United States Patent Application Publication US 2008/0050393 A1 - sequence listing, part 20

SEQ ID NO: 65815 - DNA, 2113 bp, Homo sapiens
gagttacaaaatatggacaaagaagatgcattaatttgctttgaagaacacattcgggctttagaaaaggaggaagaagaagaaaaacagaagagtttgctgagagaaaggagacgacagcgaaaaaatagggaatctttccagatatttttagatgaattacatgaacatggacaactgcattctatgtcatcttggatggaattgtatccaactattagttctgatattagattcactaatatgcttggtcagcctggtaagattattttctttcctaatttaccgttatggtagtagttgaaatgggccaaatgcaaaggtgattgtgttgggggaaagggtgctttatttttgttttttaaacaacaaagtaattgcagctctttggttagagctagcttttgacttctttagttttttcattaggatcaactgcacttgatcttttcaagttttatgttgaggatcttaaagcacgttatcatgacgagaagaagataataaaagacattctaaaggataaaggatttgtagttgaagtaaacactacttttgaagattttgtggcgataatcagttcaactaaaagatcaactacattagatgctggaaatatcaaattggctttcaatagtttactagaaaaggcagaagcccgtgaacgtgaaagagaaaaagaagaggctcggaagatgaaacgaaaagaatctgcatttaagagtatgttaaaacaagctgctcctccgatagaattggatgctgtctgggaagatatccgtgagagatttgtaaaagagccagcatttgaggacataactctagaatctgaaagaaaacgaatatttaaagattttatgcatgtgcttgagcatgaatgtcagcatcatcattcaaagaacaagaaacattctaagaaatctaaaaaacatcataggaaacgttcccgctctcgatcggggtcagattcagatgatgatgatagccattcaaagaaaaaaagacagcgatcagagtctcgttctgcttcagaacattcttctagtgcagagtctgagagaagttataaaaagtcaaaaaagcataagaagaaaagtaagaagaggagacataaatctgactctccagaatccgatgctgagcgagagaaggataaaaaagaaaaagatcgggaaagtgaaaaagacagaactagacaaagatcagaatcaaaacacaaatcgcctaagaaaaagactggaaaggattctggtaattgggatacttctggcagcgaactgagtgaaggggaattggaaaagcgcagaagaacccttttggagcaactggatgatgatcaataaattataccaaatatatgtttacagtatgatttaaagtctgattcagaccagggactctattttaagttcaactgaaataacactgggttttaattatatcacaggaaaaaaaaagtgcatttaagtattgttatcgtggactttataaaagcaaaggaaattgaaagtaacttttgattctgtatcaagaatcatattttcatacagtcataactgtctttctgtgaccctttcacagggcactgtaggatggattaaaggtggcaatttactgataactgcagatgtctctactttgttctaaaatctaagtcatgaggtgatttgatttactttatagaagctggattttgaagatctaatgaaaaattttttgataatatagtagtacaaaaaaagcaccagcaactgataaaaattgcttttttgtgcgctacccaactggttaaagccaatgtgatcttttatggtgaaactcctaagaaacaggtggttttgctggaaacttggtagacccttaattatagtggtgctaatgagcactactgtaatataaagccaccattattttttatcaaacatctgaatacattttacaaaggctattgtgagggcattattttgagcatctattttgaggtgatgtttaaaaaaactttaacatcaaatcaaattgtaaattaatttaaatatattgccttaaggacctactaaagaatgtgccaccagactttaagtgatagttgcaatatccttgtctaaaaaaaaaa

SEQ ID NO: 65816 - DNA, 432 bp, Homo sapiens
aggtgcaggtcctggtgcttgatggtcgaggccatctcctgggccgcctggcggccatcgtggctaaacaggtactgctgggccggaaggtggtggtcgtacgctgtgaaggcatcaacatttctggcaatttctacagaaacaagttgaagtacctggctttcctccgcaagcggatgaacaccaacccttcccgaagcccctaccacttccgtgcccctagtcgcatcttctgtcggaccgtgcgaggtatgctgtcccacaaaaccaaatcgagggcatgtcgatctggaccgtcttaatgcgtatagactggatctcatccgcttacgacattaattagcgtatggtcggacctgctgcttttatagctgtacgatatgaatcctactataacgatctgatatctagtattatggctggactagttag

SEQ ID NO: 65817 - DNA, 5153 bp, Homo sapiens
ttttttttttttatttccacaattgcttaaaatattttattaaaggaagaatacaatttaacaaaaaagtgtttattaaaaggggaaatatatagtaatatgtttaaggcacatggcaaacttttggcattaaattgcaagaaaaaagaaatacaaattatcacaataaatttcagaatctgtttctttagtccaaatagtttttttttaaaaaagtctgaacaggcaggcagcagttcactaaggaagggcacatcatgggcttgggtatctccgtggcgagagccacttgctgcctggggggtactcccaggatcaggcaggggctccactcacatgggacattcaggggagcgggataatgccctgttgaggggattttcccccacaaacgtccaactgttgggtccagattttgctgggaatttccctcacgtttcattttcccaaacaagaggcagagatttctcagggaaagcaattattggggttagggtctaaacttttgggcagtttgttccactccaatgatggtataaccttctgttttcttctgctgcagataatcaattagctgaggtggttttacctccactagaggaagccactgttctgcagagacactgaggtgctgaaactgtttgtcgctgatacactgaaggctgccaacaacgagcactgaagccccaaatacctcacaggtcctgcacagtcctcctaaattggtcggtttgtcgatgagcgaggccacaacgatgagtctactaattgactttccaagtctggcagcacgatcctgaaacaggagctccaggtctaagtcggaaacacgactgttccacgggataatcttcttctgaacgtcggtccactccgcttggttatctgcttcgaccaaattagtacctatgtcttgctgagaccagtcacctggttttagtttactaagttgagtttgagaaaggtaccactgaaatcccgcagctaaaggaacatcagtgaatctggtaaatttatcaatggtgatccattcatcttcaataaggcctgaaaggcgtggaaggatgtaaaatatggtctctagacaataatccttgagtgggtgaaatgttgcaaaaaagaaatgctcctgaatgcgttgccaattcttcttggcattccctgctccgtgcatgctttccacttgatggaggctggattcaatcacaggagtcagggcatcaaattcttcaacacttaacactttacacacagtccagagtttcttaagagcaactaaagcatacagtcgaacactaaaattgtgattgaaacaccactgcagcacaactataagggcttgcttcagaattagtttcttttctggaatattttgagtaataatgtctaaatgtgataaaactgctaaaaacgtacaaatgcttgttttaagattttcttcaccataagaaaaacaatcccagaactttggaagaaattgagggaatttatgaagaatcaatataataatccattctataaaatattttatggatgcttgattgttggtgaaaaccagcctggaaaatcctgtcaaataattccattcaagaaattctggtcaagtctaggggatagtaacagcagagtcttgcacactcggtttttcactctgtgctgtagagaattcacatagtagcgttttttggcgttggacgataaatcctctttaactaatagcttgattgcaagatcctcaataaacaacttgtgggacatattggagccatctaataaacacaggaatttgacagcacaaattctcacataatggtcttctctcttagtattttccataacaatatttgccgcacagtcatgtccaaggttttctatgaaggtctgtacatcctgaacaagtctttgatcacgcctaaacacagttccaaatatacaagcctcaaggataagttcgctataatttttagcacttgataaagatccttgggacacatttgaagcagacactatccaagactgacagcagtaacttatcagtgtattgaagactccagtctttatagcagacatttcaattatcttgtacataatctcttttattttgaaatatgcctggcccttgattttggcagcaatggtaagaactttgttatcaaaaacaaactgaacaaaagcttttaaattagcccagaatatcagctgagtgttgcttaaagaagatataattttccacgccatgtcaaaagactctatgcagagtgattcagaggaagtcagaagcttgggaaccaacactttcaagcaatggaacactggtaaaacttgatcagaagaaagaactgtgagggcttctagtgcagactgcaaagtccttattggcatctgaacggcaggtagaaacggttccagaatttcactccctgtggttggtataagggtgtgatattttttcaacaggaaagagaggcacacccattgatcatgaatatattgtgcaactatttttccccatccttgggaagatgacgattcttccaaaacactgctgcactccaaggggtgagcataactgctctgctcctctgcgtggggcttctgcagcgtctgattgagctgaagagaggaaaggaagctttccaggggcccagcatggagagagtccagctgcagctcaggcttctggtctatggcctcacacaccatggccaaggcagccatgctcactactctctgaatctgacttccaactgttggctcctgtccactgtccatctcttgaagatgctgaatggatgcatttttcaaaagagaaataactctccagatagggttaccccttttccacccaaccttcaaatgcagatttataagctcagttaacaccatcaggtataaatggcaacgatccagatctgaaacactatttagctcattcatagtaagtcttctgagaataaattcagaaatgctctctgtagtagacatgaaaaagttctgaagaacagtagacacctcatcatcttgggcactggaacctttcaacctgcatgtgttcaacagcttcaacagcagctggaggcatctgtcagtcttcagcaagggcatgtaggcattggtactaaacttcataagcacatccagaagagggtctaagaatatccgcaatacattctctgttctctgctttccgctatactgagtcttcattccttccacatccacagccagcaagaccatcagagaaacaagcttggcttcaaaccaatcaggcataaagcagttttctcctgtttcccaagcagatgacttaacatactcttgaacaatgctctttacataagcatttaaagatgtcttgtgaagtccaatggagctacacgtaggggatggcttaaaatagctttcattaacacgtagccagtcacacagctctgtccacaatgaagttcctcgtcctaaggattcctcttgtctcagagacatgagaaaagttgagacatcagaaagtgacacttatctccacatctagcaaattcatagcctgtttgaagaaggtagcattggagcgcccctctcaggagaatttgatgtgtgatgctagtgcaatgaataacatccctgagagcaagaagcccatctatacccagggccttatgtcttgggacatttgccaaagccttagatagaaacaaaatgggaacagcacaccaatgcctacttgtcatcttccgaataaacttcaataggaagctactctttatttcttctggaagaagagaaatataagtgactaaaaacttctgtaatttcagtcccaatggagaacagcttcctattggctggcctggggacctgctatacagagagctctctgaaagcgcatccattaatggtccaataataaactcagaaaattctggtgaaaatggaagaatctttgtttcatacagctccaaaaaatggataacaccttctttggacaggattttgttttcactttcaaacattcttttataaatacacatatgccaggatgggtgaaagagccaacatccattttcctctgacaccgcatattcaaacagattgtttagctttggtaaaactggctttataacatgtatctgatttccttctaaagtctccataattaaaatataattttcccaaaactttagaagctcatcttttttcctctcagaccaccaaaacagacttgggccgtttccttcctggggcccgcaggtgcagtcggcccccagctccgccgacacctccaccgccctctgcagcaggtagcgcgctcgcttgcgcgtcagggcgtccgcctggcccagccccgcctgcaccgtcctccagaagcgccagcagcgccgggcgtccgggcccgcctcgcgcgcgccgcgggcgcggtcgccgccgggctcgggcaacagcttctcggccagggcgctcaggaccagcagcttctcctctacgcggccggaccccagggacgccccaggcgcggccagcccgccccacacggcccgcagcgccgccccgccacattggaccagcactggcagcagtcgcccggccaccagcgccgccgcgtcctcggcaggcccggcctcatccccgtccccgcccccgcccagcgccagggcgacggcggtccccgccacccgctccagtagcggcccgtcctcgcggggccgcaaacatggcccgacggctgctagcacttccacggcagcctcggcgccaggcgcgcgccacccggcgagcagatcgcgcagcgcctcctcagccagcgcggccgccagctgcggacgcccggccaggcggacgcacgagcgcagggccgcgcccgccgccctcagcacgcgccggcggtggcgaggctgcagactggggtccgggccgcccgcggggcgtccgcgcaggctccgcagcagtggcacgaggtaccctgcagccacctcgcgcgccgcctccgggagcgcgcctgcgcccccgctgccgcgcgcctcctcgtcctcgagccgctgcagaaggaagcgcagcgtctccacgcgctccgcggatgcctccccttggcacagcgccccaagcagggcccgggggtcccggctctgcgagagcagcgcttccgcgagcacccactccat

SEQ ID NO: 65818 - DNA, 2142 bp, Homo sapiens
aaaagatgagagaaaagataaaaaagaagaaagagatgatgaaactgatgaaccaaaacccaaacggagaaaatcaggcgatgataaagataaaaaagaagatagagatgaaaggaagaaagaagataaaagaaaagatgattctaaagatgatgatgaaactgaagaagataacaatcaagatgaatatgaccctatggaagcagaagaagctgaggatgaagaagatgatagggatgaggaagaaatgaccaaacgagatgacaaaagagatatcaacagatactgcaaggagaggccctctaaagataaggaaaaagaaaagactcaaatgatcacaattaacagagatctgttaatggcttttgtttattttgatcaaagtcattgtggttaccttcttgaaaaggatttggaagaaatactttatactcttggactacatctttctcgggctcaggtaaagaagcttcttaataaagtagtgctccgtgaatcttgcttttaccggaaattaacagacacctcaaaagatgaagagaaccatgaagagtctgagtcattgcaggaagatatgctaggaaacagattattacttccaacaccaacagtaaagcaggaatcaaaggatgtggaagaaaatgttggcctcattgtgtacaatggtgcaatggtagatgtaggaagcctcttgcaaaaattggaaaagagcgaaaaagtaagagctgaggtagaacagaagctgcagttactagaagaaaaaacagatgaagatgaaaaaaccatattaaatttggagaattccaacaaaagcctctctggtgaactcagagaagttaaaaaggaccttagtcagttacaagaaaacttaaagatttcggaaaacatgaatttacaatttgaaaaccaaatgaataagacaatcagaaacttatctacggtaatggatgaaatccacactgttctcaagaaggataatgtaaagaatgaagacaaagatcaaaaatccaaggagaatggtgccagtgtatgataaaatccatgtagtgatgaggaatggtgttaaataatgtaatatataaaaatcatgatataagaatgtttgaaggtgatgcatgtttgattttagtagtataaatgtattttagttcaaatgatgtataaagttttatgaatgtgagtttctgcttttgaaaattgcttgtaattcctagccttcaaattattaaacactccttgagtgaaataattttgcattgcaaagtgttttaggatgaactttgttatagttttaactccaataaagttcatcagtttaattgactgtagtatttaattaccaaatttcttttattaaaatgcctagaaatttttaatttatagaattattaggttttaaaatttttagttcatctgttaaaatttcagtcaaaatcataaaatagcatgatgcttaatttttgcaagttttttgaaactttttgttttttttactcatcaccaaaaaatcccctcttgatcagtctctaaaagcattcattaaaaattcagttcaggccgggcacggtggctcacacctgtaatcccaacactttgggaggccgaggcaggtggatcacctgaggttaggagttcgagaccagcctggccaacatggtgaaacccggtctctactaaaaatataaaaattagctgggcatggtggtgggtgcctgtaatcccagctacttgggaggctgaggcaggagaatcgcttgaacccaggaggcggaggttgcagtcactcaggatcatgcagctacactccagcctgggcgacaagagtgaaactccatctcaaaaagaaaaaaaaaaaaaatcagtttatttgaaagacagtatatcagaaagaaagaagcaatagagaactagtattgttctttatgggttagactttacataatattagttgtcctgatgtcaatgttactgctttcaattaatttttctactttcccagaatagcatctatattccttttaattttgagggtttaaaaaaaaatgcagtgtatgtcaaatttacagtttagtaccaagccagtagatgtcagtatgatgccttaaattaagtcttctttaattaaagatatttttttaaatt

SEQ ID NO: 65819 - DNA, 1327 bp, Homo sapiens
cgcgtgcaccggaaaatctcacagaagcagcagcggaaatggccccgcgcggcaggaagcgaaggtgacgctacgcgagcgagtgggccccgccctctacgggggcactggcgcggaaactggccctgaagtggggtcttccccggcggatcctggagtcctatttcctgtttaacttcttaggatcttgctcattgacccttgctggggcgaggctctctggactgaacacaggccaggagctccaagcccagcaggaaaggtattgtgaggcccaaggctccccaccaggccttaagtccccagagaggttccagagggttcagcgcccagacagaaaaagctcgaaacttcctatacaagccagagctctggagaggaacagaccgcacatgtcagagcccattaagcatttccatccagcctgaaaaggccaggagagtcaggccaccagggggcgccagagaaccacaggagatccaggaagcgcttgctaggaccaagctcccagctcccaggacccccaggccggcagcggagtccaggagctggtgtggcccacaaagggtcggagagcctcccagtgagaacagtaggggcaggaaaatgatcaggtcaagggtctcccagctggcagagagggctcccagcagagtgaggacttcattctctagggcagaccacgcccactggaggaaggaatgtacatcctgggaggcctctaagctccccagactcaaatgccagcagctcacatactggagaagaggaagcctggaatttacagggtgcagaggggctgggcagcagccttcctgccattctgcagaacctgtcagcttcaaagggaggctccactctgcggtggcaaagctgggcctgacccttctggccaagatgtcctggtccccacagctcgccaagcgcaagcacttggcccctaacctgagcctgagggaacctgattctactctgcctccccaaagtgggtgatccctcgtgcaggggaggacagcatcggagattcacactgcttcacagagggatcttcagctgcaaggtcactgctgtactggggcccacccttccctaagacagagagtcccccagggccaggaggcaccctgggaacccaaatggggctccacagaatacacgagcctccaaaaagtttagtattatgaagcatctgaatttttttctcttccagaatggctttaaaaagtagactcaggcccagagtcctcaggacatatcagaaaagctttgagagtgtcctgatctctgcaaagcctctaataaattggtcatttgggcaaaaaaaaaa

SEQ ID NO: 65820 - DNA, 1485 bp, Homo sapiens
attatagccattaaatatgtatacagatatctaactgaaataaaaagtgttttaataattaaaagtttaacatatgggcatatgtgacatatagtgatatagcatgtctctttagttttgttgtttttgttgttgatggctaaccacccctgcttgtcttaaaaattgataaggtaccactgatgaaattatgaccaggtgggcccgagttagtaccacatataacaagagacccttgcctgcaacatcatgggaggacatgaagaagggatcctttgagggaacaagccaaaacctaccaaagcgtaaacaacttgaagccaataggctatccctcaaaaatgatgcaccccaagcaaaacataaaaagaacaaaaagaaaaaagagtacttaaatgaagatgtgaatggattcatggaatacctaagacagaattcacagatggttcacaatgggcaaattatagcaacagacagtgaggaagtaagggaagaaattgcagttgctttaaagaaagacagtcgacgggaaggaagaagattaaaaagacaagcggcaaagaaaaatgcaatggtgtgtttccattgtagaaaacctggtcatggaattgcagattgccccgccgcccttgaaaatcaagacatgggcactgggatatgttacaggtgtgggtccacagagcacgaaataaccaagtgtaaggctaaagtagacccggctcttggcgaatttccttttgcaaaatgttttgtttgtggagaaatggggcacctgtctagatcttgtcctgataatcccaaaggactctatgctgatggtggcggttgcaaactttgtggctctgtggaacatttaaagaaagattgccctgaaagtcagaattcagagcgaatggtcacagttggtcgctgggcaaagggaatgagtgcagactatgaagaaattttggatgtacctaaaccgcaaaaacccaaaacaaaaatacctaaagttgttaatttttgataacagctagcactatcatgagttactacctcattgttactttctaaaccaggcccgcttcacgagttagagttgagctcccctgtagccaggactatgctgtagatatcagtatgatctgggtgtggccaaaaacaattttctttattctgtctatcaaatagtacttctaccactgtttggagaaaattgaagaaaagaataagatgattaaatgaattctctaaaagaacatattttaagagacagaacttagacataaccaagtagttgtatacctgattgtaacaatcatcttttataaaagcaaaattatgcataaatgtaaaacacccctaaacaaagggaacaaatgaatttttggttatattgttttcttggctcaaagtatcaatttattattataatagaaatttataagttgctagaaagtctatatttttaaagtacggaataaaaatatgttttctattaagcaa

SEQ ID NO: 65821 - DNA, 1188 bp, Homo sapiens
atggattatgaaactacagaaaaggaagtagcagaaccactcctggacctgaaggaaggaatagaccagttggagaacaataaaaccttgggctttatcctgtctactctcttagccattgggaactttctaaatggaactaatgccaaagcgtttgagttaagctacctcgagaaggttccagaagtcaaagacacagtgcacaagcagtcgcttctccaccatgtgtgcaccatggtggtagaaaacttcccagacagctccgatctgtactcggagatcggggccatcaccaggtcagccaaggttgactttgatcaacttcaggataatttatgtcagatggagagaagatgcaaagcttcatgggatcacctcaaggcaattgcaaaacatgaaatgaaaccagttttaaaacaacggatgtcagagttcctgaaagactgtgcagagcgaattataattttaaagattgtccatagaaggataatcaacagattccactcctttttactctttatgggccatccaccttatgcaattcgggaagtgaacataaacaaattctgcaggattattagtgaatttgcactagagtatcgcacaaccagggaaagggttttgcagcagaaacagaaacgggccaaccacagagagagaaataagaccagagggaagatgatcaccgattctggcaagttctccggcagttctccggcgcccccaagccagccgcagggtctgagctatgcggaggacgcggctgagcacgagaacatgaaggctgtgctgaaaacctcgtccccctccgtggaggacgccacccccgcgctgggcgtccgcacacgcagccgagcaagccgaggatccactagttcctggactatgggaactgatgactcgcccaatgtcacagatgatgcagctgatgagatcatggaccgcatcgtcaagtcagccacccaagtgcccagtcagcgagtggtgccgagggagaggaaacgatcccgggccaaccggaaatctttgcgaagaaccctgaagagcggcctgaccccagatgaagccagagccctgcgcttggttggcacctctgagttgctggtgtttccgttataagttattcctatataggtctcagtaaatgtgtcattttttttgttctatacctgttccgttcggtttctg

SEQ ID NO: 65822 - DNA, 2201 bp, Homo sapiens
agaaatgacttaatcgtctttttggcagaccagaatgcacccgtattttaaacccaaagtaaaggtatctttcaagaatcacagtgcattgataacaagtgtagtccctggggattatgatggagattctcaaatggatgtccttctgacatatcttcccaaaaattatgccaagagtgaattaggagctgttatcttctggggacaaaatcaaacattagatcctaacaatatgaccatactcaataggacttttcaagatgagccactaattatggatttcaatggtgatctaattcctgatatttttggtatcacaaatgaatccaaccagccacagatactattaggagggaatttatcatggcatccagcattgaccactacaagtaaaatgcgaattccacattctcatgcatttattgatctgactgaagattttacagcagatttattcctgacgacattgaatgccaccactagtaccttccagtttgaaatatgggaaaatttggatggaaacttctctgtcagtactatattggaaaaacctcaaaatatgatggtggttggacagtcagcatttgcagactttgatggagatggacacatggatcatttactgccaggctgtgaagataaaaattgccaaaagagtaccatctacttagtgagatctgggatgaagcagtgggttccagtcctacaagatttcagcaataagggcacactctggggctttgtgccatttgtggatgaacagcaaccaactgaaataccaattccaattacccttcatattggagactacaatatggatggctatccagacgctctggtcatactaaagaacacatctggaagcaaccagcaggcctttttactggagaacgtcccttgtaataatgcaagctgtgaagaggcgcgtcgaatgtttaaagtctactgggagctgacagacctaaatcaaattaaggatgccatggttgccaccttctttgacatttacgaagatggaatcttggacattgtagtgctaagtaaaggatatacaaagaatgattttgccattcatacactaaaaaataactttgaagcagatgcttattttgttaaagttattgttcttagtggtctgtgttctaatgactgtcctcgtaagataacaccctttggagtgaatcaacctggaccttatatcatgtatacaactgtagatgcaaatgggtatctgaaaaatggatcagctggccaactcagccaatccgcacatttagctctccaactaccatacaacgtgcttggtttaggtcggagcgcaaattttcttgaccatctctacgttggtattccccgtccatctggagaaaaatctatacgaaaacaagagtggactgcaatcattccaaattcccagctaattgtcattccataccctcacaatgtccctcgaagttggagtgccaaactgtatcttacaccaagtaatattgttctgcttactgctatagctctcatcggtgtctgtgttttcatcttggcaataattggcattttacattggcaggaaaagaaagcagatgatagagaaaaacgacaagaagcccaccggtttcattttgatgctatgtgacttgcctttaatattacataatggaatggctgttcacttgattagttgaaacacaaattctggcttgaaaaaataggggagattaaatattatttataaatgatgtatcccatggtaattattggaaagtattcaaataaatatggtttgaatatgtcacaaggtctttttttttaaagcactttgtatataaaaatttgggttctctattctgtagtgctgtacatttttgttcctttgtggaatgtgttgcatgtactccagtgtttgtgtatttataatcttatttgcatcatgatgatggaaaaagttgtgtaaataaaaataattaaatgagcaggaatttttgtgtccacttgacttggtcttgcttcttattctaatgatgcaaattatacttttgtgaatatatcacggagtcattaggcattcagcttcatcacagcaggtcaggggtctcactgatggcatacaatatagtgatcgggtactctgacttggtagcacagtaagacagacttgccttaaactcctaattcaaccacttacaaagtcattgtttgaactt

SEQ ID NO: 65823 - DNA, 3244 bp, Homo sapiens
ttttttttttttggtagagatggggtcttgctgtgttgcccaggctggtctcaaactcctaggcttaagcagtcctccagcctcagccttctcaaagtgctaggatgattggcatgagccacctcgtctggcctgcaggtctttttaagcatttgctgttcaataataagcatcttctttatgcctagtatttgtgataagagcacaaaacaattttctaatctcaaagagcttatattctagtggggtagagataagtgatttatcttggtgtagttttggcttttttgtttgtttttttgagacagcatctcacactgtcgcccaggctggagtgcagtggtgcaatctcagcttactgtaacctccgcctgccaggttcaagcgattctcctgcctcatcctcccgaggagctgggatcacaggcgcctgccaccacgcccggctaatttttttgtatttttagtagagacggggtttcaccatattggccaggctggtctcaaactcctgacctcgtgatccgcctgcctcggcctccctaagtgctgggattatgggcgtgaaccaccgcacctggcctatcttggtgtttttacatccttcagtatttttcaaggttttacagcttttttatctatagacttataccatcttcaaaagcaatacaattttatttgtagacgtgatttcccccaccaaatgcacattttatggagctctaggacaaaagtcaggatgaaaagtaatctatcgctggtgctactttaataccttcctgactggtgccactggctaaattctagcagtacgatgagagggccattaaggcctatcttagcaagcaagacattatagcaaagacctaaacactcaaaggttcaacgtcttctagccagggaactattctctaattcttccaccttgatatgatttcagcaaattctgataacccggtattactcttaatgcatttttgtaacatttgacaaacatctcccaatatgtagactcccactctcctgatgctaatcagtatcagacaatggaagtaaattttcctgcttttctcaacttttcctcaaattcatgttagtgaagtactttcatttggccatcattatttatcaaccttaagaaacatgcctattgacgaagtaaatatactaggaattcaacgtatctacgggaatgtggacaaagacatataccaagacaaggcactagagtgaaaagccattaaaataaaatgctcagcagcaaaggatttgtaatggttaatttgcaatatatccatatggtgtaatattacagtcattagaaatgacatttgcgtaaggatctgagtggaaactgatacagcctgtcggagagctactgagtagtattttatcacagctgcatacataccctttcacccaacagttccactcctgggagtctagtcaacaaatggacaagttgcacaaccaagctatggtcaaatatgtgtgttgtaggatttatgaaactggtaccaatttaatattcaaatgtgattaagtcatggcaatctatttactggatactttgtggttaccaaagagctatgtgctgccacagggagtcctttcaatagtgattgaaaaaggcagaacactactagacagaactacctattttatgcatgtattggcatacactgaaaaagcttagtcacttaaaatgaggttgtacagattgtagattttgtttttaaacgcctgtatggtttaaaaaatgttttgggaaatagacatgagcagggcagagaactacaacctacaggccaaaccccaccccactgcctgtttgtacggccaacaagtttaaaatttttttaatgttttaggtttttttttttttaaaaaaaatactatgcccatttgtttacaaatcgtctgtgggtgctttctcactacaatggcagaattcagtagttgagacagacctatggtccacaaaggccgaaatatttactgttttaggagaaaaaaacaacatgaattgtaataacttggacttacttggttgctcagtcctgatgtgtcctgttaaaacctaagagaaacagcaccaagttcaatctagtgcaatcagcctatcacatctaagctgcttttgccagatctgatatctactcccgaccttaagccaggagactttgtaaacttactaggttataataaaacttaaaaactatcgatatttactaatctacatcatggaactatttcaaaagcagtcatatggtaagatggatcaggagtctttaaaaataaaactgagaaagaaaaatcatgtgatcaattcagtagtagagacagaggttggtatcaagtctatgttcatacacttaccagtgccacccagcagggccatacaagacacatgaaatgagatcagctcaagggtgacaagatgaaactgggagagggccggggagacccgaactcttaatattggattccacacaagaggaaaaattttagtccagctcccagcatggcagctaatggcaagttactcagtaccataaagccaactcttggaatatacctgacttccacgataaaatggagatgagtgcaggggtgagtgtatagttaagaaaacaaacaatatattactagtccaggtggtagatgacagatttttattatttacacttctctcaaattattacattcagcatgttttgctttttatgttatttaaagtataaaccctcatataattccctaagatgggtggcatgccaagtagctaaatgaaatatcatcccagcccaaaagtacttattcgaatgaaatattacatttttcttaaataaagcaataaattaggtaccctattatcatggtattttcttttttggccagcttttctagataaggttgtattgctactgcaactaacaaaaaagatgtggcagggctgggcacggtggctcacgcctgtaatcccagcactttgggaggccgaggcgggcagatcacgaggtcaggagatggagaccatcctggcccaacatggtgaaaccccgtctctactaaaaatacaaaaaattggccaggtgtggtggcaggtgtctgtagtcccagctcctcgggaggctgaggcaggagaatcgcttgaacgcgggaggcagaacctgcagtgagccaagatcatgccacagcactccagcctaaactacagagctagaaagtggctagagcagcc

SEQ ID NO: 65824 - DNA, 989 bp, Homo sapiens
gttggggtctcactctgtcgcctaggctggagtgcagtggcgtggatctctgctcactgcaagctccgcctcccgggttcatgccattctcctgactcagcctccggagtagcggggactacaggcgcacgccaccaggcccggctaattttttttttttgtatttttagtagaaacggggtttcaccgcgttagccagaatggtttctatctcctgacctcatgatccgcccacctcggcctcccaaagtgctgggattacaggcgtgagccactgtgcctggccaaacgctggtaggtttgggagtgagaccacattacatttaaatatatttacaatgttttctgctctattctttagtagacttttcctcacgtggtcctacgcatttctttctaagtttattttcatatagcctatccctgtctacaatttaaattgggatcttctatattctagttattatttgtaaataagaaaactactgacttttttctagtatattttctcagaataggattttctatttttctataaaatgaccaatgttatgaagcttcgtaagttttgtcaaagtgatacacacatacagcaaaaaatcaaatagtacagaagtataaaagcaacaacctctgccttgccccttctccaccttcaggtccccttcccagatacaataatttttagctttttatttttaattattctggttgttacctacataactctgggcaatatggaaaagttattgattttgtatattaatttcataatcagttaccttgatgaattctcttgtttctagtagtttttctttagggttttaaagggatacaatcataccatttgcagttagtaaccattttatctcctcttatttccaacttcgtactgttttctcttgtctaatttgtttttaattggtgggtacttctagaacaaggttaaataaaagtggtgttggtgggcgtccttatttctgatatta

SEQ ID NO: 65825 - DNA, 914 bp, Homo sapiens
  misc_feature (1)...(914): n = a,t,c or g
attttgtggcgctgtatgacgctatcatgaatgcaggccaggaggagggaatcgacaattttggaacctatgccatgaatgccttacgcctggagaaagccttcagagcctgggggttagagatgaactgtgatacaaatcctttggaagctggactggaatattttgtgaagttaaataagccagcagacttcataggaaagcaagcactgaaacagattaaagccaaggggctgaaacgaagactggtctgcctcaccttggcaacggatgatgttgatccagagggaaatgaaagcatctggtacaatggcaaggtggttggcaacacgacatctggaagctatagctacagcatccagaagagtctggctttcgcatatgtccctgtacaactaagtgaagtgggacagcaagtggaagttgaactattaggcaaaaattcccagcagtcatcatacaagaacctttggtattgaccgaaccacctagaaaccggcttcagaagaaagggtgaaggacaaaacttgaaaaaagccttccacagtcactgaataagattgctntgcctgtcttgaaatatataacggctccaggggattagggaaccggaattctttcaaacgtcaagcctaatttgatctaggaaccttctgtaagggttctagcagccgattatggatatggtacatgcctttaatgagaatggaagatgtgttttcccccatccaccgaaaattgggtcgaaacaccttccactatgggctcttattgaaacgcggctgtggaaaattattctttaaaaaagaaagtttgcgggctcttgggttccgcggttaggggcgtgcgtgccccctgggaggcccctgtgggcgggggtgcgcccgctctttcggggcgatggccgcaactga

SEQ ID NO: 65826 - DNA, 1819 bp, Homo sapiens
ttttttttttttgaaaagagacaataaaatgatttgttttttattcaaagggataactggataagtagatttgttccattcttgtgaaatactttttaaaaaaatacgaccaacttctttgcaaatagcagacacatacctcaactatgatgacctaatttttggtggataatgtacatgattaggcagaaataggcaagctcacactggtagattaactatcaaatactcagtcaaaactccgtttgtggcccccacttcttgatcgatttctattcccacttcgtcttctaccatcttgtcgacttcctgagcgacttccttgtcgactctgtctacctgaccggccgccagatcgaccacctgaccggcctgaccggcctgatcgaccacttgaccagccactcctctgtctggaattagaagatgtgtttccatcataatattcttcaatttcaggtaatttggctggcactgagagtatccagtcggaatcatgccactctgcctgtaacctttctgactcagttgtaggaacatcaaagcaaacacccatatttcctttcaggaggcacattctggtaatctgagacactgcattactactcagctttctgttaagttctttccaagcacagctgacatcctgtatttcctctaggctttccagagtcatggtcacaaaccccttatcagaggtgatcaaagatcgtggttcaaagcttgatgcaccagaaatgtgggctaaagctgcagccaatgcatccactgcacctttctcttctatcagtctctgagctgatggtcggaaaaaatcaacagcagcataagaaacggaagccagagacctgatggcatccatgcttttagatttaactaaatccattgtagaaggaacacctacacgtttaaaagtaattcctgctttttgttccacatatcttagttgacctctttctcttggttgataaaaacatatacaaatccctgtccgtccagctctacctgtgcgtccagagcgatggatataggactcaacatcctgaggaggagaactttgaatcaccaggtcaacttcaggaatgtccaaaccacgggcagccacattggttgccaccaaaactttaaaactaccttctctgaagccttttagtgtaatttctctttgtgactgtgcaatgtccccatgtaaacactgggcattctgttttatgtgtggattcatggccatttcagttacattcttcttggtctcacagaaaataatagccctcccttcagacccactgtagacttgaaggacatctccaataactgctggcctctgagaccaatgacactggatggccaaatgttccacagtagttgcagccttttgagtcatttttccatcaaggtcaacctgttcatatctggatttcatgtattttttctgcaactgtgtatacccactgtgggcaagttgcagaaaaaagtaaagtctgaggattgtcttcagaatcagttttgtaggattcatgaataatatcttcaacttgttcagcgaaacctaaatctaacatctgatccacttcatcaagcacaacatgtcgcagtttagaaagatccaatcggccactctgcagatggtctttgatacgaccaggtgttccaaccaagatgtcaataccatttcgaatatgattaatttggctttgatatgatgttccaccataaaaacgcgccacggtgagtttcctagattatatctttgaagtctctggatacgtggtttgccagttcccgtgttggagccaaaacaagtacctttggtgagcgg

SEQ ID NO: 65827 - DNA, 789 bp, Homo sapiens
cggacgcgtgggcggacgcgtgggctgtggtctgccctgatagccaagaggactcagagacccgagcacaggaggacagtggctctgagcagcctcccgacagcgtcctgcctgacaaactgaaggtgagctgggagaaccccagcccccaggaggcccctgctgcatagagtgcagaaccgttccaggcaccctgttctgagacttctgaggctgcccccagggagggtgggaagccccctacacccccacccaagatcttatcagagaaactgaaagcctccatgggtgagatgcaggcttctgggccacctgctccaggcacagtgcaggtctcagtgaatggcatggatgacagtcctgagcctgccaagccctctcaggctgagggcaccccaggaactcctccaaaggatgcaacaacatccacagcactgcccccctgggacctgccacctcagttccatccccgctgctcctcccttggggacttgcttggggaaggcccgcggcatcccttgcagcccagggaacggctatatcgggcccagctggaggtgaagggggcctctgaacagacggagaaactgttgaacaaggtgctgggcagtgagccggcccctgttagtgccgaaacattgttcagccaggctgtggagcagctgaggcaggccacccaggtcctgcaggaaatgagagatttgggagagcttagccaggaagcacttgggctaagggagaagcggaaggagctggtgaccctctacaggagaagtgcaccctagggcg

SEQ ID NO: 65828 - DNA, 1662 bp, Homo sapiens
gcagctcctcaggctcggcgtccccggccgtggctgagctctgccagaacaccccggagacctttttggaggcctccaagctgctgctcacctatgctgacaacatcctcagaaaccctaatgatgaaaaatatagatccatccggattggaaacacagccttttctactagactcttgcctgtcagaggagctgttgaatgtttatttgaaatgggctttgaagagggagaaacacatctcatctttcctaaaaaagcttcagtggagcagctgcaaaaaattcgtgacctgattgccatagagagaagtagcagactggatggctcaaataagagccacaaagtaaagtcatctcagcaacctgcagccagtacccagcttcctacaacaccatcttcaaatcccagtgggttaaaccagcacacaaggaaccgtcaagggcagtcatcagatccaccatctgcttcaacggttgctgctgactcagccattctagaagttcttcagtccaacattcagcatgtgctggtctatgaaaatcctgctcttcaggagaaagcgttggcttgtattccggtccaagaactaaaaaggaaatcacaagaaaagttatcgagagctagaaaattggataaaggtagttgatgtcacttggcgatattcctgcaaacatgaagaggtgattgccagaagaactaaggttaaagaagcattacttcgagacactattaatgggcttaataagcagaggcaactgtttttgtcagaaaacagaaggaaagaacttctccagaggataattgtggagcttgttgaatttatatctcccaaaacccctaaacctggagaacttgggggaagaatatctgggtcagtggcttggagagtagcccgaggtgaaatgggtctacagagaaaagaaaccttgtttattccctgtgaaaatgagaagatttctaaacagctccacctttgttacaatattgtgaaagatcgttatgttcgagtttcaaataacaatcaaaccatttctggatgggagaatggcgtgtggaaaatggaatctatattcagaaaagttgaaacagactggcacatggtatatttggcccgaaaggaaggatcatcttttgcttatatttcctggaagtttgagtgtgggtcagttggcctaaaagtagatagcatttctattagaacaagtagtcaaacttttcagactggaacagtagaatggaaattgcgatctgatacagcacaagtagaactgacaggcgataacagtcttcactcctatgctgatttttctggtgccactgaagttattttggaagcagaattaagcagaggagatggttgatgtcgcttggcaacacacccagctgttttagacaaagccttaaatgacccatgaagaaaattgtttggagataattataaaattcagtgacctttgagaacctgaacattatagaaaagctggcaataatcaaggacttactgaagtagtctgttggttcagtgcatccttagttggtcagttacccaccctgtgctagcatatttcttttgctagactatccatcagtgtaaccctacatgaaatattatcttatatacggtggactataataaaatattgaattaaaacctttaaaaa

SEQ ID NO: 65829 - DNA, 1113 bp, Homo sapiens
aaaaatgcggtgccacgcggcttttcccgtcctttccggtgtaacaccgggcccagttttgctatttaggaggccctaaacaaatgtttccactctcaaggccccgctgctgaaacatggccactttaaagggcccgcccctttttttttttttgaaaaaagtccatggaggcccatggggttgggcttgtatactagctttgggggggtcgagtccgtcgctgtttttgtcgagatgttatggagacgggtttctttcgaatgtcgtggtacgcggctggggggcatcccatatcagtcactcccaggtttatggaggggttcttcctactattagggactttttcgcttccgaagcgaagggcttcttcaaatcaatgaaaattattaattattactggtggttagagaaaatgaaatgagccttaaagatgattaggatgttttcatgttgggtgtatgcatccgggggtagtcccgagttaaacgtcgggggcattccggtataggccccgaaaaaagtgtttgtgggaaggaaaagttaagatttaccgccgattgaattatgataggtgaaatgggatttttgccggtaggttttgtcttaagggggtgtacccctgagaatagggggaaaatcagttgaatggaagcctcctattgatggcaaatacagcttcctattgatagggacataggtggaagtgagcttacaacgtagtacgttgtcgtgtaagtacgaatgtctagtggatgagtttggcttatacaatgcccagtcagggccaccctacgggtgaaaaagaaagatgaattcctagggcttcagagcacttgcagcagaatcattcataatgggtttccggggagtgtggcgaagtcagctaaatacttttaccccccgtggggaatagcgatgattatggtgaccgagggggaaatatgctcgtgtgtctacgcctatttctactgtaaatatatggtgtgctcacacgattaacccttaggaagccaaatgaatttatagctcaaaccctacctatgtatcccaacgtttctttttttccgagtagcaagtacaatatgggagattattcccaaccccgctaggat

SEQ ID NO: 65830 - DNA, 862 bp, Homo sapiens
aacggtggctcctcgaggtccacggtcccggagatgggatttcgccatgttgcccaggctgatcttgaactcctgggctgaagatatccaccctcctcggcctcccaatgtgctgggattacaggcctgagccaccatgcctggcccaagtgttcattgatgatgagagatgggcttttcgcatcaaatcacaaaaatatgctgagtaatgtgaggattcttgcttttctggaagctaacacatagtcagtgccaaagtagtgacagaagaaatcttgagaggaagcatttttgtcttgtacttgaaacagctgctgggcccaccatggctcctgtgaagatcagccatgtggtatcattttcttctcaggatcccaagtatcctgtagagaacttgctaaacccagatagtccaaggagaccttggctcggctgccctcaggacaagagtgggcaattgaaagtagaactacagctggagagggcagtgcccactggctacattgatgtgggtaactgtggctgtgcgttcctgcaaattgatgtgagccaccatgcctggccaagttctcatactatttctgtcacatctgcagttaatttcctccactgaagtcttgaaagcccactaggagggttggaatcaacttcttccaaattcacattcatgttgatgctgtgacctcctcccatgaatcaccagtattcttaatggcatccaagatggtaaattatttccagaaggttttaatttactttcctagatccatcagaggaatcgctatctatatggcaaatatagccttacagaatttatttcttaaatagcaatgcttgaaagttgaattactccttgaaaaaa

SEQ ID NO: 65831 - DNA, 1856 bp, Homo sapiens
ccatgtaaccctcataaaccaaagcgccttggggccctcagtggtttgtaggattctaagagctctgtgctccctaaggtaatctgggtgcctcctcccacagagctcctggactctaacaaagtccagaaccttttcattcattgatttaaacacacatatttgggtcatcccatagcttattcagaggaaattaaaagttcagaagcttctagagtgattgtcaatgggggaaaatatgatacaaactgtatattaaagtgatcttttattaaactatttactgcttagtctaaattcaggtagagcagtcaaagaaagttatccatcaactttgttgaattcatatctttcattttagaataacagcagactttaagcatgtattatttttccagtgttcagcttagtctaagactgtgtgagtctggtttgatccattgccgtgaagaatacacagacagcagctgtaatgagcaggtgcattccctcgtagagaagttttggagaaaatacactccatataaataaatgataacgcagagatgtcaccaaaacgatgtacgtgaaaactggaatagaacaaatcagtgcgtagcagaagcaagcatgactcagtgctgaaccactgcgtgtttctgagctcaggaagtgcactaagtggctggcccacagcacaggccctgcgtacgtcccaaacgctgtcaggagcacggctgggatttccacgtaggtgtctaagcccacgaagcctgcggagatgtccacggtggcaatgttgttggagttgccctgaaaatagaagaatgcttgaccaaaccaataatgcatcacagtaatctcagctgcatcgtgtctcaggggcttccagatgaatttagtcattagagtctgaatcaagaggctaaatgctaagaccggaagattatgtggtctaaagagcaaggctgccagaagaactaatccactatatatctcccataaacctacagtcttgagtttgaagtctgcagcaatgacttgagatttaagtaagtctttggtgcccgtgaacagaatgccaaggacaaagacataaacaaaacgagcttcaataatacccttggaaatgtccttgctgtccggccgccacgggaaccggacactcccgatggccgcccggtagcagtagacgcccagcagccccagcgccagggcagccttggacacaggggagcaccccctctgcaccagcacaaaaactacgaggagggagagggcagccaggacagagagctcggctttgtggtcagagctggtgagccagtggccgaggtcaggccggtgagcccactgcacacctgtctggtttagggagcgcagcagccggcagcaggccagtattagccacggactggccagcaccatccacttctcgcggcctttgagcacttcggaggtagaggggcttccgtggcctttgtctcgctccaggacatcacagccaggcccgtcctgccacgctgctgtggccccgtcatgcccttgttccacacagaggccacacggaggctcaccgtcatctcccagaaagtagtttctgtaggtttcttggctcagagctagacacagggtgttcacaaggaagtaccaggtctggtgctcctcctccacgaagctgctggcgcccaggctcaagacgtggcccgccgtccccaacagaataagaaggtctagctctgaccaccttgagctgggatgcatggggttcttccttggggtgtttccacccacgagcacgttggtcagaacagacacacggacgcgtgggtcgacccgggtactgcggggcgtctaatgcaggggtcaatgggcgg

SEQ ID NO: 65832 - DNA, 2569 bp, Homo sapiens
ctagggatctgtaaaatctattttgtcttaaccaaagaacaaatttttgacatatcttgaataggatgactataaattatgacttttaaattgtcgtaatttttgtactattatctgatatttttatttttatgtattttcgtaagtagtttagagatagtcacattttaaaaatctaagatcaagcaaatgaagcttatttttatgtattcatagtataaaagaccttcagtaaataggtaatatttttgttttattctagaaaacagctccttgaacacagtgagctggcttttcacacattgcagttgttagtgtttactgcccttgccattttaattatgaggctaaagatgtttttgacaccgcacatgtgtgttatggcttccttgatatgctctcgacagctctttggctggctttttcgcagagttcgttttgagaaggttatctttggcattttaacagtgatgtcaatacaaggttatgcaaacctccgtaatcaatggagcataataggagaatttaataatttgcctcaggaagaacttttacagtggatccaaatacaataccgtaccagatgctgtctttgcaggtgccatgcctacaatggcaagtgtcaagctgtttacacttcatcccattgtgaatcatccacattacgaagatgcagacttgagggctcggacaaaaatagtttattctacatatagtcgaaaatctgccaaagaagtaagagataaattgttggagttacatgtgaattattatgttttagaagaggcatggtgtgttgtgagaactaagcctggttgcagtatgcttgaaatctgggatgtggaagacccttccaatgcagctaaccctcccttatgtagcgtcctgctcgaagacgccaggccttacttcaccacagtatttcagaatagtgtgtacagagtattaaaggttaactgagaaggatactacccattttactatggcacaatgccgtgtgtcaaaaacaatcaccctttggcttattcacattaataaaaatcacaagctttaataacagacacttaaaaataagataaaaatggattggaaatttttctgattactaaaaggtaaattacttttctgttcattgaatgtcagccttattaagcttgtcatataagttattaaatcattcatgtcatactgcataaacaaatgttcatttcagaattttaaagagaaatgtatataaaagaacaatgaattttaataaatcaggggtatgtaagtcctttttcatccaactaggtgaattgcttcagattttctctagtaccagagggtacctcctcaaactctttgaaccacttaaggcagaagaatgcaagctctgaaatgacatccttaaaatgctgatactggtcacagcctctttacctctgtgaggaaattgtaacagtgtgtcttttaaggtgtttttattttaccagcccttaagaaagatctctaataccttttaatacttttttttaataatttcaaggtgaagtgtttttaaaaacactttgttttgtaatgttttgaatctcttgagatgtgtttaccccactagatacatatttgccactggttagttctccatctaagctcaagaggttattcatctctctttagattccagtggcttttcttttaacatccaggtaaaacagaaactgctatggtatacaaccaagttttggggttaaacataatcagaaaagaaaatccagttaaatttatgaagtgagattttcagatcctagatcttgaataaaggaaaggtcttttcatcttgatggccccaaagcttgttggtcatggtctttatttctggccactatcttcttaaataatatatttttaagccctcatttatttttggttttgggtgaggaaagtcatgttttctaagtcctctcccctaataaaacctacccaacaatagtgctttgaaaagtggtagttatcttgaagatactcttgccaaatgcaaagataaacattctttttgtctgctttataaatatgaaatatgccagatctatagtattttaatgtgcatctactttaaatgagtcatcttggggtttttataattcccttatgttctcgcccctctacacttgaaataacaaaatgccttaattttatggattagttctcttatagtagacaggcagctatatgcagcaaaaccaataaagttatttttcaactttcatagttgtaaaatatcttataacagaatacaaaacagctaagaaaacatgccacattttattttagcattttcaaataatttgtttttggtgtaagcacaggataaaaaaggagagcgtcaaagaaaagagacataacacctaacattcataaaaattaacaaagtatattttggatgatgtttttacaggaaatattttaaataagttggtagaacttttaaaatggtactgtattagctaataaaatattcagtacaaatatatgtttggatttatgcattaaaaaactaataaaattatttccaactttaaaaaaaaaa

SEQ ID NO: 65833 - DNA, 1022 bp, Homo sapiens
ttttaatttttttacaaacatttatttctcatggtttgggaggctgggaagtccaatatcaaggcactggcatagtccatgtctgggtaaagggcctgctttcccggttcaaaagatagctatcttctcactgcaccctctcatggtgaagggcaaagctagctctctagggattcctatcaggaaactaatcccaattacaaggcctccatcttcatgatgtcctccaatcctaaaaaccaccagagacagggccttcaaataccatcacattgtgggggagaggggggggcacgggggtaaggtttcaacatatgaatctgaggtggcatacactcagccaaaacattacacctctggcccccaaaatccatgtcatcacatgtaaaatatattcatctcatcccaaaggcctcaaaagtctcagttaattccagcatgaagccctaatgtttaaactcaaactccaaagtgtcatctcaatatcacatcactcagatatggatgagactcaattcatgctgaggcaaaattcttcttcagctccgaaccggtgaaaaccaaactagtcatgtatttccaaaatatgagacaggcacaggatagagattcctattccaaaagtgagaaacaggagaaaggggtgagctcccaaacaagtctgaaacccagaaagcaaactgaagactttccatattctttagatatgtagatacttgtagacctgtcctccactattcattttcacaggtattcgaaggttgtgtgataaatgaaagctttcccacattctttacgtaaggtttatctccattatgagctctttcatgtctttgaaaggaactggaataactgaacgtttttccacattgcttacattcatagggtttttctccggtatgagttctttcatgtattctaatggaactggcataattgaatgctttcccacattctttacattcatagggtttttctccagtatgagttctttcatgtgttcggacagaactaggacagtc

SEQ ID NO: 65834 - DNA, 397 bp, Homo sapiens
aataaagacagttgatgtggccacccaaaaaccatgatagctcttcagttaactatgttggaagttctaatatactccacaatgtgaacacagtcagattctatttctgcatcaaaaagtgttgttggaagttgtcagatatatttcaatatagaacccccattcaatgactaggagatgagagagcagcagagatgggaaaaaaagctttataaaattcttctgaaattctgccccctttcttcataatgctcatgtttctcatgctgagagtaattgtgcactttgggtggttagagagaaattgcttttaggggactattttctggctgacttgatcaatcttatatctaaactgagctttttctcaagatcttttttctcaagatctttttag

SEQ ID NO: 65835 - DNA, 1106 bp, Homo sapiens
tcggacgcgtgggcggacgcgtgggctcggtcgcttagtgtgtctcctagttcctatcctgaactacacactgaagttccactgtctgtcttaattctgggattgcttgttgttttcatcttatctgtctgttttggggctggtttattcgtctttgtcttgaaacgccgaaagggagtgccgagcgttcccaggaataccaacaacttagacgtaagctcctttcaattacagtatgggtcttacaacactgagactcacgataaaacagacggccatgtctacaactatatccccccacctgtggtacagatgtgccaaaaccccatctacatggcaggaagggaagggagacccagtagcctattaccgaaacctggcaaggagtttcagctattaggcaacctggaggagaaaaaagaagagccagccacacctgcttacacaataagtgccactgagctgctagaaaagcaggccacaccaagagagcctgagctgctgtatcaaaatattgctgagcgagtcaaggaacttcccagcgcaggcctagtccactataacttttgtaccttacctaaaagggcagtttgccccttcctatgaatctcgacgccaaaaccaagacagaatcaataaaaccgttttatatggaactcccaggaaatgctttgtggggcagtcaaaacccaaccaccctttactgcaagctaagccgcaatcagaaccggactacctcgaagttctggaaaaacaaactgcaatcagtcagctgtgaagggaaatcatttacaaccctaaggcatcagaggatgctgctccgaactgttggaaacaaggacattagcttttgtgtttgtttttgttctccctttcccagtgttaatgggggactttgaaaatgtttgggagataggatgaagtcatgattttgcttttgcaagttttcctttaaattatttctctctcgctctcctcttcccactcccacactgaaaaacaaagaagaaaaaagaaacaaaaccataaacaaaatctatgaagaaatgcattgtagaaacattcatgtccactgatggttcctaagaagagaagggaaaaagaaa

SEQ ID NO: 65836 - DNA, 1999 bp, Homo sapiens
ctggacactcaggtggcaccaggtttcttgtgctcccagcgccctgcccacccttggagccaggcacacagtgacgactcggaggccaccagcctgtcctctgtggcctatgcctttctgcccgactcccacagctacaccatgcaggaattcgcccggcgttacttcccggaggtcccaggccttgctgggccagactgatggaggtgccgcaggaaaggacacggacagcctggtgcagtacaccaaggctcccatccaggagtcgctcctcagcctcagtgatgatgtgagcaagctggctgtagccagcttcctggccctgatgcggtttatgggtgaccagtccaagccccggggcaaggatgagatggatctgctctatgaactgctgaagctgtgccagcaggagaagctgagggatgagatttactgccaggttatcaagcaggtcacgggacacccccggccggaacactgcactcgaggctggagcttcctcagccttctcacaggcttcttccccccgtcgaccaggctgatgccctacctgaccaagtttctgcaggattcaggccccagccaagagctggcccggagcagccaggagcacctccagcgcacagtcaaatatggggggcgccggcggatgcccccaccgggtgaaatgaaggctttcctgaaaggacaagcgattcgcctgcttcttattcacctgccggggggtgtggattataggacgaatatccagactttcacatctgtccacatgcccaggtagcagcagaagtgcaggaggagctgtgccggcaaatgggtatcacggagcctcaggaagtgcaggaattcgccctcttcctcatcaaagagaagagccagctggtgcggcccctgcagcccgccgaatacctcaacagcgtggtagtggaccaggacgtgagcctgcacagccggcggctccactgggagaccccactgcacttcgataactccacctacatcagcacccactacagccaggtgctgtgggactaccttcaggggaagctgccagtcagcgccaaggcagacgcgcagctcgccaggctggccgccctgcagcacctcagcaaggccaacaggaataccccctcagggcaggacctgctagcttacgtgccaaagcagctgcaacggcaggtgaacacggcctccatcaagaacctgatgggtcaggagctgagacggctggaaggacacagcccccaggaagcacagatcagcttcattgaggccatgagccagctgcccctcttcggctacaccgtctatggggtgctgcgagtgagcatgcaggccctgtccggacccactctcctggggctcaaccgccagcatctcatcctcatggaccccagctcccagagcctgtactgccgcattgccctgaagagcctgcagcggctccacctgctaagccctctggaggagaaggggccccctggcctggaagtcaactatggctcagctgacaacccccagaccatctggtttgagctgccacaggcccaggagctgctatacaccactgtcttcctgatagacagcagtgcctcttgcactgagtggcccagcatcaactgagaggagtgcaggccggggagagaagaggatgaggcctcccccggcccaagtctcacccacatggtctgccttggatgctatcagatcactgttctagaacctgcctcagcacagcccagccggcccacatgcaggccatgaggcaggggctgctatcacgtcaccagcaggcaaagaaaacagccagaccctctccaggacggcctggggccaaagcgggctgcaggaactcggctggggcacctgaggttgcccagtctgagggagatgcccacccgaccccaggctccgcccaggccccacattagcacaagcccaggcatgggagaaacagctgctgaggaaataaaactccctggagaagtcgacgcggccg

SEQ ID NO: 65837 - DNA, 2646 bp, Homo sapiens
gtcacagcaccggcagcggcgcctgcaggaccatggcaaggagaggaaggagcttttctccacaaccacttcccagtgtgcagagaagaaaccagaagccagtggcccagaggctgagccctgcccagagctccacacggagccagtggagccactgactcgggcatcctcggcaggccctgagggtggaggagtccgccccgagcagccctttattgtgctgggacaggaggagtacggggaacaccactcatccatcatgcactgcagagtggattgctctgggaggagagtcgccagcttagacgtagatggggtcatcaaagtgtggtccttcaaccccatcatgcagaccaaagcatcctccatttccaaatcaccgctgctgtctttggaatgggccaccaaacgggacagactgctcttgctgggcagtggtgtgggaacagtgcgtctctatgacacggaagccaagaagaatctctgtgaaatcaatatcaacgacaacatgcccagaatcctgtctcttgcgtgcagccccaacggggcctctttcgtctgttcggcagcagctccgagcctcacttcccaggtggacttctcagcaccagacatcggcagcaagggcatgaaccaggttcctggcaggctgctgctgtgggacacgaaaaccatgaagcagcagctccagttctccctggatccagaacccattgctatcaactgtacagccttcaatcacaacgggaacctgctggtcacaggggcagctgatggcgtcatccggctgtttgacatgcagcagcatgagtgcgcgatgagctggagggcccactacggggaggtctactctgtggagttcagctatgatgagaacaccgtgtacagcatcggcgaggacgggaagttcatccagtggaacatccacaagagtggcctcaaggtatccgagtacagcctcccctcagatgccacgggcccctttgtgctgtctggatacagcggctacaagcaggttcaagtccccaggggccgactcttcgcttttgactcggagggaaattacatgctgacatgttctgccacaggcggcgtcatctacaagctgggtggcgatgagaaggttctggagagctgcttgagcctaggtggccaccgagcccctgtggtcaccgtggactggagcactgccatggactgtgggacctgcctcaccgcctccatggatggcaagatcaagctgaccaccctcctggcccataaagcctgatgacttgccccaagggccacccgaggaagcagtattatctgcggtggggggaggagatataggacaggaaaaccacgtgctccactccagctccctgccagtgcagtgactctgcagggaaagactggcaaggaggctcaggtgcttccatctgtggtgactggaatgggacccacgtggagtaggtgacatatgcttcccagagactggtattgtggctgtgccaggagtacatgtgagactatgggaggaaagctccggaagaaggagaaacattgcagtggctactgtgttggcccagtagaaattgacagtattttgtatatatgtgcccatttatctttttcttttttaaaaaaagagaatactcttgtggtcccctgatgtctctttctaggatgtgtgtcactttgcttcagtgacagccctcccacccagcctggctctgctggccccgaactgaacctctccaggctctcctgttgctttgccatggagccaggtcagctctctgtctgttctgctgggtaacaaggtttggcagttcctgtttctctgggcttaagtcaaggccacagaattctttttcttccctgaaagctggcagcttttgttacagaagattctcaggatgaaggcaggggctgaggcctctgctactggctgcccctttccatccagtggctgctgtttcccaagacgggctaagcgtttcttatctgaaatgcttgggacaggagtgttacagattttggattttttcagactttggaatatttgcatatatacataatgaggtatcttggtaggtctcatgtctaaacatgaaattcattcatgttttatatataccttatacatgtagcctgaaggtaactctatacagtattttaaataattttgtacatgaaacaaagtattgattgtggtcaggtgtggtattttccacttgtggtgtcatgttggtgctcacagttttggggccgggcacggtggctcacgtctgtaatcccagcactttgggaggccaaggtgggtggatcacttaaggtcaggagcttgagaccagcctggccaacatggtgaaaccccatctctactaaaaataccaaaattagccaggcatggtggcaggtgcctataatcccagctactctggaggctggggcaggagaatcacttgagcccaggaggcggaggttgcagtgagccgagatcacgccactgggagaacccaactcaaaaaaaaaaaaagtttggggttatggaccattttggatttgggattttggggtaagggaccctaaccctgaccttttttatttggggggctcctctaattcttccaacggaacatttttggggaaagatgaggg

SEQ ID NO: 65838 - DNA, 2554 bp, Homo sapiens
gcggccgcggcataggggggcactgtggacttgcgcgagtatgctggctgtgtcagtgctggccgcagtccgcggcggcagacgacggtgaggcgcgtccgcgagagcaacgtcctccacgagaagtccaaggggaagacgcgcgagggagccgaggacaagatgaccagcggcgacgtgctgtccaaccgcaagatgttctacctgctcaagaccgccttccccagcgtccagattaatactgaggaacacgtggatgcagcttgatcaggaggttatcttgtggggatcataagattcctgaggatatcctaaagggaagtaactactccctaaagaggtacccagcagaaagtgttactgtctggattgaccccacttgatgctacacaggaatattacagaggatctttcgaaagtacgtcactactatggtgtgtgtggctgtaaatggtaaacccatgctaggagttatacataagccattttccgaatatacagcttgggcaatggtagatggtggttcaaatgtgaaagcccgctcttcctacaatgagaagaccccaaggatcgttgtgtctcgttcccattcagggatggtcaaacaggtcgctcttcagacttttggaaaccagactacaattatcccagctggtggtgctggttataaagttttagcacttttggatgtgcctgataagagtcaagaaaaagctgatttatacatccatgtgacatacatcaaaaagtgggatatatgtgctggtaatgccatcttaaaagccctaggggggcatatgactaccctgagtggtgaagaaatcagttacactggttcagacggcattgaagggggactccttgctagcatcagaatgaaccaccaggccctggtcagaaaactcccagatctagaaaagacaggacataaatgagcataactgattacagggtacagttcttcacagctgaaatggttagcctgagatgctggaagcttcaaaggattggtggagactatgcatggttaaggccatcccgaactttttaaagtatttatgaagcatcagagacttattttccctgtaatagaatgcaaaatcagggaaaatgggttgctttgtgtctcaagtattgtctttatttttgagactattttcatacagttgtcatacacaaggcgcatatatatatttgtgaattaaaatctgtagctgagtctacattgttatgagtcaccattttcacacaacatcatgaatcttcactgttagtactttcatatagaattcggttgaaggaaagattgatttttgtgtagatgtttaatataactttacaactatatctcattgaaaataaagtcattggggatttttacctctaatttggatggaaagcacaagaagccacacattcattaatatgcaacaaatgttgtatttatgttactgaatatttctatggattaaaatagaaaaagtttaattgattttttcttttaaattttaataacaggttcaccagctggtagaaaatagagacacatgatgatttgcattgtaataatttctgtgtgtatgtgtgtgtggttgttttgtttttataaagaaaagtgtgtttgtacccatgagttcagcatttctgcccatcttgctatttttctatttacccatagagaaagatgctatggttgatccttttccttctgtccatcaacattaatcattaactttggaagggtcgggtttaaggtttcagggttagcactatagttttggttcattttctcattaacgataaaatatgctgtaaggcactataagaatataaatgattctattacaattgaaagttacttgacattacatgaattgaactgcctttcattatcttcagacactttgttttagtattttttttttaatttgctaggtttgtatatagaagatcctttcattatcaagaatgagtatggttgcttttgccatggttgcttttactattaataaatgtatctagcctacccaaactctgtagtaacttttgagattctcttaatttcccctcagattaaaatagagaaggttgaaggtactttttgatgaaatttttttctagtctggttagaaaaaaaaagttgtgacatattcattgtgttaccgtaactagaaccttgctttgtgaactgtctttcattgggatgtatggtttctctcaatgtgaaatctggaaacttcatgtaaactacccatgccgttatttcatgtgactccagtgcccttgtattccataacatgctgatgagagggatttctcacggtttctttctttgctaaattttttaaccataaagcagcttaccctttattttcccatcttggaagtaaaattgaccaaagaatgtacgttctagcctggtggaatgtgcatactttaggtttgtatgttacattgtccaaagccctttactttcttattagtaaactgaatctaatatgacacaaatgttttcacccaatctcttgcaactggtcaaattcgagaaggtgtg

SEQ ID NO: 65839 - DNA, 1663 bp, Homo sapiens
ttttttttttttatcatcaaatcggatctttactcaactatggtgaatgccatggaacataatacaaacatggatgttactggagtttatatttttaaattcaaaattgaaaaaatacaaattgaaaaatagaaatatttaattattaaaattttctctttcataattctttttgcgcctttgagttgaagccaaaaggctggccgtcttcccttccacaccgagatgtcagtgtcaggcctcgggtggcacggtggggacgggcagtttagaattcagccttgaatccttcaactgggaacgatgtttaatttgattcaggttcgtaacggaaaacagctgttcacaagcgtgggtactcccaaacacagatattcaggacaactactggagatagttgtagaatctcaccatcttcacacagacttgtatttaggaaccagcaccgtattgcactgtagttcaattactatttatggtctgcattcacacaagaaacatctgccaacaaaggcaaactggacaatgtctgttccttctcatgagtctggattccgagagcctttgggggaatttggtcttcaaccccaggacgtaggtgaatacagtccgggccacctctttcatttctgaaagccgactgcagcacaggaaagagtaaaggttttttttccttgccggtggattccccaggaccaagcatacaccatcatacattcaagtagctgtttgtggacatccttgcggagaaatattcagtgttcagaacggtcataaccttgaccagaagtctttgactaaccttctcaggggaacccactgtggcttttgcctgatttaaaatgaaccaagttggttaacttgaacagttcagatttcttccacaaccaagtcacagagcttctgtgaaatctctcaggtcaagtcaccatcaactcactcgtgactgaagtccaggagcggaagtgtcgagagcatcgcggtgtgttctgttcagttgctcagaacaagtcaactcctgatgatggatgcaacgacccaacttccgtgtccttgccaaatgctgtcgccttggatcaaggtgtcctgccaagtccccctgtcatgacgctgtcctgtagttgtgcttcgggaactctggccagtctatgtgaaacttttctctcaatatacaaaaaaaattagtcctttcccagtgttgggcctgccttggcaccatgccacagacttcttcggtcacatcaagattcttaacaccacaaataaataaagctaactgggtggtaatagtttatgagcagcgaaagaaaaggccacaatcaatttgactctttcaagcaactggacttgtaaatcccccgagttatctccaactcactgtgcaacgcaaatgcccgttagacttaaataacggtctcaacagtcatgtgtttctgtgcaggacacgtcactctgctcctttataaacttgccatctgctgtagctctgaatgcccaggtcattcttctcacgtgattccggaacggcgtaccactgccgcgccacttctgttaattcgcttttcaaaacaaaccctattgacatttgagtccctttttcagttcgttgaggatggcatctcgagtctgttctgtgtactggtcgtagctcttactatgcttt

SEQ ID NO: 65840 - DNA, 2142 bp, Homo sapiens
  misc_feature (1)...(2142): n = a,t,c or g
ttttttttttttacaggctcaaaaatcaagtttaatatcaaaagaagttacacataaaggtttttacatttccgaaaatctgatagttaaaatatcccgtctggtgttgattgtgatacacttaagtgaacccctgaaaacctttattttgaaattgaagtttttgctcagaaactgggcagaacttttcacattctgacagaagataaaacttaagtctaaaaaatattcggtaacttttttctcaaaaacattaagtactttagaatataaagcagaaactcttaccaagcatgtgtacccatcagccacacctcctgtctttgggggaatttggttacttggagctctgtgggtgctatatgaatcctagagacagcaaacttctgctgtacagctaacttacaagggcctgaacccggctgatggcagcaagcctgctacagtccagaagagtgcgacttcttatatttacatatgaacgcatctgtctttccaaggctaactttgtagcattccactggtaccaaggagccaaatggtgacattctgtctaagaatttgtggttactggcttcgaatgaagttgacgctgtcttgaatgcaccagttttttcttcaggattcaagcactttttaattccaggttcatctgtgtgactgtccttggaattgaaagggatgttgctctctttacaatctgtaaggcgcctgtggtgatcttcactaagcaacaatacaatggttccgccaacatgaagcactctttccatttcttgtagaatgcttttgatgtcttttcctaacttaaactttttcccaaatggaatgtcagaaataataatatcaacactttctgaaggcaatggcaattctataacagagattttaagtaattcaattttatcctcaaggcctgcagctttcagattgtcccaagtacctagtaactgtgagtcgctgacatcagcacctacataatacacatctggccattctttagcagcttccaaaagtattgttccaagtccacacattggatctaaaacaaatgcaccagccccactgtcaggcccagtcgtgctcgagataggggagaaaagacatccaccacttgatatgtctacagaggaagcagagtcctcagtgcacagccaggtttcagtcagagccatatggtaccttaatgtcagccagagatgccattgcccacgctattgtagatcgcagtccagctgtcttgatgtaagctctgctggctagggaaaccctgaacacaggaatccccaccacagagtaaatgtcatttagatgtataaagatctctaattgtggattcctcaagtctgctttccatccaaagtgtttcataatagcaattccaattacttttcctacctcctgtgcagtgaaggcctttccaatagttccactgcagcgacaagatactctgaaagtcaagtcattctgattatgagtatcaattgctttctctatgtcattctgaaattcttcttcttgaaacttttcgcttttagtggtaaaatctctttgctccagagtttcttcttttatttgtttttccagctggcagtccctattctcttctatcttttgcatttgttctatttttaatttctttgcaatgatttcattttctcccacttttctttttagttggttatcatctctctgagaaagtttttccttttttgcatcaagttcaagaagatttttccaaattgaaatggcattcaaccaacttcctggatcttcatttataagtctttgcatttcattaaatatttttcctttacttacagaagaaataataagtggaaactgctttttaatcagcaaaaataatctttctgcagattttaatttcttcaacatattcaaatcagaacaggtggtgaaaaaaacctttcctgaaatatattcaacctgcgtggccgccagccgcgcccgcacctctcgcattacgaacggctccaggccgcgacccgcagtgcagaagaatcgggcgccagcctcaggcccggaccctggctctccacacgaaatcgtggncccgggnnttnctnnnnngtngntcntncagtaccanctacggatcaggatgngccggcccgctctccc

SEQ ID NO: 65841 - DNA, 2500 bp, Homo sapiens
gggcaatggcatcaacgtcctcaaaattgcccccgaatcagccatcaaattcatggcctatgagcagatcaagcgccttgtttggtagtgaccaggagactcttgaggattcacgagaggcttgtggcagggtccttggcaggggccatcgcccagagcagcatctacccaatggaggtcctgaagacccggatggcgctgcggaagacaggccagtactcaggaatgctggactgcgccaggaggatcctggccagagagggggtggccgccttctacaaaggctatgtccccaacatgctgggcatcatcccctatgccggcatcgaccttgcagtctacgagacgctcaagaatgcctggctgcagcactatgcagtgaacagcgcggaccccggcgtgtttgtgctcctggcctgtggcaccatgtccagtacctgtggccagctggccagctaccccctggccctagtcaggacccggatgcaggcgcaagcctctattgagggcgctccggaggtgaccatgagcagcctcttcaaacatatcctgcggaccgagggggccttcgggctgtacagggggctggcccccaacttcatgaaggtcatcccagctgtgagcatcagctacgtggtctacgagaacctgaagatcaccctgggcgtgcagtcgcggtgacggggggagggccgcccggcagtggactcgctgatcctgggccgcagcctggggtgtgcagccatctcattctgtgaatgtgccaacactaagctgtctcgagccaagctgtgaaaaccctagacgcacccgcagggagggtggggagagctggcaggcccagggcttgtcctgctgaccccagcagaccctcctgttggttccagcgaagaccacaggcattccttagggtccagggtcagcaggctccgggctcacatgtgtaaggacaggacattttctgcagtgcctgccaatagtgagcttggagcctggaggccggcttagttcttccatttcacccttgcagccagctgttggccacggcccctgccctctggtctgccgtgcatctccctgtgccctcttgctgcctgcctgtctgctgaggtaaggtgggaggagggctacagcccacatcccaccccctcgtccaatcccataatccatgatgaaaggtgaggtcacgtggcctcccaggcctgacttcccaacctacagcattgacgccaacttggctgtgaaggaagaggaaaggatctggccttgtggtcactggcatctgagccctgctgatggctggggctctcgggcatgcttgggagtgcagggggctcgggctgcctggcctggctgcacagaaggcaagtgctggggctcatggtgctctgagctggcctggaccctgtcaggatgggccccacctcagaaccaaactcactgtccccactgtggcatgagggcagtggagcaccatgtttgagggcgaagggcagagcgtttgtgtgttctggggagggaaggaaaaggtgttggaggccttaattatggactgttgggaaaagggttttgtccagaaggacaagccggacaaatgagcgacttctgtgcttccagaggaagacgagggagcaggagcttggctgactgctcagagtctgttctgacgccctgggggttcctgtccaaccccagcaggggcgcagcgggaccagccccacattccacttgtgtcactgcttggaacctatttattttgtatttatttgaacagagttatgtcctaactatttttatagatttgtttaattaatagcttgtcattttcaagttcattttttattcatatttatgttcatggttgattgtaccttcccaagcccgcccagtgggatgggaggaggaggagaaggggggccttgggccgctgcagtcacatctgtccagagaaattccttttgggactggaggcagaaaagcggccagaaggcagcagccctggctcctttcctttggcaggttggggaagggcttgcccccagccttaggatttcagggtttgactgggggcgtggagagagagggaggaacctcaataaccttgaaggtggaatccagttatttcctgcgctgcgagggtttctttatttcactcttttctgaatgtcaaggcagtgaggtgcctctcactgtgaatttgtggtgggcgggggctggaggagagggtggggggcgggctccgtcccctcccagccttttgctgcccttgcttaacaatgccggccaactggcgacctcacggttgcacttccattccaccagaatgacctgatgaggaaatcttcaataggatgcaaagatcaatgcaaaaattgttatatatgaacatataactggagctcgtccaaaaagcacactacgacagaactggacgttagaagttgtcattataaagcagccttctaataaagttgtttgcaaagctgaaaaaaaaaaaaaa

SEQ ID NO: 65842 - DNA, 2366 bp, Homo sapiens
gcactatgtcacattgccgtggggcagcagatgaacctgcactggctgcacaagatcgggctggtggtcatcctggcttccacggtggtggccatgtcggccgtggcccagctgtgggaggacgagtgggaggtgctgctgatctccctgcagggcacagcgccattcctgcatgtgggggctgtggcagcagtcaccatgctctcctggatcgtggcaggacagttcgcccgtgcagagcggacctcctcccaggtgaccattctctgtaccttcttcaccgtggtgtttgccctctacctggcccctctcaccatctcctctccctgcatcatggagaagaaagacctcggccccaagcctgctctcattggccaccgcggggcccccatgctggctccagagcacacgctcatgtccttccggaaggccctcgagcagaagctgtacgggctccaggctgacattaccatcagcctggacggcgtgcccttcctcatgcatgacaccaccctgcggcgcaccaccaacgtggaggaggagttcccggagctggcccgcaggcctgcctccatgcttaactggaccaccctgcagagactcaacgctggccagtggttcctgaagactgaccccttctggacagccagctccctgtcaccctccgaccacagagaggcccagaaccagtccatctgcagcctggcagagctcctggagctggccaagggcaatgccacactgctgctcaacctgcgtgacccgccccgggagcacccctaccgcagcagttttatcaacgtgactctggaggccgtgctgcactccggcttcccccagcaccaggtcatgtggctgcctagcaggcagaggcccctggtgcggaaggtggctcccggcttccaacagacatcaggctccaaggaggcagtcgccagcctgcggagaggccacatccagcggctgaacctgcgctacactcaggtgtcccgccaggagctcagggactacgcgtcctggaacctgagtgtgaacctctacacagtcaacgcaccgtggctcttctccctgctgtggtgtgcgggggtcccatccgtcacctctgacaactcccacaccctgtcccaggtgccttcccccctctggatcatgcccccggacgagtactgtctcatgtgggtcactgccgacctggtctccttcaccctcatcgtgggcatcttcgtgctccagaagtggcgcctgggtggcatacggagctacaaccctgagcagatcatgctgagtgctgcggtgcgccggaccagccgggacgtcagcatcatgaaggagaagcttattttctcagagatcagcgatggtgtagaggtctccgatgtgctctccgtatgttcagacaacagttatgacacatatgccaacagcaccgccacccctgtgggcccccgagggggtggcagccacaccaagaccctcatagagcggagtgggcgttagctgaagacatgtctgtcccacctgtacctgacacagaagctggggagcctaggagagctggtggaagtgtgtctgaactcggagtgctctgggagcgggctccacagcctccttgtgggctccagccccttgtcagccgcagcctctcttgagggggactccctgtctcctgaggcccagctgggccaggactccatcctttcagatgcccctgcaggcctggggctccttctgggaagtatggggcctagggcttggtccccctcttctgaggccctctcctgtatcccgacctggaagctttgatgggtcatgggccatgccataccccctgtggcaatggagtgtgtggatgctcacctgtgccatctgtcctcctgtctgtgccaggaggcacctgagttctctgctgttatcctgccccaagggcctgggccgagcctctacctgaagcaactctgctcttcctgtcagtctcaaagcacaaggaggttcagcccaggaggaagccagctgcaatgtggagacacgtcctcctccccaacccacctcatgccaccgccaaccccctgccccaggagcgggcctgagccacgtcccctaggagcagctggagatggccaaaagagtgagctcaggactactggatcccatgcccaggtgtccagcagacctcaaggcagaagggtcacctaacccaggagttccacagactgatgtgacctcaggttcccacatcagtggccaccaggcagggcccacctggtagaagtgttctggatatggcccagggtgggtgtgtggctaagtgggcctgaacagagggaaccctagggcccttggccaatgtgattaaagctgccatcttg

SEQ ID NO: 65843 - DNA, 3293 bp, Homo sapiens
ttttttttttttaggtttgacatttattgtagcagaatttttaatatcacagtatgggacaaaggtttacactttgcagggtattctttgggggaatgttaaatactgtaataaaaacatgttcaatcatggtaaaatgttcaacttgttaaaattacaaatgaacaaaaaaaaatttttttcctcatatattggccttaaataccaaatgaaggagtttaaaacttaaggattcaatgtggaaaacgagttaaatatgttcctaaattttgcaggaaaataaaagataaactgtaggaaaaagggtattttgatttaacagttcacaaaactggtatctggaacatttccccagaaaaatctaaagtttcctttccaagatccgtaaacctacggtccacctggggtcccataggttaacccaataacctacccccaaatcaccaccaccaccaccacccttgcagccacattgcaaagttcacagatcctgcggcaaccgctagtgttctgcagaggcccctcctgcactcagaagctcgatttcctccaatccaatgcagctggtcgggtgggcggttacggactggacaaaacaatttaacaaccccacttcctttccgaggacactcttcacttcgtagctcccatcttcaccggcggcaaacctcagcagggaggaaatgctgcgctgcaacagcttgaccttcactctgcactgcggtcttgagcggcagtccaggaagacctgcaggtgcctcttgagaacaggagatgtgaccacccgggagcagtccccacaggaaaaggcgcctctgtcttccggcctctgttccaatctcccgttgccacacatgtcacacacaggccatgagaaagcagtgctctcgtccacgccaaccacagtgccttgaacactgcagatggagttgacaggtgttgcagagtccaggctgtcgagcatcacccgggccaggcagctcacaggaacttgcaccagagaccacactcaaaaggggcttctgaagcaaggaggaccagttcgttcaagcacaaacaatcccgaccctggtcacggagagcgtcccttgaagaagaggctgtggaggggcagcccccagcgagtgcctcccaggacttcagagcccagcacacacaagggggccacatagaccagcagggttttggggagcctggggtctctcttcctccttcgtttgcaggagtgacatcggtcactatcagccagatctccctttgctcccaggaagcagcagactcttcaagctgtggtttttggtaaatcaccgtggcatagaaactgcaacggggtaccaagatcattcatctggagaatgtctcttaagcagcgggtaactggaggctggtaaagcttataaatggggtcttcgtcaattatatcaatttgtcccagatttggatgagctgtgaggatgtaacacaaggctggagtagccagatggagtttttatctcttcaacagggctggtcgcggcccaggtgttttccagaggtatcgctgggggccaacagggtgtcaatcaaactgaaaatccccgctgtccttcctctggtgactttctgtagaaccttcattccccacccaggctgcaagacttcccttccaaactgtcttgccttcgaacatgttgaactccaaagtgcacttcaccgaaacattccaacaggcatcttgtaccaagaaggcaggctcgagttccagctgggtctgtgtgtcctgagctggccccctgctgacccctggtgctgtctctgctgggaagagaatacactctttgaaccaccactcggactccagctccctggccacgaggcagctcccctggctttccaccacatcccaggagagaatccctcaggggagtgctggttgggatgcgctgttttgcttctttgtgcccatgggtccaggctgtccctgtagtggctacaccactacacacaacctggatttcaggtgaattatttgttagacccttaattacaaacatctgggccaaagagatgcttcttcttggaaggggtatgtccggacagtacacttcacaagttttttctgaatcttctttggcaacaactttctcacaaaagtaagtattcagaataacagggcaacttccacttggaataatcagtttttgccagggagggaagatccggacagtgtcctggggacggcccctgaggtagcctgcagtctccttggtgaagagaactttcaggccagctccaggcctgggagccacactttgggaggagctggtggctggtgaccccaataactgctcacacatggcaacttgcatggcacattcctcatgcagctctaaaattttcacagttaatacaccagattttctacctgaaagtgtcttttggtaagaaatacattgatgtctccacaaagaaatagcagatctctctcgattctgcagtccatttagtctttctgctagtccacctcttaaaagcttcttctttgctgaattttctggagtcctgggaaacttagctgtgggtttctgaggtgtatgcaaaatggtctctgttgattttgtccttggatctatcagtctctccataatctgtcttgcatccgatgcaaactgcacgtggtatttgtgaggggattctgaatcaatgagtaggacattttccaaatcatcttctttttcactatctgatgaatactctaaaatttctatagaacttggcttgggaagctccgacagcttctcatcacttgtcaaagactgattacttgcacaagaagcacagtctgagatttccacagcaccctcgtcatcttcaaattcatcacagtcactagcctctgccctgtcactgtcaatctcccagtcgataaactgtaattcatctctctgtaactgagaaagtgtcttatcttcatccgacaaatcacttccactggagctccatgttatgtctgtaagcccactggtgcttttagatgtggtggtttcttgcttgggtctagggcataattcaaggtgcttttctgtaatccgtcttctcttcagctgttaatgaccggattcccagaagtgttctgaaacccttctccacacctgagccatgcttcaggagagagaggcagctgcccctgctgtcctgagacctgctcttctgacctgcagtggtctttctcctggaaaggatgggcattctgtattccaactcctttttctcttagagccccgagcgcggctgccgcggggcatctccgggag

SEQ ID NO: 65844 - DNA, 1594 bp, Homo sapiens
gttgtgagtgacaccctaaaagaagctggcacccactacatcatggctactgatggtacccagttgcaccacattgagctcaccgcagatggctccatctccttcccaagtccagatgctctggcctctggtgccaaatggcccctgctgcagtgtgggggactgcccagagacggccctgagcccccatctccagccaagacccactgcgtaggggactcccagagctctgcctcctcacctcctgcaaccagcaaagccctgggcctggcagtgcccccgtcaccgccatctgcagccactgctgcatcaaagaagttttcctgcaagatctgtgccgaggccttccctggccgagctgagatggagagtcacaagcgggcccacgctgggcctggtgccttcaagtgccccgactgccccttcagtgcccgccagtggcccgaggtccgggcgcacatggcacagcactcaagcctacggccccaccagtgtagccagtgcagctttgcctccaagaacaagaaggacctgcgtcggcacatgctgactcacacaaaggagaagccttttgcatgccacctctgcgggcagcgtttcaaccgtaacgggcacctcaagttccacatccagcggctgcacagtcctgatgggaggaagtcaggaacccctacagcccgggcccctacccagaccccaacccagaccatcatcctgaacagtgatgacgaaacactggccaccctgcacactgcactccagtccagtcacggggtcctgggcccagagcggctacagcaggcactgagccaggaacacatcatcgttgcccaggaacagacagtgaccaatcaggaggaagccgcctacatccaagagatcaccacggcagatggccagaccgtacagcacctggtgacctccgacaaccaggtgcagtatatcatctcccaggatggtgtccagcacctgctcccccaggaatatgttgtggtccctgaaggccatcacatccaggtacaggagggccagatcacacacatccagtatgaacaaggagccccgttccttcaggagtcccagatccagtatgtgcctgtgtccccaggccagcagcttgtcacacaggctcaacttgaggctgcagcacactcagctgtcacagcagtggctgatgctgccatggcccaagcccagggcctgtttggtacagacgagacagtgcccgaacacattcaacagctgcagcaccagggcatcgagtacgacgtcatcaccctggccgatgactgagccccgagggcccaacacagatcatggatttgcggccagctctcctgggggtagggggccaccaggactcacctccctcttcatttaggatctccagatactggatagccagcatcctctcattcccagggagccagacctgtgctgttggggttaggggcagccatgggccccagccaggacatgctgggtgccccagcctgcaggcaggctttgggagagaaatttatttttgtttgggtggacccactggcctgtcagtctcaataaagggaccggagtccagtcctgaaaaaaaaaa

SEQ ID NO: 65845 - DNA, 1482 bp, Homo sapiens
cccacgcgtccggcaccttcgtgtcccactactcgagccacctgaagcggcacatgcagacacacagcggagagaagccgttccgctgtggccgctgcccctacgcctcagcccagctcgtcaacctgacacgacatacccgcacccacactggcgagaagccctaccgctgtccccactgcccctttgcctgcagcagcctgggcaacctgaggcggcatcagcgtacccacgcagggccccccactcctccctgcccgacctgtggcttccgctgctgtactccacgaccagcccggcctcccagtcccacagagcaggagggggcggtgccccggcgacctgaagatgctctgctccttccagatttgagcctccatgtgccaccaggtggtgccagtttcctgccagactgtgggcagctgcggggtgaaggggagggcctctgcgggactggatcagaaccactgccagagctgctattcccttggacctgccggggctgtggacaagagctggaggagggtgagggtagtcggctgggagctgccatgtgtgggcgctgcatgcgaggagaggctggagggggtgccagtggggggccccagggccccagtgacaaaggctttgcctgtagcctctgcccctttgccactcactatcccaaccacctggcccggcacatgaagacacacagtggtgagaagcccttccgctgcgcccgctgtccttatgcctctgctcatctggataacctgaaacggcaccagcgcgtccatacaggagagaagccctacaagtgccccctctgcccttatgcctgtggcaatctggccaacctcaagcgtcatggtcgcatccactctggtgacaaaccttttcggtgtagcctttgcaactacagctgcaaccagagcatgaacctcaaacgtcacatgctgcggcacacaggcgagaagcccttccgctgtgccacctgcgcctataccacgggccactgggacaactacaagcgccaccagaaggtgcatggccacggtggggcaggagggcctggtctctctgcctctgagggctgggccccacctcatagcccaccctctgttttgagctctcggggcccaccagccctggggactgctggcagccgggctgtccacacagactcatcctgaactaggtccttcttccccatgttttatacagacggaccagaagccacctttttctcccccgctggccaggggctccacacagactaacgtaggcactataaggaccagcccaaccccatgggcgggggggcccatatggaccaggggaccttgccttgactgaggcacttcacgagctcagtgagaagggccctgtattcacctccactgcccccaggggctgtggacaaaccggctgggggactgcccagcctcccacctgtttatttaacttatttcagtgctttataataaaggaaacactaac

SEQ ID NO: 65846 - DNA, 809 bp, Homo sapiens
ttttttttttttttctcaaaccaaacgtcactttacttttttggtaacttttcattataataataaactctatgggggattttgcagcctccataatcttctcccttgtaacaaacgtgcagtccgttcacaagctgtaaaaacaagcccaaacccaagacatcacaagaggcaagagcagtggcagtgagaagggaccctgtaaaggatgtttcaaaggagggtcccaggctatgtggccactggatgtaggcagtgagctgagtccaggctttcggtctgggaagtggcagaggctgacacaatggccaaagaggatttggagaggaaactatgctcggtttcactcctgccagcccaacagcctattccctggtgtgaatcaactggtgtttgatcaactttgatcgctgggctgaaggctttcccacaagcagcacagtcatagggcttcaccccagtgtgaatcctctggtgctggatgaggaccgaacgctgactgaaggctttcccacactcactgcatttgtaggggcgctcgcccgtgtggattatctgatgctgaatgaggtgtgagctctggctgaagcccttaccacattcaacacaggtgtagggtttttccccagtatgaactttctggtggtgaatgagatttgagcttcggttgaaggctttaccacactggttacattcatggggcttcagcccattatgaatcctctgatgctgaatgagggttgagctctggctgaaggtttttccacattcagtacattcatagggcttctctccagtgtggactcgct

SEQ ID NO: 65847 - DNA, 2228 bp, Homo sapiens
ttttttttttttttaatcaatatttgaaaaatgtaacttttattctgaacatgtagtatttatctttattagcaatttttttcataatataagcatgcctcaatcatccaaaagctatctacctatctatataaattgatatacatgctactgaattgacttcttaatagactcatatggtaagtgttataatgactaatcaacctacttctgataattttggtgtaaacaaaaatgatatttattttttattaaatcaagtttacctatcaaattcccttttagaaaaacactgcaagtttagtcttaccaagattgcaagtaaattttaaaattatggtgctgtaaataaaaaggttttaagttgaaatgtgtactgagattagccatatcacaaaagtcctatcatgggtaatgaaaagtcttatttttaatatatttttgtttcctttttcttttgacatgtggcccaagataagaaggtcttattttttaaatgccaaagaacagtattcaacaaaattcgatttaattttatatctaacaaaaacatagaaactggctagtcatattcaagtcaattggtcacattgtatggaatacaaaaataaatgagaaaaaaaaccagttctacaaaaatgctttgttattataatactgaaccacattaaataaaaattcatttttgaaaaaactgcttgctataagaaaatgaaagttagcaggataaatcataagcaaaacatttagaacaaatgtatgaacacattgtggttatcaccattacaaatgtatacaacaccttacaaaaatcttaaataaaaatgtaaaaatatttactggcagtgaatatggcccaggctaattataccaacgggtaggtgatactgggaaactacaagatcaattacaataatcaccttttaagatgatactaaaacaaatgttacatcctccttagaattaaccagggttaataatacatgacaagggttataaagcaactccatgttaagtaggaattcggtctctcaaatattcaagtatagcagctgttcctttcattaatatggctgctcgaggaactcggaatggatttccatccagtagtaatgttcttaagtttacacaattaccgagctctggtggaatttgtaagaggtcattattttgaaggtccaacgtggtcagattttccatcatcttcattttctgagggtccacagatccaacctgattattactaatcagaattgtttcaagtgtgaagatacgatatagaacttcaggtagcattttaaacctattaaaggaaagattgatcgtttgcagtcttaccagtgattccatttcttctggcaaagaatttaaaaaattgttcctgagatctaaaaaagtcaatttctgaagcacacataactccaaggatataaaggaaagtttattaaaactgagatcgacatcagaaaccatttccttcagttctaccatcctttttggaatttcacatagttgattcttactgaagttaatagaagtgacgatgttgctttttactgcatcaaacacctcatcaggaatcaaagttgcttgtttatcactatagtctaatatttttaatgtaatgatggcatgtatattgactctggattcactggtagtgtcatggcagtctcagtagcagactcacttggctaggtccatcatctttgatcttgcttcgtagatattttaggacttcttgtgttcctttacttataatttctcttcgaattgttctcaaaggatttccttctaatgccaaaaatttcaaatgaaggttccccaatgaatagggaagactactaatatcattgttgcttaggtcaagcctttccaaggaccgtagtagtataatttcatctggaacagattttaacttgttatccctcaggtctagcacaagaattgaattcagatgtttaagatgttctgcctctaacatttcaatctggttttcacctacgtgcaattccttcaatagactacaagaaggaaattctggtagaaaacgtaatttattcctccgcaaataaagcaattctagtgattccatgccagccaattcaggaggtatagtttccaagagatttgaattacaatccaaatgcttcaaccttttcattctatttatttctgctggcaaactcttcagttcattactagaaagattgagtcgcaccagactg

SEQ ID NO: 65848 - DNA, 720 bp, Homo sapiens
ctgcagaagatttgccttattatggtggctccgtggaaattgctgactactgccctttcagtcaggaattcagttggcatttaagtggtgaatatcagcgcagctcagattgtagaatattggaaaatcaaccagaaatttttaagaactatggcgctgaaaagtatggacctcattccgtttgtctaattcagaaatcagcattcgttatggagaagtgtgagaggaagctgagttacccagactggggaagcggatgctatcaggtttcttgttctcctcaaggtctgaaagtttgggtccaagatacttcatatttgtgtagtcgggctgggcaggtcctccctgtcagtatccagatgaatggctggattcacgatggaaacctgctctgcccatcatgttgggacttctgtgagctctgtcctccagaaacagatcctccagccactaacctgacccgagctctgccacttgatctttgttcctgttcctcgagcctggtggtcaccctctggcttctgctaggcaatctgtttcctctgctggctggatttcttctgtgtatatggcactaggaatggaaaagtggatcttcaagatattcttttatggtatgttcttgggaacaaagcacaaagtttgagtgagtgccaacctatgcagatggtagaagtggcattcctggctttggcttggaagattgacgaccatcagacg

SEQ ID NO: 65849 - DNA, 1771 bp, Homo sapiens
acttatctggatacacatacattcattacagaatttaaaaagaattggtacctgtttgtactaatatagactaagttgcattagtaggaaacaaagcaaactggaaggtacttatttaaaaatcattatgaaagcatttgtccatctatgtaacatgcatgggtgggaagctagattaatattcaataaccgggggaaaagggtaagggggtgagttagtgtctggtaatttttttttaccaaaaaatgaatttatgatgagaaattttgaagaattatactgtagcagcaatagctgatttgtaagtatcgtcttttatatgtagtagttcttcactagagctcatgaaaaaagtattccatttaagatgttacaaattacttgatgttttaatatgttctttgttgaatagcttattttacatttcagtcaaaatagttatttcacaggtgaaaccactaagtagcttacttcctaccttttaaattaataaagttacagtcagccacattgcttgagtcttgccaaaatctttagagaaacaacacaaactcagacatctaagtcagatcaaattagagcccaatatttttgatacttttattgtatatgactagttttctagaaaactattccagaagatacagtcttccttccagaaaatacagctttactgtccttaagtgcctaatcattttcaagaggaggagcaaacagtttgccctcaagtatctggtctatcaacaggggtctggctaaggaaaaaacggccttagagagtgatgaacctacttaacactacctggtacctcaactcatgctaaacattctaatttgagcaaagctaaatcatgggtcttagtctgtttagcaaaatctccacaagatgaaatttagcttactaccccaaactgttcaatgttttgggtccaatttagacacaaaaaaatgttttataatcctagacattagattaatgaactttttaaaaacaaagtcatgtttgggcttagaagtttgcataatgttacacagaatgattatgatatcttccgaaacagcttggggttggggggaagttacacataggtgcatttgcataactatccaaactattttactgttttcacaagtacaacataaataacaaaggtgctaatttcaaagacaggtttcaaacaatgagaataagaatatattatttcatatcaggcaataataaccttagcccaaatacttttaacatctaaagtgcattaattgacttccttaggaattttcctaaggaccaaaggtagatacaaatggcctattttaaatagtaatattactccatgttcacagacacttaaaggcaatcactattcaacatacaattgtggaaattactgatttttagttctcagaattagagttccctttgtttttcctcccaggcaaaggaaagcttgatttgctctggggttgagaaagtttactggctaataaagtgaatggttcaatcagagttttccgatctgtaacagtcacctcccacagtcttactttctcactttttgcccactgctgtgccacttcagcgtccacttgtctctgctcagaaaggtcgattttgtttcctaataccacaattgctacctcttttttgtctttgaacttatcgatttctttcttcagaagctccactctttgaaaggattcaaggttattcacactgtacacaagaacgaagccatcagcaaatgaaaaataatgctttggcagctccaa

SEQ ID NO: 65850 - DNA, 1310 bp, Homo sapiens
ttttttttttttaatagccaagtattccatttattaacaaaataagtcttaccaagggagagctctgttcgtcccaaacaggccccgcagcccccgcgctgccgcatcagaccagaaggagggaggagtggggagaagaccccagtcgctggggggtccactctgggggctctgccgggccaggcctaggagagggcgggggctgctgtgatccgagagctccctgacgccccaaccttccccgaacgcagctaacgagctcgtgacatccgctgacatcgccaccggtctgctttggagggatctagcgagagtcacctaccccacccctactgccaggggaggggtcgttgcccccacgagggagagaaaaacaaggactataatgcacttcgcaaaatgtaaggggccggcttcacgccagcggggccttctgggactttgaattcaaccaggtgagcgctccaggtgccccgacaggcgcactgtagccactgggtgttaggggcgggagtctggaaggtgacggtagacggccacttgggcccttctgggggcgagcctactggtggggtcagggctctccgtgctcagagcaaggtagaggagcaaggccctacttttggggggcagggtccagaccaaggaccctatgcgcggagggtggcgggggaggagtcccggagcagtgtaccaggtcaatagagctccagggcccctgccacccaggtggccccctccacccccaaaatgagttacaaaaaaaacctcctctctgttacttgtacaacaaaggaaaaaacaaaacaaaacaaaacaaaaaacaaaaacagaaccgcaaatggaaggaaacaagagggaatgaagggggaagagggaaaaagagaaggcggaaacgtagttttaagttaagactcatgcaagaaactccccaggaagggaaaacaaaacgtctagaagaacccaaagaccccaactctccctcaaaccaaaccaatcaaaaccaaaaaaagaggaaaaggaataaaaaatgtaaaacttatatctaagaaaaaataacagaaaggaacaggggcggggatcatgtcgttatttgtgggattaatattattatttgggagaacacagactttttgcataccattgactcatgtgggccgttaatgcacttatattcccagcttgtaagctaacattatagtaaataaatacacagtccggtggggaagggctgggtggggaatcccggcagggtcaagcagtagtggaggttgcagcggcgacggcaggtggggagggaggaggaggga

SEQ ID NO: 65851 - DNA, 430 bp, Homo sapiens
gaaaacctgaaaatcatgttgaagctaaacccatatgcaaagaccatgctctgcaacaccaggctttgccaggccagcaaccacaaactccaggtggataaggcagcggcggcggtggcagcagcagcagcagcaccagcaccagcaccagcagcaccagcagcaccagcagcactagaggccaaatcagatgagaaagggggttgcagtcaagaagcctgtggtagggaagaaaggaaagaaggttgttgtttttaagcaggagaaacctctggtgggaaaaagggcagcagctaccaaccaagacatcagtagctgaaaaaaaaacctaccacagaggaaacgaagcctgctgcatgagcttgttggtttattccataaaggtcaaataattttggacagcttatttttaataaaagacctgatcagg

SEQ ID NO: 65852 - DNA, 1104 bp, Homo sapiens
caaaacttttcttttctttttttggcatgcaggctctttttactgttctgagcagtgttttgcaatgtgtgacccctccgcactgttggtgaacatacagaacctcctatatgggcacccaagcccaggccagtgtgagaaccttggcgggggggtggggaagattagaaggggaaggcccctagcctgactcagaggtgaagactgctaggccctgctgtccttggggtacgaactgtcaagggcctttacctccccccgcccccgcgggtgggcttttggaaggtggatctcccaggacgtcatgcagctccgggccatccaagatatcaggaaattgttgagcacccgttacccagccggggaactgggctttgacctcaatttcaagcctttctggaatctccccattcacaatacggagagaactctcaaagggactttgctgcccacccagtggcactgtgaaactggccgatttgggcaccagacgctgagccactccatccctagcaaaccccagcatgacactccctggcagtagctcccgaacgtccacatcgccacctccgttcctagtcttgccaaagaagatctctagcttgtccagcagctcctcctcactcagcctgaggctggcaggaaatccagtgaccaacaccctccggccactcaactggctggacaccatcacctggatggtggtgaccatgggcagctccaagggctggacctgcacccgcagccggcactcctccatgttgatcgtgtgctccttttgttgcagcacctgctcagccactttggggtcatcaaaggtgatcagagcagagcccgcaagcagagggcagtggatccgcaaattggaaactaaagacttaggcacttccgggtcctgctgggtgtgtcctcggaataccagggggatcttgggcactgaaaatgggaccttgtctttgggggagtccccgagctcctttctcagctgctgcaggtcccacagcctcatcttgagtctggcctgctcctcctgaagggcgtggagggcggtctggcctgctcctcctgaagggcgtggagggcggcatccagtggggctgacat

SEQ ID NO: 65853 - DNA, 1924 bp, Homo sapiens
ttttttttttttgaaaatactgttttattaacaccacagtgataaacaactttaagcttatgtttctttatagatcactggctcacacataattcaaaacccacacagaagctaagagtctttacattaaatatattcttcctaaaaatccttactgtatgcatctgtcctcaagcagtaaaatttgattatgccccattttataattaatatggtcacatttacataggcaaaataatggaagggcacagctaatacaaggcaaacttaaaccctttctacttctgagctggggggtggggggcacacacttgggattggttcttcaagtatgtattttttccaaacattagcttcagtgaagagttctgatgattttcacagctacccccctaaaagctacatgacagaaagacgtcacaaggcgcaaagtacataacgctggatacacatgctttacataatttgctacattctacatctcttcaagtaaattaatatttctaaaacgctaggtaaagtgatttaatacttaaacatatttggggtattttttacgtgtttgtaaatagacagtactaagaaaacacaaacatgagattgtaactaatgaatacatatgttgacagtattttacaggttttacaccctccttcttggaaccatgttgtttctctaaattcaaatactcaaaacatttttcagaacttgaaatggcagttttcctggccttattaacagtagtgtcatgatctccattgcaatcttcctcaatgccatcaatctcctgtgaagtgtaaagctgatgtctgcgttacaaaagcaaagtctcaaagatgacgtttttcttgggttctgccttctctgcactgcgaaatgtcatgagtaaagaaatttaagaattaagcactgagaacgtgttcagtcatggcttgggtgttccatgtgtagcgtatgctgtgtgatgaatgggtttcaaagtgacgttctttacttcgcatctgctaacaccctttgtaaacctcaatcctcagagaagagaccatgaaaacataattttgggtttaattcagttttctttaacaccttttgatatatttattatgttcaaaatgaaagtcaaatttgaatcgagctggccaggatctaattgctttaatttaatctattttaggaatgtcagaataaattcacattgtattttggtcaaaaacctgagcctttttaagtccatcgatattctgggaaaaacaaaaccaggcttttttcttcgtgggctttctcttcatccatctctgccccccttacttcttggcgtcatcaggcatctcggcgtgggcatcgtcatgtttggcccccgcggcagcctctgccgcagcctcctcctcctcctcgtcttccccctcctcctcgtcatcctcgtactcctcttcctcctcctcctccccctccaaggtccatgcacacccctccatctcgccggtgagctcttggatcttggcgagtaggggcttatagatgtcattatactttttttccagagcctgaaattccttatcaaatttggcttctatcttatcgcatcgcttctgcagctttttgagggccaggactcggcatttcaccgaattaggcaggctctcgataaagtcatttttcggctttggggcattctctgcaggggtctggggctcctcagccatctgaccagccgcgctgtcagggtcaccagccgcgctgtcacagtctccaccctgcgcaccgccttccgccattacctcctctgccgctgcctccgccgctgccgccgcctggctaggctccgcaggcccctggttttccgagtcggccatgttagaggagaagccgcagaggtctaggagggctcccgcagaggccctgcacccgagctcggacgcgtggg

SEQ ID NO: 65854 - DNA, 1966 bp, Homo sapiens
gaatgcacctgagtcactgctgtagctaaacaagcaagttgtaagaaaatccataggctatacagacttttggcaatccatcaaatttatcacctgaggctgctgttaaatgctgtgctggaaagaacaaagacaggtagagcttacaggacaggacagaacaacatggatgtagatttgctcatcctcgcccaacacttagcaccagtgcccaaatcttttatttagggaaccgtctcctgctgactacatgtccaggtctccatgccaaatgagccacaggatcctgcctgcagcacacacactccaactcccatggaaattaagtctctcattcttaacaacaaagaaaagccaattaaaaagtaaacaaacaaaactgagaagttgatcttaattcccactaattctctttcaggcccttgggcaagtactaatttttatagctgctttatcctactgacattgcaaggcagggattaacaagtctagtttcttttattgccagaaaattctttacatctaatatatattccatggctacaagttccaacccgtttcccccatgattccattagagatgtcttctattttccaaacatcaccaatgagaggcataagacagtgcattaatagttcatctggagattcccctagtggtggttaacaagatttcatcacagtaaaaaactgtgataacaggatccaagagaagttgccgaaaagtttaagaaggaactcaagtgatgtccaactttgcaaaccgtgtccaatgacaaaagaaagaaaatccaatttcggttcctggaacactttacattgtaattcatttcggcctcatgagactatggaaattggtaagcctgctactgtgaagagaatggtatgcaattaaacatgcatgttactgctttttgttttggaagaccatgctgccaatgtttctattggatgtgttcaaaaatgactggagagatcaatacaaagccaacaatgtttacttctgtgaccacagaagactactgagtggctgcagagcaagtcttgattattttctgtgaaatgtatgtttatcccattttctgatgtaaaatttttcaaggtttgtgatttttcttttacataaattttagtgccaagctccatttggtgaatgtcttcagaatgaggacactggacaagcttctcttcacaggtggagtttctggtgtctaagaaggcttgaccgcctgctgaagtttctcctgcatatgctacaagtatatggctgctcacctgtgtgggttctccggtgtttaataaggtgggagttctgactgaatttttttccacattcatgacatgtgaagggcttttctcctgtatgagttctttggtgtgtatgtaaatttgtattttgactgaagcttttccccccccatgaacatttatatggttttattccttggtgtgttgttaagtgcttattaagatctgaactccatctaaacctcttatcacactgttgacatttatagggtttctcttcagtgtgaattctttggtgcttaataaaggtcaggagctaactctgaaggttttcccacattcctgacatttaaaaggcttctctcttgcacaatctttcttgtgacgatccataagtttgagcagctcttgtttccaggttgaaagtttctttcttttcttcactggaaaatcttggtgccattttcccactctgtgcatatcaaaatgattttctttgcctgctgttttctggggaacttttactttggccttttttgatatgacgcctgctgatgcttgtatttctaagtcagaaagagacacaggctgatgattttcagtgtcgtttttgagctttaaccctgtaggagattttccggcactatccttaaactccggggatacttgaacccatggctcttccccttgctctagacaggagatcactttaggtttg

SEQ ID NO: 65855 - DNA, 1925 bp, Homo sapiens
  misc_feature (1)...(1925): n = a,t,c or g
ttttttgaaatctggtcccaaagtttcaaaagaatactaatgcaacaaaaagaaataacctctctgtataaagtgattatagagatgtgtgttgaggtaaacagcttcataaaaaccgttgagcagggaagcacagccactgctatagaaatttttaggtaagtctggtgctagcattattctacaaaactgtttacacccattataaataggggacagttcttattgctcctggagcttgtagctccaatctgttccagctccactgaaaaatgatttttctcaacaattggtagcaaagatttccaaatttacaaaaagtcattaccaatgcatcactttttgattaatttctgattgccatatagatatggactacagtatgcatgtccttgacaccaagtacagaaaaaaagcttagaaaagtcgttttatcaaagttcagttcaatgagaaacatgaaaaagtgcaaaatatgtacaattcctggcagttctcacacgggatttttttgactacagaccataaaagtttacatttgtgtaatgaaatgacgatggatttcacatcactgttaatatacaagtttttgcttcaaagtgcttactttatttataaaagagaagatcaagagggttgcaggaattttttttttttaacaacaaatcaatggtatgtgtcccaatctccttcttcctcttcctttagtgcaacatggcgcagcagcctcatggataaggtctgatttcaaaagacattcctgaaacctcacctacagcagcactctaggggtcccattaggggtggctctctttttcttctgcagccgattctgaacctttcgagattttactactttcattctcacctcaaaaacttcatgaatggccttccggaagcaatgaaaattatagtcaattagcccttttctttcaaagctttcctctctgacaaagcaaacgagagccaggaactttgtcacctcttttaaataaagcacggttgtattattaagctttatgatggctgtggattccttgtcatagggggttcctgctccatcttctttgagaccataaatacaagagatgtcaataaccacatctatcatatcacagcagagctcataggtttgcatatccaccggagtactatcagttgcaatataaattttactgaccacatcaaatagaaatgccttttcaattccagaatttgagataaagatgttcagcaaattctccagagttgggagttgtggaatcagtttctgaacaactttgctaaaagcttcaaatattgaatgatcatatatgcttgtcagataaaagctgaggtgaattttttctaatccagcatctgcaaggtcatcgtttgccctctggtgaatatctctttgggtttcaattttgtggtcatctgacagaccatccactttatgaataaacacctcgaagttgatgtcagtattcactttgtaggccctggtcaccgtgaggtggagcctggccagggcttccatgtaatcatcctgtgagtcaatgacaaatatcagtgctcctgttccccggaagatcatctcatagtcaaatgtagggtcaaaaaagtcaatctgtcctgggaagtcccaaatctgaaaattgacaaaggagctgttggaaacatcttcccggcatatcttattagtgctctccaagaacagagtttcgttgggagacattttgtgaaagacaactttctgaatagacgacttgccgcttctcctcaggcccatgagcaggattctcggcttcacttcagtgctgaaggggtcactgaagtccagaactccctcctctgtgccgctgtccggatcggcgtcggaggagtcgggcccgtctccgtagtccgctgaattccnccgcngtgactgagtctcattccca

SEQ ID NO: 65856 - DNA, 2265 bp, Homo sapiens
atcccggccgcatggtctcccacaccccagcccctcctgcaagcttccctgtgccataccttccaggggacccaggtgccccatgctctagtgtcctcccaaccactggcatcttgactcctcacccaggacctcaagattcctggaaagaagccccagcccccaggggaaacctccagaggaacaaggtcaatgcatctttccctacccactccctcgcacattcaccaatgaccacgttctaattccttggaggattcagtcagtccttccccttctcagactgtccccgccctcctcccacttactcttctttcctcagaaccctcttctttctctttccctcttacacacatacaccagtctcctcacttcccagtttcccacactcactcttctgtctccttgttcactgtcattcctgccactccccaaaaccagagccatggagtctctcaggttagactcatgtctttccttctgtctctttagctgccagagacatttatgcccccagcaccaattactgctccagttatgagcctcacccctgagctacaagggattcttccctcacagccccctgtctccagtgtgagtcatgctcccccaggagttccaggagaactcagcctgcaggtgacaaggacaatgtattcccctcccttgggaaaccttccagccctccttgggtgcaggtcatggtagatgggcctcattcctcaaggcatgtgctgagggagactgggggcaggtaccaggtgtccttactgcagagaaagggaggctgctcatctccccaactctgctgtaatgggaacagtgtgactgtgagtcactggggactagtccttagggaagccatgagaaggacagcttgcccctctggcctttctccctgcttctttatcagcagcttcagcacctgccacctgagaagatggaaaggaaggagctgcccccagagcatcagtccttgaagagcagctttgaggcgcttctccaacgctgctccctgtctgcaactgacttaaagacaaaaaggaagctggaagaggcagcccagcgtctggagtatctatatgagaagctctgtgaggggacactctcacctcatgtcgtggctgggctccatgaggttgcccgatgtgtggatgcaggaagctttgagcagggccttgcagtgcatgcccaggtggcgggctgtagcagcttcagcgaggtgtccagcttcatgcctatcctgaaggctgtcctcatcatcgctcataagctgctggtctaaaccaggcagcctctcttgctaggaggccacttctgctgttacataactcctccctgcagaagaggggacttctgcaacagattctgtttctttttcccgactcttttccttgctgccaggtatgtgatgctgtaggcttggctccaaaccagctgagtgcctgctttttactcctttatgtctggccttctaggatctgtccaagacactctcaggcctggagggagggcatagaatcagttcttcactctccctaatactacactctgtaaggacctggggcaggatatcttctcccccagggatcttctatttaagtggcttctgagagggtgaacaggattgttacttttaagcctacctctgctgtgacccatcatgtgggtcttttgtttctcccttctgtggtttatgagcctgcccttaccttttccctgcctctgacttggtatttccaggtccgtatttctctgtagcccagggtctggggtagagctgactgctgttcaccctttgaacaactcatggacgtgagggatgggtgctgagcagaaccaagagaggaaactttggcgctgttaaaatggaatttctcatctgccggcattattaagggtgggctaggttggatggaaggtgaaagggatgaactgccttttgctggaagctgtcttaggctgtgagacaggagcaggggaaccacagcctatggggaactgcccttgactccacctatgttggagccttagcccaaggccattccttctgtgatgataaagcccagttctggaattggagccatattaaggaatgattctcttccagcgctgctcctcaagggttgggggtccttctccctcgcagccaccacatgtctcagggctaccttctccgattggatttgcatttgtggcactgtctttgatgcagtgatgtacttaatggtgcaataaagctgcttcgatttggtaaaaaaaaaa

SEQ ID NO: 65857 - DNA, 5433 bp, Homo sapiens
cggacgcgtgggatcattgaatttgacccaaagtatactgccttcgaagtggaggaagatgttgggctgatcatgatcccagtggtgaggctacatggaacttatggctatgtgacagctgatttcatctctcagagctcctctgccagtcccggaggtgttgattacattttgcatggcagtacagtcacctttcagcatgggcaaaacttaagttttataaatatctccatcattgatgacaatgaaagtgaatttgaggagcccattgaaattctactcactggagctactggaggagcggtccttgggcgccacctagtgagcagaatcataatagctaagagtgactctccctttggagttataaggtttctcaatcaaagcaaaatttctattgctaatcccaattccacaatgattttatcactggtgctggagcggactggaggactcttgggagagattcaggtgaactgggagacagtaggacccaactctcaagaagccttactgccacagaatagagacattgcagacccagtgagcgggttgttctattttggagaaggagaaggaggagtgagaaccataattctgacaatctatcctcatgaagaaattgaagttgaagagacattcattattaaacttcatcttgtgaaaggagaagctaaattagactccagagctaaagatgttacattaaccatacaagagtttggtgacccaaatggagttgttcagtttgctcctgaaactttgtctaagaagacttattcagagcctctggctctggaagggcccctgctcattaccttctttgtcagaagagtcaagggcacctttggagagattatggtttactgggaattaagtagtgagtttgacattactgaagactttctttccaccagtggatttttcaccattgctgatggagagagtgaagctagctttgatgttcatttgctaccagatgaggtacctgagatagaggaagattatgtgatccagcttgtttctgtagagggaggagccgaactggatctggagaagagtatcacatggttctctgtttatgcaaatgatgacccacatggagtatttgccctgtattcggatcgccagtcaatacttattgggcagaaccttattagatccatccaaattaacataacccggcttgctggaacatttggagatgtggctgttgggcttcgaatatcatcggatcataaagaacagccgattgttaccgaaaatgcagagaggcagctggtggtcaaagatggtgccacatataaagtggacgtggtgccaataaagaatcaggtcttcctatcactgggctctaatttcactttgcaactggtgactgtgatgcttgtcggtggacgtttctatggaatgccaacaattcttcaggaagcaaaatctgctgtccttccagtctctgagaaagctgccaattctcaggtcggatttgaatccactgcttttcaactcatgaacatcactgctggcacaagccacgttatgatttctaggagaggcacatatggagctctctcggttgcctggaccactggatatgctcctgggttagaaattcctgaattcattgttgttggcaacatgaccccaacactggggagcctttcattttcccacggtgaacaaaggaaaggagttttcctgtggacgtttcctagccctggttggccagaggcctttgttcttcacctatcaggagtgcagagcagtgctcctggcggagctcaactccgatcaggtttcattgttgctgaaattgaaccaatgggcgtcttccaattttccactagctcaagaaatatcatagtgtcagaagatacacagatgatcagattacatgtacaaagactatttgggttccacagcgatcttattaaagtttcttatcagaccactgcaggaagcgccaagccactggaagattttgagcctgttcagaatggggaactgttttttcaaaaattccaaactgaggttgattttgaaataaccattattaatgatcagctttctgagatagaagaatttttttacattaaccttacttcagtagaaattaggggattacaaaagtttgatgttaattggagcccacgcctgaatctagatttcagtgttgcagtgattacaatattggataatgatgacctggcaggaatggatatttccttccccgagacaactgtggctgtagcagttgacacaactctcattcctgtagaaactgaatccaccacatacctcagcacaagcaagacgactaccattctgcagccaaccaacgtggttgccattgttactgaggcaactggtgtatctgccatccctgagaaacttgtcacccttcatggcacacctgctgtgtctgaaaagcctgatgtggccactgtaactgccaatgtttccattcatggaacattcagccttgggccatccattgtttatattgaagaggagatgaagaatggcacattcaacactgcagaagttcttatccgaagaactggtgggtttactggcaatgtcagcataacagttaaaactttcggtgaaagatgtgctcagatggaaccaaatgcattgccctttcgtggtatctatgggatttccaacctaacatgggcagttgaagaagaagactttgaagaacaaactcttacccttatattcctagatggagaaagagaacgtaaagtatcagttcaaattttggatgatgatgagcctgaggggcaggaattcttctacgtgtttctcacaaaccctcaagggggagcacagattgtggaggggaaggatgatactggatttgcagcttttgccatggttattattacagggagtgaccttcacaatggcatcataggattcagtgaggagtcccagagtggactagaactcagggaaggagctgttatgagaagattgcaccttattgtcacaagacagccaaacagggcctttgaagatgtcaaggtcttttggcgagtcacacttaacaaaacagtcgtcgtgctccagaaggatggggtaaacctgatggaggaacttcagtctgtgtcagggaccacaacctgtacaatgggtcaaacaaaatgctttatcagcattgaactcaaaccagaaaaggtaccacaggttgaagtgtatttttttgtggaactatatgaagctactgctggagcagcaataaacaacagtgccagattcgcacagattaaaatcttagaaagtgatgaatctcaaagccttgtgtatttttctgtgggttctcggctggcagtggctcacaagaaggccactttaatcagtctgcaggtggccagagattctgggacaggactaatgatgtctgttaactttagtacccaggagttgaggagtgctgaaacaattggtcgtaccatcatatctccagctatttctggaaaggattttgtgataactgaaggcacattggtctttgaacctggccagagaagcactgtattggatgtcatcctaacgccagagacaggatctttaaattcatttcctaaacgcttccagattgtcctttttgacccaaaaggtggtgccagaattgataaagtgtatgggactgccaacatcactcttgtctcagatgcagattcgcaggccatttgggggcttgcagatcagctacatcagcctgtgaatgatgatattctcaacagagtgctccataccatcagcatgaaagtggccacagaaaacacagatgaacaactcagtgccatgatgcatctaatagaaaagataactactgaaggaaaaattcaagctttcagtgttgccagccgaactcttttctatgagattctttgttctcttattaacccaaagcgcaaggacactaggggattcagtcactttgctgaattgactgagaattttgccttttctctgctgactaatgttacttgcggctctcctggtgaaaaaagcaaaaccatccttgatagttgcccatatttgtcaatattggctcttcactggtatcctcagcaaatcaatggacacaagtttgaaggaaaggaaggagattacattcgaattccagagaggctactggatgtccaggatgcagaaataatggctgggaaaagtacatgtaaattagtccagtttacagagtatagcagccaacagtggtttataagtggaaacaatcttcctaccctaaaaaataaggtattatctttgagtgtgaaaggtcagagttcacaactcctgactaatgacaatgaggttctctacaggatttatgctgctgagcctagaattattcctcagacatctctgtgtctcctttggaatcaggctgctgcaagctggttgtctgacagtcagttttgcaaagtgattgaggaaactgcagactatgtggaatgtgcctgtttacacatgtctgtgtatgctgtctatgctcggactgacaacttgtcttcatacaatgaagccttcttcacttctggatttatatgtatctcaggtctttgcttggctgttctttcccatatcttctgtgccaggtactccatgtttgcagctaaacttctgactcacatgatggcagccagcttaggtacacagattctgtttctggcgtctgcatacgcaagtccccaactcgctgaggagagctgttcagctatggctgctgtcacacattacctgtatctttgccagtttagctggatgctcattcagtctgtgaatttctggtacgtgctggtgatgaatgatgagcacacagagaggcgatatctgctgtttttccttctgagttggggactaccagcttttgtggtgattctcctcatagttattttgaaaggaatctatcatcagagcatgtcacagatctatggactcattcatggtgacctgtgttttattccaaacgtctatgctgctttgttcactgcagctcttgttcctttgacgtgcctcgtggtggtgttcgtggtgttcatccatgcctaccaggtgaagccacagtggaaagcatatgatgatgtcttcagaggaaggacaaatgctgcagaaattccactgattttatatctctttgctctgatttccgtgacatggctttggggaggactacacatggcctacagacacttctggatgttggttctctttgtcattttcaacagtctgcagcttctagtaccctctgttctactttttacttctatgagatcaacattttttagcttccacacagggactctgacttcaagagagaagaaaagtacttttgtacttacatgcctactgagcccagattccaaaggccttggggttctatgtttccttaacactgaatgggctttccaagtgcat

SEQ ID NO: 65858 - DNA, 723 bp, Homo sapiens
ttttttttttttccccttcccctccaaagtccagggccaccagaactgactttattaaaaaaatgacaaaacaggtctatacatatttacaggctgggagccaggaggctcaggtccgacagcaggggccaggctgctcacttcttggagagcttgacttgcttgtgcttggggggtgcccacttgaggcagacggagtccactgtgatgggtggtttcttatactgggcacttttgaggtgctcctccaccagcttgggtgtgacacagatcacgtgctggcccttccagtacttgaccatattgagggattgcagggtactgatgatgtcattttgggtgatactggtcatctggctgaggtccttgatggacagtgtgcccccggaagttcccgcaggatctccagcagctacaccaggaccagtagctgcggtagctgaaggcttgcccagggtcagacagcggcttctccggggagccgactgtgctctccagcttggagagctcataactgaaacccgatgaggaacttcccgtagccgcggcgttggtaggggggcaaggtcaggatgcaggccacattgtttccatccggggactcctttctccttggagaagtacccacaattgtggcccccctgccggtccaaacttatcaagatgtaaaaacgaacgggttcccttaaaagtacatgtcttatggtccaagaaaagcttggc

SEQ ID NO: 65859 - DNA, 764 bp, Homo sapiens
caagaagcaccatcacaagcgttcccactcaccctcagtgagtaagcgtgtagaagggacatggggtgaagctgggttgttttggggaaataaacactttgttttccccttacaatatctcccttggagggaagtttgaggattcctttggccctgggtcctcctcccctctcgaattcccagacgagggcttctggagggcagagaacctctgcactgacatgtatctgctgatctgcccagggctctgagtcagaagaagaggagctgcccccaccatctctccggccccccaagcggaggaggcggaacccctcagagtcaggctctgagccctcttcctcacttgattcagttgaaagtgggggtgctgcccttggaggacggggctccccttcctcccatcttcttggagcaggtaagcagttgctgtgagcgtagaagctggagaactgttgtcccagactgagaggatgccctccacaagccccagctcctttgagggtagactggattgggagggctgcacctgtggaagtagaaagaacttcctctacctgcccaagcaagaagctggagaaggaaaactggacttatacttcctcagagcatgaggttcctgcctgtgaagaatgaacagaggggctagaacaaagaaaaagagcctgtctttctcctgttgggacttagtagggatttttctatctctagatcatggccttcggaaagccaagaaaccaaaaaagaaaactaagaagagaaga

SEQ ID NO: 65860 - DNA, 1181 bp, Homo sapiens
ttttttttttttgagatttcccaggactggctttaatttgaaaaatctgattggggtctcttcccgtatcagagaaggaacagcccaagctatgaccccagggccagggaattcagtccccaccagaccctgtcattccatcactagggggtaattccaggctccccctgccagccctgagacaggaggacggatgtgaagttgcccaggactagattctgtctctccaaagtggcccaagccctgttctctgtactagggaagccagctgtgtcttttcgaggacagttggtccagccagcaggctcagttcagataccagacaaccattccagcacgagggctcagcgccctggccccggcggtcgctccagtgcctgtgtgcccaccagcacatccatgaggtagtccaattcggcctcgtccagctccggagcttcctccttgcccggcccatcctcagggcctggtttgaggccctcagaggctggtgcccaaagttcattgtcatacatagaggtgtcaatatcctcaaacaggccctcaagcccatcgtccagtagacagccagtggctgggcccagcaggtccaaggcacccaggctgggcgctgctcccccgatgctacggcctggtggcccctcgtctgccaagggttggggagcctgactcaggccctcaatgtggctgaggtcctccaggaggctggccatggaggctgaaagggcagcgtccgagcttgccagtaagttgtcagccacactgggggctgcaggtgggctaggcacaggtggcagggcagccgcgggtgccatggacgcctggatgcgccgcagagtgttcacgaccagcaccaggtgccgcaggtccggctcactctgctgcaggctgtggtggagcttgagcactgagaggtcaaagagggagctagaggccacggccgggggtgcctgtgccaccgctgcgtggccaggatctagccaccaggagtcgactgccagaggttccttctcctcctcctcctcccgtttccgcttcagacccttgctcagcatcttgctcactagcggccaatcagaacgaagaggtagccacccacaaccaatcaggaaacggcggcggcagcatcgcttgttggctgtcctccggaaacccgcgcctgggtcgcgcccacgcgtccg

SEQ ID NO: 65861 - DNA, 1055 bp, Homo sapiens
ctgatgggcagtggggtgtgggggggaggtagataggtatttaggatggaattctgctagacaggaaaatatagttcagttcctcatagttcaggctggagcaagtaagattccagttttaccactgaatctctgagcctgtctcctcatctgtaaaatgggaacagcaatcctagcccagagggttgtcaaagtcactgtgctatcgggcctggcagaatgggagtgagaggggctcagagggactgttacaggacatgaggtgacgatggtggggtggcaaggcaggagctgatggagactcactgagaagtggagaagcaagattcatcacatacgggacataaagggagatggaggggcagggggtagtcctggtctcggcctggtggggaagggcttcaatgggaggaagccagggtgtgaagtgacgggggaggtatagtgtgacaccagagggtactgagaaagacctgggaggcaggatggcggctaggactaaatcctctctcccagagaaggccgagcctcctagagccagagaaggaggcagaggagggacagcaaagggaagaagagatgggaggatgccgtgtgaacaaagccaaggcggggaggagaagaagttattatcagggtgggggtgggctgagggcatggttcaaggcctgatgtctttgcctcctaatgccgggggtcttgctggctgggtcaggccactcacaggaatgggccataatccttggttgacaataaatggacaaagcagctgggtgcggtggctcatgcctgtaatcccaacactttgggaggccaaggtgggtggatcacgaggtcaggagttcgagaccagcctagccaacatagtgaaaccccgtctcaactaaaaacacaaaaaattagctgagcgtggtgcgggcacctgtaatctcagctactcgggaggctgaggcagaagaatcgcttgaactcaggaggcagaggttgcagtgatgagagaatgtgccactgcactccagcctgggcaacagagtgagactctgtcaaaaaaaaaa

SEQ ID NO: 65862 - DNA, 767 bp, Homo sapiens
actgccttcttgggtgagtgcattagctgggtagggtctgtcccggacctaactggatagtgtgggaagcagtggatcgttgtttcaaaaaccatttctttttggaaattgtcacagagaaggactagatttgcggatgcctaccttagctgcaggcgtaggcccacacctgacgcgtaagctgcctaaacggcagctaacgtagatccacccagacgccggaaacgggggaagctcctgctttgcatgggttccgctccctcctgtttgttgtggtgtggagccaggtggcatgtgtggcgatggagtcacggggcgggtgacagaatttatgccagattgtaaaattcctggtttaagtttcccctggaaaagtttcgtaaaggttaagaaacgtgtctgttgaggtcctttaaaagccggtgctctgctgggagtaacgagcaaacgtttgttttagcatctacggcttaagcttccatagagaagtcggtatctcaaagttgcttgaaacagaaaaggacaaagaggttggtggaatagggtaacggataaggttactcttaagaggttttagagagctttccccagttttaggagatgattaatggtcatgaaagtgtgtaaaatatacatgctattggagttgcaacgaaagacataattactgtgcccctttagtgttttcaaacattttccagatctcacatcctataattttagagtttatcatctgaggcagaaacaagacgactggaatctgatga

SEQ ID NO: 65863 - DNA, 955 bp, Homo sapiens
caaagtagtaatatcacggatttggtagacatttttcttatcacaatgcttatttctacaccttcacagcattttcctatgcttaccactttaaggagatcagaattactgtctcagtttggctggggctgctcagtccaaaatttggaactgagatgagttacagatttcagtttagttagagtttctgaattgcatcagaacagctgggtctacttccagagtggtccctcctgaggtttattttgactcatggttctacaggttgtaagggaagcatggcaccagcatctgcttctgatgagggcctcaggaagcttcccatcatggcatatggcaaagagggagcaagcaaatcatggtgagaaaggaagcaagagtgagcgggaggaaatgccaggctcttttgaacaaccggatctcgcatgaagtcatagagtgagaactcattcattactgcaaggacaacaccaagtcatttgtgaagattccatccccgtgacccaaacacctccgggtaggcccacctccaacactggaggtcacatttcaacatgagatttggaggggacaaacatctaaaccatatcaagatttttcatttatttgtctaaattgattcctatgtatttcatatttttggagctattgtaaatgagattgctttcttgatttcttttttcagattattccccattgacatatataaatgctactaatttctgtatgttgagtttgtatcccagcaacttaactgaattagtttacccagttcctagcagttttttggtggagtctttaggtttttctaagtgtaagttcatgtcatctgtgaacaaggctatgatttctttctttccaattttagtactctttatttttttcccttgcctaattgctcttccaggacttccaatattatgttaaataaaagtggtgaaaagtgaaaaaaaaa

SEQ ID NO: 65864 - DNA, 951 bp, Homo sapiens
acgaaccggagggctagagacagcggccgagaggacgagccgttcagccccagggccctgagggcccgacttgagaagctggaagccatgtaccgccgggccctgctgcagctgcacctcgagcagcggggaccacgtccgagcggggacaaggaggagcagcctctacaggaacccgactccggcctccgctcccgggactcggagccctctgggccctggcctgtagccgaggccgcagccgatgagaggcggagcctcgagcgggcccctcctcctccgttcccagctacccccgacctcgcgcacgccctggcccgcgccctgcccgcggataccttggactacggtgccttcccgcccccaccagtggacacttccgggtggcgcttggccatccgcttggtggaggtcgagtgggtgcaagggccctcaggacctcccacatgtacagttcccctgcctcttgccccggctagtttccctggagagaggcctagccaacaacgaagggacggattttaaaacagcgagaactgggtgccaagaaacacttcatattccctgaacttttctggatgttgtgcgaacctgttgtattttttttttcctgtattttggttctgagggatgagtaatgtgtttttagttcgttgagtttatccattcttcaatcccctaaagccttcagctgttctttcatatgtggccaacattttaagtacagtgtttgcttttataagtcggtgttacttggatgtcctataaaatacccactttttataaagatgatatttataacctaggaactcatgcctgtcttggctgcagtccctgtacatctaatatatactgatttgtttgcccccagagaatttttaaggtatctgcctatatcgtgatcttttgaaatggtaaataaatctggtgcattaaaaattaaaaaaaaaa

SEQ ID NO: 65865 - DNA, 1842 bp, Homo sapiens
aagtacaaaataatattttaataacataggaacatgaacatgaaaacaatgtaaacaggttagaatttttggatatgatacctaccaaacgtgatttggaaccgtaccgcaactgggtaaaatttctatggcaaaaggattaaccaaggcatatcataggaaatccactttgcccaatataagcagttctcagcacatactcaaatgcacacaaacatgaaaatcggaaataaaggaatgttaaaaaaataacttaggcagacacaaataaaaccaccccactagtgtatgaatgatgccacgtttcttatgatcttaattacatttaaggatttaaaaaatgccactgatctcacagtttacaatatccaaatcttcaaacctgctggaagaagtcccacagcacagcctggaaattcgcatccgttgcattctctcgtgcagttacctgcttatgggctgtaccttctgccttgatatgtagtcagttcttcctgaaggatggaagctctcttttgcagaaaattaacctgtgattttagggaggaaatggtgtcttcaagttcttgtcttagggatgctggcatcaatcctttcaattttgtttcatattcttgtcgtatgtaagttatctgttcctgtgactccaattctttgtgttgtaattttttctctgcacatcgcacctgattagaacggttttctaattcatcttgtaaaaccttgattgcttggtcattatctctaatcagctgcttcttctcatcttcaaacttttgtctaacatcctggagccgcctttctgcagcaagctgctgctggctgttctcttctttcagagaggaaatggttgtctgaagttctgctatgatctgtgaagatttggcaagcttctgagtgtattccttctcaatctgcttcagcttgctgttggccttttccagtgtcatctctgtctcagcagcatgagtctttttcagctctattttcatcttttctgattcagccttcagtttattgacgacaatctcatgttcccttgtagccctttgcttttcctcttcacgaagaagaccaagctctaccagctgctgtttccgctgtgagttcacattgatcaattcttctctcaacttgtgaacctgggcctccatgtcggcaataacctgtgcatctcgtttcttgaactcctgaatttgattttcgtgctccatattggcagcgcgaagctgtttttccaggttttcaatttcccgttcatggtctcggactaggctatccttctctgcgttatgctgctgtaataggtgcgtcttctcctgttcatgctccagcttcagctctactatctgttgttcataccgctgtctgatgtcctccagttgccataaaaactcctttgattgtttctcacgaagagatttggatctagttagatctgcctccactttttccatttcaaagcttcctcaaatttatgaattttcttttgagtatcttcttttcctttatcaagttcactctgcaagtcatgagcctttttttcatagatgtgttttagatgacttttctccatctgaaacttattttcttgatcccttagttgttgctttctttgaagttctgattcctgtaactgctgttttaattgacagacattctgctctaattcttcaatcatactagatgccttagaagctgaaagagcatgttcttgttttagaaggtttatatcagcatcatatttggtttgtaacagtttcatgttttgctcataatcatttacaagatggtccttctctttatgcagtgtgttacgccttgcctttacttcttgtaatt

SEQ ID NO: 65866 - DNA, 856 bp, Homo sapiens
  misc_feature (1)...(856): n = a,t,c or g
cccaggagccctcgcagcagccaatccgcttctcactccgcagctatcagacagagaccctgcccatgatcctgacctccaccagccccagggcaccctcccggcagtccagcacagccacgagctccagctccacaggcggctccatccgcaggttctcctttgccagggctgagccgggctgcctggtgccctcaccgcccccgccatacaccaccagccactcaatccacctggctcagccatctggtttcctggtgtcaccccagtatttcgcttaccccctccagcaggagcccccactgcctgggaagagctgtccagacttcagttccagttgacacgcccaggccatgaatccacaactcagtcagatggcagacaggtggagccctgctcccattgccacatgcaattctgagaaaatttcccttgtaactgatcagtgtcatggaggagcatgctaggaaaacacagcaccttctaatttgaaagttcctgtctccaatcacagaaaggctaaaccagagaactgttttctggttttgcaaacatgtgatcattacatttcaatctatgctacttttattcaaaatatgcagcagtttgactttaaagttgcaaactggctaaaaacgttttactggacattcagctatattgcttagaaaagggctacatgtttctttttcatataagttgttcattgagttatgataggaatatattcataaataagcaaagaaaaatacctaattgtaattatcaaaggttcacttaaaaaattaactattaggtaaacttaagggggcagtgaaanaatctatttatgatttcgggagtaacccnaaccatg

SEQ ID NO: 65867 - DNA, 1293 bp, Homo sapiens
  misc_feature (1)...(1293): n = a,t,c or g
ttttttttttttgacgcggggagagatttaatttacatagcagccacttggggtccagtcagagctggggcagtgggggaatctataaccccagagggtaccccccagacccccacccccgggagaccagtcctcaccaacccttggatgggctcccaaggttgtgcagaagatgctccagtcaaaaggatagagacatttgggaaataaaggctgtccccaaagttggggggaangtccacggcctgggagtggatagcctacatggtggccccagggggtctgagagaccagtcccatgtccctgggcgagtccttcagcctgggtggccctagaggaaagccttcgcgggcggaaactgttccctggaggagggcgcggtactggtcaaaatccttcctttccacacgggtgacgccgccttccttagcatacccacaacttcccggcacaccagccttgataaagcgcttcattcgtgggacaccagaatcacaccaacccctgaaattgtttgaaggcaaggccccagagcctcaatggctctcccatgtccaaggtgggtttgtgggttcatcccagaatgtagaaagttggggcagggcaatagtccatctgagcaaaaggccacttcggcttctttctggcccccaagacaggctggcaaagaggacgcatggcccagttctccggagatgcccataccgaacccaagctggtgacnggtactcctcctcaggccgccccaggaaaacttgcgtgcccagcaagttcccacaagcactgaacgtttaggtcccagctgctcccacatggtgctggctgaaatagccaatcttcagattcctgtgagcgtgtctgatgccccgaacaggtgccaggtcccccaaaagcagcttcagcatggtagacttcccagccccattctctccaaccacacagatgcgagactcgagatcagcagacacagagaggcgactgaagatgacgtgcttcggatcgtagtagaaatccacctcatctagctgcagaattggcggcgagaacttctcaaacccatcagggaacttcattacgacctctgattccttgtccacaggcttcagctcaggcctgggagaagagatgaggtagactagatttattacttaaaaaaataacttcctacacgagtaatatatgttcagagaaaacttagaaagggcttgtactcctaccactcaggtatcattactttagagtccattcttctcatttactgtatgctaaaaaatagaattaggctttttgtg

SEQ ID NO: 65868 - DNA, 2002 bp, Homo sapiens
ccaaaatcatgaaagtcaccgtgatgaccccgtaggaaaaggaggaattcgccgtgcccgagaatagctccgtccagcagtttaaggaagaaatctctaaacgttttaaatcacatactgaccaacttgtgttgatatttgctggaaaaattttgaaagatcaagataccttgagtcagcatggaattcatgatggacttactgttcaccttgtcattaaaacacaaaacaggcctcaggatcattcagctcagcaaacaaatacagctggaagcaatgttactacatcatcaactcctaatagtaactctacatctggttctgctactagcaacccttttggtttaggtggccttgggggacttgcaggtctgagtagcttgggtttgaatactaccaacttctctgaactacagagtcagatgcagcgacaacttttgtctaaccctgaaatgatggtccagatcatggaaaatccctttgttcagagcatgctctcaaatcctgacctgatgagacagttaattatggccaatccacaaatgcagcagttgatacagagaaatccagaaattagtcatatgttgaataatccagatataatgagacaaacgttggaacttgccaggaatccagcaatgatgcaggagatgatgaggaaccaggaccgagctttgagcaacctagaaagcatcccagggggatataatgctttaaggcgcatgtacacagatattcaggaaccaatgctgagtgctgcacaagagcagtttggtggtaatccatttgcttccttggtgagcaatacatcctctggtgaaggtagtcaaccttcccgtacagaaaatagagatccactacccaatccatgggctccacagacttcccagagttcatcagcttccagcggcactgccagcactgtgggtggcactactggtagtactgccagtggcacttctgggcagagtactactgcgccaaatttggtgcctggagtaggagctagtatgttcaacacaccaggaatgcagagcttgttgcaacaaataactgaaaacccacaacttatgcaaaacatgttgtctgccccctacatgagaagcatgatgcagtcactaagccagaatcctgaccttgctgcacagatgatgctgaataatcccctatttgctggaaatcctcagcttcaagaacaaatgagacaacagctcccaactttcctccaacaaatgcagaatcctgatacactatcagcaatgtcaaaccctagagcaatgcaggccttgttacagattcagcagggtttacagacattagcaacggaagccccgggcctcatcccagggtttactcctggcttgggggcattaggaagcactggaggctcttcgggaactaatggatctaacgccacacctagtgaaaacacaagtcccacagcaggaaccactgaacctggacatcagcagtttattcagcagatgctgcaggctcttgctggagtaaatcctcagctacagaatccagaagtcagatttcagcaacaactggaacaactcagtgcaatgggatttttgaaccgtgaagcaaacttgcaagctctaatagcaacaggaggtgatatcaatgcagctattgaaaggttactgggctcccagccatcatagcagcatttctgtatcttgaaaaaatgtaatttatttttgataacggctcttaaactttaaaatacctgctttatttcattttgactcttggaattctgtgctgttataaacaaacccaatatgatgcattttaaggtggagtacagtaagatgtgtgggtttttctgtatttttcttttctggaacagtgggaattaaggctactgcatgcatcacttctgcatttattgtaattttttaaaaacatcaccttttatagttgggtgaccagattttgtcctgcatctgtccagtttatttgctttttaaacattagcctatggtagtaattt

SEQ ID NO: 65869 - DNA, 607 bp, Homo sapiens
  misc_feature (1)...(607): n = a,t,c or g
ctcaaagagatcttcagccatacgcatcatcataatcactgtcaaaagacagatttttctttttttagaattttaaatgtaccttttaatttgctcctggggcaaagagccaggactggtactagagcagtgtctgggatgagaagaatttaataaaatgggattaggtccaatggttgggttaggggaggcaacctgctcgggaggatcagcctcaacctatccatgcagcagggcctccacctgtccctctccgtagtcccacacctggaacccagagccatctgcctcttcccagatcatggccgacagcactccaccagactgcggctggagcaggcacaggattcacttattgagggctgtggcctggcacaaatcatagcctatacccagggacagttgtgtcacttctgccaccaccacatccgccttctgcagccacatcaagtaccactcatggatgagcccgtcacccccagcggacttatcaaccccgcgtccagctccacagccgccacgtgctcggtgagcactggctccaagcatggcagctgccatacaatccacctgtagaggggcccgnccctctgtgctcaaaggatgg

SEQ ID NO: 65870 - DNA, 1187 bp, Homo sapiens
ttttttttttttctaaagctttatttattttataaaatgcatagaataaattatactagtaacattttaaaaattaacatctttgtattcagcagtcctgggtcaggaggcaggaggagagtagtggggacgggatggctcactgggcagctaacccgtgtaggccacttcctcctcgtcactgccatcggggaccgcgtctgtcccaaagtagcggtcgccaaagttcccaatgcctgggatgatgcggaaaaggtcattgacccgcttgtccaccgccgtggtgatgattctcactcgcggaaatgcataggccactgagtgcacgcccatctctgccatgagcagcgacagcaaaaagatcttgtcctcaggcacgtcgtggtccaggagcacgcgcactgccatcatggccgccgcgcccgtggacacggtgcagtccatgaggatcacgtggtcatcgctgatgtccttgggcagcctcaggtagtggagctcgggcagcaggggtcaggctcgggctccccggtaagctggttggtctggatgaggatggtgccgatgcgcacgtctttgcacacagcgcgcagcgcgggctccatggtttcaccggcgcgcagaatggacacaccggtgatctgcttccccgcatagcacttgcccgcatagtcctgcccctgcggggtctgtacgacgcagtcctgaaagggcaggaaggagagcgcgtgctcgatgagcagccgcatcagtctcttggagtagaagatgaactcgtcgcgactggtctccttgtccctgatgatggtgtgcatgccccgtacctgcggcgtgctcttcaggacgctcagcgtccggggcagcgggtggcactggtgtgccgaggccagcgcagccctggggacaaaccgatggggaacactcaagaagggggtcttttcccagagccctccctccccacaggacggctgtgcgtcactgtgaggggaacacacgggccaggcacagcacgaggtgcagagcgggcctgacttctgcctggggctgagctggggggagacgtcgccctacctgagctgtcaggcaaaggcgaaagatggcggcgaacaacggggcaagctcaccatcaggcagaaagctagcggggtaggctgtgagggcccctcccagtgcgggaccggacgcgtggg

SEQ ID NO: 65871 - DNA, 1586 bp, Homo sapiens
ttttttttttttatactttatgctttacttcttacttcaaacatacatccttgattaaagaacaaaaacaactcactgaagggtgataaaataatcaaaatgtatttgcccctgaaagtggaattactacctcaaaaagaatacaactctttcattttccccaaaataatcatgtgagttcatgggcatgctcatcactcgctgtctgtgtggaaaaaaaaaatcgaagaggggatttactggactgaactggcctagggagcctttgctgggcatctctcaggactgggactgcaggcccagatcccttttactcaggatggcatggcacttaggaacatggaaaacagttaaggataaacggctgggtgggtatttatttaccttatattgcaggaaacatttttatgacttccctaaccctggttttccaattaggaaacatcccccacttaatggaaattgtcaataaatgctggctcaaaccaccctccccaaatactgaaaaacagtacatccgtttctctggtacccttgccaagttgtctgcaaatgctttgtcgatttttctactgagttagacaaacttgtgatttttttccctttcttaacacaaatttaaaaagtaggaaacaaaacctagtggataaaatgacatattttcaatatgagttctgtggcagtctcacatggaagtcaggagtaacagcctcaattcctaaatagctgtttaccactgcttttctgagcatatttaagtaatacagaatataaaggagcaaacaaaatatgaagtttataaaagatttcaaacacttttctaaaaatatgaggcccatattttagaggtatttcattccttttctcaaacaatatggagatttataaatatgagaatatatagatatacagaccttaataaatgaagtgttcttaaaaattttatatggaaaaccagttagctttaatttcttcacaatttttatggatttatccagatcaaggacaacttatgtggcagctatccgaaaatcaggctaacaggaaccccaaaatttgaaaataggaataatattagcaagagaaaaacttcaattctatgtgacacaataaattaccaaagtgaattttacttacaattagctaagaaaaacaagaaagaccatctgaacttgcaacccagtggcttgacaaaagcaatccaaaactttaaagttggtaagccaaactaacaagggtgacttgaggctgggcacagtggctcatacctgtaatcccagcactttgggaggccaaggcaggtagatcacctgaggtcagaagtttgaaaccagtctggccaacatggggaaatcctgtctctactaaaaatacaaaaattggctcggcatgatggtgcacacctgtaatcccagctactcgggaggccgaggcaggagaaccgcttaaacccaggaggcagaggtcgcagcgagccaagatcatgccactgcactccagccccaaaaggctgctccacaatggatgtgctgtggcgtatactttagaagcctttgtcttcccggacgcgtgggcggacgcgtggg

SEQ ID NO: 65872 - DNA, 1012 bp, Homo sapiens
gaggaaggctctcccgcccatgacgggatgggaaaactatgcctggggccgacgctctgcccggctgctgccgctgaggaaagccgggacgcggagccccgccgagagcttctttgctccggacgcccctggacgtggcgggcagccgcgagggtaaccaccatgatcccctgggtgctcctggcctgtgccctcccctgtgctgctgacccactgcttggcgcctttgctcgcagggacttccggaaaggctcccctcaactggtctgcagcctgcctggcccccagggcccacccggccccccaggagccccagggccctcaggaatgatgggacgaatgggctttcctggcaaagacggccaagatggacacgacggcgaccggggggacagcggagaggaaggtccacctggccggacagtgaccaagaagctacccacgggagcggctgcccatcaagtttgacaagattctgatgaacgagggtggccactacaatgcttccagcggcaagttcgtctgcggcgtgcctgggatctactacttcacctacgacatcacgctggccaacaagcacctggccatcggcctggtgcacaacggccagtaccgcatccggacctttgatgccaacaccggcaaccacgatgtggcctcaggctccaccatcctggctctcaagcagggtgacgaagtttggctgcagatcttctactcagagcagaacgggctcttctatgacccttactggacagacagcctctttacgggcttcctaatctatgccgaccaggatgaccccaacgaggtatagacatgccacggcggtcctccaggcagggaacaagcttctggacttgggcttacagagcaagaccccacaactgtaggctgggggtggggggtcgagtgagcggttctagcctcaggctcacctcctccgcctctttttttccccttcattaaatccgaaacctttttattcatccaaccatctatttattcactt

SEQ ID NO: 65873 - DNA, 1991 bp, Homo sapiens
ttttttttttttctgatccatgcatcctttattccattaccaaccactgtgccgcatccaagcaacagtacacaaactggcaatcaaccgcagtccagttgtacaacgatctgaggcttacagtacatttaaggcttttaaatgtggaaaaaaaaattaaaaccaaagaacccccaaatccaaacccctaaccaacacaagtagtatagcaatgttaagcatctcctatttctgatgcttatttggcgcaacttccagtgtcaaaacccaaataattcctaaactaaaaagattagtttagtgaaattttaattacataaattcttcaaagcataaacttggaatttttgtcttggaaatgttataaaatttttaatagcaaaacataggaataaaaacatattaacaaaatgtattcaatcatttacattacaaacaaggaatctgcagttcattgttgtagcctgacaaaagaaatcatatctaccattaagaatctatgcacaatgtgattgcaaatatgtacagtactttaaaaaagcctacaaggaggactttacagaaggaaagtcagctaggctctttgttaaaccaaccagacaatcaaaatagtaaaactctgttggctagtaataaatttacacttaaaaaaacccctagtttctttttgtttaagaatattccagttatatttatatggttacagttgatgaagctgtacacgagagttccagtaaattacccttcagttcatttgtccgggaaagatcagcatgttaacaaaaaataataaaggaattttcaccacactagctttccagttacactatcacagcttcacaaatggattgaacccatgtatccagtggcagaaagagagctgcatgtgaaataccgagaacattggtggcaacagggcaagtcctgcatgaatgtcagaaatgatggataaggttgagaaacagatgcgaggctactttatacagcactagaaaattgtccctacattcagctctcattcccattcctgcaaggtaatgaagctgggaatcacgactgttcagtttaacgtgttgtgtgaattagcagaaccacctctagatacaaaagactgagatttcatcagctctttgattagaacaccctaaaggttgggcacttcttcatggttatcaagcctttacagctacccagttaaagcatgtgcaaaacagaggactcttctgttcacagtaaatgaggtaagatcaagttgttgtcttcaggaattaggaagttcgtgagatatgaactgttttagtctttctaggtattgtgcataaagctctatgtcattatgcccagccccttcaacccaaaggggctccacggctcggggacagcgctcgtacatcgctaggccatgggagaaatcgatgacctcatcctctgtaccatgaatgaccaacacaggagaggtgactttagatatcttgtcaatgctggggaaagcatcaaagcagtatgttttcctggtatccggaaaagccacacgcaaaccagacatcagaggggaatggagaattaccgctgcgcattcatacctcgaggccaagtctaccgtggggacagtcccaatgctctgaccatagaggataatgttctcgggactcacgccataccgggtgcgcagcgcctgccacgcggcgtcgatgtcggcgtagaggttcttctcggagggcttgcccgagctgacgccgtatcccgagtagtcgtaggagaagatgttgcagttgatgcgggagccgaggccaatgtagaagctgcacatctggcccaggtccacggcgttgccgtgcgagaagagcagcgtgtagcggctggagggcgcgcagcgcacgaacatgcagccgagccggttgtcccgggccgtgcgcgagaagaagacctcgacggcgttccagcccgctgcgagtattgccagtcggcgcgctcgctgaggtgcaggctgc

SEQ ID NO: 65874 - DNA, 872 bp, Homo sapiens
tttcctgtgtgaccaaagccaaaggctaaacctggctgcattttattggatgggtgatggaagtgggtgggagtactatggtaaaggagggatatatgggtgggagccaccaacaaaagtcccccatccccctcccccaacagaaaggagagagacaaccctttcccctcaggtgatctggaattccagggcctctgccagctttgcaggaggtgcacagaagctggatgcttttggtctggtggccatgagctagactctgttgcctttggttgcttttcactccacagcaaacccgcaggtctcctccacggctgtcagcagcttctcgtagagcttctcataggactcatatggtggaatgtcgatccggttaaagcaggtatgggccttcggaaggttgtctgtgttcgcgtctatcaggtggatggtgaacagccggggccctgccgcgcctgtagatccttgcaaagccttgaagccttggagcgggactcgcgtggacccagtcacaaactgcaggagcctggccctcctttcttcatcgaacgtctccaccgcttgccagaaccaccgcacgatgttgctgtcggccacacagtgcttcagccgcgtgttcgacttccagtcgttcaagtctattttatccaggccgcctatgatcagctccagttccttctggtcaaaaggcttcagcagatgttgagggatgagctcattgaaccccttctgcagagctaagaactgggcttcgattcctctcataaacctccagtttacatacaaccggacgtatttctttcctattctgctcctgtgactggcacattctgcccattgggtttcagttacatgcgcaggattcggccgaa

SEQ ID NO: 65875 - DNA, 2434 bp, Homo sapiens
accagtaataatagttttatttgattttaaaatagtcatcaatgtgaaaatttctcaaagcttaagagtaacagtctagagccaaggttgggagtgggggccaggcctcacacagagcccagcttgaggcccctgagccccaccctcctttccagagggagggaggagacagctgagggggccctgaatcagtcctctccctcgtccccaaggccagctgtgccaggcccctggagggcaacagctcatgcggaggactggggggggaagcaaacaggtaggaaacggaaatgaggttaacaattacaccatcacccccaaaaaaaaacaaaataacaaaacttgtgactatgaaaggatggaagatgaatactgataaactcctcagctccccagaaaagcccagtctgggctgggttgggctgattggaggaaaggtcttgagacccaactgcatgttacctctgaagaataaatattctaagaaaaagggaaaaccatgaggcaagctgctgcagtcagtcaacgcagctgacaggcctggcatggcccacaacctgaccccatccacacaggaaacagctgtgcgggtctggatagaggagaggtcaagggcttggactggggaccctgagctgccaaggtgtggggactccttgcagtcctggtgcagcaatggcaggaaggccagcaggggccctagttgagcaggttgccctgctcctgggcctgggtcaggctgtccttgcggtgcaggtggtgaacccccatcctcttggggctgcgctgggggcgactggagctggggagtggccaggccctgccctcggtgtgggaagtgcctggcccctcctctgtgcccctgttaatgggcagcaggctctggcgctcttcctcaggactgataggcaggttcagctcttcttcctccctgggaaagccagagtcaggttctgtgggtagcaaaagctcactctcttcgggtcgggcagaaggtgcctggaccacctcatctctgtcagcggggctatgggcaaaatggcgctgcagctcagggagggcatcgcgtccaaaggctgtgcgctgggccacagcagcaggtggtggagtacggtccacaaatgcccgctgccagctgaccagcaggtcctcttcagagctggcagagctagctggggcactgagtgttaggggtgctgggctgggctggtggtggggtgaggcctgggctgaggcaggggtgctgggcactgggctggggcgggcccgctcactcccctcctctaccaggctcagggaaatggcctggcgggtagcgtaagtgcagttgggcagggggcatgttgcgggggatccgaaccttatcctcagagaactctattaccctgcggccaggatacagtgggtgtggtggagacggggttgggtaggggttcagcttctcaaaggctggcaggggcagctcttcctccggggagcccctgtgagtacccagagagtggcactccccattgtgttgtggggtggggctgccatgtgcccgggggactggctggaataactgggacaccctcactcatgtccacatgcacaaagacatcctcagccaaggggcgcccggcgctgcctgactgggctgaattgagcagtagagactccggcttctctaacactcgggcaatgactgaggtaggcaccacagcccctggggctaggctgggagcaggacctgggctggcggcctcttgaccactgtgcaaatgtttccgaaccatgtcctgtagctcacagggcagctgaggtaaaagagcaggaaagagagacatcaatgatcgcagccaaagataacttgactcatggcgaaagtaatggctcccacctttaagtacctctgtgtactcagcactctgctatctcctgttcttacagcatgccagtgtgtataccctcacttcacagacacataggcctggagaggggaagacaactcaaagctttggttaacttggccaagatttaaacccggatctgctgctgcagccagcatgttctcaaacttctatctcccagcttctgcccaaaccatacttaagtttggagaatctgcatagaccagtagccttagaaatacctctacttctgggccgggcacagtggctcatgcctgtaatcccagcactttgggaggccgaggcgggtggatcacgaggtcaggagatcgagaccatcctggctaacacgatgaaaccccatctctactaaaaagacaaaaaaattagccaggcgtggtggtgggcgcctataattccagctacttgggaggctgaagcaggagaattgcttgaagccgggaggcggaggttgcagtgagccgagattgtgccactgcactccagcctaggtgacagagcaagactccgtctcaaaaaaaaaa

SEQ ID NO: 65876 - DNA, 671 bp, Homo sapiens
  misc_feature (1)...(671): n = a,t,c or g
ggcgtgtgctgatccgccatcccactgtggagatgaaggtgtgtgctgatcccccatccccctgtggagatgaaggtgtgtgctgatcccccatccccctgtggagatgaaggtgtgtgctgatcccccgtcctcctgtggagatgaaggcgtgtgctgatcccccgtccccctgtggagatgaaggcgtgtgctgatccgccgtccccctgtggagatgaaggcgtgtgctgatcccccatccccctgtggagatgaaggcgtgtgctcatcccccatccccctgtggagatgaaggcgtgtgctgatcccccatcccactgtggagatgaaggtgtgtgctgatcccccatccccctgtggagatgaagggatatgctgatcccctgtccccctgtggagatgaaggggtgtgctgatcccccatccccctgtggagatgaaggtgtgtgctgatcccccatctccctgtggagatgaaggggtgtgccaatcccccgtgcccctgtggagatggaggcgtgtgctgatccccatccccctgtggagatgaaggtgtgtgctgatcccccatccccatgtggagatgaaggggtgtgttgatcccctgtccccctgtggagatggtgtgtgcgaattccaccgcntggtctaatggtcatcagttcaag

SEQ ID NO: 65877 - DNA, 1897 bp, Homo sapiens
caacagaatagaagtcagcatcggaatctcaatggtgcgggagatagaggaagtcaccggagcagtcatcaagatcatctccgaaaggatccatatgccaatctcatgttgcagcggtaaaaggattgggtctctaaaatccagatgatgcaactgcaaagcactgatccctacctggatgatttttattaccagaattactttgaaaaactggagaaactgtcagctgctgaagaaatacaaggtgatggccctaagaaggagcgcaccaagcttatcacccctcaggtggccaaactggagcacgcctataagccagtgcaatttgagggctctttgggaaagcttaccgtttctagtgtgaataatccccgaaaaatgattgatgctgttgtgacatctcggagtgaggatgatgagacaaaagaaaaacaagttcgagacaagaggagaaaaacccttgttataattgagaaaacctacagcttactccttgatgtggaggactatgaaagacgttatctcctaagtctggaagaagagcgacctgccctaatggatgacagaaagcacaaaatttgtagcatgtatgacaacttaagggggaaattgcctggacaagagaggcctagtgatgaccactttgtacagatcatgtgtatccgaaaagggaagagaatggttgcccgtattcttcctttcctctccacagagcaagcagctgacattctcatgacaacagccaggaacctccctttccttatcaagaaggatgcacaagatgaggtgctgccatgcttactgagtcccttctctctccttctctatcatcttccatcaggtgagaatcaccagccttttgcgacagctaatgaacctacctcaaagtgcagctacaccagcactctccaatccttcaccttcactgctgtgcttccaggaacaagtttggcctgtcactgctcctcatcctcctgagccgtggtgaagacctacagagttcagaccctgctacagaatcaacacaaaataatcagtggacggaggtgatgttcatggcaacacgagaacttctgcggattccccaagcagccctggccaagccaatctctatacctacaaacctagtgtccctcttttctcgctatgttgaccggcagaaactgaacttgctggagacaaaactgcagctagttcaggggatacgataaaagatctccaaatgtgtcctgtacctccttttggctgccacctgcactgctgccatcaccaatggagtgtttttaatgagggaaggaaggtagctttttccccaaagcaaagtcttgtgggatcgattcctgtttacaggggttgtctctctaaatgtcagatatttccccactgctctatgaaatttggctgggtgatacttctgctggtttctttaccttctgtgttacagttctgcatgtcctacttttactcagttctgttttgcattttctttgccctagagacacaagtgtaatctctccctttatccctccacttactccacctcagagtagattgtagcctgccaaaggattccttccctcatcctattgaagttgttttttcgttgcccccatattaatatgactatagaagagccaattaagtagaaatcaagatatacacacacacatagatacacacacacacaccccatacatgtatttatgtggtcttcagagggtccttaaagaatgaattttagattgaaaaatatttagttgtctcattacctcttctaaacacaaaccagctgatgtattttaatctgtttctgttctatcttgtaattaatttggtgggttccacctgttttaacataaataaagagtatggcaggcacgtttaataaaaaaaaaaa

SEQ ID NO: 65878 - DNA, 1858 bp, Homo sapiens
ttttttttttttctggtacccaaagggtcctttattctttatcatcctatttgagttttattgtttttacacagctgggaaatgcttaaggtacaaattaataaattttaaactcagtatggaaaatacatttaataaattaaagcaaaaaccaaagatctgaggagatccaagagatcaagacaatctgtaaccagagtctgaagtatccaaggagctactttttttggaggcatattctcctcagcttccagttatcatttgataaacacatcagcaaaaggttcagtgttttaaacaaatgtagactttattttgtactgtacaaagtgctaatgtcagtagatccattaaaatatagaatatttaagaaagatcattaataaaagtaatggtcattcaatttaatgttacagtttacagcgttttactgctagtgttttaagtcagcatgagcagtatcaaagtacttatgtagctagtttctaaaactttacagaaaacccagtacaattccaagtgcttatagccaatataagcatatttcatattagaaatagttatccatatgttaacaagaaactatggtcctcaaatatgccaattttagagtctaataactactgatagtaactatgtaaatattttggaataaacagttatttacgcaagccacacttcagctgagatgatcactagacatctgtttccagagcttcaacaatgtgtgcagcagaaggacgatctttagggtcttcattagtgcatacagagaagagttcaattactttctggtatgattcatccagttcttccatattaataggtggcctagttcccaaggctgcatagtatgcttcatcatcaaaatcactttcatcaaaagttttatcttcatcatcatcatcatttgaaagattaatgtgtggaatcgataaagtcatcatttcccacaaagtaaggccaaaggcaaatatgtctgccttgtcagtaataacaccattctcctccacagcttctttgggtttccatggctctgtgccaatgtaacaagcctcagggtcagtcacagtcatattttcatccagtggtagagagactcctacatcacagattttaattgtttcaaaatcgcctttaattacaacatttgaagactttatgtctccatgaagcagtttcttttcttggtgcagatactttaaccctcttgccatattcaaagcaacttttaaaattatggctgctggaaaaggatcttggctggctttatatcgttcttctattaagtcatttagagacttttcacctccatattccatagcaagacacagactgccatcattggcttcagtaaaagcacgataaccaacaatgtttggatgatgaaggcttttcaaaatcttagcttcatccattagtctcttttgatacacacttcgataatgatcattacatataggattaatcttttttacagcccaaggagaatgagacaaacctcttggagatcttttcattaggtacacatttaccccagtaccaaagccaagcttctgcataaacggagaggccgggatatttatagttggagttgaacataatacagatttctttttttctgataatttgcttggtgtcttgaaattactgatcccttccattgtgaaagccactctcagtccagagtctcaccgcctggaaggaaaggtcggaggtgaaaataagtcgtggccaagtacctcttcaaaattggtcccgagcggcccccagcgagaccctgcagctgcctctagcaccaacacatacgcccggcagctgccgttgcaattcgaacctcgtgccgaattcgaatcga

SEQ ID NO: 65879 - DNA, 354 bp, Homo sapiens
tccacatcaaaatcccaagcaagcggttttataaaaactgacaagctcattttaagtcatatggaaatgcaaagggcctgcaacagccaaaatatatttgaaaaagaacaaagctaaaaaactgttgcaacctgagttcaggccttttataaagctgtagtaatcaagacaatgtggcattgccaccaaaatacacaaataaatcaatgaaacagtactgggagtccagaaatagatccatacatccatagacaactgatttctgacaaaggcaaaaggcaattcagtaggaaaagcgtagtttttcaacaaatacaactgaaacaactggacaatcatgcccaaaaaagcctt

SEQ ID NO: 65880 - DNA, 1498 bp, Homo sapiens
aaaccctcaaatatatggtcaagtaattttcagaaaggatgccaaggcccttcaatggggaaaggacagccttttcagagtggtgatgggggatctggatagccacatgccaaagagtgacattggacccttataacatattcaaaaattaactcaaatggacaaaaatataaacataagagctaaaactttgaaattcagccttagtttgactgctagaacaaagtaccgtagaccgggtggcttataaacagcaaacactgatttctcattctggaggtcagacatgagagaccacagtgccagcacggttgggttcggatgaggccactcttcccggtggcaaactgccaccttctcttgtggaaagagcttgctagcctccagcctcttcttataagggtactggtcccattcatgaggactccaccctcattacctaattacctagcaaagattccacctccaaataccataacattggagtatttcccatctccccccaaaaaagtgccaaatggtctgatgtaaaaggaaaaaaattcagtcactgtgctccagatctgcaaattgcacatcttgattttcagcaccataaagacaatcatttggaagatccggtgatattttttctctttaatgcaaatgttttggtgtcaagcagattgaatttgtggggaggtgtcctgttagtgtggctggtcactgaccattcagaaggaagaaaatgtgaaacagattgctcaagtgtaaaggagtctgaaaatgtctgtcctcaagcctgcaagatttggaaccgttctgcgtcccttttccatagatataggaataataagtctggattcagtagagtcatttgaccagccagcccctcagggtggtccctgggtctgggcagccatgctctccggagctgcccttgggggcaacttccagggccaagccagagaggccagagctctagactaacgttagagttccaagtgtacgcagcagagaagacagctatgctgtgtgtgtgtgtgtgtgtgtgtgtgattgtgccttctgtggatatcggctagggactgtctcaggaaagcctctgcctttggcgtgtttactggctgtcaaaaccctgcccacagccttatagacccccaaagaaaaatgttctcatccttactccagagatgttcaaacaggagtgattgtctgacagtgactacactcacaggagaatgacaaacagcaaggcccagctgtcccttggtaccctcaggggattggttctaggacctccaaataacaccacagtcccagcatgctcaagtcccgcagtctgtcctgctgaacccatggacaaaaaaggtcggcccctccgtatgagaggcttttccatctcatgaatacacattgggttgaaaaaaatctgcgttttagtggaacagccaggtttaaacacattgttgttcaacgggtccacttgtattcattcacaatacagatttcattttag

SEQ ID NO: 65881 - DNA, 2072 bp, Homo sapiens
ttttttttttttgctcataaacaattttattttttttctcagtatgtgcccttgaagattccaaaatgttggagtttctgattctcctgggatcaaaggtaaaagcattgtatggaaacactcaaccttggctcattaccctcctgaggagctaagtctggaggcctcagagagagggagctgacattcacaacttattccaagatgggtaacccagtgaacaaagaattagtaaaacatagactcagtctgtagagggcttcaaatatacatattctatatatataaacctgttatataggatttcaacttattggtttccttgtgatttgtaattaaagtacaaattataaagatgttgcacactgctgatttccccttctcagcccccctccctccccaacataaataacattacaaaggtcaggtgatcctaagaatttttgttgttgtaaatattttgtttttaaaatcatattccccttcctcccctgcaaactacctctgagagtttgtaacacagcagcatggaatggacaagactggggacagcatggaggtctaacggagagagcgcagaacgttgcttctcactgacgggcaccagatgggcttccgcatttccattgacaacagaggctacgacaggaagcagagaatgtgcaatgcggcttcatcctcctccaaagagaaggctagctggaccactgagaaaagccctaaaggcattgaggtttttggagacagagcacagctccagaaatgtcttggctcagtatttacacaatatcttgaagctgcactttccttttaagaaatgtgtgtttctgaaggtgcctcttctgaggttggttgggggaaaggagaaacgtaaaaacaaaaacaaaccaattcccacatatgtaaaagtcctgttataagtcttagttattttcacacacatcattaatagtagatactgacaatgattggtttcttttcttattctttttttttagagcatgagtaaagagaaagagagaaggaagaagtgcactaaggagagcgccgtcccttcttcagcattaagtgacactggatggtctggattcggttcttggctgggacaaactcgggctgaagcttcaatgtggattcataccacaccagtgctttttcaaattcttccattgccacgtagacattgcccagagtgaagtggttcacagcaaagtgtggtgcgatctctactgccatggtggctactatgacggcgtcattccagagcttggcattgtgcaagatgttggccaggctaatcaggggcacatccttcatctggtgtggcgcatagtgcagagcctggcggaggcagtcgattgccttctttccttggcctttcaccctccagtagagggctgccatgctggagaggacccaggacgtctggttcttttccaaaactttggcaattcgggtgccaatctgttcaagcgactgttgtggatattggtctttgccgagattttgtaatacctctgttaactgactctcccctgtgtagtgcaggctggctcggttggaaaccccatgcaagtggtccagggtatgcatactcgtggggagattgccattgcaaagaggctccattgctggctgctgtataggggtggcaaaatctatgtgttctgtgatgtcaatgttttttgaagaaactgcaagccaggtactcacgatggcagtcagctctacccagcggagtttgaggcattcgtccgggctgggccatcccagacgctggtagtcacgtttttttccttgtggcccaggagatgccaccttggggccagtgatctctaggtttgcttggtaacgatgtccattttctatctgacctgtttctacttttttcccaggagttttcttatgatctcctttgggtttctttacacgtttgacctggaatgtaatccattctgttgcttcatcatcttcacttctgcagtctccatagcaagagcttctggccactccatcctggggacctttcttcagcacccgtattccttgtaagtctagacgccgccctttca

SEQ ID NO: 65882 - DNA, 1770 bp, Homo sapiens
  misc_feature (1)...(1770): n = a,t,c or g
ggaattcccgggtcgagggttttgttttgttgctgttgttttttgagacggaatctcgctctgtcacccaggctggagtgcggtggcacaatctcggctcactgcaagctccgcctcctgggttcacgccattctcctgcctcagcctcccgagtagctgggactacaggcgcccgccaccacgcccggctaattttttgtatttttttagtagagacggggtttcaccgtgttcgccaggatggtctcgatctcctgacctcgtgatccgcccacctcagcctcccaaagtgctgagattacaggtgtgagcccccgcgcccagcctgttttttgttttttttttagtacctgactgaaagagactagcaaacaactcctgaaaatctgtaattgtagtaaggttactacacggtaagaagtgaagccgcaaaataaaaacttccattttattttcctttaggagccatggagcatattggcaatttggttctgactcctaaaatcattttactatacctttacactgcctacattggagactgcaagcagtggaaaagaatagatactccagatctcgtcgataaacccaggctcctcctaaaccagccagattcagagagaaaaacgagctggcctgccttattgtattacttgccatcaaggttcaatgtggttctattacccagtaaagtcattgaccaaacaaggtattttcacaaagctaaccttttttaaaagcatgtaaaaattgtacatttgtacatatacgcattacaattttacatccaaagatcaaatagttaacagttcatttagggctttttgtattgtttgattttccagattctgtcactcccttggctttgacctaacctgacatcattctgtcacattatcttctaaatcaagtaaacgttcatttgtctcagtaagcacaatctatctgggtgacaccagagaggtttctgaagggtctggtgtacgctgaggcagtgaaataggtctgttggcacaggtaagaaggaagtggcatgataaacatcacaaccccagggaacagccttccagagtggcacaagcactcccaccgagatggtccagtgcccacccgttaaagagtcaaaacccaaagttactgagtgtcccacaaagcaagtcacactagctctcaaaggaagtgagctgtttcaggactcaatgaagcagggtcactttgaacactggtggtttgacatctgtgaaagaagtcatttgaactcttataaagagaattaaggggtcagcagcttccctggaaaatgcaggaaaaccaataagagaggggacagttttcatcttttcataaagttcttctccagagctaccgaagttctctgtaaagagtagatattccgcttcacccgatcctccagggaggaagtagatgcactctccagcttcatgcggtggatgaacttcccatcccgggagtccagcttctctagcctctgctcccgttcctcatccttagcatgcctcttgaggatgttcagtctctcctcctccctccatttggcgttttccatcatctcttgccgttttcgctctaattcctctgcagagagttttctggtgtatccgggagcatgtcgcctttggtagacctcttttttaggtgatgggctcctagtttggcctgtctctctcctgttcaccttagagttgtgcagtttgctgggtcttggctcgtgccgaattcntgcagccgtcgaaggcgtcaattctctt

SEQ ID NO: 65883 - DNA, 4242 bp, Homo sapiens
agcgccgccggccgggaggcgaaggatgcaggcggctccgcgcgccggctgcggggcagcgctcctgctgtggattgtcagcagctgcctctgcagagcctggacggctccctccacgtcccaaaaatgtgatgagccacttgtctctggactcccccatgtggctttcagcagctcctcctccatctctggtagctattctcccggctatgccaagataaacaagagaggaggtgctgggggatggtctccatcagacagcgaccattatcaatggcttcaggttgactttggcaatcggaagcagatcagtgccattgcaacccaaggaaggtatagcagctcagattgggtgacccaataccggatgctctacagcgacacagggagaaactggaaaccctatcatcaagatgggaatatctgggcatttcccggaaacattaactctgacggtgtggtccggcacgaattacagcatccgattattgcccgctatgtgcgcatagtgcctctggattggaatggagaaggtcgcattggactcagaattgaagtttatggctgttcttactgggctgatgttatcaactttgatggccatgttgtattaccatatagattcagaaacaagaagatgaaaacactgaaagatgtcattgccttgaactttaagacgtctgaaagtgaaggagtaatcctgcacggagaaggacagcaaggagattacattaccttggaactgaaaaaagccaagctggtcctcagtttaaacttaggaagcaaccagcttggccccatatatggccacacatcagtgatgacaggaagtttgctggatgaccaccactggcattctgtggtcattgagcgccaggggcggagcattaacctcactctggacaggagcatgcagcacttccgtaccaatggagagtttgactacctggacttggactatgagataacctttggaggcatccctttctctggcaagcccagctccagcagtagaaagaatttcaaaggctgcatggaaagcatcaactacaatggcgtcaacattactgatcttgccagaaggaagaaattagagccctcaaatgtgggaaatttgagcttttcttgtgtggaaccctatacggtgcctgtctttttcaacgctacaagttacctggaggtgcccggacggcttaaccaggacctgttctcagtcagtttccagtttaggacatggaaccccaatggtctcctggtcttcagtcactttgcggataatttgggcaatgtggagattgacctcactgaaagcaaagtgggtgttcacatcaacatcacacagaccaagatgagccaaatcgatatttcctcaggttctgggttgaatgatggacagtggcacgaggttcgcttcctagccaaggaaaattttgctattctcaccatcgatggagatgaagcatcagcagttcgaactaatagtccccttcaagttaaaactggcgagaagtacttttttggaggttttctgaaccagatgaataactcaagtcactctgtccttcagccttcattccaaggatgcatgcagctcattcaagtggacgatcaacttgtaaatttatacgaagtggcacaaaggaagccgggaagtttcgcgaatgtcagcattgacatgtgtgcaatcatagacagatgtgtgcccaatcactgtgagcatggtggaaagtgctcgcaaacatgggacagcttcaaatgcacttgtgatgagacaggatacagtggggccacctgccacaactctatctacgagccttcctgtgaagcctacaaacacctaggacagacatcaaattattactggatagatcctgatggcagcggacctctggggcctctgaaagtttactgcaacatgacagaggacaaagtgtggaccatagtgtctcatgacttgcagatgcagacgcctgtggtcggctacaacccagaaaaatactcagtgacacagctcgtttacagcgcctccatggaccagataagtgccatcactgacagtgccgagtactgcgagcagtatgtctcctatttctgcaagatgtcaagattgttgaacaccccagatggaagcccttacacttggtgggttggcaaagccaacgagaagcactactactggggaggctctgggcctggaatccagaaatgtgcctgcggcatcgaacgcaactgcacagatcccaagtactactgtaactgcgacgcggactacaagcaatggaggaaggatgctggtttcttatcatacaaagatcacctgccagtgagccaagtggtggttggagatactgaccgtcaaggctcagaagccaaattgagcgtaggtcctctgcgctgccaaggagacaggaattattggaatgccgcctctttcccaaacccatcctcctacctgcacttctctactttccaaggggaaactagcgctgacatttctttctacttcaaaacattaaccccctggggagtgtttcttgaaaatatgggaaaggaagatttcatcaagctggagctgaagtctgccacagaagtgtccttttcatttgatgtgggaaatgggccagtagagattgtagtgaggtcaccaacccctctcaacgatgaccagtggcaccgggtcactgcagagaggaatgtcaagcaggccagcctacaggtggaccggctaccgcagcagatccgcaaggccccaacagaaggccacacccgcctggagctctacagccagttatttgtgggtggtgctgggggccagcagggcttcctgggctgcatccgctccttgaggatgaatggggtgacacttgacctggaggaaagagcaaaggtcacatctgggttcatatccggatgctcgggccattgcaccagctatggaacaaactgtgaaaatggaggcaaatgcctagagagataccacggttactcctgcgattgctctaatactgcatatgatggaacattttgcaacaaagatgttggtgcattttttgaagaagggatgtggctacgatataactttcaggcaccagcaacaaatgccagagactccagcagcagagtagacaacgctcccgaccagcagaactcccacccggacctggcacaggaggagatccgcttcagcttcagcaccaccaaggcgccctgcattctcctctacatcagctccttcaccacagacttcttggcagtcctcgtcaaacccactggaagcttacagattcgatacaacctgggtggcacccgagagccatacaatattgacgtagaccacaggaacatggccaatggacagccccacagtgtcaacatcacccgccacgagaagaccatctttctcaagctcgatcattatccttctgtgagttaccatctgccaagttcatccgacaccctcttcaattctcccaagtcgctctttctgggaaaagttatagaaacagggaaaattgaccaagagattcacaaatacaacaccccaggattcactggttgcctctccagagtccagttcaaccagatcgcccctctcaaggccgccttgaggcagacaaacgcctcggctcacgtccacatccagggcgagctggtggagtccaactgcggggcctcgccgctgaccctctcccccatgtcgtccgccaccgacccctggcacctggatcacctggattcagccagtgcggattttccatataatccaggacaaggccaagctataagaaatggagtcaacagaaactcggctatcattggaggcgtcattgcctgtggtgattttcaccccatccctgtgcacccccggtccttccctgatcccggtaacatgtttccccccacaagggcaccctacccatacccaacgaagcaaagggggccggaagtcggcagaagaagcccggacgccgcccatccatgaacaacgaccccccaacttcacagagacccattgatgaaagcaaaaaggaatggcctcatttgaggggtggctacttggctatgggatagggaggagggaattactagggaggagagaaagggacaaaagcacccttgcttcatactcttgagcacatccttaaaatatcagcacaagttgggggaggcaggcaatggaatataatggaatattcttgagactgatcacaaaaaaaaaaaacctttttaatatttctttaa

SEQ ID NO: 65884 - DNA, 1002 bp, Homo sapiens
cccacgcgtccgagagaattcacactggagagaagccatatgagtgtgaggtttgtcagaaattttttaggcacaagtaccacctcattgcacaccagagagttcacactggagaaaggccatatgaatgcagtgattgtgggaagtcatttacccacagctctacattccgtgttcataagagagttcacactggtcagaagccttatgagtgcagtgaatgtgggaaatcttttgccgaaagctccagtctcactaaacacaggagagttcacactggagaaaagccttacgggtgcagtgaatgtgaaaaaaaatttaggcaaatctcttcacttcgtcatcatcagagagttcacaaaagaaagggcttatgagtgcagtgagtccagtctcattaaatattggagaatacacacctgagtaagatcctgtgattgcagcaaatgtggaaaatgtttacccaaaggtctgctctccttggatattggagagttcacactagagaagagtccttacaagtaaaataaatttgggcagttttgtagccacacctctgtattccttcaggattatagttaacactgaatgaaggccttactagtgtgacaaatacaggatatttatccagaagtctggctgcataactcacaggagagctgtcatgtgggaggattgctacatgggaggatttgcttgagcccctgggaggcagaaggttgcagtgagccgagattgcaacactgccagtcccagtctgggcccacagagtgaggaccctgtttcaaaaataaaatatataaatgacatccaataaagtatgcatatttgagctgcaggataagtcttgaattttctttttcttttttttgggagagccctcgctctgtcacccaggctggagtacagtggcataatctcgggtcactgcaagccctgcctcctgggttaatgccattctcctgcctcggcctacctaatagctgggactacaggcaacca

SEQ ID NO: 65885 - DNA, 1887 bp, Homo sapiens
  misc_feature (1)...(1887): n = a,t,c or g
tttttttaatttcctgcaataagtagtcatttaattaaagaacaaaattaacaggaatcaaaatgttgcagctgtattttttgttagacattatataaaaaaggaaaagtataatacagtaaatcatcttgtataacatgaacttaaagagttttcaaattaattatgatcaggataaaaatgtcttttgaacataatactgaatgacactgtcacatgtccctcatgtcagaggcctgggagtggtgagcctgcacatgcacgttgcccgtcctccattacactgcagaactgtaaaacaaggttgaaaggcaaacaacagttttcttctgatagagttatgttgggtcttaactgaccccaacagttcacactcctcagacaccaaagaaggaaggaagtgtgtcctctggttactcctcttgcaggtaagtgtggtcaagattgcacctgtgtgtgtgatcctactcttctcacaaacacagcaggtagggtagtcttgagctgaacttcaggaaagttccctgatgaatgttcagtgttggtatcaaaaaattaaacacaaattcttctcagaagaaaatctctatggcctgtggaatcttgtcaagtgcttgcttgatgcatgtacctccatttcattacttttgtactcatttaattctttacgaattgctgccttatctgctgctgacagtctcgtccagggtttgtctgccctcctgtcatagtcctgcgcttttgctacttccacgtaatcactgaatcgtatcagaatttttctgtctcttaattcatcaacagtgggtctctgattaagctttcttgtcaatctttgcttgatttctcttctttcttcctgctctgtctgatcattcctttgtttcaagatatttcttctctccagctcttccacggcaggtctttggctcagccgtttggaaagcttcatctcgatctgctgccggatctcctgtctttcttcatcagtccttctggggaaaatgttccggtcttctagttcctgtttgcttggccggttccttagcttcacggccaggagctccttcttgcatttccgtggcagtgttccagaaataatggagtcgttcagcgcctcctcgtcctgatacaaaagcaagtcgtctttgagttcagaatttatgatcaggttctccttgttctcctcagattccttagcggcagttcgcttgttctccaatgccccgtcaaagctccaagcctcctccctctccttgccccgctccacgctggacgttctcgacagacggacatccagccgcttctttggagaccctttactttctcttccttgaaaactgtcctggcggtgcttcgtggccagcgccctgtgcagctcctcaatgacgcggcttgggggaagaggccggtggaccgtggtgagatgcggagaccccgtgggtgtggagagctggccccggagggaagggtcggcactcttcatgctggaggcttggaagagtgtggcttggcctgtgacattttttgtggttttggagcttgccttgggtggcggagtgggcagcagtggggggctggggagctggcccacggatctctccagaggtctgggaggactgtccagggagtcagccccagctaaggcttgggagagctcattggtggtgggcaggaggctgccagcgtctgcttcttcaccactggatgcagaaggcatcttggctgcatcgtccaagtgggcagctgaggacagtggcttgtccagggagacctggtccgtcccagtggccaaggggcttccgggctgggcatcttctgaagtcagcgtctccgccgtgggagtgggtggganttccnccgcnctggcgagggtntacctgtcat

SEQ ID NO: 65886 - DNA, 2085 bp, Homo sapiens
  misc_feature (1)...(2085): n = a,t,c or g
tggcacgaggcctcgtgccggaaaactgaggcctgggagcaggaacctgtaggcagcgcttgagggtagcgggatagcagctgcaagcgcgcgtgggaggcgggggctctgggcggaacaaaaatcacaggatgtcagaggatgtttcccgggaagaactgggataaaggaagggtcccagcaccatggaggacccgaaccctgaagagaacatgaagcagcaggattcacccaaggagagaagtccccagagcccaggaggcaacatctgccacctgggggccccgaagtgcacccgctgcctcatcaccttcgcagattccaagttccaggagcgtcacatgaagcgggagcacccagcggacttcgtggcccagaagctgcagggggtcctcttcatctgcttcacctgcgcccgctccttcccctcctccaaagccctaatcacccaccagcgcagccacggtccagccgccaagcccaccctgccggttgcaaccactactgcccagcccaccttcccttgtcctgactgtggcaagacctttgggcaggctgtttctctgaggcggcaccgccagatgcatgaggtccgtgcccctcctggcaccttcgcctgcacagagtgcggtcaggactttgctcaggaagcagggctgcatcaacactacattcggcatgcccggggggagctctgagtgcagcttaagcctctccacggtgacgggtggctctgtggctggtaggactcacccatgatatggggtgcaggaactctgggggccctgaaggatttgcttccctcccctgggaaggcagagggctcttaataaagaggacccagaagattcttatttagagcttcagtctttggagcacacagggccttcgtgagacagtgaaatcagataataatgagatcttttgttaaaaaaaaaaaatgggaagggagtgcgggagagaaatggtttgtgtctcccttattcccagttaaatacctagctgcagattgtgccatcacccttcattcttcccagatggatgccatgggctatgggagcaaattgccctggacctttgcctgaatgggggcaggaaaggtgaggtgttgctggcctgtaatgccaccaggtgagttccagatgtggagcaacttgggcttttggggatggggcagcaaagttgggagctggaccccaattgagtgggggtagcaattggagtccttgtgtctcttttccaccccctgccatcctcacttagaggggccatggcactagatggcactagtcccccgataatttatgtctcgttgaaataattttgtatatcattctagtcctgaaatatttttttcatatgtgtaggtgaaatggtatgaataagctaacaggaatagtatctaaaaacagaaaacatccatattaaaatgtcgtaaaccagggagctctggcttttnagtgggaatttccagagaacataagggtgtgggcaggtgggggaactcaggccagagttggcctcgctttgtggggaaactggtttggaatcaaacagagataccttctgtttcgggttttatttggccaacactgggagatttcccattaagatcctattttcagctctcttgaaaggcccaacctaggctgacattgtcacaggggcaggacagaagttacaacaggctggagggagcagtgggtgtcaccctcaactggagatgagtcccaccaggccagttttacccccttagttacctgccctgcacctgcagacaatggtcgatgccttgcatataatacttatagactctgtttatgttgagggatgtttttaaagcccacaggtgaggtggatgtggaagactgatcactgtctctgtttttagctaagcacacagcagctgaaaagactgcatttcccagattcctttgcagctagatgtggccttgtgactgatttctggctaaattcctgggtagaacagtcaagcttaagaaagggacggctgggcacagtggctcacgcctgtaatcccagcactttgtgaggctgaggccggtggatcacctgaggtcagga

SEQ ID NO: 65887 - DNA, 923 bp, Homo sapiens
gggacgaggggctttgggagaaaaaaatccaactggcaaaagagatgcgttcctcagtggattccgagatcggccagacggagatccgggccatgaagggcgagatccacaggatgaaggtcaggctcgggcagctgctgaagcagcaggagaagatgatccgtgccatggagttggcggttgcccgcagagagaccgtcaccacccaggccgaggggcagcgcaagatggacaggaaggcgctcacccgcaccgacttccaccacaagcagcttgagctgcgccggaaaatcagggacgttcgcaaggccaccgacgagtgcaccaaaaccgtcctggaactggaagaaacacaaagaaatgtgagcagctccctcctagagaagcaggaaaagctgtcggtgattcaggcagacttcgacacactcgaggccgacctcacccggcttggggccctcaaacgacagaacctttcagagatcgtggccctgcagacacgccttaagcacctgcaggctgtgaaggaggggcgctacgtgttcctgttccgctccaagcagtccctagtgctggagcgccagcgcctggacaagcgactggctctcatcgccaccatcctggaccgcgtgcgggacgagtacccccagttccaggaggccctgcacaaggtcagccagatgatcgccaacaagctcgagtcaccagggccctcctagggagcagcctggactccgccttgcaaggcctccaggaagagatccggaattgtgtttgtcatgagggacttggaatcttttgtgttcctaaaaaccacatgtaccctcagaagggcatcgtttaagagaaataagccagccccacccataggaatctttttagccactcagcaatttaataaaccaggtaaaatcctaaaaaaaaaa

SEQ ID NO: 65888 - DNA, 989 bp, Homo sapiens
gattcgagactggtagacactagtccgtgtggtggaattcctccactgggaacactcgggctgccctggccactctggagcgcgttgccaagatgaaccgctcggtcatgccggaggggaagctggtggagcccgtcctggaaaaaagaggaagatttgcagacctattggatgctaaatatttacggaccacattacagatctgggtcatatggcttggaatctcttttgcctactatggggttatcctggccagtgctgagctgctggagcgggacttggtctgtggttcaaagtcagactctgcggtggtggtgactgggggggactcaggggagagccagagcccctgctactgccacatgtttgcaccctctgactatcggaccatgatcatcagcaccatcggtgaaattgctttgaatcctttaaatatactgggcatcaatttcctgggaagacggctgagcctttctattaccatgggatgcacggctttattctgccttctcctcaacatttgcacttcaagtccggcctgattggcttcctcttcatgctgagggctctggtagctgcaaacttcaacaccgtctacatttacacagctgaggttcttatgagtgcatcaatactgggggccctgtgtctcttctcatctgtctgtgttgtatgcgccatttctgcattcactctccccatcgaaaccaaaggacgggccctccagcaaattaaatgaagacctgcaaagctatgtctaccagatgagaaaaatgaattctatcttcagaactgcggtgcatttttttaaaacttggttttacttctgtatgctactcggtaattagtaaagtgatttttttttaaaaggcatatatgggaatggggtaggtaactgtatattgatctcttccttgaggaacaatatataaagtacttttataaaatataatttaagctttcaaaggggtgtgagagggagatggtgg

SEQ ID NO: 65889 - DNA, 1734 bp, Homo sapiens
aaatttgtatttcgataaccattagtgcagtgcggtggaagtcaagatggcggcgcggacagcgttcggtgctgtgtgccggcgcctctggcagggattggggaatttttctgtaaacacttctaagggcaatacagccaaaaatggtggcttgcttctcagtaccaatatgaagtgggtacagttttcaaacctacacgttgatgttccaaaggatttgaccaaacctgtggtaacaatctctgatgaaccagacatattatataagcgcctctcggttttggtgaaaggtcacgataaggctgtattggacagttatgaatattttgctgtgcttgctgctaaagaacttggtatctctattaaagtacatgaacctccaaggaaaatagagcgatttactcttctccaatcagtgcatatttacaagaagcacagagttcagtatgaaatgagaacactttacagatgtttagagttagaacatctaactggaagcacagcagatgtctacttggaatatattcagcgaaacttacctgaaggggttgccatggaagtaacaaagttttgtttctttatttttttagacacaattagaacagttaccagaacacatcaaggagccaatctgggaaacactatcagaagaaaaagaagaaagcaagtcataaagcctcagggaggccatttttgcctaaatttgaaatgagggtgggccagatgagtatgtttaagtggagagtgcttccagctgagatgatttgagtctgtcctaactgctccattgagttctcgtgccctcatcagctgagggcagggaatggaactttaatggaagaaccacttttatctattctttttattcattgtttcagttctgatttcagcaaacatgagcaaaccactttgactgaaagcagaaagagtgaaaattctattttgttacgctactggtgttcaattattagtttgtaccatttttaatttatgtcagttgatgcatctgaaaataagtgcttggagtgttcgtacccttatttttttttaagattcctagaaggaatctttggttaattcagattgagcagttaaagtttttgctatttacctttgtgcaggctggcatatgctaatttgggggtggtaaccaaccgattttatctcatgtaagcattacattttgaagactgaatatacttcacagcagatcaaacacatttatggcatgcactgacctcttcttggagcccagaactttatagagttgcctaccagggttactgtaatggaatttatgatcttaagaaattactagttgtattatttatcctatgattcattcattcaataagcttttactgcataaactttacatccagcactgtagttaagtacccaaaattgaatagaaataatggcttttgaaaatcgcacaaagcaggccaggcacggtggctcacgcctgtaatcccagcattttgggaggccgaggcaggcggatcacgaggtcaagagatccagaccatcctggctaacacggtgaaaccccgtctctaataaaaatacaaaaattagctggacatggtggcacgtgcctgtaatcccagctactcaggaggctgaggcaggagaatcgcgtgaacccgggcccggtggaggctgcagtgagacgagatcgcgccactgcactccagcctggcgacagagcgagacaccgtctcaaaaaaaaaa

SEQ ID NO: 65890 - DNA, 1799 bp, Homo sapiens
cttagaatttaagcatgaacattacaaagacttaaggtatgtgataaaaaacctctttccttacaggtattcagattttatttgtgagcccctaaacatcaatgtcttaaagggttgacattataacaatggaataactgaaaagcgaagttttctgaagtcatatgaccctgctgtgtgcccaagtcacctattcacatggctgttcacatcatctgcatgaaaatattttcactttctgttaaccatagtgatttacaattctatgactattaaagtttattaaacacaagtttagaaagtatctttaacaaaggtgtgtttatttccatatattgctcattacatttttcttgccacagttttatctaaagccaggtcaaaatctttctctaaggtatttattaatagtgtatgttcttcagatataaaatccctctggtcaacatgcaacatttgaatatctattggcactgtacctctatgagatatttatgacatttgttaatagtgaacctcaacctcctgaccgcacatccgaagttgggggcgatgtgggggaacatacacaaaattacaaccacattactggtcaagcactttatagctaaaatctattgactttaaaatagcattgtatgtgaattcagagttttaatgtattttgtggatcaaaaggaaagggtcaaaggctaagctgaacacggagggcactaaattagctaataaggcagctagtgcccctgttcttgccccagccctgtcatatcactacatccgattctctcaaatgttataaagaataatgaacttaaaacttcaggggttcctgaaaactggtattaaattaaaagcagagtagtcaaaattctttgcaaatgacttctgtgatagaaaaaaatatttccaacctgcgtcagaggagaattatcttttaggtgccaaggaaagagtgataaagatgctgagtatattagtcaaggtcatctgagaagactattttgtggttgattcttctgagcccctgaattgtccaacattattggtgtacctgtagcgtgaacaacattgcaaccaataattttttgaatacagcaatgtaaaaccctcaactttaatgttcctcagatcgtaacaaatcagctcagctacaagtcttccccaaagtggagctattctagtcatatatttacttagtttcaaagagcaggaatcctgcaaaggtggagaagcgttggtggtccccatggagagcgccattgcccattcgcagccaaacctcatcccctttggctagcttcagcacagcatgattgctggatgtatctgatttgcccttcatttcatagctgtacatgctgaagactgtgttgccattgtgcataaggtacacatacacttcctcaacatcctcatgcttcatcatgctgaaggtgaagaaatacacacctgatactggggccccaaatctaccagtcatgacatcaaagaagtttccaatgttggtctcaacactgctgaagataatcccactgttctgattgctgaagtgggttgccagagaagccatgaatgcaatctgtaatcccagctactccagaggttgaggcaagagaatcgcttgaaccttggtggaggctgcagtgagccaagatcacaccactgcactccagcctgaagttctggtggaatccccgggtagcccttctctcctttggggccatgctgcccccgctcccctcgaggccccaggtcacctttgtcgcccttctcacctttggctccttcatgaccagtgg

SEQ ID NO: 65891 - DNA, 1798 bp, Homo sapiens
  misc_feature (1)...(1798): n = a,t,c or g
agccatcgtaaaaccacaaccagctgtacatcaacatagctcaagttcatcagtttcctctgggcatttgggagccctcaaccattcccctcaatcactttttgttcctactcaagtacctactaaagatgatgatgaattctgcaacatttggcagtccttacagggatctggaaagatgcaatactttcagccaactatacaagagaagggtgcagttctacctcaagaaataagccaagtaaatcaacatcataaatctggctttaatgacaacagtgttaaatatcagcaaagaaaacatgaccctcacagaaaatttaaagaagagtgtaagagtcctaaagctgagtgttggtcccaaaaaatgtccaataagcagcctaactctggaattgagaactttttagcatctttgaatatctccaaagaaaatgaagtacagtcatctcatcatggggagcctccaagtgaagagcatttgtcaccacagtcatttgccatgaagagatgaatatggattaccctctcagcctaaacaaaataagaaattagcatcttatatgaacaagcctcacagtgctaatgagtaccataatgttcagtctatggacaatatgtgttggcctgcccccagccagatccctcctgtatccacaccagtaactgaactttctcgaatttgttcccttgttggaatgccacaacctgatttctcctttcttaggatgccacagggctccttaggcatgaatttccctttgccttcacaagtatttgcaaattatccttcagctgtaccacctggaaccattcctccagcctttcccccacctactgctaatataatgccttcgtcgtctcatctctttggctcaatgccatggggaccatcggtgccagttcctgggaagcccttccatcatactttatattctgggaccatgcccatggctgggggaataccagggggtgtgcacaatcagtttatacctctgcaggttactaaaaaaagggttgcaaacaaaaagaactttgagaataaggaagcccagagttctcaagccactccagttcagactagccagccagattcttccaacattgtcaaagtaagtccacgggagagctcatcagcttctttggaagtcctctccgatttgctcaacctgcatcttctttttcaagttggaaactggcctcttcaaggccattagtatatctcaccataagtcaacaccaatctcttcttcaagaagaaaatcaagaaaactggctgttaattttggtgtttctaaaccttctgagtaaatttggccccttagaattaagttaatttcttctctttccatctacctttttataaatacatatctatgtctcataaaaattagaatgtactattttaaaataatatgtgtaaattgaaatttttttcatttttaagttatcaggcacttttcatgctgtttaaaagactgtgtatcaaattgtgcactttaagtatgtgcagtttgttgtatgtcaattatacctcaataaatctaataaaaaactaaattaaaccttgcattaaaataatatcacagtatcagtggactaaacattaaaatgtaccactctaatcattggcctcatgattgaagcatcctgaactatgaattagacatcagttagcaataataagcattttttnactatcattgaggaataattcatggagcatgaaatttgggcctccggtatacttctgaatgtggatttatnctctttttaatgatgtagaaaatgnaggaga

SEQ ID NO: 65892 - DNA, 4138 bp, Homo sapiens
ttttttttttttggaatttttaatttatttatcatgtttgtaagttacagacatttatgttttcagcaacagtttataatagttacatctcatacttcaactattagaacagagagaacattaaagtacaaagaaagacttcaaaaatgaggttactgtgatgtatcataaaaggagttaaaattcaaaatatcaaagacctcacctatcggactaaacataaatcttaaaacctcctatggtcctctgagcctaaaattacaaaacttagcaactgcttaaaccaaggaattaacggttctgtgttttcaaggtaagaaaacaaaaaatgctttggtaaactacctttaatactagtttaaatgtttctgccttgtttgtatctctcttgaaagactgtatataagtacaggcacagcatatatttgagaaaacatctcacaaatttcatttactataggtttctcaataatctttacatttaatcaatgagaaaagtgattcagtctcttgaattttaagttaaaaaaattaaaaagtatttccagggactcttaaagctctctcccaaagtataaaatattatgtactttcaaaatcttaagcattcacgttctttctgagaccaacgcaggatacaaacttactctcaacatagatgcttatgtgcttttgggcacacatagtctttcttagaacagtggtcaaacagctcacaggaccctgtactcctcttcatcctggactgtgatggtggccacagccagaccagccccctcccatctgccttccaggtcagattccctggcatttattaagctgtcactcttcaatgggttcttccttgggggactcaagctcattcaataagtctttgccagctgctccggcttttgaagcaaagagaactgctccctgcttaaaaccgaggttcttcaaactccgggcataatctgcatatatagcagtgatgagtttctctgtgtcctcagtgacttcaaatgctccatacttgaggcaagcttccacaaataaggctgctctatcaaagtatctcatgctgtgaagcgtctctgccacgctaaaaaagcagcccagagagaggagaaccaggagagcctttgatttctgattgacttgtggagaacaaaggtggtcaacccaccgccttaaaacatcggcacactcctcaggattcaaacggacttttgccagccatgcagcccgattccactcgccgtatgtctgcaggtagcggcaggcgtctgcagccttatctatcaggcagagcaactgaacgccctctgccaatttgccattggcaatcatattcgttgccaccaacttaatggtgctctgagaggggcctgacgaggtgacagtagtgactaaacaggctttcagtgaatcacagtaataatgctggttatctgcacttgtttccaacagcaactgcacagctctgtctgtttgacccaagagcagtagctggtctgtacatttccttgtatgatcataagttgaccgtttcacttcctgcagattaaccctttctagctgaaatttctgaaagtaggcattttcacagagcacgtcatagcatatatccagtgggttgctcagtttgtctcgaggagcagcttctttaggagctgttgtgctggctgacttttcctgggataagctgtgcaggtagtgggcagcgacagtccagaagtgcagctccgattcatcaccatagagccttgaaacaagcaggcacctctgcaagagagtgaattctggatcaagcaacagtttctttatgtcattagacaatgaattcaactgttcttggaggagattctttatttcttcattttctggatagtcaacatgagaaatgtccaaagaatactgtccattccaaggctggtgtaataagaaggctttcaaggcaagagaggcccttggaacaaggagataggggcaccacacaggctcggttaactcttgttcatccattctaaagcacgcagacttcatagacatctctaggactctgatgcacccatcatctgaggccaagatcactttatctgacgtacaccagtccacatccaatatacgaaaggtcacatttctgccacttcttaaactgctcaccatctgaacctctttagtatcccacacttcagctccatcattgtacattgctattaatttttgatttcctttaccaggagcaaaacgaatcttcctcacccaacttcggtgtgtgggtattcctctggatactctgcctttcaagtcccagaaatttaaatttccatccatatctccaagcactaatgtatcacctttccaagcgatgcaggtaatactacccatacttccatctggtggaatccgagcactgtcttttactgagtttccttcaacagtgagatgatacacttggccatcaatatcggtaaatacaaaatgttcccgggcagagatgttctgactaagttcagatttactttctgcctcctgcagcaagctgatcacagatgattcaacaatactcagctctgtgtctgagactacggtctggcgggccatggcctctcgagttgcaagttgcttctttctcaggctcttcaagttgtgagatggtgaccactccaaagcagttattgtagggaagtttttggacatctctctaagaagggtacaagtcctaacatcccatagctccaggggtttatctctgaatacgactgccaaatactgcttcaaatgagatactttaatcatttcgatggcagattcatcattgcctctttcaccacgaaaagcaatgctcctacctgttggaagatcaaccagttgaagttcatttctcactaatcccatattgtttggtgttgaggtagcaaaagaaagaaaactagtcaaacttgtccattcaatacccttgacttcacatgagtggatgcttaactctttgtgtagcagaccactggtgagatggtacaccaggacagaaccattacttgtaccaacagccagcagtggctgatacatcttgatgttttttgtggtcaacggtggacacatacgaatagcaaactgtggtgcgggcagtcctgaaagcagtcccgtcagcaggaacttgaggtgcacttcccgcagaattgaacctctgggatgttcttccccagcaattgcactttgcccaatcatgttatctaaggaaaggtctgggagtttattctgtagcactcctacaggaattccacagaaagacactggtgaatataaaggtgacacaccagaactactgttccgtgaatttcgattacaaactgcagacttgagttcccatatcatgaccctgccatcactcactacgagggcggctgcattctcattgacaggacagcacaccatactgaagggacggacggtttttgtcaccctgattgcatcacactggcttcgtaaatcataggtaagctcctgaactggatctggatctggttcctcatttgaagtggtaaaaatgttattataagatcttcgaacacgtaaagttatacaaccattttcatgtagacaaaataaaccatcacgctgaaagcagggtattacctgtaaaaatggaactcctgtgcgttctattgcaatcacacccaccgtctgattcacctcaaggtcaaggattaaaatctctcgaggatagagcaacaacatgtgattcctttttgaaggcaggtatgccaactgaaggcaatcattgagagttatgaattcagcactaggtttctcttgagtgattaaaatttttactttatttagagctttcttggcacctgtggctgtggccagcttgttatgagctgggctagagtgtgggctggatatgtaaacttttttcccagggcctgagggaggcttggatggggagaagtctgagatgaaaacaataccctcgctggtaagcactatattgagaaaagcaaaactctgattaaagtttaatgaagtttagcatacagttttattccaatacaattttgagagcaatatagtgataattttaataatatataactggcaatgttatgcattcataacataatgggaatgttctctaagttgaagagaaaca

SEQ ID NO: 65893 - DNA, 1413 bp, Homo sapiens
agctgtagtgggtgctgttcttccatgcataagttcgccatactaactggggtgtagatatgtacctcttttctctaggctcagagtcccccaaaggggccattggccacattgtctctactgagaagaccattctggctgtagagaggaacaaagtgctgctgcctcctctctggaacaggaccttcagctggggctttgatgacttcagctgctgcttggggagctacggctccgacaaggtcctgatgacattcgagaacctggctgcctggggccgctgtctgtgcgccgtgtgcccatccccaacaacgattgtcacctctgggaccagcactgtggtgtgtgtgtgggagctcagcatgaccaaaggccgcccgaggggcttgcgcctccggcaggccttgtatggacacacacaggctgtcacgtgcctggcagcgtcagtcaccttcagcctcctggtgagcggctcccaggactgcacctgtatcctgtgggatctggaccacctcacccacgtgacccgcctgcccgcccatcgggaaggcatctcagccatcaccatcagtgacgtctcaggcaccattgtctcctgtgcgggagcacacttgtccctgtggaatgtcaatggacagcccctggccagcatcaccacagcctggggcccagaaggagccataacctgctgctgcctgatggagggcccagcatgggacacaagccagatcatcatcaccgggagtcaagacggcatggtccgggtttggaagactgaggatgtgaagatgtctgttcctggacggccagcaggagaggagcccctggctcagcctccaagcccaagaggccacaagtgggagaagaacctggccttgagtcgagagctggacgttagcattgctttgacagggaagcccagcaaaaccagccccgcagtgactgctctggccgtgtccagaaaccacaccaaactcctggttggtgatgagagggggagaatattctgctggtctgcagatgggtaggaagagagaggcagcagaggctctggcacaacagtgccaggctgagggtggcagaggtgactggggcctgagctctgcctacagaaaaaacccccagggcctccttccccacagttctcaaggaagggcctctggcaatcacagctctgcagcccaaccctctccatggccgatgggacttctatgaaaaggatgagcacacacactcggagggctgagcagcacgctggaaactgtgacttggtgatgcccagctgcacacgaaattacacatgactcaccttattaagggctattgcactgaaaaaaaaaaaaaaggggcccctaacgggaaattattgtattgtctttattttattaaagcacctatgttttaaaaaaaaaa

SEQ ID NO: 65894 - DNA, 840 bp, Homo sapiens
catggcattcctttggcttgtgtgctgctttgcccttgtgggcgccacctttggctgtggggtccctgccatccaacccgtgctgaccggtctgtccaggatcgtcaacggagaggatgctatccctggctcctggccctggcaggtgtccctgcaggacagaactggcttccatttctgcgggggctccctcatcagcgaaaactgggtggtcactgctgcccactgcggggtcaagacaaccgatgtggtggtagctggagagtttgatcagggctccgatgaagagaatgtccaggtcctgaaaatcgctcaggtttttaagaaccccaagttcaactccttcaccgtgcgtaatgacatcaccctgctgaagctggccactcctgcccagttctctgagactgtgtctgccgtgtgtctgcccactgttgacgatgacttccctgctgggacactgtgtgccaccactggctggggcaagaccaaatacaatgccctcaagaccccttgacaaagcttcagcaggctgccctgcccatcgtgtccgaggctaagtgcaaggagtcctggggttccaagatcaccgatgtgatgatctgcgcagcgcccagtggcgtctattcctgcatgggtgactctggtggccccctcgtctgccagaaggacggagtctggaccctggcaggcattgtgtcctggggcagtggtttctgctccacttccacccctgccgtgtatgccctcctcactgccctcatgccatgggttcaggagatcttggaagccaactaagtacacggtccttacctcttccatattactcccccgccgtgcatc

SEQ ID NO: 65895 - DNA, 1372 bp, Homo sapiens
gtcacgtatgttttaaatattcaaaagtttctgtcagaaaacagtattttggaattaaatttctagaatctttcataatattctctcctctctactgaacatagtactaggttggtaactggaggatcccagaaagtcatgctaatttttctaacaaaacaggccttgctgtctctaactctgatctgatatcctgctttgagcaaataaaagagccctggaatgtgaagagacatgagacagtagtcagcttctcaggtaggtaagcatgaatgaagcagataacagagacgagggatacgaaggtcagaaagaatttcagaccttaaaatgtggtatagaatgctctgcttccatggaaaggtttcctaaaaagccatttatttctctagctcccaaataggagcatcttttgtcccatacccttaaattctttaaggatcctacttcctatttagtgattttccttagagggtaccgtgagagctaaagtcctctttatggcttataaggtgctgcatgatatgcctgctcttccattgttttgggggagtataagaatatttctgagtattttagaggaactgcatgttagatcatttaacgtttcttttcccatcatgtctgaaatgtgtaagaggagtggtgatattaagatttgtttcagaaatcacaggaacatgaatgacagatgttacttctctatttttttttaatattagcaatcctaacagatttcgagtgatagctcatcattgttttcatttgcagttgccttttggtaggtgatattgagcacttttttatatatctattgggcatttgtatatatttgttggcaaaatatttttttcactctttcaaccattttttagttggattattattgttattattatacttgcttttgctttgaattttctatatattttgaatattaagcttttctgatatatacagtttgctgttgtgagcatgctgcaataaatgtgcaagtatacgtatcattttcatataataaactatttttctttggggtagataccccaatgatgagatttcctgaatcaaatgatagttctggcccaggcgtggtagctcacgcctgtaatccccaacactttgggaggtagaggcgggcaggtcatgaggtcagaagtttgagaccagcctgagcgatatggtgaaaccccgtctctactgaaaatacaaaagttagccaggcgtggtggcagcttgcctgcagccccagctcctcaggaggctgacacagaagaattgcttggacctgggagtcagtggttgcagtgagctgagatcgtaccactgcactccagcctgggacaactaagactccgtctcaaaaaaaaaa

SEQ ID NO: 65896 - DNA, 1529 bp, Homo sapiens
ttttttttttttaataaagtcggctgccatcctctcccccggctcaggtcaaagttcataggcagcaatgcacaaagtcctctgtgaagccagtgttctctgctccccgggtcagaggtcacaggtcaagttcagtcagtccgaagaatcatgggcgggtgctcgctgtcctcatccagggcgcagggcgtgggccttcggtcctccagggcaggcgccacccacagcacccagggtcgtctcgtgtagggcaagtctccgttggggatgaaggcacgtaagtaccttttcctgcaagctgcgcccgtaatgtctgaggtgactaagggggcaattcgtgagaaggcagagttcccaagattctcattgggtcgttttccaagactgccgttccagccggtgctgcttcattcaggggcacactcgccgccctccttgggggtccaggttgtacatgtacaggtacccgtcggcggcacccaccaacaaccgcgggatcttctgaattgtggctagcgagcagatgtttttgtggccgcagaatggcaggcggaccgtggcgaaggctctgccctggttgaacatttctgtcacttgggaaggcaggtagctggtggaggcccatgagcactttcccgaagtacccggtccaggtggtgggctcctctgggggtttttctttcacagtctcgagtttgaagatgtgcacggtctcagtgttgctggaggcggagaggaacatgccgtccatgctgaaggccagggagcagatgctcacgcacctctttactcctctccgaaactcaaagagttttttgtccttctggaatggaaaataccctaatcacggtccccttctccgaagccgtggcaagtttagttccacttgcgtcaaaggccagtgccgcttaaaggactgtcgtgagccggaatcatgtttgcagctctcaaattaaagggtatcgaagacctggcaaaccctctccgatggtcgcgctccctgggtacgccaagtagcagttgtcgttgttgattgacagcgcacacaggcctgcagggtttggaggcgtctccctgatcgtatgcagcaccttcatgtcccgaatgttgtggatgtacagggactcctccaggcatactatcagcctctgcctgttgagcttcacagccagaatcgtgttggagtagctgtagttgcagatctcagttcccttcttaaagtggcaaacctttagcttccttggtgctttaaggctcacgatggccactaggctgctggagaacaatctctctacaatgcacacatcttccgtatcggtgcattcatagatctgttccagcttatccacagaagaaagggagaaaaatttataaccggacttactaccaacagctagggaccagacaacagcgcgacggccaagaccagctgctcttgatgcccctttcacttctgtgttgtcctggttgaagttggcgaagagcagctggccggcgccggcctccccgctctggctcgccaggttcat

SEQ ID NO: 65897 - DNA, 1219 bp, Homo sapiens
  misc_feature (1)...(1219): n = a,t,c or g
tgggccccccgagggatcctttaaaacggcccccccttttttttttttttcagagtttcaaaatattctcatctgttaaattaagagtgtctcccatagaaaagcagtggaggccccacagggcaagtacaaaacagaattaaaactcccaagggtcttgtctttacaaaagaaaaggcaggaggcagcccctggacagctggtcatgctggccgctccggttggaccacgttgcataatcctcagtcgcatcatcacaacgtctctgagcgttttgatggggggagaaggggcagtgtagtgtgtatgggaggagaggcccagagggctctctttgcccccttacccccttttttatatcccagaggaaagtcgggggaacctggctacaccttgaaatgaggctatgtgtttcaaacctggggacggggtaagagaggatctgtgctttgagcaacctgagccagaggcagaggggtgttggaggggtaaggggaggatgcatgatgcttattgctttgtacctttcactgggaaggagggcagcagccaacagtagctcacaggtttgtaaactgagcctgttggctttaagaagggaggcaatgaaatcgaattaaatataaaagagtcatttgtgcaaaaataacttaaacaaataaaagacctggggaagggggtgttccccttagcgcctggtggggaaagggccatataccatcccccccaggccttttcagtgacatggcttcgggggggcgggggggtggtgggggggggtgaaacttccctgccccctgcaatggctcaggatgggattgtaggggaaggagttgcatttgtgctctgagtggggagtagtgcccccacccactgtccacaggtgcaggtggctggcaggggctcccaaggctcagcactcagctctccccaatcagggtcagatccagctccaggtatggctgctatggggccagtttcctcctcttgtttttggcaggacggccagggcgggcccggggaggcagagggacagctgctcgggctgtagggctgggttccaaggtaatgtcctggcgggagctattgctgttccgggtagggttgtattttctcctacgaccacgacgaaaaattctgtctactcccgggggcaccttaaggtcctcagaatggggcccgggaggggggnnttagcgccatcaaatagggtctcagt

SEQ ID NO: 65898 - DNA, 2609 bp, Homo sapiens
tcgcagatttccagaatgaaagtgcagcagccctggctgctgcagccactcgacatttacaagaagctgagcaaaccaaaaacagtggcactgagcactggtggaagatccatgaggcatgcatgcttgccctaggctcagtgaaggccatcatcactgacagtgtgaaaaatggcaggattcattttgacatgcatgggttcctgaccaatgtcatccttgcagacctcaacctctcagtgtctcctttcctcttgggccgggcactttgggctgccagtcggttcactgttgctatgtcccctgaactgatccagcagttcctacaggcaacagttagtggtcttcacgagacacagcccccatcagttcgaatttctgcagtgagagccatctggggttattgtgaccaactgaaagtctcagagagtacccacgtgctccagcccttcctccccagcatccttgatggcttaattcacctagcagcccagttcagctcagaggtcctcaacctggtgatggagaccctgtgcatcgtttgtacagtagaccccgaattcacagcaagcatggaaagcaaaatctgccccttcaccatcgccattttcctaaagtacagtaatgatcccgtcgtcgcctcactggctcaggacatcttcaaggagctgtcccagattgaagcctgtcagggcccaatgcaaatgaggctgattcccactctggtcagcataatgcaggccccagcagacaagattcctgcagggctttgtgcgacagccattgatatcctgacaacagtagtacgaaatacaaagcctcccctttcccagcttctcatctgccaagctttccctgctgtggcacagtgtacccttcacacagatgacaatgccaccatgcagaatggcggagagtgcttgcgggcctatgtgtcagtgaccctggaacaagtagcccagtggcatgatgagcagggccacaatggactgtggtatgtgatgcaagtggtgagccagctcctggacccccgcacctcagagttcactgcggcctttgtgggccgccttgtttccaccctcatctccaaggcagggcgggaactcggggagaatctagaccagattcttcgtgccatcctcagtaagatgcagcaggcagagacgctcagtgtcatgcagtccctgatcatggtgttcgctcatctggtgcacactcagctagaacctctcttggagttcctgtgtagcctcccaggacctactggcaaacctgctctagagtttgtgatggctgagtggacaagccgacagcacctgttctatggacagtatgaaggcaaagtcagctctgtggcactctgtaagctgctccagcatggcatcaatgcagatgacaaacggctacaggatatccgtgtgaagggagaggagatctacagcatggatgagggcatccgcacccgctctaagtcagccaaaaacccagaacgctggacaaacattcctttgctggtcaagatcctaaagctgatcatcaacgagctctccaacgtcatggaggctaatgccgctcgccaggccactcctgcagagtggagtcaagatgactccaatgatatgtgggaggaccaggaggaggaagaggaggaggaggaggatggtttagctggccaacttttatctgacattcttgctacaagtaaatatgaggaggattactacgaggatgatgaggaagatgaccctgatgccctgaaggatcctctctatcagattgatctgcaggcatatctcacagatttcctctgccagtttgctcagcagccctgctacataatgttttcaggccaccttaatgacaatgagaggcgagttctacagaccatcggcatctaaaaaggggagcctttctacatttgctccttctgggccagccgcaaaccattttgcagccctcactggccttgagatgcactttcttctcaacctaaagtggcatcttgacccttgggcccttggcctcggcagtgacactgatgacaattcagaccaggctcaccggtgccgtcacttaggaatgctggaacaaaggacatttctcaaagttcccctgaagacatgccatctctagaaccttttttctccccgactctacccccacctctgttcctagagccctctgctggcgagtccagaaacattattgcccagaaggattatgtgtttatggattattttgccccgcctcaggagcgcaggaagtcactaccatttatattctaaaacagacctatctatgttcataggacttctgatgtgttcagataggaatcctcatgagagatcattatgctttgtgccctggaccactgctgctctgggttctcaggaggaacaggcaagagcagcttcattctaagcctttccagtgacctcagccttgcttctcttctacaacactaaggctcctctgtcagaggaggtcgtcttgtttttgcttcattgcatgacataacccttcccctcaagctgttcctatatatacatgcacacacaaaataagccagacagatggcaatttgatcttccttttttagaaaaaaaaaa

SEQ ID NO: 65899 - DNA, 2338 bp, Homo sapiens
acctcccgctcctatttcaccgtcccgatcccatccgcccccaccccgggacccgcgccccagggcggccttcccatgcatcgcccctcccccgttccctcctgtccccaccccatgtctgcccaggacccagccctgccctgtcccccattgtccctgggggcgggtcccagcctcttccggagctgaactcggcccctgcgcgctgccccctcctctctccgcagtactcgccagggatgaccatgagcgtgtgatggggcggcagccccgggcctctctgcgggcctaggcttctgcccagcgcccctgctcagggcgaggggctgaggtcacacctcgggcacctggactcctggccaatcaaggcttgcccagctgggaggccccacacgaaagactcttaccattttattaaaaacgcaaggacctcagagacgttcttttctgtatggacccttcctgccatttgtattttgtcccagagagaaaggctctttggggggcccctctccccaggacgtcagggggtggggcccataaataaatggaagctggttttggtttttggtagcttgtctcagattccctctttggccttctgccaccacactctccaccctgtggtctttgttccgtcccggcccccatctagccccacctttgagaactgggggcagagcgaggctccaggttctgggcttctcccctgggaagttggggtgaatgaccatgggcagaggggatgggactgaaaactgggcgctcaagagtcggggaagtagagggaggcagagtcaggtcacaggccccaagaaccccaggtggaaggagggctgaagtggcagcgccctttatttgtgggggccttcaaggtagggtcgtggggggcagcggggaggaagagccgagaaactgtgtgaccggggcctcaggtggtgggcattgggggctcctcttgcagatgcccattggcatcaccggtgcagccatttgtggcagcgggtaccggtcctttcttgttcaacatagggtaggtggcagccacgggtccaactcgcttgaggctgggccctgggcgctccattttgtgttccaggagcatgtggttctgtggcgggagccccacgcaggccctgaggatgttctcgatgcagctgcgctggcggaaaagcgcattgaccaccgggctgccgggcggcactagtggcgccttgaagaggaagctgagcagggacagcacggggtggaaggtctgcggctcggggtccatgtcagtgcagaagctcacgcgctggcacagctcggtcagcagcgctaggtccagcatgatgggtgcggccagcagcgagtcctcacacgtgttgtgcagcaccagtgtgttggttccgcccagcatcagctccgaggtatactcatccagcgcgcgcttgctgtcacccacgtacggcacatacttgatgaccacgcagtggtcaggctcttcgccgggcgtatagagcactgggttgctctgcaccatgtcgtccaccacgttgctcttggacacctccttagagcggaactgcaatggcgccgataggttctccccatcgttgttgcccaggtggttgtaactcacgatggacatggtcttgaggccggagccaatgaggaagtccacaagcacggacttgactttggtctggcctgacttgaagtcatctccgcccacaaaaacccggtgctgccacgcgagctcaagagctccgggcaccagggtgttctgcggagacccattgaggaaggcacagccctccaggatgctggccacggcgaagagcgtggagggcgacacctccagaccgagctcaatggtgcgcagcaggttctcggctgtgtcgttgaggcctggaatcacctcacagaagcgctccgtgttcgccgtccacagcactatgactttgtccagccccgcgctagaccggaagtctcggatgtccctgcggatctgctccagctgctgcgcacgcgagcctgggatgaggttgtccgcgcgcgcgctctggttggccgcgatgaattcggggatgtaaacagaaggccggggccgcagggcctccatgtgcggccacagttgctcctgcagcccccagtccagcaccttcgcgcgccgcatcgcctcggccaggttcagcgacgagatgtcccagccatcgaacacgaggtcgttgggcgccaccatgggcagcaccgcgctgaagggtacgaacacctcctggccctcggcgtccaggcccaggctcacggtgcccgcctgagtcagcgaaccgttagtagttggcctccttgcggccgc

SEQ ID NO: 65900 - DNA, 2511 bp, Homo sapiens
tgcagcgggcgtgagttgggggaggacgggttgccgactcgcctacctagcggtctcttgattgtcgatattttgttggcataggtttatgtagagacgtatacatatatatagacacactgtctttaaatctaggcctgtatccggtgtccgaggcgaactcagtaagatgatgttaagaggaaacctgaagcaagtgcgcattgagaaaaacccggcccgccttcgcgccctggagtccgcggtgggcgagagcgagccggcggccgcggcagccatggcgctcgctcttgccggggagccggcaccgcccgcgcccgcgcctccagaggaccacccggacgaggagatggggttcactatcgacatcaagagtttcctcaagccgggcgagaagacgtacacgcagcgctgccgcctcttcgtgggaaatctgcccaccgacatcacggaggaggacttcaagaggctcttcgaacgctatggcgagcccagcgaagtcttcatcaaccgggaccgtggcttcggcttcatccgcttggaatccagaaccctggctgaaattgcaaaagcagagctggacggcaccattctcaagagcagacctctacggattcgcttcgctacacatggagcagccttgactgtcaagaacctttctccagttgtttccaatgagctgctagagcaagcattttctcagtttggtccagtagagaaagctgttgtggttgtggatgatcgcggtagagctacaggaaaaggttttgtagagtttgcagcaaaacctcctgcacgaaaggctctggaaagatgtggtgatggggcattcttgctaacaacgacccctcgtccagtcattgtggaacccatggagcagtttgatgatgaagatggcttgccagagaagctgatgcagaaaactcaacaatatcataaggaaagagaacaaccaccacgttttgctcaacctgggacatttgaatttgagtatgcatctcgatggaaggctcttgatgaaatggaaaagcagcagcgtgagcaggttgatagaaacatcagagaagccaaagagaaactggaggcagaaatggaagcagctaggcatgaacaccaattaatgctaatgaggcaagatctaatgaggcgtcaagaagaactcagacgcttggaagaactcagaaaccaagagttgcaaaaacggaagcaaatacaactaagacatgaagaggagcatcggcggcgtgaggaagaaatgatccgacacagagaacaggaggaactgaggcgacagcaagagggctttaagccaaactacatggaaaatggtgataaaagaaaatgtggctgaagttacccgaagttcagcttgcagtgtaattcagaagagttaagaccagaagtactggaatcatacttcctttcaggtcaaaacattttgtgggaaatatcctgttcgtgacctaggagaaacaagacagaaaaaaaaatctttcttcatttatgaatttcttactccatacaagcagtttatggatgtctgggcaatcatagcacttgccatttaaaaacatgctacaggggcacattttctgtggttaaaaatgatctccagaataagtgtaaactgcagttttcctttgcattgagggttttggctttttatttgtaaattaaatcaagatgttacccactccttggtgtggtggtcttgctggttcgtgttgggaagtagtatggcagcaatgcacaaattcagaatagccaagaaatccctccttttcaacgctctgtgcctgggaaccattagaggagttttaaaaaccatccctcatagcccacaattttgggtcaactctcaaaattgggaataagaaaactggcactgttgggagaaaaatcgttcttactgaaacatgaactggctcaggcaagcaaatagcgggagtcggcacaggaaggagtgtgtgctgcggggatgcgtggtggcgtcaccttcaaaactaaagtgttgccaggcggacagatgagtccttgatcttgtttcctgatcttgtttccatttgactgaattctgaaccttcattgtcttcacagtcttgccacttgcctagtgaggcttttccgaacctggaaggagacgtctagaaatcccaactttgctgtaacagacaaaaggacgtggaatgtactttctgctacagccattacagtcaactagatttgagtgctgccgctgaactacagcttgtacactacacggtccacagagccgagcaataacttctttacccaaaaagtttgcatggaagataaacagcaggatgccagagcctgaaaatgggagatgtgtgtgaattacttcaaaggcaaccttcagtccccagaggaacactcaacaccagatggaagcaggcccctgagctgggcctggtcagacaggcatcacccactctgcctggaggctcagaggaggctggccctctcaaagctcgtgtcacctggcatttg

SEQ ID NO: 65901 - DNA, 2258 bp, Homo sapiens
aatacacggcctccaatatagtgaattgagagtatacatgggctaccctgcaacaggtcaaggcagctacccctcattgataagggtgatgatttgcagattcttttgtctttttgctcagtacacacttcagagccacaaagcacatacatttactcaatgtttatgtaattcagcctttactgtaaaaaaggaaacaacaaaaacaaaaccctattaataaacacaatgcaaacaatgcccgagattatcataaaaacatactagcaagccacaagtaccagagaggggtgaacaggcatatctgctagctctcctcttgcagtcctcagcctcccacaggaggcacaaggtccaaactattcctcaaaaaaaaggacagcctctttatgctgaaataggaactttaaaggaagctcttcttgtagtccaaatggacgtaccttgtggtatggctgtaaggactcgattttacggcttgtgtattcctaactatagctaggcctgtcacctgctgttcctgtgatctcagctttacctagaagagctcctgaaacagaatgggtacacgaaaatctggaatgaatagctatctgctcaaaaacgattgtttaaaaacagatgattggggccgggcgcggtggctcatgcctgtaatcccagcactttgggaggccgaggcgggcggatcacgaggtgaggagatcgagaccatcctgggcaacatggtgaaaccccgtctctactaaaaatacaaaaattagctgggcgtggtgatgccagccactcgggaggctgaggcaggagaatcgtttgaaccagggagtcagaggttgcagcgagccgagactgcgccactgcactccagcctggcgacagagcgagactccgtctcagaacgaacaaagaaacaaacaaaccagatgactgggagactgaagaggaaaaaagatgggagaaaacgtagggaaaggatggggcctcacagactcagctgtgggtgggggggtaaatcattacctcaggagaagcccaaggaattgtccccgaggtgagctttggaaagaaaacaaaaacaaaaacaaaaacaccaaaaaacacctaaatttcctgtattaaagtgacacataatcatgttttctgattctcttcactgtctgcctgcggggagggggtggggaaggtgttaatgatgctgatccctacttctgcttcaaggagatctggtggggaattcttccaccagtccagagtttgctggtgctgacctcatccctgtatcacgggcctagaatgtgggaggctaataggatgggtgggttgcaggaggtagaagaggggatggcctagagagtttctccattcagagctggagagttgttgaagggaagggtattttaaaagggctccacccacccctagccccagcccctcagctgtggggagaggccacctcctctgatggggtctcgatgctgctgctctgttcctggtctggcacgtcctcctcttcctgctccaagctgaagttctcgagctcctgaaaaatctcatccatgaagtcctgggagttctgtttgtaagacacagctaatcgaattgcatcattgaagagcttcacaacattggtaccatcagcagccgagacgaaatacaggggcagggagaacttcttggcaaaattgaagcttttttgggtcacgtttatgtctgctgtagagagaaggtaggacattggtctgtctgtcaagggaagggaagaaggtttggaggggggggccactggaggccttcattccagaaagtgggataggcagggatgattgggaaacaggtcctagaaagagctcagttaatagggatctgtgtcttggaaagagggcaggtcggcttagctggcttctttataaggtgggaagaatgcaagcaaccaaccaagggttgtatcttatcgtgggagggaggaccaatcactgaaggttgcctgcccggggaatggaggaggaaatgtatgagggcaggtccccagtgaattgctaacacccaggtgcagggatggccccaccatcaattttattggccaccacgatgcatgggatctctggcctgaactcccgaagctctgtataccaggtgctcaggttcctatgggtgactttcctctggacatcaaacaccatgatgcaagcgtgggtcttgtggtagtaggaggcatgcatgctctggaaccgttcctggcctgccgtgtcccaaaagtc

SEQ ID NO: 65902 - DNA, 1841 bp, Homo sapiens
  misc_feature (1)...(1841): n = a,t,c or g
ttttttttttttatctgtatgaaatattagttttaataaaacagaaccagtccatgtatggaggcatgggcataaggtcaacttgcactaaatgtaactcgtacgttttttctaaaataatttcttgagcattgtggtggccttatgtactaacccgaagctgaacttcctgggaagctgatccaatggagcacttggaattcaggggtggagtcttcttcctgggtcagagctggttcagggtcacatgctcttgaggtccctaaaggccacatgtgctgcatttcgcccagcagctcccatcacacctcctccaggatgagccccacttccacagagatacaggccctggagagggcagcggtagccagaatgcaggggcacggggcgggcgaagtagagctggtccagggacatggcgcagtggaatatgttccctccaggaagcccgaagattctctccaaatctggtggtgtgaggatgtctctgccaaccacagagtccttgaagccaggggcatagacctcgatgcaatcaaacactgtgggaaggcaggccatccatggcatcttcaaaggcctgatgaaggaggagggtgtcttcacagttcaggtggatggagcattggtgatggggcagcggctggcccctgggagcattgggggccgccaggaagctgggcagcctgtctacggccacttctgaccaggctgcagggggacacaggctggaggtccgggaatggagatgatgactgagttcagctgcccccagcctggaggtttctcactcagatgggtcaaaggagacagtgctgcaatgtggtgtgcctcttaccattgatcttggtgacaggcgaccgggtgtccagctgagagattctctccaggaactcctcaggaagccactcctgtggcgtcagcttcaggaaggtgatctgcggtgatgtgttggacagcaccattttgcttctcacctctgtgccatcttccagcacaactccttgaacacagccttcactgttcacctgcaccttcgccactgtcttttcagtgaagatgcttgctccatgtgtggtggctgagcttgcgatcgcatcagagagggcacccatgcccccctggacgtagccccaggccccctgcattccctccaggccccccatcacatggtgcagcagcacatacctgtggacagaccatccgactcagatcctggaggtgggatctcatctccccagagttccaggtgcaactattcctttccatcttgatcttcagcccttccctgccaccatccagccctctcccagcagccttcaatgagctcaagttcttgtaagagccctttgccttctctacaccctctccctaacaagtgtgtctatgtgcatagcttattaccacaaagaaggcaacgatgcccaaacctgcagctccagccctctcctgagctccagctccggtgtccagctacccacagatatctccctttggaccctttcttggcagcatcttaaacccaccaccttttccccattctccagctgcttccccttcaatctttcccatcccagtgaacggcacctttcaacaggaggttctgtttccgacagaaatccaggtgtcagccttgaccgctaccatccttccccatctacatccacaaagcaacaccaactcagcctccaaagggctttcaaggtcatcccacctctcagccactcttctcttcattatgctgctgcagtagtgcccctcattggaccccctctcccacgaattccnccgcnctgtcctagagtcatcagtgagggnctcatttnnccnncgggggcgcg

SEQ ID NO: 65903 - DNA, 3393 bp, Homo sapiens
tttagttttggatacacagtgcacttcattccaagagatcttactagagatccccgacagtcagaagatttcccgcttgatcaggatatttctcgacgtgtgttattgctttgcttgtcacagttttctagggaaactgggtgtcagggtaacactcctaggctggcctcccatgagggagttacctctaggaggcggcaggagttttatctggcactgaaaacttgctggttggttttctagatccatgtttattttcagttcaaagacaaagtagaaaacttgagagtggaaaatgttaccttttagttcacactcctaatcccttagtccccataaaataaacattctaaagtgtaagcagtagaaataatggaaactccacagaaacagaaataaattagtttctttcagtcttggtggaggtccttttgccgaacaccatactccactgtgaacagaattcatcttgaacgaagaagaaatctttggcctatttcaccatgtctccagcattgcataacagacatttttcaaattcagtttcttctccaactgcagcaaaaaggcaaagagtagtctgtttcaggagtctgcatcgggtcctgtgagagccttgtccacttagaacaagcctttaacttgttctgtttcggtatcaagatctatgtcataaaagcagggccgggtgggcagtcctggcatggtgctcatcgttccgaccaaagggtaaatgaacccagcgcctatgctggcccggacgtcactgataggtaagatgaagtcccttggcacaccttttttgtcaggttggtgagatagagaaaggtgggtctttgccatgcagatgggcaaatttccaaaaccctgttgagtgtaacgatctattttggcttgtgcctcaggagagagttcaatatctttggctccatagacagcctgagcaatggtccttatcttgtccacaattggaacctgaacatcatacaggaactggaatcggcttcttttactcgcagcctctctcacagcccgagccaagtccaccgatccttttccaccaaccgaccagtgatagcaggggactgcatcaaaggcaccagcccgctttgcaagctcacacaccaagtcaatctcagcgcgggtgtcggtcttgaagacattcagagccaccacaacgggaaccccaaagagctgagtgatctgaatttgcttctggaggttacagcagccgtctgccaccagctggatgttctcctctgtatattctttcttaagaggaacaccagccgttacacttggcccgcctccatgcatcttcagagctcgcaccgttgccactaacacaaccacgttgggcaccaagccggaagctcggcacttgatgttgaagaatttctccattccgatgtcagcaccaaagccagcttcggtcactacaaatccttcttcaccaaccagtttcagggcaattttatcagccaacactgaagagttgccgtgagcaatgttagcaaaagggcccgcatgcacgaacacaggtgtcccttccagggtctgcatcaggtttggttttattgcatctttcatcaaaactgtcaaagcacctgtcacccccaaatcatctgctgtcacaggctgcccgcttttgtcactggccaccaccatccttcccagccgtgccttcatgtctgcgaggctgtccgtcagggccagcaccgccatgatctcgctggccactgcgatgtcaaactgcgcctgccggtaatggcccttctctgtgtttccctgcccgatggttatttttcgtagaaatcggtcatttgtatccaatactctctgccacgtgatggtagatgggtcgatgtcgagacgggcaaatttactcacttcctcttctgtcagtgtgctcggatcagtcttatttattcccagtttttttagccgagcaagctgaatttctgaaaattctctgacaccattcactaaaggaaccagccgattatacagagccttatctgtttgcgtgttttcatgaagaatcctcgtgtcgatggcggcagccagcaagttattggcagcggtgatggcgtggatgtctccagtcaagtgaaggttgaactcctccatggggatgacctgggcatatccaccacccgcggctcctcctttcactccaaacgtcggtccttgggaaggctgcctcaagcaggcaaaggagttgacattcaggtgtgcggtcagagcctgcacaagcccgatggtgactgtgctcttcccttctccaagaggggtgggtgtgatcccagcaactaagacgtattttccatctgcttgatcctttaacctttctagcacggacaaacgtactttggctttgcttttgccatagatttcaatttcatctgcaagcaatccaatctccttggcaaggacatccacagcttttggagtttgtcctcttgaaatctcaatgtcacttggcacaggggagagaggctgaagtttcaagcagtgaagtctccaccgcctgtgctgctgttcacgaagccatctccttccactactgaccatgttctgaattcgcagagctgcagcaaggagaatcacatcatcttcctcaatgagtccaccaaaatgtattcttggagagccacacccaaccttccctgacaggaagtcatgggagcagttgagaacagtagttcctggttgtatccaagtaaggggaatctcttctggcttaggtgagcctaggaccacaatgtcagcctcgtgaagcttgctttgaagctggcgtgttttccactggatgctcattgtcatggacccttttctctggaacaggcattgtagagcagcttccaaagacccatgggcccccactaccaaaatcttctttccatctaggttgacacctgatttttcaagaagttcaattacagctttggcaacaggtgaaacaaaacattcatgggcatcccctcgcaccagcttccccaggtttatgtctgttactccatccacatctttttctggtttcaaggcattgaggactttgttgctaaacaagttctcagagatctgaagggcaaggccatgtactctggtatcttcattgatctttaagatttcatctataatctcggcttcactgctatctggagggaggcaaatgtgagtgatgttcagaccagcctcctcagccaaattctcggttgatttcctagcatcaagcttgtccgtcacctcgcctggataacttgcaacgaaccgcgcttgaagcgcagcagtttttttcttgccaataaactatagatacttcttttgaattctgaatgacttctctgacgatggagtcccgcgccgcgggcgttcggccgccggggctgc

SEQ ID NO: 65904 - DNA, 1753 bp, Homo sapiens
tttttttttggcttgttttttaaataaaccaaagtcaaaaacaaactgagagtgtgtcctccaacagctcttcctactctccttaggcttgccccgcgtgcccttcccaccccagcgcctctgctggaccaacggtgcagttcgctccaagaaggtgggccagggcccggggaggtgcgcaacacacccctggcatgctgggcttgcctgctggagggtgctgctgctccgtggagggcagcaggcccaggaaggggtttcctctgctcgcctaagttacagcacaatactatgtggacgtttcattgaaaattttacttgaaaaaataaaattccagatactcaggtgagacacaaacccactgttcctgctttgagacctgtgaattcttgtgggacagttccactgacagcttgcgttcccgaggtaccagtcctcagtgacctcgggaaccccaaccacttaggtcccaaagccacaagggtgccctttgtcttgctgggaagctggctgagggcctgccagggctggaggaccagctctcccgcacagggttcagggcctctcccagaaaaaagaggttttgaagtgaaaaggcaacgaggggccagagggctccccaggatgggtcttttggaggtagatttgatgcccacaacgcatgcaaggctaagacccccaacttagccaacgaagcccatggcctcagaagggctgcagcttgctcaggccgtgggccaggatgcatgctggacggttctccaaataaaaaagccccaagggtttgtctacactgcttacctgctggggctgtgagtggggagacggcggcctgcctagggctcctggtgccaggctcaggaagagtcattcattgcaaagggccggcaagtgaaccagggccacctctgtccccagcctgtgagaggagcagctagccctgagaagggcaaggatgaatgaggctgaccacgtcacaggagtcctccaagagtgacggggattcagtcatcggccacaatggagagggcccggagctcactgagtttggcctcgttctcccgctcccgctgctcatcggagtggcctggctggtcaagctgatgggacaggtctccaaagatcttgtgcatttccgagtagtacacaacctgagctcggatgagggactcgaagctgggctggaagtagtcgaggcggctgccgtagaagcgcggcatctcctccagcagctgcctgttcttggcttcaaagtcctcccgcacaggccgcagctcctctcgtgcctggtggagcttggccagcactggccccgtcttctccttttcctcatacttctccaccttggcctgcagcctcctgtagtcctgcaaggcctgttcccgcctcttcacagccatgttgaggctcgggaagacactgccgaacttttttaagggctcgatcacagtcttctggatctggttcaccttttcctgattgaaggcatccatccgcttcatggccgtgtccagggccgtcaccatgttcagaaggtcctggtcttgctcacagaggggattggagagtaagtccaaggatatcttcacggcagattttgacatggtgctgaagttttccatactccctttcaaagtctctctccactgttttgggcacaatctgtttcttgggctgcccaatcttaaaaggaatccagctcatggtcccgaacctgcgtctgccgccggggtcctcagccacaactcgttt

SEQ ID NO: 65905 - DNA, 1159 bp, Homo sapiens
  misc_feature (1)...(1159): n = a,t,c or g
ctccctgaccggtccccctgccctaactcctccctgacccgttctccagccctaactcctccctgaccagtcctcctgccctaagtctcctccctgaccagtcctcctgccctaagtctcctccctgaccagtcctcctgccctaactcctccctgaccagtcctcctgccctaagtctcctccctgagtggtcctcctgccctaagtctcctccctgaccggtcctcctgccctaagtctcctccctgaccggtcctcctgccctaagtctcctccctgactggtcctcctgccctaactcctccctgactggcctccatccaagcagagcttgagtattgctggttccctgctcaaacccaccactggttgctggttccctgctcaaacccaccactggcactggcttcccatcacatacagaataaaggctaaatgtctacacttggcacagaaagtcatcaacaggccccagggcacgtttctggtgttatcttctgctaatgccctgccctgactcctatgctgcagctgaatggaacgagccattatcccctcaggaacgctggcttctcagtaaacgattatagcccagaagccctgtcatcacagaacctagctattggctaatgggtcagctttggcttcatttctctgaataatttatttcaaaacataatcccaaggaacaaggttaggaaaaggggagggtgacagggacagagggagagcctgtgcaaagacgtgttatccagttggcccctgctgtggctggctggttgctcaatcctgtaagatcttctaagaagctttatgagatgtagtgagaaccatctgtcctggggatgagtctgtctgtcggcttccattcctcatgggttatgagttgctccacaggattctggatgtatacagatgctcttcatcttaggaaggggttacgtcccaataaacacgtggtaagtcaaaaatactgtgacctggaagctttctcctggctgcgagttgtcccacgtttgcttggcgttgcccggccttttccagactgaaccaatgttcatcttacatgtgttgattgatgtctcatgtctccctaaaacgtatgaccaccttggcacatgtcgtcaggacatcctgaggctgtgtcacggntgtgca

SEQ ID NO: 65906 - DNA, 1249 bp, Homo sapiens
tttttttttttttgtggaaaacaacaccttatttattcagggtgtaatactgtctacttcctttcagaagacttgaaaaagatcaaaataggataaatggacagttactactaaacgattcaaatacttgggcagtatctttccctcttaaccctttcacacgtttttaaagtgtcaaaattgatgaatggtataaattcaaaaggaaaattcttttctactgaaaaggacatccagctcgcacaaacggtggttcagctgaaggcaaggcgtttctggttttcctctgcactcgggcggatcgttaacttccccaagttacaactgagttgctctttccaggcttttcgaagcatctttaagtttccccaccaagtcctgtaattgttccatgctgcaactaaaactaatctctggataggatggggaatcagtgttctgtacacttaaggtcaccaaatatgcaggtctgtacatcctatgaagttgattggtctttatctgatattccaagcgccaagaaacatccgttatatgagggagaaatctgcctatactgaaagatgcaatgataacttcgtacatagtctcctcagaagaacttttcagttatttatatttactaagaatggctctactttccacccccaactccattttaatccattctgaatttaaaccattgttaaactttatttttaaattatgaatggtaaaggagcatttcaaaatcatctcaataaacgatctttaaaaacatgagcttaacttcaattgcttgacatgccctttggctccttttctttgggtcaagatcccgaagatcttgtttcacaccaacactctccattcatacctgcaagtgaaaagtgcctcagcttgacaccttatacagtacctaccttcccagtaggatttctagggaattcttattatactgatattccgtgcaaaacagttctattcgctctctgtcaaatttacagtcttctagataagtgcttagagttgacttgtcagctcggtgctttcctgcctctagtatgtaagttgcagctgctgcatgacaatgttttaaaaccactgggtcgatatgtttcaagtctggatgatctaacacggcctcgtccgcctgggcgtccagcagactctggaatgccgcccggaggagaagcgtgaaggcgttggagtcgaaggagcggggatccgccagcatctggaagcctttctgcacagactccgagagctc

SEQ ID NO: 65907 - DNA, 5664 bp, Homo sapiens
  misc_feature (1)...(5664): n = a,t,c or g
ttttttttttttgcacagaaaacattgctttattaactgcgtttgccaacacacgaggagtgcaaagggctccctatgacacaagccctggtggggccggggtctggaagcccccatgagtgagcaggacaggatggggctgggaactatgcagcagcggcaacacagaatcatgcagggcacagcgggcactggccacacccaggtgaccatacattctattgctcgttaagggttgcgcacatggacaatgtacaaaaaggagaaataggtctttgcgttaatgaaaaatacattttttctctacaaaggaatcttttctaatacaagaaaataaatattgcaacataagccaaaaataatttaaaattgctcttttcaatatattttcaatatttctcttgtatattaacaaatggcacatcactttctttgaaacaaagacagaaggtgtctcctcctgtgacattcatatcatccccccaccgtcccctcaaactgacgtggaacacaaagtgtttgtgcctctgagggagaaagtggcaggaggtgccttaaagaacaaccaaaggtctcagactccagccctggctcattggccaatgtggccagcgaggccaagggcatgggagagtgccctccccaagggccttgctatagaaatccagatcatttttcagtggtttgcatatggacaaaggttggccacatctggcagttagcaaggaaatgccaagttcagccgctgccaatgttggttagaattgggcagttgaatctctaggaattgtcccagctagtcccacagtgtgcccatacacagtatacacaggcatgcctgcatacggacacacgagacgtggcctggcacaccccccacaaacaattcaacatctatgtctggaaacctggggtggcttctccaaggaagctgaggcccttacattgcaaatgctcacacactgtcactaagtcaggctcatttaataaaataaacccttctacctttcttcttctcatttgtttcaaaatacatttatgatacataaaaatacttttcttgcacattatcctttgtcatgtgatgagggggaaggaggtggtgggcggtcaggtcagtgagaagggggacgatagccagaatgagttacagagcagcttctccttccctgcggaggagctgtgtgtggaggcagatgtggttgagagaaagatctacctccacctctgacctggaaaaggaacctgcctcagtctcagggacaagcaaagccctctacactggggacagtagaccggaaaaagacagaagcggctgtgaccaacaggggaaaggctgggaactgggggaggatgggtggctggcatccttctccttgcagcctgctggacatcctggaggtggagacagctgcctgaagaagattgctccagggcttggcctgggagtgaaagggcaccccaaatgaaaggccacccccctcccctcgcagcagccagccagcctaacagacatttgggttctgcaggacacaggctcagcaacagtccagtccaaagcaacagccaatgaagaagggccagaatccagaggccaacaatgtgagcagaggctcttggaagaacaccagccagcccgaggcaaggggccagactcgttgcaccctctccctaattctccacccacccctgccaccagggaggcccagcccctgccccaggatggtgtgaaggggcaaggggccaagtgctgagactgctggaccctgggctttctgggacccctggcagagtttggttgttctttaagctcacctctttgcttcctgcagggtcagaccgggcaatctggcacagacagggttgcagcccgaggtgacccaaagcatggggaaggaagaagttctgttcaaaggcagtaaacagagactggggttgggacactgatgctgacactgactggtcactactacccaaggcgggcaggcagaactaaactctacagggtagctcatgccatcccaacgcccagaatccttgaagcccaccccactccctccgagtccacccggactagacacatttgtccgatcctctgaactgagtcattatctttgtttcctgttttgctaaaattcacatgaaattgagtgtcgatgacaatgccactgtcgtaccttgatagttttggagttaggggtggatgaaggtcaagctgttccccatcctgcttatttgctttatgtatttggggaggagggaaccacatggtaaagacgttttccatgctggtttcaccgtcagtatctttcccctctgtgagtctcacagtttaggaaagctcacagtgggctcagcccaggatctgaaatctaacacccaggtacacttcagcagcagcaaagcatcctcttccaagcgcttgagctcttctccttgggtgtgtgcaatgaacatgtttctatactttgttgctaaagaactccatttaaaaaaaagtccaaatgacaagttgtcaggtccaggctgtgctgtattatggtcaaaatattctttggcatccacagaatgattcgactgattcactggactttttgcaaggttctttttggagaagttctggctttaccagtggtggaagtgacccaggagtaattcatcaaagaaaaaaaaatgttttcacggaattccttttttgttgttccctgagctatcaccctggggccactctactgaaactcttcagagcaactacctgggacctaagggtggggtggggaaggcaggacggcggggggggatggcaggacggggggggggggatggctgtgccaggggttaaggctcaggaacaggggaacatccagcaagacttacaacagccccagcggccaacaccggcccgccctgggccccgggatcccactgcttgttggaaggaggagtttccaaaaggaaaccacggaagaagctcatcttgtagcaggactaggaaacttgaaaaggcaaacggtctggtctggtcagctctgtctgagcgtgaccagacttcggccgagactggccccgaaggaaggaaggaagttggagcctcagagtgattctctacagtgggctggtctgagccccatgaccctgtctgggcactggccctcccctacagccctccacctgcactggcagctggctgtttgggagtcccctgagtaaatggcacagctcaggagggattctgggaaccccttcccagagccgctgggctgggcactggcaggggcagagcagcaagggaggggagggtggcagggtgggcaggcaggcctcagatgatacgggctgatcaggaacagctttcagttcccctggaactagcgggccctctgcaccccctcagtgctttctcatataaactcgttgtgcttgtgacagtgagtagactctggctgggtatcgtttattatacttccttggggatcggtggagtgtagcaggaccccccaaatggaccccagtgggatctgggggcaaggcggggtaggccctggactggcccatctgccatgaaataatgcccaaacgacagtctgtgtcacccagtggcagtgggctggagtcctgagctcttgtccaccttgcttgcatctagccaggagcccagcaataccacgtgggcagggcagggatggtgcgcgggacctggcagggtcctagcggccggagccgtggaaggaatcctaatgtcctaggccagcacagaggaaagacaacagtgtagaattcaaaactctctctatattaaaaataaaaccacgacggagtggcagcctcgagggtctgggacactcagcagagactggaaatggcagttgtgactgggctgaggccttgtggggggaccagggcagggcctgggacagggaagggggtgagttaggaggccagtacgcccatgcggaccaccctcctttgcccctgcctcccggggaccccgctgcaccccaccgtcctcggcctcttacatcttgagttgctcatctccccattcagagaagtaagccatcagtctcagtgtcaaaatgcaggcttgaccttgggcctctcagccacagctgaaaggtggtccccatccccagcatcaggcctgggcacccgggcaatctccggggtttaccttggctctcgcgggggtggccggagccggcccaaaggcttagggcttgctgcagggccagggcacttggacatctgagtcagcagctactgaggctgcctcgtccggggtctcaggggccagtggcggggggctttcaggggtggctaggatgggacagtccccggctgcagggctggacggcaagtgagaagatgtccgacgtggtggcttcctggtaggtggcccttgaccccccttgccactgcctgcatcctggnccccaggtcttcttgggggctttgtctggagtcgtccgtgaaccaggcccgtcctgcggtggtggtggtggtggtttcttcttggcaggcaggcgggtgcggcctcgggccttcctagcagggtcaccaggtcgcagcgaggggtcccgcatgaagctgagcagtgtctcctcgtcctgcagcagttcctctgacagcagccctggagcagggtcctcgcggtgcccattgttcagtggccactcgctcatggccatgttctctgctgtgatctgcaccgactgtgccagccagctgttgaagaaggtgccatcgatggggaatgaggtggacaggcctgctcgacacagatcctgttcaataagtttcatctgcaggtggaatatctgctcctggagtttgcagatggcgtgtttcgttctctcgcgccttgtcaccatgtagcacagatttctaaccctctctaggtcctgccgcagatgggtgaagagcttcaggcggcggtagaggacgtcctgctcctgctgggccaggttgtccacctcgtcggtcttgggggtcagcagcggctggttggcattggctttcctcttcagcttccagtactggtagatgaagtcgaccagtgcctcagccaggtccagccgctcagccacctcagccggctccaccagctcgtagaagtcctcctctagctgctgcagccgctgcttgcgcagggtcaccttttccaggtcctcgccagcctggctgggttccgtgggctcagatgtgggctcattacgtgggcccccgtcactgtgctcctggcagaatgacttgaacttgacctcatcgttgtctgctaatatagtccgcatttccaggccgtggtcaaaggcgcatgtgacatggaacgctgtgaccgcaggaaggcatggaacactggatgcaggtgcctgtgcattccttgcagaggctgcaggacagagcccagcggctggctgggatatgcgagatcttggtgatgggctccatcttctctgggcagccgatgctgacctcaggaatccatagggcacagctgacatgcacccacttggtcccacttctagtgggcttcaaggctcctcctcgcttggggcagagcaggcactttggctggacacccagggcacacgtccggcacagccagctgcccgtgggcaccttgaggatcccgtagcatgcctgatgcacacagacgttgcactt

SEQ ID NO: 65908 - DNA, 1336 bp, Homo sapiens
ccaagctagaaggaaagggaatggggggcatgttagggaaggggtggagagcagggtctggcaagtgactggctcttgtccctacagtgtgtactccactgggtctcgcccgcatgttctccgtcactgggaagctgctagtcaagccccggctgctggaagacctggaggagcagctgtactgctcagcctttgaggaggcagccctgacccgcaggatctgtaatcctacttcctgctggctgcctttagacatggagctgctacacagacaggtcctggctctgcagacacagagggtcctgctgggtatgtggcttcgtagggcttgggatacctgggtttccccaaggagagtagcccctggttccaggtgcttgctgacagcctcccatccctgcacagagaagaggcggaaggcttcagcctggcaacggaacctgggctaccccctggctatgctgtgcttgctggtgctgacgggcctgtctgtgctcattgtggccatccacatcctggagctgctcatcgatgaggctgccatgccccgaggcatgcaggtaccaggctgccctcccaccatatcctttggggagggcctaagaacagctggggagaggaggcagaagctgaggacagtgggaaggctgggtgccgggtagtgctgatggtggggaatgctcacagtgatactgccccactcctcagggtacctccttaggccaggtctccttctccaagctgggctcctttggtgccgtcattcaggttgtactcatcttttacctaatggtgtcctcagttgtgggcttctatagctctccactcttccggagcctgcggcccagatggcacgacactgccatgacgcagataattgggaactgtgtctgtctcctggtcctaagctcagcacttcctgtcttctctcgaaccctggggctcactcgctttgacctgctgggtgactttggacgcttcaactggctgggcaatttctacattgtgttcctctacaacgcagcctttgcaggcctcaccacactctgtctggtgaagaccttcactgcagctgtgcgggcagagctgatccgggcctttggtgagagggagtgagggtgcaggctagtggggggtggtaatcatctaggacactctggaacatggatcaccccagcaggggagagggtgtgcttcctgctttgtgggtaacgtacctcatccacacattctgtggcttggctgcctggtccctaacggactggacctttgacttgcttttgactgcccatctcctcttctccagggctggacagactgccgctgcccgtctccg

SEQ ID NO: 65909 - DNA, 1512 bp, Homo sapiens
ctgagagtgagaacagtaatacgttcagatctaagagtgggaaagatgccagttttgagtctggagctggggataacaccagcatcaaggataagtttgaggctgctggtggagttgatatagggtcttggttctgtgctggtaatgaaaacacaagtgaggacaaatctgcacctaaggctaaagccaaaaagtcatctgagtcaagaggcatatatccgtacatggtccctggggcaggaatggggtcatgggatggagccatgatctggtcggaaactaagtttgcacatcaaagtgaggccagcttcccagttgaagatgagtccagaaaacaaaccaggactggggaaaaaactcggccctggtcttgccgctgtaaacacgaagctaatatggatccacgagatcttgaaaaactcatttgcatgattgagatgactgaagatccttctgttcatgaaatagccaataatgctttatataacagtgctgattattcttattctcatgaagttgttcgtaatgtaggtggaatttcagttattgaaagcttgctcaataatccctaccccagtgttaggcagaaggctttaaatgcactgaataatatctcagtgggctgctgaaaaccataggaaggttaaaacttacttaaaccaagtatgtgaagacactgtcacctatcccttgaattcaaatgtgcagttggctggactaaggttgataaggcatctgactattaccagtgaatatcagcatatggttacaaattatatttcagaatttcttcgtttgttaacggtggggaagtgggagaaacttaaaggaccctgtttttgggaatgcttttgaatttctctaaaaatccatctatgacaaaagacttgctcattgccaatgcaccaacatcacctgattaacatttttagcaagaaagagacaaaggagaatattcttaatgctctttcactatttgaaaatataaattaccattttaaaagaagagcaaaagcatttaccccagggacaaattcagtaaaaattccctttatttcctattccaacgacctaaagcatgtgccaagaaacttcgagccttagcagcagaatgcaatgaccctgaggtgaaagagagagttgagctattaataagtaaactctgattggctgtatgttcccaaacaaatttgagtaatattttggttttgcactctggaagtaatgcacattgtaaattgcattataactttgaaactgatgttacctatgatggtctatagctggaaccatttaatggaacaccaaatgaattcaagcttgtactaaaaatacatgtgttgatttttatcttgtctggattgagatatttttagtatgcttcatgagcagaaactgaatggattcttcataagtaaggtaatctttggtcctttgtgtggacttatgtttatacatttaagactatttttatgtcatcaataaagttgtgtgttttaagcagcagaaaaa

SEQ ID NO: 65910 - DNA, 3593 bp, Homo sapiens
atgagcctctccatgagagatccggtcattcctgggacaagcatggcctaccatccgttcctacctcaccgggcgccggacttcgccatgagcgcggtgctgggtcaccagccgccgttcttccccgcgctgacgctgcctcccaacggcgcggcggcgctctcgctgccgggcgccctggccaagccgatcatggatcaattggtgggggcggccgagaccggcatcccgttctcctccctggggccccaggcgcatctgaggcctttgaagaccatggagcccgaagaagaggtggaggacgaccccaaggtgcacctggaggctaaagaactttgggatcagtttcacaagcggggcaccgagatggtcattaccaagtcgggaaggcgaatgtttcctccatttaaagtgagatgttctgggctggataaaaaagccaaatacattttattgatggacattatagctgctgatgactgtcgttataaatttcacaattctcggtggatggtggctggtaaggccgaccccgaaatgccaaagaggatgtacattcacccggacagccccgctactggggaacagtggatgtccaaagtcgtcactttccacaaactgaaactcaccaacaacatttcagacaaacatggatttactatattgaactccatgcacaaataccagccccggttccacattgtaagagccaatgacatcttgaaactcccttatagtacatttcggacatacttgttccccgaaactgaattcatcgctgtgactgcataccagaatgataagataacccagttaaaaatagacaacaacccttttgcaaaaggtttccgggacactggaaatggccgaagagaaaaaagaaaacagctcaccctgcagtccatgagggtgtttgatgaaagacacaaaaaggagaatgggacctctgatgagtcctccagtgaacaagcagctttcaactgcttcgccccaggcttcttctccagccgcctccactgtaaaggacatcgaacctcaaagattttatgtcccagccgagggtgaagagcgacgcccgaggccgagagcaaagaggagcatggccccgcagcctgtcgacgcgggccaagatctccccccacccacgtcggaggagccctgccgtgacaagggcagcccccgcggtcaaggctcaccttttcgctgctgagcggccccgggacagcgggcggctggacaaagcgtcgcccgactcacgccatagccccgccaccatctcgtccagcactcgcggcctgggcgcggaggagcgcaggagcccggttcgcgaggggcacagcgccggccaaggtggaagaggcgcgcgcgctcccgggcaaggaggccttcgcgccgctcacggtgcagacggacgcggccgccgcgcacctggcccagggccccctgcctggcctcggcttcgccccgggcctggcgggccaacagttcttcaacgggcacccgctcttcctgcaccccagccagtttgccatggggggcgccttctccagcatggcggccgctggcatgggtcccctcctggccacggtttctggggcctccaccggtgtctcgggcctggattccacggccatggcctctgccgctgcggcgcagggactgtccggggcgtccgcggccaccctgcccttccacctccagcagcacgtcctggcctctcagggcctggccatgtcccctttcggaagcctgttcccttacccctacacgtacatggccgcagcggcggccgcttctctgcggcagcctcagcttcggtgcaccgcaccccttcttaatctgaacaccatgcgcccgcggttgcgctacagcccctactccatcccggtgccggtcccggacggcagcagtctgctcaccaccgccctgccctccatggcggcggccgcggggcccctggacggcaaagccgccgccctggccgccagcccggcctcgggtggcagtggactcgggctctgaactcaacagccgctcctccagcgctctcctccagctccatgtccttgtcgcccaaactctgcgcggagaaagaggcggccaccagcgaactgcagagcatccagcggttggttagcggcttggaagccaagccggacaggtcccgcagcgcgtccccgtagacccgtcccagacacgtcttttcattccagtccagttcaggctgccgtgcactttgtcggatataaaataaaccacgggcccgccatggcgttagcccttccttttgcagttgcgtctgggaaggggccccggactccctcgagagaatgtgctagagacagcccctgtcttcttggcgtggtttatatgtccgggatctggatcagattctgggggctcagaaacgtcggttgcattgagctactgggggtaggagttccaacatttatgtccagagcaacttccagcaaggctggtctgggtctctgcccaccaggcggggaggtgttcaaagacatctccctcagtgcggatttatatatatatttttccttcactgtgtcaagtggaaacaaaaacaaaatctttcaaaaaaaaaatcgggacaagtgaacacattaacatgattctgtttgtgcagattaaaaactttatagggacttgcattatcggttctcaataaattactgagcagctttgtttggggagggaagtccctaccatccttgtttagtctatattaagaaaatctgtgtctttttaatattcttgtgatgttttcagagccgctgtaggtctcttcttgcatgtccacagtaatgtatttgtggtttttattttgaacgcttgcttttagagagaaaacaatatagccccctacccttttcccaatcctttgccctcaaatcagtgacccaggggagggggggatttaaagggaaggagtgggcaaaacacataaaatgaatttattatatctaagctctgtagcaggattcatgtcgttctttgacagttctttctctttcctgtatatgcaataacaaggttttaaaaaaataataaagaagtgagactattagacaaagtatttatgtaattatttgataactcttgttaaataggtgggaatatgaatgcttggaaaattaaactttaatttattgacattgtacatagctctgtgtaaatagaattgccaactgtcaggttttgtgttcttgttttcctttagttgggtttatttccaggtcacagaattgctgttaacactagaaaacacacttcctgcaccaacaccaatacccctttcaaaagagttgtctgcaacatttttgttttcttttttaatgtccaaaagtggggggaaagtgctatttcctattttcaccaaaattggggggaagggagtgccacttttccaggcttccactttcaaattccttaaaatataactgagattgctgtggggagggaggagggcagaggctgcggtttgactttttaatttttcttttgttatttgtatttgctagtctctgatttcctcaaaacgaagtggaatttactactgttgtcagttgaaacag

SEQ ID NO: 65911 - DNA, 5268 bp, Homo sapiens
cggaatactaaaaggtccagggcagaaccctgagaaagattaacatcttggggatgagcaaaggagaagccagagtagtggaaaggaaatgacgagaacgtagtattttctttttttctgagacggagtctcgctctgtcgcccaggctggagtgcagtggcgcgatctccgctcactgcaagctccgcctcccgggctcacgccattctcctgcctcagcctcccaagtagctgggactacaggtgcccgccacctcgcccggctaatgttttctatttttagtagagatggggtttcaccatgttggccaggatggtctcgctctcctgacctcgtgatcccccgacctcagcctcccaaagtgctgggattacaggcgtgagcccctggagattttttttttttttttttgagatggagtctcgctctgtcgcccaggctggactgcggactgcagtggcgcaatctcggctcactgcaagctccgcctcccgggttcacgccattctcctgcctcagcctcccgagtagctgggactacaggcgcccgccaccgcgcccggctaattttttgtatttttagtagagacggggtttcaccgtgttagccaggatggtctcgatctcctgacctcatgatccacccgcctcggcctcccaaagtgctgggattacaggcgtgagccaccgcacctggccagcgtttatctttaaatgtgccttggacctggcccctggctctttgggagggagagtccttggcaggccccgttgcctccaccccaccagtgcaccttggctcctggtcactgcccaccctccctgcccgggcaggaattcttacaggccctacactcctgaagggaaatcaggctggtcctggggcaggcagcctctcagagctgttgagaattgagcaatctccttgtgctctttcaagctgttcttttctttggttcacactgagcaagggctggttgctccgatagggagaagacgtgaggagtggcatttactgtgattgagcacagggcctgtggactctcccattcacgcagccacatttcccaaaaagaagtggtcctgctccccaccccccgacccccactgcagcgccacctgcctttatctgtacttggagggacagcgcacaggctgtggctggctaccccaggtggctccacccagctctcagaagttcacctgctgcactcagaggccgtttacttgaggtttgatatttatctccaaaggaagggctgccccgactggcctggaccctccagggagttcagcaagccggaaatgcgtgtctgctgctctcctggcccctgggccacctgcttctgtggccctgggattggggagccagggctgagggcctgtagggccccctgtctgtgcctctagaggccctgagccacctcctgcagtgttttagatcccataagcaagagacagaattgtgcatggatggtgagaaaacatgaagctttttatttgtaaacagaaaatggcagggctcactgtgtggggctggggacagcgctaggcctgctttaggccgtgcaccccaacctggggtgttccaccaagaggggtacagtggcctccactgtgagtatgtggccatcctctggctcctgattgctgagttcctgattgctgtctttgcgtaacttaggaaccccgatgaagagcccgtgctcatagctccgttcctgacatgttcaggaacgcctctgttgaggtttttctctttggttctggaattcctgggtccctttgacccctgatgcgtttgttttgggtgttgatgagcactggagctgcttccccacagggatggggcattggggagattccgacacagcagggccctcacccaggaggctgctgtgggtgctggagcggttgcttccatggagctgggattcctctcatttggggctgtaggaaggggtctttcctctctgtgctaacagttgtttgtttaaaaagaaaggctgtttaaacctttcaaacttaaaacttctttttttctttggagatggagtctcaccctgtctcctcccaggttcaagtgattgtcatgcctcagcctcctgaatagctgagattacaggcacatgctaccatgcccagctaatttttgtagttttagtagagacggtgatatggtttggctgtgtccccaccccaatctcaacttgaattgtatctccaagaatttccatgtgttgtgggagggacccaggggaggcaattgaatcatcgggctggtcttttctgtgctattctcgtgatagtgagtaagtctcatgcgatctgataggtttattaggggtttctgcttttgcttcctcctcattttttctcttgccgctgccatgtaaaaagtgcctttcaccacccgccatgattctgaggcttccccagccatgtggaactgtaagtccaattaaacctctttttgttcccagtttcgggtatatcttcttcagcagcgtgaaaatggagtgcacacacacgtcagcactgtgggcgcacacacctgcactcacacattcatcaggacccatgggcacacgtgcacacacacgtcagtcctgtgggtgcacacacctgcactcacacattcatcaggacccatgggcacacgtgcacacacgtcagcaccgtgagcgcacacacctgcactcacgcacacacctgcactcacgcactcaggaccgacggacatacgtgcacacacacatcagcaccgtgggcgcacacacctgcactcaacgcactcgtcaggacccacgggcagatgtacacacatgcaccagcacccgtggacacgtgcacgcacacatcagcacccatgggcatacatggatgcacacatcagtaccatgggcacacacacatgcacccactcccgatggcttcggcttgctgggtgcctgcttcgccctcgggtgagcaagtctggaggcaggcacttggggtggggccacagtatggttcttaggagcccagtgtcccctggacccacttgctcccagccttgggtcccaaagtgctgctcccactggtctctgtgccccacccatcatgggcagggctgtctgaacagggcagagtcacgagtgatgcaagggtggggtgtggaggccttgcctagaggcagcagccagctctggcttggctgggccttaccttcactgtcctgctgtgagacgcaggagccctgggggaggacggcagtctgtatcagggcagtggtgaaactgcagattcctaaatgtgatctggagacgactcttgctggagaaatctacccaggtcccttgggtctgtccctcccttcaccctccacagtcagggacaggctgcgtggtgtgcctccccatctgtgcgtggcctcagcgcagcaggcctgtcctgcccattgctaaaggtagagcccggcagattcattgtgtggtgagggcttccccagacccaccaactcctgtgtcttcccatggtgagaagggtggggtctctctggggcctttttttttttaggaagtcactgatgccactcaggtgggtgcccagctccccacctgatctctggagtggccccttctgctggaggctgccccaggctggatgccgtggcctgcagaccccccttcttgcagtccctgggcaggcagcacccatgcgcacacgtgcacacaggccgtgagcactgccctgtgagccaggtggtggtggggggtgttggggctaaggtttggttagggcccgagtgcttgcgcacccccccatccaatttcccatggtgctgggatgctgccgcctcctggaccctggcgttgaagtgccaccttcatctccctccccagacagtaagctccagacaagggcaggctgtggccgtcactctggccagctgctcgggggcttggtggctgctgggtggtcgcctggactctgccctcctgtctcctggtgtcccggaggggccttgctgggctgggccctccaccgccccattgggcgcctgactctcagggcgcagtcagttctttggggatggccctgatctctgagcgggactgcctctggcctttcttctgcatcccctactgaacagcagcctgctagacgccctgaggaggcaggctgaggggtggaaggggcgtggccgtgcccagcagagaccaccctctgatgacggtgggcgtcctttccagcccctctcggggcatcgcttcatcccttcccccatttccttcctggccctgctctccaagtcttgtgtgtgtggtggggcctggcttccctcccggcctctcgcctgttcccgcccatccctctctggttctctcaggcctcctctgggcttgccaggaatgtaggggaattagggggagggggacacaggaaatgcctcccctcctctgacaacagctccagctgcagggggaggggggaggggagagcagagtgggtgagacgagggagggctgaaggggggagtcggcttggggggagagtgttctcctgcccacccaggcactgggcgtggcccagccccacagacagaacagttctttcttccttattttattttttattagagacagggtctcactctgtcgcccaggctggagtgcagtcgtgtgattggcctcaagcgattctcccacctcagccttccaaagcactgggattacagcagtgagccagtgtgcccagcctcttcctaagtttacaccagtgtgggcatccagtgaggggaactggcctgtgatgcggtggtccttgtgacatgtcaggcagttttagagtagggtttgttaaaacatgggttaaattgggccccacccccagccctccactcctcagctactcaggagaagcgcgaggcatgggtgcgcgaaaattctgagtctgccttccacctgaaccccctctggaaggtctgaccaccggccgggcgcggtggctcacgcctgtaatcccagcactttgggaggccgaggcgggcggatcacgaggtcaggagatcgagaccatcctggctaacacagtgaaaccccgtctctactaaaaatacaaaaaattagccgggcgtggtggcgggcgcctgtagtcccagctacttgggaggctgaggcaggagaatggcgtgaacccgggaggcggagcttgcagtgagccgagatcccgccactgcactccagcctgggcgacagagcgagactccatctcaaaaaaaaaa

SEQ ID NO: 65912 - DNA, 5654 bp, Homo sapiens
ggagcgacgccgctcgggtcagtcggcggccggactgggaagatggacgcagctactctgacctacgacactctccggtttgctgagtttgaagattttcctgagacctcagagcccgtttggatactgggtagaaaatacagcattttcacagaaaaggacgagatcttgtctgatgtggcatctagactttggtttacatacaggaaaaactttccagccattggggggacaggccccacctcggacacaggctggggctgcatgctgcggtgtggacagatgatctttgcccaagccctggtgtgccggcacctaggccgagattggaggtggacacaaaggaagaggcagccagacagctacttcagcgtcctcaacgcattcatcgacaggaaggacagttactactccattcaccagatagcgcaaatgggagttggcgaaggcaagtccataggccagtggtacgggcccaacactgtcgcccaggtcctgaagaagcttgctgtcttcgatacgtggagctccttggcggtccacattgcaatggacaacactgttgtgatggaggaaatcagaaggttgtgcaggaccagcgttccctgtgcaggcgccactgcgtttcctgcagattccgaccggcactgcaacggattccctgccggagctgaggtcaccaacaggccgtcgccatggagacccctggtacttctcattcccctgcgcctggggctcacggacatcaacgaggcctacgtggagacgctgaagcactgcttcatggatgccccagtccctgggcgtcatcggagggaagcccaacagcgcccacttatttcatcggctaagttgggtgaggagctcatctacctggacccccacaccacgcagccagccgtggagcccactgatggctgcttcatcccggacgagagcttccactgccagcacccgccgtgccgcatgagcatcgcggagcttgacccgtccatcgctgtggtacgtggcggccacctgagcacacaggcatttggtgctgaatgctgtttgggaatgacgaggaaaactttcggatttttgcgtttttttttcagcatgttgggataagtactgtgttcacgtggttgggaatctgaagggtataagagccggaactgtgtccttgcaccctcacgtccctcccccaggcaccacctcctgtgcagccttcatggccttcgagtggcccagagagcgtgtgtctggatgtgagcgtgtgtgggcgcgtgctgagtgtgcatggatgagtgtgagccatggtgagtgtgtccccctcacacctacatttaaacacacgggcggcccctccacccacccctgcaccaccttcgtcacacccacatttaaacacgggcggcccctccacccacccactcctgcaccaccttttgttttccggaggctctgacttgacctctctgggggatttcctaagaaggagcttccctgtttttccattttgattacctagttgtgatttttggtgtgtgatttatgcagacctgcctgccctcaaatatatttgatggggaaagaggccaaaaaacccccctagaaatcatgaatgacggtgacatgctcagggaagcagttaaccgaatcgggggctctgttgtggatgctccgccccatttaggaggaagaaggcagatctgggcctgaaatgggacggtctctgagctgtggcgcagccccagagtgcacaccacgctccatgcacctcctgggcagggtggcagtagtggggaacatgggctggagctctgtggctcacactttttgtttgtttgtttgtttttgagacggagtctcactctgtcgcccaggctggagtgcagtggcgcgatctcggctcactgcaagctccgcctcccaggttcacgccattctcctgcctcagcctctggattagctgggactacaggcacccgccaccacgcctggctaattttctgtatttttaatagagacgggttttcactgtgttagccaggatggtcttgatctcctgacctcatgatccacccacctcggcctcccaaagtgctgggattacaggcgtgagccactgcgcgcagcctggcgcacacttcttaccagaacctagtcacgaattcctcgtcgaactagaattaggtatgtttgttactgtaaacgcagcttggtggcttacagtgattggcactctaacagtcaggtcaggctagagagccagccaccgcagacagaggagtggacgcgtgaacgttgagttgagaccaaaggggccacctggtgggataactgtcctcacccgtgaggaggaggaatgtcccctgtccccgggggagagtgctcctacaccagcgccgaggcggcagaatggtgtcttcaggggaagagagtgcccagtttgagcttctccccccatttcgtttctttttgtgttaacatctgcgcatctggcagcgttgagaattcctagtgactgtcattacaggcggcagctttaaggatgtgattgccggtgacccttggccggtcccctgtctcctggctcctcagcaggaggctccctgtgtcacggtgtccttgggcagttctcggtggcctttgccgccaagcttccagggagctgctgggcgaaggctgagacccagcggccctgtctcacagtcacagagagaagagctccccacttggccctaactcataacctgccccaatcccggaacactcggtgaggtttgagagatgcacaccacgtaacatctcgtgggcgaatcaaggcacagcaacgcagtggagcctgaggggagccgggcactggtgcaggggaccatgcacagggcaccctcggagctccattcccggccacaggagccaaggcaggctggaatgtccagcacctgcatgctgggggcctctgctgcgccactggcagtgggaatggaagcccccacctcttatccgactgcagatgggggtgtcgtgttctgctcatcgtcatttcgttttaggggtttttctgtaagactgaagatgacttcagtgattggtgccagcaagtcaaaaagctgtctctgcttggaggtgccctgcccatgtttgagctggtggagcagcagccttcacatctggcctgccccgacgtcctgaacctgtccctaggtgagagctgccaagtccaggtggggtccctcggaggtacgatctgtgcccttgcttccccagtcctggcccccttggttttgaccattaaggtgtgtgtgagcctgagccgtgagcacttggcagtggttcgcctgtgagaccaggtatggagtggagcgtcccctcctccaagcttgcgcccagcagcccaggacccacctcgtcttccccaccagcgctgcctgccggggcgctgtggagctgggcgtgctaccatggagtcctcaggggtctggagcagacagaacatgcaggctctgtggtgacgcagtcctgggtgggggactggttcacttgggcaccactggccatgggtggcgtagacccctcggaccatggccagcgtgccgcaggagccggcctgggctcgtgcagtgaagtgagtggccgtgagcgcgtcctcctcatctctgtctccctgtgggaaactctacaaacaaggcaatggcaatggaaccactcctgatgaccacgagggtcagacgcgggacagaggcccctcaggcctgagattgtgccggccgccccctgccctcctcaccctgccctgctcctcttctctgctccctccccccatattcgcaggtctgcacaacccccggacctgttcacacccgcatggggacagctgtctgtgggctgcagagcaggcactgctcagtctgccccacgccaagggcccttgactcacacccaggtggcccacccaagatgcctgatgcgctatgtcctgttccttctagattcttctgatgtagagcgactggaaagattcttcgactcagaagatgaagactttgaaatcctgtccctttgaaaatcctggggtcgggggtggcacctgtgagagcctggggctcctggtgccgctgcgtttcatccatcccgcccgctcgcctgccgagggctgcgccccgtgctgcctccccccagagggccacccgctgtgctcgtggactgaggctgcgctgcccgggaggccttactgcttggtgtcagactgcccagctcagagtgcccgtcagggcctgtgcatccgcacgcggagccgtctgttaggagcttccagagcgttctctcgacactgccagccccgtgttagcacctgggcctcagtcccacttgctcccaggcgccggttctgtggttggtttggaattaaagtcctgtttgaagttgtcagacacagacatgaatttctggggcgctccctgagtcagtctcagaagacctgtgcaggctggcgtgagaggagcggcagccacactgcggccccacgcccaaggactgggctgctctcgaggggggcgcgcccaccgctgtgtcctctctgcccagcctggcttaccaagggctacctcagtgggagatgaggttggaggaacgaaggcgaggttcctccttgctttggggagaaaagtattcaggaagtgggtgtgtgggaaacctgaagatggcgtgcacaggacacagcgtggtcggcctgggcagaagggcggctggctgtcctggagctgctgctggagcctgccctcagagtgtccctttccagtgctgtggcattctgtggcagcttccccaggtgtggtgacggggggggggcggggcctccacctgtgacagccaggcttgagggtggacggcgtgcctctcccaggagccttccccatgtccttgccttgctgagaattgccctcccatgccgctgaggtgttaggtggtttagggccaaaaggggaaaaccacttgagtcttgtggtgtgtggtgggcagacaccacagggtggcatcacctggtggcatttccagaacctcagccccgattccagcacccaccaccgcctgaccctgtgtaacctgctgtcccgggtcccagagtgcactctgccccactgctctgctgcctgtcctgggaaagtagctttgccccactaggaaatgtaaacaggagggcttggggagcgtgggcacttttctcatgagcagctactgcggcgttggcaggactcgctgctgctgctgctgctgcttgtgtaggtcggggagccggagatccccgaggacgcgcgccggacagtcggcactgaccggcccacctggtagcagaggacacccccagccccccaagcattgaagacatagtgtatttcctcgtatcctttctcccttgggtgtagttggggtggggaagcagggaaggctggtgcgatctccattccttgggctccgcgtccgagttcatggtgcgccgctgtgctgggagctgcagtgggaatgtgtgggacaccttgaccaaaggggagctttgtctcgtgtgttttgaaaaaggcttaatgaagagaatgttgttcattcttagtagtatagtttgcaattcttaatggcaaataataagtttcagtagaaacccaaaaaaaaaa

SEQ ID NO: 65913 - DNA, 353 bp, Homo sapiens
ggcacgaggaaggctcaatattgtcaaggtgtctctttttcccaacttgatcaatagagtcaacataatcctgattaaaatcctagcagttggtttcttggatattgaaaactgactctaaagcttatatagaaaaagacccagaatagctaacacagtattaaaagaggaacaaagctggaggactgataccactcagtttgaagttttgctataaagctacagtaatcaagacaatgtcatattggtgaaagaacagacatatgggtcagtggaacagagaacccagaaatagacccacacaaatacaatcaactgatttttaacaaaggggcaaaggtaattcagtagag

SEQ ID NO: 65914 - DNA, 1956 bp, Homo sapiens
ttttttttttttgagacagagtctcactctgttgccccggctggagtgcagcggcgtgatctcagctcactgcaacctccgcctcccaagttcaagcgattgtcctgcctcagcttcccaagtggctgggattacaggcgcccaccactatgcccagctaattttttgtatttttagtacagacggggtttcaccatgttggtcaggctggtctcgaactcctgacctcatgatttgcctgcctttgcctcccaaagtgctgggattacaggcgtgagccactgggcccagcctaatttattactttttaagcgatagccgtactgagccgccccctgaaggcggctgccaggtcttgccccaggcacctgggactctgtttgcaggccctgccctctgggctgagaaggatgcactttggacaagtcatctgtgtttgtgttttccagtttttctgtactttttaagtgttttgtgttacctggtctcattcccctccccacacctacccatttgaggggatggagttgaagtcacctggtcacctgtaccggcccagttcggctacaacctggagtgtccgtaaacaattcctctcacccacaaaacaatgtaatcccagcgatggactggattctgaaggccacttcccaccatcatagctgccatgcccaggcagtgcctgctctatatatagagtctgcctccaatcctgctggcttcagcctggagaagggatatgggagctggagctttgatggatgaataggtgttcaccggatctgggcagaggggtcatccgctccccaggtgggcactgataaaggaaggtacaggcctcacctggaactgccaaggcagcctccagaaatgctcggctgtctcggggcacgctccagtatgccagtcctgcgggattacgtccagctacttccagaaacactcagtgtcccctcccctcaggctctgccttggcctggccttgtccagtctaccctggacaagatgccgtgtgtttgaggcccagcagagtaagcccttggccgtgatgtgtctgaaacacctgttaggggttccctccatatgtcagagcctctctgggatgaagttcaagccagaaaacccagtcgaggctcaagtttgaatttcagcttcactgtgtggctctgggaaaatggctttcccactctgtgcctcagtttccttgtgtttacaagactaatcccattgactgtttattaagcacctactgtgtgccaagcgcttttacgtggcttctccctcagccagccttgagaaggctggaggtggtgtcatcacctccattttacagacaaagcagctgagaccccagcgaggggcggagacctgtcccacgatcacccagcaggagtcgtggcagaacggagcatcagccagaccctgttgtgggcgttgtcatcaagggagcttgaatggagggtctggtgtcagatacagccgactccagccccagctcatcccccatgatgctgtgtgacccactgggcactctggtgagggagctttccagacatcaacagcccactctgcttccctttctgagtcccctgtccagcactgcctagtgttggagggtagaccaaggctgtgcatgattcaccccctccttccatcctggagctggcagtgaataaaagcccgtatttacaaaaaaaaaaaaaaggggggcccgtttaaaagaacccttggggggcccaaatttaacgcgggctggcaaggaaaaatttttctccttaaggggggccgtataaaaacctgggcccggcccgtgttttaacaacgccgaaaggggaaaatctcttacctgggaattttggaaaagaacccttattttggggggggaacatagtggcccaacctccctccaaaaattaaaggctttagggaaaaaaaaaatttttaaggggtataggg

SEQ ID NO: 65915 - DNA, 3390 bp, Homo sapiens
tacagaagcagacacatgtaagaattcaccattagatgaattagaagaaggagaaattagaagtgatagtgaaacatctaaaccacaagaaagttttgaaaaaaattccaaacgtagagtgtcagctgatgtgcggaagtcaaagactatcccacgacgtgggaaaagtactgtgtgtttagataaagacagtaggaaaacacatgtaagaatccatcagaccaataacaaatggaataaaagacctgataaatctagtagatcttcaaaaacagagaagaaagataaagtgatgagcacttccagcttggaaaaaatagttccaattattgctgtaccctcttctgaacaagagatcatgcacatgttacgaatgataagaaaacatgtaagaaaaaattatatgaaattcaaggcaaaattttcattaatacaatttcacagaattattgagtcagcaattttgagttttacatctttaattaaacatctcaacttacacaaaatctctaagtcagtgactaccttacagaagaatctctgtgatattatagagtctaaacttaagcaagttaaaaagaatggcatagttgatcgtttatttgaacagcaactaccagatatgaaaaaaaaattgtcggaagtttgtagatgaccaacttgattatttgtttgcaaagcttaggaaaatcttagtatgtgattccaaaagctttggaagagatagtgatgaaggcaaacttgaaaaaacaagtaaacagaatgcacagtattcaaataggtcagaaaagggagtgtgggacaactccaacagaggaattgctggaaaggaaaaattatccaaaatcaggaaggaccctgttcattataaggtctttaggtggggggtgttaaaaaatctgaggaaaattatcaagaccaaaataactccagtattaacactgtaaagcatgacattaaaaaaaattttaacatctgctttgataatataaagaactctcaatccgaagagcgctccttggaagtacactgtccaagcaccccaaagtcagaaaaaaacgaaggaagcagcatagaggatgcacagacatcccagcatgcaactttgaagccagaacgaagtttcgagattcttaccgaacagcaagcatcgagccttacttttaatttagtgagtgatgcacaaatgggtgaaatatttaaaagtttgttgcaaggttctgatcttttaaacagcagtgttaactgtactgaaaaaagtgagtgggagttaaagactccagagaagcagctgctagagactcttaagtgcgagtctataccagcttgtacaacagaagagctagtttcaggggtggcttctccatgtcctaaaatgattagtgatgataattggtcattattatcatctgaaaaaggtccatctctgtcttcagggctttcattgccggttcatcctgatgtgttggatgaaagttgtatgtttgaagtgtctactaacctacctttaagtaaagataatgtgtgtagtgtagaaaagagcaagccctgcgtttcttccatacttcttgaagatctagcagtctctttaacagtaccatcgcctctgaagtcagatggtcatctcagttttttaaagcctgatatgtcgtccagttcaactcctgaagaagtcattagtgctcattttagtgaagatgccttacttgagggaagagggattgcattcttagcaagatatttcattttagctctggagtctgataattcaagcagtaaatcaagttgttcttcttccctggacaagccgatcctgttgctccaggctttcagtaccaccctaatctacctatgcatgccgtcataatggaaaagtccaatgatcatttcattgtgaaaatacgacgtgcgacgccgtctacctcttctggccttaaacagagtatgatgcctgatgaattattgacatctttgcccagacatggaaaggaagctgatgaaggaccagagaaagaatatatttcatgtcagaacacagtttttaaatctgtggaggaattggaaaactccaacaaaaatgttgatggcagcaagtcaactcatgaagaacagagctctatgatacaaacacaggttcctgatatatatgaatttcttaaagatgcttcagataagatgggtcatagtgatgaagtggctgatgaatgtttcaaattgcatcaagtatgggaaacaaaagtgcctgaaagcattgaagaattgccttcaatggaagaaatctcacactctgttggggaacatcttccaaacacatacgtagatctaacgaaagatccagtcactgaaaccaaaaacttgggggaattcatagaagtaacagttttacatattgatcagttgggatgttctggaggcaatttaaatcagagtgctcaaatattagacaattctttgcaggctgatactgtaggtgcttttattgatttgacacaagatgcttcaagtgaggctaaaagtgaaggtaatcatcctgcattagctgtggaagacttgggatgtggggtgatacaggtagatgaagataattgtaaggaagaaaaggcacaagtggcaaacaggcctttaaaatgcattgttgaggaaacctatatcgacttgaccacagaatctcccagttcatgtgaagtaaaaaaagatgagttaaaatcagagccaggatcaaattgtgataactcggagttgcctgggactttgcataattctcacaaaaagagaagaaacatttctgatctaaatcatcctcataaaaaacaaagaaaggaaacagacttaactaataaggaaaagaccaagaaacctacccaagattcttgtgagaatactgaagctcaccaaaagaaagccagtaagaagaaggcccctcctgtgactaaagatccctcatcattaaaggcaaccccagggattaaggattcatcagcagcacttgccacttctacaagtctttctgcaaaaaatgttattaaaaagaagggagaaattatcattttatggacaagaaatgatgaccgggaaattttattggagtgtcagaaaagagggccatcatttaaaacatttgcatatttagccgccaagttggataaaaatccaaatcaggtctcagaaagattccagcagctaatgaagctctttgaaaagtcaaaatgcaggtagttaatggttacactacaggagactagtaaaataaatgtttgacactgtagttgtgcagttaatggcctgttagtcattgaagatgtgaatagtgggtgagagacatccagttgagttcctgcttcagtcacaggttggaggatgattgctcgagcaggcatctaaggtgacctc

SEQ ID NO: 65916 - DNA, 1079 bp, Homo sapiens
  misc_feature (1)...(1079): n = a,t,c or g
cacctgcctaggactctcacagtgctgggattgcaagcatgagccaccgcacccggcccagtcttggtcttttgacctttggagtcatgcacagggaacctcttcctttgttctcagagagttcttgggttcccctgaagtttgtttcaagataaacatccccgctgcttcacccttccctggtgtgatccagcgtggctttcacacgccgtccatctccctcgctggcgtgtccctcccagaatcaaaaggcagacttcccggggagatcccaggccatggcggggagcagagccatcgggagttccctgtcaggagtcctgccctcagatttgagagtgcagaaccccgccagccccccaacttgcatgcaaaccctggcatgtgtgcctctttcctgagggatcgtccataaatatcaccagattatctaaaggttgggaaaggatccatgaaccaaaatagggcaagagccactggtcaagatgcttcccctctgcaattgcaaaagtggagtggattgtgtggtgagatgaggaagtttcattcttctcgtttgttttctcccagtacgagtatgcgttgagacatttgtacgtgctggtcaacctttgtgagaagccgtatccgcttcacaggtaactaatgcagcggtgacgcttgaaaggtcgatgtcattctgaaagcagaaggggctgccatcctcttctgcaagtgggcagtttcacttctgccaggagctccctccagctttcctctacagccatttgtcagcagggtccagaagccacgttctcagtgacagctgctgggcgggcctgtcataactgcctgcctgccgcatgtgggtttgcgtttgtctgcctttcttcagagttgacgcggttcaccaagttctccttcctgtctctcgcaggataaaattgtccatggaccacgtgtgccttggtcactactgaagagctggctcctggaagcttttccaaagtgtgagcgcccccaaccgactgtgtgctgatcaagagactggagaaggtggaantgaagaagtctccgctggctcngggccctcctgggga

SEQ ID NO: 65917 - DNA, 1719 bp, Homo sapiens
ttttttttttttcagacacgcacttgtggtttattacacacagtgatctccatctacacggaaatggaaggcaagcagccaggatggagctggttgctgggaacacttgctggaggtggaaaagcctctcgtcagagccgtgggtgggtcttggtggcaggccccctgctcaggcccagctgggaaccagccctgagctttgctttgcctgcacagcccacctagagagccatttttggccagagttctgggtgggagacttggggccagtgagacccagactctgagtgggaggcctgcctccctggtccaggccatgtcctatcttgtccctctctgggtgataatggaaacagagacaggaagtagcagtcagtccaggctgggcccctccatccccgacactctgctccctggagctgggtccacatcacagcgatcacagagctcagccactactcctggccagaggacatgtgctctcatggcaggctggcctcctgaggcctcctgaatgtggtagagctagaccctcgtgggggatttccactcactgctccccgggcccagccgcaagtgctgggcgagtcttgtccgggggccaagtcttgtccaactgcagaggcagctggttgtggttgagtttggaggctgatgaggccaggagcaacagcagccgctgttccacccctgggtcttcttggatagggtgtgtcccagggactccagagttttgcgggggcaggttcttacagggcagtaccacagctgagagtctctctgctgatcaggtgactgaaggcccaacgtagcatctttctagccttgcccgagccaggtgcttctaccttcatctccttcctgggaaagcccaggcccaagggtgcccctcaggtacacatctccctggtctggcctgtccactttccggcagcttcacatgccggtggctttggggctgggtgggcatactcttgaatgttaaaaggccacaggtagcgcattccatgaaaaaagatcaatatattactgttttgtttttacaaaaattaaaaatgtccacacggatctgtacaggtgtgagctgggcctgtgggtcacttatgccagcagccaggcacaggcagcccgtcggggcccacgggacacggctggtccaggcctggtggtcccggctcgcccttctggcccttcactcctttccggccggggacccctcgttctcccttctctccacgctcgctccgatcacctttctctcctcggggtccagggaaaccatctagtcctggctccccgggtcggcccttctctcctttggttcctggcagcccaataaggcccggtgggccaactggcccaggcaggccgctggggcctctctcacccgacgcacccttctctccctttgctccatccaagcccttgggaccctggattccctggaggcccatcgggcctggggggccaggggggccagggggccctggctccactatgagctgagccaggctctcctgtaggctgtcagacgccgactcccccttctcccccttgaggccgtcagcgcccgggaggccggacaagcccatctcgcctgcttcccctttgagtcctgctggcccaggctctcctgggtctcctttctgtcctttggggcccttctctccatcgattcctggggcaccgggcaatccaagctcgccccggacgcgtggg

SEQ ID NO: 65918 - DNA, 1619 bp, Homo sapiens
ttttttttttttattttcccttttattcaacaccctccccacccagtctccccgcccccaagggtccgacacgaaaggtccaggccctcctcgggcgcgacagggagccgatccttaaaagcaaaccctacaaataaataagcggggtcgggggcgggggtctctgcagtccagggcctacggtccaacggcagtcaggtcgaatcaattcaccagcagcgaatgctcctccgaggggtcccttccgcagcagcagagaaggctgcaggccgagccgctcccgcggcggaacttgccggaggtggggctgtcctggcactgtgcgatgtaggcctgcagctcgctctcctctgcgcctgcgccgccgggatgcttgatggtgtcgtaggcgccggtgatgagcgcgatgaagaggctgagcaccatgtagatgaagaggctgatgaaggagtaaaggtagagctgggagaagagccacaccaggctgctgcggccctgctggcgcctgcatggcggcgaacgtcacaaacatgtcgtccccattgatgagcgagaacaggcactcagacaccatggagagtgagcggaacttcacatgatagggccccagcacgatccagccacagaagcagtagcccaggtagatgacagccacgcagcagcagaagcgcatgacgctgggcagggccacccgcagtgtggcgatgaggatattgtagttgtggaagaaggtcaggtagcggatcacgcccacccacaccagcagcgtcgaggtgcccaggaggatgctgcagacgtcgtagctcgccaagttcttggcctcgatgccgatcttcatgatggtgcccgagatggtgagcacatcgctggtgacgagcaggatgtaccagccattgacaaattccagccgctcccacaggctgatgacccgtccccgctgccgccacatgaaccccacaaactcgttttgcagcaggaagcctcgaaggagtgagcgggcgcagaggaggaaggacagggagcaggtgaggatgaccaccacgtcaaacaggagccggaagctgttgtctccgtgctggaagacactggggtgcttacactcctggatgtgggcctgggtctccaggctgatggggatccgcccactgtgtgctttgttgtcaaacgtgatcaggacgctgaaggtatagcagtccgggatctcattattgatgaggctctggaggttaatggtcttcagccggaagtggatggtgacattgaccagcttgtggaatttgagcgtgaggttcttgtaactggagctgctttccaagagggtgagatcgtcgctggggggcggagggggccgctcggggggatccaccctggatgcagtcagtaaccaccatcggatcaatgtcaaatgtgtcgttggccgggtccacgtggcctcggtggtagtaccgctggcagagagcaagccctgagccattggtccaagggtcacccccaccacggacatacgcataccggcccagtgacacgtcaggcaacgccaggtactggtccacagcatggaagatggcctggtacagctgctcccgcgtgtaggctgcgaaggtgtcatccgctccgtc

SEQ ID NO: 65919 - DNA, 2193 bp, Homo sapiens
ttttttttttttaactggcaaaggcatatttttatttaaataaatcaatctcacaactgtaattcgaacttgaaattagcaaagtttctttcacttcttacacataaaaaccttaaattttaactgtaataaagtgtgaatcctttaataacctgggtttttaaaagggtgccacccaatgggggtaatggaaaagggggatgttaatgtactaggcttccctggaaaatattttaaacatttttcatacaatactagggaaaacttccccttcttccacgtttaggcttaatagaacaaatcacatggaaagtttcatagtgggttcttttatttataaaataatcacattcaagtcttaccagagagtagcaaagtcttcaattcctttcctttcctttgaagaaataatgtagagcaatcactcataaatccctctaattataaataaaatccaagatattatttgacaatgagatgctttatttaaacttgatacatttactatataagaattctgtgaaaaaatggggtatgaaattattttggatctgaatctttgcattataaaatctaacccaaaactatgtcatttcactgtattctgtgactattagcagatggatgaccaaaggcaactacttcctttcctggcaaaacaagacaagtttcagctgacttccccatggtgttacaagttctcctagtgaagtaaaaagtcccaacccctctttctatgcatgtcatctccaggaaggtaagctttgggaagcacctgcgccagccctatatctgtgcttggcatgaggttcacacaggttcggccttgagatggggatgttcctctcaaccaaacaactctacttgaattattccgagactccttggaggggtgaaacttcaggcctgggtgtctctgcagtgagatgtctgtggttggtaaacagttctgtagagtcttgttctactgatctttcttctaggtctgactctgggattgtagtacaaccacctggcatgaccatggtctggtgggggctgctgcatcggtacttaggcagagacggccacctttggataatctatcgcagagcaaggtgatatgtttcttcagttgggctcgtgtcattggggtatgtcagcctgcctggtgggttcaaagcctgctgcttagcactcttacgacagcaagtctttcacatggtggaaaatggcggcatccaccgtttcttcccagcccaattcttgagtgtcttcttgtagcggcagaaatgccgcttccagaatagcaacctggtcagcactaagcttctgccacagcgcgatcagcagaatcaccaaatgggtggcactcttcagcctggtgaatgactggaacagattgcccttggttttccctcccactgcatcctgctagagcaattacctgccttgtaggttcccatcctaacaaggtgtcccaggtgttgaagaggggcaggagttttatctttgaatcttgctagtagccggcgttgaatggcccgaaattgtacagctctctcagataagagttcttctaatttttcaccatttatccgtagctcaaaatggatggatccaatcaactccaaaatattccttgaaaggggtaatagatccccgaaaaagaacatgcaaaatctttgactccctgtttttcaaaatattcttgaaggcgaagaataagctcattggttaatgaagcccaaagatccttcaaattgttccactcctggaatgcgaatatccgttgaagaagttttggaagcaagaacagtaattccgagcacctccctaagaagtgaaaacccattacattcacctgatcatcatctgactgactggcaaaacctgggaagagactaagaagactgactggagatttgttggtatcaatagtaattttgtggcttgcagtttttgaaggctgacctggtaggcaaattaactttaggggaagtctaaatttacattggataactcgcggaatgccatcaggatttcgattcataaattcaaaggtgaactgatcacaagtcaattctaatggtggttgcacgtagactgataatttggctttttgcaatatcactctgttctgcagtgtgaccttcaccgtgacagaagggacaaggtcagttcccacctcaacatcggtcgcttgagaaactg

SEQ ID NO: 65920 - DNA, 2517 bp, Homo sapiens
ctgaacgggaactatttggttctgttggtgtcattggtggtcattcttcctttgtcgctgtttagaaatttaggatatttgggatgtaccagtggcctttccttgttgtgtatggtgttctttctgattgtggtcatttgcaagaaatttcaggttccgtgtcctgtggaagctgctttgataattaacgaaacaataaacaccaccttaacacagccaacagctcttgtacctgctttgtcacataacgtgactgaaaatgactcttgcagacctcactattttattttcaactcacagactgtctatgctgtgccaattctgatcttttcatttgtctgtcatcctgctgttcttcccatctatgaagaactgaaagaccgcagccgtagaagaatgatgaatgtgtccaagatttcattttttgctatgtttctcatgtatctgcttgccgccctctttggatacctaacattttacgaacatgttgagtcagaattgcttcatacctactcttctatcttgggaactgatattcttcttctcattgtccgtctggctgtgttaatggctgtgaccctgacagtaccagtagttattttcccaatccggagttctgtaactcacttgttgtgtgcatcaaaagatttcagttggtggcgtcatagtctcattacagtgtctatcttggcatttaccaatttacttgtcatctttgtcccaactattagggatatctttggttttattggtgcatctgcagcttctatgttgatttttattcttccttctgccttctatatcaagttggtgaagaaagaacctatgaaatctgtacaaaagattggggctttgttcttcctgttaagtggtgtactggtgatgaccggaagcatgggccttgattgttttgggattggggtacacaatgcacctggaggtgggccattaattggcaccactcaaactcaaactcagtccatctgatgccagtgttgagtaaactcaactactatgaaatttcacctaatgttttcagtttcacttccttttgaagtgcagattcctcgctggttcttctgagtgcagaataagtgaactattttgttttgttttgtttttttaagaaacttatctgtatgttagaaatgggatatgaacaacaaagccacgagtctcgggttaagggaagtgacaattttattccattccagagaatggacaaactcttaacttttatcaagccacatgcttggctgtgtcattgtttaacttggatattttatgattttacttgaatgtgcctaatggaaccatttgatgtgagaaacaattctttttaatttacagcaaaatattgaataaccattgacaaaaacactattattttttgtaccaaaaatacttaaagacctcagaagcactcttttacttttaagaaattgcttttttgaactttattcagaagcagttatcaataaattccataaaataatgtcattggtatttaaaaatgaatattaatataatgaaatggtttgcctttttgtaggcataataagccaaatacttttttacccaaaataatttttagagaaaatgatgtaatgaaaaattgtaccatgaattaggagcatagttttttccatttaaacgtcaccattacttaaaagatgattgattattgctataccaaatcagatgaactctgttcatcacttttcttctctgtccccaaacaatttggttcattcagactgaaatgtttgtgtcttcaacttattagaatggaagataatgcagatatttctgtgggaaataaaataactaattttgaggtaccaaatagtgcaattgggtaaaacagggtttattcagttgcatctgtctccagtgttgtattgacagctctgggtctttttttgggccagcccttttttgacattgcttccagcagtggaaaatgggcatttgatggcaataggccaaaattattgtgtccagagagtacactttttcaaaatgctcacctactggaagtgtgaattacttgacaatgtatggcttagttgtgttcatgttttgtctacagtagaggtctaatccacaggttacacctatgtttgatatgatataagttctctttgcgtaggccactgggtttctcatgcagtaagctttataaaaactcatttgcactggactgtcatctcattcttgtacaacgtagaattacttgtttacatccaacaaatggttagctagggaaaacagtgcaaactgagtgttagtagtcattttgggtccaactgcatgtcaacccttccatttcaatcccagttagaaatgaaaataattactttgaaacttggctttaagagcacatttatcgtacgtcacagtgtatggtgaatatattattaaataatgtggtacttcgctcatcaggcataatgtctaaaatctaatatacataattccattccttcctggttgccacagtatcttctcccatac

SEQ ID NO: 65921 - DNA, 1500 bp, Homo sapiens
cgttgctgtcgattttggaactcaaccctatgaacaatgggccattcaaatggaaaaaaaagctgcaaaagaaggaaatcgcagagaacgtgtttgtgcagaacatttgaggaagtacaatgaggccctacaaattaatgacacaattcgaatgatagatgcgtatactcatcttgaaactttctataatgaagagaaagataagaagtttgcagtcatagaagatgatagtgatgagggtggtgatgatgagtattgtgatggtgatgaacatgaggatgattttaagaaacctttgaaactggatgaaacagatacgatttctcatgactttattttttgaaaacaataaaatagttgaaaaggctggctgaaaacccagaatatgaaaatgaaaagctgaccaaattaagaaataccataatggagcaatatactaggactgaggaatcagcacgaggaataatctttacaaaaacacgacagagtgcatatgcgctttcccagtggattactgaaaatgaaaaatttgctgaagtaggagtcaaagcccaccatctgattggagctggacacagcagtgagttcaaacccatgacacagaatgaacaaaaagaagtcattagtaaatttcgcactggaaaaataaatctgcttatcgctaccacagtggcagaagaaggtctggatattaaagaatgtaacattgttatccgttatggtctcgtcaccaatgaaatagccatggtccaggcccgtggtcgagccagagctgatgagagcacctacgtcctggttgctcacagtggttcaggagttatcgaacatgagacagttaatgatttccgagagaagatgatgtataaagctatacattgtgttcaaaatatgaaaccagaggagtatgctcataagattttggaattacagatgcaaagtataatggaaaagaaaatgaaaaccaagagaaatattgccaagcattacaagaataacccatcactaataactttcctttgcaaaaactgcagtgtgctagcctgttctggggaagatatccatgtaattgagaaaatgcatcacgtcaatatgaccccagaattcaaggaactttacattgtaagagaaaacaaaacactgcaaaagaagtgtgccgactatcaaataaatggtgaaatcatctgcaaatgtggccaggcttggggaacaatgatggtgcacaaaggcttagatttgccttgtctcaaaataaggaattttgtagtggttttcaaaaataattcaacaaagaaacaatacaaaaagtgggtagaattacctatcacatttcccaatcttgactattcagaatgctgtttatttagtgatgaggattagcacttgattgaagattcttttaaaatactatcagttaaacatttaatatgattatgattaatgtattccataatgctacagaactgacataagaatcaataaaatgattgttttactctgaaa

SEQ ID NO: 65922 - DNA, 7131 bp, Homo sapiens
cgaattcccgggtcgagcgtggtcattgaggacaagtcgacgagagatcccgagtacatctacagtcagccttacggtaagcttgtgcgctcggaagaagctagggtgataatggggcaaactaaaagtaaaattaaaagtaaatatgcctcttatctcagctttattaaaattcttttaaaaagagggggagttaaagtatctacaaaaaatctaatcaagctatttcaaataatagaacaattttgcccatggtttccagaacaaggaactttagatctaaaagattggaaaagaattggtaaggaactaaaacaagcaggtaggaagggtaatatcattccacttacagtatggaatgattgggccattattaaagcagctttagaaccatttcaaacagaagaagatagcgtttcagttcctgacgcccctagaagctgtatagtagattgtaatgaaaagacaaggaaaaaatcccagaaagaaatggaaagtttacattgcgaatatgtagcagagccggtaatggctcagtcaacgcaaaatgttgactataatcaattacaggaggtgatatatcctgaaacgttaaaattagaaggaaaaggtccagaattagtggggccatcagagtctaaaccacgagggccaagtcctcttccagcaggtcaggtgcccgtaacattacaacctcaaaggcaggttaaagaaaataagacccacccgccagtagcctatcaatactggcctccggctgaacttcagtatcggccacccccagaaagtcagtatggatatccacgcccgcccccagcaccacagggcagggcgccataccctcagccgcccactaggagacttaatcctacggcaccacctagtagacagggtagtgaattacatgaaattattgataaatcaagaaaggaaggagatactgaggcatggcaattcccagtaacgttagaaccgatgccacctggagaaggagcccaagagggagagcctcccacagttgaggccagatacaagtctttttcgataaaaatgctaaaagatatgaaagagggagtaaaacagtatggacccaactccccttatatgaggacattattagattccattgctcatggacatagactcattccttatgattgggagattctggcaaaatcgtctctctcaccctctcaatttttacaatttaagacttggtggattgatggggtacaagaacaggtccgaagaaatagggctgccaatcctccagttaacataggatgcagatcaactattaggaataggtcaaaattggagtactattagtcaacaagcattaatgcaaaatgaggccattgagcaagttagagctatctgccttagagcttgggaaaaaatccaagacccaggaagtacctgcccctcatttaatacagtaagacaaggttcaaaagagccctaccctgattttgtggcaaggctccaagatgttgctcaaaagtcaattgccgatgaaaaagccggtaaggtcatagtggagttgatggcatatgaaaacgccaatcctgagtgtcaatcagccattaagccattaaaaggaaaggttcctgcaggatcagatgtaatctcagaatatgtaaaagcctgtgatggaatcggaggagctatgcataaagctatgcttatggctcaagcaataacaggagttgttttaggaggacaagttagaacatttggaggaaaatgttataattgtggtcaaattggtcacttaaaaaagaattgcccagtcttaaacaaacagaatataactattcaagcaactacaacaggtagagagccacctgacttatgtccaagatgtaaaaaaggaaaacattgggctagtcaatgtcgttctaaatttgataaaaatgggcaaccattgtcgggaaacgagcaaaggggccagcctcaggccccacaacaaactggggcattcccaattcagccatttgttcctcagggttttcagggacaacaacccccactgtcccaagtgtttcagggaataagccagttaccacaatacaacaattgtccctcaccacaagcggcagtgcagcaggtagatttatgtactatacaagcagtctctctgcttccaggggagcccccacaaaaaatccccacaggggtatatggcccactgcctgaggggactgtaggactaatcttgggaagatcaagtctaaatctaaaaggagttcaaattcatattggtgtggttgattcagactataaaggcgaaattcaattggttattagctcttcaattccttggagtgccagtctaggagacaagattgctcaattattactcctgccatacattaagggtggaaatagtgaaataaaaagaataggagggcttggaagcactgatccaacaggaaaggctgtcatattgggcaaatcaagtctcagaggacagacctgtgtgtaaggccattattcaaggaaaacagtttgaagggttggtagacactggagcagatgtctctatcattgctttaaatcagtggccaaaaaattggcctaaacaaaaggctgttacaggacttgtcggcataggcacagcctcagaagtgtatcaaagtactgagattttacattgtttagggccagataatcaagaaagtactgttcagctaatgattacttcaattcctcttaatctgtggggtcgagatttattacaacaatggggtgcggaaatcaccatgcccgctccattatatagccccatgagtcaaaaaatcatgaccaagatgggatatataccaggaaagggactagggaaaaatgaagatggcattaaaattccagttgaggctaaaataaatcaagaaagagaaggaatagggtatcctttttaggggcggccactgtagagcctcctaaacccataccactaacttggaaaacagaaaaaccggtgtgggtaaatcagtggccgctaccaaaacaaaaactggaggctttacatttattagcaaatgaacagttagaaaagggtcacattgagccttcgttctcaccttggaattctcctgtgtttgtaattcagaagaaatcaggcaaatggccatatgttaactgacttaagggctgtaaacgccgtaaacgccgtaattcaacccatggggccttctccaaccccgggttgcccttctccggcccatgatccccaaaaggatgggccctttaattataatggatctaagggattgcttttttacccatccctctggcgggagcaggattgcggaaaaatttgcctttactataccagccataaataataaagaaccagccaccaggtttcagtggaaagtgttacctcagggaatgcttaatagtccaactatttgtcagacttttgtaggtcgagctcttcaaccagttagagacaagttttcagactgttatattattcattatattgatgatattttatgtgctacagaaacgagagataaattaattgactgttatacatttctgcaagcagaggttgccaatgcaggactggcaatagcatctgataagatccaaacctctactccttttcattatttagggatgcagatagaaaatagaaaaattaagccacaaaaaatagaaataagaaaagacacattaaaaacactaaatgattttcaaaaattactaggagatattaattggattcggccaactctaggcattcctacttatgccatgtcaaatttgttctctatcttaagaggagactcagacttaaatagtaaaagaatgttaaccccagaggcaacaaaagaaattaaattagtggaagaaaaaattcagtcagcgcaaataaatagaatagatcccttagccccactccaacttttgatttttgccactgcacattctccaacaggcatcattattcaaaatactgatcttgtggagtggtcattccttcctcacagtacagttaagacttttacattgtacttggatcaaatagctacattaatcggtcagacaagattacgaataataaaattatgtgggaatgacccagacaaaatagttgtccctttaaccaaggaacaagttagacaagcctttatcaattctggtgcatggcagattggtcttgctgattttgtgggaattactgataatcattacccaaaaacaaaaatcctccagtttttaaaattgactacttggattttacctaaaattaccagtcacggacctttagaaaatgctctgacagtatatactgatggttccaacaatggaaaagcagcttacacagagccaaaagagcaagtaatcaaaactcagtatcaattggctcaaagagcagagttggttgcagtcattacagtgttacaagattttgatcaatctatcaatattgtatcagattctgcatatgtagtacaggctacaagggatgtaaagacagctctaattaaatatagcatggatgatcagttaaaccagctattcaatttattacaacaaactgtaagaaaaagaaatttcccattttatattactcatattcgagcacacactaatttaccagggcctttgactaaagcaaatgaacaagctgacttactggtatcatctgcattcataaaagcacaaaaatttcatgctttgactcatgtaaatgcagcaggattaaaaaacaaatttgatgtcacatggaaacaggcaaaagatattgtacaacattgcacccagtgtcaaatcttacacctgcccactcaagaggcaggagttaatcccagaggtctgtgtcctaatgcgttatggcaaatggatggcacgcatgttccttcatttggaagattatcatatgttcatgtaacagttgatacttattcacatttcatatgggcaacttgccaaacaggagaaagtacttcccatgttaaaaaacatttattatcttgttttgctgtaatgggagttccagaaaaaatcaaaactgacaatggaccaggatattgtagtaaagctttccaaaaattcttaagtcagtggaaaatttcacatacaacaggaattccttataattcccaaggacaggccataattgaaagaactaatagaacactcaaagctcaattggttaaacaaaacgaagggggagacagtaaggagtgtaccactcctcagatgcaacttaatctagcactctatactttaaattttttaaacatttatagaaatcagactactacttctgcaaaacaacatcttactggtaaaaagcacagcccacatgaaggaaaactaatttggtggaaagataataaaaataagacatgggaaatagggaaggtgataacgtgggggagaggttttgcttgtgtttcaccaggagaaaatcagcttcctgtttggatacccactagacatttgaagttctacaatgaacccatcggagatgcaaagaaaagggcctccacagagatggtaaccccagtcacatggatggataatcctatagaagtatatgttaatgatagtgtacgggtacctggccccacagatgatcgctgccctatcaaacctgaggaagaagggataatgataaatatttccactgggtatcgttatcctcctatttgcctagggagagcaccaggatgtttaatgcctgcagtccaaaattggttggtagaagtacctactgtcagtcccatcagtagattcacttatcacatggtaagcgggatgtcactcaggccacgggtaaattatttacaagacttttcttatcaaagatcattaaaatttagacctaaagggaaaccttgccccaaggaaattcccaaagaatcaaaaaatacagaagttttagtttgggaagaatgtgtggccaatagtgcggtgatattacaaaacaatgaatttggaactattatagattgggcacctcgaggtcaattctaccacaattgctcaggacaaactcagtcgtgtccaagtgcacaagtgagtccagctgttgatagcgacttaacagaaagtttagacaaacataagcataaaaaattgcagtctttctacccttgggaatggggagaaaaaagaatctctaccccaagaccaaaaatagtaagtcctgtttctggtcctgaacatccagaattatggaggcttactgtggcctcacaccacattagaatttggtctggaaatcaaactttagaaacaagagattgtaagccattttatactatcgacctaaattccagtctaacagttcctttacaaagttgcgtaaagcccccttatatgctagttgtaggaaatatagttattaaaccagactcccagactataacctgtgaaaattgtagattgcttagttgcattgattcaacttttaattggcaacaccgtattctgctggtgagagcaagagagggcgtgtggatccctgtgtccatggaccgaccatgggaggcctcaccatccatccatattttgactgaagtattaaaaggcattttaaatagatccaaaagattcatttttaccttaattgcagtgattatgggattaattgcagtcacagctacggctgctgtggcaggagttgcattgcactcttctgttcagtcggtaaactttgttaatgattggcaaaagaattctacaagattgtggaattcacaatctagtattgatcaaaaattggcaaatcaaattaatgatcttagacaaactgtcatttggatgggagacagactcatgagcttagaacattgtttccagttacagtgtgactggaatacgtcagatttttgtattacaccccaaatttataatgagtctgagcatcactgggacatggttagacgccatctacagggaagagaagataatctcactttagacatttccaaattaaaataacaaattttcgaagcatcaaaagcccatttaaatttgatgccaggaactgaggcaattgcaggagttgctgatggcctcgcaaatcttaaccctgtcacttgggttaagaccatcggagtactatgattataaatctcatattaatccttgtgtgcctgttttgtc

SEQ ID NO: 65923 - DNA, 1455 bp, Homo sapiens
  misc_feature (1)...(1455): n = a,t,c or g
tttttttttttgcggtttccaaacttttgtatttttagcagcagaagccatcctccaaacaaaaccgtatgcaaaacctcagctacaaaacagatcagtgggctgcttgcccgtgtggggcatgggctgggccccgagctctccctccagcacccagtacttcttccacaaggccctatgtgagctcagtttaaaaccccagggccttggcaggggtcaggtgggcgggagcagggggtggaccttgtagcactggagctaaagcagccagataaggtgggctagttcttaagacctctggagggtgtggctagtctctgagacctggacaacttcattctccaccagggcctggcccccatccccattgagctgtctcatgcgcaggttaatggagccgtaggtcttcctggagcccttgccggggacgaaggtcctccggcggtacagctcgcccttgcacagggagaccatgagcagcaccgacaagagcatgccgcccaccgtgagcagcccgaggcctgcgatgatgcacctgtccaggtgggagcctaggcgggcgtagtacatctccagtcgttccatctcccgcgctgtcactgtgtccggattgactcgagcctcacgggggatggcgtatgctgtcaccaccagaagaatcccactccccaggaaaacgagggcggaaacaaagccataatccaccgggcggctcacgggctccagggctggcccctcctctgaatgaagggacagatcatcccgctgggatcggggcagtgaggagacacccccagggggactgggtgagctgcccagtctcgtgttcccagggttctggaaatgggtctcatgctcctctgaggagaagcaggcattctccacaccctccctggttggggccactgggcccaggggagctgatctccttggggcttggggaccattgctcagtgtcttcagttccagaccagggggagatgccattgggaaggagggccccagctcatcccttggccccttggcagctgcaaactcatacccctgtgctggtggcatcactccaccagccttccctggctctgcatccctcactcatagactcttcattttatccagctgtttatcagcaaccgtgagcaccttgagagcaggcataagtttgaattccatctgggtccccagcctgcgcccagactgcttttaccagagttaggacatctctctgtttcatgcccaggttcagagatattcaccagttacacaaaggccgtgcccaattaccctaacataagcagaaacacaccaactgacatagctgctcccgcccaccattcacaccccacgaccccaccagttactaatttcatctgcagtcagacaggtcctgaaaggaacactccagttccacacacactcctnaggaattccnccacntggncaaaggtctacgat

SEQ ID NO: 65924 - DNA, 3891 bp, Homo sapiens
ttttttttttttcacagtgaaaatggttttatttaacatgcagcaaaacaagggcagcagagctgggatatccagtacagccatttgccacgaagcactgacctcaacagtaacgagtaacactcaaataactgtaatgtctagagcataacacaaagttccatttccacatagtaattccacagacattcccagggctgcagcagccagtctctggaaagctcttggatttattccttaagtagtgaaaaatgattcacttttgacttgtcctcttctaatgaagcagtgaaacctgcttgctaaagacagcgaggggcagggaagggatatgacctcttcccatagtaaggaataaggaagcctggcaaggggcagggaggaaccagggaacatggtctgtgccaccttcctttccccagagatgtccgattgctgagcttgttcacctgggctccgcaagcttcccccgtgtctatggcagctggtgattttttttttgtgacggaggcttggagtacatgtcccaggatcacatccagcagctagagtggctgggacaagctggcgggggccaagcactgttgaagcaatagggtctggtgactcagctcaagtgtggcccgatctcatcacctccagacccaacatctcgctgacagtgcccctcagtagctggggaacagttgaggtttctgggcagcacattaggacatatgtctagtgtaacatttgtgatcctgaggcctcctgtgtccagccacaggtgccacaccacatgccatctggtgagaggagagggaggccaaagcagtaggatgtagagtggcggtagattccaaggggaggatagcagtttatttcatgccaagcaagaggtagtcagtaggatggcctgtccccacggctggaggcacgcttttcccagaaagctgagtacctgcttctggagaaggggaaatactggctctcttcattttccttcctatccctagttgggcctgtcatgaggccaaattccatgtcctgccaagatgtccataggacacagcctgccactgccagggacaagcacacaactcatcactccgtggccattccaggacgatgctgtccaccagaggcagggctggggactttgcagtatgccagttccttattctgggccaggcaccttcctgggccacctccctggggatggcagcaggagctggttggcgggggaagcatggaattgcaacagggctgcagccccttgggccgtgcatctgtcaggtgtgaggatgtggctcttgtggggaatgacccatgacagtctctctttagagactcccaccccccaccccccaccccagtggcttcagtgaatgccagtagaaggaagcaaacacctacgccaagcctgggggtccatgttcccgggacagcagtgaagtcaggggccactccgcacccctgacagcatatggccacttcaagtcacacaggtagataaaaacaggtccttttaggggccaaaggagaggttatcacagcagcagtttggttctcagcagaaatgcccagggcccctgttccacatcaaagctacaagcactgttgtcagggcatggagagtgacgggaccagagccctcctcgtctcagggcagcctgcctggcttcaaggtggagatcacagcgtcctctggggtcataggttcccccactgttccacaggagggaactggtccacctcgcccacctctgtgctcagctgctcccccagggcgaaggtcagcttataccgaagccgcaccttctccttcagtggattggccagcaacatgacctgggtgatggctgcaggtggctggatggggctaaatggagagagttctgtcccagaaggtggctgcaacttcactttcattgacttgggcactgcagcctgcagcacgatgctcttgacaggtaagggagccgtgttcagcatggacaccaccaccaccagcacgtcaggtcgtcctgggggacactccttggcaaagtggaagaggatgcggaagccgtttttatcgtaggctgtcacaggaagggcactgctaggcttgatcgattccaggggcacgtggatgctggccagggagagctcaggccccttcggggggctgccctgggactggaaactcagtggctggaagagcgggctgccgggccccgtggagaagggcaggaggggcctggctggggtggtggtggggatgagaggggaggtagtgggtttcaccaagcccgaggtcactttggcctcttctagaagctgatcgagggcatccaggtggtgcagcgcgctgttgcccaacgccaagccatggtgcccagggactgcgggctcaacttttggggccaaggctggggccactccagtagaaaacaaggaggagcccgcactgggggcaggaacactggctgggaccacaggagctgggaagggaggcggcagtggagcttgggagctgcttgaggagggggctgagggctggagcagaggagcgtcggaggcgccacaggcagcggtccccggcctggggctgaagaagtccaggtcggactgttccctctggagcaggtgccactggctgttcccagctgactctttgggaggaacattaggggctgggtcggcgaggcccaagcagagtagctcctcgtccagccaggagagggcgttgcttgtgctgctgggccccagggtggcctcggcctggctagaggagcggctccgtggaggtcctgaggcctggggtggtggagggaggattgggatgcctgaggagggtggagtaggtgctggggccaacacggaggacaaactgttggtcgtgtccagctccgcaaggtcgatgagcgtgccttggttactgcactgactgtttccttccgagtcaggcagggttaaggtagccacctcgccattgatgacctgcccttcaataattgttttgtaagagttgatgacccgggagaggttgtcactggcttgcaggatgtcccccaaactgttatcattgtcctcagtctcactggcgagtttaaataaagtccgcctcttgttctcacactgatcaaacagctccttcatcagctctctgtccccgtccgaagagtcctcctggctgtaatgaagcagcatctcactgagcagtctcacgttgttgttaacttcctctaacgtgtgcagacgcttggtcaccttctggatccgtgcctcgtcttccctcaccatggacttgatgagcttgttggcctcctgcaggtcatctgggtttttgcttttcagcagcttggctaaaagcttggacttctcctcatcatcaaaaacagggtttttgggacgaggtggtggagaggggatcagcgtcctatccacaggaattggtgggtcagactgcactatgccctgtctcttcagcatgtggtaggcgtctttgatctttgcttcttctggcagggccatggtccagctgtacagcagctcaataaccttggtcttcactttctcagacaccctgtcccccaggtacgtcagggcctggagcgcctcccattcctgtggggactggatcttgtgggccagcagtcggacggcgatctgtggcctgggggacaagcagaacacactccagtgcactaagcctggggctacctggctggccctccttggccatggttgttccccttcccagtccgctccctctcagctgcccccacagtgctgagactcacccttccagctccttgttgatctgatcacagaagccaattatgtattcccagtcctcctggcggttggaaggattggtggctttattgagccaggactccaggctttcccacgaaatagtcgacc

SEQ ID NO: 65925 - DNA, 954 bp, Homo sapiens
ttttttttttttacagataaaaacactttatttaaaagtataaaaccaggcttactccttcaaactgctcccacccctaattatctccacaaagagctatataaattgggcaggggtatgtgtacagtcatctcagctctaacaaccccagttcttctttcaattctcctttctcccttcatacaattgagatgtttgtcctttgcactttccccaagatagcaaaggtgatacaaatgtggaaggaggggaagtgtagaaaataaactgtcatcatcctctattcccatctccagggaacagacagattatatgaactctgaccaaatgatttgcttgtctgaagaaacaaataataggtacagttactctctgtatcctaaagaaagacacgagggtccagagtccttcttcagtatatagcctcgtccatattgtcatcactgtcaccaccaaagtcctctccattgtcaaaatatgacatgatgtaatcagtttcctcttcatgttcttcttcatcatactcttcttcttcctcctcttccttctcttcttcttcttctttctcctcatcctcctctgaagttacttcttcttccttcttctccagggtctctagtttctgtattgtttcctccttatcttctgtggtcttagggggcctcttggggagcagaattgtaatccctggtggagggatcaaaaggtaaaccttcagagagcaaattttgccagctttatagcccatcctcatgcaaagaacatgtcactctgctgccctcatgtggccactatgacatctagcaacaacacttggtagattgggtataggaactgggatggaaggtgagaccagcagcagcctcggccctcaggctgatgaaggaaacctctcttctccctccttttttccagatacactcacgtcccttctgtcgtcttctcgcaaccgta

SEQ ID NO: 65926 - DNA, 283 bp, Homo sapiens
ggagccaccgcgccccccgccaaatttagactttttgagctctgtgcgttgtgcctttcaacacttttcacaatggattttctgcttcttgataaggaaggcacccttgatcctgtcatggattcatttagcacacattggaccacgataggccctgctgacatgtttttttcattgtagacagcattataagaactttaaatctcacggcacaaacccctcgaagtctgtctgggcacatgccacatgccaatcttgtgcctttcccaaccttcttggttgg

SEQ ID NO: 65927 - DNA, 1642 bp, Homo sapiens
cgcggccgcgtcgacataaatgtgaggaatgtggtaagggcttcactcaggctgcacattttcacatccatcagagagtccacactggagagaaaccctacaagtgtgatgtgtgtggtaagggcttcagccacaattcaccattaatatgccatcggagagtccacacaggagagaagccatacaagtgtgaggcgtgtgggaaaggctttacccgtaatacagatctgcatattcatttcagagttcacacgggagagaaaccctataaatgtaaggagtgtggtaagggcttcagtcaggcttcaaatcttcaagtccatcagaatgtccacactggggagaaacgattcaagtgtgaaacgtgtgggaagggcttcagtcagtcctcaaagcttcaaacccatcagcgagtccacactggagagaaaccatatagatgtgatgtgtgtggtaaggacttcagttatagttcaaatcttaaactacaccaagtaattcacactggagaaaaaccatataaatgtgaggaatgtgggaagggcttcagttggagatcaaatcttcatgcacatcaaagagttcactcaggagaaaaaccctataaatgtgagcagtgtgataagagcttcagtcaggccatagattttcgggtacatcagagagtccatactggagagaagccatacaaatgtggtgtctgtggtaagggcttcagtcagtcctctggtcttcaatcccatcagagagtccacacgggggaaaagccatacaaatgtgatgtgtgtggaaagggctttagatacagttcgcagtttatataccatcagagaggccacactggagaaaaaccttacaaatgttgaagagtgtgggaaaggctttggtaggagcttgaatcttcgccatcatcagagggtccacacgggagagaaaccccatatatgtgaggagtgtggtaaggccttcagtctcccctcaaatcttcgagtccacctgggtgttcacaccagggaaaaactctttaaatgtgaagagtgtggtaaaggcttcagtcagagtgcacgtcttgaagcccatcagagagtccacactggagaaaaaccatacaaatgtgacatatgtgataaggacttccgtcaccgttcacgtcttacatatcatcagaaagtccatactggtaaaaagctttagaaatgagaaatgtgttaccaacttttgtctgaatgcacatcttcaagtttttggctagtccatgctggtggtaaaccctgtaaaactactgagagtggaagggggtttgttcacacttgggaatctttctaacaaatccatcaagatgataacacagaaccatgaacaggaatagaactcgtatttaggggagaaatagggctggtggctctcttggtaagatctagttaatataaatgatcacctttcattgtgaatatatgcctgaagataatgtgtggaaggatatttgccatatgctaactggttttttggccagggagagttttgggttattatcccttttctttaattttcattttatacttacagtgatcattattttcataaaagctgtaaagctatgaaaaatgaataaaattactaaaaattttctgtaaaaaaaaaa

SEQ ID NO: 65928 - DNA, 1759 bp, Homo sapiens
gacccgccttgcggaattcggcacgagggacccctgtgcccaggctccgtgcgagcagcagtgtgagcccggtgggccacaaggctacagctgccactgtcgcctgggtttccggccagcggaggatgatccgcaccgctgtgtggacacagatgagtgccagattgccggtgtgtgccagcagatgtgtgtcaactacgttggtggcttcgagtgttattgtagcgagggacatgagctggaggctgatggcatcagctgcagccctgcaggggccatgggtgcccaggcttcccaggacctcggagatgagttgctggatgacggggaggatgaggaagatgaagacgaggcctggaaggccttcaacggtggctggacggagatgcctgggatcctgtggatggagcctacgcagccgcctgactttgccctggcctatagaccgagcttcccagaggacagagagccacagataccctacccggagcccacctggccacccccgctcagtgcccccagggtcccctaccactcctcagtgctctccgtcacccggcctgtggtggtctctgccacgcatcccacactgccttctgcccaccagcctcctgtgatccctgccacacacccagctttgtcccgtgaccaccagatccccgtgatcgcagccaactatccagatctgccttctgcctaccaacccggtattctctctgtctctcattcagcacagcctcctgcccaccagccccctatgatctcaaccaaatatccggagctcttccctgcccaccagtcccccatgtttccagacacccgggtcgctggcacccagaccaccactcatttgcctggaatcccacctaaccatgcccctctggtcaccaccctcggtgcccagctaccccctcaagccccagatgcccttgtcctcagaacccaggccacccagcttcccattatcccaactgcccagccctctctgaccaccacctccaggtcccctgtgtctcctgcccatcaaatctctgtgcctgctgccacccagcccgcagccctccccaccctcctgccctctcagagccccactaaccagacctcacccatcagccctacacatccccattccaaagccccccaaatcccaagggaagatggccccagtcccaagttggccctgtggctgccctcaccagctcccacagcagccccaacagccctgggggaggctggtcttgccgagcacagccagagggatgaccggtggctgctggtggcactcctggtgccaacgtgtgtctttttggtggtcctgcttgcactgggcatcgtgtactgcacccgctgtggcccccatgcacccaacaagcgcatcactgactgctatcgctgggtcatccatgctgggagcaagagcccaacagaacccatgccccccaggggcagcctcacaggggtgcagacctgcagaaccagcgtgtgatggggtgcagacccccctcatggagtatggggcgctggacacatggccggggctgcaccagggacccatgggggctgcccagctggacagatggcttcctgctccccaggcccagccagggtcctctctcaaccactagacttggctctcaggaactctgcttcctggcccagcgctcgtgaccaaggatacaccaaagcccttaagacctcagggggcgggtgctggggtcttctccaataaatggggtgtcaaccttacccaaaaaaaaaa

SEQ ID NO: 65929 - DNA, 2471 bp, Homo sapiens
agttgcgtggaatttatccaaatccagaccgtgggtgccctttccccaccaccatcccagctgttctcaccctgggaaggggagcggcgggttggcacggccagtgtcctccaaccagtgaagaagcgcaaagtggacatgcccatcactgtgtcctacgccatctcagggcagccggtggccaccgtgctggccattccacagggccagcagcagagttatgtgtctttgaggccagacttactgacagtagacagtgcccacctgtacagtgccactgggaccattactagccctacaggagaaacctggaccatccctgtttattctgcccagccccggggggaccctcagcagcagagcattacccacattgccattccccaggaagcctacaacgcagttcacgtcagtggctcacccacagccctggcagctgttaagctggaggatgacaaggagaagatggtgggcaccacatctgtagtgaaaaactcccatgaagaggtagtgcagacccttgcaaactctctctttccagcacagttcatgaatggcaacatccacattccagtggctgtgcaggctgtggcaggcacgtaccagaatacggctcaaactgtccatatatgggacccccaacagcagccgcagcagcaaactccccaggaacagacaccaccaccacagcagcagcagcagcaactccaagttacttgttcagctcaaactgtccaggttgctgaagttgaaccacagtcacagccacagccttccccagaacttctgcttccaaattctttgaagccagaagaagggcttgaagtatggaaaaactgggcccagaccaagaatgctgaactagagaaggatgctcagaacagattggcacccattgggaggcgccaactgctgcgattccaggaagatctcatctcctctgctgtggcagagttgaattatgggctctgtctaatgacacgggaagctcgaaatggagaaggtgaaccctatgacccagatgtgctctactatattttcctgtgtattcaaaagtatctttttgaaaatggaagggtagatgacattttctccgatctttattatgttcggttcacggagtggctacatgaagttctgaaggatgttcagccccgggtcactccacttggctatgtcttgcccagccacgtgactgaggagatgctatgggagtgcaagcagcttggggctcactccccctccaccttgctgaccaccctcatgttctttaataccaagtacttcctattgaagacagtggaccagcacatgaagctggccttctccaaggtcttgcgacagacaaagaagaacccctctaatcccaaggataaaagcacgagtatccggtacttgaaggcccttggaatacaccagactggccagaaagttacagatgacatgtatgcagaacagacggaaaatccagagaatccattgagatgtcccatcaagctctatgatttctacctcttcaaatgcccccagagtgtgaaaggccggaatgacaccttttacctgacacctgagccagtggtggcccccaacagcccaatctggtactcagtccagcctatcagcagagagcagatgggacaaatgctgacgcggatcctggtgataagagaaattcaggaggccatcgcagtggccaatgcaagcactatgcactgagatgccttggccatggcacaagagaaaccagccaggaaaaaccagacagactttcacactaaagaagaggcctccatttttttttttcttttttttattgggggagttacgaagcctttcaggctgcttctgtttaaaatataaaagaaaactttgccccctttgcatcttcataaacctgctgcgggcagactcctcagccgatggtggctctgggtttccttgagtgtcatatgtcctagaaagttgctggctgactcttttttgtctggggcctggggaaagggcttggactgtgaaaagaaatgtggcccctttccatcttcaagagagatggaattaatgatggatggaccctggagggaatctccccagccgacttccactgggctgacagactttgctgaccacaggggaacgatgttcttttctttcttcatgatcagacataaacttagcatcttaatggaagaaaaatgaggggaacttcaattatgatttattaaagacaatttctattacaccctcctttatgacaagtgacattttagatgtaaaagtaaaaactttaccatgccttttttttttttgttggcctaacattgaggccttaaaacctgaggctcctgtgcctgatggaattcttgtaacataccctggggtatcatataaagataccactctgtttctcttatgtattcttactctagttgtttattaagaatgacaagcacgtcttttcaaaaaaaaaaaaa

SEQ ID NO: 65930 - DNA, 838 bp, Homo sapiens
ttttttttttttggaacctcgggccacacagctcaggcacacaccatcggggctactggctgcttggagtttattttccgcttggtgccaggtgcacagttccaggtgtcaggaaagctagcgagtgctggggccgggcggtagagagcggggctctcactggtttttggtgtctgctgtgttgatgcgaaggtctgcttgctgcagccgcctagtttacagggtggggggtgggaggtggggaggggggcgagggatgcggagtggggagaggggcggggaggggctctggtggactagcgcctccgcaggcctggggctggtggtaaccgctcaggtcaggacgggggcccagcgctggctgtgctggactgaccgccgggctgcttcctcggggcgtcccgagccaggccacaggcggtcatgctgctggaggcctggggaggttccgagtgctctgcggactccaacaccgtggccatgaacgggagggtggacttcccgaaaaagaagctggcccaccaatgacccgggtcagccttggggagacctggggggtggggaatggcttccccggggcactcggtactgctgcaggagctgttgctggaagtggaacccaggcggcgccggtagtagtcgtgggtggccacgagcgagccgctggaggggatggccgccatgctttagcttgctggctggtgggatctgggcggcgacccctcgcgggcctcggcgcacgatcacgggtggcggggacgggggcgctaggccacggagcccatttgcagagaagaccgcgggaagccgcgccacgacagagaggcgcgcgcggggt

SEQ ID NO: 65931 - DNA, 1459 bp, Homo sapiens
ttttttttttttgagatggagtttgttgcccaggctggagtgagtggcacagtctcggctcactgcaacctccacctcctgggttcaagcagttctcgtgccgcagcctcccaagtagctgggactacaggcatgcgccaccacgccaggctaatttttgtatttttagtagagatggggtttcaccatgtctcaaactcctgacctcaggcgatccacccacctcagcgtcccaaagtgctgggattataggcgtgagccaccgcacctggcctatgagtggtcttttaattaggaacaaatctaatggaaaggagagttgactgaagttggcccacaggattgtgaagctgggcagtgccttcatgaaggcttgccaccttgggacgccccagtttactggggtgtcttgcggagtgcagaaggctttctggcagctgcctgggtttggccagaccctgcctcccctcccgccggccaacccctagtccccttcctgtctccacttgcattcaggggtggctgctgttctgagaacattagaactgggaagagagatggagtcacatggatttttggtgggcattattctaaactttcgtatccaagttagtcccccttattccactgtggcattgccgttctaagcagttacctgatgcctgctgctgaagagctgctcacaggaggcggcggcggccctggcactgccccttgcattaggtcttgtgtttgatgtgttcttgtgaatttactttgtcagaacaaaatatttacgcgttgggttcaggaatttcttttagctccccatctggctgtgaaattcaggaaacctcccgttgcctagtaatcaccccatgtaggtgtacattgtgacaaagtgcatctgaccactaaggggcccccttggtgaccccagcacattcacagcagtgttagaatggcctgcattttggagatgctggctggcctttcagtgcctcccaggaagacacatggcctttccctcttcagatgcctgaagggagtgctttgaggcaggtgatgtgctgggagtgtgggcggcctccctctggccccggggccctctgtggaccttggctccctccgtggacctgggcttcgtggtgagcactgcagcctccctgggcattccctccagcgccagcaccactgcaacatatagacctgagtgctattgtattttggcttggtgtgtatgctcttcattgtgtaaaattgctgttcttttgacaatttaagtgattgttttgtttactgtaagtttgaaaataaaaatgaagaaaaaaattccaatgactgtgctgtggttggagactttatttaccaagatgtttactcttcctttccccttccattttgaggagctgtgtcactcctcctcccccccagtgctttgtagtctctcctatgtcataataaagctacattttctctg

SEQ ID NO: 65932 - DNA, 2852 bp, Homo sapiens
ctacgagtacgtcggcgcccgcacctccccgcaccgcccgcgctgcgcgcccggaggagcgaccgccgcagttctcgagctccagctgcattccctccgcgtccgccccacgcttctcccgctccgggccccgcaatggcccaggcagtgtggtcgcgcctcggccgcatcctctggcttgcctgcctcctgccctgggccccggcaggggtggccgcaggcctgtatgaactcaatctcaccaccgatagccctgccaccacgggagcggtggtgaccatctcggccagcctggtggccaaggacaacggcagcctggccctgcccgctgacgcccacctctaccgcttccactggatccacaccccgctggtgcttactggcaagatggagaagggtctcagctccaccatccgtgttgtcggccacgtgcccggggaattcccggtctctgtctgggtcactgccgctgactgctggatgtgccagcctgtggccaggggctttgtggtcctccccatcacagagttcctcgtgggggaccttgttgtcacccagaacacttccctaccctggcccagctcctatctcactaagaccgtcctgaaagtctccttcctcctccacgacccgagcaacttcctcaagaccgccttgtttctctacagctgggacttcggggacgggacccagatggtgactgaagactccgtggtctattataactattccatcatcgggaccttcaccgtgaagctcaaagtggtggcggagtgggaagaggtggagccggatgccacgagggctgtgaagcagaagaccggggacttctccgcctcgctgaagctgcaggaaacccttcgaggcatccaagtgttggggcccaccctaattcagaccttccaaaagatgaccgtgaccttgaacttcctggggagccctcctctgactgtgtgctggcgtctcaagcctgagtgcctcccgctggaggaaggggagtgccaccctgtgtccgtggccagcacagcgtacaacctgacccacaccttcagggaccctggggactactgcttcagcatccgggccgagaatatcatcagcaagacacatcagtaccacaagatccaggtgtggccctccagaatccagccggctgtctttgctttcccatgtgctacacttatcactgtgatgttggccttcatcatgtacatgaccctgcggaatgccactcagcaaaaggacatggtggagaacccggagccaccctctggggtcaggtgctgctgccagatgtgctgtgggcctttcttgctggagactccatctgagtacctggaaattgttcgtgagaaccacgggctgctcccgcccctctataagtctgtcaaaacttacaccgtgtgagcactccccctccccaccccatctcagtgttaactgactgctgacttggagtttccagcagggtggtgtgcaccactgaccaggaggggttcatttgcgtggggctgttggcctggatcatccatccatctgtacagttcagccactgccacaagcccctccctctctgtcacccctgaccccagccattcacccatctgtacagtccagccactgacataagccccactcggttaccacccccttgaccccctacctttgaagaggcttcgtgcaggactttgatgcttggggtgttccgtgttgactcccaggtgggcctggctgcccactgcccattcctctcatattggcacatctgctgtccattgggggttctcagtttcctcccccagacagccctacctgtgccagagagctagaaagaaggtcataaagggttaaaaatccataactaaaggttgtacacatagatgggcacactcacagagagaagtgtgcatgtacacacaccacacacacacacacacacacacacagagaaatataaacacatgcgtcacatgggcatttcagatgatcagctctgtatctggttaagtcggttgctgggatgcaccctgcactagagctgaaaggaaatttgacctccaagcagccctgacaggttctgggcccgggccctccctttgtgctttgtctctgcagttcttgcgccctttataaggccatcctagtccctgctggctggcagggggctggatggggggcaggactaatactgagtgattgcagagtgctttataaatatcaccttattttatcgaaacccatctgtgaaactttcactgaggaaaaggccttgcagcggtagaagaggttgagtcaaggccgggcgcggtggctcacgcctgtaatcccagcactttgggaggccgaggcgggtggatcacgagatcaggagatcgagaccaccctggctaacacggtgaaaccccgtctctactaaaaaaatacaaaaagttagccgggcgtggtggtgggtgcctgtagtcccagctactcgggaggctgaggcaggagaatggtgcgaacccgggaggcggagcttgcagtgagcccagatggcgccactgcactccagcctgagtgacagagcgagactctgtctccaaaaaaaaaaaggccgggcgcggtggctcacgcttgtaatcccagcactttgggaggccgaggcgggcggatcacgaggtcaggagatcgagaccatcctggctaacacggtgaaaccccgtctctactaaaaatacaaaaaaaattagccgggcgtgatggtgggcgcctgtagtcccatctactcgggaggctgaggcaggagaatggcgtgaacccgggaggtggaggttgcagtgagccgagattgcgccactgcactcccgcctggg

SEQ ID NO: 65933 - DNA, 2028 bp, Homo sapiens
  misc_feature (1)...(2028): n = a,t,c or g
ttttttttttttgctataaaattatctcgggtttaattattatcaatatcagaactatagaacattaacggtactaaacctgtatttacaattacatgtacaaaaaaaaatgttctttgtgaggagcaattttcagcaaatctgacaaacagcaagagtcattcctattttgggtttgaaaagagaaatgggaaatttccaaggacggcccccctcctccctctcactccagtggaccctctggaacatcaatttggcaaagggcctgaggtagaaagggaggtattaacaatatcaggcactcattcttcccctcttatgaaagggatgaatttttaggaaccgttttccatcatttattatactgatgtgccatccatctgcatcattaggttcagtagttaccatgacaatatgatgcctacagcaatctaacttgatagccacatgccagaatgtgaaaaaataggaccagctaagaaagtgagagaaatataattaatctgagccacattcaaaaaaatgtgcacaaaactaggaccaagagggaaactgctgaaatatcattgaagaggaaattataaagggcagcaataatcaagtttcagtataaaaacttttgctaaatagagccatgtattggtctattactaagacaggaagtagtcaaagttggtctagaatattgttctgagcccctgcccctccccctgcttcccatttcttgctacagggccctgcggtatcatctttgattctagctgttagggccctaatttccccaaggctctcaagccaccaccataagtgccaccaccatgtcactctgctcatgtgcagtctgctattagacccagactttccacctgatgaaataatttccatcattgtgaagttaatcttaagagactgaattgtgctgtgtcttgagagatcctgtcctcttgccttctaagtgcccggtggaggcatcgggctagcacaaacctcttgagggtcccaatatggtagagaggggctgggagattgagaaaaagagagcaagaaagtttcagtcctgggagatgagcctgggacgtgtgtttattctcagcatggctgggtgggatagcgacgctgagctaggcgatttggccgattcaggctagtggccgtgggcagctgaggcacctgagatgggttgtaaagaggaacagccccttttaaggcaggtggaggaagaagaacaccagggttggagcagagctcaaaggaaacactctctggtccagacaagcctccaaccccagcgcccgcagctgctcccccgctggatgcggaatcctcggcccttcacccccnacctctgcccctggagaaggcactaacatccggcagaggtggggactcaggggaaggtgtcagtgagaggcccaggccagcctggtggggagaagatgctctgggggtctcctgctcagagtcagggctgtctgaggagtcctcgtctccagcgggggatgcgttcttggtgggcttcgatcgaaaccagctgaaccagccaaaccctgagctctttgtatgctccttcccatctccgagcttgcctctctgggcagtatttcggggagagtttttatcagcctcatcagaggactccttctcatcctccttggctgaactggcggaactctcagaaatacttcgtgctctagcagccaatggtgtctgtggtttggaaatgacctcttggccatcaggaggctgggaagtttcttgagacactgtgttctctccagggcccaggtgtgtctgcagcatttcctcccagactgttcctccagtggcctctgtcactgccacgctgctgccagtccctggtagatgggtctcaggcactgagtaaaaaggcctcggtgtccctgtctgccctgcaccccctcctgttgggtaggagcccggctggaggggaaagggcccctgtggtctgggctggagcaggcaggtctgatcaggtgtcagccacagagctgagcgcccacgcgtccg

SEQ ID NO: 65934 - DNA, 1697 bp, Homo sapiens
  misc_feature (1)...(1697): n = a,t,c or g
ggctgctgggtgtcctggcaggcacgtcctgtggggtcagcacgccggctgcagcgcagggtgggcctgagatcgggtgccgggccccccatctccacctgtctggacacgcacccctggcctgtccttgcagcttcctcccgacatcccttggcggtgtctgtgtctcggccccagccccagccctcctttcctggggcaccctcccagccatctggtattggggctgcccccattgcctagtcctgggcccagggccagcccactctgggctggctttacttgtctgttcctaatggcagggcgtcccaggaacagccccataagagctggtagaaacaggagggagtccttgtcagcaggcatcttcgagctttttgttttgttttgtaaaaagcggttaaccagcaagttacataaaagcttatttgttcccactgaattttccacacctcacacgtgagtcccagccatgcagtgcttgtgagggagcatcaccccttgccgcctggctgggcggggccctgggctcagaggggtcagccacagaggaagcgcctgtcctgacgtgtagcggccaggacctgggcgctggagaggggccagctgggtgaagacggctcccgggggcactggcgcacacgaggtggggtctctgtccagcctgggtaggcatgagctgagctcgagtgagggccctgcctgcccacagcacggggccccagcgctctaacccggccatttgcccgtgcagcctgttgcgctgtccccacctgcggggcctgcagatggctgcgtgtggctcactaacctaaagcatgtgtttcttccctctgctgtccaccgctctggtaggcacttacctgggtaagtagtttttgtgctactggccagccctgggcgctgggccttggcttgtggcaggtgccctgaggtatggctgttcctgcttgggagcgccgcagatcaggcacctgggcccccacctgaccctgcccggcagagctaagcaaactggcagggaaaggctgacccagggctccagggccccagtttggnccccaggggagtgccccaagttaggaggcaactgcaggtggggaggggctggacaggctgcttctgttccttaagggatgggcctcagctaagcagcgtttctggagctggcaggttgctccgatgcccctgggccctggcacctgactgagttgagtatgacgtcctgtcctctctgagctggtcctgctgggagccgagccatcctgggaccagctcccacatgcacacgcccacacctacacgcagggcagtggggaagggcagtgagtgggggagggcagcggcggtcctgggcccagctgggggtgaccaggagcatggaccccgcttcttggcccaactcccgcagtgccccttgggctcctcaccctgcactgtgggaagtcagaggcctctggcaccccatccccaagcacatgccaaggtggctggggcccacccagggcagagggtggtgacctgtttctggccggggctggcggctctctcagagccttaagaaaaagcccggcctcctggtggggcagtgccggccacagcgaggctgccctgcagaggggcttgtgccgctgctggactgacagccttgcgaggctttgcttgcctcggcacggcaggcaagtgggtggacagcg

SEQ ID NO: 65935 - DNA, 4277 bp, Homo sapiens
ttttttttttttctacaaattattttattagaatgtcagactcaaaagaactaccaggaacatgcctgaaaatgctatatatgatttatgcttgacccatgacacctgctgtcactggatccagagtgagcaagggaaaggaagtggaggtaggcggggacagcaccagccctggctggccagacctgaggcccacagacctggtccccacaaccaggattcctacaatgtacacattcctaattcaggctcaactctcctttacccaaaagtaaatgcctcaggactcaatctgaatcactgtctgtctcagcttctttcacatccacgctgaatttgtactcctggtcacatcccatgtaagcgtcactcatgaagtacagagtgtagttgtgggcaccagtggctggggccacaaagtccaacttcaccttgggcccttctgctgcaaggtcagcctcttgatggagatgaggctattggacttggcatctccaatcaccacccaccagccactcttcacgtttcctgcggaagaaaaggcgcattgagcaggggcctgtgacttccctcctctcgcttcagctgcaccagcaccacaactgggccggcacttgcggatgcctgtccttatctacccacctcataaagatagtcgattattaggggtaggggttacaaaagcgaggcaccatctgcaaatctggctgtcagtcagctgaagccaacgcgttccgttcttcatcctccatctccatgatgtcgaaaacactctccactcccttgtctgtgcaacgtttgatatgctcagaggtgaagtgtggcagctgcttcaggtatgagtccttggaccacatggcttgggtgaccatctgggccagttccatagctgccagagcagggctgagccacccattgctggaaaggacatccacgcaggcctggatgagccggattgccttactaaggatttcctccgtatctgactgcaactcagcactcagctgcatgcgagacaagtgagcctgcaggagcaggttggtcttgacgtgcggatcattgaacttagggttattcagcttgtgggggaccttctgagccaactgcctcaggagattgtcttcatggtgccggatgggaatgttctcatactctgctgcattggagatgatctcgataagccctcgcaccttggtcttggcattgagggacatgctgaagagctcaatggtggtgtagttgatgtaatagtaggcggcgatcatgcctaggttcagaggcgccacgtccatctcgtcctcgatgctgatgcacttggactgctccaggtcactcagggtctgctccaccagctctgacaagtggtccgacaagtgacgatgggagatgccctgcaggttgtagtaattggggttctgtgtcatgcggcggtacagaaaggtccaggtgaggtagtccacagcatcctgcttgttctcaatggtcttggtgacgatctcagcattgaagtggtcatgcatacagtggtccaggtgagattctactggcaatggctcatataagaacttcttgaagaaatccttcttggagccctgacacatgatgacacagcgcccctcatcgtcctgcaaagggcggttggcgtggcccaccatctgaagcacgtcatagatggggtaatccacataggcgtggatcttgccattgtagtactgggtatccatgatgattaccaggtgggcagccacgttcatgccccagcagagactccgagaagccaccaccacctggatagcccctgagctgaagagctgctccaccaggcgtcgctccatggggctgagcccctcatgcaggtagcccaccccatttagcagcgtttccttgagcgtgctgtcacttagcttctccaggtacggaatcagatccttctcggtgcagtgcaagaacctctgccgttggatgtctgctgcacaggtggtgaggatgtcaatggcagtgaggcgggtctgcttgcgagacggcacaaagacaatgacaggcttcttgggcgagtgcttggtgatagcatggtacacaggcttggccatggagagcaggcgggtttgtgtatggctgatgttgaagccctggatgtgcagctccaaggggacgggacgcacattgggatggaagttgaaggtggaggtggcactgcagcccagccagtgggccacatccttggcattggagagcgaagagctgagtgccacaatgcgaatgggccgctcaatctgggaggagatgtagcgcattcgggagcagatcacttctaagacaggcccattctcgcccccgataaggtggacctcatccaccacgaagaggttgatgttctgcacgttcttgcgctgcttccatcgccgggaaagtatgtcccacttctcaggggtgctgatgataatgttccctttgcccagcagcttcaggtctgtgctggtctcgcctgtcaggagtaccaccttcttgttgagcctgtcctggaacttctcgtaccagtccatgtatacctgctctgccagggcctccatgggggtgatgtacacacagcgcccctccgagctctgcagcagcattcgcaggatggcaaactctgcacaaatagtcttcccgctgcccgtgggggcccccacaaacacgttgtcgtcactgttgtatacagtgttaaacacctgggtctggatgggattgaagaaaggaaatttatcttggtaaagactctcaaaggcactgtttctcagagcagacacgggcaagggctgcaggtccaaaagttcggttggaggggggtacttctccggcaagatcaggtgccggaaggagacaggcagctgggtctcacaagagagccagcggtcagacaccactcggatgaagtactgagggggcagcggttcaaagacaggcacgaagaatgtaatgaggtgctcgtcctgggcgtacttggccttgaggagaaaatactcatggtgcagaatcacctcgctgtccacatcctccaccagaatccaaaaagcctcggatgaaccatgcaccttttcatcccactggaagtctggcgtgatggtcagctccaccttcagggtggagcgtgtgataggctgcaggtgcactgacaactccagcttgggaaacagatggacatatttgtggatggtcttccccatctttggcatgcggataagctccccaatctcattatgattcaggtcgtacagacgctcaaaggggaaattcttcttctcaatcttcttcactacttcctcagggagtttccggaactggcgcagaggacacatggactgccacatgcgtttgtcgatcatcttgcagaggttcagggtcttgtctgtaagctgtgcccaacctcggttcaggacaatttcaaatatcgctcgcatcaaccggccagccgactgtgtgacatacaccatgtcagccatcagtgcaaagccctccaatttcagctgtgagatgaaggcttgcagaagaacgttgatcttagcactgggttcctcaatgctctcctttacagggataggcaccctctccagcaacttctgcagctccagcttctcctcctctctcactgtgatgttcttgaactcagaggacaatgagaagaccctgaaaagctcaatctcactcagggtgggcttcagcagctggttgtaagtctgcactgtatcattggtgatgtagtagtggctggctatacggcccagttctgtcacctggaagttgcccgtcttcttgtcgtacttgaccagattgttcttgtccagcatcagggcagctgtatgaaccagatctagtcggcgctggtccagcaggggatctcccttgaggtcatcatgagagatgccatagagggttggggatcgcagcattcggatatagaggtaggcatagcccagccagttcaccgcatccttggcattctggacatttcctagcacgatttctgcattgagcatgtcaggaagctttgaaaccatctggctttcaataggaagttgttgattgaggagggacaggtagtactgtagctccccatgagatgtgatgagtatgccttcacccttggtgtcatactggggtcttccggcacgtcccagcatctgcagaatgtccagtgctcccagttctgtccaacgccccttctctggactgtacacctgggtgcctttgatgatgactgtatgtgcagggagattcacaccccaagctagagttgc

SEQ ID NO: 65936 - DNA, 1132 bp, Homo sapiens
ctgtttggggaaccctacatctttgaagaacttctgagcttgaagatccgcatctctccagatgcctttttccagattaacacagctggtgcagagatgctgtatcggactgtgggggagctgactggagtgaactctgacaccatcctttcttgacatctgctgtggaactggtgtgattggcttctctctggctcagcatacatctcgggtccttggatttgaattgttggagcaggcagtggaggatgcaagatggactgcagccttcaatggcatcaccaactctgaatttcatactggtcaagcagagaagattttgccagggctgctaaagtcaaaggaagatggacagtcaattgttgctgtggtgaacccagcccgtgccggactgcattacaaggtgattcaagccattcgaaacttcagggccatccacacgctagtttttgtttcctgcaagctccatggtgaatccactaggaatgtcattgagctgtgctgtcctccagaccctgctaagaagctcttaggcgagccctttgtcctgcagcaagctgtacctgtggatttgttccctcacaccccacattgtgagctggtgctcctctttactcgataagcagcctcctagaagacagcaggctatttgttaaggctgaagtttcagaaactttcaggtttggcatattgctacattgcagaccctgggagcattacagtggaaaccaatctttggtttgtgaataggaagaatctattaggcctctggtctgaggcagattttttttttgagatagagtctcactcttgcccaggctggagtgtcgtggcgtgatctcagctcactgcaacctccgcctcccgggttcaagtgattctcgtgcctcagcttccccagtagctaggattaaaggtgcgtgccaccatgcccggctaatttttgtatttttggtagagacagggtttcaccatgttggccaggctggtctcaaactcctgacctcaagtgatccacccgcctcggcctctcaaagtgctgggattataggcgtgagccaccacaccccgccgcggctgacttaaccttagatttcagattccctttcaatcatgcccgtttgcttgggct

SEQ ID NO: 65937 - DNA, 2433 bp, Homo sapiens
aattgacccgcgctgctggaattccgtacgaggcttatggacctcggccagctcagaggggtgcccgcataccgagtccacgtataaagagtcggatcactgctcactggtgatgcctttacacatgtgtgactgggagaaaggacaggaagatttattgtacagacctaagaaaccctgacattcgggtgctaatttgtgaagaaaaagcaccagttctcaagatggagcttgatagatcagctgatcctcctcctgcaatttgggttgcaacaactaagtctacagtaaataaatggactttgaaaggaattcataattttagagcctctggagattatgacaatgactgtacaaatcctataacacctctttgtacacaacctgaccaggttattaaagggggtgctagtattattcagtgccacattcttaatgataagagacatatattaaccaaagataccaataataatgtggcatattgggatgtattgaaggcatgtaaagttgaagatctgggcaaagtggattttgaagatgaaattaagaaaagatttaaaatggtgtatgtgccaaattggttctcagtagacttaaaaacagggatgttaactattactttggatgaaagtgattgttttgctgcctgggtttctgcaaaagatgctggtttcagcagccctgatgggtcagatccaaaattgaatttaggaggacttttactccaagcactcctggaatattggcctagaacacatgtgaatccaatggatgaagaggaaaatgaagtaaaccatgtaaatggggagcaggagaaccgagtgcagaagggaaatggatattttcaagtgcccccacatacacccgtgatctttggtgaagctggaggtcgcacactgttcaggctgctctgccgagattccgggggtgagactgagtctatgcttcttaatgaaacagtgccacaatgggtaattgacatcactgtggataaaaatatgcccaaattcaacaaaattcctttctacctccaacctcatgcatcttcaggagcaaaaaccttaaaaaaagatagactctctgctagtgacatgctccaagtccgaaaagttatggaacatgtttatgaaaaaattatcaacttggataatgagtctcaaaccactagctcttctaataatgaaaaaccaggagaacaggaaaaagaagaagatattgctgtgttggcagaggagaaaattgaacttttgtgccaggaccaggttttggatccaaatatggaccttcgaacagtgaaacacttcatatggaagagcggtggagacctcaccctccattaccgtcagaagtccacgtgaaggctgggctaatgctcctggatattcatttacgaccttcctctatggccccaagagtagtcctaggaagcccactgatccccaacgggagcaagacttctaacggttgattggtatggaccgagattatctttcaattgaagtgactaatcgagatgtaatatagaaaccagtctccatgtgtagattaagctgtccccagggaagcagagtgcaagagcagaagagccccaagcagactatgtctttcaagatgtacagaagactgacaacaggccagtgcagactttgcttcctccttttgtttcaaaggaccttatctacccattaacacttgttagagacacctcagtcgggccacaactgtctctgtttcaactttaagcccacacactctgtagcttttctaaaacagtacattccattcatgcagtagatatgaaggctttttccaagtttgtcatataaagtaatcaaattgttttcaccgtttaagacagttatttttaatgggaatttgctgttgcacaatttgagaaccagcccatttcataataaaagattaatgttgggcttgttgttaatattgcatctcagatgtgttcttgtaggaagatctgttgaaattccaggtgctggatcatagcacttggactgttgggccggagtttgtgcagcccatgcctagcgatgctgcacctcccatgatgtcctggctttgtggcaaccccagggaggtgcagcagtttcactccttcctccactgtgtccagttttatttacacaaagcgagctgagaccacaggttcttgctctggatgagcagcatgacaccatcaaaatttaagaccatgatgaaatttcagtttcattcaaatgttacctaaaatttatggtgtcagaataaagggagatcatagtgagttaatttgatattcatatcctggaagtatacatatttgtttttccaaagttttatatgcaggtttttgttgtacctgtatccagatcttcttttcactgttctaacaatctaacactttcatagaatcatttggatcttggtcgacgc

SEQ ID NO: 65938 - DNA, 2227 bp, Homo sapiens
tttttttttttccgttttgttatttaatcatatatttttacttgtatctaagccaggtcctttggcaatgaggaggtgtgcagggatcggggtgaggaagtgcaggactggatggacatttaaggtagggcagctttgggggatgccacttccaaatgcaatggggaccatcactgtgtattccccatagttgtgtggtgagcagctctggataccctgaccacaaagctttggggacaatttgttcaccagaagatgtgaggaggacggaatactcaaaggcactcagagatggtggagctttggagctgaggcgggcaaggcatctcagatggtcacgctgtttctctaccatgctgggtcaaaggtactcacacggcaggttcaggactgcattccggacctcaatctccttgtccatggaagccagttcctcctggaattgtctcagcacagcttggggctcaggaccagagaaatatttctcctcatgcatgacaggctggcgtctgccaaggaactttgtgaaggtcttttgcatacgtgcctggtggagattgggcagtaagtccactatatccttctctgtcacatccttagagatgggcgggggcttctgcatggtgcatgggccattagggatccaggagtaccagtccagctggcccaggtggttagaagcatgctgacctgtgcatgtgaagatgcacatggtgacaaagtggcagagctgagcccgggactctaaggagatgaggaacccctggtcttgggccctctgcagtccagtctcagtcatctctctgcaccaggcctgcagctctagatcatccttcatggcttggtcactattgtagaaaagcccaaccatcccctccacgtacctattcccggctgatgattccccacagcctgatggcatcttagccataaaaagaagatttcacatccaggagcccacggtcagccaggtcatcaggaggacagagggaatgataggtcaaacaagccatggctctctgaagaatgtccacgtggcttccactaccagtgctcaccaccaggtcaaaaattccccattcggagacaagactactctgggccagcgtgttgatcgccatggtgtagcggaagtgggggatcaggagcttgtagataggatggaggctaggcaagcttctcattgtagccacagcaataacctcagcaatcaagtgtcccctcagcagatgtgactgtaactgctgcagctggaaatcagagctccggacccaggtcttggccaggagccaggccatggggggatgcgagggcagaaagagcagaggtgggggacatccgtgtcaaggtggctggagctggatgaccatgggtaagagtcctccatcaggctgaagcttcagcacgaccaaaggggctgccacgcattgctgcttaaaaatgatgacattaggcttgactccatccagcaaggagaaatccacttcaaacagagatccagcctggagttctttctccagctgggtcttcaagtcttccatccctggaggcagcaccaggcaggctgggagccttgaagaacacctcaggagcatggggtttgcaccattgagaaactggtacccaaagaaggcatcattcttccaagaatcataaacccgctcagccaggacagtctttccatgtgggaatatttttttgaaatcttccagccttttcacacaatttatgaaatccagtgtccccttaatggccaagtccttcaacccttttgctagggagacattaaagtctaaatccttatcctcgaggaatcgctcgtccctaggaaggtccggttgcctattccctgctataggcaggattaacccatctttccaggagccccaccagtaccctcaggcaggcagataattccgtggccctgcacccagcggtagcaggggaaaaaggccgcgccttgggtccccgggccctgcactgagatccacttgcagaaccagtcgagactcaacagcacgttgtgtttgcgcagcttcaccatcaggaggcgccccaggtgcagggggacgtcgatctcaaactctgcctcctttccccacaccggtggcagctgcttccctaggtctgcctccccgtgctcgcccaccagccatagctgcaccaggttgggagagcccgccaggagcaaatccccggtggctacgcggaccgtgtacttgcccat

SEQ ID NO: 65939 - DNA, 928 bp, Homo sapiens
tgggcttcgggcgacagtagcaacaaccacaaaccacgagagtggctggagatcgatttgggggagaaaaagaaaataacaggtgcagaaaataacacaagtgccaagtgcaggagtagtttcatgactgtaaatgactcgcagttgaaaatacgcttattgtttacataggtgcttctctacctacctccaagttcttgaaatatttgaaaatgtaacaaatctttacattctttctgtgaaaagaatctgtatgcaagttgtaaatatggatatatggattagagagataattcttcaatggtgaaatctttatatggtgtattgtcagtgtgaaaacattaatctgtgaagagatttttaaatgcaactaatataagttggcctgtgagatgatctgaggtttcaaatgagggagaaaaaaatgaaacttgaaattataatagatgttatatttaacaaacttttaaaaatagcctggtaaatattattttcttacaaggaattaggaccacaggatctacacagtcgaacttcaacttttatgttaagagttttgtgatgaacttcaaaaacaataattctaagtggaagacctataaaggaattgtgaataatgaagaaaaggtaagaggtaaccctagaggcaagagaactgagtaggagaacaggcctctatatattttcatcaatgtgtttacattaaatatctcattaataaaagacagtgaggccaagcatggtggttcatgcctgtaatccccaagctttgggaagccaaggcaggaggatcatttgagaccatcctgggcaacatagcaagaccccaccactacaaaaaaaaatttttaattacccaaatgtggtggtgcacacttgtagtcctagatacttggaaggctgaggcaggaagatcacttgagcccag

SEQ ID NO: 65940 - DNA, 1031 bp, Homo sapiens
ttttttttttttgagatggagtcttgctctgtcgcccaggctggagtgcagtggcgcaatctcggctcactgcaacctccacctcccgggttcacgccattctcctgcctcagcctcccgagtagctgggattacgggcgcccgccaccacgcccggctaattttttgtatttttagtagagacagggtttcaccgtgttagccaggatggtctcgatctcctgaccttgtgatccacccacctcggcctcccaaagtgctgggattacaggcgtgagccactgcgcccggccacattcagttcttatcaaagaaataacccagacttaatcttgaatgatacgattatgcccaatattaagtaaaaaatataagaaaaggttatcttaaatagatcttaggcaaaataccagctgatgaaggcatctgatgccttcatctgttcagtcatctccaaaaacagtaaaaataaccactttttgttgggcaatatgaaatttttaaaggagtagaataccaaatgatagaaacagactgcctgaattgagaattttgattttttaaagtgtgtttctttctaaattgctgttccttaatttgattaatttaattcatgtattatgattaaatctgaggcagatgagcttacaagtattgaaataattactaattaatcacaaatgtgaagttatgcatgatgtaaaaaatacaaacattctaattaaaggctttgcgtgacgcccgagtagttgggattacaggcatgtgccaccatgcccagctaattttgtatttttagtagagatggggtttctctgtgctggtcaggctggtctcgaactcctgacctcaggtgatctgtctgccttggcctcccaaagtgctgggattacaggcatgagccattttgcctggccaaaattaatactttttatattaaatttacatatatatatatatatgcgttttctttttgataccgggtctcacactgtcacccaggctggagtacagtggcacaacctctgctc

SEQ ID NO: 65941 - DNA, 885 bp, Homo sapiens
atactggaaaaaaatcatacaaattggaagactgtggcaaaatcttttaagtattgctcaaatatatccagccataattcatactaaagattatgcctatgaacctaaggaagtttggcaaagcttatgaatacacctcaaactttcctaagccttggagaaatatcagtgagaaacctcagaaaactgaacaatgtggcaagccctttaaatggttgtcacatcttactgtaggtaaaataattgatagtggagaaaatctctacaaacaaagaatgtgtcaaaacttctaacatgctcatactttatggcacataaaagcgtttatacttgaaaaattatacagagtgtggaaaagccatttctatctgctcacatcatagtcaacatcaggaagttcatacttaataaaattattataaatgtaattactgttcaaagaccttggaaaatataaacccttaaaataaaaaagagtattctggagacaaacattacaaatataaagagggttgtaatacctttacttgccctatataatgtacagattttacactagaagaaaactctaaaggaattactcaaacttgtttggcatcagagaatttatgttgaaggaaaccgtacaaatgtaataagtgtggaaaaacatttgttcagaaactacagcttacaaaacaccacacagtttataataaaaaatatttttgcagatggaatacatatgtaaaaatatttagtcaaaattaagtctttgtaaactttagaaaattcacggtagggagaactaaggcactggcacttaagacgttacactaaatcagaatgttctgtaaagaaagtaatccaaagctaaaactgttggataatttatttgtatataag

SEQ ID NO: 65942 - DNA, 2225 bp, Homo sapiens
gaagaaggaggaggaggcccgcgtcgcctccggcggggctcgcgctcgccccgcgctcgccctccgcctcgcccgagccccgggagggtgaaacgctttctcccagcatgcagcgggaggagggatttaacaccaagatggcggacggcccggatgagtacgataccgaagcgggctgtgtgccccttctccacccagaggaaatcaaaccccaaagccattataaccatggatatggtgaacctcttggacggaaaactcatattgatgattacagcacatgggacatagtcaaggctacacaatatggaatatatgaacgctgtcgagaattggtggaagcaggttatgatgtacggcaaccggacaaagaaaatgttaccctcctccattgggctgccatcaataacagaatagatttagtcaaatactatatttcgaaaggtgctattgtggatcaacttggaggggacctgaattcaactccattgcactgggccacaagacaaggccatctatccatggttgtgcaactaatgaaatatggtgcagatccttcattaattgatggagaaggatgtagctgtattcatctggctgctcagttcggacatacctcaatagttgcttatctcatagcaaaaggacaggatgtagatatgatggatcagaatggaatgacgcctttaatgtgggcagcatatagaacacatagtgtggatccaactagattgcttttaacattcaatgtttcagttaaccttggtgacaagtatcacaaaaacactgctctgcattgggcagtgctagcagggaatacccacagtcattagccttcttctggaagctggagctaatgttgatgcccagaatatcaagggcgaatcagcgcctgatttggcaaaacagagaaaaattgtgtggattatcaaccacttacaagaggcaaggccagcaaaaggatatgacaatccgtccctccctagaaagctgaaagctgataaggaatttcggcagaaagtaatgttaggaactcctttcctagttatttggctggttgggtttatagcagacctaaatattgattcttggctcattaaagggctaatgtatggtggtgtttgggctacagtacagtttctttcaaaatcctttttcgatcattcaatgcatagtgcattgccccttgggatatatttggcaaccaaattctggatgtatgtgacgtggttcttctggttttggaatgatctcaactttttatttatccatcttccattccttgccaatagtgttgcacttttctacaattttggaaaatcttggaaatcagatccagggattattaaagcaacagaagagcaaaagaaaaagacaatagttgaacttgcagagacaggaagtctgggacctcagtatattctgcagtacctgtttgatacggaaaaccggtgagggtccaaacattgtggtgtgtggcaaccgctggtataggcaaaatttgatcatcattgcccatggggtgggtaactgtgtaggtgcaggcaaccatagatattttatgggctacctattcttcttgctttttatgatctgctggatgatttatggttgtatatcttactggggactccactgtgagaccacttacaccaaggatggattttggacatacattactcagattgccacgtgttcaccttggatgttttggatgttcctgaacagtgttttccacttcatgtgggtggctgtattactcatgtgtcagatgtaccagatatcatgtttaggtattactacaaatgaaagaatgaatgccaggagatacaagcactttaaagtcacaacaacgtctattgaaagcccattcaaccatggatgtgtaagaaatattatagacttctttgaatttcgatgctgtggcctctttcgtcctgttatcgtggactggaccaggcagtatacaatagaatatgaccaaatatcaggatctgggtaccagctggtgtagcgacatcttatcctatgaagcatattgctgagtggtgcctgaaaattgtgtctgtccgtgtctttctcacactcgaatccacatcctttgaacaagagcatgctatgtgtagggctaatggtgaattttacagtctttttttcaacacttttattaacaaaagtaaacatggacagaacacactgccatttctgggaagagtaaagatgat

SEQ ID NO: 65943 - DNA, 2914 bp, Homo sapiens
ttttttttttttaagggggacaattaaaaatttaaaaaataattttaaaatagaacagcttagagataggaaacctaaatttatttcccaattccttactgtgcccccaaaaccagggttcaccaaaagggctgtcctcccaacaaattttctggaattctatatattcagcattaaattccatgataaaagttgggaaatcccattcaccattttgtaatacatattgatggcatttaataaaattgcatgggcccgtatcttttggcatttctggtatcctaggtattaaggtacaggtgcctaccacagggccagggttctcaatacttggaataaatggacacaaaaatagccccaggacccagcaaagttttttcctggggtggggccttccatagaatcctctgtactttggctgggaatccaccatggaaatcccatgggtcttcagcttttgcatttttcagcaacataggttatattgagtttatcctcaggtgaggcagtggagaccccttgggacgcggattccatggtaagggtggctttgtaatgtgtcaccttggtggggctatgttttcccggaactctcttccagtaaagatggcccaacaagagacattttgcttggataaccgggagggcggaagtgaagcagcagcacattgtttttaacacttgggaaggtttgtgctggggcaccaggccgttgttgcagttccacacgttgccatgtatctgttagatcacctcgttgggtgtgggcagtagtcaggcctgcagccaggcctgcagctgctccaccttccccaggatcatcctttcagcttctctaattcctgggccagatgcatatttaactctgtgaggaagggcaccagcttcttctgcaggacacccacatcatcgaagctggaggtggtgagagactgacatgggttccaggccatcctcgtgggttccagctcgtgctcgtgggctccactgtgtcctcggtctcccacactttacatccatcttcccttcccgagtgcctgccctgcagacttgaatcctacagtctgtagaagcctccagtctactgctttctagctccaggttttttaaggtctttggaccttggcaaccagactgctgtatctcggaagcgggttccacccaggctgaaaatctccgtgatcacgggtgtgccagcccctcctgcctcttcctctggggccaatttggaggcagaatcatccttgttctcctccttgtcctcctctgggtcaggtggctcttgcttcacagaaggcaggcctgggtctactgccttgctagggcagccaggcaccaatacgggagaagtcaggacagctgtgcctggtgtccactcgtcctgggtatccgccttctcttgcttcacctggggtaaggccacaacccaactcatgccagaacactgggcytcctgcaacagggcttctgtggaagctgcaacagggcccggcacctgcacaggamtgcttgcgcccttcccgtaaaaaacacaaggttcagtgcccaggcgggggcagcacaaagccaccacctgcttcctgcttcgttggagcctgggtatggtctggttgggctgtgcgtgtagccaaggtgggcttcaaggtagggccaagatggtgccgtcgggcagagctgggcctctttcgacgacggtaaggtgggggcgaatcttgccccatcctcagactctgaccagacactgggcagcagccgcttcatggcaaactgcaggcattggcgccaacgacacttctggcgcttctggttgctgcccccgaatttgggcttgtcgcagcagaagtcgcagcggccacatccattccgccgtaggcaggctgcacaggccccgcacttgcggttctgccggcggttcgtgtaggggctgtagctcgtcctcgtctacacagtaatagatgaactcggcaggtggcgagggggccagggctctggggtgcggctctgtgggctctggggactgtgatgggggtggtggaggcagtggctgggctccggggcgccgcctggcagccatcttggagtcacagcctcccttgcggcgggcatgtttaccccgtaggcaacgtcgctggacacatttccactggcgcctgagaccagggcggggagggcgaaggcagatggggcaatggccacaatcytcttgggtctgacagccccggcatactccacaccctcggctcttaaacattctctgttcccggttgaaggcaattctctgtgctcgacagtctttgcacaacgttttgagccgctgcctttgggtgccatcccctgagaagctgattccacagttctcacagcacccaggagcagggaatgaagctggggctgtgtcagtgtcagccttggtctcatccctcggggcctccttcctgacctcaccactctggggtccaacctgacgtttccgagtcttggctggccttgaaggcttctttcgcttcttgctggcaaccgccacgggatgggccttgggggctggatagcacaagatgccttgtttgaagtcgaagagggtgagatcacacgcagggcccaggtatcgagtcagctcaactttgcttcggatcctgtctcctgtggggctctggtaataggtgtctgagcgtccacaggtggcccctgacttgcgaaagacttcgcggcgcttccagccagggcccagggccgggcagtccagccagtcctcagccatggaggccacaggaagcagcagtagccagtttggcaccaggccggtatcttccgccactctaggcccgtggacccatggcgagggtccctcctgcacctcccgcctcgccctcctccccttcctcctcctccgcggccggggggagtatcacacaaa

SEQ ID NO: 65944 - DNA, 680 bp, Homo sapiens
ttttttttttttttaacttctgaaaaatatttattcttgtttgatgaaagcaacgtttctcagcaatgcattttaaaaaatattttagccggtaaattaaaaagggcccataatgtacccctggcagacttcagcatataccaaattttaaatttaaatcagcttgaattcagtggggtatacaaatcaatcattttagttgttttagggctttttattgaataggaaaaaatataaacaatgttgtaggagtaatgagaaatcctcccacactggaaaaaaaactaggtagttttaatttttttggggatcatattttctgagggtgtaactggctttcattagatgatcatacttttcctgacatttttacaatgtattctttctttaaatataaaaacctgacaaggataaatatagtgtttcaacttcttaggcctatttgtggatttttctgttttcctctgacccatcattggattctataaaaaagtgccggggccaaggaaacaatagttaggaggtaattcttcctttagggtcctttcagcagtcttgccaagcaagcatgtatcattcctgatgtacttctaccagttgacagcaagaagaatatcaccacatctaattcttccatcattgtattgctgtgttccttcacaatggatttgatgaaaaaa

SEQ ID NO: 65945 - DNA, 3941 bp, Homo sapiens
  misc_feature (1)...(3941): n = a,t,c or g
aagaaattgcaggtgctgcagcagagaacatgttaggcagtttgctgtgcctcccaggttcagggtcagtgcttcttgacccctgcactggttctaccatatcagagacaacaagtgaagcttggagtgtagaggtattgccaagtgactcagaggccccagacctaaagcaggaggagcgtctgcaagaactggagagctgttctggactgggtagcacatctgatgatacggatgtcagggaggtcagttcccgccccagcacaccaggcctcagtgttgtgtccggcataagtgcaacctctgaggatattcccaataagattgaagacctgagatctgagtgcagctctgattttgggggtaaagattctgtcactagtccagacatggatgaaataactcacgattttctttatatacttcagccaaaacaacattttcaacacattgaagcagaagcagacatgagaatccagctgtcttctagtgcccaccagctgacctctcctccttctcagtcagagtctctgctggccatgtttgatccactgtcttcacatgaaggggcttctgctgtggtaaggccaaaggttcactatgctaggccatcgcatccaccaccagatcccccaatcctggaaggagctgtgggaggaaatgaggccaggttgccaaactttggttcccccatgttttaactcccagctgaaatggaggcattcaagcaaaggcattccttacccctgagagactagttcgaagcaggagctctgaatatagtatcttctgtccggagacccatgagtgaccccagctggaaccggcgtcccaggaaatgaagagcgagaactccctccagctgcagccattggtgctacttctttggtggctgcacctcattcatcatcttcatccccgagtaaggactcctcaagaggagagactgaagaacgcaaagatagcgatgatgagaaatcagacaggaacagaccttggtggagaaaacgttttgtttcagccatgcctaaagctcctataccatttagaaagaaagaaaaacaagaaaaagacaaagatgatctggggcctgacagattctcaacactcacagatgatcccagccctagactcagtgcacaagctcaggtggctgaggatattctggacaaatacaggaatgccattaaacggaccagccccagtgatggagcaatggcaaactatgaaagtacagaggttatgggtgatggtgaaagtgcacatgattctccccgtgacgaagcactgcagaacatctcggctgatgatctcccagactctgcaagccaagcagcccacccgcaggattcagctttctcttacagagatgcaaaaaagaaactgaggcttgctctttgctctgcggactctgttgccttcccagtgctgaccccattcaacaaggaatggtttaccagaccacacagacccagaagacaatgaaattgtatgcttcttaaaagttcaaatagctgaagcaattaatttacaagataagaatctaatggctcaacttcaagaaacaatgcgctgtgtgtgccgttttgataataggacttgtaggaaactgctggcttcgattgctgaggactacagaaaaagagccccatatattgcttatctcactcgttgtcgacaaggactacagaccacacaggctcacctggaaaggctattgcaaagagttttgcgggacaaagaagtggccaatcgatactttaccactgtctgtgtgagattactgcttgagagcaaagaaaagaagatcagggaattcattcaagactttcagaaactcaccgcagctgacgataaaactgctcaggtagaagattttctgcagtttctttatggtgcaatggcccaggatgtcatatggcaaaacgcgagtgaagaacagcttcaagatgcacagctggccattgagcgaagcgtgatgaaccggattttcaagctcgccttctaccctaatcaagatggggacatacttcgcgaccaggttcttcatgaacatatccagagattgtctaaagtagtgactgcaaatcacagagctcttcagataccagaggtttatcttcgagaagcaccatggccatctgcacaatcagaaatcaggacaataagtgcttataaaaccccccgggacaaagtgcagtgcatcctgagaatgtgctctacgattatgaacctcctgagcctggccaatgaggactctgtccctggagcggatgactttgttcctgtgttggtgtttgtgttgataaaggcaaatccaccctgtttgctgtctactgtgcagtatatcagtagcttttatgctagctgtctgtctggagaggagtcctattggtggatgcagttcacagcagcagtagaattcattaaaaccatcgatgaccgaaagtgaccaagaccaaggcccaccaaggcagcagactgttaatcagacaaacagatctctgagaaggtgcatcagctgctttgaaggctgaagattgttttgtatgatactgcacagcatcaggcattttaaagcagatctttactaaacaggttaatgagctaacaagcaggttctctcgtctttgggctctttcctttctgagttgcatattctattttcttgtccccaagtagagactagtactacaaaaagggaccacatttttcaagtatttctaagtataaaaaacaaaacaaaaatctcttaggaaatgtctagacctccattcttggattccctttctttccttttattttaaaaaagaacagtacccctcttttaagatgctgtcttacattaatgagcatctaatggaaagaaggtatgagttgcactgaggattagaatagtggtgcgttagtggcattatctataaatacactcacctaaattgaaagctaagaaggaaatgtaaatataatatatatttatatttgatgtaatatggacatctgcagattctaataaacaaggactattgctgatagtaggctgtgacatactgtcttgtgaaatggtttccttgacaaaatttaagctgagcttaaaagcaaaaaaacaaaaagtacacagaaatatttattaaaatgtaatacagtttattgaactttctaggtatggagtttgatggacagggctgcctttaatgagtgtgaaggtcactaagtcacttagacatctcaccgtggaagtttgtgagcctgcattaggagatagactgattaccatacatgacataaaaaggaacagtggatagctcatactttatggtggttcttctcctccgaaataatatactgcagaaatcccagacagagctccttacaaacctttaattgtaatatatttttgatgattattcacattgaatgcacagaccaagaattcagtgaatgtcattttttaaaaaactaatttgtattgtctgctctagtgatacaagttttactagtgataaactattttaatcaaccatactattcttatggaaaaaaatatctattttggcaggtttctgtgcctttatttccctcttctgaaaaaaagtctgtgttttcatagtttggtttgcattgtatatcaataattaatcaggaatgggttttggtgcctgaaaaattggccatggaggcacaccaaagcttcaagcacaagtcttgtacatgggccatcactgtctggtttcacttcgtgtgtttcctaaacacatttagctgcttttttaacaaactcagccccatacttgagtcccttgttgttgagagcatttccaggcatcttttaagggaactggtgacaaacagcctcgggcagatgaacacggaggctctctgttgtctgtctctgagatctttgtgtctggggaatncctanaagatttttattttatgtt

SEQ ID NO: 65946 - DNA, 1195 bp, Homo sapiens
  misc_feature (1)...(1195): n = a,t,c or g
tttttttttgagacggagtttcactcttgttgcccaggctggagtgcagtggcgtgatctcggctcactgcaacctccgcctctcaggttcaggtgattctcctgcctcagcctcccaagtagctgggactacaggtgcctgccaccactcctggctaattttttgtatttttagtagagacgaagtttcactatattggccaggctgctggtctcgaactcctgacctcgtgatctgcccgcctcggcctcccaaagtgctgggattacaggcatgagccaccacgcccagcccctgcaagcagtttctttaactctgttgggatgccattcgtgggcaaagctagatttgggacaagttgcccagctctgctaggaagagtcagtcctcagggggaagtttcttttcacctccgggatccccagggcttcctgggttgactcaggacttcatacgcagcctggatctccaggaagtgcctctgtgcctcctctgtctggtccaggttgtggtctgggtgccagaccttcactagctcctggtaactccgatgtatttcttcatttgttgccccttctgagaggcccaaaacctggtaagccagctgacgcttctcatcctgaaaactgtgaacaaactcatagagcttcgcccactcctgaaagcagctgctgttgaagccagtctcccccatcagtagcctccagatccggtaaggcagaaggaggacaaactccatgaggcggccaagaagggggaagaagctgaaccaattcaagaaggagccaaaggtttctgccacatagctgagggtggcagctgtgttgcagagggcactgtatgccagtgggcctgtgaaagcaaggtaagccaagcccagacgatagagccgcacactgagcggctctgatgccaccaaagctttgtagcggcgatgcctctgagctgtaatgctggcggccacgctaatgggcagtatggctatggggcggccatagaagataggtgaagtgagaaatgctgaccccagagtgttcttaaagtctgaggtctggttgccaacagcagccaccagcaagacccctaagccaactgccagtgggagggccacaatatagaagttgaccatggaagaaaggcgaattccaccacatggactagggatctcgaccncntggactagggactcaaacc

SEQ ID NO: 65947 - DNA, 793 bp, Homo sapiens
  misc_feature (1)...(793): n = a,t,c or g
cagctacaaaatttggcttttacccaaactagaaaaatcagggaaccccagactcaggcccagtagagaccccaaagaagcagagaagggtcagttcactgaggggccacacctgccccagggccaggccactgtccatcctggtgccaccaccaccctgctggcctggccccccccaaccagacagcagtccccacccagcccagcaccggtaaccttgagaataggggccaatcaacaggggggccaggagcccccaaggtgcagggtgcactgagggccccaccggccctgctgaacacaggcctgacaccacctctctccttcaaggccaccgacgctcttgggaggcagtcagtgccgtctccctgcgtcactggcagaagactgaggctcagaggggcagagtgacctgccttgaccacccacgcacgtctatgccggagcaccaggctgccccagcggctcctcccggccttttgcagccccatcgcccacccacatggaacatggctggggtggactgcagggatggagctggggcaggacacagccctaggagcacctgcctggcgccagcttttgctgacggcagcccaacagcccccagccacgtggcaaagcgggtccccacgcagccctggctgcagctgctccaggggtggcctgagacttctcaaagaagatgctgtgcccggtcccccggaacccctacttggccggacgccgctgatggtgccggacgcggggtcgcacgggaattcgtgccggtntnaagggtatcaggncccgc

SEQ ID NO: 65948 - DNA, 1407 bp, Homo sapiens
ttttttttttttcttgccaatttttctatttttagggggtagagacggggtttcaccatgttgcccagcgttcctcccgccacggctttccaaagtactgggattacaggcatgaaccgccgcacacaccacttgtatctcctatgcccgtgtcaagcagcagcagggcggtgggaacggctgcacctgcactgtggcagctcgcaggcctccctgacgtccaggcggaggctttctcaagtgtgggtgccttgggtccgacccaggaccccctccccagctcccgtcctgtggaggagaccccaccatgcttcctcaccaccggctggagatgtcctgaccccctgcccactgcgccctaacattactgactctaaaccagaacccagtgcccaccctgtcctcaccgtcctcaccccacggcattctgagtgagggacgcccaggcccacccactccctggactcacttctgtccccccgagagaccttgcccgggacatgtacccacctatgccctctactgcccacctcagccctgtgggacccagtggtgaggaggggagtcctcacggccagccaaggacaggatggtgacgaggggcaggggaacgagggccaccaggccttggctcatgatgcctccaaattccccagggcctccccagagcctggacaccgctgcatggcagggtgggtgtagcctgccagccacatgtcctctgccccacccctcgctggaaatgcctgtcccgatatggcccacgggtcctgccgttgcccctcaccatgctccctgatgtgtccaggctggcctgggggtcgtgctacctgaggcggcagagctgagccaaggtccaggaccagtttcaagagggtgggccaggctcctctgagtccatttctagggcagcccctgcacccttgccgtgctggactcggtggggacgtctgggtggctctctgcaggtgacacacgtgctgtggctggccaggtgggtggcaggtatgtgggggtggagctctcagctctatcactgccaggccctggggtgatgctgggcagagctgtccctgcgagggccctcggaatccaggagttgggcgattccgggatggttccagagcttccaaacccacatccagcccaggatgtgagaagcagcccataaaggcctgagccaggctgtcctggtggggcaggtactgtgggccccgcctgcccagctgacaggaggcagccagcggatgcccgggtgggaggggctcgagctctcagggtgtcccccagctaggactcatccagggcagggacccctcatgggaggatggggagtcacatggtgcccaggacccccgactgaggactgcagcagacccgtcacagcaaacggagtggaggcctgtt

SEQ ID NO: 65949 - DNA, 3013 bp, Homo sapiens
tccttcttgtcctggtcgttgttcccgtctgagtaccagctccccactgccctgagggcgggccggcctgcggcggagggaaaaaggaagaggagaaggaaattgtcccgaatccctgcagtgggtccaagcctctcccgggtggccagtctttctgtaggttgcggcacaacgccaggcaaaagaagaggaaggaatttaatcctaatcggtggaggtcgatttgagggtctgctgtagcaggtggctccgcttgaagcgagggaggaagtttcctccgatcagtagagattggaaagattgttgggagtggcacaccactagggaaaagaagaaggggcgaactgcttgtcttgaggaggtcaacccccagaatcagctcttgtggccttgaagtggctgaagacgatcaccctccacaggcttgagcccagtcccacagccttcctcccccagcctgagtgactactctattccttggtccctgctattgtcggggacgattgcatgggctacgccaggaaagtaggctgggtgaccgcaggcctggtgattggggctggcgcctgctattgcatttatagactgactaggggaagaaaacagaacaaggaaaaaatggctgagggtggatctggggatgtggatgatgctggggactgttctggggccaggtataatgactggtctgatgatgatgatgacagcaatgagagcaagagtatagtatggtacccaccttgggctcggattgggactgaagctggaaccagagctagggccagggcaagggccagggctacccgggcacgtcgggctgtccagaaacgggcttcccccaattcagatgataccgttttgtcccctcaagagctacaaaaggttctttgcttggttgagatgtctgaaaagccttatattcttgaagcagctttaattgctctgggtaacaatgctgcttatgcatttaacagagatattattcgtgatctgggtggtctcccaattgtcgcaaagattctcaatactcgggatcccatagttaaggaaaaggctttaattgtcctgaataacttgagtgtgaatgctgaaaatcagcgcaggcttaaagtatacatgaatcaagtgtgtgatgacacaatcacttctcgcttgaactcatctgtgcagcttgctggactgagattgcttacaaatatgactgttactaatgagtatcagcacatgcttgctaattccatttctgacttttttcgtttattttcagcgggaaatgaagaaaccaaacttcaggttctgaaactccttttgaatttggctgaaaatccagccatgactagggaactgctcagggcccaagtaccatcttcactggggctccctctttaataagaaggagaacaaagaagttattcttaaacttctggtcatatttgagaacataaatgataatttcaaatgggaagaaaatgaacctactcagaatcaattcggtgaaggttcactttttttctttttaaaagaatttcaagtgtgtgctgataaggttctgggaatagaaagtcaccatgattttttggtgaaagtaaaagttggaaaattcatggccaaacttgctgaacatatgttcccaaagagccaggaataacaccttgattttgtaatttagaagcaacacacattgtaaactattcattttctccaccttgtttatatggtaaaggaatcctttcagctgccagttttgaataatgaatatcatattgtatcatcaatgctgatatttaactgagttggtctttaggtttaagatggataaatgaatatcactacttgttctgaaaacatgtttgttgctttttatctcgctgcctagattgaaatattttgctatttcttctgcataagtgacagtgaaccaattcatcatgagtaagctcccttctgtcattttcattgatttaatttgtgtatcatcaataaaattgtatgttaatgctggaaagaaaaaaagaagaaagaaagaaaccatccctgtccttcagtttataatctagttggagagataagaaacgtacaaaccaaaagataacagaatatctgaagcatgtactcattgtcagatgttccctctgaggaggcacagagggagggcaaaagctttctgtgggatgtgctagtcggctaaagcttcacagaggaggtggcaattgaaaatgagtcctgaatggggtagggtggttagggaattccatggagacaagacaaggggggcatggtgtgagaaaaggcatggaagtaggaaccctcttcctatgacaggagatcattctgcttagagtggagagtgtggagagtgggagtagataattttggaaagctgggtgaagccagttgtggagaattgtttgaatattatcccattgaatacccagagccactaaatctttttttactagaaaataattggggtccatatgaaagtctctattactgagtagtgtcaatgagggtgtggcaaaatggagcctttcacatcctagtggtggccatttggtaatacagatataagccttaaactatgtaaacccttgtcctaaggaagtaattgaataattgcccaaagattgtatgtatgaggctgttcatcccagcactgtctaagctagtaaaaattggaaacaatttaagtatctagcacattggattggttataaagcaaggaatgttcacacagtaggatattataagtatgctgatggaaatctatattgccaggaaaagctattcattatgcgttgtgaagtcagaaagtaaaaaagggtagatagaagtattcgaagtatagttccattttttgagactaataaaacatatgtttaaaaggacactaaaaactggagttatagatatccagatagaaacagtagttatctttgggtagaagaataatgagtgatctttacttttttactttttattcatctttgtgtttttatttatctaaaatggg

SEQ ID NO: 65950 - DNA, 1063 bp, Homo sapiens
  misc_feature (1)...(1063): n = a,t,c or g
ccttttttttttttttaaaacaaaatacattattttatttcaattccatgattttaaaatgctttttatttttttctttttgccccttttacaggggagacgtaaagctgtcccagttatcaaaaaattcaaatctccttttcttctgtggactggctgtcaatgagctttcatccagggtgtctcccatgttctgggaactacttccagatgttcctgaagcacttcctgggtcaaaggactctgctgcttccaggagctccatatcacttccttctttctcaaaggacttctggaataggtcgtagatcttctgctgctttgggtccttgtagaggtaatcagtggattctgtcatttctgaaaaattggtctcagaaagcccggcttctgccagaactttaatcttctcttgaatcaggggccaaaggtagtcatcagctgtgccctttgccacgaggtagtgaatgcccacggagctggtctgtccaatgcggtgcacgcggtcctcagcctggatcagcacccctgggttccaaaacagctcagcaaacaccaccaggtcagccgaggagaaggtgaggcccatattggcagcggtgatggacagcacggccacagcatgcctctccgacagttggaactgctggcacaggtcctcccgctcagctgatgaggtggagccatcgatgcggatgtgctgcacgtgctttctctcaagctcttgcgtaattgcgtccaggaccaccttatggtgtgcaaatactaaaaacttctctcttccactttccagtaggtccaagatatattcaatgacagatgggattttagcttcagctgttctgttgaagaagagaatgagggcatctttctgctgctgtttagttttgtccttggtggtcatttccttggctgcagcatccagggcagctctggtcctggcattgatccgtcctggggcaatcaccactatcttgcgctgcttggcaggcagctgggaaaggacgtcggacttgaggcgccgcaggaattccnccgcncttgcctatgttncacgtatcga

SEQ ID NO: 65951 - DNA, 722 bp, Homo sapiens
gcacgaggcgacaggcacgcagcctactaggtgtggcggcgaccctggccccgggttcccgtggctaccgggcgcggccgcccccgcgccgcaggcgggtatccccggtggccagagagaagaggacctcctgaccccgcggtggcagctgggaccgcgctacgcggctaagcagttctcgcgttacggcgccgcctccggggtggtcccggttcgttatggccgtcgccggagcagctgcgggagctggaggccgaagaacgcgaatggtacccgagcctggcgaccatgcaggagtcgctgcgggtgaagcagctggccgaagagcagaagcgtcgggagagggagcagcacatcgcagagtgcatggccaagatgccacagatgattgtgaactggcagcagcagcagcgggagaactgggagaaggcccaggctgacaaggagaggagggcccgactgcaggctgaggcccaggagctcctgggctaccaggtggacccaaggagtgcccgcttccaggagctgctccaggacctagagaagaaggagcgcaagcgcctcaaggaggaaaaacagaaacggaagaaggaggcgcgagctgctgcattggctgcagctgtggctcaagacccagcagcctctggggcacccagctcctgaggctttgtcccttcccaataaagcctgctacctggcagtacccctgaagaaaaaaaaaa

SEQ ID NO: 65952 - DNA, 1194 bp, Homo sapiens
cccgggggtaaaaattttttttaattaaaccccggaaagcaaactttccaaccgccaggctatggcggttgtttttcccccttttccccttaaaaattttttttttccctaaaggctttaaattttggagggaggttgggccaatttgtcccccccccaaaaaaaaggttctttcccaaaattcccaagttggtttttaaaaggccccccataaggaaaaaaatttttccttgccatccccggttaaatttgggccccccaagggttcttttaaaagggcccccccttttttttttttttttttttttgcatcaacatttttattgaaatacaaaaagtgcaaacggtgaaatacatgattggtgccaaggaagtcattaagtgtgaatgtgaacactggattcacacagtacaagcacccgctccctggggtacagaccagtgggggacatgagaaagaccaaatagatccgaaaggctccccagtgaatggggctgtgagcgacacttgatacacaaaggagggcggagagcagagcagccctggccgaggctagagaccaagggactgatgaagaaccagcagcagcccaggccccagggggctggatgcactgctgatggtcttgggagagcccagcgaagttatgcccaggcccagcctggcttgcggatggggctgggctggtcagtgaggatccccacagtacgggctctggaatcatcctgcctggccaaggtcatgggggcagggtcactgcaggtacttccctgtactccccaaggacaaggctgcaggaagagggatccccaggaaggagtgtaattctacgagacagtgggagtgagatcagccatcactggggccgaggttctgttaaaaaaaaaaaggtcttgcccgggcgcaattgctcacatcctgtattcccaacaatttggggagtgcgaggttggtgggatatttaggtcagtgaattcagactatctggtcaacattgtgaaacctcttctctactaaaaatacaaaaaaaaaaaaccaaaattagctgggtgtggcagctggcagctgtggtcccagctactcaggagggttaggcaggaaaatttcttttaccccaaaagcggaggtgtgccgaaattgggcccctgccctccagcctgggggcaaaaccagactccctttcaaaaaaaaaa

SEQ ID NO: 65953 - DNA, 2426 bp, Homo sapiens
tttcgtaacttaaggtatattaagcagtccccacagacatgctgcctgcactccacctgctgagctggctctgaggctcaggagacgtggccctctgtggtcccattgtctccacgtctgtggtaacccggtgcctttctagagcaggcaggctcccggcatgggtggaaacagagcagggggccagcttcccccaatcaccggtgctgctgtggaggaagagcttggtggcgctaggacgtccttgtgaatgtgacttggaagagcagtttgggatttttttcattgcctggggatgagagggagagacaacgtgtgtcttacacatctcccaacagccgacttagatgtgatccgttctcccagagggagcaggtttctttgaacttttcctttttatgtacagcatagtgctgagcagatcactgcactgtgcaggagttttaacgacagtcaggccaacggcatggaaggaccgcgggagaatcaggatcctcctccgaggcctctggcccgccacctgtctgatgcagaccgcctccgcaaagtcatccaggagcttgtggacacagagaagtcctacgtgaaggatttgagctgcctctttgaattatacttggagccacttcagaatgagacctttcttacccaagatgagatggagtcactttttggaagtttgccagagatgcttgagtttcagaaggtgtttctggagaccctggaggatgggatttcagcatcatctgactttaacaccctagaaaccccctcacagtttagaaaattactgttttcccttggaggctctttcctttattacgcggaccactttaaactgtacagtggattctgtgctaaccatatcaaagtacagaaggttctggagcgagctaaaactgacaaagccttcaaggcttttctggacgcccggaaccccaccaagcagcattcctccacgctggagtcctacctcatcaagccggttcagagagtgctcaagtacccgctgctgctcaaggagctggtgtccctgacggaccaggagagcgaggagcactaccacctgacggaagcactaaaggcaatggagaaagtagcgagccacatcaatgagatgcagaagatctatgaggattatgggaccgtgtttgaccagctagtagctgagcagagcggaacagagaaggaggtaacagaactttcgatgggagagcttctgatgcactctacggtttcctggttgaatccatttctgtctctaggaaaagctagaaaggaccttgagctcacagtatttgtttttaagagagccgtcatactggtttataaagaaaactgcaaactgaaaaagaaattgccctcgaattcccggcctgcacacaactctactgacttggacccatttaaattccgctggttgatccccatctccgcgcttcaagtcagactggggaatccagcagggacagaaaataattccatatgggaactgatccatacgaagtcagaaatagaaggacggccagaaaccatctttcagttgtgttgcagtgacagtgaaagcaaaaccaacattgttaaggtgattcgttctattctgagggagaacttcaggcgtcacataaagtgtgaattaccactggagaaaacgtgtaaggatcgcctggtacctcttaagaaccgagttcctgtttcggccaaattagcttcatccaggtctttaaaagtcctgaagaattcctccagcaacgagtggaccggtgagactggcaagggaaccttgctggactctgacgagggcagcttgagcagcggcacccagagcagcggctgccccacggctgagggcaggcaggactccaagagcacttctcccgggaaatacccacaccccggcttggcagattttgctgacaatctcatcaaagagagtgacatcctgagcgatgaagatgatgaccaccgtcagactgtgaagcagggcagccctactaaagacatcgaaattcagttccagagactgaggatttccgaggacccagacgttcaccccgaggctgagcagcagcctggcccggagtcgggtgagggtcagaaaggaggagagcagcccaaactggtccgggggcacttctgccccattaaacgaaaagccaacagcaccaagagggacagaggaactttgctcaaggcgcagatccgtcaccagtcccttgacagtcagtctgaaaatgccaccatcgacctaaattctgttctagagcgagaattcagtgtccagagtttaacatctgttgtcagtgaggagtgtttttatgaaacagagagccacggaaaatcatagtatgattcaatccagatatgggttaaattcctcattttacttttaaactggtggtaaagtggaaattgcaaaaaaaaaa

SEQ ID NO: 65954 - DNA, 688 bp, Homo sapiens
ttttcggcagaagggcccagccttgagccttgtgcccttaacgcgggccggcccgcccaggtgagcagctatatggccacggtgtcggggctcctcaagatcgtccaggccttcgtggcctgcatcatcttcggggcgctggtccatgacagccgctacgggcgctacgtggccacccagtggtgcgtggccgtctacagcctgtgcttcctggccacagtggccgtggtggccctgagtgtgatgggccacacagggggcctgggctgcccctttgaccggctggtggtggtgtacaccttcctggctgtgctcctgtacctcagcgccgccgtgatctggccagtcttctgtttcgatcccaagtacggtgagcccaaacggccccccaactgtgctcggggcagctgtccctgggacagccagctggtggtggccatcttcacctacgtcaacctgctcctgtacgtcgttgacctcgcctactcccagaggattcgcttcgtgcccagcctgtagcccacagtggcagcccacccacctctgctctctggccaccagctccaggttctgcgagggaaactcaggtgaaccaaagtgtcaagtagcgagcaggagggaagccgcgggctcaggggagatgaagtacaacgggagaggtcgctccccgacttccagactgggctcc

SEQ ID NO: 65955 - DNA, 1257 bp, Homo sapiens
ttttttttttttcaattctactccaaaaatcagcatgtttaatggggcccctgtgcactgccctctgccccctctgaggttcgcacaccgtgggcacggactcgatacaagcacgtgaaacgggggtggccccagttgcttagaatctggatcttcaccttgggaaaggcagctggggggtcattctgcaggtggaaagtctgaatctccgatttctcaacatcgaaggtgaatttccccaaggaaacttcagtttcatcataaacctggaggccctggtgggtgaagaatgaaaggaggaaaaagaccgcgaaatcgcggggggcgctgttggctcctccggtgtgctccacgctgggcggtggatgctgcagagtgatgtcgctcagctgcactcggcccggcagttggatcaccacctggccttggtcgccttcaaaagcccagcaattcccagggaacacgtggggctccaggataaccgtgggcggccgtgcgtagttccagaagctgaagcgattccagaagtaggcagtgttcctgtctgcgtaatcgtgggatgtcttctgcaggtcgatggaggctcccacagagctcaaagcatagtcgggcttccgcacaaaatcctcattcagcctctggaacacgagcttggccactctctcgctgttggctgcccgaacagtggacacctccttgtggagtttatccagctcggcctggagctgctgcagctgctgcccctgggagcgcacgcgctcgtggtactcactggaggtgggaggtgggcgccgtggggttggctccctgtccccctggacacctcccaaaggcccccacgccttcaaggttctcaaagaagcaactttgagccccccaatttcccaccctaggtgccctctttcaccttagagtcagcatctccttaggttcctgttggatgaagggacaaaacacagagccgctcagctcccgtcgtccttgctcctacctcagcctggaaacggccagggcttcctttttgaagactgtgtcccctttcctcgactcctccttgacctcccagtatcagagcccccaagagaccctcaagcacaatccctcataagtctgattatatccagccctttcttaaggattgtagcctctggcactacccccaccccagcagaccgacagtccaggggacccccacaatctacgggttcacaacctgccaaccccctaccccaagacagtctccccaacttacattcg

SEQ ID NO: 65956 - DNA, 881 bp, Homo sapiens
  misc_feature (1)...(881): n = a,t,c or g
ttttttttttttgggcttcaaatcaagtttaataaataaaacagcaaaggggggttcaaggcagttatcacttcacagtgtggtccttggtggggtgagggatggtcgagtccaactcggaaaggggctcgagcacaagaggccggacgacacccggggcagggcgcgccgccgcccacggaggaccccactccaacgtgtaaacagaaacagaaacgaacgagagggccagggaggagggggaccaggactccaagccatcttgctaggaagcttcccacagaaggaagacctgcagggctggggaaacaggctggagtctggcccctgcgtggccagcagggccggctcctccggaggctccctgccttggtaccgggggaggacagcaaaggggatgtaaatcacctgtctcctcaaacccacgcctggggttgctgagggaccccaccccaaccgctcaggatcggggagcagggatggagggggaagaggcaggtgggggtgtaaagtgcggcttttcctgaagtggagacgatggggtgggaaggcgaggctggggtgggggccggacagcgaggtatatggctctgtgccccacggggttggcactgagtagcagctgcccacgacccccagggctggggcagcccgcggccctgccgggtgtggagagacagagccaagcagggagctgagggcgccccggcggaggctgctggtgcggggcagggcgtcctgcccgtctccccgccggggcagtgacgccttccctcgcctctgctggctggaagggactaggtggccggctctgcccggaattccccgcnctgcctagggtctcagtcnanggnctcagtgggcgctannncngcgcctcc

SEQ ID NO: 65957 - DNA, 782 bp, Homo sapiens
caagaatccatactgaaaactgtggggaaacttactgcaactcaagtagcgaaaattagcttttttttttgctttggggggtttttggcaaatttgtcatatcaagaagcactttcaaacccacaagtggctatagttaatattttatcttcaacttccggactttttaccttaatccttgctgcagtatttccaagtaacaggggagatagatttaccctttctaaactattagctgtaattttaagcattggaggcgttgtactggtaaacctggcagggtctgaaaaacctgctggaagagacacagtaggttccatttggtctcttgctggagccatgctctatgctgtctatattgttatgattaagagaaaagtagatagagaagacaagttggatattccaatgttctttggttttgtaggtttgtttaatctgctgctcttatggccaggtttctttttacttcattatactggatttgaggacttcgagtttcccaataaagtagtattaatgtgcattatcattaatggccttattggaacagtactctcagagttcctgtggttgtggggctgctttcttacctcatcattgataggcacacttgcactaagccttacaatacctctgtccataatagctgacatgtgtatgcaaaaggtaaggaaactatttattattcatagatattttaggtgtgttattaaaacaaacctaatgaaagttgagatgtgattaaattataaggatacaaacataaataatacttgatg

SEQ ID NO: 65958 - DNA, 1366 bp, Homo sapiens
  misc_feature (1)...(1366): n = a,t,c or g
ttttttttttttctttggattgaatgcttttattgttttaacacagataacgctatggccatgtaatctgtaatctctgatttccaaaatgtgaaccaagaagtataactcaacttagtcttataaaaattacgatattttccctcatggaaaaaaaaatcagaaaatactacatggtttttttgttttttaagttttttcctatactactggtttaaatcactgtaacagaacaggaatatgtaaggcacattctggaaccttacatctaagattaaactacttatatttaccttaataaatttaaaggcaaaatacagctctttatccaaacagacttctttcagaacaatctttcccaaaatatttaatacaggtgattttctgtttctagaaaagactagagtttccaatccttcccacctgaacaaaaacaccactctctgactatcacccaaagagaaaagaagaaagaaaaggcctttaggatgcagtgggcacagactgtaacacccagacacagaggaaagtcagtctgcggagggagcctggaatccagcctccacagcttcctgaggggtgtgctggaggccacctgtggacatgttcaggtgccgagcacaaccagtttgtggagctggtagagaaaggtgttcttccctctgctgctctcacggtcggcctgctccatgaccagctttggatcaacctgattccactcgtagggcttttcatgccacttgggaacaatcttctcccttggttttgactgacagaacaaacctaaaagcttctgacgggcaatgtcttgaagctgcgcaactctctctggcccaagacacttgcatccatttggtccatcacagactagcttgttaatagcagccctgagaatattaacctcgacgacatcctccacgctgaattgaacgtcaaacgcaagctccatgtcgtgctcgggcagtatggaagcccctgtagctggattccaccccaaaccacaaaggactccagtatagtacttgccattctgatcaatccttaactctatcaccggtgcgaataacatgctgaggagagccgggaggccagggatatgaggcatcagagaggtttctctcagcagcatcgtagatcctgttcaagtcatgctaaatcaacatcgggcattaactcacgctgctcagggcagcgttccctcccggcccgctcctactcatctgcaggtatcccctcctctgctgagtctgtccagtccccacaggcccaccccaatagtaacgcacactccctgttctctgtttccacagtaccgaattccaccacatggactaggagtcgtcaatnnnnncaatggtctcaaccc

SEQ ID NO: 65959 - DNA, 1438 bp, Homo sapiens
ttttttttttttagtatttataatcatttacttgtagcgaactgtttaaagttaacacttgtttaaatttttttacactatagcatttatgcaatggtttacagaattcatggagttatttttatcagtatgggaattaattaaaaccttgaatctttgttttgtctgcttctctgagcacaagcctggtcagctggtccctgcgggtcctaccagccagcttctctgtagggctctcggccgcgtccacctctgctctcccaccacaaggtcacaaactcccacgcagtcctgggtcaccccgcagctgctctggagacttggctctgggcgtctcgtggcccaagtgctccaagttggaagtttctgtgggcctcgtgtaggggatgccgtgctgggtgagcaaacctttcagccttttgatctcctttgagagttctttatgagccttcctgcagttttccagggtctcaaaccccaagctgtcaggacctccctccagctgggtgggttcattttcttctggggtctttaagtagccagcatcctcaaaaagtgtcctcagcaacttctcatggccctggggggtgatcagctcatcggccaggtcctgctctacctggtcccactgccgctgcagggcctctggcagggttgggtacactagcaaggcgtgggggtggcagacgaggggggtctcgaacgtcagcgcgtagacgcaggtgctcggctcggacacatgggccagccggttgctttttccacacgccagctccaccttgctctgccggctccgggaacggcaggcgtcaccgtccctcatccacatgcccgtgaaggtgttgttggcgatctcccactcgtgccagatgccgaggatcccactgtaggcgttccagcggaaggtctgctcgtgctgggtcacgttgtggaacgggcagaactcatacttgtacctggggacacagatggcatgaggggggtccgcaggctgcgccccagcccaccctcgcacccaccctgcactcacgtggactccaccaggctgaagcacttgcccgagagtcggaagagatgcacgggtcctggaagagacctcacactgatccccagggtccaagcacagaacctgtctgcaaagacgtattaataataaagtcgaggccgggcgcggtggctcatggctgtcatcccagcactgtgggaggccgaggcgggcagatcacgaggtcaggagatcgagaccgtcctggctaacacggtgaaaccccgtctcagacacgggtgaaggatccctcttggcctggaggcgactggcctgaggcaagaacgggttgttcaccccaaacgcgttgggctcctcccccaccttcattttcgctgcacctgccggcgcgggcccgccgaccgagagcccgaggagcaacaggagccgcgc

SEQ ID NO: 65960 - DNA, 1415 bp, Homo sapiens
  misc_feature (1)...(1415): n = a,t,c or g
agcttttaactggtcctcaatccttactgaacataagagaattcatactggagagaacccctacaactgtgaagaatgtgcaaagcctttaatcggtgctcacaccttactagacataagaaaattcatactgccgtcanacgctataaatgtgaagaatgtggcaaagcttttaaacggtgctcacatcttaatgaacataagagagttcaaagaggagagaaatcctgcaagtataaaaaatgtggggaagcttttaatcactgctcaaaccttactacgtaagaatttttactaaagagaaatcctacaaatgtaaagaatgtggcaaattccataaatcttgctcaaggcattgaaatcacaagataattcatactggagagaaacactacaaatgtgaagaatgtggggaaagtcttcaaccattgctgacagcttattgcacagaagaaaattcatgctgagaaaaattctgattttaaagaatgtggcaaagcatttaataactactatgaacttactcatcagaggttttgtgctagataaaagcaatgtaagtgtaatgatacacattacatttatctgtggaaagatgtcaccaaataaaagccttagagtacacaaggtgtaatgatagtgatacattacatttgtacatggaaagacttcaaaaatataagccttagagtacacaagagtttttatactgaagaaaaacattacaaatataaagattgttgcaatacttttacttatgttacagattttgttgtacataggagaatttatactgaaaggtaaccctctaacagttgctcaaattttattccattttagataatttacattggaaagaaaccctacaactgtaatgaatatgaaaaaaattgtttaaaaagtacaccttagaaaacactagtttaaggccgggcgcggtggctcacacttataatcccagcactttgggaggccgaggcaggcggatcacgaggtcaggagatcgagaccacgatgaaaccctgtctctactaaaaatacaaaaaattagctgggcatgttgtcgggtgcctgtagtcccagctactgggagaggctgaggcaggagaatggcgtgaacccgagaggcggagcttgcagtgagccgagatcgcgccactgaactccaacctgggcgacagagactctgtctcaaaaaaaaaagaaagaacgctagtttatatgaaagcatttaacagatgcagtaaatataaaaaattaataaaaaattaagtctaaatgaacatcagaagattcacagtagaaaccactaagacgctaacactttcaatgttattctaaatcagggcattgattataaagagtaattcaaggttaacataatttagttagcctaaacagaaataggagattat

SEQ ID NO: 65961 - DNA, 2964 bp, Homo sapiens
gaaactcctaggcagcagaggcccacgactacttcctcctgagtgccgttcagtggcctgtgtccaggctctgaagggctccaagaagctggtgctgtctgtgtactcagcagggcgcatccctgggggctacgtcaccaaccacatctacacctgggtggacccgcagggccgcagcatctccccaccctcgggcctgccccagccccacggtggtgccctgaggcagcaggagggtgaccggaggagcaccctgcacctcctgcaaggaggggatgagaaaaaggtgaacctggtgctgggggacggccggtccctgggcctcacgatccgtgggggagctgagtacggccttggcatttacatcactggcgtggacccaggctctgaagcagaaggcagcgggctcaaggttggggaccagattctagaagtgaatgggcggagctttctcaacatcctacacgacgaggctgtcaggctgcttaagtcatctcggcacctcatcctgacagtgaaggacgtcgggaggctgccccatgcccgcaccactgtggacgagaccaagtggatcgccagttcccggatcagggagaccatggcgaactcggcagggtttcttggcgatctcacaacagaaggaataaacaagccaggattttacaagggcccagccggctcccaggtgaccctgagcagcctggggaaccagacacgagtgctgctggaggagcaggctcggcacctgctgaacgagcaggaacacgccaccatggcctactacctggatgagtaccgtggcggcagcgtctctgtggaggccctcgtcatggccctgttcaagctgctcaacacccacgccaagttctcactcctctctgaggtgagaggcaccatttccccgcaagacctagaacgcttcgaccacctggtgctgaggcgtgagattgagtccatgaaaggcgcggcagcccccaggccccggggctggggaacacctagttccatggtgttcctacagttgacacgggtttcattccacaggcagccacggcacctccaccaccgtcagctcggccaggaacactctggacctggaggaaactggcgaggctgtccagggcaatatcaacgccctcccagatgtgtccgtggatgatgtcagatccacctcccaggggctgtcaagcttcaagccactgcctcgcccaccacctctggcccaaggcaacgacctcccactaggccagccaaggaagctggggagagaggacctccagccaccttcctccatgccttcctgctcgggcactgtcttctcggctccacagaaccgcagcccgccagcgggcaccgcacccaccccagggacctcctctgcacaggacttgccctcttcccccatctatgcctccgtctcccctgccaaccccagctccaagaggccgctggacgcccatctggccctggtcaaccaacaccccatcggccccttcccacgggtccagtcacccccgcacctgaaaagcccctctgcaaaggccacagtggctgggggctgccttctgcccccatcaccctctggccacccagaccagacaggcacaaaccagcactttgtcatgggggaggtccaccgccccgacagcgagccagacgtcaatgaagtgagggcgctgccccagacgcgcacagcctctacgctctcccagctctcggacagcgggcagactctaagcgaggacagtggtgtggatgctggcgaggcagaggccagcgccccaggccgaggaaggcagtcggcgtccaccaagagcaggagtagcaaggagctgcctcggaaagagaggcccacagatggggccaacaaaccgcctggacttctggagcccacgtccactctggtccgtgtgaagaaaagtgcggccaccctgggcatcgccatcgagggtggcgccaacacccgccagcccctgcctaggattgtcactattcagagaggcggctcagctcacaactgtgggcagctcaaggtgggccacgtgattctggaagtgaatgggctgacgcttcggggcaaggagcaccgggaggccgcccgcattatcgccgaggccttcaagactaaggaccgtgactacattgactttctggtcactgagttcaatgtgatgctctagaggccaaggcctgagggcctcccaccactgcccagcccctggtcccagtccctttccaccgttggcttcatcaagctccttgcggggttggggctgcatggccagggtggcaggaagacatcccccctccatcccagcccactggaccagaactgggagaggaagagagcaggacaaggcagacagaaggtcaggtcaggaactggtgctgtactgggtacacagtaggcgcccaggacaagtgggttgcaagacaggaagaaaggaaaaggaagggcagagtgctggtttctccaggttgggttgggggcactgctgtcccccctccagctaggacccagcccatccccagatgcctgagcctttgtccaaagtgaggtcactcgagaattcatggacacggcccccagtcagggggcatcttgcaagacctttagtgccacaaataagcatcgagcacctccccattcacacccccattcctcctggctccttatcccccatggtgtttattatttatttccctccccatgcccctggggaccccaaggccccagcttccctctgcacccccagcctatcccagaggccttgcaggtgaccagcagtgtcattgtatttatatacagagcttatgactttaatttttcaataaagaaatctgaacaaggttagaaaaaaaaaaaaaagggggggccgttttaaagaaccaaatttaacgtccgggggctggcaagggaaaagtttttttatagggcccccaaaattaattccccgggcgggc

SEQ ID NO: 65962 - DNA, 2465 bp, Homo sapiens
  misc_feature (1)...(2465): n = a,t,c or g
tcctctgtcccttggctatattgagatcctgacgatgcctaccaagctgcctcttatgtaggatccagaaccagtgggatgaaagagcagcaggtaggctccaaagagctgatagcactgggggcttcatgacccataggacatgagctgggaccccatcatctcccttcagactagggcactttcagggtctctcatatataaacacacatacacacacatacacaccgcaaatgatggggaggggaggtggccccagcatgtggtggatcacagtcactaagtctacttacttattatttatttttaaaatatatttaaacagcagcagtcacttccaaaatgcaaaaaaaattacaatttttagaataaaattataatgtttataatgcgggtcagaagaattgaaggtacaacagaatcaaatcacgcagcactggaggcggctggagaagccaaagcccactggtcaggggtccaagctgacaagaagtcccaacctgagaggtctccacacccaaatcatacccctcagcttcccactgacagagccagtgtcctctgggttagagaaggagaagcggcaaggagctggccctctgtgtgggtgtcccaaacccagtcccccccatcagccagggacctgctaatccacctcctccatgttgctgtaggtgggggctggccgatccacagggggggcgaagcgttcaggggctgtccgcgtgggggccacctcgggggcctggccagggcctagtccctggctggcagcagcctcagctgcagggcctaggtctgggtggtgctcagagtgacctgccctggggggcctctccacaggagagttccgccggcggtagaagagtacataggcataacgcgtcacaacctggctctcgtctaccgttgtcactgtgctgtcatcaaacaagcgccagcccacgtcactgcgctgactgctacgatcattgggcaggcgtgcacaggcagtgtagtggccaccaatcatgcctccatagtggttgatgacagcatatagatcgtagctgggcagctgctcctctttctgaccaatgcagaacttgctcaggtccaggttcctaacagggaactccaccaagtcattgatcttgtcacgccagataaaactacgaaaggagaagcgcttgagctgcacgatgagaacatttggcaggcgccatagcaacagctgcttggaggcctcacggtgctgtttgcactgtgggcagtaccaggcctcctcgggtgccagcacctcaggccgtgtgaagaggttgaggcactggtccagggtgaagtggccggcccgggcagcctcaccggcagagcctggatcctcagcacattccagctccttggaggctaccaacacaaactcctgcaagcgctcattgttccgccagacgagagccaggctacagtcgtcacccagctccagtggggtgtctcctttgtcctctagccgctgctctcggttggatgaatcaattttatagatgaagaactggggtgtgtgggcattcatagcttcacttggatgctggtacccaggcacagcagcttcgggtcgggacaccctctcgccagctggcaaggagccaacctcaatgggcccactggccagcatctcagaagaaattccactggtgctgggcacaggaccccggtcaggggctgcccacacccggggaagccctgtgtccccctcagccataggggtcaccagctggagctcaggtggctgaatggggtctctctcgctgtccccagcctccagggaacctgtggagagcagtgtggtgcagccagggctctgagactccaaggccatgcggcctggctgaaagggtggctggaatacactcacagagtaccgggcatagccctctagcaactgagcgaggcgggcataagtgaggcgtgaggcaggtacactgaccaggaaggggtagccaatgttctcaggtcggcagaggcccttgtggtcaggccagtgggttttctggcagagctggttgcagtagcccacacggtagcaccgggtacagcgcttcagcttttcatcctccgactgttgcttccgctggcaggctgcacacttggagatggggacgctgggcacctgggggcgctgttgcacctctagcaccactacccgctccttagccaactctgaggatagcagctcaaagcagaggagcgtatcagatggggacacagtgtccagtgagtgggagggtaggaacacacgatgaaaacgattcttaattacctccgccaaacgcaggttctcagcgcttcacatgcacactctgagagagggagtccaatacttcgctcgcagtggagttctccttgctgacgctcacaggaacttgtgggcttaatntcggtctntgcgggcncnntaanntggtntcaggttnncacgnnnggaaccc

SEQ ID NO: 65963 - DNA, 1010 bp, Homo sapiens
  misc_feature (1)...(1010): n = a,t,c or g
ttttttttttttgcagaggaactgactcatttatttgtggatccaatgctctcttcccactgtaccggtcctaatttactgcagccgagctcctcacatgctggactatcactccatataagggttgcggtcagtgggcaggggtctgggtccaaggccgcagcaggaggaactggacagcggaggaagtagctagggcatgtgcttggcccactgcctccagcaccccaaatccctgcctgaggctggggagagaccttctgccggcggctcctcaggccttcccggacccggcctaaggaggccaagcggtttctcttggcggagggctcggtagtcctcccggatcttctccaggttgctgagggtcttcttgcccagctctgtctcgatctgctcctcgaggtctcgaacctcccgcatgatggtgcctgtgtcctcgatggtctggatgagctggctgcagttctcgtgcagagcagctagatacttataggccttccgaacagcatcgtccttcttggcatccttgaacacaagctcatcagtcaccgcaaacgtccggtccagcttcccagatagggagttgatttccttctgaagctccttcgtatcagacaagatcttggtgatctcttccttctgcttccggatgttgcccacgatctccaggatgcgctgggtgtaggccagccgggacacatctctgggcagagtctccagctctgacatctaggcagggatatagcaggcactgccccaggaccatccccccaccctcttaagctacccaggtccctcacacaggccttaccagctgcttatagacctcctccttcctgcgggcctcttcagcagccgcccggacactctggtgcagttcttggatctctgccagccgtcgagaagattccagctctctgcaatcctgcagctttcgggaattccaccacacggagtagtgatcgaaannnnnnnnnnanggtgttcgagcnnnnnnnttctcatct

SEQ ID NO: 65964 - DNA, 1835 bp, Homo sapiens
  misc_feature (1)...(1835): n = a,t,c or g
ttttttttttttaatcaaaaagttttttaaatttatgtaatgtctcattaatatataagctttttccttgtttcatacaaaacaggactccacacacttaggatggaaatccacacacttaggatttccaaccattttacatgatgcttgatgaaaatatctttttatatcactttatccatacaatactttagtcttttaagagaatactgaaaatagtccgactttcaaattttaagtgcaataattagtatggttaattgatatttaggaagggcatgtaatgttcttagaaaaagaactttatttggaatgtaagattttattcgggataatcggttcttatgccttaaattcccttagttcaaataaactaatgttaaagaattatggctgttttttaccaaaattctctacaattgtatgattactctccaacataacttcaagatggttgaggaaaataaaacaggtagtctctgaagtttttccacaggaacagcacgctaagtgcttctttctggagttattttgtgacactgaatcgccaaagaaaagcttcctatagagttaacagagacttctcttgggctgaaggctgcttgtgggttccacatgcagtctctgtgagaatgggattcttgtgtcagccatgggtcacaacttttctgtgcacttttctggtgctggattaggtggccatgctggttgaaggcacgcccacactccccgcactcatagggcttctcgcctgtgtggatccgctggtgctggatgagcactgagtactggctgaaggccttcccgcagctattgcactcatatggcttctcgcccgtgtgggtcctcaggtgcacaatcagagttgctttcaggctgaaggctttgccacattctgtgcactggaagggcttttcacctgtgtggattctctcatgctggatcagagaccggcgtgcactgaaggcgtgcccacattcaccacacacatagggcttctccccagtgtggactctctggtgctggatcaggtgtgagtgctgaacgaaggccttcccacattcgtagcatgcatagggcttttcctcggtgtggatccgctcgtgattcatcagtgtggagcggtggctgaaggtcttcccacactcactgcactcatagggcttctccccggtgtgcacgttgtggtgctgaatgaggactgagcggtcgctgaaggccttcccacactcgctgcacgtgtagggcttctccccggtgtggatcctctggtgctgcagcagtgtcctcttcacactgaaggttttcccacactcattgcacctgtgaggcttctccccagtgtgtaccctctggtggctccgcagaacagtgctatggttgaaggctttcccacacaacggacacacatatggcctttctcccgtgtggatccgctggtgctgaatgagatgtgagagttgagtgaaggctttccgacactcaagacattcgtgaggcttctctcctgtatgtatcttgtgatgctgagcaagatctgagctcactctaaaggcttttccacactcattacactcatagggcttctcacctgtgtgaattctcctgtgtttactaaggactgagctctggctgaaggccttcccacatacactgcacacatagggcttctctccagtgtggttacgctgatgctgaaggaggtgggaactccggccaaagcacttcccacactcaacacacatgtagggcctctctccacgtaggnactgcctggtgcggagtgagtggcatgctttggcttaagacctgaacttcacggtggtcaacagagt

SEQ ID NO: 65965 - DNA, 1031 bp, Homo sapiens
  misc_feature (1)...(1031): n = a,t,c or g
ttttttttttttgaaaccgagacaacctttaatcaggaaacctcagagagacgcatgacacctggcggtacagtcccagtgagtggaatcccagccggacgcaactcttcctccaggagaacttggcagtcccaacccttctcaaaagatgagccagccacgcggtccagggaggatgctgacagtggaaacgacttcctccattcttacagcacattccaaacacttcttgggaacaaggttacatccagccttgggggtcttccatcctcaccagggcccctgcaggagggagcccaggcatccccaccaggttcatccttggagctgccctgcacacaccctgggccactggcagaggtcctctctccagagtctcccggacacagtgacctccttacatggtggactcttccccccgagaagcccccactgggggctgctgggggccagggtgggtggtggctgcaagggctgtggagagtctagaggtggtgggagaaagcacgcgaggcccgaggagggtgatgggggtcttcgaggggctggggtccatcatggaaagtgctgaagcttccgtcaggagggtgccaggcagaggaggccacctggacactatctgggccccagaggctgagaacgagcgctctggagtcacaggaggtggctgaggagcccctggggaagctagaggtagagtgggggctcctggaggggtcgaaggccctggtgagagtcgaggggaggccccaggctcccctgggaaagtggctgtcagccccaaagcgagtgagtgtggaccatgagctcctgccgggcttgtaggtaaagtctgtgttttcatcaagttcgttcttaaaaggagctggaggagatgaagccccggcctcgagggtgatgccgtcgggggcccaggacaggagctacagttgacaggggcctcagtgtctccatgcaggctccgaccagctttgccgaatgccacatttccgaattccnccgcntggactaaggtcatcgaaagtcgaagg

SEQ ID NO: 65966 - DNA, 764 bp, Homo sapiens
ttttttttttttatgattaatttgttttctttattgcaaaaaaaaagaattaaagaaaaaaacatttgttcaaaagctacctcaaaagtcctcctaccaaacatgatttggcaatctttttgcatgattagtatgatggcagtaggagctttgtttaataagcaaacatgatgaaaattccaaaaggtgctatgcaaaagatcagaaggaagatgtttttcctgagaccctctgccaactgttacttcttctgatgcctttcctgcttcttgaacaaggcttaagacagcttctctgttccatttctgaccactatgtggcacccagaactttgaagtaggaaatagaaaaaaatctgcttaactagtgatttgctgtgaatctttaatcaatgcctcttaaaaataattcatttatggccgggcgcagtggctcatgcctgcaatcccagcaccctgggaggccgaggcgggcggatcacgaggtcaggagatcaagaccatcctggccaacatggtgaaaccccgtctccaccaaaaatacaaaaaattagctgggcatggtggtaggtgcctgtagtcccagctacttgggagtctgaggcaggagaatggcgcgaacccaggaggcggagcctgcagtgagttgagatggggccactgcacttcagcctgggcaacagaccgagactccatctcaaaaaaataaataaataaataaaaataattcatttatttttttcagtgatttggaatatggtggct

SEQ ID NO: 65967 - DNA, 1674 bp, Homo sapiens
agtactagcttcagaaggaaaagctttattttctcagagaaaagggtggtagattaaggaaatgacccagcatgttggtattttgttgttgttgttgtttaggtgtacatttaaatgcttatcaaaaaggaaacattgtcatgtcaaagaccactgcaggggaagcccagaggtggctgtaagcaagcagatcacaagtcctttaagaagttctttcaaatagcagtagagctcagaggggggctgttgtttcaaacaagattcaattagcatcaagttattaaagggcagccggggaaacaagaataatattgacagacctgctttttaagcagtatcttttccctctaatcagctgagtttgttggagctgatcattttatttcttcaactccattcaactataggtgcaaagaatgagaacttcagtgtaactccaattttctaagagaactaatcatattgctgctttataaaaaaggtaatctttcacagttgcttagatttatgaataattagatttaaagcattatactggaatctagaaatctagctaaaagagctgaggttcttatctgaattatttgggccgttagccttctgttgaactatagaaagaacttaaagatatagttgtaaaataaggacgtactccccaaaactgtcccaagtatccacttgattctgtatctttatattgcatctttttctcatatttctgcaagtttacataaactctggtcaactatgaatgcctcccgggatgagaaatgggagtttgggtgaaatagattagagaataggttttggggtttttttaaaccacatactctcttgtcaactttcaagttttgtgcttgtacctcttccaaagtattcatttgaaaatatttcatttttgaaatcagaaaggcactgtctgtgctctctctccgccagatactcagtctgggttacaggaagtagaaatttgtgactactagcctttcccagcctcctttgtaactcttgactttggaaatgggaattcagccactgagaactttttgatgtgcagctgcctttctcagggaacactaaccaagaaacaaagtcttcaggtcacctttcctcttccttttgtgaggacaggagacaaaagaacaagatctccctgaagtgtctccttggctttacaacattccacagtaggcacctaacacttgagttaaatgtgcagactacacacctaccataaaattagggcactcaaggtaaggaaagtatttccatagttacttggatatttggcagagtagttttctctcttaaactactaattgcccataacttgctgggtgtgtacacaacctgtaggaagtattatttttaaaagttaccggctgggagtggtggctctcgtttgtaattctagcactttgtgaggccgaggtgggcggtacacctgaggtcaggagttcgagtccaacctggccaacatggtgaaccccgtctctactaaaaaaaatacaaaaaattagctgggcatggtgctcatgcctgtaatcccagctactggggatggtgaggcaggagaatcacttgaacctgggaggcagaggttgtggtgagccagaatttggccactgcactccagcctgggcaacagagcaagactccgtgtcaaaaaaaaaa

SEQ ID NO: 65968 - DNA, 1640 bp, Homo sapiens
tgcaaataatatatctaacatacatcctttcaaaatgtaacatccttaactagttaacatagtctagagtctaggggcaaagacaagcaaatattgatgatttagaaatgcagtagcacgttaggctacaacatggttaattccaagtcacttcatattttgcaagttctttgctcctatgattgaatacttcaaacatgtatcttatctttcctcctgagtatccaaaagtgctttggagagcaaaagtgctttgtctccccctttcccaaaaacaaggaggggggatagggctgtagcaagaagggccagctgctctagagaaaatgtggcagtaccagggtaaatgttagcatccttaagcgggtatcttcagccagcaaccctggtgtatgggggctagtgacggtaggatttcatgggtaacctaagaacaactcttttcagggcatgttttttaataatcttaaaaggattcctcaggttggctttccctaactggaaaatggagataaaaaaaaaaaaattccatccccaagctgtcctttcaatgctcccccagctggtctgggcacactccttcctcttgcaccccttagagcgggccagcagctccctctgggagaaatgaggccccttagctgtgcatacccagagggaacgaaacattctcttctgtagcaggtgccccgatttaggaagacaattctccaaagccttgtgagctaggcaagagtccagagagaacacatttttttcctctgaatcaagtctttctctcatttacacagtctcatcttaagaactttaagtgtgaaaggaaatatgctaaattattctgagctgtccacttagagtgtggtgtggattttcccactgtttttaaacacacagaaagacacactccaaaaggcctttccttcttgttcactggtgtggtttattcttgaagcaaggtctctctccagttgaagcccccagttggtccatgggtaagaggaaggattggtggatctgtcagctgccatattccagtttctcctaattcttcacaggaacaaaatcccagatatgggatctttcggaccatttgtacgaagtccttggagttctgaggtgacaggccctgaagttggcaggtacacgcttcaagggaagatgcgtgggccaccaatccaggatgttatttcctttacttttacattcacttattatttcttttgttacttggaaacttctactgatataagtatcataggattctgaaacaactaatttgctgattggaatgtgaggtctgtaggttgtatcaacactcaggttggctgcagctaactctgatggaggtatccatgcaggtaatgtgctcccagcaacccattttgtccactcaaataagccgggctctacacggatcttcaagtgattttcttgttgtaaacctttcaagatattgtgtgcagtctgaacgcagcgaagggacggggagcaatagacatgatcgataatggtattgctctctaataaggcttcacccactagtcttgcttgcatgcatccaaacacagtgatgggagcatctttctcgtaatctcggaaaccaccactccgctgaggtaaactatgaggcatgttcaggg

SEQ ID NO: 65969 - DNA, 4093 bp, Homo sapiens
  misc_feature (1)...(4093): n = a,t,c or g
ttttttttttttgagaatggaagcaaaacttttattccttcttggctggagaaaggagaaactatgtgggtggttgtgtacccaggacccccattccttcaccccctcccaagaaccaaaagaagacaaagcagcggccacccaaatgggctcccctcttgcccaaagtgaaagccgagaggtgcagcggcttggctggggaggcaggtgagcgcaagcaccggcacagggcaggggcggcttgcagtgacagggcgggcggcccagggcggcccatggggccggggtttgaaggggaagaggcgccggggcttgcttgggtaagcggggcaaggcttgggggggctgccggcttggcacggggccccaggactcaggggcaccaacaacgcgggtaagggggctggcctgggaatgggcttcgtcccccccaatttgacccaccagttgtgtacttccccctttgtccttgaagcaggtaaggacactcctgtagagccaggctgcccgacgtgctttaaccaggatctcctcggcaggggggtcctttgggccatgaacccccaccagcaagcatgttggatgcctgctttggcggcagtcctatggtgaaagcggttctttctggccctacggtaggccgttgcttcagcccccaggcccctgggccaccacccttggctggcgtcagcaggccccaggacccccgngcccccatgccttgggggcacaggtgggccttgggtcagagagtctaccaacacttgatgatgtctcgtggggagcctgtgttgctgacgagaccgggggccctgtgactttggcccttgaaggggctgcccccaatgtggtaggggccgccgtacttgatggagatgaggtagctgccaggtgccatgggggtataggtgacgcggtagccctcagggcactcctggcaatccatcttcaccttggaggggccgtcaatggtcaccgacagggcaccagctcccgcattgctcgtgttcacgacgaactcagctgggttccctgtgacaccgccttccagacctgctccgtaagcagacaccaagcctgggtcccctccatgcccaggctccccaactcggatcttgaaggggcttccagggatgtgggtgccgttgaacttgacgtcaatcaggtaaacgccattctcccgagggatgaagcgcacagcatacttatcttggtcaatttctgtgacatagcactcctccagggctcctgaggggctgtgcaccttggcatcgatcgcccccttggccccgttcaggctgactgcaaaagaggctggctggttgacctttagccctgactcctggaagcacagcagacatggttagatgggggtgcttgagccagggcaagggaggacggaaaggccccaggagcaagaggcccgcgggtcgcacttacccatctggcgtccaacttggtttaaagagggagagccactgatttgcaaggggcagcaagccacaggcgcacatccccgcccctgcccccacactctgccgtcgcacacacccaggtggcaggaagggagggctgccccaccctgtgggcagcacccagccttggcaggctgtccctctttaaaccgcagccctggtgctcaaggggcacaggcttctgttcaaagcctccagacctgagacacgagaaaaactccacgtggtgggcaggatatttcctgccgaccccaagcgtgggctgcacccggccagagcagaggcctggaacccagagctgggccaggggggtcactgaacacagggccaaggcctggtctctgcggtggctctggtctgtccgggcccaggagccccaggtgggcggtttctctcggtgcctcacccgaaggctagaaacagtgaggcggcgggcgtcgccagacggagaagccacaggcaccacgaaggggctgtcgggaatgtgttcctcgttgaacttgactgagacttcgtagtcacctggctcctggaccacataagccacaccacaggagccgtccttgcggtcctcaaaagagatctcagccttgctggggccctcgacagcaatggccaggcctccagcaccagcttcccgggtccagatactgaattcggctggcactccagcttcagctctctccaggccagggcccccagctcggaccttgtgggctcccccttcccctaggggccccacggtgaactggaaggggctccccaggcacgtgcttggcccttgtacttcacgcttgactgtgtgtgtgcccatctcagcgggaacaaagcggatgcagtaggtgtggttctccccttcccacgatctcggccctcatgggtccttcccgatgggctggtcacctgggctgtcaatatccctggatgctaatttcagggattttcaggctgaggtcacaatgactaccaacgttggccactgaaaggagcccgacgcctgcgggtgatgctctctttcacacggccctcgcctgtcaccttcacagagaaggggctgccaggcacgtgctggtcggcaaacttgatgttgatgatgtagttgcctggctctgtggggcagtaggtgaccctgcacgtcccgtcctccaggtcctctgtgttgatgtccaccttgctggggccctcaatggacaggctgagcccaccatagcctgcatcgcgggtatcaatgataaactctgcaggctcaaaggtgtggccttcgtgaaggccctgaccagagacccgaacacgactggcatccccaatttccgactggctgatcaccaccgggatggggctgctggccacgtgctggccatttttcttcacatgcaccaggtgctcccccgtctccttgggcacgaatgaaatccccacgtggccattacgcagccgcttcagcaaacagggctcctcccggcccgagggcgggaccacagtggccgtcagcaggctgagatccgtctctgagatgttgatggggatgtcggcagcagagccgacctttaggtgggacatacgcatggagtcgtcacctgtgacccgagcagtgaaggggctgcctgggacgtgctgttcattgtacttgactagaatgctgtagtcccccggcagcacaggcaggtaggacacgctgcatgtcccatcctggttgtcagtgcagctgatttctgctttggacgggccctcaatggccagagacaggcccccctctcctgcatccttggtgttgacgggtgaaggtggcaggcttgttcactactccatgggtgaggccaggcccataggcagtgacatggccacagttgacgtaatccacatagaactgcaaggggcttcctgggatgtgcatgttgtcatagcggatgtccatctcgtgcaggccagcctcgctgggtgcataccgcacggtcacggtgccgtctttgttgtcagtgatggtgggctgcgccaccttgcctgagggcatccgaacctcccctgtgatctcgcccttcttgatggtgaaggggatgacaaggtcaaagggcctcaggctggtcacatccagcccattgacacccaccaggggcctctccggggcccaagtctgctggccgccctgggcgtaggtgtactgtggggccagctgctgagaccgtagagggggctgcaccgagggctggtccccagccagagccgtcacttggaaggggctgttgggcacgtgctcgccaccaaagcgcacacagatgacgtatttgcccggctggggggccgtgtagaagatgtcgaaagtgccgtcctcattctccaccacgtccacatccacctctgagccatcaggcgtgcacacggtgcacgtcactttgcctttgcctgccgccttagtgtccacagtgatcaccgtctcctccccaatctgaatggtggggccgatgccagcacctgtgacagtgcacttgaccttggacgcatctgtcacatcatgcacagggaccttgaaaggactgcctggcacttgatggccaccataggtgacgttgaggctgtaggtgccagcctcataagggatgtactcgaccgagcagctgccc

SEQ ID NO: 65970 - DNA, 3428 bp, Homo sapiens
  misc_feature (1)...(3428): n = a,t,c or g
ggaattcgtacttcatcacctaaaactgaaggcaagcacgaagaaactgttaataaagaatcggatatgaaggtgccaactgtaagtttgaaagtatctgaaagtgtaattgatgtgaaaacaactatggaaagtatatctaatacgtctacgcagtctctcacagcagaaacaaaggacatagctttggaacctaaggaacaaaaacatgaagacaggcagagcaatacaccttctcctcctgttagtaccttttcatcaggtacttctaccaccagtgatattgaagttttagatcatgaaagtgtaataagtgagagctcagcgagctcgagacaagagactacagattcaaaatcaagtcttcacttgatgcagacatcttttcagcttctctctgcatctgcttgtcctgaatataatcgtttagatgatttccaaaaactcactgagagttgctgttcatctgatgcttttgaaagaatagactcatttagtgtacagtcattagatagccggagtgtaagtgaaatcaattcagatgatgaattgtcaggcaagggatatgctttagtgcctattatagttaattcttcaactccaaagtctaaaacagttgaatctgctgaaggaaaatctgaagaagtaaatgaaacattagttatacccactgaggaagcagaaatggaagaaagtggacgaagtgcaactcctgttaactgtgaacagcctgatatcttggtttcttctacaccaataaatgaaggacagactgtgttagacaaggtggctgagcagtgtgaacctgctgaaagtcagccagaagcactttctgagaaggaagatgtttgcaagacagttgaatttctgaatgaaaagctggaaaaaagggaggctcagttattatctcttagtaaggaaaaagcacttctagaagaagcttttgataacctgaaagatgaaatgttcagagtgaaagaagaaagcagtagcatttcttccttgaaagatgagtttactcaaagaattgcagaagcagaaaagaaagttcaactagcctgcaaagagagagatgctgctaaaaaggaaatcaaaaacataaaagaagaacttgccactagattaaatagtagtgaaactgcagaccttttgaaagagaaagatgagcagatccgagggttaatggaagaaggagaaaaactttcaaaacagcagctgcacaattctaacatcatcaagaaattaagagctaaagacaaggagaatgaaaatatggttgcaaagctgaacaaaaaagttaaagagctagaagaggagttgcagcatttgaaacaggtccttgatggcaaagaagaggttgagaaacaacatagagaaaatattaaaaaactaaattccatggtagaacgccaagagaaagatcttggccgtcttcaggtagacatggatgaacttgaagaaaagaaccgaagtattcaggctgccctggatagtgcatacaaagaacttactgatcttcacaaagccaatgctgcaaaggatagtgaggcacaggaagctgctctgagccgtgaaatgaaagctaaagaagaactttctgcagcattagagaaggcccaagaagaagcccgtcagcagcaagaaacattagccattcaagtgggggaccttaggcttgcattgcagcgtacagaacaagcggctgccagaaaggaggattatttacgccatgagatcggtgaacttcagcagagactccaggaagcagagaatcgaaaccaggaactgagtcaaagtgtttcatcaacaacaagaccattgcttcgacaaatagaaaatttgcaagcaaccctgggatcccagacatcgtcgtgggagaaattagagaagaatctttctgataggcttggtgaatcccagaccttgctggcagcagcagttgagagagaacgtgcagctacagaagaactccttgctaacaaaattcagatgtcttccatggagtcacagaattctcttttaagacaggaaaacagtagatttcaagcccagctagaatcagagaaaaataggctgtgtaaactggaggatgagaacaataggtaccaggttgaattggaaaacctaaaagatgaatatgtaagaacacttgaagagacgaggaaagaaaagacattgttgaatagtcagttagaaatggaaagaatgaaagttgaacaagaaaggaagaaagccatttttactcaagaaacaataaaagaaaaggaacgcaagccattttctgtttctagcactcccaccatgtcacgctcaagttcaataagtggtgttgatatggcaggactacagacatcttttctgtctcaggatgagtctcatgatcactcatttggaccaatgcctatatcagcaaatggaagcaatctttatgatgctgtaaggatgggagcaggatcaagcataattgaaaacctacagtctcagctaaagctaagggaaggggaaatcactcatttacagctagaaattggcaatctagaaaaaactcgatcaataatggctgaagaactagttaaattaacaaatcaaaatgatgaacttgaagagaaggtgaaggagatacccaaacttagaactcagctaagagatttggatcaaaggtacaacactattctgcagatgtatggagaaaaagcagaagaggcagaagaacttcgattagatctcgaagatgtaaaaaatatgtacaaaactcaaatagatgaacttttaagacaaagtctcagttaacttgtgaaaattgaattcccatcaaactgaatgtaagcatttaatatctaaacatttaatgcggacttccaataaattcttttatataattatatagtgggatttactgtagagtgtaaaaatttttttaaaattgatttacactatgtagtaatatttacagttaaattattttgtgcaatatttgaactttatttttgaaactattctttaaagatttattttttaaagcattcattttttttccttgaatagcacagagatttattactttatcctcatataaatatggctagagaagaagaatggtgttcatatatgtattgtagatatacaactagttgtatctataatttgtaagtgtttatatatatattaagaacatttgaagagtaatgttaacatactgaaactttgaaatctttcacatttaaaatttcaacatatcttaattactgctcatgaaaatgtacattaagtgttaaagtaaaaaattattaaatctgtgggctattaaattttaaactaattttttttccctttaaaagtaaggagtcacactggacactgtctggaaatttaaaggngtggaatggtttaaactnaaaaanattttggtccggaaatttnttttcacc

SEQ ID NO: 65971 - DNA, 826 bp, Homo sapiens
ttttttttttttgctgttggttgccttactttaatgctgacctagcagccccgacaggaagctttaacataaagccttgaccctgagaagcatgggtgcgtcttgtcgtgagcaggttcatggctgtgctccatcctcagcccgctgatttttggtcttttgtcctttgatccagcagttcccacgtggatgttgtactgcttctgtccttgatgttgatgccgtgggcagtcaggccccggcgcagggtgtcgcatgcttccagcaggggctgcctttctaggagctgctgccgccgggcgtcccccgtggcctcgggcatggccagcgcaaactgccggaccttctgccggaaccgcaccagctcgtccaccacaccatgcaaggtagcctcgctgccgtctcctgaaacgtactgttgatttgccagagaaattccaacagtttcaaaaaactgttcaaagtaagagatgatggcaccaaacacagcaggacttctcggcccttcaggttccttcagggacgccctgagctgtccattcccgtggtgtgcaaggcccaggatggcatcaaccaccctgggtgtgtcaaagtcatctgccaaggccgccttcacggccctcttggtgctggagagcctgagggaagaggagagaacagtcacagcagagggagctccactctccccaggcggcccccacaccagtccttccccagggagagacgctgggggctctaatctggggactttctctaggtcatattcccaaagacttgagttcctgagtagcagaaaattatgtaacatcaactgcaaactgtcatg

SEQ ID NO: 65972 - DNA, 1091 bp, Homo sapiens
acgttttccgcaccagttgtaacctcaaaagccacaagaggattcacacgggggagaatcaccatgaatgtaatcagtgtggaaaagctttcagcacaaggtcctctctcactgggcacaatagcattcatacaggggagaaaccttatgaatgtcacgattgtgggaaaaccttcaggaagagctcctatctgacacagcacgtaagaactcatactggagaaaaaccctatgaatgtaacgagtgtgggaaatccttcagcagtagcttttctcttactgtgcacaagagaatacataccggagagaaaccctacgagtgcagtgactgtggaaaagcctttaataatctctcagctgtgaagaaacacttaagaactcacactggagaaaaaccctatgaatgtaatcattgtgggaaatccttcacaagtaactcctatctttctgtgcacaagagaatacataatagatggatatgaattactgcaggaacttctggaggaaagcactcattgatctttcatccctaagatagtttgagagagctcacactggatatataagttatttgttgcagcataacaaatgatccccgcaaattttgtggcttcaaacacgaaatgtttattctctaacaatttctacagatcaggaattcaagaacagcttatctctgtagttacactgcaggatctctcatgcctttacttacaatcaagatgtcagccaaagctatagtcatctaacatctttactgatgaacagtccacttccaagatgacttattcacatgcctggaaagttgatgttggttgttgtcaggggaccttcagtcattaccatgtaggcctctttacaaggcccagctccttgacaatttggcaataagttctcgccaaggttagtgatccaagagaggaccaatacagaggccaaaatggcttttatggcctatcctcaggaggactgctaagctttcacttatttcctattgtgttggtctcacaacacaccaatcctgatacaatgtgagagactgcagaaggtatgaataccaggaaacagataactcagaagcatctgggaat

SEQ ID NO: 65973 - DNA, 881 bp, Homo sapiens
aagctaaaagtctcagcatagaagctataaaaagaaacaagtggaaattgtagcactgaaaatacaataacaaaatttactggaaggtctcaacacaatgaagatgactgagggaagagtcagtaaatttgaagatacatgagcagaaattatctagtctgaatgacagagaaaaaagtgaaaaaaatgagaagacctttggggatctgtgggacaatatgagacagtctaatattcatgtcttaggagcccagaaagaacaattggaagaaaaaaatatctgaagaaataatagctaaaaacttccaaacatctggcaaaaaacaaatattcacatacatttacataacattctatttaaagccggtctgctggcacagcaaatcccaaaaaggaaaaccacacccaggcacatcataatcaaagtgatgaaaccaactgtaaagaaaatactttgaaaacaactggaagaaaacaacactttgtatataggagaaccaaagatttcagtgatggcagatttctcatcagaaaccatggagcaacatttataaagtgcttttaaaaagcaacaaaactgtcaacacagaatcctttatccagcaaatatattctttaggaaagaaaatgaaataaagacattttcttttttttctttacttttttttttttaataaaagggagtctcactctgttgcccaggctggaatggaggggggcgatctcagctcactgcactccagcctgggggaacagagtgagacttcattgttgaaattcgtgctccactccagcaactgctttcaatcggagttccatcctccgccgcagtatgccctaacgcagcgttatcttcagagctacccaccagccttccgaaa

SEQ ID NO: 65974 - DNA, 1675 bp, Homo sapiens
tggccatctttactgtgggctgaagcctgtgcgcttactcgcgcatgtgcaagccttccctcgctttcctcttccaagtagccttgcctagagcggagcctcccgcgccatttctgtgcgcctgcgtagcgtgaccctgcgcagcctgggaggcgggtcttagctccaggtgcgtacggcatctgacttgacgtggcccacaactgaaaggtctggggagaaggcgccgtgtccgggtgtggagaggggcgtcgtggaagcgagaagagtggcccgtccctctcctccccctttccctctttcggaaagtggtttctgcggggcccgggagcctcggagtaccgaacctcgatctccggggcggggtccttggtggggactgagcgccccctcccggggacgggcggtctggccgcggagtcccctgcgggagcgtgattggctggaaacggtcccgaacccccaggggagcccgatccctgggggaccctggcttcggactccagtatctgtcgtcgcagggtccctgccctagtggcctatgtcccttgctcggggccatggagacactgcggccagtacggcggcgcctctgtctgaagaaggggaagtgacctccggcctccaggctctggccgtggaggataccggaggcccctctgcctcggccggtaaggccgaggacgagggggaaggaggccgagaggagaccgagcgtgaggggtccgggggcgaggaggcgcagggagaagtccccagcgctgggggagaagagcctgccgaggaggactccgaggactggtgcgtgccctgcagcgacgaggaggtggagctgcctgcggatgggcagccctggatgcccccgccctccgaaatccagcggctctatgaactgctggctgcccacggtactctggagctgcaagccgagatcctgccccgccggcctcccacgccggaggcccagagcgaagaggagagatccgatgaggagccggaggccaaagaagaggaagaggaaaaaccacacatgcccacggaatttgattttgatgatgagccagtgacaccaaaggactccctgattgaccggagacgcaccccaggaagctcagcccggagccagaaacgggaggcccgcctggacaaggtgctgtcggacatgaagagacacaagaagctggaggagcagatccttcgtaccgggagggacctcttcagcctggactcggaggaccccagccccgccagccccccactccgatcctccgggagtagtctcttccctcggcagcggaaatactgattcccactgctcctgcctctagggtgcagtgtccgtacctgctggagcctgggccctccttccccagcccagacattgagaaacttgggaagaagagagaaacctcaagctcccaaacagcacgttgcgggaaagaggaagagagagtgtgagtgtgtgtgtgtgttttttctattgaacacctgtagagtgtgtgtgtgtgttttctattgaacacctatagagagagtgtgtgtgttttctattgaacatctatatagagagagtgtgtgagtgtgtgttttctattgaacacctattcagagacctggactgaattttctgagtctgaaataaaagatgcagagctatcatctcttaaaaaaaaaa

SEQ ID NO: 65975 - DNA, 2707 bp, Homo sapiens
ccgccagcctgggctccgcgcagcccactgatctgggcgcccacaagcggccggcatccgtgtcgagcagcgctgccgtggagcacgagcagcgtgaggtggcagccaagcgagaaacaaccgccgccgcctgcgcaccggggcccggccgacagcctgtccaccgcggccggggccgccgagctgagcgcggaaggtgcgggcaagagccgcgggtctggagagcaggactgggtcaacaggcccaagaccgtgcgcgacacgctgctggcgctgcaccagcacggccactcggggcccttcgagagcaagtttaagaaggagccggccctgactgcagttgcaagaacagcaaggaaaaggaagccctctccagaaccagaaggtgaagtcgggccccctaagatcaacggagaggcccagccgtggctgtccacatccacagaggggctcaagatccccatgactcctacatcctcttttgtgtctccgccaccacccactgcctcacctcattccaaccggaccacaccgcctgaagcggcccagaatggccagtcccccatggcagccctgatcttagtagcagacaatgcagggggcagtcatgcctcaaaagatgccaaccaggttcactccactaccaggaggaatagcaacagtccgccctctccgtcctctatgaaccaaagaaggctgggccccagagaggtggggggccagggagcaggcaacacaggaggactggagccagtgcaccctgccagcctcccggactcctctctggcaaccagtgccccgctgtgctgcaccctctgccacgagcggctggaggacacccattttgtgcagtgcccgtccgtcccttcgcacaagttctgcttcccttgctccagacaaagcatcaaacagcagggagctagtggagaggtctattgtcccagtggggaaaaatgccctcttgtgggctccaatgtcccctgggcctttatgcaaggggaaattgcaaccatccttgctggagatgtgaaagtgaaaaaagagagagactcgtgacttttccggtttcagaaaaacccaatgattacccttaattaaaactgcttgaattgtatatatatctccatatatatatatatccaagacaagggaaatgtagacttcataaacatggctgtataattttgattttttttgaatacattgtgtttctatattttttttgacgacaaaaggtatgtacttataaagacatttttttcttttgttaacgttattagcatatctttgtgctttattatcctggtgacagttaccgttctatgtaggctgtgacttgcgctgcttttttagagcacttggcaaatcagaaatgcttctagctgtatttgtatgcacttattttaaaaagaaaaaaaaagccaaatacattttctgacattgtaagattgccttactgtctgtcattccttattgctggcccctttctcaggccggaggccaagtggtggagaaggaaaggaaatgatcgaacgggcatgttgtcaagtgggcatgccactgggaaataccaccagtttaccctgaaacattgtcctcagaggagtaggaaaggggattttgaatctctattttgctcaaaagttcagttcctgagatactgatgactgagagtgctgctgggaaattttcaggattgtgtggtcttttggggttttttgtttttttttttttaaaaaaaatttgaccgttgttcactgtcccacgtgatcagttgtaagattacaatgctgcatgctagtgggttacataaaaaacaattccagtgatggaaggcggttataatggatggtggtgtgtacaagatggcactgccatctttgagcagagcccagctctgcagcgccacttcatctttttaaacaccctataggtctgtttgttgttgctgttgtcctttattttgaaagagttgcaagagaagttacagtccaggtgaacttggagattgtgggattggttttgtttctgttttgttttgtttatcatttacctgtagtgctattgctgttgatactatcacctataccctgtttctagtgagtgctgaatacagtatggtacaatgacagtaacagccgcgtggtgctgccaggactgcccttgggcatatcagtgacagcccaaatgtgggtggaggaaacctgtaatttccttcttaacatgtgtttgaaataccaagtgaataatactgttctggaaaaaaatgataaactagtggaaattaaagaaattaagggttttatataatagacaggccccacctctcaaaatatttttagaagtctttttgtaaactaatttcttttgatcactattttgcatcagtaaaatgatttttttaaaaccaataaatcatcaattattagaaatagttgtctcacagggatactggtttttcttttgggctgttatgatttaacattgacaggaacactattttaaatccttacgttcaggtgtttgtaacttggccttataattaggctgaattatggcttcaaggtctacaatttatgtgtatggttcacagcctagctttctatttacatttgaaaatacagatttttaccaactttggattcttttttaggtatatggttgcctttcctttttaaattgttcaaaactattttttaatggtcag

SEQ ID NO: 65976 - DNA, 1233 bp, Homo sapiens
  misc_feature (1)...(1233): n = a,t,c or g
tttttcaagaacccaatttaatcagatttacgaggggacatgtacaaaaaacacccgaacaatgcagaattcatcgcaagactagggactgaatctggaaggtagagtccccgccccagggaggggcccagcgtgttggagatctcaaggttttttcccactgattctctaagtcttggccttatctaacacatgaaaccaaaccccacaactgaggctaagatttaagagctacccagagctaaattttcccctccccaagcctccctgctctagaagtggaagggaaagaaggggagagactatgaacctaaggagagtggagcctccagcaccaccggacagggactgcatagctgtccgacaactgagctcctcctgcctatctgtggccaaatgccctccatgtttgcaggcaggttggccaacaggggacagggagggtggggggaggcagaggggtgccccaaacgccctggagaggccgaagggaggaggggcagcactggaggccccattcggacttgctgccacgggagtcaccactgcagggggccgatgtcagctcccagctcctcttcctttagctggaagggcttcactggccacttcaccctgatgatgggctccacgtggtcctgaaggcggtgccgcttcatatgggcatttcgactcttgatcttgtcaaacaccctttcacactctctgcatggaaaaatgccctggctctctgcacttcccaacagctcgggggtccgcttggagcctgcatttgggctggagctgaggatggactccctcctataactcttggtctttaacttgggagttggatggtggctgggtctctcccgagggctgcatgggaccttttcctctgtcctttccacttcctccggctctctcttgaccctcttttctagccctggggctcggccacagtcaaacttgatcatttttttccagatgtaataatactcaacgcactgagctaccgtctttgtctggatctagtgaaagaaaacaagcaggctgtggctgtgccacgcgggccctgggagtgtgaccttgccattgggccggccgcctcctttggaaagccctccggaagcacctcttcctttggcttggcgttaccactcaccacaaaggcacaggaccagaattccaccacntggatagtggactcacaacncntnnnntaaggtctacgaanttntcttnnngggcccg

SEQ ID NO: 65977 - DNA, 1191 bp, Homo sapiens
  misc_feature (1)...(1191): n = a,t,c or g
cgccactgctagaaagcagggtttgaactccagctaccacggtctgtcgccggagttcctgcgttgacctcagataatgtaaagcttgtgtaagatgctgcgggaattccagatcgtttcagtgactatggccccagaacactgacagaggtcccctccccaccatggcaggatctgagtgcaacaggaggctcccacccactcccagggccccacaggcacagccacagccacttctgaccctttattggggcactgtcggccccaaataaatataatacattaaacccagagctgagggaatcgtgcaccccaggaggcgccccccacaacctcagccgggcaaaataagttagtggggggcctgccagaggccgggccagctccctggtctaaagtgcatctcggttcccgtggggattccgtggtccccacgtctgcacagcccctggttgggccgtcgggaggggcgggtgggagatgcctggcgctcacaccgtgccagcagtggccgccgaggctctgtgtgtccatctgtccatgtgggggaacagctgcgtggccggggtcctcaggaaaagctgtcatcgggccggggctgggtgtcaaagggagggtctgagactgtgatgccttggtgcagcttctccagcgagaacttcatctcatccaggagctccacggaggcccgcaggatctgcctccacttgtgcacctccacgctgtggaattgcttctgcagcgccaggatctcggcccactctgtggccgtctgggggaacttgcccttggccagggccaggctgtgccaggactcaaaggtgtgggctgtcctttccagggaccagaggcggtagaagagcaggacgttgagggcgatgaggatgataaggctggggacaggggtcagaggtcaggattcctggggtctagatgctctgaacacccccaaacaactacatcttgtagggacacctctatcccccattgcagaggaggagaattaggctcagagaggatgagagacatgcctagggttgcacagtccatagcagggaagtcagtgttcaaacccaggtctgtctgatgcccatacccttgactgccatgccaggccacctccctgggggagctggagggcatggggtggggagaagaggcgaatgccnccncaatggctatcagtcgcat

SEQ ID NO: 65978 - DNA, 1406 bp, Homo sapiens
ggaattcagcggccccgggcacgcgcgcgcgccaccggcccggcaggtgctgtccttattcccagcccagtcaagagctaccggggctggctagtcatgggggagcccagtagagaggagtataaaatccagtcctttgatgcagagacccagcagctgctgaagacagcactcaaagccccgtctcttgaatgcacagttgcctgctttgagacagaagatggagaatattccgtttgccagaggagctatagtaattgctctcgcctgatgccttcccgctgtaacacgcagtacagagatccgggtgctgtggacttggagaaagtggccaatgtgattgtggaccattctctgcaggactgtgtgttcagcaaggaagcaggacgcatgtgctacgccatcattcaggcagagagtaaacaagcaggccagagtgtcttccgacgtggactcctcaaccggctgcagcaggagtaccaggctcgggagcagctgcgagcacgctccctgcagggctgggtctgctatgtcacctttatctgcaacatctttgactacctgagggtgaacaacatgcccatgatggccctggtgaaccctgtctatgactgcctcttccggctggcccagccagacagtttgagcaaggaggaggaggtggactgtttggtgctgcagctgcaccgggttggggagcagctggagaaaatgaatgggcagcgcatggatgagctctttgtgctgatccgggatggcttcctgctcccaactggcctcagctccctggcccagctgctgctgctggagatcattgagttccgggcggccggctggaagacaacgccagctgcccacaagtattactacagcgaagtctccgactaggcctccagatcagggcttcctcaccagcactggcctttcttctacccacctctaaagctggcagtggagtctctgcctcacccaaagacttttcccttccagactttgagtgtcttcccttctagactttcccatctcctggtgagatgtttcccacttatgccgtggtcctgccctgagcccctttccccaccacaacccaccacggccaggcagagaagggcaactcccaagagccactgcactgtgtaaccattagtgcaactactaccttggtgcctcagtttacccatctgtaaaatgggtaagcatagccactggtgggatattttgggatgtcaaggggtggaggcagagcacaagtcacaccagaaactgctttttatacattttgtataaggacaactctggaaacaagcctatttcctccagccagtttcactgaatgctgcaccacatgctacaccagttcagcgtgagaattttctaataaatcttttctgatactaaaaaaaaaa

SEQ ID NO: 65979 - DNA, 2408 bp, Homo sapiens
cagtgcggaggaattcgagagccagcaggccagcgtgaccatgcacgatgtggacgccgagtccttcgaggtgttggtcgactactgctacacgggtcgtgtgtctctcagtgaggccaacgtggagcgcctgtacgcggcctccgacatgctacagctggaatatgtgcgggaagcctgtgcctccttcttagcccgacgtcttgacctgaccaactgcaccgccatcctcaagtttgcagatgcctttggccatcgcaagctgcgatcccaggcccagtcctatatagctcagaacttcaagcaactcagccacatgggttcaattcgggaggagactctagcagatctgaccctggcccagctgctggctgtcctgcgcttggatagtctggacgtggagagtgagcagacagtgtgccatgtggcagtgcagtggctggaggctgctcccaaagagcggggtcccagtgctgcagaagtcttcaagtgcgtgcgctggatgcacttcactgaagaagatcaggactacttagaagggctgctgaccaagcccatcgtgaagaagtactgcctggacgttattgaaggggccctgcagatgcgctatggtgacctgttgtacaagtctctggtgccagtgccaaacagcagcagcagcagtagcagcagcaactctcttgtatctgcagcagaaaatccaccccagagactgggtatgtgtgccaaggagatggtgatcttctttggacaccccagagatccctttctctgctatgacccttactcgggggacatttacacaatgccatcccctttgaccagctttgctcacactaagactgtcacctcctcagctgtctgtgtgtccccagaccatgacatctatctagctgctcagcccaggaaagacctctgggtgtataaaccagctcagaatagttggcagcaacttgcagatcgcttgctgtgtcgtgagggcatggatgtggcatatctcaatggctacatctacattttggggggacgagaccctattactggagttaagttgaaggaagtggaatgctacagtgttcagagaaaccagtgggcattggtggctcctgtccctcattccttctattcctttgaactcatagtggttcagaactatctttatgctgtcaacagtaagcgcatgctttgctatgatcctagccacaatatgtggctgaactgtgcttctcttaaacgtagtgactttcaggaagcatgtgtcttcaatgatgaaatctattgtatctgtgacatcccagtcatgaaggtctacaacccagctaggggagaatggaggcggattagtaatattcctttggattcagagacccacaactaccagattgtcaatcatgaccaaaagttgcttctcatcacttctacaaccccacaatggaaaaagaaccgagtgacagtgtatgagtatgatactagggaagatcagtggattaatataggtaccatgttaggccttttgcagtttgactctggctttatttgcctttgtgctcgtgtttatccttcctgccttgaacctggtcagagttttattactgaggaagatgatgcacggagtgagtctagtactgaatgggacttagatggattcagtgagctggactctgagtcaggaagttcaagttctttttcagatgatgaagtctgggtgcaagtagcacctcagcgaaatgcacaggatcagcagggttctttgtaaatagtattttgagacactaagatgtttctactgctacggaatgtattttaaacacatatcgtttctttttcttggaaaaaaagttgattaggaccacagatttggtttagaaagggtaatattttgaaatactacaaggtttagacagtccatgaaatcgacctgtttaataatttaccatcctgaaagtccagaattaaaatatggaagcaagaactatataattgattaggatgcttggtaggtttttttcattgttcaaatattcattgcacagtggattgttttgattagttagtatgctttttttttaattaattcagtccttcctgttaatttttaagttttggttagtgcccacaaggaatttaaccttttgatttgtataatagaaaactgaacctaggaattgttagccggggttttgaaggatgtgtacctttcccttcaaaataaagtggtagattttcaaaattttacactagtcagttctttatattactaagttaaatggtagtttggtaaaattattttgggttttccttcctacaaaggaaaaaattggatttatatatataaggttactgcataatgatttcattttgataatgtgcagaatggcctcataagctcacagaaagtaaaaaaaaaa

SEQ ID NO: 65980 - DNA, 733 bp, Homo sapiens
ggaattcctcgagccgccacgatgtcccctgcgctcctgtcccctcccgcgtagagcttgcctttgttccaggaatagcgctccaggctcctgctgccgcccctgggcctcactctggagcgggctgcctccgccctctcgtgacagctcagcccctcccatgcacatttggacgctgtcctgcgctccagttgcacaaagctgagctcctgttacacactgacagaccactgacagccgccgctgccaacccccctcctcctcaccagacttccagacgactacatcatgctgcccacagacctgcgctgccactgccatcgccatccatcgcattccaccgacagactgctgcttctagtgatctgtactcacctcggaggtatctgggctggacacagcccctggacaatgatccagacagctggctgcccctcaagggacctgttaccttcagcgagacccatttcctccccaatcccagagactttttgtgctcctgccacatggctgccagggctcagttgtgcctggcagccaaatcgagtctctcattttctcttgtggaccagttagttttgcccagaatccatttctcttctgaatttgcagcattttctcaggtgctttttgatcaacaaaataacttgtatcttctgcttaactcctttatactacctggagaaaagtattttccatattttcaataaatgtcagacactattgagaaaga

SEQ ID NO: 65981 - DNA, 727 bp, Homo sapiens
ctcctgggacctgcactggaggtagtgtccaacctgtgcccccagcaaggcaagccggggagggagacgggagccgggtggcccagggctcctgtgcttggagtgggggaggttgggactctgcagagggcctgaggggcaggaacgggaagatcccctcctcagtttatccacctgagggccccccgcagtgccctcctcagcctcactttgttctgcccaggggattggccgtggaccatgaggtttggaacagaaagcctgcccctggtttcacgctcagcaagttccttctcctgtaggaacccctgatccacagcttctgtgtctgtggggtgggggtggcaattgtggccccatctgcttcccaggacagttacggctctaaggtgtggtcttggctgtggtgatgcttgccaagacactgcccggggtgtggcatcagccttccctttgcccacaggacgatgccctgagtctctgttcatccattgacctgtgcagatgcacaggacacctgggtggggccgtggggacaccaggatgagtggccatgtgtgtgcctgcagagggtggtgtcctcatgaggtagaaggcctgggagccggctggaagtaggctgctgggccccattgcaggggggaccgcgccgtgatgcggcttgcaggggccccggggcagcggggctggctctgctgacgcccacatggcctgggccccacgtgga

SEQ ID NO: 65982 - DNA, 1148 bp, Homo sapiens
agagtgtccccctgtagacctgttagagtgctggaattcctgcagtaaatgcacaacccggacggaagtgcctctccgacagcagatccaggctcggagctccagacgctgggacaggccgcccgcagaccacccccgccgcgcgcgggacacgacgccccccgcaggacacgcccatcagcccggaaacccctgagctgcttctcccggaggccgatgcccacccgggagcccccaaagactcgcggctcccgggggcacctgcatactcacccgcctgggcctgggcccccgctgcagggactggcgccccgaggcctcaaaaccagcgccccccgccctccgtgccagccccagccgggaccccacaaggcaaagaccaagaagattgtgtttgaggatgagttgctctcccaggccctcctgggcgccaagaagcctattggagccatccctaaggggcataagcctaggccccacccagtgcccgactatgagcttaagtacccgccagtgagcagtgagagggaacggagccgctatgtcgcagtgttccaggaccagtacggagagttcttggagctccagcacgaggtggggtgttgcacaggcaaagctcagggcagctggaggccctgctgagctccctgcccccaccccaaagccagaaggaggcccaagttgcagcccgggtttggagggagtttgagatgaagcgaatggatcctggcttcctggacaagcaggctcgctgccactacctgaagggtaaactgaggcatctcaagactcagatccagaaattcgatgaccaaggagacagcgagggctccgtgtacttctaagtgcccctgcagatgggcagagggatgcatggggatgcaggtcccttgcatttcttggtatctctcagcttttcctcttgcagctccccctaccaggggtcgctttctcctggattgcaaatgcctcttcagtttggactcagctctgacagcccctcctccaggaaggccttccaggacttcctcctctgggtcctctagctctgaccctacagggactccagatctcaacctgttccctggaagtagggcctgctctccatcccagtgaaataaacatgtattagacacctaaaaaaaaaa

SEQ ID NO: 65983 - DNA, 1538 bp, Homo sapiens
aattgggatccttagagcagcgtggcggaattcatccacagtcacttctgttcatttttaatgaaaacctattgctgttattttctattatgagttaacggtgatgtgtgttttttaaattttgtatacttgctctcaccctaaaatataccttaagagacttttcccctgtttttctttctgctttccaagactccaggaaaaacagcttccatggcacattttgtacagggcacatctagaatgattgccgcagaaagttctacggagcataaagagtgtgctgaaccatcaacaagaaagaacttgatgaattctcttgaacaaaagataaggtgtttggaaaaacaaagaaaagagctcctggaagttaaccagcaatgggatcagcaatttagaagtatgaaagagttatatgaaagaaaggtagcagagctgaagacgaaactggacgccgcggaaagattcctcagcacgcgggagaaggatccgcatcagaggcagagaaaggacgacaggcagagagaggacgacaggcagcgcgacctgacccgggaccggctgcagcgggaggagaaggaaaaggaacgcctaaatgaagaattacatgaattgaaagaagagaataaacttttaaagggaaaaaatactcttgcgaacaaggaaaaggaacattacgaatgtgaaataaaacgcctcaataaggctcttcaggatgccttgaatatcaagtgttcattttccgaggactgtttgaggaagtctcgagtggaattctgccatgaggagatgagaacagaaatggaagttctgaagcagcaggtgcaaatatacgaagaagacttcaaaaaggaacgatcggatcgagagagacttaatcaagagaaagaggagctacagcaaattaatgaaacttcccaatcccagttgaacaggctgaattcccagataaaagcttgtcagatggagaaagaaaaactagaaaagcaattaaaacagatgtattgcccaccctgtaactgcggcttggttttccacctgcaagatccatgggtaccaacaggccctggagctgtgcagaagcaacgggagcacccaccagactatcagtggtatgctcttgaccagcttccgccagatgtacaacacaaggcaaatgatggtgtcttgctccacctccagtctgttgccaggctggtctcgaactcctggcctcaagtgatcctcctgcctctggctcccaaagtgctgaaatttcaggtttatcctcagtaaagaaagtccatccgtagaagtacacactaacagagagagacaacaggcaacgagggagcgtggctgaggaccctcttctttgtttatactgaggcttgtttctgccacaaaggcacatcatctaccctgttatttgtgcctggtcatgttttcctttggtatgaatacaggaaaaggcttctgacagctaagatcctgatcaaattggaggagccagttattatacaaccaaatacaacttccagtttccttgaaaaaaaaaa

SEQ ID NO: 65984 - DNA, 2780 bp, Homo sapiens
gcggggaattagctgggcgacgtggaggaggacaggtggtggccgtgttcgtggtcaccttcgacccccgctcgggaaacatggtagaatggtgcttacctcaagatattgaccttgaaggtgttgagttcaagtctatggccagtgggtcccataaaatccaatctgatttcatctatttccgaaaggggcccttcttcggcctggcctgctttgccaacatgcccgtggagagcgagctggaacgtggcgcgcggatgaagtctgtgggcatcctctctccctcctacacactgctttaccgctacatgcacttcttggagaaccaggttcggcaccagttggagatgccaggacattactctcatctggctgccttctatgaggacaaaaagggggtgctccatgctggtcccggcagaggcagcagcctgccccctgtctactggctgccttccatccaccgatacatgtaccctgagatgaagatcacacacccagctggctgcatgtctcagtttataaagttctttggagaacagatcctcatcctctggaaatttgccttacttcgaaagcgcattttgatattttctcccccacctgtgggcgtggtgtgctatagagtgtactgctgctgctgcttggccaacgtttcactgcctggcatcgggggcaccattcctgagtccaaacctttcttctacgtgaacgtggctgacatcgagagcctggaggtagaggtgtcctatgtggcctgcaccacagagaagatattcgaggagaagcgggagctgtatgacgtctacgtggataaccagaatgtgaagacacaccacgaccacctgcagccgctgctgaagatcaacagtgctgacagggagaagtaccgccggctcaacgagcagaggcagatgctgttgtactcccaggaagtagaagaagactacaacccttgtgaagaggacctcttcgtgctgtgagtcctggggccgtggatgtggagtctccctgaggatcccttcggcactgagtgacctgcatccctcccatgtcattcactgcgggccagggatgccgtttattgctgccaagggcacttagagccgggctccttacagaggcaaacctgagccctgaaatgccattagggggaacccagaagacttagggaaagaagcaggtcccttaagagaaaacaggagtcttagtgtttctttccttgttgggcttttacatcgaggatgtccactgcctggaagctctgtctgtccctcaggactcagggacttctcatttccattgcctcctttgaatagagtagttccttgcgctgaatattatgggataatctgaaattttaattcttgaatcaaatgaaatctctttgccccgtaggtgcagaagccagggcctttccacctcacagtactgatttcattcctagacagctgggtgaagtagccttctgtggcatcaactgaattctcccagcttcctgtttggtcttccaggggtgaggttgtggtttgatgctgaaaacttaatgtgggcatttctacaaaggtgtagcaccttgattctaatagtggacttcctaaaacctacatcctgtttaggtggaaagtatctgagacttgagcacagccatagtctcatccaggtatgacatgtgccactgtgtctgaaattcctgagcaccgagggccgcttcaggcaccaggcactttgccaacctgagagctgtatggggctggactgtctagtctaactaggcagtgaaccctgtcctgaacagagcttgtttgttcataaagcactctaaagcagtgacttttaaatcttgatctgtgcataatctcactcctccccaaagagtcatccaagggagagcaaaacacccaagggtaacggttggctcacggttccattttgttgttggttgttgaatttttgctttcctcctatgacttaagcagaaagagggaaaagcagtgtttggggggcctcttctcaggctgtgtttaaaacccaggtcactttccctcaacaggaaaatggattttgacaggccatcttgcttagagatttccctaatcacaccataattaatgccaaatggtttctttgctaaccttagtagcacttgaataattaacttttactcttttctttttttaaaagatacctgcgaatccactgaaaagtacattaaacaaaacagtatagttttggttccccatatgtggattatctggtgagctttttattcccccccgcttcctttcctgtgtcttgtcttccaaatgcaggtttttcctagaacaaaacaaccggatatttcagactttgttggaggtgtctgccagtcaagacaaaactctgacagcagagcatgcccggggcatgggcctagacccccaaggagaccggagctttctcctggacctgctggaggcctatggcattgatgtcatgctggttatcgacaacccctgttgcccgtaggaggagccaacaggactgggagccgcttcacgtgggatgtcagcagcccggagttcaccccagggccccagagggcctcattttttattaagttgacacaaaggaatattgtttatactttccaacaaacataatttttgcaatttcctttctgcccttttccctagagataaggtgagatcaccttggttttgtgtcctgccatgttaggatattggaatctgccactttctcccagagctgctggtcctctgggcttggtcatgggagtt

SEQ ID NO: 65985 - DNA, 1606 bp, Homo sapiens
ttttttttttttcgaatgcgcagtgatgctttaatccccctgtttgcaaacgagctctgtggaagctcagcaggaaggatggaaagatggggaggaagaccctggcgggtggaagtgtggccagggacacaaggctgcccttatgggactgaaagagaaagctgctgggctctgtgtgactggaaaccagggaaggagacctggctgaggcaggaactgggtttgccagcagtgcggaggggcagcgggtggctcagaagtgggagcaggtacacagaaggagctcagggcatgcctggggcatctccaaagctctgctgagagtgaaggccaggagcctgttttccttccccagaagtgtgctcatgggaaatggggcagggggcaggctggcttggggatggaaagtaagcttacactttgatattaaactcattctttgacttgctgtcaggcaagaagcccattctgtgagcttcagcatataagcattgggagggtgtgagctggggctcccagacacccccagagcagagggagcagggcctgtcagcctcctctgctgctcctggacagagacccacggggtcccatgggctccaaacctgcccagcaagtttaagggccgtgggcaggccttgtagccgggcaatgggatgtgagcagaaacgagaatgtggcctagcagtgggtgcaggacaaggagaggtgaaccccaccccgagagcattccgggaggtgtcatcaagtctcttaggcagtctggtgatatttggtgttctgagctaaggagggaatggacttgtctgtcacgcaggggccaagagaagcaggtgcaggtcttagagctgagccttggggaggggaccctagtgagacagcgcctccgtggagtagaagaaggggcaggatggaaatcaaggtgggaattttggggccgcttctccatgtgtgctttgctggacagcacattgtcccattagccactaccaaacccgcctctggcttctgagcttggcagcacaggaaaacgcggaggttggagcacccccaggagttcctggagtggctgtcacaggcctgggtccccttcaccccaaggccgccgtgggccactccattcctcagcacgttcctggcagtgactccgtgacgctgtcttcctgactcggggcccaggaacgagctggacgtaaggccactgggctgtgcttgtgctggggctcccagaggcatccgggggccccgtgtgtcccccaggaaagccggctggtctccaagtgaggcgaagacccgtgcccagcagacaaggccggtctcggggctggcagagagctgcccccagggtgtgtgtcaggaggtgacggctggagcctcgtgggcgggtgaagtgtgtctgctgggtcagcactgcccagatctgccatcgtgttcggaccccatccctgcaggagctggggcaggtggagatggtctagtcctcctggggcctctccacagtgagaaacgtgtccaggactgtggcctgccgctcggggtcgcctaggggctgcttctcgtggctctgctcagcccttgtcctcgtccagcctcgtgccaagcgtgg

SEQ ID NO: 65986 - DNA, 1338 bp, Homo sapiens
  misc_feature (1)...(1338): n = a,t,c or g
tgccatacattcatgcatggtcagctctgagcccctcaggaatagaagggccttccatttaaaacagcttacacctggagacaacaaacaccaagaaacatgcaaacactacagagaatctgtatgtgaagaagtcatattttatattgatgagggtgctgttagaaaatgttgatggatggcttcggtcactcatgctagtctaaccagaggggcctgtgacggtgtctgcttctctttcaggattcccagttgtttctgtgtcaggcactaagcaatctggcggcttttggtccaaatgggtattttagttgtctttttgcaccttttaatccctcttcgaagagtcaagttcaaatgctggaaaccgtgatgtctctggtcccaggacatcagagagaaagtgaatagcgccagccatgccttcaaagagcgaatagggtctgtcaggaatgcggcacccgtgtgctccgtaatctagacaccactctgcaaacttgcaagctcggtagaggtacttcttatcctgcgtgagacggtaaagggacaggaaggaatagccgttgccagcagtcccatggcatatcccgtagcccttccgcagcaaacctcgctgccaaatcacatcgctacactccatggcctctttcaagtacttctcctccttaaagaccttgtacgcctgcatgagcatgtggatgacccccggggcgccgtggcaccagtgcaccagccggtctgtttcattgcttaatgatgatgggtaattcccagatcggaattttttgtggcgcacataatcaatactgggtttcaccatttctgtcaaggtttcttggtccacttttgctgccggctgcattaacatatagtaaattccagccatgccatgggctgctccaacgtactgcttccggtgccactggtacaacagcgggcagcgctccgtttttctttcttcccttgacaaagtcttacccgattcaataatagcattgactacctctttaatagctgactcacacacggtgcctggacctatctctgtgttcaggtacagtaaggcatacagataacctgcccgtccataaagcagctcatcaggaaggtctgattcttggcaaacaaccgatctctggagctgcaaaagtttttgtggacacattcctggggggactcacagtgcactttttgagttttgtggataaaatcacaggttccaacaggccagggggggcccagcattccccacagaggaaggttgancccgcgggccnttcagatttccnaagtgttttnttttttacgtaattcnggggnttcggagcaggntaggtt

SEQ ID NO: 65987 - DNA, 1673 bp, Homo sapiens
gcggccgcggcgcccgcgcgcgacggcccggccagcgaggccgcgctgcagctgctgtgccgcgccgacgccggcccgctctgcgccgcctgccgtatggctgcgggccccgagccgcccgagtgggaaccgcgctggaggaaggcgctgcgcggcaaggagaacaaggggtctgtggaaatcatgagaaaggacttgaatgacgcccgggacctgcatggccaggcagagtcagcagctgcagtgtggaagggacacgtgatggaccgtaggaagaaggcactgaccgactacaagaagctgcgggccttctttgtggaggaggaggagcatttcctgcaggaggctgagaaggaggaggggctccctgaggacgagctggctgaccccactgagcggttcaggtcactgctgcaggcggtctcggagctggagaagaagcatcgcaacctgggcctcagcatgctgctgcagtgatggcgccaacccgtggcagtcccagagctggaggcaggaggatggatcctcatctccatgggaagtgtcagcgtgtggctgccagggaagcgtggcaggcgcctggccttgggtccatctacatagttgcgtgtttcaacaatgtccatttatccttcaccccgaggcgtgttttgggggctgcaaacacctcccggtagaggctggacctgaggacccttcccacctgtgcccgtcccttcctgaagtcctagccacagcccatcctccatgagtcccggcagctctgggtcatgcccttccctggtcacccatctgcccctcacccgtcatccagggacccagaccctgcaccttccatgtgggcccacagatccttggcaggtacctgaggtgcaccattgagtgtcggatttggggttagcatccagaaagaagaatgcgcatgacgctctgtgaaggctggaactcaggtcttcagggagagaaaggaagactggattgcaccttgatgcctcctgaggaggcggcccccctcttgaggtgggcgtgggcccggcccagccttatccaagtcgctctgtccacctcccccttcctggcccccaccccactcctgtgcctcccaggagccctccctgtgctccacctgcctccgcagaaggaagcctctttctctgtttccctgggtgagggggctggcaggtggctaaccccatttagcatctccaggccctgccatcgtgtctcatcttgctgttatctctagctctttccctcctcccatttcctttagtagttgaattttgcaaagcttgtagcagtagctcagttgcctgcagcatccttgtgtgtagataaattagtcgacagaaactcagcactggggacaggattgcaaagtcggggacatagatgcagacagttgttgagatttggggatagccgggcttgtgagcggtgcccatttccagatgaagcctttcagcccttctgagtccccggcccttggtgcgatgtctgtgagtttgacctgcccagcgtgtgggctggctcaatgctgaataaagtgggtttgtgtcagctcgtttgcttcgtctccgtgtgtccacctggcctcttccccctgccctggccaccctccagtgtcaaaggaaacttcctcgtgacacgtgctaaagcatggtgaggaggac

SEQ ID NO: 65988 - DNA, 1009 bp, Homo sapiens
  misc_feature (1)...(1009): n = a,t,c or g
ttttttgctgatataaaaaatagtggcacggcactttttattctctttaatcagaaaaataagccctgcgcttctgggatggaggccccaggtgagcaccggaggaaggggcccgggtgggtggggagcgagggggcccggaggccaaagcagatgctgcaccagaggctggtcagaacccgggagggcctgcgggggtggggtcctcatgagcaagtgcggggtgctggaggtcaacaactgcctggcctgggagccagggacacccatccccttcctgacacctgaggcggcccagctgggcaagaccaggcctgcaggaccagagcctcctgtcacgtggcgcaggggtccaggtggtcaacgctgctctctggaggaccactggttagagcctgcccagctcccctgaggtctggagacagtcaaagcccccccaaacaccccctcccttttgggcgagtggcgtgccttggactccagaagactcgagtggggctgccttgagaccaggtcctgagggggtggcaacacctgaccacaggtgggggccgtggaaggggcagggatgggcccaggggtagccttgtagtgtgaggtgtgcccgaccacatgtaggtcaacagccagacgggacgctgcaggggactgtggggaagccgggagaaggcgctgcccaccctgtggggtccccctcgcctggagaccctgcaggcaacccttcagtgcatgcccacgggggtggtggaggcagagtcctgagaggtgggggtgggagcctccgggtcccctgcaggtcctgacccaccagatgggcccatgtgccccctgtagcttgggggccctggaggtggacaccagcacctcctgactaccagggggagggcctggactgaaacccacaccttcaccattccgccactgggccaatctngcaggaactgaggcaccccacagatccttcatgcccaanacgccactcactctcacacctcttgcacacatgcaa

SEQ ID NO: 65989 - DNA, 2535 bp, Homo sapiens
ttttttttttttcacacttggccagtttattaaaggcagggagcttcggcagggtccaaaagggagaagttgggagatgccccctcctcagctccctccttccccaacaactcttctacagcccagcccccagggcccagaggcagggctggcgtcaggcagactgtactgcataaatacgtggaggccacagcccgaatcagcagcgtcagggggcagggaaactgggtttgggatgagaagtgggtggctctgggggcacgtcccccagtgcttgtccagagcccagggacccacagagccagagaggggaccagtgggccagcttggggtctggctacggccagccctgcccagcgaggctggcaggtggctctggttttgggggagaagtggggtggggtgtggccatgccacggcccacggggacagggtggggtcaggtgctgttgccctgctcctgttcaaagagtagcatggccagctgggttcgggagccgaggccctcaagcacgctctggaggcagcggtggtacaggtcctcactgagcctcgcgctgcacgtctgggcccggtagcgctgcagcagcgccggctccaccgcccgcagcacatgcagactggagaagtggaggaacagctcgtacacatccaggctctccagcagctcctcttcttgttctgaggctgccgccaggcgcccacgggctgccacgtagtcggagttgtagaagcaggcctcgctggctgcctggcgatcaaagcggccagtgtcacggcccagctctgggggcccaggcccttgtggtggggccacagctgggtggaaggcttggaaatgcatgggaaagaaggcctgccagccggagatggcatgcatgcggcagcggttcaggaagtcaggcgtgagcaccgtgtctggcccggccagcaggaacagtgtgtccagcgggtgcttcttggagagtagatccatgaggcgcagtggtgagggtgcggctgtctgcacactgagccatggcacccgggcaccggggaaacgccgctcccagctctgccacatgggccttgacaggtgcgaagacatctgccatgggccacgcgctgggccctggcgcggctccatacaattagcaagccagggtcaaggctgccgcagcatcaccaggctccagtgctgcagtggcaaaggcctccaagaagccaggggcccaggtcacgttcagccgcagctagaggcagcagcacagtgagacgtgaggcctcagtgacatagggcacaggcaagatctccacgcggctcagcggccggagcagctgcactcggcgagtgaggggccggcggcctccctggggggtcagtgcctccagctgcaagtccagcgtgtattccataccccgggccggatcaaagcgtcggtagccattcaccagctgctgcttctggagccgcaaggccgggtggtagcggcggttcagctcctctagagctgtccccagaacatcggccacatcagcccggtcagccccacgcagtgggcagcggggtgagccatcggcgcaggagaaagcatgctgctccgtgaagtagtcccagcgcagcacctcaaagcgggaggccgggcgggatggtgctggaatacccacgggccaagcagctgcccggtccccatcaacggccagatggctggtattctggatctcccactgtaactcctggatctcctggtacgtgcgttccagttcagctcgggcgaaagctttgtgcagctggtacatgtgcacagggtcacgcacagggtgggctgtcagggcacttcggaaatgagggtccccctcctgcactggctccccagggctcagctccagatggctatagtgcaccccctcgtggtcaccagtgcagcccaccccggtggcatcgagaatgcagcgacccagccactcgtcagggcgcgcactgacgatgtcgttgcggcagccttccaggtgggggcgcagttgttgcagcagcatgcgcgacagcagcaccccaaagcctccgtggcagtagcggccgggggtgggctctccgccgatgaagtcctggggccggcccaggtacaggtgggcggcggaggccaggctgaggtggcaagttaggcgtgccaggccgtgcgcctcggtgtaggtggtgtcaggcaccaggaagaaccagtcaaagtcgtcgccgtgctgctccagcaggtggcgcagcgccaggtgcaggtgtccaatgggtcgctcctcgcccagcgtcaccactgccatgccaggtggggcccggcggccccgtgcgcccgtcaggaacaccacacgctccagccggtgccccagcgtgcggttcacggccacgcccagcgtgggcagcgtggtctgagaggtcagccccgccaccagcagcctctgcctgatgcccagctccgtgctgatgtagcgggtcctaggggaggagatggcacaagcttatcaaaaagacgaattccaccgcacggtctaaggtctactattgtcaac

SEQ ID NO: 65990 - DNA, 569 bp, Homo sapiens
agggaagtcttatgaatgtaaggaatgtgggaaggtattcatttttttccgttcctttcgtaaatatgaaagggcacacactggcgaaaagccctgtgaataaacaatgtgggaaaggatttttcatatcttctgtggagctttgaatgcatgaaaagacagactacagagaaatgctaaatgtaaggcgtgtataaaagcatttagtaatttctcttccttgcttatacatggaaggatgcacactggagagaagccatatgaatgtaagaattgtgggaaagccttcacatctgccaagagccttcaaaatcatggaaggacacacaccggagagaaaccatgtgaatgcaagcaatgtggcaaagctttcatttgttccagttcctgtcagagacatgaagagacacattctgttaatatgcattcagttatcctaattcctttgaaacacagaaaaagagtagggaaaggacctctgagataactgttttctgagttgagaagagctacttgtgaatggacaattaaatctagatgtatttagatctgatacaattcatctgtat

SEQ ID NO: 65991 - DNA, 1441 bp, Homo sapiens
  misc_feature (1)...(1441): n = a,t,c or g
ttttttttttttaatttcactccttcatgactgtcacatggacaaaatgaaactaaacttaaatcataactaaaaaaaccaccaactatatttttgaagatttttctaattcttgccactcaaaggacaacattttccacaccggtttgtatgttatccttttggtcattgtcttctgaaccaatgaaatgttgattctccaagggatttgagttttcgtggcacacgtcacctattttctcctgctgacttgggcttttgaataagtgtttcttttggtgcattccaagggcagcagctgttttgcaaattttggggcactggaagcaggcatagcccttcccattatgctcccgaatatgcctctgctcgtgattccttttggtggagagatacaaaaatctctgaaagcagaactgacagtggtaacgcttttctccagtatggattctttcatggattttgagggtctcattcaaggtgaatgccttgttgcaatactgacagacgaactccttcaagcccaggtggatgcgttcatgtttctgtaagtttccttgcaccgaaaagcaccgtccgcaggtcttgcactggtatggcttctccccggtgtgacatctcatgtgcattttgagtgtggaagggctctggaactgcttggcgcagagctcgcaggcatatggccgagaagtaagatgtcggtggggccttccttggtttccagcccccactgctttgtctccatcacagagttcacactgcagcttgggcatctctttagtttcttcttcctcaaagggtttatcctgaggagccttccccacggcgcaatccagttctgctgggtatttacatttatggctcgggctcctgtttccgtgctccttcctccagttgactttcctcatttttttcaactgtctggatttctttttgggtttgtagttgtagtaagggcgccacggtttgtcagtggaatcctggtcacttgcgtcatcgaacacttcactcatctccatgcactcggattggcaaagaccgagtgggctgtctccactgggttatgggtcattcccctgtggcaaaggctcctcctgcatctgatacttgggtcttctccctcttttataaaacaatttagatcatagaatgtgccttttcacaatggcttcgtttccaattttcactgttatttggcaaaggggtgcaacattactatttgtggaggttcccggcagagcaggttttgcaatgtaggtttcaattttgctggtttcttcagcaatatttgtggttttgctcagtgatcctccaggatcagcaacatagtttgactcaaccggtatttctcccctggtatgtgatgtagttttctttttctccttagtgcttttgggtctgaacttccncgcnnattgctaatgaactcgaangagcccca

SEQ ID NO: 65992 - DNA, 1951 bp, Homo sapiens
ccacccctccaccaccaccccctgccccacctgcccagctgccctgcccacagtgctccaagtcctttgcctcagcttcccggctgtcccggcaccggcgtgcagtacacgggccccctgaacggcgtcaccgctgtggggtttgtggcaagggcttcaagaagctgatccacgtgcgcaaccacctgcggacacacacgggtgagaggcccttccagtgccactcatgtggcaagacctttgcttctttggccaacctcagccgccaccagctgacccatacgggtgcacgtccctaccaatgcctggactgtggcaagcgcttcacacagagctccaacctgcagcagcaccggcggttgcacttgcggccagtcgcctttgcccgcgccccccgcctccccatcactggtctctacaacaagagtccctactactgcgggacttgtggccgctggttccgcgccatggcgggcttgcgactgcatcagcgggtccatgcccgagctcggactttgacgctacagcctcccagatcaccatctcctgccccacccccacctccagagcctcaacagactatcatgtgcacagagctgggggagaccatcgccatcattgagacatcccagccactggcgcttgaggacaccctgcagctgtgccaggctgcactgggggccagtgaagcaggcgggctcttgcagttggacacggccttcgtgtgacgcagctgaaaagcaacaacaaaagggtttggttgcaacagccagtgtgggtacctctggggagagaggacctcctctgacaaactggtctggtacccaccatgtgccaggatccaccctggcctctttttacccactgactccccagaacaacccttccaggcttctcttgtcatctttctctgcctgaggggaaactgaagctctgaaatgcgatgtgatctgtaccaggtcacccagctatgctgcaaagtgggttggccaaggccctttgcactgcatcaccctggtgcccagcaacatcaggtaaccttcactgagcaccaagcttatgccaggtctgtgctggccactctcatatacctcttcagatcctctgcttgtacccccagcccttgccttccctggattttgggcacccaggactttgctctgcctggtggagggtacttgatttctctgggcttccttcatctcaattctgacagtgtggaaggaaatctgtaggtacccaggtcctcagctccagactgggtgatgctggagacccaggagcaagtcagcacaggctctgcccacaggaggcatgcacaatctggtaggagaaacgcacaagtacagatagcttgctctctgagtgtgtctcattgattcattcagcctgtgtgtcctaaagcctcccttctcccatactgggtgatgctgggggcagagatgagtcaggcctaaagcttctctgggctgtgatggggatgtgcagggacagtgggatcccaggaaacagacctccatggtgggagatcacgagttaaggacttcctagagaaggtagtccctgaaggaaaagtaggaatctggcagtgaaagaggaaaagaacattccaggcagacagcactgcaagagggtgagctcttggtgtatttggagaccatccagttattcatctgactgcctacctgaggcaagcaccacacttaccactgtatgtgtactatgatcccaacaggcttgtgacatagatttcatattatccctgttgtatagatttttaaaactggtggctgggcgtggtggctcacgcctgtaatcccagcactttgggaggccgaggcgggcagatcacgaggtcaggagatcgagaccatcctggctaacacggtgaaaccccgtctctactaaaaatacaaaaaattagccaggagtggtggcgggcgcctgtggt

SEQ ID NO: 65993 - DNA, 2725 bp, Homo sapiens
ggaattcgctatatgccgctatcctctgggcatgtcaggaggccagattccagatgaggacatcacagcttccagtcagtggtcagagtccacagctgccaaatatggaaggctggactcagaagaaggggatggagcctggtgccctgagattccagtggaacctgatgacctgaaggagtttctgcagattgacttgcacaccctccattttatcactctggtggggacccaggggcgccatgcaggaggtcatggcatcgagtttgcccccatgtacaagatcaattacagtcgggatggcactcgctggatctcttggcggaaccgtcatgggaaacaggtgctggatggaaatagtaacccctatgacattttcctaaaggacttggagccgcccattgtagccagatttgtccggttcattccagtcaccgaccactccatgaatgtgtgtatgagagtggagctttacggctgtgtctggctagatggcttggtgtcttacaatgctccagctgggcagcagtttgtactccctggaggttccatcatttatctgaatgattctgtctatgatggagctgttggatacagcatgacagaagggctaggccaattgaccgatggtgtgtctggcctggacgatttcacccagacccatgaataccacgtgtggcccggctatgactatgtgggctggcggaacgagagtgccaccaatggctacattgagatcatgtttgaatttgaccgcatcaggaatttcactaccatgaaggtccactgcaacaacatgtttgctaaaggtgtgaagatctttaaggaggtacagtgctacttccgctctgaagccagtgagtgggaacctaatgccatttccttcccccttgtcctggatgacgtcaaccccagtgctcggtttgtcacggtgcctctccaccaccgaatggccagtgccatcaagtgtcaataccattttgcagatacctggatgatgttcagtgagatcaccttccaatcagatgctgcaatgtacaacaactctgaagccctgcccacctctcctatggcacccacaacctatgatccaatgcttaaagttgatgacagcaacactcggatcctgattggctgcttggtggccatcatctttatcctcctggccatcattgtcatcatcctctggaggcagttctggcagaaaatgctggagaaggcttctcggaggatgctggatgatgaaatgacagtcagcctttccctgccaagtgattctagcatgttcaacaataaccgctcctcatcacctagtgaacaagggtccaactcgacttacgatcgcatctttccccttcgccctgactaccaggagccatccaggctgatacgaaaactcccagaatttgctccaggggaggaggagtcaggctgcagcggtgttgtgaagccagtccagcccagtggccctgagggggtgccccactatgcagaggctgacatagtgaacctccaaggagtgacaggaggcaacacatactcagtgcctgccgtcaccatggacctgctctcagggaaaagatgtggctgtgggagggagtttcccccagggaaactcctaactttcaaagagaagctgggagaaggacagtttggggaggttcatctctgtgaagtggagggaatggaaaaattcaaagacaaagattttgccctagatgtcagtgccaaccagcctgtcctggtggctgtgaaaatgctccgagcagatgccaacaagaatgccaggaatgattttcttaaggagataaagatcatgtctcggctcaaggacccaaacatcatccatctattatctgtgtgtatcactgatgaccctctctgtatgatcactgaatacatggagaatggagatctcaatcagtttctttcccgccacgagccccctaattcttcctccagcgatgtacgcactgtcagttacaccaatctgaagtttatggctacccaaattgcctctggcatgaagtacctttcctctcttaattttgttcaccgagatctggccacacgaaactgtttagtgggtaagaactacacaatcaagatagctgactttggaatgagcaggaacctgtacagtggtgactattaccggatccagggccgggcagtgctccctatccgctggatgtcttgggagagtatcttgctgggcaagttcactacagcaagtgatgtgtgggcctttgggggttactttgtgggaaaactttcaccttttgtcaaagaaaaggcccctattccccagctgtccagatgaaacaggttattgaagaaatactggagagttcttcccgagacccaagggagggcagacttacctcccctcaaccagcccatttgtccctgactcctgtgtaataaagctgatgctcagctgctggagaagagatacgaagaaccgtccctcattccaagaaatccaccttctgctccttcaacaaggcgacgagcgatgctgtcagtgcctggccatgttcctacggctcaggtcctccctacaagacctaccactcacccatgcctatgccactccatctggacatttaatgaaactgagagacagaggcttgtttgctttgccctcttttcctggtcacccccactccctacccctgactcatatatacttttttttttttacattaaagaactaaaaaaa

SEQ ID NO: 65994 - DNA, 302 bp, Homo sapiens
catcaaagaaatcacactggagagaagccatacaaatgtattgaatgtggcaaggcctttgggcggttttcttgcctcaacaaacaccaaatgattcattctggagaaaaaccttataaatgtaatgagtgtggcaaatctttcattagtcgctcaggcctcactaaacatcagacaaaacatactgcagagagtcttaaaacaaaattcaatgtggaaaagcctttagatgttctcctaacttctgggttcaaataattcatacttattgatatagcttgtatatttgtcacttccgtctg

SEQ ID NO: 65995 - DNA, 354 bp, Homo sapiens
ttctttcagactttttgctttaaatattctgtttgaaaaaaatactggtttcctaagtaaattattttcttggccattcactgtggctcacatctgtgatcccagctctttgggaggcaggggtgggaggatcacttgatccaggagttcaagaccagcctgggtaacccatctctacaaaaaattaaaaaattagcccggcatgatggtgcaggcctgtggtctcagctactcgggaggctgaggcaggaggatcccttgaacctggaaggttgaggctgcagcagactgtgattgcatcactgcactccagcctgggtgatagggtgagaccctgtctggggaaaaaaaaaa

SEQ ID NO: 65996 - DNA, 2729 bp, Homo sapiens
gcgaccgccgctcggtgaggagtggcggaggggccagggctagccttcagcgaggatgtgcctgagcgtgttcggcgcgaatctgagcctgtcgggcggcgcagctccagcacttgctggagcagatgggagccgccttcccgcgtgggccgtcccggagcctggccagctgcaccttcaaccagtgtttaactggctgaagagatcttttcccttcatggcttttcaaatgctacccaaataaccagctccaaattctctgtcatctgtccagcagtcttacagcaattgaactttcacccatgtgaggatcggcccaagcacaaaacaagaccaagtcattcagaagtttggggatatggattcctgtcagtgacgattattaatctggcatctctcctcggattgattttgactccactgataaagaaatcttatttcccaaagattttgaccttttttgtggggctggctattgggactcttttttcaaatgcaattttccaacttattccagaggcatttggatttgatcccaaagtcgacagttatgttgagaaggcagttgcctgtgtttggtggattttacctacttttcttttttgaaagaatgctaaagatgttattaaagacatatggtcagaatggtcatacccactttggaaatgaataactttggtcctcaagaaaaaactcatcaacctaaagcattacctgccatcaatggtgtgacatgctatgcaaatcctgctgtcacagaagctaatggacatatccattttgataatgtcagtgtggtatctctacaggatggaaaaaaagagccaagttcatgtacctgtttgaaggggcccaaactgtcagaaatagggacgattgcctggatgataacgctctgcgatgccctccacaatttcatcgatggcctggcgattggggcttcctgcaccttgtctctccttcagggactcagtacttccatagcaatcctatgtgaggagtttccccacgagttaggagactttgtgatcctactcaatgcagggatgagcactcgacaagccttgctattcaacttcctttctgcatgttcctgctatgttgggctagcttttggcattttggtgggcaacaatttcgctccaaatattatatttgcacttgctggaggcatgttcctctatatttctctggcagatatgtttccagagatgaatgatatgctgagagaaaaggtaactggaagaaaaaccgatttcaccttcttcatgattcagaatgctggaatgttaactggattcacagccattctactcattaccttgtatgcaggagaaatcgaattggagtaatagaaaatggaagatggtgttgttaataaaggcatttaatagataaaaacatctccaaaaaggattttgaagctgatcctatttagttaaaaagataattttgctttcaactgtaggtccagaaaactaattattggcatcagtctgtgaaatagtccattatttgttgttaaaaatgcttcaaaaggttttcagtgtcagtctgagatgcctggtatataggagcctttgggaaatacctatttttcagtattccatgcatattggatatcaccatgaagcaagagacatgcattctataatcatgtagacactcagactcaggggaaaatacaagttatatcctgaaagcctttaaaactctatggtaggatcaaagattcaaatggtttcagagaggttttatttcaattaatttgttctagtgctttcaagagcaagtacatcaaaatgtagaaggtaaaatgtatgcaacactaatataaattattccaagtctttaaggagccaaagaaaaaaaagatttctcacagctttttgttctgttttgtatttcaattaggaacttgcagtattattttgaaaaccattctaaaataataggagttaggaaataaataaagttttgctagccctgctaagttcaggcttagaggcttatcgctaagtataaacttcaccagattccacgaaaagctggatagctttttttctgacttatgttgtggttgcacccctcacaaatggcagaacagtatgtaaagctggtaacacctcggtttcagtgcaccatgtgtttgctttgtgaaggtgaagaatatgttggtttagagaaagaaattggatgtaattttatgcaatttacttttaaagacaaacataactatttagcagagaatattttaataaatgcaaaacaacagctggactgctgtacatcaaggacagattaactggaaaacatatgttccttatgtgtgattgagagccattcagaaaagacttcctttgtgttcagcctatacttttccatatggtataccttgaaaaaaattagcacaccatggttatttttctaccttttataaaagacagagcctgtttactcatttagaagatagagaaaattggtctaaaattgaacatcctagattcacactcccaagtcacttaaggtgatttgatggtgaggaaaatgattgacaaagcccaacaatgatctcaggaattacattttccaacagaccaaaaaatgttttcatgtagcagcaatgcagatttggtgaatatttaatatatattttagtatgtatttcactttatgactgacaattaaaaaatattgtttggccaaacagtaaacacccttttgaaacc

SEQ ID NO: 65997 - DNA, 1446 bp, Homo sapiens
aaccgaggtacataggacctcgcggaaccccggtcgaccccgcgtccggagcgcctcgcggttcggaagagcggcgaaatgctcttccgctagaccagccactttttgggaatgagggcgcagtcggagcttgaacatctctccgagctgcggcgggaagcggggaaggatcgcagctcaatgcatgggtcggccgcgcggacgcgtgcgagtgtgcggactcattggacgacggcggcggcggcgaaagcggatgaagaccccggagccaacttgtttccggtgagggcgggacagtctgagctgctcgtgaatatttataaaccggctcccccgcaggcgccacctgtcattatgcttactaacgttcgggacgtctcccgggctgcttgggcgaggagaggcaggggtgtgtgaccccggtggttactgtgctcgcgtagagcacctagggcctgctgaagccctccctcgcccgcgcctctccttagtccttgagatgagatggcaagttacagcggcttctccggcctgctggagattcgctacgggccaggacaccgcagctgccttccccaattcgctttctttccgcagccgccgctgccccgaccccggatctgcatgtggaagtacctggacgtccattccatgcaccagctggagaagaccaccaatgctgagatgagggaggtgctggctgagctgctggagctagggtgtcctgagcagagcctgagggacgccatcaccctggacctcttctgccacgcgctcattttctgccgccagcagggcttctcactggagcagacgtcagcggcttgtgccctgctccaggatcttcacaaggcttgtattgcaacccccttgggcaacgtggaggagtgctaccgctacttcaccagtgtccttttttgccatggagtcaggcggcctcctttcagcatcgacctcttcaaagaggaacagctgctggccttggaagactacgtggtcaacacttacttccgccacttcaagctctataaatacgtcttcacaccccaggtgcggctggatctgtctttgacttacatggggctacagccacccaaactgtggccagagagtgagacggagaaagaagaaagcaaggagatggaggagcaggcagttaccccgcagaaagaggaactagagacagtggccccaccagagccagagccaagccacatccacgtcctccgagcctacatcaagacccaagtgaacaaagagctggagcagctccaggggctggtggaggagcggctcaaggccagcgaggaaaggctcagcagcaagttgactgcactagagcggcccttccagctacctccgggtaaagggtagagcatgatccagtgtccccatacattttccccgaattagagctctgggccagaatggcaccatccctgcaaa

SEQ ID NO: 65998 - DNA, 2184 bp, Homo sapiens
  misc_feature (1)...(2184): n = a,t,c or g
attacgccaagcttggcacgagggacccctccaaactgtgtagacatagtctaaaatgtttggagtgtaatgaagtcttccaggacgagacatcactggctacacatttccagcaggctgcagatacgagtggacaacaaatgaagaaacacccctgccgccagtgtgacaagtctttcagctcgtcccacagcctgtgccggcacaaccggatcaagcacaaaggcatcaggaaagtgtacgcctgctcgcactgcccagactccagacgtacctttaccaaacgtttgatgctggagaagcacgtccagctgatgcatggcatcaaggaccctgacctgaaagaaatgacagatgccaccaatgaggaggaaacagaaataaaagaagacactaaggtccccagtcccaagcggaagttggaagaaccagttctggagttcaggcctccccgaggagcaatcactcaaccactgaaaaagctgaaaatcaatgtttttaaggttcacaagtgtgccgtgtgtggcttcaccaccgaaaacctgctgcaattccacgaacacatccctcagcacaaatcggatggttcttcctaccagtgccgggagtgtggcctctgctacacgtctcacgtctctctgtccaggcacctcttcatcgtacacaagttaaaggaacctcagccagtgtccaagcaaaatggggctggggaagataaccaacaggagaacaaacccagccacgaggatgaatcccctgatggcgccgtgtcagacagaaagtgcaaagtgtgcgcaaaaacttttgaaactgaagctgccttaaatactcacatgcggacacacggcatggccttcatcaaatccaaaaggatgagctcagccgagaaatagccacagatgctccatgaggaaaatccctgtccacattggaataaaaaagacatttttgttacaaagtttgccagtataatagagttaacagtactgtctaggctgttgcaatatattctctttcaatgtaccttccttcacctcgtcgtatatatcctcgataagtattaaaacagtatttgagtttaaaagagtttgtatatatttaaatgaataactttttatactctttgttacatgtttgtatcagtatttagtggaaaaccatttgagttgttttgggttagaatttttctttttgtactgtttctttaaaacagagttcttagtaacaggggcagttcctgaattcaaataaaccattttgtatgtttggattttgaatgggttaactaattacaggctaaaataatgccttttttagtgtttttaatttttagaattcactacataaattgtaagtaattgtgggtctcaaaaacactaggaacttttaagtgtcttagcacttcctcgatgtgcctgccctgagggagtgagttcacatttgagacaactgcactccagtgtggacgtgcctttgtcttcaggccatgccgaagggtgtttaaagcagtcttgcaggtcgctcctttcccagccgtggataaaaactgaagctaggaatctaataaggaatgctgatttcctcagttccattttgaggaatggggaaggctattctaaagaaaaaaatgggatttgttttctcggcagatctgcaaggctggctttaagagcacaaggagggaaagtaacgaaagggctggactactataaaagttacaaatacgtagttagaccaatagatttatatagtcaggtttttgtcatgtaatttattaactaactattacagaaacacagctaagaatatcaagtatttctctggctcttgacagaaaaaaatcagttgacttaaccctttgctgtcaaaagagttggcgtttcctgttctgggtgctactgccaaacgttatggtacttagagtcgggatgcacaacttcaaccaccgacttatcaatgcagccgcctgtgtattgcaattggccgttaccttaagcactgagccacccgggtttagttcagccatttcaagagtacatttaacgtcggcagttctgctttactaaaatgcagtagaggtactcttctgtcccttccgtttatagttctctgagagagttatattttttggttttgtttgtgtttcttttgaattnatatctgtattatcctgaacatgtttga

SEQ ID NO: 65999 - DNA, 695 bp, Homo sapiens
gaaaagaacagtgcctctttccactgccagaaccccaggacctttttcaggcctcacagatgaagtttgaagattttcaaaaagatctcagaaaactgaagaaagacttgaaagcctgtgaagttgaagcagggaaagtataccaggtctcctcaaaagagcatatgcagcctttcaaggaaaacatggaacaatttattattcaagccaaaattgaccaagaggcagaggaaaattcactgacagagactcataaatgctttttggagaccacggcatatttcttcatgaaaccaaaacttggagagaaggaggtgtccccaaatgctttcttcagtatctggcatgaattcagctctgactttaaagacttctggaagaaagagaacaaacttcttctacaagagagagtaaaagaagccgaagaggtgtgtagacagaagaaaggaaaatcactttataaaataaaaccaagacatgactctggaattaaagcaaagataagcatgaaaacttgaacaatgaaaagcagaatgaaaatgagtcattgcaacgactttcacaaaattcagctgacctgagagtgggagggaaactaccgtcattctgctcatgtttcttcttgacctcttgcataatctttttgttttctagacagttcactaattgttgaattttactgtatattcatataa

SEQ ID NO: 66000 - DNA, 2043 bp, Homo sapiens
gaattccgggggagagagagaaagagaggagagagaagaaacgggaggaggggataaggaaattaaaccctttaagtcaatgcatattgtggtgacaccggcacaggcgccctcacggtggagtcggccagggctgtgcgttcccaaaatatgaccaggggtgcttggatgtgtcggcagtatgacgacggcttaaaaatctggttggcagcaccccgagagaacgagaaaccgttcatcgattccgagagggctcagaaatggcgactgtctctggcatctctcttgtttttcacagtcctgctctctgatcacttgtggttctgcgccgaggccaagctgacccgggcccgggacaaggagcaccagcagcagcagcggcagcagcagcagcagcagcagcagcagaggcagcggcagcagcagcagcagcagcggcggcagcaggagccctcctggcccgcgctcctggcgagcatgggggagtcctcgcccgccgcccaggcacacagactcctctccgcctcctcgtcccccaccctgcccccctccccgggagacggcggcggcggcggcggcaagggcaaccgaggcaaagacgaccggggcaaggctctttttctaggaaactctgccaagcccgtgtggcgcctggagacttgttacccccagggcgcgtcctcgggccagtgcttcacggtggagaatgcggacgcggtgtgcgccaggaactggagtcggggggcggccggggggggacgggcaggaggtgaggagcaagcatcccactccgctctggaacttgtcggatttttacctttcgttttgtaattcctacacactttgggagttgttctcggggttgtccagtcccaacactttgaactgcagtctggatgtggtgctcaaggaaggcggcgagatgaccacttgcaggcagtgcgtcgaggcttaccaggactatgaccaccatgctcaggagaaatacgaagagtttgaaagcgtgctccacaaatatttacagtcggaggagtactcggtgaaatcctgtcctgaagactgtaagattgtctacaaagcctggctctgttcccagtattttgaagtcacacagtttaactgcagaaagacaattccttgcaagcaatactgtttggaggttcagacgaggtgtccatttatattgcccgacaatgatgaagtcatctacggaggcctctccagtttcatctgtacagggctttatgaaacctttctaaccaatgatgaaccagaatgctgtgacgtcaggagagaagaaaaatcaaataacccatccaaagggaccgtagagaaaagtggctcctgtcacaggacatcgctcacagtgtcatcagcaacaagactgtgcaacagcagactcaagctgtgtgttcttgtactgattctcttacacacagtgctcacagcctcggcagcacagaacacagccggactgagctttggaggcatcaacacgctggaagaaaactcaaccaatgaggagtaacggaaggacgagtgtcaccacagcagcagctggcccgccgtgaaaaatggcaactgctgtctcatgtaacagaaactgggtgcttttaccctcgaattacttattgcaaggcctttagggtaaaatttaaacagatgggcctgaatccaaacaaggacacaaccacagctttttattgactaaaaggctggaaagtgactttaaatttctcacaccattttatacactgtgttttaatgtttggaggttttatttgctttcgttttggtttgggtttatttgtttgtttattttttgcacttgttaatacaggatttattttgggggatggtttctcagaggtaaactaagtcttttcactgtctctatctctctatatatttctagtcattgtgtgtgttcatcagatagttctgtctttatgtcctgtcagcttctattagaggaatgattgctatgacctcatggtatagcaaaaaacaacaacaaaaaaagaataaaaaataaaaaaaaaa

SEQ ID NO: 66001 - DNA, 2084 bp, Homo sapiens
cggacgcgtgggggaagattaagtctgtagcactgtttgtagcagcgtgtccaaggcaagaactgataactctgagtgatgttcagaagtttgcagagataaatggttcagccctatgtagctacaacctaaagccttctgaatacactacatctccaaaatcttctgttctctgccccaaactaccagttccagcgagtgcacctattccattcttccatcgctgtgctcctgtgaacatttcctgctatgccaagtttgcagaggccctgatcacctttgtcagtgacaatagtgtcttacacaggctgattagtggagtaatgaccagcaaagaaattatattgggactttgcttgttatcactagttctatccatgattttgatggtgataatcaggtatatatcaagagtacttgtgtggatcttaacgattctggtcatactcggttcacttggaggcacaggtgtactatggtggctgtatgcaaagcaaagaaggtctcccaaagaaactgttactcctgagcagcttcagatagctgaagacaatcttcgggccctcctcatttatgccatttcagctacagtgttcacagtgatcttattcctgataatgttggttatgcgcaaacgtgttgctcttaccatcgccttgttccacgtagctggcaaggtcttcattcacttgccactgctagtcttccaacccttctggactttctttgctcttgtcttgttttgggtgtactggatcatgacacttctttttcttggcactaccggcagtcctgttcagaatgagcaaggctttgtggagttcaaaatttctgggcctctgcagtacatgtggtggtaccatgtggtgggcctgatttggatcagtgaatttattctagcatgtcagcagatgacagtggcaggagctgtggtaacatactattttactagggataaaaggaatttgccatttacacctattttggcatcagtaaatcgccttattcgttaccacctatgtacggtggcaaaaggatctttcattatcacattagtcaaaattccgcgaatgatccttatgtatattcacagtcagctcaaaggaaaggaaaatgcttgtgcacgatgtgtgctgaaatcttgcatttgttgcctttggtgtcttgaaaagtgcctaaattatttaaatcagaatgcatacacagccacaggctatcaacagcaccaacttctgcacctcagcaaaggatgcctttgtcattctggtggagaatgctttgcgagtggctaccatcaacacagtaggagattttatgttattccttggcaaggtgctgatagtctgcagcacaggtttagctgggattatgctgctcaactaccagcaggactacacagtatgggtgctgcctctgatcatcgtctgcctctttgctttcctagtcgctcattgcttcctgtctatttatgaaatggtagtggatgtattattcttgtgttttgccattgatacaaaatacaatgatgggagccctggcagagaattctatatggataaagtgctgatggagtttgtggaaaacagtaggaaagcaatgaaagaagctggtaagggaggcgtcgctgattccagagagctaaagccgatgctgaagaaaaggtgactggtctcatgagccctgaagaatgaactcagaggaggttgtttacatgaggttctcccactcaccagctgttgagagtctgcgattatgaagagcaggatcttattacttcaatgaaagcatgtaacaagtttctcaaaccaccaacagccaagtggatttggtacagtgcggctgtctaataaataatcaaaagcatttgatagaaatctgtcttgccttaaaacaggcttaaacaacaacaaaaaaattaaaaagggggggccttttaaagaattcccgggggggggcctagtttggggggcgagcctaatatttttttttctctttggggaggagtggtagatcatgcctgtgggtccttcacgaggggacctttttgctggtggatcacctgtggggcccacctcctcaacagt

SEQ ID NO: 66002 - DNA, 2076 bp, Homo sapiens
ggaattccccgctgccccgacgagtcggaactataccgagatccgggagaagctccgctcgaggctgaccaggcggaaagaggagctgcccatgaaggggggcaccctgggcgggatccctggggagcccgccgtggaccaccgagatgtggatgagctgctggaattcatcaacagcacggagcccaaagtccccaacagcgccagggccgccaagcgggcccggcacaagctgaaaaagaaggaaaaggagaaggcccagttggcagcagaagctctaaagcaggcaaatcgtgtttctggaagccgggagccaaggcctgccagggagaggctcttggagtggcccgaccgggaactggatcgggtcaacagcttcctgagcagccgtctgcaggagatcaaaaacactgtcaaagactccatccgtgccagcttcagtgtgtgtgagctcagcatggacagcaatggcttctctaaggagggggctgctgagcctgagcctcagagtctacccccctcaaacctcagtggctcctcagagcagcagcctgacatcaaccttgacctgtcccctttgactttgggctcccctcagaaccacacgttacaagctccaggcgagccagccccaccatgggcagaaatgagaggcccccacccaccatggacagaggtgagggggccccctcccggtatcgtccccgagaacgggctcgtgaggagactcaacaccgtgcccaacctatcccgggtgatctgggtcaagacacccaagccgggctaccccagctccgaggagccaagctcaaaggaagttcccagttgcaagcaggagctgcctgagcctgtgtcctcaggtgggaagccacagaagggcaagaggcagggcagtcaggccaagaagagcgaggcaagcccagccccccggcccccagccagcctagaggttcccagtgccaagggccaggtcgctggccccaagcagccaggcagggtcctagagcttcccaaagtaggcagctgtgctgaggctggagaggggagccgggggagccggccaggaccaggttgggctggcagtcccaaaactgagaaggagaagggcagctcctggcgaaactggccaggcgaggccaaggcacggcctcaggagcaggagtctgtgcagcccccaggcccagcaaggccacagagcttgccccagggcaagggccgcagccgccggagccgcaacaagcaggagaagccagcctcctccttggacgatgtgttcctgcccaaggacatggacggggtggagatggatgagactgaccgagaggtggagtactttaagaggttctgtttggattctgcaaagcagactcgtcagaaagttgctgtgaactggaccaacttcagcctcaagaaaaccactcctagcacagctcagtgaggccctgcccaggctgagctgcttcagggcatcctgaggccctgactgccagctgaaggcgtataatttttccctccgtgtgccccacctacccgtccaagaccctctgtgctccccaccatcctggaccaaccaaaagctgaacggatgccacactgtgctggggccccttgacctcagcagagccgcttcctggtgctacgcagcctccacactcagagcccgtggactgggctggcctaagggccagggctgatggtactgctggcccaacactgctctctttgtgtttggtttttttgtttttgtttttattttgtttttttccaattctttacttttgatactgtgaagatctttcgtgccgaaagataaagcaacatttggacacagagttggcatgttggtgatttgtgggtctgggcggggagggagttgagggtgtgctcagaagcatgggctctcccttagtcactaaccctagcatgcaccatgcatcagcagtttggtgctattgtcccattttacaggtgaggaaactaaagccgataggaaagtgactcagctcaacttagtctggctgattagcattgagcgcagactggtatgattatggcatctgtgcccttttctccttt

SEQ ID NO: 66003 - DNA, 1693 bp, Homo sapiens
tggggatggtgggtcctggggaaaaacgggcttttggtgtggaaatgacatctttcctgtttccgacctctgcctgcctcatgccaggtgagacctttcatgcctgtttccatgattgagaacatgggagtacgcttctttccacctacgttcctggtggattttcactggagttgggctgcactgtggaaaaggggttgggcagctcctgtggcacagtgagggggcatagaagcccaaggcagtcggtaagaaatcaccaatttattgaatgaaaaacccaacatcaactcagtccctcccacccccatctcctctctctggcccaggagacgctcaggacagcagggctgagccctgggaagggctggaggagagcttgggggaggtatggagaatgagaaaaacactttcaaaatgaagttctgtgcaaaaacttctgggaaggagtgagaggacaagagaaaagctccaaaggggctgtggggcgcagatggccgggctggggggtgcagagggctgggctggggccctgtgtcctcaaccactcctgagaacacggacggtcaggaatgaggggctcagaccccgggttggtgagagggaggtgacagggagggaaggagcctgctggagggaaacctggctgggaggatgggtctgggcccaggctggggcctaaggagggggaagaacagagcagggaaaggcagaaaaactgacacggtgggaggagggagatgaatgggagatgaaacagaatgtctgaggggccacagacagcatgtatggtggtgggggtctgcctcccatctctccaagtccaggcagagctgtgctgggtgaggggctgggaggcagaggcaggagcatcattaacaagggtggaagccacgaagacagcgaccagtgcacagggtgtgtcacatggtacaaccaagagacttggcgtgcaaagaaccaaagaaacactcaggacacacacgacatctgcagggaacctgggggtggtgaggaagtcgtgcacgggtggtggggggagactgggaggcccctctgtcctagaaacgctgtgtcaccatagcaacagggtcctggaggcaggggagctgcctcctgcccctgtgagctgtgaagtaggggtcctgtgggctcagggtgcccccttaccctcccttgggaagctctggggcaggtggagaaccccataagagttgaaagtggccttgggtcctgctggaggcagcagagtgagtggatctggcagctgcatcctagaggacaccctggtggctggaggggctgggggaggactaggctctcctgctggggaccaggattccagctttctcatttccgagaaggaaactgataccacaaggaagagtttggaagtcgggtgaaggaaggcctgggggactcagtccaggggactatgggcaccagaaggcaaaaccaacacgccttgggcctggagcaggagggagaaggggaaaagcgggaaggaggaggggctgtgcaggggtgggctggaggggaggggagggaaggcgtccctgtggcagtgtccttcgggacctgggcgagtgagaggcagaccctggtgccagggaaggggtgctgggcccgggcctgctggcctccccctgccgcaggcggtgaggctggtggcagtgccaggagggaaagtgcc

SEQ ID NO: 66004 - DNA, 1515 bp, Homo sapiens
  misc_feature (1)...(1515): n = a,t,c or g
ctctcctcagcggctcgcctaagtccagtgcctcccaagcaggggctgcagcggggcagggagcccccgcccctgcccctgcctcccaagagccccttcccatagctggaccaggtgggacagggattttgggaggaggatggggcctgtgttggtgagggctggttgggagagagggacacagaggggatgcctgtctcacctgcccctgtcgctgtgtccctggatccggccccagcgacagcacctgctccacggccacttggctccattcagagaccaaacagcttcctcttccgttcctcctctcagagtggctcaggcccttcctcaccagactctgtcctgagacctcggcggtacccccaggttccagatgagaaggacttaatgactcagctgcgccaggtccttgagtcccggctgcagcggcccctgcctgaggacctggccgaggctctggccagtggggtcatcctgtgccagctggccaaccagctacggccgcgctccgtgcccttcatccatgtgccctcccctgctgtgccaaaactcagtgccctcaaggctcggaagaatgtggagagttttctagaagcctgtcgaaaaatgggggtgcctgaggctgacctgtgctcgccctcggatctcctccagggcactgcccgggggctgcggaccgcgctggaggccgtgaagcgggtggggggcaaggccctaccgcccctctggcccccctctggtctgggcggcttcgtcgtcttctacgtggtcctcatgctgctgctctatgtcacctacactcggctcctgggttcctaggccccaaaatcggccctccctcacccctttcccttcctctctatttataaggtccctgctccacccgaccccacctgcggtgccttcagccccaaccaaagacactagtgcacccccttcacagacactgacctcagaggccccactctggtgcccccagaccctgggcccccagcctctggcctccctccagtagccccacgagtccccacctctcagtgctgacggtgccttcatgtccccgccggccctgcccctgccctctgtaccccgtgaggggtggcaggagctggagtctcccccttcctcctgtgccctccccttccccccccaacagctgctatgggggggctaaattatctctattttgtagagaggatctatatttgtaggggttcggggcccaggccgggtccctatctctgtgtataaactgtacagaccgtggccgccctgcctgtgtgtgtgtgtgtgtgtgtgtgtgtgtgtgtgtgtgcgcccccacncncacncacacgcgcacatntgnttcgcgtgtgggggggtgtggacatgtttctgtgcccaccagcatctccctcctgagatgccgcccttttttgctcccggagcgtgcgccaaccccccgggtcaactcctttttgttatcggtgattttttttttcgggcctaattggcccccgccccccgcct

SEQ ID NO: 66005 - DNA, 5039 bp, Homo sapiens
  misc_feature (1)...(5039): n = a,t,c or g
agacacagattcccaagtccgtagttgtaaatagcggccagaggctagtataataccacccccccttagtaagaagtaatgcgttgcctgcacgggtaaaattggggcccccgaagggtcctttaaaagggcccgcccttttttttttttttcactgtgaaatatttatttttgttttgtagtattaagcatgattaaaccagtgcagaaaaataccaagtacattgggtgaacgatgagctagctgttctagtatttgctttttgtaatccagttaagaccatcagcatatacaacctcatctctaactcaacaatgtagctgcagggtaacatgtggataccctgtgtgctctactggcctccaaaggcattcaggggatcctcaaagatgttgggccccttgtgttcaaatcttggttcaggtgcggcctgtgcagatcggctttttggtttnggttggtcttaagcctggatactcagaggagaaagatgtcnatccatatcatcatcanaatatagaactcatgaagtataatctctcaccttctttctctttcccctgcccaggccctaagttagggttcccatccatataacaaagacttctggtcaggtggcatttgctatctctgggattccctgcccatgaaagccacaaagagatttcttcttttacacaccctgaagcatattatggccccagcaaggctaactaaatcaaactgtggtttaaaaacaaaacaaaccaaccactgtgaaatatttatttttgttttgtagtattaagcatgattaaaccagtgcagaaaaataccaagtacattgggtgaacgatgagctagctgttctagtatttgctttttgtaatccagttaagaccatcagcatatacaacatcatcactaactcaacaatgtagctgcagggtaacatgtggataccctgtgtgctctactggcctccaaaggcattcaggggatcatcaaagatgttggacaccttgtgttcaaatcttggttcaggtgcggcctgtgcagatcggctttttggtttggttgtcttagcctggataccagaggagaagatgtcatccatatcatcatcaaatatagacttggcttccactttctttttggacttttcctttggttttacagttaagtcagcaaagatatcaatgttatcatcaaataaattagattcccaatgttttctccttctctctggttttctgagagggtttaattgcttccgtaggcaaaatatatcatccttgttaagcctcaaaaatatcgttgtgttgttaatatgacatccgtgctgactattgggattttgtctcattcttcttgactttctgatctgtaaagggggtcatcctcatcttccaggagaggaaagggatttgttttctttgctggttttggtttagcagactgaaagagatcatcatcactgctggcctcgcctagagcaggaaacatggggctctttgctttaccacccactggtgggttggcaggattctctgctatctttgccttgggttttgttctctccacagactgagatccagtgcccgtggaaaagatgtccccagaatcaaaaaggtcagcctcccctctggaatgacccagagactttgcaaaggggcttctgtccactccaggcacaggaccaccttcccaaggtgcagcggcagctgccagggcctcctcagtgctgtcttctccactggctgctctgagctgtggccgatggccatttggggaaatggcgccatcagcccactgtgcaatgggtcctctggggacgctcatgtcctcagtctcgctggactcctgagcagccagccgcctagctgcacgggtctgcggtctacgcttccctctcatcttgacacggctcttgtttgcactgtgtaaggtgtctgcctgagctggaagatcaaaactcacaccggcctccccactcccgggaaggacaggcacactttccagaccgtggctccttctgtgttcagatgaaggaaaagccaattctggcaaaacaggctttacttcagagatctgggaagccgctgtgggcagcaaggccgctgggttgatcgctaaatttgcctgaggtgtttccggcttccatatgcctttttctttactaccttgaatggattcaggatgtttctggtttttgaaagagtcaacagagtggtcttttttcactactctctttttctcttgtaccaaaggctgggacttggcagagctgaaaagatcatcatcttcatcatccccaaacaggctcccaacacttggctctaacagcttggtttttttggtgccagcaaaaaggtcaacatctgggtcattgtccttttggagcttgtggctgaaaagcagctcttcatcctggaagacacctgtgctcttggggtgggcatcaggaatcgcagccctttcctacttcttttctgtggagcctgggataatggttttgaatcttccaattttatcctcttcctcatcaaacaagctaagaacagttttggttcttaggcttggttcctttgtcccatggggatgatgaagaaaataaatcagaatgcttgactgtttcctgagcagatctagtcaaaagtccttccttttctgactcagccacatcagttctcccaaattttaatgactccttggcactctcaaccttcttatccacagacttcactccaagttgtgcctccttctcttcttcatcgctgaacagcaaaggtggtgcctcagagacagtctcttttttctttgttgcaggaggaacagatgtgggaggagagccaaacagagagcctccgctatcaacatcgtcttcaaagaggagtgacactctctgggtcttcttttggctgtccttggcaatggcaaaaagatcatcttcttcgtcttcctcaaagagactggtctttttcacagccttggcctcctggctctggagggtcccagaatccctgggttctcctttagacctgctgtcagatgctaagtgggtctgtgaagcaggaatattccactggtcctcctcatcactgctgaacaacagggcagatgctttctttttggagagctcggaggcttttgctttctcttctctctgagcttgtagacacaatgtctgcttcttagcagctgtacccccaaaaagattatcctcttcatcttcatcatcaaacagggaaaccgacgtggggagcttgccaggcagcagagatgcaccttttaagttactcgccctttgagaagaaaacaaatcctcagagtcctcctcatctgaaaataagcctttttgagtctttgtttctgatgagggcttgagatttttgctggaagataaggtaacctttttttctgctcttgctttattttcatctgtctgactcacagtggcttctggcgatgctacggctttttctttgaacagatctccttcttcgtcaccaaagatatcggcagtggattggactttgcgtgttttagaaggtttgctgtggggtgccgagaaaaagtcgtcatcatcatcaccatcatcatcatcaaagaggccagtgggagggggaccataggggcttttccttggagtgggctgctcaggcttctgtggctccttcagtgatggaacggaggcagcaccaaacacatccgtgtctcctaaaaatacagaaacagctcctgctgggattttctttccaggtttggatgatgaagactcctccttaacagaggctccagcttgccgatcctggggggcttccgtgaagaggtcactctcctcgtcctcatcatcaaagagccccttgcccccactgaacaggccacctccagagccaaatggcgagaagtcctcgtcggtcagcttggggggtgcgaataagttatcctcttcatcgtctgaaggagttctcctttccttcttctctttgagtgtcttccgaggttttgcttctcctgagggtaaggttgtcggctcctcgtccactcgacccatggcatcccccttgatgcgggcagccagctcatctgcaaacgatgtaggtctgcttcttttaggtctagtattttcttcaatgtcctcaatatcttcctcctccttctcagagtcagcaaaaaggtcacagccatcatcatcctcttcctcatcactcatttgtgtggtgtgctggttttgttcattgtcactgtgatgggcaaaatcttcatctgactcctcctcttctttctcttcctcagtgtccacaatactgccacgatcactgcctacagagccttcttcactggacagctctccaagacctacatcttcttgttccatgaacagctttgacccaatgagatatggtaaaggacgatcaatgtatagatcctttggttcaaggatcagttccacccgcccattagcatcatcttcctcggagtctgagtttcctgctttgatatcaagttgctcaaaggcactgtccaatacttgtaagccatagttcacagcctcctggactttaggaatgagatctacttctttctgctctcgtgtcttctcctgctctgttttttctgcctcagccttgagtactggctcctccacttcttcatcatatacacgattctcaatgaactgggtattagagagcataaggaagtcattgaagacattatgcaggcgacaatctgtggctttggtttcccgaattagtccgtccacttgtttcttgatttcatgggtcctagagatagtttgctgtgagaattcctgtagaaactgtagtaggcccgcgtcggccgccagcgaccagctctggctgctcctgcggatctcctccatcgaccacggccgctcccacacgggctccgacgctggcgccagctcctggtcgggggtcgtccggttcatcatcctagccgcccggctcggtgggctccgaagctgccagcacacgccgaggactgcagagccccggaagcctagccccagccaagctgcccggggcgtgac

SEQ ID NO: 66006 - DNA, 1979 bp, Homo sapiens
  misc_feature (1)...(1979): n = a,t,c or g
ggttttttttttccttttcctcttttttttggaaaatactctgtttattaaagaccaggcgggtgggaggtaaggttgtgggttctgtatgggaaactgagtcccagccccagggagggagaaggaggacggaccagctggcagcctgcgagaaggtcaaaggtcattggccggaccccattcatagcggtcttcatgggaggactccgcatcatggactcgcgtaaactttttcttcagggcttcccgttcataggttcgcatgctgtcctgtcgccactgtccctgggggtggcggctgtccacctgggggcccctttatgatccgagaattctcccacgatccgctcgggctttggggacttatctgcctgcacgggctccgagggaccgggccagggctggagccgggggctcatcatccacatccgtgtaaggcccccccctcgcccgtctgtgtaaccctcgcccatccgtgtaacgcgccgcccctcgccgtccgtcctccgtaatcgctgttaaacgcggctgtcgcagctgaggtcagcggagctgtcggcccaggccgtggtgagggaggtctaggttgtcctccaaggagccatccagctgatcttccgccgtccagatgggccgcgtctgctgctctcgaatgatggccttgagctcctggtaccaggtgtcactcgtgccattcagagggatggtggctgtgaagaggtggctgctgtgttttcgcagcttctgggcttgtgcgtagaggcgacgggtgctgcggcgggaggcaggcgccagccactggcgcagtgccttgagggccggccggctctcggggatgaagaagaccacaatggggtagtactgcacatagttgaggcgctcgatggcggagggggtcacatccaggagcgcatgcttgtctttttctgcaatcacccgcacggtgtctagtttgatgatcttggaggggctgtcggtcctggacacagtctctgcgatttcaaactggtcaggcatctcagcagtcaacttctgcatagcaatgtcggccacgggtcccaggatcactaccgggcgcttgaaactggcttctcgcaacaccactcgttcgtagggcgggtagcggccctgtcgggtcagagctgagaggtcctcacggctccgctgagtggtcttcttggctcctcgacgcagaccccgcagccgccagaactcggcccgagcattggagcccgcggaggagccgggcccgactcccacggccctctgggcagcttccaggctggccagctgctccgccctgctctggttgggaatgatgcaccgctcttgctcccgcaggtcacgacccatgcgcaccgccagccagtggcctcctcgtgcgtggctctgcccggggccggggtgcagcgtgtccagcacgtggaagacgtcgccacgggtgaagcccaggccagacggcggactgggctccagctcaaagtgagtgcggatgtagaaggagtcacccacgcgggactgcaccattttccagaaaatgtcctgcttccgctgcgtcaccagctccatctcctcgcctggtggcagccccagcaggaactgcactgcctcctcccgtgtcaggttctggaatggcacgtcattcacctgcagaatctgatctccctcctggatgccctgcccgtcggccgggctgcccgcctgcaccccggacacgaagatgcccacgtcattgccccctgccagccgcagcccgatgctcttgcccttgaggaagcggaccacacgcgtgtcggggctgtacccacgatcctccatgctctgactgctgggcactctgtagatgtcatagctgctttccctgggcaactctgaaagggaaaagccagtctctttcccaagcacactggctcagtccagcctccnnncctgtgnttgcgacgactctctatgcntcaaggnntgataactnnggcacc

SEQ ID NO: 66007 - DNA, 3067 bp, Homo sapiens
ttttttttttttgagatggagtctcgctctgtcgcccaggctggagtgcagtggtgcgatctcggctcactgcaagctccgcctcccgggttcacgccattctcctgcctcagcctcccaagtagctgggactacaggcgcccgccaccacgcccggctaattttttgtatttttagtagagacggggtttcactgtgttagccaggatggtctcgatctcctgacctcgtgatccgcccgcctcggcctcccaaagtgctgggattacaggcgtgagccaccgcgcccggctgcaaataatctttctttttttctttttttctgagacagagtctcgctctgttgcccaggctggagtgcagtggcgggatctcggctcacggcacgctccgcctcccgggttcacgccattctcctgcctcagcttcccgagtagctgggactacaggggcccgccaccacgcccggctaatttttttgtatttttagtagagacggggtttcaccgttttagccgggatggtctcgatctcctgacctcgtgatccgcccgcctcggcctcccaaagtgctgggattacaggcgtgagccaccgcgcccggcctatttttagttttaaacaaaaaagtttaagaagtaaaaaaaaaacatgttttgttgtcgttttctttgagagggagtttagcattgatgcccatgctggagtacaggggcatgatctcagtttactgcatcatcctgcctccgagttcaagagatttctctgcctcagcctcctgagtagctaggattacaggctcctgccaccacaccccacacattttttgtatttttagtagagaacgggaattcgccatgttggccaggctggtcttgaactcctgatctcaggtgatccgcccgcctcggcctccctaagtgttgggactacaggcgtgagccaccatgcctggccccaaccagaacacttctgagcgtggaagaggatgctgttaattactcaagaccaaaaggcataaaaggagacatatgtccacccaagtgataaggcagtttgggaaactacatttcccagtatgccctgccccttgaaagttaaaaatcttaactggcacagagcaccctgggacacctgtggttagcaccatttaagaagtaaaaggtatagggttgggttctgacgtgaaggctttccccttccatgggacacttaaccagacacaggacacaacacctgaggtgaaatttcaatgggtattaagtctggggtagagcttctctctccccaaatctagcttccaaagatgtggagctggtggagctgtccattggtccactgccctgtttctcctgggtgctgcctctgcctcctcatatcaccagcgtccccactgccactagtctgtagggggattccgggctaggtgctcttcccactcgacttcaaccaacttatatagctccatggtggcctgggcatcttccacagaggaatgtccgctcttcccaacctggatatcccggtttagcagcttcttggtgagatgcttcagagacatggtggcattctccgggcagtcagccttccggttgaggggggggatatgggaggtgtcacgggtgagggacttggggtgaaagtactgaagggctttgaagtcgttgtggatggcatgccccaccactatcttccctgtgagtatcttcaagatctctccatccttgaaatgctcactcccacaagttttctttcttctggaatccaccttcctcttccacaggtgatttccatggtataccctgtttggactcatactgccagtggctccttaccttcttattgatctccaccccatgacattaatttgccttcagtcctaaatgacactcatgtttgagatgtccatgtatttagttcagttctggcttgctacatgaagtcctttaactattaccattatgttggccttagacacatggctgggacccgggctccagggaggctaacaaaagcccaaaattacatgcaattagatgtgtatgggtactagaggaagagaatctgtggctttcatcaaattctcagagtctacaaaccgtaaaaaattaagaatcacatataaactaaagttgcagaagcaaccttattcacactagttttggaaccaagtaaaataaaaataacttctcaatatttcaggaaactgttttttttttttgagatggagtctcgctctgtcgcccaggctggagtgcagtggtgcgatctcggctcactgcaagctccgcctcccaggttcacgccattctcctgcctcagcctcccaagtagctgggactacaggcgcctgccaccgcgcccggctaattttttgtatttttagtagagacggggtttcaccgtgttagccaggatggtttcgatctcctgaccttgtgatccgcccgccttggcctcccaaagtgctgggattacaggcatgagccaccacgcccaggaaattattgtagttttagtagagacaagatttcaccatgttggccaggctggtctcaaactcctgacttcaggtgatccgcctaccttggcctccaaaagtgctgggattacaggcatgagctactgcacccggcctaaccaggctggagtgcagtggtgggatctcggctcactgcaagctccgcctcccgggttctcaccattctcctgcctcagcctcccgagtagctgggactacaggcgcccaccaccacgcccggctaattttttgtattttttagtagagacggggtttcaccatgttagccaggatggtctcgatctcctgacctcgtgatccgcccgcctgggcctcccaaagtgttgggattacaggcgtgagccaccgcgcccggccagcagcttcatttattaggggcttcggtgagggtggggaaaggcagcgccagggtcagaggcgccgaaagaagagcttggagccgtggtccagcgtgcactcgccggggcccggccgactgggctgcagctggcgcagggcgtccctgtcctcagcgcagaggcgtct

SEQ ID NO: 66008 - DNA, 2449 bp, Homo sapiens
  misc_feature (1)...(2449): n = a,t,c or g
ttttttttttttatagaaccgagataaacctttttatttatttatgcttctccattttgtttaaaacaacaacaacaaccaccttaatgtaactgacagcccttccccctcaccctgcctcgggctgggggatagttaatcggggaaatggccccccagggtgggggctgagccagaagagcccctcaaggagctcatggagcccaaattcccctgccctggggaggggacctgttagttgtgtgaacgggaagcctctcccgaagcctctgcttgtaccatcaaatgatgcccttggtcaacaagggtcatgaagcatgggggaggggggatttcggcctccctctggtccctacccagcccaatctcacgaagcaggggctggggggggtttaaaagagggtggaacgggttggggttggctcacaccgaagggagtcactgttgttaaatggcccctggggtggcccccttcctctccatcacccccctagtggtgactgctgcagctgcaccaattgggggcacccccgcgtccccaccaggacccaggcgcccttgggcctcttgagcctggggcctatggccctctcccaattcacccaccgggaccagctaaaccacggggaccagcctcttccgggacccctccacccgcccgctttctctttctcttgcctctctttggctgctgcggctgcctnttgcccgccacttcctggcgcccctcgacgcctctttcttccccaggctgtgggggatctgtccatgaagggggttcagggggctggggtgggtcatgggaggtggtcggttacacagtcactcgctccgaagggcatgagggtgcaggaggcattcggggtggcatccatctccctcgcacacccccgcatggctcccagcctgctcccggcctcacttcttgggtgcacgggcacctcctcccctgcagacctgctctgctcaccctgctgtcgctgggaggatgggacatagctgacaaggacaacatcactggagcctcccgactccaaagggatggggtgcacccggaagtgctcgagcatatcgaaaatggactggaaccacaggtgctggacccggcactgaccctcctcgttcagcgacaaacgcaggtgcttggccttgccctggaagttgaaggtgaggacgtattcaccccgcccttgtctcaactctggcgcacccagaaagaacaccgtgggagccagtgccgccagtcagcaccaactgtgcaacccttgagccgaagagagcatcccgtggaaccaaggaataccctgaagaggggctggtccccctcaaccgccctctggctcccccctggaacaggaaggaccctgtggctgtttccggagtgtccaagggagggtagggggctgagaggggatgaactgtccctgctgggggtccctcttcaatggggatgcgggggggcaactctgggggaagcagttccatcgagtcaaaatgggaggcggcaatggaggcagagctgggggagatggatgccgaggggcggtctgagaggcccccatatgccccctgcgacaggcggtcattgctctcgctgggtccaagcagcaggtcctggctgggtagactctccgagtgattcaggcaggacagctccaggctgtctgtgttctcccttgtaaggaatgaggtcccaggggccagagggagggtcatggggcggggactggtagcagggcagggtcctgggctcaggcattcttggatgtcagacacccaggccttcacatgctgggcatccactgtctccatgatatactcggatggaccttccaccttaaccacaaacgtgttctcccggtcaggcatctccagggctgtggttgtccggacgtctgtgatagaagagcaggggatgctgagtcggggccgagaggccttgggtggtacaaagaactccaggcgacttcctcctcctccttctccttcacttcgaagcagcaggcgacacttctgccactgaggctgccctcctccccctgaaggaggcccagccacccctcctccccggcccactccggctgggtcaggggctgcctcctcagcccccatgaaactcagcagctcttccctctgcaccatccctgctccatccttcaaggcgccccctccccgactgagtctcagcctctcaaaacggtgagtccatctttccccaggggacgttccatcactgaccagtcccctaccaacggtcccagccccgccagaggagttggagttgctgtttccacctaagactggggggcctgacgaggtctccaggggcccagcggaggagggagggtcaacggtcccccgccactgcaggatgccacggactgagcctcggacagagcgacccactgaacgcagggaaaagcgcttcttgagcttcggcttggaggag

SEQ ID NO: 66009 - DNA, 857 bp, Homo sapiens
aaataccagcttcgaaggacaggtggaacaaagttcctcaaaaacttggacactggccaccccgtcttcttttgtaacgattgtgcgtcccaaatcaggactccttccacgtacatcagtcacctagagtcacacttaggcttccggctacgggacttatccaaactgtccaccgaacagattaacagtcagatagcacaaaccaagtcaccgtcagaaaaaatggtgacgtcctcccccgaggaagacctggggacttcctatcagtgcaaactttgcaatcggacctttgccagcaagcacgctgttaaacttcaccttagcaaaacacacgggaaatctccggaagaccaccttctgtatgtctctgagttagagaagcagtagcatttgcttttgatagaaaggactgcagtttgctttgagggaaactgtggaaggcaccttcaggccccctctgacttgttgttcttggcacatgttcttattttaactgcagagaatcactctgggctggactgttttgtataactgtacagtgtttaatagaggtgcataatcagctgttgttactggtaaaatatgaaggttaaaatgcagtggtaagtgtttggaactttgtgtaaacgggatttagttgtgagcatcctcccgatgcttcaagctgcatgcattaacagacagtttaattaagcatttataacggaatcaggcacaccttttccacgagactcgagtgtgctggcatttctcaccctttcatctttagccctctgagtactttgaagcacttttgcattaatttggttaaaaaataaaataaaataataataatgtatgaagctctgttttttaaa

SEQ ID NO: 66010 - DNA, 1364 bp, Homo sapiens
ggaaaaacaaacgccctttgagaagacggggactcgccaggatacccctctctcccctcatccagcctccagcccacccaattcctccccacctcctccacctccccaggccccacctacctcctccaactcctccggggaaacccaagccctgccgctcatggaacagaagaactggaaccgtcgtttctggaacaggactatctgagagcggttcttcctggccctcgagttcatggaacggtataactggaaccgacgcttacggagcaagggtatgcgagagcggttcttcctggccctcgggttcgtggaacggtataactggaaccgacgcttacggagcaagggtatgcgagagcggttcttcctggccctcgggttcatggaatggcctaactggaaccaacgcttacggagcaagggtatgcgagagcggttcttcccatacaggaagtagaagatgttttgtttggagtcctcgtcgtcctcctccatgtcattggccaggtagctgaggacagaaatcaggttgctgctcaggggcaccaccaggagaggcctccggctgaggtcagcttcccagagaggaaggtaagggaccgtccctagctcaggactggcacccaccctgcagagagccacgccttcctcaggagggctctgctggacagagacctgatcaagggcgtctcccactccttcaggatggagacaaaaacccaactggtggccgagagtggtggcttacgcctggaatcccagcacactgggaggccaaagcaggaggatcacttgaggccaggagtttgagacgggcctgggcaacatagcaagaccctcgtctctattaaaaatgtaagaaatatgccagacgcggtggctcatgcctgtaatcccagcactttagaaggctgaagcaggtggatcgcttgagaccaggagttggagaccagcctggtcaacacggagaaaccccatctctactaaaaatacaaaaatgagcctggtgcggtggcacacccgttaggcctagctactcaggaggctgaagcacaagaattgtgtgaacccaggaggcggaggttgcagtgagttgagattgggccactccattccagcctgagaggcagaacaagactctgtctcaataaacaaacaaacaaacaaacaaactgtccaggtgtggtggcacagccctgtagtcggagctaataaagaagctgaggtgggaggatcgcttgagcccaggatatggaggctgcggtgagctatgatctcaccactggcactccagcttgggggacagggcaagtctgtctcaaaaaaataaaagaaattgaatacattgaaaaaaaaaaaaa

SEQ ID NO: 66011 - DNA, 585 bp, Homo sapiens
tggctcatgcctgtgatcctagcactttgggaggctgaggcgggcggatcacgaggtcaggagatcgagaccatcctggctaacacggtgaaacccgtctctactaaaaaatacaaaaagttagctgggcgtggtggcaggccctgtagtcccagctactcgggaagctgaggcaggagagtggtgtgaacccgggaggcggagcttgcagtgagccgagatggcgccactgcactccagcctgggcgacagagcgagattccgtctcaaacaagaaaaaaagaaaatgttctaggccgggtacagtggctcacgcctgtaatcccagcactttgggaggccgaggcgggcggatcacgaggtcaggagatcgagaccatcctggctaacacggtgaaaccccgtctctactaaaaatacaaaaaattagccgggcgtggtggcgggcgcctgtagtcccagctactcgggaggctgaggcaggagaatggcgtgaacccgggaggcagagcttgcagtgagccgagatcgcgccactgcactccagcctgggcaacagagcaagactccgtctcaaaaaaaaaa

SEQ ID NO: 66012 - DNA, 643 bp, Homo sapiens
  misc_feature (1)...(643): n = a,t,c or g
cgagattattatgtaatggtaaaaggatcaattccacagaaaaatataaaaattataaatatatacgcaccccacatgagactacattaatatgtaaagcaaataatgacagttctgacgacagaaattgacagcactagtaggagacttcaataccccccttacaataatagaatatccaggcagaaaatgaataaagaaacagctgatttgaacaagcacacacggaacattctgtaggatagatcatatgttagttcacaaaacgagtttaaacaaacctaagaagatagaaatcattccacgtattttttctaaccacagtggaataaaactagaaatcagtaacagcaagaaaaccataaaatttgtggaaatttaaacacagtcttgaataatcattgagtcaagaaggaaatcaaaagggaatcttaacagtatcttcagacaaaaaggaaaacatagcatactacaacctatgggatgaagcaaaggcagtactaagagagaagtttctagagataaacaatactacattnnnnnnnnnnnnnnnnggatttcatttttccttcggggaaccagtaaaaaaacaccaccctaagcctagtgtttgcttattgaaaaaaatattaggaattagggg

SEQ ID NO: 66013 - DNA, 995 bp, Homo sapiens
cccacgcgtacggtgcggggcaccccatttgacagctgctcctacctgtgctcacacacaggcaacaggtccaagttcagcatggcggatgaagacgcacggcagaacccctacccagtgaaggccatggaggtggtcaacagcggctctgaggtctggtacagcaatgggccgggcctccttgtcatcgactgtgcctccctggagatctgcaggcggctggagccctacatggccccctccatggttacgtcagtcgtgtgcagctctgagggcagaggggaggaggtcgtctggtgcctggatgacaaggccaactccttggtgatgtaccactccaccacctaccagctgtgtgcccggtacttctgcggggtccccagccccctcagggacatgtttcccgtgcggcccttggacacggaacccccggcagccagccacacggccaacccaaaggtgcctgagggggactccatcgcggacgtgagcatcatgtacagtgaggagctgggcacgcagatcctgatccaccaggaatcactcactgactactgctccatgtcctcctactcctcatccccaccccgccaggctgccaggtccccctcaagcctccccagctccccagcaaggtcttccagtgtgcctttctccactgactgcgaggactcagacatgctacatacgcccggtgctgcctccgacaggtctgagcatgacctgacccccatggacggggagaccttcagccagcacctgcaggccgggaagatcctcgccgtcagagacctcatttgggtccccaggcgcggtggagatgttatcgtcattggcctggagaaggattctggcgcccagcggggccgagtcattgccgccttaaaagcccgagagctgactccgcatggggtgctggtggatgctgcccgggaggcaaaggacacttgtgtgtgcaacctttgaaaaagaaaacacagaggggtgccttgccg

SEQ ID NO: 66014 - DNA, 2717 bp, Homo sapiens
gattcttaacatatttaatgaaactcgagcttcataaaccagtgaaatgcctacccctatggagacggggagctggtcatgggacccaggtgcctggaggacatcccagtggctttgaaggctccagccagtcaagacggtcaatattagcccttctgccaacatctggcaatgtgaggacgaaggcatcaggtgcagcctgcatggaggagtttccagggcagtttgggccccacccacgactggggcaggcggtacaccagtgacgcacctccatagaataccaccatgccagcaaccataagcactgggtgccagttgaacatgtagatgctgccattccaggcaaagccaccacgccagtactgcatccagtagatagtgaagaggatgcacatagagcccagggaccccagcagcaggcaggacaagtagaaccgtccagacaccattctgatcacgcactcctttagccctaatgataggctcagagaactggcctgggctccaattcctgcgaaatgggcaccttgagcaaatcacttaacatttgcaggactcacccctaaccacagtgggacgaagtgaggccgggatctccggaacccgcctctcgctaccaggcgccggagctgccgctcccgaggttcctaggagatgcagaagacactgccctgaatgcctacagccggctggcaatgccgccccagagcagagcggcgggtgccgcctcgccttcttataggctcgcagcacttccagtcgcgcgcgaggcctcctgggaagtgaagtccggagaccaggggtggccggctcccagcgcgccaagctgctaaccccctaactcccgttcctcctcggcgtttcttctccaagtccgaagtcagggtccaggactgctgcgatgcatcagccccgcctctcatcccccatccagaggaggcggaaatgttcaggtgaacgcgaagcctcccactacgagccggccctcagcaaggccgtgcgcagtgtgggcgggagccctaagtcagctagcggcgacgctgggagggcccggagcaggccgggccccgaacagcgaaagctccaacatggcggccagactggccatagagcgggaagagaaagccggggactagcaggccgcacggcgcagacggggcccgcctcctccatttacttccggaatttaaagccggcttccggaagccgggacgatgtccgcatgacaaccgacgttggagtttggaggtgcttgccttagagcaagggaaacagctctcattcaaaggaactagaagcctctccctcagtggtagggagacagccaggagcggttttctgggaactgtgggatgtgcccttgggggcccgagaaaacagaaggaagatgctccagaccagtaactacagcctggtgctctctctgcagttcctgctgctgtcctatgacctctttgtcaattccttctcagaactgctccaaaagactcctgtcatccagcttgtgctcttcatcatccaggatattgcagtcctcttcaacatcatcatcattttcctcatgttcttcaacaccttcgtcttccaggctggcctggtcaacctcctattccataagttcaaagggaccatcatcctgacagctgtgtactttgccctcagcatctcccttcatgtctgggtcatgaacttacgctggaaaaactccaacagcttcatatggacagatggacttcaaatgctgtttgtattccagagactagcagcagtgttgtactgctacttctataaacggacagccgtaagactaggcgatcctcacttctaccaggactctttgtggctgcgcaaggagttcatgcaagttcgaaggtgacctcttgtcacactgatggatacttttccttcctgatagaagccacatttgctgctttgcagggagagttggccctatgcatgggcaaacagctggactttccaaggaaggttcagactagctgtgttcagcattcaagaaggaagatcctccctcttgcacaattagagtgtccccatcggtctccagtgcggcatcccttccttgccttctacctctgttccaccccctttccttcctttcctctctgtaccattcattctccctgaccggcctttcttgccgagggttctgtggctcttacccttgtgaagcttttcctttagcctgggacagaaggacctcccagcccccaaaggatctcccagtgaccaaaggatgcgaagagtgatagttacgtgctcctgactgatcacaccgcagacatttagatttttatacccaaggcactttaaaaaaatgttttataaatagagaataaattgaattcttgttccataaatgggggagtctgtctgtctagctagatctcttcatgttaagaggcgtgccaaggtccagcttaacatctacttgacccagagggaagatggagccacagatgaaatacagatctttgttgagatccattatgagtacaaagtattttagcagaaattcaagatggaatctgatgctgcatcccccactcctggagctccagatgtgtgtgctctgttcagactctcttttcttatcagaagccttaactgccctcagaagaataaaaatattcccttagccagctttggcaaaagaaatttttaaaattcttatgtccgtagtatcagttttctat

SEQ ID NO: 66015 - DNA, 2694 bp, Homo sapiens
gctggacgcggaggcgctgggcgcacggcgcggagccggccggagctcgaggccggcggcggcgggagagcgacccgggcggcctcgtagcggggccccggatccccgagtggcggccggagcctcgaaaagagattctcagcgctgattttgagatgatgggcttgggaaacgggcgtcgcagcatgaagtcgccgcccctcgtgctggccgccctggtggcctgcatcatcgtcttgggcttcaactactggattgcgagctcccggagcgtggacctccagacacggatcatggagctggaaggcagggtccgcagggcggctgcagagagaggcgccgtggagctgaagaagaacgagttccagggagagctggagaagcagcgggagcagcttgacaaaatccagtccagccacaacttccagctggagagcgtcaacaagctgtaccaggacgaaaaggcggttttggtgaataacatcaccacaggtgagaggctcatccgagtgctgcaagaccagttaaagaccctgcagaggaattacggcaggctgcagcaggatgtcctccagtttcagaagaaccagaccaacctggagaggaagttctcctacgacctgagccagtgcatcaatcagatgaaggaggtgaaggaacagtgtgaggagcgaatagaagaggtcaccaaaaaggggaatgaagctgtagcttccagagacctgagtgaaaacaacgaccagagacagcagctccaagccctcagtgagcctcagcccaggctgcaggcagcaggcctgccacacacagaggtgccacaagggaagggaaacgtgcttggtaacagcaagtcccagacaccagcccccagttccgaagtggttttggattcaaagagacaagttgagaaagaggaaaccaatgagatccaggtggtgaatgaggagcctcagagggacaggctgccgcaggagccaggccgggagcaggtggtggaagacagacctgtaggtggaagaggcttcgggggagccggagaactgggccagaccccacaggtgcaggctgccctgtcagtgagccaggaaaatccagagatggagggccctgagcgagaccagcttgtcatccccgacggacaggaggaggagcaggaagctgccggggaagggagaaaccagcagaaactgagaggagaagatgactacaacatggatgaaaatgaagcagaatctgagacagacaagcaagcagccctggcagggaatgacagaaacatagatgtttttaatgttgaagatcagaaaagagacaccataaatttacttgatcagcgtgaaaagcggaatcatacactctgaattgaactggaatcacatatttcacaacagggccgaagagatgactataaaatgttcatgagggactgaatactgaaaactgtgaaatgtactaaataaaatgtacatctgaagatgattattgtgaaattttagtatgcactttgtgtaggaaaaaatggaatggtcttttaaacagcttttggggggtactttggaagtgtctaataaggtgtcacaatttttggtagtaggtatttcgtgagaagttcaacaccaaaactggaacatagttctccttcaagtgttggcgacagcggggcttcctgattctggaatataactttgtgtaaattaacagccacctatagaagagtccatctgctgtgaaggagagacagagaactctgggttccgtcgtcctgtccacgtgctgtaccaagtgctggtgccagcctgttacctgttctcactgaaaagtctggctaatgctcttgtgtagtcacttctgattctgacaatcaatcaatcaatggcctagagcactgactgttaacacaaacgtcacgagcaaagtagcaacagctttaagtctaaatacaaagctgttctgtgtgagaattttttaaaaggctacttgtataataacccttgtcatttttaatgtacaaaacgctattaagtggcttagaatttgaacatttgtggtctttatttactttgcttcgtgtgtgggcaaagcaacatcttccctaaatatatattaccaagaaaagcaagaagcagattaggtttttgacaaaacaaacaggccaaaagggggctgacctggagcagagcatggtgagaggcaaggcatgagagggcaagtttgttgtggacagatctgtgcctactttattactggagtaaaagaaaacaaagttcattgatgtcgaaggatatatacagtgttagaaattaggactgtttagaaaaacaggaatacaatggttgtttttatcatagtgtacacatttagcttgtggtaaatgactcacaaaactgattttaaaatcaagttaatgtgaattttgaaaattactacttaatcctaattcacaataacaatggcattaaggtttgacttgagttggttcttagtattatttatggtaaataggctcttaccacttgcaaataactggccacatcattaatgactgacttcccagtaaggctctctaaggggtaagtaggaggatccacaggatttgagatgctaaggccccagagatcgtttgatccaaccctcttattttcagaggggaaaatggggcctagaagttacagagcatctagctggtgcgctggc

SEQ ID NO: 66016 - DNA, 671 bp, Homo sapiens
  misc_feature (1)...(671): n = a,t,c or g
tttcgtcggccattttggtggctggggcatccttgacaaacttggcagcaactttggctgcctgggcagcggaggatgtggcagcggcgtatgctgcggcggcagcggcggcgatggcagcggtggttttcagccggtgaagggcagactggggagccttaggctgtgcttccttgggggccccatccttgccaactctatccttggggtccccatctttgccacctctatctttggggacatcatccttgtgagctctatccttggggtccacatccttgccacctctatctttggggacatcatccttgtgagctctatccttggggtccacatccttgccacctctatctttggggaccccatccttgcgagttctatccttgggggccccatccttgcgggccctctcccgaaggccccttaggctggggacatcattttcctccccctttacttggacagctgcgagctggagggcttctccctggcgagactgatatggctggagtggtcgaggccacaatgagccaaactcagtggctggtggtggggccctggagggttggggctgagttggccgcaggacacctaagtcccagaattccaccgcntggtctaatgatctacgaacctaatggtctacaatngggggggcgggggggggcggg

SEQ ID NO: 66017 - DNA, 508 bp, Homo sapiens
tttcgtgccgccatctgctggcggctgcgctcactgcacgccttcgtctccctagaccggtaccgggagtaccagtggatcggactcaacgacaggaccatcgaaggcgacttcttgtggtcggatggcgtccccctgtgtcctgtgggccgccaccggagctgcccctggctcaagtgttcggccgcccacggctgcgctatgaggtggacactgtgcttcgctaccggtgccgggaaggactggcccagcgcaatctgccgctgatccgatgccaagagaacggtcgttgggaggccccccagatctcctgtgtgcccagaagacctgtgagtgccaggaagaggcaggtgggagtgggagacagtagccaacagtagccttggactccacttaaagtcctgcctgtcactggccatgtgaccttggagccatcactgcccctctctgaggcaaaggggaagaggtgggctggaggctctggggttccttcagtgctgatgtctga

SEQ ID NO: 66018 - DNA, 820 bp, Homo sapiens
ctgtgccgacgccaggagaccccaagctgcatcgccgagtggaagcaactagaactccagggctgtgaaagccacaggtgggggctgagcgaggcgtggcctcaggagcggaggacccccccactctccctcgagcgccgcagtccaccgtagcgggtggagcccgccttggtgcgcagttggaaaacctcggagccccgctggatctcctggctgccacccgcaccccccgccagcctacggtgcgcccgcgggcccagcttctctctgcgctgctccccgttaaattccctggggagacggaaaaaaaggcaaaggaagtcggttctccaggggccagaagtgttgagcctaattagtcttcagacttctcaatgaggaatcgcttatcagtttcttatctgggagagttgaggatggagggacagaaggcacccaggatttgcacggggggggattcagggagagagggtgatgagggacggggtgggccttccagtcttggcccagtccccatcttgcacacattgttggcttcctcttagagccgttcgcccccctggggaggggagacccatagtgacctctcctgacacccgccgaccctgaccagtgttgccgggttcttcaaaggccacgctctgactgctggtctgtgtcacctgcaccccccagccccaccgtagagatgccttcttcggtgacggcgctgggtcaggccaggtcctctggccccgggatggccccgagcgcctgctgctgctcccctgcggccctgcagaggaggctgcccatcctggcgtggctgcccagctactcc

SEQ ID NO: 66019 - DNA, 714 bp, Homo sapiens
cccagctggcaggcggctgtgtccctgtagaagggatgctccatccagcctgctactccggagctcgcgcccacagcgagggccctcgcagctctatctggggactctggtaccagttagcacttcttgttcttgtcatggggccagccaggccctctctgaggtggcacctaccgcctcccaggcctggtgggagggtgggccctgccgtcacaggcagacctggctaggatacttccagcctgggattcgcctctgaagaggcagcagctgctagtggaggtttcttagacaaggacgcaggatggggcaggagaggggaggggcatgggtctgggacaaatgatggcagtgccagcactgcatctcccattgtgcagggagtagcccgccctggaagtagggttgggggtgaagcgtgttggaagatgtgggagaggtgtgattccagtaatgagtcttataacttgggagcagccacgcgtcacccaggcagaaggacctggtgggagagctgcccgggggagtgaggacaggtgcagactgggtggaaggtgggtggggagaacaaccccagctggacagggggtttcccctagagccacagtcccacctgccccatgaagacctgggagcaactaaatctgggctctgcgggcgaggggtggggctggggcccctatgcctcctgtcactagacctgcctgtcctgcc

SEQ ID NO: 66020 - DNA, 354 bp, Homo sapiens
caggaggaggaaaaggaaacaaccaggccagtcatggtgtctcgtgcctacgaggaggaggaggaagcggaggaggggaaaaaaaaggaggaggaaaaagaaacggagcacaaggagttggaggaggaggaggtggaggaggaggagggaaaagaaatggagcaggaggaggagggaaaagaaatggaagaggaggagcaggaggaaaatgaaatggaggaggaggaggaggaaaaagaaatggaggaggaaaaataaacaggaggaggaataagaaacggaggaggaagaggaggaggaggacaaagaaacagccagggccgacgtggaggctcacccctgaagtccagctgg

SEQ ID NO: 66021 - DNA, 644 bp, Homo sapiens
  misc_feature (1)...(644): n = a,t,c or g
atcaatggaacaaaatagacaatctagaaatagagccacacaaacatgaacaacttgtttttgacaaaggtgcaaaggcaattcattagagaaaggatagtcctttcaacaaataatagtggaataattggactgtatgctaaaaatatgaatccagagctaaagcttatacctttaacaaaaattaactcaaaatgattaatacatctaaatacaaaatgaaaagctgtaaaactttaaaaaacaaaaatacattcatgatctggatttaggcaacaagttcttaagacaccaaagcatagtacatttttaagaattggtaaattggattttatcaaaattaaaaacttttgctctaaaaatacacaattaagagaataaaaaagacaagcaacagtctaggagaaaatatttccaaatcacatatcagacaaataacnnnnnnnnnnnnnnnnnnnnnnnnnnnnnnnnnnnnnnnnnnnnnnnnnnnnnnnnnnnnnnnnnnnnnnnnnnnnnnnnnnnnnnnnnnnnnnnnnnnnnnnnnnnnnnnnnnnnnnnnnnnnnnnnnnnnnnnnnnnnnnnagtgcctttcggacgcgtgagtcgacttggcaaaaccggaccgggtcgttccgaaggaagta

SEQ ID NO: 66022 - DNA, 2306 bp, Homo sapiens
gcggtggaattctgagggtcttcacttcggtgaactgaacccttgaagcggctgtgggcagggcagcagggctatggccaccccccaggttcgcctttgccgacgcaagagcccaactgccctcctgggtgcgtccccacgtcagggtgtatgacaactttggccatgtcatccgagacgtggcccagttcttccgtgttgccgagcgaactttctgcagatgccagcgccggccccccgggctacagcacccagtgtgcgtggagaagatgctgtcagcgaggccaagtcgcctggccccttcttctccaccaggaaagctaagagtctggacctgcatgtccccagcctgaagcagaggtcctcagggtcaccagctgccggggaccccgagagtagcctgtgtgtggagtatgagcaggagccagttcctgcccggcagaggcccagggggctgctggccgccctggagcacagcgaacagcgggcggggagccccggcgaggagcaggcccacagctgctccaccctgtccctcctgtctgagaagaggccggcagaagaaccgcgaggagggaggaagaagatccggctggtcagccacccggaggagcccgtggctggtgcacagacggacagggccaagctcttcatggtggccgtgaagcaggagttgagccaagccaactttgccaccttcacccaggccctgcaggactacaagggttccgatgacttcgccgccctggccgcctgtctcggccccctctttgctgaggaccccaagaagcacaacctgctccaaggcttctaccagtttgtgcggccccaccataagcagcagtttgaggaggtctgtatccagctgacaggacgaggctgtggctatcggcctgagcacagcattccccgaaggcagcgggcacagccggtcctggaccccactgggaactttccagatgctctcgaccagctttgtggctctacatctcttcatcaggaagaacggcgccggatcccaagctgaccgtgtccacggctgcagcccagcagctggacccccaagagcacctgaaccagggcaggccccacctgtcgcccaggccacccccaacaggagaccctggcagccacccacagtgggggtctggagtgcccagagcagggaagcagggccagcacgccgtgagcgcctacctggctgatgcccgcagggccctggggtccgcgggctgtagccaactcttggcagcgctgacagcctataagcaagacgacgacctcgacaaggtgctggctgtgttggccgccctgaccactgcaaagccagaggacttccccctgctgcacaggttcagcatgtttgtgcgtccacaccacaagcagcgcttctcacagacgtgcacagacctgaccggccggccctacccgggcatggagccaccgggaccccaggaggagaggcttgccgtgcctcctgtgcttacccacagggctccccaaccaggcccctcacggtccgagaagaccgggaagacccagagcaagatctcgtccttccttagacagaggccagcagggactgtgggggcgggcggtgaggatgcaggtcccagccagtcctcaggacctccccacgggcctgcagcatctgagtggggtgagcctcatgggagagacatcgctgggcagcaggccacgggagctccgggcgggcccctctcagcaggctgtgtgtgccagggctgtggggcagaggacgtggtgcccttccagtgccctgcctgtgacttccagcgctgccaagcctgctggcaacggcaccttcaggcctctaggatgtgcccagcctgccacaccgcctccaggaagcagagcgtcatgcaggtcttctggccagagccccagtgagtgcccacggaggcccccagcacacccaacgtggcttgatcacctgcctgtccagctctggtgggccaagaacccacccaacagaataggccagcccatgccagccggcttggcccgctgcaggcctcaggcaggcggggcccatggttggtccctgcggtgggaccggatctgggcctgcctctgagaagccctgagctaccttggggtctggggtgggtttctgggaaagtgcttccccagaacttccctggctcctggcctgtgagtggtgccacaggggcaccccagctgagcccctcaccgggaaggaggagacccccgtgggcacgtgtccacttttaatcaggggacagggctctctaataaagctgctggcagtgccaaaaaaaaaa

SEQ ID NO: 66023 - DNA, 1393 bp, Homo sapiens
aaattagaagcagtagatctcatggagccacgtttaatatgtgtagccacagtaactcgaattattcatcgtctcttgaggatacattttgatggatgggaagaagagtatgatcagtgggtagactgtgagtcacctgacctctatcctgtagggtggtgtcagttaactggatatcaactacagcctccagcatcacagtgtaagttggtatacagaaaaggtgtccttttgtaaaaatcagcaattctccagaggactatctcacataagtcatcttatgagctcacaggacaagaatatacctatgtctgattggttgccaggtaagacattaagactcaacaacaatatcacagaatcagaccatgtgtcccatggcaatgtgaatccaatagtcaattacataatgactatagaaacacaacagtcaccaaattaaactagacttactattttagtgagttaaaaattacatactaaaagtttattggtaggtaataaatgcttttgagtaaatagtggaaaatgtctcatgttgaggctatggttttgtaggaacaagtacccttattttcagagcatcatgtacttaagtataatggtcttggtaaagatagttcatataagttgtatctagacaactgtatcgtctaaattgtaaacaattatctagtaccaattttccctttttatttttcagcatcaagagaaaaccaatcagcttcatcaaaacagaagaaaaaggctaagtcccagcaatacaaaggacataagaaaagtgggtcaccacgtggtgttcacatacattttctaattgttaactaattggagtcacagtattcttggacagaaaatgatatatcttgtgagaactgatgattgtgcattatgtattatgcttaaaggtgcagtatgccataaaaggcaaacccttgcaataatgagaaacactgatattttactaacaggagaaattattaccacagtatttaaagtatacgtggtaaagaatagagtctgtgaatgattcttgaaataatatgtaaaacctactgaaagttaatcctttttaaaaactttatttaaaaagaaaaattagcagccaggtgcagtggctcacgcctgtaatcccagcactttaggaggccgaggctggcagatcacaaggtcaggagatcgagaccatcctggctaacacggtgaaaccctgtctccaccaaaaatacaaaaaatctgccgggcgtggtggcacacgcctgaagtcccagctactcaggaggctgaggcaagagaatcacttgaacccaggaggcagaggttgcagtgagccaagatcacgccactacattccagctgggcaacacagcaagactctgtctcaaaaaaaaaa

SEQ ID NO: 66024 - DNA, 904 bp, Homo sapiens
tgtcctgacaaggctgtaaagttgaagtgtaacacaaaggttaggtgcccaactcctgattttgaggaccttcctgagagataccagaaccacctctcagaacacaagtctccaaaactcttaacagtgtgtaaaccatttggtcttcatgcatctccacatgcatctattaaaagagaaaaaattttggcagacatcgaagcagatgaagaaaatttaaaagaaacacgttggccttatttgtctccaaggcgtaagtcaccagtaagatgtgcaggtgtaaaccctgtgccttgtaactgcaaccctcccgtgcccacggtatcttccagaggacgagaacaagccgtaagaaagagcgaaaaggaaaggatgagagaataccaacgagaactagaagaaagagaagaaaaattaaaaaagaggccactgctatttgaaagagttgctcagaaaaatgcaagaatggcagcagaaaagcattattctaataccctaaaagcactaggaatatctgatgagtttgtttcaaagaaaggccaaagtggaaaagtacttgagtacttcaacaatcaagagacgaaaagtgtcactgaagacaaagaaagctttaatgaagaagaaaaaatagaagaaagagagaatggggaagaaaattattttattgataccaacagccaggattcttacaaggaaaaagatgaagccaatgaggaaagtgaagaagagaaatctgttgaagaatcacactgaatcatcaaggtctcctctctatgcccttgctgttgtttgcagcgtcagggtgtcagcagccgcatttgtgtttagaacatctgtggggacgcttctgatatgtgcagggctgttgatcaaagtcatctgtagcctgaaaagccttgatcca

SEQ ID NO: 66025 - DNA, 1595 bp, Homo sapiens
  misc_feature (1)...(1595): n = a,t,c or g
ttttttttttttctttaaaaccatttacttacaaactttaattcagcaaaggtccgtgtggggagactggggtggggtcgggggaatagtccccttggagtggatgtggacccccagagtcaagggagggaagctggtggcccagttggctgggggcaaggcccagggtcacctcaggtcgacaggtcctgctggtgggcgggcccagagtttatcttcatggagtgctggtttctggcactgggctggaaggaggccagctccagggatctggccgggggtgggcaggcagaattcaagaattcatcttcaacaagcgagtgacagcagaggctccgggagatgggcacaatgtccgactcccacagacagacagcaggggactggcagagaaagcccatctctgcacggaggcccgggtaggagggggtggtggggccggttcgccaagatgaaggctttccccttctactgtccccagggtggagatcctgggtagggtggcccaatccctaggccagagctgtttggtccatagtcaagctcccagagcttggcatctgtggctctggccagcagggcctggggcccagcttttaaggcatcagaaggggagggggctgcggcagggaccccgggccccacggctggggtataggccagatgggcaggcaggggcaggagacagccatgcctgcagcaaatgtgggaaaaacagctgtttcaaaccgcaaggtgtggaatggtggcccggacaggccgggccttgaaggaatcagagctgggggctgtccggggtggtttgaaaaataaaacttagaaaaggaaacagaagtcagttgtcaaagttaaaaaaaaaaggagacagtctctgtatcttcacgggaggtcagggaaacctccaaggcactcgaaaggccaaaattacaggagcaatgaggcaggagggctccggagagacgggcacagcggaggaggagatggggggagggagggagagcaggccggggcccctctctcttaaggctgcagggtttcagcgtggggagcaagccagagacataatgaggcctccagactcccccacaccccttgggctcctggggctccggctgattggtcagtaaagtctttcagagatttttctattaccgaaagagagaaaatggtttaaaaaaaacacaaaacaaaacatcagaaaacccaaaagcgatttggtgcaggcccttgagttatctctggtgccagccacttagaaaatcctcttccgcttcaggtaggagtccgcgtagtggccgccgaggccctgggagtgctggcccacatagctgccttctgggctgggctcgggcgagggcagcaggtgggcaaagctgcgtttctgcccgcccagtggggtcttcagcaggtggctgtgaccattaggcccgggggtgaggcccaggagcccttccccggaccccagcggggaagagccgattgccttactgaggtggctctgcttgaggccagcctgcaggccgctggtaagtattcctgnnnnncgtnnttcgagactgcagtncgggccccctgggttattcctnncgggcccc

SEQ ID NO: 66026 - DNA, 1123 bp, Homo sapiens
ttttgagaccatttgtcgatccctagtccatgtggtggaattcgttttgactgagcagaatggtgccattgcagatcaacacgcactttaaataatcaaaacccctatctttcccctgggaaggaggaagccgaggaaggctgtgtttctgactcacacgggggagtcgggggagtcgtaaacaaccctgaagagaacagccaggcctggtgagtcactcctgggagtggctcctccccaccctgccacgcagcggcaactgcgggctgggcctaccccctggtggccacgctccctccgcacccggcctctctctgtggcatgggggcggccatgccccttggtggagatgaatgggagtggagctgggctggctgggcaggcaggggcttgcctcttgctgactaaggcagccctggaggggcccgaccatggggcaggaacccagttgccatcctcagagcgaggatcattggccgggctcggggatcagggcctctgtggtcccggcacgcctggcccgtgagactgtactctgcacgactcctccaggtggccagggtcaccggaactggctcgctctcctctgccagttgccggaggtctgggcaccaggccaattctcaccttcccgccagggttaaacattagtgggaggttatcagcgtgggccaggggagggagaggggggaattcaactctgtctcctctgctggagccaccagttcccgcaagcccagacaatgccggtggaggaatttgtggctggctggatctctggtgagacatttttcttccttctgtcacatcacacccaatggtaggtcacttcctcgggaagatgggtgacatgggaggagcagagaccaaagtctgagttccggcctggcgggaggatcacttgagcccaggagtttgagaccagtctgggcaacatagggaggcccctgtctctacaaaaaaatcaaaataattagctgggcatggtggctcacacctgtagtcccagctacttaggaggattgcttgagctcaggagttcaaggctgcagtgagctatgactgcaccactgcactccagcctgggtgacaaaatgagcccctgccccaaaaaaaaaaaaaa

SEQ ID NO: 66027 - DNA, 1369 bp, Homo sapiens
ttttttttttttctgatcagactctttttattgttttgttttttataaacaagtctcaggtggaaaaagaaagaaagggaggagctagctctctgccttctcagccaattgaaatcgtggaaaccaatgggcttcagctagccccactcatcactgctgggggggaaaagacatccctactccccttccccgtggcactcatgatattctcaatgccccaacaagggtcatcttggttcctctcggcgtttctgtcctggcctttggctctggctccggctctgactccgactccggctccggccagggccccgggagcccctagagctgctggagcccctggaagagttgctgccggccgtggaacatgtgctggtgccctggccccgggacaggaagcttggtctgctgtatgggagccaggcctcttcatctgggtggagcacccgctgggctgccaggggcacggcctggaccgctttcctctccccactgcgctcccgctccagggaggacatgctgcctgctgccctcagctctagggcccagctcgcctcttcctctggcggtggcaagggtggtgggggcaagtccccaggactgttctccctcctgtagggaagagccttgggtttcttccggaatcgagcacggggtccttgaagtgggggagtcatctccccattcccctgccaggttctgcctggggcactgctggctgtgctaggggcaggactggggctgaggtggggtgaggctgcagggccagcacccaagccagcaggcctcgcttcacggatgcccagcatgggctgggatacactgagaggggaactcggcccaaggggcaccctcctgggcatctgatggagatggggcatgtcagttgggggctggggagggtcaggaggtgagggtgtaagagtggctgtggactgctgtccataggaaggtgtgggagagggggtttcccttcgggatggggtgaccaggcaccctccactggagctgggctccgtcaggtgacttctctcaggcattggcgggcaccactcctctggctttgagctgccctccagctcctcctccggcccttctaggcagctcagttcacaagaaggaggaggtgggggcagggcttctggccagttcagagagggcatctgcacaggtttccccagaagcttcactttgcctcccttggctccactgtccccctggctccactctggaggagcgttctggctccagggacccagatctcctgagggatgttgggggaagcccccatggaaggtctgcagctctctaccccgctgggtcaatggtgctatagacaggaccctccccaggggggggcgggcccctg

SEQ ID NO: 66028 - DNA, 860 bp, Homo sapiens
caagatcccgacaggcttaatcgctcccttaaggaaaaagttattccttgcatccgcggtaaacttgggcccccccaaggatcctttaaacgggccgcccctttttttttttttcaatttcttcaacaggtcatgttcaatttcttcaaagttttaacataaaaataatgagagccaggagtggggccggggcctggggggacgaaggtggtatgtgaaacaaggttggcacacaggcctcaccctcctctgcctcagattcccaagtgggcaggtgggggtgaatggggctccgggtagcacctcagctcctctcagctcccctcagcctgttctccttccagacccagagagctgagaagagtagctgtgaggctcagggcagaggctctctgcctttcaggaacagcccttaaccctgctccccttgcttgggcctcaggaaggtgccgcgagctctcctgccgtccctgggccgccctggctctgctgtgtccagatggtcaggctactgccagctggggccttgctgctctgaagtcccaggaagccaggggtctgcaggagcctcttgcctccaggctggttggggaagacgtcctccaggaagtagtagatatggcccaccgcaatccccagcaggtccacgaggatggagttgcccagcagcagcgagaagcccatgagcgcccaaggcaggaacggtgcctggaacttccggaacacaaggtgcgggttgaagtagagttgaaaggggctgaggagctccagctgcaccgcggcggtggtgaggacacaggctgcggtgtaagcccgcgtcaccgccggcacctgcaggaactcggccgctagtccctgcc

SEQ ID NO: 66029 - DNA, 871 bp, Homo sapiens
ggatggtcggctgggtgggcctggacggctggatgggcctgggctgggtgggcctgggcagctgggtgggcctgggcagctgggtgggcctgagctagggcagcagggcctggctcacgccgctgcctcagatcccgcaggcggagctgccaggggccaccctgcaggtgcagcttttcaacttcaagcgcttctcggggcatgagcccctgggtgagctccgtctggcactgggcaccgtggatctgcagcatgttctggagcactggtacctgctgggcccgccggctgccactcagcccgagcaggtcggggagctgtgcttctctctccggtacgtgcccagctcaggccggctgaccgtggtggtgctggaggctcgaggcctgcgtccaggacttgcagagccctacgtgaaggtccagctcatgctgaaccagaggaagtggaagaagagaaagacagccaccaaaaagggcatggcggccccctacttcaatgaggccttcaccttcctggtgcccttcagccaggtccagaatgtggacctggtgctggctgtctgggaccgcagcctgccgctccgaactgagcccgtaggcaaggtgcacctgggtgcccgggcctcggggcagcccctgcagcactgggcagacatgctggcccacgcccggcggcccattgcccagcggcaccccctgcggccagccagggaggtggaccgcatgctggccctgcagccccgccttcgcctgcgcctgcccttgccccactcctgaatgcaccacatgcctctgtctccccgctgagcccaggcacttgcccaggccgccctgcaggaccactgcaataaacgcattctcctgccaaa

SEQ ID NO: 66030 - DNA, 885 bp, Homo sapiens
agggagctgcccctcacgccagagcagctggaggctgtgtttgaaagtctggaccaggctcacactggctttctcaccgccagggagttctgcctgggcctggggatgtttgtgggggtggcgtcagcccagggagcgaacccctgcaggactcccgaggagacctttgagtcgggcgggctcgacgtgcagggcacggcgggctctctggatgaggaggaggaagaggaggagcgattccacactgtgctggagcagctgggggtggccccggtcctgggcgagcagcgggctgtgaggacgctctgggccaggctgcagcgcgagcgccccgagctgctgggctctttcgaggatgttctgatacgcgcgtcggcctgcctggaggaggcggcccgggagcgcgacggcctggagcaggcgctgcggaggcgcgagagcgagcacgagagggaggtgcgcgctctgtacgaggagacggagcagcttcgggagcagagccggcgcccgccgagtcagaacttcgcccgcggggagcggagaagccgtctggagctggagctgcagatccgcgagcaggacctggaacgcgcgggcctgcggcagcgggagttagagcagcagctgcacgcccaggctgcggagcacctggaggcacaggcccagaactcccagctgtggcgggcgcacgaggcgctgcgaacgcagctggagggggcgcaggagcagatccgcaggctggagagcgaagcacgaggccgccaggagcaaacccaacgagacgtggtcgccgtctccaggaacatgcagaaagagaaagtcagcctgctacggcaactggagctgctcagggagctgaatacacggctgcgggatgacagggac

SEQ ID NO: 66031 - DNA, 3658 bp, Homo sapiens
  misc_feature (1)...(3658): n = a,t,c or g
tttttttttttttaagatagaaatctatgcactttaatgattgccagaattgcccagcatagcttcagtaaaatagagaattgtctagaaaatacaatctccaaaatgtgtgcaagtactgcaaaccggacagaccggggcagggcaaggcccttgaaaccaagtcctccttgagcacctttcccaggttagaaacccctcttcagcctgtgcttcgcacgtttccttcagcgtgccgcccattcagactgcgccaacttacgtccccagtgcccacgcctgngtggatcaagtgtccaacgggaaagtatgagttagggcaagcgctttttttttaagctgtaaacgcttcacatgactgggccccgtaaggaaattgtggggagcttaggatgagcctgggagctttttcagggacttggatgaggactctgtacacaaatgtgtactggcagagagtctgcaccagcatcattctctgttgccctcagcatgtccagcactctcgggatgtccagcacctcattgtgttccaggcaggcgatcatgatctccgacaaaatcaccacgccagtccttcctaccccagcactgcagtggaccaacaacggagggttggggctttggggatcacttgtgctatttgtatggcgtcgaacagactggatctcttcaagatatgataaaaatcccttgaggtcttctggacagccatgttcaggccagtctgtgtattggaggtgccagacggtcctctcttgcccggtaaggaggtgcttcatcttcaggcctgtggtggcatagcagccagagtctgtgcggaaccgggtcgtgatcttaaaccttccataggtgacagtgttgtgcctggaaccaagtcgtggccagtacctaaagctcttctcccttccaccctcctcttctgctgtcaccattgctataattgcaattccctgttcccataccatctgccaaaaatcttgacaggtattctgtaatggtccctgtgtggcaatataatcccattcgattccactgacagagaccttaatatgtgatgcgttgatgtaaccagtgttgttttctttagttgggaccaactccactctcacatcatcataaggaagaacatcttggaatcgatttctttctgcattttcagggagtcgtgctgttgagcactccccatcaactagccgtttcttaagaattctttcatattctgtgaataccattccttgttctaatcgttgttccagaattttacacctttcatcattcgttgctctggtagccacttcctttccttcatcaggcagaggcactcgagatagggagagtccatttagggcagccagtttaagaggaccaattttttttgcatctactcgagtctttttcattccccctagaggcgggagcccttccacgatgttcttcttcccagagagaaggtccgacaccggccttttcttcagagagtccctccgggctcggtagcggcctgacgtggtgaggtcggactccgacatggagggcatcagcagcccgtctctccagggccgctgggcctctgcggtcgtgcggacggggctgctgtccatcatcctcttctccgcgtctgggacgtgggccttgggctccaggatgtgcaggggcccggcgagcaggacgcgagggcagccaggtgggtcctgggccaggccgggccgaggctcgcgcgcacgtgcagggggcgcccgggccccgctctcctcctcgaagtcctcgtcctcctcctcctcgctgctgtggattagcatggtggcgtccgacagggacttcttatggccgtacctcaagccctccgcctcctccggcccttctcgctgtgtcctctcggtgaaaacgctggggctgggagcccaccgagacggctcgcggcgcccacctctgccgccgacgcggatagggtgcgctccttgagccgcaggccctccaggccgtggctgagcccggccacctcgatgctgttccgtttgtgcagctgcgcgtggcgcgcggcggtgaggggctcgctgacctcctgcagcgagtgcgccacgggcaggctgtcctcctggaacgtttgcaccgagtggtgcacgcgccgcgtgatgaggtcggggttgctgctgctgatgtaaaggtggcgggacaggtctggcgtgctgttggcgggcctggggggcgggtagggtgggggtggccggtacacctgcgtccgcatgatgttgggagacgggtagtcctgcgcctgcagctgcgcattggtcagctccggcacgctgaccgcgcccaccacgggccgccgctcggcagggtaggggtagggagacgggctgtggaagctgtagctcaggctgaacgggcagtgtgcggccgctggcgaggggagctgtgcgtgctcgcggatctcgggctggctgtagaccagcgccgcgggcctgctgtaggcgtacgagctgccgatgttgaggtttcgcagcgagtggctctgccgttccgcatgcaccaggcccctgttgagctgcttcatcacagtctcatagtctggggtggggcggtaggacgggggtatcacggcgctgtgccgatgggacgggaggtagtcaggcctcatgacgtcactcccggtgatgctagggttggacgacatcggcgagggctgcaagtagggctgaggattatttaaggagttggtgctgtgtgcactgtagacactggcatttacggatccgaccgttgaagtcaatctgggctctattcaagcttgtctgaaattgaccatagtatcccttcctggttgggcacaaagaggttatcttgggaagaagcatatggttctgtataatgtccattatagtgcaactggcggtgggggaggcatcacgtagggctggggtttaggcagagacatccttgaagaagacctcctcctgattgggttcactgtgacagtctgagtttgcaggttacactggtttagtctgtaaaacttgtgtcgcgcaacacagagtctccaaatgtattttgctgtttccatgtcttcagtttgaaattgaatggtctcctctttatttgccagctctaatgcaaaaaaggacttgttgtgggacatgttggcaatgtcatgccacctaaataccacaggatgccttccattcttgtgtttcacaaagataccttcaagacacgctccaatggatatgtcacttccttggctatccttagcagggtagctctcttctccatagccatccattctctctacctcctgcatgtacagcatttcagcatcaggagctgtgagccctctgtatttctgatgtagtaaggccactttttgggttgcttcttccaatactttttcatcttgtaaccatcccacaggaaacaaggcaaatttctgaagaaagtcctgggattcatactgatcaaagtcaccaaaaatcgcttgaacagctaagcctgctaggtgaattggctgttccaaggtacaagggataccttcttcccagatatccttcctcagttgcagataatactggtacccggtaatcctctgctggaagcgaggaacctgaggcgcttaaacccccattccaaaatagacggtaggttccaaggcgtttttttc

SEQ ID NO: 66032 - DNA, 1820 bp, Homo sapiens
ttttttttttttaataaatagtttattcatccagcagtttcagccctgatactgaagcctgttgcggtgtttcttatttttctggctggagcctgattatgagaacatggcctcaccacggggccagcgctcagattcctgccctgccgatcatccagacatcagaggaaatgagagtattgctcaaatgagggagactggagctttattaaggaaacaaaaaataccagtaagactagagaggggtggttaatgtttctggaggcagctgtggaatttcctgtttgctccccctctcctgcctgccgcagatgaggacacacggggaagactcgctggagaggcttctcgcacttaataaggccccccgtcggggtgcttctgggagcctgcctcccaggggagcaggcttgaggagctggcgggagggccggtgggccggcggcgcggaacgctgctcccttgtggccggcagtgggcagcctgcagccactgcgcctctcccgccgccaagagccgcggccggggtaacagaaacgccggctgcgctgaagttcttgttaaacagccccgcgtcggggctgtggtcacagtaaagcaaggcgatcttcgcacacagcaagtgcgaggctctgggccctgacgcagggctcccaagctcccggaatcggcgttctggctgcaggcctggtctagagtcgcagcttctgtgagaagcaacactgaggcgggcccgcccgccctggggctgcccgaccctcctctctgctctcagccccagtccctacttcgggatcctcccaggaggctgtgccggctgctcactcctcctgacctgagggaccgtgtgtctgggcctggtgtttctagacggtcccccctacagtcacttgttctaatttctagcaccttccctcttcaggatagaggcccagccagccagagcacaggctttctcccttcaccctggagctctcaggtaacaaccccctgaaggcacatggaccaagctgctccccatcccgccacccgaaacaccatccttgccccacctcccaggtgacagactccctggcgtggccatgccccagcccaccagccccacgcttgtcagctgggcctgacagctgctgctcttgttttctattcatgaaaactcaacccttctccccgtttctgccagcacaacagggcagagtctgggctatcaccctggcttctccccctccctttaaaggaagcccacattttcctgcgagccgaactcctctgaagagtatggcagacctttggaatcgtgtcaggacgagactgaaagtcaaggcaagtgtgaattcagcaccgcaggcctggtgaccctcctgtgcctctggagtgggctgtcctgggacaggctgaccaggaacaagtccccgcccggggcttatcgctctgagtcagagaaggaagagggcttagtccatctccacaccagcatgtcctctcctgcaacgcggtgggactccgtctggatccgggattcgttggaggccaggaactccacagctcggtcccagacacgcttcatgcgcctccggctctgtggagggatcaagctgtcgcgcacgtgcaggatgcctacatatggatagcgctccatgtcctgctcccagtccacgtaatggtcctggaccacgtctataatcttcttcaccatctcatacatggcttgttcctcctcttctaactttcgccaccgatattttaggagaattaggagcccccacaaaaaagccaagcaccagaagaagatgagctcgtgccgaattcccgcaatgccg

SEQ ID NO: 66033 - DNA, 635 bp, Homo sapiens
tcagaaattacatctatattaaagtttcaaaagctaataatatatttttacatcttcaggtcaagttatagtaatttattaaagaaaataaaattaatttcctttgctgatcaggagagctgatctgcagttgtgcgctttgtccagcaagtacatgagaaagatgtattgatggaccaaatcattaaaaacaaaatccacaaggaagaagaaagaaggagaagaagaaagaaaagacgaagaaggagaggaggaagaagaagacgaaggaagaagaagaaaaggagaagaagaacgaaggagaaggaaggaggaggagaaggagaagaagacgaaggaaggagaaggaagaagaaagtaagaagaaggagaagacggtgacgaaggaagaagaaggagaaggaagaaggagaagaactaagaagaagaaaggaggaggagaagaaagaactaaggagaagaagaagaaggaggaagaagaaaaggaaagaggaagaagaaagaagaaggaggaagaactaagaagaagaaggagaaggaagaaggaagaaagaaaaagaacgaaggaggaggagaggaaggagaagggagaagaaaaagaaggagaagaagaataaggaacaagaaaaaaaaaa

SEQ ID NO: 66034 - DNA, 745 bp, Homo sapiens
tgggacaatgtggaaaagccttcatttcttccagtaaatttcgaatgcatgagagaactcacacgggagagaaaccctatcgatgtaaacaatgtgggaaagccttcagattttcaagttctgttcgaattcatgaaaggtctcacactggagagaaaccttatgaatgcaaacaatgtggaaaagccttcatttcttccagtcactttcgactgcatgaaaggactcatatgggagagaaagtctaagaatataagcaacattctgaagccttcggttgttccagctccttctgaatacacaaaagagttcatactggacagaagctgtgtgaatacaaacattgttctaaagcccttaattgttccagtttcttttgagcacgaaagaattcccactggtgagaaacagtatgaatgtaaacattgtgattaagccttcagttgacctaattcatttcaaagacaggactcgtgctgcagtgaaatctggtttggtttttgctttttggttttttaaaaaaggccaagcttgttggctcatgcctatagtcccagcactttgggaggccaaggtgcaaggcgggcagatcatttgaggtcagaaattcgagaccagcgtggtcaacatggtgtaaccccatctctactaaaaattaccaaaaaatgaaccaggcatggtagtgcatgcctctaatcccagctactcaggaggctaaggcaggagaatcacttgaacctggagg

SEQ ID NO: 66035 - DNA, 727 bp, Homo sapiens
cagccctggtggatgctgggaatgggaggtgacattctccagggacaggtcctggaaggggtggggaagaggtaggttccagccccgcagaaccctggaatccctcctgtgcctgaggccctgccccccagcatggactaatggtgtccctacctctccctcagggcagccctgtggctgggaccctgggaacagcctcccatcccacccaacatgcccaagtgtgggggaatgttctacagcagtgtagcctccagcccttctctccaggaggctttgagagcccaacttactcccctgcagagcaggaaggtggtaggtcaagtgtggccaccattggggagacgagaaagaagtggggccccaccagattgcacaatgggaacctcagctggcccctgaacagaggactcagttgtctccaccctacaccgctattccctggagctcagccaggcgcagccttggaaggagaaagggctggggttacctggcttgtcctcctccaggaaagcccccttcctcctctgccccagctcccagcctggcctcctccaggcaggccctactcctctgccccagctccggctttccccatgaggtttgtcccaggcatgaagaaagcatccagagtgccaatgagtgggcctaggccagaggcccctcagtccccaagggtactgttttggtggcctttcagagggtcaaggaagccctgcttggggta

SEQ ID NO: 66036 - DNA, 530 bp, Homo sapiens
ttttttttttttgagtgtggttaatcctttaccaatagcttttctgttacaattcacaggagaatacataatggagagaaatcctatgagtgcagtgattgtggaaaatcctttaatgttctctcatccgttaagaaacacatgagaactcacactggaaaaaaaccctatgaatgtaattattgcgggaaatccttcacaagtaactcctacctttctgtgcatacgagaatgcataataggcaaatgtgaattcaataactgtgggaaaagcattcattgatctttcatgcctcagataacatgagcaaactctaacaagatgtatgaatcacctgctactgtgtaacaaattaccccccaaaattttgtggcttcaaacaaaaacacttgttatctcaaaatttttgtaggtcaggaattcagaaacaacatagctctatagttcttcaggatatctcaagaggttacagtccagatgtcagcagaactgtaatcatccagaattgttactggtgaagggaccactt

SEQ ID NO: 66037 - DNA, 524 bp, Homo sapiens
  misc_feature (1)...(524): n = a,t,c or g
ccctgtattgtcacctgactccaaaaaaattattttgtggcctatgggtcttttggggtttgtctgctagcataggactgcttcctgttccctctgagtttgttgacctttgctcagggacacttcaggagctagtttctaattgttttctttcagtggtaggagtgaaggtggcaggaattcccgggtcacccctgcagctgccaactaccgcagcagaactgcaaaggtaaggtgggctccagcccatgatgctcagtgggggactcagacatggtggggcttgtgtggctcctgaagttgtagaagttgttgggaccaggctggttgtggttcaaagattgttcctttggcttttgagaaggaggtttctaaggaagcgggacattttcggggatccaggggaggagtaatgctttttcactttttatgtaaagcttcgtttgtgttgtgttgttcaccaggcaaagccttccaagcaacagggagctggggatgcanaaaaggaagaggaggagtaatgg

SEQ ID NO: 66038 - DNA, 419 bp, Homo sapiens
aataaagaaagaaacagaagctggccgaggagtgagttgagctttccaagttagctgaccttaaagatgctgaagctgtccagaaattcttcctggaagagatatagctttggtgaagagatcctagctaaaggtgtagaccacctgacaaatccaagtgctgtgtgtggacagccacagtggttactgcaagtgttacaacaaactcttccactaccagtgatccagatgcttctgacaaagcccctaccagttaatcagagacttgtaagtgctggcgcttggccaaagacgatgtggaatgagaaacaaatgtcaacataataaaatctcagttaaaatacttgaaaaattcttaacttggtagttgagcagaagggcaaatatgcttgttatgaactattctacattgaaatcta

SEQ ID NO: 66039 - DNA, 996 bp, Homo sapiens
  misc_feature (1)...(996): n = a,t,c or g
gcgtgtcaactctgaaaaggccaagcttcattaccttcgttcttttgacaaggggccatttgctacctttaagacgccgcatgatcgaacttgagagtggacaggacttaacttcagcactgatgggacgctcatccttatttacaccaacggcagcttcattcgcctgattgatgcattcaaaggagtggcgatgcacacatttgggggctatgccaacagcaaagctgacacacatggaggcttcatttactccagactctcagtttattatgataggatcagacgatggcaagatccatgtctggaatggagagagcggtataaaagtagctgtgttggatggtaaacacacaggcccgattacctgtttgcaattcaaccccaagttcatgacttttgccagtgcgtgttccaacatggccttttggttgcccaccattgatgactgaccctgttgctgcttggctatttctgtatagtgagggcggccagcaggaagaaactcagagggaactgagataatagtgggattggatcatttgactgggctggagaacatccttttacatggccttcccatggatgtgctgtacatctgctcaaaagaaaataattactttgatgagcgtcttcaaaaggactcttggtgcaacagactcaattggaactcagcttttctaactgtcactgcaccaagctctgctggaggagtgaccagactcacgatttggtatagtggggctctcaagcatcttcaatttgaatgtacatgctgctgaggagccggtgaagtcatcagttccgcacatcccttctaccctccaactgcatgggaagccaaagtcctggttttgaaatgcttgggcagctcagccgcttgccctcaccctgcatgtcttgttactgggtctccctgtgtacttgtggcattatccacaaccatcatgtttcttaggtgccaaacatttacagaaacattntcatatatcttgg

SEQ ID NO: 66040 - DNA, 2228 bp, Homo sapiens
tcagctgctagtaacagacatcccaggcaacaaagaccatcacagactaagccagcacatcatgaccagcagtgcctggccgaaagggtcccgaagccctatggttttccggtctctgatgcagtgatagacatccagggcacccaccctctgcgccttggaaagcctgcagcaccgtcgctaagagcaagtggtctggctgcagccacgcccctgctgcagagcgagcccagcctcaccagcgacgagctgcacctgcccgggaagcctggcctgggcacgccctgcgccagcctcacactgggcccgcccacaccgcccgcctccatgcccaacctcgccgaggccacgctcgcggacgtgatgccccggaaagatgagcacatgggccaccagttcctgacgcccgatgaggcgccctcgccccccaggctactggcggcgggcagccccctggcgcacagccgcaccatgcacgtgctgggcctggccagccaggactccctgcatgaggactctgtgcgcggcctggtgaagctcagctccgtgtgacccacatggccccaggccgggggacaccagaggctcctccatgggcagcaggagtgagcggaggggtgtgtcccacagcgactttcccagccaatgccacggtggagatgacagccccaggtctggggtacagagaccacttaggatggcacagggtggctggccccggatgctgagagcttggtttcatttgaattttcttccccaacctgagtgctttgacaacaatggaaatagagaagtggctgctttcttttggtgaccctccaggggtggaatcggagtgtgtctgcccgcccttgtgacagacacacggaaggcttctgacgcttgtggccagactgcaattgcacttatgtgttatgctactaatatttgaaacagacctgccattccatttgttaattaaaaaaaaaaaaaatcctaaagggaaaaaaccgaccaggtgtggatctgcatgccacgctgccgtctgtgttacagtggtgttgcctaatttcccaaggaagtgcctgctttctttttctttttttaattttgtgaattttcaagtgctgttttgttggaagacagtgcaacgatactgagacttaatggacagtgtcatcactcagcttactgggctgaggcgtctgtggagaggtggcaccggggctgcagagggcggctggggttccgtcgtgtcgggtgtcacttcaccttctgtttggccgctcgatgaggtctcgtgttgagatattgtgtgccacaacccccacagtcttcacctccgtgtgtgatgaaacttcccgtggacagccaataaaatgacgtcctctgttattttggatctgcgtacggttatccttaatagcataaatgaaaacaaagtcatccagatggggagagtttttcttgaaatgtccctagcgaggaatggtccccagacaaccaaaagtcaaatctttgaactgggagatatttatagaataatttcttagataagaggcaagttttccatcatttattttctttaattatctctttttgacaccatcttagtggaatttgctctacgtttgcagtttgccgtgcaacagttgatcggaagtagggaaaagggaggggacgctcagggagaaggttctgtagggcgtcttctgggcttccttctgtgtaaacgtgtcactcaatcccagaagtgcaacttgaggtcctagtaaaggtatcagaaaatgaggaggagaaatcggcttagagtctaagctgagatcatgtaggtcatcatccttcctagacactgatcagaatgaaattaagaaaatgaccactttgttcactttcattggtcacctagaagggaacgaactggctctggacttagggagtgtgtcactatgggggcagccacaggggacacagcaactcctctcctggcttctttccagaccataaatctaacagctaaagctactcaagttcaaagccatggccttgctccttataaccatatgaaagacaagacacattgaccaatgatacaagtaacccaagtgatttgcatttatggaaaaaggctattactcctgagaaagagttgccattttatattaaagaaaagaagataggaaaaagaaaagcacacaagttttatttggaatgaaggcaattcacaggtcacaaaataattcatgctg

SEQ ID NO: 66041 - DNA, 2631 bp, Homo sapiens
  misc_feature (1)...(2631): n = a,t,c or g
gcggccgccgccacgtacatgaagtgcagctgcgccggcgggggcggctccacggtctcactctgcacggcctcgatcttgtaggggatgttgaggctgcccagcgaggcgagcgctcccaggaatgcggccacgtcggtggcactctggaagcactgcgaggaggcctgcacacactgccggttgtcaatctccaggtagacgatggagccgcggacgtccatggggtccagctccctccgccgccgcccaccctcgctgccaccagggagcagcgaggccttcacctggcccagcagggcgtcaggtgcggcccagccctcggcggcacgcttgatggggtgcttgcgcagctcctcctcgcggccgtagtaaggggaagatcatctgctggccgctgagcgtcacgctttgaagaccacgttggtgttgcagcacgcgggcttgaactcccgcaggaaagtggaaaggagctgttgcgcagctgctccggcggcatcagcaccaccactcaccgcgtgccggccgcncagcctctcgggtacatgctccgcacagtccagcccgtcccactcgcactccgcgctgttgcagccctggtcgcagtgcccgtcgctgaagtggtccttgcagtactggtcgtacagggggttgcactggccttccgcacgctggcagtcaaagccgtcgaagaggcagccggctgagttgcactggctgtcacagtggccgtcactgaagtacttccagcactgcagagactgcgtgcagttcttccaggggtcattgaagttgagggagcagtcaccgccgtcccagccgcacgcgtggttgttgcactgcaggctgcagaccttgttgcccgcgtcctcctggcactcgggcagctcgcacgcctcctcgatcagcggcggggggatgtcgcgcccggccccacccccgaagctgtagtccaggatgtggcacaagagcccgttgaatttggcggggcacaggcaacggtagaaggggctctcggatgtgggctcacaggtcccctggttgtagcaggggttgccgcccaggcaggggctgctggccgggaactggcattcggggcccgtgaaggggcccaggcacaggcaggtggggctgcgcgggccggagatgcatgtgccgccgttgaggcagcgcaggctgccgcaggtacgagcgtcattctcacacgtggcgccctcgaagcccgcagggcacttgcagatgaaacccgcgggcggtgttggaggccacggcgcaggtgcccccattcttgcagggcttgcctttgcagccattgatgacggactcgcagcggcgcccggtgtgaccagcacggcactcgcagtggaagtcattgacgcgctgcacgcagttctgggtgccacgggcgtcgcagggattggacaggcactcgttgacatccccctcacagcgctcacccacgaagcccggcgggcaggtgcagctgtagccgcccacctggtccacgcaggtgccgttgttaaagcacttggggctccgggacacggggtcaacggggggattgcagtcgtccacgttgatctcacagtgcacaccctgagtgccccgtgggcaggagcacttgtaggtgttggggaggtcgaggcaggtgcccccgttctggcaggggtgggagaggcactcgtcgatctcctcagagcagttcaccccgtggtagccggccacgcacttgcaggagtagccgcccaggtagtccgtgcaggtggccccgttctggcaggggctgggtgagcactcgtccaccaggtcctcacagtagctgcctgtgtagcccgcctggcagcggcagtggtgcgtgttgcccgcgtccacacagagccctccatgctggcacaggcgggcaacgtcaacaccttgtcgctgcgcagccacctcacaggacacgctgggcacgtcgcagtaaaggccggtccagccgctggggcactcgcagcggtactgggtgtgggtctgccagcatttgccgccgttcttgcagggcgaggagtcacaccagtgcacaaggttctggcagttggggccagtgtagccctgggggcaggtgcacctgtggagaccgcgaccgtcctgacaggtgccgcctagcaggcagggtcgtgagtcgcactcattgactacgtgctggcagtagctgcccgtgaagccgggtggacacaggcaggtgaacgagttgatgccgtccacgcaggtgccaccgttgaagcaggagctctctgtgcagtcaggcgtgttgttctcacagtggatcccgctgaagcctgcggggcaggtgcacgtgtagctgtccacgcagtccgtgcagttggccccgttgcggcaggggtcactggcacactcgttgatgtcctcctcacagaaagtgccccggaagccgggcaggcagtcgcagaaggccgtgttgatgccgtctgtgcaggagcccccgttgtgacacgggttgggccggcagtcgtcgatgtcggtctcgcagttgcgcccactgtagccggcctggcagtggcagcggtagccgccgtgggtgttctggcaggatgcgccgtgccggcacgggctcagaacgcactcgttgat

SEQ ID NO: 66042 - DNA, 1238 bp, Homo sapiens
ctgagtctgggccagaaagcccaagcacttgcagggaccctccccaaacccagcctctgggctgagccaggctctgtgattacctgggagagccccatgaccctctggtgccaggggaccctggatacccagggttactatctcaccaaggaaggaaaccccatgacctggtaccaacagagcccaccagagcccaggaacaagaccaacttcttcatcccatccatgagagagcaccatgcagggagataccactgtcactatctcagccctgcaggctggtcagagcgcagcgagcccctggagctggtggtgacaggcgtgtctaggaagccctccctcctgaccctgcagggccctgtcgtggcccctggggagaatctgaccctccagtgtggctctgatgtcggctatgacaaattcactctgtacaaggaggggggacatgacctcgtccagggctctggccggcagccccaggctgggctctcccaggccaacttcaccctgggccctgtgagggtctcccacgggggccagtacagatgctacggtgcacacaacctctcctccgagtggtcggcccccagtgaccccctgagcatcctgatcgcaggacagatccgtggcagaccctccctctcggtgcagccgggccccacggtggcctcaggagagaacgtgaccctgctgtgtcagtcacgggagcagttggacactttccttctgaccaaggagggggcagcccatcacccactgcgtctgagatcagagcaccaagctcagcagcaccaggctgaattccccatgagtcctgtgacctcagcccacgcggggacctacaggtgctacagctcacgcagattcttcccctacctgctgtctcaccccagggaccccctggagctcgtggtctcaggagcagctgagaccctcagcccatcgcaaaacaagacagactccaagactggtgtgtaaggagatgctctcggttatggggctggcacagagggtcaggtcctgtgaaggggaggtgggtgccctgggtggacatccaggggtcccgggtgatgttgatctgccctgacctctgagacctcttggtccaccatccccagcctcacacccccaggattacacagtggagaatctcatccgcgtggctgtggctggcttggtcctggtggtcctcgggattctgctgctttaggattggcacagctagagaagtccccaca

SEQ ID NO: 66043 - DNA, 1802 bp, Homo sapiens
  misc_feature (1)...(1802): n = a,t,c or g
cccgccggctcccaacagctcccaccagcttgtcaggacaacaccgctctctgcggctggcaagcaagcctgagcgtgaagtgccccttggagcagggcaacaggagtccatggaggcagacacagacctagaggcaggcctggaagaagaggcggtggggggcctggggcctggagcctgggcctgcctccccgggcagggtcttcgctatctggaacacctgtgcctggtgctggagcagatggcaaggctccagcagctctacctgcagctgcggatccagaggcccccaggggatcccggcgaggaggagtcgacccgagcccctttaccgtccccgttacacaccccaggcaatcgggggcaggggccatgggagctgctaagccagacagagcacacaggagcaaaggctgcttcacccccaaaggtggaggtgcccagtgccaaccctcccaggctgccagaaaccccagtggagccaacgtaccacttgccatcctcccagggacacaagcgggatatctcccactgggacaaggtcaaggtcctgctcaaccggatctgccggagaagccaccaccaccctgagccccctgcccctcctgatggctctgaccccaggatcgagtccagggacctccctgaaaggcctcagtgccgcccccaccggaagacctttatgccatcattagtggttaagaagcaacgagcaaaaaacctttctgtaggctgagacctctcggtgcacctggtgaccctgggtggaggggacttgctgtgaagtcttcctcgccctctgccctcttgctgcttctccacattgccaggaaaagctgctgacgcctgccctcctctcttgagtcgagggctgaatctttctcctctaagcagtctggtcaggaaccttggtttcttgagaggcccccaagatgccgcagctccagggctcttcctcctcaccagaaatccctgggcttccacaatgtgaactcactcattgtcaggtgtccgtggagtgtttttggcatggtgacctgtctgggcccagcatgttgcagatgtgtatttatgcgcaatggtatgcatatctctgtgtgactgtcagtgttgcaagctggctggatccaaccatctcttctgaaataatgcatccaaagggttgatattctgggggaggtcactgcagaaggatggaactgacctttattccccagtgggcagttactgagctttcctcctcagagccatgctggcagccctgggacagagaacggtgtggctttggctgcctctgcatggaatcttgccccggactcctgaagactgcacaaggaatgaggaagatcagggacaacctgggaactgaataactttcaaagccagtgctcagcttctctgctccgtactagcgtttacaggtcttaattcaaaccagatgcctgtactagtttttagaccccaagtcaacctttctgagccacagcttcccgctgggaataatgatgcctgccctatctacctcacagacttgttatgaggataaagtgagattaaactgcctcaaagtgcaaaaaaaaaaaagggggggcgcctttaaaaagaacaaattttaaaccccgggtttggaaaattaaatttttttttaagggggccccaaaattaattacagggggggggttttaaaaaacgggggaggggaaaaacctggggtttcccaaatttatagcgctggggagaaaancctttgctggttggtgggttttgagggcccccccccctttaacacccccaccggtaa

SEQ ID NO: 66044 - DNA, 1990 bp, Homo sapiens
ggaattcacaatttagcctataacaagtgggaacaaaactccacctcttgatcttgaggagctgcagtcagattgaaaaggagtatggacagtgggggaaataacggagaccattattgcaaaaaaaaccacactgactgatcctccacacctggactagtttgggccgactgatcctccacatctggactggtttgggcaaaggcaacacccttaggcacctcctctcaccagctgtaccttctccctccttcccctgcaagccttttcctggagtttattggtgatcccaagcctccagcctggaagggctacctcctcgccgtgctgatgttcctctcggcctgcctgcaaacgctgtttgagcagcagaacatgtacaggctcaaggtgctgtagatgaggctgcggtcggccatcactggcctggtgtacagaaaggcatccacagcatatctgaagaaatattcagaagttaactaatctcagatgatttcagcaggagtaaagaagagaaacagactcagaaatgccattacaacagttaattatgtcaaatttatcaccctgattgatcacgcagcattaacctcaagaacgccaagccaagtttttttgacaaatgtgagccaaggtttccgaaaaactagcagatatgactgtgacttacaaaatggaaaaagtaaacgagaaacacaatttgatatgatttaataaaagatttgtttccaccacttctcctgggaacctcagcacattttctttccactgacagttattatctctacctttattgaacaaagacacccggaacacagctgctgaggatcagtaaagaaaatcattcttttattaataagactgttattagcaggaaaaaaaaatccatgtttgggagtttgcactgaagttacaggccattttgaagaaatatggctgactagtgccaacattatttcaggcaatttcatgatcaaatgtcttattaggttgtttaaaatttttatagagattgtaaatcagaactattttctatttgccctaaatatttagatgctacagggaaagcagatcaaattaaagggtactgtgcacatttttttactggggaactcccggggatattaaatcatttcgcctgcagcatgggaattcttcagtacacatgcttgtggaaacattccacgctccgccagcacggctcattaaagtgatgatttggggttgcaacaacagtggccaagtacttcctgtgttcaactggggaccatgtggcaagaccccaaagcttcccccagagatcctatggggaataaggtttttggagcccaccatattccattatttcagccctaaaattaacacccatggggaccaggaatccagaagaccagaggagccagaccaaatgtgtgtaagacatgctggaagggaaaccttcctttttagaaaccagggtcaatatcctattaaactttaagattgtgtatctcttgcccctggcagtttcctgtatttgagttttaaccctactgatataccccatgcatgtgaataaagtatcttcctgcatgtaacaggatatttaatgtaaccttgattatagttgcaaatgctgggaaacgatccaaatgtctttcaatatggcactgattaaataaattatggcacagtctcacaatgaaaaacgaaatgtagccattaaacagaatgaaatgggtctagctaaattgaaataggactacctctaagatatgttgttaaaaagaaaaaaaagaaagtgcagaggaacaagtatgataccattttgtattttttaacatatgcaagcgtgattgtgcccacacgagaatacctttgaaaataaactcagtatttgcctcagtggataaaaacaagaaccagccttattttcactgttatatcttttggtgccactttttgaactttttaccatatgtgcatatgtaactttctaaataaattttgt

SEQ ID NO: 66045 - DNA, 1481 bp, Homo sapiens
atggatgttaacagcagcggccacccggacctctacgggcgcctctgctctttcctcctgccggaggtggggggcaggctgcccgacctgagccccgacggtggcgccgaaccggtcgcggtctccgggacgccgcatctgctgagcgggggcccccgaggtgacggccagcccggcgcccacctgggacgcaaccccgggcaatgcctccggccgcggggagcaaatcaagaaagggccgagaaagttgtgatcggctctgtcctgacgctcatctctctgcgatcgcgggcaactgcctggtggtatctccgtgtgcttcgtcaagaagctccgccagccctccaactacctgatcgtgtccatggcgctggccaacctctcggtggccatggcggtcatgcccttcatcagtgtcaccgacctcatcgggggcaagtggatctttggacactttttctgtaacgtcttctccatgaatgtcatgtgctgcacggcctggatcttgaccttgtacgtgatcagcatcgacaggtaccttgggatcatgaagcctctcacgtaccctatgaggcagaaggggaaatgcatgacgaagatgattctttctgtctgccttctttccgcctttgtcactttacctaccatttttggtcgggctcagaatgtaaacgatgataaggtgtgcttggtcagtcaagactttggctacacgatttactccaccgcattggcatcctaatccccatgtgcgtcatgcttttcatgtactaacagatttacaaggccgccaggaaaagcgcggcctaacacaggttacctggcttccctcgagtggagccagacagcagtagtcaccctgaatggcacagtgaagttccaggaggtggaagagtgtgcaaaactttcgagactcctcaagcatgaaaggaaaaaatatctccatctttaagcggaaacagaaagcagcgactaccttggggatcatcgtctgggcctccaccatgtgctggccgccctttttcctcctgacagccagacccttctgtctatggcactgcctgcagctgcatcccactgtgggtggagaggatatttccatggctgggctatgcaaactctctcattaacccttttatttatgccttcttcaactgggacctgaggaccacctattgcagccggctccagtgccagtaccagaatatcaaccagacactctcagctgcaggcatgcatgaagccctgaagcttgctgagaggccagagagacctgagtttgtcctacaaaactctgactactgtagaaaaaaaagtcatgattcatgactgaaagagggataatggagatgaaataaacaaggcaaaatagaggtggaaacagaagaaagtcatttgccaagactgcagaatggaatgcagcttctgtcctttcttaagatggctaaaacgtgacaaacagcatgacctgatgtacaaca

SEQ ID NO: 66046 - DNA, 1328 bp, Homo sapiens
acgccaagcttggcacgaggagccttagagaacatcagaaagcccacccaggggattaaatgtatgcatataaagaatacgaaaaaactctgagctggaaatcaaacctcacaatacataaatgaacacacaggagagaactgttaacatagtgagcactggaatttcctctacaatttcagcctccaccaaatatcaaagaatagaagataaattgttgaaatctattttatatgggcattctttcagccagagcccagtcttctatggatatacagaactcacacagcaaagaaaccctataaacataatgaatatggaaaatactcttgcgaactcactcctcagaaaactcacgctgcagaaaagctctgagaaagtaataaaaatgtgaaaactttgtgccaacaatcaaaactcattcaccatcagagaaatcacacaatgacaaaagctagaatataataagtgtgtgataaactttaatgaaaaagtcagtccagcaggaaattccattcaagatagagacctcatagtatattaaaacaaacaagaaatgaagttaatggatgtgggaaattcttctgccatgtcaaccctcattttaacctacacagaggtaatccctatatgtcgtataataactattgaaatgttcactagtaatcattttcacttctccctcatgccacacctgggccttaaatttcttcaaccacttctcttcattcttaaacggggtcatattgttaccctctagctagtggaatatggggtcagtgacaggtcttaaatacatcagtcaaattctcaatattttcttctatccctcattagaatggaatggaggaaaaccttgggactcaggctctgatgatggaaagtacaagatggtaggaacccgggtcagagaaggatcctgtggcatggagttttctcctccctgtacacagttggacttcttgcagtgaggaaataaatgtgttccctgctgaacttctaaaggtttgggtatacttgatactgacagaaactcaacaaccctcacataataaaacttaggagtatgatttttcaggacatctgaactcagtgtatgtcagaaaagtcacataggacaaatctcggacagcatcctgaatgaccatggcttttatccccaaagtcttcctcatcagacaggtaatatcataagaaatctgacattttaacaaatataggaaattcttcacacacacagacacacactcacacatacacacccaaagtctcattaaatatatgataatttaagttttgatggtgaaaaagtttcaacaaattatcat

SEQ ID NO: 66047 - DNA, 3294 bp, Homo sapiens
agcaggaggaggaggttgatgccaaacgcaaggagaagcaggaggaggaggttgattatgagagtgaggaagaggaggagagggagggcgaggagaacgacgatgaagacatgcaggaggaacgaaatccccacagggaaggtgctcgaaagacccaagagcaagatgaagaggtgggcttaggcactgaggaggacccgtcccttcccgccctcctgacgcagccccggaaacccacccacagccaggagccccaggggcccgaggccatggagcgccgggtccaggctgtgcgtgagatccacccgttcatagatgactaccagtacgacaccgaggagagcctgtggtgccaggtgacagtgaagctccctctgatgaagatcaactttgacatgagctccctggtagtatctttggcccatggtgccgtcatctatgcgaccaagggcatcactcggtgcctcctgaatgaaacaaccaacaataagaacgagaaggagcttgtgctaaacacagaaggaatcaacctcccagagctattcaagtatgcagaggtcctggatctgcgccgcctctactccaacgacatccacgccatagccaacacgtatggcattgaggccgcgctgcgggtgatcgagaaggagatcaaggatgtgtttgccgtgtatggcatcgcggtcgaccctcgccatctctccctggttgctgattatatgtgcttcgagggtgtttacaagccactgaatcgctttgggatccggtcaaactcttccccgctacagcagatgacatttgaaaccagcttccagtttctgaagcaagccaccatgctgggatcccacgatgagctgaggtctccttctgcctgccttgtggtcgggaaggtcgtcaggggcgggacaggcctgttcgagctcaagcagcctctgagatagcagctaccccggcaccatctgcccagctccaaggacccttggtgagggcgtggcccagcctgccttctgcatgagaggaccaggagactggaatccagggcagttccaagtgacagtacagagcacagcagcgaccttgggcctgaaagcagtgggcctctgagctgggccagcttcacctggaaagtgacagagttgctcatccttgcccctccctgtctctggatttttatcaaggtttaccaagtcttctgagtccccctgagatggctggggcttcacctgtgctgcaggaggcctctgtggcataacccctaaggagaagtcctgattcacgattcactgagaagaccaaggggaagccatgctttgctgctggggaccccaggcacctccagagtagggaagcggggttcttttgctgtgagtggccagggacaacagacaagattcctgggggctcccgatgagcaggaacgtggagcctgctgcccaaggcctgctccttccggctgctccagcccctgggggcagagtccacaaagagtccccatcaagacttcttccctgagtcaagtacagcgtagcatagtcctccacccacccaacctctctgcctggccagggtcctggccctgccactgtgtggcgaggtgtccttctagaccacatcagccccaaggctgggagcagtcgctccagggccgcagcagttcactcccacacatagaacccaggtcactgctggggcgattgaacaggttgcctggcttttctctgctgtcagtttggtgtggaggcctatgttctgccccatacaccccacaggccctgcttatgggaaggaacacaggcctccagcccagaggactgtgccgccctgttcttggccgtccacgtttcctctccctctagcaccagcaatacatttccctggcatggacagaaaagacagagaggacttatacaaaggttttgtaaaaccagaggctagcttctatctttgtctactgttatttcagctcagggcgggtaattaacatcattggaactagctattaggaaagaaaaaaaacttggttttttttacaacaattttttcccttggtttgcagtttctgcatttggatttgagaacccagggcggggattttcttggcacagtcaggtcttgggtccctcttcctgtgctttcttgtctgaggccttagggggaagagctcagcctctgcagcctcctccacctctgcccctggcctgcctctgctgtgacctccttccagagctagctgctggccctgtggccaggagaagcagaggggagaagcctttatgcagaagctgtgctagccttggtctggggtggggaggctgctgctgtgaccttaggggtagggttggggatcaagggaggctttgtcaagggagagtgaccatgttgctccctacatccatgcaataggacccagcctgcacctcctaggcctacactggggaaagcctgacagaaatcagtacctcctaacggggtctgccaggttcaccaaggcatgggcacagaggaatatgacagttttgaggcaggcaggaagggcccagcctgcagggtaagacattcattctttgagttaaaggccatattcacttgatgatttctacacacactagaattgtgagagtgtccttgaaggagatcacaaagtaacctggtgactgtggcacagggtccgtggattccatctctcccaggcactgagggcgcagaggcgaaggagcaagccctgcatattggcagggctgtgaccatcgcacttagatcagacccccgacctgtgttgggatgtgagggatgccctcctgccccacccatccacatggttcctgggcagctctgttttattcctgtgtctttcctgatggatgagtattaagacagcatgtctggtttttaaacagacatttgggagcttgcacatcctgatgagcagggactcactgtggtggccttagggaattacacgctcactttggtggttctctatgctcggaagcctctgagagtggccttggcagcttaagatggcagaggctttggagtcttcttaggactgtaagtgcccattgaggatgcatttgagttttggaaagtaggcccaagtcaaatctgatggatggattcaagaacatggactaatctgcgttgtcatttttaatcaaaatgtaatggagattgatcatctggtggggttcacaaacttttcatgagagctgtgagttctttttttgagatgcacttttgcactttgttacccaggctgagtgcagtggcgcaatctcggcttccactgcaacc

SEQ ID NO: 66048 - DNA, 776 bp, Homo sapiens
acagtgaaggtggctgagaccaggacggaggcagcacagatggggagacatgattggattctgcctgttgtgaagctggagccacaggactggctggaggccagatgcaggagtggtagaggggaggtaggatgtggacgagcattggcgtccctgggaggacacagcgtccatcctggggcaggcactggggaggagttgaggagttcagtttgggacatgacactggagatgcttattagataccaggtggggaggtcgagcgggccatggagggctgagtctgcagttctggggctaaagagagatgtctgggaactgtcagcacaaaaggagccatgagactggatgagatcatccgggtctgaggactgagccacaggcaccgtgcagaccaggaggacacagaagggcatgggaggacgtggaaggacatggaaaactccaagtggcccagaggaaactgtggtcagccctgccttccagagttgggggagtgtaagagctgaggcccaaaggaggagtcagggatgctaagccgtggaaagggtagtggaaggactttccttctggaaagggatgacagcgtggacaaaggccgagaggtggggaacgaggctggaggatcacgggccattcacacaggcagtgaaagtcagcctgaggatttagcccagaggtgatggagcccctgaagggtgtgtgtggagggcaaaggagaggggacaagacagggggacggctcaagaggctgcggcggggcaaggccagtaccc

SEQ ID NO: 66049 - DNA, 570 bp, Homo sapiens
  misc_feature (1)...(570): n = a,t,c or g
ggccncnnnnnaaaatgatctcttcggggggaatattntcactatagccaatcccaccgatgttctaaagattcgaatgcaggctcaaggaagtttgttccaagggagcatgattggcagcttcatcgatatataccaacaggaaggcaccaggggtctgtggaggagtgtggttccaactgctcagcatgctgccatcgttgtgggagtagagctaccagtctatgattttactaagaagcacttaatattgtcaggaatgatggaagacacaactttaactcactttgtttccagctttacatatggtttggctggggctcttgcctctaatccaggtgatgtggcaggcactcacgtgatgaaccagagggcaatcgtgggacatgtggatctctataagggcactttggatggtattttaaaaatgtggaaacatgagggcttttttgtattctaaaggattttggccaaactggctttggcgtggacccttgaacatcattctttanattacatatgagtagctcaagaggctttanatctaaggactgaattatatgtgagccc

SEQ ID NO: 66050 - DNA, 1253 bp, Homo sapiens
ggaattcctctgtcccgccatacacagggtgggacggggcagggcgggcattgagctttgtgtcctggggtcagggtgcttcccctgccggcctcaccccaccaagcggatctcatggtgctcctctggctgggcccacccgcagtggtatccttctgggggcccttatgggagcctgccgggggtgcagatcctgccgggggtgcagagcctgctgggggtgcagatgatttctgggtcccaggaccatgagggggctgctctacacacagccggaagatgctgcggacccaaactggccctttccctcccacaccaccccaggaccaatgggctggctggaggccacccatgctaaaataggctcaagggcctactttagcttctgggcaaaggtcttggcctgggcctgactctgtggccttcctgagctgcctccccagtaggcctcagtgctgggctacaggcctcctccattccctccattcatgtgaccccacccctcccagcagaaactctcttccgtagcccaggagcagctgttgagggtttcacctgcccatgccccagcctaaggccggcttccccagagcagacgggttgcactctcctgcccctcaggcccactctgtcatccaacaagctcactgcaactggcccatcttaaaaacaacaccggctggtcacgctggctcacacctgtaatcccagcgctgtgggaggccggggcggggggatcacttaaagtcaggagtttaagaccagcctgggcaacatggtgaaacccgagctccactaaaaacacaaaaacaaattaaggcaccctgagtggtggtgggtgcctgtggtcccagcgactcgggaggctgaggcagaattgcttgagcccaggaggtggaggctgcagtgagccacgatcgcatcacgcactccagcccgggcaacctggcaagaccctgactctaaaaagaaaaaaacaacaaaaaaaaaaagcccacgttcaagggcagcactattcaaaagagggaagcaactcaggaatccaaacgcgcaggagggaacacatcggggttcatccacaggggaacacgattcacccaaaaaaaggaaggaaaccggcccggccccgggacttgaatgcacctggaggagactgtgatgaacaaaagcacccaaacccaaaagggcagggacggggtgatctgactgaggtgaggaccccagccagccaaattcatggagacagaaagaag

SEQ ID NO: 66051 - DNA, 1789 bp, Homo sapiens
ttcggcacgagcagaagttgtcctattaactttttttttggtctgaggttatgtacttcttgggagaaaaagtggttcttccatcaatatcaaaccttcccttcatttctctagttgaactggggcacgagtcctcctcactccaagcatgttggccctcccttcctcgagtagaaatacggctttccacctttttatcagaactcctattcatgcttctcaaacagggcctaggatagcagaggctcagcagccagagggaaacagggaggaagctgtttctccatccccagagatgtaagctgggcgagagtgtcagggcctggccataccactgacctcaggaaaatgagcctgggggacagtactaagggtgtggggggtcaggtgggtgtgtcaggtacctccagagctttgaggggtggggcagagagtcagtgggactgggaggactagggcagtgtcccctcatccctgggacggttttcctgaatggcctggcaggctgggggctgtcgcgtcaacagccaacctcctggatgatgtggagggccacgcgtgtggggaggctggaggggagatcgaagctccaacttctctatgatcggggatctcccagcggagttcctgggtgtttcatgggagcacccgccctgtcccctggaggaacacactgagggttggtgggcaggtgacccaaagatatggatccccctgacttggtcgacattgcttccccctttctgcaacccctgaaaaggggccctagccctacttccacctagatgtgtacctgtagcatgaagtgccaggtactgtttctggggaatattcttttgggtgtgaggtggcagacaggcctgcccccatgggggaccctcggcctgagaaccaagcactgggcagcttcagtctgtgggcccagaggcttctcaactttcacccagtcccttccaaaggccacgtgggccagaagactctgcctcagaccctcctgggcccgcagctgaaccctgatcctcatgccacattcgagggtcaggaggcatccagaaacaaggactggaagggcctcagaggtcatctagatagtccagcttttccatcccattttatagatgaggaaatttgaggcccaaagacgaggggagaacttgtccaaggtctcagagctcagtggtggaccctggccagcacctgagtgtcctgctgcctctctccctggacccatgcatcgtctacctggggggatctgcatgggtcccaaatgaagggggcagagagagtcgggtcagctctcttgcccagtctaggggccgtgcctgagcgaggccctgcagggtagaggatgaggcagcttccctctccttttcagatgaagacttccggggcaggcgtcaggaggcacccaaggtggaggaaggcctgcgagaaggacagtaagagatgccagcagctcttccttgccagagatgatctgacccggtgggggcagctggaaagcaacactggcccccagctgaagggcccagctgcagccagacagatggtgcttgagaaccgaggcccggtgatcctccagccacagtccagcccaaccactgccactttccatgggacttagaacttcggagttgctgccttgcaattggaggaaggacctggggcccctataggcagcagccaattacagccccttttgtagccaggcgttcctatggtcaaagagtggaaatgcaggaaccaacctccctttaaaaaaaaaaaaatccagaaggcaaaaaaaaaa

SEQ ID NO: 66052 - DNA, 1421 bp, Homo sapiens
  misc_feature (1)...(1421): n = a,t,c or g
ggcagcgaggatgtggtacagcgcatggacctggagggaggctgggaactgctcaggacctcggcggggcatgaggagggggccaccaggttggccagcggccccctttcccagggccatggctgagcacgcagggccccgactccccctggtgctgaagacgctggcatgcacacacagcagtgcgtatgagaaccagagggtgaccaccaccgccttcctggccgagctgctgaacagcaacgtggccaacgacctcatgctcttggactcgctgctggagagcctggcggctcgccaganaggacacatgcgccagcgtgcggaggctggtgctccgcggcctggccaacctggcctccggctgccctgacaaggtgcgaacccacggcccccagctcctcacagccatgattggcgggctggacgacggggacaaccctcacagcccagtggccctggaggccatgctgggccttgcgaggctggtgcacctggtggagtcctgggacctgcgctcagggctgctgcacgtggccatccgcatccggcctttcttcgacagtgagaagatggagttccggacggcatctatccgcctctttgggcaccttaacaaggtctgccacggagactgtgaggacgtcttcctggaccaggtggtgggcgggctggcgcccctgctgctgcacctgcaggaccctcaggccaccgtggccagcgcctgcaggtttgccctgcgcatgtgtggccccaatctggcatgtgaggagctctcagctgctttccagaaacacctgcaggagggccgagccctgtacttcggggagttcctcaacaccacctgcaagcacctgatgcaccatttcccagacctgctgggccgtctcctgaccacctgcctgttctacttcaagagcagctgggagaacgtccgagctgctgcacccctgttcaccggtaagcaccaccccctgccccacccccacgccgcccggcagccccgcctgatgcccccacttcacagggttcctggtgctgcactcggagcccaggcagcagccgcaggtggacctggaccagctcattgcgggtgagcacccctccacggggcccctccgctgggccctgctgaccctgtaggcacccgcagggactaagtgattttcctggatttcaggactttttccctgtcactggtgacctcatcgtctctagtaattcacggaaacttcttaactgttccaagagagcttaaaaaacactaaaaaaggaaaaacgatctttccgttggctcctgagcctcccagcagaggctgtcaggagagcgtggcccacgcgcaggcatgggcatgccgaggtcacagcccgcaggcagcccccctcctctacccccagcgctccagatcctgctgaaggag

SEQ ID NO: 66053 - DNA, 1506 bp, Homo sapiens
tttcgtccgagaggggtcaaatgcctgttcaaagggagaggttcggagcatggcctgggaaagtccatcccaaatggcgctgtcccaggagcccaggcaagcagggactcccccttagcaccgggaccagcatgtggtgccctcaggccagcagagtggggcacattggatggctccgacctcgaggacacggacgatgccttccagcggagcacacaccgctcccgcagcctccgcagagcctacggcctgggccgcatctgcctgctggatgcgccccagaaccatgcgacacccacgatagccactggccaggtgcccgccgtgtgtgagattctcgtgagggaccctgaaaacaacagcatgggctacaggaggagcaagagcacggacaattttgcctttctgaagaagagctcctttaagcggaagtccacctccaatcttgcagacctcaggacggcccatgatgcacgggtaccacagaggaccctgagcagttcctccactgactcccaaaagcttgggtcaggaaggaccaaacgctggaggagcccgataagggccaaggactttgacagagtcttcaaacttgtgagcaatgtgactgaggctgcctggaggagggagagtcctaggagtggggccccatcccctggagaggccagcctgagacttcaggcacacagccggctgcatgacgactactcccgccgcgtctccaggagcactgagcaggacagcaggcggggcggggcggtcatgcatgggaccactgcaacctgcaccgtggcccccggtttcggctcagccacctctaaggggccccacctagacgctgacactgccgtatttcctcttgaaaccaaaagttcctgggcggtggaaagcgacagttcctgcacttgcagctctttgccaagcccgattgtccaggatgtgttgagcaaagactcctgtgacccaaacgctggcagccagttgacatttgaccctgagcagcctcccacccctctaaggcccaccacacccaagccccagagccctcagagcccccagagccccggggcaggaagtgccagctgtcacagcaatcacagtgccctgtccgcgaattcagaggaaagtgaaggaagggcagaagagcctgctcagagagagccagggcctgtgtccttgcaggatcccctggaagccacacatggtatgagggcagcaaggaccttctggtgaacattggtgtggcagccggcccagaagaaaaggagaaggaggaggtaagggcagcggcgaggtccctcatgtgggcgaccctcctgcgggaagggagcttgcacaggtgttgcccttggtccctaacctgtcaaggtcagtggccctctgctgaccttgttgcccttacagtattagtgggaatgggagttgtcaagttgctgtttaccaagttcagaagtaatctctatctcctttgaaataaattgacaatgtacgagattcattgagatg

SEQ ID NO: 66054 - DNA, 2625 bp, Homo sapiens
  misc_feature (1)...(2625): n = a,t,c or g
gctcgcagggcagtccggtgaagagctacgactacctgctcaagttcctgctggtgggcgacacgactgtgggcaagggcgagatcctggagagcctgcaggacggcgcggcagagtccccgtacgcctacagtaacgattgcagctgagaaggcgcgaantgcttggtccctgaaaagctgccgcctaccctggtctggagcccctgcaagctggcgtagagcaggaaggggttgcatcacggctgagtcctcccctgcgcanacaatgggatcgactacaagaccaccaccatcctgctggacggccggcgcgtgaagctggagctctgggacacgtcgggccagggccggttctgcaccatcttcaggtcctactccaggggcgctcaggggatcctcttggtgtatgacatcaccaaccgctggtcctttgacggcatcgaccgctggatcaaggagatcgatgagcatgcacccggagtcccccggatcttggttggaaaccggctgcacctggccttcaagcggcaggtcccgacggagcaggcccgcgcgtacgcagagaagaactgcatgaccttctttgaggtcagccccctgtgcaacttcaacgtcatcgagtccttcacggagctatcccgcatcgtgctcatgcggcacggcatggagaagatctggaggcccaaccgagtgttcagcctgcaggacctctgctgccgggccatcgtctcctgcacccccgtgcacctcatcgacaagcttccactgcccgtcaccatcaagagccacctcaagtccttcttcgatgggccaacgcgattggaacgcggtcatgatgcacggctgttcctactccatggccagcggggccgggggcggcggcagcaagggcaacagcctcaagaggtccaagtccatccgtccaccccagagccccccccagaactgctcgcggagtaactgcaagatctcctagcggggacgggcggggccgcctgtgcagatgccaggagggctcgagctggacactcctggctggacgccaggccagtgccgcctacgtggagactgtccacacagctgcctcagaagcgccgggctttcctcacacctgagccgggtgcgaggaggagcatgcacggaccaagcgcggcaggcgggaggagggggcgcggctgggctgctggtgcttccgggaatcttggtctgaaacaagccgggcctccccagctgcctgggcttgaccggcggggagcctggttggcctttcttatttatatagagaacacttcacttttttgtacatttttaaggggccttcagggaagcctgggtgtggcccggtggtggtgcactggtgacttcatggccacgccagctgcggggacgcacttgggactcctcgagaggggactcgcggccgcgatggcaaggcatcctgtgaattcatgcgctgcgagtggcggggctgcccagaggccgggggagcagacagggccggtgctccctctggaagcttgggtgaccggggccctggctcccacgggatggagggtgtggtcctgtggtcagagcccaagcagcactcaggagaggggagaaaggaggtgcacctggcagcccacatttttgttgctccccaaatccctccccacgtggggatgagaaccttcctgctgtgatgtgacaccttcggggacattgaccactcaaaactcagatcatctcgcccaccctggagagtgcagagctatctgtagacttaggaatacttgatgggcagcggtgcagaccccgggcacctgcgtgcagcctcctgttctcggcagcttctgtcgctggccctggggtccccacagctgcagctctcctgtgaggttgcacggcatcagaaccatcctgaccttcttagggacgtgcctggaaccacctcgtccacgtccacgtccacctgggggcctcgggaggctaggcccctcctcaaaggcccaccagcccggcgctcatgctgagccccaggcacgcagggccggccacctctctcctgaagccattggccgctcctccacccagtgcttctgcccatgcctgccccagcagcccctctgcacggtcaccatcgcctgggcctgcccacagcactggtgctcacctctacctcctgtcctcaggccgtgcggcacgacatggccagcacgcagaaggagccctcccgggacccaggaccccccgtggtggactccgcggcacatgcttcccaaggtggtcccacggagggtgttactgggcaccagtggactcgccccatggcccgttcctgggagatgagggccgtggcctgcatgaactaccagatgagtaagggaaccccaggcaggcggccctgccacagccccccaaagacactggcctcctgctccagcttccctgtcctggccccacctgtcctgttgctgccagcagggcccttgtttgggattatgaacaaacctcacagactttgaggacctggatggtcctgcattcacggcatcaacactacccgcgctgctgttagacactccgccattcctggttctctccgaaccgttctttgtacagtaaatgtaattcagctgtggta

SEQ ID NO: 66055 - DNA, 807 bp, Homo sapiens
tttcgtcggaggcgggcgcgggcgcgtccctgtggccagtcacccggaggagttggtcgcacaattatgaaagactcggcttctgctgctagcgccggagctgagttagttctgagaaggtttccctgggcgttccttgtccggcggcctctgctgccgcctccggagacgcttcccgatagatggctacaggccgcggaggaggaggaggtggagttgctgcccttccggagtccgccccgtgaggagaatgtcccagaaatcctggatagaaagcactttgaccaagagggaatgtgtatatattataccaagttccaaggaccctcacagatgccttccaggatgtcaaatttgtcagcaactcgtcagacggggtttcactgtgttagccaggatggtctcgatctcctgacctcgtgatccacccgcctcggcttcccaaagtgctgggattacaggcgtgagccaccacgcccggccaatattttgtaatttttagtagagatggggtttcactatgttggccaggctagtcttaaactcctgtcctcgtgatcctcccacctcggcctcccaaagtgctgagattacaggtgtgagccactgcatccagccaataatatgctctttaacaaacaatggatcaaaggagaaatcacaagggaaatagaaaaatacttaaaaatgaatgaacatgaaagaaaacataccaaacgtatgggaaacagtgaaaacagtgcaaacgaggcaatttatagctatacaccattaaatttaaagataagaaagacgtcaaaccaacaa

SEQ ID NO: 66056 - DNA, 1337 bp, Homo sapiens
  misc_feature (1)...(1337): n = a,t,c or g
tttcgtggtgactccagcggaggagctctgggacacccttgtctagggaagaggtcttactggctgccctcacctgactttgtgtccccaggcccccagccatggccctgtccctgcctctgggccctagacttggctcagagcccctcaaccacccaccgggagcacctagagaggcggacattgttggatgcaccgtctgccccgcgtccggagaggagagcacgagcccagagcaggcccagaccctgggacaggactccttgggccctcctgagcacttccagggtgggccaaggggcaatgagcctgccgctcaccccccgagatggtcaacaccctcttcctacgaggacccagctgggggcaaacactgtgagcaccccatttctggcctggaggtactagaggctgagcagaacagcctgcacctgtgcctgctggggctgggccgccggctgcaggacctggagcaaggcctggggcactgggcattggcccagagtgggatggtgcagctgcaggccctccaggtggacctacgaggggcagctgagcgtgtggaggcgctgctagcgtttggtgaggggctggcacagcggagtgagcccagggcctgggcagccctggagcagatcctgcgggccctgggagcttaccgagactccatcttccggcggctctggcagctgcaggcccagctggtcagctacagcctggtgttcgaggaggccaacacgctggaccaggacttggaggtcgagggagactcggactggccaggacctncgtggggtctgggggccctgggcacccagtagcctccccacttccacagagttggagtgggatccggcgggggacattgggggccttgggcccttgggacaaaagacagcccggacactaggagtgccctgtgagctgtgtggccacagggggccccagggcaggggacaaggccttgaggtgagagcagacccccttgagggaccttctgccaggcaccctggggacatctctgcgcaccttctagcaagatcctgcccttccaaggaggtgtcagtggctctgtctccccctctatctctgtctctcggtgtctccttctatctcactgtttctctctctcgtctgtctctgtctacatcctcaagccccatctcaaattcactcctatcctgaggcccccagatgatgccccactcacctcctgactgtcccagtctctcctgaagtgccacctcttcagggaggcctgtcgtgacctccaaacatgagcactcctatcttcttactttatttcctaacagcactcaccacagcttgactttgta

SEQ ID NO: 66057 - DNA, 1373 bp, Homo sapiens
ccaggggcatttcgtggggtcggactggcagcagaatagtgtggtaatctgtgatgggctgggccaggtggttggggagtacaaggggccaggcctgcatggctgccagccgggctccgtgtctgtggataagaagggctacatctttctgacccttcgagaagtcaacaaggtggtgatcctggacccgaaggggtccctccttggagacttcctgacagcctaccacggcctggaaaagccccgggttaccaccatggtggatggcaggtacctggtcgtgtccctcagtaacgggaccatccacatctttcgggtccgttctccggacagttaaaggggctaggactagggtgagagggagtggggagggagagggcaggaaggaggcagagctgtccgtgggaggtggaggccgaggacattttcctgaagggcaggggttggcaacttttcaacatggagtgccaaactgctaacccgtcttctagtgtgtgagaatagggaccaaggtggtggcgtgaccttaactctcagaagcagaggaggcaggtgggtggagggggatgctgggaattcacctgcctcttgctttttgtgggtggctgctgccaccaccgccgctgctatatagtttaggtttctgaggtttgtgagcctgtcctgctttgcattcttcaaaaccattcctgatagagtagccgagggagagtcttggggccaagaagggcccagggtgggtcaggcgtgtgcactgtggaacagagctgagaccccggccccccttggactggcacagggtcctacagagtcagaggaggcctgagatttcgaatgggcagtgaatggcctcttctgccagccacaggcaggatgctccttgatcacggcatcccccggcggtagtacagggtgagcttgcaggagggtctgcaagtgcagacagcagctggggccaaagaggtgttaggttcaaaggctgcgaagagaataggctactggaaaaccaaacccaacagaattcacgtccaaaaatccacattctccatcgcttctcagccttttggctaagattaagtattaaaaaaaaaccaggctctgccaggcgcagtggctcatgcctataatcccggcactttgggagtctgtggcaggaggattgcttgaggccaggagtttgagaccagcctgggcaacatagcgagaccccatctctacaaaagattaaaaattagctgcgtgtagtagcatatgcctttcaacgtagctactcaggaggctgaggtgggaggatcccttgagccgaggagtttgagtctgcagtgagctatgatcgcaccactgcattccagaccccatctcgaaaaaaaaaa

SEQ ID NO: 66058 - DNA, 3869 bp, Homo sapiens
ttttttttttttctcattaacaaagcagtcaattccctttatttttaaaattttatgtacacatatgaatgatctgtataatgtacattcaatatagagaagctttatatatgtgatagttgtagagaacatttcagaatgatactcatcttttacatgacatcttgacatccatttttaaatttgttttgcacaagctccttgtcattcaatttggtaaaagccagttatacatactaatgtgtactgtgagcctttcagaagggttaatgattgagggatgccagtgaaggggtgcaggggacaaaacctaataggtcttgggatgggtggggggggagggatgggccacggcaggactttggatgcagggagagggggaaaatattctttcccggggggaaaagtgacttagcccaatttttgttgactgtagctcaaccctacagtcatgcctagttcaaaaaaaaaattccaaaactaggaagaaagttttgtctttttgattcacagttttgtaaacagatataaaggaacaaatgtgcttacatacaccaagaaaaaaaaaattcttgtgtacccacttatgttgatccacagagtgctttcttataatgtgatacaattaggatcactgactttttttcctaaaaatatatttatagaaaaaggaataacactgtcatgaaaccaggagaaaggcagtaagagtttgcttcaacgtatcagctggaggaatgtggacttggcactggcctttcagcgtttattgtctctcgtgaatatttcaagtctgatagccaaggtcgcctgcctcatggtctacaggaggtggcaggttagacatgactgatgtagatgtacctgcggtaaggtagccagcaactccaggtcctgtgaggtatcctgctgtttgtgactcagaaatgaacaaatcatgtttctgatctttgaaggcactccagactgaagaacggcacaggatttcattcacctgttctccatactgcaaacttcgagtcattgccttgagagctttaacaatctgagccttagtggctgctgggctgtccaggttttcaaggccaatgccttcgagtaattttaagaggtatggaaccaaatctgctttcagggcttgtgctactaattcactctgctccttctgaaacattcgattaattgcttcacaggctagaccaacagtatctgctcgctttttcattccattcatcagtgggccaatggtctctaaagatgccatggctcgaacacacagctcattttcagacaaggcatggataacccgaatggcactcttaggaatggcattgttcctatgattcattgcctggataactttgggaagatggcccaatggcgggacctgatctgccagctgaggttgtgcgctgaagagacacactgttgccattgtcaaggtttccagagtttctccatgaggattgttcttctctaggagctcagttaatttttctaacagggcaataagaaattctctaggctttcttagaacccaggctggttgtgcaataaagatcctcaagaagactcctccaacagcaagttccccctctgcttctccaaacaccacagcaaaatcttcaggcaacttccagtttgcctcagggttgtcctgctgatttttaaagtgctctagcatcatttccctaactgttgtggacactttatctctggaattatcattccaaattaactcaggattttcatgagttccttcaaaaaatatgtacagcagcttcaggattgtctctcatagcatcccatgaaaacgcttggtagaaatttcattaacggtaattcgaacctttggacctatcagtttatctgctgtcattttggcaaaaagttctgctgtttgggctcgaacctgtggatgtgttgaattgcagaacatatccagtaaatggaatcaaagcaccctttgccattgcttctttgattaatttttgtactcggatgtccaaagcataaagagtttcccagaaccaagctgaccgacttgatggcaatgaatgtagaagagccaataaactggacaaaacccattgattcagcaatattgttgacacagtcttggttagatgtcactatattcacaacctcttaaagccaacctgctgtacttgaccagctccatgaaacgcggagaagagaaaatatacacctacagtgcccaatgtcattcactctcagaacctggattgtattttatgacatttctcagagcctccaaagccatttctactctcggtaagcgatctccatgttgctctgactccacttttgccgcgtgtgtgatggccatgaatgtgtgcaagtattgggcctgcgagcctatataatccaagagacttgcagcaaatgcttttggaacctccagttggaaagtaggaacttcattatacaccctaacaaaaatctcccctacaataagttatttggcatgatcactgtagacaaattctgatccataagttttgtcacaatcaccttttttaatcatgttttcttgttgggattcaagaaattcaagtaattctgctcttgtagaattgttccatatcaaatatggactttctgtgttgctgttaagcatcttcaaaatctcagtcacactagccacagcaagttttctagcaacatagggtgtcagcatgccagctaagcttttccttatggttggattttctggagttgcttgttcttcagccaaataccctccaaggcgactcagagcatggacactcagtttggcaaggctgtttgctacctcctgctggtttgtttcttcacttttctgaatgccactctcttctagtgtgtagtcataattaaacagaaaaccaaggagataccacaaaattccagcctgaaataggtgtgtctgtagccagaaatccacagcaaaagaactgacacattctaccccaagagcagctacgcggggaatactcttgccaaaatatagtacccgacagagatccttgatgatgctaggcatttccgtgatcttctctcggcattcctcaaactgagcagccacactgtagcatttacttatgtatccacacacctgtactgacatgtcacttggtttactagaacgagtcaagacagccacacagcgactaaatgcctcttgtaacacctctagtccattctctcttctgagctcttcagcattgagggctgaacagttgacagtatggaaagctagctctgtagccgcaggcaacaatggtgattcttttgagaaaaggaggtcatctgaagtttccattgttatagtccgaataagcatggggtatcctgcatatttataaggctgtaaatcttctttatgacggttgaagaggatgctctgtgtttttagaattaaaattatattctctggatctggcccatccactatttttgctgatttggtacataaaaattcatatgctttatttactttttcaaacatgtccctcccttctggattcttatcagggtggtacttttgtgcaagtctgaagtaagctttcctaatcttgctctcatcatgcggtccctgtccttgaggcagattaagcacttcataagcatcatctattgacatcataggtggcttcttttctacttctttcttccaggcatcaagggtatcttttagaagcttaaccgggtctttaattggccaatctggaaaccggagtgtatcacacagttgtttgaggtaataaatattacaaaatagttcattttcgagttgtggatagttgattataggaatggggcaatactgataaagtgctcttgtgttactctgaagacgaggtgtg

SEQ ID NO: 66059 - DNA, 545 bp, Homo sapiens
cagaaacatggctttaccagtatgaccctcaagacaaaatacaaaacaatggctaccaagaggtggaagtggcccagtcacagcaagagcagattgatcaagagcaaaggtcatggtaacagttttttggatcctcaagtcattttgcttgttgactttttggagggccaaataaagatatcatctgcttattatgagagtgtttcgagagaaatccaaagcttagcagagaaacgcctgggaaagcttcaccagagggtcttccaccgtgacagttcccctgcgcattcctctcataaagcaagggcagtttagctagaatttctatcaaaaatcattaggtatccatctcccagtcctgatttggctccttctgacttctttttgtttcccaatcttaaaaaaatccctgaagggcacctgtttttcttcagctaataaaaaagacatggttaatttcccaggaccctcagttctttaaggatagactgaatggctggtatcattgcttgaacttaatggagcttatgttgggaaacaaaaat

SEQ ID NO: 66060 - DNA, 1350 bp, Homo sapiens
ttaaatttgtagattaatttgagaatttacatctgtagaacattctaggaacgtgctatctcatgtcatgtattcatttcttggtaatgtctttcagaagagctttagtgtttccatatatagatcttatacatcttttgttagataaaagatctttgtatttttgttcctaaattcttcatacatttgtattgccattgtaaatgggatctttcttccattttctaattagttattggtggtacatgggaaaagtatttgaggtttgtgtgctgatttcttgattttgtagatagccactgtattgaattctcattacttccagtaaaatcttagttgattctcttaggcttctttggctaacatttttcatttaatatgcaaataatgatagttttgtctcttcctttccaatacttctactctttccttcctttcccttttcctttttcctttcctttcctttccttttttttcccttctcagggccttgttgtcacccaggctggagagcaatggtgtgacctagctcactgtagcatcaaactcctgggcttaggggatcctcctgcctcagcttcctgagtggctgggactacaggcaggcagctaatttaaaaaatgtgtttgtagagacaaggtcttgctatgttgcccaggctagttttcctgccacttcagaggaaggactcaggtttcctttttctcctacttttaagagtttttattaggaattatctgttgaatgttatctaaaacagtcaataaaatgtattaagtaccagctgcatgcaagaccctaagttagatacagtcagccctcttcatcagcaggtccacatcttcagattcaactagataaggctgaatatttgaagaaagaaacaataaaaatacaattagaaagtacagtataacaactgttgtcattatacaatatctatacattttattagtgatgacctaaagtacatgggaccaggcacggtgactcacacttgtaatcccaacactttgggaggccaacctgggcagcatagtgagaccttgtctttaataaaaataaaaataaaaaaattagccagtgtggtggtatgcacctgtagtcccagctactcaagaggctgaggtgggcagatcactggagcccaggaggttgcggctgcagtgagctgtgattgtgacactgctctccagcctgagtgacagagggtgatcctgtctctaagtaagtaaataaataaagtatatggggggggtgtgttggttatatgcagacactgcaccattatacgtaagggattgagcatccacagattctggtatggtgtgggggcgatatcctagaac

SEQ ID NO: 66061 - DNA, 1863 bp, Homo sapiens
  misc_feature (1)...(1863): n = a,t,c or g
ttttttttgtttcctccagtgtgatactttatttgtttttttgtgggaaacctctgggacctgccctggagagcctggcaactgcagggcactgtggggctgggaggtgcctcagcacgtggggccaggggctggcatgcaccgcgctgcacagatgaggtcggtggtgaccaggcagaggtgacaccagggacggtctccttgagctgcaacaactggcccgaggctggggaccccacatggtgatttcatcccaaacagttcttgattctacgtgacctgatttggggggttcaggtttaagggaggccaggtcttggacgggcccccgtggttctcggtgtgaaggggacgtctgctgctccccaccagacccgcagtcccagtctgccgggtcatgaggggtggaagtgcctgatgagcgccttcttgtcaatcttgcccatctggttccgcgggatctcctccaccagcaccagctccgagggcaccgcgtacggggccaggacatttctggcccactctttgagctccctgtgggacagtgagtgtccttctcggagggtcaccacagcagtgacccgctggccccatgtcatatccggaactccaatcacagccacatctgtgatgctggggtgggccagcaggtgccactccacctccagggcgctgaccttgtagcctccagtcttgatgatgtccactgaggtccggcctcggatccagtactggccatccttaaacaccacggtgtcccctgtcttaaaccagccatccagggtgaatgcactcttagtttcttctggtttattccagtattctcgaaacacggagggtcccctcaccagcagctccccctccttttcttcaaaccctggggtcaccttggtccccctctcgtctccctctgcgtggatggtgtaggagcaggcttccctctgtgggttttctgagacaatgcgcacctgtactccaggcagtggggtccccacggaacctggcaggcgcatggcagtggtcaggggcccggacagagccatgccgatctcggtcatgccataccgctccagcagggtgtggcccgtgatgttcttccacttatccagctctgggaggggcagggcagctgagcctgagaccatcagcctaattttttcttcacaaactgcacgcaagaaatcctgggcgtgcggctgggtaaaatgcctgtcgtagtactccatcagcttggtgtatattgtaggcactgccataaagacattgatccgcggcgtttcagaacttaagaacttttcccaaacctgctgagggctgaactcaggcatcatcacacaggtggctcccacccagagaggacagagcagcgcgttgaccacaccatggacgtggtgcagcgggagcacgtggaggatcacgtcgtctttggtccatgcccacttgtggaccagcccggtcaccacagccctgatgttttggtgcgtgctcagcacgcccttgggcctccccgtggtcccactggtgtagatgatcatggcgcccttgttcctccatccctgctctgggaccgggacctctgccggttcctctactgctccagtgtagatggctggtgtgagcggcagcagcgggacccccagcttcctgaccaccgggctcaggagctccaggtactcctggctggcaaggaccacagagctctgggagtcgcagatgacatactccagctgggccgcgggatgcttcctgtagaggggtactgccacaccgccgctcatccatgaggccctctgggccacgacgtaggaggcgtggttagctcataggaaggaggaatgccnctcnncagggtaggctatcgag

SEQ ID NO: 66062 - DNA, 1122 bp, Homo sapiens
ggccagagcagctgatcacaggaaaggaggatgcagccaacaactatgcccggggccactacacggtgggcaaggagagcattgacctggtgctggaccgcatacggaagctgacagatgcttgctctggcctgcagggcttcctgattttccacagttttggtgggggcactggctccggcttcacttctctgctgatggaacgcctctccctggattatggcaagaaatccaagctggagtttgccatctacccagccccccaggtctctactgcagtggtggagccctacaactccatcctgaccacccacaccacactggaacattcagattgtgctttcatggtggacaacgaagccatctatgacatctgccgcaggaaccttgacattgagcgccctacctataccaacctcaaccgcctcatcagtcagattgtgtcctcaatcactgcttctctccgctttgacggggccctcaatgtggacctcactgagttccagaccaacctggtgccctacccccgcatccacttcccgctggtcacctacgcgcccatcatctctgccgagaaagcctatcacgaacagctctctgtggccgagataaccagctcctgctttgagcccaacagccagatggtgaagtgcgacccgagacatggcaagtacatggcctgctgcatgctctaccggggcgacgtggtgcccaaggatgtgaatgtcgctattgctgccatcaagaccaagaggaccatccagtttgtagactggtgtcccacaggcttcaaggtgggcatcaactaccagcccccgaccgtggtccccgggggagacctggccaaggtgcagcgggccgtctgcatgctcagcaacaccacggccattgcggaggcctgggcccgcctcgaccacaagttcgacctcatgtacgccaagcgggcctttgtgcattggtatgtgggagaggggatggaagaaggagaattttcttgaaggccaggggaagacttagcttgccctggaagaaggattatgaagaagtggggactgattcgtttgaagaagaaaatgaaggggaggaattttaaatatataccttccccttgaaaaaaaaaat

SEQ ID NO: 66063 - DNA, 1850 bp, Homo sapiens
ttttttttttttctccgtacaagtattttatttccattacaatagtgccacgccaaaactacagtagctcaaaacataatacaaaaaatagattcccagctcccaaccccacgtccacgcacccacagagaagccagccctatggctccccaggcctaaggggaggggtctcacttcattttccttaaagctctggagcgggtagtggcagtggcaggggcttccacccctgctgggcctgagccctcttcttccccaaccccctgccggccccggcagacctgagccatgagtgtggtctccattccctcgggctgcacccccagccctaggacacctgcctgtgtccagggagggggtccaagcccatggtgctggtgctgacactacaggaccaccaccctccacgcggaaggcaggagggtcgggggaggggaggcagaggggacaccatggctgggagaagcccgcctctatgtggcaaggggactgcggctggcttctgcttcagctacttctcgggttcctgtctcctctgcagagctaccaggactgctgcgtgctgggaccaggacctccatctggaatccactctcgataccctgcaccagcttggaggcagatcccaaggtggcaggggtgtccctgtgccgtctgcttcctctcgggcaggaggattccagcttcccgggtgaggggagagcactgtccaggcagggctgggccaggaggcctgggctgctgaggcgggaaagcggtggctgtggagggcacgtgctgcccccacctccgtctcggggcctggcttccccactggatggcagaggccgctccaggtgcttccacttggtggcgcccatgagtctgctactggagaagctgtggtctcagggaggagacagacaccacaggccagactgggtggaggaatcttcccctcacaatgtcccctggctaaaagcatccatctagctgcaagtactatcttgattcaacccaggggccgacaatggactgcagcccagggtaagtccagcagttttgcagtcttccgatgccccgtgccatggacctgccggccagagctcctgggctcccgtggaggttagccctgcaggcaccggggaaatggggctatggcctgtgcttcagtcaggacacctgggggctgcactgcggaggccaagggcatctaggagcaggggctgtctccttggggtggagactggcggctgcagcctcagataaggcactagaggactggactggtcctgggagccaggcccagccatgtggtggatgacggtgctcagagagaggatttgggtcctgcgggaggtgacagctgtttctcttttcttttttttgggacggagtctccctctgtcacccaggctggagtgcagtggcgcaatctcagctcactgcaacctctgcctcctgagctcaagagattctcttgcctcagcctcccgagtaactgggattacaggtgcccaccaccactcccggctaatttttgtaattttttttagtagagatggggtttcaccacgttggccaggctggtctcaaactcctgacctcaggtgatccgcccacctcaacctcccaaagtgctgggattacaggagtgagccaccgggcccagcctgttttctcttttctcctttccctggggaagagggttggccggacagaccctggtgtgggctgggatgggggactgctgcgtgctgggaccaggacctccatctggaatccactctcgataccctgcaccagcttggaggcagatcacaaggtggcaggggtgtcctgtgccgtctgcttcctctcgggcaggagga

SEQ ID NO: 66064 - DNA, 3458 bp, Homo sapiens
  misc_feature (1)...(3458): n = a,t,c or g
ggtttacacgtacctccgcctcatcgtggaccaccatgggactgcccagctccaggccctgcgacagaaggaagtagacttctgcatctcactgcttcgggaacggttcatggaatgtctgatgattggtcgggatctcgtaagactacttcagaatgttgctaggataccagaatttgaactgctttggaaagatattatccataatcctcaggccttgagtcctcagttcacaggtatcctacagcttcttcagtcaagaacatcccgaaaattcctagcatgtcgtctaaccccggacatggagactaaactcctcttcatgacatcccgggtgcgatttggtcaacaaaagcgataccaagattggttccagcgccagtacctgtcaactccagatagtcagtctctgcgctgtgacctcattcgctacatctgtggggtagtccacccttctaatgaagtactgagttcagatatcttgccccggtgggccatcattggttggctcctgacaacgtgcacgtcaaatgtcgctgcctccaatgccaagctggctttgttttatgactggctgttctttagtccagacaaggatagcattatgaacatagaaccagccatcctggtcatgcaccactccatgaagccccacccagccatcactgccacactcctggacttcatgtgccgcatcattcccaacttctatccaccattggagggccacgtgcggcagggtgtcttttcctccctcaaccacattgtggagaaacgggtcttggcgtgtaaaaagtattggctctacctcagactgctgggcatatgtcttcttggctcttagaggaatttctctcctgccatcgtattacaaagacacctagctcccctgtttgacaaccctaagttggataaggagctgcgggcaatgctgagagagaagtttcctgagttctgcagctcaccctccccacctgtggaagtcaaaattgaggagccagtttccatggagatggacaaccatatgtcggataaggatgagagttgctatgacaatgcagaggcagccttcagtgacgatgaagaggatctcaacagcaaaggaaagaagagggagtttcgcttccaccctatcaaggagacagttgtggaggagccagttgatatcaccccttaccttgaccagttggatgagtccctgagggacaaagtactccagctacagaaggggagtgatacggaggcccagtgtgaggtcatgcaggaaattgtggaccaggtcctggaggaagactttgactcggagcagctgtctgtccttgcttcctgcctacaggagctcttcaaggcccactttcgaggggaggtcctgcctgaggagattactgaggagtccctggaggagtctgtaggaaagcctctgtacctaatatttaggaacctatgtcagatgcaggaagacaacagcagcttctctctacttctagaccttctctccgagctatatcagaagcagcccaagattggctaccacctgctctactacctgagggccagcaaagccgccgcagggaagatgaacctgtacgagtcatttgcccaggctacccagctgggcgatctgcacacctgcctgatgatggacatgaaggcctgccaggaggacgatgtgcggctcctgtgccacctcacgccctccatctacacagagtttccagatgaaaccttgaggagcggagagctgctgaacatgatcgtggctgttattgactctgcacagctccaggagctggtctgccacgtgatgatgggtaacctggttatgtttcgaaaagactcagttctcaacatactcattcagagcctagactgggagacctttgagcagtattgtgcctggcagctctttctggcccacaatattcccctggagaccataatccccatcctgcagcacctcaaatacaaggagcacccagaggccctgtcctgcctactgcttcaactccgaagagaaaagcccagcgaggagatggtgaagatggtgctgagccggccctgccatcctgacgaccagttcaccaccagcatcctgcggcactggtgcatgaaacatgacgagctgctggccgagcacatcaagtccctgctcatcaagaacaacagcctgcctcgcaagagacagagcctgaggagctctagcagcaagctggcccagctgactctggagcagatcctggagcacttggacaatctgcggctcaacctgaccaacaccaagcagaacttttttagccagacgccaattctccaggcgctgcagcatgtccaagcgagctgtgacgaagcccacaagatgaaattcagtgatctcttctccctggcggaggaatatgaggactcttccaccaagccacccaagagccggcgaaaagcagctctgtccagccctcgaagtcgaaagaatgccacacagccccccaatgccgaaggaaggagtcggggttccagcagtgttttcaggaaggagggaaggacacggaaaccgaagccttaccaagcgggaaacggaaaagggtcctctgcagtgggctctgacagtgactgaggccctgcattccccatcccacccccggctggactgccctctccttcttggtgattcaaaggttaatagaggctgaggagattgcaggggaaacacccttgctgcatccccaagctcccccggtggaaggaggagctttctcctctggctgagtttgagaagctgccatgcacgccctagccccttccctcctcctggggcctccagcccctcacactgctgttcccagtgatatttgggatctgactgaagccagaggctctgtaaaatcagaccatagtggaagtcctcagccccctggccccttccgcaatctcctcccccagtctcccaaagagccatttcaacagagaagggaaatgacaaaggggcagctggccagataagctaggatgagagcagagactcagtgtgtgggtgtcccttcctgcttcccccttcaggtcttggtttgttctgaagggacgttttatagtcactatccacatgccagtgtgaaatgggcatctatgacgtggtcagggtgtccattcctaatcatggggggngggggggnccccaaagaatgccaccnaagcattcagaaaggagtctgaaagggtggccacagccccacgatggtgtgccctgggaggcttaggttggtcttgaggttgggcacctcaatctacaccagagccccaggggagtcccagagggcaagttttcacagaattgtcaaatgatcccatttccttgagtctgttttttttttttgtttttttttgttttttttttggcagagataatcgtgttcttaaaattgtttttttaaatgacaataaaacaagccagaatgtcaaaaaaaaaa

SEQ ID NO: 66065 - DNA, 1610 bp, Homo sapiens
  misc_feature (1)...(1610): n = a,t,c or g
tttcaccattgtgattttgtttattttttctattaaaaacaaaaagtcacacattcaacaaggtgtgccgtgtgggtctctcagccttgcccctcctgctcctctacgctgcctcaggcccccagccctgtggcttccacctcagctctagaagcctgctccctctgcagggggtggtggtgtcttcccagccctgtcccatgtgtccctccacccattttcctgcattctgtctgtccttttcctccttggagcctgggccagctcaaggtgggcacgggggcccagacagtactctccagttctggggccccccgagtgaggagggaacgggaagtcggtgccttggtttcagctgatttggggggaaatgccttaatttcactctcctcccttctccagcctcaggggaggatctggaggatccactactgtctttaagatgcagagtggaggggaggtgggcacccaccctgcgattctccaccctttccccttctttcgtcctcaccatctctgcagacccctctcctcctccttcctcttggnctccacaactgaggggaggctggtgcccaagctgtggcctgcagtctgtgaggagggctgtcttgcctcacactcctcacagcctacttccccttccccggggctgagagggtgaaagtgtgtggggaaggagaggactggtttcctgggttctcaggggccaggaggagtaacagaaccaggtctgctccccaccttactcggatggcctccctgcccctctgctggcacagcctgggcaaggggagaaggtggtccctgcagaggggctccaggctggtgagagcccccctgctgtcaggaccagattttcccagccatccagcatgctgcggggagaaggggcagaggctcacctccctcctggggccttttgttttggatcctggggatggtgagaatggaggttctagaaggggtaaggccagaacccagggatccaggagtcggctctcagctggagcttccataccttctgggctccctttgctgaccaccagcccaagggagctaagaccaggagggggctgggcgctgtcccttctctttcccaggagccctgccaggggctgtgggcctacaaggcttccaggggatgccatccagcctgtaggaaaccaaagatgggaagtggctcctagggggctgtactctctttcctcctcctccccagtaccacatatactttctctccttctatctccagggccccaccaatctgtttacatatttattatcctatgggggcctgagcaggattgagggagccaggggaggggcaggagtcccagcaccatcggttcatagtgggcttgtgtgtttgttttagatcctcctgggagatggggatggggccaggctcagtgtactaggcctctctgtgctgagccccaggctcccggccccttacccactctttccctgtggctggtctggttctcatgtaaacccactccttgctttgtctccctggatatggatttcagttaagtattttgtaacccgttacactgtgtgtccttgtgtaaataaacttgtttctggcagtgccaaaaaaaaaa

SEQ ID NO: 66066 - DNA, 2208 bp, Homo sapiens
caaacgctgagtgactcggggccggacagttcataaataattgattcctttccccactaaagcagtcgaggagatttgtaatccactttttagtgcaacaagagctccatgttatgcttgtaataaattatttacacgggagctgggctggtgtgcagtggcaggtcccgtcagaagagatgaggctcctgggacaggtcagcgtcaggggcagcctgctgtctgctctggagggcggcgctcacctctgggtcgcagtccccacgatcagccagcagctgtgagagaggagcaggtcctcagcccatgccgcccactaggcctcagaccacaggggaggggctctggcagaaatagtcgagttgtattgccagccaggcaggcacatggcccaggcagctgtcaattctcatgtcccccacgtggcccaaggtgggcatcttgacgttacctctgccacgtgtgagaagctctttttcgggcaccgaggtattaactgcagcagaaaaagacgagcttttgttatcagttccacggggttgccctagagagaaaacaggcaaactcacaggttagaagacatacagaaacagggctggtgtgtcccccatagtctgcatgctgtgccggaacattctttggcagaaggagcctccggctggggggagctcccctggaggtgggactggcccttgcacctgcctgacccttgagctccaggctcctgccagctggaggtgaaactgtgcttgtatccccagccacgaagagctggaccagcttcaagtacatgtccacagcaacatgcaggaaggcctcttccctgatggccgcgtcttcatggaagtaggagagaagactagaggtaaagacatagtgacaaatggctacagactgctggaaaggtagcaggtgatgccaagggatactgctcatctgtggagcagaggcacagacaacccttcccatctggcgggacccagaggtgctgagatgggggtctgggaaacactgcccagccctgaccagccctgtgggtggaggtacctgtaaaaagcgaaaggcagcagcctggtgtgctgatccggggccacacggaggaggagccgccccagcctgaggtctgcaacaccaagaagtggctcaggcaactctggacatctctgcctattatcagtgctggggacacccctgggggtcgggacgtgtaccctgggaggcctggctgtggggatagtgtggggcgaacagcctgagctgaggatacccaggtacctgtcagcagctgggagaggatgggggggtcgacctcttgcaggagggtgggtgtggtgcagagagaggcagtccccatgataggcccattggtcctggggttgaccagtgagccagtaaattatcttattgctttaaacaagtttgtgcttaatctgtcccaactaaaatggagcttataaacttacttagcaaggaacctcaaggagggctcgttcttaaccatttgcaagttgcctctgaaaagagcggccctccgcatttgtgcctcagcagcgtgtttcttaccactctctgtcaactgaaagagtgccagccaggatatcttcctcttctctaaacactcgaggattgctgcacaaacgtggaaagcctttggcaggtctgtggtgctctgtaaaccgcaggagaccaaccctgagaatggccgacctggtgctcccatgggtaggagggtacagccctcagcacagaagagggcatttcctctttgcttattgtaagtcttaaaactggtgacagttttacctatagaaggtaatactgggcctctggacagaagaggctcaggtaggaggccagggacttcgagcacccacaccaaggctgctgcaccacgtcctcaaataagacattaaaagaaaggcccacaggccggatgcagtggctcatgcctgtaatcccaacactttgggaggccgaggtcggcggatcactgaggccagttcaagaccagcctggcaatatggtgaaaccccgtctctactaaaaatacaaaaattagccgggtgtgacagactcacgcctgtaatcccagctactcgggaggctgatgcaggagaattgcttgaacccaggaggctgaggttgcagtgagctgagatcacaccactgcactccagcctgggtgacagagtgagacccccatctcaa

SEQ ID NO: 66067 - DNA, 2668 bp, Homo sapiens
cccacgcgtccgcccacgcgtccgtacagaccacaattactatatatctcgaatatatggtccatctgattctgccagccgggatttatgggtgaacatagaccaaatggaaaaagataaagtgaagattcatggaatattgtccaatactcatcggcaagctgcaagagtgaatctgtccttcgattttccattttatggccacttcctacgtgaaatcactgtggcaaccgggggtttcatatacactggagaagtcgtacatcgaatgctaacagccacacagtacatagcacctttaatggcaaatttcgatcccagtgtatccagaaattcaactgtcagatattttgataatggcacagcacttgtggtccagtgggaccatgtacatctccaggataattataacctgggaagcttcacattccaggcaaccctgctcatggatggacgaatcatctttggatacaaagaaattcctgtcttggtcacacagataagttcaaccaatcatccagtgaaagtcggactgtccgatgcatttgtcgttgtccacaggatccaacaaattcccaatgttcgaagaagaacaatttatgaataccaccgagtagagctacaaatgtcaaaaattaccaacatttcggctgtggagatgaccccattacccacatgcctccagtttaacagatgtggcccctgtgtatcttctcagattggcttcaactgcagttggtgtagtaaacttcaaagatgttccagtggatttgatcgtcatcggcaggactgggtggacagtggatgccctgaagagtcaaaagagaagatgtgtgagaatacagaaccagtggaaacttcttctcgaaccaccacaaccataggagcgacaaccacccagttcagggtcctaactaccaccagaagagcagtgacttctcagtttcccaccagcctccctacagaagatgataccaagatagcactacatctaaaagataatggagcttctacagatgacagtgcagctgagaagaaagggggaaccctccacgctggcctcatcgttggaatcctcatcctggtcctcattgtagccacagccattcttgtgacagtctatatgtatcaccacccaacatcagcagccagcatcttctttattgagagacgcccaagcagatggcctgcgatgaagtttagaagaggctctggacatcctgcctatgctgaagttgaaccagttggagagaaagaaggctttattgtatcagagcagtgctaaaatttctaggacagaacaacaccagtactggtttacaggtgttaagactaaaattttgcctatacctttaagacaaacaaacaaacacacacacaaacaagctctaagctgctgtagcctgaagaagacaagatttctggacaagctcagcccaggaaacaaagggtaaacaaaaaactaaaacttatacaagataccatttacactgaacatagaattccctagtggaatgtcatctatagttcactcggaacatctcccgtggacttatctgaagtatgacaagattataatgcttttggcttaggtgcagggttgcaaagggatcagaaaaaaaaaatcataataaagctttagttcatgagggatcgacacctttggttcaaatgttctctgatgtctcaaagataactgttttccaaagcctgaaccctttcactcaaaagagcaatgatgaatgtctcaagattgctaagaaaaacagcccatgcaagagtgagaacaaacacaaaataagagattttctacattttcaaaacagatgtgtggcaaaaggatgttgtttttctggtctagatccatctgtaccaacaagttcatcactttacagaacgaatctttttatccgtacaggaggttcaaaccatgtctgcctcttcctttgtaatgaatgacctttctatgagctgtgacaaaatttccgaacaattagctaaggatttgggaagagggggtggcaaacggggctttctgttttcctgcctcagcatgaaaacatctgatttatgctttatggaagccttacctccaatccccaactgttaagtcccatgaaaccacagttgctctgggctgatggaaacaaaaggaaacagtatgaagagttccttaatcatttttgaaacaaaaatgttaagggattttaaacatatgattatttttaattttatgccttttcagtactaaacacccatttcattgctgattcctgtctaagaagccattcacgtcagcatggcgatagaaagaatgaaaaaaccctgctgaatcatacagtaattttctttaaagcacatagtagttacataaatatatatatataaatatatttttgtttataactaacacaaggcaggatcttgtgactctaagagtgcgttttgtcatcaagacaaaacagatgcaagatgcatcactgcattacttccatagagttgtaaaataatccttaatattagaatatttttctgtcacttagcaaaagtggttcagttcattgccgcgcccatcatgttcttgactatttgatccactttttcgtttatgtcaaccccttccctctctggctaaataaagtggatgcagaaagctccttaaaaaaaa

SEQ ID NO: 66068 - DNA, 655 bp, Homo sapiens
gtggaggaactcatactgtcttataactcagtattttaaaccgataacactgattgcataaacaaacaagcaaacaaaatgaaaacttatgcaaatgttaactttgtttccctgctttttaactctttgttgtttctctttatatcttactgtaccatgtcttgaaaagttgttgtagctactatttttggttggttcatcattttgtctttccacttaagagtagtttacacaccacaattacagtgttataatattctgtgtactttctattactggtgaattttgtaccttcagacgatatcttactgctcattaatgtcttcttttagatggaaataaagtatttagtatttcttgtcagacaggtctggtgttgatgaaatccctcagcttttgtctgggaaagtatttctccttcgtgtttgaaggatatttttgctggatgtactattctagggtaaaagttttcttccttcagcacttgaaacatgtcatgacactctctcctgacctgtaaggattctagtgacaagtctactgccagatatattggaaccccattatatgttatttgtttcttttctcttgctgcttttagggtcctttctttatccttgatgtttggcagtttgattattaaatgccttgagat

SEQ ID NO: 66069 - DNA, 1549 bp, Homo sapiens
ccaggcccctgccccgtgcactccctgaggtcacagggccctgcccagccgcccactgtgcctcgtggccatggcctgctcctggccctagtctgacttgtccctgcccccaaccctctccccagctcagctcccactggacacccttcacggttcccaaggccagccagctgcagcagtgacgcctggaaggacatctggtggtccttaggggagtggcccctcctgagccctgcgagcagcgtccttttcctcttccctcaggcagcggctgtgtgaaccgctggctgctgttgtgcctcatctctgggcacattgcctgcttccccccagcgccggcttctctcctcagagcgcctgtcactccatccccggcagggagggaccgtcagctcacaaggccctctttgtttcctgctcccagacataagcccaaggggcccctgcacccaagggaccctgtccctcggtggcctccccaggcccctggacacgacagttctcctcaggcaggtgggctttgtggtcctcgccgcccctggccacatcgccctctcctcttacacctggtgaccttcgaatgtttcagagcgcagggccgttctccctcgtgtcctctggacccacccgccccttcctgccctgtttgcgcagggacatcacccacatgccccagctctcggaccctgcagctctgtgtcccaggccacagcaaaggtctgttgaacccctccctccattcccagttatctgggtcctctggattcttctgtttcttgaatcaggctctgctttccccctagccactacaggcagcctctgacagggccgctttacttgcattctgcagcaattacatgtgtccttttgatccttgcccaacttcccctccctctcccagctcctggcccctggcccagggcccctcttgctgtttttacctctgttccttggggcctagtacccagcaagcacccaaatgggggaggttttgggatgagaggaggaaacgtgtatacctgtaacatctggtggctcttcccccagaagtttgtgttcatacataattgttttccacgctggatcataatgtgacgtgcagttctgccctgtgctggggagccacatgaagcttcccctggctaacttgctaccccgcagcaatcccagtgtggctgtctgcttgctaaaaaatggatctgtgctcatctgtattgatgtccttggagttctacaagtggaacttaagtgtcaaaaagaatatgtggtttttagctgagcgtggtggctcacacctgtaatcccaggactttgggaggctgaggcaggaggattacaaggtcaggagttcgggactagcctgtccaacatggtgaaaccctgtctttactaaaaatgcaaaaattattctgggtgtggtggcgggcatctgtaatcccagctatttgggaggctgaggcaggagaatcgtttgaacccgggaggcggaggttgtagtgagctgagatctcaacactgcactacagcctgggcgacagagcaagactcc

SEQ ID NO: 66070 - DNA, 725 bp, Homo sapiens
  misc_feature (1)...(725): n = a,t,c or g
cccaaccggaaaaaggttaacaccctgtaaatacacaatctctcctccatttcaccatcctcctgtttagaccatccccactgccctatctataccaccaccctgtctacaccagcaccactaccccatgtataccaccaccccgtctacataatccacccgtgtacaccacaatgttccctttgtctgcaccgtcctcctgtctacactggcaccactgccccagctataccaccaccccgtctacataatccacccgtgtacaccacaatgtccccttcgtctgcaccgtcctcctgtctacactggcaccactgccccatctataccaccacccgtctatacaatccacccatctgtctacaccatcgcctctcctctgtctacaccatccttctgtcaacaccggcaccactgccgtatctatatccacccatctacaccatcacctcccctgtgtctacaccatcctcccatccacaccagcaccaccaccccacctacaccatcccaccatctacgccattgccaaatctacacagacgacctcactcccatccacgccttcacacgcacacccgtccacaccaccatctcccccgtgtccgcacggcggccccgctccatcggcccgagaacagcgacggtggctttgtcccacgcgtcgggtctggcccggngtgcccgaggagctcagggaccgtgtagcccggtgtgcggcccct

SEQ ID NO: 66071 - DNA, 1834 bp, Homo sapiens
ttgcagtgagccaagatcacaccactgcacttcagcctgggcgacagggcaagactgtctcggaaaaataaaagaaagaagatgctgatatgctacaacacggatgaacctggaggacgtggtgcagtgaaataagctggtcacagagagacaaatcctgggtgatcccacttacatgagacaggccgacggtcgcaaggtcctacggtcaagcatccgggagtttctatgcagcgaagccatgttccacctgggagtccccaccacacgggccggcgcctgcgtcacgtccgagtccacggtggtgcgcgacgtgttctatgatggtttggatcctttgagatttttaagtctgcagatgagcacacagggcgtgcaggccccagcgtggggaggaacgacattcgagtgcagctgctcgactatgtcatcagctccttttaccccgagatccaggctgctcatgccagcgacagcgtgcagagaaatgctgccttcttccgggaggtgacgcggcgcacggcgcggatggtggccgagtggcagtgtgtgggcttctgccacggcgtgctcaacaccgacaacatgagcatcctggggctcaccatcgactacgggccctttggcttcctggacaggtacgaccccgaccacgtgtgcaatgcctccgacaacaccggccgctacgcgtacagcaagcagcccgaggtgtgcaggtggaacctgcggaagctggccgaggccctgcagccggaactgcccctggagctgggggaggccatcctggccgaggagtttgacgccgagttccaaaggcactacctgcagaagatgcgcaggaagctgggcctcgtgcaggtggagctggaggaagacggggcgctggtgtccaagctcctggagaccatgcatctgaccggtgccgacttcacaaacaccttctacttgctgagctccttcccagtggagctagagtcgccaggcctggcggaattcctggccaggctgatggagcagtgtgcctccctggaggagctgaggctggccttccggccccagatggatccccggcagctatccatgatgctgatgctggcgcagtcaaacccgcagctgttcgcgcttatgggcacccgggcaggcatcgccagggagctggagcgtgtggagcagcagtctcggctggagcagctgagtgcggcagagctgcagagcaggaaccagggccactgggctgactggctacaggcgtacagagcccggctggacaaggacctggaaggcgctggggacgctgccgcctggcaggctgagcacgtgcgcgtgatgcacgccaacaacccgaagtacgtgctgaggaactacatcgcgcagaatgccatcgaggctgccgagcgcggggacttctcagaggtgcggcgggtgctgaaactactggagaccccttaccactgcgaggcgggggccgccacagacgccgaggccacggaagccgacggggcggacggcaggcagcgctcctacagcagtaagcccccgctctgggcagcagaactgtgcgtgacatgatcttcgtaacgacctcggcacgatccacacccctggagtctcccgaggcccccatgtgctgctgagtggccaagatgatgccaggctgccctatacactgggggattctgccctggcccatgcacacccgtctttccatgatggcagagacatccagtcaggacctgacccgtctctgtctgaggccggctcagcagtgcagcctggtccctgggggctggacccaggctcctaaataaaccagcaactccctcgaaaaaaaaaa

SEQ ID NO: 66072 - DNA, 3263 bp, Homo sapiens
atggacttgtacagcaccccggccgctgcgctggacaggttcgtggccagaaggctgcagccgcggaaggagttcgtagagaaggcgcggcgctcatagaggccgcctggccgctgctctgagggagcgcgggggccgcctcggtgctgctgccccgcgggtgctgaaaactgtcaagggaggctcctcgggccggggcacagctctcaagggtggctgcgattctgaacttgtcatcttcctcgactgcttcaagagctatgtggaccagagggcccgccgtgcagagatcctcagtgagatgcgggcatcgctggaatcctggtggcagaacccagtccctggtctgagactcacgtttcctgagcagagcgtgcctggggccctgcagttccgcctgacatccgtagatcttgaggactggatggatgttagcctggtgcctgccttcaatgtcctgggtcaggccggctccggcgtcaaacccaagccacaagtctactctaccctcctcaacagtggctgccaagggggcgagcatgcggcctgcttcacagagctgcggaggaactttgtgaacattcgcccagccaagttgaagaacctaatcttgctggtgaagcactggtaccaccaggtgtgcctacaggggttgtggaaggagacgctgcccccggtctatgccctggaattgctgaccatcttcgcctgggagcagggctgtaagaaggatgctttcagcctaggcgaaggcctccgaactgtcctgggcctgatccaacagcatcagcacctgtgtgttttctggactgtcaactatggcttcgaggaccctgcagttgggcagttcttgcagcggcacgttaagagacccaggcctgtgatcctggacccagctgaccccacatgggacctggggaatggggcagcctggcactgggatttgcatgcccaggaggcagcatcctgctatgaccacccatgctttctgagggggatgggggacccagtgcagtcttggaaggggccgggccttccacgtgctggatgctcaggtttgggccaccccatccagctagaccctaaccagaagacccctgaaaaacagcaagagcctcaatgctgtgtacccaagagcagggagcaaacctccctcatgcccagctcctggccccactggggcagccagcatcgtcccctctgtgccgggaatggccttggacctgtctcagatccccaccaaggagctggaccgcttcatccaggaccacctgaagccgagcccccagttccaggagcaggtgaaaaaggccatcgacatcatcttgcgctgcctccatgagaactgtgttcacaaggcctcaagagtcagtaaagggggctcatttggccggggcacagacctaagggatggctgtgatgttgaactcatcatcttcctcaactgcttcacggactacaaggaccaggggccccgccgcgcagagatccttgatgagatgcgagcgcagctagaatcctggtggcaggaccaggtgcccagcctgagccttcagtttcctgagcagaatgtgcctgaggctctgcagttccagctggtgtccacagccctgaagagctggacggatgttagcctgctgcctgccttcgatgctgtggggcagctcagttctggcaccaaaccaaatccccaggtctactcgaggctcctcaccagtggctgccaggagggcgagcataaggcctgcttcgcagagctgcggaggaacttcatgaacattcgccctgtcaagctgaagaacctgattctgctggtgaagcactggtaccgccaggttgcggctcagaacaaaggaaaaggaccagcccctgcctctctgcccccagcctatgccctggagctcctcaccatctttgcctgggagcagggctgcaggcaggattgtttcaacatggcccaaggcttccggacggtgctggggctcgtgcaacagcatcagcagctctgtgtctactggacggtcaactatagcactgaggacccagccatgagaatgcaccttcttggccagcttcgaaaacccagacccctggtcctggaccccgctgatcccacctggaacgtgggccacggtagctgggagctgttggcccaggaagcagcagcgctggggatgcaggcctgctttctgagtagagacgggacatctgtgcagccctgggatgtgatgccagccctcctttaccaaaccccagctggggaccttgacaagttcatcagtgaatttctccagcccaaccgccagttcctggcccaggtgaacaaggccgttgataccatctgttcatttttgaaggaaaactgcttccggaattctcccatcaaagtgatcaaggtggtcaagggtggctcttcagccaaaggcacagctctgcgaggccgctcagatgccgacctcgtggtgttcctcagctgcttcagccagttcactgagcagggcaacaagcgggccgagatcatctccgagatccgagcccagttggaggcatgtcaacaggagcggcagttcgaggtcaagtttgaagtctccaaatgggagaatccccgcgtgctgagcttctcactgacatcccagacgatgctggaccagagtgtggactttgatgtgctgccagcctttgacgccctaggccagctggtctctggctccaggcccagctctcaagtctacgtcgacctcatccacagctacagcaatgcgggcgagtactccacctgcttcacagagctacaacgggacttcatcatctctcgccctaccaagctgaagagcctgatccggctggtgaagcactggtaccagcagtgtaccaagatctccaaggggagaggctccctacccccacagcacgggctggaactcctgactgtgtatgcctgggagcagggcgggaaggactcccagttcaacatggctgagggcttccgcacggtcctggagctggtcacccagtaccgccagctctgtatctactggaccatcaactacaacgccaaggacaagactgttggagacttcctgaaacagcagcttcagaagcccaggcctatcatcctggatccggctgacccgacaggcaacctgggccacaatgcccgctgggacctgctggccaaggaagctgcagcctgcacatctgccctgtgctgcatgggacggaatggcatccccatccagccatggccagtgaaggctgctgtg

SEQ ID NO: 66073 - DNA, 738 bp, Homo sapiens
ggggaggcaggaggaggctacagacggtctcaagagggaggcccagccagtcccgcggcccctgacaccccatcagggcgctcaggcccagcagctccggggaggacgccggcgaggaccccaccacgtttgctgcccaccctctgcccagtgacccccgtctcttggccactgtgaccaacgcatacctgggcacacgagtgtttcacgacacgctgcacgtgagcggcgtgtacaatggggctggcggggacacgcaccgggccatgctgcccacccccctcaacgtccggctggaagcccctgcagggatgggggagcaactgaccgagacctttcccctggacaccaacacaggcttctttcttcacaccctggagggcccccgcttccgggcctcccagtgcatttatgcgcatcgcacgctgccccacgtgctggctttccgagtgtccatcgcccgcctggccccggggagcgggcccatcacgctgctcctgcggtcagccttctccccagaaagcccagacctggacctgcatcagggtcctgacttccagggagcccggtacctgtatggccacaccctcacccctgagcagcccggggggccacagcaagaggtacacatgctgtggacaccagcacccccagacctgacccttggggaagctgcgccaggccctgcgtggctcacactaaactacctgctcagtgccctgccccggcgcgcggccg

SEQ ID NO: 66074 - DNA, 1879 bp, Homo sapiens
cccgcgctgcaggaattcggcacgagtggcagcggtggaggcggcagcacaggaggaggaggaggaacagcaggaggaggaactcaaagtactgctggccctggagggatatctcagcacctgacttacacatcttacatcctcaagcaaactccccagggcacatttttagttggccagccatcaccccagacttctggaaaacaactcaccactgggtcagtggtccaaggaacactgggagtcagcacatcttctgcacaaggacaacaaacgctaaaagtcatctctggacagaaaaccacattgtttacacaggcagcccatggaggacaggcatctctaatgaaaatatccgatagcaccttgaagactgtgccagccacctcacagctctcgaagcctggaaccacaatgctgagagtagcaggaggggttatcacaactgccacttcccctgccgtggccctctcagcaaacggtcctgcacaacagtctgaaggaatggctcccgtgtcttcatctacggtcagttctgtaacgaaaacttctgggcagcagcaagtgtgtgtgagccaggccaccgtgggaacctgcaaggctgccacccccaccgtcgtcagcgccacgtccctcgtgcctacaccaaaccccatctctgggaaagccacagtatccggactgttaaagattcactccagtcagtccagtccgcagcaggccgtcctgacgattcccagccagctcaaaccactcagcgtaaacacatctggaggggtgcagacgatcctgatgcctgtgaataaagtggttcagtcattttctaccagcaagccacctgccattctgcctgtagctgccccaactccagttgtccccagctctgctccagcagctgttgcaaaagtgaagactgaaccagaaacacctggaccgagttgcctctctcaggagggtcagacagcagtgaaaacagaagaaagttctgagctgggaaactatgtcattaagatagaccatttagaaactatccagcaactcctaactgcagtagtaaagaagattccattaatcactgcaaaaagtgaagatgccagctgcttttctgcaaagtctgtggagcagtactatggctggaacattggaaaaaggagagccgctgagcggctaagagcaatgacaatgcgaaaagtcttacaagaaatcctggagaagaatccgagatttcaccacctgactcccctcaaaaccaagcacatcgctcactggtgccgctgtcatggctacaccccaccggaccctgagagcctgaggaatgacggggactccatcgaggacgtgctgacccagatcgacagcgagcccgagtgcccatcatcattctcctctgctgacaacctctgccgcaaactggaggacctgcaacagttccagaaaagggaacccgagaatgaggaggaggtggacatcctcagcctctccgagccagtgaagataaacatcaagaaggagcaggaagagaaacaagaggaagtcaagttctacctgccaccaaccccagggtctgaatttattggggatgtcacacagaagattgggatcaccctgcagcccgtggcactccacaggaacgtgtatgcgtccgtggtggaggacatgatcctgaaggctacagaacagctggtgaatgatatcctgagacaggctttggcagttggataccagacagcttctcacaacaggattcccaaagaaattacagtgagtaatattcaccaggccatttgcaacattccttttctggactcttttaccatcaaacacatgggaatatcttatgagtgccattgagcggacttgggtgccctggataaccacg

SEQ ID NO: 66075 - DNA, 900 bp, Homo sapiens
ctaatacgttgcatgcccgcgtaaacttgggcccccccagggatcctttaaaacggccgccccttttttttttttttttttctcaaatgtcatttattagaaaatacaattcccgagaaaggagatacaagggattctgggaagtgggaagtaaacagtacacagatctctttaaatcaggagcatataggtcataataaaatgagctacaggcacaaagccagtaacacatttatggtccgttcatctggaaaagtttcaccgcccactccccactcctcttccccctcctggaagcagccagctttatccttggcattttaattttagagaaaatttaaacttccatgctgccctgtggcttcggtcaatggagcttctttctccagttatggaatgagtcagcaaaacggggagtttctgatccttggaattagggagggacagtttacagaatgtcctcatttcactcttttcccaatcatgggaaatatccagccaattctggttttaaagattcatatcaaattcaaagtccctccctccttttggcgaggaagacaaccctttggagcgaaacacaaaagagcaaatgtaaaatccatctggggcggggcatggtggctcacgcctgtaatcccagcactttgggaggccaaggcaggcagatcacgaggtcaagagatcgagaccatcctggccaacatggtgaaaccccgtctctactaaaaatacaaaaattagcttggcgtggtggcacatgcctgtaatccccagctactcgggaggctgaggtaggagaatcgcttgaacccgggaggcagattttgcagtgagtcgagatcatgccactacactccagcctggggacagggggaaactccgtttccaaaaaaaaaa

SEQ ID NO: 66076 - DNA, 1432 bp, Homo sapiens
aaggggcctggaggatatagttctggtcctgctgggagacacgagggtcacaggcatggagaatggagatggagggggagcccggtccgtgggccccaagagccgagccggacgagggatggagtggggagacgcaggagggcggtgtctagggctggggaatggagtcgtgtctggcaccccggtggggactgtattggaaggcagcccagaatgggcagcggcgaggagtgaacacctggctgcaggtgacggcctgcaggaaggaggcgaagatggccccagggaaccaaagaggctttgccgacccccgggagaggaggaggtggactgggaacccctggccaaattccgagcagcctgcgggccagagctggcagacctggtggctgaggagttggcctttgctaggcagcatgggacccggggtttccactggaccggagctggctttgcccttaaggacggcacctcggacttcttcctggatggggccctgacacgctgcagctgctcaattcacgccgcccgccgtctgccctgcatgacacctctttgcagcgcgcctcctcactggggctgccttattccacatggacctgctcagggattgctgggggagagccccagagccctgacccttcatgcctctgcccaccaccctccaccaggagggtcggagggcattcttcgatcccaaagataatagggctgaggccaaggagaccgttgcagtccccctggccaccttctgggtcatccagggacctcctcatggcagtttgcctctctgggtccaagggcaagctgtaagtggtctctgaggtcctggagccacagcttgggaaggtgttgatgggcagggtggattctgagggcttccctctggagaggaagcatgtgatgagaggtgtagacagggtcaggctgggacagaaggaaggaaaggggcagagctggggggagggggaggaagcgatcatatggggagtgtctggcaagagtagactggccagtctagggagtgcagcggggagaggggaaagggagaaagtacagaagacagatgaaggagaggaggtaagcgagaaaaaatggaaaggggagccggaaatggaggagagaggacaagcaaagagacagaaatgaagacatgaggaaaagctgggggaagcaggagaggaagggacgggatgtaggagggggaagaaaaatcggagatgagacaaaagaaatgtgtgggagacgggtagagacgaaatgcaaggggcgtggttttggtttttctccaagacctggagacatcgacccccatcgccttctgaagagagagggagggcgggcactgggggtcaggagagtctccagcaggggaggggaattgtttggactattgttcttcaggattggaataaaacaatcttaatttgga

SEQ ID NO: 66077 - DNA, 795 bp, Homo sapiens
  misc_feature (1)...(795): n = a,t,c or g
ttttttttttggaagatcaccctgctttattgcctgggccttaaggtaatcaggggtgtccctctccagccaggacctgggattccgtttcaggagctcgggctgaacggccaccttcctggtgggtctgagccccagtgcctggtgtgaaggggcagacgcccatgacaacagccaccccgcatgtcccggcatgtcccggcactgtgtgagccacatttgctgaagtctgggtcctggccctggcagggtgggctgggctaggagatgacacagcagcagcagctgtggcagcggcagaagggggggcagtggcagcagtggcagcaggggcagcagcagcagtggtgggcgatgtcatccccgcgccccacgggcggagggccagcgtaggtcagtccggcctggcgctgactgctgctgtaggggttgccaggctgctgccaggcctgctggttctggatgggggcagccccctggttacccttggcgcccttgggccctgggacctcggtcggctgcaagaggtgggttggctctggggcacagggccccactggcaggggctgcatctccgaggatgaggaacaggtggaagccacctctaactgctgccccaggtcaggccgcaggtgagcccgggggatgctgatgtgggcatatgggttcttgacgaccatctcttgggggtccatggtccagcctgtggtggcaacacggcagtctgtcctctcggtccggacgcgtgggtcgtcccgggatttggnnntggcaanggtttccnaggtgtcaaag

SEQ ID NO: 66078 - DNA, 805 bp, Homo sapiens
  misc_feature (1)...(805): n = a,t,c or g
tcttgctctgccacccagactggagtgtagaggcacgatcttggctcactgcagcctccgcctcctgggttccagcaattctcctgcctcggcctcccgagtagctggtattacaggcacccgccaccatacccggctaatttttgtatttttagtagagacggggtttcaccatgttggtcaggttcgtcttgaactcctgacctcaagcaatccacccaccttggcctcccaaagtgctgggattacaggcatgagccaccgctcctggctttctttaatgtaacttaaataaaatataaggttttactttatttgtgctttttggaaatgtctcctgatttttaataacagtttattatgccttgtaccagcttttttattaatatataaggtgcccactatattataccaattatgctgcttatatagttattcatatgcatctcaaaaccttccttaatgtacttntaatgaggtaacaccataggcanaattgcatctttntcattatctgccatttaatatctatagtttaccaacgatgacactgcaagcattgtgtcttctgatcgtgccagtcgtggacgaagggagagtgtggtatctgccgctgattatttcagtcgctccaatcgtaggggaagtgttgtctctgaggtggatgatatcagtatcccagatttgtccagcgtgagtgtattgcatggggtggttggttatgttgtcccaggcttgtgactaacagctaatatgttagctattttataataaaagtgggaacttgatttattgtcttaagaag

SEQ ID NO: 66079 - DNA, 745 bp, Homo sapiens
aacacgatttcgtccggtgcgaggccagaggtggggaagccatcggacgtcggcggtgaggatcttctcctgacccagcatcgctcatcacaatgaagaaccaagacaaaaagaacggggctgccaaacaatccaatccaaaaagcagcccaggacaaccggaagcaggacccgagggagcccaggagcggcccagccaggcggctcctgcagtagaagcagaaggtcccggcagcagccaggctcctcggaagccggagggggctcaagccagaacggctcagtctggggcccttcgtgatgtctctgaggagctgagccgccaactggaagacatactgagcacatactgtgtggacaataaccaggggggccccggcgaggatggggcacagggtgagccggctgaacccgaagatgcagagaagtcccggacctatgtggcaaggaatggggagcctgaaccaactccagtagtcaatggagagaaggaaccctccaagggggatccaaacacagaagagatccggcagagtgacgaggtcggagaccgagaccatcgaaggccacaggagaagaaaaaagccaagggtttggggaaggagatcacgttgctgatgcagacattgaatactctgagtaccccagaggagaagctggctgctctgtgcaagaagtatgctgaactgctggaggagcaccggaattcacagaagcagatgaagctcctacagaaaaagcagag

SEQ ID NO: 66080 - DNA, 869 bp, Homo sapiens
  misc_feature (1)...(869): n = a,t,c or g
tttcgtggagacgctacgctggcgcaagaggtttttttggaggcgctacgctggcgtaagaggcggcgggggaggcgctacgctggcgtaagaggcggcggtggaggcgctacgctggcgtaagaggtggcggtggagacgtttcgctggcgtatgaggtggaggtggagacgttacgctggcgtaagaggggcacgatacaactgcagctgcaataaactggtccttatacctgttggggtctaacccagaagtccagaaaaaagcggatcatgaattggatgacgtgtttgggaagtctgaccgtcccgctacagtataagacctgaaaaaacttcggtatctggaatgtgatattaaggagacccttcgcctttttccttctgtttctttatttgcccggacagttagtgaagattgtgaagtggcaggttacagagttctaaaaggcactgaagccgtcatcattccctatgcattgcacagagatccgagatacttccccaaccccgaggagttccagcctgagcggttcttccccgagaatgcacaagggcgccatccatatgcctacgtgcccttctctgctggccccaggaactgtataggtgttccaagccattctgattctccttccacctactgcgaaaatgtcaaaagtttgctgtgatggaagaaaagaccattctttcgtgcatcctgaggcacttttggatagaatccaaccagaaaagagaagagcttggtctagaaggacagttgattcttcgtccaagtaatggcatctggatcaagttgaagaggagacgaaatcgtcgacnnnnnnttccggnccggtncgtgcnggcgtagcggttctctatgggagg

SEQ ID NO: 66081 - DNA, 1730 bp, Homo sapiens
cggacttcccgggtcgactacagcatcggcggcggcggctagtgccgctagcgcctcgagcgatgcacctcctttccaactgggcaaaccccgcttccagcagacgtccttctatggccgcttcaggcacttcttggatatcatcgaccctcgcacactctttgtcactgagagacgtctcagagaggctgtgcagctgctggaggactataagcatgggaccctgcgcccgggggtcaccaatgaacagctctggagtgcacagaaaatcaagcaggctattctacatccggacaccaatgagaagatcttcatgccatttagaatgtcaggttatattccttttgggacgccaattgtagtcggtcttctcttgcccaaccagacactggcatccactgtcttctggcagtggctgaaccagagccacaatgcctgtgtcaactatgcaaaccgcaatgcgaccaagccttcacctgcatccaagttcatccagggatacctgggagctgtcatcagcgccgtctccattgctgtgggccttaatgtcctggttcagaaagccaacaagttcaccccagccacccgccttctcatccagaggtttgtgccgttccctgctgtagcaagtgccaatatctgcaatgtggtcctgatgcggtacggggagctggaggaagggattgatgtcctggacagcgatggcaacctcgtgggctcctccaagatcgcagcccgacacgccctgctggagcacggcgctgacgcgagtggtcctgcccatgcccatcctggtgctacccccgatcgtcatgtccatgctggagaagaaggctctcctgcaggcacgcccccggctgctcctccctgtgcaaagcctcgtgtgcctggcagccttcggcctggccctgccgctggccatcagcctcttcccgcaaatgtcagagattgaaacatcccaattagagccggagattagcccaggccacgagcagccggacagtggtgtacaacaaggggttgtgagtgtggtcagcggcctggggacggagcactgtgcagccggggagctgaggggcagggccgtagactcacggctgcacctgcagggagcagcacgccaaccccagcagtcctgggccccctgggagagtgctcaacctacagtggagggagactgacccattcacattttaacataggcaagaggagttctaacacatttcgtacaaaaaaataatcaagtgcatttctgggccttatgtggggttgtcaaaactccactcagcacaattatgtgtgaagctgaaaaattgtagagtgcccatggggtagaagtagaatccttttatactttggttccttttttatttttattttttatcagaatcaaatctgagccttagtttcagctgaccagaagtggcaggaggacaggtggaggcgagccagattaggcctggagttgggctggtttggtggccaggctggtaaatttaggatattacaatggccagcccagatggctccctgggctggcatggggaggggagagaaggtggtctgcaccccacaggatgaactagccatgactagggtcctcaggcagtggcccagggaatcagggagcactggaggcctctgcaagattctgtgggcagctggctctgaatgtagccagcccacatccattccagagctgcagaaccacgccctctgagtggaagccg

SEQ ID NO: 66082 - DNA, 2298 bp, Homo sapiens
  misc_feature (1)...(2298): n = a,t,c or g
cctaaaagaacaaaaaaaagtgagagaaccattagatactcagtttcctgacagtaacagaagaaaacaggactaagaacattcactaaagctttcagtgtgggcagtctgtcagtaaaaaggtaagtagtagggtcagaggtatggcattccacataccagctctaccaagaatgaaagagcatacggactacagaaacggacgtgtgtccgtgattaaactttttggcatcgctgtattaatcccttttgatgtatataagttcagtatatgacaaatgtttcagttccccccccccaaagaatccaatcacaaccaagacacacacacaaatcacttctcagttacacatctgcatttctttaacaaaacagtaagagatacaatcatagcgaagaggtcacccgcacaatacattatcagcacactgtctagaacacctcatttaaagacactcagtaaaaacgtattcacaggacctgctgtgaatggcaagatatggtaattttataatagaagaactctgctcatgcagtactctccacacaccagacgtcggaaatcacagccacatcatcaccttgctcacacttcctattatactagatatgcaaaaagccaaaaaaagcagcttttaacattatatcattatatcacaattttgaaacatgggaaaaaataaaaaacaaaaaccattgtgtggataaaatggtctccgtgacattgagcagagtgttatctttttttttttttacattattgcacagagatttctcatcaatgttcttcagtttttatgtcttttcctaaatgtgaataagtgctatggataaaatacaaatgtagaaaataacagcagcatgatttgtcaaagttaatccctataatttagtaagaaaaaatggatataaacaaaataagtgctctttctaaactgtactaaattttccaaaaatattggttttaaatggcagtgaaggtcctgaaaagcctattgaaagcgatgctgagtcctggttttcaaaagtgtcctggtttggggtttccttggtgaagagcagaatttcaaggtgaagtaatccgacggactaaatttaaaacaaaacagccctcggcttcccctaattgggcctgtgaagggcaaccggcttccgggganccctggacctgggaggccagccgagtggttggggggtgcctggcccccatctacacgtacacaggctggcagccttcagtctgatccaccagatcagagctttctaaatctgagctctcagcctgtgaagcttctgctcctgaaggctttgggcatcgaaaggggtagccattgtcatcaaagaaccttcggaaggtgaattcgtaaaatgcgtgctcaggatgcttgttattgggcgaggtgagtgtgtcccaggccttggtgctaaccttcgctggcatcgttccaagggctttcttcatctacggggtcgaaattcgaggtgtccatggggtggctgatggtgggaacgtagggggctggctgcttccggatgtcactggagaagtcaatggcgctgaagaaggggtgggccttcaggtcatcggccccattccgccccaggcggtggtctgcggagcagcacagcttggtgatgaggtccctggcctcagggctcagcttcacctgggctggaatgtggagcgtgttctcccagttgatcaccttcagctgggtttctgtgggagtaggtgccaaaaagggcggctgccccaccagcatctcgaagagaatcactccaacactccaccagtcacagagttgagtgtaccctttgcggaggagcacctcgggtgcgatgtagtttggagtccccaccagtgaatgtgccaggcacctctggtgctgcttccgcgccctctgctctagggtcttcagcctctccccacaccgacagttagacacatcatcccagaggtcgctgggctccatgctgtcctgtctgacatggctccctttctggtaatatttggaattgtgagtccacctgaacccagtgcagaggccgaaatctgtgagtttaatgtgaccatccagatctatcaaaatgttatcaggcttgatgtctcggtggatgaagcccatcttgtggacactctcaatggccaaagtcagctctgcgatgtagaaccggcccaggtgctcagggaagacctccatccggatcagcaggctcatcatgtccccaccagggatgcggacgcggggtcgcccgggnttccgnccgtgccagcatttcgggacctcttagcggccg

SEQ ID NO: 66083 - DNA, 891 bp, Homo sapiens
tttcgtaaggcccagggggtgtctgtcagtgggacgaccttgtttcccctccacgtctcctctcatacttcaaattacttctcctatgcatttggagagcgggagagaaaaacaccaggaaggaggagggaacaaagaaactctacaggcagagacacaggactgagccgcgttgggggcactgggaggagtgagccttggggttgcaccctcggagccccactgtcctgggagcagccttcagaaccacccttttgttctctgaagtaccaggcgttcagcttttccaaggactggcagctgcacatctttgtccctgccccttccatctctaggctcagccccgctgggcaggctggcccactccccacccctgcccagggccaacccctacttcccatgccccctctgcccacctgcagcacactggagccttgcaggccctctctgcatcattcaagatgcagactcctacactttgacctgcacacatcctcctgaagcttccacttcctggcccctgcctggcttctcacctcccccacctcagccccccaggggatgtgccgcctctcccagtggcccaggacatcctccacttcccgggaaccccaggcacttccacatcctcagacacagtgagaagatgaccctctctccaagccaggaagagacctcccgaggagcccagccagccagcacgctgacctccaacgtccagcctctggaaatgtgagaggccaacgtctgcgttgggagccacgtggtcccgtgggatctggcctggcgctaaagccgctgcgctcctgccccgcaccaggatgtgggaactttgagaaccgctgagagtcgagagatgtcatcgaaacgacacccgatacgtgttccctg

SEQ ID NO: 66084 - DNA, 778 bp, Homo sapiens
tttcgtaggatgcccagccagccgagctccgggcagtacccgccctccacggtcaacatggggcagtattacaagccagaacagtttaatggacaaaataacacgttctcgggaagcagctacagtaactacagccaggggaatgtcaacaggcctcccaggccggttgctgtggcaaattacccccactcacctgttccagggaaccccacaccccccatgacccctgggagcagcatccctccatacctgtcccccagccaagacgtcaaaccacccttcccgcctgacatcaagccaaatatgagcgctctgccaccacccccagccaaccacaatgacgagctgcggctcacattccctgtgcgggatggcgtggtgctggagcccttccgcctggagcacaacctggcggtcagcaaccatgtgttccacctgcggcccacggtccaccagacgctgatgtggaggtctgacctggagctgcagttcaagtgctaccaccacgaggaccggcagatgaacaccaactggcccgcctcggtgcaggtcagcgtgaacgccacgcccctcaccattgagcgcggcgacaacaagacctcccacaagcccctgcacctgaagcacgtgtgccagccgggccgcaacaccatccagatcaccgtcacggcctgctgctgctcccacctcttcgtgctgcagctggtacaccggccctccgtccgctctgtgctgcaaggactcctcaagaagcgcctcctgcccgcagagcactgta

SEQ ID NO: 66085 - DNA, 1176 bp, Homo sapiens
cttgcgggtgagggaggcccaataacagccagactccatcagttcagaggcaggggctagagatggatttaattcaacttaaaaagaaatacaagaatggaccttttctgcagtcctgagggagtggacaggttgcgtgcgtgctctgacggtgggatccagaccccctcctctcctgcgttgaaggtgccaccgggcctcatccccagccacatcacatcctgagcctcttacaggcaggccccgaggtcctttcacctttctcttctctccagtgcttggtgcattttcaaactcagtacctttcttttgaataaatgagcaagaataaacccggtgctgcttgccgagctcctctccctgggcggggaactaaagcaaaaccacgctggatggggtcccaaacaccctaagaaggccgagctcctgccgctctccagcacgcgcaccgaagaccggagggagggtctgtcgctctcctgcaggagcacgagtggagggagggcctgcggcgctccagcaggagcatgaggagtggagggagggcctgtcactctccagcacgcacaccgaggagtggagggagagcctgtcgctctccagcagaagcaccaaggattggagggagggcctgtcgctctccagcaggagcacgaggagtggactgccggcccgtcactctccagcacgtgcaccacggagtggagagagagcctgtcactccagaaggagcaccaggagtggactgcggacccgtcactatccagcacgtgcaccaaggagtggagggagggccccttgctctccagcaaaagcaccaaggatcggaagtagggcctgtcgctctccagcacgtccccccccggcagtggagggagggcccgtcgctctccagcatgagcacccagagatggaggaagggtcagccatttgtcaggctctgcgtgtgaaaagctgggatttcatttcttatcagttattactgtcactatcactcaggatgaaattggcctcacccgctcaagaacaatgctgccttctccctgtcctcctcctggattggtgaggaaaaagccagactaacctgttccacaccttggcatcagttgcataaatgctatctcagcatgttctagaacacagtactgtttaaacaacgttctgggggtaaccaag

SEQ ID NO: 66086 - DNA, 1861 bp, Homo sapiens
ataatagaaacatgtttaattatggagagtaaaacagaaacgagaaaaaacaggtatcatccatgtattttatattcttttctagaacaaccaatctttattagaaagttgtagtcacgtttacaataaatatcaacaatataatgaaaaagtagaacaaattagtttccaaatactgaactcctgtaaccaaaacacatttttggatttgggaaaacacagtaaacacataccaaaaacacagccacaaataccaaaaacaaaaaccagctcaagtataggattgaactggctggaaaacacttattgtgttactgccttaagaaccccacggagcaccttgtagctcattaactgcacattttccttaggggggaaacaaggtcctctctcagtcacatatgcataaggaaatctcaaaacccaaaggccatcaggtggaagggtgatttcttgtttttctgggtagaataccggacatggtggtgggcctggctgaacctgaggcattagtattatctgcaaaggagcatcaggaaccacaacaaaaagcctcataagttgagcataatgaggtttcagccctctaccttgagaggatgacagaatatataagggcatgtcactatttagggcttttaaagctgattcctttggcccacttcccattactttcattactttgtcaggcccagagcacatgaatctccgacctcgagagtcttcatattcaaagcccacaaaagctcgagctatgtcatctcgccgtcttcctcttcccattacaaccgcacttctctttccaggaatagctttatttggagcaggccaagagtttgtgtctaagtctccttcatcttcagctctagtcctgatgacaatgtcccaaggcataagataatttgttcctggaataaagccctgttggtccaaacctgtatgaaagttataagacttagcagggcctagtttaaccaaagaccagctggagaatttgggtaggagacctttagggcaatttgaatgtagcatgcctgggagatactcaactgtggatgcctgtcgatcaacgaagtttggcctcttctcagttttcacttctacttgaccatgaacttctggattatctcctcctgcttgtggatcagctggataggtacctaagctatctgtggattggcccaaactcaaagctaaactcaggctcgtgctctctccttgggtttgaggttctttttctttaagtttatcagcatccgaatctggaggagcaggagaggattcatttttagcaggagcaggatctggagtacttggttcaaatactgggaaattgatatgatccaattttccacaacacttttcttccagaagctgatagaagtcataattggctgctttgatatcaaagggatcatctcgaggtgcttgtttccttccacagttgcaagcaccagtagatcgagctcggctattgtgatatagcacaggcggatttctatcagcctctggtttttctcctgatttaggtaatgagtgaaatttgtgcacacagtgttgatcagttaaactcctctcctcacagagctgatggccattgctccaaaatttgtagcagtcctcatgtaactgcatggcgtatttgtgaaatgctggacctatagcatgttgactgtacactcgaagagcctgggcaagctgattcttatggacagtcattgtgtaattatgaggcaaatttgactggtaggcactgtgggccatgggtaaagctttttggcatcggttttctgaaaattttgggtcaatatacaaaaatctttccaagactttaatactgcttaaaatcttacatgttagc

SEQ ID NO: 66087 - DNA, 1264 bp, Homo sapiens
aacgtggaaaggcctttattcgtagagggaatcttaaagaacatctgaaaattcattctggtttaaaaccctatgactgtaaagaatgtgggaagtcctttagtcggcgtgggcagttcactgaacatcagaaaattcatacgggtgtaaaaccatacaaatgtaaagaatgtgggaaggcctttagtcgtagtgtagaccttagaatacatcaaagaattcatactggtgagaaaccctatgagtgtaaacaatgtgggaaggcctttagacttaattcacaccttactgaacatcagagaattcacactggtgagaaaccctatgagtgtaaggtatgtagaaaggcctttagacaatattcacatctttatcaacatcagaaaactcataatgtaatttaatataagaaaaggtttccatgtcatgctctatttatagaatatcaaaatatttatggccagaagttctgtcaatgtgttgatgtttttttacacatattaacttaataaatgtatgagtcttaaatacctcttagttctcattaaatttaggaaaattcacactagaaaataaagctgttaatgtaacagttgtggaaaagtgttctagcaacagcatatacttatcatcattgcctttccactactctactatctgtgtgatattagacaaaatatttgcttcttggtacctcagctgtaaaatgaaacacacctaaaagtgtggttgtttccaacatgtataatacagcaacaactatctggccccaaacctgctttggattaatattggatatttactgtttttattatcatccaacattattattagtggatttcttaaataggaagatgccaatggagatgacaaatttggaaaaacccactcatcacttaccatttccatgaagtactttcttttgataaaaatctgttatgggcctgaatgtttgtgttccccgtaacaattccctatgttgaaaacacgaatcccaaggtgatggtatttgaaggtagggcctttaggaggaaattaggtcatgaggggtggagccttcatgagtgggaattactgcctttataaggaagaagccaaagagccagctagctcttttcaaccacatgaggttacagcaagaagtcagcagtctacagtgcaaaagagggccttcaccagaacccaagcatgctggcaccttgaccttggactttcagcctccaaaactgtgagaaataaacctcagttgtttataaaaaaaaaa

SEQ ID NO: 66088 - DNA, 821 bp, Homo sapiens
ttttcggttatgatggcgaggaaagccgctggtgggcttggaggtcatcaaaaaaaccacccatccccctaccactaccatgcagcccaccactactacgacgcccctgcctaccactacaaccccgaggcccaccactgccaccacccgccgcacgaccaccaggcgtccaacaaccacagtccgaaccactacgcggacaaccaccaccaccacccccaaacccaccactcccatccccacctgtccccctgggaccttggaacggcacgacgatgatggcaacctgataatgagctccaatgggatcccagagtgctacgctgaagaagatgagttctcaggcttggagactgacactgcagtacctacggaagaggcctacgttatatatgatgaagattatgaatttgagacgtcaaggccaccaaccaccactgagccttcgaccactgctaccacaccgagggtgatcccagaggaaggcgccatcagttcctttcctgaagaagaatttgatctggctggaaggaaacgatttgttgctccttacgtgacgtacctaaataaagacccatcagccccgtgctctctgactgatgcactggatcacttccaagtggacagcctggatgaaatcatccccaatgacctgaagaagagtgatctgcctccccagcatgctccccgcaacattcaccgtgggttggccgtgggaaggtttgccacttcattttgttcattgtgggattggggacaaaggccaccccaggagatgtgggcacaggctacttggattacagtgcatcctatgaagactg

SEQ ID NO: 66089 - DNA, 1453 bp, Homo sapiens
aaataaaaatttctgtgtttgaggtatcactgtaagacatgccaatatggcacatttgtaaaacaacccaggagtctattctaaaaatcacaaccaactcagcatcatctctgcagacttactaacaggctgaactaatctctttatacaagaagtattttaattattacaaaaacaaaggaggcacgtactaaaaattctgcatttcatagaagagtaaaactttgttagagatattttcatgatcatctacctgcagacaccattcatttaaaaagtcctagtcaagaccattaagcagctgcatcttctacaacattgaaaaaaaatccctagagatttaaaaaactgaagaatttcactatctttaaaagatattatattttagtacataaagctattaaatttctctgtgtcaagagcaaaacattaccccttaccttgcttcatcattggaaggtggacacctgatccagcaatactcattaactgctaggtagatgacccatgttgatggcagtaaagccattttacaatgaacttatgaagtagtaacactagccaaacacacagagacacaaataccaaaaatgatgtgtttagtatacacaaatagctatacttggggcatggctatcaagtaacaagactgatttaatactttacagttacagcacattaaaaatatattgccagagggataatggtcccaaatacgaaaaatgtctatatggaaaaggctgtgatttattgcaaagcataatatatagcaaattccaaggaagggcaaacacgttttaaaaacaaatttttaaatttaacgggcttaagccaaagtctcagttactttctggagaattcagaactattaggtgtagaagaatgcttttccttttttctcttctttttttcctttttgggatgtttccctttttttgatttactctttttttcttttttcttttctttcttctgatatttttgtttcttttgttttgaagtgtcctcttcagtggaactggatgagtaagaccttttcctttttttttttcaatttgattttttctttgcttttttcttttttcttttcctcttcttcatttattcttttttcctgtaatgcctgcaatttattcagttcttcattctcttcatcgctatcttcactacttgtactgctgacatccaaaactatgtcccttttagggtctactcggagaaaattgcggcattcaaaagtcaggtgaccagggtagccacattttttacagcctgctctgacactgtccttgttgcaacctgggactgccatgacggtggtaagaggggtaactcgagcctctggctttcgaaaaggcgcttgcttcccgccagctgtgagaacaaggcacagtcaaagcggcgttttccttcccccagcgcagcagcaccctcgctacggtcgcgtacgcgt

SEQ ID NO: 66090 - DNA, 2530 bp, Homo sapiens
ttttttttttttgaaactccaatatcttaataatgcaaacatatttggattgaagaatgaatgcatcaatgctaaagaatagcttacatatgttgtaaagcaacaagcatatcttcaagaagtgagtcctcctcaatatgactccatgcttattctacatgcctgaaaactgggcccacacacaggggcacacgtacacgcacacaaacgcagatacggacacacagatatgcagaccgaaatgctgacaccatcgctctctagattggattagctctcatttaaggcttcttaggtgccgcagtgcccctaatattaccaggattgaaaacagacttttaggaaggagcagcattacttcgaaaagtagtcatctgctcttgtcctccaatgtgtgtattttaacaaatacaatttcattctatgttgactctgtgtttataatatttaaagaaccatgaaattaagaaatctcaggattgttttagtgagaacttcccattcaaaataaaaaaaaagggcaattctgaccctaagatatcatcaattttatgataacgcaataagatttccctttaggttaagatgtcatgggtctctagaccaagccaagtttatctaactcattctgtatcttaaggtgcaatgctgagtgatgggggcaaggtttcctcggtgataccaaatcagatttgaagcttgccatcaaggatgcatcagacaggaccattaattaaataagttaccataaatctcagctggataaaaggagagttgacatagagtgtgttcacttgctgatcacttattcctctttgccaaggcttctgttgttggggttgttgttttaaactcctggtttgtttgactgtttattttatttgcttgattgttttcttccttttggtgtcctgcaacatatgctgagatttcatccctctaaggatgttagaaggggaaagagggtggacagggcagcaggagggaaagggaaggggtcattagtaattgcaagtattctaagaaaatagatgaagtgaatacaataagagggtactacttggtatatttatgtaaataaaagcattatctgtaactgtgaattaactgccaactatcaggttgttagttgtaaagctcaataaaggctgtgctgatttgcatacagaggagggcatctgccgtgggagaggaacagagggccctcccgagatgttccttcctccctgcggccagcgtccccatcagcaccctgcccaccccactagagatcccataggtgcccctaacattcttgtggaatttcataaggcagatcggaatggcccatccaataacagctgcagagtatttgcctgagcgtggtgaaaactggcatggagctctcccacagagaggcattgggaaatgagaaaaataagaagagagcctagaaccttccaccccatccacactcccaccctcctcacagtcacagcagcagcaggtttcaatgtaacgtaattactttaatgatacatttctttagatttagaattgctcttctgaatttaaaaaccttggtcagccaatagtttggcagtcttttcatcccaaatttgaaacgttgcttactcatctattcccttgaactccgtgaccaatgctgcctttgctgaagcgtctcaagttcattcagccatcatcggattccaattcctgggaaacctcttcggaggagctgttgctgtggatccgcccgtcgctcttcatactgtggaaagtcttcctgaaggcctccatcatggcgtgggccagtttcttggcctcgagcttgctctcgcactccacggcgtggcagtccatctggtaggacaggtcatcattgatctccctgtagacccaggcgaagatgttggggctcacgttgtggtcggcggtgcagtaggcgatgcgggccacctggaaggtatccatgtgcactgtggcctcccctttgtggtcgagatgatggagccaaacttggaatggccggatttccaggagggcattggccggaaagacatcctctcgggctagcgtgtgcttcttccagagctcaatgactggcttttctgtgcagcctgacaaaaactgcatgccagtggtggggactttgcccaggtaggtaaccttgcagccactgtgagtccttgtcttcatcagcggtgtggtcgtgcacagctcaatggcctccggctcatggaagatgaccgctgggagaggttcctttttcagtgttaagacattcaatttagacttcagcatggtctgaaagtgctgcaggcgctccgtggccggctgccacatcttccagccctgggttttggcagaggagacgctggcgagactgtcgatcgcgccggggggcgaggggctggggtcccgctttacatctggggtcggtgtccgcgggatgtgcgtcctggcgctggccaccgccgccgggtgggcgtagggggctgcgagcaggaggaggcgcggcgctcagctgccggcaacttgtacgaaa

SEQ ID NO: 66091 - DNA, 1236 bp, Homo sapiens
ttttttttgtgatgcagcatcaggtgcttttaaatcagattaattcacaataagtgatattgcaaagggtctgggggctgtacatgggcaggggcttggggagctttgtacatggggctgggaaacaagggaccctccaggtggaagggtattttttaataaaaaaaataatggagctacaaccaccccctcccccctccccgattaaaaagacacaaaaatagacgtctctgaggtaaacggggagcctggggcttaagggtgtttaaagggcttcacaggtgccagagcttagaggtgtcacaggcaccggggtggctcctgcatcagttggtagaacagcacgtagccctcgctggatgccacctggttttcactgacaggggagacacgagagtcattgtagacatgccaaccagtctggcaccggcacagggctgtgtagtggccatagtggacgctgcctgagtggttgcaaagggcatacagctggtatacaggacttccggctttgtcactggcaaagtcccctaggctcagtcgctgcagtggaaagtctacacctactgaactttttttgatggagcctcgggaggcagaaaatcgattcagatggagcacgaggattcgagggaatctttgtactgtcaactttttggtacttcgagttttctgccgacatcggtcacacactggggcattctccgactctagctcttcttccttagtgaaaaggttgaaacaatcccgcagagacaccttgcccccagcaaatcctttcttggggaaaaggggaagaaaggtcaacatgttctgaatttccttttccaactcttctcaatcaatccaggcttcagttctgctccagaaacccacagggttcccgcccacactctgggggtgggtaggcttgggtcacagagcccctgtcctgtccaccccggaatcctctggaatcccaccttggggatgggcagggacaggtcacaaaaaacctcgaaggtcgtggagcgatacccacaggcctggcacttgagacaacttttcaactggcccacaaacaggtctagacagaagcacagggacaggagaaaaggtcattgttggatgttatgagatgatttcttggatttccatctcttcctgcccctttgcttgacccttcctttcccactaccaacactcctaatcaactcttcacacagcttcacatttgcatcatccagtcttgttccc

SEQ ID NO: 66092 - DNA, 1673 bp, Homo sapiens
aaaggaaagtggaagttggattctgaaagatcgaggtgcccataggaattttatggtcgtcggattttgaagacttgaactagactgggggttctccttgcatttcttgcctgttgcctatctttgtcctctctcttccggcttcgagatgaatgtgcagccctgttctaggtgtgggtatggggtttatcctgccgagaagatcagctgtatagatcagatatggcataaagcctgttttctctacagacatgactttgtgaaggagcgagggaaactcatagggccccagagtgtaagagacgacccccggatccagcactgccggcgcatgggccagctgcagagcgagcttcagtacaggaggggggcgaccagcagccaagcccagttccatctgcccatggacatggtgcacctggtccatgccaagaatgcccaggctctggccagcgaccacgactacaggacacagtatcacaagttcacagcactgcccgaggacctgaagatggcctgggccaagaaagcccatgccctgcagagtgagttgcgctacaagtcagacctgatcggcatgaagggcataggatggctggcgctgagatccccacagatggagagtgcaaagaaggctggagaactcatcagcgagaccaagtaccgtaaaaaaccagacagtatcaagttcaccacagtggttgactccccagacctggttcatgccaagaacagctatatgcactgcaatgagcgcatgtatagatctggagatgcagaatccctgcacagatacaccctgatccccgaccatcccgatttcacccgagctcgcctcaatgcgctgcatctgagtgacaaagtctacagaaactcctgggagcagacccgggctggcagttatgacttcaggctggatgccatccccttccagacttgcccgggcatcttagggaattgccagtgatttccggtacaaagaggctttcctgcgggaccgaggcctgcagatcgggtaccgcagtgtcgacgatgacccaaggatgaagcatttcctcaacgttggcaggctccagagtgacaatgagtacaagaaggactttgccaagagtcggtcccagtttcacagcagcacagaccagcccggcctccttcaggccaagaggagccagcagctggccagtgatgtgcactacaggcagcccctgccccagcccacctgcgacccggagcagctgggcctcaggcatgctcagaaggcccaccagctgcagagtgatgtcaagtataaatcagacttgaacctgaccagaggtgttggctggacccctcctggctcctacaaagtggaaatggctcggcgggctgcggaactggccaacgcaaggggcctgggtctccagggagcttaccggggggcagaagcagtggaggctggagatcatcagagtggggaggtgaacccagatgccactgagattctgcacgtcaaaaagaagaaggccctgctgttgtgagccatgtccaccctgattcctgagaggccagagaggaagtttgttcaccagagacaggcttcagatggctttgatttcggcaagctggaatggcccaccagcccatcccagatcttcctttattaaaataataactctgaaagcagaaaaaaaaaa

SEQ ID NO: 66093 - DNA, 2567 bp, Homo sapiens
ctcgtcccacctgacgagaaatacccacaggtgtggagaggcaggcccctttcaggtgagtctgtggctgctctgcccaaagtcaaccctgatggggtgaatgagggaaggggcagggtttacagcacctgtgctcatggccagccacggggtgaatgaggaaagggacagggtttacagcaccagtgctcatggccagcctgtgaaccagggtgagctccaaacaaaattccctcaaatcccaaggaaatgaggacgacagagaccatatgattagttcttcatgaggttatgtttactacaaatttttattgttaatgtttctcatcctgaaattatgggatacagcctagcagtttgtcctcacttggcagagtaggtaaccctggctctcacactgagcccccaagagtccttttggttttactggtgtcagggattacagtcagcaaaccccactcatttacagggtcaggtgtacagggctgagctggagggttagggtcagggcccctcaggaaactctggtctggcacagcagcagcagggatgccactctccctttgtggaatccttcttaatacaagagtgagaagcagaagagcaaaccacaaaggaattccagctcagaccccaaagtacctgggagagctgcaaacagccatggagataagagaggcggggagggaacacagtgactgagtctgagagacagcaaagcacctctccagcgaaagccactccgagatgcagcctaacttcctagtttgcatcagcaagatgagcaggcaccaccatggaaagagcacctggggtgtagctggttaccacagctcagccacattccccagaaacggaggtcagccctccatggcccaggaaaacatgggggatgaagggttggcacctgcagtgaccagatggagatacaatgcaggcagctgctaccatgcttggtgaccagggtacaagcccctgatgagcttgccatggcagccaaggacactggtgccggaggaacgacaggggcctgcaaagggacatccgaggagggggaagcaagctgggagcaagaccagcccagctaggtttcagggcaacagcaaagccccagagacatggaggcagatgagtcaaccttgctgggtgagaagtgagcttgcactgcatagggcaagaagaaggtggaccccactcctccaggaggctgacagtctcagccaggtacaatggagggtccaggtcacaaggaagggggctatggtgagcatggatggagaaaggtaggcttgctgtgtggaaggaaggaggaggggaggggaagggtgagcaaagtggggctgcaggcatcaggctgtggctgatctgtggtcagcctggagctcagaggcagttctggattgacaggacacatggtgtggccacacaggtggggggacagtgatcccatagtccccagggagtgactgggaggcagaagattggaacaggacagagaagggcaaagaagcacatggctcatgctttaaaggtgtttttatgccaagacaagggggcgaggacctcatcttgaggtgagaagaagtcgttgccctgccagtccagtggtttgaacatgaatccagcccagtggacagggaaggcccagggagaggtgggtagggagggcatcctgcagaggctggggacaaggaggatggcacagaatgccatcacagccaggggagtctggcagggcttggcggaggcgccaaagttaccagcaagctagaaggcaacaactgatagccctcacaggaaccttcttgtgtagacccacagaagctccctatccctgcctgctttgcctgactctgaaatgccagacaggcccatttctaggtctgttctcctgaaaatacatctttggtgctgggtagatcctgaatcctgagaatacaagtttctgctcctggatacacagtcacatgacccagaagatcccagcccagtggctaggccaaggctgcagtccactccttcatccacagcccgttctccccaagggtctcacttcatcgaaggcgcagataacacagtagggtggcctccactggtctgcccatgctcagcaaccatggccaggagtaactgccatctccagggtgagaagcctcggtcggaggagatgacacccacttagggttcacagccccttcctgtgtcagttccaggaaccttggatcacagacatggcctcacccagacaaggacacgaccgtgcagccttaagatgtcagagtcccaagcgcggggagaagggctgcaagccacaggtggccacgtctgggattcaccagctgctctgctcagacctggcttctccagacacgctgtggccccagctctgcctggctctctagcacctgggggaggggggaggggctgggccttggtttccccgagagagtccctttcacacatgggaccagccaacatgagctcatcaggtcacaggcagccgcagcctcctgccacacaggaagaagattcctgacccacaattatcattgcaaaggagtattttg

SEQ ID NO: 66094 - DNA, 1894 bp, Homo sapiens
ctgaatccatggaaaaacgctttacaggacttctgcttaccttttctcagaatcaccagccttcttcagcaccacctttttggggaagatttacctagctgccaggaagaagaagaattttcagttcttgccagctgcctgggacttctgccaacgttttaccaaacagaacatccattcatcagtgcctcctgtctggattggccagttccagcatttgatattataactcagtggtggttttgagataaaatcatttactgaaagacatgcagaacaaggaaaggccttgcttatccaagagtcaaaatggaaattaccacacctactacagttgcctgagaattataacaccatttttcagtactaccacagaaaaacctgtagtgtctgcaccaaggttcctaaagatcctgctgtttgccttgtgtgtggtacttttgtatgcctgaaaggactttgctgcaagcaacaaagttactgtgaatgtgtactgcactctcagaactgtggtgcaggaacaggtattttccttttgatcaatgcatcggtaattatcatcattcgaggtcaccgcttctgcctctggggttccgtgtatttggatgctcatggagaggaagaccgggatcttaggcgaggcaaacctctctacatttgtaaggaaagatacaaagttcttgagcaacagtggatttctcatacttttgatcacatcaataaaagatggggtccacattacaatgggctgtgactctccacctcagcattgcatcgtatcatcattttcgctacgaatttatttttcaacaataagctttaacttaatttgggggattaacacttttgctgagggagaaaaagaaaacatacattatgaagcctttccaaaattaggtgcttggtaatcacgttaatggtataattttttttttttaatatctggagaacattaataacaagttaaattattctttagtggtcattttttaagtgcacaattaataagaagcacaacttgttcacaaactcattcagaaatgattctcccaacaatgcatatcagctattcattgatacttagagtgggtgtgatttatttgacattttactgcttctttctgtctgtgtgttttaatttgcatctgccaagcataatgcatcttttttcctctgccattcttgtgttgattggagaatttttctgtatgtaattagaaaaaaatgtaaaacatgatttatgtgaaatactgtatagtaaaagttggtctaatagtagaactttaaaattttttcttattgtgaggaatctgttaaaagtttaaagctttgctgaaaactgaattcattctcaggaatttcataaatcttctccccaggtaaataattgaaatagctgtaaaataagtagatagctgctgttaatataatacagtacattttggggggcatatgtgtggttggggggtccttaaaaatcaaaatttgccatttcagttggatgaattactagaggtaataacaaatcttactataaaatcaagaggtttaagaacatacactgggcagatgttgattccgtgcatgcccaccttttattaccaaacaaggttttgtttatatgattgtattagaaatgctcagacttccccagaaatgaaccataaattttggaacttcctttcagctcaagaggttcagctatattgtatttgtgcagtggtaatcactacctatttctggctcgggtttccctaaaaggaaaaaaaaggcggcagtgggtgatgaccctcatggaatgagccacgcttcctgcattcctccttaggaactggctgtggaaaaccaatttatggtttgcaggggtttaaaaatccagtaaaaatgggggatg

SEQ ID NO: 66095 - DNA, 1392 bp, Homo sapiens
tggtcctcgtagttcactgtggtggaattccgcggggttgggcggtcgctgccgggggcaccgcatccgccgggcggaggagcgcgccgaggagctgcggaacaagattgtggaccagtgtgagaggctgcagttacagagtgctgccatcaccaagtatgtggcggacgtcctgccggggaagaatcaaagagcagtgagcatggccagtgcagcgagggaactggttatccagcggttgagtctggtgaggagtctttgcgagagcgaggagcagcggttactggaacaggtgcatggcgaagaggagcgggcccaccagagcatcctgacacagcgggtgcactgggccgaggcgctgcagaagcttgacaccatccgcactggcctggtgggcatgcttactcacctggatgacctccagctgattcagaaggagcaagagattttcgagaggaccgaagaagcagagggcattttggatccccaggagtcggaaatgttaaactttaatgagaagtgcactcggagcccactactgacccaactctgggcaacggcggttcttgggtctctctcaggcacagaggacatacggatcgatgagaggacagtcagccccttcctgcaattgtcagatgatcgaaagaccctgaccttcagcaccaagaagtcaaaggcctgtgcagatggcccggagcgcttcgaccactggcccaatgccctggctgccacctccttccagaatgggctccatgcctggatggtgaatgtccagaacagttgtgcctataaggtgggcgtggcttcaggccacctgccccgcaagggttctggcagtgactgccgtctggggccacaatgccttctcctgggtcttctctcgctatgatcaggagtttcgtttctcacacaatgggcagcacgagcccctggggctgctgcggcggcccagcccagctgggtgtagtgctggacttgcaggttcaggagctgctcttctatgagccagcctccggcacagtgctctgtgcccaatcaatgtgtccttcccggggcccaatcttccccagtctttgctgtggccgatcagaccatttctatcgtccgctgacctctggccacaggaagccaggtccaccgcccaccaccctttcaggccatgtttctactcagtgtgcttttcccaaatgatgtgtgtggtgtttctaagagaaacagggcccataaccagtgggcagctttaggagggatggggatctgtttcagatctaggcataacctgtaaatcacaggtgtccaaacttttggcttccctgggccacatttgaagaagaattttcttgggccacataaaataccctaacgatagctgatgagctaaaaaaaaaa

SEQ ID NO: 66096 - DNA, 662 bp, Homo sapiens
agtcgggcagcctcccagatctctgacaactttacaagctgcaggggagaccagcgataaccctgaaaccttcccatgtaacccccagggcgctggccagaccaagagcagctgccacatcaggctggtgccagcagtccctgcctgccacactgcccccccaccaggccactgaatgaggcagctgggagaggcaggaagtggggcttcaggctgaattcttgatttgacccttcttggcccttttgcttgggagacctggaactgaagggcatggaaccccccttggaccctgtgggcaggaaaactgctccccttgtccctgcctgggggtaggacagataaggctgctcgtcctgcggcggccccccagcccacctgcttcctatccgtttcctgcaggatggtgccccctgcatcccctcacccattgctcacggaaggaaaagcagacgtggccagcctgcatcctctgccctccctgagcctcctggcctggctggccacagctggcatggacgccatcagcaggctccgtgcaggcggacggggcagcccccacagccagggcaccctggccctcactcaccagcacccttttgttcttttcctagcaaaatatgcaaagtgtgaccagtgtggaaacccaaaggtgagtgggt

SEQ ID NO: 66097 - DNA, 3036 bp, Homo sapiens
ggctttgtttatctccatcatcatccaaacagactaccaatcctgatcccagcccaatcttgggcccttgaaaaaataacttaacatcctaactacaagggagaaactcctttcaaattaatgaacctggctgacttatatagccttaaaattatggaaatgacaagggttacaatgtcagaatgagcagtaaaccttccccagtcctatcagagcaaactttctggggttgcatcccctcagaaacccatttggggcccaatctcaatgcacatatcagtgcgcaaagcactaaaattccaggcaacactttgtattgagagaagccaaaattttggtcaggccctgggacatctaaagtcaccaatgtaactacaccatacagattaaaccctcacatgatcatgtaagctatgcagttacccaagctgcatcatttagaaaacctgtacagtttttatggaaaccatccctagtcaaggacactttaaatatatagtctaaataccgttaaggtaggcccactagctgtgttcacattttcccttggccaccttaccagggactttaataacttgggaaagtgaaaacaacaagctaacccacatgttcaccatagaaaacaattttgtcttgaaaaacaaggactctttttcccgtgtgggaccagttcctacttatgttttaccagccaattggactggaacctatacagttgtttatttagcccccgaaattaatatagctcccaacaaccaatccttcattatacttttaactgcaaccaccagacacaaatgagccatccaactgataccactttcggtagagctaggaataacagcaggagtaggaatgagagttagcagccttgcagtttccctatcctattaccaatgcttgtccaaggattttatggaaagcttaggtgacattgcccaaaagtatcatcaccttacaaaatcagatagagtctttggcagtggtggctttgtaaaatagaaggggactggatctcctaaatgctgaagaaggtggcttatgtctttttcctagaggaagaatgctgtttttatgtcaaccaaacaggattagtaagggatgccacccaaaaactagccgattggtaccataagatatgacaacagctgtctgagtcatggggcgcctagtcaaaatgctaatttggggctcacatctccttcctctggccagtccactattaattattatacttgccttggcttttggatcatgtttggtaaatcttttaaccagatttatttcttcttgcctagagaccattatgataatgcagcagggccaccagtcagtttcagataatgatgtcaaccccggccaccaagaagtaaccttgtctccactagacagagcaggttgcaggaatttagccaattcagaggtcttggtctccataatttggaattttccttcggatttgatcaagttggatagagttggtcaaacccaatgggaaaaagatgaaaacaacaagaaacagaaacaaacagcaacaacaacaacaacaaaaacaatgcatttaattaaattaagatgagctcatgctggagtagggtggactctgaacccagtgggacaagcgtccttattaagaagagggaaatctggacacacacagagcagagaccgccgtgtgaagatggaggcagagatcggagagatgctgccacacgccacaaatgcctggggctcccagaaactacacggagcctcccccagcggcttcagcaggagcatggctcggccaacactttgatcttggtcttccagcctccagaacggtgagtcgttttcctaaaattcccttttccactggtgtgtggtgcaagatgaggcacattttccatggatggtgaacagagggaggagccttttgatcacaaccaggtcaccccacttctaagccactgtgcctccagccccacaagactaaggagagagagcgcagcgtggtggagagtgagctgtgctgggaccattgtttccgtaacctcgttttctgtgtccagctgacacaccttcaaagtggcatcaggtcctaaactgtagcttgcaatgtgcctgtttccagaaaccaaggtgaaagtgcttttagacagtgttcccatgcaagagtcccttcccagcttttttctggaaatgcatgtttctctgaactctgagtcccaagaaaaatcacttgagacaccaagaaaatgggggaagtgctaaaattgtgtgggaattcaagcttaacaataaacatcaagacatttttgataaaaatgaatccactgacatcggggaggagcaagagaacagcacgctgacactgggtcagaggctaagaccgacatttctgggaaccactcccggaagggcacagaggagacgctttcagcctctcatcagccagcctggcctgtagctgctgcacgttatgagtgtgttcctggcatgactgcttctaacagcgaccatttcattaagtttttaagtgcctggtaattgcttggttatgaccggtgtctgctccatggcagcctcttcctgaagaaatgctgaggcagtgtcacgctggtgtctgtcctccttacagaatgcctgaacagttccattgactcaaagtgaagatcaaaagaaccaaatgacagcaatagccaagtgtaatcatcagtaaccctgtgttctatccacaggtaaaaaacaatcatcctcttcattatgggtttcaattttaaatgtaatacatttttagaaatgcctatttccttttataatctctttatataatctaggttattctggctcttaggtcttcatttagctactgaaaagatttgatctcaaatcaatgatctaaccacccatgaccatctcccacctctctccccgtacaccccccagcatgaattctgggaactcaggtaaaatgctttctggaaacctgcctgtattagtctgttgtcaagctgctaataaacacatacccgaaactgggtagtttataaagga

SEQ ID NO: 66098 - DNA, 1387 bp, Homo sapiens
  misc_feature (1)...(1387): n = a,t,c or g
agagatcgcggagagacgcataacgcagcccgctcctccagggccctccaggccctccggccccgggccggcgggtgaactggggggccccgggacaggccgagccctctgccctgcagataacggaggcctctgctgtggctgcccactggctgtgcccgcccactggctgtgcccagaccttgaagccgcagcgaacctctctttcccaccccacctcggtgactaatggcggccgtggcgtctcccagcccggaccccgccggcacccgggtctcccgacccaagcctcgacgaaacccccgcagagccgccgggacgcagcgcctttgggcggcgctgggcgtggtgggccgggaagtatggcggcagctcgaacgccgcgcggcggaggccattaaggcgtggacggcccgggaaggcggcctagggacgcaagcaggctcggccgcctctttaggccacggagccgcgcagatccggttcccgggtgaccactctgtcgccattgggcgagacctacctagtcctgacgacaacggacaaaggccttaaggggcctggaaggtgagcgaagtcccgaacgacgacgggtggaacggttagcggccatcgggcggttggtcttcattctaccagactttgctgtcggaagagagaaatggtagaatgacaggccacgtttggcccgttggaaatgcccaccaccctctgggaagatttactggccgtttatggaaggcctgtgtatataatatgaaaaagctgctctcaactccaccccaaccttttaatagaaaacatttgtcacatctagcccttctatagatggaaagaggttgccgacgtatgataaaatagagttagaaagttacacatcttgtaaattctcatttgtttaaaagaaatcatagaaaatacatgtcttctggagatgacttttggaaatggagttgttaagacggcctctggaagcgatacgtccacgtttgttaagtgggttagatgacatggagctggaagacctgagaaggaagagaagaaggttctatgctagactggtcatatttagaagacattttcatattctatccattgttttgtgtgcattttattcctcactactgtgtatatagttgacaatgctaagcttttttgaaatgtctcttctttttagatgttctgaagtgcctgatatgttaaaattagaggtagcaaaatcacattttgtaaatacctttttgttacaattcataggaaatatttttgggggggaatggccaaatcacctgttgagtaatactcattgtgtttgtgcagtggttcangggaggagagaggtgggggggtgccgttggtgggagagacaaaaagagggagagtgtgc

SEQ ID NO: 66099 - DNA, 2744 bp, Homo sapiens
tttttttttttttctatatataaaatctttattacaggcagtattggtccatacacttaacacaataccaacagtacacggtttaatctttcaaaatcatcatttaaacagcaaaagacccaagaaataaaatttgagtcaattatttttcaaaatattctcaatgcacattatccttaattcccttattatagtgaaacatacaaatacagaaaaataccccatttaacaaatactagtgttaaatggttatttggcttaaaatctgagttaagaaaatcctttttagcaacctacatacagataagtagcaaactttattatattaaacaaattcattctgctaaaacatgtaaagaatttcatccatcatgtattctgatcccagtacaagtgtttattctcttaccgtcacgattcttatatgaaggaccaactcaaagagttgtcctagatataaccttatcctcttccccaacacacttcatccaaaagtctgttcaacagatggcaaccgggtagcagtcacttcaccatctgatgccagtggttccgtgagagcgtggccaggcctgtgaaacagcccattttcctacctactgtgggttgctgctcaggaggaacgatatacgccaatacaagcaggaaatctgcagctcctctgctatgtgcctcagaacactttcaatttttctggtcaatgctctgattaggtatcatacataaaagccagcatattagtttaaatctttaaacaaaaaactatattttccaaagtcattatcatttgggccaattaagtgatcttttcgtgctttgttgagcttcatctttagggcatctcttctttcttcccattcatgaagttcggcatttccatgtgcaaatttacagctgtttccttctgggcaggtgccattcatatacctatcacaaatactgaaatagcctgttgggaagcggtgctgccagcagtactggtcgtcctcggtgtggaaaaccttctctttgtgcttctcggaggagatgtggccctgccactgcttctcactgttgcagtttttcccacacatccagcagtgaaagtccactgtaacttcagcataatctgttggcatgtgaatttgttttccattttccttgtttgactgactggctatgtcttcacttttttcatttttttgactcttgagccatagttcgtaaaattgctccatatcttgtatcccattctccttcatgtaagtccaaacttctctttcctcaggactatgagcaaaggaacagtttcccacatattgacattttttcccagaagcaatatggttgcacagatcaaactgtaaaggcatttgtttctttgtggggagaggacggatgttcatccacttcttacgttcaatagacatcactctcatcgcacgccggtctttggtccacgaatgccttgcttttgcactacaatattttctgtttttgtctggttcaatgacttgaccgtttctcagacactgggcgcacacaaactttatcttcatattaagaaatccaggcattatttgattaccaagtacctgcgctccaggtacatttgcttccaaattctgccaatatcgtttagactcttgagcaatagcatcatgtgagatacctgtttcattttgcattatccagactttcagttccacaagactatgggcataaaagcactcatcttcccttaaacagccataccgaacttcatgtcgacataaatcaagctgacactgaccatgaaaagaacgtattttggagtattttactgttgtctctcgcaaaatgtggacaaggcacttattgtcttcaaactcatgctttgtaaccgggtgagaacaagcagtagaattatctttatttcttttacttatcattctaggcttatgatcaaaacatttctcacaaaggaatataaattccccaagatgctcctggagaagtttgaacacagtaaggttaatctttccattgccgccaaagaaagcctcccggctgaatgctcctttccgctccagtgtccacacatctatctcctcttggcaataagcaaacgtgcagtggcctgaatatctacattcctcctcagcagcaacatctttacatatataatatggtccttcataatttgtttttgttggtcttggacgtatttttttccatgatttatcttcaacattctttatcctaccgattaaaatatctttcttacacttatgatctatgttagcatggtaagtgaaatccattaacttagggcctgattttacaaaacagatctggcaagcttgtctcaattcatgggttccttcgaggggatgtcttggagtcactgatgaagatggtttggtaactgcacttccaaaaaagtttccaaagtcatttctaggctgacttgaaattcccaggaaattctctgaagcaaacaaactacctggtccattcataagtaaaagggaagaattactgttgttaaagcggtgttccctctctagaagttgaggtggacagatctcgtttggattcactcattgaaaatgaatttaaagaagaacagaaatcttctaaggatgaagtcaaaggtggataaaattctgagaaggagggtggaggagcatacctcgcaccaatgggtaaggttcctaacagcgatgccgaaaagggcatgctaggagagacactggctgtctgaaggggtcctctgactaaag

SEQ ID NO: 66100 - DNA, 1145 bp, Homo sapiens
  misc_feature (1)...(1145): n = a,t,c or g
tcaaaaaaaataaaaataaaatacaaaaacaactttcccccataccactccttatcccacacccccatcctctatcccctatcccctatccttaatctctttgtaactgttgctcactcgctctctcactctcatgtgtgtgctctctctcacatacaccacacacacacacacaccccacctacataatttcttctcttacacctttaatataaatatctgagttttggttcagttttgcaaacatttaaaaggcaaacatggtattttgcttgtttcagcatttaataaggtagtgcatacttctttcatatggaaggaaaacatcatattaagttaatatttaaacgtacacaattataatttgcaaaaaaaaatcaagatgataatttcttaaatagtaaattgaaataaatgatattttcctagcatgcttgtcattcagcaataataagaaactgagataagaatgcaggcagttgaagttcacttcagcctgagtgcaagtatacacaaaacagcaaaaatattacatagaaaataaatgttgtccattggattgagtatggtgctaccatttgtcacagtgttcatattcatagttgtggctatctttggggtcactgctgtattcagacttgtcttggaatttggagtcatctagggatttgaggtcattttgagatttgggcttgtcccaggattggtgctaccatttgtcacagtattcatattcatagttgtggctctttggggtcactgctctattcagacttgtcttggaatttggagtcatcttgggactcgaggtcattttgagatctgggcttatcccaggattggggttcattctgggattggtgctcttcctgggattaggtctggtcccgggattcaggcttgacgcaggattggatactgccatagaatttgaggttgttgatgttgaagtttgtccccggaatgttaacaaacatgaagagcaggccaatcggtgatagcttgaacatcatcctcctcttttgatatttttctccgaagagtaagaattcagtctttctccagcgacaaagcgaccgcccacgcgtccgcggacgcgtgggcggacgcgtgggtcgacacgagaannaagccnggtagtcatt

SEQ ID NO: 66101 - DNA, 2222 bp, Homo sapiens
agtcagcgcggtggaattcgctatgctgagggtgacctcactctctatcaccgtacctcagtcactgacttcctccgagctgccaaccctgttgacttcctctccaaggccagcgaaatcatggtagatgatgaagagttggcacagcatccagctaccactgaggacatacgggtgtgctgtcaggacatcagagtgttggggcgcaaggagctcaggtcgctactaaactggagaacaaaacttcggcgatatgtggccaagaagctgaaagaacaagcaaaggcactggacatcagcctcagctctggagaggaagatgaaggtgatgaggaggactcaacagctggaaccacaaagcagccctctaaggaggaggaggaagaggaggaggaggaacaactgaaccagaccttggcagaaatgaaggcccaggaggtggcggaattgaagaggaagaaaaagaagctgttgcgtgagcagagaaagcagcgggagcgtgtggagctgaagatggatctgcctggggtttccattgcagacgagggggagactggcatgttctccttgtgcaccatccggggtcaccagttattagaggaagtaacacaaggggatatgagtgcagcagacacatttctgtccgatctgccaagggatgatatctatgtgtcagatgttgaggacgacggtgatgacacatctctggatagtgacctggatccagaggagctggcaggagtcaggggacatcagggtctaagggaccaaaagcgtatgcgacttactgaagtgcaagatgataaagaggaggaggaggaggagaatccactgctggtaccactggaggaaaaggcagtactgcaggaagaacaagccaacctgtggttctcaaagggcagctttgctgggatcgaggacgatgccgatgaggccctggagatcagtcaggcccagctgttatttgagaaccggcggaagggacggcagcagcagcagaagcagcagctgccacagacacccccttcctgtttgaagactgagataatgtctcccctgtaccaagatgaagcccctaagggaacagaggcttcttcggggacagaagctgccactggccttgaaggggaagaaaaggatggcatctcagacagtgatagcagtactagcagtgaggaagaagagagctgggaacccctccgtggtaagaagcgaagccgtgggcctaagtcagatgatgacgggtttgagatagtgcctattgaggacccagcgaaacatcggatactggaccccgaaggccttgctctaggtgctgttattgcctcttccaaaaaggccaagagagacctcatagataactccttcaaccggtacacatttaatgaggatgagggggagcttccggagtggtttgtgcaagaggaaaagcagcaccggatacgacagttgcctgttggtaagaaggaggtggagcattaccggaaacgctggcgggaaatcaatgcacgtcccatcaagaaggtggctgaggctaaggctagaaagaaaaggaggatgctgaagaggctggagcagaccaggaagaaggcagaagccgtggtgaacacagtggacatctcagaacgagagaaagtggcacagctgcgaagtctctacaagaaggctgggcttggcaaggagaaacgccatgtcacctacgttgtagccaaaaaaggtgtgggccgcaaagtgcgccggccagctggagtcagaggtcatttcaaggtggtggactcaaggatgaagaaggaccaaagagcacagcaacgtaaggaacaaaagaaaaaacacaaacggaagtaagcagagctgccaggctcccaggagagcatggggactaggaggaagggtgtggcatggctcagtctggcccccttgattaccggcctagcccctgctcacatcacagctgtctgaagaacagtgaggtggagtgcctagaactcccgtggtggtcctgagcagagaggaggatgtcctcctgcctgcctgaaggtctcccatgaaaacactgctgaactgtgttgacactcatgaccctttttttaaaccgttaaagggaagttcggtgttggagcgatactcaatgtagtcagtctacacctggacgtgtgggccacttaagccctccccacccccatcctattcctaaataaaaccaggataatggaaaaaaaaaa

SEQ ID NO: 66102 - DNA, 1863 bp, Homo sapiens; identical to SEQ ID NO: 66061
  misc_feature (1)...(1863): n = a,t,c or g

SEQ ID NO: 66103 - DNA, 1820 bp, Homo sapiens
ttttttttttttgactatctttggaattcatttcattaaggttttcacaaaatacaaagctcaaacgtaatcatctatgtccaccacaaaacagaatcaaataagtggttagcacaacaaacatagtgatcttttccattttaaaaaatataaataacaatgttcaaggttttacagttttcttagtgtgtgtctttttaaggctttatgttgcagacccttcattaatggtacttgtaccctgccatcaggatacactgcccaccagcaaggaaggccactgtggatacattcctgagggggacacacactgatccatgttgcctcagcctgttaaaaactaaatgatcaaacaccctccaatcagttctcagtttcattaactttctttctactacaaagtaataatagaaaggggtacgtgtccagcagcattcgagctctcagaagatcaatcaggaagggcaagaaggaaaaaggcttcctcctggagagaatttttttcctttcatcaggaacaaacaccaataacccagatagttcaaacagtggtttgtactgaaacatttttcagattaaatagtgttgagagaaacagtgatcttttggttgggtattttagaagaggttaaagtggagaggttaatgttgggaaaataccactgaaagtacagcccccagcaggaatgggctcactcgtgaggtttgggggcagagccagggccccagccttgggaatgaaatctgagggcaggctctccagcagacacttgacctgctcctggcccagcttgatcttgtcatccagcttccgttgctcaatgaggagcgtggacttcattttcacgaagtgctggtagtcctggagctgctcctctgaaaggtaattggccaagatgcccagcactactcgctccctgcgatccaggttctccttcagctcccgggcatcctcatgctgaccagccaggatcttccttttctcgtaaagagagctcctttcttcattactggcatcttcaccaaggccgctaaggacattctcaacacgggctagacgccccgagagggagagcagcaggttgaccaccttgtccaaatcccctatgaacatcctatacttgtcaaactcattgggcttgcagagctcgctgatcagagcctccacctcttctcccagggcgttgttgagcttgatgtccgtgagcaggctccccttcgcctcctggagggtctccagcttgtgggtgagacttccaatgagttcagcgttattatcattgacttgtgcatgttcctcttcctcattcggttctgctggcatatctatgattttgttcagtagctcagccttggtagcacacacactgtagtaggcaggccagttacaccaacatgctcactgcttcctagtgttcattcctcttgccttcacatcctgaagagctgacagttctctgtatggccttcctctttacactgttttccttcagcaagttcacatctcggggaaacaaaccttccatcaggtccattgttgtcttcagcctggagtctggatccaaaatgtctgctagagatttgtcttggtggacaatttccttggccaaagcctctgttctgatgtcttctgaactcttctgaggatcaggactgactttcttttctaaaccctgagttccactgactggatcatggctgaggctttgagtctggatgggtgctggctgcccaccaagagacccagcaagttgggcgtgaacgctcatgaaggagggtggtgtggactcagcctctgaacccttgatagaagtttggag

SEQ ID NO: 66104 - DNA, 569 bp, Homo sapiens
aaggccttatgagtgcagtgtatgtggggaattgtttaggtacaactccagccttgttaaacattggagaaatcacactggagaaaggccttataaatgcagtgaatgtgggaaatcatttaggtaccactgcaggctcattagacaccagagagtccacacgggagaaaggccttatgagtgcagcgaatgcgggaaattctttcgttacaactccaacctcattaaacattggagaaatcacactggagaaaggccttacgagtgcagagagtgtgggaaagcctttagccacaagcatatacttgttgagcaccagaaaatccacagtggagaaagaccttatgagtgcagcgaatgccagaaggcctttattagaaagtctcacctggttcatcaccagaaaatccacagtgaagagaggcttgtgtgctccatgaatgtggggaattctttagctaaaactccaacctcattaaacatcagagatttcacaatggagaaagtttaccattgactattgtaattgggtagtaatgttatataaattccacatttttatgcaacta

SEQ ID NO: 66105 - DNA, 2371 bp, Homo sapiens
ctacatagtaaacttctcttcagtagggtaaacgaatgctaaaactctgagacctctgtcagctgaagtcataagaaaactgcatatttgttggaagaaaataaagaaatgaagagctgctaagcatgaataaggactgtctctagaaattaaagggaagcttttaataaacacatatttttctctccccgaacttccctcccccaaattcaggagttggccgaggaaaagatatctccaccatcacaggtcatcgtgggaaagacatctctactattttggatgaagaaagaaaagaaaataaacgaccccagagggcagctgctgctcgaaggaagaaacgccggcgattaaatgatctggacagtgatagcaacctggatgaagaagagagcgaggatgaattcaagatcagtgatggatctcaagatgagtttgttgtgtctgatgaaaacccagatgaaagtgaagaagatccgccatctaatgatgacagtgacactgacttttgtagccgtagactgaggcgacacccctctcggccaatgaggcagagcaggcgtttgcgaagaaagaccccaaagaaaaaatattccgatgatgatgaagaggaggaatctgaggagaatagtagagactctgaaagtgacttcagtgatgattttagtgatgattttgtagaaactcggcgaaggcggtcaaggagaaatcagaaaagacaaattaactacaaagaagactcagaaagtgacggttcccagaagagtttgcgacgtggtaaagaaataaggcgagtacacaagcgaagactttccagctcagagagtgaagagagctatttgtccaagaactctgaagatgatgagctagctaaagaatcaaagcggtcagttcgaaagcggggccgaagcacagacgagtattcagaagcagatgaggaggaggaggaagaggaaggcaaaccatcccgcaaacggctacaccggattgagacggatgaggaggagagttgtgacaatgctcatggagatgcaaatcagcctgcccgtgacagccagcctagggtcctgccctcagaacaagagagcaccaagaagccctaccggatagaaagtgatgaggaagaggactttgaaaatgtaggcaaagtggggagcccattggactatagcttagtggacttaccttcaaccaatggacagagccctggcaaagccatttgagaacttgattggcaagcctacttgagaagtctcagacccccaaggacaaccagcacagccagtgcaagccttagcctccaaatgggacaagtggtggggcaggaggcaggagcaccagaagaggaggaagatgagcttttgagagtgactgaccttgttgattatgtctgtaacagtgaacagttataagactttttttccatttttgtgctaatttattccacggtagctctcacaccagcgggccagttattaaaagctgtttaatttttcctagaaaactccactacagaatgacttttagaagaaaaatttcaacaaatcctgaagtctttctgtgaagtgaccagttctgaactttgaagataaataattgctgtaaattccttttgattttctttttccaggttcatggtccttggtaatttcattcatggaaaaaaatcttattataataacaacaaagatttgtatatttttgactttatatttcctgagctctcctgactttgtgaaaaagggtggatgaaaatgcattccgaatctgtgagggcccaaaacagaatttaggggtgggtgaaagcacttgtgctttagctttttcatattaaatatatattatatttaaacattcatggcatagatgatgatttacagacaatttaaaagttcaagtctgtactgttacagtttgagaattgtagataacatcatacataagtcatttagtaacagcctttgtgaaatgaacttgtttactattggagataaccacacttaataaagaagagacagtgaaagtaccatcataattaacctaaatttttgttatagcagagtttcttgtttaaaaaaaaataaaatcatctgaaaagcatttgtacagtaaaatgtataatgaagctttgccaaccagactgtgctagcaacaaatttttttaaataagctttatgcagtggtaataaggtggcctcaaatatattgtgtctgatggagagttattagtgaaatgaatgtggtctttcttaaggcctggatggactgtgtagcaattccttgatgtccagtttggaaagatgtactcttctcaacaagaaaaacttaaatccgtcgtgcccaaatatagttgtgcttttatttccaaaaa

SEQ ID NO: 66106 - DNA, 738 bp, Homo sapiens
ttttaacatttttaatgtactggtattgccatttgtagcagatgctgattttaagttaaacaatacatgtcatgctataggtcaaatattggggctctggggtgtgtaaactgggctcaagtctgggaaattgattgaggggccgtgattctgttttaataattcaaattagtattttgtccatttgacctagaagttttctgcttgtataaattaagtgggaatgcagtaggcttcctatcagtttcacttccaggaacaccataattaattagcccaatgcccaagttctacacaagtcagactattctgattgctgctttgcttctgctgtcccattacagtagctacgcccaccttacctttgatagttgagtgcccgtcacttgggcccctgctaccctccggatccagttattcccattttgtatttaaattttgtagttgagtgactgaggttcccactgttagatctgacatacagagaagtgcaattatagggttcttcaaagatgtagctgctgcccttgtaaatctgttttgcaaggcatcagtcaagggtatatcttctggaccctcccagctgggatgagtaggtctaaagtgactaatccactccaccttctgaatctccctaagcctttggatcccttcctctacattaaaccaagggagatcaggcatttccagctcactcacagtgggccatcttttaatccatatttcagctaaccacgc

SEQ ID NO: 66107 - DNA, 1433 bp, Homo sapiens
gcaaggggcagttggtgaacttgctgcctccagagaattttccctggtgtggaggcagccagggacccaggatgctccggacctgttacgtgctctgttcccaagctggtccccgctccaggggctggcagtccctgagctttgatggcggggccttccaccttaagggcacaggagagctgacacgggccttgctggttctccggctgtgtgcctggcccccactcgtcactcacgggctgttgctccaggcctggtctcggcgactcctgggctcccggctctcaggcgcatttctccgagcatccgtctatgggcagtttgtggctggtgagacagcagaggaggtgaagggctgcgtgcagcagctgcggaccctcagcctccgaccactgctggcagtgcccactgaggaggagccggactctgctgccaagagtggtgaggcgtggtatgaggggaacctcggtgctatgctgcggtgtgtggacctgtcacggggcctcctggagccccccagcctggctgaggccagcctcatgcagctgaaggtgacggcgctgaccagtactcggctctgtaaggagctagcctcgtgggtcagaaggccaggagcctccttggagctgagccccgagaggctggctgaagctatggactctgggcagaacctccaggtctcctgcctcaatgctgagcagaaccagcacctccgggcctccctcagccgcctgcatcgggtggcacagtatgcccgggcccagcacgtgcggctcctggtggatgcggagtacacctcactgaaccctgcgctctcgctgctggtggctgccctggctgtgcgctggaacagcccgggtgaaggcgggccctgggtgtggaacacctaccaggcctgtctaaaggacacattcgagcggctggggagggatgcagaggctgcgcacagggccggcctggccttcggagtgaagctggtacgaggtgcatatctggacaaggagagagcggtggcccagctcccatggaaatggaagacccccccactcaggctgactatgaggccaccagttcagagttacagcccgctgcctggaactgatgctgacgcacgtggcccgccatggccccatgtgccacctcatggtggcttcccacaatgaggaatctgttcgccaggcaaccaagcgggcaggccggctatgtagtgtataagtccattccctatggctccttggaggaggtaatcccctacctgatccggagggcccaggagaaccggagcgtgcttcagggtgcccgcagggaacaggagctgctcagccaaaaactgtggcggcggctgctgccaggatgccgaaggataccccactagcacccctgagggggtcatgtggtcaataaaagtccttaggtgctgcctaaaaaaaaaa

SEQ ID NO: 66108 - DNA, 1062 bp, Homo sapiens
  misc_feature (1)...(1062): n = a,t,c or g
ttttttttttttccagtcattaatgatctgtccttttgagatcttttacttcagaggaagatttaggcaagagagcaacatataatagtcagtgatacaaagaagggcatggaacatttggggaacacaggggtttggagggcctgaagcacaggggtggtggtattagaaatgtgggaaatatgggccatgagcctccggacagaatggggtccaggaaggacagcatcacacactggtgctggaatttggggatccttctgtgggcaacctcagcagtctggttattggcccttttttcttacagcctggaaaactggaccaagtttctattgatctcagcgaccgaccggcagcctgtaaggggccatggaagtgtggaactcatttgttaaaatgttcaaaacttccttaacaccatgttcacccttgcaggcaaggccccataggattggtctcccaagaaaaatgcacttagctccaagggccagagccttctgcacatcattgccagttctgaccccggcatccaggtagtacttcatgttcccctattcagcagctcctacttctgtcaaagcatcaattgaagcaagaacctcatcaagctgcctcccaccatggttggaaacaatgataccctggacattgtgcttcacagctaactctgcatcctcttttgtcaaaatccctttcaggatgatgggcaatcgagttatgctctgaaaccaggagagatcattccagcagagagaagtgctgataggagtcatctggaaataaggtattgcatttccctttttaggtgattgaagatctgttagtgttaagttcctcctcaactggtttcgaatgtcatgtcgcctgttgccacatacaggtgtatccaaagttattaccaaagctttgaaacctagggattctaccctctggatcaactgtttgttcagctgcaggtctggatgcacatagagttggaaccatcggaggccttcgggagctcttgctgtgctcatttccccgaattccaccacnctggactagtgttctcaaaannntcga

SEQ ID NO: 66109 - DNA, 914 bp, Homo sapiens
tgccagaattcggcacgaggaaatgagcttggctgggcaccctctctgggccttggaggcaagcctgggctcctctgaaaatacaggcagcttcctttccctgacttgcctggaggagccaggccctgtggtgcggtctggctctgaggcctgtggtcctgcttgggactggcagtcttaggctgagggaacattttccagagtatagccgagggacagaatgtctcagtaagacgggctcggaggggaagtgttttggaaaggcctctgcttgctctgggaggcgttcaggatgctgaggttttggaaatctatggcggctcttcacaactgctcccagctttgggaggaggaatagacgggtgctcgtttcctcgggttcagtggcaaaggtgaagaccagcactgccgacctgggacctgggcctctcccgggcctggggaggacactggactttgaaggggaatgcagcctagaaggcctggaccctggagtcaggagatgctgctcccatccagtaagccctggctggagctcttctgggcaccaaccctggcataaaaccagtggagcctctgggcctgcactcaacagtgcctctgatggagcaggttcagcttggttgtgacctctgctagaagccctccctggcctccctgtgcactgagctggtggttcctcctttgcgccccaggtacatgctcagatctgtgtaccctacactttgtcctccagcttcgtgtttggatgttcacaactcccatgagaagggcccccgagagctggcacagtgcatgtgtttcctctccagacttctacaaacctggcacataattgtttgctggaagatggcatgttcctaaaacagaggaagtagaacctgaataaagcgaaatccaacttcccaaaaaaa

SEQ ID NO: 66110 - DNA, 757 bp, Homo sapiens
tagtaacttgagggtgatgtttccgagggtgctccctacccacactgcagcggggtcctcgtgtgctcgcggtgcatttttgcagctggcgacttgaactgggttgtgcacaagcaccattggtttgccaataagtttaacctggatgtggaacatagatgtggacctcttcgccatccagtgtttgggtgagcaccggaggcataaagctttatagaccttaaaacactgaccattataggcaatcttagggtgcattttgtgcatccttcttattatttctatttagttcctcttgccaataagcatcagaaaaattgtatggagtcctctttggggtagggatgctaagtcttcatgcagaaaagctgcatggtttctgcagagcacaattggctagaaaggctgtaacattaaatgtttatctagaattaacatgagtaggagtaaaagtggctgtggcatcagggcgggcagcaaagcattctggagcgagggggctagggtgactggggaagaggctgatgaaaaaaataaatcaattaaaagagttcagggacttaacaaaatgagatttgacctgtgccaaaactattttgagaattttaaatatgacatttttcctggtatgaataaatttatagcaacaaacaataataaagatacaattgatcttgtatgttatgtatgttgacagagaaatttgattttgctctaaaaaagataatagtgatcaacatagatggagaacaatgcc

SEQ ID NO: 66111 - DNA, 758 bp, Homo sapiens
ttgtaggaaaagattaaaaaaaagtgtaagttccttctggggattactggggtagggctgatatttctccggactgcttcaagtgtgaccagggactgcgtggacaccttaaagaaaattttataatgagtctagtaagtttcgggtctagggtgcatttttatgtagctaacaaggtgccagttagcgtatttttgagcttggaactgccctaataaaataagttctctaaaaacagtaatcaggcatattagctttaatgtaggtggcgatgagtttttaggccaaggaaggaataatgttttatgtaccaaagccttttgtccccattttccatcatacgaatagtattccctgttgctaagccgatgatacattacccttttccccataggtgtgagtggcggtctgaaatggagaagttcaatagttctgattgcagatcctatgcagaagagataataacggaaaataatctttgtctcctggattaagctgaggctggcaaagagtgaaatgtcccaagccctctaacaacaaacaacatactttgtgttgtcctggatgctggtctggttgccaaatatgtggaactggccccatatgcgtgtactgttgtccatttcatgagagtaggctcgacggacaccatggggcaaaggatctgatggttgccagcctaagcgttttagacttttgacccagagatttattgttttgggtgtggaaaaaattttccagtgaagggtctcaagata

SEQ ID NO: 66112 - DNA, 1813 bp, Homo sapiens
tattaaaaaatagcctgtgatggccgggcatgttggctcacagctgtaatcccaacactgggaagccaaggtgggtggatcacctgaggtcaggagttcgaggccgggctggccaacatggtgaaacctcatctctactaaaaatacaaaaaattagatgggcgtggtggcaggtgcctgtaatcccagctacttgggaggctgaggcaggagaatcgcttgaacccaggaagtggaggttgcagtgagcacgatcgtgccattgcactccagcctgagcaacaagagtgaaactctgtctcaaagaaaaaacaacaacaacaaaactgtgattctccatctaactttttacaattatcctttcacaattcaagaaagtgtgaatgcaagtcattactaacagtatctcagtaaaagtagtccaggagcaaatattttctttttaactgggttcccagctagttccattcccttgaattcagtggcaaagtcactgtcaataaaaggtttttactcttcttcctttttgaattgtaacttgcttactgaattcaggaattgggtgatcaaaagataactgcttattatagtaagataaccttggaacagaactgtgattaaaaacctgaataataaaaaacacacaagacccattaaaacctattcctcactttttcttcgtgctggcttcatggttgtctttgctgtcttcattgctctccccgttatgttgtggctgattaccatcttgagcatcagatcctccatttagagtctttgacccttgcgaaggaatccaatggaaaaactttgttaaagcttacaaaacaataattgaaggtgtccactaaagatccagaatcaaaatacaacatggccatcgtgtttctactacttaatgtcttttatttgaaattacattgtaatacagccctctcttgaatgttagaattgggttttgatgctttgtcaaaaaggggagcagatgaccaccagaggctttgggtagctaaggcaccataaaaagcaggttaactatctatgagtacaggaagtggattattaatctgattattctggttgttactattaccaggaatactacagggtgttgtaattcttagcatattcatttattctaccacggaaaagcaatgtgaatcaaattttaaaatttactattttagaacaaagtgctaaaggagtatttcctaattgatatttttgtgcctaataaagggggttttcctgtaagtcgtattaataattctctaaggggacccatgtcattccccaataaagcaacaaaaacaaaaaaccaaccgactgcttttgacataccagcttttaccttaagcagctgccactaagatgtttaataacaagactggaggagctgataatggtactatgattctgttttaagagtctttcatacattctgaaatgtttatgagtgaaatggtatgtcagggatttttcgtaaaacaactttcaagaggggcatagagaaagcttatgggctacaaaagcacaatgatcataaactgaactgccaaagctggatgacaaggacatgagaagttatttctatttgtataagttataaatttttcctaatacaaatgaaaagaaaataactactgttagtaataagtactagcaggatttaactactgctaaagttagtgaaaaaagtagaagctaaggttcagtgccttacatatatgctacacatctaagtgctttgtaagactttatcaccaggcgcggtggctcatgcctgtaatcccagcactttgggaagccacgg

SEQ ID NO: 66113 - DNA, 2054 bp, Homo sapiens
  misc_feature (1)...(2054): n = a,t,c or g
agtccctcctgcactccagcaactccagccatcagtcatcttccagatccttggaaagtccagccaactcttcctccagcctccacagccttggctcagtgtccctgtgtacaagacccagtgacttccaggctcccagaaaccccaccctaaccatgggccaacccagaacaccccactctccaccactggccaaagaacatgccagcagctgccccccatccatcaccaactccatggtggacatacccattgtgctgatcaacggctgcccagaaccagggtcttctccaccccagcggaccccaggacaccagaactccgttcaacctggagctgcttctcccagcaacccctgtccagccaccaggagcaacagccagaccctgtcagatgccccctttaccacatgcccagagggtcccgccagggacatgcagcccaccatgaagttcgtgatggacacatctaaatactggtttaagccaaacatcacccgagagcaagcaatcgagctgctgaggaaggaggagccaggggcttttgtcataagggacagctcttcataccgaggctccttcggcctggccctgaaggtgcaggaggttcccgcgtctgctcagaatcgaccaggtgaggacagcaatgacctcatccgacacttcctcatcgagtcgtctgccaaaggagtgcatctcaaaggagcagatgaggagccctactttgggagcctctctgccttcgtgtgccagcattccatcatggccctggccctgccctgcaaactcaccatcccacagagagaactgggaggtgcagatggggcctcggactctacagacagcccagcctcctgccagaagaaatctgcgggctgccacaccctgtacctgagctcagtgagcgtggagaccctgactggagccctggccgtgcagaaagccatctccaccacctttgagagggacatcctccccacgcccaccgtggtccacttcaaagtcacagagcagggcatcactctgactgatgtccagaggaaggtgtttttccggcgccattacccactcaccaccctccgcttctgtggtatggaccctgagcaacggaagtggcagaagtactgcaaaccctcctggatctttgggtttgtggccaagagccagacagagcctcaggagaacgtatgccacctctttgcggagtatgacatggtccagccagcctcgcaggtcatcggcctggtgactgctctgctgcaggacgcagaaaggatgtaggggagagactgcctgtgcacctaaccaacacctccaggggctcgctaaggagcccccctccaccccctgaatgggtgtggcttgtggccatattgacagaccaatctatgggactagggggattggcatcaagttgacacccttgaacctgctatggccttcagcagtcaccatcatccagaccccccgggcctcagtttcctcaatcatagaagaagaccaatagacaagatcagctgttcttagatgctggtgggcatttgaacatgctcctccatgattctgaagcatgcacacctctgaagacccctgcatgaaaataacctccaaggaccctctgaccccatcgacctgggccctgcccacacaacagtctgagcaagagacctgcagcccctgtttcgtggcagacagcaggtgcctggcggtgacccacggggctcctggcttgcagctggtgatggtcaagaactgactacaaaacaggaatggatagactctatttccttccatatctgttcctctgttccttttcccactttctgggtggctttttgggtccacccagccaggatgctgcaagccaagcttggtgtgtatttaaggcagctcaacaagggggacctggtcccatggtcagaagaaaaccaactgtgctgtgcccccttggcgaaaaagtaacaccaaattttcctttccattgggtttatatttatattnttttgggaacaagatctcttgtcacaagcttaactggaagggggtactaaggct

SEQ ID NO: 66114 - DNA, 1086 bp, Homo sapiens
ttttttttttttgagtgaggtacgagtattaccaaatgatattttctgaagatgctttttggaaagctctgaatctatacctaatgctcttaattattggcttgtttcatttttttcctccagtttttaacaagatcacataactggcttatttttaacagctttgtcaaactacaatttacatgccgtaaaatgtacacactgtaattttataattcattgacttttagtaaatttctagcgttatgcatcgccacaatccagttttagaatatttccatgaccctaagaagtttcctcatgtctattaatattcccaatcctaggcaccactgagttgttttctgtctttataagtttttctttctacatcttatataaatggaatcataatacatgtagtattttgtgtctggcgtcttgcacttagcatggtgttcttgaggttcatctgttgtagtatgtattgatacttaatttttttattgccgaatactattccattgcatggaaaagacttattttatttctaggttcaccagttgagggacatttggattgttcccacttcttgggctgttaggaataatgttgctctgaacatgtaaataaagatctttgtgttcacatatgtttttcattttctgttggggagattccctaggctagaaattgctgggccatatgaaaaatcaatagttagctttgtaagaaacagtcaaactgttttcccaacgtgacattttatattcccaccaggaatgtttaaaactagtgtcttcaaatcctcaccaacatccaggattgtgtctttatgattatagccatttttgtaggtacaaagtggcatctcatggtggttttaatttgcatttccataatatctaattaggttgagctttttttatgtgcttattggccatttgtttgactttgtttggtgaaatgtatacaaatcatttgctcatttttaatttgggttgtctgtcttgtcttctcattttattgagttaaatgagttcttaataatctctggcttacaagtccttaatttatcaaatatatgatacgtggacatttcctcat

SEQ ID NO: 66115 - DNA, 644 bp, Homo sapiens
agttattgaccttacagatgaggtagagattgagataagggtagaaggtttattcaaagggataataacagagaaagagatcaatatccaagaaccagaaggttatagaacaccaagcaggtttaacccaaagatgattacctcaaggcatttaataatcaaacttccaaagatcaaggataaaggatcctaaaagcaacaagagaaaagaaacaaataacatagagttgggctttaatacgtctggcagcagacttttcagtggaaaccttacaggccaggagagagaagcatgacatatttgaagtgctgaaggaaaagaacttttaccctaaaatagtatatccagcaaaaatatccttcaaacatgaaggagaaatgaagactttcctagacaaacaaaacctgaggtatttcattaatgccaggaccatgctacaagaaatgctaaagggagtatttcaaccagaaagaaaattacattgatgagcaataaatagtcacctgaaggcaaaaaaacttactggtaatagtaagtacacagaaaaacacgacgtattatgacaatgtaactggggtgtgtagactcctcttaccctaagtagaaagactaaacaatgaaccaataaaaaattataactacc

SEQ ID NO: 66116 - DNA, 1281 bp, Homo sapiens
ttttttttttttacatttactaaaagtttatttcaaatctgcctccaagtccatgtgttctgaaaaggacagagggggccttggagtgcagccagatggaaggactttgaaggctgtccaagtgctgctttcagagtgcaccaagtttttattgtccctgactgtggctccctgcctgtttgtcaggcgggagcctggagcctgcacagggacagagctggtttcatccggcactccctagccctggacaccctccttgtctcgcctgccctcctgcaggccttcactctcccctgaggctgtcctggcccggactgtggggagcacctccaccccccggagcaggtgcacacccaggtaagcaggtccaggggctggggtgggcagggctagcttttggatcctgagtgtcactactctctcctcccagggatgccctggacctaagtgacatcaactcagagcctcctcggggctccttcccctcctttgagcctcggaacctcctcagcctgtttgaggacaccctagacccaacctgagccccagactctgcctctgcacttttaaccttttatcctgtgtctctcccgtcgcccttgaaagctggggcccctcgggaactcccatggtcttctctgcctggccgtgtctaataaaaagtatttgaaccttgggagcacccaagcttgctcatgtggcaacatggcccttcctgtccctttattgatgtcatccagggtcttaacgcccctgaggctgagccctgctgcagaacccagcgctcctggccttgggccagcagctgaagccccatgctgtgtggagcaaagaggtttcctgagcaggcacatcccccggtgggtacctggagctgttgggagtatggcactcaaggtggagggcaggcacggcccaggggtcccaggatctgaggccgctgagctccctgtgtcagtttcctggaagaagcagctgcagcccttgtgcctgtggccagctggtacaagacgggtccacgcccccttggtccttttgtcctgaatgccttactccatagtctctgggcagagggagccagggcgggcaagcttgtggctgctgggagggctggtatgcagggcagaaagatggagatcaggaagactggccacaggcctggtgggaggaacaggatagggtgaggaggctctgggctggcggcctggcaggacttgaactctcagagcaagacgtgaccccagagtccctctccctcgtgccaagcttggcgtgagcagc

SEQ ID NO: 66117 - DNA, 1096 bp, Homo sapiens
ggacacagtgaggaggggctggataggagaagcatagtggtcatgggaaatgaaccaatcattgagcactgactcttcttttgttgggattgggttttttggggactgcagcattcttttatacagcaaaatgcaagagcctggagctgtgctggatgtggtgggtgcctggctccaagacccagccaatcaaaaccttccagaatatggagccttggcagaatttcacgtgcagcgggtgctgctgcctctgggctgcttatcggaggctgaggagctagtggtgggctctgcagcctttggtgaggagcggcgactggatgtacttcaggccattcacacagcgaggcagcagcagaaacaggaacactcaggctctgaggaggcccagaagccaaacctggaaggctctgtctcccacaagttcctgtcactaccgatgttggttcgccagctttgggactctgcggtgagccacttcttttctctgcccttcaaaaagagtctcctggctgccttgatcctctgtctcctggtggtgagatttgatccagcttccccttcctccctgcacttcctctacaagctggcccagctcttccgctggatccggaaggctgcattttctcgcctctaccagctccgcatccgtgactgagggtccctgcgcaccacagcctctctgctcctcacgtccgtggccacagaagcagagcgacagagcgacacatccacaggcgcccctggggaaatgggaccagcctaatctcgcggagtgcactgtgtcttgctgcctgggtgccctctcctttgcaccctacttcagctggtcgcggtagatgatgtggaaacaaagcaggaccagcaggcacagcacctccagaacagtgccccggatgaccagaggccccttgaaaagggaggggtttggggacagggactgtgtccatgaaacattccatcttcttggtgaaggcaaggggttggttcttcaggtcaggatgttaatggagctggaagttcagaaaaagcctggtgaagtgacccttggcctttcacttcttgagaaacatacttctttgctgggcaaaaaaaa

SEQ ID NO: 66118 - DNA, 1227 bp, Homo sapiens
cagttttttttttttttttttgctgcatgattttattactataaatatacagtaaaaacgaaccaacgatgagcccatctgagcacatcagacggcagcacatgggagtcccagcgggccactctgcggcccgaacttcacgcaaagctctggcaccaggactgatggccagaggctggggccttggtgggggcggggggcgggcggtgcagggggctgtgtgtgttgttggggagaggtgcatggggggagagaggtgcttggggtggggtagaggtgcgtgggagatgctcggtccgagtgcacacacatgcatgggaacatgtgcaggagtatgtgcgtgtgtgtatgcgtgacagcatgtgtgagcgtgagtgtgcatgtgtgaacgtgtgcgtgagcatgtgcaagtgggcgtgcatttgtgtgtgtgtacgtgtgagcgcatctgcgtgcctgtgcacgagcgggaggggtggctggcctgggtgtgcagggagctgggtgtgaggaccgtgctgtccactgctgggtctcgcccaggaggcagagctcatgctcggagccaccgtgagcctcagggagggtactgagctgccccacagccgacctgtccccaggcccccactgcagggcagccctccagagccaggtgagcagcagacaccttgcctggcccaaggctccgcaggggtggatccatgccctgggtcaccacggcccaggcactccctttgccatctgcggccccaggaggtttacctataaaaaaaacaaacaaacaaacaaacaaaacaggacgaggtcgcccagaggccaagcctccccggccgggaccccattccccaggtgtgctgctggcttcctcctccctgggcccagcctgccacagaaagcctgagacagaacaaaccaaatcagagagaactgcaagggggccgggcgcggaggctcacgcctgtaatctcagcactctgggaggccgaggcaggtggatgaccttaggagtttgagaccagcccggccaacatggtgaaatcccttctctactaaaaatacaaaaaaattagccgagcatgctggtaggcacctgtaatccccagctactcaggagcctaaggcaggacgatcacttgaacccgggaggcggaggttgcagtgacccgagattgagccactgcactccagcctgggcagcaagagtgaaactccatctcaaaaaaaaaa

SEQ ID NO: 66119 - DNA, 698 bp, Homo sapiens
ttttttttttttgtggtctaaaataaacttttaattgcacatttgtgtcttgggttatctgtggggtgagaaacctcctcacttccaatcccagctatctgggtacaatctggtgttgtggtctggctgtcggcgaggggtagaggtgggtgcaggactggcccccgagtctgcaccgacctcttcagggcagggagctcagaccatggtagtacttgcactgcttcagggcctcgctgaagccctcacacagggacaggtcactctgagtggtggaacagtccaggaactgcctgatctcataggcgcagggccccaatctgcaaggggcttggggggcagcgggggttgggggccttgcttggacagcagctcgggggaagggctccgaagctcccccccgcttgaaggctccgggtcaagggcgctgcccatgaacgtgtcccacagccgagccccacggctacccctgcggcccgtggtcgccatctgagccatgagccccggctggcccgaaggggcgggggctggggcggctgccgagggcggtgggtgcgcgggcgggtgggcagagggcgcggcggggcggctggctggccgggaggccgcgctgcggcttcccccgaggcatggtggcggcggtgggacccgggcgaccttagagacggcggcagcggtgctgtcgcggggacaaatgc

SEQ ID NO: 66120 - DNA, 1294 bp, Homo sapiens
cagagacgctgcaaattgcttgtggacggtgtaggccgctgcaggccaccatgaaccggcttccggatgactacgacccctacgcggttgaagagcctagcgacgaggagccggctttgagcagctctgaggatgaagtggatgtgcttttacatggaactcctgaccaaaaacgaaaactcatcagagaatgtcttaccggagaaagtgaatcatctagtgaagatgaatttgaaaaggagatggaagctgaattaaattctaccatgaaaacaatggaggacaagttatcctctctgggaactggatcttcctcaggaaatggaaaagttgcaacagctccgacaaggtactacgatgatatatattttgattctgattccgaggatgaagacagagcagtacaggtgaccaagaaaaaaaagaagaaacaacacaagattccaacaaatgacgaattactgtatgatcctgaaaaagataacagagatcaggcctgggttgatgcacagagaaggggttaccatggtttgggaccacagagatcacgtcaacaacagcctgttccaaatagtgatgctgtcttgaattgtcctgcctgcatgaccacactttgccttgattgccaaaggcatgaatcatacaaaactcaatatagagcaatgtttgtaatgaattgttctattaacaaagaggaggttctaagatataaagcctcagagaacaggaagaaaaggcgggtccataagaagatgaggtctaaccgggaagatgctgccgagaaggcagagacagatgtggaagaaatctatcacccagtcatgtgcactgaatgttccactgaagtggcagtctacgacaaggatgaagtctttcattttttcaatgttttagcaagccattcctaaacagcccaactggcatttaattacccaatactgtatataaggcaaatatggacagttactttcctcttgcctgttcatatccttcagtgacattgaggaagcagtgtttctctttttaaaggagaatagttgtcaaccttcattcatctcttacatctctcaccctctccttttttttttctttgattttcccccttattgatgggactgatattcattctgtttttgatgaacatttggaaactgtcgggctttttattaaagctctgtaaaattaaaaggttttggaattataagcaatctttgtttctgagggttatttttattttgcatatagctttgatgtaattaaactggaaactctttcctgaaaaaaaaaaaccaaa

SEQ ID NO: 66121 - DNA, 1227 bp, Homo sapiens; identical to SEQ ID NO: 66118

SEQ ID NO: 66122 - DNA, 1334 bp, Homo sapiens
tttcgtggacaggagggctggcaagggagggtccagggttaggggattcggagtggcttcaggcggaccacgtggctaccttttttccagggccagactttggcagcgtgtaaggtctgaggacaggggcaccggaggccgaggatgagaggccagtgcctgtttccaggcagccagggcctcagaaactccggccggagcactcacccgtcggtggaggccgttaccagggccaccttatttgcgagcgggtcccggcgggtcatcccggagctggccatccgcaccgaattccaagcccgggcacagaggcctagcagccccgccttgtgcatggatcagaccagcaagtgccacttcggataaaccctttggactcctaactccaatcaggtgtctgctttgttgaggactcacagacacagtctcctttcttcaagatctttacaatgcaagacctcactaacacacagggatggtctcccagagggtctgtgctgttccttcactcagaacatcaagatgcactgaagtaaggatcctctattctacagttcctgctagctgagctattccatgggggcttcagcaggaaattccaaggttggctttgacaagctaaggccggctggtggagcacatcgagttctggaggttcatgtgtgttttcatgaagatctgtctgcccgtagcagataaagagttgttgccccactcctcctggggtcttctattttcctgggaggaatttctggattaactgaacacacacacacacacacacacccttttgaagcatcaacagtaattctgagttcttagggacaatgcagattaaatccacaataagaaagacaactatggccaggtgtggtggctcacggcctgtaatcccagaactttgggaggctgaggcggatggatcacctgaggtcaggagttagagaccaacctgaccaacatggagaaaccccgtttctactaaaaatgcaaaattagccgggcatggtggcaggcgcctgtaatcccaaatactcgggaggctgaggcaggagaatcacttaaacccgggaggcagaggttgcagtgagccaagatcgcgccattgcactccagcctgggcaagaagagcaaaactccatctcaaaaaaaaaaaaagagtcctatggttccaaaggggaccaaacggccctcattggaaaaaataggggactttattatgcaagggggttccagtcccttggtttggttttgggaaaagaaaaaaaggcctacaatccaaaaaaatagggcccatcacaggcttccccaagggacaaaattaatccattttt

SEQ ID NO: 66123 - DNA, 1772 bp, Homo sapiens
ttttttttttttaagattattctaaaatacaacgtttattaaaaaaacatgcgatcttgccaataggccaattccatgagaacaaaagattttttttcccacctacaagtctttttagagaaacaaacggaactatttccagatgaggcggggtgtctgggaggggctgtgggtggtctggggctggtgactggtgaggttgggtggccctctgggggtccgggaggcactttccgttttgcttctgttggagatgttcccgtcggatgctgaagaacaagcctgccggctggggccactcccgacctgggctgtggcacccgtgtggccctcggccctcctggcctgagaaaggggagtgagaaggagccactgtcctgatatgggcaaaactcggggtcactggtctcatgcttccaaggccccgtgagcaggccaggtggggggatccctgggggaagcccctcacccttctccaacccccagccttcggggagcccctgccctccaggccctgtgctcggaggtggggggaggacggctcagtgacttttggttcccatgacattgacagagacagggacctcgacgcatcctccatacccgctgcggggaaatggaccccaccagccagcacggggtgagttgggggccagtccctggcagagtgtgggtgtccacagagggtctcttctgcagtggcggatcgggcgccagcagggtcccggcctcagtgctgcctgtgcgggcgaagggtggcctgtgggcaagggctggagctgccccagcagccgcgggctctgcctcacgacccagtgggtgccccgtgatgtggcagggctggccttgagtttcctgcttctcacgagcctggcaccgccaagcccaggcccctctggcccatctccacaacaccctgtgtggccgccgcttggggcaggccctgtgggccccacccagcctggctgaggggcggtggagagtgtccgcctggacggtgaggtcagctggcggctgctggccaccctcgtgctcgaaagatgcccctagcgccccctccgttgcatcaggaccctaggccagcctgtcccagtgtctcctcagctcaccatggcaggctcaatggtgaccccccttttatatagggggaaactgaggcctggcgaaagaaagatgcggcctgaggtgggacgtgaacccgcggccctgcagcccagacagcggccccggagtgaccaccagcttcaccgaagcccctttactgtgcccccgaggacacctgcctgccgttccccagggccgtcaccgccgatagcggtagcgcttgaagtgaaaccacagctggaagatgccgttggcaaactggcagcggaagccgtggcggtgcgagtattcccactcgcggttgacgatcttgaaagcgatgtcctcgtagggcggccccgcgtggaagcgcaggatggcgaaatccttgttgtcggcgcaggcctccaggaagtactcgggcgtggagcgcttgtcgatgaggtcggggtagaagatgttgaacttgtatccctgcacgatcttgggcggtgggttgtcaaagtcgtagtgcgtctggttgtacttgttccactcgaagcccgtgtgcacgcggttgaagaagcgcggcttgcgtggccggtacttgtcggcccacaggtaggccttgccggtgagtggcatctccacgctgaactgcgcctcgtcttggcccatgccctccttggcccgccgaaagaagatgtcct

SEQ ID NO: 66124 - DNA, 1194 bp, Homo sapiens
ttttttttttttatgattttaatatactttatttatttaaaaagtacacagttttaaattggtttcaataggtttcaagcagaagggacactgcctaccacttgcggtcccatttctgatgaagggtgattatcatgtggcaaactcacatttgcatgactggcaaagtaaaaagatagataactttttgtcaacatatctttaagagtttatatcacgcacagtttaaaatcatgacgagatgctgatggttggactatattcatgtctcgtatgttgcaccatattttggttcacagtttatccatgatttagcatgccaagagaacatctcagtcagtaagagaacatctcagtcagtgtcaccttgagaagagcatcaaaagcagagggagcagaaggaggaccgtctgggcttggagactcggcgcacccccacactccctcgcattctcctcaggatggaagccatgacaagattctgggcgccttctgatcttctgggcctttagacgttcacacttaagggattcattatgttgactgtagttaaggcatgtttccaaggattgcttttttctactctgcatttcagaggtcaaaatttggcaatgacaactctcttaactactctctctctccaacagtggaaaggatgtaattttccttctctaatatttctcccccaggtttccttaccactgataccccttactggtttccgtggtagtgagtggacctgcacacaaaaggatatacctgatttcaatgggtgccatggtgatgggggccacagattcacagaggcagctgctgtccaccaccaccatgaacaggttgctgcttgggatttgctggatgacaaaggacctgttggaacaagaggtagcgaggcagtcatttaccatccgtcaattaaagagccatgaggaagacttctctcctgggtggtagcaactaccatattttgtaaagcaaattttggagactattttactactaatgttaccttctttctccatgaggctcttcacttacaaatacctagcttcactaggaaaacaacaatagctatgacgacatgcggctcatacaactcaccttggaaagactgaagtgctgtatgtacaaaacacaagagtcagagttggctgaatcacctgttcccaaggtttaagaggtcagactttcaaa

SEQ ID NO: 66125 - DNA, 1218 bp, Homo sapiens
  misc_feature (1)...(1218): n = a,t,c or g
atgcagaagacctacggccacctgggcgcgctcggtgagagcccgggtccgagcccctcttctttcactgggttcacaggggagatgatgtagaaggnccgagaggactgtgagccctaatcccgcactcttgcaccaacaccagcagccacctcccgttcccagggcttcaggtaccccctcgggagtgttttcacccgcatccatttcattcaggcagcagcactgcagccccttccaggttgagtataagctccgagggggtgccctcagcctggaggggaatgccatcttcccacgatggcctctcaggcccgcgctgtgatccctgttctctcccaggattcccaggccccaaaccagccctcatctcttggatggaacaggagagtgaggcttggagccccgccgcccaggatcctgagaagggggaaagactgggaggagctcggagaggagatgtcccaaacaggaaggaagaggaaccggaggaagtcccaagagccaaagggcctagaaaggctcctgtgaaggagagtcctgaagtgctggtggaacgcaaccctgacccagctattagcgtggccccggcacgggcacagccacccaaaaatgctgcctgggacccgaccacaggagcacagcccccggcacccatacccagcatggatgctcaggccggccagcggcgccacgtgtgcacggactgcggccgccgcttcacctacccctcactgctggtcagccacaggcgcatgcactcgggggagcggcctttcccctgccccgagtgtggcatgcgcttcaagaggaagttcgcaagtggaagcggcaccagtggatccaaccgcttcctgctccggggggcggcggggccggaggcctggcgatccgggcttgtgccttcgggcccccgtccgaggtgaccgggacgccgcctgtgctcttccggcactacccagacatcttcgaggagtgcggctgagcggcaccgcaggctgcgagttgagcctgaccttggcacgaaggacttgacggatccctgaggtggggccactgagtcggggactccggaacttgaaattcattgcccttgggttttcctcaaaggatcccttcaagttttccaactttgtaaaaagaaaagttgcctgtaaagattcgaatagattagacttgccacccatctccccagtcttttgtttaacaaaaaaaaaa

SEQ ID NO: 66126 - DNA, 2148 bp, Homo sapiens
cgaaaagaaagtgggggactctaaagattttctccttttaagaaaaaatagttccggctggggagtacaaaatggagtgtaaaaagggccttgggccccagggaggcccctgtggactaaggggagttcatgcaccccttctttccccagaggggctggactcaggtgagtatgggggtgggggctcctgcacttcgacacaggcagcggaagggttttctccccattccctctgcactcccaacttgagctatactttttaagaaagtgattcaccctgcctttgcccccttccccagaacagaacacgttgatcatgggcgatatttttcattgtgccaaaaagttgccatgaccgtcattaaacctgtttaacaccaaataataaggaaaataaaacaaaaagttcgggcatggtgcagaaactcactccaaataaattacctaccaaaatatataatggtggaaatattccaaaattccatattttgggatttatacacaaaagataaacaaattagaggccaagaggctgccggaagggaaaaacggggcctggaatggccgacgtgaggaatgagctgggcctaaagaggccactggcaggcagtagctggacctgccgaagtggccgaaaggcaggagctttggacgggggaggccgcagtgaggcgagagctagctgggcgtggagagtccactgtgaggccaaggccaaggccgggcccgtgcaggcctttgagaggcaggaggccgggcctgcaaaggccgactggagatcaagttctgcgcctgaagaggctgccaaaagtcaaaagcgggggcctgggaaggcagccgagagccatgagctgggctgggccgaaagaggccactgggaggcaggaggagctgggcctggagaggctcactcgaggaagttttgcacctggagaggccgccgagaggacggagctgggcccggggaggccgacttgctgctcttccaggcccaattccaggccgacttgaggacgacttgggcctgcagagactgccgggaggctggagctgggcctggagaggccgacttcgggacgatttggacctgcagaggccgccgggaggcccaagctgggcctagaggagcccaccgaccggaggccgtttggggcctgcagatgccatcggagggcaggagctgagcctggagaggccaccgtgaggcctgagctgggcctggggagcttggctttgggaagctgtgggcctaccagggccactgggagctgggcaggagctgagtccaaagatgttgttgggaggccaaagtcgggcctggagacgcagccgggaggaagagctgggcccggagaggatgccgggaggctgcaagtgggtctggagaggccgacttgaggaggttctgggcccggagaggccgccggaagggaaaaactgggcctggaaaggccgttgtgaggaatgagccccatgggcctgaagaggccactggcaggcgggagctgggcctgccgaagcggccgagaggcaggagctttggactggggaggccgcagtgaggcgagagctagctgggcgtggagagtctgctgtgaggcagaggctgggcctgtgcaggccttcgggaggcaggaggccgggccttgtcgaggcctgcagaggccgccaaaagtcaaaagcggggcctgggaagcccgcccagaggcatgagctgggctgggccgaaagaggccactgggaggcaggaggagctgggcctggagaggctgactcgaggaagttttgcacctggagaggccgccgagaggacggagctgggcccggggaggccgacttgctgctcttccaggcccacttccaggccgacttgaggacgacttgggcctgcagaggctgccgggaggccagagctgggcctggagaggccgacttcgggacgatttgggcctgcagaggccaccgggaggcccaagctgggcctagagaagcccaccgaccggaggccgtttggggcctgcagatgccatcggagggcaggagctgagcctggagaggccaccgtgaggcctgagctgggcctggggagcttggctagggaagtttgtgggcctaccagggcctctgggagctgggcaggagctgagt

SEQ ID NO: 66127 - DNA, 898 bp, Homo sapiens
gaattcccgggcacactttagtaaaaggcaaagtcaggatttgaatccacacacttatctagtacactctaagacacaggggcagattttagtaaacagtaggagatggactctcagaatttggtgcctggggagagggaagaggagagagatgcctggtgacaagcccagcccttgcctctccacaggagagtgggaacaatgaggtcatcttcatggccttggacttggccagtctggcctcggtgcgggcctttgccactgcctttctgagctctgagccacggttggacatcctcatccacaatgccggtatcagttcctgtggccggacccgtgaggcgtttaacctgctgcttcgggtgaaccatatcggtccctttctgctgacacatctgctgctgccttgcctgaaggcatgtgcccctagccgcgtggtggtggtagcctcagctgcccactgtcggggacgtcttgacttcaaacgcctggaccgcccagtggtgggctggcggcaggagctgcgggcatatgctgacactaagctggctaatgtactgtttgcccgggagctcgccaaccagcttgaggccactggcgtcacctgctatgcagcccacccagggcctgtgaaactcggagctgttcctgcgccatgttcctggatggctgcgcccacttttgcgcccattggcttggctggtgctccgggcaccaagagggggtgcccaaacacccctgtattgtgctctacaagagggcatcgagcccctcagtgtgagatattttgccaactggcatgcggaataggagcctccagctgtcctagacgaccgggcaagccatcgcctatgggaggccagcaagaggctggcagagcttaggcctggggaggatg

SEQ ID NO: 66128 - DNA, 625 bp, Homo sapiens
tacctttttaaaattttttatttttttatttagtggccttttagattatggtgatcttcacctcatctccacctgtctccccacattagacaggggtcttatgcttgctactgtgagggtaaagggttgactgggaaggggtggtagggacatggtaggggcagagcctccagccccacttccccaggttttgctgacagtggccggcttttagatgatggtgatcttcacctcattgttctcatcagtctggtacaaaaaaggaatgcaagggctgctgcccaagcctgggtgctcctggaggttctgcatctcatgaagcagttgcatgatctgctgctcagtggggttgtcacagggagaatgcttccccgcctctccttgtgcagactccccactgctggcaaggctcacctcacaaagatctttggagagagggaggcagggtgctgtgggagccctcccctgctcctgcgtgcccactgtgcctgaggactctactcactaccctggcttgtcagtagccccaagctactgggggggccggggcccctggagtgggctcatcagcagggttctgggcagctgccaggaatctgctatgccacttgttgcagtcgtccac

SEQ ID NO: 66129 - DNA, 2434 bp, Homo sapiens
accagtaataatagttttatttgattttaaaatagtcatcaatgtgaaaatttctcaaagcttaagagtaacagtctagagccaaggttgggagtgggggccaggcctcacacagagcccagcttgaggcccctgagccccaccctcctttccagagggagggaggagacagctgagggggccctgaatcagtcctctccctcgtccccaaggccagctgtgccaggcccctggagggcaacagctcatgcggaggactggggggggaagcaaacaggtaggaaacggaaatgaggttaacaattacaccatcacccccaaaaaaaaacaaaataacaaaacttgtgactatgaaaggatggaagatgaatactgataaactcctcagctccccagaaaagcccagtctgggctgggttgggctgattggaggaaaggtcttgagacccaactgcatgttacctctgaagaataaatattctaagaaaaagggaaaaccatgaggcaagctgctgcagtcagtcaacgcagctgacaggcctggcatggcccacaacctgaccccatccacacaggaaacagctgtgcgggtctggatagaggagaggtcaagggcttggactggggaccctgagctgccaaggtgtggggactccttgcagtcctggtgcagcaatggcaggaaggccagcaggggccctagttgagcaggttgccctgctcctgggcctgggtcaggctgtccttgcggtgcaggtggtgaacccccatcctcttggggctgcgctgggggcgactggagctggggagtggccaggccctgccctcggtgtgggaagtgcctggcccctcctctgtgcccctgttaatgggcagcaggctctggcgctcttcctcaggactgataggcaggttcagctcttcttcctccctgggaaagccagagtcaggttctgtgggtagcaaaagctcactctcttcgggtcgggcagaaggtgcctggaccacctcatctctgtcagcggggctatgggcaaaatggcgctgcagctcagggagggcatcgcgtccaaaggctgtgcgctgggccacagcagcaggtggtggagtacggtccacaaatgcccgctgccagctgaccagcaggtcctcttcagagctggcagagctagctggggcactgagtgttaggggtgctgggctgggctggtggtggggtgaggcctgggctgaggcaggggtgctgggcactgggctggggcgggcccgctcactcccctcctctaccaggctcagggaaatggcctggcgggtagcgtaagtgcagttgggcagggggcatgttgcgggggatccgaaccttatcctcagagaactctattaccctgcggccaggatacagtgggtgtggtggagacggggttgggtaggggttcagcttctcaaaggctggcaggggcagctcttcctccggggagcccctggcagtacccagagagtggcactccccattgggttgtggggtggggctgccatgtgcccgggggactggctggaataactgggacaccctcactcatgtccacatgcacaaagacatcctcagccaaggggcgcccggcgctgcctgactggaaagaattgagcagtagagactccggcttctctaacactcgggcaatgactgaggtaggcaccacagcccctggggctaggctgggagcaggacctgggctggcggcctcttgaccactgtgcaaatgtttccgaaccatgtcctgtagctcacagggcagctgaggtaaaagagcaggaaagagagacatcaatgatcgcagccaaagataacttgactcatggcgaaagtaatggctcccacctttaagtacctctgtgtactcagcactctgctatctcctgttcttacagcatgccagtgtgtataccctcacttcacagacacataggcctggagaggggaagacaactcaaagctttggttaacttggccaagatttaaacccggatctgctgctgcagccagcatgttctcaaacttctatctcccagcttctgcccaaaccatacttaagtttggagaatctgcatagaccagtagccttagaaatacctctacttctgggccgggcacagtggctcatgcctgtaatcccagcactttgggaggccgaggcgggtggatcacgaggtcaggagatcgagaccatcctggctaacacgatgaaaccccatctctactaaaaagacaaaaaaattagccaggcgtggtggtgggcgcctataattccagctacttgggaggctgaagcaggagaattgcttgaagccgggaggcggaggttgcagtgagccgagattgtgccactgcactccagcctaggtgacagagcaagactccgtctcaaaaaaaaaa

SEQ ID NO: 66130 - DNA, 941 bp, Homo sapiens
ttttttttttttgctcagcaatctttattcagttcttcttgggggtgggatgcctcccttcccatgctcccacccctcccatcccagaactccgttgggctcagtgtcctctgttgagggaaggtcttggtgcccagatgcctactctgcaggagagggaggaaccttgtccctttgcgggagtcgctggtctcttctgttgtggggaagaaggaaggtgggaggggcactgtccaccagcactcagagctccattatgtccccagctggggttgcagggtaggggggactgggggtgtcccccagcctcagcagacggagggcctcagggatgaggctgccaggatagcgccagagaagcagctcagagcaagggctcctgagtgggggcagggctggggagaaggtcatgggggggctgcagtaggggtggtcattgtgcaggctgagttgagagaagtgggtggccatgttctcctcagacagaaactgcttgcgcagaggctccctggcgtccaggccccaagtcacccccaaggcggcccgcgggaggcgctgggcccctccctgggggcctcgctgcaagggctgctgcaggatcattgggttttggggtcctgcgggtgggatctgggcgacaggggaggagtctctgagggcgtggccaagagaggatgggcgtggctttaggcgggcacagccgcgaggttctgcgcgggcgcggaagacgggcggcgcgtggcggaaggcaggcttgctcctcggggtgggggagggtatccggcttaagggggctgcggtggacaccacttcttaatgtcgggggtcttcgcggcgctcacctcggctcctagggttcgggacggtacgcaccagccaccttcgcgccgaaggcggtagggcgccacggagaggaaccgctctaggcaccgacagcaacg

SEQ ID NO: 66131 - DNA, 2744 bp, Homo sapiens
ttttttttttttaagttcaaaagtacatttatttaaaatgtgggcaagatatcaatataaaagaaaacagagtataagaaataaaaataatcaaagtacaaaacatttcaaatctttaacatccataatttagagatagcaaggtctttatttacaccattttatttctagtttgaagtcccgtaacagttttgtgaaaacatttaaaaacctgggcaaatgaatcataaaacctaatgtggggctcttaaagtcatataatacaaaacataatttatgtttccctcaggattaaaattgcaccatctttaaaagggtgccggtatatttattatatcctgtccttccccgcttcacagtctggatcccccaggaaaggcagctgggaaaaccagagcctgtgaagggaagcgcagcagcttcctcgccagaccagaacagccagccccgcaccgcaggaagtccgacatgcacggcagcctagacgcccatagttaaaccttatatgattcatagtccagcgtttgagtgagcacttcagtcagaacgaaactctgcattgtgaacatctatgccctctggcaaaatattcttcggataaaatgaaggtcattttccacaggataattaaaattatttcccgaacaaactcgaagttcctgcttgtgctcccatgagcttccggaaagatggctgccttggataacacctttcctcctgcacactctacgattgccttcatagtggaaagacttgggcagattcccaggtgtgatgtaaaaatattttgccttaaagagtggagaaacgtgtgcccgttttaaggattcttccaagctgaaagagaaaagtacttctgcctcagcatctcggagaatgtagttctgctcatcaatgaacttctgacacctgaagcattcttccagccactctggcgtcactatgtgcttcacgacagaaatcgcccgccaggaacttcacggtgcgagtcactttgctggcaataaggtgtgtgcacttctgtgcagactccgcaacctctccaccaagaatgtagagcttcttaaatatactgttgaacctggacaggctcgaatccagtgaaaagcacaaaaaggggtcaattcttggagttagctttttagtgggaggtggtacggtcttcaattctggctcttttggaagaaaggctggacattagctacttcattctgtttcagtttgggaggtagtcttatactcatcaacaactctgcagacacttttaagggaactctccaagcatctaaaagatttaaaactaaatgctgggtaggggcaaatggatcctgcagactgaatgccgtgtagcgactatactgaatctgcctcagtgcctcaaagtttcccagaagaatgtcgccaagccactgggcgttgacacagggtatcctccactctttggctttttcatactttaaaccagttggttctttacagatgaggactgtgttgctgcggcatagataacccgtatatttggcacctgccaaataagccattaattttaggtcatctctgtcactatcaacaaatccagtcacagaaataatatgctgtgaacatggctttcctcctggtgggaaggccactgggaagtgaagggctcggtgcggcggtaccattttcttcttctttaagactgtgtttaaccagtgtgcagtaacacatctctttctttctcttattgcctgtgcatacgcgctgctgacttgactctcacagagaaggtgcgtgcatcgactcgtgaaggtggggtcaacagtgccgccatgtgcctggattatccttttccaggtggccagcagttgcttatcagacatctgctctggataatccgcaattgcaaacacacatcccaataagaagccttcttctggaatctccactgctggatcatgtccaaaaagctgatgctgctgaggcgatggtggtggctgctgttgctgctgctgctgctgtgaaaatggatgcggcggctgctgggggtaaggttgctgagagatctgctgctgctgctgctgctggagctgcattatctgctggggctgaaggtgtaaaaccgggtgctgctgctgctgctgctgggcctgctgctgctgctgtagcatgtgtgtctctggagtcactttcacttggctaaacagcactgcattggcatttgtatgtccctgctggctgtgattcacctgctgttctaaatttttcgtaggtgctgaaagagtctgtaagatatgtgctacatttgatggccggttcatctgctgaatgtcagcattattagtaatattcctcagtgtccgtacagctggactccaggtagctatcatttctgatctttcagaactttggaggttttgtccagcagccattaaattaccccggacctcagggggcaaaatgttacctgggacgggtgggacattggcacacaagttaatcaacccaggctcctttccctgaggcagcctgcgttttgctgcagctaactgtgggacttcggccggggtccagtttaaatttctctcctgtttttccggtgatgaatctgaagaatcatcaaacattaattcccctttagatttttcagtgttggatttaggagaaaactgctggtcacctgaaggagacccttcttgagagctggcagggcttgacttctcatctgtactaccctcattctgagaatcttgttcctcattttc

SEQ ID NO: 66132 - DNA, 1041 bp, Homo sapiens
cgttgctgtcgggataaatggaaatttcaacttatttcaaattttgcacatattatgaaaccttattaatgtatttttatcaaactaaatcagatttgtatttgaattgttaggaaaaaccatgtgcagttttggctgataattgaaggaaaaatatcaaatactttgaattttttttctcttttttcaaaccctctgcagaggtaggaaggtatgaatttcttttttatgtcaagatgcaaaaacaaatcatgatgcttttgttgggagaatttttgtattcagtattttgtatgtaccttttttttttttaaattggaaagcccaattaggtttaacatttagctttgcttgactccagtgtaaaatgaagatgaccttgtcacagctcccctgacctgaagcagagcccttcccatcactgacagtgttgggggttgagagccccccagcagagcccttcccatcactgacagtgtgtcggcagctgagagctcccccagcagagcccttcccatcactgaacagtgttggcggctgagagccccccagcagagcccttcccatcactgacagtgttgggggctgagagccccccagcagagcccttcccatcactgaacagtgttggcggctgagagccccccagcagagcccttcccatcactgacagtgttgggggctgagagcccccctagcagagcccttcccatcactgacagtgtctggggctgagagccccccctagcagagcccttcccatcactgacagtgttgggggctgagagccccccagcagagcccttcccatcactgacagtgtctggggctgagagccccccctagcagagcccttcccatcactgacagtgtcgggttgagagccacccccagcagagcccttgccacgtacagagattttctgtcagcagtttcccagtatttcagactcataatctgtgtttagcactccagtgttctcttgtaatagccaggtctggaaacgacccatggaaagaggggcctttgtattctgctaga

SEQ ID NO: 66133 - DNA, 1834 bp, Homo sapiens
gcggccgcggcacccgtagggacgggggtgctgccaccaccggaggaatcacaaaggccaccctgtcaataacatcctgcagagactctccacaccgacaaagcgtcaacatcagctcacttggactttctgaggatgaagtgtaactgtgcgctggcccggcctccttcccacgacggccatccagggacccacgccactgtacccttccatggctaggcagggcacaaatccttagcaagtctctgccatagactggagcttgagaacagcgccgctcgttgactaaataaatctgatccaggcgctctttcaagagtctggtcttttcctcctgggtcggccctccaatgggagaagctggtttggaggccgttccgggttctcctacagccaaggcattcaccgccacgcggcccggaacgccaacttgtggggtcaagggtgcagggctgggaccgccggccgggggcttgcttcccagggcgccgtgcacagcgcccgcctgagacacggtctgcatcaccacagggccaggggctcgaatgtagggctgcccgggggcggacacgatctggaggacgctgccttgcagctgcagcggctggcccgctgtgagctgccgggagctgcctgtgtgacagggtgaacttgctgccctggaactgcagtgtcaccggcgtctctggctgagccacgcggctctgtggtcctgtgatggatgccagctgagctattttcactacctctccactgggcaagcgggccttcatttgcttcctcctcttcaattgtttcctcttcatcgtccacttcgtcatcagtcaaagatatgctagcttttctttttcttccagacattcctgaatccagagaactttcctgtaatgcgtcaaatcctttaggtctcaattctttccctctcctggaaactttctgtaaatttaaggccttcttccttttttcttctaattctactcgtagttttatttccacaacctgttcaatattcgaccaaaagcactctatctcccgggccgtggaggcggctatccgcctcagtctgctctgctcttccttcttccccctttcttcacggagctgcttctcctcgtgatggcgcaccacagttctaacgagcttcttcgcagcagccaccttccacctcctctcctgggcaaagtctgtggccatccactgcatctcctccagcagatagtcccagtgggacttggggcgtggggcctcctgcagctttggcagacgcctctgggaccacagacctgctttcctcagctccgcaatgcgctgatgcacctggttctccagagttatttgttctgtcagcgtatcctgagaactgtcttgggacgaggtggcattctgagcaggactctgtggtttggtgggggcagatgccaccacccctggggtccgggaagtgactggagatagtgccttattggtggctgaggaaggtctatttactggagaggatcgagcaggggagggtcctgggccggagccactcacaggcgcgagggacgaggtagaagaggtgggcagaggccgtgggcagggcggggcagggtccacagggagccttgtcgatgctaccatctcgtcattgataacctcagatttttcttcctcctcttcctcctcctcctcctcttcttcaatgtccaaatcattctgcctaagatatgcttgtaatggggcataatgtttcttcttgaaagctaagaaatccatcatgttcccttgaaagtgttgcaagaaaaacagttcaatcaaatactccttgaagacctccttcagagcgacagcaacg

SEQ ID NO: 66134 - DNA, 5559 bp, Homo sapiens
ttttttttttttcagattctgcatacagacagctttatgtaaaatatataaacatttgtccaaattggtacacaggattgcataaatatggcaattaagattgcatttacagatgtgcatgtacaatgctgtgcaaattatcacaatattacaatttcagaaattattcaaattggtatccaagtaaagcaattagtgaaaaaatacccatgcagaatttaaatatctcagaacaaaatttaaaatgtcttcattaaaagttcacacatttaaaatagttttattcattttatttgtatatgtcaaaatacatttttatttccaaaatagtgggttttgcaactagtttcatgcagaaacaaggtctgctcaatactaccaataaaatcaatatagcacagtagctgttcagttttagatacaaagaataaataacctaaatacaaaacactaaaatattagaaacatgtatttaatcattcttcacaggcatccaaacttcacaaatataaaccatagcatgcctaactgttgtgcaaccagaacatgttgcagtcactcaaactgatcagttatctgtatattttacctccacataagaccatggaaattctcaatattcagacctaccattcatacagttcaaatataaccaaaaataaaactcccacaactatccttgtacctttaaaatcaagaatcctgagcttggtagtaagagcataaccttatatcttcataaaaccaatcgagagagagaggacttaaaatcctgcttaccaaaacacccttccccaaccccaaagtaatctaaaataggcagtagaacacaatgaccttttaaaatgaaggggtacaaattcacatttaatatagtatacaatacaatcaataatacaatcagctactataagctttacaatgtacaatttattcaaatggctgaactgttcagtggttaaggagacagttatgtgccagaaagatgtagtattttttgcatggtttaatgaaaatataaaagctatttgtccaaataaaagccatcgtcactatgtacttggttttgcgcttttttttccttaaaaaaaaaaaaggccactgaaatgtataaaatggtctgaacatgatggtggtatcaaagtcgatgcctcttcacatggcaataacagtgcatttaacattaactcacgggttaattctgcaaatgatttcatagcattactttggctagcacaacagttttagacagcactcagataaatataggtatgtgaaatgtaaagcaattatcttatgcaactttaattatggttgagtactatcaaatgaaaactgaaaataaaagcactttacagtaggaaacttttgtaaagatgatagggctccacataatgtgtaacttttaaagtctttatatcacattgttagcaaattttgttttttaacactatcatggagtagcctactctgcattagcagacatttgaaataagaaatagtcaagcatgccatgtggtggtctaaaaatcaaaacaatacacttatttgtatatacagcatcactcagtacctgctaaaatgaatgtgaagattacagaatctaacatcttatactacaataaaaaaaaagtgaccaatgaagcagaaaataggaattaaaagatctaacctcaaatgactttaaagcattcatataagaaataaatgcatattgccacaaacagtgaaagcatatgttccaccaagcaattcagttccaggtgggaggcaacccagcattagccctaatacatgacaataatcacagaagagcaagtgttcttttctgtaatgaaaaagccgtgaaaacatagaagactctgccacatgaagagtttagaaggaaaaaatacaaacccaaacttagatgaaaagccaaaaaatttaaatatcgaaaaactcgaaactgtggcacatccaaaaaatgttgagtaactgtcttctgtgaagagctgaaaagtttttgttgaccacaaaagtatttatggtacaactaaggccttactgggttaaatatctgaggcatatctggccttgaacactttccttatatgctggagctgtaaacaagttttcctcagtcattaaaaaaaaatcttctcagcagctgcattaacatgaaacaatggtcttgattaaaaaaaaaaaacaaaaaacaaaccaacaacaacaaaaacaccccagaaaattaaacaaaatgaaacaaaaattctagataagagggcatttggcaggatatccgaaaatgacagtctccaaggattcttcccagacttccagtgactgccaattatggtccactgggttactaatatgtgcaattccattacttgctgcttttttttttttatttggaaagtttgcttataactctgatcaaggccccattttcatcctttagcctctggttgtctgcttttaggtctggtaacattttgagctcttcttccatttcagatattcttctttctagagctcttcgttcccttttttccatttccaacagtgatctatcagcaaatctttcttgtctctgggtggccttttccaactcgtaatttaaggatctgttagttccatatttgtatcatgtaggctgtgccttcagcttttcattttcaggctaggaatttgttcataaaggctttttaaaggtcaggttgaggtcatcccttttctaggccctgctggctggtaaggggttttcctttccttctaaggtaacctggtatggatcccaggaggcggaccccaggcaaggggaatcatatcgatcaccacctgatgtagaactgggttcatatctagaaatggaatccgtctgagtttctttcttattggatcccctcttctgtgtcctgattgttgttcttgttcattttcatcactatcttgtgtccaaaatgaaaactcctgtagatcttcttttctctcttggtccgtccgtcgttcctctgattgatttaaggttgtgatttaacttctcccttctttctcctcttctcttttttctccctctctttcattttcttttgttattcctctggagtaagcagaagttatgcctacaagactaatttggcctgtttagttgacttgaagcatacagtgaactgctcatagtagaaagtgaagaggatggagtggttgaacttgaagttgatacctggcctataccgctggtaaggtctcatcatacggtccttggagtacttttgtttatattcatcttctctagatgtttctgactccttcttttcttcttgtttctctttatcttgtttctctttttcctctttttctttttcttcattttcttgttctctggttcgggtagaacgacttcttcctattgttttctcagcttcttgaagatcagttaatgtcactccctgtgttgatcttctagattgtcttgcttgtctagatcttgcttttctttgggattcagactcttcatccctaacaggagtgaggtatgatctgcgtctctccctgacctctgttgtggaggagacagtgccagcagtagttgtagtcagggttgtggtagaagctgcagcatttacaacagttggagcaacaggaatggtcactgccgtaggaacactgtccttttctttctcagtactatcctcagcccacaaacgatttgaggtactgctttgtgtgcctgctgagggaaggaacccgttgtaatcttttgtaggtaggtgcttgtgctgggaaagcagggcttttctgaaggcccagctgccagagggtaactggttgggtttgatgtggtgccttggaacactagaactaatcaaatcatcttgtcttcctacccaaaggagcaacttttatgatacgttgatccttcattaactgagctattttttttaagatcatcttcccattttctccttgtatatgaactacttgttccgcaaacttgaagatcctctgttttctttctcttcaatgtcagatgtactggctagtcgtcttggtattgtaggtgcaacatatgcaagcctagttcctttactatctttctccttttctttattatccaaagaggaggaaagtctgggacttgaagctgaacgtgtaacacctgcagtatctttttctttctgaccctctttagatgctgtgatttcagcaagtgcaccatagctgccccgtctttcctaaatccctaacctcccaagttgcaggagactcatcttttctctcttcttcctttgggagaaatttttgtagctgtggttggaaactttttaataggtgatgtaggtgttgcttgacctgatgacacagtaggtgttgtaacagctacaggagctgcttgtgtactagaagtgttggcattagttacagaagcccaggggttttgtcttatctgtttcagcttctgattccggagtcatcttcctcatcttcttcactagaagcaagctagactcatccttctttccttcttcttcttcatcaaccttttcttgttcccagagattcaatacgggatgcatttttctctggttcaataatcaacgtctctttgtttttaaaggtcttctgtgactgattattgtccatatttgctgttgattcaattagtggagatttcttgtcccgtttttcactatggagcagattttgtttcttttgcaactcttctaaatatcctaaaatgtcttcatctggctacaatcaaaggctggtttggccccactttgttgaccatctccatatcacacaggattgtccactaaaattcggacatgcttcttctttaccccaaatgagctgcaggcatgaagaggtgtccagccatcatagtctttaatattaacatcataggcctgcctgtattaaaagttttaaaacttccgtatagcctttagcagctgcaacgtgaagtgctgtacctccagattttgcatgccggacatcatttatatgaccactatttagccactgcctggcatctctaagcatgatccgttcttcttcctttcgagctgcttctatatcaaccccttgccgattaacttcattttgaagtagctcttccattgcctcctcctccgcaatatctaaaggtgtatctccttcactgttgacagcccctacatgtgctccttgaccaatcaaaaactctgcaatatcaagatatccacaggaagctgctgcatgtagtggtatccagccttcattatcaggttgattaatatttgctccattttctaccagaaacttcaccatatcaacattgtcatcaatgcaagcctggtgcagggcagtgagtccgtccacattggcgtaattgatgtcggcgccgcggtgcagcagcttgaggacctcgtccgtgtcgccgctggagcaagcagccaggaagacggcgccatcgtcgaacttcaccttggtcttctggcgcttcaccaccggaggctcgaggtccgtctcggagccgatccagcgtttcagctgctcgttccgcttctgcttcgcgtccgccatcttcat

SEQ ID NO: 66135 - DNA, 2210 bp, Homo sapiens
cggacgcgtgggcacttgcctccctgcctgcttctggctgccttgaatgcctggtccttcaagctccttctgggtctgacaaagcagggaccatgtctacctttggctaccgaagaggactcagtaaatacgaatccatcgacgaggatgaactcctcgcctccctgtcagccgaggagctgaaggagctagagagagagttggaagacattgaaccttaccgcaaccttcccgtggggctaaggcaaaagagcctgacagagaaaacccccacaggagcattcagcagagaggcactgatggcctattgggaaaaggagtcccaaaaactcttggagaaggagaggctgggggaatgtggaaaggttgcagaagacaaagaggaaagtgaggaagagcttatctttactgaaagtaacagtgaggtttctgaggaagtgtatacagaggaggaggaggaggagtcccaggaggaagaggaggaagaagacagtgacgaagaggaaagaacaattgaaactgcaaaagggattaatggaactgtaaattatgatagtgtcaattctgacaactctaagccaaagatatttaaaagtcaaatagagaacataaatttgaccaatggcagcaatgggaggaacacagagtccccagctgccattcacccttgtggaaatcctacagtgattgaggacgctttggacaagattaaaagcaatgaccctgacaccacagaagtcaatttgaacaacattgagaacatcacaacacagacccttacccgctttgctgaagccctcaaggacaacactgtggtgaagacgttcagtctggccaacacgcatgccgacgacagtgcagccatggccattgcagagatgctcaaagtcaatgagcacatcaccaacgtaaacgtcgagtccaacttcataacgggaaaggggatcctggccatcatgagagctctccagcacaacacggtgctcacggagctgcgtttccataaccagaggcacatcatgggcagccaggtggaaatggagattgtcaagctgctgaaggagaacacgacgctgctgaggctgggataccattttgaactcccaggaccaagaatgagcatgacgagcattttgacaagaaatatggataaacagaggcaaaaacgtttgcaggagcaaaaacagcaggagggatacgatggaggacccaatcttaggaccaaagtctggcaaagaggaacacctagctcttcaccttatgtatctcccaggcactcaccctggtcatccccaaaactcctcctccccctccttcttcccaaaggctgccaccacctcctcctcctccccctcctccactcccagagaaaaagctcattaccagaaacattgcagaagtcatcaaacaacaggagagtgcccaacgggcattacaaaatggacaaaaaaagaaaaaagggaaaaaggtcaagaaacagccaaacagtattctaaaggaaataaaaaattctctgaggtcagtgcaagagaagaaaatggaagacagttcccgaccttctaccccacagagatcagctcatgagaatctcatggaagcaattcggggaagcagcataaaacagctaaagcgggtggaagttccagaagccctgcgataaaaacatgatctttagaagaggatgcagaactgttcagtggtattacatgaaatgcattgtgagatgtttctaaaataccttcttcaattcaaaatgatccctgactttaaaaataatctcacccattaattccaaagagaatcttaagaaacaatcagcatgtttcttctgtaaatatgaaaataaatttcttttttatgtcgtgagatttgtattggcaagaagcagttaatttaaagatgctcttcctatctgtggatgtgttggtaactccgagttgtaatgagttcatgaaatgtgctgttatttttgtaatctcaataaatgtggattgaagttttttccctttttttaaagccaaactaatatttttctgtgacttgatacatctgtcagatttttgtaatctcgataaatgtgtattgaagttttttccctttttttaaaaagccaaactaatatttttctgtgagttaatacatctgtcaggtgtgtatgtaacattactggacattaaaaaaaattattacattctcacccaaaaaaaaaa

SEQ ID NO: 66136 - DNA, 2041 bp, Homo sapiens
atctttcgggcaatgtaactactacagcaaaatgagatatgatccattaaacaacatattcgcaaatcaaaaagtgtttcagtaatataatgcttcagatttagaagcaaatcaaatgatagaactccactgctgtaataagtcaccccaaagatcaccgtatctgacaaaataactaccacagggttatgacttcagaatcatactttctcttgatatttacttatgtatgtatttattttttttaatttatttctcttgagaccggcgtctcgctcctgtccgcccaggctggaagtgcgatggtgtgatctcggctcactgcaaccagccacctccctgggttcaagcgattctcctgcctcagccatccccgagtagctgggactacaggtgcccgccaccacgcccaagctaatctttatacttttaatagagacggggtttcaccgtgtcggccccggatgggtctcgatctcttgacctcagtgacccgccccgcctcggcctcccaaagtgctgggatgacaggcgtgagccactgcagcccggccttctcttgacgtttaaactatgaagtcagtccagagaaacgcaataaatgtcaacggtgaggatggtgttgaggcagaagtaggaccacactttttcctatcttattcagttgataacaatatgacctaggtagtaatttcctatgtgcctacttatacacgagtacaaaagagtaaaacagagagactgctaaattaaagggtacggtgaagttcttcataagtaactcccgtaaacttggaacacttgtccaaaaagccagcagctaggtgaattgtttccatgtatttttcctatgatccaataagtgaactatgctattcctttccagtcctcccaagcacttcttgtccccatcaccacttccggtgcctcgaagaaaaaaggtaacaaatcaaggaacacaacctaaagaaacacacacacaaaccaaagacaactacagcgtctgcaaaagtttgctagaagactgaaacctgttgagtataaggatctggtattctacgatgatcaatgagttcactttcagagtttgttcaagacatacgtttccgtaaggaaacatcttagttagaagttattcaagcagtaggtaccatccctaagtatttttcaccaaattccgtgacaaataaaagagcctatctaaccagaaaaaattaagccgagtaccggcaccatcccatagggcttttgtcttttacgcttcattaggcactttcccatgccttacaatgtctaggattgaccctgatagcatttccgaaaacaagctaatgctttgtccagttccttcagtgaagaccaagctcacgcccctaatgcgctatgggcataagcatcattttggattccacttcgagagttccctggaagaattgaatcggcaatatccgtgttcccggttgcagacccgaaacaagttccctgcaagcacaccaggcctcctggttgggcgaattttttatcccatgtctgtgaagtcttttgggacagaactgaaagagcaacctctttcggaggatgccaaagtgttgtagagtagatctccatgccttcgactctgtaattctcaatcctcctaacctctgagaattgtctttcagcttgcgtggactctgaaagtttacaataggcccttccgatttggcacagtacccacccggtattgcagtggtgagaagctagatggctcaagatactgatagcttctttgccgtggtaagaacacaaagctaaataacctttccccctttcacgaagaaggctcatcaagccttccgctggtgctttttgtagattaaaagcctgaatctgaggcgcgattgcggctatcttcccttctgaaatgacggaagagtccaattttgtcacttccaggctatcacttatgttcggtggaagttattgccccctttattaagttttacttttggttcttcctgtttgggaattttaagggtggaaacttcaatttttaaatttc

SEQ ID NO: 66137 - DNA, 514 bp, Homo sapiens
ttttttttttttaaaagggagtcttactctgttgctaggctggagtgcaggggtgcaatctaagttccctgcaacctccacctcctgggttaaaacaattttcctgcctcagcctcccgaggactgggaatataggtgcacgccaccacacccaacaaatttttgtacttttagtacagatgagggttcactatgttggccaggatggtctcgatctcttgacctcatgatccacccacctcggtctcccaaagtgctgggattacaggcttgagccaccgggtgaccggcttacagggatatttttaatcccgttatggactctgtctccaggagaggggtctatccacccctgctcattggtggatgttaaaccaatattcctttcaactgctgcctgctagggaaaaactactcctcattatcatcattattattgctctccactgtatcccctctacctggcatgtgcttgtcaagttctagttgttcaataaatttgttaataatgctg

SEQ ID NO: 66138 - DNA, 1267 bp, Homo sapiens
gacgccacggacacgtcgcctttcgtgctgtactcgatgcagacggctacgacgccctgcgctgagctggtgcacgagtcggccgagcggatctacatggtgacaacggtggtgacggtgaacgacgactctgcctagaatgtctggctgtcgtaccagctgctcaaggccacgtagcctggcctgttcggtgtgtgggcgcacgatgacgaggtgcgcacgtccaggatgctgagcgagcgcgtcgcagccaagcagaggctggtggtgctggtcaaggacaatggcgagccttcgcgctcggccacgccacagctgcacgtggttctggtgacgggctactccaagcctttctccgcttcctatagctggcccccggccagacccaggccaactcgctcactgtctacgtggtggtggcgttggcctcggtgtcgtcgctcttcctctattcggtgctcctgttcgtgacggtgcggctgtgcaggaggagcaggtcggcctcggtgggccgctgctcgatgcttgagggcccctttccagggcgtctggtggacgtaagcggcaccgggaccctgtcccagagctaccaatacgaggtgtgtctgacaggaggctcagaagcaagtgagttcaagttcctgaagccgattatccccaacttctctccttagggcactaggaaagaaatagattaaaattccacccttcacaatagctttggatttaattattgataggaacccatttgataaattccttaacttcttatgattgtcttgttgattaaattgttcatgctcaccaccaccaataaggtatttttctctgattgttagttcaaattatattgttaattccagtttcccttttcctcatatttaccccgaagaggtgttgcatatagaatcccaattaacaaaatatactttatcttcaaagttgatgtcatttaaaatttttccgtctttatattttatttacttcctattcattttttgctccatttttcatgttacttctcagtttcctagaacttcaagtattaaaataacctgttgcatgtattaggcatatttcctatgttacatttcttttgtctattttcctttcaaaattggtatttttgttgggctcaattttcattataatacttttcttaaagccgctttctttcttttcttttctttcttttttttttttcctttttggaaacggggttttctttttgcccccccggttgaagggcagggccaaattttgtgtg

SEQ ID NO: 66139 - DNA, 875 bp, Homo sapiens
  misc_feature (1)...(875): n = a,t,c or g
tctggcggaattacacagaaccctacctgagcaggcacccccaatttgctcaatattttgttgacttcagagaaacaaagaatggttttagaaaaagctaaggaaaaggctgatcttattcacactgactctcccagtaatccagtaagggcagctgctcatattgcagttcccacctctgacctgggatggaatataaacactggagatagatctaaccttgaacactatcaaaactgcattttgatcagcctctgcaagggagtgcccaagcaaaggagcctcaataaggtccaggatggtcaagcagaagcctaatgagggttgctttggaattcttagaacaagtctttgaagctttcagagaataaatggatattgacccagaagccccagaaaatttgatgatagctaacatgatgtttatccaacaaagtgccccagatattcagagaaagttacaaaacgtagctgaggcattggacatgtttttgtctcaattagtgaagattgtttttaatgtatttactgatcacaagtttaaagagtggaaaataaaacacaaggaataatgaaaatggcaagctgacttgttatctgtggctctgaccctagtagtccctggaccacaacaagggccgtcatcagacactccatctatggtagaaccacctgggcccccaaaagccaataaaaacggacatcccattgcaggtcccaaccagtgtgcttactgcaacaggggggacactgaatggaaaatttctcatgccttacaaagcctgatgttaaacagtcagccttctgcccaccaaatgcctgggatagctggngagcttgagagagatactaaagaanaagaccagaaatggtaa

SEQ ID NO: 66140 - DNA, 1545 bp, Homo sapiens
agtgtggtggaattctttgtattcatcagggagtacacacagggaaaaagccctataaatgtgaagagtgtgggaagggctttgatcagagctccaaccttcttgtccatcagagagtccacactggagagaagccctacaaatgcagtgagtgtggcaagtgctttagttcaagctccgttcttcaagtccactggaggtttcacacaggggagaaaccatataggtgtggtgagtgtggaaagggcttcagccaatgtacacaccttcacattcaccagagagtccacacaggggagaaaccatacaaatgcaatgtgtgtggaaaggattttgcgtatagctctgttcttcacactcatcagagagttcacactggagaaaaaccatataaatgtgaagtgtgtggaaagtgcttcagttacagttcatattttcacttacatcaaagagatcacatcagagagaaaccatataaatgtgatgagtgtggtaaaggcttcagccggaattcagatcttaatgttcacctcagagtccacacaagagagaggccctataagtgtaaggcatgtggtaagggcttcagtcgtaattcatacctccttgcccatcagagagtgcatatagatgagacacagtacacacattgtgagcgtggaaaggaccttctgactcatcaaagactacatgagcagagagaaacattataaatgtagtaagtcagggttcaattagtaaaacagaagccacactgtattccagatgatagaggcttactcagcctgtgggagggctaggggagcaaaagacagggacactgccatcgataatgtcagcctgcagcactgaagtgtgccaggccaaggactgtggatttcaagaacttctgtgaagctcccatcaactgctgtatgctacaatggcaagaggttacttttgacaaatgggtggtttgtggtagtggttgtagttagtggtcaaatttccattaaagggtgtgtccaggaaggaaattctaattgggatgatcatggtaaggtcttcagttcagccaacgtctttagatttttttttagtccccagtagaaaaatactctctgtatgaagaacattcaaaagtgtgctcaaaaatgaaacccatgctcttactatgaaagaacgttagtacccaggttttccatgagattctctacacaggcaagaagctccatagaagtggcatttgaagggtgtggcagaggcagtgctgtgtttatcacactggttccatttccttgcaaataagaagtctatttcccagtaacccttgcagttaagagtgtgcccatgtgattgagttctagccaatggagtgtgagcaaaagtgatataagccactttcaggtctagcctttacaaacatcctcaggcttctctatccctgccaaggtgaccttggaggctgcttattccagactgggttgatagaaggtcactacttcatctgtgttggatttctttttagagtaagaaataaaagttcattgtgtctcaccactgaaa

SEQ ID NO: 66141 - DNA, 441 bp, Homo sapiens
cccacgcgtccggacatatgctactcaaactgtcaagagacagagacaaatagaatcttgaaagtagcaagacaaaaattacttttcatgtacatgggctcctcaataacattaacagctgacttctcatcccacatcatgaaggccaaaaggcaatgggatcatatattcaaagtgctaaaagaaaaaactgccattcaagaattctgtatccagcaaaactatcctttaaaatgaggagaaattaagacattcccatataatcaaaaactgagagaacttgtcattagcacacctaccctacaagaaatactaaagggagtccttcatactgaaatgaaaggatactagacagcaattcaaatccacattaagaaataaggagcaccaataaagactgtatatatgtatataattgatagtataaatttacttttcttt

SEQ ID NO: 66142 - DNA, 1859 bp, Homo sapiens
acccagtccctgagagagctcatctcagatctggagcatcggctgcaggggtcagtgatggagctgcttcagggtgtggatggcgtcataaaaaggacggagaacgtgaccttgaagaagccagaaacttttccaaaaaatcaaaggagagtgtttcgagctcctgatctgaaaggaatgctagaagtgtttagagagctgacagatgtccgacgctactggggtaaggagaagtcacattatcataagccaccctgcggcttatcattattattatctttatcttttagaattttatgttctctattaggctcatgttttaagatttatgattctccttccaagacacacataacttacccctccttataacttctaaacaaggttcctcccagttttctctcaagtctttatcaagatttctctcatatcacaaataaagttacattatatcccttagctgacctgttaatttttctacagttgatgtgacagtggctccaaacaacatttcatgtgctgtcatttctgaagataagagacaagtgagctctccgaaaccacagataatatatggggcacgagggacaagataccagacatttgtgaatttcaattattgtactggcatcctgggctctcaaagtatcacatcagggaaacattactgggaggtagacgtgtccaagaaaactgcttggatcctgggggtatgtgctggcttccaacctgatgcaatgtgtaatattgaaaaaaatgaaaattatcaacctaaatacggctactgggttatagggttagaggaaggagttaaatgtattgctttccaggatagttccttccatactccttctgttcctttcattgtgcccctctctgtgattatttgtcctgatcgtgttggagttttcctagactatgaggcttgcactgtctcattcttcaatatcacaaaccatggatttctcatctataagttttctcactgttctttttctcagcctgtatttccatatttaaatcctagaaaatgtggagtccccatgactctgtgctcaccaagctcttgaaccttcttacacactcagccccttctgtacagcacctcttgtccaggtgcatctcatacacctgaactcatttgcatcattttaaccatcttttccttgctgtctcccttctttctatttgaacgtccttcactcatcagtaaaatgtaataattgccttgtgccatattgtccccaatattttattgacatttgatagcaatttttttcatcattttccgtactcctaaggaaaactgacctatacctcataaaatgagaccgctatttaggtattacttctgccagatatttatcacccaattgcctctgacactgactaagaagatgaagaaaagcttttcaacagcctttctatatcatcgtgtgataattgttcaccaatgaatgagtccttagccctgtgtcagtttaccctcgatgcccttatttgtgagttaaagagaaaatatcataaatggtatactcttaagtatagaggttttgtatctagaggatctcagttcaactcctgtctctccatataccagcagtgtaactgtgaataacatacttaaatggctgtgcttatttccttttcttttcttttttcttttttttttttttggaaaaaaaagttttgtttttgtcccccaggctggagtgcaatggcacgattctcggttcactgcaacctccacctctcagattcaagcaattcttcctgcctcagcctcccaagtaggctggggatttacaggtgcccaccaccacccctgggctaaaatttgtattttcagtagagacggg

SEQ ID NO: 66143 - DNA, 982 bp, Homo sapiens
ggaaggaacggggtggccacgagctgtgagggagatggatttcacggacaaccagacaggcctcggtggtaacaacgaaagggaaaacttagaatccagaattgctacaaatgtattatctaaaatacaaagaagtatgacagtgtgacccatactgaggaagaacatcatcagtagaaactgtctgagtgtccagatgttgaatttagtaaaggcttggaaacaacttgtggatggagcagtagaaattatccattctgaagaacagagagaaaaaaacaagaaaaatgcacagagcctcagaaacccgtggtacaacatctgctgtaccaaagcatgtcgaatgggggttccaggagagaggaaagatatttgttacaataatggttaaaaactttccaaattttaattaaaaaatatgcacattcaagagcacaggaagtttgaactagaataaatgcaaagtcacatcatagtcaaactggcaaaggccaaagagaaaatgttgaaaggcgtcagagaagaatgacccatcccatgaaaggggagcttcaataccgccagccactgacttcttagaaacaatggagaccagaaggcagtggagtggcatactcaagctgctcagagagaagaaccatcagccaggaatcaaaaccgttctacacaagtgaaagggaacgaacgacattccctgagaagcagagactggtgggattcattgttggcgaaacctgccttaaaggaaatactaaaggaagaccttcaagttgaatagaaatgacaccagacggtaacttgaatcctcaggaaggaaggacaggcactgcagatggcaagtgtaggttgacgtcaatatcctgtaaatatctctcctcacatcttaggttttactggaactacgattgtataaaataattacactgttgtcatggtatgtggcataaatggactgcacaaagaagacagggtattgagctct

SEQ ID NO: 66144 - DNA, 1256 bp, Homo sapiens
aggactgcagtattcattttatttttatattatttatttattcttccttagtttcttgagattatcatccgctgagggtggaaggggagtgaagcagacacactcaggaggtgtcttgcagattatcatccgctgagcgtggagctgagggtggaacgcgagtgagcagacactccggagctgtcttgagattatcacccgctgagggtggaaggggatagaacacgccctttgcatgtttccttggaatttttatcccctgagggttaaagctgagggtggaagggggagtgagcagacacactcgggaggtgtcttgagattatcatccgctgagggtggagctgagggtggaaggggatagagcacacacttcggaaaggtgtctttaggctcaggggagttatcaattatagaatgttgttgagttggaggaggtgggctggtggccccatcctgttttttaaaagtttcaagctgtgaggtagggccagtagggcaatcctgaagaatgacgatgctccactgccgccattctgaccttaagaagtcagttaggcattgctgtaaatattcttttcactcccaggtaataccaaactgtaagtgcaccggttgcaaagaggctttcttgcaacaggggtgattttgcatctgtagtaagtcctctgcccgccggccgcaacgcttgcgcacgttgaaacatttccatgtaggtgtgtatttctttcatatccaatttcccgttttcctctgcctctgacacctgcctctccttttctccgtgctcacgttctttcatgcttagtttcctcagatgttctttggcggtcttcctctttccattgattttgtcatgacggttgacttttgttgtcaccttcatcttacagattttagctcgaactttggtttccacctgtctccataaagtaaagatgtcttccaggacaattttaattccttcctgtctacggcggttggacctcctggctctctgctgtacatccgtggatccatcatgtccattttgagacgggaagatagtcttcaggaaactcacacaaaggtaacttgtgcagagggagatggcaaatttataacttctcagaaacacagtaatgataagtaaccaaggacttccaccaaagtcagtcccacgatgacgatggtcagccagagtattgataacccaagcagagtgccaggttttacagcctccgctcagccattcatatcctaagcaacaaaacatt

SEQ ID NO: 66145 - DNA, 1773 bp, Homo sapiens
ttttttttttttgttcaatgaacataaaataattttattaaatataacaaaaattaaaacataacaaaagtatcacagtattatagtaccatttaaatataacatagaaaaatactacaaaataagaaatacaaagacaaaagctaggtaagatttttatttactatgatgggtgtgcttgcctgttcataagttcattccagtctggaacacaggaagataatgctacccgcataactgctgcacaattcagcccatttctttcctttgtttttaactgcgttaagatggaaaaccctagttcacacaaactagttgttgtgaatggtagcaatagccaggacactctttctacttaacaatggaaagtcttcctttaccttcatccaaaatgctgataaacttaaggtttcataatcattcttcaatgtatatgaagaactaagctgcaataattcattctcttcttcaggcaccaagtttagctcaattattgattcagggtttcgaaaagcaaatggatcttttacccaactgttttcccttaatgtttcaaatttttcttctggaaagaaatggttaaaagtttgagacagagaagtgagatgcaacaatatctctaattttatttctttcaaaatgttttcattaataatattctcttcaatatgctgcaaaaatcttggaaacatgtaatagctaggacgattacttttaagtcttacttgccataacaataatgtctttcgaaatccctggatacgttcaacatgttggaatacatcactgtttttcccctgtagttttaaactcagttcattaagaatgctaaaaatatcagttaaatatgccaattttgttacccaagtatcatcttcaaaaatacttgccaaatgagattttttttcaatgagaaaaaagtgaatctcattcctgagctcataaaccctgcttagtattttcccttgagacaaccacgaatttttggtatgatatagtaagtgggtatgattagttccaatctctgaacaaaatgtttcaagaagccggctattcaatgagcttcctttaataaaattaacaactttcactgcatttttcaatacctccatgagattctgtggaatttctctggatgctaaaccttcacgatgtataaaacaatgattccacacagcaccattattagtaacttctagtaattttttaattactctgctatgttttccagtcatggttgctgtgccatcacttgtaattcctttacagtttttccagtttaatttatattggccaactatgcgcctttctaattctgtaaaaatatctaatccacttaggtgtgaggttaaatttaaaaaacacaaaaaatcctccaaaaaatcatcttgccacgcatatctgacataaactaaaagtgttgtgcagcttccaatatcagtgctttcatcaagctggattgcaaaatctatcccagactgtaaacgagtaataagcattgtttataaatgttctgcaatagtacaaattcgaagagatactgtgttatcattaggtatagtttttaatttatcagctgatttatcatcaaatattgtacgcaccatatccaaacatgctggaagaataattttttcagcagctgtgttagctattttctcttttgccacacgatatgcacctaaatatgatgataataagacaactctctacagcagtagaacacttaagaaattgtgcgggggcgtgggtcgacacgggaattcgggcgct

SEQ ID NO: 66146 - DNA, 1799 bp, Homo sapiens
ttttttttttttcttttaaaggttttatcttttattagcatttcatcctcacaaaaatactattaggtggtactgttattaccattttaaaaaccaaggcacaggggcatgttttgccaaacaccacataggcagaggtggaattatgagaattatattatttatatatatcataaagataggccaaggctggtctttcccatgttcattacattaacagaatcattttccgttacagtgctatataaagtgtggtccatgtgttgacactggcccacaaattgtttgcttctggtctctgcaaaagttatagataccaagagcaagtatttagaaatgtttgcagcaatctgacagagttaactcagttaaataccataataaaaaactggggcttttattttgtatgtctgtttttttcgttttcatttttcgtggtaatctatttatttatttatttaagagacagagtcttgctctgttgcccaagctagagtgcagtggtgcgatctcagctcactgcaacctctgccacttaggttcgatgcaattttcctgcctcagcctcctgagtagctgggattacaggcaccccccacaatgcctagctaatttgtgtattttagtagagaaggggtttcaccatgttggccaggctggtcttgaactcctgacctcaggtgatctgctcacctgggcctcccatagtgctgggattacaggtgtgagccactgtgcctggcccgcattttatttatttatttagagacaggatctcactctgtcaccaagctggagtgcagtggcacaatcatggctcactaaagccatgaggcagggtctcactatgttgcccaggctggtttcgaactcctgtctttccacagtgctgggattacaggtgtgagccacttcacctggcccattattattgcattttagagaagcactgttcaacaacagtttgtaggggaaaaggcccttgatggtttgggatgcagtgcatcagtatcaatcttctaaagcctaacagggactgagtgatgctatagtctttcgactctttaacatacgaaataatttctgataaattgtgagcatgaagtaaaagggattcccacatgttccgtaacaaacagaaaatttcttaaattacaaattctctgctaaagggcattttctaaaggccatcgtattctctttacattatgcataggacttcctcactaatatgatttctctgatgtaaagtaagttgatcactacgaataaaggcttttccacattctttacattgatagggtttttcaccagtatgaattctgtgatgtcgagtaagttctgaattaacactgaaggctttcccacattctttacatttatagggtttctcacccgtgtgaactatgtgatgtcgagtaagttctgcttgaagacgaaaggcattcccacattctttacagctataaggtttctcaccagtatgaagtctaaaatgttgagtaagatgataccgacgactaaaggtctttccacattccttacattcatatggaagctcaccagtgtgaattctttgatgtaatgtaagtcgataactgcaaataaaagcattcccacattcattacatatgtagggcttctcaccagtatggcctctgtgatgttgagtaagatgatagtgccgactaaacgtcttcccacattccgtacattcgtagggtttctcaccagtatgaattctgtgatgttgcgtgagatgagtgctacgaataaaggccttcccacccacgcgtccg

SEQ ID NO: 66147 - DNA, 1140 bp, Homo sapiens
actctcacaattaaaacatttggaaaggaattaatggtgtatttccattagggaaagtgctgacaagccgcaagggatcccttgatggttctgggcatgggcgcccagcctgggctctggctttgggagcagcgaggggaatgtgtctctcacccctaggcctcctggtctggctcctgctcaggccacacggcgcacccacccccagcgcgcctcagtccaggtcactgggcagggtgtttactgctgcgctccaacccaagcatgtagatttcagaaggggactaggacccccggcaggtgtttgagaccaccggctcccaagtgcgtcgccttgggggtttgcatcggctcctcagcctccccaggcaatctctgtgtagggtcgggagcgggaggtctgagttgagccgggtgcctgagatctccggtgcaggtcgggggaggggagcccccctcgggctgtggttagagcgggagaggaacttcccagactagctggcacagagcctcgggaaggcggcgggcactgcaggtggtttacgggaagtgctgcagccttggggtggggacagcgtggccagacccaccgcctcatctgcacacctgggctcaagcgctaatgacgacaggggactgagtgaatgggacccccatggacccgcgcgcctgccccacgccatggcctgggtttcgggagccttgctttattctgcctcgggtcggaggctgggggagcgagacctccagtgcccgtgcggctgggggagagggtggaggggccacttagatgtaggagtcatcaccaccgggcgcatcgtagggacccccacccctccccgcgccctcgccctcatcgccgctgccggagtcactggcgccatccacgtccagggtgggcgcgttgagaacgaccacgtctgcctccgtcccgatgtcctcgccaaaccagacagccttgtacccgccctctggccgccgctccttggtcaggatggacctcaccgccgtggggcttccgccagctcgggccgctgcggggggctcaagggcaccgcctggggaggcagggccggggggtgcgggctatgcgggcatcggtgcctccgcgggcttggggtcgtgcgtggggctggggac

SEQ ID NO: 66148 - DNA, 2948 bp, Homo sapiens
ccccctttgtcaacaacaacccggggaacctcttacacatggggccaaaaagccgctacggcccggctggggcacagcgaacagtgaaggacccagctgaaagccgaaagctggtggaaggcgctgcagggcccaccgtgtggttgacatcgcctgtggcagtggagatgcccagaccctctgcctcacagatgacgacactgtctggtcctggggggacggggactacggcaagctcggccggggaggcagcgatggctgtaaagtgcctatgaagattgattctcttactggtcttggagtagttaaagtggaatgcggatcccagttttctgttgcccttaccaaatctggagctgtttatacctggggcaaaggcgattatcacaggttgggccatggatcacatgaccatgttcgaaggcctcggcaggtccaagggttgcaggggaagaaagtcatcgccatcgccactggctccctgcactgtgtgtgctgcacagaggatggtgaggtttatacatggggcgacaatgatgagggacaactgggagacggaaccaccaatgccatccagaggcctcggttggtagctgcccttcagggtaagaaggtcaaccgtgtggcctgtggctcagcacataccctcgcctggtcgaccagcaagcccgccagtgctggcaaactccctgcacaggtccccatggagtacaatcacctgcaggagatccccatcattgcgctgaggaaccgtctgctgctgctgcaccacctctccgagctcttctgcccctgcatccccatgttcgacctggaaggctcgctcgacgaaactggactcgggccttctgttgggttcgacactctccgaggaattctgatatcccagggaaaggaggcggctttccggaaagtagtacaagcaactatggtacgcgatcgtcagcatggccccgtcgtggagctgaaccgcatccaggtcaaacgatcaaggagcaaaggcgggctggccggccccgacggcaccaagtctgtctttgggcagatgtgtgctaagatgagctcgtttggtcccgacagcctcctccttcctcaccgtgtctggaaagtcaagtttgtgggtgaatctgtggatgactgtgggggcggctacagcgagtccatagctgagatctgtgaggagctgcagaacggactcacgcccctgctgatcgtgacacccaacgggagggatgagtctggggccaaccgagactgctacctgctcagcccggccgccagagcacccgtgcacagcagcatgttccgcttcctgggtgtgttgctgggcattgccatccgaaccgggagtcccctgagcctcaaccttgccgagcctgtctggaagcagctggctgggatgagcctcaccatcgcggacctcagtgaggtttgataaaggattttattcctggactcatgtacatccgagacaatgaagccacctcagaggagtttgaagccatgagcctgcccttcacagtgccaagtgccagtggccaggacattcagttgagctccaagcacacacacatcaccctggacaaccgcgcggagtacgtgcggctggcgataaactatagactccatgaatttgatgagcaggtggctgctgttcgggaaggaatggcccgcgttgtgcctgttcccctcctctctctgttcaccggctacgaactggagacgatggtgtgtggcagccctgacatcccgctgcaccttctcaagtcggtggccacctataaaggcatcgagccttccgcatcgctgatccagtggttctgggaggtgatggagtccttctccaacacagagcgctctcttttccttcgcttcgtctggggccggacgaggctgcccaggaccatcgccgacttccggggccgagacttcgtcatccaggtgttggataaatacaaccctccagaccacttcctccctgagtcctacacctgtttcttcttgctgaagctgcccaggtattcctgcaagcaggtgctggaggagaagctcaagtacgccatccacttctgcaagtccatagacacagatgactacgctcgcatcgcacttacaggagagccagccgccgacgacagcagcgacgattcagataacgaggatgtcgactcctttgcttcggactctacacaagattatttaacaggacactaagatggggaaacgtcctcgtgagatgagagcctgagccaggcagcagagcactcgctgctgtgtagactgtaggctgcctggtgtgtctgatgagaagcgtccgtcctcgagccaggcgggaggagggagtggagagactgactggccgtgatgggaatgacagtgagaaggtccgcctgtgcgcgtggaacactgtggacgctcgacttccaagggtcttctcacccgtaatgctgcattacatgtaggactgtgtttactaaagtgtgtaaatgtttatataaataccaaattgcagcatccccaaaatgaataaagcctttttacttgtgggtgcaatcgatttttttttctttctcctttctttcaagtgtcgtgagtcgtcttgattgtatattggaaataactgtgtaacaaatcgtattataaatatttcaattaattttactctgaatttgtttattaaaagacttttgaacatgaaatgattagtattacttgaatgcatccagaggataatttaaaccaaaatgaaaaaccagaaggccatttggtgtcccctctcccaggtgtccccttgtagcatatgcattatgtcatctgaattgaggcctttctgtgaacagcatcataacttctatcatggaaagtgtactatatataatgtttgtgtcatgtatatgcctaaattttaattatctataaataaaacatctgacataaaaaaaaaaaaa

SEQ ID NO: 66149 - DNA, 3630 bp, Homo sapiens
ctggctccggctgcgagcagggatgtccgcccgggcggtatgggccaggctgtgaacagctgtgtgggtgtctcaacgggggctcctgtgatgcggccacgggggcctgccgctgccccactgggttcctcgggacggactgcaacctcacctgtccgcagggccgcttcggccccaactgcacccacgtgtgtgggtgtgggcagggggcggcctgcgaccctgtgaccggcacctgcctctgccccccggggagagccggcgtccgctgtgagcgaggctgcccccagaaccggtttggcgtgggctgcgagcacacctgctcctgcagaaatgggggcctgtgccacgccagcaacggcagctgctcctgtggcctgggctggacggggcggcactgtgagctggcctgtccccctgggcgctacggagctgcctgccatctggagtgctcctgccacaacaacagcacgtgtgagcctgccacgggcacctgccgctgcggccccggcttctatggccaggcctgcgagcacccctgtccccctggcttccacggggctggctgccaggggttgtgccggtgtcaacatggagccccctgcgaccccatcagtggccgatgcctctgccctgccggcttccacggccacttctgtgagagggggtgtgagccaggttcatttggagagggctgccaccagcgctgtgactgtgacgggggggcaccctgtgaccctgtcaccggtctctgcctttgcccaccagggcgctcaggagccacctgtaacctggattgcagaaggggccagtttgggcccagctgcaccctgcactgtgactgcgggggtggggctgactgcgaccctgtcagtgggcagtgtcactgtgtggatggctacatggggcccacgtgccgggaaggtgggcccctccggctccccgagaacccgtccttagcccagggctcagcgggcacactgcccgcctccagcagacccacatcccggagcggtggaccagcgaggcactagtagaggcagtcccgtggagcccgcctctccagtcccagccagaggggaccctggcctttggtgaccactgagaaggacacttcacgggcccagagctcctggtactgcccttcctttgagggccgtggagggctgtggacagcccagcaacctgtcgctcttggaggctggtgtggccttgaggagggaagcctcgcatggccgctggaagagaggcgcctcctggcctggctctgcagaacccaggggcacgctctgggcctgggctgaggaagtcccgctctccccgcggctctgagttggactgaggacaggtgtgggcgccagtgtgggtgcaggcgcaggtgcaggcacagggccactgtcctccaggcaggctttttggtgctaggccctgggactggaagtcgcccagcccgtatttatgtaaaggtatttatgggccactgcacatgcccgctgcagccctgggatcagctggaagctgcctgtcatctcctgcccaatccccagaaaccctgattcaggtctgcaggctcctgcgggctcaccaggctgctggctccggtaccatgtaaacctaggaaggtaaaggagcaggcaacctcctcgtggcctgtgtgtttgctgtgttacgtggactctgtgtgggctcctccctggggcccggccagcataacggtgcacccagggacctcccagtgcacccggggccctttgcaggggtgggggtgccacacaagtgaagaagttgggactcatctcagttcccagtgctattgaggagaacgctggggctgcattcattaccgctgagacccagagactggctgttcccagagaatggcccagggggaggagggctggtgtggaggggcaacctggactgaggccgaactcccttgggctcaccccacccacccctacctgagcatcagcagtggggggagggcagcatcgcaggggcagggactccctgggtgaggacagaccagccctcccgagcacctggcactcatgggctgaggctgacttctcctggaagaagggcccagagtggaaggaagaggcagagggtagaggtggtggctgggggctcctctgcagagtggggtggccaatggagagggctgcactcacaccgcaacataggactctctctcccttaagaaggcccccttagggtctgggctgccgcccccatcaccctaaaaccagccaaggtagctgaggccccagggcagacaatttcaccagcaggaggaggaggagtccagtgagcttggttgctcacagacagcaagggagctgtcacagaggaagctgatgaatggaccgctgtggggagactttaaagtagaacagtgataagggagggcaggatggtggggatgcagaagcagcagccagagagagacggactggggtgcagacggagtgtggaaaacgcataccttgaaatgaagcatccagcagatggggtgagtggatacagctcaggagattctcccaggaatagcagggaggcgtaaagagagacaacgtacagagatagatgaatggaaatgggtaagggaggtgttcattcacatccatctaactgcaaaatacaaaagtaagaagtcattgacatgaagcaacgacgaccaagacgttctcagatctaaaggtgaatgatctcagtcagcctggaaatgcacaaggtggaaaaataacataaaaaagccataagaccttgaagaacatcaatgtcaaagataaattctaaagtcccagagaaaaaagaatgggaatcaaattgacctcagactatacgtgagaaacacggagagccagaaaactgtgatgttccatcctcagagtttgaaggaaatatttgaaggctgaattttacatccagctaaactatcaaaggcatgcaaagtccatgttattcttaggccttcaagctcaggcatttttctacagaaaagcctgattttaaaatgctcttagagacggttctccagccagaagagaaagaagccaggagggtgctctgagatattcagtcaccacagttcccaaatggcctaggaattcagagagtcagaatatcaccattactccccaatgggaacccccgacagtctcagcatggtgtgagggtgtggacggggggcctggcaggtaccaatcactcatcccgctcagtgaagacacagtgttcagctacggaagccataaggcaggccgagcttctgcccatccggaggaaatctcagctatccaacggcggtcaggagcagaggaaaataaagcagaataactagaaaacacgctcacagatcctaatgttaacggttacaaatgacgacggaaaaacaaactcctgaccatatattatatagtttcaagcagcaagaaggaggatattgaacattctcaacacacataataaacgcttgagatgatgatatgctcattaccctgatttgatcactagacatcccatgtatcaaaacatcactgtgtatccgatgaatatctacaattattgtcaattaaaaacatcattaaaaacagactagactgcattaaaaatataaaaaaaaaa

SEQ ID NO: 66150 - DNA, 1092 bp, Homo sapiens
  misc_feature (1)...(1092): n = a,t,c or g
ctttttaaattgggttatcttttgttaagttgttaagttgattcctagtactggacttttatcaggtaagtgatttgcaagtattttctcccattctgtaggttgtctttcttgataatatcttttaatatataaaagttttaaatgttaatgaaatccaatttatttttaaataaattggatgtatattgttgctcatgctgttggtatcataaataagaatttattggcaaaatcaaggtcatgaagatttatcactttttcctttatccctaggttttatagggtttgctcttacatttaggtctttaatatatttttgtatctagtatgaggtagagatctaaattcgttcttaagcatgtggatattcgcctgtctctgcactatttattgcgaagagtatccttttctcattaaatggtcttgacacccttgttgaaaatcagttggccatagatacatgggtttatttctgtgctctcagttctattccattgatctgtatattatacttttgctagtaccacactgttttggttactgtaattttgtagtaagttttgaaatcagaaagcatagagttcttcggttttttcttctttttcaagtttcctttagctacagagtttcctgcaattgaatgtgaatttgaggattttcctttccatttctgcaaaaacagccaattaggttttgataaaaattgcattgaatctgtagatcaatttgggtagaagttgccattttaaaaatatttagccttccgggccaggtggggtggctcacgcctgtaatcccagcactctgggaggctgaggtgggcagatacctgaggtcaggagttcgagaccagcctggccaacatgatgaaaccccgtctctactaaaaatacaaaaattagccagacgtggtggcaggcgcctgtaatcccagctactcaggaggctgaggcaggagagtcccttgaacccaggatggggaggttgcagtgagccaagatcatgccattgcactccagcctggggacaagagtgaggcttcgtctcaaaaanaaagaattccnccgcnctgngctaatggactcgatg

SEQ ID NO: 66151 - DNA, 433 bp, Homo sapiens
aacagattcaggagctgaataaaaccccaacaagatacccatgctatgacacattcataataaaactcctaaaactaaaagcaaagaaaaaaattgataacatccagaaagaaaaggaacgacacattgctgatagaagtcccgttagattgacagccgacctctcatctgagaccctgaaggctcaaaggatgcgccacaaggtacttcaagcactgaaatgaaagacctgtcaaataaattctctatccagtgaaaacacacttcaggaaatgaaggggaaatgcagatgttctccaacaaggaaaacgaagaggaattgttaccaacgagctcacccttgaagaatggctaaaggagcttctccacacagaaaggaaataactggagaaaacctggaatcttgttagcaacgacaacagagagcactaga

SEQ ID NO: 66152 - DNA, 2389 bp, Homo sapiens
gcccggattcttctggataatgaccattacgccatggaaaaattgaagaaaagagtactggaatacttggctgtcagacagctcaaaaataacctgaagggcccaatcctatgctttgttggccctcctggagttggtaaaacaagtgtgggaagatcagtggccaagactctaggtcgagagttccacaggattgcacttggaggagtatgtgatcagtctgacattcgaggacacaggcgcacctatgttggcagcatgcctggtcgcatcatcaacggcttgaagactgtgggagtgaacaacccagtgttcctattagatgaggttgacaaactgggaaaaagtctacagggtgatccagcagcagctctgcttgaggtgttggatcctgaacaaaaccataacttcacagatcattatctaaatgtggcctttgacctttctcaagttctttttatagctactgccaacaccactgctaccattccagctgccttgttggacagaatggagatcattcaggttccaggttatacacaggaggagaagatagagattgcccataggcacttgatccccaagcagctggaacaacatgggctgactccacagcagattcagataccccaggtcaccactcttgacatcatcaccaggtataccagagaggcaggggttcgttctctggatagaaaacttggggccatttgccgagctgtggccgtgaaggtggcagaaggacagcataaggaagccaagttggaccgttctgatgtgactgagagagaaggttgcagagaacacatcttagaagatgaaaaacctgaatctatcagtgacactactgacttggctctaccacctgaaatgccgattttgattgatttccatgctctgaaagacatccttgggcccccgatgtatgaaatggaggtatctcagcgtttgagtcagccaggagtagcaataggtttggcttggactcccttaggtggagaaatcatgttcgtggaggcgagtcgaatggatggcgagggccagttaactctgaccggccagctcggggacgtgatgaaggagtccgcccacctcgctatcagctggctccgcagcaacgcaaagaagtaccagctgaccaatgcttttggaagttttgatcttcttgacaacacagacatccatctgcacttcccagctggagctgtcacaaaagatggaccatctgctggagttaccatagtaacctgtctcgcctcactttttagtgggcggctggtacgttcagatgtagccatgactggagaaattacactgagaggtcttgttcttccagtgggtggaattaaagacaaagtgctggcggcacacagagcgggactgaagcaagtcattattcctcggagaaatgaaaaagaccttgagggaatcccaggcaacgtacgacaggatttaagttttgtcacagcaagctgcctggatgaggttcttaatgcagcttttgatggtggctttactgtcaagaccagacctggtctgttaaatagcaaactgtaggtccaaatctcaattttttagaattttaagttatgaagtgctcaaaggtactgacacagttgattttattcacaccattaggggtatgcaagatgtccctgttttataaacataatcacaacagtaataaacctcaagtagtggctagtgtttagtatagaaatataagatgttgatttagtaaactgataaaaatcgaattcttgtctttttagtgggatccttactgtccctggaaagatatagcatagtggttctcagcacagtctccagaacagaagcatctgtagtacctggtaacttgttagaaatgtacattctcaggctccacagcaggccgcctgaatcaaatcctgggaggtggggacagaaatctgtgttttaagaagccttccaggtaattctgctgcacactcaagttcaggaaccaccggtatagaccattaccttagtggatttacctgtagagtttattggatcctgaaaccaatcaattacttagaactaggcaaagatgaaagtatagccaactattcttggctatatatatatattcaagtgggccgggcgtgatggctcacacctgtaattccagcactttgggaggtcgaggtaggcagatcaccgagcccaagagttcaagacaatcctggccaacggcgaaactctgtctctacaaaaaatatacaggcgtgttagcatgtgcctgtaatcccagcttcttgggaagctgaggcacaagaattgcctgaacccaggaggtggaggttgcagtgagctgggatcgcgccattgcactccagcctggctgacagagcgagactgtctctaa

SEQ ID NO: 66153 - DNA, 2649 bp, Homo sapiens
tgcggtggaattctcagcccatggtgcccctggctgtggagaaccaggctgggggtgagggtgcaggcggggagctgggcatctccctcaacatgtgcctccttggggccctggttctgcttggcctgggggtcctcctcttctcaggtggcctctcagagtctgagactgggcccatggaggaagtggagcggcaggtcctcccagaccccgaggtgctggaagctgtgggggacaggcaggatgggctaagggaacagctgcaggccccagtgcctcctgacagtgtccccagcctgcaaaacatgggtcttctgctggacaagctggccaaggagaaccaggacatccggctgctgcaggcccagctgcaggcccaaaaggaagagcttcagagcctgatgcaccagcccaaagggctagaggaggagaatgcccagctccggggggctctgcagcagggcgaagccttccagcgggctctggagtcagagctgcagcagctgcgggcccggctccaggggctggaggccgactgtgtccggggcccagatggggtgtgcctcagtggggatagaggcccacagggtgacaaggccatcagggagcaaggccccagggagcaggagccagaactcagcttcctgaagcagaaggaacagctggaggctgaggcacaggcattaaggcaagagttagagaggcagcgacggctgctggggtctgtacagcaggatctggagaggagcttgcaggatgccagccgcggggacccagctcatgctggcttggctgagctgggccacagattggcccagaaactgcagggcctggagaactggggccaggaccctggggtctctgccaatgcctcaaaggcctggcaccagaagtcccacttccagaattctagggagtggagtggaaaggaaaagtggtgggatgggcagagagaccggaaggctgagcactggaaacataagaaggaagaatctggccgggaaaggaagaagaactggggaggtcaggaggacagggagccagcaggaaggtggaaggagggcaggccaagggtggaggagtcggggagcaagaaggagggcaagcgacagggcccgaaggaacccccaaggaaaagtggtagcttccactcctctggagaaaagcagaagcaacctcggtggagggaagggactaaggacagccatgaccccctgccatcctgggcagagctgttgaggcccaagtaccgggcaccccagggctgctcaggtgtggacgagtgtgcccggcaggagggcctgactttctttggcacagagctagccccagtgcggcaacaggagctggcctctctgctaagaacatacttggcacggctgccctgggctgggcagctgaccaaggagctacccctctcacctgctttctttggtgaggatggcatcttccgtcatgaccgcctccgcttccgggattttgtggatgccctggaggacagcttggaggaggtggctgtgcaacagacaggtgatgatgatgaagtagatgactttgaggacttcatcttcagccacttctttggagacaaagcactgaagaagaggtcagggaagaaggacaagcactcacagagcccaagagctgcggggcccagggaggggcacagccatagccaccaccaccaccaccggggctgacaccctgccccacagggaatggccttggcctggcccagcccaagatcccagcgttatctaactcctggagggtggactctgtcctggcttgtttggtgtcctcagatatctttcacacagtagagcaaaatcaccagccctgcactgatgtcactttatgtagaaaaaggccttagctggacctgcgttgccgtctatgcaaatgcatgcaaatactccaggccctgggatgtgggcttgtgttttgtcactgtgaagggggagatgggagaggagcctgttttggggtggggtctggggaaggcaatctgattctgaagctaaagagctttcatcctcttgagtgtatgtccccatagtgggccccttgacccacatgctgaccggtgccttgggatttgactagagttgctggctcgaggcccagcacgaggacttaccctggggttttgttaggtttggaagcagctgtccctagggggtgaagtcccccccctttttttttttacccctgtttttcccacggtttcacctccctatgtgaactgtagactcaaatcccaataaagggctgttgcagctatgatgctaggtggtttctaagcacaggggacaccccacaccccctgcctgaatggatgggtccatcccaggcactggtacttgcccccttgttctgtatccccctttgcccttgccttgcccttccaacaaaccctaggcccttgagaagctgatacttctccttttgctcacagctgccttggccccacccctgggagatgtagcaaattgagtgtgggttttggagtctgagcctcaggctcaaatccaggccaagtgatcttgggcaagttaatctctgggaactttgggtttcttatcctcaaaaaaggcgatggaagggctggggaagtgattaaataaaagcaacgcaagaaaaaaaaaa

SEQ ID NO: 66154 - DNA, 858 bp, Homo sapiens
gcggccgccactgccacctcctcggaggacacgctggggctcggcggtgaagagtctgtttccggggccgcctctccctggggtgcccccgaagcctgcctgagggcctgggggccatttcctgcatcccggggacccgtcatcactctcacatggtggtcaggacacaggacaaagaagggcccttcttggatgaggaggctctcgtgggtcagccttaaggcgttctcatccacatggacttggatggccgtctcctcctcctcactgggcaagagcagccagaaggcctggtccatgagcaggtttgccaggcagtgatgagtgaagccgagagcatggtaggtggaaaacttccagatttcttcaaaagtcttaaacgtcaccacgatccggtcctggtcactgtggatggacagcagcctggctgataattccccaagcacgcgggccatctcccggctatcattctccagcaggcggagctggccccggagggtctgctgtaggccggggtcccgcagtctgctcttcctccgcacagccagcagctgcagggtcaggtctgtgggataaacccccatctggcagggaggggtcccagcagcaggcccagccacgcgggcaggaggagcctcgtcgcctctcactggcgccttggcctcctcgggccccgctttctcccagctcacagagggcctcatgaccacagtccggacctggtcccgggtgctgccacctcctgagggtcccacaggacccctccccatgggggtcggctcctcagtggtcacggcagggaggttctccatgacccgcagagacctcacatgcctggccctgcggcgtgttcctcag

SEQ ID NO: 66155 - DNA, 483 bp, Homo sapiens
  misc_feature (1)...(483): n = a,t,c or g
ggtcgacccacgcgtccgcggacgcgtgggctgtcacaagaggcgttgagatcactgtgaattatctgggaatccagtgtgatgtgaaattttggtcccaacacatttcctccattcttgttggaataatcatcgccacatccatcagaggattgctcataccacgttcttttatgccatctctagcagtaagtcctccagtgtcaatgtcctgctattagcacagataatgggcatgtactttgtctcctctgcgcttctaatctgaatgagtatgcctctagaatatgcaccataattaccgaagtccttggagaactgcagttcaatttctgttaccattggtttgatgtgatcttcctggtcagcagtctctctagcatagtgtttctctatttggctcacntacaggcaccagagaagcatatgacaccttgaacttanggctactacagactggtagaggccagtggtctcaaattt

SEQ ID NO: 66156 - DNA, 656 bp, Homo sapiens
tttaaaaaatcaaacaaattttagtacaaaaaatgcagtaactaaaagagctcaatgtgtagatcaagtagcagattagatggtgctgaataaataattaatgaactgaaacgtcagaaaacaatgcatactgaagctcagagagataaacagatggaaaatacagaaaagagcataagagacttatgggatagggtaagtaggcctaacatgcttctacttgaagtctcagaagaagagaacaaagagaatgggatagaagcaatatttgaagagataatggctgtgaatttccctaaactataaaagacttcaagccacagactgaagcattatgagccccaaacaggagaaatacaaagaaaatacaaacagctagaggtaaaaaagacgtattatcttcagtggagcaacagcatggttgacagctgacttctgaacaaaagcaatggaaagcagatgacagtggaatgaaagtgtagaaaggaatacccttcaaaaatgaaggtgaactaaagatgttttcagacaagaaaaatatgagaaaatatatcgccagcagacttgcactaaaagaaatactaaatggcattatttaggcagaaggaaaatgatcccaaatagaatcttagaaatgcagtaaagaatgaggagca

SEQ ID NO: 66157 - DNA, 951 bp, Homo sapiens
cataaattcactgacggtggagaaaccttcctcaaggagtcatacctccttatacatgagcgaactcatacaagagcaaaagactgtgaacacagtacctatagaaatgccttcctcaggaaccccgccattgttaaacaagagtgagcgcctagtgggcagaaatgtagtgattgtggaacaaccttttccaagaaatcaagcctttgtagttaatcaggaatttgaacagagaataagcctcacaaatgaagtgaatgtggccccatcagtaataaattatatcttgtatcttacagatattgtatcagaataaatcttctgataccagaaaggtgggaaaatctttagtaggaatcctccagccattatatcccagagagctcatttagggctgaaacactgtggaggcagtggttgtggaggacatttctgtgagaagtcaaacctgttaaacaccattgaaatcatgttgggtagaaatgcagctgttatgaggaagtctttacctggagatgatatctcaattggtatcaaaagaattcttacaggaatatttatgaaagattgtgatggtgcttttagcgctaaattgtgcctcgtgtgccaaagaaacatagacaactgtagaggcaatggatatggaaaacatttttcgtaaaatatgggagaatttatagaaaagaaaaactcttgaaagtaagaaatgatggcaactcaccaaattaactcatgtatcatacttttatgtcttgagagtcttggagggacgtgtttaatgaaatcttgaaccccaggaatagtattatgtaatgaaaacctatgaatataacaaatatggaagtaaaattgtgttagtttcttatgagtgttgcaccaaactaacacaaatttaatggcttaaaacaacacaaaatcattatcttacagttctggaggactgaagtccaa

SEQ ID NO: 66158 - DNA, 934 bp, Homo sapiens
gcagacgccagtggctttggctctgcagcgccaaggaggcggcgtggcgtcatgctccggggagcgcacaggtttccttccagtcgaacaattaacttcagatccagcaggtttgacccaccctcacctgctgggacatgcgagtgctggtgtctggaaggagggccgggctgtgctgagctctggggggccggtccccacagctcccccgacagggcccccggggcctcctctataaatcaggggtccgtgctcccagcctgcttcgaggggtttctgcttggcgtgtgggttctaagtgcgagctgctgtgtgtggaggctcctgagcaccgggtgcccctcgcgcgtgtgggtcccggggcagcccagctgcacacaggatggtccgggggtgcgggtgggggcagagctgagcatggcgtgtacttggccacagaagtcttgctgtggtgccgctggacccctgctaggaggacagggtcccctctctcacgaagcacacggacctccagagtccctgcccctgcagtcctgggagcctgcagttggggctggagttggcctctcggagccacccaaacggagaggcccatgagaggggagctcaggggtccagcagaggctgacagagtggcctctttgtcctgttggcggcccctgctcatgcctggggcgtcctccctggagctgggggagctcagggacccccaggtctgtgtggctgcccctgccactccaggcacagcggcacggccctcactctttacctatttggaattggaggcaatgagtggcaagaacatgatgacagacacgggaggtaaaaatatgttcactggctgttccctttataaataagaagtggtgggacttgcgctgctatttttaaatagaccagagagtacactggagaaggcattgagtggttttat

SEQ ID NO: 66159 - DNA, 1818 bp, Homo sapiens
gcggctctacttcctttattgaggtctcaagttccagcctccgcccgtctcgggacaagaccaggcggggttctgcacgcggccgcccgggcaagcccagcagatgccccgtcaggagtactcgcagaggtgggccgcagcctgcgggaacagtgggaagctgccttccagccacttcatgatgtgctgcaggtggccgccgtggctgcagccctggcaccacacgaagagacccttgactacgtggtggcagacggcacacatgctggcgcacgtgtggccacctgtcgcagaacccagccccggctgctcatgggccgcttgcagtggctgcagttgacgtgcagggtggtggaggcctggttgaggcagctgacggcgcggctggtgctcagcttgaccacctcgttggacacgttccagaggcggaagcgctgcagcaggtcgatgtaggaagtgtaccagtgctcctgggtctgctcgtcgatgtccttgcgcacccgttcacccaggacgatgagcacagacacagccatctgcacgtcgccctgctcagcgtagaagtgcagcatgtcgcgcaccagcacgccgaagaagtcgggcggcaggcggctgtcgtagagcgcgtgtgagacagacaggagcgagaaggaggagtccacgggggccagggaggccacatccgcctcgctgccgctcacgtgcggggagtcggccttgtcctgcaggtgctcgggcccgggaggcgtgtccacgatctcgtggcgcagcggaaaggcctcctgcggcagcacgcactcagggtcctcggggtgcgcgtgttccggatccagcaggtacagctcgtcctcctcaccttccacgtcacccagcaggtagtcggcaggtacgtcgctgccctcggtttcctcgttatcctcattggtgatgagtgtggccgaggagtcgagcagaactgtgtcgctccgcgcatctcctttgctgcggtccagccgcgtctcactgcccaaccctggggccatatccttcaggttgaaactgttcatgagcgggaggccacaggagccacccttgcccacactgtggttgaggtttgcagtgggcactaggccagggctgcagtagatgatccgcagcatggtccacgtttgcgccacctggttgcggccaagctctcgagccacctttgcgttgtggtcacagagctcggccagtggccggccagccagcgcataacgctcagctgtgtccacaaaccagcgcatgccgccgccacctggctccgtctcaaagacactgagggcactggaggcgaggcctgcgaagggctcggcagggtccagcttgcgcttaaagaagatggggtggcgccggtcgccagtgtagggcttgcgccccgactcggcagccacgaggctctccttggcggcgaaggccaggtccccgaagaggccgtagcagaggccctcagggttggcgcgctcgacgggttggctggcgtcgcggaacaggtgctggcacagcgagctgtccttggagccagacagcaggaaggaggggtcgtgggggtggcgccaggcaattcccgtggtgacgtctcggtgttcctcaaacatggcagctggcacgaagggccggcgcacgtcccaaacatagatgttgtggtcccccatcatggagcacgtggccaggtggtggcggcactctggccgccacttcacacgggccaccgaggcgatggtctgcacacagtgcatctccttggcacggtgcgtggtcatgtcccagacctcctcgtgccaagcttggctgaatgtc

SEQ ID NO: 66160 - DNA, 2170 bp, Homo sapiens
ctgtaattttcttccagagccagcaattctggcaacactacactttcgatttatagcaaagcacacaagtagcagtgtctttgaaaagaaaggataaaagaatcaatgaaaaagttactagttcttaaagatctgtgtctcattcgaggaacttaaggacctctccctcaatctaaaagcagaatgcactcttgctgcttactcccagcatgccctcagctgttcctatttactcctggaggaaggcaatgatatttgagtctgggttatcaacaatcctttaattttttatttttatttttttccctgggatttcgaaccaatatactcctagcctgaacaacatagaacatttcctttccattttggtagaaattattttttaatgtaaattatattgtgttctatttgtttccaatgtcttgaaaagttcaatcacttctccaaattctccgaataaacataagaaaatatctctccccagcactacccggtcccccagtatcaccatcctaaaggcacttccacttcctctatcatcagggaaggagtgtgcagttctgatttagctcctcagtggagtaaagggaatttagaggaagggggatttctgcagaaattgtcagttacacaagtaagttcctcttggttccccgtttcatcaaaagtgaaaaactgttcacaggagtgcccatgtcccctgtttccctatgcatcactagagccaagaggggactccgccagcaaggcaccctctgctctgtcccgcagatcacagtccccgactttcaccccattgtttgtgcaatgtgcagaactggagcccaaagcagcgggctcaggatcactctccaggcccggcgggcccatagactccttccttggctgggaagaggggctttcgtgaaagcagagcttgacaagccccagtactgtcatggtcaagatcaccaacactactactgctgtgctcacaaatatgaagaccacggcagaggaggagtcgaaagcctgaggagtggcagaggaagtcgtagaattaaacttggaaatcacgctccctgatggggtgatagtggcctttgactcggcttgaagggacatttgaagggtagacatcgtgctctgtgatccccatcgaggaatctcaggaatagatgttactgaattgtcttgttcagggacaagtggtgtctctcccagcttctcgtcgaccctgattggccatgttctctgcggcacggggctggttgcagtggccggcgggcgcctggtgggcaccccggtccccccaagggtcggctgtccttccccactggtcacacaagaagcggaccgtccttccccagctcgaagcccgtagcacattcgcaggcaaagcctcccaagtcgtctaggcagttagggagctctgcgcatttgccagcacggaggtacctcccggggcagggacacaacacatcgcccgagagtttgtcccagcgagcgccgatttcgtccgcgatgcaagtaactgagatcgggagctgtccccggcagagcgcactcacctcggtcccaggtggactgaagtccagagcggcgctgtgcagctggaagggcgcgcgatagctcaagttagaggcggccccggggcgcggcgcaggacacaagacctcaaactggtacttgcacaggtagccgttggcgcgcaggtggcatcgcatctccttccagcctgcgggctcgaccccaccggtggcctggagtaccgcgcatctccgcgcggtgcaggagcgttggggctcctccacccactgcagcgtgtcgctttcgagaccgccggggtcggaggacagccaggagaaaccccgcaaaggctcgttctccagggtgcagtgggaacgcctgcgctccagtgcgacccagaacagcaggtctttggagccccctccgggccctgggcctgcccgcaggagcgcgagcacagcgcgcagctcggcgcccgcacgcacggtgttgagcgccccacctcgcaggatgcaggcctcctcggccgcctgccgcttcatggtagcgtggtgcagcctgtagcaggcccccgaggccgtgcagccagcaaggtcggatgtggggtgttggccgccgcccggcccgggccagagcgcctgcccctcatgccaagctgagc

SEQ ID NO: 66161 - DNA, 1836 bp, Homo sapiens
ctgccccattccctggcctggtttcctaacctcttcttcctcccctgccctgcttcccttcctccaccaccctgctctcaaaggcctcctctccagacccctggaagggaggcttccccatctttagttttccactctgccccggggggcacccttctactcctagccacgtcccttgggaccggtgggactggaggaggaacggtcaccctcctcccccatggaggtttccaggggtcccccagacatgaaagaggggtgagctggaggaagtcatggtgtcactggggtacaggggggtgaatgaagggcatgcaggccctcagcccgggctgtgccagccctcccagccccaggcccatctgagggaccaagacgctgttacgcaggcccttctttccagctatcagcactttcagcatcggctcttcagcagatccaaaccccctcagcaacttgcagaggacctgtcccctctcaaaagtcccctggcctagggtggggacccccaaacctacggcaaagccagcaacagtagcagcctgctcccatttgctggggaggagatcatcttgttcccctggccccccactctccctccatgtccatccaaaaaccataaaatcactgggttccacatcagcctccatgaggccaagccttgtacctgcaaggctcttggcctaaccattcctctgtcctcttctctggcctgcctggggagcccgtgaaggccgcacgggtgcctccagcctgagacatcaggggagagcctgcagctgagttcagcagaaaggaggaatcctggccctcaggaagaagatagtcacatgtttttcttccttgtccccacagcccccagaacaacattctccctgctggcagcccttccatgtctccaaacctgggtcagagtgaaaggacctttgggggtgggtgggagcaaagggcccacctgctggttggtgaaagcagtggtgccggagtgctaggtaccgcacgagagggtgcgggggcttgggaagcagaccagggttggacaaaaccccatgagggcggggagctggaagaaaagtctcttggggacctctggggcaaggagctgagaagtcctgcagcaccaggtgagacttgcttacagtggatgccacttctaggcctctggaccgcagatgccctcctccctcctgcacacctggcctcctgggcctccaggtaaagagagagagccagcccagccctgtttcccctcagtcctcctttgctcctgctgcttctcccaacagcccactgttaggaggtagtagaccccagcctcaaggctctgaccttcttcatgtgggcacagagggtcctgacactctggcagggcctgagctggggcaggcctccctcagggccaggggcgatggcaccccggggacaggcagacctccttcctgccgtcagcacccccttccttatcactgtctggtctccgagcttcggctgcagcctgaggtgtgtcctgggctcctcagagcctgaagcaagcttttggaagcctgcagtcctcccagctccagtgcaaaagcctctctctccagcctttccccaggcaggagttggggttgggggcctctgtccctcatcgcttaccttggaaaggtgggaagctggcaatctgcaccttggggcctgggctccccctctctgtgccagcggcttcccagcacctgggaggggctgcagccccagctggactccagcctgtccctcttagcactctagctgccccactccagggcagggactcgaaaccccctccgtcctgagcagccacctccagggccctgt

SEQ ID NO: 66162 - DNA, 1771 bp, Homo sapiens
taaggagtgtgggaaagccttcaccaggtcttgtcaacttactcagcacagaaaaactcacactggagagaaaccttataaatgtaaggattgtgggagagccttcactgtttcctcttgcttaagtcaacatatgaaaatccatgtgggtgagaagccttatgaatgcaaggaatgtgggatagccttcactagatcttctcaacttactgaacatttaaaaactcacactgcaaaggatccctttgaatgtaagatatgtggaaaatcctttagaaattcctcatgcctcagtgatcactttcgaattcacactggaataaaaccctataaatgtaaggattgtgggaaagccttcactcagaactcagaccttactaagcatgcacgaactcacagtggagagaggccctatgaatgtaaggaatgtggaaaggcctttgccagatcctctcgccttagtgaacatacaagaactcacactggagagaagccttttgaatgtgtcaaatgtgggaaagcctttgctatttcttcaaatcttagtggacatttgagaattcacactggagagaagccctttgagtgcctggaatgtggtaaagcatttacgcattcctccagtcttaataatcacatgcggacccacagcgccaaaaaaccattcacgtgtatggaatgtggcaaagcctttaagtttcccacgtgtgttaaccttcacatgcggatccacactggagaaaaaccctacaaatgtaaacagtgtgggaaatccttcagttactccaattcgtttcagttacatgaacgaactcacactggagagaaaccctatgaatgtaaggagtgcgggaaagccttcagttcttccagttcctttcgaaatcatgaaagaaggcatgcggatgagagactgtcagcataaggaatgtgggaaaacctaaaggtgtccctgttctctctgaagacatgaaaactcactggggagaaaccctatgaatgtaaaaatgtggaagcaactttgtatctcaggtcttaatgaacacatatgaattcacagtggagaagaccctgcatcagggaatgtggaaatgactttgctgaattctcaagccttaccaaacacatcagaaatctcactggagagaaaccgtatgaatgtagagaatctgggaatacctttctgaatcccacaaaccttaatgtgtgtatgtgaactcacattggagagaaaccctgcaatttaaatggtatggtctggatgatgccccactccatatttgtaagccctaagtcctagttccttacactataactgtatttggacatagggttttcaaacaggtgagtaacttcaaatgaggttgttgggttcgatccctaatctgacatcactggtgtccctataagggaaactgaaggaaggatacacatggagaagactgtgtggatccaccagaagatggccatctacaagccaaggacagagacctggaacagatgctttcattatggcctccagaggaaaccaaccctgtctccaccttgatattgcacttccaggctccagaactgtgaggcaataaatttctcttggttaaatcattcagtctgttattttgtacagcaaccctaggaaactaatactgtgaggaacttgggaaaagctttagatcaagcttgtccaacccgcaggccaggatggctttgaatgcagaccaacacaaatttttaagctttcttcaaacataataaattttttttgtgatta

SEQ ID NO: 66163 - DNA, 1082 bp, Homo sapiens
actactatgttatttatttatttatttatttagcggcagggtcccgctccgtcacctaggctagagtgcagtgatgagatcacggctcactgcagcctcaacctcccaggctgaagcaatcctcccacttcagtctccctagtagctggcactacaggcatgtgccaccaaaccaggctaattttcttttttttatttttgtagagaaggggtcttgctctgttgttggtcaggctggtctcaaactcccaacctcaggtgattcgcccgcctcggcctcccaaagtgctgggattacaggcgtgagccacttatgcccggccggatttgcccttattaatggttatttcttgtgaaagattctttttgcctttgcattccttttattctgtttattcccccatgcctcacccaaagagttgcacggtcaattggcccgtgaaggggacgcctactttcaaacaaggcagacaggacacgacaggacggcggctcatagcacagactttggattgcagtggatgggaccagatcctggctccacttctcgctagctgtgtggccctgggcaagctgcttaacctctctgggcctcagtttctccccctgtaaactgggggatgtgaacagcgcctgcctccgagtcctaaggattgggagtagtcgtgtaaagtgctcaggtccacaggccatcaatactaatagttaaaaattattcttagaatcttgcttccctcagctccctgaaaggccactaaggcaccccagttgcagaggccaaaggtccgggaggcttcacagccacggctgtgccccagggtcttggccccggcccacctgcatgtaggtgatgggctccagctgggcggcccggagcttccgcagctgctccttgtccttcctcaggtctgtcttgcagccgatgagcaccatggggatcccgcggcagaaatgcgtgacctcagggaaccactgtggagggaggaggcgggatcaggggcgcggccgggcccagatgtggggccaccacccaggaggccggcctcaccttgatgaggacgttgtcgtagctggtgggattc

SEQ ID NO: 66164 - DNA, 2401 bp, Homo sapiens
agttaatctctttggctgggcctacagatgacatacagagtacaggcccccaggttcatgctttaaatatccttagagcattgttcagagatacgcgcctgggagaaaatattattccttatgttgctgatggagctaaggctgcaattctgggttttacatcaccggtctgggcagtgcgaaattcatccacacttctctttagtgccttgatcacaagaatttttggagttaaaagggcaaaggatgaacattccaaaacaaatagaatgacagggagagagtttttctctcgtttcccagaactctatccttttcttctcaaacagttggaaactgtagccaatacagtagacagtgatatgggagaaccaaatcgtcatccaagcatgtttctcttacttttggtgttggagagactctacgcttccccgatggatggtacttcttctgctctcagcatgggaccttttgttcccttcattatgaggtgtggtcactcacctgtctaccactcccgtgaaatggcagctcgtgccttggtcccatttgttatgatagatcacattcctaataccattcgaactctgttgtccacactccccagctgcactgaccagtgtttccggcaaaaccacattcatgggacacttctccaggtttttcatttggtgcaagcctactcagactccaaacacggaacgaattcagacttccagcacgagctgactgacatcactgtttgtaccaaagccaaactctggctggccaagaggcaaaatccatgtttggtgaccagagctgtatatattgatattctcttcctattgacttgctgcctcaacagatctgcaaaggacaaccagccagttctggagagtcttggcttctgggaggaagtcagagggattatctcaggatcagagctgataacgggattcccttgggccttcaaggtgccaggcctgccccagtacctccagagcctcaccagactagccattgctgcagtgtgggccgcggcagccaagagtggagagcgggagacgaatgtccccatctctttctctcagctgttagaatctgccttccctgaagtgcgctcactaacactggaagccctcttggaaaagttcttagcagcagcctctggacttggagagaagggcgtgccacccttgctgtgcaacatgggagagaagttcttattgttggccatgaaggaaaatcacccagaatgcttctgcaagatactgaaaattctccactgcatggaccctggtgagtggcttccccagacggagcactgtgtccatctgaccccaaaggagttcttgatctggacgatggatattgcttccaatgaaagatctgaaattcagagtgtagctctgagacttgcttccaaagtcatttcccaccacatgcagacatgtgtggagaacagggaattgatagctgctgagctgaagcagtgggttcagctggtcatcttgtcatgtgaagaccatcttcctacagagtctaggctggccgtcgttgaagtcctcaccagtactacaccacttttcctcaccaacccccatcctattcttgagttgcaggatacacttgctctctggaagtgtgtccttacccttctgcagagtgaggagcaagctgttagagatgcagccacggaaaccgtgacaactgccatgtcacaagaaaatacctgccagtcaacagagtttgccttctgccaggtggatgcctccatcgctctggccctggccctggccgtcctgtgtgatctgctccagcagtgggaccagttggcccctggactgcccatcctgctgggatggctgttgggagagagtgatgacctcgtggcctgtgtggagagcatgcatcaggtggaagaagactacctgtttgaaaaagcagaagtcaacttttgggccgagaccctgatctttgtgaaatacctctgcaagcacctcttctgtctcctctcaaagtccggctggcgtcccccaagccctgagatgctctgtcaccttcaaaggatggtgtcagagcagtgcccacctcctgtctcagttcttcagagagcttccaccagctgctgagtttgtgaagacagtggagttcacaagactacgcattcaagaggaaaggactttggcttgcttgaggctgctggcctttttggaaggaaaggaaggggaagacaccctagttctcagtgtttgggactcttatgcagaatcgaggcagttaactcttccaagaacagaagcggcatgttgaagaaaatctgggggattgggatgggggtatgtgtggatttttcctccactaaatctgcaggaaacatgttgaacataaattcaaaaattttatcccaaaaaaaaaa

SEQ ID NO: 66165 - DNA, 1696 bp, Homo sapiens
ccgttttgccggttcgacccacgcgtccgataagtgggagggctcccctcaggcagtttgaaggctcatacaaaagcagttcatacagtagattttacagctgacaaatatcacgtggtctctggggctgatgattatacagttaaattatgggatattccaaactccaaagaaattttgacatttaaagaacactctgattatgtgaggggtggatgtgctagcaaacttaatccggatctctttataacaggatcatatgatcatactgtgaagatgtttgatgcacgaacgagtgagagtgttctctccgttgagcatgggcagccagtggagagtgtcctacttttcccctctggaggtcttctggtgtcagcaggaggtcgttatgttaaagtctgggacatgttaaaaggaggacaattgttagtatctttgaaaaatcatcacaaaaccgtgacatgtttatgtctaagcagctctggacagaggttactctctggctcactggataggaaggtgaaagtatacagcacaacttcctacaaagtagtccacagttttgattatgcagcttcaattttgagtcttgcccttgcacatgaagatgagacaatagttgtaggaatgaccaatggaatactgagtgttaaacatcggaaatctgaagcaaagaaggaatcacttcccagaagaagaaggcctgcatatcgaacctttattaaaggaaaaaattacatgaagcaacgggatgacattttgattaacaggccagcaaagaagcacctagaattgtatgacagggatctgaaacattttcggatctctaaggcactcgatagagttcttgatcccacttgtacaataaagacacccgagattacggtgtccatcataaaggagttaaatcgaagaggagtccttgcaaatgcgcttgcaggtcgggatgagaaggaaatcagtcatgttcttaatttttgataaggaatctttctcagccaagatttgcccctgttttaatcaatgctgctgaaataattattgatatatatctgcctgtaattggtcagtcccctgtagttgataaaaagtttttactacttcaaggacttgtagaaaaagagattgattaccaaagagaattgttagaaaccttggggatgatggatatgctttttgccaccatgagaaggaaggaaggcacttctgtgttggaacacacatctgatggatttccagagaataagaagatagaatcatagtgtctgctaaataagacatataagaactctgaagttggaatagatttgactgtattaaatgttggcgagagactctctttgatacattaaaaaaactgtttgcagaagcagttctatggaagagactggaataattatggccggaaaacaagtacccgttttaagtaagacatggttttccatgtaatattttgaattacagcatcttcacctagaagatctcaattgtcttagtcacagagtaggtttatctgggatggatattaattttaatacaggagtgttctgtatcaacatttgggttggtattcagatgggaattcaaatatgaatcctctctggagagggtccaactgggaatcctgctaaaggagcaaagccttgtattacctctggaagacaacaaaaacaattggcaacaacaaaaaaaaaaa

SEQ ID NO: 66166 - DNA, 1366 bp, Homo sapiens
ttttttttttttaagaatttgtaccagtaaatttattccaagtaagacttgtgtgcacacaccaggcagataatttccacacaaacaccaaacattgtagtaaaactagttaacactttggccatgaaactcaaagatacttgaaaaacctctcgatagcactttgagtcacttaattctgacaaatattaatatgtcatccatgcttgcccagttataattttacaatataattgtatttttcattgtacttattattcattatacttactatatatatttaaaacatctttgctgaaattctcttatcccaaaaataatttttcagtaactccaaaatacccacatgtacctcttagcaggctattccaatatcaaaattctttttcttcaagtaacaagttctcaatccacaccattcctgatcacagatataactgatatgcagttttataaacagctcttttactccttgttcctattttagcaggccaaccatcacttcactgatatcccagagttttcttgcaacagattcatccatagctttgggcaacagttcttcctctttacaatccccaaagtatcttcctgacactccttctacctcaggtgaagaggccaaataaatggaagtctgggcaccttctactggagttttgaaaaaagcccatgacaccaaattgaagagtggtttgaccaacagtggaatgtgtatgtgcctccccagatttgtccgtacaataccaggatgcaacacattgacggtgacatttgtgccttctaagcggcgggctagttccctggtaaaaagaatgttagccagtttgctccggctataacaaaagcttttattatagctttgttcactgttcaagtcatcaaaattgatgtctccgtatttataaagtttggaagaaactaccacaatcctgctgggagctgaacttttgaggagtccaaggagaagattggtgagtagaaagtgccccagatggttcactccgaactgcatctcaaacccatcttcagtcttcatgtaagggcactggaagatccctgcgttattgatcaagacatccagcctaggctcttcctttaaatgtcaaaaagagaatggcagaattattaagaacacacgccttgtattgctttttctgttcatgataattacattttaataaaaatgggcacttgagactaaaagcatttaatttcagttgttggtctatcgatcagagaactacttgaaacactggcaattttgtgtttaataaatggggaaagggattcctccgcaggatgttcctcagataaatactgatgttcatgatctaacattcaacagctcttttttcctcgtgcc

SEQ ID NO: 66167 - DNA, 1835 bp, Homo sapiens
accttatgaatgcaatgaatgtggtaggtcctttattcagagtgcacatcttactcaacatcaaagaatgtatacaggagaaaaactctatgaatgtaatgaatgtgagaaagccttccatgatcactcagctcttattcaacatcatattgtccatactgcagagaaaccctatgaatatcatgactaggaaaactttcagttactgttcagacctcattcaacatcagagaatgcacactggagagaaaccatacaaatgcaatgaatgtgggaatgcctttagtgattgttcatcccttattcagcatcaaagaactcacactggagaagagccttatgaatgtaatgaatgtgagaaagccttccatgatcactcagctcttattcaacatcatattgtccatactgcagagaaaccctatgaatatcatgactgggaaaactttcagttactgttcagacctcattcaacatcagagaatgcacactggagagaaaccatacaaatgcaatgaatgtgggaatgcctttagtgattgttcatcccttattcagcatcaaagaactcacaccggagaagagccttatgaatgtaagcaatgtggaaaagcctttagcagaagcacataccttactcaacatcagagaagtcacgcaggagagaaacagtataaatgcaatgaatgtgagaaaactttcagcctgagttcattccttacacagcacatgagggttcagactggagaaaaaccctacaaatataatgaatatggaaaagcttttagtgactgctcaggacattttcagagaactcacactggagagaagccctgtgaatgtaatgactgtgggaaacctttcagtttctgttcagccctaattcaacataagagaattcataccagaaagaagccctgactgtaccttcataccagtaaatgcactgactgtggaaaagccttcagtgattggttagcacttgttcaacatcagataactcaacactggagaaaaaccgtataaatgtactgaatgtggaaaagccttcagttggagtacagacctcaaaaatcaccagaaaactcatactagtgaaaaatcctataaatgtaatgaatgtagaaaggcctttagttactgctctggtcttattcaatgtcaggtcattcatactatagaaaaaccttatgaatacggtaaatgtggcaaagcctttaggcagaggacagaccttaaaaaacatcagaaaatgcataccgaagagaaaccctatgaatgtaatgaatgtgggaaagcctttagccagagcacatatcttacaaaacaccaaaaaattcatagtgaagagaaatcaaatatacatactgagtgtggggaaaccattagacaaaactcttctttttacaacaataaaacctcacactggagagttctctgaatgccttaagaatttggttaatatggagacccttcccagggaaacagaaggaggatcgtgaaaaccgttgactacttagaatgatcacatggtttagtggagagagcatgattctgggttttaaaagtcatggatctcaatctcagctcctattactaactagatcttttactttggggtaagtcacttcatatctttaggccttaatttcctcatctgaaaaactggaaggcctgacttgacttgttgagcttaagatcctcaattattatatttactaggaattcaagtttctatagatgtggttcagaattgtgacttatttattgtacatcaggtgtgattcacaagtgagcttgtagtagttattaaggagtcaataaagatatgatat

SEQ ID NO: 66168 - DNA, 1035 bp, Homo sapiens
  misc_feature (1)...(1035): n = a,t,c or g
aaattttcgggtcgacgggaggcaggaggtgaggaacaagcaggctgtataacaaacagctacacaggcaggggaagttttaactaagacaaagacgatgggggtattggagctgagataaataaacagctaactggcatatttcacttttggttctttaccatccatatgcactctcctacacacataggaatttctttggaataattaaacaagtctatattcctacctaagaagatatgagggaagaagtcctcacccacccccaaaggagcagatgcgcagttcaaacagtcctttgtattcccatggcacgccatgtcaattactcctcaaatttagtcccattctaactattctgtttcttaaagacaaaattataaatgtaacctctaataatgtgtatataaaataaaagtgggaaaaagatagaagtaaatggttcatttaaataaataaacacatggatataaacacacatacgtataacaagcagagagaaaacatgcaaaactacatttcttgtttctgtcactggtcttgaggttgtagttgatgtccatggtttacttcttcagtgactaattccatattttccctgccctccacttgaacctcagctgctccgggttttgtaccagggaggagcgatccaaatcttcgttcgcccagagtccgaatcctctgttgtcctgctttcgttcagttgtggttttccattaaccttttctatggagtatagaagtactcggaggttctacacttcatcacttcatcctccttgcctcaattgtctagcagtgccacagttttcctttgataattgggattaaccactccagccagtagattaacttttttcttttttttttttgccctttggtttagggggaaatgaaacccaaaagggccaagggggagtcccctgttccaatggattaaaacacaaagttgggccccccgtggggagggcttttccccttggggncttaaaaaaaaactcccggacccacagggcctttgattggctggaag

SEQ ID NO: 66169 - DNA, 4945 bp, Homo sapiens
  misc_feature (1)...(4945): n = a,t,c or g
gtgaggaaggggtgctcattctacctgtatctggtggctgagggtgctgaccacaggcgaggagtagctgtgctgcgaggggggcgtcaggaactgggctgcggtcacgggtgggaccagcgaggatggcagcgacgtgggcagggcggggctctcctggggcagaatagtgtgcaccgccaggctgctggggcccagtggctgcacgtctgcctggctcggctctccactcaggaagctccggcccaggtggccgctggctgctgagctcacgccaaggtgcggctgtggtggtggtggtggcggctgcaggctttgctgctgctggatgtttgctggctgcaggttctgctgctgcatctgtaagttttgtggctgcacctgctgggtctgcaccaggtgaggctgggtggccagccgggtgctgggcaggccctggtagctcatcatctgggacagggcgctggcagcaaggctactgtgcagcgggcctaccatgccatgctgcagggagggggcctgtgtgctcagggggcctggtgccacactcccccgcagagggttgtattggttcggcaccatgccgctctgcagccgggacagccactcgcattgaccattcaaactggtggacccgcccacagtgaaattcagggcccctccgctgctggagcccaggacggtgctggtgccagaggccacaggcaggtgggagagacgaggtgggccagtctcaaaggccagccggccgcccccacccagcgccgccatctcgggcttggccgccacgttcaggtgcccgatgcccaggtgggtgtcgggcatcccaggcaggtggttgaggggcacggacggagactgctggaacggggagggcagcagtggcggcgaggccacgtctgacaggtagccatggggtgactccagggagtccacgggcgagagcatgccggagctgtccagcaggcagcccttgccatcctgggacttcttcctccgtgccttgaggtccttggcctccttgcttccacaggccaggcctttgctgctgggcttgcggaccttcttgccctgcacgccgggcttgaggctgcccaggtagccgttgggcgagcagagcgggggcgacagggtgggcgtgccccccagcggggctccgtgcagctgcgggctgcgcaccaggttgtactcgtccagcagcctcacgatgtcgtgatgcatgcgctcctgtgcgatgtcgcgcggcaggcggtccatatgatccgtgatgtcccggttggcaaagtggtccagcagcaccttggcggtctcgtagctgccctcccgggcggccagaaacaggggtgtctcctccctgttgttctgcatatctttgttagccccgttcttcaggagcacaactgcggcatccacattgttcacggcggcggcccagtgcagggcggacttgcccaggtcatctacggcgttgacgtcggcgtgtgagttgatgaggtcctccagcatgccctccacggccaggcgggcagccaggatcagtggcgtcgtgccatcatgcatgcgggcatccaggtctgtggctcggttccggatcaggatctggaagacaccttgtgcgtcggcagacacagccgcatgcagcggggtgcggcccatgttgtcctggatgttggcatctgcgctggcctccagcaggcgcttggcggcatcagagcgtgagtagcgggcggccaggtgcaaggcggtctcgcccgtgcggtctgtctggttgtgcaggctggcgccctggtagatgaagtcggagatgacggccggcgcgtcctcctcttcctcgctgttgcccgtctccaggccgcccccgctgcaggaggcgatcatgagcggggtgaagccatcaggcccgcggacattgacgtccaatgcaatcggcgtcaaacctcaaccctgggggcggtgtgggggccatggcaagaacatgcgcaggtcagcggcatcccaggtgctgctgaagtccactgccggtggtctgtctggtcgtccaggtcaggcagaaccacgggctcctcgaaccggaacttcttggtctccaggtcctcgtccccccactcattctggttgtcgtccatgagggcaccgtctgaagcgttcttcagcggcttgaggcccacgggagtcctcgccgaggggctcccgccgcttcttcttgctggcctcagacactttgaagccctcagggaaccagagctggccatgctgccgccggcgcttgcgggacagcagcaccccgcagcccacgaagaacagaagcacaaaggcggccgccgccacgtacatgaagtgcagctgcgccggcgggggcggctccacggtctcactctgcacggcctcgatcttgtaggggatgttgaggctgcccagcgaggcgagcgctcccaggaatgcggccacgtcggtggcactctggaagcactgcgaggaggcctgcacacactgccggttgtcaatctccaggtagacgatggagccgcggacgtccatggggtccagctccctccgccgccgcccaccctcgctgccaccagggagcagcgaggccttcacctggcccagcagggcgtcaggtgcggcccagccctcggcggcacgcttgatggggtgcttgcgcagctcctcctcgcggccgtagtaaggggaagatcatctgctggccgctgagcgtcacgctttgaagaccacgttggtgttgcagcacgcgggcttgaactcccgcaggaaagtggaaaggagctgttgcgcagctgctccggcggcatcagcaccaccactcaccgcgtgccggccgcncagcctctcgggtacatgctccgcacagtccagcccgtcccactcgcactccgcgctgttgcagccctggtcgcagtgcccgtcgctgaagtggtccttgcagtactggtcgtacagggggttgcactggccttccgcacgctggcagtcaaagccgtcgaagaggcagccggctgagttgcactggctgtcacagtggccgtcactgaagtacttccagcactgcagagactgcgtgcagttcttccaggggtcattgaagttgagggagcagtcaccgccgtcccagccgcacgcgtggttgttgcactgcaggctgcagaccttgttgcccgcgtcctcctggcactcgggcagctcgcacgcctcctcgatcagcggcggggggatgtcgcgcccggccccacccccgaagctgtagtccaggatgtggcacaagagcccgttgaatttggcggggcacaggcaacggtagaaggggctctcggatgtgggctcacaggtcccctggttgtagcaggggttgccgcccaggcaggggctgctggccgggaactggcattcggggcccgtgaaggggcccaggcacaggcaggtggggctgcgcgggccggagatgcatgtgccgccgttgaggcagcgcaggctgccgcaggtacgagcgtcattctcacacgtggcgccctcgaagcccgcagggcacttgcagatgaaacccgcgggcggtgttggaggccacggcgcaggtgcccccattcttgcagggcttgcctttgcagccattgatgacggactcgcagcggcgcccggtgtgaccagcacggcactcgcagtggaagtcattgacgcgctgcacgcagttctgggtgccacgggcgtcgcagggattggacaggcactcgttgacatccccctcacagcgctcacccacgaagcccggcgggcaggtgcagctgtagccgcccacctggtccacgcaggtgccgttgttaaagcacttggggctccgggacacggggtcaacggggggattgcagtcgtccacgttgatctcacagtgcacaccctgagtgccccgtgggcaggagcacttgtaggtgttggggaggtcgaggcaggtgcccccgttctggcaggggtgggagaggcactcgtcgatctcctcagagcagttcaccccgtggtagccggccacgcacttgcaggagtagccgcccaggtagtccgtgcaggtggccccgttctggcaggggctgggtgagcactcgtccaccaggtcctcacagtagctgcctgtgtagcccgcctggcagcggcagtggtgcgtgttgcccgcgtccacacagagccctccatgctggcacaggcgggcaacgtcaacaccttgtcgctgcgcagccacctcacaggacacgctgggcacgtcgcagtaaaggccggtccagccgctggggcactcgcagcggtactgggtgtgggtctgccagcatttgccgccgttcttgcagggcgaggagtcacaccagtgcacaaggttctggcagttggggccagtgtagccctgggggcaggtgcacctgtggagaccgcgaccgtcctgacaggtgccgcctagcaggcagggtcgtgagtcgcactcattgactacgtgctggcagtagctgcccgtgaagccgggtggacacaggcaggtgaacgagttgatgccgtccacgcaggtgccaccgttgaagcaggagctctctgtgcagtcaggcgtgttgttctcacagtggatcccgctgaagcctgcggggcaggtgcacgtgtagctgtccacgcagtccgtgcagttggccccgttgcggcaggggtcactggcacactcgttgatgtcctcctcacagaaagtgccccggaagccgggcaggcagtcgcagaaggccgtgttgatgccgtctgtgcaggagcccccgttgtgacacgggttgggccggcagtcgtcgatgtcggtctcgcagttgcgcccactgtagccggcctggcagtggcagcggtagccgccgtgggtgttctggcaggatgcgccgtgccggcacgggctcagaacgcactcgttgat

SEQ ID NO: 66170 - DNA, 2495 bp, Homo sapiens
ggaggcaggaggaggggctgccacctgtggtggatgccattgatgacgcctctgtggaggaggacttggcagtcgctgtggcaggtggccggttggaagaagtgagcttcctacagccctacccagcccggcgacgtcgagctctgctgagggcttcaggtgtgcgaaggatcgatcgggaggagaagcgggagctgcaggcactgcgccaatcccgggaggattgtggctgtcactgcgataggatctgcgaccctgagacctgcagctgcagcctggcaggcatcaagtgccagatggaccacacagcattcccctgtggctgctgcagggagggctgtgagaaccccatgggccgtgtggaatttaatcaggcaagagttcagacccatttcatccacacactcacccgcctgcagttggaacaggaggctgagagctttagggagctggaggcccctgcccagggcagcccacccagccctggtgaggaggccctggtccctactttcccactggccaagccccccatgaacaatgagctgggagacaacagctgcagcagcgacatgactgattcttccacagcatcttcatcagcatcgggcactagtgaggctcctgactgccccacccacccaggcctgcctggccctggcttccagcctggcgttgatgatgacagcctggcacgcatcttgagtttcagtgactctgacttcggtggggaggaggaggaagaggaggaagggagtgtggggaacctggacaacctcagctgcttccatccagctgacatctttggtactagtgaccctggtggcctggccagctggacccacagctattctggctgtagcttcacatcaggcatcctggatgagaatgccaacctggatgccagctgcttcctaaatggtggccttgaagggtcaagggaaggcagccttcctggcacctcagtgccacccagcatggacgctggccggagtagctcagtggatctcagcttgtcttcttgtgactcctttgagttactccaggctctgccagattatagtctggggcctcactacacatcacagaaggtgtctgacagcctggacaacatcgaggcacctcacttccccctgcctggcctgtctccacctggggatgccagcagttgcttcctggagtccctcatgggcttctccgagccagccgccgaagccctagatccctttattgacagccagtttgaggacactgtcccagcatctctaatggagcctgtgccggtgtgaggaccaggatgtcttttcccagccccaagagacctgttgctgctttcttgtaattatggggctccccagagtctgcgtaacagtctcccactggctggctcacccacaggtgccatgtgcacactcctggttttcaaacaattctctggatttatttatttgttttaacttttctgtgctgaagagaggactagggggagggggcttcccctttcagctgcccggccccccacacccacagcttgctcttctatctccacaacgtgagcctggaagaggagaaaatgtggctcctctggagcttggcagaccacttttcggtctttgcgtgatgttccttagcccaaagacggtgagacagggctgaaatcaggtggcttctgccaccctgagccctagacccatgggtggctaaatccactggactgtgaagactataatttatttccataatttatttggagattgaggaggctttggttgcacttctttggctggtgggtaatgccaggggtggggtgggcacaggccctcaagagccccttttgccttgtagtcctacaccttgccctgcctgggctttggtgcagactaggtgtggatttgagctctgtgatctatgtctgctgcctggctcctagatggctctgcgggcaggtgctggccaaggacatcatctaggcagggggagagcctgggctgaacagctgtgaccaaaactcccttctgccccaccctgccccctccacttcctgccctctgttccatcttcccccttcccaaaggccacagcctttattccaggcccagggatgtaggagggggaaggaggaaacaggaagcccagagagggcaaagggcctacctcggggcgcgaaccatgccccagactattatctcagggctttctgggcactgcacttcagcgtggcccacctgcccatgccctgaggccagttggcgaggggtggctcctgagggtttttataccctttgtttgctaatgtttaattttgcatcataatttctacattgtccctgagtgtcagaactataatttattccatttctctctgtgtctgtgccaagaaacgcaggctctgggcctgccccttgcccaggaggccttgccagcctgtgtgcttgtgggaacaccttgtacctgagcttacaggtaccaataaagaggctttatttttaaaaaaaaaa

SEQ ID NO: 66171 - DNA, 959 bp, Homo sapiens
tacggctgcgagaagacgacagaaggggagaaccaggaaggcgctgagcttaaactgaagcaagttcggtggacgccggcggcgccctgatctaaagaaacgactcagggactgcggcgcttgcacgtcaacgggaggtgtgagcccaaagaaatgggacgtcggtcatcagatactgaagaagaaagcagaagcaagagaaaaaagaaacaccgtagacggtcctcctcgagcagttcttcagatagtagaacatacagccgaaagaaaggaggaaggaaatcaagatcaaagtcaagatcttggtccagagatcttcagcctcgttcacattcttatgatagaagacgcaggcatcgatcaagcagtagctcttcttatggctccagaaggaaacgaagtcgaagtcgttcaaggggtcgagggaaatcctatagagttcagaggtctaggtcaaaaagcagaacaagaaggtccaggtcaagacctcgtctccgttctcatagtcgtagcagtgaaaggtccagtcacagaagaacgcgtagtcggtctcgggatagagaacgacgtaagggcagagataaagagaaaagagaaaaggagaaggataaagggaaggacaaggaattacataacatcaaacgtggggaatctggaaacatcaaagctggattagaacatctgccaccagctgaacaggccaaagccagactacagctggttcttgaagctgctgcaaaagctgatgaagcattgaaagccaaagaaagaaatgaggaagaagcaaagagaagaaaggaggaagaccaagccaccctggtagaacaagtaaaaagagtaaaagaaattgaagctattgaaagtgattcttttgttcagcagacattcagatcaagtaaagaagtcaaaaagtcagtggaacctaatggagtgaaacaggcacctttaacatcaggacg

SEQ ID NO: 66172 - DNA, 748 bp, Homo sapiens
tttcgtgcaaagaaaactgtgagagagagaatttttaaaaagcagctggggcctgaggtttctcccccagtaccctgggtcacctcagcccagagctggcggcaggcccccagcccctcatgtcagagccccctgtgtactgtaacctggtggaccttcgccgctgtcctcggtccccacccccaggccctgcatgccccctgctgcagaggctggatgcctgggagcagcacctggaccccaactctggacgctgcttctacataaattcactgactggctgcaagtcctggaagcccccgcgccgcagtcgcagcgagacgaaccctggctccatggaggggacacagaccctgaagaggaacaatgatgtcctgcaacctcaggcaaagggcttcagatctgacacagggaccccagaaccgcttgacccacagggttcactcagcctcagccaacgcacctcgcagcttgaccctccagccttgcaggcccctcgacctctgccgcagctcctggacgacccccatgtgaacctcccatttctttgtgaaggccaagatcctccctgccccccctccccccttttcctgctccacataaacatcttcctctttctgaatatcctcctacccagccctcccccagcaactttaagggacttcactcctgggagaccccctagggaaagccgtggccactatggagggcgagggtgattacagatcccattccctccacttcccag

SEQ ID NO: 66173 - DNA, 1938 bp, Homo sapiens
cgaaaaggaggtcctgtcttcggggagaaacattctaaatcacctgccctctcttcctggggggacccagtcctgctgaagacagatgtgccattgagctcagcagaagaggcagagtgccactgggcagacacagagctgaaccgtcgccgccggcgcttctgcagcaaagttgagggctatggaagtgtatgcagctgcaaggaccccacacccatcgagttcagccctgacccactcccagacaacaaggtcctcaatgtgcctgtggctgtcattgcagggaaccgacccaattacctgtacaggatgctgcgctctctgctttcagcccagggggtgtctcctcagatgataacagttttcattgacggctactatgaggaacccatggatgtggtggcactgtttggtctgaggggcatccagcatactcccatcagcatcaagaatgcccgcgtgtctcagcactacaaggccagcctcactgccactttcaacctgtttccggaggccaagtttgctgtggttctggaagaggacctggacattgctgtggattttttcagtttcctgagccaatccatccacctactggaggaggatgacagcctgtactgcatctctgcctggaatgaccaggggtatgaacacacggctgaggacccagcactactgtaccgtgtggagaccatgcctgggctgggctgggtgctcaggaggtccttgtacaaggaggagcttgagcccaagtggcctacaccggaaaagctctgggattgggacatgtggatgcggatgcctgaacaacgccggggccgagagtgcatcatccctgacgtttcccgatcctaccactttggcatcgtcggcctcaacatgaatggctactttcacgaggcctacttcaagaagcacaagttcaacacggttccaggtgtccagctcaggaatgtggacagtctgaagaaagaagcttatgaagtggaagttcacaggctgctcagtgaggctgaggttctggaccacagcaagaacccttgtgaagactctttcctgccagacacagagggccacacctacgtggcctttattcgaatggagaaagatgatgacttcaccacctggacccagcttgccaagtgcctccatatctgggacctggatgtgcgtggcaaccatcggggcctgtggagattgtttcggaagaagaaccacttcctggtggtgggggtcccggcttccccctactcagtgaagaagccaccctcagtcaccccaattttcctggagccacccccaaaggaggagggagccccaggagccccagaacagacatgagacctcctccaggaccctgcggggctgggtactgtgtacccccaggctggctagcccttccctccatcctgtaggattttgtagatgctggtaggggctggggctaccttgtttttaacatgagacttaattactaactccaaggggagggttcccctgctccaacaccccgttcctgagttaaaagtctatttatttacttccttgttggagaagggcaggagagtacctgggaatcattacgatccctagcagctcatcctgccctttgaataccctcactttccaggcctggctcagaatctaacctatttattgactgtcctgagggccttgaaaacaggccgaacctggagggcctggatttctttttgggctggaatgctgccctgagggtggggctggctcttactcaggaaactgctgtgcccaacccatggacaggcccagctggggcccacatgctgacacagactcactcagagacccttagacactggaccaggcctcctctcagccttctctttgtccagatttccaaagctggataagttggtcattgattaaaaaaggagaagccctctgggaaaaaaaaaa

SEQ ID NO: 66174 - DNA, 2186 bp, Homo sapiens
cggataaagacgctgggagattgacatgcatttcgaccaatagcattgcagagaggcgtatcatttcgcggatgttccaatcagtacgcagagagtcgccgtctccaaggtgaaagcggaagtagggccttcgcgcacctcatggaatcccttctgcagcacctggatcgcttttccgagcttctggcggtctcaagcactacctacgtcagcacctgggaccccgccaccgtgcgccgggccttgcagtgggcgcgctacctgcgccacatccatcggcgctttggtcggcatggccccattcgcacggctctggagcggcggctgcacaaccagtggaggcaagagggcggctttgggcggggtccagttccgggattagcgaacttccaggccctcggtcactgtgacgtcctgctctctctgcgcctgctggagaaccgggccctcggggatgcagctcgttaccacctggtgcagcaactctttcccggcccgggcgtccgggacgccgatgaggagacactccaagagagcctggcccgccttgcccgccggcggtctgcggtgcacatgctgcgcttcaatggctatagagagaacccaaatctccaggaggactctctgatgaagacccaggcggagctgctgctggagcgtctgcaggaggtggggaaggccgaagcggagcgtcccgccaggtttctcagcagcctgtgggagcgcttgcctcagaacaacttcctgaaggtgatagcggtggcgctgttgcagccgcctttgtctcgtcggccccaagaagagttggaacccggcatccacaaatcacctggagaggggagccaagtgctagtccactggcttctggggaattcggaagtctttgctgccttttgtcgcgccctcccagccgggcttttgactttagtgactagccgccacccagcgctgtctcctgtctatctgggtctgctaacagactggggtcaacgtttgcactatgaccttcagaaaggcatttgggttggaactgagtcccaagatgtgccctgggaggagttgcacaataggtttcaaagcctctgtcaggcccctccacctctgaaagataaagttctaactgccctggagacctgtaaagcgcaggatggagattttgaagaacctggtcttagcatctggacagacctcttattagctcttcgtagtggtgcatttaggaaaagacaagttttgggtctcagcgcaggcctcagttctgtataggcaatgctgtgttattacttgaatatagaatatatagtttacaaaatgaaaattccaatgttctcaccaaatatatgccttcgtgtgtccaaagtataattattttagatgctaattttgaatagtttattaaacagttataaatatgcaaagtagctggcatgtagtgtcacggattttctggatagaggaagtgattggaagtattccacttaaagccatggaattagcaatagtttgctttttaatagaaggcccatttgtaagaatgttgaaaatatgtgtaccgtttaaagaaaaagcagctttaaagtgacaaacaaaataccctttttcttttagtatgggttatttttctaggttttctgtccctccctcagtagtgaagagttttctttattcctggcagtgtcaggaatattggtttgaaaagctgttggcctatctggagtttggccttgttaacctagtattctaaccagttaaccagccttagtatgcattaaaattgtattgttcagaaagtttgtttctcattttctgcaaattcttactttgaaaatgaatcaccacatagtatgtccctttaaagcattgacgcacagacaaatgtttaaagcacagtaaatacaaatatatgcctttggatattaaattaatgcttgatgataaaagaatcaaacttttttttttttgaaagggagtctcgctttgtcacccaaactggagggcaggggggggatcactgttaagggcaacctttgcctcccaggatcaagcaattttgactcaccctcccaagtagctgggattacaggggcaggccaccatgcccggctaattttttgtatttttagtaaaaacggggtttaaccatgctggccaggctggtctcaaacacctgaccttgggatccgtcc

SEQ ID NO: 66175 - DNA, 2461 bp, Homo sapiens
tttcgtctcctgcggcgcatgcgtcgcgcccaaacgaggccggcgttggagaaaggcaggcaacgcatgcgtagttgatgtagggagtcggcggtgagaaatggacagcccgcattgaccgaagctttgcgcatgcgttttactgctgggtgaagccgaacctcgggagcccaggacgccctcctgcacatgcgcaggaggctcaatgacagtcgagctttggctaaggctccggggaaagggtctagccatgctgcatgtgacccggggggtctgggggtccagggtccgagtatggccactgttgcccgcgctcctcgggcccccccgggccctctcatcgctggcagccaaaatgggggagtatcgcaagatgtggaaccccagggagccccgcgactgggcccagcagtaccgcgagcgcttcattcccttctccaaggagcagctgctccgcctcctaatacaggaattccactcgagtccggcagagaaggcggctttggaggcgttctcggcccacgtggacttctgcaccctgttccactaccaccaaatcctggcccggctgcaggccttatatgaccccatcaaccctgacagggagaccctcgatcagccatcactaacggatccccagcgtctgtctaatgagcaggaggtgcttcgggctctggagcccctgctggcccaggccaacttctccccgctgtctgaggacaccctggcctacgcgctggtggtccaccaccctcaggatgaggtccaggtgacagtaaatttggatcagtatgtctacattcacttctgggccctgggccagcgagtcgggcagatgcccctgaagtccagcgtgggctccaggcgtggcttcttcaccaagctgccccctgcggagaggagatactttaagcgggtggtcctggcagcccggaccaaacggggacacctggtactgaagagtttcaaggacacgccgctggaaggcctggagcagctgctgccggagctgaaggtgcgcacgcccaccctgcagcgcgccctgctcaacctcatgctggtagtctccggcgtggcgatcttcgtcaacgtgggcatggtggtgctaaccgacctcaaggtggccacctccctgctgctgctgctcttcgccatcttcatgggcctgcgggcctccaagatgttcgggcagcggcgcaacgcgcaggcgttggagctggcgcacatgctgtactatcgcagtacgtccaacaactcggagctgctcagcgccctggccctgcgcgcgcaggacgagcacaccaaggaggcgctgctggctcacagcttcctggcccggcggccagggggcactcaaggctcgcccgaagagacctccaggtggctccggtcggaggtggagaactggctcctagccaagtcaggctgtgaggtgaccttcaacggaactcgggccctggcgcatctgcaggccctgacccccagcatgggattgtacccacccccgggtttccccaaactagacccagtggctccgatcacttccgagcccccgcaagccacgcccagcagtaacatctcctgagtagaacctacctccctgcccagtcagcaggctaggaactaagccccgcctccttcacgacaggctgtcaattacggttattatacttttcactccaacttccaataactgacaggtgattatttttgctgcactgtgtgcttaagcaaagcagccaatcaaagcagctagcagttgttaagtcttccccgccccttcgatgaacagccaatcaaagcgatttagctctgcttctgttccatttcttagtcccaccctcaccataaacatccaagtgtggtttggctgaggagctgagggtgtctgccaatcacagctgctcagctctggcttctgtaaaccgccaggtagaagagttaaagctgcgccctcccgagactatatatcattgtctttttcagcccgctccgggcaaactgcccatcatgtgcaccaaggccgttagccctgcctcctggcaaacgtccagtgacagctgctgggttccatcaactttgggcagccggttgtcgctgcagggaaggaaccaataagaatttctaaaggaaacctgatcttgctatcaattgctgctgcttaaatggcaggccaactggtcagctgctgatcagggtgtctaggctgaaggagttggagaccttgtgctaggtaggtgaaccagaaaccaccctcgccaccaagactcgctcccaacctggctcccggcaacctcaggtgccttcctcgcccaggtctttcaccctttctacagaaactcacctcggtctggatctcccccaccaccagcagccttgtgcaatatttattggtctatcaatttctccccgtctccctgtcccaaaagtaataaatcatgtttaataaaaaaaaaaaaaa

SEQ ID NO: 66176 - DNA, 759 bp, Homo sapiens
tttcgtccaggacgaggtggccaggcggcccccatggcgtccctggtctaggcggagaaccgcctgggcgatgagtgagaacctcgacaacgagggcccgaagcccgtggagagctgtggccaggagagcagcagtgccctgagctgccctaccgtctcggtgccccctgcagccccggcagccctggaggaggtggagaaagagggcgctggggcggctacagggccggggcctcagcccgggctctacagctacatcagggatgacttgtttacctctgagatctttaaactggagctgcagaacgtgcctcgccacgccagcttcagcgacgtccggcgcttcctgggccgctttggtctgcagccccacaaaaccaaactctttgggcaaccaccctgcgcctttgtgacattccgcagcgctgcagagagggacaaggccctgcgcgttttgcatggtgccctctggaaaggccgcccactcagtgtgcgcctggcccggcccaaggccgaccccatggccaggaggaggcgacaggagggtgagagtgagccaccagtaacacgagtggccgacgtggtgacccctctatggacagtgccctatgctgagcagcttgagcggaagcagctggagtgcgagcaggtgctgcacaaacttgccaagtgagtgtgggcgcaaaacaaccctcttggccagggctctgcccggcctgtgcttcctgagcctgtccgaattccaccgcgttttttcag

SEQ ID NO: 66177 - DNA, 2183 bp, Homo sapiens
ttttttttttttgagacggagtctcgctctgtcgcccaggctggagtgcagtggcgcgatctcggctcactgcaagctccgcctcccgggttcacgccattctcctgcctcagcctcccgagtagctgggactacaggcgcccgctaccacgcccggctaattttttgtatttttagtagagacggggtttcaccgtgttagccaggatggtctcgatctcctgacctcgtgatccgcccgcctcggcctcccaaagtgctgggattacaggcgtgagccaccgagcccggcccaagagaataggggagccaaggaggaaatgtggaaacgcagttgtgtggcccagcacgagcctgggcgaccaccgggtgacatccgtcccacatcagggcggcctcccaggtcccataagggtagccccctcatctgcaggacagagggaagccagtcagggcccccccggacgttaggaccaggagaaatcaacaggagggcagcccgtcctctctcttggggcgcccacccggcccggctgagccctgccccacccaactccacagggctgttttgcctccccacggaaggcgggctgaggagacaaccagatcaggagagcaaggtcatgaaggaggggacctctccacacaggtgttccgtgggaccctcagcagctctggctctgcctcaggaggtcacctgccgccctgtgggagccgcagagcctgacgctcagccccaggccagctgcggccaggcctgcgggcccctggtgatggggttacgtggggtgcgggatacagctgagtgggaaccggaaacctattctctttttaacaaaaataatcttaggataagaattattttaacaacatataaaactgtttcaagccctcctccccagagctggcgctcagcagccctagcggctgctccttcaggcgaagggtggtttgcagatgtggggagggtgtctggggacgttgctgagctggctgcagaagggtggggatatcagggcacagtctccatgtgtgtgccaagccctggcccccacagcgctcgatggacctcagcaagctgcccagccctggcccaggtgccccgactgtgggactcagttgttctgagcacatttgactccacttttcctttaaaaatgaatgtcttgttcctgtgcattggtggcatcacagaccccagctggggcgcgatgtcaaaggtcgggacagctgtgccgggaggcagccacagggaagctcacacatcctgtcagtgtcaccttggtttgcaaaacccatatccccggtaaaatgaggccggacagaggggctgttaggacagcaaagcagcagtgtccagagacccctcaatccccaaaggtccgcaccctgtcctgcacaccctgggccacgccggccacacccctctgctgcaacaagctcatccctggacttctgggagaatgaacccgaggttggtttggggagacaggtgaggcggttggatctacagaacaacccaccatttctgggggccgcagaggatccatcacagacggatactggggagtaaacggcccaggccaggtgcccaggaaaggacggctgagcatgtggagcgagagggaggcaggtggacgctgcagaccccaggttcagtgcggcccctcggctgttcctcccctgtagggtttggacagacccacccccagccttgcccagctttcaaaggacaaaagggagcatcccccacctactctcaggtttttgaggaaacaaagatttgtggtaactgaaggtgttgggtcagtggccaggtgccgacactgagctgtgacccagaggggacgctgaggaagtgggcgtgagtggacatgtcaggtggttaccaggcactggttgttgatggtcggtggttgggtgtgggcagtcatcagtcatcaggtgtgctcaggggacaatctcccctcaaccgcacatgtgccactgttcagcggagctgactggtttctcctggtagagggccggctgtatcctgacagatgcctggtgagcaggggaagcaggacccagtggtcaacaggtgtctttaactgtcattgtgtgtggaatgtcgcagactcctccacgtggcgggaatgagctgtgtaaatacttcaataaagcctgacttcacatctgca

SEQ ID NO: 66178 - DNA, 2483 bp, Homo sapiens
gagtgatacctgactcctccagaacccttcagggcaggcattttattcatcatttattttaaaaataactgggagtcagaaacagatgctaagaggaggcacattcttcaagttttctaaaagaaccctttctactttggataggacaaaaatgagctttggctgaatgaactgagactagacataagaaggactgagctgctgatgagttatgaatggaagactaacacgcagtctcaaggcaggagaagaagaacatgtgctgttttcctgggagtggggcaactggtggtggctgtgagaaggcagagctcttcagaggggacagccaagaacaggtagtcactgggggccctatttagcctgagaatgcaggagggattgttttatggggtcctccctgcccctcaagacacccttccgccccatccccacaccagggtgctagagaagataggaatatagattttaatcattgtgctgctgctattaaccagagtgcaattaatccatcttttgtggattttgatgccacagtgtaaatgagagggtttcacacagaaacactctgggggccttcggtgacaaaagggctaggcctctggtggggagggggtggcaaaaggtgaagtggaattaggagagatgtggggagcagacccagggctgggagactgctccttccccatcacacatgcccatcaaggaccccaagaggaagggattcttcctgccatggcctgggctgtccaagtgagcctgacttcccttccaaggcagctgcctctagcttcatgtccaattctcgctgagtagatgaggtccagggtaggcccacagttgaccaccaaatggtgaagagatataagccaagggagaagaaagtggtttggaacccccaatcattctccatttttcatcctaagctaccttaaaactagttcagagctggggaaagacagcaacagcagtctatcctctcggtcagaactgctctacctgcctcctggagatgggggtggggggaggtgggactcacaggagggagaggtaggaaatattcctgtgcctttctttgcctgtgcagtaagtgaagactctcttcagagtcagctctgcagctggtggagtcatctgtgcctcttacagttttctgagattggtaggatttggagctatagagaggtcaacttagagccccaaggccagactccactggttgctaacaggagctgacattcttggaagtagccccgactgcttggacaagatcattcctcatgttaagagtgaagtgatatggtccagggcaaaggtactgagcccagagacagctaggagtcagagacacacagggcctccactgcgtcactcagaccctggttgacacctcccacggcgaggaggcagttcttgacgactatgctggagcaggcacagcggggtgtgggcatggcagggaggatctcccatttgttcttccctgggtggaatgcttccgccgtctccaggacagtgggttgattcccaagtcccccagccactatgacccgtccactcagagagccagccacaaaatctgcccgccgcttcttgaggaagaacgatcgttccatcttcagccatcccccctgttccatgtcgaacacgtccatcgtccgcaggaacttgggctgccggtagaggcgaccttgccgcaggcctcctaggctgtacaagtggttgtccagggtcacaaagctggagaaggcccgcttatagggaatgttgggaaacttggtccaggagcgagtctcgatgtcaaagacctcgaaagcgttgaccgcgtacttggactgtcgtccccccagcacgtagatcttggagcctcggaggaaggaggtggcagcatatctcggggtgggcatgggtgctagggacacccacatgtccttcagcatgtcatagtgttggaggtggttgtgtggacgtaggtccaggcccatcccgcctgccgcatatactcggtaatctttggccgtgacagaaatgcccatggcggcctcacgcagcatgctcctcttcttccacttgccctcatcgatgttgtacatctccacgaccttcaggggcagctgattggtgcccacgcccccaatcaccatgatccgcttccccagggcggtgacggccacccccgcccgggctgtgggcagccggggcaaggcggtccactggtcggcctccggggagtagacctcgaagcagtccatggggacgccgttgtcgtcacatcccccgatggcatagacctggcccccggtctccagcagggagcagtagacccggcggctgggcagtggcgccaggcgcttccactggaagtccttgacgttaggcacctccatggcagccttggggagcgcccgggcgccgggagagttgcgagcgcgggggtccaccggctacttggcgccggctcccacggcccctatcgcactaaa

SEQ ID NO: 66179 - DNA, 2451 bp, Homo sapiens
tttcgtcacccaggcagtccctgacgtgtcggggaggagccgggcgcggaggtacgctgagtggagctcggggctgcgtaggggagctgagccgagcggctgggcgggcctggccgggccagcggaggggagacgtcggttgagcggcggcgaacatgcgcttttgacacattggaggctttcttgatcatggatggtgaagatataccagatttttcaagtttaaaggaggaaactgcttattggaaggaactttccttgaagtataagcaaagcttccaggaagctcgggatgagctagttgaattccaggaaggaagcagagaattagaagcagagttggaggcacaattagtacaggctgaacaaagaaatagagacttgcaggctgataaccaaagactgaaatatgaagtggaggcattaaaggagaagctagagcatcaatatgcacagagctataagcaggtctcagtgttagaagatgatttaagtcagactcgggccattaaggagcagttgcataagtatgtgagagagctggagcaggccaacgacgacctggagcgagccaaaagggcaacaatagtttcactggaagactttgaacaaaggctaaaccaggccattgaacgaaatgcatttttagaaagtgaacttgatgaaaaggaatctttgttggtctctgtacagaggttaaaggatgaagcaagagatttaaggcaagaactagcagttcgggaaagacaacaggaagtaactagaaagtcggctcctagctctccaactctagactgtgaaaagatggactccgccgtccaagcatcactttctttgccagctacccctgttggcaaaggaacggagaacacttttccttcaccgaaagctataccaaatggttttggtaccagtccactaactccctctgctaggatatcagcactaaacatcgtgggggatctcttacggaaagtaggggctttagaatccaaattagcagcttgcaggaattttgcaaaggaccaagcatcacgaaaatcctatatttcagggaatgttaactgtggggtgctgaatggcaatggcacaaagttctctcgatcagggcatacatctttcttcgacaaaggggcagtaaacggctttgaccccgctcctcctcctcctggtctgggctcctcgcgtccatcgtcagcgccgggtatgctgcctctcagtgtgtgagtgcctagcctccaggtgggggctcctgccctcctccaacaacccaggacacccacgcctcacccctcggtgcctgggcccagccccgtgcccctccgtctgcctccgcacggctggcagagggcaggctgcatgcagtggcggctactgggccctgcccagccccggaactctgcgcgatatcaatactggctattttctcttctcgccgtagtgccgttggtttcacatgattgcacttttgtgggtcgcaaggtgatacatacgtgtattacttggtcactggatgcagaagtacccattcatcacacctgccccatagcccccactctgctgtactgataggatttagttgtgttttaggacattgcaaatcttctagaagttctcccccaaatcaggtcaatgtgtgccctcctgagctcccacccaggcatctccagtgctcatgatcatgtgtcccccaactccacccctcacagtttgggcctgtttctggcaaagagtcaggaaggttactgaattagggaacattttctgcaccttctgattttacttaagcagctaccattccatggacttgcctcccagagcagcacaatgcccgtctgagccccacgtggcaggagcctctgggacggggcacacacaggcccagcctctgtgctgtctcctcctctgtgcgcctcagactcggggtgagggaggcgggcagcctctcgccagccttcccgtccttcagttcaacgacatctttggagtgtttttgttttctcttccaagggccgtcccgttgtgttaggaagggtgagtggctggttccagggtgggccggtgccagctccggggtggactgaacagcggcggctgtccctgtgcatcctttgattactctcatgctgcatttactgtttacatttgttttattgtacataggtttgtaaacattattgcctgagatatttgtatataacttgggctttgtagcttttatttattcagaacgcatacggcatgttaatgactctgatggtgtcctcctctgggcagctgtataggatcatcatgtggttacaaaaaatacttccctcaaaaaaattcttttaatgtggaaacaataaatttcacagaaaaaaaaaaaaagggggggccgttttaaaggatccttgggggggcccaagtttacccgggcttgcaaggtaatagctttttccttatagggag

SEQ ID NO: 66180 - DNA, 1124 bp, Homo sapiens
gtccggagttcccgggtcgacagtctcccagaacaattcccaggagctcggattccaagagccgcccttgccctcgtttaccttcgctagtcgccctgcagccccgccctgtccggaggccccgccctccatgaatcagctgatcccgcggacccactgggttgccaagctcgcgccggatgcggagcgcggtgctgccggtggagcttcaggtcttgatagactttctgtaaagaaggaatgatttggtgatggagtgttcccactgaccgatggactcaaagaagagaagctcaacagaggcagaaggatccaaggaaagaggcctggtccatatctggcaggcaggatcctttcccataacaccagagagattgccaggctggggaggaaagactgttttgcaggcagccctcggagtgaaacatggagttcttctgactgaagatggtgaggtctacagctttgggactcttccctggagaagtggaccagtggagatttgtccaagtagccccattctagaaaatgccctggttgggcaatatgttattactgtggcaacaggaagcttccatagtggagcagtgacagacaatggtgtcgcgtacatgtggggagagaattctgctggccagtgtgcagtagccaacccgcagtatgtgccggaaccaaatcctgtccgcattgctgattctgaagccagccctttgttagcagtcaggattttacaaatggcgtgtggcgaggagcacactctggcattgtcaataagcaaagagatttgggcatggcgtaccggctgtcaattgggtctcattaccactgcctttccagggacaaagccacaaattgttgaacatcttgcttggcgagaggcgctctcaactgcctgtggggcttccacaattaggccttgttcaatgcctcccttccaggtattgaagcagtcccaaaaccatgcaacaatgcactcccctttgagtactattactgacaaaaatcacctggaatttttggaccgcgttggtggcccttagggggacactgacaaacctttggagaaagacatgcggccttgtcttagcccctcactggaaccctcacggcagaaaaaaattgct

SEQ ID NO: 66181 - DNA, 1173 bp, Homo sapiens
  misc_feature (1)...(1173): n = a,t,c or g
tttcgtgggctctggactctgtatctggaactggtggcgtcggcccaggtcggcgggaaccccctgaaccggaggtacggcagctggagagaactggccaaggctctggccagcaggaacattccagctgtggatccacacctccagttctaccatccccagaggctgagcctcgaggaccacgacattgaccaaggggtgagcagtaacagcagctacttgaagtggaacaagcctgtcccctggctctcagagttccggggccgtgccaacctgcatgtgtttgaagactggtgtggcagctctatccagcagctcaggaggaacctgcatttcccactgtacccccatattcgcacaaccctgaggaagcttgctgtgtcccccaaatggaccaactatggcctccgcatctttggctacctgcacccctttactgatgggaaaatccagtttgccattgctgcagatgacaacgcggagttctggctgagcctcgatgaccaggtctcaggcctccagctgctggccagtgtgggcaagactggaaaggagtggaccgccccgggagagtttgggaaatttcggagccaaatttccaagccggtgagcctgtcagcctcccacaggtactacttcgaggtgctgcacaagcagaatgaggagggcaccgaccacgtggaagttgcatggcgacggaacgaccctggagccaagttcaccatcattgactccctctccctgtccctcttcacaaatgagacgttcctacagatggatgaggtgggccacatcccacagacagcagccagccacgtggactcctccaacgctcttcccagggatgagcagccgcccgctgacatgcttcggcctgacccccgggacaccctctatcgagtgcctctgatccccaagtcgcatctccgccacgtcctgcctgactgtccctacaaacccagctatctggtggatgggcttcctctgcagcgctaccagggactccggtttgttcatctgtcttttgtttaccccaatgactatacccgcctgagccacatgggagacccacaataaatgtttctaccagggaaaacgcctacttaccaagaccggtgagagacactgagtnggggcagggaaggtgaccttgcagagggtctgcgggaccat

SEQ ID NO: 66182 - DNA, 1308 bp, Homo sapiens
gtcgacgatttcgtgtgcgttcactcatgggctggatcctcacgccctcctgccctggcagcttgctgcccgccatccctccatcaaaatcaaagctctgatgcatccttccgtgggactgcaggtctctgtagccaatggggttgctgagctggtggaggtttccctccatctcctggtactgctgggcagagagcaggctgcgaactgactctgcgctccggaactgcatggacgagttaagagtgcccatgttgctcagcttctcagacacattcattccagagtctttgctgaggtcaggcatggaaaatcgggataggtgctcctggcgcttggcaccaccatcagcagagaggcctgttgcattagacagggccagggattccatggagccccgaggggtctgctctgtgggcgtcatgtcctctgtgtatttcagggaactgatgggatgacgggtccgacactgctgagtggacaagcccccttcctcttcctcttcctcccatatttggggacttggatgctgcctcgggtctcactgaaactctgactagacatatcactgtagctctcctgagatctcagcctccccgggtaatagtcttctcggcattccttgatgaagctgccagcatgtcctgtcatggccagtgacgagctccttttggggttgctgaagtgcttgccccacatttcgggctgggccccagccccttgccctcctggactgtaggaagttctgatgttgcactggctgaggagctgcagagggctctgggtctggttctgctccatcttgttcccataatggtagggctcttcccggctcctccagatggggtcccggttgaggctgggtgtctggctggacaggctgagcatgtccatctgcagtgacagggggtctacgtcggctgacagccggttagaactcacttgcagctggctgtgctggttcagcatgggctcctccgtcttgcccttgttcttgccaattttggcactgcgccgggactccttggccctggcattctggaaggcggaatcagaggagtcagaaccattggggtcttccccagcactgcaggccccgtgagcagaatatctggccctgcttcgggaggaatggccgccccaggagggatttcttgcagtgagcacagcagaaacaggtctcagtggcatgccagtgttggccgtcataggtcatttgaccttggtcgatacctatatgttgggcacaggcgtcacaatattctgcataccaggactcgaaacagtggcgacagtaggggcttctct

SEQ ID NO: 66183 - DNA, 1204 bp, Homo sapiens
  misc_feature (1)...(1204): n = a,t,c or g
cccccaactggaaacgaaacccttccctcttttgaaaggttttccccctnatgaaaaaggtggtgcaagaggatccctcctacctcccaagtccctggactatgaccgcttcagccgcaacgaaccccattgggaagggtgtccatcccccttaacaaggtggacctgacccagatgcagaccttctggaaggatctgaagccatgcagcgatgggagtgggagccgaggggagctgctcttgtctctctgctacaacccctctgccaactccatcatcgtgaacatcatcaaagcccggaacctcaaagccatgggacatcgggggcacatcagaccccttacgtgaaggtatggctgattgtacaaaggacaagcgggtgggagaagaagaagacggtgacgattgaagaggaacctgaaccccatgtttcaatgagtccttcgccttcgatatccccacggagaagctgagggagacgaccatcatcatcactgtcatggacaaggacaagctcagccgcaatgacgtcatcggcaagatctacctgtcctggaagagcgggccaggggaggtgaagcactggaaggacatgattgcccgtccccggcagcccgtggcccagtggcaccagctgaaggcctgagtggggccaagggaggcccagggggccgagggcccaggtccccatcatgccctcaccactttatgcacaacgcccggcctgagccccctgccatagggaggggaggaccctgagggctcagccagggaggggtcccaggactcaactgggccccgtttctaggaagtaccagccccatcccccacagtccagctccggggaaggggctctgggaggcattttcctgctttgccccttttcttcctgacttactaatactaaagaagttgggggagctcgagagccagacggccagacaggcagacccctccagaggcccgcccaggtgggcatggtcccccattttctttaaggcagcaccctggagtggagagaggccactccctctccagcccccgatgtggacccggggaggggaggctgaggcgtttggccccggcctggccaggagaggcccatccccagggcagtttcaggtgccggctgggccctgaatgtcgaggataggcatatagcccgttgctgcggcatggaggtggtgccgttccacaatcggtc

SEQ ID NO: 66184 - DNA, 988 bp, Homo sapiens
gtccgattctcgggagacacgcgtcgttattaacctaaaagattctgtgttttgtctatattgcaaactctttggggaaggaaaaaatcaactgaaaaatgaaaatgggtgcaaagattggcaacatttatcacatattcttagtaaacatgaagaaagtgaaatgcacatcaacaatagtgttaagtactcaaaattaaaatctgatctgaaaaaaaataaagctattgatgctgcagaacgcaaattatatgaaaatgagaaaaatgatggtgtgctgttgttgtacacgtaatatacctgagttgttttttggcatgatgatcagaatcttacattactcagaaaacatctgtcctgcaatagtcagtactattgtgttgtaagtctcctctacagagtaacttgcagcagttccttagcaataagtatgatagcaaataaatagcaaagaatgtttccattctaaatctaaaactaattagattcaatcatcattaggcaatgacttcattaggcaatgaagattaacaataggtaattgttaatcttcaaaatctatcaatttacacctatttaaaaattggcatttaatgactgccatttgatgggtttggttaatattctgttcttggccgggcgcaatggctcacgcctgtaatccaagaactttgggaggctcaggcgggtagatcaattgaggtcagaagttcaagaccagcctggccaacgtggcaaaacctcgtctttactaaaaatacaaaaattagccaggtgtggtggcacacacctgtagtcccagctactcaggaggctgaggcaggagaatcgcttgaacccaggaggcagaggttgcagtgagctgagattgcaccactgcagtccagcctgagcaacagagcgagagtcagtctcaaaagaaagaaaaatattatgttctaattaccttgaaagaggaaagaaaggcttgaattgatcaataccagtt

SEQ ID NO: 66185 - DNA, 1642 bp, Homo sapiens
ggaattcaaatgtatgagcagcaggtggtgaagctgagtgaggctgcggctttggttgggctttaggagcaacgggtgtatgcgcttcacctgaggcgctacaatgacgcgctgctcatccatgacaccgtccgcgccgtggatgccttggctgcgctgcaggatttctatcacagggagcacgtcactaaaacccagatcctgtgtgccgagcgccggctgctggccctgttcgatgaccgcaagaatgagctggcccacttggcaactcatggcccagagaatccaaaactggagatgctggaaaagatcctgcaaaggcagttcagtagctctaacagccctcggggtatcatcttcacccgcacccgccaaagcgcacactccctcctgctctggctccagcagcagcagggcctgcagactgtggacatccgggcccagctactgattggggctgggaacagcagccagagcacccacatgacccagagggaccagcaagaagtgatccggaagttccaagatggaaccctgaaccttctggtggccacgagtgtggcggaggaggggctggacatcccacattgcaatgtggtggtgcgttatgggctcttgaccaatgaaatctccatggtccaggccaggggcgtgcccgggccgatcagagtgtatacgcgtttgtagcaactgaaggtagccgggagctgaagcgggagctgatcaacgaggcgctggagacgctgatggagcaggcagtggctgctgtgcagaaaatggaccaggccgagtaccaggccaagatccaggatctgcagcaggcagccttgaccaagcgggcggcccaggcagcccagcgggagaaccagcggcagcagttcccagtggagcacgtgcagctactctgcatcaactgcatggtggctgtgggccatggcagcgacctgcggaaggtggagggcacccaccatgtcaatgtgaaccccaacttctcgaactactataatgtctccagggatcctgtggtcatcaacaaagtcttcaaggactggaagcctgggggtgtcatcagctgcaggaactgtggggaggtctggggtctgcagatgatctacaagtcagtgaagctgccagtgctcaaagtccgcagcatgctgctggagacccctcaggggcggatccaggccaaaaagtggtcccgcgtgcccttctccgtgcctgactttgacttcctgcagcattgtgccgagaacttgtcggacctctccctggactgaccacctcattgctgcagtgcccggtttgggctgtagggggcgggagagtctgcagcagactccaggcccctccttcctgaatcatcagctgtgggcatcaggcccaccagccacacaggagtcctgggcaccctggcttaggctcccgcaatgggaaaacaaccggagggccagagcttagtccagacctaccttgtacgcacatagacattttcatatgcactggatggagttagggaaactgaggcaaaagaatttgccatactgtactcagaatcacgacattccttccctaccaaggccacttctattttttgaggctcctcataaaaatcaatgaaaaaatgggatagaaaaaaaaaaaa

SEQ ID NO: 66186 - DNA, 2352 bp, Homo sapiens
cggctccgggagctctgtcaacagtggctacagcccgagacccataccaaggagcagatcctggagctgctggtgctggagcagtttctgatcatcctgcctaaggagctccaggcccgggtgcaggagcatcacccagagagcagggaggacgtggttgttgttctggaggatttgcagctggatcttggagaaacaggacaacaggtggacccagaccagccaaagaaacaaaaaatacttgtggaggagatggcccctctgaaaggagtacaggaacagcaggttcggcatgagtgtgaagttacaaagcctgagaaagagaagggtgaggagacaaggattgagaatgggaagcttattgtagtaacagactcttgtggaagagtagagtcatctgggaaaatatctgaacccatggaggctcataatgagggctctaacttggaaaggcatcaggccaagcccaaagagaagattgagtataaatgctcagaacgtgagcagagattcatccagcacttggacctgattgaacatgcgagtacacacacgggaaagaaactctgcgagtctgatgtgtgtcagagttccagtcttacaggacataagaaagtcctctcttaggagagaaaggtcatccagtgttcatggagttttggggaaagcctttcagaggagttcacacctcgtcagacatcagaaaatccatcttggtgagaagccttatcagtgcaatgagtgtggcaaagtctttagccagaatgcaggccttttggaacatctcagaattcatactggagagaaaccttatctatgtatccattgtggaaaaaattttaggcgcagctctcaccttaatcgacatcagagaattcacagtcaggaggagccctgtgagtgcaaggagtgtggaaaaacctttagtcaggccttactcctcacccaccatcagagaatccatagtcactccaaaagccatcaatgtaacgagtgtggaaaagctttcagtttgacctcagaccttattcgacaccacagaattcatactggagaaaaacctttcaagtgtaacatatgccagaaagccttccgactaaactcacaccttgctcagcatgtaagaatccacaatgaagaaaaaccctatcagtgtagtgaatgtggagaagccttcaggcaaaggtcaggtctttttcaacatcagagatatcaccacaaagacaaactggcttgatgaggtgttctctccttgtagaacatcagagaaggcacattgactagcaaacagcactttaggaaaagtcaccgtagcccactgtggcatcagaaaattcttgggggctgagttggaggctccctgcctctattctctctcctttgctttccttgaagtcagctttggaccacaataatttcactgtagatgatatgctaggatcaaagttaaacagcattcttcactgcaggacatctcagagcatgtaacataactgcatgattatatactctaagcaatagagagcttcatgactgagtaagagttttgaagtcagcagtgaatcaagtgcccacagatttgcaggcttaagcagaacaagggaagattgatatttttggatatgctatagcagctttctcctatgaaataaaactgatgatgtttggaagtatactactctcaaaggtgtctttaaagtacaggttaatggtgaacattttcccccagtggcttcacctcattcctcccactggccttaccccttccttccccagtggaagcattttcaaaagcaaagataattttcgctggtgaacttcagaacttgccttcagggttagcttcatgtaattttaccatttcccatccccattccccaccacattatgtcaagattcaagttataaattaacgttttacttagactttgaaagagatttcatgagtaatttgaatgaaccttgctgaattaatctgaatagcaactgtctgacttgataactccagtgccagtatagtggctgctgcatagacactattcagtaaatgtctgatgaaagaaattggactttttccctttaatactgatgatgcaattttgaaatgttgcttgttctggaatacttcggaagttaaacaataaagtcagcttggagaggagatcatgatctttatactgtgaatagcagaatgtcacagatgaagaatattaaaattaggggcgtccactccaaaacatatcaccagagtgacaacttcagccctcagcctctgcaatccatatatatcctggtcttgggagtccatagaatactgtttccttctaataaaggtttcaaacaaaaaaaaaa

SEQ ID NO: 66187 - DNA, 5039 bp, Homo sapiens; identical to SEQ ID NO: 66005
  misc_feature (1)...(5039): n = a,t,c or g

SEQ ID NO: 66188 - DNA, 805 bp, Homo sapiens
  misc_feature (1)...(805): n = a,t,c or g
aacatgccttaactttgtatgttttataactttccttactaaaggtacatttttataactttcttaatatttcctttcccttcttcctacttcatttctttccttagtctttctttttgcatctttttctgatttctgtctcttctagtctctctcttatttttttctatttctctttctaatgtacaataattagatgagtgttggtaacaatggatatatgtacatatcttagtttccaaaatttagggatgtgtttaacatctgtttgccacaactgattaggttccaatcctctagggttaacacctgtttaaggaggaaacgtgcctgtcagctggtaatctgggcattgtaggataatttgtttagccagtctctgggctagttgaaattgtttagataagtttctccaattttggtggaaaaattgatgtgattgggtggcttggtcaagcagtgatgtcataacctgaaggtctgcttgatcttgccacaagccaatgggccaggcagagatctgtgggctcaaacgtgtgtaataaaaataggatgtgtaccttggtccggcaattgctgaagttgaagaaaaagaggcacacagagtgggctccagagcgaacttaaggctgtaaaagtaatttaataaataaacagaacagcctcagctctccgaatgctagtaaatttagatccagtgattggattacgtggtctccaccagactgccgcttttccatctttaccgaattccaccacacggtctaaaagacatcaatngnnnntnctnatagtcttcaattcc

SEQ ID NO: 66189 - DNA, 1240 bp, Homo sapiens
ttttttttttttctaaagctttatttattttataaaatgcatagaataaattatactagtaacattttaaaaattaacatctttgtattcagcagtcctgggtcaggaggcaggaggagggtggtggggacgggatggctcacttgggcagctaacccgtgtaggccacttcctcctcgtcactgccatcggggaccgcgtctgtcccaaagtagcggtcgccaaagttcccaatgcctgggatgatgcggaaaaaggtcattgacccgcttgtccaccgccgtggtgatgattctcactcgctggaaatgcataggccacctgagtgcacgcccatctctgccatgagcagcgacagcaaaaagatcttgtcctcaggcacgtcgtggtccaggagcacgcgcactgccatcatggccgccgcgcccgtggacacggtgcagtccatgaggatcacgtggtcatcgctgatgtccttgggcagcctcaggtagtggagctgcgggcagcaggggtcaggctgcaggtggggctccctgcgtccccttgctgtgagctccctctgccccctacccccgggctcatcaccccggctgcccccaggcacctcgggctccccggtaagctggttggtctggatgaggatggtgccgatgcgcacgtctttgcacacagcgcgcagcgcgggctccatggtttcaccggcgcgcagaatggacacaccggtgatctgcggggaggggaggctaagcgcccacatcccgccccagcagcctgtcccgcgcccaggtgtgcccaggcaggtacctgcttccccgcatagcacttgcccgcatagtcctgcccctgcggggtctgtacgacgcagtcctgaaagggcaggaaggagagcgcgtgctcgatgagcagccgcatcagtctcttggagtagaagatgaactcgtcgcgactggtctccttgtccctgtggggccaacagttgagcgggagcacgcgcccggggccgccccgtccccaggtgggccctcacctgatgatggtgtgcatgccccgtacctgcggcgtgctcttcaggacgctcagcgtccggggcagcgggtggcactggtgtgccgaggccagcgcagccctggggacaaaccgatggggaacactcaagaagggggtcttttcccagagccctccctccccacaggacggctgtgcgtcactgtgaggggaaccctcggccaagctggcg

SEQ ID NO: 66190 - DNA, 2047 bp, Homo sapiens
caagaagatgaagaacaaaccagcacccaacctcatagggcaccaagcaaggaagaagatgatacagttaactggtattccagtagtgaagaggaagaaggaagcagtgtcaaatcaatactgaaaacattacagaaacaaacagaaactttaaggaatcagcaacaaccttccacagaactcagcactcctactgatccaagacttgctaaagagaaaagtaaaggaaaccaagtggttgaccctaggcttaggactatcccaaggcaagacattagaaagccttctgagtctgccccactggatcttagacttgcgtgggatcccaggaaattgagagggaatggaagtggtcacataggctcttctgttggtggagcaaagtttgatttgcatcatgcaaatgctggcactaatgtcaaacacaaaagaggcgatgatgatgatgaagatacagaaagagaactgagagaaaaagctttcttaatacctttggatgcctcacctggcataatgctccaggatccaaggtcacaattgagacagttcagtcacattaaaatggacattactctaaccaaacccaactttgcaaaacacatcgtgtgggctcccgaagacttacttccagtacctttacctaaacctgatccagtgtcttcaatcaatttacctctgcccccacttatagctgaccagaggctaaatagattatggaatacaaaaagtgatcttcatcaaaacacagtgtccattgatccaaaattagcagccaaagccaaaattaacacaacaaacagagaaggctacctagaacaatttggagactcacacggttcaggagctaaattaggagatcctagactacaaaaaaattttgatcctaggcttcacagactgcccaatacagagtctcatcaagtggttatgaaggattcacatgcatcaaagggtgcccctcacttacccagatcaaaccctggttcatcacagccctcaggggcaggaactagcaattctggttccggggctctgcctccatatgcccctaaactctcttcctcagctggccttccactgggaacttccacttcagttcttagtggtattagtttgtatgaccctagggatcacggttcatcatccacatcagagctagcaacagcttcttcaggagaaaactcaaagaaccagaaaaaaagtggtggcttaaaaagtagtgacaaaactgaaccttctcctggagaagccatccttccacaaaaacccagtccaaacgtgggagtcactcttgaggggccagctgacccacaggcggacgttcccaggagttctggtaaggttcaggtcccagcagtgcacagccttcctgttcaggcattaacaggcttaattaggccacagtacagtgatccaaggcaggcaaggcagccaggacaggggagcccgaccccagataatgatcccggtagagaaacagatgacaaatctctgaaagaggtttttaaaacttttgatccaactgcttcaccattttgttagctattgtgtaactgagcaattcttttcactcttgtgactatctcagtcctctgctgttttgtaactggtttacctctatagtttatttatttttaaattataaacacttttcagctgctagtatcagaaccacatgaagttatagcctctaaagcctgcggtattttatataatatttttataactttaagagactgtagtaattgacctaaaaacttatgttagcttcagtaaaagtacttttattgtaaataaacaatcatgaactcaacactctgcctgaatatatgccagttgtctttcataatcaatgtttagataaatgattgccactttttatatggttgtttagtttcaagcaatatgatgtacattacttttgagaaacagtattttgactaggacctctcttatttgtcagcacagaactgattaatatgtaatgctacctgctaattaaaatgtaaaatcaagtaaagaaaacattttaaaattaaaaaaaaaa

SEQ ID NO: 66191 - DNA, 1707 bp, Homo sapiens
cggacgcgtggggaagaggtcccatttctgagccacagaaacaggccacatccagtaggggtcctggaaggctgtgagaacccagaggagaccctgacccagcctgcaggtagaagactgcctttggaggcagctttgaaagatgactcttccagatggaagaatcaggaagggccttcccacgtggaggcaccagcaggagcaaacgtccctggtgtgttcaggcaaagagccacaggagagtgacctcgtggagtgggaagagattgtttcccattcccttgccagggattggttgaggaatggacaaggcttgcagttcacgcaagccagtgaaatgcgaggggaagtcttgggagtggggtggaggaggtcatctgggaagggtgtccttggtcttaaaaagaggcacaagaggccgggcgcggtggctcttgcctattatcctagcactttgggaggccaaggcagggggatcacttgaggtcaggagttcgagaccagcctggccaacatggtgaaaccccgtctctactaaaaatacaaaaaattagccagacgtggtgccaagcacctgtaatcccagctactcaggaggctgaggcaggagaatcacttgaacccaggaggcagaagttgcagtgagccaagatcgcgccactgcactccagcctgtgtgacaagggcgaaactccatctcaaaaaaaaagggggagggtggcgcaaggagaggacacctctctcctggccctgtcgccatcttccctcatcaatagctaaaaatggcaaagaagaaagagccaggaccccgtgccatcaaatcctccggccttgtgctgccctgtctcggcactgcttgccttaggagatcaggagtgttcctagccactgggagatgggatgcctgccactggcagctctgccgtccatcctcaccatcccaccgtccccccaagacagctctccatcccatcctctgcctcccttctagcctcaacctaactcagggctcccccgtctcacacctgggttgcaggaacatcctcttcaccaacccccctcccatccctcctcagggctgcctagggcagctacaaaaaccaggccagcctctgaaaggtgctccacatctcattaaaaaccgtgaaatcgcactgccccactatcagaatagctcagaggagaaggtctgccagtaccaagtgctggtggggatacggagaagagcagctcccaggcgctgctggtgcaaatgtgctttgttgcacccacggcaggaaactgaccagcttctcatcaagttaaatacgcatctaccctatggcctagcatttccactcttgcttacacatccaggagaaatgagtccttacatgcacaaaaggatgagtaccgtaatactcacatcagcaaataaacaatacagctgtgtgtcagtagtagaatgaataaattgtggtcgattcatacgttagaatacagcaatttaaaaacaactgctacacacaaaaatgttggtgaatctttcagacacaatgttgagcaaaaatagccacagaagagtgtaaggctgtacgattttatttaggtgaggttcaagaacagacaaaacacggtgatagtggtcagaagagcgggtacctctgagctgagggcattgaccagcagtgggcaaaagggaacattctgatcccagaaatgttctat

SEQ ID NO: 66192 - DNA, 1097 bp, Homo sapiens
ggcacgaggccaggacatctaccggctccttctgatggattttgtgttctctttagtcaattccttcctgggggagtttctgaggagaatcattgggatgcaactgatcacaagtcttggccttcaggagtttgacattgccaggaacgttctagaactgatctatgcacaaactctggtgtggattggcatcttcttctgccccctgctgccctttatccaaatgattatgcttttcatcatgttctactccaaaaatatcagcctgatgatgaatttccagcctccgagcaaagcctggcgggcctcacagatgatgactttcttcatcttcttgctctttttcccatccttcaccggggtcttgtgcaccctggccatcaccatctggagattgaagccttcagctgactgtggcccttttcgaggtctgcctctcttcattcactccatctacagctggatcgacaccctaagtacacggcctggctacctgtgggttgtttggatctatcggaacctcattggaagtgtgcacttctttttcatcctcaccctcattgtgctaatcatcacctatctttactggcagatcacagagggaaggaagattatgataaggctgctccatgagcagatcattaatgagggcaaagataaaatgttcctgatagaaaaattgatcaagctgcaggatatggagaagaaagcaaaccccagctcacttgttctggaaaggagagaggtggagcaacaaggctttttgcatttgggggaacatgatggcagtcttgacttgcgatctagaagatcagttcaagaaggtaatccaagggcctgatgactcttttggtaaccagacaccaatcaaataaggggaggagatgaaaatggaatgatttcttccatgccacctgtgcctttaggaactgcccagaagaaaatccaaggctttagccaggagcggaaactgactaccatgtaattatcaaagtaaaattgggcattccatgctatttttaatacctggattgctgatttttcaagacaaaatacttggggttttccaataaagattgttgtaatattgaaatgag

SEQ ID NO: 66193 - DNA, 1380 bp, Homo sapiens
ggaatttattggctaatgctaccgtaaaaggtggtcggacacaattttgattcctaaaggtcctgttagaaagaaaagagagaacatatttatatttacctccctcccctttatacttattatatttaccctcccaaattgtgattgaactttgagccatagctaatttccataatcctgaatgttcctgtcctatggcaggagatatcatttttggaataggggtgataatgccaccagggctccatataataggaacatcagcttccgtctgaatgtaccgtgtatggttctctttccaatgagtccatcagcttattttataagaaggcccttcagtgcaatttttcttaaaaatccccttaggggaccagtcaatgacgattccataggaattattttgtagcaccccagccttacttgctacacaatttccccaatgccaagcgtccacaccttcaaaccaaactctattttgtttacattcgagtttgtctggtcagaactgctgagtttcagggctggaatggttatattttaaactttgccctgaaatcatatataaagtagcctgtgatttattttttccagggattactgccaaccatacttgtgtgccaatttgtaagcatccagcagcaggtcctaggcatattggaggatatttatatcctattgatatattcattttcatcccttcctcattaggatgcatcggcactctgttatctatgggctcaggcatcgaggttctgtcattgttgtacacctcaataatagggtccatccaactcacagacctaattaaaggaggaaatgggacataagtccaataagtaaaattttgagttgcttttacagtagggaggcttaccgccacagtaagtaccaccatcatagccaccattaggttactagttgtttttgatttgttctgtgctctcagattgtcctctgccatctgtgccagtttcctgatttgtccccatgttggagggtctgcctggtgagtattcttggtcttttcctttgtctctgagattttcattcatgccatcactcgtatagggagttctggctcttcccagagtcctctcttcctggtgtggctcatgatagaccttcagatgtttggtgggcacccacagaggcacctgattgtcacttggagagacagaagcaaatcctcttccccatgtaattatttttcctttttcccaactctttgtatgtgcatccctccactgtatatcttgtctggcatttttattttccttttgtcctgttaagtgttgttcagctgctgtcatgggctgatccttttgtaaaattaccccctttaatgttgataaagcgaggtgtagttgtgctggaaaaaaa

SEQ ID NO: 66194 - DNA, 1145 bp, Homo sapiens
acattgcggtggacttctcttccttcgatgccatcactgtaggtaagaaggtcccactggtgctttgcttctttctctccttccatatctcttagtgtctccagagctgcagtacaagttggggggatggactgtaaaagccagaaatcccaagccacaagcacgctgcaggtagcaaccccacacccagcaaaacaccgcttcttcctgcccactttcccctctgcgccaactgtacacaccataccctatgcttgtccatttgggaaactggcttccaggacagcatctttcctggaaagacagcaggaagctgatggtcactcctcaactctctcttgtctctgggcagacaggcaacagcaactgtacatttttaaagggagccatttctgggaggtggcagctgatggcaacgtctcagagccccgtccactgcaggaaagatgggtcgggctgccccccaacattgaggctgcggcagtgtcattgaatgatggagatttctacttcttcaaagggggtcgatgctggaggttccggggccccaagccagtgtggggtctcccacagctgtgccgggcagggggcctgccccgccatcctgacgccgccctcttcttccctcctctgcgccgcctcatcctcttcaagggtgcccgctactacgtgctggcccgagggggactgcaagtggagccctactacccccgaagtctgcaggactggggaggcatccctgaggaggtcagcggcgccctgccgaggcccgatggctccatcatcttcttccgagatgaccgctactggcgcctcgaccaggccaaactgcaggcaaccacctcgggccgctgggccaccgagctgccctggatgggctgctggcatgccaactcggggagcgccctgttctgaaggcacctcctcacctcagaaactggtggtgctctcagggcaaaatcatgttccccacccccggggcagaacccctcttagaagcctctgagtccctctgcagaagaccgggcagcaaagcctccatctggaagtctgtctgccaaagttccttgaagaatgcagcattgtctttgtctgttcccaccacatggaggtgggggtgggatcaatcttaggaaaaagcaaag

SEQ ID NO: 66195 - DNA, 2096 bp, Homo sapiens
tagtccagcgtggtggaattccagaggtgaaacctcacgtgtgtgaggagtgtgggcatggatttatccagaagtcgtcgctcaaatcacatcggagaacacactcaggggagaagccttatgtgtgtggggaatgtgggcggggatttagccggaggatagtcctcaatggacactggaggacacacacgggagagaagccttacacgtgctttgagtgtgggcgaaactttagcctcaagtccgctcttagtgtacatcagaggatacactctggggagaagccttatgcatgcacggagtgtgggcaaggctttatcacgaaatcacagctcatcagacaccagaggacacacacaggagaaaagccttatgtctgcggagagtgtgggcgaggctttatagctcagtcaaccctccactaccaccggagtacacactccaaggaaaaaccttatgtgtgcagccagtgtgggcgaggcttttgtgataaatcaactctcctcgcacacgagcagacacattcaggggagaagccttatgtgtgtggggaatgtgggcggggatttggccggaagatactcctcaacagacactggaggacacacacaggagagaaaccttacgcatgcatcgagtgtgggcgaaactttagccacaagtccactctcagcttacatcagaggatacactcgggggagaagccttatgcatgcgtggagtgtgggcaaagctttaggagaaagtcacagctcatcatacaccagaagatacactcggggaaaagctttagaggtgcaaggagtgaggatgtgattttagcaacaagtcagccatcagccacaccagcggaaatgcttagggagaagccttgtttgtaaggtaatgtggacagagctgtacgtggacatcattacttgtcacgtgtcagaggacacactcgggagaaaccttcatggagtgagagtaaggtgttggctggaagtggccccttaagagatacttggagtcaaatctatccactgtacgcccaccccactcttgttctaagagctttggggacagtcttttgaccccttacattcctttagatgtgaagatgacagagatctaacttctgagagcagaggtgtcaagtgacggtccccttggaggaatggtctttgcatctgactacttccttctgcaactgtgttcttccattagcttccatgacactctcctgctttatttttttctacatctctagcctttgctgtttcctctcctaccccacctttagattttactcagagttcagtctccagccctacaatctgagggacacctttaccaggtccccttcctaaccctccagtcccaaatccaagattctttaaccacactctaaaagttcttcagactcaggacttaaacatagccacgccaccttggccttcaatgacagggatctagcaatgctgcatcatcagccttccaataccaggtttaagggtattttaaacacagctcctcttaaatcctccaatctcagtacccagtgttttagccatgctcgggtggctaaattacatccaggaatggtgccagggcctttagccatttgtctctcctcacactccagggcccatatggcccaggttctgacagtttgccttactcccttggcctggggctagccctacctgataccctgtgtcaatgagtgtaccttggagagctatccactcaggccccagtgcctctatttgctaagggactctgccacagaaaagaaggggagagatgttcatgtaacctcaaaatacttaggcttggttttgatgctagagaggaaaaaggacttggagagagagaaggaatggctggtccagaggcttttgtccactccctctcactggaagtggttgatctccagggaatccccaaggttagcctgcttaggggaagggctaggggtacctggaatgtaggatctcccccatgcctggcctaccaccctaatgtgtccggaattggtgggttcttggtcttgctgacttcaagaatgaagccgtggaccctcacggtgagtgttacaattcttaaaaaaaaaa

SEQ ID NO: 66196 - DNA, 1142 bp, Homo sapiens
attcacatcttattcagcatcaaagaattcacacatgagagtaagcacatgaatgtaatgaatgtggaaaagctttcagtcaaacctcatgccttattcagcatcacaaaatgcataggaaagagaaatcgtatgaatgtaatgagtatgagggcagtttcagtcatagctcagatcttatcctgcaacaagaagtcctcaccagacagaaagcctttgattgtgatgtatgggaaaagaactccagtcagagagcacatctagttcaacatcagagcattcataccaaagagaactcatgaatgtaatgaagatgggaagatatttatcaaattcaggcttcattcagcatctgagagttcacaccagggagaaatcatgtatgtactgcatgtggtaaagccttcagtcatagctcagccattgctcagcatcagataattcacaccagagagaaaccctctgaatgtgacgaatgaagaaaaggtattagtgttaaactcttaatcgactcctgcaaatctataccagtgagaaatcttacaaatgtattgaatgtggcaaatttttcatgctattagtattttcataccttagtcacatttggagaattcacatgggaataaaattccattgctgcaatgaatgtgaaaaagccatcagtcaaagaaactaccttgtttagtatcaaattcacgccatgcaaaaagattataaatgtaataagcatgtatgtgtgtgaggagattcagtcataacccaacgctcattcaacatcaaagaatttatacctaagagaacttatttgggtgtagtaaatggcagatctttcaataggagtttaactagtctttgtcatatcagaatatccatagtagacaagaatttgatgtaacgcaaatggaaaaactcgacaccacatttcaggctttacccaacatcgaaataatggagagaaaattgttgattatttgtttatgaaattgttaatacatagtcccaatctttttcattgcacaaaaatctagggttgacttggtaaatgcagtgacattttctcatggagttcctttatttaatatgtattctaagtaggtacgtttatttttacttttttattataattttgatattaaaaagaa

SEQ ID NO: 66197 - DNA, 1199 bp, Homo sapiens
ttcagtgtggcggaattcccatcgtggagttccacatgacgactgaggcccaagccaccatccgcatggacaccagtgcaagtggccccacccgcctggtcctcagtgactgtgccaccagccatgggagcctgcgcatccaactgctgcataagctctccttcctggtgaacgccttagctaagcaggtcatgaacctcctagtgccatccctgcccaatctagtgaaaaaccagctgtgtcccgtgatcgaggcttccttcaatggcatgtatgcagacctcctgcagctggtgaaggtgcccatttccctcagcattgaccgtctggagtttgaccttctgtatcctgccatcaagggtgacaccattcagctctacctgggggccaagttgttggactcacagggaaaggtgaccaagtggttcaataactctgcagcttccctgacaatgcccaccctggacaacatcccgttcagcctcatcgtgagtcaggacgtggtgaaagctgcagtggctgctgtgctctctccagaagaattcatggtcctgttggactctgtgcttcctgagagtgcccatcggctgaagtcaagcatcgggctgatcaatgaaaaggctgcagataagctgggatctacccagatcgtgaagatcctaactcaggacactcccgagtttttttatagaccaaggccatgccaaggtggcccaactgatcgtgctggaagtgtttccctccagtgaagccctccgccctttgttcaccctgggcatcgaagccagctcggaagctcagttttacaccaaaggtgaccaacttatactcaacttgaataacatcagctctgatcggatccagctgatgaactctgggattggctggttccaacctgatgttctgaaaaacatcatcactgagatcatccactccatcctgctgccgaaccagaatggcaaattaagatctggggtcccagtgtcattggtgaaggccttgggattcgaggcagctgagtcctcactgaccaaggatgcccttgtgcttactccagcctccttgtggaaacccacctctcctgtctcccagtgaagacttggatggcagccatcagggaaggctgggtcccagctgggagtatgggtgtgagctctatagaccatccctctctgcaatcaataaacacttgcctgaaa

SEQ ID NO: 66198 - DNA, 3596 bp, Homo sapiens
gttccagcttgtagaggctactagatttcctcaacttgtgggtgcatgatccaatctctgcctctgtgatcaccttgcctcctcctcttctcctcttctgtatgggtctcctcctctggaggaagagtgtcaggcctctgagcccaagctaagccatcgtatcccctgtgacctgcacgtacacatccagatggccagttcctgccttaactgatgacattatcttgtgaaatgccttctcctggctcatcctggctcagaagctcccctactgagcaccttgtgacccccactcctgcctgccagagaacccccctttttcctttacctacccaactcctataaaacggccccacccctatgtcccttcgctgactctcttttcggactcagcccgcctgcacccaggtgaaataaacagctttattgctcacacaaagcctgtttggtggtctcttcacacggacgcacgtgaaatttggtgccgcgcatgaaatttggtgccgtgactcggatcgggggacctcccttgggagatcaatcccctgtcctcctgctctttgctccgtgagaaacatccacctacgacctcaggtcctcagaccgaccagcccaagaaacatctcaccaatttcaaatccggagcttgctacatgtgccggaaatctggccactgggccaaggaatgcccgcagcccgggattcctcctaagccgcgtcccatctgtgtgggaccccactgaaaatcggactgttcaactcacctggcagccactcccagagcccctggaactctggcccaaggctctctgactgactccttcccagatcttctcggcttagcggctgaagactgacactgcccgatcgcctcggaagccccctagaccatcacggacgccgagcttcgggtaactctcacagtggaaggtaagcccgtccccttcttaatcaatacagaggctactcactccacattaccttcttttcaagggcctctttcccttgcctccataactgttgtgggtattgacggtcaggcttctaaacctcttaaaactccccaactctggtgccaacttagacaatactcttttaagcactcctttttagttatccccacctgcccagttcccttattaggctgagacactttaactaaattatctgcttccctgactattcctggactacagctatatctcattgccgcccttcttcccaatccaaagcctcctttgcgtcctcctcttgtattcccccaccttaacccacaagtataagatacctctactccctccttggtgaccgatcatgcaccccttaccatctcattaaaacctaatcacccttaccccactcaacgccaatatcccatcccacagcatgctttaaaaagattaaagcctgttatcactcgcctgctacagcatggccttttaaagcctataaactctccttaaaattcccccattttacctgtcctaaaaccagacaagccttacaagttagttcaggatctgcgccttatcaaccaaattgttttgcctatacaccccatggtgccaaacccatatactctcctatcctcaatacctccctccacaacccattattctgttctggatctcaaacatgctttctttactattcctttccacccttcatcccagcctctcttcgctttcacttggactgaccctgacacccatcaagctcagcaaattacctgggctgtactgctgcaaagcttcacagacagcccccattacttcagtcaagcccaaatttcatcctcatctgttacctatctcggcataattctcataaaaacacacgtgctctccctgccaatcgtgtctgactgatctctcaaaccccagcaccttctacaaaacaacaactcctttccttcctaggcatggttagcgtggtcagaattcttacacaagagccaggaccacaccctgtagcctttctgtccaaacaacttgaccttactgttttagcctagccctcatgtctgcatgcagcggctgccactgctttaatacttttagaggccctcaaaatcacaaactatgctcaactcactctctacagttctcataacttccaaaatctattttcttcctcatacctgacgcatatactttctgcttcccagctccttcagctgtactcactctttgttgagtctcccacaattaccgttgttcctggcccagacttcaatccggcctcccacattattcctgataccacacctgacccccatgactgtatctctctgatccacctgacattcaccccatttccccatatttccttctttcctgttcctcaccctgatcacgcttgatttattgatggcggttccaccaggcctaatcgccacacaccagcaaaggcaggctatgctatagtacaagccactagcccgcctcttagaacctctcatttcctttccatcgtggaaatctatcctcaaggaaataacttctcagtgttccatctgctattctactactcctcaaggattattcaggccccttcccttccccacacatcaagctccaggatttgcccccacccagggactggcaaattagctttacctcaacaatgccctgaggtcaggaaactaaaatacctcttagtctaaatagacactttcactggataggtagaggcctttcctgcagggtctgagaaggccaccgcagtcatttcttccattctgtcagacataattcctcagtttagccttcccacctcaatacagtctgataacagacgagcctttattagtcaaatcagccaagcagtttttcaggctcttagtattctgtgaaacctttatatcccttaaggtcctccatcttcaagaaaagtagaatggactaaaggtcttttaaaaacacacctcaccaagctcagccaccaacttaaaaaggactggacaatacttttaccactttcccttctcagaattcaggcctgtcctcagaatgctacagggtacagcccatttaagctcctgtatagatgctcctttttattaggccccagtctcattccagacaccagagaacaaaccccctttgactgtaattttccattaccttccctaatcctataaaacggccccaccccatctccctttgctgactctcttttcggactcagcccgcctgcacccaggtgaaataaacagccttgttgctacacaaagcctgtttggtggtctcttcacatggacgcgcatgaaatgtggcgcatgaaatttggtgccgtgactctgatcgggggacctcccttgggagatcaatcccccgtcctcctgctctttgctccgtgagaaagatccacctatgacctcaggtcctcagactgaccagcccaagaaacatctcaccaatttcaaatccggaccccactggaaatcggactgttcaactcacctggcagccactcccagagcccctggaactcttgcccaaggctctctgactgactccttcttggcttaacggctgaagactgacgctgcccgattgcctcggaagccccgtagaccatcacagatgccgagc

SEQ ID NO: 66199 - DNA, 2331 bp, Homo sapiens
ttttttttttttctaggtccaatggtagtttttattccccaggaacaaagataatgtggagaagaaactccaaaaggaaacagagcacggatgacagaaatgacaccacggcagcctggctcaggagtcaggtagatagatggctgctccacagtggacctggtcatggccctggtttcttggatccacatttgccccgtctcttaagtgtccatctcagaggtggaggatggagacagtgaggtggaaaacgtgcttgctctacacaaagacaaatggatcttctattcccagaggaccagggacaccaaaacctccctcttcagaatggaggtagacagataaaaatgagaggggcttgagtgtcacagacaatctgaaagtaataataggggctcactgtggctggcagaactggtactgaaatggggactacaggggaagcagcttccagttttatggtggagagtcagtcctgaatcaggccctggggcaattataaccagagtgctgtttctagccacttacttcaaaggactatggctatgttgaatcagaagccattatctttttcccagaggatgcacttccatccctatttctggcatgatcctgctccctacgagcctgatcctttaaaaaacagattggcaagcgacgagaaaaacggtgcctcacatgcttgagatgtgacagcttctcctgcaggcaagaacctctcagaacaaggtcctttggtatgagctagatcatccaggcctgtccctgcagaacacaccaagactcatccctgtactacagggtggcctctggctatggcctggcacagtgaggacagaggcggggtcctgagtcaacatcacagggaggtctcctggaggatgcaggtggagctgctcccctgataggctgtgccatccagggccatggcctccttgtctctgctgtcccccagcacaccattcctcggcttctcaggaaacaggccagtgtcgaggtggtcctggccgtagctcctgcagtggagccgcttctgacaggacaacggaaggagggacaggagctttggcaacactgggtaaatggttgcagggttcagggaccggcctcgcattctccatgaatggaaatgtgcttgtgagtctatgggtggatccatccacagcagcgggccccatgtcctcccttggcccccagagaccccagcccccacccacctcctacatcccagcagaaaagcatgacagctacggacacccaaggagctcagagggcaggagcctttctccctaggagtccccttagggccctcttgttaaacccctccggtgcttcatctgcaccgcaatccccacacccttaccaagtgaagtagactgacaaatcaggccccaccacaaatcactgtggtggagttgtgagcactgtaccataagtaagacaaggaatagaaccgctgcagccctgtgggcctgggaagagcagaggtgagaacaattagcaattcgttggcagggcgattccttgggcaccaatctctacttgcccgcatggtcccagggtcttgggacccaatacccaacatttccctggggcctctggtggcccatcccttagcaagacccctgtgaaagccctcaaaggaggactttgagaaaacaagaagatagcaagccctgccttacttggagaaggtagtcaagggcatcagtgtggtcacagtggcaacggttagattggtgggcagggagaagctggacccattagagggagagggtggcatgctgaagcccatgctggtcacgatgctcccgatgccaatccagaaggccatgacgagcccagccaacaggcccacaacagcaccctgccgagacacagtgcaggcctgtcacaaggccagtcctgccagccctcacggcagtcctcagctctcctggtgacagccctgccaacccccaggtccatcctgctacacatgactgtggatccagatgcatcactcacaggagggttagcacatggaaagaacattccaaggcagaagagtcccagcagcggtcccccaaccatgccaaagatgctgattgctgcctgcagcacaggtcccatctgggaggaaatataggccattcctagacaaagcagcccatagccaaaggctgggggaaaaggacaggagaggaaacaagaaggtgtgagttaacacaagcaatggggtaaagcaaggctccctgcccagccaaactaccacctctgtctctctggaaacaaaaggcatattacatcacgccccagcttcctcccaccaagtcctcactcctatgtgac

SEQ ID NO: 66200 - DNA, 1980 bp, Homo sapiens
aggggactctcttctccccgcttgtctctggcccctgcagaggcttggaaggccaaaaagaagcaggagctgcagcatgccaacagttccccactgctccggggcagccactccttggagctccgggcctgtgagttaggaaatagaggttccaagaacctttcccaaagcccaggagctgtgccccaagctctggttgcctggcgggccctgggaccgaaactcctcagctcctcaaatgagctggttactcgtcatctccctccagcacccctctttcctcatgaaactcccccaactcagagtcaacagacccagcctccggtggcaccacaggctccctcctccatcctgctgccagcagcccccatccccatccttagcccctgcagtccccctagcccccaggcctcttccctctctggccccagcccagcttccagtcgcctgtccagctcctcactgtcatccctgggggaggatcaagacagcgtgctgacccctgaggaggtagccctgtgcttggaactcagtgagggtgaggagactcccaggaacagcgtctctcccatgccaagggctccttcaccccccaccacctatgggtacatcagcgtcccaacagcctcagagttcacggacatgggcaggactggaggaggggtggggcccaaggggggagtcttgctgtgcccacctcggccctgcctcacccccacccccagcgagggctccttagccaatggttggggctcagcctctgaggacaatgccgccagcgccagagccagccttgtcagctcctccgatggctccttcctcgctgatgctcactttgcccgggccctggcagtggctgtggatagctttggtttcggtctagagcccagggaggcagactgcgtcttcatagatgcctcatcacctccctccccacgggatgagatcttcctgacccccaacctctccctgcccctgtgggagtggaggccagactggttggaagacatggaggtcagccacacccagcggctgggaagggggatgcctccctggccccctgactctcagatctcttcccagagaagtcagctccactgtcgtatgcccaaggctggtgcttctcctgtagattactcctgaaccgtgtccctgagacttcccagacgggaatcagaaccacttctcctgtccacccacaagacctgggctgtggtgtgtgggtcttggcctgtgtttctctgcagctggggtccaccttcccaagcctccagagagttctccctccacgattgtgaaaacaaatgaaaacaaaattagagcaaagctgacctggagccctcagggagcaaaacatcatctccacctgactcctagccactgctttctcctctgtgccatccactcccaccaccaggttgttttggcctgaggagcagccctgcctgctgctcttcccccaccatttggatcacaggaagtggaggagccagaggtgcctttgtggaggacagcagtggctgctgggagagggctgtggaggaaggagcttctcggagccccctctcagccttacctgggcccctcctctagagaagagctcaactctctcccaacctcaccatggaaagaaaataattatgaatgccactgaggcactgaggccctacctcatgccaaacaaagggttcaaggctgggtctagcgaggatgctgaaggaagggaggtatgagaccgtaggtcaaaagcaccatcctcgtactgttgtcactatgagcttaagaaatttgataccataaaatggtaaagacttgagttctgtgagatcattccccggagcaccatttttaggggagcacctggagagatggcaagaatttcctgagttaggcagggatcaggcattcattgacactcagggagtgtcacacatttctgttctgcaattaaagggagaatgaggttcatccaccaaattt

SEQ ID NO: 66201 - DNA, 1824 bp, Homo sapiens
ttttttttttttaaaaggtaataggtgtttattaaaaactttttcacccagaggcagttaacatttataacttaaaacccagcccactacaaaaagggatgggagcaataaaaactgtgcaacattgaccaaaggacccaaacagacgaggcccgggaagggcagccccaggggactggggtctctcctctcccgaggcccagagcagctgcattgtggaagccgggatgcccccagcccctggcggggccctgtgcaccgggcctctccggctggggcagggacccccgaaaggccatcagtagtagtgtgtgctcatcgcgcagcctggacgctcagccactcactctgctccgccattgctgaggctgcaccccacggcggctcgatgtgaacgccagttgccgctcccgcggtctccctccagtgtgctctggatttccttcaggactctctcatcactgagcagagcgcgctccatcaccaggccgggctgcttctcctcgccatcactctgagtccctgagttcctggctcggctcggggccttcttggggcccgcaccgttaccagggcggtggttcttggtttctgctgaatccaccagacaccggggctccaccagccacttggtggagagagagaagcgctcaaactccgagggtgagatcaggtagaagccttggccatatttggtgaagacgcaggaggcgatgccactgacgtcctcccggcggatgcagctgtagcgcacctggggcttgagcaggggcagcgagaccacctggatgtcgcccaggttggtaaggactgccaggtggtgctccccgtagtcctcggctcgacgactgccgaagtgggccacgctgacccgccgcactcttgagccctccagggccgtcagcttcaacttcagcttggcactcaccttgggcagcgtgaacaccttgaactgctcctctgatacgacgagcagctggtggcttccctgcatgtcagggctcttcgacagatcatgggccacttcgaggggctcgggaaggggtacgctgtgtccgtcgagcaccaggatgcccaccaccggcgcccggtgcatcagctggatctccttggcctgctctgcccgcacaggctcatccattctccgctcggcgggaggcacacgcagggagaaggcatagatggtgcccccattggtgccagcccacagcgaggggcagtgccgggagctgtccttcaggtaggtgtcagcaaagtacagggtccggacgaagcctgtgaaggagtcctctgccgagcgagcctcgatcttgcgctgcacaggcgccagctccatgttctggaggcctggccgctcagccttggcactcccctcctgtgcctcaggcctcacctctcctggggggccagctgggtgccgcttccggctggacacccggctccgacgcatccggcggaatgactgacgcaaggacttcttgagggacttgacgcgggagagtgggccctccaaggccagctggtctctggggtgcagtgtgcacttaacaaagacctgccgccgctgctggtggtcaaagaggccaaagccatggctggtgccgaaggccacgagccgccactcagagtgcagggccaaggaggtgaccacagccgggggctgacactgcaccaacacgaagggctgaaagccaggctcaaagcgcacgggccctgagcgggctgccaggcgctcgtgccccttccagcggtagccctcttggtcaaaaagcaggtaagcctccacctgctccacagccagctccgctgcctcgtcattcagtt

SEQ ID NO: 66202 - DNA, 1299 bp, Homo sapiens
ctgtggtggaattcgtacctctgagtgtcctctaggatctcagctggtgcctaacaatgacctctttagactcagctcattttcactgctacatcttcaagccattctcctgcctcttggcaacctctagtggcccagcttctgcctcacagcagcctctccatgcatgcctagctcctgcctctttagggaacttacaggcctaaaactttcttaatttgggcttctcaggcccagctcctgccttctgttggcctctacaggcctggcatcatcctttcaacagcctctttaggcccggcctctccaggaccaaaacatccttaagtcaacctcaccaggcccggctcctgtctccttgcggcctccagaggccgagcttttgcctgccaatggcctctctagccccagcttttgcctgccaatggcctctctagccccagcttctgcctttcatcggtctctccaggcttagctcctttctcttcacggcctctgcaggcctaaaacttcctcaatttggcatctccaggcccagctcctgcctccaggccgcctctgcaggcctatctcaagccttacaacagcctctttacccccagctcctttctccgacttgtctctccaggcctagaacttcctcatgtttacctcaccaggcccacctcctgccttccagtagcgtctacaagtttggctcctgcctcccatggatctctccaggccccaaactttctcaagtcaacctcaccaggcccggcttctccctttcatcagccttccaaaggccagcttttgcttcatgtctgccttccgagtcccagctcctgttttatggcagcctcctgaggcccagctcctgcctcctagtggcctcttttggcccaactctttcctcaccagggccttccagaccacgttcctgccttttagcagccactacaggcccagctttgcgtcctttcaagagtcctgcctcacagtggcctcccaagggcaactttctgcctcatgtcagcctcttgtgccctggtcctgcttcctggtagactctgcaggccctgctcctgccttacgttgccccttttataaagatccagttcctgcctcctggctgcctctatgagcccaaatcctgcctaacaacaacctgtttttgcccagctcctgcttcctggcagcctccttaggccaaaaatttccttcagttgacctctccaggcccatcctcctgcctctcagcaccctctttaggcccagctcctgccttaataaatttgaataaattattgttatgtg

SEQ ID NO: 66203 - DNA, 2188 bp, Homo sapiens
gtacagtgcggtggaattcgctgaccatgagccgctgggggttcatgtctgggctctgaacccctttaggctggttcttcgtcggatcctgcgtcgagctgtgcgtttcttcatggagatcttaaaggcaccacctggcttcctaggcagcctggtacctgtagtggtggagacactgggagatgcttatccagaactgcaaaggaactcagcccagatcgccaacctggtgtcagaggacgaggcagccttcctggcctccctggagcggggtaggcggatcattgatcggactctgaggaccctggggccttcagatatgttccctgctgaagtggcctggtccttgtcactgtgtggagacctgggactccccttggacatggtagagctgatgctggaggagaaaggggtccagctagactccgctggactggagcggttggcccaagaggaggcccagcaccgggcacggcaggctgagccagttcagaagcagggattgtggcttgatgtccatgcgcttggggagctgcagcgccaaggagtgcccccaactgacgacagccccaagtacaactactccctgcgacccagcggaagttatgagttcggcacctgtgaggcccaggtgttgcaactgtatacagaggacgggacagcagtggcctccgtggggaaaggccagcgctgtggcctcctcttggacaggaccaacttctacgcagaacaggggggccaggcttcagaccgtggctacctggtgcgggcagggcaagaggacgtgctgttcccagtagcccgggcccaggtctgtggaggtttcatcctgcatgaggcagtagcccctgagtgcctgcggttaggggaccaggtgcagctgcatgtggatgaggcctggcgtctaggctgcatggcgaagcatacggccacccacctgctgaactgggcactgaggcagaccctgggccctggcacagagcagcagggctcccatctcaatcctgagcagctgcgcttggatgtgaccacccagaccccattgaccccagagcagctccgggcagtggagaacactgtgcaggaggccgtggggcaggatgaggctgtgtacatggaggaggtgcccctggcgctcactgcccaggtccctggcctgcgctctctggatgaggtttacccagaccctgtgcgggtggtatcagtgggggtgcccgtggcccatgcattggacccagcctcccaagccgcactgcagacctctgtggagctatgctgtgggacgtgagtcactcctttgtgctgcctggcccaggggacccggatccttgcccttcccttggtctttggagccatcagcccttaatgggagatgcacgctggcttctcccttctctactgtcatgccccgactttctgttcactccttcctcccacaggcacctgttacgtactggggctgtaggggacctggttatcatcggggaccgccagctttccaagggcactacccgcctgctggccgtcactggggagcaggcccagcaggcccgagagctaggccagagcctggcccaggaagtgaaagcggccactgagcggctgagtctggggagccgggatgtggcggaggcactgaggctgtccaaggacataggacgactcattgaagctgtggaaactgctgtgatgccccagtggcagcggcgggagctgctggccacagtgaagatgctgcagcggcgtgccaacactgccatccgtaagctgcaaatgggacaggctgcaaaaaaaactcaggagctgctggagcggcactcgaaggggcctctgattgtggacacagtctctgctgagtctctctcagtgctggtgaaggtggtacggcagctgtgtgagcaggcccccagcacgtctgtgctcctactcagcccccagcccatggggaaggtgctgtgtgcctgtcaggtggcccagggtgccatgcccaccttcacagcagaggcctgggcactggcagtgtgcagccacatggggggcaaggcgtggggctcgcgagtggtggcccaaggcaccggaagcactactgacctggaagctgccctcagtatagcccaaacctatgccctcagccagctctgacccaggtccgcccagggacccacatggactaaatgtaattaaaagg

SEQ ID NO: 66204 - DNA, 975 bp, Homo sapiens
gtggtggaattcaccgcacctaaaatgcacttgcactattactcagcagcagtaacatggtaacacttaaaatggtactcggggacctccaaagactaaactgacaagccttcaaggagcccaggggctagagtataatggtgcgatctgggctcaccgcaacctccaccacctgggttcaagcaattctgcctcggccgctcgagtagctgggattacaggcatgtaccaccacacccggctaattttgtatttttattagagacggggtttctccatgctggtcaggctggcctcaggtgacccacctgcctcggcctcccaaagtgctgggattacaggcgtgagccacacctggcctaaaaatcatttaattttttatgcttgcctagttataaggtcaaagagaatcaaatgactgatgcagtcagcacctaacaacctctgtatatgggaagggggtaatgagaacatactatttggaaataataacagcctaagagccaagtgctgaagttacatttctgcctaccacagctaaagctctcctcactgtctcctacccagtcctcctttccatcaattaccagtctcttgtataaatgtatccattaccaggctcacagactgggagtgatttttctcctttggagctcgtccagaatccatcagcctcacacacatatttacctgcaaatcattggaaaagcaaaaatgtttaactgcatgtataagatggttgtcatttgcttgaatacccccttgaaaaatgttgattcttgagcatcagtgggacatagaggtgtctgaagaaccattttacatgatttcataaataggaggtctctgcattaccatgtttgcttgcaaagtggaaaccttttagatgtgtaacttgaatgtatcaagatctcaagtgcttaatgataaggtgttgacttgttaaattaaaccatttggaatacaaaaaaaaaa

SEQ ID NO: 66205 - DNA, 1334 bp, Homo sapiens
ggacgggcattcctccacacggagttcctggtcagcctggtggccgctgacttcctcctgatcagcaacctgcccctccgcgtggactactacctcctccatgagacctggcgctttggggctgctgcctgcaaagtcaacctcttcatgctgtccaccaaccgcacgggcagcgttgtcttcctcacagccatcgcactcaaccgctacctgaaggtggtgcagccccaccacgtgctgagccgtgcttccgtgggggcagctgcccgggtggccgggggactctgggtgggcatcctgctcctcaacgggcacctgctcctgagcaccttctccggcccctcctgcctcagctacagggtgggcacgaagccctcggcctcgctccgctggcaccaggcactgtacctgctggagttcttcctgccactggcgctcatcctctttgctattgtgagcattgggctcaccatccggaaccgtggtctgggcgggcaggcaggcccgcagagggccatgcgtgtgctggccatggtggtggccgtctacaccatctgcttcttgcccagcatcatctttggcatggcttccatggtggctttctggctgtccgcctgccgatccctggacctctgcacacagctcttccatggctccctggccttcacctacctcaacagtgtcctggaccccgtgctctactgcttctctagccccaacttcctccaccagagccgggccttgctgggcctcacgcggggccggcagggcccagtgagcgacgagagctcctaccaaccctccaggcagtggcgctaccgggaggcctctaggaaggcggaggccatagggaagctgaaagtgcagggcgaggtctctctggaaaaggaaggctcctcccagggctgagggccagctgcagggctgcagcgctgtgggggtaagggctgccgcgctctggcctggagggacaaggccagcacacggtgcctcaaccaactggacaagggatggcggcagaccaggggccaggccaaagcactggcaggactcaggtgggtggcagggagagaaacccacctaggcctctcagtgtgtccaggatggcattcccagaatgcaggggagagcaggatgccgggtggaggagacaggcaaggtgccgttggcacaccagctcagacaggggcctgcgcagctgcaggggacagacgccaatcactgtcacagcagagtcaccttagaaattggacagctgcatgttctgtgctctccagtttgtcccttccaatattaataaacttcccttttaaatatatttatttgcaagacca

SEQ ID NO: 66206 - DNA, 3262 bp, Homo sapiens
ttttatgctttttgttcttgattttattttacataattgcatgtataaactttctgatggattgatttttcctttctgtcccgattatctagcctctgatgtgctcaagagctggatctgctgacttatcaaaaaagtgacatttggccaggcacggtggctcagcctcacctaatggtttcttagcaaacttcagtagaatgtttagaacgcggccctgataaacttgagtgctggtaggaggtgctacctcgctcaatctgtgagcaaccagccctgtgccctggatgcttggcgggtggagagaaagacagtgttatgtgggcaagcctccaactcaccagttgcagtagagcatctggctctctgtctgctgctatagccctgtgagtcagccagacgtgtggtccccaagccagcttcccacctagcacccttgttctgctacagctcccccacctgccctcttgcattgcctaggatcccacgccccgctttcagtctgctctgggacatctgtcttcttctttgcaggggactaagtatatgacttaatgaatcctaaaaggaaaaaaagatgtcaggaaaaaaaagtgcacacaagaaatgttgcaacatctcatccttagcaactttgtttggttagtactgcataactcacagcagattccaaggcacctgccttgaacattgctacatgctctaggcattatcaggaacgcagccagggtgcctgcaaagttgtctccagtttctgggtaagaggaccatcatccatattgtctgtggctttgtgtctgagttgggctactgagcctgtgacttcagaccccttgtctgcctgatggatacattctgtataatacgttaccatcacaatttcatgaatgtaactaatgaagatctagcccttccgtgccgcctgctgaactatgtcacctgtggataataaaacctctacacataggcattttatacaaaggcaagtcaaacagcaatggtagtggcaagtgatgtatttggcttaaagaagcttgtgttactgaagttaacgcagaagtctggcctccgtttgtgggattattaaatatatatcctacgggatcagagtcatctattagaaacagtgatagccctgggtataaataaacatttctttagagtttggcgtcagtttttcaatgtccatcctcaaatcagacagtctgtttgaggggtcagttttcagggtgcatctgcaccgagaggcttgaggcagcaatgacccctgggctgcagttcggttgcaggcgctggtggcgggcagtccaggttggagggtggagatgggccaaggtcacagatgctgcagggcttcctgtccttgctctgtgtaaccgtcatcgcggtgggtgtttgcccactgtccaaaggactcctggatgtgcacgtttctctgtgtgttggccaggcgcttcttatctcgggagaagaagctaaacagtcgcttgatgcccgactccggctggggggacgtcctcgggtgggcgatgggtgggggttggggtattcggttttcctcttccatttcttcactcttatagtaagccagctcctcctgcagcaagaacaccttggacttgagctcgttcctctcgtgcagcacgtcccgcagctcctgcagggtgaaccgggggcggttggggtccttgagatccatggccaccttctctgcgtcggagatgctctcctctcccaccggctccgtctcaggctcctcctccccattctggctgtgctccccctgcagcctctctcgcaacttccccagctctgctcgcaggctgcccatctcctgctccttggtctgcaggtctgcctccagctccaccttctgttcgatcagggctttcccctgggcctccaccaccgtgacccggtgccgaaggtcatggttgatcttcatcagccgtgtctgctgctgctgtaaagcctcaacgtcctcatttttcaggcccagctccctgtccttggcgcggatctcgtcgcgttgtttgtccaccacctccttcagcttcttcatcacctgtcgctcccgctctgacatgcctgtcatcccagctacttagaagactgaggtgggagaatcttttgagcctgggaggttgaggctatggtgaactataattgcgccactgcactccagcgttgaagacagagacctcaaagaactgaaaacataggtccacacaaaagcttgagcacgatgttcacagcagcacgattcacaacagccaaaaggtggtgacgtctcacaggtccatccatagatgagtgggcaaacgacatgcagtatggcttcatgcttctggaactcctcctctgagaagttgacatccttgtgggagaggttggtcatgagctgcttgttctcctcctgcagctgggcgatctgggagaggaggtcctgcgcctcccctcgccacacatcctccaccagctccagctcctcaggctcctcctccccattctggctgtgctccccctgcagcctctctcgcaacttccccagctctgctcgcaggctgcccatctcctgctccttggtctgcaggtctgcctccagctccaccttctgttcgatcagggctttcccctaggcctccaccaccgtgacccggtgccgaaggtcatggttgatcttcatcagccgtgtctgctgctgctgtaaagcctcaacgtcctcatttttcaggcccagctccctgtccttggcgcggatctcgtcgcgttgtttgtccaccacctccttcagcttcttcatcacctgtcgctcccgctctgacatgccttcatgcttctggaactcctcctctgagaagttgacatccttgtgggagaggttggtcatgagctgcttgttctcctcctgcagctgggcgatctgggagaggaggtcctgcgcctcccctcgccacacatcctccaccagctccagctccttctggtgcttgcgctccttctcgatgcggtccatcctctccaggcgcaggcggtccagctccaggcgcagctcgtccagctcgggcgcgacgtggtggcggctgaccagcacctccaggatctccaggacgcgcacgaccttgggcatgaggcgcgcgatggcctcgcagccgtgctggtcaatgacccgctcgaactcgtggcccacaagcgacgcgatgtcgtacacgtccatgacggtcagctcggccacgttcttgtccagcgccggaattccacc

SEQ ID NO: 66207 - DNA, 1610 bp, Homo sapiens
ttttatcaccatttctctgacccctccctgtcttaggtctgaataattgggtcacccataggaatgcagaacccagggtgggcagagcagagcagcacttgctggcgataggcctcgagcctgtgtttctgagtccttgaggaccacgagctaacaggagctggtctgtaggttgctctccgtaagcagtgatgcaatggacgagggatcgtagacactgtcgaattcctcatctgagctcagcccttcgtttttgagagctgactcagcagctgagcgggaagctttgcgccaggagtccttctccagagacttgatccgggcctggagctgttcattgacctcatgctgctcctccacctcacgctgggccttcttcctcaggccgtccagtcgctcaatttcctcttctgcttcatccacctgacgcttcaaagccttcaccctcaggcttagctggtctttctggtcattgacatgctgccgctcgtcttcaatctggatggatagttctttaactttccgctccagttttcgattggtagactgcagaactgtcttctccctctcttcagcctgtagccgctcctgcaacaactgattctgggactcaagctgagagaggctggcactaggcttctggaagccttctgagctggccaaccgggtcttcaggtccttgttctgtctctccaaggagattttgtcacactccaggtcctgccgagcagacctttcctgcatgagctctgtcctcagctgatccacctggtcccggccacgattcacccgatctgttagcagctccacggtgttcttctcctcatctaactctgtttccagccgtgagactttttcctcgagacccttcagctgccgggccctgtcgtcctgggaacgcttcttgttctctgcctcttgctccagcccctgcagtcgctgggccagtagctctttgtccagccgggctgtgtcccgctcagcctgggatgcctgcagggcctgccgcagcctctggatctcatcctgaagtcggctcagtcctccagaggtcttctcagcctcactggcccaatccttggcctggcgctgggcatctgccacctcccgccgggccttttccttataatcctccagctgggcctggagctgctgcagggcttgcttagagtcctccccgatcttctccaactccttgttcagtcggtccacagtcctgtccagcaaacgcttctgctcctccagctcagccttgcctcgccggagcacctcccgctgcttcccttcctcctccagggcccggttcagtgtctgctgctcctgccccaggcgggccagcccccgctgagcctcctctaggcgtgcctccagtgcccgcttggctgctgccagactcccctcctcttcctgggacgcattcagggcctcctccagctgctgtttctctgcctccagccgctgcagcttgtcccgtagtcgtgcctccaccgcttccccaccatccaccagacctcgagtctccttcagctgctgctccaaacccaggatgcgccggcggaattcgtcattttcctcctgggtctcccgaagcgtcgtctccactgcggccc

SEQ ID NO: 66208 - DNA, 2443 bp, Homo sapiens
gtgttgggcaattccgctcgagctgaagccgacagtgtctgtgacttccctctctgttgcacttaccaaccctctttccatgtctggaatgagaaaagaaaaagagcagcattgccagagcccaggtttgtcatctcccaggcatctcagaaccagtatcctcttggagagcattcaaggaaaaagtccagaaagtgcgctgtcagaccacgtcactaagagtttcatcaagctcttagagatcgctcctgcagggcccactgctgtgcttttctgaaacatccatttattaacagagccccactattttaacatgttccaggccctagcacaaaacacagatcttaaagaacgcttacgcagaatccatgccgagtctctgctcctcgactcccccgctgtcgccaagtcgggtgacaatctggcagaggaaaactccagagatggaaaaccgagctctagttcatcagctttctaatgaaagtaggactcttccatcacttgactccctttctggagtttttttttgatgcttcagggaagttctgttatctccaagctcttcagaaaacgagatttctgatgatgactcatatgtcagtgacataagtgataatctttccttagataatctcagtaatgatttagataatgagagacagaccttggggcctgtccttgatagtggtcgggaagcgaagtcccggagaagaacgtgcctgccggcgccctgcccgagcagcagtaacatcagcctgtggaacatcctgaggaacaacatcgggaaggacctgtccaaggtggccatgccggtggagctgaacgagcccctgaacacgctgcagaggctctgcgaggagctggagtacagcgagctcctggacaaggccgcgcagattcccagccccctggaaaggatggtatatgtggcagcctttgccatatcagcgtatgcatctagctactaccgagctggaagcaagccatttaatccggttcttggagaaacatatgaatgtattcgggaggacaagggcttccagtttttttcagaacaggtcagccaccatccgcctatctctgcgtgtcatgctgagtctagaaattttgttttctggcaagatgtgagatggaaaaacaaattctggggcaaatccatggaaattgttccaattggcacaacccatgtgactctgccagtttttggggatcattttgagtggaacaaagtgacctcttgcatccataacatcttaagcgggcagaggtggattgagcactatggagagattgtcatcaagaacctgcatgatgattcctgctactgcaaagtgaattttataaaggcaaaatactggagcactaatgcccatgagattgaaggcacagtgtttgacaggagtggaaaagcggttcatcggctgtttgggaaatggcatgaaagcatctactgtggcggcggctcctcttctgcctgtgtatggagagcaaatcctatgccgaaaggctacgagcaatactatagcttcacacagtttgcgctggaattaaatgaaatggatccatcatcaaagtctttattgccacctactgacactcgatttaggccagaccagaggtttctagaggaagggaacttagaagaagctgaaatacaaaagcagaggattgaacaactgcagagagaaaggcggcgggtcttataagaaaatcatgtggagcaccagcctcggtttttcaggaaatccgacgatgactcttgggtgagcaacggcacctatttggaacttagaaaagatcttggtttttccaaactggaccatcctgtcttatggtgaaaaagtaaagaagaaagataacattagtgtatttctcctgtgcttgccttctgaagtggcacaaacctgtgtttatatatttaaaagatactctaggatgatcacttgtgcttatcttagcattgtaactctttaagtctatattttcctcagtgcgtttctttacaatttcaaatgttaccctgattgtttatatgaatgtagaacaccttgacatttttttttatatataaactatttaataaaaatgaaagattgaatgttcatgtgtgggttaaaaaaagaagctttaacactaattttccaaaggttagggaagattccaattaaatttatgccttataaaattatgttgtagaaaaaaaatcaacctctcccaggtgcattaagaaataagaattcccagggttactcacccatgcgtaagctacccaagtttaatttggtagctgaaatatctttttgcctcagacagctcttgaattgctcatacagaacaattctgctggtgctggagtctgaagaatattttcatttgcattttagtggttagggagaggatataagattaatggaatgtatatttttatataagacgtatacgg

SEQ ID NO: 66209 - DNA, 3639 bp, Homo sapiens
ttttttttttttgagacagagtcttgctatgttgcccaggcaggtcttgagctcctgggcttaggggatcctcccgcctcagcctcccaagtagttgggactacaggcacacactactactcttggtttgcctatttttaaatcaggttgtttgttttcttattattgtgttctctacactgtaggatattctacctttcctagaatttcatgtaaatggactcagacatactgttgtgtctggcctcttttgttcagtgtaatgtttttgagcttcatccttgcatgttatgtgtatcagtgattgattcaatttttattgctgcatagtattggattgtatagctataccacaatttgtttattcattctcctgttgatggaatattggttgtttccagtatttagctattattattttattttttttttttgagacggagtctcgctctgtcgcccaggctggagtgcagtggcgggatctcggctcactgcaagctccgcctcccgggttcacgccattctcctgcctcagcctcccaagtagctgggactacaggcgcccgccactacgcccggctaattttttgtatttttagtagagacggggtttcaccgttttagccgggatggtctcgatctcctgacctcgtgatccgcccgcctcggcctcccaaagtgctgggattacaggcgtgagccaccgcgcccggccaaaaagaagaaatattaagttgtccataatctgttatatctaactattataaagtataaataaaacaaaataagttttacattacttgtttctgtcacattgttcaaaattcttttgggcttaaagccaactatgaattttagtagagtaggaggacaatgggaaacagattctttttttgttgttattgaaatgtaagcaacttgcccttaaaatagtatgaatatccagttcaggtaacaactttcacttttaattagtcaaatatatattaaatataaaaatctaatgctgtacagatgtgactttggacattttaagtattagtttattcagaaacgcctttaaaaatcagtgtgtatagaactagctcatttcttaactgtcaaatttagaagtgcaacagtgggtcttcagagagaatatgcccaagaaaaactggataaaaagactgggtaaatacatcaaatgaaacagtgattcacttttgacaagactgaaatataagtatataatcactgatgcatatttattcagtaggcccatgtgattatgtggtttttaactaacagcatttatttttgcaaactgcttggcattcctccaagggaaaggagcttctagactacaaacactgagcacatacatcttaaattaacacatgaattgcatatggattgttgatatgcttttagagtcttgtctctacagaagaaaaacacgttcctggggtccatgcctttttcagaggcacaatctatagcttggaacttaattgctgtccatggtatctggcctttaattataagaaattgttgacaccccaatacagggtgcatctaaatacataatgcaagaaaggaggttttagtggttaaacttcggcacgcttaaagattttaggaatgtaattatgccattaggcagtatttctttgtctatggacttaaaaagttttcttggggcattttaaagaggtttatcaaagttatattgttgaaaaactattttccctggaaataatgtcccctccttcccaccttctgccttgatattcttactggaaaaaaagtgaaattgttcagaattacaaccatatagggtttccaggcatagcatgggcacattgggaatggaagactagaagaccccagcaaggaatgtaggtacattaattgctgcctaccctgagaaataactctgagtttcttctcccaagtattcctcaaggatccattcattgtagagtcaacagatgtcttttagaattcattataataagaagtccatgaacatacacacactatccttgaatagttttacattatattttttctaggtagttcctgaatactttaatgagcttaataaatgagaaaatgtattgaaaggtctttgtaagttactatataaatatgacatgtgttttaataatatctgaatttggctgggaacaatggctcatgcctgcaatcccagcacttagggaggccaaggcgggaggatcccttgagctcaggagtttgagaccagcctgagcaaaatctctaaaaaaaaaatttctattagccaggtgtggtggcatgcgcctgtactgtagtctcagctactcgggaggctgaggcaggagaattgcttgaacccaggaggcagcagttgcagtgagctgagattacgccactacactccagcctggtgacagagcgagactatctccagaaaaaaaagaaaaaaagaaaggaaatattgagtacttcctctatgtaaacccctgtattgggtgctgaaagagatggaattataaggaacttaacatttagtaaatgggccaggcgcggtggctcacgcctgtaatcccagcactttgggaggccgaggcgggcggatcacgaggtcaggagatcgagaccatcctggctaacacagtgaaaccccgtctctactaaaaatacaaaaaattagccgggcgtggtggcgggcgcctgtagtcccagctactcgggaggctgaggcaggagaatggcgtgaacccgggaggcggagcttgcagtgagccgagatcgcgccactgcactccagcctgggcgacagagcgagactccgtctcaaaaaaaaaaaaaagaaaccccgtctctactaaaaaatacaaaaattagccgggcgtagtggtgggcgcctgtggtcccagctacttgggaggctgaggcaggagaatggcgtggacccaggaggcggagcttgcagtgagccgagattgcaccattgcactccagcctgggcaacagagcaagactccgtctcaaaaaaaaaaaaaattatcaataccaaatatgatacagttatgtaatacccattttgcatatgcacagtggaaatactgtaaaaactacaagatgaaagaaaaccgactggccagaactttaaatttcagactaatccatgataaaaatctagatgataaaaaacaaaaataaaattaacaaaatagataactcgatatcctttccatattcagtcgtctactaacatgccatctccaaacaaatccattacctcaaaagaggaagaaaatgggccaggcgcggtggctcatgcctgtaatcccagcactttgggaggccaaggcgggcagatcacgaggtcaggagatcgagaccatcctggctaacacggtgaaaccccgtctctactaaaaatacaaaaaaattagctgggcatggtggcgggcgcctgtagtcccagctactcaggaggctgagacaggagaatggcgtgaacccaggaggtggagcttgcaatgagcggagatcgcgccactgcactccagcctgggcgacagagcaagactctgtctcaaaaaaaaaaacaaaccaaaccacccaaaaggacaccaaaaaacactcctcatgccccaagtcataccc

SEQ ID NO: 66210 - DNA, 1829 bp, Homo sapiens
ttttttttttttactgtaaattttagaaatgtttattttagaaacacacaaagctaaaatgcatatttcagtccaacaacctagagagaagaaatagggagctacatgtttttgtttagtcttgttttttcctcaaaatccatccctaagagtcaggagctacaagtttataggtacgcatttgtatgaatatgcttgccatggattctaaggacctaggaacatctaggaatacaggacattacatttttattttgaaaaaatatttaaattaaatttacatgtacaatataatatcactttcaggaacaaaaaaacattaatggaaagtaggaatatacttaaaacaaaattatttttacttttgaggtcaaattctacaccctggaaaaagtcagaagcccatactagagttttgtagaagtttttttaaaaatgcttttaaaatttagcaaggctgcaaagtctgtcaataaataaatcaaattactatctgtcagtaagctatgaagtccacagtaagtaccaatgcaaactgaacagatttagaaagtcaatccatactttctagcatcatcatgaaaactccatgactgaccgacacatcatttccaatgttatcatcaaggcctcagtgtgtaccccaggacacactttcaaattctcaggcagttccttaagaatgtgtgggagtttctgcaatgtctttatatttccagcataaagatccagtaaccagtcagtatgaacactggtggtttctttatgacttttacaagccataagcagttcatttagatgagttaaccctttggaagctaaaatgaactctgaagataaatcaaaaattgaacaaaaatttagcaacatcctactaagtaaaaaggagccaaattcaagttgctggtaatgaaaatgtttctctgcttgtgcatgaaagttctccactgtatcttctatttttgtaatagcaaacagttcttctttgatttgaggtgaaaccacataatccaagggcaattctcccttagcattcctctgttgtaaaagcactgggcccccatgctgtagtagcagcttgccaatttctacatgtccgtttgacagtgcatcatgcaaaggagtcaccccgtccacttgagtgagcagatctacctctggacaacgttgcaaaatttcctggacacacactgtgttgccatagttacaggcttcatgcaaaggcgtccagccagcattgtctttaacattgatgtctattcctggcaaagagagaagaagaatcaatttctccacttggttatttatgcaagctctatgcagggctgtttctccttttagattagtcttgtgaaaattcatctttttaactacagaggggcaattctccttggaacatgacaattctccttctgacttctttttcaatttttttaatgatgaggaacatttagcaaggttcaggtctagtaactctggcagcccttcgacttgtttttgtttagtaccattcagcattagtaaggttctctgagagtcaaaacaaggccgctgtcctattttctttgacacctgaatctttccagacccaagcacaccagttttccccaaggctggtaaataggaatataccattttctgaagagagagtggctcagaagaaacactgccagagctctgtagacacaactttttaaagactgcctctgcaacaaacatttgaagccaggaggaggaaaaggagcaaatgaaaatctctaattcctgtgaagaaaagtcatcacacgaaagagaaacataacttcctaagtcatcagacatgtgtcgcc

SEQ ID NO: 66211 - DNA, 672 bp, Homo sapiens
tacctcatcaggcatcagaggattcatactggttagaagctctatggctgcaaccagtgtcagaaacttttcaggaatatcgctggcctcattaggcaccagaggactcatactggtgagaagccctatgagtgtaatcagtgtggcaaagccttcagggacagctcctgtctgaccaagcaccagagtaattcacactaaggagaccccatatcagtgtccagaatgtgggaagtccttcaagcagaactctcacctggcagtacatcagagactccatagcagggagggtcccagccggtgtcctcagtgtggaaaaatgttccaaaagagctcatcccttgttcgacatcaaagagcacacctgggagagcaacccatggaaacataatggttgggggccacatgagtcttccagttcactctcactcctgtgtttaggaggcgtgtcttagatctgactcctctctggtcagtagaaaagaatcctttaagctatccagtgaattgatgaatgtgagacattgctgagccacactgttaagtctgctcattggggaactccagagacaacttaggcatgagggcagaaaagtctttggggatgattcagtctgtaccagacatgacaacacacacactggaatgaaatgtgcaaacatgggggtgact

SEQ ID NO: 66212 - DNA, 1605 bp, Homo sapiens
ttttttttttttcgtatttcaagggtttttattctgagcagtaggtacaaaaaataatgacatagttgtgtctaattctgtatagttcaggcaccctccacaggctgtcaatctctgatttgatctacttttaccagatttaacagatccttgaatttactttactgtatatacttccttcttgctcacattgggaatcaaactaatgctggaaacatgcatcttcagacttcattgaggaattccagattgagacacgctgggatgtggattgagtccatggttagagaagatggattaaatggaaacaaaacaggaaacatgtgcttggcatctaatagcagttgctgagggtcattccgctcttgtagttgtgcctggattgttcgtataaaggccactgttacccgttcttcaaattcattcaggggagtataaaggtttaaaattttgacaatctgctgggtgctgagggaggtacacagggagcagatagcctctgcgtcctcctgggttttcttctttaattgcaggagctgggctgcttggatcagaggttccatggtctgaactgctccactctggtgaaggtttcttccccgaagccactcctcaagctgacttatattgtacctgagttgcatgcctgtgctccaagagcagacgtccttccgcaggagcaggtcattaagagtcactgcgttgatcatgtagaagagctgtttgaatacctgcaggatgatctcagggtccaagccctggtcacacatgactgtatgaaaggcattcatctggcggatgatagcttccaggcggtatgagttatcctcatctgccatgctggaggagtgcttctgggagccagtgggcttcacaccagatagaccctgaatgctctaattttccaacatggcagaaactatcatcggctgtaacacaccctcggcaattttaatgagctgctggtagatctgaatggaaaggtcacgtcaggcacctgacggtattcggtgaggtcaaaattcttaagacagtgttcaattctgctttgcagtgttatgagtcatgaagccctcatccccgctgtactgcttcagacagtgaagaaggcggcaggtgttggataaccagaatgacgtcatctcaaagtcatcattgtgctttttcaggactttcttaatgccgttgatggtggaggtcagcagggagtgcaccttgagatcgtcgttggtgtagtcccgcgtgccggatgcacatgtagaggatgtaggcggggagacagggcactgtgcccgacagcatctggggcttcaagtctgtcaccaggttccggatgaggagggcctcgtcctctttgtggtactccagcatgccctggaaatccttctctttccgctggaccgtgacctgcctgttgagctcatggcgcttcctctcactctgggccaatgcctgggcagcttctaggtcctgggctttcttcatgtaaatcttcagttgctttttgagcttcctctcattcttttccagcttttctaccagttctttaaggtccagattctcgttggtcagccgggatatttcctgctgaacgccgctcgtgcc

SEQ ID NO: 66213 - DNA, 764 bp, Homo sapiens
cccccttttttttttttttcaaaagtgttctgtttaatacgctttgtctggtagtgcttgggtgcctgtggttggtttctctcactggaaccagtcctgggccccactcgcctggcttcctccagtcgccccaggtcctggggctggtgtgtcagaagctgcctttgtcctctccattcatccatccttgggcctgtctggcctatgatgccctcattcagctctcagggtccagaggtgactggtgtggatcctgctcgctgtgccaagatggccctccagatgcggcataccatccctcccctgtgggtaatggactcagtgtggctcagccagaaggtggccctggactctatcttgcacacactgtctgcccagtgccccctctgtccctaggggacccaggtgcccctttggtttccaggaaggaacctaggcaggcctgcagttggccaggatgaggccatatgcatggttcacacttggggggcccaggatgtacctgatgcgggtgtagatgaggtcatctcgagtggcataggtgagcagagtgtggagggtgaagctatggttcaacagctggatgtggtcaaagacccgcagaaagagggaaataagaaattacagaaagatgtgtcgagacccaggtactagctctgctctgttgccaaaataatgaggcagatcacacccttctgggcctcagttttctcatccatacaatgggacgagaatactaagtgttcttctggtagtgagattct

SEQ ID NO: 66214 - DNA, 2288 bp, Homo sapiens
ctaattcggcacgagctgatcgggggaggccgagaaccgcagggactggccgagaaatctcctttacagacaataggtgaagaacaaacccagaatccctacactgaactgctagtactgaaggctcatcatgatattgtacgatttctggtacagttagatgactacagatttgcatctgctggtgatgatggaattgtagttgtgtggaatgcccagacaggggaaaaacttttagaactgaatggacacactcaaaagataacagctattattacatttccttccttggaatcttgtgaagagaaaaatcaactcatcttgacagcctctgctgatagaacagttattgtgtgggatggtgatactaccagacaagttcagagaatatcatgcttccagtctactgtaaagtgtttaactgttcttcagagactagatgtttggctttctggtgggaatgacctgtgtgtgtggaaccgaaaattagatctcctgtgtaagactagccacctttctgatacaggtattagtgctttggttgaaatacctaagaactgtgttgtggcagcagttggcaaagaactgataattttcaggttggtagcacccacagaaggatcactagaatgggatattcttgaagttaagcgcctccttgatcaccaggataatattctctcattgattaatgtcaatgatttgagttttgtcaccggctcccacgtcggagagctgatcatctgggatgccctggactggaccatgcaggcctatgaacgcaacttctgggacccatctccacaactggacacccaacaagaaataaaactctgtcaaaaatcaaatgacatttctattcatcatttcacatgtgatgaagagaatgtatttgctgcagttggaaggggtttatacgtgtatagccttcaaatgaagcgtgtgattgcctgccagaaaactgcacatgactccaatgtcctgcacattgccagacttccaaacaggcagttaatctcatgctcagaagatggcagtgtacgcatttgggagttaagagaaaaacagcagcttgcagctgagcctgtaccaacaggtttttttaacatgtggggatttggaagagtcagcaaacaagccagccaacctgttaaaaagcagcaagaaaatgctacttcatgttcactggagcttattggagatttgattggacactcatcatctgtggagatgtttctatactttgaagatcatggactagtgacgtgctccgctgatcatctcattattttgtggaaaaatggagagcgagaatctggattgcgcagtttaagattatttcaaaaattagaggagaatggtgacttataccttgctgtctagtttaaggaattaaaaatacacatgcatgaaccttgaacatcaaatatcgggtactactctgaaaaccattaatatattgatcacttaaattggtaattttttttgtcagtccataaaattctacatgtttaaattttttgtggacctaccaaccaggaacatgttgcttctcaggtcctagtatatcctccaaagaatataccacaagtttttccatttgactttgagctgctgttgaagtggtgagtgctgtgttttgagcttattttgaacctagatccttgtgaaaggtacaaatagaggtaatagttaagttatggcatttattagaagttttattatttggcttcctttagaattattgtgaagtttaaaaatagcctttctcctgcaaattttcctagtctttagtaactgttagtgttctatatagcacaaacttgaatctctcagccaaaaaagggaacatatatactgtttaagtatggcaagttttctttggtaccaatttgtttagataattttaaaaatgttttttagttctagctactaaaacctgtatgaactcaaatggataggcatcttgtgagggtgtgtttttcccagtgtgaattggcttgaagagccatgggctaaatgggtactagaacaacaactgcccctcatgtacgccaaggatgagctctagatcatttgagaggcacagtgtttccggagtcagggactggcagctgagcgcaactgccccatctgaccactgactcaaatacgaactgcttgagacagacttcttttatgtagttctttgcagtgtccattgagacactataaccagccttgtaacaatatgttttctccttttggtgctaaaaaataaaaatattagaaagtagtctaaaaaaaaa

SEQ ID NO: 66215 - DNA, 1206 bp, Homo sapiens
agtcaggagtcttcagacagtctagctgcagagattgttacacctgaaatcagggagaaacttattcgtcttcagcatgagaataagatgttaaagcttaaccaagaaggttcggacaatgaaaaaatagccttattgcagagccttctagatgatgcaaatctacgcaagaatgaactggagacagagaataggtacttgtgcccataaatttccctcttactacggcttttgctgtatcccatagatttcggctggtgaatcaaagacttctggaagtacagtcacaagttgaagaattacaaaaatctttacaggatcaaggctcaaaagcagaagattcagtccttctaaaaaagaagcttgaagaacatctagagaagctgcatgaggccaataatgaactacagaagaagagagccattattgaagatctcgagccaagatttaacaacagctccttaaaaattgaagaattacaagaagctttacgaaagaaagaggaagaaatgaagcaaatggaagaacgatacaaaaaatacttagagaaagccaaaagtgtcatccgtactttagatcctaaacagaatcaaggagcagcaccagaaatacaagctcttaaaaatcagctccaggaacgagaccgactgttccactcattagagaaagaatatgagaaaacaaagagtcagagagagatggaagagaaatatattgttagtgcctggtacaatatgggaatgaccctgcataaaaaggcagctgaagatagactggcaagcacaggctcagggcagtcatttctggcgaggcagaggcaagcgaccagcagcagaagatcatacccaggccacgtgcagccggccacagcaaggtagagaagttgtgccgctcaatcacagacacctgcacccacaacatacttctgttacacacaagaacatttcaggaaactcagccagcttattttttgtttctcttctatgtcaatacttagtgtttctcattttgaggactttttctctctcctgtatctttgttttagtttctttggtttttattttgtagtcctttcagttatttttaatgtgccaaaaatttgtacatgttcaattaaaaatgttgtataatagtgtaatacttttctttgtatgaaaatgtcctcttcttcaaaggtataggctttgtaatgaattagattttctg

SEQ ID NO: 66216 - DNA, 1159 bp, Homo sapiens
ggaagccagctgggccagaccaggaaggagcctgaggcacagcaccaaggcatggggtagggtgggctttgaggcacggcctccccatgcccagacccaggcccaaacaggaggctcctgtgcaccagcaagtgcagcaaagctggctgcagtgacaaggaagtcagagggagggctggtttgcctcaaccctcgccctggatgtggcaaaagataccacaccgaaggaagctgtaggggatctgggacttagtcaggctagctaagggcactgagtgattacagggcaaggccacagagcggcaggaagttgtaagtgcaggggccaggcacagtctgagtggagagccatgatggcactcatccctggctggctcctgggcccaggcccttgctcagaatacagtgcccaggcccgcctgggcattgccttaattcctgtctgaggctgccttccgtcatcctcctcaagctgactgctatcagcaggagaagggaatgcagaaccacacccaccccaactccagtgtctccagaactgagcagggaccctccccatgacggagacagacaacccaatggcagggcctgggggagttctaacctcccgagcccaagcctgacttcccttccctctccagatactgaggaaagtgggttggaggtgggccatgagggtgggggacagggggagggagagccatttcctaagaagagcccaggttgtctcagcccagggagactggtttcaggagctgttccttcagaaaggacgatggaaatggaagtcacagcagggctggggaactggggactggttaggttggacccatgggtgcagcaccctccaaactggtgtcagagcctgcagatgagtcccgggaggagcggccctgcaggaagcggatgatcttctcaatggtggcctcctggtattcgtgggaccacctgtgggcacaggagccaatgtggttcagacagctgggcagagggagctgctagtcagctgtttgcccacactctgcctgtcatggtgatttgtaccctacccccctggtcccagggccctggggctcacttgataccgttgaaagtaagcacagcctgcatgtcctcaggcaggacctggggctcaggccactcgaagccatcaatgatg

SEQ ID NO: 66217 - DNA, 622 bp, Homo sapiens
caactgtctgcctgcctggttgcctaaaccagagctgtggctccaactgctgccagccctgctgccgcccagcctgctgtgagaccacttgcttccagcccacctgtgtgtacagctgctgtcagcctttttgctgctgatcaagtcccgagagaaccaccatcctcacacaacaactttctgctcaactgacttatcttttgggggactaatttaatttgctgctgacagccaccatgctctcacccaaatttttatgaattctctacatgtttaaaatcttgggaatctgcttgagggagggcagaatacttcatcctgattctctttttccttacactttgtggatcatgtgccagcttcgtgtgttctcaattttgagtcatggtctcagctttgactcaaaagtcaagagcttcattctctgcttctaaggaatttaggtttctgcaactgatcaataatctttgcaatcttttttttggttttcaatatcctcctcatcgttccttggtatccttctttcttcttttcatgataaatttgtgttgtgtccctgggtagcagaaaatccttacccataatgtttctgaataaactctgaaccatcctcatctcaaaa

SEQ ID NO: 66218 - DNA, 3258 bp, Homo sapiens
ctttgaggtcttgtggtctgattcttcaataacatcagtaaccaaatcttcctctgaagtgacggaatttatttcaaagctatgtcagctctatcctgaagagaacttggagaaactcattccttgcttagctggtccggacgcattttatgtggagcgaaaccacgtggatctggactcaggcctgaggtacctggcctcattaccttctcacgtgttgaaaaatgaccatgtcaggaggtttctcagcacttcctctcccccacagcagcttcagagtccaagtcctggcaatccctccctttctaaagtaggtaccgtgatgggcgtgtctggaaggcctgtgtgtggagtggctggtatcccgtcctcgcagagcggagcccagcaccacgggcagcacccggccggctcagccgcccccttgcctcactgctcccatgcgggcagcgcgggctcagccctggcctaccggacccagatggacacatcacctgccatcctcatgccttccagtctgcagacccctcagacccaggagcagaatgggattctagactggcttaggaaactgcgtttgcacaagtattaccccgtctttaagcagctctccatggagaagtttttgagccttactgaagaagatctgaataaatttgagtctcttaccatgggggcaaagaagaagctcaagacccagctggagctggaaaaggagaagtcagagagacggtgcctgaacccctcggccccgccgctggtcaccagcagtggtgtggctcgagtgccccccaccagccacgtcgggcccgtgcagtcggggcggggcagccatgcagcagagctgcgggtggaagtggagcagccccatcaccagctgccccgggaaggcagttcctcggagtactccagctcctcctccagccccatgggggtacaggcccgggaagagagctccgacagcgctgaggagaatgacagacgtgtggagattcacttggagagctctgacaaggagaagccggtgatgctgctgaatcacttcacttccagttccgccagacccacggcccaggttctccctgtgcagaatgaggccagctccaatccatcaggccaccaccccctgcccccgcagatgctgagcgcagcctcacacatcacacccatccgcatgctgaattccgtgcacaagccagaaagagggagcgcggacatgaagctcctctcgtcttctgtgcactcacttttgtctctagaagaaaggaataaaggatctggaccaagaagcagcatgaaagtggacaagagctttggcagcgccatgatggacgtgctgcccgcgtccgcaccccaccagcctgtgcaggtcctctctgggctttcggagagcagctccatgtcacccacagtctcctttggtccccggaccaaagtcgtgcatgcatccacgctggacagggtgctgaagacagcacagcaaccggccctggtcgtggagaccagcacggctgccacggggacgcccagcacagtcctccacgccgcccgtccgcccatcaaactgctgctgtcgtcatctgttcctgctgattctgccatttctgggcaaacttcctgtcctaataatgtgcaaataagtgtgccccctgcaataataaacccccggactgctctgtacacagccaacaccaaagttgccttttctgcaatgagcagtatgccagtgggccccctgcagggtggcttctgtgcaaacagcaacactgcctctcccagcagccacccctccacgtcctttgccaacatggccacagatgcccagctgcccagcccccagctccagcccggcgctgtcctccgtccctgaaagcagtttctatagcagcagtggcggtggcggctccacaggaaacattcctgcctcgaatccgaaccaccaccaccaccaccaccatcagcagcccccggcacccccgcagcccgccccacccccgccaggctgcattgtgtgcacgtcctgtggctgcagcggcagctgcggctcgagtggcctgactgtcagctacgccaactacttccagcacccgttctccggtccgtccgtgttcaccttccccttcttgcccttcagtcccatgtgcagcagcggctacgtcagcgcccagcagtacggcggcggctccaccttccccgtcgtgcacgccccttacagcagcagcgggaccccagaccctgtcctgagtgggcagtccacgtttgccgtgccacccatgcagaacttcatggcagggacggcaggggtgtaccagacccaaggactggtgggcagtagcaatggttccagtcacaaaaagagcgggaacctatcttgttacaactgcggggccactggtcaccgcgcccaggactgcaaacagccgtccatggacttcaaccggccaggtacttttaggttgaaatacgcccctccagcagaaagtctggactccacagattgatatttttcctctggcaaaccagaacgttatttaagccatggagacataaggaaaattaaatacaaaactgagaaggtctagttgctgttgagcttaatctttttaatccaaaggtgctttacttttcctagactggatagaaaatctagccgtagaaagtgcatcaaactcgatttattgccaaaaccctagattggagcttgggtgtcagaactcgcctagtgggcatctctgtggctggtgagatcggccacctccacttttggttgcagtgcagagacgccatgtctcccgaagagcattgccatcactggccctcctaggctcacacgtcaattccagggcagctacacgtggtctgaatcgagaaccgagcttggagttctccaagtggagttccacccgccggactcctgacacccctgggctagggaaaatgtcgactttgttttgttctgttcctaaagtgattagcactaatctctgggatttttaaggattgcactacagaagaatgtaccctgatgtaaatctctgcggttctgggagccaaactcctctgagaacagtcagtgcaagagactccaataatccatattgaaagagtcagcaccagcagaggctactcgacttaggacgcaacagaggttttagtatttccttccctcctccaagcacttgtagcagtttcaggtttttaatttttttctgcaaataaatctaaactacgttattaaatagaaatagtttactcgca

SEQ ID NO: 66219 - DNA, 1298 bp, Homo sapiens
cccgggtcgacccacgcgtccgggcaggcggaggctgtggtccggggggcgctgacagctccaagccgaggattctgctcatgggactccggcgcagcggcaagtcctccatccagaaggtggtgtttcataagatgtcacccaacgagaccctctttttggaaagtaccaacaagatttataaggatgacatttccaatagctcctttgtgaatttccagatatgggattttcctgggcaaatggacttttttgacccaacctttgactatgagatgatcttcaggggaacaggagcattgatatacgtcattgacgcacaggatgactacatggaggctttaacaagacttcacattactgtttctaaagcctacaaagttaacccagacatgaattttgaggtttttattcacaaagttgatggtctgtctgatgatcacaaaatagaaacacagagggacattcatcaaagggccaatgatgaccttgcagatgctgggctagaaaaactccatcttagcttttatctgactagtatctatgaccattcaatatttgaagcctttagtaaggtggtgcagaaactcattccacaactgccgaccttggaaaacctattaaatatctttatatcaaattcaggtattgaaaaagcttttctctttgatgttgtcagcaaaatctacattgcaacagacagttcccctgtggatatgcaatcttatgaactttgctgtgacatgatcgatgttgtaattgatgtgtcttgtatatatgggttaaaggaagatggaagtggaagtgcttatgacaaagaatctatggcaattatcaagctgaataatacaactgtcctttatttaaaggaggtgactaaatttttggcactggtctgcattctaagggaagaaagctttgaaagaaaaggtttaatagactacaacttccactgtttccgaaaagctattcatgaggtttttgaggtgggtgtgacttctcacaggagctgtggtcaccagactagtgcctccagtctgaaagcgctgacacacaatggcacgccacgaaacgccatctagtctgaatcccagcgtcggggctctgtgccagcttactcttcactccagggtcggatgccacgtgctacaggacatgggagctgctgcttgtgggaatctggtgcctgttccactagagagacaaggggtagagtttctcatttggatgaaaaccccttcaactggtggtgtacaactgaagctactatatcttttttgaaaatggcaaaaaaaaaa

SEQ ID NO: 66220 - DNA, 3167 bp, Homo sapiens
  misc_feature (1)...(3167): n = a,t,c or g
ggaattcgcgagcgcagggcgcatgactggcaggcagctccacctgcagccctggtgccggatccactaggtgaagccagctgggctcctgagtctggtggggacgtggagagtctttatatctagctcagggattataaacacaccaatcagcaccctgtgtctagctcaaggtttgtgagtgcaccaatcgacactgtatctagctgctctggtggggccttggagaacctttatgcctagctcagggattgtaaatacaccaatcagcaccctgtgtttagctcaaggtttgtgaatgcaccaatcgacactctgtatctagctgccctgatggggacgtggagaacctttgtatctagctcagggattggaaacgcaccaatcagcgccctgacgaaacaggccactcggctctaccaatcagcaggatgtaggtggggccagataagagaataaaagcgggctgcccgagccagcattggcaacccgctcgggtccccttccacactgtggaagctttgttctttcgctctttgcaataaatcttgctactgttcactctttgggtccacactgcttttatgagctataacactcaccgcaaaggtctgcagcttcactcctgaagccagcgagaccacaagcccactgggaggaacgaacaactccaggcgcgcaatgaacaactccaggcgcgccgccttaagagctgtaacactcaccgcgaaggtctgcagtttcactcctaagccagcgagaccacgaacccaccagaaggaagaaactccaaacacatctgaacattagaaggaacaaactccagatgcgccaccttaagagctgtaacactcaccgcgagggtccacggcttcattcttgaagtcagtgagagaccaagaacccaccaattccggacacattttggcgaccatgaagggactttcgcctattgccaagcggtgagacaatcgctgagcagtgagaccatcacctattgccgagcggtgagaccattgcctatcgccaagcaaatcgaggccatcaagctacagatggtcttacaaatggaaccccaaatgagttcaactaacaacttctaccgaggacccctggactgaccagctggtcctggcacttcccctggcctagagagttcccctctgaaggacactacaactgcaaagccccttcttcgcccctatccagcaggaagtagctagagcagtcatcggccaaattcccaacagcagttggggtgtcctgttgattgaggggtgacagcatgctggcagtcctcacagccctcactcgctcgctcactctcggcacctcctctgcctgggctcccactttggcagcacttgaggagcccttcagctctgtatctagctactctgatgggtccttggagaacctttatgtctagctcagggattgtaatacaccatcagcaccctgtgtctagctcaggtttgtgaatgcaccaatggacactctgtatctagctactctggtggggccttggagaaccttgtgtcaacactctgtatctaactaacctggtggggatgtggagaaccttgtgtctagctcagggatgtaaacgcaccaatcagtgccctgtcaaaccactcggctctaccaatcagcaggatgtgggtggggccagataagagaataaaagcaggctgcccgagccagcagtggcaacccgctcaggtccccttccacactgtggaagctttgttcttttgctctttgcaataaatcttgtactgctcactctttgggtccccactgcttttatgagctgtaacactcactgcgaaggtctgcagcttcactcctgagccagtgaaaccatgaacccaccagaaggaagaaacgctgaacacacctgaacatcagaagaaacaaactccagacgcgccaccttaagagctggaacacttaccgcaagggtccgtggcttcattcttgaagtcagtgagaccaagaaccccccaattccggatacaatatcgacaaaacatgcatctttgatgtctgatagttacagagagaagaaattagttcctgtggtttacccccattctagcactccctccttccagtaattcctggaaggagggagtgcaccaatcgacactctgtatctatctactctggtggggccttggagaacctttatgtctagctcagggattgtaaatgcaccaattggcactctgtatctagctcaaggtttgtaaacacaccaatcagcaccctgtgtctagctcagggtttgtgaatgcaccaattgacactctgtatctagctgctctggtggggccttggagaacctttatgtcgacactctgtatctagctaatctggaggggatgtggagaaactttgtgtctagctcagggattgtaaacgcaccaatcagcgccctgtcaaaacaggccactcagctctaccaatcagcaggatgtgggtggggccagataagagaataaaagcaggctgccccaaccagcattggcaaccccgctcgggtccccttgcacactgtggaagctttgttctttcgctctttgcaataaatcttgcaactgctcactctttgggtccacgctgcttttatgagctgtaacactcaccgcgaagatctgcagcttcactcctgagcccagcgagaccatgagcccaccggcaggaacgaacaactccagacacgctgccttaagagctgtaacactccccgtgaaggtctgcagcttcactcctgagccagcgagatcacgaacccaccagaaggaagaaactccgaacacatccgaacatcagaaggaacaaactccggaggcgccaccttaaaagctgtagcactcactgcgagggtccgcggcttcattcttgaagtcagtgagaccaagaacccaccaattccggacacaaaaccctgtctctactaaaaaatacaaaaaaattagcgcggtggggtggccggcgcctgtagtccggctactcangaggctgaggcaggagaatggcgggaacccgggaggcggagcttgcagtgagccaagatggcaccactgcactccagcctggtggacagagtgacattctgtctcanaaaaaaaaagaaaaaaacccattggttaaaaacaaaa

SEQ ID NO: 66221 - DNA, 875 bp, Homo sapiens
  misc_feature (1)...(875): n = a,t,c or g
ggcaccactgcactcctacctggatgacagagtgagaccctgtctccaaaagaaaataaaagtaaagattcaccaagaggctacctggctacataatcgtaatgactctactgctcaaaccatctggggctccatcagtggatacctacaaagtatgacatggtttttacctttcttcggaccctaagtggtcatttaattgctattacttttggcgtattgtgtttttaaccttttggtgaaagtttgtgtctttcaggtttcaatagctccaagtcaagctaatgatggcccaagaattccaacccataacatcccagggagcaccccagtccctacagggtctttagggacagccagtgaggagatttcccccacccccctaaaagttagggcaggggacggacatcccctgtttcaggcagggaagttcggtttcaggaaggttgaggtctttcagcccttttctccttaagaaatagagggtgaaatctcctcagggggaaatagagataggaacaggaaatgggatgggggttgcttctttcatgattactttaaccaatgccttcttactttaaagttctaggaactggccttaggaaatctaactatgaaaccaaggttatggagtatcccacctcaggaaggaacactgaacaactgattgacagtcttcttgccgccagccagaccaccaagtggcccattaaccaagagaaccagcgcaaccagatacgctgacccgcatctcctacctctcatgtgctttgcccagcccagcctgcataccttactcatgatgtcaattcccaagtttcgctaataaaaacatctctgcaagcctcttcagggagcccnccnnaaaaaaaaaa

SEQ ID NO: 66222 - DNA, 2202 bp, Homo sapiens
tcaaaatgaaaattcagtggacaagtggggaaaacctttagtgattgataaactcaaggaaatggccaaagtcgagggtctctggaacttgtttttgccagctgtcagcggactcagccacgtggactatgccttgattgctgaagaaacaggaaaatgcttttttgctccagatgtctttaactgccaagcaccagacacagggaatatggaggttctgcacctgtatggaagtgaggaacagaagaaacagtggcttgagcctcttcttcaagggaacattacctcttgcttctgtatgacagaacctgatgtagcttcaagtgatgccacgaatattgaatgcagcatccaacgagatgaagatagctatgtaattaacggcaaaaaatggtggagcagtggagctgggaatcccaagtgcaaaattgcaattgttttgggaagaactcaaaatacttctctctccaggtaattaaacaattctgattgagaaacctgtgtaggaatgagccagtcttcctcctatctaggtaatttacttaaaattcactgtttggactcacaaatcataatgtaagatatgagagtaaatgtcatatatttgtatttcacaagtattttctaacaggtgtttttggaaaacattatagggagtattgctgaacattcttcgctgtggaattttcagtattagaaagtgttgctaaattatcaaagctgtttggattaaattatcagacaaattttttcagacctgtgtaatgaagtgattagatgtttagatcaaaggcaataatcttgaaatgtttaattatatatataagttcccagttaccattgttgagcagtgagaagcttcaatcaaacaactcatttattttcaaatcattgtttctgttccagatcacagcctgcatcagactatgttggtgtacgtcttttacacagttcccattccagtcatcactgcttacatgactacatgaaaacatcaaaaagacaattgggattctgcttattatctgttttatttttcttcttagcaaactttttctaatacaatttttcttttgactagacacaaacagcacagcatgattcttgttcccatgaacacacctggagtaaaaataataaggcctttgtcagtttttggctacacagataattttcatggaggacattttgagatccattttaatcaagtgcgagttcctgccacaaatctaatactaggtgaaggtaggggatttgaaatttcccaaggccgccttggacctggcagaatccaccactgtatgagaacagtaggtttggcggaacgcgctttgcagatcatgtgtgagcgggcaacacaaaggatagctttcaagaagaagttgtatgcacatgaggttgtggctcactggattgctgaaagccgcattgccattgagaagatccgcttgttgactctgaaagctgctcacagcatggacactctgggcagtgctggcgctaagaaagagattgcaatgatcaaagtggctgccccacgggctgtcagcaaaatcgttgactgggccatccaggtgtgcggaggtgctggtgtttcccaggattaccctctggctaacatgtatgctataacccgagttttgcgtttagcagatggacctgacgaagttcatctttcagcaatcgcaacaatggagctgcgggaccaagccaaaagactgacagccaagatataaggagggtggcactgccacatcccactggcagaaactctcctttatacaaacttcattggctccaacatttgaatctcatatttttgtagcagtttgagcacagggttaattattcatttgtggtaaagattatagcatctattttgatcagtgggttttattatttcaagggtcacacagggttaagttcagtaagaaatgctgtagctgttgtcattcaatctagtgcctccttgaggccaggagttcaggaccagcctgggcaacatagcgagacccccattgctacaaaaaatttaaaaatgaaacaagtgtggtggcacatgcttgtagtcctagctacttgggaggctgaggcaggaggattgcttgagtctaggagtttgaggttacagtaagctgtgatcgtgacatggcctccagcctgggtgaccgagtgagactgtttctaaaaataaaaaaaaaa

SEQ ID NO: 66223 - DNA, 2725 bp, Homo sapiens
agccaccaggcaagaaaccttcagggtgattatgtgtgtgctttttttttttttaatagtatcattcatttgtacagagaaatcatttggatggatctatttacagtcttttctgattatcatttccactggccaaatatatttcacagaatagtcaacactgacttgaattgatcaccattataatcgggcttttactcctcctcccccctttcaaagatgatgatcccattttaacagaaacattttgtaataaaagattcaccagtctttttccatcttatgactaaatccaccaaaatttatttaatatggtcaaatttttaacacatttcattgtttcttttcaaactcattatttgcaggtattgcaaaccaaggcaaataagtccacggtcccctcgagccttctacaacttactgacacgccctcaagttgaggcttctcctatctcctttcacacttgtgaaatgtctggcacaaccagacattttacttgaagacaaaactactctcttttcctctctttttcttttaactcactaccaatcaccttccctcttgcatttcagacaacactaaaactttcaacaaaatctttgaagtggttttctttcagtagtctagaatacatcaagccatttcatgggtctttaccctgaaatgctacactttaaaaatggcaatttttttaattggctcaaaaacagtatggcttggtttcacttggtaaaattaatgtgatttaaaaaaatatatatatatacacacacacacacacatacacacacatttttaatcaggaagaaaaatactttaaagacatgccaatttgaaaaggcatcaaagtaaaaaaataaaagcaaatgctaaaaactactttacaataaaaaaattaaataatcggcaggttaaatgaatgtaaaatgaggaatgtacagtgaaaaacaaactaatataaagcattccagttgataaaaacctcctcaggcttatggtttgttttccaaggaaattatgtttcaatgtaaagtttgaaatactccagacatacattccatgtaggttttgggtgccaatgttaaaatttcaaattttgcatgcaaggcttagcaaagaaacactggcagaattccagcatttgcaaaattctaagttttggtgaatattgtaaatattacaattggtattagaaagccatgatgaatccagaattaagagaaaacccatttcataaatattttgtttgattaaaaaataccaggcttaccatgttttaaataattcaagaaaatatctttaaaaaaaaaaggactgcaatttaacagtaatctgtatatctttagctgccattaaaaaaagaaaaaagaacaaccaaaaacaatgaaaatgttacaactggtataaagtaaccctatgatgctccccttacgagaaaacaaaactgtacacatttataaacaaacagtctctcccatcagttaacacacagagccttctctacaccaaagtctctttccgtttgccaccagaaagggctttgtccctcgctcttcggatgccgggctgtgtctggtgtgtctttaagctcttgctgtcctctgccatctgcatgccagagccacatctgtaagcgttttcatcaacttctacctgagtaacactggaaactgtggatgccctcctctgggctgtgagtttcctcgcagaggggtggttcccctcacactcttcgtgcagctccggcaggccctgcagctcaggtggactgcctgccgactggaagggggcaatggccgctcgaatacagttgaaccactgctgcttgtggaacacgtcattggcttgcagagtgtgagactaggctggagaggggtcatggaagcgaattctaaagatatttttagctttctctgagttactgaaagctcctcgaaaggagcctcccattctcacatctccatcctgcaggtcttctaggactagctcttggactgggattggctgccggtaaacctggtaagagtgccgttcgttccgtgtgacgggccgagtcagaaccaagatgtcttgaaacaggaaaatgtaaagtttatgtccactcttgctccgcagctccccatggcacagcagcactttgctcgcttcgattctggggtccctctgcttttcatccaggtactccagcttgtcgatgtaatactggcactcggattcacctttcttcaagttgatatcagagaggactccctgtattatcaatatagcatcctccagaagctgaacatcagggtgctcttttggagtgtgtttaagaatttcttttaacagtaaagggtatttgactaggcgacttcgagggatatctaggaaactccaaagatctagttttcgactgaagggagactcgagacatcgctggaggaagtcttggactcttggatcctgtttcttttgatcaagaagagctttggctgccagctggttactacagtaacctctgtaggcattcaagcgcggtaactgaagagtaataaaagaaaaggtatgatgtgttcctgttatgaccgagtgcattaacaagcctgcaaacatgaaacacaaaatgtacagctattcttgagagttttaacaagctgtggacattttctggcagataataatggaagctgaatagcattttagcaatcatcaaaatgctcttcaaattttcataatttggct

SEQ ID NO: 66224 - DNA, 385 bp, Homo sapiens
aaagatgaatacataagtaaatcacattcctatatattagcaatgaacaagtagaatttgaaatgaaaacacaacacacttacatcaacacccccaaaaatgaaatactcaggtataagtctaacaaaacatgtacaagatctatgtgaggaaaactgcaaaactctgaaagaaataaaagaggaactataaatgcatgaagagatatttcatgttcacagataggaaccctccatgttgtcaagataccagttcttcccaacttgatctataggtccaaagcagtgccaatcaaaatcccagcaaataactctggatattgacaaactgactctaaagtttatagatagaggcaaagaccccgaatagccaatacaatattgag

SEQ ID NO: 66225 - DNA, 2744 bp, Homo sapiens; identical to SEQ ID NO: 66131

SEQ ID NO: 66226 - DNA, 1624 bp, Homo sapiens
  misc_feature (1)...(1624): n = a,t,c or g
gagaatgtcttgccacccaatgtaacaaacacctctgaatttttttttgtttttgacagttttttgtctcacctaatctggccacctttgttttgagcgtggtgcctccagtgtcaatcattgctgtaatttatgggcgatatctacggaaactgaccaaagtcactcaggattccctggcacaagccactcagctagctgaggaacgtattggaaatgtaagaactgttcgagcttttgggaaagaaatgactgaaatcgagaaatatgccagcaaagtggaccatgtaatgcagttagcaaggaaagaggcattcgcccgggctggtttctttggagcaactgggctctccggaaacctgatcgtgctttctgtcctgtacaaaggagggctgctgatgggcagtgcccacatgaccgtgggtgaactctcttccttcctaatgtatgctttctgggttggaataagcattggaggtctgagctctttctactcggagctgatgaaaggactgggtgcaggggggcgcctctgggagctcctggagagagagcccaagctgccttttaacgagggggtcatcttaaatgagaaaagcttccagggtgctttggagtttaagaacgtgcattttgcctatccagctcgcccagaggtgcccatatttcaggatttcagcctttccattccgtcaggatctgtcacggcactggttggcccaagtggttctggcaaatcaacagtgctttcactcctgctgaggttgtacgaccctgcttctggaactattagtcttgatggccatgacatccgtcagctaaacccagtgtggctgagatccaaaattgggacagtgagtcaggaacccattttgttttcttgctctattgctgagaacattgcttatggtgctgatgacccttcctctgtgaccgctgaggaaatccagagagtggctgaagtggccaatgcagtggccttcatccggaatttcccccaagggttcaacactgtggttggagaaaagggtgttctcctctcaggtgggcagaaacagcggattgcgattgcccgtgctctgctaaagaatcccaaaattcttctcctagatgaagcaaccagtgcgctggatgccgaaaatgagtaccttgttcaagaagctctagatcgactgatggatggaagaacggtgttagtttattgcccatcggtctgttccacccattaagaatgcctaatatggttgcctgtccttgacccaaggaaaaattacctgaatagggaaaaccatgaagagcctgcctttcaaaacccaaatgggatataccagaaaacctaatgaacaaacaaagttttatttcagcataaggaagcaattactggtaaacaatatgagactttaatgcaaaacagtgttgcagaaaaaaaactcagagactatgaaatacataaaccgatatatcaagttatttgaaaaatacctatttttttccaaagtgtgtaaaagattgttttgaaacgtacctgttctcaagatctttttattcagagttttaataattgtaactttttaaatgtctatagcactgaagttattttcaggttttgtattntcttttcttg

SEQ ID NO: 66227 - DNA, 4747 bp, Homo sapiens
ttttttttttttgaattaattgatgaggtttatttgattgtctttcttataaaatacattaaaaatactgcttttaactgtaggcacacaattaaaacaaatgtaaacctatgtttaatttaaaatatattaaaatgatttaataaaggtcttttattattttacacatcaaatttcatgcaatcagtactccactgaaggagaaaaggattatgaaaaaacaatgaaagcacagggtaggaaaataaacaacacaaaagactaattctggattttttttctgtgtccttaataccctgtgctgtctttgacaacaaagatgccttacttatgtgattcagaggcccggaagtgaaaaaaatacaagtagttaatgaataatgcatatgttcatagcaatggtcaaattatactgtttcctaatggataccatttttctttatcgagtgggacactacagagtcggatgttaattgctcccacaaatacagttttactcttcacaataagcattaagacatgtccttggagctctgtgacttcatcatatactacaatttcattgtaagtggggtccgtacattttggaacagattttgttttcctcctacgaacttcactgggatatggtaaaagataaaattcaacatgtgcactgggcgcagagccatctgggagatgaatgtttttcatgtgtttcactagtatggtcagcttcacatcctcgtaggatatgactaactgcaccttaggcttcttgtctggaaacttctcacctaggtacacaggtgatgattcttcaactgtttgttgcccagcctcagagaggaaaaagctaagtacacaatcactgtttgtaacttcatgtgatacatttaatatctgttccatgtaatgatttagatctctgaatcttctgtgatctgaatttgtaaaaggtaggtgccaccaatgaggaaactctgggagagtcagtgatgcaaactgcttctgaagttggctgtgaagttttgaaaactgctcaaatgatttttctgtcaggcttgtttcgttgttgctgtgtgtcacctggatcagatacagattactggatttcttgctgaaccctaaaattgttgctctttcaatcgacctagttgtactcagcaaacaggattcctgaggaaaagtctgtgaagtagatttggcagggcttatggctgacatttgtgcaagtgtgtggatcaagttattcaatttaacagggaaacactccagactttcctttattttcttggtaaaatgacttgttgcttccaggtctgtgtcttgtggacgaagattattatacacatatttcaggtcttgaaatcccacttagctcaggcagtccctgcatacagcatcatttcccagcaggttccaagagcagttggctgtgctttctgataatattataagcacgacagcaaagttcccacaaaatcttgaaaatgctgtgggtttttccccaccctctgtaataaagtattcccatctctgaagtaaaaatgaaaggagctcggtccctttttatccctccaaatgtttgtgcatgacctaagaattttccaaagtcaatatgaaacatgtggcccgactttgtcagcatgatattatcattgtgacggtcacatactcccaggatgaatgttaccacacaccagccagcacaggagtagaaaaagttcctcaaggccttttcataatctgcctttaagtggttgtgctgactgaaccactttttaatggtattttctttcaatggtcctatcagtccagaatggcgatgaatctttgctagggtcacagcatcaggtaccatctgcaccaatcgttggtcttttcctgtggatagacatctataaatgatcatttgcatatccaagccttcctgcagccaaatattgtccatcacttgaataagctgcagaacaagcatatcctgacgaagatcatctccagccttaaaaataatgctgatgtttttgcccatcagattagcattgatgaaagtaatcttcaatggcaaagcattagatgtaaaatatgaacatgcatcgtgatcaatcccttttatacatagggcagggttcagaggaagatgacaagtatttacatcttgaaagaactcttctagtctgccaatttctttcttcagtacctcctgtctttgatggtcactggcagacttgactctttccccaatatctcccagaattttgataagtttctgctccttggaaaactcatcattcaaggctttacctgcacagaattggagagcagctagtagcttctgataccagcttttaaaataagcttcattttctgcattttttagcagccagtaaagacgatgggcaacctggatgctctgcaaggagcggtggagtagaagttgcactaaaggactctcaaggttccattcaaacttgacagcctgaactagctgtgggagatattccagtagttcatcattcaagaggttgtctaattgttgaactgccactttacgaatttcttgatctggaaaactggaagtcaaaagcccaagagcctctaaaggttgagaaaatgtccatcttctcaaaatggtatgcatttctgaaacagtcctttcatcccatccaggggcactacccaggactaaaggaagggagcagttttcattattgcagtagaagcgataaaaccataaatatcttttcttttcttcagagagtagtaggggagtctgtttctgtgaaagtctggcaatatgttttatacactcctttagtggctcttcaagattacttctattctcttcagaatcaggtttcatatactcccacccagtagctggaaaatcaatctgcagggtcaccggggatggctgacttacatcccacactcctggagttatcatttctacgggaggctcactctgtaatgtcatgctgaacagcatagacccgagaatggatttttcttttggaaacagtggaagacaagtccacgccagtaaatttgcattgttggttgcacaggcaatcccaaacagttttacagtgagcatggattcccttggaagtgactttatttcaaggggaaaattgatcctgtgcacccaggtttctggaatgttgtgtgctgcatacactgtgaagctgaggtgggaaggaagcccgggatttagataggaagtgcatctaggtacatttacaggctgaaaatctgcataaaagctgttacagtagacattgattagctggtagatggatgtggatagttcagttgttaccttctctatcaagccttttgctgaagtctctgaactttgataaaaattctctccttttctctgaagaattagacttagttcatttactgcatctgtaatttgtttggtttccacacaccctagaacactgcatatttttttaacttcttcaataatattatacacgttttcctgggttttcaataggtatttcaggtggaagtcatattttctgatgagtgttaagagacattgtctggatactttccaaatatgcataaattctagaagttgattcagataaaactgactgtggtcctcttcatgctttcgagatagctttcctggagcttccctacttttctgcaggtggagctgaataacagatttatctttttgaaacattttgtggctccccaaacagtggtcgttttgtaaaaattcttcagagccccatacacttagaatatgatctttggggagtagctggtcatttgtgcaaaaatgcagaatttctgcaattagatctttgacaagataattagcacatggcataaaatgaagaggttgtgttgagttatcaataaaaatatgtatattaaacttggtcttagaaaagagctgatacggaaatgctgtagtagtgctccagatcttcccagaattgaaattaacatcagctgcatgatatctttctctgattttttttactttgttgcaaaaagaggccagactcgtattgctgctttgaggtacttccactagctgaatggaacaacctattgactctatattcttctgccatgtactttcccacattccgggttgaagagagcctttcaaaagcatcaaagatggttccacaatgttcacatgtccactccttttattctcttctttcggcatgaagtcacttgagaaggatgaatttgttggaggaatgctactttcaaatcctatatggtagttatgattttcattttctaattctttctctagattaattttatccaaacttgtgaatgatggagctaaaatactgaatctggaatcatcagcaccatgatgttttcctatggggcttccccaggagcattctttattcgtattttgaggttttggtaacacagaaggactaaaaccaattgctggtgctttgctaacttgatgccaggagagttcacggcttttagaagtgaattcattcaaggatatttggtgtgcttcatttaatgaatgccctgttgagtcccattttggtgcagtgggcacaaaaaaggtgttttcatcaatttcactctcgtagtgtggaattttgccactgatctcatctactatctgatcaaaacccagactgacttggctagaagaatggggttgatttacaaagagaaattcttggtgttcatactgcttttcgtgtgattcattaggatttggatccgtttgccaagaatatgccat

SEQ ID NO: 66228 - DNA, 2817 bp, Homo sapiens
aaatgttccagctgatgatgtgtctggaaataaacatgaaactatttatacaatactaaatcaggacgcccagaacaagagtcccagcgcggtcatgagccacgaatcggatgctgctcactctgacagtgccaggtcatcttccagcaagttagaactctcgcctgatgttaacaaaataaggaaatcagagcccaagatcaagaagtctgtaagtcatgaaagagtctccaaaatgaatttttaattgactggaaaagggatcacctttttctcatctgagagcaagaaatatgagagacccaaggatgatcgagaggaagagttcaacacgtgggtcaataatatgtacgtcttctttgtgaacacgctctttcatgcgtataaacgtgaagaagctatcaaggagaaaataagggcagacaggttacgtagcacagcacaggcccagcagcggaagatggaagatgacgaactggaagcaaggctggacatctttatcttgagagaggaagaggccaagagacatgactatgaggtggacatcacagtgctcaaggagccggcagacgtgtcatcctctcacctcatactggaccctcccaaggaggatgtgaccgtgtccccatccagcaagaccatcaccagcaagaagaagaaaaagtagagagacacgaggacacacacacaggcttaggatggcacgtgctgtaagatttcctgagcattacagttcttagcactgaactcgtcacagtgttttaacataccccttggcccactgcatctcaggtttcctacatggctggattacgggagttcgagaccagcctgggcaacatagtgagacccccccatctctgcaaaattaaaacatcagccgaccgtggtggtgtgtacatgtggttctagcttcttgggaggctgaggtgggaggattgcttgagctcaggaggttgaggctgcagtgagccattgcattccagcctgggtcacggagctggtggccagtgtaatctataaataggcagcaggagagagactcaacaccaaaccagaattttaaaaacttttaacaatttattagtcttattttccagtaaaatattcacagagatgtcaaaagaatgagatggtgagcgatatagccaactacctttaattaattccacataaatagttaagatctaaaaacctcagatgagcagaccgagtcgaaatgtgattcttcaaagcaagtattgctttacccttgtcctgaatgcagtctgtcatatgaccactaatttgcatgtgaccaaatggttgcagagtgttttttagatatgctctcggtgagccgtcatccgtcaatccaagaagaagatgttgttgaactgcgttgcacaaagtttcttgacctcttcatttacttcaatcaggtttgcatttttttgattcaaaataacatagagctcccgccgatcagacttctttccaacaacccagtaatcactcatggccttcacaatgatctcctcatcttcatccactctggtaaagtcactgttgatgtcaccgagaatcttcattaaatccgggtgcacggaagtgagcgacacgctgggcgttttcctcatgtgaactgtgctcttctcggcgagattcatgtggttgaagtagataaacttaaactggggttcctttcctcagaccccggaacatcccccttgttgatgttaaaactgttccacaagatgtccagaggcccagccactgtgaagctggggccccaacgatgctgtcccagtccttcggcaaaaaacccaacgttgggtggacagaggcgtcgatcataaagcacacagccgcactcatggccttataaacggattaaatggagctcttcataagtgtcatctgtatttacaaaaattttggggaatctgcattttgcatctggatcattgaggttcaagggtccggtaagaaatcttccatagtgttgaagatttcctggcatttctgctcttattggagaatcccttcctgctaactcaggttcggatgtgccttgggaaaagggaggtggtaaggtatttgtataaaattctcatgtcatcttgttctaatccactccagatgagctgatcgttatagagaaaagcagtgtatttgactatattcaggctttcctccattcgtattaataaaggactggattttcaaataagtcattttatccaacgggaagaagctgattccaccaaaaatgtcaagtaggtcacatgactgcaaatgtagcgtttgcaaataccgatggaagaatttctctaatctttctttcagaagcttgacgcctccgtcttccatggctttcagaaatgtaccattaaaaagcttgtacatgctgtagcactgccgcagcaccgagctataaaccttgtccaacaactcctcctcttgatattcaataactggttttccatctttactctgtttttcaattataggattccgaacaaccatgaccatccagaaattttcttctggttcattgaagaactgtctgttcttctgtgtatgtaaagattttgcaggttttgatgggctaaatgtccttgtaaactgtacaatagcttcacacaatccgacatttctaatcttctcattcttttctacctcatttggatgataaaataaaatcttattttcctcctgtccttcgcgcggcccgaagcgcgggttgtagatgaagaaactcagcagcgccggcgggaactgcttctcctgggccgcccagggcccgctcccggccccggccgccgctgcagccat

SEQ ID NO: 66229 - DNA, 446 bp, Homo sapiens
aagttaaaatgatattaggaaaaagctcagattagatataaaattgatcatgtctgccagaaaatattctcctaaaagcaatttctctctaaacacccaaagcgcacagctactctcagcaagagaaacatgagcattatgaagaaaggtggcagattttcagaagaatttttataaagtttctttcccatctctgctgttctgtcatctcctagccattgaatggaggttctatattgaaatacatctgacaacttccaacaacactttttgatgaagaaatagaatctgactatgttcatatagtggaatatattagaacttgcaacatagccaaactgaagagctattatggtttttgggtggccacatcacatgtctttatttgtcctgtaatagcagcattccaatttagtgaaataaaagatactaaaattgtgtttact

SEQ ID NO: 66230 - DNA, 1101 bp, Homo sapiens
tacctggatcgggtgaaggtactggtgttgggagactcaggtgttgggaaatcttcgttagtccatctcctatgccaaaatcaagtgctgggaaatccatcatggactgtgggctgctcagtggatgtcagagttcatgattacaaagaaggaaccccagaagagaagacctactacatagaattatgggatgttggaggctctgtgggcagtgccagcagcgtgaaaagcacaagagcagtattctacaactccgtaaatggtattattttcgtacacgacttaacaaataagaagtcctcccaaaacttgcgtcgttggtcattggaagctctcaacagggatttggtgccaactggagtcttggtgacaaatggggattatgatcaagaacagtttgctgataaccaaataccactgttggtaatagggactaaactggaccagattcatgaaacaaagcgccatgaagttttaactaggactgctttcctggctgaggatttcaatccagaagaaattaatttggactgcacaaatccacggtacttagctgcaggttcttccaatgctgtcaagctcagtaggttttttgataaggtcatagagaagagatactttttaagagaaggtaatcagattccaggctttcctgatcggaaaagatttggggcaggaacattaaagagccttcattatgactgaattacactcatcctttggaagagtgagcaagcagtggcagtttttcacagctcatcttgctgtgttcaattattaccatcacagccttttaacaaaatcatcttaaaatgctacccttcagccttaccctttaatggaaaaatgaaaggaagtgacaatacgggaggtccaaactttgtccctgttctctgtgttccttacctttctgtccctgtgtatagattatgtaaaagccttgtgtaaatatgagatgttgtcaaaatgatgcagtaaatgagcaatgacagtgtactgcagagaaaatttactcttgcctagaactggagggtttttatgggtctgtaattttcccacactcattgctgaaagcttaattaagtacttcaaaaacgtaaa

SEQ ID NO: 66231 - DNA, 364 bp, Homo sapiens
aggaactagataggctgaacagaccaataacaagtaatgagattgaatcagtcataaaaagtcttccaaaaaagaaaagtccacgaccaaagggcttcactgctgaattctactgaaactttaaaaatgtaataccaacttttttcaaactattccccaaaaaaacgaaacagaaggaattcttccaactcgttttacaagggctttatcttgaaggcaaaatggcaccactcaaatgtccatactcaaatatgccgcattttggattttccctgggctgtcacctcctatcctggcttcaaaactgtgtatagtgagcacatctccgcgggtctccccaccctgtgggtaacacttgacgata

SEQ ID NO: 66232 - DNA, 1695 bp, Homo sapiens
tggaattcctgggtcgacgatttcgtgaaagagtcattaacagttaggagttgatggcagtttcaataacaggtcattgccgagaaaaggatagcactataatatgcagaaatctacaaattctgatacttccgtggaaacactgaattctacccgccaaggcacaggagctgtgcaaatgagaatcaaaaatgccaacagccaccatgacaggctcagccaaagtaaatccatgatcctcaccgatgtcgggaaggtcactgaacctatatccagacacagaaggaatcattcacagcatatcttgaaagatgtcattcctccattggaacaactgatggttgaaaaagaaggttatctgcaaaaagctaaaattgcagatggaggaaagaaactaaggaaaaactggtctacttcctggattgttctttctagtcgaagaattgaattttacaaagaatccaagcaacaggctctgtccaatatgaaaactgggcacaaaccagaaagtgtggatttgtgtggagcacacattgaatgggccaaggaaaaatcgagcagaaagaatgtctttcagatcacaacagtatcaggaaatgagttccttctacagtcagatattgacttcatcatattggattggttccacgctatcaaaaatgcaattgacagattgccaaagggttccaagttgtccattcaaggaaacctgggatttatttcaaattccaaaggttcctctagcactgaattgctaagtcactaccgacagtgatataaaagaaccagaaaccatgagcaccagaaaatctttaatgttcagactgcatcacagtgcttccgatacaagcgacaaaaatcgagttaaaagcagattaaagaagtttattacccgaagaccttccctgaaaactctgcaagaaaaaggacttattaaagatcaaatttttggctctcatctgcacaaagtgtgtgaacgtgaaaattccacagttccgtggtttgtaaagcaatgcattgaagctgttgagaaaagaggtctagatgttgatggaatatatcgagttagtggcaatctggcaacaatacagaagttaagatttattgtcaaccaagaagagaagctgaatttggacgacagccagtgggaggacatccacgttgtcaccggagcactgaagatgttttccgggagctgcctgagccgctcttcccttacagtttctttgagcagtttgtggaagcgatcaaaaagcaagacaacaacacaagaattgaagctgtaaaatctcttgtacaaaaactccctccgccaaatcgtgacaccatgaaagtcctctttggacatctaactaagtaagttgtaaggatttctggatgtgtcattttatagtcatttcctaaatgggcaatattgaatttcacatctctaaggcaagagtttccaaatgcgtacatctcgtattttcccttgtagctgaactaggtctttctgcagaagctggagaatgtgttagggataggaaggacaatctacaaaaggaacttctgaaataacttatttttcaaggccctttcaactagtatatgtttgctgattgcttgtcagaaccatcgcctggaccctgggatgggtcatcttgactttgttatctaacataatgaaagaacatgaaatgattcagacatggattc

SEQ ID NO: 66233 - DNA, 2077 bp, Homo sapiens
ccaggactttctggactcacagaacctcagtgcctacaacacccggctcttaaagaggtcgatggagaagggaagccctactacgaggtgcggctggcttctgtgcttggctcagagccttccctggactctgaggtgacttccaagctgaagagctatgaattccggggaagccctttccaggtgacccggggggactacgcgcccatcctccagaaggtggtggagcagctggagaaagccaaggcctatgcagccaacagccaccaggggcagatgctggcccagtatatagagagcttcacccagggctccatcgaggcccacaagaggggctcccgcttctggatccaggacaaaggccccatcgtggagagttacatcgggttcatcgagagctaccgcgacccctttggttcccgaggagaatttgaaggtttcgtagctgtggtgaacaaggccatgagtgccaagtttgagcggctggtggcgagcgcagagcagctgctgaaggagctgccctggcccccaacctttgagaaggacaagttcctcacccctgacttcacctccctggatgttctcaccttcgctggctccggcatccctgccggcatcaacatccccaactacgatgatctgaggcagacggaaggctttaagaacgtgtcgctggggaatgtgctggctgtggcctacgccacgcagcgggagaagcttacctttctggaggaggatgacaaggacctgtacatcctctggaaggggccctccttcgatgtgcaggtgggcctgcacgagctgctgggccatggcagtggcaagctcttcgtacaggacgaaaaaggagcattcaactttgaccaggaaacagtgatcaacccagagacgggcgagcagattcagagctggtatcggagcggggagacctgggatagcaagttcagcaccatcgcctccagctacgaagagtgccgggctgagagcgtgggtctctacctctgtctccacccgcaagtgctggagatctttggctttgagggggctgatgcggaggacgtgatctacgtgaactggctcaacatggttcgggccgggctgctcgctctggagttctacacacctgaggccttcaactggcgacaggcccatatgcaggcccggtttgtgatcctgagagtcttgctggaggctggcgagggactcgttaccatcactcccaccacaggctccgatgggcgcccagatgcccgggtccgcctcgaccgcagcaagatccggtctgtgggcaagcctgctctagagcgcttcctgcggagacttcaggtgctgaagtccacaggggatgtggccggagggcgggccctgtacgaggggtatgcaacagtcactgatgcgccccccgagtgcttcctcaccctcagggacacggtgctgctgcgtaaggaatctcggaagctcattgttcagcccaacactcgccttgaaggctcagacgtgcagcttctggaatacgaggcgtcagctgctggcctcatccgatccttctctgagcgtttcccagaggatggacccgagttggaggagatcctcacacagctggccacagccgatgcccgattctggaagggccccagtgaggccccatctggccaagcttgaggaagatgtgtggccttgcccccaattccatcagaccaaggctgcaagtggccctccattcgtgtgtgtatttaggggctggggagggggaggggcaggagcttggaccttggtactacctcagctgagggtggtgacacaaccccttccatttgtcagcactttccagcctgccaattgcttcccctctgtgatctcatttcatctgcactgccatacgtggagtgagcaagacagggcttaccatcctgtctaccagatgaggaaatggcagttctgagaagtcactggtctagatcccgcaggtggcacatgacagctagggttcaaaacgttctcaccaaatccaatgctcctcacatattaattttataaccagacaaataaatattagagacaaccaccaaaaaaaaaa

SEQ ID NO: 66234 - DNA, 679 bp, Homo sapiens
ccagacatcatcctagcacttaaggagctggaagcagaggtatcatttaaactacttcctctgcttccagacatcatcctagcacttaaggagctggaaggttgaacagaaattcttcttggaatccttgaaggtttagactccattcttaaagattggattctgaatatcaggtaacatttttatttggaatatatgtatacagcctttttcaaaatccctagggccactcttttgggggtatttaaaaaatgtgttagctggatctgaggcatcctgtaatcaaaaccaatatatatgtagcaaaatgaataacatttttcaaactttttggacttcagaattatggataacagattgtaacctcatataaaatcatacttttgcgctggggaacggtcgtcacgcctgtaatcccagcactttggcaggctgagactggcagatcatttgaggtcaggagttcgagaccagcctggccaacatgacgaaaccccgtctcgactaaaaatacaaaaaaattagctggacatggtggcacccatctctactcccagctacttgggaggccgaagagggaggattgcttgaacccaggaggtggaggttgcagtgagctgagatcatgagactgcactccagcctgggtgacagagtcgagactccatctcaaaaaaaa

SEQ ID NO: 66235 - DNA, 2287 bp, Homo sapiens
ggtttgcttcctttcccagcatcaatctccagcaaatgctaaaagaagtccccaaaaggtttggggatgagagaggtgccattgttcattacacgattctcaataaccatgtttaccggagatctttagggaaatacacagacttcaagatgttctctgatgagattttgttatcattgacaagaaaggtccttctcccagatttagaattttatgttaatcttggagattggcccttggagcatcgaaaagtcaatggaacccctagccccatacctatcatttcatggtgtggctctctggattcaagagatgttgtccttccaacgtatgacatcacccactccatgcttgaagccatgcggggtgttacaaatgatctcctctctattcagggaaatacagggccttcctggatcaataaaacagagagagctttcttcagaggtagagacagccgagaggagaggctccagttggtacagctgtccaaagaaaatcctcagctactagatgcaggaattacaggatatttctttttccaagagaaagaaaaggagcttggaaaagccaagttgatgggtttacttgatacttgtacttaaagaaatgtggatgggaccgtggctgcttacagatatccatatctcatgctgggcgacagtctggttttaaagcaggactcgccatattatgaacatttctacatggcactagaaccttggaagcattatgttccaattaaaagaaatctgagtgatttattagagaaagttaaatgggctaaggaaaatgatgaagaagccaagaagattgcaaaagaaggacagttgatggctagggacctactacagccacacaggctttactgctactattaccaagtactgcagaaatatgccgagcgccagtccagcaaacccgaagtacgtgatggaatggaacttgttcctcagccagaagatagcacagccatctgccagtgccacaggaaaaagccttcaagagaagaactttgagtcagcccagaatcacactcctgtgtatcccggctacactttaaggaaagattgaatctaagctgtgaaggacagtatagaagactgcaccaagtggactagttctcccggtggctttatatatgtagatggatatagcagtactggttgagtatccctcatctgaaatgcttaggaccaggagtgtttcaggcttcagattttttaagatttgggaatatttgcatgtacataatgaggtatcttggggatgagatccaagtctaaacacaaaattcatttatattttatatataccttgttcacataccctgaaggtaattttatataatatttttaataatttgtgcatgaaacaaagtttgtatacattgaactgtcagaaagcaaaggtgtcactatcttagcgacccaagtggtggtgtcagcactcaaaaagttttggattttggggtatttcagattttagatttttgtatgaggaatgttcaacctgtatttgaacgaagcattaccaaatatcgattgaatattaatatcttttgcgtaaaaactgctattatcagcatcatagtttctctaaaaagaaaacttggggatcatagccgatagagagacttgctaaaatataaatcagcctctgcaaaactgtttacatatttattggtttacatattttattggtttatttctatcccctgttcactttttctcttccacttccaattatgaagagaaaatatttgttcagggttgtccccccgccccccgtcactgcataatttctcctcttacaagctgcttttggctttcattaataacagcttccttttagaaggtctgataaggatatttaaggaagaagagaatgactctgttattaaaggtggcatggagactgtggagggaatattttttaaagcactactcatatcctttaaactaaattttgccaaagcccgagacaacattaaggagaaattgtaccttaagttagtaattccaaatctatctgagttgtatacccatcaaagacaatacagttattaacatagatgaaggtatgctataggcatcattcattatctctatattgaataggtgaaagataactgtagtcaggtgaaaggcattcattatttttaagctgaaaaggggatccttgaaaacactgaaaacctctacaacaatcttcaggaagcctgctatcttgggattcactaataataggccaagaacaaaggcgagcatccattcctcactccacg

SEQ ID NO: 66236 - DNA, 1378 bp, Homo sapiens
gtgcggtggaattccggcgtttgcacggagtgcaatcactgcgtccttacgggggttgcaaggcgtccgaagtatgagtccactaacaaaagtccagaaactcgccagttaatagtattgtgtctcttcaaaatatcggagaataatttctttctcgctgatcgcctaacttctactgacgaagcttggaagttgcagaaggttggagtgcaatggcgcgatctcggctgactgcaacctccacctcctggattcaagctattctcctgcctcagcctgccgagtagctgggattacaggcatgtgccaccgcacccagctaattttgtattttttagtagagatggggtttctccatgttggtcaggctggtcttgaactcctgacctcaggtgatccgcccacctcagcctcccaaaatgctgggattaccggtgttgagccaccacgccccgcagacttgtgttaattctacagggaacagcctagaagacacaccatgttcacacacatgccaccctacctttgtcttctcactgttggttattggtgggaaggaaatcacatcaccgtctgcatccacaagacacgggtaattttcatttccatccagcaagtgaaggtatctgtgcaggcccgacacactctgccgcttcttctgcttcctctgctcctcggcctccagctgcagctgccgcaccagctccttggccttggcttctttccgccccaaggggacaatcttgaggtcctgtgggggccgggcgcagtacagcaggggccctttgacggcacggagctcgtgggtggcaagggtggcagccgtcctcttctcacagagatcttcgtggagcttggtctgcgaggtgaggaagcgcttgagtgcattccctggctgcaggtccatgcctcgcaccacggcccccacaatgtagggccgcacatcccggacctcggggctcactctgactgtcagaggtacggggttttcagagacgtgcaggaccctgagcagcagccggccggcatctcccacgtcctgctcctccccatcaccaccttcccgcctctgcttcctctccctcctcttcctccggctctcttccttctccgagccctcggcacggcccttgcccttcccgccaccacggcctccgacgcgcaggtactccaggatggatctggtctggcagccgctgaccatcttctccaggcgcttgtccctcagcttgttcccacggaaattgatctccttgagcttggggcagtccgcaagctctgcagggatctcgctcagctggttgttcgagaggtccaacgtcttgagcgaggccaggtgggcgatgtcggggctgagttctcggagcccacgcgtccg

SEQ ID NO: 66237 - DNA, 2017 bp, Homo sapiens
tttcgtgcgggagatcagaggtcccgccgtcccgcgcctgacctcggctgaggacaggcaccgccatgggccacacgcacacagcccggagttgcagcggaccggcagagattacagcctggactacctgcccttccgcctatgggtgggcatctgggtggctaccttttgcctggtgctggtggccacagaggccagtgtgctggtgcgctacttcacccgcttcactgaggaaggtttctgtgccctcatcagcctcatcttcatctacgatgctgtgggcaaaatgctgaacttgacccatacctatcctatccagaagcctgggtcctctgcctacgggtgcctctgccaatacccaggcccaggaggaaatgagtctcaatggataaggacaaggccaaaagacagagacgacatcgtaagcatggacttaggcctgatcaatgcatccttgctgccgccacctgagtgcacccggcagggaggccaccctcgtggccctggctgtcatacagtcccagacattgccttcttctcccttctcctcttccttacttctttcttctttgctatggccctcaagtgtgtaaagaccagccgcttcttcccctctgtggtgcgcaaagggctcagcgacttctcctcagtcctggccatcctgctcggctgtggccttgatgctttcctgggcctagccacaccaaagctcatggtacccagagagttcaagcccacactccctgggcgtggctggctggtgtcaccttttggagccaacccctggtggtggagtgtggcagctgccctgcctgccctgctgctgtctatcctcatcttcatggaccaacagatcacagcagtcatcctcaaccgcatggaatacagactgcagaagggagctggcttccacctggacctcttctgtgtggctgtgctgatgctactcacatcagcgcttggactgccttggtatgtctcagccactgtcatctccctggctcacatggacagtcttcggagagagagcagagcctgtgcccccggggagcgccccaacttcctgggtatcagggaacagaggctgacaggcctggtggtgttcatccttacaggagcctccatcttcctggcacctgtgctcaagttcattccaatgcctgtgctctatggcatcttcctgtatatgggggtggcagcgctcagcagcattcagttcactaatagggtgaagctgttgcttgatgccagcaaaacaccagccagacctgctactcttgcggcatgtgcctctgaccagggtccacctcttcacagccatcagctttgccctgtctggggctgctttgggataatcaagtctacccctgcagccatcatcttccccctcatgttgctgggccttgtgggggtccgaaaggccctggagagggttttttcaccacaggaactcctctggctggatgagctgatgccagaggaggagagaagcatccctgagaaggggctggagccagaacactcattcagtggaagtgacagtgaagattcagagctgatgtatcagccaaaggctccagaaatcaacatttctgtgaattagctggagtaggagtctgggagtggagaccccaggaaacagcatgaggtgcttactcaggaagtcaggacatttttggcctttggcttaacttccagatgctcagtcggcttggggaaggactgaagggcagctgccaagacctcagttacctcctgacctgagggtggagagtggcaggaagcaagcatgtttgctgtgcacttaggaaaggctggtgagccagagggactgatcaggccccattcactctctactcattaaaaggtcctgagccacgaagcgcttcccattttgaactttctgtcctcacagattctgtttgacagaatctaagggccatcagggaactcttttcatcttgcaaagagaaaaagccagtctttccagaataaatattcatctgtttgaaataaa

SEQ ID NO: 66238 - DNA, 1056 bp, Homo sapiens
tttcgtgttctgggaacgcagcagtgaccggcctgtccggtggttccctgccaggtgcggggtgtgaggagacagatgcatggataagtctccgtgggaaactcaggcctttgtcctggcggaggggaatgggtctgaggcagcctctgccgggctggcggcctgtctggctgcgcgtcctgcagcaccggcctcacccccagcacacgcccgccaggagcgcaggggccccgaggatggaagcgtctgtctgaggcgctgtcctgggaccccaccccgccttcggggctgatgcacagaccgggaattgaggatacctggtgtggaggaggccgctgtgtttgggcctgggtctgaagggtgagtgggtgtcattgtggccacgggccggggtcgggggagcattcaggtggccggaggaggcctggcacagggaagggcagtgaggggcccgggtggggccaggagatagaggggcgggaccaggcctgtgggacagtttgaatcacgcggggagtttggtctttatgggaagaaaggcgccgtggccattcggagagccactctggcactgctgccggtgcggtccggggctgcggggcctcctcctgggcctgaactgcagggctggtgggggccatgggggaaggtggctccacaggtccccggagctgggggagcaggaggatggggttgaccaggagggaaagctatggagctggagaatgcaggaggcccccgaggggaggtgcagccagcgctggtggggaggcctctgaggggtacgcggtaattgacatcacgggtgtgggtgagagtggctttcaaagcatcggctggagcagggtccccattaaagccagagacgctgacgccatggggctggggttggggctgggccggggctttgggaggtccgaactccccagcagggagccagggctctgggccagttcccaggcccagttaatcttcagtagaatcgatcgaccttggctcagagggttggaggcagggatgggcaaagggtgaggggtgaggcgcacgaatggcgaa

SEQ ID NO: 66239 - DNA, 430 bp, Homo sapiens
cataattcggcacgagggaaaccagggagcccccctacttcagtgtagagtcagcaaaacctgtgcaggacttctatgccaaaattataaagcactgacgaaagaaagtgaaagggatctaagtaaataaggagacataccatgttcattaattttaagactcaacatagcaaagtcgtcaattcttcccaaatggatgtgggtttaatgcaattcctatcaaaatctcagcaatagtgtttctagataaagacaaaattattctaacatttacatggaaaagcaagtgaactagaatagctcaaacaattctggatgaaaagaacaaactagtaggaatcaatttcaatatagctacgtaatcaagaccctgtggtattgctgaagaaacagacacatagatcaatggaactaacacaatatacccaca

SEQ ID NO: 66240 - DNA, 2248 bp, Homo sapiens
gcggtattcggcacgagcttccctccctcccttctctcgtctcctccccactgcgcctccctccctcctggccttccttcccttacccgactttgcagatttctcttcccccaggcctccctcctccacctctccgccccctccgggcttggctctcccaggaggctacgactggagccactggtcccgcaggatccccgcgtcctcggtcgccgcgtccacgtccctctcgcgtccccgcccggcgccacgccgcctcctctgggttcggcctccgcgcggtgcagcgcagtctcaggccgcgggacaagcccgacttaaatctctgcaatggctaacgaagcttatccttgtccgtgtgacattggccacagacttgagtatggagggctaggccgtgaagttcaagtcgagcacatcaaggcttatgtcaccaaatcccccgttgatgcaggcaaagctgtgattgtcattcaagatatatttggctggcagttgcccaataccagatatatagctgacatgatctcaggaaatggatacacaaccattgttccagacttctttgtagggcaagagccttgggacccctctggcgactggtctatcttccctgagtggctgaaaacaagaaatgcccagaagatcgatagagagatcagtgctatcttgaagtatctgaaacaacagtgtcatgcccagaaaattggcatcgtgggattctgctggggtggaactgctgtccatcatttgatgatgaaatactcagaattcagggcaggggtgtccgtctatggcatcgtcaaggattctgaagacatttacaatttaaagaaccccactttgttcatttttgctgaaaatgatgttgtgattccactcaaggacgtatctttgctgactcagaagttgaaagaacactgcaaagttgaatatcaaattaaaacattttctgggcagactcatgggttcgtgcatcggaagagagaagattgctcacctgcagacaagccctacattgacgaggccagaaggaatttaattgagtggctgaacaagtacatgtagcaagaatcaagggcaagccttcctagaatagctttcatcccaaaatttgcttggaaatagttagatcatttgatttaattttcacttttataaaataagtgtaggaatcctaaaattgattatttcatttgaaacacaaattcagtaggacgtaatgcatgaaataatttaatttttgacatgtacatcgaatcataatttaaaaacaaggtctgaccaggtgtagtgcctcatgcctgtaattccagcactttgggaggccaaagtgggtggatcacctgaggtcaggagtttgagaccagcctggccaacatggtgagaccccatctctacaaaaaatacaaaaattagcctggtgtggtggtgcacgcctgtagtcccagctacttgggaggctgaggcacaagaatcaatagaacccaggaggtggagactgcagtgagccaagattgtgccactactgtactctagcctgggcagcagagtgagaccctgtctcaaaaataaataagtaaataaataaataaataaaataaaaaccaggtcagtacctggagaatttgaatgatagagaatgatagagtaataccctaattattagttaaaacctacaggccgggtgcggtggctcacgcctgtaatcccagcactttgggaggccgaggtgggtggatcacttgaggtcaggagttcaagaccagcctggccaacatggtgaaaccccatctctactaaaaatataaaaatcagccgggcatggtggcatgtgcctgtaatcccagctactcaggagtctgaggaggagaatcacttgaacctggaggcagaggttgcagtgagtcgaggttgcgctactgcactccagcctggacaacagagggagactctgtctccaaaaaaaaaaaaacctacagctgttcaaggaccagctgacaggtcaagtgtggccttttctggtctttgaacacatcatagaaagtgacaaatgctgcaaagccatgaagaacatgaactataaacgggtagactaactgcccagcttagacacttatctatgccacaaaacagctgaatttgtcacatttatatattgcaatatgggaagtattgagatcaaaacaggattccattgacctaattatattaagctaataaactaattttttgaatttttgaaaaa

SEQ ID NO: 66241 - DNA, 2352 bp, Homo sapiens; identical to SEQ ID NO: 66186

SEQ ID NO: 66242 - DNA, 2900 bp, Homo sapiens
atggggctcaaggcgcgcagggcggcgggggcggctggcggcggcggcgacgggggcggcggaggcggcggggcggctaacccagccggaggggacgcggcggcggccggcgacgaggagcggaaagtggggctggcgcccggcgacgtggagcaagtcaccttggcgctcggggccggagccgacaaagacgggaccctgctgctggagggcggcggccgcgacgaggggcagcggaggaccccgcagggcatcgggctcctggccaagaccccgctgagccgcccagtcaagagaaacaacgccaagtaccggcgcatccaaactttgatctacgacgccctggagagaccgcggggctgggcgctgctttaccacagcgttggtgttcctgattgtcctaggggtgcttgattctggctgtcctggaccacattcaaggagtatgagactgtctcgggagactggcttctgttactggagacatttgctattttcatctttggagccgagtttgctttgaggatctgggctgctggatgttgctgccgatacaaaggctggcggggccgactgaagtttgccaggaagcccctgtgcatgttggacatctttgtgctgattgcctctgtgccagtggttgctgtgggaaaccaaggcaatgttctggccacctccctgcgaagcctgcgcttcctgcagatcctgcgcatgctgcgggatggaccgggagaaggtggcacctggaagcttctggggctcagccatctgtgcccacagcaaagaactcatcacggcctggtacatcggtttcctgacactcatcctttcttcatttcttgtctacctggttgagaaagacgtcccagaggtggatgcacaaggagaggagatgaaagaggagtttgagacctatgcagatgccctgtggtggggcctgatcacactggccaccattggctatggagacaagacacccaaaacgtgggaaggccgtctgattgccgccaccttttccttaattggcgtctccttttttgcccttccagcgggcatcctggggtccgggctggccctcaaggtgcaggagcaacaccgtcagaagcactttgagaaaaggaggaagccagctgctgagctcattcaggctgcctggaggtattatgctaccaaccccaacaggattgacctggtggcgacatggagattttatgaatcagtcgtctcttttcctttcttcaggaaagaacagctggaggcagcatccagccaaaagctgggtctcttggatcgggttcgcctttctaatcctcgtggtagcaatactaaaggaaagctatttacccctctgaatgtagatgccatagaagaaagtccttctaaagaaccaaagcctgttggcttaaacaataaagagcgtttccgcacggccttccgcatgaaagcctacgctttctggcagagttctgaagatgccgggacaggtgaccccatggcggaagacaggggctatgggaatgacttccccatcgaagacatgatccccaccctgaaggccgccatccgagccgtcagaattctacaattccgtctctataaaaaaaaattcaaggagactttgaggccttacgatgtgaaggatgtgattgagcagtattctgccgggcatctcgacatgctttccaggataaagtaccttcagacgagaatagatatgattttcacccctggacctccctccacgccaaaacacaagaagtctcagaaagggtcagcattcaccttcccatcccagcaatctcccaggaatgaaccatatgtaggccagaccatccacattcagaaattcgaagaccaaaggcattgatgggggaagtttgttaaaagtttgaaaggacaggtttcagggactggggaggaagctggacttcctcgtggatatgcacatgcaacacatggaacggttgcaggtgcaggtcacggagtattacccaaccaagggcacctcctcgccagctgaagcagagaagaaggaggacaacaggtattccgatttgaaaaccatcatctgcaactattctgagacaggccccccggaaccaccctacagcttccaccaggtgaccattgacaaagtcagcccctatgggttttttgcacatgaccctgtgaacctgccccgagggggacccagttctggaaaggttcaggcaactcctccttcctcagcaacaacgtatgtggagaggcccacggtcctgcctatcttgactcttctcgactcccgagtgagctgccactcccaggctgacctgcagggcccctactcggaccgaatctccccccggcagagacgtagcatcacgcgagacagtgacacacctctgtccctgatgtcggtcaaccacgaggagctggagaggtctccaagtggcttcagcatctcccaggacagagatgattatgtgttcggccccaatggggggtcgagctggatgagggagaagcggtacctcgccgagggtgagacggacacagacacggaccccttcacgcccagcggctccatgccctctgtcgtccacaggggatgggatttctgattcagtatggaccccttccaataagcccatttaaaagaggtcactggctgacccctccttgtaatgtagacagactttgtatagttcacttactcttacacccgacgcttaccagcggggacaccaatggctgcatcaaatgcatgcgtgtgcgtggtggccccacccaggcaggggcttcccacagcctcttcctccccatgtcaccacaacaaagtgcttccttttcagcatggtttgcatgactttacactatataaatggttcccgctaatctcttctaggataaaaaaaaaa

SEQ ID NO: 66243 - DNA, 1910 bp, Homo sapiens
cccttctcggctgtgtggcttcgacttcctgattctcccacgacgtccctggccgggagacccgctggactctgcggctggccaaaaggggagggggagccccgcgtcctgggggcccctagcggaaggggcgggggttgcgctgggcatcctgtctggggcatctgtctgggactctgttggtgcctctcacctggcgaggggcctgtggtgggggtaggggggaagtccctggcgccatgcttggccaagccctgctctgctgggctgcgggctggcggcgctcacccagctcctcacctgtcccgcatcttcctgtttttcttccctttctggttgggcagcgagagttgagaggaggcagatggcttccatcccagaaatcgctctcctctttccatccctacagagagggacagagaggcaaagttccttgcatcccccggggcactgtccctgtgagctcccggtgtcctgcacatgtgagcccctgagtcaccgggcctgtgagtgtgggatggggctccgtggccagcctggcctcctggggttcactttgtgctttcctacgccaactcttcctgtgtggctttgctggccttccactgaggaggcacataggtttggaggacagatgagggcccactggagagctgtacccctcagtgagggccgccaccttgatggtttttgatggataatggggttgacctctttgttccttccacatgtttttatgtttgaccatttgctcagctgagcttgtcttaataattggattcatggttaatgagccccacatgggcgagagggtggccttcattctgaacccatttaggcagcacgggcagccctcctcgccatgggcaggatcagagcccccccgcccagtcttggggttgctcctggatgctgtctgggaggcttgctcatggtgacatcctcatctccccgtgcacgttaccgcattcagagcttgggtcacctggacactgaactcaggtgaattttctctgagatcccgggagaaggaggacagttctttggaaggttttccagggccgatcacggaaaggatgagaagggagaggtcctggtgggggacacaattacagtggcagtgtaacacccggaaactttattgcatgaagtccctctcactccctctacctccttcttttacgtggactctgccaaagaccaggataccagaatgcagtggagtgaccaagtgtagtgggaccttgggaacgcgagtctggagccaggcggctggggtttgcatcctggttctgcccctccttagctggctgacatggcacaagccacttaccctctctgagccttactgtcttcagtggcaaatggatctgtcaacaggccccattgcctggggttgttactgctgagattaagggatgctcgtccataaaaagacttagcgttgtgcctggcacatagtgtatggtggataaatgggacttaggactaaaactcatgccttggtgtgtttttgcagtgatgttttgttctggggtgcatcacaagagacaaggttcttggctgggcatggtggctcaggccaataatcccagcactttgagaggccgaaaggggaggatcgcttgagcccaggagtttaggaccggcctgggcacggtggtgaagcctcatatcaaccaaaaataaaaaaataaaaaataaagccaggtatggtggtgtgtgcctgtggtcccaggtgctttggaggctgaggtgggaggattgctggagtctggagggtcgggctgcagtgagctgtggtcgtgccactgcactccagcctgggtgacaaagtgagactctgtttcaaggaaaagagagagagagagacagacagatccacaagagtcttaagccagaatcttcat

SEQ ID NO: 66244 - DNA, 5433 bp, Homo sapiens; identical to SEQ ID NO: 65857

SEQ ID NO: 66245 - DNA, 895 bp, Homo sapiens
ttttttttttttagagactgtctcactctgtcacccaggctgaagtgcagtggcacgaacctcagctcactgcaacctccacttcctgggttcaagtgattctcctgccccagcctcccaagtagctgggaccacaggcaatgcaccaccacaccaagctaatttttgtatttttagtagagatgaggtttcaaccatgctggccaggctgggtcttgaactcctgacctcaagtgatccacctaccacagcctcctaaagtactgggattacaagcatgagccactacacccgacctcatagtagttttgatttacacttccctaatgattgtgtccagcatctactggccatttgttagtggtttttttcttcttttaagaactgctgagacatccataaacattttcaaaatgcagggtatgtttttcagtgttaaggcaactgttctgatgtgtttttcctttgctctctatcaccaaatactgtacatataaatagtaagactgggctttgtgttgtccattgttaatcctaaatgcaacaaaacacatggagactttgaaaatccttcagaataatgctatagttaagattttgctaaagcaagtgttttttctaactccttgagctgcatattgccttgagtaatcatcatccggattgtatcctcttcggtggcacttttgtttcttctgaattcttctcttgcccaatctttcaggtatttgcgatcagaatcatttggaacttgccgaattgtttgcaaaatccttctgtagaggagaagaacttgttgccttcttacgaactgctttaacgttagcgtcgctgggggtaagcgggaagcagccatgtccaccagagccacaggccggtcaatggggccttcgat

SEQ ID NO: 66246 - DNA, 2130 bp, Homo sapiens
gggtcgacccacgcgtccgatggagtgtaggccggccggcgagactgcacctcccagcatgccttgcagccaggactggagtcggtacttaagagtgatggggttccctagatactttaggccgtcgcatcgattatagagattgaggtggaacccggggcctgggaactggacgcacgcggagggcgaagatggaagcctggcgctgtgtgaggaagggctacggccactgtgtggtgggaagaggccgataccccatgtttccccatcactcgaggagtctgggcagagactggactacaccgtgggagaatctgcaaaggtgttgctggaacagacatatttctagttgtatgaggtggcctggacattactctcgagctccttacccatacttcagtagtaggcatttttcactaaattggagaccaccctgtttgtttgagtctagaactcagttccagtactgtaactggagacctgacaacctgagccagacatctttgattcatctctctagttacgtcatgaacgctgagggagatgagccttcatcaaaacgaagaaaacaccaaggtgtgataaagcggaattgggaatatatatgtagccatgataaagaaaaaacgaagatcctaggagacaaaaatgttgatcccaaatgtgaagacagtgagaacaagtttggacttttcagtgatgtcctataatatactttcacaagaattcggcacgaggataactctcacctttatagacattgccggcggccagtattacactggagttttaggtttcccaatatttctgaaaggaatttaaacattttggtggcagacgtactttggtttgcaagaagttcaagaagatcattatggagcagagatcaggccaagtttggaatcactgggttatcactgtgaatataagatgcggacaggaaggaaacctgatggctgtgctatttgcttcaaacattccaaattttcactcttgtcagtgaacccagtggaattcttccgccctgatatttctctgttggacagagacaatgttgggattagttttactcttacagcccaaaattccatatgcttgcctgccctgcaatctggcgtagcaaattacggcatctgttgtattaatccagggcgaggtgatattaaggttgacgcaattggcaatgctactggcagagatttccagtgttgcccaccagaaagatggcagcttctgccctattgttatgtgtggtgactttaattctgttcctggttctccactatatagtttcataaaggaaggaaaattgaattatgaaggacttcccataggaaaggtatctggccaggaacagtcttcacggggacaaagaattttatctattccaatttggcccccaaacctaggtatctcacagaactgtgtgtatgaggtacagcaggtaccaaaagtagaaaagacagacagtgatctgacacaaacacagctgaagcaaacagaggtcctagtgacagctgaaaaattgtcttcaaatttacagcaccatttcagtttgtcatctgtttattcacattactttcctgacactggaattccagaagtgaccacctgtcattcccgaagtgccataactgtggattatattttctactctgcagaaaaggaagatgttgctgggcacccaggagctgaagttgctttggttggtggcttgaaacttctagctagactgtcacttcttacagaacaagacttatggactgttaatggacttccaaacgaaaataactcttcagatcatctgcctttattggcaaagttcagacttgagctctgactctctttgatcacatactaattttctttccaatttgtattgtttttcaaagaatgtaaagttcttaagtgtatgcatgttgtttatttttgcactgtggagattctgaagcggttatgttagatgctttgaaactccatatcagaagaaataactttataacaattttttttaataatgaaaaatattttcctgacaagtgagctctaaattctctttattgtaaaagagatgtaaaggttttatattctaaatcctagtaaaattgacagtgatttttaaaaaaaaaa

SEQ ID NO: 66247 - DNA, 3569 bp, Homo sapiens
agcggccggggccacgatggagcgcgacggctgcgcggggggcgggagccgcggcggcgagggcgggcgcgctccccgggagggcccggcggggaacggccgcgatcggggccgcagccacgctgccgaggcgcccggggacccgcaggcggccgcgtccttgctggcccctatggacgtgggggaggagccgctggagaaggcggcgcgcgcccgcactgccaaggaccccaacacctataaagtactctcgctggtattgtcagtatgtgtgttaacaacaatacttggttgtatatttgggttgaaaccaagctgtgccaaagaagttaaaagttgcaaaggtcgctgtttcgagagaacatttggggaactgtcgctgtgatgctgcctgtgttgagcttgggaaactgctgtttaggattaccaggggggacgtgcataggaaccaggaacatatatgggacttgcaacaaattcaggtgtgggtgagaaaaggttgaccagaagcctctgtgcctgttcagatgactgcaaggaccaggggcgactgcctgccatccaacctacagttcctgtgtgtccaaggtgaagaaaagttggggtagaaagaacccatgtgagagccatttaatggagcccacagtgccccagcagggtttgaaacgccctccctacccctccttattttcctttggatggattcagggcagaatatttacacacttggggtggacttcttcctgttattagcaaactaaaaaaatgtggaacatatactaaaaacatgagaccggtatatccaacaaaaactttccccaatcactacagcattgtcaccggattgtatccagaatctcatggcataatcaacaataaaatgtatgatcccaaaatgaatgcttccttttcacttaaaagtaaagagaaatttaatcctgagtggtacaaaggagaaccaatttgggtcacagctaagtatcaaggcctcaagtctggcacatttttctggccaggatcagatgtggaaattaacggaattttcccagacatctataaaatgtataatggttcagtaccatttgaagaaaggattttagctgttcttcagtggctacagcttcctaaagatgaaagaccacacttttacactctgtatttagaagaaccagattcttcaggtcattcatatggaccagtcagcagtgaagtcatcaaagccttgcagagggttgatggtatggttggtatgctgatggatggtctgaaagagctgaacttgcacagatgcctgaacctcatccttatttcagatcatggcatggaacaaggcagttgtaagaaatacatatatctgaataaatatttgggggatgttaaaaatattaaagttatctatggacctgcagctcgattgagaccctctgatgtcccagataaatactattcatttaactatgaaggcattgcccgaaatctttcttgccgggaaccaaaccagcacttcaaaccttacctgaaacatttcttacctaagcgtttgcactttgctaagagtgatagaattgagcccttgacattctatttggaccctcagtggcaacttgcattgaatccctcagaaaggaaatattgtggaagtggatttcatggctctgacaatgtattttcaaatatgcaagccctctttgttggctatggacctggattcaagcatggcattgaggctgacacctttgaaaacattgaagtctataacttaatgtgtgatttactgaatttgacaccggctcctaataacggaactcatggaagtcttaaccaccttctaaagaatcctgtttatacgccaaagcatcccaaagaagtgcaccccctggtacagtgccccttcacaagaaaccccagagataaccttggctgctcatgtaacccttcgattttgccgattgaggattttcaaacacagttcaatctgactgtggcagaagagaagattattaagcatgaaactttaccctatggaagacctagagttctccagaaggaaaacaccatctgtcttctttcccagcaccagtttatgagtggatacagccaagacatcttaatgcccctttggacatcctataccgtggacagaaatgacagtttctctacggaagacttctccaactgtctgtaccaggactttagaattcctcttagtcctgtccataaatgttcattttataaaaataacaccaaagtgagttacgggttcctctccccaccacaactaaataaaaattcaagtggaatatattctgaagctttgcttactacaaatatagtgccaatgtaccagagttttcaagttatatggcgctactttcatgacaccctactgcgaaagtatgctgaagaaagaaatggtgtcaatgtcgtcagtggtcctgtgtttgactttgattatgatggaccgttgtgattccttaagagaatctgaggcaaaaaagaagagtccatcccgtaacccaagaaaatttttggattcccaactccacttccttttattggtgctaacaagctgttaaagatacatctcagacgcctttgcactgtggaaaacctaggacaccttaggctttccattttgccttcacagggactggattaacagcgagacgtgtggtgcatggggaagcatgactcctcatggggttgaagaattcgttaaatgtttacacagagcaccggatcacaggatgttgaggcacatcacttggactcagcttctatcaacaaagaaaagagccagtttcagacattttaaagttgaaaacacatttgccaacctttagccaagaagactgatatgttttttatccccaaacaccatgaatctttttgagagaaccttatattttatatagtcctctagctacactattgcattgttcagaaactgtcgaccagagttagaacggagccctcggtgatgcggacatctcagggaaacttgcgtactcagcacagcagtggagagtgttcctgttgaatcttgcacatatttgaatgtgtaagcattgtatacattgatcaagttcgggggaataaagacagaccacacctaaaactgcctttctgcttctcttaaaggagaagtagctgtgaacattgtctggataccagatatttgaatctttcttactattggtaataaaccttgatgggcattggggcaaacagtagacttatagtagggttggggtagcccatgttatgtgactatctttatgaggaattttaaagtggttctggatatcttttaacttggagtttcatttcttttcattgtaatcaaaaaaaaaaaattaagcagaagccaaaatacttttgagaccttgtttcaatctttgctgtatatcccctcgaaaatccaagttattaatcttatgtgttttcgttttaaattttttgattgggagtttctttagattttaatggttccaaaggagttcaacttttgaggggacgatctttgaatatacttacctattataaaatcttactttgtatttgtattt

SEQ ID NO: 66248 - DNA, 1052 bp, Homo sapiens
ttttttttttttgagacggagtctcgctctgtcgcccaggctggagtgcagtggcgggatctcggctcactgcaagctccgcctcccgggttcacgccattctcctgcctcagcctcccgagtagctgggactacaggcgcccgccaccacgcccggctaattttttgtatttttagtagagacggggtttcaccgtgttagccaggatggtctcgatctcctgacctcgtgatccgcccgcctcggcctcccgcctgcctcagcctcccaaagtgctgggattacaggcgtgagccactacgcccggcctttgcttctttgcataatctcagctgagatttataatttacttgtgggattctcccctctcaaactataagttctgtgaagacagagatggtatttttttctcctcactctattttttttttttagacggagtctggctctgtcgcccaggctggagggcagtggcgcgatctcggctcactgcaagctccgcctcccgggttcacgccattctcctgcctcagcctcccgagtagctgggactacaggcgcctgccaccacgcccggctaattttttgtatttttagtagagacggggtttccccgggttaggcaggacggtctggatctcccgacctcgtgatccgcccgcctcggcctcccaaagtgctgggattacaggcgtgagccaccgcgcccggccccctcttccccaatttttcatacagttgcccctatacaatatacacacccttgagggcaggtagaagtccagcccacctgcggccagggacgctgtggggaagcatttttctcctgagttgctaagaagaaccctgatgggcggtgagcagaaggaccacaagaccagccagggttccaggctggcagcggataaggccagagagatcgctaggccccagaaagccccctactttcagtcagggtgggacagagggcttcgacataaaatggaagcaagccttgagaaggaaccaggagaccttggagccctaaagttggggccagccgggaaatggg

SEQ ID NO: 66249 - DNA, 2575 bp, Homo sapiens
ctgcggcccctgccggttacataactcgttgcgggctccgcgcggtcccacttcccggctcccttcgcctccaggatgcgctgagccctacaacacccccagcggccgccggctcccccacgaggtgtgaatgacagaggtggtgccatccagcgcgctcagcgaggtcagcctgcgcctcctctgccacgatgacatagacactgtgaagcacctgtgtggcgactggttccccatcgagtacccagactcatggtatcgtgatatcacatccaacaagaagttcttttcccttgctgcaacctacagaggtgccattgtgggaatgatagtagctgaaattaagaacaggaccaaaatacataaagaggatggagatattctagcatccaacttctctgttgacacacaagtcgcgtacatcctaagtctgggcgtcgtgaaagagttcaggaagcacggcataggttccctcttacttgaaagtttaaaggatcacatatcaaccaccgcccaggaccactgcaaagccatttacctgcatgtcctcaccaccaacaacacagcaataaacttctatgaaaacagagacttcaagcagcaccactatctcccctattactactccattcgaggggtcctcaaagatggcttcacctatgtcctctacatcaacggcgggcaccctccctggacgattttggactacatccagcacctgggctctgcactagccagcctgagcccctgctccattccgcacagagtctaccgccaggcccacagcctgctctgcagcttcctgccatggtcgggcatctcttccaagagtggcatcgagtacagccggaccatgtgatgtcggctgggcagccgccaccaggccccacccttcggccgcccgcagagcccgccttcctgtccatctgaccccttctgttttctgcaaggagctgccagccatctaactgggctcgtcggcctgccccagctgcaggcccggtgctacacgggctcgggaacagaacatcgtgggcatgcgcagagcatgcccatccgtggcaggtacgccacagcagacacaaaggctcttcagctcccctccctgcttctggaaacctctgcctgctgccctggccctgcccccctgcgcatgcaccatccccagggctgacccagtgtggctgcattcactgggaggggcctgccctcactgggcctctcccactccgctgcctgttcttgcagctccttcctggaaagctggaggggactttctcctgcaagggaggaacgcaagtattatggacacacttgaccgtaaaggcacaggagcctcggaacaagggggcgcaataaagggaatggcccgtccccttccagaaccagcccaaagaagcctggggggtgaggagtggcccccactcctccatgaggggctgatgaggggtgggcagcctgggggaggctttcctcgcaagcacagagctctgaggctcagccccctggcacaggcggtcacgcatcaggacggttcctactcctcagcaccttccgtgcagttaccagtgccctgggaggtcacactgcccgtcggaccttggcatgctccattcagctgacctgctgaggacaggcatcgccgagactccttgggtcctccccgccctccctcatgctgccacaagctgctgctccaaggcctggccacatgcagacaggaggaagctgagctcgacattaggcctcaaggctgccatctgtcttgtagggcctggccttgtgggcagggggcagtcctgtgccttgtgggccctcagcctctgagggcagagatgctgtcagtgccgcaggtgcatcacatacttctagcatcctctccaccctgcattccaaatgctgcttgctgcctgccctgccctccgatgcaggggtggggtgggggcggagtcccgcccagcatagctgcagtgtcacaaagccatggcagagggtcctagcggcgccaccctgccccagcctgaggaggagggagagggaggaacaaccctgggcagacggggtctcagggacctgtgtccttccgcctccagagctgcccagccacgggctctcagggtgctggggcagccccaggtcccctcttgaactcagctggggccaggggccctcagaatgaaggcaggcaccaggcaggagcagcatccccctccttgacggtgctggcaggagggccgcgccatgctgactgcttgaacctctgctgacctgacagtgctggcgggagggccgcaccatgctgactgcctgaatctctgctgaggctgcctgcctgccgggcccagctcagcgccctctccactgcgaatcagtggcgatcatgtgatttctatttctgccccacagggtaagggacgagtcttctggaaggctctgccatggacatttgtcctcgggctcagaggccccaccctgccccacacctgcccctaatcactgcagtgtccagcccagtgttgaacagattgtagcgttctgtctcattacgagcaaataaatagactttcattggaaa

SEQ ID NO: 66250 - DNA, 408 bp, Homo sapiens
gcaaattaagacaggagcagctcctgggagaagcagacaccaaacaatacggctgctggcccagaggtcaaaaaccatggcctagagggggcggtcaggaagtgggacattaggccgggcgtggtggcccatgcctgcaatcccagcatctttggaggccaaggcaagtggatcacctgagttcaggagtttgagaccagcctggccaacatggtgagacttcgtctctactaaaaatacaaaaaaaattcgctgggcttggtggcgggtgcctgtaatcccagctactcgggaggctgaggcacaagaatcccttgagcctggggaggcagaggttgcagtgagccaagatcgcaccactgcactccagcctgggcaacagagcaagactccatctcaaaaaaaaaa

SEQ ID NO: 66251 - DNA, 1931 bp, Homo sapiens
ttttttttttttgggtgttttattatttatttacttgacaggtaacatcgatttggtcctacaagacaccatgctataggcttagctacttgctgttgcacaagagaactttcctgaactctcaggaagcccttgcatggcctatcgaggacagctcagtcactgaagggaaaaattccataccaaagaagagagaaaaattccataccaaagaacagacttcccccagggaacctccgtcctacagcccttcagggccatcacactcacacacatcagccatcatcaaaatagtggccatgctgggaagaacaggagtcctgaactagaaggtggtcttcaaaccatggcgtaccgatttatgtatattacagatagataaattaagaggtctacatgaataaaaaatctctcaaaggggaacgaattccattctgtcatgccaggtgtttgtcagaaccttgaaaacgaaggtggttttcagtggagcttgtattaaaaatagaaggtatttatacacaggccctgctcctctcatggccatgaaatcctctggtgttgtcaggacccctgggcaacctcagcacccctacgggtagcccatctgcagtctgcatcttccgggagagcaggggactcgtaccggggcttttctcctgggtccccatctcggcttggcgacgcctccggacccaggggctgccagagggagtgacgctgctgtcagaggaataatccatacacttgcggaagatctcagggctggtgctgcagttcagtctaccttcctccgccagtggggactttctggaaacgcctttgcgttgggccaaggggctgctccaaggacttgtgcacggggaggcatttggactcagaaagagattctggtggccagacgggctgagcttgttggtggccgcgtgccgtcggcccgccataggggatgtggggttgctctcggggtcagaggagctgttggcagaagactcatcacccatgtactgaagctcctcgactctcttgttcagggacttgttcaggtggatgctcgcagtgggctcctcgtcatgatttttgtctttggcaggtttctttttgggtggcttcataccaatcaggacagctttcatgttctctttgccctgagattctgtgatcatgaactcatgggctttgatggctgcttccacctcctcgaactccacgatggcacactcctgggtccccacttggctgtagcggctgctgatcctccggatgtcagggggcagctctctcccaggtttgaggatccgcactgatgagatgactccaaaagtcccgaaaagcttgagcaggtgttccatcaccttctcttgcacccttccattcttctggggggtggccagagcccacagcttaggagacaagtagagatcatagcccaggagcatcttgctggggaggttctcgttggggaacagtgggacgggggtggtcctcctcaccttccggtggtcctcattcaactcaaggaccactgaatacttcaaagcatgtgctgtggttctccagtcccgtgtaagatgtttcacctttttgaaggatgtgagtagcttaacgctcacatatcccagcttgttcctcctcacgtgttttagcaaaaaggcgtccttctccaggttttcatcagaaaagtagaattaaatctggtccaccagtttcttgatcaactcctcatccgggggcttccactcctgctccaggtcctcacgctcgttctcacctccacttgcagtggtgccactgtgcccgcggctcggctcctcctcgctcgcgctgccccagccggggctgaggtaccgggccgggtccccggcgccccgagtctccgccccaacctcatcgtcctccaactcgtccacgtcctcggcctcttggcctcgtgc

SEQ ID NO: 66252 - DNA, 511 bp, Homo sapiens
gaattcgagctcgcgacccggagatccgtaaccgtgagaagacccatcattatgcccgaatgggttacacagaatattatgaatggccgcggcgttaatcgtctggatgatgttaatcggccaaaaagcccggaaatcaagaacgatattcgtctgttccgccaggagctgcgtgatgccgcttatcatttccagggcgatgccgacaacgatcagctttctgtaacgccgctagtggggctggggaaatcgagtctgttgaacaagaccattttccatcttatgccttgtgccgagcagaaactaaccatctgtacgccatacttcaacctgccagcaatccttgtgcgcaatattatccagttgctgcgcgaagggaaaaaggtcgaaattattgttggtgataaaaccgcgaatgccttctacattccgtacgatgcgcctaacatgataatcggcacggtgcttcatctctatacgatgtacgggtcgcgacattgaattcgtaatc

SEQ ID NO: 66253 - DNA, 1227 bp, Homo sapiens; identical to SEQ ID NO: 66118

SEQ ID NO: 66254 - DNA, 1504 bp, Homo sapiens
gacttccgacgagctgggtcggggacacggtgaagaggctccagcgggacctgcccatcagtcctgggccaggaggggctccaagcagcacccagcggtccgggggagtctcagacccggcatgcgtggctggcagacctgggagagccagggcagggttttgcgttcagagaaggattgccccagagacccgtggtggacttcatgggtgctgagtggcccgtgtgacagtgatgacacgaaggcttcggcgtttgagtgggtgcaggtgcacgccagggcttggtgcttccctgcctggccctggagggagctgggtggcctggcttcaggggaagacaggagccaggacacacgtcagcccagcaggtgtggggggtgctgcagccctcggcagtggggtcaggccctgggggatgtttccaatggtgggcagcctggccaggccggagaagacatgttcacgggcatctatcagatgcccccttgaggaggctgagttatttgagggctgctgcaaagtacgctaggctcaaattctcttttcccagccagagccctggccacacggactcagaggggccaccggggtggggaaaggacccctcccccaccccccgcagccactggcctccagctctcggccacagaatggcctctaaggctgactcagccgctcccttgggctgtggcagcaggaggcgggggctctggctcaggccccggagcctgtgcagcttgcccatggccctaggcagcgaggggacagcctgggggacttcctgcctaggcaaggtcattggccgggcctggcctgtggatagtggggccaggggccggcccaggccaaatgagtgccctccttgttatgacaccaagtgactacaagggaggcaagacccctccaggcctctcagccgacactgggtcccaccacacacagtgactgtgccgtgcagtgcaggttctggccttttccttgaaggcatctggtagacccgaagccacgctctcgggccgcacatgcacgccgcagcaccagctgccctgagctgcttgtacaaccaaacacctttcccctcttctccagctgtaacctggagagtcagccatgccttgtcttttgttctcataaatagtcactggggccgggcgcagtgactcacgcctgtaatcccagcactttgggaggccgaggtgggcggatcacctgaggtcaggagttcaagaccagcctggccaacatggtgaaaccccgtctctactaaaaatacaaaaattagctgggtgtggtggcgggcgcctgtaatcccagctactcgggaggctgaggcaggagaatcgcttgaacccaggaggtggaggttgcagtgagccgagatcgcgccactgcactccagcctgggtgacaagagtgaaattctgtctcaaaaaataaatacataaataactaagactcagagagtacagtcaagatattaatagtcaaaagttgtcgcaacag

SEQ ID NO: 66255 - DNA, 445 bp, Homo sapiens
cagtccttgttcccccaggaagggctggtgggccccagcacacacttgggattatgtgtatacataaataaatattgggctgtttccctcttcctgtgaagtggttctcaaattcctatgtactgtaaagctgtacccttaaaagtacagatgtggccgggcacagtggctcacgcctgtaatcccagcactttgggaggctgaggcgggtggatcacttgaggtcaggagttcaagaccagcctggccaacatggtgaaacctcgtctccgctagaaatacaaaaattagccaggcgtggtggcgggcacctgtaatctcagctactcgagaggctgaggcaggagaatctcttgaacctgggaggtggagattgcagtgagccgaggtcgtgccattgcactccagcctggacatcaaagtgagactcaggccaaaaaaaaaa

SEQ ID NO: 66256 - DNA, 1198 bp, Homo sapiens
aaaatctttcctctaaagtcaaactgttgcagttgtattcagaggccagtgtagcgcttctaaaactgaataaccccaaggattttcaagaattgaataagcaaactaagaagaacatgaccattgatggaaaagaactgaccataagtcctgcatatttattatgggatctgagcgccatcagccagtctaagcaggatgaagacatctctgccagtcgttttgaagataacgaagaactgaggtactcattgcgatctatcgagaggcatgcaccatgggttcggaatattttcattgtcaccaacgggcagattccatcctggctgaaccttgacaatcctcgagtgacaatagtaacacaccaggatgtttttcgaaatttgagccacttgcctacctttagttcacctgctattgaaagtcacattcatcgcatcgaagggctgtcccagaagtttatttacctaaatgatgatgtcatgtttgggaaggatgtctggccagatgatttttacagtcactccaaaggccagaaggtttatttgacatggcctgtgccaaactgtgccgagggctgcccaggttcctggattaaggatggctattgtgacaaggcttgtaataattcaccctgcgattgggatggtggggattgctctggaaacagtggagggagtcgctatattgcaggaggtggaggtactgggagtattggagttggacagccctggcagtttggtggaggaataaacagtgtctcttactgtaatcagggatgtgcgaattcctggctcgctgataagttctgtgaccaagcatgcaatgtcttgtcctgtgggtttgatgctggcgactgtgggcaaggtatgtttactgccaaacaaataagaatgggagcataaaacatccttgacaggtagagagagttttgaatggcttttgttatttaaaataatgattctctgtgtatccctttaccagccttgcattcaaactagttatgaaagtaagagaacaacataaatcactgaagaggatcttttcctgttattgttgcagtctggtgttttgttttgttttgttttgtttggaccaagcagatttaccttagctgaaaatatgtggtgaagttttaatttggaaacaaaaaaggatatcaataattcattaaataaagatggttcaaacactggaa

SEQ ID NO: 66257 - DNA, 1605 bp, Homo sapiens
ccttttttttttttttaaccttagtttaggtaaatttaatgactgtaaaagctgttcacatagcagctttaaagagacacgttttccactgacataaagttgcttcgccccttgcagcttatctccaccttcatgacctgtttcctcagtggcaggcaatgtctccccttcctgttggggaggattgcccaagtcagctctgaggccatcctctcaggtcagcaatatgcagaagagtccctcagagtggtcctgcagagaacatgtcccctaagtgtctgagaactggctgaggtgatcttcaccagcacatagtccccaggctgggctctgaccctgagcccagggttattgacatcctccatctctgcatcagggaagatcaccttaaggtttccatcattcctgccacacaggtcagtggcagagcgtttactgagcccttccactagcaccaactgggtacagcccacagaggtctgattggcttttgttgcttcttctcggaagatagtgatgagttcctccaaacgccttaattttacctcttccgggacatcatccttcagcctatgatatgcccgtgtcttctgtctcatgctgtaggcaaagaggaagcccatgttgtactgaacttcccggagcaaagagactgtctggacgtgatcttcctccgtctcaccacaaaagccagcaatgaaatcgctgctgaggctcacacctggaatagattctctaatatggtgaactaactccacataagcttctcttgaatatcccctccgcatggcctccaacacacggctgcttccactctgggctggcaggtggatctgtttacagatgttatctctctcatgaatcagctgcagaacctcatcaggaaaatccttggggtggggagaggtaaaacggatcctcatttcaggatctactctggagacctgatccagaagatgagcaaaacgaagtcctccttgcttggttttatagttggtggtaaagccacgactgagattggtaggcactgcactgttgaactggacctccgaattgtcccgaaaactattaacattctgaccaagaagtgtcacttctttcagccccaatattaatctcttagtttttgctttgtttgttttgtaatagagacagcagctcccagtgttgcccaggctggtcttgaactcctacgctcaaggcaccctcctgccttggcctcccaaagtgctgggattacagcaccaaaaaatgtaccaaagaaagatggcaatgctcgaggaaactctctttgcaactttcctgctcagaaagcttcttcacttcctctagaatggaggcaataggccgactcctctccctgccccgggtgaaaggaacaatgcagtagctacacatgttgtcacagcctcgcatgattgacctagaattccaatcctcagaggaacccgggagcggggccgccttgtcttcaaggctttaagctgatgtaaacggttccagatggtctgctcagccttctccctcccgcagcagcaacagtgcccggggtcccgcagcgtaagttctgccggcaagtcggatcccctcacaggtccgccgctg

SEQ ID NO: 66258 - DNA, 548 bp, Homo sapiens
tgattgtccagagtttgtaccaggccaagccttttgctcacatacagagtctgccccaaattctccaagaattggaagcccattgagcccaaagaaaaacagtgaaacaagtattcttcaagcaatgtctagaggtttgtctaccagtttgcctgacttggactcagaaccttggatagaagttaaaaaaagacatcagccagccccagtgaaattgagggaatcagtgtctgtccctgaagggtcattaaatcagctatgttcttcagaagaaccagaacaagaagaacttgattttttgtttgatgaagagattgaacaaataggacgaaaaaacacatttactgattggtctgataatgattcagattatgaaattgatgaccaagacttaaacaagattttgattgtaactcagacaccaccttatgtgaaaaaacatcgtggaggagatcgaacaggcacccacatgtctcgggcaaaaatcacatctgaacttgctaaagttatcaatgatggcttatattattatgaacaggatctatgga

SEQ ID NO: 66259 - DNA, 437 bp, Homo sapiens
attctgctagatttcgctaccttatggctgaaaaacttggcattcatcccagcagctgccatggatggattttgggggaacatggcgactcaagtgtggctgtgtggagtggtgtgaatgtggcaggtgtttctctccaggaattgaatccagaaatgggaactgacaatgatagtgaaaattggaaggaagtgcataagatggtggttgaaagtgcctatgaagtcatcaagctaaaaggatataccaactgggctattggattaagtgtggctgatcttattgaatccatgttgaaaaatctatccaggattcatcccgtgtcaacaatggtaaaggggatgtatggcattgagaatgaagtcttcctgagccttccatgtatcctcaatgcccggggattaaccagcgttatcaaccagaagctaaaggatgat

SEQ ID NO: 66260 - DNA, 595 bp, Homo sapiens
gaatggacatgtaaaatttagttacattccagggaattttcaggtgaaaattagtagatagttaatatgaaaattttatatgaattcatattttttcttggacaatatgctaatatttattgatttcacaaatttacagcatatgggtgattttggaagcattcatagacccggaattgttgttgactatcaaaacaaatccaccaatgtgacagttgctgctgcaagaggaataaagagaaaaatgatgcagccatttaataagcccagtggaacctttatcaagaaacccaaactagcaaaacctatggagaagataagcctcagcaaatcacccacaaaaactgatcctaaaaatgaagaggaagaaaagcggcgaattgaggctcggcgagagaaacaaaggcgcagaagagaaaaaaacagtgagaaatacggagatggatacagaatggcatttacatgttcattttgtaaatttcgaacatttgaagaaaaagatattgaactgcatctggaaagttcttcacatcaggaaacattagatcatatacagaaacaaactaaatttgataaagtagttatggagtttttg

SEQ ID NO: 66261 - DNA, 593 bp, Homo sapiens
gtggaagaagcgttgcttaaagagtatattaagcgtcaaattgaatattacttcagtgtagaaaatttggaacgagacttctttcttcggggaaagatggatgaacaaggtttcttgcctatttccctgattgctggttttcagcgtgttcaggctctcactacaaaccttaatctcatcttagaggcactgaaggatagcacagaagtagaaattgtggatgagaaaatgagaaaaaagatagaaccagaaaaatggccaattccaggccctcctccacgcagtgtgccaccaacagacttctctcaactgattgattgtccagagtttgtaccaggccaagccttttgctcacatacagtcagggtgatgatcttctgaagctcttggatgtcatttgatcggaatatgcagtggaataggtgactcactgaaatgcctttataaatactggaacaaatcctgctgcaaaaatgaaagcgatcagactgtcttctgttcaagaatgtctattcccacctcttggtggaggaagttgggccaacactgcagtggagataaccacctttgcgataatgagagacagaccagag

SEQ ID NO: 66262 - DNA, 677 bp, Homo sapiens
aacacaaccaagttttgacattccagtttcgaccaggctgaaatttcccacagtgaatccgaacatctcccagctagggattctccttcacttagtgaaaatcccacaacggatgaagatgacagtgagtatgaggactgtccagaggaggaggaagacgactggcagacgtgctcagaagaagacggtcccaaggaagaggactgcagccaggactggaaggaaagctctactgcagattctgaggctcggagcaggaaaaccccacagaagaggcagatacacaattttagccatctggtatccaagcaggagttactggagctctttaaggagctacacactgggagaaaggtgaaagatgggcaacttacggtcggactggtgggctaccctaatgttggtaagagttcaacaatcaacaccatcatgggcaacaagaaagtatctgtgtctgccacacctggtcacacaaagcactttcagactctctatgtggagcctggcctctgcctgtgtgactgtcctggcttggtgatgccatcttttgtgtctaccaaggcagaaatgacttgcagcggaatcctcccaattgatcagatgagagatcatgttcctcctgtatcactagtttgccagaatattccaagacatgttttagaagctacctatggcat

SEQ ID NO: 66263 - DNA, 993 bp, Homo sapiens
cgtggccgataccgggaattctaccagtgtgattttgacattgctgggaactttgatcccatgatccctgatgcagagtgcctgaagatcatgtgcgagatcctgagttcacttcagataggcgacttcctggtcaaggtaaacgatcgacgcattctagatgggatgtttgctatctgtggtgtttctgacagcaagttccgtaccatctgctcctcagtagacaagctggacaaggtgtcctgggaagaggtgaagaatgagatggtgggagagaagggccttgcacctgaggtggctgaccgcattggggactatgtccagcaacatggtggggtatccctggtggaacagctgctccaggatcctaaactatcccaaaacaagcaggccttggagggcctgggagacctgaagttgctctttgagtacctgaccctatttggcattgatgacaaaatctcctttgacctgagccttgctcgagggctggattactacactggggtgatctatgaggcagtgctgctacagaccccagcccaggcaggggaagagcccctgggtgtgggcagtgtggctgctggaggacgctatgatgggctagtgggcatgttcgaccccaaagggcgcaaggtgccatgtgtggggctcagcattggggtggagcggattttctccatcgtggaacagagactagaggctttggaggagaagatacggaccacggagacacaggtgcttgtggcatctgcacagaagaagctgctagaggaaagactaaagcttgtctcagaactgtgggatgctgggatcaaggctgagctgctgtacaagaagaacccaaagctactgaaccagttacagtactgtgaggaggcaggcatcccactggtggctatcatcggcgagcaggaactcaaggatggggtcatcaagctccgttcagtgacgagcagggaagaggtggatgtccgaagagaagaccttgtg

SEQ ID NO: 66264 - DNA, 557 bp, Homo sapiens
cacagcttgcccatcggggacatacaaacctgaaggctcaccaggaggaatcagcagttgcattccatgtcctgatgaaaatcacacctctccacctggaagcacatcccctgaagactgtgtctgcagagagggatacagggcatctggccagacctgtgaacttgtccactgccctgccctgaagcctcccgaaaatggttactttatccaaaacacttgcaacaaccacttcaatgcagcctgtggggtccgatgtcaccctggatttgatcttgtgggaagcagcatcatcttatgtctacccaatggtttgtggtccggttcagagagctactgcagagggatgcaaactgccaatttacattgcttatttactgtcttgcctgatttccttgatttagactctagtaaaccagtcagttcttcatttctttttggatgtcatagaccccatactacggaacgagaaaaattataggaaagttgaaatcacaattaccaagttcaattgaccacataattgtaaactacgccttttatagcccttttatgaa

SEQ ID NO: 66265 - DNA, 433 bp, Homo sapiens
ttggcttggagtgtggctgcctggattcgaaagtgtgtccttgactccatggagtaattcttgtagttttgcctggaattgagcagcgaatcagacacatgaggctgcctgctcccagagatgcttttcctcctgtttgagctgtatgagccccgcgagccaaggaaggattgtagagaaattaatgtgtccagagagagttgagccctacccaatgggagagttaaccagaagggtttgtggcccctcatccctggtatcatggccactggaaccactcctggtcctcctgggttcctaagcttgaaggggtggttttagggaatagacccctaccctggaaggcaggaggcatgggtcctcacacagccatgcagttggcttctgatgtgaccttgggaacttacttcctggctctgggagtctaactgcg

SEQ ID NO: 66266 - DNA, 724 bp, Homo sapiens
gggtaacactgtgatgtttcagcacctgatgcagaagcggaagcacacccagtggacgtatggaccactgacctcgactctctatgacctcacagagatcgactcctcaggggatgagcagtccctgctggaacttatcatcaccaccaagaagcgggaggctcgccagatcctggaccagacgccggtgaaggagctggtgagcctcaagtggaagcggtacgggcggccgtacttctgcatgctgggtgccatatatctgctgtacatcatctgcttcaccatgtgctgcatctaccgccccctcaagcccaggaccaataaccgcacgagcccccgggacaacaccctcttacagcagaagctacttcaggaagcctacatgacccctaaggacgatatccggctggtcggggagctggtgactgtcattggggctatcatcatcctgctggtagaggttccagacatcttcagaatgggggtcactcgcttctttggacagaccatccttgggggcccattccatgtcctcatcatcacctatgccttcatggtgctggtgaccatggtgatgcggctcatcagtgccagcggggaggtggtacccatgtcctttgcactcgtgctgggctggtgcaacgtcatgtacttcgcccgaggattccagatgctaggccccttcaccatcatgattcagaagatgatttttggcgacctgatg

SEQ ID NO: 66267 - DNA, 347 bp, Homo sapiens
cgagtgcatggaggactgcaacagaggagtgggggactgaagattggaatgaagattgttctgagccagaacatttcacatatgttatatgaaggagactgggcatgaacaggactctgtggaaccacactatggaaagggcaagtgcacttgtgtaagtccaatatctgattgtcggatttatcccaggaagagattggtggttgggtagggcaccagaagtggagttaggcaggtagtgcattgagtaacagctgctggtggtacatgactacttggtgcatttaagtatttgctataaggtcctgtaatggattggcagtggatccaaagcgagtgttgtggta

SEQ ID NO: 66268 - DNA, 439 bp, Homo sapiens
  misc_feature (1)...(439): n = a,t,c or g
cacgaacacgccactgtgtgctgcaaagatgagaacggctggcacgagatccaccaggcctgcaggtacgggcacgtgcagcacctggagcacctgctgttctacggggcagacatgagtgcccagaatgcctcggggaacacggccttgcacatctgcgccctctacaaccaggacagctgtgcaagagtgcttctgtttcgaggcggaaataaggagttaaaaaactacaacagccagactccatttcaggtggccataatagcaggcaactttgagctggcagaatacatcaagaaccacaaggaaacagacattggtgagtaggcacgtggagaaactgtgttgggatttggtttggagatgctctgaggaatcagttcactcaccagcttttttaaaattctccttagnttgggtttaggagcctgcttttagc

SEQ ID NO: 66269 - DNA, 439 bp, Homo sapiens
gggaaagcagggagtttcagacacacagtgaggagagccgggtgcacactgtgaacacagggtgggaagagctgcacacacacaccgggtcccatctccctacctctcccacgtactccatgacgaagctgttcttgcgaatcttctccagggtgcggacgccccagccacgcccatcatccgtgcggaagatgcagaggtcatatcggatacccttctgtaccacacgatttgggcagtcatagccgcagcggcagcgggagttgcactcgtagatgggcagcccggctcgaagccgcacctggccctggtcattgtaggcaaacttgtgcagtgacgcccccgggcagcagcctccagtgggtgcccacagacagtcctggcactcgcagcccacagccacctggttgagggtgatgccctcaccaacacggtactc

SEQ ID NO: 66270 - DNA, 435 bp, Homo sapiens
gagaaagcagcagctgccaacatagatgaagtgcagaagtcagatgtatcctctacagggcagggtgtcatcgacaaggatgcgctggggcctatgatgcttgaggtagcacatcttcattttagtgctgtattttaaaatcttgttgatcttcacattattacatttaatttcaggtgaatataatttaaggagaatccacactagtactagtactatggacctcttgagcttgctgatatgcctgtgtgtctctatgtatgttttggctcctgctgccagtatatgtgtgtttgaaattaacatagaattaaattaactagattagagtagacattggcaagttgtaattgccagttgagcatttatttgaaaaactgtattcacaagtcctactaaattctgtgttgattttagcttgaaatgttctcaaaa

SEQ ID NO: 66271 - DNA, 512 bp, Homo sapiens
ggacatagagcacactgagggcaagaggtacttcacctgggacaaaaacagattcccaaaccccaagaggatgcaagagctgctcaggaacaaaaagcgtaagcttgtggtcatcagtgatccccacatcaagattgatcctgactactcagtatatgtgaaggccaaagatcagggcttctttgtgaagaatcaggaaggggaagactttgaaggggtgtgttggccaggtctctcctcttacctggatttcaccaatcccaaggtcagagagtggtattcaagtctttttgctttccctgtttatcagggatctacggacatcctcttcctttggaatgacatgaatgagccttctgtctttagagggccagagcaaaccatgcagaagaatgccattcatcatggcaattgggagcacagagagctccacaacatctacggtttttatcatgtaagacatccaaaaagaattaaactgggcttgtgtgacccaccttttggctgaaaaa

SEQ ID NO: 66272 - DNA, 345 bp, Homo sapiens
tgcctctgaaaattcatggagtgtcagttttgtccaccagcatgcagaacaatattaacatttaaagcactgaaaacaattaagaaaatgcgtcagctgtactgagagcagggtgcagagattcggggtggcagtgggagtgtattggcttctaacatttcctgtctttgctctctctttccctgttattttttgtttcttggtggccagaactctccatgccttccgatcagtacgagttgcagcttcagaacagcatcccgggccccgaaggagacccaacccggccggtggctgtcttggcccaggacacgtcgatggtcactgcactgcagctgggacaga

SEQ ID NO: 66273 - DNA, 423 bp, Homo sapiens
aactgggggcaactgctgtaagtaattatgatcagcagcaaaagttcttaagttagtaagctgcccaatagatgaaggcaaagcttcaacttcattgaaactacaatccagttcttctactgatattaaccctcctatagagtctggcagatacattaactggttttcatctattttaagcgttgttatattcttcaacgaaccaatagtctcaggaagctgctgaagtgaattgcttgataataggaggtcttgaaggttttcacatgttgaaattccttcttcaaccatttcaatattatttttagaaacatccaaatatgtgagctgtttcaaactaccaataaaccctggaataaaagtcagtctattagcatccatccaaaactctttcaatccacttagttgctcaagtacttcagg

SEQ ID NO: 66274 - DNA, 369 bp, Homo sapiens
cagatgatcgactcccagaattccaaagaaacaaagtcccataaagctctgtctgatctggagcttgtggcccagtcaattatcatcatttttgctgcctatgacacaactagcaccactctccccttcattatgtatgaactggccactcaccctgatgtccagcagaaactgcaggaggagattgacgcagttttagccaataaggcacctgtcacctacgatgccctggtacagatggagtaccttgacatggtggtgaatgaaacgctcagattattcccagttgttagtagagttacgagagtctgcaagaaagatattgaaatcaatggagtgttcattcccaaagggttagcagtgatggtt

SEQ ID NO: 66275 - DNA, 481 bp, Homo sapiens
aataccctgtaagggtctgaataaatgaatgagtgaggggatgaacgcccaactccagtcacatggtctctgacttctgtctgcagggtggggtcaaggtgctcatcacaggtccttggaccgaagccgccgagcattactcctgtgtctttgatcacatcgcagtgccagcctcacttgtccagcctggtgtcttacgctgctactgtcccggtatgaggattgggaaccgtagcgggagggactgacatgtgggcagttaggacagatcaggacctccaggcttccagaaagcactgggaacaaatgggttgttttgagagcacaaggacttcatccagtcctgaggttgagccccaagctctcccagcaggcagaagagcccagacttaggtgtcagaagatcgaggttcctgtccaagaagtctacctcttagcttaccaatgacctcagatgagtctgatctctctgaagcccttg

SEQ ID NO: 66276 - DNA, 357 bp, Homo sapiens
ggtgttgacatgaacagagaagcctttacccacatcgtacctggacaagtccaaatgggaagaaacgctccgtctgcccctgggaaccacggtggaaggtttcacgccagtcttcgatgagtgcagggaatgtgcaattgtacagatccgtgttataatttatattggactcccctaaaaacagtccaaattgtaaagggagtttggagtagactgcaaaaatgaccacacattactctcctccctccatccatgccctgaggtagtggtcttcccacggtctctctggactggtctttttccagccagtggggcatcagcaaatgtggtacgaacagaggcttgaaaagtacttca

SEQ ID NO: 66277 - DNA, 352 bp, Homo sapiens
attgtattgtgattgctttgcaaatggtgaattttgcaacaactgcaattgtactaattgttacaacaatttggaacatgaaaatgaaaggcaaaaagcaataaaggcatgccttgacagaaatccagaagcctttaagcctaagatagggaaaggaaaggagggagaatctgatcgacgtcatagcaaagggtgtaattgcaaacgatcaggatgtcttaaaaactactgtgaatgctatgaggcaaaaataatgagttcctcaatatgcaaatgtattggctgtaagaattttgaagaaagcccggaaaggaagacattgatgcatttggcagatgcagctgaagtaagg

SEQ ID NO: 66278 - DNA, 350 bp, Homo sapiens
caatcaatcaatctatctgctgctgttgctgctgactgcacgggcatccatatcggtgggtctttcttaccttttagtcggttcagggtcacccagtagtgttgctctgggctgcggatgtctttggaccactgaagcatgtcttttgcatggatgtcagtcagtatgaactctacaaacttccttgtaagtacatagtaagcacttccaaaataaatggttaagttatggggtggtttgtctttgaatctgttatttggaggtgcatagatacttcctttaggaacgaattcgagatgactttgacttgtcttggatttaatgtgcaatggttggattactccaggagt

SEQ ID NO: 66279 - DNA, 363 bp, Homo sapiens
actggaagtgccttcagaggtcacccctttgggctttgccatgcaggctacaaagactctcctcctcagaacatgctgcttgcaggaattcaacatcatggaaaagaataaaggatgggctctcctgggaggaaaagatggccatcttcagggactatttctccttgccaacgcattgctggaaagaaatcagctccttgcacagaaggtcatgtacttattagtccctcttcttaaccgagggaatgataaacataaactcacatctgcaggcttttttgtggagcttctccggagtccagtggccaagagactgcccagcatatactctgttgcccgctttaaagactggctacaagatgg

SEQ ID NO: 66280 - DNA, 404 bp, Homo sapiens
gtggagggcctgcttatggtcccccaccgtcacttcatgcacgagaaggacgttatgagcggagacttgatgggtaagttccaaggtttctgtaggcaggtattttgtatttgatatggtgagaaacagaaactcatatttaggggccccagatggatttaaagttttgggcattctcaatgtttcctattttgggttggaaacggaagtgatttatatcccaatggctggtatcttatggaatcgtagaggatatttcctgcagctgattggatatctgttcctgagatataatgtgatggaagatttcctatggaagcttcatttttggagttacctgtcttctagaattacttattccttctcttggataatgttaagtccttccttggatatatcccttg

SEQ ID NO: 66281 - DNA, 368 bp, Homo sapiens
cttaattgtcacttagtaattcaagcataaagcaaaatgtggcatggaaattcaaatatgaaaaatatgatgagatattgtcaggtgattctatttcagtatagaataaatgcatgatggggatggggggctaacagtttattgatatgatctgggtacaagtgtgttcactttgaaatttcatcaagttgtatatttatggtttatgtgcttactgtgtgtatgccatatttcaattaaattaaaaaaaattgttattaaagtatgaagaaacttaccttcttttctctttcaaggagatgattattgacagagtaaatggacaggctgttcctagatatttgatatatgacataattaaattcaat

SEQ ID NO: 66282 - DNA, 338 bp, Homo sapiens
gaaacttttgaagaattaattgactgctctggggggtgtattctaggaggtttggtggatgcacacacacatccagtatgggctggtgaaagagttcacgaatttgcaatgaagttggcaggagccacctacatggaaattcaccaggccggaggagggatccactttaccgtggagcgcacgcgccaagccacagaggaggagctgttccgctccttgcagcaacggctccagtgcatgatgagggctggcaccacgctggtggagtgcaagagtggatatggcctcgacctggagaccgagctcaagatgctgcgcgtgattgagcgcgcccggcg

SEQ ID NO: 66283 - DNA, 377 bp, Homo sapiens
agtttcctcatgagtctgctagattgaagaaggcctgtgaaggaatgataaacatctatcctactgtacagtatccattagaagtgctttgtttgcatttaattgaatcaggtaatttcttccttattatagtgtgtgtcctagaggtgtgtgattatgtgagtgatgttattaatcaaaaaatgttttagtgtctaccatgtttaaggtgttgtttctgtgtttctggacataaaaagaagtataatgtgtagtctttgtgtatatgaaaagactaataaatataggaaagtacagtaatacagaagaattatgagttgccagatttattgttagtcagtgaaatctttttaatggtggaaattggagggggtctt

SEQ ID NO: 66284 - DNA, 596 bp, Homo sapiens
aatacacgccacctaagatttgctatactttttttaattctgtcctatactttgtttccacttgagaaactgctctttattatactggtggacagaatcagaaactttagggtagtttataatggaatgaagcttctgatccaaagaataagtaatttctggaaattttacagcaacatttgttaattcatctggatccgaggaaagatcaaagagttgaggcaatattgatgcaccatccgaataggctatatatttccagtggttagttcgaagcatgtaggtggaggcattcacattacatccatggaattcactcagaatccagggtggatgcaggtttttgactttatgttcattcttaaatgtttctgatgataacggcaacaaagagtatccactcaggttctgaggcagaggaattccagcaatatcaagcatggtagggtaaatatccacaagagaaaccacatttgatacttgtaggccggctttaattcctggtcccatcatcaaaagcggaacatgtgcactagcctcgtacatgctcattttataaaactgtcgatgttccatggccagctctccatggtctg

SEQ ID NO: 66285 - DNA, 484 bp, Homo sapiens
cgcaatcatgtctttacaaggcaatgcattttcacaaatgaagaaactgcaacaattgcatttaaatacatcaagccttttgtgcgattgccagctaaaatggctcccacagtgggtggcggaaaacaactttcagagctttgtaaatgccagttgtgcccatcctcagctgctaaaaggaagaagcatttttgctgttagcccagatggctttgtgtgtgatgattttcccaaaccccagatcacggttcagccagaaacacagtcggcaataaaaggttccaatttgagtttcatctgctcagctgccagcagcagtgattccccaatgacttttgcttggaaaaaagacaatgaactactgcatgatgctgaaatggaaaattatgcacacctccgggcccaaggtggcgaggtgatggagtataccaccatccttcggctgcgcgaggtggaatttgccagtgaggggaaatatcagtgg

SEQ ID NO: 66286 - DNA, 362 bp, Homo sapiens
tgaaaaagaagaaaatgaaggaaagcgaggctgacagcgaggtgaagcatcaaccaattttcataaaagaaagattgaagctttttgaaatactgaagaaagaccatcagctcttacttgccatttatggaaaaaagggggatacaagcaacatcatcacagtaagagtggctgatgggcaaacagtgcaaggggaagtctggaaaacaacgccttaccaagtggctgctgaaattaggtaaaccgcagtgtggaaaagatattcaatcttaagtaattatactgaagcctggtgaaaatgttttcttagggaccgctaatatattactccattctcacgatactaaaaggacatgtctgag

SEQ ID NO: 66287 - DNA, 362 bp, Homo sapiens
gcctacagggggtccatggcagcagttctactttctgcagctccctaagcagtgactttgaccccctagagtactgcagccctaaaggggatccccagcgagtggacatgcagcctagtgtgacctctcggcctcgttccttggactcggaggtgcccacaggggaaacccaggtttccagccatgtccactaccaccgccaccggcaccaccactacaaaaagcggttccagaggcatggcaggaagcctggcccagaaaccggagtcccccagtccaggcctcctattcctcggacacagccccagccagagccaccttctcctgatcagcaagtcaccagatccaactcagcagcccct

SEQ ID NO: 66288 - DNA, 401 bp, Homo sapiens
  misc_feature (1)...(401): n = a,t,c or g
cttaaacctgggtttctgccatatcaacctagggggaaaacttagccatgtggatttccaggtcactgcctcatagatggagagaatttttggcttcctctctgcctgcagatagcagttaagtaggaagtttgcaaatattgtggatggcctattgagaacaataaacatgattcacttgcttgcctgtcctactgaagaccaagagatgatgttctgccaatctatgcttatggccatgcagtggggaagtcagtcactggaggttatgtctatcgtggttgtgaatccccaaatctcaatggcctgtatatctttggagacttcatgagtggtcgacttatggctttgcaggaagatagaanaaacaagaaatggaagaagcaggatctttgcctggg

SEQ ID NO: 66289 - DNA, 387 bp, Homo sapiens
tggagcctagcgagtagccagccccagaatccagtgtctcccagggaagacggctcagcggaaaaacccggttcatgctgacccgtggcttatcagtgctgggggacctacagagtgagtcctctaggcggcactccctgcctatgcaggagacccctggcaccatccaggactcctagcaatgggaggacattcagctgggcagaggctgggttagatcaggacccaccccaggctgtctaggctgggtcaggacgccactctctgtgcacttgctctcccccagctcctgcacaggcagagcacccaactgctggcacagagactcagccggacctgcttccgccagtggagacaacaggtgggaacccaggagatgtcccctct

SEQ ID NO: 66290 - DNA, 420 bp, Homo sapiens
  misc_feature (1)...(420): n = a,t,c or g
agatcacaagttgtacccagttgaaatgcagaaataagcaaaaganccaaatacggttgtaaaggagccttagccaggaatatctttcataaatcaaggtctgcggcagctggccctggccctgtcatggtatagccaaagtgtcttcatcacggaacatcggggagcaccacacagaccagagtataataatgtggaatacagagctggtcagcacttaattggtttacacctgcttgtctgtttcccctgtgtttctctgcaggttcgaatcgtcctcccatgccatcagtatgagcgcctatctgcgagaacagagaagggagctctatagtcggagtggagaactgcaaggtgagtgattgagcttctctggaaaaattaattttctggaggagtatttcctttattacacatgag

SEQ ID NO: 66291 - DNA, 469 bp, Homo sapiens
gaaaggaaccaagaatgggcagttcaactacccttgggatgtggcggtgaattctgagggcaagatcctggtctcagacacgaggaaccaccggatccagctgtttgggcctgatggtgtcttcctaaacaagtatggcttcgagggggctctctggaagcactttgactccccacggggtgtggccttcaaccatgagggccacttggtggtcactgacttcaacaaccaccggctcctggttattcaccccgactgccagtcggcacgctttctgggctcggagggcacaggcaatgggcagttcctgcgcccacaaggggtagctgtggaccaggaagggcgcatcattgtggcggattccaggaaccatcgggtacagatgtttgaatccaacggcagcttcctgtgcaagtttggtgctcaaggcagcggctttgggcagatggaccgcccttccggcatcgcc

SEQ ID NO: 66292 - DNA, 376 bp, Homo sapiens
  misc_feature (1)...(376): n = a,t,c or g
cctcttcctcttcctcttccnnnnnnnnnnnnnnnnnnnnnnnnnnnnncggcactgaatctcgcttacactaggttttatttaatgattcccctccttatactttctgtctcaccagtttcctttcacactgatttaccggctacacaaaattattcttattgggcttatgtgccttttcctccacttattcgaccactcacctggatggacgctcctgcagaaatctacactaatgatagtgtgtggatgcctggagctacagatgaccgttgccccgctcaatcaggaaaaggcggcactgcatttaatgttaccatgggttacaaacacccacctctgtgcctcggacatgcacctggttgtatccatctaa

SEQ ID NO: 66293 - DNA, 391 bp, Homo sapiens
tctcaaaccaggctgggctggaattatttgcttaagagactgaacaggactcttcatgccaaaacaaagaggctctctgtccactgtctgagaatgagtggaaaagctatacaacttgcctgaagtttcatccagggctggaaaaaatagcttacaggtgaggttgaaagggacagtaagataaagaagtgggtttatcaataagccagttgcacacgcaccaacacagcggaactaaaagcttgtccctgagcagccaggcagaggtggacagagactccagagacctgcagagggagcacggagaccagcagagggagcacacagacctgcagagggagcacggagacctgcagagggagcacagaaaccctgggtccagggaggtggt

SEQ ID NO: 66294 - DNA, 630 bp, Homo sapiens
acttggtgcaggctcacattctggcctcagaagccctgagagctgacaagggccatattgcctctgggcagccctacttcatctcagatggcagacccgtgaacaactttgagttcttccggcctctggttgagggcctgggctacacattcccgtctacccgcctgccattgaccttggtctactgctttgcttttctaacagagatggttcacttcattttgggtcgactctacaacttccagcccttcctcactcgcactgaagtttacaaaactggtgtcacacattattttagcttagagaaagccaagaaagagctaggttataaggctcagccatttgacctccaggaagcagtggaatggtttaaagcccatggtcatggcagaagttctggaagtcgtgactcggagtgttttgtttgggatgggctattggtcttcctcctgattatagcagttctcatgtggctgccttcttctgtgattctgtcactgtgaaggaggggccagaaataaggtgatcacagttggctgagatggttctcaagaaacatgggttttaaaatgtgtacagtgatatctggtgccaaacattggctcttcaaattgctacttaaaaaaaaaa

SEQ ID NO: 66295 - DNA, 750 bp, Homo sapiens
atcgacaaccctatgacatcgcaaacgttattactaatcactatatagaactactcactataaggactttaatcctccacgacccaaattcttactacatctatcattttcacctatatcttgggctctacctctgaggccatgtccaacgcactgcctgaataggctaaatgcatctttagaatacagtatgaagaggtcttgtatattcaaaggcctattgaataagacacaagaacattttttcaagaattgattctcactcaggcatcaatggctccaccaccaaggaaacatgctgctctttgtgctatggaagtgcttcctcttgcactaccttctccacctcgtcaattatcagaatcagaaaaaagtcgaatggaggaccaggaggaaaatactttaagagagttgcggttgtttctcagggatgtaaccaagaggctggccacagataaacgctttaacatcttcagcaaaccggtggatattgaagaggtttcagattatcttgaagtaatcaaggaaccaatggacttatcaacagtaataactaaaattgataaacataattacctgactgcaaaggatttcctgaaagatattgacctcatctgtagcaatgctttagagtataatccagataaggacccaggagataaaataattaggcacagggcttgtaccctgaaggacactgcacatgctatcattgcagctgaattagatccagaatttaataaactttgt

SEQ ID NO: 66296 - DNA, 592 bp, Homo sapiens
cctcttctctccttcttgttgcctgcaacacggcgagcaagggagacatatttcagccctgtttgtgttaccgctctttcagccccaccatttgacaggtcccaggttcttgtcctgcattcaggaacaatgaggtatacggacaactggagcatgaacaaggtgaagaggagctttactgagcgacagtacagctctcaggagacccaaagtgggtcgcttggtcagattgagacagtctgcgtggtaaacttttgggcagcctggtttcttgcaggagacgagctggccagcatccccacaactaaaacactcatcttctcgctcctttgtgatttcaccctgggtcctgcgctttccctgttgcttcttcttgaatttctttgacttttcttccgtggcaatgggttgattctttggccttacacccaagaagccactgcagttcggggctccacatttgcagacagtctttccattcccacgacattctcggttgccccggagggagctcacaggggcgcgagaacgagagtgttaaagttgtggtgactctggcggtcgtgtcgtccgtgaaagaaacctgggtcat

SEQ ID NO: 66297 - DNA, 351 bp, Homo sapiens
catggctgaccccgacccccggtaccctcgctcctcgatcgaggacgacttcaactatggcagcagcgaggcctccgacaccgtgcacattcgaatggcctttctgagaagagtctacagcattctatctctgcaggatctcttagctactgtgacttcgacagataatttagcctttgaggatggacggactgactggctgcaaaggcctgactgtgtctccttcaaaattcatgtgctgccaatgtgacggtattaagaggaggggccttagagggggattagatcctgaaaggtccttactttttggagtgacgaggatgcatacgatgaaagcatctcgtagatacg

SEQ ID NO: 66298 - DNA, 374 bp, Homo sapiens
gaactccccaaaggcaccatccaggtttttaccccgcttgtcaaattcccctctggcccagggctggctgctcagcaggagtgtttaataagcacttaattgcccggtgagtacagaccattccagctcaccttaactgtttcctggctgactcgcctctcggcctgattgccctgctcatctggctgagtgagctggaatgagtgtagtggtagtgccacctataggttcctcttaccttggtcttatttcacaggagcacttcccgaacgagtttacctcgggagatggaaagaaagctcaccaggactttggctacttttatggctcgagctatgtggcagcctctgacagcagccggactcctgggctgt

SEQ ID NO: 66299 - DNA, 392 bp, Homo sapiens
gggctcggcgtggggctggggacacagctgcagcttcttctgggccggaatctcatcttaccttggggtaagtgggaacatcgcgtcgaggagtcaacttcttgaggttatccaaaaaactgtacttacaggggcagttggtcctagagagaaggagcagagatgagctgaggacctgctgattcagtctggagaagccctcagcacagcaaaagcaagctgacaaacccaacccccaagccccggggggacttaattgctgggggaaaagagtcagggcagcagcaactcacttgaagcaaaattcctgatgacctgtctgacctctgacctcacactagactcttggaaaacacacagaaagtcatatgttggggctgggcgtggtggta

SEQ ID NO: 66300 - DNA, 535 bp, Homo sapiens
agtatattaagcgtcaaattgaatattacttcagtgtagaaaatttggaacgagacttctttcttcggggaaagatggatgaacaaggtttcttgcctatttccctgattgctggttttcagcgtgttcaggctctcactacaaaccttaatctcatcttagaggcactgaaggatagcacagaagtagaaattgtggatgagaaaatgagaaaaaagatagacccagaaaaatggccaattccaggccctcctccacgcagtgtgccaccaacagacttctctcaactgattgattgtccagagtttgtaccaggccaagccttttgctcacatacaggtaacatcttttcttctagagcaaacgatgtaacagtgggttatttggtccaatttacttacttatttatttattttcagtttatttagatttgataggaaaattaaagctaactgaaagacttttgagccccattttgtattgatattgcctcactcacagagttacaaattaaatacggatttaagaattatga

SEQ ID NO: 66301 - DNA, 602 bp, Homo sapiens
  misc_feature (1)...(602): n = a,t,c or g
gggccacgctgtcaaacagaggtggatgagtgcctgagtgacccatgtcccgttggagccagctgccttgatcttccaggagccttcttttgcctctgcccctctggtttcacaggttcacaggggaggcattggaaagaactggcagaatattttattccatttgggttggggcagagttcattggtgggtgtttgatggttgggatgtgagaatagaatgagaatggtatcctttaaagttatttagtgtaaaacctgcacaattgtacaaccatggggacaagggcaggggttaccgtagggcccacatgggcccagtgtaaatggtgtgattgcggcttgggagcagaggacggggctcaaagaaaaggcattcacttgcttatttagcaagcacttaccaactgcctactatgccagatacggaggcaaatctgagtaagacagttgccatcttcatgtgactttaagtctaatacagagagaccaacaagtctcctgttgatcatagcccacagaggtgctctgagaaaaaacgtgcaggatattacaagagcacagaggaccagcccacccagacntaaaatggaggaggtgatg

SEQ ID NO: 66302 - DNA, 501 bp, Homo sapiens
ctcccctgctcccaggaggaagcgacaggaggagccaaggacaccaggatggtccaccaaacccgcgccagcctcaggtcagttctctttggccttatgaactcaggaacccctgaggattctgagtttcgggcagatgggaagaatatgagagagtcctgctgtaaaaggaaactggtggtgggaaatggaccagagggtccaggtctgtcaagcacaggcaagaggagggccacaggccaggactcttgtcaagagagagggcttcaagaggccgtccggagagagcatcaggaggccagtgttcccaagggccgcattgtgccaaggggaatagacaggctggagagaactagatcaagccggaagagcaaacatcaggaggcaacggaaacctctctcctccattcccaccgctttaaaaagggccaaaagctgggaaaagattcgttccccacccaggacctgactcctttacagaatgtctgcttttggaccaaa

SEQ ID NO: 66303 - DNA, 352 bp, Homo sapiens
cacacgggcgagaagccctacgagtgcggccagtgcggccgcgccttcagccacagctcgcacttcacgcagcacctgcgcatccacaacggcgagaagccctacaagtgcggcgagtgcggccaggccttcagccagagctccaacctggtgcgccaccagcggctgcacacgggtgagaagccctacgcctgcagccagtgcggcaaggccttcatctggagctccgtgctcatcgagcaccagcgcatccacactggcgagaagccctacgagtgctccgactgcggcaaagccttccgcggccgctcgcacttcttccggcacctgcggacccacacgggcgagaagc

SEQ ID NO: 66304 - DNA, 343 bp, Homo sapiens
agagaaaccatacagatgtgaggagtgtggtaagggcttcatttgtagctcaaatctttacattcatcagagagtccacacaggagaaaaaccctataaatgtgaggaatgtggtaaaggctttagtcggccttcaagtcttcaggcccatcagggagttcacactggagagaagtcatacatatgtactgtatgtgggaaaggctttactctgagttcaaatcttcaagcccatcagagagtccacactggagagaagccatacaaatgcaatgagtgtgggaagagcttcaggaggaattcccattatcaagttcatctagtggtccacacaggagagaag

SEQ ID NO: 66305 - DNA, 383 bp, Homo sapiens
aagtggaagagaagaagattacccgagcctgacagaccatgtaacggatgacacgacaaacaccgagctagagaaacaaacgcatggcgaaaaggaagattccacaaaggaggaaactccaggacctcctaaatggaaggaatctatgagaacattcaaacttgacccacatgatgatcaggcttttctggatggaactgacgtgtatgtatggatctatgacccagttcactttacaacattagccatgggattaactcttgcgattgcaggaatagcggccaccctcttcctcctttggtcagcaaaattgacagtagctgtttattacctcagcgtggttgcacgctgccttgtaaccagctttattctccttactgttg

SEQ ID NO: 66306 - DNA, 359 bp, Homo sapiens
ccgggacgatgcctgcctctactccccagcctcagctcccgaggtcatcacagtaggggccaccaatgcccaggaccagccggtgaccctggggactttggggaccaactttggccgctgtgtggacctctttgccccaggggaggacatcattggagcctccagcgactgcagcacctgctttgtgtcacagagtgggacatcacaggctgctgcccacgtggctggcattgcagccatgatgctgtctgccgagccggagctcaccctggccgagttgaggcagagactgatccacttctctgccaaagatgtcatcaatgaggcctggttccctgaggaccagcgggtactgaccc

SEQ ID NO: 66307 - DNA, 331 bp, Homo sapiens; identical to SEQ ID NO: 8415

SEQ ID NO: 66308 - DNA, 392 bp, Homo sapiens
ggagaacaaaatgtatcaagggattgctgagccacatgcaactgacaacactcctgtagaacacccaagtttgcatgatgtagggaaattatctactctcttcctgactctctcagtcataaaataccacattccacataactcacataaactgccaaccttgccaaatttcacagtcacttttctgatgagccaactgatgtggtattgactactatgtcaagaatcaaagcttaagacaatgatccataccacaggacattatttcttcacccacaagatcatagtcaggacttagaacttcatctctgcgctcttctacgccttcaaatattgccaccagaatgtcaactttctgcttgatctggctatcgtaaggcttccatttccag

SEQ ID NO: 66309 - DNA, 764 bp, Homo sapiens
ggcacgagaatgcaaagggctgcagttctcattcaggctactttcaggatgcacagaacatatattacatttcagacttggaaacatgcttcaattctaattcagcaacattatcgaacatatagagctgcaaaattgcaaagagaaaattatatcagacaatggcattctgctgtggttattcaggctgcatataaaggaatgaaagcaagacaacttttaagggaaaaacacaaagcttctattgtaatacaaggcacctacagaatgtataggcagtattgtttctaccaaaagcttcagtgggctacaaaaatcatacaagaaaaatatagagcaaataaaaagaaacagaaagtatttcaacacaatgaacttaagaaagagacttgtgttcaggcaggttttcaggacatgaacataaaaaaacagattcaggaacagcaccaggctgccattattattcagaagcattgtaaagcctttaaaataaggaagcattatctccacattagagcaacagtagtttctattcaaagaagatacagaaaactaactgcagtgcgtacccaagcagttatttgtatacagtcttattacagaggctttaaagtacgaaaggatattcaaaatatgcaccgggctgccacactaattcagtcattctatcgaatgcacagggccaaagttgattatgaaacaaagaaaactgcaattgtggttatacagaattattataggttgtatgttagagtaaaaaaaaa

SEQ ID NO: 66310 - DNA, 341 bp, Homo sapiens
gtcaccggtgctgcgaatgtggccaaaggggccgtccagggcggcctggacactacaaagtctgtcctgactggcactaaagatgctgtgtccactgggctcacaggggctgtgaacgtggccaaagggaccgtccagaccggcgtagacaccaccaagactgtcctaaccggcaccaaggacaccgtctgcagtggggtgaccagtgctgtgaacgtggccaaaggggccgtccaggggggcctggacaccaccaagtctgtggtcataggtacaaaagacacgatgtccactgggctcacgggggcagcgaatgtggccaaggggtcgacgcggccgcg

SEQ ID NO: 66311 - DNA, 79 bp, Homo sapiens
ggaaaccccagcgcagctgctcttcctcctgctactctggctcccagatacaaccggagaaattgtgttgacgcggccg

SEQ ID NO: 66312 - DNA, 377 bp, Homo sapiens
  misc_feature (1)...(377): n = a,t,c or g
ataattttaagggtctaaacctctcttaaagctacataaagtcattgtgagatgtattacttttcttcctatcatttgaaaatgctacatgagaagacccttgcacagttgagtttgactgacttggtagagatgactgtctgaagagagtgggagtacacacatacatcttggtcccatatttcatatattcatttacaacttaaacacaaactacttccccaagaggacaagagcttctaccttggcgccatataaatccgagttcttcattagaaactctgctgatgtccgcactgtgactccggtcgtctcacactgcagcacacagttttccagcgtagtcttaccacggtgaacaactgggatgaaaatan

SEQ ID NO: 66313 - DNA, 622 bp, Homo sapiens
ctcagtcaaggctaatgcttttggaatcagtgttaatatttttcaatctattggccgtgttgtcctacctgaagttcttcaactgccaaaagcacagccctttttctctgagctggtggttctggctaacactgacaggggtcgcttgttcctgtgcagtgggcatcaagtacatgggtgtgttcacgtacgtgctcgtgctgggtgttgcagctgtccatgcctggcacctgcttggagaccagactttgtccaatgtctgtgtgttctgtcacttgctcgcccgagcagtggctttgctggtcatcccggtcgtcctgtacttactgttcttctacgtccacttgattctagtcttccgctctgggccccacgaccaaatcatgtccagtgccttccaggccagcttagagggaggactagctcggatcacccagggtcagccactggaggtggcctttgggtcccaggtcactctgaggaacgtctttgggaaacctgtgccctgctggcttcattcccaccaggacacctaccccatgatatatgagaacggccgaggcagctcccaccagcaacaggtgacctgttacccctttaaagacgttattatctggtggac

SEQ ID NO: 66314 - DNA, 345 bp, Homo sapiens; identical to SEQ ID NO: 35537

SEQ ID NO: 66315 - DNA, 207 bp, Homo sapiens
gggccgatcacgtaccacttggactggacctcggggtcttcgtggctcacgttcaccaccaggcacgtgacctcaggggtccttcgtagtagtagcaacgcagccagttggtggggtcgtcctcctcagggaagactttgaggatcttcacgaaggagagaggtaagatgcccgtggctccccggacagtgcccgacgacgcggccg

SEQ ID NO: 66316 - DNA, 397 bp, Homo sapiens
gctgccagaggtctcaccatctttctcgggttctttggcttctttcttgctctttttagtggaagacttggactggcttatcacttggccaacttccttttccttgagtctcagctcaaatgccatataagacaagtctttcataactaccctaggtaaagtcctctttcctttttcttcttgctgaaattttattctcttctatataaccctgtttattttgtgaaaagcaattataaaaatttataattttcttttactatgataagctctcttgaagacaggatattgtctatcttgttgtctctgagtaagcatcttttttccccaacaatattcaccctctaaagatacgattaaaagtgtgatgagacattttgttatctttaagctgata

SEQ ID NO: 66317 - DNA, 389 bp, Homo sapiens
gttagaaatcaagtttttggagcaggtggatcaattctatgatgacaactttcccatggaaattcggcatctgttggcccaatggattgaaaatcaagactggtaggatcaaacatattttccctagaagttgatgcacaaatgtctgatgctctatccatgtgaatttattttatggtccactttttactcagtagatgcattcttttcaggtaaagaactttctcaaggatttgaaagccttcccaaagaaggggaataattgtcctttctggttccattcattgtaaatgaaaagttaatggttccagtgcttcttttctctgtaaacaaaaacccaaataatttttcatgtattaaaaaaagaagcaaatcaattgattgtcagt

SEQ ID NO: 66318 - DNA, 286 bp, Homo sapiens
gccagcctcaagttggggttggataaggctgtgcttcaatccatgagtggtcgggatggcaacattactggaatccaacagttctctaagaaggagattgaagatcttttaagaaaaggagcatatgcagccatcatggaggaagatgatgaaggctccaagttttgtgaagaggacattgaccagatcttgttaagacgaactacaaccatcaccattgaatctgaaggaaaaggttccacctttgctaaggcaagctttgttgcttctgaagtcgacgcggccg

SEQ ID NO: 66319 - DNA, 465 bp, Homo sapiens
cgcagaagcaggggaatgggcgtctttacctgggtcgtggccagcgtgtaacccttgggctggagactttcagctgctgcagcaatgtcagtaatttctttctttggacctagagtagtgggccctggagtaggaggcccactgcctgcatctgcctcactctgctcttcatccctggcaagcaagtactccaccccaaaatcatcatcttcctcctcttcatctgcttggctctgtgattgggcatcctcagactcttcagactcagattcctctgatgctgaacttccacttgtttcttcctcctctgaatgttcatcttcctcatcctcactccggtcctccacagagtctgactgactgctactatcctcctgaggaggctcttccgcttccacgggcccctctggttcacagtcagagctattagcatcagcctcatcttcatccgcatctcctgcctcc

SEQ ID NO: 66320 - DNA, 354 bp, Homo sapiens
atcttcttcactaatgtatttgatctgggtgttgctcagaaaaagtttgcgtagggagcttggcagtttgggtggcacgtgtgaaagagaattgaaagatagtgatagcaactccaaatttgtcagcgtttcaaatactccatcttctatgttagttttctcgcaaactttgttaaaatagcagttccaggccaaatagagatttttcaagtttataagtcttgaaatgccctctttagttatgttgtatatattggtttgaattagactaagttctgtcaaagactctggcaaaccagagggtatttggggtaactggttgtcttcaagcagtaactcccttaggttttttag

SEQ ID NO: 66321 - DNA, 210 bp, Homo sapiens
cttctgtgtgtctgtcttcctgtgggtgcctgcccgtctctttctcttctaacagcccctttgaaccagctgatgcgctgtcttcggaaataccaatcccggactcccagtcccctcctacattctgtccccagtgaaatagtgtttgattttgagcctggcccagtgttcagaggtagttgggctcttctttcttggtcgacgcggccg

SEQ ID NO: 66322 - DNA, 378 bp, Homo sapiens
ggctttgccacattcttcacatggggatggtttctctccactatgaattttcttatggctagttagttgtgaccaccaattaaaaactttgtcacattcatcacatttgtagggtttctctccagtatgaattttcttatggttagttagttgtgaccaccaattaaaaactttgccacattcgtcacatttgtagggtttctctccagtatgaattcttttatgttttgttaggtttgaacatcgattgaaaactttgccacattcttcacatttgtatgggacgtctccacgatgaccacatttatgactagtaaagcctgagaaccgcctcaaggcttcttcacatgcgccacatgcgccaggttaatttttttc

SEQ ID NO: 66323 - DNA, 343 bp, Homo sapiens; identical to SEQ ID NO: 36024

SEQ ID NO: 66324 - DNA, 338 bp, Homo sapiens
gtaatagtcgtccctggaatagcacatgccggcagtacaacctctcgcacaaaaatatgtggccgtgtccgcagcggtgacagaactcagcctcagggagaatcggctcctggacgtgtctattgacatgaagattcgattccagagggaggggttgtaatcggtggccccactatggtggacatagcccatccattgcagtttcttccctggggtctgccggatccaactccaataaaaatttttgatggagtcaccagagacagaacaggtgagggacagggtttccgaaggcttcaccaggcctgggcccgactcctgcaaccgcagctgggacg

SEQ ID NO: 66325 - DNA, 361 bp, Homo sapiens; identical to SEQ ID NO: 8773

SEQ ID NO: 66326 - DNA, 720 bp, Homo sapiens
ttgagaacaacatggattttatgggattaattataatgcagaacaaattaaagcaagaaacccctgcagtacttgaagatttgcataaagccaacattcgcaccgtcatggtcacaggtgacagtatgttgactgctgtctctgtggccagagattgtggaatgattctacctcaggataaagtgattattgctgaagcattacctccaaaggatgggaaagttgccaaaataaattggcattatgcagactccctcacgcagtgcagtcatccatcagcaattgacccagaggctattccggttaaattggtccatgatagcttagaggatcttcaaatgactcgttatcattttgcaatgaatggaaaatcattctcagtgatactggagcattttcaagaccttgttcctaagttgatgttgcatggcaccgtgtttgcccgtatggcacctgatcagaagacacagttgatagaagcattgcaaaatgttgattattttgttgggatgtgtggtgatggcgcaaatgattgtggtgctttgaagagggcacacggaggcatttccttatcggagctcgaagcttcagtggcatctccctttacctctaagactcctagtgtttcctgtgtgccaaaccttatcagggaaggccgtgctgctttaataacttccttctgtgtgtttaaattcatggcattgtccagcattatccagt

SEQ ID NO: 66327 - DNA, 324 bp, Homo sapiens
tatgtatttattgaatgcctgctctgtgctagatacagactttaatactgcatctagcagtacacatatcattttaaaatttggatttaatataaggccaatattcctctttttacacaggaagaccaggcttgtgcaacttgccttattcttgcttgctccactgctgcctgtgatatagaattatctgcctgtgctactcttgctttgtataggattgtttgtcttgttttgttttatcttctcgttctgtttcatgttccaggttagcgtgtgtagagtcttgctggtctctgtgctagatgatttgacttactaaaatcg

SEQ ID NO: 66328 - DNA, 342 bp, Homo sapiens
cttgtatacctcttgtagcacctgaagacatcactgcatttcagcttaacattggccggtcgactgaaagccccattgattttgtagtaactgacacggttcctggaagtcaaagtaattctgatacacagtcagtacaaagcactatatcaagatttgcctgcagaatcatatgtgaacggaatcctccctttacagcacggatttatgctgcaggatttgactcatcaaaaaacatctttcttggggagaaggctgccaaatggaagacatcagatggacagatggatggcttgaccactaatggtgttcttgtgatgcatccacgcaatgggttcacag

SEQ ID NO: 66329 - DNA, 310 bp, Homo sapiens
tttttccaatacacatataaaccatcattcactaaaatgtactatatattcaatattttgtgtatactcactgcttttcctaacgtgaaaaatttaccaaaatgctaattgtgacttataaggtatttaacagactcccgacaaaaagcagaatgatcagcgaaatcggaaaagaaaagctgaaccatatgaaactagccaaggtagtaataatttcgtatcaacaaaagtactcaattctaatgtacttagatagaattttctaactcatactaaataattagtttgtacacagggattcctgataaag

SEQ ID NO: 66330 - DNA, 502 bp, Homo sapiens
cttaaagtgaaatttaaaaagtaataataatttttaaaaatgtttaaaggcttactttggagagacagttttacatagcttaatattttatcattaaaggcatggtggagctggttcctgcttccgataccctcaggaaaatccaagtggaatatggtgtgacaggatcctttaaagataaaccacttgcagagtggctaaggaaatacaatccctctgaagaagaatatgaaaaggcttcagagaactttatctattcctgtgctggatgctgtgtagccacctatgttttaggcatctgtgatcgacacaatgacaatataatgcttcgaagcacgggacacatgtttcacattgactttggaaagtttttgggacatgcacagatgtttggcagcttcaaaagggatcgggctccttttgtgctgacctctgatatggcatatgtcattaatgggggtgaaaagcccaccattcgttttcagttgtttgtggacctctg

SEQ ID NO: 66331 - DNA, 353 bp, Homo sapiens
cattttcatcttaggcatcttcaggtgccagtctgggccatgaacatccacatctggggcatcaatgtccactttgggccctctgatgtcaacatctggcactttcatttcaccttctaccttgggaacagacacatccatatcccctttgactttggggcctttcaagtttaagttcacatcaggcatggagatcttgggggtcttgaagtgcatctcaggcatcttaaacttgggccctttcaactttgcatcaggacactccagctcaacatcaggcacctccacatccacactggggcctgttaaatctccctccaattttggcaaagacacatccacatcccctttga

SEQ ID NO: 66332 - DNA, 338 bp, Homo sapiens
ctcgcacagagatagaaggccgggtcctcgcttctcagactgttcatttggagataaagggtgttcttggcgttgtctctggagatggtgaatcggcccctcacagagtctgaatactgtgtgatgccgccattccagttaatgtcagagacccactccagccccttccctggagcttggcggacccaggtcatgccataatcatcataggtgaatccagaggctacacaggagagtctcattgatccccccggccgttccacatgtcccccagactccaccaacaccatctcacactggacaccttttaaaatagcaatatggaaaacccaggtcag

SEQ ID NO: 66333 - DNA, 508 bp, Homo sapiens
agatcaaaaaatttattctggggaaaaatcctatgagtgtgctgaatttggaaagagcttcacctggaagtcacagttcaaggtacatctgaaagttcctacaggagaaaaactctatgtatgtattgaatgtgggagggcttttgtacagaagccagaattcatcacacatcagaaaacccatatgagagagaagccctataagtgcaatgaatgtggaaaatccttttttcaagtatcgtctcttttcaggcatcacagaattcataccggagaaaaactatatgaatgtagtgaatgtgggaaaggtttcccttataactcagatctcagtatacatgagaaaattcatactggagagagacaccatgaatgcactgactgtggcaaagcgttcacacaaaagtccacactcaagattcatcagaaaatccatacaggcgagagatcctacatctgtattgaatgcgggcaggccttcatccagaaaacacaattgattacgaaa

SEQ ID NO: 66334 - DNA, 414 bp, Homo sapiens; identical to SEQ ID NO: 20301

SEQ ID NO: 66335 - DNA, 522 bp, Homo sapiens
attttccacgtctcttcaacctccgctcaatttacttacaatggaacaggattcgctccattagccaaggtttgacatggacttggagttccttacacaacttggatttatcagggaatgacatccaaggaattgagccgggcacatttaaatgcctccccaatttacaaaaattgaatttggattccaacaagctcaccaatatctcacaggaaactgtcaatgcgtggatatcattaatatccatcacattgtctggaaatatgtgggaatgcagtcggagcatttgtcctttattttattggcttaagaatttcaaaggaaataaggaaagcaccatgatatgtgcgggacctaagcacatccagggtgaaaaggttagtgatgcagtggaaacatataatatctgttctgaagtccaggtggtcaacacagaaagatcacacctggtgccccaaactccccagaaacctctgattatccctagacctaccatcttcaaacctatcacaccccatccac

SEQ ID NO: 66336 - DNA, 630 bp, Homo sapiens
gcgcgcgctgcgacgccaacctcggcttctcgccgctaacggcatcgagcctgaaagcatggcgatctcagagccgatcaagggcagcagaaagccctgtgtgaataaggaggagttggctttgaagaagcccatggcgaaatgtgcctggaagggtcccagagagccacctcaggatgcccgggcagaagccgagagcccaggaggcgcctctgagtcagaccaagatggtggccatgaaagcccaccaaagaagaaggccgtggcctgggtgtctgccaagaaccccgctcccatgaggaagaagaagaaggtgagcttgggccctgtctcctacgtcttggttgactcagaagatggcaggaagaagccggtgatgccaaagaaagggccaggctcaagaagggaggcatcagatcagaaggcccctcggggccagcagcctgccgaggcaacagcctcaacctctaggggtccgaaggccaagccagaaggctctcctcggcgtgccaccaatgaatccagaaaggtttgatctgggggaccacccatactgaggagttgaaagaacaaggaagaagtaccaagtcaaccaagttctctcttgtcactgaataagactttggactg

SEQ ID NO: 66337 - DNA, 503 bp, Homo sapiens
acaaggagaacatttttaacgcagaccatttccctctctggtaccgaagagccgctgagcagattccagggagcttcgtctactcgatcccattcagcactggaccagtcaataaaagcaatgtggtgacagcaagtacatccatccagctcctggatgaacggaaatctcctgtggtggcagctgtaggcattcagatgaaacttgaatttttccaaaggaagttctggactgccagcagacagtgtgcttccctggatggcaaatgctccatcagctgtgatgatgagactgtgaattgttacctcatagacaataatggatttattttggtgtctgaagactacacacagactggagacttttttggtgagatcgagggagctgtgatgaacaaattgctaacaatgggctcctttaaaagaattaccctttatgactaccaagccatgtgtagagccaacaaggaaagcagcgatggcgcccatggcctcctggatcct

SEQ ID NO: 66338 - DNA, 404 bp, Homo sapiens
cggacgcgtggggtttgtttttatcccgtccttcaggagatgacctggcttccaccactttctgctattcaagcacctggcaaagtggaaccaaccaaatttccatttccaaataaggtgagatcttgcatccctcaggaggaatatgtttcactcatgcaggcatttctagtgggcagtgggctttacccgtgattgtcttttcttctgtaaatattcctgccagaggcacgtgaatctgatccttcacaatttgcaagcgcatacttattcatttatgaaagggggagaatcaagcctccaatcttacttacctacacttctctgcaaaatgtgatactactgtaattatcattttgtctaaaaaacattcatgaagttgaaatgcatcttataatcatttt

SEQ ID NO: 66339 - DNA, 592 bp, Homo sapiens
ccttgacccagtctatttatgacaagaagcttgtgttaatgcagaaaaatctccagggcctgggtgcccccggccctgcaggaccaagaggattcaaaggagatatgggcgtgaaagggcctgttggcggcagaggcccgaaaggagaccccggcagcttgggccccctgggaccccagggtcctcaggggcaacctggagaggccgggcctgtgggagaaaggggccctgttggccctcgagggttcccaggcctcaaaggctcaaagggcagctttggaactggagggccgagaggacagccaggcccaaaaggggacatagggcccccagggccagaagggcccccggggtctccagggccctcagggcctcagggaaaaccgggaattgcagggaagacagggtcaccaggccagcggggggccatggggcctaagggtgaaccagggatccagggtccccctggtctcccggggcctccaggtccaccaggaagccagagcttctactgaggagggctggggcagagccactgtcacacagaatgccggaggggcgcagagcaaatccaggccccagaaagcctcac

SEQ ID NO: 66340 - DNA, 326 bp, Homo sapiens
ttctaaatacaaaagggaatataaagatgactttcaaggaacatataatgtagtcagaaagatgagaggattagttatacaatttaaggaagggaggataactttgggaaggttttgcggaggacacgttggctcgtcatctctcttcgtgttctcctcccttccttcttcttttccctgtcccgttcgtcgctctctctcccttttctccttgttctctcccgctccccgttcccgctccttcccttcctcctcgtgcctctcttcttctccgttccgttctcgttctccttccctcgggctctccgtctactccctcctccctc

SEQ ID NO: 66341 - DNA, 376 bp, Homo sapiens
  misc_feature (1)...(376): n = a,t,c or g
cgccgctttgtttctcaagagactgggaatctgtatattgccaaagtagaaaaatcagatgttgggaattatacctgtgtggttaccaataccgtgacaaaccacaaggtcctggggccacctacaccactaatattgagaaatgatggagtgatgggtgaatatgagcccaaaatagaagtgcagttcccagaaacagttccgactgcaaaaggagcaacggtgaagctggaatgctttgctttaggaaatccagtaccaactattatctggcgaagagctgatggaaagccaatagcaaggaaagccagaagacacaagtcaagagtggggaaanntcttgagaaatcccttaatttttcagcagggaggatgc

SEQ ID NO: 66342 - DNA, 359 bp, Homo sapiens
atctcaggagaatccatttactggagccagaaacctactccatcatcgaacgccagcccttggtctgagcctgcggctgtagatgtggaactcacagcatatgcattgttggcccagcttaccaagcccagcctgactcaaaaggagatagcgaaggccactagcatagtggcttggttggccaagcaacgcaatgcatatgggggcttctcttctactcaggatactgtagttgctctccaagctcttgccaaatatgccactaccgcctacgtgccatctgaggagatcaacctggttgtaaaatccactgagaatttccagcgcacattcaacatacaggcagttaaccgaatggg

SEQ ID NO: 66343 - DNA, 406 bp, Homo sapiens
  misc_feature (1)...(406): n = a,t,c or g
cacaactccggtccactcaaattgctacagttcattgtagtgcacaaaccacttctcgacatctcctgcagaaactgagccagacttgcatggtaatcagtactaatactggtcgtgtatacagaccaaaagactgtgaaagacttgttctgtacttaaaagatatcaacctacctaaacttgataaatgggggaccagtactttggtagcattcctacaacaggtattgacgtatcaaggattttatgatgaaaatttggaatgggttggtctagaaaatattcaaattgtggcttctatgtcagctggaggaagactgggaagacataaacttactaccagatttacttccatcgttcgtctttgttctatagattacccagaaagagagcagttacanacgat

SEQ ID NO: 66344 - DNA, 389 bp, Homo sapiens
  misc_feature (1)...(389): n = a,t,c or g
aacaacatctcggacctgagcccactgtgcctgctggaacaattggaggtgctggacctggagggcaacagcgtggaggacctggggcaggtgcgctacttgcagctgtgcccacgcctggccatgctcaccctggagggcaacctggtgtgcctacagccggcccctggccccaccaacaaggtgcccaggggctacaactacagggcagaggtgaggaagctcattccccagctgcaggtcctggacgaagtgctggccgcacacacaggcccaccggcccccccgcggctgagccaggactggcttgcggtgaaggaggccatcaagaagggcaacggccttcccccgctggactgttccccgggagcccccatccggagacttgn

SEQ ID NO: 66345 - DNA, 354 bp, Homo sapiens
ctggaaaggggctgtagtgctgcagctgtccacttttgggtggtgcctgcatatcgtgcagaaccatctgtgaaccaggccctagttttctcttcctctgtcaattgataatagggaactccccctgaggccatcagtgcaggctgggaaagagaaggcagggtggcaggagtggagaccatgggcatttgagccacttcctcatgtaacttacttgtgccttcagggcctgctcgagcccgatcaggtagataccacttccatctgattatggaatgctgctgagcatgacccactttatggctagatgggtcataaagcacccagttcatgataggcagttcaggttggatg

SEQ ID NO: 66346 - DNA, 438 bp, Homo sapiens
gtggaggagaagcacaggtctctaagtcatcttctctggacagacgcctcaaccacaacaattcacaattgcaatgcaaggggtttccaccaaaacttaatgcaaaagtagatgggcttatgattcctgaggttgctagtacctgagctcgctgaaagagagggtcaggtggtagcttctgcaatttatttgatgtcacatctaaccgagtcatcttgtgcaaatgggagaaggtccccttaggaatgttatcaatcatattgtgatccaaactaagggtatgcaagctaaccatcttctcaacagcatcccaaggaatggtttctagattattataggacagatccagctcctcaagggcgaagacatcatcaaacgctgtagaggaaattaaagtcagctgattgttgttcagtatcaaatgatgaagattggaaa

SEQ ID NO: 66347 - DNA, 369 bp, Homo sapiens
  misc_feature (1)...(369): n = a,t,c or g
gctttccggagtgattcacgtcttgcagaacatcagagagttcatactggagagagaccttacacatgtaatgaatgtggcaaggtttttagtacaaaagcatacctcgcatgtcatcaaaaacttcatactggagagaaactttacgaatgtgaagaatgtgacaaagtttacattcgcaaatcacaccttgaaagacataggaggattcatacaggagagaaacctcacaagtgtggtgattgtggtaaagcctttaattcaccttcacaccttattaggcatcagagaatccatactggacagaaatcttacaaatgtcatcagtgtggcaaggtctttagtctgaggtcactccttgcagaacan

SEQ ID NO: 66348 - DNA, 883 bp, Homo sapiens
attaatgagaagttaaagggttttaattcatgatgtacaagtcactagtatgccccaatcagagacaagggggataaaatcaaatatctggaatacactaatacatggaaaataaagaaaaaacagacatactgaaacagtatgagaaagacaatgatcagtctacactaaaagcacacagcaggattcttcattgttcacctacctgattgagagagaatccggtgagggacaggaaagaggatgaatgtgacatgagctctgagggcttctccaataaggatttcttcacagtcccagaaaaaaaggtaattaagttataccttctattttcttaatattaatcttaccatactatggaaccaaagcaaaagcatgcctgtattcgcccactgagtacaatttgaggctcagaagatgtgaattcaaatctgttaacaccaagacaccgcctaagtgccagttgccacaggtgcatagaatcctccttttagatcaaacctagtcagagattatattctggcagggaccagagaccctggtaaacagcactctgagtgtttatgaggcatggacctcaggaatccccttgtcaatagttgcacttaatctcaaaacaaaatgctgaactgttccaacactgtttctctccaccccacaatttttaaaacattaacattggtgacttttaaaaagcctttcaaatccatttgacaaatggctttgttaatatgctttttaagcagctctatttgcagtatatagtaaaacagttgctaaaagtcaagcttacatttattggccctagcaaagttattaggagaaacaaagctgaatctctaatgctgtcactgaatagctggctaataaaacattactaaat

SEQ ID NO: 66349 - DNA, 310 bp, Homo sapiens
cacggcccaccttcctgccccctcgcctgccacggcccaccttcctgtcccctcgcctgccacagcccaccttcctgccccctcacctgccacggcccaccttcctgccccctcgcctgccacggcccaccttcctgccccctcgcctgccacggcccaccttcctgtcccctcgcctgccacggcccaccttcctgccccctcgcctgccacggcccaccttcctgccccctcgcctgccacagcccaccttcccgtcctcacctgccacggtccacctttccatcctcacctgccacagctcaccttg

SEQ ID NO: 66350 - DNA, 350 bp, Homo sapiens
ggaagccccagctcagcttctcttcctcctgctactctggctcccagatgccaccggacaaattgtgttgacacagtctccagtcaccctgtctttgtctccaggggaaagagccgccctctcctgcagggccagtcagactgttaacaacctcttagcctggtaccaacagaagcctggccaggctacatgtctgctcttttctgatatattctatcaatctcttttcgacagcatatgttacttccgttctctttcctccactatcgagtacctgtaacttattctacgtaattgctgatactatgtctaccggggcatcctattagaaagttaaatcctcgatggcg

SEQ ID NO: 66351 - DNA, 298 bp, Homo sapiens
gtcttgtgatttaacttctttcctatttatattttgtgatctttcactttgtctttctagttttttgtcactttgagagtctactcgactgtgtgacctttctccaggggtctctttctcccaagaagagttaatgcgttcacctttatagtcagaatctgagttacttttaaacttcgaacttttgctttcagtctttggttcacctttaccatatttctcaggatgtccttgtagcctttgactagcctccaatatccttggttcaccatcaccacagccagtacttaagtctttt

SEQ ID NO: 66352 - DNA, 282 bp, Homo sapiens
ctttcttggggggtaactgcttgagaacctcttcttttactcttctgagaataaatggctttataatttgttttgcatgtgctattctctccttttcatatatgctttgctcttctgctacagattagagtgcggaggagggagttgccaagcacaaaacccaagtgcctgacataaagtatcaaagtgagaaaggtatttatgtaggaggaggcaacagtgtgagacttgatacctacagggatgttgatgaaatatgtaagtacattaagaataacatga

SEQ ID NO: 66353 - DNA, 306 bp, Homo sapiens
tcttggcaaagttcttcttgatctgctcactcaccgactggtggatattcttatctatagctgtatctcctgcaatcctatgatggggttatgtggtgggtagcctacttctccatgagccctctgtttgatcccacttctcgtctgactatacatattgcccatcttttctcttcccctactgatgatctggatacatagtgcgaggcctaatgcccctccagtgaacttcttctccacaggttctctacgcccctctcctcgccctctgaaccgccctcaatacccctcccttttcagccgtct

SEQ ID NO: 66354 - DNA, 344 bp, Homo sapiens
caaaagcttcagtcacagccactgaggagccaacatccatggtaaaacactctcgatcccagtccagggaggcacccagagctcgcagctgctcacagatctctccacctttcgcctccttccactgccacacctccctaaggaaggcctcccggctcagctcatgtctcctcactccccgttccttccacagttgtttctccaccacagcttgtgtagcaattcctgcatgatctgaaccagggacccacagcacttgatccccacgcatccggtgccagcgcacgagggcatcctgtatggccaccgtgagtgcgtggccaatgtgcagggagccagtgact

SEQ ID NO: 66355 - DNA, 256 bp, Homo sapiens
tttagaccctccagaagtttgcagttcctattcttcagtctgtgggcttcatcaattatcacacagctccagtgaatcttcttcaactctgggcagtctgctaggatcatttcaaatgttgtgatgacgacgtggaacttgaagactcctgaaagggggtttccctgggcgtctctgtacaccatttcatactgctggatcatctgcctgctgatctggctgccgtggtacacaatggcattcgtcgacgcggccg

SEQ ID NO: 66356 - DNA, 316 bp, Homo sapiens
tggaaatcctcgtggaccactttctccagtgggacctcgatctcctttttcacccgggggtccaggaggacctttaaaaaaattacagttactgatcatagttgtaaagcataggaaaaatgggttagtcatctgtcaaggtacttatataaggaaatccaaagtcttctatttgttgtgcaataataagaatgtataatactgaacttcatgaatggaggagtattctgctattcaggaatataatgccctatactaatgaggatgacattgcctcaaagtaaacaacctaacagtatattaaatgtgagtgtgg

SEQ ID NO: 66357 - DNA, 137 bp, Homo sapiens
tctcttcgcggtgccagactaaagtcaagctcaacagggccttctttacccgctgattccgccaagcccgttcccttggctgtggtttcgctggatagtatgcacggacagggggaatctctgtgcaacacggccgt

SEQ ID NO: 66358 - DNA, 414 bp, Homo sapiens
ggggaagacaccagaggggattgatgccattgaggaaatagagatagatttggaagaaactgaaagagaaatatccccacaggaaaatggcctagaggaggttaagcctctaggtgaaatgcaaacagatttgaaagcaaccggaagggagatttccccaagggagaagacaccagaggtgattgatgccactgaggaaatagacaaagatctggaagaaactggaagaagagaaatatccccagaggaaaatggcccagaggaggtcaagcctgtagatgaaatggagacagacttgaaaacaactggaagagagggttcctcaagggagaagacacgagaggtgattgatgctgctgaggtaatagagacagatttggaagaaactgaaagagaaatatcgccacaggaaac

SEQ ID NO: 66359 - DNA, 94 bp, Homo sapiens
atcttcggactcccatgcctgagatttcaggtccagggggcccctcagggccacctcggcttcctccaccaaagccaccttggtccatgccccg

SEQ ID NO: 66360 - DNA, 325 bp, Homo sapiens; identical to SEQ ID NO: 39179

SEQ ID NO: 66361 - DNA, 339 bp, Homo sapiens
gacaataccaaatgaatgaacgtgactgtgttccaacaaaactttatttacaaaaacagggatgggccggatgtagccagaggccataatttgccaacccctgatttagacgaaggaaaggagcagtgcttcactgcttttaaattaattctgtattctcacaaggcctacattgaaatggaattatagcctcattttttcttagaacctttatattttgttttattcatatacagggttgtcaagctggacagactattaaagttcaagtctcctttgatttgcttagtctgatgtttacatttgtaagtccatgtaccaacgatttaatcatacacg

SEQ ID NO: 66362 - DNA, 599 bp, Homo sapiens
ctgagtcgaaacttggatgtgcgagctttcatttacaagactctgatgccttctgaagcaaatggcttgctcaactccttgctggatatagtttccagcctcagcgccttgcttgccaaagcccagcacgtctttgagtatcttcctgagtttcttcacacatttaaaatcactgccttgctagaaaccctggactttcaacaggtttcacaaaatgtccaggccagaagttcagcttttggttctttccagtttgtgatgaagatggtttgcaaggaccaagcatcattccttagcgattctaatatgtttattaatttgcccagagttaaggaactcttggaagatgacaaagaaaaattcaacattcctgaagattcaacaccgttttgcttgaagctttatcaggaaattctacaattgccaaatggtgctttggtgtggaccttcctaaaacccatattgcatggaaaaatactatacacaccaaacactccagaaattaacaaggtcattcaaaaggctaattacaccttttatattgtggacaaactaaaaactttatcagaaacactgctggaaatgtccagccttttcca

SEQ ID NO: 66363 - DNA, 381 bp, Homo sapiens
  misc_feature (1)...(381): n = a,t,c or g
atggtactttagtttgaaatttgaaaatggggcatttatagtgttactgtaagttcattttgctgccttttcagtggagaagagtttttcccaacatccaatagtcttcttcatggaacacatgtgccttccacagaggaaanttntngtatagttgtgtttatagagatgaattatttgtaatgagtagcgaggttctgtatttgttattattgttattatgagggatatgtttaagtgtggtttatattctagatagttattgttgatatatatgatgtgagtgaattttttgtatgtggctttaatatagcctttggtaatttgggttcttgaggtttggatcgtattattcctgttactggatgatttggttttccg

SEQ ID NO: 66364 - DNA, 624 bp, Homo sapiens
ggctgggggaaaaacctcccttgggggcccccttcgtggaagagccccccagatgggaacaagtacaatgtggtggccatactctccactgagctcctgaacaaatgctgcgtggggcatgtgccagtgcggggcctgtccaagggctttggcctgcccccccaggaaccctggatccagtttgccaccatccgagacaacatcctctttgggaagacatttgatgcacagctgtacaagaaggtgctagaagcctgcgccctcaatgatgacctcagtatcctgcctgctggagaccagacaaaggtgggggagaagggtgtcacccttagcggaggacagcgtgcccggattgcccttgctcgtgctgtctaccaggaaaaggagctctatctcctcgatgaccctctggccgctgtggatgcagatgtggccaaccacctgctgcacaggtgcatcctgggcatgctgagctacaccacacggctgctctgcacccaccgcactgagtacctggagagggctgacgcggtgctgctgatggaggccgggcgcctcatccgggctggacctccctctgagattctgccactggtacaagctgtccccaagtcgacgcggccg

SEQ ID NO: 66365 - DNA, 343 bp, Homo sapiens
gagaaattccagatgcagcggttatacatgctgcaaggaaaaagcgccaaatggcccgagaattgggagatttcactcctcatgataatgagcctggtaaaggccgccttgttagagaagatgagaatgatgccagtgatgatgaagatgacgatgagaaacgccggatagttttttctgtgaaagaaaagtcacaaagacaaaaaattgctgaggaaataggaattgaggggagtgatgatgatgctttagtaactggagaacaggatgaagagctcagccgatgggaacaggagcagataaggaaaggaattaatatccctcaggttcaagccagtcaacc

SEQ ID NO: 66366 - DNA, 372 bp, Homo sapiens
atttacgcactcttaaatcttttacttcttcctgtaatttcaacttatcatacaatgaggtgaaaaagtcacttcgatcaacatgtcttggggcaacacacaacgcatcaatatcagcacctaaaaaaaattaagcccatcaaccactaattaatattaccagaaaattattttgcatcctatcatggtagtatttgatgttgagaatctgtttaacatactggtgagcttctaaaaatgttccaccccttacttaaaattaccagtcaatggaggacaaacatgattttaattgatgtggtatattttgatcctgcagcatcctctatttatagtggcccaagtaaactgggagcccaaagaaagatggct

SEQ ID NO: 66367 - DNA, 265 bp, Homo sapiens
tgacaattgggcggcaatatttactgaagaagaagacagggacaattgtggaagaaagagtaaatcgtcctggatggaatgaagatgatgatgtatctgtttcagatgagagtgagctccccacaagtaccaccctgaaggcctccgagaagtctacaatggaacagttggtggaaaaagcttgtttcagagactatcagcgtttaggtttaggaaccataagtggcagctcttcccgttcaagacccgagagtcgacgcggccg

SEQ ID NO: 66368 - DNA, 551 bp, Homo sapiens
atattattgaaactcgaaaagtccttgatttaaggataaatctgaagccttcttatctagtagttccacagacgggtttccaccatgaaaagtcagatcttctgattttagattttggtacatttcagctcaacagtaaagatcaaggtttacagaagactactaattcatctctggaagaaataatggataaggcatatgacaagtttgatgttgaaataaaaaatgtacaactactttttgcaagagcagaggaaacctggaaaaagtgtcgatttcagcatccatcaactatgcatatattgcaacccatggatattcatgttgagttggctaaggccatggtagaaaaagacattagaatggccagatttaaagtgtcaggaggacttgctttgatgcatgtgagaatttctgaccagaagatgaaagatgagctatatttgatgaacagtatacctttgccacagaaatcatcagcccagtctccagagagacaggtatcctcaattcctattatttcaggtgggacaaaaggtctacttggtact

SEQ ID NO: 66369 - DNA, 724 bp, Homo sapiens
  misc_feature (1)...(724): n = a,t,c or g
ctttataaaacgtaggtgcttctgtctattggtcacccaagtaacaagaagacagtttggagcagccaatttagggataggtatttgctttatttgcaggggtgacaaataactgtacctattacttcttttaactgatttgttctgccatggtggatctatcacaattacatcaaatgttttcctatagtttagaagtggttgcatacaagaaatgtcagataaaagaaaactgcttttcggtggtagcaggtatttctgtcccattaaagtaatcacttttgtaaagctagagttgttttcaacaactcgcaaaaataaatcctgttctgtaacagatgtatcctcttccaccaattgtaatgtctgatgttccatttcattcagagaaggcaaatgctttgccatttcacataattctgacaaactgcaggcgtcaagtggtaaagtaatgggcttactacccttgtcctgtttttcaaaaagtggataaagaaaaccacttttgagaccttcctggatcaactgtaaagatccatccaaaatcagctccctgatctttgtatggtattccatagcatccaattcaccttgattgaaaacaacacatcttttacgcttcttcccaataatagaaatggagatttcttttttaacaccattcatcagatcttccttttcgaattccaacgtctatcaggtttcgaggnnnnnnncccgctct

SEQ ID NO: 66370 - DNA, 344 bp, Homo sapiens
  misc_feature (1)...(344): n = a,t,c or g
gaaaccccggggcagcttctcttgctcctgctactctggctcccagaaaccaccggagaaattgcgttgacgcagtctccaggcactctgtctttgtctccaggggaaagagccaccctctcctgtatggccagtctgagcgttatcagcagctacttagcctggtaccagcagaaacctggccaggctcccaggctcctcatctatggtacattcagcagggccactggcataccagacaggttcaatggcactgggtctgggacagacttcactctcaccatcagcagactggagcctgaataacttctattccagagaggccaaagtacagtggaaggtgn

SEQ ID NO: 66371 - DNA, 345 bp, Homo sapiens; identical to SEQ ID NO: 40238

SEQ ID NO: 66372 - DNA, 320 bp, Homo sapiens; identical to SEQ ID NO: 40292

SEQ ID NO: 66373 - DNA, 338 bp, Homo sapiens
gttccacctttgctaaggcaagctttgttgcttctgaaaacaggacagatatttctttggatgaccccaacttttggcaaaagtgggccaaaaaggctgacctagacatggatctgctcaacagcaagaataatttggtaattgacacacctagagtacgaaaacaaacgcgccactttagcactctgaaagatgatgacctggtggaattctctgatttggaaagtgaggatgatgagcggccacgctcccgcagacatgaccgtcatcatgcctatgggcgcactgactgctttcgggtggaaaagcatctcctggtatatggttggggacgatgg

SEQ ID NO: 66374 - DNA, 334 bp, Homo sapiens; identical to SEQ ID NO: 40420

SEQ ID NO: 66375 - DNA, 302 bp, Homo sapiens
tttatttcttggctatctattgtgttccactggtctgtgtgtctgtttttatgccactgttgtgctatttttattactatagctttgtagtatattttgaagtaagatagtgtgctatctgcagctttgttatttttgctcaaaattgctttggctatttggggtagacatttttaaaaagaccctcttggctgtaaacttagggtcaaaaatatttttccagatgtttctgtcttgctgataaaagctaataaaaccaaggaggctcttctgttttggattttttctgcttcatgtttcat

SEQ ID NO: 66376 - DNA, 310 bp, Homo sapiens
cctgggccaagtgattacagcacttgtcgacgtgggtaatggaaaacagagacatgtttgctacagagactccaaacttaccttcttactacgggtaaagtagatccttgggttcctgggctccttttggttatgctaaagttgatagtgggacagtctctcagccttggtggcaagagtatacattttctttgcttaaaaaggtcttgtgatttctcaccgaaaatatgttcattcctatcattaaacaggattcccttggaggtaatgccaaaacagccataattgcaaatgttcatcctggatccag

SEQ ID NO: 66377 - DNA, 330 bp, Homo sapiens
catgaaacacctgtggttcttcctcctcctggtggcagctcccagatgggtcctgtcccaggtgcaattacaacaatggggcgcaggcctgttgaagccttcggagaccctgtccctcacctgcgctgtctctggtgaatccatcagtccttacgactgggcctggatccgtcagcccccagggaagggactggagtggattggaaaaatcattcatagtggcagcaccaactacaacccgtccctccagagtcgagtctccatatcagtagacacgtccaagaatcaggtctccctgaggatgacctctgtgaccgccgcggacacggg

SEQ ID NO: 66378 - DNA, 305 bp, Homo sapiens
ggaaaggtgattctcctgtcacaaaaagtaagtgcgagagcacttattgtcacaaagattaagtgcaagagcatactaaaggtgtctttggccagcacagagtcctcaatttcggtgtagtcgctttgtcctatagcattttctgcagcaactcggaacacatataaagagccctcagtcagtggggtgactgtgcacttggtgtccttgacagtgatatccactgtttgccagccttttcgcctgacgtctctcttttccacaatgtagttggtgatgggggaccctccatctttctcaggaac

SEQ ID NO: 66379 - DNA, 213 bp, Homo sapiens
atctcctgctcatacaccaactttctgaccatgctggccacagacaccatccacgtcagcatcattatcagtggaaaaaagaaaccaacgttgttcaggaataggtcgctggtatggcaggggtaaggggccgcctgagtctgtgctgctggttccagggcttcctgcccagtctgcaccaaaatgatggctctttcgatgtcgacgcggccg

SEQ ID NO: 66380 - DNA, 328 bp, Homo sapiens
accgcttacacacagcaaacctgggcgattcaggcttcctggttgtcaggggtggtgaagtcgtgcaccgatcagatgagcagcagcattacttcaacactccattccagctctcaatcgctccccctgaagccgagggagtcgtcttgagcgacaggtaatctcccctctcagccattaagtgtgagcaggacgtggctcattcatagtcccctcctgtcccccttgagtgcagtgaggtaggcatttccatgaaaaggaatacactgagaatgttctcatcaagaggaccttttagtttaactttgaaagatacttttctggaact

SEQ ID NO: 66381 - DNA, 296 bp, Homo sapiens
gcaacaatgacattggaggttacaattttgtctcctggttccagcaacacccaggcagagcccccaaacttcttatttatgaagtcactaatcgggcctcaggggtttctgctcgcttctctggctccaagtctggaaacacggcctccctgaccatctctgggctccaacctgaggacgcggcttattactactgcttctcatatactgacactgacgctcgcgtggttttcggcggagggaccaagttgaccgtcgtgggaactgtggctgcaccatctgtcttcatcttcccg

SEQ ID NO: 66382 - DNA, 319 bp, Homo sapiens
cgagtctacacaaagctcctagggtttcaaaatataaaaagtgatacgcttaagttttttgcctttaaataatattctataaatcaaaaaacctcatcctataacttattatattaatagactattattcaaagacaaagatcggacttgggatgacatagaaagcaaattaagagccgaaagtgaagtccctattgtgaaaacctcaagcatggtatagtaatttttcttgaagattcacacattttaatagagttttattttaaggaaaagacccttatttttgagctgttcgttgatttgctttttcaaaagaaga

SEQ ID NO: 66383 - DNA, 803 bp, Homo sapiens
ccctgaaaacatttgggagtaaaataaaatgtattagagaagcactaaaagattacggaagaccttttcttttttcttttgttcctcccccaaagtgcccggttcctctctatctagaacatacggttttttgtcttggaaaccttttagtagcacacacttactagtatttatgatactgtttagtaaatggtcaacttagaggctagacctttggatataatctcattgtatgataatttttgtatttatacttttttcctgaaatgttacatttgtcttttaaaattctacttaattatattctaatccttaacttaaaagttaccagcttgcaaacatttgctattccaggctctatatttctcagtatactctcagggtttctttatccctttccactagccttatttcttgtttgtctggtaagtatgaaaaaataaaattgggagactgaaaaaacaatagaatgatgaggatgatgatgatactttaaccctactagtctatgtaagcataaactcattaattgaagaggagttaatgttaaagtccctccacaaggaggtgttataatttgtttttcccccagaacagaccaattatagacttagttgcatttataagctatgttttagcttttctttcctattggattttgtaactgcgacagtccaaggagtgttggtgagcacaatgagttaagtcccagagccagaggtggtgttttcaagcttaggaactggggggtcgggggtagggtcggggggaggtggaaattggctcctgaaattttattctta

SEQ ID NO: 66384 - DNA, 328 bp, Homo sapiens
  misc_feature (1)...(328): n = a,t,c or g
ctctgcacctcctccatctgaggccctggtcttctctgcacctcctccatctgagccccttcccttctctgcacctcctccatctgagccccttcccttctctgggcctcccccatctgacccccttcccttctctgcacctcctccatctgagccccttcctttctctgggccccctcctccatctgagccccttcccttctctggggcaagaagcatggccaccgaggctccagcttaacggtatttggaggtcaaggtcggggnnnggnnnnnnnnncntntntntnanatttatnaattttatatattgaaatatattatatgc

SEQ ID NO: 66385 - DNA, 2018 bp, Homo sapiens
acaagttatctgtgaatcataggagaacacatcttacaaaactcatgcacactgttgaacaagctactttaaggatatcccagagcttccaaaagaccacagagtttgatacaaattcaacggatatagctctcaaagttttcttttttgattcatataacatgaaacatattcatcctcatatgaatatggatggagactacataaatatatttccaaagagaaaagctgcatatgattcaaatggcaatgttgcagttgcatttttatattataagagtattggtcctttgctttcatcatctgacaacttcttattgaaacctcaaaattatgataattctgaagaggaggaaagagtcatatcttcagtaatttcagtctcaatgagctcaaacccacccacattatatgaacttgaaaaaataacatttacattaagtcatcgaaaggtcacagataggtataggagtctatgtgcattttggaattactcacctgataccatgaatggcagctggtcttcagagggctgtgagctgacatactcaaatgagacccacacctcatgccgctgtaatcacctgacacattttgcaattttgatgtcctctggtccttccattggtattaaagattataatattcttacaaggatcactcaactaggaataattatttcactgatttgtcttgccatatgcatttttaccttctggttcttcagtgaaattcaaagcaccaggacaacaattcacaaaaatctttgctgtagcctatttcttgctgaacttgtttttcttgttgggatcaatacaaatactaataagctcttctgttcaatcattgccggactgctacactacttctttttagctgcttttgcatggatgtgcattgaaggcatacatctctatctcattgttgtgggtgtcatctacaacaagggatttttgcacaagaatttttatatctttggctatctaagcccagccgtggtagttggattttcggcagcactaggatacagatattatggcacaaccaaagtatgttggcttagcaccgaaaacaactttatttggagttttataggaccagcatgcctaatcattcttgttaatctcttggcttttggagtcatcatatacaaagtttttcgtcacactgcagggttgaaaccagaagttagttgctttgagaacataaggtcttgtgcaagaggagccctcgctcttctgttccttctcggcaccacctggatctttggggttctccatgttgtgcacgcatcagtggttacagcttacctcttcacagtcagcaatgctttccaggggatgttcatttttttattcctgtgtgttttatctagaaagattcaagaagaatattacagattgttcaaaaatgtcccctgttgttttggatgtttaaggtaaacatagagaatggtggataattacaactgcacaaaaataaaaattccaagctgtggatgaccaatgtataaaaatgactcatcaaattatccaattattaactactagacaaaaagtattttaaatcagtttttctgtttatgctataggaactgtagataataaggtaaaattatgtatcatatagatatactatgtttttctatgtgaaataggtcctgtccaaaaatagtattggccagatatttgggaaaagtaaattgggtttcctcagggagtgatatccccttgcacccaagggaaaagattttctttctaacacgagaagtatatgaatgtcctgaagggaaaccctgggccttgatatttctgtgactcgtgttgcctttgaaactagtcccctaccacctcggtaatgagctccattacagaaagtggaacataagagaatgaaggggcagaatatcaaacagtgaaaagggaatgataagatgtattttgaatgaactgttttttctgtagactagctgagaaattgttgacataaaataaagaattgaagaaacaaaaaaaaaa

SEQ ID NO: 66386 - DNA, 171 bp, Homo sapiens
gtatatactattaatctaggctatttctgacactgttgattttccttttccccttaggtgaggcaggcgactaatcagattgtgatgaattgtgctgatattgatattattacagcttcatatgcaccagaaggagatgaaggtaagagctgttttccattttaatttgct

SEQ ID NO: 66387 - DNA, 168 bp, Homo sapiens
ggcacgagagctttcaaagcatgggcagtagctcgcctgagccagagaggtggcaaagctgagtctgcacaagattgcaagttagtgacagatcttaccaacgtccacaccgaatgctgccatggagatctgcgtgaatgcgcagatgacagcgcgctccttgtcaag

SEQ ID NO: 66388 - DNA, 429 bp, Homo sapiens
ggcacgagggaagctgccccgtccaggttcatgttcctcttatttctcctcacgtgtgagctggctgcagaagttgctgcagaagttgagaaatcctcagatggtcctggtgctgcccaggaacccacgtggctcacagatgtcccagctgccatggaattcattgctgccactgaggtggctgtcataggcttcttccaggatttagaaataccagcagtgcccatactccatagcatggtgcaaaaattcccaggcgtgtcatttgggatcagcactgattctgaggttctgacacactacaacatcactgggaacaccatctgcctctttcgcctggtagacaatgaacaactgaatttagaggacgaagacattgaaagcattgatgccaccaaattgagccgtttcattgagatcaacagcctc

SEQ ID NO: 66389 - DNA, 365 bp, Homo sapiens
ggcacgagggaaaaaattcaaagtgctcaagtccgtagaagagatcctagtgttccattacagctcttagtgttccctactctccattctcctataggagtgattgttcaaaatgttgacttagttaaattgtcctttttaacgcacagtacgactagaactttctcaatttatttagatcaaatagctattcttataggccaaatacaactgagaatagtcagactcattggcaccgatcgagataaaaatgtagttcctttaaacaaagcacaggttcgacaagcctttattaattcgtcagaatggcagtcaaatctggctgattttgttggcagtatagatattcattaccctaaaactag

SEQ ID NO: 66390 - DNA, 404 bp, Homo sapiens
ggcacgaggcttggcaagagagattatttggagaaagcaggagaattaatgaggctggctttaaaagaggaagaagaagacgactatgaagctgcttctgatttttataggaagggagttgatttactcctagaaggtgttcaaggagagtcaagccctacccgtccagaagctgtgaagagacgatcagccgagtaccttatgcggacagacagcatctctagtctttatgggaaacctcagcttgctgatgtatcttatgtgtgtctccaacttctgatggcactcctactcatctgactcggccccccccactcgtgccggctccctgagccccaatcgctagacacccgctcctgttcttcctgcaactcacccgtctgctctgtgcgtccgccgtctcg

SEQ ID NO: 66391 - DNA, 717 bp, Homo sapiens
gatgaaacttccggtctcattgtccgggaagtgagcattgagatttcgcgccagcaagtggaagaactctttggacctgaagattactggtgccagtgtgtggcctggagctcagcgggtaccacaaagagccggaaggcgtatgtgcgcattgcataggaactcatgacctgacatccattagcagagtcatcagagtcatctggctgctgtgttgagaatggaccatgctgggcaaggggagaagcaggaagaccagtgatgagactgcagctatgagagatgttaagctactgtagattggaagcagtggaggtggtgaggccaggatttcagatatatttaaaagtagagataacagcttttgttgagaccttggatgtgtgatgtgagagaaagaagagaaaggatgattttgaaagggcctaagcctttatccaaggatttctttcaaatgtctttagtgaagccattcctgcctcacagagggaggaggctgggcattcctttctcaatactttcagagcagtttgtccatacccctaatatagtgcttgtctcatttcgaattatattcactcgtaaaatttgtgtttcatgccagtgagttccatgagatcaagaattctattgtacttaattttatatctctcctgcttagcacaatacctagagtatcacagatgtttaacaattttcttgaattaaaactgttat

SEQ ID NO: 66392 - DNA, 339 bp, Homo sapiens
ggcacgaggataaatatataaaagtctttcataaaattttcaattcaaatagacacaagacaagacatactggagagaaacctttcaaatgtaaaaaatgtgatgaatcattttgcatgcttttacacctacatcaacataaaagaattcatattagagagaattcttaccaatgtgaagaatgtgacaaagtgtttaagcggttctcaacccttactagacacaagagagttcatactggagagaaacccttcaaatgtgaagaatgtggcaaagcttttaagcactcctcaacccttactacacataagatgattcatactggagagaaaccctaca

SEQ ID NO: 66393 - DNA, 518 bp, Homo sapiens
ctgtcagaattgcttgatatgtttcagccttatattctttattgtgtgctccctgacggtaaccacatctcccacagtatctgacagttctgtggcctgagaggcagagtccatggcttccagaacatgtgtcccaattggttcctctcctttcccacctggactggctgcttttgacctctaactctttgtcttccagaaaacaataagcctcctcaggcagatgcagtcccagataaagagctgacccttcctgtggatagcacaaccctggatggcagcaagagctcagatgatcagaaaattatctcatatctctgggaaaaaacacagtgagtattgacacaaaatccttatttttgcaaagcctccagacctttggaagagcaaggttttatttgctattatgagttgagttgctcttaatggcttatccagtggggtgactgaggaagaaatgtttgcaattccaaacttcaactccaagaaaatgatattataatcataatttttgtaag

SEQ ID NO: 66394 - DNA, 350 bp, Homo sapiens
ggcacgagcaagataaaaataaatacaacacacccaaatacaggatgatagttcgtgtgacaaacagagatatcatttgtcagattgcttatgcccgtatagagggggatatgatagtctgcgcaacgtatgcacacgaactgccaaaatatggtgtgaaggtcggcctgacgtattatgcttgtacgtatagtactgtcgtgctggttgctcgcacacttctcgatacgtagtgagctggactcagctgattactagtcactacgctctaagttgtatgggcacactatttgtactattaacgacggagctactataccaggaagcggatctgttctgccgttctgctg

SEQ ID NO: 66395 - DNA, 346 bp, Homo sapiens
ggcacgagcggcacgaggaaaatcaagattcgatctccagtagactggaggaatgctgtgaaaaacctctgttggaaaaatcccactgcattgccgaagtggaatacgatgagatgcctgctgacttgccttcatcatctgctgattttgccgaccactatctctccctctctctacccctcgcttgccccccctattcccccccctattgcgccttactctcttcatctctcccccctatccctgtctcactctcctctcagtccctcccaccttctcctcccctgacgcccgtatgtctacatctatcctctttcgtggaagtctctatccgtgctagattacg

SEQ ID NO: 66396 - DNA, 368 bp, Homo sapiens
ggcacgaggtacagaggaaggaccaccttcatgagtgaccacgtggccaggggcaaggccatggtgaggagtcacagggtcaccacctttgacaacaggacatactgctgccgcttcaaggatggtgtaaagttcggcgaggccactgtgcaggtgcaggtggcagggctgggcagagagcccagaatccaggtgacagaccagcaggatggagtcagggcggagtgcacatcagcaggctgtttccccaagtcctgggtggaacggagagacttcaggggccaggctaggcctgctgtgaccaatctatcagcctcagccaccaccaggctctgggctgtggcatccagcttgacgctctgggacga

SEQ ID NO: 66397 - DNA, 720 bp, Homo sapiens
ggcacgaggtttgatgttgaatttgttgatgaaggaagcacttcaatggatctctttgaagcatggaagaaggaatataagttgcttcatgaatattggatggctctgaggaatcgtgtgtctgctgttgatgaacttgcaatggctacagaacgactaagagtgcgtgatcctagggagccaaagcctaatccgcctgttcttcatatcattgaaccacatgaggtagaacaaaaccgaataaaactactaaatgataaagctgttgctacatcacagcttcagaaaaaacttgggcagcttctttacctaactaatttggagaagtctcaagataaaacatcgggaggtgttaatccagaaccttgtccaatctgtgctcgacagctaggaaaacagtgggcggtactgacctgtggtcactgtttctgtaatgaatgcatttctataattattgaacaatacagcgtgggatctcacagaagctccattaagtgtgcaatctgccgccagaccacatctcacaaagaaatctcgtatgtctttacctcagagaaagcaaaccaggaggaggacatccctgtgaagggcagccattctacaaaagtggaagctgtggtcagaactctgatgaaaatacagcttagagatccaggggccaaagcactcgttttctcaacgtggcaagatgtattagatattatttcaaaagctcttact

SEQ ID NO: 66398 - DNA, 349 bp, Homo sapiens
  misc_feature (1)...(349): n = a,t,c or g
ggcacgagcggcacgagtgaagaagctttgtccaagtttacattgaaaaaggtattgttgttggtctgttttcttgattatgctaaaatttccagactcattgatcatgatccttgtctcttctgtaaagatgccgaattcaaggctagtaaagaaatccttttggctttttcacgagatttcctaagtggtgaaggtgacctttcccgtcaccttggcttattgggattacctgttaaccatgttcagacaccatttgatgaatttgattttgccgttacaaatcttgccgtagacttgcaatgtggagtgcgccttgtgcgaaccatggaacttctcacacagaacn

SEQ ID NO: 66399 - DNA, 343 bp, Homo sapiens
ggcacgaggagtgagtcttgaggccagtgttaggtttcaggcggtatcagatttgaccttgaggctggggtcagagtagggttaggttggggattagcattgggattgggtttgggttcagttttggtgccggggtagatctgatggtggatctggttaggttagagctaggttttggcttgcattgggagtggggactaggggaggtgcatagcttccagccacccctttctcttccagaacttcatcaaagccaagcagtacccaccaagcacacaggtggaggtgcagaatgatggggctgagtcggccgtctttcagcagctcttccagaagtggacag

SEQ ID NO: 66400 - DNA, 359 bp, Homo sapiens
ggcacgaggagactgcatagggctcggcgtggatggaggagatagagaatggagaccagtctggggctgctgaggacctgctgagagatacctgcagcgtggaccaggtgggggcggctgaggatttgccaagaggtacttgcagcatggaccaggttggggttgctgaggacctgctgagaggggcctgcagcgtggaccaaggtgcagccacaggttaggcagctgtagccaacgtccaggtggaccatggaggtagaaccagtgggagctgccgagtggccggtgaggcactgggaggaccaggtcaccgcgaggaggaggaggggctcccagaaagatagggtttgaggtgagag

SEQ ID NO: 66401 - DNA, 353 bp, Homo sapiens
ggcacgagctgcatagggccggcgtgggcggaggagagggtagcagggcagggaaaggcagggggtgccctggggttgctacagagcttgccaacgaggggaaggggagattaagaatgtaactgaggcaggttccacagttgcaggagcagtccttagatccagccatcattcccagcgatccagtctctctgatgatgatgaggatgttctgtattatgggtctattttgaatgctctgatgatctatgctcattctgaagtagattttttcttctttctcagttttcggttaatgtatgttgattgcttgtttttgtatttctgagtattttttgtccttattgttagag

SEQ ID NO: 66402 - DNA, 391 bp, Homo sapiens
ggcacgagcgcatctatgtgtactccttccccgacaatccccgaaagctgtttgagttggatacccgggacaaccccaaggggctctgtgacctctgccccagcctggaaaagcaactgctagtgttcccgggacacaattgtgggactatactagatgtctatcttataattatatatcctcgtgatctacccttcaccttttatgccaattcacatctccacacttaaagtctaactattaacctgtaattcagcacatctcactcacaatactctctttattatctctaattaatataataacatgctaaataattactataaactccatcaatctttcacttcacatttacaccgatgatctaatctacttaatcacttgcgattcc

SEQ ID NO: 66403 - DNA, 529 bp, Homo sapiens
ggcacgagtgatcactgggctgaccgctttgaggacctgcccctctatttcatgactttccatggacagcaaagcatcaggactgtaatagatacaatgcaacatgcagtctacgtctatgacatttgtcatgtgatcatcgacaacctgcagttcatgatgggtcacgagcagctgtccacagacaggatcgcagctcaagactacatcatcggggtctttcggaagtttgcaacagacaataactgccatgtgacactggtcattcacccccggaaagaggatgatgacaaggaactgcagacagcgtccatttttggctcagccaaagcaagccaggaagcagacaatgttctgatcctgcaggacaggaagctggtaaccgggccagggaaacggtatctgcaggtgtccaagaaccgctttgatggagatgtaggtgtcttcccgcttgagttcaacaagaactccctcaccttctccattccaccaaagaacaaggcccggctcaagaagatcaaggatgacg

SEQ ID NO: 66404 - DNA, 367 bp, Homo sapiens
ggcacgagatcgattcatgtaaagctggacgtgggcaagctgcacacccagcctaagttagcggcccagctcaggatggtggacgacggctctgggaaggtggagggcctacctgggatttgaccagagtccgcctggctccaggctctgccacccacaggaagaagaaactacactgacagatgtgagacagtgtttccccttcagtctttgaacaggctttgtgttttctaaatgacactggataaaagggaattcattcaagagctccaaggcttccctttccgcccggcttctgttgccctggcctgagcagcgagcagctgggaggggactgaactgcccctaaccagggttgtggctggcg

SEQ ID NO: 66405 - DNA, 376 bp, Homo sapiens
gggaagtggatgcgggggtaggggaccaggttggtctggaattctgtcaggtcaacattcagggctccatcaaatctcacggaagcagtgatggaggacacaatctggctaataaggcggctaaggttagtgtaggttgggcgctcgatatcgaggtttctacgacagatgtcatagatggcctcattggctaccatgaaggcacaatcacagtgctccagggtggtgcgggtggtgaggctccccctcttcccctcatttccctcgctcccccggcctcccacacctcccatcatccctaactatactctctttacaactccccccacctgtgcctctctcgacgcgccccttacctcccaacgcgggcgatacg

SEQ ID NO: 66406 - DNA, 859 bp, Homo sapiens
ggcacgaggcaggaagtggatattctggatctgaaagaaacccttaggctgagaatactttctgaggacatagagagggatatgctctgtgaggacctggctcatgccactgagcagctgaacatgctcacagaggcctcaaaaaaacactcggggctgctgcagtctgcccaggaagaactgaccaagaaggaagccctgattcaggaacttcagcacaagctaaaccaaaagaaagaggaagtagaacagaagaagaatgaatataacttcaaaatgaggcaactagaacatgtgatggattctgctgctgaggatccccagagtcctaagacaccacctcactttcaaacacatttggcaaaactcctggaaacacaagaacaagagatagaagatggaagagcctctaagacttctttggaacaccttgtaacaaagctaaatgaagacagagaagtcaaaaatgctgaaatcctcagaatgaaggagcagttgcgtgaaatggaaaacctacgcatggaaagtcagcagttaatagagaaaaactggctcctgcaaggtcagctggatgatattaaaagacaaaaggaaaacagtgatcagaatcatccagataatcaacagctgaagaatgaacaagaagaaagtatcaaagaaagacttgcaaaaagtaaaatagttgaagaaatgctgaaaatgaaagcagacctagaagaagtccaaagtgccctttacaacaaagagatggaatgccttagaatgactgatgaagtcgaacgaacccaaactttggagtctaaagcattccaggaaaaagaacaactgagatcaaagctggaagaaatgtatgaagaaa

SEQ ID NO: 66407 - DNA, 791 bp, Homo sapiens
  misc_feature (1)...(791): n = a,t,c or g
cgagacccgaccctgggcgtggtgcatcgaggtagatgcaaagatgctggccagagcaagtgtcgcctggagcgggctcaagccctggagcaagccaagaagcctcaggaagctgtgtttgtcccagagtgtggcgaggatggctcctttacccaggtgcagtgccatacttacactgggtactgctggtgtgtcaccccggatgggaagcccatcagtggctcttctgtgcagaataaaactcctgtatgttcaggttcagtcaccgacaagcccttgagccagggtaactcaggaaggaaagatgacgggtctaagccgacacccacgatggagacccagccggtgttcgatggagatgaaatcacagccccaactctatggattaaacacttggtgatcaaggactccaaactgaacaacaccaacataagaaattcagagaaagtctattcgtgtgaccaggagaggcagagtgccctggaagaggcccagcagaatccccgtgagggtattgtcatccctgaatgtgcccctgggggactctataagccagtgcaatgccaccagtccactggctactgctggtgtgtgctggtggacacagggcgcccgctgcctgggacctccacacgctacgtgatgcccagttgtgagagcgacgccagggccaagactacagaggcggatgaccccttcaaggacagggagctaccaggctgtccagaagggaagaaaatggagtttatcaccagcctactggatgctctcaccactgacatggntcaggg

SEQ ID NO: 66408 - DNA, 423 bp, Homo sapiens
  misc_feature (1)...(423): n = a,t,c or g
attganagcgcttgactgtagacacagctatgactgatctactatattgtatactggtcctatagggcattagttcctcacggagcctaattgtgcacgaagctcttaaccccctggagagcactgggggtccatgctgaggccgaggctggaccatgggaggcctttgacgaagcacagccattaagcccaactggtacacaggtgatgggctttgacgccagccttgtctcctcccactacaggcccggtacccccagttcatcagcagggtgagaggacgaggcaccttttgctccttcgatactcccgatgattccatacggaataagctcattttaattgccagaaacaaaggtaaggggtcaggagtggctgctgagtttcatgagcatccagtatctcctgctgtagctgccacat

SEQ ID NO: 66409 - DNA, 939 bp, Homo sapiens
ttttttttttagtagagacaggatttcaccatgttggccaggctggtctcaaactcttgacctcaagtgatctgcctgccttggcctcccaaagtgccaggaatacaggtatgagccactgcaaccatccacattttttatttttgtactatatactggggttctactaccaaaaaaaggaactactagcttataaagtttctttcaccatttaacattctatctctcacacatcaataccactcagggaataggaagaaacgttgaagtgccatcaagcaagttttacctgtgaatctgatcttgcctgcatgaccgtactggagccagaccatcaatttcgtcaaaaaaaataattgatgggcgcatctgataggcctgatcaaacagcaatcgtagctgtctttcagattctcctacccatttacttagacaatcagcacctttcctcatgaaaaatgctactcttttatccccttgactgcactcattggcaagtgctctggcaaccagagtctttccagttccaggtggcccataaaacaaacaacctcttgggggttgaattttaaatttttcaaagacttctggataaagtaatggaaacaccaccatctcttttagagctgctatatgattagacaggccaccaacactatcaaatcgtacctggtaatggaagcgaacatgtacatttttagatttggagtccagattaaaatgtcacccccccccatacacagtcaatgaagtaataatatcttaattgtgacctgaagattaacagaaaacgtctgtaaaggttagagttttgactaaaaagaaaaatcattggttcctttttttaactttaaaactaaaacaaagcacattatagttcaagcatatgtttcaaaacagagtactcaccggacgcgtgggtcgacccggggcgtccga

SEQ ID NO: 66410 - DNA, 666 bp, Homo sapiens
aatcgaacccgctgaaggcgtgaaacggcccggagctacactggaatttggcctgtcttcctgacaggctttgagtgccaagggcagataccaagtcctccagtcttcgtgtcttcccacaggtcgtcatgaaagtgggctctggtgggtgtttattgacttgaattgaccccaagtggacgttgctgagaactgtcatgcgatttgtccctacagcaacctaacatcaaacagaagtttgtggccctcctgaagcggtttaaagtttcagatgaggtgggctttgggctggagcatgtgtcccgcgagcagatccgggaagtggaagaggacttggatgaattgtatgacagtctggagatgtacaaccccagcgacagtggccctgagatggaggagacagaaagcatcctcagcacgccaaagcccaagctcaagcctttctttgaggggatgtcgcagtccagctcccagacggagattggcagcctcaacagcaaaggcagcctcggaaaagacaccaccagccctatggaattggctgctctagaaaaaattaaatctacttggattaaaaaccaagatgacagcttgactgaaacagacactctggaaatcactgaccaggacatgtttggagatgccagcacgagtctggttgtgccg

SEQ ID NO: 66411 - DNA, 383 bp, Homo sapiens
ggcacgagagccttctggctgtggcaagttgttgaacaaatctatatttgctgattaggagccaaatcccaactaaatggattgacataaaactcaaacgtatctttcctccaagttgagtgagtcagctcaaaactaggaggccagatttttactgtgagccacatctgagccattcggtctgaatgtcccactggatccctggggtttgtgtggatctgtggtggagagtggggtgttttggttgttgtgtgtgtttgtggttgtgtttggtggtgtgtgtggtggggtttggggtggttgtgggtgttgggtggggtgttttgttgtgggtgtggtgtgtggtgtttttggtttggttggtgtgtttggggtggttgttg

SEQ ID NO: 66412 - DNA, 688 bp, Homo sapiens
ggcacgagagggaaacgtcatatatctggaagttcagaaaggccagttcctgcggctcctctgtgctgctgacagccagccccctgccacgctgagctgggtcctgcaggacagagtcctctcctcgtcccacccctggggccccagaaccctggggctggagctgcgtgggatcctccagagaacctgagagtgatggtttcccaagcaaacaggacagtcctggaaaacctcgggaacggcacatccctcccggtcctggagggccaaagcctgcgcctggtctgtgtcacccacagcagccccccagccaggctgagctggacccggtggggacagaccgtgggcccctcccagccctcagaccccggggtcctggagctgccacccattcaaatggagcacgaaggagagttcacctgccacgctcagcaccctctgggctcccagcacgtctctctcagcctctccgtgcactggaagctggagcatgggggaggacttggcctgggggctgccctgggagctggcgtcgctgccctgctcgctttctgttcctgccttgtcgtcttcagggtgaagatctgcaggaaggaagctcgcaagagggcagcagctgagcaggacgtgccctccaccctgggacccatctcccagggtcaccagcatgaatgctcggcaggcagca

SEQ ID NO: 66413 - DNA, 335 bp, Homo sapiens
ggcacgagcaaactcggggctcagcttggggacgggagttgatagtcaggtgcctggaacataatggagaccgtccatattggttgaatgagtggatgaatgaattaatgaatttcttttctcttaagtcctgcagctgattaagtcacagaaatttctgaataagttggtgatcttggtggaaacggagaaggagaagatcctgcggaaggaatatgtttttgctgactccaaagtaagtgacagcaaacttctaaagtgggctgtgaggtagggaggggacacaagcgttttgaggctcgctgtgtgccagggagtgtatcattagctcactc

SEQ ID NO: 66414 - DNA, 1293 bp, Homo sapiens
cgacgcctgtccctcttagacttgcagctcggtcctcttggcagagaccccccgcaggagtgcagcaccttctccccaacagacagcggggaggagccggggcagctctcccctggcgtgcagttccagcggcggcagaaccagcgccgcttctccatggaggacgtcagcaagaggctctctctgcccatggatatccgcctgccccaggaattcctacagaagctacagatggagagcccagatctgcccaagccgctcagccgcatgtcccgccgggcctccctgtcagacattggctttgggaaactggaaacatacgtgaaactggacaaactgggagagggcacctatgccacagtcttcaaagggcgcagcaaactgacggagaaccttgtggccctgaaagagatccggctggagcacgaggagggagcgccctgcactgccatccgagaggtgtctctgctgaagaacctgaagcacgccaatattgtgaccctgcatgacctcatccacacagatcggtccctcaccctggtgtttgagtacctggacagtgacctgaagcagtatctggaccactgtgggaacctcatgagcatgcacaacgtcaaggtgaggcctcgggggcagggtccccccatcttggcagccacctgtccagaagcccagtgtggggacccactctcaccaccagggatccggctgctgaggtggctcaaaccttcccacgtaggaaagagggagagggcaatgccatcaacgagtccaggaactgggttgagcgctttaccccaagaacagacacacactgtctgccactgtctagctgttggtataaaacccactctcaactctgaacatcagtttcccagtctgtcaaatgggagtgtgagctacctgccaaaatgcagggaggcttctggggaagctcggggttatgaatgacctctcctggtgtttgttaaagaatcaagactgggcatggtggcccacgcctgtaatcccagcactgggaggccaaggcaggaagatggcttgagcccaggagtttgagaccagcctgggcaacatggcaagacctcatctctactaaaaattgaaaaattagccgggcacagtagcgtgcacccatagtcccagctgcttgagaggctgaggcaggagggccacttgagcccgggaggttgaggctgcagtgagccatgatcacaccactgcactccagcatgggtgacagagtaaaaccctgacatgtattgcgggcgctctagaggataacaagcatac

SEQ ID NO: 66415 - DNA, 327 bp, Homo sapiens
ggcacgagtccagatgctgagattcgcccttggtgttacaccatggatcccagtgtcaggtgggagtactgcaacctgacacgatgtccagtgacagaatcgagtgtcctcacaactcccacagtggccccggttccaagctcagatgctccttcggaacatacatcatctgcgaaatgtcccggtggtcagaatcggtattattgtatgcctcagctgtttagtaccgtattgttcaattgtggatctaggaatgaactgagttgtatgtgggtacggagtgaacgggcttaattatgtgtgtcacttctgcttgtttgagtaatg

SEQ ID NO: 66416 - DNA, 358 bp, Homo sapiens
ggcacgaggttcggaggcatagtgggggaatcaggctttattctgaagaaacagttgactacatgggactttttctacccaatgcccatttcacgactcctctgagactaattgggaaacggggaaattcttggaattttgattttaaaaaacttttttgggttttttacttatatgagactgtcagaagacatccttacttttatgccccgcaactcctttatatagctattcagtctagagctgattttacacaattgtctctggctgctgttgattttgactgcttgaaatcattttttgatgagatcccccttgtataaaccgctttgtgccgtgtagacagcttgatagagcc

SEQ ID NO: 66417 - DNA, 352 bp, Homo sapiens
ggcacgagcttaatgagtgtttcatttgccagatttgtgcttacgagttcacatatgatagcacttattcttcaagggcttaaataaacattactgtcccgcactttagaaaacataaacataattttttatgtttatgactggctaatttttctcttatgaaagcaaaagatacaaaatccacgggtatgtaggttcgtcacaataatcacagtaggaaactttgctctatcccccgacagggcctggcactcatcaatgggacgcagatgatcacatccctgggctgtgaagctgtagagcgagccagtgctattggagcggaggctaacgttgtggcaggcctgacccg

SEQ ID NO: 66418 - DNA, 346 bp, Homo sapiens
ggcacgagatttcaagataaattagaaaccaagtaaaatcagtgtatttttgctaggtacttaaaggactattttgtatcttttaaattatctgttcatcttttaacttgctcatatttataaccttttcatgatgaatgatattagaatacatgactaattatacagaataattttctttttaatttcatttataggagaacctttacaaatagatcacttggtttttgtagtccatgggattggaccagcttgtgatctccgctttcgaagcattgtacagtgtggtaggtttgcaaagcatgtgagagaatattaatcagtgctcttgtgagctgagataaac

SEQ ID NO: 66419 - DNA, 349 bp, Homo sapiens
ggcacgagcggcacgagccttctcctactgcattagcatttggggaccaccctattgtacaaccaaagcaattatcctttaaaattattcaggtaaatgataattaaaatgtttttttctatggcttctaagaaaccattgactaacttactaacaactaagatgtctgtttgttttatatgtagtcataaagcagaattacacatcaagaaagataacttactaaacaaaaacaacagaatttgtaggaaggagtgagaaactgaaacacacaatttactatcagctttttaaacaaccgttaacatgtcagttctgtttactgattctttctgaacttaatttccag

SEQ ID NO: 66420 - DNA, 718 bp, Homo sapiens
  misc_feature (1)...(718): n = a,t,c or g
ggcacgagaactactcccaggagtgtggcagctttctcctggctgagagcatcaagccggctccccctttcaacgtgactgtgaccttctcaggacagtataatatctcctggcgctcagattacgaagaccctgccttctacatgctgaagggcaagcttcagtatgagctgcagtacaggaaccggggagacccctgggctgtgagtccgaggagaaagctgatctcagtggactcaagaagtgtctccctcctccccctggagttccgcaaagactcgagctatgagctgcaggtgcgggcagggcccatgcctggctcctcctaccaggggacctggagtgaatggagtgacccggtcatctttcagacccagtcagaggagttaaaggaaggctggaaccctcacctgctgcttctcctcctgcttgtcatagtcttcattcctgccttctggagcctgaagacccatccattgtggaggctatggaagaagatatgggccgtccccagccctgagcggttcttcatgcccctgtacaagggctgcagcggagacttcaagaaatgggtgggtgcacccttcactggctccagcctggagctgggaccctggagcccagaggtgccctccaccctggaggtgtacagctgccacccaccacggagcccggccatacgaaatcgtcgaccgnnnnntccggcacgggacctcaa

SEQ ID NO: 66421 - DNA, 324 bp, Homo sapiens
ggcacgaggaccttccttgctttcagaatttcacccagggtctgacaggcctcaagaaaggagaactagttatgaaccgattcatccaggcccatccccagtggatcatgattcactggaatcgaagcgaccacgtctggaacaggcttctgattctcattatcagggtcacatcactggcgaatccctaccaggacgtgtacactagcagctcctcactgtggaatctgatgggcaatgccatggtgattacccactatatccgtcttaccccatatgttcaaagtaaactcggttccctagggaacctgatgccatgttacc

SEQ ID NO: 66422 - DNA, 342 bp, Homo sapiens
ggcacgagtgcggacaaagctgcaggctcagcatgtgtcgtaccgggagctgggtgcctgtgttcgaactgcagtggctcagggtggctggcgctcactgtggctgagctggcgccccactgcccttcgatatgcgcccttctcattcttgaacctgttctctactcagctcctgtcgctcccctctttcgtccgcatcctttcgccttctctttttctcgcctgccttgcctaccttgctccttctccccgctcctctttcctccatcttaccatccgctctcctttctctcccctcgcagccctctgactctcccctcttttccccctccttgtcggcac

SEQ ID NO: 66423 - DNA, 345 bp, Homo sapiens
ggcacgagcgatgactcttctagtatggtagacaatcataccaagcagcttgcatttgaatctttggctgtgattggaaatgctctaaccctcctggaagtgggtcagattgcagtgtgtagttttggagaatgtctggaggtgatatggccaatgcgtgcgcactcgacgcatgagcacggttgtattcgtttggaacgctggagacgccggctggagcggtgcgagcgtgtgtccatggaataattcctccgcgggggatcgcctggtggcagttgatcgcgaggagtaggtgttggctggtcagtcgtctctccccggcggtcgggtagaggacgagtaaag

SEQ ID NO: 66424 - DNA, 660 bp, Homo sapiens
ggcacgagatcctttgttagagcaagtggaattacctgctgtggcatcagtcagtgcttcagtaattaaatctccatcagatccctcacatgtttctgttccaccacctccattgttacttccagctgccaccacaaggagtaacagtacatctatgcacagtagcattcccagtatagagaacaaacctccacaggctattgttaaaccacagatcctaacccatgttattgaaggctttgtgattcaggagggattggagccatttcctgtgagtcgttcctctttgctaatagaacagcctgtgaaaaaacggcctcttttggataatcaggtgataaattcagtgtgtgttcagccagagctataaaactgattttaagatatttacaatatatgggacgattttcgctgaattagatagtggttgtgatattatataaagaaaaaaatggctgaggacaaatgtagaaaagaattgatcagtgatcgtgcatttcactaaagcgttctattgctttagtgaagcatactcagtatcttcagtatcagtagaaaagatactcagtatcttttcagtttgggatatgatggtcactgatggccatcagcattcattgcccagtgtgtgaggccactatggatgaaagttgactattg

SEQ ID NO: 66425 - DNA, 379 bp, Homo sapiens
ggcacgagcgacgagggcgacccctctgagaagctggagctggtgacaggcaccaacgtgtacatcacaagggcgcagctgatgaactgccacgtcagcgcaggcacgcggcacaaggtcctactgcggcggctcctggcctccttctttgaccggaacacgctggccaacagctgcggcaccggcatccgctcttctaccaacgatccccgtcggaagcccctggacagccgcgtgctccacgctgtcaagtactactgccagaacttcgcccccaacttcaaggagagcgagatgaatgccatcgcggccgacatgtgcaccaacgcccgccgcgtcgtgcgcaagagctggatgcccaaggtcaaggtgctcaagg

SEQ ID NO: 66426 - DNA, 351 bp, Homo sapiens
  misc_feature (1)...(351): n = a,t,c or g
ggcacgaggatgcgcatctgctccttcctcaggctggcctggagggccaacgcggccgcctgggccttgctccggacctgggcgatctcctcgtttgccctggaggggtaggggcggngcagaggctgagctggagcccaagtgctcagagaatacctacagggtggtacctagtctaacagtgagagttgagactgatagtaagagagggcacagaaagctaagagcataagaggatgagaaaagagagagacacgaaaacagagatgggaagaatgaaaatggaatgagaagcgaaacatgagcgtaaaggactgaggggacacgaagtgaagaagagggaaatgaaag

SEQ ID NO: 66427 - DNA, 351 bp, Homo sapiens
ggcacgagtgacatttgattaaatgtaaaataagaaatcccttgaaaattggttagaacagacaataaatatctcattactgttaagtgattactgtgggggtttttttgcttttgttcttttttttaacagacctccaactcgggcagcttctatccttcctcttcttggacatggtgttccacgtttgccccctggcagaaaacctcctggccctccccctggtccacctcctcctcaagtcgtgcctatgtatggccgtaaagtgggttttgccctaaaacttccccctccgaggctatatgaagacatgttatataggcctgaacttgctgagaagcgcctgttctt

SEQ ID NO: 66428 - DNA, 722 bp, Homo sapiens
ggcacgagccgtgatcatctaaatgctttcctggagttttctaaagaaggggatgcccaatcttccctgaaatcatctgttctgagtactggaaatcagctccttcgactaaaaaaggtggacacagccacgctgcgctctgagctgtcgcgcattgatagccagtggactgacctgctaaccaatatcccagccgtccaggagaagctccaccagctccagatggataaactgccttcccgccatgccatttctgaagtcatgagttggatttctctaatggaaaatgttattcagaaggatgaagataatattaaaaattccataggttacaaggcaattcatgaataccttcagaaatataagggttttaagatagacattaactgtaaacagctgacagtggattttgtgaaccagtccgtgctacaaatcagcagtcaggatgtggaaagtaagcgtagtgataagactgattttgctgagcaacttggagcaatgaataaaagttggcaaattctgcaaggtctagtaactgagaagatccagctgttggaaggcttattggaatcttggtcagaatatgaaaataatgtacaatgtctgaaaacatggtttgaaacccaggaaaagagactaaaacaacagcatcgaattggagatcaggcttctgttcaaaatgcactgaaagactgtcaggatctggaagatttgattaaagc

SEQ ID NO: 66429 - DNA, 692 bp, Homo sapiens
tttttttaacaaagaaactatattgatgataaagtacatttacacaaattaacatgcagatagaaaccgccttcaacttgcttctttctcaccatcttcacagtgtcgacctttaaacccaaggggacagaggcaaatgtaggagtcggctttgattgctgtgcaggtgccaccatggatgcacgaggcctcatcacagattccactgctgcattcccccacatcagccccactgagtgcttttcccaggggccagggcctcatgtcaattctcctcccattcacagcgagcgactgcacacagccttgaaagcctcggtttgtccctgttgctctaaccaacaagtaagcgctgggagcgccaccaagatagagaggtgtccggaaagtaattttactgtattggccctgagactggcctgtcactggggtgccattgttcagctgcagcagcccgttcagcccatctctgtagagcataaccgtgtgccaaccccctagtttgattttggtctcacttacgatgatggcaaccccagttccacaattaaacctgaactgcagggagcgtcggatgatagccagggacatgaaatcccccctcccgtgttcgttctccccacagtagagcagtaagccatcctctgcctccgccctaaattcaagagtaatttgaaatgcctgctcgtgcc

SEQ ID NO: 66430 - DNA, 365 bp, Homo sapiens
ggcacgagcggggcaggaaacggagaagcacaaacgaaactgatgcctccaatatcgaggatcagtctgagacagaagcctatgtgagtcttgcaagttgggatgctgactatacaaccatctttccttttttacgttggagcctcactccggggcttgcaccctcaagatgccttctaaacgtacagctctgtatgatcatctcctgcctctgttagacggctttagttgatatattacatatatttgactctgtgtcgacttggtctgagcctgataatgatactcgcgtctctcgaggttgttactctagtttgcgtttgtcttcttccatgtccattctataatatcaggcgtcggacccg

SEQ ID NO: 66431 - DNA, 313 bp, Homo sapiens
  misc_feature (1)...(313): n = a,t,c or g
ggcacgagcggcacgaggaaatatgtcaacatactacagttagtgtacagaatcagcatttcattgttaggacattttcctcaactttctaaagccagcatttcaactgacttttccagaccatatttgaagatgttagtggttttggtgcctggcatcgaagatggtgtggtctttctggaatctgcntatcttattgtacttatccagatgctgatactcgtgcggtagtcattctaacctcggaacaccggccaacgaaactattgaagcctgacggctgcaacgtaatctactgcctatcccagcgccg

SEQ ID NO: 66432 - DNA, 339 bp, Homo sapiens
ggcacgagcatggccccagggcgggtgggccaggctcatggtctctctccaggccagcagtggcaccacaagggagatcacactgagatgcctgttaattctccccaccccagatttgcttccagctcctgacgctgtgtctgcgggagctgtttgagttccgattcatgcagactgaccccaactgggccaacttcctgtatgatgcctccagccaccaggttggttcctagtgatgtgtgtctgggtacatttgctgttgtaacaaatattccttgatatttcggtagctcaacaaaatagcagttgattacccccacaataggcaggggtggccct

SEQ ID NO: 66433 - DNA, 377 bp, Homo sapiens
ggcacgagaaaagaagaattcagtgcagaagaaaattttctcattttgacggaaatggcaaccaatcatgtacaggttcttgtagaattcacaaaaaagctaccaggtattttttaaataatcacagttaatatttattgagagtttaaatatgtgcccacagattagattacctattttacatacggtgttttaattttcaaaacattcctgtgagatcagctctattttcactattactttgccaagtattttcacatgtacttatttcactgctattctctacaatagtcttgtgacattgagaaaggcaggtctgttctttgtaaaatgaaaatcatttaatatctgatttaaagtaactgtcgaactactat

SEQ ID NO: 66434 - DNA, 326 bp, Homo sapiens
ggcacgagaggaaatctgtaactaagggggaataggaggcaaagagaaagagctgaaacaaatcttcctcctgttgtagtaaggacaaaggcacagagaagcacagtcagcctgaaatcatgaacgctgctagggaggtcgtgtgttcatgaagcagcagcgcctggaactggggactgtgcaaggtcctctgccataggaggaggcttccctcatgctggggctacacctctctccccggaaaagagaaacgacacacctgtgcgttcacgttggcaccaaactccagaagacactgtactgtctcttccagcccccaagaggcg

SEQ ID NO: 66435 - DNA, 477 bp, Homo sapiens
ggcacgagcccacattccaaggctacagacaggaggagggaaccagcataggaactggcatggagcagcttgtgaaggagaggaaaggggtacaggctcgggagaagcagcctgcagagcccccagcccctctgcggaggcgggcggccagtgatggacagtatgagaaccagtctccagaagccacatcccctcgtagccctggggttcgctcccctgtccagtgtgtctccccggagctggctcttaccatcgctctcaatcctggagggcggcccaaagagccccatttgcacagctacaaggaggccttcgaggagatggagggaacctccccgagcagcccaccacccagtggggtgcgagcccccccggatatgaccatgactcccctagatgctctgggcctgaaacctcacaatccagcggacatcctgttgcaccccacaggagagccccgcagctatttggagaccg

SEQ ID NO: 66436 - DNA, 388 bp, Homo sapiens
ggcacgaggttagccagctataaactcagtctcattccctgtccgttccaactttactgggttcttttaaaaaccagaccacgggctgggaaatgccttgatctttactgaccgagttgtatattgggcctagccctagccctgttaaggggcactgtgtggaaatgcccaggctctccagattgaaacttctcactcttcaccatccagttgtccagctgcagcaaagcacatacagagtgggagttagagcagtccctacaggaccaggcactgctgaaagcgcagctgacacagttgaaggagtcatttcaacaactccaattagaaagagatgagtgtgctgaacatatagaaggagagagggcccggtggcatcagaggatga

SEQ ID NO: 66437 - DNA, 892 bp, Homo sapiens
ggcacgaggtcattgccacaggcaggacctatgggcgcatataggttgtaatgaaactgtagtctcagttggaagcctaaacatgaaatgggtcagtgagcaaggctctattcctagtctccagccatgcctgtggcaacctgagcccgctctcagcacattggacccaggcagatgtaaaaaattcacagaactatgatttggactgaagggtttgtagatttcctccttcattctaatttcagtgtctaaaattcttgcatccatgaacgagctgggcatttgatgagacagggctgaatactttagttttcctcctggaaatcatctggggcattttctttgaactgatgggaacaataaagcataactgtttgcacaaacttgggataaatgattttgggataacgatctaccagaatggggatatttcacccttggttctgagatgtaaaccaaagaatatcatgaccagctttcaggcctcctgaagtatatctctcaaattgtcctgttctcatgctgaggagcctgagatccctgtgtggggattagacagtggactgttatgggtgtaggtgaattggcttattttgtctgtccctgcctgaatgtattgcaggaattaaaaaggaccaagaagaggaagaagaccaaggcccaccatgccccaggctcagcagggagctgctggaggtagtagagcctgaagtcttgcaggactcactggatagatgttattcaactccttccagttgtcttgaacagcctgactcctgccagccctacagaagttccttttatgcattgggggaaaaacatgttggcttttctcttgacgtgggagaaattgaaaagaaggggaaggggaagaaaagaaggggaagaagat

SEQ ID NO: 66438 - DNA, 401 bp, Homo sapiens
ggcacgaggttaatgacaataaacctgaaattaacatcaacctcatgtcccctggaaaagaagaaatatcttatatttttgaaggggatcctattgatacatttgttgctttggtcagagttcaggacaaggattctgggctgaatggagaaatagtttgtaagcttcatggacatggtcactttaaacttcagaagacatatgaaaacaattatttaatcttaactaatgccacactggatagagaaaagagatctgagtatagtttgactgtaatcgctgaggacagggggacacccagtctctctacagtgaaacattttacagttcaaatcaatgatatcaatgacaatccaccccacttccagagaagccgatatgaatttgtaatttcagaaaag

SEQ ID NO: 66439 - DNA, 1224 bp, Homo sapiens
ggttttttttttttttcttttgggaaaggcattggccactttggactttattagcaacagtaatgtcccctgacatacgcacaagcttgtagctccacggccaggtcttcccccaacctcacaatggccccgtgatgcaggcaggcaggcgagtgggggtctcccctccttatccacagggccaccgaaaggcccacgagacggccttgcccgaggtcacccagcggagtggcttgctgggagccctgggaataacagtcccacacaaggctctctccctccgcagctggacctgtacgcgggggctctgtttgtgcacatctgcctgggctggaacttctacctctccaccatcctcacgctcggcatcacagccctgtacaccatcgcaggtatggtgcctgcagcagggaggtccacccaggggacgtgtaaaggggtcagaaggccacctccccctacaggcccgagggagcagcccaggaagtggccccagcaggagccccagaagttcctccccgtgtccctcctccctggggccagggccccctccagcaaccttgcttccactggcagggggcctggctgctgtaatctacacggacgccctgcagacgctcatcatggtggtgggggctgtcatcctgacaatcaaaggtgaggacagagtctgtggccatggcggggctgtccccacagcgagccctttggagtctggcactgcccggcactgtgcaggattcatgccgttggggttctgggtagcatcgctgggagtgggtgggttcaggaggttgagccactaggcagtcagcccccctgctggcccctcagggactgccctggctggtagaggctacccaccctgctgccccgctgttaccagctctggccctggcaaggagctgactcaggaactcagggccagccacacccgcattggctcagcgcttgatggtgaggtggggctgtaggcgggtgtgaaggcacacaaccaggaggccataaaactgcctgggcagctcctccaattgtttaaaagcatgtacaaaatgccaagaggtgatgctacctcctgcaggacaaaggccagggaggaaagaagagagctgggagagattggcgatactagtctggaacagataggaaactcacagggctgcccggagagagcgtgagctcaccgtccctggaagtatgtaagcagagccaggagctcgtgcc

SEQ ID NO: 66440 - DNA, 357 bp, Homo sapiens
  misc_feature (1)...(357): n = a,t,c or g
ggcacgaggaaattgctgaacttcaggggcaagcagcagtgctcaaggaggcacatcatgaggccacttgcaggcatgaggaggagaaaaaacaactgcaagtgaagcttgaggaggaaaagactcacctgcaggagaagctgaggctgcaacatgagatggagctcaaggctagactgacacaggctcaagcaagctttgagcgggagagggaaggccttcagagtagcgcctggacagaagagaaggtgagaggcttgactcaggaactagagcagtttcaccaggagcagctgacaagcctggtggagaaacacactcttgagaaagaggagttaagaaaagagctcttggaan

SEQ ID NO: 66441 - DNA, 1079 bp, Homo sapiens
agcctctacaactgagttaaagaaagagagtaaaaaagaaaggccagaggaaaccagcaaggatgagaaagtcgtgaaaagcgaggactatgaagatcctctacaaaaacctttagaccctacaatcaaatatcaatacctaagggaggaagacttggaagatggctcaaagggtggaggggacattttgaaatctttggaaaatactgtcaccacagccatcaacaaagcccaaaacggggcccccagctggagtgcctaccccagcatccacgcagcctaccagctgtctgagggcaccaagccgcctttgcctatgggatcccaggtactgcagatccggcctaatctcaccaacaagctgaggcccattgcaccaaagtggaaagtgatgccactggtttctatgcccacacacctggccccttacactcaagtcaagaaagagtcagaagacaaagatgaagcggtgaaggagtgtgggaaagaaagtccccacgaagaggcctcatctttcagccacagtgagggcgattctttccgcaaaagtgaaacacctccagaagccaaaaagaccgagctgggtcccctgaaggaggaggagaagctgatgaaagagggcagcgagaaggagaaaccccagcccctggagcccacatctgctctgagcaatgggtgcgccctcgccaaccacgccccggccctgccatgcatcaacccactcagcgccctgcagtccgtcctgaacaatcacttgggcaaagccacggagcccttgcgctcaccttcctgctccagcccaagttcaagcacaatttccatgttccacaagtcgaatctcaatgtcatggacaagccggtcttgagtcctgcctccacaaggtcagccagcgtgtccaggcgctacctgtttgagaacagcgatcagcccattgacctgaccaagtccaaaagcaagaaagccgagtcctcgcaagcacaatcttgtatgtccccacctcagaaggcacggtcttgtcttgacattcgccgacatgggtcaaaagttccttccccaaaggccaccaccccaaaggcca

SEQ ID NO: 66442 - DNA, 433 bp, Homo sapiens
  misc_feature (1)...(433): n = a,t,c or g
ggcacgaggatggagaaacattttattgcaaagggtaaacaatttcaaatgaaattaggtgggaaataaatagcatatataaataaatatatctacagatagatctatacccatcaccataaagaaacatatccttacctttgacagtggaatgagaaaatccaatttgtaggaaaggatcactctggtgagcagtaccacaaacaccacataggcagagttctcaaagtctgttaattgcacctagacaagcagaagcccagagaagttatgaaccaactacacaaacatgctcttccctgacccaggcccttcctcagatcatgtcattcccaagccatctcctaattccccatctgggtttgggaagcccttttgcccacatttnatttttcaggaaattcaaccttcctttaacttgggactggacttg

SEQ ID NO: 66443 - DNA, 345 bp, Homo sapiens
  misc_feature (1)...(345): n = a,t,c or g
ggcacgagcggcacgagatctgaagaggtatattgcttacagaaagagcgggagatggtaaatcacagtcttcaagagacttctgagcaaaacgttattctacagcatactcttcagcaacagcagcaaatgttacaacaagagacaattagaaatggagagctagaagatactcaaactaaacttgaaaaacaggtgtcaaaactggaacaagaacttcaaaaacaaagggaaagttcagctgaaaagttgagaaaaatggaggagaaatgtgaatcagctgcacatgaagcagatttgaaaaggcaaaaagtgattgagcttactggcactgccaggcaagtn

SEQ ID NO: 66444 - DNA, 331 bp, Homo sapiens
ggcacgagcactagccgttgtgcctctttcttggttgtaggacgggccaaatgcagcaacttgtccgtcaccttagaaggaatatcttgacaggccccacaccactgtacccctagaaattttactgaggtagaagttccctgaattttacttggatttatttcccatcctctggtatgcaaatgtctcactaataagtccagtgtgtttgctacttcttgctcactggatccaatcagcatactgtcatcaatgtaatggactagggtgatattttgcaaaagcaaaaagtgatcaagatctctttgaatcaaagctggagcattgatgt

SEQ ID NO: 66445 - DNA, 340 bp, Homo sapiens
ggcacgagcttctacttgtacaggaaaggttacttgagtttgtccaaagtggtgccgttttctcactatgctgggacattgctgctacttctggcacgtgtggcctgcctcctaggcattgtccgctgggcctacccccacttcccgcagtttctcgccatctcctctccgatccatctctacctgacgtcataactctatatgcatgttatgcggtccatcttagtcttctaaaaaggccattttagcttacctgccatcaagctatacatgtggaaatatacactgtattattttccctttccaggtgattacttacctcatctgttcttatatctgc

SEQ ID NO: 66446 - DNA, 331 bp, Homo sapiens
ggcacgagggccgaccagtgctatgaagatgtgcgcgtctcacagaccacctgggacagtggcttctgtgctgtcaaccctaagtttgtggccctgatctgtgaggccagcgggggaggggcctttctggagctgcccttgggcaagactcgacgtgtagataaaattgcgttgacggacgttggcctctatggtcgtgtgttatgcgttgtgtggtacgttatcttcggattttgttcttatagcgcttgacgcgatggtgacttctgatttggtttgactttggcgtaccgatttgtgtgtgtggtcagtagtgcaagctgtggtgcgg

SEQ ID NO: 66447 - DNA, 418 bp, Homo sapiens
agtgaactttattacagtaaaattggccctgctttgaaaacagttgggcttagcctggatgtgtcccgtcgggattggcctcttcatgtaatgaaggcagtattggaagagttaatggaggccacacccccgaatctccttgccaaagagctctggtcatcttgcacaacacctgatgaatggtggagagttacgcaggtatgtgctttgttttagactatactcagtagtagtatttcttttgcctgctaccttcttgcctatcttgtttgtcctccttcccttccttcctctgtccctccagacttggtagtttgagacgtatatttgagtttaatattacagttataaaggcatgaacatgactgtgtccgagggcaggatgggggaagaagtatggaggaaatgaaaaggagat

SEQ ID NO: 66448 - DNA, 683 bp, Homo sapiens
ggcacgagggcagatttgcatctttacaaccagaagctcagggagaagttgaaggaggaggagaacacagtgggccgaagaggtgagggtgctgagcctcagtatgtggacaagttcggcttccacacggtgacgtgctgcggcttcatcccgcaggtgaatgagtggcaggatgactggccgacctttttcgcccggcaccggctccaggcgcagctggacctcattgagaaggactatgctgaccgagaggcacgagaactctggtcccggctacaggtgggcacggcagtgacttctctgggaaagagctggtcctctcatgatcccgccgcatttgtgcgggttcatctataaaacggagctggagcagggaacactgagtcctggagcacacatcagggaggaaggggggcaggggcgggggttcccccaaaagggagtccgaaaggagtgaggagtgaagacacacttggctcctcgtgcccctctccactgctaggtcaccaggtatttagcctcagactttcctcatgtgaaacacaggtgcttgtaaatggtggtgtttaccatgattactgttcttactatcagtaacacttgtccactccatcgtgttcctctcccatgggaagatgtgggtaccagatgatccagaatgactgatttcaaaacataactct

SEQ ID NO: 66449 - DNA, 478 bp, Homo sapiens
  misc_feature (1)...(478): n = a,t,c or g
gagactccaagccccagtttcacctcagaggcagagatgaggggtcccccggtcctgctcctccaggccgccccaatggagtgtcctgttccgcaggggatcccggccgggtccagtcctgagcctgcacctgaccccccggggcctcatttcctccggcaggagcgcagcttcgagtgccgcatgtgcggcaaggccttcaagcgctcgtccacgctgtccacccacctgctcatccactcagacacgcggccctacccctgccagttctgcggcaagcgtttccaccagaagtccgacatgaagaagcacacctacatccacacaggtgagaagccgcacaagtgccaggtgtgcggaaaggccttcagccagagctccaacctcatcacccacagactcagagagaacccaccatggtgctgtctcctgccgacaagaccaacgtcaaggccgcctggngtaagggtcgcgcgca

SEQ ID NO: 66450 - DNA, 1819 bp, Homo sapiens
cccacgcgtccgaacagaagatgtgtacacatccagaaagaaacaacaccagaccatgatgcattatttttgtgcattaaatactcttcagtacaagaagaaaatagcattgttagaacctctacttgggtacatgcaagctcagataagtttctttaagatgggttctgaaaatcttaatgaacaactggaagaatttttagctaatattggaacaagcgttcagaatgttcgcagggaaatggacagtgatatagagaccatgcaacagacaatagaggatttggaagtagccagtgatcccttatatgtgcctgacccagaccccaccaaatttcctgttaatcgaaatttaacccgaaaggctggataccttaatgctaggaataaaacaggcttggtgtcatctacctgggacagacagttttacttcacgcagggtggaaatttaatgagtcaggcccgtggggatgtagcaggaggcctggccatggacatagacaactgttcagtgatggctgtggactgtgaagacagacgatattgttttcagatcacctctttcgatggaaaaaaatcttcaattttgcaagcagagagtaaaaaagatcatgaagagtggatctgtacaataaacaacatatctaaacaaatatacttaagtgaaaatccagaggaaactgctgcacgagtaaatcaatcagctctggaagctgtcactccttccccatctttccagcagaggcacgagagcctgcggccagcagcaggacaatctcggccaccgacagctcgaaccagcagttcaggatccttaggatctgagtctacaaatttggctgccctctctctagattctcttgttgccccagacaccccaatacagtttgacataatttctcctgtgtgtgaagatcagcctggccaggcaaaagcctttggccagggaggcaggcgtacaaatccatttggagaatctggaggaagtacaaaatctgaaactgaagattctattcttcatcagttatttattgtccgattccttggttcaatggaggtgaaatcagatgaccatccagatgttgtttatgaaactatgcgccaaatcttagctgcccgggccatccataacatctttcgtatgacagaatcgcatttattagtcacttgtgactgtttaaagttaattgatccacagacacaagttacaaggctcacgtttccattaccttgtgtagttttgtatgctacacaccaggaaaataagcgcctttttggatttgttcttcggacatcaagcgggagaagtgaaagtaatctgtcatcagtctgctatatatttgagtcaaacaatgagggggaaaagatatgtgattctgttggactggcaaaacagatagctttgcatgctgaactggatcgtagggcatcagaaaaacaaaaagaaatagagagagtaaaagagaagcaacagaaagaactcaataaacaaaaacagattgaaaaggacttggaagaacaaagtcggttgatagctgcttccagtagaccaaaccaagccagtagtgaggggcagtttgttgtccttagcagtagccagtcagaagagagtgatttgggaggaggaggaaagaagagagaatcagaagcataagcttatacttttggtagatattcccccttggaatttgacagtttctatggtgaaatggcagaaggtaacaactatgttgaaatatcaaggaggagattaagctttatatttgcttatttgttgtagctacattttaaaaaaaagattgaacttgatgaaaaaaaa

SEQ ID NO: 66451 - DNA, 377 bp, Homo sapiens
aactacccattttctggattttcccctatttttttgaatcccgaatttgtcagttttttccaagcttccagatgctggattaccaggtagattatgataatcatgcactttataaacacggaaagacaggtcgaaaacagtctcccgtgcgtattttcaccaacattccgcccaacaaaataatccttcctactgaagaagggtacagattttgctctccgtgtcaacggtatgtttctctagagaatcaacactgtgagcactgtaattcttgcacatccaaggatggcaggaaatggaaccattgctttctctgtaaaaagtgtgtaaagccttcctggatccactgtagcatctgcaatcactgtgctgttcca

SEQ ID NO: 66452 - DNA, 648 bp, Homo sapiens
cggacgcgtgggtgtgggcaacagagaatccccgggacaagctgggatgaattcaattcattccccaggccctgcgagcccagtcagtcacccggatggccaagaagccaaggcactgccgccctttgcatgtgacgtgtgcgagaagaggtttacgtgtaattccaagctagtcatccacaagagatcacacacaggcgagagactctttcaatgtaatctctgtgggaagcgcttcatgcagcttattagcctccaatttcaccagcgaacccacactggcgagaggccctacacgtgtgacgtctgccagaagcagttcacccagaagtcctacttgaagtgtcacaagagaagccacacaggggagaagcccttcgaatgtaaagactgcaagaaagttttcacctacagggggagcctgaaggagcaccagcgcatccactccggagagaaaccctacaaatgttccaagtgtccaagagccttcagtcggctgaaattgttaagacgccaccagaaaacacatccagaagctacttcttagtgattgcataatccggtctatgccttctgcaccaagaagaagagaatgatatttttcatcaatgttatcagatgacatttgacacatgcaagggcgtctga

SEQ ID NO: 66453 - DNA, 600 bp, Homo sapiens
ggtcacagaaaaaaacacagaaatgtgcaatgtcatgatgcagttgaggaaaatggccaatcatcctttattacatcgccaatattacacagctgaaaaactcaaggaaatgtctcagcttatgctaaaggaacctacacattgtgaggctaaccctgacctgatctttgaagatatggaagttatgacagacttcgaactacatgtactttgtaaacagtaccgacacattaataactttcagttagacatggacttgattttagattctggaaaatttcgagttttaggatgcatcttgtctgaattgaaacagaagggtgatagagttgtgttatttagccaatttaccatgatgctggatatcttagaggttctattaaaacatcatcagcataggtacctcagattagatggaaagactcagatttctgaaaggattcatctaattgatgagtttaataccgatatggatatctttgtgtttctgctatcaacaaaagctggtggattaggaataaatctgacttcagcaaatgttgttatacttcacgatattgactgtaatccttataatgacaaacgcggcggtggggggct

SEQ ID NO: 66454 - DNA, 518 bp, Homo sapiens
agacggttgcagttgcttccaaacctttagtccgcctcggattcccgttcgacccacgcgttcgatgtgacaaagcttttaatcagcaatcaaaccttgcacgtcatcgtagaattcatactggagagaaaccttacaaatgtgaagaatgtgacaaagttttcagtcggaaatcaacccttgagtcacataagagaattcatactggagagaaaccatacaaatgtaaggtttgtgacacagctttcacatggaattctcagctggcaagacataaaagaattcacactggagagaaaacttacaagtgtaatgagtgtggcaagaccttcagtcacaagtcatcccttgtatgccatcatagacttcatggtggagagaaatcttacaaatgtaaggtctgtgacaaggcttttgcgtggaattcacacctggtaagacatactagaattcatagtggaggaaaaccttacaagtgtaatgaatgtgggaagacctttggtcaaaattcagatctt

SEQ ID NO: 66455 - DNA, 704 bp, Homo sapiens
tattctttatttagatatattcaatatttattttcatgagattactttcttttgtagataattatcaaacagcacagctacttgccttaattttagagttactcacattttgtgtggaacatcacacatatcacataaaaaactatattatgaacaaggacttgctaagaagagtcttggtcttgatgaattcaaagcacacttttctggccttgtgtgcccttcgctttatgaggcggataattggacttaaagatgaattttataatcgttacatcaccaagggaaatctttttgagccagttataaatgcacttctggataatggaactcggtataatctgttgaattcagctgttattgagttgtttgaatttataagagtggaagatatcaagtctcttactgcccatatagttgaaaacttttataaagcacttgaatcgattgaatatgttcagacattcaaaggattgaagactaaatatgagcaagaaaaagacagacaaaatcagaaactgaacagtgtaccatctatattgcgtagtaacagatttcgcagagatgcaaaagccttggaagaggatgaagaaatgtggtttaatgaagatgaagaagaggaaggaaaagcagttgtggcaccagtggaaaaacctaagccagaagatgattttccagataattatgaaaagtttataaagact

SEQ ID NO: 66456 - DNA, 583 bp, Homo sapiens
ctcgcgcgcctgcaggtcgacactagtggatccaaagaattcggcacgagggcctttagaatgaagtcatacctcattgatcatcaccgaactcacacaggagagaaaccatatgaatgtaatgaatgtggtaaatcattcagtcaaaagacaaatctcaatctacatcagagaattcatacaggggagaaaccctatgtttgtaatgaatgtgggaagtcctttcgccagaaagcaaccctcactgtacatcagaaaatacataccggccagaaatcctatgaatgtcctcagtgtgggaaagcctttagcaggaagtcatatctcattcatcatcaaagaactcatacgggagagaaaccatataaatgtagtgaatgtggaaagtgcttccgccagaagacaaatctcaatctacatcagagaattcatacaggggagaaaccctatgtttgtaatgaatgtgggaagtcctttcgccagaaagcaaccctcactgtacatcagaaaatacataccggccagaaatcctatgaatgtcctcagtgtgggaaagcctttagcaggagtcgacgcggccgcg

SEQ ID NO: 66457 - DNA, 332 bp, Homo sapiens
ggcacgagcagctcaccaacaacacagccactgccccctctgccacgcccgtgtttgggcaagtggcagccagcaccgcaccaagtctgtttgggcagcagactggtatcacagccagcacagcagttgccactccacaggtaatcagctcaaggttcattaatctagatttttagtatatagtattattgaatatatataatgttttatatattagactttatacttgagacataggaaataatttatgtataactgttaattaaattttatatttgctagattagaaaattctattaatttattaatgaattatatctaattatgtgaca

SEQ ID NO: 66458 - DNA, 1087 bp, Homo sapiens
  misc_feature (1)...(1087): n = a,t,c or g
tttccttagggagcaaatatctgatcatattcttctgtatattccaaaagccacttgcttggcttcctaaggcgtttcttctctgaccgcacagctggttcagggagctcagcctgtggtgtcaaactgggaattcctggctccttttccatgtcaccaatgctggcactggatttatcacaaacatttaaccgtggcccagctgaatctaagcagtcagcatgattttgctctgtcagtggttcctcaagtatgcttgctgaaggagttctatgctctggaaactcatcccgcccctcctgcacagggtcactaggaagtaagaccctaaaggcacactcagagttttctttctctttaaatctgttcatgcgcttacgaggtttagtgcgcctttggtttaaacgctgccaccgctttttaggcaccacttgatttacaccattgagttcatcattctcactgttcattacagagtccagctctgggccttttccgttttcaaaagagagtcctttttcagaaattttaccaggatcagattgcttaaccttgctatcgaaatgcacatcagaaaaatggtcaccatcttcacttgttaagtggcccattatctgaaggggatcctctttactaggatcttctgccccacctctcaatgaacctccacgttctcggtctccctgcagtacagcatcaagagtcacacttggaagctgattcagttttcttttgcgctcggtctttaaggctttacggttcactgtgttctttaccatttgggctgaaaaagcatctcgcaatttggatgaaggctttgatcgtccacagttgcgcctagtaacacagtctgaacgacttttaccagaagcagggaggtctctcttgtcggacagtaagccaggtagggaagcagacaactcgccagataatgcagagtcacccccactagggctaggattggcggagttctgagtgccatctccctttttctctgaattgtgtgtggagcctcctgaaaccaaaaccttagagactcctacaggactattcggacgcgtgggtcgaccgggnnnnnggganaaaa

SEQ ID NO: 66459 - DNA, 328 bp, Homo sapiens
gtccgctaccagttcacgcctgccttcctccgcctgaggcaggtgggagccacgtgagtcgctgggctatgggtggtggtgggggtgagggagagggtgtgagtgggcccttcttagcctctcgtatgggtggtctgtcctgagcctggctggattgttgacttcatggacagacttagctctgcctccttttcttgctcatggtggagttaacagtgggtgacaatcctgtatactattttcgcttgatcgagaggcactacgttcgcatccaggtactcatatgctatgacttccactatggtttctgtatacccagcaacacgcg

SEQ ID NO: 66460 - DNA, 344 bp, Homo sapiens
ttggagttcagtgatgatattgtgaagatcattgaagcagccattaattcagatggaggacagccagaaattaaaaaagccaacagcatggtcaagtccttcttcattcgggtgaatgatattactaattcatgtttttaatgcttacctataagtaattaccctgtgaatacaatgaacttgttctcttctactttttgctttgtggtgtgtataaaacatctttggtttaatttgatcccctgattctttgagaggaacttggtgaggttgccagagtggatggatctttctcttggtggcctgaaattatcctcgtattaacagagaagctggtttgaaga

SEQ ID NO: 66461 - DNA, 325 bp, Homo sapiens
tataaatgtacagaatgtggcaaagccttcagtcagagcatatgccttactcgtcatcagagaagtcattctggagataaaccttttaagtgtaatgaatgtgggaaagcctttaatcagagtgcatgtctcatgcagcatcagagaattcattcaggagagaagccctacacatgcactgaatgtggtaaagccttcactcagaactcttcccttgttgaacatgaaaggactcacactggagagaaactttataagtgtagtgagtgtgaaaaaactttccgcaaacaagcacaccttagtgagcattacagaattcatactg

SEQ ID NO: 66462 - DNA, 435 bp, Homo sapiens
cctaacttgtttccgacagggcatggtgctgatgtgaaatgtgtagactggcatccaaccaaagggttagttgtttcaggaagtaaagatagtcaacagccaatcaagttctgggatcccaagactgggcagagtcttgcaacacttcatgcccataaaaacacagtaatggaagtgaaattaaacctcaatggcaattggctactcacagcatcacgtgatcatctctgtaaactttttgatatcagaaacctaaaagaagagcttcaagtcttccgaggtcataagaaagaagccacagctgtggcctggcatcctgttcatgaaggactttttgccagtggagggtctgatggttctttgttattctggcatgttggggtagagaaggaagtgggtgggatggagatggctcacgaagggatgatctggagg

SEQ ID NO: 66463 - DNA, 328 bp, Homo sapiens
ggcttatgaacaaatgtgaagacatttcaaataaattgaccaaacaagttaccatgcttactggaaatggaggtggatggaacatagaacaaccttccattctaaaccagagtttgtcactcaagccctatcagaaggttggtttgaattggctggcattggtacataaacatggacttaatggcattttggcagatgaaatgggcctaggaaaaactattcaagccattgcatttctggcatacctctatcaggagggtaataatggtcctcatttgatcgttgttccagcttcaactatagataactggttaagggaagttaattt

SEQ ID NO: 66464 - DNA, 521 bp, Homo sapiens
ggctgccattgccagaaagcctgccaaacctcaaccgaaacttaaacccaagggcaatgtgggaattgggggttctgctgtaccaccacctcctataaaacacaacatgaatattggaacttgggatgaaaaagggtcagtggtaaaggctccaccaacccaaccagttctgcctcctcaaactataatccagcagcctcagccattaattcaaccaccaccattggtgcaaagccaactgcctcaacagcagcctcaaccaccacaaccacagcagcaacaaggacctcagccacaggcccagcctcaccaagtgcagcctcaacagcagcagctgcagaatcgctgggtagctcctcgtaacaggggagcaggcttcaaccagaacaatggagcgggcagtgaaaactttggtttaggtgttgtacctgtcagtgcttcaccttctagtgtagaagtgcatcccgtgctggaaaagctaaaggccataaacaactataatcccaaagactttgattgga

SEQ ID NO: 66465 - DNA, 236 bp, Homo sapiens
catcagcggccaggaaggattgcaagcagtcttagccagcgactattcatttgcacagtttagatatctccaaaggcttctccttgttcatggaaggtggtcttatttccgaatgtgcaaattcttatgctatttcttctataagaattttgcatttacacttgtgcatttctggtttggtttcttctgtggtttctcagcccagactgtttatgaccagtggttcatcacccttg

SEQ ID NO: 66466 - DNA, 884 bp, Homo sapiens
ccacacgcagaacaacaacaacaagccccaccaccacccgacaaatgacaacaaccccagctgcacttccaacaacagtcgtgaccacacccgatctcacaaccggaacaccactccagatgacaaccattgccgtcttcacaacagcaaacacgtgcctttcactaaccccaagcacccttccggaggaagccacaggtcttctgactcccgagccttctaaggaagggcccatcctcactgcagaatcagaaactgtcctccccagtgattcctggagtagtgctgagtctacttctgctgacactgtcctgctgacatccaaagagtccaaagtttgggatctcccatcaacatcccacgtgtcaatgtggaaaacgagtgattctgtgtcttctcctcagcctggagcatctgatacagcagttcctgagcagaacaaaacaacaaaaacaggacagatggatggaatacccatgtcaatgaagaatgaaatgcccatctcccaactactgatgatcatcgccccctccttgggatttgtgctcttcgcattgtttgtggcgtttctcctgagagggaaactcatggaaacctattgttcgcagaaacacacaaggctagactacattggagatagtaaaaatgtcctcaatgacgtgcagcatggaagggaagacgaagacggcctttttaccctctaacaacgcagtagcatgttagattgaggatgggggcatgacactccagtgtcaaaataagtcttagtagatttccttgtttcataaaaaagactcacttattccatggatgtcattgatccaggcttgctttagtttcatgaatgaagggtactttagagaccacaacttctctgtcaaaaa

SEQ ID NO: 66467 - DNA, 1957 bp, Homo sapiens
tatatcttggccttagaaaatcagcttacaatggccgaatattttttagaaaatggtgcaaacgtagaagcaagtgatgctgaaggaaggacagcacttcatgtgtcttgttggcaaggccatatggaaatggtgcaggtcctgatagcataccatgctgacgtcaatgctgcagacaatgaaaagcgctctgctttgcagtctgcagcctggcagggccatgtaaaagtggttcagcttctgattgagcatggtgctgtagttgaccatacatgtaaccaaggtgcaactgcactctgtattgcagcccaggaagggcacattgatgttgttcaggtcttattagagcatggtgctgatccaaaccatgctgatcaatttggacgcactgctatgcgtgttgcagccaaaaatggacattctcagataattaaattattagaaaaatatggggcatctagtttgaatggctgttccccatctcctgttcacacaatggagcaaaaacctctacagtcattgtcttcaaaagtgcagtcattaacaattaaatcaaatagctctggtagtactggtggaggggatatgcagccttcgttacgtggtttacctaatgggcctactcatgcttttagttctccttcagaatctccagattctacagttgaccggcagaagtcatcactgtcaaataattccctgaaaagctcaaaaaattcatctttgagaactacttcatctacagcaacggctcaaacagtgccaattgatagctttcataacttgtcatttacagaacaaattcagcagcattcattgccacgcagtagaagtcgacagtcaattgtttccccatcttccacaacacagtccttaggacagagtcataattcaccaagtagtgaatttgagtggagtcaagtaaagcccagtttgaagtcaactaaagcaagtaaaggggggaaatcagaaaattctgccaagtctggatcagctgggaaaaaagcgaaacaaagtaattcttcacagccaaaggttttagaatatgaaatgactcagtttgatagaagaggacctatagccaaatccgggactgctgcaccacctaaacaaatgccagcagaatctcaatgcaaaattatgataccttcagctcagcaggaaattggtcgatctcaacagcagtttcttattcaccaacaaagtggggaacagaagaagagaaatggaataatgacaaatccaaattatcatcttcagagcaaccaggtttttcttggtagggtttcagtcccacgaacaatgcaagatagagggcatcaggaagtgttggagggatacccttcctcagagacagaattaagccttaaacaagctctgaagcttcagattgaaggttctgaccctagcttcaactataaaaaggaaacaccattataaaagtttcctattcttgtgaaacaagaagacattgtgatgggagtggttcttcagctactggatgggaaacatatgcctgttgatttgctgaaaaaaccaaaaaaaatgaagaatgtgatcttctggcagtacagttaccttaattactgtaatgtgccctaaatagtaaggctgcccttctcaatgtaaccctctgtgcttaaaaaatttcattttgtgtgctttgtattcactacacaggaataagcactttttaaaaatgcagatacatactgcagttccctgataaaagctgaaaagaaaatttgagtattttaagttaaaattgtgataaaaaaatgtgcatgtgccataatcaaatatatatgaaaaggcagtgttccttgtatttatttttttttctttttgtggcaaaagaaacttaaacatactgtttcagtcacattgcattgtagtgtatggcctgtttcttgtatctttaaagacgttgctcaataaaacaaatcttgcaactgta

SEQ ID NO: 66468 - DNA, 1466 bp, Homo sapiens
tggacttgtggcaattcactcctcttcatgaggcagcttctaagaacagggttgaagtatgttctcttctcttaagttatggggcagacccaacactgctcaattgtcacaataaaagtgctatagacttggctcccacaccacagttaaaagaaagattagcatatgaatttaaaggccactcgttgctgcaagctgcacgagaagctgatgttactcgaatcaaaaaacatctctctctggaaatggtgaatttcaagcatcctcaaacacatgaaacagcattgcattgtgctgctgcatctccatatcccaaaagaaagcaaatatgtgaactgttgctaagaaaaggagcaaacatcaatgaaaagactaaagaattcttgactcctctgcacgtggcatctgagaaagctcataatgatgttgttgaagtagtggtgaaacatgaagcaaaggttaatgctctggataatcttggtcagacttctctacacagagctgcatattgtggtcatctacaaacctgccgcctactcctgagctatgggtgtgatcctaacattatatcccttcagggctttactgctttacagatgggaaatgaaaatgtacagcaactcctccaagagggtatctcattaggtaattcagaggcagacagacaattgctggaagctgcaaaggctggagatgtcgaaactgtaaaaaaactgtgtactgttcagagtgtcaactgcagagacattgaagggcgtcagtctacaccacttcattttgcagctgggtataacagagtgtccgtggtggaatatctgctacagcatggagctgatgtgcatgctaaagataaaggaggccttgtacctttgcacaatgcatgttcttatggacattatgaagttgcagaacttcttgttaaacatggagcagtagttaatgtagctgatttatggaaatttacacctttacatgaagcagcagcaaaaggaaaatatgaaatttgcaaacttctgctccagcatggtgcagaccctacaaaaaaaaacagggatggaaatactcctttggatcttgttaaagatggagatacagatattcaagatctgcttaggggagatgcagctttgctagatgctgccaagaagggttgtttagccagagtgaagaagttgtcttctcctgataatgtaaattgccgcgatacccaaggcagacattcaacacctttacatttagcaggtaagtgaatgaagtttcacagatttaggctggtaatatctgagattcattttacccaggtaaaatattttctgtaactaaactttaaaaattcaaatcaggccaagcatggtggctcacacttgtaatcccaacactttatgaggctaaggcaggaggattgcttgagcccaggaatttgagagcagcctgggcaacatggcaaaaccacacctctataaaaa

SEQ ID NO: 66469 - DNA, 599 bp, Homo sapiens
ggcacgagctggaagaatcctccaataatctaacccagttccagactgtagaggcccaattgaaacagtggcttgtggaaaaagaacttatggtcagtgttcttgggcccttgtcaattgacccaaatatgctaaacacacaaaggcagcaggtgcagattttgctgcaagaattcgccactcggaaacctcaatatgaacagctgacagcagctggtcagggcattctgagcaggcctggagaagacccttctttacatgggattgtgaaagagcaactggcagctgtgacccaaaaatgggatagcctaacagggcaattgagtgacagatgtgactggattgaccaagccattgttaaaagcacacagtatcaaagcctgctgagaagcctttctgataaactgagtgacttggataataaactcagcagcagtctggctgtgagcacgcaccctgatgctatgaaccaacagttggaaacagcccaaaaaatgaagcaggagatacagcaggaaaagaagcagataaaagtggcccaggcactctgtgaggatttgtcagcactggttaaagaagagtacttgaaagcagaactt

SEQ ID NO: 66470 - DNA, 1788 bp, Homo sapiens
tttttttttttagaaattagaatactttattataaatattttcagaatataaactgattttgtatcaagacctctttgaaactttagaaactttatgtaacctaagatcataatatatttcattttccactttccagcctagaaaatacactgcaagttagatctaataaaggagaaaaaaattgcttcacagagaaaaaccaatgaacataaaatacccaactcaaaactataacaaacccaatcaagaaacagattgtgcaaaggtcattaatcctccaatttaaaataaataacctcccaacagaaaatatttccaccatcaaagcaatttgatgaataaaagcagagtcactttcattaaaggaaattacactatatgttcaaaaaatgtaataatgcttttagaaaatgaggaaaagcaagcaatttctgtgttggagagcaagcatgctaaacactttgtttactaggcctttgttagaagttaaagaacctattcacataagaaaagtggtatgaacacggatatcataaaaccaagctctcacctattttttcaatttaactttgggagaaccaactttgaaagcttcaaaatccaagaatagactggtcccaaagcatttcctcctctgtcctttcttggccttgttcctttttcttttttgtacgcttacgttcctctttcttagagactacatctcggctttttttctcctttcgattcttaagcttttctgtactgacatgtacggtttctatttccacctctgttttctttctttggatgctcttgtgtttgtctaagtcaatttcctcgcagcttttttttctcttatgcttagaccgctcctcctctgatttttctctgccttcctctgggtgccttttcctcttctgatgtatctgtttgtgactggcttgatgagtactggtactgttatctgaggagaagtgcttgtaaactctatgttctacaccatgtgagccacaaatatattcttgttgattaaagttcaggggtactggtttttctgagaaacagtccctcgtgaactgacagtagctcagagagtctagtctcaatctgctgtcatgggctggtaaccactgaggcaaccgattttccactgtttgtggaatattgcatgatcttgggtaggtctggatggtttcagatgggagtctctggtcaaacattctatacgtgggtctggaattaacctctcctttgtacccacaggtttccaaatagtcccctttcatctttctgaaacaagtctttggctctaagcctctggctttctgtactttaatataatcttcaagttcatcttgaaaagagtcatatgtcttctttgaatgcttcattaggttgacaaaacgggattttccttatcaggctgagaatttggtggagaaatctgatcatattcactcagtttttcagcatgaattttcaaatagtgagactacacaataactggtgagctaaaaaccacaattcagagatcaaaaatcaatttttgtccaattctccactctcactcatctcataatgcaaaatcctttgttatttgaactgtaacactactccacagacatcttttataaaaggtatctgtaaacaaagttcagtctttgttcattcaatgtggtatcttctctgaggcaggggcgggcgtctacaactactgtcccccgccccgccaacgccgccagccaggggataagccgcggtggaggtggcggagaggcaggaacaaccgctgccgccaccgccgc

SEQ ID NO: 66471 - DNA, 762 bp, Homo sapiens
atccaacctgaaacctggagtcaattactacttccgggtatctgctgtaaactgtgctggacaaggagaacctatagaaatgaatgaacctgtacaagctaaagatatacttgaggcaccagagattgacctggatgtggctctcagaacttctgttattgccaaagctggtgaagatgtacaagtgttgattccctttaaaggcagacctccacctactgtcacatggagaaaagatgagaagaatcttggcagtgatgccagatacagcattgaaaacactgattcatcctcattactcaccattcctcaagttactcgcaatgatacaggaaaatatattctcacaatacaacatggagttggtgaacctaagtcttcaactgtgagtgttaaagtgcttgacacaccagctgcctgccagaaactacaggttaaacatgtttctcgaggcacagtcactttgctctgggatcctcctctcattgatggaggatctccaataattaattatgtcattgaaaagagagatgccaccaagagaacatggtctgtcgtgtcacacaaatgttctagcacatccttcaagctaatagatttgtcggagaagactccattcttcttcagagttcttgcagaaaatgaaattggaattggggaaccctgtgaaactacagagccagtgaaggctgctgaagtaccagctcctatacgtgatctctcaatgaaagactcaacaaagacatctgtcatcctcagctg

SEQ ID NO: 66472 - DNA, 844 bp, Homo sapiens
cttctcagaggtgtaatataactacgactgaaaaatcggcaatcctggaaattccaagtagcacagtagaggatgcaggacaatacaactgctacattgaaaatgcctctggaaaagattcctgttcagcacaaatactcatactagaaccaccgtattttgtcaagcagttggagccggttaaggtgtctgttggagattctgcctctctacaatgccagcttgctggaacccctgaaattggggtatcctggtataaaggagatacaaaattgagacccactacgacttacaaaatgcattttaggaataatgttgctacactggttttcaaccaggttgatattaatgatagtggagaatatatctgcaaagctgaaaacagcgtgggagaagtttctgcatcaactttccttaccgttcaagagcaaaaacttccaccatcattttctcgacaattgagagatgttcaaggaacagttggactgccagttgtttttgattgtgccataagtggatcagaacctatctccgtgtcttggtataaagacggcaagccattgaaagacagcccaaatgtacaaacatcatttttagacaatacagccacactcaatatttttaaaactgaccggagccttgcaggccagtattcctgcacagctacaaaccctataggctctgcttcttccagtgccaggctcattctcacagaggggaagaacccacccttctttgacatccgtcttgcccctgtggatgctgtggtgggagaaagtgctgactttgagtgccacgtcacgggcacacaaccgataaaggtcagctgggccaaagacagcat

SEQ ID NO: 66473 - DNA, 1404 bp, Homo sapiens
gcgccacgcgcggcctggcggcggcggccactctaaccagcgcaaaatgtccctggaacaggaggaggaaacgcaacctgggcggctcctaggacgcagagacgccgtccccgccttcattgagcccaacgtgcgcttctggatcaccgagcgccaatcctttattcgacgatttcttcaatggacagaattattagatcctacaaatgtgttcatttcagttgaaagtatagaaaactcgaggcaactattgtgcacaaatgaagatgtttccagccctgcctcggcggaccaaaggatacaggaagcttggaagcggagtcttgcaacagtgcatcccgacagcagcaacctgatccccaagctttttcgacctgcagcgttcctgcctttcatggcgcccacggtatttttgtcaatgacgccactgaaagggatcaagtccgtgattttacctcaggttttcctctgtgcctacatggcagcgttcaacagcatcaatggaaacagaagttacacttgtaagccactagaaagatcattactaatggcgggagccgttgcttcttcaactttcttaggagtaatccctcagtttgtccagatgaagtatggcctgactggcccttggattaaaagactcttacctgtgatcttcctcgtgcaagccagtggaatgaatgtctacatgtcccgaagtcttgaatccattaaggggattgcggtcatggacaaggaaggcaatgtcctgggtcattccagaattgctgggacaaaggctgttagagaaacgctagcatccagaatagtgctgtttgggacctcagctctgattcctgaagtcttcacctacttttttaaaaggacccagtatttcaggaaaaacccagggtcattgtggattttgaaactgtcttgtactgtcctggcaatgggactgatggtgccattttcttttagtatatttccacagattggacagatacagtactgtagtcttgaagagaaaattcagtctccaacagaagaaacagaaatcttttatcacagaggggtgtaggccgtgagttttaggtgaatttatgtggttccctgcttgaaaaccttccccctctcccaggttcggtttagagaactttgcccacaggtcttctggggaccccagaggtgtctgtgctgacaaggcgacttcagattccatactgagatcgttcccaggctggcgtctctggggtttttaaggctggctggagaagacagtgggaagggtgccccgtctgacacccctggggttgctgagggaacggttggagtggggatcggcctgcgaaaggatactgtgaaatcactaattaactaataaacctgtctcaagttgaggatttgaagaaaaaaaaaaaaaag

SEQ ID NO: 66474 - DNA, 562 bp, Homo sapiens
cccacgcgtccgggagattggaagtcttctataacgggacctggggcagcgtcggcaggaggaacatcaccacagccatagcaggcattgtgtgcaggcagctgggctgtggggagaatggagttgtcagcctcgcccctttatctaagacaggctctggtttcatgtgggtggatgacattcagtgtcctaaaacgcatatctccatatggcagtgcctgtctgccccatgggagcgaagaatctccagcccagcagaagagacctggatcacatgtgaagatagaataagagtgcgtggaggagacaccgagtgctctgggagagtggagatctggcacgcaggctcctggggcacagtgtgtgatgactcctgggacctggccgaggcggaagtggtgtgtcagcagctgggctgtggctctgctctggctgccctgagggacgcttcgtttggccagggaactggaaccatctggttggatgacatgcggtgcaaaggaaatgagtcatttctatgggactgtcacgccaaaccctggggacagagtgactgtggaca

SEQ ID NO: 66475 - DNA, 489 bp, Homo sapiens
cccacgcgtccgcccacgcgtccgccctccctgacttttccagcctttcactttaacttcctggagctctaatttctccttctcagatcagcatccccagaacacacctgtgttaagtcaaagaccttggacccaatggtcatcttcttcaccagtgggaccacaggcttccccaagatggcaaaacactcccatgggttggccttacaaccctccttcccaggaagtaggaaattacggagcctgaagacatctgatgtctcctggtgcctgtcggactcaggatggattgtggctaccatttggaccctggtagaaccatggacagcgggttgtacagtctttatccaccatctgccacagtttgacaccaaggtcatcatacagacattggtgaaataccccattaaccacttttggggggtatcatctatatatcgaatgattctgcagcaggatttcaccagcatcaggttccctgccctggag

SEQ ID NO: 66476 - DNA, 738 bp, Homo sapiens
cttggtatgtggtgcccccagaacatggccagcgcctggaacgcctggccagggagctcttcccaggcagttcccggggttgtggggccttcctgcggcacaaggtggccctcatctcgcctacagttctcaaggaaaatgggattcccttcaatcgcataactcaggaggctggagagttcatggtgacctttccctatggctaccatgctggcttcaaccatggtttcaactgcgcagaggccatcaattttgccactccgcgatggattgattatggcaaaatggcctcccagtgtagctgtggggaggcaagggtgaccttttccatggatgccttcgtgcgcatcctgcaacctgaacgctatgacctgtggaaacgtgggcaagaccgggcagttgtggaccacatggagcccagggtaccagccagccaagagctgagcacccagaaggaagtccagttacccaggagagcagcgctgggcctgagacaactcccttcccactgggcccggcattccccttggcctatggctgcccgcagtgggacacggtgccacacccttgtgtgctcttcactcccacgccgatctgcagttagtggcactgctacgcagccccgggctgctgctgtccacagctctaagaagcccagctcaactccatcatccacccctggtccatctgcacagattatccacccggcaaaaggcagacgtggtcggggtcgcctcc

SEQ ID NO: 66477 - DNA, 689 bp, Homo sapiens
atacaaacaccaaattagaagtcaagaaaatccctcaggaattgaacaacattaccaagctcaatgaacacttcagcaaatttggaactattgttaatatccaggttgcttttaagggtgacccagaagcagccctaatccaatatcttaccaatgaggaggccaggaaagccatttctagcacagaagcagttctaaacaaccgattcattcgagtcttgtggcatagggaaaataatgagcaaccgacactacagtcctcagcacagctgctcctgcaacaacagcaaacacttagtcacctctcacagcagcaccatcacctgccacagcatctacatcagcagcaggtgctagtggcccagtctgctccttcaacagtgcacggaggtatccagaagatgatgagcaaaccacagacatcaggtgcatatgttcttaacaaagttcctgttaaacatcgtcttggacatgcaggtggtaaccagagtgatgcatcacatttgttgaatcagtctggtggtgctggagaagattgccagatattttcaactccaggccatccaaaaatgatttacagctcctcaaacttaaagacaccttcaaagctctgttcagggtctaaatctcatgatgttcaagaagtgcttaaaaaaaaacaggaagcaatgaagttacaacaagatatg

SEQ ID NO: 66478 - DNA, 383 bp, Homo sapiens
tatgaatgtaaggaatgtgggaaggtattctttttttccttttcccttcggagacatgaaaggacacacactgggaaactctgtgaatgtaaacagcatgggaaaggattttttcatagaagctgtcctagacacatgaagatagacactggagagatacttcataaacgtaagatacgtggaaaagtctttcattctcctagttcatttcaaacatgtgaaagatctcacactagagaaaaacgctataaatgcaagcaatgtggaaaacccttcatttatttcaatgcctttcaacgtcatcaaaggagccacactggagagaacccctatgagtgtaagcaatgtgggaaagcctgtatttcttccactgcttttcagtg

SEQ ID NO: 66479 - DNA, 517 bp, Homo sapiens
catcccccttcattcaatcctgtagcaactggcagtgacaagtggtgcccaggacagggacatgagcaaagaaggtctgctggagcagagaaagtgaaactgaccagatgagcaagaaaccttgggacaagtctactggcagctaatataagcacataccaaggttaccagcactcggggaagcaaggacggaagaagaaaagaggatgctctttctccctcatgtaccccaggtatctgctagaaagagaagagaactagggacacctgccaccctcttcctaggttctgtggatggaaagagaccaaatactttagcatccaatactcagctgtacaagtggatatcccagaatgaccttcttggtcatccaaaaactaaatcttttatgactcatggggaaaccagtggcatctatgaggcaatctaccatgggatccctatggtgggcattcctttgtttgcagatcaacctgataacattgctcacatgaaggccctcaatgtggacatcag

SEQ ID NO: 66480 - DNA, 421 bp, Homo sapiens
caggcctgctgcaggggctacctggccaggaaagcatttgccaagcggcagcagcagcttaccgccatgaaggtcctccagcggaactgcgctgcctacctgaagctgcggaactggcagtggaggcggctcttcaccaaggtgcgtgctaagaagggcctcctgagtagctgggactacgggtgcacaccaccatacatacctggctaattgtttgtattttttgtaggaggtgtggtctcaccatgttcgcccaggttggttcacaaactcttggggctccagcaatcctccttaccttcagccttcccaaagtgctgggaattacagggcatggagccactggtggcccggccctttttgcatttttagtaggagacaaggtcttcactatttttgcccaggttgacctttcctgggg

SEQ ID NO: 66481 - DNA, 541 bp, Homo sapiens
catgggctcagcctcagccaccatcagagtacagatccttgacaaaccaggcccacctggaggaccaattgaatttaagactgtaactgctgagaagatcacccttctctggcggcctccagctgatgatggtggtgcaaaaatcactcactacattgtggaaaagcgtgagacaagccgcgttgtgtggtctatggtgtctgaacatttggaagagtgcatcattacaaccaccaaaattatcaaaggaaatgaatacatcttccgggtccgagccgtgaacaaatatggaattggcgagccactggaatctgattccgttgtagccaagaacgcatttgttacacctgggccaccaggcataccagaagtgacaaagattaccaagaattcgatgactgttgtatggagcaggccaattgcagatggcggtagtgatataagtggctatttccttgaaaaacgagacaagaagagcctaggatggtttaaagtactaaaagagacgatcctggaagctgggcttcggaagcgtccagct

SEQ ID NO: 66482 - DNA, 333 bp, Homo sapiens
agctgacgtggtctgcctgttattggagagatatattaagaatccagttgtggattgcagctgatattcttttgcgaatgcttgaaaaagcacttctttatagtgaacaccagaacatcagcaacactggactgtcatcccaaggcttattgatatttgcggagttgattcctgccattaagaggacgttggctcgccttctcgtgatcattgcgagcctggactatggcattgagaaacctcatttaggaacaggcatgcaccgtgtgatcggactgatgcttctatacttaatctttgcaaatgctgaaagcgtgattagagtcattgggg

SEQ ID NO: 66483 - DNA, 358 bp, Homo sapiens
gtgcagtgtccctttagcagtcattaactcacagtgagttatcaatgggtgttagttctctgtgggtctgacaacttagtatagtgaaaagagtgctggcctgtggctgaacatgctggagaagagcttgcctggccacagggacacagccacgcagatccagcatgtgtctcccatgtgccaagtggagcccccagccaagaaggcagccacactagcagagggtgacaaggacaatgacattgacctgtttgtcagcgacaatgaggaggaagacaaggaggcagcccggctgtgggagaagtggctgaggtggtatgtggagaagaaggccaagaagactgcgttggtggtcaag

SEQ ID NO: 66484 - DNA, 1552 bp, Homo sapiens
atgaaccatccaaatctgttaatcaagatacctgtagtccttttccagggatgctctttggaggtgaagatcgaggaacttattcagagaaggaaagagaaatccagtctagactggttggaacaaatggctgagcaacagaggagcaagagacgagaaaaagatctagaactcagggttgcagcgtctggagcacaagaccctgagaaatcgtggaatgaattactcacatcattgcagttaagtaaggaggagcctgatagactaaagcagtttagtgtggcaccaagacactttgaagagatgataccacctgaaagacccagaatagctttccagacacctctcccgcctttatctgccccatctgtcccacccatcccatcagttcatcctgttccttctcaaaatgaagatttgcgcagtggactcagccagcgcccttggtgaaagggcgtctcccaggattgcacctctgcctatcacctcccctactaccacctttggctactaactatcgaactccttatgatgatgcatactatttttatggggccaggaatactttcgatcccagtcttgcttattatggttcaggaatgatgggcgtacagcctgcagcttatgttagtgctcctgtcacccaccaactagcacaacctgttgtgaatacggttggacagaatgaactgaagattacaagtgatcaagtgataaattcaggattgatttttgaagataaaccgaaaccttccaaacagtcacttcagtcttaccaagaggctttgcagcagcagattcgggaaagagaagaaagaaggaagaaagaacgtgaagaaaaagaagaatatgaagctaaattagaagctgaaatgagaacatataatccctggggaaaaggtggaggtggtgctcctctcagggatgcaaaaggaaatctgataactgatttgaataggatgcacagacaaaatatagatgcctaccataacccagatgcaagaacatatgaagataaaagggctgttgtatctctagacccaaatttagccacttcaaatgctgagaacctagaagatgctgcaaataaaagctcaggtcatatgcaaacacagagctctccttttgctcggggaaatgtatttggtgagcctccaactgaacttcagattaaacagcaagaattatacaagaattttcttcgtttccagattgaggaaaagaaacaaagagaggaagcagagcgagagagactgagaattgcagaagaaaaagaagaaagacggcttgcagaacagagggcacgaattcagcaggagtatgaagaggaacaggaaaagaaaagagagaaagaggaggagcaaaggctaaaaaatgaagagcatattcggttagctgaagaaagacaaaaagaagcagaaagaaagaagaaagaagaagaagaaaaatataacctgcaacttcagcactactgtgaaagagacaatttgattggggaagaaacaaagcacatgagacagccttctcctatagttcctgctcttcagaacaa

SEQ ID NO: 66485 - DNA, 594 bp, Homo sapiens
  misc_feature (1)...(594): n = a,t,c or g
ggcacgaggtgcgtccctgatcttattacctgctaaagggcctatgctttatgctaaatcaaaattccccttaatcatcaatgctaaaacctttttttacttttaatcttacttaaagattccttattagcaagcttgctggatggagtaagagcctctggtaatagagatgtttgtgcaaaaatgacaccaacccataaaggtcagcgatgggggttactcatcatgcctgttgatgaggaagtagagagccttcacctcaggttcttagctacgcctccaaatggcaactttgcagatgctgtattcaggatcaatgctaatatttcatacagtggagtcctacatgcagtaacacaagatggtctcttctcagaaaacaaagaaaaactgatcaataatgccataacagcattactgtcccaagaaggggatgtcgttgcttcaaatgccgaacttgagagtcagttccaggctgtgaggaggcttgtggcatccaaagctggtttcctggctttcactcagcttccaaagtttcgcgagcgtctagnggtgaaggtagaaaaagcactcaaaagagcaacaacggatatt

SEQ ID NO: 66486 - DNA, 1269 bp, Homo sapiens
gcgcccacgcgtccggtctttcccacactgcaggatctgtcttcttctaaagaaccttctaattccctaaacttacctcacagtaatgagctgtgttcatcccttgtgcatcccgaattgagtgaggtcagttctaacgttgcaccaagcatccctccagtaatgtcaagacctgttagctcttcctccatttccactcccttgcccccaaatcaaataactgtatttgtcacttccaatcccatcacaacttcagctaacacatcagcagctttgccaactcacttgcagtctgcattgatgtcaacagttgtcacaatgcccaatgcgggtagcaaggttatggtttctgagggacagtcagctgctcagtctaatgcccggcctcagttcattacacctgtctttatcaattcatcctcaataattcaggttatgaaaggatcacagccaagcacaattcctgcagccccactgacaaccaactctggcctgatgcctccctctgttgcagttgttggccctttacacatacctcagaacataaaattttcttctgctcctgtaccgcctaatgccctctccagtagtcctgctccaaacatccagacaggtcgacctttggtccttagctcacgagccacccctgttcagcttccttcccctccttgtacgtcttctccagttgtcccttctcatccccctgtgcagcaagtgaaagaattgaatccagatgaggctagccctcaggtgaacacctcagcagatcagaacactcttccctcttcacagtcaaccacaatggtttctccccttttgaccaatagtccagggtcctctggcaaccggcgaagcccagtctcgtctagtaagggcaaaggaaaagtggacaaaattggccaaattttgttgaccaaggcatgtaagaaagttacaggctctcttgagaaaggggaagaacaatatggtgcagatggagagactgaaggccaagggctagacaccacagctccggggctcatgggaacagagcagttatccacagagctggacagtaaaaccccaacgcccccagcacccactctgctaaaaatgacctctagccctgtgggcccgggcactgcctcagcaggacccagcttacctggcggtgctctccccaccagtgtacgctcgatagtaaccactctggtaccctccgagctcatctccgccgtaccgaccacaaaaagcaatcatggtggcatagcatctgagtcacttgcgggg

SEQ ID NO: 66487 - DNA, 1276 bp, Homo sapiens
tctacagcagggtatacaggaacgagacagtcaaattaagatgctcaccgaacaagtagaacaatatacaaaagaaatggaaaagaatacttgtattattgaagatttgaaaaatgagctccaaagaaacaaaggtgcttcaaccctttctcaacagactcatatgaaaattcagtcaacgttagacattttaaaagagaaaactaaagaggctgagagaacagctgaactggctgaggctgatgctagggaaaaggataaagaattagttgaggctctgaagaggttaaaagattatgaatcgggagtatatggtttagaagatgctgtcgttgaaataaagaattgtaaaaaccaaattaaaataagagatcgagagattgaaatattaacaaaggaaatcaataaacttgaattgaagatcagtgatttccttgatgaaaatgaggcacttagagagcgtgtgggccttgaaccaaagacaatgattgatttaactgaatttagaaatagcaaacacttaaaacagcagcagtacagagctgaaaaccagattcttttgaaagagattgaaagtctagaggaagaacgacttgatctgaaaaaaaaaattcgtcaaatggctcaagaaagaggaaaaagaagtgcaacttcaggattaaccactgaggacctgaacctaactgaaaacatttctcaaggagatagaataagtgaaagaaaattggatttattgagcctcaaaaatatgagtgaagcacaatcaaagaatgaatttctttcaagagaactaattgaaaaagaaagagatttagaaaggagtaggacagtgatagccaaatttcagaataaattaaaagaattagttgaagaaaataagcaacttgaagaaggtatgaaagaaatattgcaagcaattaaggaaatgcagaaagatcctgatgttaaaggaggagaaacatctctaattatccctagccttgaaagactagttaatgctatagaatcaaagaatgcagaaggaatctttgatgcgagtctgcatttgaaagcccaagttgatcagcttaccggaagaaatgaagaattaagacaggagctcagggaatctcggaaagaggctataaattattcacagcagttggcaaaagctaatttaaagatagaccatcttgaaaaagaaactagtcttttacgacaatcagaaggatcgaatgttgtttttaaaggaattgacttacctgatgggatagccccatctagtgccagtatcatt

SEQ ID NO: 66488 - DNA, 951 bp, Homo sapiens
ggaggcaggagggtactaacctccgaagccagactctgttatgtgtgctcagggagtgtggagcggctggtggagtgctgggcaaaatgccaccaggctttgtcccccatggctctgcaggacctgatggagaaggtgatggttcttaacaggagcttggagcaactgcggggtcctcatggggtgagcccaggccctgccacaacctacagggtcactcagtatgccaacctcctggcagcccagggcagcctggccactgccatgagctttctacccagggactgtgctcagccaccagttcagcagctaagagatcggctttttcatgctcaaggttctgctgtcttgggccaacagtctccccctttccccttcccccggattgttgtgggagctaccctccactctaaagagacatcatcttacagattgggatcccagccttctcaccaggtcccaactccatctccaaggccaagggttttcacccctcagtcatcaccagcgatgcccttggcaccttcccatcctagcccttatcagggtcccaggacacagaatataagtgactacagggcacctgggccccaggccatccagcctttgcctttgagccctggggtaaggcctggacctcaagattcctggaaagaagccccagcccccaggggaaacctccagaggaacaagctgccagagacatttatgcccccagcaccaattactgctccagttatgagcctcacccctgagctacaagggattcttccctcacagccccctgtctccagtgtgagtcatgctcccccaggagttccaggagaactcagcctgcagcttcagcacctgccacctgagaagatggaaaggaaggagctgcccccagagcatcagtccttgaagagcagctttgaggcgcttctccaacgctgctccctgtctgcaact

SEQ ID NO: 66489 - DNA, 414 bp, Homo sapiens
gcgagcatgcatcacatcagaagggctcattgccttcatgaacgacaatcgagtggttagaaccaaagatatgtttatcaaaccactataaaaatggagctgaccagccctttgcaactgatcagagtaagccggtggcagtcccagaagagcagcctgttgcagaatctggactattagcgagggagcctgaagaaataaatgcagatgatgagatagaggatacatgtgaccacaaagaggatgacctgggagctgtagaagaacaacgtagtgtcatcctacatctcttgtcacagcttaagctgggcatggatttaacaagagtggtgcttcctacatttatcctagagaagcgttccttgctggaaatgtatgcagactttatgtctcatccagacctatttatagcca

SEQ ID NO: 66490 - DNA, 134 bp, Homo sapiens
tgtagtcccagctactcgggaggctgaggcaggagaatggcgtgaacctgggaggcagagcttgcagtgagccaagattgcaccactgcactccagcctgggcagcagagcgagactccatctcaaaaaaaaaa

SEQ ID NO: 66491 - DNA, 504 bp, Homo sapiens
cggacgcgtgggattttgaacctaccagcaaggaagagagttgaacaatttgcccatagtcatgcagatttaggactgtgccagagaccccagcaacctgcttcctagctcaggtaccttccttccaggctcttgttaccactctcagagtggactcccagatgtgggggagggttttctgaaacttaaaatcatcgagtttcccttcgttttctctcttgtgcagcccgatatcagaatgaattagctggcgtagataccgagctgctagccgagagattttactaccaagccctgtcagtagctcctcagattggtaagttgtccccaacttgggcctctgaatccagtagggttttcctagggaagacgatgttgttgagatggcaggcagttcatactcattttccccagctcctcttcattctcagctctctcgtacttcaccttgtttataccttttccctcttgtaacacactcagaaaatggtggaaggggaagat

SEQ ID NO: 66492 - DNA, 489 bp, Homo sapiens
ttgtcacctcattacgccaagcttggggaagggaactacttcagtttgatcacgggcagtcaaatccaacttactacatcaggctggctaatcgtgatctagttctgaggaagaagcccccagggacactccttccatctgcccatgccatagagagggagttcaggattatgaaagcccttgcaaatgctggagtacctgtccctaacgttcttgatctctgtgaagattcaagtgtcattggcacccccttctatgtgatggagtactgcccaggtctcatctacaaagacccttccctgccaggcttggagcccagccacagacgagccatatacactgccatgaacacagtcctgtgcaaaattcacagtgtggatctgcaggctgtgggacttgaagactatgggaagcaaggctcgacaacctgggtgtttcatccagaagagccagaggtgctttgctgttccttgactgggaactttctac

SEQ ID NO: 66493 - DNA, 562 bp, Homo sapiens
tgggaaagactttcgccaccaacatacactgtttgagcaccagaaaatccacacagaggaaaggccttatgagtgcagtgaatgtggcacattgtttaggtacaactccgaccttattaaacatcagcgaaatcatactggagaaaggccttataagtgtagtgaatgtggaaaagccttcagcctcaaatacaatgttgttcaacaccagaaaattcacactggagaaaggccttatgagtgcagtgaatgtgggaaagcttttcttagaaagtctcacctacttcagcaccagaggattcacaccaggccaaggccttatgtgtgtagtgaatgtgggaaggccttccttacacaggctcaccttgttggtcaccagaaaattcatactggagaacggccttatggatgcaatgaatgtgggaaatactttatgtacagttcagcactcattagacatcagaaagttcacactggagaaaggcctttttattgctgtgaatgtgggaaattctttatggacagctgcacactcattattcaccagagagttcatactggg

SEQ ID NO: 66494 - DNA, 841 bp, Homo sapiens
tgtctataaccaagaccctgtagttacctctagatttagggtgaagctgacactacagggcctggaggaagatgacgatgatagggtatctcccactgtactccacaaaatgtccaatagcttggagatatccttaataagcgacaatgagttcaagtgcaggcattcacagccggagtgtggatatggcttgcagcctgatcgttggacagagtacagcatacagacgatggaaccagataacctggaactaatctttgattttttcgaagaagatctcagtgagcacgtagttcagggtgatgcccttcctggacatgtgggtacagcttgtctcttatcatccaccattgctgagagtggaaagagtgctggaattcttactcttcccatcatgagcagaaattcccggaaaacaataggcaaagtgagagttgactatataattattaagccattaccaggatacagttgtgacatgaaatcttcattttccaagtattggaagccaagaataccattggatgttggccatcgaggtgcaggaaactctacaacaactgcccagctggctaaagttcaagaaaatactattgcttctttaagaaatgctgctagtcatggtgcagcctttgtagaatttgacgtacacctttcaaaggactttgtgcccgtggtatatcatgatcttacctgttgtttgactatgaaaaagaaatttgatgctgatccagttgaattatttgaaattccagtaaaagaattaacatttgaccaactccagttgttaaagctcactcatgtgactgcactgaaatctaaggatcggaaagaatctgtg

SEQ ID NO: 66495 - DNA, 1256 bp, Homo sapiens
ctcgatcacctgatggccctgcggcgcagctcccgggttgacccacgcgtccgagcggatgttcactctcacgaccatgattcaagctcttgcacctgttatgggatgggacaggaagccactgaagatgttttcatcagaagagatgagaggacatcttcatcatcatcataaatgtctgacgaagatcctgaaggttgaggggcaggttccagatctgccatcctgcctgcccctgactgacaacacccgcatgctggcctctatcctcatcaacatgctctatgatgacctgcgctgtgacccggagcgcgatcacttccgcaagatctgtgaggaatatatcacgggcaagtttgacccccaggacatggacaagaacttgaatgccatccagacagtgtcagggatcctgcagggcccctttgacctgggcaaccagctgctgggactgaaaggtgtgatggagatgatggtggcactatgtggctcagagcgcgagacggaccagctggtggccgtggaggccctcatccatgcctccacgaagctcagccgcgccaccttcatcatcaccaatggagtgtcactgctcaaacagatctacaagaccaccaaaaatgagaagatcaagatccgcacactggtgggactctgtaagctcggctctgcaggtggcacagactacggtctcaggcagtttgcggaagggtcgacagaaaaactggccaaacagtgtcgcaagtggctgtgcaatatgtccatagacactcggacccgacgctgggcagtggagggcctggcctacctcacgctggacgctgatgtgaaggacgactttgtccaggacgtccctgccctgcaggccatgtttgagctggccaagaccagtgacaagaccatcctgtactcggtggccaccaccctggtgaactgcaccaacagctacgatgtcaaggaggtcatcccagagcttgtccagctcgccaagttctccaagcagcatgtgcccgaggaacaccccaaggacaagaaggactttatagacatgcgggtgaagcggcttctgaaggcgggtgtcatctctgccctggcttgcatggtgaaagcagatagtgccatcctcactgaccagaccaaggagctgctggccagggtattcctggcactgtgtgacaacccaaaggaccgaggcaccattgtggctcaaggtggtggcaaggccctgattcccctggctttggagggcacagatg

SEQ ID NO: 66496 - DNA, 659 bp, Homo sapiens
actttctaaggcaatcgttctttgttttcgactacacttcacaaaagataatattacaaataatacagctgctgctacagtgcgacaagttgttactgttgtttttgagaggatggttgctgaagatgaacgacacagagatattatagaacaaccagtactggtacaaggaaatagtaacagaagatctgtcagtaccctcaaaccttgtgctaaagatgcatatatgcttttccaggatctttgtcagttggttaatgctgatgctccttattggctagtgggcatgacagaaatgactcggacgtttggcctcgaattacttgagtcagtcctcaatgattttccgcaggtctttttacaacaccaagaatttagtttcctcctcaaagaaagggtatgtcctcttgtgataaagctcttttctccaaatataaagttcagacaaggttccagcacctcatcttctccagcaccagttgaaaaaccatattttcctatctgcatgcgtttgctgagagtagtatctgttctgattaagcagttttacagtcttttggtaagtgctaatttccttatgtatttgtgtatataggtgcatgttgcgccctttgtaaaaagtggtctgttgcagcgcatttagttctttcaattcaacc

SEQ ID NO: 66497 - DNA, 1129 bp, Homo sapiens
gaggtgatctgcctgcccaggcctcccgaaatgctggggtttacagcgtgaagcccgctgtgccccgcccagccacttcttcttattggagtgtgagcactaggagccagggacctttccatggtgcttgctgtgttataccctgcacccagaacttagtaggcgttcaaacaaaatttttaaaaataaatggaagaacgaattaagaaaccttccgggtgagtcattatactgtccccaaacaggggacatcatcaattttattcctgccaagtagatctggactagaagaatatgtgcttgatctacaacaaaagctgccaggcaaatgcctgatactacgtccatctcacctgttctgctcccaccatgctaattggcttgcacttgaagaggtgggtgatgaatttgggaatgaaggagtttgcaaatttaacgcagaactgagtgaagtacttgcgtgtggaagccaggttgtcacggatgatggggacgttctgcttgatgtgcagaatgacagaggtgacgtaggggctctggtcaccaacgtgctccacgttctgccactgcatcttgctcatggcagtcagggcaggatcacaggcagcatccagatcctgaaccagcagctgaatactgctggagatgacggtgctgaacgtgtccatctctccagtcagattgattcgttcaatcagacttacatccactttttctttgagtttttcttctagctgctgggtggtggccagacagtactctgccgtgctcaggatgttacagatgaggcagagctcctccagagtgaacttggctacttctgagccctccttttccttgaggaggctgctgatagtcagtcctccactgctggttgtggttttgggcaggttgccagagaggattttccaggcgtattctcggaggtacttctggaaaatggtggtcagggcgatcatgggctccccagtactgagctgagagcattgcaccatgcacttcttgtagtagacaaagaggtcggcgcagctggggagcacggcacccccttcatcagtgttgggcttaggtggcccctgggctttgaaatcagccacaaaccgatcccacgcgtccgcccacgcgtccg

SEQ ID NO: 66498 - DNA, 837 bp, Homo sapiens
cccacgcgtccgctggaagctttaaggaccactgggctaaaaatttgcctttcctcatagaagactacgaagagcagccagggttgcaaccccacataaaagatgtgttacatcagaattttgagagttataagcctgaagtacaggagctgatttgtgtggctgatcgtttgggatccctgatgcaatatgaaacacctggtttcctgccaaacaagagaatacacagagctatgggtttggccgcattggaggtcatgcaagccgtgcagcgtacatggaccaactcgaaagttcgaatgaatgggaagacacggttgatgcagtggagagacatgtttgacattgcagttaaatggagaaggattgctgacccagaccagcccgtgctgtggttagatcaaatgccagcacgaagtcttagcagaggttttaacaaccacattaatttaatcaggggtcaggtgatcaacatgagatacctagaatattttgagaaaatacttcattttattaaagacagaattcttgtttatcatggagctaataatcctaaaggattgctggaagttcgggaagccctggaaaaggtacacaaagtagaagaccttcttccgattatgaaggtaactttagcatcagaatggcagtccatgtttttagaggaaaagaaaaccaacagcacttttttaaaaagaactcagaattattaaatgctatttgaaatcactcgtatgaacacattctgaataataaccaaaataaaagaacctacaggcatcagactcaaacagaaaaaacaacttgtgaggaagcagttaatatagaaaaaaaaaa

SEQ ID NO: 66499 - DNA, 453 bp, Homo sapiens
attcagctagccatggttattgcccgtttatatgaatctgaatttgagacttcatccacttatatatccatcctaaatcagaagattttgggttgccaaaaggatggctcaggattcagttgcaaaagattacatcctgatcctttcctgcgtagtcttgcctattgggtaatgaaagattacacccgagccttggacacattactggaacaaacaccaaaggaggatgatgaacatcaagttatcatcaagtcttgtaacccggtggcatttagtttttataactaccttcgaactcatcctttgctcattcgaagaaatcttgcctcccctgaaggaactttggcaaccttaggtctcaaaactgagaagaactttgttgataaaattaacctcatagaaagaaaattattctttaccactgcaaatgctcattttaaagttggatgccct

SEQ ID NO: 66500 - DNA, 410 bp, Homo sapiens
agtgatgcagtcagatagaactgccattcgatctgactccactcacttggttacattaggaggagttttgaggcagcagctggatggcagtaaagaattacggatgtatgatgaaagggcacaagaatggagatctttagccccaatggatgctccccgttaccagcatggtattgctgtcattggaaactttctttatgtagttggtggtcagagtaattatgatacaaaaggaaaaactgctgttgatacagttttcagatttgatcctcggtataataaatggatgcaggttgcatcattaaatgaaaagcgcacattctttcacttgagtgccctcagaggacatttgtatgcagttggtgggcgcagtgcagctggtgaactggccacagtagaatgttacaacc

SEQ ID NO: 66501 - DNA, 840 bp, Homo sapiens
tgagctaacacctatagcagttgacactacctctcaaagaaatgcatctccaaatagtgagccctgcagcagtgattctgtatccgagccagaatgtactactgattcttcatccagcaaagagcacacatcatcatctgctattccaggaggtgtggatattatggtcagtgaagatatgaaattaactgactcagagctaggaaagctggcaaataatatccaggaattattatatagtgcctcagatatatgccatgatcgagctgtcaaatttctcatgtcaagagcaaaggatggttttcttgagaagctaaattccatggaattcataacactttctagattaatggaaacattcattttagacaccgaacagatctgtggaagaaaaagcacgtcattacttggagcacttcagagccaagctattaagtttgtaaataggtttcatgaagagagaaaaaccaagctcagcctcctcttagacaatgagcgctggaagcaagcagatgttcctgcagaatttcaggatcttgttgattctctgtcagatgggaagattgctttacctgaaaaaaaatcaggagccacagaagaaaggaaaccagctgaagttcttattgtcgagggacaacagtatgcagttgttggaaccgtattgctgttaataagaattatccttgaatattgccagtgtgtggataacatcccatctgttactactgacatgcttactcgtctgtcagatttattgaagtacttcaattcaagaagttgccagttagttcttggagctggtgcactgcaagttgttggactaaaaacgataactacaaa

SEQ ID NO: 66502 - DNA, 892 bp, Homo sapiens
agcagtgtcggcccaaacacaatgcccaggttgttggcagacatcttgttttccataaatcgtgcagccaccctgaacagatgggccaccaggtgccgcagggtgttgtagttagagtcaggcagctgtaccaagagggtcttcagcgagcggataacctcagggctggggctgggggtcccagggtcgtccccagggtctgcatgcaaggtcttagccagagagatgaaggcgtcgtagaggtggaaggggatcacgggctcggtgagctcctgaagaaatcgcttgaggacactcgagacgtcatgaggcgagttccccgacagctccaccaacgctcggccattctcgaaagcctggcacagccgctccacacggacccgggacccgctgacccggtaaatgccctgcacatccagggcacggtgttctatctcagccgtgcacttcgtgaccacaaagggtacctcctccgggaagtccctgggtagctgcaggaagtcaaccccaaaaaggggtgtccgggctgggagccgcctgtgtccacagaggatcaggagagtctccaggcagcgcttgtggcaggtcagaaagcactcctcacactccgtcccgctgaccatgaaggcttcgcactcgcggcacttggctgggccccgcagtcgccgcagctggtgggtctgagccgcgctggacagtgtccacttcccgaaggggctgcccagcccattctccagcccgtctcccaggtcagggtctcgctcctcaaagtcatctgaggactcagtgcctgtggacgaagccttcaccagctgcctcgtgccagcgcctgggctggaagtgggtgagtccagggaccgagactcgctgccgccacccacgctgtccacat

SEQ ID NO: 66503 - DNA, 419 bp, Homo sapiens
gagaacgtggaggtcttcaccgctgagggcaaaggaaggggtctgaaggccaccaaggagttctgggctgcagatatcatctttgctgagcgggcttattccgcagtggtttttgacagccttgttaattttgtgtgccacacctgcttcaagaggcaggagaagctccatcgctgtgggcagtgcaagtttgcccattactgcgaccgcacctgccagaaggatgcttggctgaaccacaagaatgaatgttcggccatcaagagatatgggaaggtgcccaatgagaacatcaggctggcggcgcgcatcatgtggagggtggagagagaaggcaccgggctcacggagggctgcctggtgtccgtggacgacttgcagaaccacgtggagcactttggggaggaggagcagaagga

SEQ ID NO: 66504 - DNA, 412 bp, Homo sapiens
aatttttctctgtccaggattcttgcctccaaaccactgtacctggtcggctgtgcacctttgggaaccttacagtgcgttttgtggggaccaaggtcccagagcccacctgtccactagctaccccttgcacttccaggttccgctttgattataccaatgagagggccctgcggcgcactctgcaggaggacctggtgaaggacgtgctgagcaacgcacacatccagaacgagttggagcgggaatttgagcggatgcgggaggatcgggaggtgctcagggtcatcttcccaactggagacagcaaggtgcgtgtgggtcgaagtgctgatgctagagatgtgcctccctggatggctgtccccagacacagccctccctccatttacccctctctcaggacgaactg

SEQ ID NO: 66505 - DNA, 578 bp, Homo sapiens
caccctttgtcataaaatagtcatctgaaaaatgaaccaccatcaattccaagtctagctaattttcataaataatacttgttgaatagtcccattaattctgggcttcttgctagagtggtagtatgttagtgcactgtactttaagggcttaaaagctgaatatatagaacttaccagggctgttcaaatacagccaaaataggaatgttcctttcaactgtaactacttaattctgcttcattcaagctaacaattgcatgtaaacattcttactttgttttaatttcaagcaacacaactcagaacatgcgcgactgcaagttcctacatcacaagtaagaagtagatcaacctcaaggggagatgtgaatgatcaggatgcaatccaggagaaattttacccaccacgtttcattcaagtgccagagaacatgtcgattgatgaaggaagattctgcagaatggacttcaaagtgagtggactgccagctcctgatgtgtcatggtatctaaatggaagaacagttcaatcagatgatttgcacaaaatgatagtgtctgagaagggtcttca

SEQ ID NO: 66506 - DNA, 511 bp, Homo sapiens
ctatcccaaagtgagaagaacaattactattcaagccgttttagccctgacagccagtatattgacaacaggagtgtgaacagtgcagggcttcacacggtgcagagagcaccccgactgaaccacccgcctgagcagatagactctcactcaagactacctcatagcgcacacccctcgggaaaaccaccatccgctccagcctcggcacctcagaatgtatttagtacgactgtaagcagtggttataacaccaaaaaaataggcaagaggcttaatatccagcttaagaaaggtacagaaggtttgggattcagcatcacttccagagatgtaacaataggtggctcagctccaatctatgtgaaaaacattctcccccggggggcggccattcaggatggccgacttaaggcaggagacagacttatagaggtaaatggagtagatttagtgggcaaatcccaagaggaagttgtttcgctgttgagaagcaccaagatggaaggag

SEQ ID NO: 66507 - DNA, 781 bp, Homo sapiens
ttttttttttttcaccaggagagtctgcaggtttccttttaatcaaggctctactgaaggtgttttgtggggctaaaagcccccaaaacatgaaatggacatgtaacaccacctggatcccccatagcaggccagaccactctggcgagcactgctggtctgcccaaatctgggtaatcagactgggtattcattggctgcatttcaaagcacagcactgctttcagccaggatgaagtgggagtgaacccagctgctagcagagctgccactccaggctgagagccaagtaccagccactgccagtgaagactggcccctttactgaagggagttgttcagagtccagccaccggccctggggagggagagaagtcagggtattctgctcggggatggtcagggctccgcagctccatcgccagcatcctttggaaagccgcctctggcggagacagccggctgggggggcgctccaggtttggctgagacgttcccgccaccagccggctccgggcgccggcggcccagctgccgtaacatctcctcgcaggctgcgatggtgtccaggagctgccgctgccgctgctccaccgcgtccagcagctgctgggcgcgctcctcccggggcggctgtgggggtggcctcccgccgagccccagccccgccttcccgcggtccacgccggcagcctccccgcgtgaccagtctgagcccgggccccattccatctccgcttgcgcggcccgaccaccgcccccctttcggccgcccccctcc

SEQ ID NO: 66508 - DNA, 628 bp, Homo sapiens
  misc_feature (1)...(628): n = a,t,c or g
ctcacactggggaaaggccctacaaatgtaataagtgtgagaaaagttaccgacaccgttcagccttcattgtacataaaagagttcatactggggagaagccctataagtgtggtgcctgtgaaaaatgctttggccagaaatcagaccttatcgtgcaccagagagtccacacaggtgagaagccgtataaatgcctggaatgtatgagaagttttactcggagtgccaacctaattaggcaccaggcaactcacactcacacttttaaatgccttgaatatgaaaaaagctttaactgtagctcagatcttattgtacatcagagaattcacatggaagagaaaccacatcagtggtctgcgtgtgagagtggcttcctcctaggaatggactttgttgcccaacagaaaatgagaactcaaacagaggagctacactataaatgcactgtatgtgataaaagcttccaccagagttcagcccttcttcaacatcagacagtacacattggtgaaaaaccgtttgtctgtaatgtgagtgaaaaaggtcttgagcttagccctccccatgcgtcagaagcctcacagatgtcttgaccaggcgangaagctgtaataccaatatt

SEQ ID NO: 66509 - DNA, 828 bp, Homo sapiens
cagagttacttgcccagagttgcagagccagttcctgccccatcttctgtggctcccgagtccttggatgggtgatagcagccgcctgccatcttccctgtctcaggacctctcccactcctatccaggtgacatcatccggaaaatcatccccaaccacgagctggttggggagctggcggcgctgtacttggagagcatcagccccagcagtcgcaaccctgccagcgtggagcccaccatgcccggcaccgggcccgagtgggacccccatggtgggggctgccctcaggatgacggccactcagggacctttgggagcgtcctggtggggaaccgcattcagatccccaatgactctcggcctgagaaccccggaccactgggccccatctcgggggtgggtggcgggggcctgggcagcgggagcgacgacaacgccctgaagcaggagctgccgcggagcgtgcacgggctgagcggaaactggctggcgtactggcagtacgagatcggcgtgagccagcaggatgcccactttcacttccaccagatccgcctgcagagcttcccgggccactcgggggccgtcaagtgcgtggcacccctgagcagcgaggacttcttcctgagcggcagcaaggatcgtaccgtgcgcctctggccgctgtacaactacggcgacgggaccagcgagacggccccacgcctcgtctacacccagcaccgcaagagcgtcttcttcgtgggccagcttgaggccccacagcacgtggtgagctgtgacggggctgtgcacgtctgggaccccttcacagggaagaccct

SEQ ID NO: 66510 - DNA, 495 bp, Homo sapiens
ggtcgtgaccttgattgggatgaagagatggcaaaagcccagtcacatgactgtgttcctgttctttcagaacacccactgtatattctttacacatctggcacaacggggttacctaagggtgtgattaggcccactgggggatacgctgtcatgctacactggtcaatgtcttccatatacggacttcaacccggagaggtgtggtgggcagcttctgacttaggctgggttgttggacattcctatatctgctatggacctcttcttcatgggaacacaacagttttatatgaggggaagcctgtgggaacaccagatgctggcgcttatttccgtgtgcttgcagagcatggagtagctgccttgtttacagcaccaactgcaattagagcaatccgtcaacaggaccctggggcagctttggggaagcagtactctctgacaaggttcaaaacattatttgtggctgggagaacgatgtgatgtagagaa

SEQ ID NO: 66511 - DNA, 416 bp, Homo sapiens
aagaaacagaaagtaaaactgaacaaactagagatattgttaaaggggatgtcaaaacctgtaaatggctttttgagacccagccaatggagtctctttatgaaaaagtttcgttaatgaccagcagtgaagaaattcataagggagatgtcaaaacttgtacttggctctttgaaactcagccacttgataccataaaagatgactctgaaacagcagtcaaattgcaaactgtaaaacaggaggagatccaaggtggggatgttcgtacagcatgttttctttttgagacagaaaatttggacagcatacaaggagaagaagtgaaggaaatcaagcctgttgaaatggatatacaagctggagatgtttccagcatgaggtataaatttgaaaatcagtccttagattctata

SEQ ID NO: 66512 - DNA, 819 bp, Homo sapiens
acaccggacacgcatgatcgaaggaggccttgtgcttacgcatgtggcccttgagaaaccaagactgtgtaaagctctggccgcacacttggcagcggaactccggaggcgctgggggctcctcgggagcggcaggagctggggtcggggttgcctcacgttcgggctggggctccggctccggctgggggactgatctgggttcgggctggggtggaggctgaggctgaggctgaggcggaggcgcagcggaggtggccgccaggggacgctcgggagccccgtgggccgtcaggctgtggtgcagcagctcctcctcctggctggagccgaaactgcacaggccgcacttccagggcctatgcaggatgtgcaggtggcgttcgcgctccgccgaggtgcgaaacttgcctttgcagtaggggcaacggaaggcggacgatgaaggagcctggggccgcgccagaccctcagtggcaggggtggcctgcatgccccctgagcttcgggctctccccagtcgggcctcgcgtagtagcgcgcgctcttccaactccagcaacaggcgtgcagcaggactacgtgggcgctcgggctggtgtgtgcgcaggtgcaaagcaaggatagagttgaagcggaagcgcttcccgcatacagggcaggggaagcgccgttcgcctgcacgactctcagaccagctcaccgctcccatcccgagcgaccatgcgctcacggctggcccgttggagtatcgctgcagatccagctcgccgtcgaaagccggcgacgacggcgttaagcggccgctcgcgaaactag

SEQ ID NO: 66513 - DNA, 455 bp, Homo sapiens
cccacgcgtccgcccacgcgtccggtcaagaaaaactagtgcctccatccgtggagctagatgtgaaattaattgaaggtcttgtggtaaaggctggaaccacagtcagattccctgctattataagaggtgtgcctgttcctactgcaaagtggacaaccgatgggagtgagattaaaaccgatgagcactacacagttgaaacagacaacttctcatcagtacttaccattaagaactgcttaaggagagacactggggaatatcaaatcacagtttccaatgcagccggtagcaaaacagtagccgtacatcttactgttcttgatgttcctgggccaccaacaggtcctattaatattctggatgttactcctgaacacatgactatctcatggcagccacctaaggatgatggaggaagccctgtgataaattatattgttgagatacag

SEQ ID NO: 66514 - DNA, 638 bp, Homo sapiens
aggaatgtggaaagacctttagacttagtttttaccttactgaacacagaagaactcatgcaggtaagaaaccttatgaatgtaaggagtgtgggaaatcatttaatgtgcgtggacagcttaatcggcataaaacaatccatactggtataaaaccttttgcatgtaaggtgtgtgagaaggcttttagttatagtggtgacctcagagtacattctagaattcatactggagagaaaccatatgaatgtaaggaatgcgggaaagcctttatgcttcgttcagtccttactgaacatcagagacttcatactggtgtgaagccctacgaatgtaaggaatgtgggaagacctttcgagttcgttctcaaattagtctacataagaaaattcatactgatgtgaagccctacaaatgtgtacgatgtgggaagacctttagatttggtttctaccttactgaacaccagagaattcacactggtgaaaagccctataaatgtaaagaatggggaaaggcctttattcgtagagggaatcttaaagaacatctgaaaattcattctggtttaaaaccctatgactgtaaagaatgtgggaagtcctttagtcggcgtgggcagttcactgaacatcaa

SEQ ID NO: 66515 - DNA, 406 bp, Homo sapiens
cccacgcgtccggcagctgttggccagctgcatagataaaggagacctgagtggcctgcacagtctgcggtgggagcccccggctgacccgagtccagtgccagccagcgagggggcccagagcctgcacccaactgagagcatcatccatgttcccccactggaccccagcatggggatggggcatctgagagcctcaggggccaccccttgccctcctcaggccattggaaaggcagtccctctggctggggaagctgcagcaccagcccaattgcaaaacacagaaaagcaggaagacagtcactctggacagaaagggatggcagtcttgggaaagtcagaaggagccacgactacccctccggggcctggggccccagacctcctggccgccatgcagagt

SEQ ID NO: 66516 - DNA, 394 bp, Homo sapiens; identical to SEQ ID NO: 56417

SEQ ID NO: 66517 - DNA, 550 bp, Homo sapiens
ctgtgacacctccgggcagcccggcacttgttgctcccacgacctgttgtcattcccttaacccggctttccccgtggccccccgcctcctcccggcttcgctccttttcatgtgagcatctgggacactgatctctcagaccccgctgctcgggctggagaatagatggttttgtgaaaaattaaacaccgccctgaagaggagccccgctgggcagcggcaggagcgcagagtgctggcccaggtgctgcagaggtggcgcctccccggcccgggacggtagccccgggcgccaacggcatgacagactcggcgacagctaacggggacgacagggaccccgagatcgagctctttgtgaaggctggaatcgatggagaaagcatcggcaactgtcctttctctcagcgcctcttcatgatcctctggctgaaaggagtcgtgttcaatgtcaccactgtggatctgaaaagaaagccagctgacctgcgcaacctagcccccggaacgcacccgccctttctggccttcaactggtacgtgaagaca

SEQ ID NO: 66518 - DNA, 432 bp, Homo sapiens
  misc_feature (1)...(432): n = a,t,c or g
tgggctgctgacgggccgctcgtaaccttcagttcgggggcttgacaatnnnnnnnnnnnnnnnnnnnnnnnnnnnnnnnnnnnnnnnnnnnncaactgaggggaagagaacagaaagagggggaaaggaggaccgaacaggaggaggaggggaggggggaggaggaggaggtgtacgaggaggacgaacatcccttggtggaggaggaggaggactaaaagagaaaaagacgatctatcacagaagacaaccttcttcgctgtctaaactgggctttttttcccccctagaaaataccatatttggagaatttgggaggatttctctttggtttggaaaaacaaaaaaggaatctcggacctaatacctttccttatcgggcctggaaattcaaagaccgacccatccacgcctttattgcaccgagactn

SEQ ID NO: 66519 - DNA, 611 bp, Homo sapiens
acaattccttagtttcaccacttcaaaaaatttattctagtgtcaaatcccacattttaaataaatacagaaatgattttgatgattctccatttctcccacaagaacaaaaagcacaaataagggaaaaaccgtgtgaatgtaatgagcatggcaaagcctttagagtgtcttcaagccttgctaaccatcaagtaatccacactgcagataacccttacaaatgtaatgaatgtgacaaggtcttcagtaacagttcaaaccttgtacaacatcaaagaattcatactggagagaagccttacaagtgtcatgaatgtggcaagctcttcaatcgaatttcactccttgcacgacatcagagaatacatactggagagaaaccttacaaatgtcatgagtgtggcaaagtcttcactcaaaattctcaccttgcaaatcatcacagaatccacactggagagaaaccttacaaatgtaatgagtgtggcaaggtcttcaacagaaatgcacaccttgcacgacatcagaaaattcatagtggagagaaaccttacaaatgtaaggaatgtggcaaagcattttcagggggttcaggccttactgctcat

SEQ ID NO: 66520 - DNA, 932 bp, Homo sapiens
cagctttgtgtgtgaagttggcctaggtaactcatcttctaatatgaacatcagaggtgacactggacacaaggcatgtgaatgtcaggaatatggaccaaagccatggaagagtcaacaacctaaaaaagccttcagatatcacccctccttgagaacacaagaaagggatcacactggaaagaaaccctatgcttgtaaagaatgtggaaaaaacattatttaccattcaagcattcaaagacacatggtagtgcacagtggggatggaccttataaatgtaagttttgtgggaaagcattccattgtctcagtttatatcttatccatgaaagaactcacactggagagaaaccgtatgaatgtaaacaatgtggtaaatcttttagttattctgctacccatcgaatacatgaaagaactcacattggagaaaagccttatgaatgtcaggaatgtgggaaagcattccatagtcccagatcctgtcacagacatgaaaggagtcacatgggagagaaggcttatcaatgtaaggaatgtggaaaagcattcatgtgtccccgttatgttcgtagacatgaaaggacccactctaggaaaaaactttatgaatgtaagcagtgtgggaaagcattatcctctcttacaagttttcaaacacacataagaatgcactctggagaaagaccttatgaatgtaagacatgtgggaaaggcttttattctgccaagtcatttcaaagacatgaaaaaactcacagtggagagaaaccgtataaatgcaagcaatgtggtaaagccttcactcgttccggttcctttcgatatcatgaaaggactcacactggagagaaaccctatgagtgtaagcaatgtgggaaagccttcagatctgccccaaatcttcaatcgcatggtaggactcaca

SEQ ID NO: 66521 - DNA, 422 bp, Homo sapiens
cttggattcagtgatggacaggaagccaggcctgaagaaattggctggttaaatggctataatgaaaccacaggggaaaggggggactttccgggaacttacgtagaatatattggaaggaaaaaaatctcgcctcccacaccaaagccccggccacctcggcctcttcctgttgcaccaggttcttcgaaaactgaagcagatgttgaacaacaagtgctctacaagtatagaaagaagccttcctcttcccaccgtccccagacaccacataatggaaaaagcaagaattttctgcataagcaaggccttaaaaaaaaaaaagccagcctctgatgggacttttttcctgccaaaaatcccactggtccactgtcgcaatttttacaaaaggccacgataaaagagtaaggcccattttg

SEQ ID NO: 66522 - DNA, 610 bp, Homo sapiens
cgcccacgcgtccgcccacgcgtccggaagggaaagagtgtgacaacctgttcaccgtcattgcccatttatacaacttccacgtggtacagtctctcctcatcttcgacattttgaaaaaactgattggaactttcaccgaaaaagatattgaactgatcttgttaatgctgaaaaacgtgggtttttcattgaggaaagatgatgctttatcacttaaggaattgatcactgaagcccagaccaaagccagcggggcaggcagcgagtttcaggaccagaccaggattcggtttatgctagagacgatgttggccctgaagaacaatgacatgcgcaaaattccaggctatgaccccgagcccgtggagaagctgaggaaactgcagagagctttggtccgcaacgccggctcaggttctgagacgcagcttcgcgtctcctgggacagtgtcttgagtgcggagcagacgggtcgctggtggattgtggggtccgcctggagtggggccccgatgatcgacaacagtcaccatacgcacctgcagaagcagcttgtggggacggtcagttcaaagatcctagaactcgccccggagcagaggatgaa

SEQ ID NO: 66523 - DNA, 776 bp, Homo sapiens
ttggtgtgaccttaccattcaccttcctgcagcagtgctgcttaaggagatacatatccagcctcatcttgcatctcttgcaacctgcccttcctcagtgtctgttgaagtaagtgcagatggggtaaatatgctacctttgtccactcctgttgtcacaagtggcctcacctacataaaaattcagcttgtaaaagccgaagtagcttctgctgtctgccttagactacatcgtccacgggatgccagcacattaggcctttcacaaattaaattattggggctcactgcttttggtaccacctcttctgcaacagttaataatccattccttccatctgaagatcaggtatccaaaacaagtattggatggttacggttattacatcattgccttactcacataagtgatctagaaggaatgatggcaagtgcagctgcacctactgctaatctgctgcagacttgtgcggccttattgatgtcaccttactgtggaatgcattcacccaacatcgaggttgtgcttgtaaagataggactgcagtctactagaattggcctgaagctcatagacattctcctgagaaattgtgcagcatcaggcagtgatcctacagatttgaatagtcctttactttttggaagactaaatggactctcttctgactctacgatagatattctttaccagcttggaacaactcaggatcctggtacaaaagacagaattcaggccttgttaaaatgggttagtgattctgcaagagtggctg

SEQ ID NO: 66524 - DNA, 456 bp, Homo sapiens
  misc_feature (1)...(456): n = a,t,c or g
cccacgcgtccggcttcgtggtccagggctccaatggcgagtttcctttcctgaccagcagtgagcgcctcgaggtggtgagccgtgtgcgccaggccatgcccatgaacaggctcctgctagctggctccggatgcgagtccactcaagccacagtggagatgaccgtcagcatggcccaggtcggggctgacgcggccatggtggtgaccccttgctactatcgtggccgcatgagcagtgcggccctcattcaccactacaccaaggttgctgatctctctccaatccctgtggtgctgtacagtgtcccagccaacacagggctggacctgcctgtggatgcagtggtcacgctttcccagcacccgaatattgtgggcatgaaggacagcggtggtgatgtgaccaggattgggctgattgttcacaagacccaggaagcangattttagg

SEQ ID NO: 66525 - DNA, 465 bp, Homo sapiens
caggacggacggagcccggccactgctacaggctgtattcatctgcggtttttggtgacttcgagcagtttcctcctccagaaatcacccggaggcctgttgaagacttaatccttcaaatgaaggcgctcaacgttgaaaaggtcatcaacttccccttcccgacgcccccctccgtggaagcccttcttgccgccgaggagctgttgatcgcactgggtgccctgcaaccgccccagaaagcagaaagggtgaagcaactgcaggagaaccggctgagctgccccatcactgcgctgggccggacaatggccacgttccccgtggcaccccgctacgctaagatgctggcactgagccgacaacacggctgcctgccctatgccatcaccatcgtggccagcatgacggtgcgggagctgtttgaggagctggacagaccagcggtccagtgacgaggagctc

SEQ ID NO: 66526 - DNA, 567 bp, Homo sapiens
ggatagggagctttccctaatggaacagatcaaggaattgatcctggaaagaaacaccatgaatgtaccgactgtgggaaaacctttctctggaagacacagcttactgagcatcagagaattcacactggggagaaaccctttgaatgcaatgtatgtggaaaggccttcaggcatagctcatctcttggtcagcatgagaatgctcataccggagagaaaccctatcagtgtagtctctgtgggaaagccttccagcgcagctcctcccttgttcaacaccagcgaattcacactggagagaaaccctatcgatgtaatctatgtgggaggtcctttaggcatggcacatccctcactcaacacgaggtcacacacagtggagagaagcccttccagtgtaaggaatgtgggaaagcctttagtcgatgttcttcccttgtccaacatgagaggactcatactggagagaaaccttttgaatgtagcatatgtgggagggcttttggtcagagcccatccctttataaacatatgaggattcataagagaggcaaaccttaccat

SEQ ID NO: 66527 - DNA, 1561 bp, Homo sapiens
gcgccggggcatcctggccgtgctggacgaggcctgcagctctgctggcaccatcactgaccgaatcttcctgcagaccctggacacgcaccaccgccatcacctacactacaccagccgccagctctgccccacagacaagaccatggagtttggccgagacttccggatcaagcactatgcaggggacgtcacgtactccgtggaaggcttcatcgacaagaacagagatttcctcttccaggacttcaagcggctgctgtacaacagcacggaccccactctacgggccatgtggccggacgggcagcaggacatcacagaggtgaccaagcgccccctgacggctggcacactcttcaagaactccatggtggccctggtggagaaccttgcctccaaggagcccttctacgtccgctgcatcaagcccaatgaggacaaggtagctgggaagctggatgagaaccactgtcgccaccaggtcgcatacctggggctgctggagaatgtgagggtccgcagggctggcttcgcttcccgccagccctactctcgattcctgctcaggtacaagatgacctgtgaatacacatggcccaaccacctgctgggctccgacaaggcagccgtgagcgctctcctggagcagcacgggctgcagggggacgtggcctttggccacagcaagctgttcatccgctcaccccggacactggtcacactggagcagagccgagcccgcctcatccccatcattgtgctgctattgcagaaggcatggcggggcaccttggcgaggtggcgctgccggaggctgagggctatctacaccatcatgcgctggttccggagacacaaggtgcgggctcacctggctgagctgcagcggcgattccaggctgcaaggcagccgccactctacgggcgtgaccttgtgtggccgctgccccctgctgtgctgcagcccttccaggacacctgccacgcactcttctgcaggtggcgggcccggcagctggtgaagaacatccccccttcagacatgccccagatcaaggccaaggtggccgccatgggggccctgcaagggcttcgtcaggactggggctgccgacgggcctgggcccgagactacctgtcctctgccactgacaatcccacagcatcaagcctgtttgctcagcgactaaagacacttcgggacaaagatggcttcggggctgtgctcttttcaagccatgtccgcaaggttagacaagggacaaggatggcttcagggctgtgctctttttctagccacgtctgcaaggttagaagctggtgcagagttttgggggggcacttgggagaaaatggaggcaaccccagcccaggcccagctgctcctgacactcccaaaactgtcgccagcggggaggggaggcagtagggactgccgaagcctggggccctggtgggtgacagggcagcaccagcctgggtccagccacctctcccacaggtgaaccgcttccacaagatcaggaaccgggccctcctgctcacagaccagtcgagc

SEQ ID NO: 66528 - DNA, 1086 bp, Homo sapiens
tttcctctttgaactggttgtagttatggtattatttcttttaccatgagaacctgccaaagttgtccaggttgcagatatacctatggtagtagtggttgtggcacttggaggttctgtcaagacttcaggctcatcttcaactttaagcttttctttttcttgagcagcttggagttcaaagttctctttatttttggcttcaatttcttctagtttccttctttgttcttcctttttcttccttctcttctcttttcttttttctcttttcgcagccaaagccagcctccgactttcttcccttaacttttccaagtctaactcctctaacaaaatgctggcgtttttgtttgcttcagcagcctgtctatctttggcttgtactattgactccatacaaagatgacacttcttcagcatctccttatcagtgatggttgctatgtatctcatacattcagaatctgatggaaactgattgacttctttgactaagtagcgcaccaccttcacatgaccctttctaaatgctgccataagaggagttatcttgcggttatctgctgcatccacatctgcacctgcttgcaccagtaactgaaccacatcgaggtgtccaccatttgctgctagccacaatggagtgttccccttcttgttacgtacatcaatatgagctcccctgccaataagaagctcacagaatttgtaatgccctttatctgctgctatggttaaagctgtatctcttgaggagggaactggaggggcattaacatcagcacctttatccaaaagaactcggcccacctccgcatatccaccagaggcagcttccattagtggtgtgagaccagtcttagctctgtgttcaacatttgcttttctatcaagcagaagactaaccacttcagttcttccttggaagcaggctaaagtaagggcagtgttccgattggtttctatctgagcatttatgtcagagcccatgtctaacaggagcttaacagcagctgtatgcccattcatagctgctaacatcagaggagagatgcccaatttgctaccagttctagagttaat

SEQ ID NO: 66529 - DNA, 852 bp, Homo sapiens
  misc_feature (1)...(852): n = a,t,c or g
cccacgcgtccgctgatgctgaaagagagcaattttgctgacagttattatgactacatttgtattattgactttgaagccacttgtgaagaaggaaacccaccggagtttgtacatgaaataattgaatttccggttgttttactgaatacgcatactttagaaatagaagacacgtttcagcagtatgtaagaccagagattaacacacagctgtctgatttctgcatcagtctaactggaattactcaggatcaggtagacagagctgataccttccctcaggtactaaaaaaagtaattgactggatgaaattgaaggaattaggaacaaagtataaatactcacttttaacagatggttcttgggatatgagtaagttcttgaacattcagtgtcaactcagcaggctcaaataccctccttttgcgaaaaagtggatcaatattcggaagtcatatggaaatttttacaaggttcctagaagccaaaccaaactgacaataatgcttgaaaaattaggaatggattatgatgggcggcctcactgtggtcttgatgactctaagaatatcgcccgaatagcagttcgaatgcttcaggatgggtgtgaactccgaatcaacgagaaaatgcatgcaggacagctaatgagtgtgtcctcttccttaccaatagagggcactccaccaccacaaatgccacattttagaaagtaacaacagttttgtgtgtggatcattccaattgaagttgctatgaagaggtagcagatgaatctcattgaattagtcctgtagtgcaaactttaagcaccttanaacatttaaaatcttattacaggtgataga

SEQ ID NO: 66530 - DNA, 1103 bp, Homo sapiens
cccgggtcgacccacgcgtccggtgagccttctggtctttcgccaggaagacgccttccacccaatggaactgaatgcagagccaagccagatgcagattccaaaagaaacgaaagcagaagatgaggatattgttcttacacctgatggcaccagggaatttctgacatttgaagtcccacttaatgattcaggatctgcaggccttggtgtcagtgtcaaaggtaaccggtcaaaagagaaccacgcagatttgggaatctttgtcaagtccattattaatggaggagcagcatctaaagatggaaggcttcgggtgaatgatcaactgatagcagtaaatggagaatccctgttgggcaagacaaaccaagatgccatggaaaccctaagaaggtctatgtctactgaaggcaataaacgaggaatgatccagcttattgttgcaaggagaataagcaagtgcaatgagctgaagtcacctgggagcccccctggacctgagctgcccattgaaacagcgttggatgatagagaacgaagaatttcccattccctctacagtgggattgaggggcttgatgaatcgcccagcagaaatgctgccctcagtaggataatgggtaaataccagctgtcccctacagtgaatatgccccaagatgacactgtcattatagaagatgacaggttgccagtgcttcctccacatctctctgaccagtcctcttccagctcccatgatgatgtggggtttgtgacggcagatgctggtacttgggccaaggctgcaatcagtgattcagccgactgctctttgagtccagatgttgatccagttcttgcttttcaacgagaaggatttggacgtcagagtatgtcagaaaaacgcacaaagcaattttcagatgccagtcaattggatttcgttaaaacacgaaaatcaaaaagcatggatttaggtatagctgacgagactaaactcaatacagtggatgaccagaaagcaggttctcccagcagagatgtgggtccttccctgggtctgaagaagtcaagctcattggagagtctgcagaccgcagttgccgaggtgactttga

SEQ ID NO: 66531 - DNA, 383 bp, Homo sapiens
aaccaagagagcttggaatttggtaaactcaagataaagtcagactggatctgcagggggcataaagtggtacctcctctctgtttaaattgtttaatttacttaaactatagtttttgcccaagaacgaagtcaggcaagtagtagaaccacactgtacctcagttctcaacatttggctctgagttgtttatttagtaatatgttttaacacaaactctatcagtttttagaaatttgtttaacattgtcttttactaatttagtatatgaaaatgatgatcagctcctgtgggaccctgagtacttaccagaagataaagtgattatatttcttaaagatgcatctagaagaacaggtgatgagaagggtgtagaagcaa

SEQ ID NO: 66532 - DNA, 372 bp, Homo sapiens
gctaaaataaaaatgaataaataataaaaagaatggtacgttttgctatagtcaaactgccatcaagaaccaaagtaagcaggaagaaacccagaaagctgaagtccattcttctctaattttctgctccttgaacaatagatatgacataaagatacgtcataaagatatgacataaagagtaagagccactgacctgtggctgggcaggggatggggcatcagggtgctggatgagaatctggctctgctctgggcgggctgtcaccatggtgctggcagtacccaccaccattccacaaccaccattgattgaggagacttggtgagttagggtggctttcagtctcatcttggcttctgatggtatag

SEQ ID NO: 66533 - DNA, 703 bp, Homo sapiens
tgaagtaccaactattacttgcaattcttaatgatgaactatatcattctaaattggatgattgcctctgagttggaagtcctccatttctctttccacatgagtagtagcattcacatttgctgttactttatcacttgcttcaacaaaagaacaagttaatttattttatgtttcttaatgctgctgtaatgtttttaattgtttttctttgtcattacagacctgggcattacattctctatcattgatcattgattctgctggcccactctattatgtgcatgtggaacctaccctttctcttattataatagttgtggtaaatgtgcctcctactcatgctgaagttcaccaaagccttggtcgctgtttgaatgcccttattaccacgttaggtccagagctacaaggtaacagtacttcaatttctaccttaaggacttcctgtctactgggttgtgcagtaatgcaagataacccagactgccttgttcaagctcaggccatctcttgccttcagcagcttcatatgtttgctccacgacatgtcaacttgtctagcctggttagctgcctctgtgtgaatctttgtagcccctacttgttactgagaagagcagtactggcttgcttacgtcagcttgtacaaagagaagcagctgaagtttcagaacatgctgttatgcttgctaaggatagc

SEQ ID NO: 66534 - DNA, 214 bp, Homo sapiens
cttctcttcctcctgctactctggctcccagatatcaccggagaaattgtgttgacgcagtctccaggcaccctgtctttgtccccaggggagagagccaccctctcctgcagggccagtcagagtgttagccgcaacctagcctggtatcagcagaaacctggccaggctcccaggctcctcatctctgatacattcagcgtcgacgcggccg

SEQ ID NO: 66535 - DNA, 353 bp, Homo sapiens
tagagacacaaattacattgtcataagtaaaaactatagtggatggaaataaacacaaatgatccttatgtggcttttagaaggcgtactgaaaaaatgcagactcgaaaaaatcgcaaaaatgatgaagcctcttacgaaaaaatgcttaagctgcgacgagatctaagtcgagctgttactattctagagatgataaaaagaagagaaaaaagtaaaagagagctattgcacttaacactggaaattatggaaaagaggtataatttgggcgactacaatggagagatcatgtctgaggttatagcacagagacagccaatgaaacctacttatgccatccccatcatccg

SEQ ID NO: 66536 - DNA, 1042 bp, Homo sapiens
cggacgcgtggggtcatggagctggcactgcggcgctctcccgtcccgcggtggttgctgctgctgccgctgctgctgggcctgaacgcaggagctgtcattgactggcccacagaggagggcaaggaagtatgggattatgtgacggtccgcaaggatgcctacatgttctggtggctctattatgccaccaactcctgcaagaacttctcagaactgcccctggtcatgtggcttcagggcggtccaggcggttctagcactggatttggaaactttgaggaaattgggccccttgacagtgatctcaaaccacggaaaaccacctggctccaggctgccagtctcctatttgtggataatcccgtgggcactgggttcagttatgtgaatggtagtggtgcctatgccaaggacctggctatggtggcttcagacatgatgggtctcctgaagaccttcttcagttgccacaaagaattccagacagttccattctacattttctcagagtcctatggaggaaaaatggcagctggcattggtctagagctttataaggccattcagcgagggaccatcaagtgcaactttgcgggggttgccttgggtgattcctggatctcccctgttgattcggtgctctcctggggaccttacctgtacagcatgtctcttctcgaagacaaaggtctggcagaggtgtctaaggttgcagagcaagtactgaatgccgtaaataaggggctctacagagaggccacagagctgtgggggaaagcagaaatgatcattgaacaggtaaaaaggggaaacactcagaggcgagcctgcttggctttttctggtgggtacagggcccatggttggtgttgtcaaacttggagtctacactgaggctccccacatatctgcaaatgattgcatgctggataataaatctcttgggtctaagcagtgatgtagtggctccttacagagtcagaaagccacccaggcctgcaagacttgcttgtccttcactaaatgtaaaaattctatt

SEQ ID NO: 66537 - DNA, 703 bp, Homo sapiens
agctagtcgcgagcggccgcccgcgatctataactaggccgccacactataccacgtcggcactacagcaggccctgctgtctcccacgccgccagactatacaagacaccagcaggtaccccacatccttcaaggactgctttctccccggcattcgctcaccggccactcggacatccggctgcccccaacagagtttgcacagctcattaaaaggcagcagcaacaacggcagcagcagcagcaacagcagcaacagcaagaataccaggaactgttcaggcacatgaaccaaggggatgcggggagtctggctcccagccttgggggacagagcatgacagagcgccaggctttatcttatcaaaatgctgactcttatcaccatcacaccagcccccagcatctgctacaaatcagggcacaagaatgtgtctcacaggcttcctcacccaccccgccccacgggtatgctcaccagccggcactgatgcattcagagagcatggaggaggactgctcgtgtgagggggccaaggatggcttccaagacagtaagagttcaagtacattgataagataaagcctggcgctctgtcatgctctgtcccccaaggctgggagccagactccccgcatccccttggttcatgtgcctgaacagttcctggtattcttgctgttgctgctgttgctgctgct

SEQ ID NO: 66538 - DNA, 856 bp, Homo sapiens
  misc_feature (1)...(856): n = a,t,c or g
cagcaacagagcctaaagaaagaaaaagagcccacattggggtgattcctcactttttcatggctgttctctatgtctttttgcatgcaattcttataatggttcaagcaacaactctcaatgtagcttttaactcacacaacaagtctttgcttactatcatgatgtctaataattttgttgaaattaaaggaagtgttttcaagaagtttgaaaagaacaatctctttcaaatgtcaaatagcgatattaaggaacgattcacaaattatgtgcttttactgatagtgtgtctaagaaacatggaacagttttcttggaatccagatcatctctgggtgttgtttccagatgtctgtatggtaattgcatcagaaattgccgtggatattgtaaaacatgcctttattactaaattcaatgacattactgcagatgtctacagtgaatatagagccagtcttgcttttgaccttgttagcagccgacagaaaaatgcatacactgattacagtgactctgtagcacggaggatgggctttattcctctcccactagctgttttactcatcagagttgtaacaagctcaattaaagtgcaagggaatcctgtcttatgcctgtgtcatactcttctattttggggttgatatccctggaaagtacttaataggcatcgtgctgttggggggaaatcgtgccagtatgtggaagggaagccaaaatgggaaggaggaaggctgttcgaattcctncccgcaacctggcactccagggcaagcccttccngttaantcacagnacaaatgttaaaccctttcaagggcntttccacaggagggaaaccgttttgcct

SEQ ID NO: 66539 - DNA, 626 bp, Homo sapiens
cccacgcgtccgcgactcgggaatcttcggccgaggctcggcaatccccccatcctccgtcaccagggagtgcgggaatccgccgtttgcgctgaggcaatggcggcagctgcgccggtggccgcggacgacgatgagcggcggcggcggccgggggctgactccatcagcagctatgaagcccagatcaccgccctgaagcaggagcgacagcagcagcagcaggactgtgaggagaaggagcgggagctgggccgcctgaagcagctgctgtcccgggcctaccccctggactccctggagaagcagatggaaaaggttgggattgggatggcttccctgctgccctgggatttggaagaatgttgaggactgtggatgtcccattccctggtcatggggtgcggggcacccagcagtgattctaggaatagcacagagttaccaggtgttgttgagagcttggctctgtgctccgtagggtcctggcttgccccttattagtgggtgaccaagttcgcttagctccaaaattaacttaagttatgtagagggaagggaacttacacttaagggtaacaaaaaaaattcttactgttattaaatattgacttctggtgtacatt

SEQ ID NO: 66540 - DNA, 679 bp, Homo sapiens
atactactatttgtttaaaatggaaaaatattgaaacctttacttgtgatacacagaatattacctacagatttcagtgtggtaagaatataacattgaccagagaatttttttttgtggcacaatgttgttctagatattatttaatcttactctctgccctttctctcttcctccctgcctctcttgttctccctctgtttggcttttttctttcttgtctttttcttgggctgtggtatatttagagtcaaataattaaattacctatacaattcaaacaaattcacaaaataaatgaatacttttcatgaaaaataaatatctaaaaattgaaagtcaattaatttacaataattttcttggcaattgttatacacaggcattgttgaagagatcatgaaagaagggtgttataaggaaatgataatacacaaactctgttatgaagtaaggaaaaaaaatacaggattgtatggttcaagagtttactttttccatcctgcatcaacaaaattcatacacaagttcaagaacacttaaataagaagaaagcagaaaaagaacagcaagtgcatctagggatatgtttggatttgaattgaggcaactaataattgagatgatagtatttttaaagtgtatttgaatttaatgaggtgaactctcccaccctttg

SEQ ID NO: 66541 - DNA, 1225 bp, Homo sapiens
cccacgcgtccgtggcaaagcttttaagtggtcctcaaagcttactgaacataagataactcatactggagagaaaccctacaaatgtgaagaatgtggcaaagcttttaaccatttctcaatccttaccaaacataagaggattcatactggagagaaaccctacaagtgtgaagaatgtggcaaagcttttacccaatcctcaaaccttactacacataagaaaattcatactggagagaaattctacaaatgtgaagaatgtggcaaagcttttacccaatcttcaaaccttactacacataaaaaaattcatactggaggaaaaccctacaaatgtgaagaatgtggcaaagcctttaagtactcctctacccttactaaacataagagaattcatactggagagaaaccctacaaatgtgaagaatgtggcaaagccttcaagcggtcttcagaccttactacgcataagataattcatactggagagaaaccctacaaatgtgaagaatgtggcaaagcttttaagtactcctctaaccttactacacacaagaaaattcatactggagagagaccctacaaatgtgaagaatgtggcaaagccttcaaccagtcctcaatccttactacacataagagaattcatactggagagaaattctacaaatgtgaagaatgtggcaaagcctttaggcagtcctcacaccttactacacataagataattcatactggagagaaaccctacaaatgtgaagaatgtggcaaagcttttaacaagtcctcacaccttactagacataagagcattcatactggagaaaaaccctaccagtgtgaaaaatgtggcaaagcttctaaccaatcctcaaaccttactgaacataagaatattcatactgaagagaaaccatacaaatgtgaagaatgtgggaaagcctttaaccagttctcaaaccttactacacataaaagaattcatactggagagaaaccctacaaatgtgaagaatgtggcaaagcttttaaccagtcctcaatccttactacacataagagaattcatactggagagaaatcctacaaatgtgaagaatgtggcaaagctttctatcgatcctcaaaacttactgaacataagaaaattcatactggagagaaaccctacacatgtgaagaatgtggcaaagcctttaaccattcctcacaccttgctaca

SEQ ID NO: 66542 - DNA, 1236 bp, Homo sapiens
ctgattgacatctttgccattctaaatgtttatcaggagggtgacccgagacagagaacgctgctggatcctgggaggttcagcatggtgtctagtccagctcccatggagggtggggaacaagaacaagaacttctaggtcctaaactacaagaggaccaagaagaggaagtagttgaaaatgatgaggagatagccttttcaggcaaggacaagccagcttcagagaatagtgaggagaagctgatcagtaagtttgacaagcttccagtaaagatcgtacagaagaatgatccatttgtggtggactgctcagataagcttgggcgtgtgcaggagtttgacagtggcctgctgcactggcggattggtgggggggacaccactgagcatatccagacccacttcgagagcaagacagagctgctgccttcccggcctcacgcaccctgcccaccagcccctcggaagcatgtgacaacagcagagggtacaccagggacaacagaccaggaggggcccccacctgatggacctccagaaaaacggatcacagccactatggatgacatgttgtctactcggtctagcaccttgaccgaggatggagctaagagttcagaggccatcaaggagagcagcaagtttccatttggcattagcccagcacagagccaccggaacatcaagatcctagaggacgaaccccacagtaaggatgagaccccactgtgtacccttctggactggcaggattctcttgccaagcgctgcgtctgtgtgtccaataccattcgaagcctgtcatttgtgccaggcaatgactttgagatgtccaaacacccagggctgctgctcatcctgggcaagctgatcctgctgcaccacaagcacccagaacggaagcaggcaccactaacttatgaaaaggaggaggaacaggaccaaggggtgagctgcaacaaagtggagtggtggtgggactgcttggagatgctccgggaaaacaccttggttacactcgccaacatctcggggcagttggacctatctccataccccgagagcatttgcctgcctgtcctggacggactcctacactgggcagtttgcccttcagctgaagcccaggaccccttttccaccctgggccccaatgccgtcctttccccgcagagactggtcttggaaaccctcagcaaactcagcatccaggacaacaatgtggacctgatt

SEQ ID NO: 66543 - DNA, 1438 bp, Homo sapiens
tgctttgcaaatctgcctgacacatcctgagctgcagaatgaaatttgctgtcagcttattaaacagacaagacgaagacagccacagaatcaaccaggaccattgcagggctggcagctcttggcactctgcgttgggctcttccttccccatcatcctttcctgtggctcctcaggcttcacctaaagaggaatgcagattccaggacagaatttggaaaatatgccatttactgccagcgttgtgtagaaagaacgcaacaaaatggtgacagagaagcaagaccctcaaggatggaaattctttcaactcttctccgaaacccttatcaccattctttgccctttagtatacctgtgcacttcatgaatgggatataccaggtagttggttttgacgcatctaccacagtggaagaatttttgaatactttgaaccaggacacaggaatgaggaaaccagcgcagtctggatttgcgttgttcactgacgatccttctggcagagatttagagcattgtcttcaaggaaacatcaaggtgaaaccaagtccttttcaggagccaagcccaacgaacagcaaagaagctactctttacaagaagagtaaactttgcaagaagtttaattcaggagttttccaaaactttaaccaatctaatctccacgataagaaaaaaaaaatgcaggactttgttaaacccatagaattcttaatacacaatctctacatatacacattccatattaaagagaggaaaggggttagtaatggaaatgatactctaagtattaggataataagggtagatatgtagaagtgctaataaaatggctttccatttttttccatttattcagcaatacttactaagctattttattgtatcccaggggctggctggactcatgtggggaatacaaaaggaccagaaatagtccctgcccacagtgaacttaaaatttgcttacggaagagcagctttatacacagataaccttgaactagggttgaaagtgatgaaagttttgagagtgctgtgaactttgcacagaaagagagagtttaagttcagcattgggaagtttagggaaaggccctgagctggaaatgaaaaatggtttaggaaacagacctgtgtcccgggtgcagtggcttacgcctgtaatccaagcactttgggaggccgggtcaggtggatcatttgaggccaggagtttgagaccagcctgggcagcatggcaaaaacccatctctactaaaaatacaaaaattagccaggcatggtgccacacacctgtagtcccagctactctggaagctgaggcactagaatctcttgagcccatgaggtcgaggctgcagtgagccgtgatcacgccactgcactccagcctgggtgacagagcaagactgtctcacaaaaaaaaaaaaa

SEQ ID NO: 66544 - DNA, 673 bp, Homo sapiens
  misc_feature (1)...(673): n = a,t,c or g
ggaattcccggtgcgcaggcagggcaactacctgctgtgctcactgctgctgggcaacgtgctggtcaacaccacgctcaccatcctgctcgacgacatcgccggctcgggcctcgtggccgtggtagtctccaccatcggtatcgtcatcttcggagagatcgtgccccaggccatctgctcccggcatggcctggctgtgggggccaacaccatcttcctcaccaagtttttcatgatgatgaccttccccgcttcctacccggtcagcaagctgctggactgcgtcctgggccaggagataggcaccgtctataaccgggaaaaactgctggagatgctccgggtcaccgatccctacaacgacctcgttaaggaggagctgaacatcatccaaggggcgctggagctccgcaccaagacggtggaggacgtgatgaccccactccgggactgcttcatgatcaccggcgaagccatcctggacttcaacaccatgtctgagatcatggagagcggctacacccgcattccagtgtttgaaggggagcgctccaatatcgtggacctgctgtttgtcaaagacttggccttcgtggatcccgatgactgtacccgcctgaaaaccatcaccaaattctataaccacccnctagcactgtgctgtcaatga

SEQ ID NO: 66545 - DNA, 509 bp, Homo sapiens
tgcttgtaaataagtccatgcccacagtgactcagattcctttggaaggaagtaatgtaccacagcaaccacagtacaaagatgtacccataacctacaaaggagcaacagactcatatattgaaaaagtgatgatatcttcaaatgctgaagatgcttttctgatcaaaatgctgctgagacagacaaggcgtccagaaattggagacaaattcagcagtcgtcatgggcaaaaaggtgtttgtggcttgatcgtcccccaggaagacatgccattttgtgattctggcatctgtccggacatcatcatgaacccacacggcttcccatcacgaatgacggtggggaagctcattgagctgctggctggcaaggccggtgtgctggacggcagattccactacggcactgcgtttggaggcagtaaagtgaaggatgtgtgtgaggacctcgttcgccatggttataactacttggggaaagactatgttacatccggcatcacaggg

SEQ ID NO: 66546 - DNA, 364 bp, Homo sapiens
aaatcgcaacttatgtgccaacaaatgtatatgggcgaaaaaccctttggatgcagctgttgtgagaaagccttcagcaacaagtcataccttctagtgcatcagcaaactcatgccgaagagaaaccctatggttgtaatgaatgtgggaaagacttcagtagtaaatcatacctcattgtacatcagagaattcatacaggagagaaactacatgaatgcagtgaatgcaggaaaacattcagtttccattcacagcttggtatacatcagagaattcacacaggtgagaatccctatgagtgctgtgaatgtgggaaagtcttcagtaagaaagaccagcttgtttcacaccagaaaactt

SEQ ID NO: 66547 - DNA, 579 bp, Homo sapiens
ggcacgaggatgagaaagacaagggggccctagacaacctgctctcccagcttattgctgagttgggtatggataaaaaggatgtctccaagaagaatgagcgcagcgccctgaatgaagtccatctggtagtaatgagactcctgagtgtcttcatgtcccgcaccaaatctggatccaagtcttccatatgtgagtcatcttccctcatctccagtgccacagcagcagctctactgagctctggggctgtggactactgcctgcacgtgctcaaatcactgctggaatattggaagagccaacagaatgacgaggagcctgtggctaccagccagttgctgaaaccacatactacctcctccccacctgacatgagcccattctttctccgccagtatgtgaagggtcatgctgctgatgtgtctgaggcctatactcagcttctaacagaaatggtactgaggcttccttaccaaatcaaaaagattactgacaccaattctcgaatcccacctcctgtctttgaccaatcaaagttttactttctctccgagtacctcatgatccagcacgaaa

SEQ ID NO: 66548 - DNA, 1327 bp, Homo sapiens
tgatagacatgttgagaccctttgtattcattttcttggacccagcactggcagtacagcaaagacggggggccgtaactggctgaagactggcaactgcctctatggaaacacatgtagattcgtacatggcccttcacctcgtggtaaaggttatagcagcaattatagaaggtcaccagaaagacctacaggggatcttagagaaagaattaagaacaagcgccaagacgtggacactgagccccagaaacgaaatacagaggagtcatcctcacctgttaggaaagaatcttcaagagggagacatagggaaaaggaagacataaaaatcactaaggaaagaactccagaaagtgaagaagaaaatgtagaatgggaaactaatagagatgattctgacaatggagatattaattatgattatgttcatgaattgtcattggaaatgaagcgtcagaagatacagagggaattaatgaagctggaacaagaaaacatggagaagagagaagaaattatcattaaaaaggaggtttcaccagaagtggttagatcaaaattgtccccgtcaccttctctaagaaagtctagcaaatctccgaagcgaaaatcaagcccgaagtcgtcttcagctagcaagaaagataggaagacatctgcagtatcttctcccctgttggaccagcagagaaattcaaaaaccaaccaaagtaaaaagaaaggaccacgtactcctagtccaccccctcctataccagaagatatcgctctggggaaaaaatacaaagaaaaatataaagtaaaagacaggatagaagaaaaaacaagagatggaaaggacagaggacgagattttgaacgacaaagagaaaagagagacaagccaaggtctacttccccagcaggacagcatcattctcctatatcttctagacatcactcatcttcctcacaatcaggatcatctattcaaagacattctccttctcctcgtcgaaaaagaactccttcaccatcttatcagcggacactaactccacctttacgacgctctgcctctccttatccttcacattctttgtcgtctccccagagaaagcagagtcctccaagacatcgctctccaatgcgagagaaagggagacatgatcatgaacgaacttcacagtctcatgatcgacgccacgaaaggagggaagatactaggggcaaacgagacagagaaaaggactcaagagaagaacgagaatatgaacaggatcagagctcttctagagaccacagagatgacagagaacctcgagatggtcgggatcggagagaa

SEQ ID NO: 66549 - DNA, 1632 bp, Homo sapiens
acagaaaaccctgaaaaacctatgacatgatcaccagtttcactggactgactattaggaatttgggcctggaagacaacaattcagttcgagattctggtacacaagcgtgtgagcgtcccccaaggctagtgtgggcatggcccctgaggtgagcacggactcattccctgtggtgagcgtggacgtgtcgcctgtggtgagcacatatgattctgagatgagcatggacgcatcccccgagttgagcatagaagcactcccgaaggtggacctggaaacagttcccaaggtgagcatagtagcatccccggaggcgagcctggaagcacccccggaagtgagtctggaagcactgccagaggtgagcgtggaagcagccccagaggggagcctggaagcacctcccaaggggagcgcagaagtagcccccaaggagagtgtgaaagggtcacccaaggagagcatggaggcatctcctgaggcgatggtgaaagcatcccccaagacatcccttgaagcaagcatggaagcatctcccaaggcaaaagcgagagacgctccaaagaaatcagaaatggacaaacaggccttaatccctattgccaagaagcgtctatcatcatacactgagtgttataaatggtcatcatctcctgcaaatgcttgtggtctgccgtctcccatcagcactaacaggcaaatccaaaagaactgccctccatcaccattaccacttatttcaaaacagtcaccacagacttcttttccttataaaataatgcctattcaacacaccctgtctgtgcaaagtgcatcaagtactgtcaaaaagaaaaaagaaacagtttctaaaaccactaacagatgtgaggctttgagccaaaggcatatgatctatgaagagtctggtaataagagtactgcaggtattatgaatgccgaggcggcaacaaaaattttgacagaattgcgccgccttgctcgtgaacaaagagaaaaagaggaagaagaaagacaacgggaagaaatgcagcaaagggtcattaagaaatcaaaagacatggcaaaggaagcagttggaggccaagcagaagaccacttgaaactcaaagatgggcagcaacaaaatgagactaaaaagaagaaaggatggctggatcaggaagaccaggaagcaccactgcagaaaggggacgccaaaataaaagctcaagaggaagctgacaaacgcaagaaagaacacgagagaattatgttacaaaatttacaagaacggttagaaaggaaaaagagaatagaagaaattatgaagcggacaagaaagacagatgtgaatgcctcaaaggtcacagaaacatccagccatgacatatatgaagaggctgaggctgacaacgaagaaagcgacaaggactcattgaatgaaatgtttccatcagccattctaaatggcacaggctcacctaccaaatttaaaatgccgttcaacaatgccaagaaaatgacacacaagctggtatttctagaagatggtaccagccaggtccgtaaagagccaaaaacatattttaatggcgatttgaaaaacttcagacaaaaaagcatgaaagacacttcaatacaggaagt

SEQ ID NO: 66550 - DNA, 420 bp, Homo sapiens
ctcagggattgaggatggtattcccagggctttagggcttaggcctattggggaaggaaaacaccatggctcaccatcagctctttctggcctacaccaggatctccctactacgataatgtccgtccactctgctacagcgactcggatgcagtattactatgttttgacatcagccgtccagagacaggggacagcgcactcaagaaggtaagactagatcaactctctaatctctaactcagcatgaggaccaagaaggaatcgggaccttgtcatgaatgccctcttgtataacatcaagaaatggaagccagggaaggaagagatttgcccaaggccacaccattagctacagctctgggactggaacttgggtctccttaccccactgcctcccgccctttttgttatcccatg

SEQ ID NO: 66551 - DNA, 414 bp, Homo sapiens
tatacactacgtagccattatgatggagcacgggcattaacttttcatcctgaagaacctgggctgggtactgcttctgaggaccataccctgaaactttggaacctgcaaaaaacaggtcctgccaaaaagcaagtattttagtgttagcctggtgtatttcttccaattttgctaatataagcaattattcctcattattgatgcatgtctttaatgcacacatttgatctagtgactatttaatatcaaccagcgattcatagttatttaaatgccttctcttcccctaccctttttccccctcttttaagagtgcctctttagatgtagagcctatctacacatttagggcccacatgtaagttttactgagttggggtttaattaacatcatcattattgttaaatatt

SEQ ID NO: 66552 - DNA, 591 bp, Homo sapiens
agactgccgcagcgactcatcctatcgataaggttcagttagccaaggtggaggatgggaaaagaatggaactgtcccagctactcaatgagatcagggcaaactatgaaaagatcctcaccagaaatcagatagagacggtgctctcaacaaggatccagctagaagaagacataagcaaaaaaatggacaaagatgaagaggctttgaaggcagctcaagcagaactcaaggaggcccgacgccagtggcaccacctgcaagtggaaattgaatctctccatgctgtggaaaggggccttgaaaactccctacatgccagcgagcagcattaccagatgcagctgcaagacctagagactgtgattgaaggactagaaaaagagctacaggaagtaaggcgcggcatcgaaaagcagcttcaagagcacgagatgcttctcaacacgaagatgaggctggaacaagaaatagcaacttatcgccacctcctagaaaaagaagaaatcagatattatggttgtatccaaggtgggaaaaaaagacaaaaagcctaccacaagtagagttggttttgttttaccatcaccc

SEQ ID NO: 66553 - DNA, 401 bp, Homo sapiens
ggcgctaccatgggccaacatttgccaaggctgctcaggattactgtggcatggcttggtcggtactaactcagagattcaagaatggcctcttttcatcacatgcagatgagcatcgactcaaatatcagtgttttaaatcggcttggatgtaccaagtcttacatgaaggattccactttccctatgactacccaaacctgcggacagcccagctggtgtatgaccgagaggttcagtggacgctgggagccattctatataaaacacgattcttaccactcagggatcttcggcaggaaggtgtccgacaagcccatggtagctggttccgtctctcctttgtatacaaccactatctcttctttgcctgtatcctggaggggctactggccatcttc

SEQ ID NO: 66554 - DNA, 1386 bp, Homo sapiens
ttttttttttttcagagttctaataatattttattttattcctatgaatgtaaatcataaattttgatgttttaaaaatcctaaatggtttaaaggacttaccgagacttgattaacccagtttttaaaataaaaaatcaaattataaatttattttataaaaataactgccagttttgcatagtaatatagtaacaaatcaacactcttcaaagtttaaaggaaaagggaagctggtattggtttctgtctgaagtcagatctaacttttacgaagacaatagtttcagatcagaatcaaataaatttcagaactcagtttgagagaaaaggaaaaactttagttaaaatctttacaataaaataattatgactataaatctctttagttaaatatgtacacattacatggtatttgtataaagaatggaaatggataaagtttttcaggcaaatctaatgcacaaatacaccatcttttagagtataatgtcagtttatcattcgttaacagctgtgttagacagtggctctgctttgtgcaaaacgtgataaacaaaattaggaaaaattctgcaaaattatttagttccccaaggaaattactaaaatagaaaatggcaaaagaaaaaaaggttgcacactgaagcttgattgtatactcaggctacaatgaccagcactgatgtaacccccatatctgctaagtccttgggtagctttagtctgaagtaaaaactgaagtcctagcaattgtgctttttatgcagccacatggccaataaggtagatattgtcataaagatgccctacaaaatcttcactaatattttgagcagcgcgacgggtatttcgaataaattccctttttgacattttattcttcacatgagggctagtgaggtcaatggaaagtagaatcaaagagtagcacagtacatagacagcatcaggactaaggccaagttctcgcattaaatcagggttgcaagcacagaatctatgtgagaactttgttataagagtttcaagatactctccacgctcttcaggggcatggatatgacgaaaaaattctctcagtgcatttggcaagaactgatttctaaaattatgcaatgttacaaggtcatccaagacatctctcctttcatcaagatagattctcagttttttccaatttagtgttcttgtacagaagataaactttgctatttcctttggcgaatcatccaggatacccttggacataaagtagttcactcccacaaactgtgcagatgttctcccccaccccatgagccactgccagcagctgctgtggagcttggttacccatatccgtgacatgaacgcctcgtgccaagcttggcgtaaggaggttct

SEQ ID NO: 66555 - DNA, 653 bp, Homo sapiens
tccgaaactctccgatgaacaccacgccaagcttggcacgagggtgaagactttgtaagtgtatcaccgcagcacctccataagcttttgtcctccagtgatctaaatattgaaaatgaaaagcagggctataatgctgccatcaagtggcttcttgccaatcctcagcatcattccaaatggttggatgaaacacttgcacaggttcgcctgccattgttgccggttgattttcttatgggtgttggggcaaaagaacagattgtcaagcaaaatctaaaatgtagagatttactggatgaagcaagaaattaccaccttcacttgagtagcagagcagtacctgactttgaatactccattcggactaccccaaggaagcatactgctggtgtgctgttttgtgtaagtggtcgaggtggatctggtgacccctttcgcagtattgaatgctattctatcaacaaaaacagttggttctttggaccagaaatgaatagtcgaaggcgacatgtgggtgtaatctctgtggaaggtaaagtgtatgcagtaggtggacatgatggaaatgaacatttagggagtatggagatgtttgatcctctcactaataaatggatgatgaaggcatcaatgaacacaaagaggtagag

SEQ ID NO: 66556 - DNA, 801 bp, Homo sapiens
ggaaagtctaaatgctgtaactagcaattggcaaaagcaagtggacaaggcattggagaaactcagagacctgcagggagctatggatgacctggacgctgacatgaaggaggcagagtccgtgcggaatggctggaagcccgtgggagacttactcattgactcgctgcaggatcacattgaaaaaatcatggcatttagagaagaaattgcaccaatcaactttaaagttaaaacggtgaatgatttatccagtcagctgtctccacttgacctgcatccctctctaaagatgtctcgccagctagatgaccttaatatgcgatggaaacttttacaggtttctgtggatgatcgccttaaacagcttcaggaagcccacagagattttggaccatcctctcagcattttctctctacgtcagtccagctgccgtggcaaagatccatttcacataataaagtgccctattacatcaagtaagttgattttaattctcctttatgataccaagaaaatcatgttttattgataacttaagaggcttctccccccataacttttaaaaatagaattcagtcctattatctgaaagaaactgtgatatagttaatattaaaaagaaactacttttaacatgagaattatatttttcatgtatcagattagggatataggtgtgtttagctgatatattttaaagtagagatttaaatatttggagacagacaataagctatgatggccgtactgtattccagcctggacaacaaagcaagatccagtctctaaaaagtaaa

SEQ ID NO: 66557 - DNA, 840 bp, Homo sapiens
cagcacacagaattaaaatacagacatttaatagatatgatttgcagattccagaattgtgttttaatatcatgcttttcacagtaagtcatattaacacctccttcttaatattacacagttgtgacacctagtctcttggctaattgctgggttctgaaattttcaatagataaattttatatatttgtacctatgagtgtattatattgcctattctgttattctgaatcactaaactaatgtatatgggatattcagcaatacttaaacagaagacgacaaaatgaaataatggccaaaatccaagcagctattatacagattcctaaacctgcatcaaatcgtactttgaaagcactcgaggcccaaaaaatgatgaaaaagaaaaaagaggcagaagatgtggctgatgaaattaagaagttcgaagcattaataaaaaaggatctccaagcaaaagaaagtgcatccaagacttctttagatacagcaggccagacaaccaccgatttgttaaatacttactcagatgatgagtacattaaaaaaatccagaagcgccttgaagaagatgcttttgcacgagagcaaagggagaaaagacggcggaaattgttaatggaccagttaatagcccacgaagcacaagaggaggcttatcgggaggaacagctgattaaccggctgatgcggcagtcccagcaggagcgcaggattgccgtgcagctcatgcatgttcggcatgaaaaggaagttttatggcaaaacagcattttcagagaaaatcaacatgaggaaagacgaaataaagatttccaggatgctcttgatcgagaa

SEQ ID NO: 66558 - DNA, 537 bp, Homo sapiens
aaaagcggcgcggctcgttcaagatggcggagctcgaccagttgcctgacgagagctcttcagcaaaagcccttgtcagtttaaaagaaggaagcttatctaacacgtggaatgaaaagtacagttctttacagaaaacacctgtttggaaaggcaggaatacaagctctgctgtggaaatgcctttcagaaattcaaaacgaagtcgacttttttctgatgaagatgataggcaaataaatacaaggtcacctaaaagaaaccagagggttgcaatggttccacagaaatttacagcaacaatgtcaacaccagataagaaagcttcacagaagattggttttcgattacgtaatctgctcaagcttcctaaagcacataaatggtgtatatacgagtggttctattcaaatatagataaaccactttttgaaggtgataatgacttttgtgtatgtctaaaggaatcttttcctaatttgaaaacaagaaagttaacaagagtagaatggggaaaaattcggcggcttatgggaa

SEQ ID NO: 66559 - DNA, 436 bp, Homo sapiens
  misc_feature (1)...(436): n = a,t,c or g
ctccctccttctccctcctcttccctccctccttctccctccttctccctcctcttgcctccctccttctccctcctcttccctccttctccctcctcttccctccctccttctccctcctcttccctccctccttctccctcctcttccctccctccttctccctcctctttcctccccccttctccctcctcttccctccctccttctccctccttgtgcatccaagtccctccctcgtagtacttacaccttcatccttgtgcctgctgaaaactaactcttactggattataatgaccttaattccttttgactctggaaagacaacttaacttagtttttccacatcattaaaaatatagaacctccngtatgagaaaaaaacagtttttaaaacatcttaaatttaacgccaaactacatgctaagcttt

SEQ ID NO: 66560 - DNA, 659 bp, Homo sapiens
  misc_feature (1)...(659): n = a,t,c or g
tctctctttgccagtaatgttggaagtggacatttcattggcctggcagggtcaggtgctgctacgggcatttctgtatcagcttatgaacttaatggcttgttttctgtgctgatgttggcctgggtcttcctacccatctacattgctggtcaggtcaccacgatgccagaatacctacggaagcgcttcggtggcatcagaatccccatcatcctggctgtactctacctatttatctacatcttcaccaagatctcggtagacatgtatgcgggtgccatcttcatccagcagtctttgcacctggatctgtacctggccatagttgggctactggccatcactgctgtatacacggttgctggtggcctggctgctgtgatctacacggatgccctgcagacgctgatcatgcttataggagcgctcaccttgatgggctacagtttcgccgcggttggtgggatggaaggactgaaggagaagtacttcttggccctggctagcaaccggagtgagaacagcagctgcgggctgccccgggaagatgcctttcatatttttcgagatccgctgacatctgatctcccgtggccgggggtcctatttggaatgtccatcccatccctctggtactggngcacggatcaggtgaa

SEQ ID NO: 66561 - DNA, 2024 bp, Homo sapiens
  misc_feature (1)...(2024): n = a,t,c or g
cgacccacgcgtccgctttgttcctcgaacttggatctttcctgctgaatatactcaattccaaaattatgtgaaagaattgaagaaaaaacggaagcagaaaacttttatagtgaaaccagctaatggtgcaatgggtcatgggatttctttgataagaaatggtgacaaacttccatctcaggatcatttgattgttcaagaatacattgaaaagcctttcctaatggaaggttacaagtttgacttacgaatttatattctggttacatcgtgtgatccactaaaaatatttctctaccatgatgggcttgtgcgaatgggtacagagaagtacattccacctaatgagtccaatttgacccagttatacatgcatctgacaaactactccgtgaacaagcataatgagcattttgaacgggatgaaactgagaacaaaggcagcaaacgttccatcaaatggtttacagaattccttcaagcaaatcaacatgatgttgctaagttttggagtgatatttcagaattggtggtaaagaccctgattgtagcagaacctcatgtcctgcatgcctatcgaatgtgtagacctggtcaacctccaggaagcgaaagtgtctgctttgaagtcctgggatttgatattttgttggatagaaaactaaagccatggcttctggagattaaccgagccccaagctttggaactgatcagaaaatagactatgatgtaaaaaggggagtgctgctaaatgcgttgaagctactaaacataaggaccagtgacaaaagaagaaacttggccaaacaaaaagctgaggctcaaaggaggctctatggtcaaaattcaattaaaaggctcttaccaggctccccagactgggaacagcagagacaccagttggagaggcggaaagaagagttgaaagagagactcgctcaagtacgaaagcagatctcacgagaagaacatgaaaatccgacatatggggaattatagaccgaatttatcctcctgaagataaagcattacttgaaaagtatgaaaatttgttagctgttgcctttcagaccttcctttcaggaagagcagcttcattccagcgagagttgaataatcctttgaaaaggatgaaggaagaagatattttggatcttctggagcaatgtgaaattgatgatgaaaagttgatgggaaaaactaccaagactcgaggaccaaagcctctgtgttctatgcctgagagtactgagataatgaaaagaccaaagtactgcagcagtgacagcagttatgatagtagcagcagctcttcagaatctgacgaaaatgaaaaagaagagtaccaaaataagaaaagagaaaagcaagttacatataatcttaaaccctccaaccactacaaattaattcaacaacccagctccataagacgttcagtcagctgccctcggtccatctctgctcaatcaccttccagtggggacacccgcccattttctgctcaacaaatgatatctgtgtcacggccaacttctgcatctcggtcacattccttaaaccgtgcttcctcctacatgaggcatctgcctcacagtaatgatgcctgctctaccaactctcaagtgagtgagtctttgcggcaactgaaaacaaaagaacaagaagatgatctaacaagtcagaccttatttgttctcaaagacatgaagatccggtttccaggaaagtcagatgcagaatcagaacttctgatagaagatatcattgataactggaagtatcataaaaccaaagtggcttcatattggctcataaaattggactctgtaaaacaaccgaaaagttttggacatagtgaaaacaagtattcgtacagttcttccacgcatctggaaggtgcctgatgttgaagaagtaaatttatatcggattttcaaccgggtttttaatcgcttactctggagtcgtggccaaggntgttggaactgtttctgtgattcaggattcctcttgggag

SEQ ID NO: 66562 - DNA, 395 bp, Homo sapiens
atccgggcccggaactaccagcttggccagggcattgtggatggggacatcccgccccgggtgaagaaggacgctcacgagctcatcctggactttatccgctcacggcctccactgaagcaggtctctgagaggcggctgcgcccgttgccaccaaagcaaaggtccctgcatgagaagatcctggaggagatcaagcaggagcggaggctgcgcccggtgcggggcgagggctgggctgcccgcgggtttggctctctgccctgcatcctcaacgcctgctccggagatgccaagtccacctcctgcatcaacctgtcagtcacagatgctgggggcagcgcccagcgcccgcggccccgcgtgctgctcaaggcgcctaccttggctgaaat

SEQ ID NO: 66563 - DNA, 826 bp, Homo sapiens
  misc_feature (1)...(826): n = a,t,c or g
cggacgcgtgggacaagcttcatcaaacccagaagtcatcaagataaattcaattctggatatagtaacaaaagtggaaaactattatcttaaaggatatattgtcggggctattcatcctgttatacaacctgtggggcagcgaaaacacctacctgcaagttacctatacagagtggtgctattgcgcttgaaattaagcccaaagaattcggcagcacccagtggacaaagacgcccaaggctcgtgattgaggaatgtcccctaacttctgaggcacaaacaaatgacgcagcaaaagaactgatagaaaagattaatgtcgctgctaaaagaggaatgaaatttgttggattcatatcacagcattattctccatctaaattctgcaatggaaccaaccatgatggagatatagaatcgatgctacatgtgagacacggttcagatgaaaactgtagaagttggaatgaagggacgttaagtgggcagtcatctgaaagcggaattgaggaagaacttcatcatgaaagtggacagtatcaaatggaacaaaatggcagccctacttcctctaaatcaagaaagggagaagcctcagataacaaattgtatacagtcttcaatgcttttgatgatgattcaacctcctgggcctatcaggaaggcatcctgtcaatgaaagtaacaagaaaaggatcagtcattagtacacttgatgctgattggctgggagttaactaccttttattattaaacaaggcttgtctttaatttgattcttttgtattctggggaaacatcttaaagggggaaccntttgcc

SEQ ID NO: 66564 - DNA, 1114 bp, Homo sapiens
ctggaacatgcagcagctttgcgggccctacaagatcaggtatccatccagagtgcagatgcacaggaacaaggggaagggcttttggctgaaaacaatgccttgaggactagcctggctgccctggagcagatccaaacagcaaagacccaagaactgaatatgctccgggaacagaccactgggctggcagctgagttgcagcagcagcaggctgagtacgaggaccttatgggacagaaagatgacctcaactcccagctccaggagtcattacgggccaatagtcgattgctggaacaacttcaagaaatagggcaggagaaggagcagttgacccaggaattacaggaggctcggaagagtgcggagaagcggaaggccatgctggatgagctagcaatggaaacgctgcaagagaagtcccagcacaaggaagagctgggagcagttcgtctacggcatgagaaggaggtgctgggggtgcgtgcccgctatgagcgtgagctccgagagctgcatgaagacaagaagcgtcaggaggaggagctccgtgggcagatccgggaggagaaggcccggacacgggagctggagactctccagcagacagtggaagaacttcaagctcaggtacattccatggatggagccaagggctggtttgaacggcgcttgaaggaagccgaggaatccctgcagcagcagcagcaggaacaagaggaagccctcaagcagtgtcgggagcagcacgctgccgagctgaagggcaaggaggaggagctacaggatgtacgggatcagctcgagcaggcccaggaggagcgggactgccacctgaagaccattagcagcctgaagcaggaggtgaaggacacagtggatgggcagaggatcctggagaagaagggcagtgctgcgctcaaggacctcaagcggcagctgcatttggagcggaaacgggcagataagctgcaggagcgactgcaggacatcctcactaacagcaagagccgctcaggccttgaggagctggttctctcagagatgaactcaccaagccggacccagacaggggacagcagtagcatctcctccttcagctaccgggaga

SEQ ID NO: 66565 - DNA, 372 bp, Homo sapiens
tttctcaccagtatgaattctacgatgtcgagcaagttctgcatgaaaactaaaggacttaccacattctttacattcgtagggtttttcaccagtatgaattttctgatgttgaacaaggtatgagccatgactaaaggccttcccacattcattacatttatagggtttgacaccagtatgaattttctgatgttgactaatatgtcgttgtaccctaaaggtcttgccacaaaccttacattcataaggcctctcaccagtatgaattctttgatgttcagttagttgataatgaagtctaaaggccttcccacattctttgcattcatagggtctctctccagcatgaattgtctgatgtactctaag

SEQ ID NO: 66566 - DNA, 974 bp, Homo sapiens
ctggagcggacccgccggacgctaccgcctttccagccggagccagcgcgagctcggcacgggggacacccggtccgaggccggcaagccggctggtgcccgagtcggccaagcatgggcaaccactcaggacggcccgaggatccggaaccaggtggaaaaggattattcatacctgaaggagatatgtgatcaccaagccgaacagctgagcagaaccagcctaaagctgcaagaaaaagcatcagagagtgatgcagagatcaaagacatgaaagaaaccatatttgaattggaagatcaggtggaacagcaccgggctgtcaagttacacaataatcaactcatcagtgagctagaaagtagtgtgatcaagctggaggaacagaagtcagacctggagaggcagctgaagactctgaccaagcagatgaaggaggagaccgaggaatggaggcggttccaggcggatctgcagaccgcagtggtggtggccaatgacatcaagtgtgaggcccagcaggagctgcgcaccgtgaagaggaaactgctggaggaggaggagaagaatgcccggttgcagaaggagctgggggatgtgcagggccacggcagggtggtcaccagcagagccgcccctccacctgtggatgaagagccagagtcctctgaggtcgatgctgctggtcggtggcctggtgtctgtgttagcagaacatctccaacacccccagagtcggcaaccaccgttaagtcacttatcaagtcatttgacttgggacgcccaggtatttaatcattttttctataagcaaagctccaaattcaaactttggcccgacatttgatatgtctactatctctactccaccctggccctgtgttgttacaaccacaagggcgctttccaggtcctaccacgtgcagccactgcatgcaggagcctggctgaggctccagggaggcactgatgg

SEQ ID NO: 66567 - DNA, 1033 bp, Homo sapiens
  misc_feature (1)...(1033): n = a,t,c or g
cccacgcgtccggatgtgtgctcacacttgggggacctgattggggcttcagaccttgggggcctgtccgcagggtctcctccatccttcttgatttgcctgtcattgaggctgcccgctctgggcgccattccccagcctaacacctcttctcagtctttccttgcaggtccctggagtccaggccttggggcagtgaagaaaccgtggggaggggcatgagatgccagtccccaaagtccttgggagcccttgtgggccaagtcattgtaggacacaccctctcctgggcattgctgaggtcacccagtgagcctaggctcccccctcctcccatccccagcctgggggaaccttcagcgtctctcctccctgtaggccccggctcagcttcccaggaacttttgttggtgggtactagtagggtaaggcagttcttcccatcatgagggagaccttgggagactttcattaccaaatccattgctgccccgaccttcctgggactgatctgggtcaccctggtctcctgatcttggagaagtcaagttcttatcccagacttgagaggttacaagcctccaggtctctggcaaagtgtggagatgatggacagccatttgtacacacaccagccagtcccttagcatatctctcttggttttgtctcaggtctgcctcagccacctccctgacgctgtcccactgtgtggatgtggtgaaggggcttctggattttaagaagaggagaggtcactcaattgggggagcccctgagcagcgataccagatcatccctgtgtgtgtggctgcccgacttcctacccgggctcaggatgtgctgcagcctcctggccactggaggggctgaccgcctgatccacctctggaatgttgtgggaagtcgcctggaggccaaccagaccctggagggagctggtggcagcatcaccagtgtggactttgacccctcgggctaccaggttttagcagcaacttacaaccaggttgcccagttttggaaggtngggga

SEQ ID NO: 66568 - DNA, 372 bp, Homo sapiens
agcgtgtgaccttaggaatcaatggggctgtactgaatccccgagtaaatatcttggttcgaggagaagtttacaaatgctctcttgagccagtgtttcaaactttctatgatgaactaaatgtgccaataacagaatttccaggaaaaacaagaaatttgtttttgcaattagccgagcatgtagcccagtctctcactgtcacttcatgttatgtatgtggaggaactgtaatagcagatcaatggccatgggaagcccgagaattagtacctacagacccagttcctgatgaattcccagctcaaaagaatcaccctgataatttctgggtcctaaaagcctcaatcattagacaatactatatagcag

SEQ ID NO: 66569 - DNA, 425 bp, Homo sapiens
caataaccatatcaaacaacacggtcagcgacatgcacagcagcatgacgatgatgtcatctttcggcgcatgacgcagcaagtcgaccactttgtgcgcttcactcatgttccacgccaccatcaacagcagggctgccatggcggaaagcggcagccaggagagcagcggtgccagtaccagcagggcaagaataaccagaatagagtggatcaccgccgagataggggacgttgccccggcacggacgttagcggcagaacgcgcgatggcagctgtagcggtaataccaccaaagaacggagcgataatattccccagtccctgtccaaccagttcgctgttcgccttgtgtttcgtcccggtcataccatccagcaccacggcgcagagcagagattcgattgcgccgagcattgccatt

SEQ ID NO: 66570 - DNA, 335 bp, Homo sapiens
gtcaaaaacgatttcctagcaactgtggccgtgatggaaaactgtttctttggggacaagcacttcatatcatcgcaaaactcctgggtaagtggagaagattgggaatggtatttttttccttgttattaagctattagaaataaatatgcctttgctggcacataatagtactttggtacaacaggatatcctatggagtttaaaaataagtatttaaaatataacaaatctgtattagtccattctcatgctactaataaagatatacccaagactgggtaatttataaaggaaggagttttaatggcctcacagttccgtcgacgcgggcg

SEQ ID NO: 66571 - DNA, 592 bp, Homo sapiens
cctgacctcctctgtggacctgtactttggggcgcaccatcccctccatgtgacaatgttgcccaatccctcgcacctggaggccgtcaaccccgtggccgtgggcaaaactcgcggcaggcagcagtctcgccaagacggcgattactctccagacaactcagcccagccgggggacagggtcatttgcttacaggtccatggtgatgcttttttctgtggtcaagggattgttcctgaaacattcacgctgtccaatctcccacatttcaaaattggtgggagtgtgcatttgattgttaataaccagctgggttacaccactccagctgaaagaggaaggtcttctttatactgcagtgatattgggaagcttgtgggctgtgccatcatccatgtcaatggagacagcccagaggaagtggtccgtgccacacgactggcttttgaataccaacgccagttccgcaaggatgtgattattgatctgttgtgctacagggcagggggccacaatgagctggatgagccattctacaccaaccccatcatgtacaaaatcatcagagctcggaagagcattccagacaca

SEQ ID NO: 66572 - DNA, 556 bp, Homo sapiens
  misc_feature (1)...(556): n = a,t,c or g
gttcacgtctgcagcagtaagatgggagctttgtccacggagcggctacagtactacactcaggaactgggggtccgggagcgcagtggccacagcgtgtccctcatcgacctctggggcctccttgttgagtatctcctgtaccaggaggagaaccctgccaagctgtctgaccaacaggaggcggtccgccagggtcagaacccttaccccatttacaccagtgtcaacgtccgcaccaacttgagtggggaagattttgcagagtggtgcgagttcacgccctatgaggttggcttccccaagtacggggcttatgttcccaccgagctcttcggctcagaactcttcatgggacgattgctgcagctccagcctgaaccccggatctgttacctgcaaggtatgtggggcagcgcctttgccaccagcctggatgagatcttcctaaagaccgccggctcgggcctcagcttcctggagtggtacagaggcagtgtgaatatcacagacgactgccagaagcctcagctgcacaacncctcgacgcgggaat

SEQ ID NO: 66573 - DNA, 332 bp, Homo sapiens
agattttagacctgctggtgctagaacagttcctgagcattcttcctaaagacctgcaagcatgggtgcgtgcacaccatccagagactggagaggaggcagtgacggtactggaggatctggagagagagcttgatgaacctggaaagcaggtcccaggcaattcagaaagacgggacatactcatggacaagttggcccccttgggaaggccatatgaatcactgactgtccagctccatcccaaaaagacccagctggagcaggaagctgggaaaccacaaaggaatggtgataaaactaggactaagaatgaagagttgttccagaag

SEQ ID NO: 66574 - DNA, 805 bp, Homo sapiens
gcgagagcttcacaaggaagttgaagtagctaagaggaatttggcccaacagaaaattatatcagaaatggagtctaagttagtagaacaacaacttgcagaagaaaacaagcttttaaaggagcaagaaaacatgaaagagctagtagtcaaccttctccgcatgactcaaatcaaaattgatgaaaaggaacaaaagtccaaggatttcctgaaagctcagcaaaaatacaccaacattgttaaagaaatgaaagcaaaggatcttgaaatcaggatacacaagaagaaaaaatgtgaaatttatcggagactgagagagtttgctaaactgtatgacaccattcgaaatgaaagaaacaaatttgttaacttactccacaaagctcatcagaaagtaaatgaaataaaagaaaggcataaaatgtcattaaatgaacttgaaattctgagaaatagtgccgttagtcaagaaagaaagctacaaaattccatgctgaaacacgccaacaatgttaccatcagagagagcatgcaaaacgatgtgcgcaaaattgtatcaaaacttcaggaaatgaaagaaaagaaggaagcccagttaaataacattgacagacttgccaacacgatcacaatgatcgaagaggagatggtgcagcttcgcaaaagatacgaaaaagctgttcagcatcgaaatgaaaggaggggtctttctcctggcatgattacaaaggatagatttttgcctgtttatggggaaatcacaaccagaaatattcaacttgagaagaaactaatgggccta

SEQ ID NO: 66575 - DNA, 418 bp, Homo sapiens
ggagaactggctcccaatgatagatgttgccgtgtgtgtggaaaaataggccactacatgaaagactgccctaaaaggaaaaggttggcaaatgaatatatatcaacattttgaggaaaataaatgagaggccaatttgtagctataattatgttcagaaatgtttaactgagaaagtttagggtatttaattatacctaaggtaaatgttcatttgagtggaattttgtaatagggtaagatttgcatgtggtataatagtatcttctaacattcatttgttcatttattcattaattcactcagtttttttttggttttggttttggttttatttttgttttttttgagacggcatctcgccctgtcgcccaggctggagtgcaatggtgtgatctcggctcactgcatcctccgc

SEQ ID NO: 66576 - DNA, 631 bp, Homo sapiens
cttacttatcctttccctcatcctttccctcatcctttccctcatcctttctctcatcctttccctcatcgtttccctcatcctttccctcatcctttccctcatcctttccctcatcctttccctcatcctttccctcatcctttctctcatcctttccctcatcgtttctctcatcctttccctcatcctttccctcatcctttccctcatcctttccctcatcgtttctctcatcctttccctcatcctttccctcatcgtttccctcatcgtttccctcatcgtttccctcatcctttccctcatcctttccctcatcctttccctcatcctttccctcatcctttccctcatcctttccctcatcgtttccctcatcctttccctcatcctttccctcatcctttccctcatcctttccctcatcctttccctcatcctttccctcatcctttccctcatcctttctctcatcctttccctcatcctttccctcatcctttctctcatcctttccctcatcctttccctcatcctttccctcatcctttccctcatcctttccctcatcctttccctcatcgtttccctcatcctttgcgggacgcgtgggacgacccagaaattc

SEQ ID NO: 66577 - DNA, 667 bp, Homo sapiens
ggaaaaacaagcaacagatgacattatcaaaaatatgtcttttgaaaaccaagtcaagtacctagagatgaaaaccacaaatgagaaactgttacaggaattagatacacttcaacaacaattggattcacagaacatgaaaaaagagagcctggaagcagaaatagctcactcccaggtgaaacaggaggcggtattgctgcatgaaaaactttatgagttggagtcccatcgagatcaaatgattgcagaagacaaaagcataggatctccaatggaagagagagagaaattacttaagcagattaaagatgataatcaggaaatagccagcatggaaagacagttaacagatacaaaagaaaagataaatcagtttattgaagaaattagacaacttgacatggatttagaggaacaccaaggtgaaatgaaccagaaatacaaggagctaaagaaaagggaggaacatatggacacttttattgagacttttgaggaaacaaagaatcaggaactgaaacgaaaggcacagatagaagccaacattgttgcactcttggagcactgcagtcgaaatataaatcgtatagaacagatatcctctatcaccaatcaagagctaaagatgatgcaggatgacctcaattttaaatctactgaagcg

SEQ ID NO: 66578 - DNA, 360 bp, Homo sapiens
tgatattgccttaaaagatgctgaaaaagttcacttcatcctagtggaaaaggtgaccacaagattcaaggtggatggaaaacacagaaagaaaaattcagtgtttgaaagacttcaaattgatattcaacacttgtgtttgaacaagattcctgtgctaagagaagaaaaactacctgtggtaggaattggaaagcatctgtgtggtatggcaacagatcttgcattacgatgtttggttgaaacctatgctgccagttttgaggaaaggaatgaagaacctttagccaaacgcataaagaatgataaaacagaaaaagaaatttacactttggccaaggaaggaaatgaaaaaaatgt

SEQ ID NO: 66579 - DNA, 924 bp, Homo sapiens
ccaaaatatcaaactcctctgaaggtgaagcccagagtgaacatgagccatgttttatagttgactgtaacatggagacgtctacagaagagaaggaaaacttacccggaggatacagtggaagtgttaaaaatagaccaacaaggcatgatgttttagatgactcatgtgacggctttaaggacctcatcaaacctcatgaggaattgaagaaaagtgggagaggcaaaaagccaacaagaacattagtcatgacaagcatgccatctgaaaagcagaatgtcgtcatccaggttgtggataaattgaaaggcttttcaattgcaccagacgtctgtgagaccacgactcacgtgctttccgggaagccacttcgcaccctgaatgtgctgctgggaattgcgcgtggctgctgggttctctcttatgattgggtgctatggtctttagaattgggtcactggatttctgaggagccgttcgaactgtctcaccacttccctgcagctcccctgtgccgaagtgagtgccacttgtctgcagggccgtaccgcggaaccctctttgccgaccagccagtgatgtttgtctcgcctgccagcagccccccagtggccaagctctgtgaactagtccacctgtgcggaggccgggtcagccaagtcccccgccaggccagcatcgtcatcgggccctacagcggaaagaagaaagcaacagtcaagtatctgtctgagaaatgggtcttagattccatcacccagcacaaggtctgtgcccctgaaaactacctattgtcacaatgacagtgacctcactggcctgtggtgactgcacacagctcgcaaaactgtctttggatgttcaaatgagaaacaaaactgtgaagagaaggaactggcgtatacaagatgacttctagat

SEQ ID NO: 66580 - DNA, 351 bp, Homo sapiens
cgggaacatttctacttacaggcattcacctgggagctggggtcaggacacttgccttttcttttgctttgctttcgttcttcatccctgattttccgctcagctcccttgtcacagaagaccttgatctggcagtaggcccggtgcacaggcttgttgctgcggttgttgtaactataggtatcaatttgaatgttaagaggcaaccccttcactcccttctgggaagagaaatctgtgcttaagcagttcacagagatgaaaacctttgcttcatcgttgatgtcccatgtgaaggaaatggcgttatacgcaatctcctcgatgttactgatagtgttgaagctttct

SEQ ID NO: 66581 - DNA, 439 bp, Homo sapiens
ggctggcgtcgtgttctgcttcgatctcttcagcaggaagcggggcaggttcagcgtctggcgtaacaaaggtttcggtagatactgccagcggctggccaattttcgtgacagacaggctttccagttgctcaaccagattcactttacccggtgcaaacaggttgataacggtggaaccgagtttaaagcgacccatttcctggcctttcagcagtgccacagaaccgtcgttttccccggcaggccaggtccagcgcttgatgataccttcgcgcggcggcgtaatggtgcccgcccagaccgtctcaatgctgccaacaatcgtcgctccgaccagaatctgcgccattgggccaaattcggtatcgaaaaggcaaatcacgcgttcgttacgggcaaacagattcggcacgttctgagccgtgagatgggtaag

SEQ ID NO: 66582 - DNA, 543 bp, Homo sapiens
gcaaagggttgttgacttcctccctctcccctcccttcgttccttcttcccgaaggcactcatctgagaaaaagagaacgaagtattgttcctgttctctttcttaagtcattcgaaacactgcccctgcgagttctttaagttccctgcaatctgtacaccctagaaagagggagagagagagggagagagacccacagagcagggatcaggtaaaggagtggggctgctgcagccattcagacctcaggagctgggtgtgaaggagcataagtgtgggatttgtgggcgggagttcaccctgctggccaacatgaagcgacacgtgctgatccacaccaacatccgcgcctaccagtgtcacctctgctacaagagcttcgtgcagaagcagaccctcaaggcacacatgatcgtccactctgacgtgaagcctttcaaatgcaagctttgtgggaaggaattcaaccggatgcacaacctgatgggccacatgcacctgcactcagacagcaaacccttcaagtgcctctattgcccaag

SEQ ID NO: 66583 - DNA, 1092 bp, Homo sapiens
cccacgcgtccggaatgattaatggagaaaccatgaaaatattggtaatttttttttttactaaattttatcactggagattaaaagggtcattgaaaatgattgtaccagggttccttcatgatagacatggggctgagtcttaaagcaaacagggaattcacctccacctcaacattttgttgggcaaattttcaaacataaaggacaatgagaagtattttatagtgaacacttatctacttacctcttagattcaacaatgaatattttattatacttgttgcatatttatccccctacccatccctcttttcttccaacaattgtgaattcatctttgaggtattcattcaacaaacacataggtgctggggatgatttaatttaatcgaagatgattaaagcattcagtcctgtcctccaaagtctcacaacctagtgtagggaaatagacatgaaatatatcattgctgcaaaatgatgagtggcataatacaggtatatgtgaagttcagcagagaaacacgttggaagaaataatctttgactcttgaagtattgtttgaagtttttgggagttaccacgagtgagaaggagtttgcctagcaaagataattctaaacagaaacattagcatttgcaaagatgtggggttaatgttgtgagtgttaaaaagaacatatagtaaaaatgcaaaattggaaacatgtggtctgtatattattgcaactttagtgtaattcctacctcatttgggataaatgtagcatgttttatgttaagggaccatatatcataacacatttttgttctaatatttgatttatgagaaatgtttgttaaatttagatgtcaatgaagagcttccagccagaagaaaacgaaatcgtgaggatggggaaaagacatttgttgcacaaatgacagtatttgataaaaacaggtaatgttgatgaacaagtgaggctcccacaatgttctggaaatgttttcattctgaagcagaatataattatttatattgattatttcattgcctttgtttctttttattcttacggatgaaaaaacaaatttgcaaacactga

SEQ ID NO: 66584 - DNA, 417 bp, Homo sapiens
gcgggcttaaccggcttcccaacccttacttttcacaagataattcatactgataagaaaccctacaaatgtgaagaaggtggcaaagcttttaaccgatcttcaatccttagtatacataagaaaattcatactggagaaaaaccctacaaatgtgaagaatgtggcaaagcttttaagcggtcctcacacctcgctgggcacaagcaaattcatagtgtacaaaaaccctacaaatgtgaagaatgtggcaaagcctttagtatattctcaacccttactaaacataagataattcatactgaagagaaaccctacaaatgtgaaaaatgtggcaaaactttctaccgattctcaaaccttaatacgcataagataattcatactggagagaaaccttgcaaatgtgaagaatgt

SEQ ID NO: 66585 - DNA, 447 bp, Homo sapiens
cgacccacgcgtccgcggacgcgtgggcggacgcgtgggcggacgcgtgggctggcggccattgccctgctggtcctagaggaggaggagagcgccttctggtgcctggtggccattgtggagaccatcatgcccgctgattactactgcaacacgctgacggcatcccaggtggaccagcgggtgctccaggacctgctctcggagaagctgcccaggctgatggcccatctggggcagcaccacgtggatctctccctcgtcaccttcaactggttcctcgtggtctttgcggacagtctcattagcaacatcctccttcgggtctgggatgccttcctgtacgaggggacgaaggtggtgtttcgctatgccttggccattttcaagtacaacgagaaggagatcttgaggctacagaatggcctggaaatctaccagtacctg

SEQ ID NO: 66586 - DNA, 508 bp, Homo sapiens
ctgaaaaaggaccactttctcctaaagttctttttaatcacctttgtcagaaggcacctcgatttaaagatttccagcaacaggacagtcaggagcttcttcattatcttctggatgcagtgaggacagaagaaacaaagcgaatacaagctagcattctaaaagcatttaacaacccaactactaaaactgctgatgatgaaactagaaaaaaagtcaaagcatatggaaaagaaggtgtgaaaatgaacttcatagatcggatctttattggtgaattaactagcacggtcatgtgtgaagaatgtgcaaatatctccacggtgaaagatccattcattgatatttcacttcctataatagaagaaagggtttcaaaacctttactttggggaagaatgaataaatatagaagtttacgggagacagatcatgatcgatacagtggcaatgttactatagaaaatattcatcaacctagagctgccaagaagcattcttcatctaa

SEQ ID NO: 66587 - DNA, 505 bp, Homo sapiens
ggcggcagcagcagccctggacgcagcagccaagctcttcgctggctcccgggggctctcccgggttcctctcattgcaggctgaaggtaatgagaggccctaagatcccagaggatgccataagaggaaaagtcaggggagtgttgaagactctgcctcctacaaatatccatccgcagagccatcctgtgcaaaggaaggagctaggctgtgcgccctgggcgtcatgatccttctgcgggcctccgaagtgcggcagctgcttcacaataagttcgtggtcatcctgggggactctgtgcatagggcagtatacaaggacctggtgcttctgctgcagaaggaccgcctgctcactcccgggcagcttagagcaaggggggagctgaacttcgaacaagatgagctggtggacggaggccagcggggccacatgcacaacggccttaactaccgtgaggtccgcgagttccgctccgaccaccatctggtacgtttttactt

SEQ ID NO: 66588 - DNA, 338 bp, Homo sapiens
ggcaaacgcagctctctgtcagcatccgacgggctgtcagaccagtgctgatcttcactggactcttcctcctcctcgtcatagtcctcctcctcctcctcttcatagtcctcctcctcctcctcttcatattcttcctcctcctcctcctcctcttcattcccaggcccaaagctctttgaggcctctagctcctcttcacttttccctttcagaagggcatggatccgcacggcctccttccacggaacaccacccaggtcagatgggggcaggcgaggctcctcctcctcctcctctccctcctcctccatctcagactcggaactactgctggc

SEQ ID NO: 66589 - DNA, 424 bp, Homo sapiens
gcacgagtgtcagttcttgagatgatgctctggacttaataactttgatcagaccttctaaacccaaatttgaagtgaggaccagaccagaaaatctaggatacatgatggctagagacacaggtgtagcttttaatagatgcaggctaacagctgccattttcccattctctagatacattattctattttcatcttccccagaaccctgcaaggcagtgctttcacttcctgaaagaaactggcaggatagggaccttaccatagaacagagttctgggagaagggaactgaaccaggtcccttgcagctgtccctagacttccctgaccccatccttgcttgctttccagaccccatgccacagctggatgtgactgaggccaacaaggagttcatggaacagagtgaggagctgtatgac

SEQ ID NO: 66590 - DNA, 367 bp, Homo sapiens
agacagagccttcttgggacaggtgacctgccttgtgccagctgccgtattccccatagggggcgctgtcccggcgcttatcctggaggaaagaatggtcacaagaaagatgagcagaacagacccttgcacctcaggccacagcccaagacatgtgctaggcctgaatgatgggccaggctccgagggactcaggagcagatgactgaccatccggggccagaggtggtttcccagagtgggagacactggggcaggccctcaagagccaaactctttctcatgagcgcgggtgaggatctccttgtacaaggtctccgcatcctggtacttgccctgcttcaggtagcaggaagcctggaagcgg

SEQ ID NO: 66591 - DNA, 685 bp, Homo sapiens
ggcacgagtggaggggatgggaacttggagactcacaccacactgcccaacattctgaagaagttcaacccttacctccttggcttctctaccagcacctgggaggggacagcaggactaaatgtggcagcggaaggggccagagctagggacatgccagcccaggcctgggacctggtagagcgaatgaaaaacagccccgacatcaacctggagaaagactggaagctggtcacactcttcattgggggcaacgacttgtgtcattactgtgagaatccggaggcccacttggccacggaatatgttcagcacatccaacaggccctggacatcctctctgaggagctcccaagggctttcgtcaacgtggtggaggtcatggagctggctagcctgtaccagggccaaggcgggaaatgtgccatgctggcagctcaaaacaactgcacttgcctcagacactcgcaaagctccctggagaagcaagaactgaagaaagtgaactggaacctccagcatggcatctccagtttctcctactggcaccaatacacacagcgtgaggactttgcggttgtggtgcagcctttcttccaaaacacactcaccccactgaacgagagaggggacactgacctcaccttcttctccgaggactgttttcacttctcaaaccgcggcg

SEQ ID NO: 66592 - DNA, 513 bp, Homo sapiens
ggcacgagccttcgggagagaaacctcataaatgtactgaatgtgggaagtctttcaatgagaagtcaaccctcattgtgcatcaaagaactcatacaggagagaaaccctatgaatgtgatgtgtgtggaaaaaccttcacgcaaaagtcaaaccttggtgtacatcagagaactcattcaggagagaaaccctttgaatgtaatgaatgtgagaaagccttctctcagaagtcctacctcatgctgcatcagagaggtcatacaggagagaaaccttacgagtgcaatgaatgtgaaaaagcattttcacagaaatcatatctcattatacatcaaagaactcatacagaagaaaaaccctataaatgtaatgaatgtggcaaagccttcagagaaaagtcaaagctcattatacatcagagaattcatacaggagagaaaccttatgaatgtcctgtgtgttggaaagcttttagccagaagtcacagctcataatacatcagagaacgc

SEQ ID NO: 66593 - DNA, 399 bp, Homo sapiens
ggcacgagcgggctggtggacttggtattaatcttacagctgctgatacctgcatcatctttgattcagactggaatccacaaaatgacctgcaggtaaaggaattcattgtcttagggactaactacctaacttgggagatttttcaacaagaataggatcttttagaaagacctttcacagagtttggaattgtttccttagttaagggtggcagttaggtcagggaatcagcaaacgttttctgtaaacgacaagacagtaaatgttttaggctttgtgagccatcgagtctttgttgcaactgcttatctccaagtcctgtagcgcaaaaacagccatagataatatgtaaatgagtgggtggtcccacctgtgtccccattgaactttattttt

SEQ ID NO: 66594 - DNA, 749 bp, Homo sapiens
gaagaactggatacgcagctccttcaagcaagctttcgggaagaagaagtccccaaaatctgcgtcctctcattcagatattgaggagatgacggattcttctttgccttcctcaccaaagttaccacacaatgggtccacaggttccaccccactgctgaggaattctcactccaactctctaatttcagaatgcatggatagtgaagctgagaccgtcatgcagctccgaaatgagttaagagacaaggagatgaagctgacagatatccgcttagaagctctcagttctgcccaccagctggaccagctccgggaggccatgaacaggatgcagagtgaaatagagaagctgaaagctgagaatgatcggctgaagtcagagtctcaaggcagtggctgcagccgggctccttcccaagtgtccatctctgcctccccgaggcagtccatgggcctctcccagcacagcttgaacctcactgagtcaaccagcctggacatgttgctggatgacactggtgaatgctcggctcggaaggaaggaggcaggcatgttaagatagttgtcagctttcaggaggaaatgaagtggaaggaggattccagaccacacctctttcttattggctgcattggagttagtggcaagacgaagtgggatgtgctcgatggggtggttagacggctgttcaaagaatacatcattcatgtcgacccagtgagtcagctagggctgaattcagacg

SEQ ID NO: 66595 - DNA, 445 bp, Homo sapiens
attcatcagagaattcatagtggtgagaaagcatatgaatgtagtgaatgtgggaaagctttcaatcagagctcagccctcattagacatcggaaaatccatactggtgagaaagcttgtaaatgtaatgagtgtggcaaagcattcagtcaaagttcatatctcattatacatcaaagaattcacactggtgagaaaccttatgagtgtaatgaatgtgggaaaacctttagccagagctcaaaactcattagacatcagcgaattcacacaggagagagaccctatgaatgtaatgaatgtggaaaagctttcaggcagagctcagagctgattactcatcagagaatacatagtggagagaaaccctatgaatgtagtgaatgtggaaaagctttcagtttgagctcaaaccttatcagacatcagaggattcatagtgggg

SEQ ID NO: 66596 - DNA, 421 bp, Homo sapiens
agccctgatcctttcagccggcctgagcacgggagctctcgttgcgattctactctgtgtcctcatactgcttattttagtcgtgttgtttgctgcattgaagaggcaaagaaaaaaggaacctctgataatttcaaaagacgatgtccgggacaacattgtgacctacaacgatgaaggcggcggggaagaagatacccaagcttttgacattggcacattaaggaatccagaggcaagagaagacagtaaacttagacgggatgtaatgcctgaaactatttttcagataaggaggactgtgcctctgtgggaaaatattgatgtacaagattttatccatcgaagattaaaagaaaacgacgcagacccaagtgcacctccatatgattcgctggcaacgtatgcctatgaagggaat

SEQ ID NO: 66597 - DNA, 1238 bp, Homo sapiens
atcttaccaagatgcatctcacagaaaaccctcatccacaggtgactcatgtgtcttctagtcagtctggttgtagcattgccagtgactctggaagcagcagtttatctgatatctatcaggctacggagagtgaggtaggagatgtagatttgacacgtcttccagaaggacctgttgattctgaggatgacgaagaggaagatgaagagattgatcgaacagatccattgcaggggcgagatcttgttcgagaatgtcttgaaaaagaacctgcagacaaaactgatgatgacattgaacaattgctggagtttatgcaccagctccctgcatttgcaaacatgaccatgtctgtaaggagagaactctgctcagtgatgatttttgaagtggtagagcaggctggagctattattcttgaagatgggcaagagcttgactcatggtatgttattttaaacggcactgtggaaatcagtcatccagatggaaaagttgaaaatttgtttatgggaaatagttttggaattactcccactctggataagcagtacatgcatggaattgtcaggactaaagtagatgattgtcagtttgtctgcatagcccagcaagattattggagaattttaaaccatgtggaaaaaaatacccataaagttgaggaagagggagaaattgttatggtacatgagcatcgggaactagaccggagtggaaccaggaaaggacacattgtgatcaaggcaacacctgagcgtctcataatgcatttaatagaagaacattccatcgtggatccaacttatatagaagattttctattaacttacaggacatttcttgaaagtcctttggatgttgggatcaaactattggaatggtttaagatcgacagcttaagagataaggtgacacggattgtattattatgggtaaataatcattttaatgattttgaaggtgaccctgctatgactcgatttctagaggaatttgaaaaaaatctggaagatacaaagatgaatggtcatctccggttattgaatattgcctgtgctgcaaaggctaagtggagacaggttgtgctgcaaaaggcttcccgcgagtcccctctacaattcagccttaatggagggagtgagaagggatttggtatttttgttgaaggagtagaacctggtagcaaagctgctgattcaggactgaaacgtggtgatcagattatggaagta

SEQ ID NO: 66598 - DNA, 469 bp, Homo sapiens
  misc_feature (1)...(469): n = a,t,c or g
ggcggggctcntttgagacctgatgaccatcattacgcccagcttggcacgagggggaggacttcagctacggcctgcagccctactgcgggtactccttccaggttgtgggggagatgatccggaaccgggaggtgctgccttgccccgatgactgtcccgcctgggcgtatgccctcatgatcgagggctggaacgagttccccagccggagggcccgctttaaggacatccacagccggctccgagcctggggcaacctttccaactacaacagctcggagcagacctcggggggcagaaacaccacgcagaccagctccctgagcaccagcccactgtgcaatgtgagcaacgccccctacgtggggcccaagcagaaggtcccgccctttccacagacccaggtcatccccatgaagggccagatcagacccatggtgcccccgccgcagctatacgtccccgg

SEQ ID NO: 66599 - DNA, 511 bp, Homo sapiens
tccttttcatcatcataatcatttattttttgttttcttaaatgaagcataataaacagttaaaattctcagaaaaatcatctatagttgagtgtaaaactcccctaaatcagtcttctagggccacacggagcagaagcagcttcccacccaagcacctctgaactgtgcgtgaggaggcacaattcagggttgtttctcgagaacactcattggaaaacaattcactactgcacgaagagggccaaagatctgcagagaaatgtgaagcaagtgttttgcactttttatccaaatattgattaggttttaaagcaactgatcacttgctgacagctcagccacgggatgccacgcctggagtctggaaggaggagaagcaccaagtccttacggtatgagatggcactgaatgaggctttatggtggggtttcccacagacgtgaccttcgtttgcttctgtaggtgctccacccattcctgcagatcctgctgtgttgacgacactat

SEQ ID NO: 66600 - DNA, 1149 bp, Homo sapiens
  misc_feature (1)...(1149): n = a,t,c or g
gggtagaaagctcccacagtttaagtacagaaagactgtgtggcctcgagcatataatctaaccaacttttccagcatgtttactgattcctgtgactgctctgagggctgcataaacataacaaaatgtgcatgtcttcaactgacagcaaggaatgccaaaacttcccccttgtcaagtgacaaaataaccactggatataaatataaaagactacagagacagattcctactggcatttatgaatgcagccttttgtgcaaatgtaatcgacaattgtgtcaaaaccgagttgtccaacatggtcctcaagtgaggttacaggtgttcaaaactgagcagaagggatggggtgtacgctgtctacatgacattgacagagggacatttgtttgcatttattcaggaagattactaagcagagctaacactgaaaaatcttatggtattgatgaaaacgggagagatgagaatactatgaaaaatatattttcaaaaaagaggaaattagaagttgcatgttcagattgtgaagttgaagttctcccattaggattggaaacacatcctagaactgctaaaactgagaaatgtccaccaaagttcagtaataatcccaaggagcttactatggaaacgaaatatgataatatttcaagaattcagtatcattcagttattagagatcctgaatccaagacagccatttttcaacacaatgggaaaaaaatggaatttgtttcctcggagtctgtcactccagaagataatgatggatttaaaccaccccgagagcatctgaactctaaaaccaagggagcacaaaaggactcaagttcaaaccatgttgatgagtttgaagataatctgctgattgaatcagatgtgatagatataactaaatatagagaagaaactccaccaggnagcagntgtaaccggcgnaccacttggntnatncantattnaaagagncaatggggttncatattcanaaaccccaanaggnagttctacaggcatgtcaaagacagcaggtattttgtgatgaagagttgtttaatgnaaaccganatanttnctatcnttttctcnaacagattncaanagagntgagttttttnatgggnagnccacaaaaaaaaaaa

SEQ ID NO: 66601 - DNA, 1327 bp, Homo sapiens
ttgtgctttctgacctttgcctcttttattatagagatgagaaagaagagggtatcctgggaagcatactgttacctagttttcagatagctttgcttacctctgaagatcacattaatcgcaaatatgcttttaaggcagcccatccaaacatgcggacctattatttctgcactgatacaggaaaggaaatggagttgtggatgaaagccatgttagatgctgccctagtacagacagaacctgtgaaaagagtggacaagattacatctgaaaatgcaccaactaaagaaaccaataacattcccaaccatagagtgctaattaaaccagagatccaaaacaatcaaaaaaccaaggaaatgagcaaaattgaagaaaaaaaggcattagaagctgaaaaatatggatttcagaaggatggtcaagatagacccttaacaaaaattaatagtgtaaagctgaattctctgccatctgaatatgagagtgggtcagcatgccctgctcagactgtgcactacagaccaatcaacttgagcagttcagagaacaaaatagtcaatgttagcctggcagatcttagaggtggaaatcgccccaatacagggcccttatacacagaggccgatcgagtcatacagagaacaaattcaatgcagcagttggaacagtggattaaaatccagaaggggaggggtcatgaagaagaaaccaggggagtaatttcttaccaaacattaccaagaaatatgccaagtcacagagcccagattatggcccgctaccctgaaggttatagaacactcccaagaaacagcaagacaaggcctgaaagtatctgcagtgtaaccccttccactcatgacaagacattaggacccggagcggaggagaaacggaggtccatgagagatgacacaatgtggcagctctacgaatggcagcagcgtcagttttataacaaacagagcaccctccctcgacacagtactttgagtagtcccaaaaccatggtaaatatttctgaccagacaatgcactctattcccacatcaccttcccacgggtcaatagctgcttatcagggatactcccctcaacgaacttacagatcggaagtgtcttcaccaattcagagaggagatgtgacaatagaccgcagacacagggcccatcaccctaaggtaaaatagctgctgattttgtgttaactcactaccttataaatgctgtgttttctttctagtatactattttaaatgtgagagacaaaagaatggggataaagtaagcaaggcagctcttttttgttttaaaaaaaaaa

SEQ ID NO: 66602 - DNA, 658 bp, Homo sapiens
atcagagattgcatgttggtgagaaaccctataaatatgaaaaatgtgggaaggcctttatcagtggctcagcctttgttaagcatgggagaattcacactggtgagaagccactcaaatgtaagcaatgtggaaagactattagcggtagctatcaacttacagtacataagagtattcatactgggaagaaaccatatgagtgcggggaatgtgggaaagcttttctagtatatggaaagcttacccggcatcagagtactcacactggtgaaaaaccctttgggtgtgaggagtgtgggaaggccttcagtaccttttcatacctggttcaacatcagcgaattcataccagtgaaaaaccttacgaatgcaaagaatgtgggaaggcctttagcactagctcaccccttgctaagcatcagagaattcatactggcgagaaaccctatgaatgtaaggagtgtgggaagtccttcactgtgtatggacagcttactcgacatcagagtattcatactggtgagaaaccttttgaatgtaaggaatgtggaaaggcctttagacttagttccttccttcatgcacatcagcgaattcatgcagagataaagccctacggatgcaaggaatgcgggaaaaccttcagtcgtgcctc

SEQ ID NO: 66603 - DNA, 865 bp, Homo sapiens
tttttttttctgaattaagaataaatttattaggaaattattagtatagttagacagtatccagcaaaaaaggttattttatacctctacttttccaaaacgaagaaacctccccacaaatcccatcaacacacagtcatgctggaaggcattctgtcttactctgttggtttcatgtaaatgtttggggtgactcattccgcctcttcttttctcaagttccaggcttcttgggtagaccaaaactaatacacaatgttagagcacacaagagacccattctaacaggcttttattaccttttcttcggagtcccctggttgacaggtaattactccatctcttgatccccctgcaaatgttgccttacaatttgcaagccaagagagtgtggcctctttcctgttgttgtaggtatccaaatattcttgcagttctaacacactgaacttgagcttgtccagaagtccacatgaaaggagagtctcggcatccacaaaaagtgtaggacattcagagcaggaggtgagcatctgggaagagctgacaaatttggatccgattccccggaggttatctccaaggtaactggctgcatcacaggttaggaagcagaaccttttctgaatattcttaaacaaggaggagaacacatgaaatgtatacacagcacaggagccatttgagtcacacataagctggttgatgtggttgcgccaggcctcctcggcatcgtcacaggctgcgggctgaaaggcggcaaggatggctgacaagaagggcgagggagggggagagactcccctgcctcgatacaggctggagtcatcgtgcaaaatggtgtcaaaggtataacggtttcaag

SEQ ID NO: 66604 - DNA, 801 bp, Homo sapiens
  misc_feature (1)...(801): n = a,t,c or g
gggcagcctgcattgcgctggagcagcacctgtcccgctgggcagaggatgggcgctgggtcgaatacttctgcctggccgaaggccacgtggcttccgttgactcagtgctgctgctccagggtgggtcactctgtctgtcgggctcccgagatcgcaacgtcaacttgtgggacctgcggcagctggggacggagtccaaccaggttctgatcaagaccttaggcactaagcgaaatagtacccatgagggctgggtgtggtcactggcagcgcaggaccaccgcgtgtgctccggctcctgggacagcacagtgaagctctgggacatggcagcggatgggcagcagttcggcgagataaaggccagctcagccgtgctgtgcctctcctacctgcctgacatcctggtgactggcacctatgacaagaaggtgaccatctacgaccccagagccggcccagccctgttgaagcaccagcaactacactccagacccgtgctgaccctgctggcggatgaccggcacatcatctcaggcagcgaggaccacaccctggtggtggtggaccgccgagccaacagcgtcctgcagcgtctgcagctggactcctacctgctctgcatgtcctaccaggaaccccagctctgggctggtgacaaccagggcctgctgcacgtcttcgccaaccgcaacggctgcttccagcttatccggtcctttgatgtgggccacagctttcccatcactgggattcagtactccgttgggagcctttgtanaccacattcactgacaa

SEQ ID NO: 66605 - DNA, 617 bp, Homo sapiens
ggggtttcttgagtaattattttgattgactgatagaaatgaaacatcttcattgtagattttaaaatcgtcccgagtttttaccatggaaactctttcttctgtttctgcctttgatggttcctttttctgaggactatatgaggagtttttggcattgaataactgcgacttgtcctcagcttttaatgcaactttaactgtactgatatgatttatgtgtgttgttgaagttgtctggtctctcttgaggacctcaagtttagtgatatttctttctcttttctgtggagtaccacacttgtccctgcaataacaaagtagtacagcaaaaaatccaatgacaatgactattgttcctcctaatatggctgtaagaaacactgtgtggtaggcagttatgtccttggaatcttcatttatacctgaacctctagttcctggaagtggagctgctatccagtaccccaaatgtggtgcatcatatgtccagattaaatgattgttatgttccttgaccattccccgaccatgatttacccaagcacctgtgttcatatcaaatgtccaagcaggtatgcgatcccctgcacttatatcattcagacgtagaagag

SEQ ID NO: 66606 - DNA, 380 bp, Homo sapiens
gtgacctggatgtctgaggaggaagtacttcctgcaggacaacctgccgagggcaccacctgctgcctcgaggtcactgcccagcaggaggagaagcaggaggatgcagccatctgcccagtgacagtgctccctgaggagccagtgaccttccaggatgtggctgaggacttcagccgggaggagcgggggctgctgggcccgacacagaggaccgagtaccgcgatgtgatgctggagacctttgggcacctggtctctgtggggtgggagactacactggaaaataaagagttagctccaaattctgacattcctgaggaagaaccagcccccagcctgaaagtacaagaatcctcaagggattgtgccttgtcctc

SEQ ID NO: 66607 - DNA, 1083 bp, Homo sapiens
ttttttttttttgtgtgtttagctttaatgtctattaaataggttggaaaaacaggccaagtgtagggacctgactcctgcaaagggcctaccgcagccctctgcactcaagcagcagccccatccagaccaggagtgtgttctgttctcctggcaggcagggctgataggtgtaggatggcgtctgtttcctttgcagtgtgggctggtcagaggagaaacagcaacttcctgctccttctcactgtgtcgttggctcaccatagaccacgtcctgcattccctctgattctctcatggggagagccctggaccttctggtggtgtcccagctgggtgggttcaaggctgctaccccgcttggggcagctggcctgcagggaagggccagacggcacctctcagtggagactgaatcttccttccttcaggaggctgcctccagggaagacctggggtccttcctgcgctcagcgctggctggctgtcctgttcatgcagtggaagacattacagaagaattcatacgagaagaacatgaagcctgtggagagggcagccttcagcaagctgggggacaggcccttgaagaagcccagggcgccttccttttgtagcacctgcttggcacagtccatgaggcccttgtatctccgtacctggccaaaggcagctctggcatgctcaaaccctccaacctgtagccgcttcttgaagaggtccagcggatatgtcagggtcttgctgatgacaccagctccactgccacaaagcaggttttggaggttctcatttttctttccttcggctggtatggcccacttgtacaggtgcttcaaggagctgtagcaagagaactgcagcccggcgtaggggaagatggcgatcaaggtgggagccaagcctttgtagaaaacctgggggccttcgctcctatacatggtccccacggcgtggcgcagcgtattatagaccttgggctcaccctgagctgcaaagcgggtgcgcagaacatccacggggtgcacagtgagggtggccatacaggcagccaggccaccacatacaaagtgcactcgtgcc

SEQ ID NO: 66608 - DNA, 840 bp, Homo sapiens
ggcacgaggagaaagcctgctgtgtttggcttgttcagcagggtattatgaattagcacaagtattgcttgctatgcatgctaatgttgaagatcgagggaataaaggagacataactcccctgatggcagcttccagtggaggttacttagatattgtgaaattattacttcttcatgatgctgatgtcaactcccagtctgcaacaggaaacactgcgctaacttatgcatgtgctggaggatttgttgacattgttaaagtgctccttaatgaaggtgcaaatatagaagatcataatgaaaatggacatactcccttaatggaagcagccagtgcaggtcatgtggaagttgcaagagttcttttagatcatggtgcaggcatcaacactcattctaatgaattcaaagaaagtgctctaacacttgcttgctacaaaggccatttggatatggttcgctttctacttgaagctggtgcagatcaagagcacaaaacagatgagatgcacactgccttaatggaggcctgcatggatggacatgtagaggtggcacgtttgcttttggatagtggtgctcaagtgaacatgcctgcagattcatttgaatctccattgacgctagctgcctgtggaggacatgttgaattggcagctcctactttattgaaagggggagcaaatcttgaagaagacaatgatgaaggatacactcccttgatggaagctgcccgggaaggacatgaagaaatggtggcactactcttagcacaaggagcaaatataaattcccagacagaagaaactcaagaaactgctcttactttggcttgctg

SEQ ID NO: 66609 - DNA, 492 bp, Homo sapiens
gaccatagtccatgtggtggaattccctgccaatgtgcacctcatcaactccggggtgggcgtgactgccctgcagctgccttcggccactgccccaggaaacttcctcctggccaaccctgtgtctggcagccccatcgtgacgggtgtggccgtgcagcagggcaagatcatcctcaccgccaccttccccaccagcatgctcgtctcccaggtcctgccgccagcccccggcctggccctgccactgaagccagagacggccatctccgtgcctgagggaggcctcccggtggcccccagccctgctctcccagaggctcacgccctaggcaccctttctgcacagcagccaccccccgccgctgccaccacctccagcaccagcctgtccttctcccctgactcccctggcctcctgcccaacttcccggcgcccccaccagaggggctgatgttgtcacccgcggccgtgcctgtctggtcagcagg

SEQ ID NO: 66610 - DNA, 416 bp, Homo sapiens
atctgcatcctggaacttggtcacttgtgtgaacaatgtggagcggtccagtggccagccgttcttccggcaggtggcctgcaccagcgccgtgaggtaggactcagggatgtgcagccccgagagccacatcacgctgggctcgctctcggtcacctggagagaagagaggacaagtgctgggagcctggggctgccatccaatgccaggtcaaagctggcctggaagtttagtttatgataaaagacatatttcacctaagtggcaaaagatggcgttggcacaactggccgcctgtctgagaaaaacaatctggactgccacattccaggtagatcaaagatttagatataaaaataaaataaaccacaaaagtactgggccacatctccaatgaatgctttcatatcgtggg

SEQ ID NO: 66611 - DNA, 749 bp, Homo sapiens
ttgatgataaagctggcatctgtggccactaggataaggcactggacagctgagtgtaggccaatccagaggcggaactccatgtagtccaggccattgcctttgctgaagtcgaagaggagcttctcaaagatgaggatgggccccgtgctgctgagaatgatgagaggctgtcccgagaagaggcagaacaaggagccagccatggcagtgcccaggaagctctccatcactccctgataattgtcggtggcatcccccagaagcccaccaaaggtgatcgcgttggtgatacagccgaggtagatgaataggatggcagagatggactgaatgtggaagccatcatagaagtcacttgggaaccagggcaacttcctcttgatatccagacacaggccaccgaagaacctgctcaagacaggcccaggagctgctcagcagctggggaccgagtcctgctgataagatccatgctgctgtcctggctgcttgccccactccctgggccagtcagttcctgctgtggctggtctggccgcaggccccagtggactttttgcaggcctgaaagatgtcccttctggtcagtttttctttgagggtaagtgggtactggaagcccaatgtggataggagggcattctttctgatccggaaatctcctcctgtggttagtgtggtccagctttcctaccccagccttctcctccttcaccttcatgactttgtgttcttagctctggaaa

SEQ ID NO: 66612 - DNA, 693 bp, Homo sapiens
gaagacccttagtcagtgtggtggaattcgcagagaggctggcagggcaggaagccaggccagagaagggggagcctggctgccttacccggctggcccagcatgttggcaaagcggacatcagtgctgactgctggatatagctccatccaggtggacatagagtgcagctgccctgtctcatgcagctcgtccaggaaggtctgagcagggagaggccagttatagggagagtgagacagggaggcagagccacagactgagggggaagagagggaatggcagaggaagaggcagggacaatcaagattgaggaaatgcaggcaagagaggcagagatgaagagatgcagatggaaggctgagaacaatgcaaaaagagagaaagtaaatacacagagagggacagaacaaaaaggtgagaacaagccagtcccgggatgcaaagaaacagaaacctgcctgcagtaacccctagcactaccaccaccactgccacccccaagctgagggaataaactctgcctgtcgggtgccccaccaagggaaataaacatggcctagctgccaagtcatgcctgtagggtgctctctactggcagtttctgggtggtgcatacatctagtctccctagaagagcacagtccagaattgaggaggtacagcagaaacagactgcaggcagagagaggg

SEQ ID NO: 66613 - DNA, 434 bp, Homo sapiens
gcggtggaattccaaaggaccaggcagcctgtgcagaccaagttttacacagacgccatggtggtcttccatcacgtcaacgcctacgaagaggacggctgcatcgtgtttgacgtcattgcctacgaggacaacagcctctaccagctcttctacctggccaacctgaaccaggacttcaaggagaactccaggctcacctcggtccccaccctcaggaggtttgccgtgcccctccacgtggacaagaatgcagaagtgggcacaaatttaatcaaagtggtatctacaacagccacggccctgaaggaagaagatggccaagtctactgccagccggaatttctttatgaaggcttagagcttccacgggtcaattatgctcacaatggaaagcaataccgatatgtctttgctacaggagttcagtggag

SEQ ID NO: 66614 - DNA, 456 bp, Homo sapiens
ttgagtaccctagccagtgtgttggcgaggtacgcaggttcaatgccttaaacgctgaaggacgatgggtggttaccatcaaatccacttcctgggattccagcatttctgccatataggcattacgtttaacgcggacatccagcgctaatttcggataaaccgaactcacgcgatttaacaggaaaggtaagatcgtatcggcagattcatctgaagcaccgatagttaatacgccctgaagattactgaacattaatgatgagcaggcctcatcattaaaacgcaggattttcctggcgtaaccaagaagttgaatgccatgttcagttaacagtttgttgcgaccgtgacgagcgaacagttctttcccaacgagttgttccagacgctgcatttgctgacttacggcggactgagtacgacacacagcggcagctgcggcagcaaaagtgt

SEQ ID NO: 66615 - DNA, 470 bp, Homo sapiens
aagtgtcccaactgaactcgagtcactgtggcggaattcgtccaagctactgtgccagtcttcatctacaccagtaccctccagttagccgggcccaactcctacaaggaaatcattgagaatgcccatgaagaagactttctggaaaacacatggtctgctccatatccatacagcaaaaagcttgctgagaaggctgtgctggcagctaatgggtggactctgaaaaatggtgataccttgtacacttgtgccttaagacccatgtatatctatggggaaggaagcccatttcttactgccaatataaatgaggccctgaacaacaatgggatcctgtcgagtgtcagcaagttctccacagccaacccagtctatgttggcaacgtggcctgggcccacattctggccttgagggccttgcgggaccccaagaaggccccaagtgtcctaggacagttctactatat

SEQ ID NO: 66616 - DNA, 461 bp, Homo sapiens
cgaggaattcgctgggaggtaggcgcggggcggtcggctgcggtggcggcgtttggatgattgtctctcggcggcggagtcggatactgtggcgtatgaggacctgtctgaggactatactcaaaagaaatggaaaggtctcgcactcagtcagagagccctgcactggaacatgatgctggaaaatgaccgtagcatggcttctttggcaggtaggaacatgatggagagttcagagctgactccgaagcaggaaatttttaaaggatcagagtcatctaatagcacatcagggggactctttggggtggttcctgggggaacagagactggagatgtttgtgaagataccttcaaagagttagaaggacaaccctcaaatgaagaagggagcagactagaaagtgatttcttggaaataatagatgaggataagaaaaaatccacaaaagacagatatg

SEQ ID NO: 66617 - DNA, 704 bp, Homo sapiens
cttgtgctctctgcccagctgtgctgaagtcccgagggacatgtccgctgcttgcgggtcggttcctgaggaattggaagtgtcacgagatgtggccctcgttgggctggcgctcattggcctcccttgtgcctgtgcaggaggagctgattaactcagtggtcatctcgcagctctcccacatccccgaggataaagaccaccaggtccgaaagctggccacccagttgctggtggacctggcagagggctgccacacacaccacttcaacagcctgctggacatcatcgagaaggtgagagccgttgtacccggggccgggtgctagcgtgccagagctccgtgggcagcaatggcctctgggccctctgtcctcctcttcgagtgaccggatggctgtgtccgtaggtgaggctcccctccctgcagggtgggtgtcccgaggcctgtgcagggcctgccactgctggatttgtgtcctgactgaaagtcctggacatgggtgtcctgtcacactctgggacagctgggctgggcctcctggaccgacgctggagcccagacctggggctggggctggggctttggcctgccgtcctccctgcccagccaacagctttgctctttgattttcagatgcattttggtttctgcacagtcactcgggtataaagggcatctttgcttttgagcaataaagatg

SEQ ID NO: 66618 - DNA, 453 bp, Homo sapiens
caggaattccgggcgccacccacgcgttcgatggatcctggaagagcgcaagcgggtgatgcaggaggcctgcgccaagtaccgggcgagcagcagccgccgggccgtcacgccccgccacgtgtcccgtatcttcgtggaggaccgccaccgcgtgctctactgcgaggtgcccaaggccggctgctccaattggaagcgggtgctcatggtgctggccggcctggcctcgtccactgccgacatccagcacaacaccgtccactatggcagcgctctcaagcgcctggacaccttcgaccgccagggtatcttgcaccgtctcagcacctacaccaagatgctctttgtccgcgagcccttcgagaggctggtgtccgccttccgcgacaagtttgagcaccccaacagctactatcacccggtcttctgcatggccatactggcccggta

SEQ ID NO: 66619 - DNA, 377 bp, Homo sapiens
cataatgtatagtatttctcctgccaactctgaggaaggccaggaactttatgtctgcacagtcaaggatgatgtgaacttggatacagtacttctcctaccctttttgaaagaaatagcagtaagccaactggatcaactgagcccagaggaacagttgctggtcaagtgtgctgcaatcattggtcactccttccatatagatttgctgcagcacctcctgcctggctgggataaaaataagctacttcaggtcttgagagctcttgtggatatacatgtgctctgctggtctgacaagagccaagagcttcctgctgagcccatattaatgccttcctctatcgacatcattgatggaaccaaagagaagaaga

SEQ ID NO: 66620 - DNA, 438 bp, Homo sapiens
gaaaatgttgagccatttcgacaaaaactgtccatgataatcaaagaggagaaactgtgtctagctcagctatacagtggggatgaaacagacctcttttggaagtcaatgccagaaaattctcaggcaagtaggaaagatatctgcctaccagggaagaaaataaacaaagaaaggttgtctgcctttttatgtgcaaatgcagacggaactcataaattaaagtcaatcattattggaaaatcaaaactgcccaaaagtgtgaaagaggacacaagtacattgcctgtgatatataaacccagtaaagatgtttggttcaccagagaattgttttcagaatggttttttcaaaactttgttcctgaggtccgacattttcaacttaatgttctaagatttcatgacgaggacgtcagggcatgttacttttgacag

SEQ ID NO: 66621 - DNA, 1019 bp, Homo sapiens
ccttgggcagctaccgctgcaagtgccgggaaggctacatccgggaagatgatgggaagacatgtaccaggggagacaaatatcccaatgactctggccatgagaagtctgagaacatggtgaaagccggaacttgctgcgccacatgctaggagttctaccagatgaagcaaaccgcgctgcagctgaagcacaagatagctctgctccccaacaatgcagctgacctgggcaagtatatcactggtgacaaggtgctggcctcaaacacctaccttccaggacctcctggcctgcctgggggccagggccctcccggctcaccaggaccaaagggaagcccaggcttccccggtatgccaggccctcctgggcagcccggcccacggggctcaatgggacccatgggaccatctcctgatctgtcccacattaagcaaggccggaggggccctgtgggtccaccaggggcaccaggaagagatggttctaagggggagagaggagcgcctgggcccagagggtctccaggaccccctggttctttcgacttcctgctacttatgctggctgacatccgcaatgacatcactgagctgcaggaaaaggtgttcgggcaccggactcactcttcagcagaggagttccctttacctcaggaatttcccagctacccagaagccatggacctgggctctggagatgaccatccaagaagaactgagacaagagacttgagagcccccagagacttctacccatagcacatcccaacaccgtcacgccaaaggaagagaaagatcaactcacctgcagttaaaccatctaaagagaagaaagaccactggagacctagaaaacatacatttttctcttctcttctcctgacgtctctccactcctcttcttccaaatacgatgctattttcagagtcccctcctaggcctgcagacatgagggagtgaatgattgatttacctgcttctcactaagagtccattggggaggtttgcatagt

SEQ ID NO: 66622 - DNA, 476 bp, Homo sapiens
gacaagtgtggcaaaggtttcagtcacaactcgtaccttcaagctcaccagagagttcacatggggcagcatctgtacaaatgtaacgtgtgtggtaagagtttcagttacagctcagggcttctcatgcatcagagactgcacacaggagagaaaccctacaaatgcgagtgcgggaagagctttggccggagctccgacctccacatccatcagagggtccacacaggagagaaaccctataaatgcagtgagtgtgggaagggcttccggcggaattcagaccttcacagccaccagagggtccacacgggagagaggccctacgtgtgtgacgtgtgtgggaagggtttcatctacagctccgacctccttatccatcagagggtccacactggagagaaaccctataaatgtgctgagtgtggcaaaggcttcagttacagctcagggcttctcattcaccagagagtcca

SEQ ID NO: 66623 - DNA, 375 bp, Homo sapiens
ttttttaagcaattttccaaattttcagcatgatattaatatttcttcatcaaatgaaatcatttcttcccggggcttcattcagacaacagatgtttcttcctcagccaaaaagaaaatattgttattccaattacgacgcatagctgaagactgtcaaattcccctaatggtgtataaccaggcatttatatattttgatcagtatgctgcaatattagaagacactgttagaaatgtattggttgcatcagcagctatgttcattgtttccttattgttaatcccttatccattgtgttccttgtgggtgacttttgctatcggttctgtgattgtaggggtaacgggtttcatggcattctggaaagtcaa

SEQ ID NO: 66624 - DNA, 443 bp, Homo sapiens
ggcacgagaactggagacaggccctccactgtgaacaagcttttgcagcttcccagcacgaccattgaaaatatctctgtgtctgtccaccagccacagcccaaacacatcaaacttgctaagcggcggatacccccagcttctaagatcccagcttctgcagtggaaatgcctggttcagcagatgtcacaggattaaatgtgcagtttggggctctggaatttgggtcagaaccttctctctctgaatttggatcagctccaagcagtgaaaatagtaatcagattcccatcagcttgtattcgaagtctttaagtgagcctttgaatacatctttatcaatgaccagtgcagtacagaactccacatatacaacttccgtcattacctcctgcagtctgacaagctcatcactgagttctgctaatccaataacaatggg

SEQ ID NO: 66625 - DNA, 388 bp, Homo sapiens
ggcacgaggtaatattttatacatggatgaatcagccagtgcagattcaatcaggatatgtgattttgggtttgcaaaacaacttcgaggagaaaatggacttctcttaactccatgctacactgcaaactttgttgcacctgaggttcttatgcaacagggatatgatgctgcttgtgatatctggagtttaggagtccttttttacacaatgttggctggctacactccatttgctaatggccccaatgatactcctgaagagatactgctgcgtataggcaatggaaaattctctttgagtggtggaaactgggacaatatttcagacggagcaaaggatttgctttcccatatgcttcatatggacccacatcagccgtatact

SEQ ID NO: 66626 - DNA, 503 bp, Homo sapiens
  misc_feature (1)...(503): n = a,t,c or g
tggccctcgaggccaacaattcggcacgaggaaannnnnnnnnnnnnnnnnnnnnnnnnnnnnnnnnnnnnnnnnnnnnnnnnnnnnnnnnnnnnnnnnnnnnnnnnnnnnnnnnnnnnnnnnnnnnnnnnnnnnnnnnnnnnnnnnnnnnnnnnnnnnnnnnnnnnnnnnnnnnnnnnnnnnnnnnnnnnnnnnnnnnnnnnnnnnnnnnnnnnnnnnnnnnnnnnnnnnnnnnnnnnnnnnnnnnnnnnnnnnnnnnnnnnnnnnnnnnnnnnnnnnnnnnnnnnnnnnnnnnnnnnnnnnnnnnnnnnnnnnnnnnnnnnnnnnnnnnnnnnnnatcctgaagcatttcatcaaagaattgtaacaggagatgaaacatggcttctccagcatgatcctgaagaaaaagcacatttcaagcaaagcagaccagtccagagcaaaggttggagaggctctagtgacaactcactcttgtctcatggtcacgaattcttggt

SEQ ID NO: 66627 - DNA, 760 bp, Homo sapiens
ggcacgaggatatgtcatcgccaggcttagaattgccatcttgtgaattaagtcgccttgaagaaattgcagaacttgtggcatcatctttaccttcacctcttcgtcgtgaaaaacttgcactggcactagaaaatgagggttatattaaaaagctcctggagctttttcatgtgtgtgaagatttggaaaatattgaaggactgcaccacttgtatgaaattatcaaaggcatctttctcttgaatcgaactgctctttttgaagttatgttctctgaagaatgtataatggacgtcattggatgtttagaatatgatcctgctttatcacaaccacgaaaacacagggaatttctaacaaaaacagccaagtttaaagaagtgattcccatatcagatcctgagctgaaacaaaaaattcatcagacatacagagttcagtatatacaagatatggttctaccaactccttcggtctttgaagaaaacatgttatcaacacttcactcttttatctttttcaataaggtagagattgttggcatgttgcaggaagatgaaaaatttctgacagatttgtttgcacaactaacagatgaagcaacagatgaggaaaaaagacaggaattggttaactttttaaaagaattttgtgcgttttcccaaacgctacagcctcaaaacagagatgcttttttcaagactttgtcaaacatgggcatattaccagctttagaagtcatccttggcatggatga

SEQ ID NO: 66628 - DNA, 492 bp, Homo sapiens
gagtggacaaatgggtggatggatgggtggatgggtgggtgagtggatgatggacccaatgtacaaatcccttgaacctttgatgacttggaacaccacctctgccctatttcatcaattgccataatgaaataaaatgctccaaatggaatctgttttggcacaaaacatgaaggaaactaactagcaactgatattatgggtccattgattcaataatactttattgccttacttatgtaaaattgatatcacttcctctttcacctcatttttaattgcagattgaggaacagttgactttggaaaagttgcatgagtggactaaacctgagaatctcgatttcattgaagttaatgtcagcttgcccaggttcaaactggaagagagttacactctcaactccgacctcgcccgcctaggtgtgcaggatctctttaacagtagcaaggctgatctgtctggcatgtcaggagccagagatatttttt

SEQ ID NO: 66629 - DNA, 621 bp, Homo sapiens
ctcatccttaaagtgacagagtaaattaactctaaggccccatccaggactcaagctgtgtgattttacaaaaatgaaaattatattaataatcccattgtaaaatcccaaaagaaagtcaagagactagcagaaagacaggtgggtgatgggatgtcctggacagagcctggatcatgaggtccccatgtagtgcttgtactacgcagatgtttcctcttgagctattttaaaggtgtggaaaaagccaaagcaatgccctctccacggatactaaagactcacctttccactcagctgctgccaccgtctttctgggaaaacaactgcaaggtaagataccaacagctccctgtgacagaagggaaagtaagccaaccaaagcgagtcctgcagaccccaacgcagagcattcgtgatcacctttgcctctccactgtctctgatgcttaccagcaaagagaaaacataaagttctacattcagcaggacattcacctgaacagtttcaaataggacatgaaggcaggatccagattgaatgtttggagggaactagagacatggggaggcagtgagtgcagtaagcgtagctgtgaaatgaaggggagaagatggtgg

SEQ ID NO: 66630 - DNA, 395 bp, Homo sapiens
tatgaatcgtcacagcactgagaaaacccacctatgtgacatgtgtggcaagaaattcaaatcaaaagggacactgaaaagtcacaaactccttcacactgcagatgggaagcagtttaagtgcacggtgtgtgactacacagcggcccagaagccacagctgctgcggcacatggaacagcatgtctccttcaagcctttccgctgtgcccattgccattactcctgcaacatatctggctctctgaagcggcactacaacaggaagcaccctaatgaggagtatgccaacgtgggcaccggggagctggcagcggaggtgctcatccagcaaggtggtttgaagtgtcctgtttgcagctttgtatatggcaccaaatgggagttcaataggc

SEQ ID NO: 66631 - DNA, 377 bp, Homo sapiens
ctatggacccgcagctcatcccctgctcaccacctggcctctccttttctctgtgtgcagatctggcagtgtggtggggttctggaaacacacccatgttcccatgttggccatgttttccccaagcaagctccctactcccgcaacaaggctctggccaacagtgttcgtgcagctgaagtatggatggatgaatttaaagagctctactaccatcgcaacccccgtgcccgcttggaaccttttggggatgtgacagagaggaagcagctccgggacaagctccagtgtaaagacttcaagtggttcttggagactgtgtatccagaactgcatgtgcctgaggacaggcctggcttcttcgggatgctccagaa

SEQ ID NO: 66632 - DNA, 338 bp, Homo sapiens
atgcgaattgctagcatcagcaaaagtctcaccatggttgctcttgccaaattgtgggaagcagggaaactggatcttgatattccagtacaacattatgttcccgaattcccagaaaaagaatatgaaggtgaaaaggtttctgtcacaacaagattactgatttcccatttaagtggaattcgtcattatgaaaaggacataaaaaaggtgaaagaagagaaagcttataaagccttgaagatgatgaaagagaatgttgcatttgagcaagaaaaagaaggcaaaagtaatgaaaagaatgattttactaaatttaaaacagagcaggagaatga

SEQ ID NO: 66633 - DNA, 713 bp, Homo sapiens
aggcgctggcctatgctgaagtggctggactcccgccccagtatggcctctactctgccttcatgggctgcttcgtgaatttcttcctgggcacctcccgggatgtgactctgggccccaccgccattatgtccctcctggtctccttctacaccttccatgagcccgcctacgctgtgctgctggccttcctgtccggctgcatccagctggccatgggggtcctgcgtttggctcacatctcccctcatcctctgggactgggtggagccgggaccagctcgatgtcccctcttggctggccagggttcctgctggacttcatttcctaccccgtcattaaaggcttcacctctgctgctgccgtcaccatcggctttggacagatcaagaacctgctgggactacagaacatccccaggccgttcttcctgcaggtgtaccacaccttcctcaggattgcagagaccagggtaggtgacgccgtcctggggctggtctgcatgctgctgctgctggtgctgaaactgatgcgggaccacgtgcctcccgtccaccccgagatgccccctggtgtgcggctcagccgtgggctggtctgggctgccacgacagctcgcaatgccctggtggtctccttcgcagccctgggtgcgtactccttcgaggtgactggataccagcctttcattctaacaggggagacagctgag

SEQ ID NO: 66634 - DNA, 561 bp, Homo sapiens
ttttttttttttattttaagttctaaacagtttcggtttctcaaccgttccttttctttttgcttaattttttccttatgttttttgtgccactgttctatttctaggtctttaaggcttagcattcgttcaaaacttgtctgcattaaatcatcattcactaacctcttttctttaggtcgggtatcttttgatgctggtgatgacttaggtttaggcttatctgcttcagattttagtttgagtaagctatttatttgaattttatctttatgtttgtctcgttctttgtatctatctatatctttatcttttttatctttttcttttccatctggagttttcaaaggttcatcttttgttttttctttaagggataagggtttttcatgttgtgctttattaccgtctactatacttgattttttttcttcctgtatgtgtttggagttagttatatttatactttctttatctctagatttttcctttttatctagctccctgtctttttctttatttttgcctttttctgatttactgtattcactattatctgat

SEQ ID NO: 66635 - DNA, 418 bp, Homo sapiens
ataatttagattgtggacttagttacagggttatttcttaccttaaaaaactcagccaacagaccaaactagagtcagaacgaatactagcatcagtggggaagaaacctccccaggaaattggaattaaagtgaaaaatcattctggaggtggcatgtccttgactcacaataaaaattttagaaaactattgaaagaaatcacaggggaaactgcacttagactgacagaattgaacaccaaagaatttgctggcttccaaattgggctcttaaacaaggatttgaaacctcagacatacagaaatgcttatgatattccccgtagaggtcttttagaccagctgaccagaatgagatccaatctgctgaaaacgcacaagtttattgttggacaagatgaagattcccttcatag

SEQ ID NO: 66636 - DNA, 851 bp, Homo sapiens
aaccatcagatccagaggttgcaggagatcccatatttccaccggggccaccttcttgcccagaagttaaagataaaacgaagtcaagcatctcactaggatggaaacctccagccaaagatggtggcagcccaatcaaaggatacattgtagaaatgcaggaagaaggtactactgactggaaaagagtaaatgaaccatacaaacttataactacctgggaatgtggggggcctaatctgaaagagctcaggaagtacagattcagagtgaaagctgtcaatgaagctggtgaatctgaaccaagtgatacaactggggagatccctgccactgatattcaagaggaaccagaagttttcattgacattggagcacaggactgtctggtttgtaaagctggctcacagattaggattcctgctgtcatcaagggacgcccaacaccaaaatcatcttgggaatttgatggaaaggcaaagaaagcaatgaaggatggagttcatgacatacccgaagatgcacagctggagactgctgaaaactcctcagtaattattattccggagtgtaaacgatctcatacaggcaaatacagcatcacagccaagaataaagcaggacaaaagactgcaaattgcagagttaaagtcatggatgtaccaggcccacccaaagatctgaaagtcagtgatatcacaaggggtagttgcagactttcatggaagatgccagacgacgatggaggagacaggatcaaaggctatgttattgagaagaggactattgatggaaaagcctggaccaaagtcaatccagactgtggaagcaccacatttgtagtgcctgag

SEQ ID NO: 66637 - DNA, 798 bp, Homo sapiens
  misc_feature (1)...(798): n = a,t,c or g
tgagggaagggagaatctgggagtccatgctctgagcggacatcacactagggctcagtgttagacgggcctacaccttggttaatcctggaaggattcgatccctatgctgaggtgaaggcggtccaccacggttctacctacttccccaccccccaaacctttacctacccaactcttttttttcttctttttcgcatcagcatccttgctgctgccgatgctggaatggctagtgatgctgttgaggcttgagatgctatctgaggagttttgtctcttgatccgaagttctttgggtgtggtttctgaggcattaagggctccctgaatgactgcctgggcctcagagttctttttcttcagaaagtctatggtttctcgcaaatccagcagctcagtgtccttctcctcggccgtctctgccaggtgtcgcaggcgggatgtcatattcaccaggctctgctcaaaagcagccaccagattagcattggcagaaagctgagacgtcaaggtggccactttttcctgggatgattccagttccctacgaagcttccggatttgctcagattgcatcctctcctcagctgaggagtaggtggaggaggcactggaggccagggacagcactgagccgtgaacatcgtccgtggggtctcggaaggatcctgaccgaatcattcccttgggtctctcggccagggacagggtgctcccccggacgcgtgggtcgaccgggaatccggngcggtcctcaggcgatcaacnagggtttcaattnnttnntctnggtca

SEQ ID NO: 66638 - DNA, 415 bp, Homo sapiens
accgggacgacccacgcgtccgggaatttaattctattatatatgcagactttctaaagaagataaagcttttttatgggagaaacgttattattgcttcaaacacccaaattgtcttcctaaaatattagcaagcgccccaaactggaaatgggttaatcttgccaaaacttactcattgcttcaccagtggcctgcattgtacccactaattgcattggaacttcttgattcaaagtaagtcaaatacatttatttgctcttgttttattgtcagtttttccagtaaggtatgttgccagaagtatttcctttccttttaacatgaaagcaattcaatataatccaaatgtgtaaatgtatatttatacaaacatatcttctgcattgaagttgtcaataaagcattgcatgt

SEQ ID NO: 66639 - DNA, 737 bp, Homo sapiens
cgttttctcggggagatgcgccgcccggtctccctgccagcggagtgctgggccgaggacagggcggcaggggtgacagtggggtccaggagagtctcaaaatcctaagctttcagtatttgttattgtgaaagaagttaattcacctgaaacagaggaggggcaacctgagttatcagaaagtgacttcctggccttcccttctttactgatcaggtcaatgtctggtctgggtccagtgttccttcccaaactgtgggaaatggaggcggctgtgtgggaacattgacccctcagttctcccagataattggtcctgtgatcagaacacagcagatgtgcagtataatcgctgtgatattcctgaggagacctggacagggcttgagagtgatgtggcctatgcctcctacatcccaggatccatcatctgggccaagcaatacggttacccctggtggccaggcatgatagaatctgatcctgacttaggggaatattttctttttacttcccatcttgattccctgccgtctaagtaccatgtgacgttttttggagaaacagtttctcgtgcatggatcccagtcaacatgctaaagaacttccaggagctgtccctggagctatcagtcatgaaaaagcgcagaaatgactgcagccagaaactgggggtggccctgatgatggctcaagaggcagaacagatcagcattcaggaacgggttaacttgttt

SEQ ID NO: 66640 - DNA, 918 bp, Homo sapiens
agccgacaccctttacagtcaaattaaagaagatgtcaaaaagcgtgctgtggcactggatgaagccatttctcaatcaactcagttccatgacaagatagatcagatccttgagagcctggaacgcatcgtggaacgtctgaggcagccaccctctatctctgcagaggttgagaagatcaaggaacagatcagtgaaaataagaatgtgtcagtagacatggaaaagctacagccgttgtatgaaactcttaaacagaggggagaggaaatgattgctagatctggggggactgataaagacatatctgccaaagctgttcaggataagcttgaccaaatggttttcatttgggagaacatacacacactggtggaagagagggaagccaaactactggatgtgatggagctagcagaaaagttctggtgtgatcacatgtcattgatagttaccattaaagatactcaagatttcatccgggacctggaagatcctggaattgatccttcagtagtaaaacaacagcaagaagcagcagagaccataagggaagaaatagatggactacaggaggagctggatatagttattaacctaggttctgaactcattgcggcatgtggggagcctgataaacccattgtcaagaagagtatagatgagttaaattcagcatgggattctctaaataaagcttggaaagaccggattgacaaacttgaggaggcaatgcaggctgccgttcagtaccaggatggactgcaggcggtatttgactgggtagatattgcaggtggtaaattagcttcaatgtctccaattggaacagatctcgaaactgtcaagcagcagattgaagagctaaagcaatttaagtctgaggcctatcaacagcagatagaaatggaaagact

SEQ ID NO: 66641 - DNA, 610 bp, Homo sapiens
tcgcggacgcgtgggtttctggtgaaggtggaacgtctataaccaacttacaatttatgggggaagcctttaagagtatccatgagaaggtatcaaaaatatcagaaactaggaaatcagatcaaaaaaccactgagtcaacagtaaccagaaaaactgaaccaaaagctcctgaaccaatttcctcaaaaccagtaattgttactgggttgcaggatacaactgtttcttcagacagtgttgctaaatttgcagttaaggctactggagaaccccggccaactgccatctggacaaaagatggaaaggccattacacaaggaggtaaatataaactctctgaagacaagggagggttcttcttagaaattcataagactgatacttctgacagtggactttatacttgtacagtaaaaaattcagctggatctgtgtcctctagctgcaaattaacaataaaagctataaaagatactgaggcacagaaagtctctacacaaaagacttctgaaattacacctcagaagaaagctgttgtccaagaggaaatttcccaaaaagccctaaggtctgaagaaattaagatgtcagaggcaaaatctcaaag

SEQ ID NO: 66642 - DNA, 836 bp, Homo sapiens
tcatgacctttgaactctatgaggaatttcttcgagctatgggccttcaggagaggaaggagacaatccgtggtgtatactctgtgattgatcaactctcccgaactcatctcaatacactggaacgcctcatctttcatctagtcaggattgctctgcaggaagacactaatcgaatgtctgctaatgctttggccattgtgtttgcgccctgcattctccgctgccctgacaccactgacccactacaaagtgtacaggacatcagtaagactaccacttgtgtggaactgattgttgtggaacaaatgaataaatacaaggctcgtctcaaagatatcagtagcttggaatttgctgagaataaggcaaagaccaggttgtcactgattcgtagatcaatgggaaaggggcgtattcgtcgaggaaactatccaggtccatcgtctcctgttgtagttcggttgccttctgtgtctgatgtctcagaggagaccttgactagtgaggcagccatggagactgacatcacagaacagcagcaagcagctatgcagcaggaggagagagtactgactgagcagattgagaacctacagaaggagaaggaggagctaacatttgagatgcttgtactggaaccccgtgcctctgatgatgaaacccttgagtctgaggcctccattgggactgctgatagctcagagaatttgaatatggagtctgaatatgctatctctgagaaatcaggtaagtgaacatggtagaccaaagactccagatttgttttgcaaaggaggaataaagattccaaaactaagacaaagtcttttaaa

SEQ ID NO: 66643 - DNA, 397 bp, Homo sapiens
gagaggatccaaagccttgattggttttggtgtttcaacaaaaggaccacgtccatactggttctccgcagctactcggaagaggtactggttgccttcattcagatgcttagcgaagtgactctttttctttgatgtagctgagagaggtgaccactgggcgctggcaacatctctcctctcaaccacataattggtaataacagaaccaccatcatccagtggttctttccaagtaagggaacatgaatctttcctaatttcactgacttccagatctctaggtggcccaggtttatctaatacaagtacttttactgagacagtttttgaaccagctagattctccactgttaaagaataaattccaccatcttcatgggcagcattacgaatt

SEQ ID NO: 66644 - DNA, 419 bp, Homo sapiens
atcaatacagacctaaatggcgtattcctaaactgtcccaagatgatcttgagatagtgagaccagcccgccggcgtacaccttctcctgattatgacttttactaccgacctagaagacgttctcttggggacatctctgatgaagaattactcctccccattgatgactacttagcaatgaaaagaacagaggaagagaggctgcgtcttgaagaagagcttgagttaggtttttcagcttcacccccaagtcgaagccctccacactttgagctttctagcctacgttactcttcaccacaagctcatgtcaaggtggaggaaacaagaaaagacttcaggtattcaacctatcacatcccaacgaaggctgaagctagtacaagttatgcagaactgagggaacggcatgcccag

SEQ ID NO: 66645 - DNA, 770 bp, Homo sapiens
agtaactataactgtccacccagagcctcatgtaacatggtataaatcagggcagaaaatcaaaccaggtgacaatgacaagaagtacacatttgagtcagacaagggtctttaccaattaacaatcaacagtgtcactacagatgatgacgctgaatatactgttgtggcaaggaacaaatatggtgaagacagctgtaaagcaaagctgacagtaaccctacacccacctccaacagatagtaccttaagacccatgttcaaaaggttactggcaaatgcagaatgccaagaaggccaaagtgtctgctttgagatcagagtgtctggcatccccccaccaacattaaaatgggagaaagatggtcagccactgtccctcgggcctaacattgaaattatccatgaaggcttggattattatgctctgcacatcagggacactttgcctgaagacacgggttattatagagtcacagccactaacacagctgggtccaccagctgccaggctcacctacaagtggaacgcctgaggtacaagaaacaggaattcaagagtaaggaggagcatgagcgacacgtacaaaaacaaattgacaaaaccctcagaatggctgaaattctttctggaactgaaagtgtaccactgacacaggtagctaaagaggctctgagagaagctgctgtcctttataaaccggctgtaagcaccaagactgtaaaaggggaattcagacttgagatagaagaaaagaaggaggagagag

SEQ ID NO: 66646 - DNA, 813 bp, Homo sapiens
cgacccacgcgtccgagaacgcccacggccaggcctcctccttcgccaatttcctcgtccgcacttacctggggaaggatgctggcttcgattcagagatcttcaaaagatcgacgtttggccccagcgtggaattcacctcggtgctgaagccagtctttgctcgtgagaaggaacccttctccctgtcatgcttgttttcggaagatgtgttagatgctgagagcatccagtggttccgagatgggagcctactgaggtcctcgagacgtcggaagatcctctacacagaccgccaggcatccctgaaggtgtcctgcacctacaaggaggacgaggggctctacatggtccgggtgccctcgcccttcggaccccgggaacagagcacctacgtgcttgtgagagatgccgaggccgagaaccccggggccccaggctccccactgaacgtccgatgcctggatgtgaacagagactgcctcatcctgacttgggccccgcccagtgacacccggggcaaccccatcactgcctacaccattgagcggtgccagggcgagtctggggaatggatcgcctgccatgaggcccccggagggacttgtcggtgcccaatccaaggcctcgtcgaaggtcagagctatcggttccgggtgagagccatcagcagggtaggcagcagcgtcccctccaaggcctcagagttggttgtcatgggtgaccatgatgcagcccggaggaagacagagatcccctttgatctgggaaacaagatcaccatcagcacagacgcttttgaagatactgtgg

SEQ ID NO: 66647 - DNA, 1279 bp, Homo sapiens
agaattttctattctgctccagaaagccgaagaacatgaagagtcacaaggtcctgttggtatggaaacggagactattaatcagcagcttaacatgttcaaggtattccagaaagaaaagattgaacccttgcaaggtaaacagcaagatgtaaactggttaggtcaaggccttattcagagtgctgccaaaagcactagcactcagggcttggagcatgacctggatgatgtcaatgcacggtggaagactctcaataagaaggtggctcagcgagcagcccagctgcaggaggccttgctgcactgtgggaggttccaggatgccctggagtccctgctcagctggatggtggacactgaggagcttgtggccaatcagaagcccccgtcggctgagttcaaagtggtaaaggcccagatacaagaacaaaagcttctccagagattgttggatgaccgaaaatctacggtggaggtaatcaaacgagaaggagaaaaaattgctacaacagcagagcccgcagataaagtgaagattttgaaacagctcagtctcttggatagcagatgggaggcattgcttaataaagctgaaacaaggaatcgtcagttggaaggtatctcggtggtagcacagcaatttcatgaaaccttagaaccactgaacgagtggcttacaaccatagaaaagaggctggtgaattgtgaacccataggaacccaagcatctaaacttgaggaacaaattgcacagcacaaagccttagaagatgacatcatcaatcacaataaacatttacaccaggctgttagcattggccagtccttaaaggttttgagctccagggaggataaagatatggtgcagagtaaattagacttctctcaagtatggtacattgagattcaagagaaaagtcacagcaggtctgagctcctccagcaggccttatgtaatgctaagatttttggggaagatgaagttgaactgatgaactggctgaatgaagtgcatgacaaactgagcaagctctcagtccaggattacagcactgaagggctatggaagcagcagtctgaacttcaggttctgcaagaggacatcttactcaggaaacaaaatgtagatcaggctttactaaatggtttagaactacttaaacaaaccacaggtgagatatctttcaaatcacatcatcatgtggtcagcattttatattgttttcaaaatattttagggatgggaaaaaaccaaaacactttataatttttggtg

SEQ ID NO: 66648 - DNA, 739 bp, Homo sapiens
aagcgagccatgtttgaatgtgaagtttctgaacctgacatcactgtacagtggatgaaagatgaccaggaactgcagatcacagacagaataaagattcagaaggagaaatatgtccaccgccttctgatcccatccacccggatgtctgatgctgggaagtacacagtggtggcaggaggcaacgtgtcaactgcaaaactctttgtagaaggcagagatgttcgcatccgaagtattaaaaaggaggttcaggtcattgagaaacagcgtgctgttgttgaatttgaggtcaatgaagacgatgttgatgcccactggtataaagatggcattgaaatcaatttccaagttcaagaacgacacaaatatgtagtggaaagaagaatccaccgaatgtttatctctgagaccagacagagcgatgcaggagaatacacctttgtggcaggaaggaacaggagttctgtcactctctatgtcaatgctcctgaaccgccccaagttctgcaggagctccagcctgtcactgtgcagtctggcaagcctgcccgcttctgtgccatgatatccggaagaccacagcccaaaatttcctggtacaaggaagagcagctgctttccactggcttcaagtgcaaatttcttcatgatgggcaagagtacacgcttttgctaattgaagccttcccagaggatgcggcagtctatacctgtgaagccaagaatgactatggtg

SEQ ID NO: 66649 - DNA, 650 bp, Homo sapiens
gtgaggacctgactgtggccctgcaagcagaggaactgaccctccagcagctgggcaccgtgggactctggcagttcctgcatggacagtgcccaggtacatgctttcaggaatcctcaactttgaagactggccacatcaggccagctgtgggccttcgctttgaggtggggcctggagcagctgttcattcccccctggcctcacaaaatggcttcctacatttattgcttcatggctgtgacctcgagctgctcacttcagtgctcagtggcctggggcccttcttggaggatgaggagatcccggtggtagtccccatgcagattgagcttctgaactccagcatcaccctaaaggatgatatcccccccatctatccaacatctccaggccccatccccatcactctggccatggaacatgttgtgctgaagaggagtgatgatggtgtgttccacataggcgctgctgctcaggacaaaccatcagctgaagtacttaaaagtgagaagagacagcccccaaaagaacaggtgtttttggtgcccacaggagaggtttttgaacagcaggtgaaagaactgcctatcctacaaaaagaacttatagaaactaaacaagccttggccaatgccaaccaagataag

SEQ ID NO: 66650 - DNA, 815 bp, Homo sapiens
  misc_feature (1)...(815): n = a,t,c or g
gcggccgcaacgtctgcaagttcgcgctgcacagcggctacagcagctacagcctcagccgcgcgccggacggcgccgccctggccaccgcgcgcgcctcgccccggcaggaaaaggatgcgcctccacttagcaaggctgggcaggatgtggttctgcatctgcccacagacggggtggttctagacggccgcgagagcacagatgaccacgccatcgtccagtatgagtgggcactgctgcagggggacccgtcagtggacatgaaggtgcctcaatcaggaaccctgaagctgtcccacctacaggagggaacctacaccttccagctgaccgtgacggacactgccgggcagagaagctctgacaacgtgtcagtgacagtgcttcgcgcagcctactccacaggaggatgttttgcacacttgctcacgctaccacttcttctgtgacgatggctgctgcattgacatcacgctcgcctgcgattggagtgcagcagtgtcctgatgggtctgatgaagacttctgccagaatctgggcctggaccgcaagatggtaacccacacggcagctagtcctgccctgccaagaaccacagggccgagtgaagatgcaggggggtgactccttggtggaaaagtctcagaaagccactgccccaaacaagccacctgcattatcaaacacagagaagaggaatcattccgccttttggggaccagagagtcaaatcattcctgtgatgccagatagtagttcctcagggaagaacagaaaagaggaaagttatatatttnagtcaaagggtgat

SEQ ID NO: 66651 - DNA, 663 bp, Homo sapiens
cccattaatggagcatcttttaaaggtcatgatgttttgagtgagggtacccgttttgtcggagaaaatgtactcaatctgccccagttcctcattgagcgtggtcgttcgagccactgcaggtattgcttttcgagaataatacatcttccggtcccagtttataaaatatctgtgtcctagacgaattacttccacactcacatataaggaaatgggtacaactgtattgagaataataatatatgaccagaatgttaagaatccggagaacacagagctcttctctccttcattccaaaagaggaaagttctgaattggtccccagtttgactctcccagattgaatttcctattgcaagaataattcccaagcatatcagaaacccaaaaatctgaaataagatagaagtgtggttaaggttaacttgaactcaaaattagtcatatcaacatgatctaattacgcatctaactccaagaaatagtcatttgaaaagcaagtatgcaaacctcttcttaccattaatcatatgaattacgtcaggaactcagctaaatattttacatacattttctcactgaatttgcccattgactctctaagatgggaacagtcattatccccactttacagtttaaaaacaaagtaaaatggaagc

SEQ ID NO: 66652 - DNA, 445 bp, Homo sapiens
gaaacctgtcactcttacacatcagacaaatcctaaaccccatgtgaatagtgtgggtggccataatttatatggcttatatcaaatgtccttatgaatgcttataattacataaaatttattctttcatttttatagtctgttcggcacttgaagtactccttgtttaaaaaatcactactgggcagtgtttcggataatggaatagtaactctctgggatgtaaatagtcagagtccataccataactttgacagggtacacaaagctccagcgtcaggcatctgtttttctcctgtcaatgaattgctctttgtaaccataggcttggataaaagaatcatcctctatgacacttcaagtaagaagctagtgaaaactttagtggctgacactcctctaactgcggtagatttcatgcctgatggagccactttggctattg

SEQ ID NO: 66653 - DNA, 553 bp, Homo sapiens
  misc_feature (1)...(553): n = a,t,c or g
acatggttcaaagcattcaggtagaactggaagccgaggcggaaaagatgcgggtgtcccagcaagaattactttctgttgatgaatctgtttacactccagactctgatgtggccgcaccacagatcaacaggaacctcatccagaaggctggttaccttaatcttagaaacaaaacagggctggtcaccaccacctgggagaggctttatttcttcacccaaggcgggaatctcatgtgtcagcccaggggagccgtggctggaggtttgatccaggacctggacaactgctcagtgatggccgtggattgcgaagaccggcgctactgcttccagatcaccacgcccaatggaaaatcgggaataatcctccaggctgagagcagaaaggaaaatgaagagtggatatgtgcaataaacaacatctccagacagatctacctgaccgacaaccctgaggcagtcgcgatcaagttgaatcagaccgctctgcaagcagtgactcccattacaagttttggaaaaaaacaagaaagctcatnnnccggcgc

SEQ ID NO: 66654 - DNA, 1684 bp, Homo sapiens
attcgctgtctccacgcatgaggagacgtgtaggggccgggttcggccctggtgaactctcacccgagcggtttctctttccgggacaacatggcgccgtccacgccgctcttgacagtccgaggatcagaaggactgtacatggtgaatggaccaccacattttacagaaagcacagtgtttccaagggaatctgggaagaattgcaaagtctgtatctttagtaaggatgggaccttgtttgcctggggcaatggagaaaaagtaaatattatcagtgtcactaacaagggactactgcactccttcgacctcctgaaggcagtttgccttgaattctcacccaaaaatactgtcctggcaacgtggcagccttacactacttctaaagatggcacagctgggatacccaacctacaactttatgatgtgaaaactgggacatgtttgaaatctttcatccagaaaaaaatgcaaaattggtgtccatcctggtcagaagatgaaactctttgtgcccgcaatgttaacaatgaagttcacttctttgaaaacaacaattttagtatggaaagatttatgacataattttattacttactgtaatcgtatacagtttccattaacttttatgacatcatagggttttcctaaatactgttaatctattaatcaataattactcttacatacatttgcataattctttataagtctgaattcagtgaaaatctgtaacacaaaggttttcttttacaataactttttattatctgggtaattgctattaagacatttgaatatcttttcctggaatttaattgctattgaaattctgtgacacaaattttttagatattttatcgtgtagaattttaaacttcagacacctagttctagtaaccatcagcttgtggccaatcttatctcatccatacatctctccagctaccatctcttactaagtgaaagcaaatcccagatatggttatacttttatatacttgttaaatatgtaattgtaaatatttcagagtagatttctgaagattggggcctttcattttttaaacttagccacaaaaccattatcacaaattattaaatatgtgttcaaatttctactaattgcaaatgttacaattttttttaaaactcgggatccaaataaggtactgcacattgtggttgattgatatatcttttatgtttcttttggtcctataagttcccactctatctgttattttattcttcataatttattgtttaagaaacaaggttatttgtctttcacgttttcccatagtttgaattttgcttttgtatcccatggtataatttaacatgttcatctgtcccctataaattgcaagttggctctagagtttcagcttcaggttcttttttaggtgagtaagggtaagactacattataaggtgatgttcacttcttttatcaagaagcacataatgtctggttgtctttaattttgtaggcttagctgacattaatgtttcatgcctggatgcattatttcatcagtggttgcaaattgttgatactctggttttttctccctcacttatttttcagctgtactgcttctataaagaaaaatttccccttctactatttggttacctagtgctgcatttatatagaaaaggcgggataaatatt

SEQ ID NO: 66655 - DNA, 546 bp, Homo sapiens
gttatgatacagtgggcatcctgagatggagaaatgtctctcatgttttcctgtaaggtgtcctgttaaaggagggaaaacttaatctcaagaaagaagacaagcttagaaagtagtatgtttctctaagacaaacctgtttttttgctacatcatttttatcaaatatatgtctgatcagactgaatccaccaaacataaggctggtagggctataacttacactcattcttttcttccacaggatggatctggcagtctttgaacatgcttatgtatgatcaatataaactataattctttctgctcttagacttctcaaatctcaaaatgtcacgaagtcaacatttgtaattaaagcccaagactatgaacaggaacactttcttttggtggaatgtaactctcctatactaaattaatcaggttatatgtagaataagtgtacttttctttctactgtgcaatgttatccaacctgaatttaacccctttcaatactcaaatttatgaaaaatggagaagcggccttttctatcatataag

SEQ ID NO: 66656 - DNA, 329 bp, Homo sapiens
ccaaaaccttatttcagatcagaaggaaatagcaaactataagttaataaactggtcgtatagtacatataaattaatcatgtgcaaatccagtcaatgtgactaaatttcccagagtacagtttctcccctcattctggctgtggacattaactgttagtattattatacaataattgtgcttacttgactattgtagagttcttctagaagagctaaggatttaatggactttgatctgcaaatttcttgctctgtaaattgctggatagctggatgaaccttctgaatctgacccaaacgcaaaaatcctattttaaacttggcta

SEQ ID NO: 66657 - DNA, 368 bp, Homo sapiens
cttggttgttggctcactgaagaagttgtcaatcatgttcagttcttccttctccaccaccacaaagccttgctctttggcatcttttccatagacatcgggagaccactgaacaaagaatgtgtacaaatgatccaccctctcccgaggaacagcaaaccagtactctggctgctttctccgtttgccgtactgctggaccatggctgcagtgtgagtggcaaaggattttctcattggttttcccactttgatgcacaggaacatgggtggggtcttgcttttttcttcttttgaaggaagtatatcttcaatgggtacctgaattctctttaacagccacaactgaacttcagatttattatcca

SEQ ID NO: 66658 - DNA, 383 bp, Homo sapiens
cttgattcaagtatgttggagtgaggtcacatccaccaccaaaccaccactgcttgttgccatcagcttcttctacttctgggtaatgtccaaaaaaaatgttcttcatgagcacatttttttagtccttgagtttttccccctactttcacacttgattgatggtttaactggatacagaattctaggctgaatgcaaaactttcaaggtgatgttttaccaccttctaccttcaattctactgccaacaagttagatgctattcatattcctaatccctcctaggcgattctaaaaagtttttagatattatctttatttctggtgtcctaaaacaaatttcataataatttgcctagtatagggtttcttttattgtgct

SEQ ID NO: 66659 - DNA, 582 bp, Homo sapiens
gaatccagtggcataatgacagaaaggtatagaatcacagttgtgaataacggggaaaaaataaagtagttatacagtagttagactatcttgagaagttacagtaaaatgaatgagattgtgggagcaaaattgttactaccaagtttactaaataagcacagaggtaatttgaggcttattttacctatgaaccatgttccgggtataccatacagaaggaaaagattccttcaggagagatgtataattacggtttaaatcccgtccagctaaggaacagcgataatttcccacaatcacaccatctggattcagcatgggtaccaccttgaagacaaaagtgtcccgaagcaactgtgcatcacttgagtttcctaaaatataatctaggaagcctttcatgatccaagagctgttggtttcccctggatggacccttgcagtcagaatcacagccttccgctttcttgagtcagagctcttcaagggggtagtgattgttaaaatatacaccatgttcctagcaagcgtgtggcacaaaacacgtattttacaaaactttgaccgtactggatcatt

SEQ ID NO: 66660 - DNA, 916 bp, Homo sapiens
ttttgataagaggcaacatgaagcaagaatccagcaaatggagaatgaaattcactatttgcaagaaaatctaaaaagtatggaggaaatccaaggccttacagatctccaacttcaggaagctgatgaagagaaggagagaattctggcccaactccgagagttagagaaaaagaagaaacttgaagatgccaaatctcaggagcaagtttttggtttagataaagaactgaagaaactaaagaaagccgtggccacctctgataagctagccacagctgagctcaccattgccaaagaccagctgaagtcccttcatggaactgttatgaaaattaaccaggagcgagcagaggagttgcaggaagcagagaggttcagcagaaaggcagcacaagcagccagagatctcacccgagcagaagctgagatcgaactcctgcagaatctcctcaggcagaagggggagcagtttcgacttgagatggagaaaacaggtgtaggtactggagcaaactcacaggtcctagaaattgagaaactgaatgagacaatggaacgacaaaggacagagattgcaaggctgcagaatgtactatacctcactggaagtgacaacaaaggaggctttgaaaatgttttagaagaaattgctgaacttcgacgtgaaggttcttatcagaatgattacataagcagcatggcagatcctttcaaaagacgaggctattggtactttatgccaccaccaccatcatcaaaagtttccagccatagttcccaggccaccaaggactctggtgttggccttaagtactcagcctcaactcctgttagaaaaccacgccctgggcagcaggatgggaaggaaggcagtcaacctccccctgcctcaggatactgggtttattctccc

SEQ ID NO: 66661 - DNA, 359 bp, Homo sapiens
cttgagtgaggttttcgagtaagtcatttggactgcttgatgcactgaaaccttctgtttcagactttaagtctacccctgaaaagagaaaagcgaaagattacttgtattccctaaacactaaatatttcaaacttcattaatcatttagaagatctagtggcaaaaatagtaattcagaggatgcttacaaaaccttttccaatcttttcctataacacaacttttgacaatgatatggaaattttgaagattaatgagttcccttaaaagcaattttcatcttcaatagaactacaaattttacaaataagaatttttacagacatatgatagagatttaacacatcccatggaca

SEQ ID NO: 66662 - DNA, 561 bp, Homo sapiens
  misc_feature (1)...(561): n = a,t,c or g
cttagctatcgcccatcaccgcttctatacaaagaggctgaccttttggacgtgtctggctgtgatctgtatggtgtggactctgtctgtggccatggcatttcccccgggtttagacgtgggcacttactcattcattagggaggaagatcaatgcaccttccaacaccgctccttcagggctaatgattccttaggatttatgctgcttcttgctctcatcctcctagccacacagcttgtctacctcaagctgatatttttcgtccacgatcgaagaaaaatgaagccagtccagtttgtagcagcagtcagccagaactggacttttcatggtcctggagccagtggccaggcagctgccaattggctagcaggatttggaaggggtcccacaccacccaccttgctgggcatcaggcaaaatgcaaacaccacaggcagaagaaggctattggtcttagacgagttcaaaatggagaaaagaatcagcagaatgttctatataatgacttttctgtttctaaccttgtgggggcccctacctggtnggcctgttat

SEQ ID NO: 66663 - DNA, 484 bp, Homo sapiens
ggggtgtggccaagggcaccacccccttgaaaaccgtagtagcatgactatcgccaagcttggcacgaggccagagcatgaggcccacagtgttgtgccaatggaggatgttgcctgggagtacaagtgggaacttcatgaggccctcgaacatctgaagaaagagcaagaagaggcctggaagcttgaagttggtgaaaggaaacgaactgccacctggaagatacaggtggaaacccgaaaacagagtgttgtatgggagtttgaaaaataccagcgattactagagaaaaagcagccaccacatcggcagctgggggcagaggtagcagcagctctggccagcctacagcgggaggcagcggagaccatgcagaaactggagttgaaccatagcgagctcatccagcagagccaggtcctgtggaggatgattgcagagttgaaagagaggtcgcagaggcctgtccgctggatgttgcag

SEQ ID NO: 66664 - DNA, 866 bp, Homo sapiens
gggggactttgagatgtgtgaatattcatcagcatttgcttgtggaacgctcacctctgctttttactcttgccgaaagactgtattgatcaagtgatgaaactacagaatctgtttgtagatgattcaggtcgatatttggctattcaattccatctggaatgggcatatgtgtttttatattattatgagtacagaaaagcaaaagatcagttggatattgctaaggacatcagccaattacaaattgatttgacaggtgctttgggaaaaagaacacggttccaggaaaattatgtggcacaactgattctagatgtaagaagggaaggggatgtcctttcaaattgtgaattcactccagcacccactcctcaggaacatttaaccaagaatcttgagctcaatgatgacaccattctgaatgacataaagttagcagattgtgaacagttccagatgccggatctgtgtgctgaagagatcgctattattcttggaatctgcactaattttcaaaagaataacccagtgcacacattaactgaagtggagcttctggcatttacatcatgtttgctttcacaaccaaagttctgggccattcagacatcagccttgatcctccggacaaaacttgagaaaggaagtactcgccgagtggaacgggcaatgaggcagacacaggctcttgcagaccaatttgaagataaaactacatctgtattggaacgcctgaagattttctattgctgtcaagtaccacctcactgggccattcagcgccaacttgcaagtttgctctttgagttgggatgtaccagttcagcccttcagatatttgaaaagctagaaatgtgggaaga

SEQ ID NO: 66665 - DNA, 452 bp, Homo sapiens
agctgcccttcctgggcctggggtctgttcttccccagggcatggtgatggtgagcccggagatgaatcctaccatctgctcggtgtttgaggcagagatagtcttactgttccatgccaccaccttccgacgaggattccaggtgacagtacacgtgggcaacgtacgtcagacggcagtggtggaaaagatccatgccaaggacaaactgcggacaggcgagaaggcagtggtacgtttccgcttcctgaaacacccagagtacctgaaggtgggcgccaaactgctgttccgggagggtgtcaccaagggcatcggccatgtcactgatgtacaagccattacagcaggagaagcccaggccaacatgggcttctgaacccttcaggcagggacagttctattgctgtccctacaatatataaggtgacttctggccatgctgccctgc

SEQ ID NO: 66666 - DNA, 814 bp, Homo sapiens
ggcaagaagccactgggctaggtacttcaacccaacccttgacatctagcgcatcgtctcttactggtttcagtaactggtcagcagcgatagcgccttcctcctctacaataatcaatgaagatgcaagtttctttcaccagggaggggtccctgctgcttcggctaataacggtgctctgttgtttcaaaatttcccccatcatgtcagccctggctttggaggcagcttctctcctcagatcgggcctctctcacagcaccacccacatcaccctcatttccagcatcatcacagccagcatcagcagcaaaggaggtctcctgccagtccccatcccccacccttcacacatagaaatgctgcttttaaccagctgcctcatttggcgaataatcttaacaaacccccctctccgtggagcagctaccagagtccgtcaccaacaccctcctcttcctggagcccgggcggtggtggatatggtggctggggaggttcccaaggccgagatcaccgcagagggctgaatggtggaataacgcccctgaactccatctcgcctttgaagaaaaattttgcaagcaatcatattcagctccagaagtatgctcgccccagctctgcctttgcacctaaatcctggatggaagatagcttgaacagggctgacaacatttttccttttccggatcgccccaggacattcgacatgcactcactggagagttcactcattgacataatgagagctgaaaatgataccattaaagggcagtcttcactgtttccaatggaagatggattcttgga

SEQ ID NO: 66667 - DNA, 411 bp, Homo sapiens
ggcctcgtgccacttacaccaatggcattgacatgaacatggtcctaaagggtttcccagaatgcttacaagcagacatttgtctacatctcaaccagacattgctgcaaaactgcaaagcctttcggggggcaagtaaaggttgccttatagctttggcaatgaagttcaaaaccacccatgcacctccaggagacaccctcgttcactgtggggatgtcctcactgcactttatttcttatccagaggctccattgaaattctcaaagatgacattgtggtggctattctgggtgagtgttttataagtgcatggtgacagattcagttattagcttgtaatgcatagattaaaatgattaggaaaaaaagactgatgtatgtattcataagaacagcttaagatggtg

SEQ ID NO: 66668 - DNA, 709 bp, Homo sapiens
agggcagggctgtcatggcttagcatggtcggccttcttgggttctccagacttcaggggaagggtagcctgtggagggctccccgcccgggagttcttggcatctttattaaggtcccgagcgtagagtagctcatcctgcacaggctccagggggcacagtctcagggcccgcacctcctcctgcactcgtccacacagccgctgcggcatttgctcggcgctgctggtcaccaggccctgctgcaacctgaaggcctgctcctgggggcacgtctgggagtggttgttcctcactaagcaccattggatcttctgccagacgtcctcggtgcgctcaggcgcgctgcgataggcttgggagatgtcgctcacggggaaggacatgaagcgcagcgtgtggttgctctccagggcccttgcgatgtccaggaagcccagggcagatgtattgttccgatcccataggatagttctgagggaggagtttatctgcagggccttagacagcatcttggccccgatgtcctccatgccattgccgctcagatccaccttggccaggcaggtgttgctgcccagggcattgatgaggatgctggtgcgaagcttcagccgggagtctgccaccgacagtgactgcagggactgtgtgggcaaggggcggttggacccagtccccacagcctcctccgactgcaggtcccct

SEQ ID NO: 66669 - DNA, 522 bp, Homo sapiens
tacgcgcagcttggcacgagggcaagtttggggcagtctgtacctgcatggagaaagccacaggccttaagctgtcagccaaggtcatcaagaaacagactcccaaagacaaggaaatggtgttgctggagattgaggtcatgaaccagctgaaccaccgcaatctgatccagctgtatgcagccatcgagactccgcatgagatcgtcctgttcatggagtacatcgagggcggagagctcttcgagaggattgtggatgaggactaccatctgaccgaggtggacaccatggtgtttgtcaggcagatctgtgacgggatcctcttcatgcacaagatgagggttttgcacctggacctcaagccagagaacatcctgtgtgtcaacaccaccgggcatttggtgaagatcattgactttggcctggcacggaggtataaccccaacgagaagctgaaggtgaactttgggaccccagagttcctgtcacctgaggtggtgaattatgaccaaatcttcg

SEQ ID NO: 66670 - DNA, 696 bp, Homo sapiens
atgtctcagggactcccagcagcctcctaccccgtgaggaggagagtttcctaaaaaagaaggaacctagagaaaggcagaccatgtgtgggaaggatatccagggatatcctttgagcacctagagccagctctgccagaacgcagacctctccggttttttaagctaataaagtccttttttgcctaaatctgtttgaattggatatctggcattttccactctttgcccgtaaccaatacaaaaactcaccccaatttctccccaacttccatgtgtcctccgcatttccccaggtattgtccaattcaaatgtaaatgggtcagagaacggctccaggtccggatcctctgcctcgatgtggaggggctcatgcacagcagactcacagacctccatgtagcgggaacgtggccggagagtcgggacgttgtcattgatgtcagacaggaagagcattagggtccctgtagcagtctgcggtgggaagccatcatcaacagcgtgaatgatgattacataaaaactgttatttacatgaggggattctcggtcaattggctccacggtgatgaccactccggagtttttgtcgacgctgacccaatttgctgggtcatgaaccagttcatatcttatctggctgtctggatccatggcattaaaagttcccaacagggtcccaggcctggcc

SEQ ID NO: 66671 - DNA, 205 bp, Homo sapiens
cgcaccttctcttcctcctgctactctggctcccagacaccaccggagacactgtgttgacgcagtctccagccaccctgtctttgtctccaggggagagagccaccctctcctgccgggccagtgagagtgtgggcgacaactgcttagcctggtctcaccagacacctggccaggctaagcagttgtcgcgtcgacgcggccg

SEQ ID NO: 66672 - DNA, 726 bp, Homo sapiens
  misc_feature (1)...(726): n = a,t,c or g
ctttctacagaaccaaaaacacagaagttgagtaataagaaaggaagtaatactgacactcttagaagagtactgttaacacaagcaaaggtaactatactaaacatttttaaagatcagtggaagagccagtctttttcctagatttcagttagataattgttaactttgtctcaattaaaaaattttggttacttaaatttttgcatcattatttgcatatctttgagacaacaaaaatttgcctttttttagnnnnnnnnnngtggtggggatctaaaagattcttatatgtaaatacaaatattacagagaaagtgaatatgatagccaaaatgtggattatgaggatacaaatccattaactgattactggcaaaatcagaacaatccaatgacagcagagctcaaaatcaatttgcagcagtaaataccccacagaaagaaacttctcagattgatggaccatctttaaacaatacttacggtttcaaagtcagcatacaaaacttacaggaggcaaaagctttacatgaggtaaaactgcaacagtaaggacacatacattgggttcagtttaactcctgttttattctataaaacaagtatggaatttttttaacaagggaggagtatattgaattctatcctattaatcttcatcttggtctcattttactattttggatatttacatggttatgtacaatacataaacttaaagct

SEQ ID NO: 66673 - DNA, 484 bp, Homo sapiens
ggcgggtttttcgagcgcctcgatgagcacgtcgaccggccgacccacgcgtccgtttctttgagttataaagaaagaagctgcttcagacattacctgtgggaaccactcagaatctcccagcgctttcaggaaggtcacttctgagtcagtagggatggtgcttgggatacaagccctcatcagcttcttaaaactggctttcacttgccggatttcatgaaattcaacaggaacaaactcacaatttaaagcaaattctaccttgaagttctgcggatgaagattcagagaattaggcagatgaagtgctataggtaaaagagtgatgcttccaatggggcagtgcataatgacaaagttatttggggccaaatagctgcagaggctgccaatgggtcaagaaagtcaatcttgtacggcaatgtgtcagtgttggtgggaagagccattcagtacaagctagtggcttgcccagaatggg

SEQ ID NO: 66674 - DNA, 1203 bp, Homo sapiens
cccaacatcgcgatagtacccaaggacgggacgggatgggcaaacaagcaggatcagcaagacccaaagagttccagtgcgacggcctctcagccgccggagtcgctgccgcagccgggtttgcagaaatctgtctccaatttgcagaaaccgacacagtcaatcagtcaggagaatacaaattcagtgccaggtggaccaaagtcatgggcacagctgaatggaaagccagtaggacacgaaggtggtttaaggggctcaagccgactgttatccttctctcccgaggaatttccgacgctgaaagcagctggagggcaggacaaggctggcaaagaaaagggcgtcttagatctgtcgtatgggccaggaccaagcctccgccctcagaatgtgacaagctggagggagggcggtgggcgacacataatttctgccacgtctctgagcacctccccaactgagctgggcagcaggaactcgagtacgggagatggagccccctcctcggcatgtaccagcgattctaaggacccctctctccgcccggctcagcctgtccgaaaaggggcttcacagttcatgggaaatgtataccacccacctacataccatgacatgcttcctgcttttatgtgttcgccgaagtcatcagaaaaccagggtacagtggaacgaggctcttttccccttcctcagctccgccttgaacctcgagttccttttagacagttccagatgaatgaccaagacggaaaagaaaacaggctgggattgtctcgcccactccgcccactaaggcagctggtggagcgggcaccacggcccaccattatcaatgcggaaaacctgaagggccttgacgatctggacgccgatgccgatgatggctgggcaggcctccatgaagaagtggactattctgagaaactgaagttcagtgatgatgaagaggaggaagaagttgtgaaggacggcaggccaaagtggaacagttgggaccctaggaggcagcggcagttgtcaatgagctctgcagacagtgcggacgctaagcggactcgagaggaagggaaggactgggctgaagcagtgggtgcgtcccgtgtggtccgaaaggcgcccacctccccacgccctcccctcccctgctgcaggggctctggagagaaacaataaagagattcacacacaaaaaaaaaa

SEQ ID NO: 66675 - DNA, 1325 bp, Homo sapiens
  misc_feature (1)...(1325): n = a,t,c or g
ccaggaagcccactgtaattcgaattccagccaaaccaggaaaatgtttacatgaggatccacaaagtccacctcctctccctgctgaaaaacctattggaaacactttcagtacagtatctggaaagctcagtaatgttgagagaactagaaacttggaatccaaccacccaggtcaaacaggaggttttgtgcgagtacccccaaggttgccaccgagacctgtgaatggaaaaaccattccaactcaacagcctccaaccaaggtgccccctgagagaccacctcccccaaagctttctgcaaccagaagatctaataagaaactgccttttaatcgatcctcttctgacatggatcttcagaaaaaacaaagtaacttggcaactggactctcaaaagccaagagtcaagtttttaaaaatcaagatccggtgctaccccctcgtcccaaaccaggacaccctctctacagtaaatacatgctgtctgtgcctcatggaattgccaatgaagatattgtctctcaaaaccccggagaactctcttgtaagcgtggggatgtacttgtgatgctgaagcagacggaaaataattacttggagtgccaaaagggagaagacactggcagagttcacctgtctcaaatgaagnttatcactccacttgatgaacatcttagaagcagaccaaaccccttttctccccctaaggntccaagccacgctcagaagcctgttgacagtggtgctcctcatgctgtcgttcttcatgatttcccagcagagcaagttgatgatttgaacctcacttctggagaaattgtttatcttctggagaagatagatacagattggtacagagggaactgtagaaaccagattggcatatttcctgccaactatgtcaaagtgattattgatatcccagaaggaggaaatgggaaaagagaatgtgtttcatctcattgtgttaaaggctcaagatgtgttgctcggtttgaatatattggagagcagaaggatgagttgagtttctcagagggagaaattattattcttaaagagtatgtgaatgaggaatgggccagaggagaagttcgaggcagaactgggattttccccctgaactttgtggagcctgttgaggattatcccacctctggtgcaaatgttttaagcacaaaggtaccactgaaaaccaaaaaagaagattctggctcaaactctcaggttaacagtcttccggcagaatggtgtgaagctcttcacagttttacagcagagaccagtgatgacttatcattcaagaggggagaccggatc

SEQ ID NO: 66676 - DNA, 749 bp, Homo sapiens
cgacccacgcgtccgagcgagactccgtgggcgtatgaccctccgagccagtctatttttcaggagcattgaactgaccagttatgtttatatctgggagaactacaggctgttcaatttgccttgggattctccatggacttggtattcagccttcttaggagttgactttggctactactggttccatcgtatggctcatgaagttaatattatgtgggccggacaccaaacacatcatagttctgaagactataacttatccacagcactgagacagtctgtcctccagatatatacttcctggattttctactctcccctggccctcttcatacccccttcagtatatgctgttcatcttcaattcaatcttctttaccaattttggatccatacagaggtcatcaataaccttggtcctttggaactgattcttaatactcgtagccatcatagggttcatgatggcagaaatcgttattgcatagacaaaaattatgctggtgttcttattatttgggataaaatttttgggacatttgaagcagaaaatgaaaaagttgtatatggcttaacacatcccattaatacatttgaaccaatcaaagtgcagttccatcacttattttccatatggactacattctgggccacacctggattcttcaataagttttctgtcatatttaagggaccgggatggggtccaggtaaaccaagacttggtctcagtgaagaaattcccg

SEQ ID NO: 66677 - DNA, 563 bp, Homo sapiens
agcgccaagggggacaaaggcggaaaggataaaaagcagattcagacctctcccgttcccgtccgcaaaaacagcagagacgaagagaagagagagtcacgcatcaagagctactcgccatacgcctttaagttcttcatggagcagcacgtggagaatgtcatcaaaacctaccagcagaaggttaaccggaggctgcagctggagcaagaaatggccaaagctggactctgtgaagctgagcaggagcagatgcggaagatcctctaccagaaagagtctaattacaacaggttaaagagggccaagatggacaagtctatgtttgtcaagatcaaaaccctggggatcggtgcctttggagaagagtgccttgcttgtaaggtggacactcacgccctgtacgccatgaagaccctaaggaaaaaggatgtcctgaaccggaatcaggtggcccacgtcaaggccgagagggacatcctggccgaggcagacaatgagtgggtgggcaaactctactactccttccaagacaaaaacagcctgtactttgtgatggacta

SEQ ID NO: 66678 - DNA, 507 bp, Homo sapiens
ggactggcgaaccttgtgtagcagagctgacagaggagaactttcagaggcttcatgctgagcatgagcggcaggccaaagagctgtttcttcttcgaaagacattggaggaaatggagctgcgtattgagactcaaaagcagaccctaaatgctcgggatgaatccattaagaagcttctggaaatgttgcagagcaaaggactttctgccaaggctaccgaggaagaccatgagagaacaagacgactggcagaggcagagatgcacgttcatcacctagaaagccttttggagcagaaggaaaaagagaacagtatgttgagagaggagatgcatcgaaggtttgagaatgctcctgattctgccaaaacaaaagctctgcaaactgttattgagatgaaggattcaaaaatttcctctatggagcgtgggcttcgagacctggaagaggaaattcagatgctgaaatcgaatggtgctttgagtactgaggaaagggtgtatt

SEQ ID NO: 66679 - DNA, 1007 bp, Homo sapiens
ctgaagatcacaccgatgaatgccgatgtgattgtgctgggcctgcagagcaaggaccaggctgagcagtggctcagggtcatccaggaagtgagcggcctgccttccgaaggagcatctgaaggaaaccagtacaccccggatgcccagcgctttaactgccagaaaccagatatagctgagaagtacctgtcggcttcagagtatgggagctccgtggatggccaccctgaggtcccagaaaccaaagacgtcaagaagaaatgttctgctggcctcaaactgagcaacctaatgaatctgggcaggaagaaatccacctcactggagcctgtggagaggtccctcgagacatccagttacctgaacgtgctggtgaacagccagtggaagtctcgctggtgctctgtcagggacaatcacctgcacttctaccaggaccggaaccggagcaaggtggcccagcaacccctcagcctggtgggctgcgaggtggtcccagaccccagccccgaccacctctactccttccgcatcctccacaagggcgaggagctggccaagcttgaggccaagtcttccgaggaaatgggccactggctgggtctcctgctctctgagtcaggctccaagacagacccagaagagttcacctacgactatgtggatgccgatagggtctcctgtattgtgagtgcggccaaaaactctctcttactgatgcagagaaagttctcagagcccaacacttacatcgatggcctgcctagccaggaccgccaggaggagctgtatgacgacgtggacctgtcagagctcacagctgcgctggagagtttggagccagaggatccttccctgagaatcaccaccgtcaaaatccagacggaacagcagagaatctccttcccaccgagctgcccggatgccgtggtggccaccccacctggtgccagcccacctgtgaaggacaggttgcgcgtgaccagtgcagagatcaagcttgg

SEQ ID NO: 66680 - DNA, 555 bp, Homo sapiens
gagcctttccatcccaggggatgcccaggcatggagaagctgcccctgggatggaaaggctccctgccagcaggttcttgcccacctggcccagctcaccatcctcagcaacttcaccgcactctccttcttcatgggcttcatggactcccacagggatgccatccctgactatgaagccctagtgggccccctgcacagcctcctcaagcagaagcctgactggcagtgggaccaggagcatgaggaggccttcctggccctgaagcgagccctggtgtctgccctctgcctgatggcccccaactcccagctgcccttccgcctggaggtgaccgtgagccacgtggccctgacggccatcctccatcaggagcactcagggaggaagcaccccatagcctatacctcaaaacccctcctccctgatgaggagagccagggcccccagtcagggggtgacagcccctatgctgtggcctgggccctcaagcatttttcccgctgcattggagacaccccggtggtcctggacctttcctatgcctcccggac

SEQ ID NO: 66681 - DNA, 402 bp, Homo sapiens
  misc_feature (1)...(402): n = a,t,c or g
gagaaagaatccctccattgctgttccaattgtccttaaaaggttgaagatgaaagaggaagaatggcgagaagctcagagaggctttaacaaagtatggcgagaacaaaatgagaaatactacttgaagtctctggaccaccaggggatcaactttaaacagaatgacaccaaggtcctgaggtctaagagcttactcaatgagattgagagtatctatgatgagaggcaagagcaggctacggaggagaatgctggtgtacctgttggcccacacctctcacttgcgtatgaagacaaacaaatactggaagatgctgctgctctgattatccaccatgtgaagaggcagacaggcattcagaaggaggacnnnnnnnnttnnnaacactaaaaaaaaaa

SEQ ID NO: 66682 - DNA, 876 bp, Homo sapiens
  misc_feature (1)...(876): n = a,t,c or g
gggaattgaatttacaagattttagtcatcttgaccacagggacctaatacctatcattgctgctctggaatataatcagtggttcacaaaactgtcctctaaggatctaaaactgtccactgatgtctgtgaacagatcttgagggtggtgagtaggtccaatcgactggaagaattggtgttggaaaatgctggacttagaacagattttgcacaaaaactggccagtgctctagcacataatcccaactcaggactccacacaattaaccttgctggcaacccactggaggatagaggtgtgtcctctttaagtattcaatttgccaaactcccaaagggattaaagcacttaattttatctaaaacccattatcancctaaggnggtgaacagcctttctcagtcactcagtgccaatccattgaccgcctctacccttgtccacctcgacctctcagggaacgtccttcgtggagatgacctctcacacatgtataattttttggcccagccaaatgccattgttcatctggatttatccaatacagaatgttccctggacatggtctgtggagctcttctccgtggatgccttcaatatttagctgtgctcaacctctccagaactgtcttctctcaccggaaaggaaaagaagtacctccatctttcaagcaattttttagtagttctctggctttgatgcacatcaacctttcaggcacaaaactgtctcctgagcccttaaaagcactgttattgggcctggcttgtaatcataacttgaaaggggtttctctggatctcagcaactgtgagctgagatcaggaggtgctcaagtattagaaggttgcattggctgaaatacacaac

SEQ ID NO: 66683 - DNA, 1080 bp, Homo sapiens
cctctactgcagcttcatcatcagattcttctttctgttcttggggtgcttcttcttcctccatgggctcctcaacagtttcagtcttgctgctccatacataaataggaaagtttatgaactgtgaatattttttgacgagatttttaattgtatccaattcaaggtaatcagatgcttcttcttttaagacaagggtaattgtcgttccccgtcctagagtgtttcctcttgggtcagcaattacagaaaattcattggagtcagactcccagattggccagtttggtgtcggtttctattccgccttccttgtagcagataaggttattgtcacttcaaaacacaacaacgatacccagcacatctgggagtctgactccaatgaattttctgtaattgctgacccaagaggaaacactctaggacggggaacgacaattacccttgtcttaaaagaagaagcatctgattaccttgaattggatacaattaaaaatctcgtcaaaaaatattcacagttcataaactttcctatttatgtatggagcagcaagactgaaactgttgaggagcccatggaggaagaagaagcagccaaagaagagaaagaagaatctgatgatgaagctgcagtagaggaagaagaagaagaaaagaaaccaaagactaaaaaagttgaaaaaactgtctgggactgggaacttatgaatgatatcaaaccaatatggcagagaccatcaaaagaagtagaagaagatgaatacaaagctttctacaaatcattttcaaaggaaagtgatgaccccatggcttatattcactttactgctgaaggggaagttaccttcaaatcaattttatttgtacccacatctgctccacgtggtctgtttgacgaatatggatctaaaaagagcgattacattaagctctatgtgcgccgtgtattcatcacagacgacttccatgatatgatgcctaaatacctcaattttgtcaagggtgtggtggactcagatgatctccccttgaatgtttcccgcgagactcttcagcaacataaactgcttaaggtga

SEQ ID NO: 66684 - DNA, 397 bp, Homo sapiens
tagcgcgtcttcccgagccactcccgtcctgggtcgctcggctggacttaagtcacaacagattatctttcatcaaggcaagttccatgagccaccttcaaagccttcgagaagtgaaactgaacaacaatgaattggagaccattccaaatctgggaccagtctcggcaaatattacacttctctccttcttcaggagagatttgatgaaaaaaattatattttggcatcatcttgactcttgaacttactcccagatcagctacaaatttgtcctatggcctgaggcactgaaaacacgacagagctctgcaataatttccagtcagaccagacaacctagttattcccttttcccaggtgtcccggtgacctatattattgtcaacaacaaggc

SEQ ID NO: 66685 - DNA, 619 bp, Homo sapiens
agaatctctgaggaaaagcgtggtttggtaaactcccatgtttagaacagaaatgttagcatgaacttagttggccaatggtcaggcactgccaaggtttataggggtgccaacacataaatgattggtgggaacctgtgcttttgaggtcagggtcatagtttgagtcctctgtggggctagttaaactaagttataaacccactatggtataaaaaatataaaactaaaaaactgccgtattattcctatatatcttattttatttgcgtgcaaataaatatgactagatttaatttcctaacatgactttacattgacattgaccatttcccttgtaaagcattctccagcagttgcagagggaccaagcccacactgtgacaccagacaaaagtcacttccgatcactaaaagatgcggtacagagactgctctcctaccacgtgtgccagggctccatgcccactgaagaagacttgagaaaagtggacaatgaatttgagacagctgtcactcagctcctaaaaaggacccatgctatgcttaacaaatacagacgcctgctcctagaagatgccatggcaaaagtcatgctactgatatttgttctttaaaa

SEQ ID NO: 66686 - DNA, 724 bp, Homo sapiens
atgacacatttgaagcctcgaaccgcggcggaccccgcgtgcgctcgaagataaccaagcagtcttttaaagaaaagatttgttgccttgccaactaatacgacctcatcgagacctctgactgagtgttgtagtgatgcaggtgactctcctttgaaacctgtcagctgtccaaaatctaaagcatcagacaagcggagtttacttccacatcacatcaggcagatatatgacgaattatttcagatacatgtgaaattgcagtgtgaaactgcagcacaacagaaatttgctgaagaacttcaaaagcgagaacgttttttacttgaaagagaacaactgcttttcagacatgaaaatgccttgagtaaaattaaaggtgttgaagaagaggttcttacaagatttcaaattataaaagagcagcatgatgcagaagttgaacacttaaccgaagttcttaaggaaaagaataaagaaaccaagagactgaggtcctcttttgatgcattgaaagaattgaatgataccttaaaaaaacagttaaatgaagcaagtgaagaaaacaggaagatagacattcaggctaaaagagttcaagcacgtttagataatttacagaggaagtacgagtttatgacaatacagagattgaaaggaagttcccatgctgttcatgaaatgaaaagtttaaaacaagaaaaagcaccagtttcaaaaactt

SEQ ID NO: 66687 - DNA, 522 bp, Homo sapiens
  misc_feature (1)...(522): n = a,t,c or g
tttggtaaaaggctgattttggccatagtcttgagttctcaagtgacgtgtgaaaaaccaatgtttccataggtccttctgtacctcccttagtgaatccacctctgcctacaacttttcaaccaggagctcctcatgggccccctccagctggaggcccacccccagtgagggccctcacgcccctgacatcatcatatagagatgtaccccagcccttatttaattcagctgtcaaccaagaaggtaagtgaaccaagaaacaaagtcaaatcctcaagttttgacttagggtagaaagatgaatattagctgaattctgtgcattaaaatcacattttttccagaaaatctagttttggttagggatgggctacaggaatttacaatttaaagttcctcagggatttccctttggccatccgctggggctgtgactacccttggggaaaaagctcttagtgtttttgttaanttttttgttgctatgcgggtttttttaaaaatcatgggtattaaggc

SEQ ID NO: 66688 - DNA, 466 bp, Homo sapiens
ctccccatagataccgtcgccgcacgatcggaatgaattccctgggagacccacgcgtccgaagatacagacataggcttttgcggcacaaattgactgtgagtgacggagaatctggagaagaaaaaaagacaaagcctaaagagcataaagaagtcaaaggcagaaacagaagaaagggtaagatgttttaattctgaatgtaaagaacatattggaccagacagtggcttatgcctgtaatcctagcactttgggaggctgaggtgggcagattgcttgagcccgggagtttaggaccagcctgggcagcatggggaagcctcatctttatggaaaatggaagaaatagctgggtgtggtggtgtgcacctgtagtcccagctacttgggaggctgaggtgggaggatcacctgagccccggaggtcaaggctgtagtgagcagcgattgcaccactgcattg

SEQ ID NO: 66689 - DNA, 601 bp, Homo sapiens
gcatgagccagacaatggagcttgctcggaatccacccatgatgcaagagatgatgcggaaccaggaccgggccctgagcaaccttgagagcatccctggagggtataatgccctccgccgcatgtacacggacatccaggagcccatgttcagtgctgcccgggaacagtttggcaacaatcccttctcttccctggccgggaactccgacagctcatcctcccagcctctgcggactgagaatcgagagcccctccctaacccctggagcccctcgccccccacctcccaggcccccgggtccggtggggagggcaccggaggatcggggaccagccaggtgcacccgacagtctcgaacccctttgggatcaatgcggctagcctggggtcaggtatgtcctgggatggaaggagcttagtggggtcaccagggcagcccctctgtcccaggactgaatggggttcatactgctccaggattttgaaggcagaggtgagactgtcgaggccacagagggggctctgccgtctgggatagtggccgggtgagggctggttctggccatgtcctgatatccctaggagtgacccaagtaa

SEQ ID NO: 66690 - DNA, 722 bp, Homo sapiens
ctagagctctactcctgaggtactggaccggcattcccgggctctgcacaagagggtttagctggctaccacagggaggggccccacccagcctggccacagccagtgaccacctcccactatgcccatgaccccagcggtatgtgccgctctcaatccttttcggaagctgaaccccagctgcccccagctccggtccgagggggaagcagccgggaggctgtgcagaggggactgaattcgtggcagcagcagcagcagcagcagcagcagcctcgcccacctccacgccagcaggaaagagcccacttggagagtcttgtagccagcaggcccagccctcagccattggcagagacccccatccccagtctccctgagttcccgcgagcagcctcccagcaggagattgaacagtccatcgaaacactcaatatgctgatgctggacctggagccagcctccgctgctgccccactacacaagtcccagagtgtccccggggcctggccaggggcttctccactctcctcccagcccctctctggatcctcccgtcagtcccatccactgacccagtccagatctggctatatccccagtgggcattcgttgggaacccctgagccagccccacgggcctctctggagtctgtccctcctggcaggtcttactcaccttatgactatcagccatgtttggctgggcctaaccaggattt

SEQ ID NO: 66691 - DNA, 535 bp, Homo sapiens
cctggaaactgcattgactgctgcaaccaaaatcaacaccgccaacccagcaacaagaatacccggtgcagaagcggccattacgccgaccgtgccagtgcctaatgccagcattttcccggccagtaacggaccgctcatagcccccagacgccctaccgccacggctgttcccacacctgttgcgcggatctgcgaactgtaaaacaacggtgccagggcatacaaaacgctttgcccacctgtcgcaaacaaccccgcgacaaatcccgccagcaacataccgttaaatgacgacaccgttccaagcgccagcagcgaagctaacatgccgctataaatcagtagcgacatggttactggacgcagcttatccatcaatgcgcccaacattaacgtcccgcttgccgcccccatttgcagggcaaacatcacccctgccgcctgcgatggctggaatccttgctccaccaaaagtagcggtagccagttgatcaacatgtagaccaccagcagagtgaagaaataacacaat

SEQ ID NO: 66692 - DNA, 179 bp, Homo sapiens
tttttttcaccccacccccagggggggggtgtcccccccctcccccctcccatattttttttcccccccgagctttttttttttgggggggtgttttccccttttttccccccccccaaaaagtgttttttccccaaagcccccccccggttttttttttcccccccctaaaaaaaaaa

SEQ ID NO: 66693 - DNA, 3155 bp, Homo sapiens
ttccagttctgacacctttttaatagaaatcactgtttttaggaaacaaatagcacttttgtaatttttttttacaatgtttcttaccttgatcttaatttaagtaacactaggaagacctcaatatcttttattttcctttttaatttaaaaaaaagttttttttccccagatacaaagatttttgcccttgcataaaaaaacagtgcccgaacgatgacacaaggactcacaaagactcacgggacctcactgacactatgattcctactctaccatgcaaggtcttggctacccttaattggactgtcagcctgaaaaacagcttttctattccttattttagtttttgttaccaagaaagtaaaatgaacagtaaaataaaactttccttaaagaaaaaaagaacaaaaacaaaaattaaagaaagagaaaagaaacgtctccattcaattcacacacacctgggtcgcgtgctgcttcactcaagatcttctcttcttataaatatagaaaagggatggagcttgttttcaagtaaaatcactgatccacctttttttccttcctggacacacacatccttcttccctgccttgggcaagggccagtggcccgggctctgcttgttcttggagaggagacagcgggataaccacggagatgcgcgactcaccaagcagggaaggaaggagactgggcaggcttcaggagtggtggggttaccgcgcagggagcagagtgcaggggagaagaacctactggctgttcttggtgtcagtctccccttgcacgaggcccccgccagaggtgattaaatactgcttatttgatacactgtcccaccccctgctccctccagccactccccttccctattctgggcactggggttggtgaaatctcaattcctttttttggttttatagtagcgaaagtttagaaacaggaaagcccacacactctttggacttgtcttctctacctaaacaaacggctcggcaagtaaggatctgaaacctgctctcctccctccgcccgtccctgctccccacccaagaaaacagaaacaaacccatcgtggctgtggaggctgctgcaggcacacactggtgtataatagagagagtaaatatattatttcacttggcatggtgctggcaaagaacctccagctggcactatttcatgtaacatggtccaatctttgcatgtacacacagaataagaaggatcaattggcaaactctggtgccacctggcacaagcatcttctctctctctggaaccaaagaaccaaaagaattctgcactttccagaaatccggctttgcttttctagagtcttcagtgttctgttctccttgccgccgggatcccgtggcttctcctagaggggctctgttatttagtctcttccccctggttacagttcgctgtgcagctctgggaggagggggaaggggccggcgtggaggtggcggcattggcagggggggtgcagtccgggccattggagatggcccccacagtggcctcagagtctacaggtttggagaggtcgatgccgtggatgaggcgaatcagctgttttaccttctccagggagctgtgcatctccttctgccgggccaggatggtgttcttcatttccatgcatttacttatggaattgctgagctgtttcaccttttgctctagttgttctcgttcttgttttaaatctgaactccatttaagtaacttctgtttctcttcttcttttgctgctttgtaggcaatataggaatgaacaattgctaaagttccaggccatggaattgcttcttccttcttcagcatctggtcctgacatctgggacagatccacatgcccttgggaattgttttcagaggggggtctaagcagtccaaatgatatacacgggaacatgtgtcgcacatcagtaactggccactttttctgcaaacgctgcaaaaatcctcatgaatatcaccgtctgtggaggtggggctgggcagggacacaggctgaacaggtgcagggaaagtgaatgtggtctctgtcttttcattttcaggggagtcaggatgactggattggggggatgttggggtaagggctccaaaccccagcactgcattgtattttggaggacgacctctcttccgggtcccagggtgcattgtgctgtttaggtatgtcactgcactcttcttacgctctggctcaaagactgctccactgtagaccggatttgctgttgttcttctttttcgctcttgcctcttgctttggatttcttctagatggtcatgtgttaccaaccctagagacaccatgaaggcaagtttctgagggttctcctcccgttttggtttgggtgcagcaggtggggtgatggtgcggctctctgtttgtttctcatctgtttctgtgtgagatttaactgtctgtttttcaagacttggcttgctaagctgtacagtttgaggtccagcgagtctggtccctggagtagctatcacaatgctggtgagctgggccatggggaacgttttggctatggttgcagtctgcccattgacgacacggacggggtggatggaattctgggatgtgggaagggttgtgggggtgaacttggtcagcatgacgggcctctggataagctgaggagctgcgagcatgggaggtggtgctggggcaataggaatgttattttgggccacaggcttgggtcgaacctgtggaagaaagtttggacgtggagtgagtctaggaggggggataaactgtggtactttgatgggctgaggaggtgttgcctgaacctgcagagtgactgtgttttttgccacaatttggacagcctctgccccaggcccagtgaccttactagacgtctggaggttgactggtgtgttttgcacatcagtgctgagcacagccttctgactgttgatggcggtcaccatagcaatggtaggtctctggcccaccacagaggcaggcatggtcgcagttgctgctttcaagacgagaggtagtgtctttgtggtaatcatagaagttgtagttacagtcttctgtgaagcagtcaggttgggagaggctgcagctgactgctgggcgtggtggtggtggtacgaaa

SEQ ID NO: 66694 - DNA, 691 bp, Homo sapiens
ccggaattccggtaacgtttcgtagaagaccgaattccttaccaagacagagagagttacagtcagcctgcatggcatcatcgtggacctccacagcgggattggaaatgggaaaaagatggctttaataatactaggaaaaacagctttccacattctttgaggaatggtggtggaccaagaggacgttccgggtggcataaaggtgttgcaggaggctcctcgacttggtttcacaaccatagtaattctggaggtggttggctttcaaatagtggagcagtagattggaatcataatggtacaggaaggaattccagttggctttctgaaggaacaggtggcttttccagttggcatatgaacaacagtaacggaaactggaaatccagtgtacgtagtacaaataattggaattacagtggccctggagacaaatttcaaccaggcagaaacagaaattctaactgtcaaatggaagacatgactatgctatggaacaagaaatctaataagtcaaacaaatacagtcacgacagatataattggcagcggcaagaaaatgacaaacttggtacagttgccacatatagaggtccttctgaaggatttacaagtgataaatttccttcagaaggcttactcgacttcaattttgagcagctggaaagccaaaccactaaacaagcag

SEQ ID NO: 66695 - DNA, 550 bp, Homo sapiens
cccggacccacgccgcccccgcgccacggctctcccccacaccgccttattcgggtcgagaccccggggcccccggcgccgcctgctgatgagcggatctccggaccccccgccagcagcgataggctagctatcctagaagactatgcggacccgtttgatgttcaggagactggcgaaggctcagcaggagcttcaggagccccagagaaggtccctgaaaatgatggctacatggagccctatgaggctcaaaagatgatggccgagatccggggctccaaggagacagcaactcagcccttgcctctgtatgacacaccctatgagccagaggaggatggggccaccccggaaggtgagggggccccctggccccgggagtcccgcctgccagaggatgatgagaggccccctgaggagtatgaccagccctgggagtggaagaaggagcggatttccaaagcctttgcagttgacattaaggtcatcaaagacctaccttggcctccacctgtgggacagctggacagcagcccctccctgcctg

SEQ ID NO: 66696 - DNA, 796 bp, Homo sapiens
attgtgcccattggccatccatcccaaagaaggtacgtgcattacttcagtggcctgctctccggctccatcaaaatgaacaacaagcccttgtttctgcaccacgtgatcatgcacggcatccccaactttgagtctaaaggaggatgtcggccgtttctccgcatctaccaggccatgcaacctgtgtacacatctggcatctacaacatcccaggagacagccagactagcgtctgcatcaccatcgagccaggactgctcttgaagggagacatcttgctgaagtgctaccacaagaagttccgaagcccagcccgagacgtcatcttccgtgtgcagttccacacctgtgccatccatgacctgggggttgtctttgggaaggaggaccttgatgatgctttcaaagatgatcgatttccagagtatggcaaagtggagtttgtattttcttatgggccagagaaaattcaaggcatggagcacctggagaacgggccgagcgtgtctgtggactataacacctccgaccccctcatccgctgggactcctacgacaacttcagtgggcatcgagatgacggcatggaggatgggaacaaacagaataccaatagccagtcaattggaagcatctcaggtggcctggaggatcaatatacctggacagacacacactggccttcccaaagttaggccctccaaaatgtcaagttgccaagccagaatccaaagctttgcactgagaacttcatgttggggctctgtcccctcctggagccctgcctgggtg

SEQ ID NO: 66697 - DNA, 619 bp, Homo sapiens
gagcggccgcagcgccgtctgctcagcgcccgggtcaataggagccagtccttcgcaggcgtcctcggcagccacgagcgggggcccaggagtttcccggtcttcagcccgccggggcccccacggaagccccccgcgctctcccgagtgtccaggatgttttccgtggctcacccagccgccaaggtgccgcagcccgagcggctggacctggtgtacacggcgctgaagcggggcctgacggcctacttggaagtgcaccagcaggagcaagagaaactccaggggcagataagggagtccaagaggaattcccgcttgggcttcctgtatgatctggacaagcaagtcaagtccattgaacgcttcctgcgacgactggagttccatgccagcaagatcgatgagctgtatgaggcatactgtgtccagcggcgtctccgggatggtgcctacaacatggtccgtgcctacaccactgggtccccgggaagccgagaggcccgggacagcctggcagaggccactcgggggcatcgcgagtacacggagagcatgtgtctgctggagagcgagctggaggcacagcttggcgagtttcatctacgaatgaaagggg

SEQ ID NO: 66698 - DNA, 416 bp, Homo sapiens
tttcgtcggcttcaccttggagagccagcttttagagaccttggagagccagctctcagaaaatgttcactcttctgcctgcagttccccacctggagggaccagcaccctccactcagacacacccattcttcagcatcctaccctaatctgctgcctcaaatcccttgcacccagtgttttgtggtccctggcctaggttgaaaggacctcaggctatgcctgtccaccccattaccacagtctaaagagcagtttcctgccatttatctgagcatctctgataacaccaggagttcctgtccagggactgagggccctgcttgcttccttcctagatccaagacatcagtgtggagacagaagacaacaaggagaagaagtcagccaaggatgccctgcttctgtggtgccag

SEQ ID NO: 66699 - DNA, 533 bp, Homo sapiens
gcggtactgcgccggaattcccgggtcgacggctgcgagaagacgacagaagggcaagatgcggcgcatcgactgtctccggcaggcggacaaggtgtggcggctggacctggtcatggtcatcctgttcaagggcatcccgctggagagcaccgacggcgagcgcctggtcaaggctgcgcagtgcggtcacccggtcctgtgcgtgcagccgcaccacattggcgtggccgtcaaggagctggacctctacctggcctacttcgtgcgtgagcgagatgcagagcaaagcggcagtccccggacagggatgggctctgaccaggaggacagcaagcccatcacgctggacacgaccgacttccaggagagctttgtcacctccggcgtgttcagcgtcactgagctcatccaagtgtcccggacacccgtggtgactggaacaggacccaacttctccctgggggagctgcaggggcacctggcatacgacctgaacccagccagcactggcctcagaagaacgctgccca

SEQ ID NO: 66700 - DNA, 477 bp, Homo sapiens
cagctggccgttctgcaaggcttcctgggcctgcagctccctgacgtcacacacgggcggccgcaggtccagggggccgtgcgcgaaggcacagtgcagcccattcttcacgcagtggccacgtgcgtctgtctcgtggatgcaggttcctgttttgtagtaacgcaggtggtacttgcgttctgtgtcccccgtcgtccggtgcaggtagggacactcgtcgccgtcggggcacacgccggtggcttcgttgtacttggagcagtacacgtcggggctgtagttgaaggtgccgtcgcgcctgcggaggggcctgcggcgccgctggttgaggaagtgccagtggaagcaggtgaacggccggtgctgcgcgcacttgtgctgtagtgggtcggcttctccgtctgcgggggggacccgctcagcgccgctgccgccgctttcgaaaccgacggcattacgaaatcgtcgacccgg

SEQ ID NO: 66701 - DNA, 517 bp, Homo sapiens
cgatcctgctccggaactcccgggtcgacgatttcgtggaggaagagctgccggaagtaggcggtggaggtggtagcggagctgacggcagctgccagggaaaccgaggcgcgggacgcaaggccagcagacaggccggccagagggtcatctgcgtccggcacccaggaggctcgtggtccgcctttgcctgggctgagggtctctggccccgcagcctctcttggaggcgggcctgtccctaagcccgccaaggggcgccgcgccgaggggctgcggagtgggggacggacgcccccgacccgggaaggggcgtccggcggggccggaggagagggctctccccgctcaggaggtgcccctgggcgggggaccgggagtcctcaaccccggactgaggcaggggtctctgggggcgaggaatgcacaattccctctatccccgtcacgactttgttcagatctaataaatgctgaacgctcatgaccctcactagtcgatctctcaatccgcttg

SEQ ID NO: 66702 - DNA, 879 bp, Homo sapiens
tttcgtggccatgagggaggatggcggcaccttgggcgtattctctcccaaaaagacaccacacctcgtcaacctgaacgaggacccgctgatgtctgagtgcctgctctactacatcaaggatgggatcaccagagtgggcagggaggatggcgagaggcggcaggacattgttctgagtgggcacttcatcaaggaggagcactgcgtcttccggagcgactccaggggaggcagcgaagctgtggtgaccttggagccctgtgagggggcagacacctacgtcaatggcaagaaagtcacagagcccagcatcctgcgttcaggaaaccgcatcatcatgggtaagagccatgtgttccggttcaaccaccccgagcaggcccggcaggagcgtgagcgcacgccttgtgcggagacgccagctgagcctgtggactgggccttcgcccagcgtgagctgctggagaagcagggcatcgacatgaagcaggagatggagcagaggctccaggaactggaggaccagtaccgccgcgagcgggaggaggccacctacctgctggagcagcagcggctggactatgagagcaagctggaggctctgcagaagcagatggactccaggtactacccggaggtgaacgaggaggaggaggagcccgaggatgaagtccagtggacagagcgggagtgtgagctggcgctctgggccttccggaagtggaagtggtaccagttcacgtctctgcgggacctgctgtggggcaacgccatcttcctcaaggaggccaatgccatcagcgtggagctgaaaaagaaggtacaattccagtttgtcctcctgacggaccctcgtgccaagcttggcgtagtcag

SEQ ID NO: 66703 - DNA, 749 bp, Homo sapiens
tttcgtgcggctcggcgctccgggcctggcgttgtggcgccgcagcccttgccaccttccctgcacctgccctgcccggcctcatgtaccgcgcgctgtacgcgttccgctcggcggagcccaacgcgctggcgttcgccgcgggcgagaccttcctggtgctagagcgaagcagcgcgcactggtggctggccgcgcgggcgcgcagtggtgagacgggctacgtgccgccagcctacctgcgccgcctgcagggcctggagcaggatgtcctccaggccattgaccgggccatcgaggctgtacacaacacagccatgcgggatggtggcaagtacagcctggaacagcgtggagtcctccagaagctgatccaccaccggaaagagaccctgtcacgcagaggcccttcagcctccagtgttgcagttatgacctcatcaaccagtgaccaccacttggatgctgctgcagccaggcagcccaatggggtgtgtcgagctgggttcgagcggcagcacagcctacccagttctgagcatcttggggcagatggaggcctcttccagatcccacttccatcttcccagatcccaccacagcctcgccgagcagcacccaccacaccgcccccaccagtgaagcgccgagaccgcgaggccctgatggcctctgggagtggtggccacaacaccatgccctccgggggtaactctgtgtccagcggctcctcagtcagcagttgtatt

SEQ ID NO: 66704 - DNA, 570 bp, Homo sapiens
agatacccccccgaattcccgggtcgacgatttcgtgagccctgtggcccggggaggggcatctgcatgaacaccggcggctcctacaattgccactgcaaccgcggctaccgcctgcacgtgggcgccggggggcgctcgtgcgtggacctgaacgaatgcgccaagccccacctgtgcggcgacggcggcttctgcatcaactttcccggtcactacaagtgcaactgctaccccggctaccggctcaaagcctcctggcctcctgtgtgcgaagacatcgacgagtgccgggacccaagctcttgcccggatggcaaatgcgagaacaagcccgggagcttcaagtgcatcgcctgtcagcctggctaccgcagccaggggggcggggcctgtcgcgacgtgaacgagtgcgccgagggcagcccctgctcgcctggctggtgcgagaacctcccgggctccttccgctgcacctgtgcccagggctacgcgcccgcgcccgacggccgcagttgcttggatgtggacgagtgtgaggctggggacgtgtgtgacaatggcatgtat

SEQ ID NO: 66705 - DNA, 889 bp, Homo sapiens
cttttttttagtagagacagggtttcacttcttaccaaggatgatctcgatctccggacctcgcgatccgcccacctccgcctccgaaaatgctgggattacaggcctgagccactaccgcctggccatttttttcttgagacaaggtcttattctctcgccaagaatggagtgcagtggtgcaatgttggctcactgcagcccaaacctcctgggcttaagtgatcctcctacctcagcctctcgagtagcaggaccacaggcgccaccatcacacccagctaatgttttattcttcgtagagatggggtctcaccgtgtggcccaggctggcaactgcatttttttctcccagctcaaggagggaggagcagccgagcccagcaggtacaacgtgggtttgctctgtgctgggagagctacagggctgtgcagagccggcagggacaggacctggggctccaggaggcccccacatgctgcctctcagccacctgccagccctgttttatgaatatgtttaccgtggctgtcactttgtcccggtctgtcacaaaggcacggaatccttccccaaacaaggtgccagccgtcctgatggactccaagacggtctgacggtgctcggacgccttcaggcggatctgctcgcggatgatgtctgcattctcccgctcggccttggcgcgcgcccgggcctcggtctccactcgcagcatctcattcttgtgccgcagctccatctcccgctccacggtggctgccccagagaggcagggcagctcagcaccatgcagtgcagcacgtccacctccacccacactgtggaccggcccacgccacggaccggcccacgccacggacagaccaacgccacagacaggcccat

SEQ ID NO: 66706 - DNA, 898 bp, Homo sapiens
agtgtatttaatttgtgctgaatacagcatcttaaaatatgaattttgttcaccaacacttgcaaatcaagagatgtacattgatctggatttcccacttaggggaaagaaatcagatgatctggcaacataaactatattcccacacagtggctggagctctaatagaagctgcaaaatcaaagatacatcagtacaaagtacgagcttatatccaaatgaagtctctgaaagcatgtaaaagggaaatcaagtcagtcatgaatacagctggaaattccgcaccctctctctttcttaaaagcaattttgagtacttaagaggtaattatcgaaaagccgtgaagctattaaatagttcaaacattgctgagcatccaggattcatgaaaacaggtgaatgcttgagatgcatgttctggaataaccttggttgcatccattttgccatgagcaagcacaatttgggaatattctactttaaaaaggctctgcaagagaatgacaatgtctgtgcacagctcagtgcaggtagcactgatccaggtaaaaaattttcaggaagacccatgtgtacgttactaaccaataagagatatgagttgctgtataactgtggaattcagcttcttcacattggaaggcctcttgctgccttcgaatgtctgattgaagctgttcaggtttatcatgcaaatcctcgcctctggctacggctggctgaatgctgcattgctgccaataaggggacttctgaacaagaaactaaaggccttcccagcaaaaaaggaattgtacagtctattgttggtcaaggctatcatcgtaaaatagttttggcatcacagtctatacagaatactgtttataatgatgggcagtcttcggccattcctgt

SEQ ID NO: 66707 - DNA, 562 bp, Homo sapiens
caatttttttctcttttcttaaggtatcagatacacaccggacttcaacattctatcataagacctacccaacccaactgtttacctctggacaatgccaccctacctcagaaactgaaggaggttggatattcaacgcatatggtcggaaaatggcacttgggtttttacagaaaagaatgcatgcccaccagaagaggatttgataccttttttggttcccttttgggaagtggggattactatacacactacaaatgtgacagtcctgggatgtgtggctatgacttgtatgaaaacgacaatgctgcctgggactatgacaatggcatatactccacacagatgtacactcagagagtacagcaaatcttagcttcccataaccccacaaagcctatatttttatatattgcctatcaagctgttcattcaccactgcaagctcctggcaggtatttcgaacactaccgatccattatcaacataaacaggaggagatatgctgccatgctttcctgcttagatgaagcaatcaacaacgtgacattggctctaaaag

SEQ ID NO: 66708 - DNA, 2171 bp, Homo sapiens
cacgcgtccggaaaggaagaggcggtgagaggctgcaaagccccttgcgtgttccgcagaaaccagaaagacctccccttccacccaagcctcagttcctaaactcaggggcatatcctcaaaaacctcttagaaatcagggagtggtgaggacactgtccagctctgcccaagaggacatcatccggtggtttaaagaggagcagctaccacttcgagcgggctaccagaaaacctcagacaccatagccccctggttccatggaattctcacactcaagaaagcaaatgaacttcttctgagcacaggcatgcccggcagttttctcatccgagtcagtgaaaggatcaaaggctatgccctgtcctatctgtcggaggacggctgtaaacatttcctcatcgatgcctctgcagacgcctacagcttcctgggcgtggaccagctacagcatgccaccttggcggatttggtggaatatcacaaggaggaacccatcacttccctggggaaggagctccttctctatccctgtggtcagcaggaccagctgcctgactacctggagctgtttgagtgacagcctccatcagggtcatcctacagcctccaagcgggctttcccctggacaaatgccactgcaacatttatgtgtgaagccaaaatcaccctgcagcagagccaatactgatcaactgaaagtatccatggagtcctcattgacacctcttttctgcacaaatactggaattcaatgtcaagagaaaatgacctctgctcaaaagggagaagagtctcaatttcagcaagtacctgtcatgaagggtatgaccttaatgatgtacataaaataaaacaaatgaagaaatggaaaacttttagaaattaaggtgtacttgaaaacgagtatctatcatatgacccctgcactccctctgtatcatctcaggaggtttcaggggcctgttgacatgaagtttcgaagtttcatgttggctttggaatggtagcaaaagcctttcctggctgagatgatgcttaaaacacacctcacttattgtacatgttggaaccaggacatgagagacatagaaaaacagaagtcatgaatgtaaattgaatgagaggcttaacatgcatgaaaatacagatggacctgcaggaaagtgagcaaacatcgctgagtttgttttcttgttcgggagaatggggccggggctggcctggcctcccctggatatactctatagtgcaccaaaaggataaagcatctgtacatgtatttttttattttttatcagaagtgcttagacaagaacagaataagcaggctgtttggatgctacttgtggttgaattgtgttcccccaaaatatatggtgaagtcttaacccccatccccgtgaatgggaccttgtttggaaatagggtctttgcagatatagtcaagatgaggtcacattggattagggtgggccccaaatccaatgactggcatccttaggagaagagagagttttggtaatagacacaaatgcagtgggaagaagaccaggggacaagaggcaagttggagtgatgcagccggaagggaagggacaccaaggatctccggccaccagcagaagccagcagagaggcatgggacaggttccccacaagccttagaaggaagcatggccctgacttcagaattccagactccagaactggaagaataaatgtctgttgttttaagctgcttagttcatgctgagttcatgctgacttgttactatagccccagaaagctaatacagtcgtttatgtaattacataacctgacacacaagatcgacccattcactgctgcccagtccaccattttcataatgaagtagaaatgggaggtaagaaaaacattccagccagttctgtttagccctgggacacatatttgtcccgtcaggaatcttatgccctcctggaacccccgcccacctcagtccagtcccagtcaggcgaacggcctctggacagggactgaggtggctttgagccactggagatcatttttcttggaggatggagattggctagtacctctggcctaactgtgtaggtcaatactcttttacattgccttctaataaaagcagaatgatacagcagtgttgttaaaaaaaaaaa

SEQ ID NO: 66709 - DNA, 570 bp, Homo sapiens
cccgggcgaccacgcgtccgaaaaatgaagtccaggactatgtcagtgtagaatacctgtctccccacatgggtggaactgatcctttcaagtgtagctatgcaccactagtagatgatgacttccagaccccactgtgtgagaatgggcctattaccagtgaggatgaaacttcaagtaaagaagacatagaaagtgatggcaaagaaacattggaaacaatttctaatgaagaacaaacacctcttcttaaaaagattaacccaaccgaatctacttccaaagcagaagaaaatgaaaaagttgattcaaaagtgaaagctttcaagaaaccattgagtgtatttaaaggccccttactacacatcagcccagcagaagaactgtactttggaagtacagaatccggagagaagaaaaccttaatagtgttgacaaatgtaactaaaaatatagtggcatttaaggtgagaacaacagctccagaaaaatacagagtcaagccaagcaatagcagctgtgacccgggtgcatcagtggatatagttgtgtctccccatgggggtttaa

SEQ ID NO: 66710 - DNA, 639 bp, Homo sapiens
tttgcactcgtgagcaattcggcacgagcttccgagtgtcatagtaaacaagaactggaggctgatgtcagccataaagaaaccaaaaggaaactcgtagaagcagaaaattctaagtcaaaaagaaagaaaccaaatgagtattcaaaaaatctggagaagaccaataggaagtcagaagaacttagcaaaagaaacaactcttctgggataaagctagattcttccaaagattctggaactgaagacatgctttggacagaaaagtatcaacctcagactgccagtgaacttataggaaatgagttagctataaaaaagttacatagttggttgaaagactggaaaagaagagctgaattggaagaaaggcagaatctgaagggaaaaagagatgagaaacatgaagatttctcgggtggcatagactttaaaggcagttcagatgatgaagaagagagtcgtctttgcaatactgtccttataacagggccaacaggagtgggaaaaactgctgcagtgtatgcttgtgcccaggagcttggatttaaggttagtaacagctatgatgagagaatgttaatgtaataattacccttggattaaaaggaaacataaaccattctcccttcgtttttt

SEQ ID NO: 66711 - DNA, 2095 bp, Homo sapiens
ggggaagtctggagaaggcattgtttcaattattaaaagtgtgggggcagtgggcggaacaaacgcgccgactacagaggctggacgtaagcttatcggtggcgcgcgtgcgcagcgccggcccgagttgccaaaacaaaggggatttggtgatggaggctttgttagaaggaatacaaaatcgagggcatggtgggggatttttgacatcttgtgaagcagaactacaggagctcatgaaacagattgacataatggtggctcataaaaaatctgaatgggaaggacgtacacatgctctagaaacttgcttgaaaatccgtgaacaggaacttaagagtcttaggagtcagttggatgtgacacataaggaggttggaatgttgcatcagcaggtagaagaacatgaaaaaatcaagcaagagatgaccatggaatataagcaggagttgaagaaactacatgaagaattatgcatactgaagagaagctatgaaaagcttcagaaaaagcaaatgagggaattcagaggaaataccaaaaatcacagggaagatcggtctgaaattgagaggttaactgcaaaaatagaggaattccgtcagaaatcgctggactgggagaagcaacgcttgatttatcagcaacaggtatcttcactggaggcacaaaggaaggctctggctgaacaatcagagataattcaggctcagcttgtcaatcggaaacagaaattagagtctgtggaactttctagccaatcagaaattcaacacttaagcagtaaactggagcgggctaatgacactatctgtgccaatgagttggaaatagagcgcctcaccatgagggtcaatgacttggttggaaccagtatgactgtcctacaggagcagcagcaaaaagaagaaaaattgagggaatctgaaaaactattagaggctctgcaggaagaaaagagagaattgaaggcagctcttcagtctcaagaaaatctcatacatgaggccagaatacaaaaggagaagttacaagaaaaagtaaaggcaactaacactcaacatgctgtagaagctataagtttggaatctgtgagtgcaacgtgtaaacagctgagccaagaactaatggaaaaatatgaagaactgaagaggatggaagcacataacaatgaatacaaagcagagattaagaagttgaaagaacagattttacagggtgaacaaagttacagttctgcactagaaggaatgaagatggaaatctcccatctaactcaggagttacatcagcgagatatcactattgcttccaccaaaggttcttcctcagacatggaaaagcgactcagagcagagatgcaaaaggcagaagacaaagcagtagagcataaggagattttggatcagctggagtcactcaaattagaaaatcgtcatctttctgaaatggtgatgaaattggaattgggtttacatgagtgttccttgcctgtatctccccttggttcaatagctaccagatttttggaagaggaggaactgaggtctcatcacattctagagcgcttggatgcccatattgaagaactaaaaagagagagtgaaaagacagtgagacaattcacagccttaaagtagcctcttaaaaaaatcacaatcttggaaataaaaataaacaccaaagagttactgtcatctgaagtagcagctctttaaaaacatgaagagataaaattataaaaatgatacatctaaagcagtggtgaagaaagctgaaaaactgatacttttgataggcattttctctgcactggtttttttaaaggacttcttccagcaataagttgaaagaataaaccactttgctagacttttttctcatacgaatatttattatcataaagtgatacttaccttgctgacttaaatgtgaatagctatgtactaattgaaataaggattttatgatacatgttgaaaataaagtaactgcaggaactttctttaggggaaatgtgtagaagcatggatttaggggtcaaacatacctggatcgatagactggttttgccacttaccagccaacggggctt

SEQ ID NO: 66712 - DNA, 467 bp, Homo sapiens
gggtttcatagatcgtcgtgggcattccgcacgaggcgagaggtactacgtgcccgaaggagagtgctgcccagtgtgtgaagatccagtgtatccttttaataatcccgctggctgctatgccaatggcctgatccttgcccacggagaccggtggcgggaagacgactgcacattctgccagtgcgtcaacggtgaacgccactgcgttgcgaccgtctgcggacagacctgcacaaaccctgtgaaagtgcctggggagtgttgccctgtgtgcgaagaaccaaccatcatcacagttgatccacctgcatgtggggagttatcaaactgcactctgacagggaaggactgcattaatggtttcaaacgcgatcacaatggttgtcggacctgtcagtgcataaacaccgaggaactatgttcagaacgtaaacaaggctgcaccttgaactgtcccttcggtt

SEQ ID NO: 66713 - DNA, 503 bp, Homo sapiens
gtgaatcctcatgtgtttcctccgggacacgagatcgccaaaggatttcccgcattctttacattcgtaggtcttctccaccatgtggttcttcttgtgcaaattaaagttggacttccagcggaaggctttgccgcactgcgtgcacgcgtagggcttctcccccgtgtgattcctcacgtgctctttgaggtgggaggggtgctggaaagctttcccacagtcgtgacactcgtagggcctctctccggtgtgcgttctcttgtgtgcgatgaggtggcagctccggccgtaagccttcccgcactgatcacacttgtaaggcctctcgccagtgtgaactcgcatgtggattttcagggccgagagggtccggaatgcatttccacactgactgcagtcaaagggcttctctttgaggtgagttcttgcgtggctcctaagggctgaagggtcgttgaaggctttcccgcagtcgctgcactcgtaaggcttctccccgg

SEQ ID NO: 66714 - DNA, 870 bp, Homo sapiens
gcacgagctacagcagctgtggggaagtgttccttaatcagtcataccttcaggcacgtgcgggaagtcacaacggagaagaaacatggaaatggaagccgtgtgggaaagctctaactcactccatgggctgcgccacacctgttgaaatgcatgccgtcaggaatccccacgtatgtagggaatgtgggaaggcctttaggtacactgcctaccttactggtcgcgtgcaagtccaccctggggaaaagccctgtgaattggaagaatgtggaaaagcctcccctgtttcttccagcctaactcaacatgtaagaattcatgctgcagagaaaccctgtgaatgtaaagaatgcggaaaagccttcactggactctcaggtctttctaaacacgtccaaacagaccctggacagaagccctatgaatgtaaggactgtgggaaagcctgcggtgggttttatctactgaatgagcatggaaaaactcacacgagggagaagccctttgcatgtgtggtttgcggaaaatattttagaaattcctcatgccttaataatcatgttcgaattcacactggaataaaaccctatacatgcagctactgtgggaaggccttcactgtgcgctgtggccttactagacacgtacgaacacacacgggcgagaagccatacacgtgtaaggactgcgggaaagccttctgtacatcctcgggccttactgagcatgtaaggactcacactggagagaaaccatatgaatgtaaagattgtgggaaatccttcactgtttcttcaagcctgactgagcacgcaagaatccataccggagagaaaccctacgaatgtaagcagtgtggcaaagcct

SEQ ID NO: 66715 - DNA, 473 bp, Homo sapiens
ccgcgctgcaggaattcggcacgagagatagtgtgtatggactagaactgcaccgcgataagagagttttagcgctagagatccttcctgagagagtgccaactcctcgtatcgattcacgactggcagattccctgattggcaaggcagtggagcatgtgtttgaaggtgaacatggtaccaaggatgaatggaagggtatggtcctggcgcgagctcctgtgatggatacttggttttacatcacctacgagaaagatcctgttctctatatgtacacgctgcttgatgactacaaagatggtgacttacgcattattccagattccaactactatttccctacagcagaacaggagcctggagaggtggtcgacagtctcgtgggcaagcaggtggagcatgccaaagatgacgggtccaagagaactggcatttttatacatcaagtggtggcgaagccatctgtttac

SEQ ID NO: 66716 - DNA, 860 bp, Homo sapiens
ggaattcctgttggaagaatttagacaaactcagcaagttcctccaaacaaaatagattatgaatatagtgaattgatattataccagaatcaagtgatgagagaggcagatctgttgcaggaatctttggaacatatagaaatgtatgagaaacaaatatgtgataaacttttggtggaagaaattaaaggggaaatactgttgaaattgggaagattaaaagaagccagtgaagtgttcaaaaacttgattgatcgaaatgcagaaaactggtgttattatgaaggcttggaaaaagctctacaaattagcactttagaagagaggcttcaaatttatgaagaaattagtaagcagcaccccaaagcaattacacccagaagattacctttgactcttgtcccaggtgaaagatttagagaactaatggataagttcctgagggttaacttcagtaaaggctgcccacccttgtttactactttgaaatctttatattacaatacagaaaaggtttctataatccaggaacttgttactaattatgaagcctctcttaaaacgtgtgacttttttagcccatatgagaatggggagaaggaacccccgacaacactactctgggttcagtatttcctggcacagcactttgataaacttggacagtattctttggctttggattatattaatgctgcaattgctagtactccaactctaatagaattattctatatgaaagcaaaaatttacaagcatataggtaatctcaaagaagctgcaaagtggatggatgaagcacagtctttggacacagctgatagattcatcaattccaaatgtgcaaaatacatgcttc

SEQ ID NO: 66717 - DNA, 637 bp, Homo sapiens
gtgcttcagttgctgcactccacgagcgacgtggtgcggcagtacatggccaggctcatcaatgcttttgcgtcactggcagaaggtcgcctctaccttgcccagaacacaaaggtgctgcagatgctggagggaaggctgaaggaggaggacaaggatatcatcaccagggagaatgttcttggggccctgcagaagttcagtctcaggcgcccgctgcagacagcgatgattcaagacggcctcatcttctggctggttgatgttctgaaggaccctgactgcctgtctgactacacgctggagtactcggtggctttgctcatgaacctctgcctccgcagcacagggaagaacatgtgtgccaaggtggcaggcctcgtgctcaaagtcctttcggatcttcttggccatgaaaaccatgaggtactcattcagcactgctggccctgggctcggggaggctacactggggacccaatgcctgtgaccccacaggcacacagctggcccaggatggttgctgtatttgaaaactgtacatgttctctgtccttctgggattttcataagcaactggaaatcttttataatttttagaattttggaagtcagaagcaggatgttctttccgtcc

SEQ ID NO: 66718 - DNA, 872 bp, Homo sapiens
gcgggggaattccacgtcactggatctgagctggaataacttccacacaaggggagctgtggccttgtgcaatggtctccggggtaatgtgaccctgacaaagctggatctctccatgaatggctttgggaatgaggtggctctggccctaggggaagtcctccgactcaaccgctgcctggtctacctggatatcggtggcaatgacatcggcaatgaaggggcctccaaaatcagcaaaggactggaatccaatgaaagcctcagagttctgaagcttttcctgaatcccataaatatggatggggctattttacttatcctggctatcaagaggaaccccaaatccaggatggaagagcttgatatttccaacgtgctggtgtccgagcagttcatgaaaacgttggacggagtgtatgccgttcacccgcagctggacgtggtattcaaggcagtacaaggcctctctcccaagaaaaccatcttcttgttgacaaaccccatgaaactgatccagagctatgcagaccaacacaaaatcacgatcgtggacttcttcaagagcttgaaccctactgggacaatgaagatgtctgtggatgagttccagaaagcgatgatagagcaaaacaaggtccccctgaaccagtaccaggtcagggaggtgataaagaagctcgatgagaagacaggcatggtgaacttcagtttcttgaacacgatgaagccatagcaacaagtctggtctagaaagaagtctcggcgagaggagtcctcgcaagtcggatggtggcagggaggagagcaagaggtggctgaaatctcgatggacagatcctgtggcaggggctgggcacaagcaaataaag

SEQ ID NO: 66719 - DNA, 620 bp, Homo sapiens
  misc_feature (1)...(620): n = a,t,c or g
attggagacttgtagaccgtgcggtggaattccatgaaaaaattcatggaggaggaaaaacctttgattttaaagaatgtgggcaggttttgaaccccaaaatatcccataatgaacaacagagaattccttttgaagagagtcaatataaatgtagtgaaacctctcatagttcctcccttactcaaaacatgagaaataattctgaagagaaaccttttgaatgtaatcagtgtgggaaatccttcagctggagctcgcatcttgttgcacatcagagaactcacacaggggagaaaccttatgaatgtagtgaatgtggaaaatccttcagccggagctcgcaccttgtttcccatcagagaactcatactggagagaaaccttacaggtgtaatcaatgtgggaaatcctttagccagagttatgtccttgttgtgcatcaaagaactcatactggggagaagccttatgaatgcaatcaatgtggaaagtcattcaggcagagctataaacttattgcacatcaaagaacacataccggagagaagccctatgaatgtaatcaatgtgggaaatcatttatccagagctataaacttattgcacatcanagaatg

SEQ ID NO: 66720 - DNA, 1571 bp, Homo sapiens
cagttgcgatgaatcgctggtagacattaccgaaatccttgcagagaccatacttactcctgatgaatttgcaaatgctgttcgtatggaaatcaaagaccagacgaaatgtgctgcctctgatggaattggttctaatattctcctggctagaatggcaactagaaaagcaaaaccagatgggcagtaccacctaaaaccagaagaagtagatgattttatcagaggccagctagtgaccaatctaccaggagttggacattcaatggaatctaagttggcatctttggcaattaaaacttgtggagacttgcagtatatgaccatggcaaaactccaaaaagaatttggtcccaaaacaggtcagatgctttataggttctgccgtggcttggatgatagaccagttcgaactgaaaaggaaagaaaatctgtttcagctgagatcaactatggaataaggtttactcagccaaaagaggcagaagcttttcttctgagtctttcagaagaaattcaaagaagactagaagccactggcatgaagggtaaacgtctaactctcaaaatcatggtacgaaagcctggggctcctgtagaaactgcaaaatttggaggccatggaatttgtgataacattgccaggactgtaactcttgaccaggcaacagataatgcaaaaataattggaaaggcgatgctaaacatgtttcatacaatgaaactaaatatatcagatatgagaggggttgggattcacgtgaatcagttggttccaactaatctgaacccttccacatgtcccagtcgcccatcagttcagtcaagccactttcctagtgggtcatactctgtccgtgatgtcttccaagttcagaaagctaagaaatccaccgaagaggagcacaaagaagtatttcgggctgctgtggatctggaaatatcatctgcttctagaacttgcactttcttgccaccttttcctgcacatctgccgaccagtcctgatactaacaaggctgagtcttcagggaaatggaatggtctacatactcctgtcagtgtgcagtcgagacttaacctgagtatagaggtcccgtcaccttcccaggtacatttttgtagtcctaaatataagtacattttatactcctaaatataaatacaaaaatacaagtttacaaatgaaaatggcatttttatttcttcatctgtttaaccaagaaagggagaacgggccacttgtttgggtagatcatgatgttggattctaaataagcaatatttgggttgagtgaaagtgcttttgcaaagatttgccactcttgcaagttgtaaagcatagctgaaaggcagtcctcctgtggactgccattgtctgtgacagtggtcatcatgcagacttactgtattcagcaaggcagctttggtgattagtggtgaagtagaggccttatgtcgaagggtttttgcagtatttgcaaacaggtctctggagatttggatggtttaattcagcgtgtgtgggctgtacatgtgatatactgctggtccttgaaagtaaggtagca

SEQ ID NO: 66721 - DNA, 1174 bp, Homo sapiens
ggaattcgcactgtcaagaatgagttctccctcaagaccttcaagaggaagtccgaggtggatcgtgctgtcaagaggatgcggcatctgtccacgggcaccatgaccgggctggccatccagtatgccctgaacatcgcattctcagaagcagagggggcccggcccctgaggcagaatgtgccacgggtcataatgatcgtgacagatgggagacctcaggactccgtggccgaggtggctgctaaggcacgggacacgggcatcctaatctttgccattggtgtgggccaggtagacttcaacaccttgaagtccattgggagtgagccccatgaggaccatgtcttccttgtggccaatttcagccagattgagacgctgacctccgtgttccagaagaagttgtgcacggcccacatgtgcagcaccctggagcataactgtgcccacttctgcatcaacatccctggctcatacgtctgcaggtgcaaacaaggctacattctcaactcggatcagacgacttgcagaatccaggatctgtgtgccatggaggaccacaactgtgagcagctctgtgtgaatgtgccgggctccttcgtctgccagtgctacagtggctacgccctggctgaggatgggaagaggtgtgtggctgtggactactgtgcctcaaaaaaccacggatgtgaacatgagtgtgtaaatgctgatggctcctacctttgccagtgccatgaaggatttgctcttaacccagataaaaaaacgtgcacaaagatagactactgtgcctcatctaatcacggatgtcagcacgagtgtgttaacacagatgattcctattcctgccactgcctgaaaggctttaccctgaatccagataagaaaacctgcagaaggatcaactactgtgcactgaacaaaccgggctgtgagcatgagtgcgtcaacatggaggagagctactactgccgctgccaccgtggctacactctggaccccaatggcaaaacctgcagccgtgagtgtaccctaggggtggggtgctgatggaaggtggggtccactcatgggggcgggcgggttcactagcaaccagttatttctggagcccaccgggtttcctgatggtctggcaggtgtatccttccttatcctcagtttcatt

SEQ ID NO: 66722 - DNA, 1051 bp, Homo sapiens
gagaccttgtcttaaaaaaataaaatgctgtcagaataaaaagcagtcaacagaaatgaaacccttataagagacaaataaatgtgggcaattattttctgcaaaatgccctccaagcccctgggcgccattgccttctgtaataggacatcacctgaacaggctttctgggctggagccaaggaccctccctgactcccacctccctttctgccttgtaccccagccaggtggaagagaccggagtggtgctgtccctggagcaaacggagcaacactctcgcagacccattcagcggggcgccccctctcagaaggacacccctaaccctggggacagccttgacacccctggcccccggatccttgccttcctgcacccgccttccctgagcgaggctgccctggccgctgacccccgccgtttctgcagccctgacctccgtcgcctcctgggacccatcctggatggggcttcagtagcagccactcccagcaccccgctggccacacggcacccccaaagtcctctttcggctgatctcccagatgaactacctgtgggcaccgagaatgtgcacagactcttcacctccgggaaagacactgaggcagtggagacagatttagatatagctcaggatgctgatgctctggatttggagatgctggccccctacatctccatggatgatgacttccagctcaacgccagcgagcagctacccagggcctaccacagacctctgggggctgtcccccggccccgtgctcggagcttccatggcctgtcacctccagcccttgagccctccctgctaccccgctgggggagtgacccccggctgagctgctccagcccttccagaggggacccctcagcatcctctcccatggctggggctcggaagaggaccctggcccagagctcaaaggacgaggacgagggagtggagctgctgggagtgagacctcccaaaaggtcccccagcccagaacacgaaaactttctgctctttcctctcagcctgagtttccttctgacaggagg

SEQ ID NO: 66723 - DNA, 423 bp, Homo sapiens
gtgaactccaagactgttttgatgttcatgatgcatcttgggaagagcagatattctggggatggcataatgatgtccacatatttgacacaaagacacagacttggtttcaaccagaaattaaaggtggagttccaccacagccacgagccgcgcatacgtgtgcagttcttggaaataagggttatatctttggcggacgtgttctgcaaactaggatgaatgatttgcactatctaaacctagacacctggacttggtctggaaggattactattaatggagaaagcccaaaacatcggtcatggcatactttaacacctatagctgatgataaacttttcctatgtggtggactaaatgcatataatatgccattaagtgatggttggattcataatgtcacaacacattgttggaaac

SEQ ID NO: 66724 - DNA, 452 bp, Homo sapiens
gcggtggaattcctcacacgggagagaaaccctatgcatgtaaggaatgtggaaaaccatttagtaatttctctttctttcaaatacatgaaaggatgcacagagaagagaagccgtatgaatgtaagggttatgggaaaacattcagtttgcccagtttatttcatagacatgaaaggactcacactggaggaaaaacctatgaatgcaagcagtgtggcagatccttcaactgttcgagctcctttcgatatcatggaaggactcacactggagagaaaccctatgaatgcaagcaatgtggaaaagccttcagatctgcctcacagcttcaaattcatggaaggactcacactggagagaaaccttatgaatgtaagcagtgtgggaaagcctttggatctgcctcacaccttcaaatgcatggaaggactcacactggagagaaaccc

SEQ ID NO: 66725 - DNA, 548 bp, Homo sapiens
  misc_feature (1)...(548): n = a,t,c or g
gttcagccagactcctgataagagaatctggcggccttcagccataattcccttcggaagcttttgcaaagcctcctggccttccaagaagatgatattggtgcccatatgaatgtaggaagaacttataaaaatttaaatagaaccaaagaagctgaagaatcttacatgatggctaaatcactgatgcctcaaattattcctggtaaaaaatatgcagccagaattgcccctaaccacctaaatgtttatatcaatctggctaacctgatccgagcaaatgagtcccgactggaagaagcagatcagctgtaccgtcaagcaataagcatgaggcccgacttcaagcaggcttacattagcagaggagaattgcttttaaaaatgaataaacctcttaaagcaaaggaagcatatcttaaagcactagagctggacagaaataatgcagatctttggtacaacttggcaattgtacatattgaacttaaagaaccaaatgaagccctgtattgcggccgctctagaggatgcaagtnnncgaaggc

SEQ ID NO: 66726 - DNA, 407 bp, Homo sapiens
gagagaagcgtaatacacgtaaacaattttggaaaaccttcagttattgccactcgtttcaaacccacaaaatttctcacacaggacacaaaccatatgattgtaaggaatgtaggaagtccttcaattctttgggaaaccttcaaagacacatggcagtgcagcatggagatggaccttataaatgtaagttgtgtgggaaagcatttttctggcccagtttatttcgtatgcatgaaagaactcactctggagagaaactatatgaatgtaagcagtgttctaaagcctttcatttttacagttcttatctaagacatgaaagaacacgtactggggagaaactgtatgaatgtaagcagtgttctaaagccttccctgattacagttcttgtctaagacatgaa

SEQ ID NO: 66727 - DNA, 838 bp, Homo sapiens
cggacgcgtgggaagtcctttatgtttctggaaattctgctgaggtattctttgtagattatggcaataagtctcatgtagatctacatcttttgatggagattccctgtcaatttcttgaacttcctttccaggctttggaatttaagatttgcaaaatgagaccatcagcaaagtctcttgtttgtggcaagcactggagtgacggggccagccagtggttcgcctctctggtgagcggctgcaccctccttgtgaaggtcttctctgtggtgcacagcgtcctgcacgtggatgtgtaccagtactcaggggtccaggatgccatcaacataagagacgtcctcatccagcagggctatgccgagctcacggaggagtcctacgagtccaagcaaagccatgaagttctcaagggcctcttttccaagtcagtagaaaacatgacagatggctctgtgccctttcccatgaaagacgacgagaaatatctcatccggattttgttagagagcttttctaccaataaactgggtactccaaactgtaaggcagaacttcacgggccttttaacccttatgaactaaagtgccatagtttgaccagaatatccaaattcaggtgtgtttggattgagaaggagagcatcaactctgtcattatcagtgacgcccctgaagaccttcaccagagaatgctggttgcagcttccctttccatcaatgcgactggatctacgatgctgctgagagaaacctctctgatgcctcatatccctggcctcccggctctcctcagcatgttattcgcaccggtgatagagttaaggattgatca

SEQ ID NO: 66728 - DNA, 1135 bp, Homo sapiens
  misc_feature (1)...(1135): n = a,t,c or g
ttttttttttttcaaaacaatgttatttgtttattaaataaagattgcttgttacacagaaaattattttctttaattatcatacatagctctctttcacatcaggcagtaaaacactgcatttacttcatctcaggatactggatacaagattaatagtcagtttgtctcaaaatatgtcaatgtgttctgtctgaaaacatgcagaggggcttggagtaatcatatcattttacgaggtgctttagaaaaccaagctacaggtcctgaatacattccaaaaatcctaaataattaccaacagaagagagaactcttgccagccagtacactcaataaagaagtacaaaggtgcagacaatgtaactttaccaggaagcttaaggggtggcccagcttctcggcaggagtcagcaggcctggcagcctccatggctggcgctgctgtgtggaaacagggccatggtcttcttgagctcctggtagctccagtgcatctgctccacctcggctctgtgctgcgcccgcacctggctcagctcctgcagcaggtgttcattggtgctgaccagggagctgtggctctcctgcagcatctgcgtgagctcctggatcttgtcgtagtgctccaggtgctgcttcagttccacaatctcgccacacagcctcttcacacttgtttgaagtccagcgatctgcaaatttaacgtggctgcagtgtctgcactcttcacttcctttttcatactcaacaaaagcgattttaacctactgttctcttccaaagatttatctaaatgttgtctcaaatcatccagctccttgtgtgcgtggtgcagctccgccgtcacctcgctcatctcccgggcgtgctgctgctgctgctcagcaaggcggctttgcagggacttactctccagagccagggagccgacatcttcacccaccatcgcagagctgtcctgagctgctgtgaattcttcaacagatgacaagatgtgtcttgcctgagcaaggaatgcctcgttgctgtgcagggacctgcagccgccccagctcctgtccaccaggtccaagaggaattccaccacacggactaggnacatcagttanannnnnnaaggggatcgaatcc

SEQ ID NO: 66729 - DNA, 568 bp, Homo sapiens
ggaattcccttcctctgtacgcctccctgccctatgcacagcagctccgagtcttccaaggggccccaaagggctatcgcaaagtgatcatttcaaccaacatcgctgaaacctccataaccattacaggaataaaatatgtagttgacacgggcatggttaaagcaaagaagtataaccctgacagtggtcttgaggtgttagcagtgcagcgggtatcgaagacgcaggcttggcagcgcacagggagggctggcagagaggacagtggcatctgctaccggctctacacggaggacgagtttgagaagtttgataagatgaccgtgccagagatccagaggtgtaacctggccagtgtgatgcttcagcttctagcaatgaaagtcccaaatgtgctcacctttgacttcatgtcaaagccatctccagatcacattcaggcggccattgcccaactggacctgttaggtgctcttgaacataaggatgaccagcttaccctgactccaatgggaagaaagatggcagcatttcctttagaacccaaatttgccaaaaccatcct

SEQ ID NO: 66730 - DNA, 719 bp, Homo sapiens
atcgagagcctatcgatgtggggcttttcttacagattgggaaatggtggtggggaaaccgaacaatttatgtttgctcttgaaactgttttaggtgtggcctgaagtcactgatcctgagaagttcgtgtatgaagatgtggctatcgcagcatacctgctgattctatgggaagaagaaagggctgagaggggactaactgccaggcagtcctttgtggacctgggatgtggaaatggcctcctggtccacatcctgagcagtgaggggcatccaggcagagggattgatgtccgaagaagaaaaatctgggacatgtatggaccacaaactcagttagaggaagatgcaatcacacccaatgataagacccttttccctgatgttgattggttaatcggtaaccattctgatgaactcacaccatggatacctgtcattgcagccaggtcttcctacaattgccgcttctttgtcctcccctgctgcttctttgacttcattggaagatactcccggaggcagagtaagaagactcagtaccgggaataccttgacttcattaaagaagtgggcttcacctgtgggtttcacgtggacgaagactgcctcaggattccttcaaccacaagagtctgtctcgttggaaaatccagaacatacccttactccatagaagcttccgtggatgaaaagaggactcagtacattaagagcc

SEQ ID NO: 66731 - DNA, 855 bp, Homo sapiens
cgttcccgggagcgtgtctgggtttgggggcgggagacaggctgagccgcctgggcggcctggcctgtacggggcgggggaggccatggcctcggctgagttgcaggggaagtaccagaagctggctcaggagtactcgaagcttcgggctcagaatcaggttctgaaaaaaggtgttgtggatgaacaagcaaattctgcagctttaaaggagcaactgaaaatgaaggatcagtcattgagaaaactacaacaggaaatggacagtttgacatttcgaaatctgcagcttgccaagagggtagaactacttcaagatgaactagctctaagtgaaccacgaggcaagaaaaacaagaaaagtggagaatcttcttctcagttgagtcaagagcagaagagtgtctttgatgaagatctgcaaaagaagatagaagagaatgaacggttgcatatacaattttttgaagctgatgagcagcacaagcatgtggaagcagagctgaggagtcgactggccactctggagacagaagcagcccagcaccaagctgtggttgacggtctcacccggaagtacatggaaaccattgagaagctgcagaacgacaaggctaaactagaagtgaaatctcagactctagaaaaggaagccaaggaatgtcgacttcgaacggaagaatgtcaattacagttaaagactcttcatgaagatttgtcaggtagattagaggaatccttatcaatcatcaatgaaaaagtaccttttaatgatacaaaatatagtcagtacaacgctttgaacgttccactccacaataggagacaccagctgaagatgcgagatattgctgg

SEQ ID NO: 66732 - DNA, 492 bp, Homo sapiens
  misc_feature (1)...(492): n = a,t,c or g
tggggggggagggtaggggnnnaattgaaattcgatgacagtggngcaattcccggcggcgttcaggcaccctttggggccgtcaggaacatctacaccccgcggactggccaccgaatccggaagctagaccagatccagagcgggggcaattacgtggctggaggccaggaagccttcaagaaactcaattacttggacataggagaaatcaagaaaagaccaatggaagttgttaatacagaggtaaaaccagtaatccatagcaggatcaacgtgtcagctcgctttagaaaaccgcttcaggagccgtgcactatcttcttgattgcaaatggagacctcataaacccagcttctcgcctccttatccccagaaaaaccttgaatcagtgggatcatgtactacaaatggtcacagaaaaaatcactctgaggagcggggctgttcacaggctctatactttagaaggaagacttgttgagagtgga

SEQ ID NO: 66733 - DNA, 1658 bp, Homo sapiens
tttgtatttttttagtagaaacgaggtttctccatattggtcaggctggtctcgaactcccgacctcaggtgatccgcccgcctcagcctcccaaagtgctgggattacaggcgtgagccaccgcacccggcctgctgtaccttctttgtgcctcagtttccctctttattcaatggggctatcttccagggtagcctcgaggctaagatctgaatccatggccccttactgtctgctcctttcctctcctaaggactccagtgggggtgactcatgtgcttctgaggaggaaccaacctttgaccccggctatgaacctgactgggctgtcatcagcactgtgcggccacagccctgccactcagaccccacgagaggtgcagagcccagctgcccccagggctcctgggccttctcagtgagtctgggggagctaaagtccatccgccgctccaagccaggcctcagctgggcctacctggttctggtgacccaggctggaggttccctgcccgcactgcacttccaccgcgggggcacccgcgccctgctccgcgtcctcagccgctacctgctgttggccagctccccgcaggactcccgcctctaccttgtcttcccccacgactcctctgctctctccaactccttccaccacctgcagctctttgaccaggacagctccaatgtggtgtcacgcttcctccaggatccctactccaccaccttcagcagcttctcccgagtgaccaacttcttccggggtgccctgcagccacagcctgagggagccgcctccgaccttcccccgccacccgacgatgagcccgagcctggattcgaggtcatttcctgtgtggagctggggcctcggccaaccgtggagcggggccctccagttacagaggaggagtgggcacgccacgtgggccctgaaggtcgcctgcagcaggtccctgagctgaagaaccggatcttctcggggggtctgagccccagcctgcggcgcgaggcctggaagttcctcctagggtacctcagctgggaaggcacagctgaggagcacaaggcccacatacgcaagaaaacggatgagtatttccgcatgaagctgcagtggaaatctgtgagccctgagcaggagcggagaaactcacttctgcatggataccgcagcctcatcgaaagggatgtgagccgcactgacaggaccaacaagttctacgagggtcccgagaacccggggctgggcctgctgaacgatatcctcctcacctactgcatgtatcacttcgacctcggctacgtccagggcatgagtgatcttctctcccccatcctctacgtcattcagaacgaggtggatgctttctggtgtttctgtggcttcatggagctcgtgcaagggaactttgaagagagccaggagaccacgaagcggcaactcgggcgactgctgctgctcctgagggtgctggaccccctgctctgcgacttcctgggtatgtctctcgggagggtgggcaggagacaatggggccatagaccttgccagattctctggtagcagccacagtggcatcctggacattgggtcctgatccaaacaagagaaacatccccacacaacctagaatgtagaggcagaattgctgtt

SEQ ID NO: 66734 - DNA, 947 bp, Homo sapiens
gcggtggaattcgcgaggacgagtggtactgccctgagtgccggaatgatgccagcgaggtggtactggcgggagagcggctgagagagagcaagaagaaggcgaagatggcctcggccacatcgtcctcacagcgggactggggcaagggcatggcctgtgtgggccgcaccaaggaatgtaccatcgtcccgtccaaccactacggacccatcccggggatccccgtgggcaccatgtggcggttccgagtccaggtcagcgagtcgggtgtccatcggccccacgtggctggcatacacggccggagcaacgacggagcgtactccctagtcctggcggggggctatgaggatgacgtggaccatgggaattttttcacatacacgggtagtggtggtcgagatctttccggcaacaagaggaccgcggaacagtcttgtgatcagaaactcaccaacaccaacagggcgctggctctcaactgctttgctcccatcaatgaccaagaaggggccgaggccaaggactggcggtcggggaagccggtcagggtggtgcgcaatgtcaagggtggcaagaatagcaagtacgcccccgctgagggcaaccgctacgatggcatctacaaggttgtgaaatactggcccgagaaggggaagtccgggtttctcgtgtggcgctaccttctgcggagggacgatgatgagcctggcccttggacgaaggaggggaaggaccggatcaagaagctggggctgaccatgcaggtgtgtctgggatgggggatggcactttgggaggccaaggcggatggatcacttacgttaggagttcaagaccagcctggccaacatggtgaaacctcatctctactaaaaatacaaaaattagctgggtatggtggcgggtgcctgtaatcccagctactgaggtggctgaggcag

SEQ ID NO: 66735 - DNA, 582 bp, Homo sapiens
acggccgccagcagcgggaacaggaacagaggcggctgagccaggaacgggatcgcctagagggtcttcgccagagactccgcaaggcccagggacagctcgactcacagccagaggaccaacgcgagcggcttctgcagggtgtgcaggagatgagggaacaactggatgtggcccaacgtgcctatgaggacctggagttccagcaactggagcgggagagccggcaggaggaggaggatcgggacagccctgggccccaggtgccagaccccaaggtccaggaactccaggccagcatggcgcagcacagacaccggatccgggtcctggaagagcagctcaagtcactgggggagcagatggcagccgagagccgggggttgagccggaagaaggaggaggcccttcaggccctgtcacaggaacggagccggctgctcgagctcaattgccttcagggaacacctggcggtgacttctctgagcccaacccggccctcactaagctgctgttcacccaaaagacagaccgccagctgcttgtgctccaggatgccgtggcccactccgctgtcaccc

SEQ ID NO: 66736 - DNA, 980 bp, Homo sapiens
agcgtgtcgaattccacctacgtggtagagaggggcggctgtgtggcggtttgtcacatctagatccatgttttgcttccctggagccgcattcttttaggactaccttgatttattccgtccctgggctggtggggccgaggagtgtcggaggagagccagtgctttgcgtggtcctctgaattctgccaggtagccctgctccggcgtccgtgaaggggccaggacagtgtccgccaggaggggctgtgctcccagacaggaagcaggagaggttgcagccctgttctgaccctgccattccgccctctcctcacccctgccccacagggactgcatcgccctctgcttcctcaacagcggcaccagctttgtggccggctttgccatcttctccatcctgggcttcatgtctcaggagcagggggtgcccatttctgaggtggccgagtcaggccctggcctggctttcatcgcttacccgcgggctgtggtgatgctgcccttctctcctctctgggcctgctgtttcttcttcatggtcgttctcctgggactggatagccagtttgtgtgtgtagaaagcctggtgacagcgctggtggacatgtaccctcacgtgttccgcaagaagaaccggagggaagtcctcatccttggagtatctgtcgtctccttccttgtggggctgatcatgctcacagaggtgagggcctgggaagcgggggaaggctggggaggaggagccaagtgacagctgctacctgtcagtgaggcagataccctggctcccggtcagggcaggtcttctgggcttctggacactaggactccctcttttccccatcccaggaacgacaaagtaggcaggtccctcctctggcctttgggcatggaccacccacctccagggatgggtgaggagccatttggctccacagtaagtgaagaggtatgtggagcattggattgggagaagc

SEQ ID NO: 66737 - DNA, 450 bp, Homo sapiens
aatgaaactagagcatagtccgtgcggtggaattaaaataaatactggggcagcagacaggggccagcctgcctgtcctgaggcttgttttctctcgtgggcagcttccgggcatttgtggaggacagtgaggacgaggacggcgctggggagggcggctccagtttgctgcagaaacgtgccaaaaccaggcaggagaaggcccaggaggaggccgactacatcgagtggctgaagggacagaaagagattcggaacccagattccctgaaggaactgacgcatctcaaggaatactggaacgaccctgagttggatgaaggggagcggttcctgcgggattacatcctcaacaaacgctatgaggaggaggaagaggaggaggaagatgaagaggaaatggaggaagaggaggggtccacggtcccccagtccagctggctgtggaca

SEQ ID NO: 66738 - DNA, 601 bp, Homo sapiens
actgctccgccagcaacttctctgtggtctatactcgctatgggaagtgttacaccttcaacgcggacccgcggagctcgctgcccagccgggcagggggcatgggcagtggcctggagatcatgctggacatccagcaggaggagtacctgcccatctggagggagacaaatgagacgtcgtttgaggcaggtattcgggtgcagatccacagccaggaggagccgccctacatccaccagctggggttcggggtgtccccaggcttccagacctttgtgtcctgccaggaacagcggctgacctacctgccccagccctggggcaactgccgcgcagagagtgagctcagggagcctgagcttcagggctactcggcctacagtgtgtctgcctgccggctgcgctgtgaaaaggaggccgtgcttcagcgctgccactgccggatggtgcacatgccaggcaatgagaccatctgcccaccaaatatctacatcgagtgtgcagaccacacactgggtccgtgctgcctaccctttcctacctctccatcagcctcttcatgtctctgtccactcttctcctcactgtcttggatcct

SEQ ID NO: 66739 - DNA, 472 bp, Homo sapiens
ctcgagatacctagtcagtgtggtggaattcgcagaagcagttcatcagagacgtgttggactgtgaggcggatgaaatggacttctccttcatggatatggatgatgcgctccggaagttccagtcccatatccgggttcagggtgaggcccagaaagtggagcgactcatcgaagccttcagccagcggtactgtgtctgtaacccagccctcgtgcgccagttccggaacccagacaccatcttcatccttgcttttgccatcatcctcctcaataccgacatgtacagtcccagcgtcaaagctgaacgaaagatgaaactagatgacttcatcaagaacctgagaggggttgacaatggtgaagacatcccccgagacctcctggtgggcatctaccagcgcatccaggggcgtgaactgcggaccaacgatgaccatgtgtcccaggtgcaggctgtggagcgcat

SEQ ID NO: 66740 - DNA, 450 bp, Homo sapiens
ttcgagtttcactagcccagtgtgatgggcttctccggtcgggtgaaaaatccgggactgtgggaactgccgttcggcaccaccgcacgcgagatcctcgaagattacgccggtggtatgcgtgatggtctgaaatttaaagcctggcagccaggcggcgcggggactgacttcctgaccgaagcgcaccttgatctgccgatggaattctgagctaaactgctcgagacggcgctaatgtacgcctaaaactgaaacgagacaagaggcattttcttatttacttttagtaacttacaagtgtctcatatcggcgacagtttaatttctgacggtaataattagatattcagcgaaggaaaaaaccttaagaaaaaagccataaaaaccatgaggttattatggccgatttgaggagggaaagagtaagagcagtttgttaaatgtacg

SEQ ID NO: 66741 - DNA, 751 bp, Homo sapiens
cccacgggaagggcaggtgaagcaggggctgctgggggattgctggttcctgtgtgcctgcgccgcgctgcagaagagcaggcacctcctggaccaggtcattcctccgggacagccgagctgggccgaccaggagtaccggggctccttcacctgtcgcatttggcagtttggacgctgggtggaggtgaccacagatgaccgcctgccgtgccttgcagggagactctgtttctcccgctgccagagggaggatgtgttctggctccccttactggaaaaggtctacgccaaggtccatgggtcctacgagcacctgtgggccgggcaggtggcggatgccctggtggacctgaccggcggcctggcagaaagatggaacctgaagggcgtagcaggaagcggaggccagcaggacaggccaggccgctgggagcacaggacttgtcggcagctgctccacctgaaggaccagtgtctgatcagctgctgcgtgctcagccccagagcaggtgaggcacgtggccagcatgggagggctgcagccagcgtgccccccactgccaggcctcaggcacactgtagctttttatgtgactggctacacagccctgtcaggactaagtgggaagaagtaagcttgttctcaagggtggtgtcctcagtttgtgaccttcccctgctgtcctcttccagagggacgtggcccttctctcccctgaccagtcctttccactagtgcgaggcaggg

SEQ ID NO: 66742 - DNA, 495 bp, Homo sapiens
  misc_feature (1)...(495): n = a,t,c or g
acccctatcgtagaccctagtccatgtggtggaattcgcgggtgaacatgccgaggccatcgctagccgggagcaggaggtgctgcagggttggaaagagctgctgtcagcctgtgaggatgcccgcctgcatgtcagctccacagccgacgccctgcgcttccacagccaagtccgcgacctgctctcctggatggatggcatcgccagccagattggggcagccgacaagcccaggtgcccctcatccctcctcgggcttcctgcctccccctggtggcctaccccagccacccccagcccattgacagcccccttctcaatggaatgacaacagccaatatctgtgtgnnnnnnnnnnnnnnnnnnnnnnnnnnnnnnnnnntcgtgtgtattcagaccccttttttaggcctgtcattggggacttcggtcatggggcatccttctgtccgctgtccttcccagntgcctattattaccctctccatggga

SEQ ID NO: 66743 - DNA, 447 bp, Homo sapiens
ggaggaattccttctacaatgaagctgtcaattatgatacctgcaagcagtgtacacagtgcaaccatcgaagtggaagtgaactcaagcagaattgcacacctactcaggatactgtctgcagatgtagaccaggcacccaacctcggcaggacagcggctacaagcttggcgttgactgtgttccctgccctcctggccacttttctccaggcaacaaccaggcctgcaagccctggaccaattgtaccttatctggaaagcagacccgccacccagccagtgacagcttggacgcagtctgtgaggacagaagcctcctggccacactgctctgggagacccagcgccctacattcaggccaaccactgtccaatccaccacagtctggcccaggacttctgagttgccctctccacccaccttggtgactcctgagggcctgg

SEQ ID NO: 66744 - DNA, 393 bp, Homo sapiens
ttagtgtgctggcagacagcggcgatattgagtccattcgccattatcatccccaggatgccaccaccaatccttcgctgttactcaaagctgccggattatcacaatatgagcatttaatagacgatgctatcgcctggggtaaaaaaaatggcaagacccaggaacaacaggtggtcgcagcgtgtgacaaactggcggtcaatttcggtgctgaaatcctcaaaatcgtacccggtcgcgtgtcaacagaagttgatgcacgcctctcttttgataaagaaaagagtattgagaaggcgcgccatctggtggacttgtatcagcaacaaggcgttgagaaatcacgcattctgatcaagctggcttcgacctgggaaggaattcgatatc

SEQ ID NO: 66745 - DNA, 584 bp, Homo sapiens
tcccgtccgaacctaggttgcccttccgtgtgatagggtctacactggccagggagggggttttggaggagaggctgctctctcttcagttccctcccctgttcctggccacacggatcccaaaccccatgccctgagctggtccaggccgtgtaggccagaccagtcaaagccacctccaacctccgcttccaccagtgcccctggtgtccaagatctgccctagtgacacctacaaagtgtggaagagcggccagaacctgagggtagacaccacactcctgggctttgaccacatgacctggcagcgagggaaccgcagctttgtcttcaggggccaagacacaagcgccgtggtcatggagattgaccacgaccgccgggtggtgtacacagagactctggcactggctgggcaggaccgggagctgctgctggctgctgctcagcccactgaggaacaggtgctgagccggcttaccgcgcccgtcgtcaccactcagcttgacaccaagaatatctcctttgagaggaacaagactggcatcctgggctggcgcactgaaaagacggagatggtgaat

SEQ ID NO: 66746 - DNA, 659 bp, Homo sapiens
aattggaccatagagatccctaggcagtgtggtggaattccaagagccgaagagccagtcctcactggggtgcagagggctctttgggggcagagcgggcactgcatggaccctgcaccctggagctgatgttcaggtcacaaagctggtgaagaactaccggtcccacgaggccctgctgatgctgccctcacggctgttctaccacagggaactcgaggtctgtgcggaccccacagtggtgacctccttgctgggctgggagaagttgcctaagaaaggcttccctctcatcttccatggtgtgcggggcagcgaggcacgggagggaaaaagcccatcgtggttcaacccggccgaggccgtccaggtcctgcgctactgctgcctcctggcccacagcatctccagtcaggtgtctgccagcgacattggcgtcatcacgccctaccggaagcaggtacgccctgcccaggcacgcctggttctgtgaggtccctgcagccctgctccttggctcctgcagctccacagaggcaggaacaagctccttgtgagcagcagcaggtttttaaaggggcaggaccgcacttgaatgtcgttcaacatgagaggtcacccaactgccatccatgggccagttccgggcagctgccagg

SEQ ID NO: 66747 - DNA, 418 bp, Homo sapiens
acttgagcgtggcgaggagccctgggttcccagtggaaaggacatgaccctggccaggaacacctacgggaggctcaactctggttcctggagtttgacagaggatagagatgtttctggagaatggccacgagcttttccagataccccacctgggatgactactagcgtcttccctgttgccgatgcctgccacagtgtaaaaagcctgcagcgacaaccgggtgcctccccatctcaggagagaaaacccacgggggtgtcggtgatctattgggagaggctcctgctaggctcgcgcagtgaccaggccagcatcagcctgcgactgacctccccactcaggccccccaagagcagccggcccagggaaaagaccttcacagagtaccgggtgcctgggaggcagcccacgacg

SEQ ID NO: 66748 - DNA, 650 bp, Homo sapiens
actagtccagagtggtggaattcacctgacggtgaacctcgctgcgccccacggtcctggcgctttcttccgctacatgcgccagcccatcaaacaggagctcatctgcaagtggctggcggccgacggcaccgcgaccccgagcctctgctccaaaactttcagcaccatgcacgagctggtcacgcacgtcaccgtggagcacgtcggcggcccggaacaggccaaccacatttgcttctgggaggagtgtccgcgccagggaaagcccttcaaagccaaatacaaacttgtaaatcacatccgcgtgcacacgggcgagaagcccttcccttgtcctttcccggggtgtgggaaggtctttgctagatcagaaaatctcaaaatacacaaacgaactcacacaggcgagaagcccttcagatgcgagttcgagggctgcgagcggcgcttcgccaacagcagcgaccgtaagaagcattcgcacgtgcacactagcgacaagccatacacgtgcaaggtgcggggctgcgacaagtgctacacgcaccccagctcgctgcgtaagcacatgaaggtgcacgggcgctcgccgccgcccagctctggctacgattcggctacaccgtctgccctcgtgtcgccctcgt

SEQ ID NO: 66749 - DNA, 976 bp, Homo sapiens
catccgccacctccatgacagccaacacgtggctgttttccaccggggccgattcttccgcatggggacccactcccgaaacagcctgctttccccgagagccctggagcagcagtttcagagaatcctggatgatccctcaccggcctgcccccacgaggaacatctggcagctctgacagctgctcccaggggcacgtgggcccaggtgcggacatccctgaagacccaggcagcggaggccctggaggcggtggaaggggccgctttctttgtgtcactggatgctgagcccgcggggctcaccagggaggacccggcagcgtcgttggatgcctacgcccatgctctgctggccggccggggccatgatcgctggtttgacaaatccttcaccctaatcgtcttctctaacgggaagctgggcctcagcgtggagcactcctgggccgactgccccatctcaggacacatgtgggagttcactctggctacagaatgctttcagctgggctactcaacagacggccactgcaaggggcacccggaccccacactaccccagccccagcggctgcaatgggaccttccagaccagatccactcctccatctctctagccctgaggggagccaagatcttgtctgaaaatgtcgactgccatgtcgttccattctccctatttggcaagagcttcatccgacgctgccacctctctttagacagcttcatccagatcgccttgcaactggcccacttccgggacaggggtcaattctgcctgacttatgagtcggccatgactcgcttattcctggaaggccggacggagacggtgcggtcttgcacgagggaggcctgcaactttgtcagggccatggaggacaaaaagaagacggacccacagtgcctcgccctgttccgcgtggcagtggacaagcaccaggctctgctgaaggcagccatgagcgggcag

SEQ ID NO: 66750 - DNA, 2046 bp, Homo sapiens
ataaaatggttgtctttggtggctctttaggatcccggcaaatgagcaatgatgtctgggtccttgaccttgagcagtgggcgtggtccaagccgaacatctctggccccagtcctcatcctcgaggtggccaatctcagattgtcatagatgatgcaactatcttaatcctcggagggtgtggcggtcccaatgctctattcaaggatgcttggttgttgcacatgcattctggtccttgggcctggcagccactcaaggtagaaaatgaagagcatggggccccagaactgtggtgccatccagcttgccgggtgggacagtgtgtggtggtcttcagccaggctcctagtgggagagccccactcagccccagtttgaactctcgcccatcacctatcagtgccactcctccagctctcgttcctgaaacccgagagtaccgctctcagtctccagtaagaagcatggatgaagctccttgtgttaacggccgctggggaacactgagacccagggctcaaaggcagactccttcaggttcccgggaagggagcctttccccagccagaggagacggctctcctatcctcaatggtgggagtttgtctccaggaacggcagctgtgggtggctcttctttggacagtcctgtacaggccatatctccaagtactccatctgctcctgaaggatacgacctgaaaataggactttctttggccccccgacgaggatcactaccagatcagaaagatctgagattaggatccatagatctgaattgggatctgaaacccgcttccagtagtaatcccatggatggcatggacaataggacagttgggggaagtatgagacaccctcctgaacagacaaatggtgtgcataccccacctcacgtggccagtgcccttgcaggggccgtctccccaggtgccctgcgtcggagtctggaagccatcaaagcgatgtcctccaaaggcccctcggcctctgcagcactaagtcctcctcttgggtcttctccaggctctcctgggagccagagtttgagcagtggagaaacagtgcccatccctcgcccagggcctgcccaaggagatggacattccttacctcccattgctcgccgcctgggccaccaccctccacagtccctaaatgttggcaaacccctataccagagtatgaactgcaagcccatgcagatgtacgtgctggacattaaagacaccaaggagaaggggcgggtcaaatggaaagtatttaatagcagttctgtggttggacctcctgaaaccagcctgcataccgtggtacaaggcaggggtgaactcatcatatttggaggactcatggacaagaaacagaatgtgaagtactatccaaaaacaaacgccttgtactttgtacgagcaaagagataatgtgttctaaacccctttccttttctgtggcttttaatttggaattttccagtgtgtaagcatttggactgagaattgggaaaacaaaattactcccagaagccaaaactctttaattcccaaccgaagtcactccaggctgggatcaaatctccattaagaaaaaaaattatatataaatatatatatatatattatatagccaactctgttgacaaaaaaagggagagatttccatcctggttcagataaagttgtgtgctgtgttttaacaggggctgggctgcctttttctaccttgctggtaactagaccaagaagttagagaatagactaacatcagtaacttcccaaaagaaactgaagagccccctgtaaatctttatgtggccttcttggagttaaaaaatgaaagggcatatgtaagttgcaaaggtggagggttttagactctcatgcttcaggtgctgtcggggtaaaagtaactgtttttccccttctcttaaaaccacagaggacctgtgacagctctgcagaaattgcagtgcctggccccctcttgccttttatggctgaggaaagttacccaacaaaggattttattccaaaaaaaaaa

SEQ ID NO: 66751 - DNA, 743 bp, Homo sapiens
ggaattcaggggaaggtgtgcaaagctggaagtcctgcggggcatgtctgtgttctgagtcagggccctgaagagatctctctgcctttgtgggctgtgcctgccatcgtgggcagctgcgcaaccgtcttggccctcctggtccttagcctgatcctgtgtaaccagtgcagggggaagaaggccaaaaatcccaaagaagagaagaaaccgaaggagaagaagaaaaagggaagtgagaacgttgcttttgatgaccctgacaatatccctccctatggggatgacatgactgtgaggaagcagcctgaagggaacccaaaaccagatatcattgaaagggaaaacccctaccttatctatgatgaaactgatattcctcacaactcagaaaccatccccagcgcccctttggcatctccagagcaggagatagagccctatgacattgacaacgccagcagcatcgccccttcggatgcagacatcattcaacactacaagcagttccgcagccacacaccaaaattttcaatccagaggcacagtcccctaggctttgcaaggcaatcccccatgcccttaggagcaagcagtttgacttaccagccttcatatggtcaaggtttgagaaccagctccctaagccactcagcatgcccaactcccaaccctctgtctcgacacagtccagcccctttctccaaatcttctacgttctatagaaacagcccagctgtagt

SEQ ID NO: 66752 - DNA, 963 bp, Homo sapiens
cgttgctgtcggaggaggaggttgattatgatgatgatgaggaccaggggtcagccacactctctcagactcctcagccccagagagtatcaggggtttttccccgtcctcatggaccccacccactgcccatgactgctactccccgaaagcttccagagggtgagagtgcaccacttgagcttcctgcccctcctgcactgccccccaaaatcttctacattaagcaggaacccttcgagcctaaggaggagatatcaggaagcggaactcagcctggaggagcaaaggaggaaaccaaagtgttttctggaggggacactgaagggaatggggagctagggttcttgttgccttcagggccagggccaacatctgggggagggggtccatcctggaaaccagtggatcttcatgggaatgaaatcctgtcagggggtggaggacctgggggagcaggccaggccgtgcatgggcctgtgaagctaggggggacaccccctgcagatggaaaacgctttggttgcctgtgtgggaagcggtttgcagtgaagccaaagcgtgaccggcacatcatgctgaccttcagccttcggccttttggctgtggcatctgcaacaagcgcttcaagctgaagcaccatctgacagagcacatgaagacccatgctggagccctgcatgcctgtccccactgtggccgtcggttccgagtccatgcctgttttctccgccaccgggacctatgcaagggccagggctgggccactgcccactggacttacaagtgactgctgaggctatacactagcttctagaacaagataaccactgctgctgatggatacttttccctcactgccatggcacaccagtcatggatcttgtaatcatgccaagagaatagatacattatggacctcttgttcttagatatgggcctctcagcctggcagatgtgga

SEQ ID NO: 66753 - DNA, 783 bp, Homo sapiens
attgaggaatggcagtatttctacccgatggtgctaaaaaagaaagaagaatcgaaagaggaagacgagttgggatatgatgatgatttccctgtggcagttgaagtaattgttggtggtgttcggatggtttacccttcagcatttgttttgatctctcagaatgacatcccggttcctcagagtgttgccagtgctggaggccacattgcagttgggcagcaagggcttggtagtgtgaaggacccaagtaactgtgggatgcctctgacccctcccacctctccagaacaggctatcctaggtgagagtggaggtatgcagagtgctgccagtcacctggtttcccaagatggagggatgataacgatgcacagtccaaagagatcggggaagattcctccaaaactccacaatcatatggtccatcgagtctggaaggaatgcatcctcaacagaacccagtccaagaggagccaaatgtcaactccaactcttgaagaagagcctgctagcaatcctgctacttgggattttgtggatccaacccaaagagtcagctgttcttgttccaggcataagcttttaaaacgttgtgcagtcgggcccaatcgacctcccacagtatctcaaccagggttcagtgcaggaccatcatcatcttcatctttaccacctcctgcttcttctaagcacaaaacagcagaaagacaggaaaaaggagacaagctgcaaaagagacccttaataccatttcaccataggccctctgtggccgaagaa

SEQ ID NO: 66754 - DNA, 472 bp, Homo sapiens
ctgaacgggactggcccttctgcctctccctgctcttcttatggcccagggagagagcccttgggtgggacctcagagtttctggggcctgatggggctggggtagaggtggtgattgagtctcgggccaacgccaagggggttcgggaggaggacgccctgctggagaacgggagccagagcaacgaaagtgacgacgtcagcacagaccgtggccctgcgccaccttccccgctcaaggagacctccttttccatcgggctgcaagtactgtttccattcctcctggcaggctttgggaccgtggctgctggcatggtgttggacatcgtgcagcactgggaagtcttccagaaggtgacagaggtcttcatcctagtgcctgcgctgctggggctcaaagggaacctggaaatgaccctggcatcaaggctttccactgcagccaacattggacacaaggacatgtatt

SEQ ID NO: 66755 - DNA, 877 bp, Homo sapiens
acctcacaagcggatgccggggcttctcctggctgccccagcgcccgcggatctgtctgccgaggcgcgcttccactcccagagtttattcctcgttccttcttcagtcctgctcgtcggaggacccggttgccatggtgaaggaaaaagtggcccaccctcaggaccctcaccacccatcagagaagcctgtcattcactgccataaatgtggggagccttgcaagggtgaagtgcttcgggtccagaccaaacatttccacatcaagtgtttcacctgcaaagtgtgtggctgtgacctggcacaagggggcttcttcataaagaacggagagtatctctgcaccctggactaccagcggatgtacgggacacgctgccatggctgtggggagtttgtggagggcgaagtggtgactgctctgggcaagacctaccatcccaattgctttgcttgtactatctgcaagcgcccgtttccacccggagaccgagtcacattcaatgggagagactgcctttgtcaactctgtgcacagccgatgtcgtccagtccgaaagaaaccaccttctccagcaattgtgccggctgcggaagagatatcaagaatgggcaggcgctgctggcgctggataagcagtggcacttggggtgctttaaatgcaagtcctgcgggaaggtcctcaccggggagtacatcagcaaggatggtgctccgtactgtgaaaaggactaccagggactctttggggtgaaatgtgaggcgtgtcaccagtttatcacagggaaagtcctggaggcaggtgacaaacattaccaccccagctgtgcacgatgcagcagatgcaaccagatgttcacagaaggagaggaaat

SEQ ID NO: 66756 - DNA, 494 bp, Homo sapiens
cccacccccaggcaacatgaactttcccagccaacccttcaaccagcctctgggtcaaaactttagtcctcccagtgggcagatgatgccgggcccagtggggggatttggtcccatgatctcacccaccatgggacagcctcccagagcagagctgggcccaccttctctgtcccaacgatttgctcagccaggggctccttttggcccttctcctctccagagacctggtcaggggctccccagcctgccgcctaacacaagtccctttcctggtccggaccctggctttcctggccctggtggtgaggatggggggaagcccttgaatccacctgcttctactgcttttccccaggagccccactcaggctccccggctgctgctgttaatgggaaccagcccagtttccccccgaacagcagtgggcggggtgggggcactccagatgccaacagcttggcaccccctggcaaggcaggtgggggctccg

SEQ ID NO: 66757 - DNA, 600 bp, Homo sapiens
cccacgcgtccgcccacgcgtccgcccacgcgtccgcccccagagccaagaccttctccagaaggtgacccttcccccccaccaccaccaatgtcagccctggtccccgacactcccccggacacccctcctgccatgaagaatgccactagctctaagcagctcccactggaaccagagagcccctcagggcaggtcgggcctaggccagcccccccgcaggaagagtccccttcctctgaagcaaagagcagaggacccaccccaccagccatgggcccacgggatgccagacctcctcgaaggagcagccagccatctccaacagcagtgccagcctccgacagccctcccaccaagcaagaggtgaagaaggcaggagagagacacaagctggcaaaggagcggcgagaagagcgggccaagtacctggcggccaagaaggcagtgtggctggagaaggaggagaaggccaaggcgctgcgggagaagcagctccaggagcgccgctgccggttttagggagcaaacgtcttaaagccgagcaacgccgttcaagccttggaggaacggctagcggaagaagtttgtggaaaacaa

SEQ ID NO: 66758 - DNA, 622 bp, Homo sapiens
ttttcagatggtggccagcagagatctgcaaccccaggtctgtgccactgaacatccagggccttaaacatgacttgggggacttccctgtattcttctttggttctcatgactactactgggtacaccagggcagagtgttcccttatgttgaaggaaacaaaagctttgctgaagggcagactagtattaacaagaccttcaaaaaggcactggaagaagctgcaaaacgtttccaggaattgaaagcacaaagagaaagtaaagaagccctagagattgaaaaaaactcaagaaaaccccctccctacaaacacatcaaagctaacaaagtaataggaaaggtgcagatccaggttgctgacctgtcagagattccccgctgtaactgcaagccagctgatgaaaacccttgtggcttggaatcggagtgcctgaacagaatgttgcagtatgaatgccacccgcaggtgtgcccagctggagatcgttgtcagaaccagtgctttacaaagagactataccctgatgcagagatcatcaaaacggagcggagaggctggggcctcaggaccaaaaggagcattaagaagggtgaatttgtaaatgaatacgtcggtga

SEQ ID NO: 66759 - DNA, 536 bp, Homo sapiens
ggcacgagaagctatcgagcacatgtaattatactcactggggctcgaccttataaatgtaaagaatgtgggaaagccttcaactcttctaattcctgtcgagtgcatgaaagaactcatattggagaaaaaccatatgaatgtaaacgatgtggcaaatcattcagttggtccatttctcttcgattgcatgaaagaactcatactggagagaaaccttatgagtgtaaacagtgtcataaaaccttcagtttttcaagttcccttcgagaacacgaaacaactcacactggagagaaaccctatgaatgtaaacaatgtggtaaaaccttcagtttttcaagttcccttcaaagacatgaaaggactcacaatgcagagaaaccctatgaatgtaaacagtgtgggaaagccttcaggtgttcaagttattttcgaattcatgaaaggtcacacactggagagaaaccctatgaatgtaaacagtgtggaaaagttttcattcgttccagttcctttcgactgcatgaaagaac

SEQ ID NO: 66760 - DNA, 444 bp, Homo sapiens
cattttacccggctgcaggaattcggcacgagcctgcctctacctggtctgccgtacggagggcacgccgcacatgctcctggacctcagcgacctgctccaggtagacagcctccgtcctgcatctttccccacctggggttgtgacctgggggttgtgaccagggttgtgaccggggtgtaccccaggtgcctccacgcatctcagtggccggtctgtgctgcctgcccagtcaggaagttttggtctgtaggatgaggggccttcatgacatgggggtcacagtccgagacttgtgggagtgtgggtctccatggcaggagggcacctgccaatgctgggcacggttgggtgttagctaggcctgggtgaacagtgaacttttgtcctacacaaaggagattattttcaattaaaaaatttttttgtgagtaaaaaaaaaa

SEQ ID NO: 66761 - DNA, 636 bp, Homo sapiens
tggtgtagaccttcagctgcaatttttcatctgctgaccagacatgcgccgccactttcttgccatcgcctttggcctgtaacaagaatgcgtgatcgtaacctttcactttgcgctgatcgtcgtcggcaagaaactcactggcgatgattttggcgctgcggaaatcaaaagacgttccggcgacagatttcaggccgtcgtgcggaatgccgccttcatcaaccggcagatattcgtccgccagaatctgcaacttgtgattgcgcacgtcagactgctcgccgtcaagattgaaatagacgtgattagtcatattcaccgggcaaggtttatcaactgtggcgcgataagtaatggagatacggttatcgtcggtcagacgatattgcaccgtcgcgccgagattacccgggaagccctgatcaccatcatctgaactcagggcaaacagcacctgacgatcgttctggttcacaatctgccagcgacgtttgtcgaacccttccggcccgccgtgcagctggttaacgccctgacttggcgaaagcgtcacggtttcaccgtcaaaggtataacggctattggcgacacggtgggcatatcgggcaatagaggcctccagacactcggccc

SEQ ID NO: 66762 - DNA, 1043 bp, Homo sapiens
  misc_feature (1)...(1043): n = a,t,c or g
gaattcggcacgagagatctcaggactccgtgtcatctccttcgccacagaagcagaagtcagcctcggccctcacctacactgcttcctccacatctgccaaaaaggcctcgggccctgccacaaggagccctttcccacctgggaagagcaggacttcagaccacagcttgagtagagagggctccagacaaagcttgggttctgacagagccagcgccacctccacctccaaacccaattcccctcgggtgagccaggcccgagcaggggagggcaggggggccgggaagcacgtgcggagctcctccatggccagcctgcgctcccccagcacaagcatcaagtctggtttgaagagggacagcaagtctgaggacaaggggctgtccttcttcaaatcagccttgagacagaaggaaacccggcgctcgacggatcttggcaagacagccttgctctctaaaaaggctggtgggagctctgttaagtctgtctgtaagaacaccggggacgacgaggcagagagaggccaccagcctccagcttcccagcagccaaatgcaaatacaacgggaaaagagcagcttgtcaccaaggaccctgcttctgccaaacattccctgctgtccgctcgcaaatccaagtcttcccaactagactctggagttccctcgtctccgggtggcaggcagtctgcagagaaatcctcaaaaaagttatcttctagcatgcaaacctctgcacggccttctcaaaaacctcagggatatttctgcaatcgaagtgttttatctgtaaagatgtttatttatttagaacccctgccctcccaccaaagccttctgtgcttttgctttgtacttttttgagtnnnnnnnnnnnnnnnnnnnnnnnnnnnnnnnnnnnnnnnnnnnnngtctaattcaatagcatattgctcaaagcgacgtcttattctgccattgaaccaaattgcagctataggcaatacattgacaccaaccttactggaacatttgtgtacgattcctcagacgacg

SEQ ID NO: 66763 - DNA, 690 bp, Homo sapiens
aaagtggcagtgtttcttctgaaattctcaggcagtcagactgtcttaggcaaatcttgataaaatagcccttatccaggtttttatctaaggaatcccaagaagactggggaatggagagacagtcaagggttatgtcagaaaaggatgagtatcagtttcaacatcagggagcggtggagctgcttgtcttcaattttttgctcatccttaccattttgacaatctggttatttaaaaatcatcgattccgcttcttgcatgaaactggaggagcaatggtgtatgacaagccgccgaaatttgccatgtcacgagagcaaatgtcacagtcatgttctcacacggcacataatgcaagtctgttgacagatgcgggtccattgtcatgtggggagtcgagggcgagctgtttgtttttgtaacgatgttgggaagtgatggctctgcagtcacaaagagcagccttctctcactggctgcaccgatgaacattacgaagttctagaacaaacatcacttcaaaatgcctggagtaattcctcttatatcaactaatttcaagaagaaaacctgcagaaactaaccccacccctctcaacgagaatattgtgtccacgtcctctttacttatacgacccgtctcttattctcttataacacaacgtcataactaaacgagcacaacac

SEQ ID NO: 66764 - DNA, 516 bp, Homo sapiens
attggaccgcctgcggaattcggcacgagagcggcttatcaacagaggcattttctgcttatggtaataagacggacaacacaagagaaaagaggacccacagaaggacaaaacgttttttatcctatccacggtttgtagaagtcttggtggtggcagacaacagaatggtttcataccatggagaaaaccttcaacactatattttaactttaatgtcaattgtagcctctatctataaagacccaagtattggaaatttaattaatattgttattgtgaacttaattgtgattcataatgaacaggatgggccttccatatcttttaatgctcagacaacattaaaaaacttttgccagtggcagcattcgaagaacagtccaggtggaatccatcatgatactgctgttctcttaacaagacaggatatctgcagagctcacgacaaatgtgataccttaggcctggctgaactgggaaccatttgtgatccctatagaagctgttctatta

SEQ ID NO: 66765 - DNA, 886 bp, Homo sapiens
gcggccgctgcctccttctccttcctgccttctcctcccaaatgagcagagcgtccacagtctgcgcaggacaccagctcttcaggccgcccactcttcttgttcatgttggagccccccaagcagaagtcacagtagttattgggaatgactgttccatccggtcctttctggggcctgtggttctcatttctgtggttgggtggggaccgagtctcctggtcttgagcttcatccccctcctcgctggccaggtgagtgtgagcatagtggtagctgagccccggtcggttcttgtagcgcttgccacagatgtcacagacgtaaggtttgtcgtggtcttcctgagaggcggcgtcgtgcctcctcctgccccctgcagagccgcgagcccgtcctctagtcctgttctttcgcttgggaatatcctcttccaaatcctcttcttcattcccttcttctacattttcatcattttccaaaaccctctgtatttcctggatgctttcctcctccctggcatccaccttcttctcaaccccctcgccacggagcaaggcttccagcgtggtgctctctgaggtgaacccatccttcttcaggggaagctccacttcaggttttatctccagcagccgcagttttggatcttcaggtgggtgcaatcgtctcttcttgcgccagcagcgggcagggtatgtatacagctggcccggggcaaggcctgggcctcggtgcctcttctccatccagatgtagcagttgttctgggccaccccagtctgtgagtccaggaagggaagacgcacgctgcgctctgcacacagccgtgagttgtaactccggcagtgctcaatggcttccttgtagaactggtccccgagcg

SEQ ID NO: 66766 - DNA, 654 bp, Homo sapiens
aatcgagaccctcggcattggcgggccattcttcttgcacaacccataactccatcatcacttggaagtactttcttgtggctggctgtacatgaggatggtttaagcctcttagaatacaactccatgaggttaatagtcagctatgtgtacaagagtctaatgacctttggaggctatcaagatgattttatggtagtcattaacaatacacattcaaaggacaaaccaacagagaaattactttttgccatggcaaaacccaagattcttgaaatcactcttttgatcgccagttacataaacaacttccatcagcaaaaggcagcatttcaccacctctctgctccagcactgctctcagcccagacccggggaccccaagccagaatgatgggaagccagcctcttctgtcaagcagcagaccgaccaaaggccccaccttactctgaaagctggggagcctgaacattcactccttgtcctccatgctgtggctgtatcagctccctacaagttcgtttacacctggcagcacggcagccacacaccggtattccaaaccttaacaatgaagggggttagtctcttttatttgattcttaaatattcaaataaatattaacagtaaaacataaacaccaaaaaaaaaa

SEQ ID NO: 66767 - DNA, 2015 bp, Homo sapiens
tttcgtccacgtcctgctccccctggtgaagaagctgccctgggcttgtcgtcctagggtctccagacatgtctgaggtgaagagccggaagaagtcggggcccaagggagcccctgctgcggagcccgggaagcggagcgagggcgggaagacccccgtggcccggagcagcggaggcgggggctgggcagacccccgaacgtgcctgagcctgctgtcgctggggacgtgcctgggcctggcctggtttgtatttcagcagtcagaaaaatttgcaaaggtggaaaaccaataccagttactgaaactagaaaccaatgaattccaacaacttcaaagtaaaatcagtttaatttcagaaaagcttgagtctactgaaagcatcctgcaggaagctacatcatccatgtctttgatgacccagtttgagcaggaagtatccaacctccaagatatcatgcatgacattcaaaataatgaagaggtgctcactcaaaggatgcaaagccttaatgagaaatttcagaatattacggatttctggaagagaagcctagaagaaatgaacattaatacagacattttcaaatcagaagcaaaacatatacattctcaagtaactgtccaaattaactcagctgagcaggaaataaaattgctcactgaacggctaaaagatttggaagatagcacactaagaaatattagaacagtaaaaagacaagaagaagaagatctcctgcgagtagaggagcagctaggctctgatacaaaggcaattgaaaagttagaagaggaacagcatgccctctttgccagagatgaagatctgactaataaactttccgactacgaacccaaagttgaagaatgcaagacacatttgccaacaattgaaagtgctattcactctgttctcagagtctctcaggatctgatagaaacagaaaagaaaatggaagacttgactatgcagatgtttaatatggaagatgatatgctgaaagcagtgtctgaaataatggagatgcagaaaacccttgaaggattttttttatgataatagcatattaaagatgcaaaatgaactggatattctaaaagaaaaagttcatgattttatagcatactcaagtacaggagaaaagggaactttaaaagaatataatatagaaaataaaggaattggtggtgatttttaaattcatgacatttattctgatgaaccatatcattatacataaattgattagtccattgattttgagttactttgatacgcctcatcttatcctacattattggaaaataaatgagatgtccacacaaatggattatccacataatcaaagcttatctttttaagcactaaaacttacttcattgtaactatttgaaatagaaatagttctttaaaaatatttctctacttttaaaacaagatacttaatatttttaatgttttttaaagcattaatggacatcatcattaatttcacctattatattgtacccacatatattgatgtctccaggggctaataaagagtatttaccacttcactaaatgaccccaatttgccattttcaaacctatgtctcataccttttctgtcacctgaacttactgtcaggttggttggtaatgtgcctgcctcagccagttcactttcttaggtaattcactgcaggttaagaatccacacaaccaagttcatgggaattttgtgtaaaataaaagataacatgcctgagggagagcctggtgcctttgctatgaattaatatgcactttctgaaaactctaaagcctgggaaacattttagtttttgttaaggttctaaactgtgttacagatacttgtaagacttttaaaatcagagtaagtatgttcttacataaggcctttcttaggaattatgtgtatataaatctttgaaatatctttatatacctgagttttaggttccaactgtgttagacatgagtttgctagatccatggtctctagat

SEQ ID NO: 66768 - DNA, 629 bp, Homo sapiens
aatcaaccatagtgagttttgtccttaagtccttggtgattcactgaaaacagacacgtgtttccctgaaggttagtgtttcctggcatcgtgtttgttttgttgttgtctcagagggagaaactgagaaaaaagatgatggaatatactagatgccgaagaaacattctgatgaggagccagataaaacttgaattggaatggatgcgtgttcttaaccgggctccattatcaatgacctttcataactttaagaataagaatgttcttctctctgaaactgtgatgttgctcttcaggagtcttaccgccagataatgaagatgcgaccgaaagacttgaaaaaacggctgatggtgaaattccgtggggaagaaggtttggattacggtggtgtggccagggagtggctttacttgctgtgccatgaaatgctgaatccttattacgggctcttccagtattctacggacaatatttacatgttgcaaataaatccggattcttcaatcaaccccgaccacttgtcttatttccactttgtggggcggatcatggggctggctgtgttccatggacactacatcaacgggggcttcacagtgcccttctacaagcagctgctgggg

SEQ ID NO: 66769 - DNA, 722 bp, Homo sapiens
tttgtgcttggtgaggctggaggcctggccgaaggccctcccgcagagctgacagcgatagggacgctcgcccgaatgcacgtgcaggtgctggagcagcgctgagctctggccgaaggccttggagcagtgcgggcaggcgtagggccgctcgcccgtgtggatgcgcaggtggtgttgcaagttggagctctgcccgaaggctttgccgcagtgggggcagcggtaggggcgctcggccgtgtgtgtgcgctggtgctgcagcagcgccgagctctgcccgaaggccttgccgcactgcggacacgggtagggccgctcgcccgtgtgcgtgcgcaggtgtttgagcagcgcagagccctggccgaagcccttggcgcacaccgggcacttgtggggccgcgggccgccgtgcgtgcgcaggtgctgtgccaggagcgagccgtgcccgaaggccttgccacacaccgggcagtggtgcggcttctccccgctgtggctgctgcgatgtttcagcagcgtggagcgccagccgaaggccttgccgcaggccgcgcactggtacggccgcgccccagtgtggatgccacggtgctgagccagggtggcaccgtggctgaaggacttcccgcagtcggggcagcggtacggcttctcgccgctgtgcgtgcggcgatgctggctcagcccgggaattccaccacactgaccctggtctcgat

SEQ ID NO: 66770 - DNA, 527 bp, Homo sapiens
aggggggacccacgcgtgcggccagttgtacaggaactgccaaaggctacagaaattctttctccctatgtcccagcctacccccactttagcgaggccaacagccgcctcagaaaccagattcaggagctaacatgccccaggtctcacgaggatcagagactccagaggccagggaaggagatcaaggtagtcaagcgggggtcgtctcagatctggttgtgctcgagctatgcaaatgcctctcacggagatgcgaggacctatctattatgatgaccagggccacatccggagggggcaacagactttcatctatcagcccttttcaaccactgatctactaaactggaaacactctgaaccctgccatcttgctcctggtatcagagagccctgtcgtgcataactgtgtagaagtgttggactcagtttactccagcagacctgatctccgggaccagccttgggcatcagtagactggaagctatatgtggacaggagcagcttcatcaacccacaaggg

SEQ ID NO: 66771 - DNA, 495 bp, Homo sapiens
ggggattgagaccttacgtcgtccactatccatgtggtggaattccaagaacttctcttccccgaataaatcagcgggggactctttgaagctgcacattctgattcagcaggcctgagattctacatttgtatgtcttctcagaaacaatcggcctggaaggttatatttaaaaagaaagtttctcttttgaatattgccacaagaataatgggtggtcagaaatctggaacagagtatcctgagaatctgcccaccatgaaggctacagttgaaaataaagattctgttctgaatacagccaccaaaatgaaggatgtacaaacatccacaccagaagaacaagacttagaaatggcatcagagggagagcaaaagaggcttgaagaatatgaaaataaccagccacagcaactggatgatgctcgcaacaaagctgacaatcaagaaaaggcaatacttaatattcaagccagatgtgatgctagagtacaa

SEQ ID NO: 66772 - DNA, 593 bp, Homo sapiens
catcgatgaccttactcagtgtggtggaattccaggttcaaagcctgagaccaaagagctgcaggatttgaatccatatttccaggggtaactattaataaaaatgtagcttggataaattacatctattataaccagcagtggtttattaattacaccagggatgctatcaaaggaatagctgaccaattagggcctactagccaaatggcttgggaaaacagaatggccctagacatgatattagccaaaaaaggtggagtttgtgttatgatcaaaactcaatgttgtaccttcatcccaaacaatactgcccctagtgggagcataacaagggccttacaaggccttactgctttatccaatgaattagctaaaaattctggagtcaatgaccctttttcaggatggctagaaaggtggtttggtaaatggaaaggaatcatagcctcaattcttacttctcttgcagccgtaataggtgtagccattctttttgggtgttgtgtcacaccatgtatccgtgggctagtacagaggcttatagaaacagtacttactaaaacctcccttagctctcctccaccttatta

SEQ ID NO: 66773 - DNA, 448 bp, Homo sapiens
cttgaatgaccactcgaccagtgcggtggaattcggtggtggggctgcgtgtggtaggcgggcgtcagcggcgcgggcttgctgtctgcgtgcttgctggacggagtgaccgggtgggaggggagctgccaagggcacagagcgggaagggcagagaacatgagactcgcgtgctcaccgcgaaagggcacttatcacgcacttccttctgctctttaaacactccatgtgaaataaacctcaggatttatcatttcattcgtatctctggctctcagcagtcagtttttggggccaaacactagctcgcgccacctgggccgagcgtggggctcctcacggcgtctgccccagacaggaggggcagctctagctggggccccagcactcaaaagacatccactagccacatttattagctacggagtaacatttatagaaaaaagcc

SEQ ID NO: 66774 - DNA, 1103 bp, Homo sapiens
ggaattcagccaatcaagagattggccacctccaagatatggtaaggaaaagtgaacaaggtcttggctctgcagaaggacttattgctagtcttcaggactcccaggaaaggcttcagaatgagcttgacttgactaaagacagcctaaaggagaccaaggatgctctattaaatgtggagggtgagctagaacaagaaaggcaacagcatgaagaaacaattgctgccatgaaagaagaagagaagctcaaagtggacaaaatggcccatgacttagaaattaagtggactgaaaatcttagacaagagtgttctaaacttcgtgaagagttaaggcttcaacatgaagaggataagaagtcagcaatgtctcaacttttgcagttgaaagatcgagagaaaaatgcagcaagagattcatggcagaagaaagtagaagatctcttaaaccagatttccttgctgaaacagaatctggagatacagctttcccagtctcagacttctttgcaacaactgcaagcccagtttacgcaagaacgacagcggcttacgcaagagcttgaagaattagaggagcaacatcagcaaagacacaaatcattaaaagaagcacatgtccttgcatttcaaactatggaagaggaaaaggaaaaggagcaaagagctcttgaaaatcatttacaacagaagcattctgcagagcttcaatcactaaaagatgcacacagagagtcaatggagggcttccggatagaaatggaacaggaacttcagactcttcggtttgaattagaagatgaaggaaaggctatgcttgcttccttgcgctcagaactcaaccatcaacatgcagctgcaattgatttgttacggcataatcatcatcaagaattggcagctgctaaaatggaattagagagaagcatagacatcagcagaagacagagtaaggagcacatatgtagaattacagatctacaagaggaattaagacacagagagcatcacatctctgaattggataaggaggttcagcaccttcatgagaatataagtgccctaaccaaagaactggaatttaaggggaaagaaattctc

SEQ ID NO: 66775 - DNA, 731 bp, Homo sapiens
atttcgtggctgaggcggcgtcatgtcctccgaggtgtccgcgcgccgcgacgccaagaagctggtgcgctccccgagcggcctgcgcatggtgcccgaacaccgcgccttcggaagcccgttcggcctggaggagccgcagtgggtcccggacaaggagtgtcggagatgtatgcagtgtgacgccaagtttgactttctcaccagaaagcaccactgtcgccgctgcgggaagtgcttctgcgacaggtgctgcagccagaaggtgccgctgcggcgcatgtgctttgtggaccccgtgcggcagtgcgcggagtgcgccctggtgtccctcaaggaggcggagttctacgacaagcagctcaaagtgctcctgagcggtaaggacgggtgtcctgcacagtcccgcgcgctccgccagccggctcctcgtgtctgtggcgatgctgtgggctgtgcacggggcgttctgcttctctgacgttctctcgccctccctcccttccccgttttcttctggattcgtttagaagcggttatagagccttcccttcttttcagaggcggaatgtcgtctaaaatgttggtgctgactccgctgggcacgtccatcaggtgggaggggaggccctgggcccaggcagcaccttcctccttcccccgggaggaacccggcgccggcgctcgggcgtttgcaaccactgtggctcctcggaggggccggagacctt

SEQ ID NO: 66776 - DNA, 433 bp, Homo sapiens
gtgactccaaggaaccaagactgcagcagctgggcctcctggaggaggaacagctgagaggccttggattccgacagactcgaggatacaagagcttagcagggtgtcttggccatggtcccctggtgctgcaactcctctccttcacgctcttggctgggctccttgtccaagtgtccaaggtccccagctccataagtcaggaacaatccaggcaagacgcgatctaccagaacctgacccagcttaaagctgcagtgggtgagctctcagagaaatccaagctgcaggagatctaccaggagctgacccagctgaaggctgcagtgggtgagcttccagagaaatctaagctgcaggagatctaccaggagctgacctggctgaaggctgcagtgggtgagcttccagagaaatctaagatgcaggagag

SEQ ID NO: 66777 - DNA, 738 bp, Homo sapiens
ccaaacctgacaacacaacataggagctgctaatttgaggttctacccattcaaaagcaaatacttacaaaatacctgggagacagtgagaacagacaatgcagtgtcaccttgcatccttacatgtgatgtcctggctacaatcctgcccgttgtccttggtatatgaataacacttcatctcagtttgtgtgcagcttggtgtattatggcctaactctgagtgcgggtgatctaggtggaagtatttatgccaacctggccctgtctggcctcatagagattccatcttaccctctctgtatctacttgattaaccaaaaatggtttggtcggaagcgaacattatcagcatttctgtgcctaggaggactggcttgtcttattgtaatgtttcttccagaaaagaaagacacaggtgtgtttgcagtggtgaacagccattccttgtccttgctggggaagctgaccatcagtgctgcctttaacattgtttatatctacacctctgagctttaccctacagtcatcaggaatgttgggcttggaacttgttccatgttctcccgagttggtgggattattgctcccttcatcccctcactgaaatatgtgcaatggtctttaccattcattgtcttcggagccacgggtctgacctccggcctcctgagtttgttattgccggagacccttaacagtccggtgttaaaaacattcttcgacctttaggtgtat

SEQ ID NO: 66778 - DNA, 616 bp, Homo sapiens
actttccgcgtcgacccacgctttagatctgtatacttttcactctagagaaatcttacaattgtacggtttgtaacaaggttttcgtgcgtaattcagtcctggctgtgcatactagaattcacactgcaaagaaaccttacaagtgtaatgaatgtgggaaagcttttaatcaacaatcacatctttcacgtcatcgtagacttcatactggagagaaaccttacaaatgtgaagcatgtgacaaagtttttggtcagaaatcagctcttgagtcacataagagaattcatactggagagaaaccatacagatgtcaggtttgtgacacagctttcacgtggaattcacagctggcacgacatacaagaattcacactggagaaaaaacttacaagtgtaatgagtgtgggaagaccttcagttacaagtcatcacttgtatggcatcgtagacttcatggtggagagaaatcttacaaatgtaaggtttgtgacaaggctttcgtgtgtcgttcctatgtggcaaaacatactagaattcacagtggaatgaaaccttacaagtgtaatgagtgcagcaagaccttcagtaacaggtcatcccttgtatgcca

SEQ ID NO: 66779 - DNA, 782 bp, Homo sapiens
  misc_feature (1)...(782): n = a,t,c or g
gaagaaggggaaaagaggctccaggccccttctccaatcactccctgccaccctttctcctttggattccttggctgctttagcaggtcttcctagaggctaactttgatctttcttgctgcagtttctttttgggagagctagtcagtcccacagagtggtatccctagaagggagaagtaaggattgccctcttctttaaaatgaaagccagctatttttcacgccctttaactgcaggtctgctctattttcttttctctctctggagctgagagtcagagggcccttctcctcctcctttcagcccccaacactaagctgatggattgataaatacctcagcccctcgcctttctcaacccacctggcaagtcttcttaggatctgatcccagttttctggaagcaatcctaccccagcccattcttcccagagtcgagccttaatccttctcacttctcagtgtcagagcagaaatgaatcctggggttgactgtgtccattcgggttattagcagctaagaagcccagacgagtagtgtgagctgccttgggagcctcagtgagggcactgggactggcctcactctcttgcccccagcctagtgggctttctcctctgtctctccggtggccccaggcaatcgactgcatcacgcanggacgtgagttggagcggccacgtgcctgcccaccagaggtctacgccatcatgccgggctgctgggcagcggagccccagcaacgccacagcatcaaggatgtgcacgcccgctgca

SEQ ID NO: 66780 - DNA, 1134 bp, Homo sapiens
gcggccgcctcggtacggcagagcccggggccggcgctggcgcggctggagggccgagagttcgagttcctcatgcgccagcccagcgtcaccatcggccgcaactcgtcgcagggctcggtggacttgagcatgggcctgtccagcttcatctcgcggcgccacctgcagctcagcttccaggagccgcacttctacctgcgctgcctcggcaagaacggcgtcttcgtggacggggccttccagagacgcggcgcgcccgccctgcagctgcccaagcagtgtaccttccggtttcccagcacggccatcaagatccagttcacttcgctctatcacaaagaagaggccccagcctccccgctgcggccactgtacccccagatctcccctctgaagatccacatcccggagccggacctccggagcatggtcagccccgtcccctccccgacgggcaccatcagtgtccccaactcctgcccagccagtccacgcggtgccggctcctccagttaccgctttgtgcagaacgtgacctcggacctgcagctggcagcagagtttgcagcaaaggccgcgtcggagcagcaggcagacacgtctggaggagacagccccaaggatgagtcaaagccgccgttctcctacgcgcagctgatcgtgcaggccatctcctccgcccaggaccggcagctgaccctgagcgggatctacgcccacatcaccaagcattacccctactaccggacggccgacaaaggctggcagaattctatccggcacaacctctctttgaaccgttactttatcaaagtcccacgttcccaggaggagcctgggaaggggtccttttggcgaatagaccctgcctctgaagccaagctcgtggaacaggcattccggaaacggaggcagaggggtgtctcctgcttccgcacccccttcgggcctctgtcctcaaggagcgctccagcttcgcccacacaccccgggctgatgtcccctcgctccggcggcctgcagaccccagagtgcctgtctcgggagggctcccccattccacacgaccctgagtttgggtccaagttagcttctgtcccagagtaccggtattcccaacccacgcgtccg

SEQ ID NO: 66781 - DNA, 714 bp, Homo sapiens
ttcgagaccctatccatgaggggaattcctcacatgctggctttggggccacagcagctgctggcccaggatgaggagggggacacgctccttcacctgtttgcggctcgggggctgcgctgggcggcatatgctgcggctgaggtgctccaggtgtaccggcgtcttgacattcgtgagcataagggcaagacccctctcctggtggcggctgctgccaaccagcccctgattgtggaggatctgttgaacctgggagcagagcccaatgccgctgaccatcagggacgttcggtcttgcacgtggccgctacctacgggctcccaggagttctcttggctgtgcttaactctggggtccaggttgacctggaagccagagacttcgagggcctcaccccgctccacacggccatcctggcccttaacgttgctatgcgcccttccgacctctgtccccgggtgctgagcacacaggcccgagacaggctggattgtgtccacatgttgctgcaaatgggtgctaatcacaccatccaggtgagcggggatgtgggcggtcagaccctgggagattgtgtggaatggggccacttggatgtccgggagctccaggcaaatgctgactttgcctcttccttgctgcgtgcccttgaacatgttacttcacttctctgtgccttaagggttttttgcttgtttctttgtcagtta

SEQ ID NO: 66782 - DNA, 775 bp, Homo sapiens
  misc_feature (1)...(775): n = a,t,c or g
ggcctaaatctaaaaaattggagctaaatttagagtagattatgtttcactgacattttaaactatatttaaaacttactcttcagtgtcagttttctcctttataaaatctgtacattagcaacttccttcagaggactactaaaaatatgaaataacattccctcggccaggaggagggctgagtgtggcccctgccatctggtgagcagcaggggtctggggaggtctgtgctgcacacaacacagtactgtcaacagtttgcacaaggggtacaaatcagaacctgtcttgcaacacttttagttgtcaccctagtgttaggatttggttgtattgagagctgtttgttcacatttgaaaatgtttttgccatgaaaagattgcctttgtcatatttattgcaaaatctaaactgtatgtattgatatgattcaatcaaataattatgtaagttagtgattaaaatattgtagagtatactgaaaaggatagctctcaggaaggttcatctgcactttttgcaatatgttacagattttgttgcatatggttttatttgtctcattcaatgaactcttgaatcaaaccagttatgtagtttcctcattacagcccagtgagtgcaaaaacaaaacctttaggatcaagagatgttttgccaaataaccgtcaactttatgagatggtcctgacatataactttcatcaacccaagagtgnggaangtactccaagctgcccactactttgtgaactattatatgaatctgc

SEQ ID NO: 66783 - DNA, 418 bp, Homo sapiens
ggcgaggaattatcatagagacagagggtgaccaccctaagggcattgagatggatgggaaaatgatgaattcccattttctagatgggaacctggtgcccctggaagggaaggaagtggatgagtcccgcaaagagatgatccggattctcaaggatctgaagcaaaaacacccagagaaggacttagatcagctggtggagatggccaattactatgctctttcccaccaacagaagagccgcgccttctaccgtatccaagccactcgtatgatgactggtgcaggcaatatcctgaagaaacatgcagcagaacaagccaagaaggcctccagcatgagcgaggtgcacaccgatgagcctgaggactttatttccaaggtcttctttgacccatgttcttaccagtgcctgga

SEQ ID NO: 66784 - DNA, 430 bp, Homo sapiens
gggccccgagtgcagcgagcgactcaacccgcacgacatccgcttgctgctcgccgacccgccgcttatgcacaagtacgaggagttcatgctgcgccgctacctaacctcggaccccgactgccgctggtgcccggccccggactgcggttatgctgttattgcctatggctgtgccagctgcccgaagctaacttgtgagagggaaggttgccagactgagttctgctaccactgcaagcagatatggcatccaaatcagacatgcgatatggcccgtcaacagagggcccagactttacgagttcggaccaaacacacttcaggtctcagttatgggcaagaatctggaccagatgacatcaagccatgcccacgatgcagtgcatacattatcaagatgaatgatggaagctgtaatcacatgacg

SEQ ID NO: 66785 - DNA, 1122 bp, Homo sapiens
  misc_feature (1)...(1122): n = a,t,c or g
gtaattaaatctacactatctttactaagtttttccatactgtttctttggaaatccaaaaaactacttttttgactaaatggatttgacctctctgatgtttttgcaaacgaaggcacgtagctaccaaatgcgaactcattaggggaggctggacttctaacatttcctgaattctgaccttctccttttggagttgagaaactgatgtcttgcaaatgatgcccattaaataatctctctgaggattcagagaacctgtatgttttggggcttctctctggggagtgtagttttgattcaaaatcaggtaacaatggcaaaacagggtattttagatttcgagaatcttggagttctctgtcaatttcattcagtttagcaagtagcatttctctcttcagtctttcttcttcctctccttgcaatttatccatattctgaattggatacattcctagttggtaccttccagtttcccactctggcttttcttctctttccagtaaagatgccttttctttttgctttttatcaagttcttctctttcccattcatcctccagcttttcaacctcctgttttacgacatggagttcttcatctgtaacaaatttttcttctctttccataattgggtttagaatccctgcttctccatgcctgtcttgcttttgagattgcaagtccaaagtaagatgtcctggttcttcccatttgttttcgtaacacataattgtttctggagttaaaggatattcttctggcttgaagtcttccatggtttgtactccttttgtacacaggtctgcaaaatcactctggcatgcagcattttttcttaatgcaagttctttctctttatttggagaggactttggcagacgattagaatatatattttttatatccagttctctctccttttcctttaatttgtgatatagtcgctgtacctccttttgaagaactttattttcatcatgagcctcatatgcccttttcctttcagcaagcaactgtcgttggaaactgttagtactcagttcaaggtttttcgatagctccttaattcttctctcggtggaattccaccgcncggncagatggactgaaatcaat

SEQ ID NO: 66786 - DNA, 693 bp, Homo sapiens
ccatattgtatttgttgtgcatggcattgggcagaaaatggaccaaggaagaattatcaaaaatacagctatgatgagagaagctgcaagaaaaatagaagaaaggcatttttccaaccatgcaacacatgttgaatttctgcctgttgagtggcggtcaaaacttactcttgatggagacactgttgattccattactcctgacaaagtacgaggtttaagggatatgctgaacagcagtgcaatggacataatgtattatactagtccactttatagagatgaactagttaaaggccttcagcaagagctgaatcgattgtattcccttttctgttctcggaatccagactttgaagaaaaagggggtaaagtctcaatagtatcacattccttgggatgtgtaattacttatgacataatgactggctggaatccagttcggctgtatgaacagttgctgcaaaaggaagaagagttgcctgatgaacgatggatgagctatgaagaacgacatcttcttgatgaactctatataacaaaacgacggctgaaggaaatagaagaacggcttcacggattgaaagcatcatctatgacacaaacacctgccttaaaatttaaggttgagaatttcttctgtatggggtccccattagcagttttctttgcgttgcgtggcatccgcccagg

SEQ ID NO: 66787 - DNA, 677 bp, Homo sapiens
aacaagttatcttcagaaaaaagaaattatgaagtaaatgcgtaccatcaggagacatggaaaagaaataaaaccttcaaccttatgaggtttattttcagaactgacccacagtacacaattgaatttgggagacaacagagacctaaagtgggatgttttagtcaaatgatattcaaaaaacataaatcccttcctctacataagagaaataacacaagagagaaatcatatgagtgtaaggaatataagaagggctttagaaaatatttgcaccttactgaacatctgagagaccatactggtgtgataccctatgaatgtaatgaatgtggaaaagcatttgtagttttccagcattttattagacatcgaaaaatccacactgatttgaaaccctatgaatgcaatggatgtgagaaggcctttaggttttattcacagcttattcagcatcagataattcatactggtatgaaaccctatgaatgtaagcaatgcgggaaggcttttagacgtcattctcaccttacagaacatcagaaaattcatgttggcttgaaaccctttgaatgtaaggaatgtggggaaacgtttagattatatcgacatatgtgtctgcatcagaaaattcatcatggtgtgaaaccctacaaatgtaaagaatgtggaaaggg

SEQ ID NO: 66788 - DNA, 515 bp, Homo sapiens
agacgggacacttaccgaagaaggcagatgcagaggaccatcactcgccagatgtcctttgatcttacaaaactgctggttaccgaggactggttcagtgacatcagtccccagaccatgagaagattacttaatattgtttctgtgacaggacgattactgagagccaatcagattagtttcaactgggacaggcttgctagctggatcaaccttactgagcagtggccataccggacttcatggctcatattatatttggaagagactgaaggtattccagatcaaatgacattaaaaaccatctacgaaagaatatcaaagaatattccaacaactaaggatgttgagccacttcttgaaattgatggagatataagaaattttgaagtgtttttgtcttcaaggaccccagttcttgtggctcgagatgtaaaagtctttttgccatgcactgtaaacctagatcccaaactacgggaaattattgcagatgtcgtgctgccagagagcga

SEQ ID NO: 66789 - DNA, 1208 bp, Homo sapiens
tcttgtttgacctgggtgtggcctacggtattgactgtctgctgattgatcccaccctggggggccgctgtgacacctttactactttcgatgcctcgggggagtgtgggagctgtgtcaatactcccagctgcccaaggtggagtaaaccaaagggtgtgaagcagaagtgtctctacaacctgcccttcaagaggaacctggaaggctgccgggagcggtgcagcctggtgatacagatccccaggtgctgcaagggctacttcgggcgagactgtcaggcctgccctggaggaccagatgccccgtgtaataaccggggtgtctgccttgatcagtactcggccaccggagagtgtaaatgcaacaccggcttcaatgggacggcgtgtgagatgtgctggccggggagattcgggcctgattgtctgccctgtggctgctcagaccacggacagtgcgatgatggcatcacgggctccgggcagtgcctctgtgaaacggggtggacaggcccctcgtgtgacactcaggcagttttgcctgcagtgtgtacgcctccttgttctgctcatgccacctgtaaggagaacaacacgtgtgagtgtaacctggattatgaaggtgacggaatcacatgcacagttgtggatttctgcaaacaggacaacgggggctgtgcaaaggtggccagatgctcccagaagggcacgaaggtctcctgcagctgccagaagggatacaaaggggacgggcacagctgcacagagatagacccctgtgcagacggccttaacggagggtgtcacgagcacgccacctgtaagatgacaggcccgggcaagcacaagtgtgagtgtaaaagtcactatgtcggagatgggctgaactgtgagccggagcagctgcccattgaccgctgcttacaggacaatgggcagtgccatgcagacgccaaatgtgtcgacctccacttccaggataccactgttggggtgttccatctacgctccccactgggccagtataagctgacctttgacaaagccagagaggcctgtgccaacgaagctgcgaccatggcaacctacaaccagctctcctatgcccagaagacctggtattcctttaccaaggaataaagcctttgatgccaggacccagactcaaggagaatctgaatctctgctctcctgcttgctggtcat

SEQ ID NO: 66790 - DNA, 515 bp, Homo sapiens
gcggtggaattcatcagcccatgcttgttagtctgttaaagaagaagagaaatgacaacagtgaggctcagctcgcccacctgatacctgagctctgctttctaacagggctgactgaccaggcaacatctgatttccagctgatgaaggctgtggctgaaaagacacgtctcagtccttcaggccggcagcagcgcctggccaggcttgtggacaacatccagaggaataccaatgctcgctttgaactagagacctggggactgcattttggaagccagatatctctgactggccggattgtgccttcagaaaaaatattaatgcaagaccacatatgtcaacctgtgtctgctgctgactggtccaaggatattcgaacttgcaagattttaaatgcacagtctttgaatacctggttgattttatgtagcgacagaactgaatatgttgccgagagctttctgaactgcttgagaagagttgcaggttccatgggatttaatgtggactac

SEQ ID NO: 66791 - DNA, 421 bp, Homo sapiens
gtagctgtttactgaaccttattagaaaacctcatataggtttgacagagctggtacaaatcatcataaacacaacacacctggagcaagcttgtaaatatcttgaggactttataactaacattacaaatatttcccaagaaactgttcatactacaagactttatggactttctactttcaaggacgctcgacatgcagcagaaggagaaatatataccaaactgaatcaaaaaattgatgaatttgttcagcttgctgattatgactggacaatgtctgagccagatggaagagctagtggttatttaatggaccttataaattttttgagaagcatctttcaagtgtttactcatttgcctgggaaagttgctcagacagcttgcatgtcagcctgccagcatctgtcaacatcctt

SEQ ID NO: 66792 - DNA, 809 bp, Homo sapiens
acattccaccaggatacaatctttgatatacaacagagttttcccaccaaagaaaaagcacataagcatgaaccacaaaagaaaagttaccgaaaaaaatctgttgaaatgaaacataggaaagtctatgtagaaaagaaacttttgaaatgtaatgattgtgagaaagtcttcaaccagagctcatcccttactcttcatcagagaattcatactggagagaaaccctatgcatgtgttgaatgtgggaaaacgttcagccagagtgcaaacttggcgcaacataagagaatacatactggagagaaaccctatgaatgtaaagaatgtaggaaagccttcagccagaatgcacacctggcccaacatcagagagttcatactggagagaaaccttatcagtgtaaagaatgtaaaaaagccttcagccagattgcacacctgactcagcatcagagagttcatactggagagagacctttcgaatgtattgaatgtggaaaggcctttagtaatggttcatttcttgctcagcatcagagaattcatacaggagagaaaccttatgtgtgtaatgtgtgtgggaaagcctttagccatcgtggatacctaattgtacatcagagaattcatactggagagagaccctacgaatgtaaggaatgtaggaaagccttcagccagtatgcacaccttgctcaacatcagagagttcatactggagaaaaaccttatgaatgtaaagtatgtaggaaagccttcagccaaattgcataccttgatcaacatcagagggttcatactggaga

SEQ ID NO: 66793 - DNA, 625 bp, Homo sapiens
cgagctccaagttgcaggccctcttcgcccacccgctgtacaacgtcccggaggagccgcctctcctgggagccgaggactcgctcctggccagccaggaggcgctgcggtattaccggaggaaggtggcccgctggaacaggcgacacaagatgtacagagagcagatgaaccttacctccctggaccccccactgcagctccgactcgaggccagctgggtccagttccacctgggtattaaccgccatgggctctactcccggtccagccctgttgtcagcaaacttctgcaagacatgaggcactttcccaccatcagtgctgattacagtcaagatgagaaagccttgctgggggcatgtgactgcacccagattgtgaaacccagtggggtccacctcaagctggtgctgaggttctcggatttcgggaaggccatgttcaaacccatgagacagcagcgagatgaggagacaccagtggacttcttctacttcattgactttcagagacacaatgctgagatcgcagctttccatctggacaggattctggactttcgacgggtgccgccaacagtggggaggatagtaaatgtcaccaaggaaatcctataggttcg

SEQ ID NO: 66794 - DNA, 744 bp, Homo sapiens
actgtagaccattagtccagtgcggtggaattcatcaaccgaaacaacagtgtggtacaggtcctgcttgctgctggggctgatccaaaccttggagatgatttcagcagtgtttacaagactgccaaggaacagggaatccattctttggaagtcctgatcacccgagaggatgacttcaacaacaggctgaacaaccgcgccagtttcaagggctgcacggccttgcactatgctgttcttgctgatgactaccgcactgtcaaggagctgcttgatggaggagccaaccccctgcagaggaatgaaatgggacacacacccttggattatgcccgagaaggggaagtgatgaagcttctgaggacttctgaagccaagtaccaagagaagcagcggaagcgtgaggctgaggagcggcgccgcttccccctggagcagcgactaaaggagcacatcattggccaggagagcgccatcgccacagtgggtgctgcgatccggaggaaggagaatggctggtacgatgaaaaacaccctctggtcttcctcttcttgggatcatctggaataggaaaaacagagctggccaagcagacagccaaatatatgcacaaagatgctaaaaagggcttcatcaggctggacatgtccgagttccaggagcgacacgaggtggccaagtttattgggtctccaccaggctacgttggccatgaggagggtggccagctgaccaagaag

SEQ ID NO: 66795 - DNA, 1688 bp, Homo sapiens
  misc_feature (1)...(1688): n = a,t,c or g
ttttttttttttaaaatttctcgaattttattatacttaaatgaactcaagtacaagaaacaaagttaaaaatatgtaagtataataaaatatgtgcgccataattaaatgatattgtgataagaaagaaaaaacctggaaatgttttacagaggtttttcatttgatatcttaccatagcagtagcaaagagcttattaggctaatgttcaaaaacacatttccttaccataatattgatgccagcaaaattggtgctacagctacatgaatgaatgttttgctcagttttttctggtttacaaagaaacaccaagcaactgacctgcaaagggggacccgaagtagaccccaggcccagaccagttgttgctttaatttcccatncataactggaaataggcaaccatgggctccttggcacccctaaaaccatcctgctcactagccactgaaattaaatagtgtccaagaatttttttctgtctaatttgaaaaaagatagctaatatgacaaggctttgttgtatttacatcttgaatttctgtgggaaaaggataaaccatttttcaaagcaattgagtaagccatttttcagagcaccaagagggaagctttttagatttaaactcttagaattaataactggacactaaggctaagcatcttatagccatgtatcatattactagtagtattaccaataactattgaccacaaagactaacattacttcataaaaaaattttgatacagtgttcattgaaagaataaaacaagatttaaattgatgtgtatcagttcattatagctttaaaaaaattaggtatgacacagacatgctaagcgtacttctcctaccccaaagtgtttggtaatgtgtttatatactttcatattttaaaccactaagtaaaaaacgtgtatgaatcacattagaaataggtcatttaagatcattgagcttggaattagctcatttattataaatgttttataaatatttagttgccagatctcaataatgctttttgttgtcatcagatttacctagaataagccaagtggcatcccatcccgcatttcatctgttaagtgtatgcacacaccttttcttaactctttaccagtgaccacaatggctggacagctttgcatcatgcgtccatgggcgggtacactcagaccatgaaggtcattcttgatactaatttgaagtgcacagatcgcttggatgaagacggggtatgtactgcggttctcatgcttacccaaaatctcaatatagcagaaacttccaacattgccagaaaactctcctagacaccttttaccttccttgctctattcccagccttttgttgggtgtttagcaagtggattcttgaggtgaagtatgaatcaaaaggcaacagaattgggagaataccaaggggtgggtgaatgttggggaaacctccagtctcacagagcagcgaggtccacaggccaatgaaatttgatggtaaagcgtttactccctggtaggtccagagaaatgaaggcaggggtgagttttcattaagataagtgttattttgaagtgtattgatttgaaatgctgccctttattgtncnaattccaccgcactatacagtagttgcgatantccgagagttacggtctctnnnnaaannctggccctct

SEQ ID NO: 66796 - DNA, 434 bp, Homo sapiens
taaaaccttcaaccgcaaagacgcacttgttctacaccagaggattcacactggagaaaggccttacgagtgcagcaaatgtggtaaaaccttcagtgttctgtctaccctcattcggcaccggaaagtgcacattggagaaaggccctatgagtgtgcagaatgtgggaagttctttaaatacaataatagcttcattcttcaccagagagttcacactggagaaaggccttttgaatgcaagcaatgtgggaaaggctacgtgacccgttcaggcctctatcagcactggaaagtccacactggggaacggccctatgaatgtagcctgtgtgggaaaaccttcactaccagatcctaccgcaatcggcaccagcagttccacactgaagagaggtcttatgaatgtacagagtgtgggaaagccttcaaac

SEQ ID NO: 66797 - DNA, 483 bp, Homo sapiens
tgaaatatggggcagatccttcattaattgatggagatggatgtagctgtattcatctggctgctcagttcggacatacctcaattgttgcttatctcatagcaaaaggacaggatgtagatatgatggatcagaatggaatgacgcctttaatgtgggcagcatatagaacacatagtgtggatccaactagattgcttttaacattcaatgtttcagttaaccttggtgacaagtatcacaaaaacactgctctgcattgggcagtgctagcagggaataccacagtcattagccttcttctggaagctggagctaatgttgatgcccagaatatcaaggcaatccttaggtgtcacatggccctctagtggaagggatgctcagctggaccgaggcaactgcaggatattcccggggagttgttacccaagggattgcttttattcagggcgaatcagcactttcttggcaaaaaaaaaa

SEQ ID NO: 66798 - DNA, 1302 bp, Homo sapiens
gaagaggtccagttctttgcaaacaccagtgggtccttcctgtgtgtttatagtttgaattccttcaactacacccacagtccaaaagcagactcactgtgtcccaggctaccagttcctccaagcaagtcatttcccttatttaaccgatgtgtccctcaaacacctgagtgctactccctatttgcatctgttttgataaatgatgttgacaccctccaccgaattctaagtggaatcatgtcgggaagagatacaatccttggcctgtgtatcctcgcattagccttgtctttggccatgatgtttaccttcagattcatcaccacccttctggttcacattttcatttcattggttattttgggattgttgtttgtctgcggtgttttatggtggctgtattatgactataccaacgacctcagcatagaattggacacagaaagggaaaatatgaagtgcgtgctggggtttgctatcgtatccacaggcatcacggcagtgctgctcgtcttgatttttgttctcagaaagagaataaaattgacagttgagcttttccaaatcacaaataaagccatcagcagtgctcccttcctgctgttccagccactgtggacatttgccatcctcattttcttctgggtcctctgggtggctgtgctgctgagcctgggaactgcaggagctgcccaggttatggaaggcggccaagtggaatataagcccctttcgggcattcggtacatgtggtcgtaccatttaattggcctcatctggactagtgaattcatccttgcgtgccagcaaatgactatagctggggcagtggttacttgttatttcaacagaagtaaaaatgatcctcctgatcatcccatcctttcgtctctctccattctcttcttctaccatcaaggaaccattgtgaaagggtcatttttaatctctgtggtgaggattccgagaatcattgtcatgtacatgcaaaacgcactgaaagaacagcagcatggtgcattgtccaggtacctgttccgatgctgctactgctgtttctggtgtcttgacaaatacctgctccatctcaaccagaatgcatatactacaactgctattaatgggacagatttctgtacatcagcaaaagatgcattcaaaatcttgtccaagaactcaagtcactttacatctattaactgctttggagacttcataatttttctaagaaaggggttaagggtgtgtttcactggttttggaagaactcaatgcttttaactacaatcggcatttcag

SEQ ID NO: 66799 - DNA, 393 bp, Homo sapiens
aatccttctgctttcaatatttactgtaatgtacgccattgcgttctggaatggcagaaaaaggaaatatcattggcagccgcatctaagaactctgtgcagagtggagaatcagatagtgatgaagaagaggaatccaaagagccccctatcaagcttccaaaggtaagccactgagttctattaatatttagatgtgtaacctgcaggtgttctggctataatgcatatatacgcattgctaaaatactttgctttatgtaaaattgcacactaaaaataacacgggcttatgggcaaaaatagatttggagcagaaaaggaaaactctgcaactttataactaaggtgctaacaaagtcaataattgataattcactggaaagcgcagga

SEQ ID NO: 66800 - DNA, 1207 bp, Homo sapiens
ttctgatcatgtcactggcaaggcaatgcttacgtcacttggcctgaagttgggggatcgtgttgttattgcaggacagaaggttggtacattaagattttgtggaacaactgaatttgcaagtgggcagtgggctggcattgaactggatgaaccagaaggaaaaaataatggaagtgttggaaaagtccagtactttaaatgtgcccccaagtatggtatttttgcacctctttcaaagataagtaaagcaaaaggtcgaaggaagaatataacacacactccttctacaaaagctgctgtacctctcatcaggtcccagaaaattgacgtagctcatgtgacgtcaaaagtaaatactggattaatgacatcaaaaaaagatagtgcttctgagtcaacactttcattgcctcctggtgaagaacttaaaactgtgacagagaaagatgttgccctgcttggatctgtcagcagctgctcctctacatcttctttggaacacagacagagctaccccaagaaacagaatgcaatcagcagtaacaagaagacaatgagcaaaagcccttccctttcatccagagccagtgctggtttgaattcctcagcaacatctacagcaaataatagccgttgcgagggggaactccgcctcggagagagagtgttagtggtaggacagagactgggcaccattaggttctttgggacaacaaacttcgctccaggatattggtatggtatagagcttgaaaaaccccatggcaagaatgatggttcagttgggaggtgttgcagtattttagctgttctccaagatatggaatatttggctcccccatccaggggtgcaaagagtaacagattcccggggataccctttcagaaatttcttcaaataaacagaaccattcttatcttgggttttaggagaagttttagcacaacttctgcttcttcccaaaaggagattaacagaagaaatgctttttccaagtgagtattaagaagatttagaaaaacacctttcaagatgaacatgatgggattctgtgaagaaagaaaagtggagtgctgtatcttttgcattgcttggtagagttttaacacgtaggagaaaaggtgtgataagtgtattgagaagcgtacttcctccctcctttgcaagcgcaattaaaaatgaaaccagtgactaaaaaaaaaa

SEQ ID NO: 66801 - DNA, 556 bp, Homo sapiens
gcgggcagcaccacgctgctgtgccgcgacgggcccggcttttacccgcaccagagcctgcacgcctggcaccgggacacggacgctgaggccctggagctggacggccggccccacctgctgctggcctcggcttcccagcggcccgtgctcttccactggaccggtggccgcttcgagagacgcacggacatccccgaggccgaggatgtctatgccacacgccacttccaggctggtggggacgtgttcctgtgcctcacacgctacattggggactccatggtcatgcgctgggacggctccatgtttcgtctgctgcagcaacttccctcgcgcggtgcccacgtcttccagccactgctcatcgccagggaccaattggccatcctaggcagcgacttcgccttcagccaggtcctccgccttgagcctgacaaggggctcctggagccactgcaggagctggggcctccggccctggtggccccccgtgcctttgcccacatcactatggccggcagacgcttcctctttgctgcttgctttaagggcc

SEQ ID NO: 66802 - DNA, 517 bp, Homo sapiens
tgtatttcctcccatatctgactgtttgtttccaatcttttgactgctttcttgcttttaatgcctttatctttgcttatttgaattaggtacttctctgctacctttcacctgctctttttctgtgccattgtttccctggctaccttacctaaaaccaggccctagagaaacagaaagaatacattgcctgccttaggaatgagcgagatatgctcagagaggagctggctgacctgcaggagacagtgaagacgggagaggtatgttagcattagcctggaattcaggtccctcactgttttactctctatcttccttcctttcatcctgccatctttcctagcctaaatacaaactacagtgtttattctctaatccagatttggtaggtggaagctatttcttacacagagctatatttcatgtaactgattctaaccaggttttacctgtagcaaacatgtattgttgcagagtgacctcacagagcttacagcttccatatgggcctttt

SEQ ID NO: 66803 - DNA, 633 bp, Homo sapiens
ctggctccggctgcgagcagggatgtccgcccgggcggtatgggccaggctgtgaacagctgtgtgggtgtctcaacgggggctcctgtgatgcggccacgggggcctgccgctgccccactgggttcctcgggacggactgcaacctcacctgtccgcagggccgcttcggccccaactgcacccacgtgtgtgggtgtgggcagggggcggcctgcgaccctgtgaccggcacctgcctctgccccccggggagagccggcgtccgctgtgagcgaggctgcccccagaaccggtttggcgtgggctgcgagcacacctgctcctgcagaaatgggggcctgtgccacgccagcaacggcagctgctcctgtggcctgggctggacggggcggcactgtgagctggcctgtccccctgggcgctacggagctgcctgccatctggagtgctcctgccacaacaacagcacgtgtgagcctgccacgggcacctgccgctgcggccccggcttctatggccaggcctgcgagcacccctgtccccctggcttccacggggctggctgccaggggttgtgccggtgtcaacatggagccccctgcgaccccatcagtggccgatgcctctgcc

SEQ ID NO: 66804 - DNA, 586 bp, Homo sapiens
ctgcccaatgagtgagttggccgaaaagcaggggtcagaggtcacagatcccacagccaaggctgaggcacagtcctgcacctggatgttcaagccccaacctgtggacaggccagtgggctccagggagcagcacctgcaggttagccaggtcccggctggggaaagacagacagacagacacgtctttgagaccgagcctcttcaggcctcaggccgtccctgtggaagacggcctgtgagatactgcagccgcgtggagatcccttcagggcaggtgtctcgtcagaaagaggtttttcaggccctggaggcaggcaagaaggaagaacaggagccccgggtaatcgctgggtccatccccgcgggttctgtccacaagttcacttggctttttgagaattgtcccatgggctccctggcagctgagagcatccaagggggcaacctcctggaagagcagcccatgagcccctcaggcaacaggatgcaagagagccaggagactgcagctgaggggaccctgcggactctgcatgccacacctggcatcctgcaccatggaggcatcctcatggaggcccga

SEQ ID NO: 66805 - DNA, 553 bp, Homo sapiens
ccacaagatgctggtcagggagaccggagtccactctctgctcattgacccactcactcagcgcgacgcagggacctataagtgcatcgctaccaacaaaaccgggcagaattcttttagtctggagctctctgtagtagccaaagaggtgaagaaagcacctgtgatcctggagaaactacagaactgcggtgttcccgaaggccaccccgtgagactggagtgccgcgtgataggcatgcccccacctgtgttctactggaagaaagacaatgagaccatcccttgcaccagagagaggatcagtatgcaccaggacacaacagggtatgcctgccttctcattcagccagccaagaaatcagacgctggatggtacacgttgtcagccaagaatgaagccggcatcgtgtcgtgcactgccaggctggatatatacgctcagtggcaccatcagatcccaccgcccatgtctgtccggcccagtggcagtcgctacggatctctcaccagtaaaggacttgacatattttctgccttttcctccatggaa

SEQ ID NO: 66806 - DNA, 477 bp, Homo sapiens
cggacgcgtgggcggacgcgtgggtggggaccaagatggcggaccttgattcgcctccgaagctgtcaggggtgcagcagccgtctgagggggtgggaggtggccgctgctccgaaatctccgctgagctcattcgctccctgacagagctgcaggagctggaggctgtatacgaacggctctgcggcgaggagaaagtggtggagagagagctggatgctcttttggaacagcaaaacaccattgaaagtaagatggtcactctccaccgaatgggtcctaatctgcagctgattgagggagatgcaaagcagctggctggaatgatcacctttacctgcaacctggctgagaatgtgtccagcaaagttcgtcagcttgacctggccaagaaccgcctctatcaggccattcagagagctgatgacatcttggacctgaagttctgcatggatggagttcagactgctttgagga

SEQ ID NO: 66807 - DNA, 877 bp, Homo sapiens
ttgaaaaggagcgccttttagatgaatggttcactctggacgaggttcccaaggggaagctacacttgagactggagtggctcacgttaatgccaaatgcgtcaaacctcgacaaggtgctaacagacatcaaagctgacaaagaccaagccaacgatggtctttcctctgcattgctgatcttgtacttggattcagcaaggaaccttccgattcgatacaaaaccaatgaacctgtgtgggaggaaaacttcactttcttcattcacaatcccaagcgccaggaccttgaagttgaggtcagagacgagcagcaccagtgtcccctggggaacctgaaggtccccctcagccagctgctcaccagtgaggacatgactgtgagccagcgcttccagctcggtaactcgggtccaaacagcaccatcaagatgaagattgccctgcgggtgctccatctcgaaaagcgagaaaggcctccagaccaccaacactcagctcaagtcaaacgtccctctgtgtccaaagaggggaggaaaacatccatcaaatctcatatgtctgggtctccaggccctggtggcagcaacacagctccatccacaccagtcattgggggcagtgataagcctggtatggaagaaaaggcccagccccctgaggccggccctcaggggctgcacgacctgggcagaagctcctccagcctcctggcctccccaggccacatctcagtcaaggagccgacccccagcatcgcctcggacatctcgctgcccatcgccacccaggagctgcggcaaaggctgaggcagctggaaaacgggacgaccctgggacagtctccactggggcagatccagctgaccatcccgca

SEQ ID NO: 66808 - DNA, 524 bp, Homo sapiens
cgcaagttcttagcgtgcgtgagccaggactggtttctgcgggtgttcaactttgactcagtggagctgcacggtacgatgaaaagctactttgggggcttgctgtgtgtgtgctggagcccggatggcaagtacatcgtgacaggtggggaggacgacttggtgacagtctggtcctttgtagactgccgagtaatagccagaggccacgggcacaagtcctgggtcagtgttgtagcgtttgacccttataccactagtgtagaagaaggtgaccctatggagtttagtggcagcgatgaggacttccaagaccttcttcattttggctgagattgagcaaatagtacacagttcaggctctccaaacggaattttacgtacagtcgccccgttagtgtcactgatctgttttgtgttctttggctattaatcacttatttttatttgtgtttttttttatcattttcatttttcgtcttcgcttcttgtcagagttctttttttctcttttgttcttttct

SEQ ID NO: 66809 - DNA, 430 bp, Homo sapiens
ggaggaatggactcttcccagcatctttctgctcttcaggatgagcggcaccattcggtcctcatgtccctgctctgtgcccatctggggctgagccccaaggacatagtggagatggagctctgccttgcagacacccagcctgcggtgaggactggctgtaggaacctgtgggtgaagggcctccaggatcctggccacccctagcccgtcctgctgaagcacccatcacctccaccaagccctcagtaactctcatccccgtttttcccagtagacacatcccccactgcttctagggcggtgggtctcaaaaagacaagttccctaccccagacctgcccactaggactatctgggaattggccctttttacagattcccgaagagtttcttctacaggtgggccctgtctgctttgacccacact

SEQ ID NO: 66810 - DNA, 706 bp, Homo sapiens
gcggtggaattccgggttccccgttctggttcggcatatctctacagctatgtcactgtgggtgaactctgggccttcaccactggctggaacctcatcctctcctatgtcattggtacagccagtgtggcccgggcctggagctctgcttttgacaacctgattgggaaccacatctctaagactctgcaggggtccattgcactgcacgtgccccatgtccttgcagaatatccagatttctttgctttgggcctcgtgttgctgctcactggattgttggctctcggggctagtgagtcggccctggttaccaaagtgttcacaggcgtgaaccttttggttcttgggttcgtcatgatctctggcttcgttaagggggacgtgcacaactggaagctcacagaagaggactacgaattggccatggctgaactcaatgacacctatagcttgggtcctctgggctctggaggatttgtgcctttcggcttcgagggaattctccgtggagcagcgacctgtttctatgcatttgttggtttcgactgtattgctaccactggagaagaagcccagaatccccagcgttccatcccgatgggcattgggatctcactgtctgtctgctttttggcggattttgctgtctcttctgcactcaccctgatgatgccttactaccagcttcagcctgagagccctg

SEQ ID NO: 66811 - DNA, 585 bp, Homo sapiens
cgcagctagagcgagctaaggaacagattgagtctctggagcacgacctgcaggcttctgtggacgagcttcaggatgttaaagaagaacggtcttcctaccaggacaaagtggagaggctcaaccaggagctgaaccatatcctgagtgggcacgagaaccgcatcattgacgtggacgccctgtgtatggagaacaggtaccttcaagagagattaaagcaactccatgaagaggtcaacctcttgaaatcaaacattgccaaatacaagaatgctctggagagacggaaaaactcgaagggccagggtaaatccagcagcagtgctctgacaggagtcctgtctgcaaagcaagttcaggatctgctatctgaggatcatggatgcagcctcccagctactccgcagtccatttctgacctgaaatctctggcaacagccctgttggaaacaatccacgagaaaaacatggtcattcagcaccagaggcaaaccaacaaaatcctagggaatcgggtggctgagctggaaaaaaaattaagaactctggaagtttctggtttgtggagtcttccagggggca

SEQ ID NO: 66812 - DNA, 803 bp, Homo sapiens
ggagatcatgctattgggtttacagatgcttctttctcctgggataaaacaggaatgccagttctaaaagaggctctgtggcttatgtttctcagcaggcctggattcaaaattgcattttgcaagaaaacattctctttggctccatcatgaagaaagagttttatgagcaagtattggaagcctgtgctctccttccagatttggagcagttgccaaagggagatcaaactgagattggagaaagagctgtgaatataagtgggggccagcagcatcgagtaagcctggccagagctgtctacagtggggccgacgtctacctcctggatgatcccttgtctgctattgatgttcatgttggaaagcagctttttgaaaaagtgatagggtccttgggccttttgaaaaaccgggtagccatagtttcatttatgctttcttgtggggcaggggatatatctagcactgtgcctaaaattccatttattttgtttatttgttgaagcaaagtagtcacatttcacatgaaaaaaatgggatgctcagattgcaatttcacaggcaaatgtcaatgggtaatttttgaagttttacttacaagtttactctggtgacaatttatgtgattgttatctcttcatctaataccatatcctaaggggatgtatgtgccataatgaattgttgttgactcaagtgatttttacaatggtattttggtgcacaccaaaatattaataaaattttatattattaacataaaaaaaaagtcccccgggccgcgacgacgcggccgcgaa

SEQ ID NO: 66813 - DNA, 852 bp, Homo sapiens
ggcttccatcctaatacgactcactatagggctcgagcggccgcccgggcaggtgctgggtcgtttgtgggcgaagtaagtgctgtagataaagactttgggccaaatggagaagtaaggtattcttttgaaatggtgcagccagattttgagttgcatgccatcagtggggaaattacaaatactcatcagtttgacagggagtctcttatgaggcggagagggactgctgtgtttagctttacagtcatagcaacagatcaggggatccctcagcctctcaaggatcaggccactgtacatgtttacatgaaggatataaatgataatgctcccaaatttttaaaagacttttaccaagctacaatatcagaatcagcagccaatctgacacaagtgttaagagtatctgcctcagatgttgatgaaggtaataatggacttattcactattctataataaaaggaaatgaagaaagacagtttgctatagacagtacctctggtcaggtaacactaattggcaaattagactatgaagcaacacctgcctattcccttgtaattcaagcagtggattcagggacaatccccctcaattcaacgtgtactttaaatattgatattttagatgaaaatgacaatacccctttctttccctaaatcaacacttctttgttgatgttttggaaaacatgagaattggtgaactcggggcctctggtactgcaactgattcccgattcaggtgacattgctgatttatattacaagtttactgggactaaacacccccccggaacttttagcattagccccaaacacttgggagtatttttcttggcccaaaaa

SEQ ID NO: 66814 - DNA, 416 bp, Homo sapiens
tttcgtaagctttccccggtgtcggcggcaggtggaatttccacgctttatctgcgcctgcgccgcgcgggattcgcggtccgagctgaagaggttcgcggtccggtttcacttctccgaaccctgaggcagtgtgtgaagctgggacgccagccatgttccagaccgcttggcgccaggaaccagtgacctttgaggatgtggctgtgtacttcacccagaatgaatgggccagcctggactctgtgcagagggccctgtacagggaagtgatgctggagaattatgcaaatgtggcttccctggcattcccattcaccacgcctgttctggtctcccagctggagcaaggggaactgccatggggcctcgatccctgggaacctatgggcagggaggctctcagaggtatctgg

SEQ ID NO: 66815 - DNA, 361 bp, Homo sapiens
ctggtgattgctatgacctgtatggaggggagaagtttgccactttggctgagttggtccagtattacatggaacatcatgggcaattaaaagagaagaatggagatgttattgagcttaaaaatcctctgaactgtgcagatcctacttctcaaaggtggtttcatggacacctctctggaaaagaagcagagaaattgttaactgaaaaaggaaagcatagtagctttcttgtacgagagagccagagccaccctggagattttgttctctccgtgtgcaccggtgatgacaaaggagagagcaatgacggcaagtctaaagtgactcatgtcatgattcactgtcaggaactgaaatc

SEQ ID NO: 66816 - DNA, 416 bp, Homo sapiens
  misc_feature (1)...(416): n = a,t,c or g
tttcgtcaaagggcacctgcccaagctgcagatgcccagtttcaaggtgcccaaagtggacctcaagggccccgaaatagacatcaagggccccaagctggacctaaaagaccccaaggtggaagtgacagcccctgatgtggaggtgtctctgcccagcgtggaggtggacgtcaaggccccaggagccaagctggatggtgcgcggctggagggggacatgtccctggccgacaaggacgtgactgccaaagacagcaagttcaaaatgcccaagttcaagatgctctcgtttggggtgtctgcccctggcaagtccatcgaggcctcagcggatgtgtctgcgctgaaggtggaggccgacgtgagcctcccctccatgcagggggaccttaagaccactgacctcagcgttn

SEQ ID NO: 66817 - DNA, 579 bp, Homo sapiens
actacttaaacaaaccacaggtgatgaagttttaataattcaagataaattggaagccattaaagcaaggtacaaagacattactaaactgagcactgatgtggccaagactctggaacaggcgctgcagcttgcaaggcggctgcactccacacacgaagagctgtgtacctggctggacaaagtggaggtggaattactttcatatgaaactcaggttctgaaaggagaagaagcaagtcaagcacaaatgagaccaaaggaactgaaaaaggaagctaagaacaacaaagccttactggactcccttaatgaagtgagcagtgctttgctggaactggtaccatggagggcaagagaaggacttgagaaaatggtagctgaggacaatgagcgctaccgattagtgagcgacaccatcactcagaaggtggaggagatcgatgcagccattctgcgatcacagcagtttgaccaagcagctgatgctgagttatcctggattactgaaacagaaaaaaaattgatgtctctgggtgacatcaggcttgagcaagaccagacttctgctcagcttca

SEQ ID NO: 66818 - DNA, 794 bp, Homo sapiens
  misc_feature (1)...(794): n = a,t,c or g
acgagcgtggaggcgcgcaggtaaatgctacagatgaaatcaagcgagagattatccatcagttgagtatcaagcctatggctcatagtgaattggtaaagtctttacctgaagatgtaagtacctacatttctaaaaagaaaaccatagaaacttttccctgcctatcagtctagtatctatagatttacttctgtatacctttctcacaattgtaaaatctattgtcatgggatgtgtataattccggccactcttattatgaataattagaaaaagagaataggagtagaaaacagaatagtaatagaatcttttacaataaagccttgaggaagataaggacactaaacaaaaagtagcccaaacctcagaactaaggtttgtaccccacagaaagaggtcattatagggtctttagtacaaagttgctatgggtgtggataatgctttgtaacctagtatattgaggaagggagtcagaagtgcctactcacctatactgagtagaataaataatgttttcctaagctttttccttcttggcctccagagagtcttcttaatgacgagcccttgtttcattttagtgaatgcaaaataatagtgaaaaggacattcataggttaaattgcaactgtttttccttccaggggtgataagttccccagcaacctatatttcagccatggggtttttcagaaactcaacccttataattgagaagagactttattttcattgaggcttttcaaaatgtttgccctaatttgaaacatagatcanaaccttca

SEQ ID NO: 66819 - DNA, 591 bp, Homo sapiens
  misc_feature (1)...(591): n = a,t,c or g
tctctgtaccgaaatgccctgggcagccggggggtgaagctgctctgtcaaggactcagacaccccaactgcaaacttcagaacctgaggctgaagaggtgccgcatctccagctcagcctgcgaggacctctctgcagctctcatagccaataagaatttgacaaggatggatctcagtggcaacggcgttggattcccaggcatgatgctgctttgcgagggcctgcggcatccccaatgcaggctgcagatgattcagttgaggaagtgtcagctggagtccggggcttgtcaggagatggcttctgtgctcggcaccaacccacatctggttgagttggacctgacaggaaatgcactggaggatttgggcctgaggttactatgccagggactgaggcacccagtctgcagactacggactttgtggctgaagatctgccgcctcactgctgctgcctgtgacgagctggcctcaactctcagtgtgaaccagagcctgagagagctggacctgagcctgaatgagctgggggacctcggggtgctgctgctgtgtgagggcctcangcatcccacgtgcaagctc

SEQ ID NO: 66820 - DNA, 605 bp, Homo sapiens
tttttttttttgacgtggtttagattggacgactgattattggacagaatggcatcttgtcaacacctgcggtctcctgcattatcaggaagatcaaggcagctggtggaatcattctaacagccagccactgccctggaggaccagggggagagtttggagtgaagtttaatgttgccaatggaggtatgtggttcagtatatgccttaataatcacgatttccttcctcttatattattatagtctcacagtgaccctttgatgatagacaagcaaggtgcagaggacctagctcagaaaaatttagtgaggtgcccaaagtgatccaacaaagaagtggcatgatgggctcatgaacccatttgggtggtctcttggtcccctgtactcttcagcataaactattgaatagttgatgcttatctgatatggaaggactctgaattttaacattaaaacataccctgaaggtcgttgtctaaatgacaatgaccctcattttacacatgaacaaatcaaaggcctgagaggctgagttactgctgaaggccacagggttgatcagggtcagattaatgatttttagcccaaatcctgggctct

SEQ ID NO: 66821 - DNA, 2483 bp, Homo sapiens
ataaaatggacatagtagtaggacttacctcccagggctgtggttatagaggttttgtaagaattaaatgacatcatccatgtaaagcatatagcagaatgcctggcacatagatgcccttagtgaatttttgctgttgttgtgattcttttgggagcagtcatagtaacatattctcatatgttggtatgttctttcatattgcattgtcttatgaatagattctggaaaccaaaatggaggaaatgatgataagactaagaatgctgagaggaactatttaaatgttttacctggggaattttatattacacggcattctaatctctcagaaatccatgttgctttccatctctgtgtggatgaccatgtgaaatcgggaaacatcactgctcgtgatcctgccattatgggactccgaaatatactcaaagtttgctgtacccatgacatcacaacaataagcattcctctcttgctggtacatgatatgtcagaggaaatgactataccctggtgcttaaggagagcggaacttgtgttcaagtgtgtcaaaggtttcatgatggaaatggcttcatgggatggaggaatttctaggacagtgcaatttctagtaccacagagtatttctgaagaaatgttttatcaacttagtaacatgcttccccagatcttccgagtatcatcaacactcactctgacatccaagcactaaacccttatagattgacatgctggcagaagatgattgttaaactctccaggaacttgtgctatgctgggaatctgtcaagcaaaagatgcccagaaagagaacttgcagctcaatccacaaatcaagatacatgtgtgtgaaacccattccaaaaatttatatactggcacaaactggtggatcaacccctaacttaaacacttaaagtctctttatgaatttctctttttttcttctctgtgttacctgtggaatattaggtaatctaaaactttttatttattcacacagggacacttggggggaaagggaaacttgattatatttacatgggagggcatttgacttttttcaaggagggcttggacttcgtcttcaggtggcaatccttaattaaacatacaaacaaaattttccttttactttctttgccaaaacaaaatgtaaaagcactgaaatatacattgcaagtacaaatttcctgtgaaaatctttttatagaaacacaaatgtataagacaaatgtgcttgttcttttaaattctcctgtttcagaatctctttttaatctactcctaaggatgtacaagttagagtcagaagacgttttggattttttccctctctctcatcctcccgctgtgcccttgcacttgcatattaataacatttcatggactgggaaatagtgttcttttttgcaagcttgatgtcaagttagtctaaaccagcacctggcagtattttagtgctcatcaacattgtgacaatcacacaaggaagatcatttctacatttctgtcctccctgcgttctcagcttgcttaaccattcctctacctcttgcatttttttgcggataaatgtatccccatttctgcttctctgtttcccctccttttccattgtttttccttatggtactactttctcaggtgctacatatcatatatttgtcccatctataacatatttaaatgctataagtagtaactccattaaacaaaggcatttacaaaagcacacaggtgtttagaaaagcaatagtttcatcaattccaagttatgtggatattgtaactggccacaagaatgaaatggagggcatttggtgtcataagatggcatgtcttgatgacaagaaacaaaacgcccttcattaatatgcctcagtgtaataactattatagaaactgttggcaagcagagtgctttcctataacagaatgtgtcttaattttctacttgagggaaaggtttgtccaggtaacaacactaaagacaaccctaagaacacccactccagcagtatgtccattagacactaaaactctccaaattatttgtcagggagcctggcgattctgccaagaaggcaggtgttttgcccttagagcctatacagttctcttggagaaattgtctttcaggcaccactgttaatcactgagactgattctaatgcaaagcagggaagacagaggcagaaaccaggagagtggtagatcagtgcagcccagatatcggaatggaggagcaaagtttcattcacggatgtttgttgaatgctgctgcccaactcttcctttgtcacctctaggctattccactaagttacttataaactggtggctttaactgagggctgtgtaaaggtactatttggcatgtgaagtcaggataaatttatcgaatgtccgttttccacatgcaactgtgttacagaagtagtaaaattggaagaatcatgtttatggtgttacca

SEQ ID NO: 66822 - DNA, 999 bp, Homo sapiens
agagaaacagcttcacactttttatttattcagaacgtggtgtacctttccagaatagcagctttagcctcagttgagttatatgtgtcaatgccatttcaccataatgagctaaatggctgatcagataatataaaagcactgtgttgtgtggtgcataacatttccacatgtttatgttatgtttttttcagatcgcctgataggcttgccagaggggcgtgctcgcaatcacaatcgaccgcatcaaatccctgtcctggctggagtaatcattgaagatgtggcagttggagctgaacacacacttgctttggcatcaaatggagatgtgtatgcctgggggagcaattcagaagggcaggtaaatatttatattgcttgctgctttctcatattctagaaatctcacagtgttcctcagttggggaaagagataagctaggaaattcataatctactgcaatactccaagcacatcactttgctatgggactgattattttgtaagtctagttatgtctttctctctcgactgcggccaaagaagtattataccatggtttaaaacaattctggtagtacagcaaagtgattaaggggattggctgagtatttatgtgtgtgtcctcatacactgttaagtgcctggcatgtagtaagctgcagtatgtaaggatttgctactgtcaacattatcatcattactacagcaagatgtgagattaggtcctgggaacatcagttgatatgggaaaaagaatgaaacaataatatttttatattttataatatgatggcatacaaagtatctttaggtttttgcaggaagtcttgtcactcccattatttataggattaaactgagcctctgagatactgataagagactcaagaggttgatgtattcaccctcctctatttatgaaggagggagagaccttggtgtgagatgtctgaaatgctatgacggtgacttttagcttcacatgcagagcc

SEQ ID NO: 66823 - DNA, 742 bp, Homo sapiens
acacctgacgtaccggaccggaattcccccccgacccacgcgtccgccggccagtccctccccatttcgcagttctactcccacggtgggctgatggccgaccacttgccaggaaggatgcggcccaacaccagctgcccggtaccaatcaaagtctgccctcgctcaccccccttggagaccaggaccaggacttccagctcctgctcttcctattcctacgcggaggacgggagcgggggctcaccctgcagcctccctctctgtgagttctcctcctcgccctgttcccagggagccagattccttgccacagaacatcaggaaccaggcctgatgggagatggaatgtacaaccaagtgcggccccaaattaaatgtgagcagtcttatggaaccaactccagtgacgaatccggatcgttctcggaagcagacagtgagtcgtgtcctgtgcaggacaggggccaggaggtaaaacttccttttcctgtagatcaaatcacagatcttccaaggaacgatttccagatgatgattaaaatgcacaagctaacctcagaacagttagagtttattcatgatgtccgacggcgcagcaagaaccgcatcgcggcccagcgctgccgcaaaaggaaactggactgtattcagaatttagaatgtgaaatccgcaaattggtgtgtgagaaagagaaactgttgtcagagaggaatcaactgacagcatgcatggcggacg

SEQ ID NO: 66824 - DNA, 398 bp, Homo sapiens
tggcttccgaagcccccagccaccaaaagcacttcattggctcctaggcgagcccttgtcctgggtccctgcatctgactctgaagttcaggcctcagatgaaacttctttgcttcatcaaccagatccctgcattgtaaaccatagtggatgaaaggctcagcatctattacatctgtgatatacctgagggttagcaggggcatctgcatatactgtagcaggctgggcaaggagtctttctgctctttcttggcatgcttcacccaactgatgacagcctcaaagactggttcttcaggatccacctgaatttcatcgcacttgattagcttttccacctctccttgcctcagaagaatgaactcttcatgctgtaccacttcaggaaaattctt

SEQ ID NO: 66825 - DNA, 366 bp, Homo sapiens
caagcatcctgcccgccctgctggtgaccatcctgatcttcatggaccagcagatcactgccgtcattgtcaaccggaaggagaacaaactgaagaaggctgccggctaccatctggacctgttctgggtgggcatcctcatggctttgtgctcctttatggggctcccctggtacgtggctgccacggtcatctccatcgcccacatcgacagcctcaagatggagacagagaccagtgcccctggggagcagccccagtttctgggagtcagggaacagagagtaaccggcatcatcgtcttcatcctgacgggaatctctgtcttcctggctcccatcctaaagtgtatccccctgccggtgc

SEQ ID NO: 66826 - DNA, 574 bp, Homo sapiens
cggcgcttcacgcgtagaggcaggcagtgcgaatggaatgctcattgatggtggtagccagatagtaaaagttcaagggcacgctgatggtacaacgataaataagtctggctctcaggacgtagtacaaggaagtctggcaacgaacacaaccataaatggtggtcgccagtatgttgaacagagcacagtagaaacaacaaccattaaaaatggcggtgagcaaagagtatatgagagccgtgcgctggacacgacgattgaaggcggaactcagtctctgaatagtaagtcaacggcaaaaaatacgcatatctattctggtggcacgcaaattgttgataacaccagcacctcggatgttattgaagtttattctggtggcgtgcttgatgttaggggtggtacggcaacaaatgttacccagcacgatggtgcaattttaaaaactaacactaacggtacgacggtgagcggtacgaatagtgaaggtgcattctccatccacaatcacgtggcagacaatgtgttgctggaaaacggtggtcatttagacataaacgcatatggttcg

SEQ ID NO: 66827 - DNA, 575 bp, Homo sapiens
cccacgcgtccgggcatttcgagagggatcccggaagtccttgcggatgaagaattctccctctgaagcacagaatttagatgagaatacaactgagggctgggaaaatcggataagactatggactgaccagtatgaagaagctttcactaatcagtacagtgcagatgtacagaacgcgcttgaacaacacctacattctagcaaggaatttgtgggcaaacctactattttagacactattaataagactgaattggcctgtaataacacagttattggttcccaaatgcagttacagctgggaagagtcactcgtgttcaaaagcaccggaagatcctgagggctgcaagagatttggctttggacactcttataatagagtatcgtgggaaagtcatgttacgacagcaatttgaggtcaatgggcatttcttcaaaaaaccatacccctttgtgctcttctactcaaaattcaatggtgtagagatgtgtgtggatgcccgtactttcggtaatgatgctcggttcatcagaagatcatgtacaccaaatgcagaggtgcgacacatga

SEQ ID NO: 66828 - DNA, 439 bp, Homo sapiens
aatagagaaggtgccagaaagatccaaaacaagtggctgcggccgtcgcccaggagtcatcggacgccagaatctgtgtctccagaacgctatagctatggcacctccagctcttcaaagaggacagagggtagctgccgtcgccgtcggcagtcaagcagttctgcaaattctcagcagggtcagtgggagacaggctcccccccaaccaagcggcagcggcggagtcggggccggcccagtggtggtgccaaacggcggcggagaggggccccagccgcaccccagcagcagtcagagcccgccagaccttcctctgaaggcaaagtgacctgtgacatccggctccgggttcgagcagagtactgcgagcatgggccagccttggagcagggcgtggcatcccggcggccccaagcgctggcgcggcaacttgacg

SEQ ID NO: 66829 - DNA, 788 bp, Homo sapiens
ggcggcggcgtttgagtggaggaagatggcggctccgggcggctcggggtcccgccagctgtgaggagccccgagcacggctgtcgcggcctgaggcagagcgcctctgctctggccctgtccctggctccctcattaccgtcgccagcggagcgaacccgagagcgtggagcgggctgggccagctgttgagtggaatgtcatggccagctcctcggacagtgaagatgacagtttcatggctgtggaccaggaagaaactgtgctggaagggacaatggatcaagatgaggagccccacccagtattggaggctgaggagactagacataataggtccatgtcggagctgccagaagaggttttggagtatatcctgtcctttctctcaccgtatcaggaacacaaaactgcggcccttgtctgcaaacagtggtatcgacttatcaaaggtgtagcccatcagtgttatcatggtttcatgaaggctgtccaggaaggaaacattcagtgggagagccgtacctatccttatcctggaaccccaatcactcagcgcttctcgcacagtgcatgctattatgatgctaatcagtctatgtatgtgtttggaggctgtacccagagcagctgcaatgctgctttcaatgacctctggagacttgacctaaacagcaaagagtggatccgacctttggcttcagggtcctatccttcccccaaagctggagcaactctggtcgtgtacaaggacttgctagtgctgtttggtggctggacgcggccag

SEQ ID NO: 66830 - DNA, 929 bp, Homo sapiens
atttgataaccgtagtatatctctgtacgcgagccggaattcccgggtagacgatttcgtgcccgaccttcccacctgccgccatggtgcccagccaggccccttacctcgtcccagcttttcccctcccagccgcgacctcacccggaagagaatacgcagcccccggaactgcaccggaaggcctgcatgggccgcccttgtccgagggcttgcagccttacccagctttcccttttccttacttggatacttttatgaccgttttcctgcctgacccccctgtctgtcctctgttgtcgccatcatttttgccatgtccattcctgggggcgacagcctcttctgcgatatcaccctcaatgtcgtcagcaatgagtccaactctggacccacccccttcagtcaccagccaaaggagagaggaggaaaagtgggaggcacaaagcgaggggcacccgttcattacttcgagaagcagctcacccttgcagttaaacttacttcaggaagagatgcccagaccctctgaatctccagatcagatgagaaggaacacgtgcccacaaactgagtatcagtgtgttacaggcaacaatggcagtgagagcagtcctgctactaccggtgcactgtccacggggtcacctcccagggagaatccatcccatcctactgccagcgctctgtccacaggatcgcctcccatgaagaatccatcccatcctactgccagcgctctgtccacgggatcgcctcccatgaagaatccatcccatcctactgccagcacactgtccatgggattgcctcccagcaggactccatcccatcctactgccactgttctgtccacggggtcacctcccagcgaatccccatccagaactggttcagcagcatcaggaagcagcgacagcagttgtatt

SEQ ID NO: 66831 - DNA, 1050 bp, Homo sapiens
tttcgtgcccgggcagcgggggagcagcgagcgggcttccgcgagccggagaaggcacaggcctgtcccgggtcccggcaggtctgcgcgtctgttcccagcgctctgcgaggcctaaaaaggaggagcaacctgtccagaatccctgcaggacaggaaaaggaggggaaatctcgacatggaaaaaccctacaataaaaatgaaggaaacctggaaaacgagggaaagccagaagatgaagtagagcctgatgatgaaggaaagtcagacgaggaagaaaagccagacgtggaggggaagacagaatgcgagggaaagagagaggatgagggagagccaggtgatgagggacaactggaagatgagggaagccaggaaaagcagggcaggtccgaaggtgagggcaagccacaaggcgagggcaagccagcctcccaggcaaagccagagagccagccgcgggccgccgaaaagcgcccggctgaagattatgtgccccggaaagcaaaaagaaaaacggacagggggacggacgattcccccaaggactctcaggaggacttacaggaaaggcatctgagcagtgaggagatgatgagagaatgtggagatgtgtcaagggctcaagaggagctaaggaaaaaacagaaaatgggtggttttcattggatgcaaagagatgtacaggatccattcgccccaaggggacaacggggtgtcaggggagtgaggggtggaggtaggggccagaggggcttacacgatatcccatacctttaatgcctttggccttccattctgatttctctgatgagaatattgctggccctgctttccctggtaggtatttgccaggcccaatgctttaaccttaagctgatactttgctttagatgtcagtctcgttaccagcagccttttgacccaactacggcgctctatattttagtagaggattttcacccatgtgcatggaaaagatgttcatggtacattgtaaaaaaataaaattaaaattaaaaaaagtttgcagaaccgcaaaaaaaaaa

SEQ ID NO: 66832 - DNA, 461 bp, Homo sapiens
gcggtcggctgtggcaagcttctcttgtctctgacggcttgtagttatggggcaggagccgcggacgctgccgccctcccccaactggtactgcgcccgctgcagcgatgccgtgcccgggggcctctttggcttcgccgcgcggacctccgtcttccttgtccgcgtgggcccgggcgcaggcgagagtccagggacacccccgtttcgagtcataggagagttggtgggacacaccgaaagggtctctggcttcacattttctcatcaccctggtcagtacaacctctgtgccaccagctccgacgatgggactgtgaaaatatgggatgtagagacaaaaacagttgtgacagaacatgcactccatcagcatacgatatcaacattacattggtctcctcgagtaaaggacttaatagtatctggggatgaaaaaggagtagttttctgttactggg

SEQ ID NO: 66833 - DNA, 1199 bp, Homo sapiens
tttcgtcaggaatgaattaagcagcacagcccgagacgcaccacataaaaggctgggaacaccagccagccgaagaaagcccatttttgtgtctgtcagcttagatgcccttgcccggactgctaaagatgcagctatttacagtggacagaaactgaaggggtgaaagaaaacccaagatgccagaccagtttgaccaggcggttgtgctgaaccagctgcggtactcagggatgctggagactgtgagaatccgcaaagctgggtatgcggtccgaagaccctttcaggacttttacaaaaggtataaagtgctgatgaggaatctggctctgcctgaggacgtccgagggaagtgcacgagcctgctgcagctctatgatgcctccaacagcgagtggcagctggggaagaccaaggtctttcttcgagaatccttggaacagaaactggagaagcggagggaagaggaagtgagccacgcggccatggtgattcgggcccatgtcttgggcttcttagcacgaaaacaatacagaaaggtcctttattgtgtggtgataatacagaagaattacagagcattccttgtgaggaggagatttttgcacctgaaaaaggcagccatagttttccagaagcaactcagaggtcagattgctcggagagtttacagacaattgctggcagagaaaagggagcaagaagaaaagaagaaacaggaagaggaagaaaagaagaaacgggaggaagaagaaagagaaagagagagagagcgaagagaagccgagctccgcgcccagcaggaagaagaaacgaggaagcagcaagaactcgaagccttgcagaagagccagaaggaagctgaactgacccgtgaactggagaaacagaaggaaaataagcaggtggaagagatcctccgtctggagaaagaaatcgaggacctgcagcgcatgaaggagcagcaggagctgtcgctgaccgaggcttccctgcagaagctgcaggagcggcgggaccaggagctccgcaggctggaggaggagatttttgcacctgaaaaaggcagccatagttttccagaagcaactcaagaggtcagattgctcggagagtttacagacaattgctggcagagaaaagggagcaagaagaaaagaagaaacaggaagaggaagaaaagaagaaacgggagg

SEQ ID NO: 66834 - DNA, 383 bp, Homo sapiens
  misc_feature (1)...(383): n = a,t,c or g
tttttctcttccatccagctgactgatgatcagggccccgtcctgatgaccactgtagccatgcctgtgtttagtaagcagaacgaaaccagatcgaagggcattcttctgggagtggttggcacagatgtcccagtgaaagaacttctgaagaccatccccaaatacaaggtaatgaatgacctaatccctgaaatcaaagcaacagagatgcccagagccttgttttcacaaagttcaggcttcaaactctactttggagcgatgtttttgctcaccactattacagcctgttagcttgtctttataccatctgcacagttatttaaaaggnnnnnnnnnnattatttacaaggactggctgtttttcttatttacctcct

SEQ ID NO: 66835 - DNA, 385 bp, Homo sapiens
ctggccgaactcccgggtcgacgatttcgtcgccgggcaaaatcgcggtggttggggctgggattgggggctctgctgtggcccattttctccagcagcactttggacctcgggtgcagatcgacgtgtacgagaagggaaccgtgggtggccgcttggccaccatctcagtcaacaagcagcactatgagagcggggctgcctccttccactccctgagcctgcacatgcaggacttcgtcaagctgctggggctgaggcaccggcgcgaggtggtgggcaggagcgccatcttcggcggggagcacttcatgctggaggagactgactggtacctgctgaacctcttccgcctctggtggcactatggcatcagcttcctgag

SEQ ID NO: 66836 - DNA, 508 bp, Homo sapiens
gatcagcagctgggtgctctcagtcagctctccatgaagattggccgccctgcaggagtacaggccctgatccgaggaggacacgtttgtgagcagcaaggagccttcgtgcagatggtgcggggagcccagtttgcttttattcctgaaccaagtgacttcagcttcaggcactcctgcaacctggcagttgattgtcacattcactccctgcactgttttgatggtgcttcctatatcgactgtgactgcaggcttctccgtgttgatcactgtcattcgtgacgttttcactagtggctttcctgctaatgtgacggcaatggagacagagtcgtatcccaaggcattggtggcattgcaagtgtagaaacccacatctgcttccactggtgccaagatctgtaaggaatcatctggctgtagaagaatcctgtcactgaactgaacttcttctccattcctggcccagctgatggtaggccttgggtggccgatggcctcacag

SEQ ID NO: 66837 - DNA, 527 bp, Homo sapiens
tttcgtgccctgctccttcctgagggcttagagattctccttaactcccagccatggatcttggagaatttcccccgagatcagcaggagggaaaagatgccgttccaccatgtgaccgccggcttgttgtacaaggggaattacctcaaccgatcgctctctgctggcagtgacagcgaacagctggctaatatctccgtggaggagctcgatgaaatccgagaggcctttcgggttctggaccgggatgggaacggcttcatctccaagcaggagctgggcatggccatgcgctctttggggtacatgccaagcgaggtggagctggccatcatcatgcagcgcttggacatggacggggatggccaggtggattttgatgaattcatgaccattcttggccccaaactggtgtcttcagaaggtcgcgatggttttcttgggaacacgatagacagcatattctggcaggtgagtaagaatattttttttcagactaagtttgacagtaaatgtgtctgagact

SEQ ID NO: 66838 - DNA, 2147 bp, Homo sapiens
tttcgttaacctaattggtactggaacaagtgaacactgggtcgatgatgaagggccccagccaaagaaaggaaaggctgaagatgaggccttactctcagaagaagatgaccccattgatcgacggccatggacacagcagcaccttgaagctgcagacatccgtaggacaccatcgctggctctcacccctcctcaggcagagcaggaggtggatgtgttagatgtgaatgtccgtggcccagatggctgcaccccattgatgttggcttctctccgaggaggcagctcagatttgagtgatgaagatgaagatgcagaggactcttctgctaacatcatcacagacttggtctaccagggtgccagcctccaggcccagacagaccggactggtgagatggccctgcaccttgcagcccgctactcacgggctgatgctgccaagcgtctcctggatgcaggtgcagatgccaatgcccaggacaacatgggccgctgtccactccatgctgcagtggcagctgatgcccaaggtgtcttccagattctgattcgcaaccgagtaactgatctagatgccaggatgaatgatggtactacacccctgatcctggctgcccgcctggctgtggagggaatggtggcagaactgatcaactgccaagcggatgtgaatgcagtggatgaccatggaaaatctgctcttcactgggcagctgctgtcaataatgtggaggcaactcttttgttgttgaaaaatggggccaaccgagacatgcaggacaacaaggaagagacacctctgtttcttgctgcccgggaggggagctatgaagcagccaagatcctgttagaccattttgccaatcgagacatcacagaccatatggatcgtcttccccgggatgtggctcgggatcgcatgcaccatgacattgtgcgccttctggatgaatacaatgtgaccccaagccctccaggcaccgtgttgacttctgctctctcacctgtcatctgtgggcccaacagatctttcctcagcctgaagcacaccccaatgggcaagaagtctagacggcccagtgccaagagtaccatgcctactagcctccctaaccttgccaaggaggcaaaggatgccaagggtagtaggaggaagaagtctctgagtgagaaggtccaactgtctgagagttcagtaactttatcccctgttgattccctagaatctcctcacacgtatgtttccgacaccacatcctctccaatgattacatcccctgggatcttacaggcctcacccaaccctatgttggccactgccgcccctcctgccccagtccatgcccagcatgcactatctttttctaaccttcatgaaatgcagcctttggcacatggggccagcactgtgcttccctcagtgagccagttgctatcccaccaccacattgtgtctccaggcagtggcagtgctggaagcttgagtaggctccatccagtcccagtcccagcagattggatgaaccgcatggaggtgaatgagacccagtacaatgagatgtttggtatggtcctggctccagctgagggcacccatcctggcatagctccccagagcaggccacctgaagggaagcacataaccacccctcgggagcccttgccccccattgtgactttccagctcatccctaaaggcagtattgcccaaccagcgggggctccccagcctcagtccacctgccctccagctgttgcgggccccctgcccaccatgtaccagattccagaaatggcccgtttgcccagtgtggctttccccactgccatgatgccccagcaggacgggcaggtagctcagaccattctcccagcctatcatcctttcccagcctctgtgggcaagtaccccacacccccttcacagcacagttatgcttcctcaaatgctgctgagcgaacacccagtcacagtggtcacctccagggtgagcatccctacctgacaccatccccagagtctcctgaccagtggtcaagttcatcaccccactctgcttctgactggtcagatgtgaccaccagccctacccctgggggagctggaggaggtcagcggggacctgggacacacatgtctg

SEQ ID NO: 66839 - DNA, 537 bp, Homo sapiens
ttggtggcgcttgaaacgcttcctacgccggagaaagctgccattgtcgaacatgtcttgggaggcggggtccaggctccagtagttgcccttgcctgggtggcccggctcgcgggggatcttaacgaagcagtcgttcagcgagaggttgtggcggatgctgttctgccaggcggggaacttgcggcggtagtaggggaagcggccactaatgaaggcgcagatgccgctgagcgtgaggcgcttgtgcgggttttgcaggatggccatggtgatgagcgcgatgtacgagtaggggggctttgccggctgccgggcatcttcagaggccgccgcagaccttggcggtgccctgaacttggtgccaaactctgaggggtcgctcgggccgccgccgccctcgatgtgctctcggggaagcgcaaccccgccccaccgggccacctgcagccccggctggagcgactgctctaggaactgctggctcgccgcctcctcctcgtcttccacctcggcttcatcttcctcctctcccag

SEQ ID NO: 66840 - DNA, 471 bp, Homo sapiens
ggtacaaggatgccctgctgctgccagacaaccaccgccaggtggtgtttgagaatgggaccctcaagctgactgacgtgcagaagggcatggatgagggggagtacctgtgcagtgtcctcatccagccccagctctccatcagccagagcgttcacgtagccgtcaaagtgccccctctgatccagcccttcgaattcccacccgcctccatcggccagctgctctacattccctgtgtggtgtcctcgggggacatgcccatccgtatcacctggaggaaggacggacaggtgatcatctcaggctcgggcgtgaccatcgagagcaaggaattcatgagctccctgcagatctctagcgtctccctcaagcacaacggcaactatacatgcatcgccagcaacgcagccgccaccgtgagccgggagcgccagctcatcgtgcgtgtgccccctcgatttgtggtgc

SEQ ID NO: 66841 - DNA, 483 bp, Homo sapiens
aggctacggagcaggcgagaggcgacggcgagagctagagcgggcgcagcgttagggtggccgtgcaaggggagccgtggcccgggcccggggcgtgcgagacggcggaagcagcccagggccttgctgccgccatgactgaggaatcagaggagacagtcctgtacattgagcaccgctatgtctgctctgagtgcaaccagctgtatggatcactggaagaggtgcttatgcaccaaaactcccacgtgccccagcagcactttgagctggtgggcgtggctgatcccggagtcactgtggccacagacacagcttcaggcacgggcctctatcagacccttgtgcaggagagccagtaccagtgcctggagtgtggtcaactgctgatgtcacccagccagctcctggagcaccaggagctgcacctgaagatgatggcaccccaggaggcagtgccagctgagccatcacctaaggcac

SEQ ID NO: 66842 - DNA, 1229 bp, Homo sapiens
tttcgtccggcgccgggtcccggagacagacgttacgcgggctcgagcgtcctcgggaagtgccagccagagttggtgacgaccacttcctcgacgtggggcgggcggacgggaagcctggggtcgtggccaccgcctcgggagctctgggagcccgggtgaccgcgtagaaatgaacacagaagcggagcaacagcttctccatcacgccagaaatggcaatgctgaagaagtaagacaactattagagaccatggcgaggaatgaagtgattgctgacattaattgcaaaggaagaagtaagtctaacttgggctggacacctctacatctggcatgctattttggacacagacaagtggtccaggatctgttgaaggctggtgcagaagtgaatgtgttgaatgacatgggagacacgccgcttcatcgagctgcctttacaggacgaaaggagttggtaatgcttctcttagaatataatgctgatactactattgttaatgggagtggacagacagcaaaagaagttactcatgctgaagaaatcacaagcatgcttgaagctgtagaaaggactcaacaaagaaagcttgaagaattacttttagcagcagcaagagaaggcaaaacaacagaactcacagctctgctcaacaggcccaatcctcctgatgttaactgttcggatcagttaggaaatacacccttgcattgggcagcttaccgggcccataaacaatgggccttaaagcttttaaaaagtggagcagaccctaatctgaagaacaaaaatgatcagaaacctcttgaccttgcccagggtgctgaaatgaaacacattcttgttggtaataaggtcatctacaaagcattgaaacgatatgagggccctctctggaagagttcaagattttttggctggagattattctgggtagtgttagagcatggagtcctttcatggtataggaaacagcctgatgcagttcataatatttatcgccagggatgcaaacgcctgactcaagcagtatgcacggtaaaatccactgatagctgcctcttctttattaaatgctttgatgacgccattcatggcttccgggttcctaagaatagccttcagcagtcaagagaggcctggctggaagcaatagtcgctctttctgcttacagcgctcattactgtacacaaaaccagctgactgatgaggaggaggtgtatt

SEQ ID NO: 66843 - DNA, 446 bp, Homo sapiens
tttcgtcgtggggccggggcggagagaggcgagcaccgggaaggggagcgtggggccgctggaatgggtgaatttaaggtccatcgagtacgtttctttaattatgttccatcaggaatccgctgtgtggcttacaataaccagtcaaacagattggctgtttcacgaacagatggcactgtggaaatttataacttgtcagcaaactactttcaggagaaatttttcccaggtcatgagtctcgggctacagaagctttgtgctgggcagaaggacagcgactctttagtgctgggctcaatggcgagattatggagtatgatttacaggcgttaaacatcaagtatgctatggatgcctttggaggacctatttggagcatggctgccagccccagtggctctcaacttttggttggttgtgaagatggatctgttgaaactat

SEQ ID NO: 66844 - DNA, 857 bp, Homo sapiens
tttcgtgccctggctccagcatccacggcatcaggcgcagcctctgtgggacagacatcagctagaaagagggatgccccagcccctagacctctccctgcttctgaggggcatctccagcctccagctcagacatctggtcctacaggctccccaccctgcatccaaacctccccagaccctcggctctccccctccttccgagcccggcctgaggccctccacagcagccctgaggatcctgttttgccacggccaccccagaccttgcccttggatgtgggccagggtccttcagagcctggcactcactcccctggacttctgtcccccaccttccggcctggggccccctcaggccagactgtgcccccacctctgcccaagccaccccgatcacccagccgttccccaagccactccccgaatcgctctccctgtgttcccccagcccctgacatggccctcccaaggcttggcacccagagtacagggcctggcaggtgcctgagccccaaccttcaggcccaagaagccccagccccagtcaccacctcctcttctacatccaccctgtcatcctccccttggtcagctcagcctacctggaagagcgaccccggcttccggatcactgtggtcacatggaacgtgggcactgccatgcccccagacgatgtcacatccctcctccacctgggcggtggtgacgacagcgacggcgcagacatgatcgccatagggttgcaggaagtgaactccatgctcaacaagcgactcaaggacgccctcttcacggaccagtggagtgagctgttcatggatgcgctaagggcctttcacttcgtgcttgtgag

SEQ ID NO: 66845 - DNA, 592 bp, Homo sapiens
tttcgtgttcaggaactggcaccaatgcgtgttacatggaggacatgagcaacattgacctggtggagggcgacgagggcaggatgtgcatcaacacagagtggggggccttcggggacgacggggccctggaggacattcgcactgagttcgacagggagctggacctcggctctctcaacccaggaaagcaactgttcgagaagatgatcagtggcctgtacctgggggagcttgtcaggcttatcttgctgaagatggccaaggctggcctcctgtttggtggtgagaaatcttctgctctccacactaagggcaagatcgaaacacggcacgtggctgccatggagaagtataaagaaggccttgctaatacaagagagatcctggtggacctgggtctggaaccgtctgaggctgactgcattgccgtccagcatgtctgtaccatcgtctccttccgctcggccaatctctgtgcagcagctctggcggccatcctgacacgcctccgggagaacaagaaggtggaacggctccggaccacagtgggcatggacggcaccctctacaagatacaccctcagtaccc

SEQ ID NO: 66846 - DNA, 730 bp, Homo sapiens
ccggaatttccgggtcgacgatttcgtcctggacgtctcggcgggccagctgcttatggtggacggacgccaccctgacgccgtggcctgggccaacctcaccaacgccatccgcgagactgggtgggccttcctggagctgggcacaagtggccaatacaatgacagcttgcaggcctatgcagccggtgtggtggaggctgctgtgtcggaggagctcatctacatgcactggatgaacacggtggtgaattactgcggccccttcgagtatgaagtcggctactgcgagaggctgaagagcttcctggaggccaacctagagtggatgcaggaagagatggagtcaaacccagactcaccttactggcaccaggtgcggctgaccctcctgcagctgaaaggcctggaggacagctacgaaggccgtgtgagcttcccagctgggaagttcaccatcaaacccttggggttcctcctgctgcagctctctggggacctggaagacctggagctggccctgaacaagaccaagatcaaaccttctctgggctctggctcctgttctgccctcatcaagctgctccctggccagagtgacctcctggttgcccacaacacctggaacaactaccagcacatgctgcgtgtcatcaagaagtactggctccagttccgggaaggcccctggggggactacccgctggttcccggcaacaagctggtcttc

SEQ ID NO: 66847 - DNA, 773 bp, Homo sapiens
  misc_feature (1)...(773): n = a,t,c or g
agctgagtcgagctcgccggagcgggcacctctgtcagcctcctcgcagttgtagttattgtgtgtggcgtggccctggtggcagattttctctttctcttttggaagctgtgctggatgccctggaggaacaaggaggcctccagtccctcttctgctaatccccccttggaagccctccagagccccagcttcagaggcaacatggcggacaagctgaaggaccccagcaccctgggcttcctggaggcggccgtgaagatcatccacacgtccccagatatcccagctgatgtgcagatgtcggtcaaggagcacatcatgcgtcacacccggctgcagcggcaaactacagagccagcgtcatccaccaggcacacgtccttcaagcgccacctgccaaggcagatgcatgtctccagtgtagactatggcaatgagcttccaccagcagcagagcagcccaccagcattggccgcatcaagcctgagctctacaagcagaagtcggtggatggggaggatgccaagtctgaggccaccaagagctgcgggaagatcaacttcagcctacgctacgattacgagaccgagaccctgattgtgcgtatcctgaaggcttttgacctccctgccaaggacttttgtggaagctctgacccttatgtcaagatctacctcctgccttgaccggcaaatggcaagcttgcaggacccgggttgcaccgcaaggaccctggaaccccacntttggatggaggaattttccattt

SEQ ID NO: 66848 - DNA, 2166 bp, Homo sapiens
tttcgttgcaattgcaacgaatggtgttgtgcctgctggtggctcctactacatgatttccaggtctctgggcccagagtttgggggtgccgtgggcctctgcttctacctgggcactacctttgcaggagccatgtacatcctgggcaccatcgaaatcctgctggcttacctcttcccagccatggccatcttcaaggcagaagatgccagtggggaggcagcagccatgctgaacaacatgcgtgtttacggcacctgtgtgctcacctgcatggccactgtggtgtttgtgggtgtcaagtatgtcaacaagtttgcccttgtcttcctgggttgtgtcatcctctccatcctggccatctatgctggggtcatcaagtctgccttcgacccacccaacttcccgatctgcctcctgggtaaccgcacgctgtctcgccatggctttgatgtctgtgccaagctggcttgggaaggaaatgagacggtgaccacacggctatggggccttttctgctcctctcgcttcctcaacgccacctgtgatgaatacttcacccgaaacaatgtcacagagatccagggcatccctggtgctgccagtggcctcatcaaagagaacctctggagctcctacctgaccaagggcgtgattgtggagaggagtgggatgacctcggtgggcctggccgatggcactcctatcgacatggaccacccttatgtcttcagtgatatgacctcctacttcaccctgctggttggcatctacttcccctcagtcacagggatcatggctggttctaaccgctctggggacctgagggatgcccagaagtcaatccccactggcaccatcctggccatcgccaccacctctgctgtctacatcagctccgttgttctgtttggggcctgcattgagggggtcgtcctgcgggacaagtttggcgaagctgtgaatggcaacctcgtggtgggcactctggcctggccatctccatgggtaattgtcatcggatccttcttctccacctgtggggctgggctgcagagcctcacgggggccccacgcctgctgcaggccatctcgagggatggcattgtgcccttcctgcaggtctttggccatggcaaggccaatggagagccgacctgggccctgctcctgactgcctgcatctgcgagattggcatcctcattgcatccctcgacgaggtggcccccatcctctctatgttcttcctgatgtgctacatgtttgtgaatctggcctgtgcagtgcagacgctgctgaggacacccaactggaggccacgctttcgatattaccactggaccctctccttcctgggcatgagcctctgcctggccctcatgttcatctgctcctggtattatgcactggtagccatgctcattgctggactcatctacaagtacattgagtaccgtggggcaaagaaggagtggggcgatgggatacgaggtctgtctctcagtgcggctcgctatgccctcttacgcctggaggaagggcccccacacaccaagaactggaggccacagctgctggtgctggtgcgtgtggaccaagaccagaatgtggtgcacccccagctgctctcactgacctcccagctgaaggcagggaagggcctgaccatcgtgggctctgtccttgagggcacctttctggaaaatcatccacaggcccagcgggcagaagagtctatcaggcgcctgatggaggcagagaaggtgaagggcttctgccaggtggtgatctcctccaacttgcgtgatggcgtgtcccatctgatccagtctgggggcctcggggggctgcagcacaacactgtgcttgttggctggccccgcaactggcgccagaaggaagatcatcagacgtggaggaacttcattgagctggtccgggaaaccacagctggccacttagccctgctggtcaccaagaacgtttccatgtttcctgggaaccctgagcgcttctctgaaggcagcatcgaccgttgggggattgggcacgatggaggcatgctcatgctggtgcccttcctgctgcggcaccacaaggtctggcggaagtgcaagatgcgtatcttcactgtggcccagatggttgacatgcatgccatgag

SEQ ID NO: 66849 - DNA, 431 bp, Homo sapiens
tttcgtaatggctgctgacatttctgaatccagcggggctgactgcttaggagacccaaggaacagtgccaagttagatgccgattacccacttcgagtcctttattgtggaggcaagtgttggtagccacagaatgacttttactcactatacttttatgcattgtaataacagtttgacatttggtaagctttcttccccatccttttcatttggtgagtttgtactgggggagaggagtcctggggaggaggaggcatgaattaacagagtttccccacctgggtgatttgtgtctggctactctgcctgaagaagcttacagtccatttgtaacaggatgtgcaactaggttatttcagcctgaaggtcctcaaggtgtatgctagtctagctgtcaaaggagggcttcttggaagattatgagtta

SEQ ID NO: 66850 - DNA, 1992 bp, Homo sapiens
ttttttataaaaccttaaatgtaatctttaatgaaaagatataagcattataaaagaaggggtcataatgagtgatgtggagatggctacatatactttcttaagaatgccacatcttttatcatacagatttcaaatgctttttggctacataagtactttaaaagaattgagctacatcaattaaataacaaatataattagttcttcatcatcacaataagataacaatgattaaaatgttttacctcatatggtgaaaatactaatcttttcattcacaaatttgtaggcaaatgtgtaattaccaaacaacgtatagtacagaaacaagaaaaatattgtaagtctagttatgatagttttttctaatagacaaaattgtcaacaatttattataaaaaacctatacaattaatacttgatcaaaagtctttaaaaatatattcataatgaaatgtatagaaagagacatttcaaagtcatagcagttactactattacaatatttaatcatttttacaataggtctgctggtctatttcaattaaattcattctcagaaccatcacatatcttgctgaatttcatttaaagcaaaagcaagttgcttaatttttgcttccattgtttttatgttcttgcatgtttcttccaaaagttcacgcatttctttttcaatttgatggacctttaaatttgcagaatcaatacacttctgcttttcattggccagctgtgctatttcagcttgatgagcttcaacaattgcatcaacttgtcttttaaaggcatcatccatactatgaagtttttccattgcattcttttgtagttcaatacttttgtctctttccgctttaagtttcttttccttgttttcaaatttttctttcacttcttttacttgtgtttcaagatgacatagaagttctcctttatcatgccacttccgattcagtgtactgtaagcttttctgatttcttcaagttctacttcctttcctttcaactgttgttttagtttttcttttctttcattgtgcctttccaacttctcaagtacctcatccagttgtgaagatttttcatcaagttgttcttgagtgcatttttctatttctgtgatcttttcttgtaatcttttgatgtgttcatctttttcttgtaaacaatcttttaattttctaatagtttcagtttggtcgtctatgattttgcactttattcttaatgcatcactatcactttcatttgtctttcgcagacattcattctctctagataaactctcaatttgagcctccaattttccacgattttgggctagagaagatccttgttgtgccagctcatgtccccatacttttctttctgtccttaaaccaaatattagtgattccttggctgctagctcagaaataagctggactttttcgtgcttgagaagttctatttgaatactcttctgcttgtcatcttcaattaaaatttcaagggtgttgatttgattctgtaaatttgctgctgtttcttgtttcaatttagaaacttctgccagttttgttttttgttcctttaccatacaggtcagatctttaattaaagaggaagactcattttcttttcgttgagcccaaataagagcatgtttgctctttgctaactcagttgcaacattttcaaaaccatctttaacatcttgaaatcttctggcttcaacagttaaagcaatacggaattcattttctaaatccatatactgctggcttaacacgtcaattttctcttggtattcttttatcatttgctcatgctttttctcttctttggctatttctttagctaaggcatcctggaagtcagcatcagtaaaaaactcccttgtttcaagttccttcctgtgttcctgttctttcaatgcaagaagttgatgaagttgttgcgcttgttctctttctcgatgaagggaagttctaagtaagtatattt

SEQ ID NO: 66851 - DNA, 1013 bp, Homo sapiens
  misc_feature (1)...(1013): n = a,t,c or g
tgggcggggtccctcagggggcccagcctccaagcctcagcctccattcagggagtagtggagtcctggagccaggcggagcagaggtgggcccactggtgctagaatccagtggtgtaaacctagtgaaaaactcattttgttaatgcagatgcattaaacttggattggaaactgtctctactaaaattacaaaaagagtatttaagtggtgcagattaaatataagcaagattgtggagatatttaaaacacgaaattaaaaatataatagatgcactgttgcaaattactatttgaattatagatcattttcctattgcctagaaacaatacatagctaaaattccctaactacttttacgacacatatttagaaggttttaaaaatgtctgtagtcccagctattcggcagggcaaggcaggagaatcacttgagcccaggagttttagaccagcctgggcaacatagtgagggcccatctctaaaaaaaacaaaaaaaaagaaaacttcggaaatgtttcttgaactaacttaaaagccgccttgcacttctcactttgaattagtttgaattaatttacaaactgcaatatattttaaaggagcttattgtagaaaataagttgataaaaaaataaggatatatctttagggatttgtctttagggacttgttaccaagcatgtctattttccctcctgcagcttctccaaacaggctggtgtacagggagcaacaccggagctggtgcacgctggggtttgtgcagagcatcgctctcacgctgcaggtgtgcggcgccctcagctccctgcagtggatcacgctgctcatgaaggtcgtggaagggcacgcacccttcactgccacctcgctgcagaggcaggtaatgtgctgccaggcaaaaccagttccctgagagaggcctccatgtactgaagttccctgccctcagagtcaggggcctttattcantaacgagtgcagaaagggtctagaagtgacagg

SEQ ID NO: 66852 - DNA, 389 bp, Homo sapiens
  misc_feature (1)...(389): n = a,t,c or g
atagaggttgtcagtgattagactaagatgaattgtcattcattgataaataatacagaactatcagtctttcctaggagtatggggagttttgnnnnnnnnnnnaaagtctcttttttgcaggtatataaaaggaaaactgaggctgccaaaaaagagtatctgaaggcactggctgcttacaaaaacaaccaggagtgtcaggtaagagggataggatagaatgaatatttaaaccagtaagaagttttttggaagtgtttgttagcagttttaaaaagtaaataccaccaagggattgattaattgatagattgatttatgtcttcttttaggccactgtggaaacaggggaattggatccagcaccaccatcacaaactccttct

SEQ ID NO: 66853 - DNA, 1979 bp, Homo sapiens
gcggccgcctcgtgaccacctccaatgccatccctcctgctgtggtagcaactgtctcagccaccagagctcagtctccagtcatcactacgacagcggcgcatgctactgattcagcacttagtaggccaaccttgtctatccagcatcctccatctgcagcaatcagtattcagcgtcctgcccagtcacgagatgtcacaacaagaatcacactaccatctcaccctgcattagggacgccaaaacagcagcttcatacaatggctcagaaaacaatcttcagtactggcacgccagtggctgcagccacagtagcacctattttggcaaccaacaccattccttcagcgaccacagctggatctgtgtcacacacgcaagctcccacaagtaccattgttaccatgacagtaccctcccattcctcccatgctactgctgtgaccacctcaaacatcccagtcgccaaggtggtgccccagcagatcacgcacacttctcctcggatccagccagactaccctgccgagaggagtagcctgattcccatctccggacatcgggcctctcccaatcctgtggccatggaaacccgaagtgacaacagaccgtctgttcccgttcagttccaatattttttgccaacttaccccccttctgcatacccactggcggcacatacctacaccccaatcaccagttccgtgtccactatccgacagtatccagtttcagctcaggctccaaactctgccatcacagctcagactggtgttggggtagcgtctaccgtccacctaaaccccatgcagttgatgacagtggatgcatcgcatgctcgacatattcaagggatccagccagcacccatcagtacccagggtatccagccggcccccattgggaccccagggatacagcctgcaccacttggcacacagggaattcactcagcaaccccaatcaacacacaagggcttcagcctgcacctatgggtactcagcagcctcagcctgaaggaaagacttcagcagtggtgttggcagatggagccacaattgtggccaaccctattagcaatccattcagtgctgctccagcagcaacaaccgtggtgcagacccacagccagagtgctagcaccaacgctcccgcccagggctcatcgccacggccaagcatactccggaagaaacctgccacagatggaatggcagttcggaaaaccctcattcctcctcagcctcctgatgttgctagtcctcgagtggaaagctctatgcggagtacgtctgggtcacctaggcctgcaggtgccaaacccaagtctgaaatccacgtgtctatggccactccggtcactgtgtccatggagactgtatccaatcaaaataatgatcagcctaccattgccgtccctccaactgcccagcagcccccaccgaccattccaactatgattgcagcagccagtcccccgtcacaaccagccgttgccctttcaaccattcctggagcggtccccatcactccacccatcaccaccattgcagctgcaccacctccatcagtcactgtgggtggcagtctttcctccgtcttgggccctcccgttcctgaaattaaagtgaaagaagaagtagaaccaatggatatcatgaggccagtttctgcagttcctccactggctaccaacactgtgtctccatctcttgcattgctggcaaacaacttgtccatgcctacaagtgacctaccacctggtgcctccccaaggaaaaagcctcgaaagcaacagcatgtgatctcaacagaagaaggtgacatgatggagacaaacagcactgatgatgagaagtccactgccaagagtcttctggtgaaggctgagaagcgcaagtctcctcccaaggagtatattgatgaggaaggtgtgagatatgtcccagtgcgtccaagaccccccattactttg

SEQ ID NO: 66854 - DNA, 650 bp, Homo sapiens
attacgaattcaatgtccgtacccgtacaacggcttaactggcaaaacactggcgggacccaacttaagggccttgcgagagacactgcgcatcagcagaaatctcactgcaatccattaaactttggtatttaaaacttaatcaccttccaaatgctagcacttccattttttctcctctctaaaactttacacaagttacacttgattattttaaggaaccttgctaatgagtagatttcattctaagaaaaagaaaggtgtatctacccgagacaaaacacccttgcgaatgtgacagtgtaacacaagcaattaggaaacgttactaaatgtcaggagagtacattgtactgtgctgctgtgtgctgctcgctccttctaggaagaagacaggtatgcctctagagtccccgctggaaaggctgaaaacgggcgtccccttacctgctgttgacctgatggtggaggtgatgtcagagggtgtcatcatgggaatacattcgtcatcttgggagtagccggcttgaatggctcgaaggtagctgtgactccttgttcggaaacatcccgggaggtcgagggcatccatggcgtgatattcaagttccattaagatgggctcgcccacggtcttgacttgtcccctt

SEQ ID NO: 66855 - DNA, 392 bp, Homo sapiens
  misc_feature (1)...(392): n = a,t,c or g
ttctatctgaggctactgtcttttttctgctttcaggagcatgagaagaggtgttggagcgttgactttaatttgatggatcctaaactcttggcttcaggttctgatgatgcaaaaggtactgtttgaatctctttctcagcacctccttctccctggccctcttaactgtaattcctttcatcggcagaaatacaaatatttactcaaactcatgtcagtcctttgtgattactgattattattattccccannnnnnnnnnnnnnnnnnnnnnnnnnnnnnnnnnnnnnnnnnnnnnnnnnnnnnnnnnnnnnnnnnnnnnnnnnnnnnnnnnnnnnnnnnnnnnnnnnnnnnnnnnnnnnnnnnnnnnnnnnnnnnnnnnnnnnnnnn

SEQ ID NO: 66856 - DNA, 972 bp, Homo sapiens
ggttttgccttaggttgaagctttctaacgaggagatccggcaggccatcttgaagatggatgagcaggaggaccttgctaaggacatgctggagcaggtgaggaccctcgtgggaaggaaggggaactgaacccagcgggcagccacgccccttcccaacagcccccaggaggctgcgattcttgggtcaaggagaaatcaggctggaagagttagggagaaggtttatagaagcctccctgggccggcctttcttggggaaagctggaaaaggctaagtgttctccaggagtcattctcccatctgactccaaggcaaagtcagatgaggaaaagtgacatcttccccaaatctcttccctctcagttttttggatcctttgggaaaccagttgcttgtgtgacttgcgcctgctctttgcagctcctcaagttcatcccagagaagagtgacattgacctccttgtctacaggattgaccactaccagcagcgactgcaagccctcttcttcaagaagaaattccaggagcggctggctgaggcaaagcccaaagtggaaggtagggctgagggttgcaggaggcttagagtggagagttatctgatcatgatcctggagaagcattttcctgatattctaaacatgccttcagagctgcaacatcttccagaagccgccaaagtcaagtgagggttctctccaagacttccttctccccatgatgaccctcattcttgtcttactttcctcttttggggtctactctgggcttgatgatggctggtgtgagacctcggttcttgtcttctgagttcaaaagaatttaaacagacacacagcaaagggggtttagcatagaacaatgtattgcaaaagaagatatcttgtgagttaggtgcagaatagacagtacaccctgagagagagaggattcagggtgggctgcttgtaaggaattacaccgcac

SEQ ID NO: 66857 - DNA, 683 bp, Homo sapiens
gcggtggaattcccctaggcactgactacgtgcacaagtttgtgggcaaagagccaagtggcctgcgctacaacaagctctccctcaatgaggaaggaatcccccataaccccatggtcaatgctggtgccattgttgtcagctccctgatcaagatggactgtaacaaagcagagaagtttgattttgtaagttcccttgctacttagcccctggctgcatttcgccatggcatgctgtcctctccagctgccccagtggctctctaaccccactaccaggtgcaccagcccatactagaagccttatttccagaaatgtggaaatctgctggcctcaagagaggaaagcctcttgacaagacctgagttcagaagggctagtcaacctgtgaggtattaatagagcttcttaaccaagtggagcctcaatgtccctttttctcttccaggtgttgcagtatctcaacaaaatggctgggaatgaatacatgggtttcagcaatgccacgtaagtccctactcagaggactgactgaaagcattgtggtgtatgtgtgtgtacttaggatggggacaagaggaatgggggagagagaatcttaggaggaagaaatcccaggggaactttggccctccagcttcctctgagtcccttcataaacatttgtttatcttgtaaaa

SEQ ID NO: 66858 - DNA, 561 bp, Homo sapiens
  misc_feature (1)...(561): n = a,t,c or g
ccgcccacgcgtccgcccacgcgtccgcccaaaccaacaaaacccttcacctaaaacccgaagctacccagacctcagaattttggatgtctattaagttggcggtccccagcagnnnnnnnnnnnnnnnnnnnnnnnnnnnnnnnnnatcctgaagcatttcatcaaagaattgtaacaggagatgaaacatggcttcaccagtatgatcctgaagaaaaagcacaatcaaagcagtggctatcaagaggaggaagtcaaagcaaagcagaccagtcaagagcaaaggttggagtggctctggtgacaactcactctgttctcatggtcacaaatccctgctcactgctgccactgctgctgccaccacagaccaagagctccacttgcacagtgctgctggctaagaagaagttgctgtacctgagcactggaccacatggactcacagagactcccaaccaggtaaaggggtgatatggcttgtggatgtcaaccatattctcttcttgatcacctcgctgctggaacaatgggccatggtcagagtagagtggtcat

SEQ ID NO: 66859 - DNA, 471 bp, Homo sapiens
cagctgcaggctttgtggtctttcagggaaataagagaatccatttgataaaatggccagatgtctgcaaattgaagtttgaagggaagacattttatgtgattggcacccagaaggagaaaaaagccatgttggcattccatacttcaacaccagctgcctgcaaacatctttggaagtgtggagtggaaaaccaggccttttataagtatgcaaaatccagtcagatcaagactgtatcaagcagcaagatattttttaaaggaagtagatttcgatatagtgggaaagttgccaaagaggtggtggaggccagttccaagatccagagggagcctcctgaggtgcacagagccaacattactcagagccgcagttcccactcctttgaacaaacagctcatcattaacatggaacccctgcagcccctgctttcttcccccagcgagcaagaagaagaaacttctctg

SEQ ID NO: 66860 - DNA, 615 bp, Homo sapiens
gggtgacaccgccatgatttccacaagcacctctgaagggtgtgaagcagtcatgattggtgctgtcctccaggatgaagatcggctcaccatcacaagagtagaagacttgagcgatgctgccatcatctccaccagcacagcagaatgtatgccaatttccgccagcattgacagacatgaagagaatcagctgactgcagacaacccagaagggaacggtgacctgtcagccacagaagtgagcaagcacaaggtccccatgcccagcctaattgctgagaataactgtcggtgtcctgggccagtcaggggaggcaaagaaccgggtcccgtgttggcagtgagcaccgaggaggggcacaacgggccatcagtccacaagccctctgcagggcaaggccatccaagtgctgtttgtgcggaaaaagaagagaagcatggcaaggagtgccccgaaataggaccatttgcaggaagaggacagaaagagagcactttacacctcataaatgcagaagagaagaatgtattgttgaactcccttcagaaagaagataagagcccagagacagggacagcagggggcagtatcacagcaagttattcagcagg

SEQ ID NO: 66861 - DNA, 444 bp, Homo sapiens
aacagaacgaaattcgttcgctcttacctgaagccagtgagccgattgatcaagctgcacaagaagatgaagccattccccaggacgaactggatgacaaaatcgccggtgaagcgggcgtgcatgaatatgttgtttccactggcgatacgctaagcagcattctcaatcagtatggtattgatatgggtgatatcacccaactggctgcggccgacaaagaattgcgtaacctgaaaatcggtcaacaactctcctggacattaaccgcggacggcgaactgcagcgcctcacctgggaagtgtctcgtcgtgaaacccgaacctatgaccgtactgccgctaacggttttaaaatgaccagcgaaatgcagcaaggagagtgggttaacaatctgctgaaaggtaccgtcgggggaagctttgttgccagcgccagaaacg

SEQ ID NO: 66862 - DNA, 996 bp, Homo sapiens
  misc_feature (1)...(996): n = a,t,c or g
gcggccgcgggtcggcctcaccgttgtgcaggagcacgaagcggcgctgggacagcagaggcaacatcttctggccgcgcaggctcttccggaaggtctcgagcaccaggtccagggtctcgatgaccacacctgggatgacctccttcaggacctcgcagttggtgtgcagggctgggttagaattcatctccagcagccataccttgaagttgtcatcaatcaggaagtcacagccaatgaggtcaaagtaacccagcttgcagtccagcttgggcttggcggccagaaagcagtgggccatgatctgctgcatccgcttcttgagggtggtgaagacccagtccttggcgaggccccgggccttccagaacgtgtcactgatgtagcggttgaggtgttccatgctccacaccgtgtgctccttcagcagcatgtacagagggctcttcttctgcatgaactggttggtcaagtggccgccgaggtcgctggaatgggggtcgtaaaggctaagggtgaggcgagcatagccgtggccaaagaagatcatgtagggtgtggtgcaggcaatgagcaggtaggagcgcacgtcaaactttctcccgtccaccagcagcgggttctggatgtacctctgcaccacccgcgcctgaggcccccggaacggcgtcttgtggtggatggggtcgtcctccatgctccgggtcttggcctgcagggcggcaacttcctcctggttccggagcaggaagatgcctttgccctggttggaggctgtgggcttgcagatccatatctgggtttcatcaaacaaggtgaaaaaggcctctctctcgtgtttgaggtccaggcggtaggtctctgggaaaaactcttccattctcaggaccctgcagggcagggaggcaggaggatgagctgctgtcccttcgcccctggctgggtgggcggtttggagttccnccgcactgcctacgatctcgattnggcccc

SEQ ID NO: 66863 - DNA, 660 bp, Homo sapiens
  misc_feature (1)...(660): n = a,t,c or g
ggatcagagtatggaggagaatcaggacttaaagaaggaactgctgaaatgtaaacaagaagccagaaacttacaggggataaaggatgccttgcagcagagattgactcagcaggacacatctgttcttcagctcaaacaagagctactgagggcaaatatggacaaagatgagctgcacaaccagaatgtggatctgcagaggaagctagatgagaggaaccggctcttgggagaatataaaaaagagctggggcagaaggatcgccttcttcagcagcaccaggccaagttagaagaagcactccggaaactctctgatgtcagttaccaccaggtggatctagagcgagagctagaacacaaagatgtcctcttggctcactgtatgaaaagagaggcagatgaggcgaccaactacaacagtcacaactctcaaagcaatggttttctccttccaacggcaggaaaaggagctacttcagtcagcaacagagggaccagcgacctgcagcttgttcgagatgctctccgcagcctgcgcaacagcttcagtggccacgatcctcagcaccacactattgacagcttggagcagggcatttctagcctcatggagcgcctgcatgttatggagacgcanaagaaaaaaaaaaaaag

SEQ ID NO: 66864 - DNA, 1839 bp, Homo sapiens
  misc_feature (1)...(1839): n = a,t,c or g
ggaattcctgtgctcatggcctgcatgacgctgctgcccacctggttgggaggcgctcccccaggccctcccggccccgacatctcctcgccctgcggctcctataacccccactcccagggcctggtcacctttgccacccagctcttcaacttgctctcgggtgagggttacctggaatggtcccctctcttctatggcttctacccgccccgcccacgcctggcggtcacctacctgtgctgggcctttgccgttggcctcatctgcctcctgctcatcctgcatcgctcggtgtctgggctgaagcagacactgctggcggagtccgaggctctgaccagctacagccaccgggtgttctcggcctgggacttcggtctctgcggggacgtccacgtgcggctgcgccagcgcatcatcttgtacgaattaaaggtggagctggaggagacagtggtgcggcgccaggctgcggtgcggacgctgggccagcaagccagggtttggttggtgcgggtgctgctcaacctgctggtggtcgcgctcctgggggcagccttctatggcgtctactgggctacggggtgcaccgtggagctgcaggagatgccccttgtccaggagttgccactgctgaagcttggggtgaattaccttccgtccatcttcatcgctggggtcaattttgtgctgccgcccgtgttcaagctcattgctccactggagggctacactcggagtcgccagatcgtttttatcctgctcaggaccgtgtttcttcgcctcgcctccctggtggtcctgctcttctctctctggaatcagatcacttgtgggggcgactccgaggctgaggactgcaaaaccngtggctacaattacaaacaacttccgtgctgggagactgtcctgggccaggaaatgtacaaacttctgctctttgatctgctgactgtcttggcagtcgcgctgctcatccagtttcctagaaagctcctctgtggcctctgtcctggggcgctgggtcgtctggcggggacccaagagttccaggtgcccgacgaggtgctggggctcatctacgcgcagacggtggtctgggtggggagttttttctgccctttactgcccctgcttaacacggtcaagttcctgctgcttttctacctgaagaagcttaccctcttctccacctgctccccggctgcccgcaccttccgggcctccgcggcgaatttctttttccccttggtccttctcctgggtctggccatctccagcgttcccctgctttacagcatcttcctgatcccgccttctaagctttgtggtccattccgggggcagtcgtccatctgggcccagatccctgagtctatttccagcctccctgagaccacccagaatttcctcttcttcctggggacccaggcttttgctgtgccccttctgctgatctccagcatcctgatggcgtacactgtgggctctggctaactcctacggacgcctcatctctgagctcaaacgtcagagacagaacggaaggcgcaggaataaagtcttccgtggcacggcgcgctgtggcgctgacctccaccaaaccggctctttgacccccgcagcccacgtcccgctttcagaccccaggccccattgtaagcctaggtcacaacaatctgtaaactaggagaactggagaagactccacgcccttccagctttggtatctggagatttccagggcccctcgccgccacgtccctgactctcgggtgatcttccttgtatcaataaatacagccgaggttgctgagcgcgctttgaaaaaaaaaa

SEQ ID NO: 66865 - DNA, 466 bp, Homo sapiens
aatcgagatccatagtcagtgcggtggaattcctcacaggaaattaggaatggctggccagaagttgggctcctccgctctcctgtgctacatccgccctgacactgccgatccagcaagtagctttagcttgactgtagccaatgttggcacgtgccaagcagtcctgtgccgaggtgggaagccagtgcccctctctaaagtcttcagcctggagcaggacccagaggaggctcaaagggtgaaggaccaaaaagccatcatcacagaggttccggaagatctcaaagagttccagaccacagatattccggtgcatcactgtaacttcccggctgttctcggctgcctttgtagcgcttctgttctcggtagctacgcagggccagcaccacgctggcgccgtacatgatcacgagaagacaagcaaaggtggctgctgctccgtcggtgcctgccagctggg

SEQ ID NO: 66866 - DNA, 465 bp, Homo sapiens
  misc_feature (1)...(465): n = a,t,c or g
tgggggannnnaattgagatcgatgatccctagtccgtgtggtggaattccatagcccctgtccctccatcccctgaccctgttttatttgtctgtggagcactccccactacccaattttacattaagtatatttacctattgattttctgcctcctttcagcccttgcgatgagtaccctgtctgttttactcagccttatatctctagtgctggaacagtgcctgacacacagtacgtgcacaataaatacatgcatcatgtgtgatgaattagactgaatcaggttctgagaagtcaagagaacctaacccaaaaggagatcaaaggaagcaacccttacatcctcagactcgaagacgtggcagatcatcttgtactgccttttcccatcctgggatgggngggacgcttccacgttctcctgggagttggagcgaggcatccgccggcgggccatcaan

SEQ ID NO: 66867 - DNA, 452 bp, Homo sapiens
ttagcccagtgcggtggaattcgggcgccgggctgagagctgagaatgtacttacgatgacttgtttcctttggttctttcttgtattaattcacccttggggttcacggtgaatattctacagtctggaactccaacttgtgtgtaggcatagacatcctgcagaagaaaatagcaagcgggtgattccagggaggagaattcaggagatacttctcaggctccttgtgagccagaagcactgcacagacagactcgacagaaaacatgcggaggcggcacagtgcagttgccaccaaaactgagctttagacaaacctaaactacagagtggtgcttggagagtcagaaaacttgggcagccaccaaggggaagccagggtccctggcgcagaagaggccagagaggccacatcttctgcacacctgaggcccgatggccctgcagaagt

SEQ ID NO: 66868 - DNA, 1641 bp, Homo sapiens
gcggccgctgctcactgacctctaccaggccaccatggcgttgggctattggcgcgcgggccgggcgcgggacgccgccgagttcgagctcttcttccgccgctgcccgttcggcggcgccttcgccttggccgccggcttgcgcgactgtgtgcgcttcctgcgcgccttccgcctgcgggacgccgacgtgcagttcctggcctcggtgctgcccccagacacggatcctgcgttcttcgagcaccttcgggccctcgactgctccgaggtgacggtgcgagccctgcccgagggctccctcgccttccccggagtgccgctcctgcaggtgtccgggccgctcctggtggtgcagctgctggagacaccgctgctctgcctggtcagctacgccagcctggtggccaccaacgcagcgcggcttcgcttgatcgcagggccagagaagcggctgctagagatgggcctgaggcgggctcagggccccgatgggggcctgacagcctccacctacagctacctgggcggcttcgacagcagcagcaacgtgctagcgggccagctgcgaggtgtgccggaggccgggaccctggcccactccttcgtcacttccttttcaggcagcgaggtgccccctgacccgatgttggcgccagcagctggtgagggccctggggtggacctggcggccaaagcccaggtgtggctggagcaggtgtgtgcccacctggggctgggggtgcaggagccgcatccaggcgagcgggcagcctttgtggcctatgccttggcttttccccgggccttccagggcctcctggacacctacagcgtgtggaggagtggtctccccaacttcctagcagtcgccctggccctgggagagctgggctaccgggcagtgggcgtgaggctggacagtggtgacctgctacagcaggctcaggagatccgcaaggtcttccgagctgctgcagcccagttccaggtgccctggctggagtcagtcctcatcgtagtcagcaacaacattgacgaggaggcgctggcccgactggcccaggagggcagtgaggtgaatgtcattggcattggcaccagtgtggtcacctgcccccaacagccttccctgggtggcgtctataagctggtggccgtggggggccagccacgaatgaagctgaccgaggaccccgagaagcagacgttgcctgggagcaaggctgctttccggctcctgggctctgacgggtctccactcatggacatgctgcagttagcagaagagccagtgccacaggctgggcaggagctgagggtgtggcctccaggggcccaggagccctgcaccgtgaggccagcccaggtggagccactactgcggctctgcctccagcagggacagctgtgtgagccgctcccatccctggcagagtctagagccttggcccagctgtccctgagccgactcagccctgagcacaggcggctgcggagccctgcacagtaccaggtggtgctgtccgagaggctgcaggccctggtgaacagtctgtgtgcggggcagtccccctgagactcggagcggggctgactggaaacaacacgaatcactcacttttccccacaaaaaaaaaa

SEQ ID NO: 66869 - DNA, 1279 bp, Homo sapiens
aatagtcgaccgttgtggaattccactgaaagaagctgagagcctacaagttgcagtgaaggcttcacagatgggcgccgtgagtcaatcatgtgaggacagttgtggagactctgtcttggcggacacactcagttctcatgatgtaccaggatcaccgactgcctcattagtcacaggagggagagaaggaagaggctgttcggatgtggatcccgggatccagggtgtggtaaccgacttggccgtctctgatgcaggggagaaggtggaatgtagaaattttccaggttcttcacaatcagagattatacaagccatacagaatttaacccgtctcttatacagccttcaggccgccttgaccattcaggacagccacattgagatccacaggctggttctccagcagcaggagggcctgtctctcggccactctatcctccgaggcggccccttgcaggaccagaagtctcgcgacgcggacaggcagcatgaggagctggccaatgtgcaccagcttcagcaccagctccagcaggagcagcggcgctggctgcgcaggtgtgagcagcagcagcgggcgcaggcgaccagggagagctggctgcaggagcgggagcgggagtgccagtcgcaggaggagctgctgctgcggagccggggcgagctggacctccagctccaggagtaccagcacagcctggagcggctgagggagggccagcgcctggtggagagggagcaggcgaggatgcgggcccagcagagcctgctgggccactggaagcacggccggcagaggagcctgcccgcggtgctccttccgggtggccccgaggtaatggaacttaatcgatctgagagtttatgtcatgaaaactcattcttcatcaatgaagctttagtacaaatgtcatttaacactttcaacaaactgaatccatcagttatccatcaggatgccacttaccctacaactcaatctcattctgacttggtgaggactagtgaacatcaagtagacctcaaggtggacccttctcagccttcgaatgtcagtcacaaactgtggacagccgctggttccggccatcagatacttcctttccatgaaagcagcaaggactcttgtaaaaatggtaattaacactttaaacatcatctgtatagtttgaacaagaagttgtccctctgaatggttggctcttgtgtagagtgaatcaaagtcctccctagcatgggaataaatcggtactgatgagctggaaaaaaaaaa

SEQ ID NO: 66870 - DNA, 425 bp, Homo sapiens
ggcggaattcaaaagcaatgcacaggtcttcctgtgacgggccgctactctctctgccctcagtgggacggtcagccacccatgccctggtccaggcccagctgatctgctcaggagccaggcggggcatgcacgcttttattgtgccaatccggagtcttcaggaccacaccccactgccaggtaagcccataatgctccctcaaggaaccctgccaggaggagagcccaggtggcctccctgacctggggccccagagggccacaggagtagctaagacatgtctcccttgggcagggagcggtccagttggacagacttggtgctaactggctaggtgaacttgagcaagatttagcatctttctgacctcagcttgttcacctgcaaaataggtacaataatcccagtgtcacaggctgct

SEQ ID NO: 66871 - DNA, 681 bp, Homo sapiens
caaccagattggatctggttcctcgcgtcttggaacggcagcagctattaaaggagatacaggcgctgctaagacttctgatgatatcagtttaagtgtgggccaaagttatagtctttgtaaggaaggaagtgaagaacaaggtaagagcgttatactttaccatgatgtcatatactgtggtgaccagagttaatttgtagaatatgctgcatacaatttggcagaagtttataacaatttaatatgatatttaaggaaacattaacataaaatgttatggtgatagtagtaatacagagttacacatgcttttagcttacttgaactcagttatacatgttctgccagataaacatggagagagaaattctatgagcatatgccccggagtgaatatgagatgggagataagaatctgctattcttttagttggtcagaccaactagcccagcttagggataacctagtatgtaaaactgttactttccattcagtacgatctctaaatgccagctgcttcatctcttgccaactgcaaaaacagcaataagttttgacatagtgtcttagtccatgtgcattgctataaagaaatacctgagattgggtgccttgtacttgggtgcttttttggaattacagtaccctatcattggttctttgcttctgtggactgg

SEQ ID NO: 66872 - DNA, 404 bp, Homo sapiens
ggacatggacatatcctggggggaacaaaaaatggagagattctggaaattgataagagtggcccaatgacactgcttgttcaggggcacatggaaggagaagtgtgggggttggcagctcaccctctcctgcccatctgtgcaacagtgagcgatgataaaacacttcgcatctgggaactatctgcccagcaccgtatgctggcagtacggaaactcaaaaaaggtggaagatgctgtgccttttcccctgatgggaaagccttatcggttggcttgaacgatgggagtttcctggtggtaaatgctgacactgttgaagacatggtctctttccatcacagaaaagaaatgatctctgatattaagttttcaaaagatacgggaaaataccttgccgtggc

SEQ ID NO: 66873 - DNA, 1352 bp, Homo sapiens
aaatgttgtcatttacaggaaaatttgaattctcatgttctgattctttctctgcaactttctaaagctgagagtaagttcagagtcctcgaaactgagctccattacacaggagaggctctgaaagaaaaggctttggtttttgaacacgtgcaaagtgagctaaagcaaaaacagagtcaaatgaaggacattgaaaaaatgtacaaaagtggatacaatacaatggaaaaatgcatagaaaaacaggaaagattttgtcaactaaaaaaacaaaatatgttgcttcaacagcaactggatgatgctcgcaacaaagctgacaatcaagaaaaagcaatacttaatattcaagccagatgtgatgctagagtacaaaaccttcaagctgagtgcagaaagcaccgtcttttactagaagaagacaataaaatgttggtcaatgaactgaatcattcgaaagaaaaagaatgccaatatgaaaaagagaaagcagaaagagaagtagctgtgagacagcttcaacaaaaacgagatgatgtcttaaacaaaggatcagcaacaaaagctctgctggatgcttcatcgcgtcactgcacctatttagaaaatgggatgcaggattcaaggaagaaattagaccagatgagaagtcaatttcaagaaatacaggatcaacttacagctactataagatgtactaaggagatggaaggcgacacacaaaagcttgaagtagaacatgtgatgatgagaaaaattattaaaaaacaggatgaccaaattgagcggcttgagaaaatcctgcagcattcaagtttgatgctgcaggtgtttgagagctagatgaaggtatgttgccaaaatttatgaattaaattcaaatcattgatttctgaaataaactctaagtagtgaacggtattccctctcaattgcttggttaataaatgctacattaaatattttttcttacacacatctagtgaaagatgtgaaaacataaacattcatagtgaagggtatacttatgctttgttaattcatcatgtttcatagctttaaaaaaatcgcaagaaatctgtgtatccctttttttctggccctacacttttcttctgccacccctatagaactgtcagcctgcacactgaaactgttctcagaaaacaaaggcatcatcaacttctcaaggttaaggtagtgatttaaggctaacagaccccacactcatgtgataataattagttaagcaattacaggtcacaagcagtcacttgtccagtgacattttaaatctctagtcatgactttgtcattggtttacttttgcccctgggaaaagttgaaaa

SEQ ID NO: 66874 - DNA, 325 bp, Homo sapiens
ttccagccatgaatgtcaatgactcagtcaccaaacagaaatttgacaacctctactgttgccgtgaatcaattcttgatgggtaatgtttattatctttgagatgaagttgtgatgtccagttgagattctaagttttttggctttggttatttctggaaaggattcatgtagcacctctggataatgtctccataaagccagagctttgtcacctcgtaaattaaaattacattatttttattttctcctttgtatcttttctatttctaaatattatattttcaaaatattatctaataaatgtatgttgcttttatgttta

SEQ ID NO: 66875 - DNA, 678 bp, Homo sapiens
aataccctgttatgtttttttaattcaaaaacctactgtgaaagatgctacatgcacatagtgtttgacagatagacagatgattgatgtgctggttttaaagggaggagggaggcatgaagcctgttggcactggtcgtccccgcctcaccttcatctcttccacagcactctcaagctcttctggtgacttgtactcaaaatcccgctccaaatattcttcctcggcctgggtcatccattcctgcatctctgccaagtctttcttcaggttcgcagctttttcttgactttcagacaacctacttttttgagtagcgatctccttgctaagtttctccagttgagtttggtagtcacctagtcttgtctgcacccaagtttttattccagcaactggaccacttcgaagattagtctctatttccttcatgtttttcagagatgattcaattgtttctatttcattaacaaatgcagagcactggtctaactgcctctgtagacctgcgtcgtctccttgggcagcctgctgtttcattaagaagtctttcacgccatccatccacttctcaatgactgttgaatcggcctcaaaagctctgagtgtgagagcaatttcctcaagcaaatgtagatctttggaaaccaagacctttagcttgttccactttcctt

SEQ ID NO: 66876 - DNA, 708 bp, Homo sapiens
cacctgtgtcacaaggctctcctgctagttctggaataggcagtccaatggcatcttcaacaataaccaaaatccacagcaaaagatttagagagtaagttttatactcattattgaggttgaatagtttaaggatcttgattgtagttctgaatttagtattgtcattgttactcagtgagtcaagcagacaaaagaccagagatctttaacgcctttcggattttgtttaacagctgggtttattatttaaagcattgccttctgtcagctgttagtattcacgtgagagtgatctgacagtaagtatattctctttatatcagatagtatttctattctagaaatctagactcttaatatcttatatattaaatgttgtactatcagttttcctcctacaaatgcttttgcttttttgtttatattattggcccttcaaaagatcactctaaccaattaataggtttctaagaccctattatatgaagtgaacctattacataaagctatttgtgcaagtatttctaagttcttaaattgagataactggggggatcacagaatatgataccccatctgtgaatagctttaacagttattgctgtgaaggattttaagattttaacatttatgttgatgaattaattttacctttaaaaatgacatatgaaagaatcccagggtgaaagtataatctatgtgagg

SEQ ID NO: 66877 - DNA, 2414 bp, Homo sapiens
ttctggtacaagtacacgtacatggaggaaatgttgggaaacgttgccggtgcccggcaggtgtttgagcgctggatggagtggcagcctgaggagcaagcctggcactcctacatcaactttgagctgagatacaaagaggtggatcgggcccgcaccatttatgagcgatttgtcctcgtgcaccctgatgttaagaactggatcaagtatgcccgctttgaagaaaaacatgcttattttgcccatgcacggaaagtgtatgagagagctgtggaattctttggagatgaacatatggatgagcacctttatgttgcctttgccaagtttgaagaaaatcagaaagagtttgaaagggtacgagtgatttacaagtatgccctggacagaatttcaaaacaagatgcccaagaactctttaaaaattataccatctttgagaagaagtttggtgataggcggggtattgaagatatcattgtgagcaaacggagattccagtacgaagaagaagtgaaggcgaatccacacaattatgatgcatggtttgattacttgcgcttggtagaaagtgacgcagaagctgaagccgtgagagaagtctatgaaagggccattgccaatgtcccacccattcaggagaagaggcactggaagcgctacatttatctttggatcaactatgcactctatgaagaattggaggcaaaggatcctgagaggacaagacaggtgtatcaagcctctttggaactaattcctcacaaaaagttcacatttgccaaaatgtggatactgtatgcacagtttgaaatacgacagaagaatctgtcattagccagaagagcattgggaacttccataggcaaatgtccaaagaacaaattatttaaagtttacatagaattggagctacagcttcgagaatttgacagatgccggaagctttatgaaaagttcctggaatttggacctgaaaattgtacctcatggattaaattcgctgaattagagacaatccttggtgatattgacagagcacgggcaatctatgaattagccatcagtcagccacgtttagacatgccagaggtgctttggaaatcatatattgattttgaaattgagcaggaagaaacagaaagaacacgaaacctttaccggcggttgcttcaacggacgcagcatgtcaaggtatggatcagctttgctcagtttgagttgtcttcaggaaaagaaggaagtttgactaaatgcagacaaatttatgaagaagctaacaaaaccatgcgaaactgtgaagaaaaggaagagagacttatgctgctggaatcttggcgaagttttgaagaagaatttggaacagcttcagataaggagagagtagacaaactcatgccagagaaagtcaagaagagaagaaaggtccagactgatgatgggtctgatgcaggctgggaagaatactttgattacatctttccagaagatgctgccaaccaacctaacctcaaactcctggccatggccaaactgtggaagaaacagcagcaggaaaaggaggatgctgagcaccatccagatgaggacgtcgatgagagtgaatcctgatctttttttcatagacaaatgttttgttatttttataaattaattgtttggaactcttgtgactcctggaagttcttatatatttcaccagtaagaaattgattggtatctttgatggctactttttaagttattttttaaatgctcttgggttagctaggggtagggattgcaagtaaaggacttttttaactgctggatttgtttttccaactgagtccaaacttttctaatgtctgtccacatcatgcattaggaaatgtaattaaggtaacattctacagttacttttcatgtcatacccataaagatagtttatgcattcatctgaaatgtgtaactttttcatgtcttcagagtcacagacttgagttcatttcccagctctgccactcatgattatataacttaattttcattttcctcattcacaaaatgggccaatagtttgacagctcattttgaagattacattataaaaggaatatacctggtgggtgcatagtaagtgctcagtaaattgtttgttctaagccacttttaaaaatggtttcattccttgtagaattgaatgcgagtggattaataatttaccttactttcttactagtgtccagttatattgttttttagaacaacacttggaaaataatttgcagtgattatatttctgaacaaggttcagaaaacattgtttactaagaatttagtctaataatttcagttaggcgctcatcagttctccagagtggttgagtttgtaataccttgtttaaagaataatggcttgttcacgtgtg

SEQ ID NO: 66878 - DNA, 1050 bp, Homo sapiens
gaactttttcatcttcttctcctgttacaagttctactttttcgggcatttgaactactggttcaaaatggatgtcatcgctgtcctcagtcttataggcatcatcatctttctcaaagtcaccggaagtgtttgctttattggccattttaccgcattgtgatgagaataatttttctccagcacctgaaaatcccttgaaattggggtcttttttgccaaactgaaatccttctcctgaagttgattttgcaacatctgcaaatgtaaaagtgctacttgtttggccaaaaatcacaccacggccattcttctggccactaatatcctgagcctggaagccagtatcattttcaagaggcttttcacttttcttttcttgatttcctggttccgaaatgccaaatttaaatccatcagcagacacagcgatggaaaatccttctttggttgacttaaattctgtattagaagaaccctttgtgggagtaacattagctgctggtctgagaagatactgggaattatatgctggtgactgactataatatactgaagggccagtagttgcaactgttagtggagccccatgaaatgtctgtgacccctgatatccatcaggcaccgagtctggtccataattctctgtgggccaacgatgacgggatgctgacttactgctatttagtttcgtaatggcctttacttcttggcaaatcattttccgtaaagaattcctgatccttctgcccccatcgaggtggtgttttgggagaatacctaaaaaaaaaaataaaaataacaaaagagcatttaaaacacttagaaacaatttcacaatgaaatgattcccattctttcctgtttaccttgtaacttttacttggtgatagtgaatatttggtaggagatggtgtagaatgttttatttctgaatctgcatttcgcaaagaaccatttttatagagaggacctccttcactatagtcttcgagttcctgcatgactgacttaagcatctcttttacagactccaggggcacaggcaac

SEQ ID NO: 66879 - DNA, 1302 bp, Homo sapiens
cgggcacattgtaccttgagaacctttgacgccacccttggcacgagggctgagtctgttacggaagttgagatttttggtaaagcaacttcaattgacccaaatacctacatcacttggattgataaataccaggcccagcttgtggttttgtcagcccagatagcctggtctgagaacgtggagaccgcactgagcagcatgggcggaggtggagatgccgcgcccttgcactctgtgctgagcaatgtggaggtcaccctcaatgtgttagcagactctgtcctcatggagcagcccccactccgaaggcggaagctagaacacttgattacagagttggttcaccagagagatgttacaaggtccttgatcaaaagcaagattgacaacgccaaatcttttgaatggctcagccagatgcgattttactttgaccctaagcaaactgatgtgttacagcagttgtcaattcaaatggcaaatgccaaatttaactatggctttgagtacctgggtgttcaggacaaactggtccagacccccctcactgaccgctgctatttgacaatgacacaagccttggaggccaggctggggggttccccatttggacctgctggaactgggaaaacagagtctgtcaaagctcttggccatcagcttggacggtttgttttagtttttaactgtgatgaaacctttgatttccaggcaatgggccggatctttgtgggcctttgccaggtgggtgcctggggctgctttgacgagttcaaccgcctggaggagcggatgctctcggctgtgtcccagcaggtgcagtgcatacaggaagcactgcgtgaacattccaaccccaactacgacaagacctctgcccccattacttgtgagctgctgaacaaacaagtcaaggtgagcccggacatggccatcttcatcaccatgaaccctggctacgcgggccggtctaaccttcctgacaacttgaagaagctgttccggagcttggccatgaccaagcccgaccggcagttaatcgcccaggtcatgctgtactcacagggtttccgcactgctgaagtgcttgccaacaaaatcgtcccgttttttaaactatgcgatgagcagctctcttcccaaagccattatgacttcggtcttcgggctttgaagagtgtgctggtgagtgcaggcaatgtgaagagagagagaatccagaagataaagagggagaaagaggaacgaggggaagcaatgactattttgtagtacacatgaagcacaaggggaaagaaa

SEQ ID NO: 66880 - DNA, 632 bp, Homo sapiens
ttccgggtcgacccacgcgtccgcccacgcgttcggtttgtggcttttttggccaaggagcagaaggaagattacttgcctgttctcagggtggtcagtgttaccatccatactgtgtcagtattaagatcactaaagtggttcttagcaaaggttggaggtgtcttgagtgcactgtgtgtgaggcctgtgggaaggcaactgacccaggaagactcctgctgtgtgatgactgtgacataagttatcacacctactgcctagaccctccattgcagacagttcccaaaggaggctggaagtgcaaatggtgtgtttggtgcagacactgtggagcaacatctgcaggtctaagatgtgaatggcagaacaattacacacagtgcgctccttgtgcaagcttatcttcctgtccagtctgctatcgaaactatagagaagaagatcttattctgcaatgtagacaatgtgatagatggatgcatgcagtttgtcagaacttaaatactgaggaagaagtggaaaatgtagcacacattggttttgattgtagcatgtgcagaccctatatgcctgcgtctaatgtgccttcctcagactgctgtgaatcttcacttgtagcacaaattgtc

SEQ ID NO: 66881 - DNA, 821 bp, Homo sapiens
ataattagtacatgccaaaattcatgattttccatttagagatgcacaagagtggttgatacaaagtaatagtacttacagtacacgggtatgggtacggcagaaaccacagaagtggtacacaaaagatcaaagcttaggaaacactgttgggcctttgattatgagaagctctgcagttgataacaagtttattttaaatggttgttgtctgaaattaaaacttttatatacatattttattctagatgattttttcccctctgtcactgtgctggtccggggaatgtctggaagacttgcttgggcacaacagctttgtcttttacccagaggagcaaaagcaaatcagaagctttttgtacctgaacctcgcccagttcctaaaaatgacgttggatttaaatattctgtgaaacatcggccatttcctgaagaggtggacaagattccttttgtgaaagcagatctcagcattccagatttgcatgaaatagtcactgaagaattagaagagagacacgaaaaattaaggagtggcatggcccagcagattgcttatgaaatacaccttgagcaacagagtgaggaggaattgcagaagagaagttttcctgacccagttacggattgcaagcccccgcctcctgcccaggaattccaaacagcccgcctttttctctcacactttggatttttgtccttagaagcactgaaggtaattttcatgaacttttatgaataaatatattcacaagttaacattcagctgacaatagctaaaatatttttatcaggatagaagcgaattaaaaaaaaaa

SEQ ID NO: 66882 - DNA, 608 bp, Homo sapiens
ctgcgggaccctcatcttgcaggcccgggcctatgtgggaccgcacgtcctggcagtggtgacccgcacagggttctgcacggcaaaagggggcctggtgagctccatcttgcacccccggcccatcaacttcaagttctataaacacagcatgaagtttgtggctgccctctctgtcctggctctcctcggcaccatctacagcatcttcatcctctaccgaaaccgggtgcctctgaatgagattgtaatccgggctctcgacctggtgaccgtggtggtgccacctgccctgcctgctgccatgactgtgtgcacgctctacgcccagagccgactgcggagacagggcattttctgcatccacccactgcgcatcaacctggggggcaagctgcagctggtgtgtttcgacaagacgggcaccctcactgaggacggcttagacgtgatgggggtggtgcccctgaaggggcaggcattcctgcccctggtcccagagcctcgccgcctgcctgtggggcccctgctccgagcactggccacctgccatgccctcagccggctccaggacacccccgtgggcgaccccatggacttgaagatgt

SEQ ID NO: 66883 - DNA, 749 bp, Homo sapiens
tacatcaactatcgcgacagcaagctcacccggctcctgaaggactctctgggaggaaacagccgcacagtgatgatcgctcacatcagtcctgcgagcagtgccttcgaggagtcccggaacaccctgacctacgccggccgggccaagaacattaagactagggtgaagcagaacctcctgaacgtctcctaccacatcgcccagtacaccagcatcatcgctgacctgcggggcgagatccagcgactcaagcgcaagattgatgagcagactgggcggggccaggcccggggccggcaggatcggggtgacatccgccacatccaagctgaggtccagctgcacagcgggcagggtgagaaggctggcatgggacagcttcgggagcagctcgccagcgccttccaggagcagatggatgtgcggaggcgcctgctggagctggagaaccgcgccatggaggtccagattgacacctcccgacacctgctcaccatcgccggctggaagcacgagaagtcccgccgggccctcaaatggcgggaggagcagcgaaaggagtgctacgctaaggacgacagcgagaaggactcagacacaggtgatgaccaaccagacatcctggagccacccgaggtggccgcagcccgggagagcattgcagccctggtggacgagcagaagcaactgcgcaagcagaaggtgtccagggtttggggggacaaggagagtgggtttaggggact

SEQ ID NO: 66884 - DNA, 729 bp, Homo sapiens
tgcttggcacgaggcaattttaaaaaagaaaaaagaatttcatagctgtgtgccctgtcatccccttcaggcaaatgaaagaaatctgtccacatgagggtgcctccctctttcaaggcaccctccccatcttgacccaagtcagtacagcttctcacaccctgtaccccatgtctgctgctcaccagttgcttgtgtgacttgcgcctgctctttgcagctcctcaagttcatcccagagaagagtgacattgacctcctggaggagcacaagcatgaaattgagcggatggcccgtgctgaccgcttcctctatgaaatgagcaggttgggccatgggcatggtggggattcaagcaggtggggttctggcaggtggggcaggtggggctctgccaagaggaaggggatggaggtgggcaggcttgagaggagactggagctggctccgggagctggggctggccaggataggggtgggatacctcaatatatggttcaccttgtctacaggattgaccactaccagcagcgactgcaagccctcttcttcaagaagaaattccaggagcggctggctgaggcaaagcccaaagtggaaggtagggctgagggttgcaggaggcttagagtgcagacttatctgagaaaggcagcgtggctgggagccagtgaataggggcagagggaaaccaaattcttattctcaacccaaaaacaaaaacaaaa

SEQ ID NO: 66885 - DNA, 858 bp, Homo sapiens
ctatctggtcactggccactgtggctttgtattcctctaacgtggctgccaaggctgcttttcctttctgctcagactcaataattcgctccatatggtgactgcgttctttgagtgcccctatcatttcttgagcttccttattgtcttgttctgccattttcaaagtattgcttaaatgctgctggacaccaagaagctgctcccgttcaaaacgggcattctcagcgaggtccatgtaacgttgctctaattccatatagcgcccactttttacatcttcatctatgacagattgaatacttccgctctcttctagatgagcatcacatttcttatgtcatagatgaagatgtaaaaagtgggcgctatatggaattagagcaacgttacatggacctcgctgagaatgcccgttttgaacgggagcagcttcttggtgtccagcagcatttaagcaatactttgaaaatggcagaacaagacaataaggaagctcaagaaatgataggggcactcaaagaacgcagtcaccatatggagcgaattattgagtctgagcagaaaggaaaagcagccttggcagccacgttagaggaatacaaagccacagtggccagtgaccagatagagatgaatcgcctgaaggctcagctggagaatgaaaagcagaaagtggcagagctgtattctatccataactctggagacaaatctgatattcaggacctcctggagagtgtcaggctggacaaagaaaaagcagagactttggctagtagcttgcaggaagatctggctcatacccgaaatgatgccaatcgattacaggatgccattgctaaaggtagaggatga

SEQ ID NO: 66886 - DNA, 569 bp, Homo sapiens
ccgacttctagcaaaaaccattactcttttttttcttttggcattactaaactctcagattgggttttccttgagttccctttagacaatccctcccaggttggaagtgttcctgtcacaatcaaagtcttagatgtgaatgacaatgctccagagttccccagattctatgaagcttttgtctgtgagaacgccaaggcaggacagctgatccagacagtgagtgcggtggaccaagatgacccacgcaatggtcagcatttctactacagcttggctcctgaggctgctaacaaccccaactttaccataagggacaaccaagataacacagcacggattctaaccaggaggtctggtttccggcagcaggagcagagtgtctttcacctgcctatcctgatagcagatagcgggcagcccgtgctgagcagcacaggcacactgaccatccaagtgtgcagctgtaatgacgacggccacgtcatgtcctgcagcccagaggcctacatgctcccagtcagtttgagccggggcgccctcattgccatcctcgcctgcatctttgg

SEQ ID NO: 66887 - DNA, 371 bp, Homo sapiens
caggaacatatcataaaaaagttaattaaagaaaataagaagcatcaggagctcttcgtagacatttgttcagaaaaagacaatttaagagaagaactaaagaaaagaacagaaactgagaagcagcatatgaacacaattaaacagttagaatcaagaatagaagaacttaataaagaagttaaagcttccagagatcaactaatagctcaagacgttacagctaaaaatgcagttcagcagttacacaaagagatggcccaacggatggaacaggccaacaagaaatgtgaagaggcacgccaagaaaaagaagcaatggtaatgaaatatgtaagaggtgagaaggaatctttagatcttcgaaagga

SEQ ID NO: 66888 - DNA, 800 bp, Homo sapiens
gttcaaaagagagcttttgggagacttccttttctttcttttctttttcttgttttgcttgttctcctggtttggggacatccattcggcaccttgcttgctcctctgagctgctttgaaccttgatgcatggcgacagcgcaccagaacggtgacgaagatcacaacaatgaccaccatggcaccggcgatgatggcaatcatgatggttagatagtcctcattttgatagggttggctactatcccctatgttcctgtccaacggggtctccatagtcctgcggatcaagtcatagatataggaggcatttccagcagtgtcgttaacataaaggaatacaagcacaagcgtgtgcaaagacttagggtaccccaggtcacttatgttgaccaccaaacgatgcaatcccacatcagtaggtgctggtttttcttccagagtaatgttacctgttactggatcaatccggaataagcctttattgtttccactcactatagtatactttagttcagcgttcattccagtgtcaacatccactgcaaaaacttctgctaccacggagccaggaatggctgagaggggcaccaacttaaaggaagtattagacggtggagaaatgacaactgggctgttgtcattgacatccatgacgttgatagttacttttgcagtagaggaacgaggtggttgtcctccatcagtggctttgacatcaaaagtgtaggaactctgctgctctctatcaaatgagacatttgactttatgactccagaatagggatccaacacaaaat

SEQ ID NO: 66889 - DNA, 399 bp, Homo sapiens
agcacgctaccgctttaccctcagcgccaggacgcaggtgggctctggggaagccgtcacagaggagtcaccagcacccccgaatgaagctactccaaccgcagctcctcccacattgcccccgactaccgtgggtgcgacgggcgctgtgagcagtaccgatgctactgccattgctgccaccaccgaagccacaacagtccccatcatcccaactgtcgcacctaccaccatggccaccaccaccaccgtcgccacaactactacaaccactgctgccgccaccaccaccacggagagtcctcccaccaccacctccgggactaagatacacgaatccgcccctgatgagcagtccatatggaacgtcacggtgctccccaacagtaaatgggccaa

SEQ ID NO: 66890 - DNA, 667 bp, Homo sapiens
  misc_feature (1)...(667): n = a,t,c or g
tacacttgaagagggagcacaaagaagaaattgaaaacctgcaggcacagtttgaacttcgggcatttcatatccggggcgagcatgcaatgataacagcgagactagaagaaaccattgaaaatctgaaacacgagctagaacacagatggcgagggggttgtgaagagaggaaagatgtgtgcatttccaccgatgatgactgccctccaaagaccttcagaaatgtgtgcgtccagacagacagagagaccttcctcaagccctgtgaaagtgaaagcaagacaaccagaagtaatcaattagtacccaaaaagctgaatatctcctctttaagccagctctcacccccaaatgaccacaaagacatccatgcagcactccagccaatggagggcatggcatcaaatcagcagaaggcattgcctccgcctcccgcatccatccctcccctgcccctcnnnnnnnnnnnnnnnnnnnnnnnnnnnnggggggggaaattaaaagaaaaaggattttttgtggggggttggcgcacaaagggtttttttattagtcatcaaaattgaaaacttgggggccggtttaaaaaacaggggagagggaaaaaagggggggggccccaaaattatcccttttcaaaaaaccccctttttcccccccgggg

SEQ ID NO: 66891 - DNA, 662 bp, Homo sapiens
ctgaagtcaacgcaagacgaaatcaaccaggcaaggagcaaactgtcccagctgcatgaaagccgccaggaggcccacaggagcctggagcagtatgaccaggtgctcgatggagcccatggtgccagcctgaccgacctggccaacctgagcgaaggcgtctccctggcagagaggggcagttttggagccatggatgatcctttcaaaaataaagccttgttatttagcaacaacacgcaagagttgcatccggatcctttccagacagaagaccccttcaaatctgacccatttaaaggagctgaccccttcaaaggcgacccgttccagaatgacccctttgcagaacagcagacaacttcaacagatccatttggaggggaccctttcaaagaaagtgacccattccgtggctctgccactgacgacttcttcaagaaacagacaaagaatgacccatttacctcggatccattcacgaaaaacccttccttaccttcgaagctcgacccctttgaatccagtgatcccttttcatcctccagtgtctcctcaaaaggatcagatccctttggaaccttagatcccttcggaagtgggtccttcaatagtgctgaaggctttgccgacttcagcactattgaaggtcgacgcggccg

SEQ ID NO: 66892 - DNA, 371 bp, Homo sapiens
  misc_feature (1)...(371): n = a,t,c or g
aactcccctagaccctcagggcccacactaaatgtgatgaaataggacgcaagccacatatttacttttgcattttacagtaaccatattttaaaaagtaaaacaaaagaagtgaaggtaattggaataatatcacagatttaaataaatctatccaaaataccaggtctacatgtataaactattttaacattaacacaatgctttctttttatattaaggcctcacaatctaatgtgtatctgacacttctcacacatctcagtatcatggcagcaccccatatgggaggccctcccatgatgccaatgatgggccctcctcctcctgggatgatgccagtgggacctgctcctggaatgangctcgca

SEQ ID NO: 66893 - DNA, 694 bp, Homo sapiens
atgtcctggatgcactggccaaggctctgggctttaaatatgagatttaccaagcccctgatggcaggtacggtcaccagctccataacacctcctggaacgggatgatcggggagctcatcagcaagagagcagacttggccatctctgccatcaccatcaccccagagagggagagcgttgtggacttcagcaagcggtacatggactattcagtggggattctaattaagaagcccgaggagaaaatcagcatcttctccctctttgctccatttgatttcgctgggtgggcctgcattgcagcagccatccctgtggttggtgtgctgatatttgtgttgaacaggatacaggctgtgagggctcagagtgctgcccagcccaggccgtcagcttctgccactctgcacagcgccatctggattgtctatggagccttcgtacagcaagggggcgaatcttccgtgaactccatggccatgcgcatcgtgatgggcagctggtggctcttcacgctcattgtgtgctcctcctacacagccaaccttgctgccttcctcacagtgtccaggatggacaaccccataaggactttccaggacctgtccaaacaagtggaaatgtcttatggcactgtccgggattctgctgtatatgagaacttccgagccaagggcaccaaccccctggg

SEQ ID NO: 66894 - DNA, 507 bp, Homo sapiens
atgcacatatgaatcggaataatagatacatgaaataatgggtgcagggggctcagtacacagtaggcctccgctgaataattgttgagactatacccgtgttaacacgttgttctctcgctatttagggaatgatcacattaatcttggccactgacatggcaagacatgcagaaattatggattctttcaaagagaaaatggagaattttgactacagcaacgaggagcacatgaccctggtgagtggcttattctgcctgggtgggcagccaggcggtgggctggcgaagcaggtcatccatccagctcacactggaagccaagaagctgaaattattagtcttcttggaacaaggtgtctataaatctggttttcaaggtcatgactcttactaggaaagtccgggcagggcctccctcctgatgggtcctccttcatggtcagaggcagcattctcccattcctccatctcttttgggattttgaaggagataagtgggtgg

SEQ ID NO: 66895 - DNA, 404 bp, Homo sapiens
ctgaaacatggcgccaatccaaaccttaaggatatctacggcaacactgctctccattatgctgtgtatagtgagagcacctcactggcagaaaaactgctttcccatggtgcacacattgaagcactggacaaggacagtaataccccacttttattcgctataatttgcaagaaagagaaaatggtggaatttttattgaaaaacaaagcaagtacacatgccgttgataggctgagatggtcagctctcatgcttgctgtatactatgactcaccaggtattgtcagtatccttcttaagcaaaatattgatgtcttcgctcaagacatgtgtggacgagatgcagaagattacgctatttctcatcatttgacaaaaattcaacaacaaattttggaact

SEQ ID NO: 66896 - DNA, 768 bp, Homo sapiens
gtggaattcgaagaagagtcctcctcagagaccaggatggtggtgacattcctcgtgtctgccctcgaatccatgtgtaaagaactggccaagtccaaggcagaagtggcctgcatcgcagtgtacgaaacagacgtgtttgtcgtcggaaccgagagaggatgcgcttttgttaatgccaggacggattttcagaaagattttgcaaaatactgcgttgcagagggactgtgtgaggtgaaacctccctgccctgtgaacgggatgcaggtccactcgggcgaaacggaaatactcaggaaggcagtggaggactatttctgcttttgttatggtaaagccttagggacaacagtgatggtgcctgttccctatgagaagatgctgcgagaccagtcggctgtggtagtgcaggggcttccggaaggcgttgcctttcaacaccctgagaattacgaccttgcaaccctgaaatggattttggagaacaaagcagggatttcattcatcataaataggtgacacactctgcacccccgccccttcagttcatttaaagatgaaaccaatagcctaattttaattcactcgtgcatcccgcctgctgcgtttcagagctgactgttcagatgtgtcatgcttttttcattggtccgtgctgggtaatggtgttgcttttcttgcagacccttcctaggaccagagagtcagctgggtaagtgacagcttctcaggtttggtggctcttctgagctgctgaaccacttc

SEQ ID NO: 66897 - DNA, 396 bp, Homo sapiens
atgctattgaaaccctcgacgatctcagaaaggagacgatgagtgtttctgacctgtggaatactctgtctagtttgaatagtaatttaaaaaaggatgaatttctagctgcattggaactagtgacagttgatgaaggtgacaaagtacaatttgaagaatttgcaaaagtagtaaggaatatgcgtgatgctgccaggttagaagagttacaggaagttgtcttagctgctgatttgctggaaggtgacatgatagctgggaagaacttggaagactttctaagaaatgttgggattaagtcacctaaagaagaggtagagaaaattcttcaatcagattttgtttctgaagataacatggtgaacattaaagactgtatgagggctttgaggg

SEQ ID NO: 66898 - DNA, 752 bp, Homo sapiens
cggacgcgtgggggatctggcaatagctcccaaccctcacttcgtgagggccacgacaaacctgtttttaatggagctggaaagcctcattccagcacctcttcaccaagtgtcccaaagacttctgctagcaggactcagaaatctgctgttgagcacaaagccaaaaaatctctgtcccatcctagccattccaggcctgggcccatggtcaccccacacaataaggctaagagtccaggtgtcaggcagccaggcagcagctctagctcagcccctgggcagcccagcacaggggttgctcgacccacagttagttctggccctgtgcctaggcgccagaatggcagctccagctcaggacctgagcgatcaatcagtgggtccaagaagccaaccaatgactcaaatccctctaggcggacagtcagtggtacatgtggccctggacaacctgcaagcagctcaggtggccctgggcgacccatcagtggttcagttagttctgcaagacccttgggcagctctcgtggccctggccggcctgtgagcagtccacatgaacttcgacgaccagtgagtggcttgggccccccggggcggtctgtcagtggccctgggagatccataagtggctcaattccagctggacggactgtcagtaattcagtcccaggaagaccagtgagcagcttgggacctgggcaaacagttagtagctcaggtcccactataaagcctaagtgcactgt

SEQ ID NO: 66899 - DNA, 1125 bp, Homo sapiens
gcggtggaattcagcagcgcaggcaagatgtattttgtgactgcagtattctagttgaagggaaggtcttcaaagcacatcgaaatgtattattcgctaggagcggctactttaaaatgcttctttctcagaattcaaaggagacgagtcagccaaccacagctacatttcaggctttctcccctgacacttttacagttatcttggacttcgtatattctggcaaactgtctcttactggtcagaatgtcatagaagtgatgtcggctgctagcttccttcagatgactgatgtcataagtgtatgtaagacttttattaaatcttccttagacattagtgagaaagaaaaagatcgctatttcagtctctcagataaagatgccaattctaatggtgtagaacgttcctctttttatagggggggctggcaagaaggaagcagttctccacgttctcacctaagcccagagcaaggaacaggtataataagtggaaaatcttggaataagtataattatcatccagcctcccagaagaatactcaacaacccttggccaagcatgaaccaaggaaagagtccattaaaaagaccaaacatttgagattgtcacagccttctgaagttactcattataagtcaagcaaacgagaagtacgaacatctgattcttccagccatgtttcccagtctgaagaacaagcacagattgatgctgaaatggactctactcctgttggctatcagtacggtcaaggatctgatgtcacatccaaaagctttccagatgatctgcctcggatgcgattcaagtgcccgtactgcacacatgtggtgaagcggaaggcagacctaaagcgccaccttcgttgtcatacaggagaaaggccctatccatgtcaagcttgtggaaaaagatttagcaggctagaccatctaagtagccattttcgaacaattcaccaggcatgtaaactcatctgcagaaaatgtaaacgtcatgtgacagatctaacagggcaagtggtacaggagggaaccaggcgctacagactgtgtaatgagtgtcttgcagaatttggcatagacagcctccccattgacttggaagctgaacaacatc

SEQ ID NO: 66900 - DNA, 582 bp, Homo sapiens
ttattattattttgcatagagacaagcactcactgtgttacccaggctggttttgaactcctgagcttaatcagttctcacctgctttgccctcccaaagtgctatgattacaggtgtgagccaccacgcttggccctgcccaggagtcatttttgtatctacaggtatcttcctatgctgtagacagatgccctttttcaaggcaaaaaccctagccatttttctcttctccttcagagtctgcaacatcctctcaactcatccaagtgactactgcctggtgctcttggggatgcagggaggcctgagaaggccaatgtctatacagaaagttctaacatagtgcactgagtcaatgtgggcactttaaagccctttcacctgccaagtcacgaagcacccctatagttgtgtttgtaaaatactggggggtttgaaggggaaaagggataactccaaggtaccatctttgcatttcagatccacacaacttaaagatctgctgtcgagtgaatggggaagtggtccagagcagcaacaccaaccagatggtattcaagacagaggacctgatagcctgg

SEQ ID NO: 66901 - DNA, 527 bp, Homo sapiens; identical to SEQ ID NO: 66770

SEQ ID NO: 66902 - DNA, 1239 bp, Homo sapiens
tgggaacgccgcctttgctggccagggcgtggtatatgagaccttccacatgagcgacctgccctcctacacgaccaatggtaccgtgcacgtcgtcgtcaacaaccagattggattcaccacagacccccgaatggcccgctcctcaccatacccgaccgacgtggcccgggtggtcaatgcgcctatcttccatgtgaatgccgatgacccagaggctgtgatatatgtgtgcagtgtggcagccgaatggagaaacactttcaacaaagatgttggcgcggacctggtctgttaccgccggcgtggccacaatgagatggacgagcccatgttcacccagccgctcatgtacaagcagatccacagacaggtgcctgtgctgaagaagtacgcagacaagctgattgccgagggcacagtcaccctgcaggagtttgaggaagaaattgccaaatacgaccggatctgtgaggaggcttatggcaggtccaaggataaaaagattctgcatataaagcactggttggactccccctggcctggcttcttcaacgtagatggggagcccaagagcatgacatgcccagccacggggatccctgaggacatgctcacccacatcggcagtgtggccagctctgtgcccctggaggactttaagatccacactggcctctctcgcattctgcggggccgtgcggacatgaccaaaaaccggacggtggactgggcgttggcagagtacatggcctttggctccctgctgaaggaaggcatccacgtgcggctcaacgggcaggatgtggagaggggcacattcagtcaccggcaccatgttctccatgaccaggaggttgaccgcaggacgtgtgtgcctatgaatcatctctggcctgaccaggccccgtacaccgtgtgcaacagctccctctcggagtacggagtcctgggctttgagctgggctatgccatggccagccccaatgccctggtcctctgggaggcccagtttggggacttccacaacacggcccagtgcatcatcgaccagttcatcagcaccggccaggccaagtgggtgcggcataatggcattgtgctgctgctgccccatggcatggaaggcatgggcccagagcactcgtcagcgaggcccgaaaggttcctgcagatgagcaatgatgactcggatgcctaccctgcattcaccaaggacttcgaggtgagccagctctg

SEQ ID NO: 66903 - DNA, 552 bp, Homo sapiens
ggaattcgaggctcagaaggagaagtgactcacacagggtcccacagccagaaaagacaacatgagctgggatgtcagctcccttcccggatacaccactgcccagcgggccaccgcaccccatggcactctcatgcctcagctccgtgattgccaccaagccagccacagagatacggggcccagtaaggaaggcctggtcccgcaggaacttgtcctcgagcagctgcaggcatccgtccagctcagccaaagtggccgccaacatctcgggtggcactgactcgcccaggaacacagggattattatctggtgggccgacaggcagagagaggggtcagggtctgcccaaagcccatcctggttcccaccatcatcctatcatcaccagtccttgggatttctgctcacctctgctcacttctttccactcatagccaccagtagctctcatctcctactcaaacagggacagcctcccccttctccctgggtcctcacacaaggcaaccagtgggatccttctgtaatctcaatctgcccgtaccctt

SEQ ID NO: 66904 - DNA, 732 bp, Homo sapiens
ggcttcggcgctgcccgtgtgcggagcctctttaaggaagcccgagcccgggccccctgcatcgtctacatcgatgagatcgacgcggtgggcaagaagcgctccaccaccatgtccggcttctccaacacggaggaggagcagacgctcaaccagcttctggtagaaatggatggtgcctctcttgaccagctaccctcccaggggaccatgaggaagctcagaggaaagacccccgcctgctcctgtctcacggagcccacagggtcacggagggcaatggagggtcattcgctctgctggggttgccttttgcactgaagatagagaccacctttttgagtgacttgagcccaaaggcaagcgtatatcaaacgatcttctccacataacctctctgtgccatcataagaatagctgcttccgcccccggatttgctcaggcctgggaatccgctgactgaaggcctcttgttgagtgccagctctaaacaagtccctttatgcagagccacagctgtgcatgctcagccctgccgaggtcccaggccaggctttgttgcttccgttcatggaagcgcacaggatggggccgacgctgtgccggtcgtggggaaatctcactggggaagagaaaagcccaagccttgttggttacgtcagccggtccatggcggtgtcctgcggaccccaaagcccccgggaagggcgcaagtcaaagagcactggagg

SEQ ID NO: 66905 - DNA, 472 bp, Homo sapiens
ggttgcaacccaagatagttgcttctagcaagcttggagccaagagacctaggttcaaaccctgaactcagcacaagtccctttacctctctgggcctgtttcttgcctttcgtggataacataaaggcactgcttagccatcaggcactgtgtctggctgtagcaactatcattattgtcatcctcctcatgggctgtgacatggggaaaaaaaatcctggctgccactggagtgtaaacggtcctggggttgcctcctcagaggcccttccctgtgtcctcccaggcactgtcccagagccacccttcaggaatccaggcccacacccagctccagctgcccgagtggctcagtcgcccagcggcctctctgctgactgaggtgaggggtaacccggccagaggaagcagctgcctagcctgaggaaggtgctgggaggggcacagaactgtgtctgaaccacgtgtgct

SEQ ID NO: 66906 - DNA, 525 bp, Homo sapiens
  misc_feature (1)...(525): n = a,t,c or g
cggcggaattcgaaattaatggaatgacaggtttaaatggatctatacaacaaataacggtgatatcgccattttcttttagtattggtgacaccacagaactggaaccatatttacatggaggcatagctgtccaagttaagactcctaaaacagttttttttgaatcactggagaggcagttaaaacatccaaagtgccttattgtggattttagcaaccctgaggtaaataaacactttgcaggtttgagagaggcagcagaatcagagatgagaattagtgagtgattatgaagttaaaatggaataaccatgtaggtatctggctgtcgggccttataatgtgagtataataaaggttatactcacatatctaaagttgacttctgaggattaaaaatgtgaatttgtctcatagaaaaaaatgataaagtaataggaaaaagtttcacttttataatgatttgccaactttgataattataagacgaatntcataacttggacaaagatgatcttatta

SEQ ID NO: 66907 - DNA, 439 bp, Homo sapiens
ccacccacgcgtccgcccacgcgttcgagaacgatttccagatttactactgccttcatctagtcaagactctgaaattctgcccttcattcaatctagaaattatcccaagctgtatattgatggtccttttggaagtccatttgaggaatcactgaactatgaggtcagcctctgcgtggctggaggcattggagtaactccatttgcatcaatactcaacaccctgttggatgactggaaaccatacaagcttagaagactatactttatttggttttggcaagagaacagacctgactatgtcaacatccagctgtacctcagtcaaacagatgggatacagaagataattggagaaaaatatcatgcactgaattcaagactgtttataggacgtcctcggtggaaacttttgtttgatgaaatagcaaaatat

SEQ ID NO: 66908 - DNA, 450 bp, Homo sapiens
ttcaggagcactggatgcaagtcggcaggtgtttgtgtgtggaaatgacagcaaagccaagcaaagagtgatggatattgttcgtaatcttggacttactccaatggatcaaggatcactcatggcagccaaagaaattgaaaagtaccccctgcagctatttccaatgtggaggttccccttctatttgtctgctgtgctgtgtgtcttcttgtttttctattgtgttataagagacgtaatctacccttatgtttatgaaaagaaagataatacatttcgtatggctatttccattccaaatcgtatctttccaataacagcacttacactgcttgctttggtttacctccctggtgttattgctgccattctacaactgtaccgaggcacaaaataccgtcgattcccagactggcttgaccactggatgctttgccgaaagcagct

SEQ ID NO: 66909 - DNA, 440 bp, Homo sapiens
ggaattcgatcagtagaagtttgggggatatagaaacgaaggttttctaacttttagctttcaaggagattgtccggttgggaaagcaagatatgaaaaataaatatgtcaagaatataatccaaaacaatctaattaagtgctagaagtttgccatggacagacaaagtgctacttgggaaggaagttccagaaacaccacagctgggtacattcttcaccactctgagtggtggcagtgacgcgttggctttgtgagaatggtgtgtcttacttgagaaagtgtgtgtgttctgcctgcaggcatgggactcgctgtgctggagaagtggcagccgctgcaaacaattcgcactgcacagtcggaattgctttcaacgccaagatcggaggtatgggaaaccaactcacgtggatgtagaaatgcgccagttagctct

SEQ ID NO: 66910 - DNA, 1032 bp, Homo sapiens
gaaattcgcccttccgcaaactcaaccctttcggaaacaccttcctcaacaggttcatgtgtgcccagctccctaatcaggtcctggagagcatcagcatcatcgacaccccgggtatcctgtcgggtgccaagcagagagtgagccgcggctacgacttcccggccgtgctgcgctggttcgcggagcgcgtggacctcatcatcctgctctttgatgcgcacaagctggagatctcggacgagttctcagaggccatcggcgcgttgcggggccatgaggacaagatccgcgtggtgctcaacaaggccgacatggtggagacgcagcagctgatgcgcgtctacggcgcgctcatgtgggcgctgggcaaggtggtgggcacgcccgaggtgctgcgcgtctacatcggctccttctggtcccagcccctcctcgtgcccgacaaccggcgcctcttcgagctggaggagcaggacctcttccgcgacatccagggcctgccccggcacgcagccttgcgcaagctcaacgacctggtgaagagggcccggctggtgcgagttcacgcttacatcatcagctacctgaagaaggagatgccctctgtgtttgggaaggagaacaagaagaagcagctgatcctcaaactgcccgtcatctttgcgaagattcagctggaacatcacatctcccctggggactttcctgattgccagaaaatgcagatgaggaaactgaggcacagtgaagtagcccgctcaagatgaatgattctgagtctgcacttctagggtcctaaaagtgtatgtttctaacattcctctaatgttctgtgcttccaactttgatattccgaaagttacttgatttctaagatcctaggattggaacatttgagaggacaaaacttctgagattggaatgtgtgttgtgcggaatctgccactgacggttctgactttctaagaaaacgagattaaaaaataatcaggccgagcatggtggctcacatctgtaatcctagcattt

SEQ ID NO: 66911 - DNA, 1221 bp, Homo sapiens
gtgagagacatcacctccgactccctcagcctctcctggacagtccccgagggccagtttgaccatttcttggtccagtttaagaatggggacgggcagcccaaggcggtgcgggtgccgggacacgaggatggggtcaccatctcgggcctggagccagaccacaagtacaagatgaacctgtacggcttccacggtggccagcgcgtgggccccgtgtctgctgttggtttaactgccccaggaaaggatgaagaaatggccccagcctcgacagaacctcccacccctgagccccccatcaagcctcgcctggaggagctgaccgtgacagatgcgacccctgactccctcagcctgtcctggacggttcccgagggacagtttgaccacttcctggtccagtacaagaatggggatgggcagcccaaggcaacacgggtgccaggacatgaggacagggtcaccatctccggcctggagccagacaacaagtacaagatgaacctgtacggcttccacggtggccagcgtgtgggccccgtgtctgccattggggtgacagctgcagaggaagaaactcccacccccacagaacccagcatggaggccccggagccccctgaggagccgctcctgggggagctaacagtgacaggatcctcccctgactcgctgagcctctcctggaccgtcccccagggccgcttcgactccttcaccgtgcagtacaaggacagggacgggcggccccaggtggtgcgtgttgggggcgaggagagcgaggtcaccgtggggggcctggagcctgggcgcaaatacaagatgcacctgtacggcctccacgaggggcggcgtgtgggcccggtgtccaccgtgggcgtgactgccccacaagaggatgtggacgagacccccagccctacagaaccaggcacagaggccccagagccccccgaggagcctctcctgggggagctgacagtgacaggatcctcccctgactcgctgagcctttcctggaccgtcccccagggccgctttgactccttcaccgtgcagtacaaggacagggacggacggccccaggcggtgcgtgttgggggccaggagagcaaggtcactgtgaggggcctggagcctgggcgcaagtacaagatgcacctgtacggcctccacgaggggcggcgcctaggcccggtgtctgccattggggtgacg

SEQ ID NO: 66912 - DNA, 1273 bp, Homo sapiens
tttcgtgtgacatggcggaggccgcggcgctggtgtggattcgcggccctggcttcgggtgcaaggcggtgcggtgtgcctcgggtcggtgcaccgtccgggattttatccaccggcactgccaagatcagaatgttccagtggaaaacttctttgtgaaatgcaatggagcactcattaacaccagtgacacagtgcagcatggagctgtttatagtttggaacccagactttgcggtggaaaaggaggttttggatctatgctccgagcacttggtgctcagattgagaagacaaccaatcgagaagcttgtcgggatctcagtggaaggagactacgcgatgtcaatcatgaaaaagcaatggctgaatgggtaaaacaacaagccgagcgagaggctgaaaaggagcagaagcggctggagcgactgcagcggaagcttgtagaacccaagcactgcttcaccagccccgactaccagcagcagtgccatgagatggctgagcgtctggaggattccgtcctcaaaggtatgcaggctgcctccagcaagatggtttcagcagaaatcagtgagaatcggaaacggcaatggcctactaaatctcaaacagacagaggagccagtgcgggaaagaggagatgcttctggttgggcatggagggactagagactgcagaagggtccaactctgagagttcagatgatgacagtgaagaagcaccaagcacttcaggaatgggtttccatgctccaaaaattggtagcaatggtgtcgagatggcagccaaatttcccagtggttctcagagggcgagagtagtgaatacagaccatggatcaccagaacaactgcagatcccggtgactgactctgggaggcatattttagaagactcatgtgctgagctgggggagtccaaagagcacatggaaagcaggatggttacagaaacagaagagacccaggagaagaaggcagagagtaaagaacccatagaagaggagcccactggggctggactgaataaggataaagagacagaagaaaggactgatggggaaagagttgctgaggtagcacctgaagaaagggaaaacgttgccgttgccaaactgcaggaaagccagccaggaaacgcagttattgataaggaaactatagatttattggcgttcacctctgttgcagaactggagttgctgggtttggagaagctcaaatgtgaactgatggcccttggactgaaatgtgggggcactctgcagaa

SEQ ID NO: 66913 - DNA, 170 bp, Homo sapiens
ccccggcgaggggggggggggttttccccccccccccccaaaaaattttttttttcccccaagccccttaaattttttgggggggggggggcccaaattccccccccccaaaaaaaggtttttttcaaaaaaccccccgggggtttttaaaaccccccccaaaaaaaaaa

SEQ ID NO: 66914 - DNA, 489 bp, Homo sapiens
ccgacgatttcgtgaggcggcagccaggtggggttccagccagagcacgcacgcacggagccgggagcatgcagcctgcactgcgggggatgtgatgctcggctctaactcgcctggctggcccgccacggacgcctcagcttgcaaccatggtaacgtttctggcgggggacacccccgggagcccaccgcgatgggcagcctcctggtgactgatggacgagtgtccacctcccagaccgagagcgcttagtaggtcggaggaagtggagaggatgtaacacgcccccagccgggagtgaagccctgaggagctcctccccccttcgttcccaccctcaagtctgacgatgacacctccaattttgatgaaccaaagaagaattcgtgggtttcatcctctccgtgccagctgagcccctcaggcttctcgggtgaagaactgccgtttgtggggttttcgtacagcaaggcactggggattcttgg

SEQ ID NO: 66915 - DNA, 457 bp, Homo sapiens
cgacgatttcgtgtgggcaccgaggaggagctgccgcggctgttcgccgaggagatggagaatgaggacgagatgtcagaagaagaagatggtggtcttgaagccttcgatgactttttccctgtggagcccgtgagccttcctaagaagaagaaacccaagaagctcaaggaaaacaagtgtaaagggaagcggaagaagaaagaggggagcaatgatgagctatcagagaatgaagaggatctggaagagaagtcggagagtgaaggcagtgactactccccgaataaaaagaagaagaagaaactcaaggacaagaaggagaaaaaagccaagcgaaaaaagaaggatgaggatgaggatgataatgatgatggatgcttaaaggagcccaagtcctcggggcagctcatggccgagtggggcctggacgacgtggactacctgttctcggagg

SEQ ID NO: 66916 - DNA, 493 bp, Homo sapiens
tttcgtcgagcgccttgcgcacctccacgctgcctgcgccccgcgccgcaaggtggcgctcctcttggaggtgtgcagagatgtctatgcgggcctggctcgaggcgagaaccaagatcccctgggggccgacgccttcctgccggcgctgaccgaggaactcatctggagcccggacattggggacacgcagctggacgtagagtttcttatggagctcttagatccagatgagctgcggggagaggctgggtactacctgaccacgtggtttggggcgctgcaccacattgcccactaccagcccgaaacagaccgcgctccccgggggctcagctccgaggcccgcgcctccctgcaccagtggcaccgcaggcggacgctgcacagaaaggatcatcccagagcccaacagctggactgaccctggctggtcgaagagccctggccagatgtcctgtggacagacccaatttctggcctcgtctgctgg

SEQ ID NO: 66917 - DNA, 455 bp, Homo sapiens
ccgtatcgttgatctctttgaatttatcaacgtcaataatcagcactgacagcggtgtaccggtccggttggcatgggcaatttcgcgtttgaagatagtcggtaggaaacggcggttaagtaatttcgtcagtacatccataccgacttcgtggcgcgatacttcttcaaacaattcacgcagcaaggtaataatttgcgatacggtatttcttatctgtaataaaaatttcacccgcagacttctgttattcaaatttctggtgttacgcatggtttgattgaaaataccgtcgaaatcctgaatcagacgggagatatggcctacttcggcaataccactaaaataatgtcgacctttatggttaaaccacaggccaaaatcagcctggcttagaggcaaactactgcctaaatcagaatccagcaggattttatagataatatctatttcc

SEQ ID NO: 66918 - DNA, 991 bp, Homo sapiens
  misc_feature (1)...(991): n = a,t,c or g
cgccctggggccggggccgggcggcaccgcggtgcgcaagcgcaaccgtcggtgggtcggggatcggtcgcctgagaggtgagtgaggggcactgcgctgagcctggtgggtctggggtctgcggctcggggcccacggggccccaaagctcgtaagagtttggggatcgtgaggccagggtcaccgcgacccgcggggtcctgtgagtaggcggtgcggaggggaaactgaggccgggcgccatcgggcaggcccttcgagccctgatctcccttccccaggccccaggtcctggaaatgctggtccgcggcctggtggcgaggacggcgggaggggaaggcgccccgcatgtagtgagcgctcgctgggtgttcgctgccgttccgctcttattaaccgcctggaaacgtcgtccctgtgactcagggacccccgtttgtggggactgaagtcggaactctggttccagcgccgccagtccctacctgggtgaccttgcccagcctcttggcttctcggagcctcagttttcccctctgtaaaacgggcgttgttcaaaagtccctgcctaggagaaggagagccgcagggtccagcggaatctgagaactccaaagaattagcaggcgttcgtcttatatcatgtttagagtcttcttctgcatatcgggctagaggtgggggaaatctgggattcaggaccgtccaccaccacctcccacccgctgtgtaaacctgggtgagtccccttccctctctgagctaactgttccttctttcgcaaacgaggtgtaaaagcagatgcctcggagggtcattatgaggataaacccacattcaattatttgatcaggcgcctggaacttgataagagagagctggcttgagaatagctggtcttgctattaggtgccagaaaactgcagtgtantgtgcccctcagagggtgaatgattggcccattttcttttggttctgtctctgattat

SEQ ID NO: 66919 - DNA, 530 bp, Homo sapiens
gtccctacagcagcccctcggagcaagtcctcctgggagggcccagccacctggcctctgaggaggagagccaggggcggtcagcccaacccctgcccagcacaaagaccttcgcattccagacacagatccagaggggccgcttcagcgtggtgcggcaatgctgggagaaggccagcgggcgggcgctggccgccaagatcatcccctaccaccccaaggacaagacagcagtgctgcgcgaatacgaggccctcaagggcctgcgccacccgcacctggcccagctgcacgcagcctacctcagcccccggcacctggtgctcatcttggagctgtgctctgggcccgagctgctcccctgcctggccgagagggcctcctactcagaatccgaggtgaaggactacctgtggcagatgttgagtgccacccagtacctgcacaaccagcacatcctgcacctggacctgaggtccgagaacatgatcatcaccgaatacaacctgctcaaggtcgtggacctggca

SEQ ID NO: 66920 - DNA, 883 bp, Homo sapiens
agtgacctggaaacaagttctgatccagaaggtgaggattgggatgaggaagctgaggatgatggttttgatagtgatagctcactgtcagactcagaccttgaacaagaccctgaagggcttcacctttggaactctttctgcagtgtagatccttataatccccagaactttacagcaacaattcagactgctgccagaattgttcctgaagagccttctgattcagagaaggatttgtctggcaagtctgatctagagaattcctcccagtctggaagccttcctgagacccctgagcatagttctggggaggaagatgactgggaatctagtgcagatgaagcagagagtcttcaaactgtgggaacttcattctgttaattctggatggacccctacaaccctttaaattttaaggctccttttcaaacatcaggggaaaatgagaaaggctgtcgtgactcaaagaccccatctgagtccattgtggccatttctgagtgtcacaccttactttcttgtaaggtgcagctgttggggagccaagaaagtgaatgtccagactcggtacagcgtgacgttctttctggaggaagacacacacatgtcaaaagaaaaaaggtaaccttccttgaagaagttactgagtattatataagtggtgatgaggatcgcaaaggaccatgggaagaatttgcaagggatggatgcaggttccagaaacgaattcaagaaacagaagatgctattggatattgcttgacatttgaacacagagaaagaatgtttaatagactccagggaacatgcttcaaaggacttaatgttctcaagcaatgttgagttggcagcctgtagtcctagctagcatacactacct

SEQ ID NO: 66921 - DNA, 528 bp, Homo sapiens
ctgggaaacacagttctacactactgtagtatgtacagtaaacctgagtgtttgaagcttttgctcaggagcaagcccactgtggatatagttaaccaggctggagaaactgccctagacatagcaaagagactaaaagctacccagtgtgaagatctgctttcccaggctaaatctggaaagttcaatccacacgtccacgtagaatatgagtggaatcttcgacaggaggagatagatgagagcgatgatgatctggatgacaaaccaagccctgtcaagaaagagcgctcacccagacctcagagcttctgccactcctccagcatctccccccaggacaagctggcactgccaggattcagcactccaagggacaaacagcggctctcctatggagccttcaccaaccagatcttcgtttccacaagcacagactcgcccacatcaccaaccacggaggctccccctctgcctcctaggaacgccgggaaaggtccaactggcccacctatcactccccataga

SEQ ID NO: 66922 - DNA, 389 bp, Homo sapiens
cggccgcgtctacggcatattctttttttggaactgtggagaatatggctccaaaagtggttaatcgtccaggtcatactcagagtgctgactgggggtcttttggggggttaatgggaaggtttgaatttgggatttttttaaaggggaaggagattgttaagtgaggatcaacagggaatggtaaagaaactgggggttttattttctttattttatgccctatgtaataaataaccaaaaaacattattgcgtgcagtataaaaggactatgaaatctgttagctgcgtctatctcatcctaatttgaaagggcaaaaaaaaatattaccatagatttcctgctaatagtaacaatctaaagcattaatggtgttgggtcttttgg

SEQ ID NO: 66923 - DNA, 568 bp, Homo sapiens
cgcccacaccattgactgcgctgcacgaattcggcacgaggttcaacaggcagtagacagcagggactccctggccatggctctgtatgcgtgctgctttgagtgggtaatcaagaagatcaacagcaggatcaaaggcaatgaggacttcaagtctattggcatcctcgacatctttggatttgaaaactttgaggttaatcactttgaacagttcaatataaactatgcaaacgagaaacttcaggagtacttcaacaagcatattttttctttagaacaactagaatatagccgggaaggattagtgtgggaagatattgactggatagacaatggagaatgcctggacttgattgagaagaaacttggcctcctagcccttatcaatgaagaaagccattttcctcaagccacagacagcaccttattggagaagctacacagtcagcatgcgaataaccacttttatgtgaagcccagagttgcagttaacaattttggagtgaagcactatgctggagaggtgcaatatgatgtccgaggtatcttggagaagaacagagat

SEQ ID NO: 66924 - DNA, 541 bp, Homo sapiens
  misc_feature (1)...(541): n = a,t,c or g
aggaagcctggagagcctggattcaaaggagaaaggggagattttgttatcaaaggtgacaaaggacctcctggtggaaaaggccagcctggggaccctggaatcccaggccacaaaggccacacaggcctgatgggtccccaaggactacctggggagaatggaccagttggacccccagggcctccaggccagccgggatttccaggactgaggggggagtctccatccatggaaaccctgcgtcggcttattcaagaagagctggggaagcagcttgaaaccagactcgcctacctcctggcccagatgcccccggcgtacatgaagtcatctcaaggcagacctgggcccccagggccccctggaaaagatgggcttccaggccgggccggccccatgggggagccaggtcgtcctgggcaggggggtctggaaggaccctctggacccataggtcccaaaggtgagcaaggagccaaaggtgacccaggtgcaactggagttggcctncgaggcgagatgggacccccttggaatt

SEQ ID NO: 66925 - DNA, 1165 bp, Homo sapiens
gggcgggaagcgcagagtctccgggaccattatggcagtcaagtggacgggtgggcattcttctcctgtcctctgcctgaatgcaagtaaagaagggctgctggcttctggagcagagggcggagatctcacggcttggggtgaagatggaactccattaggacacacgcggttccaaggggctgatgatgttaccagtgtcttattttctccctcctgtcccaccaagctctatgcctcacatggagaaaccattagtgtactggatgtcaggtccctcaaagattccttggaccattttcatgtgaatgaagaagaaatcaattgtctttcattgaatcaaacggaaaacctgctggcttctgctgacgactctggggcaatcaaaatcctagacttggaaaacaagaaagttatcagatccttgaagagacattccaatatctgctcctcagtggcttttcggcctcagaggcctcagagcctggtgtcatgtggactggatatgcaggtgatgctgtggagtcttcaaaaagcccgaccactctggattacaaatttacaggaggatgaaacagaagaaatggaaggcccacagtcacctggtcagctcttaaaccctgccctagcccattctatctctgtggcttcgtgtggtaatatttttagttgtggtgcagaagatggtaaggttcgaatctttcgggtgatgggagttaagtgtgaacaggaactgggatttaagggccacacttcaggggtatcccaggtctgctttctcccagaatcctatttgctgcttactggagggaatgatgggaagatcacgttgtgggatgcaaacagtgaagttgagaaaaaacagaagagtcccacaaaacgtacccacaggaagaaacctaaaagaggaacttgcaccaagcagggtggaaatactaacgcttcagtaacagatgaggaagaacatggcaacattttaccaaagctaaatattgaacatggagaaaaagtgaactggctcttgggtacaaaaataaagggacaccaaaatatattagtagctgatcaaactagttgtatatctgtataccccttaaatgaattttaaatccaataaaaacatttgaagaattgtggcaaaactgtttttcagattaaaaaaaaa

SEQ ID NO: 66926 - DNA, 510 bp, Homo sapiens
  misc_feature (1)...(510): n = a,t,c or g
ggtcaaaacccatgtttctaataaatatgggactgatttcatctgtncttcattactcacacaagaacagaaatcatgcattagggaaaaaccttacagatatattgagtgcgacaaagccttgaatcatggctcacacatgactgtacgtcaggtaagtcattctggagagaaaggatataaatgtgatctgtgtggcaaggtctttagtcaaaaatcaaaccttgcgcgtcattggagagttcatactggagagaaaccatacaaatgtaatgaatgtgacagaagtttcagtcgcaactcatgccttgcactacatcggagagttcacactggagagaaaccttacaaatgttatgagtgtgacaaggtcttcagtcgaaattcatgccttgcactacatcagaaaactcatattggagagaaaccttacacgtgtaaagagtgtgggcaagcctttagtgtgaggtcaacacttaccaaccatcaggtaattcatagtgacaagaa

SEQ ID NO: 66927 - DNA, 412 bp, Homo sapiens
gggtttgtttttcttccaggccccatgtctgtgggtttggacttctctctgccaggcatggagcatgtctatgggatccctgagcatgcagacaacctgaggctgaaggtcactgagtgagtcctatggtgacatcaggaagatggaggtgggcaggaaggagtcaggcctttagggagatgggtgtgcatattggatactctaggcaagcatgggtcatttcttgtgtccagaatcacctttggtgatagaaaattttttgagaaaggacaagaggagcctttgcttatctctcacctgtgtctgtggagtggtgttagcatataacgcagcctggggccagttagcagcccaagtctgtctgtttgcctgcaggggtggggagccatatcgcctctacaatttggatgtg

SEQ ID NO: 66928 - DNA, 454 bp, Homo sapiens
ctctgtgaaaagacaacctggctttgggcagacaactgctaaaagacaccctagccaaggacagcaggctgtggtcaaagctgctctcagcatcttgctaaataaagctgtactgcatggctgtcccctccccagagcagagctagaccagcatacagctgatttcaaaggaggaagtttccctttatccatagtttccagttataacacttgtaacaagaagaaaggagagagtggtgcctggagaaaggtgaacaacagtcctcgcaggaagtctggccgcttctctttacccacctggaataagccagacctaagcactgaaggtatgaaaaataagactatatcacagctgaattgtaacaggaatgcttctctgtcaaaacaaaagtctttagagaatgatctatcactgacgttgaatttggatcagagactctctctgggttcagat

SEQ ID NO: 66929 - DNA, 866 bp, Homo sapiens
atccggtagatgttcagtacgtgggagctgtgttttacataagttttctcattccaatgctgaaaacagagaaaaagattgaatgtcatgcctgcatcgacagcacatatactaaaattggaatgatacagagaagattagtatggcccctgcgcaaggatgacacgcaaatttgtgaagcgttccatatttttaaaatcttcaaatctatctgtaacaactgatttctccgaaagccttcagagttctaatattgaatccaaagaaatcaatggaattcatgatgaaagcaatgcttttgaatcaaaagcatctgaatccatttctttgaaaaacttaaaaaggcgatcacaattttttgaacaaggaagctctgattcggtggttcctgatcttccagttccaaccatcagtgccccgagtcgctgggtgtgggatcaagaggaggagcggaagcggcaggagaggtggcagaaggagcaggaccgcctactgcaggaaaaatatcaacgtgagcaggagaaactgagggaagagtggcaaagggccaaacaggaggcagagagagagaattccaagtacttggatgaggaactgatggtcctaagctcaaacagcatgtctctgaccacacgggagccctctcttgccacctgggaagctacctggagtgaagggtccaagtcttcagacagagaaggaacccgagcaggagaagaggagaggagacagccacaagaggaagttgttcatgaggaccaaggaaagaagccgcaggatcagcttgttattgagagagagaggaaatgggagcaacagcttcaggaagagcaagagcaaaagcggcttcaggctgaggctgaggg

SEQ ID NO: 66930 - DNA, 429 bp, Homo sapiens
ggtgttcagcctagcagatctgaggagaaaacaaggggcatgcggtggcatgacccacccttctctgcaccttcagttctcaggacacaatgcggagcacacaggtgtgactggagatctctgactctgccgtccaagccaagaccaccaaactcccacctgtcaccatcactttcccacagcccccaggccctctcagccaccaacccacgactggccccagtgctggctcaactggggtcgtgagcaggggaagcacacccagcccccagaccagcccccactcatctggagtcctggcccagctgactcctgctgtagccgctctgccagggcagtggcctcctcagggctgcctagccactgctcctgcgtgtaggcctggatctctgggagcagtgtgcccaataactgctccagcaccaagag

SEQ ID NO: 66931 - DNA, 1878 bp, Homo sapiens
ctgctgactgttttcagttgtttctgtaacagcagaaagtgcactcactaggagtagtcagaattcaaaatgctgaagagaaagccatccaatgtttcagagaaggagaaacatcaaaaaccaaagcgaagcagcagttttgggaatttcgatcgttttcggaataattctttatcaaaaccagatgattcaactgaggcacatgaaggagatcccacaaatggaagtggagaacaaagtaaaacttcaaataatggaggcggtttgggtaaaaaaatgagagctatttcatggacaatgaagaaaaaagtgggtaaaaagtacatcaaagccctttctgaggaaaaggatgaggaagatggagagaatgcccacccatatagaaacagtgaccctgtgattgggacccacacagagaaggtgtccctcaaagccagtgactccatggatagtctctacagtggacagagctcatcaagtggcataacaagctgttcagatggtacaagtaaccgggacagctttcgactggatgacgatggcccctattcaggaccattctgtggccgtgccagagtgcatacggatttcacgccaagtccctatgacactgactccctcaaaatcaagaaaggagacatcatagacattatttgcaaaacaccaatggggatgtggacaggaatgttgaacaataaagtgggaaacttcaaattcatttatgtggatgtcatctcagaagaggaagcagcccccaagaaaataaaggcaaaccgaaggagtaacagcaaaaaatccaagactctgcaggagttcctagagaggattcatctgcaggaatacacctcaacacttttgctcaatggttatgagactctagaagatttaaaagatataaaagagagtcacctcattgaattaaatattgaaaacccagatgacagaagaaggttactatcagctgctgaaaacttccttgaagaagaaattattcaagagcaagaaaatgaacctgagcccctatccttgagctcagacatctccttaaataagtcacagttagatgactgcccaagggactctggttgctatatctcatcaggaaattcagataatggcaaagaggatctggagtctgaaaatctgtctgacatggtacataagattattatcacagagccaagtgactgaacacgcattcccaactatatatctacagatgcattccattttaactcttcttgagctaaaacgtcaaataggagaggaagataagataaatatttgtaaataaaacctaaagtttaaatgttttaatctgaataattgtacataaaattttgtatctctaacattccaaattactgtcaataaaatatatatttattattttaaatgctatgtgttaatatttcacttgcttgtattagaaaggcaaaatgtaagactttggtatgtgtgacatatgctttatttggctttattttacaagtacagtatctgcaaaaaacaaagtaaccttttttcatacctgccagttttgaatttatatatgttattgaacaaatagtaatagaggattcgctgttgaaacaagttgtccaagcaatgttatattcatttttatacttattgggaaagtgtgagttaatattggacacattttatcctgatccccagtggagttttagtaattatattttggtgatttcttcattttgttttctggtataaaagtagagataatgggtagtcccttctgatttagtgaaacccattgtaataattgtggaaatgttttgtctttaagtgtaaatattttaaaatttgacataccctaatgttaataataaaaagaactatttgcaaaaaaaaaaa

SEQ ID NO: 66932 - DNA, 856 bp, Homo sapiens
gaacttattcctgcccagagttcagacacagccagaaattaccatttcatacttcacagaatggaggtttcagcagccaaagccccaagtgccgcagacttgtctgagattgaaataaagaaagagatgaagaaagaccctctcaccaacaaagctccagaaaagcccctgcacgaagtgcccagtggaaactctttgctgtcttctgaaacgattttaagaaccaataagagaggcgagcgacggaggcgccggtgccaggtggcattcagctacctgccccagaatgacgatgaacttgagctgaaagttggcgacatcatagaggtggtaggagaggtagaggaaggatggtgggaaggtgttctcaacgggaagactggaatgtttccttccaacttcatcaaggagctgtcaggggagtcggatgagcttggcatttcccaggatgagcagctatccaagtcaagtaaggaagtctaccctaccaagcaggagaggggcgggggaccggcaggctgtgctccagcctcccttctgttctgtatcctatgccgagaggctatagtaaacgcttacgagtatttttttggttatactgccttaacccactgtggtttaggaagttgatccctataaaggtgtgacccgtagccacacattctgtatgtctctggataggtaactgccagccttcatgccctggtaatactgtctcatgggtggcccatgttgctgtgcctccatatacttctagagtgttgcttactgtaagttcataattatttaaaaaatgaaccaaatgggattgtcagtatttctcagcatcccttgagggacttggagaaaaattacc

SEQ ID NO: 66933 - DNA, 432 bp, Homo sapiens
cagttgagaacatttagttgcccattcttgaacatcttttcatagctttgcagacgttctgacgactgctgggcagagtgctcggcagtacgatagtagaagccgccttccacgacacgatcgttaatgtctgtccagacgttttccgaccgcaattgtgcgatcagcggatcatggctgacccagtcgcgtgcttttgccagaccctctgcgtagtcttcctgtgaacgatccagcttccagatttccggcattgtgactttctgcgcgacaaaagtgtcatattgcgccagggtaagatgctcgaacgaaatatgggtaggcagataaggggttaagcctttaaaagccgtatccaggattttattggttaccgggcaaatccaggcatccgtgattaaagaaaaagtcatatgctctttcggtaaataa

SEQ ID NO: 66934 - DNA, 2018 bp, Homo sapiens
cttgcggccgcggtgtccctggaagaggccctactgcgcctcgccgagttcctctccgtccagctgggggcggaagagagctgcgggggcccggcggacctgggccagtctggcgaggtcccctcactgttgacagtgaccagtcagctcttggcccttctggcatggcttcgaagccccagggggaggcaggccctgctccaggggactcagccagcccctcgggtccggcccccctctccagatggatccacatcccaagaagaaagcccttcccacttcaccgcagtcccaggcgagccactgggggatgagacccagggacagcagcccctccagttggaggaggatcagagggcgtggcagcggctggagcagctcatcctgggacagctggaggagctgaagcagcagctggaacagcaggaggaggagttgggtcgactgcgcctgggcgtgggggcgacggactcagagaaaagggttcagcatctgactctggagaacgaggccctgaagcagagcctgagtctcatgcgggacctcctgctgcactggggccccgggccccccatcagggctccgcaggaggaggcggaggcattgctagagctccagggccggcttcaggaggcccaagacaccacagaagccctccgagcccagctgggggtgcaggaggtgcagctgcagggccttcaaggggccctccagcagctccagcaggagacggagcagaactgcaggcgtgagctacagcagatgcatgggcagctggcaggacttcgggcacggatggccagcctgcgtcagggctgcggggacctccgaggtttggtcagcacctttacccagagctgtcagggttcgctgagtgaggcccggggccaggtgtcctgggccttgggggcactgtcatctggagggcctggcactcagctccctgaggggcagcaagggcccccagccggatgcccagggcggctgccagaactcaagggaaatatccgtgtgctgtgtcggctgaggccagggacatcttctagccttgtgagtgtggagcctggcccagggggcaccgtcaccacctgctaccgggggcgccatcgtcgattccgcctagactgggtcttccctccagacgccagccaggaggaggtcttcagagagctggaacctgcggtgctgtcctgcctccgaggctacagcgtctgcatcttcacctatggccagacaggcaccgggaagacctacagcatggagggccctcctgaggaccccggcatagttcccagggcacaagctccctagcctctttggatccattgcccctgagctcccagagtcacccctccacctccgcagccagtgaagtgtgttgtgcctgctgaagtgatcaccccccgcccccagccctgcatcaggccacaggtcttggctttctccttatcaccatttgctgttatcacggcacacagcagggaatcccaggcccccccgccaagtggttacccaagtcaccactcctgacccaaaaatcaggcatggcattaaaacgttgcaaattcctttactgttatcccccccaccaccaggaccatgtagggtgcagtctttactccctaacccgtttcccgaaaaaggtgctacctcctttccagacagatgagagagggcaggacttcaggctggatccaccactgggctctccctcccccagcctggagcacgggaggggaggtgacggctggtgactgatggatgggtagtgggctgagaagaggggactaggaagggctattccaggctcagccctgctcctgcagctttgccgctgagtgtaggaaaaacaggcatgacagaccagggtgagggttgtgcccagctgggccacggccatgcgtggggtggcccaataaacaccgtggactcccagcaaggctgctgcctggtgtttcgaggctgctgtggtcgcagacagccgcctcgccttggctccctgtcaacaaggtgggggt

SEQ ID NO: 66935 - DNA, 695 bp, Homo sapiens
ggggaggcaggaggcgttggccgccaaggccctggagcccatcttcctgcccgtggccgagctgcatgggctgcggggccatgcgactgatgagcggggcaagccgtctgagcaactgaccccaacccgagcaggtacctgggcgtgggtgggctgtgctgggcaaggtctcaaccacccgcggggaggagccctgaatcgcagcacctgccggttgccgtggtgtaaatgttccccagctgagttcgccctaaaagcgtggtgtggctgaacatggagtagggagcagaggcatgttggcacacgatgtagacacagtggatatagctgaccccaggaggacagttgtgaaatgtagccggggcattaggaagggatgttttgagtgcttcgttgattttatttctctgtaagtttacgaaacaattgtccagtaataacaaccagcttttgcatgtttcccggaaatttaatagtctgctctttgagccagcatgagctggctctggcaccgcactggctgggcaagagttttgccagccagccacggagcgtttccttccagggacaagacatgcttcttgaaagctcccgtagggccccttctgaatatcttggttctggctgcgggaagaaccctttggaagggctctggtttctctgtgcagttgggtgagagaggacggggagggagc

SEQ ID NO: 66936 - DNA, 317 bp, Homo sapiens
ttttttttttggcgctctaccaagacagttttattggacacactgagctccgcctgcctcccgcggggccatcttgtcggccacggccacatcacttctgcctagacgactgtcgcttcctcccttttcgtctttttatcttcagggacagcagacaggctgggcacaaggtgaagatcttatttttgatctctatgatgttcagctgctccacactggaggccaccctgaactcaggggcaccctggcggtacagaccatcttgtgtgtcttccggctctgggctctcgatcttgtccatgaggtcattggagctc

SEQ ID NO: 66937 - DNA, 443 bp, Homo sapiens
aattcccgggtcgacgatttcgtaaggttttgaggccttttttactgcgccgagttaaggtggatgttgagaagcagatgcccaaaaagtacgagcatgttatccgctgcaggctctccaagcgtcaacgctgtctctatgatgacttcatggcacagaccacaactaaggagacactagccacaggccatttcatgagcgtcatcaacattttgatgcagctgagaaaagtttgcaatcatccaaatctgttcgaccctcgaccggttacctcccctttcatcaccccaggcatctgcttcagcaccgcctctctggtgctaagggccacggatgtccatcccctccagcggatagacatgggtcgatttgaccttattggcctggaaggtcgtgtctctcgatatgaggcagacacatttctgccccggcgcgcggccgct

SEQ ID NO: 66938 - DNA, 1126 bp, Homo sapiens
gcgccggggcacactgacggtgagctgcgcactggtgtggtcatcacggctctcacacacgtactcccctgcgtcctctgcgcgcagccccaacacagtgagtgagcgcacgggcccctcggccaccatctggaagcgcttgcccacccgaagctgcgtgttgccgcagcgccacaccacctctgcacacgctgggcttagctcgcaggccagtgtcaccgtgccacccagctcgccgcacacaggctccagcagccggcagaacttggcggccacctcttccacctgcactgggaagtcctgcccctctgcgcccacacggcagctgtagatggcgctgtccagaacctgggcgccatgcacggtcagggtgtgggtgtccccctggctggctgtctcatgccgcttgctgcggcgaatctccacaccatccttgagccaggtcaccgtggccgcagagggtgtggccagtgtggcggtcaggatgatgtcttcatgctccttgaccaccagaggctccctgcggcagggtctctctgaaatttggggctccagctctgccacgtgcaggcggaaggacagccgttggccccccgcctcacagctgtactccccagcatccgcctggcccgcctgctgcactaccagcctccgtgtgtagccgctggcctccatgcgcacttttgagctggagctcagcttcttcccgtccttgtaccatgtcacctccatctggccctgggccacctcacagctcagcgtggcactggcccccgcctccgcctgcacctccctgcatgccggctgctccttggcaaacaccaccttgggctcagccacatgcagatggaaggagagccgctggcccccagcctcgcagctgtactccccggcgtccgcttggcttgcttcttgcaccaccagcctccgtgtgcagcccacggcctccacacgcattttcgagctggagctcagtttcttcccgtccttgtaccacataacctccgtctgggcttgggccccctcccagctcagcatggtgttggtccttgcctcagcctgcacctccctgtgcaccggctgatccttggcaaacaccacctgctccttggcacccacgcgtccg

SEQ ID NO: 66939 - DNA, 681 bp, Homo sapiens
taagacagaagaggaccccaagctgttccagtcaaccaagacccagcgggggcccctgtccgagaactggatcgaggagtacaagaagcaggtcttccccatcatgtgcgcatacaagctctgcaaggtggagttccgctactggggcatgcagtccaagatcgagaggttcatccacgacaccggactacggagggtgatggtgcgggctcaccggcaggcctggtgctggcaggacgagtggtatgggctgagcatggagaacatccgggagctggagaaggaggcacagctcatgctttcccgtaagatggcccagttcaatgaggatggtgaggaggccactgagctcgtcaagcacgaagccgtctcggaccagacctctggggagcccccggagcccagcagcagcaatggggagcccctagtggggcgcggcctcaagaaacagtggtccacatcctccaagtcgtctcggtcgtccaagcggggagcgagtccttcccgccacagcatctcagagtggaggatgcagagtattgccagggactcggatgagagctcagatgatgagttcttcgatgcgcacgaggacctgtccgacacagaggaaatgttccccaaggacatcaccaagtggagctccaatgacctcatggacaagatcgagagcccagagcg

SEQ ID NO: 66940 - DNA, 776 bp, Homo sapiens
  misc_feature (1)...(776): n = a,t,c or g
gcgccggggcagtggacccagcttcaggatgtcttcctggtatggtgaggctgttacctgggggctcagtgcccagctctaagagggcctctgagggtgcaagtggagggggcctgagttgggatagtagtggtgacacctcgagaaacaaggggagaaaaaaaatcttcaaagggtagtttctcaggctccaggaacctctggagccatctggggatagggcaaagaggggatctgctgaccttgctgagctggggcagcacctcccagagtagggcatgcagtgtggagagctctcggcccaagtcgatgtaaccctcgaagctactgctgttggttagcgtgtccagattggagatctcatacaaaaactgctgcatggaaccccattccagctccagaaactcattcatgaagcccagaaagtcctcctttgaggtaaacttggaaaagttggccaggttctggatgaccttggcaatgagggtgagggttcgtgaggtctgctcatctgggtactcctgcataagcccaaagagactgggcgacataatcgctgggcagaggaagcgcaggaagagtgaggcgctgataagcctgtctgcgatgtcctcccggcctcgctctgcgcagcgcagccgccatgaagcaaacacctccttcagctccctcgggaacacgctggggggaagggtcgggnnnnnnnnnnnnnnnnnnnnnnnnnnnnnnngccgggactgagccccagagaccctcagcttccagggaacacgaaa

SEQ ID NO: 66941 - DNA, 551 bp, Homo sapiens
ggaggcaggagattggacttggggttgcagggcattttgtcatctcattcctgcctgtttcttcctaaactgattctctgaagggcatactctgcctcataccttccttggctgtgttcattacagggtgatgacgggccggacgtccgcggaggatctggggacatcttactggtccatgctactgagactgacaggaaaggtagggtgtcagtgagctcactagattggggctggtcctgccccgggtgccactcggcctcccaccgctatcctgtcccctcctggcagccacagccctgagcaggtctgatcagcagtcctggtgcgcctgagtcagagcagggagagcccaccttggaagacaagtagatcatgttcaactccaggcgtgcgtggcatctgtcctccgctggtacaaggtagtgaccccagggcctccagggtccttgaggggctcagcgcatactaagcgcaccacagacagcgccttgagtgatggcatgtcacccagtagtactaaacttaagataacatgcaggtaccttttg

SEQ ID NO: 66942 - DNA, 640 bp, Homo sapiens
ggaggcaagagaatgccgtggatatcatggaaatgacactgacagggagagcttacaacgccgtgcatatcatggaaatggcaccgatggggagagtttagaacaccatggatatcatggaaatggtaccgacggggagagtttagaacgccatggatatcatggaaatggcaccgacggggagagcttaggacactgtggatatcatggaaatggcaccgacagcgagagtttacaacgctgtggatatcatggaaatggcaccgacggggagagcttaggacgccgtggatatcatggaaatggcacccacagcgagagtttagaacaccgtggatatcatggaaatggcacccacagcgagagtttagaacaccatggatatcatggaaatggcaccgacagggagagcttagaacgtcgtggatatcatggaaatggcaccgacagggagagtttagaacgccgtggatatcatggaaatggcacccacagcgagagtttagaacaccgtggatattatggaaatggcaccgatggggagagtttagaacgccgtggatatcatggaaatgtcaccgacggggagagcttagaacgccatggatatcatggaaatggaaccgatggggagagcccg

SEQ ID NO: 66943 - DNA, 431 bp, Homo sapiens
taaatatcttattttatggtgttttcacctggaagctgagaagaaaggggctttaatggaacaaatagcacatcaagctgttgtaatgcagtttattatggaaatggccaaaaactgtaatgtggatccaagagggtgttttcgtttatttttccagaaagccaaagcagaggaagaaggttattttgaagcattcaaaaatgaacttgaagctttcaagtcaagagtaagactttattctcaatcacaaagttttcaacctatgacagttcagaatcatgttccccattctggtgttggatctataggtttattagaatccttaccacaggtaagttggaaaagtaaatatttgttttataagcctattaattcacataatttttgttattttgccccactcttttttttttttaataggggctactatt

SEQ ID NO: 66944 - DNA, 362 bp, Homo sapiens
gtctgttggggccgcagctgcccggtacgcgcgttaccgaaagtattcacaaagtggctgaacgcgtggtaacgctggtgtcgatggaactgccggacaacgtgcggttgattcgtgattacgatcccagcctaccggaactggcgcacgacccggatcaaattgaacaggtcttgctgaatattgtgcgcaatgcgctacaggcgctggggccggaaggcggtgaaatcattctgcgtacccgcaccgcgtttcaactgaccttacacggcgagcgctaccggctggcggcgcggattgatgtggaagataacgggccgggcattccgcctcatttgcaggatacgctgttttacccgatg

SEQ ID NO: 66945 - DNA, 466 bp, Homo sapiens
cgactcgagaaagtgcatactggagagagtccttacaaatgtaatgagtgtggcaaggtcttcagtcgaattacataccttgtacgacatcagaaaattcatactagagagaaacctcataaatgtaacaaatgtggcaaggtttatagtagcagttcatacctagcacaacattggagaattcatacaggagagaaactttacaaatgtaataaatgtggcaaagaatttagtgggcattcaagcctcaccacccatctgttaatccacactggagagaaaccttacaaatgtaaagaatgtgacaaagcttttaggcacaagttctccctgacagttcatcagagaaatcataatggagagaaaccttataaatgtcatgaatgtggcaaagtcttcactcaagtttcacatcttgcacgacatcagaaaattcacactggagagaaaccttacaaatgtaatg

SEQ ID NO: 66946 - DNA, 425 bp, Homo sapiens
  misc_feature (1)...(425): n = a,t,c or g
agaaaccctacaaatgtaaagaatgtggcttagcctttagcaggtactcaacccttactacccataagagaattcattctggagagaagccctacaaatgtgatgaatgtggcaaaacctttagcatatcctcaacctttactaaacataagataattcatactgaagagaaaccctacaaatgtaaagaatgtggcaaagcctttaaccggtcctcaacccttactagccataagagaatacatactggtgagaaaccctacaaatgtgaagaatgtggcaaagcctttaactggtcttcaactcttactaaacataaggtaattcatactggagagaagccctacaaatgtgaagaatgtggcaaagcttttaaccagtcttcaagacttactcgacataaaaaaattcatactggagaggan

SEQ ID NO: 66947 - DNA, 390 bp, Homo sapiens
gggagtgagtgccagggcactgacctggacacccgcaactgtaccagtgacctctgtgtacacactgcttctggccctgaggacgtggccctctatgtgggcctcatcgccgtggccgtctgcctggtcctgctgctgcttgtcctcatcctcgtttattgccggaagaaggaggggctggactcagatgtggctgactcgtccattctcacctcaggcttccagcccgtcagcatcaagcccagcaaagcagacaacccccatctgctcaccatccagccggacctcagcaccaccaccaccacctaccagggcagtctctgtccccggcaggatgggcccagccccaagttccagctcaccaatgggcacctgctcagccccctgggt

SEQ ID NO: 66948 - DNA, 682 bp, Homo sapiens
tttcgtccttccagggccgcacgctgcggatcgggcgcgagcactacctgcggccctgcgtgccctgccacagcccgctctgcccggagcccgccgcctgcagccacgatgggaaactcttgtctagtgatgtgactcattacgtgatcccagactggaaagttgttcaagattatcttgagatccttgagtttcctgagttgaagggaattattttcatgcagacagcttgtcaagctgtgcagcatcaaagaggcaggagacagtataacaaactgcgaaacctgctgaaggatgcgcgtcatgattgcattctctttgctaatgaattccagcaatgctgctatctgccacgggaaagaggagagtccatggagaagtggcagaccaggagcatatacaacgcagctgtttggtactatcatcactgccaggacaggatgccaattgttatggtgacagaagatgaagaggcaattcagcagtatggaagtgaaacagaaggagtattcgtgattactttcaagggaattctgaatgtcaacaaacacagagcccaaatagaagcttttgttcgacttcaaggagccagcagtaaagattcagatttagtcagtgacatcctaatccacgggatgaaggctcgaaaccgctcaattcatggagatgtggtagttgtgga

SEQ ID NO: 66949 - DNA, 729 bp, Homo sapiens
  misc_feature (1)...(729): n = a,t,c or g
tttcgtgccatgcaagacgtgactttgcttctccttccccttctgccatgatttgtgatgcctcctcagccatgtggaactgagtcatggccggcttcaacatggggggcgacctcagggagcctgccgccagcattcccctgggctccctggcagctgttggcatctcgtggtttctgtacatcgtcttcgtcttcctcctgggcgccatctgcactcgagaggcccttcgctatgacttcctgatagcggaaaaggtatccctcatgggcttcctgttccttttgggcttatacatctcgtccctggcttcctgcatgggaggactttatggagctccccgcatcctgcagtgcattgcccaggagaaagtgatccctgcacttgcctgtctgggacaaggggtgagtaatcctctttttttggtttgttttttgaaacatgttttgctgctaacctcactgttggcccatcaattggttaagcttttctgatcagagcctctggtcaatttctttggggtgacacagaaaataatgcagaggtcatttctttcagccctgtcctctggctggcttaggntagggctaagtagatgaagcatcttatatgtcccagccacccagccccttagcacttttaggactgngttagctaaccagtcctagtaccatcttggaccctgagcagcatgaaaatgcagtgccccatcctttaatgaaaatgaat

SEQ ID NO: 66950 - DNA, 746 bp, Homo sapiens
tttcgtctgcatgtggagtttccaaaaactcccaagctgtgggaaccatgacaattattttcactgggaatagagcagctccacctatcatgatgcctatgcactctctccctaaagctccaagtcaaatgctggatccacactttggcttcctggggacccctgagtgtccccggtaagatggggctcagggctggtggcctctgcctcaggctgagcggccctgagtgtgtgctgaatccctctctctgcccagctcccaacacagagacagagcccttgctgacctggaagaaggcccaggagacagtgccctggaacatcatccttctcctgggagggggcttcgccatggccaaaggctgtgaggaatcggggctgtctgtatggattggtgggcagctgcaccccctggagaatgtgccccccgccctggctgtgctgctcatcactgtggtcatcgccttcttcactgagtttgccagcaacacggcgaccatcatcatcttcctgccggtcctggcagagctggccatccgcctgagagtgcaccccctgtatctgatgattccgggcacagtcggctgctcctttgccttcatgctcccggtctcaacgccccccaactccatcgccttcgcctctggacacttgctggtcaaagacatggtgcggacaggcctcctgatgaacctgatgggtggtctgtctgctagtttgggcatgaatacttgggcacagaccat

SEQ ID NO: 66951 - DNA, 777 bp, Homo sapiens
tttcgtgtaactgctgctgagtagacagatgtgtgaacagccccctggcattccatatggatcgacttcacatgcatggcttctgactgttggttgagttcttttttgataaattcggattccccaagcattctcaattttaattaatgagtgaatatcagtcccattaaatcggcttatccttacgatattgtagctatcagaattggttgcatacaaataatcttcaaacacagttataccataaagatgtctgacttgtctgccttgaatgacagcgtgtctattttttccttgatagtccactactcccacatagtccaagtaaagatctacccagtaaaccaatttgttgactaggtctagtgccagtgcagctggctgctctgtctttgaatcaattatccttgttcggttcatcccatccatgtcacatctctccactttggcgacattcccgtagtcagtaaagaaaagttttcctgctattggatctactgctattgctttaggattgtgaagctccagatcaatcagggtgacacatacagaaccgttggaattacaaacaaagatccggtcaccgacatggtccacaaaatagagatttcgagtgagccagtcaatcgccatttgttgcacattgtggaaggattgaagaatattgattgtccattcatctgttaatcctcctgcttttgttatctggatacatttgagttgatttgaagattctcttgattcaatccaacaaatcatatcttcattataaataag

SEQ ID NO: 66952 - DNA, 738 bp, Homo sapiens
tttcgtgttcctggcacgaggccccagcggcctcctgctctacaacgggcagaagacggacggcaagggggacttcgtgtcgctggcactgcgggaccgccgcctggagttccgctacgacctgggcaagggggcagcggtcatcaggagcagggagccagtcaccctgggagcctggaccagggtctcactggagcgaaacggccgcaagggtgccctgcgtgtgggcgacggcccccgtgtgttgggggagtccccgaaatcccgcaaggttccgcacaccgtcctcaacctgaaggagccgctctacgtagggggcgctcccgacttcagcaagctggcccgtgctgctgccgtgtcctctggcttcgacggtgccatccagctggtctccctcggaggccgccagctgctgaccccggagcacgtgctgcggcaggtggacgtcacgtcctttgcaggtcacccctgcacccgggcctcaggccacccctgcctcaatggggcctcctgcgtcccgagggaggctgcctatgtgtgcctgtgtcccgggggattctcaggaccgctctgcgagaaggggctggtggagaagtcagcgggggacgtggataccttggcctttgacgggcggacctttgtcgagtacctcaacgctgtgaccgagagcgaaaaggcactgcagagcaaccactttgaactgagcctgcgccctcgtgccaagcttggcgtagtcat

SEQ ID NO: 66953 - DNA, 390 bp, Homo sapiens
tttcgtgcggcggcgacggtcgggcggcacactttacctgagcattggtcctacggggtgtgccgggatggccgcgtcttcttcatcaatgaccagctccgctgcacgacctggctgcacccgcgcaccggggagcccgtcaactcgggccacatgatccgctcatacctgccccgcggctgggaggagggcttcacggaggagggcgccagctacttcatcgaccataaccagcagaccacagcattcaggcatcctgtgacgggacagttttctccagaaaatagtgaattcattcttcaagaagagccgaatccacatatgtcgaagcaagacagaaaccaaagaccgtccagcatggtcagtgaaacatccacggctgggaccgcc

SEQ ID NO: 66954 - DNA, 361 bp, Homo sapiens
tttcgtcagtacatgggccggtgccccatagtgatgatccacggccgggctgcccggttcttattggctttctggaggtcgctctccagccagcgaaactgcctctgcaccaagtggcggccataatggagaaagaaatagacctcggtggagaaggagatgatgtgggcgggacccagatcccagctgtaccacaggccctcattatcccccggcatgctgaagcgagccttgtagttagagaagttgtagcgttcttcatgattcccagggcatgtcatgtacggcaggctggcagccacgggttcaatgagccgcatgaacctatccccaacacgggcgttgtcctgatccaggttgt

SEQ ID NO: 66955 - DNA, 510 bp, Homo sapiens
tttcgtggtggctgtgggcagagtgcaggcacagaggcaggattactgctggatgccgcaaggacttcctgtggagaaaatgtctgttctgttgcctgtgtgatctcagggccccacagaacacaatccatcacccatggggcagaacgtgtgaaaacagcaagaccggcagaagcaagcggcgcgaggactcagagcgatcgatattcgtgcggttaaaagaaggtggctaccggctgcgagagaacatcctcttccatctctacgtgagcacctccccctgtggagacgcaagactccactctccctacgagatcaccacagacctgcacagcagcaaacacctcgtcaggaagttccgcgggcacctgcgcaccaagatcgagtccggggaagggacggtccccgtgcgtggccccagcgcagtgcagacctgggacggcgtcctgctgggggagcagctgatcaccatgtcctgcacggacaagatcgccaggtggaacgtcctgg

SEQ ID NO: 66956 - DNA, 385 bp, Homo sapiens
tttcgtcgggcgggatcggttacattcgcgcctatcttttacaaaaaggcgagatcaacgtcggtgcgaagctggtcgttctcggcggcccggcaatgaacatcggtcttggcggtggtgcagcgtcttctatggcgtctggtcagtctgatgccgacctcgactttgcttccgtacagcgcgacaacccggagatggagcgtcgctgccaggaagtgatcgaccgttgctggcagcttggtgatgccaacccaatcctgtttatccacgacgttggcgctggcggtctttctaacgccatgccggaactggtgagcgacggcgggcgcggcggtaaatttgaactgcgcgagattctaagcgacgaaccgggcatgagcccgct

SEQ ID NO: 66957 - DNA, 1320 bp, Homo sapiens
tttcgtgctgacagcacttcagtggggagtttcccgtcgggagagagcagtgaccagggtccccggacgcccacccagcctctgttggagtctggcttccgctcaggcagcctgggacagcccagcccgtctgcccagagaaactaccagagctcttctcctctcccgactgtgggcagtagctacagcagccccgactactcacttcagcatttcagctcctctccggaaagccaggctcgagctcagttcagtgtggctggcgtccacacggtgcctgggagccctcaggcgcgccacagaacagtgggcaccaacactccccctagtcctggcttcggctggcgggccatcaatcccagcatggctgcccccagcagtcccagtttgagccatcaccagatgatgggtccaccaggcactggcttccatggtagcactgtctccagcccccagagcagtgcagcgaccaccccggggagccccagcctgtgtcggcacccagcaggggtctaccaggtttctggcctccacaacaaagtggccaccaccccggggagtcccagcctgggccggcaccctggggctcaccaaggcaacctggcctccggtcttcatagcaatgcaatagccagccctggaagccccagcctgggccgtcacctcggagggtctggatctgtggttcccggcagcccctgcttggaccggcatgtggcctatggtggctattctaccccggaggatcggagacccacactgtcccggcagagcagtgcctctggctaccaggctccttccacgccctccttccctgtctcccctgcctactaccctggcctgagcagccctgccacctccccgtcaccagactccgcagccttccggcaagggagcccaacaccagccttgccagagaagcgaaggatgtcagtgggagaccgggcaggcagcctccccaactatgccaccatcaatgggaaggtgtcttcgcctgtcgccagcggcatgtccagtcccagtgggggcagcaccgtctccttctcccacactctgcccgacttctccaagtactccatgccagacaacagcccggagacgcgggctaaagtgaagtttgtccaggacacttctaagtattggtacaagcctgagatctccagggagcagggtgagtgctgggctctgtggtgcatcagaggccatagctggctgaggcctgctgtgtcttccctgggcaaggaacagaggcaaattcagtcctctttgtagcagggggtcatcacagagggggctggggttgaagctggacagtacgaa

SEQ ID NO: 66958 - DNA, 535 bp, Homo sapiens
caattcccgggtcgacgatttcgtgtacttctgttggggcgccgactccagggagctgcagcgccggaggacggcgggcagccccggggctgagctactgcaggcggccagcggggagcgccactctctgctgctgctgaccaaccacagggtcctctcgtgcggagacaacagcaggggtcagctgggccgcaggggcgcgcagcgcggggagctgccacaaccaattcaggcattggaaaccctaattgttgatctcgtgagctgcgggaaggagcactccctggctgtgtgccacaaaggaagggtcttcgcatggggagctggttctgaagggcagctggggattggagaattcaaggaaataagtttcacacctaagaaaataacgactctgaatgatataaaaataatacaagtttcctgtggacactaccactccctggcattatcaaaagatagccaagtgttttcgtggggaaagaacagccatgggcagctgggcttggggaaggagttcccctcccaagccagg

SEQ ID NO: 66959 - DNA, 486 bp, Homo sapiens
tttcgtctgggaacccgcagcctggggactcctccggcgggggcgctgggggcgggctgccgtcccctggggagcaggagctgagccggcgcttgcagcgcctgtatcccgcggtcaaccagcaagagactccgctgccgcgctcctggagccccaaggacaaatacaactacattggtctctcccagggcaacctccgcgtccactacaaaggtcatggcaaaaatcacaaagatgcggcctcagtgcgtgccacccaccccatacctgctgcctgtggcatttattactttgaagtgaagattgtcagcaaaggaagagatggttacatgggaataggactctcggctcaaggcgtcaacatgaacagacttcctggttgggacaaacattcctatggttaccatggtgatgatgggcattcgttctgctcctcggggactggccagccctatggtcccacattcaccacaggagacgtgatcg

SEQ ID NO: 66960 - DNA, 671 bp, Homo sapiens
cccgggcgacaatttcgttggagagtttgcgtggcgggaacgcggcggcagtgagagcgagcggcgccggcccttgcgtccggtgcggcgatgctgaccccggcgttcgacctcagccaggatccggacttcctgactatcgccatccgcgtgccctacgcccgggtctccgagttcgacgtctacttcgaggggtctgacttcaagttctacgccaagccatactttctcagattaacccttcctggaagaattgtagaaaatggaagtgagcaagggtcctatgatgcagataaaggaatttttaccattcgcctgcccaaagaaacccctggccagcattttgaggggctgaacatgttaactgctcttctggcaccaagaaaatccaggacagcaaaaccacttgtggaagaaataggtgcttctgagattcctgaggaagtagttgacgatgaagagtttgattgggaaattgagcagacaccctgtgaagaggtatcagaaagtgctttgaatccgcagtgccactatggatttggaaacttacgatcaggagtgttgcaacggttacaggatgaactgagtgatgttattgatattaaggatccagatttcacccctgcagctcagcggccaggcgcttctgtcttcgttcagctgcagtcgac

SEQ ID NO: 66961 - DNA, 588 bp, Homo sapiens
tttcgtggagaacccctacccgttccagtgcaccatcgattaccccactaagcagaccaagttcaagggcatgaagagctacatctcctacaagctggtgcccacgcacacgcaggtgccggtgcatcggcgctacaagcacttcgactggctgtacgcgcgcctggcggagaagttcccggtcatctccgtgccccacctgcccgagaagcaggccaccggccgcttcgaggaggacttcatctctaagcgcaggaagggcctgatctggtggatgaaccacatggccagccacccagtgctggcgcagtgcgacgtcttccagcacttcctgacgtgccccagcagcaccgacgagaaagcctggaagcagggcaagaggaaggccgagaaggacgagatggtgggcgccaacttcttcctgacccttagcacgccccccgccgctgcccttgacctgcaggaggtggagagcaagatcgacggcttcaagtgcttcaccaagaagatggacgacagcgcgctgcagctcatccacacggccaacgagttcgcgcgcatgcaggtgaccggcttcaaaaaggattt

SEQ ID NO: 66962 - DNA, 1328 bp, Homo sapiens
cgagttcggctccttggcagtgtgtgcccctgacccaggtgtgttggtgtcagctggtagcttcatcctgtttgtttttcagatgatcatgcaccctaagggctcatctaggctccctgagagcacctcctttctgtgtctgttctcaggaatgctgttgagctctcctgttgcaggagcatgagcgccaggggctctggtgtctgaacagcgtgttttgcaggatgactttgccaacgatgtggatgctctgctggaagaaggcctttgtgcccccaaaaagaggcgaacagaggaaaaatatggcggagacagcgaccatccgtccgatggagagacaagtgtgcagccgatgatgaccaagattaaaacagtgctcaaaagtcgtggccgcccacctacagagccgctgcccgacgggtggatcatgacattccataactctggagtcccggtgtacctacacagagagtctcgggtggtcacctggtccaggccatacttcttgggaacgggaagcatacggaaacacgaccctcctctgagtagcatcccttgtctgcattataagaaaatgaaggacaacgaggaacgggagcaaagcagtgacctcacccctagtggggatgtgtcccccgtcaagcccctgagccgatctgcagagctggagtttcccctggatgagcctgactctatgggtgctgacccggggcccccggacgagaaagacccactaggggctgaggcagcccctggggccctggggcaggtgaaggccaaagtcgaggtgtgcaaagatgaatccgttgatctcgaggaatttcgaagctacctggagaagcgttttgactttgagcaagttactgtgaaaaaattcaggacttgggctgagcggcggcaattcaatcgggaaatgaagcggaagcaggcggagtccgagaggcccatcttgccagccaatcagaagctcattactttatcagtgcaagatgcacccacaaagaaagagtttgttattaaccccaacgggaaatccgaggtctgcatcctgcacgagtacatgcagcgtgtcctcaaggtccgccctgtctataatttctttgaatgtgagaacccaagtgagccttttggtgcctcggtgaccattgatggtgtgacttacggatctggaactgcaagcagcaaaaaacttgcgaagaataaagctgcccgagctacactggaaatcctcatccctgactttgttaaacagacctctgaagagaagcccaaagacagtgaagaactcgagtattttaaccacatcagcatcgaggactcgcgggtct

SEQ ID NO: 66963 - DNA, 1309 bp, Homo sapiens
agtacataccgaattccctggtcgactccacgcgtccggatctaggcaccggtccgagtgcctgccctctgtccccgcggctgggtctcgtctgctccggttcctgggctcctaattcttggtccagcttcttccaggtctgcgcgtctgttgttcccagcgctctgcgaagcctgaaaaggaggagcaacctgtccagaatccccgcaggacaggaaaaggaggggaaatctcgacatggaaaaactctacagtgaaaatgaaggaatggcttcaaaccaaggaaagatggaaaatgaagaacagccacaagacgagagaaagccagaagtaacttgtactctggaagacaagaagttagaaaacgagggaaagacagaaaacaagggcaaaacaggagatgaggaaatgttaaaggataaaggaaagccagagagtgagggagaggcaaaagaaggaaagtcagagagggagggagagtcagagatggagggaggatcagagagagagggaaaaccagagatagagggaaagccagagagtgaaggagagccagggagtgaaacaagggctgcaggaaagcgcccagctgaggatgatgtacccaggaaagccaaaagaaaaactaataaggggctggctcattacctcaaggagtataaagaggccatacatgatatgaatttcagcaatgaggacatgataagagaatttgacaatatggctaaggtgcaggatgagaagagaaaaagcaaacagaaattgggggcgtttttgtggatgcaaagaaatttacaggaccccttctaccctagaggtccaagggaattcaggggtggctgcagggccccacgaagggacattgaagacattccttatgtgtagtgtccctggcaggcatttaccaggccatgtgctttaacgttacggtaatactttactttaggcatccctcctgttgctagcagccttttgacctatctgcaatgcagtgttctcagtaggaaatgttcatctgttacatggaaaaaatgttgatggtgcattgtaaaattaaaaaacacaacttgcagaaccaaatatatggcatcagtacatttttgtaaaactacaaagatacttacctagtaatatagtatagaaaacaattctgaaagctgtgtccactaaaagattaacagtggttatctctgggtgattttttctgttcttttttgttcatctgtccatttttctcctaaaaacagatttccttagtcataaaaataataaaatataaagtattggaaaacagtgaaaaaaaaaaaaa

SEQ ID NO: 66964 - DNA, 1118 bp, Homo sapiens
cccacgcgtccgcgatgagctcaatgtgaagccagaggggacccgaattgcggtggctcagtacagcgatgatgtcaaggtggagtcccgttttgatgagcaccagagtaagcctgagatcctgaatcttgtgaagagaatgaagatcaagacgggcaaagccctcaacctgggctacgcgctggactatgcacagaggtacatttttgtgaagtctgctggcagccggatcgaggatggagtgcttcagttcctggtgctgctggtcgcaggaaggtcatctgaccgtgtggatgggccagcaagtaacctgaagcagagtggggttgtgcctttcatcttccaagccaagaacgcagaccctgctgagttagagcagatcgtgctgtctccagcgtttatcctggctgcagagtcgcttcccaagattggagatcttcatccacagatagtgaatctcttaaaatcagtgcacaacggagcaccagcaccagtttcaggtgaaaaggacgtggtgtttctgcttgatggctctgagggcgtcaggagcggcttccctctgttgaaagagtttgtccagagagtggtggaaagcctggatgtgggccaggaccgggtccgcgtggccgtggtgcagtacagcgaccggaccaggcccgagttctacctgaattcatacatgaacaagcaggacgtcgtcaacgctgtccgccagctgaccctgctgggagggccgacccccaacaccggggccgccctggagtttgtcctgaggaacatcctggtcagctctgcgggaagcaggataacagaaggtgtgccccagctgctgatcgtcctcacggccgacaggtctggggatgatgtgcggaacccctccgtggtcgtgaagaggggtggggctgtgcccattggcattggcatcgggaacgctgacatcacagagatgcagaccatctccttcatcccggactttgccgtggccattcccacctttcgccagctggggaccgtccaacaggtcatctctgagagggtgacccagctcacccgcgaggagctgagcaggctgcagccggtgttgcagcctctaccgagcccctcgtgccgctcgtgcc

SEQ ID NO: 66965 - DNA, 948 bp, Homo sapiens
tcaaaacaaaacatgcaagaaacatatatcacaatcatgttggacagtccatgatcgtacattactatctgtgattgacagtcttccagagattattgaaacattggaagttatagcaagccattcttcaaatacaagtttcgccgatgaattgagtcatttgctgacattggtttccaaatttgaatttgtcttttgtttgaaattcctgtatcgagtgctgagtgttacaggaattctttccaaagagcttcaaaataaaaccatagacattttttctttgtcttcaaaaatagaagcaattttggaatgtttatcatctgaaagaaatgacgtatactttaaaacaatctgggatggaacagaggaaatatgtcaaaaaataacctgtaaaggttttaaagttgaaaaaccttctcttcagaaaagaagaaaaattcagaaatcagtagatcttggcaattcagataatatgttttttcctacttcaacagaagaacaatataaaattaatatctattaccaaggattagatactatattacaaaatttaaagttatgtttttcggagtttgattattgcaaaataaagcaaatttcagaactgttatttaaatggaatgaaccattaaatgaaacaacagcaaaacatgttcaggaattttataaacttgatgaggacattatcccagaacttagattttatcgacattatgcaaagcttaactttgtcatagatgatagttgcataaacttcgtcagtctcggctgtttgtttattcagcatggtcttcacagtaatattccttgtctctcaaagctattatatattgctttgtcttggccaattacttcagcaagtactgagaactcattttctaccctgcctcgtcttaagacatatttatgtaataccatgggacaagagaagcttactggcccagccct

SEQ ID NO: 66966 - DNA, 427 bp, Homo sapiens
cctcaaagttattattattgcaacaccatatatgcatcattatatgaagcatcagaaaaaaggaatacatcgttgtacaaaatgcaggctgcagtttttgacatgcaaggagaaaatggatcataagactcaacaccatcgaacatttataaaacctaaacaactagaaggattgcctcctggaacaaaagttactattcgagcttcagttggacctctgcaatcaggagcttcacctacaccttccattagtgcaagtgcttctacccttcagctctcacctccaaggactaaaaatataactgctaaaaatcctgcaaaatctaatacaagtaaacctaatacaatcaaatccaacgcaagtaaacctaatacaagtaagcctaatggaagtaaatctaaatacaaaccaaaaatctctaatatg

SEQ ID NO: 66967 - DNA, 825 bp, Homo sapiens
tttcgtgcggggctgggggctcggcccgccttgccctgaggcgctgggtgccttccagttggctgcgaccagcggtgacttacaagttggctgctgtcgcctgcgcatcggcgggccgggaggctgagcagtactgttgagagcggtgtgaggtgcttggtagcgcgccgtagctgcttccacgtccttgcttcacctcaggtaaagagagaagtaatggaaggcctgtctgatgttgcttcttttgcaactaaacttaaaaacactctcatccagtaccatagcattgaagaagataagtggcgagttgctaaaaaaacgaaagatgtaactgtttggagaaaaccctcagaagaatttaatggatatctctacaaagcccaaggtgttatagatgaccttgtctatagtataatagaccatatacgcccagggccttgtcgtttggattgggacagcttgatgacttctttggatattctggagaactttgaagagaattgctgtgtgatgcgttacactactgctggtcagctttggaatataatttccccaagagaatttgttgatttctcctatactgtgggctataaagaagggcttttatcttgtggaataagtcttgactgggatgaaaagagaccagaatttgttcgaggatataaccatccctgtggttggttttgtgttccacttaaagacaacccaaaccagagtcttttgacaggatatattcagacagatctgcgtgggatgattcctcagtctgcggtagatacagccatggcaagcactttaaccaacttctatggtgatttacgaaaa

SEQ ID NO: 66968 - DNA, 1317 bp, Homo sapiens
ggccctgaagggatctcttgtccagaattaaacactgatcaccagtggaccagagctgcctggagcacatcttcactgggctgcataatggtttttaaaaaatcctggagcctctattttagcatctcgatttgagatatgaagatccatgtttcttgagtttttcttaaacgacagaagattttgcttcccagactagcatccctctgtggctacaaccagcctgaaccgaggggtctgccctttagaagggcccagctcacgggctcactgtgcactcaggccctagccagcctgctgtacgtaggtgtttgcgatttcatcattggccttgttttaacagacagcagagcagagcacctgccataaagcaagcctcgatgtgctaagtgccatgtggagcccttgccctgctggggctcgctgctcccatttgagctgccacagatcagcccctccccccagggtctccgaggagtcaggaccgcacagcctgccctcctagggaaggacttcctcagggaaggcaggcatgtggaagccaggtgcagagtcctggcctctccacacaggtgccgcccaggtgatgtggtttgagaagctgtatgctggcctgcagtgcgtagagaagtacctcatctaccccgccgtggtgctcaacgccctcacggtggacgcccacacagtcgtcagccacccggacaagtactgcttctactgccgggcgctgctgatgaccgtggctgggctgaagctgctgcgctcagccttctgctgccccccacagcagtacctgacgttggccttcaccgtcctgctcttccactttgactacccgcgcctctcccagggctttctgcttgactacttcctcatgtccctgctttgcagcaagctgtgggacttgctgtacaagctgcgtttcgtgctgacctacatcgcgccctggcagatcacctggggctcggctttccacgcttttgcccagccgtttgccgtgccacactcggccatgctgttcgtccaggccctgctctcggggctcttctccacgcctctcaacccactgctaggcagtgccgtcttcatcatgtcctacgctcggcccctcaagttctgggagcgcgactacaacactaaacgtgtggatcattccaacacccgcctggtcacacagctggacaggaaccctggcgctgatgacaacaacctcaactccatcttctatgagcacttgacacgttcgctgcagcacacactgtgtggggacctggtgctgggccgctggggcaactatggccctggtgactgcttcgt

SEQ ID NO: 66969 - DNA, 713 bp, Homo sapiens
tcagctcagcttggcacgaggaaaggtgttcttgtgtgccttgtcttttgtttactttgccaaagcattggcagaaggctatctgaagagcaccatcactcagatagagagaagggttgatatcccttcttcactggtgggagttattgatggtagttttgaaattgggaatctcttagttataacatttgttagctactttggagccaaacttcacaggccaaaaataattggagcagggtgtgtaatcatgggagttggaacactgctcattgcaatgcctcagttcttcatggagcagtacaaatatgagagatattctccttcctccaattccactctcagcatctctccgtgtctcctagagtcaagcagtcaattaccagtttcagttatggaaaaatcaaaatccaaaataagtaacgaatgtgaagtggacactagctcttccatgtggatttatgttttcctgggcaatcttcttcgtggaataggagaaactcccattcagcctttgggcattgcctacctggatgattttgccagtgaagacaatgcagctttctatattgggtgtgtgcagacggttgcaattataggaccaatctttggtttcctgttaggctcattatgtgccaaactatatgttgacattggctttgtaaacctagtcatttttaggtggaagcatgttacagcacattatcgaggaa

SEQ ID NO: 66970 - DNA, 344 bp, Homo sapiens
aaatccccaaacctacttaggtctactctgtatttgtgttttcaaataatttttttagcttccaaatagaagcgttgtattcttttctgaattagaaaacattgttcgacttaactgctaaagagttagacaatcattttgcatatgtttattatgtcttagattgtttgcattgttacctagattctctttcatctttcaatgtcagtttttattggtttattatatgttgtttattttctttttaggaagccaccattcttcagagggcaatgaaggcacagaaatggaagtaccagcagaagatgatgattattctccaccgtctaagagaccaaaggcca

SEQ ID NO: 66971 - DNA, 642 bp, Homo sapiens
gcaatattggaggctgcatttcagtttctgtcacccctccagcagaatttgtttaaattttgtctgtcccttcgttcttactcagctacaatccaagccttccagcagatagcagctgatgaacctccaccagaaggatgtaattcgtttttttcagtgcatggaaagaagacttgtgaatctgatacccttgaggctcttctactgacagcctctgaaagacccaaacctttattgttcaaaggagatcacagatatccctcgtctaatcctgaaagccctgtggtgattttctactctgagattggctctgaggaattttccaattttcaccgccagcttatatcaaaaagcaatgcaggcaaaatcaactatgtattcagacattatatatttaatcccaggaaggagcctgtttacctctctggctatggcgtggaattggccattaagagcactgagtacaaggccaaggatgatactcaggtgaaaggaactgaggtaaacaccacagtgattggtgaaaatgatcctattgatgaggttcaggggttcctctttggaaaattaagagatctgcaccccgacctggagggacagttgaaagaactcagaaagcatcttgtagagagcacctgtatt

SEQ ID NO: 66972 - DNA, 343 bp, Homo sapiens
tggttccacagggcagaccccgctgcactcacagggaggaggaggcggcagcggcggaggaaggcggcgcaccccgagaggcatgcccaaagaaaaatacgagccccctgaccctcggaggatgtatacaattatgtcttctgaggaagcagcaaatggaaagaaatcccactgggcagagcttgaaataagtggaaaagtaagaagcttaagcgcatctttgtggtcactaactcacctgacagctttgcatttgagtgacaattccctgtcccgaattccttcagacattgccaagcttcacaatctggtgtatttggacctgtcatctaataaaattcgg

SEQ ID NO: 66973 - DNA, 1067 bp, Homo sapiens
cagccttccaaggtagggcacaccaaggcctaaggaatcagaaagggcccgagggtgggctgtgtcctggctttcaggccctggggcgaccaccagcctctgctcactctgaggctccagccagggcgccaagcctcaggaccgtgggtggggcccaaggacactctggacccccgttccattcatgagaggccctcagcacgccacgtgtctgctgtgacagcccgcagggagggtggaagccttctgtaaattccacatgtgggccgagggcatgacgtccttgatgaaggccgcgctggacctcacctaccccatcacgtccatgttctccggagccggcttcaacagcagcatcttcagcgtcttcaaggaccagcagatcgaggacctgtggattccttatttcgccatcaccaccgacatcacagcctcggccatgcgggtccacaccgacggctccctgtggcggtacgtgcgtgccagcatgtccctgtccggttacatgccccctctctgtgacccgaaggacggacacctgctgatggacgggggctacatcaacaacctcccagcggatgtggcccggtccatgggggcaaaagtggtgatcgccattgacgtgggcagccgagatgagacggacctcaccaactatggggatgcgctgtctgggtggtggctgctgtggaaacgctggaaccccttggccacgaaagtcaaggtgttgaacatggcagagattcagacgcgcctggcctacgtgtgttgcgtgcggcagctggaggtggtgaagagcagtgactactgcgagtacctgcgcccccccatcgacagctacagcaccctggacttcggcaagttcaacgagatctgcgaagtgggctaccagcacgggcgcacggtgtttgacatctggggccgcagcggcgtgctggagaagatgctccgcgaccagcaggggccgagcaagaagcccgcgagtgcggtcctcacctgtcccaacgcctccttcacggaccttgccgaaattgtgtctcgcattgagcccgccaagcccgccatgg

SEQ ID NO: 66974 - DNA, 533 bp, Homo sapiens
cgctgctaattatgacttatttcaactgaaaaacaacaaaaaaagtcaactctgccaaaagcgattgtatcctccagagatagtgacattattgatttcaggctatttgccaagttgaatgctttctgtgtcattgtttgcaacgaaaagaacaaaatcgccgaaatcaagattcaaggactggattcctccctttctctccagtcaagaaagcagtcactttttgcccgactagaaaatattattgtcacagatgttgatccaaagacagttcataagaaagctgtgtcaataatgggaaatgaagttttccgttttaatttggatttgtatccagatgctactgagggggatttggatactgacatgtccaaagtggatggtgtgctgtctctgaatgatggctgtattcagattggctatcttcataaattccttatgtcacttctgaacttcctgaataatttccagaccagacaagagtctctgagtgctgccactggccacgctgcaaaaagggctgccacaagtgg

SEQ ID NO: 66975 - DNA, 992 bp, Homo sapiens
cggacgcgtgggccgagacccgccattggacggctctgacttttgctgtgttgcatggacatattcctgtagttcagctcctcctggatgctggggccaaggtggaaggctcagtggagcatggcgaggagaactactcggaaacacccctccagctggcagctgctgtaggaaattttgagctggttagtttgctgttggagcgtggtgccgatcccctgataggaaccatgtacaggaatggaatttctacaaccccccagggtgatatgaactctttcagccaggctgcagcccacggacacaggaatgtgttccgcaaactgctcgcccagccagagaaggagaagagtgatatcctgtccctggaggagattctggccgaggggactgacctggcggagacagccccgccccccttgtgcgccagccgcaacagcaaggccaaactgagggccctgagggaggccatgtatcacagcgctgagcatggctacgtggatgtcacaattgatatcaggagcataggcgtcccgtggactctgcacacgtggctggagtctttgcggatcgccttccagcagcaccgcaggcctctcatccagtgcttgttaaaggagtttaagaccattcaggaggaggaatacacggaggagctcgttacccaaggcctgcccctgatgtttgagatcctgaaagcgagcaagaatgaagtgatcagccagcagctgtgcgtcatcttcacacactgctacgggccctaccccatccccaagctcacagaaatcaaacggaaacagacctcgcgcttggatcctcattttcttaacaataaagaaatgtctgatgttacatttctggtagaaggaagaccattttatgctcacaaagtgctgttatttacagcctctccaagggtcaaagcactcctctccagcaagccgacaaatgatggcacctgcatagagattggttatgtgaaatactccatc

SEQ ID NO: 66976 - DNA, 417 bp, Homo sapiens
ggtcgacccacgcgtccgcatctatacacttgtattaactcccactttgactccaggaaaagtgtaatgttggttcgagctcaagaaggaatctggattccgataactttacctagaccttgggaatcctccccctcaacacatttaattaatgaagtggtacaacgaattctaaaaagatctaagatatttgttttcactttaatcgctgttatcatgggcctaattacagtcactgcaatggccaccactgctggaatggcattacaccagtccattcaaacggctcattttgttaatgattggcaagccaattccacccaaatgtggaattctcaacaaggcatcgatcaaaaattggcaaatcaaattattgatttaagacagtctgttatttggcttggagatcgggtagtg

SEQ ID NO: 66977 - DNA, 196 bp, Homo sapiens
ggcacgagttcttacctctgaagacaatgttaggaccaagatatgatagtcaagttgctgaagaaaatcggttccatcccagcatgctctcaaattacctaaagagcctaaaggtaagaaacaaaatttatttttgtcactgatttaatatactttgttcagtcttggtcttcaggtggcttttaaaaaaatctta

SEQ ID NO: 66978 - DNA, 1366 bp, Homo sapiens
  misc_feature (1)...(1366): n = a,t,c or g
ctcaacccctgaaccactacttcatctgctcttctcataacacctacctagtgggggaccagctttgtggccagagcagcgtcgagggatatatacggtgcagtggtggtagagaaggggtccaactcatgagagggaccatgtagaaaagtgaggggagctgtcagtgtctaacagattgggacagtgttgtgggggtttaggggctgaggagccctggataccagagacacttggaggagatattgaagactggtgggagaatggtaatgaaaccctatgggtcaatggaacttctctttcacaagctatgaaactctcctggaactcagaggccctgacagatttatatttaacaaattaataaacagattgttaaatggaaggcaatagagaataggagttaaaaatataggttctggagtcagaccatctgaaattatatcctagctccttcacttggtactctggggctaagtatttaacttctatacctcagtctccccatctgtgaaacagggatggtaacagtgcctattctgtctgggttgttgtgaagagataattcatatgtcaatagctaataagcagttctgattttattgtgactaatcatggattagattgaatagtcaagatatctttctattaccagcaactgaactagtagcttcaagggatacaaagatgagtggaacatatagtttccaccttaagaagtctagctgaggaattaaagggtaanatttactgacaggttgaataacccggatgttgtatagggatataaagccagaaacacannnnnnnnnnnnnnnnnnnnnnnnnnnnnnnnnnnnnnnnnnnncagcacggagaacgtttggaccccgaatttggaacaagctgggcaccattggggagccgtttgcccaaaaggccgaattccccggctggggtaggtggtttagtaccacgcttcgggaggggggggcgagatcggttaacctgagaggaagggtgaggtagcacgttgacacacggcctgtcatcggtggaggaatgtaagcgtgttagaaggaaagaggggcgcagtttgatgaaacgtgctatggtcggggtggggatgatattgtatggcgccagtaggtatcgagcggcggatatatgggagtggggaggaagcgggtagtacgtaacgtagtgagaatgaaggaggggagtagcattggatgatggtgtgtagagtgggaggtaggtatcgtcggatggacggaaggaagggagtgtaggatggtgtggtaggtatggaagctacgagaggtgagttggtaagcacggcacagtaggtgagggaggttagctagtgagggaatgtagggagggc

SEQ ID NO: 66979 - DNA, 633 bp, Homo sapiens
cccacgcgtccgcggacgcgtgggtgaccttggtgctcaccctgatgtgcaagaccgaatgggctgtactcccacaatgagggctgcagaactgggccatgaattgtcaatggaaatattagcaaaggcaaaggctgatatgactatagttgataatgaaggaaaaggtgttttgttttactgcattttaccgactaagcggcattatcgctgtgctctgatcgcccttgaacatggtgcagatgtcaacaattctacctatgaaggaaagccaatattccttagagcttgtgaagatgcacatgatgttaaagatgtgtgcctgacatttttggaaaaaggagccaatcctaatgcaatcaactcatccacaggccgcacagctttaatggaagcgtcaagagaaggggtagtggaaatagttcgaggcatattggaaagaggaggtgaagtgaatgcatttgacaacgacaggcatcacgctgctcattttgctgctaaaggaggctttttcgatatattgaagcttctttttgcctacaatggagacgtggggctgatttcgataaatgggaacacaccacttcattatgctgccatgggtggttttgcagactgctgtaaatatataga

SEQ ID NO: 66980 - DNA, 799 bp, Homo sapiens
ttttttttttttgatgcttgcagagcaactcccaataacttgatcttcaagacgggaattacttctgattacactctgagaatatctgtcatctgcctttgacaccttataagttgattcttgagcattaatttctccatcagatagcctttgggttgatgactcaagagatgcttgtggctgcaacacctgtaactcttgcattgggaaaaccatcttcttgctttgaagatggatacacatctgagtcaagctttctttcagcataagactttgggtcaggggaagttatgttattttgtaatgtctgacaatgagtagaggatgcaaaagatgatgactggacagcaggcaaaaacttctgggactggggagatgatgactcttgagtctgaacattttgggaagaatgcatagaaatataattctgggtcgggctagagtctggcaaattctgagcccgagaggcagaagaataagaaagagaaggggctgttaatgttagggactcccctgaagcatagctttctgaaagactaacaactgacaaaacttgtgattgagatgaatagctaacctgtgtctggctaactggtgataaaccctgagagtgaccagatgagtaactttgagactgacttactgaagacagatctcttgtttgagcagggtaattctcatttgtaactgaagacaatacctcttgctgattagatgaataattaagcgtctgattttcaggagttatagtctgagatgacccagaaaaagtcaatgttttatacaagggtggcaattt

SEQ ID NO: 66981 - DNA, 422 bp, Homo sapiens
  misc_feature (1)...(422): n = a,t,c or g
atcatgtnnnnnnatgatattccttggtcgacccacgcctccggtggaaaaacctttattttccattcaagttttcgaagacacatggtaatgcacagtggggatggaacttataaatgtaaattttgggggaaagccttccattctttcagtttatatcttatccatgaaagaactcacactggagagaaaccatatgaatgtaaacaatgcggcaaatcctttacttattctgctacccttcaaatacatgaaagaactcacactggggagaagccctatgaatgtagcaaatgtgataaagcatttcatagttctagttcctatcatagacatgaaagaagtcacatgggagagaagccttatcaatgcaaagaatgtggaaaagcatttgcatataccacgtctcttcgtagacatga

SEQ ID NO: 66982 - DNA, 658 bp, Homo sapiens
ttttttttttttgccactgaccgcagaaagtctttattcctgagttaaaatcaggttctagaactacagcccgtcccccagggcagccaatgctagtagggcagatggaaacctctggtggaggcagccacagagttcacggctcgggcctgtgacccacgatctcatcctagccctttcgacaggtacgggtgatccactcatgctcgtcatcatctgcgtttcttagaaagcggttcctatagtccttgactaccctcgtgactgggttatagaagccgtctccacaatcgtaatagcccttggggatttttctaggtgggtccatattggtgagttgagccatacctgcaggcttcaagccattgaggatctctgtgtaaaacctccgatcatagccgtcgcagtaatgccagtttttctcatcatagtgcagcccatctgagaacgtatatgtgccctttatggccaatccgttttcccaaatggcgtcgtattggcttccgctggggaagtacagggttccctcgccgtgaaacatgccatccttcatttccccaacatatattgtttcggtagggaggatgtaccttgctttgccctccatcctcccatctacatattccccgatatatttgctccctgtgtactccatggc

SEQ ID NO: 66983 - DNA, 1893 bp, Homo sapiens
  misc_feature (1)...(1893): n = a,t,c or g
cggacgcgtggggccagctgcctgaaggagcgccaggtcctccttgctggcaggtggcgaagcccattggggcggcggtgcagaccgcggcggcggctgcggcggtctggctcgggaggcgttcctggggccaaggccatggccccgcggctgcagctggagaaggcggcctggcgctgggcggagacggtgcggcccgaggaggtgtcgcaggagcatatcgagaccgcttaccgcatctggctggagccctgcattcgcggcgtgtgcagacgaaactgcaaaggaaatccgaattgcttggttggtattggtgagcatatttggttaggagaaatagatgaaaatagttttcataacatcgatgatcccaactgtgagaggagaaaaaagaactcatttgtgggcctgactaaccttggagccacttgttatgtcaacacatttcttcaagtgtggtttctcaacttggagcttcggcaggcactctacttatgtccaagcacttgtagtgactacatgctgggagacggcatccaagaagaaaaagattatgagcctcaaacaatttgtgagcatctccagtacttgtttgccttgttgcaaaacagtaataggcgatacattgatccatcaggatttgttaaagccttgggcctggacactggacaacagcaggatgctcaagaattttcaaagctctttatgtctctattggaagatactttgtctaaacaaaagaatccagatgtgcgcaatattgttcaacagcagttctgtggagaatatgcctatgtaactgtttgcaaccagtgtggcagagagtctaagcttttgtcaaaattttatgagctggagttaaatatccaaggccacaaacagttaacagattgtatctcggaatttttgaaggaagaaaaattagaaggagacaatcgctatttttgcgagaactgtcaaagcaaacagaatgcaacaagaaagattcgacttcttagccttccttgcactctgaacttgcagctaatgcgttttgtctttgacaggcaaactggacataagaaaaagctgaatacctacattggcttctcagaaattttggatatggagccttatgtggaacataaaggtgggtcctacgtgtatgaactcagcgcagtcctcatacacagaggagtgagtgcttattctggccactacatcgcccacgtgaaagatccacagtctggtgaatggtataagtttaatgatgaagacatagaaaagatggaggggaagaaattacaactagggattgaggaagatctagcagaaccttctaagtctcagacacgtaaacccaagtgtggcaaaggaactcattgctctcgaaatgcatatatgttggtttatagactgcaaactcaagaaaagcccaacactactgttcaagttccagcctttcttcaagagctggtagatcgggataattccaaatttgaggagtggtgtattgaaatggctgagatgcgtaagcaaagtgtggataaaggaaaagcaaaacacgaagaggttaaggagctgtaccaaaggttacctgctggagctggtctgtaagatattctgggacagcactgttgccattaagtgccttgtttttttatgttcacaaatgtatatgaagaaactttctcaaacttactctttctaataaaccactaaagccagcttaaacactctaaaagtactttgtaaaccaacaataacttgatgtgtagcattccatattatttcattacgttgtactcctaaaatggggagctgttaatnaattataacctttagggtcagcactctgcatccctggagtattgttggtntttatattttgtgaggtattaacttgttttaagg

SEQ ID NO: 66984 - DNA, 772 bp, Homo sapiens
gaggcggggcctgacgtagctgatcccagcctaacctggcccggctggctgctggtgggaggccggcgactgagtaagatgaagatccagtttcagacatgagactcgttgggtgatcatttcattgagatcaacctgaatgaccaggtgtaaagtgcaagagtaatatgctatgactgagtaactatgtttccggtagcccctaaaccccaggattccagtcaaccatcagacagactcatgactgaaaaacagcaggaagaagcagaatgggaaagcataaatgtgctattgatgatgcatggcttaaaacctttgtctctagtcaaaagaacagatctcaaagatctcatcatttttgacaaacagtcatcacaaaggatgagacagaatttgaaattgttggtggaagaaacatcatgtcaacagaacatgatacaggagcttatagaaactaatcaacagcttagaaatgaacttcagctagagcaaagccgagcagccaatcaagaacaacgagctaatgacttggaacaaattatggaaagtgtgaaatccaaaattggtgaattggaggatgaatcactaagtagggcttgccaccaacagaataaaataaaagatcttcaaaaggagcagaaaactttacaggtgaagtgccagcattataagaaaaaacgaacggagcaagaagaaactattgcttctttgcaaatggaagtctgtagattaaaaaaggaggaagaagatcgcattgtcactcaaaacagag

SEQ ID NO: 66985 - DNA, 620 bp, Homo sapiens
tttcgtggccggtcgggcagcgctgcgggagcagccgccggcaccgccgccttgcaccatcgcatcatgtccgggcagctggagcgttgcgagcgcgaatggcacgagctggagggagaatttcaagaactgcaggagacgcacaggatctacaagcagaagctggaggagctggctgcgctgcagacgctgtgtagcagttccatcagtaagcagaagaagcacctcaaggacttgaagcttacactccagaggtgcaaacgccatgccagtcgggaggaggcggagctcgttcagcagatggcagcgaacatcaaggagcggcaggacgtcttcttcgacatggaggcctacctgcccaagaagaacgggctctacttgaacctggtcctcggcaatgtgaacgtgaccctcctcagcaaccaggccaagttcgcctacaaggacgaatatgagaagttcaagctctacctgaccatcatcctgctcctgggtgccgtggcatgtcgatttgtccttcactacagggtgactgacgaagtcttcaacttcctgctggtgtggtattactgcaccctgaccattcgggagagcattctcatcagcaacggctcaagaaa

SEQ ID NO: 66986 - DNA, 756 bp, Homo sapiens
tttcgtgcgagaggttggtgggtgtctccggccacaatgacccaggctgagaagggtgatacggagaacggaaaggagaagggcggcgagaaggagaaggagcagcgcggcgtgaagcggcccatcgtgcccgcgctggtgccggagtcgctgcaagagcaaatccagagcaacttcatcattgtcatacatccaggttcaacaactttaaggattggtcgagccacagacactcttcctgccagcattcctcacgtcattgcccgaagacacaaacaacaagggcagcccctatacaaggacagttggctcctaagggagggactaaataaaccagaaagtaatgaacaaagacaaaatggccttaaaatggtggatcaagcaatatggtctaaaaagatgtccaatggtacaagacgcattcctgtgtcccctgaacaggcacgctcctacaataagcagatgcgacctgcaattttagatcactgttcgggaaataagtggacaaatacatctcatcaccctgagtatttagtaggagaagaggccttgtatgttaatccactggactgttacaatattcactggcctatcagaagaggtcagttaaatattcacccaggccctgggggctctcttacagctgttctggcagatattgaagtaatatggtctcatgcgatacaaaaatacttggaaatcccactgaaagatttaaagtattatagatggatcttggtaattcctgatatctat

SEQ ID NO: 66987 - DNA, 427 bp, Homo sapiens
cgctggacaaggacacgggactcatcatgctgattgccaggctggactatgagctcatccagcgcttcaccctgacgatcattgcccgggacgggggcggcgaggagaccacaggccgggtcaggatcaatgtgttggatgtcaacgacaacgtgcccaccttccagaaggatgcctacgtgggtgctctgcgggagaacgagccttctgtcacacagctggtgcggctccgggcaacagatgaagactcccctcccaacaaccagatcacctacagcattgtcagtgcatctgcctttggcagctacttcgacatcagcctgtacgagggctatggagtgatcagcgtcagtcgccccctggattatgaacagatatccaatgggctgatttatctgacggtcatggccatggatgctggcaaccc

SEQ ID NO: 66988 - DNA, 704 bp, Homo sapiens
tttcgtgtgagggagagccgagggaaccagcgcggtgcctagcggaactccagggctggaatcccgagacacaagtgcatctgctagctgttagcacttggcagacggagttctcctctagggtagttctaactttgggtaataatgtttgtcagctacctgatattaacattgctccacgttcaaacagcagtgttagcaagacctgggggagagagcattggctgtgatgactacttaggctccgacaaagtcgtggacaaatgtggggtgtgtggaggagacaacacgggctgtcaggttgtgtcgggcgtgtttaagcatgccctcaccagcctgggctaccaccgcgtcgtggagattcccgagggagccacgaaaatcaacatcacggagatgtacaagagcaacaactatttggccctgagaagtcgttctggacgctccatcatcaatgggaactgggcaattgatcgaccaggaaaatacgagggcggagggaccatgttcacctacaagcgtccaaatgagatttcgagcactgccggagagtcctttttggcggaaggtcccaccaacgagatcttggatgtctacgtgagtttggatgtttctggactgttctttggattttgaatcttgtcacttctaaggaacatactctgaacaaataagcaacaaatcattgcccatactcaataaaa

SEQ ID NO: 66989 - DNA, 2166 bp, Homo sapiens
tataatttagactctgtacctagtcctgctgaggaatttgcagattttgccacattttccaaaaaggaaaggatacaattagaagaaatagaatgtgcagttttaaatgatagagaagcactaaccattcgggaaaacaataaaattaatagagtcaatgaactgaattctgtaaaagaagtggctttgggtagaagcttggataacaaaggagacactgatggagaggatcaggtttgtgtttcagaaataagcatagtgactaacagaggtttcagtgttgaaaaacaaggccttccaacactgcaacaggatgaatttttacagtcaggtgttcagtcaaaggcttggagtttggtagactcagctgataattcagaagccattaggagagaacaatgtaaaactgaagaaaaacttgacttacttacttctaaatgtgctcacctatgcatggattctgttaaaacttctgatgatgaagttggttctcccaaagaagaaagtagaaagtttactaatttccaaagcccaaacattgaccccacagaagaaaatgatttggatgattctttaagtgtaaaaaatggtgatagtagtaatgactttgtgacttgcaatgatatcaatgaagatgattttggtgattttggtgactttggctctgccagtggctcaactccaccttttgttactggtactcaagattcaatgagtgatgccacttttgaagagtcttcagagcactttccacattttagtgaaccaggtgatgactttggagaatttggggatataaatgctgtttcttgccaagaggagacaatattaacaaagtcagacctaaaacagacttctgataatttatcagaagaatgtcaattggcaagaaaatctagtggaacaggcactgaacctgttgcaaaacttaaaaatgggcaagaaggtgagattggacattttgattctgtgccaaatattcaggatgactgcaatggttttcaagactctgatgattttgcagacttcagttcagctggtcctagccaagttgtagattggaatgcttttgaggatgaacaaaaagatagttgttcttgggctgcttttggagaccagcaggctactgaatctcatcatcgaaaggaagcctggcagtcacataggacagatgaaaatattgatactccaggaacccccaaaacgcacagtgtaccttcagcaacttccaaaggagcagttgctagtggccatttacaggaatcagccacttcagttcagacagctttattaaaccgcctggagcgaattttcgaagcatgttttccttccatacttgtccctgatgctgaagaggaagttacttccctgaagcacttgctggaaacaagcactttgccaataaaaacgagagaggccttacctgaaagtggggaattgctagatgtgtggactgagctacaggatatccatgatgcacatggcttgagataccagtggggcggctcccatagcaacaagaagcttttgtcctccttgggaatagacacccgaaacattctcttcacgggcaataagaagcagcctgttatagtgcccatgtatgcagcaggattgggtatgttagagcccaccaaggaaccactgaaaccactttctgctgcagaaaaaatagcttccatcggtcagacagccaccatgtcaccagatatgaacacatgtacatctgatcagttccaggagtctctaccacccgtccagtttgactggagtagcagtggccttactaaccctttagatggtgtggatccggagttgtatgagttaacaacttctaagctggaaatctccacctcaagcctcaaagtgactgatgcatttgcaagactcatgtctacagtagagaagacaagcacatctaccagtaggaaaccgaaaagagaagagcacctaagtgaagaagctatcaaggtgatcgctggccttcctgacttaacattcatgcatgccaaggtgttgatgttcccagccacgttaacaccttccacaagctctcaagaaaaagcagacggataactgatgtgaattggacagtttctattgcttttccttttttccatcccttccctaccatcaaaagcatacctgctctaattaaaaaaaaaa

SEQ ID NO: 66990 - DNA, 803 bp, Homo sapiens
aagctgtggagtgagaccttcgatgtgtgcgtcaatcagatgcttacatccaaggaaatcaaacgtcaggaggcgatctttgagctttcccaaggagaagaagacttgatagaagacttgaaattagcaaaaaaggcctatcatgaccccatgctgaaactctccataatgacagaacaagagttgaatcaaatttttggaacactggactctctaattcctctacatgaagagctccttagtcagcttcgagatgttaggaagcctgatggctcgactgaacatgttggtcccatcctcgtgggctggctcccttgcctcagctcctatgatagctactgcagcaatcaagtagccgccaaagctctgctggaccacaaaaagcaagatcaccgagtccaggatttcctacagcgatgtttagaatccccctttagccgcaaactagatctctggaatttcctcgatattccaagaagccgcctggtaaaataccctctgcttctccgagaaatcttgaggcacacaccaaatgataatccagatcagcagcacttggaagaagctataaatatcattcagggaattgtggcagaaatcaacaccaagactggtgaatctgaatgccgctattataaagagcggcttctttacttggaagaaggccagaaagactccctgatcgacagctctcgagtcttgtgttgtcatggtgaactgaagaacaatcggggcgtgaaactgcatgttttcctgttccaagaagtgcttgtgatcactcgagccgtcacccacaatgtatt

SEQ ID NO: 66991 - DNA, 704 bp, Homo sapiens
gagaactctcttcagaggtcgaagacgacgagaagatgacaggatctcaagacctcatccttcaacagctgaatcaaaggctccaacaccaaagtttgacttattagcctcaaattttccacctttacctggaagttcatcaagaatgccaggtgaactcgttttggagaataggatgtctgatgttgttaaaggtgtctacaaagaaaaggataatgaagagttgacaattagttgcccagtgcctgcagatgagcagacagaatgcacttctgcccagcaactcaatatgagtaccagttctccatgtgctgctgagcttactgcattaagcacaactcagcaagaaaaggatctaatagaagattcctctgttcagaaggatggtctcaatcagacaactataccagtttctcctccaagtactacaaagccatcgagggcaagtactgcttcaccatgtaataataacataaatgcagctacagctgtggctctacaggaaccccgaaagttaagctatgctgaagcgtacctgaaacccactagagagccatattcaggaagttgggctaccgctcttagttacttgtatttaaagtggttttactgtacatgatagtagtctagggagatcttaaaagtacatattttatatgtttagtgtagaaatattatttgattaattattgagtgttgtcacg

SEQ ID NO: 66992 - DNA, 566 bp, Homo sapiens
aatacatgagtcgtccacgtgtgggcacaacgggccgagccatcagtgggtgcaactttacaaagtccaggaccagggatggcaagtcttgggatgaattgtagccttggctgcgcaatgaatctgtgatacacgagccaggccggggctcaggcaccccaccctcatagcgaccccagcgccgggaaccatcctggtattccatatagggtcctgcaaagacagcctggatctctgccaggtcatagcggcagatggctgaggcctccagggtcttccactgtgtgctcagcgtgaaggctgcatagaagtgtgtacggcttgaggtttcagcatccaggctgcagaccccacgcagtgtctcatacagtggaatgtggcagatgagacgggctttcaggaaggaagtccacttcttctgcaggatcttcttccctcccaggtctccctggggaggcagaggcacgggataaggggccagggtcagaagtccatcctctatacccgtgccccaacgtcagcccaatccaccttgcagacacgagccacacgggccacacggtgat

SEQ ID NO: 66993 - DNA, 420 bp, Homo sapiens
atttcaggagggaccagaagcgcaggcccgctcaggaggaattacaacttcatcgccgcggtggtggagaaggtggcgccatcggtggttcacgtgcagctgtggggcaggaaccagcagtggattgaggtggtgctccagaatggggcccgttatgaagctgttgtcaaggatattgaccttaaattggatcttgcggtgattaagattgaatcaaatgctgaacttcctgtactgatgctgggaagatcatctgaccttcgggctggagagtttgtggtggctttgggcagcccattttctctgcagaacacagctactgcaggaattgtcagcaccaaacagcgagggggcaaagaactggggatgaaggattcagatatggactacgtccagattgatgccacaattaactatggg

SEQ ID NO: 66994 - DNA, 392 bp, Homo sapiens
  misc_feature (1)...(392): n = a,t,c or g
cacaggaataaggcccccccctcccaggggcctccaggtagacggtgttatactagagatgtaactgagagagccaagttttaaggaggggagcaggtttggctgtggaagcccaggagcctttgcttcccctttcagcatcaggaaagcctgggctgagccccttccagtccccctcacaaccaatgtgccctacctgaccccctttcatgtccttcatgttcatggcattcttcatgcctttgccnnnnnnnnnnnnnnnnnnnnnnnnnnngcagcagcatttcttgcagatgcagaagcagcaggtgagaagcaggagcccagcaaccacagcaatggcgatcagtgcccagggtggtactgcccacacagagaagatcccagggtcg

SEQ ID NO: 66995 - DNA, 399 bp, Homo sapiens
cccacgcgtccgcttttgaatgtactgaatgtgggaaatcattcagctggagctcccatcttattgcccatatgagaatgcatactggagagaaaccctttaaatgtgatgaatgtgaaaaagcttttagggactactcagcccttagtaaacatgaaagaactcattctggagcaaaaccatataaatgtactgaatgtggaaaatccttcagctggagctcccatcttattgcccatcagagaactcacacgggagagaaaccatataactgtcaggaatgtggcaaagcattcagagaacgctcagccctcactaaacatgagataattcattctggaattaagccctatgaatgtaataaatgtggaaaatcctgtagccagatggctcaccttg

SEQ ID NO: 66996 - DNA, 1057 bp, Homo sapiens
cccacgcgtccgagaactcaaagaaattctggataggaaagggcatttctcagagaatgagacaaggtggatcattcaaagtctcgcatcagctatagcatatcttcacaataatgatattgtacatagagatctgaaactggaaaatataatggttaaaagcagtcttattgatgataacaatgaaataaacttaaacataaaggtgactgattttggcttagcggtgaagaagcaaagtaggagtgaagccatgctgcaggccacatgtgggactcctatctatatggcccctgaagttatcagtgcccacgactatagccagcagtgtgacatttggagcataggcgtcgtaatgtacatgttattacgtggagaaccaccctttttggcaagctcagaagagaagctttttgagttaataagaaaaggagaactacattttgaaaatgcagtctggaattccataagtgactgtgctaaaagtgttttgaaacaacttatgaaagtagatcctgctcacagaatcacagctaaggaactactagataaccagtggttaacaggcaataaactttcttcggtgagaccaaccaatgtattagagatgatgaaggaatggaaaaataacccagaaagtgttgaggaaaacacaacagaagagaagaataagccgtccactgaagaaaagttgaaaagttaccaaccctggggaaatgtccctgagaccaattacacttcagatgaagaggaggaaaaacaggtaggaagaatcattgctgcatttctcccaagtgtaaaataccctcaccacacctggaacatttttttgcaaatctgtctttttgttgttagtttgtaacaaaggccgagcgttatatagcaagtaaagttctttctgccttataaggctagcatgatttagcgaggtggcctacatgtttattttaaggttggtgattatgtagggcaggtgtctgcaaactttttctgtaagggaacaaacagtaaatattttaggctttgtgggccctagtagtctttgtcacaactactc

SEQ ID NO: 66997 - DNA, 1815 bp, Homo sapiens
atatcggaggaatcccagaatatagatacagcttaaattttgtcttacaaagtcagcacttattggttattcattgttgcgtgttctcaaaggccctgagtcaactgtctctactcagttaaatactatttggacttgtcccttatggtttcaagcacaattattacaatatttggggcttacaaaaattttatttataactagcttttaatttaactagatattgtaaaaattggaaatttggaatattcatttctttgtcctgttgtaggtggcgctctgttttccgaatagtgaccctgtgatgttcatggatgcattttatgggtgtctcctggcagagctgggtcctgtccccatagaagtgccattaacaagaaaggatgcaggcagccagcaggttgggtttctgctgggcagctgtggagtcttcttggccctgaccacagacgcttgtcagaaaggcctccccaaggcacagacaggagaggtggcagctttcaaaggttggcccccgctctcctggctagtgattgatgggaagcatctagccaagcccccaaaggactggcaccctctggcccaggacacagggactgggactgcctacattgagtataaaaccagcaaagaaggcagtacggtgggggtcacagtgtcccacgcatccctgctggcacagtgccgggctctgacccaggcgtgcgggtactcagaagctgaaacattaacaaacgtgctggatttcaaaagggatgctggtctgtggcatggcgtgttaacaagcgtcatgaacaggatgcacgtggtcagcgtcccctacgcgctgatgaaggcgaacccactctcctggatccagaaagtgtgcttctataaagctcgggccgcgctggtgaagtcgcgagacatgcactggtctctcctagctcagcggggccagagggacgtcagcctcagctcactgcgcatgctgattgtggccgatggtgccaacccgtggtcgatctcctcctgtgacgccttcctcaacgtcttccagtccagaggtctgaggccagaggtcatctgtccttgtgcaagttctcctgaggcgctgactgtcgccatccgcaggccacctgatctgggaggaccacctccaagaaaagcagtcctgtcgatgaacggtctaagttatggtgttatcagagtggatactgaagaaaagttgtcagtccttactgttcaggacgttggtcaggtgatgcctggagctaatgtatgtgttgtgaagttagaaggtaccccttatctttgtaaaactgatgaagtgggagaaatatgcgtcagttccagtgcaactggcacagcgtactatggattgcttggaatcacgaagaatgtgtttgaggcagttccggtcaccacaggaggagcacccatctttgacaggccattcaccaggacaggcctgctgggcttcatcgggcctgtgagtatgtcctcctgtaccagcactggcagtcagagaaggtagggggtgtggctaagggacacctcgttgcagccccacccttgtcctggccgttcctgacctcccatgtggccttggtcggtggcgttgacctccctgcccatcaccctacctgtgtgcagggccatccacacctccgagactggtgcacagtcctgcacacatggcctgagtcgggggtccccggggtggatgaggatgttttgctttttatatggagtggcaggtttgtgagtattcattatatcattctttaccattttggatgtctaaactattcaaaaataaatgcttctatttgt

SEQ ID NO: 66998 - DNA, 833 bp, Homo sapiens
tttcgtttccgttgcaaagcatttctgggagctgcatgtgggtgacgcagcagcattgttcgcaggcacaggaagccgcggctgagctgaagggctcgagaaggagcccagagcgctgcacgctgctccctctgggtagtctgaagggtcagagctggactgccctgccctatgtgctctgggagattccagaatattcaagtaaatccggattttcccagaggcagaatatctaactccttcaggagaacttccagtacagaaaacaaaacaaagacgctggggaaacttcaccaagagcctcggcagctccagagcgacgggaaacgaaagattttgctggaggagcttgccaacagcgatcccaagttagccctcactggagttcctatagtacagtggccaaaaagggataagcttaaattccccactcggccaaaggtgcgggttcctaccatccccattacgaagcctcacactatgaaaccagctccacggttaacacctgtgaggccagctgctgcctccccgattgtgtcaggagccagacggagacgagtgcgatgtcgaaaatgcaaagcctgtgtgcaaggagagtgtggtgtttgccactactgcagagacatgaagaagtttggggggcctggacgcatgaagcagtcctgtgtcctccgacagtgcttggcagtgagtgatctgctgggtaaagaattttggggaggggtggcagtgccaaaggaactgaaatacatatagtgtagagttaaagagccttcagagttggaaagaaaaggtttatactctctttttggctttattttgtaccttttttc

SEQ ID NO: 66999 - DNA, 467 bp, Homo sapiens
ttgagtattagtgtcagtgatgtgtctctctctgatgaaggacagtacacctgttctttatttacaatgcctgtcaaaacttccaaggcatatctcaccgttctgggtgttcctgaaaagcctcagattagtggattctcatcaccagttatggagggtgacttgatgcagctgacttgcaaaacatctggtagtaaacctgcagctgatataagatggttcaaaaatgacaaagagattaaagatgtaaaatatttaaaagaagaggatgcaaatcgcaagacattcactgtcagcagcacactggacttccgagtggaccggagtgatgatggagtggcggtcatctgcagagtagatcacgaatccctcaatgccacccctcaggtagccatgcaggtgctagaaatgcactatacaccatcagttaagattataccatcgactccttttccacaagaaggacg

SEQ ID NO: 67000 - DNA, 539 bp, Homo sapiens
aaccttataaatgtaacgaatggggcaaggtcttcactcttaattcacaccttgtaagacatcgaggaattcatactggagagaaaccttacaagtgtaatgagtgtgggaaagcctttagagctcgttcaagcttaactatccatcaggcaacccacagtggagaaaaaccttacaaatgtaatgaatgtggcaaggtcttcactcaaaattcacaccttacaaatcactggagaattcacactggagagaaaccttacaagtgtaatgagtgcggcaaagcctttggtgttcgttcaagcctagctattcatctgggaattcacaccggagaaaagccttacaaatgtcatgaatgcggcaaggtctttaggcgtaattcacaccttgcaaggcatcagctaattcatactggagagaaaccttataagtgtaatgagtgtggcaaagcctttatagcacattcaaacctaactacccatcaggctatccatactggagaaaagccttacatatgtactgaatgtggcaagggcttc

SEQ ID NO: 67001 - DNA, 627 bp, Homo sapiens
aagaagatgtttgcttcatagtcttgaatagtaaagaaggctcaggtctgggattcagtgtggcaggagggacagatgtggagccaaaatcaatcacggtccacagggtgttttctcagggggcggcttctcaggaagggactatgaaccgaggggatttccttctgtcagtcaacggcgcctcactggctggcttagcccacgggaatgtcctgaaggttctgcaccaggcacagctgcacaaagatgccctcgtggtcatcaagaaagggatggatcagcccaggccctctgcccggcaggagcctcccacagccaatgggaagggtttgctgtccagaaagaccatccccctggagcctggcattgggagaagtgtggctgtacacgatgctctgtgtgttgaagtgctgaagacctcggctgggctgggactgagtctggatgggggaaaatcatcggtgacgggagatgggcccttggtcattaaaagagtgtacaaaggtggtgcggctgaacaagctggaataatagaagctggagatgaaattcttgctattaatgggaaacctctggttgggctcatgcactttgatgcctggaatattatgaagtctgtcccagaag

SEQ ID NO: 67002 - DNA, 416 bp, Homo sapiens
  misc_feature (1)...(416): n = a,t,c or g
ggtacaaccagaaagtggatctcttcagcctgggaattatcttctttgagatgtcctatcaccccatggtcacggcttcagaaaggatctttgttctcaaccaactcagagatcccacttcgcctaagtttccagaagactttgacgatggagagcatgcaaagcagaaatcagtcatctcctggctgttgaaccacgatccagcaaaacggcccacagccacagaactgctcaagagtgagctgctgcccccaccccagatggaggagtcagagctgcatgaagtgctgcaccacacgctgaccaacgtggatggaaaggcctaccgcaccattgatgggcccagatcttttcggcagcgcatctcccctgccatcgntttacacctatgaccagcgacatattgaagggcaact

SEQ ID NO: 67003 - DNA, 926 bp, Homo sapiens
atagaaactagttctgaagatgaagatgatacggcagatttgtttccagaagaatctggttttgagcatgcttggagagaattagataaagatgctcctcgtgctgatgagattacacgtcgattagcagtttgtaacatggactgggatagattaaaggcaaaagatttgctggctctgttcaattcatttaaacccaaaggaggtgtaatattttccgtcaagatatatccttcagaatttggaaaggagaggatgaaggaagagcaagttcaaggaccagtagagctattaagtattcctgaagatgccccagaaaaagactggacgtctagagaaaaattgagagattatcaattcaaacgactgaagtactattatgcagtagtagactgtgattctccggaaacagctagtaaaatttatgaggattgtgatggcctggaatttgaaagtagttgttctttcatagatctaaggtttataccagatgatattacttttgatgatgagcctaaggatgtagcctcagaagtgaatttaacagcatataaaccaaaatatttcacttctgctgcaatgggaacatcaacggtggaaatcacttgggatgagactgatcatgaaagaattacaatgctcaacaggaagtttaaaaaggaagagcttttggacatggattttcaagcctacttagcttcctctagtgaagatgaagaggagacagaagaggagctacaaggtgatgatggagtcaatgtagaagaagatgggaaaacaaagaaaagtcagaaggatgatgaagaacaaattgctaaatacaggcagctcttgcaggttattcaagaaaaaaaaaaaaaagggggggccgttttaaagaatcaaggtttacttacgcgggctggcgaggtcatactttttttatg

SEQ ID NO: 67004 - DNA, 763 bp, Homo sapiens
aacccgtgtggtggaattcgcactgcacagcaggcccttccctgctgagagctagccctctttatttctgctagcagccccaggcactaattactgggtgtgttagacacatttgtgagagtgctgcctcctcacaccaaagtctacatttacttcttcaacatttatcttctgtcaggttgttggcatggagccgaggctgaggaggctcctgagcagattgcttctgtaggactgctcagttcaaacattcagcaacaccagaagcagcactgtggagagaaacccttaaaaagacaacagggcagggtcccagttttgaggagttgcaaagttcacctatcagagaagtccttgcaaagcagggaggttgggaaggccctcctgatcagctcaggtgttctcaagcaccaggtgactcacacaggagagaagtcacataggagctccaaaagtagggaggcctttcatgctggaaaaaggcattacaaatgcagtgaatgtgggaaagcctttggtcagaaatatttacttgttcagcaccagagactacatgctgggaaaaagacgtatgaatgcagtgaatgtgggaagttatttagagatatgtccaacctttttatacaccaaatagttcacactggagaaaggccttacgggtgtagtaactgtggaaaatcctttagccgtaatgctcacctcattgaacaccagagagttcacactggagaaaagccttttacatgcagtgaatgtggaaaag

SEQ ID NO: 67005 - DNA, 973 bp, Homo sapiens
tttcgtctcagcctaccgagtagctgggactacaggtgcccaccaccacccccggctaattttttgtatttttagtaaagacggggtttcgctgtgttagccaggatggtctcgatctcctgacctcgtgatccgcctgccttggcctcccaaagtgctgggattacaggcctgagccactgcgcccagcctggtggatactttcttaatcatctcattaaaaaaagcataggaagactaagacatgtttttgaggttattaggaaaatcaggcttaatattttctatttcacaagatcatatatctaaagtaaccaagtaaactatctgattatgaggatctcaaatacaagattatgaaatatttctcatactaaaaatacttatatgagtaatgacttaatgccaaatcctaacccacaagggaaacccaactgttatttataattttaaaaggtatcaactgttttcacttacttcttcttcactgctattatcctccttttctttttcatcatcttcctcctcctcttcttcctctgcttcactgctagagctatcttctttcaattcagtcttccagttagcaggaatagttctacttttgtgaaattcaagtgcctgttcaaaggcttgctttaaaacagcatcaggctttggtgcagtgtcactagtaatttcatggacatcttttcttggaactgaagtaaattttccatctttgaaagatcgaacaagaatattgtccttttttacagcaatctcatcactacaatcaggacaaaccaccaatgcaggaaaccacagtgctttctttttatccaaactaatgtaatctacacatacaactttgcctagtagctcatcaatctgtttcctatcatcctcatcttcatcactggaggatgatgaagactcttcctctggtatatgattagatcttcttcctctatttgttttctttcctatgaca

SEQ ID NO: 67006 - DNA, 817 bp, Homo sapiens
agggtcctagcacagtgtctgacggagctttcctaccagaccctgaaattcacgcatcaggcgcgggaagcggtatatcgatacagcaaatgctttggagcaagaaactaaactggggttacgacggtttgaagtttgtgacaacattgatcttgaaactattttgatggaatatgagagttattattttgtaaaatttcagaaataccccaaaattgtcaaaaagtcatcagacacagcagagaataatttaccgcaaagaagtagagggaagaccagaaggatgatgaacgacagttgtcaaaatcttcccaagatcaatcagcagaggccccggtccaaaaccacagcggggaagacaggggacaccaaatcgctcaataaggagcatcctaatcaggaggtagttgataacactcgcctggaaagtgccaacttcggcctacatatatcaagaatccgtaaagacagtggagaggaaaatgcccacccacgaagaggccaaatcattgacttccaagggctgctcacagatgccatcaagggagcaaccagtgaacttgccttgaacaccttcgaccataatccagacccctcagaacgactgctgaaacctctgagtgcatttattggcatgaacagtgagatgcgagaattggcagccgtggtgagccgggacatttatctccataatccaaacataaagtggaatgacattattggacttgatgcagccaagcagttagtcaaagaagctgttgtgtatcctataaggtatccacagctatttacaggaattctttctccctggaaaggg

SEQ ID NO: 67007 - DNA, 938 bp, Homo sapiens
aaaaaggaccagaaaactccaacatccctggtggcttcggttagcggtcctccaacgagctccagcacagctgccattgctgcagctagctctagctctgcaccagcccaagaaaccatctgcctcgacgactcactagatgaagacctttctttccattcaccttcactggatcttggttctgaagctttagcggttatcaacaatgggaacaagggccctccaggtggctcaaggataagcatgccaaccacaaagcctcgtccaggactgagagaagaaaaattagcaagtatcatgagtaagctgccactagctactcccaaaaaactagattctactcagactacacattcttcaagtcttattgctggtcacacagggccagtaccaaagaaaccccaggatttagctcatactggcatctcttcaggccttattgctggttcttccattcagaaccctaaagtttctttagaacctttgccagccaggctacttcaacaaggacttcagaggtcaagccagattcacacttcttcctcttcacagacccatgtctcctcttcttcccaagcccaaattgctgcctcttctcatgctctgggaacatccgaggcccaagatgcttcttcgttaacacaagtaacaaaggtgcaccagcattcagctgtccagcagaactatgtgtctccattacaggccaccatcagtaaatcccagaccaaccccgtcgtgaagttaagtaataatccccaactctcctgttcctcctcacttattaagacttcagataagccacttatgtaccgccttcccttatctaccccctcacctggaaatggttctcaagggtcccaccccctggtttctaggacagtacctagcaccactacctccagtaactatttagccaaggctatggtgtcacagatctc

SEQ ID NO: 67008 - DNA, 739 bp, Homo sapiens
ggaccaggactacaagtacgacagtacctcagacgacagcaacttcctcaacccccccagggggtgggaccatacagccccaggccaccggacttttgaaaccaaagatcagccagaatatgattccacagatggcgagggtgactggagtctctggtctgtctgcagcgtcacctgcgggaacggcaaccagaaacggacccggtcttgtggctacgcgtgcactgcaacagaatcgaggacctgtgaccgtccaaactgcccaggaattgaagacacttttaggacagctgccaccgaagtgagtctgcttgcgggaagcgaggagtttaatgccaccaaactgtttgaagttgacacagacagctgtgagcgctggatgagctgcaaaagcgagttcttaaagaagtacatgcacaaggtgatgaatgacctgcccagctgcccctgctcctaccccactgaggtggcctacagcacggccgacatcttcgaccgcatcaagcgcaaggacttccgctggaaggacgccagcgggcccaaggagaagctggagatctacaagcccactgcccggtactgcatccgctccatgctgtccctggagagcaccacgctggcggcacagcactgctgctacggcgacaacatgcagctcatcaccaggggcaagggggcgggcacgcccaacctcatcagcaccgagttctccgcggagctccactacaaggtggacgtc

SEQ ID NO: 67009 - DNA, 440 bp, Homo sapiens
gaagtcagacaaggctcagagtggaccctacaatgttgagaaggaaatccttacttcaagattcttgcgtgacactgagacctgtcgacagaattttaggaattttccatacccagacctggctggtcctcgaaaggcattgagtcaactccgagagctctgccttaagtggctgagacctgagattcactcaaaggaacaaattttggagctgctggtgctggagcaattcctgaccatcctgcctggtgaggttaggacttgggtaaagtcccagtatccagagagcagcgaggaagcagtgactctggtggaggatttgactcagattctagaagaggaagctcctcaaaactctaccctttcccaagataccccaaaggaagaccccaaaggaaacaagctttccagacaggatggctaaatgaatttgtgaccac

SEQ ID NO: 67010 - DNA, 611 bp, Homo sapiens
ggaatcggaagaaaatggagagagtgcaatggacagcacagtggccaaagaaggcactaatgtaccattagttgctgctggtccttgtgatgatgaaggcattgtgactagcacaggcgcaaaagaggaagacgaggaaggggaggatgttgtgactagtactggaagaggaaatgaaattgggcatgcttcaacttgtacagggttaggagaagaaagtgaaggggtcttgatttgtgaaagtgcagaaggggacagtcagattggtactgtggtagagcatgtggaagctgaggctggagctgccatcatgaatgcaaatgaaaataatgttgacagcatgagtggcacagagaaaggaagtaaagacacagatatctgctccagtgcaaaagggattgtagaaagcagtgtgaccagtgcagtctcaggaaaggatgaagtgacaccagttccaggaggttgtgagggtcctatgactagtgctgcatctgatcaaagtgacagtcagctcgaaaaagttgaagataccactatttccactggcctggtcgggggtagttacgatgttcttgtatctggtgaagtcccagaatgtgaagttgctcaca

SEQ ID NO: 67011 - DNA, 675 bp, Homo sapiens
tccgcgattccgtctggatatgtggcggctgctgctagagctggagcatttgccgggttgggggctcctgcacatttttacagtcctccagtccttctctttcgtcagtataaaagattaaactctacagaagaatgcaatcaagtgatggcttttcctttagaatttgaatatggaggctacaggaacagatgaagttgacaagctaaaaaccaaatttatatctgcttggaacaacatgaaatatagttgggtgttgaaaacaaagacgtattttagtagaaattctcctgtattattgcttggaaaatgttaccattttaaatatgaagatgaagataaaacgttacctgcagagtcgggatgtacaatagaggatcacgtaattgcaggaaatgtagaagaatttcgtaaagatttcatttctagaatatggctgacctacagggaagaattccctcaaatagaaggctcagctttgacaacagactgtgggtggggctgcacattgagaactggccagatgctcttggctcaaggactcatactacactttcttggtagagcttggacctggcctgatgctttgaatattgaaaattcagactctgaatcatggacttcccacactgtcaaaaatatactggatctttgagcatcactttcaggggaaga

SEQ ID NO: 67012 - DNA, 872 bp, Homo sapiens
tttcgtgtggtgtttctggagagcagatcagaggcaggggaaaaccacgcagaagcaggagctgaagacctcagaccggcaccagggacagcttaatgaagacaaactgaaggggaaactgagatccttagaaaaccagctatacacctgtacccagaaatactccccttggggaatgaaaaaagtactactggagatggaagaccagaaaaccagctatgagcagaaggccaaggagtcactgcagaaagtgctggaggagaaaatgaatgcagagcagcaactacagagcacacagcgatccctggccctggcagagcagaagtgtgaagagtggaggagccagtatgaggctctgaaggaggactggaggacccttgggacccagcacagggagctggagagccaactccacgtgcttcagtccaaactgcaggtaccaggcactgggggtggggagggaagacagggtatggggaggagggatggtgatgaaagaagctgttctggattagggactccaaaggcagctgacagcatctggctttcagttcctcagtcaccactactttgtaccaaattcactgttttggctctgaaatctaattttgagtttagcaaggatgtctgcattgctcatgcaaatgaactaagcgttcattggaatgacaccatcaccacccaaatgaaaagaactggctggaatattcatcagcctactaatgtcatctcccaacccactctccaaactccatcccaaaaaagcatccagttcagaattgcccactgttggcaaagaaagaatgtcactaatttatttacagggagcagatagcagggacttacagatgaaccaggccctgcgatttttg

SEQ ID NO: 67013 - DNA, 522 bp, Homo sapiens
cggacgcgtggggcgcggagcactgtttcttttcagctctcacagaaccttcagcatccccagctgccggtcttggcatcttcgaagtaaggagaggtgagaatcctgttgcatggtcaagtctggctttattttcttctgagtatttgggcttggagggtagggggtgggggctgatgcacattgtattttttttcccatgtatccccaaagtctaaacgaatcatatttttttgtagcttcttctgataaagtaacatatgctcaaagtctgtagaaacttacttaaagtttctaaagtggtaagagttggaggtgggagatccagactgtcaagttctgtcacaactgctttatgggcatctcatgagcacctactttaggttcaggatggttgaatacaaccagaatagcccattatcctgagaaatacacatcttaagaaaactggaagaatcatcttcctttggctttaaacatttatctatctatctatctatctatctatctatctatctaact

SEQ ID NO: 67014 - DNA, 683 bp, Homo sapiens
  misc_feature (1)...(683): n = a,t,c or g
cggacgcgtgggtgcggacaggccttcatccagaagacccatttgattgcacaccgaagaattcatactggagaaaaaccatatgagtgcagtaactgtggcaaatccttcatttccaagtcacaacttcaggtacatcaacgtgttcacacaagagtgaagccctatatatgtaccgaatatgggaaggtcttcagcaataattccaacctcattacacataagaaagttcaaagtagagagaaatcttccatatgtactgagtgtgggaaggcctttacctacaggtcagagttgattattcatcagagaattcacactggagagaaaccttatgaatgcagtgactgtgggagagccttcactcagaagtcagcactcacagtgcatcagagaattcatacaggagaaaaatcgtatatatgcatgaaatgtggactggccttcatccggaaggcacacttgattacacatcaaataattcatactggagagaaaccttataaatgtggtcactgtgggaaattgtttacttccaagtcacaactccatgttcataaacgaattcacacaggagaaaagccctatgtatgcaataaatgtgggaaggcattcaccaaccggtcaaatctcattacacatcagaaanctcatacaggaggagaaaatcttgtatatgttcc

SEQ ID NO: 67015 - DNA, 570 bp, Homo sapiens
cccacgcgtccgtctaggtctgagacacagtctcagtctgagacatgggactgtgtctaggtcagtcgcacccatgagagggggagagatcactgcacactggctcttgaccaacagcacaacatctgcagatgtgacaggaagctctgcttcatatcctgaaggtgtgaatgcttcagtgttgacccagttctcagactctactgtacagtctggaggaagtcacacagcattgggagataggagttattcagagtcttcatctacatcttcctcggaaagcttgaattcatcagcaccacgtggagaacgttcgaccttggaagacagccgagagccaggccaagcactaggtgacagttccgccaatgcagaggacaggacttctggggtgccctctctcggcacccacaccttggctactgtcactggaaacggggaacgcacactgcggtctgtcaccctcaccaacaccagcatgagcacgacttctggggaagcaggcagccctgcagcggccatgcaccaagaaacagagggtgcctctctgcacgtaaacgtgacggacga

SEQ ID NO: 67016 - DNA, 425 bp, Homo sapiens
  misc_feature (1)...(425): n = a,t,c or g
gaagtattcaggttggctgtgtcagatgctaatgtgctgaatcaacagtcattgcagatcacgaagtgtccatcataactggaatattccatcagcttgcagtgctgtggtgtgtgagggtctcgggcaactcaccccattttccacaggctcaggcccaggagggatgcagtccggctgagggcgaggctgtcaccaggacatggagagggtgagatcccaaggccacnnnnnnnnnnnnnnnnnagaggcacacactctctccactatngaaagaggggatatgttactcctgacaaaagtcacggccagagtgcttcctgttgggctcttaggtatgtgcccgccctggggggccaactgaagaagaagactggcatactattaggtgtgagtccccagaagctagtggatttgtgtgctgg

SEQ ID NO: 67017 - DNA, 1090 bp, Homo sapiens
ttttttttttttaagcttgaaataaaatttttattttgttttgaattaaatcaaccatgattattcacagtgcagtaagtgtgtatcatctgtttgatattttcatattacagttttgatagtgctcttcagtctgcgaaatcttctttgggtggaaatgatgaactgtcagctactttcttagaaatgaaaggacatttctatatgtatgctggttctctgctcttgaagatgggtcagcatggtaataatgttcaatggcgagctctttctgagctggctgcgttgtgctatctcatagcatttcaggtaagtcttccacttggagcaattgacatttcacggagtcttgatgtgttttaaatgaaggtgtgctctggtatgtaatgacaatatgtgaacaaacctgtggaattaaagttaaaatgaaatagtcaatttgatacagtggaaaataactaagcatacacaatactggtgaggctggtgaaacagggatgttgaatgcactcttgtcgaaagcctgcattgccatgatttgtttgtagacaaatttgaagagtttgatctttttactctgccatttttgggaacatgataaagatgtaatctcgtattatgggtaaagcttgattcaaaaagatgtgttacttggacaaaatcctaataagtagacgtagggcaatggctttatagcctatgatagaagaatatgattgcaatttaacatgttaattgaaacacatgtatataacatttatgactgtattgtgtatatgtaacagtatatctattaatctttgaaaacataaaaccttttcttattttttatttttttatttttttttgagaccaagtctctctctgtcgccaggctggagtgcagtggtgtgatctcggctcactgcagcctccacctcctgggttcgagtgattctcctgcctcagcctcccgagtagctgggactacaggcccatgctaccaagcccagctaattttttgtatttttaatagagatggggtttcaccatgttggccaggatggtcgcaatctcttgacctcttgatctacctgccttggtctcccaa

SEQ ID NO: 67018 - DNA, 319 bp, Homo sapiens
aaagcttcaaatacataggagaattcatactggagagaaaccgtacaagtgtaatgagtgtggcaagacctttagtcagaagtcgtaccttacatgccatcgtaggcttcatactggagagaaaccttacaagtgtaatgagtgtggcaagacctttagtcggaagtcacattttacatgccatcatagagttcatactggagagaaaccttacaagtgtaatgagtgtggcaagacctttagtcacaagtcatctcttacataccatcgtagacttcatactgaagagaaaccttacaagggtaatgagtgtggcaag

SEQ ID NO: 67019 - DNA, 788 bp, Homo sapiens
ggcacgagaaacctctcacacacgtcgtatttgcatggtgaacatagccctgtccctcttgattgctgatgtctggtttattgttggtgccacagcggacaccacggtgaacccttctggagtctgcacagctgctgtgttctttacacacttcttctacctctctttgttcttctggatgctcatgcttggcatcctgctggcttaccggatcatcctcgtgttccatcacatggcccagcatttgatgatggctgttggattttgcctgggttatgggtgccctctcattatatctgtcattaccattgctgtcacgcaacctagcaatacctacaaaaggaaagatgtgtgttggcttaactggtccaatggaagcaaaccactcctggcttttgttgtccctgcactggctattgtggctgtgaacttcgttgtggtgctgctagttctcacaaagctctggaggccgactgttggggaaagactgagtcgggatgacaaggccaccatcatccgcgtggggaagagcctcctcattctgacccctctgctagggctcacctggggctttggaataggaacaatagtggacagccagaatctggcttggcatgttatttttgctttactcaatgcattccagggattttttatcttatgctttggaatactcttggacagtaaggtaaagagatgaagaaaataatctttctaccagatatccattcatggtctactaactgcttctaggaaataatactattaaataaccatttcaacctggc

SEQ ID NO: 67020 - DNA, 641 bp, Homo sapiens
gcggccgctcgcgattggaaccaactcttctacatgtaagaaaggaaaggtattccctgggaagatttcagtgacagtatcagaaacatttgacccagaagagaaacattccatggcctatcaagacttgcatagtgaaattactagcttgtttaaagatgtatttggcacatctgtttatggacagactgtaattcttactgtaagcacatctctgtcaccaagatctgaaatgcgtgctgatgacaagtttgttaatgtaacaatagtaacaattttggcagaaaccacaagtgacaatgagaagactgtgactgagaaaattaataaagcaattagaagtagctcaagcaactttctaaactatgatttgacccttcggtgtgattattatggctgtaaccagactgcggatgactgcctcaatggtttagcatgcgattgcaaatctgacctgcaaaggcctaacccacagagccctttctgcgttgcttccagtctcaagtgtcctgatgcctgcaacgcacagcacaagcaatgcttaataaagaagagtggtggggcccctgagtgtgcgtgcgtgcccggctaccaggaagatgctaatgggaactgccaaaagtgtgcatttggctacagtg

SEQ ID NO: 67021 - DNA, 1554 bp, Homo sapiens
gggccatgactctttttttggaaagtgttatcacccagatgtttcgaacactaaatagagaagaaattcctgttaatgatggaatagagctattgcagatggttctgaactttgataccaaggatcccctcatcctgtcctgcgtccttactaatgtctctgcactctttccatttgtcacctacagaccagagttcctgccccaggtcttctctaagctattttcatctgtcacttttgaaactgttgaagaaagtaaggcccccagaacccgggcagtgaggaatgtgaggaggcatgcttgttcctccatcatcaagatgtgtcgtgactacccccagcttgtgctgcccaattttgacatgctttatacccatgtgaagcaactcctctccaatgagctactcctgacacaaatggagaagtgtgccctcatggaagccctggttctcattagcaaccaatttaagaactacgagcgtcagaaggtgttcctagaggagctgatggcaccagtggccagcatctggctttctcaagacatgcacagagtgctgtcagatgttgatgctttcattgcgtatgtgggtacagatcagaagagctgtgacccaggcctggaggatccgtgtggcttaaaccgtgcacgaatgagcttttgtgtatacagcattctgggtgtggtgaaacgaacttgctggcccactgacctagaagaggccaaagctgggggatttgtggtgggttatacatccagtggaaatccaatcttccgtaacccctgcacagagcagattctgaaacttcttgacaatttgcttgcgcttataagaacccacaatacattatatgcaccagaaatgctagccaaaatggcagagcctttcaccaaggctctggatatgcttgacgcggaaaaatctgctatattaggattacctcaacctctcttggaactcaatgactctcctgtcttcaaaaccgtcttggaaagaatgcagcgtttcttctctaccctctatgaaaactgttttcatatcctagggaaggcaggcccttccatgcagcaagacttctatactgtggaggaccttgctacccagcttctcagctcagcctttgtcaacttgaacaatattcctgactaccgactcagacccatgcttcgtgtctttgtaaagcctctggtgctcttctgtcccccagagcactatgaagccctggtatcccccatcctcggacctcttttcacctacctccatatgaggctttctcagaaatggcaagttatcaaccaaaggagcctgctgtgtggagaagatgaggctgcagatgaaaacccagagtctcaagagatgctggaggagcaactggtgaggatgttaacccgagaagtcatggacctaatcacggtttgctgtgtttcaaagaagggtgctgaccacagtagtgctcccccagcagatggagacgatgaagaaatgatggccacagaggtcaccccctcagctatggcagagcttacagacctgggcaaatgtctgatgaagcatg

SEQ ID NO: 67022 - DNA, 448 bp, Homo sapiens
ggatgagctgacagcggccgaggatgccaagctgcgtctggaggtgactgtgcaggctctcaagactcagcatgagcgtgacctgcagggccgtgatgaggctggtgaagagaggcggaggcagctggccaagcagctgagagatgcagaggtggagcgggatgaggagcggaagcagcgcactctggccgtggctgcccgcaagaagctggagggagagctggaggagctgaaggctcagatggcctctgccggccagggcaaggaggaggcggtgaagcagcttcgcaagatgcaggcccagatgaaggagctatggcgggaggtggaggagacacgcacctcccgggaggagatcttctcccagaatcgggaaagtgaaaagcgcctcaagggcctggaggctgatgtgctgcggctgcaggaggaactggccgcctcggaccgt

SEQ ID NO: 67023 - DNA, 404 bp, Homo sapiens
aaatgagccatcattgtcatcgaaaaggaaaatgtgtgaaatggccaccagtggtgacagacaaagagactcagaagttaatttcaaggaactgagaacagcaaaaatgaaacctgaactactgagtggacacatccccccaggccacattcctaaacctatcgtgatgcccgactatgtggcaaaataccctgtgattcagacagatgatgagcgagaacgctataaagctgtgttccaagaccagttttcagagtacaaagagctgtctgcagaagttcaggctgtcctgaggaagtttgatgagctggatgcagtgatgagcagattgccacatcattcggaaagccgacaggaacatgagagaatttcaagaatccatgaagagtttaagaaaaaaaaaa

SEQ ID NO: 67024 - DNA, 394 bp, Homo sapiens
acaatgtgtaacctctgccagcgcagtttccgtacattccaggctttaaaaaaacacttggaagcaggccaccctgaactgagtgaagctgaacttcaacagctatatgcctccttgcccgtgaatggagaactgtgggcagagagcgaaactatgtcccaggatgaccatggcctagagcaggaaatggagagagagtatgaggtggaccacgaagggaaagcaagtcctgtaggaagtgatagtagctgtattccagatgacatgggctctgaaccaaagcggaccttaccttttagaaaagggcccaattttacgatggaaaaattccttgatccatctcgtccatataaatgtacagtgtgtaaagagtcattcacccaaaaaaaaaaaa

SEQ ID NO: 67025 - DNA, 463 bp, Homo sapiens
aaggggaaaaaaatcggtgaccacggtggctggccccatggcccaggacgtggagagcctggcgctgtgcctgcaagccctgctgagtgaagacatgtaccgactggaccccactgtgctccagatgccctttagggaggaggtgaagaccccctttcccaccccaggctgcagtgagtgagaagcccacatgctcagtccagtttgtttccttcccctgctggacaccagctgctttggcttcttggctatctggagccatagcttgtaagtgcccccaaagagggcctccagtgccatatacccaacccatgcagttagaatactcagcaagtgtggttgagagggtgtggcatccagttaagctgggtttttaaccctctaggtaaccctggccaagtcacatctcttctttcagccttagcctccccatcaatacaataaagaggttaggctgggagat

SEQ ID NO: 67026 - DNA, 415 bp, Homo sapiens
aactggaagagagctttctttcttattcagccatctctttttatagatgaggaaattgaggaccaagatattaaattatttgtcctttgttaacctaattttttaaaagatgatcaattatctgttaggcctgtggtatgcaggaatctacctattttatttggctgtggtgccttatggcagttaggtcagtgattgcaaatgggcttgtggtgtctactcttagagtagactggataaactcttctgtttgtcaactacagcctggcagtgagctggacaacttggaggagattttggatgatttgcagaatagtcaattaccacagcttttcccagacacgaggccaggcgcccctgctggatcagttgacaagcaagccatcatcaatgacctcatgcaactcacagctga

SEQ ID NO: 67027 - DNA, 578 bp, Homo sapiens
gtcagattggttgtggagaatgggctgtgtctctgagctgtttaaaggcaagtcagaggcgtagttgttaatgaaatttgctctaagttaacctgtcttcttcttttgaccctccagaaggaattacggagatatagaattgctgttccagctgctccgagcctttactggtcgttttctctgcaacatgacattcttaaaagagtatatggaggaagagattcccaaaaattacagcatcgctcagaaacgtgccctgttctttcgctttgtagacttcaacgaccccaacttcggagatgaattaaaagctaaagtgagtcccactcttatgctgtagaagggtatgggtatttggtctggttttctagggaactttgggcccttttctttttttgctgtgtcactcttgaataaatagtagagtgagccaggtgctgtggcatgtgcctgtaatcccaggtaatcaggaggccacagcgggaggattgcttgagctcaggagttggaggctgcaccgagctataatcacaccactgcatcccagcatgggtgacacaatgagactctgtctcaag

SEQ ID NO: 67028 - DNA, 680 bp, Homo sapiens
gcaacacccatcccaggaaaagccacaagtcctgacccccagccccaggaagcagaagctgaacagaaagtacaggtcccaccatgaccagatgatctgcaagtgcctctccctgagcatatcctactccgctaccattggcggcctgaccaccatcatcggcacctccaccagcctcatcttcctggaacacttcaacaaccagtatccagcctcagaggtggtgaactttggcacctggttcctcttcagcttccccatatccctcatcatgctggtggtcagctggttctggatgcactggctgttcctgggctgcaattttaaagagacctgctctctgagcaagaagaagaagaccaaaagggaacagttgtcagagaagaggatccaagaagaatatgaaaaactgggagacattagctacccagaaatggtgactggatttttcttcatcctgatgaccgtactgtggtttacccgggagcctggctttgtccctggctgggattctttctttgaaaagaaaggctaccgtactgatgccacagtctctgtcttccttggcttcctcctcttcctcattccagcgaagaagccctgctttgggaaaaagaatgatggagagaaccaggagcactcactggggaccgagcccatcatcacgtggaaggacttcc

SEQ ID NO: 67029 - DNA, 368 bp, Homo sapiens
cggcacgagggcgttcaaagtaaaacaattctaaactttggtggtttaataaaacatgcttgcacactaaactcccagcagccagtttataagctctagtttaatgatccgtgcagaactctaaactgcactcagacagatgcaaaatcctgtctttcaatgacaccacgttggaaatgatactaggctgagaaaacaccatttaggtgttggtaatgcccaccctggggaatgggaatctggtgaagctggccctctgggcaagccccactacctgagtgcaggctcatgtgctccagcagtgagtgcttggtggtcagagccttgctgcacacggtgcaggtgtacggccgctcgcctgtgtgcat

SEQ ID NO: 67030 - DNA, 594 bp, Homo sapiens
aaagatgcatgttctgccactaattggtggaaaagtagaagaattgaaaaagcaccaacactgtttagcatttagctcctctggaccccaaagccagacttactacatttgctttgatactttcacagaatacttaaggtggctgcgacaagtctccaaggttgcatcccagcgcattagctcagtggacctctcgtgttgtagcctggaacatctgcctgccaacctcttctacagccaagacctcactcatctcaatttaaaacaaaacttcctaaggcagaaccctagccttccagctgccagggggcttaatgaactgcaaaggttcaccaagttgaagagtcttaacctttccaataatcatttatgggacttcccactggcaggctgcagtattccaaccctggcagagctgaacgagtgctgcaatgccctgcgaacaatcccggcatgcggtggagagatgcacaacttacagacatttttagcggacggaaactttctccaaacccttgctgctgaggtggagaacatgaagcagcttatttatctgggcctttctttctatgaaattactgacattcccgaagt

SEQ ID NO: 67031 - DNA, 590 bp, Homo sapiens
tcaaactgttaggttttagcagttaaatcaggatgtatagaacagtttactccatgtcgattaatgctagtgcttttggtcaatgcacaggctctgtgactgatgatgtgttttttttgcagacaccagttggcgctccgaggcaacctttcagttcactgtggagcgcttcagcagactgagtgagtcggtccttagccctccgtgttttgtgcgaaatctgccatggaagattatggtgatgccacgcttttatccagacagaccacaccaaaaaagcgtaggattctttctccagtgcaatgctgaatctgattccacgtaagacagtttaaatgatgcaactacaaacccccacatcgttgtatttcattactggaagccaaatttgatcagcctagtgcaattttatcttaagttatttgctgcctctacatagccttttgattttaaattagattaaatacgtgtttctctttaaaacccactggtatatgtataatatccaagctagaaaagtatatttttatcttgtaagtgaaaaaactaaaaatagtttgttagaatctccagcatcccccctcaaacct

SEQ ID NO: 67032 - DNA, 1234 bp, Homo sapiens
tatttgttaggcatcagttcaaaatagctttcttcagtgagttgaaacaagatacacaaaatgcgctgaagaattataggaccgcctataatcttgtacacgaattgagagcccatgaaactaatattctggaaattaagactatggcaggatttataaactacaagatctgtaggctgtgttttcaacacaacaccccattggatgcaattgctcagttccgaaaacacatcgacttgtgtaagaaaaagattggaagtgcggagctgtcttttgagcatgatgcatggatgtctaaacaattccaggcctttggagatttatttgatgaagctattaagttagggttaacagctattcaaactcagaatcctggtttctattaccagcaggcagcatactatgcccaggagcggaaacagcttgcaaaaaccctctgtaaccacgaagcttctgtaatgtatcccaatcctgatcccttagaaacacaaacaggcgttcttgacttttatggacaaagatcatggcgacaaggaatactaagttttgatctttctgatcctgaaaaagaaaaggtgggaattcttgccattcagctgaaggagagaaatgttgttcactctgagataatcataactcttctgagcaatgctgttgcacagttcaagaagtataagtgcccgcgaatgaaaagtcacctaatggttcagatgggagaggaatattattacgcaaaggattataccaaagctttgaagttgctggattatgtgatgtgtgattatcggagtgaaggatggtggactctgctcacttctgtattaactacagctctgaagtgctcctacctcatggcccaattaaaggattacattacttactccctagaactccttggtagagcttcaactctgaaagatgaccagaagtctcggatagaaaagaacctcataaatgttttaatgaatgaaagtcctgatccagaacccgactgtgatatcttagctgtgaaaactgctcagaagctgtgggcagaccgaatttctctggctggcagcaatattttcacaataggagtacaggactttgtgccatttgtgcagtgcaaagccaagtttcatgccccaagttttcatgttgatgttcctgttcagtttgatatttatctgaaggctgattgtccacatcccattaggttttccaagctctgtgtcagctttaataatcaggaata

SEQ ID NO: 67033 - DNA, 491 bp, Homo sapiens
cttgaaagagaaggggacaaaggaacaccagtattaagaggattttccagtgtttctggcagttggtccagaaggatgcctccattcctgcttctcacctgcctcttcatcacaggcacctccgtgtcacccgtggccctagatccttgttctgcttacatcagcctgaatgagccctggaggaacactgaccaccagttggatgagtctcaaggtcctcctctatgtgacaaccatgtgaatggggagtggtaccacttcacgggcatggcgggagatgccatgcctaccttctgcataccagaaaaccactgtggaacccacgcacctgtctggctcaatggcagccaccccctagaaggcgacggcattgtgcaacgccaggcttgtgccagcttcaatgggaactgctgtctctggaacaccacggtggaagtcaaggcttgccctggaggctactatgtgtatcgtctgaccaagcccagcgtttg

SEQ ID NO: 67034 - DNA, 983 bp, Homo sapiens
tgcggccgcaccatgagcgacatccgccactcgctgctgcgccgcgatgcgctgagcgccgccaaggaggtgttgtaccacctggacatctacttcagcagccagctgcagagcgcgccgctgcccatcgtggacaagggccccgtggagctgctggaggagttcgtgttccaggtgcccaaggagcgcagcgcgcagcccaagagactgaattcccttcaggagcttcaacttcttgaaatcatgtgcaattatttccaggagcaaaccaaggactctgttcggcagattattttttcatcccttttcagccctcaagggaacaaagccgatgacagccggatgagcttgttgggaaaactggtctccatggcggtggctgtgtgtcgaatcccggtgttggagtgtgctgcctcctggcttcagcggacgcccgtggtttactgtgtgaggttagccaaggcccttgtagatgactactgctgtttggtgccgggatccattcagacgctgaagcagatattcagtgccagcccgagattctgctgccagttcatcacctccgttaccgcgctctatgacctgtcatcagatgacctcattccacctatggacttgcttgaaatgattgtcacctggatttttgaggacccaaggttgattctcatcacttttttaaatactccgattgcggccaatctgccaataggattcttagagctcaccccgctcgttggattgatccgctggtgcgtgaaggcacccctggcttataaaaggaaaaagaagccccccttatccaatggccatgtcagcaacaaggtcacaaaggacccgggcgtggggatggacagagactcccacctcttgtactcaaaactccacctcagcgtcctgcaagtgctcatgacgctgcagctgcacctgaccgagaagaatctgtatgggccgcctggggctgatcctcttcgaccacatggtcc

SEQ ID NO: 67035 - DNA, 404 bp, Homo sapiens
  misc_feature (1)...(404): n = a,t,c or g
aatacacccctctgaaagttaattaagaatgaannnnnnnnnnnnnnnnnnnnnnnnnnnnnnnnnnnnnnnnnnnnnnnnnnnnnnnnnnnnnnnnnnnnnnnnnnnnnnnnnnnnnnnnnnnnnnnnnnnnnnnnnnnnnnnnnnnnnnnnnnnnnnnnnnnnnnnnnnnnnnnnnnnnnnnnnnnnnnnnnnnnnnnnnnnnnnnnnnnnnnnnnnnnnnnnnnnnnnnntagataaatgtttgtagctaaaacacacgaaatatcacgaacagtctttttaaagataaaacatgtaatcaccataacaactggaagcaataatgtctttgtgtatctcagtggagtcgctttttccatgaagtcaaattcgggagcacaggtgtatattaaagtatcaan

SEQ ID NO: 67036 - DNA, 526 bp, Homo sapiens
  misc_feature (1)...(526): n = a,t,c or g
aatacacctgcctgcctgtccccagctcaccccagctcagggcctggcccaagcagaggatgacggggaacagatggaagcaggttctgtctgcggcaccagcccctttccacgctcgggaagtccggaacttccctgtcagacttttcaggcactgcaccctcacggcctccaccaggcccgcacgaatggggccactttccacgtctttgatgagcatcccacacaggtgtctactggagcactcaccgccaggtttcgagatgaaatctccgccctgtagctccggacgtcctccagatccagcgtggccgtcaggacttccacgtcatccagagaaaactgggatccttgagcaaagacgcttccgttcatggcgatcatggcacagccgtcgtagtacaggcggtccccgtcgcaacccttctggttggccggacgcgtgagcgaacgcgtggctcgaccgggtaattccggcccggtactgcaggccgatcaaagaaggggttcaaatnnggacgagccg

SEQ ID NO: 67037 - DNA, 426 bp, Homo sapiens
tttcgtggctgataatgtgatttttgagagactttcaaaagactcaaaatatatggaggaaacattatgccatctggaatactttgctacggaaggcttgcggactctctgtgtggcttatgctgatctctctgagaatgagtatgaggagtggctgaaagtctatcaggaagccagcaccatattgaaggacagagctcaacggttggaagagtgttacgagatcattgagaagaatttgctgctacttggagccacagccatagaagatcgccttcaagcaggagttccagaaaccatcgcaacactgttgaaggcagaaattaaaatatgggtgttgacaggagacaaacaagaaactgcgattaatatagggtattcctgccgattggtatcgcagaatatggcccttatcctattgaagga

SEQ ID NO: 67038 - DNA, 418 bp, Homo sapiens
tttcgtccaggacacaggtcaatggagagtccacccggaggtcagctgggctccccttcttccccctccccaccctcctgagccggggatgggggccagtgctgaggtcacctggacagtttggcggttgtacaccttcaccacatggaaccggaagctgtagacaccccggacaggggctacgaaggagccagaggcccggtcaaagccaccgccctcgttcaccaggacctgggggaagcagagcctgctgagtggggctcaggaaatgcccatggctcaggggtaccatggggactaggggcaggggcagtgagtaatgaatagaaggagtggcaagtaggagtgaataggagtgaacagattcaaaagaaatgggctgggggcagcagccatgcctacctggggggcccgcccc

SEQ ID NO: 67039 - DNA, 459 bp, Homo sapiens
tttcgtccgaaaggtctggtcgcagagacaggaacgtgtaatcctcagcgtgctccagcccacagcttcgctctactgctcggcagggcagctggcctctgggcaccggcggcccctctgcctcgcggaaaagcctgatgaagtcctccgatattgatcaggatttattcacagacagttactgcaaggtgtgcagtgcacagctgatctccgaatcgcagcgtgtggcccactacgagagtcgaaaacatgcaagcaaagtccgactgtattacatgcttcaccccagggatggagggtgtcctgccaagaggctccggtcagaaaatggaagtgatgccgacatggtggataagaacaagtgctgcacactctgcaacatgtcattcacttcagcggtggtggccgattcccattatcaaggcaaaatccacgccaagaggttaaaactcttgctag

SEQ ID NO: 67040 - DNA, 406 bp, Homo sapiens
tttcgtgtcagccgaggccattctcaaacgagagtccggggctgctgagcaggtggataacaagggccggaatttccttcatgtggcagttcagaactctgatattgaaagtgtgctgttcctgatcagtgtccacgctaatgtgaattcaagagtccaggatgcctccaagttgacccccctgcacctcgctgtccaagcaggctcagaaattattgtccgcaatttgcttcttgcgggagccaaagtgaacgaattaactaagcatcgccagactgccctccatcttgctgcccagcaggacctgcccaccatctgctcagtcctcctagagaatggcgtggactttgctgccgtggatgagaatggaaacaatgctcttcatcttgctgtcatgcacggccgg

SEQ ID NO: 67041 - DNA, 417 bp, Homo sapiens
aatacaacccttctcttgctgaactcctctggtggaattgtccatggcaggccttgaggaagacattctagaacttctgaagagaaatcagagaaatccacgccatactctgttagtattccttctgtttcaggctcaatttcaccagcctgcccaagactcttagccagctgccccagggcaaaattgcagtcctccttccagtccacaatgcggcagatgaacagtgtgttggcataatctttaggccgtgccacaaagtcctggggacagtccttgagaggcacataaattctaggcactcggtggtctgagggagaaaacagggcgtatttcctaaacagttcgctgttcttatcagccaagagtttgaggaagccggttggtgctcgtcccgggaattccggacgggtactc

SEQ ID NO: 67042 - DNA, 441 bp, Homo sapiens
tttcgtcttaggaagtgagtgtgcgcgcgcgcttgtggggagatgaggcagctgctgcgcccgattgaccgccagcgatacgacgagaacgaggacttgtcggacgtggaggagatcgtcagcgtccgcggcttcagcctggaggagaagcttcgcagccagctgtaccagggggacttcgtgcacgccatggagggcaaagatttcaactatgagtacgtacagagagaagctctcagggttcccctgatatttcgagaaaaggatggactgggaattaagatgcctgaccctgatttcacagtccgagacgtcaaactcctagtggggagccggcggcttgtggacgtgatggatgtgaacacccagaagggcacggagatgagcatgtcccagtttgtgcgttactacgagacgcccgaggcccagcgggacaagctg

SEQ ID NO: 67043 - DNA, 1768 bp, Homo sapiens
attttggtgttagaaagctgtgtctttaagttgaaaagatgtgtaacaaaaccaattttgccacaagctaattgacacataaacaagaatgacgttcctacggcgtatttttggtcacaaaacaatcaccaaatttctaaagagagaccaaaacacttctaatattaaacactgaaataaatgcaagccacacatacagataagaaagatgagtaaaaacaagtaaaataacaatttacccaattattccagttcaggatcttgggtggccggaccctatcccagcagctcagagcaccagtggggcacccaccctggacaggacgccaccccactgcagggcgctcaccccgccacactcactcaggctgggaccacggagactcaccgcttaacctagacttaacctaacatgcacatctttgggatgtgggagaaaatccacgcagacatggggagaacgtgcaaactccactcagaccagaaatgaatgtcttcttttctcatcggtgttaaaacagtgttaaatgaaaaggcattactcgaggacccactgtattctggtgaggatactgactacagatgttactggtaaaggaaccagctggagggtacccaggtggtgtattgctccttacaaatgcatgggaatcaataattatatcaatcacgtcaattaataaacaggattttagaaaagcacaatcattgctcaaaaacagtaactaaaaaccaagtagatggagttgacaggaacagaacccccctagggagccctgggaagtcagctgctcaccccagaaatgggctgacgagctgcaggagctcagagccagacaccagctcctggttgaagagtgcgatgcagcggaggaagttttcatacacctcctggctcttcagcacccggcggaccttgtcaaagaaagaaaattcctgcagagtcccgtacttccccactgcagcgatggacaggtctttggtaccacgaagtttcatttttttcttggcgggtgcagacacggggcggaggagcgagggccgggagcgcttcctgctgtgctccggggtcttgtcgtgctcgttcttctgcacgctgtgcatctcgcacggcccgtttcctgtaaacagagaccgcttggcttcgggcaggaactgtccaaactctaagagcaggtcctcctggccccggaagaggttggccacctcggtgaacacctcctcttcagacatgcctcggaatggccggcccctcgtgttcagctgctccttctggtacgtgtgcaggatctccaggaatgacctgtagatttctgggtggtctaggaagcgggttttaatcttattcacatagctgatggcgttgttgaattccacggaatcggactccaggggcacctggggtttgtcctctttatacggcacctgctgcttgaagtcctctgcaccgtccccgtggttgtgcgaattctcctggcttgtcagaggcgactgtatgtttaacttgccattcttgggaatgtctattctatatccgaggggaagaaaagcgttgaatccaacaatgaggtcagggtgctcgtggaagagctgcgagacacgtctgatgactccaggagtatcgatgctctggcttttgaactccttcatgatctccaggaagccgttgtaggtggcagggtcgctgccaaagcggatcttcacctggtccagataggtgagggcgtcttctacgtgcaccggcagcttctcgtggcctgcgacgaaa

SEQ ID NO: 67044 - DNA, 459 bp, Homo sapiens
gtctacgccaagcttggcacgaggcagaaggggcaccacggtgcagctggagtgtcgggtgaagcacgacccctccctgaaactcaccgtctcctggctgaaggatgacgagccgctctatattggaaacaggatgaagaaggaagacgactccctgaccatctttggggtggcagagcgggaccagggcagttacacgtgtgtcgccagcaccgagctagaccaagacctggccaaggcctacctcaccgtgctagctgatcaggccactccaactaaccgtttggctgccctgcccaaaggacggccagaccggccccgggacctggagctgaccgacctggccgagaggagcgtgcggctgacctggatccccggggatgctaacaacagccccatcacagactacgtcgtccagtttgaagaagaccagttccaacctggggtctggcatgacca

SEQ ID NO: 67045 - DNA, 706 bp, Homo sapiens
catactttgcttgattttgggaagaaatccaatccgaccccgtttgtgctccaaatttcgaggctctttcacttttactcccaaatgcttcatatacatgagaataacatactgcatggtggagctcttatcttcctctacagcctgagcagtcatcaatacttcttcaattttggcaacaatctgttctgcacatgtccgctccttctccaaagtcaatcggtccttgtctcgctctgcatcaagtttagtcagctcgctttcagccaaggtcagtcccatactacgtttctgccgaaaatcttctaagtgcctttgaacttctggatggactctttcttgcatagtttggatatagtggcgatgcagatcctcaggaatgagctcaggtcttctcttttctagatctgcagacatttcatcaggaacagaaactttcaggtgtgctgatcgatctagaaagaactgatgaaactcaaggaagatgcgacgagtttctttggaattggtatgtttatacaggtctgaatagagataacaaagcaaagtcgcagggtcaaattgtgaaactacatggcgtaagaaaacagccaaatgagccgggcgagattttagcaattcaatgctctggaaacagctgcactgtccattgatctgttcatgttcagtaccaaaatcatcatcttctgctccaataatatgaggt

SEQ ID NO: 67046 - DNA, 466 bp, Homo sapiens
aatacactggccaaagttaaatgtttttttgatagtggaaataatatcgggctctgctgcatcaggaagattccctccttcttctgtttgtttatgaatatacgctagcagatctgcagctctgcctgttccttcacacacaactactggaacaggggggctttcctgaaggtattcaagaactgtgaggataacatttggcccaccctcaaatataagtgccaccacagggacaccctggccaatcctagcatgaattctttgctgattaatagttttttcaagttctcttctcagtctgacttccgccccatactttccaacagtgccatcatccaccaatatgaaatgggaatgcagattattcaaaacattcaatttgctcagggggttcaataaggtttgataaggagcaaccacatctctcccaacaagatcatttctgttttcaatcactccccatgga

SEQ ID NO: 67047 - DNA, 708 bp, Homo sapiens
ttcctgatgtaaatgatgccattgtgtaactattcaatgattatgatgttaaggcaacctcccatcatttagtggtgtgtcatctagatctacgcatatgtgatgcatttcatgctaaagaaaaagagtcaagctcacgtacaagtggaggggcaatgcaactctcttttgcacagctaactatagattattatccgtatcataaagcaggagatagttgtaatcattggatgtattttagtgatgcaaccaaaacaaaaaatggatgggccaatgagttattgcatgaatttgagtgcaacgttgaaatgcttaaacaggctgtgaaggatcataatgtaggttcacctcctaaatccccaacacatgcctctccccagcacacacaaacagagaaggactaccctctgaaagggacatgcagaacaccttcagtattatctcaacaatcaaaagctaagctaatgtctagttctgttgtggttagacttgcagatttcaatatataccaggtctctacagcggaacaatgtcgttcttcccccaaaagcatgatttgctgcaataaaaaatccctatatcttccacaagaaatgtcagctgtctatatagaattcacagaatattactatccagatggaaaggattttccaattccatctcccaacctctatagccagctgaatgcactacagtttactgtggatg

SEQ ID NO: 67048 - DNA, 439 bp, Homo sapiens
ttcgccattcgtgcttggggctcaaacgggttcccaaaggaacgcttcctcagcatggacttcaccaggatcaccgtggtccagctggggatgagcctgactgagttcttaacctcctcctctgtcacctccaccacgctgcagtgctcctcctccgaaggaaggggctcctccccgttcttggtcacccaagggtgcaacttgatgtctggcaccccaattctcgtctcgggattcttgtctaacatcttcaggatcaggtccttgagctcctcgctgatttctggcccctcaggaaacaccacgggctcattcttgatcttcctatggagggccaggatgaaatcgtcgatgaacgggcactgtggggtggggaggcagacaaaggatgtgggtccagggcctcgacctgtgccaggggatcaacccccctcccttg

SEQ ID NO: 67049 - DNA, 403 bp, Homo sapiens
aatacatggtgggggggttcacagttgtagtgcaatggttcatatagctggccatgatgaaggtggcttctgcaatcttgggagcagccatccggaagatcaacttctcaatgtggctttttccagagctcttgtctgggatagatctaatcacaagcatgaagtcatccctgcagccaccaaacgttgtcactgaagagtaggggtaagtgatgtgcacttgcatagtgttgtggtccaggatgctgacgccatcctcattcacagcaatccacaccagagcgttctccttggaagacagctgggcaggctgagcagcaaaaagtttagcaccaaagaaaggccatttcctggccacggtcaggtagatgcggatgcactcaggaggggagcatccttgcaa

SEQ ID NO: 67050 - DNA, 551 bp, Homo sapiens
gccctcacacagcagcatgcactcgattcgcagctggtagcagggaatggccagcaggaggaggtagaagtggtcggcgctggccagcttggctcgctcctctgtgaatgcccgcaggttttcaatctcgtgcttctcgggaaggagcttaaggagttgtttgagaacctccacatcaaacttggtggtatctccagcccggatcatagcagcgacctcctcgttggagcacttaaattgcttcaggaagatgttgaggttcaggctcttcttggcatcgaggaaagtgatctccttgggctccttcctggcccggggggccaccatggtgggctccttgggcttggctgcagggaaggagaatagtcgctcgatgctggagaagtcgggctccacagcctcggcgtcggggctgctcagggacgcccacatagagttgtgctcacgtgccacgttggatggcagcttctgccagttcagcttcttaatgcgcagtgtgggtgggttcacccgccgatggctggggacccatgctgagcccaagccatggt

SEQ ID NO: 67051 - DNA, 730 bp, Homo sapiens
cccacgcgtccggaataaagatagataagacttccgatggaccaaaacttttcttaacagaagaagatcaaaagaaacttcatgattttgaagagcagtgtgttgaaatgtatttcaatgaaaaagatgacaaatttcattctgggagtgaagagagaattcgtgtcacttttgaaagagtggaacagatgtgcattcagattaaagaagttggagatcgtgtcaactacataaaaagatcattacaatcattagattctcaaattggccatttgcaagatctttcagccctgacggtagatacattaaaaacactcactgcccagaaagcgtcggaagctagcaaagttcataatgaaatcacacgagaactgagcatttccaaacacttggctcaaaaccttattgatgatggtcctgtaagaccttctgtatggaaaaagcatggtgttgtaaatacacttagctcctctcttcctcaaggggatcttgaaagtaataatccttttcattgtaatattttaatgaaagatgacaaagatccccagtgtaatatatttggtcaagacttacctgcagtaccccagagaaaagaatttaattttccagaggctggttcctcttctggtgccttattcccaagtgctgtttcccctccagaactgcgacagagactacatggggtagaactcttaaaaatatttaataaaaaacaaaaaaaaagggcggc

SEQ ID NO: 67052 - DNA, 411 bp, Homo sapiens
cggacgcgtgggtcgaatgctaacagccacagtacatagcacctttaatggcaaatttcgatcccagtgtatccagaaattcaactgtcagatattttgataatggcacagcacttgtggtccagtgggaccatgtacatctccaggataattataacctgggaagcttcacattccaggcaaccctgctcatggatggacgaatcatctttggatacaaagaaattcctgtcttggtcacacagataagttcaaccaatcatccagtgaaagtcggactgtccgatgcatttgtcgttgtccacaggatccaacaaattcccagtacgtagaagaagggcagtcgcaatgagtgagcctctgtgggggtaaatttaaaggagattggtctatggcagctgtacctgaatt

SEQ ID NO: 67053 - DNA, 395 bp, Homo sapiens
agctgttccccccggccagcgcagcagggcagccggaccccagacccacagtgagtgcccatgtcttaaacaaacccccgcctcaggctctgacactgccaccttccaatcctgccccccttcaccttggccacgggcctcgatcattggccttagtcaaactgcaggtcttctctttgtgtccctgagtcaggcagggagacctggagaccctaaggcccaagtggggtgagttggagcctggcgccctggccctcaagctgacgcctgtgtgacgggctctttccccagcaggatcctgcagcccccgctccgtgtgaggagacccagctctccttgctgccacttcaggggtgcggcctgatggaggggaagacgatggaggcgaagaccac

SEQ ID NO: 67054 - DNA, 496 bp, Homo sapiens
agatttttgtttgtttaaacaaacttattccttatttctggtttttaaaaacaattgtttctttaacttaagacacttcatcctgaattttttaaaggcagcctattaacacatccctttaacttacttattctttgtattctctaaggaagcactacagttcgtaaggagatcatcaggaataagatcagagccattgggaagatggcacgggtcttttcaattcttcggtaaggatgtctgtcattacagtgcggattaaaggcattttgagagtaaattagacgtcgaattcagaacagtttttttagaattggaatgtagtattgaaactgcaggtctttaggttgagtgcaaattcaatgaacatgtttaagcgactaaaaatgttccagcaaacattgatttgttagtagcttaaatgtagtgaatgtagtggtttagtgtggactttccaacccgattgcctgtgttcaaattctggctctacctcttc

SEQ ID NO: 67055 - DNA, 466 bp, Homo sapiens
attgctgccgctggatcgactgctttgccttgtacgaccagcaggaggagctcgtgcggcacatcgagaaggtccacatcgaccagcgcaaaggggaggacttcacttgcttctgggccggttgccctcgaagatacaagcccttcaacgcccgctataaactgctgatccacatgagagtccactctggggagaagcccaacaagtgtacgtttgaaggttgcgagaaggccttttcaaggcttgaaaatctcaagatccacttgcggagccacacaggcgagaagccgtatttgtgccagcatccgggttgtcagaaggccttcagtaactccagtgaccgcgccaaacaccagcggacgcatctggacactaaaccttatgcttgtcaaattccaggatgtaccaaacgctacacagacccaagttccctaagaaagcatgtgaaggcacattcttccaaaga

SEQ ID NO: 67056 - DNA, 505 bp, Homo sapiens
gtattgttcagcgggccatgctgatggcgatggagccgatatgggagagtgattttcatacgctctcatatggcttccggcctgagcgcagtgtccaccacgcgatccgcacggtgaaattacagctcacagactgtggtgaaacccggggacgctgggtgattgaaggcgacctgtccagttacttcgacaccgtacatcatcgactgctgatgaaggctgtacgccgcaggatcagtgacgcacgtttcatgactctgctgtggaaaaccatcaaggcgggacatatcgatgtcggtctctttcgggcggccagtgaaggtgtgccacagggcggtgttatatcgccgctattatcgaacatcatgctgaatgagttcgatcaatacctgcatgagcgctacctgagcgggaaagccagaaaagatcggtggtactggaataacagtatccaacggggccgaagtacggcggtcagagaaaactggcagtggaaacccgggcg

SEQ ID NO: 67057 - DNA, 755 bp, Homo sapiens
atgcacgtaccggtttggagttaacgggccgaggcgcaccgtgacggcggcgtgcagccccacggctttgctgtttcgcgtgagctccaggaacacagcgcggctcgtgcgcttagggtgcgggtcagtaggagcgggtggcagggcgggagctgcggggaccgcgcagtgcaggcgtggctgaggggctgtggaagccgcctaggccagcgggggccggaggagtgagggtgggctcctggctggtgactgcggccaccccggagagggcaggggagggagctcccacctgttgtccagccagttgtgcagctgcaggaagcgcagccggtcgcggctctcctccaggctcaggcccagctcctgcacgtagcccccgctgtcatacacggcacaggagccccaggaccatgcccccagcagatccggcgctgaataggcccacgtccccgagccattgtgaggactctcccagccaacgtcgtaatcgctggtgctgaagcctcctgcggccgagcacgtgtggaccctggggccgggagggtctgggtagagtgcttcctgcagccgcacctgccgcagccgtgggggccccagctctgggctggactggttcccgtggacgtagggcagcagcacgtgggccatccatggccagagctcctcagaccgcgtgatggccaggaaggcccggctgtgcagctcctgcttgatggcgctttgcagacggtaggcgtgcccatggcatgaggcac

SEQ ID NO: 67058 - DNA, 737 bp, Homo sapiens
ggtcgacccacgcgtccggtcttatggagcatgggaggggaaggcagtctgatgaggacaaccaggaagtcccagagtcaccacagcccacagacaaaggctttggggcagtgatacagctcctaggggtggcagatgatcttggtgagagccaagcccctgtcggggctgaggtttgggtgtgtgggttgacaggcacctgtgtccccaggatgtggagctggccgagcacctcaacgccagcctggctttcttcctcagagaccttctgtccctggtggaccggggctttgtcttcagcctggtccgggcccactacaagcaggtggccacgcggctccagtcgtcccctaatccagcagccctgctgaccctgcgcatggaattcacccgcatcctgtgcagccacgagcactacgtgaccctcaacctcccctgctgccccctgtcacctccagcctcgccctccccctctgtgtcctccaccacctcccagagctccaccttctccagccaagccccggaccccaaggtgaccagcatgttcgaactgagtggaccattccggcagcagcacttcctagctgggctcctgctgacggagctggcactggccctcgaacctgaggctgaaggggcattcctgttgcacaagaaggccatcagtgctgtgcacagcctgctatgtggccatgacactgacccccgctacgccgaggccactgtgaaggctcgtg

SEQ ID NO: 67059 - DNA, 521 bp, Homo sapiens
catgcccaaagacactggagcggcttttaggctccccagaaggcttctccaaaactgacgggcacctggccgtggttccagggctgacagcattaatctcttaccataactacctggacaaaaccaaacagcgcgagatggtctactgcctggagcagggcctcatccaccgctgtgccagccagtgcgtcgtggccttgtccatctgcagcgtggagatgcctgacatcatcatcaaggcgctgcctgttctggtggtgaagctcacgcacatctcagccacagccagcatggccgtcccactgctggagttcctgtccagtgagtccccgccctgcctgcgcatgcacccgagaggttcgggctgtgtaacctgtgcgggcttctctggtgccctctctcaggactccttggggaacctgggtgtctcgccttctgctgcctcagggcctgggcgtctctgcccggctgccatgagtgctctccttcctggctttgaggggcggctcctctcacccctc

SEQ ID NO: 67060 - DNA, 963 bp, Homo sapiens
ggagcggctgccacggaaaacgcctggccggacggtggctggcggccctgcctgggcgcggagggcggcggtggcgggccccgcggccttctctcagcttcctttctcctcacgacggcctccacagtccggagcccggcggagcccggacctggcggggagagctgcctccacggccgggcacccagaccccaccgtcgcagtcgccaccacctcagtccatccttggtaccggcaatgggcttcgtatcctccagtgcacttgtaactgacttggacacggaatactaagaactcacttctgtcctcatcccagtcgcgccggcggtgaccatctcggctcttttgggcttaactgccgctcctctggactctgtctgactttgggggcaccatggaccaaagtgggatggagattcctgtgaccctcatcattaaagcaccgaatcagaaatacagtgaccagactattagctgcttcttgaactggaccgtggggaaactaaaaacgcatctatctaacgtttaccctagcaaaccagtaagtgtgtaaaagctgggggcagctgctctgaccagcagcttttcgtgccgtgtaccctcctttttcctgcttctcccctccagtcttgaatcaaataggtctcttttggtagaccgcgaggtattttgagttctgaggttgtgtctcctgagtgttcgaaccatcattaatattttcctgatgaggttcagttaattagtaagaggaagcagaaatatcaagggacttaagaattggcaggcaaagaccgggcgcggtggctcacgcctgtaatcccagcactttgggaggccaaggcgggcggatcacgaggtcaggagttcgagaccagccttaccggcatggtgaaaccctgtgtctactgaaaatacaaaaattaactgggcgtggtggcgcatgcttgtaatcccagctactcg

SEQ ID NO: 67061 - DNA, 663 bp, Homo sapiens
ccgtaccggttcggaattccgggctcgagaaggaggacgagagccagcgcctccacctggccaggcgggagcaggtcatggccgatgtggcctggatgaagcaggccattgaggagcagctgcagctggagcgggcgcgggaggcagagctgcagatgctgctgagggaggaggccaaggagatgtgggaaaagagagaggcagagtgggcccgagagcgcagcgcacgggacagactgatgagcgaggttctgacagggagacaacagcaaatacaagagaagattgagcagaaccgacgggcacaagaggaatccctgaaacacagggagcaacttattcgaaatcttgaggaggtgagaaagttggctcgtcgcgagaaagaggagagtgaaaagctgaaatcggccaggaagcaggagctggaagcccaggttgcagagcgccggctgcaggcatgggaagcagaccagcaggaggaggaggaagaggaggaggcccggcgggtcgagcagctctcagatgccctgctgcagcaggaggcggagactatggctgagcagggctaccggcctaagccttacggacatccaaaaattgcttggaactgacttcatgggtaccataagtacagagaacaagggatgctgaggcttctgatcc

SEQ ID NO: 67062 - DNA, 442 bp, Homo sapiens
gatacgtactgcaggggagaccagctgcacatcctgctggaggtgagggaccacttgggacgcaggaagcaatatggcggggatttcctgagggccaggatgtcttccccagcgctgatggcaggtgcttcaggaaaggtgactgacttcaacaacggcacctacctggtcagcttcactctgttctgggagggccaggtctctctgtctctgctgctcatccaccccagtgaaggggtgtcagctctctggagtgcaaggaaccaaggctatgacagggtgatcttcactggccagtttgtcaatggcacttcccaagtccactctgaatgtggcctgatcctaaacacaaatgctgaattgtgccagtacctggacaacagagaccaagaaagcttctactgggtgaggcctcaacacatgcgctgtgctgcactcactc

SEQ ID NO: 67063 - DNA, 486 bp, Homo sapiens
ctctatctcctgaccttgtgatccgcccaccttggcctcccaaaatgctgggattacaggcatgagccactgcgcctggcctaattagataatttcttacttgcttcacatacatactggtaaaatctgtttcccctcctgtaaactgtatttagcatagccacagtgacacttgtttaaatgacttagtgtagggtgttttaggagcttttctgtacagaagctttgagggcatggtccttaggttctcaccgctgcactggctcagggtgtccgcccctgccaaggttgggtccctctcttcccatgtgctgcgagggtgctggctgcctgtgagttctttccaaagcttcccggcggaagccttggctgctgactctgctcggtccacaggaggctaacgagccggcagcagagcctgatcctgagctacgccgaggacgagacagatgtggaggggacggtgacggcgtcccctcccagatg

SEQ ID NO: 67064 - DNA, 835 bp, Homo sapiens
aaatggtgaaagcatgcaggaagcacctgaagaccccacccagatcctgatcggctacagccgaggcctcgttgtcatctgggacctacagggcagccgcgtgctctaccacttcctcagcagccagcaactggagaacatctggtggcagcgggacggccgcctgctcgtcagctgtcactctgacggcagctactgccagtggcccgtgtccagcgaagcccagcaaccagagcccctccgcagcctcgtgccttacggtccctttccttgcaaagcgattaccagaatcctctggctgaccactaggcaggggttgcccttcaccatcttccagggtggcatgccacgggccagctacggggaccgccactgcatctcagtgatccacgatggccagcagacggccttcgacttcacctcccgtgtcatcggcttcactgtcctcacagaggcagaccctgcagccagtaggagagcttcgggagtgggtgcccagggttaggtgtgggaggcatggggcaggaccatcagtaaagacagggccaggtgcagtggctcctgcctgtaaccccagtgctgtgggaggccaaggtggtaggatcgcttgaacccaggagttcaagtccagcctggacaacgtagggagacccttgtctctacaaaaaataaaaaaattagccaggtgttgtggcacgtacctgtagtcctagctactcaggaggctgaggtgggaggatcacttgagcctgggaggtggaggttgcagcgaaccaggatcatgctactgtactcagcctgggtgacatagccagactgtgtctcaaaaaaaaaa

SEQ ID NO: 67065 - DNA, 543 bp, Homo sapiens
aactgtcaaatctgaccagagacgtccccatctttgtgtgtgccatggccttccccacggtcccatgcccactccacgtttttgagccccgctatcggcttatgataagaagatgcatggaaactggcaccaagcggtttggcatgtgtttatctgctgagcacgcggggctttcagagtatggatgcatgctggagattaaggacgtgagaacgtttcctgatggaagttctgttgtagacgcgattggcatcagtcggttccgagtgctaagccaccgccacagagatggctataacacagcggacattgaatatcttgaagatgaaaaggtggagggtccagagtatgaagaacttgccgctctccacgattctgtgcatcaacagtctgtttcctggttcgcgtctctccaggatcgcatgaaagaacaaattttaagtcattttggggtaatgccagacagagaacctgagcctcagagtaatcccagcggccctgcctggtcctggtggatcctggccgtgctgcccctggagcgca

SEQ ID NO: 67066 - DNA, 823 bp, Homo sapiens
aatacatgcggtggtggcgctggcactgtaaacagggggtcaaccttctcagttttcagtttcttgattcgcctgtggctctcctcctcctcctcttccttctttaccaacatagagtttcccatgagccctgaatccggggcacttttgctaacttcccctgcagcggcgacgctgccactcccagtgcccccgcagtggaaggggctcgcgccacctccattgctcttggccccaaagccatagaggtgccccccggaaggggcctggctgccactgccattctggtggccctgaagcaggtcgtgcttgtccttcctggatttccccgcatccttatcccgcttggcgcctcggctgctctggcttttacctggcttctcctctttgcttttcccacaggagcctgcccccgcggtggcggcagaggtgctggtgctggtactattgctgtttgggttgccgctgccgccgctgctcacactttgacccagcgctgaattcatgccagttgcctctccagggcgcccttggacttcctgcctcttgccagtgctgctgatctcgggaatcccatacaaggcagcagaaggcagagatttattagcatccttagaagttttactccttttcacttttgatttgctggtctctttgtgtgaattcccctggggagcagaggcctgaacagaagcaaattttaggccatcagctaaggctgcggtagcaccagccccactggaggccggacctccacaatccttggagttgctgctactagtgggtggttggtgggaattattcaatctcaaaattttctgtc

SEQ ID NO: 67067 - DNA, 434 bp, Homo sapiens
tttcgttccaaacaggacatacgtgaacaaatttggggctacatggaatcacaaaatttagctgactttccccgacctgttcatcacaggatacccaactttaaggggtcttatctggcttgccaaaacatcaaagacctagacgtttttgccagaacacaggaagttaaagtggaccctgataaaccactggaaggcgttcggctgctggtgctgcagagcaaaaaaacattgttggttccaacaccacgactgagaacgggattgtttaataagatcacaccaccccctggggcaactaaagacatcttgagaaaatgtgccacctctcagggtgtgaggaactacagtgtccccataggcttggactccagagtcctcgtggatttagttgtggtgggatccgtcgccgtttctgaaaaaggctggagaat

SEQ ID NO: 67068 - DNA, 639 bp, Homo sapiens
tttcgtggcagtacgacaccaggaacagcaggatcgttctcatctgtgccaagcggtccctgtgcgcggccttctcggtcctgccctatggggaaggcctgcggatcagtgacctgagggtggacagccagaagcagaggcacccgtccggcggcgtctctgtgtcttccgagatggtctttgagctagaaggtgtggagctaggagcagacgggaaggtcgtgtcttatgcgaagttcctgtatcccaccaacgccctggtcacacacaagagtgacagccatggcctgctgcccacacctcggcccagtgtcccccggactctgccagggtcaagacataaacctgcccccaccaagtcggcaccagccagcacagaactagggagtgacgtgggggacaccctggagtacaaccccaacctcctggatgacccgcagtggccctgcggcaagcacaaacgtgtcctcatctttgcgtcgtacatgaccacagtgatagaatacgtgaagccctcagacctcaaaaaggacatgaacgagaccttcagggagaagttcccccatgtcaaactgacgctgagcaaaatcaggagcttaaagcgggagatgcggagcctgtcggaggagtgcagcctgg

SEQ ID NO: 67069 - DNA, 1202 bp, Homo sapiens
taaggccagccagaacaagcggatagatatcatacataatctgaagctggatagaacttatactggcttgcagactcttggagcagagacggtagtggatgttgaactccatcgccattctctcggagaagactgtatctatcctcagtcctcggagtctgacatctctgatgcccctccatctttgcctttgaccattccagccccagtgaaagcttcttcaccaataaagcagtcacatgagccagtacccgatacctctgtggagaaaggattcccagctagcactgaagctgaacgacacactccgttttatgctttgccatcttcattggaaagaacacccaccaaaatgactacatcccagaaagttaccttttgttcccatggcaattcagctttccagccaatagcatcaagctgcaaaattgttccacaaagtcaggttcctaatcctgagtcacctggaaaatccttccagcccatcaccatgagctgcaagattgtgtcaggttccccaatatcaactccaagcccatcaccattgcctcgaaccccgacttccactccagtccacgtgaagcaaggcactgccggctctgttattaataatccttatgttatcatggacaagcagccggggcaggtgattggagccaccactcccagtacaggaagtcctacaaacaagatctccacggcttctcagatctcccaaggaacaggttcccctgttcctaaaattcatggaagtagttttgtaacatctactgtcaagcaggaggattctttgtttgcatctatgccacctctttgcccaattgggagtcaccctaaggttcaaagccccaaacctataacaggaggacttggagctttcacaaaagtgatcatcaaacaggaacctggtgaagcccctcacgtgcccgcaacaggagctgccagccagtcaccactcccgcagtatgtgactgtgaaagggggtcacatgatagctgtgtcccctcaaaaacaggtcataactcctggagaagggattgcccagtcagcaaaggttcagccctccaaggttgtcggggtaccagttgggtctgctttaccttcaacagtgaagcaggctgtggcgatcagtggtggccagatcctggtagccaaggccagctcttctgtctccaaagcagttgggccaaagcaagttgtat

SEQ ID NO: 67070 - DNA, 408 bp, Homo sapiens
tttcgtggcggcggcggcatggcggagccgagcggggccgagacgaggccccccattcgggtcaccgtcaagacccccaaggacaaggaggaaattgtgatctgcgatcgagcctcggtcaaggagttcaaagaggaaatctcccggaggtttaaggctcagcaggatcagctggtcctgatcttcgcaggcaagatcctcaaggatggggacacactgaaccagcacggaatcaaggacgggctcactgtccatctggtcatcaagacccctcagaaggctcaagatccagctgctgccactgcttcttccccctccacacctgaccctgcctcagcaccctccaccacgcctgcttcacccgccacccctgcccagccctccacctctggcagtgcctcttcagat

SEQ ID NO: 67071 - DNA, 830 bp, Homo sapiens
gttggcatgggtccttcatcacttaataggcacatcagagatcacactggacgtgaaccaaatgaatatcaggaatatggaaagaagtcatatacacgtaaccagtgtggacgagccttgagttatcatcgctcttttccagtacgtgaaaggactcatcctggaggaaagccctatgattgtaaggaagtgggagaaacctttatttctcttgtaagcattcgaagacacatgttaacgcataggggaggtgtcacttacaaatgtaaggtgtgtgggaaagcctttgattatcccagtttatttcgtatacatgaaagaagtcacactggagagaaaccttatgaatgcaagcaatgtgggaaagccttcagttgttccagttacattagaatacatgaaaggactcacactggagataaaccctatgaatgcaagcagtgtgggaaagctttcagttgttccaagtacattcgaatccatgaacgaactcacacaggagagaaaccctacgaatgtaaacagtgcggtaaagcctttaggtgcgccagttctgttcgaagtcacgagaggactcacaccggagagaaactttttgaatgtaaggaatgcgggaaggctttgacttgtcttgcaagtgttagaagacacatgataaagcacactggcaatggaccttataaatgtaaggtgtgtgggaaagcctttgatttccccagttcatttcgaatccatgaaaggacccacactggagagaaaccctatgattgtaagcaatgtgggaaagccttcagttgttccagttcgtttcgaaaacatgaaagaattca

SEQ ID NO: 67072 - DNA, 894 bp, Homo sapiens
gcggggacccggatgtgtgtggtggcggcggccgaagagcttgtgtgcggagctgagaggcctatggatgaggaggacgcggcggccccggtttgttctcatgaacaagatggatgacctcaacctgcactaccggtttctgaattggcgccggcggatccgggagattcgagaggtccgagctttccgatatcaggagaggttcaaacatatccttgtagatggagatactttaagttatcatggaaactctggtgaagttggctgctacgtggcttctcgacccctgaccaaggacagcaattattttgaggtgtctattgtggacagtggagtccggggcaccattgctgtggggctggtccctcagtactacagcttggatcaccagcctggctggttgcctgactctgtagcctaccatgctgatgatggcaagctgtacaatggccgagccaagggccgccagtttgggtcaaagtgcaactccggggaccggattggctgtggcattgagcctgtgtcctttgatgtgcagaccgcccagatcttcttcaccaaaaatgggaagcgggtgggctctaccatcatgcccatgtccccagatggactgttcccagcagtgggcatgcactccctgggtgaggaggtgcggctgcacctcaacgctgagctgggccgtgaggacgacagcgtcatgatggtggacagttacgaggatgaatggggccggctacatgatgtcagagtctgtgggactctgctggagtacttagggaagggcaaaagcatcgtggatgtggggctggcccaggcccggcacccactcagcacccgcagccactacttcgaggtggagatcgtggaccctggagagaaatgctacatcgccct

SEQ ID NO: 67073 - DNA, 861 bp, Homo sapiens
tcccgggtcgacgatttcgtctggagtgttagcaccagtactggatgtgacagcaggcagaggagcacttagcagcttattcagtgtccgattctgattccggcaaggatccaagcatggaatgctgccgtcgggcaactcctggcacactgctcctctttctggctttcctgctcctgagttccaggaccgcacgctccgaggaggaccgggacggcctatgggatgcctggggcccatggagtgaatgctcacgcacctgcgggggaggggcctcctactctctgaggcgctgcctgagcagcaagagctgtgaaggaagaaatatccgatacagaacatgcagtaatgtggactgcccaccagaagcaggtgatttccgagctcagcaatgctcagctcataatgatgtcaagcaccatggccagttttatgaatggcttcctgtgtctaatgaccctgacaacccatgttcactcaagtgccaagccaaaggaacaaccctggttgttgaactagcacctaaggtcttagatggtacgcgttgctatacagaatctttggatatgtgcatcagtggtttatgccaagtaagtgctgatttgttctcattcaacttgtccagagggtttcaatgtctttgtgtaaatggtttacatagtctcactctctgaatcactcatctttacactttttagagtttgtaaatggtgaaagatttgaaaattaaggtatgatttcagtgaaaagtaccaagtgttgtattgtgcgaaggaaaagtagactagagttatttttctttccttgagtgtcacttgaatataaaagaataaaaatttttgaatagtgttaaaaaaaaaa

SEQ ID NO: 67074 - DNA, 418 bp, Homo sapiens
tttcgtagaggcccaagaggtgagcgaggtctgcaccacccctggctgcgtgatagcagctgccaggatcctccagaacatggacccgaccacggaaccgtgtgacgacttctaccagtttgcatgcggaggctggctgcggcgccacgtgatccctgagaccaactcaagatacagcatctttgacgtcctccgcgacgagctggaggtcatcctcaaagcggtgctggagaattcgactgccaaggaccggccggctgtggagaaggccaggacgctgtaccgctcctgcatgaaccagagtgtgatagagaagcgaggctctcagcccctgctggacatcttggaggcggtgggaggctggccggtggcgatggacaggtggaacgagaccgtaggactcgagtgggagctggag

SEQ ID NO: 67075 - DNA, 737 bp, Homo sapiens
tttcgtggagaaattgctgaaaatctccctgaacaagatattctgatacagagcgtctgtgagacgatggtgccaaagctggtggcagaggacatcccgctgctcttcagcctcctgtcggacgtgttccctggagtccagtatcacaggggtgagatgactgcccttcgagaggagctgaagaaagtgtgtcaggagatgtatttgacatatggagatggagaagaagttggtggaatgtgggttgaaaaggttctccagctctatcagatcacccagatcaatcatggcctgatgatggtggggccctcgggaagtgggaagagcatggcctggcgtgtcctgctgaaggcattggagagactcgagggtgtggaaggtgtggcccatatcatcgaccccaaggccatcagcaaagaccacctctacggaaccctggaccccaacaccagggaatggacagatgggctcttcacacacgtgctgagaaagatcatcgacagcgtgagaggcgagctgcagaagcgccagtggatcgtcttcgatggcgatgtggatccagagtgggttgagaacttgaactcagtgctggatgacaataagctcctaactttgcccaatggagagcgcctcagtcttccacccaatgtgagaataatgtttgaggtacaggacttgaaatacgcgaccttggccacagtgtcgcgctgcggcatggtctggttcagtgaggatgt

SEQ ID NO: 67076 - DNA, 881 bp, Homo sapiens
gcgggtggtcgtagctcggtagtccagttgtgggtaatcggggctgtttgttcctgtccgagagagctcggcggagacggctgtcgagtacccttcacctcggtgttgggagcctgggagcgaactgcggcgcgggttaccgctcccggggacgcagcaaggggcatcgagtccctggcgggagctgcgccatggcattgctctcgaccgtccggggcgcgacctggggtcgcctcgtcacccgtcatttctcccatgcagcgcggcatggggagcggcctggtggggaggagctaagccgcttgctgctggatgacctggtgccgacctctcggctggagcttctgtttggcatgaccccgtgtctcctggctctgcaggccgcccgccgctctgtggcccggctcctgctccaggcgggtaaagctgggctgcaggggaagcgggccgagctgctccggatggccgaggcgcgggacattccagttctgcggcccagacggcagaaactggacacaatgtgccgctaccaggtccaccagggtgtctgcatggaggtgagcccgctgcggccccggccttggagagaggccggggaggcgagcccaggcgacgacccccagcagttgtggctcgtcctcgatgggatccaggatccccggaattttggggctgtgctgcgttccgcacacttcctcggagtggataagggcatcaccagccggagaaacagctgcccgctcactccagtagtcagcaagtccagcgcgggggctatggaggtgatggacgtgttctccactgatgacctcaccggatttttacagaccaaagcccagcagggctggctcgtggccggcacggtgggctgtccaagcact

SEQ ID NO: 67077 - DNA, 428 bp, Homo sapiens
tttcgtgccgctctggagcggcgggtgccgagtctcgatgacttcgcgggacagagctggagctcgtgggtggagcgggccgacctgcccgcggctgacggggctgagctggaggagagtagcaaaaacacgaagaagttggatgccatgaccctcattaaagaagacatgtccatcttcgggcactgccctgcccatgatgacttctacttggttgtgtgtaaccactgcagccaagtggtgaagcctcaagctttccagaagcactgcgaaagaagacatgggcccctcagcaagctttatggccgggccccacccccacctccagcccctgccagctctcagaaatgccatgtagtgaatgggcagggcccagcttgtagggccccaggttccacgaaaacctcctccagggagaagggccaggg

SEQ ID NO: 67078 - DNA, 433 bp, Homo sapiens
tttcgtgtgggtgtctcggtggagccttgtttagcagtttcttttctaggagcctcttgaaggactcaccgtagatgcaggaagacattggatgaggtcagcatagctgaagtgaggtgtctgggttagacaatggctatggccctggaattgcaagcccaggcatctccgcagccagagcctgaagaactcctgattgtgaaactggaagaggactcttggggatcaaaatccaaactctgggagaaggaccgtggctctgtctctggcccagaggcctcccgccagcgcttcaggcaattccaatacagggatgcagctggaccccacgaggccttcagccagctctgggctctctgctgtcgttggctgaggccggagatccgtctcaaagagcagatcctggagctgctcgtgctggagcagttcctgg

SEQ ID NO: 67079 - DNA, 517 bp, Homo sapiens
  misc_feature (1)...(517): n = a,t,c or g
tttcgtcggggatgaagatgaagacatccgggacaggggtgctaaacccgtcatggtctacatccacggaggctcttacatggaagggacaggcaacatgattgatggcagcatcctcgccagttatggcaatgtcatcgtcatcaccctcaactatcgggttggagtgctaggtttcctgagtactggagatcaggctgccaagggcaactatgggctccttgaccagatccaggccctccgctgggtgagcgagaatattgccttcttcgggggagacccccgccggatcactgtctttggctcgggcattggtgcatcctgcgtcagcctcctcacgttgtcacatcactcagagggacttttccagagagccatcatccaaagtggctctgctctgtccagctgggctgtgacctaccaaccagtgaagtacaacagcctgctgacagacaaagtgggctgtaatgtgctggcccccgtacgaaatcgtagncccgggggttcatcgaccata

SEQ ID NO: 67080 - DNA, 996 bp, Homo sapiens
ggaaggagctgctggacaggccgagggagcctacgtccgagaccgcgcagacgccgccgccatggtaagaaaatcatttttgagttacaacacaaccatctggggccctttggaactggtggagaagctgtaccccgaagcagaggaaataggagctagagtccgggatctacctggtctgaagacccctctgggtcgagcaagagcgtggcttcgattagccctcatgcaaaaaaaaatggccgattacttacgttgctcaattattcggagggatctcttgagtgagttttatgagtatcacgcactaatgatggaagaagaaggagcagtaattgttgggctgctggttggcctgaatgtgatcgatgctaatctgtgtgtgaagggagaggatttagactcacaagttggagtgattgatttttctatgtatttaaagaatgaagaagatattggaaataaagaaaggaatgttcaaattgctgccatattagaccaaaagaattatgttgaagaattaaatagacaactgaacagcacagtcagcagcctccattcaagagttgattcattagaaaagtcaaatactaagctgattgaagagttagcaatagcaaagaataacatcattaaactccaggaagaaaatcatcaattacgaagtgaaaataaattgattttaatgaaaacacagcagcacctagaggttaccaaagtagatgtggaaactgagcttcaaacatataagcattctcgtcaggggctagatgaaatgtacaatgaagccagaaggcagcttcgagatgaatctcagttacgacaggatgtagagaatgagctagcagtacaagttagtatgaagcatgagattgaacttgccatgaagttgctggagaaagatatccatgagaaacaagatactctgataggccttcgacaacaactagaggaaggtaaagcaattaacatagagatgtatcaaaagttgcaggg

SEQ ID NO: 67081 - DNA, 597 bp, Homo sapiens
caaggtggacccacccatctgcctctgctcctgcgagaggttggagtagagcataaggagcacattggtggcaggcggtgtggggggccgcggccagcactctccagctaccctggacatctgcttctccagggccccagggcgcttcatccacttggagagaggcctggtcacctccaaaaccatgctgcccaaggaaaaggtgacctgggacaaagtgacagtgaataggtccatctgaaaccgctctaagcagctgtctgaagcctgctctgtgtcgggctttggctggtggaaaatctcaatggcaagtgagccctcagtggggaggtccacagggctggacagctgcagccggagctcagcccatgccagatcctcttgttggctcaggaaggagaagtcaaaagcaaacgtccagttctgcccatccactgccacatctgggtaggagaaaaccaagaaggaaggagggtgagtgagggcctcccccagcctcagtcagtgtcacaaccaccatagctcttgctggaggccttaccttatatagaattaccttcgaattctcaccccaactctatgagttggtaagatttt

SEQ ID NO: 67082 - DNA, 430 bp, Homo sapiens
tttcgtcccatgactgagccccgccgccgccggccgttgaatgggctccgggctctggtaggaagcgctgggagcggggggcgcttttaaaacaccgatctgggttttttaaaaacctcctttgaaaaaataatggcaaactcgacggggaaggcgcctccggacgagcggagaaagggactcgctttcctggacgagctgcggcagttccaccacagcagagggtcgccttttaaaaaaatccctgcggtgggtgggaaggagctggatcttcacggtctctacaccagagtcactactttaggcggattcgcgaaggtttctgagaagaatcagtggggagaaattgttgaagagttcaactttcccagaagttgttctaacgctgcctttgctttaaaacagtattacttgcgttacctagaaaagg

SEQ ID NO: 67083 - DNA, 1696 bp, Homo sapiens
ttttttttttttgcaggaccacaaaatggaactttattcagtcacagacactgaccctccaatagccccagaagcaagagcctagggcccagcaatccatacccagtccttggagttgggcagggtaggacgctggccaagggccagtgctgtctcttgcttacagcctgaggactacgggagcagcagctgtggcctggccgctcccaatgctgggggcttggcttggtgccccatccccttcctgactgagctctatgaaggactcttaaaaaaataaaataaaatgcaagcaaagtgctttgaaagaagggaggacaccctattcctgctaaggggtagaggaagaaggtgaaggcggctaggtgcccataagagaaggctggcacaatcttcattcccgccagtgtgatttcagtctcaaaagatgagtatttggctgagaaatggaaggatactccaggctccctacggagttgtgctggggccatgctgagctgcccttgcaggcagccctgggtgctgggggcagacatgcaggacactgggaagagtcagaaccacaggtgggagggaatctcagagcccaggctccccactgagcttggccagcagctttgaactccttcagaggaccctttcattttcttcctatgtccttatcgtccatacatcccaaatactaggaagctgaagaagacggtgactcccaccagggagacagtggcaggtgctgtgaagaattggcggtaattgattcggaagtaccagaccacacccaacagcaccacaaagacaggcaccatgaggctgcccacattgacaccaaggctgggtggctcagtggccgagggggccaaggaggctgaggggcctggaacagctgaccctgggggtgagcggtggcagtgaatcacacagttgtcggtaatgttcagagaacgcagtgtgcgggctgggtcttgtagcaggcggccctggtagatcagtttcatctggctttcttgtccagggaagtatttgctcttcagggcacccacggtatcctctggcctagccacagccagctcctcggtatcattgaggaatttgagccgcacagtgatgaggccagggctgggagggaggcaggtgctatcctcagatctcaggggggcctctggactgctgctgcctgcacctgcttgtcttttgggcaggccttggatgtcaaggagatgctcaaggctgggctcaacaccacccccagctccagcctccccagtggagtctccccgaccttcacccgcctcttcagccttctcatcattaccctctgatggatgggggagttcagttggctcggggttgccttggcctgccaccaggtggtccacatgccccaggtggaggacggatgtgtcgcctgctgacacaatagcgcccaggagctggttgctaccgctgtctgctacgtaggtagagagccaagctaggaccaaggctagaatcagcaccaccacacctgccaccaccatcacctcattacccacaccctcaatgagggtgacatcagagagctccatggcctggctgctggcagggtccacgctgaaaagaccagactaaatgttttgacctcgccaggacggcccctggactcgtctttccgtaggggtcgggaaaagggctggcaatctgcgattctgttcagggt

SEQ ID NO: 67084 - DNA, 720 bp, Homo sapiens
  misc_feature (1)...(720): n = a,t,c or g
aaaaaacaagtgtgctttttctaaaaactaaaatggttgcccattactgataaaaggtgtaaaatattttagtttttagaaaaaacaagtgtgcttttagacaatataatctttttccaaggagtgatctaaagctggaaaaaggaatacatgtgagagggagccccttgcccttcttaccgtggttctcctggctgctgctccttcccaatttaaattacagttgttgttataaagtaacagcccttctgcccgcaaccctctgcagctgagctgcccctcctggacctgatgaagctgtacgaaggcgccttcctgccgagttctcagtggccccggccgaagcctgatggggaggacacaagcggagaggaagatgcagatgactgtccaggcgacagggagagtcgcaaggacttggttctcatcgactcgcttttcatcatggatcagttcaaagctgccgagaggatgaatatcgggaagccaaacgccaaggacattgcggacgtcactgcggtggctgaagccatcctgccgaagggcagtgctcgggtcacaacctcggtcaagtttaatgctccatctttgttgtatggggctctcagagattatcagaagattggcctggactggctggccaaactttacaggaagaatctcaatggcatattggcagatgaagctgggctgngtaaaacagtgcagatcattgctttt

SEQ ID NO: 67085 - DNA, 556 bp, Homo sapiens
caggctgttaagacaagagcttgtggtgctttgccaccttcaccaccccagtttgatatctttgctggcagctgggattcgtccccggatgttggtgatggagttagcctccaagggttccttggatcgcctgcttcagcaggacaaagccagcctcactagaaccctacagcacaggattgcactccacgtagctgatggtttgagatacctccactcagccatgattatataccgagacctgaaaccccacaatgtgctgcttttcacactgtatcccaatgctgccatcattgcaaagattgctgactacggcattgctcagtactgctgtagaatggggataaaaacatcagagggcacaccagggtttcgtgcacctgaagttgccagaggaaatgtcatttataaccaacaggctgatgtttattcatttggtttactactctatgacattttgacaactggaggtagaatagtagagggtttgaagtttccaaatgagtttgatgaattagaaatacaaggaaaattacctgatccagttaaagaatag

SEQ ID NO: 67086 - DNA, 816 bp, Homo sapiens
atgatctcaccgatggctcactgtgacctccgcctctcgggttcaagtgactcttctgcctcagcctcctgagtggctgggactataggttgctgaccagcaatcatccatgtttggagagtgctgcttccagacaggtgatgtgaaattaaccatgggaactgggacatttttggatattaacactggatatagccttcaacagactactggaggcttttatccattaattgggtggaagattgggcaagaagtcgtatgcttagctgaaagcaatgcaggagacactggtactgccataaaatgggctcactatttagaccttttcacagatgctgctgagactgaaaaaatggccaaaagtttggaggattctgaaggagtttgttttgttccatcttttagtggattacaggctccattaaatgacccctgggcatgtgcctcttttatgggtttgaagccttctaccagtaaataccatcttgtacgagcaatattggagtcaatagctttcagaaacaaacagttatatgagatgatgaagaaagagattcatattcctgtaagaaaaatccgggcagatggaggagtttgtaagaatggttttgtcatgcagatgacttcagacctgattaatgagaatatagacagacctgccgacattgacatgtcatgcctgggtgcagcttctctagctggccttgctgttggtatgtgtgaaatttataagaatgagagttttcttgcaaactcttccttacagatagcatttctcctctcaaattacaaaattctagagagtcaaaaaaaaaa

SEQ ID NO: 67087 - DNA, 914 bp, Homo sapiens
ggaattcgcggccaaggaggacagcccaggccaaggcaggcaacctcatgtcagccatgctgcatgtggaggccctggagaggcagctgtttctggaaccttctcaggcacttgggcctccagagcctccggaagccagagtgcccggcaaggcccaaccagaggtggatactaaggcagagcccagccacacagcagccctcaccgcagtggccctgaagccacctcccgtggagctggaagtcaacctcctgacccccggggccgttccccctacagtggtctcctttggaacggtgaccaccccagctgaccggctggccttgatagggggcctggagggcttcctgagcaagatggcagagcacaggcagcagcccgacatcaggaccctcacgctactggccgaggtggtggagtccgggagtcctgcagagtccttgctgctggccctcctggatgagcaccaggtagaggccgacctgacattctttaacacgctggtgagaaagaagagcaagctgggagacctggagggggccaaggcgctgttgccggtcctggcaaagaggggcctcgtccccaacctgcagacattctgcaacctggccatcgggtgccacaggccgaaggacggtctacagcttctcacagacatgaagaagtcccaggtgacccccaacactcacatctacagtgccctcatcaacgcggccatcaggaagctgaactacacctatctcatcagcatcttgaaggacatgaagcagaacagggtcccggtgaacgaagtggtcatccgccagctggagtttgcagcccagtaccctcccacctttgaccggtaccaagggaagaacacctacctggagaagattgacggcttccgagcctattacaagcagtggctgacg

SEQ ID NO: 67088 - DNA, 430 bp, Homo sapiens
gaggaccctacaggtgctgctggtacttacacatggccagtcccaagacgaggtggcccaggccgcggaagccctgagacacagaggtatcgacatctactccgtgggcattggggatgtggatgaccagcagctcattcagatcaccgggactgcagagaaaaaactgacagtgcacaacttcgatgaactgaagaaggtcaataaaaggatcgttcgcaacatctgtaccacagcgggtgaaagcaactgtttcgtggatgttgtggtgggatttgatgtctcaactcaggagaaagggcagactttgcttgaaggtcagccttggatggaaacctaccttcaagacatcttacgtgccatcagctccctcaatggagtaagctgtgaggtgggcacagagactcaggtcagtgtggcttttcaagtg

SEQ ID NO: 67089 - DNA, 655 bp, Homo sapiens
ccagcccagcgccaaggccctggggagcatcctggcctacctgacggacgccaagaggaggctgcgcaaggttgtctgggtgagccttcgggaggaggccgtgttggagtgtgacgggcacacctacagcctgcggtggcctgggccccctgtggctcctgaccagctggagaccctggaggcccagctgaaggcccatctaagcgagcctcccccaggcaaggagggccccctgacctacaggttccagacctgccttaccatgcaggaggtcttcagccagcaccgcagggcctgtcctggcctcacctaccaccgcatccccatgccggacttctgtgccccccgagaggaggactttgaccagctgctggaggccctgcgggccgccctctccaaggacccaggcactggcttcgtgttcagctgcctcagcggccagggccgtaccacaactgcgatggtggtggctgtcctggccttctggcacatccaaggcttccccgaggtgggtgaggaggagctcgtgagtgtgcctgatgccaagttcactaagggtgaatttcaggtgagcatgccctgcggggtccctgaggcaccttgggatgggaggaggaggaggactcctgcttgccggtctaggggtcctcaaagg

SEQ ID NO: 67090 - DNA, 1289 bp, Homo sapiens
  misc_feature (1)...(1289): n = a,t,c or g
agggcagggttcagaaagactgaatgtaaagctgggctctgagtctgccaggcccttcgtgtgttgctctgcacattaattaaagggtctacgaggtcagcaaggacgcccaagaagactcagtcatgaaaggtgaactgctcctgttttccagtgtgattgtcctgctccaggtggtatgcagctgcccggacaagtgttactgtcagtcatctacaaattttgtagactgcagccagcagggtctggccgaaatcccttcccatttacctcctcagactcgaacgctgcatttacaagataatcagatacaccatcttcctgcttttgcatttaggtcagtgccatggctcatgaccttaaacttgtccaacaattccctttcaaatctggcccctggagctttccatgggcttcagcacttgcaggttttaaatctaacccagaattcactcctttccctggaaagcagacttttccattccctccctcagctgagggagcttgatttgtcatcaaacaacataagccaccttcccacatccttgggagagacttgggagaacctaactatacttgcggttcaacaaaaccagcttcagcagcttgatcgagcgctcctggaatccatgcccagtgtgaggcttttacttctcaaggacaacctctggaaatgcaattgccacttgctcggtcttaaactctggctggagaaatttgtctataaagggggactaacagacggcatcatctgtgaatcaccagacacctggaagggaaaggacctccttaggatccctcatgagctgtaccagccctgccctcttcctgctcctgatccagtgtcctcgcaggnctcagtggcccggctctgcccccggtgtggtcttgaggcctccttgagaaccacaacgtgggggagcgaggaactcttgggagttgcgagctcaaacccaagccaaggccggcccaacctgcgtcatgcccattgccactgtcatcattcactggcgttgtgtgtgggattgtgtgtctcatgatgttgggcagttgccatcttatggctgcaactatgcggcaatcacagcccagtaccatgggggacccttggctcaaaccaatgtatcctgggaaggtggaagaaaaagagcgattttgacagctcaccagcctgagagcttttgtctcaaatagggattggtcattgcaggccagaagatagtgtctgagtagggctgatgtgtttcctgttagtctgattttgcttttgccaaaagacaaaaaaaaaa

SEQ ID NO: 67091 - DNA, 785 bp, Homo sapiens
cccgggtcgacccacgcgtccggagactcaacaccagcattcaggagatgctccgagtgcttttctccacagactcgagggtacagaagatgtttgagatcctcttggatgaaaacagtgaggctgataagcgggaaaaggctgccaacaatctcattgtcctaggccgtgaggaagcaggggctgagaagatcttccagaacaatggagtagccttgctactgcagcttctggacactaagaagcctgagctggtgctggctgcagtgcggaccctgtcgggcatgtgcagcggccaccaagccagagccacagtgattctgcatgcagtgcggatagaccgaatctgtatcctcatggccgtggagaatgaggagatgtctctggctgtctgcaacctgctccaagccatcattgactccttgtctggggaggacaagcgggagcatcgagggaaggaggaggccctggttctagacaccaagaaggacctgaagcagatcaccagccacctgctggacatgctagtcagcaagaaggtgtctggccagggcagggatcaggcgctgaacctgctcaataagaatgttcccaggaaggaccttgccattcatgacaactcacgtaccatctatgtggtggataatggtctgaggaagatcctgaaggttgtggggcaggttccagatctgccatcctgcctgcccctgactgacaacacccgcatgctggcctctatcctcatcaacaagctctatgatgacctgcgctgtgacccggagcgc

SEQ ID NO: 67092 - DNA, 632 bp, Homo sapiens
aacgtcatgcatctctggccattcaccatacatgatctacgaggtctgggtgccaagaagttctatggcaagttctgtgctggagccatcgaccatatcagtatccgtcagctccaactaatacttttgaaagtagccttgatcctaggcattgaaatccacgtcaatgtggaattccaaggacttatacagcctcctgaggaccaagagaatgaacggataggctggcgggcactggtgcaccccaagactcatcctgtgtcagagtatgaatttgaagtgatcatcggtggggatggtcggaggaacaccttggaagggtttcgtcggaaagaattccgtggcaaactggccatcgccatcacggcaaattttatcaaccgaaatacaacagcagaagctaaagtggaagagatcagtggtgtggcttttatattcaaccaaaaatttttccaggaactgagggaagccacaggtattgacttggagaacatcgtttactacaaagatgacacacactatttcgttatgacagccaaaaagcagagtttgctggacaaaggagtgatactacatgtgagccacggatttccttcaaaactctttcttattgaagtggctaatatcaccaa

SEQ ID NO: 67093 - DNA, 435 bp, Homo sapiens
caaaggccagtaatagtacccatgagtttcgtattggcctacctgaggggtgggaatccgaaaaaaaggcagttatccccctggggatcgggccacccctgactttaatctgcctaggggttctggggggtattctcatctacgggaggaaaggcttccaaactgcccacttttacttaaaggacagtccatcccctaaagtaatatccacccctccaccacctatctttccaatttcaaaggaggtcggaccaattccaataaagcactttccaaagcatgtggcaaatttacatgcaagtagggggtttactgaaaaatttgaaacactgaaaaagttttaccaggaagggcaaagctgtactgttgacttaggtattacagcaaacagctccaaccacccagacaacaggcacaggaatcgatccttaattg

SEQ ID NO: 67094 - DNA, 426 bp, Homo sapiens
aattcccgggtcgagggctacatcagcaacctgcggaagcagctggagacgctgtctggggacagggtgaggctggactcggagctgaggaatgtgcgggacgtagtggaggactacaagaagaggtatgaggaggaaatcaacaagcggacagcagcagagaacgagtttgtgctgctcaagaaggatgtggatgctgcttacgccaataaggtggaactgcaggccaaggtggaatccatggaccaggagatcaagttcttcaggtgtctctttgaagccgagatcactcagatccagtcccacatcagtgacatgtctgtcatcctgtccatggacaacaaccggaacctagacctggacagcatcattgacgaagtccgcacccagtatgaggagattgccttgaagagtaaggccgaggct

SEQ ID NO: 67095 - DNA, 449 bp, Homo sapiens
ctacacggccggaattcccgggtcgagggaggtgtggtggtggtggatatgggatccatggaagggggtttggctctaggagcctctacaatctgggtggcagtagaagcatctccattaatctaatggggaggagcactagtggtttctgccagggtgggggagtagggggatttggagggggcagaggctttggggttggcagcactggggctggtggctttggaggaggtggttttgggggtgctggatttgggactagcaattttgggcttgggggctttggtccttattgtcctcctgggggcatccaagaggtgaccattaaccagagcctcctagagccacttcacctggaggtggaccctgaaattcagaggatcaagacccaggagcgggagcagattatggttctcaacaacaagtttgcctccttcattgacaaggcg

SEQ ID NO: 67096 - DNA, 883 bp, Homo sapiens
acaggctctgaagctgcagccccacaacggatggctacctctgcacagggaaagacctggatgctctattcattcaacagaatacagaaggcactgggaatagagtgaacaatgacaaccaatgcacagctgcccacaaggtgggctcctgggggagggtcatccctctgagaagagggcggcaccaagacccacacacctgaaaaatgtggtacttcatgtcgctgatctcgatggtcttgctgctgtccccatcctgttctgatttattggtcattagtgtcttgaacctggagcaaaggagacaaagcaaggtgggttttgaaccttttacttcaccactgtgtggcgatggcaccatctgtcacctgaccggctaccacaagacggaacattttaaaaattactgctgtgctcctaaaataattttcagcaagtgccattttacaccatcttaggaagacatctgagctgagcccaattctgtccccaccacccaccctacaagcgacctgacgcctgtggccagaatgctgactcttcattccaggatatttatgttttctaataataaaagcaataactaggccagaaagaacaccacctcagagcccccctttcctgctgccctgggtccaccccgtctcatcccgctgtggggcgagtggggctctgctgcaatgtgactgcagtctgaggggcagaggctgcagggtacagccccagcgagtcactctctgtcacctggaatctgaaacaaggtgcttctgtgcccctgggctgggagtttgttatctgaggctgcctacctgttagaagctgtcaccagcaggactttatgtgcataaaacagctttccttccaccaggaaggtcacatctga

SEQ ID NO: 67097 - DNA, 726 bp, Homo sapiens
gcgaccgccgtccccagtcacaggccagcagtcagtgcggcgggaagatgtccgcgcactgatgcaggaatgagctccaccacctggttctggaacaccatggtcatgggcatgctggtctcttccacctcgggccgcagcagcgtgggcccgaacacaatggccacgctctgcaccgacatgcggttctgctcgccgtgctcgatcacccggcagaggtgctggaagagcatccgcagagtgtcgtggttgggagcgggcagcgagcgcaccaagtcacgcacacagcggctgcgccgggcctggtcctgcaacttgatggccgcaatgaactggcggaagtgcgagaaggggaagaggggctcgggcagctcccgaaagaagagcttcagggctccggtgataacgtggacgtcctcccagcgcccgtcatccaggtcaaggcgctcatcgtggtccaccttatagcgtagcttctggatggtggccaggtttccactgatgcggtacagcccgtcgatgtccagcccgcgggcctcgacggcgcggatgcactgctgcacgaagcgtggcacccggctcctctcgcgctcacacagcgcggccagcgcgcagccgaacacctggtctttgatgtagcccttctcccgcagcgactgcagtgtgggccgcctctggaggaacttgcggagcttgtgccggaccttgctcaagcggacgcgtggg

SEQ ID NO: 67098 - DNA, 652 bp, Homo sapiens
gaccaacaagtcgagtggatccagaactgcccctcccggcgcagccagcccgtggaccacgattgtaactccttgctggtcacgctgagttttgacctgtgtgagcggggccgccgggccctggagacagcctctcacagcatgtctgcaagcctggagcccttcctctacggcctgcacgccctgttcaagggggattttcgcatcacctccccacgtgacgagtgggtctttgccgacatggacctgcttcaccgcgttgtggcgcctggggttcgcatggccctcaagcttcaccaggaccacttcacgtccccagatgaatatgaggagccagcagccctatacgatgccattgcggccaacgaggagcggctggtcatctcacatgagggtgacccagcatggcgcagcgccatcctcagcaacacgccctccctgctggcgctgcgccatgtcctggatgatgcctccgacgagtacaagatcatcatgctcaaccggcgccacctcagcttccgagtcatcaaggtgaaccgggagtgcgtgcgcggcctgtgggccgggcagcagcaggagctggtgttcctgcgcaaccgcaaccccgagcgtggcagcatccagaacgccaagcaggcgcttcgcaacatga

SEQ ID NO: 67099 - DNA, 641 bp, Homo sapiens
gccactcaatatcgggaaggctgggacgcctgtggggaccgccacgttattcgcggggcgacccacgcgtccgacccaaggagaagctgcacaccctggaggagttctcctatgagttcttcagggctccagagaaggacatggtgagcatggccgtgctgcccctggcccgtgcccgtggccacctgtgggcctattcctgcgagccgctgcgacagccgctgctcaagcgagtccacgccaacgtcgacctctgggacatcgcctgccagatctttgtcgccatcctccggtacatgggcgactacccttctcggcaggcctggcccaccctggagctcaccgaccagatcttcacactggccctgcagcacccggccctccaggacgaggtctactgccagatcctgaagcagctgacgcacaactccaacaggcacagcgaagagcggggctggcagctgctgtggctgtgcacgggcctcttcccgcccagcaaggggctgctgccccatgcccagaagtttatagacactcggagggggaagctgctggcccccgactgcagccgccgaatccagaaggtcctgaggacggggccccggaagcagcccccgcaccatgtggaggtggaggccgct

SEQ ID NO: 67100 - DNA, 479 bp, Homo sapiens
tgatactggacagaaaggcttgcctggccctcctggcccccctggctatggatcacagggaattaaaggggaacaaggaccacaaggcttcccaggcccaaagggcacaatgggccatggcctcccaggccagaagggagagcacggagaacggggcgatgtgggaaagaaaggtgataaaggagaaattggagagcctggatctccaggaaaacagggtttacaaggacccaaaggagacctaggacttacaaaagaagaaattatcaaacttattacagaaatatgtggttgtgggcccaaatgcaaagagactccactagagctggtgtttgtgatcgacagctcagaaagcgtggggccagagaactttcagatcattaaaaattttgtgaagactatggctgaccgggttgctctggaccttgccacggcccgcataggcataatcaactatagccataaggtggagaaggtgg

SEQ ID NO: 67101 - DNA, 417 bp, Homo sapiens
accgagctggggagtagcgagtactccaaagcccagtgtgatgagtactgtatccagggagacaactgcttccccatcatggtacggccctgcagctgggcatctctgactagccccttgcccaccctgatgtagcagacattcccagctcatcagctaggatctctggatagatctgggatactgatttggtagtttcccatgcctcacgtgtccattcgttcactcatccgtttattcagtaaatagacattgaccaccccataccaggcagtgcactaagcgctgaggattccaaagtgaacaggacactgctcctgctctcaagaacaaagggccagtgtgggaattggacaagtaaactactgatagcagaatgggaacactggagaaggttgtctacattcccgacccagc

SEQ ID NO: 67102 - DNA, 1149 bp, Homo sapiens
aggaagaaaacgatgatgatgacgatgatgatgatgaagaagatggggtttttgatgatgaagatgaagaggaagagaatatagaatcaaaggtgaccaagcctgtgcaaattcagaagagagcagtcaagagaccagcccctgcaaaaagcagtgatcattctgaggaggacagtgacctagaggaaagcgatagtattgatgatggagaggaactggctcagagtgataccagcactgaggagcaagaggataaagctgtgcaagtctcaaacaaaaagaagaggaaattaccctctgatgtgaatgaagggaaaactgtttttatcagaaatctgtcctttgactcagaagaagaagaacttggggagcttctccaacagtttggagaactcaaatatgtccgcattgtcttgcatccagacacagagcattctaaaggttgtgcatttgcccagttcatgactcaagaagcagctcagaaatgccttctagctgcttctccagagaatgaggctggtgggcttaaactggatggccggcagctcaaggttgacttggcggtgacccgtgatgaggctgcaaagcttcagacgacgaaggtgaagaagccgactggcacccggaatctctatctggcccgagaaggcttgattcgtgctgggacgaaggctgcagagggtgtgagtgctgctgatatggccaaaagagaacggtttgagctgctgaagcatcagaaactcaaggaccagaatatctttgtctcccgaaccaggctctgcctgcacaatctcccaaaggctgtagatgacaaacagctcagaaagctgctgctgagtgctactagtggagagaaaggggtgcgcatcaaggagtgtagagtgatgcgagacctcaaaggagttcatgggaacatgaagggtcagtccctgggctacgcctttgcggagttccaagagcacgagcatgccctgaaagccctccgcctcatcaacaacaatccagaaatctttgggcctctgaagagaccaatagtggagttctctttagaagatcgaagaaaacttaaaatgaaggaattaaggatccagcgcagcttgcaaaaaatgagatccaagcctgcaactggtgagcctcagaaggggcaat

SEQ ID NO: 67103 - DNA, 778 bp, Homo sapiens
  misc_feature (1)...(778): n = a,t,c or g
cgttgctgtcgggtagagtttgctcagtatttattggcacacagtatgttctcccgtctttccttctgtcaagaattatggaaaatacagagttctttgttgcttgaagcggggtggcatcttcacgtacaaggcattgtgagcctgcaagagctgctggaaagccatcccgacatgcatgctgtgggatcgtggctcttcaggaatctgtgctgcctttgtgaacagatggaagcatcctgccagcatgctgacgtcgccagggccatgctttctgattttgttcaaatgtttgttttgaggggatttcagaaaaactcagatctgagaagaactgtggagcctgaaaaaatgccgcaggtcgcggttgatgtactgcagagaatgctgatttttgcacttgacgctttggctgctggagtacaggaggagtcctccactcacaagatcgtgaggtgctgagcttcagcagcccgctcctgagcacacttcctctgccagttacgataacgtgcgtgaggaggaggcgaccatgggaaagcccggggaacgctctggtcagccttttcctgtgaggatgaggtcggaaggtgcgcccactgcagtatcctgttccgcctctggaagtcctgcaccaatgtttgtcccactcactgtgacctcctcctgtgtggagnctccccttgctcctcctttcctgggtggggntcangctctagagctggccctgcctctcagccccccacatttttagaacacactgtagctgtgcctctac

SEQ ID NO: 67104 - DNA, 384 bp, Homo sapiens
gaatctctgtctagtttattaaagcatgaagatcatcaggtttcagatggagctctgcgatgctttgcatcactggctgaccgatttacccgtcgtggtgttgacccagctccattagccaagcatggattaactgaggagctgttatctcgaatggctgctgctggtggtactgtttcaggaccatcatcagcatgcaaaccaggtcgcagcaccacaggagctccatccaccactgcagattccaaattgagtaatcaggtgtcaacaattgtaagtctgctctcaacactttgcagaggctctccggtagtaacacatgatcttctgaggtcggagcttccagattcaattgaaagtgcattgcagggtgatgaaagatgt

SEQ ID NO: 67105 - DNA, 698 bp, Homo sapiens
cctcatttcctgatcgaacagcctcacttgtgttgctgtcagtgccagtagggcaggcaggaatgcagcagagaggactcgccatcgtggccttggctgtctgtgcggccctacatgcctcaccagccatacttcccattgcctccagctgttgcacggaggtttcacatcatatttccagaaggctcctggaaagagtgaatatgtgtcgcatccagagagctgatggggattgtgacttggctgctgtcatccttcatgtcaagcgcagaagaatctgtgtcagcccgcacaaccatactgttaagcagtggatgaaagtgcaagctgccaagaaaaatggtaaaggaaatgtttgccacaggaagaaacaccatggcaagaggaacagtaacagggcacatcaggggaaacacgaaacatacggccataaaactccttattagagagtctacagataaatctacagagacaattcctcaagtggacttggccatgattggttagtctcgctctgtcacacaggctggagggcagtggcgggatctcggttcaccccaacctttgcctcacgggttcaagggattctcgtgcctcagccttccaagtggctgggattgcaggtgtgcgccagtacgcctggctagttttagtattttttgttacagacggggtttcaccatgttggctgggctggt

SEQ ID NO: 67106 - DNA, 692 bp, Homo sapiens
agggtcgacccacgcttccgcatgatacatacacctttagaggacactgtttctgttgaaggtgatattgttcacctcacaacatccataacaaatgctaaagaggtgaattggtattttgagaataaactggtgccttcagatgaaaagttcaagtgtttacaagatcaaaatacatatacgctagtcatcgacaaagtaaataccgaagaccatcaaggagagtatgtctgtgaggccttgaatgacagcggaaaaacagcaacttcagccaaactcactgtagtaaaaagagctgccccagtgatcaagaggaaaatcgaacccctggaagtagcactgggccacctagccaaattcacctgtgagatccaaagtgctcccaatgtccggttccagtggtttaaagctggccgagaaatttatgagagtgacaagtgttctattcgatcttcaaagtatatctccagccttgaaatcctgagaacccaggtggttgactgcggcgagtatacatgcaaagcttccaatgagtatggcagtgtcagctgtacagccacactaactgtgacagaaccaccaaagtttgtaaagaaattagaagcctccaaaattgtgaaagcaggtgactcttcacgacttgaatgcaagatagctggatccccagaaatcagagttgtgtgggtccgaaa

SEQ ID NO: 67107 - DNA, 736 bp, Homo sapiens
gtttgaacagcccggaaacccgggcgacccacgcgtacgaactccgcccccatgggggccccactttttcgctttgattccttcttcccccaaagaggtcccagctaccccatcctccagaagggaccccattgccccaacagcgactcttctctctaaaaagaccccagcaactctagcccccaaagaggccctcattcccccagctatgactgttccctcccctaaaaagaccccagcaattccaacccccaaagaagccccagctaccccatcctccaaagaggcctccagtcccccagcagtgactccttccacttacaaaggggccccatcccccaaagagctcctcattccaccagctgtgacttctccttcccccaaagaggcacctactcctccagctgtgactcctccatcccccgaaaagggcccagcaactccagcccccaaagggactcccacttccccacctgtgactccttcctccctcaaagactcccctacttccccagcttctgtcacatgtaaaatgggggccactgttcctcaagcatctaaagggcttccagcaaagaaaggccccacagctctgaaagaagtacttgttgccccagctccagaaagcacgccaatcatcacagctcccactcggaaaggtccacagaccaaaaagagttctgctacttcacctcctatatgcccagatccctcagctaagaatggttctaaagga

SEQ ID NO: 67108 - DNA, 862 bp, Homo sapiens
agaaggtcaaggaagatgaggatgatggtgtgggtgatggggatgaggacactgacagtgccatagggagcttccgatattcttcccgcagtaattcccagaaacctgaaacagacacatgctcctccctggctgtctgtgatcactatgcaagtggcagcagagttggcaaagagatggatagcagtattaataagtggctcagtggcctcaggacggaggaaaaacctcctttccaaagtgactggtctggaagttccagagggaagtacaccagatcgtccctgctcagggagacagagtctaaatcctccagttacaagttttccaaatcccagtcagaggaacaggacacctcctcctaccacgaggcaaatggcaactctgtaagaagcacttcacggttctcatcttcctccaccagggagggcagagagatgcacaagttctccaggtccacgtacaacgagacctcaagttcccgagaggagagcccagagccctacttcttccgccggaccccagagtcctcagaaagggaagagtccccagaaccacagcgcccaaattgggccaggtccagggactgggaagatgtggaagagtcatccaagtcagacttctctgaatttggagccaagaggaagttcacccagagctttatgaggtctgaagaagagggagagaaagagaggacagaaatcagagaagaagggaggtttgcatctggacggcggtcccagtatcggagaagcaatgacagggaggaagaggaagaaatggacgatgaagccatcattgctgcttggagacgccggcaagaagaaaccaggtccaagctgcagaaaaggagggagtgtac

SEQ ID NO: 67109 - DNA, 521 bp, Homo sapiens
cgacacattcgggcagaagcgcatcatctcgccatcctttgataacatcaaatattataactttgttatagaagagtacccgctggctgcccagggctttgactgggagctgtggtgccgctacctaaatccccccaaggcctggtggaagctggagaactccacagcgccaatcaggagccctgccctcattggctgcttcattgtggaccggcagtacttccaggagatcggcctgctggacgaaggcatggaagtctacgggggcgagaatgtggagcttgggatcagggtgtggcagtgtggcgggagtgtggaggtcctgccctgctcacggattgcccacattgagcgagcccacaagccctacacagaggacctcaccgcccatgtccgcaggaacgctctcagggtggctgaagtctggatggatgaatttaaaagccacgtctacatggcatggaacataccgcaggaggactcaggaattgacattggggacatcactgcgaggaaagctt

SEQ ID NO: 67110 - DNA, 612 bp, Homo sapiens
aaatcaacctttgagatctcttcagtccaggcttccgatgagggcaattacagcgtggtggtagaaaacagtgaagggaaacaagaagcagagttcactctgactattcaaaaggccagggtaactgaaaaggctgtgacatcaccaccaagagtcaaatccccagagcctcgggtgaaatccccagaagcagttaagtctccaaaacgagtgaaatctccagaaccttctcacccgaaagccgtatcacccacagagacaaaaccaacaccaacagagaaagttcagcacctcccagtctctgccccaccaaagattactcagttcctgaaagcagaagcttctaaagagattgcaaaactgacctgtgtggttgaaagcagtgtattaagggcaaaagaggtcacctggtataaagatggcaagaaactgaaggaaaatgggcatttccagtttcattattcagcagatggtacctatgagctcaaaatcaataacctcactgaatctgatcaaggagaatatgtttgtgagatttctggtgaaggtggaacgtctaaaaccaacttacaatttatggagcaagctatcattaaacatgtctgtttatcc

SEQ ID NO: 67111 - DNA, 707 bp, Homo sapiens
tcttggagccagtgccagactgcacgtggagactgtcaagatcattaaaaagccaaaggatgtgacagccttggaaaatgccactgttgcctttgaagttagtgtttcccatgacactgttccagtaaaatggttccataagagtgtggaaattaagccaagtgacaaacacagactggtctcagaaaggaaagtccacaagctgatgctgcagaacatctccccctcagatgctggggaatacacagctgtggtcgggcaattggaatgcaaagcaaaactgtttgtggagacattacatattacaaaaaccatgaaaaatatcgaggtgcctgagaccaaaactgcctcttttgagtgtgaggtgtcccacttcaatgtcccttccatgtggctgaagaatggtgtggaaattgagatgagtgaaaagttcaagatagttgtgcagggaaaactccatcagctgatcatcatgaacaccagcacagaggactcggcagaatacacatttgtctgtggcaatgaccaagtcagagccaccctgacagtcaccccaatcatgattacttccatgctgaaagacatcaacgctgaagaaaaagacactattacttgtgatgtgacagtgaactatgaaggcatctcttacaaatgggtaaagaatggtgtggaaatcaaatcaactgacaagtgccagatgagaacca

SEQ ID NO: 67112 - DNA, 752 bp, Homo sapiens
  misc_feature (1)...(752): n = a,t,c or g
gaaccattacggcgctgatccaattggctcacttgcagagaaacatttgcgcattgttctgttatatgaactgcaacccatttggtagtcaaagaggtgtactgtgcaactcttccccaaattctagaaagtgagaattgttaaaattcttgattttaaacttcaactttaacactttcttaaagctgaagtctctaagaaaactgtngtagaagaaaagagatttgttgctgaagaaaaactatccttcgcagttcctcaaagagtggaagtcacgcggcacgaaggtatataatcggaagtcaggggataaatgagtttgtgtgtgtttcctcaaagtctcttcttcttccacatgtgattgtttactttagaacatgtcctcatcagttatttctccttatgttggtattagaatgtgtctaccttttgtagccttctgggactgagtcttttgtgtctatgttggccttgaatcattcgaaggaagtggatgagtcccgaaaatgttataattttgaaagtggccacacttggacataactcaagtatcattctcagtcttgggctgtacttgccctcatattaaattagcttcctccttcttatagtgaggaagtaccatgaagctatgtcctaagcagatagaagaacagttatccatctgtagtgaccacatggctgtatatacatctgtatctcagcaggctgaatttaaatgaaaccttatctttaaagtatctgcagaggag

SEQ ID NO: 67113 - DNA, 547 bp, Homo sapiens
tgaatttcatgctgaaaaagaagagatagtgaaaggtgatgtacaacaagcaataaaaaacctgttctctgaggaaagatctgtaaagaaaggcatcttaattcaggaagatgaaaaaggagatattaacatgactatctattgtcttcttcatgaaaatgatggtgacacaattgagcgtgaagaagtaataggtggtgatgtcaaacgtaccattcataatttattgtcttccacatcaaacaataaaatatctgaaagggctaaaattgatgcctctgagagaggaaatgttcagtttttcacaacctgcatagaagctggagctttggattatctgaaacaactccacacagagtcaaatgaaacactgacagctaagaaacaagaaggagagaaagaaatcattggtggtgatgttgaaggtacaaaactgttactgaagaaaaggcagtctctggttgaacatactgttagtgaaactgacatcatccctggagatgtgcataacacagttaaggtttttatgaccgagcctcagagtaca

SEQ ID NO: 67114 - DNA, 575 bp, Homo sapiens
aattctcgcgtcgacccacgcgtccgatcgagaaagcccggccctactatgaggctcggcggctgtctaaggaggttcagcaggagacacagaaggcagcgctgcggtgcgagcgggccgtaagcatgcacaacgctgctcgagaaatggtgtttgtggctgagcagggcgtcatggctgacaagaaccgactggaccccacgtggcaggagatgctgaaccatgctacctgcaaggtgaatgaggcggaggaagagcggcttctaggtgagcgggagcaccagcgagtgactcggctgtgccaacaggctgaggctcgggtccaagccctgcagaagaccctccggagggccatcggcaagagccgcccctactttgagctcaaggcccagttcagccagatcctggaggagcacaaggccaaggtgacagaactggagcagcaggtagctcaggccaagacgcgctactccgtggcccttcgtaacctggagcagatcagcgagcagattcacgcacggcgccgcgggggtctgcctccccaccccctgggccctcggtgctcctcccccgtg

SEQ ID NO: 67115 - DNA, 606 bp, Homo sapiens
taatatcaacgaagccatggctacgagggctaatgtggggaaaaggaaaaacataaccactggggcatctgcagcatcccagactcagatgcctacgggccagacaggcaactgtgagtcccctttagggagcaaggaggacctcaactccaaagagaacctggatgccgatgagggagatgggaaaagtaacgacctcgtccttagttgtccttactttagaaatgagactggaggggaaggcgacaggcggattgcgctctctcgagccaactcatcctctttcagttctggggaaagctgctctttcgaatcgtcactcagctctcactgcacaaatgcaggtgtctccgtcttggaagtgcccagagaaaaccagcctattcacagggagaaagtgaagcgctacatcatagaacacattgaccttggggcctattattaccgcaaattcttctatgggaaagagcaccaaaactactttggaatagatgaaaaccttggtccagtagcagtcagcatccggagagagaaggtggaagatgccaaggagaaagaaggatcccagttcaactacagggtggctttcaggacaagtgagcttac

SEQ ID NO: 67116 - DNA, 675 bp, Homo sapiens
cagggtcgaggcctgtaattctccccagccatccatcgtacatctctccaacaaacccagatatgtgggctcctagacttactccgatcatgtaaatgtcatcaagagaagctccttctgccaacatctggtcaataaattccttcaagaccatggctggggagaattacaggcctcgaccctgcaggccctttattcaacgggaaacctcaccaagacagattagatcccagtgatgcgcagtttgttgatgtcatccattccgacactgatgcactgggctacaaggagccattaggaaacatagacttctacccaaatggaggattggatcaacctggctgccccaaaacaatattgggaggatttcagtattttaaatgtgaccaccagaggtctgtatacctgtacctgtcttccctgagagagagctgcaccatcactgcgtatccctgtgactcctaccaggattataggaatggcaagtgtgtcagctgcggcacgtcacaaaaagagtcctgtccccttctgggctattatgctgataattggaaagaccatctaagggggaaagatcctccaatgacgaaggcattctttgacacagctgaggagagcccattctgcatgtatcattactttgtggatattataacatggaacaagaatgtaaga

SEQ ID NO: 67117 - DNA, 1977 bp, Homo sapiens
gaatttccgggcgaccccgcgtccgcccacgcgtccggaactgaggacagggacagaggttatattatggtaccttgactggcgagcacttatgaagagaaagaggatgaaggccaacattaagctggttggttcaggatttccccttccctcctctgatttggatgactctctcactgaagagatagatgaaaagattggattccgaaatgatgcaaattttgactggcaaaatgtggcagatttcagggatgcaggtggatccttaactgaggtcaaggtggaagaggaagaaagggatccgcagagtcctgaatttgaaattgaggaggaggaagaaatgttgtcatccgtcataccagattccaggagagaaaatgaacttcccgatttcccccacattgatgagttttttacccttaactcaacaccatctagatctgcatatgatgagcctcatttgctcgtaaatattgagaaacagaaactagagttggaaaaacgacgactggatatcgaggccgaaaggctgcaggtagaaaaggaacgcctacaaatcgagaaagagaggctgcggcatttagacatggaacatgagcggcttcagctagagaaggagcggctgcagattgaaagagaaaagttgaggttacagatagtcaattcagagaaaccgtccttggaaaatgaacttggtcaaggagaaaaatccatgcttcaaccacaggacatagaaacagagaagttaaaacttgagcgagaacgcttgcaactggaaaaggataggctgcagtttttgaagtttgaatctgagaagctgcagattgaaaaggaacgcttacaggtagagaaagacagacttcgaattcagaaagaaggacacttgcagtgatttttccaggcttccatttagcaaatgtttgaaaactctagatttttctcatatcaggtgatataatgatggttgctggattagctgtggtttcttgtctaatgtcagtgttcagtaggaaaaagttatatgtggataactgtatgcctaagtagtatataaaagctgtgccctagcgtaaacagtatagcagaaacttactgtgctggactctttaccttataatattacatagagtcttgtattgtctgtgtacccagagtttacaattatgtccatataaaattctagcccagaagttctcatctggggtagattttggccttcagaagaccaatttggtgatgtctggagacatgttgggttgtcaaaactggggtggggaaaaggttgctactgtgcaatgcatacctcctcaacacccccccacactcagtaaagaattttccaacccaaaatatcattagtcctgaggttgagaaaccctgtcctagcctaactgtgtacctctatagctatgttttatagttttagaatattaaaacctcagatatttatgtgggtaggtacttaaatggccaaaaactttaactatgaaatgttactgtgtagtatattgaatataggaagtgatgaagattataggtattttattcccatgtttccatctataaatagccttctcagattcagaaaacaatacagagaacatcagaaattttctaaaatgggtcactttgaaaagaattctttttctcactattaatgctttagaagcaagacgcaattttaaagctttagttccttttctttcagtcattgtcttagtttgggtacaaaaatgtcatttcagtaatgtactgaaatcttataagtgaatagttgaagctagtaaaaatgataccagtataaaaatggtacttgtagtccatgagcttgaacccaatgactgattgtttgacttttaaaataagtaatagcagccatttgggagtagggggtaggtggggaagatgtactccgtatcaaataataatgatgttgaaataatgatagtaggtatgtattatggattggagaagcac

SEQ ID NO: 67118 - DNA, 1094 bp, Homo sapiens
atgagagataggcagtaaggacagccctgtgagtccgtactgcaggtgtggggcccagttgcccttccggcctaaatgggcactttgcattttcctagaaaacattacaccccttgcttgggctcctgccaagtctgactactgcttttttttgcagaggtgaacaagaaggaggtggtggaggctgtgaccattgtagagacaccacccatggtggttgtgggcattgtgggctacgtggaaacccctcgaggcctccggaccttcaagactgtctttgctgagcacatcagtgatgaatgcaagaggcgtttctataagaattggtaagggaggaggccatgcagtccctagcttgggagcttgggagctggagagcagggagcagcgtgtgcatggtttctcagctctgtagcaggcagggagctgctgtcttgggtttagtttgcctctcgaacagaaaaatacctgggatcagacttggccagccatctggtttcagccggaagctaacaccctcattctgagtccaggctagtgggtggtggctgaggacccagttggttgaggagtccaactagaaaccaggagaggtagcagaataattaaacccctataggggtggcaagggcctctggccctgggtggaatgtcccatttcctccatcactgagtgggcttccccaaggcagaaaggtttgtcccggagcaagaattttgtttgaatgcgtgtaacttaaattaaccttgtggacctctgctcagctccgctcggctctgcccgatgagctccatccaggctccgcttgccggtggaaaaggctccttagaagccggcaatgagctccatccccacgcggtgccagtgtgccttccgctcacccctcggaggggtgatgaaggcctgcacctggtcccctccccaactctgctctgctcctgaaggcataaatctaagaagaaggcctttaccaagtactgcaagaaatggcaggatgaggatggcaagaagcagctggagaaggacttcagcagcatgaagaagtactgccaagtcatccgtgtcattgcccacacccagatgcgcctgcttc

SEQ ID NO: 67119 - DNA, 384 bp, Homo sapiens
  misc_feature (1)...(384): n = a,t,c or g
ctggaggcgagcttcaacgtcatcaactcacactcctctccctgtcttccggctcctttcggtatgtgtgggtctgggcagggcagtagaggtcagaagggctggcctggagtgctcactccatcccctaccttttggcttctgtctacccctgcaaggctggctcagaaggttctgggggaggagttcttttctcagtctcgcccctcaggtgctgatcccagcggcctgtgtgtggattgtttctgcctttgtgggattcagtgttatcccccaggaactgtctgcccccaccaaggcaccatggatttggctgcctcacccaggtaggntttctcctagtcctccattctcttgttcaaataaaggtatctatttgaactc

SEQ ID NO: 67120 - DNA, 77 bp, Homo sapiens
ctccgcctcccaaagtactgggattacaggtgtgagccaccgtgcccagccaagaccttgtatctttaaaaaaaaaa

SEQ ID NO: 67121 - DNA, 697 bp, Homo sapiens
cccctgggagtgtgctggaattcgaaagcttttgattgcagtgactctgggaaatccttcattaatcattcacaccttcagggacatttaagaactcacaatggagaaagtctccatgaatggaaggaatgtgggagaggctttattcactccacagaccttgctgtgcgtatacaaactcacaggtcagaaaaaccctacaaatgtaaggaatgtggaaaaggatttagatattctgcataccttaatattcacatgggaacccacactggagacaatccctatgagtgtaaggagtgtgggaaagccttcaccaggtcttgtcaacttactcagcacagaaaaactcacactggagagaaaccttataaatgtaaggattgtgggagagccttcactgtttcctcttgcttaagtcaacatatgaaaatccatgtgggtgagaagccttatgaatgcaaggaatgtgggatagccttcactagatcttctcaacttactgaacatttaaaaactcacactgcaaaggatccctttgaatgtaagatatgtggaaaatcctttagaaattcctcatgcctcagtgatcactttcgaattcacactggaataaaaccctataaatgtaaggattgtgggaaagccttcactcagaactcagaccttactaagcatgcacggaactcacagtggagga

SEQ ID NO: 67122 - DNA, 828 bp, Homo sapiens
caggatctgtgaggatttcatttggatacatgtcgacgctggatgatgtccaggcctttcttaggttcatcatagacactcgcctgcactcatcaggggactggcctgtccctcaggcccatgctgacaccggggagactggagccccatcagcagacagccaggctgatgttatacctgctgtcatgggcagacgtagcctctcgcctcaggaagatgccctcacaggctccagggtttggaacaactcgtctactgtgaatgctgtgcctgtggccccacctgtgtgtgatgtcgccagaacccagccgactccttcagagaaagctgcaggagtcctggagggggcccttgggccacatgttgtcactaacctttatctctatccaatcaaatcctgtgctgcatttgaggtgaccaggtggcctgtaggaaaccaagggctgctatatgaccggagctggatggttgtgaatcacaatggtgtttgcctgagtcagaagcaggaaccccggctctgcctgatccagcccttcatcgacttgcggcaaaggatcatggtcatcaaagccaaagggatggagcctatagaggtgcctcttgaggaaaatagtgaacggactcagattcgccaaagcagggtctgtgctgacagagtaagtacttatgattgtggagaaaaaatttcaagctggttgtcaacattttttggccgtccttgtcatttgatcaaacaaagttcaaactctcaaaggaatgcaaagaagaaacatggaaaagatcaacttcctggtacaatggccaccctttctctggtgaatgaggcac

SEQ ID NO: 67123 - DNA, 393 bp, Homo sapiens
acataccatagagaagccttatgaatgtaaggaatgtttaaagtcctttttatatccctcaagactcactcgtcatcagaaaattcatactggcaagaaaccctttgaatgtaaggaatgtggaaaaacctttatttgtggctcagaccttactcgacatcacagaattcacactggtgagaaaccctatgaatgtaaggaatgtgggaaagcctttagtagtggttcaaacttcactcgacatcagagaattcacacaggtgagaagccttatgaatgcaaagaatgcgggaaggcctttagtagtggctcaaactttattcaacatcagagaattcatactggggaaaaaccctatgaatgtaaggaatgtggcaatgcctttagtcagag

SEQ ID NO: 67124 - DNA, 769 bp, Homo sapiens
attttttggtgtgcatgatgagacttgtcaagtgattggatgtgaaaaagagaaaatagaccttacgagcttgagggcttctattgatggctgtattaagaagctacctgtccatcatttctgcacacagaggcctgagataaaatatgtccttaacttccttgaagtgcatgataagggggccctccgtggatatgtctgtgcaatcaaggtggagaaattctgctgtgcggtgtttgccaaagtgcctagttcctggcaggtgaaggacaaccgtgtgagacaattgcccacaagagaatggactgcttggatgatggaagctgacccagacctttccaggtgtcctgagatggttctccagttgagtttgtcatctgccacgccccgcagcaagcctgtgtgcattcataagaattcggaatgtctgaaagagcagcagaaacgctactttccagtattttcagacagagtggtatatactccagaaagcctctacaaggaactcttctcacaacataaaggactcagagacttaataaatacagaaatgcgccctttctctcaaggaatattgattttttctcaaagctgggctgtggatttaggtctgcaagagaagcagggagtcatctgtgatgctcttctaatttcccagaacaacacccctattctctacaccatcttcagcaagtgggatgcggggtgcaagggctattctatgatagttgcctattctttgaagcagaagctggtgaacaaaggcggc

SEQ ID NO: 67125 - DNA, 782 bp, Homo sapiens
gtgtgctggaattcgcaggtggcacacaaagctgagatattgtcacctttgggagcactgtattacaacactggccgatacgaagaggctttgcagatttaccaggaagctgcagcacttcagccttctcagagggagctccgcttggcactggctcaggttttggccgtgatgggtcagacaaaagaagctgaaaagatgaccaatcacattgtgtcagaggagaccggatgccttgaatgctatcgcctcttgtcagccatctatagcaagcaggagaaccacgacaaggcacttgatgctatagacaaggctctccagctgaaaccaaaggacccaaaagtcatttctgaactttttttcacaaaaggaaaccaattaagagagcagaaccttctcgacaaagcttttgagagctatagagtggctgtgcaactaaacccagaccaagcacaggcctggatgaacatgggtggcatccaacacatcaagggaaaatatgtgtctgcaagagcttattatgagagagccttacagctggttccagacagcaaactgctgaaggaaaatcttgccaaattggatcgcctagaaaaacgattacaagaagttcgagaaaaggatcaaacatagcaccaccgtctgacccaacctcatagtataatgtggtgcctctgaaaggggagtgatggaagccttgctttcacatcagcaggggcacaactaatgagattttctctcattccgagttcagggtgacacattttgggacatctgctggt

SEQ ID NO: 67126 - DNA, 875 bp, Homo sapiens
tcagaaacctcaccgatgtctgacttacctttaacatcagaaacttcttcagtgtcttccatgcttctcacctctgagaccacttttgtatccagtttgccacttccttcagaaacatctccaatttccaactcttccataaatgagagaatggcacatcagcaaagaaagtcaccttctgtatctgaagagccactctccccgcagaaagatgagtcttccgccactgccaaacctctgggagagaaccttacctcccagcagaagaatctgtctaatactcccgaacccatcataatgagttcttcttccattgctcctgaagcatttccgtctgaagatttgcacaataagaccctgagtcagcaaacctgtaaatcacatgttgacactgagaagccctaccctgcttcaattccagaacttgcttctactgaaatgataaaagttaaaaatcatagcgtcctgcaaagaacagaaaaaaaagtgttaccttcaccattggaattatctgtcttttctgaagggacagataataagggaaatgagcttccatctgctaaattacaggacaagcaatatatctcatcagtggataaggctccattttcagaaggctctagaaataaaacacataagcaagggagtacacagagtcggttagaaacctcacatacttccaagtcatcagagccctccaagtcacctgatgggataagaaatgaaagtagagattcagagatatcaaagagaaaaactgcagagcaacacagctttggaatctgtaaggaaaagagagctaggatagaagatgatcagtcaacccggaacatatcatctagcagcccacctgagaaagaacagcctcccagaga

SEQ ID NO: 67127 - DNA, 497 bp, Homo sapiens
atgtgcggtggcatttcccggctcgccactgcccttcacaggggcattctgccccagggagcttgtctatgcccctggtgcctgtctcctcacctgtgacagccccagcgccaatcactcctgccctgcaggcagtactgatggctgtgtctgtccaccaggcacggtgctgctggacgagcgctgtgtgcctcctgacctctgtccctgccgtcacagtgggcagtggtacctgcccaacgccaccatccaggaagactgcaacgtttgcgtgtgccggggccggcagtggcactgcacaggccagcggcgcagtgggcggtgccaggcatcaagcgccccccactatgtgacatttgacggactggccttcacctatcctggggcctgcgagtatctgctggtgcgagaggccagtggcctattcacagtctctgcccagaacctgccctgtgggggcagcggtctcacctgcaccaaagcgctttccgtgcgtt

SEQ ID NO: 67128 - DNA, 1808 bp, Homo sapiens
tgcagagaagaagaaaaaacaagaagaagagaaattggcccagttaaaggcccaagaggaggatcgtcagaaaagggaggcagaagaaaaggaggcacagcttgaaagaaaacgagaagagaagagactgaagaaaatgaaagaacttgagaagcagaagagaattaagaggaaccagcagctggaagcaatagccaaagaacattatgaaagggtcttgctaaggaaaaaaggtctagagccttggaagagattgagaatgcaaagcaaacaaaacatccaggtggcagaagaacattactctttgttcctgcagaggaaatacatgctgacgtggttccagcgtagtcaggaaagtctggctagaaagatggcccaggctgatcaattttattcccaaatactgcttaagagagtcatccagagctggctacagtacgtgattgatctgcaggaagaagtaagaaaattttgtgtacattttcttcaaaagaagattttcagggcctggtttaacatggtcagggaggtgaagatcgattctcagggcaagcatgagattgcagcggagcacagtgacaggaggatcctctggatcacccttcggacatggaagaagtttgtaaaatttatgaaagaggaaagagtaaaagaagaaaggcgacagcaacttcgtaggaaggtagttgaaattcttccagacttccaggtacctggaaggtaccacgagctatatcagcaatcagatacttggtccttgagtaagacaagtctggtgaacgaatgagccagattagtgtaatatttaggacaggaagctcgactagtctgtatgtgtgttatctccacccacccacacacatacatacatacacctggtttattctctacgagctacttcttagatcaaaggaattattttgagaatttttattcccttctttgacttttcctggattgctagtcattcactatagcatttatcacagtgggatcatccaaaggaacattctagagatcgtctgttcaaatatatcctatatatttttagcatagtaaactttaaaaaggacaagtgtttgcctgactgagcctgtgaagaaaatgtgtccgtatagcacgacaggagttgctgatgtgaccttaatgaaacagaaataaacaggggtgagtgctcggaaaggaagggcgggccaaggcactcagccttctagtgcagtagcgtcagtgacacgcaccccaccagacctcgtccactttcaccacccctgaaggcagaccatgtatgaaaaggttctctacacagctgctgcagaggacagcagcttatcctgatttcagagaaactgaggcaccagagatgcttctcttccgtgcaccttgataagcatgaaggacattccaaaaggtagtaactctatcatgacagtccagcaattcattaaattatctgttcatgctcccacctgcaactgctgaataatacactcagtgtgtcttctagtactcagctcagtttgatctagatattgagatacctatcttgaattcaaagaatgtcttcatctttaagatgctataaagactgataaaatgctctcttctatgaattgtgttagagaattacctgctagaaaaataatttttcattataaaatacacatttattatataacaaattcaagtagtccataaatgcatatggtaaaatgagaaagtcctgtgcagtcctgagatgattactcttatttggtgtgctgaaaatttgagttgacaaaataaaattctgtggttttttaagtgaaaaa

SEQ ID NO: 67129 - DNA, 1092 bp, Homo sapiens
agaaaaacaatcattgtgtgagtcgctgtaactcccttagctgcatattagcccaggaagaagaacagtatctacagagtggagaccagcaactgacccgacatgtgttgctgtgtttacttctcatcattggcctgttcgctaatctttccagttgtttatggtggctattcaaccaagagcctggaagactttatgttgagttacagtttttctgtgccgtgtttaactttggtcagggatttatttcctttggaatctttggattagataaacatttaatcatcctgcctttcaaaagaagacttgaattcctatggaacaataaagacacagcagaaaacagggattctcctgtttcagaggaaataaaaatgacctgtcaacaatttatccattatcaccgtgacctctgtatccgaaacattgtcaaagaaagaaggtgtggtgcaaagacttctgctggaactttctgtggctgtgacctggtgagctggctaattgaagtcggccttgcctccgaccgtggtgaagctgtgatatacggagacaggctggtacaagggggagtcatccaacatattaccaacgagtatgaattccgggatgagtacttgttttacagatttcttcaaaagagtcctgaacagagtcctcctgctattaatgcaaacactctccaacaggaaagatataaagaaattgagcattcatccccaccctcacattcccctaagacctaaattatgcaggggagaaccctacatggaatcatattctagccgcgtattcattagtttttagctgggtgaccttgggcaagttaacagaggcaacctctctgagcctcagttgtctcttctgtaaaatgtgaaaagatgtgctcccaccacatgcgcagggtctgtgattttacatgtatgtaaaacacataggaagctgacttaggaaaaagagaaaaccaaattaaagttctgataatgaatataatatagtcatcctttagtatccaaggggattggttccaggactcctgaagatcccaaaatctgaggatactcaagtcccttatataaaatggtgtaggccggg

SEQ ID NO: 67130 - DNA, 1773 bp, Homo sapiens
cccacgcgtacggccaggtgggagtgaagattgtgatgtgttggaggccacccagcccctggaacaggggttcctgcagcagctggaggagggccccagcagttctggacagcatcagccacagcaggaggaggaggaatcaaagccagaaccagagaggtctggcctcagttggagcaaccgggagaaggcaaagcaggcattcaaggaactgctgagggacaaggctgtcccctccaatgcctcatgggaacaggccatgaagatggtggtcaccgacccccgttacagtgccttgcctaaactgagtgagaaaaagcaggcattcaatgcctacaaggcgcagcgggagaaggaggagaaggaggaggcccggctaagggccaaagaggccaagcagaccctgcagcatttcctggagcagcatgaacgcatgacctccaccacccgctaccggcgggcagaacagacctttggggagctggaggtctgggctgtggtccctgagagggatcgaaaagaggtttatgatgatgtcctcttcttcctggccaagaaggagaaggaacaggccaagcagctccggcgccgcaatatccaggccctaaagagcatcctggatgggatgagtagtgtcaacttccaaaccacgtggtcccaggcccagcagtacctcatggataaccccagctttgctcaggaccatcagctgcagaacatggacaaggaagatgcactgatctgttttgaggagcacatccgagctttggagagggaagaggaggaggaacgggagcgggcccggcttcgggagcgacgccaacaacgcaagaatcgggaggccttccagaccttcctggacgagctgcatgagacagggcagctgcactctatgtccacctggatggagctatatccagcagtcagcactgatgtccgctttgccaacatgctgggccagccgggctccacccctctggacttattcaagttctatgtggaggagttgaaggcacgattccatgatgaaaagaagatcattaaggacatccttaaggaccggggcttctgcgtggaggtgaacacggcctttgaggacttcgcccacgtcataagctttgacaagagggctgccgcactggacgcaggcaacatcaagctgaccttcaatagtctgctggagaaagcagaggcacgggagagggagcgggagaaggaggaggcacgcaggatgcggcgcagggaagctgcctttcgaagcatgctgaggcaggctgtgcctgctctggagctaggcactgcctgggaagaggtccgtgagcgttttgtgtgtgactcagcctttgagcagatcaccctggagtcggagcggatccggctcttccgggagttcctacaggtgctggagactgaatgccagcacctccacaccaaaggccgaaagcatggcaggaaaggcaagaagcaccatcacaagcgttcccactcaccctcaggctctgagtcagaagaagaggagctgcccccaccatctctccggccccccaagcggaggaggcggaacccctcagagtcaggctctgagccctcttcctcacttgattcagttgaaagtgggggtgctgcccttggaggacggggctccccttcctcccatcttcttggagcagatcatggccttcggaaagccaagaaaccaaaaaagaaaactaagaagagaagacacaagtcgaatagtcctgagagtgagacagaccctgaggagaaagctgg

SEQ ID NO: 67131 - DNA, 1169 bp, Homo sapiens
  misc_feature (1)...(1169): n = a,t,c or g
tatgaggatactctgttcgtaagctcccggtgaattttgttccacagactcggaagaaaggttggataagagttcactggagattgacaagtactcgggatagtgaaaagccggagttggaacatggatagccgcttgcaggagatccgggagcggcagaagttacggcgacagctcctcgcgcagcagttgggagctgaaagtgccgacagcattggtgccgtgttaaatagcaaagatgagcagagagaaattgctgaaacaagagaaacttgcagggcttcctatgatacctctgctccaaatgcaaaacgtaagtatctggatgaaggagagacagatgaagacaaaatggaagaatataaggatgaactagaaatgcaacaggatgaagaaaatttgccatatgaagaagagatttacaaagattctagtacttttcttaagggaacacagagcttaaatccccataatgattactgccaacattttgtagacactggacatagacctcagaatttcatcagggatgtaggtttagctgacagatttgaagaatatcctaaactgagggagctcatcaggctaaaggatgagttaatagctaaatctaacactcctcccatgtacttacaagccgatatagaagcctttgacatcagagaactaacacccaaatttgatgtgattcttctggaaccccctttagaagaatattacagagaaactggcatcactgctaatgaaaaatgctggacttgggatgatgtatgatcaaactttctacattgtaatgaattatttattttcaaatgaatatgtttatttggtcagaaagtgagataataaatatcatccctacttttgtagggattataaatgtagatttatagtgtaaattatagctgaaggtccaaggtacattgactaatattacattatctttaatttgagccttcttttcaaggcaaaaattgagcagatagcaagtgaataggctgtagaagacttaaaattttggtcttagagtccttggctatatagttagagaagtttaaaaacagatggaatgattcataattcattctgcatttgattagtttcagtaaacatcagagcttgnttatgtatataaaaacatgatttctactctttaaacagcttacagt

SEQ ID NO: 67132 - DNA, 499 bp, Homo sapiens
aatgctcctttggtaagaacaattatatggctaaattaatctcagccacctagttctaaatgtagagcaaggattgcaagggattatttagacaagttcatcaattaagtaaaattagacatgaaggatataagaatgaatgataaagcaagctaaaaatggtgaaacaagggatgtctgattggaagtagaagatatttatttaggttctaggacattagtatcagtgaggacagtaatttcctgcttgtttgtatttcagtgatcacatacacttctttacctgataacgtctctcttctctaggctggttttggttacggcttgccaatttctcgtctgtatgccaagtactttcaaggagatctgaatctctactctttatcaggatatggaacagatgctatcatctacttaaaggtatcccttgaattcaatagcaaaatcctgtttctaaaaccattgctccttttatagccctgagtgctatggtccggag

SEQ ID NO: 67133 - DNA, 824 bp, Homo sapiens
ataataacagcacatcagacagggcagagaaattttgtgggcaaaaaaagaggaggcattcttttgagcatgtttctctgattccccctgaaacctctacagtgctaagcagtcttaaagaaaaacataaacacaaatgtaagcgcaggaatcatgattacctcagctatgacaagatgaaaaggcagaaacgaaaacggaaaaagaaatatccccagcttcgaaatagacaggatccagactttattgcagagctggaggaactaataagtcgcctaagtgaaattcggatcactcatcgaagtcatcattttatcccccgagatcttctgccaactatctttcgaatcaactttaatagtttctatacacatccttctttccccttagaccctttgcactacattcgaaaacctgacttaaaaaagaaaagagggagaccccctaagatgagggaggcaatggctgaaatgccttttatgcacagccttagttttcctctttctagtactggattctatccatcttatggcatgccttactctccttcaccccttacagctgctcccataggattaggttactatggaaggtatcctcccactctttatccacctcctccatctccttctttcaccacgccacttccacctccttcctatatgcatgctgggcatttacttcttcaatcctggccaaattaccattaaggaaaaaggcataaggtaactttcgacagggagggccttttctttaacaaccagcagggattcccctccttttcctggagtacctaaccccagtgtttcctcctgagatggccg

SEQ ID NO: 67134 - DNA, 692 bp, Homo sapiens
  misc_feature (1)...(692): n = a,t,c or g
ttttttgtgactctatttatctttgccctttttgaaaccatcattactccattaacaatggatatgtatgcctggactcaagaacaagctgtgttatataatggcataatacttgctgctcttggggttgaagccgttgttattttcttaggagttaagttgctttccaaaaagattggcgagcgtgctattctactgggaggactcatcgttgtatgggttggcttctttatcttgttaccttggggaaatcaatttcccaaaatacagtgggaagatttgcacaataattcaatccctaataccacatttggggaaattattattggtctttggaagtctccaatggaagatgacaatgaaagaccaactggttgctcgattgaacaagcctggtgcctctacaccccggtgattcatctggcccagttccttacatcagctgtgctaataggattaggctatccagtctgcaatcttatgtcctatactctatattcaaaaattctagggaccaaaacctcagggtgtatacatggggctggttaacagcatctgggaagtgggagcccggattcttggggcctatgttcattcaggccaagtgtatggntcactggggggaccacgatgggcattcagcctggtgtgtggaataatagtgctcaccatcaccctcctgggagtggata

SEQ ID NO: 67135 - DNA, 1108 bp, Homo sapiens
  misc_feature (1)...(1108): n = a,t,c or g
gcgcaatccgctctctatagcctcatcccctactcttccactttcccctctccttcctggctacactgatatccttgctgtttgaactccccaggcacaccttgcttcagggcttttgtggtactgtttctgctgcctggaatgtgcttccctgtacccactggactcacttcctcacgtcaatcacgtctttgaggagctgttttctcagagaggcctttgaccatcctatcttanatcattgtatttggccaggcgtggtggctcacgcctgtaatcccaacactttgggaggccgaggcagtggatcagttgaggccaggagtttgagagcagcctggtcaacatggtgaaaccctgtctctactaaaaatataaaaattagctgggcatggtggtgtgtgcctatagtcccagttacgcaggaggctgaggcatgagaatcacttgaacctgggaggtagaggttgcagtgaaccaagatgccaccactgcactccagcctgggcaacagagtgagaccatccctccccccacccaaaaaaaaatgctgtatttgccatcatggcacgcacattatctggcatgctacactttgtttgttgtttgtctttgctcacttgaatgtagcttgttcactgctgtatcctcagtatctttaatggggccttgcagaaagtagttcctcaaatatttgttatgtgagtctcatcttgtcatccaggtcaagagacaatcggacactgtctgaagaaacggtcaaaacaatatgctgtatttcagaattatatcctgaaattatattccgaaaggagttagtcagcatgtgtgggtgacattagggagtgttttctggagggaagggcaggtgcaggaagggtaggatgagggccaggtgaggatagggtggactcaggccttgttctcttccgtaggtctttactcacctggagacctgtggcccactccgccagtgtgtgtgacaagcagcttaaactgcaccctggagaacggcgtgccttgtgtgattcaggagtcggccccggctcataatagtttcattgattggagtgcaacatgcgaaggccagttttccagcgcatactgt

SEQ ID NO: 67136 - DNA, 935 bp, Homo sapiens
gaacatttaaaatagatattcccccagttcttctgggctacagtaaggagcgaaatatgattcttgagcggggttttgattctgtccgaagcttaagtgaaggctcctacattaccctctttattaccattgagccccagctggttcctggagagtccattcgagaaaagtttgagtctcaggaagatgagaaattacttcaagcaactgagaagtttcaagctgaatgtgccttaaagtttccaaatcgtcagtgccttacaacagtaattgatataagcggaaaaactgtttttatcacacgttatctcaaacctttaaaccctcctcaggagctccttaatgtctaccccaataatctacaggcaactgcagaactggtggctcgatatgtgtccttgattcccttcttgcctgacactgtctcatttggtggtatctgtgacctctggagcacatctgatcaatttcttgatctcctggcaggggatgaagaagaacatgcagtactattgtgtaattactttctgtctctgggtaagaaggcctggctgttgatgggcaatgctattcctgaggtaagaccacataggctgcctttaacagaggagtatagttgtctaatcgagttgtgtgttccagatcacacacaggacatattttcataacgatcctttgggttgctaggaaagtggcccacagatgccgtaacgggcagagagaactaccagtgataagacatgaaatggttttcagtggtcctcagggccccatgcaacacttcagattattttttggcaaacccgaaccctttaccatccaaagcccccacctagctctgtccttttagtatgggcctcttcccagccatgttcccaagaattcagattcccttaatgatgtggtagtcttcatgctttgcaatgaagaggatc

SEQ ID NO: 67137 - DNA, 860 bp, Homo sapiens
tgcgaccaccaggatccgactcagtgggggccgcagccaacatgaggggcgagtcgaggtgcaaatagggggacctgggccccttcgctggggcctcatctgtggggatgactgggggaccctggaggccatggtggcctgtaggcaactgggtctgggctacgccaaccacggcctgcaggagacctggtactgggactctgggaatataacagaggtggtgatgagtggagtgcgctgcacagggactgagctgtccctggatcagtgtgcccatcatggcacccacatcacctgcaagaggacagggacccgcttcactgctggagtcatctgttctgagactgcatcagatctgttgctgcactcagcactggtgcaggagaccgcctacatcgaagaccggcccctgcatatgttgtactgtgctgcggaagagaactgcctggccagctcagcccgctcagccaactggccctatggtcaccggcgtctgctccgattctcctcccagatccacaacctgggacgagctgacttcaggcccaaggctgggcgccactcctgggtgtggcacgagtgccatgggcattaccacagcatggacttcttcactcactatgatatcctcaccccaaatggcaccaaggtggctgagggccacaaagctagtttctgtctcgaagacactgagtgtcaggaggatgtctccaagcggtatgagtgtgccaactttggagagcaaggcatcactgtgggttgctgggatctctaccggcatgacattgactgtcagtggattgacatcacggatgtgaagccaggaaactacattctgcatggtgtcatcaacccaactt

SEQ ID NO: 67138 - DNA, 456 bp, Homo sapiens
gggtttttgccgccgcggccatggctttttcccccgacaccgcggttttttgccccactctccgcggttttttgcaccccccccaccccccgccgccgaggctttttgccgccttgggttttttgcggctttttgcccccgccgcggctttttgcgcccgccgccgcgggttttgctgacgcggctttttaaccccccgccgcggctttttgcgcctacccccgcgggtttttgctccctgccgccgtggctttttgcccctgccgctgcggctttttcccccgggcgtggctttttgcccccgccgctgaggctttttgccgctgcggctttttgcccccgccgccgctgctttttgcggcttttcccccccgccgccgcggctttttgcggctatttgacctcgccaccgcggctttatgcccctccaccgtagctttttcccccgacgccgtg

SEQ ID NO: 67139 - DNA, 682 bp, Homo sapiens
cccacgcgttcgtggacaagtatttgtttctgaagctctctatggacccaagttgagccaccttaacaatgtattggtgtttgctccatcaccctcaagccagtgtaataagccctgggaaggtcaactgggagaatgtgcgcagtggcttaagtggactggcgaggaggttggtgatgcagctggggaaataatcactgcctctcaacatggggaaatggtatttgtgagtggggaagccgtgtctgcttattcttcagcaatgagactgaaaagtgtatatcgtgctttgcttctcttaaattcccaaactctgctagttgttgatcatattgagaggcaagaagattccccaataaattctgtcagtgccttctttcataatttggatattgattttaaatatatcccatataagtttatgaataggtataatggtgccatgatggatgtgtgggatgcacattacaaaatgttttggtttgatcatcatggcaatagtcccatggccagtatacaggaagcagagcaagctgctgaatttaaaaaacgatggactcaatttgttaatgttacttttcagatggaatccacaatcacaagaattgcatatgtcttttatgggccatatatcaatgtctccagctgcagatttattgatagttccaatcctggacttcag

SEQ ID NO: 67140 - DNA, 518 bp, Homo sapiens
caggtcctcaggtccctcacctgcttctcgggatcctggaagctccagtcgaccagggaggggctgcatctgggtgtagacagagctgatgacaggcgtgagttctgagatgcaattggtgggtggaaggcggaggggacgcagatgctctgcacccacaaaggccagggaacttccaaagccaggctctaggctgtggtgtgccaccaactccacatccttttcatagccacccgagttcacatcataggggaggtctgagaggctgaagcgcatctgcttttcgcctacaaacttctggggtgtggaacgcttgcgtttggtgaggctattggccagacgatcgatgaaagttggccgctcagaggatgagtgcagcatggagtctggcaccatctccaggtcacgtatttcgtcacctggttggccagccaaagcttgggcttcagtgctgagactctgtaggtagttatggcaccgctccttgtgctcctccagggtactctgctggttgtagg

SEQ ID NO: 67141 - DNA, 491 bp, Homo sapiens
ttcccgggtcgacgatttcgtggcgtatccaagctgcagcttcttccctctctgcatcttcctcctccccatcccaggtccagggaaaaccatgacaggtcaggggaggcgggggcagggctgtcaataggacaacttgtcccaggggagtcaccggaggtcaaggccaaagacagagtggggaacaaacaggcaagatggccaggagtgtccagagctcctcaccctgcacgttgacctcatggatggtcttgggactggccctgccaaacacgtctaccagcccagccgtgtggatgaccacatgggctccggccacagctgctgccacctcatgggcctgggtcacgtccccctggatggcagtcaccctcacaggccctggccggggttggaggacacaggccatgtcagagctggggccagaggccagaggctgggttcatcttccaccctggagtcacgttcccaatgtgactcactcgacccat

SEQ ID NO: 67142 - DNA, 436 bp, Homo sapiens
tttcgtgggaggaggaggaggccccgtcgcggttcttcgccgtcgccaacggggctgtccctgtagctcccgatggagtttttagggccagctatgcaagaagaggccttgaagctggtgttactggcattagaagatggttctgccctctcaaggaaagttctggtactttttgttgtgcagagactagaaccaagatttcctcaggcatcaaaaacaagtattggtcatgttgtgcaactactgtatcgagcttcttgttttaaggttaccaaaagagatgaagactcttccctaatgcagctgaaggaggaatttcggagttatgaagcattacgcagagaacatgatgcccaaattgttcatattgccatggaagcaggactccgtatttcacctgaacagtggtcctctcttttgtatggtgatttggctt

SEQ ID NO: 67143 - DNA, 471 bp, Homo sapiens
tttcgtgcgagagtctgggcaccgtccccgagcacgagcggatcttgcaggagatcgagagcaccgacaccgcctgtgtggggcccaccctccggtctgtgtatgatgaccaaccaaatgcgcacaagaagtttatggaaaagttagatgcttgtatccgtaatcatgacaaggaaattgaaaagatgtgtaattttcatcatcagggttttgtagatgctattacagaactccttaaagtaaggactgatgcggaaaaactgaaggtgcaagttactgataccaaccgaaggtttcaagatgctggaaaagaggtgatagtccacacagaagatatcattcgatgtagaattcagcagagaaatattacaactgtagtagaaaaattgcagttatgccttcctgtgctagaaatgtacagtaagctgaaagaacagatgagtgccaaaaggtgagttggtttttttccta

SEQ ID NO: 67144 - DNA, 474 bp, Homo sapiens
tttcgtctagaagccggctgtcggtctccgtgtcgccgccgccgcccggcatcgtggagctggggcccccttttgcctgggagttttgtagtcgcctagggtcagcggtgacatcccaaagggcaggcccggcagccgccatggtggccaaggattaccccttctacctcacggtcaagagagcgaactgcagcctggagctacctccggccagcggtccggccaaggacgctgaggagcctagtaataaacgggtcaaacccctttcccgagtcacgtcgctagcaaacctcatcccgcccgtgaaggccacgccattaaagcgcttcagtcaaaccctgcagcgctccattagcttccgcagtgagagccgccctgacatcctcgccccccgaccctggtccagaaatgccgccccctcgagcacgaaacggagagatagcaagctgtggagtgagaccttcgatgtgtgcg

SEQ ID NO: 67145 - DNA, 754 bp, Homo sapiens
cccgggtcgacgatttcgtgcgcaaatggcgttgagatggttcagggccctgttcaaactccagcactgaccattcaccggcggaagcggcggcgcaggaggcggcggcggcccagcgggggcacacagcaggctctgttaccagctccagcagtggcggccaaagcacccgccaggctccgaggagaatatgaaactggggtcaaaatgacatccagatttgggaaaacatacagtaggaaaggtggaaatggcagttcaaaattcgatgaagtcttttccaacaaacggactacccttagcacaaaatggggagagaccacatttatggctaaattagggcagaagaggcccaatttcaaaccagatatccaagaaattccgaagaaacctaaagtggaagaagaaagtactggagatccttttggatttgatagtgatgatgagtctctaccagtttcttcaaagaatttagcccaggttaagtgttcctcttattcagaatctagtgaagctgctcagttggaagaggtcacttcagtacttgaagctaatagcaaaattagtcatgtggtcattgaagacactgtcgtttctgataaatgcttccctttggaggacactttacttgggaaagaaaagagcacaaaccgaattgtagaagatgatgcaagcataagtagctgtaataaattaataacttcaggtaagttttgattttctttattctccgccaagagagctttgtgcaacc

SEQ ID NO: 67146 - DNA, 621 bp, Homo sapiens
tttcgtgactgtagtcagcccttagtggatgagagcgcctatgcttcagaaacagcaggctcccaggatggacaccccgccccctgaagaacgcttagagaagcaaaatgaaaaactgaacaaccaggaagaggagacggagtttaaggaactggacggtctgagggaagccttggcaaacctccggggactgtcagaggaggagaggagcgagaaggctatgcttcgctcccgcattgaagagcagtcccagctcatctgcatcctgaagcggaggtcagatgaggccctggagcgctgccagatcctagagctgctcaatgcagagctggaggagaagatgatgcaggaggctgagaagctcaaggcccagggtgagtacagtcggaaactagaggaacgctttatgaccctagcagccaaccacgagttgatgctccgcttcaaggatgaatacaagagtgagaacatcaagctgagggaggagaatgagaagctgaggctggagaataacagcctcttcagccaggctctgaaggatgaggaggcgaaagtattacagctcacagtccggtgtgaggccctcactggggagctagaaacgctgaaggagaggtgtgc

SEQ ID NO: 67147 - DNA, 863 bp, Homo sapiens
aagaaacctttaaaatgtaatgactgtggtaaaacctttagtcgaagcttctctcttaaacttcatcagaacattcatacgggagagaagccttttgaatgcagtaattgtagaaaagctttcagacagatctcatccatcctacttcatcagagaattcacagtggaaagaaaagccatgaatgcaataaatgtggggaaagcttcaatcaaagaacaacccttattctacatatgagaattcatgatggaaaggaaattcttgactgtgggaaggccttgagtcaatgtcagtctttcaatatacatcagaaaattcatgttgttgggaatgtctgccagtgcagaaagtgcggaagagccttcaatcagatgtcatcccttttacttcataagaaaattcacaatggaaagaaaacacataaatataataaatgtgggagaggcttcaaaaagaaatcagtctttgttgtacataaaagaattcatgctggagagaaaatccctgaaaatgcgaaggccttaagtcagagtctacagcaaagaagtcaccatttagagaatccttttaaatgcagaaaatgtgggaaattatttaataggatttcacccctgatgcttcaccagagaattcacacttcagagaaaccgtacaaatgtgataaatgtgacaagttcttcaggcggctttcaacccttattctgcatctaagaattcataatggagaaaaactatacagatgccataaatgtgagaaggtctgcaatcggcattcatcccttattcaacatcagaaagttcataccaagaaaaagaaactatttgagtgtaaggaatgtgggaagatgttttctggaactgc

SEQ ID NO: 67148 - DNA, 702 bp, Homo sapiens
gtgccgcgtgtgctgcagcctgggcagcttctatgcccaggtcaaggactacgagaaagccctgttcttcccctgcaaggcggcagagcttgtcaacaactatggcaaaggctggagcctgaagtaccgggccatgagccagtaccacatggccgtggcctatcgcctgctgggccgcctgggcagtgccatggagtgttgtgaggagtctatgaagatcgcgctgcagcacggggaccggccactgcaggcgctctgcctgctctgcttcgctgacatccaccggagccgtggggacctgcagacagccttccccaggtacgactccgccatgagcatcatgaccgagatcggaaaccgcctggggcaggtgcaggcgctgctgggtgtggccaagtgctgggtggccaggaaggcgctggacaaggtgaggtcgggcctttcccacagcctccagccctcccagcactccccacttggggccagtaggttagccggctctttcagccactttgtctgacgtcagcctcaccctgatcctacgaggccaggacattcctggtcattttccaggctcagagaaggcccatcacttgccctaggacccacagctagtaaagggctggaaccctgggtaaactgaggcaggaggtcacttgcccacacagcccctatgactgtgccctagtctcttcctgctgc

SEQ ID NO: 67149 - DNA, 397 bp, Homo sapiens
ctgatcgctgctgccctgctctcctcctcctctcattcctctgcctcctggattcctgaagtttaggagaaataaggtagccaagggaaccacatggaagttgtgacagctcccagcggcgcgcccctttcgtgtgtgccggtacctcggcttaggagttgcccgctgacaccttgaatgaaggaggtccccttgccagccagcctgccgggatgggccattgctgctgcaagccttataactgccttcagtgcctggacaagacgaatgaaagtgcccttgtgaaagaaaaagagctgtcaatcgaacttgcaaacatcagggatgaagttgccttccatacagcaaagtgcgagaaactacaaaaggagaaggaggagctggagaggcggttcgg

SEQ ID NO: 67150 - DNA, 1283 bp, Homo sapiens
aacgagtttacccgccgcaagcatcttgaactgacagccacgatgcaggttgaagaagccaccggtcaggctgcgggccgtcgtcggggaaacgtggtgcgaagggtgtttggccgcatccggcgctttttcagtcgcaggcggaatgagcccaccttgccccgggagttcactcgccgtgggcgtcgaggtgcagtgtctgtggatagtctggctgagctggaagacggagccctgctgctgcagaccctgcagctttcaaaaatttcctttccaattggccaacgacttctgggatccaaaaggaagatgagtctcaatccgattgcgaaacaaatcccccaggttgttgaggcttgctgccaattcattgaaaaacatggcttaagcgcagtggggatttttacccttgaatactccgtgcagcgagtgcgtcagctccgtgaagaatttgatcaaggtctggatgtagtgctggatgacaatcagaatgtgcatgatgtggctgcactcctcaaggagtttttccgtgacatgaaggattctctgctgccagatgatctgtacatgtcattcctcctgacagcaactttaaagccccaggatcagctttctgccctgcagttgctggtctacctgatgccaccctgccacagtgataccctggagcgtctgctgaaggccctgcataaaatcactgagaactgcgaggactcaattggcattgatggacagttggtcccaggcaaccgtatgacttccactaacttggccttggtgtttggatctgctctcctgaaaaaaggaaagtttggcaagagagagtccaggaaaacaaagctggggattgatcactatgttgcttctgtcaatgtggtccgtgccatgattgataactgggatgtcctcttccaggtgcctccccatattcagaggcaggttgctaagcgcgtgtggaagtccagcccggaagcacttgattttatcagacgcaggaacttgaggaagatccagagtgcacgcataaagatggaagaggatgcactactttctgatccagtggaaacctctgctgaagcccgggctgctgtccttgctcaaagcaagccttctgatgaaggttcctctgaggagccagctgtgccttccggcactgcccgttcccatgacgatgaggaaggagcgggtaaccctcccattccggagcaagaccgcccattgctccgtgtgccccgggagaaggaggccaaaactggcgtcagctacttctttccttagatgtt

SEQ ID NO: 67151 - DNA, 914 bp, Homo sapiens
gcgatgtccctgctcactatcctctccacggggctgggcctgtcgggggccgagtcctgcagagccttgctcatctgcagagcgctccacacctgagagttgaggctcgcacactgcaggggcgtctctccttccttgttctttaaggggacatctgaatcccgagaaagaaagaggacgacacagtcgtagcggttctcccgggcggcaatgtgcagtggcgagtctccgtggatgttcacggcgtggaggtcgcacttggcagccagcaggatctcggctatgtccacgcagccggagaacgccgcccagtgcaggcaaatgttctcctcgttgtctcggatgttgatgtcagagcccttggacagcagcagcttcacgaggtccacgtgcttgtactctgtggcccagatcatgggtgtccagcctccgtcatcctgacagttgacgtccatctgtccatttgaaagcaggtactggaccacttcgtagtggcctttcttggcagccaggtgcaaacacgtagagccctctgcgtccttgggatccaccagggccccagccttgatgaggtacttcactgcttccagatggttgttttcggctgcttccatcaacggggtcctctggtcttctgagcaggtgtcaatattagcgcccgcctgaaccagcatgtggcagatgtccacgtgtccagcctctgccgcggcgtgcagtggagagcgcttattctggtgctccattttgaagttggggtcaattccgtccaccagcatgaggagcaccttctgaagctccccttgcctggcggagaagtacagctgctttgggtggaagcgaagcttcttgggtttttccgagtcgagggcgatgagagcgctctccaaggtttccttccctggtccctagaaagg

SEQ ID NO: 67152 - DNA, 484 bp, Homo sapiens
aagggatcttgctattggcctccggctgaaattgggggattggtttagagtactccagctgctgaaaactggatctggtgatgcagatgacagtctcctggaacaagccaacaatgccattggagactactttgctgatcgacaaaagtggttgaatgctgtacaatattatgtacaaggacggaaccaggaacgcttagctgaatgttactatatgttagaggattatgaggggttagagaaccttgccatttcacttccagaaaaccacaagttacttccagaaatagcacaaatgtttgtcagagttggaatgtgtgaacaagcagtgactgcatttttgaaatgtagtcaaccaaaggcagcagtagatacctgcgtacatctcaaccaatggaacaaagctgttgaattggctaaaaatcatagtatgaaagaaattggatctctgttagctaggtatgcatctcatttactggaaaag

SEQ ID NO: 67153 - DNA, 467 bp, Homo sapiens
cacccctctgagctcccgctcctggctctgtagctgagagaagccctggcaggtcagtggcaggcactgtcacgctgagtcctatgctggcagcggggaaccttggggagaacacgggacaccgcggaagccgggaaatggaatgaaatgggaagacacaaacattgaagatcagcacagaaatcccaggaggagcctaagatgtcatatcatagagagatttagtgaaagtcgccagccagatagtactgtgaatgaaaaacctcctggagtagatccatgtaaaagcagtgtgtgtggagaaatcatgggttgttcattccttaattgctatatcacatttgatgctggacacaaaccagatgagtgtcaggaatatggagagaagccacatacacataaacaatgtgggacagccttcaattatcaccactcctttcaaacacaggaaagacctcacactggaa

SEQ ID NO: 67154 - DNA, 414 bp, Homo sapiens
agatccgggtgcgagccacgcgtccgtgcaggtgcaggtactgaaagagcaactttttgctgggcgtatgccttcacccttccgctcctgcgcactcatgggaatgtgtggcagtagaagcgctgataacttgtcatgcccttctccattgaatgtaatggaaccagtaagcttctttcctcttaaatcactggggaagggaatgatacaacatttcagacacatagtttccctagtttagatgaaatatatgtttattttaaatacataatttgataaattattgttgattggaagtgactttcacctttgaaagtccattgctgtctgaagccactagaaagccacctgaattgcaatagtgatttatctttctgactaaaggaggtaatgcaccataaaaacatgtacagt

SEQ ID NO: 67155 - DNA, 419 bp, Homo sapiens
ttaatcctgactgggagaagaaagtaattgagtattttaaggaaaagctgaaggaaaataatgctcctaagtgggtaccatcactgaacgaagttccccttcattatttgaaacctaatagttttgtgaaatttcgttgcatgattcaggatatgtttgaccctgagttttacatgggagtttatgaaacggttaaccaaaacacaaaagcacatgttcttcattttggaaaatatagagatgtagcagagtgtgggcctcaacaagaacttgatttaaactctccacgaaataccactttggaaagacagactttctattgtgttccggtgcctggggaatctacgtgggtaaaagaagcctatgttaatgcaaaccaagctcgagtcagtccctcaacatctacactcctagtcgcc

SEQ ID NO: 67156 - DNA, 741 bp, Homo sapiens
atgctgctggcttaaagaaagaatgaaatatgaatagacaaaaacaaagaagggcgtaaaagaaaaggcgacagatcagtcagtgaaagcatttgctgaacactgtcctgagcttcaatatgtaggcttcatgggttgttcagtcacttctaaaggagttattcacctaaccaagctaagaaacctttccagcttggacctacgtcatatcactgaactggataatgaaaccgcgatggaaattgtcaagaggtgcaaaaatcttatctctctcaatctctgtctgaactggatcataaatgacaggtgtgtggaggtcattgcaaaggaaggacaaaacctgaaagagctatatttggtgtcctgtaaaatcacagattatgcactgatagccattgggcgatacagcatgacaatagagactgtggatgtcggatggtgtaaagaaatcacagaccaaggagccaccctgattgcacagagcagcaagtctctgagatatttggggctgatgagatgtgataaagtcaacgaagtgacggtggaacagctggtgcagcagtacccccacatcaccttcagcaccgtcctgcaggactgcaagaggaccttggagagagcctatcagatgggctggacccccaacatgtctgccgcctcctcctagcgctcctgcctcgcctagtccactgggatcattcagcagagcagaggagaattgtacatttggggagctgatct

SEQ ID NO: 67157 - DNA, 471 bp, Homo sapiens
aaagtttttagtcatagctatcaacttactctgcatcagagatttcatactggtgagaaaccctatgaatgtcaagaatgtgggaagacctttactctttacccacaacttaatcgacatcagaaaattcacactggtaaaaaaccctatatgtgtaagaaatgtgataagggtttttttagtagattagaacttactcaacataaaagaattcatactggtaagaaatcttatgaatgtaaagaatgtggaaaagtttttcaacttattttctactttaaagaacatgagagaattcatacaggtaagaaaccctatgaatgtaaggagtgtgggaaagcttttagtgtatgcggacaacttacccgtcatcagaaaattcatactggtgtaaaaccctacgaatgtaaggaatgtggaaagacctttagacttagtttttaccttactgaacacagaagaactcatgcg

SEQ ID NO: 67158 - DNA, 395 bp, Homo sapiens
tcgggtttctcatctgcacatgccgtccgcatgacactggacaagatgccatctgtccattcattggtgctgaggtcatattccccatacagttcccctagggacaatgccttggggttcaaagggaactctctaacaatgttgaagttagggtctccggcgcggcacagagaggacagggaggcctgtagaatgcgccatgaggcagtcttgccgctgcccgtgcagcccacgatcatggtggagtggcgggagttcttggtttcatacaactggaaaaccttggtgaggggttgttatcattttggtatactgtttgaccagattcagtctcaataaaaggagcattaacaaaacttcaaaacttctatggcacatctaaatttaaatatgag

SEQ ID NO: 67159 - DNA, 766 bp, Homo sapiens
ctctcgcctgagaagccttgatataaggtgtattcgcagcttaaatggttgtagagttactgatgaaattttgcatttagtgccaaataaagaaacttttagactcaccctaagagctgtcaaattatgggcaaaacgacgtggtatttattccaacatgctaggattccttggtggtgtctcctgggcaatgctagttgcaagaacttgccaattgtatccaaatgcagcagcatctactttagttcataagttctttttagttttttccaagtgggaatggccaaatcctgtgctgctgaagcaaccagaagaaagcaatttgaatttgcctgtctgggatcctcgggtaaatccatcagataggtatcatctcatgcccataatcacccctgcctacccacaacagaattctacgtataatgtgtccacatcaactcgaacagtaatggtagaagaatttaaacaaggtcttgcagtcacagatgaaattcttcaaggaaagtcagattggtccaaactacttgagccaccgaatttctttcaaaagtatagacattatatagtattgactgccagcgcatcaacagaagaaaaccatctagagtgggttggattagtagaatctaaaatccgtgtacttgttggaaacttggaacggaatgaatttattactcttgcccatgtgaatccccagtcattcccagggaataaggaacatcataaagacaacaattacgtatcaatgtggtccttgggatatttt

SEQ ID NO: 67160 - DNA, 1518 bp, Homo sapiens
  misc_feature (1)...(1518): n = a,t,c or g
cttctggacctaggactttgaacatgtcgcgcctgaagcggatagcggggcaggatctccgcgctggtttcaaagcaggtggaagagactgcggtacctcggtaccccaagggctgttgaaggcagcgaggaagagcggccagttaaacctgtcgggtagaaacctcagtgaagtgccgcagtgtgtctggagaataaatgtggatatccctgaggaagctaatcagaatctttcgtttggtgctactgaaagatggtgggagcagacagatttgaccaaactaataatatcaaacaataaacttcagtcacttacagatgacctgcgactcttgcctgcactgactgttcttgatatacatgataatcagttgacatcccttccttctgctataagagagctagaaaatcttcagaaacttaatgtcagccataataaactgaaaatactccctgaagaaattacaaacctaagaaacctgaagtgcctgtatctccagcataatgaattaacctgcatatcagagggatttgaacaactttccaatttagaagatttagatctttcaaacaatcatcttacaactnttcctgctagattatcttctctgtccagtctggtgcgactcaatctttctagtaatgaactgaagagtttgccagcagaaataaatagaatgaaaaggttgaagcatttggattgtaattcaaatctcttggaaactatacctcctgaattggctggcatggaatcactagaattgctttatttgcggaggaataaattacgttttctaccagaatttccttcttgtagtctattgaaggaattgcacgtaggtgaaaaccagattgaaatgttagaggcagaacatcttaaacatctgaattcaattcttgtgctagacctgagggataacaagttaaaatctgttccagatgaaattatactactacggtccttggaaaggcttgacctaagcaacaatgatattagtagtcttccctattcattggggaaccttcatttgaaatttttggcattagaaggaaatcctttgagaacaattcgaagagaaattataagtaaaggaacacaagaagtcctaaaatatctacgaagcaagatcaaagatgatggacctagccaaagtgagtctgctactgagactgccatgacactaccaagtgaatccagagtcaatatacatgccatcattacattaaaaatattagactataggtatgtaatttattattatttttatttttatagagatagggtcttactgtgttgcccaggctggtcttgagcttcttgggctcaagccatcctcctgctttggcctctcaaagtgctaggattataggcttgagctaccatgcttggcctaatttatttttttttaaaacattaccaaacacataggaaacttttcagaaagaaacccttcagtaaaaaggacaattgatgaggaaaaattcatcagagtacttgacttagagtaataataattg

SEQ ID NO: 67161 - DNA, 376 bp, Homo sapiens
tggacagatcagatcatccagacaaaattaacgaagaaacatcaaacttaatctgcactgtagaccaaatggatttaatagatatttctagaacatttcatctgatggctgcagaatttacattgttctctttagcacatggatcgtcctcaaggttagaccatatgttaggccacaaaataagtcattaaaaattgaaaccttgatactagaagcagacaccgacacgtcaaagaaagaatactacaggccaatgtctctgatgaatattgatgcagatatcctcaacaaaatactagcaaaccagattcagcaatacgttataaagatcgttcattgtgatgaagtggggtttatccctggggtacaaggatgg

SEQ ID NO: 67162 - DNA, 394 bp, Homo sapiens
cgcctgtttcctcagagccactttttcctttgtgttgtctggtcgttcactactttgagggaaaagaattttgccgttcgcgttcgattgactccgtccccaagatcctgtagccccacggacctggcgactccaccgtgttcgggtctttctaggaacccaatctgccttcatgaagaaaagacagaggcagaaaggaagatggcttactgcctgacaaattgttatcagtactccgtgacctttgaggatacagctgtggacttcacccaggaggagtggattttactggacccagttcagagaaacttatacagagatgtgatgctggagaattatgagaacgtggccaaagtaggatttcagctctttaaacccagtgtcatctcttggg

SEQ ID NO: 67163 - DNA, 473 bp, Homo sapiens
aacgggaaatggcggaaccgggcggcgcggcgggccggtaagccgggccgaggggcagcgggtcttggagtcgccaggccgcgctctccgttcaccgctccaggtcccatccggaagatggatcggcttctgagggagagaaggaagggaataatgaaagccacatggtgtcaccaccagagaaggatgatggccagaaaggtgaagaagctgtcggtagcacagagcatcctgaggaagtcacaacccaagcggaagctgcaattgaagagggggaggtcgagacagaaggggaagcaccagtggaaggggaagaggaggctgtgtcctatggagatgctgaaagcgaagaggaatattactatacagaaacttcatccccggaagggcaaatcagtgctgcagatacgacttacccgtatttcagtcctcctcaggaactgcctggagaggaggcatacgatagtgttagc

SEQ ID NO: 67164 - DNA, 784 bp, Homo sapiens
cccatgggctgtgttacatagagacagcagaacttgatggcgagaccaacatgaaagtacgtcaggcgattccagtcacctcagaattgggagacatcagtaagcttgccaagtttgacggtgaagtgatctgtgaacctcccaacaacaaactggacaaattcagcggaaccctctactggaaggaaaataagttccctctgagcaaccagaacatgctgctgcggggctgtgtgctgcgaaacaccgagtggtgcttcgggctggtcatctttgcaggtcccgacactaagctgatgcaaaacagcggcagaacaaagttcaaaagaacgagtatcgatcgcctaatgaataccctggtgctctggatttttggattcctggtttgcatgggggtgatcctggccattggcaatgccatctgggagcacgaggtggggatgcgtttccaggtctacctgccgtgggatgaggcagtggacagtgccttcttctctggcttcctctccttctggtcctacatcatcatcctcaacaccgttgtgcccatttcactctatgtcaggtatgtgccttctctgacctggggtctctccagggagtcaggcggtcccatagaacttttcttttctatgaagatgaagtccttgagaagtaacgagaagtcctcttcttcctgtactgtaaacatttgatgttatctgtttatctttgtgggcagagcaaactttttaccacagtttcctggtacttgggactgtattagagaaaaaaaaaaaaaagg

SEQ ID NO: 67165 - DNA, 1164 bp, Homo sapiens
agcaagtctgaagttttacaggaatctattagaaaacaaagtgtcaattatttcaagaattaccatagaacacggctcgatgaactgagaatgttcttagagaatgagacttgggaactttgtcctgttaagtcaaatttcagcatcttgcaacttcatgaatttaaattcatggaacagtctcgctccccatcagtttcacctagtaaacagccagtctcaacttcttcaaaaacagtgaccttgtttgagcagtactgtagtggtgggaatccatttgaaattcaggccaaccacaaagatgaagaaacagaagatgtcttagcttctaatgggtatgaatctgatgaacaagaaaagagtgcctatcaagagtatgacagtgacagtgatgttcctgaggaactcaaacgagactatgtggatgagcagacaggagatggtcctgtgaaaagtgtttctcgggaaactctaaaaagcaggaagaaatcagattacagtctaaataaagtgaatgcacctatcttaacaaatacaacattgaacgtcataagacttgttggaaaatatatgcagatgatgaacattcttaagccaattgcctttgatgttattcatttcatgtctcaactatttgattattacttgtatgcaatatataccttttttggtcggaatgattcattggaatcaactggactcggccttagtagtagtagactaagaacaactctaaacagaatacaagaaagccttattgatctagaagtttcagctgatcctactgccacactcacagcagcagaagaaagaaaggagaaggtgccaagtccacacctcagtcacctagtggttttgacatctggggatacgctgtatgggttggcagaaagagtggtagccacggaatccttggtattcttggctgaacagtttgagttccttcagccacatctggatgctgtgatgcctgcagtcaaaaagccctttcttcagcagttctattctcagacagtctcaaccgccagtggaactacggaaaccaatttactgggattgtaggctgggtaaagccctttgattatggaacagatggcttgcttctgcatgggctaatggtggaaatggggatggtaaaaggaattattgttcacagcacaacat

SEQ ID NO: 67166 - DNA, 681 bp, Homo sapiens
attatttagctttcaacatttattctttattttgttcccccaaacctacctgtctctctctctcctctttctttggttccctaatttaatgttaccaacaactcatggatattaatttcaattagtttgaatgctatttgatactctggtctttgagagaaggcctacataagtcaagccactcctgccggcagcctggcagctgtgttttactgatgtcttttagagacagacatcctgtgtgtgactaaatgtccaaaggggatctatagttaactctatttttaaaagttactgaggtacttcatcataaaaacaacaataaaaatacttcttttaggctgtttttttaggttaagtctacctaaaaaatgatgggtccaggttgatttgtttgttggttttgtgcacacagatattgtacaaagagaacttgagcaaggggactcccctacctgtcactcctgagatggagcgagtcaaactcaatcaagaaaactttagctcggtatttgggagaaagctctttaactccatattaaaaaataataatttctacaaaacagaacatctcactgttcatccctttataataatcaatttaacaaaatctttttttaatcacatcaactgaatccttctgttttccagatctcctactcaccatttgattctaacaaa

SEQ ID NO: 67167 - DNA, 756 bp, Homo sapiens
gtatatgtgctattgagtggtatcaacccattcctggttgaaactaaccaacagatcattgagaatatcatgaatgctgaatatactttcgatgaggaagcattcaaagagattagcattgaagccatggattttgatgaccggttgttagtgaaagagaggaaatctcgcatgacagcatcggaggctctccagcacccatggttgaagcataagatagaaagagtcagtactaaaggtatcagaacattaaaacaccggcgttattaccacaccctgatcaagaaagacctcaacatggttgtgtcagcagcccggatctcctgtggtggtgcaattcgatctcagaagggagtgagtgttgctaaagttaaagtggcatccattgaaattggcccagtttctgggcagataatgcatgcagttggtgaagaaggaggacatgtcaaatatgtatgcaaaattgaaaattatgatcagtctacccaagtgacttggtactttggcgtccgacagctggagaacagtgagaaatacgaaatcacctacgaagatggagtggccatcctctatgtcaaagacattaccaaattagatgatggtgcctacagatgcaaagtagtcaatgactatggtgaagacagttcttatgcagagctatttgttaaaggtgtgagagaagtctatgactattactgccgtagaaccatgaagaaaattaagcgcagaacagacacaatgagactcctggaaagg

SEQ ID NO: 67168 - DNA, 423 bp, Homo sapiens
accaagtgcaacaagaaaacattaacggatctgcggctcagggtaactggtcttaccgaaggccattcctatgaattcagagttgctgctgaaaatgcagctggtgtgggagaacctagtgagccatctgttttctaccgtgcgtgtgatgccttgtatccaccaggtcccccaagcaatccaaaagtgacggacacttccagatcttctgtctccctggcatggagtaagccaatttatgatggtggcgcacctgttaaaggctatgttgtagaggtcaaagaagctgctgcggatgaatggacaacctgcactccaccaacaggattacaaggaaagcagttcacagtgaccaagcttaaagaaaacactgaatataacttccgtatttgtgccatcaattctgaaggtgtaggtgaacct

SEQ ID NO: 67169 - DNA, 516 bp, Homo sapiens
caccagctaaagtgactgaattcagaaaaagagtggttaaagaagaaaaagtatcaattgaagctccaaaaagagaacctcaacccatcaaagaagtaactataatggaagagaaagaaagggcttataccctagaagaagaagctgtttcagtacaacgggaagaagaatatgaggaatatgaagaatatgattataaagaatttgaggagtatgaaccaacagaagaatatgaccaatatgaagaatacgaggagcgggagtatgaacgatatgaagagcatgaagaatacatcacagaaccagagaagcctatccctgtaaagcctgtcccagaagaaccagttcccacaaaaccaaaggccccaccggctaaagtgctgaagaaagctgtccctgaagaaaaagtaccagtgcccattcctaagaaactcaaacctccaccacccaaagtgcctgaagaaccaaagaaagtttttgaggaaaaaatacatatttcaattaccaaaaaaaaaa

SEQ ID NO: 67170 - DNA, 1272 bp, Homo sapiens
aaggacagctccttccctactcattccctgcccaagtggggccagacctctttacacacacattcccgttcctaccaaccaccagaactggatggtggcacccctaatgtgcatgaggcatcctgggaatggtctggagtaacgcttcgttatttttatttttatttttatttatttatttatttttttgagacggagtttcgctcttggtgcccaggctagagtgcaatggcgcgatctcagctcacctcaacctccgcctcccgggttcaagcgattctcctgcctcagcctccctagtagctgggattacaggcgcccgccaccatgcccggctaattttgtatttttagtagagacagggtttctccatgttggtcaggctggtctcaaactcccgacctcaggtgatccacccacctcggcctcccaaagtgctgggattacaggcgtgagccactgagcccggcctacatttttctctttattctatctaggattagttttgacatatgatatgcataacatttatggcaaagaccaaggaaggtatattattaatagtaggaagtgaaaaaatactggtggagagagacagaaaatatggtttatgtgtaagtctcatatctacctagggctacaacaatgtgctaaacattgtttagaagcaaaaaggagatggtgggtagaatgaagcgtctgccacagtgtctccactccacacagtaaatacaaaggcgactcaatatgaaccactttggatttctctggacccacctaccttaacattatagcagcggatggtatggtcactggacccggtgtaaagggcagcattcttcccggaggtctgagtaaccaggaggcagttaactttggaggtatgaccctcaaagacaccaatacatttccgactcaccagattataaacccgaacagttttatctgctgaacaggtatatagcaagttcccaaatatctgaattgcatttacgaaagcttggtgtccctcaaagcttccttctgtgggttcatcatcatctcctggctctgaagatatttctggaaaacaagaataggtttcagatacatgtctgctagagtctgaaaagatactcaagaatcagatctattatgcaatacagtagtccgtagattaaaccaaaagtagatcccttaaatcttagttcccctatcaggctactacaattttcaatacccatcttcactatgaagactgcaagataagcaaaggcagagaaggcctttcag

SEQ ID NO: 67171 - DNA, 652 bp, Homo sapiens
cggacgcgtgggaggatgtgaatatgaatatcgtgtttatgcagaaaatgctgctggcctaagtcttccaagtgaaacctctcccttaattagggcagaagatccagtgttcctaccatctcctccatccaaacccaaaattgtggactcaggcaagacaactataactattgcctgggttaagccgctgtttgatggtggggccccgataactggatatactgtagaatacaaaaaatctgatgacactgactggaaaacttccattcagagcttacgagggacagaatatacaataagcggactaacaacaggagctgaatatgttttcagagtaaaatctgtcaataaggttggtgctagtgaccccagtgatagctctgaccctcagatagcaaaggaaagagaagaagaacctttatttgatattgacagcgaaatgaggaagaccttgattgtcaaggctggtgcctcatttaccatgactgtgcctttccgaggaagaccagtacccaatgtcttgtggagtaagccagacactgacctccgtactagagcttatgttgataccacagactctcgtacatcactgaccattgaaaatgccaacagaaatgactctggaaagtacacattaacaattcagaatgtt

SEQ ID NO: 67172 - DNA, 1747 bp, Homo sapiens
ggaattcccgggtcgacgatttcgtatgaagaccttgaaacttcagcagaactcagaatcgaagctgaaccaattcagtttacaaagcgcatacagaacatcgtggtgagtgagcatcagtctgccacctttgagtgtgaagtgtcctttgatgatgccattgtaacatggtacaaaggaccaacagaactgacagagagccagaaatacaacttcaggaatgatggccgctgccattatatgaccatccacaatgtgaccccagacgatgaaggtgtctactcggtcatcgctcggctggagccaagaggtgaagcaagaagcacggcagagctgtacctaacgacgaaagaaatcaaacttgagctgaagcctcctgatattcctgactccagagttccaatcccaaccatgcctatcagagcagtgccaccagaagaaatccctcctgtggttgctcctcctatcccccttttgctaccaacacccgaagaaaagaaaccaccaccaaaacgtattgaagttaccaaaaaggctgtgaagaaagatgccaaaaaagttgttgcaaagcccaaagagatgacaccacgtgaagagattgtcaagaagcctccacctcctactaccttaattccagcaaaagctcctgaaatcattgatgtatcctctaaagctgaagaagtaaaaataatgactataaccagaaagaaagaggttcagaaagaaaaagaagctgtgtatgagaaaaagcaagcagtccacaaggagaagagagtcttcattgaatctttcgaagaaccttatgacgaactggaggtagaaccatacacagagccatttgaacaaccttattatgaagaaccagatgaagactatgaagagattaaggtagaagctaaaaaagaagttcacgaggaatgggaagaagattttgaagaagggcaagaatactatgaaagggaagaaggctatgacgaaggggaggaagagtgggaagaggcttaccaagaaagggaagtaattcaagttcaaaaggaggtctatgaagaatcacatgagagaaaagttccagccaaagtacctgaaaagaaagcaccaccacctcctaaagttataaagaagccagtaattgaaaaaattgaaaagacttctcgaagaatggaggaagaaaaagttcaagtcaccaaagtacctgaagtttcaaagaagattgttccacaaaaaccttcccggactccagtacaggaagaagttattgaagtgaaagtaccagctgtgcatacaaagaagatggttatttcagaagaaaagatgttctttgcttctcacacagaggaggaggtgtcagtcacagtccccgaggtacaaaaggaaattgttactgaagagaaaattcacgttgccatttccaaaagggttgaaccaccacctaaagtccctgagctacctgagaaaccagctccagaagaagtggcccctgttcctatccctaaaaaagtggagcccccagcaccaaaagttcctgaggttcccaagaaacccgtgccagaggagaaaaagccagttcctgtgcctaagaaggaacctgctgctcccccaaaagtcccagaggtgccaaagaaacctgtccctgaagaaaagattcccgttcctgttgcaaagaaaaaggaagctcccccagctaaagttcctgaagtacagaagggagttgtgacagaagaaaaaataaccattgtaactcaaagag

SEQ ID NO: 67173 - DNA, 787 bp, Homo sapiens
gattccagaagatatgatgtcaagaccaggaagtggagctttctcttggaagagcacagtaaactaattgcaaaggtgcgctgcctcccacaagttcagctggaccctctgcccacgactctcaccctggcgtttgcttctcagctcaagaagacatctctcagtctcacgccagatgtcccagaggcagacctttctgaagtggaccccaagctcgtgtctaatctgatgccctttcagagagctggagtcaattttgccatagccaaaggaggccgcctgctgctcgctgacgacatgggcctggggaagaccatccaagccatctgcatcgcagccttttaccggaaggagtggccgctcctggtggtggtgccatcctccgtgcgcttcacctgggagcaggccttccttcggtggctgccatctctgagcccagattgcatcaacgtcgtggtgactgggaaggaccgcctgacagctggcctgatcaacattgtcagctttgaccttcttagcaagttggaaaaacagctaaaaaccccttttaaagttgtcatcattgttgccaagagggtgatcctgttgtcgggcacaccagccatgtcccggcccgcagagctctacacgcagatcatcgcagtcaagccaactttcttcccccagtttcatgcctttggacttcgctactgtgatgccaaacggatgccttgggggtgggactactcaggttcctccaacctgggagagctgaagctcctgctgggagggaagcagtcatgctgcg

SEQ ID NO: 67174 - DNA, 414 bp, Homo sapiens
ggcaccgccaccaccgccgccgccacagcagcagcagcagcagctcacggcattcctgcagcagctccaggcgctcaaaccccccagaggcggggaccagaacctgctcccgacgatgagccggtccttgtcggtgccagattcgggccgcctctgggacgtacatacctcagcctcatcacagtcaggtggtgaggccagtctttgggacataccaattaactcttcgactcagggtccaattctagaacaactccagctgcaacataaattccaggagcgcagagaagtggagctcagggcgaagcgggaggaagaggaacgcaagcgtcgagaggagaagcgccgccagcagcagcaggaggagcacaagcggcggcaggaggaggaagagctgtttcggcgcaagcacgt

SEQ ID NO: 67175 - DNA, 739 bp, Homo sapiens
caaccacccagaggtgaggagatagtagaggaagaaggagaaggggggtggggggcgcgaagcacaaagagcaaaggcaaaggcaagcacagtgacagatgagacttgagaggtgccaggggccagggtatgcgaggccttggaggccagcatgcagtctaggatgaggcctcctaccttcagcctgcctgagggccaggagctggagggaggcgagtgaaggcccttcttcccgtgcctgcagtaatggctcccaggacacctttgaagcatgttacagcggcacgtccacaccttctttccatggctcccactgcagcggcagcgaccacagcagtctgggcttggagcagttacaggattacatggtcacgttgcggagtaagctggggcccctcgagatccagcagtttgcgatgctgctgcgggagtaccggctggggctgcccatccaggactattgcacaggcctgctgaagctctacggagaccggcgcaagttcctcctccttgggatgcggcccttcatcccggaccaggacatcggctacttcgagggcttcctggagggcgtgggcatccgcgagggcggcatcctcactgacagcttcggccgcatcaagcgcagcatgagctccacgtcggcctccgcagtgcgcagctacgatggcgcggcgcagcggcccgaggcacaggccttccaccggctgctggctgacatcacgcacgacatcgaggc

SEQ ID NO: 67176 - DNA, 620 bp, Homo sapiens
gtaaccaccactactcatagcgttggacgagggcatgagctacagttgcttaatgaagaactgagaaacattgagcttgagtgtcagaatatcatgcaggctcacaggctccagaaagtgacagaccagtatggagacatctggacattgcatgatggaggattccggaattataacaccagcatagatatgcaaaggggaaagctagatgacatcatggagcatccagaaaagtctgacaaggacagttctagtgcttacaacacagctgagagctgcagaagtactccgctcactgtagaccgttcccctgacagttcccttccaagggtgatcaacctcaccaataagaaaaacctgagaagcacaatggcagccacccagtcctcttccggacagagcagtaaagagtcgacctccaccaaagccaaaaccactgagcaaggttgtagcgctgaaagcaaggagaaggttttagaaggcagcaagcttcctgatcaagagaaggcagtcagcgaacacatcccttacctctctccttaccacagctcctcatatagatatgcaaacatcccagcacacgcccggcattatcaaagctacatgcagttaattcaacg

SEQ ID NO: 67177 - DNA, 418 bp, Homo sapiens
gggtctggggctgcctggccaccgtgtccacccacaagaagatccaaggactgccatttgggaactgcctgcccgtcagtgatggccccttcaacaatagcactgggattcctttcttctacatgacagccaaggaccccgtggtggctgatctgatgaagaaccccatggcctcgctgatgctgccagaatcagaaggggagttctgcagaaaaaacatcgttgatccggaagatccccgatgtgtccagttaacgctcactggccagatgatcgcagtgtctccagaagaagtagaatttgccaagcaagccatgttttcaaggcacccagggatgaggaagtggcctcgtcaatatgaatggttctttatgaagatgaggatagaacatatctggcttcagaaatggtatggagg

SEQ ID NO: 67178 - DNA, 645 bp, Homo sapiens
aaacttcaaaaaataataagatccaagtcaaaggtaagagttactttctgaaagataatactgcacaggggcaggatgtaccaggggtgagcagggtgagttcatggcaaaggaaagcccatgggccacttggggggggggtggagacatgtagggtggcctgtgtgtccaactggctgtttctttgagtcttgttggcaagtgctgagacacaaactgcctcttaccagaaattccgaaccgcattaatcatttgggtttaattcctctctctagagctgtttttgatagccagcccctcccatcccacagaggggagcccagtgaccctgacgtgtaagatgccctttctacagagttcagatgcccagttccagttctgctttttcagagacacccgggccttgggcccaggctggagcagctcccccaagctccagatcgctgccatgtggaaagaagacacagggtcatactggtgcgaggcacagacaatggcgtccaaagtcttgaggagcaggagatcccagataaatgtgcacagggtccctgtcgctgatgtgagcttggagactcagcccccaggaggacaggtgatggagggagacaggctggtcctcatctgctcagttgctatgggcacag

SEQ ID NO: 67179 - DNA, 504 bp, Homo sapiens
ggtagagcatccaacctgcgactgcccaggccttgggcagtttccttatctgagtgggagccctggaagcccacactgcctccttgggaaactgttaaatctcacctttgggtaactgctgaagcagaaggcacagcacagagcaatcatgagattgcatttgtgatgcatccttgagggcggagaagaccacaaaggatggctctgtgcgtggccagtcgctgctgtggccgggtcccatttacagagaggtctgtgagggtgaggaggagtggaggtttttctgcatgtgcttctgggcttgcatagtaagaggatttacttcccagctcttcatcttgctgtcatgcacgggcggctcaacaacatccgggttctcctgacagagtgcacagtggacgccgaagcctttaatctcaggtgagcgcgttgggcccgagtaggccccgcggcgcctggcctgctgctcacagctgctggttgctggtgcctcccatcagcccc

SEQ ID NO: 67180 - DNA, 742 bp, Homo sapiens
cttttatgttagtaatcgaaaagatggattttgccttagcggtagtatcctggctaagtctaagttttatggaaactcattatctgcaatattagagggagaagcacggttaactttcttgaatagaggtgaagattatgtaatgacaatgccatacgctcattgtaaaggaattctttatggtacaatgacactggagcttggtggaacagtcaatattacatgtcaaaaaactggatacagtgcaatacttgaatttaaactaaagccattcctagggagtagtgactgtgttaatcaaatatcagggaaacttaaactgggaaaagaagtcctagctactttggaaggtcattgggtaagtattttgtatatgagctttacaaaaagaattttattctgtgggaaaaaaaaaatcacatttaaaatttaaaacttattccgttgctgaaaacatcactatttaacataagcttcatcttaatagcagatattttggtggtgttctgttatcaacagtagttaattttgtgtaatattttatttccaaaacttaaaatcagtagaaatagctaacacttatatatgacttactgcattatttaagaatgttactcatattaactgatttaatatttataacatataacgctatgaggtgagtatataggtgccatgcccattttattattgtttattattggccccattttacagaagaggacactgaggcacagagagt

SEQ ID NO: 67181 - DNA, 438 bp, Homo sapiens
ctcgaggccttcggcaacgccaagactgtgcgcaacaacaattccagccgctttggcaagtactttgagatccagttcagccgaggtggggagccagatgggggcaagatctccaacttcttgctggagaagtcccgcgtggtcatgcaaaatgaaaatgagaggaacttccacatctactaccagctgctggaaggggcctcccaggagcaaaggcagaacctgggcctcatgacaccggactactattactacctcaaccaatcggacacctaccaggtggacggcacggacgacagaagcgactttggtgagactctgagtgctatgcaggttattgggatcccgcccagcatccagcagctggtcctgcagctcgtggcggggatcttgcacctggggaacatcagtttctgtgaagacgggaattacgcccgg

SEQ ID NO: 67182 - DNA, 422 bp, Homo sapiens
ctctgctgcctgtgagctggagcccactcactcctgctgctcccacgaagcttcccatccatttactttctgcaaaccttcatggagcgtcattggccttgaagaagcagcaatggaaattcaattccaggctctccaaccagactttgcaaagtggatctttgcagctcctgctctgatcacgccctggttttgtcctgtcccctcggtggtgaggaccgagatcttcctgcagtcctcccggcgggcagctttcatggtggacggggcagtgcactggctcaccaacttcatcataggcttcctgttcccatccatccaggaggccatcggtgcctacagtttcatcatctttgccggaatctgcctcctcactgcgatttacatctacgtggttattccggagaccaagggcaaaacat

SEQ ID NO: 67183 - DNA, 749 bp, Homo sapiens
cttttttgtataccaatcgccaaacttgtcaggactggctaacgcggattcgactctccatcatgagggtaggattgttggcaggccagcctgcagtgacagtgagacatggctttgacttgcttacagagatgaaaacaaccagcctatctcaggtaaagtggtgtgtttgaaattcattttaagtctgttaataagaaaaacatggtttaattcctttggtatgatttaatctatggataaaataagttaaagcttggattcattttcaaaggttttgatcctgtattttgtaaaagcaacaactgccagagttacctattttattcgtgttaaaacagtgttagaagtcaaaataatgttcatgtttttgttcatgttaaaacaatattcatgttagaacacgttaaaactctatttcttccgtgcaaagtttagaactttaaaggtaattctgaaaatttgtttatgggggaaaatttttatttatttatttatttttttgagccgagatcgtgccactgcactcttttagcctgggcaacaacagtgaaactccatctcaaaataaataaataaataaataaaaataataatacttttttttccatttaaaattttctcagtttctcctagtgtgcagtgcgctctcattgtcaggggaccgctgtggggaaaggggtcggacagctctgcactgggcagttccctgctccctggaaggctttcccatgtttatatttttcttt

SEQ ID NO: 67184 - DNA, 659 bp, Homo sapiens
  misc_feature (1)...(659): n = a,t,c or g
cacaccaaacttaacaaaacttacaacagtagttacctgtggggaggaagattaggtcccctgtcctcctttgagtaacaataaaagaaaaaaaccttgaaaaaatgacctcttgacttgtggaactgttattttcatagttagtaggagtttaaccttgctctggtctcaccttctcatccccagataaaagctgaggatgaccagcccctcccgggagtcctcttatccctgagcggtggcctgtttcgttccaacctcttgacccaggacaacggcattctgacattctcaaacctggtaacgtgttctgcaatttaccacctgcctgtcttccctgagagagagccaggatgcagcatgcgagacttacgtgttgcttgacaacgtgagaagagaaagccaatgtggagtggtttcagtttcttgggggcccacggtcattagagtattgctcttactcgaacttaatgctgctgattcatgttcccttccacacgcgcttcttgttttctgatcacccacttgtcactaagacagtgtaattaatttccctggccacaactggctgctctcttagggcatcttctcggttttgccacggaaatcatgcttatgatggctgangtctggtttgggtggtaaggctggcgttttct

SEQ ID NO: 67185 - DNA, 483 bp, Homo sapiens
catgcggaccggccggattcccggctcgacaacgtatgtgctcacctggctgacataggtgagtgtgctggtcctcctcggtcagccccaggcaccaggcatggtaggcaaaggcaaagaggtcttcaggcttggcaggtcttgctgtggctcggcttagccgtgagagccactcttggcactgcttaaaagtggagaagtggcacctgccaggcaagaagccacaggcctaggtgaggcaaagtgcagttgtgccatggggctatcagggccaaaaacacagccacaggaaggctgtgaggagagaaggctgcaaagcaagaggtaaagcagtggggacccagggtggggggacgagggacactggccaacacccaacagaagttgtctcttgtgataattctcttcccaagaactcctgtgtttgaggcatacttatcctctcgaatggggcgctactgtttctcgtatcaaatctaaatg

SEQ ID NO: 67186 - DNA, 968 bp, Homo sapiens
ggaggcagggagaaaggaggtgaggccagttgggaaggggtacactcaggggacttaacgcctggcaatgtatcgtttattcaactgagtgctggatactcaagtatcccatatattattctatacacctttttgtgtgccttaactaatgcattttttaaagtcagtttttctgtgatatcagacaaatactttagcatttagattctctttctctcactgaattgactagtaaattcagttatgaataatttagcccaaaattaacctagcaaggatttcacctgcaaattaaatttattttctgccaaaggacttaagttccaacccagaaacccccttttacaaagcactcactcttacttttctgattgtttaaataaaggcaagtaattccttttccctcttcactctgtggtacagttctgaagaataacttcatttgttttgtgaatgtttgaaattcaccaggcaaaagccacagctaatagattgtagtaacatagaaatgccacgtgccacagatcccacctccttgctcctgtccctgctcctgctagctcaaccttttccctgcactgacaggcattgtagactacgggtcaagccagctttgaagccaagcacatctggcttcaaatcctaactccatccccaactacttgtatgacctgaccctaagcagatagtttctctccttggattctgtcaagggggaaaatacttcccttacaaggttgctgtgaaaataaagtgtgataatacatgaaaagcaccttgcacatagtaggtgcctaacacacatctgtatgccctagccgccagacccctgccagatgattttattttcccctagtggttctgttcatcggagtcaaactgactatgcttttgcgactggcaacttgagggggagattcttctccactgaaacccgtgggagcctagcaccctatgaaggcaggagg

SEQ ID NO: 67187 - DNA, 444 bp, Homo sapiens
aacaccatgcactttgtgttaacaagacgaaaaccatgtatcctccgaaggcaatatggcagatcatctttgctgtttacagctttgtagcaagatgtaatatatccaaaattacttgatttctgtatccggttgggaggtggcagtggttctagagggaataggctatggtagctgtcaacctctgtaggaactgctggcatatctgcttgatcaatttgagccattgttattaaatgtctgttgatcagctcctgtcggagttcatcagccatgaagaaggaaggtgcgtttgctttcggttgcatataagcaacgtgaggtgcagttggaggataaatatgatagtttggaaacaccattccagtcaaaggtgctggagttgtgtctgtatagaagtaagtcgtcccaccaacagtttccttttggatcacctgaccagag

SEQ ID NO: 67188 - DNA, 464 bp, Homo sapiens
  misc_feature (1)...(464): n = a,t,c or g
tacgttccnnnnncgaattcccgggtcgacgggaggcaggaggtggcgggagggggtcgtgaagtctagcttcacgtatctgctgctggaccccagggagactcaggacctgccagcccgagccttctcactgaccccagctgagcgccttcagactttcatccgtgccatcttctacgtgggcaaagggacgagggcccggccatatgtccacctctgggaggcccttggtcaccatgggcggtcaagaaaacagccccaccaggcctgccccaaggtgcgtcagatcttggacatctgggccagtggttgcggcgttgtgtccctacattgcttccagcacgtggtcgctgtggaggcttatacacgggaggcgtgtattgtggaagccctagggatccagacgctcaccaaccagaagcaagggcactgctatggagtggtggcaggctggccacctgctc

SEQ ID NO: 67189 - DNA, 1015 bp, Homo sapiens
gaattcccgggtcgacgatttcgtggctggtcttgaactcctgggctcaagcaatctgcccacctcagcctcccaaagtgctgggattacaggcgggagccatggtgcccggccaatctataaattcttaccaacaaagtaagattattctgccttttaaaaaatgtttcaactgcacctttaaaaaatagcatatataaagctttcagatactcaaataacgtttatattctcttcattcatcaagggaaaagagtttctttttacaaacgagcccaaatccttgtagcagatacgtggagtgtattggaaggaaaaggagatggctgcttcaaggacatctccagtatcaccatgtttgctgattatagattacctcaggttcttgctcatcttggagccctgaaatactctgatgacctactgaagaagcttctcaaaggagaaatgctctcatatggagacaggcaagaggtggaaatcagagggtgctcgctttggtgtgttgagctgatccgggattgtcttctggagcttattgaacaaaagggtgaaaaacctaatggagagatcaattccattcttctggattattacttatgggactatgcccatgaccatagggaagatatgaaaggaattccgtttcatcgcatacgttgcatatattattgacctcaagtgtaaactgatccaaagaaaaccccctgcgttttatatcatatcatctgtacagttttgctttgatatttagagaacatgatcgaggttataggaaattgattgcccattctcacttgaaaaatacttcctaggccgggcacagtggtttatgcctgtaatcccagcactgtgggaggctgaggcgggtggatcatctgaggtcaggagtttgagaccacctggccaacatggtgaaaccccatctctactaaaaatacaaaattagctgggcgtggtggcacgtgcctgtaatcccagttacttgggaggctgaggcaagagaatcgcttga

SEQ ID NO: 67190 - DNA, 470 bp, Homo sapiens
ggaaaacctgcagaagctggtccacattgagcacagcgtccggggccaaggggatctcctccagccaggaagggagtttctgaaggaagggacgctgatgaaagtaacagggaaaaacagacggccccggcacctatttctgatgaacgatgtgctcctgtacacctatccccagaaggatgggaagtaccggctgaagaacacattggctgtggccaacatgaaggtcagccgccctgtgatggagaaagtgccctacgctctaaagattgagacttccgagtcctgcctgatgctgtctgcgagctcctgtgcagagagggacgagtggtatggctgtctgagcagagccctccctgaggactacaaggcccaggcgctggctgcattccaccatagcgtggagatacgagagaggctgggggttagccttggggagaggccccccaccctggtgcctgtcacacacg

SEQ ID NO: 67191 - DNA, 416 bp, Homo sapiens
tttcgtacagatgctcgggtagccatcaccatctattaccaggccacggaagagttccagaatggtattgccagctacattcccaaagacaacagcctccagtcggagactgtgcagtacaagcgaggagtgtgtcagcagttctgcctgccctcccacaccgtggatccctccgagtgggccgaagaggagcttggctttgatttagaccgagaagtttaccctctagtggtacatgccgtggtggatgaaggagacgagtattttggccattgccatgtactgctgggtacttttgagaagcacacagatggaactttctgtgtcaagcccctcaaacagaaacaagtagtagacggggtcagctacctccttcaggagatctatggaattgaaaacaagtacaacacacaaga

SEQ ID NO: 67192 - DNA, 935 bp, Homo sapiens
cccacgcgtccgctcaaaacataatttctgtttcatggagatgaatacaaggctgcaagtggaacatcctgttactgagatgatcacaggaactgacttggtggagtggcagcttagaattgcagcaggagagaagattcctttgagccaggaagaaataactctgcagggccatgccttcgaagctagaatatatgcagaagatcctagcaataacttcatgcctgtggcaggcccattagtgcacctctctactcctcgagcagacccttccaccaggattgaaactggagtacggcaaggagacgaagtttccgtgcattatgaccccatgattgcgaagctggtcgtgtgggcagcagatcgccaggcggcattgacaaaactgaggtacagccttcgtcagtacaatattgttggactgcacaccaacattgacttcttactcaacctgtctggccacccagagtttgaagctgggaacgtgcacactgatttcatccctcaacaccacaaacagttgttgctcagtcggaaggctgcagccaaagagtctttatgccaggcagccctgggtctcatcctcaaggagaaagccatgaccgacactttcactcttcaggcacatgatcaattctctccattttcgtctagcagtggaagaagactgaatatctcgtataccagaaacatgactcttaaagatggtaaaaacagtaagtaatgtttcattaaaagagaaatgtgagtcatagaaatgtatcacattaatctgaaaaagaggattccagcctggccatgatcagtcagttacattttttaaatgcctaggctaaacattggagggaaatatgccaatataatagaattgattggctctgggtagtagagttgatggtatttgcttttcttctttacactttttaaaaaatttg

SEQ ID NO: 67193 - DNA, 412 bp, Homo sapiens
tttcgtgagttctgttagcttgtcctggtcccggcccaaagatgatggtggttctagagtcacaggctactacatcgaacgcaaagagacatccactgacaagtgggtcagacacaacaagactcagatcaccaccacaatgtacactgtcacagggcttgttcccgatgctgagtatcagttccgcatcatcgcacagaatgatgttggcctgagtgagaccagccctgcttctgaaccagttgtttgcaaagatccatttgataaaccaagccaaccaggagaacttgagattctttcaatatccaaagatagtgtcactctacagtgggagaaacctgaatgtgatggtggtaaagaaattcttggatactgggttgaatatagacagtctggagacagtgcctggaaa

SEQ ID NO: 67194 - DNA, 511 bp, Homo sapiens
cccacgcgtccggtttcatgttgaagaaaatcagtgttggggttgcaggagacctaaacacagtcaccatgaagctgggctgtgtcctcatggcctgggccctctacctttcccttggtgtgctctgggtggcccagatgctactggctgccagttttgagacgctgcagtgtgagggacctgtctgcactgaggagagcagctgccacacggaggatgacttgactgatgcaagggaagctggcttccaggtcaaggcctacactttcagtgaacccttccacctgattgtgtcctatgactggctgatcctccaaggtccagccaagccagtttttgaaggggacctgctggttctgcgctgccaggcctggcaagactggccactgactcaggtgaccttctaccgagatggctcagctctgggtccccccgggcctaacagggaattcttccatccaccggtgggtaacaaaagggcagacaagccgggcaactaaccaattgcagt

SEQ ID NO: 67195 - DNA, 504 bp, Homo sapiens
  misc_feature (1)...(504): n = a,t,c or g
gtcgacgatttcgtgaaatgaattgtttgattgctgactttattctttggtcttacacaccagggtttccatgataaagttttggaggactgcaatatagtcctcagtttaaatgccagtaactgcaaagctctgtatcggaaatctaaggctttaagtgatttaggaagatacaaaaaggcttacgatgctgtagcaaagtgctccttagcagtgcctcaggtatggaatttatagtttatttgtttacatcgtaaccatttacatcataataaatggcatttaaagagttaaattttccagtcatccatcaacctgcttcagttgggtataattgctaatgaagcaggtgtcttgatgggaaacttccctgttttgtctattcttcttcaccattagtaaatataaccctgttaattatacatacttatttttttcaggatgagcatgtaatanaactaactcaagaactagctcagaaaatggggattaaaataagaaaag

SEQ ID NO: 67196 - DNA, 913 bp, Homo sapiens
ttttcggcacgaggaaaaccacagccaacaggagccacacagatagtgcaggaacgccccatgtgtctggtgggaagatgctcagtgctctggagtccacggtgcctcccagccagcctccacctgtgggcacctcagccatccacatgagcctgcttgagatgaggcggagcgtggcggaactcaggctccagctccagcagatgcggcagctccagctgcagaaccaggagttgctgagggcaatgatgaagaaggccgagctggaaatcagtggcaaagtgatggaaacaatgaagagactggaggatcccgtgcagcgacagcgcgtcctagtggagcaagagagacaaaaatatcttcatgaggaagagaagatcgtcaagaagttgtgcgagttggaagactttgttgaagacttgaagaaggactccacggcagccagccgattggttactctgaaagacgtggaagacggggctttcctcctgcgtcaagtgggagaggctgtagctaccctgaaaggtaaactttctgctgggtcgggggaggagtctgagctgtctttcctgcggtgtttaaaaatctgccacatagaggattcattcatgttatgcaagtatttatttaaacgtcttacatgtgccagggcattgttctggacacttgggaataccccacagcacaaagtaggtgcacatcccccctcttcttggagctggtattagagtgggtgctgtaagatttcacactaaatgattccagtaacactttctatttgctaggctcttacagtgcaccgggatgcatgtgccaaacccgtttaaaaacacaaggtggggagggatcacttggattccccagggagtttcaagaccagcctgggcaatatagagagactcacatctctacc

SEQ ID NO: 67197 - DNA, 446 bp, Homo sapiens
  misc_feature (1)...(446): n = a,t,c or g
tttcgtggagggtccccatattgcccatcaggcagcggctgttcctgtttccccgagggctcggaggtactgaaggtggtcgccatggatggagaccggggcaaacccaatcgaattctctacagccttgtaaatgggaacgatggagcctttgaaattaatgagacatctggagccatctccatcactcagagcccggcccagctccagagagaggtgtatgagctgcatgtacaggtgactgaaatgagccctgcggggagcccagctgcccaggccaccgtcccagtcaccatcaggattgtggacctcaacaaccacccgccaacattctatggagagagcggaccccaaaacaggtttgagctgtccatgaatgagcacccaccccagggagagatcctgcggngcctcaagatcaccgtcaatgactccgaccagggaaa

SEQ ID NO: 67198 - DNA, 505 bp, Homo sapiens
tttcgttgggagctggctgggcagggtggggagcccttcccagagcagtgggcccccctttccactccagcccatttctctcctgtggcctgtggctcagctttctcctgggacagagtccttcctgtggggaagggacagatgacagggggagtggggggatgagggcgtggccgtgggcgaggcacagcccaggtttgatctagggacctctggggtagcagggcttggggacccacctgaccacagcatgccctgctctgtgcctcacagaactacaggatctcatgcacatctcacgggcccggaagccagcgttcatcctgggctccatgagggacgagaagcggacgtaagtggatcgagatcggtggcagagcggcgaacgtgtgcgctttcctgcccctcacccaccccctgttgagggctcagggctttactctctgcaccctcacagccggcgaagtggctctgctcctagtcttatagttcttagcagagacag

SEQ ID NO: 67199 - DNA, 392 bp, Homo sapiens
tttcgtgccgagaggagcactgagaggcgactgctgggcctgggctactcccagctccagctgttcccgctggccgtggaggccttcctgcaggccctgcccctgtgctgggtgccaggagagcaggccacagtgctaagaaacctcgggatggcccacaatgccctcggcaactatcaggaagctcgggagtttcaccagaaggctgctgacctacacggctctgtggggcagcggtgggagcagggccggagctttggcagcctggcctttgcattgagccagctgggggaccacaaggctgccagagacaactacctgcatgccctgcaggctgcccgggactctggtaagcgtgagagggttgggatgtgactgggacagtggggagg

SEQ ID NO: 67200 - DNA, 500 bp, Homo sapiens
gtccggaattcccgtttcgacgatttcgtgctaatgagaagctagataaaacaaaggccgagttagatcaagaagccttgatcattggcaatctggctacagaagcacatttaatcatcctggatatgcaggaaaacattatccaggcgagctcggctctggactgtaaagacagcctgctgggaggtgttctgagggtgctggtgaattctctgaactgtgatcagagtaccacctacctgactcactgctttgcaacactccgtgctctcatcgccaagtttggagacttactcttcgaagaggaggtggaacagtgtttcgacctatgtcaccaagtcctgcaccactgcagcagcagcatggatgtcacccggagccaagcctgtgccaccctttacctcctcatgaggttcagttttggagccaccagtgtaagagttcaaaccagctgagtgacctggaatcagtagagaaaaattgatgtaaagcatcagctg

SEQ ID NO: 67201 - DNA, 717 bp, Homo sapiens
agctctggtctctcagggcctcccagcagctgtggctgaagcagagccgcaggggcctttgttaagacagtccatgccccctggccccgcatccccgtcacccctgccggggctggtttctcatggtcagcggttcccagccagggaggagaaacctcgctgtgggcattcgagtttgcgccctggttccagagcatcccagtgtccgagaaccaaggtggtctcccgtcagttttcctcaccccgttgggatgccagacttccctcattcctcacaggtcaatgagtacgtcgatgctcgggacacgaacatgggggcgtggtttgaggcgcaggtggtcagggtgacgcggaaggccccctcccgggacgagccctgcagctccacgtccaggccggcgctggaggaggacgtcatttaccacgtgaaatacgacaagtgagtcatggcaggtggacgggcctgggtattcaggctctgtgacgcgcatccttggctgcgggtgttcaggccagaacttggcactgtctcgagatggtgatcaggatctggggccccatcctagaattcctaacagcatacgaggctgcccacttggggactagcctgagaacccgaagacggctgccccctcctgtgtaaaaacggagggttctgctcgatcagtggctgaaactgccacgaaatcgtcggcccgggaattccgaccggaagtc

SEQ ID NO: 67202 - DNA, 401 bp, Homo sapiens
tttcgtgctttaaagttggttctgctggccttagaagatggttctgctttgtcaagaaaagtattggttctgtttgtggtgcaaagattggagccacggtttcctcaagcctctaaaactagcattgggcatgttgttcagctcctttatagagcctcctgtttcaaggtcaccaaacgtgatgaagactcttctttgatgcagctgaaagaagaatttagaacctatgaagctctgcggcgagaacatgactcccagatagtgcagattgctatggaagcaggcttacgaattgcaccggaccagtggtcctctttgctttatggagaccagtctcacaaatctcatatgcagtccattattgacaagactccagcctcttttgcacagagtgttcagga

SEQ ID NO: 67203 - DNA, 679 bp, Homo sapiens
  misc_feature (1)...(679): n = a,t,c or g
agacatcattgacgtggatgaggaaccagtagcagcggagccagactatgtgcagccccagctgaggcggccctttgagctgctgattgctgccgccatggagcggaaccccacccaatttcagttgcccaatgaactgacttgtaccactgcactaccaggttctagcaagaggagaagaaaggaggaaaccacagggaaaaatgttaagaagacacagcatgaattagatcacaatggtctcgttcccttacccgtcaaagtctgcttcacgtgtaacaggagttgccgtgtggctcctctcatccagtgtgactattgccctctcctgtttcacatggattgcctcgagccgccgctcactgccatgcccctgggcagatggatgtgtccgaatcacatcgaacatgtggtgctgaaccagaagaatatgacactgagcaatcggtgccaggtgtttgatcgtttccaggacaccgtttcgcagcatgtcgtcaaagtggacttcctgaaccgaatccacaagaagcacccccctaaccggcgtgtgctccagtcggtcaaaagaagaagcttgaaggttcctgatgctataaaatctcagtaccagtttccaccccctctcattgcacccgcggccattcgggacggngagctgatctgcaatgggatccctgag

SEQ ID NO: 67204 - DNA, 425 bp, Homo sapiens
tttcgtgcagccttcgggaagtcctgcaggagccgcgttccaggagggcagctggcagccgccccaggcccccgggccgcctgcaggtgattaggctaatgagctgccccgggggcgcggagaccggcctggcgagcggattacccggcgcccagctgctgccggcggagactcccaggagctccggagaggaaccctccgaaggtgacttcagaactggagttacctggctgagcagtgctggaatggcggctttatctacctgatcatgctgcgtcgctttaagcacaaagcccactccacttataatggcaacagtagcaacagctctgaaccaggagaaacacctaccttggagctgggtgaccgaactgcgaaaaaggggaaacgaaccagaaagtttggggtcatctccaggcctcctg

SEQ ID NO: 67205 - DNA, 614 bp, Homo sapiens
ccagaaactgtttggtatgatcattaccattgggcaagccattgtgtatgtcatgacggggatgtatggggaccctgcagaaatgggtgctggaatctgtctcctgatcatcattcagttgtttgttgctggtttgattgtgctgctgttagatgagctgctacagaagggttacggcttggggtctgggatttccctctttattgccaccaacatctgtgagaccattgtctggaaggcctttagtcccactaccattaacactggcagaggtacatcgcacagcgactgcaactgcacgcgttttgctggatgtgtgctgggaacaaacccatcgtgtcgcagtacatgcctagagccgttctggattgctctcctaggggataaggaatgcgaattcttcaaaacttaatgagcagagatttgtggagtaagcaatactacctcagagagaatagtatcaaaattttagtctctgcttatttaaaatttcagtggttgcaaacagattttcaaaatttcttttgttaaccttgcttaaggcattgctgcagaagtcatttatttgactgatttcagcatccgtagggggataaaaaggtagtggattttaa

SEQ ID NO: 67206 - DNA, 591 bp, Homo sapiens
tttcgtggaggaggagaacatccgcgtggttcgttgtggcggcagcgagttgaactttaggagagctgtgttctctgcagattctaagtatatcttctgtgtctctggagactttgttaaagtttacagcacagttacagaagagtgtgtacacatactgcatggacacagaaatctggtgactggaatccagcttaaccccaacaaccatctacagctgtattcttgttcccttgatggcacaattaaactgtgggactatatagatggcatcttaataaagactttcatagttggatgtaaacttcatgccctctttactcttgcccaagctgaggattctgtctttgttatagtgaataaagaaaaaccagatatatttcagctggtttcagtgaaactgccaaaatcctcaagccaggaagtagaagcaaaggagctgtcctttgttttggattacataaaccagtcacccaagtgcattgcctttggaaacgagggagtatatgttgctgcagtacgggaattttacttgtctgtttattttttcaaaaaggaaacaacatcaagggttactttatcatcatcaag

SEQ ID NO: 67207 - DNA, 585 bp, Homo sapiens
tttcgttcagcttccacagcgtgtctggaattctggtttgccaggcgggctgcgtcctggaggagctgagccggtatgtggaggaacgggacttcatcatgccgctggacttaggagccaagggcagctgccacatcgggggaaacgtggcaaccaacgctggaggcctgcggtttcttcgatatggctcactgcatgggactgtcctgggcctggaagtggtgctggccgacggcactgtcctggactgcctgacctccctgaggaaggacaacacgggctatgacctgaagcagctgttcatcgggtcggagggcactttggggatcatcaccacggtgtccatcttgtgtccacccaagcccagggctgtgaacgtggctttcctcggcctgcttcactcacagccacttcttcggttctcctgggacctgcctgcggctcctttcttgcttcatttgaatcgggcgggtttatccagcatttcctcctcaggagttcagaagtcgcacagcccggcagtcttcgcgcgggaggtggcgggtctagctcaccaactcccagttcggtgtcttgagctgccgg

SEQ ID NO: 67208 - DNA, 408 bp, Homo sapiens
tttcgttccgggtgtctttgtccccccggtgtcgctgccctggcccgcagccttttccccacgactctgaaagaggacagcgttcccaatgtcccagtttaagcgccagcggatcaacccgcttccagggggacgcaacttctcaggcacagcttcaacatctcttctgggccctcctcctggtttgctcactcctcctgtggccacagaactgtcccagaatgccaggcaccttcagggtggggagaaacagcgggtcttcactggtattgttaccagcttgcatgactactttggggttgtggatgaagaggtcttttttcagctaagtgtggtgaagggccgtctgccccagctgggtgagaaggtgctggtgaaggctgcatacaacccaggccaggcagtgcc

SEQ ID NO: 67209 - DNA, 406 bp, Homo sapiens
ggttcgggaatctggactgtacagatgccaggcccggggctccccacgaagtaaccctgtgcgcttgctcttttcttcagactccttaatcctgcaggcaccatattctgtgtttgaaggtgacacattggttctgagatgccacagaagaaggaaagagaaattgactgctgtgaaatatacttggaatggaaacattctttccatttctaataaaagctgggatcttcttatcccacaagcaagttcaaataacaatggcaattatcgatgcattggatatggagatgagaatgatgtatttagatcaaatttcaaaataattaaaattcaagaactatttccacatccagagctgaaagctacagactctcagcctacagaggggaattctgtaaacctgagc

SEQ ID NO: 67210 - DNA, 1131 bp, Homo sapiens
acatctgtccgtgtggtggaattcgaggattcagctgaaaaagaagtttttaagagtgactattacaacaaagttccagttagtaaaattctaggcaagtgtgtggtcatgtttgtcaaggaatactttaagttatgcccagaaaacttccgagatgaggatgtttttgtctgtgaatcacggtattctgccaaaaccaaatcttttaagaaaattaaactgtggaccatgcccatcagctcagtcaggtttgtccctcgggatgtgcctctgcctgtggttcgcgtggcctctgtatttgcaaatgcagataaaggtgatgatgagaagaatacagacaactcagaggacagtcgagctgaagacaattttaacttggaaaaggaaaaagaagatgtccctgtggaaatgtccaatggtgaaccaggttgccactactttgagcagctccattacaatgacatgtggctgaaggttggcgactgtgtcttcatcaagtcccatggcctggtgcgtcctcgtgtgggcagaattgaaaaagtatgggttcgagatggagctgcatatttttatggccccatcttcattcaccctgaagaaacagagcatgagcccacaaaaatgttctacaaaaaagaagtatttctgagtaatctggaagaaacctgccccatgacatgtattctcggaaagtgtgctgtgttgtcattcaaggacttcctctcctgcaggccaactgaaataccagaaaatgacattctgctttgtgagagccgctacaatgagagcgacaagcagatgaagaaattcaaaggattgaagaggttttcactctctgctaaagtggtagatgatgaaatttactacttcagaaaaccaattgttcctcagaaggagccatcacctttgctggaaaagaagatccagttgctagaagctaaatttgccgagttagaaggtggagatgatgatattgaagagatgggagaagaagatagtgaggtcattgaacctccttctctacctcagcttcagacccccctggccagtgagctggacctcatgccctacacacccccacagtctaccccaaagtctgccaaaggcagtgcaaagaaggaaggctccaaa

SEQ ID NO: 67211 - DNA, 1249 bp, Homo sapiens
cgcagatgggctaccgctccctcctgagcgctcgctcctctcgctcctctcccctcacccgccgccttccctgctgggtccctctccccggtctccacctctcctccctctcctggaagggaaaagtctgccaagctggggactgccacgaccaaaccaacaaaggccgaccgaaggcggagaacttgaaaagaacttgttttgttccagttaaggaacctgcaggaaaatccacacccacattgcctggttttgaactggagagctgcgtgtgtgtgtgtatgtgtgtgtgtgtgtcaagcaagaggcggaggaggcacagactatggtctctgttttgataaggaaactgccagctgtcgaaagttaaccagcagagaggggaagatggcccaggagccagcccctcctgagttttaaactacactgttttctgtccagatattccaatggagacagttggaaaacctgtacttcagagaaaagaagttttccgtggaagttcatgacccacgcagggcttcagtgacaaggaggacgtttgggcacagcggcattgcagtgcacacgtggtatgcatgtccggcattgatcaagtccatctgggctatggccataagccaacaccagttctatctggacagaaagcagagtaagtccaaaatccatgcagcacgcagcctgagtgagatcgccatcgacctgaccgagacggggacgctgaagacctcgaagctggccaacatgggtagcaaggggaagatcatcagcggcagcagcggcagcctgctgtcttcaggatctggtgccaggagacactgcattctactcccaggttctcaggaatcagatagctcgcagtcggccaagaaggacatgctggctgccttgaagtccaggcaggaagctctggaggaaaccctgcgtcagaggctggaggaactgaagaagctgtgtctccgagaagctgagctcacgggcaagctgccagtagaatatcccctggatccaggggaggaaccacccattgttcggagaagaataggaacagccttcaaactggatgaacagaaaatcctgcccaaaggagaggaagctgagctggaacgcctggaacgagagtttgccattcagtcccagattacggaggccgaccgccgcctagccagtgaccccaacgtcagcaaaaaactgaagaagcaaaggaaaacaaagtatataaatgcagtgaagaaactgcaggtgtatt

SEQ ID NO: 67212 - DNA, 441 bp, Homo sapiens
tttcgtcagagccgcgggaggacggttgcctggtattattagcaagcagcaaatatggcggtggcgcgcgtggacgcggctttgcctcccggagaaggatcagtggtcaattggtcaggacagggactacagaaattaggtccaaatttaccctgtgaagctgatattcacactttgattctggataaaaatcagattattaaattggaaaatctggagaaatgcaaacgattaatacagttatcagtagctaataatcggctggttcggatgatgggtgtggccaagctgacgttgcttcgtgtattaaatttgcctcataatagcattggctgtgtggaagggctaaaggaactagtacatctggaatggctgaatttggcaggaaataatcttatagccatggaacagatcaatagctgcacagctctacagcatctc

SEQ ID NO: 67213 - DNA, 929 bp, Homo sapiens
ctccggagcggacttcccgggtcgacgatttcgtcaagccctcagccccacgggtagcagccgctatgcctcttccggggagctgagccagggaagctctcagctgagcgaggacttcgaccctgacgagcacagcctgcagggctccgacatggaggatgagcgggaccgggactcctaccactcctgccacagctcggtcagctaccacaaagactcgcctcgctgggaccaggatgaggaagagctggaggaggacctggaggacttcctggaggaggaggagctgcctgaagatgacgaggagctggacgaggaggaggaggaggtgcctgacgatttgggcagctatacccagcgtgaagacgtagctgtggctgagcccaaagacttcaaacgcatcagcctcccgccagctgccccagggaaggaggacaaggccccagtggcacccaccgaggcccccgacatggccaaggtggcccccaagccagccacgcccgacaaggtgcctgcagctgagcagatccctgaggctgagccacccaaggacgaggagagtttcaggccgagagaggatgaggaaggccaggaggggcaggactccatgtccagggccaaggccaactggctgcgtgccttcaacaaggtgcggatgcagctgcaggaggcccggggagaaggagagatgtctaaatccctatggttcaaaggcggcccagggggcggtctcatcatcatcgacagcatgccagacatccgcaagaggaaacctatcccactcgtgagcgacttggccatgtccctggtccagtccaggaaagcgggtatcacctcggccttggcctccagcacgttgaacaacgaggagctgaaaaaccacgtttacaagaagaccctgcaagccttaatctaccccatctcgtgcc

SEQ ID NO: 67214 - DNA, 581 bp, Homo sapiens
  misc_feature (1)...(581): n = a,t,c or g
tttcgtgctacacacaacccagctgtaccagcatgtgccagagacacgctggccaatcgtgtactcgccgcgctacaacatcaccttcatgggcctggagaagctgcatccctttgatgccggaaaatggggcaaagtgatcaatttcctaaaagaagagaagcttctgtctgacagcatgctggtggaggcgcgggaggcctcggaggaggacctgctggtggtgcacacgaggcgctatcttaatgagctcaagtggtcctttgctgttgctaccatcacagaaatcccccccgttatcttcctccccaacttccttgtgcagaggaaggtgctgaggccccttcggacccagacaggaggaaccataatggcggggaagctggctgtggagcgaggctgggccatcaacgtggggggtggcttccaccactgctccagcgaccgtggcgggggcttctgtgcctatgcggacatcacgctcgccatcaagtttctgtttgagcgtgtggagggcatctccagggctaccatcattgatcttgatgcccatcanggcaatgggcatgagcgagacttca

SEQ ID NO: 67215 - DNA, 993 bp, Homo sapiens
cggacttcccgggtcgacgatttcgtaaattcacatcccgatcaccctgtatcccagcatcttgacatttccgtggcaaccaaagacgggcgcctatcagtacacaataagggcccacggtggcagtgggaacttcagctggtcttcgtcaagccacctggttgccacagttactgtcaagggcgtgatgaccacaggcagtgacatcgggttcagtgtgatccaggcacatgatgtgcagaacccactccatttcggtgagatgaaggtgtatgtgatcgagccccacagcatggagtttgccccgtgccaggtggaggcacgtgtgggccaggccctggagctgcccctgaggatcagtggcctcatgcccggcggggccagtgaggtggtcaccttgagcgactgctcccactttgacttggctgtcgaggtggagaaccagggtgtgttccagccactcccagggaggctgccgccaggctctgagcactgcagcggcatccgggtaaaggccgaggcccagggctctaccacgcttcttgtgagctacagacacggccacgtccacctgagtgccaagatcaccattgctgcctacctgcccctcaaggctgtggatccctcctctgttgccttggtaaccctgggctcctcaaaggagatgctgtttgaaggaggtcccagaccttggatcctcgagccgtccaaattcttccagaacgtcaccgctgaggacactgacagcatcggcctggctctctttgccccccattcctcccggaattatcagcaacactggatccttgtgacctgtcaggccttgggtgagcaggtcatcgccctgtcggtggggaacaagcccagcctcaccaacccctttcctgcggtggagcctgccgtggtgaagttcgtctgcgccccaccgtccaggctcaccctcgcgcctgtctacaccagcccccagctggacatgtcctgtccgctgctgca

SEQ ID NO: 67216 - DNA, 554 bp, Homo sapiens
tttcgtggctgaatcaatggctctgaaggcccggggagcgtgagcgatgcccagctgcacccgggcagggctcgcctttgtttgccagtaaggaggagaggctgtctcagctgcagaggggtcatccctgcttcaagccagtgcctcttcccagctcccatggggaccaccgaagccacgctccggatggaaaacgtggacgtgaaggaggaatggcaggacgaagatcttcccaggccactcccagaagagacgggggtggaactgcttggcagcccggtggaagacacatcctctcctcccaacacgctaaatttcaacggagcgcatcgtaagaggaagacgctggtggccccagagatcaacatttctctggatcagagtgaggggtccctgctgtccgatgacttcttggatacccctgatgacctggatattaacgtggatgacatcgagacccccgatgagaccgactcgctggagttcctggggaatggcaacgaactggagtgggaagacgacacccccgtggccaccgccaagaacatgcccgg

SEQ ID NO: 67217 - DNA, 832 bp, Homo sapiens
tatttcgagcggcagttggggcggtaccagagggtgcctggaaggatacggcccagctccacaagagcgaggaggcgaagcgggtgctgcggtattacctcttccagggccagcgctatatctggatcgagacccagcaagccttctaccaggtcagcctcctggaccatggccgctcttgtgacgacgtccaccgctcccgccatggcctcagcctccaggaccaaatggagaggaaggccatttacggccccaacgtgatcagcataccggtcaagtcctacccccagctgctggtggacgaggccttcagcatcgcgctgtggctggctgaccactactactggtacgccctgtgcatcttcctcatttcctccatctccatctgcctgtcgctgtacaagaccagaaagcaaagccagactctaagggacatggtcaagttgtccatgcgggtgtgcgtgtgccggccagggggagaggaagagtgggtggactccagtgagctagtgcccggagactgcctggtgctgtcccaggagggtgggctgatgccctgtgatgccgccctggtggccggcgagtgcatggtgaatgatagctctctgacaggagagagcattccagtgctgaagacggcactgccggaggggctggggccctactgtgcagagacacaccggcggcacacactcttctgcggaaccctcatcttgcatgcccgggcctatgtgggaccgcacgtcctggcagtggtgacccgcacaggtatgagccgggaggctgggcttgagagagatccgggctcagcacccttgaagaggtggagtgg

SEQ ID NO: 67218 - DNA, 782 bp, Homo sapiens
tttcgtgcacaatggccggcccccgcgggtagtggagcccgtttgttccgcccgtgtcgagcctggagccagaacctgtgaagagcggaagggccaagggacgtcttctccacgccgctccgactccaggggagccgtggcctcctctccgccctagcgctgagaaccgtgggtaccgatggatgtggccgagagccctgaacgggatcctcactctccagaggatgaagagcagccacagggactctcggacgatgacattctgagggacagcgggtccgatcaggatttggacggggcgggggtgagggcttctgatctggaggatgaggaaagtgcagccagggggccgagccaggaggaggaagataatcactccgacgaggaggaccgggcaagtgagcctaaatcccaagaccaggactcagaggtgaatgagctgagccggggcccgaccagctccccctgcgaggaggagggggacgaaggggaggaagaccggacaagcgaccttagggatgaggcctcctcagtcaccagggagctggatgagcatgagctagactacgatgaggaggttcctgaggagccagctcccgccgtccaggaggacgaggctgagaaagcgggggctgaggatgatgaggagaagggcgaaggcactcccagggaggaggggaaggctggtgttcagagtgtgggagaaaaggaatccctggaggctgccaaggagaaaaagaaagaggacgatgatggagaaatcgatgatgaggaaatgtatt

SEQ ID NO: 67219 - DNA, 1498 bp, Homo sapiens
gcggcccgagcccagctgccggccgcgcagcgaataccagccctccgacgctcccttcgagcgcgagacccagtaccagaaggacttccgcgcctggccgctgccgcgccgcggggaccacccgtggatccccaagcccgtgcagatctctgcggcctcccaggcgtcggcgcccattctcggggcgcccaagcgccggccgcagagccaggagcgctggccagtgcaggccgccgctgaggcccgggagcaggaggcggcccccggcggagcgggtggcctggcggccggaaaggcgtccggggcggacgagcgcgacacgcgcaggaaggccgggcctgcctggatggtgcgccgcgccgagggcctggggcacgagcagacgccgctgcccgcggcccaggcccaggtccaggccaccggccccgaggctggcagggggcgcgccgcggcggacgccctcaaccggcaaatccgcgaggaggtggcgagtgcagtgagcagctcctacaggaatgaattcagggcatggacggacatcaagcctgtgaaaccaataaaggccaagccccagtacaagcccccagatgataagatggttcatgagaccagctacagtgctcagttcaaaggagaggccagcaagccaacaacagctgacaataaggtcattgatcgcagaagaatacgcagcctctacagcgaacccttcaaggaacccccaaaggtggaaaaacctagtgttcagagttccaaaccaaaaaagacctcagcgagccataagcccacgaggaaggccaaagacaagcaggcggtgtcaggccaggctgccaagaaaaagagcgcggagggcccgagtaccaccaagccagacgacaaggagcaaagcaaagagatgaacaataaactggctgaggcgaaagagtaaatttccctgcactttccttttactcttctctctctctccctccccccaactttttttttttaaaccaacaaaccaaaaaaggccacaaaattaattagaggcttctcatctgccttggtcctgagggttccaggagctctttggtttggcttcttttgatggaagaatcctgcttcacagactgagtggcaggcctcctcctgagggccagcccctgggagcaccagggaagcgttgccgctggctgtgccctcccctgggcactctgactgcatgctgatgagcaaggcaggcaggtctgagaggcgaaacgaatctcccggcagtgcttgggaagtgtctgtgggggtctcctcctcccagatccccaagatctgttgtcactggtcgattttgaactttaggtacatgtgttcttttcaaaaattcagagaatcgtcatgttgccacagaagctcagcctgggcttcagcaattgacaaaatttgaagaaatattaaacaaaaataacaaaaaaagaaacaaccttggccttaatgtcaataaaagggagttgtgtctgttaaaaaa

SEQ ID NO: 67220 - DNA, 506 bp, Homo sapiens
tttcgttctggggctgccgcggctccgagctcactgctcctcgtggtgggcagcgagttcgggagcccggggctcctcacctacgtcctggaggagctcgaaagaggcatccggtcttgggatgtcgatcctggcgtctgcaaccttgatgaacagctcaaggtctttgtgtcccgacactctgccaccttctccagcattgtgaaaggccagcggagcctgcaccaccgtggagacaacctggagaccctggtcctcctgaacccatcagacaagtccctgtatgatgagctccggaaccttctgttggaccctgcctctcacaagctactggtgttggctgggccctgcctggaggagacgggggagctgctgctacagacagggggcttctcgcctcaccacttcctccaggtcctgaaggacagagagatccgggacatcctggccaccacgcccccacctgtgcagccgcccatactcacctatcacaccccatccaaaaa

SEQ ID NO: 67221 - DNA, 690 bp, Homo sapiens
tttcgtggatgagaccctggccagcaggaagtcggatgccatcttcagagctgccaagaaggacctgctcaccctgatgaagctggaagactcatctctgttggatggccgggtggcgcttctgcacgttcctgcaggcacggtggtgtcaaggcagggagaccaggacgccagcatcctgttcgtggtctcggggctgctgcacgtgtaccagcggaagatcggcagccaggaggacacctgcttgttcctcacgcgccccggggagatggtgggccagctggccgtgctcaccggggagcctctcatcttcaccgtcaaggccaacagggactgcagcttcctgtccatctccaaggcccacttctatgaaatcatgcggaagcagccgaccgtcgtcctgggtgtggcgcacactgtggtgaagaggatgtcgtccttcgtgcggcaaatcgactttgccctggactgggtggaggtggaggccgggcgagcaatatacaggcagggggacaagtccgactgcacgtacatcatgctcagcggccggctgcgctctgtgatccggaaggatgatgggaagaagcgcctggccggggagtacggccgaggagacctcgtcggcgtggtggagacactgacccaccaggcccgggcgaccacggtgcatgccgttcgggactcagaatt

SEQ ID NO: 67222 - DNA, 1316 bp, Homo sapiens
ttttttttttttaggttttagcatatttattttggaaaatcaacctgttttaaagttttatttttactgtacaaaataggattaaatataaaatgacttttgctccaaaatatcattatttttgatttaccagtcttctcatgagaggtcccattaaaaaaattaccttagtctaatctcaataacgtcaaactaattcatatcatgaaatgtgtgctatttcatctttaatatccttaatctcagcttggactattgttaaattagatattttttcacttaagaaagcaatttctttctctctttgtagtaagtcggtaaccaatctcccaatgcgtagtgttaaatcatttactaatggttctaaacgggaaaagtccttctttagattatacacctttggttttagatcatttgcaaaagtcactgtcttcagaactttggctctgtcaccttctaagcttagaaatctatctgtatgtttgtcgaagtcactctttagttcggttagcgtcttcttaacagagttaattctttgtgaattttcagatgctgtctttcggagcgttgctgttcgatcaatactgcttgaaagaagatcacctatattttttactgtatttttttctactttctctattttattttctagttcttgcacagaatctgtcaatgatattacatcagttactaaacctgaaatccgtcgtatatctgtttttacacttgtaatcttgagaccaacatcttttgccatggaagttgtactttggtctacttttgtaatgtcttgagaaagcgtcgtcagactgttgttcagtatatcctgtttttcagttatcctattggaccaagtttttacctcattaatttcttcctgtagacgctttagatgagcaattatttgaaaagacttcaattgttccatgatagcttcagatttctgccacttttctgaaattaaactgattttactttgaagttgttggaattcattggtttctagtttcagtaactggtattggttttccacctttgcaaatttttctgactgctgaaatacaaaccaggccaggcccaggcacgtccccagcgacagcaggctcaggcacgttcgggggtctgcccagcccccgcctccgctgctccgggccacgggggtcttcccgccctcgctccgcttcccgggctccgcagcaggggctcccttgggccccgacttcttccggctcttcacctcagacatgtctggagaccctaggacgacaagcccagggcagcttcttcaccagggggagcaggacgtgccgccttgc

SEQ ID NO: 67223 - DNA, 573 bp, Homo sapiens
tttcgtctggaggaaagcccgtgtggtcgctggcaaaagcgacgggagcaggtaaaccaagggaacatgccagggcttcagagcaccttcctagccatggacacggaggagggggtagaggtggtgtggaacgagctccacttcggagacaggaaggccttcgcggcgcacgaggagaagatccagaccgtgttcgagcagctggtgctggtggaccacccgaacatcgtgaagttgcacaagtactggctggatacctctgaggcctgcgcgagggtcatcttcatcacagagtacgtgtcatcaggcagcctcaagcaattcctcaaaaagaccaagaagaaccacaaggccatgaacgcccgggcctggaagcgctggtgcacgcagatcctgtctgcgctcagcttcctgcacgcctgcacccccccaatcatccacgggaacctgaccagcgacaccatcttcattcagcacaacggcctcatcaagatcggctccgtgtggcaccgaatcttctccaatgcacttccagatgatctccgaagccccatccgcgctgagcgagaggaa

SEQ ID NO: 67224 - DNA, 714 bp, Homo sapiens
tttcgtcgggggcgggctccaccttcacctctgccttctgctctgcttcatgctgcccgaggacgctgccatggctgtgctgacggcctccaaccacgtgagcaacgtcaccgtgaactacaacatcaccgtggagcggatgaacaggatgcagggcctgcgggtctctacagtgccagccgtgctgtcccccaatgccacgctggcactgacggcgggcgtgctggtggactcggccgtggaggtggccttcctgtggacctttggggatggggagcaggccctccaccagttccagcctccatacaacgagtccttcccggttccagacccctcggtggcccaggtgctggtggagcacaatgtcacccacacctacgctgccccaggtgagtacgtcctgaccgtgctggcatctaatgccttcgagaaccggacgcagcaggtgctgatccgcagtggccgggtgcccattgtgtccttggagtgtgtgtcctgcaaggcacaggccgtgtacgaagtgagccgcagctcctacgtgtacctggagggccgctgcctcaattgcagcagcggctccaagcgagggcggtgggctgcacgtacgttcagcaacaagacgctggtgctggatgagaccaccacatccacgggcagcgcaagcatgtgactggtgctgcggcggggcgtgctgcgggacggcgagggatacac

SEQ ID NO: 67225 - DNA, 425 bp, Homo sapiens
ttcccgggtcgacgatttcgtcgggcttcccgccggccaagagattccggccaggctctggacctccgagccgcgctgggtccttccctcccgggaggcaagtggtgatgctgctgactgcgggcagcggcggcagaggaggaggaggaggccggaggcagcagccgcccctggcccagccctcggccagtccctaccctgaagctgtggagctgcagcgccggagtctgcccatcttccaagcgcgggggcaactgttggcccagctccgaaacctggacaacgcggtcctcatcggttggctatacagtgcgctttgatgatgtcacctcagaagacaccaggatcaagtttctgacagatggcatgcttctgcgtgaagcaatttcagactctttggttccgaaatacaagtgggtcatttt

SEQ ID NO: 67226 - DNA, 703 bp, Homo sapiens
gccccttgtccttgtgttcacgtgcatgcaggagcaggctgcacttgttgaagaagaccaggcggcgggcgcagtggttgcaggtgacctcgatgcgcatgctccgacggtcatagtgccgtgccaggctcttctccaatgagaaggcatccccacactccaggcagcggtagccggtgggaggcagggccagcccagcctcagctggtgggctcaggtttggcctataggcagggagcaggttcttgctgttgaggatcttgttgaaggcctccaccaggctggactgggtccgtgatatcactgtgccgccccctgtacttggcccagtagctgtctttgaaggttgcaccatcaccaccgaggcaccattcaccttctgtcccccagtccccagccctgcccgcccgtcagccttaggcagggcttggggcaccaggcctagcacgttcttagcaatcatcttagggctggtggcagtccccccaggcagcaccacagccttgcgagccacactggctgccatcagcatggcagtactggcgttctggatggtggccacaggcagcacagtgcctttcagccttgtaccatcacccaactgtacgctcaccacctttggaccctcagaagtaggtgttgcaggggacagcttcaagaggctagcctcagccaagaaggccccctcagccaagggggcagg

SEQ ID NO: 67227 - DNA, 557 bp, Homo sapiens
ccggacttcccgggtcgacgatttcgtctggccgggaacgcacacaacgtcaaagcagtgaataagcgatttctgcagttcccgtagctgccagcctgtgcagtcctctgtgatgcttggggaccggctcctcggtcacaccccagtcctgctctgaaggttgccgttttccaaacagaaggatggtagctagaggggagatagcaagattctggagtctggaaagccttcacttggtttcttcagatggaggtactgagccctctgccttagtggatgacaacggtagtgaggaggacttcagctatgaagacctctgccaggccagccctcggtacctgcagcccggcggggagcagctggccatcaatgagctgatcagtgatggcaacgtggtctgcgcagaagccctgtgggaccatgtgaccatggatgaccaggaactgggcttcaaagccggggatgtcatccaggttctggaagcctccaacaaggactggtggtggggccgcagtgaagataaggaagcctggttccccgcgagcttcgtcagattg

SEQ ID NO: 67228 - DNA, 501 bp, Homo sapiens
gctcccgctgctgggggagagctgggttttcatggggcggcagccgaggcaggacccgcagccatgaaccgcttcaatgggctctgcaaggtgtgctcggagcgccgctaccgccagatcaccatcccgaggggaaaggacggctttggcttcaccatctgctgcgactctccagttcgagtccaggccgtggattccgggggtccggcggaacgggcagggctgcagcagctggacacggtgctgcagctgaatgagaggcctgtggagcactggaaatgtgtggagctggcccacgagatccggagctgccccagtgagatcatcctactcgtgtggcgcatggtcccccaggtcaagccaggaccagatggcggggtcctgcggcgggcctcctgcaagtcgacacatgacctccagtcaccccccaacaaacgggagaagaactgcacccatggggtccaggcacggcctgaagcagcgccacagctgccacctggt

SEQ ID NO: 67229 - DNA, 431 bp, Homo sapiens
ccacagccgtgggtgggatgtgtggtgtccagggtgcatctgaaatactctgtctttgcagattcatgagaagcttcgctattatgaaaggcaaagtccaaccccagttctgcacagcgctgtggccctcgctgaggacgtaagccccaggtttctccttacaggggctgccccactccccaccctgtagggctccttcatcttgcctcgcttgcttaggggggggacaccgggaatcaggagcccaaaggtgaagaggtgttttcttcccttgtcctcctccttctcttcctctctctgggttccccgaaaggtagggaggaacccgtgagccttggactgggctgggagacactgtgacatggagctgcccacttactgtgtgttctttagcaagtctgcttcctctgctgtaaatgagagcattggat

SEQ ID NO: 67230 - DNA, 1872 bp, Homo sapiens
cccggaattcctgggtcgactatttcgtggaaaggctgccactctgcatgtgcacagtgaccagaagccccttcacgatggggccctcgggtcgcagcagaacttggttcgcatgaaggaggcgctgagggccagcaccatggacgtcaccgtggtcctgcctagtgggctggagaagaggagcgtgctcaatgggagccatgcgatgatggacctactggttgaactttgccttcagaaccacctgaatccatcccaccatgcccttgaaattcggtcttcagaaacccaacaacctttgagttttaagccaaatactttgattgggaccctgaatgtgcatactgtgtttctgaaagaaaaagttcctgaagagaaggttaagcctggtccccctaaggtgcctgagaaatctgtgcgtttggtcgtgaattacctgcggacacaaaaagctgttgtgcgtgtgagccctgaggttcctctccagaatattctcccagtcatttgtgcaaagtgtgaggtcagcccagagcacgtggttctcctcagggacaacattgccggagaggagctggagctgtccaagtccctgaacgagctcgggataaaggagctctacgcgtgggacaacagaagagaaacctttaggaaatcatcacttggcaatgatgagacagataaagagaagaaaaaatttctgggatttttcaaagttaataaaagaagcaatagtaagggctgtttaacgacccccaactccccatccatgcactcacgttctcttacgctgggtccatccctctcgctgggcagcatctcaggggtgtccgtgaagtcggagatgaagaagcgccgagcccctcctcctccaggttcagggccacctgtgcaagacaaggcatcggaaaaggtatctcttgggtcacagattgatttacagaagaagaagcggcgagcgccagctccccctccaccacagccaccaccaccgagtcccctgatccccaaccgcactgaggataaggaggagaacaggaagagcacgatggtttattgctgtgcgtcattccctactcaggccaagcgcttctgatggacgggcctcttcctgacctcggacctttcccagtgtctcttctgccctggctctgattttcctgttgttcttcctcctttcaggataaaagggctcattgtatacccagaatttacttcctttggggtttacatataaatgcattaataacagagatttgtttgattgaggtttatatttttttgaaggaggtaaattatatgcaaattttaggttgataatattcacctgtctgaaattcactgatacttggaaatgttcctgtgaagaactctgctttattttaattcattattaattcatgtttttcttattggatattcagttccagaatttattgccaatttttcttaaaactagattgtatccataaattgaccagtatagtcaatttggatagaactgaaactttctgtctacctggtaaaactaagtgcctaaaaacatgaactataaatgtagttactaggaactcacaacttatatatactatccattcaatgatacataggacccaatgtctttgtgtttttgaggttttcctgttactgtgtactttgccattttacatagttcactaaaaagaaagaagtgggagaagaaggggggtctattcattattctatattatgattctcttcattattctgttctcttcattattctattcatttcttcacccatttattcactaaacagtgacatagtacttacttgatgctaggtattacaccagttttgtgggctataagagtgaataacaagcacgtgacctt

SEQ ID NO: 67231 - DNA, 740 bp, Homo sapiens
ccgatttcctgggtcgacgatttcgtcagaaatcggcctcccgggccaggaccgtgtccaggcagttggtccgctctcgacaatactctttggccagatcgaagcggctcatgtccagataggtgcgccagacatctcgagcctcccgttgcacgtggtaccggaagacagcccgctcactgtaggcccacagctggcctgtggaggagtccttcaccatgtgcttcagcggcccaaatttctccaggaagtgatcccgcagcaccacctgcccggtcagtgtgcacactgcctccacccggtctgccagtagcagcatgaagtggaactgggtcaagacgatggctaggggtgggctggccccatgccctaccccctctgggtactcccagactcgctcctcgctcagcagagagtcagggcgcccacagtccaatgccccatacaacacaccatcccccatcatccaggcgaaggcccggggtgcggagcgcagcttgggggtgtagaaggccaactcactgtagcccaggttgctgggaaactcacggaatgggggtgggtggtccgtgtaagctgcaaagagccctgagaaaccctgggcctcagccccctctgctgctcggcctatgaactggaagaggcgctgccgagtggtggcaataacaaagctacgcccatcagggccccgctcggcctcaagggagcacacaggtgctggaccacgaaatcgtcggccc

SEQ ID NO: 67232 - DNA, 1692 bp, Homo sapiens
  misc_feature (1)...(1692): n = a,t,c or g
gtacggctacacgcccccgccccgcctgctgcccaggaatactttctccaggaaggctttcaagctgaagaagccctccaaatactgcagctggaaatgtgctgccctctccgccattgccgcggccctcctcttggctattttgctggcgtatttcatagcaatgcatctgctcggactcaattggcaactccagcctgcagatgggcacacctttaacaatgggataaggaccggcttaccaggaaacgatgatgtggcaacaatgccatctggaggcaaagtgccctggtcgttgaaaaacagcagcatagacagtggtgaagcagaagttggtcggtgggtaacacaagaagtcccaccaggggtgttttggaggtcacaaattcacatcagtcagccccagttcttaaagttcaacatctccctcgggaaggacgctctctttggtgtttacataagaagaggacttccaccatctcatgcccagtgcccattgactagtcacataggctccactgggcctcacctttcacatggagctgaaatgtggaggcaatgccagggtttggctgtcagcttgcatagcacatcaaatcgcgctttgcagaagcccctgatacgaagtttcatttcattttggaggaagccagatctttacaggcatgtttttcagaaccttcctttccaaaggagctcgagctgtagagaacgattgtgtgaaaccaagagaaccttggtttcttctgaactggactgaaagtgcttttggaaaggactttctggacagaccccttctggttagctggtggcatcctaacaggagacaggaactgaaactgccatctgagtcagtgggcaccctcctggacagctactgagcagagcaaggagaaatctcatggcatgcttgagtctggaaagagaaccggtgtgaagggtgcacaggagggcaccatggatgttttacaagaaagacaaggcttgagttcatgggaactgagagagaagcagcaacagagaaaacaggatgagttcagacgggcagcaccaaatcacatnattagacagaggagaggcttggagtgctgtaattcaggagtttgcaactttctaagcaaagacctttttcctcagtgaaatctatatagaccctgatataaaaagacgaaggatagtttggtacctagagttacaggtcaaatcatggttagattataggttaaaccctggtaggtaggttggggttaaaaaacaccctgcgtgattggcaggaagagaaggaagagatcgagacggtaaatataagaggggggcgctataagaatcccggggggcccattctccggcgggaggaagtaattttccttctaggggaggaaataaaagagcgggactggggaagaccttcttgtgggggggtagggggcacccctcgcaaaatgacgggaggagatagatattatgtgagtgtgtgacggctcgtcgtggcgcgggaagtgtgctcgtgcaggaggaagaaatacaccgcgggcgcgtgaagcgctgtatcaacgggatgaaggtgggcttaacgatggttgtggtatcgtgcgagagagcgggtgcgcgatgacgacgagtcgcgcatgagacagagttggtattggaaggaggtgaatcgtatgaggtgatggtggggacaggtcggga

SEQ ID NO: 67233 - DNA, 959 bp, Homo sapiens
taaacccaggcagcccagccaaggcaggtcttccctcttctaaacctgaaagccctgctgagccccctcgagtgccccatccttatcccataggcccaggcttataccacttggttattctttattctcatgcattccaggatgagatcagagaatgaagagggtcccgaggacagcctgggagagaagcaccagccttcctattggcaagaaatgacccagtgctgggggtagtgaggggccctatgagggtgccggggtcatgcctggagctgctgctgactcctccagccagagccgcactggtctgagcgatcgggtgacacaggcttgaatttctcctgaagcgtttgtgttctctggcatcaatctccttcctctgtcttcctgaacatggccaaggcctccgccagcacaccatcagggtctaggattttgactcaggcgcagcatgccctccccgttgggcttgtcgttctcccactgtccctcgtagatgtcgccgttgctgtaatacatgcggccccacccgctgcgctggctgccacaccagtcaccctcataatactccttgggtccgaaaaactggatcccataacccgatttcttatcacctttccaccagcctgagtagactctcctgcactttcctgtctgttggtcaggaaggctgagggtgccgtagccgtctcgcttcccaaacttccagtccccctcatagatggctcctttcttcttccagacctgtgttcctttcccgtgtttcacgttgtccttccactcgcccacatagtagtcgccattcacagcgtatacctggctccgcaggccgttcctctgggccttccggtcccaccccttccacagggactccgacttttttgggcacttagagactggcatggtggctgcttctgcaaggctggagggtgctgcgggatcgcagcatccagacgaaa

SEQ ID NO: 67234 - DNA, 1226 bp, Homo sapiens
tctctttccctttctcattgcctttcagagaactcttcttgttggtcagtgcccggctaaaagtcctctgggcaatgcccttgagtgcaatcttggggctgctggaagcagggcccacggtggtgagcatgcgactggcggcctccagctcctcgctctcttcgaagctgggcagagtctccagccgctcacagcttgtgtcccgggaccccggcccctcacctgcctttgagccccctttactgttgaaaagtttcagcttttccagcatggacttctgattgttgggggccggcttcatggcttcaggtgtgggcctgggggcctcaggcccaggaggcttgaccgagagcatggataccgtggcactgtgcttcacgctgagggatttgctgcgccaaggcttggtggctgcaccggaatgcggtatgcccgagtaggtactgcaattagtaggggtggagctgctgccgctctccaaggaagcaggtgcattgtcactcattccggggtgggaggaggctgaacttgccaaaggctctttctcgtggctgcttggcggtgggggtggggaggtgactggtttggatttatcatagttgttaaagctctggctgcgtcggttgttagcagtagttgaccctccgcgtgttttggcctcgctgcctgcagcggataccctcgcggtaggacctggaagtctggactgcatttcagcttgtgcttttgactgctgatgtggtgctggctggtgaggctggcacggggcttggggagtgactggcacccctggggcttgctgaggggtgccagcctggcactgggagggggccccggccacctgggatacggcgggcggcagaggtgaggagaggtgctgcttctggggctgctgctgctgctgcttgtatcgggagaggctgaagaagaggcctagaatggccttgaggtttccattcttgatctcttctgcagacagcccctggatgtttattcccttagctgccaggaaattcaagcaggcatctatgttttcaatcatttgggatctgttcttcggacagccattgatgtcttcaatcttttcatttgccacaacctggataatctgggccaggagcacgccatctgtcacatcttgctggagatccctgatgagacgcttgtggccggatttggctaggtaatgattggcccagtctgtcgaaatcgtcgacccgagggat

SEQ ID NO: 67235 - DNA, 450 bp, Homo sapiens
cgggagtgctacgaggccttcctggacatagtgcgaagcctgctgaagggcagcatcgaccccacacagtacaaggacaccctacgcgagatgttcaccatccatgcctacgtgggcttcaccatggacaagctggtgcagaacattgcgcggcaggtgagccgggccggggtggggccggccctgaggacggcggaaatggctctaccatcatttcactccccgctcgggagggggcccgtggtcagcacagcaaacctatcctgttttttcttaattgatacaaaattcgcataacgtaaaattaaccattttgaagtgtacagtttggtaacatttggtacattcacaatattgtgcaaccaccacctctgtctagttccagaacatttcatctttccaaaaggagaccccatccccatcagcagccactggccattcccctgcccc

SEQ ID NO: 67236 - DNA, 453 bp, Homo sapiens
ggtcgacgatttcgcccgccgtcggacgaggagcgggagccgtgggagccgtggacgcagctgcgcctgtcgggccacctgaagccgctgcactacaatctgatgctcaccgccttcatggagaacttcaccttctccggggaggtcaacgtggagatcgcgtgccggaacgccacccgctacgtagtgctgcacgcttcccgagtggcggtggagaaagtgcagctggccgaggaccgggcgttcggggctgtccctgtagccggttttttcctctacccgcaaacccaggtcttagtggtggtgctgaataggacactggacgcgcagaggaattacaatctgaagattatctacaacgcgctcatcgagaatgagctcctgggcttctttcgcagctcctatgtgctccacggggagagaagattccttggggttactcagttttcgcct

SEQ ID NO: 67237 - DNA, 782 bp, Homo sapiens
tttcgtggcggcgctccggctctgaagggctttagccttacggagcccgcggccaaacggtgcctgcggtgcctgagctgagtgaggccgaggccgggaggccgtgcccggagtaaggcgaaagagaatgaaagacgtagataacctcaaaagtataaaagaagaatgagtctctctctgtcgccaggctggagtgcagtggcatgatctcggctcactgcaacctccgcctcccaggttcaagcgattcttctgcctcagcctcctgagtagctgggactacagggtttgtgaaacaggatctgataatcaacctcttggtaataatcaacaatcaaattgtgaatattttgttgatagcctttttgaggaagctcagaaggttagttccaaatgtgtgtctcccgctgaacagaagaaacaggtagatgtaaatataaaattatggaaaaacggattcaccgtcaacgacgatttcagaagttattccgatggtgccagtcagcagtttttgaactccatcaaaaagggggaattaccttcagaattacagggaatttttgataaagaagaggtggacgttaaagttgaagacaagaaaaatgaaatatgtttgtctacgaagcctgtgttccagcccttttcaggacagggtcacagactaggaagtgccacaccaaaaattgtttctaaagcaaagaatattgaagttgaaaataaaaataatttgtctgctgttccactgaacaacttggaacccattactaatatacagatctggg

SEQ ID NO: 67238 - DNA, 771 bp, Homo sapiens
ccgcctgccccaagactgtgtctgccagaatctgtctgagtcactggggaccctgtgcccctccaaggggctgctctttgtaccccctgatattgaccggcggacagtggagctgcgcctgggcggcaacttcatcatccacatcagccgccaggactttgccaacatgacggggctggtggacctgaccctgtccaggaacaccatcagccacatccagcccttttcctttctggacctcgagagcctccgctccctgcatcttgacagcaatcggctgccaagccttggggaggacaccctccggggcctggtcaacctgcagcaccttatcgtgaacaacaaccagctgggcggcatcgcagatgaggcttttgaggacttcctgctgacattggaggatctggacctctcctacaacaacctccatgggcctgccgtgggactccgtggcgacgcatgggttcaaccttccaccagctgagcctggaccacaacctggtggatcacatcgctcgaggcacctttgcagacctgcagaaactggcccgcctggatctcacctccaatcggttgcataagctgccccctgatcccatctttgcccgctcccaggcttccgctttgacagacacaccctttgccccacccttgtcctttatttttgggggtaacccacttcactgcaattgagagcttctctggctgcggaggctcgatcgggacgaaaccctggaaacttgtggttctccagtgggcgtcaagggtctt

SEQ ID NO: 67239 - DNA, 434 bp, Homo sapiens
  misc_feature (1)...(434): n = a,t,c or g
tttcgtggaaaggtagatacgtatatggagtgaggggaataggaggatttgtggcattatctggaacaaccagtctctagatgcagagaggggaggcacagagcggggagtctagtgctgccgggccaaagccttcaaaggggatatgggcgcatgtggcatgtctggccagggtctggtacctttgggtatctggcacatctgtcacccgtcggggctgagtagatctccctgaggcgagtggtccagggccctgctgcccggatgtgcaggctaagcgtgtcctcatggggcgcagaggtcagtgtgaaggggtggtactcggtggtccccagagccaggcaagcgatccgcacccactgccctgacttgtactcaaagccctggngcccgctggaaccgcaggtgggtcactcctggggagggatggtggg

SEQ ID NO: 67240 - DNA, 578 bp, Homo sapiens
atttttgaagagtataggtgtcagatctttttcaagaacatcagaaaatgatcgaataccacatacctgtgtcattcaaagatgtggttgtgggcttcacccaagaggagtggcaccggctgagtcctgctcagagggccctgtaccgggatgtgatgctggaaacctatagcaacctcgtctcagtgggttatgaaggcaccaaaccagatgtgatcctcagactggagcaggaagaagcaccatggattggtgaggcagcatgcccgggctgccactgttgggatggagtttcactctgtcgcccaggccggagtgcaatggcatgatctcagctcactgcagcctcctcctcctgggttcaagcgattctcctgcctcagcctcccgagtagctgggactacaggtgtgtgccaccacgcccagcttattttctatttttagtagagactgggtttcatcatgttggtcaggctagtcttgaactcctgacgtcagatgatccacctgcctcggcctcccaaaatgctgggattacaggcgtgagccaccgcgcccagcttcaaaatattttcaa

SEQ ID NO: 67241 - DNA, 846 bp, Homo sapiens
gaattcccgggtcgacgatttcgtatgactttggctgccaagctggaagactttgagctgacactggagcacctgctcatggatgtgtttatgacggagggccgccgatgtcaagtacatcttcttgatgacaggaagctggaactcctagtacagcccaagctgttggccaaggagcttcttgaccttgtggcttctcacttcaatctgaaggaaaaggagtactttggaatagcattcacagatgaaacgggacacttaaactggcttcagctagatcgaagagtattggaacatgacttccctaaaaagtcaggacccgtggttttatacttttgtgtcaggttctatatagaaagcatttcatacctgaaggataatgctaccattgagcttttctttctgaacgcgaagtcctgcatctacaaggagcttattgacgttgacagcgaagtggtgtttgaattagcttcctatattttacaggaggcaaagggagatttttctagcaatgaagttgtgaggagtgacttgaagaagctgccagcccttcccacccaagccctgaaggagcacccttccctggcctactgtgaagacagagtcattgagcactacaagaaactgaacggtcagacaagaggtcaagcaatcgtaaactacatgagcatcgtggagtctctcccaacctacggggttcactattatgcagtgaaggacaagcagggcataccatggtggctgggcctgagctacaaagggatcttccagtatgactaccatgataaagtgaagccaagaaagatattccaatggagacagttggaaaacctgtacttcagagaa

SEQ ID NO: 67242 - DNA, 646 bp, Homo sapiens
gcgagccctggacctctctgtgcagtatcctccagagaacctgagagtgatggtttcccaagcaaacaggacagtcctggaaaaccttgggaacggcacgtctctcccagtactggagggccaaagcctgtgcctggtctgtgtcacacacagcagccccccagccaggctgagctggacccagaggggacaggttctgagcccctcccagccctcagaccccggggtcctggagctgcctcgggttcaagtggagcacgaaggagagttcacctgccacgctcggcacccactgggctcccagcacgtctctctcagcctctccgtgcactataagaagggactcatctcaacggcattctccaacggagcgtttctgggaatcggcatcacggctcttcttttcctctgcctggccctgatcatcatgaagattctaccgaagagacggactcagacagaaaccccgaggcccaggttctcccggcacagcacgatcctggattacatcaatgtggtcccgacggctggccccctggctcagaagcggaatcagaaagccacaccaaacagtcctcggacccctcttccaccaggtgctccctccccagaatcaaagaagaaccagaaaaagcagtatcagttg

SEQ ID NO: 67243 - DNA, 564 bp, Homo sapiens
tttcgtgggggtatgggcgtgtggtggggcagaaagcctagacccaggtggtcctgagctgggtcccaccctccgagccatggtgcccccctgccagctattgacacagctgcgaagtgcccaggaagaggagaaccggcagctgctggctgaagttcaggccctgagccgggagaacagggagctcctggagcgcagcctggagagtcgggaccacctgcaccgcgaacagcgggagtacctggaccagcttaatgccctgcgccgcgagaagcagaagctcgtggagaagatcatggaccaataccgcgtgctggagcctgtgcccctgccccggaccaagaagggcagctggctggcagacaaggtgaagaggctgatgcggccccggcgggaggggggcccccctggggggctgcgcctgggggccgatggggctggcaacaccgaaagcctggggggccccccggagacggaactttctgagggcatggaagcaaatgggaacagggtcccttcccccgcaacccttgggcggggcccagagttccttttgcttgcggg

SEQ ID NO: 67244 - DNA, 816 bp, Homo sapiens
tcatcaggaacctcaattctcctgcactgctggaagacagtgtgataagacaagcaaaagcagctggaaaaagaatagtcttttatggagatgaaacctgggttaaattattcccaaagcattttgtggaatatgatggaacaacctcatttttcgtgtcagattacacagaggtggataataatgtcacgaggcatttggataaagtattaaaaagaggagattgggacatattaatcctccactacctggggctggaccacattggccacatttcagggcccaacagccccctgattgggcagaagctgagcgagatggacagcgtgctgatgaagatccacacctcactgcagtcgaaggagagagagacgcctttacccaatttgctggttctttgtggtgaccatggcatgtctgaaacaggaagtcacggggcctcctccaccgaggaggggaatacacctctgattttaatcagttctgcgtttgaaaggaaacccggtgatatccgacatccaaagcacgtccaacagacggatgtggctgcgacactggcgatagcacttggcttaccgattccaaaagacagtgtagggagcctcctattcccagttgtggaaggaagaccaatgagagagcagttgagatttttacatttgaatacagtgcagcttattaaactgttgcaagagaatgtgccgtcatatgaaaaagatcctgggtttgagcagtttaaaatgtcaaaaagattgcatgggaactggatcaaactgtacttggaggaaaagcattcagaagtcctattcaacctgg

SEQ ID NO: 67245 - DNA, 1029 bp, Homo sapiens
gggctggactcagctgggaaagcctgtggtgtcagtgtgaagaaggggcatgagctggtgaacatctattgccccatcgtggtctccaacgcaggactgttcaacacctatgaacacctactgccggggaacgcccgctgcctgccaggtgtgaagcagcaactggggacggtgcggcccggcttaggcatgacctctgttttcatctgcctgcgaggcaccaaggaagacctgcatctgccgtccaccaactactatgtttactatgacacggacatggaccaggcgatggagcgctacgtctccatgcccagggaagaggctgcggaacacatccctcttctcttcttcgctttcccatcagccaaagatccgacctgggaggaccgattcccaggccggtccaccatgatcatgctcatacccactgcctacgagtggtttgaggagtggcaggcggagctgaagggaaagcggggcagtgactatgagaccttcaaaaactcctttgtggaagcctctatgtcagtggtcctgaaactgttcccacagctggaggggaaggtggagagtgtgactgcaggatccccactcaccaaccagttctatctggctgctccccgaggtgcctgctacggggctgaccatgacctgggccgcctgcacccttgtgtgatggcctccttgagggcccagagccccatccccaacctctatctgacaggccaggatatcttcacctgtggactggtcggggccctgcaaggtgccctgctgtgcagcagcaccatcctgaagcggaacttgtactcagaccttaagaatcttgattctaggatccgggcacagaagaaaaagaattagttccatcagggaggagtcagaggaatttgcccaatggctggggcatctcccttgacttacccataatgtctttctgcattagttccttgcacgtataaagcactctaatttggatctgatgcctgaagagaggcctagttaaatcacaattccgaatctggggcc

SEQ ID NO: 67246 - DNA, 728 bp, Homo sapiens
tttcgtcacagccctgtcacgaatcccggtcgggttctgggaggcacagcctcggggttgcgggccgggtgcggctcggcggtggaggactcacttcctgctccatccccggctgggccctggggcggaactgatgacgcttgataatgtggctggggacttcagggaagagtgggttacctggacactgcttagagaatcctctccaggaatgccacccagcacagttagaagaatgggctctcaaaggaatttccaggcctagtgtaatctcccagccggagcagaaagaagagccatgggtcctaccactccaaaactttgaggcgaggaagatcccgagggaaagccacacagactgtgagcatcaggtggcaaagctcaatcaggacagttctgaaacagcagaacaatgtggaacatcctcagaaaggaccaataaagatctttctcatactcttagttggggaggaaactgggagcaaggcctagaattagaagggcaacatggaacccttccaggagagggccagctggagtccttttcacaggagagggatttaaacaagctcctggatggatatgtaggagagaagcctatgtgtgcagaatgcgggaaaagctttaaccagagttcctatctcataagacacctaagaacccacactggcgagaggccctatacgtgcattgagtgtgggaaaggcttcaaacagagctcagacctt

SEQ ID NO: 67247 - DNA, 1717 bp, Homo sapiens
gtgccccggctgcgctgttgcccgggcggccgacctccgtgcgtgagcgccggcaggcaccttgcgcgcgcggaacctgctgacatggccaagcatggagccgacgagccatcctccaggtcagggagtccggacagggaaggtagggcctctgaggacagatcgctgcttcatcagaggctggctgtccgggagctcatcgacactgaggtctcctacttgcacatgctccagctctgtgcctctgacatcaggagccgcctccagcagttgccgcagggagatctggatgtcctgttctcaaacattgatgatatcatcaaagtgaacagcagattcctccatgatctgcaggagacagcctccaaggaagaggaacaagtgcagctagttggtaacatatttttggaattccaagaggagttggagcaagtctataaggtctactgtgccagctacgaccaggccttgctactggtggacacgtaccggaaggagccggagctgcagcggcacatccagggcatcgttgaggcggtggtgccgcaagctggatcttcaggcctcagtttcttgctggtaattcctctgcagaggatcaccaggtacccactgctgctgcagaaaatcctggagaacacagtccctgatgccagtgcctatcctgtccttcagagggctgtctctgccctccaggacgtgaacaccaatatcaatgagtacaagatgcgcaaggaagtggcctccaagtacaccaaggtagagcagctgaccctccgggagcggctggcccgcatcaacacacacaccctctccaagaagaccacccggctgagccagctgctgaagcaggaggcggggctgatccccaggacagaagacaaggaatttgatgatttagaagagaggttccagtgggtgtctctgtgtgtgactgagctgaagaacaacgtggctgcttacctggacaatctgcaggctttcctctacttcaggccgcacgaatacaatctggacatccccgaggggcctgcagtgcagtattgcaatttggcaagagaccttcaccttgaggccttcctgaaatttaagcaacggctagaaggcctggtgtggcagccactgtgcagcctggccaaagccctgcttggccctcagaacctgatcaagaagcgtctggacaagctactggactttgagcgggtggaagagaagctgctggaggtgggcagtgtgacctaccaggaggaggccgcccggcacacataccaggcactcaactcgctgctagtggctgagctcccacagtttaaccagctggtcatgcagtggctgggccagatcatgtgcacattcgtgaccctccagagggaccttgcaaagcaagtgctgcagagggcagagggaagcatggcccagctgccccaccaccacgtcccagagcctgccttcaggaagctggtggaggacgcactgggccggacgagtaaccagcttcgctcctttcaagagacctttgagaaagtgcagccacctcccaccacacaaccgctccttccagggtctgaacgccaggtgcaggctctcctgagcaggtatggccctgggaagctgtaccaggtgacaagcaacatcagtgggactgggactctggacctgactctgcctcggggccaaatcgtggccatccttcaaaacaaggacaccaaaggcaaca

SEQ ID NO: 67248 - DNA, 635 bp, Homo sapiens
tttcgtcgggggccctgccagccgctgtgcctgctgccctggagcttacactccaggcggacgggtcccgccgaggcagagggaggctctgaaggtgtgcgctctttctcttcttttctccacagatatcgcaaacggcaccagttcaggggggtaccgcccgcctcccagaaccaaagaagtcatcatcaatggccagaccgtgaaacttaaatactgtttcacctgcaagattttccggccccctcgcgcctcccattgcagcctttgtgataactgcgtaggcaaatcgggatggtcaggactgtcccaagagaaccagactgagccacaaggacctctgatggggagtgctggaccctggggttcccttggcccccagatctcagattatggaccatcagagcaggaatgccctaggggtcttctgaccatcactcaccttttagaggcggaaagccaagcaccatcgtgaatattacaagcatgaatggcagcctcatggaaagaaccctccaggtgaatctgagcatatacaggggaacacctgttcctcttacctcatataacaggcattagtgacagtcacgagacactgcagtatgtatatctttttattaccagatgagatattg

SEQ ID NO: 67249 - DNA, 564 bp, Homo sapiens
aattcccgggtcgacgatttcgtggcggcgcccagttggggcgggttcgttcgcttcgcgttttggccagggcgggggtctgggctttaggcaggtagtatttagtttcacaatgtttggggacctgtttgaagaggagtattccactgtgtctaataatcagtatggaaaagggaagaaattaaagactaaagctttggagccacctgctcctagagaattcaccaatttaagcggaatcagaaatcagggtggaacctgttacctcaattcccttcttcagactcttcatttcacacctgaattcagagaagctctattttctcttggcccagaagagcttggtttgtttgaagataaggataaacccgatgcaaaggttcgaatcatccctttacagttacagcgcttgtttgctcagcttctgctcttagaccaggaagctgcatccacagcagacctcactgacagctttgggtggaccagtaatgaggaaatgaggcaacatgatgtgcaggaactgaatcgaatcctcttcagcgctttggaaacttctttagttgg

SEQ ID NO: 67250 - DNA, 498 bp, Homo sapiens
gttcccgcgtcgacccacgcgtccgagcaaaaccactcttcctaaaatgttagaagctgctcttcgcttaccttggggcctttgcattgggagctgtttttcacatcaaagaatatgtgctgaatggaattttagtattttgctgtcgttttaatattttcgtctggtcttcctcagttcttccagacgctttctgagagaatgggggcaggagctctagccatctgtcaaagtaaagcagcggttcggctgaaagaagacatgaaaaagatagtggcagtgccattaaatgaacagaaggattttacctatcagaagttatttggagtcagtctccaagaacttgaacggcaggggctcaccgagaatggcattccagcagtagtgtggaatatagtggaatatttgacgcagcatggacttacccaagaaggtctttttagggtgaatggtaacgtgaaggtggtggaacaacttcgactgaagttcgagagtggg

SEQ ID NO: 67251 - DNA, 880 bp, Homo sapiens
  misc_feature (1)...(880): n = a,t,c or g
ctccctaccccagactggatcccagaacttaaagatgctaggccacgaccctgagccagcctcaccttaaacatctctgacggccgccgggcagccgcatcgttctgagcccgcagggccaggtcctcctgatactccttgcagttcatctgctcatggatggcctgtagcgggtgagggactcaaggtaagaaggttcctcagggggttaaaaagctgggagaggtgaggtgcagggcaggagtccacaaaggcacttaatgcctctaggtgtagtcactggcaggacctcactttgtaatgcataagccattttacagaagaggatattggcgccagggaggtgaagtcaaggtcatcacatatgctaacagcaaaatnnnnnnnnnnnnnnnnnnnnnnnnnnnnnnnnnnnnnnnnnnnnnnnnnnnnnnnnnnnnaagttctgatgggcacagaaatcccttatacccctagggtgagaccctgcatccctaacaagggcctgcccggggttacaggcccaatgaccccagactgagcttgctcaggctgagtctgagaccaggctccagacctgtttaccggctcctcaccttcaacttttgagatgaagcggcggggacaggcctgggggaaggatcaggtagggctgtctaggtttggggtcagcactcagttgaggacacgggtggagacgtggtatagggccagggtcaggccttagtctgtcacagattcagtcagaagccagggtcagagctcggttcagggtctgagctgaatatgggaccaccttaagtgacaagtgcagggtcaggtttggtcagaggccaagtctatggacttggatgggatcagggctcaatgtgggactggg

SEQ ID NO: 67252 - DNA, 431 bp, Homo sapiens
gaattcgagaagaccaactggatagtaatttccagatgcaatcagaaaatttctgttcttatatcttcacccatgcaaagaccaagaccctgagagagggaatccttgtcactggaaaccggctggggatgctggtggagacctacctggatgccatcaacagtggagcgactccttgtctggagaatgcaatggcagttctggcccagtgtgagaactcagcagccgtgcagagggcagccaaccactacagccagcagatggcccagcaagtgagattccccacagacacactccaagagctgctggacgtgcatgcagtttgtgagagggaagccattgcagtcttcatggagtactcctttaaagataaaagccaggaatttcaaaagatgcttgtggacaccatggagaaaaagaaggaagacttt

SEQ ID NO: 67253 - DNA, 1066 bp, Homo sapiens
  misc_feature (1)...(1066): n = a,t,c or g
ttttataaatcacaaatgtatttaataaagagaagtcaaatgtaacagtaaatgtatttataaataaaattttaaatgtgttcatccacaggctggctcaaatcattttgctgtggtatgtggatctcactttgggaaagtgagaggcacccctgtacccctgcatccccctgacttagtctttgggtatctttggtcaccagcttcttcatcaacaaaatagagtattgaaatagactggtggtcttcagacttttttttaagccatagaaactgtttttttccccccagcgaattttcttttttgtgtgaaccttggcttataaaacacataaatttagagctgcctggtgaaatggtgggctgggcgggaagtctgaattttccctccacaacctccctctcctgccctgtgacatcgctgagatttccagcgctccaaggaatccagtttgaaaagcagcagatctcaaactgttgtccaaggacgctgctggctacatcagaatcccctggaggctaatgaaaaataccagcacctggaccccgatcgagcctgctgaatccccctccagggatggtccctgcggctttttgtctcacactgtccaggtgatctgagggaggtactgattcgggccctccttgctccatggcctgggatccctgaatggaggaaactgttgagtccagttttcgtccaccacagtcacctgctgtaactgggactaagaactggtgaaacaccacaaagatgctgctttgtttgaagccacccactggctcctgccctggggcgccagagagttctccatgacacagagccttcctcctcctccagccctggccataaccctggagccaacccctcagctcaggggccctcccctgccctgcctcggggctgtgagctcactcacctcttaaaccagagcagcaggcggggatggccctgaggcttgagaaacctcctcagctttggcaccagaaaccgtttcagcaggcggtggcccaggaaggtgaggaccacacaggtgagggaattccaacgcncttacgagggtca

SEQ ID NO: 67254 - DNA, 659 bp, Homo sapiens
tacggggaattcgtcacctaccaaggggtggctgtgacgcggagccggaaagaaggcatcgcacacaactacaaaaatgagacggagtggagagcgaacatcgacacagtgatggcgtggttcacagaggaggacctggatctggtcacactctacttcggggagccggactccacgggccacaggtacggccccgagtccccggagaggagggagatggtgcggcaggtggaccggaccgtgggctacctccgggagagcatcgcgcgcaaccacctcacagaccgcctcaacctgatcatcacatccgaccacggcatgacgaccgtggacaaacgggctggcgacctggttgaattccacaagttccccaacttcaccttccgggacatcgagtttgagctcctggactacggaccaaacgggatgctgctccctaaagaagggaggctggagaaggtgtacgatgccctcaaggacgcccaccccaagctccacgtctacaagaaggaggcgttccccgaggccttccactacgccaacaaccccagggtcacacccctgctgatgtacagcgaccttggctacgtcatccatggggtgagtcgcctgctggaggcaccacctccaggggctccctccccaggctctgggtcttc

SEQ ID NO: 67255 - DNA, 248 bp, Homo sapiens
ggctggtttcagtttccaagaaaagtgtgtcctacatggtaagcaaggagggaggtggaaacatctctgtcattgtccttgggggtgcaaaagaatcactggatgctcatcctggaaagttcactctgttcatccgccagcggaaaggatttgttaaaattgctttgacccatggcgcctctctggtcccagtggtttcttttggtgaaaatgaactgtttaaacaaactgacaaccctgaaggagcg

SEQ ID NO: 67256 - DNA, 463 bp, Homo sapiens
atctgttatgacaccttgcgcctgtccatcccctccaccctgcagcaacctgggctggctgagttatgttgctttgaagggagacgggatcctcatcgtcgtcaacacagtgggtgctgcgcttcagaccctgtatatcttggcatatctgcattactgccctcggaaggtagaggccctcccttggacccacctatctgctgcacgccctgccttgctggcagggcaaacactatttcctagaagactgtaacagctggcactgccaccttttccaggaaggcctctccagccttgcaggtccccttcctctatgaagccagccttctgagatgaacacattgcccccatttaggcaaggctggtagctctgcctagcctgagatgcctatgctgcctgccctgggcttcagccaacaagctaaggggaaagggcttttgtctctgatatttctttcagagg

SEQ ID NO: 67257 - DNA, 412 bp, Homo sapiens
acgcgacttctcgggtcgacccacgcgtccgcacatataacacatcacgcaccttttgagtggctaccttggttctcgcctttcttttcaagagaccattcttcaacagaactgtaaggattcttcttggctgaatcagatgtgacgcatcccacttctgcgtttgaggtctagcacataccgctccaagggctttgacgtcacagtgaagcactcacacggaagctggacgggcttcggtggggaagacctcgccaccatccccaaagggttgaatacttattttcttgtcaacattgccactatttttgaatcaaagaatttctttttgcctgggattaaatggaatggaatacttggcctatcttatgccacacttgccaagccatcaagttctctggagaccttcttc

SEQ ID NO: 67258 - DNA, 378 bp, Homo sapiens
  misc_feature (1)...(378): n = a,t,c or g
aggtgaccttccctggggccagcgtgaccacgaacaagaccgtccatctcaacgtgtcctgtgagtgctgggccgggacgcctgggtccctgatggggtgagcgtcaagcctggacactgggtgctgggtcccggaatctgggctggtggtggggtcaggaggacactggctctgccttccctgtttatgcggctcctggggacagacagggccagtgtccccagccctcacagtgatgcgggtctccatgtctttctgtcccagacccgcctcagaacttgaccatgactgtcttccaaggagacggcacagtatccacagtcttgggaaatggctcatctctgtcactcccagagggccagtctctgcgcctggtn

SEQ ID NO: 67259 - DNA, 948 bp, Homo sapiens
gggacaggacccagagccggggcaagacctattccagccagaacgggaagtggatcctagctggggccgaggccgagagccaagacttggcaagctacgctttcagaacgatcacctctccgtgctgaagcaggtcaagaaactcgagcaggctttgaaggatgggtcggcagggctggatccccagttaccagggacttgttactccccacactgccctcctgacaaggcagaggcagggtccacccttcctgagaacctgggaggcgggagtggctcagaagtcagccagagggtccacccctcggacctggaaggcagggagcccacccctgagcttgtggaggacaggaaaggttcatgcagaaggccctgggaccggagccttgagaacgtgtataggggctcggagggttcccccacaaagcccttcatcaaccctctgccaaaaccccggagaacgttcaaacatgccggagaaggggacaaagatgggaagcctggcatcggcttcaggaaagagaaaagaaatctgcctcctctgccctctctacctcccccgcctctgccctcctctcccccaccttcctctgtgaacagaagactgtggaccgggagacagaaatccagtgcagaccacagaaagtcctatgagtttgaagatttactgcagtcttcctctgagagcagcagggtggactggtacgcgcagactaagctggggctgacacgcactttatcggaggagaacgtctatgaagacattctagatccgccaatgaaggagaacccttatgaggacatcgagttacatggtcgctgcctgggaaagaagtgtgtcttgaattttcctgcttctcccacctcttccatccctgacacactcaccaagcagtcattgtccaaacctgcttttttccgacaaaattcagagaggaggaatgtatt

SEQ ID NO: 67260 - DNA, 534 bp, Homo sapiens
gggaaacccttgtcccaaaagcccatgtgtacagcaaaagcaaatgacccggagtcagcagatggatgaactcctggacgtgcttattgaaagcggagaaatgccagcagacgctagagaggatcactcatgtcttcaaaaagtcccaaagatacccagatcttcccgaagtccaactgctgtcctcaccaagccctcggcttcctttgaacaagcctcttcaggcagccagatcccctttgatccctatgccaccgacagtgatgagcatcttgaagtcttattaaattcccagagccccctaggaaagatgagtgatgtcacccttctaaaaattgggagcgaagagcctcactttgatgggataatggatggattctctgggaaggctgcagaagacctcttcaatgcacatgagatcttgccaggccccctctctccaatgcagacacagttttcaccctcttctgtggacagcaatgggctgcagttaagcttcactgaatctccctgggaaaccatggagtggctggg

SEQ ID NO: 67261 - DNA, 582 bp, Homo sapiens
atgtcagtgagacttccacccatcacaaagtttgcagcagaggaagctcgtgaaagtgactgggatggtatcattgcttgccatcaaggtaagctatcttgctcaacctggaattatcagaaatctacaataggcgcttactttctcaagccaaaagagttgaagaaagatgacataactgcaacagcagtggatataacttcttgtggaaactttgctgtaattggcctctcatcaggaactgtagatgtatataacatgcagtctggcatacatcgaggaagttttggcaaggatcaagctcacaagggatctgttagaggtgtcgcagtggatggattaaaccagttgacagttacaactggtagtgaaggattactcaaattctggaactttaaaaacaaaattttaatccattctgtgagcctcagttcatctacaaatatcatgttgctacatatggacagcggcattctgggactcgccttggatgacttctccattattgttctggacatagaaactatgaagattgtcagagagttttctggacaccaaggcccaataaatgacatggctttt

SEQ ID NO: 67262 - DNA, 942 bp, Homo sapiens
ccgtgtcgacccacgcgtccgagagaaagtgggcaaactcagcctggtggatttagctggcagtgaacgagcaacgaagacaggcgctgcaggggacaggctgaaggaagggagcaacattaacaagtccctcacaaccctcggtctggttatctcagctcttgcagatcagagtgctggcaaaaacaagaataaatttgttccatatcgtgactcagttctcacttggctgctcaaagacagcctcgggggtaacagcaagaccgccatggtggctactgtgagtcctgcagctgataactatgatgaaaccctctcaactctgcggtatgcagatcgagccaagcacattgtaaaccacgctgtggtgaatgaggaccctaatgcccgaattatccgggatctccgggaagaagttgagaaactccgggagcagctgaccaaagcagaggcaatgaaatctccagagctaaaggaccggctggaagaatctgagaagctaatccaggaaatgactgtgacctgggaggagaaattaaggaaaacggaggagattgcacaggaacgacagaaacagcttgagagtcttggaatatctcttcagtcttcgggaatcaaagttggggatgataaatgcttccttgtgaatctgaatgctgacccagctctgaatgagcttctggtgtactatttaaaggaacatacattgatagggtcagcaaattcccaagatatccaactgtgcggcatgggaattcttcctgaacactgtattatagacatcacgtcagaaggccaggttatgctgactcctcagaagaacaccagaacatttgtaaatgggtcatctgtctccagtccaatacagctacaccatggggacaggatattatggggaaacaatcatttcttcagactcaatttgcctaaaaaaaaaaaaaa

SEQ ID NO: 67263 - DNA, 614 bp, Homo sapiens
ctcattacgccaagcttggcacgaggagctgcccgacgccgatgtggtcatctctcagcccttctggcccgcatatctcagtgcggagcgaattgccaaggcgcccaagctgaagctggcattgacggcgggaatcggctcggaccatgttgacctggatgctgcgatcaaggcgggtatcaccgtcgccgaggtgacgtactgcaacagcatcagtgtggctgagcatgccgtcatgcagatcctggcactggtgcgcaattaccttccgtcgcaccagtgggtggtcgacggcggctggaacatcgccgacagcgttgaacgcgcctacgaccttgagggattcgatgtcggcatcatcgcggcagggcgcatcggacaagcagtaatgcgtcggctcaagccatttgacgtgcggctgcactacttcgacactcgtcgattgcctgcccatgtggagcaggagctggggctcacctatcacccaaacgtgcactcctggtcagctctgggacatcgtcgacatcatcccccgtgcagccacaacatattacttgttgacgcaaactgatcaattcatgcgcgccgtttgacattgtgaacacgggcgtggg

SEQ ID NO: 67264 - DNA, 622 bp, Homo sapiens
tctcattacgccaagcttggcacgaggaggggtccgagtcgcagggtgatggcagggagtggctggcattgtggtcggtgtggcagacgcagaggtagctcccgccgtgctccatgcagtagcccccatctgggcactgtgtgttcatgttgcagggcatggctgtgatttcaaattcacagagaagcccaaagaatcccagggggcactggcagaggtagctcccgccgtgctccatgcagtagcccccatctgggcactgtgtgttcatgttgcagggcatggctgtgatttcaaattcacagagaagcccaaagaatcccagggggcactggcagagggtggtgttggcgcccaggcatctgcctccgttgcggcactcacagtcatcggggactctctccctgcagtccaggcccatgaagccttcggggtactcgcacacgtagccctggtccgcatccacacaggtgcccccattgtggcaaggggccgagaggcaggcgtctggcactggatggtctcctgtctcacagcgaagtcccttgaagggctcggcacacaagcaggtgtaattccccactaggtcaacacaagagcctccattcaggcaggggtcagg

SEQ ID NO: 67265 - DNA, 426 bp, Homo sapiens
atacgccaagcttggcacgaggcccggagccagggaccacccgtgacgtgctggagaccccagtcgacctggccggatttcctgtgctgctgagcgacacggctgggttgcgggagggcgtggggcccgtggagcaggagggcgtgcggcgcgcccgggagaggctagagcaggctgacctcattctggccatgctggatgcttctgacctggcctctccctccagttgcaacttcctggccaccgtcgtagcctctgtgggagcccagagccccagtgacagcagccagcgcctcctcctggtgctgaacaagtcggacctgctgtccccggagggcccaggtcccggtcctgacctgcccccgcacctgctgctgtcctgtctgacgggagaggggctggacggcctcctggaggcgctgagga

SEQ ID NO: 67266 - DNA, 527 bp, Homo sapiens
ttagtccagtgcggtggaattcgttactgtttggagtttgtttttttcatgcccttgtgcaagagagaaagaaattttgtcctcttggttggaatattccatatggatttaatgaatctgacttgcgcatcagtatccgacaactgcagttatttatcaatgaatatgatacaattccatttgaagctatatcttacctgactggggagtgtaattatggaggaagagtgacagacgattgggacagacgtcttctattaaccatgctggctgacttttataatctgtacatagttgaaaaccctcattataagttttctcccagtggaaactattttgcacctcctaaaggcacttatgaggactacattgaattcattaagaaacttccatttactcaacaccctgagatatttggattacatgaaaacgttgacatctccaaggatcttcaacaaacaaaaaccctctttgagtccttgctcctcacccagggaggcttcaaacagacaggagcctcaggaagg

SEQ ID NO: 67267 - DNA, 456 bp, Homo sapiens
tgcggtggaattcgtggtggtggtggtggagtaggaattggtgttggctttggtgtaggtcttgttgttggcttagaagtaggcctgttggtaatgataggaggaatatatggtgtcttcggaggccaccaagtacttccaacatcaggaatccaattattatttcctgtgtcaccctttaaaatggtaccatttccctttggtacatgaattggacctgaaggttcaatcataacttttgggatatacacacaagtcagtccatcaccctggtatccttctttacatttgcacttgtaggacccacgtacgttataacatcgagcaaagctgctgcactgatactgaccaagtgagcattcgtctatgtcatgacattgatatttgcctccaatatacatgagatcgaagcctttatgacacttgcagatgtagctcccaaaagtgttgacacat

SEQ ID NO: 67268 - DNA, 961 bp, Homo sapiens
gcaccgacgtggctttctaccccaattactttgactgccagacggtggagaagagaatcgaggacttcatcgagtcactgttcatcgtgctggagtccaagcgtctggacagagccacagacaagtctggggataagatcccccttctctgtgtcccgtttgagaaaaaggactttgtaggactggacacagacagcagacattacaagaagcggtgccaaggccgcatgcggaagcacgtgggggacctgtgcctgcaggcagggatgctgcaggactccctggtgcattaccacatgtcggtggagctgctgcgttctgtgaatgactttctgtggcttggagctgccctggaaggattgtgttcagcttctgtcatctatcactatcctggtggaactggtgggaagagtggagctcggaggttccagggcagcacccttcctgctgaagcagccaatagacaccggccaggggcacaggaagttctcattgatccaggtgccctcaccaccaatggcatcaaccctgacaccagtactgagatcggacgtgctaagaactgccttagccctgaagacataattgacaagtataaagaggcgatttcctattacagcaagtataagaatgcgggagtgattgagttggaagcgtgcatcaaggctgtacgtgtccttgcaattcagaaacggagcatggaagcatcagaatttcttcagaatgcagtttacattaaccttcgacagctttctgaggaagagaaaattcagcgctacagcatcctctccgagctctatgagctgatcggcttccatcgcaagtctgcgttcttcaagcgcgtggccgccatgcagtgcgtggccccaagcatcgcggagcctgggtggagggcctgctacaaactcctcctggaaacgctgcccggctacagtctgtcgctggatcccaaagatttaag

SEQ ID NO: 67269 - DNA, 879 bp, Homo sapiens
ttttttttttttcagagaggttgcctttaatagctcagttactattgtttatgttgataaagggtctgttaatgtattgcaaaagagaaccaggaaagaggtccaagacaccatgaaatcctggccggggctcctcaaactttctcttcatgagcagtgtcccccacctgtaggtcatgttggcacagccacgcttccacagttccagaatcaccgtggaccagatgaggttgaacgaggcaaagatcacgtacttgtcatagtcttcccacacaaacaagtagtaaggtaacccaatgacagccatggggattaatgcaaaagtgaaatactccaaaaatccaaagtacagagcaattgtttccccaaagtagccacgaatactgtctatgggctgatacttcaaagcaaaccgagtgtaccaggtgtcctcaagcttcttcagggcttcactgtcatgcagtggaaacacctgaatcacgatgccagacgtgagcaatcttctcaacaatgattttcctggatacaactttgcctgagggtaaccagggatcattttttcatctttagctctaagattttcaagttcatgtttgataatgaattgacattctgccattgtcaggaaatcatcattgttatctccatctttttttttagctataattctgtttttcagccattctttggtttcttctttgacatcctgagcaagttctatgaccaccaaaggtgtgaaagaactctcagaagtatccaaagctgataaggtcactttcatctttgacaaatcagccgccgcagcgctccacgtcttcggaggcgggtccgagagccggcgagaaccggaggcgaattccaccacgctggactagacgt

SEQ ID NO: 67270 - DNA, 522 bp, Homo sapiens
tttcttttaaaccctctgattcacaagtactgaagccaggagagtttgctctgaccttagtccttcccccaacccccagagcaccatgcccggctctgtccctttgccaattcaaagcacctgccgcaacagatggcacgcagtctgcacagaccatggagtcccttggctcagccaaggcctgagcagctcggccgtaaccctgtggtggctgagccctggtcacccagagctggtgtctctgtgcccatccagaagcctcttgccctcctcaatcccagctccagacctggatcagacgccttaccttcctctggaaggtcccatccagtgcagccacaattacggtcttcccggcgttggccatggcctcgcagaactccacgatgtcagggaactggaaagggcacgtggagaaagagtgtgagagcttccaccccagcagcagctccctggagccccagcgaagacgctgccagatctgacaactccggccatttggcccggagtaactcttaattc

SEQ ID NO: 67271 - DNA, 722 bp, Homo sapiens
cttgtcttcatacatgttttgttcttagagcttaaatattgaaggcctcccatccaagggccctataccaccctggttgttggatataaagtacctgtcaccattgttgctggcttatgaagatatgatgaaagagaaggacgagctcaatgccaccctcaaggaggaaatgagaatgtttaggatgcgagcccaagaagtggtgaaagaaaatgaagaattgcaccaagagttaaataagagtagtgctgttaccagtgaggaatggcgtcagcttcagactcaagcaaaactggttttagaggaaaacaagttgttgctggagcagttggagattcagcaaaggaaagccaaggacagccaccaggagcgcctccaagaagtttctaagctgactaaacaactaatgctcctggaggcaaaaacccacggccaggaaaaggagctggcggagaacagggaacagctggagattttacgtgccaaatgccaagaactcaaaacacactcggatggcaaaatcgcagtggaagttcataaatcaattgtgaatgaattaaaaagccaattacagaaggaagaagagaaagaaagggctgagatggaggagttgatggagaagctgacagtcctgcaagcgcagaagagcctgctgttagagaagaacagtttgacagagcaaaacaaagcactggaagccgaacttgaacgagcaatgtatt

SEQ ID NO: 67272 - DNA, 709 bp, Homo sapiens
tgaattcggactgtccctgggcgggacccccacctcagagcctgcaggccggctcccactcctgcagccctctgtcctgctttcaggtgggcctgtccacgtccccctctgtccttaactccattagaccttggctcacgtggacagcaatggagttgggggaagggccctgaaggcagccccaggcctgactgtgggcctccagctacaggcatttgtgtttgggcaccagctaccccacatcccagccggtcatctctgggcataaacccccaccccccagaaaggaggcttcctgtccctcttgggcaccagctcagccaaaagccagaaagctgctctggagcataacctgacccccccacggcgaggcagggcagtcttctcctggctggcactgctctggtcatagaattgatccttcatccacctttaccccaaacaagaggtgtctccctgggtgaggacaaagtggggagggcaacagggctggggcttagagcccctccaccagccatccagggctgccttctcagctcctcccagcgcagcaccggtgccactttagtatttagtaggccacccccgggacctccatcaccacagtgcagaactggaagccacaatgctttgaatagtcgacgcctgtgcctcctgggaggtctctgggcacccctgtggagagtgagtgagaggagagtgtgttctt

SEQ ID NO: 67273 - DNA, 427 bp, Homo sapiens
cccggctcgagccgggataacttattagataatcatcgaagacaaaaatacctggaaaaaatatgggttattactgaggaaatgtacgagtattccaaggtccgctcatggggcaaacagcttctccataaccaccaagccactaatatgatagcattactcacaggggccttggtgactggagtagataaaggatctaaagcaaatatatggaaacaggctgtagtggatgtcatggaaaagacaatgtttctattgaatcatattgttgatggttctttggatgaaggtgtggcctatggaagctacacagctaaatccgtcacacagtatgtttttctggcccagcgccattttaatatcaacaacttggataataactggttaaagatgcacttttggttctattatgccacccttttacctg

SEQ ID NO: 67274 - DNA, 446 bp, Homo sapiens
atttcagaatatgacctgtgagctccatctgacttgctctgtggaggatgcagatgacaatgtctcattcagatgggaggccttgggaaacacactttcaagtcagccaaacctcactgtctcctgggaccccaggatttccagtgaacaggactacacctgcatagcagagaatgctgtcagtaatttatccttctctgtctctgcccagaagctttgcgaagatgttaaaattcaatatacagataccaaaatgattctgtttatggtttctgggatatgcatagtcttcggtttcatcatactgctgttacttgttttgaggaaaagaagagattccctatctttgtctactcagcgaacacagggccccgcagagtccgcaaggaacctagagtatgtttcagtgtctccaacgaacaacactgtgtatgcttcagtcactc

SEQ ID NO: 67275 - DNA, 864 bp, Homo sapiens
  misc_feature (1)...(864): n = a,t,c or g
cagtggcggtccgagatgaatgctactggcgccacgtcttctgggaccaggacctctggatgctcctttttattttgatgtgccacccagaaaccgccagggccaggctggagtaccgcatccgcacgctggacggggccctggagaacgcccagaacctgggctaccagggagccaagtttgcctgggagagtgcagactccggcctagaggtttgccctgaggacatttacggagtccaggaggtccacgtcaacggggccgtggggttggccttcgagctgtactaccataccacccaggacctgcagctatttcgagaggctggtggctgggacgtggtcagggctgtggccgagttttggtgcagtcgtgttgagtggagccccagggaggaaaagtaccacctgaggggagtcatgtcccccgacgagtaccactcaggggtcaacaactctgtgtacaccaacgtcctggtccagaacagcctgcgctttgctgctgccctggcccaggacctgggtcttcccatccccagccagtggctggcggtggctgacaagatcaaggtaccctttgacgtggagcagaacttccacccggagttcgatgggtatgagcctggagaggtggtgaagcaggcagacgtcgtgctcctgggatacccagtccccttctccctgagtcctgatgttcgcaggaaaaatctggagatttacgaggctgtgacgtccccccagggccccgccatgacctggagcatgtttgctgtgggctggatggagctgaaggacgcagtgcgggcccggngcctcctggacaggagctttgccaacatggctgaacccttcaaggtgtggacgg

SEQ ID NO: 67276 - DNA, 640 bp, Homo sapiens
tgtggtagcagttgaatatgccctgtcgaattacctttttgcagctgttggaaaccctaaggacttgtttgaggtttgtttgatggctcaggatttggacacagctgcctcttaccttattatcttacagaatatggaagtccctgcagtaagtaggcaacatgctacccttctattcaacacagcactagaacaaggcaagtgggacctttgtcgacacatgattcgatttcttaaagccattggctctggagaatctgagacacctccatccacacccacagctcaggaacccagttcaagtggtggatttgagttcttcaggaatcgaagcatcagtttatcccagtcagctgaaaatgttcctgccagtaaattcagtttacagaaaacactaagtatgccatctggtccctctggaaaaagatggagcaaagacagtgactgtgctgagaacatgtatattgacatgatgctctggagacatgctcggcgcctcttagaagatgtgaggttaaaggaccttggctgctttgcagcccagctgggctttgaactaattagttggctatgcaaggaacgtacccgagccgcccgggtagacaactttgtaatagccctgaagagactccacaaagat

SEQ ID NO: 67277 - DNA, 449 bp, Homo sapiens
cagtgtggtggaattcacggtctgccacaccagggggccatagtgccgacaggggagcagcctggggtggcagcccaaggccagctgctgtttgttttcctctgatccttgtggaaggcccaaaaggatcttttgtgactggcctaaaatctgccaggctggactgtgctgttcctctctgtcctggggctcctggcctcccgggctgtgtccgcactcagcagcctcttcgcggccgaggtcttccccacggtgatcaggggggccgggctgggcctggtgctgggggccgggttcctgggccaggcagccggccccctggacaccctgcacggccggcagggcttcttcctgcaacaagtcgtcttcgcctcccttgctgtccttgccctgctgtgtgtcctgctgctgcctgagagccgaagccgggggctgccccagtcactgca

SEQ ID NO: 67278 - DNA, 452 bp, Homo sapiens
actagcccagtgcggtggaattcgtgcctgaaggtgcccccatcacagtgacctgtgcggaccctgctgcccacgcaccctcactctatacttggtaccacaacggtcgttggctgcaggagggtccagctgcctcactctcattcctggcggccacgcgggctcatgcaggcgcctactcttgccaggcccaggatgcccagggcacccgcagctcccgtcctgctgccctgcaagtcctctgtgagcagagggtccttggccagggctgcccaggaggagggtggtggagggtgcttctgggctctggtgggagtgggcaaaggactgcagtgggcccaggaatgggcagttggggaaagaggacataggtgctagagaaagagacagtcctataagccctgcctggagcactctgcccacaggactcctgggaaggtgtcacttctagg

SEQ ID NO: 67279 - DNA, 446 bp, Homo sapiens
tgcggaggaattcctgtacccctgctacaggcagggtggatagacagagacccattgtcccttccatgtcctttgttccctcctagggaatctgagcagtcctccgggaacatcagggtggcacatttgagctccctcccttctgctgccccactgccagccatcagctcactctgcccgcagctgcttttggaaggcagctggttcctggggccattgcctggtggtccccagcagcctgcccagggagggctcccacccacctgagagtgcttggacacccagtggcggagcacgttcaagacacgattggtggctgctctgcggatcacaaactccttgtctccattcctctggtctgggggaaaccctggcagcatgcgtggcaaaggggagagaggacagggagagtgcccccaccttgagtctacctgctcttgaggcca

SEQ ID NO: 67280 - DNA, 497 bp, Homo sapiens
cccttgatgaccatctagtcagtgcggtggaattcccatgacagacgtatctgactggtcatgtggtcagcaagcctcgcctttggtcaggccctggagggtacagctgacccatagggccacttccatggcactgggcaagtggctgtattggaaatgaagtcgttgcccccgatttctttggggccaggttgagctttcctgcccagagcacggaggctaaagggggtgggctttggactggattggggctgacctcagcctacacctgcaggaggaggtggagacagaggtggcctgggaggaatgtgggcacgtcctactgtcactgtgctacagctctcagcagggtggcttgctggtaggtgtgctgcgctgcgcccacctggcccccatggatgccaatggttactcggaccccttcgtgcgcctgtgagtgaactggggtaggcaggcgggaggtgaggataaggcggtgactcctcacctctccaggg

SEQ ID NO: 67281 - DNA, 568 bp, Homo sapiens
cagcgtgacgaggaggagccggacggcgtcccagagaagggcatgagctcgggccccagtgccaggaaaggcaaggggcagatcgagaagaggaagctgcgggagaagcggcgctccaccggcgtggtcaacatccctgccgcagagaggtaaagagttcagaagtaagataaaagaagaccaaagacaaactacttcagggctatttcgtgaagcagaaacagcacttcatcaggtggcttttgcgggaggaagcactgttaatgcccttaggcgtaagggtaaatgattcaacttacttaaggaaatacattttcttctaacttgaaacattaaaaacaaaaaatatctacaaacttttactatagaaagatcaaatgtggccagcactttgggaggctgaggtgggcagatcacctgaggtcgggggttctagaccagcctgaccaacatggagaaaccctgtctctactaaaaatacaaaattagccaggcgtggtggcacatgcctgtaatcccaggtactcaagaggctgaggcaagagaatcacttgaacccgggggacag

SEQ ID NO: 67282 - DNA, 840 bp, Homo sapiens
ctcgtgtggtggaattcgaagccttcaacatggactctgcctactcagaacaagctgcggtgctcctgcagaggagcaggccatcccggggaggcacctctgcctggggcaagtgttccctgccgaagtttaccgtccccaaaggcagacttggcgtgacgaggataggagacttgtccctgcaggatatgaggaaggtaccttctctggccctcatagagctgaccgcgctctgtgacatcctcggcttggacctgaagaggagcaaggcggggaagtggaaagcggcagaaactcgcctctttggtgtgccccttgacagcctgctagaagctgaccacaaagtcctccccagcacacaggtcccgctggtccttcaagccctgctgtcctgtttggaaaagagaggactggacatggaaggcattctcagggtgcccggatcccaggccagggtcaaggttcatccggaagctgccgacacctttgctcacggctgagtacctcccggccttcgccgtggtgcctaacatccccaacctgaagcagcgcctgcaggttcttcacctgctcatcctcatcctcccagaacccaacagaaatgccttaaaggcactgctggaattcctcaggaaggtggtggcccgggaacagcacaacaagatgactctgaggaatgtttccaccgtgatggcccctaacctctttctgcaccaagggcggccccccaagctccccaaaggcaaggagaagcagctggcagaaggggcagccgaggtggtgcagataatggtgcactaccaggatctgctgtggacggtcgcctctttcctggtcgcc

SEQ ID NO: 67283 - DNA, 428 bp, Homo sapiens
tggtggaattctcgccatggaatatgcaccaggcggcactctggctgagttcatccaaaagcgctgtaattccctgctggaggaggagaccatcctgcacttcttcgtgcagatcctgcttgcactgcatcatgtgcacacccacctcatcctgcaccgagacctcaagacccagaacatcctgcttgacaaacaccgcatggtcgtcaagatcggtgatttcggcatctccaagatccttagcagcaagagcaaggcctacacggtggtgggtaccccatgctatatctcccctgagctgtgtgagggcaagccctacaaccagaagagtgacatctgggccctgggctgtgtcctctacgagctggccagcctcaagagggctttcgaggctgcgaacttgccagcactggtgctgaagatcatgg

SEQ ID NO: 67284 - DNA, 448 bp, Homo sapiens
ttagaccagcgtggtggaattcggagaggctgctacagaaggagaggctgctggagcaggaggagaggctgcaaaggcaggaggagaggctgagggaacaggaagagaggctgtgggagcaggagcagaggctgagggagcaggaggagaggctgctggaactggagcagaaagccaagctctgggacgagcaggcagagacacacatgcaaaccatgcggaatgactgcaccaccatcagccacatgctctcgcagaaccacgagcttgataagcagctgggcgagccacagtacgacttccaggagctggtgggttgccccacctggggagcctgccttcctccctagccctccaggcctttgtttccccacctgtaaaatgggcatatgtagccctcacgtgaaatggtacttctaaaggaacctgtgagccagagccctgctct

SEQ ID NO: 67285 - DNA, 495 bp, Homo sapiens
cattctggtggaattcccgaagacagaggaggctcgaccctcacccgccccaggaccagggacccccaccgtgacccctaccaggaccccttccagaacggctcctggtgccctgaccgccaaacccccgcttgcccccaagccgggaaccacagtggcctcaggagtgactgcacggagtgcatcaggacaagtgacaggtgggcatggagctgccgcagcaacatcagcatcagcaggacaggctcctgaggacccctcaggccctggcacaggcccctctgggacttgtgaggctccggtagctgtcgtgaccgtgaccccagctccggagcctgctgaaaactctcaagacctgggctccacgtccagcctgggacctggcatctctgggcctcgagggcaggccccggacacgctgagttacttggactccgctgagcctcatgtctgggaccttggagtccttggcggatgatgtgagctccatgggct

SEQ ID NO: 67286 - DNA, 635 bp, Homo sapiens
tgaagacccctgaacagcgtggtggaattctttatggatacttgtctctcaggggcaattaggtggaacatgcgtgaccagcttttacacatgaggaaatggaggctcacagaggcagaatcactaagcaactccccttaaagtcacccacccaggtggagctggaatttgagcctaagcagccaggctgccctgggcagcggtgggtgacaggttggcagagagcaggtttttgtctgtctgggtcttacccctttagccccatagtcaggcaggtggactcgtgaagctgtgggcagctttatcctctgaggcggtgggtctcaagtgtccagctcacctggcactcagctgtggggctcgtgactgcagcttaggactagaccctcatccttcctggggtcagtgtttagtggccaaggctgggggatgctgaggaagactgggggcccaggctgggaggcagaaggggaaggtccttcttcttggtgtccacttgcctgtgtcactgcccctgcaggtggtggagttgcccgtgacagagcgccagattgagcgcgaacacctcattcagctgcggcgctggcaggagacccggggtgagctgcagtgccgctccccgcccaggctgcatg

SEQ ID NO: 67287 - DNA, 1267 bp, Homo sapiens
aagcgcggtggaattcgtctctggctcaactcagtgggatcattagactcatgtcttacagcctggtgacatttccatgctttaagccggagtggtctgttcagtgaccacagtactgcaacacctgccaaccagtgtctgaaaatagtggctcatgtattttgtccagtttctagttgcttacagtgggagggtatcctggactgtatttcccctgcatggtcagcagcgcacctccattgagtctgcatgtgtttaatctgatggctctgttggctggcgtctgttataggttataagtatagctgcctgtgcttccaccacgagcacctggggtgtcttgtggcatgattgagctagctctgaagctgactccctcttctcactccctgccttttctcccttaccttttgcagaaaaggggtgagcggtactgggcccaggagcaggagccactgcagactgggcttttctgcatcactctgataaaggagaagtggctgaatgaggacatcatgctcaggaccctcaaggtcacattccagaaggagtcccgttctgtgtaccagctacagtatatgtcctggccagaccgtggggtccccagcagtcctgaccacatgctcgccatggtggaggaagcccgtcgcctccagggatctggccctgaacccctctgtgtccactgcaggttttggaaatgggcttcaggagggtctggtgaggcagaggggacagagcatggaggggagtacagggcatggggctagtcttgtagtctgagtgcctattttgagaacccttgctcaccctccatggactgtaattgtgagcacttgttcagcacagactcagctggggaataagcacacagctcttgctcaacaaaatgtaagtgattaaaaaggttttccttgttcagatataatctgaagattctgggaatcaagaggctctgcaggggatccatcaggaccctcacccccatccccaaatgccccatctaaaaggggttgtggtcaggacctgaccaggcacactctgattctcttgtcagtgcgggttgtgggcgaacaggcgtcctgtgcaccgtggattatgtgaggcagctgctcctgacccaggtacgatacaggcatcctgtgtgtgcagtgtgctgcccatgaccacgtgtcctgctcaagtgccttgtctgtctgccccagatgatcccacctgactttcagtctctttgatgtggtccttaagatgagggaagcagcggcct

SEQ ID NO: 67288 - DNA, 647 bp, Homo sapiens
tgcggaattccagatgcactaaatgtgagaaggtctgcaatcggcattcatcccttattcaacatcagaaagttcatacaaagaaaaagaaactatttgagtgtaaggaatgtgggaagatgttttctggaactgcaaaccttaaaatacatcagaatattcattctgaagagaaacctttcaaatgcaataaatgtagtaaagttttcggccgccaatcatttcttattgaacatcaaagaattcatactggagaaaaaccctaccagtgtgaggaatgtggaaaagccttcagccaccgaatatctctcacacgacataagagaattcatactgaagatagaccctatgaatgtgatcagtgtgggaaggccttcagccagagtgcacacctcgcccaacatgaaagaattcacactggagagaagccatatacatgcaaaacatgtggtaaggcctttagtcagcgcacatctcttattctacatgaaagaagtcatactggagagaaaccctatgaatgtaatgaatgtgggaaggcatttagcagtggctcagaccttattcgacatcagagaagtcattcttcagagaaaccctatgaatgtagtaaatgtgggaaggcatatagtcggagttcatccctg

SEQ ID NO: 67289 - DNA, 746 bp, Homo sapiens
cgagtgcgctggaattccaagatgggagggcgagggggccatacccggtggtcggggttggcctgaaggggctatgaccagctgctgccctggtcactgcctttgtggcttctaccggtctgggcctgctccccagaaggctgtacactgggaggagctgccaggaggttgtgcctggtgtctggcctgacctctgagtgctgcggttccccaggatgcgggaagtggagctgggctgggggaaggtgttgctggtgaaggacaatggggagttccacgccctgggccataagtgtccgcactacggcgcacccctggtgaaaggcgttctgtcccgtggtcgggtgcgctgcccctggcacggcgcctgcttcaacatcagcactggggacctggaggacttccctggcctggacagtctacacaagttccaggtgaagattgagaaggagaaggtgtacgtccgggccagcaagcaggccctacagctgcagcgaaggaccaaggtgatggccaagtgtatctctccaagtgctgggtacagcagtagcaccaatgtgctcattgtgggtgcaggtgcagctggcctggtgtgtgcagagacactgcggcaggagggcttctccgaccggatcgtcctgtgcacgctagaccggcaccttccctacgaccgtcccaagctcagcaagtccctggacacacagcctgagcagctggccctgaggcccaaggagtttttccgagcc

SEQ ID NO: 67290 - DNA, 1221 bp, Homo sapiens
gggtggaattcgggcagcctgcgcctgggtaccgaggctgctgcgcggcggacagcgggcgcgatgtatctccgcagggcggtctccaagactctggcgctgccgctgagggcgccccccaaccccgcgccgctcggaaaggacgcatctctgcgccggatgtcatctaacagattccctggatcatctggatcaaatatgatttattatctggttgtaggcgtcacagtcagtgctggtggatattatgcttacaagacagtcacatcagaccaagccaaacacacagaacataaaacaaatttgaaagaaaaaacaaaagcagagatacatccatttcaaggtgaaaaggagaatgttgcggaaactgagaaagcaagttcagaagccccagaagaacttatagtggaagctgaggtggtagatgctgaagaaagtcccagtgctacagttgtggtcataaaagaggcatctgcctgtccaggtcacgtggaggctgctccggagaccacagcagtcagtgctgaaaccgggccagaggtcacagatgcagcggcgagggaaaccacggaagtaaaccctgaaacaaccccagaggttacaaatgctgccctggatgaagctgtcaccatcgataatgataaagatacaacaaagaacgaaacctctgatgaatatgctgaactagaagaagaaaattctccagctgagtcagagtcctctgctggagatgatttacaggaggaagccagtgttggctctgaggctgcttcggctcaaggctaatctccagccggtagacatttcagcaacaaatgccatagggtgtctgataagtgcttttgtgtttttagtacacttagtttaaaaaaaaaaagacttattttctagaaaacgttaatgggtcttgaagatttttggcatccactgatagattttaggactgagagacttgagattgtacatttcttactactcttctactgtctgagatcagaatatgacattgcagtaaagagcttaaatagtttcatctttggtttttttttctagacacttttcttttatcccagtcatctctgaatttacattttatattaaagaaattgagctatccatacaacctgtatttactttaatttcactactgtttcagcttactttattgtatgatatgtaggtctaaaatatagtttgagtcaaataaaattagaaactgct

SEQ ID NO: 67291 - DNA, 427 bp, Homo sapiens
gtccagtgtggtggaattcaccaggtgtccggggcagtggtagtatctgggctgctgcagggcatgatggggctgctggggagtcccggccacgtgttcccccactgtgggcccctggtgctggctcccagcctggttgtggcagggctctctgcccacagggaggtagcccagttctgcttcacacactgggggttggccttgctgtacgtgagtcctgagaggcgtgggatggtgcccagtgggggtgtatggggggactaggggagggcagaactgctggtcctatcagattcagcagcgactggaatagggacatattttatatttggaatccaagacttttccttgattcatctggtctccttgaatttcacactgttttctgctgtcccccaaggtcacttcctattccttccatgggagt

SEQ ID NO: 67292 - DNA, 1439 bp, Homo sapiens
tgaattcctcaggggtgaagctcttgcaggcacttggccttagtcctgggaatgggaaagatcacagcattctgcattcaaggaatgatctggaagaagccttcattcacttcatggggaagggagcagctgctgagcgcttcttcagtgataaggaaacttttcacgacattgcccaggttgcgtcagagttcccaggagcccagcactatgtaggaggaaatgcagctttaattggacagaaatttgcagccaactcagatttaaaggttcttctttgcggtccagttggtccaaagctacatgagcttcttgatgacaatgtctttgttccaccagagtcattgcaggaagtggatgagttccacctcattttagagtatcaagcaggggaggagtggggccagttaaaagctccccatgccaaccgattcatcttctctcacgacctctccaacggggccatgaatatgctggaggtgtttgtgtctagcctggaggagtttcagccagacctggtggtcctttctggattgcacatgatggagggacaaagcaaggagctccagaggaagagactcttggaggtaatggcactgttacagaatttcacagatctcagctggtggttttcttcaggttccagcctctcttggcatctgctgccttgtttcctgtggaaacagcaagcagctctgcacggttcttctcatccttgccttgcagaagagcctgtttatttttgcctctgtcacttcctgaagaaatcagtgtattttcaatacagtgtggctcctttctcctaggttcagttaggtcgtgtttcctagcagtgtcactattcaagggttgagtccacgtcttgctctctggagaatgtcaatgtaatgtatttttcccatcgtacagagtctttgttgatttgcaaaatgttggatttggggttcatacccatattttttgttgtcatgggcatttaggtcatcagtctgttctcttatttgcttgttcttttgttaattcattcccatggctatatgccagacacagcatgatgcagaaggaatacgacagaggatgacacaggccctgccctcagctcacagtttactgccagagatagacacttggaaaaagtaattgcaggccgggcatggtggctcacgcctgtaatcccagcactttgggaggctaaggcaggcagatcacctgaggtcaggagtttaagaccagcctggccaacatggtgaaactccgtctctactgaaaatacaaaaattagccaggcgtggtggcgggtacctgtaatcccagctactcgggaggctgaggcaggagaatcgcttgaacctgggaggcagaggttgcagtgagctgaggtcgcgccattgcgctccaacctgggcaacagagtgaaactccatctcagaaaaaaaaaa

SEQ ID NO: 67293 - DNA, 354 bp, Homo sapiens
tactgcacacttcatcccacaggcaccctaaggtatgtcccaaaaccttgctaattccctagagctatggttaagctcttacttcatcatctgcttttatagacttcagtttcatcaggagctgaaagcggagcaggttgttggttccaaatgtctgcaattccagcagtttgcaaagggcaaccagctgagggcgatctaagtgttccagggccagctggtcctcaaatagtttggagaagcgaactatctcctttgtgctgggcttgtggcctgtctggacctgcttcacgtaggatgagagctgtgtagaggcatcgcccatcttggctctgttcctccttgccatttctg

SEQ ID NO: 67294 - DNA, 1061 bp, Homo sapiens
  misc_feature (1)...(1061): n = a,t,c or g
cgtggtggaattcatgagagacgcttgctctcccagaagacagacaatgagatttggaacaccttcttccacgggcgctatctgatcctacttatgggcatcttctccatctacacgggtttgatctacaatgactgcttctccaagtccttgaacatctttggctcttcttggagtgtccaacccatgttcagaaacggcacatggaatactcatgtaatggaggaaagtctatatctgcagctggacccagccataccaggagtgtattttggaaatccatacccgtttgggattgatccgatttggaacttggcttcaaacaaactcacatttctgaactcgtataaaatgaagatgtcggtgatcctgggaattgtccagatggtttttggtgtcatcctcagccttttcaatcacatatacttcagaagaactctcaacatcattctgcaatttatccctgagatgatttttatcctgtgtctgtttggatacctggttttcatgatcattttcaaatggtgctgctttgacgtccacgtatctcagcacgcccccagcatcctcatccacttcatcaacatgtttctgtttaactacagtgactcttccaacgcacccctctacaaacatcagcaagaagtccaaagtttctttgtggttatggctttgatttctgtgccgtggatgcttctgattaagccgtttattcttagagccagtcatcggaaatcccagctgcaggcatccaggatccaagaagatgccactgagaacattgaaggtgatagctccagcccttctagccgttctggccagaggacttctgcagatacccacggggctctggacgaccacggagaagagttcaactttggagacgtctttgtccaccaagccatccacaccatcgagtactgcctgggctgcatttcaaacacagcctcctacctgcggctctgggccctcagcctggctcatgcacaactgtctgaagtgctctggactatggtgatgaacagcggccttcagacgcgaggctgnggaggaatcgtcgg

SEQ ID NO: 67295 - DNA, 750 bp, Homo sapiens
  misc_feature (1)...(750): n = a,t,c or g
gctggccttagcccaggcccatcagattgctcagaatctccaccaccacttgcattagttgaggcgactcccagtttatttctctaagattggatgggtggatttcatattaaaaaaaaatttggctagttcttttggaacatattgtaaacagctatggttttccaaagggcaggaatgtattcattcattgttctctttctcccatctcacagaataaagcccttttccaccaattcagtcttaaggagaactggctccagcatagaggaactgtgactgaaacggaggaaagtgagtatggtttgaagtgagggtttgggggtgggcagcagttagccaccatttttctcctacattggcatatcagcctgactaaccttcatttccagctgtcacccctcagataagcacgttagcctcaaacagcatggtttttcttttctttatttgagcattatggttttcttagatcacataatactgtcccaagcaccaaggatacttataatttgggaagcaaggaaaggagacaatgcctagagcctccttgcattcttgagaagaggtaaaaatgaacgggagactcagccttttcctcctagaaccatctcctccctgccttcatcagcccattgtctatgactaactggaaggatcaccanagtcaatgtgcagatttgggctgagtcagtccatgactcagtccacgagaagaanactctgtggagagaaggctgtacngtaaaa

SEQ ID NO: 67296 - DNA, 420 bp, Homo sapiens
aattcccgggtcgaggatgcccccaaagcccagaccgggcctccccgggtggacaaggttggtggtcctgcctgtgccagcctgacagcacccatggggcaccgggatggggaccaagccctgtgagaggcatcggggagggtgctgggcccgggcgctgtactcacccgcaccctctgcagatgacccagtgctactttgaggggggctaccaggagacccctgtgtacctgctggcagagctgggctatgggcacaagctccatgggccctgcctcatcatcgacagtaacaggtgggctgaagtccggccagggtggaggatgtggacgggtccactgcggggcccctggtgcagggttctctggcccaaggctgcaggggcctgcaggactctgtatcccaccatcgatggggtgg

SEQ ID NO: 67297 - DNA, 411 bp, Homo sapiens
tgtggttgtggaagttgcggtggctgtggtggccgctgcggtggtggctgtggtggtggctgcagtggtggctgcggtggtggctgcggtggtggctgtggtggtggctgtggcagctgcaccacctgcaggtgctaccgggtgggctgctgctccagctgctgcccctgctgccgcggctgctgtggaggctgctgcagcactcccgtgatctgctgctgccgccgcacctgcggctcgtgtggctgtggctatgggaagggctgttgccaacagaaatgctgctgccagaagcaatgctgctgctaggcgggcccccggcctctgggcaggggctgcaggtatctgccctgtaggtaagactcccatccttcccatcctgtctggtctccccctcctctgtggtcttga

SEQ ID NO: 67298 - DNA, 411 bp, Homo sapiens
aagatccccagccggggtattaccctgaaggccgccaccaagcaagcgatgctgtactggctgcagcagctgcagatgaagcgctgggaattccacaacagcccgccggcacctcctgccacccctgatgccgccctggctgggaatgggcccgtcctgcacctcgagctagggcaagaagaggcagagctggaggagttcctgtgccctgtgaaaacaccccctgggctagtgggcgtggcagctgccttgcagcccttccctgcccttcagaatatttccctcaagcacctggggactgaaatacagaacacaatgcacaacatccgtggcaacaagcaggcccagggaacaggccatgaacctccaggggaagattctccacagagtggggagcctcaaagggaagaa

SEQ ID NO: 67299 - DNA, 577 bp, Homo sapiens
cccgggtcgacccacgcgtccgctttgacagcctggccgctgccaatagagccatctgtcacatgaatggagtgcggctcaacaaccgccaggtgtatgttggcagattcaaattcccagaagagcgggcggctgaggtcagaaccagggatagagcaactttcaccaatgttttcgttaaaaacattggagacgacatagatgacgaaaaactgaaggaacttttctgtgaatatgggccaactgagagtgttaaagtaataagagatgccagtgggaaatctaaaggctttggatttgtgagatatgagacacacgaggctgcccaaaaggctgtgctagacttgcatggaaagtccatcgatggaaaagtcctctatgtagggcgagcacagaagaaaattgaacgcctggctgagttgaggcggagatttgaacggctgaggttaaaagaaaaaagtcggcccccaggggtgcctatctatattaagaacttggatgagacaatcaatgatgaaaaactgaaggaggaattttcttcctttgggtcaattaatccggccaaagtgatgatggg

SEQ ID NO: 67300 - DNA, 2115 bp, Homo sapiens
gatctgtgcgtgggggatgtggtctgtctccgcaaggacaacatcgtcccagccgacatgctcttgctggccagcacggagcccagcagcctgtgctatgtggagacggtggacattgacggggagaccaacttgaagttcagacaggccctgatggtcacccacaaagaactggccactataaagaagatggcgtcctttcaaggcacagtgacgtgtgaggcgcctaacagtcggatgcaccacttcgtggggtgcctggaatggaatgacaagaaatactccctggacattggcaacctcctcctccgaggctgcaggattcgcaacacagacacctgctatggactggtcatttatgctggttttgacacaaaaattatgaagaactgtggcaagatccatttgaagagaaccaagctggacctcctgatgaacaagctggtggttgtgatcttcatctccgtggtgcttgtctgcctggtgttggccttcggcttcggtttctcagtcaaagaattcaaagaccaccactactacctctcgggggtgcatgggagcagcgtggccgcagagtccttcttcgtcttctggagcttcctcatcctgctcagcgtcaccatcccgatgtccatgttcatcctgtccgagttcatctacctggggaacagcgtcttcatcgactgggacgtgcagatgtactacaagccgcaggacgtgcctgccaaggcccgcagcaccagcctcaacgaccacctgggccaggtggaatacatcttctcggacaagacgggcacgctcacgcagaacatcttgaccttcaacaagtgctgcatcagcggccgcgtctatggtgaacccctacctctggaacaagttcgccgacgggaagctgctcttccacaatgcggccctgctgcacctcgtgcggaccaacggggacgaggccgtgcgggagttctggcgcctgctggccatctgccacacggtgatgaccagctgttgtaccaggcggcctcccccgacgagggggcgctggtcaccgcagcccggaacttcggctacgtgttcctgtcccgcacccaggacaccgtcacgatcatggagctgggggaggaacgggtctaccaggtcctggccataatggacttcaacagcacgcgcaaacggatgtcggtgctggttcgaaagccagagggcgccatctgcctgtacaccaagggcgccgacacggtcatcttcgaacgcttgcacaggaggggggcaatggaatttgccacagaggaggccttggctgcctttgcccaggagaccctgcggacactgtgcctggcctacagggaggtggctgaggacatttacgaggactggcagcagcgccaccaggaggccagcctcctgctgcagaaccgggcacaggccctgcaacaggtgtacaacgagatggagcaggacctcaggctgctgggagccacagccatcgaggacagactccaggacggtgtccctgaaaccatcaaatgtctcaagaagagcaacatcaaaatatgggtgctcaccggggacaagcaggaaacggctgtgaacatcggcttcgcctgcgagctgctgtcagagaatatgctcattctggaggagaaggagattagccgcatcctggagacctactgggaaaacagtaacaaccttctaaccagggagtccctgtcgcaggtcaagctggccttggtcattaacggagacttcctggacaaactgctggtgtccctgcggaaggagccgcgcgccctggcgcagaacgtgaacatggacgaggcgtggcaggagctcggccagtccaggagggatttcctctacgccaggcgcctgtccctgctgtgccggaggttcgggctcccgctggctgcaccgccagcccaggactccagagcccgccgtagctccgaggtgctgcaggagcgcgccttcgtggacctggcgtccaagtgccaggcggtcatctgctgccgcgtgacgcccaagcagaaggccctgatcgtggccctggtcaagaagtaccaccaggtggtgaccctggccatcggggacggtgccaacgacatcaacatgatcaag

SEQ ID NO: 67301 - DNA, 418 bp, Homo sapiens
ccttgctggctccctcttctgcccgctcctccccgaggcctctgctcagtgtggagagacgcagaggaggggaggcccgctcttcctgcagcaagtcctggcgtgaaaggacctgtcacaagtcctgacgtggagggacctgtctagggtgaagggagccacagaggcagctctattctgcctcagccccccgagctctgccccgggcaccttggcccctcaccgctgtcttggctttggcgatgtcatcaatctgcaggtgcaggtcttcgatctccacctccattgctttccgtgctttcacggctgccgcacaggtgaactctgactcctccagctggacacagaccacccccgccccagggagagatgtgtccagctggaggagtcagagatcgcgagcggccgctctagagga

SEQ ID NO: 67302 - DNA, 448 bp, Homo sapiens
ttccgcaacttccgggtcgaggagccagaagacgggggtgaggggctggttgaagagggcatggaaggtgtacaggggctgggtctggggctccaggctgtaaaaggtgagccagcctgaggccaggtccaaatccatgcccaggagccgccctgacacccctgggaggcgctgggcttccccgttgtgccaggcctggaggctgtcctcctggacgcagagcccccaggagcagggtccccggccaatgttgtctgtgtggggccccagcctgcaccgtggcagttgcgggtaggagacgcccagtgtcaccgagtggtctgacgcgcgcacctcccagtagtggtgcccggcctggaagctctgggcacattgcacctggccagagctcaaagctggccggggcccgcctgggccccgggactgacgacagtgcttcacctgctgg

SEQ ID NO: 67303 - DNA, 853 bp, Homo sapiens
gaatccacgcgtcgtcccacgcgtccgcggtggatgaagtgaacccaccgccacttttcttcctccccacgcagtgcgtgtcagcggggtgggtctggcccgggctcactttgagaagcagccgccttccaatctgcggaaatccaacttcttccacttcgtcctggccctctacgacagacagggccagcccgtggagatcgagaggacagcgtttgtggggttcgtggagaaggaaaaagaagccaacagcgaaaagaccaataacggaattcactaccggcttcagcttctctacagcaatgggataaggacggagcaggatttctacgtgcgcctcattgactccatgacaaaacaagccatagtgtatgaaggccaagacaagaacccagaaatgtgccgagtcttgctcacacatgagatcatgtgcagccgctgttgtgacaagaaaagctgtggcaaccgaaatgagactccctcagatccagtgataattgacaggttcttcttgaaatttttcctcaaatgtaaccaaaattgcctaaagaatgcgggaaacccacgtgacatgcggagattccaggtcgtggtgtctacgacagtcaatgtggatggccatgtcctggcagtctctgataacatgtttgtccataataattccaagcatgggcggagggctcggaggcttgacccctcggaaggtacgccctcttatctggaacatgcagctactccctgtatcaaagccatcagcccgagtgaaggatggacgacgggaggtgcgactgtgatcatcataggggacaatttctttgatgggttacaggtcatattcggtaccatgctggtc

SEQ ID NO: 67304 - DNA, 392 bp, Homo sapiens
gcgcccacgcgtccgggagagctggagaaacaggaagccagcctgtttggcaggaggccagaggtgtgtccagtgggtgaagtgtggctttgggggaatgctgacctaaccttactcgaccaacttctagttctcaggtcctagtgcggagcagatgtgtaagacctactcggagttctgcagccgccacagcaaggccttaaagctctataaggagctgtacgcccgagacaaacgcttccagcaattcatccgggtgagcggacctctccagatcccatgctcatggcccaaacccaccctccccaactcatgggggtagtgcctgtgagctgcacccacatggaggtcaggcattcgccacccgtgcagaccatccatacacagatcct

SEQ ID NO: 67305 - DNA, 881 bp, Homo sapiens
ggtcgacccacgcgtccgaaaaatcgtttctaccccctgcgctggtctacacccatccttggggcctcaccatgtacaaggaggtatgggtggtgtcggccaagtaggcactggctggtccatctggagcttccccaactgttttcttcactttaaaaaacatttcccgccacctgcaggaaaaaggcccaatgaaccccagatccagagtccaaaaacccccctcctcaaggacaaggtttctcaatcacagaggacaaacaaaagcaccacaagagcgtgtcccgagtcatggtggggaaaaggaatgcagatggactttctcatcttcctgacagaccatacacaccttgagggcaagagctatgcctgtccctctgcatcccccatgacagccatgagagctctgagggggtgtgtttctccaggcatgtggcctacccacccacaccaatgggagaagctgctgctgcactaagcagtggatcatctgattacttctactggcttcggtctccccctcaaatacacagccatccaggccccaaaaaccctagggggaagggtcccttggctcttactcaataatccacaaaatctcattgcaggcggagtccttaataatgccatctgatgaataatggttctgtattctggctgcacattggaattatcctgtgtaactttaaaaactaaacatttcctcacatattatatgattcctattcagcagatcagcagttgccattgcctatgagggaagctacagggaatgactgctaatgggtgcagagtttctttttgagatgttgaaaatgttctggaattaaacagtgatgttggctgtacaaccttatgaataaaaaaattgaattgtaaaa

SEQ ID NO: 67306 - DNA, 235 bp, Homo sapiens
tcccgggtcgacgatttcgtgctgccgccaaggggggcttcagtggctgctcagctgtgctctcagggggcagctcatcctccttccgggcagggagcaaagggctcagtgggggctttggcagccggagcctctacagcctggggggtgtccggagcctcaatgtggccagtggcagcgggaagagtggaggctatggatttggccggggccgattccagctcactggggatcc

SEQ ID NO: 67307 - DNA, 510 bp, Homo sapiens
acccatggccgcccacattcccgggtcgagaatttagggaacgacaagctcgagagcgtgactatgctgaaattcaagattttcatcggacatttggctgtgatgatgagttaatgtatgggggagtttcttcttatgaaggttccatggctctcaacgctagacctcagagcccacgagaagggcatatgatggatgctttgtatgcccaagtcaagaagccgcggaattccaaaccctcacctgtagacagtaacagatcaactcctagcaatcatgatcggatacagcgtctgaggcaagaatttcagcaagcaaagcaagatgaagatgtagaagatcgtcggcggacctatagttttgagcaaccctggccgaacgcacggccggcgacgcagagcgggcgacactcggtgtccgtggaggtgcagatgcagcggcagcggcaggaggagcgcgagagctcccagcaggcccagcgccagtacagctttctgcctcggcaaaggc

SEQ ID NO: 67308 - DNA, 925 bp, Homo sapiens
ccggaattcccgggtcgagaccaagagaatgatgtcggggataagcagtcggctgtgaagatgaagatgtttgggaagctcacccgagacacgtttgagtggcaccctgacaagcttctatgtaagagatttaatgtccctgacccttatccagattcaactttagttggcttaccaagagtgaagcgtgacaagtactcagtcttcaactttctgacgctcccagagacagcttccttgcccaccactcaagcatcaagtgaaaaagtatcacagcaccgaggtcccgacaaatcaagaaaaccatccagatgggatacctctaaacacgaaaagaaagaagattccattagtgaatttttaagtttggctagatcaaaagccgagccacctaaacaacagtccagccccttagtaaacaaagaggaagagcatgcaccagaatcatccgcaaatcagacagtcaacaaagatgtggacgcacaggctgaaggagaagggagccgcccatccatggacttattcagggccatctttgccagttcctcagatgaaaagtcctcatcctccgaggatgagcaaggtgacagtgaagatgatcaggcaggctctggggaggccaacttccaaagctcccaagacactgacttgggggaaacatcatctgtggctcacgctcttgtgccagcaccccaggagccgccaccttccttcccgatacaaaagatgcagatagatgaaagagaagagttcggcccgcggctgcctcccgtcttctgccccaatgctcgtcagacacttgaggttcctcaaaaagagaaacataaaaagaacaaagacaagcacaaggccaagaaagagcacaggcggaagaaagagaagaaaaagaaacacaggaagcacaaacacaaaggcaaaaaaaaaa

SEQ ID NO: 67309 - DNA, 592 bp, Homo sapiens
cagatgggcgtctagatgggactatattctggagtctatgcctcatacccacattcagtggtttagcattatgaattccctggtcattgttctcttcttatctggaatggtagctatgattatgttacggacactgcacaaagatattgctagatataatcagatggactctacggtaagtggaaacattttagtctttagtctgccaaggacactgtttattgttattttgcaaaaaggtaaaataatagctttagaatctgcttttaaaacattcttcaaaaaacaaaaacaaaaacaaaaaaattcttctcaaaagttatcttgaattcacattttcaaataagaaagtgatacttaagaattaatattcttggctgggcgcggtggctcacacctgtaatcccagcactttgggaggccggggtgggcggatcacctgaggtcaggagttcaagaccagcctgaccaacatggtgaaaccccatctctcctaaaaacacaaaaattagctgggtgtggtggtggggacctgtagccccagctacctcgggaggctgaggcaggagaattgcttgaacccaggaggcgg

SEQ ID NO: 67310 - DNA, 408 bp, Homo sapiens
ccagggagaacgaggggctctggatgctgagttgaaggcctgccgggaccaggaggaggagtataagtccaagtatgaggaggaggcccacaggcgcgccacacttgagaacgactttgtggtcctcaagaaggatgtggatggggttttcctgagcaagatggagttggagggcaagctggaggctctgagagagtacctctacttcttgaagcatctgaatgaagaagagctgggccagctccagacccaggccagcgacacgtctgtggtgctgtccatggacaacaaccgctacctggacttcagcagcatcatcactgaggtccgcgcccggtacgaggagatcacccggagcagcaaggctgaggctgaggccttgtaccagatcaagtaccaggaacttca

SEQ ID NO: 67311 - DNA, 1210 bp, Homo sapiens
cagcggcgtcagagcgtgtctcgcctgctgctccccgttttcctccttgagccccccgccgagccggggctggagccgccccctgaggaggaaggaggagagccggcgggggtcgcggaggagccgggcagcggggggccctgctggctgcagctggaggaggtgccggggcccgggcctctcgggggaggggggcccctgcgctccccttcctcctactcatctgacgagctgtccccaggcgagcccttgacttcgccgccctgggcccctctgggcgcccccgagcggcccgagcatcttctgaaccgggttctggagcggcttgctggaggggctaccagggacagcgccgcctcagatatcctgctggatgacattgtccttacccattctctcttcctcccgacggagaaatttctgcaggagctacaccagtactttgttcgggcaggaggcatggagggccctgaagggctgggccggaagcaagcctgtctagccatgcttctccatttcttggacacctaccaggggctgcttcaagaggaagagggggccggccacatcatcaaggatctatacctgctaattatgaaggacgagtccctttaccagggcctccgagaggacactctgaggctgcaccagctggtggagacggtggaactaaagattccagaggagaaccagccacccagcaagcaggtgaagccactcttccgccacttccgccggatagactcctgtctgcagacccgggtggccttccggggctctgatgagatcttctgccgtgtatacatgcctgaccactcttatgtgaccatacgcagccgcctttcagcatctgtgcaggacattctgggctctgtgacggagaaacttcaatattcagaggagcccgcggggcgtgaggattccctcatcctggtagctgtgtcctcctctggagagaaggtccttctccagcccactgaggactgtgttttcaccgcactgggcatcaacagccacctgtttgcctgtactcgggacagctatgaggctctggtgcccctccccgaggagatccaggtctcccctggagacacagagatccaccgagtggagcctgaggacgttgccaaccacctaactgccttccactgggagctgttccgatgtgtgcatgagctggagttcgtggactacgtgttccacggggagc

SEQ ID NO: 67312 - DNA, 438 bp, Homo sapiens
gtgtgctgcaacgttgctgcttcccgtcccagccacagtacgggtcccgggcccccaggcatgccccctggctgcggtaggcggcgcacctctccagtgggacccgcaggacgccgtctctcagccccacgaagagcgcgcgggcgctgtgcaggatgcgcaggctgcgcaggggctcgcggcgcccggggggcagcacgtgcagctcctccaggtagcagccgtggaggctgcggctcgccgtggacagcgccttcaggatggtgcccgactcggtgccaatgtagagtacatggtagagcgtgtctttagcctgcaccaggtccaccacgaggtgtgagaagcgcacgctgtcctgggtgacacagggctcgggtgtcaccggctgcacggcctcgctcatcaagaagaggcgctgcgcgtcctgcaagctgcgct

SEQ ID NO: 67313 - DNA, 566 bp, Homo sapiens
ggaattcccgggtcgagactctactccaatccagacccgcacctgctgctgcgtcatctcggtctgggctcctttcccttcaagacccggaaggaactgcagagttggaaggcagagaatgaagccttcaccctggctgacctgaagcaactgccggagctgaacccaccagtgctgatgcccagagggaatgtggggactcccctgcgggtctttttggagttgatccgggcctgccgcctaccccctcggatcatcacccagctgcagctccagttccccaagacaggttcctcccggcgctacggcaatgtgccttttgagtatgaggactcagagactgtggagcaggaagagcttgtgtatacagcagagggtgaagaaataccccaaggaacctacctggcagatataccagccagcccctgtggagagcctgaggaagaagtggggaaggaagaggaagaagagtctcactcagatgaggacgatgaccggggtgaggaatgggaacggcatgaagcgctgcatgaggacgtgaccgggcaggagcggaccactgacct

SEQ ID NO: 67314 - DNA, 406 bp, Homo sapiens
cttccattgagcggttccccatcagctttaaaacctacttctcaggaaactactttcaccacgttgtgctggggatttactgcaatggccgctatggctcattgggcatgagccgcagggctgagctgatggacaagccattgacttttcggactctgagtgacctcatctttgactttgaggactcttacaagaaatacctgcacacagtcaagaaggtcaagattgggctgtacgtcccccatgagcctcatagcttccagcccattgagtggaagcagctggtcctcaacgtctcaaagatgctgagggctgacataaggaaggagctggagaaatatgccagggacatgagaatgaagatcctgaaacctgcaagtgcccactctccgacccaagtgagaag

SEQ ID NO: 67315 - DNA, 561 bp, Homo sapiens
cccagaatgaccgggtcgacccacgcgtccgcacccagctatggaggcagctgcaggaacaacttgttttaccgagaagaaacctacactccaaaagctgagacggacgagatgaatgaggtggaaacggctcccattcctgaagaaaaccatgtttggctccaaccgagggtgatgagacccaccaagcccaagaaaacctctgcggtcaactacatgacccaagtcgtcagatgtgacaccaagatgaaggacaggtgcatagggtccacgtgtaacaggtaccagtgcccagcaggctgcctgaaccacaaggcgaagatctttggaagtctgttctatgaaagcttcgctagcatatgccgcgccgccatccactacgggatcctggatgacaagggaggcctggtggatatcaccaggaacgggaaggtccccttcttcgtgaagtctgagagacacggcgtgcagtccctcaggtaactactctgtgatcggggctctgtgaaacggttttcctgtttatgacggtgttgttgaaattttgaaaaataccacaca

SEQ ID NO: 67316 - DNA, 453 bp, Homo sapiens
  misc_feature (1)...(453): n = a,t,c or g
ctcgccggaactccgggtagacccacgcgtccgagcacggtcagcatgaaaggattttcatgagtattgtcaccgtcatacgtgggcatgagtgtgcatgtgcgcaggaacccagggctggtgggatgcagaaagaaaccaggaacagagattttctcaggccactactcagtctccgttgccctttccagcttctgnnnnnnnnnnnnnnnnnnnnnnnccaccaatattgccatggacaccacaatgggcctgcaaagcatggggctaggcagtgccagggacagagtctgcagagccgcctggaacgctccctggcagggtctcaaccctgctctccaccaaatatttcccctctcacctcattcctgtcgggcacttccagtctcgtctgcggaggggccttgacggcaatcactgtctgctccttaaagttgccaacagcacggatan

SEQ ID NO: 67317 - DNA, 462 bp, Homo sapiens
  misc_feature (1)...(462): n = a,t,c or g
gagtccggaattcgcgtggtagccaatgacagagcagataaaaatgctactgcctattttgagggtcatcatttgaatgctgagaatgctgctggtcaccagattgcctccgaaacacagatccttgaggattcttcgttaatatctgtaaagtcacagtgcagcacaggtgatgctcatacagtcctgagtgagtctaacagaaaagatgggcactgtggaaattctaacaacaaatgtgaagtaattccagaaagcaccagtgcagtaacaaacattccacaggtgcagatggttgccatacaggtatcttggaacataacacaccaagaagtcaatactgagccatataatccttttgagaaacaacaaggggaaatttcacggattgaaaaggagtaccaagtattacaagaccaacttaaagaagcgtatganaattatgagcagataaaacttaag

SEQ ID NO: 67318 - DNA, 1528 bp, Homo sapiens
cgggtccgccagtagcatttctgcagcagatgtggggatattcacagtaagacggacacgtccaagaccataaatagttggttttgccaccacgtggatgtcaaaaacaccttgctgtgtggggccacttggaggtgggaacagtgggcgtgtggacctgtcctgctgtgactttggttaacaccctgaggtggagtctgaaaaaccccggtgtacacgggctcaagaaccgctcccctttctgataccggagcgcatttcccagtggaaccccagagcagcaactcaggttcttgctcgcctgtgcggctttgtgtgcggcttgccgagggcagaaacggcagcttccgcccggagagcagagatgtggcgtggggctgagtgtggcccaccggtaatccagctgcatgcccccttccctgcctgcacctgggcgccgcctctgcacgatgaaggcgggcatttggtgtggtccttacagccgtgtgccccatcccactgatccttgcctgcctgcagaaagctacaggattggctttgcctttaagtgtcctgactgccccggcctcccttacctaccatgacacgccgagagctgagctgtcccactcgtgactaactcgccgttgcctgcaacctgctccgttgcctgcctcacacccaccccgctgtgctgcctgcaggcaccccctttcatgaggacctgggctgtgcccaggcggccccctgtgttgctggggcctgtgctgctctcgcacggcctccagagcctccctcggccccttgacccgcatgaaccggcttcccctggtgactcagtcccctcccgtcccttcctggacctcagcacaggccctggggctggcaggtgagcacccggcacccccgctaaccgcttggccctgctgcttcaggcttacaagagtgcgtgcgacatggccgaggcacgaggccgccaccaggagctttgcatccccctgtgtgtggtgccggccacgattagcaacaatgtcccaggcacagaaataagcctgggctccgacactggcctgaatgctgttgttgaggtaagagaaccccgtttcctctcgttgcttttccgtcatttattttagcaacttgtttcttctgtgctaaggatgagccggatttattcttcttcttttctcccctttgttagcttggctttatgtcacactggccagaacagggtaaaatttttttagcttctctgccttagggagagcctgtctttattgattaaaagtgagatgatatatccagtccttgggatcgtgtttctatcccacctagactaggggagccgcaggtaccattgctctggaggctgcctctcctgcccacgctgagtagtgaggctgcagggccagctgtgggagcctgcaggaaggggtgtaaatgcccggtaagtacgagctccaggacagagccgtacccactgggggccgctgcctggaaaacagccttcctggtgagacaagaggctctttagagagccgaaatcact

SEQ ID NO: 67319 - DNA, 1342 bp, Homo sapiens
cttcacctattcttccctcctcctcagtcaccggcgcattcactccgacagccggcccttcccctgcgtggagtgtgggaaaggcttcaagcgcaagaccgccctggaagcccatcggtggatccaccgctcctgcagcgagaggcgcgcgtggcagcaggccgtggtggggcgttcagagcccatccctgttttgggaggcaaggatcccccagttcacttccggcactttccagatatatttcaagagtgtgggtgatggcgttcacacaaactggtcagcgtttccctggagaggaagaggcaaggtttgtgtatttgggggataaggaaaggaagtgggcgtttgaggaaaacaaagttcttgccttaaggtaaaaagcagaggttaggggcacagagggctgttggggaggaggcaggaatcttgaaaaggtgcctgggggttgaccccattttctgaagctccagcacacagggccccgtgttcacgtcccatccttcacttgaaaaccattcacctaactggcttttccttcatgattgttctctcccttgtagctctctgcttttttggcctgtatctctcctactcctctgagatggggtcccctacattccagtgcctattaaaggagcctgcacccactctggaccccccagaatagaggggatacctcaggcctgtccctcggctggtggggggggcggagctcatcccaggattcttttcttttttttgagatggagtcatgctctgtcgcccaggctggagtgcagtggcgtgatctcggctcactgcaacctctgcctcctgggttcaagccattctctgcctcagccttcccattagctgggattacaggcatgcgccaccaggcccagctaatttttgtgctgttagtagagacggggttccaccatcttggccaggctggtcttgaattcctgacctcgtgatccacccgcctcggcgtctcaaagtgctgggattacaagcgtgagccaccgacccctgccgaggattctgccttttaccaatgcaggtgaaacatctggcaaggagacacctggagtgtaggtgttccttggtcttgaagacctagaggtggccatagagaggacagtggcctcaggtggggaactccccccccactctcattctgcaagtgcacaaactatcaaacatagcggactctggaactgggccaactcttcactgtatgcattagtgattgcagtgtttttttcttcttcagatatttgcatgttccctggattttgtattttttgataaagatatattcttgggccacagtagctggagatataatgccggacc

SEQ ID NO: 67320 - DNA, 597 bp, Homo sapiens
tactgggtcgacccacgcgtgcggtcagtaggacgattttgttagggaaaacgctttcactgcgaaaaatgtgatctagaaaacattgtgcttgaaggattggctttgtttttgtgtggggaatttagtgcattttccattctattggcatcattattaaatagtcgtaaatgtagagttattaaataattgagcttttttccattttggtttactcaggattcactccttctccagttgcacagccacacccttcagctggccttaatgttgactttgaatctgtgtttggaaataaatctacaaatgttattgtagattctgggggcggacttctcaaaccaacagtggcctctcataaccagaaccttcctgatgccaaactcccacctagcaagctagcatctgatgactcgaattcatctctccccaaccttgaccgcaatcccatcatcaacaccggtaccccccctaatgacctcacttctacgccaatgagccacaaccacaacttcacacaaccacatctccacctccactcactacacacacagatctcgacagcacctcccacataacccaaaaccccataacccg

SEQ ID NO: 67321 - DNA, 441 bp, Homo sapiens
gggtcgccccacgcgtccgggtggataagcagaagatagtggagggaatggcagagggaggcttcacacagattaagtgcaacacagacattttcattggcggagtccccaattatgatgatgtgaagaagaactcgggtgtcctgaagcctttcagcgggagcatccagaagatcatcctgaatgaccgaaccatccatgtgaagcatgacttcacctccggagtgaatgtggagaatgcggcccacccctgtgtgagagccccttgtgcccatgggggcagctgccggcccaggaaggagggctatgactgtgactgccccttgggctttgaggggcttcactgccagaaaggtacgctcaggggtctgaggcacagctccctggagggagtggaaggaacggacagccaattgggggaccacaactcttaatggaaga

SEQ ID NO: 67322 - DNA, 428 bp, Homo sapiens
cctgtttgaagatgcccaaagtggccctcaagggcccccaggtggatgtcaagggccccaagctggacctgaaaggccccaaggcggatgtgatgacccccgtcgtggaggtgtctctgcccagcatggaggtggacgtcgaggccccgggagccaagctggacagtgtgcggctggagggtgacctgtccctagccgacaaggacatgactgccaaagacagcaagttcaaaatgcccaagttcaagatgccgtcgttcggggtgtctgccccaggcaagtccatcgaggcctcgttggatgtgtctgcgctgaaggtggaggctgacgtgagcctcccctccatgcagggggacctgaagaccactcacctcagcattcagcccccttccgctgatctggaggtccaggctggccaagaggatgtg

SEQ ID NO: 67323 - DNA, 428 bp, Homo sapiens
ttaacattcaagttgatacctatagttacaacaaccgcagcaacaagcctgtgcaccgggcctactgccagatcaaggtcttctgtgacaagggagctgagcggaaaatcagggatgaagaacgaaagcaaagcaaaagaaaagtttctgatgttaaagtgccactgcttccctctcacaagcgaatggatatcacagttttcaaacccttcattgatctcgatactcagcctgtcctcttcattcctgacgtgcactttgccaacttgcagcggggcactcatgtccttcccattgcctctgaagaattggagggtgaaggctctgtcttgaaaagggggccgtacggcacagaagatgactttgctgtccctccttctaccaagctggcccggatagaagaaccaaagagagtgctgctctacgtt

SEQ ID NO: 67324 - DNA, 440 bp, Homo sapiens
gagacgcaaccgcaggttcgacccacgcgtccgcgtatccgcactgctcaggggtatggggaggatgtcaggcaggaccagcagcagctcctggaggggatctcagagctggacatcaggacagggggagtcccctcacagctgcttgtacatggagccctggccttccctctggggctggatgcctcactcaactgcttcctggcggctgctcactatggccggggccgggtggtcctggctgcccacgagtgcctgctctgtgctcccaagatggggcccttcttgctcaatgcggtgcgctggctggccagaggccagacaggcaaagttggggtgaacacaaatctaaaagatctgtgtcctctcctatcggagcatggcctgcaatgcagcctggagccccatctgaacagcgacttgtgtgtctactgctgcaa

SEQ ID NO: 67325 - DNA, 842 bp, Homo sapiens
tgcaaacgggttgctggaagcgctgtcttcctggttcacaaaggactcaaggcaggagacgagctggcgcaggcagggctccaggcagctctggccacgcttcactttctgcagggctgtgtccttcaggatcttcagcagcttagctttcatggtggatgtgatggttgtggggttaataaactggaaggaaggggcggcgttgtttgggtactgtgcagggaacttcaccagcatcttgacacgatggttgctgcagtgcacagacactgtgcagctcctgtctgccgcatccatctccacattgacattccggatttgcacattgatcagggagaattcctgctgcaaggtctgaggcagccccagttgatctgatttcctctcttccaggagatttctagggggatcttcttttagggcttcttcctccccatggcttgcagtgtgctggtgatctgtatcttcagtgtgcagggtcttctcaggttccggcagaagggaaatactctcaatgaactcatcaacaccatctaatatgtcatttgcacaaagcctctgcatctgggaatccacccgccacattctcaaggtctgatcccgggaccacgtcaccagttgatagtccttggacccttccttctgcttcctccactggaactccaggaccacatcatcatgccccacgaaggtgtggactggggtgttcaagtcaaagacattccacaggagaaggctgttttccctccgcagctggggaaccatcacagtcaccaatccattgctgaaaggtgtgtatctggccttccagacaggcacctggcaaggaagaatattgaggc

SEQ ID NO: 67326 - DNA, 422 bp, Homo sapiens
tgtgggctggagcagggaagcccacccaggcaggaggtgcctctgtgccggaggcccgagtcccctgaacacctgcaggaggccaggcatcgcccacagccctgccccctggcctcttggcaggaaaaagaatgagaagctggagctgctggtgggctgcattgcagagctgcgggaggcagatgaggggctgctgagggccggtgagaatgacttcagcatcatgtactcaacccgcaagcggagtgctcagctgtggctgggcccagccgccttcatcaaccatggtgagggtcaggcaggtggatgggcaggacgggatagagccaggcagggctggaggggtgtagtgggagggttctgcgactgagctgccgagctcatctacctctcttctctctcctgccccaactggctccaga

SEQ ID NO: 67327 - DNA, 453 bp, Homo sapiens
caaggaaagggagcttattgaaagactagaggatctcaaagagcagctggctcccctggaaaaggtacgaattgagattagcagaaaagctgagaagaggaccactttggtgctatggggtggccttgcctacatggccacacagtttggcattttggcccggcttacctggtgggaatattcctgggacatcatggagccagtaacatacttcatcacttatggaagtgccatggcaatgtatgcatattttgtaatgacacgccaggaatatgtttatccagaagccagagacagacaatacttactatttttccataaaggagccaaaaagtcacgttttgacctagagaaatacaatcaactcaaggatgcaattgctcaggcagaaatggaccttaagagactgagagacccattacaagtacatctgcctctccgacaaattggaga

SEQ ID NO: 67328 - DNA, 792 bp, Homo sapiens
atttttgatgccatgtggctacattggttttagaatactaataaaatccattgcttttaaaataaataaataaaccccatagcacatcctccatacaacatctgttgtccctcaagatacaattgttaccactatcatctaaccattattttatgataactttaaaatatcaacttggcaagaaaatattccacaaaacacactctgcctttttactttaaagagtccttggctacctgggccaatattattctcatttgtaggatttaggttccacagaatataatatgtgcctttttctgtgttccctgcagatttgcaagtaccatccctttttggggccttactttgcacctccagcatctgggaaacaatgttttcctgttgcagactctctttggtgcagtcaccctcctggccaattgtgttgcaccttgggcactgaatcacatgagccgtcgactaagccagatgcttctcatgttcctactggcaacctgccttctggccatcatatttgtgcctcaagaaatgcagaccctgcgtgtggttttggcaaccctgggtgtgggagctgcttctcttggcattacctgttctactgcccaagaaaatgaactaattccttccataatcaggggaagagctactggaatcactggaaactttgctaatattgggggagccctggcttccctcgtgatgatcctaagcatatattctcgacccctgccctggatcatctatggagtctttgccatcctctctggccttgttgtcctcctccttccg

SEQ ID NO: 67329 - DNA, 415 bp, Homo sapiens
atgacaatagcccagtgtgtgatcaggttgcatatacagcattacttcctgaagacattccatcaaataaaatcatcctgaaagtcagtgcaaaggatgctgatattggatccaatggatatataccatactcactctatggatctggaaacagtgaattttttctagatccagaaagtggcgagttaaaaaccttggctctgttggaccgggagaggatccccgtgtacagcctgatggccaaggccactgacgggggtggcaggttctgccagtccaacatccacctaatcctggaggatgtgaatgataacccccctgtgttttcttctgaccactacaacacctgtgtctatgagaacacaaccaccaaggctctgttgaccagagttcaagccgtggaccccgacattgg

SEQ ID NO: 67330 - DNA, 348 bp, Homo sapiens
accagccattgctgattcacaggcccagtgagagacaggataatcatgggatgctgctaaaaggggaaatcctgctgctgcctgagctttcttttatgaccggaatcccagagaagatgaagaaggacttcagagccatgaaggatttggctcagcaaatcaatctgagccccaagcaacaccatagtgctttggaatgcttgctgcaaagaattgcaaagaacgaggcagccaccaatgaactgatgcgttgggggctccgtctgcaaaaggatgtacataagattgaaggacgtgttctgccaatggaaagaattaacttaaaaaatacttcgtttatcacatctc

SEQ ID NO: 67331 - DNA, 849 bp, Homo sapiens
  misc_feature (1)...(849): n = a,t,c or g
tgtggattttcaggaacatccatgactgattactgggttttgatcttcttcaacctcctcttcacatctgcccctcctgtcatttatggtgttttggagaaagatgtgtctgcagagaccctcatgcaactgcctgaactttacaaaagtggtcagaaatcagaggcatacttaccccataccttctggatcaccttattggatgctttttatcaaagcctggtctgcttctttgtgccttattttacctaccagggctcagatactgacatctttgcatttggaaaccccctgaacacagccgctctgttcatcattctcctccatctggtcattgaaagcaagagtttgacttggattcacttgctggtcatcattggtagcatcttgtcttattttttatttgccatagtttttggagccatgtgtgtaacttgcaacccaccatccaacccttactggattatgcaggagcacatgctggatccagtattctacttagtttgtatcctcacgacatccattgctcttctgcccaggtttgtatacagagttcttcagggatccctgtttccatctccaattctgagagctaagcactttgacagactaactccagaggagaggactaaagctctcaaggaagtgggagagggggctgggaaagatggaatcaagtggacatcaaagtatggttaaccattcaggtgggcaagttcagggaggaggaccctggctgggcctttttgttgtattttgcattgaagtcaggcagttccntgtttttgaggcagggaattttcctgtgtggaantgtttagtcaggtatttgnaattaggcnttaggtg

SEQ ID NO: 67332 - DNA, 622 bp, Homo sapiens
tctacactcagctagctgccaaatcaaagtttttaagcctaaaggtgcagacaggaaacaaaaaactgaccgagagaagatggagaagagaacagctcatgaaaaagaaaagtatcagccgtcctatgataccacaatcctcacagaggtaatgtagtaaagcatttggttttggaagagaagcaaaggttgcatattagtctatttctaagatgagttctgctacaaaagggttggggaagattgggtggcagtttgacatgttattctctgagaaatttctggggaaaatatttaaatttggggattttgatagactgtttcctgggtgggatcttaaatgaagatgctgaaatcccaatgaggtcttagaaacagaccttaaaaactttgaagttggcaagagacttaagttggagcctagaaagtccaatttttgtcactgctggggttttgcattttttttaactttgaatcctgttagtcatgcatttgtttaattggactgaagagacatgaaacagggtgttagatctttctttgtataatgaaaagacattgatcccaatctttggtgtttgtccagatgaggcttgagcctataattgaagatgcagttgaa

SEQ ID NO: 67333 - DNA, 296 bp, Homo sapiens
actcttcccctataaacacaacgaaggacagtttgaagggctggcgcccttcgcctgcgctttcttttcgctgcattgcttgcgccactcagcaataaagagttcatgacgggcagcgggatcattttccagtttgctgactatcggaacttttttgctgccctgctgaataatatgcagcgccagcgcatgaaacgtgcgtgcggcaatgtcttctgaatgtaaccgctcgcgaatccgctcgtccatctcttcagcggctttgcgaccaaacgccagcaataaaatttgctcaa

SEQ ID NO: 67334 - DNA, 352 bp, Homo sapiens
aaagaggcttcttgattgtgctgttcattgttgtaaatccatggagctgtgcaacagtgagtaactccagatgtcctccctccctactgcagcccctgcccttgatgtggactggcagagcagcacgacctttgcctcctgtagcacagacatgtgtatccatgtgtgcaggctcggctgtgaccgcccagtcaaaaccttccagggacacacagtaagtgagagctcttgtcactggtctcgagtttgtgagaatgtgatgtgggagccgattcttgtgtgcctagaattaaaagctactgcagcagcagaccagctctaatgtgccccttggctatttgagctgtcatgg

SEQ ID NO: 67335 - DNA, 543 bp, Homo sapiens
gtagtcatcttagttgtctccaattgtgccaagcccagtgcctcaaatatagtaatcattgatgaatgctttttgttaaaatttgaaacaaatttttggttttgtctttaagaccgatgttgttgtcaactccgttcccttggatctcgtgcttagtagagggcctctttctaagtccctcttggaaaaagctggaccagagcttcaggaggaattggacacagttggacaaggggtggctgtcagcatgggcacagtgctcaaaaccagcagctggaatctggactgtcgctatgtgcttcacgtggtagctccggagtggagaaatggtagcacatcttcactcaagataatggaagacataatcagagaatgtatggagatcactgagagcttgtccttaaaatcaattgcatttccagcaataggaacaggaaacttgggatttcctaaaaacatattcgctgaattaatcatttcagaggtgttcaaatttagtagcaagaatcagctgaaaactttacaagaggttcactttctgct

SEQ ID NO: 67336 - DNA, 546 bp, Homo sapiens
aaggaaggcaggaaagaggatatatagacccttggggaaaaagcaagttatcaattagaatagtgcaaaattctcaagagattctgagtaaagcagttgggattagttgacagggcttcttaggaaagaattattaaacatgttggaatgaaagcagggagggactcagttggcagagtgggatgtagggattgtccactaggcagaaacacagccttcataataatcttcatggcttcctgcagcatttgcccctattccctttggaggaatctatctgcctttggaggtcccagccagccagtgtcaccgctcccccctggtgctcgcctatgatcaggcccacttttctgcactcgtgtccatggagcagaaggagaataccaaggaacaaggtgctgaatgacatgtcttttggtctgcattattttcacttgaaaaaattgaatgagatctaatgtaggaggaaagaattaagtgacatgcaagcccagacagcacatgttgatactgttttattaagccagaagttacgccagagttttc

SEQ ID NO: 67337 - DNA, 512 bp, Homo sapiens
ggcttgtttaaccaggataaggaggtaggggccatagaactggagctgattcctgccaggccgttttccagcagcgagctgcagagggacaaccccgccacggggcaacagaacgcggatgagggcagcgaaaggccacccagagcgcagtggagagtggactcaaacggggcacccaagacgatcgcagactcggccacgagccccaagctcctctatgtggatagagttgttcaggaaattctggaaaccgaaaggacttatgtacaagatttaaaaagcatcgtagaggattaccttgactgcatcagggaccaaacaaaacttcccctggggaccgaagaaagatcagccctttttggaaacatacaggatatctaccacttcaatagtgaacttctgcaagatttggaaaactgtgaaaatgatcctgtggccatagcagagtgttttgtgtccaagagtgaagagttccacatttatacccagtattgcactaactatccaaggcg

SEQ ID NO: 67338 - DNA, 401 bp, Homo sapiens
cgagagtgggaatgtatcccaggagtccggccccacctatgcctcattctctcaccatttcatcagtgatgcaatgacaggtgtgcccactgagaatgatgacttttgcattctttttgcaccaaaagcagccatgcaggagaaggaagaagaaccagttataaaaatcatggttgatgatgcaattgtgataagagacaattatttcagtctgcccgttaataagaccgatacgagcaaagcccccttacactttcccattcctgtgattcgctatgtggtgaaggaggtctctcttgtctggcatctttatggaggaaaggattttggaacagtccctcccacttctccggctaaaagttatattagtccccacagttcgccttctcacacacccacga

SEQ ID NO: 67339 - DNA, 501 bp, Homo sapiens
ggaaattcaagcatatgaaaaacaacatgtattttgcgagagctcattcaaaaactggaaatgtttgcctctagtgttagggaaggggaagggagtggaatataagttaaaggggaatgagaaggagactgtgcatagaccagtgatgacactaaggtatgtgattaattcaaccctctgcccctgaggtccccattcatatcctccctcatccccccagaagtagaaagatagtttttgttgagagggaaggaagactcctggcttcccctagtctagatattgcagattccaacctgttactcacaagttaggggaagagagagaaatttggaaccaggaggctctgagatctccaccctgacatgcctttcccacctgaagagccttctgggataaaccctgggttcagcctggcaccccagccctcacctgccccgtgggtccatgagcacttcccaccattgaggcatgtgttctggctgcagtagtcactgtgga

SEQ ID NO: 67340 - DNA, 632 bp, Homo sapiens
gtactttaaaggggagggttcccccctttttcctttccttcctttttttttggggtactgattttagaaacagtattaagcaccttgttgttttgtttctgttttcaaggaatgcagattctactaagatctccttgcaaaatgaatgcatttaattttccctatgtgtttttcctctgcaggtagttttcccaagagtggctcaggtttgtaagaatgatatgggaggatctcaaagagtcctggagaaacagtggacgtcgttcctgaaggcgcgcttgaactgctcagttcctggagactctcatttttatttcaacattctccaggcagttacagatgtgattcgtatcaacgggcgtgatgttgtcctggcaacgttttctacaccttataacaggtaatcatgccctagctgtgttgacctcatcaattcttcctggcttccttctcccagggggttctcttctaataaaccatatttgcaactgactgaaaattgcattcattgtgtgtagctaagaagcacttaacacttagttttcatcaacaaattaaaagtagtttataagcactattaagttaggttttaggggaagtaattagataaattatgacaatatcttctattt

SEQ ID NO: 67341 - DNA, 1047 bp, Homo sapiens
gattcttgaacatcaaagatgtttgttattgcagccaggagacaatgccataaaatgctaacaaaaaaaagttatactgttttccttaaagtcagtaaattgcataaaagtactctgagcatttttggaagaaaggcaccagataagtccaaaatcttattgctactaggatcatacagggtcacagactatggcactctgttcagccaggagactaagtctcagcaagtcagtctctgaccttgaggcttaaagagcaaggaaggaaaatgtcaataaaacagagccctgtatcacagattaaagctggagtgaaaatgatttccagttttatgtcaaagtagaagctggttcctagtgcactggcgctattttaggatggacactctgttttctttggcccatttcttcatgatccggatcatgtattctacttgggtgttacctgtgcttctcagtaaatggagcacttctcgaagggtctctttgggttctctcccagctatgatcatctggaaaatgcccacacaggcaccccgtttgccttcccaatattcagggttaggatccagcctctcaaggacatcaaaagctttggcagaatagtaaaactggcccatcttgtagcagtcattagcaatgagctgtaagagactgaaggactcgccggaggtttccatcttaagataaagttcccaggctagtcttggtttcttattcataatatagccccgagctaaccagctgaggtaaatgtaatcatttttcatcttctcactttggatcaagaggaacgcctcttcgccctcactggtattgcctgttgcagctttggcttgggcataattaaagttaaagatgtcatcattatagaagtggctcttaaatgagttgaggtaaatcaaaacatcatcaaattgcttaagcaggaagaaacaggaagccatgcactgcctccctggtattgtatcacattcactagctgatcctcccaccaactggaagaactgctgggcacttttcatatgatcccttgaaaccaagacc

SEQ ID NO: 67342 - DNA, 420 bp, Homo sapiens
gaactctccaagccctaggaggaggggcatgcaggttgctaggaggaagagcagcggggtgagggtagggtgcccagggctgcagacaaagtgagcttcacccagtctcaccttgcacaccacggccttagcattttagtaagctccatgcttacatcctgaagactgtccccagccccatttctgccgctgttacaggaggaacagaccaagcccagtgggaagacataacaggaaccaccaaacttgtatatgccaacgagtgcgccaacttcaccaccaatgtctctgccaggtgagacgaggccagcccagcccagtattgtgtgggccgtcctcaggctctatgctgccgtccaggcctgaggctgaggctccctcactgtcccctccatgtggaagcctccgtgaccacaggtg

SEQ ID NO: 67343 - DNA, 369 bp, Homo sapiens
cagaacagtctttttaaaaatgaatacctgattttagctttcctttgttaaagctctccaatggtacacctttgtaactagactaaaatctacaactacgggcccttgcctctttctcacctccttttctgccacttttaacctttgtttactttaacccactgacactggttttactcttgattctcaaacatggaaaaacagatagatgttttctttctcttaacagaattgtgaaaaattgggtgagctgctgttatgtgaggctcagtgctgtggggctttccacctggagtgccttggattgactgaaatgccaagaggaaaatttatctgcaatgaatgtcgcacaggtaaaagagatatcgg

SEQ ID NO: 67344 - DNA, 432 bp, Homo sapiens
ggcccctagtccaaggccctggccacccttcacagctgccaccacagagggaaaggaaacaatgtcatttaaccttcatagcagctttggtaataggaacagcagcggccacagcaaacatttactgagccaagtccattaagccctacatgtgcgttaccggcatggtctctggattgatgattcttctgttacttcctactgtggaggataaggccctctgtagtgccttttaccaaagaccaaagctgcatgcccaccatgtatcaagttcagtaacccccttcttctagagaatgcatgtggaccctgtggggtggattctgaccactgagtgtttccaggttccacagcagaaagccatggcaccacttcatccccatcctgccggaatgagaatcaatgttgtcaataaccaccaggccgtgtatt

SEQ ID NO: 67345 - DNA, 404 bp, Homo sapiens
aagaaatggtggcattacttcttggtcaaggagcaaatatcaatgcacagacagaagaaactcaagaaactgccttgactctggcttgctgtggaggctttctggaagtggcagactttctaattaaggcaggagccgatatagaactagggtgttctacccctttaatggaagctgctcaagagggtcatttggagttagttaaatacttattagctgcaggagctaacgttcatgcaacaacagcaacaggggatacagcactaacatatgcctgtgaaaatggtcatactgatgtagcagatgtcttacttcaggcaggcgcagatctggaacatgaatctgaaggtggaagaactcctttaatgaaagctgcaagagctggtcatgtttgtactgttcag

SEQ ID NO: 67346 - DNA, 2821 bp, Homo sapiens
aagagatcagtgccactcagatcatcgtctgcacccccgagaagtgggacatcatcacccgcaagggtggtgagcgcacctacacccagctggtgcggctcatcattctggatgagattcatcttctccacgatgacagaggtcctgtcttagaagctttagtggccagggccatccgaaacattgagatgacccaagaggatgtccgactcattggtctcagtgccaccctacccaactatgaagatgtagccacctttctacgtgttgaccctgccaagggtctcttttactttgacaacagcttccgtccagtgcctctggaacagacatatgtgggtatcacagagaaaaaagctatcaagcgtttccagatcatgaatgaaatcgtctatgaaaaaatcatggaacatgctggaaaaaatcaggtgctggtgtttgtccactcccggaaggagactggaaagacagccagggccatccgggacatgtgcctagaaaaggacactctgggtctgtttctgagggagggctcagcctccacagaagtcctgcgaacagaagctgagcagtgcaagaacctagagctgaaggatcttctgccttatggctttgctattcatcacgcaggcatgaccagggttgaccgaacactcgtggaggatctttttgctgataaacatattcaggttttagtttccacagcaactctagcttggggtgtgaatctccctgcacatacagtcatcatcaaaggcacccaggtgtacagtccagagaaggggcgttggacagaactgggagcactggacattctgcagatgctgggacgtgccggaagaccccagtatgacaccaagggtgaaggcatactcatcacatctcatggggagctacagtactacctgtccctcctcaatcaacaacttcctattgaaagccagatggtttcaaagcttcctgacatgctcaatgcagaaatcgtgctaggaaatgtccagaatgccaaggatgcggtgaactggctgggctatgcctacctctatatccgaatgctgcgatccccaaccctctatggcatctctcatgatgacctcaagggagatcccctgctggaccagcgccgactagatctggttcatacagctgccctgatgctggacaagaacaatctggtcaagtacgacaagaagacgggcaacttccaggtgacagaactgggccgtatagccagccactactacatcaccaatgatacagtgcagacttacaaccagctgctgaagcccaccctgagtgagattgagcttttcagggtcttctcattgtcctctgagttcaagaacatcacagtgagagaggaggagaagctggagctgcagaagttgctggagagggtgcctatccctgtaaaggagagcattgaggaacccagtgctaagatcaacgttcttctgcaagccttcatctcacagctgaaattggagggctttgcactgatggctgacatggtgtatgtcacacagtcggctggccggttgatgcgagcgatatttgaaattgtcctgaaccgaggttgggcacagcttacagacaagaccctgaacctctgcaagatgatcgacaaacgcatgtggcagtccatgtgtcctctgcgccagttccggaaactccctgaggaagtagtgaagaagattgagaagaagaatttcccctttgagcgtctgtacgacctgaatcataatgagattggggagcttatccgcatgccaaagatggggaagaccatccacaaatatgtccatctgtttcccaagctggagttgtcagtgcacctgcagcctatcacacgctccaccctgaaggtggagctgaccatcacgccagacttccagtgggatgaaaaggtgcatggttcatccgaggctttttggattctggtggaggatgtggacagcgaggtgattctgcaccatgagtattttctcctcaaggccaagtacgcccaggacgagcacctcattacattcttcgtgcctgtctttgaaccgctgccccctcagtacttcatccgagtggtgtctgaccgctggctctcttgtgagacccagctgcctgtctccttccggcacctgatcttgccggagaagtacccccctccaaccgaacttttggacctgcagcccttgcccgtgtctgctctgagaaacagtgcctttgagagtctttaccaagataaatttcctttcttcaatcccatccagacccaggtgtttaacactgtatacaacagtgacgacaacgtgtttgtgggggcccccacgggcagcgggaagactatttgtgcagagtttgccatcctgcgaatgctgctgcagagctcggaggggcgctgtgtgtacatcacccccatggaggccctggcagagcaggtatgacgtggcgctgtgtcatgtgaatttcccaagaagcatttcatctgtgattccgtatgaaggctttctaagccctgaaatttgcagggtcatttcctcagtttgtgtattaaagaaaagctgccccagccaagcgtggtggctcacgcctgtaatcccagcactttgggaggccgaggcgggcagaactcctgacctcaggtgatccgcccacctcagcctctcagaagtgctgggattataggcctcagtgagccactatgcccagccaagggaattctttagcatcttgaaacaatgacataaaattgctttatgtgccaatgtctaggttcctttaactagattgttaattgagaatttcttttataaacttactgcctttt

SEQ ID NO: 67347 - DNA, 425 bp, Homo sapiens
agacactgcagcctccaaggcctctgcgctgctctcaggactcatgcagaggaccttggccctgacacacaccttcccggtgtagccccccatgttcactagcttctgcttcaaagtaaaggcagtgcaagtgcagtagtcctggccctctgcatcctgctccctgagaatggtgtagagaatgggggtgctgttctgtgctatcagcagagcatcacagatgactcctggcttctcctgcaagttcaggtccacagcccaacttctagagaagatcaaaattccccgaaagaaaggtcgcatttgcttatttattaactcctctagtcctctgtgctctgagatcaggtccctccagagtgactctggagtatatcgcaaatatcctggtgggactgaaaataaaagttgctggagttcctttt

SEQ ID NO: 67348 - DNA, 357 bp, Homo sapiens
ctttaaaagtttctgatgaattagtgcagcaatatcaaattaaaaaccagtgtctttcagcaatagcatctgatgcagaacaagaacctaaaattgatccatatgcatttgttgaaggagatgaggaattcctttttcctgataaaaaagatagacaaaatagtgagagagaagctggaaaaaaacacaaggtaagagaaatcacagtacaccaaagggtcactgttgattttgtagcactgcatatagtaacactcttactaccacagttatctcacttcttttgtcttagaatagaaagagtaatcatttatttagaaaaacctatttttgcccggctgcggtggctcatgcctg

SEQ ID NO: 67349 - DNA, 540 bp, Homo sapiens
gttctccagtgctttccattcggctggccacattgacagtgtttccccagatgtcatactgaggttttcgggccccaatcactccagcaatcacaggcccatggtttatgcctgaagatgatgtttacagttacccaagcgtgcaggcaaagcctcaagcttctgcccttagaggaggccagagaatccataccccagcacaggatgcggggacaaaacaactagagtgaaggctgggttgcttcccagagtcactgcgttgcagtcgggcttggggtatgaggagggcattccccggccagctctttttcagactcagaagtctgggtttgatgttaacacttgtatctgctaatctctcttttaacaaagaatactttgttaaaagtattaacaaaggcctggctttgagcgcaggcccgcaactatttaggtttagtaactttgcttccttctctatattttaaggtcacctgtttacagacaataattttggttctccattttctgtagttacgtattattaaaactctcaatggt

SEQ ID NO: 67350 - DNA, 397 bp, Homo sapiens
cccagccctgcaaagtattgccacctagttggtgttgtaattgtgacttcaaaaggccattccaccattctgtcaacccagctgcttcaggatgatggggaacatggtaagaccagtgaattccatgagcatgagccccctgccacacttctttagccataaagtgagtgccttggtcagaggcaatgctgtgtggaacaccatgatggtggacaaggcattctgtgagtccatggatggtagtcttcacagaagcattgcatgcaggataggcaaacccatatctaaagtaagtgtctattccagtgaggacaaacctctgcccttcccatgatggaagaggtccaatataatcaacctgccaccaggtagctggctgaccactccaaggaatggg

SEQ ID NO: 67351 - DNA, 579 bp, Homo sapiens
ctgtcctcttcagcctcagtcaacagctgtgctgtgaacccttgtcttcacaatggcgaatgcgtcgcagacaacaccagccgtggctaccactgcaggtgcccgccttcctggcaaggggatgattgcagtgtggatgtgaatgagtgcctgtcgaacccctgcccatccacagccacgtgcaacaatactcagggatcctttatctgcaaatgcccggttgggtaccagttggaaaaagggatatgcaatttggttagaaccttcgtgacagagtttaaattaaagagaacttttcttaatacaactgtggaaaaacattcagacctacaagaagttgaaaatgagatcaccaaaacgttaaatatgtgtttttcagcgttacctagttacatccgatctacagttcacgcctctagggagtccaacgcggtggtgatctcactgcaaacaaccttttccctggcctccaatgtgacgctatttgacctggctgataggatgcagaaatgtgtcaactcctgcaagtcctctgctgaggtctgccagctcttgggatctcagaggcggatctttaga

SEQ ID NO: 67352 - DNA, 1036 bp, Homo sapiens
aaaagaaagatgtggcccaaagcctagagaactatacgtccaagtgtcctgggaccatggagcccatcgccctccctggcggcctcaccctgccaccggtgcccttcaccaagcttcccatcgtcaggcatgtgaaactattgaaccttcctgctagcctccggccacacaaaatgaaaagcttgctgggtcagaacgtgtcaaccaaaagtcctttcatctattcaccaattatcgcacacaaccgtggagaagagcggaacaagaaaatagatttccagtgggttcaaggagatgtgtgtgaagttcagctgatggtatataacccaatgccgtttgaacttcgagttgaaaacatggggctgctcaccagcggagtggagttcgagtctctccctgcggcgctttctcttccggctgaatctggtctgtacccagtgacgctcgtcggggtcccgcagacgactggaacgattactgtgaacggttaccataccacggtcttcggtgtgttcagtgactgtttgctggataacctgccgggaataaaaaccagtggctccacagtggaagtcattcccgcgttgccaagactgcagatcagcacctctctgcccagatctgcacattcattgcaaccttcttctggtgatgaaatatctactaatgtatctgtccagctttacaatggagaaagtcagcaactaatcattaaattggaaaatattggaatggaaccattggagaaactggaggtcacctcgaaagttctcaccactaaagaaaaattgtatggcgacttcttgagctggaagctagaggaaacccttgcccagttccctttgcagcctgggaaggtggccacgttcacaatcaacatcaaagtgaagctggatttctcctgccaggagaatctcctgcaggatctcagtgatgatggaatcagtgtgagtggctttcccctgtccagtccttttcggcaggtcgttcggccccgagtggagggcaaacctgtgaacccacccgagcatgtatt

SEQ ID NO: 67353 - DNA, 399 bp, Homo sapiens
ctgggtgataaaagtgcagatggtgcagctgcatattgcaaaaccccgcctggatgactactattaccaggaatattaccagaagctagagaagaagcaggcagacgaagagctacttggacgaagaaaccgggttgagtccctcaagctggtaacgccttacattccgaaggcagaggcttatgagtccgtggtccgaatcgagggttccctgggccaggtagctgtgtcgacatgcttcagccctcgccgagctattgatgcggtaccccatggaactcaagagcaggatatagaagctgcaagcagtcagaggcttcgggtattataccggattgagaagatgttccttcagttactagaaatagaggaaggctggaagtataggcctccaccgcc

SEQ ID NO: 67354 - DNA, 670 bp, Homo sapiens
gcaatgaaaagataggggagtgggtgcagtgtttgtttggcaggcccaggctggtcagggacagggtttgaccctctggctttgtcctcagatgtgaatgaatgcacctccggacaaaacccgtgccacagctccacccactgcctcaacaacgtgggcagctatcagtgccgctgccgcccgggctggcaaccgattccggggtcccccaatggcccaaacaataccgtctgtgaaggtcgagagctcagatcccacgtttctagcgacccacaaacatctgatcacatgttcaacggcgcccacacaaaccaagcagaatgagcgctggaggcacctggctgtgccaggcgttcgttcattcttctgaggctagatgagaaaagagcaagggtcctccggaaggagctggggtactgaggggggaggctcagggggaccccaggcaacagctgatgactcactgggaggaaggcgtttcaccatattcataacctgctcatctgcacggggcccacctgctgtgcccaggcctctccacgcttccataacccagcgtccaccactccaaggggggcactaatgccaggaggaatgagctgggggcacagacaggagacaggaccctctccaggctgggacaggacctgacccccttcttcctgtcctc

SEQ ID NO: 67355 - DNA, 563 bp, Homo sapiens
  misc_feature (1)...(563): n = a,t,c or g
gctgatgacaccttacacttatggaatttacgtcagaagaggcctgccatactacattcgcttaaattttgcagagaaagggttacattttgccatctgcctttccagagtaagtggctctatgtgggcactgaacgaggtaatatacatattgtcaatgtggagtccttcacactctcaggctacgtcattatgtggaataaagccattgaactgtcatctaaatctcacccaggacctgtggtccatataagtgataatccaatggacgagggaaagcttttgattggctttgaatctggaacagtagttttatgggacctcaaatcaaagaaagccgactacagatacacatatgatgaggctatccactctgttgcttggcatcatgaaggaaaacaatttatttgcagtcattcagatggcaccttgactatatggaatgtaaggtcccctgctaaaccagtacagacaatcactccacatggaaaacagttaaaggatgggaagaagccagaaccatgcaaacctatcctcaaggtggaattcanaacgactagatc

SEQ ID NO: 67356 - DNA, 1404 bp, Homo sapiens
ttccacaatcaactttggcatgttttgactggcaggagcttcagctggtgtaggcggtgccagggacaaagggggaaaagtgccccggcctctgggagaagcacttccccaccctcatcctgggaagccatcgagtggtcaccaatggggttcctgggttccagtcgtggctctatttctcaaagccctgtgaccgtgggcacgttgccgaacctctgtgggctcttgccttcaccaacacctatctcttctacggtgcgtaccgagtggggccggagagcagctccgtgtacagcatccgcctggcctacctcctcagcccgctggcctgcctgctcctctgcttctgtgggactctgcggcggatggtgaaggggctgccgcagaagactctgctgggtcagggctatcaggcgcctctcagcgccaaggtcttctcctcatgggacttctgcatccgggtgcaggaagcagccaccatcaagaagcatgagatcagcaacgagttcaaggtggagctggaggagggccgtcgcttccagctgatgcagcagcagacccgggcccagacggcctgccgcctgctctcctacctgcgggtcaacgtactcatcgggctcctggtggttggggccatcagcgccatcttctgggctaccaagtactcacaggacaacaaggaggagtccctgtttctgctgctccagtacctgccccctggggtcatcgccctggtcaacttcctgggtcccctgctgttcacatttctggtccagctggagaactaccctcccaacacggaggtcaacctcactctgatctggtgcgtggtgctgaagctggccagcttggggatgttctccgtctccctgggtcagaccatactgtgcattggcagagacaagagcagctgtgagtcctacggctacaacgtttgtgactatcagtgctgggagaactccgtgggggaggagctgtacaagctgagtatcttcaacttcctcctcaccgtggccttcgccttcctggtcaccctgcctcggaggctgctggtggaccggttctcaggccggttctgggcctggctggaacgggaggagttcctggtccccaagaatgtgctggacatcgtggcggggcagacggtcacctggatgggcctcttctactgccccctgctgcccctgctgaatagcgtcttcctcttcctcaccttctacatcaagaaggtgacggctcatggctggggggtatggggttcgtgcctctgggtggatgccttgagctgggctcgcctcctgctcctgctcctgcccccttccctgggtgtcagccccctggggtctgcataactcgctgactcctggttgctattgcttgcgcccccagtacacccttctgaaa

SEQ ID NO: 67357 - DNA, 799 bp, Homo sapiens
cggacgcgtgggctgcttcgaagggcgtttccatgaacgctgtcagcagccctgcaagcgcctgcttatctgctcacacaagtgccaggaaccatgcattggtgagtgcccaccctgccagcggacctgtcagaaccgctgtgtccacagccagtgcaagaagaaatgtggggagctgtgtagtccctgcgtggaaccctgtgtctggcgctgccagcactaccagtgcaccaaactctgctctgagccctgcaaccgacccccatgctatgtgccttgtactaagctgctagtttgtggccacccctgcattggtctctgtggggagccatgccccaagaaatgccggatctgccacatggatgaggtcacccaaatattctttggctttgaggatgagcctgatgcccgctttgtgcagctggaagactgcagccacatctttgaggtgcaagccctagaccgctacatgaatgaacagaaggatgatgaagtcgccatcagattgaaagtctgccctatctgccaggtgcccatccgcaaaaacctgaggtatggaactagcataaaacagcggctagaagagattgaaatcatcaaggaaaagatccagggctcagcaggggaaatagcaaccagccaggaacggcttaaggccctgctggagaggaagagcctcctccaccagctgcttcctgaagacttcctgatgttaaaggagaagctggcccagaaaaatctgtcagtgaaggacctgggtctggatgagaattacatcaacttctatgaccacctggcc

SEQ ID NO: 67358 - DNA, 767 bp, Homo sapiens
tgaagagtgggaggacgaaggggaaagtggctgaggggcttctcactatttttaagacggacaagacttgagtccagctgaagtctgagaggaagacgtaaacagggagaggctggaggcagaagagagcatgacggggctttatactgttggttaaacttctgccggcggacgcagcagcaggcggccagcgtggtgaggaggatggcagagaccagtatgaaggtcaagccaggtgagctggaactcagcctggggctgggaggccgtctgaaaggcctcgatgctgttgcagctcaggtctagcacccgcagctgctggaggctgaagtcggagatgcaggcctccaggaaccccagcctttcccagaaaaaggtctgactttcacaatcaccgggctcaggctcaccgcccccagcttctgtctccgccaacccgttctgacccactcactgctaaatgcctgacaactgctcaaaagctctactctgacaatgaggcagcttggcttaaacttctccacggtgaagtccagggatccccagcagggccttcgaggctgtttgtagcccctgccaacctgtcccccacctcccaccccagcccacatgcagtgaccacagctgaccactgcccatcatggggttcccacacccactgctggggcctgctccctgagctggttatgccatccccaaccagatccacacatgaactcttcacactgagcttcagggcctcctccaccagggagccctccctgacg

SEQ ID NO: 67359 - DNA, 1220 bp, Homo sapiens
ttttttttttttaagaaaaatagaggccaggtgcggtggctcacacctgcaatcccagcactttgggaggccaaggtctctctctggagcagagtaagtggccagtgcatgtcaagagaggaagaaaaaaacaagtgccatgagtgaaccttttaacatgtcacttcttttccctgtcagggggtgtcttccaaccttttctttgtagaacacaactttcctgaacaggaaatccaagagggcaaaagccatcagaaccagcatgaggctcactttgtggtagagctgtgcaagtacttcctgtgccaggaatacctgccttcccagatcaccatcctcactacctataccgggcagctcttctgcctgcgcaaactgatgcctgccaagacatttgctggcgtcagggtccatgttgtggacaaataccaaggggaagagaatgacatcatcctcctctcgctagtgcggagcaaccaagaaggcaaggtgggttttctgcagatatccaaccgcatctgtgtggccttgtcccgagccaagaagggaatgtactgcatcggaaacatgcagatgctggccaaggtgcccctgtggagcaagatcattcatacacttcgagagaacaatcaaataggccccatgctccggctctgctgccagaaccaccctgaaacccacaccttagtatccaaagcttctgacttccaaaaagtacccgaaggaggctgcagcctgccctgcgagttccgcctgggctgtgggcatgtctgcacccgtgcctgccacccttatgactcttcacacaaggagttccaatgcatgaagccatgccagaaggtcatctgtcaggaagggcaccggtgtccccttgtttgcttccaggagtgtcagccttgtcaggtgaaggtgcccaaaaccattcctcggtgcggccatgaacaaatggtcccttgttccgtgcctgagtcagatttctgctgccaggagccttgctccaagtctctgagatgtgggcacagatgcagccacccatgtggtgaggactgtgtgcagttgtgttcagaaatggtcaccataaaactcaagtgtgggcacagtcaaccggtaaaatgtggtcatgtggaaggcctcctgtatggtggtctgctagtcaagtgtaccacaaagtgtggcactatcttggactgcgggcatccttgcccaggctcctgccacag

SEQ ID NO: 67360 - DNA, 717 bp, Homo sapiens
tgaactgagccacccagagacttcaggcagaaatcaccaacctcaggaaacagatgggaccccaactcagcagtgtgctgccctgcaagacaccatcctggaggcagagcagaagggcaaggtagccatcggagatgcccaggacaagctggctgaggtggaggctggaccagctgctctgtgcggttcctggagcagcagaaccaggtgctggagaccaagtgggagctgctacagcagctggacctgaacaactgcaagaataacctggagcccatccttgagggctacatcagcaacctgcggaagcagctggagacgctgtctggggacagggtgaggctggactcggagctgaggagcgtgcgggacgtagtggaggactacaaaaagaggtgagcaggaggagtccccctgtaactggacaactgcccttgtccctccaagggacccctggcagtcaccccagcttaaatgctttggaggtcagtggagggcattgttcttggtcatatcaagcagaatcaccccaacaaaactctggaacttgctctctgctcctccagcctctggcctgactcttaggacaaatgcccagtgagctgggcagtgggcagagggttatctctggctctgggtttagggaatgtttggggaaaccactcacgttctcctcccatgtaagaggagggttaagtgcatctggcttcaagactg

SEQ ID NO: 67361 - DNA, 427 bp, Homo sapiens
cccacgcgtccgtgacactccaagagtctttcaccaaacaggtagttgttcattgtttcagcaactatcttggcaacatcctcagactcaaactccacaaatgcatagcctttgccatttccagtcattttacttctggacagtctgaactgtgtcacagtgccaaactgggagaaatatgaaaagatctgggtttcgttaagtagggttgttcttgttttttttgctgggttatgtgcttgcaaacctgcgccacctccttttgaaactggacatcttcctgcgggttaagcagtgagatctcagccaggccagaaaaagctgccatgccaaaagcggccgacactaactccacgcggtgctcctggaaacgtcgggctcccagctcccatgaggcagaaaacgggcatctattcttttaacatac

SEQ ID NO: 67362 - DNA, 416 bp, Homo sapiens
tttgcagtggaacattttttccatatagctccaatcctgctaatccgaagccaaagagagtgtttcttcagcatatgactagaacattccatgacttggaaggaaatgcagttaaacgggactctggaatatggatcaatgggtttgattatactggaatttctcacataacccctcacattcctgagatcaatgatagtatccgagctcactgtgaggagaatgcacctctttgtggttttccttggtatcttccagtgcactttctgatcaggaaaaactggtatcttcctgccccagaagtttctccaagaaatcctcctcatttccgactcatatccaaagaacagacaccttgggattctataaaattgacttttgaagcaacaggaccaagccatatgtccttctatgtt

SEQ ID NO: 67363 - DNA, 497 bp, Homo sapiens
agacattgtatacgagaaggggggcacgacgtcccaagtaataaagatgtcacctcactggactggaacagtgatggaacactattggctatgggttcatatgatggtttcgcaagaatatggacagaaaatggtaacctggccagcaccttatgccaacataaaggccccatcttcgctctgaaatggaacaaaaaggggaattatgttttgagtgctggtgtagacaaaacaacaataatttgggatgctcacacaggagaagccaaacagcagtttccttttcattcagcccccgcccttgatgtggactggcagaacaacatgacctttgcctcctgtagcacagacatgtgtatccatgtgtgcaggctcggctgtgaccacccagtcaaaacctttcagggacacacaaacgaggtcaatgccatcaaatgggatccttctggaatgttgctggcggtctgctcggatgacatgacattgaagatctggag

SEQ ID NO: 67364 - DNA, 498 bp, Homo sapiens
tttcgtggcgccgtgggcaagagcagcctcatcgtcagctacacctgcaatgggtaccccgcgcgctaccggcccactgcgctggacaccttctctgtgcaagtcctggtggatggagctccggtgcgcattgagctctgggacacagcgggacaggaggattttgaccgacttcgttccctttgctacccggataccgatgtcttcctggcgtgcttcagcgtggtgcagcccagctcctttcaaaacatcacagagaaatggctgcccgagatccgcacgcacaacccccaggcgcctgtgctgctggtgggcacccaggccgacctgagggacgatgtcaacgtactaattcagctggaccaggggggccgggagggccccgtgccccaaccccaggctcagggtctggccgagaagatccgagcctgctgctaccttgagtgctcagccttgacgcagaagaacttgaaggaagtatttgactcggctattctc

SEQ ID NO: 67365 - DNA, 780 bp, Homo sapiens
  misc_feature (1)...(780): n = a,t,c or g
tctaaaggctcctttgcttttgggaaatgtgctcagaggaagaactctgcagctgaactgtccctccctctggggctgccctgggtctttggctgcctgtgtcctcagggtggggcaggttggcacttccctctggctctccccggagcagggcttgccgcttgtcctcctctctactcacaaaaccctcctggatgggatcctgctgccctttatgctgctctcccagggcctgggtgtgcttcgtgtggcctgggactcccgcgcctgctcccctgccctcaggcctcggcccccctggggctgtggacaggagctctggctgtcctacgtagcttggggagccgctggggctgcagccaccggatctgctcctgggtgcgcctagctcagcccttttccctgcaggaatacatcgtcagtgccagaagctgctggggcggcaaacagaccctggagcagctactgcagcccatcgtgctgggccaatgtactgctgtcccagacactgagaaggagcaggagtggacccccataactgggcctctcctggccctcaaggaagaggaccagctcctggtcaggagactgagctgtcatgtcctgagtgccagagtagggagctctgcggagatgagcacggccattatggcaacgctgctgctcttcaagcatcagaagggtgtgttcctgtcgcagctcctggnggagttctcctggctgacggaggagatactagtgcgtggctttgatgtangcttctctgggcagctgcggagc

SEQ ID NO: 67366 - DNA, 558 bp, Homo sapiens
aatacatgggtgcttagggcaaagtggccctctccaccttccagggacacattgacatgggcaaagtcaccatcatctgggtctgacacagagatgcgagcaacgagctgtccaggtggggcggcctcagacacttggggggagccatctgcactgagaaagatgacagtcatggagggctgattgtcattggcatctcgcacatgcacagtcacaaaggccgagcccagctcagggtgagccccaccatctcgtgcttgcaccaccagttcatggacccgccgctgctcaaagtccagtggccgctctaactgcagcagccccgtgtgtgcgtcgatggagaagggtccatcaccctcgctctgcctccggttgatctcgtaagtcacagccccattgacaccagcatcggcatcagatgcgaacacctgcaagacaggactgccaggggccaggctctcagacaccacagcatggtagcggctctgattgaaagccggggcatggtcattgatgtccagcagtgtcacgtccagcagggcctgggcccttcggggg

SEQ ID NO: 67367 - DNA, 569 bp, Homo sapiens
caccgtgctggaattccccggtcgacgatttcgtcaggagcaccggtgcagcccaagtggtgactgtctcaatgtccctggctcctaccgctgcacctgtcgccagggctttgccggggatggcttcttctgcgaagacagggatgaatgtgccgagaacgtggacctctgtgacaacgggcagtgcctcaatgcgcccggcgggtaccgctgtgaatgtgagatgggctttgaccccaccgaggaccaccgggcctgccaggatgtggacgagtgtgcgcaagggaacctctgtgcatttgggagctgtgagaacctgcctggaatgttccgctgcatctgcaatggtggctacgaactggaccgagggggtggcaactgcacagacatcaacgagtgtgcagacccagtaaactgcatcaacggcgtgtgcattaacacccccggcagctacctctgcagctgcccccaggattttgagctgaaccccagcggagtgggctgcgtggacactcgggccgggaactgtttcctggagacgcatgaccgaggggacagtggcatttcct

SEQ ID NO: 67368 - DNA, 568 bp, Homo sapiens
caccgttcttgaattcccgggtcgacgatttcgttgcaagaggtgccactcaaatcatcacagtaatgaagtgggggccgctgcggagactcacctctatcagacctctcctccgcccatcaacacgcgggaatgcggcgctgaggagctggtctgcgccgtggaagccgtgatcagcttgttgaaagaagccgagttccatgctgagcagcgagaacatgagctgaaccggcggcggcagctgggcctctcctcttcccaccattccctggataatgctgactttgataacaaggacgatgataaacacgatcagaggctgctcagtcaattcggaatatggttcttagtgagcctctgcacacccagtgagaacacgcctacagaaagcttggcccggctggtggccatggtgtttcagtggtttcactccactgcgtatatgatggatgatgaagtgggaagtctggtggaaaagctgaagcctcagtttgtcaccaaatggctgaagaccgtatgtgatgttcgcttcgatgtcatggtcatgtgccttcttcctaaacccatg

SEQ ID NO: 67369 - DNA, 542 bp, Homo sapiens
tttcgtaaagagggactcactgggaaatactgtgataaatctgttactcctgacactgccttatcattagaaggcaaagggcgcttggactaccacatgagtcagaatgagaagcgggaatgtttgttaaggcaaagcttacgaggtgccatgttggagccttttggtgtgaacagtctggaagtaaaatttaggaccagaagcgagaatggcgttttaatccatatccaagaaagcagcaattacactactgtgaagattaagaatggcaaagtatattttacatccgatgcaggaattgctgggaaagtggagagaaatattcctgaagtatatgttgcagacggccactggcacacttttctaattgggaaaaatggaacagcaacagtattgtctgttgacagaatatataacagagatattatccaccctactcaggacttcggtggccttgatgtgcttactatatcacttggaggaattccacccaatcaagcacatcgagatgcccaaacagcaggttttgatggctgcattgc

SEQ ID NO: 67370 - DNA, 557 bp, Homo sapiens
gaattcccgggtcgacgatttcgtggcgcttgcagccaggcagggcccagatcagtcctccctcggcatggggctggaggctcagaggctgccaggggctgaggaggccccagtgcgggttgccctgcgagttcgaccactgctgcccaaggagctgctgcacgggcatcagagctgcctgcaggtggagccagggcttggccgcgtcactctgggccgtgaccgacactttggcttccacgtggtgctggccgaggatgccgggcaggaggccgtgtaccaggcctgcgttcagcccctccttgaggccttcttcgagggcttcaatgccactgtctttgcctatggtcagacgggctcagggaagacatacaccatgggggaggccagtgtgggtgagtgaccctgttcgtggccctgtgcccactttaaggagccttagttccttcctggatttctgccccgtcctcttgctgcctgttctgtggaaggtggggatgctgggggaggaagagttgatttcctagacagggatctgtggcccaggctgggaccaa

SEQ ID NO: 67371 - DNA, 560 bp, Homo sapiens
ttccattaaaaaatatttgagctcagactgcccagtcccaagccaatgtgtgcttgctcggaccttgaataaacagggcatgatgatgagtatcgccaccaagatcgctatgcagatgacttgcaagctcggaggcgagctgtgggctgtggaaatacctttaaagtccctgatggtggtcggtattgatgtctgtaaagatgcactcagcaaggacgtgatggttgttggatgcgtggccagtgttaaccccagaatcaccaggtggttttcccgctgtatccttcagagaacaatgactgatgttgcagattgcttgaaagttttcatgactggagcactcaacaaatggtacaagtacaatcatgatttgccagcacggataattgtgtaccgtgctggtgtaggggatggtcagctgaaaacacttattgaatatgaagtcccacagctgctgagcagtgtggcagaatccagctcaaataccagctcaagactgtcggtgattgtggtcaggaagaagtgcatgccacgattctttaccgaaatgaaccgcactg

SEQ ID NO: 67372 - DNA, 531 bp, Homo sapiens
taccttggtttatagggaaaattatccagatctacgaaatgatgctggtgagacatggctatatgattgtaggagaccccatgggcggcaagacctctgcttataaagtgttggctgcagctctcggcgatttacacgcagccaatcagatggaggagtttgctgtggagtacaagatcatcaaccccaaggctatcacgatggggcagctgtatgggtgctttgaccaagtgagccacgagtggatggatggtgtccttgccaatgctttccgggagcaagcgtcttcactctctgatgatcgcaagtggattatatttgatgggccagtggatgctatttggattgaaaatatgaacactgttctggatgacaataaaaagctgtgtctcatgagtggggaaattatccagatgaactccaagatgagcctgatcttcgagcccgccgacctcgagcaagcctctccagccactgtgagcaggtgtgggatgatctacatggagccccatcaactaggctggaagcccc

SEQ ID NO: 67373 - DNA, 536 bp, Homo sapiens
ctggggtgccccgcaacctgccttccagcctggagtatctgctgttgtcctacaaccgcatcgtcaaactggcgcctgaggacctggccaatctgaccgccctgcgtgtgctcgatgtgggcggaaattgccgccgctgcgaccacgctcccaacccctgcatggagtgccctcgtcacttcccccagctacatcccgataccttcagccacctgagccgtcttgaaggcctggtgttgaaggacagttctctctcctggctgaatgccagttggttccgtgggctgggaaacctccgagtgctggacctgagtgagaacttcctctacaaatgcatcactaaaaccaaggccttccagggcctaacacagctgcgcaagcttaacctgtccttcaattaccaaaagagggtgtcctttgcccaccttgtctctgggccccctttccttcggggaagcctgggtcgccccttgaagggagctgggacatggcacggcaatctttctttcccgctccacttcgaatgggggaagacc

SEQ ID NO: 67374 - DNA, 539 bp, Homo sapiens
  misc_feature (1)...(539): n = a,t,c or g
gtcagatggttctgtgaagggaaagaactgcacaacactcctgatattcaaatccactgtgagggaggggacctccataccctgatcatagcagaggcctttgaggacgacacaggtcgctacacctgtttggctacgaatcccagcggctcagacacaacatctgctgaggtgttcattgaaggtgccagttcaacagattctgacagtgaaagtttagctttcaaatcaagagctggagctatgccacaagctcaaaagaaaacaacttctgtttccttgacaataggatcatcatctccaaagacaggggtgaccacagctgtgattcaaccactgtctgtccctgtgcaacaggttcacagtccaacttcatatctctgccgacctgatggaaccactactgcctactttcctcctgtttttacaaaggaactggcaaaacacaggcccgtggcggaaggggccaggtggtgggttctgggagtgccgggtccgtggggcnnnaccccctctgcagggtccaggtggggggtttc

SEQ ID NO: 67375 - DNA, 568 bp, Homo sapiens
tttcgttgcgttcgcatgtgcatattaagatttgtggaacgagcaaatgctttaccgcattccttacattcacaggccttttctccagtgtgagttcttaaatgggtactaaggcccgaggattgagtgaaagctttcccacattctttgcattcatatggcttctctccagtgtgaatccttacatgttgactaagcattgaggaattattaaaggctttcccacattctttacattcatagggcttttctccagtatgtgttctcatgtgtaaaacaagtcctgaggaacgagtaaaagctttcccacatgccttacataaatacagcttctctccactgtgaatccttacatgttttgtaaggtatgaggaatgaataaaagcttttccacactccttacattcatatggcttttctccagtgtgaattcgcatgtgtaaaataagtcctgtggatctagtgaaggcttttccacattccatacatacatagggcttctttccactgtggattcttgtatgatcagtaaggtatgaagaatgggtgaaggctttcccacactctt

SEQ ID NO: 67376 - DNA, 572 bp, Homo sapiens
  misc_feature (1)...(572): n = a,t,c or g
tttcgtatttgggagaccaaagtggggagaaactctttgactgcagccagtgcaggaaatccttccactgtaagtcatatgttcttgaacatcaaaggattcacacccaggagaagccctataaatgtaccaaatgtaggaaaacctttagatggagatcaaactttactcgtcatatgaggttgcatgaggaggaaaaattctacaaacaagatgaatgtcgtgaaggcttcaggcaatctcctgactgcagtcagccccagggtgctcccgctgtggagaaaacatttctgtgtcagcagtgtgggaaaacttttactagaaagaaaactctcgttgaccaccagagaattcacacaggtgagaaaccttaccagtgtagcgattgtgggaaggactttgcctataggtcagcctttattgttcataagaagaagcatgccatgaaaagaaaacctgagggcgggccatcttttnagtcaggacacagtgttccaggttcctcaaacagtcactccaaaaaggagccctacaaatgcagccagtgtggcaaggcctttcgcaatcactca

SEQ ID NO: 67377 - DNA, 784 bp, Homo sapiens
tttcgtgtcagcacctctgtgtgagaggctgctacctgaggtgggatggccatgggtgggtcccagctcctgcaccccagtgttctcccacagggttctctctggctcccacacccacccctcattcctcagtttccccatggagggcagctgctggcattcttgctctgcccaggcttactatgaaggctgctgaggaacctgtaaacacatctctggcctcaccagaggcccttcctgttcgcattcctcagatggcaagactgtaaattcacctgtcacccagaatgccgcagcctgatccagttggactgcagtcagcaggagggtttatcccgggacagaccctctccagaaagcaccctcaccgtaaccttcagccagaatgtctgtaaacctgtggaggagacacagcgcccgcccacactgcaggagatcaagcagaagatcgacagctacaacacgcgagagaagaactgcctgggcatgaaactgagtgaagacggcacctacacgggtttcatcaaagtgcatctgaaactccggcggcctgtgacggtgcctgctgggatccggccccagtccatctatgatgccatcaaggaggtgaacctggcggctaccacggacaagcggacatccttctacctgcccctagatgccatcaagcagctgcacatcagcagcaccaccaccgtcagtgaggtcatccaggggctgctcaagaagttcatggttgtggacaatccccagaagtttgcactttttaagcggatacacaagg

SEQ ID NO: 67378 - DNA, 387 bp, Homo sapiens
tttcgtcccaagtacacttggtgcagtctggggctgaggtgaagaagcctggggcctcagtgaaagtctcctgtaaggcttctggatacatctttagcgactacttattacactgggtgcgacaggcccctggacaagggcttgagtggatgggatggttcaatcccaaaagtggcgccacagagtatgcacagaagtctcggggcagggtcaccatgaccaggatcatgtccatcagcacggcctacatggaactgagcaggcttacatctgacgacacggccatttattactgcgcgagagggagttactatgttcagctggtgtacagtatagtgaggggtgcttttgacaggtggggccaggggacagtggtcaccgtctctt

SEQ ID NO: 67379 - DNA, 572 bp, Homo sapiens
cctgctgagtggtggtgacaagtggagccgccaccgtcggatgttgacgcctgccttccatttcaacatcttgaagccttatatgaagattttcaacaagagtgtgaacatcatgcacgacaagtggcagcgcctggcctcagagggcagcgccagactggacatgtttgaacacatcagcctcatgaccttggacagtctgcagaaatgtgtcttcagctttgaaagcaattgtcaggagaagcccagtgaatatattgccgccatcttggagctcagtgcctttgtagaaaagagaaaccagcagattctcttgcacacggacttcctgtattatctcactcctgatgggcagcgcttccgcagggcctgccacctggtgcacgacttcacagatgccgtcatccaggagcggcgccgcaccctccccactcagggtattgatgatttcctcaagaacaaggcaaagtccaagactttagacttcattgatgtgcttctgctgagcaaggatgaagatgggaaggaattgtctgatgaggacataagagcagaagctgacaccttcatgt

SEQ ID NO: 67380 - DNA, 913 bp, Homo sapiens
cagatctgcgatttcttggagacatctcgcgcatagctgctgatgtgacagtgttatcacatgttaattttcctatgatgggtcgtgtgggagtaatcactgtggttctttgattctgcttagggcaagcaagctccacatatgcggaacaaactggaaagctgaccgaatttgtgtctaacctggcgtgggatttcgcagtcaaagaagggttccgggttttcaaagagatgcccttcacaaatccgttaacaaggtcctaccacacgtgggccaggccccagtcccagtggtgccccacaggcagcaggagttatagctccgttccagaagcttccccagctcatacctcaaggggaggtctggttatctctccagagagcctctctccacctgtcagagagctgtatcaccggctgaagcacttcatggagcaacgtgtgtaccctgcagagccagagctgcagagtcaccaggcctcagcagccaggtggagcccctccccactgatcgaagacctcaaggagaaagccaaagctgaaggactttggaaccttttcctacccttagaggctgatcccgagaaaaaatacggagcaggactgaccaatgtggaatatgcacatctgtgtgagctcatgggcacgtccctgtatgcccccgaggtatgtaactgctctgcgcctgacacgggcaacatggagctgctggtgaggtatggcaccgaagcgcagaaggctcgctggctgattcctctgctggaggggaaagcccgctcctgttttgctatgaccgagccccaggttgcctcttcagatgccaccaacattgaggcttccatcagagaggaggacagcttctatgtcataaatggtcacaaatggtggatcacaggcatcctggatcctcgttg

SEQ ID NO: 67381 - DNA, 606 bp, Homo sapiens
tttcgtgcaactggttcgggaaggggaagcgggggttcatcatgggcatctggaattcccacacatctgtgggcgacatcctgggctccctgatcgccggcatctgggtgaacgggcagtggggcctgtcgttcatcgtgcctggcatcattactgccgtcatgggcgtcatcaccttcctcttcctcatcgaacacccagaagatgtggactgcgcccctcctcagcaccacggtgagccagctgagaaccaggacaaccctgaggaccctgggaacagtccctgctctatcaaggagagcggccttgagactgtggccaaatgctccaaggggccatgcgaagagcctgctgccatcagcttctttggggcgctccggatcccaggcgtggacgagttctctctgtgtctgctgatagccaagctggtcagttacaccttcctctactggctgcccctctacatcgccaatgtggctcactttagtgccaaggaggctggggacctgtctacactcttccatgttggtggcatcataggcggaatcgaggcagggctcgtctctgactacaccaatggcagggccaccacttgctgtgtcatgg

SEQ ID NO: 67382 - DNA, 512 bp, Homo sapiens
tttcgttctgtcagaacctgatggctgcctccagtgtcgctcccccggagaggtgaaggcgcgggcagctccctgagtggtggggctcctctgggtgccacctcttgctgggccaagtctgcagaccagggactcatgagctcgtctccgcaggagcatgcggcgatgctgagtttcatcaaataggacgcagcagaagttgggaagcactgcagaagatgggttgtcttccagaaagaccactgttttggggaacagcttggctctttcttcggccgctggtggttggattagctgttggagggatgtgcaggactgaatggctagtactgatggtttcacggctgtctctgcaggcagggtccctgggctgccctcttcgtgaggaccatgtgtggacgtgtgctccctgcagtgctcacccggctctgccagctgctccgtcaccaggtgaggctctccttcatgggggccacccttgggggcccactctgagggccaggctgctactt

SEQ ID NO: 67383 - DNA, 340 bp, Homo sapiens
gccgctgcattatctcaggaatcgttctgggatctctatatggcctgatgccgctgtacctcaatcacaaaggggtgagcaatgccagcattggtttctggatggcggtactggtcagtgcgggtatccttggacaatggccgattggacgtctggcggataagtttggtcgactgctggtgttgcgtgttcaggtctttgtcgtcattctcggcagtatcgcgatgcttagccaggcggcgatggccccagcgttattcatcctcggtgccgctggctttacgctatatccggtggcgatggcatgggcttgcgagaaagttgaacatcatcaactggt

SEQ ID NO: 67384 - DNA, 463 bp, Homo sapiens
tgaacacttctttgccgcgcttaatgcggcggtagcctctgatggtacgtttatttatgtgcctaaaggcgtgcgctgcccgatggaactttccacctattttcgcattaacgcacaaaaaaccgggcagtttgagcgcaccattctggtggccgacgaagacagctacgtcagctacattgaaggctgttccgctccggtgcgtgacagctatcagttacacgcggcagtggtggaagtcatcatccataaaaacgccgaggtgaaatattccacggtacaaaactggtttcctggcgataacaacaccggcggtattctcaacttcgtcaccaagcgtgctttgtgcgaaggcgaaaacagcaaaatgtcatggacgcaatcagaaaccgggtcagcgattacgtggaaatatcccagctgcattttgcgcggcgataactccattggtgagtttttgtca

SEQ ID NO: 67385 - DNA, 435 bp, Homo sapiens
ctgcagctagataatttcctcaccaccggatttctcgacatcatcccactaagtcagccgctggagtttcggcgggaagggttgcaacatggggtgctggataagctgcgcagtggtaaatatccgcaacaggcgagcctgaatcttttgcgccagccggtggaagagtgccgcaaaatggtgttcagttttattcaacaagccctggcggatggtttgcgtaacgtgctgattattcatggtaaagggcgggatgataaatcgcatgccaatattgtccgcagctatgtggcgcgctggctgaccgaatttgatgatgttcaggcatattgcaccgcgctaccgcatcatggcggcagcggggcgtgttacgtcgcactacgtaaaacggcgcaggcgaagcaagaaaactgggagcgccacgctaagcgcagt

SEQ ID NO: 67386 - DNA, 440 bp, Homo sapiens
atccccggtgaggcattcggcacgagatggaaccttgtttttgtcggcttattttcctagatgggaagtgatggaattttacgcctcagtacttcagctctaaataatgaattctttgcatatgcagcacaagggtggaaacagcgactggcagaaggtaaatttgtattttctattattatgtgacatattggagtacacataccgtactgagcttgtacctttctctgatttttcagtcttttccccgacacagtacactttaatttagtaaaaactcatatccctttccaaatgagttcactgattcttttgttatacttgacattattgatgtcagatatttttgaagaaagcataattttatcttggacatcataaaatttttgatgcagcaacattttcttgcggatggtaattttaatgacattggttgatcc

SEQ ID NO: 67387 - DNA, 467 bp, Homo sapiens
tggggaattcggcacgaggaccactggcagggtaatgcccaccgctcgcagacccgggacgagtttgcccagctcttccagtacaaggcagtgagtggagttggagttagggcctgctagagactggctggtagctcggtggtgagggctgggctccctcctgctcgcttgtgaccttggtcccgcccttttaggtgttcattttggaagagttgctgagccccattgtcacacccctcatcctcatcttctgcctgcgcccacgggccctggagattatagacttcttccgaaacttcaccgtggaggtcgttggtgtgggagatacctgctcctttgctcagatggatgttcgccagcatggtcatccccaggtactgggagaggagggagccaggtggcctgggatgatgctggaacatacagtgtcttcgggaaaaccgcaaaaagacacctctcctgagtca

SEQ ID NO: 67388 - DNA, 666 bp, Homo sapiens
ttattggtgcttatcatgccaattatcacaccacgcaatatgtttatgagcatcgcatgggcgtcaaacctggcggcaatattgcactgctggcgtgtgcaggtccgatgggcattggcgctatcgattacgccattaacggcggcatacaaccgtcgcgggtggtggtggtcgatatcgacgacaaacgtctggcgcaggtacagaagctgctgccggtggaactggcggccagtaaaggcattgagctggtgtatgtgaataccaaagggatgagcgatcctgtccagatgctgcgggcgctgacaggagatgccgggttcgatgacatttttgtttatgcggcggggcctgctgtcgttgagatggctgatgaattactggcggaagatggctgtctgaacttctttgccgggccgacggataaaaacttcaaagtgccgtttaatttctacaacgtccattacaacagcacgcacgtcgtcggtacatctggcggttcaacggacgacatgaaagaggcgattgcccttatcgccactgggcagttacagccgtcgtttatggtgacccatatcggtggcctggatgcggtgccagaaaccgtgctcaatctgccggatatccctggcgggaaaaaactcatttataacggcgggaccctgc

SEQ ID NO: 67389 - DNA, 440 bp, Homo sapiens
gtatcttatttgcggcgctgatctggagttcgttcgatgagaatatagaagcttcagccggaggcggcggtggttcgtccatcgacgctgtcatggttgattcaggtgcggtagttgagcagtacaaacgcatgcaaagccaggaatcaagcgcgaagcgttctgatgaacagcgcaagatgaaggaacagcaggctgctgaagaactgcgtgagaaacaagcggctgaacaggaacgcctgaagcaacttgagaaagagcggttagcggctcaggagcagaaaaagcaggctgaagaagccgcaaaacaggccgagttaaagcagaagcaagctgaagaggcggcagcgaaagcggcggcagatgctaaagcgaaggccgaagcagatgctaaagctgcggaagaagcagcgaagaaagcggctgcagacgcaaagaaa

SEQ ID NO: 67390 - DNA, 921 bp, Homo sapiens
agaatctcggcacgaggcgttctctacctgtgtgataaaggttccccttggccggtgtgaacgacatgggaagtgtaaaaaaacctgtattgcctccagagacccatattgtggatggataaaggaaggtggtgcctgcagccatttatcacccaacagcagactgacttttgagcaggacatagagcgtggcaatacagatggtctgggggactgtcacaattcctttgtggcactgaatgggcattccagttccctcttgcccagcacaaccacatcagattcgacggctcaagaggggtatgagtctaggggaggaatgctggactggaagcatctgcttgactcacctgacagcacagaccctttgggggcagtgtcttcccataatcaccaagacaagaatggagtgattcgggaaagttacctcaaaggccacgaccagctggttcccgtcaccctcttggccattgcagtcatcctggctttcgtcatgggggccgtcttctcgggcatcaccgtctactgcgtctgtgatcatcggcgcaaagacgtggctgtggtgcagcgcaaggagaaggagctcacccactcgcgccggggctccatgagcagcgtcaccaagctcagcggcctctttggggacactcaatccaaagacccaaagccggaggccatcctcacgccactcatgcacaacggcaagctcgccactcccggcaacacggccaagatgctcattaaagcagaccagcaccacctggacctgacggccctccccaccccagagtcaaccccaacgctgcagcagaagcggaagcccagccgcggcagccgcgagtgggagaggaaccagaacctcatcaatgcctgcacaaaggacatgccccccatgggctcccctgtgattcccacggacct

SEQ ID NO: 67391 - DNA, 685 bp, Homo sapiens
ttttttttttttggagtttttcagaacaaatgtttatttaataattaagggcaaacaaaaacattaaagcataggaattcatcaactgaatacaagttgtcttgtttggtctgaaatcttgaaaaagttaatctaactacttacctgaggtaaatttaggttggcactgcttcaagggaacctccgtccatcccaaaagttaccttttaattttggttacaggctcccaagtggtcctctccaacctcaggttatgctatatgaataataccaacacctttttctcccatggttaaaagccttcagccttgtttcatacccccatagttctcttataatgtggtgattgcaatcctttccctgggattaaaaggtattttctctttccttggcagaacttcattaaagacgtcctgtttagtctgtcacagatgtcaatcaggcatcttctccccagcaagagagtgaccacttccacatggccatgggcacaggccaaatgtagaacagtcctggcagccactcccagagctcctggaactctggcccaaggctctctgactgactccttcttggcttcccggctgaagactgacgctgcctgatcgcctcagaagcgccgtagaccatcacggacgccgagctttaggtaactcacagtgcagggtaagctcgtgcaagattc

SEQ ID NO: 67392 - DNA, 436 bp, Homo sapiens
gccacgccgatcactgacgcttgtgcactgaaagccgtgaccatgattgccgaaaacctgccgttagccgttgaagatggcagtaatgcgaaagcgcgtgaagcaatggcttatgcccagttcctcgccggtatggcgttcaataatgcttctctgggttatgttcatgcgatggcgcaccagctgggcggtttctacaacctgccacacggtgtatgtaacgccgttttgctgccgcacgttcaggtattcaacagcaaagtcgccgctgcacgtctgcgtgactgtgccgctgcaatgggcgtgaacgtgacaggtaaaaacgacgcggaaggtgctgaagcctgcattaacgccatccgtgaactggcgaagaaagtggatatcccggcaggcctacgcgacctgaacgtgaaagaagaagatttcgcggtat

SEQ ID NO: 67393 - DNA, 394 bp, Homo sapiens
gttgttccagtacccagacacggaggggaaggtggaagactttacggaactcgtggagagagctcatcagagtggggtaggtatacctttcttgtggggggtccgtggaggcgtatcccaacttgtatctgtctacctatctctctctctgtcttttcatgtgccttaatttctttaccattatcacatggaatggtaaaactctccttcctgactccttgctgctacttttttctgttcccggattcctggcacatggtgggcactcagtatgtatttactgaatgaatgaatgagcaatggagttcacaggatgtgaacacactctgcccgtcttcctgtagttaagataatttcctactctcccactactctcagggaaaggtagcaacct

SEQ ID NO: 67394 - DNA, 707 bp, Homo sapiens
gacagtagcccacacttccagccttgcagaccatgaatgggatggccaatgtgaatcccgccagccgccctcactacgcctccgccatcccggagcctcgtgcctcttcccagaccaggattcctacaccgggcgcttctccccagctgcggccacgccaggccggcctggccctgagcccacagagagcagcctcccccagactgggaaaggctgcaggtccttctagaaactcctctcctagggccttccgggggagaggctctcccaagtttgctggggcggtgagggagtcagctgaggatggggaaggccccttcagctccccatggaatagtcccaggacaaccccgaaagcagccctctccagccgggctggatccggaagaattggcgagagacaaggcacccagggaaagaagaaaaaagcccaggaagggactccagtctgccagacccggggcagaagcccttctcggacgaactttcacggagaaactcaaataccaggggctccggaaggtcggaagcctccaagctgcccaggaaaagaccaaagagatataaactacaaaagttctgggacccccaggtctttggagcctgatgagggggcagcttcgtgggcttcctctccagtctgcagcccagtgcagggcaagcgcccctctccctctccgggggccattagcttctcctcagtccat

SEQ ID NO: 67395 - DNA, 873 bp, Homo sapiens
ttgatgcgcaaattcggcacgagcgggagctgaaggcggtgctcctggaagctttggggtcacccagtgaggatgtgagggctgcagcctcgtatgcactgggccgcgtgggtgctggcagcctgcccgacttcctgcccttcctgctggagcaaatcgaggctgaaccccgacgacagtacctgctgctgcactcactcaaggaggccctgggggccgcccagcctgacagcctgaagccctacgccgaggacatctgggccttgctgttccagcgctgcgagggtgctgaggagggcacccggggggtggtggccgagtgcattgggaagctggtccttgtgaacccttcgttccttctgccccgcttgcggaagcagcttgctgcaggtcggccacacacccggagcaccgtcatcacagcggtcaagttccttatctcggaccagccccatcccattgaccccctcctgaagagcttcatcggagagttcatggagagcctgcaggacccagacctgaacgtgcgccgtgcgactctggctttcttcaactcagctgtgcacaacaagccctcgctagtccgggacctgctggatgacatcctgcccctcctctaccaggagacaaagatccggcgggacctcatccgagaggtggagatggggccctttaaacatacagtggacgatgggctggacgtgcggaaggcggcctttgaatgcatgtattcactgcttgagagctgcctgggccagctggatatctgtgagttcctgaaccatgtggaggacgggctgaaggaccactacgacatccggatgctgaccttcatcatggttgcccggctggccaccctgtgtcctgcacctg

SEQ ID NO: 67396 - DNA, 609 bp, Homo sapiens
acacgctggaagaatcggcacgaggcaagctgctcttgctgcagtcactccctccccaaccagtgcttcaaagagatggccaggagcttctgtgtggccatcctgggacctcctcgaagctcccaaagaccccttcagcatagagagagaggccaggctgcaccgacaagctgcagctgtgaatgaagccacctgtacctggagtggccagcttcctccccggaactataagaaccccatctactcttgcaaggtgtttctaggaggtgttccttgggatattacagaagctggattagttaacaccttccgtgtttttggctctttgagtgtggagtggcctggtaaggatggcaagcatccccggtgtcctcccaaagggtatgtgtatctggtcttcgaactagagaagtctgtccgatccttgcttcaggcttgctctcatgacccgctgagcccagatggcctgagtgaatattatttcaagatgtccagccgaaggatgcgctgcaaggaggtgcaggtgatcccctgggtattagccgacagtaactttgtccggagcccatctcagaggcttgaccccagcaggacggtgtttgtcggtgg

SEQ ID NO: 67397 - DNA, 435 bp, Homo sapiens
tgccgtatgcaggaccagctctgatgtagatgacaaccctccagtttttaatcagctcatttatgagtcatatgtgagtgaattagccccccggggccattttgtaacctgtgtacaagcctctgatgcagacagctctgattttgaccggttggaatatagcattttatctgggaatgaccggacgagctttctgatggacagcaagagtggagttatcacattgtccaaccatcggaagcagcggatggagcctctgtacagtctcaatgtgtctgtctctgatgggttgttcaccagcactgcacaggtgcatattagggtacttggggctaacttgtacagccctgccttttcacaaagcacatacgtagctgaggtgagagagaacgtggctgcaggaacaaaggtaattcatgttcgagccacagatgg

SEQ ID NO: 67398 - DNA, 427 bp, Homo sapiens
cctgcgtctgtcggcccgaatatttatgaacatgatgaccagttaacacctaaaattggttttccctggagtgaaatcagaaatatttcatttaatgacaaaaaattcgttataaagccaattgacaaaaaggcacctgattttgtcttctatgcacctcgtctgagaatcaataaacgaattttggccttatgtatgggaaaccatgaactgtacatgcgaaggagaaagcctgatactattgaagtacagcagatgaaggctcaggcccgggaggaaaagcatcagaagcagctagaaagggcacaattagagaatgaaaagaagaaacgagaaatagcagaaaaggaaaaggaaagaatagaacgtgaaaaggaagagctgatggagcgtctgaggcagatcgaagagcaaacagtgaaagcct

SEQ ID NO: 67399 - DNA, 411 bp, Homo sapiens
ggttccgtcgcgtgttgacgcaatgtgatttctgcctccctgcacttgttatggcacgtgtccacaaaatcgaaaatttaactgaagtccctgttgtttgtagtaacaacatcgaaaatttaacaaaaaccaaagccgcagtacaatttttaaaaaaaattaatgcatatgaagacgtacaaaaatgtcaagactcgaaaaaaatacgggctggaaagggaaaaatgcgtaatcgtcgttatactatgcgacgtggacctctcgttgtatttaaagaggatcatggtattaaacaagcgtttagaaatttgcctggtgttgatttgattcaagttgacaggcttaatttgctaaagctttgccctggggggcatattgggcggttcgtgaataggacagaagctgcttttg

SEQ ID NO: 67400 - DNA, 402 bp, Homo sapiens
tgcgatgatgacgcgtttccccaacgactcgctggatgcggcgttatgtcatggtgatgtgttgctacagatttgcgccaacacccaggacacggttatccatgcgctgcgcgatatcatcaaacacacgccggatttgctcagtgtgcgctggaagcgggaagggtttatttccgatcacgcggcgcgtagtaaaggcaaagagatggcgctccaacacccctggtcaacgcgaaaatgccacatagcttcggcaggcatgccaattaaacgggcgattaacagactcagtacaccctgatggctgacgactaaaatattctgatagtgctgaaattcactaagccttgcgataaagcgttccacacgttgcgaaaatgcctgaaatccttcaccgttcgt

SEQ ID NO: 67401 - DNA, 402 bp, Homo sapiens
gtaccacgccagcgcgctgtccacgctgacccgatggccggtagcgataaccaacgggttacagcgcgctttgctgcgccagacccaggccagctgctcgcctttatccatcagtggggccagcgcgcccggttcgctggagagcggttcgaatttaccgcagagccgttttttcgccacgccaatggtcggcacatccaccaataagccaaaatggctggcgacgccaagacggcgaggatgcgagatcccatgaccatcgacaaacactaaatccggcttttgcgacagcatctcccacgctgccagcagcgcaggatattcgcggaaggaaagaaaacctggaatgtaaggcatggtggtggcgatgcgggcaactttatactcgaccagctcaagcga

SEQ ID NO: 67402 - DNA, 292 bp, Homo sapiens
gcctgcctgcaggaattcccgccaaccggatcgacgacctgccgaccaccttttccggcggtatgcagcagcgtttgcagattgcccgcaacctggtgacgcatccgaagctggtgtttatggatgaaccgaccggcgggctggatgtgtcggtgcaggcccgcctgctcgacctgctgcgcggcctggtggtggagctgaacctcgcggtggtgattgtcacccatgatttaggcgtcgcccgcctgctggcggaccgtttgctggtgatgaagcaggggcaagtggtgga

SEQ ID NO: 67403 - DNA, 370 bp, Homo sapiens
agcaggtccagctgggacaacatggactatgtgtgggaggaggaggacgaggaggaagacctggactactacttgggggacatggaggaggaggacctgaggggggaggatgaggaggacgaggaggaagtgctggaggaggttgaggaagaggatctagaccccgtcaccccactgcccccgcctccagcccctcggaggtgcttcacatgccctcagtgccgaaagagctttcctcggcggagcttccgccccaacctgcagctggccaatatggtccaggtgattcggcagatgcacccaacccctggtcgagggagccgcgtgaccgatcagggcatctgtcccaaacaccaagaagccctgaagt

SEQ ID NO: 67404 - DNA, 668 bp, Homo sapiens
ggttgcggaattcggcacgaggaaacacccacgacaggaacaagttggcccagaccctgccgcccacccagctgcctccctctgggactaagtgcctggagagcctcctgggctcagtgcccccgccctgccctggcctccacagccttcgggagctcccagacccagtgctgagtgaggaggtggtggagggcattgctgctggcattgaggcagccctctgggacctgacacaaggcaccaatggccggtacaagaccaagtatcgcagcctgctgttcaacctgcgggaccccaggaacctggacttgtttctcaaagtggttcatggagatgtcaccccctacgacctggtgcggatgagctcgatgcagctggccccccaggagctggcccgctggcgggaccaggaggagaaaaggggaccgcagatgttcatggactgcagcccacaggccctgcccatcgcatcagaggacaccacggggcagcatgaccaccacttcttagaccccaactgccacatctgcaagggtgggaggggacacgggaggggtgcaggggtggcagccaggctggggctgagcgtgcagttcagcagcaacagggatttgtggcctggggagagggtggcagagcaggggtgcccgtgccccaggtcacctaga

SEQ ID NO: 67405 - DNA, 627 bp, Homo sapiens
ttcccgggtcgacgatttcgtgctacaggcaggtgtataccacggaggcccggaccgtgctcaggtgctgccgagggtggatgcagcagcccgacgaggagggctgcctctcggctgaatgcagcgccagcctctgttttcacggtggccgttgtgtgccaggctcagcccagccgtgtcactgtccccccggcttccagggaccccgctgtcagtatgatgtggacgaatgccgaacccacaacggtggctgccagcaccggtgcgtgaacaccccaggctcctacctctgtgagtgcaagcccggcttccggctccacactgacagcaggtcctgcctggccattaactcctgcgccctgggcaatggcggctgccagcaccactgtgtccagctcacaatcactcggcatcgctgccagtgccggcccgggttccagctccaggaggacggcaggcattgtgtccgtagaagcccgtgtgccaacaggaacggcagctgcatgcacaggtgccaggtggtccggggcctcgcccgctgtgagtgccacgtgggctatcagctagcagcggacggcaaggcctgtgaagatgtggacgaatgtgccgcaaggctggcccagtgtg

SEQ ID NO: 67406 - DNA, 520 bp, Homo sapiens
ccctctggtccacgtggtggaattcggtctgattgggaggacgcagaggagcgccggggtcgaccagaaccacccccgggctgtgctggtccccagtagcctccggattggaatcattcccgcagggtcaacggactgcgtgtgttactccaccgtgggcaccagcgacgcagaaacctcggcgctgcatatcgttgttggggactcgctggccatggatgtgtcctcagtccaccacaacagcacactccttcgctactccgtgtccctgctgggctacggcttctacggggacatcatcaaggacagtgagaagaaacggtggttgggtcttgccagatacgacttttcaggtttaaagaccttcctctcccaccactgctatgaagggacagtgtccttcctccctgcacaacacacggtgggatctccaagggataggaagccctgccgggcaggatgctttgtttgcaggcaaagcaagcagcagctggaggaggagcagaagaaagcactgtat

SEQ ID NO: 67407 - DNA, 447 bp, Homo sapiens
cgttatgaccatgaacgccaagcttggcacgagggtggaatgagtaatggcatggtgtgtgcatctggagaccggagtcattacagtgattctcagctctctttacatgaggatctttctccatggaaggaatggaatcaaggagctgatttaggcttggattcatccacccaggaaggttttgattatgaaacaaacagtctttttgaccaacagcttgatgtttacaataaagacctagaatacttgggaaagtgccacagtgatcttcaagatgactcagagagctacgacttaactcaagatgacaattcttctccatgccctggcttggataatgaaccacaaggccagtgggttggccaatatgattcttatcagggagctaattctaatgagctataccaaaatcaaaaccagttgtccatgatgtatcgaagtcaaagt

SEQ ID NO: 67408 - DNA, 641 bp, Homo sapiens
tcattacgcctagcttggcacgagggcaaactgcacttcagcgtctatgactttgaccgcttctcgcggcacgacctcatcggccaggtggtgctggacaacctcctggagctggccgagcagccccctgaccgcccgctctggagggacatcgtggagggcggctcggaaaaagcagatcttggggagctcaacttctcactctgctacctccccacggccgggcgcctcaccgtgaccatcatcaaagcctctaacctcaaagcgatggacctcactggcttctcagacccctacgtgaaggcctccctgatcagcgaggggcggcgtctgaagaagcggaaaacctccatcaagaagaacacgctgaaccccacctataatgaggcgctggtgttcgacgtggcccccgagagcgtggagaacgtggggctcagcatcgccgtggtggactacgactgcatcgggcacaacgaggtgatcggcgtgtgccgtgtgggccccgacgctgccgacccgcacggccgcgagcactgggcagagatgctggccaatccccgcaagcccgtggagcactggcatcagctagtggaggaaaagactgtgaccagcttcacaaaaggcagcaaaggactatcaga

SEQ ID NO: 67409 - DNA, 406 bp, Homo sapiens
ggaagggagcaaactggactgcaatgccaagcagtggaggctttttgcggacatcctcaatgacgtagccatgttccttgagattatggctcctgtatacccaatctgtttcaccatgaccgtctccaccagcaacctagccaagtgcatcgtgagtgttgctggtggggccactcgggctgccctgaccgtgcaccaggctcggaggaacaacatggctgacgtgtcagccaaggacagcatccaggagacgctggtgaacctggcggggctcttggtcagcctcctgatgctccctctggtgtcaggttgccctggcttcagccttggatgtttcttcttcctcactggcctccacatctacgccaactaccgcgcgggccgagccctggtcatggagaccttg

SEQ ID NO: 67410 - DNA, 568 bp, Homo sapiens
ctcacgagaatacctccagaaagcacaggatgaactcctggatctccaggacaaggtgattcaggcagtaggtagcaactccagcatgttggcggagattgaagtgctgcgccagcgggtgctgagaattgaaggcaaagacgaggaaattaagagagcagaggatctgtgtcgtctgatgaaggagaaacttgaagaggaagaaaacctcacccgggagctgaaatctgagattgagcggcttcagaaacgaatggctgaattagagaagctagaagaggccttcagcaggagtaagaatgactgtacccagctgtgtctgagcctgaatgaggagagaaatctgaccaagaaaatctcctctgagctggaaatgctcagagtcaaagtgaaagaactagaatcttctgaggaccgcctggataaaactgagcagagtttagcgtcagagttagaaaagctgaaatcattaactctgagctttgtaagtgagagaaaatacttgaatgaaaaggagaaagaaaatgagaaattgataaaagaactcactcaaaaactagagcagaac

SEQ ID NO: 67411 - DNA, 617 bp, Homo sapiens
cgtcgacgacaattagaggcaagtctatcccaaaactgagtcttatgttaataatgttttttattttctgtcttctcagacagctcagctctctcaagccagcggaatagtttcccaacttccttttggaccagctcttaccagcccccacctgcaccttgtttggggggagttcatcctgacttccaggtcactggaccccctggcaccttttctgcagctgatcccagtccttggccgggacacaacctgcatcagactggcccagcccctccccctgctgtgtctgagtcctggccttatcctttgacatctcaggtgagcccatcctacagccatatgcatgacgtgtacatgcggcaccaccaccctcatgcccacatgcaccaccgccaccgccaccatcatcaccatcaccaccctcctgctggctctgccctggatccatcctatgggcctctgctgatgccttcagtgcatgcggccaggattcctgctccccagtgtgacatcacaaagacagaaccaactacagtcacctctgctacctcagcatgggctggagcctttcatggaacagtagacatagtgcccagcgtgggattcgatacaggtct

SEQ ID NO: 67412 - DNA, 976 bp, Homo sapiens
caacatcgacgtcagacctcttccccacagcctcggcctcttccacggagccttctcctgcagggcgagagcgttcctccagttgtgggtctgggggtggtggcatcatcccctaaaggaagtggtccctctgtggcaagtgatgaagtctccagctttgcctcagctctcccagacagaaagactgcgtccttttcgtcgttggaaccccaggatcaggaggatttgggagcccgtgaagaagaaaatgagaggagatggggacctttgacctgaacgggcagttgttggtcgcacaaccgcgtagaaatgcccaaaccgtccacgaggacgtcagagcagcggctgggaagccagacaagatggaggagacgctgacatgcatcatctgccaggacctgctgcacgactgcgtgagtttgcagccctgcatgcacacgttctgcgcggcttgctactcgggctggatggagcgctcgtccctgtgtcctacctgccgctgtcccgtggagcggatctgtaaaaaccacatcctcaacaacctcgtggaagcatacctcatccagcatccagacaagagtcgcagtgaagaagatgtgcaaagtatggatgccaggaataaaatcactcaagacatgctgcagcccaaagtcaggcggtctttttctgatgaagaagggagttcagaggacctgctggagctgtcagacgttgacagtgagtcctcagacattagccagccatacgtcgtgtgccggcagtgtcctgagtacagaaggcaggcggcgcagcctccccactgcccagcacccgagggcgagccaggagccccacaggccctgggggatgcaccctccacgtccgtcagcctgacgacagcagtccaggattacgtgtgccctctgcaaggaagccacgccctgtgcacctgctgcttccagcccatgcccgaccggagagtggagcgcgagcagga

SEQ ID NO: 67413 - DNA, 882 bp, Homo sapiens
tttcaaatgcagtggataggtcatttacatcttttcttgttatttggctaggttctgaagccagacacaagatgaaaaagctaactccaaaacagaaattttctgaagatttagagtcatataagatatcagtggtaatgcaggaatcagctgagaaactttcagaaaagttacataagtgtaaagaatttgtggacagttgcaggcttactttccctactagtggtgatgaatacagcaggggcttccttcaaaaccttaaccttattcaagatcagaatgcgcaaacaaggtggaagcagggcagatatgatgaggatggcaaacccttcaatcaaagatctttgcttttggggcatgagcgaattctcacaagagcaaagtcttatgaatgcagtgaatgtggaaaagtcattaggcgtaaggcatggtttgatcaacatcaaagaattcactttttagagaatccttttgagtgtaaggtctgtgggcaagccttcagacagcggtcagctcttacggtccataaacagtgtcactcggcggaactgtgctcccggaatccttctgcgcactctctctgcagaagtccctccgtgctgggtccaggcgctcccactcctcccaggttagagacacagccgtgtcctcgaaagtcaccatcccctgggatgaggttccatcgagcgctcgctgcagagcccgcaccacggccaccgcctcctccccgctctctgggcagtgctctcgcacccaggcttgaagctcctcgggcaggatggtgaggaactgctccagcaccagcagctccaggatctgctccttggagagcagctcgggtctcagccaccgacgacagagttctcggagccggctcagcgc

SEQ ID NO: 67414 - DNA, 119 bp, Homo sapiens
tcgcactcgatcgcgtcgttcaggaagcggtcgagcagcaccggcgaatcgttcgacaccttcacggcctcgcgcatgtaacgctcgaggtcgcgcggctcgtggacgatttccatcgc

SEQ ID NO: 67415 - DNA, 398 bp, Homo sapiens
tacaaatgtgaagaatgtggcaaagcctttactcggtccacagccctgaatgaacataagaaaattcattctggagagaaaccctacaaatgcaaagaatgtggcaaagcctataacttatcctcaacccttactaaacataagagaattcatactggagagaaacccttcacatgtgaagaatgtggcaaagccttcaattggtcctcatcccttactaaacataagataattcatactggagagaaatcctacaaatgtgaagaatgtggcaaagcttttaatcggccctcaacccttactgtacacaagcgaattcatactggcaaggaacatagttgaatgacatttctagtaatctctaattccagtgtctttacacagcaaataaattggag

SEQ ID NO: 67416 - DNA, 400 bp, Homo sapiens
acagaacatggatatgaggcatcaatagccggtagtgctattgccacattacaaaaagagttgtcagccacatcttctgctcagaagatcaccaaatcggtgaaggctcctactgtgaagcccagtgagactagagtaagggcagagcccacacccttgccacagttccccttcgctgacacaccagatacttacaagagtgaagctggcgttgaggtgaaaaaggaagtaggggtgagcatcactggcaccaccgtccgtgaagagcgctttgaagtactgcacggacgcgaagccaaggtaacagaaacagcaagagtaccagcacctgttgaaattcctgttactccaccaactttggtctcgggcttaaaaaatgtgactgtcatagaaggtgaaa

SEQ ID NO: 67417 - DNA, 398 bp, Homo sapiens
aaacaggggatttaagtgtgtcttttgtgtttgcaaggcactaacaccactcccgtctgtatttaaatgctgtccccaggttacgactatggctatgtctgcgtggagttttcactcttggaagatgccatcggatgcatggaggccaaccaggttgctttatacttcggtcaaatgatgctggaaggatatatttttttatatatggggagggagggtttcaaatgattttactttggaaaggtacaagaagtctatctgtggagcatactgtattccaaccatcggttgtgaggaaaatctttaaaaaggctggaaagctttctctagaaaacttaatgggcacagagtgcattttaaaagctagagcccagttgcttttggactagattccaaaa

SEQ ID NO: 67418 - DNA, 510 bp, Homo sapiens
cccatcaggtctgttaggtctccattgctcatgcgtaagactcaggcatccaccgtggccacaggtgctgaagtgcctcccccttggaagcaagagggctacgtggcctcctcatctgaggctgagatgagagagacaacgctgacaacctctactcagatcaggacagaagagagatgggaagggagatacggtgtccaggagcaagtgaccatcagtggtgctgcgggtgctgccgccagtgtgtcggccagtgctagctacgcagcagaggctgttgccactggtgctaaagaggtgaaacaagatgctgacaaaagtgcagctgttgcgactgttgttgctgccgttgatatggccagagtgagagaaccagtgatcagcgctgtagagcagactgctcagaggacaaccacgactgctgtgcacatccaacctgctcaagaacaggtaagaaaggaagcggagaagactgctgtaactaaggtagtagtggccgccgataaagcc

SEQ ID NO: 67419 - DNA, 1883 bp, Homo sapiens
cagtaaccgggtcgacgatttcgtctgtgaagctccatgtggtggacatctgacagcgtccagcggagtcattttgcctcctggatggccaggatattataaggattctttacattgtgaatggataattgaagcaaaaccaggccactctatcaaaataacttttgacagatttcagacagaggtcaattatgacaccttggaggtcagagatgggccagccagttcgtccccactgatcggcgagtaccacggcacccaggcaccccagttcctcatcagcaccgggaacttcatgtacctgctattcaccactgacaacagccgctccagcatcggcttcctcatccactatgagagtgtgacgcttgagtcggattcctgcctggacccgggcatccctgtgaacggccatcgccacggtggagactttggcatcaggtccacagtgactttcagctgtgacccggggtacacactaagtgacgacgagcccctcgtctgtgagaggaaccaccagtggaaccacgccttgcccagctgcgacgctctatgtggaggctacatccaagggaagagtggaacagtcctttctcctgggtttccagatttttatccaaactctctaaactgcacgtggaccattgaagtgtctcatgggaaaggagttcaaatgatctttcacacctttcatcttgagagttcccacgactatttactgatcacagaggatggaagtttttccgagcccgttgccaggctcaccgggtcggtgttgcctcatacgatcaaggcaggcctgtttggaaacttcactgcccagcttcggtttatatcagacttctcaatttcgtacgagggcttcaatatcacattttcagaatatgacctggagccatgtgatgatcctggagtccctgccttcagccgaagaattggttttcactttggtgtgggagactctctgacgttttcctgcttcctgggatatcgtttagaaggtgccaccaagcttacctgcctgggtgggggccgccgtgtgtggagtgcacctctgccaaggtgtgtggccgaatgtggagcaagtgtcaaaggaaatgaaggaacattactgtctccaaattttccatccaattatgataataaccatgagtgtatctataaaatagaaacagaagccggcaagggcatccaccttagaacacgaagcttccagctgtttgaaggagatactctaaaggtatatgatggaaaagacagttcctcacgtccactgggcacgttcactaaaaatgaacttctggggctgatcctaaacagcacatccaatcacctgtggctagagttcaacaccaatggatctgacaccgaccaaggttttcaactcacctataccagttttgatctggtaaaatgtgaggatccgggcatccctaactacggttataggatccgtgatgaaggccactttaccgacactgtagttctgtacagttgcaacccggggtacgccatgcatggcagcaacaccctgacctgtttgagtggagacaggagagtgtgggacaaaccactaccttcgtgcatagcggaatgtggtggtcagatccatgcagccacatcaggacgaatattgtcccctggctatccagctccgtatgacaacaacctccactgcacctggattatagaggcagacccaggaaagaccattagcctccatttcattgttttcgacacggagatggctcacgacatcctcaaggtctgggacgggccggtggacagtgacatcctgctgaaggagtggagtggctccgcccttccggaggacatccacagcaccttcaactcactcaccctgcagttcgacagcgtgtatt

SEQ ID NO: 67420 - DNA, 1177 bp, Homo sapiens
  misc_feature (1)...(1177): n = a,t,c or g
cccacgcgtccgctcctctgggggtcaagaggaccccgccagccagcagtgggcacgaccgcgcttcacacagccctccaagatgaggcgccgggtgatcgcacggcccgtgggtagctccgtgcggctcaagtgcgtggccagcgggcaccctcggcccgacatcacgtggatgaaggacgaccaggccttgacgcgcccagaggccgctgagcccaggaagaagaagtggacactgagcctgaagaacctgcggccggaggacagcggcaaatacacctgccgcgtgtcgaaccgcgcgggcgccatcaacgccacctacaaggtggatgtgatccagcggacccgttccaagcccgtgctcacaggcacgcaccccgtgaacacgacggtggacttcggggggaccacgtccttccagtgcaaggtgcgcagcgacgtgaagccggtgatccagtggctgaagcgcgtggagtacggcgccgagggccgccacaactccaccatcgatgtgggcggccagaagtttgtggtgctgcccacgggtgacgtgtggtcgcggcccgacggctcctacctcaataagctgctcatcacccgtgcccgccaggacgatgcgggcatgtacatctgccttggcgccaacaccatgggctacagcttccgcagcgccttcctcaccgtgctgccagacccaaaaccgccagggccacctgtggcctcctcgtcctcggccactagcctgccgtggcccgtggtcatcggcatcccagccggcgctgtcttcatcctgggcaccctgctcctgtggctttgccaggcccagaagaagccgtgcacccccgcgcctgcccctcccctgcctgggcaccgcccgccggggacggcccgcgaccgcagcggagacaaggaccttccctcgttggccgccctcagcgctggccctggtgtggggctgtgtgaggagcatgggtctccggcagccccccagcacttactgggcccaggcccagttgctggccctaagttgtaccccaaactctacacaggacattccacaccacacacatacacacaccccccaccctcctgccaattaaacagtagccattccccnaaaatnnnnnnnnnnnnnnncnnnnnnnnnnnnnnnnnctcggcccccgcctattcaccg

SEQ ID NO: 67421 - DNA, 1655 bp, Homo sapiens
tttcgtcacggaggaggaagccgccggtgcgtcgggacgggagcgcaggtgctcgggcacccgagctggagctccgcagccgccggtcatgtaccgctccaccaagggcgcctccaaggcgcgccgggaccagatcaacgccgagatccggaacctcaaggagctgctgccgctggccgaagcggacaaggtccggctgtcctacctgcacatcatgagcctcgcctgcatctacactcgcaagggcgtcttcttcgctggtggcactcctctggcgggccccacggggcttctctcagctcaagagcttgaggacatcgtagcggcactacccggctttctgcttgtgttcacagccgaggggaaattgctctacctgtctgagagtgtgagcgagcatctgggccactccatggtggacctggttgcccagggtgacagcatctacgacatcattgacccagctgaccacctcactgtgcgccagcaactcaccctgccctctgccctggacactgatcgcctcttccgctgccgcttcaacacctccaagtccctcaggcgccagagtgcaggcaacaaactcgtgcttattcgaggccgattccatgctcacccacctggagcctactgggcaggaaatcccgtgttcacagctttctgtgcccctctggagccgagaccccgcccaggtcctggccctggccctggccctgcctcgctcttcctggccatgttccagagccgccatgctaaagacctggctctactggacatctccgagagtgtcctaatctacctgggctttgagcgcagtgaactgctttgtaaatcatggtatggactgctgcaccccgaggacctggcccacgcttctgctcaacactaccgcctgttggctgagagtggagatattcaggcagagatggtggtgaggctacaggccaagactggaggctgggcatggatttactgcctgttatactcaaaaagtccagagggacccattactgccaataactacccaatcagtgacatggaagcctggaacctccgccagcagttgaactctgaagacacccaggcagcttatgtcctgggcactccgaccatgctgccctcattccctgaaaacattctttcccaggaagagtgctccagcactaacccactcttcaccgcagcactgggggctcccagaagcaccagcttccccagtgctcctgaactgagtgttgtctctgcatcagaagagcttccccgaccctccaaagaactggacttcagttacctgacattcccttctgggcctgagccttctctccaagcagaactaagcaaggatcttgtgtgcactccaccttacacgccccatcagccaggaggctgtgccttcctcttcagcctccatgagcccttccagacccatttgcccaccccatccagcactcttcaagaacagctgactccaagcactgcgaccttctctgatcagttgacgcccagcagtgcaaccttcccagatccactaactagcccactgcaaggccagttgactgaaacctcggtcagaagctatgaagaccagttgacaccctgcacctccaccttcccagaccatgtattgcggccgctcggaggatcaagcatacgac

SEQ ID NO: 67422 - DNA, 1268 bp, Homo sapiens
  misc_feature (1)...(1268): n = a,t,c or g
acccgttacgacccacgcgtccgccgagatcgctgtggcacaagtgatccttatgtgaaatttaagctgaatgggaagacgctgtacaaaagtaaagtcatatataagaacttgaacccagtatgggatgagatagttgtattgccaatccaaagccttgatcaaaagctacgtgtgaaggtatatgatcgagatttaaccacatctgatttcatgggttctgcatttgtcattctcagtgatcttgagcttaacagaacaactgaacatattttaaaactggaagatccaaacagtttagaagatgacatgggagtgatcgtcttaaatttgaacctagtggtaaaacagggtgatttcaagagacaccgttggtcaaatcggaagcgattaagtgccagcaagtcctctttgatacgcaacctacggctctctgagtccttgaaaaagaaccaactctggaacgggattataagtataactttgttggaagggaagaatgtctcaggaggaagcatgacagagatgtttgtccagttaaaactgggagatcagaggtataaaagtaagacactgtgtaagagtgcaaatccgcagtggcaggaacagtttgactttcactacttctctgacaggatgggcattttggacattgaagtgtggggaaaggacaacaaaaagcatgaggaacgtctgggcacgtgtaaagtggatatctcggcactccctctgaagcaagccaactgcctggagctgccactggacagctgtctgggggctctccttatgttggtcacacttacaccctgtgcgggggtctccgtctctgatctgtgtgtctgccccttagcagacctcagcgaaagaaagcagattacccagcgatattgcttacagaactccctgaaagatgtgaaagacgtcggcattctacaagtgaaggttttaaaggcagcagatctcttagcggcagatttctcagggaagagtgacccattttgcttgttggagttaggcaatgaccgacttcagacgcataccgtctacaaaaacctcaaccctgaatggaacaaagtttttacatttcccattaaagatatccatgatgttttggaagtgacagtgtttgatgaagatggagataaannnnnnnnnnnnnnnnnnnnnnnnnnnaaanaannaanaaaaannnaaannnnnnnnnnnnnnnnnnnnnnnnnngggcggccttttaaaaaaaaacaatttttttggcgcggggtggggga

SEQ ID NO: 67423 - DNA, 100 bp, Homo sapiens
gagcttcaataccctggtagagtgtgatcatccatatgggtcagctggacctcactgagccctgacataaacaaacacttccctgtaaaatgaaaattca

SEQ ID NO: 67424 - DNA, 636 bp, Homo sapiens
ttgggcaaggagagaaagcacttacatcagaccaagtttgctgatgactttagaaaaagacatccaaatgtacactttgtgctaaatcaagagtcaatgactttgactggtttgccaaatcaccttgcaaaggcgaagcagtatgttctaaaaggaggaggaatgtcttcattggctggaaagaaattgaaagagggtcatgaaacaccgatggacattgatagcgatgattccaaagcagcttctccgccactcaagggctctgtgagttctgaggcctcagaactggacaagaaggaaaagggcatctgtgtcatctgtatggacaccattagtaacaaaaaagtgctaccaaagtgcaagcatgaattctgcgccccttgtatcaacaaagccatgtcatataagccaatctgtcccacatgccagacttcctatggtattcagaaaggaaatcagccagagggaagcatggttttcactgtttcaagagactcacttccaggttatgagtcctttggcaccattgtgattacttattctatgaaagcaggcatacaaacagaagaacacccaaacccaggaaagagataccctggaatacagcgaactgcatacttgcctgataataaggaa

SEQ ID NO: 67425 - DNA, 1783 bp, Homo sapiens
ctggcttgtctggagccagcctgtagggttggggagcctttctctccatagttccagggtttggtgaagcatcttacaccagtaagtattgattgaacgtctgtcagtgacctctgcaaactctgcttttgttgtaggaagcagtacaggttttgattaagcactcagctgatgtcaatgcaagggacaagaactggcagacccctcttcatgtggcagcagccaacaaggctgtcaaatgtgcagaagtgatcattcccctgctgagcagtgtcaatgtctccgaccgaggggggcgcacagccttgcaccatgcggctctgaacggccacgtggagatggtcaatttactcttggccaaaggggcaaatatcaatgcatttgacaagaaggaccggcgtgctctgcactgggcagcatacatgggccacttggatgttgtagcattgctcattaaccatggcgcagaagtgacctgtaaggataagaagggttatacccctctgcatgctgcagcctccaatggacagattaatgttgtcaagcatctcctgaacctgggggtggagattgatgaaatcaatgtctatggaaatacagcgcttcacatcgcctgctacaatggacaggatgctgtggttaacgagttgattgactacggtgctaacgtgaaccagccaaacaataatgggttcacccctttgcattttgctgctgcctccactcatggtgctttgtgtcttgaattgttagtaaacaacggggcagatgttaacattcagagtaaagatggcaaaagtccactgcacatgacagctgtccatggaaggttcacacggtcacagaccctcattcagaatggaggtgaaattgactgtgtggataaggacggcaacactcctctccatgtggctgcaagatacggtcatgagcttttgattaacaccttaataaccagcggagctgacacagccaagtgtggaatccatagcatgttccctttacatttagctgccctaaatgctcactctgactgctgcagaaagttgttatcatcgggacaaaagtatagcatagtatccttgtttagtaatgagcacgtgctgtctgcaggctttgaaatagacaccccagataaatttggaagaacgtgccttcatgctgctgctgcaggaggtaatgtggaatgtataaaactcttgcagagcagcggagcagatttccataaaaaggacaagtgtgggaggacccctttgcactatgcagctgcgaattgtcatttccactgtattgagacattagtgaccacaggggccaacgttaatgaaacagatgactggggacgcacagctttgcattacgccgctgcatcagacatggatagaaataagactatcttaggaaatgcccatgataattcagaagaacttgaaagagccagggagctgaaggaaaaggaagccacactatgtctagagtttctgcttcaaaatgatgcaaatccatctatccgggacaaggaaggttacaatagcatacattatgctgccgcctatgggcacaggcagtgtctggaattgcttttggaaagaacaaacagtggatttgaagaatcagattctggtgctactaagagtccactccacttagctgtaagtgagatgccatgagcagcttcacctgttacaaaaacaacctaagcattcctaaaactagattgctcttaaaatgtaaatgtagtaacacagtgatgagtggtagtgaaagtagtccgtggtaaaag

SEQ ID NO: 67426 - DNA, 389 bp, Homo sapiens
gcccagcccacggtagagaaatgtccagcaccaattctgttcaagtgtgatcaggtcaaagtgtgtgctagagcacaggggagttctgaaccaggattgcccccgacaggtcactcagctctatgtgccagcatccagacatgtgtggaggttccggcggatggggaggataggcccgctgcagtccaccctggacggtgagttctctaggacacagggttactgaggtatgaattacatgctgtcaaattcactcctttaatctacagatctgttatttttcataaacttatacagccatgtcactcccagcaggagctaccatgtagaaaagtttcatcacccacaaaattgcctctagctccattgcggccacctcttcagcagcc

SEQ ID NO: 67427 - DNA, 406 bp, Homo sapiens
cggcacgagcggcacgagagtcagagggttttaatttacttgtgaagctcacactattgaaactaattgcaatgcttgactttattttctttagagtccaagaaagagaaaaacaaggcatagcacaaatccccctctagagtgtcatgttggttgggtaatggattccagagaccatgggccaggaacatcctctgtcagcacttcaaatgcttcaccttcagaaggcgcaccactagcaggaagttatggatgtactcctcattcattcccaaagttccagcatccttctcatgaacttttgaaggaaaatggctttacccaacaagtgtaccacaagtatcgtcgaagatgcctaagtgagagaaaacgcttgggaattggtcagtcccaagaaatgaatacc

SEQ ID NO: 67428 - DNA, 382 bp, Homo sapiens
aatagacaggctacgcctggacaaatactatatgctgattcgtctggtcctgaggcagtcctttgaagtcttgaagcgaaatggctgggaagaaagccgaatcaaggttttcttggatgtcctgatgaaggaggtcctgtgtcctgagagtcagtctcctaatggagtgagattccacttcattgatatttacctggatgaactctccaaagtcggggggaaggagcttttagcagatcagaatctcaagtttatcgatccattctgcaaaattgctgcaaagacgaaggaccacaccctggtacagaccatagctcggggtgtcttcgaagctatcgtagatcagtctccttttgtgcctgaagagacgatggaggaacaa

SEQ ID NO: 67429 - DNA, 359 bp, Homo sapiens
cccggcagcggcggcagcgcggggggccgagacggcagtgcctaccagggcgcgctgttgcctcgagaacagttcgcggccccgcttgggcggccggtggggacctcgtactccgccacctacccggcctacgtgagccccgacgtggcccagtcctggactgccgggcccttcgatggcagcgtcctgcacggcctcccaggccgcaggcccaccttcgtgtccgacttcttggaggagttcccgggtgagggtcgtgagtgtgtcaactgcggggccctgtccacaccgctgtggcgccgagatggcaccggccactacctgtgcaatgcctgcggcctctaccacaagatgaatgg

SEQ ID NO: 67430 - DNA, 385 bp, Homo sapiens
cctgatgctatcttttgacacagtcatatcttgtttgtatattttaccattagaaatattcttgttgaagtcaaaataaaatataaagacaaatctccaaatttaaagcattttatttgggaagcaagaattgcaattcaggacatattggtaggtggtggtcttcagtatgttcaaagaacaaagagaaggttgggagttttattagaaagaaaaatttgggggaaaggacttcctattcaataaatggtactgggataactggctagctatatgcggaagattgaaactggaccccttacttacaccatatacaaaaatcaactcaagatggactgaagacctcaatgtaaaacctaaaactgtaaagactctggaacctaaa

SEQ ID NO: 67431 - DNA, 954 bp, Homo sapiens
cccagatcatcgacatggtgcgttgtggtggtggtacagctgtggagtcttacctgtcacagtgtcaagaaatgaaggggatgaacggaaccaggtgctgaccctgtatctgtggatacggcaggagtggacagatgcctacctacgatgggaccccaatgcctatggtggcctggatgccatccgcatccccagcagtcttgtgtggcggccagacatcgtactctataacaagtactgcctatctgggcccctcctctctcttacccctctctagacttgcccttagctgtgggggtgtagtgatcccctctccctaccacataacctggttgccacgctgccctggaagcttttccccaggacccttctaagctgccaagcactcagcccctccatggcacccccactttaggctatcccaggccagcccaggctgaacgtctcctcggaacctactgtgtggtccagggcagatgtctgaatcacaagggcctctctagggcacacttttagctctaagtctctcagggctcccccaagagcctgtctaagggtctctttcctccaggacatagccctctggaacactgctttatgtctccttgaccagttccgtgtctcccagccagcacatagctctgcatattttctctggggcccttctacaagttttgcagatgtcccccaagggaagtcactgtgtgtcccggagctacctctgggttctgcagaggcctttttatacatcctctggctacgtctgtgtcccttctggcgccttcaggcaccaccccttccaggcctcgaaaggcagcgggtctctctaggtgcactccaccctctgtgttgctttgttctgaaaacaagaatcaaattaacgaaaaaaaaacaagcacaagtttatttatttatttgagacacagcctgggcaagagagtgagacttcatctc

SEQ ID NO: 67432 - DNA, 375 bp, Homo sapiens
ggtaggtgatgcaaacggccactctctcccttggctcctgtgagaccaacagtgcctaaaccaaaacaccctgctaggaactgcagcctcacagacgtgagtagtgtggaggactggaagcctgaactcaatctgcttcctgccagtgagatgctacctttttcttccatcccagacaatagaacgaggatctgatgaagtgcctctaaacgaagcttgatggaaaaaaacatattttagagttcttcacttaactcagacatgatgaaactctgtatgccaaaaacagtatttttaacacttagaaaattctgacatttcatatgaatctattctaagataaacatttattttatttattattactttttttga

SEQ ID NO: 67433 - DNA, 537 bp, Homo sapiens
  misc_feature (1)...(537): n = a,t,c or g
acaacggggatatcgggcatgacgtgcgtaaccagctgctggcaagcccgtcggtgctctacaccgccaccgggattatgttcgcgctggcgggggtaccgggaatgccgcacctgccgtttttgctgttcagcgccctgcttggttttaccggctggcggatgagcaaacagccgctggcggcggaggcggaagagaaaagcctcgaaacgctgacccgcaccatcaccgaaaccagcgagcagcaggtcagttgggaaaccattccgctgatcgagcctatcagtttaagcctcggttacaaactggtggcgctggtggacaaagcacagggtaacccgctcacccagcggattcgcggcgtgcggcaggtgatttctgacggcaacggcgtgctgctgccggagatccgcattcgggaaaacttccgccttaagcccagtcagtacgccattttcatcaacggcataaaggctgatgaagcggatattccggcggataacctgatggccctgccctccacccaaacctncgtct

SEQ ID NO: 67434 - DNA, 449 bp, Homo sapiens
gatttaatgtccgtacgccctacaacacaaagagtgcgagaaaccctggcggtaccacaagttaatcagactgtgcgcgacatgtggctattctgggtgacctccaggggcccaaaatccgtgtatccacctttaaagaaggcaaagttttcctcaatattggggataaattcctgctcgacgccaacctgggtaaaggtgaaggcgacaaagaaaaagtcggtatcgactacaaaggcctgcctgctgacgtcgtgcctggtgacatcctgctgctggacgatggtcgcgtccagttaaaagtactggaagttcagggcatgaaagtgttcaccgaagtcaccgtcggtggtcccctctccaacaataaaggtatcaacaaacttggcggcggtttgtcggctgaagcgctgaccgaaaaagacaaagcagacattaagactgcggcg

SEQ ID NO: 67435 - DNA, 386 bp, Homo sapiens
acaagtaccagaccaacctattttggtgataccgatggctcagtcggtgcagttttgttcgcgcttttcgcaacgggacatttgggaatcatggctgaaggagaaaatttccttagccagttgcttaatatagaagatgaagttctcaacgtattgctaagggagaactttaatgagcaacttaacactaatgttaatacaataatcagtatcctgaacagaagagacattattttagaaagtcttcagccttatttagttattaataaagacgctgtgacgccatgtacgtttctgggcgaccaaaccggcgatcgatttagcaatatctgtggtgatcaatttatcatcgatttgttaaaacgcataatgagtatcaatgaaag

SEQ ID NO: 67436 - DNA, 231 bp, Homo sapiens
gaacaccttcctgccaagtccgggcaaaatcacccgtttccacgcacctggcggttttggcgtacgttgggagtctcatatctacgcgggctacaccgtaccgccgtactatgactcaatgatcggtaagctgatttgctacggtgaaaaccgtgacgtggcgattgcccgcatgaagaatgcgctgcaggagctgatcatcgacggtatcaaaaccaacgttgatctgca

SEQ ID NO: 67437 - DNA, 507 bp, Homo sapiens
gccatgctatcggatttaatgtccgtacccgcagatcaggctgaatgggaaaatgctgtcgttcatattattagtttccatgcgaactaccacgcgatcgcccaggcgataagtctggccgctggattcccccatcaggcgttgccctacctggtcaaagcgatagtagtcattgtccagcgaagagacatggaccagaccatcaatgaacaagtcgtccagacggacgaagaagccaaagccagtgacgctggaaattacgcctttaaagacgttacctacctggtcgagcatgaagtcacacttcagccagtcagccacatcgcgcgttgcttcgtcggcacgacgttccgccatcgaacagtgctgacccagttgcagcatctcttccatcgaataatggtagccgccggtttcagtggtgttgccctgatgcccctgctctttcgccagcagatatttaatggcgcggtgcagcgtcaggtctggataccgacgaatcggcga

SEQ ID NO: 67438 - DNA, 458 bp, Homo sapiens
tgttgcagccaaaaggcacattgcgactggataaagacgcccgtccattgttgctgatcgaagatccagaaacccgtttacaccccattatgctttcagttgcctggcatctgttgaatcttctgccattgcagcgcattgccaccaccaactcgggtgagttgctttcgttaacgccggtagagcatgtttgccgactggtacgtgagtcctcgcgcgttgccgcctggcgtctggggccgagtggcttgagtaccgaagatagccgacgcatatcctttcacattcgttttaaccgtccgtcatcgctgtttgcacgctgctggttgctggtggaaggggaaacggaaacctgggttatcaatgaactggcgcgtcagtgcggacatcattttgatgccgaagggatcaaggtcattgagtttgcccagtccgggctaaagccactggttaaattt

SEQ ID NO: 67439 - DNA, 344 bp, Homo sapiens
cggaagcgaactgtttaggcgctgtgataccgccgcgatgtctatcggcgcgttaagcccggaagcccacgaggcgctggcggaagcgatgaacagcatcggcggtaattcgaactccggtgaaggcggcgaagacccggcgcgctacggcaccaacaaagtgtcgcgcatcaagcaggtggcttccggtcgctttggggttactccggcgtatctggtcaatgccgacgtcattcagattaaagtcgcccagggcgcgaagccaggcgaaggcggtcagttgccgggtgataaagtcacgccttacatcgccaaactgcgctattcggtgcccggagtgaccg

SEQ ID NO: 67440 - DNA, 344 bp, Homo sapiens
gccgttaaatcgtcgtattattaagcgatatcgggcgattgtggtgggggatactgcgcaggcaggcgcttctacggcatcacaacttctcgacgaacaagaagccattaccgttttcgattttaaaaccaaactggagctgcaaattagcggcctcggctgcggctatttaccccgttatctggcgcaacgttttctcgatagtggcgcgttaatcgagaagaaagtggtcgcccaaactctctttgaacccgtctggattggctggaacgaacagaccgcaggacttgccagtggctggtggcgggatgaaattttagcaaatagtgcgatcgccggtgttt

SEQ ID NO: 67441 - DNA, 255 bp, Homo sapiens
acgcattccagcgtcggacccggagatcgcagccagtgcgggacggctcattatacccaatttgcggcaggtcagtatgctcagcgatggctttgaaatgctgatacaaaccttcttgcgacggacgattgtagtaaggggttaccgtcaggcagccgacgataccactgtcattgaagcgctgcgtcaggctaatggcttccgcagtagcgttagcgccggtcccggcaattaccggaatgcgcccatcagcca

SEQ ID NO: 67442 - DNA, 595 bp, Homo sapiens
acgcattcaatgtccgtagctgtacaacgtccagactgggataactactggcggtacccaacttagtcgcatggctgcacagcgccgggaactcacagccgaaggtcagaataaaaatagcgacatacaccagcccgatgcaggcataaacccagtaccactcaatgctgcgcgccagtagaaacgcggcgatcattgggaaaatcatcccagccatactgaagaaggagtcggtaaataacaggcgggaaccgcgctgacgcccttcatacatttgtgttaccaggaatgtaccaatcgacatggtgatgccgctgaccaccccgagaatgaacatcgccgccgagaacagcgccaggctgtggctgaacatcaaaccggcaaccgccagcaccatcaggagaaagccaaaacgtaactgcgttttcaacgggacgatttccatcagccaggcgttgaggaagatagagattaaaatgccggcgttgaggaaggtgaaggtattactcatactggaaacaggcagattgaaataatcggcgatatttcccatcaccatcccggtgacaataaccaacgcaccagtcagtgcgta

SEQ ID NO: 67443 - DNA, 202 bp, Homo sapiens
agaatcggcggcagatggctgtaggcagcggtcaccgagcagaagatatgtaattcgccagagagcgacggcccttgctgatcgatggtgtggcgcaactgctgatactgcaacagcgtttgctgggcgaaaacgcgcagctcttcgcccgcttcagtcagcgtcaccgtgcggttatcgcgcacaaacagcggctgaccga

SEQ ID NO: 67444 - DNA, 552 bp, Homo sapiens
  misc_feature (1)...(552): n = a,t,c or g
tcttgaagagccgctgctgatcaacaccagcttaagcaaagaacagcgtcgggaaaaagccctgtcgatgatggcgaaagtcggcctgaaaaccgagcactatgaccgctatccgcatatgttctccggcggtcagcgtcagcgtatcgccatcgcccgtggtctgatgctcgacccggatgtggtgattgccgatgaaccggtttccgcgctggatgtttcagtgcgcgcgcaggtgctgaatctgatgatggatttgcagcaggagttggggctgtcttatgtctttatctcccacgacctgtcggtggtggagcacattgctgatgaagtgatggtgatgtacctgggccgctgcgtggagaagggaacgaaagaccaaatcttcaataacccgcgccatccgtacactcaggcgctactttccgcgacgccgcgcctgaacccggacgatcgccgcgagcgcatcaagctcagcggtgaactaccaagcccactgaatccaccgccgggttgcgccttcaacgcccgctgttgtcggcgnttcggccc

SEQ ID NO: 67445 - DNA, 426 bp, Homo sapiens
tagcgccacccttgaacgggtactaaatcaccctgacgaaacgcaagcccgacgcttaatgacgctggaagatatcgtcagtggttattccaatgtgttgatttccctggcagatagtcagggtaaaacggtgtatcactcccccggtgcgccggatatccgcgagtttacgcgtgacgccatacccgataaagacgctcagggtggcgaggtgtatctcctttccggcccgacgatgatgatgccaggccacggtcacgggcatatggaacacagcaactggcggatgattaacttgccggttggcccgttggtggacggcaaaccgatttatacgctctacatcgcgctttcgatcgattttcatcttcattacataaatgatttgatgaataaacttattatgaccgcatcggtaatcatcat

SEQ ID NO: 67446 - DNA, 353 bp, Homo sapiens
cggggtctccctctccaggattctcctggatgaagttcaaggcgaacggtgggccaccaagtcctctacagtccctcagtttgtttcgctgtctggagctgacccagtggtagagacaaaagccacattgacacccacatttaaaggacatttccgtccaaaagcctcctggtgtgtgcccgggtctgggccgtgtcctactcaccatcgcggtaccactcggcgcgcggctgcacccgcttcaggtccggcgtcaccagcatggtgcacttgagagtgaccgtctcgccttccctcctgaaggtgaccccaaacttctccaaaaactggacgtcgaagtgcgtgtacggaat

SEQ ID NO: 67447 - DNA, 340 bp, Homo sapiens
gggtgctggcgtatccggggattaaagtctcgacggcagaagccagggctattttaccggcgcagtatcgccgccaggattgcattgcgcacgggcgacatctggcaggcttcattcacgcctgctattcccgtcagcctgagcttgccgcgaagctgatgaaagatgttatcgctgaaccctaccgtgaacggttactgccaggcttccggcaggcgcggcaggcggtcgcggaaatcggcgcggtagcgagcggtatctccggctccggcccgaccttgttcgctctgtgtgacaagccggaaaccgcccagcgcgttgccgactggttgggtaaaat

SEQ ID NO: 67448 - DNA, 334 bp, Homo sapiens
ccataacctgcttgtgtaatgacccggcgcgcggcatcgtaaacctgctggcagcgcacgccggggcgaatcgcggagattgctgcgagctgtgcctgcaggacaatttgatagacgttaaacagcaggtgagattcggcgctcaccccttcgccattcaccagcaaggtgcgcgtcatatcagagcagtagccctgatacagcgcaccgaaatcgagagtgacaaactcgcccgctgcaacaatcttgtcgctggctttgccgtgcggcagcgccccacgccagccactggcgacaatggtgtcaaaagaggctttttttgcgccctgctggc

SEQ ID NO: 67449 - DNA, 435 bp, Homo sapiens
  misc_feature (1)...(435): n = a,t,c or g
actgtccgtccgctgtacatcgtgaggactgggacattcttggtgttacccaccttactcaccttgcacagcaaggctgggcactgaactgctatacctacttcggcgaactgagtcgcatgacgcagtttaaagataaatctgcgcgttatgccgagaacatcaacgctggtctgtttgactatccggtgctgatggcagcggacatcctgctgtatcaaactaannnnnnnnnnnnnnnnnnnnnnnnnnnnnnnnnnnnnnnnnnnnnnnnnnnnnnnnnnnnnnnnnnnnnnnnnnnnnnnnnnnnnnnntttaaggtgccggagccgtttattccgaaatctggcgcgcgcgtaatgtcgctgctggagccgaccaataagatgtccaagtcttacgatggtcgcaatcacgttatctggcctgctggac

SEQ ID NO: 67450 - DNA, 481 bp, Homo sapiens
tgacccgattacggtttcactgtccgtccccttacatcgccgggaccgagaaaaccctggtgttccccgacttatacgccccgctgaacattttacaacagggccatgccagtgtgctggcgcatccgcagctgcgtgagcgggcagtggcggtttcttcatttggcaagacctatcatatgaccggctggaaagtgggttattgtgttgcgccagcgcccatcagcgccgaaattcgcaaggtacatcagtatctgaccttttcggtgaataccccggcacagctggcgcttgctgatatgctacgtgcagaacctgagcattatcttgcgttaccggacttttatcgccagaagcgcgatattctggtgaatgctttaaatgaaagccggctggagattttaccgtgtgaaggtacatactttttgctggtggattacagcgcggtttctaccctggatgatcctgagtttccccagtg

SEQ ID NO: 67451 - DNA, 281 bp, Homo sapiens
attaccaattcaatctccgtacccggagatcctgcggtgagccgatctgcatgatgtgccccttgttcatcaccagcacagtatcagaaaccgcaaaggcttcgctctgatcgtgggtgacgtacagcgaggtgatatcaaactgcttttgcaactcgcggatcttgtcgcgcatgctgcgacgcaggttggcgtcgaggttactcaacggctcatcaaacagcagcactttcggcttgaggatcagcgcgcgggccagcgccacgcgctgctgctgcccg

SEQ ID NO: 67452 - DNA, 427 bp, Homo sapiens
cggcgctgacaaattgctgcaacagttgccctttgctggtttccccctgcaacaatacaggaagcgtcatggtagcgcggaactgctcggccagatcgcgcatcatggcgtgcgaggtacaaagcataaaacaacgaccgttgttagcttcgatgatcggtcgcagcattgccgctaactggcgagcagaacctggctggttggtttgcggcagattgcgcagcacacagagtaacgcctggcggctgtaatcaaatgggctgggcaacagcaacgactcggcctgttcgatgccaagccgcgaggtgaaatgatgcagatcgtcgttcaccgacagcgttgctgaggtgaagatccagctaccgggtttttgcgccattaactctttgcatttatccgccacgctgagcggcgtgagagccatatt

SEQ ID NO: 67453 - DNA, 399 bp, Homo sapiens
tttcgtcatcgagctgcccggtacggattttagtctggtcaacgcgcgacagcgacgccagagaacgcatcatgatctgttctgatggcatctccagcgagaagataagtaccggtttatcctgcaacatcgccgcgttttcgacgaggttcatcgcaaatgttgttttacccatcgacggacgcgcggcgacgatgatcaaatccgacggctgcaagccagcggtttttttgttgagatcgtcataaccggtgtttaccccggtaacgccatcgtgtggctgctgaaacaactgctcaatacgcgccacggttgcgtcgagcacatcggcgatgttcttcggcccttcgtctttgttcgcacgactttcggcaattttaaagacgcgggattcagcca

SEQ ID NO: 67454 - DNA, 367 bp, Homo sapiens
ggcacaaccagaatcaccacattcgcttggagaatatcatccccagcctgcacgccagtgaccttgtttccttcacgaaccagcgcgtcgacgcgaacgcctgggataaactgcgcgcccgcctgctcggcttgttccatcaaccacgggtccagacgattacgcaatacggtataagatgcgtgttgcggaacatctggctgctcgcggtgaaaatcgagggtaacggcgctttcttcggttaagaaggagattttctcgcgtgtgaccttgcgttctaccggcgctgatactgcaaagcctggaatgattgcttcaagtgtgtgggcataaagacgcccgccgggcatgtttttacatccggcac

SEQ ID NO: 67455 - DNA, 423 bp, Homo sapiens
acgaacagtttcgccgtctgagtgctcatttcgtccgcgtcggtcgaaacgatcgctggcgtatcggtcagacggtgagtcagacggacatctttcacgcgctcgccgagcagggctttcacacggtcgatgaacggagtcagtgctttctccgcttctttcgcgctctcatcaacttcgtcagccagtttttcaagcgactcgtcaactttagacaccgactggaacggtttaccgtcgaactcagtcagatagttcatcatccactcatcgatgcggtcggaaagcagcagaacttcgatgcctttcttacgcagcagttccaggtgcgggctgctcttcgctgccgcatagctgtctgcggtgatgtagtagattttctcctgcccttctttcatgcgggaaacgtagtcttccagagat

SEQ ID NO: 67456 - DNA, 451 bp, Homo sapiens
gtcatcgaccatgactacggattctatgcgccgacccggacaacggcgagacatgcactaccctggccatgcccaatttaatcacgtggaatcccagcgggcgttgttctatccgagctttgatatcaaagcgtttttcggtctggactccatccatctgcataccttattcaaaaaaaccagtcgccagttcaacttcatcccgggtctgaaattgccgctgtttgacggtggacggttgaatgccaatctcgaaggcacgcgcgccgccagcaacatgatgattgaacgttacaaccagtcagtactgaacgcggtgcgtgacgttgccgtcaacggcacgcgtctgcaaacgctcaacgacgagcgagaaatgcaggctgaacgcgtggaagccacgcgctttacccagcgcgctgccgagcccgcctatcagcgcggcctaaccagg

SEQ ID NO: 67457 - DNA, 493 bp, Homo sapiens
atagttttactgccctggagcgcaatggccagacggtagttacctggaaccgggacggcggcacaagtactgaacaggcgtataaaaatatcccgttctacatgactaaccgtggttatggggtactggtcaatcatccccagtgtgtctcttttgaagtgggatcggagaaagtctccaaagtgcagttcagcgttgagagtgaatatctcgaatactttgttatcgacggcccgacgccgaaagcggtacttgatcgttatacccgctttactggtcgtccggcgctgccgcccgcgtggtccttcggcctgtggctaaccacttcatttaccaccaactacgacgaagcgacggtaaacagctttatcgatggtatggcggaacgcaatctgccgctgcatgttttccactttgactgtttctggatgaaagccttccagtggtgcgattttgagtgggacccgctgactttccctgacccggaagggat

SEQ ID NO: 67458 - DNA, 424 bp, Homo sapiens
tacaattcaatttcggtacccgtacaacccggcgagcgtgattggcctgacagtccccaacttaatcattgtgctgctgattgaacggatgctcgacgacaaacgcattcttgcgcatattcgcgcctcgaaagcgccaaaacctggcgcagaactgctgctgggcgatgacgaaagtattaacgcaacaatgaccgcgcgccacggcgcactgtttgaagtcgaatttaatgatgaacgctcggtgctggatattctcaacagcatcggccatatgccgctgccgccgtatatcgaccgtccggacgaagacgctgaccgcgaactttatcaaaccgtttatagcgaaaaaccgggcgcggttgcagccccgaccgcaggtctgcattttgacgagcctttgctggaaaaattgcgcgccaaa

SEQ ID NO: 67459 - DNA, 155 bp, Homo sapiens
gagcgccgacgttggctcatcaaacaacataattttcggcttcatacacagcgaacgcgcaatggcaacgcgttgctgctgaccacctgaaatctgtccgggaaacttatgcgcatgttcggcaattctcacccgctctaggtaatgcaccgcca

SEQ ID NO: 67460 - DNA, 325 bp, Homo sapiens
cgaattcgatctccgtacccggagatctcaatgtgtggctttgcctgggactgctgatgcttgatcgcattgcaaccaaagcggcgaagcggataaacgtgacaccttcggcggtgagtaagtcgctggcaaagttaagagcgtggtttgacgacccgctctttgtgaactcaccgctgggtctgtcgcccacaccgctgatggtcagcatggagcaaaatctggcggagtggatgcaaatgagcaacctgctgctggataaaccgcaccaccagacaccgcgcggcctgaagtttgagctggcggcggaatcaccgctgatgat

SEQ ID NO: 67461 - DNA, 209 bp, Homo sapiens
ttccagtttgcgttgatcaacggcgaacagacgaatgccttcagacagtttttctaccgccatcgcatcctgattgtgctcccaacggaactccgcttcgctcatgggagctgggcgtgggaacgtctgagaaggtgggattaatttacgtaccactggcgaaactttttcctgcagctccttcagtaaattcggtgcgatagtcagtc

SEQ ID NO: 67462 - DNA, 497 bp, Homo sapiens
gccaggaagccaccggtggcagcgtcgatgtgcatgtcgatgtcgataccggtgtcggcctggaatttatccagcgcatcgagcaccggttgtgggaactcatagttaccggtgtaggtcacgccgaaagtcggcaccacgccgatggtgttttcgtcacaggcttcaatcatgcgtttcgggtccataaacaactgaccggggcgcatagggatctcacgcagctccacatcccagtagcgggcgaatttatgccagcagatttgtaccggaccgcacaccaggtttggtttatccgttggtttgcctgcagcttccatacgcttgcgccaacgccatttcatcgccatcccgccgagcatacaggcctcggaagaaccaatggtgttggtgccaacggcctgaccatttttcggcgcaggcgcatgccacagatcggcaaccatatttacgcaacgcaggtcgatggctgcggattgcggatattcttctttgtc

SEQ ID NO: 67463 - DNA, 217 bp, Homo sapiens
gctccctatgacgccgaaaattattttgattatgacaatctgaataacggaccttctttgcagcactggtttggcgtcgattcactggggcgtgacattttcagccgtgtcctggttggtgcgcaaatctcgctggcggcgggcgtgtttgccgtgtttatcggtgcggcgatcgggacgttgctgggcttgctcgctggatattatgaaggctggt

SEQ ID NO: 67464 - DNA, 431 bp, Homo sapiens
ctcattcgggttaatgcagtcggtagcaccgaagcgacgcgccagatcgaatttcttcgggttggtatcgatagcgataatccgacccgctttcgcctgacgcgcgccctgaaccactgccagaccaatcgcgccaagaccaaacacggcaacagaatcacctggctggactttagctgtgttgtgtaccgcgccaataccggtggtcacgccacagcccagcaggcagacgtgttcatggtttgcttctggattaatttttgccagagacacttccgcgactacggtgtattcactgaatgtagagcaccccatgtagtgataaagcggctgcccgttgtaagaaaaacgggtggtgccgtctggcatcaggcctttaccctgggtttcgcgaaccgcaacacagaggttagttttgccagaacgacaag

SEQ ID NO: 67465 - DNA, 315 bp, Homo sapiens
gtacgacggcatcatggcaactgactcaacacaatgtgtaaaaaaaagccgtggccgcccaaaagtgttcgacagggatgccgcgcttgataaggccatgaaattgttctggcaacacggttatgaagcgacttctcttgcggacctcgtcgaagcgaccggagccaaagcgcccacgctatacgcggaatttaccaacaaagaggggttatttcgtgccgttctcgaccgctatatctatcgttttgccgctaagcatgaagcacagctgttttgtaaagagaaaaacgtggagtttgcgctggctgactattt

SEQ ID NO: 67466 - DNA, 568 bp, Homo sapiens
aggtattctgtctgatcgctgaccttgacccgatcgatgagcttgtggacttcccgatcgtttacgcttctgcgctgaacggtatcgcgggtctggaccacgaagatatggcggaagacatgaccccgctgtaccaggcgattgttgaccacgttcctgcgccggacgttgaccttgacggtccgttccagatgcagatttctcagctcgattacaacagctatgttggcgttatcggcattggccgcatcaagcgcggtaaagtgaagccgaaccagcaggtcactatcatcgatagcgaaggcaaaacccgcaacgcgaaagtcggtaaagtgctgggccacctcggtctggaacgtatcgaaaccgatctggcggaagctggcgatatcgttgcgatcacgggccttggcgaactgaacatttctgacaccgtttgcgacacgcaaaacgttgaagcgctgccggcactctccgttgatgagccgaccgtttctatgttcttctgcgttaacacctcgccgttctgcggtaaagaaggtaagttcgtaacgtctcgtcagatcct

SEQ ID NO: 67467 - DNA, 402 bp, Homo sapiens
agcgtttcaaccgcgcggcaatcgaagttctcttcttttatgtattgcagcagacgtccggtcgtggcgaccacgatgtcctgattttcgctgaacacttccgcgtggttcatataggctacgccgccggtgatggtggcgatatccagatgcgtatgtttcgccagttcgcgggcatgatcggacacctgcatcgccagctcgcgagttggggtgaggatcaaaatacgcggcggaccggatttcttacgcgggaaatcgagcaggtgctgcaacgctggcagcagatacgccgccgttttaccggtgccttgtggcgcaaaaccgagtacatcacggccatcgagcgcatgcgtaatggctggatcctgaatggccggcgggcgagtgaaacctttttct

SEQ ID NO: 67468 - DNA, 448 bp, Homo sapiens
atgaagtactggcccatacgcagcatcacttcatacatggcgatgtcgatactttcgcctttaccggtttcacgcactttatgcagtgctgccagcgccgccgtggtggcggtcaggccagaaaagtaatcggcggtatacgggaaggcaggcattggctggtcaacatcaccgttctgaatcaggtaaccactaaaggcctgggcgatagtgttataggccggaagattggtgtactcctcggtgccgtactgaccaaaaccggacaggtgagcgataaccagtttcgggttgtgctgccacagtacttcatcggtaatgccacgacgggcaaaggccggacctttactggcttcgatgaagatatcggtggtttccattaatttcagaaacgcttcgcggccttcatctttgaaaatatttaacgccagcgcgtgcaaattgcggc

SEQ ID NO: 67469 - DNA, 299 bp, Homo sapiens
tcaatattgcctgccgtcccatcaacataagcgacagtcgtacgagaagggtcagcgctggaaggaactgccgccagttgccgcgccgtacttccctgaaccagtgagtaaccattggccatcgtgatgttataagtgccgccatcctgaacgctgacttctacaccaacaatctggtttaattcgctcaccagttgatcgcgttgatccagcagattgttaggtgacgcccctgcccccacgcctgtcaggcgcgagatttgatcgttcaggctggcaatttgtttagcgtagttgtt

SEQ ID NO: 67470 - DNA, 345 bp, Homo sapiens
catgctgtgcgccacggacataaagcccgcttcaaacgctgacggtgccaggtaaacaccttcgtccagcatcatatggaagaaacgcttaaagcgttccacgtcacaggccatcacatcctgatagcacgtcacggactcggcgtcggtaaagaaaataccgaacatgccgccaacgtggttaacgaccagcggaattccggcttcttctgccgcttccagcagaccttctgccagacgtgttgtcagctcatccagcgtttcgtgaacgcccggctgcgcgacttcattcagacaggcgaaacccgctgccatcgcaatcgggttaccggaaagcgtaccccc

SEQ ID NO: 67471 - DNA, 366 bp, Homo sapiens
caaggcacccgcgctgaatctcaaggttcctccaaagataaaacccgtcttgccttcgctggcctgaaattcggtgactacggctccatcgattacggccgtaactacggtgtagcatacgacatcggtgcgtggactgacgtcctgccagaattcggtggtgacacttggactcaaaccgacgtgttcatgactcaacgtgcaactggtgttgcaacctatcgtaacaacgacttctttggtctggttgatggtctgaactttgctgctcagtaccaaggcaaaaacgatcgtagcgatttcgataactacactgaaggtaacggccacggcttcggtttctctgctacctatgaatacgaaggg

SEQ ID NO: 67472 - DNA, 199 bp, Homo sapiens
agcagcagagacccccccgccacgccggatgcgccacaggcacacagagaagccaccacgctcaacagcagcgccgtgggcagatcgaccggaatacccagcgtattaaccgcagccagcgtcaacacggtaatagtgattgctgcgcccgccatattgatggtggctcccagcggaatagaaacggaataggtatcgc

SEQ ID NO: 67473 - DNA, 554 bp, Homo sapiens
cgccatgatggcggacctgacggaagaacagaaagcgcacggcgtgatcactgcttctgcgggtaaccacgcgcagggcgtcgcgttttcttctgcgcggttaggcgtgaaggccctgatcgttatgccaaccgccaccgccgacatcaaagtcgacgcggtgcgcggcttcggcggcgaagtgctgctccacggcgcgaactttgatgaagcgaaagccaaagcgatcgaactgtcacagcagcaggggttcacctgggtgccgccgttcgaccatccgatggtgattgccgggcaaggcacgctggcgctggaactgctccagcaggacgcccatctcgaccgcgtatttgtgccagtcggcggcggcggtctggctgctggcgtggcggtgctgatcaaacaactgatgccgcaaatcaaagtgatcgccgtagaagcggaagactccgcctgcctgaaagcagcgctggatgcgggtcatccggttgatctgccgcgcgtagggctatttgctgaaggcgtagcggtaaaccgcatcggtgacgaaactt

SEQ ID NO: 67474 - DNA, 439 bp, Homo sapiens
cctgcttacggattcaatgtccgtacccgtacatcgtcgagagtgggaataccctgatgatacccatcgtacgagacttgcggtgcagcattctcattggcgagcacaccattattgctggcagataatgtcgcaattttcgctgactgcgggttggcgtcgatgataaatccagcggtatgcaaatcttcattccagttttgcattaatagcttcgcagtaagtccactgcctttggtataggcggtataggtcgccttatagacgccatctgcggtttctttccagtctgtagtgactcctggtttcacgttgtcgatgctgactgcgttattcagttgctgtttttgttccttaacaggtttgtcattttcatctctcagttctaccgtcacctcgataggattgccggagagataacggtccttatcaatcttat

SEQ ID NO: 67475 - DNA, 140 bp, Homo sapiens
agcgaacacgttccgcgaaccagcagattaaccggaacgcccgagctggaggccgcatacagacgatcaaccaggcctttatcgacaaggttatttagcttcagggtgataccactgggcagcccttgctgcgcgttggc

SEQ ID NO: 67476 - DNA, 441 bp, Homo sapiens
tcttgcttacgaactctaggtccgtacccggagatccgcgcggctggcaccaccttgtccggccccgacatatttaacttgcggaacaggaaagtagcggtcgccgaggccatcagcggcagcgttaaaccggcgtagctgtcgagcatctgcaggttggcgatgacttccaccgtcgggaagatacgtacttcaaccggcagcatcagggtgataaaaatcatccagaagaagaggttacgtagcggaaaacgaaaccagacaatggcaaatgccgagagcatcgagacggtaattttgccgagcgtaatgctgaacgccatcacaaagctgttaagcaacatccgccagaacggcgcgctattcgtgcctaccccgttcacccagatgttgtggatgttttccagcagatgtgtgccggggatgagcgtcattcgcgcg

SEQ ID NO: 67477 - DNA, 654 bp, Homo sapiens
ggactactgggctggagtggacatttctcgctataaaaatgtgcctgttccaacctcatatatggccgaaaaatcgcagtacgattttgtcggcgcgtggtgtcacgatgaagatggcggtttgctgcacgttgccaaccaccatattgcgccaggtaaaaaacagtggagttggggacacagtgaatttggccaggcgtgggataagagtctgaccgacaataacggcccgtatatcgaactgatgaccggtatttttgccgataaccagcccgattttacctggcttgatgcttacgaagagaagcgttttgagcagtatttcctgccttatcattctttgggcatggtgcaaaatgcctcccgcgatgcggtgataaaactccagcgtagtaagcgggggattgagtgggggctgtatgccatctctccgttgaacggataccgcctggcgatccgcgaaatcggtaaatgcaacgcgttacttgatgatgccgtggcactgatgcctgcgaccgccatccagggcgtgttgcacggtatcaattctgaaaggctgaccattgagctctccgatgccgacggcaatattgtactgagttatcaggaacatcagccgcaagcgttgccgttaccggacgtcgccaaagcgcg

SEQ ID NO: 67478 - DNA, 242 bp, Homo sapiens
tacaggattctgaagaggcgcaagatgctcactggatacctgcatcaggctgttttttgtttcttccgcctcccgaatccggaacagtttttctgcttctgcatctttcacccaggctgtaccgttccacttctgaaactccccttccggcgataaccaggtaacattttccggtaacggaccgagttcagaaataaataacgcgtcccctgacgctacgtcataaaccgttttaccccgat

SEQ ID NO: 67479 - DNA, 533 bp, Homo sapiens
aacatcgagctcatggattgattaagacgcagctgtgccagctcaagaatactgtccacgctggcgatggtttcgaggcagccgtgattcccgcaataacagcgtttcccatacgggtcgacctgtgtgtggcctatttccacgagactactgctgcctgcgtgtagcagatgaccatcggtaatgacgcccgcccccacgttgtgatcgataaccacctgaatcacatcgcgcgccccgcgtgaggcaccaaacaaggcctctgccatcgtccatgcgctgatatcatgctgaatataaaccggaacgccggtatgctgctccagcgcctcgccgagcggcatctcttttacatcctcgtagaacggcatgcgatgtacaataccattttccgtatcaataattcccggcaaggttatggcaatcgaagttagacgctcaagttcaatctggtgacggataaaaacctcatcgatatggcaatcaatacgatgtccgggtcgcgacatagaatccgtgtcatggtctaccaa

SEQ ID NO: 67480 - DNA, 441 bp, Homo sapiens
gccgggacggtggacaccctagcaaactgctgtttcagcgcctttgcgccaacattaattaccccgcccccggcaacaatcaccggacgttcggcctggattaacatttctacagctttttcgatctgcatacggctggcagcaggtttgtagaccggcagcggttcgtacatgtcaggatcaaactcgatttccgcaacctgaacgtcgaacggtaaatccaccagtaccggacccggacgaccagaacgcatcaggtgaaatgcctgttgcagcacgcgaggcaccagcgccgcttcacgaactgtaaccgccattttgctgaccggtttagcaattgcttcaatatctacggcctgaaaatcttctttatgcagacgggcgcgcggtgcctggccggtaatgcacagaataggaatggaatcagcagaagcggaatag

SEQ ID NO: 67481 - DNA, 394 bp, Homo sapiens
  misc_feature (1)...(394): n = a,t,c or g
taggctgttgactttttcttcataagtacggaagtagccgttcagtgccggacgaccaaattcgttgttaaacgccgcgccgcccagcgggccttcggtcatgatgtccagcgcggtgacaatgcgctcaggcttaccgaaatcttcttcccacggctgttcgaagccaggaattcgcaggttggaaacggagaaaccaaccagacccgctttcggctttgcgccgcgcccggtggcaccttcatcgcggatttcaccgccggaaccggtcgccgcgcccggccacggagaaatcgccgtcgggtggttgtgagtttcgactttcatcagaatatgcgccggttcctgatggaaatcgtagcggcccgtttcgtggtcaccaaagtancggccc

SEQ ID NO: 67482 - DNA, 333 bp, Homo sapiens
ccagggccgtgtcttccagctgtctgtcaagacactgcctcagtttgaggcatagccccgtggctggatgttctgtggctgcgtgctctgtggccatgtgttctgtggctgggtgttctgtggctgcgtgttctgtggccatgtgttctgtggctgggtgttctgtggctgggcgctctgttgcacagtgaagggccaagcaccctccatacaggtgtgcacaggacagaggtgactgtgggaacagcaccaaacatcagccctgagccgaggctatgcgtgcgacaggttcatcagccccagctggggaaggagaatgagaacaaatggaag

SEQ ID NO: 67483 - DNA, 810 bp, Homo sapiens
tcaaacggttctttggtcaggcgctgattgccttcctgccaaatccagtgcgtatcaatagcagtaattttacccggtgcagcggcggcaacatgggtaaacatcgccagggaaatatcgaagtggttgttagagtgtgaaccccaggtcaggccaaattcatggcacatttgcgccacacgtaccgaaccttgcattgtccagaaatgcggatccgccagcgggatatcaacggattgcagggagagcgtatggcccatttgccgccagtcggtggcgatcatattggttgcagtcggtaaacctgtcgcgcgacggaactctgccattacttcacgcccggagaaaccttgctgcgcaccacacggatcttctgcataagccagcgaacctttcaggtatttaccgattttaatcgcttcgatcagcgaccatgcaccggtaggatcgagcgtaatacgcgcctgcgggaagcgttgcgccagtgccacaatagactcggcctcttcttccccggccagtacaccgcccttcagtttgaaatcgttgaagccatatttttcatatgccgcttccgccaggcgcaccaccgcatccggcgtcatcgcttcttcatgacgcaggcgataccagtcgcatgagtcatccggctggctttgatacggcagcggcgtggctttgcgattaccgacgaagaacagataaccgagcatttcgacttcgatacgttgttgcacagtcaagcaaaattaagttgcgccacgccaggctcatcccagtccagccgatgtacaggacggacatctgaat

SEQ ID NO: 67484 - DNA, 621 bp, Homo sapiens
tggagatgtttgtttctacgcgccgtgacggtcgctcgctgggtgagctggtcaaagaagagatggggccaaccgccggggtgattgcgctggtggcctgctttatgatcatggtcattatccttgcagtgctggcgatgatcgtggtgaaagccctgactcatagcccgtggggaacatataccgttgcgttcaccattccgctggcgctgtttatggggatctacctgcgctatctgcgtccggggcgtattggcgaagtgtcggtcatcggtctggtattcctgattttcgccattatctctggcggctgggtggcagaaagtccgacctgggcaccgtactttgactttaccggcgtgcagttgacctggatgctggtgggttacggttttgtggcggcggtgctgccggtgtggttactgctggccccgcgtgactacctctctaccttcctgaaaatcgggactatcgtcggtctggcggtaggcattttgattatgcgcccgacgctgaccatgcctgcgctgaccaaatttgtcgatggcactggcccggtatggaccgggaacctgtttccgttcctgtttatcaccatcgcctgtggcgcggcgtctggta

SEQ ID NO: 67485 - DNA, 572 bp, Homo sapiens
gattacgaattcaagctcgcgtacccgtacatcaccgatgaccgcaaacgtcaggtcatcatcccagctcaaggggggggtcagcctcaagcgcctgctgaaaggcacgcacatctgcaccgccttttaccagccagccgtcaccatcagtaatgatttccggcgtttcgtcagcgtccggaaattcacccgcaatggcttccagcacatccagcggcgtgaccagaccttgtaccacaccaaactcgttggtcacgataacaaagctcccgcgagcacgacgcagcacgcccaacaggttgatcggatcgagggtttccgggacgataatcgccggagacgccgaagcaatcgccgccacatcaacgccctcttccagcgccaccagcagttctttagcacgtacaataccgatgatttcatccagttcaccgcgacataccgggaacagactgtgcggtgaagagagcagttgctcgcggatttcatcgaccccgagattagcgtcaacccagcttatttcaccgccaggcgtcacgatctccgggtcggacgctagaattcgtagcatg

SEQ ID NO: 67486 - DNA, 437 bp, Homo sapiens
cactctgattacgaattcttgctctcgaccctgagatccgccaggatgaagaagacttcgaaaccttccagggcgaaggcctcttctcgatggacgaaaaatctcgccaggtgaacctgaccgaacgtggtctggtgctgattgaagaactgctggtgaaagagggcatcatggatgaaggggagtctctgtactctccggccaacatcatgctgatgcaccacgtaacggcggcgctgcgcgctcatgcgctgtttacccgtgacgtcgactacatcgttaaagatggtgaagttatcatcgttgacgaacacaccggtcgtaccatgcagggccgtcgctggtccgatggtctgcaccaggctgtggaagcgaaagaaggtgtgcagatccagaacgaaaaccaaacgctggcttcgatcaccttccagaactac

SEQ ID NO: 67487 - DNA, 389 bp, Homo sapiens
acatggccgtccggattcccctgagtttgtagcaacgcaacctgccctgcctggttaatgccaacaaaacggtgcggctgggcggcggcgcgcatagcgttaattgctgttgccagactgccgtcggtgccgtttttaaaaccaaccggcatggaaagcccggaggccatttcacggtgagtttgcgattccgttgtacgagcaccaattgctgaccagctaaacagatcgcccaggtattgcgggctattcggatctaacgcttccgtcgccagtggcagtcccatattcaccagctcaagcagcaatttacgcgcgatctgcagcccggcttctacatcaaaagaaccatccatatggggatcggtaattaaccctttccaggcgag

SEQ ID NO: 67488 - DNA, 337 bp, Homo sapiens
aggctgccgctgagcgctggggcttcgccttgagttttgagcaaatggagtgggcgagctgcgagtattacagccatcacggtaaaatgatgccggacgactggcatgagcaacttagccgtttcgacgccatctattttggtgccgtcggctggccggataccgttccggaccatatttcgttgtggggttcgctgctgaaatttcgtcgtgaattcgaccagtacgtcaacctgcgcccggttcgtctctttcctggcgttccctgcccgctggcgggaaaacagcctggcgacatcgatttttacgtggtcagggaaaacaccgaaggcgaatt

SEQ ID NO: 67489 - DNA, 455 bp, Homo sapiens
gtccgtatctgatatcgacgacgttatcctcgttggtggtcagactcgtatgccaatggttcaaaagaaagttgctgagttctttggtaaagagccgcgtaaagacgttaacccggacgaagctgtagcaatcggtgctgctgttcagggtggtgttctgactggtgacgtaaaagacgtactgctgctggacgttaccccgctgtctctgggtatcgaaaccatgggcggtgtgatgacgacgctgatcgcgaaaaacaccactatcccgaccaagcacagccaggtgttctctaccgctgaagacaaccagtctgcggtaaccatccatgtgctgcagggtgaacgtaaacgtgcggctgataacaaatctctgggtcagttcaacctagatggtatcaacccggcaccgcgcggcatgccgcagatcgaagttaccttcgatatcgatgctg

SEQ ID NO: 67490 - DNA, 396 bp, Homo sapiens
  misc_feature (1)...(396): n = a,t,c or g
gtccgacccggacatctgctggatattgacgataccgacatgcccagtcttcgttactcggatcctgaagcccagcgtattggtcagccatttaaaggtgatgacatccttaaagcgctgaatggcgaagaaaatgtcgctatcaatcgcggttttctggcgcaggctttacgcgtatttacccccatctacgatgaaaatcataaacaaattggcgtggtggcgatcggccttgagttaagccgtgtgacccaacagatcaatgacagtcgctggagcattatctggtcggtattatttggcatgctggtcggactgattggcacctgcattctggttaaggtactgaaaaaaatccttttcggcctggaaccctacgaaatctccncgctgttt

SEQ ID NO: 67491 - DNA, 402 bp, Homo sapiens
ctgtgcgaaatgtttgcgtgatgcggatgaatgcccctccggggcgtttgaacggattggtcgcgatatcagccttgacgctctggaacgggaagtgatgaaagatgacattttctttcgcacgtccggcggcggcgtcacgctttctggcggcgaagtgttaatgcaggcggagtttgctacccgttttttacagcgactgcggctgtggggtgtgtcatgcgccattgaaactgccggagacgcaccagccagcaagctattaccgctggcgaaattgtgcgatgaagtgttgttcgatttaaaaattatggacgcgactcaggcgcgggatgtggtgaagatgaacctgccacgcgtgctggagaatctgcgtttgctggtgagtgagggcgtcaacgt

SEQ ID NO: 67492 - DNA, 625 bp, Homo sapiens
ttcccgggtcgacgatttcgtccggaatcaaaaatctcctgggtggagttccccgcgggtccgcaaatgttggaagcgttaaacgttggcagtattgatctcggcagtaccggggatattccgccaatctttgcccaggctgccggggctgatttggtgtacgtgggcgtcgagccaccgaagcccaaagccgaagtgattctggtggcagaaaacagcccgatcaaaaccgtagccgatcttaaaggtcacaaagttgcctttcagaaaggttccagttcacacaaccttttactgcgtgcactgcgtcaggccggacttaagtttaccgatatccaacccacttacctgacgcccgctgatgcccgcgccgcgttccagcaaggtaacgttgacgcctgggctatctgggatccctactactctgctgcattattacagggcggcgtgcgggtgctgaaagacggcaccgatctcaatcaaactggatcgttttatctggcagctcgtccctatgcagaaaaaaacggcgcttttattcagggcgtactggcaacctttagtgaggccgatgcgttaacccgcagccagcgcgagcaaagcaacgaaatcgtcgacccgggaa

SEQ ID NO: 67493 - DNA, 453 bp, Homo sapiens
  misc_feature (1)...(453): n = a,t,c or g
ccgcatgagctaccagcgccggaagctgcacgcgtttgccagagacaaacgtcgccagcacaatcaccaccagcatcaacagaccaaacggtaacgtcgcgcggttaaaatacggcgcgccaacggagaggcgtccccagcccagcaggccgtaaatcatcggataaagcgttcccaccagcacgaacaactttnnnnnnnnnnnnnnnnnnnnnnnnnnnnnnnnnnnnnnntcccctatttctctgtggcatcttaatataaccagaggcttgtctatttttgtactatttttaaagaaccaacctttggttttgttaatactttatgttgcttcctggatttttatttcatcatttttgccttgcccattatttttttcctgccacttcctttgactctgctgctctttcgtgcagctggctggatactcagttcactgctctctggtgg

SEQ ID NO: 67494 - DNA, 127 bp, Homo sapiens
aaccgcatcccggccaacctggtggaccagttcgagaagcagctgccgctgcaccgggacggcttccacacgctgcagtaccagaggacgtccgcggccgccgagcagcgcagcgagagccccgggc

SEQ ID NO: 67495 - DNA, 335 bp, Homo sapiens
gggtggcgcccggatgacgaaacacccaccctgctggtggtgcacaatattaacctgccgccaggcgagtttggcggtccgtggatcgacgcattattcactggaactattgatccgcaggcacatcctttctttgctgagatcgcccatttgcgcgtctccgctcactgtttgattcgccgtgatggtgaaatagtccagtatgttcctttcgataaacgtgcatggcatgcgggagtctctcagtatcaggggcgcgaacgctgcaatgatttttctattgggattgagcttgaaggcaccgatccgctggcgtataccgatgcgcagtattg

SEQ ID NO: 67496 - DNA, 346 bp, Homo sapiens
gaccaactgccagcacgtagtggctgcgcgggatacgctgcaaaaacgtgtactgatcgtccagggcgacaatttcgccgccacgcagtcggtgcatggaaatatcatcaagatggtatttactcagtggctcgacacgcagatcgaaagagagatttaaatccatctctttcagagttttaccccagtcgtgtggggggatctcacgcaattcgctgcgcatcagatacagcgaactgttcatcaaatcatccagcgactgtttgcccgcgcgttcggcggtaaatttgtacaccagcccaaccagcagagacatcacaaggaagcagacaaacaataacaggta

SEQ ID NO: 67497 - DNA, 372 bp, Homo sapiens
agcgctggcgattcagggctggctaccccgtttcattgaatttggtgcctgtagtgcggaaatggcaccagaagcggtactccacggattacgcccaattggtatggcttgcgaaggtgatatgttccgcgccactgcgggcgtaaacacgcataaaggcagcattttttctttagggctgctatgtgcggcaattggccgtttgcttcaactcaaccaaccggtaacgccaacaaccgtttgttctacggcggcaagtttctgccgtggcctgaccgatcgcgaactgcgtaccaataattcacaactgacggcaggtcaacggttgtaccaacagcttggccttaccggcgcacgcggtgaagccgaagc

SEQ ID NO: 67498 - DNA, 596 bp, Homo sapiens
cgcaattgtttccctgccgattaccgaaaaaggctattgtattgacccggccaccggtgcactcgacaccagtaatccgcggattattcacgatctacaaacccctgaagaacctcactccgcaccgggtattctcgtcgaagcactgaaacgccgccgtgagcgcggccttacaccgtttaccgtgctctcctgcgacaatattcccgacaatggtcatgtggtgaaaaacgcggtgctgggaatggcagaaaaacgttcgccagaactcgccgggtggataaaagagcacgtcagttttccgggaaccatggtcgaccgcattgttccggctgcaaccgacgaatcactggtggaaatcagccagcatctgggggtgaatgatccctgcgcgattagctgcgaaccgtttatccagtgggtggtggaagataacttcgtcgctgggcgtcctgcctgggaagtcgcaggtgtacaaatggtgaatgatgtcctgccatgggaagagatgaaactgcggatgcttaatggcagccactcttttctcgcttatctgggttacctctcaggattcgcccatatcagtgattgcatgc

SEQ ID NO: 67499 - DNA, 207 bp, Homo sapiens
gttgaattattcctcagcgatgaaggcgatgatgtggtgattgaagtcgccgatcagggctgcggcgttccagagtctctacgagacaaaatatttgagcagggggtcagtacgcgtgctgacgagcccggtgaacatggcattgggttgtacttgattgccagctacgtaacgcgctgcggtggtgttatcactctcgaagataat

SEQ ID NO: 67500 - DNA, 335 bp, Homo sapiens
aggcattgatcatctccagcgccagactctctcctaccgaaaaataacctgggcgaatcagtcctccgataatgtaactttccacatggggaaaacagcccagttcattggcgattttaatgtcgttgcagatgacctttacccgcgcatcggccaggcatttcgccagttcgaggcaggttgagccggagtcgagaaaaaagcagtcgccatctttgatcattgttcgggcaagggcagctatttctcttttcgccacagattgcaatgtacgtttcacgtcgaagacgtactctttgtcgtctgtactgtcgtcgaagtccaggcaaccgtga

SEQ ID NO: 67501 - DNA, 518 bp, Homo sapiens
gcaaactaaaaccgggagcagcaccagacaacgctcactatcaaggcaataccaacgtcaacggcgaagacatgactgagattgaggagaatatgctactcccaatttctggccaggaactgcccattcgttggcttgctcaacacggcagcgaaaaaccggtaacgcacgtttcacgcgacggactccaggcattacacattgctcgggctgaagaactaccggctgttactgccctggctgtttcccacaaaaccagcctgctcgacccgctggaaattcgcgaactccacaaactggttcgtgacactgacaaagttttccctaatcctggtaattcaaacctgggactgataactgcttttttcgaagcatacctgaacgctgactacaccgatcgaggactgctgacaaaagagtggatgaagggtaatcgtgtttcacacatcactcgcacggcttccggtgctaatgctggcggcggaaacctcaccgatcgcggcgaaggtttcgtaccc

SEQ ID NO: 67502 - DNA, 405 bp, Homo sapiens
gaatcatatcgccagtaatggtgtaatttttaccttcaggctcaatgatttgcataggcttaactgccggagcaacgcggtcacggccatcaaatgggcgtgcggtcattggcaccggaactaccggaccttcttcaatcttaacgatttttttctgttctaaatcaacgaccgccaccaggttttcgatgggatgtgcccagtagttgccatcaccgacatcaagatagctgatgactttgagcaaccgggcatcttgtttcaggccatctttaccatcgaaataacctacggtcagcggcgtggtaatcacttttttcgcatcagtaataccgcgtttcttcacggcagcggcaaattcttcactgttgttaataatgttctgcacactggcgaaatcatcca

SEQ ID NO: 67503 - DNA, 522 bp, Homo sapiens
taacacccgcgacaagctcattgtcgtgaccgggctttcgggttctggcaaatcctcgctcgctttcgacaccttatatgccgaagggcagcgccggtacgttgaatccctttccgcctacgcgcggcagtttctgtcactgatggaaaagccggacgtcgatcatattgaggggctttctcctgccatctcaattgagcagaaatcgacgtctcataacccgcgttctacggtggggacaatcaccgaaatccacgactatttgcgtttgttattcgcccgcgttggcgagccgcgctgtccggaccacgacgtcccgctggcggcgcaaaccgtcagccagatggtggataacgtgctgtcgcagccggaaggcaagcgtctgatgctactcgcgccaatcattaaagagcgcaaaggcgaacacaccaaaacgctggatatcctgccaagccattaagacgggtgtcgtcagtggttttgccagtctctgcgttgtcagcgtccggacattgaatccgt

SEQ ID NO: 67504 - DNA, 493 bp, Homo sapiens
aaggatcatcatgttgacgttacgtataaaacactgcgctcactgaaacatggcgaagccctgctgaaaatggagtgttgtggtgtatgtcataccgatcttcatgttaagaatggcgattttggtgacaaaaccggcgtaattctgggccatgaaggcatcggtgtggtggcagaagtgggtccaggtgtcacctcattaaaaccaggcgatcgtgccagcgtggcgtggttctacgaaggatgcggtcattgcgaatactgtaacagtggtaacgaaacgctctgccgttcagttaaaaatgccggatacagcgttgatggcgggatggcggaagagtgcatcgtggtcgccgattacgcggtaaaagtgccagatggtctggactcggcggcggccagcagcattacctgtgcgggagtcaccacctacaaagccgttaagctgtcaaaaattcgtccagggcagtggattgctatctacggtcttggcg

SEQ ID NO: 67505 - DNA, 210 bp, Homo sapiens
ttcaggcgctggaactggcggtgcaggagtatccggtgaaagcgtgctggctgatgactaatagccagaatccactcggatttaccttaacgccgcaaaaaaaagcacaactggtggcgttgctcaatcagtacaacgtaacgctgattgaagatgacgtttacagcgaactttattttggacgggaaaaaccgctgcctgcgaaagcgt

SEQ ID NO: 67506 - DNA, 108 bp, Homo sapiens
ttcaaagcgggagaaatcacgaccgcgctgcaacagaccaaagccttgcgggttttccatggagaagctgctgaccgctaaatgtttcgggttattcaacggacgcca

SEQ ID NO: 67507 - DNA, 317 bp, Homo sapiens
ggtcttgtcgcgacgataagagaagaaagtctcattttccgtatatgtacaacggtcgccgccgaaaatttgctcaacacccacgttcgccagacgctgccgggcaagctgataaatatccgccagatacttatcaccatgctgaatgaaagctgcacttgctttagcgtctactgccataaacgcctcgcgaacctccccccccacttcgaacgcgcgtggaccaattgccggccctaaccaggcgagaatattttccggattatcagcaaaacaggaaaccgtctcttccagcacgcctgcgcacagtccacgcg

SEQ ID NO: 67508 - DNA, 537 bp, Homo sapiens
aagccttcaacatcgaacaggcgacctttaacgactacatggcgaagctgggcgaagtttccgataccgacattcgccgctttgctgacctgcaaactgccctgaccaaacgtgtggatcacttcgccgctcacggctgtaaagtgtctgaccacgcgctggatgtggtgatgtttgctgaagcgaacgaagcggaactggacagcattctggcgcgccgtctggctggcgaaaccctgagcgagcacgaagtggcgcagttcaaaactgcggtactggtgttccttggtgccgaatatgcacgtcgcggctgggtacagcagtaccacattggcgcgctgcgtaataacaacctgcgtcagttcaaactgctggggccggatgtaggctttgactccatcaacgaccgtccgatggcggaagagctgtctaagttgctgagcaagcagaatgaagaaaacctgctgccgaaaaccattctgtactgcctgaacccgcgcgataacgaagtgctgggcaccatgatcggtaacttcc

SEQ ID NO: 67509 - DNA, 214 bp, Homo sapiens
ttttactgtaatgcatccgccacatacactgatattttgccttgctgaaccacatcccacaggccaaattctttcaccgtgccgcgctctacatacgggcgcatcacatttggcgtactgaatccgacaatcgctactttgtcatttttcaagttttctgcggcttgtgcggcagcgggcagggcgttggcatcgggggcgataatggcgtcga

SEQ ID NO: 67510 - DNA, 485 bp, Homo sapiens
caaacgcggaacctttccatacgcgaccagtgaccaactggaatggacgggtggagatttcctgaccggcaaccgcgaccccgatgatctgtgggtccacggttgcccaccgggttgtgagctccagggacaggcgtgcccacggctgcctccccgtgtgaccagaatcactcaatgctgctgtcctggggcccgaagatcgtgtttgccattctggaacttttattcatctcgcttttcagaaacacaaatgacggatgaagcacacaggccctgaaacccaaacgttaacttggacttagagctgcttgagctagttacttcacatctgtttcaacggagccagtaggagctgcctcacacagctagtaggagatgtgaatgaatcaggcatgggaaggtgtctgcgtgtcacccatggtcggtaggtaggagctcttacgtagtaacagtttcccccaaactccatctcagtcatgcatccc

SEQ ID NO: 67511 - DNA, 129 bp, Homo sapiens
tacatcgtagtgacggggaaaacacattgcggtacgccacttactaccgttacaggagacgcaacgcaatcgggttatctgacgctgaacctgcctgaaatgtgggaagtgtcaggttataaccgtgtt

SEQ ID NO: 67512 - DNA, 334 bp, Homo sapiens
acttcatgtccgtacgctgtacaaccaccagactgctaaaaccctggggttacccaaattgatggacttgggcgacagcagcgagctcttccgtaagcatcacatctctggtcaggttctgcgtgacgagctactgcgtcgcggctggatccaccaattacgtcaacgcagcgacggtcccgcgcaagtcttttgccatccagattacgccggagagattggccttatcatgccgtatgaaaaagacttctgcgccacttgcaaccgcctgcgcgtttcctccattggtaaactccatctctgcctgtttggtgaaggcggcgttaacctgcgc

SEQ ID NO: 67513 - DNA, 339 bp, Homo sapiens
accacgctgacccacagcaatccacttaaccagttgaaaaactggaagcggcggtttggcaaaccggaaattcccgccatggttggcagcagcgtacggacaaatgcaagaaaacgtccagccagcagcgccagcagaccgtggcggtcaaacatgcaggtggcgcgctggtgatatttagcaggaagctgtgccagccagcctttcaccgttttggtattccctaaccagcgcccctgaatataacttagccagcagcccagacttgctgcggcggtcagaatcgcaatcgtaggcagaaaatccataaccccctgggcaatcaatgcgcctgccagt

SEQ ID NO: 67514 - DNA, 423 bp, Homo sapiens
cgaaggtattgagttatctcgatgtactgcgcgacaaagcgccggttggcaacaaagttgccatcatcggttgtggcgggattggttttgatacggcgatgtatttaagtcagccgggcgaatccaccagccagaatatcgccgggttctgtaatgaatgggggatcgacagtagcctacaacaggctggtggcttaagcccgcagggaatgcagatcccccgtagcccacggcagattgtgatgctccagcgcaaagccagcaaaccaggacaggggttaggcaaaaccaccggctggatccatcgcaccaccctgctctcgcggggtgtgaaaatgttccccaaagtgagtaatctgagtatcgccagggtcgtcccgctcgtggtgttctccggctcaaatcctcgaagccgtttcgctc

SEQ ID NO: 67515 - DNA, 358 bp, Homo sapiens
  misc_feature (1)...(358): n = a,t,c or g
gccggttttgccgcatcaatggtgcttagcgatgactcaacgtaccagtgcgccgactgcaaatctgcccgccgggccagtaaggagtaccccagttcatcaagaagctggcttgccactttcggcaacgcgaccggattaagcttcaatgactttgtctggttatttgtaagtgcgcttaaccgtgcctcaataattttcattttccccgcgacatcgttgagctgctgccgggttttgctggcattaatatcgggttccacaccttcaactgaagaagtaatcccgttctgatatagctggcgatcggtcgcgataatggcgntctgctctttttctatttgctgcaagaccgtgg

SEQ ID NO: 67516 - DNA, 226 bp, Homo sapiens
ttgatgtcggtacccggggatcgctaccgtctaccggggtgataaccaaaccacgtttacctttgggttctttaccgaaggaaacgataccgctgatttcagccaggattgccggctctttcggacgacgtgcttcgaacaggtccgcaacgcgcggcagaccaccggtgatgtccttggtaccgccggattcctgcggaatacgcgccagggtgtcaccagagct

SEQ ID NO: 67517 - DNA, 349 bp, Homo sapiens
ggcggcaaccaaatcgatggcaatgtgttgatagatacctccattttcgccagccacgataaagcccccggctggccatggaatgacatgacacaatgctttagcgctccgcctgccgccgccatagatgaccgcaactgtttctccgtctcgctctacagagccccaaagcctggtgatatggcttttatacgcgtggcatcttattaccccgttacgatgttcagccaggtacgcaccctcccccgtggttctgccgaagcgcaatactgcgaactggatgtggtgccaggcgacctgaaccgctttacgctgacgggatgcctgccacaacgttctgagccgctcg

SEQ ID NO: 67518 - DNA, 468 bp, Homo sapiens
cctgctggcaatcaatcccgataagcgtcacaatcgcgtgatcacgccgcatcctggcgaggccgcacggttgttaggctgttccgtcgctgaaattgaaagtgaccgcttacattgcgccaaacgtctggtacaacgttatggcggcgtagcggtgctgaaaggtgccggaaccgtggtcgccgcccatcctgacgctttaggcattattgatgccggaaatgcaggcatggcgagcggcggcatgggcgatgtgctctctggtattattggcgcattgcttgggcaaaaactgtcgccgtatgatgcagcctgtgcaggctgtgtcgcgcacggtgcggtagctgacgtactggcggcgcgttttggaacgctcgggatgctggcaaccgaactcttttctacgctacagcgtatttgtaacccggaagtgcctgttgatcctcttgcgtatacagtcattccccg

SEQ ID NO: 67519 - DNA, 236 bp, Homo sapiens
cagggggtggctggcgagcagcaggtcgatgcgcaaaccacggttatcgtcaaaaccttttgagcggtaatcaaaccatgagaaacgatctgctgtttgcggattcgcatggcggaaggtatcgaccaacccccagctcatcagcctgtccatccattcgcgctcttccggcaggaaagagcatttaccggtacgcagccagcgcttacggttttcttcgccaatgccgatatcca

SEQ ID NO: 67520 - DNA, 422 bp, Homo sapiens
ccagaagcggggagaaaaaacccgacgcagcggatccaccgccatcatctccatactggagagatgctctgtagcgcgcatcaagccgatttctgcggttagcgccgaaccagcacgcccggcaaacaacaacgcggcaaccaccggccccagttcacgcagtagcgataacgccaccagcatacccagactggtttccgcactataagtggtcagaaccagataaccttgcagccccaacaccattccgatgaacacgccagaaaccacaataatcagcatcgacaggacgccgacattatagagctggcgcaccagcagcggcgcatgtttgcgaaattccggtttgccgaccagcgcattgaataacattaacccggcccgcccgaacgttctcagggttttaatccctttatgtctga

SEQ ID NO: 67521 - DNA, 253 bp, Homo sapiens
tggcggccttcctgagagaatattgccgaggagtacgcgactaaacgctatcgttctaacgtcatcaactgggggatgttaccgctgcaaatggcggaagtaccaacctttgaagtgggggattacatttacatccctggcattaaagcggcgctggataatccgggtacgacgtttaaaggttatgtgatccatgaagatgcgccggtaacggaaattacgctctatatggaaagtcaggaagccagaacag

SEQ ID NO: 67522 - DNA, 439 bp, Homo sapiens
gacgacgctgcgcaggtcgcgcaagtgtgtcagcgactgttagctgaaacggagcgactggacgcgctggtcaatgcggcgggaattttacgcatgggcgcgaccgatcagctcagtaaagaggactggcagcagacttttgcggttaacgtcggcggtgcgtttaacctgttccagcaaaccatgaaccagtttcgccgtcagcggggcggggcgattgtcactgtggcgtccgacgccgcgcacacgccgcgtattggcatgagtgcttatggcgcatcgaaagcggcgctgaaaagcctggcgttgagcgtcgggctggaactggcgggtagcggcgtgcgctgtaatgtggtttcgcctggctccaccgacaccgatatgcaacgcacgctgtgggtgagcgatgacgccgaagaacagcgtattcgcggctttg

SEQ ID NO: 67523 - DNA, 174 bp, Homo sapiens
agatactgcgctttacctgcctggtttgagcaagtatcgaacaggtctttaaagcggtcatagctgcccatgcccggcttcatcatcttcgataacggcccttcttcggtatgttccggggcaatcttcagataaccgccgacgtgatgggtcgccagttctttgatatagcgc

SEQ ID NO: 67524 - DNA, 331 bp, Homo sapiens
gacaaaaagtggaagagtattatgcgcagcacctgagtatctgcaaaaatatccgcagccacaatccctacaggaattaagtcgtcatgactgtctggtgaccaaagagcgcgatatgacccatggaatatgggagttggggaacggtcaggagaaaaaatcggtgaaggtaagcgggcatctttcctccaatagcggagagattgtgctgcaatgggcgctggagggcaaagggattatgctgcgttccgagtgggatgtgttgccgtttctggagagtggcaaactggtgcaagtattgccagagtatgcacaaagcgccaatatctgt

SEQ ID NO: 67525 - DNA, 337 bp, Homo sapiens
aaactggcgtggaagccagccactgcaaccagagataaaaatcgacgtcatcacgatgttcttcgcagaactgacgcacttctggtgaatccacgttctgatacatctctggccatgcaggccagccccagcgcatttcgtcctctttcacttgctgggcatgtagcgcatcaaaggctgcctgccaaaacaggctgtcgccctgctctgcaacaaactggcgaaacgcggccatctgctcatcatcacgttgcgcgaaacctttccacgccattcgtaatgctgtcatttttagggcggtaaccgtggagtaatcgacccagtcggcatcgcgcgg

SEQ ID NO: 67526 - DNA, 245 bp, Homo sapiens
attcatcgtccgacccgacatccgatgcgcggaataaactggcgcgaccgacctatacgccataccgggtcgagccagctcagccacctgagcacgacgaccaccggaagctgcgccaaacggatcgcggcattgcagtgcgtgggtcacgtcgaaaatcaccggcgagttaccagacactttcttcataatgctgaagcccagcatatcgacaaccaggttgtcatagccgaagttagcaccgc

SEQ ID NO: 67527 - DNA, 362 bp, Homo sapiens
aacgtgcgcgttttaaactgccagcgtggccgaccaccacgattggttccttcccgcaaaccacggaaattcgtaccctgcgtctggatttcaaaaagggcaatctcgacgccaacaactaccgcacgggcattgcggaacatatcaagcaggccattgttgagcaggaacgtttgggactggatgtgctggtacatggcgaggccgagcgtaatgacatggtggaatactttggcgagcacctcgacggatttgtctttacgcaaaacggttgggtacagagctacgggttccgctgcgtgaagccaccgattgtcattggtgacattaaccgcccggcaccgattaccgtggagtgggcg

SEQ ID NO: 67528 - DNA, 495 bp, Homo sapiens
ggaagatgtgattcttaatcgtcgcgacgatggcaccgagcgtttactggagcttgccgagaaatatcgcggcagcaaaaccgacgacaccgccaacgcccagcaggcggagtggcgctcgtgggaagtgaataaacgtctggaatactcgctggtcaaaggcattaccgagtttatcgagcaggataccgaagaagcccgccagcaggctacgcgcccgattgaagtgattgaaggcccgttgatggacggcatgaatgtggtcggcgacctgtttggcgaagggaaaatgttcctgccacaggtggtcaaatcggcgcgcgtcatgaaacaggcggtggcctacctcgaaccgtttattgaagccagcaaagagcagggcaaaaccaacggcaagatggtgatcgcccccgtgaagggcgacgtccacgacatcggtaaaaatatcgttggtgtggtgctgcaatgtaacaactccgaaattgtcgatatcgg

SEQ ID NO: 67529 - DNA, 298 bp, Homo sapiens
gaaagcccattacgctggtcaatctggcaacccataccagcgccctgccccgtgaacagcccggtggcgcggcacatcgtccggtgtttgtctggccaacgcgcgagcaacgctggaaatacctttctacggcgaagctgaaagccgcgccaggcagtcaggcggcgtactctaaccttgcgttcgacctgctggcagatgcactggcgaatgcgtccggcaagccttatacccagttgtttgaagagcagattacccgtccattggggatgaaagacaccacctacaccccctcacc

SEQ ID NO: 67530 - DNA, 467 bp, Homo sapiens
  misc_feature (1)...(467): n = a,t,c or g
agaacagaatggcgaaatgcaccagcagcaccagtttcgccagtggccacagagacgagaaaccaaagttagccaccgtcaccgcaatcagcgcaaacacacccaccggtgcataacgcatcaccatgtgagtcactttaaacatggtttcagagatggagcggaacacggtcaccagcggttcacgatgcgtcgcgggcagggaagaaagccccagaccaaacagcaccgagaaaaagatgatcggcagcatttcgcctttcgccatcgacgccacaatgttcgtcggcaccagcgacaaaatcgtgcccataatgccgtgggaactgctttgtaccgcttccgtagtgctctgatatttcgagatatcgacggtcgccagctgcaacatatccaacccggcaccgggcaggaattcgttcgccagagtgatctccgggtacaatnnnnaatgcgtaatgaagtga

SEQ ID NO: 67531 - DNA, 447 bp, Homo sapiens
acgagattcactgtccgtacgccgtacatcggccatactgctaaaacccgggtgctacccatcttaatcagtcttgccgctaagttccgcgctcaataacttccttgaaccgttactgcgcaaagagaatctgcggatcatcctgaccggagccggaacgtcggcatttatcggtgacatcatcgcgccgtggctcgccagccataccggtaaaaacttcagcgccgtaccgaccaccgatctggtcaccaatccgatggactacctgaacccagctcatccgctgctgttgatctccttcggtcgatccggcaacagcccggaaagcgtcgcagccgtggaactggcaaatcaatttgtaccggaatgctatcacctgccgatcacctgcaacgaagcgggcgctctttaccaaaacgcgatcaacagcgataacgcgtttggccg

SEQ ID NO: 67532 - DNA, 307 bp, Homo sapiens
gcttcctggttagcgaaatcttccgccggaccttctttcagtaccaggccaaactgttgccagaaggtctggtatttttccgcgtcgtctttcgccagtttttccagcatttgcagcacacgcttggtcagcgcattgcgcaggttacgcgttaccgtgctgtcctggaggatttcacgggaaacgttcagcggcagatcgctggagtcaatcagaccacgcacgaagcgcagatagttcggcatgaactgttctgcgtcgtccatgatgaacacacgctgaacatacagtttcaggccgtgtttat

SEQ ID NO: 67533 - DNA, 454 bp, Homo sapiens
ccagcaattctgccggtttaataaacttcttcacatcatgcgtgcctttgggcaccatgcgcaaaatatattccgcaccaaccaccgccatcagccatgacttgccgttgcggttaagtgtcgagaaaaagacatcgccgcctggtttcaccagttgcgcacaggctctgaccactgactgcggatcggggacgtgctccagcatctccatgcaggtcaccacatcatactgcccggcatgttttgccgcgtgctcttccacggtttcctgcacgtaatccacctgaatgccgctttccagtgcgtgcagttttgccacctgcaatggctcaaagcccatatccagaccggtcaccgtcgcgccttcgcgcgccatactctcggccagaatgccgccgccacaaccgacatcgagcacctttttgccaaataaaccgccagcacgctcggcaat

SEQ ID NO: 67534 - DNA, 201 bp, Homo sapiens
gaaggcgtggctggataccctgctgcgccgatatgtccaatttgaggtttatcagggcgtggttgaaaacctggccagcgagcaggccgcccgtatggtggcgatgaaagccgcgaccgacaatggcggcagcctgattaaagagctgcagttggtatacaacaaagctcgtcaggccagcattactcaggaactcaccga

SEQ ID NO: 67535 - DNA, 424 bp, Homo sapiens
gaggatggggaccacggggacgatcagttatcgcattaaacttctggaaaagaataccggagtagcgctgtttttccgtacgactcgcagcgtgacgttgacagcggctggcgagcatctactttcccaggccagagactggctgagctggctggaaagtatgccaagcgagctgcaacaggtgaatgatggcgtggaacgccaggtgaatattgtcatcaacaacctgctctacaacccccaggccgtcgcccagttgctggcgtggctgaatgagcgttacccctttacccagtttcacatctcccgacaaatctatatgggcgtctgggactcgctattgtacgaaggtttttcgctggctatcggcgtcacgggaactgaggcgctggcaaatacctttagtcttgatcctctagagtcg

SEQ ID NO: 67536 - DNA, 715 bp, Homo sapiens
aaactatcaggtttcttcgcaacgctttccttttaccattaacgttaatggtccgggggctacggcgctggcatggcactatcttccaacacaattaccgctggcggtgctgctaagtttactggtgggctacatcgcctggctggcgaccgcttaccgaatgagcttttcccgcgaaatcaatctgggcctggcgcaacatgagttcgaattgttctgtcagcctttgcttaatgcgcgcagccagcaatgtattggtgtagagattttgctgcgctggaacaatccgcgtcagggctggatttcaccggatgtgtttattcctatcgcggaagaacatcatttaattgtgccactgacccgctatgtgatggcagaaaccattcgtcagcgccatgttttcccgatgagtagtcagtttcatgttggcattaacgtcgcacccagccattttcgccgtggtgtgctgataaaagatctcaatcagtactggtttagcgctcacccgattcagcaactgatcctcgaaatcaccgaacgcgatgccttactggatgttgattatcggattgcccgcgagctgcatcgtaaaaacgtcaaactggcgattgatgacttcggcaccggcaacagctcgttttcctggcttgaaacattacgtcctgacgtgctgaaaattgataagtcatttaccgcagctataggttctgacgcg

SEQ ID NO: 67537 - DNA, 304 bp, Homo sapiens
ttatcagattcgaggtccgtacccggagatcgcatagactgtaaacgccgtgcccggactatacttagccgctttaaagccaaggatgtaaatgtaatcccccacttcaaaggttggtacttccgccatttgcagcggtaacatcccccagttgatgacgttagaacgatagcgtttagtcgcgtactcctcggcaatattcgccagaccgccaatcacacgctggcagctcgccgcctgttcacgcgcagaaccatcgcctggtttcaccgcatagaccatgctgccaatttcagtttgcagc

SEQ ID NO: 67538 - DNA, 217 bp, Homo sapiens
tcgagctctggacccggagatcagcaacaccgcctgcgggaagtgatgttttatctcaacttgtcggagcaggaaaaagatgcgttttgtgaacgcttcggcgttcgcttgctgacgtcttatgggatgacggaaaccattgtgggcattatcggcgatcgtcctggcgataaacgacgctggccgtcgattggtcgggtggggttttgctacgaag

SEQ ID NO: 67539 - DNA, 530 bp, Homo sapiens
acctgaacgcgtttctccatacagaagtcaacgtcgaagtcaggcatggagacacgttccgggttaaggaaacgttcgaacagcaggtcaaattccagcggatcgaggtcggtgattttcagcgcgtaggccaccagtgaacccgcaccggagccacggcctggccctaccggtacgccgttatctttcgaccactggataaattccataacgatgaggaagtagcccgggaagcccatctggttgataacctgaagttcagtctccagacgttcgtcatattccgggcggcgcttaagacgttcttcctcatcagggaataaaaaggccagacgctcttccaggccctcttttgcacgcttgaccagataatcttcggtgctcatgtccccggtcgggaactgcggcaggaagtattcaccaagacgcacggttacgttacagcgtttggcgatctcaacggtgttggcaagggcttcggggatgtcggcaaacagctcacacatctcctcttcgctacgcatatattg

SEQ ID NO: 67540 - DNA, 349 bp, Homo sapiens
ccagatagttcgccagctcttcattattgagttttttcttaagcacaaaggaaaatagcccgctgctgcctgtaaagtctcgtttccagaattcgtgacctttactgccaggcagagcagggtggttaactcgcgcaacttgcggatgttctgccagccattcagccactttcagactgctttcatgatgttgacgcaaacgcacacctaatgtgcgcaggccacggctggttatataggcggtatcggcatcgaccatctggcccatcagataggcattttcccgtagctgctcccagcaacgggcattgcacacggcagtgccaatcatcgcatctgaatgcccaac

SEQ ID NO: 67541 - DNA, 348 bp, Homo sapiens
gggatggtgggtctgcaaaccgcgcatcgttacggtaacgcaacgctgctggcgtctgacatggtgtttggtatcggtaaccgttttgctaaccgtcataccggctcggtagagaaatacaccgaagggcgcaaaatcgttcatattgatattgagccgacgcaaattggtcgcgtgctgtgtccggatctcggtattgtctctgatgctaaagcggcgctgacactgctggttgaagtggcgcaggagatgcaaaaagcgggtcgtctgccgtgtcgtaaagaatgggtcgccgactgccagcagcgtaaacgcactttgctgcgcaaaacccacttcgacaacgtg

SEQ ID NO: 67542 - DNA, 560 bp, Homo sapiens
aggtcagcactgaccactgattcgttgtcggtacccgtacatcgggatgactggcacggccctgacggataccatgcaaaacaccttgtgagagaccgtgggaggagtcgatcagcagaacgtcaacgcctgcggcaaccagcgcgtcaacacgctcttcgttacccgcacctgcgccaaccgctgcaccaacacgcagacggccttgctcgtctttacaggcgttcggtttacgttccgctttctggaagtctttcacggtgatcatgccgatcaggtggaattcgtcatcaaccaccagcgctttttcaacgcgtttttcgtgcatttttgccagcaccacttcacgggcttcaccttcacgcacggtgaccagacgctctttcggcgtcatgtaaacgctaaccggctggttcaggtcggtaacaaaacgcacgtcacgaccggtgataatacccaccagttcgttttcttcggtaacgaccggatagcccgcaaaaccgttacgctcggtcagttctttcacttcgcgcagcgtcgtggttggcagaacagtctgc

SEQ ID NO: 67543 - DNA, 486 bp, Homo sapiens
gggacaaaccagcgtgctggaagccatctatacgctcggccatggtcgggcgtttcgcagtttgcagattggtcgcgtcattcgccatgagcaggaggcgtttgttctccacgggcgattacagggcgaagagcgcgagacagcgattggcttaaccaaagacaaacagggcgacagcaaagtccgcatcgacggtacagacgggcataaggtcgcggaactggcgcacctgatgccaatgcagttgataacgccagaagggtttactttactcaacggcggccccaaatacagaagagcattcctcgactggggatgctttcacaacgaacccggatttttcaccgcctggagcaatctcaagcgattgctcaagcagcgcaatgcggcgctgcgccaggtgacacgttacgaacagctacgcccgtgggataaagagctgatcccgctggcggagcaaatcagcacctggcgcgcggagtatag

SEQ ID NO: 67544 - DNA, 254 bp, Homo sapiens
tcgagatcgacacggctgacggattgattatggtggactgctccattgccttgaaagcggaagatacgctggcattactgcgtaaaagcctggggtcgttaccggttgtaccattgagcatggaaaacccgattgaactgacgctgaccgaatgggttcgctccggtagtgcggcacagggcttccagctgcttgatgaagccgagctgaaatcgttgctggaagatggcggcgtgatccgcgcgaagaaacaa

SEQ ID NO: 67545 - DNA, 358 bp, Homo sapiens
atgctgccgatccagaagctgctgcctgtgtcttccgcagtggtattgaaatcgtcatgtgcggtttggatgtcaccaatcaggcaatattaactcctgactatctctctacactgccgcagttaaaccgtaccgggaaaatgcttcacgccctgtttagccactaccgtagcggcagtatgcaaagcggcttgcgaatgcacgatctctgcgccatcgcctggctggtgcgcccggacctgttcactctcaaaccctgttttgtggcagtggaaactcagggcgaatttacctcaggcacgactatggctgatatcgacggttgcctgggcaagccagccaatgtacaggtggcatt

SEQ ID NO: 67546 - DNA, 485 bp, Homo sapiens
ccccttataacgatgaactggcaatgggattgcagcagaaaatcggtaagaacgttattgcgcgtgcaaactatgtttaccgtgaagcgcatgatcaaatcagcaaaagcagtcgtaccgacagcgcgactaaaaccaccattactgaatataacaacgatggcaaaaccaaaacgcattcgttcagcctcagttttgaactggccgaacccctgcatatccgccaggtagatattaacccacaaattgtctttagctatatcaagagcaagggcaacttgccgttaaacaatggttatgaggagagcaataccggtgataaccaggtggtttataacggcaatctggtctcttacgatagcgctccaggggcagattttaataacccattaaagatctccttaaacatggatttcacgcatcaaccgagcgggttagtgtgggcgaatacgctggcctggcaagaagcgcgtaaagctcgcatt

SEQ ID NO: 67547 - DNA, 344 bp, Homo sapiens
aatttttctttcgttatttcgttcggaagtaaactcatatcaagcgcgtcccattcttttctgtctgagtcaaagccatagacaatgactctgtcatcattaaaagcaaacaggatccgctccgcctgaccatcactattcagatcttgctcgaccaggacgcaggcgtctttttcaatacaggtcatcacgttatagcgatcctggattaaggccgaccagaatgtcgcatcaggtttaacagaaccaggggcaattaacacattatcggctaatactttttccgatacctgttgctgaagatgttgctctccatctaacgccatcagcagatcctctagagt

SEQ ID NO: 67548 - DNA, 408 bp, Homo sapiens
ccataaacgccaggaacatggcggtcttaccctgcggataaagttgagcgttgaacaggcgtttgccggttaaacgacggtcgataatggtcgccagccccagaccaatcggcggaataacgatagcgatagaacgagcggtgaccggtaatacgtggtcagtggtaaagctgaaggcaacaaaacctgcggctttgttgatcgggccaccaaggtcgattgctgtcgccgcggcgatccccattgcgtacatcagcgcgcccttctcacctgcggcagtcagcacagtacggataccgccgttgatccagccaccaaagggggtgatgacgtagtacatcgccagcatgacaaaaatggcggaaagaatcgggagcaaaaatgtggttttgaacgctaacaggaaat

SEQ ID NO: 67549 - DNA, 408 bp, Homo sapiens
actgtccgtacccgtacatcgtcaagactgggagcacccgggggatgcccaactcagtcggcttgctgaacacatcaaagctgaagtcgcgccagacctttcagttcatttgctggatgggatgggccgtgaggcgatggtcgccagcgatgcggcgctactggcgtcgggtacggcagccctggagtgtatgctggcgaaatgcccgatggtggtgggatatcgcatgaagccttttaccttctggttggcgaagcggctggtgaaaactgattatgtctcgctgccaaatctgctggcgggcagagagttagtcaaagaattattgcaggaagagtgtgagccgcaaaaactggctgcggcgctgttaccgctgttggcgaacgggaaaaccagccacgcgatgcc

SEQ ID NO: 67550 - DNA, 379 bp, Homo sapiens
gcgcgcttgaagaacagagccaattcgtcggggtccaattggctaaacgccgccagtcgttgggccagggcgcgagcatcgttctcaggcaccagccagccggatttgtcagcctccaccagttccggtattccactatgcagagtagaaaccaccggaataccgaccgccatcgcttccattagcgccaccggaataccttccatatcaccatccgcacctgtaaccgatggcaacaggaagacatccgcgtcgtcgagcatcgctttcacttcatggctcggtttaaagcccggcatctccaccacatcttccagttgatattgttcgatgagggtgcgcaggcgtctttcccacgggccaatgccgaggatgcgaa

SEQ ID NO: 67551 - DNA, 339 bp, Homo sapiens
ccggtcaattgtggttgggcgtaagcgtgagcgtgtgcatgagctggcaaactggctgcgcgaagcgggcatcaacaactgctatctcgaaggtgagatggtacagggcaagcgtaacgaagcgatcaagcgtttgaccgaaggtcgcgtaaacgtactggtcgcaaccgatgttgccgcgcgcggtatcgacattcctgacgtcagccacgtctttaacttcgatatgccgcgcagtggcgatacttatttgcaccgtatcggacgtaccgcgcgcgccggtcgtaaaggcaccgcaatttcgctggtggaagcccatgaccatctgctggtgggtaa

SEQ ID NO: 67552 - DNA, 571 bp, Homo sapiens
cggccctatagttgaaattagcggggcggacccgcgtttcgaaccactgaacgcgacggcaaatcaggattaccagcgcgacggtaaaagctacaaaatcgtgcaggatccgtctcgatttagccaggcgggactggcggcaatctatgatgccgaacccggcagtaacctgacggcctctggcgaagcattcgatccgacacagctgacggcagcccatccaacgcttccgatccccagctacgccagaatcactaacctggctaacgggcgaatgatcgtggtgcgcattaatgatcgcggcccttacggcaacgaccgcgttatttcactttctcgcgcggcagctgaccgtcttaacacgtcaaacaacaccaaagttcgtatcgatccgattattgttgcccaggatggttcgctttctggtcctggtatggcttgtaccacagtcgccaaacagacttacgccctgcctgcacctcccgatttaagcggtggcgcgggaacaagttcagtgtctggcccgcagggtgacattcttccggtcagtaattcgacgctaaaaagcgaa

SEQ ID NO: 67553 - DNA, 336 bp, Homo sapiens
ctttcaaaaatcgcgaacgttcaattattgcacctgttttaccaccttcggtaaatcgagcaacaaaactgacaaatccgatattgtcggcgtcctgccaacaatgttcaaatacggtcaatcccaaccattcagtatgcgcaaatccggccatcaattcggcacgtaacgccgctgctccacaagagggatgccaggtctttattaaataatctgcgtcttgcatcacaaaagcgcagtaacgcgaacgcatgagatgttctggatcaggtgcaaccttttcaccagacacataaaggtggcaacataggctatactcgacagcactaccacagg

SEQ ID NO: 67554 - DNA, 530 bp, Homo sapiens
tgccggtcaccgatttgccggtggaatgctcgacacctggaacttgcagtccttagggccgatgaccgccatttcagcagggaagatttacggcctttcctggggaaaccaggccagctccaccatcttcgacagcagccagtcagccacgccagtgatcgcctttttaccggcggcgggcgaagtacatctcacccgtgatgggcggctactaagcgttcagaacttcactatgggcaatcatgaagtggatacccggggtctaccgtacgggatttacgatgtggaagttgaggtgatcgttaacggtcgcgtgatcagcaaacgcacccagcgggtcaataagctgtttagccgggggcgcggcgtcggtgcaccactggcgtggcaggtatggggcggtagctttcatatggatcgctggtcggaaaacgggaaaaagacgcgaccagctaaagagagttggctagcaggtgcctcgacctccggctcattgagtacgcttagctgggcggcaacgggatatggat

SEQ ID NO: 67555 - DNA, 355 bp, Homo sapiens
cacacagtgtcaggaggggctgagttaccgcttctcatcttccacttgcaccccgacagagtggtattcccgcagaccgcggctctccgtgtcagaatctgtggccgtttccacctaattcaacagagaacgtcttattttagaactgaaacatggggcctgggcaagggactattttgttgttgttgtggatttgctgtaattaattacgcatttgtttaattaatgcagcggtgcacttgacccagtaaaaccgcagagagggaaatgcattcacactggagtaattacatcactcctgcgtctcatcacattttacataactacctgaactcaaggctgcagtttggtcttt

SEQ ID NO: 67556 - DNA, 723 bp, Homo sapiens
caggcaccagttgaagagcgttgatcaatggcctgttcaaaaacagttctcatccggatctgacctttaccaacttcatccgtttcacgtacaacattttttagaaccatgcttccccaggcatcccgaatttgctcctccatccacggggactgagagccattactattgctgtatttggtaagcaaaatacgtacatcaggctcgaaccctttaagatcaacgttcttgagcagatcacgaagcatatcgaaaaactgcagtgcggaggtgtagtcaaacaactcagcaggcgtgggaacaatcagcacatcagcagcacatacgacattaatcgtgccgatacccaggttaggcgcgctgtcaataactatgacatcatagtcatgagcaacagtttcaatggccagtcggagcatcaggtgtggatcggtgggcagtttaccttcatcaaatttgcccattaactcagtttcaatacggtgcagagccagacaggaaggaataatgtcaagccccggccagcaagtgggctttattgcataagtgacatcgtccttttccccaagatagaaaggcaggagagtgtcttctgcatgaatatgaagatctggtacccatccgtgatacattgaggctgttccctgggggtcgttaccttccacgagcaaaacacgtagccccttcagagccagatctccgggtacggacctagagttcgta

SEQ ID NO: 67557 - DNA, 785 bp, Homo sapiens
attcgaattcggcacgagggagcgcctggcagagcgggatcttcagggcagcgggcaaccccttggcccaggaagcctggaacgcaaggaccggagggcgtgggctgggacgcccctaccttggtctttcagggaaaggccttggaaagcagtcgttgcgccagacagcccagggaagagcggcagcctgaggacctagggccacctgctgttccctgggattcatgtccttctggggaggagggaggacccaggacaatggctgctgttcatgatctggagatggagagcatgaatctgaatatggggagagagatgaaagaagagctggaggaagaggagaaaatgagagaggatgggggaggtaaagatcgggccaagagtaaaaaggtccacaggattgtctcaaaatggatgctgcccgaaaagtcccgaggaacatacttggagagagctaactgcttcccgcctcccgtgttcatcatctccatcagcctggccgagctggcagtgtttatttactatgctgtgtggaagcctcagaaacagtggatcacgttggacacaggcatcttggagagtccctttatctacagtcctgagaagagggaggaagcctggaggtttatctcatacatgctggtacatgctggagttcagcacatcttggggaatctttgtatgcagcttgttttgggtattcccttggaaatggtccacaaaggcctccgtgtggggctggtgtacctggcaggagtgattgcagggtcccttgccagcttcat

SEQ ID NO: 67558 - DNA, 630 bp, Homo sapiens
gagcaggcgcttatcagctccaccatgctcttgaggtcggcgtgctccgccagcgcctcccggtcagggaaggttagccgactggccacactgccaccattcactgtctcaatctggtccaacgacttgagcatatacttgcggcgctccaatgggcgcaccttcgtctcggccaggtagtcagccgaggacttgagctgccaggggttggcagcgtcagggtgggggttgcgcttgaagaagtggtgggccttgcaggcggcgtgcaacaggtgtggcttgggcaggccctgggtttcgcagatgtagcgcacctggtcgtactcgttgttgccggggtagagaggccagcccaggtgcagctcatccatgacgcagcccagggaccacacgtccaccttctcgcagaagggcagccccagcaggatctcaggggcccggtagaagcgcgactggatgtatggctccttcacgtagcgcacctcgctgaaaatgctggcggatccgaagtcaatcacctgtcgggggtggggaagagggcgagtgggcaggtcaagcagcagggacagccgagctgggccaccccggcatctttcacctggcatcttcctgcatctgctatttgactct

SEQ ID NO: 67559 - DNA, 849 bp, Homo sapiens
tgtgtcttttgttgggatactccacagcggccgctgcagagtgaaggcgctgcagcgctggtcaccaaggggtgccagcgattggcagcccagggcgcacggcctgaggcccccaaacggaaatgggccgaggatggtggggatgccccttcacccagcaaacggccctgggccaggcaagagaaccaggaggcagagcgggagggtggcatgagctgcagctgcagcagtggcagtggtgaggccagtgctgggctgatggaggaggcgctgccctctgcgcccgagcgcctggccctggactatatcgtgccctgcatgcggtactacggcatctgcgtcaaggacagcttcctgggggcagcactgggcggtcgcgtgctggccgaggtggaggccctcaaacggggtgggcgcctgcgagacgggcagctagtgagccagagggcgatcccgccgcgcagcatccgtggggaccagattgcctgggtggaaggccatgaaccaggctgtcgaagcattggtgccctcatggcccatgtggacgccgtcatccgccactgcgcagggcggctgggcagctatgtcatcaacgggcgcaccaaggtaaggctaggtgggggcctctttggaggggctttgcagcaccctggtttgcagcattcagtgctctgagcacagtgggtttggagacaggcttctgggaggtcacagaaggtttaagcagttcagtggagtgggtatgcttacttgtggggacttgggggggtctttatcctccctacgggccttaatgtgtgcacctgataagctaggagtttgtcctggagccaacgagatcgtcgaacc

SEQ ID NO: 67560 - DNA, 916 bp, Homo sapiens
ttctcttcttgcttgaaatacctagagtagattctactttcctgactgaaccctgactaaaggattaggtttagtaaagtgctaggcactcaataataattagctgttactaatgggaataggaaaactgagaagcatgtctatttactttcttacctcatcatattttcttttttcattttccagttgtttaagtagggcctcttgttgctgaattctggattgttgctgagaacaggtcatttccagtagattttctttatcttgtaaggttctcacttgcctgtgtaactcatctacgttctgatatagaagtttcctcttctgttgttcttcttgatattgttgctttactttagcttcattttgtgttgcttcttttatcttttcctctagctgctgcttctctgaaatacaagtgtctgtgagacagactttatgagcatgttctaatttccgctgcaggtccaaaatcttttcctctgcatcagcaactttagatttctcctgaaccagctttccctgtaggttgttctgtgatttaatgctctgagtgtgtttaagtacttccaactccagttccttgattttctgctgacagtgcttgtactctgccgtgagtgaagagcacatctttgtgctgtctaataacttctgttgggcatgctttagttcaatctttatcttaatgttttcttcctgaagtaagctattatgttgctttaagtccaagttctgccctcgttcatatcgaagctcattttcagctgagttgcatagaatctggagccggtgcaaattctggtgaagttgttgtacttccccttgctggttgtattttagtttttctccagatgatggatgctgttctctctgttcaccacccacagtttttccaggacgaaatcgtcgaacc

SEQ ID NO: 67561 - DNA, 385 bp, Homo sapiens
caacagtctaaagctaaaactctttagtagatataagcaaagagaaaaaagggccagaatggataggaagggactcccaaaatctgagcataccacccccttaaggataaatgttgctagacacccataattgaggttagaaagaggaaagaaggaaaagttagtgggctatagaggggaaggatgtgatgtgagcagatgggtctcactcattctgctctgtgcagagtacctgaactatgaggatgggaaattctctaacagccgcggtgtgggagtgtctgaggacatggtccacgacacggggatgcctgctgacatctggcgcttctatctgctgtacattcggcctgagggccaggacagtgctttctcctggacggac

SEQ ID NO: 67562 - DNA, 1362 bp, Homo sapiens
cggacgcgtgggcggacgcgtgggttccagaagtgcttgctgttatccaggtgtgccttgaaggggagatttctcgccagtccatcttgaacagtctgtctcgaggcaagaaggcttcaggggacctgattccatggacagtgtcagaacagttccaagatccagactttggtggtctgtctggtggaagggtcgttcgcattgctgttcacccagattatcaagggatgggctatggcagccgtgctctgcagctgctgcagatgtactatgaaggcaggtttccttgtctggaggaaaaggtccttgagacaccacaggaaattcacaccgtaagcagcgaggctgtcagcttgttggaagaggtcatcactccccggaaggacctgcctcctttactcctcaaattgaatgagaggcctgccgaacgcctggattacctgggtgtttcctatggcttgacccccaggctcctcaagttctggaaacgagctggatttgttcctgtttatctgagacagaccccgaatgacctgaccggagagcactcgtgcatcatgctgaagacgctcactgatgaggatgaggctgaccagggaggctggcttgcagccttctggaaagatttccgacggcggttcctagccttgctctcctaccaggtcagtaccttctctccttccctggctctgaacatcattcacaacaggaacatggggaagccagcccagcctgccctgagccgggaggagctggaagcactcttcctcccctatgacctgaagcggctggagatgtattcacggaatatggtggactatcacctcatcatggacatgatcccggccatctctcgcatctatttcctgaaccagctgggggacctggccctgtctgcggctcagtcggctcttctcttggggattggcctgcagcataagtctgtggaccagctggaaaaggagattgagctgccctcgggccagttgatgggacttttcaaccggatcatccgcaaagttgtgaagctatttaatgaagttcaggaaaaggccattgaggagcagatggtggcagcgaaggatgtggtcatggagcccacgatgaagaccctcagtgacgacctagatgaagcagcaaaggaatttcaggagaaacacaagaaggaagtagggaagctgaagagcatggacctctctgaatacataatccgtggggacgatgaagagtggaatgaagttttgaacaaagctgggccgaacgcctcgatcatcagcctgaaaagtgacaagaaaaggaagttagaggccaaacaagaacccaaacagagcaagaagttgaagaacagagagacaaagaaca

SEQ ID NO: 67563 - DNA, 664 bp, Homo sapiens
ttttgccacttaaaaatttctcaaatttcttctttccacgtaattgtgacataggtattatttgtgttatatcccagatggctcactagggctactaatgtttagagtttgatttgtgtctttagcagtaaacattttaaaagaaacttttagcagttttttagggtaattacatgtcttcctttcaagggtccagattatagactctacaagagtgaaccagagttaacaacagtggcagaagttgatgaatctaatggagaagaaaaatcagaacctgtttcagagatagaaacttcagttgttaaaggttcccactttcctgttggagtagtccctccaagagcaaaatcaccaacacccgaatcttcgacaatagcttcctatgtaaccttgaggaaaactaagaagatgatggatctaagaacggaaagaccaagaagtgcagtggaacagctctgtttggctgaaagtactcgaccaaggatgactgtggaagagcaaatggaaagaataagaagacatcaacaagcgtgcctgagggagaagaaaaaagggttaaatgttatcggtgcttcagaccagtcacccttacaaagcccttcaaatttaagggataatccatttaggactactcagactcgaaggagggatggataggaat

SEQ ID NO: 67564 - DNA, 994 bp, Homo sapiens
tttcgttccggttgtctggagcccagcggcgggtgtgagagtccgtaaggagcagcttccaggatcctgagatccggagcagccggggtcggagcggctcctcaagagttactgatctatgaaatggcagagaatggaaaaaattgtgaccagagacgtgtagcaatgaacaaggaacatcataatggaaatttcacagacccctcttcagtgaatgaaaagaagaggagggagcgggaagaaaggcagaatattgtcctgtggagacagccgctcattaccttgcagtatttttctctggaaatccttgtaatcttgaaggaatggacctcaaaattatggcatcgtcaaagcattgtggtgtcttttttactgctgcttgctgtgcttatagctacgtattatgttgaaggagtgcatcaacagtatgtgcaacgtatagagaaacagtttcttttgtatgcctactggataggcttaggaattttgtcttctgttgggcttggaacagggctgcacacctttctgctttatctgggtccacatatagcctcagttacattagctgcttatgaatgcaattcagttaattttcccgaaccaccctatcctgatcagattatttgtccagatgaagagggcactgaaggaaccatttctttgtggagtatcatctcaaaagttaggattgaagcctgcatgtggggtatcggtacagcaatcggagagctgcctccatatttcatggccagagcagctcgcctctcaggtgctgaaccagatgatgaagagtatcaggaatttgaagagatgctggaacatgcagagtctgcacaaaaatcatatactgttgcctgctgcagtggctcacgcctgtaattccagcactttgggagaccagggtgggcggatcgcttgaggtcgggagttcgggaccggcctggctaattttttgtattttcagtagagatgggatttcaccatgttggccagg

SEQ ID NO: 67565 - DNA, 431 bp, Homo sapiens
tgggagataaacagtaatctgttatcatagccaaaagtgagaactaatggctatgtaaaaaaacagtttcaagaaaaactaaagttatgccagtgggctagcaattcaaaggtaaagcatgacacaagcagttctctggtcctcggtatgcagcagtaagaaactacccaatacatccaatccccgcctccagagggttctaagaaaccaactctccaaaattttgctagttgttttacacaggccagtttagtcacaaattcaatggacctgttttccttcggctcctggtccaatatggcacagtctcaatagtggacacagcttcgatgggcccgccatcattgggaacagtcactgtagtttttgcaactatggattcattcccctggtctactgcagagccaatggaacgagttttctttacaggg

SEQ ID NO: 67566 - DNA, 359 bp, Homo sapiens
atgcagttcatgatctcagttggatgtatggtgactgagacaattgcccagaatcaaagtcatgtgcaggattctactgacttcggtgtgagttggaattatctggtccctcagtgcttgcctgctgacccaagatgctctggaagtgtatctcagccatcagtattctttccacctaacgggtggaaaaggatcacttacccactttctgaaagcttagtgggaaaccccgtgaggtttaagttctatcagaagtactcaaacatgcagtggtccatcgataatttctacctgagccctggatgctaggacaactgcaagggccatggcaattgcttaatggaacagcgcatttgtcg

SEQ ID NO: 67567 - DNA, 348 bp, Homo sapiens
gcgtggaattcaaaggtgtttgtcttatggaaacccactaagctttatattggtttatgtgcttttttctatctatgctttcttttatagtaagacagtttagaaggaaagctgtcaggaggtgagtggggactctgctgagggttacgtggaacggaaggcaagacagtggagggtgcaggagtaggggaggcaaggacaaagtggggacaggacgtgcagacttgttcaggtccccctggctgaggactcagcggagagggaaggtggcagcagggggcgctggtggtcaagggtggttctgaaggagaggaggatggaattgcttctggagggtaggaggaaggc

SEQ ID NO: 67568 - DNA, 365 bp, Homo sapiens
caagcaaagtggggatgtcacctgcaactgcactgatgggcgcttggcccccagctgcctgacctgcgtcggccactgcatttttggcggctactgtaccatgaacagcaaaatgatgcctgaatgccagagcccaccccacatgacagggccccggtgtgaggagcacgtcttcagccagcatcagccaggacatataacctccatcctaatccctatgctgtagctgctgctgctggttctggtggccggagtgatattctgccataaacggcgagtccaaggggctaagggcttccagcaccaacggatgaccaacggggccatgaacgcgcagattgcaaaccccacctacaagatgtacc

SEQ ID NO: 67569 - DNA, 380 bp, Homo sapiens
  misc_feature (1)...(380): n = a,t,c or g
gtctgtgggagactcccttcagtgtgctgggacttgggcacaggggacatgcctgatgctagattaattatttttaacatctgatatttggctttagaaattcaacccaaaaatcttcacaacgaagcagaataatggtagttctgcgaagcctaactgtccgtactgctgctgtgctgttggcagcaaggaccgctcgctttctgactgggtgagcctgctatcctgagcttttgatgcaggacggtaggtgtaagttggtaaagtagaccgtggaggaaagagacctgctttgggtgatgctaagagtgtatttctattctgcacctggggtcagtccctgcttggaagctcacaggctctcctgctttaccagaagn

SEQ ID NO: 67570 - DNA, 360 bp, Homo sapiens
gatagagtgatttcctctattttcttcttttgttaaactggttttagctattctagctcccttacctttccataaaattttagaatactcatgtttataattgcaaaaaaatcttgctggatttttggtaggaattgcattaaactttatatcagttatgtatctccatgtatttaggttgtcttttgtttgttttatcagcagttagtagttttcagtacataagtcctgtacatgtttaatcaatttatagttcagtatttagatttcttttgaacaagtataagtgctactgtactttaaatctcaattttcatgtgtccatgatagtatatacttttgtatgctgatcttatagcc

SEQ ID NO: 67571 - DNA, 355 bp, Homo sapiens
acgtgggtaacctttattccccttctttgtctctttaggtcggctcattccacgtgtgtgtttcatcgagatgcacaccagagtgaggttgctcatcggtttactgatttgtgagaacactgtttccaagccttgtcgttgattgcctttgctcatgatcttcagcagtgctcatttgaagatcatgtctgattatcgaatgaactaactgaatttgccctgacatgtgttgctgctgacttacctgataactgtgacacatcacttcataccctgtttggcgacacattatgcacagttgctgctcttcatgaaacctatggcgaaatggctgactgatgtgcaaaataataac

SEQ ID NO: 67572 - DNA, 509 bp, Homo sapiens
tcaccgtgaaggaaaacctcagcctgttggctaaaatgaaagggattcatctaaaggaagtggaacaagaggtacaacgaatattattggaattggacatgcaaaacattcaagataaccttgctaaacatttaagtgaaggacagaaaagaaagctgacttttgggattaccattttaggagatcctcaaattttgctcttagatgaaccaactactggattggatcccttttccagagatcaagtgtggagcctcctgagagagcgtagagcagatcatgtgatccttttcagtacccagtccatggatgaggctgacatcctggctgatagaaaagtgatcatgtccaatgggagactgaagtgtgcaggttcttctatgtttttgaaaagaaggtggggtcttggatatcacctaagtttacataggaatgaaatatgtaacccagaacaaataacatccttgcattacttcattcacatccccgatgcttaaatttaaaaacag

SEQ ID NO: 67573 - DNA, 700 bp, Homo sapiens
caagaaccatcagcaccaacacaaatgtatctttgcagaccgaaggaatcagctaaacaatttacagtcatctcaatctctactaaaacaaaaatcacatccaacatgccacctgacaccatttctttctctctctctcttttgctccttgcgatgaggcattcatctctccttgagcctccgttctgaagagataacagtatagcaacaactctgccactgaaatcctgttctctgaccgatattggcacctgcaaagagaaacaaccagtaacaggcagcagcagcatcagtattaatcttccatgatgaaatctttacaggtcaagaacaagtacacagctcttttctcactccttcacagtggaccatgcaactagttgaggtggaagacaatggattgtctacaagccttttgaacagtggagaatgcagggcgttggctttaggaagaggcagaaatccaggcagaacttgaacgtttggaaagagtcagaaatcttcacatacgtgagctgaaaagaataaacaatgaagataattcacagttcaaagatcacccaacattaaatgaaagatatttattacttcatctgcttggtagaggtggctttagtgaagtgtataaggtaatgtatggtttattctggtttttttacactaatgtagcaaggatataggagtatgtggttaagaagtg

SEQ ID NO: 67574 - DNA, 359 bp, Homo sapiens
gtattaagtatgttaccaggtattaatttcttttggagattctgggtaattttctaagatggtgatattcttatgaaatctataaattgtgttgaggttaatgaccatctttataaattatttttaaggttttagctgaaaaggttcatatgagagctatgtccattgctcagagagtaatgctccttcaacaaggtcttaatgacagatcaggtaagataaacaactttatatatacaaaactttagtagattttgaggtcatacttaacaaggtttaagaaacgagtgtcaaatcaggtcaagtaagcctgccagtcccatgaacctggtgaaatttatcttgatgtattatataga

SEQ ID NO: 67575 - DNA, 406 bp, Homo sapiens
tatatttattattttataactattactaaatatatactggtatatttggttaatgtcgcatttatttcttcttaatgatatactctctttttcatcttttaaatgacatgaacaatgcttacaacctgcatactttggatacttgtctaaaacttgatgatactgtctatcttatgtacatagccttgtcactcccacatctgccgctgtagctgccatcttcacatacaaatgcaaaggtggcatatgtgcctatcatccttctgtgacgtgaatgacacttctcaaaggatgtgcacttgccacacaattatcatatcttcatgggacattatatgatttcctttcattttattgtatttattttcctttttttcttaccaaaaaaatcagaatttgttgccac

SEQ ID NO: 67576 - DNA, 426 bp, Homo sapiens
ctcttgttaggtgcttgaacataaattctgagttgagaggcccgaatttgtagttgtagtctatttaaagttgctgttcaagataggatgttgaagttggtttaatttctcagctccaggactgtgaacttggtgggtgcattcccttaaaagtctttccagccgtgtttaggcttcctctgagcctgcacacattcctgcccttgcccctctccaggaccttggcttctggtggtgatggtgcaacttctgcttcctgctgcaggtgccctggggctgtgagtatctcgtgactgtagcaaactgtggcttctccttaggtgctggtgtttgtccactcccggaaggagactggaaagacagccagggccatccgggacatgtgcctagaaaaggacactctgggtctgtttctgagggagggct

SEQ ID NO: 67577 - DNA, 294 bp, Homo sapiens
ggaagtttcagtgggggagtatgtgggagtgactgacgtgaaggagaaaaactggctgtgagggacagaagttggaatgctagctgcttgtctagccacctaatcagcgtaagcgtcgcctagagcaatgggatctgatgccttttgatgccccttgcagtgaatgactctagcttcctttggaagttaagcggcgttgagaagcgtttttattaaagagggattaatgatagaggacccttgtttagtgaggaaacttcttgcatggtggtgcacgatatgtcgacgcggccg

SEQ ID NO: 67578 - DNA, 484 bp, Homo sapiens
ttttattgatttagaattaaaattttgaggctcatactttaattttgtttattgtaaatgcattaactgcctgccttttaaaataagtgacatttgattgcattaaattttgcatttacaaatatgcaatctactaaaaagtctaccacatggcttattttgacccatttgtttggagacttttcattgtttcctttcttttatgctacagatggggacacctgtcacaagctcaagtacagcttcatccaattcagaaagtctgtctgcatcttataaagctctgtttcctagcacagcacaagtacgcaggaagttgcagtttaaaattgttaaaatggctttataacttaaccctttggaccctacttaaaaaatgaatatttttccaaaaatatactgtgtttacttttttaaagcaaaattaatgctatataagtcaaatggtatttaaacctttgccttcatactaaacaaaactacc

SEQ ID NO: 67579 - DNA, 335 bp, Homo sapiens
gtgactattcggggtgcggggattcccgatgagtccagaaatgtgaactatagtttggctagcttcctgaagcgctggttgacactaatggatagaggatttattttcaatttaataaatgactatatatctggattcagccccaaagatcctaaggttctggctgaatacaagtttgaatttctgcaaacaatttgcaatcacgaacattacattcctctgaacttgccaatggcatttgcaaaacctaaactgcagcgggtttaagattcagatcttgaatacagtttatcagatgagtattgcaagcatcacttcttgggtggtctacttcc

SEQ ID NO: 67580 - DNA, 373 bp, Homo sapiens
caagcagctatgggcaactcaagggctaaaaagaaaaccccaaccctgctgcttctactagaaccttccttacctgaaaccccaagctactctcccaatgaaaaagcttggtttgaacaagagagcggaagttacatacaaggaggcaggtggaagttctcagatgggaggctagctattccggaagcaatagccccccaatttatgaagcagtttcatcagggaacacacatgggaaagactgcattataaactcttgtaggatggcatttctatgtgccatgccttactgccatcactcgagccgtttgtgagcaatgtttaacctgcgcccagaacaatccatggcaagtgccaactcagcccccaggga

SEQ ID NO: 67581 - DNA, 358 bp, Homo sapiens
tttcgtgctatgttcttggctgttcaacacgactgcagacccatggacaagagcgcaggcagtggccacaagagcgaggagaagcgagaaaagatgaaacggacccttttaaaagattggaagacccgtttgagctacttcttacaaaattcctctactcctgggaagcccaaaaccggcaaaaaaagcaaacagcaagctttcatcaagtaagttgagaatcctgagcttgcaaatatcaatagttagctgctgaactgaaaaggggaactctgatgagcgtaagctaacatacagaacctctcttgcaggccttctcctgaggaagcacagctgtggtcagaagcatttgacgagg

SEQ ID NO: 67582 - DNA, 363 bp, Homo sapiens
aagaaccctgtgacaggggaagcaacttaaaaaaaatagcctaaaacttactttataaaaagttagactaatgccactgatccctaaatccttaaatagacatatttttcccataagtttttcctttcagcacttccctttcaaactttaccttgttggaggcttcattttctttttcactccacgataaaacttcatggaactgagagaaaacatcttgtcatgtttactactctgtaaggtaaaaaaataatttgtaattaaatggatttacacatttccttacattttctttgagcattaatgattgggtttagaattgtttagtttctcagagatggctaaatcaaacatttgatgaag

SEQ ID NO: 67583 - DNA, 376 bp, Homo sapiens
gagtcaagtgagtaggagaatggtggtggtgccctcaaaagaaatgagaaagtcagggcagcacctgaactgtggagattagtttagctacagacagcaagttgtaggcactggtgggcatcctggtgggaagtttcagcaaggtggtggagatgtgagtctggagggcaggggtggggccagggtagagtagaggttagactcaggagtcacaggcagaggagttggtagacaaaagggtgaggaaggagatgcctaattagcaggaggtgggtagagacaggagtaaggtttggagacagatggcgggagaggaaggagtaagaggcattgagatgggagagggaagggaagggaagcccaggatggtacagag

SEQ ID NO: 67584 - DNA, 451 bp, Homo sapiens
atagagcgccttacttgctgagccataatgcatgtgccgacactcgctgccgattcgacacttaagtaggagagccatacatagattgggatgaatttccggaattattatctaggactgctgtacgggcgagaaagatacctatctctgatactatctaaaagacgaaggctaaacaagttgtcaagttattaagcaacataagatcacaagcagttggaatactaatgtctagccttcatttagatatgaaagacatacaacatgctgttgtgaacttggataattctgtggttgacctggagacccttcaagctctctatgagaatagagcacagtctgacgaactcgaataaatagaaaagcatggccgatcttccaaagacaaggaaaatgccaagtctctggacaaacctgaacagctttatttccttaggttcctttatgaact

SEQ ID NO: 67585 - DNA, 391 bp, Homo sapiens
gcggtagcgatcgctgcagcgagggtctggaggctaaaccgtggcttgagccaggctgccctcctgctgctgcggcagcctggggctcggggactggctagatctctggatgacaagccccagttcccaggggcctcggcggagttgatacgacattagtaattcatccagcccatcgtcatctctggaatacccatctaccgcggcatggaccgggctggccagatcatcaaccccatcgaggacccccacctgccgaacgagaaggtgctgaagctctacaagagcatgacactgcttaacaccatggaccgcattctctatgagtctcagcggcagggccggatctccttctacatgaccaactatggtgaggagggcacgcacgtgg

SEQ ID NO: 67586 - DNA, 397 bp, Homo sapiens
aactagtagaatatgatatgcttcgggagatgttcagtgattctagaagtaacaatgatgatgatgaggatgaggatgatgaagatgaggatgaggatgaggatgaggatgaagatgaacacaaagaacaggaggaggaagattggtctgaagagtatctgtaacggcagctgcaggccccgtttattgaatctggccagtatagggcatatgatggtaccagatcaatagtcatggcaattctcattcccattgtcaagaatgcgagccagctccgtaggattcacattgaagcactaagactgaaggatctcatcatgaacgtggactacctgacactcacgaatcattttcagtctgtgctggagcttcttgaggtactggatgagcattaccg

SEQ ID NO: 67587 - DNA, 388 bp, Homo sapiens; identical to SEQ ID NO: 37815

SEQ ID NO: 67588 - DNA, 400 bp, Homo sapiens; identical to SEQ ID NO: 37835

SEQ ID NO: 67589 - DNA, 375 bp, Homo sapiens
  misc_feature (1)...(375): n = a,t,c or g
tgtcagcatcacctcagactctccagcaatccctccctaggtcaatcgctcccaaacccttaaccgtgagactccccatgaaccagattgtcacatcagtcaccattgcagccaacatgccctcgaacattggggctccactgataagctccatgggaacgaccatggatggctcagcaccctccacccaagtgagtccttcggtgcaaacccagcagcatcagatgcaattgcnnnnnnnnnnnnnnnnnnnnnnnnnnnagatgcaacagatgcagcagcagcaactccagcagcaccaaatgcatcagcaaatccagcagcagatgcagcagcagcattttcagcaccacatgcagtagcacctgcagcagc

SEQ ID NO: 67590 - DNA, 369 bp, Homo sapiens
ataaattatacaaatgtgaagaatgtggcaaagcttttaacaaatcctcatccattagtaaacataagataattcatactggagagaaaacctacaaatgtgaggaatgtggcaaagcctttagcctgtccctccaatttactgcacataagataatttatactggagagaagccctacaaatgtgaaaaatgtggcaaaccttttaaccaatcctcaacccttactacacattagataattcatgctggagagaaaccctacaaatgtgaaaaatgtggcaaagcttttaaccaattttcaaaccttactaaacataagataactcatactggagaaaaatcttacaaatgtgaagaatgtggccaag

SEQ ID NO: 67591 - DNA, 322 bp, Homo sapiens
cgcagtatgaaaggtgtaatggcccgactgttgagcgagggggagcaggggatcccaacggcttgcgctgcctttgcgcagaagtcggaggtcggtcacgtcacggcctggctggagtatgagagggcggtccccaatgcagttgggtgaactaccggtgcacactggagtgtctggcgtctttgcttggaaaactgctcttgaccactgacacatctcgttctgcatctaagaaacgaagtatgttcttccttatctctaggaccaaagaggaattgattttccaaccttttaactttgggctggaaaaattgaaaaaccc

SEQ ID NO: 67592 - DNA, 314 bp, Homo sapiens
catcaagaatgctgagttcaatggctgaaacacagtcgaaaagaatactgtgaattatgcaagcacagatttgcttttacaccaagtaagttctttagacattttcactgcattttttttggttatcactcgtggcataaaggtgtttgatatgatcagttgacagaggaagggggataaaagtgcttaagcactttaaagcaattattttcagcttgattttttttgatagtaataggaagtattgatatttaggaaaatattttgaaaaactgtatgctggcttttatcacacacatggttgagaattgggg

SEQ ID NO: 67593 - DNA, 310 bp, Homo sapiens
cgcggcgtagcgtccgcgggggcgatgatgcagcggatgtggtctgagaagatgaaggtgttatgtcattatccgcaacatgtgaagccgacccaaaatcgctaagctttagaatagttatggattcattatccaggatattgtctggcttgatatctgcctgtatgatattgcattttttatggagtttctttttcgtgtattctttttgactatactatgttacgcgttttaattcttgttgatcatctatacgctattatttttgtggttatgtattgcttttattttgttttctggcgtgctttcg

SEQ ID NO: 67594 - DNA, 122 bp, Homo sapiens
acagaggtcaggcacggaaaactggacagtagcaaatggataccaatcagagggaatttcttggtctgatccatgctctaatttgtatgacagacaatggggattatatatattctaatttg

SEQ ID NO: 67595 - DNA, 316 bp, Homo sapiens
tttgtctgaagaatttcttttaacatttcttttggtaggggactattggtgataaattctttctttttttctaactttgaaaaaggatttcatctttgttttgaagatattttcactgggtatagaattataaattggcttttcttctttagtattttaaagatactgctccactgttttgtcacttgaattgtttgtgatgagaaatttgttggctttatttttgttcctccatatttaacatatcctttttttctctgggtgcttttaaaattttctctttatggctggtcgacgcggtcgcgaattccaaatc

SEQ ID NO: 67596 - DNA, 134 bp, Homo sapiens
tcgagtaaaccatgggactaaagcttggctccaaagcattcaggctgaacgaaaaacatggactgctattgcataataccaacgtgcattggacgagaacgatgctatggaacctgcataggcgacacggtcgg

SEQ ID NO: 67597 - DNA, 336 bp, Homo sapiens
  misc_feature (1)...(336): n = a,t,c or g
aacgccaaaccttaggctaatggtaatgtataaccctttgcgtttttttattacgaaatacaaggacgaatcttacaatcttgatgttcctttacagtcatctttcggctaggagaatgcatgacaggcgcaggacgagaaggcgttccccgtggaatttccttattaatcctgacgcatattagcacaacccgagagtgatataggatactaccttttagtcattatatcaagtatctcctactttctcttgcatataagtttcagacatagacgtcaacagagactgtataatgatatacatttaccagtccactttgacaatgattaaagcan

SEQ ID NO: 67598 - DNA, 314 bp, Homo sapiens
cattgcatacgatccaaatattaccacttgttttatatatatgcatgtattaccgatacctctcttttttatctgcaggaaatggacaggctactagcatggtcccactgccaggtgggagattcctgatgggaacaaattctccagatgacagagatggtgaaggccctgtgtgggaggcaacagtgaaaccctatgctatcgacatatttcctgtcaccaacaaagatttcaggtacatcaggtgttcttccaggaggaatgaaggccctctctaatctcattcttttttcctttcttttttttagactgag

SEQ ID NO: 67599 - DNA, 358 bp, Homo sapiens
ctctgggagagaaagactaatgggcaggatcccattacttcattggtaaagatagtcggatactctcaccacttttaatacctttagtattacagttgatcagattacctttacttgatatgaattatttctaagttcattcccctgtgttgtagcttatttcaacaattccaactagccgtttaaaattcctcaaagaaactggtcatggaacaccaatggaagaaatacctgaggaggaattatcagaggatgttgaacagattgatcacgctgatagggagttgcggcgtggccaaaacttgaggtgcaaaggaattcatagattgcctactcatatacaagtagggcaaaatcg

SEQ ID NO: 67600 - DNA, 1047 bp, Homo sapiens
ctcactgccaccaaggtgttcacggccctggcactggtgcgaatgctcattcttcctctcaacaacttcccttgggtgatcaatggtctcctggaggccaaagtgtccttggaccggatccagcttttcctcgaccttccaaaccacaacccccaggcctactacagcccagatccccctgcagagccatctacagtattggagctgcatggagccttgttctcctgggacccagttggaaccagcctggagaccttcatcagtcatctcgaagtgaaaaagggtatgctggtgggcatcgtggggaaggtcggctgtgggaagagctccctgctggctgccatcgctggagagctccacagatgggaacaagtacaatgtggtggccatactctccactgagctcctgaacagatgctgcgtgggcatgtggcagtgcgggggctgtccaagggctttggcctggccacccaggaaccctggatccagtttgccaccatccgagacaacatcctctttgggaagacatttgatgcacagctgtacaaggaggtgctagaagcctgcgccctcaatgatgacctcagtatcctgcctgctggagaccagacagaggtgggggagaagggtgtcacccttagcggaggacagcgtgcccggattgcccttgctcgtgctgtctaccaggaaaaggagctctatctcctcgatgaccctctggccgctgtggatgcagatgtggccaaccacctgctggcacagggtgcattccctggggccatgcctgagcttacaccccacacggggttgcttctgtaaccccacccgggaccttggaaggtacccctcggggaagaaaggggccctggaacccccccggggggccttggcctggaataggggaaggcgggcgcctattcggcttggccttcctttgggatttggccatggtacaagctggcccccagtcgagccggccgggaattcagattattgatcggaaatcctgaaaaccccgcaagtcactcaactgggcattggggcaca

SEQ ID NO: 67601 - DNA, 318 bp, Homo sapiens
gcccctctaccctcccaccctcatggggttgctctcccctgaagtttctttcttacccagccccttttcctcctgctactttcctttttccctacactggttgcagggggagggagcctgccagctgcgaggacctctgtggtggaggagttggtgctgatggtggcggaagtgacccatacgggaccccgacgccatgatggccttcaacacgtcctggatgcctacactaggactacttctaaatctccccacggcttcgactacgccccttcgaccatcctaccccttcatcagactattcctcatcctcacgcg

SEQ ID NO: 67602 - DNA, 589 bp, Homo sapiens; identical to SEQ ID NO: 10675

SEQ ID NO: 67603 - DNA, 322 bp, Homo sapiens
ccaacaacaaagacaaacaaatcctactgaattggtgatccattgctcctaggtggggcaaagtccatactacctgtgtttgcgtactgctgttgcgcagctcacaacacagcttctctcttccagctaaagacagctgctttagtgcttccagctcctctaaaagcaccctctctctctctgaaaccaggttttcattatctatggaggatctctaaataagaaaaaaggtcatgaaagaatactgtttgtgatagagaaaaagggtagaaatattaagcagatttcttttaacccccgggaccaacaggccctggttctg

SEQ ID NO: 67604 - DNA, 337 bp, Homo sapiens
ggaaataataatagtttgtgctttatggggttcttttgagaagtcaatatgatgatgcatattattgctttccaaagtgctagctgcaatcaccactactgccatcatcatcactaccatcaccactactgtcaccatcaccatcatcatcaccatcaccatcactatccccatggctataatcttaatttaagctactgtcatctctcatttgattcaatgtaatagccacataacatttccccacatccattcctgccttcctccaatgcattttccattatgtaacccaagtgatctttaaaaagcacaatctcatgtcactcataggtttaaa

SEQ ID NO: 67605 - DNA, 723 bp, Homo sapiens
tacacacacacacacacacacacacacactcactctctcagaggagagaaaatattaagaatcgtgtattttacacaggtatccaaacataaaaatactttagaattgcttactgtatggacaggttatatggaatggagtttgtagtatccacattaacaaagcaagtttatatggactggttatgatattagggatatgaattagaaatggatgttgttgcactcatttaaaatattttgcctctcactttatccccagttatagtgtccttttgaatttttctcacacagtgctactatatttcatgaactggtatataaacaaaccaaaattatttcttcaaatcaagaacttatctacgaagggcgacgcttagtcttagaacctggaaggctggcacaacatttccctaaaactactgaggaaaaccctatatttgtagtaagccgggaacctctgaataccataggattaatatatgaaaaaatttccctccctaaagtacatccacgttatgatttagacggggatgctagcatggctaaggcaataacaggggttgtgtgttatgcctgcagaattgccagtaccttactgctttatcaggaattaatgcgaaaggggatacgatggctgattgaattaattaaagatgattacaatgaaactgttcacaaaaagacagaagttgtgatcacattgggatttctggtatccaga

SEQ ID NO: 67606 - DNA, 300 bp, Homo sapiens
gtttctcacccgtgtgaactatgtgatgtcgagtaagttctgcttgaagacgaaaggcattcccacattctttagtcgtataaggtttctcaccagaatgaattctgtgatggggaataagatcttaatgactactataggtctgaccacattccttacattcatagcgaatctcaccagtttgaatgacttgatgtggaccacgttcatagctattactacttgccttcccacattccttacataaataggggctatcaccagtatgaattctctgatgccccgccaagtcaccgtgaa

SEQ ID NO: 67607 - DNA, 338 bp, Homo sapiens
ggcacgagcaatagcatacggtgaattattttttactcccttataaagcccagtatcaatgacaagggagagagagaactagaaccaatcacaacctctcaagccctgcacattgctggcagagctggcagattcacctcacggtttaaagaaggagacggtacaacaatgaatcatgaagatctcagtttattaaaggaaatttttaagaagcctgtggatcctataacggtaagaggtaacatggtaactactgctactctgtggaggaaagtcattctttccctcacccaccatccagactcacctcagacacatttctggatacagacgtaagt

SEQ ID NO: 67608 - DNA, 407 bp, Homo sapiens
ggcacgaggaaaatgggacccaccgtctctcccatctgcctaccaggcacctggggcgactacaacctcatggatggggacctgggactgatctcaggctggggccgaacagagaagagagatcgtgctgatcgcctcaaggcggggaggtcacccgcagctgggtaaagaaaatgggaacccgggagaggggaccctacgtgggaagaatcagaggaagatgtacataagagtaagtggacaagatgtgtggatgagaagggcgcgtagtgctaaacagacaataagagaccgctcaggtgtggggtgacctaatggggagacgtggaatatgtttggtggcacggaggaaagtctaatggatatcgtgtttaggaggacgatggagtcttacgtgctcgttgatg

SEQ ID NO: 67609 - DNA, 342 bp, Homo sapiens
ggcacgagctcgaaaatttaatcaagagtgcgcactcttattccctttactgagggtaatatctacacggagcctagacagccgaaccagaggcttccttttgtccaagaagaggatggaatagacaagctggagctgctggctcccggatgaatttcagacctggggttctcagctccaggcaacttggactcccaggacctcctgacggtcctgactatactgtttactacccgttccatcgacttgccatggtgactgctgcctcacgattggagcgtgaacaccttacgcatctatgacactagggatacaatggagaggtatagagcaaccctagcg

SEQ ID NO: 67610 - DNA, 370 bp, Homo sapiens
ggcacgaggaaattcgaatggcaaggatggcaagaaaagctggcaacttctgtgtacctgcagaacccaaattggcctttgtcatcaggaccagaggtgccaatggtgtgagcccagaggtctgaaaggtgttgcagcttcttcgcctttatcagatcttcagtggaacctatgtgaatctcagcagggcttgacatctcatatgctgcaggttcgaaaaactagattatacattacggcgcctttctcagaaaaggagagaccgcggctgatctcttctaaagcgtgagttcagatcgaagccaatgtaaaagcccgatagtcatcacagctatagtaattgttttatcttctttcttaatccctctag

SEQ ID NO: 67611 - DNA, 420 bp, Homo sapiens
ggcacgaggggcgccatggcgctgtcctggctgcagcgcgtcgagcgtgcgctctttgctgccgccttcctgtgcggggccgtggcggccgcggcgatgactcggacccaggtgcggctgcggggcggggtcaggtaggcgggggagctggccggtctggacatggcgaggccactttcgctttccgaccgggcttgctgctgctcggagccggtggacctggtgaggcacggctggcgccggcctgtacctgaaatgcagtgaggctaatcgcgctttgtggctcctactggccagggcatacttccaagatggggtgcggcaacgggactggtcaggagcggttaaaaccgctaggggcagttccgtttaatcggtcctgctgatcagagctacagtcggtgctaaacctgcggagcg

SEQ ID NO: 67612 - DNA, 348 bp, Homo sapiens
ggcacgagaagttttttacgtggatgaagtctagtttattgatgtttttaatggtttgtcccttttaggtcctatccaagaaatctttgcctaatccacagttgcaaagattttctcctagaagttgtgtagttttagattttatatttaggtctatgatatgttctgagtttatttttcataaacagcataagagatggaccaaggttctttttttccccatatggatgtccactgatctgcattttgagatagccagggaagagggccatgtgcaaaggagatcgctgcaggtggaatgctgggtgctgccagagggggttgtgcaaggcaccaggaagccctgag

SEQ ID NO: 67613 - DNA, 357 bp, Homo sapiens
ggcacgagcataatggacagacacaagctggatgttgtttcctgtggcgagtccacagtccgagtgcagaagggcatctgcagtgggttcttccgtaatgctgcctatatagacccacacgagggttactgtacactgatcgaccaactggtggtctatatactttctttcctattcctatactacatacagtgcaaacggctggtgtgtaatattctagagcttactaataaataattcctgtatgtcttttttcttattgaccctttctttctaactattttattctctctatattttttctctttatctctctatgttttttttactattttcttttcttcatcgagttccccg

SEQ ID NO: 67614 - DNA, 347 bp, Homo sapiens
ggcacgagagctatttcacaagtggatcgattgcagtcagagcctgaaaggatccgtaaatggagagaagaacaaatggaacgcttggaagcccttgatgccaattctcggaagctagaagcataatggaaagaaaaggctatataggagctataagaatgctatgcgctgacagggcgacacaaatctttaaattgaactataagattggtctactataataatcgattataaatcatatacgcatagtataattctgggctgacaatacaatcttatgccactaatctgataatctactctctctaactagtcttacatactatctcctttactaataagatccg

SEQ ID NO: 67615 - DNA, 336 bp, Homo sapiens
ggcacgagcggaacaaaagcagctcatggctgtgtaactgcaggctcaggcaaggctctgccttccagcccgccagacgccctccaggacgaggcgatgacagaaggcagcatgggggtaaccctcgaggcctccgcagaagctgatctagtagctgacaactactgaccagagcttgtgcccagcagaagaagctagctgtcaaagcgcatgcctgtagcagttaggaagaaacctggtacgactagatgcgtcagttacgatacctatctgaagaaccagtgtcttgccaatggcgtgcgagaggttatattgtccactccctctacgtgtctg

SEQ ID NO: 67616 - DNA, 348 bp, Homo sapiens
ggcacgagcacagaataactggaagtgtacatggtaattttatagatctttgtctttatggaatcctgtatttcttgtcattatacgtatacttcatatttagcacttcattgattaaggtaatatttaatcctaccttctaagtatccaaatttgaaggtgctgagattcaaacagtcagtgggataagggggcagatcaagaaagcactccgagctccagaaggagctttcagggccagctttgaggataagctgctgatgaccgatattgtcttcatgctaacttggtatcctgtttccatcccagcgttctataacccagtagcatctttgatgaaaccagtcg

SEQ ID NO: 67617 - DNA, 345 bp, Homo sapiens
ggcacgagcgaaggcagactggacaggcctattatgcaatactcctcgacaggggccgtctggaagtggatctctccacaggggcacgaacaatgaggaaaattgtgatcagaccagagccaaatctgtttcatgatggaagagaacattccgatcatgtaaagcgaactatatgcatctttacagtttaagtgattcatttcagatggtactatataaactgattattgatctctcttagtatatatttatatctttttcttacacgtcatgtgtatacgtttttctattgttatctacgtctcttgatatatatttatgtgtatccatcttcttaattatctg

SEQ ID NO: 67618 - DNA, 342 bp, Homo sapiens
ggcacgaggtttgaaccatgagtgtacatttgaaaaactcaggcagctcatttctcgcaacacccatgacaagcatgagttgcatctgttcatgctgtcgggggtgcccgatgctgtctttgacctcacagacctggatgcgatctcgcttggcctatttgagtaagcttggagagctgctgctattggtgaactgactaaactagctaatctcgacctatcgcactgtcctatccaaggagcactgactggtactggctcccttctggacaacttggcactacctgacactgctgctgccccgtcggcttgtgcggcggctacctgagctgacccctgctg

SEQ ID NO: 67619 - DNA, 360 bp, Homo sapiens
ggcacgagcaaaatattaagagaattcacagaaataacttccagaaatggacctgataagatcattcctgctcacgtaattgcgaaggctagacgccttgcaattatgcctgcccattaagccgaaatcctggcgattgccatatgttgctatacttgtgatcccgcccttctttgcactacgatgctttcagtccttcccttcatcttcctgcctcgacgctcctactacctttcccaggatttcctatactagttaatttctaccccttcatactctcttagcgcctcttatatcacctactttcttgttcctggctactatcaatggatagatcctcaattctacttccagttccac

SEQ ID NO: 67620 - DNA, 764 bp, Homo sapiens
ccacatactggagcatagatatacactttgggatgctcatcttttctaacacctcctcaagaatttggccaaacaagttaggagaatctgtaaatccttggggtaagactgtccagcagtattgttgttttcacccagagtgagaatcttcccattcaaaagtgaatatatcctgactatcttcagctaaaggacatgcccagaaggcatctttcaggtctatttctgtaaaccactgatggtcatatggaattttgctgagaatagtatatggattgggaacaacaggatgagtggtttgaacagtttgattaatggcttgaagatcttctacaagtcagtatcaccaatctgactactttacaagtaatattggagtagtatagggagacatgcacagttcaagtagcccatctcagataaggctctcaattagaggttttaaacctaatctaccttctaagggaattggatattggtttcttttcactgtttccctgggagtttttaactttatgtgaattggaggaacttgtagcttccttcaatttccctcccttgaccactcattagcattgatgtagctttcttctgctgtagtaaacaggtttaatgaagtgaagaatccttctgggcttacacgcaagcctatacctaactttgccattaggccacttcctaacaagtttgtcccagccttaggaagtagcaaaaatttaacattggttgatcgggtttcaaatctgacttctgttttttctgag

SEQ ID NO: 67621 - DNA, 363 bp, Homo sapiens
ggcacgaggccgacaagaccaacgtcgagactggcaaaacagcggtcggcgcgggggctggctagtatggtgcggaggccctggagaggatgttcctgtccttccccaccaccaagacctacttcccgcacttcgacctgagccacggctctgcccaggttaagggccacggctagaatgtggccgacgcgctgaccaacgccgtgactgacaaatacgagttgcccaactcactgtacgcccataacgacctgcccgcacacaatcttcagccggacctgcataccttcaagctcttaatacactgactgctggcgaccctttccgaccacgtcaccactgtttcatccctgtcgactaccg

SEQ ID NO: 67622 - DNA, 324 bp, Homo sapiens
ggcacgagatttaatgacatttaaagaaaaccataaacgagcctgtgcacagagttcctacatgaaaaccaaatgtaaaccaaatattaccttcttcaacaccatcatctgtttcttcctgactttactcttgtgcatctatatcgtatgtctcttctgtactgttacagacaacgcagcacatgatgatcaattcacatcgtgacgtatacaataaagtagagtatattagtattattatgtcactactataatagataatatctaatatgagtatagatctttattaacaagtcatattgcttgatatttcatgatgatatg

SEQ ID NO: 67623 - DNA, 318 bp, Homo sapiens
ggcacgagcgagatgtcctcttcaacctgtgtgaaaacctggtgaagtccagtgaggcaaactctccagcccatgaggagttcaagacgatgctgctgatcgctcattactatgccacgcgctctgcagccgagagtgtctatcagctgtaagccgtgtattgctatccttagtgtattagactaagcatatttcggtcgtcggtcggtttatgtagtaagtggtgtcttagtgcgtgtgatccgatgaccgattttttctatcggtgtggcatgttctatattcgtaaacggctggagtatatgcatttaggatgtt

SEQ ID NO: 67624 - DNA, 333 bp, Homo sapiens
ggcacgaggttggctttaacttcctcagtgaacacaagcatgttgttgtcttctatcttcttcatggcagactcagtggtcagcagaaacttgatgatgggatagtagtcaagcttgtttctcctgggggagctcttccgaggatatctgggctgcctacagaggcttaccgccctgggcaatggtgcatttaagaccctgctgaccctcctgagcagaggactggaccttgcaagctagagcttcatggtatacatatttctgaaaggacagattatgaaatggacaggcgattgctaatagaaataatgcccctccgcgaaaaactcgaag

SEQ ID NO: 67625 - DNA, 360 bp, Homo sapiens
ggcacgaggaaagagtgcgtgcctgctacgaacgctccaacgagtacccactgattgactgagcccagtacttactggactggatcgacgcgatcatgcaggctgactatgtgccgagcgatcatgacctgctttgctgccgtgtcctgacttctggaatctttgatacctagcttcaggtggacaaagtaaacttgcacatgtttgacgtgggtggtcagcgcgacgatcgccgcaagtggatccagtgcttgaacgatgttactgtcctcttcttactgacgggctgcggtcggtacttcgtgtgcatccagcgggatcagctgactgaccggctgcaatacggttatacactgaatc

SEQ ID NO: 67626 - DNA, 368 bp, Homo sapiens
ggcacgagctggaatttgaaattaaaaacacaataccatttatattagcaccaaaaaattaaatacttaggtataacataacaaaatatgtgttatatctcaatatctatatgcagagaactacaaaactctgatgaaataaatcagagatctaaatggagatcctttgagctgcaaggtaaaaaatttaataaaaataaataaatacatgaagagagattctatgttcacgaataggaagactcaatattgtttagatgtcacttcttcccaacttgacctgtagattgaatgcaattcccatcaaaatccctgcaaatcattttgtggaagtcaactaactgattttaaagtttatataaaaaatc

SEQ ID NO: 67627 - DNA, 517 bp, Homo sapiens
tcatgttatgtttgcggaggaaccgtaacaggagatcaatggccataggaagcccgagaattagttcccacagacccagttcctgatgaattcccagcccaaaagaaccaccctgacaatttttaggttctaaaagtctcaattattagacagtattgcacagctattgaaggaaaacaattcactcattctataggacggcttagttgtcttaggcaaaagctgtataatggtaccacaaaaacagttacatggtggaattccaattacacagaaagaaatccattcagtaaatttccaaagttgcagactgtttgggcccacccagaattccactgggactggatggcccccaccaggttatactggatatgtggacacagagcttatgctaagctgcctgatcagtggacaggtagctgtgtaattagcaccattaagccatctttcttcttactgcccataaaaacaggtgaacttctaggcttcccagtctatgcttcccacgaaaaacgaa

SEQ ID NO: 67628 - DNA, 365 bp, Homo sapiens
ggcacgagccggcggaaggaccggaagctagggccgagtctcttcaccattggcttctgcatctacgacgttgcgacagagggacttcaggcagacgcggtcttgaaccgtgtgcactactatccagcatgccccctgaccgtctaagagtcgtgcagacctgtacataaggtccctgcaattaagcctgacgctggggaagaatctgtcatgaatcttgacacattgagatttgctgatggaagcataatatcatcggagctgcgactcagcatgcagaagtcaatgcacaatcatgctgccgcgttccgtgtggcaagcgtgttgcaagaaggttgtgggaaaatcatcaagctctatggaga

SEQ ID NO: 67629 - DNA, 318 bp, Homo sapiens
ggcacgaggagacctctagatatgaaatatatgaactaatacatgttcatccctatgcagttaaacagagctttgacctagaggagtacagcctctcacagtctaccctggagcaggtgggtcatttttagggattcgtatcatccatggtatatgtgtataaaacattccctgggagctgcagaggcagcacggcattgttctcctctctttatttccttcctccctttcagggtttcctggagctctccaaggagcaggagctgggagattttgaggaggagacgcggggttcactcttagcgactgttacggccg

SEQ ID NO: 67630 - DNA, 330 bp, Homo sapiens
ggcacgagctggtgatcaaggaaatgcaactgaagacagtgatgatggagtctaagcccagtttagtggcaaaggttaagaagtatggcaatatccagcattaaagagactgtggctacacaggtccactttggcattgctggtgggagtgtaaatctgcctctttcattctttttgattttagtgagatctgataggaatagaattatttcccaatagatgcgtatatttgttgatttcaatattatcttagggtttacttttcaaaatgtaggagtattggaggggtcttatctcttccgcattctcccaatctggtataatatgacg

SEQ ID NO: 67631 - DNA, 332 bp, Homo sapiens
  misc_feature (1)...(332): n = a,t,c or g
ggcacgagcttgcataattatgtactcggccatactcttaatcgctgtacagagggttaacgataacttgacactgctcgacgatgtacgacttcgagactgctatgacatcatctacgagctgctggacgagctcatggacttcggctacccccagaccaccgacagcaagatcctgcaggagtgagtgggcaggggtggggcctggggccaggcctgggcggtgtcatgacatcgacgtcatcaggtgtggaaacagaaggggcaaatttgtgttcatgttgtcccccacctgccttccacctccagcagtattcgggtttttactaagn

SEQ ID NO: 67632 - DNA, 313 bp, Homo sapiens
  misc_feature (1)...(313): n = a,t,c or g
ggcacgagccactctatacaagtgctgtgccgctgcagatgctcatgaatgctgtgccagagtgtccgatgaatttaaacctcttgtggaagagcctgataattcactcgaacaaaattgtgagctttttgagcagcttggagagtacctattccataatgcgctattagttagctacaccaagaaagtaccccaagtgtccactgctgatcttgtacaggtctcatgaaacctaggaatagtgggcagcaaatgatggctacatactgaagctaactgaaagccctgtgcagaatactatctatacgtggtn

SEQ ID NO: 67633 - DNA, 356 bp, Homo sapiens
ggcacgagaagatttaaaacaagatgtgagtgatcttactgaatttcctgaaacataaggattaccagactcttagagaagttaattgtacaacaatttcacttgcttatttgcattttgttttttataactcttactcccttttcccctctaaggagaactgtgtttatgaaactgtaaacttgcctttggatgaaatgccatattagaaaactttaacacccctcatacacgaatatctttagcctggatatactaatgaagtttccgacatgttaagacatttaaatcttggtgaaatgaaaagtggagtaccactgttggcagtatccttaccattggatggtaatgctact

SEQ ID NO: 67634 - DNA, 356 bp, Homo sapiens
ggcacgaggcagcggccagggccctatgaccggcccgggactgccaggaggtacattggcatcgtgaagcaggcaggcctggaaaggatgaggcctggtgcctacagcacatgctacgggggctacgatgagtacagagtgctctgatatagatactgcgtgtactgcgtctttttacctctattttcagatattactacatgagttcatgtctcgctgaatttataccatcttaaatatatgtttgatataatctatttcacctttatgaatatatgttagtgagatatcagtaacgttgtagcatatttgattagccgtgtacacttgtgtttggttatattagtgcacattcg

SEQ ID NO: 67635 - DNA, 366 bp, Homo sapiens
ggcacgaggccgtggacatcggggagcgcataggagcccgagtgcacccgatgaccaaggaccctggaggccactacacactgcaggaggtggaggatggcctagtctcatacaagccatagctggtgatcttatccctctgttagtctatcataatctagattcagctcttttgtatgtatattatatttgattcttacattctattctctttccatgcagattatcttatttctttttatattaaagtcatctcttactctcgttgtatatgcactgcgtgtattcagttttcttagaataatcttgttcctattttagtatatttcttattttatgtgttgctatctatttatttatcaaaaa

SEQ ID NO: 67636 - DNA, 355 bp, Homo sapiens
ggcacgagcactccctacatcctggaacctggagagtaccccacctcataggcctggggcacatcggaccccagcgtgggctccctgaagcccatgagattgggctgcccaagtgtggagaagccaggggagcccagggctgcggtgtatgaggccccaggctttcagggcccgagctgggaagcgagcccagacatctacaaccttcagcagccagaggacagccagagcccccacctggcctctgtggggtccctgagagttctcggaggctgctgggtgggctacgagaaggagggtttccggggccaccagtatctgctggaggagggggaatacccacactgctcacact

SEQ ID NO: 67637 - DNA, 361 bp, Homo sapiens
ggcacgagccctggcttaagctcagccaatagtaccatagatatgcttgacggaacatgcaaccctagaagagactgtcacagtacaacccagaataaaaccaaagaacagaaactggcttgaataaggatttgaaaaacatgaccactggtggagagaaacataacgataaaacgatgaagttaagtctcacgctcggctaatgactcattgtgtgtgcgcgcgtgagtgagtgctcaaactcactcctgtggctgatgactgcaaagtggaatccatctacctaaatgcggacatcgcgaacacacacctttagaaccctcataatgcgcacatcacccgccaaccttaagaaaccctg

SEQ ID NO: 67638 - DNA, 375 bp, Homo sapiens
ggcacgagccagcacttccggggtgacaatgaagaacaagactgatgactgaagaaaagctgtacgttatatgttggaaatctttctttttacacaactgaagatcacatctatgaactcttcaacaaaagtggcgacataaagaaaatcattatgggtctggataaaatgaagataacggcctgaggatactgaattgcggaagacctatcatgcgcttacgcagacctggttttgcgactgagttatggacttcgcatcgataaacgtatcatctgaacagaccgcctgtccagatcattgcttaccgaactatttagacatgacacaaagagtatccatgagatttcatgaatatcatattcagcacaatgg

SEQ ID NO: 67639 - DNA, 360 bp, Homo sapiens
ggcacgaggcctctttcactgttcagtcagcgttcctgggtaactcagtgcttggacactgggaaaacatgcaccctgataactcaaaggcacctggcttcagaccaccttcccagcgagtttctactactccagttgtgatatcatccatagatttctgaggttgctcattatctttacattctgctctcaagccaactcgctcccgtctaccaaaaactcggtaacattcacctgcaataaatacacaacgctctagtacattatgcaagtctgagcatcccttacatcgattatcttcctctgatcacctaatgcacgccatacctcacacctctcgggatcggatcgttcaccgcg

SEQ ID NO: 67640 - DNA, 362 bp, Homo sapiens
ggcacgagggagatggattttttcctagtgtgcctgtgtgtggtatgattccatggcattggcaaggctgagaatgggaaacttgtcatcagtggaaatcctatcaccgtgttcccggaggaagatcccaccaaaagcaaatggggtgatgccagtgctcattatgttggggagcccactggcatcttcactcccactcccatggagaaggctggggcatactgagagtagggagtcaaaatggtcatcatctctgccctgtctgttgatgaccccatgttcgtgatgggggtgaaccatgagaagttcaaaaacagcctcaagatcatcagcgatgcctcctgtaccaccaacttcttcgg

SEQ ID NO: 67641 - DNA, 371 bp, Homo sapiens
ggaaagccttcagagctgtgtcaatcctttgaatgcatggtaggactcaccctgaagagaaaccctatgagtgtgagcaatgacggaaagccttcagatctgccccacacctttgaatacgtggtaggacacacaatggagagaaaccctatgcatgtaagaaatgtgggaaacccttcggatctgcccagaaccttcgaattcatgaaaggacacaaacacacataatgcactctgtagagagaccttataaatgtaagatatgtgggagaggcttttattctgccaagtcatttcaaacacatgaaaaatcttacactggagagaaaccctatgagtgtaagcaatgtgggaaagcctttgtttccttc

SEQ ID NO: 67642 - DNA, 438 bp, Homo sapiens
  misc_feature (1)...(438): n = a,t,c or g
ctaatgactgctgcagtaccggtccggaataatgacagccntccgtaccggcccgcaatctgggtgcaacctccttgcccaagaagctgaagcctgaacaaatacgggtggagatcaagcgggagatgctgccgggggcccttcatggggggctgcacccatctgagggtccctgagcctcaccacccaaagacatgacacccctgaacctgtcgtcccgggcagagccgatgcgcgacatccgctgtgagttctgcggcgagttcttcgagaaccgcaagggcctgtcgagtcacgcgcgctcacacctgcggcagatccagctaatcgagaggctcatgcatgacaatcacatcgacacactaagcgagtggatcaaacacctgccataaaaggtgtgcgcttaccgcagctacatccagggcggccgctctagaa

SEQ ID NO: 67643 - DNA, 373 bp, Homo sapiens
  misc_feature (1)...(373): n = a,t,c or g
ggcacgagcacccacctcgcacgtgggcatcgcatgttgacctacctaccattgctctggggaacacagattctcctatgcgctatgaggacatggtcattcaatgcatcaacaggggagctcactcagggagattgacgtgggggatgatggctcgagaaatactggccatgcgtggcaccattttccgagaacacccatggcaggtaatgcctgatctgtacttctacagagatcctgatgacattgaataagaaaagcatgctgctgttgataaggctgggaccacagtggaattacagggtgaatggactgctcccgctcctgagtgcactgctactcactctgaggatgcagactggtctgaacgagn

SEQ ID NO: 67644 - DNA, 354 bp, Homo sapiens
acggcacgagagagagccttcaataccctgattttccgtgaagaccccggacacctgcggcgccaggggggccggggggcccgtcctcacccatcagcccttcctggcctttctcgccatgttctccatcaggccctgggtctcccctgacccccttcagcccatcaggtcccatggggccactgtcaccctcaaggcctggctctccccgttgcccaatgaggccctgctccccaggagtgcccaggggtccaaggtcaccctaggagaaaccgaacaaaagaccttgcgggtggatagggccagccccagctctcgacacccctttctgtctccaccaactctgactttggg

SEQ ID NO: 67645 - DNA, 361 bp, Homo sapiens
ggcacgagcctgactcttgtgataacatcaatccatgccatactggtggcgctgatgatgaaccctgacaggtgaccgtaccaggatgtcacaccaatgacactgtgacaggcctcacaacaggtgcctccttcaacttaccaggatcctctgtgaatgaaccacagaggcatttacgtacgccataatgcaccaccgagaacaggaacttggatccttgtcactcccccgttaccatccatttctctgaggggaaaacagccctgggccagtggggaagcaaaagagggtgcctgcttggagtccgattggagcgctgacggggacagcacaggggctgccctgcccaggaggcctgctt

SEQ ID NO: 67646 - DNA, 342 bp, Homo sapiens
ggcacgagaccatgtaccctgagatcattcgtgttgacatggcacatattagaaaccaaggatgtctcagaaacctggtattaaaggctaaactgtagagaagcctgactttgggtaccatcatgcggtgctgaaccatcagcgtgtggcagacggaggccatgatggtgaagacctgctcgctcgcagagtcctttcacaccaggatgagcagggtgttggtctgctgctctgagtccagcttcttaaggcattcctctggaatggctgatactgacagtctgccattctccgggattgatggcttgtcgagttaatcactctgctactcacagtcactgg

SEQ ID NO: 67647 - DNA, 340 bp, Homo sapiens
tgcacgaggtgagcttcttctttctagataagcaccataggaggtaaaggggcatttcctggcccttgggtattttgtatcaactgccaaagctgaaaatcttccctagcggttatggtcatcgtgtccccaggctcaaaaccagatccctctcttcttaaaggcttcgctgcatcaccacatttcagtatcacatacagactaacttctgcctgccatgaattctcagcggtttccacacccttttgactccataaccacttctgatgatttaaggtctgttttgcagcattacaactctctgacctgactcacatgcaatccggacacccaggaccgt

SEQ ID NO: 67648 - DNA, 342 bp, Homo sapiens
gcaccgctggctgaaggggggcgtggtgctgaaggaggatgcgctgcccggccagaaaacggagttcaaggtggactcggacgaccagtgcggatagtactactgcgtctttctccccgagcccatgggcacgggcaacattcagctccacgggcctcccagagtgaccgctgtgaggacggcagaacactatctccagggggagacctgcatactgctatagatgccagagtacgagtccactggccttgactgatgatggttcaacatcactgactcttgacacatcgctgtctttaacggatcttacactggaatagtagtctgcattgcagagtctca

SEQ ID NO: 67649 - DNA, 355 bp, Homo sapiens
  misc_feature (1)...(355): n = a,t,c or g
ggcacgaggggcggcgcgtggtctacgccgagtgacagagacgctcacgctgtgttctcgggatgacccgaatgcgagacagcagcaccatcggtggcaaacaccccagacatcaagctctttgggacgtggtcccccgcatatgctctcatgactgacactaccatacactatcacatctgcgggaccgaaaggtgcggtacctgatgcgctcgcatgacatcaccctgtgcagagcaaccatggataaccacattgatgtcgacctgtctctggatggtccggcctgtaatatatcccggaaacaaggtgtcatcaaactgaataacaacggtgatttcttcattgccattcn

SEQ ID NO: 67650 - DNA, 406 bp, Homo sapiens
  misc_feature (1)...(406): n = a,t,c or g
tcgcggacgcgtgggtctggatgtaccattggattgggagacatacatgcatcggattgggagagctggccgttttggtnnnnnnnnnnnnnnnngtttgagggctttctttaaggggagggatctataaggggacaggggggctttgaatattatttttgggaaaaggatttactacctaacattctctctgcttttaggtacattggggctgacagggacctactgttgccggggaaaggaaaaaaatatgatgatgaaaattgcccaaaaatgtaatatcaaccttttccctttaccaaatcccattcctttgggcctgatggaaaaatgtggggattggaatggggaagttaaagctgctgggcatacatatggtataccaagtgtacctaaccaaccctta

SEQ ID NO: 67651 - DNA, 318 bp, Homo sapiens
  misc_feature (1)...(318): n = a,t,c or g
ctctgttcgtcaggtgagagattcgggcttttttattcattaaaggatcaataaactctgaatccaaaagccgtttctaggggagggaaaaggagaaaagtgagccagtttgcactaaaattaaataaattcaatacatgcatggctggttaaacaactaagtaaccttacttactattaatattaccagggttgtaatattacacgctttcttcatgcttaagcaaaatacaaacatacagaatacccaaacaaaaactaaaccagaacagcaacaacacaaaaccaaatgtgaaatacattttcatgtttaatgcn

SEQ ID NO: 67652 - DNA, 1333 bp, Homo sapiens
ccgaagtggagaagggttccatgtgaacagcagttgaacatgggtcagtcggtcctgagagatggacgagacgccgggatccgaggtgccgggtgacaaggccgccgaggaacagggagatgaccaggatagtgaaaagtcaaaaccagcaggctcagatggtgagcggcggggggtaaagagacagcgggatgagaaggatgaacatggccgagcttactatgaattccgagaggaggcttaccacagccgctcaaagtctccactgcctcctgaagaagaggcaaaagatgaggaggaggatcaaactcttgtgaacctggacacgtatacctcggatctgcattttcaagtgagcaaagaccgctatggagggcagccacttttctcagagaagttccccaccctttggtctggggcaaggagtacttacggagtgacaaagggaaaagtctgctttgaggcaaaggtaacccagaatctcccaatgaaagaaggctgcacagaggtctctctccttcgagttgggtggtctgttgatttttcccgtccacagcttggtgaagatgaattctcttacggtttcgatggacgaggactcaaggcagaaaatggacaatttgaggaatttggccagacttttggggagaatgatgttattggctgctttgctaattttgagactgaagaagtagaactttccttctccaagaatggagaagacctaggtgtggcattctggatcagcaaggattccctggcagaccgggcccttctaccccatgtcctctgcaaaaattgtgttgtagaattaaacttcggtcagaaggaggagcccttcttcccaccaccagaagagtttgtgttcattcatgctgtgcctgttgaggagcgtgtacgcactgcagtccctcccaagaccatagaggaatgtgaggtgattctgatggtgggactacccggatctggaaagacccagtgggcactgaaatatgcaaaagaaaaccctgagaaaagatacaatgtcctgggagctgagactgtgctcaatcaaatgaggatgaagggtctcgaggagccagagatggaccccaaaagccgagaccttttagttcagcaagcctcccagtgccttagtaagctggtccagattgcttcccggacaaagaggaactttattcttgatcagtgtaatgtgtacaattctggccaacggcggaagctattgctgttcaagaccttctctcggaaagtggtggtggttgtccctaatgaggatgattggaagaagaggctggagttgaggaaggaagtagaggggagggtattcccg

SEQ ID NO: 67653 - DNA, 325 bp, Homo sapiens
ggcacgagccttaattccctggtctacaaatcctacataaaccgactgttggaggtatacacaaccgtaagtgaccctgaaagtgtgactgcacagtatggacggaacttactgtactataagcaaggtgactttagtgtggccgaacttctgagactgtactccctgtgaagagaatactaccaagccattaaggagcagctcatcatcagtctgtacacgtagagtgcggaatttcgagtgcctgatgctgatgtgacctgctactataaagtgctgaagggctagatcaagatgcgaatggctcatgaggccgtcctattat

SEQ ID NO: 67654 - DNA, 340 bp, Homo sapiens
aaagaaattaagagactaatcccattgataatagctacaaataaaataaaatatctaggaattaatttagccaaagaagtgaaagatctatacaatgaaaactataaaacatggacaaaagaaattgacaaggacaccaaaaaatagaaaaatattccatgtttgtggattggaagaatcaatattgttaaaatgtccactctactcaaagcaatctacagatttaatgcaatctttgtcaataacccaatgacattattcacagaaacagaaaaaattatcgtaaaatgtacatggaaccacagaagacccagactgtccaaagctatcctaagcaaaa

SEQ ID NO: 67655 - DNA, 311 bp, Homo sapiens
tggaaaattcacacacttgtgaaaattaaacagtacattctttaataatcaatgggtcaaaaactaaatcacaagggatactggaaaatactttgagatgaatgaaactaaaaacacaacataccaaaatgtattgaatgcagctaaatcagtgcttagaaggaaatttacagctgtaaatgcctatattaaaaagaaagatctcatatcataaccttccatctcaagaaactagaaaaagaataaactaaacccaaaacagggaaaacaaaataaggaaatgattatttaagcagaaataaatgaaatac

SEQ ID NO: 67656 - DNA, 681 bp, Homo sapiens
agcacagacttgtctcagactgaattgagggatggtcagctaaaacgaagaaatatggaagaaaatataaactgtttctcacataccaatgttcagccctgtgtcataaccaccgacaatgctttgtgtagagaaggtcctatgactggctctgtgatgaacctggtttcaaataacagtatagaagatagtgatatggattccgatgatgaaattctaacactttgcacaagttccagaaaaagaaacaaacccaaatgggatttggatgatgaaatcctgcagttggaaacacctcctaaataccacacgcagattgattatgtccactgtcttgtaccagacctccttcagatcaataacaacccatgttactggggagtgatggataaatacgcagccgaagcactactggaaggaaaaccagagggtacctttttacttcgagactcagcacaggaagactatttattctctgttagttttagacgctatagtcgttctcttcatgctagaattgaacagtggaatcacaactttagctttgatgcacatgacccctgagtcttccattctcctgacattactgggctcctagaacattataaggacccaagcgcctgtatgttctttgaaccacttctatccactcccttaattcggactttccctttttgcctg

SEQ ID NO: 67657 - DNA, 332 bp, Homo sapiens
aaatgtctttcggtatttgagatcactaatgactatgttccctacagtttaaaaagaaaaaaagaaacacacacacttgtcatcttttataatggttttgtcacaattcataatagacaaaatagaacaacaaacataaaattccaactgctccctcttttctctttgaaagagtctgataggtaagggaaaaaatagcatcaatactggccatgaaaatatgctaactactatacccaaactttaatgttatgactatttcacaagatgatacaatgtccatttgcaatacatatggcatgaccatttgggtaatgcattatattcctccc

SEQ ID NO: 67658 - DNA, 394 bp, Homo sapiens
ggcacgagcccccgtgtggattttctggtggcgggtgaggtgggagacctgcgagaagaacttcccacactggccgcatttatagggcttctccccggtgtggcaccgctggtgtttgatgagggatgagctctgtgtgaaggccttcccgcagtccttgcatttgtagggcttctctccggtgtgaatcctctgatgctaggtaagcgaagagctctgagtgaaggtcttgccacatgcacggcaggcatagggcttctcgcctgtttggatgatgtggtgctgaatgaaatatgagctgttgctgaacgccttcccgcagtcacagcacctgtggggcttctccccggtgtgaattcgctgatggagaatatagtccgaatggtaaatgaag

SEQ ID NO: 67659 - DNA, 395 bp, Homo sapiens
ggcacgagatagtatatacatcctgcagatgctgtgaagctgggccaggctgaactagttgtgattgatgaagctgccgccatccccctccccttggtgaagagcctacttggcccctaccttgttttcatggcatccaccatcaatgggtaaggtactgtgggcaggagtccttactcccgtggcaggctcttgcagattcaggggcatgtagtggatgtggcctgggcctggacagccaagtctgattctcagagtctctgagtgtttgaggctgcttcattctctactgggcttctgcaaatggaaactggtctcttaatgaactgttacacgtctctggcccgacatgaaatgggcagtgtaagactgaagaattttagtctgatgtgctg

SEQ ID NO: 67660 - DNA, 382 bp, Homo sapiens
ggcacgaggccatctaccaagaaatcaggctactcacctcagcaggtagctgtgatccactgcaaaggacatcaaaaagaaaacacggccgttgcccatagtaaccagaaagctgattcagcagctcaggtcactgccagactttcagtcacgcctccaaacttgctgcccacagtctcctttccacagccagatctgcctgacaatcccgtatactcaacaacaacagaaaaactggcttcagatctcagagccaataaaaatcaggaaagttagtagattcttcctgactctggaatcttcataccctgaacttaaaccagttacctacagtctaccacccatttaagaagagcaaagttacctcagctcctccggaggg

SEQ ID NO: 67661 - DNA, 717 bp, Homo sapiens
agcagtagcctggacagcggactccgaacccctcagtgccggatctgcttccagggcccggagcagggggagctcttaagcccctgccgctgcgacggctcagtgcgctgcacgcatcagccctgcctcatccgctggatcagcgagaggggctcctggagctgtgagctctgctacttcaagtaccaggtcctggcgatcagcaccaagaacccactgcagtggcaggccatctccctgacggtcatcgagaaggtccagattgctgccatagttctgggctcgctcttcctggttgccagcatctcctggctcatctggtcctcactcagcccttcagccaagtggcaacgacaggatctgctctttcagatctgctacggcatgtatggcttcatggatgtcgtctgcataggcctcatcatccatgaaggctcctctgtctaccgcatcttcaagcgctggcaggcagtgaaccagcagtggaaggtcctaaattatgacaagaccaaggacataggaggagatgcagggggagggacggcagggaagccaggccccaggaactcacggacgggccccacctctggggccacgagccgccccccagctgcccagcgcatgcggacgctcttgcctcagcgctgcggttatacaatcttgcacctccttgggcagctgcggccaccagatgcccgttccagctcccattctggg

SEQ ID NO: 67662 - DNA, 1849 bp, Homo sapiens
tgaagaactgctgtgtttagatgtctctgaaaacaggttggaaagacttcctgaagaaatcagtggcctgacttcattaacggatttagtcatttcccagaacttattagaaacgattccggatggcattggaaaactaaagaaactgtcaatcttgaaggtggatcagaatagactcacacagttgcctgaagcagttggggaatgtgaaagtctcactgagttagttcttacagaaaatcagctcctgaccctgccttaaagcattggaaaactaaagaagttgagcaacttgaatgcagacagaaataaattagtgtccttaccaaaagagatcggcgggtgctgcagcctcactgtgttctgtgtacgtgacaacagactaactcggatacctgcagaggtgtcacaggcaacagaacttcatgtcctggatgtggcagggaacaggttgctgcatctacctttatccctgactgccttgaagttgaaggctctgtggctatctgacaaccagtcccagcccctgcttacattccagacagacacagactacaccacaggagagaagattttaacctgtgtcttacttcctcagctgccttctgaacctacttgtcaagagaatctgcctcgctgtggtgcactggagaacttggtaaatgatgtctctgatgaagcctggaacgagcgtgctgtcaacagagtcagtgcgatccgatttgtggaggatgagaaagatgaagaagacaatgagacgagaacacttctaaggcgagccactccacacccaggggagttaaagcacatgaaaaagacagtggagaatttacggaatgacatgaatgctgctaaaggactggactcaaacaaaaacgaggtcaatcatgccattgaccgagtgaccacttctgtgtagagtttcacctccaagttttacctcctgtgtcttcctctgctgtcgagacgttcctgtctgcttcccgggagcctcacgtgctccttgtcctaaccagcccccgcgcgccatctttcccgtggagtgtggggaagctgctgtctcccaggaagtgccttactcatcccgcaaccagtcagcgcaccagtggtctcccggtgtgattttttttttttttaatttcagttgtttgtaataagtagaatacactactgtaaacatacgacctttgtttttgtcttatgttggggtaaaggaaagcaggaaggggaatttttatcctcctcccttccgtaaagtgctgggatattttgaatcccccaagttcccttggacctactgatgagagatagttttatgtatggggaaaaatggatactttttaaaccttttttggcagctcagatggtgtaaattttaaaattttgtataggtatttcataacaaaaatatgtatttcttttttgttattttatcttgaaaacggtacatattttagtatttgtgcagaaaaacaagtcctaaagtatttgtttttatttgtaccatccacttgtgccttactgtatcctgtgtcatgtccaatcagttgtaaacaatggcatctttgaacagtgtgatgagaataggaatgtggtgttttaaagcagtgttgcattttaatcagtaatctacctggtggatttgtttttaaccaaaaagatgaattatcaatgatttgtaattatatcggttgattttttttgaaaagatgaaccaaaggatttgactgctaatattttattccttacactttttttctgaataagtctctcataatgagtgcagtgtcagactgtgcctactctgatggtatgtgccatttgtaaaataaaatagagcagaaaaacc

SEQ ID NO: 67663 - DNA, 784 bp, Homo sapiens
ggggcgaaatgggggctgcccaggtttttaaaaatcatgcttcatcttgaagcaaacggtcacttcaccctcctcacgctgtggtgtaactttgatgaaaatacccactttgttggcctttctgaaggctataatgtcaggatcgtcctgaaagtcttgaggttctgccaactcatcgtactctgctgctgcatccttgccagctaaaacgagctctttgggaggcaccaccaccttagcagtgctgttgatatcatcagggtccccctcctcacactccaagagagtcacatgggtgaggttctcaactggatttgtaagagtcaggaggacctggctctccttcatgtagcgaaggttgggaattgacatgattctcacttctggaatataattgacagcgaccagctggattttgaatttgattgacgttgggttaaattctggcttgctcaaattatgttcacatttacggcagcgcagggaccgtttgatcagaagatgtttgtggcgaggatagagctgtgaagcacagactggctggaagtcaggctgtaacagacgctgctgaagggttgttacctctgttaaatttactggtcttgtataatagtcttcaggtagaggttccacttcatccacagcctgagctggctcaatctttatctctttctgatcctctccttctttaagggaaagtccggcaagggtactgatggatgcaccagctcgtggtcgctgaagcctggttccaagaccatatttgtccgaaaaagccagaggc

SEQ ID NO: 67664 - DNA, 535 bp, Homo sapiens
attaacctaggaaatacatgttatatgaacagtgttatttaagccttgtttatggccacagatttcaggagacaagtattatctttaaatctaaatgggtgcaattcattaatgaaaaaattacagcatctttttgcctttctggcccatacacagagggaagcatacgcacctcggatattctttgaggcttccagacctccatggtttactcccagatcacagcaagactgttctgaatacctcagatttctccttgacaggctccatgaagaagaaaagatcttgaaagttcaggcctcacacaagccttctgaaattctggaatgcagtgaaacttctttacaggaagtagctagtaaagcagcagtactaacagagacccctcgtacaagtgacggtgagaagactttaatagaaaaaatgtttggaggaaaactacgaactcacatacgttgtttgaactgcacgagtacctcacaaaaagtggaagcctttacagatctttcgcttgccttttggccttcctcttctg

SEQ ID NO: 67665 - DNA, 2262 bp, Homo sapiens
  misc_feature (1)...(2262): n = a,t,c or g
tgaagaactgctgtgtttagatgtctctgaaaacaggttggaaagacttcctgaagaaatcagtggcctgacttcattaacggatttagtcatttcccagaacttattagaaacgattccggatggcattggaaaactaaagaaactgtcaatcttgaaggtggatcagaatagactcacacagttgcctgaagcagttggggaatgtgaaagtctcactgagttagttcttacagaaaatcagctcctgaccctgccttaaagcattggaaaactaaagaagttgagcaacttgaatgcagacagaaataaattagtgtccttaccaaaagagatcggcgggtgctgcagcctcactgtgttctgtgtacgtgacaacagactaactcggatacctgcagaggtgtcacaggcaacagaacttcatgtcctggatgtggcagggaacaggttgctgcatctacctttatccctgactgccttgaagttgaaggctctgtggctatctgacaaccagtcccagcccctgcttacattccagacagacacagactacaccacaggagagaagattttaacctgtgtcttacttcctcagctgccttctgaacctacttgtcaagagaatctgcctcgctgtggtgcactggagaacttggtaaatgatgtctctgatgaagcctggaacgagcgtgctgtcaacagagtcagtgcgatccgatttgtggaggatgagaaagatgaagaagacaatgagacgagaacacttctaaggcgagccactccacacccaggggagttaaagcacatgaaaaagacagtggagaatttacggaatgacatgaatgctgctaaaggactggactcaaacaaaaacgaggtcaatcatgccattgaccgagtgaccacttctgtgtagagtttcacctccaagttttacctcctgtgtcttcctctgctgtcgagacgttcctgtctgcttcccgggagcctcacgtgctccttgtcctaaccagcccccgcgcgccatctttcccgtggagtgtggggaagctgctgtctcccaggaagtgccttactcatcccgcaaccagtcagcgcaccagtggtctcccggtgtgattttttttttttttaatttcagttgtttgtaataagtagaatacactactgtaaacatacgacctttgtttttgtcttatgttggggtaaaggaaagcaggaaggggaatttttatcctcctcccttccgtaaagtgctgggatattttgaatcccccaagttcccttggacctactgatgagagatagttttatgtatggggaaaaatggatactttttaaaccttttttggcagctcagatggtgtaaattttaaaattttgtataggtatttcataacaaaaatatgtatttcttttttgttattttatcttgaaaacggtacatattttagtatttgtgcagaaaaacaagtcctaaagtatttgtttttatttgtaccatccacttgtgccttactgtatcctgtgtcatgtccaatcagttgtaaacaatggcatctttgaacagtgtgatgagaataggaatgtggtgttttaaagcagtgttgcattttaatcagtaatctacctggtggatttgtttttaaccaaaaagatgaattatcaatgatttgtaattatatcggttgattttttttgaaaagatgaaccaaaggatttgactgctaatattttattccttacactttttttctgaataagtctctcataatgagtgcagtgtcagactgtgcctactctgatggtatgtgccatttgtaaaataaaatagagcagaaaaacacaaaaagagaacactggttcagacattcagtgggcaagtaaattatggactgcaaaataatgatttttattcaagaaagctttaaaagttttatatccagatatacaaccacaataaagcaaaataacctactatcaaaatagaaatgttgctatctttataagtgcaatttaatttgtaaatagagtttgaatcaaagtatcacaaaatactgcttcaagatttaattttaaatctgctaatttaagggatattgggaaaagttttggtgtgtttctgttgatttcttttttgtatgctgtgataaaagagaaatgaaaagtgccagtcactgtgtggtgtctaggaaaatcatatatatttttttctccaagaaataaattcatcctggacattggcnnnnaaaaaaaaaa

SEQ ID NO: 67666 - DNA, 1173 bp, Homo sapiens
gcgctttggagaaggagagaatctccctgaggctctgcaaaacattcaggatgagggaacaggggaacagctgtctcctcaagaaaggatttctgagaaacaactaggtcagcatttgcctaatcctcattcaggagaaatgtccaccatgtggcttgaggagaagagagagacctcccagaaggggcagccaagagcccccatggcccagaagctccccacctgcagggagtgtgggaagaccttttataggaattctcagcttatttttcaccaaagaactcacaccggagagacatactttcagtgcaccatctgcaaaaaagcctttctgcggagttcagactttgtgaagcatcagagaactcacacgggagagaagccctgtaaatgtgattactgtgggaaaggctttagtgacttctcaggattgcgccaccacgagaaaatccacacaggagagaaaccctataaatgtcctatctgtgagaaaagtttcattcagagatcaaactttaatagacatcagagggttcacactggagagaaaccttataaatgttcgcactgtgggaaaagtttcagctggagctcgagccttgacaaacatcaaagatcccacttaggaaagaagccctttcaatagccagtaaccaaactctctttccccatttctatctcccagcccagtcacaaaaatactcagctccatcaagaggaattgtgtctaagaggatacccctgttaatctccttttttcttggattggagaggagagaatctggacatggctttggacttggaggatatcttggattggattgcacaatggcttaaattcttgattctgcctcaggagaaagaatagtcttcatgtttccactcatccttcctttggacccatcggggaaaaagtctaaattggagatccagttttagaagtgctttctgggaagcatttaatgggattagctgtagtcactgcttatgggaagaacctcagatcagccccttaaaatgagttctagagcaggtcttctgttccagaaggggagaagcatagagggcctgtgagctcacgtgtgttctttgtcataggggtgaaaaactaacttcaagtgtcccttgtttgaaataaacttagcagagtcactttctatcttaaaaaaaaaa

SEQ ID NO: 67667 - DNA, 435 bp, Homo sapiens
ggcacgagattccataataaactttagagtaattttgtcaccatccacaaaataatttactggtttgagattgcactgaatctatagatgaagttgacatcaatatagaataaaactgacatcaatagtgagtcttcctatccatgaatacaggatgtctttatgtcttttaaaatttctttcagcaacattttatagctttcaggtagttaactttttaactgtagggttttacatgagatcatgtgatctgtcagcagagataattatactttttccttttcattttggatgcttttttcttgcctgattgctttagctaaaacttccaatattatgttgaacagaagtggcaaaagtgagcatcctcgtcttcctgatcttggaggcaaagctttcagtctttcaccattgagtgtgacattcactgtgggg

SEQ ID NO: 67668 - DNA, 832 bp, Homo sapiens
gatttacttgcggtgaaggaaaaatttgaagaggagaggctgagggaacagcaggaaatcgagctgtagaagaagagacaagaagaagagacctttctccgcgtccaagaagaactccaacgactcaaagaactcaacaacaacgagaaggctgagaagtttcagatatttcaagaactggaccagctccaaaaggaaaaagatgaacagtatgccaagcttgaactggaaaaaaagagactagaggagcaggagaaggagcaggtcatgctcgtggcccatctggaagagcagctccgagagaagcaggagatgatccagctcctgcggcgtggggaggtacagtgggtggaagaggagaagagggacctggaaggcattcgggaatccctcctgcgggtgaaggaggctcgtgccggaggggatgaagatggcgaggagttagaaaaggctcaactgcgtttcttcgaattcaagagaaggcagcttgtcaagctagtgaacttggagaaggacctggttcagcagaaagacatcctgaaaaaagaagtccaagaagaacaggagatcctagagtgtttaaaatgtgaacatgacaaagaatctagattgttggaaaaacatgatgagagtgtcacagatgtcacggaagtgcctcaagatttcgagaaaataaagccagtggagtacaggctgcaatataaagaacgccagctacagtacctcctgcagaatcacttgccaactctgttggaagaaaagcagagagcatttgaaattcttgacagaggccctctcagcttagacaacactctttatcaagtaaaaaaaa

SEQ ID NO: 67669 - DNA, 432 bp, Homo sapiens
gcccgggacgacccacgcgtacgactcagtttaagtccaaactttctaataatttgatgtagcagcgtaatgggctgcattactagtgagttccttatgtgagtgtgcgagcatatgctggatgacttatctagaataatgtagaagagaattaaacattgaatgggagcttaaattagttaatttctgaggttcccttccattcttagaattctttgatttttatattgaattgagagaactagtatagtttttatttcagcaaattataacaccattgttctcaaggcatggaaaatgtgcttttcatctttaagatactaaaccttttcactcatggcaattttttttagctagcctctaagcttggaaagcagtggaccccattaataatcctggccaactctcttagtggaactaatatgggagaag

SEQ ID NO: 67670 - DNA, 919 bp, Homo sapiens
atacagagatgtgatgctggagaactataagaatctagttgcagtagattgggagagtcatattaataccaaatggtcagcacctcagcagaattttttgcaggggaaaacatccagtgtggtggaaatgaattcagagtaaaagggagaatctcaatgaaataaatttggaaaacttctatgaaccatcattaattttcaccaacaggagagaaaccattttggagaggaactgtttgactttaaccaatgtgaaaaagccttgagtgaacactcatgccttaagactcacaggagaacttactttagaaagaaaacctgtgagtgtaatcaatgtgaaaaagccttcagaaaaccctctatctttactttacacaagaaaactgatatcggagaggaacttcctaactgtaatcaatgtgaaacagccttcagccaacatctacatcttgtttgcaagaaaactagccaaaatctacatcttgtttgcaagaaaactcacactcaagagaaaccatataaatgcagtgactgtgaaaaaggcttaccttcctcctcacacctcagagaatgtgtaagaatttatggtggagagagaccatatactcataaggagtatgtcgaaaccttttctcattctacagccctttttgtacacatgcaaactcaagatggagaaaaattctatgaatgtaaagcatgtgggaaacccttcactgagtcgtcatatcttactcaacatttaagaactcatagtagagtgttacctatagaacataagaaatttggcaaagcctttgctttttccccagatcttgctaaacatataaaacttaaaactagaggaaaacactatgtttgtaatgaatgtggcaaagaatttacttgtttctcaaaactcaacattcacataaggggg

SEQ ID NO: 67671 - DNA, 418 bp, Homo sapiens
cgacccacgcgtccgtacttgtgcaactcctttactgggccttctaatataaatcgtgttttgttgaactgtctgtaaatgttttatcaaatgatttggaccaatggaccagccaagcttccagccagttcaacaaaacacgatttatacttgtgcaactcctttacagggccttctaatataatttggaatttggggagcagatacatattcactgttatcaagcatggtttgggtttttttttaaacacaattttagctgtgttaaacattgctggcaggaatctaaagtgctacaaattctgtgaaggacaatggcaacaccaaacaaaattacacatgtgtttgccccatgaaagcaatccatcttctaagaatttaccctaaagttgtgttttagtccgttcttgcacttagg

SEQ ID NO: 67672 - DNA, 1132 bp, Homo sapiens
tgcgtacagacagccaaagcaacggcaaagaatcatggctgagagggaggatgaagagttgcttcgcccagttacgaccacccagcatctctcagaatacaaaagcgaacttgacttcatgtcaaaggaggaaaagtctagaaagaaatcaaggcgacaaagagaagtgacagaaataacagaaattgaggaagaatacgaaatctcaaaacatgctcaaagagaatcatcctcatctgcgtctagactactgagacgacggcgctccctgtctccaacttatattgagttaatgaggccagtgtctgagctgatccggtcacgtccacaaccggctgaggaatacgaagatgacacagaaagaaggtcacctactccagagagaactcgcccacgatcccccagccctgtgtctagtgagagatcactctcgagatttgagaggtctgcaagatttgatatcttttccaggtatgagtccatgaaagctgctttaaaaactcagaagacatcagaaaggaagtatgaagttttgagtcagcagcctttcacactggaccatgcccctcgaatcacactgagaatgcgctcgcacagggtaccatgtggccaaaatacacgttttattttaaatgttcagtctaagccaactgccgaggttaaatggtaccacaatggtgtggaactccaagaaagcagtaagattcattacaccaacacgagtggagttctcaccctggaaattctggactgtcatactgatgacagtggaacctaccgtgctgtgtgcaccaactacaagggcgaagcttctgactatgcaacgttggacgtgacaggaggggattataccacctatgcttcccaacgcagagatgaagaggtccccagatctgttttccctgagctgacaagaacagaggcgtatgctgtttcatcatttaagaaaacatctgagatggaagcttcgtcttctgtcagggaagtgaaatcacagatgacggagacaagggaaagtctctcctcatatgaacactctgcatctgcataaatgaaaagtgctgcattataagaaaagtcactggaagaaaaatccacaaccagaaagatcaagacgactttggcggcaagg

SEQ ID NO: 67673 - DNA, 340 bp, Homo sapiens
agctgttctcaataggagagtggttatctgcaggagatggcaagtctttgctctaaaatcctaagggcctgagctgtggttcacctatgggagcctgccaagagctccaaacaacatccctaaatgccactgtcatttcaagcaccactgtcattggatctgctggatcatatgccccaagtggcagagcagcttgcagagcagcctggagctgttgcagagcattttcttattctggaccccactcaaaactagcagcttctcaggtcgcttcataaataggccagagtaacaaagccatatgaggaatatgttgcctccaaaatccaaggaggtccta

SEQ ID NO: 67674 - DNA, 230 bp, Homo sapiens
tgtgttgcaatcttacgtggatgctgatgctgatgaaaacttttacacttgtgcatggacctatgatagcaatacgagccatcctctgctggctgtagctggatctagaggcataattaggataataaatcctataacaatgcagtgtataaagcactatgttggccatggaatttcagctcattgatagcatttccatggccaacatagtgcctagttctagatcgcga

SEQ ID NO: 67675 - DNA, 2058 bp, Homo sapiens
aaagaatacaagaaagacctggagtcaataattaaagggaaaggaatgcaagctggcactgacacccttgaaatgcagcatgccaagaaggctgcagagatagcgagtgagaaagactataaaagagatctggagactgaaattaaagggaaagggatgcaggtgagcacagacactcttgatgtccagagagctaagaaagcatccgagatggccagccagaaacaatacaagaaggacttagaaaatgaaattaaagggaaaggaatgcaagtgagcatggatatcccagatatccttcgagccaagaggacatctgaaatctatagccagagaaagtataaagatgaagcagagaagatgctttctaactattctaccatagcagatactcctgaaattcagagaattaagacaactcaacaaaacattagtgcggtattttataagaaagaagtgggagctggcactgcagtgaaagatagcccagagatcgaacgagtgaagaaaaatcagcagaatattagttcagtgaaatacaaagaagagattaaacatgcaacagccatttctgatcctccagaactaaagagagttaaagaaaaccagaagaacatcagcaatctccagtataaagagcaaaactacaaggccactccggtaagcatgaccccggagatagagagagtgaggcgaaaccaggagcagctgagtgcggcaagtcgtttctgtttccttttatattttctcaaacataacatatttttatttaaaaatatgccctttggaaggccattatccttagcaaactaacacaggaacataaaaccaaatactgcataataatgagagctaaatgatgagaatacatggacacatagaggggaataacagacaccggagcctgttggacgggagaggatgggaggagggagaggatccggaaaagtaactgttgagtactgggcttaatgccggggtgatgaagtcatctgtacaacaaactcccataacacaagttcacctgtgtaacaaacctgcacatgtaccgctgaacttaaaagttttaaaagaaaatgaatttgagcaacatgcaattatatggatgaatcatatcattataacatgaaaaagtgatatgtacatgcagcattaattctttgtaaatttaacaactgcaataataacgatgatgataaacggatatctccagatttaataaactatctaaaaatttaaaaaggaaaagtttacaccctctgcatttttggatgttccttttcacatttccttgttgaagggcatgaactgcgtgtccaggaaatttgggactgtgttgctgtaccttagctgtgtttgcttattcaagagatcttcattaagtacccaaatgtactgggcattgtcctggtcacccagacacaaagatgggtaaaatataagggagaacttcaacggggaactgcaatttctgatccaccagagctgaagagggcaaaagaaaaccagaaaaacatcagcaatgtttattacagaggtcagctgggaagagctaccactttaagtgtaactcctgaaatggaaagagtgaagaagaatcaagaaaatattagctcggtaaaatatacccaggaccataaacagatgaaaggtagaccaagtctgattttagatacacctgctatgagacatgttaaagaagcacaaaatcatatttcaatggtaaaataccatgaagattttgaaaaaacaaaggggagaggctttactcccgtcgtggacgatcctgtgacagagagagtgaggaagaacacccaggtggtcagcgatgctgcctataaaggggtccaccctcacatcgtggagatggacaggagacctggaatcattgttgacctcaaagtttggcgcacagatcctggctccatcttcgaccttgatcccctggaagacaatattcagtctagaagtctccatatgctctctgaaaaggcgagtcactataggcgacactggtctcgatcccattccagcagtactttcggtacaggtctcgga

SEQ ID NO: 67676 - DNA, 411 bp, Homo sapiens
cccacgcgtccgcttcactgtcatctttttccactttgactacaaagatatttcagagagcttcttactggatttcttcatggtgtccattttatttagcaagctcggggacctgcttcacaagttacagttcgtcctgacatatgtggctccttggcagatggcttggggttcttcgtttcacgtgtttgctcagctctttgccattcctcgaatggaaacatacttaggataatccttgagtgataatatattttatattttgaaaaatgatttcttccaggccctaactttttttaaaaaaatgttaagcatacgaagagtggatctcacaatacacattgttctatgttgctattcttagatgtgcattgatatttctaaagtgtttcaaggtcatttggcagaacc

SEQ ID NO: 67677 - DNA, 1137 bp, Homo sapiens
cttctaccactcccactgccacacagccaacctcactgtggcaactagctgttcagtctccaggccagtcaaaccagaccacgaatcccaagctaggtaaggcttcggaagaggagatggcagagccaggttgggatggtgggtggagaacagatgattatcacttggtcaccgtagctccctccttcccctctccacctgcagtgagcattgccagctttgtcactgtgaagcgacctggtgttacaggcgaaaatagcaatgaagtggccaaattggtgaatacccttaacaccatcccttccctgggccagagtcctgggccagtggtggtgtccaacaacagctctgctcatggctctcaaagaaccagcggacctgagtcttcaatgaaaggtacaataacctgaaagactctgagcagccagtcattcaaaaacattaataaagggtttgttgtatcagagctttatactcagaaatagaaaaataaaataaaatacagctgctgtagtttgttcttacagaaactttagtaaggagaaagccacttacaaaaagtgtaactgaatcagctccaagaaattatgtgtgtaattgtgctttggagattagtgaaattgattgattaaagatgggtgagataatgaaagataacttcatggaagagatggatttctgagcaaggttttaaagttaggatttggtagagagatcttcaggttgagaatgatgagcatgagggttttcagtggtctagagcaggggtcggcaaatgttttctgtaaagggcctagtagtaaagttgtaggctttgtgcacaatatatagcctctgttgcagctattaactgtgctgttgtggtggggaagcagccacagatacataaacgaatgagcatggctgtgctccactaaaaactatttatggactctgaaatttaagtttcataaaattttcatgtgtcgaaaagttttattcttttatttcaaccatttaaaaataaaaaccgcaaggtatagtggctcacacctcatcccagcattatgggaggccaagacgggaggatcacttgagcctaggagtttgagaccagcctgggcaacatggtgagatcccatctctacaaaaaaaaaa

SEQ ID NO: 67678 - DNA, 705 bp, Homo sapiens
caagaggtcaattgtgtgtatgtgcatctgacggctctcaccttctcacatcctctcactcagcgtgaaggggccagagctcattaacatgtatgtgggccaaagtgaggagaatgtgcgggaaggtgagtgagcagggaggggcagggcgtcccatgcttcccaaaccccgatggcccccaagccaccccctactcccaggctactcatgatcattcctaatcctcctttctacaagtcaggttcctgcccagctgggtctagtacctgggatgccagtgctgtattgtcaggccccagtttccctccctgctctcacctaacttcaaccccccacaagccgagctttgccctcctgtgggcccctctctctcttcagtgtttgccagggccagggctgcagctccatgcattatcttctttgatgaactggactctttggccccaagccgggggcgaagtggagattctggaggagtgatggacaggtaggggtctgagtgggaatgaaagctgaggggtccagggtgggaaggatatgagaaagctcacagcagtcttcagagtccagagatagaagttcctgctgtttcagttctgagataatataatggaagctgaaaggggccatgaaattgggcaggtgggccccttgtactgctcatctccaccctcattttgtgcctccttcacccctcaacgaaa

SEQ ID NO: 67679 - DNA, 796 bp, Homo sapiens
tttcaggaggctgcagttcagctttattctcatgcccctcatgtccagttaaggctcaagatcagcccaggccacagtcccccagcactgggactcagcttcccacctggacagggcagggggttctcttgccaactcctgccagcctccttcagctgggggatcccccagagaccgctgcctcagcgggagccacctggaagaaccagaactccagcctggagctgctcgtgggggccagccatcccccctgtccacacactcgtcccagctccatctccgggccccggcgctgaccgtggaggatctcagggcccaggcctccttgtccaaggactccccttggggtccctggctccctgagctcttgggctgcctggggcctccgctgacactccagtgccgagaaggctgcactcccaagcctgctgttcccacggtgtcactggctgagggatggggtgaggggacgtttctccggttcctgtacctcagggccctctcggttggcatctgtttcgtgttcctgcagggtctcagcggagttctcccatcccacaccaggtcctgggaggcacaaggcaaccactgggcccagggccagtgcggaagtggacagagcttgcaggagacacaggggacaagaaggaagcctcctcccccaaggagctggtgggtccacaaagagttggggggctggctggtacagtgacccttgtccctcacctttgctgtgggagacgggcgcccccagggggcctggatggcgctgtcgaaatcgttgcctaggggtgtc

SEQ ID NO: 67680 - DNA, 544 bp, Homo sapiens
ggtcgacccacgcgtccgaaaaataaagaaaatggaaaagttgagaatgggttaggcaaaactgataggaaaaaagaaattgtgaagtttgagccccaagtagatacagaagctgaagacatgattagtgctgtgaagagcaaaaggttgcttgccattcaagctaagaaggaacgggaaatccaggaaagagaaatgaaaggtaaaatttcatgctgagaaaaaggggaagctctgtagaagatagtaaaagaaaggaaattactgaggtaatggtagggtctctgtttgtttacttatttctgtatgtaataacccagcacctattgggatgtattttattttttattagttctgttgataatttcatatttcagctggagtgttcagcctggcattctgattagttaataagttaatgtgatgatggcatcttttctgggttcagtaaaggaccaaatctacaaatagaaatagtggaaacaacataggactctggagttgactgaccttgggtcaggttctagctctgacttagcttgac

SEQ ID NO: 67681 - DNA, 783 bp, Homo sapiens
  misc_feature (1)...(783): n = a,t,c or g
aggaaaatctcatcacgtttcccagaatccaacccatttcaaaggatgatttcagacgctatcggggagctattgcacgcaagcgaattcgcctaggcagaaaatatgttatttcccacaaagaagaggttccactttgcatacactgggatatcagcaagcaggcatccctgagtgacagcaatgtggaggccctcaaaaaactggcagccaaaaggggttgggaggttaccagcactgtggaaaagataaaaatatatactctggaagagcatgatgttttatctgtttgggttgaaaagcacgtgggaagtccagcacatttggcttatcgtctcttgtctgactttacaaagcgacctttgtgggacccccattttgtgtcctgtgaagtcatagactgggtgagtgaagatgatcagctgtatcacatcacctgtcctatactgaatgatgacaaacccaaagacttggtagtactcgtatcacgaagaaaacccctcaaagatggtaacacttacacagtggcagtgaagtcggtcattttgccatcggtccccccgtctccacagtacatcagaagtgaaatcatatgtgccggatttctcatccatgctatttgacagcaattcatgcattcgtatcttactttaaccatatgtctgctaggcatccttccttactttggctgggaaatcttgggtgggctgggtccaaaatccattggaaggaaacagcagcctcttgtatacagttcttaggggatcctccctgatggngggg

SEQ ID NO: 67682 - DNA, 459 bp, Homo sapiens
ttttgggggcttccccaaaaaaaaaacccccccttcaaaaaaagggggggattttttttttttttttaaaaaaaaaaaggggggggggcccccccccaggcaaaaaaaaaaccgggggggggggaaaaaaaaaaagggggggcataaaaaagccccctcggggggttttacggggtttttaggggcccttttaatttaaaggggcccattttttttttttttttttttttttttttttttttttttttttttttttttagttaaatacgcacaattttattgattgaagattaggacaaaaacattaaaccaaatacaggacaaagcaccagaggccatagatccccaccatgcatgtcaccaacctctcctcctccaaggtacttaaaaaataggggagaggggaaaaaaaaggtccttcttgacacagacaccatcttcagaatgttaaaaaaaaaa

SEQ ID NO: 67683 - DNA, 411 bp, Homo sapiens
tccgtcgcgcacgaggtggcctcgttggctttaccttggttcgcggtcgtccttggttatcgtgagcgtccgcatgtctctgggaggccaagcctaggggcgccacagcgcctgcgcgcgtacggcggccggaaggggctagaggcggctccctgggtgacaaccgcgcgccccacctttccccacgtggccgcgaagaccggcacctgtgcactgagtgcctgctgcgtgtcgggccccgtcctaggcagtggggacaaggaggctacagggtacaaataaatgagtgaacgatgttgctctagatacagctcaggagcatctatcggctgcacgccaacatcaacacaggcgaagatggtctccaagcgcattgcccaggagacctttgatgcagctgtgcgcgagaat

SEQ ID NO: 67684 - DNA, 1116 bp, Homo sapiens
tttgagtcgactacccgtgcggtggaattcgttacaagtaattgccttagtttttttccccttaagtctacagaataagttttttctgatctatttgataggtttttgtttcaggtgttcaggagagatttaattctgtttaaagaacaaatatatggtgggaatttcttggtttttgagttatatataatatctcttccctctgactaatcttatttgaaaatttagaactgtgggccaccagatgacttcagatgtcccaatccgacaaagcagatctggacagtgaatgaagctctaattcagaaatggctgagctatccttctggaaggtttcctgtggagatagccaatgagatagatggaacgttttcttcctctggttgcctaaatggaagttttttagctgttagcaatgatgatcactatagaacaggtaccagattttcaggggttgatatgaatgctgctaggcttttattccacaaacttatacaacctgatcatccgcagatatctcagcaggtaaatgagaaaatgggacagattatacagtatgataaattttatatacatgaagtacaagaattgatagacataagaaatgattatatcaactgggtccaacagcaggcctatggaatggtaggttttctgtgcaatttgtgatttcatttttatgtatatgtatctaataaaaaaagaaacaattgcttggttttgaaatgagaaagttttttcagaacttttatccagaacttactttttaaataataacacattgcaaaggagtgctatatattttacaatatttatatgcaaacattctactcttttaccaaagccaaaccaaagaaatggattacactgtaaaacaaaacaaaacaagacaaaaaaaaacctacaagggtgaaagggatttttaactcttttattttccatgagggtgcctcttatttctccagtgttgaaaatactggcattcttcatactggaactcctaagaatgcattattgttgtgaaattggtgcttcaagactaccaaaagaggactgggtgtggtggctcatgcctgtaatcttagcactttggagcctgaggcaggtggattccct

SEQ ID NO: 67685 - DNA, 464 bp, Homo sapiens
ggcacgagataggactaggagttaccaatgccacaggaactggaatagcaggtttgtccccttccctgtcctactatcatacactcttaaaggatctctcagacagcctacaagacatagcaaaatccacccttactctccaatcccaaatagactccttagcagcagtaactctgcagaaccaccgtggcttagacctcctaaccgtcgaaaaaggtgggctatgcacctttttaggggaagattgtttttccaccaaccagtctggactagtacgagatgctgcctcgcagttaaatgaaaaggcttctaaaatcagacaatgtctttcagacttttaacaccaatctttggagctggggctttgtgggcttctccctatagctgggcccctcatttccatcattctccttctcctatttggaccctgcctcttccgtctagcctctcagttcctacaaaag

SEQ ID NO: 67686 - DNA, 444 bp, Homo sapiens
cctccttattatggagccagcagggtgtggcctgggcagcggccccagtggagagtgaagacccagctgctgcccaggcctccccggcccagggggacgccagcgaggctgatcccggagcaaaaaatgctgatgaggctgcttccaccaccaaagaggccgccagggttgcccctgccactggggaagatgaaaatgcccctgcaggccttgaaggcctaggtcagggaaggtcccccgacgcccctgggggcctcccagccaggatgggcagtgcagtcgacatggccccaggaggtcccagctgggagccagagggccttgtccaggttggaggccaggaggctgaggagcctccccaggaggggctcatgcccatcttagaggagtcagaaaacgaggatgaggatggggctggggaggcgggcaagcccaagtcccccg

SEQ ID NO: 67687 - DNA, 436 bp, Homo sapiens
ataacccatttgggaggctggctgcaaatggctttgcttagcatggccatctggaaggaggctttaaagtcttccacatggccagggccttgaagggattaacccaacctcttagttctgattatgtgttcttaaatcaaacgggccaggacctatgtccacagcaactccagcaccatggccagacctgagtcctcctctctctgcagagggacgacatggaggctgtgccagggtacctgtccctgcaccagacggctgacgtcatgaccttgaagtggacacccaaccagctgatgaacgggtctgtgggggacctggactatgagaagaggtagggcactgggtctgatacgtatcccttgggtccctccactcgccttggcacaaggaagttcctccccgggggaggggaggtttgcatcccgcccctgct

SEQ ID NO: 67688 - DNA, 780 bp, Homo sapiens
  misc_feature (1)...(780): n = a,t,c or g
caaggcgacagcaatccaggggtattacctcttctaaatccatcatcttataagccatttctactgcttcctttaatgtcttatccttatgaacctcaatttanttttccatcattacttgttttgtaggatgcaaacagaataattttatcttgcatgtattgcgctcaatttctcgttgtctcttttcttgttcttccaactctctctctttctgcaccaagtttttaatatgttctgggtattcatccacttctagaaattttgcatttctggctggatccttcagtctatagatcagcatatatgcatttgtggaacttgcgaaagcactagaataatatcctctgcttcctgaagatccaccatgtgttttcttaatgtcctcttgtgttatcctgctgacatgttgatcattgaagctgtaccactgctcatcactgaatgactttatacatgcataataatgaccaccagcagcgctcccagaatgaaccataacagagaaaagttcatagatcaaggaattcttttcaagtccagattttgagatcttttcagttccactattggtttcaagacagattccttcatcaacaccatcatcattggagaaatcgttgctcatctgatcactgtgacaactaccttcattttctgctccactgtcagtgcaactttcagtctgaggagatttctcatcttcaacatcaataaaagtactcatatctagttcctcgggaaatgtcattcgatcattcagtttaatcctatgcatgg

SEQ ID NO: 67689 - DNA, 867 bp, Homo sapiens
ctcagtcatgccagtgcctgctctgtgcctgctctgggccctggcaatggtgacccggcctgcctcagcggcccccatgggcggcccagaactggcacagcatgaggagctgaccctgctcttccatgggaccctgcagctgggccaggccctcaacggtgtgtacaggaccacggagggacggctgacaaaggccaggaacagcctgggtctctatggccgcacaatagaactcctggggcaggaggtcagccggggccgggatgcagcccaggaacttcgggcaagcctgttggagactcagatggaggaggatattctgcagctgcaggcagaggccacagctgaggtgctgggggaggtggcccaggcacagaaggtgctacgggacagcgtgcagcggctagaagtccagctgaggagcgcctggctgggccctgcctaccgagaatttgaggtcttaaaggctcacgctgacaagcagagccacatcctatgggccctcacaggccacgtgcagcggcagaggcgggagatggtggcacagcagcatcggctgcgacagatccaggagagactccacacagcggcgctcccagcctgaatctgcctggatggaactgaggaccaatcatgctgcaaggaacacttccacgccccgtgaggcccctgtgcagggaggagctgcctgttcactgggatcagccagggcgccgggccccacttttgagcacagagcagagacagacgcaggcggggacaaaggcagaggatgtagccccattggggaggggtggaggaaggacatgtaccctttcatgcccacacacccctcattaaagcagagtcaaggcatctcaaaaaaaa

SEQ ID NO: 67690 - DNA, 510 bp, Homo sapiens
ggacggcgctgcggaccaatcgcgtgcgtctatgcaaatagcggtcgttctggcgaactctgctcccgcggggtgagagttggccgctcttcggccgagctgcccgcgcgtcctttctccgtgcgcgtcgtcaggcgtgtcctctccgcgtgtccacccacaggccgcccgcagaccacccccgccgcgcgcgggacacgacgccccccgcaggacccgcccatcagcccggaaacccctgagctgcttctcccggaggccgatgcccacccgggagcccccaaagactcgcggctcccgggggcacctgcatactcacccgcctgggcctgggcccccggtgagcctgaccgggagggggtccccaggccgggcctctaggcaaaagatttagcccctccagtttgagggactccggtttcccgacaccccgatttaactccagaccacgattcctgtggcagctgcagggactggcgccccgaggcctcaaaaccagcgccccccgcc

SEQ ID NO: 67691 - DNA, 368 bp, Homo sapiens
  misc_feature (1)...(368): n = a,t,c or g
ggaaaaactcccagacaaatacctgggaacctggaacaattataatgtggggaagagggtatgcttgtgtttcaccaggagatcatcaatcccctgtctgggtgcccactagaagactttaacttcgtgtgaatactgacaatgaaaaacacagggaagagatgtccacgtcagagactgccctcatacctggtgagatctgtgccaactcctcaaaaactggcacaccaaatcaaaatggatctcattcaatcctccctaatggcaacagagacccctctaactaatcccacttctcctaattacctttctttttctccttacaaacctgaaaatctcaccatttctattagcctgaaaataacatn

SEQ ID NO: 67692 - DNA, 732 bp, Homo sapiens
agtccctcctgcactccagcaactccagccatcagtcatcttccagatccttggaaagtccagccaactcttcctccagcctccacagccttggctcagtgtccctgtgtacaagacccagtgacttccaggctcccagaaaccccaccctaaccatgggccaacccagaacaccccactctccaccactggccaaagaacatgccagcagctgccccccatccatcaccaactccatggtggacatacccattgtgctgatcaacggctgcccagaaccagggtcttctccaccccagcggaccccaggacaccagaactccgttcaacctggagctgcttctcccagcaacccctgtccagccaccaggagcaacagccagaccctgtcagatgccccctttaccacatgcccagagggtacgtcgtaaaccaatatttgaagcaatgtaagatttggggaatagacaaagtgccagtgggtttctgcaacagccagtcaacacatttattgagcaactattgtgtgtctggcactatgccaggtagtgaggacacacagagggaaacagtttagaaagagacaaaaacaaatcatcacggtagggtaggataaacgcggaggtaaagagatattctcaatcatattggccaaagctgaaggaatgattctttcagtctggagaacagaggaagcgacatccgagctggatctgggaaatggatcaaaag

SEQ ID NO: 67693 - DNA, 394 bp, Homo sapiens
cccacgcgtccgcttttctcttggttctttttcctggggcggggatgggagattcctaagtcggctcagctggctccttccctcagtttcagtttccatcttgggtctctgagctgagcagagtggcaccaggctgagttaagtgggactgccctgggcagacctacctactagagcagaatggagcttcggtcctaccaatgggaggtgatcatgcctgccctggagggcaagaatatcatcatctggctgcccacgggtgccgggaagacccgggcggctgcttatgtggccaagcggcacctatagactgtggatggagccaaggtggttgtattggtcaacagggtgcacctggtgacccagcatggtgaagagttcaggcgcatgctgg

SEQ ID NO: 67694 - DNA, 690 bp, Homo sapiens
tcggaaccgccctgaattacctctgtcgacccacgcgtccggggaaacgcttctacaggatatggaaaaatttggctcgatgatgtttcctgtgatggagatgagtcagatctctggtcatgcaggaacagtgggtggggaaataatgactgcagtcacagtgaagatgttggagtgatctgttctgatgcatcggatatggagctgaggcttgtgggtggaagcagcaggtgtgctggaaaagttgaggtgaatgtccagggtgccgtgggaattctgtgtgctaatggctggggaatgaacattgctgaagttgtttgcaggcaacttgaatgtgggtctgcaatcagggtctccagagagcctcatttcacagaaagaacattacacatcttaatgtccaattctggctgcgctggaggggaagcctctctctgggattgtatacgatgggagtggaaacagactgcgtgtcatttaaatatggaagcaagtttgatctgctcagcccacaggcagcccaggctggttggagctgatatgccctgctctggacgtgttgaagtgaaacatgcacacacatggcgctctgtctgtgattctgatttctctcttcatgctgccaatgtgctgtgcagagaattaaactgtggagatgccatatctctttctgtgggagatcactttggg

SEQ ID NO: 67695 - DNA, 766 bp, Homo sapiens
atagaaccttcccatcctttttcccttgtatgaagcttgtgtcctcaatcaccgcagaaataggttatgacagttgtcttttaagcaaggagatgtaagccttggttctgtttctcatagaattaaataaacttgaaatgtgcagggctcattgtggaatcacccgagtgctccgaaactccctgaaatccactcattaacaccagacaggtgcgactcctggtgagccaggtattccaccgtgcacctgttctgtttcacctgcagggtaaagaaaaagtactggaagattgtcagctgccgaaggtcgatctcgtagctcaggtgaaacagcttcaggaaaaactgaaccgtttgctgtattccatgaccttccagaatgtggatgctgccgacaccaaatctctgtggcccatggcctcagcacacctgttggagagcagctggagtgatgattcctgtgacggagaagagcctgacatatcaccccacatagacacatgtgatgccaatacagccacggggggtgtaactgatgttatcaaaaatcaggccatagacgcgtgtgatgccaatacaaccccagggggtgtaactgatgttatcaaaaattgggattccttgataccagatgaaatgccagattctcccattcaagaaaaatcagaatgtcaggacatgtctctttcttcaccgaccagcgtacttggtggctcccgccaccagagccacactgcagaggctgtgccccgtaagagcccggtcg

SEQ ID NO: 67696 - DNA, 672 bp, Homo sapiens
tggtagagtatcacgttcttcaagtgccaaagtaaccataaatgtggttgatgtcaatgacaacaaaccagttttcattgtccctccttccaactgttcttatgaattggttctaccgtccactaatccaggcacagtggtctttcaggtaattgctgttgacaatgacactggcatgaatgcagaggttcgttacagcattgtaggaggaaacacaagagatctgtttgcaatcgaccaagaaacaggcaacataacattgatggagaaatgtgatgttacagaccttggtttacacagagtgttggtcaaagctaatgacttaggacagcctgattctctcttcagtgttgtaattgtcaatctgttcgtgaatgagtcggtgaccaatgctacactgattaatgaactggtgccgcaaaagcatttgaagcaccagtgaccccaaatacttgagatagctgatgtatcctcaccaactagtgactatgtcaagatcctggttgcagctgttgctggcaccataactgtcgttgtagttattttcatcactgctgtagtaagatgtcgccaggcaccacaccttaaggctgctcagaaaaacaagcagaattctgaatgggctaccccaaacccagaaaacaggcagatgataatgatgaagaaaaaaaa

SEQ ID NO: 67697 - DNA, 948 bp, Homo sapiens
ttttttttgacttgtatcaccttttattacacaaaatagatttcagccacgttgcacattcattctccctacaaatctggcttttaagaaatccgtagggattcagtctcatcgatttcatgactttcctttcattgatgtcatgcctgtattgtagtcaaagtcctctcaaaggacaaacgcagatgtggcttctctttgggcaggcctgggccaggaccttaggggatctctgtgtccatggcataaatctgccacccaacggcttctcagcctcgacctcggcgggcacctcaactccgtagacctgcagggccaggtagagcaccgccacggcgatgtgctgggcctggaagcggaggcacagcgccccatggtagctgtcccgcagcagggcccaggcggtgacggcaacaggggtccgctgccagctgtggcggttcagccagttctggagggaaaccaggtagtggagcaggtacttgtgtggatgctggaaggagacctggaagcgcagaactctcagcatgagaagctcacactgcacgatgctgtcccggagttcccagaagcgggagtccaattccaggggctcaccgcttgggttaaagtacctgttggacacattgatgatgtcacgagtccgcaggtgctgctcttccactttgccggccaagtaaattgaagacatggcaatcaggtaagggtcataggcgtccaggttggtctcgcaaaagaacttatggtaaatggtgcaagcagtggcaatgggaatggaccgcatccctagcttgacacctgtaattccagctactcggaagcgtgaggaaggataattgctttagtccgggagacggaggttgcagtgagccgagatcacgcccctgcactccagcctggccaacagagcgagactccgtctgcctccatgatgaacctcgccactcg

SEQ ID NO: 67698 - DNA, 1829 bp, Homo sapiens
  misc_feature (1)...(1829): n = a,t,c or g
gggggaggcactattacccgtggctggagaggccagttctgtcgttggcagcttaaccctggaatgtatcagcaccggacagtcatcgctgaccaaatgaggacactaagatccagagaggtttagtaacatgcgcaaggtcacaagttcacagtgtgcctgcgtcgggaagggcagactgtgtaccagcaagtcctgtccctggagcgcccaagtgtcctccgcagctggaactggggcctgtgtgggtactttgctttctaccatgccctctatccccgagcctggactgtctatcagcttcctggccagaatgtcaccctcacctgccgtcagatcacacccatcttgccccatgactaccaggacagcagcctgcctgtaggagtctttgtgtgggatgtggaaaatgaaggggacgaagctctagatgtgtccatcatgttctccatgcggaatggactgggtggtggagacgatgccccagggggtttgtggaatgagcccttctgtctggagcgtagcggggaaactgtccgggggctgctcctgcatcatccaacccttccaaacccctacacgatggctgtggctgcacgagtcacggcagctaccacggtaacccacatcacagcctttgaccctgacagcacggggcagcaggtgtggcaggatctacttcaggatggacagctggactctcccactggccaaagcacccctacgcagaaaggagtaggcattgctggagctgtgtgtgtttccagcaagttgcgacctcgaggccagtgccgcctggagttttcactggcttgggacatgcccaggatcatgtttggagctaaaggccaagtccactacaggcggtatacaaggttctttggccaggatggagatgcagcacctgccctcagccactatgcactgtgccgatacgcagagtgggaagagaggatctcagcttggcagagcccggtattggatgacagatcactgcctgcctggtacaaatctgcgctgttcaatgaactatacttcctggctgatggaggcacagtgtggctggaagttcttgaggactccctaccagaggagctgggcagaaacatgtgtcacctccgccccaccctacgggactacggtcgatttggctaccttgagggccaggagtaccgcatgtacaacacatatgatgtccacttttatgcttcctttgccctcatcatgctctggcccaaacttgagctcagcctacagtatgacatggctctggccactctcagggaggacctgacacggcgacggtacctgatgagtggggtgatggcacctgtgaaaaggaggaacgtcatcccccatgatattggggacccagatgatgaaccatggctccgcgtcaatgcatatttaatccatgatactgctgattggaaggacctgaacctgaagtttgtgctgcaggtttatcgggactattacctcacgggtgatcaaaacttcctgaaggacatgtggcctgtgtgtctagctgtgatggaatctgaaatgaagtttgacaaggaccatgatggactcattgaaaatggaggctatgcagaccagacctatgatggatgggtgaccacaggccccaggttagcgggtaggggtttccaggaggcctgaggtgagaaactgggcaacaagggattgtagggctcaagaaagaatgactcattgtctattacacggcatgggagcagctggagctccagtctgacccccaaacccatgtccctgatcagtgctttactgtgggtgggctgtggctnggcagctgtggctttgat

SEQ ID NO: 67699 - DNA, 743 bp, Homo sapiens
atagaatctttgaaccgccccgacccacgcgtccgagataacactggtgatatcatgaccctgaaattcttgactggactttagaatttcataagcagcatgggtactgtgcacttggtcactgcaaatgggagtttcgattgccaatgaaacccaggtgaacaaaaggctttagtttcttctttgcattactgggaagtagtcactgctctgaccactcttggaaacgggggctcttttgttctaaagatgtttactatgtttgaacattgttccataaacttgatgtacctgctaaactgttgttttgaccaagtccatgttttcaaacctgctactagcaaggcaggaaactccgaagtctatgtggtttgcctccactataaggggagagaggccatccatcctctgttatctaagatgaccttgaattttgggactgaaatgaaaaggaaagccctttttccccatcatgtgattcctgattcttttcttaagagacatgaagaatgttgtgtgttctttcataaatatcagctagagactatttctgaaaacattcgtctatttgagtgcatgggaaaggcggaacaagaaaagctgaataatttaagggattgtgctatacaatattttatgcaaaaatttcaactgaaacatctttccagaaataattggctagtaaaaaaatctagtattggttgtagtacaaatacaaaatggtttgggcagaggactccgtt

SEQ ID NO: 67700 - DNA, 1857 bp, Homo sapiens
  misc_feature (1)...(1857): n = a,t,c or g
acgaccacacaggacacccagccaggggaattctgaagccagagagcagacccacgggcattcacgagncgcttctgcttcctctgcctggggcccctgcttcttcccgagaggctgcccccaaattcagacatacctctgtgggctctcctctggttcacgtttacagaggcataaggctgtcttggatcccaacagggcacccagccctgcatggggggagcctgggcctaataggcaccccctgtacctcaggctgtggcgggagcagagtccccccctccggcccctcttcctttaccccttctcctccagcaggggcaaaggggtaggctctagagccagcacaggtcactgcctgacctggactaaaaaccccacggccccactgtccacacactgcctccccaccgcccacctcggctgctaggcccctcgcctggactggactggggagggaaagcgccttttcctgcagctcttcagagccacagacctcagggtggagtgagcccatggtgggcagtgggcaaggcggtgggtggtgggcaaggcggtgggtggtgggcaaggtgggacctcctgcagcctggaaagaggagggaggccaaggccattccctaactccctcctgcccctggtctgaggaggagggactctggagtagcagaggggctgggaaagagggggcaggggctgctgggacactgagcaggagggaggcctgagcacactgctttggaaattattctaaacacaaaaaagggaaagaaaatgttatttctccctaagtcaggagcatgcagagctagcccacctcatgtccagctgtccactttccatcctggagaaagaacagtgtgcctcaaactcctgccctccccaggcctctggggcccgctggaaagggctctgaccccctggcccggccgggctctctagtggtgatccggctcattctcctgcaagttggaagcacaattttccccccaagtggaggaaaaggaaagggccccagcctactgaagaggtgtttattttttaactaacagcctcccaccccattaagactcaccaggagaggtctgagggccattcagaacccactcctgagtgggtgggtgggtgggactcagtccagagacctaacattcagaatatagcattggttgcctattttgagatggatttaatctcccacagtattcatgagaccatctgatggaatcagatccctgagccaccttgcaggacgttttccccaacctcttacaccctggatgtcactttggaaaccaagcccttggaagcaagtggggtggcatgggagagaagggaggaggtgggcacaggtggtgagcttatgtgtgggcactctactgcctcacagaagccagccaagtgccaaggtcagcttggctggtctgaggccaccttcttagccaaaaacctagggttcattttcaggactttgataatgaacaacaaaatggggacttctttgggcagatgctaggtcagttgttttcacctaatatcctcttttagctgcatgtatatttatttataattataaccctgggggactgcagccttcatctttattgggaatgagtttgttataaatcagaaatgggtccatgatgaccactgttttccaaacccagtctgttccctgctccctcgctggcaagccccaccacacaggagtgaggccaggggctaggagttctaagaacagaggctggggtgagggtggcacccaggcagctgcatctggtctgttttaatttaactgtatttaatttgctttcaaaattaaaagtcaaatacagtttttaacagtcaaaaaaaaaa

SEQ ID NO: 67701 - DNA, 516 bp, Homo sapiens
aaaagaaaagaaagtaatattgaaaaatacagtaatacagctaagacgatcctgtcacagatgagacattgagattttggttttttcaaacagggttatgttaccttagtagtagcaatgtaaagactcaacctgaacattaaacttttcatggaagtacaaaagaaatgagtatcctagaaattgattataatattgatgtctcaaattttatgtaagttacacataaatataaaatcccaaaaacatgcacctaccaaaacaggtggagaaaagagtgttttcaacaaatgatgctggaacaactgcacatccatatgcaataaaaggaagctggacacagactttaccctcttttaaaaaaaactgacccaaaaatggaacacagacctaaatgtaaaatgcaaaactatgaaactcctagaagataacacaggagagaatctaagggaccttgagtttggcaatgactttttagatacaacaccaaagacacaatccatgaaagatataaga

SEQ ID NO: 67702 - DNA, 498 bp, Homo sapiens
  misc_feature (1)...(498): n = a,t,c or g
ctgcattataagaggaaagtgtattcgcagttactgctgttaatgccagtgaaaaaacagttgtggaagcgttatttcaaagggattcacttgttcgacaaagtcagctggtggtagattggttagagagtattgccaaagatgaaattggagaattttctgataatattgagttttatgcaaaatcagtatattgggaaaatactctgcataccttaaaacaacggcagctgacttcttacgttggaagtgttcgtccgcttgtcactgaattggtaaatgttctttgaaatgaaagttgccttcaaagttaactgattttttttttcaggctgaggaattttttctcgtgggatctttgttttgctcttctaaaggtttgcacacactaacattttactctaaaacaactaagttgccttgggatcnggtgggatatattggaaacatntccgtgaccnttgaattgtaggaataggtgtggaagttacttactgt

SEQ ID NO: 67703 - DNA, 429 bp, Homo sapiens
agcatggcccaggaggagggtgggagcctgcccgaggtgcgggcgcgggtcagggccgcgcatggcatccccgacctggcccaaaagctccatttctatgaccgctgggctccggactacgaccaggatgtggccaccctgctgtaccgtgcgccccgcctcgcagtggactgcctcacacaagcccttccaggcccgccccacagtgccctgatcctggacgtggcctgtggcacaggcctagtggctgccgagctgcgggctccaggcttcctccagctgcatggggtggatgggagcccagggatgctggaacaggcccaggcccccggcctctatcagcgcctcagcctctgcaccctgggccaggagcctctgcccagcccggaagggaccttcgacgcggtgctgatagtcggagccctcagg

SEQ ID NO: 67704 - DNA, 363 bp, Homo sapiens
ggcacgaggaataactttggcggaaacttacctcgcctacctcgtgaggacagggcacctgctaatattttggggaggctgcaaaaccaacaaggaggccgaatcttccttccggatattttgaaacccgactgcgaaaactgggacagcgggctgaatgcggtggagtgtgcattacatttggaaaaaaatgggaattaggcactactggaactgcacaaactggccactgccaaaaatgacccccatttgtgtgacttcattgttacacattacctgcatgaacaagtgaaagccatcaaagatttgggtgaccacgtgaccaacttgcgcaagatgggagcgccccaatctggcttgggg

SEQ ID NO: 67705 - DNA, 741 bp, Homo sapiens
agatttttactaaggttgtttagtgtagattagctgtgaatatcttgactcctttaaggtaataaggcttttgtttgtttttatctttcacagctagaaaattatggcatgccgtttagcagaactgaagatgggaagatttatcagcgtgcatttggtggacagagcctcaagtttggaaagggcaggcaggcccatcggtgctgctgtgtggctgatcggaccggccactcaatattgcacacctcatatgggaggtctctgagatatgataccagctattttgtggagtattttgccttggatctcctgatggagaacagggagtgccgtggtgtcatcgcacagtgcaatgaggacgggtccatccatcacataagagcaaagaacactgttgttgccacagggtaggaatctaatttctactttatttcctttgtaaaaatgaataaatttcttttagagtgtctttattttaaggaaaatagaggcattgtagaatagcagttcagacacaggccttgatataaccatgtgagggtgatggcctttcccagccgtggttcctcacctgtaaagagtgaggacagcagcacctgcctcggggtgagaaagcatggccctcagtagtcggtagtggctgccgtcagcttcacagcttacctctcccgattttagatgaggcacctgcggcccaaagagtcacatggggttttctggcaaaatctctctttgtttagt

SEQ ID NO: 67706 - DNA, 832 bp, Homo sapiens
  misc_feature (1)...(832): n = a,t,c or g
ggcacgagagactgcatagggctcggcgtggtgactcacacctgtaatcccagcactttgggaggccaaggcgggcagatcacaaactcaggagatcgagaccatcctgtctaacatggtgaaaccccgtctctactaaaaatacaaaaaattagctgcgcatggtggcaggtgcctgtagtcccagccactcaggaggctgagacaacagatgcacgccaccacacccggctaatttttacagggtcctgctacgcaccattttatgtccctacctacagtgcacaagggttaaaatggctccccaaaaaggatactgcctttgaccatccctggctcacactcataatcccactcaattttactaacttggtggtaaagttgagccacgtacacggccgaggggattgtgactgtcgtgtcctcgtcgacctccttctcctgtcgctccagatccgcctcaatctccttgagctcttccagctctctggtgagctgaaggaggctggccttcagacgggtgtcctcctccccagcctcctgaagcccagcttccagctgctgcagctccacgcctccctggtgcacctgctccttcgcattgagaaggctctgggccacttccttctccatggtgaggatctctcgcagctgcttctcggcaccgtcttgcgtttccagcagccgctccaccacctgctcgtggcgccccagcagccgtcgctgctgcgcctccgcgcggttggcgcccagcaggctgagcagcccctggctcacctcctctatgtcgcggaaggcgaattccncggcntgtcctaggnanccagtccag

SEQ ID NO: 67707 - DNA, 372 bp, Homo sapiens
ggcacgagggctaatatcacacgcctgtggggcaccgtgaatgtgaaaaatgctggcagggaaaccctgggaaggctccttgcttactacccatggtcccaaaggttctttgacagctttggcaatctgtcctttggctttgtcattttgggcaacccctaagtcaaagcccatggcccgaaggtgctgacttccttgggagatgccttaaatctcctggatgatttcacgggcacctttgccccactgatttaactggactgagaccagctgtatgtctatcctgagaacttcaagcttctgggaaacgtgctgacgaccgttgtggcaatccatttaggcaaagaactcacccctgatgtgccagcgtca

SEQ ID NO: 67708 - DNA, 386 bp, Homo sapiens
ggcacgagaactggtcaaaggcttaaactcacacagatttaagttagtgcaaagaatatgttttttttgttttccaaagaaggtcctacctacaaactcatttttctttggattctgggataaacttaccatgaccacagagtcagggtcatagggtacgttgcaattctttgcaattccaatcaggtatctctccaccaggattttgggtggggcttccacactcagcttgtgcattaactgtaattaaaaagacccagggctaagatgcatgtataccaaccagcctaatcctcacctgactatgcgaagttagctcctctcattttacacggaatattgagggaaaaaaaggttcagagcacttaaatgatttttttcagagt

SEQ ID NO: 67709 - DNA, 363 bp, Homo sapiens
gtgagcttcattttctccaaattggaggaacctgtgatgatattgatgaagctgatatactagtggatggatctctttctaaaggaatagaaccatcttcagaaggttccaaacctttatcaaatccttcaagtcctggcatttcaggtatgatattaaatttttaaatgattttaaaaaaagaataggtagtatttatcatttttctagttgttggaagatgtaaacatattaaagtaagaagtgattctcaacctgtatggtatgttactcaatatttgtgaagtcatctaagaggttaaaacaaacatttcagccattaatgagcttttagtctaattagaggagggaaaaatcatataa

SEQ ID NO: 67710 - DNA, 1435 bp, Homo sapiens
ctctgaggagacactttttttttcctccctccttccctcctctcctcctcccttcccttcccctctcctcccctctctcctccttcccccctcggtccgccggagcctgctggggcgagcggttggtattgcaggcgcttgctctccggggccgcccggcgggtagctggcggggggaggaggcaggaaccgcgatggcgcctcagaagcacggcggtgggggagggggcggctcggggcccagcgcggggtccgggggaggcggcttcgggggttcggcggcggtggcggcggcgacggcttcgggcggcaaatccggcggcgggagctgtggagggggtggcagttactcggcctcctcctcctcctccgcggcggcagcggcgggggctgcggtgttaccggtgaagaagccgaaaatggagcacgtccaggctgaccacgagcttttcctccaggcctttgagaagccaacacagatctatagatttctttgaactcggaatctcatagcaccaatatttttgcacagaactcttacttacatgtctcatcgaaactccagaacaaacatcaaaaggaaaacatttaaagttgatgatatgttatcaaaagtagagaaaatgaaaggagagcaagaatctcatagcttgtcagctcatttgcagcttacgtttactggtttcttccacaaaaatgataagccatcaccaaactcagaaaatgaacaaaattctgttaccctggaagtcctgcttgtgaaagtttgccacaaaaaaagaaaggatgtaagttgtccaataaggcaagttcccacaggtaaaaagcaggtgcctttgaatcctgacctcaatcaaacaaaacccggaaatttcccgtcccttgcagtttccagtaatgaatttgaacctagtaacagccatatggtgaagtcttactcgttgctatttagagtgactcgtccaggaagaagagagtttaatggaatgattaatggagaaaccaatgaaaatattgatgtcaatgaagagcttccagccagaagaaaacgaaatcgtgaggatggggaaaagacatttgttgcacaaatgacagtatttgataaaaacaggcgcttacagcttttagatggggaatatgaagtagccatgcaggaaatggaagaatgtccaataagcaagaaaagagcaacatgggagactattcttgatgggaagaggctgcctccattcgaaacattttctcagggacctacgttgcagttcactcttcgttggacaggagagaccaatgataaatctacggctcctattgccaaacctcttgccactagaaattcagagagtctccatcaggaaaacaagcctggttcagttaaacctactcaaactattgctgttaaagaatcattgactacagatctacaaaaaaaaaa

SEQ ID NO: 67711 - DNA, 549 bp, Homo sapiens
  misc_feature (1)...(549): n = a,t,c or g
ggagataattgtggaagacgtagattatccccctgtgttcttttcacccttgtaccctatggaggtgtcggaagctacccaggttgggaatatcattggcactgtagcagctcatgacccagattcttccaatagccctgtgaggtactcaattgacagaaacacagacttggagagatacttcaatattgatgccaacagtggggtcatcacaactgccaagtctttggatcgagagacaaatgctattcacaatatcacagtccttgcaatggagagccagaatccatctcaagtaggaagaggctatgtggccatcactatacttgacatcaatgataacgcccctgaatttgccatggactatgagaccaccgtctgtgaaaatgcccagccggggcaggttatccagaaaatcagtgctgtggataaagatgagccatccaatggactccagttaaacttcagctaaacaacggatgcaactaatagcccctgtattgcggccgctgtataggatccgngggtncgtcgactagccttcaatag

SEQ ID NO: 67712 - DNA, 399 bp, Homo sapiens
ggcacatatccagtataacctgctgggggcaatccagtcctggtggaattctgggtgggctcaaacagtctgcaattttggaaatttactgaatggatttctttctgtgtaattggaactccaccatgtaactgtttttgtggtaccattatacagtttttgtccaagacacctaagccttactacaggatgagtgaattcttttccttctctagctatgcaatattgtccaataattgaggcttttagaacccagaaattgtcagggtggttcttttgggctgggaattcatcaggaactgggtctgcaggaactaattcttgggcttcccatggccattgatctcctgttacagttcctccacaaacataccattaagtgacttagacactgagctt

SEQ ID NO: 67713 - DNA, 1127 bp, Homo sapiens
  misc_feature (1)...(1127): n = a,t,c or g
agagaatccacactggagagaaaccttacaaatgtaatgagtgtggcaaggtcttcagtcacaagtcatccctagtaaatcactggagaattcatactggagagaaaccttacaaatgtaatgagtgtggcaaggtcttcagtcacaagtcatccctagtaaatcactggagaatccacactggagagaaaccttacaaatgtaatgaatgtggcaaggtcttcagtcgcaattcataccttgcccaacatctgataattcatgccggtgagaaaccttataagtgtgatgaatgtgacaaagcattcagtcaaaattcacatcttgtacaacatcacagaatccatactggagagaaaccttacaaatgtgatgaatgtggcaaagtcttcagtcaaaattcataccttgcatatcattggagaattcatactggagaaaaagcttataaatgtaatgaatgtgggaaggtcttcggtctaaactcatccctagcacatcatcggaaaattcacactggagagaaacctttcaaatgtaatgaatgtggcaaagcttttagtatgcgttcaagcctcactaatcatcatgcgatccacactggagagaaacatttcaaatgtaatgaatgtggcaaactcttccgcgacaattcatatcttgtacgtcatcagagatttcatgccggaaagaaatctaacacatgtaattaatgtggcagagtgttcagttagcattaaagccttgtaagacatacaataatttatactggagaaaaactttgcaagtataatgaatgtagcagagcctttagtttttgttcaaggcttaataaccgttagctagaccatagaggacagaaactttactaatgtactgaatgtggcaaggtcttaaggtaaaatctgagaccaggatttttcaaagaattccttgctggtgagaaacctaacaaatgtaatgaatgtggcaaggtcttcagtcgcaattcataccttgcccaacatctgataattcatgccggtgagaaaccttataagtgtgatgaatgtgacaaagcattcagtcaaaattcacatcttgtacaacatcacagaatccatactggngagaaaccttacaaatgt

SEQ ID NO: 67714 - DNA, 541 bp, Homo sapiens
ttagtttataaagaaaagacatttaattggctcatagttctgcaggctgtacaggaagcatagtagcttctgcttctggggaggcctcaggaaacttacaatcacagcagaaggtgaaggggaagcaggcacgccgtacatggctgggctttcggcctcctcttcatcaacaaggagtcggtggtcatggcctatctcttcaccaccttcaacgccttccagggggtcttcatcttcgtctttcactgcgccttacagaagaaggtgaggtcgaggcggggtcctgggtcacagcctcccttggagacgtttcctgggtacccaggagaaggcggcgagggtggaggggactcaggggctccctcaagcccccagtgagtgctgcagggcttctgtggtcaggtctgcgtcccccgggaggggagcacgagctcagggttagggagggtttaaccacgggtgaagagggttctgttgacagacgctgaggccgcaaacgctcctcctctctcttcacactcgccaacaccgcggtggcgct

SEQ ID NO: 67715 - DNA, 1073 bp, Homo sapiens
ttttttttttttgttaagacaggaaacacatttattgagagcacagtggggtgcgccaagccctgtgctttggaaccgcatcacagcgcccctcacaacagccctgtgaggtaggtgaaggagcccacttcccacatgcagacactgaaggctcaacagctcccctaggcctcagggttcctgcggggtgggcaggggtccagcccacgggtctgaccccaggtcagcggcgtccatcagtcagagggcgggtctctactcaaggggaggccccgggtccagagtctctgggtccagcctgtcccgtgggaataggtgcagggtgtccccgtggctgtggagggatttcgagctggagaggggctggggtcccacattcgaggtcccttcccacgtaggcatccaggtgatggcttccgcccaaaccaggaaggagacgagaggcccgccaggaagaagacttgggtccgggatggtgggccccatcagggcctcttccgcagcttccatccgcagttcttcagccgacccagccgggccacggcccacgtgcctcattatgataatcagtgtgtttttccttcgcagacaaagaaggatccttatgcgacgaatactggaatccagcagctaacctcattaacgtctgcagcctcttccttcgacaaggcccgagattagccctttgtgagcgtgcttccacggagtagagcgagtcaggaagcagtgggttgaagaggaaattggaggtgaggaaggaagacagcaagtgtagacaggcctttcaagaagcttggctgatgcaaggagagcccgtggacaagggctgcctggagtgctgttggagaataaataagacaagtaagacaagcaagaggggtgggaagggactgacctgtcaaaccttttcaacaaacatttgctgatcacctcctctatgccagatcctgcctgaggcctcttttatctcatttaattctcacaacaaccataggaggttgctctcatcgaccccattcccccagaaaaggataggaagatcttcagagagaattcgccgactctgtacgagt

SEQ ID NO: 67716 - DNA, 459 bp, Homo sapiens
tgcctaggacaccctcagtctcaactgcactctccccgagactttgcccatgactccctcattctagctgtcctttctctgatttccaggcctggcccgagccaagtcaatcccaacaaagacatactccaatgaggtggtgacactgtggtaccggccccctgacatcctgcttgggtccacggactactccactcagattgacatgtggtaaggacaggtggaagtgtggcaggggccatgtggtaaagggggtggcttggtcacaacagccacccagccagctgcctttctattcactgtgccctccctgcccaggggtgtgggctgcatcttctatgagatggccacaggccgtcccctctttccgggctccacggtggaagaacagctacacttcatcttccgtatcttaagtgaggaggcatgggccctatgcgctgtggagacacacagggt

SEQ ID NO: 67717 - DNA, 817 bp, Homo sapiens
tttcgtgggccactgcaggggccgctaacggtccggcgcccctcggcgtccgcgcgcccccagcctggcggacgagcccggcggcggagatgggggcgacgggggcggcggagccgctgcaatccgtgctgtgggtgaagcagcagcgctgcgccgtgagcctggagcccgcgcgggctctgctgcgctggtggcggagcccggggcccggagccggcgcccccggcgcggatgcctgctctgtgcctgtatctgagatcatcgccgttgaggaaacagacgttcacgggaaacatcaaggcagtggaaaatggcagaaaatggaaaagccttacgcttttacagttcactgtgtaaagagagcacgacggcaccgctggaagtgggcgcaggtgactttctggtgtccagaggagcagctgtgtcacttgtggctgcagaccctgcgggagatgctggagaagctgacgtccagaccaaagcatttactggtatttatcaacccgtttggaggaaaaggacaaggcaagcggatatatgaaagaaaagtggcaccactgttcaccttagcctccatcaccactgacatcatcgttactgaacatgctaatcaggccaaggagactctgtatgagattaacatagacaaatacgacgggtgagtaagccgtctttcatcgccatcaagtccattgttaatgaaaaagttctacccacctctcagttttgagagctccttttcctaaatccgccccccgcctccacccacgaccaattgtaaaagtaaacatgcttcttacaggaaggcaagaaagaa

SEQ ID NO: 67718 - DNA, 729 bp, Homo sapiens
aaattcctgcgatgaagagggcgtctgctggaggttccaggccccgattcccttatcctgagggacgacagcatccatagcctggactttgtgtcgagccgagcctggacttccctgactatgggcccgggggcctgcacgcaacctacctgccatccccaccgctcagcgcctctgatgccttctcattgctttgtgctccctgagcctcaaggcctcaagccggcagggcggagactacatggccctgcagcccctgtgctccgagggtgggcctcccatgccccaccgtagcatctttgcccccccatgcactgcccaaccacaatcgcagcctgtcctacaataatgtgctcaaccctggctcgcctggtggccacgcctgcctcgcccatccagcagttggcgtggccggataccactcaccctacctgcaccctggggcaacgggcgacccaccatggcccctgccccacagcttcagtcccgtgctgggcccccggccccaggagccctcgcctgtgctctacgacatcctgtccaggaccatcatggcatccatccaggagcgcaaggacagggaggagcgtgagtgcctgctgcgctcccaggccgactcactcttcggcgactcaggcgtctatgatgctcccagctcctacagcctgcagcaggccagtgtgctgtctgagggcttctgaggtcctacgctgtgctacagctctacaa

SEQ ID NO: 67719 - DNA, 469 bp, Homo sapiens
  misc_feature (1)...(469): n = a,t,c or g
taatgacacanattgagngcatggaanacgcagacaggagaaagtacttcccatgttaaaagacatttattatcttgttttgcagttatgggagtttttaaaaaaattaaaacagataatgggccaggatattgtagtaaagcatttcaaaaatttttaaatccatggaaaattgcacatacaacaggaatcccttataattcccaaggacaggccatagttgaaagaactaatagaacactcaaagctcaattggttaaacaaaaaaaggaaaaagacagtaaacagtataacactcctcagatgcaacttaatatagcactctgtactttaaattttttaaatatatatagaaatcaaaccactactcctgcagaataacattttaccggtaaaaagaacagcccacatgaggaaaaactgatttggtgggaaaataacaaaaataaaacatgggaaataggtagag

SEQ ID NO: 67720 - DNA, 395 bp, Homo sapiens
ggccaattatattatgactgtatgggccagacccactcatgttcacaggctccatctgtctggcccactaatctggcctacgatggtgacttaactaaaaggctagaccaggtttatagaaggctagaatcaccctattcatggaaatggggtgaaaaggggattccatcaccccgaccaaagttagttagtcctgttgttggtcctgaacacccagaattatgaaagctcactgtggcctcgtaccacattagaatttggtctggaaatcaagttatgggaacaagaaatcataagccatattatactattaacctaaattccaatctgacaattcctttgcaaagttgtgtaaaacccccttatatgctagttgtaggaaacatagctattaa

SEQ ID NO: 67721 - DNA, 684 bp, Homo sapiens
cccttgcctaactgaagggctagctcagtggttctctgtactgtcaagttttgtacatccttatgcaaaagcagtagcccctttggtcctggcttagccctatcttgtgtataccatttccattttataatgctgctttcttgagtgtgccctatctggtgagtattggggaaactcatgacccacgtcataataggaatttcaggcctcataaagacctcatggttgaagcagaggtcctctgtttccagcaaaacccaataaaaagctaacaattgcttcttggaaggggtataagctttgccagcctatggcagtttctgggtccaaaaccccaaaggtaccctcttcccaccttgtttctgcctaagactccaattagcatgttgatctaggacagctacttgcagttctactggcctgtttcgtatgggccatagatctggggtcagttgcaccgcttgttcagcttgttgaaaagccacgctctctttctgtccccagtgaaagtcatagcgttttctagtgactgcacgcagaggttgtaaaatgttacccatgtggggcatatgatgtctccacaatccaaacaagccaataaatttctgggcctcctttttagtggtaggggttgcaaattctagtattttagccttagccttttgtaaaatggactattaccgt

SEQ ID NO: 67722 - DNA, 1683 bp, Homo sapiens
  misc_feature (1)...(1683): n = a,t,c or g
acagcatcccgcaggagctcttccgcaagatcaaggctgccgagtatttcattcctgttgatggacgggtttctgagaacaccgtgtgtctcatccggaagctgctggtccttgacccccagcagcgcctggccgccgccgacgtcctggaggccctcagtgccatcattgcatcatggcagtccctgtcatctctgagtgggcctttgcaagtggttcctgacattgatgaccaaatgagcaatgcggatagctcccaggaggcgaaggtgacggaggagtgctcccagtacgagtttgagaactacatgcgtcagcagctgctgctggccgaggagaagagctccatccatgacgcccggagctgggtacccaagcggcagttcggcagcgcaccaccggtgcgacggctgggccacgacgcacagcccatgacctccttggacacggccatcctggcgcagcgctacctgcggaaataacagcctcagccggggccaccagcactgctgcccacttcttccagccccagccaaaggcgtggctgtcagggctgggccctgtagtgctggactctcccgggccacaatagggacagggcagggacagggacagcccaggtcacacgtggggtcagcagaggtaccacgaagctaccttttggggatgattgctcgattgtttggtttttaaatctgagaagcctagataactaattctgcttttaatcacgatgttttaatctacctctgtctctttaaccatgctgtctctggactgagcaagagggaggagggagcctgctcaccccactccagggccttccccagcggccaccaactgacctggggcgctgctccccacagtccaaataagctgaaagtgcagctcgctgcaggccccagagcgagcttcccctcctccctgctctcccaggcccctgccacagcctctttccgtccctctctttctgatccaggcccctcagtccaagctttggaaaaccttcacctcatcttaaaccgaactcaaatatatttatttttttaccataccaacttctctcccatctctaggtggctcagtccatggccactccctgcccccagcctggctggacagcaaggaatccacagcccacacgtgagctccctcctcacccccaggcagggaagcccctcctgccagtccctgtcccctttcagcccaccagtccctctctgctgccggtgatgggaggcctttctagacctggctctttctctcccgtctcagtggcttctctgaggtgctgtacacgcgcgttaacctgttcccttctctatccttccccgtggtactgagctcacgtggactcccagtgcgaaggggcccatgggttgggctgcaggcctggccgtgagcgggggctgcctgcacgctcccctagcctactcttgtgtttaggggatggtgggaacatatcccagtgcccttgcctcataatagatgtggtgactctcccggtagaccctagcaagggtcctccatggtggggagggactcaggagaattgtagggattgggggaccctgcctgcctggcttgagaacagccctgctgcccttttgagccgagattttgaagtgggatgccctntttgccagaaatgnttttttcaccagantgccccttccctttgcc

SEQ ID NO: 67723 - DNA, 610 bp, Homo sapiens
gtgggaggacaatggtgagaagagggaacctaagaattcctggactctgactgggcgtgagaaatggccggaagtagcttcgagtccgtcattcaagcagtagaggctctggagaaaaactggagcgcatctgcttaaagggccgcccagggtcaggatggaggggcaaagtccgagcagggggtttcctcccatattggatcacgatgaaaactgcacagaaagtccgtgctcagtttcttccatggttacagaacacaggccccagaccaggaaggcattctgctaaagaaggggacccgaaacctcagctaccagcgccgatggttcatcctccgaggaaacctcctcttctacctagaacactagaccgaccatgcacccctgggcctcatcctgttagagaactgccaggtggaaccacaccttaaggctgcagaaccctatgcctttaccatcctgacccctggggtggagggcacaggtgggcgggcctacaagctggctgcagaaacccaggaagagctggagacttggctgtgggcactggctggcgcgagctggaggcggctggctgggctgctgtcccccctccccccccgttttaaaa

SEQ ID NO: 67724 - DNA, 767 bp, Homo sapiens
  misc_feature (1)...(767): n = a,t,c or g
gggccagcccctgataccctagcttgagagcctatccaggatttgcagtaatttgtccattttccatgaaaattttaaaaataaaaagggcaaaatgcagcaaaacatcctcgtagctgcccagactttgctagacaaagccagtgagtggttttggtcagcaggcgggcccaggccgcagttgagcacctgtcagccggtgtcgggcaggtcaggtttggagggaaggcctgcgcggctgtccacaggtggtttggtcaagggcagcctcagaaggtggcacaggaaagggtgtgcggggtgcaggcctgaccagcgatgtttgcagatggactgcctctgggggtcaacttggggaagaacaagacctcagtggacgccgcggaggactacgcagaaggggtgcgcgtactgggccccctggccgactacctggtggtgaatgtgtccagccccaacactgccgggctgcggagccttcagggaaaggccgagctgcgccgcctgctgaccaaggtgggcagctgcacccctctccaggccctgtcccaccagcctgtcccacctgctccccttcattctccagggcgaaccttcagcatcaccctcagaagctgtccttagcacctagaccagtaggacccctggctataccttcccagagtcccctctgatcccctctcatgacactgattatatgcgacggtgacaaattatctgtccctgctgctataaatcacggngtctgtaagagcagacaccacgtc

SEQ ID NO: 67725 - DNA, 964 bp, Homo sapiens
ggaattcgatggaatgtccatacccttcaccctcatccaagagcagtgtgggctgggatagggaggggacatgggtcataggctcttctaggtagagccagggccccggcgttgtgctttcccacccttctagagtttctggagtccctggagccggacctgcccgccctgagagccatggggctccacctgtgggctgcaggcccaggaacccaccctgctggaattagcgatttgctggctgaagtgtccgctgaagtggatgggccagtgccaggatacctctcttccccccagagcataacagacacgtgcctgtacatcttcacctctggcaccacgggcctccccaaggctgctcggatcagtcatctgaagatcctgcaatgccagggcttctatcagctgtgtggtgtccaccaggaagatgtgatctacctcgccctcccactctaccacatgtccggttccctgctgggcatcgtgggctgcatgggcattggggccacagtggtgctgaaatccaagttctcggctggtcagttctgggaagattgccagcagcacagggtgacggtgttccagtacattggggagctgtgccgataccttgtcaaccagcccccgagcaaggcagaacgtggccataaggtccggctggcagtgggcagcgggctgcgcccagatacctgggagcgttttgtgcggcgcttcgggcccctgcaggtgctggagacatatggactgacagagggcaacgtggccaccatcaactacacaggacagcggggcgctgtggggcgtgcttcctggctttacaagcatatcttccccttctccttgattcgctatgatgtcaccacaggagagccaattcgggacccccaggggcactgtatggccacatctccaggtgagccagggctgctggtggccccggtaagccagcagtccccattcctgg

SEQ ID NO: 67726 - DNA, 466 bp, Homo sapiens
ggcttactcactatagggctcgagcggccgcccgggcaggtcctcggtgctgaagcctaccaacgagacgctcaacttctggacgcacttcatcccgctgctgctgttcctgagcaagttctgccgtctgttcttcctgagcggcggcgacgtgcccttccaccacccgtggctgctaccgttgtggtgctacgcgtcgggagtgctgctgaccttcgccatgagctgcacggcgcacgtgttcagctgcctgtcgctgcgtctgcgcgccgccttcttctacctggactacgcgtccatcagctactacggcttcggcagcacggtggcctactactactacctgttgccaggcctcagcttgctggatgccagagtcatgactccatacttgcagcagcgcctgggctggcacgtggactgcacgcgccttatcgccgcctaccgcgccctggtgctgcctgtg

SEQ ID NO: 67727 - DNA, 1041 bp, Homo sapiens
gattcagattaattccagactaagagaagaaaagcccttggcatccaaaaggaagaaagtttaagttcttgggagaccaaccaatgttggtggtgggccactgtgggcaatgttcccttgtgggctaccactgtgggcaatgttccccttgcccacagtgtacatttttcctctgtttacatgactgcttgaaaaggaggaaaatgtcagggaaaatagaagggggttatagcaccttggggtggttgacaataaagggatgtcgtagtccatcctcaaatgcactcccatctcttgtcacacgacagcaaatagcacgggtcagatgcccttggctgaaaaggtaacctgagtacaaaaaagagaaacatatatacctgtgtttgcaccaaatgctgttaagaggcagaagcatgtggggattttggaggtacaagatatagttgtcaagaaagagaaacagctgccttgttaggaagcaccttctgactggggctaccaggatcttcctaccacagcagactggacactcaatcaattactgaggagtgaatcatgctcactttgataagggagacaaaacacctggcaataaagcatgcagtttgggatctgggcacaagaaggacagaccagttccagatcccaaggcaggccccttacccaatgtgacagatttgagataaatgggctgcagaaagtgggtcaacagtgccccttgcaggcccagcacgttccagcgtaggattttgtcactacaggacatggtacggagtctctccccgagccgaatgccatcccacgtaggcacaatgtcactggattccacagggattgtgccttctcctgtgtgagagacttgggtcagacccacaggcgccaatggaccaaaccactccctggcgtggtttctatcctccttaagcttgggccacaggctacattcattcattcttcacatatttcacagcccctgctatgcgccaggcacatatgcttggtgatggaaaaaaacggtgagcaaaaccaagtaagatcttt

SEQ ID NO: 67728 - DNA, 459 bp, Homo sapiens
atatattgctttatgaaaattatactggatctgttacagatgatagtgttgaaccaagtggaacaaagaaagaagatctggatgacagagagaaaaaagatgaaactcctgcacctgtatatggggccaagtcaattctggagagctgggtatggagtaagcaaccaggtaatctttgatcagagatagaaattagtgtagacattttgcctccagatcctcaagtggttttagaaattggttctctaattctgtgggagaaggttgatactggtatagtcttacacgtcattgaaactggaaaagatagctagatattctcctactcatgttttggataatgagataaattattttatgcttcacacacttggagtatgtcatctactgtaatatagtatctgaatgaatactttaaataaaatacatttctgtaaattaattgtatactttaaaaat

SEQ ID NO: 67729 - DNA, 1104 bp, Homo sapiens
ttccacgcgtccgggacaccatcaatgagttcggtggcataccataaaagaaccgcatcaccattggcaacgtggacttggtcctgagcaagggcaatgtggacgtggcgcttaacatgctaaggaacatcttgcccaaacagtcctgctatatggaagccagagagaagatggccaacatctacctgcagaccctcagagacaggcgcctgtacatcacatgctaccgtgagctctgtgaacatctgcctggcccccacaccagcctgctactgggcgatgccttaatgagcattctggagcccgagaaggccctggaggtctatgatgaggcctatagacagaacccacatgacgcctccctggccagcagaattgggcacgcttatgtgaaggcccaccagtatactgaggcaattgagtattatgaggctgcccagaagattaatggacaggactttctgtgctgcgatctgggcaaactgctcctgaagttaaagaaggtcaataaagcagaaaaagttttgaagcaggcactggaacatgacattgtccaagacatcccatccatgatgaatgatgttaagtgcctgcttttgctggcaaaggtttacaagagccataaaaaagaagctgtgatagaaactttgaacaaggccttggacctccagtctcggatactgaagcgagttccactggagcaaccagaaatgattccctcccagaagcaactggcagcctctatctgcatccaatttgcagagcactacctggcagagaaagagtatgacaaggcggtacagtcttataaggatgtcttctcctacttgccaactgacaataaggtgatgctggagctggcgcagctctacctgctccaggggcacctggacctgtgtgagcagcactgtgccatcctcctgcagactgagcagaaccatgagaccgcttctgtgttgatggctgacctgatgtttagaaaacagaaacatgaagcggccatcaatctttaccaccaagtcttggagaaagcgccagacaattttttggtattgcataaattaatcgatctgctaagaagaagtggaaaacttgaagacattc

SEQ ID NO: 67730 - DNA, 403 bp, Homo sapiens
aatcgagatcactagtccagtgttgtggaactcctcctaaaaaaataataataatagtatgatggaagacatttagatcactatgaaattctagagtaacatttatttttcgtcttactctttctcagatactactgcaaatcaccccctacccacctttgctttctgggcaacaagaaaaaaactgtggaggaatattaccagatttcaaattatactacagggctttaataatctaaacagcataggtttaggttactaaacctaaatcctttatgctgttttactgttataaagacagacacataaaccaatggaacagaatacagagcccataagtgaatccatagatatacagcgagctcattttcaacagatgtgccaaaaacatacattggggaaa

SEQ ID NO: 67731 - DNA, 492 bp, Homo sapiens
  misc_feature (1)...(492): n = a,t,c or g
atgcaggccatgctggaagtatctgccaacatgatgaagaagaggacatcccacaaaaaacatcggagcagtgtgggtccgagcaaacctgtttcccagccccggcggaacatcgtaggctgcaggattcagcatgggtggaaagaggggaatggccctgttacccagtggaaagggaccgttctggaccaggtgcctgtaaatccttctttgtatcttataaaatacgatggatttgactgtgtttatggactagaacttaataaagatgaaagagtttctgcgcttgaagtcctccctgatagagttgcaacatctcgaatcagcgatgcacacttggcagacacaatgattggcaaagcagtggaacatatgtttgagacagaggatggttctaaagatgagtggaggggaatggtcttagcacgtgcacctgtcatctttattaagttctagttcatataccaagtctctccctcnctaaaaaaaaaa

SEQ ID NO: 67732 - DNA, 2191 bp, Homo sapiens
accaccacccgtgcggggggatatctgagccatttctctgtgggcttttgtttttcaaagactgggcaggttgttgttgaggtgtgtgtgggctgccacgattttgtggaagtataatactttgtcattatgagatgtcgtctctcggtgcctcctttgtgcaaattaaatttgatgacttgcagttttttgaaaactgcggtggaggaagttttgggagtgtttatcgagccaaatggatatcacaggacaaggaggtggctgtaaagaagctcctcaaaatagagaaagaggcagaaatactcagtgtcctcagtcacagaaacatcatccagttttatggagtaattcttgaacctcccaactatggcattgtcacagaatatgcttctctgggatcactctatgattacattaacagtaacagaagtgaggagatggatatggatcacattatgacctgggccactgatgtagccaaaggaatgcattatttacatatggaggctcctgtcaaggtgattcacagagacctcaagtcaagaaacgttgttatagctgctgatggagtattgaagatctgtgactttggtgcctctcggttccataaccatacaacacacatgtccttggttggaactttcccatggatggctccagaagttatccagagtctccctgtgtcagaaacttgtgacacatattcctatggtgtggttctctgggagatgctaacaagggaggtcccctttaaaggtttggaaggattacaagtagcttggcttgtagtggaaaaaaacgagagattaaccattccaagcagttgccccagaagttttgctgaactgttacatcagtgttgggaagctgatgccaagaaacggccatcattcaagcaaatcatttcaatcctggagtccatgtcaaatgacacgagccttcctgacaagtgtaactcattcctacacaacaaggcggagtggaggtgcgaaattgaggcaactcttgagaggctaaagaaactagagcgtgatctcagctttaaggagcaggagcttaaagaacgagaaagacgtttaaagatgtgggagcaaaagctgacagagcagtccaacaccccgcttctcttgcctcttgctgcaagaatgtctgaggagtcttactttgaatctaaaacagaggagtcaaacagtgcagagatgtcatgtcagatcacagcaacaagtaacggggagggccatggcatgaacccaagtctgcaggccatgatgctgatgggctttggggatatcttctcaatgaacaaagcaggagctgtgatgcattctgggatgcagataaacatgcaagccaagcagaattcttccaaaaccacatctaagagaagggggaagaaagtcaacatggctctggggttcagtgattttgacttgtcagaaggtgacgatgatgatgatgatgacggtgaggaggagtataatgacatggataatagtgaatgaaagcagaaagcaaagtaataaaatcacaaatgtttggaaaacacaaaagtaacttgtttatctcagtctgtacaaaaacagtaaggaggcagaaagccaagcactgcatttttaggccaatcacatttacatgaccgtaatttcttatcaattctacttttatttttgcttacagaaaaacggggggagaattaagccaaagaagtatatttatgaatcagcaaatgtggtgcctgattatagaaatttgtgatcctatatacaatataggacttttaaagttgtgacattctggctttttcttttaatgaatactttttagtttgtatttgactttatttcctttattcaaatcatttttaaaaacttacattttgaacaaacactcttaactcctaattgttctttgacacgtagtaattctgtgacatactttttttttcttatagcaatacactgtaatatcagaaatggttggcctgagcaacctagtaagacctcgtctctactaataattaaaaaactagctggcatggtagcacacacctgtagtcccagatacttgggaggccaaggcaggaggattgcttgagacctagcaatcagtcagggctgcagtgagccatgatggcaccactgcactctagcctgggcaagagaacaagatcctgtctcaaaaaacagggaaa

SEQ ID NO: 67733 - DNA, 494 bp, Homo sapiens
  misc_feature (1)...(494): n = a,t,c or g
gtgggttaannagggtttgatncccctttgnannnncacctgatgcgcctgcnggaanngcgacgaggagacagccaattccaccaactgccacattctcaacatgtaccggaggaacacatggctgtaccaggcactgtgggaaggcaagcgggttcagagcatggagcagatctgcgaggtggcctcgggagtggcccgcattcgtgggaagacgctgggcctcatcggctagggtcgcacgcagcaggcttttgcagttccagccacagcctttggattcagcgtcatgttttattacccctacttgcaggatgggatcgagcagtccctgggcatgcagagggtctacaccctgcaggattggctgtatcagagcgactgcatctccttgcactgcagtctcaacgaacttaagcaccacctcatcaatgactttaccataaagcagatgaggcagggagcattccttgtgaacgcagcccgtggtggcn

SEQ ID NO: 67734 - DNA, 479 bp, Homo sapiens
atttgaaatcgatccgcgctgcaggaattcggcacgagattcggccacagcctcagcctccgtcgctctgtgacctgcgggtattggatgattcgtagctaagactctacgacatccctgaagccgggaaatggtgtgtgttctcattttacccaagatctttggccagtgcagggcatagaagattcattccacaaacttatactgagaagatatgagaaatgtggacagaagaatttacaattaaggaaaggctctaaaagtgtgaataagtgtaaggtgcagaaaggaggttataatggactttaccaatgcttatcaactacccagagcaaaataattcagtgtaatacatctgtcaaagtttttcataaattttcaaattcaaacaacataagacatactggagagaaatcatttaaatgtaaaaaatgtggcagatcatttcgcaagttcctccaactaacttaacataaggg

SEQ ID NO: 67735 - DNA, 945 bp, Homo sapiens
  misc_feature (1)...(945): n = a,t,c or g
cgccacgaggccttgagccagtcaccaatgccacaggaaagaggttttatggcaggcacacaaagaaacccttagatggctcagtatggacctcaacagacaggaccatccatgtcgcctcatccttctcctgggggccagatgcatgctggaatcagtagctttcagcatagtaactcaagtgggacttacggtccacagatgagccagtatggaccacaaggtaactactccagacccccagcgtatagtggggtgcccagtgcaagctacagcggcccagggcccggtatgggtatcagtgccaacaaccagatgcatggacaagggccaagccagccatgtggtgctgtgcccctgggacgaatgccatcagctgggatgcagaacagaccatttcctggaaatatgagcagcatgacccccagttctcctggcatgtctcagcagggagggccaggaatggggccgccaatgccaactgtgaaccgtaaggcacaggaggcagccgcagcagtgatgcaggctgctgcgaactcagcacaaagcaggcaaggcagtttccccggcatgaaccagagtggacttatggcttccagctctccctacagccagcccatgaacaacagctctagcctgatgaacacgcaggcgccgccctacagcatggcgcccgccatggtgaacagctcggcagcatctgtgggtcttgcagatatgatgtctcctggtgaatccaaactgcccctgcctctcaaagcagacggcaaagaagaaggcactccacagcccgagagcaagtcaaagaagcccagctcctccgccagtaaaggggagaagatcaaaaaggtgtacgagctggggaatgagccagagagaaagctctgggtcgnnccgggnnttcgaacgctgtgcacntcgaagggtatcaatggttctcaccac

SEQ ID NO: 67736 - DNA, 426 bp, Homo sapiens
  misc_feature (1)...(426): n = a,t,c or g
nttgattagcagaccttagtccangcggtggaattcgagttctaaaagtctcaattattggacagtattgcatagcttgagaaggaaaaggattcactcatcctgtagggcggcttggttgtcttgggcaaaagctgtataacggtaccacaaaaacagttacatggtggagttccaattacacagaaagaaatccattcagtaaatttccaaagttgcagactgtttgggcctacccagaactccaccgggactggacggcccccaccggattatactggatatgtggacccagagcttatgctaatctgcctgatcaatggacaggtagctgtgtaattggcaccatgaagccatctttcttcttactgcccataaaaacaggtgaacgtctgggcttcccagtctatgcttaccgcgaaaaan

SEQ ID NO: 67737 - DNA, 697 bp, Homo sapiens
tttgtacgtccactatccatgtggtggaattctgatgagagactttacgaatgtacagaatgtgggaaggcatttaacaatcgctcaactcttattcagcatcagagaattcacactggtgagaagtcctttgaatgtaaggaatgtggcaaagcattcaataattgctcaacacttactcaacaccagagaactcatactaatgagaaatcttatgaatgtcaggaatgtaaaaaggcttttaggcaaagtgcacatcttactcaacatcaaagaattcatactggtgagaaaccatatgagtgtaagtaatgtgggaaggctttcacttgtgtttctgattttaatagacatcagagaattcacactggtgaaaaaccctatgaatgtaaagaatgtggtagagcttttaacaattgttcagctcttattcaacaccagagaattcacactggtgagaaggcttatgaatataagcagtgtgggaaggtttttgtctcctgtccaacacttgttcaacatcagagaacacatactaatgaaaaaccttatgaatgtcagtaatgcaagaaggccttcaagcataatgcacatctaatgagacatcagagaattcacagtggggagaaaccctatgaatgtaatgaatgtgggaatgccttcatttgtttttttgattttaatagacatcagagaa

SEQ ID NO: 67738 - DNA, 466 bp, Homo sapiens
  misc_feature (1)...(466): n = a,t,c or g
gagcgctcctcaccagttaccgnncntncangaanttanncnatcggccaaggctctatctgctggccactaatccagcctataaagtgatttaactaaaaaactagaccaagtttatagcaggctagaatcaccctatccatggaaatggggtgaaaaggggatttcatcatcctgaccaaagttagttagtcctgttgttggtcctgaacacccagaattatggaagcttactgtggcctcataccacactagaatttggtctgaaaatcaagttatgggaacaaaaaatcataagccatattatactattaacctaaattccaatctgacaattcctttgcaaagttgtgtaaaacccccttatatgctagttgtaggaaacatagttattaaaccagattcccaaactataacctgtgaaaattgtagattggttacttgcattgattcaacttttgattgg

SEQ ID NO: 67739 - DNA, 411 bp, Homo sapiens
ggaattcccaccacaggatgcgccgcaaggcggccgtgaaacgcctggaccctgcgaggctcccgtgccactgggtgcgccctctggctgaggtcctggtcccagactctcaaacacgccccttggaagcctaccgcggacgccagcggggcgagaagaccaaggcccgggccgaaccccaagccctcggccccggcacccgtgtctccccggcagcgttcttccctctccggccaggcattcctttccgtgacttggactcgggccccgcactcctgttccccactttaaatttaggcctatcgtcgccatccctcgagtcaaagctgccactcccaaactccaggatccgcttcctcaccacacacccggtgctccctgatgtggcccgcagccgcagccccaagctgg

SEQ ID NO: 67740 - DNA, 842 bp, Homo sapiens
gttttgaacccccttggaaaaccttgacatgacacgccagcttggcacgaggagggttaccccttccctactgctcctcctgtggatccatttgccaaaatcaaagtggacgactgtggaaaaactaagggatgctttagatatggcaaaccaggctgtaatgcagagacctgtgactatttcctcagctaccggatgataggggctgatgtagaatttgagctgagtgcagacacagatggttgggtagcagttggattctcttcagacaagaaaatgggtggtgatgatgtcatggcctgcgtccatgatgacaatggcagggtccgcatacagcacttctataatgtaggccagtgggcaaaggagattcagagaaaccctgccagagatgaagaaggagtttttgagaacaatcgcgtcacctgcagatttaaacgccctgtgaatgttcccagagatgaaacaattgttgatctgcatttgagttggtattatctgtttgcttggggtccagccattcagggctctatcactcgacatgatatagactcaccgccggcttcagagcgtgttgtcagtatttacaagtatgaagacatttttatgccatcagctgcctatcaaaccttctcatctccattttgtttgcttctgattgttgctctgaccttctacctattgatgggaaccccctaaccacagctgcagggccaacagattacatggattgggaagtctttagtataaatatattttttaaagaatatccagtataattttagcttcaattatttaagaaaaaaaacctcatataatttcagctttttggaagaaagaac

SEQ ID NO: 67741 - DNA, 628 bp, Homo sapiens
tcgtgcggaggaattccccgctgctgacccgagcaaggcaccagcaccacctccagggttgcctggatgccctcggccactacaagcagtcaaaagacctggccctggcggcagaggcgctgcgggtggcccggggtcacctgacccggctcacaggtggagggggtaccgaggagatcctggacatcatcttccaggacttctgtgtgggcaagtgacgggatccagggaagtcgcacccaagctgcgtggagacccaggagcctcgggggatctggaaacagtttaggccaattgggattctcattcgcctgggaaagaacttgattctcaaatagtgaagcaacacagctgagaggtagtgagatccctgcagggactccctggagattcaggccctggaatggggctgaatggaggtcccgttcgacccttgatgctggggcatccgggttgggatggagataggaggatctcagtatatttgtttcgtagttttttatttattttgcaaataccaaaggaatgtaaaaaaaactcaggtgatctagaagtgtttattttcttcccttcccttcccttccctttccttttccctttccctttccccttccccttccccttcccc

SEQ ID NO: 67742 - DNA, 752 bp, Homo sapiens
ggaatgaccgcctcgagcggcccaagtccttctgctacccttccaagctggcggcccaccgccacacgcaccacgccaccgacgcccgcccctatccttgcccgcattgccccaaggctttctcatttccctccaagctggccgcccatcgcctatgtcacgaccccccaaccgcgcccggcagccaggcgactgcctggcaccgatgctccagctgcggccaggcctttggccagagacgcttactgctccttcatcaacgcagccaccaccaggtggagcacaagggggagagagactgagccctcccttggctcactgtccccttctgccgccagccctagccagtaagaggtgggatttctaagaccgactgtatgagctcgcctcttccagatagctggcagagggcagggcaagggattggccatttatactgggctcgagctcagaagcccgaggaactctttgctcccctgctttggggagatctcaaaccatggacgtggagctgtggtttgacagcgctggctctgcttctccccacacacttacatggcaaaggtaaaaagtctgctactatcgtgggttgatgaggattgtgggcaaacaggctctcttgttaaaagtttaaactggtgtctccactttggccatatgacggtatctaagaaattgaaaatacatacatgcttgtctcaactcttccacttgtaggaatttattctataaactcatgaatgtgaaaaaaa

SEQ ID NO: 67743 - DNA, 602 bp, Homo sapiens
aatccgtctacagtctgaaataaatcttctcaccttggaaaaggttgaacttgaaagaaagttggaatctgcaactaagtctaaactgcattacaagcagcagtggggacgagctttgaaagaacttgccagacttaaacagagggagcaagaaagtcaaatggctcgtcttaaaaaacagcaggaagaattggaacacatgagactacgttaccttgccgctgaggaaaaagatacagtaaaaaccgagcgacaagaattgttggatataagaaatgaattgaacaggttaaggcaacaagagcaaaaacaataccaggattccacagagattgcaagtggaaaaaaggatggcccccatggcagtgtattggaagaaggtttggatgattatttgactcgcctgatagaagaaagggatactttgatgagaacgggtgtgtataatcacgaggatcgaataataagtgaactcgaccgacagatcagagagattttggcaaaaagcaatgcccagttaatttaataaccttttgggaaaaagcttttattagagactctaagtctaaattttaatttctttgtaaaaccctcaaaagtga

SEQ ID NO: 67744 - DNA, 1267 bp, Homo sapiens
tccaggatgaaaacctctaaaaacaatgtttctgccccttgctgagagaatggtcgaataaatggtgaaagaggacaagatagaagctgaggctgaagttgaactttattatatgatcctggaacgtttgggaaagtaccaggaggccttggatgtcatcagagggaaattaggagagaagttgacaagtgagattcagagtcgggaaaataaatgcatggctatgtacaagaagctgagcaggtggccagagtgcaatgccctttcccggcgcctcttactaaaaaactcagatgactggcagttctatctgacttatttcgattctgtctttcgactgattgaagaggcctggagtcctcctgctgaaggtgaacactctttagaaggagaagtacattattctgcagaaaaagctgtgaagtttatagaagatcggataacggaagaatctaaaagttctcgccatctccgaggaccacatctagctaaattggagctgattaggcgtttacgaagtcaaggttgtaacgatgagtacaaactgggtgatccagaagaattaatgttccagtattttaaaaagtttggcgataaaccttgttgttttacagaccttaaggtgtttgttgacctcttacctgctacacagtgtacaaaatttattaatcagttacttggagttgttcctttgtcgacaccaacagaggataagctggcactgcctgctgacatcagagctctgcagcaacatttgtgtgtggtgcagctgacgaggttacttggcttgtaccacaccatggataaaaatcagaaattgagtgtggtcagagaattgatgttaaggtaccagcatggactggaatttgggaaaacctgtttgaaaacagaattgcaattttctgactattactgtctccttgctgtccatgcgcttattgatgtatggagggaaacaggtgatgagaccactgtgtggcaggccctgactttgctggaagagggattaacccatagcccttccaatgctcagttcaaattgctgcttgttcgaatctactgtatgctgggtgcatttgaaccagtggtggatctttactccagcctcgatgctaagcatatccagcatgataccattggttatcttttgacccgatatgctgaatctctaggtcagtatgctgctgcgtcccaatcctgtaacttcgcactcaggttttttcactccaaccagaaagatatactgcaggcaaacagctcgccgagg

SEQ ID NO: 67745 - DNA, 719 bp, Homo sapiens
gcggtggaattcctcatcctcaactcaccatcaacccttccacgatcccaaatcgctcgtggatgactttggcgaggggagccaaacagttggtggtgcaggacgcgttgctgaaacagccaaggtgtgcacggacactgtgaggtggtgacctccccaactcagccctcaacctcctcagaggcgccaatgctgactgctgtcagccagcccagaccctttctccatatgctgcccgggacgtggactctgtgactgtgaggcctgcccggctgctttctgcttcccagctctgacaacctcgccatgaaccctcctagaccctcagctcctgcaataggaagctggctgccaaaggccaggagggtccctgaaaacagacactgcattaaagaaaaagctcctggaggactcctgaagcctgaggcagccttggggcagcagtggctcatggtttacattggaaaggtaagggaggtttctggtttcctgttttataaatttatgtttttacttggtattttgacaaacatttgtatttgaagcacactaaacatctagtattgccgttttctacttggctttagcaaacaagcattaagtgaataaactgttccactttcttccttcccaggtttatcatgagtaaccgggtgctttgcttctgtgattcttggccagtgtcggtctgtttcctttgccattgagcctgctcccct

SEQ ID NO: 67746 - DNA, 481 bp, Homo sapiens
ggatcgtctccggatgccaggagtcccaaagggccgaccaggatgaggaaaccccaggcggagtccgggggaagcagcacggcatcccagcctcaggcctgcccggacggtgatggttggggtctctctatcccaaagcctgatgtgatttccttactggagcaagggaaagagtcctgcatggtttcaagggacgtaccaggaggatggtgcccagatatatatatatggaaaagagaaggtccaagaatatcaaagacattgaagaagaggaaagatttgtcctgccaaatatcagaacttttataaagctacagcaattaagacagtgtggtcctcactgataaactgactaatgaaacagaatagagagctcccaagcaaatctctacaaatttaatcttcgatacgtgatgtaggtgacatggcagatcagtaaggaaagaaagggcttttcaataaatagaatagaaaaaaaaaa

SEQ ID NO: 67747 - DNA, 1263 bp, Homo sapiens
tttttccccagggggttttagtggggtacgcccggggttttcccattcccgcgttgttaaaccccgggccaggaaattaattttgggggccccattaaaaaactttaaccttgcaagcccggggacataaaacttgatcccttaaaacgggccccccttttttttttttttccaagaataaagtcgtttattattttcagagcggcgggagtagggctggggaccctagggccgctccagtgggacttccctgaacccggttgtagaggatgatggcgcctttggccgaggggcagagttcagcccacatctccgtctcgggcaatctccgcacgttctgtgtctccacaaagaagattcctgtagactcgtgggcctcgggtcccccactcaggtagtgcttcctcacctgctcagaagtcaggctgcactggacatagaactcggcactggctcggccagcactggtctcatttcgggcgatgcccaacagcaggggctggctcagggtgagcagcggcaggttcacctcatcacagatctcctgaaggacactggaaaagagttcatgtaccaccagctgcccagcgaggtcctggtgctgggggctgccaccagggcacagggcctgaggctcagggtgcccaccaggtacgtccaccagcccaggggcctcagccacctgccgggagcggcgcaggaagacaaggaagtcatcggctgtggctagtgcagcgcccacccccagtgggtccgccagataggcctgcgtgtcaccccagtcggtggcaccctgctgtcgcagccaggcagctgagctggaccagttggtgcccaggaagtctcggtaggaagtaaggcccaggcgcaggagcagctgtggcccccgagagccaataggcgccagggtggctgagtgcaggcggaacttgggggcgtcgaagagccagggttgggcctttagccgggtctcccagatggcagtgatggcctcgtccccacctggcagtgggcgacggtcatgggcggggctcagctcggcctgtatctgctcctggggcaggcccccgccagggcactgcagcagcaaggtcacctcaggatccatggtctgaacggggcagctcatccagaggtcttgggttcaggcgccccaaatgcccatgtcccccaaacccaggggtctgcctccgacccggggcgcgcggggacccctttccagggcccggaagctccagcctccagcgggcgctcacgcgtccg

SEQ ID NO: 67748 - DNA, 702 bp, Homo sapiens
gcgtggaattccttggggcccagtggtgccaaggcaggcggtttctggtgtggttgctttagtcttcattggaggcacacgaaggagtctgtgatatcatgtgagacccgggaagggccccttcaaccgcccctttctgaactgcgggtcaggcaggctcccctggggaaacctgggcgcgtaggaggcacctccacctgctggagctggcccaggctggcctcccctgcagacaggccgcgtctagggccagctgctcatcccagacgcacccaggtgattcccatgctgaacagtttgatctcctgccagagtgtcgggccacaaactgggcagcacatcaggatcacctgggggccttcaaaaatcaaaaatccacccccaggccatgccctggacccactgcaccaggacaagaaatccaccccaggcctctccccagacccactgcaccaggacaagaaatccacccccaggccacgccccagacccactgccctaggatgtgggggtgggaaccaggtggtgctttgtaaagacgtgcaggtggtaaccccaggcccccacgctcggaaccctggccacaggatcatccaggtgtctgtgatttgcttcctcggtttcctttgtgagtggaaaataagtgttgcgtttgactagggtttaagagcagcaggcagcccctcagctcagcaggcagcc

SEQ ID NO: 67749 - DNA, 1073 bp, Homo sapiens; identical to SEQ ID NO: 67715

SEQ ID NO: 67750 - DNA, 640 bp, Homo sapiens
  misc_feature (1)...(640): n = a,t,c or g
catcttcagacaaagatgatgatgaggccacggattatgtgttcaggatcatctacnctggcatgcagtcggaattcgtgcccagggatctgatggacgtctctgtaagcaacctcccatcctgtggcagcnccagtccccggaagtcctcctgttcatcctgttcacagagtggctcggctgatggtagctcgaccaatggctgcaaccatgagagggctcccctgaaacttctctgtgacaatatgaagtaccagatcctctccagagccttctatggatggctggcctactgcagacacctgtccaccgtgagaacccacctatcagccctggtcaatcacatgatcgtgtctccagacttgccctgcgatgctggacagggactgacagccaggatctgggagcagtaccttcacgacagcacaagttacgaggagcaggagctgctgcgcctcatctactacgggggcatccagcctgagatccgcaaggccgtgtggcccttcctcctgggccactaccagttcgggatgacggaaacagaaaggaaagaggtggacgagcagattcatgcctgctatgcacagaccatggctgagtggctgggctgaaaggcgatcgtgcggcagagggagcg

SEQ ID NO: 67751 - DNA, 1045 bp, Homo sapiens
gggccacaggcagcgcttcgccagccgaggaaccggacgcggacaccgcgccccgcgagcctccagcccctcgcctgttgccgcgcgagtcccgggcccggagcgctaggagcgcgcggaaggagccatggctctggacgggataaggatgccagatggctgctacgcggacgggacgtgggaactgagtgtccatgtgacggacctgaaccgcgatgtcaccctgagagtgaccggcgaggtgcacattggaggcgtgatgcttaagctggtggagaaactcgatgtaaaaaaagattggtctgaccatgctctctggtgggaaaagaagagaacttggcttctgaagacacattggaccttagataagtatggtattcaggcagatgctaagcttcagttcacccctcagcacaaactgctccgcctgcagcttcccaacatgaagtatgtgaaggtgaaagtgaatttctctgatagagtcttcaaagctgtttctgacatctgtaagacttttaatatcagacaccccgaagaactttctctcttaaagaaacccagagatccaacaaaaaaaaaaaagaagaagctagatgaccagtctgaagatgaggcacttgaattagaggggcctcttatcactcctggatcaggaagtatatattcaagcccaggactgtatagtaaaacaatgacccccacttatgatgctcatgatggaagccccttgtcaccaacttctgcttggtttggtgacagtgctttgtcagaaggcaatcctggtatacttgctgtcagtcaaccaatcacgtcaccagaaatcttggcaaaaatgttcaagcctcaagctcttcttgataaagcaaaaatcaaccaaggatggcttgattcctcaagatctctcatggaacaagatgtgaaggaaaatgaggccttgctgctccgattcaagtattacagcttttttgatttgaatccaaaggtaccgagggtttaaagggatcttttttttttccccattaatttgttttgttcacatggatgg

SEQ ID NO: 67752 - DNA, 348 bp, Homo sapiens
cctactctgggggatcaaccagatcttcattccataactcgtgcttctcgtcctaaattatgtactagaaaaaattgtaatcctcttactataactgtccatgaccctaattcaactcagtagtattatggcatgtcatgggaattaagattttatatcccaggatttgatgttgggactatgttcaccatccaaaaaatcctggtctcatggagcccacccaagccaatcgggcctttaactgatctaggtgaccctatgttccagaaaccccctaacaaagttgatttaactgttcctccaccattcttagtcataaaagatacactccaaaagttcgagaaaatc

SEQ ID NO: 67753 - DNA, 530 bp, Homo sapiens
ccacgatttcgtggagacggagatcgagcgctgccgcttcgagtgccagtgggagcggatccctgagctcgtcaagcagctgtcggccaagctcatcgccaacgatgacatggcagagcttctcctcggggagtcgaagctggagcagtacctgaaggaacaccccctgaggcagggggccagtccccgaggccccaagccccagctgactgaggtccgcaagcatctgaccgccgccctggaccgagggaaccttaagtcagaattcctacaagaatccaatctgatcatggccaagttgaattatgtggaaggcgattataaagaagctctgaacatttacgcccgggtgggcctggacgatctgccactgacagctgtcccgccctacaggctgcgggtgatcgcacaagcctacgctaccaaaggactttgtttgtagaagctgcctatttcttcttctaccagtaatctccatgtggaccgggaacaggatgtcatcacctgttatgagaaagcatgggacatcg

SEQ ID NO: 67754 - DNA, 447 bp, Homo sapiens
  misc_feature (1)...(447): n = a,t,c or g
gtaatagagaaanattctagacctgagagctcgaanncggannnnggnnngaannnctattactgttgacagaaacacggaaaccagaacttcctcatttagcatcatttctgtccctgcttccagcacctgagggtctccgagccgtgtgatttatgccaagcttggtggtgagatcctggactacagggacttggcagcccttcctaaaagtaaggccatctatgacatcgaccgccccgacatgatctcctactcaccctacatcagccactctgcaggggacaggcagagctacggcgagtcccctcagttgctctcgccaacgccgaccgagggggatcaggatgaccggtcctacaagcagtgtcggacctccagcccaagctccactgggttggttagcctcgggcgctacactccgacctcacgggcaccacagcactc

SEQ ID NO: 67755 - DNA, 834 bp, Homo sapiens
tttcgtcgccggatggcgtaggatcggccgctggtggtggtgataccgggtacccgggctatggcgccggcgcagcgctgccctctgtgccgccagaccttcttctgtggtcgcgggcacgtttacagccgcaagcaccagcggcagctgaaggaggctttggagaggctcctgccccaggtggaggcggcccgcaaggccatccgcgccgctcaggtggagcgctatgtgcccgaacacgagcgatgctgctggtgcctgtgctgcggctgtgaggtgcgggaacacctgagccatggaaacctgacggtgctgtacggggggctgctggagcatctggccagcccagagcacaagaaagcaaccaacaaattctggtgggagaacaaagctgaggtccagatgaaagagaagtttctggtcactccccaggattatgcgcggtgagtcactggtatggaacgtgaagtagcagagtgaattctctggatctttgtcaggtatgggagcttactctattaactggaaagttcaggagggacttacgaagaatctgctgtcttcatagcacttcttattctaggtactatattggacacaaaaatgtgacagttcttgaggtttagttgggggataggatttagcaaatagagaacaatactaaaagttgactgttatcaactacttaaatatgaggcaccgagaatactaacgttagaagaggctgtttatagtttgtaagaaactgctgctcagccagtacctacttttaataggtttggactctattttattttatcttttcttttgagacagagttttgctcttttcgcc

SEQ ID NO: 67756 - DNA, 426 bp, Homo sapiens
tttcgtctcagaccagaccaccgggcgcaccccgatgccgagcccgcagcttctggtgctcttcggcagccagacaggcacggctcaggatgtgtcggagagactgggtcgcgaggcccggcgccggcggcttggctgccgggtgcaggccctggactcctacccggtggtgaatctgattaacgagcccctggtgatatttgtttgtgcaactacaggccaaggagacccccctgacaacatgaaggtaaggctggcctgatgtggctcctcagatccctgccctcgaccctcaccccgttttcattgcctggcgtctaggtgcagtaaatagctctcctttatctcatgcaccttcagaggtggatttgagagaacgtccgtgagtggggctgggggctccggttgccctctctaaaaactcgc

SEQ ID NO: 67757 - DNA, 712 bp, Homo sapiens
caaaggtcgcaggcatagggccgctcgcccgagtgcacgcgccggtggctggccagcagtgaggggtaggcaaagcggcgaccacagtcgtcgcaggcgtgcagcttctcctctgtgtgcgtgctgcgatggatggccagggagccgctccgccggaaggcacgcccacagtctgggcaggggtagggcttctctccggtgtgcaagagctggtgctggagcagcgtgctgcgctgggagaagcgggcctcacagtgctcgcaggcatagggacgctccccagagtgcacacgccggtgactgaccaggcgagaggaggaggagaagcgccgctcgcagtccgggcacgggtagggcttctcgcccgtgtggatgcgctggtggatgacgagggccgtgcgctggcggaagcggcggttgcactcgaggaaactcctgcccgaacttgggtgaaaggcaccggaagatgccttcggggaaaatggcggcgctgataccgcaccgcctttgcctggaacacaggcagcttccagctatcgattttattgaccggagcgccatgccggcttcctaacctctttgccctcaagtgtaatggcgctgcgattgggcttcacgccgtcttttttcccctccccaatacgcgcgttcattggacgggagccgaagatcgagcgttctgattgggtgctagcaaaggcggcccgtttgg

SEQ ID NO: 67758 - DNA, 425 bp, Homo sapiens
tttcgttggagacgcggagcgtcccgaggaggcaggagactcgggatgatcgggagcgtcccagggagggggcccctgagtgctttctgggggagggggcgctgcctacgtcctcaggggagcaggcttggaggctttgagtccacccttctgtaatgatgggaggggcatccgagtgcatgtgggggcccgcggggaccctagtgacacggggcgaggcccagaggatgagtactctcggggaggcgacatccttattgaagaggcagtggagggcccgttttgggggaaagggtgtcttggattccccctgtgaggcagtgccagggagcctgggggagaagagccgagatcagggtggggcagggctttggccccaccaccccaggggcccagagagagatgaggcggccaggagtgccacc

SEQ ID NO: 67759 - DNA, 440 bp, Homo sapiens
tttcgtggcggtgcggtgcggtgcgcgcggggcggtgccgcggcggcggagggagccgcgatggagggcgctccgactgtccgtcaggtgatgaatgaaggggattcaagccttgccaccgacttacaggaagatgtagaggaaaatcctagtccaactgtggaagagaataatgtggtagttaaaaaacaggggccaaatttacataattggagtggtgactggagcttttggatttcaagttccacctataaagacaggaatgaggaatacagaagacagttcacacatctacctgatacagagaggctgatagcagattatgcttgtgctcttcagagggacattttgctttagggacgactatacctttcagaaaactggctttgtttctatagcaacatcttcagaagggaaactacaatttctattgctttaaa

SEQ ID NO: 67760 - DNA, 378 bp, Homo sapiens
  misc_feature (1)...(378): n = a,t,c or g
ctagaaatcagtaacaaggaaaacttgaaaactcacaaatatggggaaaataaacacactcttgatcactggttggagatgaaatcatacaggaaattagaaaacactttgagatgaatgaaaatgaaaacacaacataccagaacttatgggatgaagttaaagcagcgttcagagggaaatgtttagctgtaagcatctacctttaaaaataagnnnnnnnnnnnnnnnnnnnnnnnnnnnnnnnnnnnnnnnnnnnnnnnnnnnnnnnnnnnnnnnnnnnnnnnnnnnnnnnnnnnnnnnnnnnnnnnnnnnnnnnnnnnnnnnnnnnnnnnnnnnnnnnnnnnnnnnnnnnnnnnnnnnnnnnnnnnnnnnnnn

SEQ ID NO: 67761 - DNA, 810 bp, Homo sapiens
aatcgtagacttcgtagaccctaggcagtgcggtggaattcccacaagatgtggacaaggaggcgatgatggaagcaggctgggacccctgcctgcaggcccccttccacctcaccccgaccctgtacaggacgctgcgtaatcaaggcaaccagggagcaccggcggagagccgagaggtgctgcaagacacggtcaacctccttttcaaccatcccaggcagaggaatgcctcccgggagaacctgaaccttcccgagccccagcctgccacaggccagccacgttccaggcctctgaaggttgcaggcagccccacagggaggctggctggagaccagggcagtgaggaagccccacagaggccaccagcctcctctgcaaccctgagacggcagcgacatctcaatggcaaagtgtcccctgagaaagaatcagggccccgtcagatcctgcggagcctggtccggctgtctgtggctgccttcgccgagcggaaccccgtggaggagctcactgtggattctcctcctgttcagcaaatctcccagctgctgtccttgctgcatcagggccaattccagcccaaaccaaaccaccgaggaaataagtacttggccaagccaggaggcagcaggagtgcaatcccagacacagatggcccaagtgcaagggctggaggccagacagacccagaacaggaggaagggcctttggatcctgaagaggacctctctgtgaagcaactgctataagaagagctgtcaagtctgctggaccccagcacaggtctggccctggaccggctga

SEQ ID NO: 67762 - DNA, 714 bp, Homo sapiens
aaatgagatcgatagtctagtgcgaggaacgtcggaattctcagactaagaacagacctgaacaaaaggtcatctagaacctattcggcgacagacattgaattcataccaatcacgcacttctgcaggagacaataggaactgtcgccctctgtaactgccatattcataagtaacccatctgaaaacaaaaataaccacagtaagtggcaattttcatttgacagtggaccccaattacatttatttttagaatgctttccatttctagactgaactatatacttttaacatacattgggggaaaaatgatcttttctagaacacttaaaagaagtaatttcttgacaaatagcaaatttttgttacatgagtacttatgccaaaaagttccattcttgaagagaaataggtaagttttttcctccataaagcaatgaaatattgtcttttagtggattcctcagttcttcctgggaactattcataaaatagcttcagttgtaataatgggtctttaagttgttaatatttccaaagctcttagtaggtgctaaatagggttaaataaaaagttttgtctgcagtgagagtaatctttgttaaatctaaaaaactgctaagatactcagttcccttccgctcagatgctactgctgcacacctgaggaagtatgggtttaagcgcagactggcgtggaagcagcccagcgc

SEQ ID NO: 67763 - DNA, 976 bp, Homo sapiens
tcccacggttctggaaggaggtggaggaacattggctgctgaagatttagttctggccagccagctacctgtgtttccgcctgctgggcgcggccctgcccctgctgaccaaggagcagctgcacctggtgatgcagggagacgtgatccgccattacggggagcacgtgtgcactgctaagctcccaaagcagttcaagtttgccccagagatggacgattacgtgggcaccttcctagaggggtgccaggatgaccctgagcggcagctggccgtgctagtggccttctcatctgtcaccaaccaaggcctccctgtcacgcctactttctggcgggtagtgcggttcatgagccctccggccctgcagggctatgtggcctggctgcgggccatgtttctccagccagacctggactccttggttgacttcagcaccaacaaccagaagaaagcccaggattcatcgctccacatgcctgagcgagctgtgttccggctgaggaaatggatcatctttcgattggtgagcattgtggacagcctgcacctggagatggaggaggccttgactgagcaggtggccaggttttgtttgttccactcgttctttgtcacaaagaagcccacatcccagatccctgagacaaagcacccgttctccttccctttggaaaaccaggcccgagaggctgtcagcagtgccttcttcagtctgttgcagaccctcagcacgcagttcaagcaggcaccgggccagacccagggtgggcagccctggacctaccacctggtgcagttcgcagacctcctgttgaatcacagccacaacgtgaccaccgtgacacccttcactgcgcagcagcgccaggcctgggaccggatgctgcagactctgaaggagctggaggcccactccgcagaggccagggctgctgccttccagcaccttctgctcctcgtgggcatccacct

SEQ ID NO: 67764 - DNA, 384 bp, Homo sapiens
  misc_feature (1)...(384): n = a,t,c or g
tcggccgatgaacgagtaaggttagagaggcaggcatgagccagatcctgaattgatttgaatgccatgggaaatggctgagcttctttccactgtgggtggccgggagctggactgggctctatttcaggctacaagaggatcaagtagacatttggtggtggagtggggccatgnnnnnnnnnnnnnngggggggccgttttaaaggatccaagtttacgtccgcgggcttgcaacgtaatattttttttttggggccccctaaattaaattcccgggccggggtttaacaacggggggatgggaaaaacccgggggttacccaatttaatggctttgaagaaaatccccttttcgccggggggcctaaaacccaaaacccg

SEQ ID NO: 67765 - DNA, 416 bp, Homo sapiens
cactgcactccagcctgggcgacagagcgagactccatctcaaaagaaaaagaaaccgttcgaccagggaaattcagagtccccaaggaagtcaagttgtcatctccagatccttgacacctattccaattttcagaaccaacgggaattggtgggatgacattaaaaataggcttctgatcctactgttgagaaagggatgctgtattcatgtcatagtggtacatctgtcctccagaggtactcacaccgtgaacagaaatggcagacattttattaccaatcatatttgctccaggagagcttgcctgacagtaaactgtgcccagtttctcttgcttaattaccccaggggtgcagagttggatgaaatctttttctgttttcgcttggggcagtgttacattattgaggct

SEQ ID NO: 67766 - DNA, 407 bp, Homo sapiens
agcacttggcgttggcagcctccacgccctcctctgcctcctgcagccgcagtgccagcttttttctaggccatggaaccagacaagctccttgatcttcttctgcatctgggcccccaagagctgctcgtcttccacccgcaggctcagctggctcagctcggagtccttcctgggagccacagagtgggaaccacaagaatccagaagggaacaagggccaggtgcaggctcagaaggcccccacctgctgccccaccacacctacttcttgagcttctcctccagctgctgcttgtcttgagcagcatcagccaccgactcctgcgtcagcttcaggtcaccctccagcttgcgcttggcccgctccgtgtccatgcgcagcttcttctcctgctccagggagc

SEQ ID NO: 67767 - DNA, 449 bp, Homo sapiens
aagcttggcacgaggctgaaggtcaaaaggccattaatcagttaaaacaagccttgcttaaagcaccagcccccagtctttctgtagggaagtcctttaatctttatgtatcataaaggaaaggaatgaccctgggagttttaattcaagttcaaggcccagctcaacagccagtaggttacttaagtagagagcttgacttggaggctaaaggatggccagcttgcctctgagcagttacagtagtggccctgctagtcccagaggccaccaagttaaccctggggaataacctgtttatgcctcacataaataatgtggcaggcttgctgtcctctaaagcgagtctctggctaacagacagctgcctcctcaagtatcagactttgctgctagagggaatcttgcagtccaggttaaaaacctgaccttggcctgatccccagaca

SEQ ID NO: 67768 - DNA, 1113 bp, Homo sapiens
  misc_feature (1)...(1113): n = a,t,c or g
ggaattcgatcgaactcgatgactgcgcccagactgatgaggagcatcggaatcggggtaaactgagtgatctggtggcagagcacctagaccacctgcactatctcaatgacatcctgatcatcaactgtgagttcctcaacgatgtgctcactgaccacctgctcaacaggctcttcctgcccctctacgtgtactcactggagaaccaggacaagggaggagaacggccgaaaattagcctgccggtgtctctttatcttctgtcacaggtcttcttaattatacatcatgcaccgctggtgaactcgttagctgaagtcattctgaatggtgatctgtctgagatgtacgctaagactgaacaggatattcagagaagttctgccaagcccagcattcggtgcttcattaaacccaccgagacactcgagcggtcccttgagatgaacaagcacaagggcaagaggcgggtgcaaaagagacccaactacaaaaacgttggggaagaagaagatgaggagaaagggcccaccgaggatgcccaagaagacgccgagaaggctaaagagatcgagatggtgatcatggagcgtagcaagctctcagagctggccgccagcacctccgtgcaggagcagaacaccacggacgaggagaaaagcgccgccgccacctgctctgagagcacgcaatggagcagacccttcctggatatggtgtaccacgcgctggacagcccggatgatgattaccatgccctgttcgtgctctgcctcctctatgccatgtctcataataaaggcatggatcctgaaaaattagagcgaatccagctccccgtgccaaatgcggccgagaagaccacctacaaccacccgctagctgaaagactcatcaggatcatgaacaacgctgcccagccagatgggaagatccggctgggcgacgctgggagcttgaggttgccttgtttcttgaaggcagcaagttcctgattgagttgttgggttgcattcattgaagggacgttgcaantgggcttncttggganggtttcgnagagaaggaaagtttttcaactttgttacggacatttttattaaggggaga

SEQ ID NO: 67769 - DNA, 470 bp, Homo sapiens
tttcgtggcgatacggtggccgagagggcacggagaggaggacggtggctgacgagatccggcatggagcatctggagcgctgcgagtggttgttgcgggggacgctggtgcgggcggccgtgcggcgctacctgccctgggccctggtggcctccatgctggcgggctccctcctcaaggagttgtccccgttgcccgagagctacctcagcaacaagcgcaacgtcctcaacgtgtattttgtcaaagtggcctgggcctggacgttctgtctccttctgcctttcattgccctcaccaactaccatctgaccggcaaggctggcttggtcctgcggcggctgagcaccctgcttgtgggcacggccatctggtacatctgcacctccatcttctccaacatcgaacactacacgggcagctgctaccagtccccagccctggagggggtcagaaaggaacaccagag

SEQ ID NO: 67770 - DNA, 1593 bp, Homo sapiens
gcggccgctgcttcaggtcggcgggctccagggagacctgggtgggcagcgtcgccgtttctcctttcttgggcagtatttttcccagcgccacgcggaggctgggccattatgagctctgcatttccaggacctggtcactattcaggacacggttccagcgcagtgcgcgttagccatgtctcagggatgagtgacattccaagatgtggccattgacttctccaaggaagagtggggattcctgaaccctgctcagagagatttgtacacaactgtgatgctggagaattatcagaacctggtctggctgggactttccatttctaaatctgtgatttcactgttggagaaaaggaaactgccttggataatggcaaaagaagagataagaggcccattgccagatgtgccaggtgcagagattaaggagttatctgcaaagagggctattaatgaagtattatcgtagtttgacacagtgataaaatgtacaagaaacgtatgtaaggaatgtggaaatctatactgccacaatatgcagcttactctccataagagaaatcatacacaaaagaaatgcaatcagtgtttagattgtgggaaatacttcactcgtcaatcaactctcattcagcatcaaagaatccacacgggagagagaccctataaatgtaacgaatgtattaaaaccttcaaccagagggcacaccttacctagcatgagagaattcacactggtgagaaaccttacaaatgtaaggaatgcaggaaaaccttcagccagatgactcatctcacacagcatcagactacacatacgagagaaaagttccatgaatgcagtgaatgtggaaaggccttcagccgtgtctcagctcttatagatcaccagcgaattcatagtggagaaaagccgtatgaatgtaaggagtgtggaagagccttcactcaaagtgcccagctcattagacatcagaaaactcattctggagaaaaaccctatgagtgtagtaagtgtaagaaatcttttgtgcacctgtcttccctgattgaacattggagaattcacactggagaaaaaccatatcaatgtaaggactgcaaaaagaccttttgtcgtgtgatgcagttcactctgcacaggagaattcatactggtgaaaaaccctatgaatgcaaggaatgtggaaagtccttcagcgcccattcttctcttgttactcagaagagaacacacagtggagaaaaaccgtataaatgcaaggaatgtggaaaagccttcagtgcgcactcttcccttgttactcataagagaacacacagtggagagaaaccctatacatgccatgcctgtgggaaggcctttaatacttcctccacactttgtcaacataatagaattcatactggtgaaaaaccctttcagtgcagtcaatgcgggaagtcctttagctgcagctctcaccttactcgacactgtagaatgtgtaatggaaaatttagcaaataaccaaaactcaaaatgttaattctgattattctgtatcatcaccagtactttgtactttgagtctttttaaatatgctctg

SEQ ID NO: 67771 - DNA, 839 bp, Homo sapiens
tttggtgtcggaagcgccagcccagagcctgggaagtggccgcagaggctgctcggccccgctgcccgccaggtcgtgggctcccgctccgggcccggggccaccggctgtggacttcaaaatgagcgtccctgactacatgcagtgtgctgaggaccaccagacgctgctcgtggtggtccagcctgtgggcatcgtctccgaggagaacttcttcaggatctataagaggatttgctctgtgagtcagatcagcgtgcgggactcccagcgagtcctctacatccgctacaggcaccactacccacccgagaacaacgagtggggcgacttccagacccaccgcaaagtcgtgggcctcatcaccatcacagactgcttctcggccaaggactggccacagaccttcgagaagttccacgtgcagaaggagatctacggctccacactgtatgactcccggctctttgtcttcgggctgcagggggagatcgtggagcagccgcgcaccgacgtggctttctaccccaactacgaggactgccagacggtggagaagagaatcgaggacttcatcgagtcactgttcatcgtgctggagtccaagcgtctggacagagccacagacaagtctggggataagatcccccttctctgtgtcccgtttgagaaaaaggactttgtaggactggacacagacagcaggtaagcttacctagagacccaggccccttggcttccctgcatcagaaagggaaagcacagggcagaatttcattgcagcaaggagtagaaaggtgttgtccattggtttttaaaactaatgactttctgtcaga

SEQ ID NO: 67772 - DNA, 617 bp, Homo sapiens
ctccaaacttctatcaagggttcagaggctgagtccacaccaccctccttcatgagcgttcacgcccaacttgctgggtctcttggtgggcagccagcacccatccagactcaaagcctcagccatgatccagtcagtggaactcagggtttagaaaagaaagtcagtcctgatcctcagaagagttcagaagacatcagaacagaggctttggccaaggaaattgtccaccaagacaaatctctagcagacattttggatccagactccaggctgaagacaacaatggacctgatggaaggtttgtttccccgagatgtgaacttgctgaaggaaaacagtgtaaagaggaaggccatacagagaactgtcagctcttcaggatgtgaaggcaagaggtaagtccctggtgatgtcctcagagagacttacaatcacactccttccatggggatgatgataagtctaggactagttgcctgatgttctcctactgccacagctcctgaaccaagagtgacattttatctcagtcttggaggaatggctctggcagtgaggatgtgggacagatatgcaacaacaaagaaagtaatagtaataattataataattgc

SEQ ID NO: 67773 - DNA, 1028 bp, Homo sapiens
ctggcacacctggcagcacccaagttgggggtggccctgggcccctcgcttgccgcacctgcactggcctcttcactggtggccgagaaccagggctttgtggcagcactgatggtgcaggaggcaccggccctggtacggctgagcctggggtcccatcgggtcaagggcccactcccagtgttgaagctccagccggaggcgctggagcccatctactctctggagctgcgcttccgtgtggaaggacagctgtatgcacccctggaggctgtccatgtgccctgcctgtgtcctggccgccctgcccgccctctgctcctgcctctgcagccccgatgcccggcccccgcacggctggatgtccatgccctttacaccacatccactggtctcacgtgccatgcccacttgccacccctgttcgtgaactttgccgacctctttctgcctttcccgcagcctccagagggggccgggctgggcttctttgaggagctctgggattcctgcctgccagagggtgctgagagtcgtgtgtggtgtccacttgggccacagggcctggagggcttggtgtcccgccacctggagccttttgtggtggtggcccagcctcctaccagctactgtgtagcaatccacctgcccccggactcaaagctgctgctgcggctggaggcggccctggcagatggagtgcctgtggccctgcggaccgatgactgggccgtgctgcccctggcgggggactacctccgtgggctggcggctgctgtctgagccccgggagaccaggtgggggcaggactgtggcccttgtgggggccaaggcacactcctgtagctctgtcgccaaaaccctgcattccgcagtgccctcgctggcttgttttcttttgggccccggttgggagcaggctcctgggggtgagggtctgtctgagtctgtttttgctgctctagcaagatccctgagacggggtaagttataataaacagaaatgtattggctcagaaaaaaaaaa

SEQ ID NO: 67774 - DNA, 499 bp, Homo sapiens
tgaagccgacgtgtgcagaagtccctcttcttcggtaccacatccctgtttccgtggaggaaggcagacttcagactgaaggacagagaaggcaactgccctacagccctgcaggtcttcaagtctgtggttgtgggcactaacccagacaagaaaaggaaagacctgcagtatcggtgcaggaaaggcaaagaagggaacatctcaacatggaaaagctctacaaagaaaatgaaggaaagccagagaatgaaagaaacctagaaagtgagggaaagccagaggatgagggaagtacagaagatgaaggaaagtcagacgaggaagaaaagccggacatggaggggaagacagaatgcgagggaaagcgagaggatgagggagagccaggtgatgagggacaactggaagatgagggaaaccaggaaaagcagggcaagtctgaaggtgaggacaagccacaaagtggagggcaagccagcctcccaggccaagccaa

SEQ ID NO: 67775 - DNA, 372 bp, Homo sapiens
gcgccggggcaaagaggcgggctagccacatccctattggaccaggatgggggacagaggtataggggaaggaagcacggtctgggggcagggacagggatggagccaaggcgagagagtgcgggattgggccaggctttagaggcacggcctgggtcgggtgggccctgggaggtgagagcggtggggacaaagtgggctcacctgggcaacctgggcctccgggacaccgcgcaggcgcgcaagcagctccaggtgctcgcggcccgtcagcagctcaaagatggcatcggattgagggcagtatcccatgctgaggtgcgcagcactgggttcccgggccacgctggggatgggggcgccgggggctaa

SEQ ID NO: 67776 - DNA, 1803 bp, Homo sapiens
ctcagggggcacctggagcatcccctgtgcccacctgggagctgggagcctctgtggctccaggaacccccagaagctgggtgcccacagaccttcaccttgaccctgcagcgcccttgagtgtgcacagcccattgtctgcaggttctcggcaccagaagttcctgctgaagtggccaaggtcttggccagtggcaactggaccccagagtctccatccccagcctgccagtgtagccagcccggtgcccggcgcctgctgcccgactgcccggctgcagctggtggtccccctccgccccaggcagtgaccggctctggggaagtggttcagaacctgacaggccggaacctgtctgacttcctggtcaagacctacccgcgcctggttcgccagggcctgaagactaagaagtgggtgaatgaggtcaggtacggaggcttctcgctggggggccgagacccaggcctgccctcgggccaagagttgggccgctcagtggaggagttgtgggcgctgctgagtcccctgcctggcggggccctcgaccgtgtcctgaaaaacctcacagcctgggctcacagcctggatgctcaggacagtctcaagatctggttcaacaacaaaggctggcactccatggtggcctttgtcaaccgagccagcaacgcaatcctccgtgctcacctgcccccaggcccggcccgccacgcccacagcatcaccacactcaaccaccccttgaacctcaccaaggagcagctgtctgaggctgcactgatggcctcctcggtggacgtcctcgtctccatctgtgtggtctttgccatgtcctttgtcccggccagcttcactcttgtcctcattgaggagcgagtcacccgagccaagcacctgcagctcatggggggcctgtcccccaccctctactggcttggcaactttctctgggacatgtgtaactacttggtgccagcatgcatcgtggtgctcatctttctggccttccagcagagggcatatgtggcccctgccaacctgcctgctctcctgctgttgctactactgtatggctggtcgatcacaccgctcatgtacccagcctccttcttcttctccgtgcccagcacagcctatgtggtgctcacctgcataaacctctttattggcatcaatggaagcatggccacctttgtgcttgagctcttctctgatcaaaagctgcaggaggtgtgccggatcttgaaacaggtcttccttatcttcccccacttctgcttgggccgggggctcattgacatggtgcggaaccaggccatggctgatgcctttgagcgcttgggagacaggcagttccagtcacccctgcgctgggaggtggtcggcaagaacctcttggccatggtgatacaggggcccctcttccttctcttcacactactgctgcagcaccgaagccaactcctgccacagcccagggtgaggtctctgccactcctgggagaggaggacgaggatgtagcccgtgaacgggagcgggtggtccaaggagccacccagggggatgtgttggtgctgaggaacttgaccaaggtataccgtgggcagaggatgccagctgttgaccgcttgtgcctggggattccccctggtgagtgttttgggctgctgggtgtgaatggagcagggaagacgtccacgtttcgcatggtgacgggggacacattggccagcaggggcgaggctgtgctggcaggccacagcgtggcccgggaacccagtgctgcgcacctcagcatggg

SEQ ID NO: 67777 - DNA, 418 bp, Homo sapiens
ttgcttcggctcaggtgccgactgctctccaggctggagccaccactactgccaccaccaccactggtgccacgaccgccaccgccgccaccgccaccaccgcagaagtgtgctgcattcatcaggatgcccggggacagcaggtcattgtcctggaacggccccgtggaggctcactgccaggtggccgctggcctgaccccttctccagtgtcctggaagctgcctcctccctcctaaccccaggccaagcggccactgtccagccggcctcttgccaaaccagaggggagggccccattcccttttgtcctcccacccaccagccaccctggacctcattggtctacaggccgttttccactatgcagcagaggcagggaagcagagaggggtcgcccatcccaccttctaggaa

SEQ ID NO: 67778 - DNA, 619 bp, Homo sapiens
ctcccatagggagaagccgtgaaagacagtgagcaggcgctgtacgagttggtgaaatgcaacttcaatgtggaggaggccctgcgaaggctgcggttcaacgtgaaggtgatccgagatgggctctgtgcttggagtgaagaggagtgcaggaactttgagcacggcttccgtgtgcatggaaagaactttcacctgatccaggccaacaaggtgcgcacacggtcagtgggcgagtgtgtcgagtactactacctgtggaagaagtcggagcgctacgactacttcgcccagcagacgcggctgggccggaggaagtacgtcccgtccggaaccacggacgcagaccaggacctggatggcagcgaccccgatggccccggccgtccgcgcccggagcaagacaccctgactgggatgcgcacagatccactgagcgtggatggcacggccggtggtctcgatgagcccggagtggcctctgatggactcccgtcctcggagccagggccgtgttccttccagcagctggatgagtcccccgctgtacccctgtcccatcggcccccagccctggccgacccagcctcataccagccagctgtcactgccccggcgc

SEQ ID NO: 67779 - DNA, 760 bp, Homo sapiens
gtacgcacgcttgcgtactctagaatgctctagagcgggcgcgcgccggggcagggaaggccgggcgtggccttagacagggcacaggggcatgaaaggcgctggggaggaacaggaccagcctcggcaagtgggagttgatgcgagtgacccgggcccttctgtctcgtctgggtctccaccaccaagagcctgatcttgcgactgaacgcccaccatggccctggcctcaccgagctgccctcggttcccaggacctctggggccactagctgggctcctgcctggtcactctcctgttcctcatcctccgcacgcccccggcacccagacttggcacactggctgcagaggctcccattgcatggtgcagacagctctccctgcacccccagtgcccgaacatggagtaggtgccaatgaatgcctcctgggggagtctgaccacgatgtgtatacagtacagccgggactccccggggagcaggtcggaaaccgcacctgctgactttcttagttgtcttttgggaaggtgggctggaccccactacatactccccaaggtcatgaggggcatcggggtgggatcttccagaaccttccccattccttctactatccaacactgacatgtgggcccccacccctgacctggggaggcaagggccgaggagtcagggagggtggagaggaagtgcccctcccatgacacgtactttgccccccacacctcctgcctcccgtcgacccgggaattccg

SEQ ID NO: 67780 - DNA, 714 bp, Homo sapiens
cgggagtccccttcttgttaaaaaagaagtccaggctcaaaagcagaggaagatggagagaacaggtattattagtaattaaagcttctaccttgcactcttcatctgctgtgaatggcctcctgggaactaggtcaggctgcgtgtgcagtgccctggctctcaacatggacttgattggtctctttacttactggtggggatacctttgagcaatccattttcttcctcagtctcagcttccccataggcaagacaggcattataacgtgaagatgaaagaacagaaatgaaagaggcaggcagaaacgctggggcaggatgtcgggcaaacaggaggtgctcaatacacgctgaacaaatcggaacgtgaaggctcatccctccttccttcctggggctcactcacctggtggtgctctccggcctgtgctctgcctccgccggcaccgggggccggcccatatccaggtgctgctccagcacctgctgccggaactcggacacctgagactgccggtcctccttctcctgccgcagccgccgctgccgcgccagccacttctcctcctcattggtgcgctggatcagcagggctgtggcagcactgctgctaagcagagagaagatgccatggttggagatgaagctgtgcaccgtggggtgtggggtgggcaccggaagcaaggggtgttggaccggctttggcgcccc

SEQ ID NO: 67781 - DNA, 442 bp, Homo sapiens
tttcgtatcgctgcgaaggcggccacggcgtccagcgaaggcccggggtaggagtcctgtaggcccttccgcatggagtccaggaaggatccccggagccactccaagccccggaccgcagcctcggagtaaccgagcagctccacgccgcggtaggtgcagcgtccgctgctggcgtcagggtccatggatgccagttcctgcaggaagccctggaggcgggccccacctgagccgcgctgagcttggagggaggccgcagccgccatcaccagaggctgcagcaaggccaagtccggctcttctgcctgcaggacaagggagagcttctgcacagagggcagggcatccagcagcaggtgggtgaaggccacgaaggtgaactggcgcagggccagggccagtgaccccgccacaggtgaggcaagggctgcagccttca

SEQ ID NO: 67782 - DNA, 879 bp, Homo sapiens
cgacccacgcgttcggaatccggatgagtactatgtgttggcagtttcctgttgacaggaatgggagaaaggggtccaggtgcctgtgagcccggggaccatccctcagcctgaggccagggttgtgtctgaagagaaatccctcatgttcatcaggcccaagaagtacatcgtgtcatcaggctctgagcctcccgagttgggctatgtggacatccggacgctggctgacagcgtgtgtcgctatgacctcaatgacatggatgctgcatggctggaactgaccaatgaagaatttaaggagatgggaatgcctgaactagatgaatacaccatggagagggtcctagaggaatttgagcagcgatgctacgacaatatgaatcatgccatagagactgaggaaggcctggggatcgaatatgatgaagatgttgtctgtgatgtctgccagtctcctgatggtgaggacggcaatgagatggtgttctgtgacaaatgcaacatctgtgtgcaccaggcctgttatggaatcctcaaggtaccagagggcagctggctgtgccggacatgtgccctgggggttcaaccaaaatgtctgctgtgtccgaagaagggtggagctatgaagcccacccgtagcggaaccaagtgggtccacgttagctgtgctctgtggatccctgaggtgagcattggcagcccaaaaaagatggagcccatcaccaaggtgtcacacattcccagcagccggtgggcgctagtgtgcagcctctgcaatgagaagtttggggcctctatacagtgctctgtgaagaactgccgcacagccttccatgtgacctgtgcttttgaccggggcctggagatgaagaccat

SEQ ID NO: 67783 - DNA, 497 bp, Homo sapiens
tttgaagcctgacagctgatgcgaccgacgcaccgttccggaattacggggtcgacgatttcgttgctcatctgggcatctgagcctccttcgaagtttcctgtcacaactgtcctcttgacagcatggatgaggaggaagacaatctgtctctgctgaccgcactgctggaagaaaatgagtcagccttggattgtaattcagaagaaaataacttcttgacgcgggaaaatggcgagcccgacgcatttgatgagctctttgatgccgacggcgacggtgaatcttatacagaagaggctgatgatggagaaacaggagagacaagagacgaaaaggaaaatctggccactctctttggagatatggaggacttaacagatgaagaagaagttcccgcatcacagtcaactgaaaatagggtcctccctgctcctgcccccaggcgagagaaaacgaatgacgagtttgcagaggaattaaggaatctgccagac

SEQ ID NO: 67784 - DNA, 644 bp, Homo sapiens
tttcgtggaatttcagtttgtgctcaagccctgttcagcattaaagtatccccccaggaaccagaccccaggatgatgagctgttcggacaaaccttcctccagaaatccgacctcagcatgtgtcagataatccacagtgaagagcccagtccatgcgattgtgcagaaacagacagaggggactcaggacctaacgcacctcacagaaccccacaaccagccaagccctatgcgtgtcgagagtgtgggaaggccttcagccagagctcgcacctgctccgacacctggtgatccacactggggagaagccctatgagtgctgtgagtgcgggaaggccttcagccagagctcccacctgctcaggcaccagatcatccacaccggggagaagccctacgagtgccgggagtgtgggaaggccttccgccagagctcagccctcacgcaacaccaaaagatccacaccggaaagaggccctacgagtgcagggaatgcgggaaagatttcagccggagctccagcctcagaaaacacgagagaattcatacaggagagagaccttatcagtgtaaggaatgtgggaaatccttcaaccagagctcaggcctgagccagcatcggaagatccacaccctaaac

SEQ ID NO: 67785 - DNA, 443 bp, Homo sapiens
aggagtaagggaggcccaggtgattgttttctgtggaccttccaggacggacggatgtgagcagtcctgagtggggactggagttagggtggggaagggaagccccaggcagcccctgcaggcccctgcccctgggccctaccgcagcagggcagccctgtctctgggtctcagctgatgcttccctctgcccactggcccctgacctggtgggatttcccaccatctctcccggcccagcctgccctgccctcctaggtcttcccaacctcccctctgcagaaacatctcagccacgtctggcacccccaggcatccctgcctgcctctatgaagttgaccccttcaatgggtttcagcctccaaccccacccccgcttgactcctgctctgtcagcacttgcttgagaaaatcatcctgggaaaccatctttttgggagcg

SEQ ID NO: 67786 - DNA, 1457 bp, Homo sapiens
taggaattgcttaaaaacaagaagttctcccacccttgttggagcgaatgcgcgagtctgacagtgaaccttttgggaaagagccagcattgtaaccgtgctcggtgacttctctggctttatagggaacagatgtgaggatagcaaggggcgcacacgtgaaatgcctggcaggtacccctttgtggctctacttacttcttgccattcctctgccctccaagtgtagaggggacaccgtgggccttggcagtcgcgttccgactccggtctggtgtatgggttgcactcggtctctctggctattttgtgtgttccgatctgacagcccacatgcctctgctgtacgcctcggccacaggacacagagcactaagaagacagagaacattcacagtctggtgagacaagtttgagatctcatattttcagctcatccttgaaaacctttcttcgatttgactgaccttgatggctccctggaatctcacctacattttatgggaaattcaactctccagagagaagagctttcagatagctgcgggacttgcaactgtgactttcagctttcgcttttgaatgaggctccaaatgtctcaatggtggcactatttccagatttgggagccctgcaaagctaatctgctcaaccttcacctactgggttcaatgaatatgaaaagctgccttcctgaaacttttccttcaaagagggaatgatctcctggaattcaagcttctacaaggtggctacctggtgttttccacttttgccgtctcctaaaaagcatcaatcaagccttgccctttcaacccactgaacacataaacatgctttctccttaactgaacttatggccacgatgaacttgaactctgagattcacagaggagagtttgttttaacagctgcttttacaatgaagccctggagttactactctcaagacccctggttctgataggccatcttttcactgtcctctgcattttctaatgcccagctgtcaaggaacacccactgaagttttccaaaacaaaggcacgaaacacaagaaaggcaagagaatgctaatcaccagatgcatgggcatcctatgggggaaccccttacatgtggaatacggtttttctccccaatttatttttataaatttattgatttctttgctagtttgttattaattgttagagatgtcctgttgcctgaggttgccctgtccgatatggtagccaccagcgacaggtagctatttagagtaatttaaaaattacattaaaaatgcagtttccttgtcacttaaccatgtttcaagtgctcagtattaaccacatgtgactagtggcttccataaaggaaggcaaaaatagagaacatttacatcgctgcagaaagctactagatttttttggccaaggcataagctctttctcataagagaaaggggattgca

SEQ ID NO: 67787 - DNA, 340 bp, Homo sapiens
ctcccccatcctgggtgctcctcacctcgcctcctcctgctctgaccagagttctccctctgcccttgggtgctcctcacctcctgctctctggccagagtcctccccctgtcctgagtgcttctcacttgctgtctggccagagtcctcccccctatcctgtgtgctccccaccttctcttgttctctccaacctgggagccctccctctacccctggatgctcctgctgctctcttcctggaacctcctcctgctctctgaccagggagtcctccctccactcctggttgcccttcatctcctgctgtctgaccagagagtcttccccctgtccaggg

SEQ ID NO: 67788 - DNA, 352 bp, Homo sapiens
acgcgtccgacaaaaacaacaacagatggggaaactgaaagtgcatagcacaaaatgcggactaattctgaaatcaccaatatgtatctgtgcttgggaaatagaggcatacacaggaatgcagatgcccacacactcacattcacactcacactcactctcacactcactctcacactcactctcactcgcactctcacactacaccgagatgctcacacactcagcctccccatgcccaggcccctgctctttgttaatcataagaagaccgtggacaacccacctggaaactatgtgcccacagacccagactgaaggtgataaaagagggtggctggcttgggggctg

SEQ ID NO: 67789 - DNA, 488 bp, Homo sapiens
ccgcgtgggggcgcacagcctctggtgcacatggcttcctccccggcggtggacgtgtcctgcaggcggcgggagaagcggcggcagctggacgcgcgccgcagcaagtgccgcatccgcctgggcggccacatggagcagtggtgcctcctcaaggagcggctgggcttctccctgcactcgcagctcgccaagttcctgttggaccggttaggggccgggagaagggcttgggggagggtacccaggcagcagcccctagcctcctctccagggcctgtcctgctgctcttttccaccctcaggtttctcactttaccaggacggcctgtgtgacttgtggcctccgagggtcctgctcccctcctcatggtctcagcgaatagcggcccttagggctggccccttacatgtgtgagtgcccagggctgagggtggctggccacctgagtcctgacctgcctcttctcctgctggcaggtacactt

SEQ ID NO: 67790 - DNA, 399 bp, Homo sapiens
gcgctaccgccccccgacgtgagagagcgaagttcttgggccgcgctccctccctacctgggtgccctccccctccgggagcctgggtccccggggcggtcgcggcggctgcatcctcaggccaggccgcggggggagggggcggcacgggcctccgaaagcggggccatggagcccagagagtcggggaaggtaggactggaaggcccgggggccgcccgctccctcccgaggatccccgagccgggctcgggcgaggcggggcggctcgggcggaggccccgcagatgagccaggcttgcagggaaggactcgccggcccgccctctcttcccgcacttcggcgcccgaccccgggagggtggcggaaaggagcggacgcttccgttcggagtccgg

SEQ ID NO: 67791 - DNA, 658 bp, Homo sapiens
ctcattgataatttttctttctctaatttggttcttatagtgtcttaaaaacgtgttagatgaattgcatagaagctactaaattatttactttgctaaagcctcctgctgaagttgaacctattttattactttttaaatttctgtattagatatcaaggcaacatgagcagccagggcaaggaatagcaccagatgcagttaatggacaaaggagggattccagatctactgtgtttcgtattcctgagttcaactggtctcagatgcatcaacgtttgctcactgatctattattttcaatagaaacagatatacagatgtggagaaggtttgtctatatgtttattatggaagatgtgtataaacctagtctttattttcaaagaaatccatagaaacaggttgtaattaatttcagacatttggttaaaaagtagaatagaaattattctatggtagggttttactgaattcacttttattctccattataagaatggaatccttatctggattacaaaaatgtgaaaagcagaggtttctcttttaaaaaaatttggagtagatttcctgtagcaattttatggcacggaattcaccacaaggtaggtttatcaagttggtttattactagaagtattaaaacataattggt

SEQ ID NO: 67792 - DNA, 403 bp, Homo sapiens
actaaggcgcaccggtgggcactgttgggacagcagggccccgcgcgcagggaagccgcccggatcgcccggaaccgggcatcttccgtggcgggtcagccgagagcccgccgggtggtgctgagtagggagtcccgggctcggggctccgcgggccgcttgcaggagcaggtggccttggcaccgagcgtgcccgcgggaggcgggggggggcgctgctcggtggctctgctgcgtagccggtgaacacttggcactgatgcccgccttctgggcaaggtgccctgagcccagcccctcgccgggctgcagcccaccctcggcgcgctcagcccgcttcaccgcttcagggacggaatagaactcgcagatgcagggtgtcgctgacattttcaactttttc

SEQ ID NO: 67793 - DNA, 1214 bp, Homo sapiens
gtgcagtgaggcggaatacacaagcgcagccaccgaggccggcctggagctggtggacaagggcaaggccaaggagctgccagggagtcaagtgatttttgaaggccccactctggggcagcaggaagaccaagagcggaagaggttgtgtaaggccatgaccctgtgcatctgctacgcggccagcatcgggggcaccgccaccctgaccgggacgggacccaacgtggtgctcctgggccagatgaacgagttgtttcctgacagcaaggacctcgtgaactttgcttcctggtttgcatttgcctttcccaacatgctggtgatgctgctgttcgcctggctgtggctccagtttgtttacatgagattcaattttaaaaagtcctggggctgcgggctatagagcaagaaaaacgagaaggctgccctcaaggtgctgcaggaggagtaccggaagctggggcccttgtccttcgcggagatcaacgtgctgatctgcttcttcctgctggtcatcctgtggttctcccgagaccccggcttcatgcccggctggctgactgttgcctgggtggagggtgagacaaagtatgtctccgatgccactgtggccatctttgtggccaccctgctattcattgtgccttcacagaagcccaagtttaacttccgcagccagactgaggaagaaaggaaaactccattttatccccctcccctgctggattggaaggtaacccaggagaaagtgccctggggcatcgtgctgctactagggggcggatttgctctggctaaaggatccgaggcctcggggctgtccgtgtggatggggaagcagatggagcccttgcacgcagtgcccccggcagccatcaccttgatcttgtccttgctcgttgccgtgttcactgagtgcacaagcaacgtggccaccaccaccttgttcctgcccatctttgcctccatgtctcgctccatcggcctcaatccgctgtacatcatgctgccctgtaccctgagtgcctcctttgccttcatgttgcctgtggccacccctccaaatgccatcgtgttcacctatgggcacctcaaggttgctgacatggtaacacagctgtttttatttactcccgtcggactataacgctgttgtcataagggatgccccatttatgaatgacagagtttcaaaacgatgtcatgtgact

SEQ ID NO: 67794 - DNA, 415 bp, Homo sapiens
gggcggctttgcggcagctgttgaatccttccatcatgaagatgtgctgttgtttgcagccctgatggcccatgagctcgggcacaacctgggtattcagcacgaccactcggcctgcttttgtaaagataagcacttttgcctcatgcatgaaaatatcacaaaagaaagtggcttcagcagctgcagctctgactacttctaccagttccttcgagaacacaaaggggcctgcctatttaacaagccacggcccaggggccgcaagcgtagggattctgcctgtggaaatggtgtggtggaggacacggatcagtgtgactgtggttctctatgtcagcatcatgcatgctgtgatgaaaactgtatactgaaggcgaaagcatagtgcaatgatggtccatgttgtcataag

SEQ ID NO: 67795 - DNA, 966 bp, Homo sapiens
cggccgccctgggagcgagcggaggagcaagcgccggagatgatgactttgaccagtttgataagcctggcgcggaacggtcgtggagaagaagagctgctgatgaggactgggacagtgaacttgaagatgatttacttggagaagatttgctatctggcaaaaagaatcagtcggatttgtcagatgaagagctaaatgatgatcttttgcagagtgataatgaagatgaagaaaatttcagttctcagggtgttacaattagtctgaatgctacatctggcatggttacatcatttgaactctctgacaacactaacgaccaatctggagaacaggaatctgagtatgaacaagaacaaggagaggatgaactggtttatcacaaatctgatggatcagaattgtatactcaagagtacccagaagaaggacagtatgaaggccacgaagctgagttgacagaagaccaaatagaatatgtggaagagccagaggaggagcagctttacactgatgaagtgttagacatcgagatcaatgaacctttagatgaatttacaggaggtatggaaacattggaacttcaaaaggacatcaaagaagaatcagatgaagaagaagaagatgatgaagaatctggacgattacgtttcaaaactgaaaggaaagaaggaacaattattaggctctcagatgtaactagagagagaaggaacattccagaaactttgggtaacttttttgcctgtctcccatcctcctttactctcatttcaacttcctccatagtattgctgtaattaatcaaagtaggcaaagaaggttgactaggtaattgcggctgccgtccggagagtggccggactttggagtgagtgctgtttatggtactgtaaaactcattctttaaaatcattgctgtttatggatttaaaatgcttgaataaaatgtttaagataatt

SEQ ID NO: 67796 - DNA, 1009 bp, Homo sapiens
cagaactgcaggatgaaatccactacccgccctaactgcattgcatctttctgggagcccagggcttcttccttgactgcctggcctggagcacgtcagcccatctggtgcccagggcgccaggctcactgatgatcagtggcctgactgaagcctttgtcatggctcagagccgggtagaagagctggcagagcggctgagctgggacttcacgccaggaccatcttccggagcctctcagtgtactggagtgctgagagacttctctgccctgctgcagtccccgggggatgcccatagagaggctctgttgcagttgcccctggctgtccaggaggagctgctgagtctggtgcaggaggcgtctagtgggcaggggccaggagcactggcttcttgggaggggcggagctcagccttgctgggtgctcagtgccaaggagtgagagctccccctagtgacggcagggagtccccggacactggatctatgggacccggagattgcaggggagcaaggggagacacttacgctgtggagaaggagggagggacacagggtggtcccagggagatggatttggggtggaaggagttgcctggggaagaggcgtgggagagagaagtggccctcaggccacagtcagtgggtggaggggcaagggagtcagcacccctgaaagggaaggccctggggaaggaggagatagctctgggaggaggagggttctgtgtccaccgtgagcctcccggtgcccatggctcctgtcacagggcagctcagtcccgaggagcctccctcctccagcggctccacaatgggaatgcctctcctccgagggtgcccagccctccacctgcaccggaacccccatggcactgtggagaccggggtgactgcggagaccggggagacgtgggggacaggggagacaagcagcagggcatggcacggggtcgggggcctcaatggaaacgaggcgcccgagggggcaacttggtgactgg

SEQ ID NO: 67797 - DNA, 973 bp, Homo sapiens
cgttgctgtcgtatgaatgtgatgaaaaattatcaacgcattgtaataagaaggttttggctcagatagttgattttctccagaaacatgcttctaaaacacaaacaagtgcattttctagaatcatgaaactttgtgaagaaaaatgtgaaacagatgaaatacagaagggaggaaaatgcagaaatttatctgtaagaggaattacaaatttaggaaatacttgcttttttaatgcagtcatgcagaacttggcacagacttatactcttactgatctgatgaatgagatcaaagaaagtagtacaaaactcaagatttttccttcctcagactctcagctggacccattggtggtggaactttcaaggcctggaccactgacctcagccttgttcctgtttcttcacagcatgaaggagactgaaaaaggaccactttctcctaaagttctttttaatcagctttgtcagaagtgggtgcatctacatttaatataaataattatgagttacaaaatactaatgtattcatcatttaacatgaatagtcgtttttactgtaactttgctcttattgccctgactatgaagagaactaaaatttgttacagctctatgctttatgaaaattatatctcagtcctcagaagaagcagcttatcctcatatataaggaaatggagacacagaaattaaatggctcacctagtctgagtgaaaagctgagaatcaaatggagatctgtcctgacttggatgcctatgttgtaataccataaagtgagaaaaccatagagttgtaaaatctagaaagtaccgtaagataacatctaatctagctttcttattttaaaagatgagctgtgaggcaaatagagtttaagtgaatttctcaaggtattacagtatgtttaaaaaccaaatccttatgtgcctggaaataaacacataaaggatctgacttgaaaaaaa

SEQ ID NO: 67798 - DNA, 1803 bp, Homo sapiens; identical to SEQ ID NO: 67776

SEQ ID NO: 67799 - DNA, 463 bp, Homo sapiens
cttttcaactccctggctttcatggacaaacaggtgatacggctttgagatattagggagggctaaagcaggggcttcagttaatgcctttttcaggtttcaaaaagcctgttcttgtgtgtctgtccaaattaacgggccatttcattctgtacctcttggatagccgccactaagatttttgtttgtcatttgaatgctttatcagcagccttttcagctgcctgtgttgctcgtttttgtttttcaaactcttggttgtcaaaaaccttttgggctatttctaaaagctgactgatattcattccagcaaatccctccagtttttggagtttttttttaatatctggggctgcctgagccacaaatgccaaattaagagcatggctattttcgggggccgctgggtcaaaaggggtgtaaatctgataagcctcctggagggtgctctaaaacgggtctg

SEQ ID NO: 67800 - DNA, 196 bp, Homo sapiens
attttctcgttatagaatttttttccccccgcagatataccgagattttccccccccccccccctaaacatttttttttccccccagccccaaaaattttttggggggggggggccccaaatttccccccccccaaaaaaaggttttttcccaaaaaccccccggggggttttttttcccccccctaaaaaaaaaa

SEQ ID NO: 67801 - DNA, 371 bp, Homo sapiens
ccaacattcagtaaaaaattactggaaacagagaaatataaattatggcccataattaggaaaaaagggtaatcattagaagtagaaccagaagtgacagatatgaagaaattagcagcttgaattatgtgatgtggcagatcttatgtattggaggtagggggaaagaagatgcagtgtggaatagatgacaaggcccaatgagagaatcacagtgcaggtccctggggccctgaaggaaggtggttctaaccacaggagaggatcatatgctttttgaaaaacagcctctgctgtgctactgggccctggtagacacggaacgttgagacccagtgatgctgtatccagaactgctcatcttaactagg

SEQ ID NO: 67802 - DNA, 350 bp, Homo sapiens
caaaaagcacatgacccctaaaatgcagaagagaacaaggacccagaatggccaaaacaatcttgaaaaagaatgtaagaaaattgacatttcctgatttcaaaacttactacaaagccacagtaattactacagtgtggtactggtacaaggacagtcatagaaatcaatggaatagaattgagattccagaaataaacccacacgtcttctgtccactgattttccacaaaagtaccaagaccattcaatggagaaaaaagagtcttttcaacaaatagtgctgggaaaattggatagccacgtacaaaagaacgatgttagatgttagatgcttacggacgcgtggg

SEQ ID NO: 67803 - DNA, 430 bp, Homo sapiens
ttcccgggtcgacgatttcgtggagcattcaccgcaacacagcagaaggcaggccgtcaggcactacatggaaatgtgcacatgtccatgttactccagaaacaatccacagccagtcatctaactttgattgccataagcccctcccttaccagcagctggcatgatgggatagatggtgaagcaccagccccagccgttcacaggcccgtcgctgatgaacttccattttaactcatcccccgggatacgtagctagctggaccagtcggaccaccctcggtctgggggaggaaagtgaatctcggggttagcttcactccatcatccaatcaacacaaactttcttagacacaaagcagaatgatttccatcatgcatgaagagcaagttcctccaatccaagctctcccaagctgaagtgcacagg

SEQ ID NO: 67804 - DNA, 427 bp, Homo sapiens
tttcgtggctaactatggcgaccgccacggagcagtgggttctggtggagatggtacaggcgctttacgaggtgggctccgcgccattagcggtccgcgaccacacccgggcccggggagggtgggaggacgcgtgtggatttgtggcctgagacctcggcgggactggctcggtcacgcccagactcggtgcctcttgctggaaggactgccgggagcttctagtcccagcggttgagtgtatggaggaacgggcgggggcgggggctgggactgagggtctcggtttgaattcttatgctccgggtcccctggaagctccggaaaggaacacgtgtaaggggacgcaggagacaggtctgcaaaaaccagagtttagacggacgataaaacggagtggtgaaaatgagtggaacaccttcgtctg

SEQ ID NO: 67805 - DNA, 435 bp, Homo sapiens
ggaattcccgggtcgacgatttcgtcgggggcggggggcggagacgccaggtgtcagggacgatgggggtccgataccacggggacgctgcggatgcccagggccgggcacgcgggacctgagggaccgggagccccggagggtggactttgcggggactgtttggcgggccggtaatcgcggagcgacgcgcgccagggcggtgggcaccggttgagtggggacctgagcggagagcgggggggtaggaaggctttcagaggcctgagttgccttgaggggtttgcacggaggggtgagcacaggatttggttcagcctggcgctccccattccgcggtgagtcggggtggaagtccctcgccggggtgagagctaggctctggggtcaggccgagaggtgctcggatccgcccgccaccgccgctcctgtgac

SEQ ID NO: 67806 - DNA, 702 bp, Homo sapiens
tcctctagagcggccgcaatacatgggtgtgggggattttcccatccctgaagatgcttaaacatagcgtgacactctggctatgttagagatgatctggaggagttgaagcatcatgtgagggttagattagaggacccctaagattctttccagtccggagagcccatattctagcagggctggagttagggactgtgaggtgcaaagcagatacatgattggaaattcaagggtgcctgggagtggtccaacttcaactataaagactggaagactggtcaggggtagagggggagggttggggttcatgtgagaaggggagtaagttgtcaaaaaagaggtatgggtttaattatgaaggctggagggccaggaagacttgaatccagatcaggtggggaagagaggaaagatgttactcactcagtgcccgcgagtggtctgggttccggataccctttgctctgagtttttgtagaagggttcctgcagtcaactgcctcaccaggtacacagacaaggagtaattctacttggaggcagggggtagacaattagcctctgcttctcataccaccactgcccacttttgttccatgaggaccagagacagactcataaagaggaaaatgcttccccaacccaggacactggatggttccccttcaccctcagcaggcttttccaggcacctgcttt

SEQ ID NO: 67807 - DNA, 469 bp, Homo sapiens
gggcggcgatcgccgcgcacgaagctgatcctctagagcggccgcatacatggggctgataatactgaggtatctgcattgaaccctgccgctgctgcagctgtagctgctgcggctgctgctgctgtggcggcggctgtggctgtgatgggcgaatttgttgcggctgcgtctgtatttcttgcatggagatacgctgttgcccggcttgctgctgttgctgcggtgggtaatactggtgctgctgcatctgttgcatgtgctgtgacagcatctgtggggcctgcagtggctgtcctccctgcactggcacctgagccagaggctgctggtagtcataatacaggtgcccttgggtagggtgctgcccgacctgaagagctggtttggacagcccaccagtgaaaccagggtgaggctgctggggcacctgctggtagcgggaagggatagccggtgctgggggctc

SEQ ID NO: 67808 - DNA, 1310 bp, Homo sapiens
tttcgtctgtctctcctccgctttgctgagccctcccttcttcctctcagttcctagagtccgaccgccgccgccgccgagagagaggagaaggagggggagtggccacagcaggtcctatctggtggtgagtggctgtcatgatctctacagcaccgctctacagcggcgtgcacaactggaccagttctgaccggattcgcatgtgtggcatcaacgaggagagaagagcacctctttctgatgaggagtcaacgacaggcgactgccagcactttggatctcaggagttttgtgtcagcagcagtttttccaaggtggagctcacggcagttggaagtggcagcaatgcccggggggcagacccagatggcagtgctacagaaaaacttgggcacaagtcagaagacaagcctgacgatccccagccaaaaatggactacgctgggaacgtggcagaggctgagggcctcttggtgcccctgagcagcccaggagacgggctcaagcttcccgcatctgacagcgccgaggccagcaacagcagggccgactgctcctggactccactcaacacccaaatgagcaaacaggttgactgctcacccgccggagtaaaggctttggactctcggcaaggtgttggagagaagaatactttcattttggcaactctgggaactggagtccctgtggaggggaccctgcccctggttaccactaacttcagtcctctgccagcccctatctgtccccctgctcccggttcggcctctgtgccccactctgttccagatgcattccaggttcccctctccgtccctgccccagtcccccattcagggcttgttccagtccaagttgccacttcggttccagctccttcccctcccttagcacctgtcccggctctggctccagcgccaccgtcagtgcccacgctcatctctgactcgaaccccctttctgtttcggcctcagtcttggtgcctgtgccagcttctgctcccccttcaggcccggttcccttgtcggctccagctcctgccccgctttcagtcccagtttcagctcctcccttggctctcatccaggctcctgtgcccccttcagctccgaccttggttctcgctcccgtccccactccggttctggctcccatgccagcatccacgcctccagcggcccctgcccctccgtctgtgcccatgcccactccaaccccatcttccggcccaccttctacccccaccctcatccccgcctttgctcatacaccggtgcctgcacccaccccagccccctgtatt

SEQ ID NO: 67809 - DNA, 398 bp, Homo sapiens
cggacgcgtgggaaaattttcaagaacacttcatttattaagggaatgtttaattctgccttggaagcggccaaatttgaagatgctgtgattcgaactgtcagtgggataagggggcagatcaagagagcactctgagctccagaaggagctttccaggatagctttgaggataagctgcggatgagcggtgagtgtcttaagtagtgttcagggcagggtgttaccattcatgcttgacttctagccagtgtgacgagaggctggagtcaggtctccagagagttgagcagctccagccttagatctcccagtcttatgcagtgtgcccatttgccttgagtctgcagtcccctggccacacccagtaacagttctttgatctatgagaatagttt

SEQ ID NO: 67810 - DNA, 646 bp, Homo sapiens
gggacttggtttgggttaagaaatggtacccaaccacactagggcccatatgggatgggcccacactgtaatcttgtctactcccactgctgttaaagttgcaggtatcacaccttggattcatcacagacgactgaagctggctgcgcaggaccagtgaaccagtcaacaagactcagaccatccaacatgactaatcctgtggcaaaaccacgacaccactgagaaagtcaaccaccctgctgtgatcactctggaggctggtcagtctacgcacaactgaagcttgagaagtcaaaccctgctgtagtcacacactggaagctgactagtctacgcatggccaaagcttgaggagtcttcactacattaggaaaggtggatagaacttataagcctaccaatgagcttagtaatactgattatcttattattatggcactgtttttgttcaggaaaaggcctatattggatctgtggagcacaggcatatcagcaactgccagctaaatggacaagagcatgtgtattaggaacaatcaagccatccttctttttaattcctctaaagcaaggggaactcttaggataaccagtctataatgagaataaaagaactaaaaggagcatgatctcaaaaaaaaaa

SEQ ID NO: 67811 - DNA, 368 bp, Homo sapiens
  misc_feature (1)...(368): n = a,t,c or g
aattataatgatattttgatgggaattgcattaaatttttagattgcttttggcagcatggtcattttgacattattggttctgcccatccatgagtatgggatgtgtttttatttgtttgtgtcatctatgatttctttcagcagtgttttgtagtttttgttgtagaggtctttcaactccttggttaggtattgtgtnnnnnnnnnnnnnnnnnnnnnnnnnnnnnnnnnnnnnnnnnnnnnnnnnnnnnnnnnnnnnnnnnnnnnnnnnnnnnnnnnnnnnnnnnnnnnnnnnnnnnnnnnnnnnnnnnnnnnnnnnnnnnnnnnnnnnnnnnnnnnnnnnnnnnnnnnnnnnnnnncagctat

SEQ ID NO: 67812 - DNA, 992 bp, Homo sapiens
gccggtcctggaattcccgggtcgaggcccaactaagctgcttccgggagctgctgggcagggcccccacgcacgcggacgggcaccagcacgtgcacgtgctcccaggcgtgtgccaggtgttcgccgaggcgctgcaggcctatggggtgcgctttacgcgactgccgctggagcgcggtgtgggtggctgcacttggctggaggcccccgcgcgtgccttcgcctgcgccgtggagcgcgacgcccgggccgccgtgggccccttctcccgccacggcctgcggtggacagacgccttcgtgggcctgagcacttgcggccggcacatgtccgctcaccgcgtgtccggggccctggcgcgggtcctggaaggtaccctagcgggccacaccctgacagccgagctgatggcgcaccccggctaccccagtgtgcctcccaccggcggctgcggtgaaggccccgacgctttctcttgctcttgggagcggctgcatgagctgcgcgtcctcaccgcgcccacgctgcgggcccagcttgcccaggatggcgtgcagctttgcgccctcgacgacctggactccaagaggccaggggaggaggtcccctgtgagcccactctggaacccttcctggaaccctccctactctgaccccctacagacaaccaagcactaatccccttagtaccaagaaaggggagccaggatttagtcctggcccagcccagagctgggacctggagcacgatctgttgacttccctgggtaggacactgccacctctgggctcaggtcctcatgcctccaaatggcatctagagtttgagcagccttcttggctgcaggcaggcctagcctgtggcagcgggctagggcccgcagagcatttggtgcccctccatgttgcaatgcaaacaccttcaccactggggcagtggggagagatggctatattaataaaataacgtgtgtctttcaaaaaaaaaa

SEQ ID NO: 67813 - DNA, 375 bp, Homo sapiens
tttcgtcgcgccgcgcaaggcactggcttgaaggtgatttaacggaaggtattcctcgacgattcgcaaaatgaagcggacatccgtgtgcaatttaatcgcgcaattgacctggcgcgtcgcaacggttcgaccattgccattgggcatcctcaccctgcaacggtacgcgtgttgcaacagatggtttataacctgccgccagacattacgctggtgaaagccagcagcttgctgaatgaaccgcaggttgatacttctacaccgacgaaaaacgctgtgcctgatgcaccgcgtaatccgttccgtggcgtgaagctgtgcaaaccgaagaaaccgatagaacctgtttatgctaatcgcttctttgaagta

SEQ ID NO: 67814 - DNA, 942 bp, Homo sapiens
  misc_feature (1)...(942): n = a,t,c or g
gagcggccgccatggccaccaccccgctgctgggcctcagccccttgtccaggctgcccatcccccaccaggccccgggagagatgactcagctgccagtgatcaaagcagagcctctggaggtgaaccagttcctcaaagtgacaccggaggacctggtgcagatgcctccgacgccccccagcagccatggcagtgacagcgacggctcccagagtccccgctctctgcccccctccagccctgtcaggcccatggcgcgctcctccacggccatctccaccttcccactcctcactgcccctcacaaattacaggggacatcagggccactgctcctgacagaggaggagaagcggaccctgattgctgagggctaccccatccccacaaaactccccctcaccaaagccgaggagaaggccttgaagagagtccggaggaaaatcaagaacaagatctcagcccaggagagccgtcgtaagaagaaggagtatgtggagtgtctataaaagaaggtggagacatttacatctgagaacaatgaactgtggaagaaggtggagaccctggagaatgccaacaggaccctgctccagcagctgcagaaactccagactctggtcaccaacaagatctccagaccttacaagatggccgccacccagactgggacctgcctcatggtggcagccttgtgctttgttctggtgctgggctccctcgtgccctgccttcccgagttctcctccggctcccagactgtgaaggaagaccccctggccgcagacggcgtctacacggccagccagatgccctcccgaagcctcctattctacgatgacggggcaggcttatgggaagatggccgcagcaccctgctgcccatggagcccccagatggctgggaaatcaaccccggggggncggcagagcagcggc

SEQ ID NO: 67815 - DNA, 851 bp, Homo sapiens
cccgggtcgacgatttcgtctaagtacctggccgagctctgtggcgttggcgctgtgctccccggcacctgaggaggaagccccagggccgcgtttcccaccggcgtgaagctgctgtcctacctctaccaggaggctctgcacaactgcagcaacgagcactaccctgtactgctgtccctgctgaagacacagctgcgagccctacacccggttcatccacgactgggtgtacagcggggagttcaaagacccttatggcgagttcatgattcaagtgaaccaccagtacctcagcttccgagataagtcgtactggacacatggctacgtgctcatctccaaagaggtggaggactgtgttcccgtgtttctgaagcacattgcccacgacatatacgtctgcggaaagaccattaacctgctgaagctctgctgcccccggcattacctctgttggtccgacgtccctgtcccccggatctcggtgattttctcccttgaggagttgaaggagattgagaaggactgtgccgtctacgttgggcgcatggagagggtggcccgccacagctctgtcagcaaggaggagaaggaattacgtatggaaattgcaaaacaagaattaatcgctcatgcccgggaagcagcatccagggtcctgagtgcactgagtgaccggcagatgtcagaacggatggccttggatgcccggaagcgtgagcagtttcagaggctgaaagaacaatttgtgaaggaccaggagcgacgccgggcggccaggcaggagaagctggatgatgacttcagctacgcccgtgaactccgagacagggagagaaggctgaagt

SEQ ID NO: 67816 - DNA, 434 bp, Homo sapiens
taccggtttcgagttaccgggtcgacgatttcgtctgcggcccagggcccgcgggagcccatggcgttgccgggtgagacaaggccggggtttggctcggattcaccgcgaggtatctaggctgccatgatgccagggccaagacctcggaagggccctcaggccagaggccaaggggtggccgctgccaagcagatggggctctttatggagtttggccctgaggacatgctgctgggcatggatgaggctgaagatgatgaggacctggaggctgagctgctggctctcacaggggaagcacaaaccacaggcaagaagccagcacccaaggggcaggcccccctgcccatggcccacatcgagaagttggcggcagactgtatgcgggatgtggaggaggaggaggaggaggaagggctggaggaagatcc

SEQ ID NO: 67817 - DNA, 808 bp, Homo sapiens
tttcgtcaggtgttggggaaattgcacagggacacccacttagagccacacagaatgagcggcgtcgatctagatgcttatggaggaaggtctgagcttccccgcccctcacaccttaggctgcgaaatatgtattcataaaacctccaggcatcttctgaggacgcctcacgcaggagaaagctgctagttccctctggctctcttgccctttggatatatctgcccctgccgggggcagggatgtggggcttgggggcatctcctgtggtgtgcctggggtgtgcagcccctgattgtcattgtggtgcccatcaggaccctggacagaagaagggaggactcagtgccagggcaatagggaggccccccagggacgctagtgctgtgacatgtgtcggaaaggcgcagtcagcagcagcggctgggtgtgtttggtgggaggtggcacctaccaccccgtggttcccactcaggggagccaagtcctcttctttggctgtagtcctgccgagggtctctcctcagttttgagtctcaaggtgaagacgcggtttgtgggtggctgaggggttgctccatggggggggctccctccctcccttccttccttccttccttccttccttccttagatggacgaggtgggtcgcatcctctgtaacctgtgcagtgtggtttctggaggggtggtctgtttcttcccctcctacgagtacctgcgccaggtccatgcccactgggagaagggtggcctgctgggccgtctggctgccaggaagaaggtgagtggcctgtcggcagcctt

SEQ ID NO: 67818 - DNA, 616 bp, Homo sapiens
acgatttcgtgtggaccaagatgctggtacagagccccacacaagtgaagatgaatgtgagccaatagaagcaatagccaagtttgactatgttgggcggtccgccagagaactatccttcaagaagggtgcctccctgctgctgtatcaccgtgcatctgaggactggtgggaaggcaggcacaacgggattgacgggctggtgcctcaccagtatatagtggtgcaggatatggatgatacgttttcagacactctgagccaaaaagccgacagtgaggccagcagtgggccagtcacggaagacaagtcctcatccaaggacatgaactccccgacagaccgtcatcctgacggctatttagccaggcaacgaaaaagaggagagccaccccctccagtaaggcgtcctggcaggaccagtgatggccattgcccgctccaccgtccacatgtcctttctaactctcagttgacctagggtcccaagccttgctagtgaccccggggcctgctgcagaaccgtggcctcaacaatgacagtcctgagcggaggcgcaggcttggcaatgcagcttacacatagcgacgctcgtagagatgcagcttcattgag

SEQ ID NO: 67819 - DNA, 782 bp, Homo sapiens
  misc_feature (1)...(782): n = a,t,c or g
gcgccgaacgacctgacagacctgccagctggcatttcctttgaccctccgacacctgcgactcctggtgctgtggggaaacccactggccttggtgccctactaccgcggcctcaccatcgacagcctggcccagctctgcgtgctggacgacatcaccgtgtctcccaatgagaagcatctcttccgggggctcagcctcaatggcgatctcttggcacaggaggcgcagtttgtggtgaccatcggaaacatcagaggagtcctggacacctctgtcttagacccggaaccccggcccgaaggccctttcatcacttacaactattacgtgacctatgattttgtgaaagatgaagaaggcgaaatgaatgagtccgcgggcgtcctggccgagatcgtcaagccctctcccagcttagaattattagttgaggaatctcctgaagaggtcgtggaagacgtcatcgaagacattgttgaagaggttactgaagaggtcgaagggtctctggagtctgaggtggaggagtcaggagagtcggagctgtctgtcatctcggggccttcgaccatcttgcagatgccgagggcctctgcagaagagctggccaagttgaggctgcgtatagatccccggctctgcccgtccccagggactgtcctcttcagcactgcccacaagccctgggctgaggtcatcccctgcagttacgagatgcagcactctctcagggacctggtcccactgaaggccttcctgctggcggngaccaccgtgg

SEQ ID NO: 67820 - DNA, 414 bp, Homo sapiens
ctccaggatactcagctaccttgtggagtcaggcctgccaagctgccaaggccctaaccaggtagcttcccaacagagccccctccctctcttcaccggagcaggccaggactcccgccaacttccttgaccagtccaggaaaggatcagggtttggcaagaggactggcttcctgccctgtccggccctgccccagcccagcacgtcacttcagccaggcgcaggccccgcctccagctggctctgcctccgccagccccgccccaggctctgacaagtctagcttcggttcccgccggcctcctgccccaggacagcttggaaacggtccgatcaggtggggcttcctcttgaaatttgggccccaccctgggaagcagccgcccttaaactgacgtcagatctggtgagag

SEQ ID NO: 67821 - DNA, 2693 bp, Homo sapiens
cagagcagggcgagagccgatcagcggatcaccgagtctcgccaggtggtggagctggcagtgaaggagcacaaggctgagattctcgctctgcagcaggctctcaaagagcagaagctgaaggccgagagcctctctgacaagctcaatgacctggagaagaagcatgctatgcttgaaatgaatgcccgaagcttacagcagaagctggagactgaacgagagctcaaacagaggcttctggaagagcaagccaaattacagcagcagatggacctgcagaaaaatcacattttccgtctgactcaaggactgcaagaagctctagatcgggctgatctactgaagacagaaagaagtgacttggagtatcagctggaaaacattcaggttctctattctcatgaaaaggtgaaaatggaaggcactatttctcaacaaaccaaactcattgattttctgcaagccaaaatggaccaacctgctaaaaagaaaaaggttcctctgcagtacaatgagctgaagctggccctggagaaggagaaagctcgctgtgcagagctagaggaagcccttcagaagacccgcatcgagctccggtccgcccgggaggaagctgcccaccgcaaagcaacggaccacccacacccatccacgccagccaccgcgaggcagcagatcgccatgtctgccatcgtgcggtcgccagagcaccagcccagtgccatgagcctgctggccccgccatccagccgcagaaaggagtcttcaactccagaggaatttagtcggcgtcttaaggaacgcatgcaccacaatattcctcaccgattcaacgtaggactgaacatgcgagccacaaagtgtgctgtgtgtctggataccgtgcactttggacgccaggcatccaaatgtctcgaatgtcaggtgatgtgtcaccccaagtgctccacgtgcttgccagccacctgcggcttgcctgctgaatatgtcacacacttcaccgaggccttctgccgtgacaaaatgaactccccaggtctccagaccaaggagcccagcagcagcttgcacctggaagggtggatgaaggtgcccaggaataacaaacgaggacagcaaggctgggacaggaagtacattgtcctggagggatcaaaagtcctcatttatgacaatgaagccagagaagctggacagaggccggtggaagaatttgagctgtgccttcccgacggggatgtatctattcatggtgccgttggtgcttccgaactcgcaaatacagccaaagcagatgtcccatacatactgaagatggaatctcacccgcacaccacctgctggcccgggagaaccctctacttgctagctcccagcttccctgacaaacagcgctgggtcaccgccttagaatcagttgtcgcaggtgggagagtttctagggaaaaagcagaagctgatgctaaactgcttggaaactccctgctgaaactggaaggtgatgaccgtctagacatgaactgcacgctgcccttcagtgaccaggtggtgttggtgggcaccgaggaagggctctacgccctgaatgtcttgaaaaactccctaacccatgtcccaggaattggagcagtcttccaaatttatattatcaaggacctggagaagctactcatgatagcaggagaagagcgggcactgtgtcttgtggacgtgaagaaagtgaaacagtccctggcccagtcccacctgcctgcccagcccgacatctcacccaacatttttgaagctgtcaagggctgccacttgtttggggcaggcaagattgagaacgggctctgcatctgtgcagccatgcccagcaaagtcgtcattctccgctacaacgaaaacctcagcaaatactgcatccggaaagagatagagacctcagagccctgcagctgtatccacttcaccaattacagtatcctcattggaaccaataaattctacgaaatcgacatgaagcagtacacgctcgaggaattcctggataagaatgaccattccttggcacctgctgtgtttgccgcctcttccaacagcttccctgtctcaatcgtgcaggtgaacagcgcagggcagcgagaggagtacttgctgtgtttccacgaatttggagtgttcgtggattcttacggaagacgtagccgcacagacgatctcaagtggagtcgcttacctttggcctttgcctacagagaaccctatctgtttgtgacccacttcaactcactcgaagtaattgagatccaggcacgctcctcagcagggacccctgcccgagcgtacctggacatcccgaacccgcgctacctgggccctgccatttcctcaggagcgatttacttggcgtcctcataccaggataaattaagggtcatttgctgcaagggaaacctcgtgaaggagtccggcactgaacaccaccggggcccgtccacctcccgcaggtaaccagcttctcctcttcctcagtaccaggggcaacgtgcttttctgcaaggcagaaggaagtgatactaaaccagtagaatgtttcccaatcttcactttgttcttaagctcaaaccattcatttgtttgcgatctgcggcactgaaataacacagaccattatgagcatcaggagaattagaaaataccacctt

SEQ ID NO: 67822 - DNA, 776 bp, Homo sapiens
gagccccgggaaaaacttcaccactccctggattacccgggatgatgcgtgtgagttgccgagggactggcctggaaaaggccagaggtcagtgggtgggggtcgcgctcaccacgccgatgaggtcgccgcggccgtactcgcccaccagctccttcttgccactgcctcgctggatcacgctacgcagccgcccattgagcacgatgtaagtgcagtcggagcggtcgccctgcctgagtgggcgtggaggtcagcaaggtctgaccacccccaggtccccacccctaggccgggcctgagcagcgcggtgggagctgcacctgtacagcgcgcgtcccgcctccactgcagtccagtcgatggcgaagtccatctggcgcacgaagggcgacatcctggctgccaccgtgtgcgccgcactcagcaccacactgggctgtgcgcgcatgatctcatagaagtcggacttggagatccgcaggaaggtgcagtcgcgttgggctcgcagtgtgaagatgagaggttcgccagtgagcaccgccagctgccccaccagttccccgggctgcgctacgaacaggcacacgtcctccgccttgtcgatcatgcgctggtacacgtgcaggcagccccagagcacgaagtgcaggctcacgtcctggtctccctggcgggcaatgatggtgccagctttggcgtggtgcagcaagactctgctgttcaggagggaggggtcctcaatccgcatcagcttggccagctcctgctttgct

SEQ ID NO: 67823 - DNA, 569 bp, Homo sapiens
ctgaatctgggcagaaagccgatgccaatttctgagactttcctgaacctaaggcaacagttgaggaggaggacgccaagacagcctctcaggaggagacaggccagaggaaagagtgcagcactgaacccaaggagaaggctactgatgaagaggccaaggctgaatcgcagaaggctgttgtggaggatgaggctaaggctgaacccaaggagcccgatgggaaagaggaggccaaacatggtgcaaaagaggaggctgatgcaaaagaggaggcggaggatgcagaggaggcagagccaggcagtcccagcgaagagcaggagcaggacgtggaaaaagagccagagggaggggcaggggtgattcccagctccccagaggagtggcctgagagccccactggggaggggcacaacctcagcacagatgggctggggccagactgtgtagcttcctgacagaccagtccttcaggcagtgagtctttacccaggggacgtgccccagagttccccctgagcccccttcctttaggggagaaggaaagagaaggccccgagcgccgg

SEQ ID NO: 67824 - DNA, 722 bp, Homo sapiens
caagcagcccctggagagatgccatgtacttccttccagactttttttccatacgtagctcagttcatgcccatgccacctcccaccacacacactaaggcagcggccacagggctgataaacagccctttctgcagagcagtgcctgggccccctcctgtatcatcagtggctctgtccaccttcctgcccgaggtcctggggtcaatgcagtgccaacacgccatccatgaccaatgcgagcaacctcactgctgtccacaaatgctcctgtgccaagccctgggcacaacgatgaccaaactctgctggctctgacatgcctgtggatccatggcatcaccaaaaacatcctgacttccttcctcctgagcatgggatggaggcaaaggcctgagcagcctcccgtgggtcacccaccacgcctgctgcgcccaccgcacctgctgcgcccaccgcacctcctgcacccaccacacctgccgcccctgccgtggctcccgtccctctgcagggccctacttccctctcctcagcagctcgctcaggcgctgtccatctcccaccccagcaccctgtccctcctcaggtcctgctgaccgggcggcctctggtctgcagcagggcacacgggccaccaagcgctaggctgtggggtcgcttgtcgaggttgtctctcccagccccttgctcccgtgtccgtggcctgggacttcctccac

SEQ ID NO: 67825 - DNA, 392 bp, Homo sapiens
acgccctgaaggatgcccgggccaagcttgactagctggagggcgccctgcaccaggccaaggaggagctggcgcggatgctgcgcgagtaccaggagctcatgagcctgaagctggccctggacatggagatcgccacctatcgcaagctactggagagcgaggagtgcaggatgtcaggagaatttccctcccctgtcagcatctccatcatcagcagcaccagtggcggcagtgtctatggcttccggcccatcatggtcagcggtggctatgtggccaacagcagcaactgcatctctggagtgtgcaacgtgagaggcggggagggcaggagccggggcagtgccaacgattacaaagacaccctatggaagggttccagcctgagt

SEQ ID NO: 67826 - DNA, 755 bp, Homo sapiens
ttgacctttactgaatccacacatgtttaaattattaacttctcgacagaaaagttgttacaacgaattaaagagattctccctcaatatgtttctgcatttgcaaatactgatggaggatatttgttcattggtttaaatgaagataaagaaataattggctttaaagcagagatgagtgacctcgatgacttagaaagagaaatcgaaaagtccattaggaagatgcctgtgcatcacttctgtatggagaagaagaagataaattattcatgcaaattccttggagtatatgataaaggaagtctttgtggatatgtctgtgcactcagagtggagcgcttctgctgtgcagtgtttgctaaagagcctgattcctggcatgtgaaagataaccgtgtgatgcagttgaccaggaaggaatggatccagttcatggtggaggctgaaccaaaattttccagttcatatgaagaggtgatctctcaaataaatacgtcattacctgctccccacagttggcctcttttggaatggcaacggcagagacatcactgtccagggctatcaggaaggataacgtatactccagaaaacctttgcagaaaactgttcttacaacatgaaggacttaagcaattaatatgtgaagaaatggactctgtcagaaagggctcactgatcttctctaggagctggtctgtggatctgggcttgcaagagaaccacaaagtcctctgtgatgctcttctgat

SEQ ID NO: 67827 - DNA, 577 bp, Homo sapiens
ctctctccagtcctggcaacaggtcccactttgtctatgggattgcttgtgacaacggctgggtctgggacctcaagttctgccccagtggagcatgggaacttccaggcacccctcggaaggtacttcccagtcaactgtgggatggccctaggactcaaagccaggacaaagaggccctgggaattcttagagttgaaggaacgaaggttggagtgtagtggatggagtttttccagcaacttcatacagtatttcagggactagaacctcaaaggttttctgtgagtcagctgaaggcagcaagcctcagcataccttttaccctttaggctcctctcctgccccggttgggtctcttggctctggcctgctcagacgggaaagtactgctattcattctaccccatccggaggccctgctggctcatcaacccccaggtgagtagcacagcaaggagaatggggctgctgtagtggtggtcacagcatagcagggcctgtctgtcttcctggaaactcctctgggccagtctctcttagcacaaagccttactcagccacacacacaccctgg

SEQ ID NO: 67828 - DNA, 434 bp, Homo sapiens
aacaatattgtgaaacattttcataaacctgaaaaagaggtatttatgggctataaaacttagtatagtgggacttttaaagatgcttttatatgtgatacacgaggcaatatggggtgcttgaattttcatttgtaagctttctggtagctgtaaaaacatgcttcatatagctaccttcagcacttgcttctctagtgtttttcttagacatagatgcaggagatttttctttggcactgtgtgttatgccccacagagaggaagcctcaccgtgttgctgtgtggagaaaatggcctggttgcagcccttgagcaagttttccaccatgggttcaaatctgcccgcatctttcacaagaatgtcttcatctgggacttcatagagaaagtggttgcttatttttgaaacactgaccagattctagataatg

SEQ ID NO: 67829 - DNA, 485 bp, Homo sapiens
  misc_feature (1)...(485): n = a,t,c or g
ccgctggaacatcaggtactggggacactggccctggtaacacagcagtctcaggcacacctgtggtatcacctggagcaactcctggagctccaggtagcagcacccctggggaagcagacattggaaacaccagttttggaaaatcagggaccccaacagtatctgctgcctcaactaccagtagccctgtgagtaaacacaccgatgcagcctcagccacagcagtgacaatctctggaagcaaaccaggtacacctggaacaccaggtggtgcaactagtggaggcaaaattacacctggaattgcatgacccaccctggaccaaaagagcccctgcttctccgggtatggaggttatttccctgtaaatcctcaccagaacccatgtgctgattccctgtaatcttcccacaataaatttttagcagctctgnnnnnnnnnnnnnnggggcgcccgttttaagggacccacctttactcg

SEQ ID NO: 67830 - DNA, 545 bp, Homo sapiens
aaaaaaaagggaaaattcatactagagagaaaccctacaaatataaagaatgtggcaaatcttttaaccggtcttcaacctttactaaacataaggtaattcatactggagtaaaactctacaaatgtgaagaatgtggcaaatcctttttctggtcctcagccctaaccagacataagaaaattcatactggacagcaaccctacaaacaggaaaaatttggcaaagcctttaaccagttttcacaccttactacagataagataactcatattggagagaaatcttacaagtgtgaataatgtggtaaagtctataaaaagtcctgaattcttaacagacataatattattcatactggagagaaactctacaaacctgaaagatgtgccaacgcttttgacaagtcaaacttttctaaacatcaagaaaatcatgctgctgagaaatcctagaaatgtgaagaatgtgacaaagcctctaaatgattgtcacacttgatcgtaggtaagataattcatactggagaaaactaccagtgtgaa

SEQ ID NO: 67831 - DNA, 1477 bp, Homo sapiens
agagtccgggcgctgaaggccagtgcccaggatgctggggagtcctgcaccccagaggccgagggccgccctgaggagccatgtggcgagaaggcgcccgcctaccagcgcttccatgccctggcccagcccggcctgccgggactcgtgctgccctacaagtaccaggtgctggcggagatgttccgcagcatggacaccatcgtgggcatgctccacaaccgctccgagacgcccacctttgccaaggtccagcggggcgtccaggacatgatgcgtaggcgttttgaggagcgcaatgttggccagatcaaaaccgtgtacccggcctcctaccgcttccgccaggagcgcagtgtccccaccttcaaggatggcgccaggaggtcagattaccagctcaccatcgagccactgctggagcaggaggctgacggagcagccccccagctcacggcctcgcgcctcctgcagcgacggcagatcttcagccagaagctggtggagcacgtcaaggagcaccacaaggccttcctggcctccctgagccccgccatggtggtgccggaggaccagctgacccgctggcacccgcgcttcaacgtggatgaagtacccgacatcgagccggccgcgctgccccagccacccgccacggagaagctcaccactgctcaggaggtgctggcccgggcccgcaacctgatttcacccaggatggagaaggccttgagtcaattggccctgcgctctgctgcgcccagcagccccgggtctcccaggccagcactgccggctaccccaccagccaccccgcctgcagcctctcccagtgctctgaagggggtgtcccaggatctgctggagcggatccgagccaaggaggcacagaagcagctggcacagatgacgcggtgcccggagcaggagcagcggctgcagcgcttagaacggctgcctgagctggcccgcgtgctgcggagcgtctttgtgtccgaacgcaagcctgcgctcagcatggaggtggcctgtgccaggatggtgggcagctgttgtactatcatgagccctggggaaatggagaagcacctgctgctcctctccgagctgctgccggactggctcagcctccaccgcatccgcaccgacacctacgtcaagctggacaaggccgcggacctggcccacatcactgcacgcctggcccaccagacacgtgctgaggaggggctgtgagcctgggggccactgtggacagacgtgggcttcagaagctcgctggcctgggcccaccagcattttcttttatgaacatgatacactttggccttcctttccccagcgcccctgagggccagaggcagatgtgggctgcaggctgcacagcccgagggtctctggctgcgggcggtgggccccttcatggggctcacctggtggattcacattaaaccggtttctgtgggcaaaaaaaaaa

SEQ ID NO: 67832 - DNA, 442 bp, Homo sapiens
ggccatagatccccggtcgaaccacgcgtgcggagctcctgttctaaaatgtacatggaaatgtaagggacttatactagccagtataacttttgaaaagagtaacaaagacggagaacttatattacctaatttcaagccttgttataaaactacagtaatcatgacagtatggtactggcctaagaggagacatacagatcaatacaacagaacagacagttaagtagactcacatatatacagtcaattcattttaaacaaagagacatacagatcaatacaacagaacagacagttaagtagactcacatatatacagtcaattcattttaaacaaagatgccaacaggaaaaggttatcttttgatcaaatgatgctaggaacaagtgggtatctctatactggcaggaaaaaactgaacctcggctaggcatggtg

SEQ ID NO: 67833 - DNA, 614 bp, Homo sapiens
acctgcccgtactcgaaggaagacttctcttcaatgaacctggtcacagcggagtagctggcggccactgggaggatcctgtgcaccagctccctgatggacaggtccaggttggggtccacgaggaaggtccggctctgcctcccagccaggggctgagcactgacgtacctcccgtccacgcccaccagcacgtacagcaggtcctccaccacggccgactcctgcgaggccaggggcaacgtgcctgcgggcacagacagcgctgtggctctgcagcccccactcccatgcccccacagccacgtgccctcatctgcgggtcagtctcactcttgctcatctttgtttatgggtataaaaggtcagccactgcacttggctttgactgaccccactggggagccacaggctgagttccaaccgccgcaggacggggccggcctgggaggcgtggtggctggtgtcaagatctcaccacactcggctccgcaatgctcagatacatggctgacatttgaaaaggtgaagttaggagttgaaaaggcgactccagcagaagctgcactttcaacattggtaagtacaacttggtaagtctgagttactctggg

SEQ ID NO: 67834 - DNA, 255 bp, Homo sapiens
ttttttttttttgggggggggggggggggggggaaacataccaaagtgggggggacagagggggatctttaattttattaaaaggttggggaggggagttaacctggaaaactttgggttttttgaagggtggatggcccttgccaaaaacaactccggttttttaaaaataaattatttttgcccttcgggggggagggccttgggttaaaattgggccaaaaaaactcacataaactgggggttagaaaacat

SEQ ID NO: 67835 - DNA, 422 bp, Homo sapiens
ttttttttgcatgtgagcatatgtttatgaacgtgtatataattagaatatctcacgcatggtgcatgccctggagcagaagcggcatcctgctggcctgtcctcctccatggccctccagcttaacccctgcctgggcatgctgatggccttgcagtcggagctccacaagctgtacgacgaggagacacagagctgggtctcaggcagcgcctgtgggggatacccatagctttgtctttcctcaggcactgttaccagtaacctgcttattggctcaaagttccaaccctttgtctggagtccaagactgatctgagggaaaaggcaagccatgtttctgctcaactccagggtgaagttagaggtcttgcaggtgccttgtggatgttcaacagccattctttactcctgttcggagg

SEQ ID NO: 67836 - DNA, 728 bp, Homo sapiens
gagtcttcaacgtggagctcaagctgaccggggctgttcctcggcttatcgagatcaacccccgcatgggtggcttctacctgcgtgattggatcctggagctctatggtgttgacctgctgctggctgctgttatggtggcctgtggcttgcgtcctgccctgcccacccgcccacgtgctcgtggccatctggtgggcgtcatgtgccttgtgtcccagcacctgcaggccctgagttccaccgccagccgtgagaccctgcaggccctgcacgaccgtggactgctacgcctcaatctgctggaggaggccctggtgcctggcgagtatgaggagccctactgcagtgtggcctgtgccggacccagccccaccgaggcccgtctccgcctgctgggcctctgccagggcctgggcatcgatgggcccagctaccctgttgcccacttcctgtctcacttcaaatagcactggggtcagggggcagggaagcagtgctgggtggaggcactgtggtgccctctgctccctggagctcttcctgcttctctccccatcaccatgccccagccccagcctggcccgctgcaatgcctaggtctgttccagagcagcagggcaatttagacaccaaggcatcctggactcaagggcctcttgccctcccgaaggccccagtccagcctacagcttccccagcattctagccttggagaaatgacaatg

SEQ ID NO: 67837 - DNA, 473 bp, Homo sapiens
ctatggcttctctgctgcagccctgagctcatagaagcctcattccgccgcctctttcctttctagatccgggtcttcctccagcagctcaagggccgcgtagcccgggaggccattcagaaagtgcatccgggtggccttcagggaccaaggcgccgggaggcacagcccccagcccccatagaggtgaggcagatgaacagggtgaggctgtccagggcaggtccctggtgggtaggtgggagttgcgggggataacctgattaggggatccccaggaggagcagggcttggggggccattgcaggctgatccctgggctgaccctgtacctctggcttcactcaggtctggacggatctggctgagaagataacagggccactggaagaagccctggcagtggctttctcgcaggtaccgccattcccccaggcaggtcagggtgtcccagaggacagggtcacatgggc

SEQ ID NO: 67838 - DNA, 1303 bp, Homo sapiens
cccacgcgtccggttacatcacctggttacctcactagcgttgaggtaaagaacaacttgacataattgtgaccttaagcaaaattcttttccggtctcagagtattaatatattagttttatttctggtatatattctaatgggaaaaatagcagtgtgttgtctgttggcttgggcacctggatacttttcagttgatattattgctctgttaccaaaggcattaatttgtctcttcatcgaacatttattgaccattcactgtgtactagcaattactgtaaaaacattgaagaagatagacaccttccctgccctattggggcttcttttccttcatggatgtttgtactttgagatataaatgcttttgactgctcaagataaaataatattgttagcgcacttttaatgtttttggttttctaattagtccaatattttaaagtatgtctttgatttatagatatttggagtctgggagtgatccttttcatgttggtgtgtgggcagccgccctttcaagaagccaatgacagtgaaacactgacaatgatcatggattgcaaatatacagtaccatcccatgtgtctaaagagtgtaaagagtaagtaaaacaaagtatgtggaaaccttaaggactcagattaaaaccagaagttttaattccattaatatgtcaagaaaatttgagaggacttcaaacatccaagcatctgggttgattttaatttttgaatttaatatttctgctgttgtttcagagtgttcggtcggcgggggtgggggtggttagcccctgaatatgatctgaaatttaatattagagtacaaaatgtattcatctatttcttattcaagaaatttattacatgcctcttcaaccttcaggagtggtggttatttcacttgaactgaagaaataccatgggaactacctttctctgcatgagcaaaaagcaagatcacctggaattgttttaagttccagagaagagttagggcattttctttcctgaatagaccatcaacacactattttagggtttacatagtatgtctcataattttcttcacacaccttctgctaattgactaaagagctgtttaggtttatgtgactatgggaagccagcataaaaagtatactcaattatttggaatttaaagtagtacatagtactatgatatgtgtagtgagaaatatagtaatggaatagaactgttggaagttcagtattgacattttaagtgacattttttaatgagctcagctgagattatagccactacttacagga

SEQ ID NO: 67839 - DNA, 509 bp, Homo sapiens
acttctgagaggatgtttccctcctctcaatcaaaagctctcttccctcctgggcaagatccttgcatgcacccagcaccctcacacctggtgccctcacacccagcactctcacacgtggtgccctcacacccagcaccctcacacctggtgccctcacacccagcaccctcacacctggtgccctcgcacccagcaccctcacacctggtgccctcacacccagtgccctcacacccagcactctcacacttgcactgtcctcatcccaactctgtggttcctctggggaatcactgtggaatccctcatgggaggatgttttcaaaaaaaacaacagcccaatgaagggtatttgaggatgagaagcaggaaagaagtcagtgggtggctgagttgtgtccaggttttgcgtggccatggaaaatcaggtgaaggacattaaatatcttgcagtggcttctccattaagagcatgaaatgaggaaaggggctgtcctcacatgcca

SEQ ID NO: 67840 - DNA, 565 bp, Homo sapiens
cgggtcgaggacgaggacgtggagaggatcattcacgagtggcagagccgaaacgagaggtttttagcagaagggtaccggaggtggggaagggaggaggagaaagaggaggagagcgacgctggctcctcggtggggaggcggcggcgcaccctgagcgagagcagcgcctgggagagcgtgagcagccacgacatctgggtcctgaagcagcagctggagctgaaccgcccggaccacggcaggaggcgccgcgcagactcgatgtcctcggagagcacctgggacgcatggaacgagaggctgctggagattgagaaggaggcttcccggaggtaccacgccaagagcaagagagaggaggcggcagacaggagctcagaagcagggagcagggtgcgggaggatgatgaggacagcgtgggctctgaggccagttccttctacaacttctgcagcaggaacaaggacaagctcactgccctggaaagatggaagatcaagagaatccaatttggatttcacaagaaagacttgggagcgggagacagcagcggtgagcccg

SEQ ID NO: 67841 - DNA, 443 bp, Homo sapiens
aaggaaaaaggatgaagaaaaattaaccagagccctaggagacccggaggacattaaggcccctcaatacaccccctaaagagccgtcctcagagaagagagagaaaggggtagaaccatgatttgaagaaataatggtgaaactttgcaaatttgataaaaaatatcaatctatacatacaaaaagctcaatgaactccaagtaagataaactagaatagatctgcactgagatacatcataatcaaactgttgaaaatcaaagacgaatagagaatctcaaaagcagtaagagagaagcaacttattatatagaagaaatcctcagtaaaattatcaactgatttctcatcacaaaccatggaggccaaaggcagtgtgatgacattcaaagtgctgaaaaaaaaaaaattactggaaaccaaaaattttgtttcttgcaa

SEQ ID NO: 67842 - DNA, 552 bp, Homo sapiens
gcgagtccgcatggctggctcgggccccggatgaggaagtgcagggggaccatagagacgaagaggtggcggcggccggagcgcccccggcctctgtcggctccgtaggctcaggtagacctggcgacgacggggctgcagctgcaggggctgagctggctgggcaagcgcgggccgcggaggaggtctcagggtaagaggccgggactggaaggcttcgggcgtagccgccccgccccactccgccctaaagggaccctccgccgggtggtgctgctaaaggggagtccaggccccccgccctctcggggcgcggaaaggaaccaaggctgccctgtgggcggcggaacgacccagggagagggaggagaccaggccccgcgtcgctagagaaaagcggcttctccgagtcatggctccgacgcgggagagagactcctcttcaacctcgatacaacagggatcccccaacttatctcctcggagaggacgacgccccttatcggaggcgtacgctctttcttagcgctcatccgttggtcagcagaggga

SEQ ID NO: 67843 - DNA, 986 bp, Homo sapiens
ggatgacgtgccgcccccggctcctgacctctacgacgtgccccctggcttgcggcggcctggcccgggcaccctgtacgatgtgccccgtgaacgggtgcttcctcctgaggtggctgatggtggcgtggtcgacagtggtgtgtatgcggtgcctcccccagctgaacgtgaagccccggcagagggcaagcgcctgtcggcctccagcaccggcagcacacgcagcagccagtctgcgtcctccttggaggtggcagggccgggccgggaacccctggagctggaagttgctgtggaggccctggcacggctgcagcagggtgtgagcgccaccgttgcccaccttctggacctggcaggcagcgccggtgcgactgggagctggcgtagcccctctgagccacaggagccgctggtgcaggacctgcaggctgctgtggccgccgtccagagtgccgtccacgagctgttggagtttgcccgcagcgcggtgggcaatgctgcccacacatctgaccgtgccctgcatgccaagcttagccggcagctgcagaagatggaggacgtgcaccagacgctggtggcacatggtcaggccctcgacgctggccggggaggctctggagccacccttgaggacctggaccggctggtggcctgctcgcgggctgtgcccgaggacgccaagcagctggcctccttcctgcacggcaatgcctcactgctcttcagacggaccaaggccactgccccggggcctgaggggggtggcaccctgcaccccaaccccactgacaagaccagcagcatccagtcacgacccctgccctcaccccctaagttcacctcccaggactcgccagatgggcagtacgagaacagcgaggggggctggatggaggactatgactacgtccaccttacagggggaaggaggagtttttagaagacccagaaggagcttctgggaaaaagggcagcat

SEQ ID NO: 67844 - DNA, 416 bp, Homo sapiens
gggttacatgtggaaaagcctttgctaagaagtcacaactcattgttcatcaaagaattcatactggaaagaaaccatatgattgtggtgcatgcggaaaagccttcagtgagaaggttcatcttgttgaacatcagagaactcatactggggagaaaccttatgattgttctgaatgtggaaaagccttctctcacaaatcgtcccttattatacatcagagagttcacactggggaaaaaccctatgaatgtagtgaatgcgggaaagccttctcccagaaatcacccctcattatacatcagagaatacatactggggaaaaaccctatgaatgtacagagggtgggaaggccttttcccagaagtgacagctgattatacaccacagagctcatactggagagaagccgtat

SEQ ID NO: 67845 - DNA, 399 bp, Homo sapiens
cggacgcgtgggaatgcctactatattcaggctgctggacgtctaattctcagagcttgtgtttaaatacataactgtcccccttgtggccttcctcagtggatgagatagtaactgtgccatgttggggtcactggcacagtcctgtcttttgagaactgactgtcctcaagggggatgatcctgaagtttctgtctggggaagaggagcaccagtgttccatgtgggctgccatcttatccccttcaccatccatcccccttcctggaatgcactgtcacgacgccacatcacagcatctctgagcccttacagaggtgtctgaatctccctggctccatgccccatctctgaagaccagctgtgaatacgtgagcctctaccaccagcctgccgcg

SEQ ID NO: 67846 - DNA, 414 bp, Homo sapiens
cgaagggaaagcagcaggttggggcttcttgtggccaacttcagagcctgtcaccaggaaaggtaagcatgggaggaaggaagatggcgacagatgaagaaaatgtctatggtttagaagagaacgctcagtcccggcaggagtccacgcggaggctcatccttgttgggagaacaggggccgggaagagcgccactgggaacagcatcctgggccagagacggttcttctccaggctgggggccacgtctgtgaccagggcctgcaccacgggcagccgcaggtgggacaagtgccacgtggaagtcgtggacactccggacattttcagctcccaagtgtccaagacagatcctggctgtgaggagagaggtcactgctacctgctctcggcccccggaccccacgcgctgg

SEQ ID NO: 67847 - DNA, 650 bp, Homo sapiens
ttttttttttttagagggggaatgtgtttaatcccagcacgtcctctgctgtcctgccctgtgtcgttgggggatggcgagtctgccaggcggcatcactttttcttgggttccttacaagccaccacgtatctttgagccacattgaggggaggggaatagccatctgcataggaggtgtcttcaaacaggaccgagtagtcatcctggggccgctgtgggggcgcatggatcagggcgcggtagaagcaggtagtctggggatacagggccagcacgagctgctccttctggaacaaggcctcagggtccgtctccgggttggccttccactggggcagcgggatgacacggcgccggctcagggtgtgtctctctttgccttcttcatcgatgtcatctacctcatacttgttggtggcatggctgtaactgaccacctcggccaggatccactgctcgtccccatccacggccttcacccgggcagccaccttgtctccaggtctggccacgtagtctcctgaggcagggatggccccacagaggggtgggggcctgtcaccaggcttcccgatccacaggggcagggtcatggccgactgctgcagcagggtcatcagcacccctctgcgcatggtcttccgggg

SEQ ID NO: 67848 - DNA, 519 bp, Homo sapiens
cccgggttgacccacgcgtccgcggacgcgtgggcggacgcgtgggcttttgcttccctttgttgatagtggcagcaagaggtggtctggaaatgagtcaacagatgaattttcagagctgtcattccggatctcagagctggcccgggagccccggggacccagagaacgcaaggaggatggctcagcggacggagaccctgtgcagattgacttcatcgacagccatgtccccggggaggatgaagagcgaggcactgtggaggagcagcgaccacccgaattaagccctggggcaggggacagggagagggcaccaagcagcaggcgggaggagccggcaggggaggagcggcggcgcccggacaccttgcagctgtggcaggagcgggaacggcggcagcagcagcagagcggggcgtggggggccccgaggaaggataggtgggacccagggccgcccggggctgttgctggacactgagccctggaaatggggccaccgagccccgctgagcc

SEQ ID NO: 67849 - DNA, 584 bp, Homo sapiens
  misc_feature (1)...(584): n = a,t,c or g
taagtatagaggctacttgtactttgctgcccttttattcagattctttcccaaatgtgcattatatgttgactgcattttttccttctctttccaggttaaagtggttgaaaaatacttctcagggcctgccattaccctggaaaacactcgtgtggttagccaatcattgcagcattacttatagctcggaagggtaagtgttcagtaaacaaatccagaggaagtatcaaagatgagctccagatacagagcttttattttgtagactggactatgcccagtagacaaacggctaacaaaagccaattcgatcttacataaaaaagataaactataagtaagtagcctgtgtcttgaataacaggttgtaacaacagcagtatgctgcctttgtatgtagcatcactgggaactggtcctaagcttagtggcccggctcctcctccagctggcccttaggcatttacactgtgagggtgagcaaggattgttagtttgcacacaccctcactgacttgcttatcccaaatgcagattaatatgtcttcaattctcaaacttanaggcagagaagggcgcgg

SEQ ID NO: 67850 - DNA, 1430 bp, Homo sapiens
catctggagaacattgtgtactacaaggacgacacccactactttgtgatgacagccaagaagcagtgcctgctgcggctgggggtgctgcgccaggactggccagacaccaatcggctgctgggcagtgccaatgtggtgcccgaggctctgcagcgctttacccgggcagctgctgactttgccacccatggcaagctcgggaaactagagtttgcccaggatgcccatgggcagcctgatgtctctgcctttgacttcacgagcatgatgcgggcagagagttctgctcgtgtgcaagagaagcatggcgcccgcctgctgctgggactggtgggggactgcctggtggagcccttctggcccctgggcactggagtggcacggggcttcctggcagcctttgatgcagcctggatggtgaagcggtgggcagagggcgctgagtccctagaggtgttggctgagcgtgagagcctgtaccagcttctgtcacagacatccccagaaaacatgcatcgcaatgtggcccagtatgggctggacccagccacccgctaccccaacctgaacctccgggcagtgacccccaatcaggtacgagacctgtatgatgtgctagccaaggagcctgtgcagaggaacaacgacaagacagatacagggatgccagccaccgggtcggcaggcacccaggaggagctgctacgctggtgccaggagcagacagctgggtacccgggagtccacgtctccgatttgtcttcctcctgggctgatgggctagctctgtgtgccctggtgtaccggctgcagcctggcctgctggaaccctcatagctgcaggggctgggagctctggaagcaactgcttgggcactaaaggtggcagagaatgagctgggcatcacaccggtggtgtctgcacaggccgtggtagcagggagtgacccactgggcctcattgcctacctcagccacttccacagtgccttcaagagcatggcccacagcccaggccctgtcagccaggcctccccagggacctccagtgctgtattattccttagtaaacttcagaggaccctgcagcgatcccgggccaaggaaaatgcagaggatgctggtggcaagaagctgcgcttggagatggaggccgagaccccaagtactgaggtgccacctgacccagagcctggtgtacccctgacacccccatcccaacaccaggaggccggtgctggggacctgtgtgcactttgtggggaacacctctatgtcctggaacgcctctgtgtcaacggccatttcttccaccggagctgcttccgctgccatacctgtgaggccacactgtggccaggtggctatgagcagcacccaggagatggacatttctactacctccagcacctgccccatcatgtatt

SEQ ID NO: 67851 - DNA, 770 bp, Homo sapiens
  misc_feature (1)...(770): n = a,t,c or g
tctgctagtccggaatccccgggtcgacgatttcgtccagctcccagcagagccccactcccccctcccaacttggcctctgctatctttgtccagcgcgtgtgcgcgctccccaggctgctccggtgtgcgtcctgctccatctctccacctcttcccaggaagcggcaaaccacagcctggggcggggagagggggggttgcattttccccttgcagagccccccagggcgcgcccatgccgaggtggggaggactgccgtcgcagaggggctggccgcccgggtgtccccccaaggcggggtctccctgcagaggagcggctactgcctttgggactgtggagacaccagggggacaaactgggagggatgaagggcgtgggaagggttaatcgtgggcataggattgcacagaacacaactggcagtgggtcggctcctgcccccccacttccagagcaaaccctgccgtcacttccacccccacgggcacctttcctggagtttgctttacagcctaaggcagaggcactgagacgggctccagctggctctgccctgggctgctgctgtgaagtccagaagcaagctcccagggaagtgggccctttttaaaacgccaggccttgagaattatgtaaatttaaagggaagatggcaggttctttcccttctctaaaaatagaatgtaggnnnnnnnnnntagaacgtaggcatcttgatattaaattccaaataagaaaccagcaaaactcatcttcccccttc

SEQ ID NO: 67852 - DNA, 558 bp, Homo sapiens
agattttagtttaagattttgtttgagcaagggttatggctgtaacaagcgagccagacactggattagatggcctgtgagaaaccttttacttttgctgtgaaaggagaaagaaacttgtttttcccactggtgagaagaattcaaaccacagacagatctgtaggtaggactgggactcgggaagctgaagttctttttactggcagaagcagcgcagccctaagcggtgttgtgcttcggagagtgttccctctaacaagaggggagtggacccacgctctgaaatcccatgcagtgatgtgatgatgacttgtcctttctctcctctgtgaaccgtagcagcgcctccggcccctcctgtgacgcacagcactcctgtaactgtctcagaaccactcctggagaaagacttccttgcaggagtgactcaagaattaatcagtaaataccttgaaatgcttgtaagctactgtgctgtatgtttctagtagccacagaataccttttaggcgacataaaaatcctcattttcgtgtggttttgttgaggacgaaa

SEQ ID NO: 67853 - DNA, 953 bp, Homo sapiens
ccactggcgacgattttcggtcaagagaaccacttacctcgccctccctgggattagaggcgtgagcttctgcgttcagccaccatctctaaatttttaaaaaattttcttgtctggaatctaaagggattctattgagcttaaaggtttgggttcttggtttttgaaaggtgctgccagccatcatcctactgaggggtagggctgggaggtctagcatttcatgggataggactgtttgccctaatttcctttccatcttctgtaggatgagagccactcagagtgggtgtcttgtgtccgtttttcgcccaacagcagcaaccctatcatcgtctcctgtggctgggacaagctggtcaaggtgagcgtcaagccaaggcaggggctttaccagtcagggtgtgctcccaggtgggcatacactccaagtcctgtggaaagctttgcagatgccctcagttgactctttctcttgtcacatggtctgatgtcccttgtaagtcagcacactgcattggatatgtgttataatctaacgtgaagtggccaggacatgttactgaatgagaaatggctaccgtatccagaagtgccaagcccttttttgttgggcctgaccctagctcatcaagagctaggatgttcacctgtcaaccgcacgtctatgcaggtatggaacctggctaactgcaagctgaagaccaaccacattggccacacaggctatctgaacacggtgactgtctctccagatggatccctctgtgcttctggaggcaaggtatttggggacaaggcgtctcctactcagtggaagacagcgtcatggaaggagcacttagccagcgtctctaacgtaaaatggcaaacattagccaagatggttttaggaggataatgagataatggcaatctgagaatatgtttccaaagattactttcagcaaatg

SEQ ID NO: 67854 - DNA, 410 bp, Homo sapiens
tgctaccgcaccggaagtcccgggacgacgatttcgtcgggagtccggggaggccatggcccctcggcgcctcctgttggttggggaggggaatttgtccttcgccgccgctctgagcgaaaccctggatcacagcactcaacttaccggcacctgcctccagcgcccggccgagtaggctcgggatccactggcctgggagaatctgcagtgcctgcgcgagcgaggtatcgatgtacgtttcggtgtggactgcacccagctggcagatgtctttgaactgcacgagagagaatttgatcaaatctatttcaacttcccgcattgtggacgcaaagctggcgtagctaagaacagggaactgcttgccaaatttttccaaagctgtgcagacgttcttgcagaggaag

SEQ ID NO: 67855 - DNA, 477 bp, Homo sapiens
tttcgtggtggctccagagatggcagtgagcgagaggagggggctcggccgcgggagccccgcggagtgggggcagcggctacttctggtactgctgttgggtggctgctccgggcgcatccaccggctggcgctgacgggggagaagcgagcggacatccagctgaacagcttcggtttctacaccaatggctctctggaggtggagttgagcgtcctgcggctgggcctccgggaggcagaagagaagtccctgctggtggggttcagtctcagccgggttcggtctggcagagttcgctcctattcaacccgggatttccaggactgccctctccagaaaaacagtagcagtttcctggtcctgttcctcatcaacaccaaggatctgcaggtccaggtgcggaagtatggagagcagaagacgttgtttatctttcccgggctcctcccggaagcaccctccaaaccagggct

SEQ ID NO: 67856 - DNA, 801 bp, Homo sapiens
ttactgtcagaacaagagccagcaagctttactgcatagtgaaaagatgctgtggcagttcctgaaggtgaccttagagcaagactccagaatgaaattcctaaagcttttaggatacagtaaagatgagcttcagaagaaggtggccacatggttgaagagtgacgtggggctaggtgagagtcctcagcccaagggaaatgacctcaacagtgacagacaacaggccttctgcagccaggcctccaaacacaccacaaaggaagcctctgcttcctcagccttctttgatgagctggtccctcagaacatgactccttgggagatccccatcacaaaagatattgatggactcctaagccaggctctcctgcttggggaactgggtccggccgtggagctgtgtctgaaggaggagcgctttgctgatgccattatcctggcccaggctgggggtacagatctgctgaagcatacacaggagctatggatttttaggagggttgccagatggttagtacttgtaacccctgtggggtttacgagatttttagatatagcgagtctctgtacaagtgtgcgtaggggctagacactaaccatgatctggagataagggctgaccttgtattgtcataaggtccgcgaaaggctcagagtacgtgagtcgtaccatggcacagggtctctaacggacgcttacagagtctcgtgcgtaaatatagggatagcatcacgaatcttgcagtgctggtcatagcttgaataggcctaagactgtgtagatttctaagacttaat

SEQ ID NO: 67857 - DNA, 792 bp, Homo sapiens
tttcgtgaggacgtggagctgcccccggggggcttcgggggcctgcaggcgctcaaccccaaccgcctctcagccatgcgggaggccttcgccaggagccgcagcatcagcaccgacgtgtgacctgggcccgcccccgggatcctggccttgaaggtcctgagacaatggggggattcctttggcacacccacctggccccaggccccaagtggggcttggctgagccctcctggaatccctgtcctcaggggaggcccaggcttggggagcccccaggctcgtggcagggataaggctcattgaacacaaatgtgtcctggggggaggcacagctggggcctggggctagaaggaccaggtgaccatacagccggctgggcatgcaccagggctctcaggcacagaggccaccgttactcctgatgattctgtctcagacccaacaacctggccttcccaggaggtctccatgtgtcaccccctccctgggtctcacccttctcacctgctcaaggaagggatgacctcagtgaggcccagggccctgcagcaaggccctccctggcaattgcagaccaaggattctgctcctccaccttgaactccagcctctttctctccatttttccctctctctcccctacccgtctctccctctctctcacacacacactctttccgggttcaaggggccaagcgttttgcctagggttgaggacaagtggttgaggttccctgaaggatgggaccgggtttgccccttaggaaggggagatttttcaagggggc

SEQ ID NO: 67858 - DNA, 419 bp, Homo sapiens
  misc_feature (1)...(419): n = a,t,c or g
gactctcgggttacgttcactaacgaaggagggcggtggtgggggtgatgtggcggcctttgaggttggcacaggggctgcggccagccgggcgctggggcagtgcgggcagctccagaagctcatcgtcatcttcattggcagcctgtgcgggctgtgcaccaagtgcgctgtgtccaacgacctcacccagcaggagatacagaccccggagatacaacagagaaatgcataatgtccagtcaatttattaaagttccaaagtnnnnnnnnnnnnnnnnnnnnnnnnnnnnnnnnnnnnnnnnnnnnnnnnnnnnnnnnnnnnnnnnnnnnatttcaatatgattaaagcaggagtgaggacacagcgaaagtgagacaaggaaaagagaacaaaataaaacaggagagacagaata

SEQ ID NO: 67859 - DNA, 1210 bp, Homo sapiens
caccatcattatcgccttgcttggcacgaggggctcccggggcgggccgggcggaccgcgggagccgcactcggcgatatggaagaggagggcaagaagggcaagaagcctggaattgtctcgccatttaaacgagtattcctaaaaggtgaaaagagtagagataagaaagcccatgagaaggtgacagagaggcgccctctgcacactgtggtgttgtcattgcctgagcgcgtcgagccagacagactgctgagcgactatattgagaaggaggtaaagctgcttccctgaatctgtggatgtgggtggtgcatcaccccacagcaagaccatcagtgagagcgagctgagcgccagcgccactgagctgctgcaggactacatgctgacgctgcgcaccaagctgtcatcacaggagatccagcagtttgcagcactgctgcacgagtaccgcaatggggcctctatccacgagttctgcatcaacctgcggcagctctacggggacagccgcaagttcctgctgcttggtctgaggcccttcatccctgagaaggacagccagcacttcgagaacttcctggagaccattggcgtgaaggatggccgcggcatcatcactgacagctttggcaggcaccggcgggccctgagcaccacatccagttccaccaccaatgggaacagggccacgggcagctctgatgaccggtcggcaccctcagagggggatgagtgggaccgcatgatctcggacatcagcagcgacattgaggcgctgggctgcagcatggaccaggactcagcatgatggacagtggatgggggggcacccacaccttccgcgcagtcgtcataggccttcccagaaggagctgcccagacctgcgtgtcagcccttggtggtggccagggagaggcgcccggtgcagatggccccgggcggcccaggtcctctactgtgaaggagcagggagctgccgagggacacgagcctcagtgcggggtggaaggctctttgccttgtccaccagggctcagccaagccctgcagtgtgtccccgctcggggagggcccggccgagcgggcagggagagccagtcctgtcggctgggcccttggacggctgtcagttttgcacatgatgttcctattgtaactctcagagaccttaaaaagaagtttactgcaatgtgaaaaaaaaaa

SEQ ID NO: 67860 - DNA, 348 bp, Homo sapiens
ggcttactcactataggctcgagcggccgcccgggcaggtttttcgtcttatttgaagtcattgccggatgtgaggaaaaaatcgcttcccttgcctgaaaagccacacaaagaagaaaattcagaaatcgtggtttggagagaatttgacaagcaagtgttcctcttgaactgaagcccccggagacaatcgaagctgtacacggtggacctggagtcagggctacactacctcctgcgggtggagctggcagcccacaagtccctggccggagcagagctgaagacgctcaaggactttgtgactgtcttggccaagctgttccctggacggccgccagtcaagcc

SEQ ID NO: 67861 - DNA, 589 bp, Homo sapiens
tccagctggtggaattccagcagattaacatttgctaacggggcctggtgcggtgacaccttcgtaaggttgctttttgcatgcctgtgctttggggttggtggtgggggcaaggcggtggtaggggcgaggtcagggcagtgagtgaggtcgcccatggtcattctctgccgtgctggggggttgtcatctctcggggcttagcacttgttggggatgggtgaagtccagtcccgagtcacagtgtgtgttgggggaggttgctgatattcatagccctgtatgtttgagtaatgacaacatccatctccaccttcagggtgaggagctgttggcctatctgtgtctgtctgtctgtctgtctgtcatccgtacctgtctctccgagggagagaaggcaggccccagggtctttccccaggatggccttgggtgagttcctgctgtcctctctgcccaggaaatgaacgccctttgaggtcaggtggacgaggatgtcagtgtgaagatggacactgtgcctggagtgaacctgagctgcatcctgaatgagatgcgtgaccaggacaagaaactggtggagaagagt

SEQ ID NO: 67862 - DNA, 619 bp, Homo sapiens
atccaagtagagcagaaccggtaacacttctatgaactgtctctcgagtatgtgtgtaagctgcaggaaatccaagaaagaaagaagtttgagtttgtggaacctatgctgtcattttttcaggggatgtttaccttctatcatcagggccatgaacttgccaaagacttcaatcactacaaaatggaactacagatcaacattcagaatacacggaatcgatttgaaggaacaaggtcagaagtggaagagctcatgaacaaaatcagacagaatcccaaggaccacaaacgagcaagtcagtttacagccgaaggctacctgtatgtccaggaaaaaaggcctgctccgtttggttccagttgggtcaaacactattgcatgtatcgaaaagcagcaaagaagttcaacatgatcccatttgagcacagatctggagggaaacttggggacggagaggtgttctttttgaaagaatgtaccaagaggcatactgactccattgacagaaggttttgttttgacatagaagctgctgatcggcctggcgtttccttgaccatgcaggcattttccgaagaggaaaggaagcagtggttggaagctctgggtggaaagg

SEQ ID NO: 67863 - DNA, 742 bp, Homo sapiens
ggcagttacttggtcgacccacgcgtccgccacgcgtccgtgggatgctccttgcccgcggccaccccatggttgtgcctcctcactgtctatgttttcctctctggcggggcgcggggcggcccctaggtgtccagccacatacaggttctagctcggaagaaggtgcgggagtaccaggttggcatcaaggtatgttgggtgcctggcgggggccttcagccctcctgggcccctcacccacggcgctatctctgcatagctcaggcctttccttggccagctctccagccccactgtgcctcttttctggctgaagctctgtttctgcctctccttccgctctttctgatctttttctctttctttctctctctacaggtctctagccacttgcaagttctagccaggcggaaatctcgggagattcagtctaagctgaaggtacggggcccctgccacctggcctggcctgcccagcaccctcctgggtgcaggcctgtcgctgctctgtggctccagcctgggacaggcaaggggctgagaagctgtgagggggtccagaaagaaacacaagtggcagcaggaagcccaagggccctgtcagtgagggagagggagaccatctgggggccactaaggcccacccctcctcttctctgtttttctttttctccttcttcctgactgctgcttactaactgcatggggacttccgtgggcagggaggaggccccggggc

SEQ ID NO: 67864 - DNA, 717 bp, Homo sapiens
cccgcttgcacgaggcatttggcttgaccgcgtttgctcaggaatcgcatctcgtggggaagttttcacgtccacttcacgtgcgtggccaggccctgtccccactcgaggcgagagctaccgggatgcccatcgcaatcgcaggcgccgtgggagctgcaggctttggaccacagagaggcccggagcaggaagctgcaacgtccacctcctcgacccggctccccgtcgccctgtggcctaaggtgtgatcatttcatgcctgatcggcctccctccagcctgttccctccgctgacggccaagcccagccaggcagggccactcggtgctcccaggacagcgttccaggttttctggcccacaggcttggagagtgggccccaccctcccttcctctgccagacgcctgcccgtggtccagcctcgtcctgctgccctggggcctccgaggtccttgtttcctgagaggagccttccctggcaacatgacccccagggaactcactcaaacggctgctcttcgccggtggctcaaatactgcagcttctgattccagcacagtttctcacagaaatctgtttctccatgtatcgctgtctcctgacccccgcgggcagcacacagttgtgtttccctccttcagggtgcaccatccttcaggtcagaagcttccagaaggcagaaatgctgagctccctgcatcggtgcaaggc

SEQ ID NO: 67865 - DNA, 650 bp, Homo sapiens; identical to SEQ ID NO: 67847

SEQ ID NO: 67866 - DNA, 596 bp, Homo sapiens
gcagctgctgcagaacatttttggggcccgccaggatgtggccactgtcctgctcctcaaccccaagcaaccaaagctgtccctgctgatgaccaacctcttcccgggcatgtcggtggaggaggtgcttagcacccagatagcccacctggccaggctgcagctggagcagatggtggagggcagcctgcaggccggcagcccacaaggcattgtggggatgcttaaacggcacgagttggagcgccagaaggccttggccctgcagcactcatggaagcagggggagcctttgattgcgacctccgaggagctgaaggccacccctgagattccgcaggtaaaaccgggaagctcagagggagaggctgaggcccctgaggaggaggaagaaaaggagaaggagaaaaaaggggtaagtggagtacaggccagggctcggagcccttggggtctggggcacagcgtaccccagcccggggctgaaggatgcaggccagtggagtctggcttccaggcctggctctgcactccctcagctgtgtgatgggctggggacatcttgctatgagatggggatggtaccagcaaggggg

SEQ ID NO: 67867 - DNA, 791 bp, Homo sapiens
tgcgctccgcacttccggagtcgagccacgcgtccgcgctggaacaccttgagctgagtgggtccaacttctcctccgctatgccccgcaacgagcccgccatacgcaactcgctcccaccctgcagccgcgcacagagtgtcggggactcggaggtggccgccatcggccagctggccttcctgcggcacctgacgctcgcacagctgcccagcgtccttacgggctccgggctggtcaatatcggcctgcagtgccagcagttgcggtccctgtcgctggccaacctgggcatgatggggaaggtggtgtacatgcccgcgctctcagacatgttgaagcactgcaagcggctgagggacctcaggctggagcagccctacttcagcgccaacgcccagttcttccaggcgctgagccagtgcccctcgctgcagcgcctgtgcctggtctctcgcagcggcaccctccagcccgatgccgtgctggccttcatggctcgctgcctgcaggttgtcatgtgccacctgttcaccggggagtccctcgccacctgcaagagcctgcagcagtcgcttctccgcagcttccaggccgagcggcccgcgttaaacgtcgtcatcttccctctgctccacgagggcctgaccgacgtcatccgggacgtccccctggtgcacctggatgagatcaccttatttaagagcagagtggccgaggaaccgccgaacctgtggtggtgagaggcggagccgccgcccatcggtctcagtcacctcgacacgggaatt

SEQ ID NO: 67868 - DNA, 583 bp, Homo sapiens
gaccagcgtggtggaattcctgctacatctgacttttgtcttgtttccatctcctcatcattccccaactcctaggtttcagccacagcctcttgggattcctcggtgcatgattctgttcacttgaatagggtcacaccacagaatgaaaggatttacctaattgtgaaaaccacagttcaactcagccaccctgctgctatggagttagtattacgaaaacgaattgcagccaatatttacaacaaacaggtaataacggggcctgattgtgccattctggctctgagctcaaaagatttttccctctctctatcacaaagcagtgttttttggtgctgtgatgtgcaaaacatgaccatcctggccaagttatagtctgattctcatttatccaaggtagtgggcattaggatagcagaggtcagtgtcatccactaagggcagtttcaccttgactgattggagaggtgtaatcctaccaggcagtggagctgtgatatttcactgtttgaaaagtagaaaaactgaggctgagagattaagtgccaggtccaagcaagtgagtgacaaaaccaggaca

SEQ ID NO: 67869 - DNA, 1322 bp, Homo sapiens
tttgatacctgtagttgagtacgttttaccgggtcgacccacgcgtccgcagaacgtgctgtgtggatgcggcgaaacgctgaggcgcggccttcgctgtgtggtggggactcacaagaccgacgtcaagatgatgctttcaagggccaaacctgctgtaggcagaggcgtacagcacactgacaaaagaaagaagaaaggtaggaagattccaaaactagaggagctactttcaaaaagagatttcactggagctattaccctgttggagttcaaacgtcatgttggggaagaagaagaggatactaatttgtggattggatattgtgcctttcacctgggtgactacaagagagctctggaggaatacgaaaatgctacaaaagaggaaaattgtaattctgaagtctgggtgaacctagcttgcacctacttctttcttgggatgtataaacaagctgaagcagctggatttaaagcttcaaaaagccgactccaaaaccgcctcctcttccacttggctcacaagtttaatgatgagaaaaaattgatgagctttcatcaaaatcttcaggatgtcacagaagatcaactcagtttggcctcaatccactatatgcgatctcactaccaagaagctatagattatatataagcgaaatactgctagataacagggaataccttgcccttaatgttttatgtggccctctgctactacaagttggattactatgatgtgtctcaagaagttttggctgtttaccttcagcaaattcctgatagtaccatcgcactcaatcttaaagcctgtaaccattttcgcctttacaatggcagagcagctgaggcagaactcaaaagcttgatggacaatgcttcttcatcctttgaatttgctaaagaactcatcaggcacaatctggttgttttccgaggaggtgaaggggctttgcaggttttacctcccctagttgatgtcattcctgaagctaggctaaacttggtgatttactaccttcgtcaagatgatgtacaagaagcttataacttaattaaggatctggaacctactactcctcaggagtatattctcaaaggagtggtcaatgcagcccttggccaggaaatgggttcagtgagtatgaaatcactgataatctataggttgcaaagttataagtgtatggaagagaacaaaatgactatcaaagtgcaagcagcaataggctctcctgtagctccttttatttctccatatcccccaatccagactccactgagaaaagaatgttatgttatttagagacaaaaaaaaaaaa

SEQ ID NO: 67870 - DNA, 873 bp, Homo sapiens
acacggaactactcatggacagataggagataccactggacattcccactctggtcatggacagtccacacagagagggtccaggacaactggaagacagagatctagccacagtgagtccagtgacagtgaagggcactcaggggtctcacacacacatacaggacacactcatggtcaagctggatctcaacatggacagtcagaatccatagttcctgagagacatggaactactcatggactgacaggagataccactagacatgcccactatcatcatggactaaccacacagacagggtccaggactactggaagaaggggatctggccacagtgagtacagtgacagtgaagggcactcaggagtctcacacacacattcaggacacgctcatggccaagccggatctcaacatggagagtcaggatcctcagttcatgagagacacggaactactcatggacagacaggagataccactagacatgctcactctggtcatggacagtccacacagagagggtcaaggacagctggaagaaggggatctggccacagtgagtccagtgacagtgaagtgcactcaggggtctcacacacacattcaggacacacttatggccaagccagatctcaacatggagagtcatgatctgccattcacgggagacagggaactatacatggacagacaggagataccactagacatggccagtctggtcatggacagtccacacagacaggttccaggacaactggaagacaaagatctagtcacagtgagtccagtgatagtgaagtgcactcagaggcctcacccacacattcaggacacactcacagccaagccggatctcgacatgg

SEQ ID NO: 67871 - DNA, 431 bp, Homo sapiens
caatttttaggtcctaaaagtctgaattattagacagtgttgcatagctagagaaggaaaaggattcactcatcctataaggcggcttagttgtcttaggcaaaagctgtataatggtaccacaaatacagttacatggtggagttccaattacacagaaagagatccattcagtcaatttccaaagttgcagactgcttgggcccacccagaattccaccgggactggacggcccccaccaggttatactggatatgtggacacagagcttatgctaagctgcctgatcagtggacaggtagctgtgtaattgacaccattaaaccatctttcttcttactgcccataaaagcaggggaacttctgggcttcccagtctatgcttcccgcaaaaaacaaagcatagccataggtgattggaaagatgata

SEQ ID NO: 67872 - DNA, 1191 bp, Homo sapiens
ttttttttttttggtagagacgaggtttcaccatatcggccaggctggtctcgaactcctgaccttaagtattaagtaatccgcccgccttggcctcccaaagtgctgggatgacaggcgtgagccaccgtacctggcgggattcatgatttaaagcaaaagaaaaaaaagaaataaattattctgctcaatactgtttggcataattgcattgcttttcatcaacactcaaaacagcctcttcaggaagcactgagatgggagtggcaagactggctgaggcctagctctctaaaacggtgggggaggggggagcgccctgagagaggcattctactaaccccaccccaatcacccctatttttactctttctactttcggaattggaaagaacgacactcgagctaggttccaatatattaactttcaggggcccactgcccatcccaaccctcccctaacaaagtcccctgccggtccctgttccctcagccagctgcaggaacctaccaacggccaggaagctgcctggtggtgtcaactaagaaaagggggagcatctgcgccgtcactgttggggagggggctctattagtggtttgagagcttcacagaagccttccccctcctaaacctccccagcttcgaagggggagaattccaccagcagccccgtcagggacctaagctgggttcagccatgcaagcagcttccaggtggaaccccggccgcgagcttcccagcccttctagagcgggagatggagagcagggtggaggcaggcggcttgcggcgcgcaagtctcctcttccccggccggctcccggctgcgagctctgccagctcagaatttgcaaagaatctgcggtttggccacccacggcagcttcagcttaaccaaagaatgagccccaggcaaagttacccccaggcaagaggcgatgggtggaggaggaggtacatgcagcgggcagccgggcccatagccagcctccttccaccgtgcagccccctccccaggggccagagccggccgaagactgggggtagggacggagtcgggggacgggatttttttccagagcaacaggtaggctggtgaggaggcctccggcccagggagaggcgctgagaaggctgcgggtgaacgggagggtcgagggcacacgtgagtgacagcaccttgcac

SEQ ID NO: 67873 - DNA, 945 bp, Homo sapiens
ttttttttttttagctcacgaaagaagttccaggatatggctataacaacaaactaatcttggtgatctctgtgactgtaatactaacgattttgattctaattttttgtcttattgaggtaaggacaataattaattcaggttttcagagagcagatcctgtctttgtgtggattcagaacccacaaactgaaaaccaaagccacttccccacttgacattcttcttcagtcatttaaggctgaggtatgctttgttcttttactgcagtgtatattccaggatttttaaaggatcctcgcttccaagagatctcaagtcacccttactctgccactaatttatttccttgttgctgaaatgatgagagatgtataatctccaccctcacggagttgtcatcaccctggcaacccctccgtagtcaaggccttcttctccatgaaattttatcattaatcgcttccagagatcttttggtctcattttcatgacctgtcaatatgattcccaaatataaacgtggacaatttatcaggggtaaatggtgaaggtaggataacgccgtgattccaattcctttacaaaccaaataaaagttctcctaaaacgggggtggcatgtccctgtcaggcgcacttcgacaggcccgttcctacggcctccgaggttagacatgtccctggcggctggggcggcgggcgggacgggggcgacggcgaggcgcggcggagtcaccacagcggccggggctggggcccgagcagccggcgacgcgactgcagcggcctgagggtcccggatgtgccaagcgtcgtcgccatgagccgcggagggagcggacgccacggcctttccctcctctaggcgaggcctagtagcggacagggctggtcagctgaggtgggcggtgctcggcggcacgggagcaggactgtggacttg

SEQ ID NO: 67874 - DNA, 1240 bp, Homo sapiens
  misc_feature (1)...(1240): n = a,t,c or g
tgcctgcggaaaccccggcgcgacccacgcgtccgcgagaggggctgagaaagtggtgacaccgccggtgtgcggagggagtccctgaaacttctcccaacagccccagggccaatcttccctcagcccactcccctcttcgccagctcccaggtccccactcctgtaccgggggtggggtggggagccaggcccgtctcccgctgggacacacacaggggccgggagcggggacgggacccccgaggcgggggggacgaaccgacagacagacggctgggcgcccgccccagcgggcaggcaggcaggaggaggcggaggcggnggtacgacggggagcactgggtctggggagtttcctctcaactatcgggggaggaattccccgcagccggaggaaagacccagacagtgttttcctcccgggggccgtgctcccccgccccgctagcggcggtcgccgccaccggcgcctccacctctaccatctcctctttctccaccacctcgggccccggtgtccccggccagcactatgcccatcttactgttcctgatagacacgtctgcctctatgaaccagcgcagccatctgggcaccacctacctggacacggccaaaggcgcggtagagaccttcatgaagctccgtgcccgggaccctgccagcagaggagacaggtatatgctggtcactttcgaagagccgccctatgctatcaaggctggatggaaagaaaaccatgcaacgtttatgaatgaattgaaaaaccttcaggctgaaggacttacgactcttggccaatccctaaggacagcttttgatttattaaatttaaatagattagtaactggcatagacaactatgggcaggtaggttgaataataaggtggcaaaatagttgatttttcattttgtggaaaaacacagtccagtccaaaaactacataacatgaaatgcaagtataaaacattccaaattaaaatagaatatgcacattgttcaaaggcaaaactcttaccctactatatatattttacatccctcattttttccccctctaaaatgcattggtattcaggattagaatctgaatcttttgctataaagttgacatacattggttttaatcccttgaaagttcagtaaagacctaaaaggaaaagcatcctaccacaccacactcatgttgtatgtgcaactattatagtggcttagagacactagttcgtgttct

SEQ ID NO: 67875 - DNA, 810 bp, Homo sapiens
cgaactgtcgtacgtatgtcttctgtttcgtcctcgtttttcggctgctgtttctccacggctctcctctttccccctcccttctctcccgggcgggcttactttgcggcagcgccgagaaccccaccccctttctttgcggaatcaccatggcggctggggtaagtttgctggctctggtggttcgggtcatcctatccaccgccatcctttgcccgagtggggccagtcggcgccagaggagttctgaggttgagtggggaactgattcgggggtctacagactgtactgctggagagtagggttcctagggcctggaggggaactgaggctggggctctcggaggccagaggtggaagggtctggggaagaggagaaaagagatgccgggtctgggccgtccgaagcctgagaaaggggttcggctctgttgccgctttgaggcgtggtatctgggcaggttgacgaacttctgtgtccgttttgtggagtaacacaggggacaggttgaagaggagggtctttgtaggcaggtccggctggcacggttaaaggtcgtctctcagggaggtttgggagcgagaggattctccggacagtgaagtcagaccaattggactccgctggccggcataatagagaagcccaacgccggggaactcgctgcgggacaggaccggagggatgatattcgcgacacggaaagaaaggctttttgagagagaggagttgatttaagaagacggcatgtattgcggccgctctatacgatcctaggtacgcgtgcgtgtgccgacggaattctatt

SEQ ID NO: 67876 - DNA, 1120 bp, Homo sapiens
tcatatgataggtggaacaatatggaaaatagtttaagatggagaagaagaaattgtttatgcagttgacttcaaccacaagagggagatccatttaaatggatgttccctggaaatgctaagcaggccttccctacttatcacagattcattcaatgctacatatgtacagcctagaagaaaacagagagatgagcagcttctgacaaatgtcctggaaacacttcgaggtgatggaaatgtgttaatagcagtggacacagcaggcagagttttggaacttgctcaacttcttgatcagatttggaggactaaagatgcaggattgggtgtttactcattggcactcctaaataatgtcagttacaatgtggtggagttttctaagtcccaggtagaatggatgagtgataaattgatgagatgttttgaagacaaaagaaataatccgtttcagtttcgccatctctctttatgtcatggtctttctgacttggcccgtgtacctagccctaaagttgtacttgccagccaacctgacctggaatgcggattttcaagggatctctttattcagtggtgtcaggaccctaaaaactcaatcattctaacctacagaactactcctgggactttagcacgtttcctaattgataatccttctgaaaaaattacagaaatagagttgaggaaacgtgtgaagcttgaagggaaagaacttgaagaatacttggaaaaagagaaactaaagaaagaagctgccaaaaagcttgagcagtcaaaagaggcagatatagattccagtgatgagagtgatattgaggaagatattgaccagccatcagctcataagacgaagcatgacttgatgatgaaaggtgaaggcagtcgtaaaggaagttttttcaaacaggcaaaaaagtcctatcctatgtttcctgccccagaagaaagaattaaatgggatgaatatggagagattatcaaaccagaggatttcttagtgccagagcttcaagctactgaagacgaaaaacgcaaattagaatctggtttgacaaatggagatgaacctatggatcaggatttatctgatgttcctactaaatgtatttctaca

SEQ ID NO: 67877 - DNA, 906 bp, Homo sapiens
gaaattcagtcctgaagtctgggatgaaacctgcaactgtatgttggatattttcaaaacaaccatcccacatgttttgctgacatggagacctgtaggaatggaggaagattcatcagaaaagcatttggatgtggatctggaccgccagtctttaagcagcatagataaaaatccctctgagaggggacagagccagctctctaacccaacagatgacagctggaagggtagaccatacgcaaatcagaaactgtttgccagcctcctcatcaagtgtgtggtccagttggaattgatacagaccattgacaacattgtgttctaccctgcgacgagcaaaaaggaggatgcagagcacatggttgccgcccagcaagacacgctggatgcagatatccacatagagacggaggatcagggcatgtataagtacatgtcttcccagcacctcttcaagctgttggactgtttgcaggaatcccattcattctcaaaggccttcaactccaattacgagcagcggactgtcctgtggcgagcaggttttaagggcaagtctaaacccaatcttctaaaacaagaaaccagcagcctggcctgttgtttgaggatcctgtttcgaatgtatgttgatgagaaccgcagggattcctgggaagaaatacagcagagacttttaacgtaagaaaattagtttctgattagatttctatctgctatatacaaaatgcatcacagcaatactgtggattgaaaagagtaagagaaaaatacatgctgacactctgacaaatttttttttctttctatttggtgactctcccatttcacttttcttaatgccctgaagagggcagagcctcatctgtttcactgttaagcccttgcttgagcccaggagtt

SEQ ID NO: 67878 - DNA, 526 bp, Homo sapiens
cagaaacacacagacacccacacatatacacacatgcacagacatgtagaaatacctagacacagaggaacacacaaagatacccaggcacacatacaggtacatctacatgcttatcaaaaacaacagcaaaaccacctaccatgacaaatactattgcagcaaaaccgaacaaataaattctgtgccataaagtttcctaaacctcatctattttgtagaaatctagtcacttgagtatcatccttcacaaagttcttttctattttttctactgtacaaagttttctgttgtcaaatagcaagagatctctgttttctacttggaatgggcctggagaagggagacagcacccgctccctccaccccttgtccctgagcacagcatggtgacctgccaagccagagggtgacctggacactcataactcaatgcagggccaactgtagcctctgggcggtgtccctgagtgagggcaaagttgtaataacacttgttctctccttttctccaatttgctccca

SEQ ID NO: 67879 - DNA, 385 bp, Homo sapiens
  misc_feature (1)...(385): n = a,t,c or g
gagcttcaataccctgctcaaccaggagaagaaggcactgcatttaatgttaccataggttataaatacccccctctgtgcctcggacatgcacctagttgcatccatctacgaactcaagtctaggctgcttatcttccggaaacatcagctacagataaaacaggacatttagtctctggtctctccctttctcctttaaaacaaatgaaaggaggagtaataggagataccccatactttcaatataaacctgcaggaaaaccatgccctaaaaattttgagggcccatctaaaactttaatttaggaagactgtgttaactcacatgcagtaatactaaaaaatgactcatatggtctagtaatagactaggcaccanaag

SEQ ID NO: 67880 - DNA, 696 bp, Homo sapiens
catctaacacactgcttgtatataacaagtgcttaataaaagtttcttgaattaatctggaatttgagaacagttaaacttctatctatggcttaataccagtcttaaaaattataagttctattaaaattctaattaaaagcctagtgattataaaagcttctcattctaataatccaacaattctgcatccaaaacagttatatacttacattcactaggagagagaagtcagtgaccagttggctaagttcaattaagtcctttaaaagaaagggagaggaagttacttttatgcctcacaactaccaaaaagaaaacattttttaacataccgcttctaaggtttcccacgattctgcagcattttgatcttgaggaatttcaggtaaggcatatatctgagtcaaactctgagaactagcttcagcttcagtagtatgaaatgctcctggatgaacataataaccccatgtttagagtttatttgctttgttagaaaagagacagcataaattgatttcataaaacaaatgccacgttaaatggtgtctaattaaatttaggctaaaaggaaattgattattctacaaaaatagaattgtttggctgggtgcagtggctcacacctataatctcagcactttggcaggctgaggcgggaggactgcctggcccccgagttcacgacccgtg

SEQ ID NO: 67881 - DNA, 2693 bp, Homo sapiens; identical to SEQ ID NO: 67821

SEQ ID NO: 67882 - DNA, 773 bp, Homo sapiens
aatcttgctccatttatctgcctatagacactggctgaacttgccccagaggccataatgcactgaggtagagaagtgggtctgtgtgctcccaaccacagttcagctgggtgctattctccctggatgaaggaaacagtaatagaaaacgttctctccagccttttgaactagggggcctggtttctttggtcttccttctcttactgcaaacttgagattcagactgatgaaaaggacaagggatcccagtggaaacaaatacttaacgaaaaatattactagtgaaaccaactaactgcattctataaaagtgtgaaaatgacactaatataaacagaaaagaaccaaagacctttgcagtgaagtaagcttctagtcatgagaaagaacttacaaaagtacattaccaattgatgataatttctccactgattttcaaaaaaaatttaacccactattaaaagacaatgaagttgaagtgggtggggaatgagaaatcaaggttaaataagcctcaatttttaatgaaattttaagagtttaagcattttcttacttttgtgtaattttaagatggtgtaagacatagcagtaagaactcgttctccttcaaagatgtagatatcccatattctgaggtttagtgtaaagggagtctacaattaaaagcaaaacaaaacaaaaatagggttaacagcttcccctcaccttgtatttataattttatgactgagttttgtaaataaatacttacgcgatcaaggaaacac

SEQ ID NO: 67883 - DNA, 397 bp, Homo sapiens
  misc_feature (1)...(397): n = a,t,c or g
ccatacacaagccagctcacagactcactctccaaatgactgggtccttcggtctttcatcagtgcctgcctgcccccaatccttagcacatccctttaggtcaatgcttcctccctcccctgctctccaccaccaccccctcctcgctgaagcccccttactcttggggacagggctgctggcctcggtgctgtcgccagcgcagataccaaaaggctcccaggccggccaggacaatgagcaggatgccacctgtcagccccacagccaggctggccacatccactcgtccacgccctgcaggaaagtagggaaggggagacactgtctcggngactgccacccaccccaacatcaaaattccttcccactgagggaagagaaatggacccgaag

SEQ ID NO: 67884 - DNA, 320 bp, Homo sapiens
ggcggggccctacctgttggtgccactgggctcagtgaggttgcccaggccttggctgcagcagtcccgctgccagcactgggagaggttgaagagcacgagacaggccaccagggccactgtcagcagcatgacctttggcttcaggctcatctgcaagaagatggagcaggcaatgaagcccaggacacagctgcaggtgtagtactggggaggggttggtgtcactcaggacagggccgcatcatcacctcctcttgcctctgatccagcactgaccccagagccccactctccagtgcttcagcatcgtgctcttg

SEQ ID NO: 67885 - DNA, 749 bp, Homo sapiens
aagattttaaagggtaaaaagttaagctaagtttaaatgggggatttcatctctctagttagagaagtatccatgttaccatagatcacatccattcattcatcattcactctaattgtcttttgttcctacctaatgaagtatgctgtatgtttgttttacagatctaaagcgggaagccagtatctgtcatatgctgaaacatccacacattgtagagttattggagacatatagctcagatggaatgctttacatggttttcgaattgtgagtgtgtattttaattcttaaagggtaaaacttgaagcaatgttggtgttggataatgctaacacttttctcttgaaatttagcagtagttgtgaacttatctgttcagaaagacctaaagtcacaagaaaaaaggattatgtcatcataaggtttacagtggcaaaggaagcaaaagctgggcatattcagttactcttcatgctttcagcatgcttcagagaagagactccaaaaggaaattgagttcagaggaataggaggaccccaaactataaacttctgaccagtagaagtcttagtgaagaagagtaggatgaaagtggaggcatccatgtagcaagactcttggcaactaaaaacaagtaacgacagacttagttcctcttttgatataatcaccatatggcatataagggcaattttatagatcacagtgtatcttgatttcaataagtcacttgatatgtctgtcg

SEQ ID NO: 67886 - DNA, 521 bp, Homo sapiens
tgaacaaggagaggctagagcaagaggagaagctcaaagccaaaatcaggcaactgacggaagagaaggcggctttggaggagtacattactcaagagagaaacagagcgaaagagactttagaggaagaacggaagagaatgcaagaactggagagcctcctggcccagcagaagaaggctttggcgaaaagcattacccaggagaagaacagagtgaaggaagcattagaggaagagcagacaagagtccaagagctggaggaacgcttggcccgccagaaggaggttttggagagcagcatagcccatgaaaaaagaaaagcaaaggaagccttggagtcggaaaagagaaaagttcaggatctggagaaccatttaacccaacagaaggagatctcagagagcaacattgcgtacgagaaacgcaaagctaaggaggccatggagaaggaaaagaataaggtgcaagacctgtagaatcgcttaaccaagcggaaagaggaatttagaattaaaagc

SEQ ID NO: 67887 - DNA, 456 bp, Homo sapiens
ggcaaggcaggcggcgcggccggcctcttcgccaagcaggtgcagaagaagtttagcagggcccaggagaagtagacaaggcggtttgggaagacatgtcagccagaagaaagagcgagggaagaaagacaagaaggacctgagatagagtttgggttttcctttttttctctctctctttattaagcccaacctgccttctacaacggagaagttttggttttctaagagctgatggacttagaagcatttggatgaacagctctgcttaccaactgaaatatccctattatcttctaaaagtggagcactgctttgagccctgggaaggcttaaaggcaaccagctctcccgagttgatttatcagcagaaaactgatggaatgtagatgtagctcctgactttaagagaccacaatggaagggaggttattttctatcatttgaggtcatgtg

SEQ ID NO: 67888 - DNA, 580 bp, Homo sapiens
ttaggtatccagcccaggagcgagggagaggcgggagtcctgggggtgaggcattgcctacattgtcacctgcccccaacctccaaggggatgcagtaaggagagggaagtccatagccgaaacacgaggccgggagatgctgatgccctcagtgaccctgcttgcaggaaagctctgacccagtccagtgcctggctctccacagatcgctggcctccccaacgacacactgtcagtggagaacggggtcatcaaccagttttcccagcgctggacccacttcattgaccctcagagccaggccaacaaatggatcaagaacatggagaaggacaatgggctggatgtgttcaagttgagtgaccgcgacttcctgcgcagcatggagaacgccatccgctttggcaagccatgtctcctggagaacgtgggcgaggagctagacccagccctggagccagtgctgctcaagcagacgtacaagcagcagggaaacacggtgctgaagctgggggacacggtgatcccctaccatgaggacttcaggatgtacatcaccaccaagcttgccaacccacg

SEQ ID NO: 67889 - DNA, 696 bp, Homo sapiens
ggcacgagggatggagaattatcctgtcgagtttttcagcttatatctttaatggataccggattgcctcgatgttgtaatgagaaaatagagcttgcaattctgtggttcttggatcagtttcgtaaaacatatgttggtgatcaacttcaaagaacctcaaagaaaaaaattgccaatccttaacataaaagaagcacaccacttgctgattgagctgagatcaccactgactacattacttataaacctgaagacagacatcttcctgtgaagggcttgtggcaaacctatccaactcgggtttcttcttccttgagaacgatctgattcatcatcatctgaaccagggatcacagtctaaggtccaggtatatgctcgtatgtcagaagtcttaggaataacagatgacaaccacgttctagagacgttcatgacaaaaatgtgaagatgaggatgaatttgagaatttcatgctgcctcttacagttgcttttgaaacagtattacaaatattcaacaacaactttaaacaagaagatgtaaagcgtatgttgatcgggctggcaagagatcttcgagggattgcctttgcactgaacacaaagaccagctacaccatgctgtttgactggatgtacccaacgtaccttccccttcttcagaatgctgttgaacggtggtatggagagcca

SEQ ID NO: 67890 - DNA, 545 bp, Homo sapiens
tttcgtagaaaagcttgccctcggccccaggggacacccagaagttgcttgttatcagaatccggaaaaaaacaaaactgccgctgaggaggagagagcaggggactcaagtgcagggcacggcctgggcaagcggcatttgtgtgaaccacatgagtgctgagagccggagttcgagaccccaccgtgggggcctggagcaaggagcccgaggagagacggcgggagtcctgcagacacgggaggtggaggagggaaaggagcactccaggcacaggaaacagcaggagcagaaggaggatggctcggagccggctgggaggctgggatgctgccccccgtggcccaaacagcaggcatttgtcagggaggtggggatgggggtatttgagtataaaagggagctcgtgttttcaggacaggctattcacaagaaaccccccagctcctggtgcgagggcccagatggaccagagtgaacagccctgtgcagcttgacttctaagattggcaggtcagttaatcccacagcctgcaccactttc

SEQ ID NO: 67891 - DNA, 552 bp, Homo sapiens
ttttttttttttcataatggtgacttttatctctgttattttttattagagaattctctattaaagaacaagggacagtggggtcacttatttttttaatgcctccatggaagtacttagaatcaatcacacagtcacccaacctggaaaatgccactttcacaagtgtaaacgcttaactggaaactgggtttctaggcactgaccaacccagcactgggggatgggaaacacaggtcagccgagcccttggtatccagaacagctcccgcgcagacagccttcagccccatgcaggctcagcttttagcacctcaagacagcgagctgacatcttcatcctacctggctgagacgttggtgaaatgcatgtaggatgatatgaccactcctatgcgtcctttcccgcccctgcagtgaatgacgaccacatgctggaggttgctgttcagccaggactcctgcgccttgcatatggtacacatcttatccaggggcggtgcgtggagctctggccagcccacatccatgatctttgggttaagcttcgta

SEQ ID NO: 67892 - DNA, 628 bp, Homo sapiens
tatcgtatttgcttcataacaaaaatctaatatgacccagaactgtcatattatttttggtcattcatcatacttagttagacaaaacagaaatccaaacccacaggataaaaaattctaaggcaaggttttatagcatattttatcacatcaatgccagaatgatattttgcagagaacaaaaggtcagctggagaaaagccattattatgtaccagcagctcacctttcctggaaatgctttgaggggatcaagcctgccctggggttggcatcagcttcgtgtttcgcttgccaccaagttgcatcatcttggctcataatctgaagaatatctccctttttgaaagaaagcccagcttccttacatggaattgccttatcctcattaggattatagtcaaagagggctttgataaacatcttgccttcttttgatggtgtctcctctttgctgccgggtataatcttaaatgtaattgctccctgagactgagccaaaatctgtattatttcctcaggccttttatcctccactggtatcccgttgacttccctaagttcatcaccaacatgaataagaccacttctatctgcagctcctcctctcatgattctggccacaatg

SEQ ID NO: 67893 - DNA, 1256 bp, Homo sapiens
gctcttttagctgttcttaactagctcgtctggtttcgggggtcttatctttggctctccttgcaaagttatttctagctaattcattatgcacaaggtataggggttagtccttgctatattatgcttggctataatttttcatctttcccttgcggtactatatctattgcgccaggtttcaatttctatcgcctatactttatttgggtaaatggtttggttaaggttgtctggtactaacgaggagtgggtttgaaagccgtcattgtgtggcactggacggggaatcaagagacccggtttctaatccctgctctgtcactaacaagctgcgtgatcttcggaaaaaagtaatcctcttggaaagctggaaacatagtccgaagcttaagtgaaaatgatacatgttagaagacatgaaacaaggagaaattctaagagtcacgtgcctgagcagaaatctcgagttgattggaggcgaactaaaagaagtagtatctcacaattacttgatagtgatgaagagcttgatagtgaagaatttgatagtgatgaagagcttgatagtgatgaaagttttgaaaatgatgaagagcttgatagtaacaagggacctgattgtaataaaacaccaggaagtgaaagagagctcaacttaagtaaaattcaaagtgaaggaaatgacagtaagtgtctcattaactctggcaacggttcaacatatgaagaagaaacgaacaaaatcaaacataggaatattgacttacaagatcaggaaaaacatttaagtcaagaggataatgatctcaacaaacaaactggacaaataatagaggatgatcaggaaaaacatttaagtcaagaggataatgatctcaacaaacaaactggacaaataatagaggatgatttataagaagaagacatcaagcgaggaaaaagaaaaaggctatcctctgtgatgtgtgacagtgatgagagtgatgacagcgatatcctagttagaaaagtaggtgttaaacgtccccgtagagtggttgaagatgaaggttcttcagtggaaatggagcaaaagactcctgaaaaaacattagctgcacaaaagcgagaaaaacttcagaagctcaaagaactctcaaaacaaagatctcgtcagagacgcagtagtggtagagattttgaggactccgaaaaggaatcttgcccaagcagtgatgaagttgatgaggaggaagaagaggataattatgaat

SEQ ID NO: 67894 - DNA, 171 bp, Homo sapiens
ccccggcgaggggggggggggttttccccccccccccccaaaaaattttttttttcccccaaccccttaaattttttggggggggggggccccaaattccccccccccaaaaaaaggtttttttccaaaaaaccccccgggggttttttaaacccccccccaaaaaaaaaa

SEQ ID NO: 67895 - DNA, 841 bp, Homo sapiens
ctgacgatttcggcacgagggatacttcagtagtgtgaataagccatctgacgaggtgtccttttactagaaacgcacatctgttactccacatcagagacttcattttgttgataaaccctatgaatgtaaggaatgtgggaaggcgttcagagtgcgccaacagcttacttttcatcacagaattcatactggtgaaaaaccgtatgaatgtaaggaatgtgggatggccttcagacagactgcacaccttactcgacatcagagacttcattctggtgaaaaactctatgaatgtaaggaatgtggggaagctttcatatgtggtgcagatcttagagtacatcagaaaatgcatattggtgagaagccctatgaatgtaaagaatgtgggaaggcttttagggtacgaggacaacttactctgcatcagaggattcatactggtgagaaaccctatgtgtgtaaagagtgtggaaaagcctttagacagtacgcacacctgactcggcatcagaagcttaatagtgctgacaggctctatgaatgcaaagaatgtgggaaggcctttttgtgtggctctggtcttagagtacatcacaaacttcatactggtgagaaaccctatgaatgtaaggaatgcgggaaggcctttagagtgcgacaacaactaacactccatcagagaattcatactggtgagaaaccctatgaatgtaaggaatgtggaaagacctttagccgtggctatcatcttattctccatcacagaattcatactgggtgaaaaccttacgaatgtaaggaatgctggaaagcctttagtcgctactcacaactt

SEQ ID NO: 67896 - DNA, 689 bp, Homo sapiens
tactgtgttaagtacgtttatttgaatgatcccaatcaatccctgcttatgagctaagtacgacatattattacccccattttactagtgaggaactcaggctctgcaggtgaagtcacttgtcctgggtcacggagcaatccaagcctaactccagatttctcttcttagctatgccatatggactctcggaactcagtgggactcaaagtttgaggaaggtgtttgatgaaggaaatgaaccccttgcctgaaaaatatcagattctcgagcacgaaataccagtccctcacccccgccaccctgatctaattcactcctactgccatatgggaaatagaatgctcagaaggaaagcggcttgtctgcagtcacccggcctagactctaaaggcaggctcctatctccgggccagggtcccccctcatcaatgccaccgtctccggtcgacccccccaccccctccattgcggggtccacctcgggactgggtcggccctggggcaggctctcaagggcccaagggctgccatcccgcgaatcccggctgcagtacaagctggaacctgaagggcagagagtacctgcaggaggagaccggaggaggccagccgggccgcgtggcccagcacctcctggctgcccatagcctccgcgccaggctcagacacctcgtgccgaattcgt

SEQ ID NO: 67897 - DNA, 454 bp, Homo sapiens
cgcccgctgcaggaattcggcacgaggggaaaagggcggcggcgtggacgaggacgaggagatggatgaggtgagcctgctgtccgagctggtggaggcggcctccttcctgcaggtcacgtccctgctgcagctgctgctgtcccaggtgcggctcaataactgcctggagatgtaccgcctggcgcaggtgtacgggctgcccgacctgcaggaggcctgcctgcgcttcatggtcgtccacttccacgaggtgctgtgcaagccccagttccacctcctggggtctcctccccaagctccaggggatgtcagcctgaagcagaggctgagggaggcccggatgactgggactcctgtcctcgtggccctcggggacttcctggggggacccctggcccctcacccctaccaaggggagcccccgtccatgctcaggtacgaagagatgact

SEQ ID NO: 67898 - DNA, 884 bp, Homo sapiens
gtgtacctttccagggcgggaatacacccctcctccacttcaagactaaattgggtgtttgcttcagattccagtcagagaaggaaacaggggatcggaattatgccatcggctattatctcaaggaaaagaaggtaaccagaagaggccggaagagaaagtccctgggaattctgctgctagtggaagggcagtaggggttgggggcttcagctgagaccctgacagtgtgaaagggctgatgtcctgaagagaaatgctctcccctctcttccttgcagtgctttcctaagggggtggacatgatggctgcccttgatctctacttccagctgtgttctgtggaggtcacttgtgaatcaggcagtgtcatggcagccaccctcgccaacggtgggatctgccccatcacaggcgagagtgtgctgagtgctgaagcagtgcgcaacaccctcagcctcatgcattcctgcggcatgtatgacttctctggccagtttgccttccacgtgggcctgccagccaagtcagctgtatcaggagccatcctcctggtggtacccaatgtcatgggaatgatgtgcctgtcacccccattggacaagctggggaacagccatagggggaccagcttctgccagaagttggtgtctctcttcaatttccacaactatgacaacctgaggcactgtgctcggaagttagacccacggcgtgaaggggcagaaattcggaacaagactgtggtcaacctgttatttgctgcctatagtggcgatgtctcagctcttcgaaggtttgccttgtcagccatggatatggaacagaaagactatgactcgcgcacagctatgcatgttgctgcagctgaaggacactgtatt

SEQ ID NO: 67899 - DNA, 547 bp, Homo sapiens
acgccagctggccgagtggggggccggaaatccaactttgctgacggttatacattctggtgttcgtgggcatcgtcctgttctccgtgtactgccgcctgcagggccgctcccaggagctcgtgcgcatcgtgagcggcgaccgccgggtgcgcagccgacacgccaaggtgggcacgctgggggaccgtgaggccatcctgcagcgcctggaccacctggaggaggtggtctacaaccagctcaacggccttgccaagcccatcggcctggtggaggggccaggaggtctgggccagggtggcttggcggccaccctgcgtgatgacggccaggaggcggaaggcaagtatgaggagtacggctacaacgctcagctcagcgaccgcatctccctcgatcggagcatccccgactaccggcccagaaagtgcagacagatgagctacgcccaggacctgccccaggtctccgtggtcttcatcttcgtcaatgaggcgctgtcggtcatcctgcgctccgtgcacagcgtggtcaaccacacgcc

SEQ ID NO: 67900 - DNA, 820 bp, Homo sapiens
tttacattaatattactgtctaattttgatatgagacagatatttgaagctactaaggactgactactctgttcactttcagagtgacttagtagaagaatattttgaagctcacagcagttcaaaagttttaacctctgatagaacactgcagaagctaaagagagctaaactggatcaggtatgttacaaggaatgttacttctaaattttttttactctgtcctgaaaaatatgctacgtaagcaacagatttgaaaagtatacacaagtagaattattgtcctgatcaaatgaaacacaagttaatgtgattattacttcttttattatataaatagtaaataggccgggcacacctggctcatacctgtaatctcagcaccttgggaggccaagggaggaggattatgtgaacacaggagtttgagaccagcctgggcaatatagggagacctcgttgttactaaaaatttaaataaataaataaataatttactggattagacagactgtaattatgcatttttcccctcttactcgtttattatttcttcaggatctatgataatcatcagggtcatagttccttgatatccatttaccatttatctctgttattcatttaacctatatgtattcactaaatctcacactggtcataaaacagcaactgcaacctgactttctctcagttaaaaactttgcacaaagtagaggatattctgcttgaggatattatggaaaacctgcccagtgtggtaaggtaacaagattactatgtaccatggttccagtagctcattttacaaaaaaaaaa

SEQ ID NO: 67901 - DNA, 371 bp, Homo sapiens
attcttatttgaaagcatctcattgcttctgcatttagtatcacatctccccattttctcataatagactcgtttttctctgtgtttgtaatgatttctctagtttgtgtaaattattctctgtattgtgtacatgatgcaccttattttgtctacattattttccgtaccttcctcccgtctttccctcacttgcttcttcctgtggcattctgatctttattaaagcttcccaactttttggtcgcctagtgatactccattgtataatctggaaccctgtgaaccattgccgtttgatgtggcgcgattccgaggcctgacggcttctgtgctgctggacctaacatatttcactggcgttcatgaaa

SEQ ID NO: 67902 - DNA, 396 bp, Homo sapiens
gggtgcggagtaaagcggtcgcgaccgtgcagtcagaacaggttgttaatcaacaggaatttgccaacgggaacgggcacagaaagaatgcctttgctggtttcaatggcgtcggaaagctcgctcaaccacacgccttcttcgaagtctttcggctggacgaactggtcgatatagcgcatcaccgggcgaccctgttgatcgacgtcgaacaccggatgaaaaacatctttgctgacgtttttactcggcggcgcggcaaagcgcatcgggcgacgcgccagcgggtggcggaaatagttgtcgagatgttcccagtcatcgagatgcagcagcagcgaatttccgccctgcatgttttgctcgtccattttcatcatcaacacgtaatcggtt

SEQ ID NO: 67903 - DNA, 359 bp, Homo sapiens
tagcctgggaacctgaccatccttgcttctcggggcagatggaggacaagctggcctgggagagacacacatttgaagagcggataagcagggctcctgagatcctggtgcggctgcgatcccacaccgtctgggagaggatgtctgtgaaactctgcttcaccgtgcaaggatttcccacgcccgtggtgcagtggtgaggggctctgttcccagggggtgaagaagtccattctgcgttttctttcagaaagaccccagttaaggagacaaacgccattgaacctgtgctggaggccacttaccttgaaactctaagcagaaatatgtttatagaagctctgaacggtcactttaaa

SEQ ID NO: 67904 - DNA, 633 bp, Homo sapiens
ttacggattcaatgtccgtacccggagatcggggagactgacattaacatgacgtgctcctccttaatagacctgcggaatacggatagacgcagaacggttacgcgcagagtaagccagcattaccggtgcttcatagcccgggaccagacgcttataagagttggtggtcgggtttgccagggcgttaatcgctttagcgtgtttgattacgccgccaatgtagtacagcgcctgctcagacagacctgcgtatttgtcgcctgcgaacaggttaacgccgtttttagacagagacatgtggcagtgcataccggagccgttatcaccgaacatcggttttggcataaaggtcgcggttttaccgaagcggtgcgctacgttgtgcacaacatatttgtagatctgaatttcgtcagcttttttggtcatggtattgaagcgggtagccacttcgttctgaccagcagtcgctacttcgtggtgatgggcttcaaccaccagacccatctgttccatcaccagacacatttcagaacgaatatcctgagccgagtctaccggtggaaccgggaagtaaccgcctttcactgccggacggtgacccccgctaccaccctcctattgggtgga

SEQ ID NO: 67905 - DNA, 800 bp, Homo sapiens
ggcggccttcacaagagaatcgtcggcggatgtacgtacctctcgtaagggattcccagcacgatatacaccgtggcgatggcggcaataatcaggatcacctgcgagttcatggtctcctggaacacctgcgccgggccggcaaaactgccgcgcaccgtcgaaggcacaccaagctggctcattgcgcgatcgatcgccgcactggcgtccgagagcgattttccggtcggcaggttaaacgaaatggtcaaggccgccgataatccctgatgattcaccgatagtggggcattcgccggttgccatttagcgaaatatgacagcgggatcgctttgccttcgttattgataacgaacattttttccagcgcactgatgtcctgggtatagcgcggatccacttccatcaccactttatactggttcatcggctggtaaatggtcgagatttgccgctgaccgaaggcgttatttaacagactgttggcggcttgtacgtcgattcccagccgtgccatggtgtcgcggtcgtaaaccagattcatctccgcgccgttatcctgctgatcggagttcacgtccgccagttccggcaacgtcgccagttttttgcggattttcggctcccattctcgcagtgccgccaggtcgtcggataacaacgtgtactggtagctggcgttcgactgacgcccaccaacgcgaatatcctgtaccgccatcaggaacagattcgcccccggttctttcgccagttttacgcgcagacggtcgataatttgctgcgccgtttcgct

SEQ ID NO: 67906 - DNA, 656 bp, Homo sapiens
  misc_feature (1)...(656): n = a,t,c or g
actacgaattcaatcgtccgacccgtagatcgctgaggctgatacccgcaccgccatagaccgcttatgctgcttggatgtcataaaatggcgtgagtcgataactgccgccagcctgaataaatacggagaagttttttgcatgaccgtccgttgcgccaatcaaccactggaagacctggaatttcataaaatcatagcgatctttcagcgcctcgctggaccccatcaaaaaagccatgatccgcgcgatgcctgggcctccatctgattcatatttcaccgatgaaggtaaaccgaatgtctgacacatatcctcctgtggcaagcgaagtaaaaccgttcgctcagcattccaacgcctgtcaaaacgttcgaccgctaacgcgcgcacatttcccgctttaatgatttctgcgtccggaacattcaacccaagttctttcgccagcagcagacagtaatactcattatcaacgctttggctgagatcgagcgtcgcattgggctgcctgatttcgccaatcggtaatttaatgatgtgcgtcgtcggcgttattcctttcggaatgcaccagtcattgcctattctgagcagngctggcttctcctgtgcgccagccaccgagatgcgaaagtcattttcttctctaatt

SEQ ID NO: 67907 - DNA, 765 bp, Homo sapiens
ttcccgggtcgacgatttcgtcggacttaaccgccgactgcgccgccgaatggctggaaaccttccaggcgaaagagctggaagcgactgaaaaaatgctctctcttgagcagaaaatgagcatggcgcaaaccgcgcacagccagtttgagcaggcttatcagctggtggtggcaatcaacggcccactggcgcgtaacgaggcgtgggatgtcgctcgcgaactattgcgcgaaggggtcgatcagcgtcacctggcagagcaggttcagccgctgcggatgcgattaagcgaactggaacagcgtctacgcgagcagcaagaagctgagcgtctgctggcagatttctgcaaacgtcagggcaagaattttgatatcgacgaactggaagccctgcatcaggaactggaagcacgcattgcctctctttccgatagcgtgtctaacgcccgtgaagagcgcatggcactgcgccaggagcaggaacagctgcagtctcgcattcagagtttgatgcagcgtgcgccggtttggctggcagcgcaaaacagtctcaaccagttgagcgaacagtgcggcgaagagtttacctccagccaggacgtcaccgaatatctgcaacagttgctggagcgtgagcgagaggcgattgttgaacgcgatgaagtgggcgcgcgcaatatcccgcaagacgaataagttgggtgtctacagggtcttgccggttctgacgttgtacaggtacggacatcgaatgcgtacg

SEQ ID NO: 67908 - DNA, 427 bp, Homo sapiens
gattacgagattcaatcgtccgtcccggagatcgctgtgactgatatatccccggcgatacccaactaactgatattgtatctgaccgtcatttctggctctttcttttgttctgctattatggaccgaaaggagactgccacgcataatttcttcagccctttccattcaaacgtgaaatcaataagttcatcagggacatcgcaaacaatatgaagacggatttcttctctgccgtgactcttttcactgattgcgtaactgtcatgctctggattatttaattctttcagcggaaatttttcctcaaaggctttattaagccgcccctggtttccttttacagcgaataaataatcacctccctgtttttgtatcttctctgcaatatctttctggcaacccatcgcatcaggtgtgatgattt

SEQ ID NO: 67909 - DNA, 465 bp, Homo sapiens
tccagtgtgtgtacgccatagttgctctcaatcctgtactttcccggttcagccgcctggcaaatcagactgccatctttgtacctaaatgagggaggcatgtttttagtttaaaggcagagttgtagtttgtgtgtgtgcaattctgccccagctcccccgcgcctgctgcccatttctgcaggtttcccttagagcctcaggcgggaggaggacagagccctgacggtgaggcccagagctcgcactggttttgctttctaaggcgagagcagcgctttcctcgttcagactctcaggggattccccattcgacagatcaaacacctgcctgacctttgttaggaattcaggacttgtcattccataagaaacactgggtgctggatcccggacccgcctacttaagctgcagtgtagctagtgtctcagggagttctgcgggacctaacgcactgaccctgg

SEQ ID NO: 67910 - DNA, 376 bp, Homo sapiens
gacgatatcgcactgaccaggattccctgcggctccagaaagaagaaaccgacaagcagcaataacaggacaatccagcccgccctgaaggttgccagatccttgatcgcactggcaggcgtcttcagcagcgaaacttaatacgttgccggaataactctgcgaaagaagagatacagcataatcagcgtggccgcaatcgctgccgcatccacggagatcataacggaggcgtactgcgcaaagctcagaccgaagaagtccgccgagacgatattcaccaggttagaaacaatgagcggcaggctggccgtatctgcaataaatcctgcagccatgacaaaggccagtgtcgtgccctggctgaacccagtgc

SEQ ID NO: 67911 - DNA, 428 bp, Homo sapiens
acccgtacaacgcggggattgcgaaaagcctgactcattccaaataaggcgaattgtggaccttcaccctgcgtgatgacgtgaaattctccaacggtgaaccgttcgatgccgaggcggcggcagaaaacttccgcgcagtgctcgataaccgtcaacgtcacgcctggctggagctggcaaaccagattgttgatgttaaagcactcagtaaaacagagctgcaaattaccctgaaaagcgcctactatcctttcctgcaagaactggccctgccccgtcctttccgttttatcgctccctcgcagtttaaaaaccatgaaaccatgaacggaattaaagcgccgattggcaccggaccgtggattttgcaggaatcgaaactgaatcagtacgatgtcttcgtccgtaacgaaaactactggggg

SEQ ID NO: 67912 - DNA, 336 bp, Homo sapiens
gttaccatcattacgaattcaatgtccgtacccgtagatcggaaccgctgaaacactgatcatatgacgcgacacattcgccttagtcggccttaaagcaatcaacgcccatcgcgaccagacctttcagtttgtcggcgtaccatttgcaggcatccggattggtaaagtcataaatcgccagacctggctgccatttatcccactgccatagcgaaccgtccgggcgtttgagtaaatagcctttctcttgtaactctttaaagacgggggatttttgaccgatataggggttaatccagacgcagattttcagtcctttcgctttcaggcggc

SEQ ID NO: 67913 - DNA, 262 bp, Homo sapiens
cattatcgaattcgaggtccgtacccggagatccagcggacagacgcggaacatttcgcctgcaccttaggtatcatatgcggtaatcagtggcgttgaaacccagaagaatccctgctcgttaaagaagcgatgcagcgcctgcgccagcgtatggcgaacgcgcgcgacggcaccaatcaggtttgtgcgcggacgcaggtgagcgacttcacgcagatactcaatgctgtggcgttttgccgccatcgggtaagtgtct

SEQ ID NO: 67914 - DNA, 155 bp, Homo sapiens
ctccggctgggatgacccgcgtcaaaaacagattactgcgcctgaatacgatcgcgcatccgttttgcttcatcagccagttgcgctaatcgctgctgctcactttgcgacaattcactgcgaccagaacgattgctgtaatgcagccataacca

SEQ ID NO: 67915 - DNA, 378 bp, Homo sapiens
catgattacggattcaatgtcggtacccgtagaacgtggaggatgacatttgcttggagattccccgactaactgaccggatggagattactggaccctactgtcgcccagtgatcgtccatcaatgccactttgccgtggagcgggcggcggcggtactcaaaaacctgaacgccgcctttaaccagatagttatacagcaagcgcgcaccgactctgacaatcggcatatccggttcgccctgaatgatcagtttgatccgcaccccgcgccgtgccgctttacgcaaggcgtgtaaaaatcgatagccggggaagaagtaggcgttggcgataatcacttcccgccgcgcctgagtgagcattttcaaataatgg

SEQ ID NO: 67916 - DNA, 508 bp, Homo sapiens
ctgccgcctggtgaagtttacgccccatcgaagccctggcaaaagaagtccgtgaactgaaataacatactcgttaattgctcaatccagccacaacgcgagaactgaccagtctgggacgaaacctgaaccgattgttaaaaagtgaacgcgaacgttacgacaaataccgtacgacgctcaccgacctgacccatagtctgaaaacgccactggcggtgctgcaaagtacgctgcgttctctgcgtagtgaaaagatgagcgtcagtgatgctgagccggtaatgctggagcaaatcagccgcatttcacagcaaattggctactacctgcatcgtgccagtatgcgcggcgggacattgctcagccgcgagctgcatccggtcgccccactgctggacaatctcacctcagcgctgatcaaaggcaagccgcgtaaagggggcaacgtcactgtttttccattcacagcgatgtacagggacggacattgaatccgtgatcagtg

SEQ ID NO: 67917 - DNA, 469 bp, Homo sapiens
cacaatagccagccgacgcttagcgggcaaattcgtaagctggaagatgagctgggcgtgatgttgctggagcggaccagccgtaaagtgttgttcacccaggcgggaatgctgctggtggatcaggcgcgtaccgtgctgcgtgaggtgaaagtccttaaagagatggcaagccagcagggcgagacgatgtccggaccgctgcacattggtttgattcccacagttggaccgtacctgctaccgcatattatccctatgctgcaccagacctttccaaagctggaaatgtatctgcatgaagcacagacccaccagttactggcgcaactggacagcggcaaactcgattgcgtgatcctcgcgctggtgaaagagagcgaagctttcatgcaaggcgagtaatttgagtagccacagggttttgccattcatgacgttgtccgggtacggcccggacattgatagt

SEQ ID NO: 67918 - DNA, 484 bp, Homo sapiens
tttcgtcggtccgggagggagggagggaggccggccctccgctcgctgggcatggagcctccggccgcgcgcctctaaggccccggcgttcatggaatatgaagacaaggctggaagacctagcaagccaccctctccaaagcagaatgtgaggaagaatcttgactttgaaccactttccaccaccgcactcatcctcgaggacagaccagcaaatctcccagcaaaaccagctgaagaagctcagaagcacagacagcagtatgaagaaatggtggttcaggccaaaaagcgagagctgaaagaagcccagcgaaggaagaagcagctggaagaaagatgcagagtcgaggaaagcattggaaacgctgtgctcacctggaataatgagatcttacctaactgggaaacaatgtggtgctctagaaaagttcgagatttatgagggcagggaatccctccaagtgtgagaggcaaagtctcg

SEQ ID NO: 67919 - DNA, 403 bp, Homo sapiens
agcatttgaaggtatagttcttgccatcagtccttcaaggtaactgctgaggctacctctcttcagtgattatggcttcttgagtcaaaatagttttttggggggtcccgatgatgtggtttgtgtataaatctctcatctactgaaatcatatttgtaagtgaaatattagtagatttaagttccattgttttctctacaggattaactacagaatattctagtatatatgttttgcgttttgctgcaccagtaagagttttgcagttcccactgtgcggagaagtctgtgcaactctctggagggatctatacgtctgtttaacacgtcaacccacaccacgctcgggttcacagggcttggatatttctgcattgcagctgttgtaacagtttcccacgg

SEQ ID NO: 67920 - DNA, 850 bp, Homo sapiens
cgtccgtagaggcccagaattcggcacgaggaagaaagcatccttgaagaagttttagaagctttaacttcagctggtgaagaaaaaaaaattgacagatttttttgtattgtggaaggcctccggcacaattcagttcaactgcaagtagcttgtatgcagctcatcaatgccctggttacatctcctgatgatttggatttcaggcttcacatcagaaatgaatttatgcgttgtggattgaaagagatattgccaaatttaaaatgcattaagaatgatggcctggatatccaacttaaagtctttgatgagcataaagaagaagatttgtttgagttatcccatcgccttgaagatattagagctgaacttgatgaagcatatgatgtttacaacatggtgtggagcacagttaaagaaactagagcagagggatattttatttctattcttcagcatcttttgctgattcgaaatgattattttataaggcaacaatacttcaaattaattgatgagtgtgtatcccagattgtattgcatagagatggaatggatccagacttcacatatcgaaaaagactagatttagatttaacccagtttgtagacatttgcatagatcaagcaaaactagaagagtttgaagagaaagcatcagaactttacaagaaatttgaaaaagagtttaccgaccaccaagaaactcaggctgaattgcagaaaaaagaggcaaagattaatgagcttcaagcagagctacaagcttttaagtctcagtttggtgccttgccagctgattgtaatattccttttgcctccctctaaagaaggtggaactggccac

SEQ ID NO: 67921 - DNA, 775 bp, Homo sapiens
gggtctcggaaggaaattccgtctcctcttcctcctcgtcttcctcttcctcgtcctctaacccggattcagtggcatcggccaaccagatctcactcgtggtaaagttgcaccgatttggactccggcactcatctctgtggccctcacccctctgtctggcagggccgtctactctgggatgtgggcccaggggacggggaggcactgggctttgagtggggaccttccggcctcgggggttatagatgcatccacctgtctcacccaagaggtagcccatccttctcgtggggtactcacaggcactcaggcaggaattcacatcctcgctgggcagatgggccggctgaggtccacctgcccacacccttcagccgcaccagagctggagacatgaaaagacatggctggcgggtgcagtggctcacgcctgtaatcccagcactttggcaggtcaagtcgggtggatcacctgaggtcaggagtttgagaccaggctgaccaacacggggaaaccccatctctactaaaaatacaaaattagccgggcaaagtggggcatagtggctcatgcctgtaatcccagctacttggaaggctgagataggagaatcgcttgaacctgggaggcagaggttgcaatgagccgaggtcgcgccattgcactgcagcctgggcaacaagagtgaaacactgtctcagaaaaaaaaaattagccaggcatggtggcacgtgcctgtggtcgcagctacttgggaggctggggcaggag

SEQ ID NO: 67922 - DNA, 340 bp, Homo sapiens
gcgggggcgactgcggccatgcttggcgtggctttggtggcaggcgcgctgggggctggagtagtggctgcggcggcggcactgctgctggtggcgctggctgtagcacccgccattgccttgtgttggggggcggtgctggcctccccggctgtgtatctgatcctagacggggtcgtggttgcggcatttgtggttgtagcggtctgtactgaccgcagcagtggtgcccctagtggcggaggctggattggcggctgtgggtttgaacgacccggtggtcgttggggcccttggtgggggtcctgacggagatgctgttggcagctggcccgtcatt

SEQ ID NO: 67923 - DNA, 356 bp, Homo sapiens
cgctagaggaagaagatggctgaaggcggagcggtggatctggacacccagcggtctgacatcgcgacgctgctcaaaacctagatccggaaaggggacacctggtggttgaacagggtatgtttgtaaagcactgcaaagtagaagtatatctcacagaattgaagctatgtgaaaatggaatcatgaataaagtcgaaactcgaatatttatcatagctgacacaataggtattagtgatagaacagatttatgaagatggaacatggccaaggggtccttctactcctaagactgctgcagtttgatggaggcctactccataccctgttagcctggttattaccagtggagg

SEQ ID NO: 67924 - DNA, 994 bp, Homo sapiens
agagaattcaaacactaccaaatcagaatcagtcgcaaacccagccattactgaagactcctcctgctgtacttcagccaattgcaccacagacaacatttggtgttcagactcagccccagccccagtcactgctgcaggcacagatttcagcagcttctattacaccactattgcagactcaaccacagcccttattacagcagcctcagcaaaaagctggtttattgcagcctcctgttcgtatagtttcacagccacaaccggcacgacgattagatcccccatcccgattttcaggaagaaatgacagaggggatcaagtgcctaacagaaaagatgatcgaagtcgtgagagagagagagaaagacgtagatcgagagaaagatcacctcagaggaaacgttcccgggaaagatctccacgaagagagcgagagcgatcacctcggagagttcgacgtgttgttccacgttacacagttcagttttcaaagttttctttagattgtcccagttgtgacatgatggaactaaggcgccgttatcaaaatttgtatatacctagtgacttttttgatgctcaatttacatgggtggatgctttccctttgtcaagaccatttcagctgggaaattactgcaatttttatgtaatgcacagagaagtagagtccttagaaaaaaatatggccattcttgatccaccagatgctgaccacttatacagtgcaaaggtaatgctgatggctagccctagtatggaagatttatatcataagtcatgtgctcttgctgaggacccacaagaacttcgagatggattccaacatcctgctagacttgttaagtttttagtgggcatgaaaggcaaggatgaagctatggccattggaggccactggtctccttcgttggatggaccagacccagaaaaagatccctctgtgttgattaagactggctattcgttgttgtaaggctctgacaggca

SEQ ID NO: 67925 - DNA, 358 bp, Homo sapiens
gatgaagttagacctctacctcacatcatgtgcaaaaattaacttgaaatgtatcaaatgtctaaaggtaagagctaaagctataaaaccttcagggaaactataggaataagtcttcaaaactttagatttggcaatgattttttagctataccgccaaaagcaccaataacaaaagaaaaaataaattggacttccctggaattaaaaaattttgcatcaaagtgcacaattcagaacttgaaaagccaacttacggagtgggaggaaatatttccaaatcaattatctaaaaactgctaatatccaatacatataaaggactcttaaaaacaacaaaagacaacccaatttttaa

SEQ ID NO: 67926 - DNA, 400 bp, Homo sapiens
cttgcgctgtggactcattcaggccacagactgcttttggtttgactggcttctacagtgtcagacagatagatgcttcacagtgactttttggtgaacaaccctactaggatacacgtgatgttcatgtccctgtgttccacgtgccatgcagtgtggacctctgtgatgtctacctgtgccgatgtcaggccggcttttctgagaggcactgtgaccacctcgtggacgactgcgcctcctacccgtgcgcgcacgcaggcacctgcctcgatgttgataccgacttctcctgcacctgcccgcctggctacacgggcaggaactgcagggcccccgtcagcaggtgcgatacacgcaccctgtcaaaatgtggccacctgtcacgagaggggccacg

SEQ ID NO: 67927 - DNA, 933 bp, Homo sapiens
  misc_feature (1)...(933): n = a,t,c or g
tgccaggctaatttttttttattttttgtagagacagggtctctccatgtctcccaggctataaaacggggttttatagatgaagaaagagaagcacagagaggacagggaagctggattggaaccataccttaagctcacattactagggtctcagaatccactcccaagggtgatcctgaagggttcactgtcaccctccggggtaagccacctcttttccccaagcgattcattccccacatgaaactcaacagtccttctatcccttcttcttaacctttcaggagtcacccaagagtcctgcctgcctccgcttacccctccaactcactttcctgctcccaggggcccaagggccctgggnctcactcacagaaactctgtctttttcttctcttctttatccttagtcctcagctttgtcttccagggagagcctggtgatggggagccctcatggtagagaccactcgaatctgccagctctgcctcttcctcatcccctggagggtagagtttcaggagggatagatcatctgggataaggcgaaggctgcttttaaaccttccccgagtacaccggaaccaggcggcgcctcccccggatccaggcaccagccgccgccgccgcctgaccggctcccgcgggggtcctgcgggccgcctgtcctccccttcgctgtcactgttgctgttatcccgggacgcgaccggccccgggggctccgggggctccacctcaacctcgtccgcggcaccgcgagcggtggcgacctccagaatttcctcatcgctgtcggtgaccaagtccacagacactacgtccagcgtgccccgggatggagaccgctgggcccgaggacgccggccccgaccgccccagccgccccgaccccctcggccggcaccgctacctccggaccagcggcc

SEQ ID NO: 67928 - DNA, 1606 bp, Homo sapiens
tttcgtagctggttttggttttggatggcttgtgggatggggaagggatgacggctggtatcggggacacggcggatggggccttgaaggttgagtccatgatgctgagggttgcggccacatgagggaaagctgtggtgtgggacatgagggcgctcgggtccggcgatgtcacgaaagctgcgtttgagagcatggctgatgtcattatgtaagaagaggtgagcctcgagctgatgggagctgaaggaagatacacagcactggggttgctgaaaggctgcaaaacggatgctggaacgggggtggtgatgtgggctgctggcgagggcagggggctatctgtcgcaggagggatcttcttccacatctgtgaattcaggtgtttttctaccatggagtttagtgcgaatcgaaaacgatcccatcttctatcaaacacatagtaccctcgtcccatgaggcgactcccaaatgagcaaaacgccataggtctggggtggtgcgtggagaactgacagtctagcttctcggattcgtcggctccgtccatctccccttcatcactggacagtcggctggcgaggtcacctccaaccggtgggagtgggggctctggagtgtggccgctatgatttgaagatgtgctgctgcttatgctatttgcagatgatggtctaggaagtacagagttgggtggtctggattttgcaggggatgcaacttttggttctggcccagagctccctgaagaccctagcagagaatcctgtgccggcccggattggcttggaagtatttccctcgtggaagtcaggagatgctctttatctttaacttctttttcccgggactttgctttgtgttctgccaggaggaggtcaaattgctttttccggcctgggactgccctccgatggcttagcgaatgtgtcttgcaggtgagggatcttgtgcaaggtttctttgtctcggcatccaatactccacagtgcttatttgggtcaaattctctctctgaaagtctcctgtaaggcttgttgctgctgttggtgccattttggcgtctcttgtctatggtggttggcagaattcctttgccatttaagatcttctctggtgaaggtggcactgacttggacatcaggacaggcttaattaaaggaggggtggagacggcagaggacgaggtggaggaggcagaaactgcagtagtggttgtggagttcattttgacattggcaccatctgccttcactaggttaggaattttctctaaactgactacaggaactggaacacatggtttatcccttgatcctttcgcaggaaagactgtgtgctgtttgctgctggaggtaagtagattgtctttgggcgttttgaatggctttgaggtgctgctggcagagtgatggccgctgagacaggcttttgttttcacctgtactagtgatgtcctgggattggaggctggagacactggagagggagaaggtctacacattgaaccgtgtcttctctcgcagtgcgactggaaaacctgtggcttgacgacctggttacaggcactgcacactacgagatagaagtcgtcatgtgctgg

SEQ ID NO: 67929 - DNA, 411 bp, Homo sapiens
tgtgtttggccctggctggccgggacctggccgactacgtggtgaagatcctcgaggggcccgctacagcttcatcaccacagtgaagtgggggattgtgcgtgacatccaggaaaagctatgctgtgttgccttggacttgcagcaggagatggccactgccgtgtcctcttccttcctggagaagagctacaagctctcccacagcctggtggtcaccatcagcaatgagtggttctggtgtccagaggcgctgtcccagccctccttcctgggcatggaatcttgctgcatccaggagaccatcttgacctccatcatgaagtgtgatgtggatatctgcaaggacctgtacaccaatgtggtgctgtctggcacattgccatgcacccaagtatcacacacaggatg

SEQ ID NO: 67930 - DNA, 541 bp, Homo sapiens
ctcgaatcatgggagtgaaggcaccaacgatgcccatgttgttgctgcgggaggcatggacctgcatgagcaccttgagcctgtccaggggggccgtgcaggttctggatacggcccctgccccacctcctgccaccaggtgtctccaccacatccccgtctgcctctcctccactgtgaactcatccgggaccgttagattctcacccacatcaaagatcgtggaatgcttccagtagaggatgatctcggggatgttttccacggggtggaggaggtggtagtctctccactcgttccagtcgatggtcatcgtgccgtttttatccatgctcttgagaattttttctgcctgctgttcagatatcttgactcccaaagtcccgcagggactgcatgatctcctgcgcgtcaatgcgtccatcattctttttgtccaaactcttaaacaccagcctcagcttcttctcatgatcttggagataatggacaaattcttcaaagtctagctgcccatcaaggtccttatctccagcttgta

SEQ ID NO: 67931 - DNA, 670 bp, Homo sapiens
gctagattctatagatcctgctttacgaaggcctggtcgctttgatagagaattcctctttagcctgcctgataaagaggctcgaaaagagattctaaagattcacaccagggattggaatcccaaaccactggacacatttttagaagagctagcagaaaactgtgttggatactgtggagcagatattaaatcaatatgtgctgaagctgctttatgtgctttacgacgacgctacccacagatctataccactagtgagaaactgcagttggatctctcttcaattaatatctcagctaaggatttcgaggtagctatgcaaaagatgataccagcctcccaaagagctgtgacatcacctgggcaggcactgtccaccggttgtgaaaccactcctgcaaaacactgttgacaagattttagaagccctgcagagagtatttccacatgcagaattcagaacaaataaaacattagactcagatatttcttgtcctctgctagaaagtgacttggcttacagtgatgatgatgttccatcagtttatgaaaatggactttctcagaaatcttctcataaggcaaaagacaattttaattttcttcatttgaatagaaatgcttgttaccaacctatgtcttttcgaccaagaatattgatagtagg

SEQ ID NO: 67932 - DNA, 323 bp, Homo sapiens
gcaattaccaccaccacgatatccacgatctctcgcacagtaatatacagccgtgtcctcgactcgcaggctattcatttgaagaaacaccatgttcttggaatcgtctctggagatggtgaatctgcccttcacggagtctgtgtagaatgtcctaccatcgcggtaaagagctgagacccactccatccccagttcctggagtctggcggatccaggtttggtaattggtcctgcctgctgatgcttatgctgagccggtggtgggcgtgccgacgcggtcttggtctgaccttttggtgtagttgagtggtttgtcctcg

SEQ ID NO: 67933 - DNA, 1362 bp, Homo sapiens
tttcgtgaaacttatcaagaaacaccaggctgctatggagaaagaggctaaagtgatgtccaatgaagagaaaaaatttcagcaacatattcaggcccaacagaagaaagaactgaatagttttctcgagtcccagaaaagagagtataaacttcgaaaagagcagcttaaagaggagctaaatgaaaaccagagtacccccaaaaaagaaaaacaggagtggctttcaaagcagaaggagaatatacagcatttccaagcagaagaagaagctaaccttcttcgacgtcaaagacaatacctagagctggaatgccgtcgcttcaagagaagaatgttacttgggcgtcataacttagagcaggaccttgtcagggaggagttaaacaaaagacagactcagaaggacttagagcatgccatgctactccgacagcatgaatctatgcaagaactggagttccgccacctcaacacaattcagaagatgcgctgtgagttgatcagattacagcatcaaactgagctcactaaccagctggaatataataagcgaagagaacgagaactaagacgaaagcatgtcatggaagttcgacaacagcctaagagtttgaagtctaaagaactccaaataaaaaagcagtttcaggatacctgcaaaatccaaaccagacagtacaaagcattaagaaatcacctgctggagactacaccaaagagtgagcacaaagctgttctgaaacggctcaaggaggaacagacccggaaattagctatcttggctgagcagtatgatcacagcattaatgaaatgctctccacacaagccctgcgtttggatgaagcacaggaagcagagtgccaggttttgaagatgcagctgcagcaggaactggagctgttgaatgcgtatcagagcaaaatcaagatgcaagctgaggcacaacatgatcgagagcttcgcgagcttgaacagagggtctccctccggagggcactcttagaacaaaagattgaagaagagatgttggctttgcagaatgagcgcacagaacgaatacgaagcctgttggaacgtcaagccagagagattgaagcttttgactctgaaagcatgagactaggttttagtaatatggtcctttctaatctctcccctgaggcattcagccacagctacccgggagcttctggttggtcacacaaccctactgggggtccaggacctcactggggtcatcccatgggtggcccaccacaagcttggggccatccaatgcaaggtggaccccagccatggggtcacccttcaaggcccaatgcaaaggggtacctcgaggagcagtatgggagtccgct

SEQ ID NO: 67934 - DNA, 569 bp, Homo sapiens
tatgggaagccagtttagagaacctggaaatcgaacctgatggaaatatactccagctcaatcagacactggaagagtgtgtgcccagggttaggagtgtacatcatgtcatagaggaatgtaagcaagaaaaccagtaccttgaggggaacacacagctcttggaaaaagtaaaagcacatgaaattgcctggttacatggaacaattcagacacatcaagaaaggccaagagtacagaatcaagttatactggaggaaaacactactctcctaggctttcaagacaaacattttcagcatcaggccaccatagcagagttagaactggagaaaacaaagttacaggagctgactaggaagttgaaggagagagtcactattttagttaagcaaaaagatgtactttctcacggagaaaaggaggaagagctgaaggcaatgatgcatgacttgcagatcacgtgcagtgagatgcagcaaaaagttgaacttctgaggtaatgtatgtaccttctagacgtcacgaatcccacagagcacctcaccagatctaacttccactgcttg

SEQ ID NO: 67935 - DNA, 1488 bp, Homo sapiens
agggggactcctgagggatgaagtgggcgatccagactcctagcttcccaccgaggcactaagggaatcagagtgggtcagcgagtacgggaagtgtggtccacgagggctggttcctgagggagaatccacaagccccctcccctcttcagtggatactgaagactccctcgacgaaggacccggggccctggtattggagagtgatttgctactaggccaggatctggagtttgaggaggaagaggaagaggaggaaggcgacggcaacagtgaccagctcatgggcttcgagagagactcggaaggagactctctgggggccaggcctgggcttccctatgggctgagcgacgatgagtctgggggcggccgggcactaagtgcggagagtgaagttgaggagccagccaggggtccaggggaggccaggggtgagaggccaggcccagcctgccagctgtgtggggggccgacaggtgaggggccgtgttgtggggcaggagggccgggtggggggcccctgctgcccccacggctactgtactcatgccgcctctgcaccttcgtgtcccactactcgagccacctgaagcggcacatgcagacacacagcggagagaagccgttccgctgtggccgctgcccctacgcctcagcccagctcgtcaacctgacacgacatacccgcacccacactggcgagaagccctaccgctgtccccactgcccctttgcctgcagcagcctgggcaacctgaggcggcatcagcgtacccacgcagggccccccactcctccctgcccgacctgtggcttccgctgctgtactccacgaccagcccggcctcccagtcccacagagcaggagggggcggtgccccggcgacctgaagatgctctgctccttccagatttgagcctccatgtgccaccaggtggtgccagtttcctgccagactgtgggcagctgcggggtgaaggggagggcctctgcgggactggatcagaaccactgccagagctgctattcccttggacctgccggggctgtggacaagagctggaggagggtgagggtagtcggctgggagctgccatgtgtgggcgctgcatgcgaggagaggctggagggggtgccagtggggggccccagggccccagtgacaaaggctttgcctgtagcctctgcccctttgccactcactatcccaaccacctggcccggcacatgaagacacacagtggtgagaagcccttccgctgcgcccgctgtccttatgcctctgctcatctggataacctgaaacggcaccagcgcgtccatacaggagagaagccctacaagtgccccctctgcccttatgcctgtggcaatctggccaacctcaagcgtcatggtcgcatccactctggtgacaaaccttttcggtgtagcctttgcaactacagctgcaaccagagcatgaacctcatacgtcacatgcc

SEQ ID NO: 67936 - DNA, 429 bp, Homo sapiens
gcgcaggcccatcgggcccactctggagcagacgctgcctcatgcccccgggtctctgctgtgaggaggagggaggggacagacctccatggcaccacagtgtcctggggaactgaggcgagtcacagaggctgcagaggaaagtgtgaacttgtcacagtgggggaaggacgtggtgccgaggccaggctgcagggctccctgtgcctcccagccccgcacctcctccctctggaccggctcccacaaggacatcccacccggtcagcagcccacggaggctcccgtgcagggaccaccccctccccgtgctgggccggctccggggccaccccctcctccctgctgcccccagagctgctcaccctggggatcttccccccatcctcttctggctcaccgtgggctcaggccctgcccgatggctgg

SEQ ID NO: 67937 - DNA, 519 bp, Homo sapiens
cagggattagatatctgtgcaaatggcaggtgcccagaaagttggctgtgatggtttattagggtctcttgcaagagaagatcattgtggtgtatgcaatggcaatggaaaatcatgcaagatcattaaaggggattttaatcacaccagaggagcaggttatgtagaagtgctggtgatacctgctggagcaagaagaatcaaagttgtggaggaaaagccggcacatagctatttagctctccgagatgctggcaaacagtctattaatagtgactggaagattgaacactctggagccttcaatttggctggaactaccgttcattatgtaagacgaggcctctgggagaagatctctgccaaaggtcctactacagcacctttacatcttctggtgctcctgtttcaggatcagaattatggtcttcactatgaatacactatcccatcagaccctcttccagaaaaccagagctctaaagcacctgagcccctcttcatgtggacacacacaag

SEQ ID NO: 67938 - DNA, 396 bp, Homo sapiens
  misc_feature (1)...(396): n = a,t,c or g
accaacaagaaaatataaaacttatgcaaactataaaccgaatagacttcacatacacagataaaatacacaaaagcagcagaatacatattcttttcaagcagacatggaagatctttcaggattccataggctaagttataaaaccaatcttagaaaatttaaaaggatagaaataacaaagcatattcaccaagcagaatgggctgaaactagaattcaatgacagaaagaaatttgagaaactcgcaaatatattgaaattcaagaacacactgctaaataaccagtgggtaaaagaagaaatcacaaagagaattagaaaatgctttaagataaatgaaaataaatataaaacacaccaaaacttaatatgcagctaaaaacaggcatacn

SEQ ID NO: 67939 - DNA, 1392 bp, Homo sapiens
  misc_feature (1)...(1392): n = a,t,c or g
gaacgttgtaaagtgcagtcctccactttagtgtcttctctggaggcggagctctctgaagttaaaatacagacccatattgtgcaacaggaaaaccaccttctcaaagatgaactggagaaaatgaaacagctgcacagatgtcccgatctctctgacttccagcaaaaaatctctagtgttctaagctacaacgaaaaactgctgaaagaaaaggaagctctgagtgaggaattaaatagctgtgtcgataagttggcaaaatcaagtcttttagagcatagaattgcgacgatgaagcaggaacagaaatcctgggaacatcagagtgcgagcttaaagtcacagctggtggcttctcaggaaaaggttcagaatttagaagacaccgtgcagaatgtaaacctgcaaatgtcccggatgaaatctgacctacgagtgactcagcaggaaaaggaggctttaaaacaagaagtgatgtctttacataagcaacttcagaatgctggtggcaagagctgggccccagagatagctactcatccatcagggctccataaccagcagaaaaggctgtcctgggacaagttggatcatctgatgaaatngaggaacagcagctgctttggcaagagaatgagaggctccagaccatggtacagaacaccaaagccgaactcacgcactcccgggagaaggtccgtcagttggaatccaatcttcttcccaagcaccaaaaacatctaaacccatcaggtaccatgaatcccacagagcaagaaaaattgagcttaaagagagagtgtgatcagtttcagaaagaacaatctcctgctaacaggaaggtcagtcagatgaattcccttgaacaagaattagaaacaattcatttggaaaatgaaggcctgaaaaagaaacaagtaaaactggatgagcagctcatggagatgcagcacctgaggtccactgcgacgcctagcccgtcccctcatgcttgggatttgcagctgctccagcagcaagcctgtccgatggtgcccagggagcagtttctgcagcttcaacgccagctgctgcaggcagaaaggataaaccagcacctgcaggaggaacttgaaaacaggacctccgaaaccaacacaccacagggaaaccaggaacaactggtaactgtcatggaggaacgaatgatagaagttgaacagaaactgaaactagtgaaaaggcttcttcaagagaaagtgaatcagctcaaagaacaagtgagcctacctggtcatctctgttcacccacctcacattccagctttaactccagttttacatccctttattgccattaactcgttaacttatgttggctaataaaggcaaattctattaaaaaaaaaa

SEQ ID NO: 67940 - DNA, 386 bp, Homo sapiens
aaatacagcggaaaaacgaaggtccttcaccagcgttttaaatcattgcaggaaaaacagagataaagtccgtgtcttttctttttccaccaagtcgcttgacttgctacagcagtactgtatggctgctgggcttgattacacgactgacttgatggagagtacaaaatcacaggacagactcaagattgtactagagttcaacagtacacaagatgttaacatttgccttgcctctacaatggctggtggactagtcctcaatttctgtcggggccaatgttggtgtattattggatcctacttggaatccagccaatgatcttcaagccattgacagagcatataggactggacaatgtagagatgtcaaagtgcttaagctg

SEQ ID NO: 67941 - DNA, 1008 bp, Homo sapiens
acggactgccccggtcgacccacgcgtccgcggaggttcgacctgctgtggccgccaagcccgggcgcgcaagaagaaactcagcaagtcagacatcatgctggtgcagagctccaatgtacccagtaacccggcccaggtgccgatagaggagtccgggggctttggctcccaccaccacaaccagaattactgctatcaggtatgcctgacccctgagtccgccaagaccgacctgatgtttcttaagccctgcagcccttcgcggagtacggacactgagcacaacccctgcggggccatcgtcaccggttacaccgaccagcagcctgatatcatctccaacggaagcattttgtccaacgagactaaacaccagcgagcagagctcagctatctagttgacagacctcgccgagttaacagttctgcattccaggaagccgacatagtaagctctaaggacagtggtcatggagacagtgaacagggagatagtgatcatgatgccaccaaccgtgcccagtcagctggtatggatctcttctccaattgcactgaggaatgtaaagctctgggccactcagatcggtgctggatgccttcttttgtcccttctgatggacgccaggctgctgattatcgcagcaatctgcatgttcctggcatccatcaaatcggtgctggatgccttcttttgccccttctgatggacgccaggctgctgattatcgcagcaatctgcatgttcctggcatggactctgttccagacactgaggtgtttgaaacttcagaagcccagcctggcgcagagcggtccttttccacctttggcaaaaagaaggcccttcacagcactctggagaggaaggagctggatggactgctgactaatacgcgagcgccttacaaaccaccatatttgactcggaaaaggatatgctagtcaattctacaggacttacctgaagcagcatgatttgcacaaagtcgaccaacaaaagca

SEQ ID NO: 67942 - DNA, 397 bp, Homo sapiens
aggacgtgagtggaaagggctgttgggagggacccagcttcacccttggggggcaccttggggccatgtgcaggccagatcgcaggggtgggctggagatgagcttggggatggcagaaccgaagaagggcaggactgggggagggccgggggggctgggctttagcctcgggtcctggggacggcattctgaatatgggaatatgggccgtgttggggtgtattcagacacccgctcagaggtgctccaagcagcaccaggcccctggctgccaactctgatattgtcactggggctctgagggctgggtgtggacaggctccttggctgggaagccagtgtcctctcggggcatagctggcatggccaggatccactcagcaatgtcttccaagg

SEQ ID NO: 67943 - DNA, 2337 bp, Homo sapiens
tttcgttgcaattgcaacgaatggtgttgtgcctgctggtggctcctactacatgatttccaggtctctgggcccagagtttgggggtgccgtgggcctctgcttctacctgggcactacctttgcaggagccatgtacatcctgggcaccatcgaaatcctgctggcttacctcttcccagccatggccatcttcaaggcagaagatgccagtggggaggcagcagccatgctgaacaacatgcgtgtttacggcacctgtgtgctcacctgcatggccactgtggtgtttgtgggtgtcaagtatgtcaacaagtttgcccttgtcttcctgggttgtgtcatcctctccatcctggccatctatgctggggtcatcaagtctgccttcgacccacccaacttcccgatctgcctcctgggtaaccgcacgctgtctcgccatggctttgatgtctgtgccaagctggcttgggaaggaaatgagacggtgaccacacggctatggggccttttctgctcctctcgcttcctcaacgccacctgtgatgaatacttcacccgaaacaatgtcacagagatccagggcatccctggtgctgccagtggcctcatcaaagagaacctctggagctcctacctgaccaagggcgtgattgtggagaggagtgggatgacctcggtgggcctggccgatggcactcctatcgacatggaccacccttatgtcttcagtgatatgacctcctacttcaccctgctggttggcatctacttcccctcagtcacagggatcatggctggttctaaccgctctggggacctgagggatgcccagaagtcaatccccactggcaccatcctggccatcgccaccacctctgctgtctacatcagctccgttgttctgtttggggcctgcattgagggggtcgtcctgcgggacaagtttggcgaagctgtgaatggcaacctcgtggtgggcactctggcctggccatctccatgggtaattgtcatcggatccttcttctccacctgtggggctgggctgcagagcctcacgggggccccacgcctgctgcaggccatctcgagggatggcattgtgcccttcctgcaggtctttggccatggcaaggccaatggagagccgacctgggccctgctcctgactgcctgcatctgcgagattggcatcctcattgcatccctcgacgaggtggcccccatcctctctatgttcttcctgatgtgctacatgtttgtgaatctggcctgtgcagtgcagacgctgctgaggacacccaactggaggccacgctttcgatattaccactggaccctctccttcctgggcatgagcctctgcctggccctcatgttcatctgctcctggtattatgcactggtagccatgctcattgctggactcatctacaagtacattgagtaccgtggggcaaagaaggagtggggcgatgggatacgaggtctgtctctcagtgcggctcgctatgccctcttacgcctggaggaagggcccccacacaccaagaactggaggccacagctgctggtgctggtgcgtgtggaccaagaccagaatgtggtgcacccccagctgctctcactgacctcccagctgaaggcagggaagggcctgaccatcgtgggctctgtccttgagggcacctttctggaaaatcatccacaggcccagcgggcagaagagtctatcaggcgcctgatggaggcagagaaggtgaagggcttctgccaggtggtgatctcctccaacttgcgtgatggcgtgtcccatctgatccagtctgggggcctcggggggctgcagcacaacactgtgcttgttggctggccccgcaactggcgccagaaggaagatcatcagacgtggaggaacttcattgagctggtccgggaaaccacagctggccacttagccctgctggtcaccaagaacgtttccatgtttcctgggaaccctgagcgcttctctgaaggcagcatcgaccgttgggggattgggcacgatggaggcatgctcatgctggtgcccttcctgctgcggcaccacaaggtctggcggaagtgcaagatgcgtatcttcactgtggcccagatggatgacaatagcatccagatgaagaaggatctgaccacatttctgtatcatttacgcatcactgcggaggtcgaggtggtggagatgcatgagagcgacatctcagctttacacctatgagaagacgttggtgatgggagcagcgtttcccagatcctcaaacagatgcatttaaccaagaatgagcggga

SEQ ID NO: 67944 - DNA, 1536 bp, Homo sapiens
gcggccgctcgcgcgagtgcacgcggcagtggttggtgagcttggacttctcgctgaagctcttctcgcactcggggcacttgaagggccgctcgcctgtgtgagtccgctggtggcgcagcaggtgcgaggggcggctgaagctcttgccgcacaggctgcagatgaaggagacctcatgcttgcccgcgtgcacgcgctgatggatcaccaagctgatgtgcaggcggaagctcttcttgcactcggggcacgtgtagggccgctcacccgtgtgcgtgatctggtgtttggtcaggctggacttgtggctgaagctgctgtcgcactcggggcacttgtagggcttagggccaccgccgccgctaccagagctgggtgacttgggacgcggcttgagcgcgtgcttggggttgaacgtgggcccgcgttcgggtgagacgcagcctccgcgcacgcggtggatgcgctggtgcagcgtgagctgttgcttgtgccggaagctgatctcgcattcggcgcactcgtagggcccctccttgatgtggttgcgctggtggatgatgaggttgatcttcaggcggaagctcttgccgcactccatgcatgtgaagggccgctcgccgcgccggttccgctgctgctggctcgaggccccgcggttctcgctcaggtgccgctcaccgtgcacggagggcgccagccttttcactgcggggtttcctagctgcaggggcggggggctctcctcgccctcgggggacatctccccgggcagcggggtctggtacatactggcctcatatctcccggacagctgcccaagggattgcaagtgctgcggcagctcatcctcctcctcctcttcttcctcctcgtcttgttcctctgtcttgatcacgatcccctccgtgcagttcctctgctgcaccagcatctgcttcagttcgctgaactcgctggagccttccgtggactcctccagcgtgttctctggctcctgcatgtccaggtctggctgttccccacaggggtcacccagctctgagtcctggaagccgtgctcttccacctgtcccatcaggggctcaggtgtctccaaactttctgagccctcgtcgttggtctgtacctcgatcttaatcacgatcccatcgtgcgcagcactgggatctgtcggcgtttcgccctcctcagagtcttcctgctcctgcatggtgggccgctccccgcgctccatctgtgacatgaggtctggtttggaaattgcatagtccatggaaaccagggactcgtagttgcccctcatcacgttcttgtagagctccttctgccactcagacaggtttccccactcctgctccgagaagtgcacagcaacatcatcaaatgtgacagggaccttgggaacttctccattgctgccggggggcagccgcaggatccagaaatttctgtttttcagcaggttctccatgttctccagccgcctctgcagcagcccatactcctgcagcaggaattccaccacactga

SEQ ID NO: 67945 - DNA, 728 bp, Homo sapiens
  misc_feature (1)...(728): n = a,t,c or g
tgaaatacttgttccactagacagtaaggtttcaagaccaaccaaatttgttgtttcgcccaagaacctgaagaaagatcttgctgaacgttggagccttcctgagattgttgggattccacaccaattatccaaacctcagcgtcagaaacagactttgccagatgattatttgagtatggacacactgtatcccggcagcctacctccagaactccgggtgaacgcagatgagcctccagggcctcctgagcaagttggactttctcaattccatctagagcccaaaagtcaaaatccagagacccttgaagacatccagtcctcttcactccaggaagaagccccagcgcagcttctacagctccctcaggaggtagaaccttcaacccagcaggaggccccagctctgcctccagagtcctctatggagagtctagctcaaactccactgaatcatgaggtgtcagttcaacctccaggtgaggatcaagctcattataatttgcccaacattacagttaaacctgcagatgtggaggttaccatgacttcagagcctaccaatgagacagaatcttcccaaacccagcaggagaccccaattcagtttccagaggaggtggaaccttctgcaccccaacaggaggccccaattgagcctccagttcctcctaggagcatnngtgttccgagagcctcaattgtctcatttnnnnngggggggg

SEQ ID NO: 67946 - DNA, 4975 bp, Homo sapiens
aaggcatccaggatgcggtgcggggcggcccggtgcccccccgccccgtcacggcagccgcggcggccgaggggaccgggccagggccgggggcggcggcccgagccgcggtagcggcggcggcgggaggggcggcctgagggcggacgggcgggcgcccgggttgcgggggctcggtgccgctccgcactgcccggccggtctcggccccggcgccatgagtggcggcggcggcggagggggctcggcgcccagtcgcttcgccgactactttgtcatctgcggactggacacggagaccgggctggagccggacgagctgtcggcattatgccagtacatacaggcttctaaagccagggatggtgccagccctttcatttcaagtacgactgaaggagaaaattttgagcagacaccattgagaagaacattcaaatctaaggtccttgcacgatatcctgagaacgtagaatggaatccctttgaccaagatgcagtaggaatgctatgtatgccgaaagggctggcattcaagacccaggctgatcccagggagccccaattccatgcctttattatcacaagggaggatggctctcggacatttgggtttgccctcacattttatgaagaggtgactagcaagcagatctgcagtgcaatgcagaccctctaccacatgcacaatgctgagtatgatgtcctacatgctccccctgctgatgacagagaccagagcagcatggaggatggtgaagacactcctgtgaccaaactgcagcgcttcaactcctatgacattagccgggacactctctacgtctctaagtgcatctgcctcatcacacccatgtctttcatgaaggcatgtcggagcgtgctggagcaactccaccaggcagtcacttcacctcagccccctccactgccccttgagagctacatatacaacgtactctacgaggtgccgctcccacctcctggccggtccttgaagttttctggggtctatgggccaataatctgccagagaccaagtaccaatgagcttcccctatttgactttcctgtcaaagaggtttttgaactgctcggggtggagaatgtgtttcagctttttacttgtgcccttctggagtttcaaatcctgctctactcacagcattaccagagactgatgactgtggcggagacgattacagctctcatgtttcctttccagtggcagcatgtctatgtccctattctcccagcttctctcctgcatttcttagatgctcctgttccatacctgatgggtttgcattccaatggcctggatgaccggtcaaagctggagctgcctcaagaggctaacctctgctttgtggacattgacaaccacttcattgagttgccagaggacttgccacagttccccaacaaattggagtttgtccaggaagtctctgagattctcatggcatttggaattccccctgaagggaatcttcattgcagtgagagtgcctccaagctgaagaggctgcgggcctctgagcttgtctcggacaagaggaatgggaacattgctggctcccctttgcattcctacgagcttcttaaggagaatgaaactattgcccggctgcaagccttggtcaagagaactggggtgagcctggaaaagttggaagtgcgtgaagaccccagcagcaataaggatctcaaagttcagtgtgatgaagaagaactcaggatttaccagctaaacattcagatccgggaagtttttgcaaatcgtttcactcagatgtttgcagattatgaggtgtttgtcatccaacccagccaggataaggaatcctggtttaccaacagggagcaaatgcaaaactttgataaagcatcttttctgtcagatcagcctgagccctacctgcccttcctctcaagattcctggagacccagatgtttgcatctttcattgacaacaaaataatgtgtcatgatgatgatgataaagaccctgtactccgggtatttgattcccgagttgacaagatcaggctgttgaatgttcggacacctactctccgtacatccatgtaccagaagtgtaccactgtggatgaagcagagaaagcaattgagctgcgtctggcaaaaattgaccatactgcaattcacccacatttacttgacatgaagattggacaagggaaatatgagccgggcttcttccctaagctgcagtctgatgtactttccactgggccagccagcaacaagtggacgaaaaggaatgcccctgcccagtggaggcggaaagatcggcagaagcagcacacagaacacctgcgtttagataatgaccagagggagaagtacatccaggaagccaggactatgggcagcactatccgccagcccaaactgtccaacctctctccatcagtgattgcccagaccaattggaagtttgtagagggcctgctgaaggaatgccgcaataagaccaagaggatgctggtggaaaagatgggccgagaagctgtggagctagggcatggggaggtgaacatcacaggggtggaagagaacaccctgattgccagcctttgtgatctcctggaaaggatctggagtcatggactacaagtgaaacaggggaaatcagccttatggtcccacctgttacattatcaggacaaccggcagagaaaactcacatcaggaagcctcagtacctcaggaatacttcttgattcagaacgtaggaagtctgatgccagctcactcatgcctcccctgaggatctccctgattcaggatatgaggcacatccagaacatcggggaaatcaagactgatgtgggaaaggccagagcatgggtgcgactgtccatggaaaaaaagttactttccagacacctgaagcagctcctctcagaccatgagctcaccaaaaagttatataagcgctatgccttcctgcgctgtgatgacgagaaggagcagttcctctatcacctcctgtctttcaatgccgtcgattacttttgcttcaccaatgtcttcacaactatcctgatcccgtaccacattctgatcgtaccaagcaagaagctggggggctccatgttcactgccaacccatggatctgtatatcaggagaattgggtgagacacagatcatgcagattcccaggaatgtgctagagatgaccttcgagtgccagaacttggggaagcttactactgtccagattggccatgataactctgggctgtatgccaaatggctggtggagtatgtgatggtcaggaatgagatcacaggacatacctacaagttcccgtgtggccggtggttagggaagggcatggatgatggaagcctggagcggatcctagttggggagctgctcacatcccagcctgaggtggatgagaggccatgccggaccccgccgctgcagcagtcccccagtgtcatccggaggcttgttaccatctcacccaacaacaagcccaagctgaacactgggcagatccaggagtccatcggggaggcagtcaatggcattgtgaagcacttccataagcctgagaaagagcgaggcagtctgacgctgttgctctgtggagagtgtggccttgtctcggccttggaacaggctttccagcatggatttaaatcgccccggctcttcaaaaatgtcttcatttgggatttcctggaaaaagcacaaacctattatgagacattagagaagaatgaagtagtccctgaggaaaactggcatacaagagcccggaacttctgccgatttgtcactgcaatcaacaatactccccggaacatcggcaaggatggcaagtttcagatgctggtgtgcttgggagccagagatcacctcctacaccactggattgccctgctggctgactgccccatcactgcacacatgtatgaggatgtggcactgatcaaagaccatacacttgtcaattccttgattcgtgtgctgcagacattgcagggagtttcaacatcacgctgggaggacgtccctttgtcaaggggcattcggacatcttgacctcccagcaccagcccggcagcagggattgaggaaagactcaccctggcagctctgacctttttttcccaaaggggacttaaggcgattgtgcaggagtaggagacaaaatgttacactcactgtaaaaagaaaactaggaggatttttgggaataaataatctattttagagtttatttgctgatttgctttttacacactttcatgtgaaagagtgatagggagagggagcgaggctggtgccgcttattttgaagctggtgccctccctcgccgtggccacatgctggaagcctgaggcctccctggactgagcctgtggcactgcgtgcgggacagttatgtttccttgccccgtcgcattaatgaggcccttccacatcatttttaaactaatgtttttctatattaacattattatggatatttggctttcataggccacacacaggtggtctgccgcgggaagcccccaggcccccaatcaaagggattttttagtagtgccctcctaagcaagcaccgaatgagtcagtccccacgtattttccttttttgtccagtattgtttgggaaggagacatgcccgggatgtgtccatccgtgcccaaatacccacatttccctgttggccacagtttccacagaagtaaacataagcatgttttaacaggtttttccttttcttttttcttttttaaaatgttttatttatttaacccgccattgtgtgtttttaagtattttctttttttaagggaaaggaaaagcttgtcacaatctaactggctatgttattattattaaatttatgttttgcaacttagaaaccagctacagtatggcccacttaataaaacacctcaaacaaaaaaaaaaaaaa

SEQ ID NO: 67947 - DNA, 346 bp, Homo sapiens
gtagatctgcgtgtgcgttcggtgtgtggccggatgtggtgggtgtgtgcgcggagcacgttttatctggagtgcttggtgtggtgtgtatttggtttgcgctttgacatgcagcatgtgtttgtgtgtgcacgcttataggttgtatgtttctgcccgattatagtgggattatgtgggtgcggtttgaaggtgggtgtgtgctgttcctgccggggtttgtggtcgtgctgtggtgagtgtatatgtgtgtgcaatgtgtggatgtgtgtgtgcccgttgaagcttgtgtgcatatgtgtggagtgtgtttatgcttaaatgcagtgtgccaaggggggttaca

SEQ ID NO: 67948 - DNA, 381 bp, Homo sapiens; identical to SEQ ID NO: 38032

SEQ ID NO: 67949 - DNA, 346 bp, Homo sapiens
  misc_feature (1)...(346): n = a,t,c or g
acgtgatggtggtggtggtggtgtcatcctgtcacaacgatacctattatctactgctgtatatgactgtgactacgagcgctcttactattattgcctgatacacacatagctgcatgnacagataattgatgtactatacaaagctgtattttactataaaccaaactcaaaatgatgatgctttcaaggaaagaagcattggattttcatgtagatcaccagtcaagaccctttttcaatgagctgatccagtttattacaactggtcctattattgccatggagattttaagagatgatgctatatgtgaatggaaaagactgctgggacctgcaaactctg

SEQ ID NO: 67950 - DNA, 403 bp, Homo sapiens
actgcctgttacgtgccaagtgctttttgttaaggacataatgtttttgactggggatcatgtttggctgatgtaaatattaatgccaaaataggagctaggatgaaagtaacactgtaattagtagtagaatttatttcatattaaaatgtgtcatgacgtaatttttatggcttggctcaagcaacaattttcagagtgcaccctcattgatgctactcacagagacgtggatgtgctgttactgctttctaactctgcctactacgtggcctattatgatgatgaagttgataaagtaaaccagtatcaacgactaagtctagaaaacctggaaaaaattgaaataggccctgaacccactctttttggtaagccaaaagttctcctgcatgcgactgca

SEQ ID NO: 67951 - DNA, 357 bp, Homo sapiens
cttcctttattaatgattccatttagcctcacaaatatcagagtaggatccttattgatgttgccttcctgatttactttatcccataagactgtagataccatttctgccttgaagcctaaaaactttctttttattcagaccgagttacattagtgctctaggtttgacgtgctacgatggagatgccactacaggagcatgggcctatgtgaggatcctatcataatgtgggggagtagggatggtgaaccccgacgggtcagctccatgcagaaggggggcaacatgaaggaggtgtacacccgcttctgtaccggcctcacccagattgagactctcttcaagactggggac

SEQ ID NO: 67952 - DNA, 422 bp, Homo sapiens
gactcaaagattattagacatgttagaattcatactggtaagaagccctatgtatgtaaggaatgtgggaaaggccttcagggggaactcagaacttcttagacatgagagaattcacactggagagaaaccctatgaatgctttgagtgtggaaaggctttcaggcggacctctcaccttattgtccaccagagaattcatactggagagaaaccccatcaatgtaatgagtgtgcaagaaccttttgggataattctgagctgcttctccaccagaaaattcatattggagagaaaccttatgaatgtagcgagtgtgagaaaacatttagccagcattcccaacttatcatacatcagagaattcacactggagagaagccttatgagtgccaagaatgtcagaagacttttagtcggg

SEQ ID NO: 67953 - DNA, 378 bp, Homo sapiens
  misc_feature (1)...(378): n = a,t,c or g
attgattgaatgaacctgatctctagagtagaccattattagtggctcttttgaaggaacagtattaaagccattccctatagctcaggtccatggcgcctaagtaggtaaaaaagttgaaagaaattattaagaaagacatagtaagtcttgaagtcaagtagtatcagtcctccaactttgttctttccactcaatgttgagtttattattctggatttttgcttctccaaactttggactcagtttgttgatatgtacaaagtaaattactgggattttgattatgattgcaagcatcaatggaaagaactaataccttgacaatatttagctntcttatacatgaacaagaaatatctgtcatttattaagttn

SEQ ID NO: 67954 - DNA, 351 bp, Homo sapiens
tagaagtcaatgccttcataaagtgaatcaatttctaggttggcctgggtgctggacgacagggtcctcctggccctcccgcaggcggcgcgcagccgcctcacggctcgcttgttctggctgatgtcctttttgtgtttcctcttgaactcctccacgaagtggctcacacgcactgttgtcgtagacctctcctctggagtgaggcgctgcaggacgaaccatctctatatctgactcagcatgtatcgttactaatccttcatatcttatgtattcgagatgggggcctgtgctaggcgtacgtatccacgagctgtatacagtatattcgatccattgtgtagggcg

SEQ ID NO: 67955 - DNA, 342 bp, Homo sapiens
ggcatgccgggtgccagttcaaagccctgctgtggaagaattggctctgcagactcaggaacccggtccttttccttgctgaattcttctggccttgtatcctgtttgtaattctgacagttcttcgttttcaagaacctcccagatacagagacatttgttatttgcagccccgagatctacccagctgtggtgttatcccctttgttcaaagccttctttgtaacactggatcaaggtgtaggaacttcagctatgaagggtcaatggagcatcattttcggtaagagaaacacaaagatctttttcagaaatctcagaaagctgatacatagaacaggg

SEQ ID NO: 67956 - DNA, 384 bp, Homo sapiens
ggagccaggccttatgtatgcagcgaatgtgggaaagagttcagtcggaaacacacacttgttctgcaccaacgaactcacactggagaaaggccttatgagtgcagtgaatgtgggaaggcctttagccaaagctcccaccttaatgtacactggagaattcacagcagtgattatgagtgtagcagatgtggtaaagctttcagctgcatctccaaactcattcagcaccagaaagttcactctggagaaaagccttatgagtgcagcaagtgcgggaaagccttcactcaaagacccaacctcatcaggcactggaaagtccacactggggaaaaggccttatgtgtgtagtgagtgcgggagagaattcatccggaaaca

SEQ ID NO: 67957 - DNA, 313 bp, Homo sapiens
cccagtacgatcctgaagacaaaacacaatcagagcaatggttaccaacaggtagaagtggtccagtcaaagcaaaagaggtccagtcaagagcaaaggtcatggcaggggttttttgggatgctcaaggcaatatgcctgctgactttctcgagggccaaagaacaataacatctgcttattatgagatgacttggagaaaactagcaaaagattttagcagaaaaacacccaggaaagcttctccaaagagtccttctaaaccatgacaatgttcttgctcattattctcatcaaacaagggcaatttttc

SEQ ID NO: 67958 - DNA, 684 bp, Homo sapiens
ggcacgagcaataacaatcacacagaaattcaagaaatttctttagcattaaggagtcacatgagtaaagcaccaagtaatacattccacccccaagatttctctgatgtattagttttattttgtatgggaactctcatagaacagggaaggacaattggttggaaagactgttctatagctgccagagactggataagcgtgaccagtcaacaattccacgcaatctcctgaagacagatgctgtcctttggcagtgggccatatgggaagctgcacaattcactggtctttctaagctgagaaccccactgggcagagctcaagacaccttccagacaattgaaggtatcattcgaagtctcgcagctcacacattaaaccctgatcaggatgttagtcagtggacaactgcagacaatgatgaaggccatggtaacaaccaacttagacttgttcttcttctgcagtatctggaaaatctggagaaattaatgtataatgcatacgagggatgtgctaatgcattaacttcacctcccaaggttggtttccatgagatagtgttgttttatagcagtttaatggtcacagctggcagtatgtgcagagctgaaatcacagtagacttgtgtatttggtttatatataggtgagacatccttacctacaaattgaaccagg

SEQ ID NO: 67959 - DNA, 398 bp, Homo sapiens
ggcacgagcaagagctctctctcagaaggagagtagttatctgaagaagagggcagggccttgctccaatgttctagaggcctccactgtgattcacctatggaggcctgccaacagctccaatcagcatccctatctgccactgacacctcaagcaccattggatctgctgggtcgtatggcccaagtggccaagcagcttgcacagcagcctggacctgttgcagagccttctcctgttctggactccactcaaaattggcagcctttcggctcactcgataaatgggctggagtaacacacccaaatgaggaatgtgttccctccgaaatccagataggcattgtgctctttcttggttgtaggagggactaaatgcagcaacttatccttcacc

SEQ ID NO: 67960 - DNA, 635 bp, Homo sapiens
attttataggctagaatacaatctctaaaaggccctttctgattatcttaacccaattcattgcaaatattcaccattaagataagagtcactctgtagaacctgtcaattttctcagtcttaaggctttgagaacactttaatttttctataaatccgagttgaatgtactgccgggaaggaaaagctggagccccagggcctatggttcactccaccatcattaatgtttacatccacctttcagatctcatttttgatgaagaggaaggagcggtttccacaaggggcacctccgttcagagcattgaactgggtcctcccaccccatgcaaaccatcacggaaatacatttggtggccagattatggcgtggatggagacagtggctactatttctgcaagccgcctgtgttgggctcatccctttctgaagtccatagatatgtttaagttccggggaccatctacagttggagatcgtcttgtcttcactgccattgtcaacaatacatttcagacctggtaaagtgagcccttaggctgctatgaagaaatttaaacttgcacaaatgtaatttttaatttcagcctggagtgttgaagttggagttcgcgtggaggcctttgactgt

SEQ ID NO: 67961 - DNA, 467 bp, Homo sapiens
ggcacgagcttggctccatccgctttggggtttccagtctttgttggagtcaggactctcaaaagaagggaacgcgttataggggcccaaactggatttggggactgcaaaggcgagcagcgctcgttcagtttatctcctgggaacgcaccaggagttgggcacacgcgggagctgggtcggtgctcctggcaggtaacggcttgttcccggtgcatacggcagactgcggaggaacgggaggccgagaggcagcaggcgaaccgcatcctcctgcagatgcagcaggaggcctatcataagagccttgcacagactgtgaccgctgaccctctgtgcgtgcacagttgcgtcagtcgtcggcatgcagatgatggcgccgtgggtgggcgagttgagctgcatgcatatttgacgatcatcggacttcttatgcgcgggtgcactgtgtctttggatgatggagg

SEQ ID NO: 67962 - DNA, 784 bp, Homo sapiens
ggcacgagggcccaggaggagcaggggggctccgctgtgcgcaggatcgcccaggaagtgcagcgctttgcccaggagaaaggtcatgacgccagtcagatcacactagccttgggcacagctgcctcctaccccagggcctgccaggctctcggggccatgctgtccaaaggagccctgaaccctgctgacatcaccgtcctgttcaagatgttcacaagcatggaccctcctccggttgaacttatccgcgttccagccttcctggacctgttcatgcagtcactctttaaaccaggggctcggatcaaccaggaccacaagcacaaatacatccacatcttggcgtacgcagcaagcgtggttgagacctggaagaagaacaagcgagtgagcatcaataaagatgagctgaagtcaacgtcaaaagctgtcgaaaccgttcacaatttgtgttgcaacgagaacaaaggggcctctgaactagtggcagaattgagcacactttatcagtgtattaggtttccagtggtagcaatgggtgtgctgaagtgggtggattggactgtatcagaaccaaggtactttcagctgcagactgaccatacccctgtccacctggcgttgctggatgagatcagcacctgccaccagctcctgcacccccaggtcctgcagctgcttgttaagctttttgagactgagcactcccagctggacgtgatggagcagcttgagttgaagaagacactgctggacaggatggttcacctgctgagtcgag

SEQ ID NO: 67963 - DNA, 351 bp, Homo sapiens
ggcacgagggtgaagaggaagcagtacgatgcctacggctctgcaggcttgggcctggggccagcggctcccagcatagctactggaagggaggccccactgtgaaccccgaggagctgctcaggaagaccgacggcgaaagatcgtcctgatgctatcgagagcatcatacatgctacgaaaaagccaactgggacttctcaacggcaccaattactgccatttagcccacgagctgcgtctcagctgcatggagaggaaaaacgtccagattctaatcatggatccctccgccttggcaagcgaccgatataacctcatactggcacaaaccagacagagaccggatct

SEQ ID NO: 67964 - DNA, 1468 bp, Homo sapiens
taatccaacccagcagaaaggcttttttaaaaattaactgataacttgttcttagcaaattaagacaattacaataaaacatcagctaactgggttcttgtgagaaaactgaggtcagcttggaaaggagttccccgagtggagttcccagcggcccgcggctgacggcccagatctgtcctgaggggtcgtgggagcccagcgcctgccttgagggaaatgaacactgaaaacaggatttgggagcagtattggattgacagcagagaagggactgtttgtaagggcagtttctcactgaagctgctaccattttcctttgtaaagaagtcatccacctcctcccagcggtgcccattttcaagacgctgccagagcctcttaaaacagcttcttgaaagggtttttccacaacgggttctggaatgttctgcttcagctctggaggatgctctaaattagttcaccatgatgaagttagatttgcagtgagctataaactccgtcacagggtcatgctcgccttccgttttgatggtacctgcgatgctgtcattctccaggatggggaggaaaagttgcacgaagtcagaggtataaggaggagcaatgacgtccagcacctcagtgacaaaatagcgaatgagtgaaatgtcagtgtccagcttctccagacactttcggatgtaactgacaacaggaagtacataacctcgactcagcaggtgaaccatcctgtccagcagtgtcttcttcaactcaagctgctccatcacgtccagctgggagtgctcagtctcaaaaagcttaacaagcagctgcaggacctgggggtgcaggagctggtggcaggtgctgatctcatccagcaacgccaggtggacaggggtatggtcagtctgcagctgaaagtaccttggttctgatacagtccaatccacccacttcagcacacccattgctaccactggaaacctaatacactgataaagtgtgctcaattctgccactagttcagaggcccctttgttctcgttgcaacacaaattgtgaacggtttcgacagcttttgacgttgacttcagctcatctttattgatgctcactcgcttgttcttcttccaggtctcaaccacgcttgctgcgtacgccaagatgtggatgtatttgtgcttgtggtcctggttgatccgagcccctggtttaaagagtgactgcatgaacaggtccaggaaggctggaacgcggataagttcaaccggaggagggtccatgcttgtgaacatcttgaacaggacggtgatgtcagcagggttcagggctcctttggacagcatggccccgagagcctggcaggccctggggtaggaggcagctgtgcccaaggctagtgtgatctgactggcgtcatgacctcttgatgagaaaaaccatagagcccgttactaacaaggcagcttcttttttc

SEQ ID NO: 67965 - DNA, 339 bp, Homo sapiens
ggcacgaggactctgatccggctcagctttccagtcagctgcggaaggagccacgctttcgggggttgcaagatggcggccaccagtggaactgatgagccggtttccggggagttggtgtttgtgtggtcattctgtgtctgtgtatgtgtgttattatgttgtcgcttttgatgtgtgtatgggtttgtggtttgatgtgctgtggtcttttgtgtcttatctgtagcggtttctgtctattgatttggtcattattgctgtttggtgtttggatatgtctgttttacggatcttgggttgtgtgttctggtattcgcttgtcttttgttggtgttg

SEQ ID NO: 67966 - DNA, 493 bp, Homo sapiens
ggcacgagacctgctctgtaactcacattgtgtccttctctctccctttccttaacccttcccatcccgcttcaactcctggccatacagagaatgaacagccttccctcgtttggtttgacagaggaaagttttatttgacttttgaaggttcttccaggggacccagccccctaaccatgggagctcaggacactctccctgttgcagcagcatttacagaaacagtcaatgcctatttcaaaggagcagacccaagcaaatgtatcgttaagattaccggagaaatggtgttgtcatttcctgctggcatcaccagacactttgccaacaacccgtccccagctgctctgacttttcgggtgataaatttcagcaggttagaacacgtcctgccaaacccccaacttctctgctgtgataatacacaaaatgatgccaataccaagggaattctgggtaaacatgccaaatttgatgactcacctaaaga

SEQ ID NO: 67967 - DNA, 342 bp, Homo sapiens
ggcacgaggaagaccttgccgcattcactatatttgtaaagtttctctccagtatggattagaagatgggccataagtcctgaatgcttgctaaatgctttcaacgtttgttacatttgtaaggcttctctgtactatgaattatttgatgccgtgcaattgaccaaagaccttgccacattcattacgtgtgtaaggtttttctgcagtatgacttctctgttgagtgagggaaaatttgtgcctgaagttcttgtacactcattacatttgtaaggtttttctccagaatggattacaagatgggcgctaagtcctgaacactctttaaatgctttacca

SEQ ID NO: 67968 - DNA, 333 bp, Homo sapiens
ggcacgagattaattcaccaccctattaggtaggggctgccagggaatgagcgaggactccaaattttctgtaggaggggtgttgggagttggcaattcggcctgggagagaaggctctacccctcgtgaatagccctttgcactaccctgccagcagcccgacctgtcctcctgccttgacccacactcccccatacccctataagctacagcacttccccgcccacctgccttccaagacccaccctgccgaccctcaccgcccacgaggccccagccgctccaccccctcctgccccccactccacgacatccgactgcctctacacccg

SEQ ID NO: 67969 - DNA, 696 bp, Homo sapiens
ggcacgagctctgaccacgaattacctggcttaccacttactgccttgagggcgggagctccatacttagtaaatggctttgggccaacatatgatgcactgccagacaccacctgtgtcagttcccgtagtgcctgacggtctatttccctgccgtccaggctgtgtaccccgctgtgggagaaggcttgggccaggctgagccaggttccctgactgtgtgcagccattctgccccacagaagctgctccttggtatccgagctctgaagtgtttgggctgcaactgactggagttcagaggacaccccaggggcagtggcagtgcccgtctctgatatgctccgctcccacgagcccttgttacactcctgctagcccctggcttgtgggcttggcctctgagctggacttctttcggtccttgttgcaagtgggccaccttcacctggaaggccaggtcgtggtatttctgcatctcattgggccccagggtgtaccaccgctcgctcagcatctggctgacggtccggttatcctggttggggtgaccctggtgcgccccgccagggcctggtgccgcctgctgaagatcatgagcgccactcatgggccaccggatgtggtccttgtctgatttgttggggctgcgtccatccttctcagaaatgagtcctgttccttgcgcagggcact

SEQ ID NO: 67970 - DNA, 1089 bp, Homo sapiens
tttcgtagctggttttggttttggatggcttgtgggatggggaagggatgacggctggtatcggggacacggcggatggggccttgaaggttgagtccatgatgctgagggttgcggccacatgagggaaagctgtggtgtgggacatgagggcgctcgggtccggcgatgtcacgaaagctgcgtttgagagcatggctgatgtcattatgtaagaagaggtgagcctcgagctgatgggagctgaaggaagatacacagcactggggttgctgaaaggctgcaaaacggatgctggaacgggggtggtgatgtgggctgctggcgagggcagggggcctatctgcccgcaggagggatcttcttccacatctgtgaattcaggtgtttttctaccatggagtttagtgcgaatcgaaaacgatcccatcttctatcaaacacatagtaccctcgtcccatgaggcgactcccaaatgagcaaaacgccataggtctggggtggtgcgtggagaactgacagtctagcttctcggattcgtcggctccgtccatctccccttcatcactggacagtcggctggcgaggtcacctccaaccggtgggagtgggggctctggagtgtggccgctatgatttgaagatgtgctgctgcttatgctatttgcagatgatggtctaggaagtacagagttgggtggtctggattttgcaggggatgcaacttttggttctggcccagagctccctgaagaccctagcagagaatcctgtgccggcccggattggcttggaagtatttccctcgtggaagtcaggagatgctctttatctttaacttctttttcccgggactttgctttgtgttctgccaggaggaggtcaaattgctttttccggcctgggactgccctccgatggcttagcgaatgtgtcttgcaggtgagggatcttgtgcaaggtttctttgtctcggcatccaatactccacagtgcttatttgggtcaaattctctctctgaaagtctcctgtaaggcttgttgctgctgttggtgccatcttggcgtctcttgtctatcgtggctgg

SEQ ID NO: 67971 - DNA, 358 bp, Homo sapiens
ggcacgagggataaaaacatactcagactgttctaacaagttctaccaaacattaaatgaagagatatgctaatcttaatccattccagaaaaaagaaaaacagcaacactttcttaactctttttataaagttaaattacaatctggataccaaaatcaggtgaagtgaggggagtatgagaaaggaaaatgataaatcggggatgacgtaggaacagggagtggctggagcgggatggcaggagaggagggatcggggagggtggcgggcgggaggaggcagggggggggtggtgggagaggggagaggggggagagggaggggggatgggggggaggtgcggcggtgcgcgatgg

SEQ ID NO: 67972 - DNA, 602 bp, Homo sapiens
  misc_feature (1)...(602): n = a,t,c or g
gatgtgatgtgcactgcttttcatgacaatgaagagacatttttgaaaaaatacttatatgaaattgccagaagacatccttacttttatgccccggaactccttttctttgctaaaaggtataaagctgcttttacagaatgttgccaagctgctgataaagctgcctgcctgttgccaaagctcgatgaacttcgggatgaagggaaggcttcgtctgccaaacagagactcaagtgtgccagtctccaaaaatttggagaaagagctttcaaagcatgggcagtagctcgcctgagccagagatttcccaaagctgagtttgcagaagtttccaagttagtgacagatcttaccaaagtccacacggaatgctgccatggagatctgcttgaatgtgctgatgacagggcggaccttgccaagtatatctgtgaaaatcaagattcgatctccagtaaactgaaggaatgctgtgaaaaacctctgttggaaaaatcccactgcattgccgaagtggaaaatgatgagatgcctgctgacttgccttcattagctgctgatttttgttgaaagtaagggtgttttgccaaancttatgg

SEQ ID NO: 67973 - DNA, 334 bp, Homo sapiens
  misc_feature (1)...(334): n = a,t,c or g
ggcacgagaactggacacagtagaaaaaccactcatcatagcaagaatggagaaaataacaacttgaatgagaaaagacagtcaacagatgtcaacactgagatgaatagggatgtggngattatgtgacnnggtttttngngnngtnntnnttntntnngttttgtgggttggtgtgttttgtttggtgtggggttgtgtgggtttgtttgttggtggttgtggttgtttggtgttggngggtggttggttttgtggggtggttgtggtgtgtgtgtgggtgtgttttgggttgttgggtgggggtttgggtgtttggtgtggtgttggggtg

SEQ ID NO: 67974 - DNA, 238 bp, Homo sapiens
cacatgcactcacaccacatgcactcacacacaccacatgcactcacacacaccacatgcactcacaccacatgcattcacacacacaccacatgcactcacaccacatgcattcacatgcaccacatgcactcacaccacacgcatgcactcacacacaccacatgcactcacaccacatgcactcacaccacatgcatgcactcacaccacatgcatgcactcacacaccacatgc

SEQ ID NO: 67975 - DNA, 350 bp, Homo sapiens
ggcacgaggtttgctgacatcccgacaggaaagactagccgatatatcctgcgaagaacaaccatggcaactcggaccagcccccgcctggctgcacagaagttagcgctatccccactgagtctcggcaaagaaaagcttgcagagtcctgccaaccaactggtgccggcagacagatcacgtattgtgcaaagatgcttaggcggagctctgctagtcgactattccatgctactgagaatccgattataatgagcgtcgtctgcgagtattttactatgattttatcggcgacagatatgcagattggtagggtatatgctgcttgtagtggcaccatctactcacg

SEQ ID NO: 67976 - DNA, 354 bp, Homo sapiens
ggcacgagcaggccattctggaggaaaacaaggagaagctgccacttgacatcaaccccgtggtgcacccacactggcacatctttaaggactacacggacgtgcaccatgtggacagacatttctaatccacccgcgctttaccctcacctatagtgacgcggacgcccagatgctgtacaacttctcacacttcaatgtctacccgaaattcatacaggataagccaagggcactcatgagacaggaatgatgggagtacctgcacattgtccttctgaggcctgacagctttactttattgtccacatggatataccgatctggggagcatataacttttattgtctatct

SEQ ID NO: 67977 - DNA, 314 bp, Homo sapiens
ggcacgagcatctacctagcacatcgtgtggccgcgggcttgggaattggcccagttcatccaccacacatccaagaaggcagacgtggttctggcgtgtggcgactctatcgtgcatcccgaggacctgatctgctgtccgctgacggggaggagttgcctatgtgatgttcatctactctcgtctctcctagctcgtctcggtagaggttatgctgtctctctgactaatctctaggagttctgctgccacgctcgtctctgctgttgctgctcttctgttggctcttgcgtactcttcgacggcatctctg

SEQ ID NO: 67978 - DNA, 339 bp, Homo sapiens
ggcacgagaactggacctttatgttctaggaatttccacttgatgccttcaggatagcgctcttcttcccacctttaaaagacaaagcacagcctcatttagtgatcgccttgtctaacatggggatcatcactgattaaatgccaaataattatccgctcaactgattagtgctctggaatgacttctgggcctcacattcaaggcctggatcaaaagaaccagtgtctctcattttgcaattagccaatgtcttcaagtatcatgaattactagtgataattatcgataattcctcttgctgtcgtatatcttgctattatgtaccgcactcatccc

SEQ ID NO: 67979 - DNA, 422 bp, Homo sapiens
  misc_feature (1)...(422): n = a,t,c or g
ggcacgagcttggctccatccgctttggggtttccagtctttgttggagtcaggactctcaaaagaagggaacgcgttataggggcccaaactggatttggggactgcaaaggcgagcagcgctcgttcagtttatctcctgggaacgcaccaggagttgggcacacgcgggagctgggtcggtgctcctggcaggtaacggcttgttcccggtgcagacggcagactgcggaggaacgggaggccgagaggcagcaagcgaaccgcatcctcctgagttgcagcaggaggcctatcataagagcctggcacagccgctgcccgctgaccctctgtgcgtgcacaactcgtcgctcttcgccctgcagaatctgncagccgggtctgacgactcgaccannatcacttacgtnnaactggtg

SEQ ID NO: 67980 - DNA, 380 bp, Homo sapiens
  misc_feature (1)...(380): n = a,t,c or g
ggcacgaggggctttgggccgggtgttgcgaatgtgaaggcttgagtaaccttccgtcaaggagctcccagtcttgttgaggataccaagacgtaggcagttactgtacagcttggacgatgccggtggtgatcttctggcactgggagaaccagtccttcaatgccttagtcaactacaccaacatgaatgcggcttcacccacatcattcagaaagcgccgtccttggagggccgatgcgtgccctttgccgctgttgctgcggctgactgtgtcaatatccccatgatgcgacagctggagcttatcaagggaatttgcgtgaatgacacgaatgtttatgagatttgtcattcccggaaagcatgagtcataggcn

SEQ ID NO: 67981 - DNA, 347 bp, Homo sapiens
ggcacgaggtgagcgtattctttctagagaagcaccaaaggagctaaagcggcagcccatgtcccttgggtatttgggatcaactgtcaaagctgaaaatcttcctcagtggttttggacatcgtgttcccaggctcaaaaacagtgccctttcttattaaaggctacgatgcattaccacatttcagtagcacagacagacgaaattctgcctgccaggaattctaagcggtttccacaccctattgactccaaaaccaggttgaatgttttaaggttcgatttggagcagtacaacgctctgatcctggctcacgtgcaatacggccacccaagaccgtaattcc

SEQ ID NO: 67982 - DNA, 1376 bp, Homo sapiens
cttcagaacaaattgccaaaagccagagttgtttatgctagtgcaactggtgcttctgaaccacgcaacatggcctatatgaaccgtcttggcatatggggtgagggtactccatttagagaattcagtgattttattcaagcagtagaacggagaggagttggtgccatggaaatagttgctatggatatgaagcttagaggaatgtacattgctcgacaactgagctttactggagtgaccttcaaaattgaggaagttcttctttctcagagctacgttaaaatgtataacaaagctgtcaagctgtgggtcatcgccagagagcggtttcagcaagctgcagatctgattgatgctgagcaacgaatgaagaagtccatgtggggtcagttctggtctgctcaccagaggttcttcaaatacttatgcatagcatccaaagttaaaagggttgtgcaactagctcgagaggaaatcaagaatggaaaatgtgttgtaattggtctgcagtctacaggagaagctagaacattagaagctttggaagagggcgggggagaattgaatgattttgtttcaactgccaaaggtgtgttgcagtcactcattgaaaaacattttcctgctccagacaggaaaaaactttatagtttactaggaatcgatttgacagctccaagtaacaacagttcgccaagagatagtccttgtaaagaaaataaaataaagaagcggaaaggtgaagaaataactcggagaagccaaaaaagcacgaaaagtaggtggccttactggtagcagttctgacgacagtggaagtgaatctgatgcctctgataatgaagaaagtgactatgagagctctaaaaacatgagttctggagatgatgacgatttcaacccatttttagatgagtctaatgaggatgatgaaaatgatccctggttaattagaaaagaccacaagaaaaacaaagagaaaaaaaagaagaaaagtatagatccagattctattcaaagtgccttattagcatcaggtcttggatcaaaacgacctagtttttcatctacaccagttatctcacctgctcctaacagtacaccagctaacagtaacaccaacagtaacagtagccttataacaagtcaggatgctgtggaaagggctcagcagatgaagaaagacctgcttgataagctagaaaaattagctgaagacctcccccctaataccctggatgaacttatcgatgaacttggtggccctgagaacgttgctgagatgactggccgcaagggacgggttgtgagcaatgatgatggaagcatatcttatgagtcaagatctgaacttgatgtgcctgtggaaataa

SEQ ID NO: 67983 - DNA, 697 bp, Homo sapiens
ggcacgagcgaatgaatgaattgtggcctcaggaaccacgagcgcatggtgtagcaccaggacaacataaggctgcactgccatctaatgttaatgaatcgccattacagtttactattcggcaggctagattagccggagatcttgatgcctggcagtttgcagtagttttgcaacccccacgacagcaaggtggagcccatcaagcggtatgggaaccattttcttttaagctgctcaaagatcttaaagcagctgttggtcagtatggtcccaattcgcctttcatccgatcgctattgcaatctgtggctcagaataagctattgactccgtgtgattgggagattttaacgaaagttacactttcgccctcccaatttcttcagtttaagacttggtggaccgacgaggctcaaaatcaagatcgaaaaaaccgtgctgctaatcctgctattgccattacatttgaacaacttctaggaatagggggtcaatggggaactgtaaacaaccatcaggacttcgagatgatgccattgaacaaattcgcaattgctgtttgagggcatgggagaaaattcaggatctgggaactacttatcagtcttttaattctattagacaaggctcaaaggaaccatatcctgatttcattgctcgccttcaagacgcagcacagaaggctctcactgat

SEQ ID NO: 67984 - DNA, 381 bp, Homo sapiens
gagaaaaacagagagatgctggacatcttaataaagcatctggtcaaagtatcactacacagccaacaaaatctcatgactgtctcaaatcttggtgtcatatttggcccaactctaatgagagcacaggaagaaactgtggctgctatgatgaatattaaatttcagaatattgtggtagaaattctgagaggccctatgaaaagatttttcatactgctccagacccaagcattcctcttcctcagcctcagtctcgatctggatcagtatgaacaatattttcatagcgctctatcagaagatttttcctactgctccagaccccagcattcctgttcctcagccttaggctcgatctggatcccgaatgacacgagc

SEQ ID NO: 67985 - DNA, 831 bp, Homo sapiens
tggggtttatcaggaatgcactcagctctcagggaatagggatgtcctcctctgccaaaagttggagcagaagaatccactcactggtgatttctcctgcccctctggctactccccggtgcacctgttatcccagatccacgaggagggttacaaccacctggagtgtcatcgaaagtgcactctcctcgtcttctgcaagaccgtgtgtgaagatgtgttccaggtggcaaaagctgaatttagggctttttggtgtgtggccagcagccaagtacctgaaaactcaggactgctttttgggggcctcttcagcagcaagagcataaaccccatgacaaatgcacagtcatgcccagccggctactttccactgagactctttgaaaacctcaaggtatgtgtttctcaggactatgagttgggaagcaggtttgcggtcccctttggcgggttctttagctgcacagttgggaaccccctggtagatcctgctatatccagagatttaggggcactgtctctgaaaaagtgccccgggggcttcagccagcacccagccctcatcagcgatggatgccaagtgtcctattgcgtcaaatccgggctcttcacaggagggtccctgccccctgccaggctcccacctttcacccggccacccctcatgagtcaggctgccaccaatactgtcatagtgaccaattctgagaatgcgagatcctggattaaagactcccagacccaccagtggaggctgggagaaccgatagagctgcggagggccatgaatgtcatccatggggatggtggtggtctgtcaggaggggc

SEQ ID NO: 67986 - DNA, 1069 bp, Homo sapiens
agctggctactatttggactctggctgacgttgatggtgatggacagctaaaagcagaagagtttattctttgcaatgcccccttaccggcaatggccaagctgggcaggcccaataccactgactttacctcctgagcttgttcctccatctttcagaggaggaaagcaaattgattccattaatggaactctggccttcatatcagaaaatgcaagaagaggagcctcagaagaaattaccagttacttttgaggacaaacggaaagccaactatgagcgagggaacatggagctggaaaagcgacgccaagccttgatggagcagcaacaaagggaggcagaacgtaaagcccagaaagaaaaggaagagtgggaacgaaaacagagagaattacaagaacaagaatggaagaaacaacttgaattagaaaaacgcttagagaagcaacgggaattggagagacaacgagaggaagaaaggagaaaagacatagaaagacgagaggcagcaaaacaggaacttgaacgacaacgtcgcttagaatgggagagaattcggcgacaggagcttctcaatcaaaagaatagagaacaagaagaaattgtcaggttaaactctaaaaagaagaatcttcatcttgagttggaagcactgaatggcaaacatcagcagatctcaggcagacttcaggatgtccgactcaaaaagcaaactcaaaagactgagctggaagttctggataagcagtgtgacttggaaattatggaaatcaagcaacttcaacaggaacttcaggtaagtccttcactgctaaattgttcttaaacatgtacaattaatagttcttctgggctgggcacggtggctcacggctgtaatgctagcactttgggaggctgaggcgggtggatcccctgaggtcaggagttcgagaccagcccagtcagcagggcaaaaccccgtctctactaaaaatacaaaaaaattagctgggtatggtggcgcatgcctgtaatcccagcaactcgggaggctgaggcaggagaatcgcttgattctgggagg

SEQ ID NO: 67987 - DNA, 334 bp, Homo sapiens
ggaacagttaaaattttgccacattcttcacatttgtagagtttctatgaattatctcatgtttaataagggttgaggatgaaatgaaggctttgccacatttaacacacttgtatggtttctctccaataagaattttcttatgtgaaaaaaggggtgaggggtggttaaaagctttgccacgttctctacatctgtagggtttctctccagtgtgaattatcttatgtgtagtaaggttagaggcagcttaaaggctttgccagattcttcacatctgtagcgtttctctccagtatgaactttcttatgtgtagtaagggttgaggactgg

SEQ ID NO: 67988 - DNA, 374 bp, Homo sapiens
cgcaggagttgagggaggagtggacggagttacccacaggagtcgagggaggagtggacggagctacccgcaggagtcgagggaggagcggacagagttacctgaaggagttcagggaggagtggatggagttacccacagcagtcgagggagaagcggatggagttacccgcaggagtcgagggaggagcggacggagttacctgcaggagtcgagggaggagtggactgagttacctgcaggagtcgagggaggagtggacagagttacccgcaggagttgagggaggagtggatggagttacctgcaggagtcgagaggggagcggatggagttctccgcacgagtcaaaggaggagcggagagagttctg

SEQ ID NO: 67989 - DNA, 387 bp, Homo sapiens
tcaacttctctgcacctcctccatctgagccccttcccttctctgcacctcctccatctgagccccttcccttctctgggccgcccccatctgacccccttcccttctctgcacctcctccatctgagccccttcctttctctgggccccctcctccatctgagccccttcccttctctgggcctcccccatctgaccccctttccttcactgcacctcctccatctgagcctgttcctttctctgggcctgctccatctgaccgccttcccttctttggacctactacatctgagccccccaatagactgggatgcctactcaaccacaccccatatgcctctccaagaacactcctttgcctgagcccacacgtttgcatcccct

SEQ ID NO: 67990 - DNA, 691 bp, Homo sapiens
ggcacgagaagcctgggctcccaatgctgcccagggctgcagaggcaggaacttcggagtgtaagtggacacactgcactgtgtctctgacgtaggtgtgattgctcccatgaggaggacagctccacagtttcacttaccgttgtccattttgttttgattttcggcagctccatcctggaattgttccccaaattattatgcctggatggccagcagtcacccagagcaactttatgtggtactgaagcccacaagaggttaccaacctgtaaggtgagaagagaggatccagcagggtggtgcatgaggaagggggggtaccatctgtggtcctggggactctttattccagggaagcttctttggatctgagatgttgaagaatctggtcctgcaattcctgcagcagtaagtatccctgggaatctgaggcaagagaaggctaggtcagatgaatttacccaagtacaagtctgcctacagtcagactttcaagactcatttggcacccaggccacagagatagcctgtcctcactggtctccaacaggtattacttgatctatgactctggagatcgacagggtctccttagtgcttaccacgatgaggcctgcttctccctgagcattcccttcaatcctgaggactcagcccccttctgcagttctttcaagatagcaagaag

SEQ ID NO: 67991 - DNA, 692 bp, Homo sapiens
acttcctgaaggcagcggccccagctcgggtcccactcatcccatggcccatcacctgcctgcagccatggagagccatcaggacttccggagcatcaaagcaaagttccaggcctctcagccggagcccagcgacctgcccaaaaaacctccgaagcctgagtttggtaaactgaagaagttctcccagcctgagctaagcgagcacccccagaaggccccgctgcctgagtttggtgcagtgtccttgaagcccccgcagcctcagttcactgacctccccaagaagcccccgccgcctgaggtcactgacctccccaagaagcccccgccgcctgaggtcactgacctccccaagaagcccccgccgcctgaggtcactgacctccccaagaagcccccgccgcctgaggtcactgacctccccaagaagccgtccaaactggagttgagtgacctctccaagaagttcccacagctgggggccactccgtttccaaggaagcccctgcagcctgaggtcggtgaggcccctttgaaggcctcgctgccggagcctggtgcgccggcccggaaacccctgcagcccgacgaactcagtcaccccgccagacccccctccgaacccaaatccggcgcattccccaggaagctctggcaacccgaggccggtgaggctaccccgaggtccc

SEQ ID NO: 67992 - DNA, 1091 bp, Homo sapiens
ttttttttttttcggcatttcagagacttttaatactttcagtaattctgctattgctatctagaaggcagagccaggtgtacaggatggaacatgaaagcagaccaggagcatgactactgaagcacagcatcacagggagacggtcaggcctctggataactgcaggcaggcctgacttatgtcaggccctccataagagatggtggagtagagtcttctctaaactcccctggggaaagggagactccctttcctggtctgctcagtagcaggtgcttttccttggcactgacgctaccactagaccatggtccgcttggtacgggcatcttcccagacgctggcattactgctagaccaaggagccctctggtggccctgcctgggcataacaaaaggctcacactcttgtcttcttgtcacttctcaccatgtcccctcagctcctatctctgcatggcctgcctttttttaggttatgattgtagagtgaggattattataatatttgaataaagagtaattactacaaactaatgattaatggtatttatataatcatatctatgagctatatcagtatacctcttgttattttatatattttattacactggaacagctcgtgctctcggtctcttgcctcggcacctgggtggcttgccacccacatctccccgctttttattaactaggatcaccattgccatcattgcttgtcgttgactttggacttgtcttcggattccttgcgggatctgcagactaaaagtagacaacataagcataccaatattaataatgccagtgacaacaatgatcctctgaggggtttgatccatttaaagggattaagatcagataattctttagctattccttcaaaaatgtctgagcccagaacagtggataaatgagcctgtgaagcctcaaaaatttgttctttaagttttgaaatatccaaggttaagttatcatcccaggtttttaaatgtcttgaggccgattcccagctatgctgatctttattataagcataaggtgttatacagtaatcagaagtattccaatcacattgtaattgcata

SEQ ID NO: 67993 - DNA, 1159 bp, Homo sapiens
ctggaagaattaacaactacagcatcaaggaggaggagtgtgattctgagggggatggctacggaagtgattccaacatccccagaagtgaccacccaaagtccactggtgagcccacaagagagatagaactgaaaagttcccaggggagcagtctgaaggatttaggcctgaagacaagttctctagttctggagaaatgttctttgtctgccttagtgagcaaagaagatgaagagttttgtgaactgtacactgaggacttcgatttggaaacggagggggagagtaaagttgataagctctcagatattcctctcaagccagaggtgctcgcggaagatggtgtggtccttgacagtgaggacgaggtggactcggccgtgcagcacccggaattgccagtgaagacgttgggcttctttataatgtgtgtctatgtgtacctcatcctccccctcccccactatgtgagtggactctttctgggaattggccttggattcatgactgcagtttgcgtgatttggttttttacaccaccaagtgctcataaatatcacaagttacacaaaaatctgcgacactggaacacaagatctctggatatcaaagaacctgaaatactgaagggatggatgaatgagatttacaactatgatccagaaacctaccatgcgactttgacacattcagtctttgttcgacttgagggtggaaccttaagactttcaaagcccaataaaaatatatccaggagggccagctacaatgaacccaagccagaggtcacctacatcagccagaaaatctatgacctctcagacagcaagatttatcttgtacctaaaactttggctcgaaagcgaatctggaataaaaagtaccccatttgtatcgagcttggtcagcaagatgactttatgtctaaagctcagactgataaggagacttcagaagagaagccgccagctgagggaagtgaggaccctaagaagccaccccgccctcaggagggaacaagatctagccagcgagatcagatactctatctctttgggagaactggccgagaaaaagaggaatggtttaggagatttattctggcatctaagctaaagtcggaaatcaagaagtcatcgggtgtctctggaggtaa

SEQ ID NO: 67994 - DNA, 412 bp, Homo sapiens
aaaacagaaggttcaagatactaatttggaggttaacaagctgaagaatatattaaagtctgaagaatctgagaaccggcaaatgatggaacaacttcgaaaagccaatgaagatgctgaaaactgggaaaataaagcccgtcaatcagaggcagataacaataccctcaaactggaacttatcactgctgaggcagagggtaacagattaaaagaaaaagtagattccctcaacagagaggttgagcaaggccatccagagtagagatgtggcccagttcagaaatgttgtcacacaattggaagctgatttagacattaccaaaagacaactaggaacagagcgctttgaaagggagagggccgtacaagaacttcgccgccaaaattattcaagtaatgcttatcatat

SEQ ID NO: 67995 - DNA, 536 bp, Homo sapiens
taatgatggaatgagatgagatgaaatgagatgaaatgatagatgagataaaatgatgatatgaaatgatgagatgaatgatgagatgatgagatgaatgatgaaatgaaatgatgagatgagatgatgaaatgaaatggtgagatgaaatgatgagatgaaatgaaatagtgaaatgaaattgaaataaaatcgaaatgagagatgaaatgatgagatgatgaaattgatgaaatgatgagatgtgatgagatgaaatgatgagatgagatgagatgacatgaaataatgaaatgaaattgaaatgagataagatacgagatgagatgaaatgatgagatgaaatgatgaaatgatgagataagatgaaaagagttgatgagatgatgagatgaaatgagatgaaaagatgaaatgatgagatgaaatgaaatgatgagatgaaatgaggtgaaatgaaattagatgaaatgtaatgagatgaaatgaaatgacataatgaaatgaaataatgaaatgagatgaaataaaataat

SEQ ID NO: 67996 - DNA, 974 bp, Homo sapiens
aaacaatccgatctaccacagatcctgtgatgagccagtgtgcatgtctggaggaagttcacttaccaaacattaaacctggggaaggcctgggcatgtacatcaaatcaacctatgatgggttacacgtgattactggaaccacagaaaattctcctgcagacagatctcagaagattcatgctggtgacgaagtcattcaagttaatcagcaaactgtggtgggatggcagctgaaaaatctggtgaagaaattgagagagaatcccaccggagttgtgttactgcttaagaagcgccccaccgggtctttcaactttactcctgctcccctgaaaaacctacggtgggaagccacctcttgtacagacctcacctccacccgcgacaacccagtcccctgaaagcactatggatacctcactgaagaaggagaagtcagccatcctggatctttatattcctcctccgcctgctgttccctactctccccgggatgagaatggcagttttgtttatggagggtccagtaagtgcaaacaaccattgcctggtcctaagggttcagagtccccgaattccttcttggaccaggaaagccggagacgaagattcaccattgcagactcggatcagttgcctgggtactcggtggaaaccaacattctgcccacaaaaatgagagagaaaacaccatcttatggcaagccacggcctttgtccatgcctgctgatgggaactggatggggattgtggacccttttgccagacctcgaggtcatggcaggaaaggggaggatgccctttgccggtatttcagtaacgagcggattcctccgatcattgaagagagctcctctcccccataccggttctccagacccacgaccgagcggcatctggtccggggtgcggactacatccgaggaagcaggtgctacatcaactcagatctccacagcagcgccacgat

SEQ ID NO: 67997 - DNA, 439 bp, Homo sapiens
agtgattcggcacgagattacaaatatatatgcactaaacatcagacttcctaaatatataaagcaaacactgacagaattgaaagaagaaatagacaacacaataatagtaggagattcaataccccactttcaataatggataaaataaccagacagaaaatcaataaggaaacagagcactcgaacaatactataggccacttaaccatagacatacacagaacattccacccaacaacagcagaacccacattcttctcaagtgtacatggaattttctccagatagacgacatgttgggccacaaaacaagacttaaaatataaaaacattgacattctaccaagtatcttccaatcacaatgggatgaaaccagaaatcaatagcaggatgaaatctggaaaacccacaaatatgtggcaactaaacaacaca

SEQ ID NO: 67998 - DNA, 1773 bp, Homo sapiens
ttttttttttttccgattggtgctgggagttgtcaccacattggccctttttttcccaaacacatttgtgaatgttgcagatgttgcagagattccaatcgtagtggtggtggttgcactaggaggttctatgggaacttcttgctccacatcttcatcattctcctcttcatcttcatcctctggtagttccgaattctccttaggtttgttttcttcatcttcttcctgtttccttttctgttcctcttttttcttttttctcttttcttttcttttttctcttttagcagcaagagcctgctttctgctctcttctcttgacttttccagatcaagttcctttaaaagaatactcgcattcttatttgcttctgcagcttgctggtctttagccttcacaatggtttcgacacattgatgacattttttcaacagttccttatctgtaattgttgctatgtatctcatgcattctatatcagaagggaactgatttacttcctttaccaaatattgaacaacttttacatgacccttgcgaaatgctgacataagaggtgtgattttccggttatctgctgcatccacatcagcacctgcttgcactagcaactgcacaacatcaaaatgacctccattggatgccagccaaagtggcgtatttccctttttgttacgaacatcaatgtgggctcccctatgaatcaggagttcacaaaatttgtagtgacctttgtctgctgctattgttaaagcagtatctcttgaggaaggcacagggggagcattaacatctgctcctttatcaagaagaactcttccaacctctgcataccctccagaagctgcttccatcaagggggtaagacccgtctttgccctatgttcaacattggcttttcggtccagaagcaaactcactacttctgctcggccctggaaacaggccagggtgagagccgtgttccgattggtctctatttgggcattaatgtctgaacccatatcgagcagcaattttactgcaggaacatgtccattcattgcagccaacatcaggggagaaatacctagtttactcccagtccttgaattaatttctgccccagcattaagcagaatcttaatgatattaacatatcctccagacgcagctagactcagtggtgtataatcagatacgttcctatgttctttatttgcacctcgagccagcagcaagtctaccacctcctgacgtccaccagaacatgccaatgaaagcggagtatccttagttcgttcagactgtgcttctatatctccacctttatccaaaaggatttcaacaactccaacatgccctgctgttgctgccaggattagtggtgtgaaaccttttttgtctctgtgttcaattttggcatcccgtgcaatgagcacagatacaagttcttcatgaccacctgcacaagctagtgttaatgctgtgtcatgattgctctcagtatgtgcatcaatgtcaactgaaggatacacaggaggcatcgattgggaagccacattgcttgtagtctgcgaacaggattcaggtgtaagacactctgtggtctgagaagaactgttggaaccagtgggcactttggtactcacagctgctatcaggtcatcaagagtgtcggtaagcgtctgagctggagttgcaaccattagtccatctggttcttgaactaacagcccctgatcatgtccagtaatagcaatctgaggctgtcctacaatcctcgtgcc

SEQ ID NO: 67999 - DNA, 348 bp, Homo sapiens
ggcacgagcaaatgtgaagaatgtggcaaagccttcaactcgtcctcacaccttactgcacataagagaattcatactggagagaaaccctacaaatgtgaacgatgtggcaaggcttttaagcgctcctttatccttactagacataagagaattcatactggagagaaaccctacaaatgtgaagaatgtggcgaaggctttaagtgcccctctacccttactacacataagggaattcatactggagagaaactataaatgtgaggaatgtggcaaagctttaagctatcccactatgcttttttcacataagaaaattcatattggagggaaactgtacaagtg

SEQ ID NO: 68000 - DNA, 1276 bp, Homo sapiens
ggcacgagctttggcctacaccggctggtggagcttgggcagagctcaggcaagaaggcaggtgactggtatgggccatcgctagtggcacacatcctcaggaaagccgtggagagctgctccgacgtcacccgcctggtggtgtacgtttctcaggactgcacagtgtacaaggcggatgtggcacgcctggtggccaggccagaccccacagccgagtggaagtctgtggtcatcctggtgcccgtgcgactgggtggcgagactctcaaccccgtgtatgtgccctgcgtgaaggaactcctgcgttgcgagctgtgcctgggcatcatgggtgggaaaccgcgacactcactgtacttcattggctaccaagatgacttcctgctgtacctggaccctcactactgccagcccactgtggatgtcagccaggccgacttccccctggagtccttccactgcacctcgccccgcaagatggcctttgccaagatggacccaagctgtaccgtgggcttctatgctggagacaggaaggagtttgagacactctgctcagagctgaccagggtcctcagctcctcctcagccacagagcggtaccccatgttcaccctggccgagggccatgctcaggaccacagcctggacgacctctgctcccagctcgcccagcccacactccggctccctcgcacagggcggcttccttcaggcccaaacgccccagctctgaggactttgtgtttttataaagggaggggatgaggggaaagatacaacactatttatttttttatttatgtcatgtcgggtgtgggatcttgagctctggcagtgatgatggtacttcctgttgtcagcccctcaagcccagctgcaaccagtctggggccattcagccagggacagagcccacagagcccatacacctgtctcccaccagcggggccctcctggcagggtagggaaggaggaccccgggcacccccctcagggcctgactcacgtactgtagtttgcactggacgcccgggccctccctgtcccaaagcccccttgggggaactgtggctgctgggggccaataaagctgtgtaacttgatcgtgggtgtggctgggcgcagcgttctgaggggatgtggggtctgggaggtgtctcgaggtgagagctccaagtcacgggaagtttaagtcagcctcagtttccacatccataaaatgggacgacttccttacccacagctacacgtgttttttaatttttttttt

SEQ ID NO: 68001 - DNA, 918 bp, Homo sapiens
aaattgacttctatagacgattcgccacgaggttttccagacaccctatgcttcagctcaaaaaacggagcttgtagctgtaattgaggtattgactgcttttaatatgcctattaatgtgatttctgattcttcatatgtggttcattcgacacaattaattgaaaatgctgagttacgatttcatacagatgaacaactgatgactttatttatgcaattgcaaacagcagttaggagtagaatgcaccctttttacatcactcacattagggctcatacacctcttccaggacctttgactgcagggaatcaaatggctgatcgcctagttgctactgcaatatctaatgctggacactttcacaatttaacccgtgttaatacctctggtctcaaacgcagatacagcagtacctggaaagaagctaaagctattatccagcgatgcccaacttgccaaatggtacattcctcatcttttacaggaggagttaatcctcgaggattggaacctaattctctttggcaaatggatgtcaacacatgttccctcatttgggagactagcttatatacatgtatgtgtggacaccttttcttactttgtctgggctacatgccaatcaggagagtcttctgcctgtgttagttaaacatcaccttttgcagtgttttgtggtggtgggcattccagcttctattaaaacagataatgccccaggctatactagccaagctctagctacatttttctctgtgtggaatattaaacacattaccggtatcccatacaattctcaaggacaagccatagtggaaagaatgaatctctccctaaaacagcagttgcagaaggagacggggggaaatagacaatatgtaaccccacagatgctcctgaatctagcattatta

SEQ ID NO: 68002 - DNA, 1223 bp, Homo sapiens
tatactcagattggccaatatcatgtcatattcactgtcatcaatctcagcaaaagtatatgggtcttcttcctcctcctgctctttttcctcttcttttttttttttttctcctttgggttcatctcctgtttcttgtctaacaccaggatgaccccagttttgacttctttccatttggccttccaccattgtccctggtaaggtgaagtgaggtctttccagttggaaggcattagctacaggtcgcggcggggggagaggaggtctgctgctcatgagtggctcttgtgaattattttctggatcagcaccaggaatgaacacatacaagtcatcatactggtcttcagaactctcactgccaacctctagtgggctgtgtttggtctccatgcctgatccattctgttttccttccccttccatttcatttgcctcagctccatctgcactctgcccgtatgtcttcctgctttcatgatgaaatgctgggttctgtgtggaaggaatatatgtggaaaatgaggcaatatcctcttcataatcattttcttgctcattatttatgtcaatttcttggattgaaaagtcttcgaagattttcttgagttctttgtgaccatgcctttcagcaatatgtgcggggtctgaaccctccatatttttcatcttagatgcccaggttgctcctgaacattgaagcaaatgaatagccaggttctttaagccaaattttgctgcacagtggagaagagttggaagttctttgaaatgagtatatttgttttgagaacaaatttcagtttgaagagactggaactcataatatggtatctcatgtttgaatatggatgtaaggacaccatcaagttcttcaatgctattctggcacaaactctctcctgaatctgccattctgaataggcattcctttgcctttgctgttgggtagtacttaattttggttgtagctttaacgattccatcacagtagacattgacatggactgaaccagcaggaaactctaaagctttcatgcaccagactttcttattccaaagggctggccgtgttctaatgcgcttattacttgatgtaaattcaacctctacagtatcaccaattacttcatctctcaaaatcatgaatatttcaccaggattctcacatgaaataacagtgggaagcaccactgctagtggtatggtgtttcatgcgc

SEQ ID NO: 68003 - DNA, 802 bp, Homo sapiens
ctccgcaatgccttggacgtcctgcatagagaggtgcccagagtcctggtcaacctcgtggacttcctgaaccccactatcatgcggcaggtgttcctgggaaacccagacaagtgcccagtgcagcaggccagcttgaaccacttggaagcaaaacagagaccctggacctgagagcagagatgcccatcacctgtcccactcagaatgagcccttcctgagaacccctcggaatagtaactacacgtaccccatcaagccagccattgagaactggggcagtgacttcctgtgtacagagtggaaggcttccaatagtgttccaacctctgtccaccagctccgaccagcagacatcaaagtggtggccgccctgggtgactctctgactacagcagtgggagctcgaccaaacaactccagtgacctacccacatcttggaggggactctcttggagcattggaggggatgggaacttggagactcacaccacactgcccaacattctgaagaagttcaacccttacctccttggcttctctaccagcacctgggaggggacagcaggactaaatgtggcagcggaaggggccagagctagggacatgccagcccaggcctgggacctggtagagcgaatgaaaaacagccccgacatcaacctggagaaagactggaagctggtcacactcttcattgggggcaacgacttgtgtcattactgtgagaatccggaggcccacttggccacggaatatgttcagcacatccaacaggccctggacatcctctctgagga

SEQ ID NO: 68004 - DNA, 859 bp, Homo sapiens
  misc_feature (1)...(859): n = a,t,c or g
gtggtggaattcctctggagcaggaggcccagtggctcttctgacccaaggccccgccgtccagcttctaagtgccagatgatggaggagcgtgccaacctgatgcacatgatgaaactcagcatcaaggtgttgctccagtcggctctgagcctgggccgcagcctggatgcggaccatgcccccttgcagcagttctttgtagtgatggagcactgcctcaaacatgggctgaaagttaagaagagttttattggccaaaataaatcattctttggtcctttggagctggtggagaaactttgtccagaagcatcagatatagcgactagtgtcagaaatcttccagaattaaagacagctgtgggaagaggccgagcgtggctttatcttgcactcatgcaaaagaaactggcagattatctgaaagtgcttatagacaataaacatctcttaagcgagttctatgagcctgaggctttaatgatggaggaagaagggatggtgattgttggtctgctggtgggactcaatgttctcgatgccaatctctggcttgaaaggagaagacttggattctcaggttggagtaatagatttttccctctaccttaaggatgtgcaggatcttgatggtggcaaggagcatgaaagaattactgatgtccttgatcaaaaaaattatgtggaagaacttaaccggcacttgagctgcacagttggggatcttcaaaccaagatagatggcttggaaaagactaactcaaagcttcaagaangagtttcagctgcaacagaccgaatttgctcacttcaagaagaacagcagcagttaagagaacaaaatgaattaattcga

SEQ ID NO: 68005 - DNA, 438 bp, Homo sapiens
cccacgcgtccgcccacgcgtccgcccacgcgtccgcccacgcgtccgcgattctgccggcagctcagcagcatggccagcaagctcatcatctccccgttcaccctcgtctactacacttaccagtgcttccaaaggtgaagcctccctcctccccagcctggtgtttccccagagggccctcagtcagctctcccaggtcaaggtccaagagaagcttatttcccctctctcccaccgtaccttaccacgtgctcacccatcccacgtgctcaggcccctgcccttcctttggccctgtgttgcagtgtcacagatatcctggctctgagagctcataccagatgcccccacataggagcagagggcccattgggccactcagattggacaggggctacctgagagggaacaggagtcagggctgaggcatgtggg

SEQ ID NO: 68006 - DNA, 456 bp, Homo sapiens
gcctggctgttgctcaggtgaccagcttgtgtctctgggagggcgctgctttccccggccacccggcgcgatgatccagaatgtcggaaatcacctgcgacggggcttggcctctgtgttctccaaccgcacatcccggaagtcagccttacgtgcggggaacgacagtgccatggcagacggcgagggataccggaaccccacggaggtgcagatgagccagctggtgctgccctgccacaccaaccaacgtggtgagctgagcgtcgggcagctgctcaagtggattgacaccacggcttgcctgtccggtgggcatccaggtggcctcggaggacctgtgctctgagaagcagtggaatgtgtgcaaggccttggccaccttcgtggcccgccgagagatcaccaaggtgaagctgaagcagatcacgccgcggacagaagaggagaagatgg

SEQ ID NO: 68007 - DNA, 1414 bp, Homo sapiens
  misc_feature (1)...(1414): n = a,t,c or g
ccctcgaggccaagaattcggcacgagcgactgtcaaatcttcttcagaggatcacccgggaaaacgaccgagaccgaagattggctactgtaaagcagttgaaagaatttattcagcaaccagaaaataagctggtactagttaaacaattggatatcttggctgctgcacatgatgtgcttaatgaaagtagcaaattgcttcaggagttgagacaggagggagcttgctgtcttggccttctttgtgcttctctgagctatgaggctgagaagatcttcaagtggatttttagcaaatttagctcatctgcaaaagatgaagttaaactcctctacttatgtgccacctacaaagcactagagactgtaggagaaaagaaagccttttcatctgtaatgcagcttgtaatgaccagcctgcagtcaattcttgaaaatgtggatacaccagaattgctttgcaaatgtgttaagtgcattcttttggtggctcgatgttaccctcatattttcagcgctaattttagggatacagttgatatattagttggatggcatagagatcatactcagaaaccttcgctcacgcagcaggtatctgggtggttgcagagtttggagccattttgggtagctgatcttgcatttcctacgactcttcttggtcagtttctagaagacatggaagcatatgctgaggacctcagccatgtggcctctggggaatcagtggatgaagacgtccctcctccatcagtgtcatcaccaaagctggctgcgcttctccgggtatttagtactgtgctgaggagcattggggaacgcttcagcccaattcgggtcctccaattactgaggcatacgtaacagttgttctgtacagagtaatgagatgtgtgacggctgcaaaccaggtgtttttttctgaggctgtgttgacagctgctaatgagtgtgttggtgttttgctcggcagcttgaatcctagcatgactatacattgtgacatggncattacatatggattagaccaactggagaattgccagacttgtggtaccgattatatcatctcagtcttgaatttactcacgctggtatgtgaattattcttttcctttttaatgtgttggtttattcaggcccttaaatggatatgtaagaaattaagggctttgtctgggtatggtggctcatgctagtaatcccagcgctttgggaggccaaagcagaagggttgcttgcatccaggaattctggcacagcttgggcaatgtagtgagaccccatctgtacaaaaagtcaaaaattagcttggtgtagtggtgtcgcactgcggtcctagctactcgggaggctgatggaggaggatcgattaagcccaggaacttgaggttgaggtgagctctga

SEQ ID NO: 68008 - DNA, 630 bp, Homo sapiens
caaccccgccgccggggacatgtccaacccctgaagccggaggaacgggccagtcagactgcgcccgacaggtatattgaaaagtctgattcagttacaatcagtgtatggaatcacaagaagatccataagaaacaaggtgctggatttctccgttgtgttcgtctttttccagtgccatcaaccacctcaaagacactggttatcagaggttggatttatgcaaacttgggccaaaggacagttagaagacagtagctgaagaagcatctgtagggaatccagaaggagcattcatgaagatgttacaagcccggaagcagcacatgagcactgagctgactattgagtcggaggcgccctcagacagcagtggcatcaacttgtcaggctttgggagtgagcagctagacaccaatgacgagagtgatgttagcagcgcactaagttacatcttgccttatctctcactgagaaatctaggtgcagaatcaatattgttaccgttcactgaacagctattttcaaatgtacaagatggagataggctcctgagtattttgaaaaacaatagaaagagcccctcacagtccagccttctaggtaacaaatttaaaaacaaaatatttg

SEQ ID NO: 68009 - DNA, 428 bp, Homo sapiens
atgagggcacggccttgtaaagaaacccaaagcagcacagcctctgagaactgaataatggccccttccagatgcctctttgcaatggtggaaatttggcagtaacaggttcctgggcagatcgatcaccactacatgaagcagcaagtcaaggtcgccttcttgctctgagaacattattatcacagggttataatgtaaatgcagtaaccttagaccatgtcaccccattgcacgaagcctgccttggagatcacgtggcatgtgccagaactctgctggaagcaggagctaatgtaaatgcaatcacgatagatggcgtgactccgttattcaacgcatgctcccaaggcagtccaagctgtgcagagctgcttctggagtatggtgccaaagcccagcctggagtcatgtcttccatccccaac

SEQ ID NO: 68010 - DNA, 798 bp, Homo sapiens
agaagcgctgggcttggacaggcctgccattgacaaacagagccctctcaacatcaatggtgctagggatctgcggctgccctgggtcaatccttacatggagggggccacgccagccatctaccctttcctcgactcgccaaataagtattcactgaacatgtacaaggccttgctacctcagcagtcctacagcttggcccagccgctgtattctccagtctgcaccaatggggagcgctttctttacctgccgccacctcactacgtcggaccccacatcccatcgtccttggcatcacccatgaggctttcgacacctttggcctccccagacattccgcctctcgtccattgcgcagacaaaagcctcccgtggaagatgggcgtcagccctgggaatcctgttgattcccacgcctatcctcacatccagaacagtaagcagcccagggttccctctgccaaggcggtcaccagtggcctgccgggggacacagctctcctgttgcccccctcgcctcggccgtcaccccgagtccaccttcccacccagcctgctgcagacacctactcggagttccacaagcactatgccaggatctccacctctccttcagttgccctgtcaaagccatacatgacagttagcagcgagttccccgcggccaggctctccaatggcaagtatcccaaggctccggaagggggcgaaggtgcccagccagtgcccgggcatgcccggaagacagcggttcaagacagaaaagacggcagctcacctcctctgttggagag

SEQ ID NO: 68011 - DNA, 483 bp, Homo sapiens
gttcggggaattgacgctgtggtaccggatcgaattcccgtgtcgactataacgtgctggtctgcgttaatcgcaccagcgcgcagcaaccgttgcaggtatatgattttttgtgcgatgcgggagtcgaattcatccagtttattccggtggtcgagcgcctggctgatgaaacaactgcccgcgatggacttaagttacatgcgcctggtgatattcagggtgagctaacggaatggtcggtgcgccccgaggagttcggtgagtttctggtggcgatattcgaccactggatcaaacgcgacgtcggcaagattttcgtgatgaatatcgaatgggcgtttgccaattttgtcggtgcgccgggtgcggtttgccatcatcagccaacctgtgggcgctcggtgattgttgagcacaacggcgacgtttacgcctgtgatcactatgtttatccgcaatatcgggctggggaatatgcac

SEQ ID NO: 68012 - DNA, 1443 bp, Homo sapiens
  misc_feature (1)...(1443): n = a,t,c or g
aaataatgaaagatcgatggatgaatgttggtcatgaagaggaagaactaaagccatatactgagcctgatccggatttcaatgacacaaaaagaatagacattatggtcaccatgggctttgcacgagatgaaataaatgatgccttaataaatcagaagtatgatgaagttatggctacttatattcttctaggtagaaaaccacctgaatttgaaggtggtgaatcgttatccagtggaaacttgtgtcagaggtcccggcccagtagtgacttaaacaacagcactcttcagtcccctgctcacctgaaggtccagagaagtatctcagcaaatcagaagcagcggcgtttcagtgatcatgctggtccatccattcctcctgctgtatcatataccaaaagacctcaggctaacagtgtggaaagtgaacagaaagaggagtgggacaaagatgtggctcgaaaacttggcagcacaacagttggatcaaaaagcgagatgactgcaagccctcttgtagggccagagaggaaaaaatcttcaactattccaagtaacaatgtgtattctggaggtagcatggcaagaaggaatacatatgtctgtgaaaggaccacagatcgatacgtagcattgcagaatggaaaagacagcagccttacggagatgtctgtgagtagcatatcttctgcaggctcttctgtggcctctgctgtcccctcagcacgaccccgccaccagaagtccatgtccacttctggtcatcctattaaagtcacactgccaaccattaaagacggctctgaagcttaccggcctggtacaacccagagagtgcctgctgcttccccatctgctcacagtattagtactgcgactccagaccggacccgttttccccgagggagctcaagccgaagcactttccatggtgaacagctccgggagcgacgcagcgttgcttataatgggccacctgcttcaccatcccatgaaacgggtgcatttgcacatgccagaaggggaacgtcaactggtataataagcaaaatcacatccaaatttgttcgcagggatccaagtgaaggcgaagccagtggcagaaccgacacctcaagaagtacatcaggggaaccaaaagaaagagacaaggaagagggtaaagattctaagccgcgttctttgcggttcacatggagtatgaagaccactagttcaatggaccctaatgacatgatgagagaaatccgaaaagtgttagatgcaaataactgtgattatgagcaaaaagagagatttttgcttttctgtgtccatggagacgctagacaggatagcctcgtgcagtgggagatggaagtctgcaagttgccacgactgtcacttaatggggttcgcttcaagnaattatctgggacattattgctttaagaacatt

SEQ ID NO: 68013 - DNA, 658 bp, Homo sapiens
ctccgtggggtcggagtcagacagctccaaagaagagaccatctatgacacgatccgggccactgcggagaagccgggcggtgccaggacggaggagagccagggcaacacgctggtgatccgcgtggtcatccatgacctgcagcagacgaaatgcattcgatttaacccggatgccacagtgtgggttgcaaagcagcggatcctgtgtacattaacccagagtttgaaagatgtcctgaactacggcctgttccagccggccagcaatgggcgtgacggcaagttcctggatgaggagcggctcctgcgcgagtacccacagcccgtgggtgagggcgttccttccctggagtttcgatacaagaagcgggtgtataaacaagccagtctcgatgagaaacagttggccaagctccacacgaagaccaatctgaagaaatgcatggatcacattcagcatcgcttggtggagaagatcaccaagatgctggaccgaggcctggatcccaatttccacgacccggagaccggagagacccccctgaccttagccgttcagctggacgactttgtggaggtcatcaaagctctcaaaaatgggggagctcacctggacttccgtgccaaagatgggatgaccgtcctacacaaagcc

SEQ ID NO: 68014 - DNA, 1050 bp, Homo sapiens
  misc_feature (1)...(1050): n = a,t,c or g
ctgcaggctttccgcaacgccagcgaggtgcccatggtgcttgtgggcacgcaggatgccatcagcgctgcgaaatccccgggtttatcgacgaacaagcagagcccgcaagctctccacagatctgaaagcggtgcacctaattatgaagacgtgcggcggaacttacgggcttcaaatgtggagcgtgtctttccaggacgtggcccagaaggtagtggccttgctgaaagaagcagcaaactggccatcgggccctgcaaagtcactgcccaacttcgcccagccacttcggccgtgtccgccgcctccatcccggcccgtgcancaatcaaccagggccacgaatgggcggcggcagcgccttcagcgactacttcgtcctcagtcccctccacccccagcatcagccagcgggagctgcgcatcgagaccatcgctgcctcctccacccccacacccatccgaaagcagtccaagcggcgctccaacatcttcacgtctcggaagggtgctgaccctggaccgggagaagaaggctgccgggtgcaaggtggacagcatcgggagcggccgcgccatccccatcaagcaggggatcctgctaaagcggagcggcaagtccctgaacaaggagtggaagaagaagtatgtgacgctctgtgacaacgggctgctcacctatcaccccagcctgcatgattacatgcagaacatccacggcaaggagattgacctgctgcggacaacggtgaaagtgccagggaagcgcctgccccgagccacacctgccacagccccgggcaccagcccccgtgccaacgggctgtccgtggagcggagtaacacacagctgggtgggggcacaggtgccccccactcggccagcagcgcatccctgcactctgagcgccccctcagcagctcggcctgggctggcccgcgccctgaggggctgcaccagcgctcctgctccgtttccagcgccgaccagtggagtgaggccaccacttccctgcccccaggcatgcagcaccctgccagtggccc

SEQ ID NO: 68015 - DNA, 672 bp, Homo sapiens
tgtagtttaattaagtcccatctatttattcttgtttttgttgcatttgcttttgggttcttggtcatgaagtctttgcctaggccaatgtttagaagggtttttctaatattatcttctagaatctttatgggtgttagatttaagtctttgatccatcttgagttgatttttgtataaggtgagagatgaggatccagtttcattcttctacatgtggcttgccaattatcccagcaccatttgttgaatagggtgtcctttctccactttatgtttttgtttgctttgttaaagatcagttgactgtaagcatttggctttatttctgggttttctattctactccaatgatctgtgtgcctgtttttataccagtaccatgctgttttggtgactttataatatagtttgaaatcgggtaatgtgaagtttcccagatttgttctttttgcatagtcttgctttggctatgtgggctctcttttggttctgtatgaattttaggatttttttttaagttctgtgaagaatgatggtggtattttgatgggaattgcattgaatttgtagattgctattggctgtatggtcattttcacaatattaattctacccaatattctatatagtaatattaatgaattaatattaattcgtgagcatgggatg

SEQ ID NO: 68016 - DNA, 1469 bp, Homo sapiens
ctgactgtgatccgaagagtggatgaaaactgggctgaaggaatgctggcagacaaaataggaatatttccaatttcatatgttgagtttaactcggctgctaagcagctgatagaatgggataagcctcctgtgccaggagttgatgctggagaatgttcctcggcagcagcccagagcagcactgccccaaagcactccgacaccaagaagaacaccaaaaagcggcactccttcacttccctcactatggccaacaagtcctcccaggcatcccagaaccgccactccatggagatcagcccccctgtcctcatcagctccagcaaccccactgctgctgcacggatcaacgagctgtctgggctctcctgcagtgccccttctcaggttcatataagtaccaccgggttaattgtgaccccgcccccaagcagcccagtgacaactggcccctcgtttactttcccatcagatgttccctaccaagctgcccttggaactttgaatcctcctcttccaccaccccctctcctggctgccactgtccttgcctccacaccaccaggcgccaccgccgctgctgctgctgctggaatgggaccgaggcccatggcaggatccactgaccagattgcacatttacggccgcagactcgccccagtgtgtatgttgctatatatccatacactcctcggaaagaggatgaactagagctgagaaaaggggagatgtttttagtgtttgagcgctgccaggatggctggttcaaagggacatccatgcataccagcaagataggggttttccctggcaattatgtggcaccagtcacaagggcggtgacaaatgcttcccaagctaaagtccctatgtctacagctggccagacaagtcggggagtgaccatggtcagtccttccacggcaggagggcctgcccagaagctccagggaaatggcgtggctgggagtcccagtgttgtccccgcagctgtggtatcagcagctcacatccagacaagtcctcaggctaaggtcttgttgcacatgacggggcaaatgacagtcaaccaggcccgcaatgctgtgaggacagttgcagcgcacaaccagggaacgccccacggcagcagtgacacccatccaggtacagaatgccgccggcctcagccctgcatctgtgggcctgtcccatcactcgctggcctccccacaacctgcgcctctgatgccaggctcagccacgcacactgctgccatcagtatcagtcgagccagtgcccctctggcctgtgcagcagctgctccactgacttccccaagcatcaccagtgcttctctggaggctgagcccagtggccggatagtgaccgttctccctggactccccacatctcctgacagtgcttcatcagcttgtgggaacagttcagcaaccaaaccagacaaggatagcaaaaaaaaaa

SEQ ID NO: 68017 - DNA, 411 bp, Homo sapiens
  misc_feature (1)...(411): n = a,t,c or g
cccacgcgtccgcagtcatccaatgtgaatttctagttttttttgnnnnnnnnnnnnaaaaaaaaggaccaggagggaataaaaaaggcatccatctattttaggttcttcaaaatatggggcactgggcaaatctgaccaacccaacaaagcctttccagctgtcccgccaggggacggaccggataagggaggagtttttccgccaaggaaaccgaaaaagggaacggggcttggaaataacccccatgtgtgacaagcacaatgcttccggggaaaaatcacaggggggcttcataaactatattgttcatcccctctgggaaacatgggcaaacctcgtccaccctgacccccaggatattttggacactttggaggacaatcgggaatggaccagagcacaatccc

SEQ ID NO: 68018 - DNA, 778 bp, Homo sapiens
cccacgcgtacgcattttgatgcccaggctggggtgcagcctttaaaggtttcttgcggcctcctttaggcagctttcctgttcgaagggcctgctgtgagatggggaatgaaccctgttccacacccgcacccccagtgccctctcttgcctcctcctcaggctggaaacgtggcctgcatctctcctgagtgtccttctggcccctgtcagacccccccacagacggattgctgtacttgtgttccagtgagatgctatttccacggccggtggtacgcagacggggctgtgttcagtgggggtggtgacgagtgtaccacctgtgtttgccagaatggggaggtggagtgctccttcatgccctgccctgagctggcctgcccccgagaagagtggcggctgggccctgggcagtgttgcttcacctgccaggagcccacaccctcgacaggctgctctcttgacgacaacggggttgagtttccgattggacagatctggtcgcctggtgacccctgtgagttatgcatctgccaggtgaatgacaacctgctcgccttcagctgctttacctggctgccccgcctcacccagaggagacaagcgtcctggcccctccagaggctggcctcaggctggccgcagtctccctccggtgctgtcaagttccactttcacaaaaagggttggaccgagtttatcctgctctcagtagatgtgtgaggacgatggtgcttggcagttggccttaagaagtgtgtattgttggccaggc

SEQ ID NO: 68019 - DNA, 416 bp, Homo sapiens
taaacaggtaccatacaagaaggccagaagtgcacctcctttacttaaaaggaaaccccagagtggattatatgcgtcagttaggagctcaggctatggcaaacccagttcaccactcaagatgttttctactcttgaaaagaaaacttcagaggacattataaaaagcaaaaacttgagatcgatttctacctccaatcaacctaggaaaaaaggattccttaggatactgtggtgagaacaaggagaagaaattacttatgtttaaaagagttcaggaagcagaggataaatggaggggtgcgcaagccctaattgagcaaattaaagccacattctcagaaaaggagaaagaactagaaaataagttggaagaactaaagaaacaacaggaaaaagaactcttcaaattgaat

SEQ ID NO: 68020 - DNA, 1559 bp, Homo sapiens
ttttttttttttataaaagttcagcacgttcacagtgcagctcatacggttctccttgctctcatcttgcatgatgatggttctatagtccagcaggttctctaagaggctgctgaccaggagggcgaagacctccccagagctggagaggtatttgtgtttccggcaatgttctaggagcagtttttccagaagaaccttgtattgttcgtctcctctgcccccttctacctcctggtccagctttgtgatcagctcattctcaaacatatggaaattgccatttccactgaaattgaactcacactgcatcatatcaaagaaaatggggattgtggctttccggagctctacttcaggggtcagagtgacctccagaatgggacccaccatggatgggatgaatttgattctgtggggacccaggttataccacatgtcccggattctaaagccgatttcctttctcatgtccccatattttttaacaattttgttgcgcttggcttgtgagaaggtttcaagctgaagggactcatgggtgagaaatgcaactgccaaatggaagtaattgttccagagctgaagttcaaagcttgcctgatccatgaagaatcttgtgagaacttcagcaaaccgatttatagcacggagaaaaaccctgttttgagtcatattcatcaccatccaatctttggcatagacattctttccaatcaggtccttgaacatgataaaagtttccatgaggaagtcgatgatgtcttgtctggttttgaaagtgctgatgtagtggctatagtggctgtcgtccatttgctgcagcagggcaatcatgcaagccacaaaactcccgatgtggggagactgccggttcatcccaatcactgtccggttgatccttctcaagcagccgttccattataagctgaatgtgcaccgcagtggcacccacatccttcctgtccagcacctccaggatgttgctcagaagctgcgagcttgcctcgtggtcaggcttgttggagttgtcatctaactggccgctgagctggtccgtcagcagtggcagcagcacttctctgcactctgactgtcgaaaaagagtgctctctactatcttggtcatgcagttaagtttctgccgaaccagctggttgtcaggaatgctttgaatgaatttgcctttggtgtttttcttacagggggcagctttgaagtaccttcctagcataattaatgatgtcaaacttgtatttgatcctgttgagctcaggtaaatagcaaaacaaaattttgttccttaactctaacagaaacagctcccctgcttggctggagcctgggctgctacacctggcttttatttttctaagaagtattaactgaatacctttttgtgctcagttctgtggaagatgcaaaagaacatccaaaacctgccctgagagaggtttgcactttctctgggaaaacaagacatgcagacataaaatcgattacaaaagatagtgtataatgacatgcttccagccctacccctaagtatcccagcagtg

SEQ ID NO: 68021 - DNA, 411 bp, Homo sapiens
cccacgcgtccggtgtaattgagtttcccagtttctacagactgccattgctatgcacggctgagatggacagagtttgcttgggaatccgccacactcactgcctgtcaccacacctgcaggcgacgactgtaagggcaagaggcacctcgacgcgcacacagccgcccactcgcagtcgccacggctgcccggtcgggcagggaccctctggcacatctgggcatgtgcaggttgtctctcgccccgtctccgtctcatctcgccctgtcaccatgctatttgtgtcttgtgtggtttgtgcttggaattcaagtgctttaaagtcttgctgtaaaaactgacaggaatagtattaactttggtttaaaacagggtgaatctctctcgaaaagcttcctttggaaattt

SEQ ID NO: 68022 - DNA, 413 bp, Homo sapiens
  misc_feature (1)...(413): n = a,t,c or g
ggtgaatcctgtgacactagagacagtcctgaggtgcctgcaggcccggtacatggcagacacattctacaccaatgctggctgcaccctggtagccttgaaccccttcaagcctgttcctcagctctactcgcccgagctaatgagagagtaccatgctgcgcctcagccccagaaactgaagccccatgtgttcactgtgggtgaacagacctacaggaatgtcaagagcctgattgaaccagtcaaccagtctattgttgtcagtggagagagtggtgctggaaagacatggacgtctcgctgcctaatgaagttctatgctgtggtggccacctcacctgcatcttgggagagccacaagattgcngagaggatagaacagaggattctnngactcaccctgcatggaa

SEQ ID NO: 68023 - DNA, 682 bp, Homo sapiens
ggcacgagtcacatctgtgttgtcataaggatcaaatgagagcatatgtcttttatctttcatttacagctgcgagcaagtcacaccagcctacaagccagatataatgaagccaagaaaacgctgacagagctgaagacttacagtgagaaactggacaaagagcaagcagccctcgagaagatagaatccaaagctgatccaagtatcctacagaacctgagagcacttgtagccatgaatgaaaatctgaaaagtcaagaacaggaatttaaagcacattgtcgagaggagatgacacgactacagcaagaaattgaaaacctgaaagctgagagagcaccacgtggagatgaaaagaccctctccagtggagagccgcctggtaccttgacctctgcaatgactcatgacgaagacctagacagacggtataatatggagaaagagaaactttacaagatacgtttactacaggctcgaagaaatcgagaaatagcaattttgcaccgcaagattgatgaagtccctagccgtgccgagctaatacagtatcagaagagatttattgaactctaccgccagagtagtttcagcagtgcacaaagaaaccaagcagttcttcactttatataataccctggatgataaaaaggtttatttggaaaaagagattagtctg

SEQ ID NO: 68024 - DNA, 459 bp, Homo sapiens
tcgattcgaattcggcacgagggagcaaataataagcccttgtgtgtgtttttggcagaaaagccatgaagacaagcagatgctaataaaagaatctgcatctttgtttgttattccatgttaaagggttgaaataaaggtaagagaatatttgtactgttgttatccaaatccatctcctgttctactctctattcaaaataatcgtacagtgactaacagagctttcagaccaacagtattttttatttttcattttaagttcagggtaccaacatttctttccatggatgttgatggacgtgtcatcagagctgactctttttcaaaaatcatttcctctgggttgagaataggatttttaactggtccaaaacccttaatagagagagttattttacacatacaagtttcaacattgcaccccagcacttttaaccagctcatgatatcacagcg

SEQ ID NO: 68025 - DNA, 794 bp, Homo sapiens
ccgtcacatcccccgccagcttgtagatgcctggattgagatgggcagccggctggatgctcgtcagctcattcctgccctggtgaactacagccagggtggtgaggtccagcaggtgagccaggccatccgctacatggagttctgcgtgaacgtgctgggggagactgagcaggccatccacaactacctgctgtcactgtatgcccgtggccggccggactcactactggcctatctggagcaggctggggccagcccccaccgggtgcattacgacctcaagtatgcgctgcggctctgcgccgagcatggccaccaccgcgcttgtgtccatgtctacaaggtcctagagctgtatgaggaggccgtggacctggccctgcaggtggatgtggacctggccaagcagtgtgcagacctgcctgaggaggatgaggaattgcgcaagaagctgtggctgaagatcgcacggcacgtggtgcaggaagaggaagatgtacagacagccatggcttgcctggctagctgccccttgctcaagattgaggatgtgctgcccttctttcctgatttcgtcaccatcgaccacttcaaggaggcgatctgcagctcacttaaggcctacaaccaccacatccaggagctgcagcgggagatggaagaggctacagccagtgcccagcgcatccggcgagacctgcaggagctgcggggccgctacggcacttgtggagccccagggacaaatgtgccacctgcgacttccccctgctcaaccgccctttttacct

SEQ ID NO: 68026 - DNA, 918 bp, Homo sapiens
cgcagcgactcggggacctggagctgacgcctagtacgtatgaggaagaacggggtgggtggctgcctgagtctggaggcgacgcctcggttgtgcagtctgaacctgcccttctcagctgagggtgctgacagcaaggggtgggaggcgggccccgagtccccagctgtggacacttgtattagctttaatagaagagaaatggaggagccatagaatattaaggatgaattcaggaaggcctgagaccatggaaaacttgcctgctctctacactattttccaaggagaggttgctatggtgacagactatggggcctttatcaaaatcccaggctgtcggaagcaaggtctggtccatcgaactcatatgtcatcctgtcgggtggataagccctctgagatagtagatgttggagataaagtgtgggtgaagcttattggccgagagatgaaaaatgatagaataaaagtatccctctccatgaaggttgtcaatcaagggactgggaaagaccttgatcccaacaatgttatcattgagcaagaagagaggcggaggcgatccttccaggattacactgggcagaagatcacccttgaggctgtcttgaacactacctgcaagaagtgtggctgtaaaggccactttgcaaaagattgtttcatgcaaccagggtgggactaaatactctctgatacctgatgaggaagaggaaaaggaagaggcaaagtcagcagagtttgagaagcctgaccctacaaggaatccttctagaaaaagaaagaaggagaagaagaaaaagaaacatagagataggaagtcatctgactctgacagctcagactctgagagtgatacaggcaagagggcaaggcacacatcaaaagacagcaaggcagcaaagaagaaaaaaa

SEQ ID NO: 68027 - DNA, 545 bp, Homo sapiens
  misc_feature (1)...(545): n = a,t,c or g
gcttcccatccccaaaaggcgccctccgactccttgcgccgcactgctcgccgggccagtccggaaacgggtcgtggagctccgcaccactcccgctggttcccgaaggcagatcccttctcccgagagttgcgagaaactttcccttgtccccgacgctgcagcggctcgggtaccgtggcagccgcaggtttctgaaccccgggccacgctccccgcgcctcggcttcgcgctcgtgtagatcgttccctctctggttgcacgctggggatcccggacctcgattctgcgggcgagatgcccctgggacacatcatgaggctggacctggagaaaattgccctggagtacatcgtgccctgtctgcacgaggtgggcttctgctacctggacaacttcctgggcgaggtggtgggcgactgcgtcctggagcgcgtcaagcagctgcactgcaccggggccctgcgggacggccagctggcggggccgcgcgccggcgtctccaagcgacacctgcggngcgaccagatcacgtggatcgggg

SEQ ID NO: 68028 - DNA, 1209 bp, Homo sapiens
ttttttttttttccgattggtgctgggagttgtcaccacattggccctttttttcccaaacacatttgtgaatgttgcagatgttgcagagattccaatcgtagtggtggtggttgcactaggaggttctatgggaacttcttgctccacatcttcatcattctcctcttcatcttcatcctctggtagttccgaattctccttaggtttgttttcttcatcttcttcctgtttccttttctgttcctcttttttcttttttctcttttcttttcttttttctcttttagcagcaagagcctgctttctgctctcttctcttgacttttccagatcaagttcctttaaaagaatactcgcattcttatttgcttctgcagcttgctggtctttagccttcacaatggtttcgacacattgatgacattttttcaacagttccttatctgtaattgttgctatgtatctcatgcattctatatcagaagggaactgatttacttcctttaccaaatattgaacaacttttacatgacccttgcgaaatgctgacataagaggtgtgattttccggttatctgctgcatccacatcagcacctgcttgcactagcaactgcacaacatcaaaatgacctccattggatgccagccaaagtggcgtatttccctttttgttacgaacatcaatgtgggctcccctatgaatcaggagttcacaaaatttgtagtgacctttgtctgctgctattgttaaagcagtatctcttgaggaaggcacagggggagcattaacatctgctcctttatcaagaagaactcttccaacctctgcataccctccagaagctgcttccatcaagggggtaagacccgtctttgccctatgttcaacattggcttttcggtccagaagcaaactcactacttctgctcggccctggaaacaggccagggtgagagccgtgttccgattggtctctatttgggcattaatgtctgaacccatatcgagcagcaattttactgcaggaacatgtccattcattgcagccaacatcaggggagaaatacctagtttactcccagtccttgaattaatttctgccccagcattaagcagaatcttaatgatattaacatatcctccagacgcagctagactcagtggtgtataatcagatacgttcctatgttctttatttgcacc

SEQ ID NO: 68029 - DNA, 666 bp, Homo sapiens
gtaaagtctttaactggttctcaacccttactagacacagaagaattcatactggagagaaaccctacaaatgtgaacaatgtggcaaagcttttaagcagtcctcaacccttactacacataagataattcatactggagagaaaccctacagatgtgaagaatgtggcaaaacctttaaccggtcctcacaccttactacacataaaagaattcatactggagagaaaccctacagatgtgaagaatgtggcagagcttttaaccggtcctcacaccttactacacataagattattcatactggagagaaaccctacaaatgtgaagaatgtgggcaaagcttttaaccaatcctcaacccttactaaccataagagaattcatactggagagaaacccttcaaatgtgaagaatgtggcaaagactttaaccagttttcaaaccttactaaacataagaaaattcatactggagagaaaccctacaaatgtgaagaatgtggcaaagcttttaaccagtttgcaaaccttactagacataagaaaattcatactggagagaaatcctacaaatgtgaagaatgcggcaaagcttttatacagtcctcaaaccttactgaacatatgagaattcatactggagagaaaccctacaaatgtgag

SEQ ID NO: 68030 - DNA, 472 bp, Homo sapiens
aaaaattgcagctgccttctccccaagatagttttcagttccagacaaaaccatccagaactcaggaggccttctcaagtgaatgctgcagaacagaggaagagttcctagatcaagtgaagaggaagctggctcagaccagccctgagaaagacctgttgaccacaaagccttgtcactgtaaggatatcctgaagttagtgctcttacccctcacccagcattgcttggtcgttggagaaaccacctgtgcattttattacctgctggaggctgcggctgcctgcttggacctgtcaaataattatatggtctgtttcaacatgggacgtattactttagccaaaaaattggctaggaaagcccttctactgctgaaaaggaattttccttggacctgggttgggggccttttccagacattccttggaaaggaatgggctttcatgtaccctgagccacctccaaacga

SEQ ID NO: 68031 - DNA, 583 bp, Homo sapiens
  misc_feature (1)...(583): n = a,t,c or g
tgcccaagctcttgacattggccctgccggtccactgatgggtgttgtccagtataggagacaaccctgctactcactttaacctcaagacacacacgaattctcgagatctgaagacagccatagagaaaattactcagagaggaggactttctaatgtaggtcgggccatctcctttgtgaccaagaacttcttttccaaagccaatggaaacagaagcggggctcccaatgtggtggtggtgatggtggatggctggcccacggacaaagtggaggaggcttcaagacttgcgagagagtcaggaatcaacattttcttcatcaccattgaaggtgctgctgaaaatgagaagcagtatgtggtggagcccaactttgcaaacaaggccgtgtgcagaacaaacggcttctactcgctccacgtgcagagctggtttggcctccacaagaccctgcagcctctggtgaagcgggtctgcgacactgaccgcctggcctgcagcaagacctgcttgaactcggctgacattggcttcgtcatcgacggctccagcagtntggggacgggcaacttccgcac

SEQ ID NO: 68032 - DNA, 2102 bp, Homo sapiens
gggcggaggcgcaggccatgctgcggctggtgcccaccggggcccgggccatcgtggacatgtcgtacgcccgccacttcctggacttccagggctccgccattccccaagccatgcagaagctggtggtgacccggctgagccccaacttccgcgaggccgtcaccctgagccgggactgcccggtgccgctccccggggacggagacctcctcgtccggaaccgatttgttggtgttaatgcatctgacatcaactattcagcaggccgctatgacccctcagttaagcctccctttgacataggtttcgaaggcattggggaggtggtggccctaggcctctctgctagtgccagatacacagttggccaagctgtggcttacatggcacctggttcttttgctgagtacacagttgtgcctgccagcattgcaactccagtgccctcagtgaaacccgagtatcttaccctgctggtaagtggcaccaccgcatacatcagcctgaaagagctcggaggactgtcggaagggaaaaaagttttggtgacagcagcagctgggggaacgggccagtttgccatgcagctttcaaagaaggcaaagtgccatgtaattggaacctgctcttctgatgaaaagtctgcttttctgaaatctcttggctgtgatcgtcctatcaactataaaactgaacccgtaggtaccgtccttaagcaggagtaccctgaaggtgtcgatgtggtctatgaatctgttgggggagccatgtttgacttggctgtagacgccctggctacgaaagggcgcttgatagtaatagggtttatctctggctaccaaactcctactggcctttcgcctgtgaaagcaggaacattgccagccaaactgctcaagaaatctgccagcgtacagggcttcttcctgaaccattacctttctaagtatcaagcagccatgagccacttgctcgagatgtgtgtgagcggagacctggtttgtgaggtggaccttggagatctgtcttccagagggcaggtttactggcctgggagtccatattccgtgctgtcaattatatgtacatggggaaaaaacactgggaaaaattgtagttggaattacctcactctgttcaacagtaagctgttaaaaacagaacaatgacataaatcaagggagaaagaaaatgggcactttatgtctcagaattactcaaatcaatttatttttagttggtaatggatataatatttcttaaaacaaaagtaaggtgttaatgaataggtctctccttctcctcctcctcctcctcttcccttgggggaaaaaaaaaatgggctaataaaacttccctccatggctaaaagggaaaacgcttacattcaattctttagtcatggatggtctcgttccagatgttattgttccagggaactaaattcattcctgatgccagatctgatcgagtcagtatgtcttcagcttgatcagattttaaaatcagttttgaaaggggttcccgacttctttgctttgggagaatttggtcttatgctcataagcagttcatgagtgacaagtgtagcaaaagccagccatatattttcagaatctatatcctcaggaaatggtcctttttttttctataaatcaccaaccaactatctaaatggacatttgggggaattccctcccaaatttgattttgttattagaaaaatgattccgtgaacacagatgtgttttgaagaagtagcacgtaatggcttttatctaccatcaacctgataaggcacatgtgaaatggaaatgttctctttcctctgaagcagcaaattaatgttgaaaacttacatagacagaaagtaggttttggaaagggaaaccacagagattagggggacttaaaattaatataggcacaggaaagagaaaagtgtgcgctccattctcagtgggggttcaccacaaaacacgggccccaggagggaagcgctgtctaggcacacggcaaggccttagtaacagcatgctacactgctcgaggtacggtatgtcccatcgccctgtgcaccgtagagacctcagtcatct

SEQ ID NO: 68033 - DNA, 381 bp, Homo sapiens
cccacgcgtccgctttcggcttctgcatgtcaccagcatcaggagtgcctggatcctctgtgggatcatatggatccttatcatggcttcctcaataatgctcctggacagtggctctgagcagaacggcagtgtcacatcatgcttagagctgaatctctataaaattgctaagctgcagaccgtgaactatattgccttggtggtgggctgcctgctgccatttttcacactcagcatctgttatctgctgatcattcgggttctgttaaaagtggaggtcccagaatcggggctgcgggtttctcacaggaaggcactgaccaccatcatcatcaccttgatcatcttcttcttgtgtttcctgccctatcacacact

SEQ ID NO: 68034 - DNA, 875 bp, Homo sapiens
actttttttaatcgattctgatgtttggccacttgctccattatcattcttctcatctttaccttctattttcttagtatccttgctttcttttttttcagatttctcagacgatcttttctcttcttttttgacagaggcttgtgtcttgctacttctatcactcgtattttttttatctccagaacttcttgaactactcttttcatcattttctttcttcatttctttcttagagggatcaccttttactttttcaacagaaatcagctgtccatgcagctcagtgcgatgaagatgtgcaatacacctggacacctctgtgcttgaagacatagttacaatgccatagcattttgccccagaacttcgagcatttgtaactaccttttgcactcagaacctttccatatttgccaaagaggttcttcaaatcagcagctttggtattagatgaaagtccactaacccagatatttttagttgagcttccactgctaccactagtactacttgtacttcctttgtcatctttagatgatgtcttgctgtctttagattcctttgaagagctctttgcttgaccagaggccccagtagacgagggccctttcttcaaagtatccttttctttgtctccagattctgctttcttagaactttctctggcttccttctcgacagggtcacccttcacgcagtcttccttcttaccatctttatggttcgcattcatctcataatccttgctttccttctccgggctctgtgcaatggcgtcctgcccatcttttggcttacttgcttcagaatctgtaattttcacatttttacctgtttctaggaggtcatcaccatcaaaatccagagtgatg

SEQ ID NO: 68035 - DNA, 409 bp, Homo sapiens
  misc_feature (1)...(409): n = a,t,c or g
cggacgcgtgggcatgggtgagggacccaccaccccgctgcactgtgcattgtgcctcccgtgtggacgccctctctgttgttggcccgcgggtgagggacccaccaccccgctgcactgtgcattgtgcctcccgtgtggacgccctctctgttgttggcccgcgggtgagggacccaccaccccgctgcactgtgcattgtgcctcccgtgtggacgccctctctgttgttggcccgcgggtgagggacccaccacccctagggacccaccaccccgccgcactgtgcattctgcctcctgtgtggacgccctctctgttgtcagtggctttgaggtgtcagtgcttacttagatgctggtttaatgctggacccatttgttaaacgcaccttcactttgtcaaaan

SEQ ID NO: 68036 - DNA, 2627 bp, Homo sapiens
gcaatgcgaactttctgtgagtcagcaaaacaagaccgactgaagctccaaaatgaactggcacacaaagtggcagaatgcaaagctttagcattagaatgtgaaagggtcaaggaggattcagatgaacagataaagcaattagaagatgcattaaaagatgtgcagaagaggatgtatgagtcagaaggtaaagttaaacaaatgcagacccattttcttgcccttaaagaacacttaacaagtgaagcagcctcagggaatcacagactaaccgaggaactgaaggatcagttgaaagacttgaaagtaaaatatgaaggtgcttcagcagaagtggggaaattaagaaaccaaatcaaacaaaatgagatgatagtagaagagtttaagagggatgaaggcaagctgatagaagaaaataagcgattacagaaggaacttagtatgtgtgaaatggagcgagagaagaaaggaagaaaggtcacagagatggaaggccaggcaaaagaattgtcagcgaagttggccctttccattccagctgaaaaatttgaaaacatgaagagctcattatcaaatgaagtgaatgagaaagcaaaaaaattagtagaaatggaaagagaacatgaaaaatcacttagtgaaattagacagttaaagagagaacttgagaatgttaaggccaagcttgctcagcacgtcaaaccagaggaacatgaacaggttaagagcagattagaacagaaatcaggagaacttgggaagaagatcactgagttaacattgaaaaatcagacactacaaaaggaaattgaaaaagtttatttggataataagctcctcaaggagcaagcacataacttaacaattgaaatgaaaaatcattatgttcctttaaaagtaagtgaagacatgaaaaagtcacatgatgcaattattgatgatcttaatagaaagcttttagatgtaacacaaaaatatacagaaaagaagttggaaatggagaaattgctactggaaaatgacagcttaagtaaggatgtaagccgcctagaaactgtgtttgtacctcctgagaaacatgaaaaagagataatagctctgaaatccaatattgttgaacttaagaaacagctgtctgaacttaagaaaaaatgtggtgaagaccaggagaaaatacacgctctcacatctgaaaacactaacttgaagaagatgatgagtaatcagtatgtgccagttaaaacccatgaagaggttaaaatgacactgaatgacacgttagccaaaactaacagagaattattagatgtgaagaaaaaatttgaagatataaatcaggaatttgtaaaaataaaagataagaatgaaatattaaaaagaaacctggaaaacactcagaaccaaataaaagctgagtacatcagcctggcagagcacgaggcaaagatgagctcgctaagtcagagcatgagaaaggtgcaggatagtaatgctgaaatcttggccaactacagaaaaggccaagaagagattgtgacactgcatgccgaaattaaagcccagaagaaggagctcgacacaatacaagaatgcattaaggtaaaatacgccccaattgtcagctttgaggagtgcgagagaaaatttaaagcaacagagaaagaactaaaagaccagttatcagagcagacacaaaagtatagtgtcagtgaagaagaagtcaagaaaaacaagcaagagaatgacaagttaaagaaggagatttttacccttcagaaagatttgagagataagacagttctcattgagaagtctcatgaaatggaaagagcattaagcagaaaaacagacgagctaaacaaacagttaaaagacttgtcacagaaatacacggaagtaaagaatgtgaaagagaagctagtagaagaaaatgccaaacagacttctgagatacttgcagtgcaaaatcttttgcaaaaacaacatgttccattggaacaggttgaggctctgaaaaaatctcttaatggcacaattgaaaatctaaaggaagaactgaagagtatgcaaaggtgttacgagaaagagcagcagacagtgaccaaactgcatcaattgttggagaatcaaaagaactcttctgtacccctggcagagcatttgcagattaaagaagcatttgagaaagaagttggaatcataaaagccagcttgagagaaaaggaagaagaaagccaaaacaaaatggaagaagtctccaaacttcagtcggaggttcagaatactaaacaagcattaaaaaaattagagactagagaggtagttgacttgtctaaatataaagcaacaaaaagtgatttggagacacagatttctagcttaaatgaaaaattggccaatctgaatagaaagtatgaggaagtatgtgaggaagttttgcatgccaaaaagaaggaaatatctgcaaaagatgagaaggaattactgcatttcagcattgagcaagaaattaaggatcagaaggaacgatgtgataagtccttaacaacaatcacagagttacaaagaagaatacaagaatctgctaaacaaatagaagcaaaagataataagataactgg

SEQ ID NO: 68037 - DNA, 1086 bp, Homo sapiens
ctatgggctaatgaagctggtgctgcccagtgccttgcctgctgagctggcccgcgtcattgtcctggacacggatgtcaccttcgcctctgacatctcggagctctgggccctctttgctcacttttctgacacgcatgcgatcggtcttgtggagaaccagagtgactggtgacctgggcaacctctggaagaaccacatgccctggcctgccttgggccggggatttaacacaggcgtgatcctgctgcggctggaccgactccggcaggctggctgggagcagatgtggaggctgacagccaagcgggagctccttagcctgcctgccacctcactggctgaccaggacatcttcaacgctgtgatcaaggagcacccggggctagtgcagcgtctgccttgtgtctggaatgtgcagctgtcagatcacacactggccgagcgctgctactctgaggcgtctgacctcaaggtgatccactggaactcaccaaagaagcttcgggtgaagaacaagcatgtggaattcttccgcaatttctacctgaccttcctggagtacgatgggaacctgctgcggagagagctctttgtgtgccccagccagcccccacctggtgctgagcagttgcagcaggccctggcacaactggacgaggaagacccctgctttgagttccggcagcagcagctcactgtgcaccgtgtgcatgtcactttcctgccccatgaaccgccacccccccggcctcacgatgtcacccttgtggcccagctgtccatggaccggctgcagatgttggaagccctgtgcaggcactggcctggccccatgagcctggccttgtacctgacagacgcagaagctcagcagttcctgcatttcgtcgaggcctcaccagtgcttgctgcccggcaggacgtggcctaccatgtggtgtaccgtgaggggcccctataccccgtcaaccagcttcgcaacgtggccttggcccaggccctcacgccttacgtcttcctcagtgacattgacttcctgcctgcctattctctctacgactacctcaaggcctccattgagc

SEQ ID NO: 68038 - DNA, 1908 bp, Homo sapiens
actcggcagcggaccaagatggcggcgccctgtgagggacaagcgtttgccgtaggggttgaaaagaattggggtgcagtagttcgctccccagaagggaccccccagaaaatccggcagctgatagatgaggggattgccccggaagagggaggcgtggacgcgaaggacacgtctgccacatcccagtcagttaatggatcaccccaagcggaacaaccttcattggaatctacaagcaaagaagccttctttagcagagtggaaacattttcttctttgaaatgggcaggtaagccctttgagctgtctccactcgtctgtgcaaaatatggctgggtcacagtggaatgtgatatgctcaagtgctctagctgtcaagcttttctctgtgccagtttacaaccagcttttgactttgacagatataagcaacgatgtgctgagctgaagaaagccttgtgtactgcccatgagaagttctgtttctggccagacagcccatccccagaccgatttgggatgttgcccctggatgagcctgctattcttgttagtgaattcctagatcgttttcaaagcctttgtcacttggacctccagcttccttccctaaggccggaggacttgaaaactatgtgcttgacagaagacaagatcagtcttctcctacacttgcttgaagatgaacttgatcaccgaactgatgagagaaaaactacaatcaaattaggctcagacatccaagtccacgtcactgcctgtattctctctgtgtgtggctgggcgtgtagttcctctttggaatccatgcagctctccctgatagcatgttcgcaatgtatgaggaaggtggggctctggggcttccagcagattgaatcgtccatgactgacctggatgcatcctttggcctgaccagctccccaatcccaggccttgaggggcgaccagagcgcttacctctggtgcctgaatctcctcggaggatgatgacccggagccaggatgccactttctccccaggctcagagcaggctgaaaagagccctggtcccattgtctctcgaactcggagctgggactcttccagtcctgttgaccgtcctgagccagaggctgctagccccaccaccagaactcgcccagtgacccgaagcatgggaacaggagacacccctggcctggaggtaccatctagccctctgcggaaagccaagcgagctcgcctctgctcctccagcagttcggacacatcttcccgaagcttctttgatcccacctctcagcatagagactggtgcccttgggtgaatatcacacttggcaaagaaagcagggagaatggtggaactgaaccagatgccagcgccccagcagagccaggctggaaagcagtgctgaccatcctcttggcgcacaaacagtctagccagccagctgaaacggactccatgagtctctctgagaaatcaaggaaagtattccgaatatttcggcagtgggaatctctgtgctcatgctgaagatactccagcgccttcctggagatagctggaatgagagtgactttttgaaaaattaaggctgagttcctttcggtcagctgacactaagtttttcctgttctgggttaatcataaggagccccctgccatagcaaaggcagtgagtgtcaactatctgcatctggctgagagagacccgtttcctttcagggatgtggacagggtaagggcagcaagcatggttctgttaaaggagtgtggggttaacagactagaaggaagactaaggacctgaccacccatttcagcatcttcaatgtggagcagtgttctgaggactcttctatcctaggactatgacagtgtgtattaataaaatatttgctaagaaaaaaaaaa

SEQ ID NO: 68039 - DNA, 473 bp, Homo sapiens
attcccgggtcgacgatttcgtgggaaccaggaataagaggcatttccttgaagggagaagaaggaatcatgggctttcctggactgaggggttaccctggcttgagtggtgaaaaaggatcaccaggacagaagggaagccgaggcctggatggctatcaagggcctgatggaccccggggacccaagggagaagccggagacccagggccccctggactacctgcctactcccctcacccttccctagcaaaaggtgccagaggtgacccgggattcccaggggcccaaggggagccaggaagccagggtgagccaggagacccgggcctcccaggtccccctggcctctccatcggagatggagatcagaggagaggcctgccgggtgagatgggacccaagggcttcatctggagaccccggcatccctgcgctctacgggggcccacctggacctgatggaaagcgag

SEQ ID NO: 68040 - DNA, 1132 bp, Homo sapiens
  misc_feature (1)...(1132): n = a,t,c or g
ggcacgagcggcacgagcggcacgagggggccctcagccaagatgcactcttgagaatctccatcccactggactcaaacatgaggccagagaagtgtcgtcgctttgttcatcctcagtggcagctccttcacctgaatgggaccttccccaacacaagtgacgcagacatggagccctgtgtggatggctgggtgtatgacagaatctccttctcatccaccatcgtgactgagtgggatctggtatgtgactctcaatcactgacttcagtggctaaatttgtattcatggctggaatgatggtgggaggcatcctaggcggtcatttatcagacaggtttgggagaaggttcgtgctcagatggtgttacctccaggttgccattgttggcacctgtgcagccttggctcccaccttcctcatttactgctcactacgcttcttgtctgggattgctgcaatgagcctcataacaaatactattatgttaatagccgagtgggcaacacacagattccaggccatgggaattacattgggaatgtgcccttctggtattgcatttatgaccctggcaggcctggcttttgccattcgagactggcatatcctccagctggtggtgtctgtaccatactttgtgatctttctgacctcaagttggctgctagagtctgctcggtggctcattatcaacaataaaccagaggaaggcttaaaggaacttagaaaagctgcacacaggagtggaatgaagaatgccagagacaccctaaccctggagattttgaaatccaccatgaaaaaagaactggaggcagcacaaaaaaaaaaaccttttttgggggaaaggctccacatgcccaacatatgtaaaaggatctccctcctgccctttacaaaatttgcaaactttatggcctattttggccttaatctccatggtccaagcatctggggaacaatgttttcctgttgcaaactctttttggggcagtcatcctcctggccaactggtgttgcaccttgggcactgggggtcagggagagtctccagcagggggagggtgaattgtttgggactatttgttcttcaggtttgggantaaaacattntattttngttta

SEQ ID NO: 68041 - DNA, 650 bp, Homo sapiens
ggcacgagcatgattagacccttgaggagtatgaattgctgcagtgattccactcaatgatagaccttgtctgaatgttgcgctctgtgatgctgctgggcccaaggttaaggttgtggaagtggaggcatattcaaaagcacacgtacttgacaagcagccagctatagtgctttgcatctgttggatgtagaggttgtgctctgggcctaacaaactattgctcaaatgaatttcccatccttttttttagggaacactcatagggtggaccaaaggtttcaaggccactgactgtgaaggggaggacgtggtggacatgctcagggaagccatcaagaggagaaacgagtttgacctggacattgttgcagtcgtgaatgatacagtggggaccatgatgacctgtggctatgaagatcctaattgtgagattggcctgattgcaggaacaggcagcaacatgtgctacatggaggacatgaggaacatcgagatggtggaggggggtgaaggggagatgtgcatcaatacagagtggggaggatttggagacaatggctgcatagatgacatccggacccgatacgacacggagatacgagaaaatgaccagtgggatgtacttgggggagattgtgcgggaaaat

SEQ ID NO: 68042 - DNA, 828 bp, Homo sapiens
tatatcaacattgatatagatccagggtacttaaaaacagccttaggcctttatagaagctgcctgctcaccgaaaataagatccgctccctaatatacaatgccttgaatcccatgcataaagagatttcccagaggtccacagccacaatgtatataattggaggctattactggcatcctttatcagaggttcacatatgggatcctttgacaaatgtttggattcagggagcagaaataccagattataccagggagagctatggtgttacatgtttaggacccaacatttatgtaactgggggctacaggacggataacatagaagctcttgacacagtgtggatctataacagtgaaagtgatgaatggacagaaggtttgccaatgctcaatgccaggtattaccactgtgcagtcaccttgggtggctgtgtctatgctttaggtggttacagaaaaggggctccagcagaagaggctgagttctatgatcctttaaaagagaaatggattcctattgcaaacatgattaaaggtgtgggaaatgctactgcctgtgtcttacatgatgttatctacgtcattggtggccactgtggctacagaggaagctgcacctatgacaaagttcagagctacaattccgatatcaacgaatggagcctcatcaccttcagtccacatccagaatacatgaagaagatggccatctgcaaaccaggaagcaggtcatcatgagacaccagatctaacagcatcttgatcttggacttctcagccttcaaaactgcgagcaataaatttctgttgtttaagacaaaa

SEQ ID NO: 68043 - DNA, 1405 bp, Homo sapiens
cgataggtactcctgtattgtgagtgcggccaaaaactctctcttactgatgcagagaaagttctcagagcccaacacttacatcgatggccccagcagtgcacaggcccaggcctcctccccgacgttgtcctgcctggacaatgcaactgaggccctcccggcagactcaggcccaggtcccaccccagatgagccctgtatgacgacgtgggacctgtcagagctcacagctgcggtggagcctaccgaggaagccacccctgttgcagatgacccaaatgagagagaatctgaccgggtgtacctggacctcacacctgtcaagtcctttctgcatggccccagcagtgcacaggcccaggcctcctccccgacgttgtcctgcctggacaatgcaactgaggccctcccggcagactcaggcccaggtcccaccccagatgagccctgcataaagtgtccagagaacctgggagaacagcagctggagagtttggagccagaggatccttccctgagaatcaccaccgtcaaaatccagacggaacagcagagaatctccttcccaccgagctgcccggatgccgtggtggccaccccacctggtgccagcccacctgtgaaggacaggttgcgcgtgaccagtgcagagatcaagcttggcaagaatcggacagaagctgaggtgaagcggtacacagaggagaaggagaggcttgaaaagaagaaggaagaaatccgggggcacctggctcagctccggaaagagaaacgggagctaaaggaaaccctactgaaatgcacagacaaggaagtcctggcgagcctggagcagaagctgaaggaaattgacgaggagtgccggggcgaggagagcaggcgcgtggacctggagctcagcatcatggaggtgaaggacaacctgaagaaggctgaggcagggcctgtgacgttaggcaccaccgtggacaccacccacctggagaatgtgagcccccgccccaaagctgtcacacctgcctctgccccagactgtaccccagtcaactctgcaaccacactcaagaacaggcctctctcggtcgtggtcacaggcaaaggcactgtactccagaaagccaaggaatgggagaagaaaggagcaagttagaaaacaagcttcatctaaagactctcatgtcaatgtggaccttggtgacaatcctgctttgttaaagcaaaaactatgcgaaagggtgagtctgtttagaagaaaaagcaaagactgaggtactgtgaatggagagcttcagctaagaggaggctctgtcccttttcagagccaaaggaaataatacaacaaaaaggaggcttctttggagacctaagtctattggatgtaaacaagacgttgtatttaggg

SEQ ID NO: 68044 - DNA, 1023 bp, Homo sapiens
ttgctgcgagattcggcacgaggggatttgggggttctttgagctgccccattttatcccctccccaacttttgccgcttcctccaggccattttctttggcggtattgatgtgtcaatccgcggggaggtctggcccttcctgctgcgctattacagccacgagtccacgtcggaggagcgggaggcgctgcggctgcagaagcgaaaggagtactctgagatccagcagaaaaggctctccatgactcccgaggagcacagagcgttctggcgtaatgtgcagttcactgtggacaaagacgtggtccggacagatcggaacaaccagttcttccggggggaagacaatcccaatgtggagagcatgaggaggatcctgctgaactacgccgtgtacaaccctgccgtcggctattcccaagggatgtcggacctggtggcgcccatcttggccgaggtcctggatgagtcagacaccttctggtgctttgtgggtttgatgcagaacacgatcttcgtcagctcaccccgggacgaggacatggagaaacaactgctgtacctgcgcgagctgctgcggctgacgcacgtgcgcttctaccagcacctggtctcgctgggcgaggacggcctgcagatgctcttctgccaccgctggctccttctgtgcttcaagcgggagttccccgaggccgaagcgctgcggatctgggaggcctgctgggcccactaccaggtgaccagggcaggggccagggctggggaggttgggaccatggcccctgaaccaccgtggccaccctgcctgctgcccctgttcgactcgccgccccccacccacagccacacattagccccccatacggcgactgccttaccgtcccacgtggctggcttcagaccttacagctcgcctccccagtcactgaaatcgatgcaaaatggccgctgactgcactcattaccactttactgggctggagctcctcctgtcacaacccctcagtgtgagtgacactgg

SEQ ID NO: 68045 - DNA, 519 bp, Homo sapiens
gaatggatgacacaaatggaaatgagtagcctgaacacttacattgtccgccgttacatagcaacacccaatggcgtcctcagaatttatcctgcttccctcatggacaaagcatttgatcccactaggagacaatggtatctccatgcagtagctaatccagggttgatttctttgactggtccttacttagatgttggaggagctggttatgttgtgacaatcagtcacacaattcattcatccagtacacagctgtcttctgggcacactgtggctgtgatgggcattgacttcacactcagatacttctacaaagttctgatggacctattacctgtctgtaaccaagatggtggcaacaaaataaggtgcttcataatggaggacaggggttatctggtggcgcacccgactctcatcgaccccaaaagacatgcacctgtggagcagcagcacatcacccacaaggagcccctgggtagcaaatgatattcctcaaccaccccaactttgtaa

SEQ ID NO: 68046 - DNA, 1241 bp, Homo sapiens
aagtcagtctgttcttactgaatttcttctcttgaactttctgtttattccttattttggacacagtagacaattttgctcaatttcacttctgcctttcttgggttcaggtttggtaccaataattggtaaagctgatgtaattctaagtttttctcatccagcgcataggaaagcttgcctataggtatctgatttaattattttgaatagtcaatgggctaaccaaggagaagatgaggggatcaaatatctgatgtttaaattaaactagtattcatctctttactttaaatttggtctcttaaaggtctcgcattttgtttcatttgtagtgccacagtttcaggattaatggtattctttcctttcaggctttaaatgaagaaattgttaatagaaagaagaatgtagatcaagctattaaaaatggtcaggctcttctaaaacaaaccacaggtgaggaggtgttacttatccaggaaaaactagatggtataaagactcgttacgcagacatcacagttactagctccaaggccctcagaactttagagcaagcccggcagctggccaccaagttccagtctacttatgaggaactgaccgggtggctgagggaggtggaggaggagctggcaaccagtggaggacagtctcccacaggggaacagataccccagtttcagcagagacagaaggaattaaagaaggaggtcatggagcacaggctggtgttggacacagtgaatgaggtgagccgtgctctcttagagctggtgccctggagagccagagaagggctggataaacttgtgtccgatgctaacgagcagtacaaactagtcagtgacactattggacaaagggtggatgaaattgatgctgctattcagagatcacaacagtatgagcaagctgccgatgcagaactagcttgggttgctgaaacaaaacggaaactgatggctctgggtccaattcgcctggaacaggaccagaccacagctcagcttcaggtacagaaggctttctccattgacattattcgacacaaagattcaatggatgaactcttcagtcaccgtagtgaaatctttggcacatgtggggaggagcaaaaaactgtattacaggaaaagacagagtctctaatacagcaatatgaagccattagcctactcaattcagaggcgttatgcccgcctagagcgggcccaggtcttagtaaaccagttttg

SEQ ID NO: 68047 - DNA, 490 bp, Homo sapiens
ggagagcccactgaacctttgcatagaggagcaattcgagccccatggacacagaccctccccaggagattcggcggaggtttggcaagaaggtaacgtcattccagcccttgctgttcactgaggcgcaccgagagaagttccaacgcagctgtctccaccagacggtgcaacagttcaagcgcttcattgagaactaccggcgccacatcggctgcgtggccgtgttctacgccatcgctggggggcttttcctggagagggcctactactacgcctttgccgcacatcacacgggcatcacagacaccacccgcgtgggaatcatcctgtcgcggggcacagcagccagcatctctttcatgttctcctacatcttgctcaccatgtgccgcaacctcatcaccttcctgcgagaaaccttcctcaaccgctacgtgcccttcgacgccgccgtggacttccatcgcctcattgcctccaccgccat

SEQ ID NO: 68048 - DNA, 371 bp, Homo sapiens
taatgctaattgactccagcttgtctcaaacactccctacatcctgctttcttcccttttcaaacattgttcccagaagaaaagcaggagctggcatccccagtacgctcacatctcccctgtccctcatctgcaaggacacgaaagctatgtgaccttctgccagctggaggatgaggctgccttcacatgcagcgccgactgcaccatcaggaggtgggacgtgctgaccgggcagtgtctgcaggtgtaccgaggacacacgtccatcgtgaacaggatcctggttgccaacaaccagctcttcagcagctcctatgaccggacagctcgggtctggagtgtggacaaggggcagatgtcccgggagt

SEQ ID NO: 68049 - DNA, 422 bp, Homo sapiens
agaaatcataatggagagaaaccttataaatgtcatgaatgtggcaaagtcttcactcaagtttcacatcttgcacgacatcagaaaattcacactggagagaaaccttacaaatgtaatgagtgtggcaaagtcttcactcagaattcacaccttgcaaatcatcagagaatccacactggagagaaaccttacaaatgccatgtgtgtggtaaggtctttaggcacagttcatggtttgtacagcatcagagaagtgttcatgagagagtccttacaaactgagtttggcaaactctatcataagttctagcagtaatcaacatccgagagtctatactagaaagaaatcatttaaatgtactatatgtggcacaggctgtatcgagacctaccaaatcactagacatcgaaacattcat

SEQ ID NO: 68050 - DNA, 1376 bp, Homo sapiens; identical to SEQ ID NO: 67982

SEQ ID NO: 68051 - DNA, 794 bp, Homo sapiens
tacacactcttgtttggagagagtgtgttgaatgatgcagtggccatagtccttacatattctatatccatttacagtcccaaggagaatccaaatgcatttgatgccgcagcattcttccagtctgtggggaatttcctgggaatcttcgctggctcatttgcaatggggtctgcgtatgccatcattacagcactgttgaccaaatttaccaagctgtgtgagttcccgatgctggaaaccggcctgtttttcctgctttcttggagtgccttcctgtctgccgaggctgccggcctaacagggatagttgctgttctcttctgtggagtcacacaagcacattatacctacaacaatctgtcttcggattccaaaataagaactaaacagttgtttgaatttatgaactttttggcggagaacgtcatcttctgttacatgggcctggcactgttcacgttccagaatcatatctttaatgctctttttatacttggagcctttctagcaatttttgttgccagagcctgcaacatatatcccctctccttcctcctgaatctaggccgaaaacagaagatcccctggaactttcagcacatgatgatgttttcaggtttgcgaggagcgatcgcatttgccttagctattcggaacacagaatctcagcccaaacaaatgatgtttaccactacgctgctcctcgtgttcttcactgtctgggtattttggaggaggaacaacccccatgtttgaattggcttcagatcagagtttggcgtgggacctgg

SEQ ID NO: 68052 - DNA, 1095 bp, Homo sapiens
gtccatgcagctgatgctgagccagctgatccagcaactgaggaccaacatccagcttcctgcctgcctccgtgtcattggctacctgcggcgcatggacgtcttcactgaggctgagttgagggtgaagtttcttcaggcccgagatgcttggctccggtccatcctgactgccattcctaatgatgatccctatttccatattacaaaaaccatcgaggcctcccgtgtccatctctttgatatcatcacccagtaccgtgccatcttctcagacgaggacccactgctgccccctgccatgggtgagcacactgtgaatgagagtgccatcttccatggctgggtgctacagaaggtctcacaattcctgcaggtgctggagaccgacctttaccggggcataggcggccacctggactctctgctgggccagtgcatgtactttgggctgtccttcagccgggtgggagctgatttccggggtcagttggctcctgttttccagcgggtggccatcagcactttccagaaagcaattcaggaaacagtggagaaattccaggaagaaatgaactcctacatgctcatctcggctccagccatcctgggcaccagtaacatgcctgctgctgtgccagccacccagccggggacgctgcagccacccatggtgctcctagatttcccacccctcgcctgctttctcaacaatattctggttgccttcaatgatctgcgcctctgctgccctgtggccctggcgcaggatgtgactggggccttggaagatgcccttgccaaggtaactaaaataatcctggccttccatcgcgctgaagaggctgccttcagcagcggggagcaagagctctttgtccagtttctggcactgtctttcctgggaagaccttgtttccgtattttaaatcgctgtctccaagtcctttttccaccagctcagatagcacagactttaggtaagagaatgaaaattctgtaaactgccttactgatgtgtaattcacatactaaataattcatccatttgtgtaagtcagtgttttttagtaaatatgaatccaattttagaat

SEQ ID NO: 68053 - DNA, 589 bp, Homo sapiens
  misc_feature (1)...(589): n = a,t,c or g
ccacaattcagtggcttgtttgctttcaactgtcaatgtcaaacctggaaacttcttcgagaggactcctgtaatgctgggcctgaggacatccagtctcgaataggacactgcatgttattccactcaaaaaatcgttgcttatatgtatttggtggccagcgatcaaagacctatttgaatgatttctttagttatgatgtggactctgatcatgtagacataatatcagatggcaccaagaaagactctgggatggttccaatgacaggatttacacagagagcaactattgatccagaactgaatgaaatacacgtcttatctggactcagcaaagataaggaaaagagggaagaaaatgttagaaattcattctggatttatgacattgtgaggaatagttggtcttgtgtctataagaatgatcaagctggcaaaggataatccaacttaaaagtcttcagggaaggaaggaaccatgtccaaggttttgcccttcagcttgtatacggtgaggctacacaggttccttacttatttggntgggatnccggggaatcttgctcttccaaggtgnggttnggtg

SEQ ID NO: 68054 - DNA, 429 bp, Homo sapiens
tttcgtccggacagccgcgcgctgagggtctcggggcgggcgccgcgggacctctccgggccatggcagcccctgtcaaagggaacaggaagcagtccacggagggtgacgccctagacccacctgcatcccccaaacctgctggcaagcagaacggaatccagaaccccatctcgctggagttaacctgtggaagatctacaaagcagtggagaagctgggggcctatgagctggtgaccgggcgccgcctctggaagaacgtgtacgacgagctggggggcagcccaggcagcaccagcgcggccacgtgcacgcgccgccactacgagaggctggtcctgccatacgtgcggcacctgaagggggaggatgacaagccgctgcccacctccaagcccaggaaacagtacaagatggctaaggagag

SEQ ID NO: 68055 - DNA, 437 bp, Homo sapiens
acggttcatcgtgccaagggcctcaagccattgtcctcatgctccgcggatgcctatgtcaaagccaatctgctgccaggggccagcaaggccagccagcttcggacacacaccgttcggggcacgagggtacctgtctgggaggagacactcacctatcacggcttcacccgccaggatgctgagtgcaagacccttatgctgtgtgtgtgcgaggacccatggtacagcgacagtggcaggcaccttccctgggggagctgcgggtgcccctgaggaagctggtgccaaaccgagccaggagctttgacatctgtctggagaagcggaggctggccaagaggcccaagagcctggacacagcctgtggcatgtccctctatgaggaggaggtggagacagaggtggcctgggaggaatgtgggcacgtcctactg

SEQ ID NO: 68056 - DNA, 720 bp, Homo sapiens
gcacaggaaaaccaccccctgctcctcctcctgaccctcccaagctattctttgacatccgtaaagatgccgttaaccgtggcgagagtccttccctggggactcaggcttcgttcccagatgtgagaccacctgtgctaggcccccgggttacctctgatcccgaaaaccggaagagcaaagaatcttaccttttgcagccgagttatccagccaaggatgccacttcctccagtgcagcccagccggaggtaatagttgtccctctctacctggttaatactgacagagggcaagaaggcactgccagacctccaacacctctggggcctcttggctgcgtccccacaatcccagcgactgcctctgccgcctcacctctgaccttcccgactctagatgatttcattccccctcatctgcagaggtggccccaccacagccagccagcccgcgcctctggctcctttgcccccattagccagacgccaccatccttctcaccaccacctccgctggtccctcctgccccggaggacctccgcagagtctcggagcctgacctcacgggagcttgtttcggagtaccgattccagtcctcttactaaatgaagttttcttcttccccttattgggactgattcccaagctttccatcaagttaggaaggcttccattccgccttattcctccaaaaagattggcaaatctaactattg

SEQ ID NO: 68057 - DNA, 1174 bp, Homo sapiens
cttttgtcatgaagaaggtgatggattgacagatggaccagcaaggctactcaaccttgacttggatctgtgggtccacttgaactgcgctctgtggtccacggaggtctatgagactcaggctggtgccttaataaatgtggagctagctctgaggagaggcctacaaatgaaatgtgtcttctgtcacaagacgggtgccactagtggatgccacagatttcgatgcaccaacatttatcacttcacttgcgccattaaagcacaatgcatgttttttaaggacaaaactatgctttgccccatgcacaaaccaaagggaattcatgagcaagaattaagttactttgcagtcttcaggagggtctatgttcagcgtgatgaggtgcgacagattgctagcatcgtgcaacgaggagaacgggaccatacctttcgcgtgggtagcctcatcttccacacaattggtcagctgcttccacagcagatgcaagcattccattctcctaaagcactcttccctgtgggctatgaagccagccggctgtactggagcactcgctatgccaataggcgctgccgctacctgtgctccattgaggagaaggatgggcgcccagtgtttgtcatcaggattgtggaacaaggccatgaagacctggttctaagtgacatctcacctaaaggtgtctgggataagattttggagcctgtggcatgtgtgagaaaaaagtctgaaatgctccagcttttcccagcgtatttaaaaggagaggatctgtttggcctgaccgtctctgcagtggcacgcatagcggaatcacttcctggggttgaggcatgtgaaaattataccttccgatacggccgaaatcctctcatggaacctcctcttgccgttaaccccacaggttgtgcccgttctgaacctaaaatgagtgcccatgtcaagaggtttgtgttaaggcctcacaccttaaacagcaccagcacctcaaagtcatttcagagcacagtcactggagaactgaacgcaccttatagtaaacagtttgttcactccaagtcatcgcagtaccggaagatgaaaactgaatggaaatccaatgtgtatctggcacggtctcggattcaggggctgggcctgtatgcttgctcgagacattgagaaaca

SEQ ID NO: 68058 - DNA, 1410 bp, Homo sapiens
atctggttccattttatcagatatcagctttgacaagactgatgaatcactggattgggactcttctttggtgaagactttcaaactgaagaagagagaaaagaggcgctctactagccgacagtttgttgatggtccccctggacctgtaaagaaaactcgttccattggctctgcagtagaccaggggaatgaatccatagttgcaaaaactacagtgactgttcccaatgatggcgggcccatcgaagctgtgtccactattgagactgtgccatattggaccaggagccgaaggaaaacaggtactttacaaccttggaacagtgactccaccctgaacagcaggcagctggagccaagaactgagacagacagtgtgggcacgccacagagtaatggagggatgcgcctgcatgactttgtttctaagacggttattaaacctgaatcctgtgttccatgtggaaagcggataaaatttggcaaattatctctgaagtgtcgagactgtccgtgtggtctctcatccagaatgtcgggaccgctgtccccttccctgcattcctaccctgataggaacacctgtcaagattggagagggaatgctggcagactttgtgtcccagacttctccaatgatcccctccattgttgtgcattgtgtaaatgagattgagcaaagaggtctgactgagacaggcctgtataggatctctggctgtgaccgcacagtaaaagagctgaaagagaaattcctcagagtgaaaactgtacccctcctcagcaaagtggatgatatccatgctatctgtagccttctaaaagactttcttcgaaacctcaaagaacctcttctgacctttcgccttaacagagcctttatggaagcagcagaaatcacagatgaagacaacagcatagctgccatgtaccaagctgttggtgaactgccccaggccaacagggacacattagctttcctcatgattcacttgcagagagtggctcagagtccacatactaaaatggatgttgccaatctggctaaagtctttggccctacaatagtggcccatgctgtgcccaatccagacccagtgacaatgttacaggacatcaagcgtcaacccaaggtggttgagcgcctgctttccttgcctctggagtattggagtcagttcatgatggtggagcaagagaacattgaccccctacatgtcattgaaaactcaaatgccttttcaacaccacagacaccagatattaaagcagtccctggaggaggattgtgtgtccattttacagctggagaagccgagatccagaaaggacccccaagttgtgggcagaataaatctacagcagcttttaactattaaaccaacttagattttggtagtctttcaa

SEQ ID NO: 68059 - DNA, 1443 bp, Homo sapiens; identical to SEQ ID NO: 68012
  misc_feature (1)...(1443): n = a,t,c or g

SEQ ID NO: 68060 - DNA, 520 bp, Homo sapiens
  misc_feature (1)...(520): n = a,t,c or g
cgacccacgcgtccggaagcctttagttattcctcaacttttcgaagacatatgatttacacactggagagaagccacataaatgtaaagaatgtggggaggccttcagttattcttcggcttttcgaagacacatgataacacacactggagagaaaccctacgaatgcaaacaatgtgggaaaaccttcatttatctccagtcctttcgaagacatgaaaggattcacactggagagaaaccctacgaatgcaaacagtgtgggaagaccttcatttatccccagtcctttcgaagacatgaaaggactcatggtggagagaaaccctatgaatgcaaccagtgcgggaaagcattcagtcacccctcctcctttcgaggacacatgagggtgcacactggagagaaaccctatgagtgcaagcaatgtgggaaaactttcaattggcccatatctttacggaaacatatgagaacacatactagagagaaacccttatgnattgtaagcagtgtggg

SEQ ID NO: 68061 - DNA, 1723 bp, Homo sapiens
cggaagccttctctggggctgcaaggacctgagctcagcttccgccccagccagggaagcggcaggggaaagcaccggctccaggccagcgtgggccgctctctcgctcggtgcccgccgccatgtgggccgtcctgaggttagccctgcggccgtgtgcccgcgcctctcccgccgggccgcgcgcctatcacggggactcggtggcctcgctgggcacccagccggacttgggctctgccctctaccaggagaactacaagcagatgaaagcactagtaaatcagctccatgaacgagtggagcatataaaactaggaggtggtgagaaagcccgagcacttcacatatcaagaggaaaactattgcccagagaaagaattgacaatctcatagacccagggtctccatttctggaattatcccagtttgcaggttaccagttatatgacaatgaggaggtgccaggaggtggcattattacaggcattggaagagtatcaggagtagaatgcatgattattgccaatgatgccaccgtcaaaggaggtgcctactacccagtgactgtgaaaaaacaattacgggcccaagaaattgccatgcaaaacaggctcccctgcatctacttagttgattcgggaggagcatacttacctcgacaagcagatgtgtttccagatcgagaccactttggccgtacattctataatcaggcaattatgtcttctaaaaatattgcacagatcgcagtggtcatgggctcctgcaccgcaggaggagcctatgtgcctgccatggctgatgaaaacatcattgtacgcaagcagggtaccattttcttggcaggaccccccttggttaaagcggcaactggggaagaagtatctgctgaggatcttggaggtgctgatcttcattgcagaaagtctggagtaagtgaccactgggctttggatgatcatcatgcccttcacttaactaggaaggttgtgaggaatctaaattatcagaagaaattggatgtcaccattgaaccttctgaagagcctttatttcctgctgatgaattgtatggaatagttggtgctaaccttaagaggagctttgatgtccgagaggtcattgctagaatcgtggatggaagcagattcactgagttcaaagccttttatggagacacattagttacaggatttgctcgaatatttgggtacccagtaggtatcgttggaaacaacggagttctcttttctgaatctgcaaaaaagggtactcactttgtccagttatgctgccaaagaaatattcctctgctgttccttcaaaacattactggatttatggttggtagagagtatgaagctgaaggaattgccaaggatggtgccaagatggtggccgctgtggcctgtgcccaagtgcctaagataaccctcatcattgggggctcctatggagccggaaactatgggatgtgtggcagagcgtatagcccaagatttctctacatttggccaaatgctcgtatctcagtgatgggaggagagcaggcagccaatgtgttggccacgataacaaaggaccaaagagcccgggaaggaaagcagttctccagtgctgatgaagcggctttaaaagagcccatcattaagaagtttgaagaggaaggaaacccttactattccagcgcaagggtatgggatgatgggatcattgatcc

SEQ ID NO: 68062 - DNA, 1841 bp, Homo sapiens
gaaaagatgatcgaagtcgtgagagagagagagaaagacgtagatcgagagaaagatcacctcagaggaaacgttcccgggaaagatctccacgaagagagcgagagcgatcacctcggagagttcgacgtgttgttccacgttacacagttcagttttcaaagttttctttagattgtcccagttgtgacatgatggaactaaggcgccgttatcaaaatttgtatatacctagtgacttttttgatgctcaatttacatgggtggatgctttccctttgtcaagaccatttcagctgggaaattactgcaatttttatgtaatgcacagagaagtagagtccttagaaaaaaatatggccattcttgatccaccagatgctgaccacttatacagtgcaaaggtaatgctgatggctagccctagtatggaagatttatatcataagtcatgtgctcttgctgaggacccacaagaacttcgagatggattccaacatcctgctagacttgttaagtttttagtgggcatgaaaggcaaggatgaagctatggccattggaggccactggtctccttcgttggatggaccagacccagaaaaagatccctctgtgttgattaagactgctattcgttgttgtaaggctctgacaggcattgatctaagtgtgtgcacacaatggtaccgttttgcagagattcgctaccatcgccctgaggagacccacaaggggcgtacagttccagctcatgtggagacagtggttttatttttcccggatgtttggcattgccttcccacccgctcagagtgggaaaccctctcccgaggatacaagcagcagctggtcgagaagcttcagggtgaacgcaaggaggctgatggagaacaggatgaagaagagaaggatgatggtgaagctaaagaaatttctacacctacccattggtctaaacttgatccaaagacaatgaaggtaaatgacctccgaaaagaattagaaagtcgagctcttagttccaaaggattaaaatcccagttaatagcccgattgacaaaacagcttaaagtagaggaacaaaaagaagaacagaaggagttagagaaatctgaaaaagaagaggatgaggatgatgataggaaatctgaagacgataaagaggaagaagaaaggaaacgtcaagaggaaatagaacgccagcgtcgagaaagaagatatattttgcctgatgaaccggccatcattgtacatccaaattgggctgcaaaaagtggcaagtttgattgtagcatcatgtctttgagtgtcctattggactacagattagaggataataaagaacattcatttgaggtttcattgtttgcggaacttttcaacgaaatgcttcaaagagattttggtgtccgtatatacaaatcattactgtctcttcctgagaaagaggacaaaaaagaaaaggataaaaaaagcaaaaaagatgagagaaaagataaaaaagaagaaagagatgatgaaactgatgaaccaaaacccaaacggagaaaatcaggcgatgataaagataaaaaagaagatagagatgaaaggaagaaagaagataaaagaaaagatgattctaaagatgatgatgaaactgaagaagataacaatcaagatgaatatgaccctatggaagcagaagaagctgaggatgaagaagatggtaaatgacctccgaaaagaattagaaagtcgagctcttagttccaaaggattaaaatcccagttaatagcccgattgacaaaacagcttaaagtagaggaacaaaaagaagaacagaaggagttagagat

SEQ ID NO: 68063 - DNA, 775 bp, Homo sapiens
ctcaagataaaccaagcaaaaccagaatgtggacggcagagccttgttgaacttcttatccgaccagtacagaggttacccagtgttgcattacttttaaatgatcttaagaagcatacagctgatgaaaatccagacaaaagcactttagaaaaagctattggatcactgaaggaagtaatgacgcatattaatgaggataagagaaaaacagaagctcaaaagcaaatttttgatgttgctttatgaagtagatggatgcccagctaatcttttatcttctcaccgaagcttagtacagcgggttgaaacaatttctctaggtgagcacccctgtgacagaggagaacaagtaactctcttcctcttcaatgattgcctagagatagcaagaaaacggcacaaggttattggcacttttaggagtcctcatggccaaacccgacccccagcttctcttaagcatattcacctaatgcctctttctcagattaagaaggtattggacataagagagacagaagattgccataatgcttttgccttgcttgtgaggccaccaacagagcaggcaaatgtgctactcagtttccagatgacatcagatgaacttccaaaagaaaactggctaaagatgctgtgtcgacatgtagctaacaccatttgtaaagcagatgctgagaatcttatttatactgctgatccagaatcctttgaagtaaatacaaaagatatggacagtacattgagtagagcatcaagagcaataaaaaag

SEQ ID NO: 68064 - DNA, 602 bp, Homo sapiens
cgcctcgatcctgtgatgttggaggtggcaatgcttttccacataatggtcaaaacctaggcctctcacccttcttggggaccttgaacactggagggtcattgccagatctaaccaacctccactactcgacacccctgccagcctccctggacaccaccgaccaccactttggcagtatgagtgtggggaatagtgtgaacaacatcccagctgctatgacccacctgggtataagaagctcctctggtctccagagttctcggagtaacccctccatccaagccacgctcaataagactgtgctttcctcttccttaaataaccacccacagacatctgttcccaacgcatctgctcttcacccttcgctccgtctgttttcccttagcaacccatctctttccaccacaaacctgagcggcccgtctcggcgtcggcagcctcccgtcagccctctcacgctttctcctggccctgaagcacatcaaggtttcagcagacagctgtcttcaaccagcccactggccccatatcctacctcccagatggtgtcctcagaccgaagccaactttcctttctgcccacagaagctcaagcc

SEQ ID NO: 68065 - DNA, 2239 bp, Homo sapiens
cgctcttcactagcctcggcctgagcgagcagaaggcccgcgagacgctcaagaactcggctctgagcgcgcagctgcgcgaggccgctactcaggctcagcagaccctgggctccaccattgacaaagctaccgggatcctgttatatggcttggcctcccgactcagggatacccggcgtctctccttccttgtaagctacatagccagtaagaagatccacactgagccccagctaagcgctgcccttgagtatgtgcggagtcaccccttggaccccatcgacactgtggacttcgagcgggaatgtggcgtgggtgtcattgtgaccccagagcagattgatgaggctgtggaggctgctattaacaggcaccggccccagctcctggcggaacgttaccatttcaacatggggctgctgatgggagaggctcgggctgtgctgaagtgggcagatggcaaaatgatcaagaatgaagtggacatgcaggtcctccaccttctgggccccaagttggaggctgatctggagaagaagttcaaggtggcaaaagctcggctagaagaaacagaccggaggacggcaaaggatgtggtggagaatggcgagactgctgaccagaccctgtctctgatggagcagctccggggggaggcccttaagttccacaagcctggtgagaactacaagaccccaggctatgtggtcactccacacaccatgaatctactaaagcagcacctggagattactggtgggcaggtacgtacccggttcccgccagaacccaatggaatcctgcatattggacatgccaaagccatcaatttcaactttggctatgccaaggccaacaatggcatctgttttctgcgttttgatgacaccaaccctgagaaggaggaagcaaagttcttcacggccatctgtgacatggtagcctggctaggctacacaccttacaaagtcacatatgcgtctgactattttgaccagctatatgcgtgggctgtggagctcatccgcaggggtctggcttatgtgtgccaccagcgaggagaggagctcaaaggccataatactctgccttcaccctggagagaccgtcccatggaggagtcactgctgctctttgaggcaatgcgcaagggcaagttttcagagggcgaggccacactacggatgaagctggtgatggaggatggcaagatggaccctgtagcctatcgagtcaagtatacaccacaccaccgcacaggggacaaatggtgcatctatcccacctacgactacacacactgcctctgtgactccatcgagcacatcactcactcactctgcaccaaggaattccaggcccgacgctcttcctacttctggctttgcaatgcactggacgtctattgccctgtgcagtgggagtatggccgcctcaacctgcactatgctgttgtctctaagaggaagatcctccagcttgtagcaactggtgctgtgcgggactgggatgacccacggctctttacactcacggccctgcgacggcggggcttcccacctgaggccatcaacaacttctgtgcccgggtgggagtgactgtggcacaaaccacaatggagccacatcttctagaagcctgtgtgcgtgatgtgctgaatgacacagccccacgagccatggctgtgctggagtcactacgggtcatcatcaccaactttcctgctgccaagtccttggacatccaggtgcccaacttcccagctgatgagaccaaaggcttccatcaggttccctttgcacccattgtcttcattgagaggactgacttcaaggaggagccagagccaggatttaagcgcctggcttggggccagcctgtgggcctgaggcatacaggctacgtcattgagctgcagcatgttgtcaagggccccagtggttgtgtagagagtctggaggtgacctgcagacgggcagatgctggagagaagccaaaggcctttattcactgggtgtcacagcctttgatgtgtgaggttcgcctctatgagcgactattccagcacaagaaccctgaagatcctactgaggtgcctggtggatttttaagtgacctgaacctggcatcactacacgtggtggatgcagcattagtggactgctctgtggccctggcaaaacccttcgacaagttccagtttgaagcgtcttgggatatttctccgtggatcag

SEQ ID NO: 68066 - DNA, 850 bp, Homo sapiens
tcatagtaaagaagacttttctgaagagaagctttctcttctaccaaatgatctttggtcattttcttgatatcttctggaagacacctctcaatacgtttttctttcagtcttttaagaataagttcaagggttgcttctttagatggtattttctccttctgaatgaccttgggttcatcttcattctcttcatcttcatggtctagagaagagccaaagctttttggaagtgtgttactacgtggacgtgtctgaggtacaaattctccatcagaatttttgtgttttgcatctttaatttgcttccgcagttttgtaagctctgtcatccattttaatacctttggattggcagcaatatcactgtaggagggcttgctatttctttccctttcaaactgttcctcaaattgtctgattttcttctgaagtttcttgaccagctgataaggtgttctgtcctctctcttttcatcttttgaactaaaggatgatcttcgaattctagtaaaagacagtgctttagatgaggaatccaacttttctggatcatgtaggaaacgctggctttgaccaaaatctaaactgcggtgtgataatactggaggacagtcctcttccaaggggtgatgattcattcttccagcttgtggagacagctgagcttctccagactcagagtcctcctgccaagacttaaaagcaggaaatggctcttcccatttatcaccatcagaaacattcttcagatctaaatgtggaatactgacacacgctgcttccccttgaacaccaacactctgacctcctggtacttctgattcagtgttggcattcaaatcacata

SEQ ID NO: 68067 - DNA, 404 bp, Homo sapiens
tttcgtccacccccagcagaaaaaataagatactgaaataagttgagtcatttcgcaaacatttactgagcacctcctgtgtgccaggctcctagaaagacagggagttggtcccctgcacagatgacaaactgccccagacagcagacagacaaacaaactgccccggacagcagacagacaaacagacacattgccctggacagcagagagacaaacagacacactgccccggacagcagacagacagacacgttgccccggacagcagacagaaaaactgccccggacagcagacagatagacaaactgccccagacagcagacagacaaactgccccggaaagcagacagcaaactgccccagacagcagacagacagacacacttccccagactgtatt

SEQ ID NO: 68068 - DNA, 569 bp, Homo sapiens
tttcgtcaagtgtgtgtgcgaacgggaacagagacgcaagccaaattcacctccgtggagctgctcagggaatacatttcgacctgtgttcctgaatgcactcatcccctcaaagtggggacctgtcccaaggactggcccagctgtggggagatcaccttcagagactatcagatgagatacagagacaacaccccccttgttctcgacagcctgaacttgaacatacaaagtgggcagacagtcgggattgttggaagaacaggttccggaaagtcatcgttaggaatggctttgtttcgtctggtggagccagccagtggcacaatctttattgatgaggtgggtatctgcattctcagcttggaagacctcagaaccaagctgactgtgatcccacaggatcctgtcctgtttgtagataatgaaactcccagaaaaattacaggcagaagtcacagaaaatggagaaaacttctcagtaggggaacgtcagctgctttgtgtggcccgagctcttctccgtaattcaaagatcattctccttgatgaagccaccgcctctatgg

SEQ ID NO: 68069 - DNA, 1041 bp, Homo sapiens
ttttttttttttgctgcttcagatcatgtttattgtggggccagggggtagggatcctcgggtgagagggctggctggccggggtaagttgctctggacgtgctggcggggagcagtcctggtggcgggatggcgggggcacttctgggtcccagggtgcacgggatccgggcagtgctcagggtggcaagaggcggcgtgcaggcacctggggcgccggggtctctaggcgtttcacacgcagcagcgcccccagcacgccctcagggggcagctcagagcccacatcgtggtcggcggcacggcggaggcggcgcggggctgccaccccctcggagtccgcgcttcccgcaagaatccgtcccagcaagtacctcaacagctcggggtccacgtcgggtgtctcgtcgcctgcctcctcagcatccgggcccgcggggccgtcgtcgtagaccgggggccggggtcggagcgccgcggcggggacgggcgcggggacaagctgggctgctagggcggcagggtcaaggcgggcgcggagcagagcgcgagcgagctgcgctgcaggcgcgtcggggtcgtcgtccaggcccagagccggatcagagttgcggggggcgccccagacgcgcagcagctgcgccaggacgcgcgcctgctgatcctcagcctcctgcgcctcggcccgcgcccgctcctgacgttcggcctccagcagatgcgccagcgcccgcgccagctcctgcaccgcccccgccgcctcacctcggggcactgaccgccggaagcggcgaggagcgccagtctcagccaagggcggagacgctgcgcttaggccgcggggctcctttaccggccgcgcgcagagcgcggggggcggccgaaacaggccgagcagcagcagcaccaaaaggccgacgcccccggcccgcggcccccagagcagcggcgaccccgccatgctgccccagcgagccgggctccggacgggcggactggctggcacgaaatcgtcgacccgggagattccggagatgatcc

SEQ ID NO: 68070 - DNA, 432 bp, Homo sapiens
atctactcatccattcatccactcatccacccacctatccacccattcacccacctggccaccatttcttccttcctttattttttcctttctttttttccttctctccttccttccacccatccacccacccactcattcacctgtctacctatccacccatccatccatccgtctacccacctgtccctctatccctgtccgtctattcttccatccatctacccactcctgagtacttcctcttccagcctgtggcccatggagatcacatggtagaatatcctctatgccaggggagcagagtccaatacctcgtctttggaagtcaccctcctccaagcccccatttccttgcccccatttcctcaccccatcaaaaagggatacccagcccaccctgcccactcctagattgccatgagcacccat

SEQ ID NO: 68071 - DNA, 853 bp, Homo sapiens
ccgaggtcgagttccaagtcggagacagattttgcgagtggataagacgatggaagatggtaccccaaagcatatcatccagatgacaggatttaagatggaagaaaaagaagcgctagtcaaattactttaaaactagattgcacttttattaagagtgagaaatacaaaaattgtacacatcttatagctgaacgcctatgtaagagtgaaaaatttttagcagcttgtgcggcaggaaagtggatactaaccaaggactatataattcatagtgccaaaagtggcagatggcttgatgaaacaacttatgaatggggatataaaattgaaaaagattcccgttattcacctcaaatgcaatctgcacctaaaagatggcgtgaagaactgaaacgcactggtgctccaggagccttccacagatggaaagttgtcctccttgttagaactgataagcgaagtgattctcttataagagttttggaggctggaaaggcaaatgttattttaccaaaaagttcaccaagtggaataactcatgtgattgccagtaatgcaagaattaaagctgagaaagaaaaagataactttaaggctccattttatccaattcagtatctaggggattttcttttagagaaagaaattcagaatgatgaagattcccaaaccaattctgtttggactgaacatagcaatgaagaaacaaacaaagatttcaggaaagatgcaggatttcttgaaatgaaaggtgccttaagagagaccatgtatagaacccagaaagaaatgcaaaatcatgaagatgtcaatgttggttctattttgattcaacatcacaaaaaaaaaa

SEQ ID NO: 68072 - DNA, 442 bp, Homo sapiens
tttgatgacccttataccaggcggtggaattcatcgagacttcatatcatggagtcataactgagaacaatgacacagtcattttggtttccaccactggtagccctggataaagatgcaccggttccttttgcaggggaaatctgtgcgttcaagatccatggccaggagctgccctttgaggctgtggtgctcaacaagacatcaggagagggccggctccgtgccaagagccccattgactgtgagttgcagaaggagtacacattcatcatccaggcctatgactgtggtgctgggccccacgagacagcctggaaaaagtcacacaaggccgtggtccatatacaggtgaaggatgtcaacgagtttgctcccaccttcaaagagccagcctacaaggctgttgtgacggagggcaagatctatgacagcattctgg

SEQ ID NO: 68073 - DNA, 1027 bp, Homo sapiens
gcccccccccccccccccattgtagaccaatgtacatctggtggaattcgtgggccatccgcagggcatacctggatgggtctggggcgcagacgctgatcaacaccaagatcaacgaccccgatgacatcgcagtcaactgggtggcccgaagcctctattggacccacacaggcactgaacacatcgaggtgacgtgcctcaacagcacctcccacaagatcctggtgtcagaggacatggacgagccccgtgccattgcactgcatcccgagatgggcctcacgtactggatagactggggagagaaccctgaaatcaagcgtgccaacctggacaggcaggagctgcgcgtgctggtcaatgcttccctcgggtggcccaacggcctggccctggacctgcaggaagggaagctctactggggagatgccaagacagacaagatcgaggcgatcagtgtcgatgagacgaagaggcagaccctcctgaaggacaagctcccacacattttcaggttcaccctgctgggggacttcatctactggaccgcctggcagcaccacagcatcaagcgggtacacaaggtcaaggccaaccgggacgtcatcattgaccagctgcccgacctgatggggctcaaagctgtgaacgtggacaaggtcgtcgggcctggaactgctgagtgacatgaagacctgcatcatgcccaaggccttcttggtcttcaccagtagagccgccatccacaggatctccctcgagaccaacaacaacgatgtggccatcctgctctcggcgtcaaggaggcctcggccctggactttgatgtgtccagcaaccacatctactggacagacatcagcctgaaggtagcgtgggcccgaacatgcacacgtgcagcctatatgggaaaaccttccctctgtacctgcctcaaaggtttcagacatttttcttaaagcactataatatttattgtaacccaattcaagctaattaaatatgagcaaacctatttcaaaaa

SEQ ID NO: 68074 - DNA, 782 bp, Homo sapiens
gcgtaggaagtgcgcaggaattccatcatttggccttcagagttttagaacgctatcaactaatgattttaaaatgatatcctgctatttcatgacttacatgtccttttacaatattttttctctttttacacaaacggatgaataaatatggctttaaaaatcctcaagctgacccctgccctttattaaggcacccacaaaaggactaagattatatctcattttgcagttgaagacattgggactgagagatgtcatgtgacttgcccagattcacacagaaatctgaagccttagaattcttagcctttacatttttatccaccatgaccattaccttgaaagtgcattgacttgaaagtgactttgtttttttttcccccatcacgtctaggactgtgaattaccatcatgtcatcctcccccagctgccccggaaacgaggagaagcacatacagtgcaccaagaacccagtggcgatttgggtcttggaccccatgctcagccacttgtgggaaaggtacccggatgagatacgtcagctgccgagatgagaatggctctgtggctgacgagagtgcctgtgctaccctgcctagaccagtggcaaaggaagaatgttctgtgacaccctgtgggcaatggaaggccttggactggagctcttgctctgtgacctgtgggcaaggtagggcaacccggcaagtgatgtgtgtcaactacagtgaccacgtgatcgatcggagtgagtgtgaccaggattatatcccagaaactg

SEQ ID NO: 68075 - DNA, 464 bp, Homo sapiens
ttgtagactagaggaccctgtggcgagagtggtggaattcgcagaaaccagtttgacagacaacagggaaatccagacagacatttccatcagatgatcatcagacatgaagaaatgcccacttttgaccagcatgcatcccttactttttatcagaaaattcatactagagaaaaaccttttgggtataataaatgtagaaaagacttctggcaaaaggaactccttattaatcatcaaggaatttatactaatgagaaaccctataaatgtaaggaatgtgggaaggcctttaaatatggctcacgactaattcaacatgagaatattcattctggtaagaaaccatatgaatgtaaggaatgtggaaaggccttcaattctggttcaaattttatacaacatcagagagttcatactggtgagaaaccgtatgaatgtaaagattgtgagaaggccttcag

SEQ ID NO: 68076 - DNA, 461 bp, Homo sapiens
catcgacgccctttgaagacctctagaccgtgcggcggaattcgcccaggccaggtgcagacaggcacccccgtcatcttgcgccccctgccccctcaggtttgtgtgtaagaacaacggggtcctgttcgagaaccagctgctgcagatcggagtcaagtcagagttccgacagaacctgggccgcatgtatctcttctatggcaacaagacctcggtgcagttccagaatttctcacccactgtggttcacccgggagacctccagactcatatcctctcaggcccggcccagcctcctgcctctccacgtcggccttcctcaccgtggggaagccggctgacccaggtccacacttctcttcagcctctcttgggcacgcaattagttctctgagattgagtgtctgcatctgttaagatgggggtgggattccttcccccaggacaggggatgacag

SEQ ID NO: 68077 - DNA, 907 bp, Homo sapiens
ggcacgaggactcccccagcagggagggaggagaccagttccaatctcccagggaaggagcacccgggaaggccaccaagctcgccaacggatgccactattgggcagtatgtgaagaagatccaggagctcctgcaggagcagtggaactgcctggagcatgggtacccggagctggccagcgccatcaagcagccagcctccaagctcagcagcatccagagccagctgctgagctccctcaacctgctgctgtcggcctactcggcccaggctcacccacccaaggagccgccggcctcctcctcctccccgccagtggagatctccccatcgaccagccttaaatccataatgaaaaagaaagactatggcttccgtgcaggaggtaatgggaccaaaaagaaccttcagtttgttggggttaacggtatgagaccacctcaagtgaggagaccagcggtgaggacagcaccccagaggacttgtctgacagcgaggcagagaagaagtgtgacggcccagatcacaagcatgtcaaagatgcccatctcacctgcgaggctgggcagggcatccctgagggcacctgccatgctgcccacgaaagtgggcctggggaagaagtcccccactccaaggccgagagatataaaccctcacaagaatttcttaatgcatgccgggcactgagccagcatctgccagaaactgggaccgccacagaccagctcttgaggcaaagcttgaacaccatcagtcaagagtggttccgcgtctccagccggaagtcgtctagccctgccgtggtggcctcctacctccacgaggtccagcctcactccccacacttcctgaagctgcttgtcaacttggccgatcgcaacgggaacacggcccttcacta

SEQ ID NO: 68078 - DNA, 740 bp, Homo sapiens
acatgggtcgctggctcgggctgctgctggtggagatgggctccagagtcactccggaggcgctgcactatgactacgtggatgtggagaccttaaccagcatcgtcagtgctgggcgcaactccttcctatatgcaagatcctgccagaatcagtggcctgagccccgagtctatgatgatgttccttatgaaaagatgcaggacgaggagcccgagcgccccacaggggcccaggtgaagcgtcacgcctcctcctgcagtgagaagtcccatcgtgtggacccgcaggtcaaagtcaaacgccacgcctccagtgccaatcaatacaagtatggcaagaaccgagccgaggaggatgcccggaggtacttggtagaaaaagagaagctggagaaagagaaagagacgattcggacagagctgatagcactgagacaggagaagagggaactgaaggaagccattcggagcagcccaggagcaaaattaaaggctctggaagaagccgtggccaccctggaagctcagtgtcgggcaaaggaggagcgccggattgacctggagctgaagctggtggctgtgaaggagcgcttgcagcagtccctggcaggagggccagccctggggctctccgtgagcagcaagcccaagagtggggaaactgcaaataaaccccagaacagcgttccagagcaacctctccctgtcaactgtgtctctgagctgaggaagaggagc

SEQ ID NO: 68079 - DNA, 3098 bp, Homo sapiens
  misc_feature (1)...(3098): n = a,t,c or g
atttttctgggtgtcactttttccatgaagggacgtcatatagaagaagccctaaccaaccagcgcaaagtagagggggaaacctcccccccaaaaattcgagaagaaaaagaaggagaanacagtgaagagaaaggaaaaggccaagaaaaaggaagagaaacctatggggaagaatacctgatcatgatccagccccccaatgtgactgtcctccttcgagaaccagtgcgggcttcctgctgtggctgtggctccaaccccagtgcagccccccattatcgttgctcctgtcgccacagttccagccatgccccaggagaagctggcctcctcccccaaggacaaaaagaagaaggagaaaaaagtggcaaaagtggaaccagctgtcagctctgtagtgaattccatccaggttctcacttcgaaggctgccatcttggaaactgctcccaaggaggtgccgatggtggtggtgcccccagtgggtgccaagggcaacacaccagccactggcactactcagggcaaaaaggcggaggggactcagaatcaaagcaaaaaggctgaaggagccccaaaccagggcagaaaggcagagggaaccccaaaccagggcaaaaagacagagggaaccccaaaccaagggaaaaaggcagagggaaccccaaaccaaggcaaaaaggcatgaaggaaccccaaaccaaggcaaaaaggcggagggggcccataaccagggtaaaaaggttgatacaaccccaaaccaggggaaaaaggtggagggggccccaacccagggcagaaaggccgagggggctcagaaccaggccaaaaaggtagaaggggcccagaaccagggcaaaaaggcagagggggcccagaatcagggcaaaaaggcagagggggcccagaaccagggcaagaaggctgagggtgcccagaatcagggcaagaaggcagaggggggccagaaccagggcaaaaagactgaggaggcccagaagcagggcaagaaagcagagggggcccagatccagggcaagaagaacgagggggctcagacccagggcaagaaagcagagggggcccagaaccagggcaagaagaacgagggggctcagacccagggcaagaaagcagagggggcccagacccagggcaagaaggccgacggggcccagaaccagggcaagaaggccgagggggcccagaaccagggcaagaaggccgagggggcccagaaccagggcaagaaggccgagggggcccagaaccagggcaagaaggccgatggggcccagaaccagggcaagaaggccgagggggcccagaaccagggcaggaaggccgagggggcccagaaccagggcaggaaggccgagggggcccagaaccagggcaagaaggccgagggggcccagaaccagggcaagaaggccgagggggccccgaaccagggcaagaaggccgaggggaccccgaaccagggcaagaaggccgaggggaccccgaaccagggcaagaaggccgaggggacccgaaccagggcaagaaggccgagggggcccagaaccagggcaagaaggccgagggggcccagaaccagggcaagaaggccgagggggcccagaaccagggcaagaaggccgagggggcccagaaccagggcaagaaggccgagggggcccagaaccagggcaagaaggccgagggtgctcagaaccagggcaaaaaagtagaaggggcccagaaccagggcaagaaggctgagggggcccagaaccagggcaagaaggccgagggggctcagaaccagggcaaaaaggccgagggagcccagaaccagggccaaaaaggagagggagcccagaatcagggtaaaaagacagaaggggctcagggcaaaaaggcagaaaggagtcccaaccaaggcaaaaaaggagagggagctcccatccagggcaaaaaggcagattcggttgctaatcagggcacaaaggtagagggtattacaaaccaggggaaaaaagcagaagggtcccccagtgaaggcaaaaaggcagaagggtcccccaaccaaggcaaaaaggcagacgcagctgccaatcagggtaaaaagacagagtcagcttctgtccagggcagaaatacagatgtggcccagagcccagaggcaccaaagcaagaggctcctgccaagaagaagtctggttcaaagaaaaaagggcccccagatgccgacggccctctctacctcccctacaagacgctggtctccacggttgggagcatggtgttcaacgagggcgaggcccagcggctcatcgagatcctgtctgagaaggctggcatcattcaggacacctggcacaaggccactcagaagggtgaccctgtggcgattctgaaacgccagctggaagagaaggaaaaactgctggccacagaacaggaagatgcggctgtcgccaagagcaaactgagggagctcaacaaggagatggcagcagaaaaggccaaagcagcagccggggaggccaaagtgaaaaagcagctggtggcccgggagcaggagatcacggctgtgcaggcacgcatgcaggccagctaccgggagcacgtgaaggaggtgcagcagctgcagggcaagatccggactcttcaggagcagctggagaatggccccaacacgcagctggcccgcctgcagcaggagaactccatcctgcgggatgccttgaaccaggccacgagccaggtggagagcaagcagaacgcagagctggccaagcttcggcaggagctcagcaaggtcagcaaagagctggtggagaagtcagaggctgtgcggcaagatgagcagcagcggaaagctctggaagccaaggcagctgccttcgagaagcaggtcctgcagctgcaggcgtcccacagggagagtgaggaggccctgcagaagcgcctggacgaggtcagcccgggagctgtgccacacgcagagcagccacgccagcctccgggcggatgccgagaaggcccacgagcaacagcagcagatggccgagctgcacagcaagttacagtccttcgaggcggag

SEQ ID NO: 68080 - DNA, 1710 bp, Homo sapiens
agggggtcccgaggttgaaacattgttggaggggggtccaggaaccccatccccagggccctgaagttccgcaaagccccaatggccttggaaaggcccgggccgttcttctttaaaaaggttttctaagtcttggtaatgttctgctttcagggcaagcagttcttcttgtgagacggaagtgagaggccaggttgggcagagccatgcttatagggaccctcatgcttaggaagtggcggaactggaattcaaacaaggtctgtttgtttccagagccatggctctcagccttctctgaaccacgcaagactcccgcttcagctccactgcacacctttgcggtgtcaggtaccatgctggggctttctactcgcacagctcactatgggggtgggggagacacgatggcctccatcaaagaggaggaaactgaggcttagagaaggtgaggaggcctggcgtggtggctcacgcctgtaatcccaggactttgggaggccaaggcaggcagatcactagaggtcaggagttcgagaccagcctggccaacttggtaaaaccctgtctctactaaaaatacaaaattagctggatgtggtggtgcacgcctgtaatccagctactcgggaggctgagtgaggcaagagaatcgcttgaacctgggaggcacaggttgtagtgagtcgagatcacgccactgcactccaggctgggtgacagagtgagatattgtctcaaaaagaaaaaaaaaaaggaaaaaacgagaaggggggtaactgcaaaatggcagagctgtctgatcccaaatgacacttgttctctctgctgctgggcaccttcacgctttcctatgggtgtcacccacctcccaccctgaggtattccacctcctacctggatgcgagcagcagtttccctgcggaaatcctccttcagggcagcttcacggcggctcactagcccctccagcagcgccagggtgtcctcgtggctcaggccaccaccacctccctggccaggagccccttgccgcagctccagacgttccagccgcatggcctccttctgccagttggaggaaaattcagcagcaagagcttccagacgccgctccagagagtgtacccgggacataacacgctgctcagcctggaagggcagagagagagccacggagtgagggacccttggatgatagtgcttcccaaagaccaccccgacacagccaacacagaaagaaagggaaaagattccagagacgttccagcataaggccatgcagggccggctggagctcgtgggcaggggctgccgacctctgagctgggtgtgctgggagccagggatcactgggtgccggccacagaggaaggtccctgaggacacagtaccgaagtctgatcccagaggaggaaggaaggtgggccggggagaaggtctgagtgcagggatggtccaggaggaggactggaagctgcaggatggctgcagggggccgtggaccctcctggcctgaagctcactccttccccgcctcctacaggggcaggggagccagggctgcgagttctgtctgtggactctcaatggctttcactccttccctaggtaactatggctaagagacagaataatttgaaaatacgttctttttcctctttagctggatgtcccacagagaaaatggaataaatgtcatttggactg

SEQ ID NO: 68081 - DNA, 1930 bp, Homo sapiens
cgagggaaagtgaagaagatgctgctttagctgctgcacgctatgaagagggagagtcagaagcagaaagcatcacttcctttatggatgtttcaaatcctttttatcagctttatgacacagttaggagttgtcggaataaccaagggcagctaatagctgaacctttttaccatttgccttcaaagaaaaaataccctgattattaccagcaaattaaaatgcccatatcactacaacagatccgaacaaaactgaagaatcaagaatatgaaactttagatcatttggagtgtgatctgaatttaatgtttgaaaatgccaaacgctataatgtgcccaattcagccatctacaagcgagttctaaaattgcagcaagttatgcaggcaaagaagaaagagcttgccaggagagacgatatcgaggacggagacagcatgatctcttcagccacctctgatactggtagtgccaaaagaaaaagtaaaaagaacataagaaagcagcgaatgaaaatcttattcaatgttgttcttgaagctcgagagccaggttcaggcagaagactttgtgacctatttatggttaaaccatccaaaaaggactatcctgattattataaaatcatcttggagccaatggacttgaaaataattgagcataacatccgcaatgacaaatatgctggtgaagagggaatgatagaagacatgaagctgatgttccggaatgccaggcactataatgaggagggctcccaggtttataatgatgcacatatcctggagaagttactcaaggagaaaaggaaagagctgggcccactgcctgatgttgatgacatggtttctcccaaactcaagctgagtaggaagagtggcatttctcctaaaaaatcaaaatacatgactccaatgcagcagaaactaaatgaggtctatgaagctgtaaagaactatactgataagaggggtcgccgcctcagtgccatatttctgaggcttccctctagatctgagttgcctgactactatctgactattaaaaagcccatggacatggaaaaaattcgaagtcacatgatggccaacaagtaccaagatattgactctatggttgaggactttgtcatgatgtttaataatgcctgtacgtacaatgagccggagtctttgatctacaaagatgctcttgttctacacaaagtcctgcttgaaacacgcagagacctggagggagatgaggactctcatgtcccaaatgtgactttgctgattcaagagcttatccacaatctttttgtgtcagtcatgagtcatcaggatgatgagggaagatgctacagcgattctttagcagaaattcctgctgtggatcccaactttcctaacaaaccaccccttacatttgacataattaggaagaatgttgaaaataatcgctaccgtcggcttgatttatttcaagagcatatgtttgaagtattggaacgagcaagaaggatgaatcggacagattcagaaatatatgaagatgcagtagaacttcagcagttttttattaaaattcgtgatgaactctgcaaaaatggagagattcttctttcaccggcactcagctataccacaaaacatttgcataatgatgtggagaaagagagaaaggaaaaattgccaaaagaaatagaggaagataaactaaaacgagaagaagaaaaaagagaagctgaaaagagtgaagattcctctggtgctgcaggcctctcaggcttacatcgcacatacaggcaggactgtagctttaaaaacagcatgtaccatgttggagattacgtctatgtggaacctgcagaggccaacctacaaccacatatcgtctgttattgaaagactgtgggaggattcagctgagaagctccgctctacat

SEQ ID NO: 68082 - DNA, 1408 bp, Homo sapiens
  misc_feature (1)...(1408): n = a,t,c or g
gtagcggcccggaattcccgggtcgagtagccagaacggtcacgaggaaggggcaaccgtggacagagaggacgggcctggcgtggccctcgaggggcctctgcaggaggtcctggagttgctgaggcccacggactccacccagccccagctccgggagctggagtaccaggtcctcggcttccgggaccggctgaagccctgcagagcacggcaggagcacacctcggccgagagcctgatggagtgcatcctggagagcttcgccttcctcaatgccgacttcgccccggatgagctgtccctgtttgggggctcccagggtctccgaaaggaccggcccctgcccccaccgtcatcactgaaagcgtcatccagggaactcacagccggtgccccagagctggacgtgctgctgatggtacacctccaagtctgcaaagctctgctgcagaaactggcctcccctaatttatcaaggctggtccaggaatgcctcctggaagaagtggcacagcaaaagcacgttctggagacactttctgtccttgactttgagaaggtcggcaaggcaacatccattgaagagagtcctagtggagggaaacctttcgggtccttgtcatgtgctctccccgagtcaccattcaggtttctgaactggggctttcagtcatcccacaggcctcgcggacgaaggggtgcctgaagctgtggagagggtgcacagggcctggcagggtcctgtcctgccctgccacgacgctgctgaaccagctcaagaaaaccttccagcacagagtcagagggaagtacccaggacagctggaaatagcgtgccgcaggctcctggagcaggtggtcagctgtggtgggctgctccccggagctgggctcccagaagaacagatcattacctggttccagtttcacagctacctgcagaggcagagcgtctctgacctggagaagcacttcacccagctcaccaaggaagtgacactcatcgaggagcttcactgtgcgggacaggccaaggtggtccggaagctgcaggggaagcggctgggccagctccagcctctgccccagaccttaagagcctgggcgctgctccagctggacggcactccgagggtgtgcagggcggccagcgctcgcctggctggtgcagtcaggaacagaagcttccgggaaaaggctttgctgttctacaccaacgccctggcagagaacgacgcaaggctccagcaggccgcatgcctagcgctcaaacacctcaagggcattgaaagcattcgaccagactgccagcctgttgccagttttgacnggggaggccgtgcgggcggcacgggaaanaccacactgttcgtttcggtaaaaattggcacaaattttnaagcga

SEQ ID NO: 68083 - DNA, 480 bp, Homo sapiens
caaatacacaaagtagagatgtgtagaatgacagataatgactggtccctgatgggcccgtacacctgcggacctgagaggctaccatagggccaggaccccttcatcactcaagtgtcaccttgaggctaggatccctgggtccccacggcaacatggtgtagcccgcgcctttgggtccatagaagtttcagtgcggtcgggatcctttggtttctgcagaactacactgtggtccctgaagggacgcggagaagccctcagccccgctccccgtcttagcggccctcccctcgcccccacagaagtttagcactccctggcggcgcttcttcacgtctatgccagtctatgccatcatcgtggccaacttctgccgcagctggacgttctacctgctgctcatctcccagcccgcctacttcgaagaaggttcggcttcgagatcagcaaggtaggcctggtgtccgcgctgcccca

SEQ ID NO: 68084 - DNA, 1955 bp, Homo sapiens
cgtggaattcctggagcgcgagcaggagcagcgacggcacacggcctacatttcggagctcaaggccaagctgcatgaggagaagaccaaggagctgcaggcgctgcgcgaggggctcatccggcagcacgagcaggaggcggcgcgcaccgccaagatcaaggagggcgagctgcagcggctgcaggccacgctgaacgtgctgcgcgacggcgcggccgacaaggtcaagacggcgctgctgaccgaggcgcgcgaggaggcgcgcagggccttcgatggagagcgcctgcggctgcagcaggagatcctggagctcaaggcagcgcgcaagcaggcagaggaggcgctcagtaactgcatgcaggctgacaagaccaaggcagccgacctgcgtgccgcctaccaggcgcaccaagacgaggtgcaccgcatcaagcgcgagtgcgagcgcgacatccgcaggctgatggatgagatcaaagggaaagaccgtgtgattctggccttggagaaggaacttggcgtgcaggctgggcagacccagaagctgcttctgcagaaagaggctttggatgagcagctggttcaggtcaaggaggccgagcggcaccacagtagtccaaagagagagctcccgcccgggatcggggacatggtggagctcatgggcgtccaggatcaacatatggacgagcgagatgtgaggcgatttcaactaaaaattgctgaactgaattcagtgatacggaagctggaagacagaaatacgctgttggcagatgagaggaatgaactgctgaaacgctcacgagagaccgaggttcagctgaagcccctggtggagaagaacaagcggatgaacaagaagaatgaggatctgttgcagagtatccagaggatggaggagaaaatcaagaacctcacgcgggaaaacgtggaaatgaaagaaaagctgtcagcgcaggcgtctctgaagcggcatacctccttgaatgacctcagcctgacgagggatgagcaggagatcgagttcctgaggctgcaggtgctggagcagcagcacgtcattgacgacctctcactggagagagaacggctgttgcgctccaaaaggcatcgagggaaaagtctgaaaccgcccaagaagcatgttgtggagacattttttggatttgatgaggagtctgtggactcagaaacgttgtccgaaacatcctacaacacagacaggacagacaggaccccagccacgcccgaagaagacttggacgatgccacagccccgagaggaggctgacctgcgcttctgccagctgacccgggagtaccaggccctgcaacgcgcctacgccctgctccaggagcaggtgggaggcacgctggacgctgagagggaggcccggactcgggagcagctacaagctgatctgctgaggtgtcaggccaaaatcgaagatttggagaagttactggttgagaagggacaggattccaagtgggttgaagagaagcagctgctcatcagaacaaaccaagacttgctggaaaagatttacagactggaaatggaagagaaccagctgaagaatgaaatgcaagacgccaaggatcagaacgagctgttagaattcagagtgctagaactcgaagtaagagactctatctgttgtaaactctcaaacggagcagacattctctttgaacccaaactgaaattcatgtaaagctctcagatgttttcaagcatgtgtaaaggggacatgttatagtttctttctttctttctttctttttttttttttaaatctgtatgttcagaataatttcactgccttaatgtgttctggagagcgtgctcacccaagtctatggacatgtaccagagctaatatatttattgcctatggcttgttttgcacttaataaaataatttgtttttgcaataaaaaaa

SEQ ID NO: 68085 - DNA, 781 bp, Homo sapiens
tgtgtattttctcactgggtccctgggaccagcctggggaggggatggttgtgaatcaccattttacaggtgaaaaagtggaaggtcaaaatgaagtaagttactgccaagggctacagaccaatgcagggcctgtgtgctccccagctctgcaccatctccctgagagctggggggaaataaggacggcgcatttgtttcacagccctcgacaagctgccgcgacgggctcttcctgctccagagcgtctggggagggttgcagggttaaccagctggtgagtgggcccggtccctgcgagggaaggacccctcgtgccccctccgcccgcgctcacatgacgatctccttccgggtcgtctccagggacaggtactccacccagctcttcttgtcctggtagttcttggactcatccacgatcttctgaaacatcgctctcttcctgaacccagggaacaagggaggtgcagtgctcacacacccagtgctcacccgctgcatcagaaccctgctccgcaggatacggccctgccgtcctgcggacgctgcgtccccagcgcccacagcagaaaccgagggttgttggtgccgcggtggtcgatgtcatggcacaggccggctgtcaccatggcgaaggcctccagccacgtaccatgagcagcgtgaacatcgtctgggccacgttgaagccgtggcgccagttgtggtaggtgattctccggtaccctttgctgatggagaacaggaaccgcaccaggacctgggggagccgagagg

SEQ ID NO: 68086 - DNA, 1096 bp, Homo sapiens
  misc_feature (1)...(1096): n = a,t,c or g
ttttttttttttaactgaagagtttattatactttcaacttttctgcagatgtaacattttttaaataaaaagttgagaataaaaaaatcacaaaaatagttttgctgaagaaaataccacacattcctttttactataatatttaatataataatatacacttatacattggtattatttacacttcattaaaaaaaacccattcaacctggaaattaactaccttaaacacactatttaactttcaggtgctaatgtatttaatttctttaaatattaaatccaaaatgggctcaatatcctaaattactgataactagatgcagatgtaaggatcatgaatcaatacttccattaagttaaaaatatcaataattttttgcaacatttcttctttgtttttcttctttgtctagaatagtctgttttaagctcaaagtagcatcttgaaatccaggatttaagtctaagaccttcttgaaatcttccaaagcatcatcaaaatatcccagcctatacagtatcaaccctctgttgtaatatggaacttcaaaattgggttggacttctatggcagatgtgtagtcatccatggcttcataaaaatcaaccctgaagtacttgatttgccccctgttgttatatgcagtagccaaatcctcagggctgcatttgcgtcgcggcagctggctcctcacgggtgggcttctccccgcgttctccgccgccctcgtcataggcctcgcctaggcctttctagaaagacgaacgtccgcccgctcagtcctagtgctcccgggactctcgtcgctagaggccgcgcaagcgcaccggcgaatgtaagcggagtacagtgcctcggcctccgcgtactctccattgttgaaatgagcctgggcgagtgttagggttgcgtggctttcttgccgctgtccttccatagcagccaaggcctagttttcggtgtagaatgggggttgacctccgagcggttagaggtggcaccacaaagccacttccacaccctggaatctaccttgacggccaaccttggcgcgaattccaccacncggactagtggtcngtcaatgcgat

SEQ ID NO: 68087 - DNA, 2098 bp, Homo sapiens
gcgcccgcggacatgtgcaggatgtccttcaagaaggaaactccacttgccaatgctgcattctgggcagccaggagaggaaacctggcgctgctgaagctgctgttgaacagcggccgggtggacgtggactgcagagacagccatggcaccacactcctgatggttgctgcctacgctggccacatagactgtgtgagggaactggttctgcaaggagcagacatcaatctccagagagagtcaggtacaactgccctattctttgccgcccagcaaggccataatgatgtcgtgagatttctctttggatttggagcatccactgaatttaggaccaaagacgggggcaccgccctgttggctgccagtcagtacgggcacatgcaggtggtggagaccttgctgaagcacggagcaaacatccatgaccaactttatgatggagccactgccctcttcctagctgcccaaggtggttacttggatgttattcgattactgctggcttcaggagcaaaagtcaaccagccaaggcaggacgggacagcgcccctgtggatcgcgtcccagatgggccacagcgaggtggtgcgggtgatgctgctgcgcggagccgaccgcgacgctgcgcggaacgatggcacaacagcattattgaaagcagccaacaaagggtataatgatgtcataaaagagttgcttaaattctcacccactcttggtattttgaagaatgggacatcagcgctccatgcagcagtgctcagtggaaacattaaaacagttgcgctgctcctagaagcaggggcagacccatccctgagaaacaaggccaatgaacttccggcagaactaaccaaaaatgaacgtatattgcgtctcctgagaagtaaagaaggtcccagaaagagctaacttagctccatatttgacagaaagatagaaagcttaaccacattgtccaaaaagaaattgcatttcaagcagtgttggaaattcttttatgaaaaaaaaagatgcccagaatgcccatcctgtgggtccctgacaaagaagagctacgctctgtgcacgaagtcaagaaccaaacagctcagggaccctcttgccccttcaccatggacttctcatggtgtcctgtaactcatctcccggggggcctggcatgttcacagattccacagaaactcattttcaacaatgctaacttggacctgtcagttaaactctaaggtggacagggttctcagtactaagcaaggaaacagaatgctttgttcctttaaaagactgaaaagctgaccttcaatggattgaggcacttttgcttttgtgttaaatgtagatgtgctaaaatatatagatctatcatattttacctacatatgtatgtcattccagtataaaacattctcctctacccaagaaccatagccatgattgttataaatcaatgaagtgtaaacatacattattaaaaaaccacttctgacattccattatgtgctattcaaagatggactattgaactatagaaaagacagactgtgcatttgttcgttgatcctcatcttattcctgacatgtaaaaatcaattttacgtagagtcaacattgtaggtaggttaaaataccagtggcaaatttggaaattcagaaacttataaaccacgagaaatatataggcttgtctctttggtcttttattttggctctattgttgggaatctatttcctattccataagtaagtatacctaacatgctgtggaatcttgagtttccaacaccgtgctgcttgatagaatgactttgaggtccttggataaaatgtgatatatgcaagtacagtatgttgctattactattgcaggaatataaataataaaagactgttattagcacttagtaagtcttcatctatgcatgtttttgagttgactgattccaagaatgaaatatgaggtttattgaattattcctttgaaagggatcaaaacttatattcaatgcactttataattaatggtgtctaaatgcctcagtcagtgcctaactgcacatacaaaaataaaaccttctttctgtaatctacc

SEQ ID NO: 68088 - DNA, 1407 bp, Homo sapiens
  misc_feature (1)...(1407): n = a,t,c or g
tttcgtggaaaagaaggtggacgtggacaagcgtgggctgggagtgaccgaccataatggaatggccgccaagcccctcggctgccgcccgccaatctccaaagagtcttccgtggaccgccccacctttcttgacaaggatggcggcctcgtggaagagcccacgccttcaccgttcttgccttccccaagcctgaagctccccctttcacacagtgcactccccagtcaggccctgggtgggattgcctccgggctgggcatgcaaaacttgaattcttctagacagataccgagtggcaatctgggtatgtttggcaatagtggagcagcacaagccaggaccatgcagcagccgccacagccaccagtgcagcctcttaactcttcccagcccagtctccgtgctcaagtgcctcagtttctatcccctcaggttcaagcacagcttttgcagtttgcagcaaaaaacattggtctcaaccctgcactattaacctcgccaattaatcctcaacatatgacgatgttgaaccagctctatcagctgcagctggcataccaacgtttacaaatccagcagcagatgttacaggcccagcgtaatgtgtccggatccatgagacaacaggagcagcaagttgcgcgcacaatcactaatctgcagcagcagatccagcagcaccagcgccagctggcccaggccctgctcgtgaagcagccaccaccgacactgcccccgccgcacctgtctctgcacccctctgcaggcaaatcggccatggacagcttccctcgcacccacagactcccggcctacctgacctgcagaccaaagagcagcagtcttcacccaacacctttgctccttaccctctcgctggactgaacccaaacatgaatgtcaacagcatggacatgaccggtggcttgtcggtgaaggacccatcccagtcccagtcacgcctcccccagtggacgcaccccaactccatggataacttgcccagtgccgcttcccccctggagcagaaccctagcaagcatggtgctatccctggaggtctaagcattgggcctccaggtaagtcctccattgatgactcctatggccggtacgatttaatccagaacagtgagtcaccagccagtcctcccgtagctgttccccatagctggtcacgtgccaaatctgacagtgataaaatctcaaatggctctagcatcaactggcccccaggtaagaccatgcaacacttctgtgcaacagcagcaggtcagaatgtgctccaagcctgcagagagtgattaggctgagaggacccagaatctgagctaaggatctggaagcgttaagcccagantttgnattttcttggaatccattgnagtcaatttgggtatggt

SEQ ID NO: 68089 - DNA, 2458 bp, Homo sapiens
atgaggacacttgggacttgcctggcgactttggccggacttttgctaactgcggcgggcgagacgttctcaggtggctgcctctttgatgagccgtatagcacatgtggatatagtcaatctgaaggtgatgacttcaattgggagcaagtgaacaccttgactaaaccgacttctgatccatggatgccatcaggttctttcatgctggtgaatgcctctgggagacctgaggggcagagagcccacctgctcttaccccaacttaaagaaaatgacacccactgcatcgattttcactattttgtgtccagcaagagtaattctcctccggggttactcaatgtctacgtgaaggtcaataacgggccactggggaatcctatctggaatatatctggagacccaacacgtacatggaacagggcagaactggccattagtactttctggcctaacttttatcaggtgatttttgaagtgataacttctggacatcaaggctatctcgctatcgatgaggtgaaggtgttaggacatccatgtaccaggactcctcacttcctgcggattcagaatgtggaagttaatgctggccagtttgctaccttccagtgcagtgccatcggcaggaccgtggcaggagacaggctctggttacagggcattgatgtgcgagatgctcctctgaaggaaatcaaggtgaccagctcccgacgcttcattgcttcatttaatgttgtgaataccaccaaacgagatgctggaaagtaccgctgcatgattccgcactgaaggaggtgttggaatatcaaactatgcagagttgggtagttaaagaaccacccgttcctattgccccacctcagctcgcctctgtaggagccacctacctgtggatacagctcaacgccaactccatcaatggggatgggcccattgtggcccgagaggtggagtactgcacggccagtgggagctggaatgaccggcagccagtcgattccacgagctataaaattggacaccttgacccagatacagaatatgagattagtgtgctcctgaccaggccaggggagggtggcactggctctcctggtccagctctcaggacaagaacaaagtgtgctgatcccatgcgaggcccaagaaaactagaagtagtggaggtcaaatctcggcaaatcactatccgctgggagccatttggatataatgtaactcgttgccacagttataatctcactgtccactactgttaccaagttggaggacaagaacaagtgcgagaagaagtaagctgggatacagaaaattcacaccctcaacacacgatcactaacctgtcaccatacaccaatgtcagtgtgaaactgatcctcatgaacccagagggccggaaggaaagccaagaactcatagtgcagacagatgaagacctcccaggtgctgttcccactgaatccatacaaggaagtacctttgaagagaagatatttcttcagtggagagaaccaactcaaacatatggtgtaatcactttatatgagatcacctacaaagcagtcagttcctttgacccagaaatagatttatccaatcagagtggaagagtttcaaagctgggaaatgaaacccattttctgttttttggactgtatccggggaccacatactcctttaccatccgagctagcacagctaagggttttgggcctccagcaacaaaccagttcaccaccaaaatatcagcaccctctatgccagcttatgaacttgagacacctttgaatcaaactgacaataccgtgacagtcatgctgaaacctgcccacagcagaggagcacctgtcagtgtctatcaaatagttgttgaggaagaacgtcctcgaagaactaaaaagacgacagaaatcttaaagtgctacccagtgccaattcacttccagaatgcttctctgctgaactcacagtactactttgctgcagaatttcctgcagacagcctccaagctgcgcagccttttacaattggtgataataagacatataatggatactggaacactccccttctcccctataaaagctacagaatttatttccaagctgctagtagagccaatggggaaaccaaaatagactgtgtccaagtggccacaaaaggagctgccactccgaaaccagtcccagaacccgagaaacagacagaccatacagttaaaattgctggagtcatcgcgggcatcttgctgttcgtgattatatttcttggagttgtgttggtaatgaagaaaaggctttacaagcatggtgccagcatctgttcagcttctggtgaggcctcaggaagcttccaatcatggaggaaggcaaagcacaagcaggcgtgtcccatggcaagagcaggagcacgagagcgagcgggagggtgtctcaaactttgaaacaacca

SEQ ID NO: 68090 - DNA, 457 bp, Homo sapiens
  misc_feature (1)...(457): n = a,t,c or g
aatagactgcgtaacctacgccanngcgnggaattcgtcagcttctgcagctctcccgggctagcatggcagcgcggaagagttggacggccctgcggctctgcgccacagttgttgtacttgatatggtcgtctgtaaaggatttgtacaagatttagatgaatcgtttaaagaaaatcgaaatgatgacatttggcttgtacatttttatgcgccatggtgtggccattgtaaaaagctggaaccaatttggaatgaagctggtcttgagatgaaaagcattggttctccagttaaggctggaaagatggatgctacttcctattctagcattgcttcagagtttggagttcgaggttatccaacaattaagctggctctaattcggccacttccaagtcaacaaatgtttgaacatatgcacaagagacaccgcgtatttttcgtttatgtaag

SEQ ID NO: 68091 - DNA, 866 bp, Homo sapiens
tgcggccgccatctcgccgtcgtcccgcagggtgggccggggcgttgctcaggccggccactggcgcctgggggaactctctcggcaaacccgtccatgtcgcccgagcccagggatccgttcacgtggtgaggctccatacgcgctcataggcggccatggggccctccgggccagggccgagcggggaaattagccctgccggcgccctgcccgatggggttcatgatagtgtacatgttttcgctggagttggtggaatctccagggctaggcatgatgggtgttccagggggcccacctcctcctgggggtccggtgtagctgccgggggatgaggaggagtaggggatcgagtttccactggggctggcccacgggccacgaactcctgggcccatgttcatggcaggcaggcctgggccggcgagggagttgggtgggggtcgcatgccacctccatagctctggggccccacgctggccatgccacgaggaggcgtcaccctctgcattgggccgcccatgctcggatgcccctgggctcgtggggagggctccatggcgccagggaggaggggctgggagccagggaggcctgcgggaggctgactcggcatccgcagggtgggccgggggccccctgggaagcgcggtgacatgaagggctgaccgtgaggccccatcatgggggcattggggttgtggggggacggctgggagccgggggggccctggaagaagccagccgccatggagcctgcggccattgtgtcacctggggccatactccccataacggggctgggggcggctgcagcaaatatagtcctggaaggccttggcctcgccggagtgctcgcagg

SEQ ID NO: 68092 - DNA, 590 bp, Homo sapiens
gcttgcggccgcgtgagccgccggagcaggagctgcagcgacgtcgggagcagaagcggcggcgacacgacgcgcacagctgcagcagttcaagcacctggagtccttttacgaaaaacctcctcctgggcttatcaaggaagatgagactaagccagaagattgcataccagatgtaccaggcaatgaacacgccagggaatttctggctcatgcaccaactaaaggactttggatgccactggggaaagaagtcaaagttatgcagtgttggcgttgcaaacgctatggtcaccgaacgggtgacaaagaatgccctttctttatcaaaggcaaccaaaagttagagcagttcagagtggcacatgaagatcccatgtatgacatcatacgagacaataaacgacatgaaaaggacgtaaggatacagcagttaaaacagttactggaggattctacctcagatgaagataggagcagctcgaattcctctgaaggtaaagagaaacacaagaaaaagaagaagaaagaaaagcataagaaaaggaagaaagaaaagaaaaagaagaaaaaacggaagcacaaatctt

SEQ ID NO: 68093 - DNA, 550 bp, Homo sapiens
ctttggtgtaataaacttgatatgtactggcttcctgcttatgtggtgcagttctactaatagtatagctttaacatgcctatacttacctgaccatttttgatctttttagtttaatgacatgtttaataagttactgggtaacattgaggaaacctagccctgtctattcatttgggtttgaaagattagaagtcctggctgtatttgcctccacagtcttggcacagttgggagctctctttatattaaaagaaagtgcagaacgctttttggaacagcccgagatacacacgggaagattattagttggtacttttgtggctctttgtttcaacctgttcacgatgctttctattcggaataaaccttttgcttatgtctcagaagctgctagtacgagctggcttcaagagcatgttgcagatcttagtcgaagcttgtgtggaattattccgggacttagcagtatcttccttccccgaatgaatccatttgttttgattgatcttgctggagcatttgctctttgtattacatatatgctcat

SEQ ID NO: 68094 - DNA, 576 bp, Homo sapiens
tccgagggcctgatgaatctcagtccttcggccatgaagaatctcctgcatcacattctcagcggcaaggagtttggagtggaacgaagcgttcgtcccactgattcaaatgtcagtcctgctatttctatccacgagattggtgctgttggagcaaccaaaacagaacgaactgggatcatgcagttaaaaagtgagataaagcagtcacctggaacctctatgactccaagtagtgggtcctttcctagtgcatatgatcagcagtcatctaaagatagtcgtcaaggtcaatggcaacgccgaagaaggctggatggggcactgaatagagttccagttggattttatcagaaagtatggaaagttttgcagaagtgtcacggactttctgttgaagggtttgtccttccttcctctaccactagagagatgactccaggtgagattaaattctctgttcatgtggagtctgtcctgaatcgtgtacctcagccagagtaccgtcagctgctggttgaagccatcctttgtcctcaccatgctggcagatattgaaatttcatagcatcggaa

SEQ ID NO: 68095 - DNA, 632 bp, Homo sapiens
ctgtataagagaaatttggtagacatctaaaacaagtctgtatattaaaaataataacttgatgaacaaaaactttccctggtggaatttcattttatgtttcataggacctttaacttgaaggaagtcctgaattctattggtattcagacttgtgttgaggttaacaagaccctgatggaaagaggtttacccactttaaatgctgagattcaagctaatcttataggtcaattttcaagcattgaagaggaggacaatcctatctggtccttgattgataaacgaattaagctttacatgagaaggctactttgtcttccaagccctcaaaaatgcatgcctcctatgccaggaggcctagctgtcattcagcaggagctagaagccctaggctctcaatatgcaaacattgtgaatctcaacaacctacgtgtatggtccgttttatgcaaatatacttcgaaagctgctcttcaatgaggaagccatggggaaggtagatgcttcacctcctgctaactaaagaagagctgacattggacgagagattggaaatccagtacaaaggtatccagtccacttccattgatggcattagagatcctcgaaatcgtcgaccgggaatgcgg

SEQ ID NO: 68096 - DNA, 433 bp, Homo sapiens
ggaacagatgaaacaaatgacagtttggtggctccacaggaaaaacaggttcataaaagcatcttgccaaacagcttaggagtgtctgaaagattgcagaggttgacttttcctgcagtgagtgtaaaagtgaatggtcatgaccagggtcagaatccacccctggacttggagaccacagcaagatttagagtggaaactcacacccaaaaaaccataggcggaaatgtgacaaaagaaaagcccccatctctgattgttccactggaaagccagatgacaaaagaaaagaaaatcacagggaaagaaaaagagaacagtataatggaggaaaatgctgaaaatcacataggcgttactgaagtgttacttggaagaaagctgcagcattacacagatagttacttgggctttttgccatgggagaaaaaaa

SEQ ID NO: 68097 - DNA, 440 bp, Homo sapiens
ggcaatcagaaatgcacgaggaacaaccaccgcatctcctccctgctctgcgacccccaggaaggctacctccagatgctgcagatctccaacctctatctgtatgacagtgttctgatgctggccaacgcctttcacaggaagctggaggaccggaagtggcataacatggcgagcctcaactgcatacggaaatccactaagccatggaatggtgggaggtccatgctggataccatcaaaaagggccacatcactggcctcactggggtgatggagtttcgggaggacagttcgaatccctatgtccagtttgaaatccttggcactacctatagtgagactcttggaagagcctttcgtgatggtggctgagaacatcctaggacagcccaagcgctacaaagggttctccatagatgtcctggatgcactggcca

SEQ ID NO: 68098 - DNA, 738 bp, Homo sapiens
gcggccgcactgcgggcaggggtagggcttctcgccgctgtgggtgcgcctgtgggctggcatctccgagctctggcggaagcagcgcccgcagtccgggcacgggtagggcttctcgccggtgtgggtgcgcacgtggcgccgcaggtcccgaggggtaggcgaaggcgcggccacagtccgggcaggggaagggggtctcgccgctgtgcacgcgccggtgctggtagagggcagagctctggctgaagcggcggccacagtcggcgcagccatagggtttctcgccggtgtggacgcgcaggtgcgaagtcagcgccgagcgctgcgtgaaggcccggccacactccagacagcggtggggccgctccccacgatggatggcccggtgtttgctcagggaggaagcgtggccgaagcccttgccgcagtctgcgcagtggaagggcttctcgcccctgtggctgtaaatgtgctccaccagtgtggagcgccaggcgaagctcttcccgcacacgtagcagccgtgacgctggtcagctcgggggacaggggggtgggcaaaaaagcgggggcgactccggcgccgggccttggacagctgctccaacccggcaaagggggcttggggagccttcagcccaggagacccggcggccacagggtcgggcttctccagggctcccgtcccatccctttgtctttcctcttccttgtttctggaatctgggtccgccc

SEQ ID NO: 68099 - DNA, 1948 bp, Homo sapiens
acttcaccaatgaagcccccccagctcctctcccagacgcctcggcttcccccctgtctccacaccgaagagccaagtcactggacaggaggtccacggagccctccgtgacgcccgacctgctgaatttcaagaaaggctggctgactaagcagtatgaggacggccagtggaagaaacactggtttgccctcgccgatcaaagcctgagatactacagggattcagtggctgaggaggcagccgacttggatggagaaattgacttgtccgcatgttacgatgtcacagagtatccagttcagagaaactatggcttccagatacatacaaaggagggcgagtttaccctgtcggccatgacatctgggattcggcggaactggatccagaccatcatgaagcacgtgcacccgaccactgccccggatgtgaccagctcgttgccagaggaaaaaaacaagagcagctgctcttttgagacctgcccgaggcctactgagaagcaagaggcagagctgggggagccggaccctgagcagaagaggagccgcgcacgggagccggaggcgagagggccgctccaagacctttgactgggctgagttccgtcccatccagcaggccctggctcaggagcgggtgggcggcgtggggcctgctgacacccacgagcccctggcgccctgaggcggagcatggggagctggagcgggagcgtgcacggaggcgggaggagcgccgcaagcgcttcgggatgctcgacgccacagacgggccaggcactgaggatgcagccctgcgcatggaggtggaccggagcccagggctgcctatgagcgacctcaaaacgcataacgtccacgtggagattgagcagcggtggcatcaggtggagaccacacctctccgggaagagaagcaggtgcccatcgcccccgtccacctgtcttctgaagatgggggtgaccggctctccacacacgagctgacctctctgctcgagaaggagctggagcagagccagaaggaggcctcagaccttctggagcagaaccggctcctgcaggaccagctgagggtggccctgggccgggagcagagcgcccgtgagggctacgtgctgcaggccacgtgcgagcgagggtttgcagcaatggaagaaacgcaccagaagaagattgaagatctccagaggcagcaccagcgggagctagagaaacttcgagaagagaaagaccgcctcctagccgaggagacagcggccaccatctcagccatcgaagccatgaagaacgcccaccgggaggaaatggagcgggagctggagaagagccagcggtcccagatcagcagcgtcaactcggatgttgaggccctgcggcgccagtacctggaggagctgcagtcggtgcagcgggaactggaggtcctctcggagcagtactcgcagaagtgcctggagaatgcccatctggcccaggcgctggaggccgagcggcaggccctgcggcagtgccagcgtgagaaccaggagctcaatgcccacaaccaggagctgaacaaccgcctggctgcagagatcacacggttgcggacgctgctgactggggacggcggtggggaggccactgggtcaccccttgcacagggcaaggatgcctatgaactagaggtaccatcaggagccaggccctgcctgactcagctctgcacccaggaaccccaggggagtgcagcatggcccctgtcttacagggttgtgggaggaacagacctgagacagcaggagtcacagggtccaggaagatccaaatcacccgaaggcggcgaggagcagtgagctgccaggtggcatgagagccactagccgagtggagccctcgaggggctgtggggatcctgaccccatctcactccacccactccccttcatttctgctatgcc

SEQ ID NO: 68100 - DNA, 1099 bp, Homo sapiens
gcggccgcgggagcttcccgggcctgtgccgtatgaaccaggcagttatcctggacatggaagatgaggaggaggaagagctgaccatggagatgtttgggaacagctccatcaaggtccctggtcgcccacagtttgagctggacatcgagcccaaggtgttcaagccgccgagtagcacagaggccctcgaatgacagccaggagttccccttccccgagacgcccaccaaagtgtggccgcaggacggaggtacatcgtggagtactcactagagtatggcttccttcgcctgtcgcaggccacccgccagcgcctgagcatccccgtcatggtggtcaccctggaccccacgcgggaccagtgcttcggggaccgcttcagccgcctgctgctggatgagttcctgggctacgatgacatcctcatgtccagcgtgaagggcctggccgagaacgaggagaacaagggcttcctgcggaatgtggtgtcgggcgagcactaccgctttgtgagcatgtggatggcgcggacgtcctacctggccgccttcgccatcatggtcatcttcacgctgagcgtgtccatgctgctgcggtactcacaccaccagatcttcgtcttcatcgtggacctgctgcagatgctggagatgaacatggccatcgccttccccgcagcgcccctgctgaccgtcatcctggccctcgtcgggatggaggccatcatgtcggagttcttcaacgacaccaccaccgccttctacatcatcctcatcgtgtggctcgcggaccagtatgacgccatctgctgccacaccagcaccagcaagcggcattggctgcggttcttctatctctaccacttcgccttctatgcctatcactaccgcttcaatgggcagtatagcagcctggccctggtcacctcctggctcttcatccagcattccatgatctacttcttccaccactacgagctgcctgccatcctgcagcatgtccgcatccagggagatgctgcttcagacgccaccgctgggccccgggacccccacggcagctgcccgatgacatgaacaacaactcgggcgccccg

SEQ ID NO: 68101 - DNA, 394 bp, Homo sapiens
ggcacgagatgagactagagctttgcctaaaggacttcccacactctcgacattcataaggcttttctccagtgtgaagtctccaatggtcattgagactgtagcttttgctaaaggatttcccacattcactgcatatgtaacatctttctgtagtgagggttctctgctgctgaacaagtgtgtgtttaccgctgaatgcttttgtgtgttctccacagttgtaatgagtttttcctctgtgactgatggccccaccgtcgcttttgctattggattgctccccagtgtgagcagcctgttgatggagaaatcccaacttggccaggaagtccttcccaacttctcttgaggtggaaagactcccctgacacatggaatgtgcagggcttcc

SEQ ID NO: 68102 - DNA, 1049 bp, Homo sapiens
aggtaaatggacattctgaggaaacttcccagtctcctaataggactgaaccacatgacagtgattgttctgttgacttaggtatttccaaaagcactgaagatctctcccctcagaaaagtggtccagttggatctgttgtgaaatctcatagcataactaatatggagattggagggctaaaaatctatgatattcttagtgataatggacctcagcagccatttacaaccgttaaaatcacatctgctgttgatggaaaaaatatagtcaggagcaaggctgccacactgttgtatgatcaaccattgcaggtatttactggttcttcctcatcttctgatttaatatcaggaacaaaggcaattttcaagtttgattcaaatcataatcccgaagagccaaatataataagaggccccacaagtgggcccacaatctgcacctcaaatatatggtcctccacagtataatatccaatacagtagcagtgctgcagtcaaagacactttgtggcactccaaacaaaatccccaaatagaccatgccagttttcctcctcagctccttcctagatcagagagcacagaaaatcaaagttatgctaaacattctgccaatatgaatttctctaatcataacaatgttcgagctaatactgcataccatttacatcagagacttggcccagcaagacatggggaaatgtgggccatctcaccaaacgaccgacttattcctgcagtaactcgaagtacaatccagcgacaaagtagtgtgtcctccacagcctctgtaaatcttggtgatccaggctctacaaggcgggctcagattcctgaaggagattatttatcatacagagagttccactcagcgggaagaactcctccaatgatgccaggatcacagagacccctttctgcacgaacatacagcatagatggtccaaatgcatcaagacctcagagtgctcgaccctctattaatgaaataccagagagaactatgtcagttagtgatttcaattattcacggactagtccttc

SEQ ID NO: 68103 - DNA, 503 bp, Homo sapiens
gcggccgccactagcgctggggcgcttggagagccgtcgccggcgctggtgctgggacgcagcgtgccccaggcggctgtccccgtgaggcccctggcgctgcacctggcgcacaaggcgcgtgggcccgggggccctttcggcggggagccgccaccgccaccgccgccgccgtcgccgttgccgccgttgctgcgggatccgccggccgaggacgcccgggaagaggtggcagctggccctgcggaaaagcggcagccgccgctgctgccgcctaagggaaatccctggaccaaaaagcctccccagcacctgtccccagacacgacaggtccgccaccgcccccgctggaaaccctggaggcagaattcggttccctcaaaattataaaagcaggaaagctcaagacaaagaaatccaacaaggctagtgatttcagtgatatggagaattggccaacaccaagtgaattagtgaacactggatttcagagcgtcctcag

SEQ ID NO: 68104 - DNA, 837 bp, Homo sapiens
ctcaagaccgaatccttcaagccatgggaaacatcgcactggcctttcatttgctgggggagcgagccagccctaactccttctggcagccctatattcaaaccctccccagggaatatgacactcctctctactttgaagaagatgaagttcggtatcttcagtccacacaagctatacatgatgtcttcagccagtataaaaacacagctcgacagtacgcctacttctataaagtcatccagacccatcctcatgccaacaaactacccttgaaggattctttcacttacgaggactacaggtgggcagtctcttctgttatgacgaggcaaaaccaaattcccacagaggatggttcccgcgtgaccctggctctgattcctttatgggatatgtgtaaccacaccaacggcctgacaccagaagattccttcgctcttgctgtcgcctctgcctaagaccctccattccttaggcacttacgggactcactcatagacctcctccagcgtggctgccctgagcaccctatgtggaatgactacgcctccagctcatccgccctcctgccctgtcctgttacatttccctctattgtccagatccgcttgtttctgcctttttaaaaaattattgttggttcacccccccgcctcccattagaatggaagatccatgaacgcagggtgattttgggggagggtctgttttgctcattgctatatcgctgtggtttttaatgaattcatgactggtaaataaatgactgtaaaagccccatgcctaggaaaaaagatcagaaagaaataaaccaaaatgttaacgtgaaaaaaa

SEQ ID NO: 68105 - DNA, 2197 bp, Homo sapiens
gaaaatctgcagccctgggattggcgattgctggggcggtggcatttgggtactccaatatctttgttacctccccaagccctgataacctccatactctgtttgaatttgtatttaaaggatttgatgctctgcaatatcaggaacatctggattatgagattatccagtctctaaatcctgaatttaacaaagcagtgatcagagtgaatgtatttcgagaacacaggcagactattcagtatatacatcctgcagatgctgtgaagctgggccaggctgaactagttgtgattgatgaagctgccgccatccccctccccttggtgaagagcctacttggcccctaccttgttttcatggcatccaccatcaatggctatgagggcactggccggtcactgtccctcaagctaattcagcagctccgtcaacagagcgcccagagccaggtcagcaccactgctgagaataagaccgcgaccgacagccagattggcatcagcgcggacactgcatgaggtttccctccaggagtcaatccgatacgcccctggggactgcaagtggaagaagtggctgaatgacttggctgtgcctgggaattgccttcaacaatcactccggataagttctcaaggcttgccccctttgcctgaagcttgtgaactgtactatgttaatagagataccctcttttgctaccacaaggcctctgaagttttcctccaacggcttatggccctctacgtggcttctcactacaagaactctcccaatgatctccagatgctctccgatgcacctgctcaccatctcttctgccttctgcctcctgtgccccccacccagaatgcccttccagaagtgcttgctgttatccaggtgtgccttgaaggggagatttctcgccagtccatcttgaacagtctgtctcgaggcaagaaggcttcaggggacctgattccatggacagtgtcagaacagttccaagatccagactttggtggtctgtctggtggaagggtcgttcgcattgctgttcacccagattatcaagggatgggctatggcagccgtgctctgcagctgctgcagatgtactatgaaggcaggtttccttgtctggaggaaaaggtccttgagacaccacaggaaattcacaccgtaagcagcgaggctgtcagcttgttggaagaggtcatcactccccggaaggacctgcctcctttactcctcaaattgaatgagaggcctgccgaacgcctggattacctgggtgtttcctatggcttgacccccaggctcctcaagttctggaaacgagctggatttgttcctgtttatctgagacagaccccgaatgacctgaccggagagcactcgtgcatcatgctgaagacgctcactgatgaggatgaggctgaccagggaggctggcttgcagccttctggaaagatttccgacggcggttcctagccttgctctcctaccaggtcagtaccttctctccttccctggctctgaacatcattcacaacaggaacatggggaagccagcccagcctgccctgagccgggaggagctggaagcactcttcctcccctatgacctgaagcggctggagatgtattcacggaatatggtggactatcacctcatcatggacatgatcccggccatctctcgcatctatttcctgaaccagctgggggacctggccctgtctgcggctcagtcggctcttctcttggggattggcctgcagcataagtctgtggaccagctggaaaaggagattgagctgccctcgggccagttgatgggacttttcaaccggatcatccgcaaagttgtgaagctatttaatgaagttcaggaaaaggccattgaggagcagatggtggcagcgaaggatgtggtcatggagcccacgatgaagaccctcagtgacgacctagatgaagcagcaaaggaatttcaggagaaacacaagaaggaagtagggaagctgaagagcatggacctctctgaatacataatccgtggggacgatgaagagtggaatgaagttttgaacaaagctgggccgaacgcctcgatcatcagcctgaaaagtgacaagaaaaggaagttagaggccaaacaagaacccaaacagagcaagaagttgaagaacagagagacaaagaaca

SEQ ID NO: 68106 - DNA, 792 bp, Homo sapiens
gttggtgctctctggaagaccacatccttccctagaaaggagattagttttggtttgggaagaggtctggtgttgggggagtttctccagctcccctggaactcctgtctctcccctacagaaggatctgaagagctgggtccaagggaacctcactgcctgtggccgctccctcttcctcttcgatgagatggacaagatgcccccaggcctgatggaagtcctgcggcctttcctgggctcctcctgggtggtatacgggaccaattaccgcaaagccatcttcatcttcatcaggtggggcccggctttgcagtgggcacagtgggggggccacttctcagaggttcagctctacagccttagcctgtgctcccagcagaatccagttccccatgggcttagctgggctttcccagtgccctccgccactctcagagatgacattgtcattccgcctggttgatttccctttggacattctcagcaaattctgggctcagtctttttgatcgccacttctttgtggaagccctgccaggtcaagaagttttccctcttttgtggtgaggaggacacaggcctgggaaaaataggaacagagttcttgtcctttagtcccagctctcagaatcctcgctgtgtttcctcaggcagcatggctccgcctctctgagcctctgtctctgcttctgaacagcggggccaataatgatgccccgatgccttcctggaagttcagtgagggaaagtcagttgagggacacaaaagtgttttgtaaactataaagt

SEQ ID NO: 68107 - DNA, 888 bp, Homo sapiens
  misc_feature (1)...(888): n = a,t,c or g
gcggccgcctcatgctggccggccacggcggcgtcttcgcgctcacgctgctgctcatcctcaccaccaccggcctcttcttcgtctttgactgtccctacctggctcgcaagctgacccttgccatccccatcatcgctgccatcctcttcttcttcgtcatgagctgcctgctgcagacaagcttcaccgaccctgggatcctgccccgggccactgtctgtgaagcagccgccctggagaaacagatcgacaacacaggcagttctacataccggccaccccctcggacccgggaggtgctgatcaacgggcagatggtgaagctgaagtactgcttcacctgcaagatgttccggccaccccgaacctcacactgcagtgtctgcgacaactgtgtggaacgatttgaccatcactgccccctgggtgggcaactgtgtggggagacggaactatcgcttcttctacacgtttattctctccctctcattcctgacggccttcatcttcgcctgtgtggtcacccacctgacgttgcgtgagttgtgggtgagggcagtggggagtggaaggggtcagccagcaagctcaagggtcagcaagcttcagcagtcactgtccctctgagcttgtcctctcctgtttctttctccccaggcgctcagggaagcaacttcctctccactctgaaggagacaccagcaagatatcctttgtcagctagaggacactccagtgggaactgaggtcccttcactgggtgggtgccctgcctcatcctctaatcagaagggaacagcgtacagctcacatgtgtcctccagaatccaacatgccagctcttctgttcacacccaggcaagagctgatcctatatggngcatt

SEQ ID NO: 68108 - DNA, 1991 bp, Homo sapiens
agacgctgcaggaattcggcacgaggcgcatttcggcaagttggagtgcttagtgcagttggtgagagcgggagctctcactcttcgtctccaccacacggtacgcgcagacgccagcgccacattgcagcctttgggggacatcctcagtgcctggtctggctgattcaagcaggagccaacattaacaaaccggattgtgagggtgaaactcccattcacaaggcagctcgctctgggagcctagaatgcatcagtgcccttgtggcgaatggggctcacgtcgataaccccaagaaaggcatcagggttctggagtggttgtttgagtgacacagcacaaggccttgatttcatcatgcttttgctgtggatgtagtgtagcttgctgaacaggtatggaagctgtctttgctgttaagtacttctcccgtttgtttatcaacctgcagctaacaggatgtctgcttttttacaggtttatttcacagagcagtgtacattcttgtcttccaggggaacttcaacatggagttacttttgatccctcagttttaattcagtgtctaaaggtttacaagttcaacttactctattttattcagctctttcacttactctgccatcacttcctacttgaatctgagttttagctactgtagaggtctcagacctttcctttttagtactattagccaggtaaaactttggttcttgtgagtggtagggatgagtttttaggacagtattcaaagcctttttaaaggaaccaactactcaaatgctctacaatgccaaaaatacaatactcctgcaggttttcccaagcaaggccaaaacaatcaaaatctgacagaaaaacacagctgttcagctctggaatctgatgataggctactttttaatgtcaggacatccttctaaacttccacttacagtgtcacatgtaagcatgaaggctggctcgttggtgagccattgctttgtttttaggaagacagttatgaatgccatggacaatctcagtacatgttgtttgttatgattttattcacgctaaaggaatgggtattaaaattaagtgcatataatatagaattcagtttcaagtctgaagttagcgtaaatttagattcttcagactaacataaaacatgattttgagaagttaaataggaagatgccttttttagaagtttagcatatttagtttatctcccaaatcttgcttagaaatcaaatgtatataagagaagttagttacagagctagattgattaactacttctttaatgaagatttgctatgaatttgtttactctttcataccaccttcagatagctagtcagttcagcaggagcagagaccaggttagcacgcggatggggtgtaattcagtgtttttgtgttgtacagcctgagaaatgccagtggcctgacagcagcagacattgcacaaacccagggtttccaagagtgtgcccagtttctcttgaacctccagaattgtcatctgaaccatttctataacaatggcatcttaaatgggggtcatcagaatgtatttcctaatcatattagtgtgggaacaaatcgaaagagatgcttggaagactcagaagactttggagtaaagaaagctagaactgaaggtgagaccgctttgcgggtgggaagagcacacttatttttcctttctgtaatatgttttctttttatggctgagcgcaccttcgagatgagaccttcacttcaggtggtaatgcgcctggtggattgtgcggtgacggtggagatttctcctgtactgccactgcgaagatgggacttaacaaaagggaatgtgagggaaatactgatggcccaagtgtaaatgtctatgtggaactttttgagcacccatgtttacctgccgtgaattagattttttaatttgttgtatctgtttgaaatatatctattaaaaaaaatctgccactgaaaaaaaaaa

SEQ ID NO: 68109 - DNA, 590 bp, Homo sapiens
gcagagcgggccctagaggaggccgtggccaccgggaccctgaaccttgtctaaccggcgcttgaagcacttcccccggggcgcggcccgtagctacgacctgtcagacatcacccaggctgacctgtcccggaaccggtttcccgaggtgcccgaggcggcgtgccagctggtgtccctggagggcctgagcctctaccacaattgcctgagatgcctgaacccagccttggggaatctcacagccctcacctacctcaacctcagccgaaaccagctgtcgctgctgccaccctacatctgccagctgcccctgagggtcctcatcgtcagcaacaacaagctgggagccctgccccctgacatcggcaccctgggaagcctgcgacagcttgacgtgagcagcaacgagctccaatccctgccctcggaactgtgtggcctctcttccctgcgggacctcaatgtccggaggaaccagctcagtacgctgcccgaagagctgggggacctccctctggtccgcctggatttctcctgtaaccgcgtctcccgaatcccagtctccttctgccgcctgaggcacctgc

SEQ ID NO: 68110 - DNA, 486 bp, Homo sapiens
atcgagatcactatccatgtggtggaattccggcctcccggccagcagccacagctccaaacttccggtgaccgtcgggttcagcggctgtgtgaagagactgaggctgcacgggaggcccctgggggcccccacacggatggcaggggtcacaccctgcatcttgggccccctggaggcgggcctgttcttcccaggcagcgggggagttatcactttaggtctgtgggtgctggcatcccaggccccagcagggcagggcaggggtctccaggaggttctggggaggggccccccctttcttctccatcacaacccctccccgcagacctcccaggagctacactgcctgatgtgggcctggaactggaggtgcggcccctggcagtcaccggactgatcttccacttgggccaggcccggacgcccccctacttgcagttgcaggtgaccgagaagcaagtcctgctgcgggcggatgacgga

SEQ ID NO: 68111 - DNA, 1061 bp, Homo sapiens
ttttttttttttccgtctagaatccgctttattatggcacctggtgggtctggtgggatctgagggaggaagaggctgcagtcttgctgggcagcccctcggtcagtccagcagcccctcaggccatgctgctgctcagctgcatggcaaagtcctgcacatgctccttcagagtctggcgggcatctgcctgtgcccgcttctcccgtgcccgctcctgctgcagcttggtcagtctcaaccgcagccgctgctcccgccgcttgcaggcctgcagctggcgctgggccttgtcaagggcatcaagggctgcctcggctcgccgcttccagagtaaggcgctgcccacctggtagctgtgttcattctggatgtaggctccggcgggtgggggcaggcgcagcatatacgctgagggggagactggccgtggttcgagaggggagggctgccgctctggtgaaggctgggcgctgcagcctgcttcatctgcctgggcacccaaggggcccagtaggtctgaaaaggggctgctaaggccaggctccagcctcccagctggggaggccggcaaagtggcaggtgctgaggcctcttccacaggaaagcaggtgacatcagcaggtggaggtggagaaaatggagttgtgggccctcggccctcggagcagcgcttcctgcatcgtctgagccggctgacttcaggggggccaggtgggtaactgtgtcctttggtcttggttgtccggcgcaacttggagaaagactcaaatatggtggggactgccccctcctttagcctgtgatatccactgattcccaccagctcaaagcagtcctcctcaaagtgtttggagcagaagtagatgtactcggatgccgggtcccacaggccctggccgctggggtccagccgctggcagttggccagccacaagcctcgcctcgggttgtccttcttgggaagtctgtggaaggagatgccgcggttgcgcgtctcgcgcgtgtcccgtgtgcagcagccggcggcggagcagtgacgcggcatgctctggccattg

SEQ ID NO: 68112 - DNA, 1353 bp, Homo sapiens
  misc_feature (1)...(1353): n = a,t,c or g
ggaggcagccctgaccgacttaagggttcaggcgcggtcccagcccgggacgatgtccatcggcacggagaaccgtggctctgggctgtccgcagtggccgtccaggaggtcatctcagatgtggtggaagtcaggctggccaacaggcccggaggtctggaggtgctgctgaaccaggaggtgctgagcttcaccgagcagagctggatggacctgaaaggaatgttcctgtcggtggctgccggggacagggtctccatcatgctggcatcaggggccggcctggaggtcagcgtgcagggcccgttcctgagtgtgtccgtcctgctgcctgagaagttcctcacccacacccacggcctcctcgggacactcaacaacgaccccaccgacgacttcaccctgcacagcgggcgcgtcctgcccccaggcaccagtccccaggagctgttcctgtttggggccaactggaccgtgcacaatgcgtcctccctgctcacctacgattcctggttcctggtccacaacttcctgtaccaacccaagcacgaccccaccttcgagcccctcttccccagtgagaccaccctcaaccccagcctggcacaagaggcagccaaactatgtggggacgatcatttctgcaactttgatgtggcagccactgggagcctgagcacgggcactgccactcgggtggcccaccagctgcaccagcgtcgcatgcagagcctgcagccagtggtgtcctgtggctggctggccccacctcccaacggacaaaaggagggcaacaggtacctggcgggttccaccatctacttccactgtgacaacggctacagcctggccggggcagagaccagcacctgccaggctgacggcacctggtcctcacccaccccgaagtgccagccaggacgcagctacgcggtgctgttgggcatcatctttgggggcctcgcggtggtggcggcggttgcgctcgtctatgtgctgctgcgccgcaggaagggcaacacgcacgtctggggtgcacagccctgatgggagcagcttggctgtgagcaccaggccaagactcctgagaacaggcagcccagtcctgcgactcccgcatccccaggaccagacacctgggacctggatacttgatacctgggcatttaaccccctactctgtcatctcagaccccaggcaggaggcccagtgttccaacacccaagccccgtgctagcagcgatccgtgctcttcaccaaatactcacggctctaattctcaanncntgangaaatcgtcgacccggganttccggnacagtcatctatcgtacggcttccttgggggcca

SEQ ID NO: 68113 - DNA, 536 bp, Homo sapiens
gcctgtgtgtctctgtgctttgctccttctcctacctccaaaatggctggactgcctccgatccagttcatggctactggttcaggggcaggggaccatgtaagccggaacattccagtggccacaaacaacccagttcgagcagtgcaggaggagactcgggaccgattccacctccttggggacccacagaacaaggattgtaccctgagcatcagagacaccagagagagtgatgcagggacatacgtcttttgtgtagagagaggaaatatgaaatggaattataaatatgaccagctctctgtgaatgtgacagcgtcccaggacctactgtcaagatacaggctggaggtgccagagtcggtgactgtgcaggagggtctgtgtgtctctgtgccctgcagtgtcctttacccccattacaactggactgcctctagccctgtttatggatcctgggtcaaggaaggggccgatataccatgggatattccagtggccacaaacaccccaagtggaaaagtgcaagagga

SEQ ID NO: 68114 - DNA, 690 bp, Homo sapiens
  misc_feature (1)...(690): n = a,t,c or g
tttagtgcagtatcctgaatttagattcacacagagttttaaatagttttatttaaaaattggtggagggaaacccataatttgaataatggagtctcttaaattcagtctgaattggactgcttgcattggtctgtcaggtgataactaaatttccctttcagttggtcctgttgaaacggaaccataaaatgactgtgatattacttatccaacataagaaggaaatcagcattttatttacattttatccctgtttcaatacacaaaagcaactccaaagtgaattgtttgagatttaaggtttgcttaactcttcccaaccctttggcttttagatttgcttggaacggtagaagaaatccttccaagcctctcagaaaatatcagtgtttgggggatgaaagattctgttccacaaggtgtaatttcactcaaagaaaaactgagcacctcacctgatgagcccgtgccacgcagccaccatgttgtctcactcctcaagtctacttgtctttacatttttacctctggaacaacaggtatgatccaattcttttggaaggcttaaaatgaatggcgaggaatttggcaaagcaacagtgttggggccaaatttctaccctgtgttggtggaccaacctctggaggatggctggttgcnaggaggtgttagggtcttcgggggtt

SEQ ID NO: 68115 - DNA, 243 bp, Homo sapiens
tggtgaaatgagctcggacaggatgaggaccatacggaggaaacatggtagcgcacgctatataccggccccagtttacgatgaaagccgttcgccagttcctgcgcctgatgaatcgcgttatcaatcgctgccttacgcgctttgtctttataggcatccggctgcgccacgcccagcgacacagaacgaatttcgttaagacccgccttcagcgcgccatccagcaaggaattcgatatc

SEQ ID NO: 68116 - DNA, 603 bp, Homo sapiens
caggaaacaatgctggtggagaatgggggctaccctcccctgtccctagaaggggcaggaagccaggttgctggggtttgggctcagggaagggcagagaggtgtctagggctgcaggaaggccccaccgtccccagcactcacccttgtgcggcatcagtgcataggtgaactcgtggcgccccgtgtcagcagtagcgtccggggctttaggcgcccgcaagctggggtgaggagggcgcgtaggggccacgctgaagctgttggagttgtggtcgggaagacccatttctccatgccagctcccaggcctggtgggtaccccacttacagcgagaggctgaggatgctgcctcgcactgacgcgccatacttgcagtcgttgagcagggccagcccaaagccgtgttctgacagatccatccagcgatgggcccacacctggagggcagatccaagacccacttggtggccctgtgcccctctttgtgctcccagactccagagctcctgtcactaggccgagcacaagctctagaaccacacaactgaactccagctcccactgtacggggccctgggcatgccacccaacctgcctaa

SEQ ID NO: 68117 - DNA, 868 bp, Homo sapiens
attgccactggaggcttggatttgatggcagtgttttatacacagaaagacagctgcatggaaaacaaaattctgctgggagtaaatggaggcctgtgcctgcttatatcattgggagccatctcaccctgggtccaaaatcgacagccacactcggggctcttacaatcaggggtcataagctgctatgtcacctacctcaccttctcagctctgtccagcaaacctgcagaagtagttctagatgaacatgggaaaaatgttacaatctgtgtgcctgactttggtcaagacctgtacagagatgaaaacttggtgactatactggggaccagcctcttaatcggatgtatcttgtattcatggtaagtcttgggagttactcaaggtcacttttgcagactttaaaattacaggaaaagaattgaaataactttcagtagctgtgaggctgcaaccatttgaggaggggggaaaataaccacaagtaaaaaggcgaagagcgtgaactcatatttgaacttcgttcaccttacttgtttttatttggggtaaataaagcaaatatatggtatgtaaatatttgaacttcgtttaccttacttgtttttatttggggtaaataaagcaaatatatggcatgttgcagcaccgttgcctaaccccctttaaaagatggtcgaatagtagtttgctatacctttactggagggcaggggagcacaaagtgaagaagagatagaatgtgccagcatgtcctggcagctttctgatccaaaggaaatagctttcttctgctgttgatggaaagagtacagagtgctgtgtgcgtggtcattctgtgcagacaagaaatgttcattctctt

SEQ ID NO: 68118 - DNA, 682 bp, Homo sapiens
tttcgtctgggccgctggggcaactatggccctgttgactgcttcgtcctggcctctgactacctcaacgccctggtgcacctcatcgaggttggcaatggcctcgtcaccttccagctgcgtggccttgagttccggggcacttactgccagcagcgcgaggtggaggctatcaccgagggtgtggaggaggacgagggctgttgctgctgtgaacctggccacctgccacgggtcctgtccttcaatgctgcctttgggcagcgctggctggcttgggaggtaacagccagcaagtacgtgctggagggctatagcattagtgacaataatgctgcctccatgctgcaggttttcgacctccgcaagatcctcatcacctactatgtcaagagcatcatctactacgtgagccgctcaccaaagctggaggtgtggctcagccatgagggcatcacggcagccctgaggcctgtgcgggtgcccggctatgccgactcggatcccaccttctcgctgagtgtggatgaggactatgacctccgcctgtctggcctctcgctgccctccttttgtgctgtgactcgagtggatccagtactgcgcctcccgcggccagcccgtggaccaggattggaactccccgctggtcacgctgtgttttggcctgtgtgtgctgggc

SEQ ID NO: 68119 - DNA, 801 bp, Homo sapiens
cccgggcccacgattttgtgggaggaagagatatcagaactgaaagttaattttattcacacggctgcttctggaacatctggagtgcctggtgtcccgccatgaacggtcactgcggatgactgtggtgaagcgccaggcccagtcaccttcgggggtctccagtgaggtggaggtgctgaaggccctcaagtcactgtttgagcaccacaaggccctggatgagaaggtgcgagagcggctccgggcagcgctggagcgagtcaccaccttggaggagcagctggcaggtgcccaccagcaggtgtctgccctgcagcagggggcaggggtgcgggatggagcggcagaagaggaggggactgtggagctggggccgaaacgcctgtggaaggaggatacgggccgggtagaggagctgcaggagctcctggagaagcaaaactttgagttgagccaggcccgggagcgactggtcaccctaacaacaaccgtgactgaactcgaggaggacctgggcacggcccgccgggacctcatcaagtcggaggagctgagcagcaagcatcagcgggacctccgggaggctctggcccagaaggaggacatggaagagcggattactacactggagaagcgctacctggctgctcagcgtgaggcaacatccatccatgacctcaatgacaagctggagaatgagctggccaacaaggagtccctgcaccgccaggtacctcctcagggtggggtggggatgggcattgtacttagccctggaggtgtcctcgtgaacctact

SEQ ID NO: 68120 - DNA, 730 bp, Homo sapiens
  misc_feature (1)...(730): n = a,t,c or g
ttggtcgacgatttcgtgcccgccccatcctcatcctcaaggagactcggcggctgccctgggccactggctacgcagaggttatcaatgccgggaagagcacacacaatgaagaccaagccagctgtgaggtgctcactgtgaagaagaaggcaggggccgtgacctcaaccccaaacaggaactcatccaagagacggtcctcccttcccaatggggaagggctgcagctgaaggagaactcggaatccgagggtgtttcctgccactattggtcgctgtttgacgggcacgcggggtccggggccgcggtggtggcgtcacgcctgctgcagcaccacatcacggagcagctgcaggacatcgtggacatcctgaagaactccgccgtcctgccccctacctgcctgggggaggagcctgagaacacgcccgccaacagccggactctgacccgggcagcctccctgcgcggaggggtgggggccccgggctcccccagcacgccccccacacgcttttttaccgagaagaagattccccatgagtgcctggtcatcggagcgcttgaaagtgcattcaaggaaatggtaggtattcctgggagtctggggcagcaaggccaggctggcgcctgcgccaaggctgtccgtccttcctggagggctcccagaaagcgcacgngtttgctgcctgggttcaccttgaccgccccctgtgaaaatggggg

SEQ ID NO: 68121 - DNA, 531 bp, Homo sapiens
  misc_feature (1)...(531): n = a,t,c or g
tttcgtgctggtgctgctgtgggcgctgggggcccggttccagggcagcccccagcagggcacgatcgtgggcatgaggctggcgagctgcaacaagtcgtgtgggacgaacccggatggcatcatcttcgtgtccgagggcagcaccgtgaacctgaggctgtacggctacagcctgggcaacatctccagcaacctgatctccttcaccgaggtggacgatgccgagaccctccacaagtccaccagctgcctcgagctcaccaaggacctggtcgtccagcagctggtcaacgtgagccgcgggaacacgtccggcgtgctggtggtgctcaccaagttcctccggaggagcgagagcatgaagctgtatgcactgtgcacccgggcccagcccgacgggccctggctgaagtggacggacaaggactcactgctcttcatggtggaggagcctgggaggttcctgcctctctggctgcacattctcctaattacggngctgctggtgctgtcgggcatattttctgg

SEQ ID NO: 68122 - DNA, 774 bp, Homo sapiens
agcatgggctgggtggggctccccagctgctgcggccaggacagcatctgcctctggttggaagcactcccagaaagtccaggctgcagagaagcagcaggccctgcagctgttctcagccctgccctggtcagcatggattccctgcctggtgctcagccgagcccagcctgcccctccctgtttcagtcctggctttgactcaaactctcagcttccaagtcctgatgccctcaggccctctgcccaggacatcagtggtgcccaggcctaccacagccccccaggaaactcggaatgatggggcctataccgtgcgccccagctcagggcctcatggctcccagcccttcaccctggcagtgcttctccgaggccgggtcttcaacattcccatccggcggctggatggcggacgccactatgccctgggccgggagggcagaaccgtgaggagctctttctccgtggcggccatggtcagcacttcatgtggcaccctctgccccctgtggacagacacaacggcaaccgggactcacctgcctgctcttcccaccaagccttgaggccacaacgaagaatgcaggtgtctgcccagttcactaggttctggatgaaggaaccgtggtggcctagaccagtcaggggacagcacaggcactgctggacaacaaaagatcctctcacatctacttgtgggctagggcacccttagaggactggctacctgcaagttacattcaataaacatttgttgaattaaaaaaaaaa

SEQ ID NO: 68123 - DNA, 568 bp, Homo sapiens
tttcgtggaaagctgccagagggcaggagtggaaaggattctggcgagcaccgggaggagtggcggctgcgggatcagctgccgagcaggcacagggacaggtgcctggagaagtactgggagagcgcccaggagcgctaccggctgagggtggggaagcgcagggccaagcgcgcgaagcaggttgtgggggaccgggtcgagtggaagtacccgccggagaggaaggccggctggctgtggcgcccagagacggtggagtccgaggaggaggagaaggaggaggggaatgaggaggaggaggaggcctgcagaaggaagagcagccccttagaagtccagcagcagcaactccggcggcccacagtcagattcagcacctgcctcagatctccacgtctgtctcagctgcccctctcctgctgcctctcaggcaccagtgccattaacgagctggcgaagatgggcgacccggatctcctggaagtgttggcggaggaaggggaaaaagtcaataagcatatatactactctttccaaatgagtgagcagagcctgagcagcagag

SEQ ID NO: 68124 - DNA, 711 bp, Homo sapiens
ggaaaatagcagattttgggttcagtaacctcttcactcctgggcagctgctgaagacctggtgtggcagccctccctatgctgcacctgaactctttgaaggaaaagaatatgatgggcccaaagtggacatctggagccttggagttgtcctctacgtgcttgtgtgcggtgccctgccatttgatggaagcacactgcagaatctgcgggcccgcgtgctgagtggaaagttccgcatcccattttttatgtccacagaatgtgagcatttgatccgccatatgttggtgttagatcccaataagcgcctctccatggagcagatctgcaagcacaagtggatgaagctaggggacgccgatcccaactttgacaggttaatagctgaatgccaacaactaaaggaagaaagacaggtggaccccctgaatgaggatgtcctcttggccatggaggacatgggactggacaaagaacagacactgcagtcattaagatcagatgcctatgatcactatagtgcaatctacagcctgctgtgtgatcgacataagagacataaaaccctgcgtctcggagcacttcctagcatgccccgagccctgggcctttcaagcaccagtcaatatccaggcggagcaggcaggtactgctatgaacatcagcgttccccaggtgcagctgatcaacccagagaaccaaattgtg

SEQ ID NO: 68125 - DNA, 768 bp, Homo sapiens
aaactggccacggccgggagcggaggggacagcggggatcgtgagctccggcccgggcgagcgggtgcgtctgccgcagagtcggcacctgaaggacatggaggaaagaccggcagagaccaatgccaatgtggacaactcggcgtccccctcggtggcccagctggccgggcggtttagggagcaggcggctgcagccaaggagacaccagccagtaaaccaacccgaaggaaaccgccctgttccctccccctgttcccccccaaggtagacctgggccagaatggtgaggagaaatcaccacccaatgcgagccaccctcctaaattcaaggtcaagagctcgcctctgattgagaagcttcaggccaatttaacctttgacccagctgctctactgcctggggcctcacccaagagtcctggactcaaggctatggtgtcgccatttcacagcccaccttctacccccagcagccctggtgtgcgatctaggcccagcgaggcagaggaggtgcctgtcagcttcgaccagccccctgaaggcagtcatctgccctgttacaacaaggtaaattctagctccagattatggcggtgtgtctgtggaaatgtgggcactggcacccctgaattttctctaccctgttgtcctggagaaaggaggaaacattcggagttactgtcagagctgcgtgttaacccaagtgaaatttctcctctcctttgcaaatgatccctgaactaggatcacctttttcctcgacc

SEQ ID NO: 68126 - DNA, 402 bp, Homo sapiens
tccatgaacatggtattatttaggcttttgatttgtgaaatcagccttttatacttttcagcagacatatacaccttttgtgtatatgtatgtctaagtatgttttagagctattgcaaactggcattttaaaaataaattttggttttagattaatcagtgctcgtatagaaaaggatgattgatttttatctacacgggtaatcatttctgtaaaaagggacagttttatttctttttgatttgtttgccttttatatcctgattttttagtgcagtgactagatcttttagtatagtattgaataggaatggtaagagcatacatccttgtcttgttcctgatctgtatgggaaagtattcagtcttttaccaataagtatgttgacatgccaggcaca

SEQ ID NO: 68127 - DNA, 627 bp, Homo sapiens
cttgatgtttttcacttgaagacattttgaactttttcttacagggtttctctgctgggctgtttgcattctaccatgataaagatggaaatcctctcacttcaagatttgcagatggcctcccaccttttaattatagtctgggattatatcaatggagtgataaagtagttcgaaaagtggagagattatgggatgttcgagataataagatagttcgtcacactgtgtatctcctggtaacgcctcgtgttgttgaggaagcacgaaaacattttgattgtccagttctagagggaatggaacttgaaaatcaaggtggtgtgggcactgagctcaaccattgggaaaaaaggttattagagaatgaagcgatgactggttctcacactcagaatcgagtactctctcgaatcactctggcattaatggaggacactgggagacagatgctgagcccttactgtgacacgctcagaagtaacccactgcagctaacttgcagacaggaccagagagcagttgccgtggtgtaatttgcagaagttccctaagcctttaccacaggaataccagtactttgatgaactcagtggaatacctgcagaagatttgccttattatggg

SEQ ID NO: 68128 - DNA, 885 bp, Homo sapiens
tttgggggatgggactgagatagatttcccttatttaatttttcttccatcctgcagatttatgacctgtgtgttgatgccttgagtccaaccttctattttctcctgccaagctcaaagataagagatgttaccttccttttcaatgaggagggaaagaacatcattgttataatgtcttcggctgggtacatctatactcagcttatggaagaggccagcagtgcccagcagggacccttctatgtcactaatgtgttggaaatcaatcatgaggacctgaaggacagtaacagccaggtggcgggcggtggtgtgtccgtgtactactcccacgtgttgcagatgttgttcttcagctattgtcaaggcaaatcattcgcagccaccatcagcaggacaaccctggaggtgttgcaactcttccccatcaacatcaaaagttccaatggtggcagtaagacttctcctgctctttgccagtggtctgaggtgatgaaccaccctggcttggtgtgctgtgtccagcaaactacaggggtgccgctggtagttatggtgaaaccagacacttttcttatccaggagattaagactcttcctgctaaagcgaagatccaagacatggttgctattaggcacacggcctgcaatgagcagcagcggacaacaatgattctgctgtgcgaggatggcagcctgcgcatttacatggccaacgtggagaacacctcctactggctgcagccatccctgcagcccagcagtgtcatcagcatcatgaagcctgttcgaaagcgcaaaacagctacaatcacaacccgcacgtctagccaggtgactttccccattgacttttttgaacacaaccagccagtctcaaaa

SEQ ID NO: 68129 - DNA, 1465 bp, Homo sapiens
tgatgctcaactgcaggttttttgtctctgtggaggcacttttatttgcatttctgatgggatgggtttattgtagaacttcaaatgtctagtgggtatccaaacaggaagctgattttctcctggtgaaacacaagaaaaacctctcccccatgttatcaccttccctgtttcccatgttttacttttgttgtctttccaccaaatcagttttccctcatgtgggctgttctttttaccagtaaaatgttgttctgcagaagtagtggtctgatttctataaatgtttaaaaaatttaaagtatagggtgctagattaagttcatctgggaagtgttatactccttactgtctttttcccttttttgtttaaccgattgagctttgagtgttctattagttctttcaattatggcctgtccttgggaattataagggattcctgttgtatgtgtaaattttccactgatttaagaatttttgaactgctttactacagtaacctggcccattgtctgttttaactttttctggaactcccatgacaggaaaacaagataataaatgtctttttaacatggggaagtacttttctcctgtctggcaggttgcccatatgaaatgtgaataagtatcaactgtcacatggaccaattgccaattttccaaatgaaggtaccgtgcatgacatccatttgccataacacattaggacatagacctctggggattaactcttgcctccctgagtggccaggtgtagaatctgacactgggtgcaatgttgtacaatattttttgtctgtttccatgtgatatcaaatttattttttaatcctattgcatttacatgagtcaaggcatgaagttcttgtgcttccatgaatgcagatgatactagcaagtcagcttgttcatttgctttagttaaaggccctggtaaattagtgtgtgctcgaatatgagtaatataaaatgggaaatttctttttcttacattttgttgtaacaaattaaacagcgggtttaactgatcatccataatgtatttgattagggctctctcaatatcctttgtagcctgtactacatatgcagaatctgatacaatattgatagattgatcaaaatcttattaacactgtaatgactgcaaccaactctgctctttgagtcaattgatactgagttttgattacttgctcttttggctctgtgtaagctgcttttccattgttggaaccatcagtatatactgtcagagcattttctaaaggtccgtgactggtaattttaggtaaaatccaagtagtcaattttaaaaactggaggatttttgtttttgggtaatgattatcagtaattcccacaaaatcagcaagaccaatctgccatgcaccagaattgataaaggcttgtctaacttgttccttggttaaagggacaactatttgtttgggtcatt

SEQ ID NO: 68130 - DNA, 547 bp, Homo sapiens
  misc_feature (1)...(547): n = a,t,c or g
cgttgctgtcggccgccgccgccgcgttggcctcgccgcccctgctcggacaccatgccacaaggagagtgatctcttcccctgttttcacaatggaggactccggaaagactttcagctccgaggaggaagaagctaactattggaaagatctggcgatgacctacaaacagagggcagaaaatacgcaagaggaactccgagaattccaggagggaagccgagaatatgaagctgaattggagacgcagctgcaacaaattgaaaccaggaacagagacctcctgtccgaaaataaccgccttcgcatggagctggaaaccatcaaggagaagtttgaagtgcagcactctgaaggctaccggcagatctcagccttggaggatgacctcgcgcagaccaaagccattaaagaccaattgcagaaatacatcagagagctggagcaagcaaatgacgacctggaaagagccaagcgcgccacggatcatggtctctcgaagacttttgagccagcgcttggantcaggccatcgaaaagaaatgg

SEQ ID NO: 68131 - DNA, 910 bp, Homo sapiens
  misc_feature (1)...(910): n = a,t,c or g
cgaggctacaaccccaacgtgaatgcaggcatcattaactcttttgctactgcagcctttagatttggccacacattaatcaatcctattctttaccgactgaatgccaccttaggtgaaatttccgaaggccaccttccgttccataaagcgctcttttcaccgtccagaataatcaaggaaggtgggatagacccggttctccgggggctgtttggcgtggctgctaaatggcgggcaccctcctaccttctcagtcctgagctgacccagaggctcttctccgcggcttattctgcggccgtggattcggctgccaccatcattcaaaggggtagagaccacgggatcccaccatatgttgacttcagagttttctgtaatttgacttcagttaagaactttgaggatcttcaaaatgaaattaaagattcagagattagacaaaaactgagaaagttgtacggctctccaggtgacattgacctctggcccgcccttatggttgaagacctgattcctggtacaagagtgggaccaacacttatgtgcatttgttacccagtttcagcggctaagagatggagataggttctggtatgaaaaccctggagtatttaccccggcacaactcactcagctgaagcaggcgtccctgagccgggtgctttgtgacaatggtgacagcattcagcaagtgcaggctgatgtctttgtaaanggcaagaatacccacaggattacctgaactgcaagcgagaatccccgaatgtggaccctgcgaagtgtngcaaagacttnctggtgagaactggtaaggagtangaggacagttccagagcagtngacgcaagaagtctcaaaagaaacgctcagcttcaatacagctatcctgtttgataaggatatt

SEQ ID NO: 68132 - DNA, 1347 bp, Homo sapiens
  misc_feature (1)...(1347): n = a,t,c or g
ttttttttttttaccataaaaacctttctatatcagctcacccacacctccctccgttcctccctgccctttctcgccctgggtgatcatcagggatgctggagtctggcgccccccccacaccaccagagctgaagccgacattcaaggtggacgtggcgccgtggagagccaagggaaggcccagctcctctccttcgtcccccactctctgtggggctcaggaaacacacgctgaccggaaggcagtggcccaggagaggcaggctagggtgcaggctcacgccattggtgcagtccttctggggcagaaaactcaacacgggctccggcttcccatcattgccaggcccgtccgtgtcccacacagagacagccccgctcgtgctgccactcactaggaactgcccggtcgggtccagatcgaagtagatgcgctgattggtggtcacctctcgacccagggaccacagtgggtaaccagactgccggagatcccagcacaggagctcagcatccttgcgggctcctgagaagaagcggttgccatcgggatgaaagcagaggtgggtgatgcccccttggtgccctcccagcaaggcgagaggggagccatcatcccaggcatacagacccagggagcggccgtaggagccacaggcatagaggggctgggctgggctgaaggctatgcaggagatgatgccgctctggccctgcttttttgcaaatgtggctcggacctcgcagtctcggccaggccgggccgtggaaaaaacactgcacaagtccggttgaagccactagaacgagctgggagccatccggggagaagcagagcgaatgggctgccgtcagctcatccaggtggttgtaggcgcgaaaggaagcccggagctctccagtgaatgcgtcccagatatgaatcgggttctcccggctgctgctggccacgtaggaggtgtctggctgggctgaggacatcagagaataccagcagtaatcatagatggtatcaccttccaccattcgaaggacagggaccatttctgcatattccacctgctccccctcatggtacagctctgggggcaggttataaattcgcaagatgttatcagcactattggtcaagatgcaggaaccgtcaggagcccacttacagcctttcaagaagttctcaggttgggtgctgaactctgaccaggacccactgagaaatcgaggcagctgggaaagtttaaagttccaaacggtgtctccctcgtcctctgcagcgggttccccaaaggtctnttnnttccnccgcnntttcgagggtttcaatggtctcgaannnnnacccac

SEQ ID NO: 68133 - DNA, 116 bp, Homo sapiens
ttttttttttttgagatggagtcttgctctgtcacccaggctggagtgccgtggcacgatctcagctcactgcaacctccacctcccaggttcaagcgattctcgtgcctcagcct

SEQ ID NO: 68134 - DNA, 1362 bp, Homo sapiens; identical to SEQ ID NO: 67933

SEQ ID NO: 68135 - DNA, 820 bp, Homo sapiens
tattccgtgcggcggaattcctgaaattaggaaaattttttatggaagctttcacaagctacacattgttgtcagtgagactttggtcaaagtggttattgactgcaagcaagtgggtgagaaggcaatgaacgcatcagctaatatcacgtcagatggtgtagaagtgctagggaaaatggttcgatcaagaggaccaggtggaaactctgcaccgttccagttacagatgtttgatattgtttgctccacatcatgggccaatacagacaaatgctgtgaacttccaggcctgagagatgatgagtcttgcccagaccttccccattcctgctcctgttctgaaaccaatgaagtggctctgggaccagcgggcccaccaggtggtccaggactccgaggaccaaagggccagcaaggtgaaccgggtccaaagggaccagatggccctcggggtgaaattggtctgccaggacctcagggtccacctggacctcaaggaccaagtggtctgtccattcaaggaatgcccggaatgccaggagaaaaaggagagaaaggagatactggccttccaggtgccacagggtatcccaggaggcgttggttcaccaggacgtgatggctcaccaggccagaggggccttccgggaaaggatggatcctcgggacctccaggaccaccagggccaataggcattcctggcacccctggagtcccagggatcacaggaagcatgggaccgcaaggcgccctgggaccacctggtgtccctggagcaaagggggaacgaaggagagcggggtgacctgcagttct

SEQ ID NO: 68136 - DNA, 630 bp, Homo sapiens; identical to SEQ ID NO: 68008

SEQ ID NO: 68137 - DNA, 970 bp, Homo sapiens
cggcacgaggaacggtcaatttgagccgcgtcgaggtcgggcttgggaagggtcagcgggaggcctgagggcgccgggcgctgcggcaggcgggcccggggtccagccgagagggtccgggcgccaggcaacgcgattcgcgcgggggtgaacccggggagggggccggcctccccgttctgggacctttcgctcccctgggacctgtggccgccgcccacagaccatgctcctggggcgcctgacttcccagctgttgagggccgttccttgggcaggcggccgcccgccttggcccgtctctggagtgctgggcagccgggtctgcgggcccctttacagcacatcgccggccggcccaggtagggcggcctctctccctcgcaagggggcccagctggagctggaggagatgctggtccccaggaagatgtccgtcagccccctggagagctggctcacggcccgctgcttcctgcccagactggataccgggaccgcagggactgtggctccaccgcaatcctaccagtgtccgcccagccagataggggaaggggccgagcagggggatgaaggcgtcgcggatgcgcctcaaattcagtgcaaaaacgtgctgaagatccgccggcggaagatgaaccaccacaagtaccggaagctggtgaagaagacgcggttcctgcggaggaaggtccaggagggacgcctgagacgcaagcagatcaagttcgagaaagacctgaggcgcatctggctgaaggcggggctaaaggaagcccccgaaggctggcagacccccaagatctacctgcggggcaaatgagtctggcgccgcccttcccgcccgttgctgctgtgatccgtagtaataaatgatgtcctctccaatggctgtgctactgcatggactgtatactcgatttcatgtgtatgtcgcagtaaacaaaaccaaacctcaaaaaaaaaa

SEQ ID NO: 68138 - DNA, 398 bp, Homo sapiens
aaaaaagagtgaaatactcccacaggatctagaaaatagcctcaaaagggcaaatctaagggttactggccttaaagaggaggtagaaggagagagagggatagaaagtttatttaaagagctaataatagagaccttttcaatcctaaagaaaaatatcaatattcaagtgcaaggttatagaacaccaagcagatttaacccaaataagactacctcaagacatttgataatcaaactcccaaaggtcagggataaagaaaggatctcaaaagcagcaagagaaaagaaacagtatacaatggggctccagtacatctggcagcagacttctcagtggaaaccttacagattaggagagaatggcatgacatatttaaagtgctaaaggaaaataa

SEQ ID NO: 68139 - DNA, 474 bp, Homo sapiens
cgaggctgccctgaggcctatgggacactttacagtgctaggcaaagcgtttcgagaggaggataatgccaccgcgggcctggtcgagctcgaccgggaagtcaactatgctttggtccccagggaaatccccggcactgggggcccgtggaacgtggtctttgtgccccgttgctcaggcgaggagtttctcggtctcggtcgcgtgttccacttcccggagcaagaggggcagatggtggagagcgtggccggcgccctgggtgtggggctgcgcagggtgtgctggctgcgatccatcggtcaggcggtccagccctgggtggaggccgtgaggtgccagagcctgggcgtgttttccgggagggaccagccagccccaggggaggagtcctttgaggtctggctagaccacaccaccgtgtattgcggccgctctggaggatccacgctaacgtacgcaggcgatacggc

SEQ ID NO: 68140 - DNA, 522 bp, Homo sapiens
agaggtggtgtttcagatatgctgatcaaagttcaagccacggaacaaatgggttactgccccatacagtgtgaaaagttgtgctatttgcctggaaactccaagtgcagcagtgtatatgagaactgtttagaacaaagcagggcaataggtaatgtccatccaagaggggtgcagtcccagcgagatacctcattattgaagcacacgtgccgagtggatctctttgatgacccctgctacattaatacacaggctcttcaaagtacacctggctctgctggaaatcaaaggtcagcccaaccactggggagcccatggcactgcggaaaggcaccagaaactgttcagccgggtgccacagcccagcctgccagctcacattctttgccacacattaagcagcagctgtggagcgaagaatgctatcatggcaagctgagcaggaaggcggcagagagcctcttggtaaaggatggggactttttggttcgagagagtgcaacatcccctggccaaaat

SEQ ID NO: 68141 - DNA, 1241 bp, Homo sapiens; identical to SEQ ID NO: 68046

SEQ ID NO: 68142 - DNA, 695 bp, Homo sapiens
  misc_feature (1)...(695): n = a,t,c or g
gcggccgctggcacgtccctgaagtagcgggcatcagcgaaggcggtctgcagggcatccacactgcgccgcacctcagccaccttctcctgggcgccggcgggcaggccccgcacgctggactccagagcctctaccgtgccctgcagctcgtgggtcaggctgcgggacagcaccagcgtctccagctctgcctggctccggcggcggctctccggagggcgctggccccattccccccacagctcgtgcaccttcccagggcgggccggggcggtgggggtcaccccacactgcatgtggtctatcagctccagcgtctcctgcagctgggccagggtgtcctgggcacggtgtttgctctgcctcagtttccccacagagtgctcgtaggccaggtggcggatccgtgctgacagggagccgaggcgcacaaagtagccctgctgtctcctctgatcctccaccgaacccacttcagggccttcagcctcagccgccagtgccgcgagctcttcctccgtcatgggcaggaagtgatccaccagctcctgtgatttttccagtacaacatccacagcatggctcagggagcgcttcagcttcacgatccagccccggcccctccggaccaggtccaccacancagtgactctgatggccaccacgtcattggctgaggtcaccacctggaa

SEQ ID NO: 68143 - DNA, 672 bp, Homo sapiens
tgaaggagatcttcatgcactcgggcctcaccaagaaccttttagcacacatatgggccctggccgatacgaggcatacggggaagttaagcaaagaccaattcgcgttagctatgtatttcattcagcagaaggtcagtaaaggcatcgaccctcctcaagtcctctcgccggacatggtcccgccttcggagagaggcacgcccggcccggacagttcaggctctctcggctccggggagtttactggcgtgaaggagcttgatgacatcagtcaagagattgcccagttacaaagagagaaatattcactggaacaagacattcgagaaaaggaagaggcaatcagacagaaaaccagcgaggtgcaggaattacaaaatgacctagaccgggaaacaagcagtttgcaggagctcgaggctcagaaacaggatgctcaagaccgcctggacgagatggaccagcagaaggccaagctccgagacatgctgagcgacgtccggcagaagtgccaggatgagactcagatgatctcatcactgaaaacgcaaatccaatctcaggaatctgacttaaagtcccaggaagacgatctgaaccgagccaagtcggagctgaaccgattgcagcaggaggaacccagctggagcagagatttatgctggcgag

SEQ ID NO: 68144 - DNA, 798 bp, Homo sapiens
  misc_feature (1)...(798): n = a,t,c or g
aactagcaagggggagaagaaagaaaaaaaaccaagagaagagcagaggaagtggacaaagcaagaaaaaacaaaaacgagacgcgaatgaagcaacgagacagaagaaagagaaagacagaggacagaggaagagaaagaaaggaaggcagagagaagaggaaacaaaagggcagaggagaggggagagggaaggggagggaagaggggagaggagagaggggagaggggagaggggagagaggagagaggagaggggggtcccacctacagcccctgagcgcccacctgtggtctgtccgttgcttcagacaattcagtgcccagaaatttctggacagccacctctgcaggccagacaccgccaagaacaaccgttgtgctgattttctaaaatttccatcctgcccgctgagccccggcggggcccaaaccgcaagcctgtgcctcctgtgtcagggcagctggcatcagttagaggtaatttcttgattagtcatgcgcgttcctcagcagtcctggctgtctgtcttccccgggggctgtccggtggccacagggcacagactcgaaatggcaacagatctggctgccaagaggctgcttgctggatccccagaccacacaggtacagacacgatggtggccgggtgaggccgccaccgtatgactttcaacagcacgtggtgtttaaatgtgtgcgaagcactgctgcctacgtggagagntaaagcaacanattccaagcccaggtgtgtgctcacacctgtatcccaatgctttggaaggcgaagcgga

SEQ ID NO: 68145 - DNA, 4975 bp, Homo sapiens; identical to SEQ ID NO: 67946

SEQ ID NO: 68146 - DNA, 1710 bp, Homo sapiens; identical to SEQ ID NO: 68080

SEQ ID NO: 68147 - DNA, 1523 bp, Homo sapiens
gcgggcggggcccgggaggtgctcacactgcagttgggacattttgccggtttcgtgggcgcgcactggtggaaccagcaggatgctgcgctgggccgagcgaccgattccaaggagcccccgggagagctgtgccccgacgtcctgtatcgtacgggccggacgctgcacggccaggagacctacacgccgcgactcatcctcatggatctgaagggtagtttgagctccctaaaagaggaaggtggactctacagggacaaacagttggatgctgcaatagcatggcaggggaagctcaccacacacaaagaggaactctatcccaagaacccttatctccaagactttctgagtgcagagggagtgctgagtagtgatggtgtctggagggtcaaatccattcccaatggcaaaggttcctcaccactccccaccgctacaactccaaaaccacttatccctacagaggccagcatcagggtctggtcagacttcctcagagtccatctccatccccggagcatctgtatgattcagaagtacaaccacgatggggaagcaggtcggctggaggcttttggccaaggggaaagtgtcctaaaggaacccaagtaccaggaagagctggaggacaggctgcatttctacgtggaggaatgtgactacttgcagggcttccagatcctgtgtgacctgcacgatggcttctctggggtaggcgcgaaggcggcagagctgctacaagatgaatattcagggcggggaataataacctggggcctgctacctggtccctaccatcgtggggaggcccagagaaacatctatcgtctattaaacacagcttttggtctcgtgcacctgactgctcacagctctcttgtctgccccttgtccttgggtgggagcctgggcctgcgacccgagccacctgtcagcttcccttacctgcattatgatgccactctgcccttccactgcagtgccatcctggctacagccctggacacagtcacttgttccttatcgcctgtgttcctctccagtttccatggttcatctgggctgacatgctgagcttctgtgggaaaaaggtggtgacagcaggagcaatcatccctttccccttggctccaggccagtcccttcctgattccctgatgcagtttggaggagccaccccatggaccccactgtctgcatgtggggagccttctggaacacgttgctttgcccagtcagtggtgctgaggggtatagacagagcatgccacacaagccagctcaccccagggacacctccaccctctgcccttcatgcatgtaccactggggaagaaatcttggctcagtatttacaacagcagcagcctggagtcatgagttcttcccatctgctgctgactccctgcagggtggctcctccttacccccacctcttctcaagctgcagtccaccgggtatggttctggatggttcccccaagggagcagcagtggagagcgtcccagtgtttggg

SEQ ID NO: 68148 - DNA, 420 bp, Homo sapiens
tttcgtttccgggcggtccgctgggaggtggcgcccggagggacacccgtgcctggggtcggggccagtgctcttctcggagctccagaagttctgctgagaagcgcggcggcagcaagacgacttctccggagccgccgagctggagttagaggtggagctccgtggggccgggcccccggctgcggggcagcggctcctgcaggcggaggccccggcggagaatgagccggagccggaggtggtggtggtctcctggcagagcggtgggaccgggagcaagctgcggtggttcaccaccttgatgctgtgtgcctccttcctggggctgggattgagtgttgctatagtgggacccacgtttcaagatttggcaacaaacgtgaaccgaaatatcagtagtctgtctttcatttttgg

SEQ ID NO: 68149 - DNA, 882 bp, Homo sapiens
ggaccagcagagcttaatcaggaagcttcagaagagaggtagtcccagtgacgtagttacacctatagtgacacagcattctaaagtgaatgactccaacgaattaggtggtctgactaccagtggctctgcagaggtccacaaggcgattacaatttccagtcccctaaccacagacctgactgcagagctgtctggtgggccaaagaatgtatcagtgcaacctgaaatatcagagggtcttgctactacgcccagcactcaacaagtaaaaagttctgagaaaacccagattgctgtcccccagccagtggctccctcctacagttatgctacccctaccccccaggcctctttccagagcacctcagcaccatacccagttataaaggaactggtggtatctgctggagagagtgtccagataaccctgcctaagaatgaagttcaattaaatgcatatgttctccaagaaccacctaaaggagaaacctacacctacgactggcagctgattactcatcctagagactacagtggagaaatggaagggaaacattcccagatcctcaaactatcgaagctcactccaggcctgtatgaattcaaagggattgtagagggtcaaaatgcccatggggaaggctatgtgatcgtgacagtcaagccagagccccgtaagaatcggccccccattgctattgtgtcacctcagttccaggagatctctttgccaaccacttctacagtcattgatggcagccaaagcactgatgatgataaaatcgttcagtcccattgggaagaacgtaaggggcatataagaaagagaagatttctgaagatccacccatgtattgcggccggctcgttgcctcacgc

SEQ ID NO: 68150 - DNA, 1864 bp, Homo sapiens
cccaacatcgcgatagtacccaaggacgggacgggatgggcaaacaagcaggatcagcaagacccaaagagttccagtgcgacggcctctcagccgccggagtcgctgccgcagccgggtttgcagaaatctgtctccaatttgcagaaaccgacacagtcaatcagtcaggagaatacaaattcagtgccaggtggaccaaagtcatgggcacagctgaatggaaagccagtaggacacgaaggtggtttaaggggctcaagccgactgttatccttctctcccgaggaatttccgacgctgaaagcagctggagggcaggacaaggctggcaaagaaaagggcgtcttagatctgtcgtatgggccaggaccaagcctccgccctcagaatgtgacaagctggagggagggcggtgggcgacacataatttctgccacgtctctgagcacctccccaactgagctgggcagcaggaactcgagtacgggagatggagccccctcctcggcatgtaccagcgattctaaggacccctctctccgcccggctcagcctgtccgaaaaggggcttcacagttcatgggaaatgtataccacccacctacataccatgacatgcttcctgcttttatgtgttcgccgaagtcatcagaaaaccagggtacagtggaacgaggctcttttccccttcctcagctccgccttgaacctcgagttccttttagacagttccagatgaatgaccaagacggaaaagaaaacaggctgggattgtctcgcccactccgcccactaaggcagctggtggagcgggcaccacggcccaccattatcaatgcggaaaacctgaagggccttgacgatctggacgccgatgccgatgatggctgggcaggcctccatgaagaagtggactattctgagaaactgaagttcagtgatgatgaagaggaggaagaagttgtgaaggacggcaggccaaagtggaacagttgggaccctaggaggcagcggcagttgtcaatgagctctgcagacagtgcggacgctaagcggactcgagaggaagggaaggactgggctgaagcagtgggtgcgtcccgtgtggtccgaaaggcgccagaccctcagccaccgcccaggaagcttcatggctgggcaccaggccctgactaccagaagtcatcaatgggcagcatgttccggcaacagtccatcgaggacaaggaggacaagcccccaccaaggcagaagttcattcagtcagagatgtccgaggcggtggagcgagcccgaaagcgccgggaagaagaggagcgccgagcccgggaggagaggctggccgcctgtgctgccaaactcaagcagctggaccagaagtgtaagcaggcacgaaaggcaggtgaggcccggaagcaggcagagaaggaagtgccctggtctccaagtgctgagaaggcatctccccaggaaaacggccctgctgtccacaaaggctccccagaattccctgcccaagagacccccaccacattcccagaagaggcacccacagtgtccccagcagtggcacagagcaacagcagtgaggaagaggccagagaggctgggtcccctgcacaggagttcaagtatcagaagtcccttcctccccgattccagcgccagcagcagcaacaacagcaggagcagctgtacaagatgcagcactggcagccggtgtaccccccgccgtcccacccccagcggcacttttacccacaccacccccagatgttgggcttcgatcccaaggggatgatgaagcctttcttcatggggccccgcgattatcccccctttgggccccggggggattttt

SEQ ID NO: 68151 - DNA, 1876 bp, Homo sapiens
tttcgtgaacatttggaccagttgctacaggtggacaatgaggagaggaaagccagggtatgtggccacctctggagtggggttgggaggtgcagagctgggacgtaccgggcctggagacgtctggtgagctcaggacaccctatgcatcctgtcaaatgctccaccctgcctgaccccacctctccttttttcaggacaggttgaagggcggcttggcccatccactgtggtcctggaccacacaggcggctttgaggggcttctcctggtggatgatgacctgctgggggtgattggacacagcaactttggcaccatccgctctaccacatgcgtgtacaaagggaaatggctctacgaggtcctcatctcctcccaggggctcatgcagatcggctggtgcaccatcagctgccgcttcaaccaggaggagggggttggagatacacacaactcctatgcctatgatggcaaccgcgtgcgcaagtggaatgtgaccacaacgaattatggcaaggcgtgggcagcgggggacatcgtgagctgcctgattgacctggatgatggcactctgtccttctgcctgaacggtgtatcactgggcactgcctttgagaacctgtccaggggcctgggtatggcctacttcccagccatcagcctctctttcaaggagtccgtggccttcaactttggcagccgtcctctgcgctacccagtggcaggctaccggcccctgcaggacccaccgagtgctgacctggtgcgggcacagaggttgctgggctgcttccgggcagtgctgagtgtggagctggaccctgtggaggggcggctgttggacaaggagagctccaagtggcggttgcggggccagcccaccgtcctcctcacactggcccacatcttccatcactttgcaccgcttctgcgcaaggtgtatctggtggaggctgtgctcatgagcttcttgctgggcatcgtggagaagggcacacccacacaggcacagtccgtggtgcaccaggtcctggacctcttgtggctcttcatggaggactacgaggtacaagattgcctcaagcagttgatgatgtctctgcttcggctgtaccgattctcacccattgtcccagacctgggcctacagatccattacctgcggctcactatcgccatcctgaggcatgagaagtcccgcaagtttctgcttagcaatgtcctcttcgacgtgctccgctccgtcgtcttcttttacatcaagagccccctgcgtgtggaggaggccggcctgcaggagctcattcccaccacctggtggccccactgctccagtagggagggcaaagagagcacggagatgaaggaggagaccgcagaggagcggctgcggcggcgagcctacgaacggggctgtcagcggctcaggaagcgcatcgaagtggtggaagaactacaggtccagatcctgaagctgctgctggacaataaagatgacaatgggggtgaagcttctaggtatatcttcctgaccaagtttcgcaagtttctgcaggagaacgccagtggccgggggaacatgcccatgctctgcccccctgagtacatggtctgcttcttacaccggctgatctctgccctgcgctactattgggatgaatacaaggcttccaatcctcatgcttccttcagtgaggaggcctacatcccgccccaggtcttctataatggcaaggtggactactttgacctgcagcgcctggggggcctcctctcgcacctgcggaagaccctcaaagatgaccttgcttccaaagccaacattgtgatcgacccactggagctccagtcaaccgccatggatgacctagat

SEQ ID NO: 68152 - DNA, 544 bp, Homo sapiens
tttcgtggcggagaggcacggaggagccgctgtggctgccgccacggccgcccggagtcctgggtcaagctgagtatctccacgtttaggtgcacaaatactattttgtgaagatcttaaatttgtggtataagaacttgaaggaaatagaactgatttgttacttctaaaaggttgtgctggtgaggtggaatgagccctaccagaaactggccacgtgcgatgcggacggaggcatattcgtgtggattcagtacgagggcaggtggtctgtggagctggtcaacgaccgcggggcgcaggtgagtgatttcacgtggagccatgatggaactcaagcacttatttcctatcgagatgggtttgtcctggttgggtctgtcagtggacaaagacactggtcatccgaaatcaacttggaaagtcaaattacgtgtggcatatggactcctgacgacccaacaggtgctgtttggcacggccgatgggcaggtgattgacatggattgccacggcaggatgctggcccacgtcctcttgcacg

SEQ ID NO: 68153 - DNA, 1037 bp, Homo sapiens
tacggctgcgagaagacgacagaagggtacggctgcgagaagacgacagaagggtacggctgcgagaagacgacagaagggtacggctgcgagaagacgacagaagggtacggctgcgagaagacgacagaagggtacggctgcgagaagacgacagaagggtacggctgcgagaagacgacagaagggtacggctgcgagaagacgacagaagggtacggctgcgagaagacgacagaagggtacggctgcgagaagacgacagaagggtacggctgcgagaagacgacagaaggggaacggcaagggccgcagccagcaccgggcggagagggctaccatggggaaaatcgcgctgcaactcaaagccacgctggagaacatcaccaacctccggcccgtgggcgaggacttccggtggtacctgaagatgaaatgtggcaactgtggtgagatttcggacaagtggcagtacatccggctgatggacagtgtggcactgaaggggggccgtggcagtgcttccatggtccagaagtgcaagctgtgtgcaagagaaaattccatcgagattttaagcagcaccatcaagccttacaatgctgaagacaatgagaacttcaagacaatagtggagtttgagtgccggggccttgaaccagttgatttccagccgcaggctgggtttgctgctgaaggtgtggagtcagggacagccttcagtgacattaatctgcaggagaaggactggactgactatgatgaaaaggccccaggagtctgtgggaatctatgaggtcaccccaccagtttgtgaagtgctgatccctcttccttccccagttgcccttaagaactgaggaaaggacaaagtacttctaagccaccagagccccacagaggctcgttccttttgacccttgtctcctggggtggctattacggaaacctttcacaatcttgcattgctgggacttttatttacagctttccccaagccccatcaataaagcccctgttcacgctgaaaaaaaaaa

SEQ ID NO: 68154 - DNA, 1089 bp, Homo sapiens; identical to SEQ ID NO: 67970

SEQ ID NO: 68155 - DNA, 1138 bp, Homo sapiens
gactctgcgggcagtgccctggaggaggacgacgaagacgacgaggaggatggggagcccccctacgagcccgagtcggggtgcgtggagatcccggggctgtcggaggaggaggacccagccccgagccggaagatccatttcagcacggcgcccatccaagtgttcagcacttactccaacgaggattacgatcgtcgcaacgaggatgtggatcccatggcagcctctgctgagtacgagctggagaagcgtgtggagaggttggagctgttccctgtggagctggagaaggactccgagggcctgggcatcagcatcatcggcatgggcgccggggcagacatgggcctggagaagctgggtatcttcgtcaagaccgtgacggagggtggtgcggcccatcgggatggcaggatccaggtgaatgatctcctggtggaggtggatggaacaagtctggtgggagtgacagagcttcgcggcgtctgtgctccggaacaccaagggccgagtgcggtttatgattggccgggagcggccgggagagcagagcgaagtggcccagctaattcagcagactttggaacaggagcgatggcagcgggagatgatggagcagagatacgcccagtatggggaggatgacgaggagacaggagagtatgccactgacgaggatgaggagctgagccccacgttcccgggtggtgagatggccatcgaggtgtttgagctagcggagaacgaggatgcactgtcccctgtggacatggagcccgagaagctggtgcacaagttcaaggagctccagatcaagcatgcggtcactgaggcagagatccagcagctgaaaagaaagctgcagagcctggagcaggagaaggggcgctggcgggtggagaaggcgcagttggagcagagtgtggaggagaacaaggagcgcatggagaaactggaaggctactggggtgaggcccagagcctgtgccaggctgtggacgagcacctgcgggagactcaggcgcagtaccaggccctggagcgcaagtacagcaaggccaagcgcctcatcaaggactaccagcagaaggagatcgagttcctgaaaaaggagactgcacagcgtcgggttctg

SEQ ID NO: 68156 - DNA, 561 bp, Homo sapiens
ttttttttttttagctgttcttaaattttattttccaaaaaatggcattttccaggtgccccagtcctcattcctaaggtcccacctcagttggcacctgtgcgtgtatatggatacactttccccccagggccctgcctggtatgggccagggcagcccatgaactctgggcctcaccatgaggttctgggtgaggccctcgtcccgcctcagtgctggcccgagctgccgagccagggccgcagcccccgtcttgcctctgtctgccggctgctcccggggcctgatcctctggcccccactgggcctgggctgcacatggcagctacctgctcactgtcctcctcactccctggcacacagcttcagggtggaccaatcacccaacgtcagattcggcccgcaggctaggtctcccgccacttcttcccgttcagcacctgcagcttctccaggctctgggtcactaagcacagtgcttgccccatctcacggacacggtcctccagggctcccgagagctcggggaggctcatggcctgcagggacgcttgccagcc

SEQ ID NO: 68157 - DNA, 1078 bp, Homo sapiens
ctgcccgcacgggtatcctgtatgaggcccggcgtcgggggacccggaagcagatgttccggccgggaaaggaggagacgaataactcgcccaaccccgagctgctatcgctggtacagaacctggatgaaaagcctcgggccgggggtgcagaatctggtcctgaagaagatgctctgagcctcggggctgaagcctgcaacttcatgcagccagtaggggccaggagttacaagaccctgcctcacgtgacacctaagaccccccctccaatggctcccaagaccccgccccctatgactcctaagactccacccccagtggctcctaagcccccatctcgagggctccttgatgggctcgcgaatggggcagcctcttcggctggaatccctgagccaccaaggctgcagggcaggggtggggagctgtttgctaagcggcagagccgtgcggacaggtatgtggcggaaggtacacctggtcctggtcttggccctcggcctagaagtccttctcctaccccgtatgtgcccccttcctggaaatattcacccaacatccgtgccccgcctcctattgcttacaacccactgctctctccctttttcccccaggcggcccgaactctccctaaggcccaatcccaggggcctcgggcaacacccaagcagggcatcaaggctctagattttatgcggcatcagccctatcaacttaaaactgccatgttctgttttgatgaggttcccccgactcctggccctatcgcctcagggtcccccaaaactgcccgagtccaggagattcgccggttttccactccggcaccccagcccactgcagaacccctggctcccactgtgcttgccccccgagcagccactacactggatgagcccatctggagaacagaactggcctcagcccctgttcctagcccagcccctcctccagaggctcccaggggccttggggcttctcccagctcctgcggtttccaggtagccaggccccgattttcagccaccagaacaggatttcaagttcaatgtttggaggcttgggcaaggcacca

SEQ ID NO: 68158 - DNA, 594 bp, Homo sapiens
attaacttccctgcttggctgaaacctataaaataaatgacatggagctggaaactcccagcgatgcacagcaattcctactttctggaccacccaggagatgatctgaatggcatatggatcttcatctacaatgtctgtgtttggcctgtcatctttatttcttgacttttcaaatactttagatgtctttagcttatataatacttgtagagttattgcagaagcatcccagaacttaactgacccatcagcatgccctgtaataattatttctgggtaactttgagcacccaagccccaattacctccgctgatgggccattcctttttgctgtaaccttgacgtttctgtctagctccaacagaataaagtgcaggaataaggtccacaggacaatccgcaaaatattcgcaacatgtaacaggggactcatgtatactcaaagggtagggattttcaaatataggatatccattttgtgcaaggtctataagtactaaatccttttctagaagaacaaccacagcatatggttcttgaaaatcatttgggtatggtgtttcacacagcgttagaaaatcaacaattgg

SEQ ID NO: 68159 - DNA, 811 bp, Homo sapiens
aatgaaaccgattgacatcattacgccgagcttggcacgaggcccgggtctgtggcccagggctcccctgacccccagcagacccccagcaggatgggtagggaaggggaagggactcatagcagcctgggatgctcctccctcgggatggttgtcatcgcagacctgagcacagaccccactgagctggaagagagggctctggaggtggctgggcccgatgggcaggccagtgccatatcacctgcctctcccaggaggaaggccgctgatggaggccacaggagggccttgccaggctgcacctcgctcactggggaaaccacaggagaaagtggggaggcagggcaggatggcaagccccccggcgatgtcctagtgggccctacagcctccctggctctggcacctgggagcggagagtccatgatgggtgctggagattccggtcatgcatccccggacacaggtccatgtgtcaatcagaagcaggagccaggtcctgctcaagaggaagccgagttaggtggccagaacctcgaacgagacctcgaggggttccgtgtgtccccgcaagcctctgttgtgctggaacacagagaaatagcagacgaccctctccaggagcccggggctcagcagggcattccagacaccacctcagagctggcagggcagcgagaccacctgcctcattctgcagaccagggcacctgggcagactctttagctgtggaactcgacttcctgctggacagccagatacaggatgccctggacgcctctgacttcgaagccccacctgagcagt

SEQ ID NO: 68160 - DNA, 803 bp, Homo sapiens
  misc_feature (1)...(803): n = a,t,c or g
gtagttttcatcaccattgcggttgcggggaggcccaggcatgttgagcaaaacaagcttggcgtcccgggatttcttcacgatgacctcgttcagccgcacggccgntgtgcatgcgccgcacgttggactggttcaagttctcccactccggcttcatgctgaagaagtccttgatgccctcagaggagacaggactgggggcccttaattcttctctgccaccgacttgtccttgggtccagggtgaaaatgcaccttctccggatctggtctccccttccccctcagggctcctccccttggggaacggggaactggtggggcactttggggaagcacttctgattcgtggatcagcttgcacctcctcctctgggcttctctttcactgtcaccagccgtctcttctggggacgttcaggcggagccgcgtgttggctggattctttctccggattgagcctcgtgactcatctgtgatactctggatctagggagtgacataggttggtgccagctctgctgggagtcaccacccatgccctgcaaagagctatcaccagagatgatgttcagccaggatgcactttctggaactgtaccagttgttaaaatattgctatgatttgagaccaaatagctactgcaccactgatctgcctgccccacctcctctccagaaccccagacctcatctggcaacaaaagggttaaccttggcacagcaaggctctgcctagcactatggtccaatgtcagtcctcagtccactggtcagtgaccatgccatgttttacccc

SEQ ID NO: 68161 - DNA, 877 bp, Homo sapiens
tttgaaatttgttgaacattatcacgccaagcttggcacgagggccggctccctctggctttttaaggacccctgtgccgcccccaacgaaggcttctgctccgccggagtccaaacggaggctggggtggctgacctcacttgggttggggagagaggtattctagtggcctccgattcaggtgctgttgaattgtgggaactagatgagaatgagacacttattgtcagcaagttctgcaagtatgagcatgatgacattgtgtctacagtcagtgtcttgagctctggcacacaagctgtcagtggtagcaaagacatctgcatcaaggtttgggaccttgctcagcaggtggtactgagttcataccgagctcatgctgctcaggtcacttgtgttgctgcctctcctcacaaggactctgtgtttctttcatgcagcgaggacaatagaattttactctgggatacccgctgtcccaagccagcatcacagattggctgcagtgcgcctggctaccttcctacctcgctggcttggcatcctcagcaaagtgaagtctttgtctttggtgatgagaatgggacagtctcccttgtggacaccaagagtacaagctgtgtcctgagctcagctgtacactcccagtgtgtcactgggctggtgttctccccacacagtgttcccttcctggcctctctcagtgaagactgctcacttgctgtgctggactcaagcctttctgagttgtttagaagccaagcccacagagactttgtgagagatgcgacttggtccccgctcaatcactccctgcttaccacagtgggctgggaccatcaggtcgtccaccacgttgtgcccacagaacctctg

SEQ ID NO: 68162 - DNA, 2009 bp, Homo sapiens
tttggacgcaaaccctccctcatcggccttgacccggagcaaggcccacctgaaccccatgtcgtacacccagcactgcatcaccacaatggctgctccctcctggaagtgcttgcctgctgcagagggtgatccccaaggccagggtctccatgatggcagcttcgggccagccagtgggacccttggtcaggaagaccggggcctcagcttcctactcaagcaggaggaccgtgagatccaggatgcctacctgcagctcttcaccaagctggatgtggccctgaaggagatgaagcaatatgtcacccagatcaacaggctgctgtccaccatcacagagcccacctcgggtgggtcctgcgacgcatccttggctgaggaggcctcctccctgcccctggtcagtgaagagagcgagatggacaggagtgaccatgggggcatcaagaaggtgtgcttcaaggtggccgaggaggaccaggaggactcaggccacgacaccatgagttatcgcgactcctacagcgagtgtaacagcaatcgagactcggtcctgtcctacaccagcgtgagaagtaacagctcctacttgggcagcgacgagatggggtctggagatgagctgccctgtgacatgcggatcccatctgacaagcaggacaagcttcatggctgcctggagcacctctttaaccaggtggactccatcaatgctctcctcaaggggccagtcatgagccgggctttcgaagagaccaagcatttccctatgaaccacagcttacaagagtttaaacagaaagaagagtgtacaatccgtggccggagcctgatccagattagcatccaggaggacccctggaacctccccaactccatcaagaccctggtggacaacattcagagatatgtggaagatgggaagaaccagctgctcctggccttgctgaagtgcacagacacggagctgcagctgcgcagagacgcgatcttctgccaggccctggtggccgccgtgtgcaccttctccgagcagctgctggcggccctgggctaccgctacaacaacaatggcgagtacgaggagagcagccgcgacgccagccgcaagtggctggagcaggtggcggccacgggcgtcctgctgcactgccagtccctgctctcgccagccacagtgaaggaggaacggaccatgctggaggacatctgggtgacgctgtcagagctggacaatgtcaccttctcctttaagcagctggacgagaactatgtggccaacaccaacgtcttctaccacattgagggcagccggcaggcgctgaaggtcatcttctacctcgacagctaccacttctccaagctgccctcccgcctggagggtggggccagcctgaggctgcacacagcgctgttcacgaaagtgctggagaacgtggaggggctgccttctccaggcagccaggccgcggaggatttgcagcaggacatcaacgcgcagtccctggagaaagttcagcagtattaccgcaaactcagggcattttacctggagcggtctaacctgcccacggatgccagcaccacggcggtaaagatagaccagctgatccgccccatcaatgccctggatgagctctgccgcctcatgaagtcctttgtccacccaaagcctggtgctgctgggagtgtgggcgccggcctcatccccatctcctcggagctctgctaccgcctgggggcctgccagatggtcatgtgtggcacaggcatgcagaggagcaccctgagcgtgtccctggagcaggcggccatcttggcacggagccacgggttgctgcccaagtgcatcatgcaggccacggacatcatgcggaagcagggcccaagggtggagattctggccaaaaacctgcgagtcaaggaccagatgccccagggtgctccgcgcctctaccgcctctgccagccgaaaatgaatggggacctatgaacacccctgtatt

SEQ ID NO: 68163 - DNA, 622 bp, Homo sapiens
acccccgaatccctcttcagaacggtcgtcttcccaatcatctaactcaccgacagcacctccagaggctccgaagttacagcgctggagaggctggagtgcaatggtgcgatcttggctcactgcaacctcctcctcccaggttcaagcaattctcctgcctcagcctctcaagtagctgggattacaggttcaggtttagcggtcgcatcctgggtctggctctgatccatcagtaccttcttgacgctttcttcacgaggcccttctacaaggcactcctgagactgccctgtgatttgagtgacctggaatatttggatgaggaattccaccagagtttgcagtggatgaaggacaacaacatcacagacatcttagacctcactttcactgttaatgaagaggtttttggacaggtcacggaaagggagttgaagtctggaggagccaacacacaggtgacggagaaaaacaagaaggagtacatcgagcgcatggtgaagtggcgggtggagcgcggcgtggtacagcataccgaggcgctggtgcgcggcttctacgaggttgtagactcgaggctggtgtccgtgtttgatgccagggagctggagctggtgat

SEQ ID NO: 68164 - DNA, 859 bp, Homo sapiens; identical to SEQ ID NO: 68004
  misc_feature (1)...(859): n = a,t,c or g

SEQ ID NO: 68165 - DNA, 1068 bp, Homo sapiens
ggaattcgtatgaacactcagcccccacctgctaaccctccctcctaggcatcttcagggctccctgggtccacaggaccctccccagatctcaggtctgaggacccccactcccaggttctggaactggtctctagcgacagcctgaacgtgccttcagaggaggaggtctaccgagccgtcctgagctgggtgaaacacgacgtggacgcccgcaggcagcatgtcccacggctcatgaagtgtgtgcggctgcccttgctgagccgcgacttcctgctgggccacgtggatgccgagagcctggtgaggcaccaccctgactgcaaggacctcctcatcgaggccctgaagttccacctgctgcctgagcagaggggcgtcctaggcaccagccgcacacgtccccggcgctgcgagggggccgggcctgtgctttttgctgtgggcggcgggagcctgtttgccatccacggagactgtgaggcctacgacacgcgcaccgaccgctggcacgtggtggcctccatgtccacgcgccgggcccgggtgggagtggctgcggtggggaaccggctctatgctgtgggcggctatgatgggacctcagacctggctaccgtggagtcctacgaccccgtgactaacacgtggcagccggaggtgtccatgggcacaaggcgaagctgcctgggtgtggccgccttgcatggactcctgtactcggccggcggctatgacggggcctcctgcctgaacagtgctgaacgctacgaccccctgaccggaacgtggacgtccgtcgctgccatgagcacccggaggcgctatgtgcgagtggccacgcttgatgggaacctgtatgctgtgggcggctactacagctcctcacacctggccactgtggataagtgaacttgtggtcgcccgtggcgtccatgctgagcctactcagctcagcgggcgtggccgtgctggatggtgccctgtacgtggcagggggcaacgactgcaccagctgcctcaactctgtagagagatacagtccaaggcttgagcctgggaagc

SEQ ID NO: 68166 - DNA, 678 bp, Homo sapiens
cccgggccgagccacgcgtccgctcattgtgaaatttgcagctcagaagaattttttacaaagactagagtcttacatccaaatggggaatggagtcagagtgacaacggctgtacccaaatctgagaggctctcttgtcttctccatcctattataccctctcctctccatcaatggttaccgaaataagtccaccttctctgtgaaccgaggtccagatggcaatccaaagactgtggggttctacctgggaacttggagagatgggaacgttgtctgtgtgcagtctaatcatctgaaaaacatccctgagaaacacagtcaagtggcgcagtactatgaagtattccttcgacagtctccattggagccctgccttgtatttcatgaaggtggatactggcgtgagctcacagtccgcaccaatagccaagggcacacaatggctatcatcactttccatccccagaaattaagtcaggaggagctccatgttcagaaggagattgtaaaggaatttttcatcagaggtcctggagcagcctgtggcttgacctcactttacttccaggaaagtaccatgacccgttgcagccatcagcagtctccctatcagcttctgtttggggaaccctacatctttgaagaacttctgagcttgaagatccgcatctctt

SEQ ID NO: 68167 - DNA, 2078 bp, Homo sapiens
ggggagtttgatgataaagaagcatttgtgacatctgcatataagaaaaaactgcaagagagagctgaagaagaagaaagagaaaagagggctgctgcactggaagcatgtttggatgtaaccaagcagaaagatctcagtggattttataggcacctattaaatcaagcagttggtgaagaggaagtacctaaatgcagctttcgtgaagccagatctggtataaaggaagaaaaatcaaggggcttctccaatgaagtaagttcaaaaaacagaataccacaagagaaatgcattcttcaaactgatgtgaaagtagaggaaaacccagatgcagacagtgacttcgatgctaagagcagtgcggatgatgaaatagaagaaactagagtgaactgcaaaagggaaaaggtcatagagacccctgagaatgacttcaagcaccacaggagtcaaaaccactctcggtcacctagtgaagaaagagggcacagtaccaggcaccacacgaaaggatcacgaacgtcgagaggacatgagaaaagggaagatcagcaccagcagaagcaatccagagaccaagagaaccattacactgaccgtgattaccggaaagaaagggattctcataggcacagagaggccagtcatagagattcccattggaagaggcatgaacaggaagataaaccaagggcgagggaccaaagagaaagaagtgacagagtatggaaaagggagaaagatagggagaaatattcccaaagagaacaagaaagagatagacaacaaaatgatcagaaccgacccagtgagaaaggagagaaggaagagaaaagcaaagcaaaggaagagcatatgaaagtaaggaaggaaagatatgaaaataatgataaatacagagatagagaaaaacgagaggtaggtgttcagtcttcagaaagaaatcaagacagaaaggaaagcagcccaaattctagggcaaaggataaatttcttgaccaagaaagatccaacaaaatgagaaacatggcaaaggacaaagaaagaaaccaagagaaaccctctaattctgaatcatcactgggagcaaaacacagactcacagaggaagggcaagagaagggtaaagaacaagagagaccacctgaggcagtgagcaagtttgcaaagcggaacaatgaagaaactgtaatgtcagctagagacaggtacttggccaggcagatggcgcgggttaatgcaaagacctatattgagaaagaagatgattgatggctaccccaagagaaagatttaaggaagcacagaaaactgtaattcctggaacctgctgcgtaaaaccataaaggagtgtgttaccagtagtttggagggcatttttaaatttattttcaaaattttaagttaaaagtcagtcttacagcttggatgtttggatgtggatgtttggctgaatttatatatagtgtgtactcatcaataccacattctttgttgtattcaagaaccgttaagagtgtgctaattccctgtaggtacataatgaggaaaatttgctccactacaaccattaaaaaataattttggccagatacggtagctcgtgcctgtaataccaacattttgggaggccaaggcagaaggatattgaggctaggcattcaagaccagcctaggcaggataataagaccttgtctctatttaaaaaacaaaaagcctagcatggtagtccatgcctgtagtcccagctgttcaagaggctgaggcaagaagatcacttgagcctaggaatttgatgttacagtgaggtatgatcatgccactgcactccaacctgggcaacagaatgagaccctgtctctaaaaaattttttttaaataaataatttaactcttctaataatgttttgttgcaggaaatgtatttcagataaaatatggatttgaaaaacagaaaatatactttatgttctgaaatttgtatttaagtataaaatgtgaatcatcttgtctaaattagcttacagcatagttggcttaaatggaaaattaaatgatatgcttattaaaaaaa

SEQ ID NO: 68168 - DNA, 781 bp, Homo sapiens
cagccgtagaccccgacgtcgtacaggatgtactcgaagtagccgtgcagctgctctttcaatttggtggctgctcgcttgtcaaacacctcctgcaggcacaggaagtccaggttggcggggaagaaggcggagacctcatggtcgaaggcctcgtcggggtgccgcctcctgcgtgcagccgccttcttcaccaccgaggccttgtacaggagcttgctgttggcacctggctccccgctggcactggtgtctggcccagctcgccccttcaccagggactcccgggaggccgaggggctgcccaggctccctgaatccccgtcctgctgattatggttgggcgtctggccccttgggcccccgccagctccgttcctggcctggcccccaggcacagggtcgtcagcttcaggtgggcggccgccctcctcgccaccgatgcgcacgatgcaggcatcctccgggctgctgctgtcgacagggtccccagaggctgggccgttggcagcctcgtcaccggggtgccgcccaccgtcacccttgtactccacagaggctgtcctcttaatgctcccggggacggcccgggccaccccatcgccgccctgtggtgacaccaggctgctgaagctagcggcgctgatggaggtattggtgggggagtcgatgtaaattttgatctggggccgggcggccccattgcggattctctgcccgatctccttggcccgcgcttgggtgtaaaaaggttgttgaccctggcgagtgagtcgggcag

SEQ ID NO: 68169 - DNA, 761 bp, Homo sapiens
ccgagacctcggtgtggcccttgaggcatttcaatgggcgagggccggcgactgtggatctggagctggacgcgctggaggggaaggagttgatgcaggacggcgcgtccctgagcgacagcaccgaggacgaggaggagggggcgagcctgggcgacggcagcggggcggaaggcggcagctgcagcagcagcaggcggtcgggcggcgatggcggggacgaagtggagggcagcggtgtgggagctggcgaaggagagactgtccagcacttcccgctcgcgcggcccaagtctctaatgcagaagctccaatgctccttccagacctcctggctcaaggactttccctggctgcgctattccaaggatactggtcttatgtcttgcggctggtgccaaaagacccctgcagatgggggaagcgtggaccttcccccagtggggcatgatgagctttcgcgagggacccgcaactacaagaaaaccctcctcctgaggcaccacgtctctaccgagcacaaactccacgaagccaacgcccaggagtcagaaataccatcagaggaggggtactgtgactttaatagtaggccaaatgagaactcttattgctatcaacttctgcgacaactaaatgaacagagaaagaaaggtattctttgtgatgtcagcattgtggtaagcggaaaaatcttcaaagctcataagaacatcctggttgcaggcagccgtttctttaagactttatattgcttttca

SEQ ID NO: 68170 - DNA, 1415 bp, Homo sapiens
gcgggatacaccttccgaggaggtctccagtgcattccaaagtgcgggaggttctgagttactttcaccatcaaaagaaagttcggcagggagtggaagagatgctttatagattatataagcccatcctttggagaggattaaaggccagaaactctgaagttcgatcaaatgctgcattgttgtttgttgaagcatttcctattagggatccaaaccttcatgctattgaaatggatagtgaaatccagaaacagtttgaagagctctatagccttttagaagatccttacccgatggtccgttccacagggatccttggtgtttgtaaaataacttctaagtactgggaaatgatgcccccgaccattcttattgacctcctgaagaaggtgactggggaactggcatttgacacgagctcagctgatgttcgttgttctgtctttaagtgtctgccaatgattttggacaacaaactgagccaccccatttttagagcagctccttccagctctcagatacagtctccacgacaattcgggagaaagtgagggtagcttttgtggacatgctgttgaagatcaaagctgtgagggctgctaagttttggaaaatatgtcccatggagcacattctggttcgtctggaaactgattctcgacctgtgtctcggcgcctggtgagcctcatctttaattctttcctgcctgtgaatcagccggaggaggtctggtgcgagcgctgtgtcaccctggtgcagatgaaccacgccgctgccaggaggttctatcagtacgcccacgaacacaccgcctgcaccaacatagcaaagctgattcacgttattcgtcattgcttaaatgcctgtatccagagggcagtgagagagcctccagaggacgaggaggaagaggacggaagggagaaggagaatgtgactgatgatcgctgcaagatccctttattcatgctaatgtcctttatgccggcctctgctgtccccccattcagctgtggtgtgatttccacgctgagaagccgggaggagggcgctgtggacaagagctactgcactttgttggattgcctctgctcctgggggcaggtggggcacattctggagcttgttgacaactggctgcccacagagcatgcccaggccaagagcaacacagcttctaaaggtagggtgcagatccatgacacacgcccagtcaaacctgaattggcattggtctacattgagtatctgctgactcatccaaagaaccgcgagtgcttgctctctgctcctcggaagaaacttaaccatcttttgaaagcccttgaaacgtcaaaggcagatctggagtcacttctgcagacaccgggtgggaagcctcgtggcttcagtgaagcagctgccccggcgc

SEQ ID NO: 68171 - DNA, 561 bp, Homo sapiens
acaagtgctggtcgaagtgtgaggagagtgaggggtttgtgagtgaagactgtgtcgcacatggcgcacttgtagatcagcttggcctgctgagtttggaagctgggatgctgggagtagaggtgggcatgggcacttggcccagacttgaaggccatggggcagatggggcacttgtggaaaaccccgcagtgcgacgtctggatgtgggacttgatggagttcacacccccaaacaccactgaacagctggggcacctgtatcctacacggcgagagacgtgcagacaggcctcccggagatgggtctgaaaatcggcttgcaggaagttgcccccacactcaggacagacatgggggggtcgattcttatgcatgcgctggtgggcgctgaagctgcagcgattggggagcatcatggggcaggttgggcacacattgctggtggccccagggcaagcaagtgctggtcgaagtgtgaggagaggaggggtttgtgagtgaagactgtgtcgcacatggcgcacttgtagatcagcttggcctgctgagtttggaagc

SEQ ID NO: 68172 - DNA, 1713 bp, Homo sapiens
tttcgtagcagcttggtcgcgacaggtgcgctaggtagagcgccgggacctgtgacagggctggtagcagcgcagaggaaaggcggcttttagccaggtatttcagtgtctgtagacaagatggaatcatctccatttaatagacggcaatggacctcactatcattgagggtaacagccaaagaactttctcttgtcaacaagaacaagtcatcggctattgtggaaatattctccaagtaccagaaagcagctgaagaaacaaacatggagaagaagagaagtaacaccgaaaatctctcccagcactttagaaaggggaccctgactgtgttaaagaagaagtgggagaacccagggctgggagcagagtctcacacagactctctacggaacagcagcactgagattaggcacagagcagaccatcctcctgctgaagtgacaagccacgctgcttctggagccaaagctgaccaagaagaacaaatccaccccagatctagactcaggtcacctcctgaagccctcgttcagggtcgatatccccacatcaaggacggtgaggatcttaaagaccactcaacagaaagtaaaaaaatggaaaattgtctaggagaatccaggcatgaagtagaaaaatcagaaatcagtgaaaacacagatgcttcgggcaaaatagagaaatataatgttccgctgaacaggcttaagatgatgtttgagaaaggtgaaccaactcaaactaagattctccgggcccaaagccgaagtgcaagtggaaggaagatctctgaaaacagctattctctagatgacctggaaataggcccaggtcagttgtcatcttctacatttgactcggagaaaaatgagagtagacgaaatctggaacttccacgcctctcagaaacctctataaaggatcgaatggccaagtaccaggcagctgtgtccaaacaaagcagctcaaccaactatacaaatgagctgaaagccagtggtggcgaaatcaaaattcataaaatggagcaaaaggagaatgtgcccccaggtcctgaggtctgcatcacccatcaggaaggggaaaagatttctgcaaatgagaatagcctggcagtccgttccacccctgccgaagatgactcccgtgactcccaggttaagagtgaggttcaacagcctgtccatcccaagccactaagtccagattccagagcctccagtctttctgaaagttctcctcccaaagcaatgaagaagtttcaggcacctgcaagagagacctgcgtggaatgtcagaagacagtctatccaatggagcgtctcttggccaaccagcaggtgtttcacatcagctgcttccgttgctcctattgcaacaacaaactcagtctaggaacatatgcatctttacatggaagaatctattgtaagcctcacttcaatcaactctttaaatctaagggcaactatgatgaaggctttgggcacagaccacacaaggatctatgggcaacaaaaattgaaacggaggggttttgggagagaccacgcaactttgaaaatcaagggagacccctcaaaagcccagggggtgaagattgccccagttgctaaggtggttgtcctggctcgaattattgagcccaaggctcctcttcacgagagaaaggaggacaagccagctggaacccgaaacttagggtcgcc

SEQ ID NO: 68173 - DNA, 791 bp, Homo sapiens
gcgctccgccctctccagctcccctctccttttgtttttcataaactgcagggatcaggccctctggtcctgacagaggaggagaagaggaccctgatcgctgagggctatcccatccccaccaaattgcccctgtcaaaatcagaggagaaggccctgaagaaaattcggaggaagatcaagaataagatttctgctcaggaaagtaggagaaagaagaaagaatacatggacagcctggagaaaaaagtggagtcttgttcaactgagaacttggagcttcggaagaaggtagaggttctagagaacactaataggactctccttcagcaactccagaagcttcagactttggtgatgggcaaggtttctcgaacctgcaagttagctggcacgcagactggcacctgcctcatggttgtggtgctgtgctttgccgttgcattcggcagcttctttcaaggctacgggccctatccttctgccaccaagatggctctgcccagccagcattccctgcaggagccctacacagcctccgtggtgagatccagaaacctgctgatctacgaggaacattctcccccagaggagtcatccagcccgggctcggctggggagctggggggctgggatagaggttcctccctgctcagggtgtcagggctggagtccaggccggatgtggatcttccccatttcattatctcgaatgagaccagcctggagaagtcagtgcttttggagctgcagcagcacctggtcagcgccaaactgggaggggaatgaaa

SEQ ID NO: 68174 - DNA, 894 bp, Homo sapiens
agaggaccccaacttgaaagaaagggaacagctgggatcagaccagacaaatttgtttccaaaggactctgtcccctcagagagtcttccaattactgtacaacctcaagctaatacgggacaggtagtcctgataccagggctcatttcgggtttggaagaggatcagtatggcatgcccctggccatcttcacaaagggatatctgtgtttgccttacatggcattgcagcagcatcatcttctctccgatgtcaccgttcgggggtttgttgctggagctactaacatcctttttcgacaacagaaacacctcagtgatgccattgtggaagtagaagaagctctgatccagatccatgatccagaactcaggaagctgcttaacccaaccactgcagacctaaggttcgcagactacctagtgaggcacgtgactgagaatcgggatgacgtcttcctagatggcacgggctgggagggaggtgacgaatggatccgggcccagtttgcggtctacattcatgccctgctggctgccacgctgcaattagacaatgaaaagatattatcggactatgggacaacttttgttacagcatggaagaatactcacaactacagggtgtggaacagcaacaagcatccagcacttgcagaaataaatccaaaccatccatttcaaggccaatactcagtatcagacatgaagttaaggttctcacattctgttcagaatagtgaacgtggcaaaaaaattggaaacgtcatggtcacaactagccggaatgttgtacaaacaggaaaagctgttggccagtcagttggaggagctttttccagtgcaaagacagctatgtcttcatggctttccactttcaccagttccacctc

SEQ ID NO: 68175 - DNA, 568 bp, Homo sapiens
actgggtgcaggaagaggggtcacccctgtgctctgggccccaggattgggagtaccaaggcaggggctgacttgctggctctgaccacacagcccctcgtggctgcagggagccaataggagacctgggcacagtgcccagcctgggtgtggcttttgagcaaagccagccccagaagcagcttagggtgataggggaggcttcccaggagaccaggaagaggcttgggggtggcagccagcacagcccggtggagggcggcccggagacgcaccaggggacggatgcatgaacctgagacgtgtgagtcaagttgtgtgtgagcccgggatgcatgggagctggggtgcatgtgagcaggggtacatgggagctggggtgcgtgtgggcccggggtgcatgagtgagggtgtgtgtgagccggagtgcatgtgggcccggggtgcgtgtaagagggggtgcgtgtgagcccggggtgcgtgtgagcccggggtgcgtgtgagcccggggtgcgtgtgaggggggtgcgtgtgagccggggtgcgtgtgaaaaggggtgcgtgtgac

SEQ ID NO: 68176 - DNA, 424 bp, Homo sapiens
gtcgacgatttcgtctgtcacggaccttgccgccttcttctacttcgcatccgccgagcctgcccgggtccgggcgcttgtctatgggcaccacggggatccagccaaggtcgtcgagtaagagacggcgccgaaaccggggaaggggactggggtttctggaaggctttaacacgagctgcggactgggaagagagggacagggtccgaggaagggggcagagaatagcaaaccgaagccgaagcccagggcgtttttggtaggtcagaaagaccgtacttgaaggtagctgaagacccgagaggcaattatcagggtattaatggctgatgtttattgatcgaatattgtgtcaggcaatcccttgtttaaatggatgctctcatttaattgtcacaacaatgttttggggtagttattgat

SEQ ID NO: 68177 - DNA, 2452 bp, Homo sapiens
cgatttcgtgggaagctcagattgcggaaatcattcagtgggtcagtgacgagaaagatgcccggggttaccttcaagctcttgcttccaagatgaccgaagagctcgaggctttgaggagttctagtctggggtcaagaacactggacccgctgtggaaggtgcgccgcagccagaagctggacatgtccgcgcggctggagctgcagtcggccctggaggcggagatccgggccaagcagcttgtccaggaggagctcaggaaggtcaaggacgccaacctcaccttggaaagcaaactaaaggattccgaagccaaaaacagagaattattagaagaaatggaaattttgaagaaaaagatggaagaaaaattcagagcagatactgggctcaaacttccagattttcaggattccatttttgagtatttcaacactgctcctcttgcacatgacctgacatttagaaccagctcagctagtgagcaagaaacacaagctccgaagccagaagcgtccccgtcgatgtctgtggctgcatcagagcagcaggaggacatggctcggcccccgcagaggccatccgctgtgccgttgcccaccacgcaggccctggctctggctggaccgaagccaaaagctcaccagttcagcatcaagtccttctccagccctactcagtgcagccactgcacctccctgatggttgggctgatccggcagggctacgcctgcgaggtgtgttcctttgcttgccacgtgtcctgcaaagacggtgccccccaggtgtgcccaatacctcccgagcagtccaagaggcctctgggcgtggacgtgcagcgaggcatcggaacagcctacaaaggccatgtcaaggtcccaaagcccacgggggtgaagaagggatggcagcgcgcatatgcagtcgtctgtgactgcaagctcttcctgtatgatctgcctgaaggaaaatccacccagcctggtgtcattgcgagccaagtcttggatctcagagatgacgagttttccgtgagctcagtcctggcctcagatgtcattcatgctacacgccgagatattccatgtatattcagggtgacggcctctctcttaggtgcaccttctaagaccagctcgctgctcattctgacagaaaatgagaatgaaaagaggaagtgggttgggattctagaaggactccagtccatccttcataaaaaccggctgaggaatcaggtcgtgcatgttcccttggaagcctacgacagctcgctgcctctcatcaaggccatcctgacagctgccatcgtggatgcagacaggattgcagtcggcctagaagaagggctctatgtcatagaggtcacccgagatgtgatcgtccgtgccgctgactgtaagaaggtacaccagatcgagcttgctcccagggagaagatcgtaatcctcctctgtggccggaaccaccatgtgcacctctatccgtgggtcgtcccttgatggagcggaaggcagctttgacatcaagcttccggaaaccaaaggctgccagctcatggccacggccacactcaagaggaactctggcacctgcctgtttgtggccgtgaaacgagaaatcctttgctatgagatccagagaacgaagccattccacagaaagttcaatgagattgtggctcccggcagcgtgcagtgcctggcggtgctcagggacaggctctgtgtgggctacccttctgggttctgcctgctgagcatccagggggacgggcagcctctaaacctggtaaatcccaatgacccctcgcttgcgttcctctcacaacagtcttttgatgccctttgtgctgtggagctcgaaagcgaggagtacctgctttgcttcagccacatgggactgtacgtggacccgcaaggccggagggcacgcgcgcaggagctcatgtggcctgcggctcctgtcgcctgtagttgcagccccacccacgtcacggtgtacagcgagtatggcgtggacgtctttgatgtgcgcaccatggagtgggtgcagaccatcggcctgcggaggataaggcccctgaactctgaaggcaccctcaacctcctcaactgcgagcctccacgcttgatctacttcaagagcaagttctcgggagcggttctcaacgtgccggacacctccgacaacagcaagaagcagatgctgcgcaccaggagcaaaaggcggttcgtcttcaaggtcccagaggaagagagactgcagcagaggcgagagatgcttagagacccagaattgagatccaaaatgatatccaacccaaccaacttcaaccacgtggcccacatgggcccaggcgacggcatgcaggtgctcatggacctgcctctgagtgctgtgcccccctcccaggagaaaaggccgggccccgctcccaccaacctgg

SEQ ID NO: 68178 - DNA, 1229 bp, Homo sapiens
acagtcgtcctcaaggattttatcctggaacattatagtgaagatggctatttatatgaagatgaaattgcagatcttatggatctgagacaagctcgtcggacgcctagccgggatgaggccggggtggaactgctgatgacatacttcatccagctgggctttgtcgagagtcgattcttcccgcccacacggcagatgggactcctgttcacctggtatgactctctcactggggttccggtcagccagcagaacctgctgctggagaaggccagtgtcctgttcaacactggggccctctacacccagattgggacccggtgtgatcggcagacgcaggctgggctggagagtgccatagatgcctttcagagagctgcaggggttttaaactacctgaaagagacatttacccatactccaagttacgacatgagccctgccatgctcagcgtgcttgtcaaaatgatgcttgcacaagcccaagaaagcgtgtttgagaaaatcagccttcctgggatccggaatgaattcttcatgctggtgaaggtggctcaggaggctgctaaggtgggagaggtctaccaacagctacacgcagccatgagccaggcgccggtgaaagagaacatcccctactcctgggccagcttagcctgcgtgaaggcccaccactacgcggccctggcccactacttcactgccatcctcctcatcgaccaccaggtgaagccaggcacggatctggaccaccaggagaagtgcctgtcccagctctacgaccacatgccagaggggctgacacccttggccacactgaagaatgatcagcagcgccgacagctggggaagtccacttgcgcagaccatggtcatcacgaggagtcggtgcgggaggccagcctctgcaagaagctgcggacgattgaggtgctacagaaggtgctgtgtgccgcacaggaacgctcccggctcacgtacgcccagcaccaggaggaggatgacctgctgaacctgatcgacgcccccagtgttgttgctaaaactgagcaagaggttgacattatattgccccagttctccaagctgacagtcacggacttcttccagaagctgggcccttatctgtgttttcggctaacaagcggtggacgcctcctcgaagcatccgcttcactgcagaagaaggggacttggggttcccttgagagggaacgccccgttca

SEQ ID NO: 68179 - DNA, 411 bp, Homo sapiens
tttcgtccgcgcgaaacctgcgtccgtcgggggctgcgctgggcgggtccagaaccgttagttgggggcgagcgcggcctctgcattttccgccgagctcgggtaccctgagccggccgtgcctgcagtcctcccgccgctctgtgggatggggtcggtgacccggaaccccgaggggagacagtgctttcggggcgccgcggtggaaagaacagatcgcctccggaagcgtggggtctgggccagggaggcgatcccctccgatgcgcgggacagaggaggctcggtgtcctctcggggaggggaaaactggtcctatccagtcctgtgggagtcctatgactcactctgggcgttttccagtttgggtggacttgtcatttcccgctgggggagccgttcctgggcggc

SEQ ID NO: 68180 - DNA, 414 bp, Homo sapiens
tttcgtctccctggacgcacgggcggcggagcaacgttcgcgtcatcacggacgagaactggagagaactgctggaaggagactggatgatagaattgtgagtgcggggcggccagggtcctacgtccgtgcctggacacacgacttcaccccgcacgttcctcgtgcgggtcgcaggctccccaggactgcgcctccgagttgcggagcgagcgtccccgacttctgcagctccccaaactcttgggatctgccgccagcttggtcccaccccctcgtctcttacccgtgaatgttaagtttcttctggggtgcaccctcgtttcgtttcttgggttgtggtgcgcccaaagggttagtgccaatgcgaattctgacatttttcatgactttgaggatgcgactggggcgcgg

SEQ ID NO: 68181 - DNA, 556 bp, Homo sapiens
tttcgtgggccggttgctaagacttggcgaagcgctgcgcttgcgcccggatccctcaggcggctgcaggcttcagcctgcgctggttggtgaaacagagatgtcagaaaaggagaacaacttcccgccactgcccaagttcatccctgtgaagccctgcttctaccagaacttctccgacgagatcccagtggagcaccaggtcctggtgaagaggatctaccggctgtggatgttttactgcgccaccctcggcgtcaacctcattgcctgcctggcctggtggatcggcggaggctcggggaccaacttcggcctggccttcgtgtggctgctcctgttcacgccttgcggctacgtgtgctggttccggcctgtctacaaggccttccgagccgacagctcctttaatttcatggcgtttttcttcatctttcggagcccagtttgtcctgaccgtcatccaggcgattggcttctccggctggggcgcgtgcggctggctgtcggcaattggattcttccagtacagcccgggcgctgccgtggtcatgct

SEQ ID NO: 68182 - DNA, 1438 bp, Homo sapiens
gcggccgctcctgatgtccccggcgctgtggcccccgccccaggctctgtgcgcctcactgctccagagtcagtcgtcaggtgtctgctgccacagccccgcgcgccatcccagccagcattcattgcgcattgcaggtatgacaggccagagactgataggagatcagccagcatctcccagggcagtacggctccattcttgggggcccacgaacccttggacttggctgaactacaggtggtagaatcctttaaatctccaacaggtccgctgaccccgggtcgccagggggcactgtcctgccaaatgttgggcaggaaggtactcaatgttgggcactgcctgaaggtcccttgtcgcccacaaggggttctctctcccttgtacctcttcgtcactgaaaaaccagtctaagtgctggatcagtgtctcccacgatcttgtagcggtcaggcatgtgggtcaccatgtctgtcatgttgtcctcaaacgtcctcaccaggggcggcccaaagaccagggccaggttccggggttccatcttgtttttctcagagtggtcagcgatggtcttgaggatggcccacaaggaatttgagcgtttcatagtagtgtcctgggagatcccggatcagcttccgcagcgtcctcattcgctcccgcgcgtcctcaatgcggttggcctcgatgaagtcgttgtatttgtcatcagtgaaaagaggctcgggcagctttcggaagaaggacttgagcaggctgctgatcacattgaggtcttgccagcgctcatcctgcaggttgatgtcaccaggcccgcggttgagctgctcctgtaggctggacaccactgcattgttgccgggcactcggtaaatgcctgtggactccagccctcgtgcctccacaatgcgacagcatgcagccacgattaaggggacgcgctggttctccgtggctggctggcactcctccagcctgaccccaaacgccctcggagcggccttcttatttttcttgatgatgttgatgccccagggggttttgggggctgcagcactgtcatccttgctccctgcgggcaggtcctgagtcctgaggccacgtgccgcactctgcttgaggaactcagacttgaggccccccaggccgcgagagcctttgggggaggaatcagctttgggcccagagctatggctcactttgcgataatcattaagcttcttgctgatcagagcttggttggcacagccggggtcctcgccctcggccctgctgttctcccggatcgctctgatccagcccagcatgtcatcccggtcctcagcctgaaagagatattcacagaagtcagcggtggtcagccggaacacgtgcctcctcttggtctcgctgtaggagatgtccacgaggcaggagccgatgcagacgggcgccg

SEQ ID NO: 68183 - DNA, 676 bp, Homo sapiens
gggtcgacccacgcgtccgacggattaggggcataagtcacctgatgctttggctgaggtttggaaggtgcctgattcattgcgaaaggctcttataaattcatccattgggctcacctaccctttagggaagtaatctttcccaatgtggtctcagaaataaagtggattgacagcatgccatctcaacgatgaagagaagctccactgagcaatactgtgccccaggagatgtcataactgcacacctgtgtgcctacatcttgctgcttcttatcacaaaacaaaggagtttgttcaagaggtatttccaaatgcccagcattcccaactgaagtggcctttgccttggacatgtcaaatgatgtctccctgttggattttgagaggatgagagacattttattgtctctgttgatgaagatggaaataagtgacagtaactgcccaacaggtgcccgtgtggccattgtttcctacaatgccaaaaccaattacttggttcgtttctcagactacaaggggaaggttgcactcctggaggctgtcaggaacatccccctggagcagtcatctggccgcaggaacctcggggccaccatgaggtttatggcgagacgtgttcaaacgtgtacgctcgggtcttctcatgaggaaggtggctgtgttcttccag

SEQ ID NO: 68184 - DNA, 1207 bp, Homo sapiens
tgatgaatgaacatgcacaaaatatttatagcaaatatatttgctggtaagatgaatgctttccctgtaaaactgggaacaaggcaaggatgtttgctcctgccactcttattcattgtagtactgtaacttctatcaagcacaatgaggcaagaaagtgaaatagaagtcatacacgtagagaagaaataaaactttatatttacatatgacatgattgtatacgtagaatattacaaggaatcttagaaaaaaacctcaggccaggctgttctccaactcctgacctcatgatctgtccacgttggtctcccaaagtgctgggattacaggtgtgagccaccgcacccggccaagagggaacatttcttaacacatttaaaaaattattttgatgccaaaatcatacagacagtacaaaaataatacaactacagacatatacctctcataaatttagtagcaaaaatctttaacaaaatactagcaaatagaaaacagtcatgtaaaaagtatacaccataataaccaagtgggatttatttgagttatacaagcaaggctggttcaacattcagaaatcgatcaatgtaattaacccagcataggctaaagaagaaaaattacataacatcagttaataatagagaaaggatttgacaaaatgcaatatccatccatgataaaaactctccatactagacattgagaggatcttcctcaatttgatgaatgaacatgcacaaaatatttatagcaaatatatttgctggtaagatgaatgctttccctgtaaaactgggaacaaggcaaggatgtttgctcctgccactcttattcattgtagtactgtaacttctatcaagcacaatgaggcaagaaagtgaaatagaagtcatacacgtagagaagaaataaaactttatatttacatatgacatgattgtatacgtagaatattacaaggaatcttagaaaaaaacctcaggccaggcgcagtggctcatgctataatcccagcgctttgggaggctgaggcaggtggatcacctgatatcgggagttcaagagcagcctgaccaatatggagaaaccccagctctactaaaaatacaaaattagccgggtgtggtggtgcatgcctgtaatcccagctacgtgggaggcaggagaattgcttcaacctggaaggtggaggttacggtga

SEQ ID NO: 68185 - DNA, 1095 bp, Homo sapiens
tttcgtgtggtgatgtgggctgctggcgagggcagggggctatctgccgcaggagggatcttcctggctgaaagagaatgctgtgttggcggctcctgatgcagagttaaatgcttgttaaagaaaaaaagagtcttggccgttccttttcttcctaatgtcttccacgcccccatcggctgccatccctccaggttcgggcccgccggggcctggggtttgggcagcgaggttgagagggtagcggggtgctacgctctccagagttgacacccaggcagccccaatgttgctcagtgacagcagattggttaggcaagtcctgaacaggggggagggacctgatgccctgtggctcgggtttctgtgcttccacatctgtgaattcaggtgtttttctaccatggagtttagtgcgaatcgaaaacgatcccatcttctatcaaacacatagtaccctcgtcccatgaggcgactcccaaatgagcaaaacgccagaggtctggggtggtgcgtggagaactgacagtctagcttctcggattcgtcggctccgtccatctccccttcatcactggacagtcggctggcgaggtcacctccaaccggtgggagtgggggctctggagtgtggccgctatgatttgaagatgtgctgctgcttatgctatttgcagatgatggtctaggaagtacagagttgggtggtctggattttgcaggggatgcaacttttggttctggcccagagctccctgaagaccctagcagagaatcctgtgccggcccggattggcttggaagtatttccctcgtggaagtcaggagatgctctttatctttaacttctttttcccgggactttgctttgtgttctgccaggaggaggtcaaattgctttttccggcctgggactgccctccgatggcttagcgaatgtgtcttgcaggtgagggatcttgtgcaaggtttctttgtctcggcatccaatactccacagtgcttatttgggtcaaattctctctctgaaagtctcctgtaaggcttgttgctgctgttggtgccatcttggcgtctcttgtctatcgtggctgg

SEQ ID NO: 68186 - DNA, 1296 bp, Homo sapiens
aactattgccacctcatttctgtggggtgtcacatgccaaacctgatgtgatctcaaggttggaacgagagaagagcccatggacatcatttgcaggtcatacctgcttggaagaaaactggaaagctgaagactttttagtgaaattcaaggaacaccaagagaagtattctagatcagttgtaagcatcaaccacaaaaaactggtgaaggagaagagtaaaatatatgaaaagacatttactctaggcaaaaaccctgtgaattcaaaaaatctacctcctgaatatgatactcatggaaggattttgaaaaatgtttcagaattaatcatcagtaatctaaatcctgcaagaaagagacttagtgagtataatggatatgggaaatcactcctgagtactaaacaagagactactcatcctgaagtcaaatcccataatcaaagtgccagagctttcagtcataatgaagttcttatgcagtatcagaaaacggaaactccagcacagtcatttggatataatgactgtgagaaatcattccttcaaaggggaggcctgattacacatagtagaccttacaaaggagaaaacccatctgtatataataaaaaaagaagagcaaccaatattgaaaaaaaacatacatgcaatgaatgtgggaaatctttctgcaggaaatcagtattgattctgcatcagggaattcactcagaagaaaaaccctatcaatgtcatcaatgtggaaatgcatttagaaggaaatcatatctcattgatcatcagaggactcacacaggagagaaaccctttgtttgcaatgaatgtggtaagtccttccgcctcaagacagccctcactgatcatcagagaacacacacaggggagaaatcgtatgaatgtctgcaatgtaggaatgccttcagattgaagtcacacctcattcgtcatcagagaactcacacgggagagaaaccatatgagtgtaatgactgtgggaagtccttccgccagaagacaacactctctctacatcagagaatccatacaggtgagaaaccctatatttgtaaagaatgtgggaagtcctttcaccagaaggcaaatcttactgtacatcagagaactcatacaggggaaaagccctatatttgtaatgaatgtgggaaatccttctcccagaagacaacccttgctcttcatgagaaaactcataatgaggagaaaccctatatttgtagtgaatgtggaaagtccttccgccagaagacaacccttgtagcacatcagagaa

SEQ ID NO: 68187 - DNA, 654 bp, Homo sapiens
  misc_feature (1)...(654): n = a,t,c or g
ctccccgtctcttccctggccttgccctctctctttctgccctgtagccgcgggcgtccaaatgaagctggaattcctccagcgcaaattctgggcggcaacgcggcagtgcagcactgtggatgggccgtgcacacagagctgcgaggacagtgatctggactgcttcgtcatcgacaacaacgggttcattctgatctccaagaggtcccgagagacgggaagatttctgggggaggtggatggtgctgtcctgacccagctgctcagcatgggggtgttcagccaagtgactatgtatgactatcaggccatgtgcaaaccctcgagtcaccaccacagtgcagcccagcccctggtcagcccaatttctgccttcttgacggcgaccaggtggctgctgcaggagctggtgctgttcctgctggagtggagtgtctggggctcctggtacgacagaggggccgaggccaaaagttgtcttccatcactcccacaaacacaagaagcaggacccgctgcagccctgcgacacggagtaccccgtgttcgtgtaccagcccggccatccgggaggccaacggggattcgtggagtgcgggcccttnccagaaagggtatttgttggtgcangcagattccnaacattaaact

SEQ ID NO: 68188 - DNA, 409 bp, Homo sapiens
  misc_feature (1)...(409): n = a,t,c or g
agaaaccnaacagatctgtggggcaggaaaatgtttcttttccagctttcacagctctctgagaaggggcatggtgggaattttagccgatttaataaaagctgcagcatgagacctgtgaatcccaccctgctgcttcctggatcctgccacaccccatccagcagcaaccaagccagtctcgcccctgactgggacagagtggctgagaggggctctggagccagctgcctggatttgaatcccagctgtgccacttaccagctgtgtgactgtaggaagctactctttgtccgtgcgagactacgaccctcggcagggagataccgtgaaacattacaagatccggacccttgaacaaacggggcttctacatatcccccccgaagcaccttcagcactctgcagg

SEQ ID NO: 68189 - DNA, 1145 bp, Homo sapiens
aaagattctgttttgaatatagccagaggaaaaaagtatggagaaaaaactaagagagtgtcttctcggaaaaaaccagccttgaagtgtcttctcagaaacaaccagcattgaaggctatctgtgacaaggaagattctgttccgaatacggccacggaaaaaaaggatgaacaaatatctgggacagtgtcttctcagaaacaaccagccttgaaggctacaagtgacaagaaagattctgtttcgaatatacccacagaaataaaggatggacaacaatctggaacagtgtcttctcagaaacaaccggcctggaaggctacaagtgtcaagaaagattctgtttcgaatatagccacagaaataaaggatggacaaataccgtgggacagtgtcttctcagagacaaccagccttgaaggcttacaggtgatgagaaagattctgtttcgaatatagccagagaaataaaggatggagaaaaatctgggacagtgtctcctcagaaacaatcggcccagaaggttatatttaaaaagaaagtttctcttttgaatattgccacaagaataacgggcggttggaaatctggaacagagtatcctgagaatctgcccaccttgaaggctacaattgaaaataaaaattctgttctgaatacagccaccaaaatgaaagatgtacaaacatccacaccagaacaagacttagaaatggcatcagagggagagcaaaagaggcttgaagaatatgaaaataaccagccacaggtgaaaaaccaaatacattctagggatgaccttgatgacataattcagtcatctcaaacagtctcagaggacggtgactcgctttgctgtaattgtaagaatgtcatattactcattgatcaacatgaaatgaagtgtaaagattgtgttcacctattgaaaattaaaaagacattttgtttatgtaaaagattaacagaacttaaagataatcactgtgagcaacttagagtaaaaattcgaaaactgaaaaataaggctagtgtactacaaaagagactatctgaaaaagaagaaataaaatcgcagttaaagcatgaaacacttgaattggaaaaagaactctgtagtttgagatttgccatacagcaag

SEQ ID NO: 68190 - DNA, 1045 bp, Homo sapiens
gtgcctactaaaaattgatctgcctttccttctgctacagctctgattgtgccatactgatcaggaacctctatttctctttcaggattcagatcatgatcccacagaattatttttctgtctttccctcctccagttaataacatcccatttctcatctgacaaagtgtgaacacactgccatcatgagctttgatttgtttgctgatttgatatacacctttaggtcctttcccaggtgtgggctctacagtagttttgctccatataagcatgactccacctgagtctccagtaagaacatctccattccccaagaatgctaaacactgcacaaattttggcttttcatatttcccaaaaattccctgttttcttgttagtgaattgccgctccaggtccagaagaaaatatgagatttaccgcatgtaattatggtatttgcatctgttgggtgaaactccacagccaaaacaacttcatttgttgtctttatttctgctccttttgctttcttctgccagtcccatacagtaagcatatgctcattggagtcatcaataacacataaatgaacacctgaatctgcttttgaaaaatccaggcatcctactccacgctcaaaagtgccaagtccaataatctgcagtgtggatagagtaacagaatcccacactctgacgtggggttgtagaggccttccatctttatccacgccagctatctgtccagttgcaatcctaattttgtcaggatgtatagcaaggcatttcacacagtctgtatggcccaggtagtgtcgctgagttctctcctcataattaaatagtactactactgatgcaatgaaataaactatttccccggtcggaagaaggtaaacattagctctacagtcctttcctcgattaccatgttcattccttccgatgttgacaactatgatgacatcagaacggaactgcctcctgagaagctcaaactggagtgggcatatggttatcgaggaaaggactgtagagctaatgtttacctatttccccg

SEQ ID NO: 68191 - DNA, 559 bp, Homo sapiens
ggtcgacccacgcgtccgcccgaggctgtctgcccttccccagcctctgcagcctacaatcccaatcaagagccagcccggtttctgcaagcacacaggagcagaagagaaaccagtgaagacttcaccgctgcatatcaggccagcgacggctgctcggtgacggcgctgctctgccaccaagaaaaaccccaaacccactgatcccacaaagaggggagaaaaaggaagtcttcatgctgaagaaggagaaatacaaacgtgtatgtgccggtttgcctctggtcgttaccgtggaggcattcacacgcctgtccatttggcattattatgagcgatccccagacagaagaacttaaggtcaagttttacagagataaccaaggacatcttaaaggagacaggctgtgcgatcattggaagagggaagctgtggatcttgcattcatgcatttggatgaagatgacactggaaactgcacgttgcaggttgaggtggccaagtatcaacggaatgggaaatatgaggcttcaggaaggaagtgcgcgaaccacagga

SEQ ID NO: 68192 - DNA, 449 bp, Homo sapiens
cgacccacgcgtccggaaagaaagaataatgaaatagaagaactgaaaactttatacaggagtaaacaacatgaaactgaagagactattagaaagcttgaaaagaaagttcagacactgatacgtgactgtcaagttatcagagagactaaagaagaccagattgcagagctgaaaaagatatgtgaacaaagtacggaatctctaaataatgactgggaaaaaaagcttcacaatgctgtagcagaaatggaacaggaaaagtttgatcttcaaaagcaacacactgaaaacattcaagaattgcttgaggatacaaatgtgcgtctgaataaaatggagagtgaatacatggcgcaaacacagtccacaaaccacatgatcaaagaactggaggcccgtgtccagcacctgactggagaagcagagaacagtatttacagaggaga

SEQ ID NO: 68193 - DNA, 428 bp, Homo sapiens
  misc_feature (1)...(428): n = a,t,c or g
aacacagagaagtacggcatacctacagcctggtgtccctttggcactgcccattttacgaggaagccatgcatttagttgaagaaggaaaaatttactccagagtactgagaactgaaatgttggagtgcctaggagacagtgattttcttgccaaacttcactgtattcgacaggcttttcaggtaattctttcagaatcagctaacaggatattcctcgctgagagcggaaggaaaattttatcagctttaattgtgaaagcacgaaagaatccaaagaagtttgaagatgtttttgatgaaatgatctattttttagagcagaccgatcactggggtagtactgaaatggaacttgctgctagaggggngaaaaaactacattttatgacgctggtctggatttatattaatggctcctttgag

SEQ ID NO: 68194 - DNA, 506 bp, Homo sapiens
tcctattgtatttttcagtcattattttgtttggtgaatgatcaaaagcaggagggagtcttccttagaaagttctttccatcgtttctgtatactagaatctccctttacacattttgctccttctgttatagccatgtatgagaatctcagttgatctggggtctgagataagacccatttggaattttcttatgttcagtaacacttgtttaatgttaatatcatctcctttttccatcaaaacaagacaagtgtgtaccacagagaaggtgctggagcgtccagtgcctgcactacggtggatcaccacaggtccatggtcagggttcaaggagccagattctctcactttaaacaagaaattgagaaatgaagctggtgattgagggactccaaaatctggccaagtagtataatgaaagtgagatattgttctggtttcaccactattgatattttctaattgtggtagatgtactgtataatacgacttcacatcttct

SEQ ID NO: 68195 - DNA, 1116 bp, Homo sapiens
attgtgccagaaaagaaaacactggtgcctcctataaagccagaagttccacctgttacaggtacttgtcatttgaccttaagcttcagaagatccaattcctctgctgtatattttgctagtagtctccatagctccacatgtaactttactaatatcttttaagtgccagaggctcccaaagaagttgtccttgaaaagaaagtgccctcgactcctcctaaaaagcctgaagtcccacctgttaaagtgcctgaggctcccaaagaagttgttcctgaaaagaaagtgccagtgcctcctcctaaaaagcctgaagtgccacccacaaaagtcccagaggtgccaaaggcagctggtcccagaaaagaaggtgcctgaagctattcctcccaaaccggaaagtcctccccctgaagtgcctgaagtgctgccaccgaaggaagtggtcccagaaaagaaagtaccggtgcctcctgccaaaaagccagaagctccacctcctaaagtgccagaggctcccaaagaagttgttcctgaaaagaaagtgccagtgactcctcctaaaaaacctgaagtcccacctgttaaagtgccagaggctcccatagaggttgttcctgaaaagaaaatgccagcggctcctcctaaaaagcctgaagtcacacctgttaaagtgcctgaggctcccaaagaagttgttcctgaaaagaaagtgccagtgcctcctcctaaaaagcctgaagtgccacccacaaaagtcccagaggtgccaaaggtagctgtcccagaaaagaaggtgcctgaagctattcctcccaaaccggaaagtcctccccctgaagtgttcgaggagcctgaggaagttgccctagaagagcctcctgctgaagttgtggaagagccagagccagcggcgcctccacaagtgaccgtaccacctaagaaacctgtcccagaaaagaaagcacctgctgtcgttgccaaaaaacctgaactaccaccagtgaaagtgcccgaggtgcccaaggaggttgttcctgaaaagaaggtgcctctggtggttcccaaaaagccagaagccccacctgctaaagtgcctgaagttccaaaaga

SEQ ID NO: 68196 - DNA, 181 bp, Homo sapiens
  misc_feature (1)...(181): n = a,t,c or g
ttttttttttttgagacggagntgngctctgtnacccaggntagagtgcaatggcacgntctcggctcactgcaagctctgcgtcctgggttgacgccattctcctgcctcagcctcccgagtagctgggactacaggagcttcgccaccaattccagcctggggtggacagagtgataag

SEQ ID NO: 68197 - DNA, 1245 bp, Homo sapiens
tggggacccagcgtgcgcggtgcccggggccgggccggggtgacctgggctgcagccatggaagaacagagggaggccctgaggaagatcatcaaaacactggctgtgaagaatgaagaaattcagagctttatctactccctgaaacagatgctgctgaacgtggaggcgaactcggcgaaggtgcaggaggacctcgaagcagagttccagtccctcttctccctcctggaggagctgaaagaaggcatgcttatgaagataaaacaggaccgtgccagccgcacctacgagctgcagaaccagctggctgcctgcacgcgggccctggagagctccgaggagcttctggagacagccaaccagactctgcaggccatggacagcgaggactttcctcaggctgccaagcaaatcaaagatggagtgaccatggcccctgccttccggctatcattgaaagcgaaggtcagtgacaacatgagtcacctcatggtggacttcgcgcaagagcggcagatgctacaggcactcaagttcctgcctggtgagaggggcacgcaatagagggccaggacttccggggaatgacctgggaggctaggaggccctgaaacaggacctggagtatggtggacgacccggtgtctgaattccgcctgggggaggtggagctctgagaattccacgccctgtggggggtggagttctcatggagccccgcccctgggtggagccatgggaagaccccacccactgtgtagtgacatcctgggaaaactctgtacccaggggtggaactgtgagaataccatgtcctgtggggttggttgagtcctcatgaggccccgccctggggtggagccatgagaaggtcaaactcaccaggtgggaaaatcctgtccccaggggtggagccctgagaatagcacgtcctgtgggggtggggtattcatcaagtcccgcccatgggtggagccatcagaaagccccacccaccagggggtgaggtcctgggaaaactctgtccacaggggtggagccctgagaataccatgtcgttgggggagtggagtcctcccgagacctcctccctggatagagccacgagaagggcctgcccaccacatggtagctcctgggaaaaccctgtttccaggggtggagccctgagaaggccacgtccccgaggagaaatggactgagaaaccagcctgtctatgatgcagccccatgtatagcgca

SEQ ID NO: 68198 - DNA, 936 bp, Homo sapiens
tttcgtccgcgccggaggccgccaagaagccgacgccctgccaccggtgccgggggctggtggacaagtttaaccaggggatggtggacaccgcaaagaagaactttggcggcgggaacacggcttgggaggaaaagacgctgtccaagtacgagtccagcgagattcgcctgctggagatcctggaggggctgtgcgagagcagcgacttcgaatgcaatcagatgctagaggcgcaggaggagcacctggaggcctggtggctgcagctgaagagcgaatatcctgacttattcgagtggttttgtgtgaagacactgaaagtgtgctgctctccaggaacctacggtcccgactgtctcgcatgccagggcggatcccagaggccctgcagcgggaatggccactgcagcggagatgggagcagacagggcgacgggtcctgccggtgccacatggggtaccagggcccgctgtgcactgactgcatggacggctacttcagctcgctccggaacgagacccacagcatctgcacagcctgtgacgagtcctgcaagacgtgctcgggcctgaccaacagagactgcggcgagtgtgaagtgggctgggtgctggacgagggcgcctgtgtggatgtggacgagtgtgcggccgagccgcctccctgcagcgctgcgcagttctgtaagaacgccaacggctcctacacgtgcgaagagtgtgactccagctgtgtgggctgcacaggggaaggcccaggaaactgtaaagagtgtatctctggctacgcgagggagcacggacagtgtgcagatgtggacgagtgctcactagcagaaaaaacctgtgtgaggaaaaacgaaactgcttcaatactctagggagctacgtctgtgtgtgtcctacgccttcgagaacgaaagttcctgtgtc

SEQ ID NO: 68199 - DNA, 564 bp, Homo sapiens
tttcgtgcgagagcttcgagcggactcaggtgaggacggtggaccccggtgcatccctggggcaccctgagggacgcggtgtccgggaggggctttgaagggagtaggagtcttgcaggccccagttgaagacggggcgagggtgtagtgagcgggggcattgacgtgcagatctgggcgatcccaggaaggtcggggaccccagggtaccccagctggcctggggagaagggcagaggcgggctcggaggagatggcaggatgcgtggccaagaggagcctgatcggctgggtaccgggcaggagtcccaagatgaggtgagaggggaaggaactgaaaaggggcggaatggaagggttgcccctaaacaagggaagcgcacgggagccacttgggggctcaagtgtgggggcggagagtgggggcgccgggctgggaatgtgaagggtgaggggacctctcttcccctccgatcacttcttggttgcattgacatcccttcccaccccccaccccttagcatccccctttctcgatgcctcttgcttggctctggccagccc

SEQ ID NO: 68200 - DNA, 441 bp, Homo sapiens
tttcgtggcagctggcggtgggggggcggccctgggataggggctgtggcagtacgcggggacccggctgcggtggctgcgggactgacgagtgagtctcgggctggggcggaaacggagctccgggtaagggtggagggcgagggaggccgagacgggacgagctcgcaatcccacttcccaccccttcccttctaggcggggaaggaacggaagctgttaacctccttgggcctccccagcccctagtttgggggaggggagaagagggcggcgggacctttcctggcgccgctcggtgggtttggaaagaggtggaaggaggggcagcagccagcgagactgggccttctccgggctgagcgcgggagggtggagttaggagcatgggaaccctgtcgcttttcctttctgtttgttcctcgtggccgctcagattaa

SEQ ID NO: 68201 - DNA, 692 bp, Homo sapiens
  misc_feature (1)...(692): n = a,t,c or g
gttgggtttgatgcatcggatgtaatggggtgtgcacctcatcagtgtggccaccaggtcgttggcttgtttctgaggcagaagtgaagacgggtgggtggggggcacagagatgggaccctctggcccctcttttttccaccctggatacagtcccaatagacagagactgggggtgggtgagggctggtaacagataagccacaggggccagatgtccctggtctgtgtgcacctccactagtgcacaccacactagtgggactgatgtggggtgtctgcctgaccctggaacccaagacaaggagctctcacgtctaccgcactcaccacttaccttggcacatagagttgatggagacctccaagaagctggttcaagctccctaaacccagagctggaggaagaccctgctgaacagatgacgtcacagtcagaggcagaagccccaggattggtagacagacagacgttggaatgagagaaacagagtccggaccccaggtagggtggaactcagccctctgcaggcccagctccccattgtacaccccaggcccaccttgatcttggagccggcggtgctggggcgccccttcttgtctccatccagcttctcggggaagagcatccggaggaaggccctgggtaggaaaggggagaggaggagnntgaggtatggctagacttt

SEQ ID NO: 68202 - DNA, 891 bp, Homo sapiens
  misc_feature (1)...(891): n = a,t,c or g
tttttactttcattagtgttttcaatagtgtgggcgcaggctcagaaggtggagaggctggcctcagaggacacccaggcttggggctaagtcccagtgtccatatgaagctgtttctggccttgtccgtttttgttgtcccaggctctgtgcccctcactcagnnctcagtcaagaacttgtctttgtgttgcttcttggggacatgctcagggcagaagtcagagcggaggaggcgggaaaagtagattatgatcatcacgtccagcatgagcaggatacccagcaggaaggtgcccagggtcctctggttcacataacgcaagaagaaatgggtgaggtagggcctgaggggccaggcggaagagaaagtacatgaccaggttcacatacttgttaacccggtagaggagatgatcctgggcattactgattttcatcatcatgcgaatggtgaggaagatgttgctgacttccaccagtagtgttaagacacccccaccgacaaagctgctccaaaagatgccggagaagaaggcacccatggccatgacgtgatggacaaggtattcccaagaggctcgcgtctgtccgctagccacgatgtccaccgtatcgtggatgaaataccccgcagagaagcaaacgagcaaatagccagaaagtgaccacgccgtctcaatctccactaacatgtcaggagtctgccatacacacagcagtgcccagatccccgacacaatggagtgagcgaaggagacgagcaggttgtgccagcgccaggtgcgcagggggtcggcgcgcacgtgcacgggtaggggcaggcgacagagcgcgcgccggagcgcccggaaggtcagcggaattccaccacactggattagggaaggc

SEQ ID NO: 68203 - DNA, 444 bp, Homo sapiens
aattaattgaagaaaaaaattcggtcagcacaagtaaataggatcacttggccccactccaaattttgatttttggtactgcacattctctaacagccatcattgttcaaaacacagatcttgtggattggtccttccttcctcatagtacaattaagacttttacattgtacttggatcaaatggctacattaattggtcagggaagattacgaataataacattgtgtggaaatgacccagataaaatcactgttcctttcaacaagcaacaagttagacaagcctttatcagttctggtgcatggcagattggtcttgctaattttctgggaattattgataatcattacccaaaaacaaaaatcttccagttcttaaaattgactacttggattctacctaaaattaccagacgtgaacctttagaaaatgctctaacag

SEQ ID NO: 68204 - DNA, 504 bp, Homo sapiens
accaccactccagctttgcacaaggagatttgttctgatttcacagtttcagtcaccacccctgtgcccaagcaagaaggtcacctagacagcgagagcccaaccaatatcccactgacaaagcaaggaggttccagggatgttcagggcccagaccctgtctgcagtcaacccatccagcctttgtcttggcatggaagcagcctggatccccagggcccaggcgacaccctaccacccttgccatgtcacctcccagaccttcagattccaggtacctcacctttgcctgcacatggaagccacctggaccatcggatcccagccaacgccccactgtctttgtcccaggagctcccagacactcaggttccagctaccacacctttgcccctgccacaagtcctcacagacatctgggtccaagccctcccaacttcacccaagcagggaagcctcccagacatccagggtccagcggctgcacctccacttccggagcca

SEQ ID NO: 68205 - DNA, 1086 bp, Homo sapiens
tgcggacagcccctatgcgcgcgctgtcgcgacgagacgcaccgagcacgcatgtgggcgcgccacgacatcgtggccctgggtcagcgaagccgcgacgtgccccagaagtgcagccgtgaaggccctgcagacggccacgcgggaggccatcgcgctgctgcaggccatggtggaggaggtgcggcacagcgccgccgaggaggaggacgctatccacgccctcttcggcagcatgcaggacaggctggcagagaggaaagcgctgctgctgcaggctgtgcagagccaatacgaagagaaggacaaggccttcaaggagcagctctctcacttggccaccttgctgcccaccctgcaggtccacctggtcatctgctcctccttcctcagcttggccaacaaggctgagttcctggacctgggctatattgccagtgaccaccgagctgaattcgcgcgctgtctggagccactgctgctgctggggccacgtcgggtggcagctgctgcaagtggtgctaacacgctggcagggggcttaggccccaaggcgctgacggggccccactgcccctccccagtaggaaagatgtcggggtcacccgtccaaaagcccacgctgcaccggtccatcagcaccaaggtgctgctggcggagggcgagaacacgcccttcgcagagcactgccgccactatgaggactcctaccggcacctgcaggcagagatgcagagcctaaaggaccaggtacaggagctgcaccgagacctcaccaagcaccactcgctcatcaaggcggagatcatgggagacgtcctgcacaagtccctgcaactggacgtgcagatcgcctcggagcacgccttctttagagggcatgacggttcgctttccaggagatttgggaggaagcctatcagcgagtggctaatgagcaggagatttatgaagcccagctccatgaccttctccagctgaggcaggagaatgcctacctgaccaccatcaccaagcagatcacgccctacgtacgctccattgccaaggtgaaggagcgggtggagcccagattcaggcacccg

SEQ ID NO: 68206 - DNA, 582 bp, Homo sapiens
acctcccgctcctatttcaccgtcccgatcccatccgcccccaccccgggacccgcgccccagggcggccttcccatgcatcgcccctcccccgttccctcctgtccccaccccatgtctgcccaggacccagccctgccctgtcccccattgtccctgggggcgggtcccagcctcttccggagctgaactcggcccctgcgcgctgccccctcctctctccgcagtactcgccagggatgaccatgagcgtgtgatggggcggcagccccgggcctctctgcgggcctaggcttctgcccagcgcccctgctcagggcgaggggctgaggtcacacctcgggcacctggactcctggccaatcaaggcttgcccagctgggaggccccacacgaaagactcttaccattttattaaaaacgcaaggacctcagagacgttcttttctgtatggacccttcctgccatttgtattttgtcccagagagaaaggctctttggggggcccctctccccaggacgtcagggggtggggcccataaataaatggaagctggttttggtttttggtaaaaaaaaaa

SEQ ID NO: 68207 - DNA, 812 bp, Homo sapiens
gcgctgcaggcaccgggccggaattaccgggtcgacgatttcgtgcggggcccgccgaggcccggcttctgtcctgcgcgcgcagattctcgcaaatctggaagcggatcgcgtggagtgacggtcacaccgcggcgaattaattcccaaagactcatgttacatgagaaagccaccaagaagaccaaagaaaaggagacaaggatggctcttcctcagggatgcttgactttcaaggatgtggctatagaattctctttggaggagtggaaatgcctgaaccctgcacagagggctttatacagggccgtgatgttggagaactacaggaacctggagtctgtgggattgacttctaaggactcttggtacatgaggaagaaacccggaaggggaagaggaaagcaaaggcgtcaggaatggttcttcctcagggtctattgacattcagggatgtggccatagaattctctcaggaggagtggaaatgcctggaccctgctcagaggactctatacagagatgtgatgttggagaattataggaacctggtctccctgggtgaggataacttccctccagaagtggggatgttcccttgtgtatctttgcattttctcttgtttctcttgggagttgcatccttgcttgactaaaatggaagccgtattgattttgaaatgaaaagcttcatgatgtagcatctggactttcactgtccccttttttagatgttctgcgctcttcatgatagctcagtgggggttccagaagtaaagattgctctataccttatggctggcaaggcgtgg

SEQ ID NO: 68208 - DNA, 1521 bp, Homo sapiens
  misc_feature (1)...(1521): n = a,t,c or g
cgcttgcaaactctgggatttgtaccttcgaacaagaaatgagtttgttcagaaaggagaagcagatgacgaagatgatgatgaagatgggcaagacaatcagggcacagtgactgaaggatcttctccagcttacttgaaggagatcctggagcagcttcttgaagccatagttgtagctacaaatccatcaggacgtctcattagcgaactttttcagaaactgccttctaaagtgcaatatccagattattatgcaataattaaggagcctatagatctcaagaccattgcccagaggatacagaatggaagctacaaaagtattcatgcaatggccaaagatatagatctcctcgcaaaaaatgccaaaacttataatgagcctggctctcaagtattcaaggatgcaaattcaattaaaaaaatattttatatgaaaaaggctgaaattgaacatcatgaaatggctaagtcaagtcttcgaatgaggactccatccaacttggctgcagccagactgacaggtccttcacacagtaaaggcagccttggtgaagagagaaatcccactagcaagtattaccgtaataaaagagcagtacaaggaggtcgtttatcagcaattacaatggcacttcaatatggctcagaaagtgaagaagatgctgctttagctgctgcacgctatgaagagggagagtcagaagcagaaagcatcacttcctttatggatgtttcaaatcctttttatcagctttatgacacagttaggagttgtcggaataaccaagggcagctaatagctgaacctttttaccatttgccttcaaagaaaaaataccctgattattaccagcaaattaaaatgcccatatcactacaacagatccgaacaaaactgaagaatcaagaatatgaaactttagatcatttggagtgtgatctgaatttaatgtttgaaaatgccaaacgctataatgtgcccaattcagccatctacaagcgagttctaaaattgcagcaagttatgcaggcaaagaagaaagagcttgccaggagagacgatatcgaggacggagacagcatgatctcttcagccacctctgatactggtagtgccaaaagaaaaagtaaaaagaacataagaaagcagcgaatgaaaatcttattcaatgttgttcttgaagctcgagagccaggttcaggcagaagactttgtgacctatttatggttaaaccatccaaaaaggactatcctgattattataaaatcatcttggagccaatggacttgaaaataattgagcataacatccgcaatgacaaatatgctggtgaagagggaatgatagaagacatgaagctgatgttccggaatgccaggcactataatgaggagggctcccaggtttataatgatgcacatatcctggagaagttactcaaggagaaaaggaaagagctgggcccactgcctgatgatgatgacatggcttctccanactcaagctgagtagg

SEQ ID NO: 68209 - DNA, 831 bp, Homo sapiens
tttttttttttttgacgatgtctctcaacaatacctgaagtttctcatactcatcatcccaagtctgaaaaacttcaaagcatgctaccataactttttcaaaattcttcataaggcaacatgcatcaaatttcctagtgcccaatacttggagtaattggagaactcaagtctcttgaaattgcctccaccaaacgcagtggccctctggaataggatattttgtgtttcggatctttctcaaatgtgtgaaaatggcaacaagcgcctgtcttattttgtccagctccgtggcagacagcaaatcattcagagggaaatctttcatcagaggattgtagtcattcacagtttccaaagcctgttttagacctgtgtcagtgtcaaaactgacggtggcatggaagcgcttgccatgtttcaagatatccagagtcaggagaacttccgggctctcccgtttctcctggatgcggtataacgcacgttccaagtttagccaaaaactaatttcctgtaaggcagttcctgatgcaggatctcgatccagtttggtcactttttgaatttctcggatccagcggttaactccagattgtaactgattaagaaatgttgggtcttcaaccttatcaccaaagtctgtaacttttggcttttctccacgctcataacactgttttgcaacatttgtgatcattggatgaatcggcaggctgatctccggaatttcaatattttgctgcaagtgaaggagtcccatttcgagttctgcaatcttcttttcaactgaaggagccattttatcaccatccctgtctgccttgccag

SEQ ID NO: 68210 - DNA, 814 bp, Homo sapiens
gaattcggcacgagaggtctgccggcgatggagtggtgggctagctcgccgcttcggctctggctgctgttgttcctcctgccctcagcgcagggccgccagaaggagtcaggttcaaaatggaaagtatttattgaccaaattaacaggtctttggagaattacgaaccatgttcaagtcaaaactgcagctgctaccatggtgtcatagaagaggatctaactcctttccgaggaggcatctccaggaagatgatggcagaggtagtcagacggaagctagggacccactatcagatcactaagaacagactgtaccgggaaaatgactgcatgttcccctcaaggtgtagtggtgttgagcactttattttggaagtgatcgggcgtctccctgacatggagatggtgatcaatgtacgagattatcctcaggttcctaaatggatggagcctgccatcccagtcttctccttcagtaagacatcagagtaccatgatatcatgtatcctgcttggacattttgggaagggggacctgctgtttggccaatttatcctacaggtcttggacggtgggacctcttcagagaagatctggtaaggtcagcagcacagtggccatggaaaaagaaaaactctacagcatatttccgaggatcaaggacaagtccagaacgagatcctctcattcttctgtctcggaaaaacccaaaacttgttgatgcagaatacaccaaaaaccaggcctggaaatctatgaaagataccttaggaaagccagctgctaaggatgtccatcttgtggatcact

SEQ ID NO: 68211 - DNA, 1116 bp, Homo sapiens
ggcacgagacaacctaaaagtggcttcagaggaaaagcaagaaaggctccaaagaagtgaaaataaacagccacaggattctcaaagttacggaaaaaagaaggatgcgatgtatggaaattttatgttgaagaaagacattgccatgctcaaagaggaattatatgcaataaaaaatgacagtctcagaaaggaaaagaaatatattcaggaaattaaaagcattacagaaataaatgctaactttgaaaagagtgtaagactcaatgaaaaaatgataacaaaaacagtggcccggtattcgcaacagcttaatgatctgaaagctgagaatgcaaggctgaattcagaattggagaaggaaaaacacaacaaagaaagactagaagctgaagttgaatccctccattctagcctggccactgctataaatgagtacaatgaaattgtggaaagaaaagacctagaactagttttatggagagcagatgatgtttctagacatgaaaaaatgggttctaatatttctcaactaacagataagaatgagttgcttactgaacaggtccataaagctcgggtgaagttcaataccttaaaaggtaagctccgtgagacaagagatgctctcagggaaaagacattggctttaggaagtgtacagctggacctaaggcaagcacagcatcgaataaaggaaatgaagcagatgcatccaaatggagaagctaaagaaagtcaatccattggaaagcagaactctttagaggagagaatacgtcaacaagaacttgaaaatctcttgcttgaacgacaactagaggatgctcgtaaggaaggcgataataaagagatagtcattaatatccacagagactgtcttgagaatggaaaggaagatcttctagaagaaagaaataagggattaatggaaggaataatatttttttaaaagaaaacctgcttcagtgtgaaaaagaaaaagcagaaagagaagtaagtatgaagaaaactataaacttctggaaagaaaatttaaatatttcattctggctatatgttgaccctagttcaatatacaaataaatagatgaaaatgtgtttccaaaaaaaaaa

SEQ ID NO: 68212 - DNA, 1922 bp, Homo sapiens
  misc_feature (1)...(1922): n = a,t,c or g
tacggctgcgagaagacgacagaagggcgtattcctctcaaaaacatatatcgcttgttttcagcagatcggaagcgagttgaaactgctttagaggcttgtagtcttccatcttcaaggaatgattcaatacctcaagaagatttcactccagaagtgtacagagttttcctcaacaacctttgccctcgacctgaaattgataacatcttttcagaatttggtgcaaaaagcaaaccatatcttaccgttgatcagatgatggattttatcaaccttaagcagcgagatcctcggcttaatgaaatactttatccacctctaaaacaagagcaagtccaagtattgattgagaagtatgaacccaacaacagcctcgccagaaaaggacaaatatcagtggatgggttcatgcgctatctgagtggagaagaaaacggagtcgtttcacctgagaaactggatttgaatgaagacatgtctcagcccctttctcactatttcattaattcctcgcacaacacctacctcacaggtatgaattttctagttctttgttactttagccagtctcaccaaatttcaccaacctctactttctgttgttcggaagctgaagtgtgttttcttccatttcctgcgaagtgcctctgagaactctggggttccaccactaaagcctcccgcctcccataagcagtcatgtccacatgtgtatgaagcaatagcatcatttctccacagcctaagtttttaagtcttctaaaatgcaaccggctgacattttcagatcaatgggatttttgtgtaactgaactcattcttcagtgtacttgaagccatgtccnagtcctacccggttctctgggctgtgttcatctacatgacagctccgaagttcttaagtggtggctcatgcctgtaatcccagcactttgggaggccgaggcgggcggatcacctgaggtcaggagtttgagaccagcctggccaacatggtgaaaccccatctctactaaaaatacaaaaaattagccgagtgtggtggcatgcacctgtaatcccagctactcgggaggctgaggcaggagaatcgcttgaacccgggaggtggaggttgcagtgagccgagattgtgccactgcactccagcctgggtgacaagagtgaaactccgtctcaaaaagaaaaaaatgttcagtgatagaaaataattttactaggtttttatgttgattgtactcatgctgttccactccttttaattattaaaaagttatttttggctgagcatggtggctcatgcctgtaatcccagcactttgggaggccgaggcgggcggatcacctgaggtcaggagttcaagaccagcctggccaacatggtgaaaccccgtctctactaaaaatacaaaaattagctgggtgtggtggtgggcgcctgtaatcccagctactcgggaggctgaagcacaagaatcgcttgaacctgagaggcggaggttgcagtgagccgaaatcgcgccattgcactccagcctggccgacagagcgagactccgtctcaaaaaaaaaaaaagtatttagggtaaaaaacaaggatatactttttgctatgaaatatatcttatggccaggcgtggtggctcatgcctgtaatcccagcactttgggaggccgaggcaggcggatcacctgaggtcaggagttcgagaccagactggccaacatggtgaaacccccgtctccactaaaagtacaaaaattagccaggtggtggtacacacctgtaatcccagctacttgggaggctgaggcaggagaatcacttgaacccaggaggcaaagttttcagtgagctgagattgggccactgcactccagcctgggtgatggagtaagactccgtctcaaaaaaaaaa

SEQ ID NO: 68213 - DNA, 363 bp, Homo sapiens
ttataatttccaagtacaagaaagttatagaacacccagaagatttaacccaaggaagactacctcagggcatttaataatcaaactttcaaaggtcaaggataaagaaaaggccctaaaagcagcaagagaaaagaaccaaataacatactatggagctccactatgcctggagcagactttcagggaaaccttacaggccaggagagagtggcatgacatatttaaagtgctaaaaacttttaccctggaataatatatccaacaaaattatccttccaacatgaaggaaagataaagacttttccaggcaaacaaaagatgaggaatttcatcaacacaagacctgttctacaagaaatg

SEQ ID NO: 68214 - DNA, 1122 bp, Homo sapiens
gagtggcggggtaaggatgggaagccgagcagacggccccagaacaagcggtcatgtgactgggaagatggccgtctttccttggcactccaggaataggaactacaaagctgaatttgcatcatgccgactggaggctgtaccattggagtttggggactatcaccctctgaaacccataactgtcacagagtcaaagacaaagaaagtgaaccggaaaggaagcacttcttccacgtcctcctcctcctccagctccgtggtggacccgctgagcagcgtcctcgatgggactgaccccctctccatgtttgcagccactgctgaccccgcagccttggcagctgccatggacagctccagaaggaaacgtgatagagatgataactccgttgtaggatcggattttgagccttggaccaacaaacggggagaaatccttgcccggtacaccactaccgaaaagctgtctattaatctgtttatgggatctgaaaaaggcaaagctgggactgccacattggcaatgtcagagaaggtgcggacccggctggaggagctggatgactttgaggagggttcccaaaaggagctgttgaacttgactcagcaggattacgtgaaccgcatagaggagctcaaccaatcgctgaaggatgcctgggcctcagaccagaaagtgaaggctctaaaaatagtcatccagtgttcaaagcttctttcagacaccagtgttattcagttctacccaagcaaatttgtccttatcaccgacatacttgatacatttggaaagctcgtgtacgagcgcatcttttccatgtgtgtggatagccgcagcgtcttaccagatcacttttctccagagaatgcaaatgacacggccaaggaaacatgcctaaattggtttttcaagattgcctccatcagggaactcattccaagattttacgtggaggcatccatcctgaaatgtaacaaattcctctccaaaacgggaatttcagagtgcctgccccggtttgacatggcatgattcagagggatcggagacccactagtgttcgggtgtatgcccgtggcctgacctgtgcccgggtgggaatggaagtggccccacat

SEQ ID NO: 68215 - DNA, 342 bp, Homo sapiens
gttagacaaccgtacaaatgtaaggaatgtggaaaaggctttaagtgttttgcaagccttgataatcacatgggaattcacgctggtgagaaactctgaatttcaggaatgtgggagaaccatcacaccctcctcacacctaaagcagtgtgtaacagctcatactggaaagaaattcaaaaagactaagaaatatgggaaatccttcactaatttttctcaactttctgcacatgtgaaaactcataaagaggagaagtcctttgattgtaaagaatgtggaatttccgttagaaattcctcatatcttaatgatcacattcaaactccaactggagtaaa

SEQ ID NO: 68216 - DNA, 998 bp, Homo sapiens
cgcatgggctctggggacagagggggaggcgcctatgtgcacatactcttatgtgtactcagctcggctggcgtgtgatcattgaggagttatcaagcacaattctaaggaaactggcacttctttgcttctgtaaccctccttccccagcaagctggagaaatggtggaaacagaaatgcagacaggatccccccatgctcctgctgagcgaagctgccttcactcctagactatagcgatcccagctctaatttcatacaaagacaggaagaactaatttcagcgtaaggaaggcaccgtcgtaggaggatgggatgcctgggagtcggctcacctcaaagtcctggtactgctcctctgtcaacgccttctttgcaaccacgagggtccgcagtccttcgcgagccatgtttccgcactcctcttccagccagtcattatactgcacgataggagacatggccacgtcagcgcccttcatgtagaatgtgatttctgccgtggattcatccctgacgatgacgcccatccgcttgctctcggaggtgaagggaaacagctgcagaatgcagaagctgaggacctggccactgggggtcttcagctgcatggaggtgaggtccctgctgaccagcgtgaggcccacactctctgtccactgcaccagagcgacctcatccgggctggaagcctggtaggtgcgattctcatcactgaagtcttggtcagcctctgcgaactcagtctcctcagtaacgccggcccgagactcatacacgggggtcacgttgtgacacagcacgatggctttcacggcttcatggattcgactactgacacttttcctaactttgggagctgaagattgggcttttcttagtggagttgaaccagtattgtttccaccagcttgagactgcatctgtgagtaggagtccctgacatggctctggatctcatccatcgtgtcggcgccataggacacggtgcccaggt

SEQ ID NO: 68217 - DNA, 708 bp, Homo sapiens
accatgcttcccacagttaaaacaagctccaggaaatagaatatttcctttatccactcttagtcctgccattgcctgtgctagcagagtagccttatgcagattaattccaataccatcacaggccttggtataatcaactaaatgtgctttccctctgataggtcgcagagctgccaggcagtcgggattagcattgttgaaagctaataagtgcaacactatatcctgagcagtcgaatctgcagttacctttttaagagactcctgtaaccgagctataaaatccatgtatggtttttttggtccctgttttactgcactaaaggaagggtattgttctccacatgaagtgattttttcccaagctctaatgcacactcctcttaagctgttctacggcatcatcctgcacgaccacttgtgcatctaaaccaacccagccgctgacccccaaaagttggtctgcagttatattaatttgaggttgggcctgggcgctgcaagtaggctgaatggaagcttcacctgcccaccaagttttacattgtaagaactgagcaggagttagacaagctcgagtaagagtgtccgtcagtaggaatcatctgactggaaacagcaacattctttaacagtcccattacgaaatgagaacctggtccatattgattgatagcctgtttaaactccgtaagtaatttaaag

SEQ ID NO: 68218 - DNA, 640 bp, Homo sapiens
aaaatcacctcgggaccctgatgcaaaactgggattcttcttcccgtgtacctttttcaagtgggcagcactcaactcaatctttcccaccctcattgatgtcaaagtccaattcaatgttacagaaacccactggcctatgtgcggcccatggacggacaggagtccatggaaccaaagctgtcctctgagcactacagcagccaatcccatggcaacagcatgactgagctgaagcccagcagcaaagcacatctcaccaagctgaaaataccttcccaaccactggatgcatcagcttctggtgatgtgagctgtgtggatgaaatcctaaaagagatgacgcattcatggcctccccctctaacggctattcatacaccatgcaaaacagaaccttccaaatttccttttccaactaaggagtctcagcagtccaattttggcactggagaacaaaaaagatataatccttctaaaacttcaaatgggcaccagtctaaatctatgttaaaagatgacttaaaactaagcagcagtgaagacagtgatggggaacaggattgtgataagacaatgccgaggagtacaccaggaagtaactctgaaccttcacaccataatagtgaaggagcagata

SEQ ID NO: 68219 - DNA, 739 bp, Homo sapiens
gaggcggcggcggcagcgttatcagttcgtaggtgtaaagctttgaaggaaaaagatttaattagaacgtctgagtcagactgttactgctacaatcaaaattcccaagtggagtggaaatacatatggtcaactatgcaggtgaaaattaccagtccaggcctgttcagaattgtatatatcgcagaaagacataattgccaatatccagaaaacattctatcttttatcaaatgtgtgattcataacttttggataccaaaggaatctaacgaaataaccataatcatcaatccatacagggagactgtgtgcttctctgtggagcctgtcaagaagatatttaactatatgatacatgtgaatcgaaacatcatggatttcaaactcttccttgtgtttgtggcaggagtttttcttttcttttatgcaaggaccctgagtcaaagccctactttctattactcctcgggaactgtgctaggtgttctaatgacattagtctttgtcttgctgttggtgaaaagattcattccgaagtatagcaccttttgggctctaatggttggttgttggtttgcctcagtttatattgtatgccagttgatggaagatctgaagtggctgtggtatgaaaacaggatatatgtattaagctatgtcttgatagttggatttttcagctcttgtggttggtacaagcatgggcccccttgcagacgacaagagcagaaatctt

SEQ ID NO: 68220 - DNA, 744 bp, Homo sapiens
agaggccccccaagacgcccccctgcccgcccagctgctcttgcaccagggacaccgccttctgcgtggactcaaaggcgtgcccaggaacctgccctcggaggtcatctccctgaccctggtgaatgccgccttctcagagatccaggatggagcgttctcccacctcccgctgctgcagttcgtgttactcaactccaacaagtttacactgattggagacaacgccttcacaggactgtcgcacctgcagtatctcttcattgagaacaatgacatctgggcactatccaagttcaccttccgaggactcaagtccttgactcacctctcgctggccaacaataacctgcagacactgcccagagacatcttccggcccctggacatcctgaatgacttggacctgcggggcaactcactcaactgtgactgcaaggtgaagtggttggtggagtggctggcacacaccaacaccacggtggcacccatctactgcgccagcccgccccgcttccaggagcacaaggtgcaggacctgccgctgcgggagttcgattgcatcaccacagattttgtgttgtaccagaccctggccttaccagcagtggcggctgagcccttcctctactccagcgacctctatttggctctggcccatccaggagtcagcgcctgcaccatcctgaagtgggactatgttgagcggcagcttcgagactattatagaatcccagccccctt

SEQ ID NO: 68221 - DNA, 423 bp, Homo sapiens
aatacatgggcttctgtttgtaaagggataagggctttggactgattgtcagaaagccacaaagctgcaagctctttaagtttggtaaatgagaatggtaaattcttcaatctgttgtcactcaaatttaggactcttagtttctgcatctgtccaatctcttcaggaagaaattctaatttgttggagcgtagagacatgactgttacattcttacaacttccaatttctctgggtaattctggaaggaaattctcatcaactgctaatgtccgaagactatgaaggtagccaatagtagaaggtagtgactccagttcattacagctacagtcaaattcttctaataaagataaactatagaatcaggcaattgttgcaacatattggatgacaataagaggtcctcaagggcttcacatc

SEQ ID NO: 68222 - DNA, 726 bp, Homo sapiens
cggaaggtgcctgctttcctcctttaactgggaagaaaataatctccctcaaaaccattgccccccaaaataggcctcactgtccatccgtccttggctgctgtccctccctccgtgcctactgaaatcgtccctcatagtaagtattggagtcggtggaggcgctggcatcgcctgctcatggagcccttccctctgccgctgcaggacacatgcctttctgtaggaagttgaaagtaacgtcaagagcaggttcatcagtgggacagagtcaatcagccgttgaatcctctgtatggaggtgctctgggccataatgctcaaggctgcaggggggccatctgtctcccaacccttgtgaagggcctccacttgtaggtcttgaaagagagacgttagcagtttgatggcatggtttgccaatattactgagagtaccccaaatccctgatgcccttttccaggccccagtttaggggagcccactccctctttagtacgagaaaggatgtctctgactcggagggcagccagtgggtccttctctttccccttatcagccaacgcagtaggactgaggttcagtatgaggaaaaggctgtttaacaagcaccaagcacccagcaattggaaattctgatagtgctcaccaccagcccggcgagaactgctgattgcttgtccaatcatgtcatagatttcgagacatttctggacaattgtagg

SEQ ID NO: 68223 - DNA, 672 bp, Homo sapiens
  misc_feature (1)...(672): n = a,t,c or g
agaaggctcttcggttgcgtttggaaagcaagctttcagagatgaagaagatgcacgagggggacttggcgatggctctggtcctggatgagaaagacagactgattgaggagttgaagctgtctttgaagagcaaagaagctttaattcagtgccttaaagaggagaaatctcagatggcatgtcctgatgagaatgtgtcatctggagagctccgaggactttgtgctgctccaagggaagaaaaggagagagaaactgaggctgcacaaatggagcatcagaaggagagaaacagctttcaagagaggatccaggcacttgaagaggacctgagagagaaggaaagagaaattgctacagagaagaaaaatagtctaaagagggataaagccattcagggtttaaccatggcattaaaatcaaaggaaaaaaaggttgaagaacttaactctgaaattgaaaagctcagtgctgcctttgctaaagccagagaggccctacagaaagcacagacccaggaatttcaggggtctgaagactatgagactgctctatcaggaaaggaagccctttcggctgcgctgcgctcacaaaacctcaccaagagtacagagaaccacagtttgaagattctcattaaatgattcatttcatttcanaaaaaaaaaa

SEQ ID NO: 68224 - DNA, 668 bp, Homo sapiens
attccagggcaggggcctggcggctaatgatggtgagtacctcaaactgcagtggagggctggcactctggttcttgccccctcatgccccctctccaccctctctgttctttcctctcctcccagggagcttcaggccatggaggccttgcagaatggccagaccacggtagaggggagcatagagggccagtcggctggggctgcgagccatgccatgatagaaaagatcctcagcgaggagcctcggtggcaagagactgcttatgtgctgggtaactataagacggagccttgcaagaagcccccgcggctgtgccgccaaggctatgcctgtccctactaccacaacagcaaggaccggcggcggagcccccggaagcacaaatacaggtccttaggccccaggaggccagccacgggagggaggagtggcagggaaggggtcaggcagaggctgctcccactggctctccgggaggaggggaggctggtcctggggatgacaggatcgcaagcccagggcccaggggagggcatagtgaggatagctggacagtaggagcccagcttcacctcctgcatgaatgaggaccctggtcagaccgtctctgaggctccaccgctcctgatcctgcatgaatgaggaccacgccacagcgtggacc

SEQ ID NO: 68225 - DNA, 438 bp, Homo sapiens
actgcggtaccggttcggaattgccggctggacgatttcgtcatggacccaggcgcctttgagactgtcctatcctccgcttacactggccgcctcaggatgggtgtgctgacattggcaacttccttacagtggggtctgtgctccaaatgtggcacattgtggacaagtgcactgaactactccgagaaggccgggcctcagctaccaccaccatcactactgctgcagccacctctgtcactgtccctggtgctggggtgccatccgggagtgggggcactgtggcccctgctaccatgggctctgcgcgctcccatgcctccagccgggccagtgagaatcaatctcccagcagcagcaactacttcagccccagggagtccactgatttctcatcttcctcccaagaggcatttgcagcttctgcagtgggcg

SEQ ID NO: 68226 - DNA, 533 bp, Homo sapiens
atcgacgatttcgtgcggccggtccggttccgcggcccaggcagagggactctgcaagcaatggctgcagcgcgcctggcaagagcggcgcctgctgctgcgggagccgcgctacacgctgctggtggccgcctgcctctgcctggcggagacacagagattgactggaaggcctacatggccgaggtagaaggcgtcatcaatggtacctatgactatacccaactgcagggtgacaccggaccacttgtgtacccagctggtttcgtgtacatctttatggggttgtactatgccaccagccgaggcactgacatccgcatggcccagaacatctttgctgtgctctacctggctaccttgctgcttgtcttcttgatctatcaccagacctgcaaggtacctcccttcgtctttttcttcatgtgctgcgcctcttaccgtgtccactccatctttgcgctgcggatctccaatgaccctatggccatggagctgctcttccttagtataaaccatctgttggcccaacg

SEQ ID NO: 68227 - DNA, 1327 bp, Homo sapiens
tttcgtgagcatttgagggctgtttatgatctatggggtaaaactctctgactgactggatgaggaaaatgaaatgcgagagggttgagcccaaggttcattcatctgctcaatcgaggccactcattctggccactgtgtgccagatgctggggattctgtcctcttgggagctgacgtagcccaggtggtggctgtgggctgctggaggtggggatccaggtggaggagcaagtctagggaagtgtgctggggaggccctctctgaggaggtgacatgccagctgagatctgaatggcaggaaggagtggccatgaggacatgggtgatgacagtctgggtagaaagatgaaggaggggaagcaggtaaggagttgtgatctaattctgggagccactggagggtgaaagcagggattagaagtcagggatttacattttaaagagatcacctctggcagggctttgttaagagtggcctgcaagaggccaagcatggttccagggggccagttgcagagggctggtgcaggagcccaggcaaggattacggggctcagtcctgccctgtggggagcaagagtacacggctggattccagagctgccagcaggcctaccccctggggcctgcctgtggcctctcatccctgcctgtcccagtagacactgggggtgggtaagtgctcccgtgaagggggggcccaggcgattctgggtctggccctgtgtctacaggggagcaccgtggcctgggcgctggcgtctccaaggtgcggagcctgaagatggacaggaaggtgtggacagaaacacttatcgaggtggggatgcccctgcttgccaccgatacttggggtctgccccattcaacagctgtctgggtctcccagccccctccctatctcagtgaccacagcaccttggagctggaaagagaccctttgtgataatatagtgggtggggatttcggaaaagcaatttttggcaaagtcagcaaactggccagtgagctaagaatgtttttatagttgtaaagtgttatttttttttaaagaaaaaaaaaggaagaaaatgcagcagagactgtatgtgttctgtaaagccgaaaataattactatttcgccctttagagaaagaatttgctaacttctgatctaatttcactgtcatccattgaatagatgtgtaaactgaggtcctgggcagggctgtaatctgcctgagattaccctgtaaatgcatattgaccaccatccctgcctctttctgtcccacttctgaatgacccagggccttctcccctaccttgcacagcctgtatt

SEQ ID NO: 68228 - DNA, 1008 bp, Homo sapiens
ggaattcccgggtcgacgatttcgtgggaggcaccgggccgcgggccaagcctaccggttgtcacaatttgggtctgcagcagaaatgctttcagaacagacagcagcgctggggacaggatgggaatcaatgaatgtacagctggatggagcagagccccaggtggaaaggggaagccaggaagagcggccatggagaacagtaccaggacctctggagcacctgtgctgtgaccttgaagaggagccacagtcccttcaggagaaggctcagtctgctccctgggttcctgcaattccccaggaggggaacactggagactgggagatggcagctgcacttcttgcggctggatcacagggcctggtaaccatcaaggatgtgtcactgtgcttctctcaggaggagtggcggagcctggacccctctcagacagacttttatggagaatatgtcatgcaggaaaactgtgggatagtagtctctctgagatttccaattcccaaactggacatgctttctcaactagaaggaggagaagaacaatgggtccctgacccccaggacttagaggagagggacattctgagggtcacatatacaggagatggaagtgaacatgagggggatacccctgaactagaagcagaacctcccagaatgttatccagcgtgtctgaagatactgttctctggaacccggagcatgatgagagctgggattccatgcccagcagctccagaggaatgctcctggggcccccttttcttcaggaagatagtttctcaaacctgctgtgtagcacagagatggattccctgttaagaccccacacatgcccccagtgtgggaaacagtttgtatggggttcccaccttgccaggcatcaacaaacacacactggggagagaccctacagctgcctcaagtgtgagaagacctttgggcgaggcatcacctcatcaggcaccagaaacccactacatgacagaccagcaggtgctct

SEQ ID NO: 68229 - DNA, 847 bp, Homo sapiens
cggctgcaggaattcggcacgagcatacgtgaacaaatttggggctacatggaatcacaaaatttagctgactttccccgacctgttcatcacaggatacccaactttaagggcgcttctcatgctgccgagcaactcccacgcttgcaggcgttcaaaacggccaggaccattaaagtaaatcctgatgccccccagaaaagtgctcgcttcttcgtccttgaaagcaaaaaaacattgttggttccaacaccacgactgagaacgggattgtttaataagatcacaccaccccctggggcaactaaagacatcttgagaaaatgtgccacctctcaggtgccaccagagcgactggggagacaggatagaatttccaaaacatgctccattggaaattgcctcaccagttctaattggtcagtgcctgccccccgtggaccctgcgagatgatgagaacacagggtttcctgcagtgcagggtttcctggactaagcccccttctgtgactgtcgggagacccccaagccacccgtatgcactgatccatacggaacttgtcatagcactgcaggcagatcccaccgccacatcgaatgatcagttactgctggatacgggactgaaaatggctttttcctgagtcttacataaaccgtgttatgagaaccatgaacatattcagcttccctattctttatatgcatgcctgcattagtataaagcggtacacttttgggacattttggttgaagggataattttttagaagcgagtatattgtacataaagatagtggccttcaggattttatattgaataaatatgtcatacagtgaaaaaaa

SEQ ID NO: 68230 - DNA, 400 bp, Homo sapiens
tttcgtagggggtcgtgtgtgtgtgatgtggggagctcgggggcgggtcgggccgggcctccggcagactgcacggcccggatttgggtttctcattttgcagcgggaggtctgggaagacaacgggaggaggcggggccgggtctccggaaggaggcggggcaggggtcgggtcgagtctttgttggggcgaagaagctggagggtgggccgctgggggcgaggtggttggtccccggtttgggggaaaggggacttttttctttttagagtatcttgaaaggcgctagtgcgcgcaggagaggtacacagatttccctccaaaaccttgttaccaggcgcactgcgattgatgccccttgcctttgcttgggcctttctcttccctcattttaagacg

SEQ ID NO: 68231 - DNA, 991 bp, Homo sapiens
cccacgcgtccgggcattttccttgggaataataatcaagcccatgaaggccacaaaggagtccttttgtattacatcttttctctgttccacaaaactcacacaaaatggtgatatgcttgatcttttgaaatggagaacccacccagacaagatcactggctgtctctctaaattaaaagaaattgatggctcagagatagtaaagtttctgcaggatacactggataccttatttggaattttagatgaaaattcccaaaaatatgggtctaaagtgtttgattctttggttcacataataaatttgctgcaagatagcaaatttcatcattttaaacctgtaatggacacttacattgagagtcattttgctggggcacttgcatacagagatctcatcaaagtgctcaaatggtacgtggaccggatcacagaagcagagcggcaagagcatatccaggaggtgctgaaggcacaagaatacatttttaagtatatagttcaatctcgaaggctgttttcccttgccactggtgggcaaaacgaagaggagttccgctgctgcattcaggagcttctcatgtcagtccgtttctttctttcgcaagagagcaaagggtctggagcattatctcagtcacaggctgtgtttctgagctctttccctgccgtgtactcagaactgttgaagctctttgatgtccgggaagtagccaacttggtccaggacaccctgggcagtctgccgaccatcctgcatgtggatgattccctgcaggccatcaaactgcagtgcattggcaaaaccgtggaaagccagctttataccaacccagattcccgatacattcttctgcctgtcgtgttacatcacctccacattcacttgcaagaacagaaggacctgatcatgtgtgcacgtatccttagcaacgtattttgtcttatcaagaaaaatagctcagtaagtaaatacaggtcatagtat

SEQ ID NO: 68232 - DNA, 734 bp, Homo sapiens
tgcagcaggaaacagcattctggggaggcaggcctttcagaccggatttagtgagcagtcagtaaccccagagcttcttgtctgagagcagaagctggagaaaaaagaaagtttcgatcattgatgctccggacatctcatctttaaagaacattgactcagaagttagaaaacacatctgtacaggcccccatgccttcctgctggtgacaccactgggcttttacactaagaatgatgaggcagtgctgagcaccatccaaaacaattttggagaaaaattctttgagtacatgatcatacttcttaccaggaaagaagatttaggggatcaggatctagatacgttcttaagaaacagcaataaagctctctatggtctcatccagaagtgtaaaaacagatatagtgccttcaactaccgggcaacaggagaagaagagcaaaggcaggcggacgagctcctggaaaaaattgagagcatggtgcatcagaatgggaacaagcattgtgttttcagagaaaaagaaaccctgaacattgtccttgtggggagaagcgggactgggaagagtgcgaccgggaactctatcctggggagcctcgtcttcacctctcggctccgggcccagccagtcaccaagaccagccagagtggcaggaggacatgggacggacaggaggtggtggttgtggacactccttccttcaaccagatgctggatgtcgaaaag

SEQ ID NO: 68233 - DNA, 1234 bp, Homo sapiens
ttttttttttttcggtggagtaattccttttaatttagacatgtgttcacatactttatgcataagaaaatagttcattaagatacattttcatggtaggctgtttaaaatctagcagtaatgtgacaatatttaaactgttctaaaaataactcgaaatactctcagaaaagagcaccctggacgtggctctacattcccctggaagttttgtaaatgctagaatgttctttgtttccactcaaaagtagtcatctatttactgggaataccaaagacatattcatgtaaaataaattatatacagaatatacatagtctatatacataaatatacttgcacacaaatgtagaattatccaccttatgtcttttaaatctgggtcattacagaaacgcggtcctctcagccacacccgctacttgtgcagttttccctctggccacagggcttcctgcaaaagcagacgcagcctgttgcactcgtccacctccggggccgcccaccgcctcttcaggtgctggatgtcgatggagccagacgccctggccagcaccagggccaggaagctgccaccagccttctcaggctcacccaccgcagccatggccaccagcctgttgggggagacctgctgtttggcgacaggacccagatcgctctggaggaggtcccagatgtagatgttggatgtgtcgtcctgcaccaggaacacggcaggcctggttggggaccactgcaggccggtgaccgcatggctgtccgtgctgctgtcccactgcaggagcggaaacgcggagctcagctggtgcagcctgatgcttccgtccgaacagccggccaaaaatattggttctccaaatggtgaaaaatcaatgacattaactttcactggtcttataccatgttgctgaggtttgaatagtttgggagccactctcaaatcttgtcttgtgccatggcttatgagacccatgtctgtgccaataataaagtgattaggatctgaaggcagaaatttaacattcagtgtttgtgtagtgccccaaaattcattacctttatgggaaagactgtcacccaactggatcagagcactatgtaccagcttgaccctccctccaggcatcagacctaaatcacttattgaacctgcgatgtctgcctttggtaattcaacaaccacccatacattgagaaccccactctcatccaaggaagcgatgtggaagg

SEQ ID NO: 68234 - DNA, 864 bp, Homo sapiens
ccccctggagctggagcagaccatccgtttccgtatagaaagtggagaaagatgagaactacgttaacgccatcatgcagctcggctctatcatggagcactgcatcaagcagaacaatgccattgacatctatgaagagtatttcaatgacgaggaggccatggaagtgatggaggaggacccttcagctaaaaccatcaatgtgttcagggacccccaggaaatcaagagggctgccacacacctctcctggcaccccgatggcaacaggaagttggcaggggcatactcctgcttggattttcagcgggcacctgtgggcatgagcagcgattcatacatctgggacctggaaaaccccaacaagcctgaacttgctctgaagccatcgtctccactcgtgacgttggagttcaaccccaaagattcccacgtactcctgggtggctgctacaatggacagatagcctgctgggacacccgaaagggcagcctggtggcggagctatccaccattgagtccagccaccgagaccctgtgtatggcaccatctggctgcagtcgaagacgggcaccgagtgcttctcagcttccacggatgggcaggtcatgtggtgggacatccgaaagatgagcgagcccactgaagttgtgatcttggacatcaccaagaaggaacagttggaaaatgccttgggggccatctccctggagttcgaatctactttggtgagtgtcccttgctgtcccttccccgacttgcattgacagggcagccagggctaaagacaggccattgctaggatatcaggtgctcgtggaacccagcaccagcccagggaggccaccctcactgcagcca

SEQ ID NO: 68235 - DNA, 436 bp, Homo sapiens
ctgtcgtgcaattccgagcaggcactgctcagtctggtgcctgtgcagagggagctacttcgaaggcgctatcagtccagccctgccaagccagactccagcttctacaagggcctaggtacctgcccttcccagctgaggctttctgagcccccaccgacccccagacacctcagcgtagcctctgtctcccatcacatgttcccctctcatcgctccctttgcccacatcttccagacttcttcgccgccccattcccatcagacaatctcccctacaccctccagtcccctttcccctcacctcctccagctactccctctgaccatgctcttatcctccaccacagacttaaatgggggcccagatgaccctctgcagcagacaggccagctcttcgggggcctggtgcgtgatatccggcgccgctacccc

SEQ ID NO: 68236 - DNA, 1617 bp, Homo sapiens
  misc_feature (1)...(1617): n = a,t,c or g
ttttttttttttaaggacagagtgaatttattccaagaatgccagtcctgagaacccacttcccacaggcaccaggtcacttggcacgctccgtagttttgctagttaaggcctgggatggcagtgaatcactgggtcactgctaccaacttggcaagggaccgccaccctcactcccacgctcacatgagggttgagtgtaagtctacaactctaagccatagggaatgcctcaaagggcctcttcagggttggccttgctaagggactcccagccatatgccaaggctggctgtcaaccctttccagggcccttgtggaatgagaaggccagccataggatttgtaaaggccacgtgggatactaagcttgggaccttcctatgtccaggaggaacagaggctacatctaggcccctgtccaccaggtcacagtcctgtcccaggcactctctgcttgcccagatcttgctctggtcagcttcctttgggagcagattcgcagaggtgggtggggagtaggaggtggaggttcccatggggcaaggaaggtgggggacactgtagctccaggttttctcctgttgcagagagaagccagcttcatgggaaagggcaacaggttgaggcctcggtccccagcagcttcaggctcaggccctgagtgtccacttcaaccaggtggatgctgtaattcccaaggccctcggtcttggccagcaccgcctccaaggcctccttttgctgtggctccttggtcaacagatagagaaagcctccaccgcctgccccagccaggctctggccatgcacgtggggggccaggacatccatcatacgccgcacagtcaggggctcacagcctggagccatgagcttcttctgctcccagtacgaggtcaggcactggcccagcagaggcaggcttccttggcggaagccttcagcacactcctcagtttgccgtaccaggctgtgggcattctgcaccacagcaggaagtcgggcataccagctcctcagcacatcctgcagcaggttccgagccaggcgggtcttgccagtgtacaccaagagcaggtggtcattgagcttctggacaaagccctcaggcaccgtgacctcttctacctccaccttcagtggcagctgagcccgggagcgccccaccttgatgccaggcattaggccacctacttggtcctgccagccacctccagtggtgagcacctgctccaggtgcagcactgcgtggatcagggcttccgtgcccaccacccggcctgcggctcgctgcaaggcagccagggcagtgcctgccaggatgctgctggtgcccaggccagagccgtggggcagctcagaccaggtgtgcagctcaaagccgcccccgaaggtgcggagcagctgctcactcagctggagttccgagtggacatgcacgatccctgcacagatgaaggccgccttcagcagggcccctggggcatgaggctggcagtagtcccgcaggtcagccaggcnccggcacactatcaaaacaaacgtctcatcctgccgaggccccgccgccagccacagctcaggctccgggatgcgggaattccacgacagtgc

SEQ ID NO: 68237 - DNA, 481 bp, Homo sapiens
tcgcctagcagtaagttggttggcatgtggtgggcaggcagggctggcagtagtcggaccacttcagtctccctgctctgccttccccagcaccattcggtgcctcgaacctcctggtgaaccccctggagccccaaaatgcagataagatcaagatcaagatcgcagacctgggcaacgcctgctgggtggtatgagcaagtgtgggagagcagagtggggggccctgctccaagggtggaggcacagggccgctcttggggagccctaccccagtctgcagtgcacgtgaaccgtcggctgggtgggcactggtcctgcccagtcaacagcactggggccatggccaagggcaggggccactaggaagggatcagcctcagcctcagatcactgggcctgtccctcttggaggacctggggaccccgaggctcacagcaaaccccactgagcttctcgggtaggcggatcggggtgggg

SEQ ID NO: 68238 - DNA, 1069 bp, Homo sapiens
gtagcggcccggaattcccgggtcgagtagccagaacggtcacgaggaaggggcaaccgtggacagagaggacgggcctggcgtggccctcgaggggcctctgcaggaggtcctggagttgctgaggcccacggactccacccagccccagctccgggagctggagtaccaggtcctcggcttccgggaccggctgaagccctgcagagcacggcaggagcacacctcggccgagagcctgatggagtgcatcctggagagcttcgccttcctcaatgccgacttcgccccggatgagctgtccctgtttgggggctcccagggtctccgaaaggaccggcccctgcccccaccgtcatcactgaaagcgtcatccagggaactcacagccggtgccccagagctggacgtgctgctgatggtacacctccaagtctgcaaagctctgctgcagaaactggcctcccctaatttatcaaggctggtccaggaatgcctcctggaagaagtggcacagcaaaagcacgttctggagacactttctgtccttgactttgagaaggtcggcaaggcaacatccattgaagagagtcctagtggagggaaacctttcgggtccttgtcatgtgctctccccgagtcaccattcaggtttctgaactggggctttcagtcatcccacaggcctcgcggacgaaggggtgcctgaagctgtggagagggtgcacagggcctggcagggtcctgtcctgccctgccacgacgctgctgaaccagctcaagaaaaccttccagcacagagtcagagggaagtacccaggacagctggaaatagcgtgccgcaggctcctggagcaggtggtcagctgtggtgggctgctccccggagctgggctcccagataagcagctcattcccctggttcctaataaaaagcctttatgttaccacaaacaagaaggacctgaaattcatcacccaaaatcaaaacccaaaccccccggaatggaaggctcatttcttttaagcttttttttttttttcccgccccgggttttttcttttgggg

SEQ ID NO: 68239 - DNA, 461 bp, Homo sapiens
cacttgccgcgctcttcttttttcaagttttgggcacggagtccagcttggtggatgcgcgcttccagctgcccgcctttccctggttccctcatgtcattcaacccaagcccgagatcaccgctggaggcagcgttccagcgctcaagaccaagccgcgctttgattttgccaacctggccttggcagcaacgcaagaagatccggccaagctcggtcgcggggagggcccaggctcccctgcaggtgggctgggtgccctcctcgacgtgaccaagctgtctccagaaaagaagcccacaaggggacgtctgccttccaagaccaagaaggaattcgtctgcaagttctgtggccgccacttcaccaagtcctacaacctacttatccatgagcggacgcacaccgacgagcggccctacacctgtgacatctgccacaaagccttccggaggcaagac

SEQ ID NO: 68240 - DNA, 1456 bp, Homo sapiens
cttatttattttgaagctcagattgtcccaaactcagccagtgggaagcactttaagctggctctggtctcttatttgtatttttattttaattattattactttttttgagatggtgtcttactctgttgcccaggccggagtgcagtggcacaatcttggctcattgcaacctctgcctcccaggttcaagcgattcttctgcctcagcctcccgagcagctgggatttcaggtgcctgccacccatacccggctaatttttgtatttttagtagagacagggtttcaccattttggcccaggctggtctcaaactcctgaccttgtgatccgtccgcctcggcctcccaaagttctgggattacaggcatgagccaccgtgcccggcctgagtttctataatttaagcatctttaaggtaaagaaaaattgaaaatgagattacaggcaatttaacgcacaatttaatgaccagttcaatgagctggtttatttgcttgtaaaattattttatctaatgtaaaaatacttggtaaagaaaagttcttaatggggctggaagacaaaaagtctgcatttaaaaaaggttaacaaaatcaataatatatgggtaagcataggcacagaagaataaaaaatttaaaaatgttaaaatcaataataaagccactaataaccacaaaaggaaaactatggttctttttactttgtcaaagttctgcatctgttcccggttggtcagccaggattccatgtcctgcgcagtctgaatgaccaaatgcttcgtaatctgcaaacatctgtgtaaaaccggttagcaaaagacctctcggagctgtacattgagctggtagtcccttagttctgcctcttcacaatgcagttttaaatccttgtctttttcaccccagagaagccagagaggtcccattttttccacagcccacaccagtacgcttggccagagcctgcaaagcgggctatggtttcattgcccttcagtaactcatacatgctgatgttattagtacagacattgccgttctttttgtcattgaccaagtctttcagaaccatattcttcagtttgctggtactctcactgcaatgtaggctgccctcaggagggatcccaaattgaacaagaacctcagagagttcttggataaaatccactttattggggaactgtggaaattcttcaggcaactcaataaaatggttgtcaatgtccacaaaacacaaattagcctcttgaggaagttctagtttagaacggtcagttccttcttttgactgaaggcccatcagataagggacaggagcatcaagaaaatgtagcagagaagcaggtagaatgggcacataaacatgttgccattgaaatgggaacaaaagtgtggtgatgccttctgccacagtcatcaggcgttgataatcttgtggtgatgcct

SEQ ID NO: 68241 - DNA, 849 bp, Homo sapiens
cgttgctgtcgggccttcacaactctttttgtgcatggcccggccccttagctgctctgtcactgaatatcggcgtgagtatgttattcatctgctgtgcggctggggtctgcaggacagacccctgcagctggggaaggaggcatgggactctgggaaagggaggcagtcatttaagcctggagccaaggggccaggggcctgggtaggcaacagagccacacagtgaccttgctaccctatttatgggccagccaccacctgccctcatgcccagggtctttctgcaggtggagctgaagagccaggaggctcaaagtctgcagcagcagcaggaccagtacctgggtcatctgcagcagtatgtggccacctatcagcagcaggtggtcacctatcagcagctgacctctgaggaggaggagctgcacaaccagttactgctgcagacccagctcgtggaccggctgcagcagcagaaagctcaaagcaaagctgtggccaagatgggctgccaagagttgcgggagacccaggagcacctggaagctatcagccagcagaaccagcagcctcaggcccagttgagcctcatggctctccctggggaaggagatggacagtgaggaggaggaggaggtgcctcagcccatgccaagcatcccggaggatctagagagccagaaggccatggtggcatttttcaactcagctgtagctagtgccgaggaggagcaggcacggctatgtgggcagctgaaggagtgcactgccagcgcctggctcatctgttggcctcggcccagaaggaacctgaggcagcagccccagccccaagaactgggggtg

SEQ ID NO: 68242 - DNA, 1703 bp, Homo sapiens
ataacgctgaagcatggcactaaaacagtgtctgctttgggtctggatccctcaggtgcccgtttggtgacaggaggatatgactatgatgttaagttttgggattttgctggaatggatgcttcttttaaggcatttcgatcccttcagccctgtgagtgccatcagatcaagtcattacagtatagtaacacaggagacatgattcttgttgtatctggaagctctcaggccaaggtgattgacagagatggttttgaagtaatggaatgtataaaaggagaccagtatattgtggacatggccaacaccaagggtcatacagcaatgcttcatactggctcatggcatcccaaaataaagggagaatttatgacttgctcaaatgatgcgactgtgaggacgtgggaagttgaaaatccaaagaagcaaaaaagtgtgtttaaaccacggacgatgcaaggcaaaaaagtcattcccactacgtgcacatatagtagagatggaaacctcatagcagctgcctgccagaatggaagcatacagatctgggaccgaaatttgactgttcatcctaagttccactataaacaggctcatgactcgggcacagacacttcttgcgtgactttttcctatgatggtaatgtccttgcctctcgtggaggtgacgattcattaaaattatgggacatccgacaatttaataaaccacttttttcagcctcgggtcttcccaccatgttcccaatgactgactgctgtttcagtccagatgataagctcatagtcactggtacatctattcaaagaggatgtggcagcggcaaacttgttttctttgagcgtaggactttccaaagggtgtatgaaatagacatcacagatgcgagtgttgttcgctgcctgtggcatccaaagctgaaccagatcatggttggaactggaaatggattggctaaagtctattacgaccccaacaagagtcagaggggagcaaaattatgtgtggttaaaacccagcggaaggcaaaacaagctgagactctaactcaggactacatcatcacccctcatgccttgcctatgttccgtgagccccgccaacggagtacaaggaaacagctggagaaggacagactggatcccctgaagtcgcataaacctgaacctcctgtagcaggcccaggtcgtggtggccgagttggaacccacgggggcactctctcttcctatattgtgaagaacattgctttggacaagaccgatgacagtaatcctcgggaagccattttgcgtcatgccaaagcagcagaagacagcccatattgggtttctccagcatattccaagactcaagcccaaaacccatgtttgcccaagttgaatctgatgatgaggaagcaaagaatgagccagaatggaaaaaacgtaaaatttgaagaatctcatttgagagctgtttgcatgagtgggaggggtatgggacaggtttgggttttttttttatgctcatgaaattaaaaattcatttttatgaaaaaaaaaaaaaaggggggggcgttttaaaagaaccaatgttaactcgccggggatggtaatcgttatttctttagtagggccacctataattcattcgtggggcggctttttaacattggtgggatgggaaaaccgggtcctaccaaatttaatcggttgcg

SEQ ID NO: 68243 - DNA, 475 bp, Homo sapiens
cccgggtcgacccacgcgtccgtatagatgatggtgggtctaagattacaaactatgtaattgagattatagaagctaacaggaagacatgggtccatgtctccagtgaacctaaggagtgcacgtacacgattcccaaattgctagaaggccatgaatatgtattccgaatcatggcccagaataaatatggcattggagaacctcttgacagtgaacctgaaacagcaagaaacctcttctctgtccctggagcaccagataaaccaacagttagcagcgtgactcgtaactccatgactgtcaactgggaagagccagaatatgatggaggctctcctgtgacagggtactggctggaaatgaaagacaccacttcaaagagatggaagagagttaaccgagatcctatcaaagccatgactttgggtgtttcttataaagtgactggtcttattgaaaggttccgactatc

SEQ ID NO: 68244 - DNA, 437 bp, Homo sapiens
gtggaattcctcagtcatgctcacacacactcacaccatttacacttacagttgacacacgtacacatcacctactcacacacaatttaccctcctactcacatgctcacacaccattcacatagttcacattcatacacacacctacgcatccattcacacatatatgcacacacactcatacccacacatttatcctcacacataccattcacacccacaggttcacacacattcacctactcacacctgtcatcctctcattcacatgctcacaaaatggtcacacagtttacccctcacacccacacactaacccattcacactcacagattcgtacacatacacctactcagacacatcatccacccattcacgtgctcacacacacatgttcacacaggcatgtgcccttcacactcataagctcaccatc

SEQ ID NO: 68245 - DNA, 917 bp, Homo sapiens
gtacgtgcggtggaattcgggggaagaaaggaagtcagagggcttagacagtgaggggggacagaacatctccatgtgcactctcatctcttggagtcagcaacaggtatctacggggagggccgtgcatcctctactaccctgcaggatctggaggtaagaggccctgggccgaggtgcagtgaccctgcaggccagccctccaacctcctcccacagcaggggcttgttgcccctctgccagctgaggcagcccacacacccccaccagccctaatgattattctctctacccctccccacaatcttcctccaactccttctctctgcatgcacctcagagccagtaccaagaactagcagtagccctggattcaagctccgcaataatcagtcaactcactgaaaacatcaattcactggttcgcacatctaaggaggagaagaagcatgagatacatctggtacagaagcttgggaggagcttgttcaaactcaaaaaccagacggctgaacccctggccccagagcccccagcagggccatctaaggtggagcagctacaagatgagaccaaccacctaaggaaggagctagagagtgtgggaagacagctccaggctgaggtggaaaacaatcagatgttgagtctcctgaacaggagacaggaggagaggctacgtgaacaggaggagaggctacgtgaacaggaggagaggcaacgtgaacaggaggataggctacatgaacaggaggagaggctacgtgaacaggaggagaggctgtgtgaacaggaggagaggctgtgtgaacaggaggagaggctacgtgaacatggggagaggctgtgtgaacaggaggagaggctatgtgaacaggaggagaggctacgtgaacaggaggagaggctacatgaa

SEQ ID NO: 68246 - DNA, 420 bp, Homo sapiens
ggcggtggaattcaaaccctacaacgtgctcaatgtgaggaagccttcagcaggaagacagaactcattacacatcagttagttcatactggggaaaaaccttatgaatgtactgaatgtggaaagacattctcccgcaagtcacagctcatcatacatcagagaacacatactggagaaaaaccctataaatgtagtgaatgtggcaaagccttctgccagaagtcacatctcattggacatcagagaattcacacaggagaaaaaccttatatatgtactgaatgtgggaaagccttctctcagaagtcccaccttccgggacaccagcgaattcatacaggagagaaaccttacatatgtgctgaatgtggaaaggccttttctcagaagtcagaccttgttttacatcagaggatt

SEQ ID NO: 68247 - DNA, 435 bp, Homo sapiens
cccgggtcgacccacgcgtccgagctcctcgttgtggagacaagatcaaaaatcatatgtatagaatgtgactgtggctcccttaaagattgtgccagtgatagatgttgtgagacctcttgtaccctttctcttggcagtgtttgcaatacaggactttgctgccataagtgtaaatatgctgcccctggagtggtttgcagagacttgggtggtatatgtgatctaccggaatactgtgatgggaaaaaggaagagtgtccaaatgacatctacatccaggatggaaccccatgttcagcagtatctgtttgtataagaggaaactgcagtgaccgtgatatgcagtgtcaagccctttttggctaccaagtgaaagacggttccccagcgtgctatcgaaaattgaataggattggtaaccgatttggaacg

SEQ ID NO: 68248 - DNA, 728 bp, Homo sapiens
ccgggtcgacccacgcgtccggacgccagtttagcccaggtccacggactacaatgtttcgtattcctgagtttaaatggtctccaatgcaccagcggcttctcactgatttactatttgcattagaaactgatgtacatgtttggaggagcccattctacaaagtctgtaatggattttgtcaatagcaatgaaaatattatttttgtacataacacaattcacctcatttcccaaatggtagacaacatcatcattgcttgtggaggaattttacctttgctctctgctgctacatcaccaactggttctaagacggaattggaaaatattgaagtgacacaaggcatgtcagctgagacagcagtaactttcctcagccggctgatggctatggttgatgtacttgtgtttgcaagctctctaaattttagtgagattgaagctgagaaaaacatgtcttctggaggtttaatgcgacagtgcctaaaattagtttgttgtgttgctgtgagaaactgtttagaatgtcggcaaagacagagagacaggggaaataaatcttcccatggaagcagtaaacctcaggaagttcctcaaagtgtgactgctacagcagcttcgaagactccattggaaaatgttccaggtaacctttctcctattaaggatccggatagacttcttcaggatgttgatatcaatcgccttcgtgctgttgtctttcg

SEQ ID NO: 68249 - DNA, 1122 bp, Homo sapiens
cccacgcgttcgctcctgcaggacagctaacccccgcatcggtgacgtgatccagaagctggcccccttgctgaagatgtacagtgagtatgtcaagaactttgagcgagcggctgagctgctggccacctggaccgacaagtctccactcttccaggaggttctcactcgcattcagagcagcgaggcttcgggcagcctgaccctgcagcaccacatgctggaaccagtgcagagaattccacgttacgagctgctgctcaaggagtacatcagaaagctgccagcccaggccccagaccaggccgatgcccagaaagccctggacatgatcttctcagctgcccagcactccaatgcagccatcactgagatggagcggctgcaggacctgtgggaggtgtaccagcgcctgggcctcgaggacgacatagtagacccctctaacaccctgctccgtgagggcccggtcctcaagatctccttccgccgcaacgaccccatggagcgctaccttttcttgttcaacaacatgctgctctactgtgtgcccagggtgatccaggtgggcgcccagttccaggtgaggacccgcatcgatgtggccgggatgaaggtgcgggagctgatggatgctgagtttccccactccttcctggtgtctgggaagcagcgcaccctggagctgcaagcccggtcccaggaggaaatgatttcctggatgcaggccttccaagcagccattgaccaaatcgagaagcggaatgaaaccttcaaggctgcggcccaggggcctgagggagacatccaggagcaggagctgcagtctgaggagctgggcctccgggcaccgcagtgggtccgggacaagatggtgaccatgtgcatgcgctgccaggagcccttcaacgctctgacgcgccgtcgccaccactgccgggcctgcggctatgtggtgtgtgccaggtgctccgactaccgggccgaactgaaatacgacgacaacaggcccaaccgagtctgcctccactgctacgcattcctcactggaaatgtgctgcctgatgccccggaggaaatatggcgggcctttcctggaaaagtgggtctctctcacctccc

SEQ ID NO: 68250 - DNA, 568 bp, Homo sapiens
cgtggcggaattccgtagacacacagagatacacacgcatgcacacgaagacacatggagacacagacacgcatgcacatgaagacacggagacacacagagatacacggaaacacagacacatgcacacacgcgaagacacagacacatacacatgcatgcacatgaagacacggagacacagatacatggaaacacgaacacagacatgcgcacacacgacacacatggagacacgcatgcatgcacatgaagacacacggacacacagagaagatacacggaaacacaaacacacagacacaggtccacacacagaaacagagacacacacagacacacatggaaagacacacacagagacacggacctgtggccgcacagcggatcatcgatggctgaagagtcccacttcctgtcgttcagaagcgtttgctgaccacctcctgggtgccaggcttgctgggcactggggactcagcactaagccgggtgccagccatggccctcttggaccccagcctcctggactgtgctgcatgtggtggagggaatgagacaggggtcg

SEQ ID NO: 68251 - DNA, 2228 bp, Homo sapiens
ttttttttttttcctgaaatgtaaattgtttttaatatatttaagagcacacagaagtcttgatttataaaaaaataaatatataacatgacaaatttactgatgatcctggagctctgaggtcaaactctttaaatgatcagtgaaaacataaaacatccatgatctgttaacacacacaggagcatattccagttgtaaaaaacaaattccttgaaggctcagaacgaacaaaaatcagtctttatggcagaaagcacatccaaagctaggcaatgaagttcagcctgggccacgtgaacctttcaccagccagcctataacctatggagccaggacaggaaagcatgatccttcagctcatgacgccacccaggcttccagacaactgcagaatgaaagagtccctcagaggctccccagcccctgctgccatcataaagcacgggagggattgttttgtccttagcggctctgtcctaaatttgagagcaggagactgagaaggttatgctcattaaatattgtcattgtaacacggaatggaaatcatgatccttgcccatgggcactgagctgaaagaaagaggaacctcacatgaggctttcctagagaccaggatgttgggtgagtgggcgtgcacttctcaagtgggcaaggaagaactgcttttctccagctgacatgctctcaggggtgaagaagtttagcttaaaatacctgatggcgctgcataaactggggatttgggaactgagtttttagctctgtgacacacaacataaaaaacaaaaatccagtctcattagctaaattcggattaaaatctgaaatgtttttatggagttgccaacaggctggaatgtacctgatacaatttaatctgcttttatttctttggctgtcttccaaaccactttcttcctgtaattcttaagttggctagttctccttcctcagaaaaattacccctaagaatcttcctaatagtgagggtgtacttccgaatagaagagtccttcggctgaaatggcatctccaaggcctacagttcgaatggggtctttacacaccaatactggtgtgaagtggaaggatattccctctctgtgccattctactactggcttgtttgggtttaatacaatcctggagcctgcctccgaatgggaagtcatgaactcttggggtgccctcagagacactcggctggtgtctatggtttctgtggcgcaggcctgtgtcccagccacacgagctcctgcagccacggctgccagctggttggcccagtgtccatccacagttgccaggatgtggtagaccagcgtgtggaaatggatcctggtgagatccgaggctctgcttttactcctcccatgttctttcaagatccagaagaggatgtcactgaccatgcccacatcaggaacaccgttccaggaagagagagaagagtgaggtccagaggctgactgggtgagaaataacagctcctgttcattcagcccaagggaagtcaccgcgggaaagacctgctgaaggaacaatgctgctcatgagctccctgttagtcatactggcccagctctaggtgaaactggaataccagtggggatgtcagaaatggaggttacaacctccaagagtctcttcctctggagctccttgctttgtccctccatcatgtgcaatccagagaggccccccaggtctggctgaaactcctccaggctagacacaaacacctccagcatattcatggccccgttggagaggtcgtgagagaagatgaatcggttggcatggggagcttttaactggccccactcctcccctgcttgatactctaaaatgaggtggaactcatccacttcctgcaatgactctggtggaacaaagacattgtcatcaagaagctcatgtagctttggaccaactggaccgcaaagaagaacctttaaatctgagttggctgcaaatttctgtccaattaaagctgcatttcctcctacatagtgctgggctcctgggaactctgacgcaacctgggcaatgtcgtgaaaagtttccttatcactgaagaagcgctcagcagctgctcccttccccatgaagtgaatgaaggcttcttccagatcattccttgaatgcagaatgctgtgatctttcccattcccaggactaaggccaagtgcctgcaagagcttcacccctgaggaattca

SEQ ID NO: 68252 - DNA, 631 bp, Homo sapiens
tttcgttgctctcacacatccttcgtcccctctcaccaaccctctcccatatttctccccccttcctccatgccctcctgttctactccctccaccaccaccctccaaagctctctggtggatgtgagctgacagtggtcctccaggacttcagtgcgggccacagcagtgagctgaccatccaggtggggcagacggtagagctgctggagcggcccagcgagcggcctggttggtgtctggtccgtaccaccgaacggagcccgcccttggagggtctggtccccagcagcgccctgtgcatctcacactcccgaagcagcgtggagatggactgcttcttccccttggtgaaaggtaggagaacagagcgggtgggaggcacagaccaaggaggccacgagcgctggcctgactctagctgaagaccaccatggaagtgacctgtctcacagacccatttttaccctgtggggtttctttgggacctgactgtgaagagaatgggttgggaacttggagaggaagagctcccgagtaactgtgtgtgactttgggaaagtcatttagccttcctgagtcagtttcatcttggaaatgaaggttgaattaagtaacctccaagatctct

SEQ ID NO: 68253 - DNA, 992 bp, Homo sapiens
  misc_feature (1)...(992): n = a,t,c or g
tttcgtgggaaggacaaggccttcacctatgactttgtcttcgacctggacacctggcaagaacagatctattccacctgtgtgagcaagctcatcgagggctgcttcgagggctataatgccacggtgctggcctatgggcagacgggggccgggaagacgtacaccatgggcactggctttgacatggcaacgtcggaggaggagcagggcatcatcccgagggccatcgcacacctctttgggggcattgccgagcgcaagcgccgggcacaggagcagggcgtggctggacctgagttcaaagtcagcgcccagtttctggagctctacaacgaggagatccttgacctgtttgacagcacccgtgaccctgacacccgccaccgcaggtccaacatcaagatccacgaggacgcaaacggtggcatctacaccactggcgtcacttctcgcctcatccactcccaggaggagctgatccagtgcctgaagcagggggccctgtcccgcaccacagccagcacccagatgaacgtgcagagctcacgctcccacgccatcttcaccatccacctgtgccagatgcgcatgtgcacccagcccgacctggtgaatgaggcagtgactgggcttcctgaatggacacctccctcgagtgagtatgagacactcactgctaaggttcactttgtggacctggccggctcaaagcggctgaagcggacaggggctactggcgagcgggccaaggaaggcatcttcatcaactgtggcctgctggccctgggcaatgtgatcagcgccttagggaccagagcaagaaggtggtgcacgtncctacaggactccaagctcactcgcttctncaggattcgctggggggcacaggcagaccatatgaacgcctggtgaaccctcacacgagattcatggagaacctaaacacttaatattccatcggcccggacattagaaccaggttagtgacc

SEQ ID NO: 68254 - DNA, 812 bp, Homo sapiens; identical to SEQ ID NO: 68207

SEQ ID NO: 68255 - DNA, 2912 bp, Homo sapiens
cccgtgtcgacgatttcgtcataacgaaatagctaccggaagtgcgctgctcgcaccccgggacccgcccgggctgccggctgatgtggaccgtccgacccgcgtgtctgataatcctttgacgggttttggtcggcggagaatggtctctaaacttcccaaaccgcccccgtttcacgtcctgtgaaaggaagtgctcctctgatgaccaatcagcggcgagaagctcttttaacgtccgtccttctttcacgcctccttccccgcgctttggttcgtgcgtccgcgccccagtgtcgggtctgcgtggatcggtccttccaggacaccgtcgccttcccggccgcgtcggagtccggcggcgacctgcctctgaaacatggcaggctcggatgctgagtgggtaaccattgccaataaccttctttttaagtgtcatatacatctgagaatacatgaacttcaagactgtgatgctaatgtttttattgctctttatcagtctattttgggagaaaaggtaccagacctcatagttattcctaggagtcaagaagatgatgcacacaatgtacaagcagtaattgattcactggccttggactacttgcaggtcagcttgtctcacataacaggagaaaatatagtgaaaggagataaagaatctattaagaatctcctggaaatatttgatggtttgttggagtatcttacagaacgcatcagtgaaacatctcatgagaaaagtgctccttgtcttctgagatgttgggcccctcttgggatggagatgaagcagaatccactggtgaaatcattagacttggagacacagcacacaccttttctctaagaagtaatggtgctcaatgtcctaatgaaatgctgtctaaaaaagccttagcctcaccaagttctaaatcacatgaagatatgttgtaccctcctagtgttttgtccaagagtaggacatcctttgttgaagacacggaaaccctttctgtgagtgggattccaaatgctaggaagctaggggagcctatccgagcagctattcctttacatccaccctaccacccttcagagcctcgagcaccctgccccataggaaaagaatacttgcattcaagtcactgctccccagccgtaaattctactggagagcatacggaattttctggggatctagatgatggacttttcttaatttccaagttgcctaaaggcagcaaatgggaagtatatccagctcaggtccaagggcctaggacaaggaagcctcccaaaggaaaaagaaatgaaaacagagctacagcctcatcctgcaattcacctttcccccagaggccaagaaagagattaacagaacaagaattacatgatgtatcagaaaaactctctcagcggctttctgaactagattggatgttaaaaagtgctctgggtgatcggattaaagaaaagactgaccataaagaagaaaatactggaaatgaggaggtagaggatggaactgaggagacactgtctcagcacagtgatggcatcgtggagtatgggccaaagaagtcaaggccaggactttccatgcgtagaaagccaccctacagatcccattcgctctctccatctccagttaacaaacacaaacagttccacttggagagaaaaaggcagcgcaagccaagagaaacagatgtccgccaattccaagcacaggcgtttactgaagcatttgaaagggaactaagaagacataaagttcaagagaatattggacctctaagaatacatgagaaggaggaggaaacagaaaaaatatacagaggagaagctgttcgtaaaggaactccagaatgtagtcagccctggaagatttactctagaaaaaccacaacgcagagtctaagaggtggcctcccaaagccaaataaagcagttccaatgaaagtaagtgaacacagtctcctgccccttatgctggagcagtttccgtttctttatgtttctggcccaacactaagcaaaatgtggaaacagcaaattgcacaggttgaacagcttaagaaagaagcatgtagagaaaatcgatcaaagaagaaactccaagatgaaatagaagaagccctaagaaggcatgacctccttactacccttgtcaagaaagaatatgaacataacaagagactgcaagacttcaaggactgcattcgtaggcaaaggttgacccaatcaaagataaaagaaaatcgacagcaaatcgttcgtgctcgaaaatattatgatgattatagagttcagttgtgtgcaaaaatgatgagaatgaggacccgggaagaaatgatatttaagaaactgtttgaagaaggtttaaacattcaaaagcaaagattacgagacctaagaaactatgccaaagaaaagcgagatgaacaaaggagacgccaccaggatgaactggactccatggagaactactataaggaccagttttcattgctggcagaagccatatcacaggaacatcaagaacttaaagccagagagaaatctcaggcccagacattacataaggtgaagagggagctgagatctaagatggagaaggaaattcagcagctgcaggacatgataacacagaatgatgatgatgttttcttccgggaactggaagctgagcgcttcagatctcggcttcagctggcttcctttcagtacagtaaaagtccctccctatgaggccagacttgataatagtaggtgaaggttctggaggcctttaccaggacagagctagaatcgagccagtaaacagtctaagccagaaaaataattttcaaatgctttacctgtattttcattccagtactttttatgattttttaaataaaaattgttttctaaaaaaaaaa

SEQ ID NO: 68256 - DNA, 635 bp, Homo sapiens
cgagcacctgaaggatgacatggaagcttccgggacccagaactgcttcctcaactccgagatccaccaggtcacaaagatctggagaaaggtggctgagaaggagaaggcccttctgacgaagtgcgcctacctccaagccagaaactgccaggtggaaagcaagtacctggccggtctgagaaggctgcaggaggccctgggggacgaagccagcgagtgctcagagctgctgaggcagcttgtccaggaggcactgcagtgggaagctggggaggcctcatctgacagcatcgagctgagccccatcagtaagtatgatgagtacggcttcctgacggtgcccgactatgaggtggaagacctgaagctgctggccaagatccaggcattggagtcacgatcccaccacctgctgggcctcgaggctgtggatcggccgctgagggagcgctgggctgccctgggcgatcttgtgccctcagccgagctcaagcagctactgcgggcaggagtaccccgtgaacaccggcctcgtgtctggaggtggctggtccacctccgtggtccagcacctgcacactccaggctgctaccaggaactgctgagccggggccaggcccgcgagcaccct

SEQ ID NO: 68257 - DNA, 878 bp, Homo sapiens
cccggttcgacccacgcgtccgcctgctcctcctcccatgccatctgtatttctgccacccaccactataccctcccctcgaggccagggccacactccggagttcccttgtactgagcagagtggacgaggccttctacctcctgtagcccccagctggcttgatttggctggtcttggggtgatgcctgacaccttcaactcaaggtctccctctgtggagggttctctgtgggcagtgggcacagagagtcagggtcgagattggaggcacctgccgaccatcacaagtgagctctctggggctccccgctgccacactgtaccctgtgctgggagcacagctctccaagagcctggggagccccaggggccaccagccagcccttcgtgcccagaggaggccttggctgccacatgggagcagccatgggcttcggaggtattcgggcctgagagaatgcccccctctggagctgctcgaagcttccaagaagtaacagagccagctgtagtggcagtggaccggcaggccatcttcccagatacctggactctcacggaggaacatggcctacagcaggagaggccaaggccagagccagggaggctgggaagcagctcccctgcctcagttaccacggagcagctaggtgcaaagatgaccgagaggggaagtgtggccaggccaacccagggacctgaaaccccaaggagcccagagggcaccacggaagctgccacccaggacgggaaggaacagccagagcttccatgtgccatggccatgggcacacccagcaccacggagaggatttccacctctggccaggcaggcaccagctcgcatggctgctgggcatggccattggcgggtc

SEQ ID NO: 68258 - DNA, 771 bp, Homo sapiens
gcggccgcatccagcagagccttcaggggcaccaggcccaccagctgtgagcccaccactgggaggctcagctcctgtgcttctcggcaggtctcctcgtagaccgtgtgcagtgccgtgacctcaaagtccagaagattggtggacacctgagccaggttcttctcatccaggtaccagccaatgccctgaactttcttcagacgtcctggctggtccttcccgcggccctgctcccgcaggttgagcgcgatgcggtgggcttgctcctttgtgccgagcaggttggatgttaaaagcaatgaggaacttcctcgcccccgtggccgtggccccccaactggggacaaaggagctgggaccaaagtcgggcgcccagtcggcctgctggagctgtgagcaagttcgctctgggaaccgcaagcaaccacataaatataacggcagagaaaaggaaaaactcgtgaacccgcacaccagtgtgactgtgacgtgggccctgcgtcgggattttcttcggggggactggcatgaccgtgacgggggttacgtgtgccctgcatgccggcgtgaccgtgacgggggttacgtgtgccctgcacgctggcgtgactgtgacctacgtccctgcctcgggatttctttccaggagcgctgggttggtgcagcctaggggtgggtatgcactttgtccagtttgtctctgtttgtttcatatcattttcttgatttagttaatttcccaaagtgaaattattctgctctagaaaa

SEQ ID NO: 68259 - DNA, 778 bp, Homo sapiens
agattttccgggcacccttccgtatctgcctaggcattttgctgtctcctcctaatacggaacaagcacaatataaaaaacaattagagcagttaaacaaggatataatacagcttcactaaataagaaggaactcacacttaaagatgtggaatgtaaattctacaaaatgaaaactgcttatgaagaggttacaactgagttagaagaatataaggaagcctttgcagcagcattgaaagctaacagttccatgttaaaaaaattaactaaatcgaataagaaaatagcaatgatcagtatcagctctttatggagaaagagcaggtgaaatattttctcagcactcttcctgcaaggcgaggtcaagagtcaccttgtgttgaaaatcttactagtataggactcaatgaaaatatattccccaaatgcccgtaagaattcctacttcaagcctcagacttcaaataattgccagaactacttgactgaggttagttatatgaccgtttctctttagggtttcatttctctagcgtaattcttgtttataatttggtgaaatactgagttgttctgttgacttttgcatgtgaagtaaagatcataattagctgtgttaacacagaaaggaaatgggaactttacattttttaattccctggagctctcattttcaagagatatccatttgctaactttattcaagaaacgtgactaaactgacatgtttgaaatgtctttaaaagctgcatttaagttaggttttagaaattgc

SEQ ID NO: 68260 - DNA, 1645 bp, Homo sapiens
gtgctgggaacggcaaggcggtctgggggatggggaggggcaaaggtgagagatcaccttccctatcctccaccttcccgcagggaagacgaagccaggtgccagggctggggtcgggacacccatgttctgggcggcttgaccccaaatcccagaccccggaagctccaggctcgggatgtgtcctgagcacctgtcccggccccctcctctccagcctgtcaggccagcctccccagcccccttccctcaactctaggggcagcatagccccaggccaccctagcccagcccctgcattgccgtttccccagaggtggcccctccacctctgctctgacctctccccatctctctgcccctccttttctcacaagtgccatgagttttcaaacatcttcgggtctcagcctgctgctgccatgaactttgttgggttaagggggaggggctctaggaaggaactggggggaaggggacaggtaggtggctggagggaccctttttgctgctagaaagcccctcccttctcccggggagctggggctggcttgtccccatcaattaggggagaaggggtcagaccaaagatggtggtttgtcccgtgtaagggaacaggtgtggggaagaggtggggttgggttccaactctggctttttctggtagaaaggcctaacccattacaccagaagaccatgggtgaagtctagatggggaggagaagtgaggccagggacagtcttgccagacgactctgaggagggcaagggacagttccatggcccttcccggactgcactaggctgggagctctgttgtgtggaggggtggtcagaggtctgtgaagagcgggcaggaggcatgagcaggcgaggagctggcctgtcccgggaagcagcccagcctgtggctgcccccgacaccaggaggagggccaggagagttccagggggctgaggcacacagagaggccaacttcctccctgcccagccttccttgtatctctccagactcggacaatcaaagggagagagggtgtatcgggtcctgttccagccggcatcgccgggtggcttccaggcctcagagctgtgtggcagggccccctgctggggctggacatcactgcagtccagtgcaaagccgcccccagagcccaggtgtccccccaacctaaccagacctggtgccttgacgcccccaccccagctgggacggtacagagaagggtcttggtttcctctcctactcccttccttaggctcctgaactcgtttgctcctaaatcttgttaattctttttctctggattttggtttcttttggctttcccttgccttcccctttctctgtctccaacactctttccccatgtctttctggctgtctctatgttcctcttctcttatcctcaactttctgtccattcgggcctcctccccacctcccacgccccagcccctccctccttggtctccttttcgatatgccaaaccaattttgggtcgagtgcatttaacgagaacaaaacaaaaggctcataacaacaagaacgtttcagaaaaaaacaaaaagttttaaaaaaattgttgagtcaaaaagtcaaacaataaagaaattaagatttcttggaaaaaaaaaa

SEQ ID NO: 68261 - DNA, 465 bp, Homo sapiens
gaattcttggggcgaaccacgcgtccgccacgcgttcgccacgcgttcgcccacgcgtccgcaataatagtaggggacttcacaccccactttcaggaacgggaaggtcatccaggcagaaaaatcaacaagaagcattggagttaaactatactctaggccaaaagagcctgacaaacattaacagaatatttcatccaacagctgcagaatacacattattctcattggcaagtggaacattctccaggatagactataggttagctcacaaaacaatctcaaaaaattaaaaaacgtcaaaattatatcaagtctcttttctcaacacaatcaaaaaaactagaaaccatagcaagaggaactttggaaactatgcaaacacatggaaattaaacaacatgctcccgaatgaccagtgggtcagggaagaaattaagagggaaaatttaaaatttcttgaaa

SEQ ID NO: 68262 - DNA, 1222 bp, Homo sapiens
cacttgtcgacccaagcctccccggacgcgtggggcgcccccggacctcgcgggacctgcgtttgcgcaggaagaattccccaaggagacttcgccataggagttcacaggaaatattgaaatgtcaggttccactccatttcagatgagattagttcatttagaccttaaaggagctccaccaaaggtctcgtacctctcaaagcccctctgaaatcaaagagatcttgcatctggctggactcaatgagctggaggtgattcccttggtgcagacatttggacacatggagtttgtgctgaagcacacggccttcgcccacctgcgggaggtgggctccttcccctgcaccctgaacccccacgaggcagagtccctggcgctggtgggcgccatgattgaccaggtcctggagctacacccaggcgcccagcggctgcacgtcgggtgtgatgaggtctattacctcggagagggggaggcctcgcgccggtggctacagcaagagcagaacagcacggggaagttgtgcctgtcacacatgcgggcggtggccagcggcgtgaaggcccggcgccccagcgtgacacccctggtgtgggacgacatgctccgagacctgcctgaggaccagctcgcagcgtccggggtgccgcagctggtggagccggtgctctgggactacacggccgacctggatgtgcacggcaaggtcctcctcatgcagaagtaccggcggtgcggctttccgcagctgtgggcagccagtgccttcaagggtgccacggggcccagccaggccgtgccccctgttgagcaccacctcaggaaccacgtgcagtggctgcaggtggcgggcagcgggcccacggactcactgcagggcatcatcctgaccggctggcagaggtacgaccactactctgtgctgtgcgagctgctgcccgcaggagtcccgtccctggccgcctgcctgcagttgcttctacgcggtatgtctggtctggccaccccaagccccaccggcccctccccgaaagacccggagggcaggaggccaagcacccagtgctccaaccaccctgctggactgtggtggtcctcacagtcggaggatggtctcaccgccccagctcagccacccacctgccctgaagtccacccaggctgggcctgtgtctgggtctccaggcctaagcccaaagcaggctggagagtgac

SEQ ID NO: 68263 - DNA, 1546 bp, Homo sapiens
tggtcatcctcctacggaccatgaactcactcaagcaattgtacacagtgactatggatgtgcattccaggtacagaactgaggcccatcaggatgtggtgggaagatttaatgaaaggtttattctgtctctggcctcttgtaagaagtgtctcgtcattgatgaccagctcaacatcctgcccatctcctcccacgttgccaccatggaggccctgcctccccagactccggatgagagtcttggtccttctgatctggagctgagggagttgaaggagagcttgcaggacacccagcctgtgggtgtgttggtggactgctgtaagactctagaccaggccaaagctgtcttgaaatttatcgagggcatctctgaaaagaccctgaggagtactgttgcactcacagctgctcgaggacggggaaaatctgcagccctgggattggcgattgctggggcggtggcatttgggtactccaatatctttgttacctccccaagccctgataacctccatactctgtttgaatttgtatttaaaggatttgatgctctgcaatatcaggaacatctggattatgagattatccagtctctaaatcctgaatttaacaaagcagtgatcagagtgaatgtatttcgagaacacaggcagactattcagtatatacatcctgcagatgctgtgaagctgggccaggctgaactagttgtgattgatgaagctgccgccatccccctccccttggtgaagagcctacttggcccctaccttgttttcatggcatccaccatcaatggctatgagggcactggccggtcactgtccctcaagctaattcagcagctccgtcaacagagcgcccagagccaggtcagcaccactgctgagaataagaccgcgaccgacagccagattggcatcagcgcggacactgcatgaggtttccctccaggagtcaatccgatacgcccctggggactgcaagtggaagaagtggctgaatgacttggctgtgcctgggaattgccttcaacaatcactccggataagttctcaaggcttgccccctttgcctgaagcttgtgatctgtcctatgttaatagagataccctcttttggtgccacaaggcctctgaagttttcctccaacggcttatggccctatacgtggcttctcgcttcaagaactctcccaatgatctccagatgctctccgatgcacctgctcaccatctcttctgccttctgcctcctgtgccccccacccagaatgcccttccagaagtgcttgctgttatccaggtataggagcagaggcgtccttgtggcagtgatttggggaaccactgaggcatcaggaattagtggcttaataactgcattgtgggagttttgaaactgtggagtcctggtctggaaccaaggggctgggtctgctgagacaggtgactagggtgcactggaagaggttagcgccactagacacccaaagctccactgttgacggacggggaaaagccagaaccgaccgctctct

SEQ ID NO: 68264 - DNA, 1319 bp, Homo sapiens
  misc_feature (1)...(1319): n = a,t,c or g
gactatatccatcagcgtgaaaactccagcaggagggaaggaaacagatgtccctgagtcattcagttccttcagaagttgtttttgagtacctactatgtgccaggctgtctgcttggcactgtggaatgagctcactccctgtgcccaagcagctcttggaataatttgcacacttctcaatacagctggtgcctagtagggttattcaattccattccatcacatcctgtgtgcctttaactcttactgtanagaggaaagggaaaggtggnggaggacaggagaggaaggaggcgatctgatacacggaagagagtttttactgtaatccggagaaaatgcaggtcttctttgatgcctttcatattggatgacataaatgagactgtttttaacactttattagcaatatgaagagtttcaaaagaggaaaaatgggtttttattgtaagtttacattatttgggctttataaaagcatggtcttttaaatgttcacacttccctgggcatgaatggactgtgctgtatggccctagatcgggaaaaagagctaatccgccaagcagctctgcagcagaccaaggagatggacctcagccgtggtgcggctcatgtttacagcttttcttccggatagcactggcagcttcacaaggcgcctggaacccgtggtatcagacgccatctatgacagtagtgagtacttcacttccaacagggggcacaccaagaatagacttccagccctgccctgccatttacttgctagctgagtcctggggaaggtaacttaatcactttaagcctcagctttatcatctgtaaaatgtgaataggaaaatctagcttgaaaggttgatgtccaggttaaatgaggtattttaagaggggctcaatacatgtaattctttttcctttgatgtacattttttagtcttttacatgaaatgtcacatctcatcttatttatgaatgtcttgctataaagatatatggttgatacttttagaagggagaataatcccaattttctttggtggtggggggactctggaaaggagtttataaaagacaactattattcttacccattttctttcccatatgttactagctttatcaagagagaaacttgaagttaaatgaatgagtagcatagacagcatgtgacttcaaaatcctatttcaagcctgggtttgcgtcatgctctggagtctcacctacttgggaggctgaggtgggaggatatggagttcagcccagcatgagcaacattatgagaccctatctcaaaaaaaaaaataggattttt

SEQ ID NO: 68265 - DNA, 675 bp, Homo sapiens
atcatatatagtattataaatgaaggattctgccttcttggccttattcattagtacgctagtatgaaatttggaactgctttgagtgtgtattacaattaagtactattcgtttctgtccctttttttctttttaagaattaagtaaaaactagttaacattttttcccttttaggaggaaaaggattagtagatattcagcctcattgggtatctgccctggcttggccagaagagggtccggctacagcctggtcaggagagtctccagaattgttgttggtgggacggatggatggatctctgggactgattgaagttgttgatgtgtccaccatgcaccgtcgagaattggagcattgctatcgaaaggatggatactcttattagcatgaagtgggaccctacaggtcatattcttatgacatgtgccaaagaagacagtgtgaaactctggggctctatttcgggatgctggtgctgtctacattcactctgccatccatctattgtaaatggcattgcttggtgccgccttccagggaaaggatccaagttgcagttactgatggctactggctgtcagagtggcttagtatgtgtttggcgcattcctcaagatactacacagaccaatgtgactagtgcagaaggatggtgggtcgacgcggccg

SEQ ID NO: 68266 - DNA, 932 bp, Homo sapiens
cgcaatttccggttcgacccacgcgtccgcccaggtacccgagcttggagatctgtgtgatgatttattttaatgagactggggagtccccgaaggcaggaggctgccacagtccctctcccaggagggggacttcacaccagctgccatggggctccttaggggccccttaggggagaaagatctggactgtaatggttttgacagtcgcttcagtctgagcccaaacctgatggcatgtcaggaaatccctacagaagagaggccacatccatatgacatgggtggccagagtttccagcacagtgtggacctaactggtcatgagggggttcccacagctgaaagtccactcatatgtaatgagtgtgggaaaaccttccaaggaaatcctgaccttattcagcgtcaaatagtccacactggggaggcttcctttatgtgtgatgattgtgggaaaaccttcagccagaactcagttcttaaaaaccgtcatcgatctcatatgagtgagaaagcttaccagtgcagcgaatgtgggaaagccttccgagggcactcagacttttctaggcatcagagtcaccacagcagtgagaggccttatatgtgtaatgaatgtggaaaagccttcagccagaactcgagccttaaaaagcaccaaaagtctcacatgagtgagaagccctatgaatgcaatgaatgtgggaaggcttttaggcggagctcaaacctcatccaacatcaaagaatccattctggggagaaaccgtatgtgtgcagtgagtgtgggaaggccttcaggcgaagctcaaacctcatcaaacaccacaggactcacacaggagagaagccttttgagtgtggcgagtgtgggaaaagccttcagccagagtgcacacctgaggaagcaccagagggtcacactggag

SEQ ID NO: 68267 - DNA, 684 bp, Homo sapiens
actttactgagaagaacagggctgtgattgttgatgtcaaaactcggaagaggaaaacagtgaaggactaccagctggtccagaagggaggaggacaagagtgtggtgactctcgggcccagctgagccagtactcccagcactttgcctttatcgccagtcaccttctgcaaagcagcatggacagccattgtcccgaggcagtagaagcaacttgggtcctgtccctggccctgaaaggattgtataaaacactaaaggctcacggttttgaggagatcgtgctactttccttcagaccgatttgctgaagttgctggtgaaaaagtgcagcaaagggactggctttagtaaaacgtggctcctccgggacctggaagtaagagacgagagggactcctgctcctctttcctggggcagatgtgctggcctaggagttagaagcatcaccgagttccagctgcttctgccctgtgcacactcctttagtacagtgttgaaaactcccttgcttctgtattccctgttggaaatagggattatgacacctgtctacccctgtcagggaaaatgaatttaatgtttgttcaaagaacagtggaagagaagcattttatggaaacacatgattaaccattatatcatggtaataaaggatacccttgaattcatatttcccttta

SEQ ID NO: 68268 - DNA, 1467 bp, Homo sapiens
ggaggcaggagattcagaccctaaagttcagatcaacgccatttgcagtcagtggctacccatatcccatgctgttcttgctatggtgtgtcagaaacttcctagtccccttgatattacagctgagagagtggagagactgatgtgcacaggatcacaaacttttgactcttttccaccagaaactcaagcactgaaagcagcttttatgaaatgtggaagtgaggacactgctccagttattatatttgtttccaaaatgtttgcagttgatgctaaggccttgcctcagaataagccaaggcctctcactcaagaagaaattgctcagagacgtgagcgtgcaagacaaaggcatgcagagaagcttgcagcagcacagggacaggcacccttggagcccacccaagatgggagtgccattgaaacatgtccaaaaggagacgagccaagaggtgacgagcaacaggtggaaagtatgacccctaaacctgtgctccaggaagaaaacaaccaagagtcttttattgcatttgctcgggtgttcagtggtgtggctcgaagaggaaagaaaatttttgtcttggggcccaaatacagtcctcttgagtttttacgaagggtaccattaggcttctcagctccaccagatgggcctcccccaagtcccccacatggcatactgtgctctggaaaacctgtatcttctgatgggaagggaactggaatatctagaggaggtacctccaggaaatgtgctaggaataggaggccttcaagattttgtgctgaaatctgcaacactgtgtagcctgccatcctgcccaccatttataccactcaacttcgaagccactcctattgtgagagttgctgttgaaccaaaacatccaagtgaaatgcctcagctcgtaaaaggaatgaaactgttaaaccaggctgatccctgtgtccagattttaattcaggaaacgggagagcacgttttagtcacagcaggagaagtccaccttcagcgatgcctggatgacttaaaagaaaggtttgcaaagattcatatcagtgtatctgaacctattattccattcagagaaacaatcacaaaacccccaaaagttgacatggtcaatgaagaaataggcaaacagcaaaaagttgcagtcatacaccaaatgaaagaagatcaaagcaaaatccctgaaggaatccaagttgactctgacgggctaatcaccataacaactcccaataaacttgccacgctcagtgttcgagccatgccccttccagaagaagtcacccagattctggaagaaaatagtgatttgattcgttctatggagcagttgacatcctctttgaatgagggcgaaaatactcacatgattcatcagaagacccaagagaaaatttgggaattcaaaggaaaactggagcaacacctaacagggagaagatggaggaaca

SEQ ID NO: 68269 - DNA, 475 bp, Homo sapiens
gcaaggccggaattcccgtgtcgacgatttcgtcttgggatttaagcttacagcttcccggtggtatctgatggcgcccgtttggttgcctttagcagccaggtttctgccgatgttgcagcgaacctcagcactgaggggacacacagacacagcgcctctgaaaaccgcccctcgctccgccactcgccgccgcgcaccgcgcatctcagcctctcagcatcttgctgagtaggattcccagcaccacggcagcgatgagcttctttttctcggtgtgtttgcgcaggctccgaatccaaaaagcagcatcacacagcaccccacgctcgggaccacgaagcccactcggaagaacaggttacttgcggggagaaacgggataacgagcaatcccaggcgcagagtaaggatccttctctggtggccgtctgcagagcacagggcttggcgtattatgccaattgggcggaac

SEQ ID NO: 68270 - DNA, 2848 bp, Homo sapiens
gagcaggaaaagcgaaagaggtccctgaagctcattctggagaagaagctggccattctggagcgggccattgagagcaaccagagcagtgtggatctgaaactggccaagctgaagctctgcacagagttctgggagccctccactctggtcaaagagtggcagaaactgatatttttgcatcccaataatacagccctttggcagaaataccttttattttgccagagccagtttagtaccttttcgatatcaaaaattcacagtctttatggaaaatgcttgagcactttgtctgctgttaaggacggcagcatcttatctcaccctgcgttgcctggcacggaagaggccatgtttgcactctttcttcagcagtgccactttctgcggcaggctggccactctgagaaggccatctcattgttccaggccatggtggacttcaccttcttcaaacccgacagcgtaaaagatctgcctaccaaaggacaggtggaattctttgaacccttttgggacagtggagagccccgggctggggagaagggagcccgaggctggaaggcgtggatgcaccagcaggaacgaggtggctgggtggtcatcaacccagatgaggatgacgatgaaccagaagaggatgaccaggaaataaaagataagactctgcccaggtggcagatctggcttgctgctgagcgttcccgtgaccagaggcactggcggccctggcgccctgataagaccaagaagcaaaccgaggaagactgtgaggatcccgagagacaggtgttgtttgatgatattgggcaatctttgatcagactttccagccatgatcttcagttccagctggtggaggccttcctgcagttcttgggtgtgccttctggctttactcctccagcctcctgtctttatctggccatggatgagaacagcatctttgataatggactttatgatgaaaagcccttgacttttttcaaccctttgttttctggggctagctgtgttggccgcatggataggttgggctatcctcgctggaccaggggtcagaaccgagagggcgaggagttcatccgcaatgtcttccaccttgtcatgcctttattttcaggcaaagagaagtcccagctctgcttctcctggttacagtatgagattgcaaaggtcatttggtgcctgcacactaaaaacaagaagagattaaagtctcaagggaagaactgcaaaaaactagccaagaatctccttaaggagccagaaaactgcaacaacttttgcctgtggaagcagtatgcacatctggagtggttgcttggcaacacggaggatgccagaaaagtttttgacacagcacttggcatggcaggaagcagagaactgaaagactctgacctctgtgagctcagtctgctctatgctgagctggaggtggagctgtcgccagaagtgagaagggctgccacagctcgagctgttcacatattaaccaagctgactgagagcagcccctatgggccctacactggacaggtgttggctgttcacattttgaaagcgcgaaaggcttatgagcacgcactgcaggactgtttgggtgacagctgtgtctccaatccagctcccaccgattcctgtagccgcctaattagcctggctaaatgcttcatgctcttccagtatttgaccatagggattgatgctgctgtgcagatatacgaacaggtgtttgcaaaactgaacagttctgttttcccagaaggctctggcgagggggacagtgccagctcccagagttggaccagtgttctcgaagccatcacactgatgcacacgagcctgctgagattccacatgaaagtgagtgtttacccgctggcccctctgcgagaggcactctcacaggctttaaagttgtatccaggcaaccaggttctttggaggtcctatgtacagattcagaataagtcccacagtgccagcaaaaccaggagattttttgacacaatcaccaggtctgccaaacccttggagccttggttgtttgcaattgaagctgagaaactgaggaagagactggtggaaactgtccagaggttagacggtagagagatccacgccacaattcctgagaccggcttaatgcatcggatccaagccctgtttgaaaatgccatgcgcagcgacagtggcagccagtgccccttgctgtggaggatgtatttgaactttctggtttccttaggaaataaagaaagaagcaaaggtgtattctacaaagcacttcagagttgcccttgggcaaaggtgttgtacctggacgccgtggagtatttccccgatgagatgcaggagatcctggacctgatgactgagaaggagctccgggtgcgcctgccgctggaggagctggagctgctgctggaggattagagagcagcgggaaaacgggctgtgcctgcgaggccaagttgcccaccctgcggagctaggaggcgcgagcagagaacgtgtgtgttaggagaactcggcttttgaaatgttctttctcgatagtaataatgtgggctgccagcctctcacatcttgcacactttttgggtgtgtaaatgacacaaaagttatttacatattatatatgtgaatatgtgtatatatgtacatagccagagagtcatgccacgtggtcattaaaccgatgatgattgagaaaaaaaaaaaaaagggggggccgttttaaaggatccctgggggggcccaagtttacccgggcttgcaaggaaatagttttttccctatagggggccgaattataagctacctggggatctttggg

SEQ ID NO: 68271 - DNA, 711 bp, Homo sapiens; identical to SEQ ID NO: 68124

SEQ ID NO: 68272 - DNA, 731 bp, Homo sapiens
gtgggaaaggtgaaaagagaaggggcagctgggacatggtgacaccaagagagtagaagcccctagactcatcgagggtcttagccacgaagtgattgtgtctgcagcatgtgggcggaaccacaccttggccttgacggaaacgggctccgtgtttgcgtttggggaaaacaagatggggcagctgggccttggcaaccagacagacgctgttcccagccccgcgcagataatgtacaacggccagccaattaccaaaatggcctgtggggctgaattcagtatgataatggactgcaaaggaaacctctattcctttggggtgccctgaatatggtcagctgggacacaactcagatgggaagttcatcgcccgggcacagcggatagagtacgactgtgaactagttccccggcgagtggccatcttcattgagaagacgaaagatggacagattctgcctgtaccaaacgtggttgtacgagacgtggcctgtggcgctaaccacacgctggtcctggactcccagaagcgagtcttctcctggggctttggtggctatggccggctgggccacgcagagcagaaggatgagatggtcccccgcctggtgaagctgtttgacttccctgggcgtggggcttcccagatctatgctggttacacctgctcctttgctgtcagtgaagtgggtggtctgtttttctggggggccacgtcgacgcggccg

SEQ ID NO: 68273 - DNA, 1634 bp, Homo sapiens
atttcgtggcttgccgggcggccccaggcggctgggcacgcaccccaagaaggagcccatggaggcgctgaacacggcgcagggcgcgcgcgacttcatctacagcctgcactccacggagaggagctgcctgctcaaagagctgcaccgcttcgagtctattgccattgcccaagaaaaattggaagctccaccacccaccccaggacagctgagatatgtattcatccacaatgcgatacctttcatagggtttggcttttttggataatgcaattatgattgttgctggaacccatattgaaatgtctattggaattattttgggaatttcaactatggcagctgctgctttgggaaatcttgtgtcagatctagctggacttggacttgcaggctacgttgaagcattggcttccaggttaggcctggtcaattcctgatcgcacaccaaagcaagttgacatgtggcaaacacgtcttagtacacatttgggcaaagctgttggggtgactattggctgcattctaggaatgtttcctttaattttctttggaggaggtgaagaagatgaaaaactggaaacgaaaagttaatcctcttagaatacctataaaaagatgtaaactaatgtacctcagtaattaaatatgctgtcacaacatttaggaattaagacagtaacagtatagatatgggatcaaataatttagcatgtattatggaaaacactaacttattgtggcttgatcttcttaggacatcttttttaaaaagctgtttagtatcattttgtgtatattgttgaaatgctttttcatcaatagcagtcaacattttatcctttctttttatattcataatgttatttaagtgtcattgatgtactgtattgacttggggtttgcttatttgttacttaacatgtgtacatgcatgaaagcatttttcgttgttccctgatagttacatttcaaccttgggatttttcccaaattacttaagatgtttaatgtcagttaaagatttttttaccctctttttgggaacatcaattttgtactgttatgcagtaaacatttataataatataatttcagtcatttcttaactgtcacatctattgaaaatggatatagatacaggttttaagtattttaagtatatattacttattttaattttctgactttactattttaagggccagagggttaatcacaaagagcaattatgtggtctccctgctacatgaaaccgtgtatactaacaagcgtacaatttttagttgattttttttaaccttttagtttcccagttttgaataattacatggtggattctgacttttgaggggaagcaaatgattattttagagtctttgaaatggggattgtggaattagattgaactaagggatttaacatgatgcttggaaattaagagactaaagctttttttaaaaaaaggtggaaaataggaactgtcaagaaggtttatggtataaatgatgaagttgaagtgatgtttgaaagattaatgagatacaatttatattatttggtaaggtttttttttttccttccaaagaggccatcttctcatctgaatggattaagtctgaataccccat

SEQ ID NO: 68274 - DNA, 873 bp, Homo sapiens
tttcgtgggatggcgacgcctcggccctgcgcggacgggccctgctgctcgcatcccagcgcggtgctcggcgtacagcagacgctggaggagatggacttcgagaggggaatctggtcggcagccctgaatggagacctgggccgagtgaagcatttaatccagaaggccgaggacccaagtcagcccgactcggccggctacactgcgctgcactatgccagccgcaatgggcactacgctgtgtgccagttcctgctggaaagcggagctaagtgtgatgcccagacccacgggggtgccactgctctgcaccgagccagctactgcgggcacactgaaatcgcgcggctcctgctatcacatgggtccaaccccagggtggtggatgacgacggcatgaccagtctgcataaggctgctgagaggggtcacggggacatctgctccctcctcctgcaacacagcccagccctgaaggccatccgggaccgaaaggcacggctagcatgtgacctgctgccttgcaacagtgacctgcgggacctgctatccagctgagccgccaccctatctccagctgcctttaaagggtacacagaccagttctccaagcccctgccttggtcagcatccatgctgctgggcagggaactgaggccagaccacccaggaagagccccagtctggtcactgtggaagcgagggagtagatttggtgtggctaaaagtgtttaagactggacagatgatcatattctaaattagttcatatgagacatctatttatttggaaaaaaataaagttatatccttacctcatcccacacccaaagataaattgcaagattaaagrbctaaatataaaaacac

SEQ ID NO: 68275 - DNA, 483 bp, Homo sapiens
ggaattcccgggtcgacgatttcgtcttttcttctcttggtattatattcctctcctcctccatctttatttctttgatctctgtttcattttcctccttaacttttatttcttttacattttcacactccttacattgcttgttaacaactttctctggcaatgccatctgaaattcaatgttggctgatctacagtactcctcaaaaccatataagtattttttataagcacatttaacattgtatcctgcagctgaatttaagacagggattccaagatcttggtagacttgtttccaaacagctccactttcaatattatcaaatcctccaagtttgtgtacaagtctgaataacttaaagagattcaaatttcgatatccaagtacaggtcgtttgttaatagggtgtacctctatcttccataaatttgtacaattgctgaagaaagttctccctttcttctggaaatggttctatt

SEQ ID NO: 68276 - DNA, 805 bp, Homo sapiens
acgatttcgtctgaagtacacgcaatgcgcagcgaggcctcgggttttgccggcgcagcgcgggaggtggtcgcggacgaaagtgataaaatctggagaaaaacagaaatctgaagctaaagacagaaaagttctagaaatcctgcaagtcaaggatgccaaaatacaagaatttgaacagagagagtcagtactgaaacaggaaataaatgaccttgtaaaacggaaaattgcagtagatgaagaaaatgctttcttaaggaaagaattcagtgacttggagaagaaatttaaagataaaagtcaagaaattaaggacactaaggagtgtgtacagaacaaagaagagcaaaacagactagttataaaaaatctggaggaggaaaacaagaaattaagtacccgctgcactgacctgctaaatgacctggagaaattgaggaagcaggaagcacattgagaaaagaaaaatatagcactgatgcaaaaataaagacctttgaagacaatttaattgaagcaaggaaagaagttgaagtatcacagagtaaatacaatgctctatcattacagttgagtaataaacagactgaacttatccagaaggatatggatattaccctggtcaggaaggaactgcaggagctgcagaatctttacaaacagaacagtacacatacagcccagcaagcagagctgatccagcagcttcaggttctcaatatggacacacaaaaagtactgagaaatcaggaagatgttcacacagctgaaagtatatcatatcaaaaagtatgcttttatt

SEQ ID NO: 68277 - DNA, 1260 bp, Homo sapiens
attcccgggtcgacgatttcgtctcgggggaacagcccggagccctgggcggcaggagggaagggccaggagggcagggagagggtgtgggcgggttctctgggcaccatgtggctacaggtgatggggtctggggggaaaaagacccctgttcaccctctgctcctgtccccacaggacatgcggaagcacgtggccatgaccctgctggacacagagcagtcgtatgtggagtcgctgcgcaccctgatgcaggtggggctcggggcccactcccctgagaatggcctttctgagcctaggaggctgtcagatgggtgtgagcaaacccctttcatggacaagggactgaggccagagagccgtgtccctggcatccgtcgcctttccatgaagaacccccagcatggccattccagagaaggaggaaggcttctcccgggcaagagagaatgcagaggggccaggccaccccagggcaggcgtccctaccctgctgttcttccacgtccccctggcaaccctgaccctgaacttagatccgtgaactccctctgatgtgccgcctccattgtattcactgactgggaagtatgagttgaatagagttcagtattgagcacctgctgtgtgcaggccctgttccaggtacaggagacacaggaatgaataagagagcccagcccctgccacaggagctcaccgccctgctgagtacgtagtggagtatacgggcactctagaaacatcgaggggcacctgctaagcgtggggtcagggaggtttcctggaggaggtgctcacttccaccatgacctgtcttctcaacagcaggaatagcacattgcaaagccaagtgaggcctggcacattcggaggtctacgtggccagcacagagcacaacgcgctggtcccatagctatgctgtcggagtcggcagaggccacgctgtgggggcctagaacaccagttggaggcagtagattctgccagggtccgtggatgatcagcgaagggctttgagcaggggaggtgtgtggcctgattcatgcttcatgaagtctgtctgacagctgggaaggtgggtggcagaagaggaggtcaaggccattgagatccggcaaggatagaggttacaggaagggagtgctggggacagacactcatgaagtggactggtcaggccaggcgtggtaactggttggttgtggggggcaaggtggggaagcccaagatgatgtctgggctcctggcctcaa

SEQ ID NO: 68278 - DNA, 594 bp, Homo sapiens
cccgggtcgacgatttcgtcgggctgtttgtgcaatcttgatttgttctgtgagcttcaggatcttctgctgcaggtgagcaatggcagcctttgtgcgctgagggtctggtgttccatccacagagtctgtgtggatgctgccatcggtactggaggccactgcactggatgtttgggcaaggctgcttacttccaaccgttcgatccgctccgcagttccctcctctcctggtagacatgcagcagcagcagcagcagcagcacaagctatttccatcatagcagagccggtaggtgcatcagttgtggatgaagacctgggtcggcctgactgcataacagctgtcatctcctgaccagacttcctgttgatttggggacttccctttggggcctctggcttgccccgcctactatgcaagcttgtccctctcttcatcttgggtggcactcagaatctgctgcaggacacgattcagagcttcatcactcttccttaagcacttctaaggtgtacaatccttttaggaaaagcggcggggaggggaggagcagccggcgtctccgccagcgccgtcgctcgagctcaagc

SEQ ID NO: 68279 - DNA, 1880 bp, Homo sapiens
ccgggccgctatttcgtccaacatcgtgatagtacccaaggacggtacgggatgggcaaacaagcaggatcagcaagacccaaagagttccagtgcgacggcctctcagccgccggagtcgctgccgcagccgggtttgcagaaatctgtctccaatttgcagaaaccgacacagtcaatcagtcaggagaatacaaattcagtgccaggtggaccaaagtcatgggcacagctgaatggaaagccagtaggacacgaaggtggtttaaggggctcaagccgactgttatccttctctcccgaggaatttccgacgctgaaagcagctggagggcaggacaaggctggcaaagaaaagggcgtcttagatctgtcgtatgggccaggaccaagcctccgccctcagaatgtgacaagctggagggagggcggtgggcgacacataatttctgccacgtctctgagcacctccccaactgagctgggcagcaggaactcgagtacgggagatggagccccctcctcggcatgtaccagcgattctaaggacccctctctccgcccggctcagcctgtccgaaaaggggcttcacagttcatgggaaatgtataccacccacctacataccatgacatgcttcctgcttttatgtgttcgccgaagtcatcagaaaaccagggtacagtggaacgaggctcttttccccttcctcagctccgccttgaacctcgagttccttttagacagttccagatgaatgaccaagacggaaaagaaaacaggctgggattgtctcgcccactccgcccactaaggcagctggtggagcgggcaccacggcccaccattatcaatgcggaaaacctgaagggccttgacgatctggacgccgatgccgatgatggctgggcaggcctccatgaagaagtggactattctgagaaactgaagttcagtgatgatgaagaggaggaagaagttgtgaaggacggcaggccaaagtggaacagttgggaccctaggaggcagcggcagttgtcaatgagctctgcagacagtgcggacgctaagcggactcgagaggaagggaaggactgggctgaagcagtgggtgcgtcccgtgtggtccgaaaggcgccagaccctcagccaccgcccaggaagcttcatggctgggcaccaggccctgactaccagaagtcatcaatgggcagcatgttccggcaacagtccatcgaggacaaggaggacaagcccccaccaaggcagaagttcattcagtcagagatgtccgaggcggtggagcgagcccgaaagcgccgggaagaagaggagcgccgagcccgggaggagaggctggccgcctgtgctgccaaactcaagcagctggaccagaagtgtaagcaggcacgaaaggcaggtgaggcccggaagcaggcagagaaggaagtgccctggtctccaagtgctgagaaggcatctccccaggaaaacggccctgctgtccacaaaggctccccagaattccctgcccaagagacccccaccacattcccagaagaggcacccacagtgtccccagcagtggcacagagcaacagcagtgaggaagaggccagagaggctgggtcccctgcacaggagttcaagtatcagaagtcccttcctccccgattccagcgccagcagcagcaacaacagcaggagcagctgtacaagatgcagcactggcagccggtgtaccccccgccgtcccacccccagcggcacttttacccacaccacccccagatgttgggcttcgatcccaaggggatgatgaagcctttcttcatggggccccgcgattatcccccctttgggccccggggggattttt

SEQ ID NO: 68280 - DNA, 749 bp, Homo sapiens
gaattcccgggtcgacgatttcgtggcagcaggagcctgggactcgggagcgggacccggacaaagccacccgcttccggatggaggagctgagactgaccagcaccacgtttgcgctgacgggagactcagcacacaaccaagtcatggtccactggtctggccacaacagcagcgtgattctcattttgacaaagctctatgactataacctggggagcatcacagagagctcgctttggaggtcaaccgattatggaacaacctatgagaagctgaatgataaagttggtttgaaaaccattttgagctatctctatgtgtgtcctaccaacaagcgtaagataatgttactcacagacccggagattgagagcaagttattgatcagctcagatgaaggggcaacttatcaaaagtaccgggtgaacttctacattcaaagcttgctttttcaccccaaacaagaagactggattctggcatacagtcaagaccaaaagttatacagctctgctgaatttgggagaagatggcagcttatccaagaaggggttgtaccaaacaggttctactggtctgtgatggggtcaaataaagaaccagaccttgtgcatcttgaggccagaactgtggatggtcattcacattatctaacttgccgaatgcagaactgtacagaggccaacaggaatcagccttttccaggctacattgacccagactctttgattgttcaggatcattat

SEQ ID NO: 68281 - DNA, 797 bp, Homo sapiens
agtaaatacagtagttccttcctggattctggttggagagatctgttcagtcgctcggagccaccagtgtcagagcaactggacgtggcagggcgggtgatgcagtacgtcaacggggcagccacgacacaccagcttcccgtggccgaagccatgctgacttgccggcataagttccctgatgaagactcctatcagaagtttattcccttcattggcgtggtggaggtgggtctggttgaagactctccctccacagcaggcgatggggacgattctcctgtggtcagccttactgtgccctccacatcaccaccctccagctcgggcctgagccgagacgccacggccacccctccctcctccccatctatgagcagcgccctggccatcgtggggagccctaatagcccatatggggacgtgattggcctccaggtggactactggctgggccaccccggggagcggaggagggaaggcgacaagagggacgccagctcgaagaacaccctcaagagtgtcttccgctcagtgcaggtgtcccgcctgccccatagtggggaggcccagctttctggcaccatggccatgactgtggtcaccaaagaaaagaacaagaaagttcccaccatcttcctgagcaagaaaccccgagaaaaggaggtggattctaagagccaggtcattgaaggcatcagccgccttcatctgcttcagccaagcagcagcagactatgctgagagtgtccatccgatggggggtcgattggagtgacatcaagttcttccagttg

SEQ ID NO: 68282 - DNA, 502 bp, Homo sapiens
tcccgcgtcgacgatttcgtggcctgtggagcccagtcccaggcaacagtgtccccagagccccagtgttggctgggttgggtctggggcactcccagggagctccccaaggtccgcacgatgggaagactgacaggtcctcaggaccaggccgcagacggacagagaggaccaggctccctgggctcctgggtggggctccgctgactgctggctctccccacaggtggaacgtcctggggctgcagggcgcgctcctgtcccacttcgtggagcccgtgtacctgcagagcatcgtggtgggcagcctgcaccacacgggccacctcgcacgcgtcatgagccaccgcatggagggtgtcggccagctgcccgcctcctaccggcacaaccggcctctcctcagcgcggtgtctgaaggagttctgaaaacagaatcactagtgttgggctcacccaagaggcccccacctgccacctggcccgccaccttgccacctgc

SEQ ID NO: 68283 - DNA, 415 bp, Homo sapiens
agtgtggtggaattctacacatagatgtgtgtgtatatatatacacatagatgtgtgtgtatgttatatatacgcatagatgtgtgtgtatattatatatacacatagatgtgtgtgtatattatatatacacatagatgtgtgtgtatattatatatacgcatagatgtgtgtgtatattgtatatacacatagatgtgtgtgtgtgttatatatacacatagatgtgtgtgtgtgttatatatacacatagatgtgtgtgtatattatatatacacatagatgtgtgtgtatgttatatgtacgcatagatgtgtgtgtatgttatgtatacgcatagatgtgtgtgtatattatgtgtacacatagatgtgtgtgtatattatatatacgcatagatgtgtgtgtatgttat

SEQ ID NO: 68284 - DNA, 2462 bp, Homo sapiens
  misc_feature (1)...(2462): n = a,t,c or g
cccacgcgtccgagagtcagagatctacaggatcccccgccccaaatggccccggagatccagcctccatcccaccacttctcccccgagcagcgggccctgctctacgaggacacactctacactgtcttgcaccgcctgggtcatcctgagcccaaccatgtgacggaggcctctgagctgctgcgatacctgcaggaggccttccacgtggagcctgaggagcaccagcagacactgcagcgggtcagggagcttgagaagccaatattttgtctgaaggcaacagtgaaacaggccaagggcattctgggcaaagatgtcagtgggttcagcgacccctactgcctgctgggcattgagcagggggtaggtgtgccagggggcagccccgggtcccggcatcggcagaaggctgtggtgaggcacaccatccccgaggaggagacccaccgcacgcaggtcatcacccagacactcaaccccgtctgggacgagaccttcatcctggagtttgaggacatcaccaatgcgagctttcatctggacatgtgggacctggacactgtggagtctgtccgacagaagcttggggagctcacggatctgcatgggcttcgcaggatctttaaagaggcccggaaggacaaaggccaggacgactttctggggaacgtggttctgaggctgcaggacctgcgctgccgagaggaccagtggtaccccctggaaccccgcactgagacctacccagaccgaggccagtgccacctccagttccaactcatccataagcggagagccacttcggccagccgctcgcagcccagctacaccgtgcacctccacctcctgcagcagcttgtgtcccacgaggtcacccagcacgaggcgggaagcacctcctgggacgggtcgctgagtccccaggctgccaccgtcctctttctgcacgccacacagaaggacctatccgacttccaccagtccatggcgcagtggctggcctacagccgcctctaccagagcctggagttccccagcagctgcctcctgcaccccatcaccagcatcgagtaccagtggatccagggtcggctcaaggcagaacagcaggaggagctggccgcctcattcagctccctgctgacctacggcctctccctcatccggaggttccgctctgtcttccccctctctgtctcggactccccagcccggctgcagtctcttctcagggtcctggtacagatgtgcaagatgaaggcctttggagaactgtgccccaacaccgccccattgccccagctggtgactgaggccctgcagactggcaccactgaatggttccacctgaagcagcagcaccatcaacccatggtgcagggcatcccggaggcaggcaaggccttgctgggcctggtacaggatgtcattggcgacctgcaccagtgccagcgcacatgggacaagatcttccacaagtgagcagatagccagtaccctcaagatccacctcttctccatggctttccgggagctgcagtggctggtggccaagcgggtgcaggaccacacgacggttgtgggtgatgtagtgtccccagagatgggcgagagtctgttccagctctacatcagcctcaaggagctctgccagctgcgcatgagctcctcagagagggatggagtcctggccctggataatttccaccgctggttccagccggccatcccctcctggctgcagaagacgtacaacgaggccctggcgcgggtgcagcgcgctgtgcagatggatgagctggtgcccctgggtgaactgaccaagcacagcacatcagcggtggatctatccacctgctttgcccagatcagccacactgcccggcagctggactggccagacccagaggaggccttcatgattaccgtcaagtttgtggaggacacctgtcgcctggccctggtgtactgcagccttataaaggcccgggcccgcgagctctcttcaggccagaaggaccaaggccaggcagccaacatgctgtgtgtggtggtgaatgacatggagcagctgcggctggtgattcggcaagttgcccgcccagctggcatgggaggccctggagcagcgggtaggggccgtgctggagcaggggcagctgcagaacacgctgcatgcccagctgccngagcgcgctggccgggctgggccatgagattccgcactgggtgtccgcaccctggccgagccagttggaggtgggcatcgccaagcacatccagaaactggtgggcgtcagggagtctgtcctgcctgaggatgccattctgcccctgatgaagttcctggaggtggagctttgctacatgaacaccaacttggtgcaggagaacttcagcagcctcctgaccctgctctggacccacacactcacagtgctggtggaggcggccgc

SEQ ID NO: 68285 - DNA, 1609 bp, Homo sapiens
  misc_feature (1)...(1609): n = a,t,c or g
cgaagttatggccttccttataaggaaaaggggtggattggaggaatcgccaattgaagtttcgaaggatcgctttagctgaatatcagagaaccttgtgaagatcttaaagagcaactaaagcataaagaatttcttctggctgctaatacttgtaaccgtgttggtggtctttgtttgaaatgtgctcagcatgaagctgttctttcccaaacccatactaatgttcatatgcagaccatcgaaagactggttaaagaaagagatgacttgatgtctgcactagtttccgtaaggagcagcttggcagatacgcagcaaagagaagcaagtgcttatgaacaggtgaaacaagttttgcaaatatctgaggaagccaattttgaaaaaaccaaggctttaatccagtgtgaccagttgaggaaggagctggagaggcaggcggagcgacttgaaaaagaacttgcatctcagcaagagaaaagggccattgagaaagacatgatgaaaaaggaaataacgaaagaaagggagtacatgggatcaaagatgttgatcttgtctcagaatattgcccaactggaggcccaggtggaaaaggttacaaaggaaaagatttcagctattaatcaactggaggaaattcaaagccagctggcttctcgggaaatggatgtcacaaaggtgtgtggagaaatgcgctatcagctgaataaaaccaacatggagaaggatgaggcagaaaaggagcacagagagttcagagcaaaaactaacagggatcttgaaattaaagatcaggaaatagagaaattgagaatagaactggatgaaagcaaacaacacttggaacaggagcagcagaaggcagccctggccagagaggagtgcctgagactaacagaactgctgggcgaatctgagcaccaactgcacctcaccagacaggaaaaagatagcattcagcagagctttagcaaggaagcaaaggcccaagcccttcaggcccagcaaagagagcaggagctgacacagaagatacagcaaatggaggcccagcatgacaaaactgaaaatgaacagtatttgttgctgacctcccagaatacatttttgacaaagttaaaggaagaatgctgtacattagccaagaaactggaacaaatctctcaaaaaaccagatctgaaatagctcaactcagtcaagaaaaaaggtatacatatgataaattgggaaagttacagagaagaaatgaagaattggaggaacagtgtgtccagcatgggaggagtacatgagacgatgaagcaaaggctaaggcaggtggataagcacaggcaggccacagcccaggaggtggtgcaggtccccagaagcaggaccngcttcttccnggagagggagggnctgtcggaagaggtgggnccgncttggggnccnngttacccagnatncncaatcttttttggttgacccggttggacagggtggacttnantgttttncaaaggngntttttcattccancttgttttngcttaatttngcncaacgnacccacggcctncccggnntgaaaccccccnccctgagggggggttntccccc

SEQ ID NO: 68286 - DNA, 1129 bp, Homo sapiens
  misc_feature (1)...(1129): n = a,t,c or g
ccgggtcgacccacgcgttcgaacaattccggcttcgctgcgactcatacctcatctttaacatatgcattttgaagaaagatggctgagatggacagaatgctttattttggaaagaaacaatgttctaggtcaaactgagtctaccaaatgcagactttcacaatggttctagaagaaatctggacaagtcttttcatgtgggttttctacgcattgattccatgtttgnnnnnnnnnnnnnnnnnnnnnnnnnnnnnnnnnnnnnnnnnnnnnnnnnnnngtgaggcccttcattagacactaatttgaagctatggcattcccccactatgagcccacctgtcagccaggctatctgccttgatcctagatgaagtggccattctgcctgcccctcagaacctctctgtactctcaaccaacatgaagcatctcttgatgtggagcccagtgatcgcgcctggagaaacagtgtactattctgtcgaataccagggggagtacgagagcctgtacacgagccacatctggatccccagcagctggtgctcactcactgaaggtcctgagtgtgatgtcactgatgacatcacggccactgtgccatacaaccttcgtgtcagggccacattgggctcacagacctcagcctggagcatcctgaagcatccctttaatagaaactcaaccatccttacccgacctgggatggagatcaccaaagatggcttccacctggttattgagctggaggacctggggccccagtttgagttccttgtggcctactggaggagggagcctggtgccgaggaacatgtcaaaatggtgaggagtgggggtattccagtgcacctagaaaccatggagccaggggctgcatactgtgtgaaggcccagacattcgtgaaggccattgggaggtacagcgccttcagccagacagaatgtgtggaggtgcaaggagaggccattcccctggtactggccctgtttgcctttgttggcttcatgctgatccttgtggtcgtgccactgttcgtctggaaaatgggccggctgctccagtactcctgttgccccgtggtgggtcctcccagacaccttggaaaataacccaattcac

SEQ ID NO: 68287 - DNA, 460 bp, Homo sapiens
cccgcgctgcaggaagtcaacgctaacgcactggcctggggaaaacagtacgagaacgacgccagaaccctgtttgaatttacttccggcgtgaatgatactgaatccccgatcatctatcgcgacgaaagtatgcgtaccgcctgctctcccgatggtttatgcagtgacggcaacggccttgaactgaaatgcccgtttacctcccgggatttcatgaagttccggctcggtggtttcgaggccataaagtcagcttacatggcccaggtgcagtacagcatgtgggtgacgcgaaaaaatgcctggtactttgccaactatgacccgcgtatgaagcgtgaaggcctgcattatgtcgtgattgagcgggatgaaaagtacatgggcgagttttgacgagatccgtgccgggagttcatcggaaaaatggacgaagtgttgtcccgggacccaatgc

SEQ ID NO: 68288 - DNA, 462 bp, Homo sapiens
gcattagtccagtgcggtggaattcgccgctgactgctgaggtgccacccgagctgctggctgctgccggcttcttccacacaggccatcaggacaaggtgaggtgcttcttctgctatgggggcctgcagagctggaagcgcggggacgacccctggacggagcatgccaagtggttccccagctgtcagttcctgctccggtcaaaaggaagagactttgtccacagtgtgcaggagactcactcccagctgctgggctcttgggacccgtgggaagaaccggaagacgcagcccctgtggccccctccgtccctgcctctgggtaccctgagctgcccacacccaggagagaggtccagtctgaaagtgcccaggagccaggagccagggatgtggaggcgcagctgcggcggctgcaggaggagaggacgtgcaaggtgtgcctggaccgcgccgtgt

SEQ ID NO: 68289 - DNA, 786 bp, Homo sapiens
  misc_feature (1)...(786): n = a,t,c or g
gcgtggacttcggatggaatttcagtcctctgcatgtggatatatcattttccaaatacaatttattgaaggctgcccttcccttactgtgtgttcttggcacctctgtcaaaaaccaattgaccgtaagtgcatggatttacttctgggctctctattctgttcctttgggtcacatgtctattttggggatgccataatacttcagttctctttccggatttatattcctcaattttattgtccttgcttctctctgtcagttttcatgtattccttagctttgctctatattctttcctttggagaattgatccatcattataagtttaggtgttagaagttacggggaggcaaaaggatgctcaatagcctcttccctcaaaggatatgcaatttggttaaggacacatataaattaattaaagtnnnnnnnnnnnnnnnnnnnnnnnnnnnnnnnnnnnnnnnnnnnnnnnnnnnnnnnnnnnnnnnnnnnnnnnnnnnnnnnnnnnnnnnnnnnnnnnnnnnnnnnnnnnnnnnnnnnnnnnnnnnnnntgggaactgggattaccagtgtgaaccannnnnnnnnnnnnnnnnnnnnnnnngtgtgaaccatcaaacccagcccagagacatgtaaatttatcattataatttttaaaattgcataattcaatttaatgttgtcataatttttttcaaaggaattgcgtccggagaaatttattgtttttaagactaaaatagtcattaaaaagatggatgctggctgggcacggtggc

SEQ ID NO: 68290 - DNA, 4975 bp, Homo sapiens; identical to SEQ ID NO: 67946

SEQ ID NO: 68291 - DNA, 839 bp, Homo sapiens
  misc_feature (1)...(839): n = a,t,c or g
aagaatgtctggaagagatggaagaaaaggttttttgtattggtgcaggtcattcagtacacgtttgccatgtgcagttatcgggagaagaaagcggagcctcaggaacttctacaattggatggctacactgtggattacaccgacccccagccaggtttggagggtggccgagccttcttcaatgctgtcaaggagggagacaccgtgatatttgccagtgacgatgaacaagaccgcatcctgtgggtccaggccatgtatcgggccacggggcagtcacacaagcctgtgcccccgacccaagtccagaaactcaacgccaagggaggaaatgtacctcagctggatgcccctatctctcaattttacgcagatagagctcaaaaacatggcatggatgaatttatctcttccaacccctgtaactttgaccacgcttccctctttgagatggtacaacgccttactttggatcacagacttaatgattcctattcttgcctgggctggttcagtcctggccaggtgtttgtactagacgagtattgcgcccgaaatggagtccgggggtgtcaccgacatctctgctacctcagagacttgcttgaacgggcagaaaatggcgccatgatcgaccccacccttnttcactacagctttgccttctgtgcatcccatgtccatgggaacaggcctgatggaattgggaactgttgactgttgaagaaaaggaacgttttttgaaggaaatcaaaagaggaggnttccgnagttctgctaagaaaaatcaggttacaacattttaggnaattgcttttcccatttgggtcgaacct

SEQ ID NO: 68292 - DNA, 1820 bp, Homo sapiens
tcccatcgattcgaattcggcacgagctaccgttcaggctgctgagccttttccttcgtggatccgctcccacggcagcgcgccatggcctccgggagccgctcctggagaggaggtgcgctgccgcctcctccttccagcactcatcgagtctgggacgcgagcttccttatgacctcctgccccaggatgctcctggctaccggcagaggctgcgggagcgactgtgggaggactgtgcccgcgccgggctcctgctggcccctggccaccaagggccacagcgccccgtcaaggacgagccacaggacggggagaatccgaatccgccgaactggtcccgcacagtggtcagggacgtgcggctgatcagcgccaagaccggctatggagtggaagagttgatctctgcccttcagcgctcctggcgctaccgtggggacgtctacttagtgggcgccaccaacgccggcaaatccactctctttaacacgctcctggagtccgattactgcactgccaagggctccgaggccatcgacagagccaccatctccccttggccaggtactacattaaaccttctgaagtttcctatttgcaacccaactccttacagaatgtttaaaaggcatcaaagacttaaaaaagattcaactcaagctgaagaagatcttagtgagcaagaacaaaatcagcttaatgtcctcaaaaagcatggttatgtcgtaggaagagttggaaggacattcttgtattcagaagaacagaaggataacattccctttgagtttgatgctgattcacttgcctttgacatggaaaatgaccctgttatgggtacacacaaatccaccaaacaagtagaattgactgcacaagatgtgaaagatgcccactggttttatgacacccctggaattacaaaagaaaattgtattttaaatcttctaacagaaaaagaagtaaatattgttttgccaacacagtccattgttccaagaacttttgtgcttaaaccaggaatggttctgtttttgggtgctataggccgcatagatttcctgcagggaaatcagtcagcttggtttacagtcgtggcttccaacatcctccctgtgcatatcacctccttggacagggcagacgctctgtatcagaagcatgcaggtcatacgttactccagattccaatgggtggaaaagaacgaatggcaggatttcctcctcttgttgctgaagacattatgttaaaagaaggactgggggcatctgaagcagtggccgacatcaagttttcctctgcaggttgggtttcagtaacacctaattttaaggacagactgcatctccgaggctatacacctgaaggaacagttttgaccgtccggccccctctcttgccatatattgttaacatcaaaggacagcgcatcaagaaaagtgtggcctataaaaccaagaagcctccttcccttatgtacaacgtgaggaagaagaaaggaaagataaatgtatgagaccgaccttgttcactccagatattaactgtattgaacacaacaaaatacattgaatttgtattaaacatataacgcataaataaagctcccattcttacccttaaaaataaaaggagaatgaaaaaaaaagatgccaataggcatatacgtggttttgggtattccggggtcttcccgtggtctgttcactttgcggtggtggtgatatattaggcagtcggggcgcctgatgtacgccttcttatagaggtacatggttggatgcagcgtcttgacgtgggattcgctttattcgcc

SEQ ID NO: 68293 - DNA, 2531 bp, Homo sapiens
  misc_feature (1)...(2531): n = a,t,c or g
ttatattaatgaattagatttaagttccctcattatgagaagataatctttagcatcactgaaagagttaagaaatgagacaaaaatcagatcatattcctttattacatatatgaaatataaaaacaaattaacaaagcaatatatatatatatttgcaagtccacaggacttcagagaaaaaaaggttctgtatgtgaaattattcatatggcactgtgttcatgttttgtatattcaagtacaaaagaaactatgtatagtggttatgcgtgggtacagaagatgaataataatgaaaaactgtgattttttgactatcacatacattgtgttaaaaaacaggtaaatataatgactattactgttaagaaagacaaggaggaaaactgtttcaatgttcaggtttaaatactaagcacaaaaatataacaaattctgtgtctacaataatttttgaagtgtatacaagtgcattgcaaatgagctctttaaaatttaaagtccatttcccctttagccaagcatatgtctacatttatgatttctttctcttattttaaagtctcttctggtttagttttttaaaaagtttcatcatggctgtcatcttggaatctagcctccagctcaaagctgagacttcacgcatacatattctcctttctggttgcatcttcacctagtttctccaagtattcagagttaaatagcacaacttcttttatatggtcacttttgtccacatgtagtggcagtgctgctgcttcagtaggctttctcacacacccttttccttctttcaacagcagtcaccaaacgttcacaacacaagtggtaggtagtaaagtgctttatacaaggaaatactatatacacatggagaggttccatttaacacctacagaccaaagttcatgcgtaacacacaagagaaggctctttaacaaacaccttttctgatagtagggttagggattccttaaaacgtcattcattactttaagtagcatcaaacgtaagtaacatcgctgaagctggaaggcgtccttgttagaggtactgcccttaatggattactgctaaatgtcatgctgctattaaaatattcttaatagttaagaatttcagaatcagtcccatagaaaacagatatcagtgtaggggttttcatttctcttcatgaaataaaactgtatttaaacatgggtccagaagagataaattagataagacccatgcattcaaacatttctatatgttttggcactttaaaaaattccagtttcctgtctgaggtcttcttgctctaaagtttgtgttttgtacatagacaagtgccattatgtgctatccatcttaatgctacttgcactctctttttaaaatatccatgacttttcttccaagagaaggtttccagtgctggacaaagcttttcatattcacaattagtttgcctgttcttatatcctcatgtcctgctacaaggtattccaaaccaggattgaggattggacaagtgcatcctctgtccgtccatgattctggatataatgttcgctttcctcggaaaatcttcagtttggtagattttaagacctttttaatcttcacattgacctcaacatgagtacctttatcatgagctgataaaatctttatttttagcacatatgaatatttcattccacagaatgccttggcatttcctaatgtctgttccttacattcgcattttcctgagtgtagaagtgcagaaaacccctgcgcatcctcccactcccaggctggttcgctcttattgtgcacgggacggaagtcaggaacttcatgataccagtctatgtctgtgtggctgctgatgcagtctccggtgatagggtcacagctccccgcacagtcacatggtcgacagccatagtctccgaagccccagtatcccaccatgcacctgtcacaacgtcgccctgccaccccaggcttgcaagggcagtcaccattgctggggtcgcagaaggtcactgagttggcaggaaggacagctgatcctactggatggcaggaacacggtttgcaagcatctggagctgagaagggtctccgcaggtcacgatagaagcctggcttgcacctctggcaatactgtccttctgtgttgtgctgacagtcatcacagacaccaccactacgattccctgatgcctcccacacattaacgtcgaagtgacaggtatcagcatgcccattacacttgcaggttctgcactcgttgggagcccccgttttgccatcagctgcctcccatggccggtcattgtataacggggcacagtgctggcagtggctgcctgctgtgttgtgcttacacatacacttcccatggaccatgtggaatgttcctggggccttgacaggtctgaagccatgaacaggtatgcattgatcagcgtgaacattgcagaagcagctgcccttgacaatgaaatcatagattgcatagtgtgtaaaaccgctnncgccgtcgaagg

SEQ ID NO: 68294 - DNA, 752 bp, Homo sapiens
atagtcgctggactcgagcatctggctgggctcttacctcatagaccttcaaggacagagaccccagggcctggacctgatgccaccccaggccaaagccagagtgggagacccattggtcaggctcagcagggtgggaacaggcagagggacaagaggggaatggagaagtggagaggaaaaggaatcgagggacaggaagggggaggctctaggaaggttctgggttgggggtcagtgcatctcagggagaaccaaggaaggtgggcatggctggagaggaggaaaaggaaggagccccaggtgtcagggcagtaggctgggagtcagtgtggcaaagcgggggcaggacacagatacagtggcaggggcccagggctgggacatgagagaaggcagcgaggcggcagagggagaagagaggactcaggtggaggtggggtgggtcagctgtcagcatccctcagaggagaaatgtggagagctggaggccagcagtcactcacactcgctctgtcctcctgtccagtggatacagccctgggcgctctgctggcccaaggatgtccccactgcccctccatggcctctggccttcttcccattcatatttatttatttattgacttttatgaagtttccccttccatccgatccctactgcccatgttgtcctgaccatccctcccagccatccagctgtctgtctatctgccacaaggaaataaaaatggcaagcagcaaaaaaaaaa

SEQ ID NO: 68295 - DNA, 1009 bp, Homo sapiens
gtcagggcattccccacctccacctcaagaaaactgggtcagttttgcagatactccaccaaccagtactcttttaaccatgcatcctgcttctgtccaggaccagacaacagtacgaactgtagcatcagctacaactgccattgaaattcgtaggcaatccagtagttatgatgatccctgggaaaataacagatgaacaaagacagtattatgtaaatcagtttaaaaccattcagcctgatctaaacggatttattccaggatctgcagctaaagagttttttacaaaatcaaaacttcctattcttgaactttctcatatttgggaactctcagactttgataaagatggtgcattgacactggatgagttttgtgctgcttttcatctggtggttgctaggaagaatggctatgatttaccagaaaaacttcctgaaagcttaatgcccaaactgattgatttggaagattcagcagatgttggggatcagccaggtgaggtaggttattcaggctctcctgctgaagctcctccaagcaagtcaccatcgatgccatcactaaaccagacatggcctgagctgaatcagagcagtgagcagtgggagacatttagtgaacgctcttcaagctcacaaactctgacccaatttgattctaacattgcaccagctgatcctgatactgctattgttcatccagttcccattcgtatgactccaagcaaaatccacatgcaggaaatggaacttaaaagaactggcagcgatcatacaaatcccactagcccattacttgtgaaaccatctgaccttttagaagaaaataagataaattcatcggtgaaattcgcttctggtaatactgtagatggttacagtagttcagactcttttacttctgacccagaacagatcgggagcaatgtaactcgtcaaaggtctcattcaggaacgtcgcctgataacactgcaccaccacctccccctccaagggccacagg

SEQ ID NO: 68296 - DNA, 1888 bp, Homo sapiens
caggggcaactttggcaagaggcccaggcccaagatgagggtcagcatggggaccctaccgtgaaaaggcaaagacaaagatggtccagatcaagcaacaagaaaacaaggaacccaaaggcggcacgggagccttgcccagggcctggctctctccttgcccaggttagaagaaaacacgaagcaaagcagcaacaacccctccccctcctagctgcagggataaggcctcaatattagggcccacatgcattgtgcatcctatagaaatggatgagtgagtgcatgtcagactaacacgaggtttctcatcggcttcatggcgggtacacttctgcagcaccaattctcttcccttctacactaaacaagacagtacagcaacgtccgggctctcagtcctgaggccaccacttctcagctgcctccacagcaggctgggagctctgcgttctctcccaagtaggtctgatggtcacgatgttctcatcagccccattctaggcgcctatgcaagttccaaagaagttcattcctagacctggggtaagcaggccacctcaggagctgcaatcacatcacggcccccaaagctctgtcagagttcttgcctggtccccctaagtccatggggaccagagaggccaagctcacctcttcaaggccggtgggtgagccactgctcatgccaggatggacctcatacatactcctgccttcttgccaacccaagggctgtcggtggttttaaaacgcatcatggtatggattccttttttttttaaacaatctttttttcttttttttttttcttaaatgtaaaaaacacctcggtacagcagagacagacacgaagggcgggcgggagggctgcatgcaggggcgtgcattggctgcttgccgcttttgtaattgaattgttttaaaccttcaaacaaacaggactggccgctgtcactcaggccctccagagccactggctgcgaaggttcggacctccggctggaatctcctaaaagcccctgtggctgagctcactgcagcggtgcgggcagggggcccctgagcagtgatagtggacattgagccacttgccattcccgacgggtgccagacccgggtcttcttctgacttggctgggttcgaaggccgaccctgcccgtcgatgtactgggtgaggcggatgtaggcgatgcacgctgcgtcctccccaatcacgtggacgtgtgggtttaggatggtggtatggataggcttgctgttcttggacaggagattctcaaagtaaaacttatggaaatccatcccctccacgaggttaccaagggcctcaggctcaaaggaagtgaggcctggatcacaaatcttcgtgtaggcctcaaagtccccattgttgatggcttcaatcagctgttctgtaatcttaatgatctcctgttttcgcatggctgaggagcagagagaaggctggggctgcatgcctgcagagggggctgttctgtcccgggagctccgtccttcaggcaccgagctgccattcccagtgcggagcggggcagctttgaggtcctcatcttctgtggtggtgttgcagctctctgtggagcccttgatcccatctgtagcgttgtgtaccacagtggtttgtggctccatggccgtctgcaagggcgcgggctcttgggctgggcttacgagactgtttttgttgttgctctgtggcttgacaccgccatccgacttcttgttcaataggcttttggcagctgagaagttcctggagacaagcatggtcgtgaggatggcacccttcagttttctccgggcattgaacttgcgcaaacactccacagtctcctgacgatgcatcatggatgccaccgtgga

SEQ ID NO: 68297 - DNA, 966 bp, Homo sapiens
tgaggtgcaattcgcctgagtctctgacttccctcctggtgctgctgaccacggccaacaacctttttgttttgattcctgcgtattccaagaaccgggcctatgccatcttcttcatagtcttcactgtgataggaagcctgtttctgatgaacctgctgacagccatcatctacagtcagttccggggctacctgatgaaatctctccagacctcgctgtttcggaggcggctgggaacccgggctgcctttgaagtcctatcctccatggtgggggagggaggagccttccctcaggcagttggggtgaagccccagaacttgctgcaggtgcttcagaaggtccagctggacagctcccacaaacaggccatgatggagaaggtgcgttcctatggcagtgttctgctctcagctgaggagtttcagaagctcttcaacgagcttgacagaagtgtggttaaagagcacccgccgaggcccgagtaccagtctccgtttctgcagagcgcccagttcctcttcggccactactactttgactacctggggaacctcatcgccctggcaaacctggtgtccatttgcgtgttcctggtgctggatgcagatgtgctgcctgctgagcgtgatgacttcatcctggggattctcaactgcgtcttcattgtgtactacctgttggagatgctgctcaaggtctttgccctgggcctgcgagggtacctgtcctaccccagcaacgtgtttgacgggctcctcaccgttgtcctgctggttttggagatctcaactctggctgtgtaccgattgccacacccaggctggaggccggagatggtgggcctgctgtcgctgtgggacatgacccgcatgctgaacatgctcatcgtgttccgcttcctgcgtatcatccccagcatgaagccgatggccgtggtggccagtaccgtcctgggcctgg

SEQ ID NO: 68298 - DNA, 1035 bp, Homo sapiens
  misc_feature (1)...(1035): n = a,t,c or g
gagtctgtagaagaggcgacaccagggcttccaaatgaacaaccgaaaggaagatatggaaatcacgtcccactaccggcacctgctgcgggagctcaacgagcagaggcagcacggcgtcctgtgcgacgtctgcgtggtcgtggagggcaaggtcttcaaggcgcacaagaacgtcctgctgggcagcagccgctacttcaagacgctctactgccaggtgcagaagacgtcggagcaggccacggtcacgcgtccgggacatcgtcacggcccagggcttcaaggccatcatcgacttcatgtactcagcgcacctggcgctcaccagcaggaacgtcatcgaggtgatgtcagccgccagcttcctgcagatgacggacatcgtgcaagcctgccacgacttcatcaaggcggcgctggacatcagcatcaagtcggacgcctcagatgagcttgcggagttcgagatcggcgcctcgtccagcagcagcacggaagctctcatctcggccgtgatggccgggaggagcatctccccgtggctggcacggcgaacgagtcctgccaattcttccggagactcggccatcgccagctgtcacgacggagggagcagctacgggaaagaggatcaggagcccaaggccgatggccctgatgatgtttcttcacagcctctatggcctggagacgtgggctacgggcctctgcgcatcaaggaagagcaggtttcaccgtctcagtacggagggagcgagctgccttctgccaaggacggtgcagtacagaactctttctcagagcagagtgctggtgatgcctggcagcccacgggccgaaggaagaatcggaaaaacaaagagaccgtccggcacatcacacagcaggtggaagatgacagccgggccagctccccggtgccgtccttcctgccgacgtcggggtgccgttcagcagccgagactcanatgcggacctgtccgtcaccgaagccagcagctccgacagccgaggagagaaggccgagctctt

SEQ ID NO: 68299 - DNA, 443 bp, Homo sapiens
accgttccggaattcccgggacagctggtgtcctgtgtggcagagacagtggtgttggcggccgtgctatggcacatcagcgtgctggtgccctgcttcctgaccttccccaagcagtgctcaagagaatggtggtcgtatggagcacagggaaggagtccctgcgggtgctggctttcctggtcctcagcagagtctgccggcacaagaaggacactttccttggccccatcctcaagcaaatgtacatcatgtatgtgaggaactgcaagttcacctcgcctggtgccctccccttcatcagttccatgcagcggaccctgacggagctgctggccttggagccgggtgtggcctaccagcacgccttcctctacatccgccagctcgccatacacctgcacaacgccatgaccacccgcaagaaggaaacgtctgtgtac

SEQ ID NO: 68300 - DNA, 1712 bp, Homo sapiens
tcgaccagcaactgccacggactgctgggtcagttcctgaatcaggatgccagactcacagaagaccctgcagttgctggaaaggccctcgctgttggcaatgtagaaacccaggtggtgtcgctggaagggcgccggctttttgtagaggtggatgaggatgacaaaggctatggagccctggatggtgacggtgacattggcgttggcagacacggacacctccagcccccagctccccaccaccacactctggttgcaggggagcaccagtctgtccccaccatccaagatgactctgctcggtgtgatctcgagataagatctctctggcttgttgatgaggatggtgatagtgcgcaagtaagtgcgctgtttcttgtggccatttggaggggcgggtgccccaattaactctccgttcactgtgacaccagagtccctgtgatcagagaccagcctgaggatgtccccgggctgcccatcaatgttgaagcacacggtgagtctgctcagggggaaatccacaacaaagtggggatcaccatccactgatgttttagagattttaattcttggctggtatggcttcttgagcaaaggtcctggctgcgtgccagctcctcgcacgctctgcaccaccggttcgggtcccatggcagccgacatgccgtgggcctcctccaggccatccatgcgtgggaccggccccctcagcttcatggaggtgaagggagtgaggaagcggtagctcacagccagggcctgggcccgctgccgcagccgctccttctccggttcatcgtcactttgcagccaggagctcagcagctcctttgtggtgaggtagctccagagacgctcgatgtggttggtgtccccctctccatcgcctccaggcctggggcttcctgtgacatctttccctgccttctgaggccgcacaggcacatctgtcttcaggatgatgaatttcttactgttgctggcggtgacctccacgtgcaggtgatccagcttcctgtccaccagcttccccgcaatgatgatctccgagccgttgaagtagttggggaacagggtcttggtggcctgcaccactgagctggggggataatcgatgcggatgtcagagaggagcggggtcctgatttcatcgtagaacccgatgagctgcgagcctgcgtcctcctcctcgtgcacgcgccgtgtgaggccacagttctccagcgacagtttctccagcagcctgaagtccacgtcgttgccgatgccaatggtgaagatgcagacttggcctcgggcggcctctcgggtgttgttgaggatcttgagggtgtgcgtctccccgaccgtgggcttcccatccgtcaggaagacgatgagggacactctccggtctccaatgccactgtgggccacgtacttgttgaggagcctgatggccctctgcagggccccgttgatgtctgtgcctccagtgggtgacatatggtgaatgtacactttcccatccctgatgctgtctggagtgactgatatcaagtggtccttccatactttgatccggttggaaaatccaatgatactgaaacggtcctggggtcggaggtcatggagaattgtgaagagggcatccttggtctgccggagtttggttcccaccatagaagcactgctgtcaagcacgaataccacattcttgggtaaag

SEQ ID NO: 68301 - DNA, 839 bp, Homo sapiens
gttttttctcgagcaggttagccaatatacctttgctatgtgcagttatagagaaaagaagtctgaaccacaagaattaatgcagcttgaaggctatactgtggattataccgatccccacccaggccttcagggtggttgtatgttctttaatgctgttaaagaaggagatactgtaatctttgccagtgatgatgaacaggacagaatattatgggttcaagccatgtatagggccacaggtcaatcatataaaccagttcctgcaattcaaacccagaaactgaatcctaaaggaggaactctccatgcagatgctcagctttatgcagatcgttttcagaaacatggtatggatgagtttatttctgcaaacccctgcaagcttgatcatgccttcctttttagaatactccagaggcagactttggatcacagactgaatgattcctattcttgcttgggatggtttagccctggccaagtctttgtgttagatgagtactgtgcccgttatggtgtgagaggctgtcacagacatctctgctaccttgcagaactgatggaacattcagaaaatggtgctgtcattgaccctaccctgctccattacagctttgcattctgtgcctctcgatgtgcacggcaacaggcctgatggaattgggactgtttcagtggaagaaaaagaaagatttgaggagataaaagagagactctcttcccttttagaaaatcagataagccatttcagatactgttttccctttggacgacctgaaggtgctctaaaagctacactttcattacttgaaagggttttaatgaaagatattgcc

SEQ ID NO: 68302 - DNA, 1706 bp, Homo sapiens
gcatttattgaggcgacccaagcgtccgaatgagctgcacgaagctggaagatgacgccaaggacaaccagcacaaggccaacgaggtggagcagatgatccgagacctggaagccagcatcgcccgctacaaggaggaatacgccgtcctgatctcagaggcccaggccatcaaggcagacctggcagctgtcgaggcaaaagtaaaccggagcactgctcttctgaagagcttgtctgctgaacgtgaacgatgggaaaaaacaagtgaaactttcaaaaaccagatgtccaccattgctggggactgtctcttgtcagctgcgttcattgcctacgcgggttactttgaccagcagatgcgtcagaacttgttcactacctggtcccatcacctacagcaagccaacatccagttccgtacagatattgccaggacggaatacctttccaatgctgatgagcgtcttcgctggcaggccagctccttgcctgctgatgacctttgcacagaaaatgccatcatgctgaaacgattcaataggtatccgctgatcattgacccctctggacaggccacagaattcattatgaatgaatataaggatcgtaagatcacacggaccagcttcctggatgacgccttcagaaagaacttagagagtgcactgagattcggtaacccccttctggtccaggatgtggaaagctacgatccagttttgaacccggtgctgaaccgtgaagtgcggcgaacaggggggagagtgctgatcactctcggggaccaggacatagacctgtcgccatcgtttgtcatcttcctgtccacccgggatccaactgtcgagttcccaccagatctctgttcccgggttacttttgtaaacttcacagttacccgtagcagtttacaaagccagtgtctaaatgaagtacttaaagcagaaagacctgatgtggacgagaaacgatctgatcttcttaaacttcaaggggaatttcagctccgtttgcgtcagctggaaaaatctctactacaagctctgaacgaggtgaaagggcgcattttggatgacgacacgatcataaccactctggagaacctgaagagagaggctgcagaggtcaccaggaaagttgaggagacggacattgtcatgcaggaggtggagaccgtgtcccagcagtacctcccgctctccaccgcctgcagcagcatctacttcaccatggagtccctcaagcagatacacttcttgtaccagtactccctccagtttttcctggacatttatcacaacgtcctatacgagaacccgaacctgaagggtgtcaccgaccacacacagcgcctgtccattataacaaaggacctcttccaggtggcgtttaaccgagtggctcgaggcatgctgcatcaggaccacattacctttgccatgctgctggcaagaatcaaactgaagggcaccgtgggggagcccacctacgatgcagaattccagcacttcttgagaggaaatgagattgtcctgagtgctggctccacccccaggatccagggcctgactgtggagcaggcggaggcggtggtgaggctgagctgccttcccgcgtttaaggacttgattgcaaaggttcaggcagacgagcaatttggcatctggctggacagcagctccccggagcagactgtgccctac

SEQ ID NO: 68303 - DNA, 1116 bp, Homo sapiens
tttttttgcggggaggcagcggtgatctttactgagtcagaagggagaccctggggaagtggggcagggcaggggtgggatggtggtggtgagaggccaggcagatgatcttgtctcgggagggaggaggcttctcagcagagatggatccccggcctggaggggagctggcagcaggccaggagggctccgccagagaggccgtgacggtggcggagccggtgaaccgcgcctggctcggcagggttctctctgcgggtgtgcacagcaaagcttcggcccgtggggcccggaggtccgctcagctctacatccaccacgtgcatgtccgtgaagctggtatcagccacgagcaccccaatcaccccatcgaagcccaggctgggggcagccagggcagccgccgccatggtgttggaatttcgcggggcaaaagggcagaagcccacggagcagggccttccgtaagagcaacagtgcaaaggccccagggctgtgggctgcagccaggggtcccctcaagccggaagccatcggggtgtgtggcccatggtgaacacgaaggctccggaggcccccagctgcatccaatctcctgatgtcctcagcgccccacagggccccttcggccacaaacacggcgtggtcccagtgctgtgaggcctccaagagctgccgctctgtggtctggtcacttagagctgagggggaccccaccaggagattggcatggcgcaggatttgtgccccagattcatggattattttgggatgggccacttccacaaccagatcagggcgcctttccccaagggcagcaaggttctggagctgcagggaagggggcacgctccctgccattcgtcctgggtcacgattccagacaaaaacaagttctaggccaagttctggtccctgagccaagaggcgggagacgagggactgtccttgacttgctacctttcactctgtcccccatcgtgccaccagctgcctccagtgtgacgttctcgctcccacgtccgtccctcccgttccccagctcgcatcagcccaggagaagccttcgaggcctggagaggccaagtgcccccaacatgagccccagccacgaaa

SEQ ID NO: 68304 - DNA, 739 bp, Homo sapiens
agcctcagcacctggaaccaggtggtgctgctacagggtcctccaggaactggaaaaacattcctatgtaaagcattagcccacaaattgactattaaactttcaagcaggtattggtatggccaattaattgaaataaatagccctaacctcttttctaaacggttttccgaaattgacaagctgataactaagacgttccagaagattcaggatttgattgattataaagatgctctggcattttcactgattgatgagatagaaagtctcacagccacccataatgaaagccatcgggtgccattggcatggtcaacgctgtcttgacccaaattaatcagattaaaaggcattttaatgtagtgattccagctacttccaacatcaccgtgaagattgacatggcctttgtgggacaggtctgatatccaagcaggtatatcagtctgcgctctgcagcaagccatcttcaaaatttacggttttctgtttggaagaactggtcaagtgccaggtcatataccctcctcagcagctattaaccctccaaaagctggagatgattggcttcattgaaaacaatgtgtcaaaattgagcttccttttgagtgacatttcaaagaagatcgaggcctccatggccagttcctgaggaaactcctttttctggtgcatacactgtgtgtccaggctacaccaggctttctctctggtcgtggacaagcaggttgaagag

SEQ ID NO: 68305 - DNA, 542 bp, Homo sapiens
  misc_feature (1)...(542): n = a,t,c or g
tggctttgagcttcatggcagccagtataaaaaaggattgacatgacctcatagttttatatcgctcacatgatacatatcacttccaaagaagtagcttttctgagcacaaaatactaaaaatcctcaggtgagatttagtaagagggctaagacagcaactggttctctttttcagcaaccacagaagacaactgcaatgggacatgccataccagcgccaactgcctcaccaactcagatggtacagcttcatgcaagtgtgcagcaggattccaaggaaacgggaccatctgcacagcaatcaatgcctgtgagatcagcaatggaggttgctctgccaagggctggactgttaaggaggaaccaccccgggaagggcgagtgttgcacgtggcaaagcagggcttacacggggttgatgggctttgtgttgctggggaanttcaacccgtgttttggagaacctgggtggcttttgacaagattgcggggtgcacacggncagggaccccaccgggttgcctgttactgttttgcca

SEQ ID NO: 68306 - DNA, 833 bp, Homo sapiens
ctataattagaacactaacattggaagtaaaaacgttgtttataagtaattacttgtaaaattttaagtgaaatgtttttcttcaggcatgtcttcaggcttttgaaaagttcacaaataagaaaacctgtcctctctgtagaaagaaccagtatcaaacccgagtgatacacgatggggcccgcctgttcagaatcaagtgtgtgaccaggtgaggacgccaggcccgtttggcgctaagcagacacagatcaggctatgacaactaacttgttttttgaatagtgggattttatctctcttcttggccaccataatttccccagggccttgtacagcacagggcttataacaactactgaagtattggttgacataagagtcatcataaattaagtcatttttccaaatatctgtgtttttagaatcccaagcctactggagaggatgtgttgttagaaagtggtacagaaaacctgaggaaaacagtacctccccacagatgccaagttaagaaaaaaattctttgaaaaaaaggtaggtaaagatcattatgttctccagatatggtctccgtgcgggtggttcacttggggtcaggaaggctaacagaggtggtaaaactttgagacttacttcactttgagggctttttaaaaatgggtgagatgctgctaaaaatcctgtttaactttagttggctttccaacctagatgttcaaatacttctagactttcttttctagttaaatcataaaattaggttaaatcaaagcaacttctgtttggccattttgtgctaattgtttaaataaacttatctcttcagacac

SEQ ID NO: 68307 - DNA, 801 bp, Homo sapiens
  misc_feature (1)...(801): n = a,t,c or g
agacgggctgctccatgaggtgctgaacgggctcctagatcgccctgactgggaggaagctgtgaagatgcctgtgggcatcctcccctgcggctcgggcaacgcgctggccggagcagtgaaccagcacgggggatttgagccagccctgggcctcgacctgttgctcaactgctcactgttgctgtgccggggtggtggccacccactggacctgctctccgtgacgctggcctcgggctcccgctgtttctccttcctgtctgtggcctggggcttcgtgtcagatgtggatatccagagcgagcgcttcagggccttgggcagtgcccgcttcacactgggcacggtgctgggcctcgccacactgcacacctaccgcggacgcctctcctacctccccgccactgtggaacctgcctcgcccacccctgcccatagcctgcctcgtgccaagtcggagctgaccctaaccccagacccagccccgcccatggcccactcacccctgcatcgttctgtgtctgacctgcctcttcccctgccccagcctgccctggcctctcctggctcgccagaacccctgcccatcctgtccctcaacggtgggggcccagagctggctggggactggggtggggctggggatgctccactgtccccggacccacagctgtcttcacctcctggctctcccaaggcagctctacactcacccgtctaaaaaaaggcccccgtaattccccccgacatgnnnccccgctctagaggatcaagcaactacgcggcggctcacgacgc

SEQ ID NO: 68308 - DNA, 1007 bp, Homo sapiens
  misc_feature (1)...(1007): n = a,t,c or g
gcggccgccgccaccctggcagctcaccgtgctgcaccgcgcgtaggnttcggcctcgacaagttcctgggccgcgccgagggtggacctgcgggatctgcaccgcgaccagggccgcaggaagacgcagtggtataagttgaaatccaaaccaggaaagaaggacaaggagcgaggagaaattgaggttgacatccagtttatgagaaacaacatgactgccagcatgtttgacctttctatgaaagacaagtctcggaatccatttggaaagctgaaggacaagatcaaggggaagaataaggacagtgggtcagacaccgcctccgccatcatccctagcacgacaccttcggtcgacagtgatgatgagtctgtggttaaagacaagaaaaagaaatcaaagatcaagaccttactttccaagtcaaatttgcagaagacgcctctttcccagtccatgtctgtcctgccgacttcaaagccagaaaaagtgctgcttcgtcccggagactttcagtcccagtgggattgaagatgacaatgaggatgagtcctcctcggcctcggatgtcatgtctcacaagagaacagcgagtacggatcttaagcaactgaaccaggtcaactttacccttcccaagaaggaaggactttcctttcttggtggccttcggtctaagaatgatgtcctttcccgctctaatgtctgcatcaatgggaaccatgtttacctggagcagccagaagccaagggtgagatcaaggatagcagcccgtcctcctccccatcccccaagggcttcagaaagaagcatttgttctcttctacagagaacctggcggctgggtcttggaaggagcctgctgaaggaggtgggctgtcttctgacaggcagctctccgaatcttccaccaaggactccttgaagtctatgaccctgccgtcctaccgacctgccccactggtcagtggggacctgcagggaaaacgatggcccctacgc

SEQ ID NO: 68309 - DNA, 828 bp, Homo sapiens
gtcgacccacgcgtccgcagacagaatcttggatttgggttttgaaaaggacatcacagtgatacttaatgctgtaaatgctgaatgccaaaaacgacagaatgtcttgctatcagcgacactcacagaaggtgtaacgcggctagctgatatcagtttgcatgatccagtcagtatttctgtcctggacaagagccatgaccagttgaacccaaaggacaaagcggtccaggaggtctgtcctccaccagctggcgacaagctggacagctttgcaataccagagagtctcaagcagcatgtgactgtggttcccagcaaactgaggcttgtctgcctagcggccttcatccttcagaaatgcaagtttgaggaagaccagaagatggttgtctttttctcaagttgcgagctggtggagttccactacagcctcttcctacagaccctgctgagcagctcaggggcgccggcatcagggcagttgccatctgcctccatgcgattaaaattcctacggctgcatggcggcatggagcaggaggaaagaacagcagtgtttcaggaattttcacattccagaagaggcgtccttctttgcacggatgttgcagctcggggcttagatctccctcaagtcacgtggattgttcagaatacatccaccggattggaagaaccgcccggattggctgccatgggagcagcctgctcattttggctccttcggaggcagaatatgtcaactcgttggcttctcacaaaatcaacgtttctgagattaagatggaagatattttgtgtgttctgacaagagatgattggttt

SEQ ID NO: 68310 - DNA, 930 bp, Homo sapiens
aggaagcgcagggacagagcggtgcagtccgagctttcggaaagggtctttgctgctgcgcccgggcaggggctgccgcggccccaggtcccgcttcgagacgcggcgcggtccaggcgggaggcgactccctaggaagggacccggggcgggaggaggaagtgaggccgcgcggaaggaaggcggcgagccccggggccccgaggccttggccgcgtcacagcacccacatggcctctggagtgggcgcggccttcgaggaactgcctcacgacggcacgtgtgacgagtgcgagcccgacgaggctccgggggccgaggaagtgtgccgagaatgcggcttctgctactgccgccgccatgccgaggcgcacaggcagaagttcctcagtcaccatctggccgaatacgtccacggctcccaggcctggaccccgccagctgacggagagggggcggggaaggaagaagcggaggtcaaggtggagcaggagagggagatagaaagcgaggcaggggaagagagtgagtcggaggaagagagcgagtcagaggaagagagcgagacagaggaagagagtgaggatgagagcgatgaggagagtgaagaagacagcgaggaagaaatggaggatgagcaagaaagcgaggccgaagaagacaaccaagaagaaggggaatccgaggcggagggagaaactgaggcagaaagtgaatttgacccagaaatagaaatggaagcagagagagtggccaagaggaagtgtccggaccatgggcttgatttgagtacctattgccaggaagataggcagctcatctgtgtcctgtgtccagtcattggggctcaccagggccaccaactctccaccctagacgaagcctttgaagaattaagaagcaaagactcaggtggactgaaggccgctt

SEQ ID NO: 68311 - DNA, 604 bp, Homo sapiens
cggacgcgtgggcaagccctggtctggctacctctccaagccctggctgtccacctatccaagccccggcctggctacctctccaagccccaggctgtccacctctccaagccccaactgtctacctctccaagccctggcctggctacctccccaagccctgggctgtccacctctccaagcgccaactatctttctctccaagccctggcctggctacctctccaagccccaggctgtccacctctccaagccccaactgtctacctctccaagccccggcctggctacctctccaagcccctggctacctctccatgcccggcctggctacctctcctcttgcctataggccctgaggggcaattccagcccaagggaatccatggctcctgctgctccaagaaaacctagttcatgttgtggctctgcagagcctggcctggtcttgtcctctgtgatttcacagaccttccgtagccagtcccacctgccctgctctctgctgcatgcgacgagggcctcctgtcagctcctcagagacccttattaatcccagggctcgccatgcactgcctccttcgctggagcctcttaccttcca

SEQ ID NO: 68312 - DNA, 398 bp, Homo sapiens
cgagcgaggaggaggaccgagagatccgaaagctggagcgttgcctcggtttgaacaagcgcaaaaagaaggacggcagcagctccgtgccgctgagctttgcacgcgacggtcttgactatattctgggagccctggagtctgggaaaaatagcggcttgtacgacagcagtggtgaggaggaggaagatgccggacagacactccccgaaagtgacttagagagtgactcccaggacgaaagtgaggaggaggaggagggagacgtagaaaaggaaaagaaggcgcaggaagcagaagcgcagagcgaggacgacgacgaggatacagaagaggaacagggggaagaaaaggaaaagggagcgcaggagaaaaggagggggaagagagtccgtttt

SEQ ID NO: 68313 - DNA, 394 bp, Homo sapiens
tttcgtaggaccctagtccagagacttttcggctgaggtttcggcagttccgctaccaggaggcagctggaccccaggaagctcttagggagctccatgagctctgtcgtcggtggctgaggcccgagttgcacaccaaggagcagatcctggagctgctggtgctggagcagatcctcactatcctgccccgcgagttctacgcctggatccgggagcatggcccagagagtggcaaggccctggccgccatggtggaggacctgacagaaagagcactggaggccaaggcggttccatgccacaggcagggagagcaggaggaaacagcactttgcagaggcgcttgggagccaggcatccagctggggccagtggaggtcaagcctgaatg

SEQ ID NO: 68314 - DNA, 531 bp, Homo sapiens
agaagggtgtcccaaccttgctcatggcagctggcagcttctatgacattctggccatcactggcttcaacacatgcttgggcatagccttttccacaggctctactgtctttaatgtcctcagaggagttttggaggtggtaattggtgtggcaactggatctgttcttggatttttcattcagtactttccaagccgtgaccaggacaaacttgtgtgtaagagaacattccttgtgttggggttgtctgtgctagctgtgttcagcagtgtgcattttggtttccctggatcaggaggactgtgcacgttggtcatggctttccttgcaggcatgggatggaccagcgaaaaggcagaggttgaaaagataattgcagttgcctgggacatttttcagccccttctttttggactaattgggagcagaggtatctatttgcatctctcagaccagaaactgtaggcctttgtgttgccaccgtaggcatttgcagtattgatacgaatttttgactacattttctgaa

SEQ ID NO: 68315 - DNA, 798 bp, Homo sapiens
tctccgggtcgacccacgcgtccgcaacaatagcactatggtgatgacaggcatgcggatccagattgggactcaagcaatagaacgggcccgggggtgagtatcgagatcttcggcagaactatgcagctcaacctgagtcgctcacgctggtttgacttccccttcaccagagaagaagccctgcaggctgataagaagctgaacctcttcattggggcctcggtggatccagcaggtgtcaccatgatagatgctgtaaaaatttatggcaagactaaggagcagtttggctggcctgatgagcccccagaagaattcccttctgcctctgtcagcaacatctgcccttcaaatctgaaccagagcaacggcactggagatagcgactcagctgcccccactacgaccagtggaactgtcctggagaggctggttgtgagttctttagaagccctggaaagctgctttgccgttggcccaatcatcgagaaggagagaaacaagaatgctgctcaggagctggccactttgctgttgtccctgccagcacctgccagtgtccagcagcagtccaagagccttctggccagcctgcacaccagccgctcggcctaccacagccacaaggatcaggccttgctgaacaaagctgtgcagtgtctcaacacatctagcaaagagggcaaggatttggaccctgaggtgttccagaggctagtgatcacagctcgctccattgccatcatgcgccccaacaaccttgaccactttacggagtcaaagctgccccggcgc

SEQ ID NO: 68316 - DNA, 541 bp, Homo sapiens
tttcgtgggccactgtgtgaacacagaaggtgggtttgtgtgcgagcgtgggccgggcatgcgggtgtctgccgaccgccacagctgccaagacactgacgaatgcctagggactccctgtcagcagagatgtaaaaacagcattggcagctacaagtgttcctgtcgaactggcttccaccttcatggcaaccggcactcctgtgtagatacaccccaaggattcctctctgctcacccattttcttggctgcctttgctccccttgatgtaaacgagtgtcggaggccattggagaggcgagtctgtcaccattcctgccacaacaccgggggcagctttctatgcacatgccgacctggcttcaggctccgagctgaccgcgtgtcctgtgaagctttcccgaaagccgagctggccccatttgccatcctgcaaccccggtgacacccgtacaagaggctactgttgcttgctgaggccgcacggcctgccctgtgcccaggacatagacctccttctggggctccagggacatcag

SEQ ID NO: 68317 - DNA, 525 bp, Homo sapiens
  misc_feature (1)...(525): n = a,t,c or g
gggctccttccgctgcatctgtccccatggcttccaggtgcagagtgaccactgcattgatatcgacgagtgctcagaggagcccaacctctgcctctttggcacctgtaccaacagccctgggagcttccagtgcctctgcccacctggctttgtcctctctgacaatgggcaccgttgctttgacacacggcagagtttctgcttcacccgttttgaggctgggaagtgctcggtgcccaaagctttcaacaccaccaagacccgctgctgctgcagtaagaggcctggggagggctggggagacccctgcgaactgtgtccccaggagggcagcgctgcctttcaggagctctgcccctttggccacggggcagtcccaggcccggatgactcccgagaagacgtgaatgagtgtgcagagaaccctggcgtctgcactaacggcgtctgtgnntcaacaccgatggatccttccgctgtgagtgtccctttggctacagcctgggacttcaacctttggca

SEQ ID NO: 68318 - DNA, 661 bp, Homo sapiens
tttcgtctgggacaataatgagagagaaaagatgagcccatgggatatggagccaattccagaaggaactgcctttccagatgaagttggtgctggtgttcctgtctcccaggaagaattgactgctttgctatacaaaccccaggaaggagagtggggggctcattccagagacgaagaatgtgaacgggttattcagggcatcaaccaccttctttccctggattttgccagcccttttgctgttccagtggatctcagtgcctaccccttgtattgtactgtagttgcttatccaactgacctcaataccatcaggcggagacttgaaaatcgcttttacaggagaatatcagcattaatgtgggaggtacgctatattgaacataatgccaggactttcaatgagccagacagtcctatagttaaagcagctaaaattgtaactgatgtcttacttcgatttattggggatcagagctgtactgatatactggatacttataataaaattaaagcagaagaacgaaacagtactgatgcagaggaggatacagaaattgttgatttagattcagacggtcctggtacttcatctggaagaagggtcaaatgccgaggcagaagacagtctttaaagtgtaatcctgatgcttggaaa

SEQ ID NO: 68319 - DNA, 1199 bp, Homo sapiens
ttttttttttttaccataaaaacctttctatatcagctcacccacacctccctccgttcctccctgccctttctcgccctgggtgatcatcagggatgctggagtctggcgccccccccacaccaccagagctgaagccgacattcaaggtggacgtggcgccgtggagagccaagggaaggcccagctcctctccttcgtcccccactctctgtggggctcaggaaacacacgctgaccggaaggcagtggcccaggagaggcaggctagggtgcaggctcacgccattggtgcagtccttctggggcagaaaactcaacacgggctccggcttcccatcattgccaggcccgtccgtgtcccacacagagacagccccgctcgtgctgccactcactaggaactgcccggtcgggtccagatcgaagtagatgcgctgattggtggtcacctctcgacccagggaccacagtgggtaaccagactgccggagatcccagcacaggagctcagcatccttgcgggctcctgagaagaagcggttgccatcgggatgaaagcagaggtgggtgatgcccccttggtgccctcccagcaaggcgagaggggagccatcatcccaggcatacagacccagggagcggccgtaggagccacaggcatagaggggctgggctgggctgaaggctatgcaggagatgatgccgctctggccctgcttttttgctagagagggaaggaacaaagtgggggagggggcaatggctcctggcactaaccaggctaagcagaggtctgtctcccgtcccagcaccaacatgcttggactcaacatcccccccatgctgtctgtcacaagcaggacaaagacctctgatgctccccacatctatcctcccaaaggacctaaatgcccaagccccacttcatccctctcaaatcccagttcttccttggagagatgcaagttgaaggcctacaggaaaacggaatcagctttatcaacaattttctagaaagatttcagagaccaaaagctccacagctgacagggtatgagttcaggaaggaagcagtcctttgaccagctggttggccttgggaaggtttcctacctgctctgagcctgtttgctcctctgccgactgggctgcacctgctcccggggccgtacagaggacgggaattccaccacgct

SEQ ID NO: 68320 - DNA, 440 bp, Homo sapiens
  misc_feature (1)...(440): n = a,t,c or g
tttcgtagtttcctgcttctgtcactacacctcccaccctctccatcacctgctctgctcttacaaggatccgaagaaatggaatcatcgtatcgctgatctacgtaaacaaactgaagaattgtctgaaagaaaatatgacatgaacttatgaattcaacaggtgaagatttacaacttgataaatcaactttgtcagctcgagctgtaaaagccaaaggtccggtgatgatcccatacccttttttccagtctcatgttgaagatttttatgtagaaggccttcccaaaggaannnnnnnnnnnnnnnnnnnnggaaagggggttttccttttaatcccccaggtgggggggaaggggcccacctttgtgggaaatggaacctttggcttctgggtttaaaaaaattttctggcttatccctcccaggccctgggaca

SEQ ID NO: 68321 - DNA, 419 bp, Homo sapiens
cggcacgagcgacgaccatgggctccgtgtccaaccagcagtttgcaggtggctgcgccaaggcggcagaagaggcgcccgaggaggcgccggaggacgcggcccgggcggcggacgagcctcagctgctgcacggtgcgggcatctgtaagtggttcaacgtgcgcatggggttcggcttcctgtccatgaccgcccgcgccggggtcgcgctcgaccccccagtggatgtctttgtgcaccagagtaagctgcacatggaagggttccggagcttgaaggagggtgaggcagtggagttcacctttaagaagtcagccaagggtctggaatccatccgtgtcaccggacctggtggagtattctgtattgggagtgagaggcggccaaaaggaaagagcatgcataagcgcagatca

SEQ ID NO: 68322 - DNA, 835 bp, Homo sapiens
tgaaactgcgcaagctctggcctggtttccctccttggatttctgaccttgagccaaggcttttgcaaagatatgtgggtgctcctcttctgcctcgtcatggccagctgccagtactccctgctaaagagtgttcagcctgaccccgcctcaccaatacacggacacaaccaaatcataacatatagcagaccaatctatttttgtgtgctgtgtggccttattttgcttcttgatacaggggccaaagccaggcaccctcccagttacgttgtgtatggcctgaagctcttctctccagtgtttctacaatcagctagggactacttaatagtatttttatattgcttccctgctatttccctccttgggctcttcccgcaaatcaacactttctgcacttatcttttggagcaaattgacatgctgttttttgggggttctgctgtgtctgggataacctcggctgtttacagtgtggcccggagcgtcttggctgccgccctgctccacgcagtctgcttcagtgcagtgaaggaaccgtggagcatgcaacacatcccggcactgttttcggccttctgtggcctcttggtcgccctttcttaccatctgagccgtcagagcagtgacccatctgtactcatgtccttcatccaatgcaggctgtttcctaaatttttacatcaaaatctggcagagtcagctgctgaccctctccccaagaagatgaaagattcagtgacggatgtcttaaaatgggatctcatcgtctgcgccaggggtggttggcttttcattggcaggcaaggccagcactgtattcctgtcattg

SEQ ID NO: 68323 - DNA, 1972 bp, Homo sapiens
gctgcaggaattcggcacgagcatcatctccctcctccaggaccttgtaagtgtcttccctgccagctctgtgcaggaaacttccatgctggtttccctcctgccaacctctcttaatgctctgagagcctctggtgttgacatagaagaggaaacggagaagaacctggaaaaggtacagactatcattgaacatctgcaggaaaagaggcgagagggcactttgagagtggatacctacactctagtgcagcctgaggcagaagaccatgttgagagctaccgaaccatgcccatttaccctacctacaatgaagtgcacttggatgagaggcccttccttcgccccaatatcatttctggaaaatacgacagcactgctatctatctggatacccacttccggctcctgcgagaagatttcgtcagacctttacgggaaggtattttggaacttctccaaagctttgaagaccagggcctgaggaagagaaagtttgatgacatccgaatctactttgacaccaggattatcacccccatgtgttcatcatcaggcatagtctacaaggtgcagtttgacacaaaaccactgaagtttgttcgctggcagaattccaaacgattgctctatgggtctttggtatgcatgtccaaggacaacttcgagacatttctttttgccaccgtatctaacagggagcaggaagatctctgccgaggaattgtccagctctgcttcaatgagcaaagccaacagctgctagcagaggtccagccctctgactctttcctcatggtagagacaactgcatactttgaggcctacaggcacgtcctggaaggactccaggaggccaggaggaagatgttcccttccagaggaatatcgtggagtgtaactctcatgtgaaggagccaaggtacttgctaatggggggcagatatgactttacccccttaatagagaatccttcagccactggggaatttctaagaaatgtcgagggtttgagacatcccagaattaatgtcttagatcctggccagtggccctcaaaagaagccctgaagctggatgactcccagatggaagccttgcagtttgctctcacaagggaactggctattattcaaggacctcctggaacaggcaaaacctatgtgggtctaaaaattgttcaggccctcctaaccaacgagtctgtttggcaaattagcctccagaagttccccatcttggttgtgtgttatactaatcatgctttggaccagtttctggaaggcatctacaattgtcagaagaccagcattgtgcgggtgggtggaaggagcaacagtgaaatcctgaagcagttcaccctaagggagctgaggaacaagcgggaattccgccgcaacctccccatgcacctccgaagggcctacatgagtatcatgacacagatgaaggagtcagagcaagagcttcatgaaggagccaagaccctggagtgcaccatgcgtggtgtcctacgggaacagtacctgcagaagtacatctcaccccagcactgggaaagtctcatgaatggaccagtgcaggatagtgaatggatttgcttccagcactggaagcattccatgatgctggagtggctaggtcttggtgtcggttctttcacgcaaagtgtttctccagcaggacctgagaatacagcccaggcagaaggggatgaggaggaagaaggggaggaggagagttcgctgatagagatcgcagaggaagctgacctgattcaagcagaccgggtgattgaggaggaagaggtggtgaggccccagcggcggaagaaggaagagagtggagcagaccaggagttggctaaaatgcttctggccatgaggctagaccattgtggcactgggacagcagctggacaggagcaagccacaggagagtggcagacccagcgcaaccagaaaaaaaaaa

SEQ ID NO: 68324 - DNA, 795 bp, Homo sapiens
gcatgcgtaattcgccaccaggttcaacgcggggcccattgacaccactatcatcatgaatgggaggcagatccagtgccttgcacccacgtctaccgaggtcctgaggaggagggtgacatgctggacccagggctggtgatgactggaaccaagtgtggctacaaccatatttgctttgaggggcagtgcaggaacacctccttctttgaaactgaaggctgtgggaagaagtgcaatggccatggggtctgtaacaacaaccagaactgccactgcctgccgggctgggccccgcccttctgcaacacaccgggccacgggggcagtatcgacagtgggcctatgccccctgagagtgtgggtcctgtggtagctggagtgttggtggccatcttggtgctggcggtcctcatgctgatgtactactgctgcagacagaacaacaaactaggccaactcaagccctcagctctcccttccaagctgaggcaacagttcagttgtcccttcagggtttctcagaacagcgggactggtcatgccaacccaactttcaagctgcagacgccccagggcaagcgaaaggtgatcaacactccggaaatcctgcggaagccctcccagcctcctccccggccccctccagattatctgcgtggtgggtccccacctgcaccactgccagctcacctgagcagggctgctaggaactccccagggcccgggtctcaaatagagaggacggagtcgtccaggaggcctcctccaagccggccaattccccccgcaccc

SEQ ID NO: 68325 - DNA, 1276 bp, Homo sapiens; identical to SEQ ID NO: 68000

SEQ ID NO: 68326 - DNA, 540 bp, Homo sapiens
tgtgcgaggaattcgaatcaggtaatggagaggactggcatgaagggggcacaggactgtgaaaacctgagtgattctgtccttccctcatcctctatccctgaaccagggcagacatagatggaatcagagcaggagttggtgttgatgtggtttcaggtccacctatcagagtttgagagatttaggccatgaaccattatgaatatagatgagaacctttgtaattgctgaaggaggtagtagtgcaggcaagtcctgtgtgcaagacctgctgctcccagttagtacggacccctgtgacattcacagaagttcagaatgtctgagatgctctgcaggctaccttatctccgtctgcagctacacctccagtgatcacaatcagtgctacgctggcacagccagcctggccctgctctggattggaggcatcctcaagggctgcttgctgtggaagcagtttcgctggaccgagaggagccactggaattttgggtactgggccttatggtcacccgggaatgggaatggctgctg

SEQ ID NO: 68327 - DNA, 807 bp, Homo sapiens
  misc_feature (1)...(807): n = a,t,c or g
cttctttacgccttgcgtggcacgagcgtttaatttccctgatcaagcaacagtaaaaaaagctgcctatagcttgcctcgggttggaggagggaccagctgtggtctgccacaagccaggaggatatcattggccactcctcgacagctttataaatttccaatatgactcagcgctggcaaagaagggaaatttcaaacttcgaatatttgatgttccttaatactattgcaggacggacatataatgatctgaaccaatatccagtgtttccgtgggtgttaaccaactatgaatcagaagagttggacctgactcttccaggaaacttcagggatctatcaaagccaattggtgctttgaaccccaagagagctgtgttttatgcagagcgttatgagacatgggaagatgatcaaagcccaccctaccattataatacccattattcaacagcaacatctactttatcctggcttgttcgaattgtgagtatcttcattgagttagcttgcctttggtaccttaaaattttaacataagtaaattaaataaaaatcaaatcagttgtaatttgattaacaaagattagagacgagtgaagtagaaattaaagatttcaaagtagcaaaatatgaattttttttattgagttgtctcatttgcaaaattggattaggaagatagttatctgttgctaggtattatgagcttaaaccaaaccagttgtccagttataaaggagccaaaattgagtacataccnnnnnnnnnnnnnnnnnaaggaaaggggtctttccttttccc

SEQ ID NO: 68328 - DNA, 589 bp, Homo sapiens
ccatcattacgcctagcttggcacgaggatctacgacatctacgccatgttcctctgtcactggcacaagcaccaggtcaaagggcatggaggggacgacggagcggccagagccccgggcagcacgtgggccatagcgcgtggctacctgcacaaggagttcctcatggtgctccaccatgccgccatggtgctggtgtgcttcccactctcagtggtgtggcgacagggtaagggagacttctttctgggttgcatgttgatggcagaggtcagcacgcccttcgtctgccttggcaagatcctcatccagtacaagcagcagcacacactgctgcacaaggtgaacggggccctgatgctgctcagcttcctctgctgccgggtgctgctctttccctacctgtactgggcctacgggcgccatgccggcctgcccctgctggccgtgcccctggccatccctgcccacgtcaacctgggcgctgcgctgctcctggcccctcaactctactgggtcttcctcatatgccggggggcctgccgcctattttggccccgctcccggacgcccacggactggcaaggc

SEQ ID NO: 68329 - DNA, 2333 bp, Homo sapiens
  misc_feature (1)...(2333): n = a,t,c or g
gcaccaccattatcgcctagcttggcacgaggaaccctttaaatgtgaagtatgtttcaggacttttgcccagttgaattcactgtaccagcatattaaagtccacacaggggagcgtccctactgctgtgaccagtgcggcaagcagttcacccagctcaacgccctccagcgccaccgccgcatccacacaggggagaggccattcatgtgcaatgcgtgcggacggacattcaccgacaagtccactcttcggcggcacacctcaatacacgataagaatactccatggaagtctttccttgtcattgtagatggctcgcccaagaacgatgacggacacaagactgaacagcctgacgaagagtatgtgtcatccaagctttcggataaattgctgtcttttgcagaaaatggccatttccacaacctggctgcagtccaagacactgtacctaccatgcaggagaacagttctgctgacacagcctgcaaggagnatgactccgtggtgtcccaggacaccctcctggccaccaccatcagtgagcttagcgagctgaccccacagacagactcgatgcccacacagcttcactctttgagcaacatggaataagagcttcaagcagttcccatcctgttagtctgcgtgtgtggtagctgaactcaagatgatgtggggctaagaaaaataattgtccatgtgcaaagatgtgggcaagaatggcctctgcagattttcctgaacttctgctaacttgcacggctttatcacagcatttttaaagctttccctcaaaaatcctgatctgcatgatctcagctactttattgacaaaaaggcagtgaacataacctcacttaattctggtgtagggtgtatgtgctaatcgttctaattcttgattacctagtttatagataactgctggtcttaattgcagagtacagagaactgaaccagctcctgatattgtagttagcagtcttcctggcttctcactctgccttatatttccatgtgggtttacttctctcataactactttcaaggtatttttcttccaagctgaaataaaactggggccacatattttcagtcatttcttccctgttgaattgaagcaaatcagattttctgtggggaccctcaaatgcaactgaagaaatagattgttgcattcattcctccccaccccccatttgtaggcagtaaacaaagtatgactgacagattgaacacctgcaaaactgctagcgtaatctcagcacatacgcagctaggaagtttgtcataaaatcaacttagaaatgagatgaggctgttcagtttgtcttaaaaaaatcagattaggtaaaagctgtcctaccaaagagtctagcaaaacaatatagtatttttttgcagaggcatgaaaaattaagatgctttagagtacttgaaagttgtgtagtcattttatttgcaaaatgaggtgactgtggcaaattatagaacacagagtattattacttttgccaggtttttctgacttgatttctgtaatttccagaaacccagacttctcatttccacacctagagatggaaacaggcaagtaactgacatgtctatttccttgggagcatgtgagaacatagcagtagggaccaaaagtctcagcacacttacctccgattatgccttaaagagttgattgtgaagaaccagtaactttgtcccaaatgcttctttggctgtttcatgcaggacttaattattgcttttaaaaattcacaatgaaaagacgattctgctgtatttgttaaacgttgacatttggttctagggccttgagtatgtgccacgtgcttgtgaaatgctatgattcacatgtaacatttaaacattaatttaaaaagggaaccttggagaattcttttgttcactagttccttttttctctacatttttaatttattaaacttgctgtgaaaacactttgattttctaagaggaaggtactttaagttccagaatgaacatgtagctgcactatgccagaaattaatgagggaagactttcttcctaagtgcttatgttttaacttatgttagtgaaaccactacaaggtgtttcaggcgctgataacatgcttcacacctgcccttggaggtcacagtactaatttacttcaaatttagttatgacagtgtcactgtatcctagttatgtttacagcacaaataaataatgactgtcatacatccagaggagaccgaacctgcccagctgatgtactgttttatggaataaagtcacttgatcagaaggaattgaaaaaaaaaa

SEQ ID NO: 68330 - DNA, 513 bp, Homo sapiens
ggcacgagccccgccccggcctcctttccccttcacgaagccggctctggggcgcgctcacccctgtgaggaggccggaggtcggactcaggaggctccttctccactcccggaagatcatgtaccagcccagccggggtgcggcccggcgtctcggcccttgcctgcgcgcctaccaggctcgaccccaggaccagctttatccagggactctaccattcccacccctttggccccactccacgacaaccacttccccatcttctcctctattctggtctcccctgcccccacgccttcccacccagcgtcttccccaggttcccccactacctctccctcagatccaggccctcagctcagcatgggtggttctccctccaggaaagggggaggagggaccaggacctgagttgcatagcggctgcctggatgggcttagaagcctttttgagggacctccctgcccctatcctggggcttggatacctttccaagtccctggaactgccc

SEQ ID NO: 68331 - DNA, 428 bp, Homo sapiens
cggacgcgtccgcccacgcgtccgcccacgcgtccgctagaaatttctgtggaactccatttgactttctatctgtgaaatccaaactgtctctgaagaaataagaaaaatagtgttttgacttttaggagacaactatgtttattattttgccttgcaaattaatgtctaaatttgtacaagcacctatctacagatttttccaggtaaaccatcatgttttatgtgtaaaggtagattgatgtgcatttactttatactttggtacttaggccattacacatctttgcactggaattggtgcagatatataagtgatcctaatgttgatgctgcccagaccccaggaatgcagaggtgagcatgacacacacagtccctgccctgatggagctcatagactagtgaaggaatagggctctatgacc

SEQ ID NO: 68332 - DNA, 401 bp, Homo sapiens
  misc_feature (1)...(401): n = a,t,c or g
actgtgagcacctgtgtgcagacaaaccagaaaacaagaagatatggataaattgctggacatatacaacctcccaagatggaaccaggaagatactaattccatgaacagaccaacagtgagctccaaaaatgaatcagcaataaaatcagcaataaatagcctacaaacaaaagacagctcaggaaaagacagattcacagtcatattctaccagatgtgcaacaaagagctggtactattcctactaaaacttttgnnnnnnnnnnnnnngggggggccgttttaaaggatccaagttttacttccgcgggcttgcaaggaaaaagtttttttatggggcccccaaaatcaatttcctgggccggggtttaacaacgcggggacgggaaaaacccggg

SEQ ID NO: 68333 - DNA, 484 bp, Homo sapiens
tgtttccatgcgatatcaaatttgttttttaatcctgttgcatttacataggtgagggcctgaagttcttgtgcttccatgaaggcagatgatactaccaagtcagcttgttcatttgccttagttaaaggccctggtaaattagtatgtgctcggatatgagcaatataaaatgggaaatttcttttgcttacagtttgttgtaacaatttaagcagctgatttaactgatcatccatactatatttgattgattagggctgtctcaacatcctttgtagcctgtactaaatatgcagaatctgaaacaatgttaataggctgattaaaatcttgtaacactgaaatgacagcaaccaattctgctcttggagctgagtgatattgagtttcaatgacttgttcttttggcccagtgtaagccactattccgttgctggaaccatcagtaaacaccgtcagagcaaaaaaaataaaaaaaaaa

SEQ ID NO: 68334 - DNA, 644 bp, Homo sapiens
ctggagcttgagtagctgacattaaatactcatgttgtctttggttatagatttaatctccctgactctgtttatttttcgtttttgtctttcatcatgagtatgtggtcctaaagcagtgaatctcaaactatgtttctaaagcatctgaacctgctgggaaatgaaaagttacccactatttaatataaatatacatgcatatacacatacacatacaaatgcatatacaaatacatatgcaaatacatgcacaagtgcatatacatgagcatgtatccacgcatatcatatacatgtacacatacacatacatacatatacacatatagacatatgcatatacatagaccaaaggtatagctgttttggctgaagctccggtctcactcactcaactcacactcaccctctccctcgtctggccttcatagtgacacctaagcaccctcacaaaaagcctaggctctgcccaactccactttaaaaccactgagctttgattcagtcaaaagcttgtcctcaccaaccagcttgccagtgaatctgaaaatgtggacctttgcgtgagtcagtgctttctgacatcaaaatctcttgaaggaaagaggatcgttcccctattttaaacattgaatttggca

SEQ ID NO: 68335 - DNA, 390 bp, Homo sapiens
agaagtagggcaattttcttgagagaaagcacttacataattgtactatttactttttccatggagcctaattttgacttgaaagaatgacagactgttgagagagatggggagaggttaaggagggggcccaagtgaacaatatcaggaatgaaagagggggaatattactacagatcttacagacattaaaatgatgataagggaatatcgtgaacaattccatgcccctaaatttgatgacttaagagaaattgatcaactccttcaaagacacaaactaaaactcactcaagaaaaaatatgtaacctgaatagtcctatatctattaaagacatcgaattccagctgggtgtggggcatgtggttatttgtccagctacttggga

SEQ ID NO: 68336 - DNA, 1392 bp, Homo sapiens; identical to SEQ ID NO: 67939
  misc_feature (1)...(1392): n = a,t,c or g

SEQ ID NO: 68337 - DNA, 364 bp, Homo sapiens
ctggaacgtaattgcggcgaaaaagtgacgctgaagggatactggaaaatgctttctggcaaattgcgctcaatgaggatggttctctgcaactggtagataaagacagcggtgtgcgctatgaccgggtattgcaaattgaagaaagctctgatgatggtgatgaatatgactattcacccgcaaaagaagagtgggtaattaccgcagcgaacgcgaaaccgcaatgcgatattattcatgaagcctggcagagcagggctgttatccgctatgacatggcagtgccgctcaatttgtcagaacgcagcgcacggcagtccactggcacagtaggggaggtgttggttgtcgctcttactga

SEQ ID NO: 68338 - DNA, 455 bp, Homo sapiens
actcattcaatgtccgtacccgtacaacggcgagactggcataaccctggcgctacccaaccgattctgcttggaccagaaaactactggggcaactacccgaaattcttcgtctctatgatgaaggccttctttggtgataaagcgacggcggaaaatagctggggctttgactggttgccgaagtgggataaaggctacgacgtcctgcaatacttcgagatgatgaaagagggcaaggtcaatggctatatctgccagggctttaaccctgttgcctcattcccgaacaaaaacaaagtgatcggttgtctgtcgaaactgaagttcctcgtcaccatcgacccactgaacactgaaacctctaacttctggcagaaccacggtgagctgaacgaagttgactcgtcgaagatccagaccgaagtgttccgtctggcatcgacctgcttcgg

SEQ ID NO: 68339 - DNA, 415 bp, Homo sapiens
cgccgacatcgtactgactgctggagacctggcgttacccggcttaaaaacggtgtaaataagctgattcaaggcatttacgggagaaaaaatcggctcaaacatgaagaaatgaaatgactgagtcagccgagaagaatttccccgcttattcgcaccttccctaacagagctgtcagcgatgcggcgaagcttctggctttctcctgcgggatcgttgagaccactcgcatctcgcataacgactgcgtttgcgaatgagcctgtgccccagaaagataaagccgtcattaacatgggggattttaagtttatccatgttcaacctgagtttcagactgccttcgagcacacccccgcacttcctctctgatggttccacctgggctttggtggccttgacgatgaggacaag

SEQ ID NO: 68340 - DNA, 433 bp, Homo sapiens
acgaattcgaggtccgtacccggagatctttaataaggtaaacgatgatcgttgccccgcgattggctgaaatcaacgcactcaaagcacagggcgatgccgtctggccggtgctgtcttatgccgatatcaaagcaggtcatgttactgcagagcagcgcgaacagattaaacgtcgcggttgtgcggtgataaaaggccatttcccccgcgaacaagcgctaggctgggatcagtcgatgctggactatctggaccgcaaccgctttgacgaggtctacaaaggccccggcgataatttcttcgggacgctcagcgcttcacgtcccgagatttaccccatctactggtcgcaggcgcaaatgcaggcccgccagagtgaagaaatggcgaatgcgcagccgtttcttattcgtctgggggcatttgaaag

SEQ ID NO: 68341 - DNA, 364 bp, Homo sapiens
accaaccggaatggtgtcaccctgataccacggttttttaaagcgtttctgtttccattcgcgggtaggcatgttgccggaacgttcttccgccaggtcgataccggtgtaatgaccataaccgaatttacccatccattcggagaggcgatcgatccccatatcgtaggccacctgatagaagaaggtatccgcagattcttccagcgatcttgtgacattcagacgcccgtggccccattttttccagtcacgataacgtttttccgaacctggcagttgccaccagccctgggtcaaacagcgtcgtattgcgcgtgatcaccccggcgctcaatgccgaaaccgccacatagggtgtaac

SEQ ID NO: 68342 - DNA, 665 bp, Homo sapiens
atcttcgctggagcagggcttccagaagcctgctcaggccgttaaccgtgacgttgtgatcggcgaaactatcaccgttggcgaactggcgaacaagatggcggttaaaggctctcaggtcatcaaagcgatgatgaaactgggcgcaatggcaaccatcaaccaggttatcgatcaggaaaccgcacagctggttgctgaagagatgggccataaagttatcctgcgtcgtgaaaacgagctggaagaggcggtaatgagcgaccgtgacacgggtgctgcggctgaaccgcgcgcgccggttgtgaccatcatgggtcacgttgaccacggtaaaacctctctgctggactacattcgttcaacgaaagtggcctctggcgaagcgggcggcattacccagcacattggtgcataccacgttgaaactgaaaacggcatgatcaccttcctggacaccccggggcacgccgcgtttacttcaatgcgtgctcgtggtgcgcaggcaacggacatcgtagtcctggttgttgctgccgacgacggtgtgatgccgcagaccatcgaagcaatccagcacgcgaaagctgcgcagcaaccggagtatagttgcagtgcgcaagatctataacacacaagctgatctccgggtacggacatagaat

SEQ ID NO: 68343 - DNA, 311 bp, Homo sapiens
cacagctccctgtccatcctccagtgtgggctcccctccatcccaggacccctcacagctccctgtccatcacccagtgtgggctcccctccatcccaggacccctcacagctccctgtccatcttccagggggggctcccctccatcccaggacccctcacagctccctgtccatcttccagtgtgggctcccctccatcccaggaccccctcacatctccctgtccatcctccagtgtgggctcccctccatcgcaggacccctcatatctccctgtccatcacccagtgtgggctcccctccatccca

SEQ ID NO: 68344 - DNA, 207 bp, Homo sapiens
ttcaatgtccgtcgccgtagatcgccaggagtgtgacacacgctagtgttcccgagattactcaggttggtgcccaggtggtccccaggtgagtccccaggtgggtccccatgtgagtcaccaggtgagtccccaggtgagtccccaggtgagtccccaggtgggtccccaggtgagtcccctggggggttcccaggtgagtccgca

SEQ ID NO: 68345 - DNA, 392 bp, Homo sapiens
ttaagcagaagaatgtggccaggcagctgaacaaggctccatccagtgccatcctcctatcagaggaagactgtcccgtgctcattcatattctgtgttcagatctggctcaggaactaagccaaggctgtgccaccatccaggttcgcaggacgcgctccagcaggtgcttcacagaggaagtggtctgtccgggcagctcctggagctgtacctcctggttttggagaaagagggcagcctcttgtcaaggcaagaggagtccaaagcagcctttggtgatgaggcagaggcagtagacatgattttgacaaaaagacctcctctgggctgggggcagtggatcatgcttgtgttggcagcgctagggtagtcccagtcgggcagatgta

SEQ ID NO: 68346 - DNA, 584 bp, Homo sapiens
gctggagtcattgcctggtttcaaagagattgtgagcaggggagtaaaagtggattacttgactccagacttccctagtctctcgtatcccaattattataccctaatgactggccgccattgtgaagtccatcagatgatcgggaactacatgtgggaccccaccaccaacaagtcctttgacattggcgtcaacaaagacagcctaatgcctctctggtggaatggatcagaacctctgtgggtcactctgaccaaggccaaaaggaaggtctacatgtactactggccaggctgtgaggttgagattctgggtgtcagacccacctactgcctagaatataaaaatgtcccaacggatatcaattttgccaatgcagtcagcgatgctcttgactccttcaagagtggccgggccgacctggcagccatataccatgagcgcattgacgtggaaggccaccactacgggcctgcatctccgcagaggaaagatgccctcaaggctggtagacactgtcctgaagtacatgaccaagtggatccaggagcggggcctgcaggaccgcctgaacgtcattatt

SEQ ID NO: 68347 - DNA, 1389 bp, Homo sapiens
ttgggtcactgaraccttggggttgatcgctctgaccatgaataagtagattgtattgggccgcagtcctcttacagtatagagggtggtctttacatggtttgccacggtctgccagctgttgctcactgattggctgaaagcctcaatgatatatgcacttgctggaagggttccaggggtacctggctgccaggacaaggtgacactgttcttagtaacatcagtgacctgcggtttggatggtggccctggcaggtcacttaaatcatagcttttactgattgttgctccagactctgtcacatccagcactgcactccaggaagcctctccacttgaacttgtagccacacaagtataagtgccagtatcagaaatccgtaaattcttaatctgcagtgtgccttgctcttgaattgttgctcttggatctctacccggaaaagtaaatccctcctttaaccagctaattacaggaagaggatcaccagtggctttacatttcagtaacgctgtaccatccactgccagcgtttggttggctgggccttgtagaattataggtggaggtctatctgtcaaaacatcagtaacctccagttgagcttttgctaaaatgcttcctgccacagttaaagcctggcagatgtagtaacccgcgtcggaacgttgaatgttggtgattgtgaggtctccagttggtgacactgagcatctactgttgggctgctggggttggtttgggaaaagtaggttctggctgccttctttctgccaaaaaacagctggctgtgggtttcctttagtttcacagggaaatgtcactgttcgaccttgagcaacaatctgatctcttggccgaaccacaaactgtgggggagcaacagggcgagctcggacggtgagtgtagcagaggcttccatttttccaacccgattctcagcaatacacatataggtgccttcatctgtactcatggtctttttaattcttagtgtgtaatcgtctttgatgtcataccttcctcttggcaagtctgcatcatcctttttccacctcacagttggttgaggatctccttggacttgacaacgaaattctacagcttcttcctccagtaccacctggttaattggcctcctgagaaatgtgggtcgttcaaagacagtcagctctgctgggtcactgtccctttctcccaccatattggtaccaacacaagtatacatccctgcatcacttttcctggtattggagatcatcagttttccaccacggatacttattctttcttccttggcatcaattcgaactttggcttttttccagtaaatggagggttctgggtggccccggggagggtggcactccaggattgcaggctc

SEQ ID NO: 68348 - DNA, 939 bp, Homo sapiens
ccaagacctgctttgaaaaggctctggaagggaaccctgaaaaccctgaattcaatactgggtacgcaatcaccgtctatcgcctggataaatttaacacagcatcagggaggaataaggcattttctctgcacgtcctaaaacgagctgtcaggctaaatccagatgatgtatatattagggttctccttgccctgaagcttcaggatgaaggacaggaagctgaaggagaaaagtacattgaagaagctctgaccagtatatcttcacaggcctatgtctttcaatatgcagccaagttttatcgaagaaaagggtctgtggataaagctcttgagctcttaaaaatggccttggagacaacacccacttctgccttcctgcatcaccaaatggggctttgctacagggcacaaatgatccaaatcaaggaagctacaaactggcagcctagaggggcaagatagggaaactgtggacagattggttcaattggctatatgcaaatttgaaaagactataatgttaaagcgaacatttgagatggcctatgttgacctggctgaaacgtatgcagaaataggccaccacagaaaggctgaggaacattttcagaaagggttacgcatgaagatctttgaagatcagctaaagcaagagattcattaccactacggccgtttccaagaacatcatgggaaatctcaagataaagcaattacccattatttaaaaggtttgaaaatagaaaaaatgtcccattccagggaaaaacttctcaatgctttagagaaattggctaaaagatgtattcaccagaatgtacgggttgtggaaagtgtcagcctccttgggcttatccacaaattgaaaggagaagtaagtgatgctttgctgtgctatgagagggctctgaggctggctgctgacctgaaccct

SEQ ID NO: 68349 - DNA, 914 bp, Homo sapiens
  misc_feature (1)...(914): n = a,t,c or g
ggaggcaggcgcgtggtggtggtgaaaagctccgtgtgcaggttgtgcaggtggggcacgagctccagccagaaggccaccttgttggcgcggtagttgtcacgcacgcgtggcttcaggcctatgtgcagatactgcttctccttgctgttgaatttgctccacaccacctcctcgaagcgattgggcttggtgtggatgaacttggtatcctgcggcaccggctggttggggtccccagtcttggcgaagttggtccagtaggtcatgaccacggcactgagcatgacgtcattcttggagaagttacaggggaagaggtcggtggcacccaccatgggcacgccaaagacatagggcagttcatccccgtgcgccgcatctgcccactcaggccggccctccgcctggcagtggtggtagaaggtgtaaaagtagacgggagactggtagtcggcgtgcagcttggcagtggccacagctggtgccacccattggtggtcagtaaagagcgccagcagggttttgcggcgcatttcgccattgtcccggtcggcccagtctgtgtacataaacttgatggtctcccgaagcacatccttgccttccgggtagccatacaggttgtccacaaagttggagacagtgaagtcaaaggcgctggcagacacaccgtcctcgctctctgcagagtcctccacgaacttgaggccctctccctggttgacgccgatgagcatgtcgtagttgaggaattctccctgctgcatgaggatctcatggtcatcggggaccacgtcgccatccaccacggggcccaaaggcgatgtggtaaccgggcaggctgcacgtccttggtccaccaacttcccgggaggctttccgggcgcaganacttcacagcttaacactgt

SEQ ID NO: 68350 - DNA, 788 bp, Homo sapiens
ttttttttattgttaaagttgttctattttattattattgttgttaatcttttactgtctaatttagaaattaaacttcatcataggcatgtatgtatcataaaaaacacagtatatataggattcagtactatctgcagtttcaggcattcactgggggtcttggaacgtatcctgcagataagggtgggctactgcacaaacatctggacgttcattcatgtgccactaaggatcatcacacagtgaaaagcataccacactctggaaaggctctgatcaactttttctggcttctccaagacaatttgaaagcatccaacttggttctttcaaaaaaatccacacacattttccttcacaggttcaatctgatattggtttgctgcatccagcaaagactgaacattgttgctattcacggaaattctagcagtataagcaaattccaccagttgttcaataatatcaggttcaggcatctttgagttctacttcaaaggactttgattcaagcatgttagttgtgaacattaagttaaaaaaatgactggctgcagcaagaacaacacgatgagcaggtatctttctttcctggaccatgaggatcacgtcacacaacgttttctttagatttatgtggcttgtcaagaaggttctgcaatcagtccctcccagcatgatatcaaattggcattgagtataaatccctgagcagattgtagattcaactacagctgggtggtagatttaaatcactgtttccgcatgttattcatgacgcccat

SEQ ID NO: 68351 - DNA, 810 bp, Homo sapiens
cgcccagtggctgcgctgggacaagaattccttaactttggaggcagtgaaacgactaatagcagaaggtaataaagaagaactacgaaaatgttttggggcccgaatggagtttgggacagctggcctccgagctgctatgggacctggaatttctcgtatgaatgacttgaccatcatccagactacacagggattttgcagatacctggaaaaacaattcagtgacttaaagcagaaaggcatcgtgatcagctttgacgcccgagctcatccatccagtgggggtagcagcagaaggtttgcccgacttgctgcaaccacatttatcagtcaggggattcctgtgtacctcttttctgatataacgccaaccccctttgtgcccttcacagtatcacatttgaaactttgtgctggaatcatgataactgcatctcacaatccaaagcaggataatggttataaggtctattgggataatggagctcagatcatttctcctcacgataaagggatttctcaagctattgaagaaaatctagaaccgtggcctcaagcttgggacgattctttaattgatagcagtccacttctccacaatccgagtgcttccatcaataatgactactttgaagaccttaaaaagtactgtttccacaggagcgtgaacagggagacaaaggtgaagttttgtgcacacctctgtccatggggtgggtcatagctttgtgcagtcagctttcaaggcttttgaccttgttcctcctgaggctgttcctgaacagaaagatccggatcctggagttt

SEQ ID NO: 68352 - DNA, 1945 bp, Homo sapiens
gcaattcccgtgtcgagcagaagctgtacgggctccaggctgacattaccatcagcctggacggcgtgcccttcctcatgcatgacaccaccctgcggcgcaccaccaacgtggaggaggagttcccggagctggcccgcaggcctgcctccatgcttaactggaccaccctgcagagactcaacgctggccagtggttcctgaagactgaccccttctggacagccagctccctgtcaccctccgaccacagagaggcccagaaccagtccatctgcagcctggcagagctcctggagctggccaagggcaatgccacactgctgctcaacctgcgtgacccgccccgggagcacccctaccgcagcagttttatcaacgtgactctggaggccgtgctgcactccggcttcccccagcaccaggtcatgtggctgcctagcaggcagaggcccctggtgcggaaggtggctcccggcttccaacagacatcaggctccaaggaggcagtcgccagcctgcggagaggccacatccagcggctgaacctgcgctacactcaggtgtcccgccaggagctcagggactacgcgtcctggaacctgagtgtgaacctctacacagtcaacgcaccgtggctcttctccctgctgtggtgtgcgggggtcccatccgtcacctctgacaactcccacaccctgtcccaggtgccttcccccctctggatcatgcccccggacgagtactgtctcatgtgggtcactgccgacctggtctccttcaccctcatcgtgggcatcttcgtgctccagaagtggcgcctgggtggcatacggagctacaaccctgagcagatcatgctgagtgctgcggtgcgccggaccagccgggacgtcagcatcatgaaggagaagcttattttctcagagatcagcgatggtgtagaggtctccgatgtgctctccgtatgttcagacaacagttatgacacatatgccaacagcaccgccacccctgtgggcccccgagggggtggcagccacaccaagaccctcatagagcggagtgggcgttagctgaagacatgtctgtcccacctgtacctgacacagaagctggggagcctaggagagctggtggaagtgtgtctgaactcggagtgctctgggagcgggctccacagcctccttgtgggctccagccccttgtcagccgcagcctctcttgagggggactccctgtctcctgaggcccagctgggccaggactccatcctttcagatgcccctgcaggcctggggctccttctgggaagtatggggcctagggcttggtccccctcttctgaggccctctcctgtatcccgacctggaagctttgatgggtcatgggccatgccataccccctgtggcaatggagtgtgtggatgctcacctgtgccatctgtcctcctgtctgtgccaggaggcacctgagttctctgctgttatcctgccccaagggcctgggccgagcctctacctgaagcaactctgctcttcctgtcagtctcaaagcacaaggaggttcagcccaggaggaagccagctgcaatgtggagacacgtcctcctccccaacccacctcatgccaccgccaaccccctgccccaggagcgggcctgagccacgtcccctaggagcagctggagatggccaaaagagtgagctcaggactactggatcccatgcccaggtgtccagcagacctcaaggcagaagggtcacctaacccaggagttccacagactgatgtgacctcaggttcccacatcagtggccaccaggcagggcccacctggtagaagtgttctggatatggcccagggtgggtgtgtggctaagtgggcctgaacagagggaaccctagggcccttggccaatgtgattaaagctgccatcttg

SEQ ID NO: 68353 - DNA, 709 bp, Homo sapiens
gttgctttttgaaaatgttactacatggagggaaacaaaactgggtttcttcctgatgcctcttaccaagacaatctccagatgtattatagagataaatgtggaaggtaaaactatgaaagaaatagaagaaaatgcaggagaatatcttcatgatctacaaatggaaaaggagttttttaaatctcaaaggcataaattaaggcagacattaacttatttatatagaatttaagtatgtatatttaacgaagaacatattaaagttaatactcaagagaacaaaataaattatttatagtgcctaatactgatgagggattagtatctagtgtataaaaagaagcctgcaaattaagaagaaaaagatagcaatctcagtttaaaaggtaggcaaagtatatgatcaagcagtttacagaagaggaatcctaaagaaatagctggcatagttagggcttaaactcattaagtgaaatgcaaattccaacaacatgaattaagtaaaaattagaaataggtattatataacaccatgttggcaaaaatgtggaaatttgagactcctcacataggttgtagaactgtagactgctgtagccagtatatgcatactgcatgacccagcagttttattcctgatatgcctcccaaagaacttctcacactgtccatgacatacatgcaatggtgtttgttgcagtattaa

SEQ ID NO: 68354 - DNA, 411 bp, Homo sapiens
ttttttttttttgaggacaaggtctcactctgtcaccccaaggtgggagtgcagtgacgacatcacagctcactggcagcctcaaccctggggttcaagtgatcctctcaccttcagcctccccaagtagttgtgcctcctaggcacacaacactatgccccggcaaatttttttgtattttgtattttttgtagaaacaggatttcgccatgttggccaggctggtctcgaacaccctgggctcaactgatccgcctgcctcggcctcccaaagtgctgggattacaggtgtgagccaccctgctcaaccaggttttattatttaagttagttaaactttggatagattgtataatatatagtttaatgtaatcatgctcatattttttaaataaataaaacactatact

SEQ ID NO: 68355 - DNA, 865 bp, Homo sapiens
gtcgtggaattcgccttccagctgtcttctgtgagtgtctgcctgacagtttcctttggctggcagctaggcactgtgtcttcctgtctctctagggactggttcttgaagggaaacctcctcatcatcatcgtcagtgtgttaatcatcctgcccctcgccctcatgaaacacttgggctacctggggtacaccagtggtctctctctgacctgcatgctgtttttccttgtttcggtcatctacaagaagttccaacttggctgtgctataggccacaatgaaacagcaatggagagtgaagctctcgtgggactccccagccaaggactcaacagcagctgtgaggcccagatgttcacagttgactcacagatgtcctacacagtgcccattatggcttttgcttttgtctgccaccctgaggtgctgcccatctatacggagctctgccggccctccaagcgcaggatgcaggccgtggccaacgtgtccattggggccatgttctgcatgtatgggctcacagcaacctttggatacctcaccttctacagcagtgtgaaggcggagatgctgcacatgtacagccagaaggacccgctcatcctctgtgtgcgcctggccgtgctgctcgcgggtgaccctcactgtgccagtcgtgctgttccctatccgccgggccctgcagcagctgcttttcccaggcaaggccttcagctggccacgacatgtggccatagctctgatcctgcttgttttggtcaatgtccttgtcatctgtgtgccaaccatccgggatatctttggagttatcgggtccacctcagcccccagcctcatcttcatcctccccagctgtatt

SEQ ID NO: 68356 - DNA, 770 bp, Homo sapiens
cccaaccctctcatctactgcacctgctgggacccctggaacttgggaccacggaagctaatcaagacccctcaactaccacgcaagaactccacagggagttccaagctaactcctcttctaccagctccaaaaaatcacaattacctccaaccaacaaaacctgttgtttccccaaaaatgaaaatccattcagcaaggcaagaagagactaataaatcattttatgaagtgatcaacgtgtcacctgggctatcaacttgttcggaatcgggaacagatttctgttcaccttaggggatgagatgtttgatagggaaaaagcggtgggaatcggagatcccggacaaaggcagattttccaggaccaacatcatttctgacctagaagagcaaatctcagagctgacagcaataattgaacaaatgaacagagaccaccagtctgcccagaaattgctctccagtgaaatggatctccgctgtgctgagatgaaacagaactttgaaaacaagaacagggagctcaaagaggcccatgaagcagaactcagtgagttggagaacaactacaaagcagccttgaaggcagagaagttggctgcccaagagaagctagaggagatgggaaaagaatacaagtatttgaagaatatgtttcgtacgtatcaggacagtatttatgatgaaatggaagagaagtggtcaaaacagaaggcgaaatggaagaaggatgagaagttcgagcgagaaaatatcctgctacagca

SEQ ID NO: 68357 - DNA, 2513 bp, Homo sapiens
ttttttttttttaaatttaaaaagatgtcctcactgcacaagtgatctacgggctacaggcaaggatgggagacggaggcttcaacacaactcattgcacttagaaccgttactaaccgaaacaccatttgcttgtcaacaatgtacccttgacagcagggagaaacttctttatagtctctgcttcagacaagatttacagctttctccaaggccagaggccaattgtgaccacaagtcttgtttcttgtccaccagacccaatcctctggcaccttgtaccccccgttcctcagcaatatgctcggcctaggttccagaggcagctggaaggaagcagctatgggctcattcagttctgtttgcccaaatccagaagccctaggaaagtcccgtctgagtcttgactcctgacccttgcagtggctggagtcggtactggtgcacacccccactcccacggtgtgggtagtgctgtgaattggaaaccgcagataccctggaggcctggtagacagctgactgcccagcactgggcagactgatagtccgtaagtctgatggcaatgacgacctagagttctgaggaaaggaggtggaactcagagttcctgtgctggactgagaaactgaatctgaggttggcgagtctgagggtccctgcagggtagggctagcagcactagaagggcagctcctccttggaagattgctgccagtgctgtttccagaatgtggctggctgctaaaataccctggtgtccccgtaaatggggccaacgagtctgtggacacagggtgggcggggctggaataggacgtggaagagagggatgattctgaagaaccgtgagagggggggtttccaggtctcagtgcagtagttcgataactgtatcctggagactgtgtaggatgtcctctgaagggggaggaactctgctgaaggaggctttgtgattctgtccgaggactatcacactgcaggagctggtagctgtatctggaagggctgtaaactgttgctcctttagagagtgctgagcttaatgtctctgggccttctccatctgcagggtctgagtctttctctgtgatgttactctcccatgtgggagagggctctcccttttgggccaccctcacgctgcttcggaggaccttggggatgctccctccttctcggagtcgttctactgatgtgggaaccatccacctactgctgatattctcttgaggtctgcagtgagatgaagaagtgcctctggaatctgatgggcttaccgcctccaaatgggacatagaggaatgagatggggagaattttttgtgaggggaagatggagttcgggctgaggatccctgcacaccatgggcaccagtgtcggaaacggagttactgctgccttgcccagctcctgcagacttgcttttgctctgtgcagagtcacctcccccaccagcagaattttccttagcttcttgtttccgttttcggtactccagcagggatacttttttcctctgtggtgggttctggggggcagatgggactccttcacaggccctttcaccaccaggtgacaaggatccacgagagaggtctttcattaagccatgttcatatctgctggaaaatccttctgcaggggaacaatatcccccatccaaatgtaaaggcttcctatcccccactagaggagatcctcgatacagtccatctgctcgaggcatagcattcaaaggggagtaggcatacatcaagttgaactctgtccgaaatgcctggtctgagtttctcacgagggtctgatgtccatctccacttctgcttgggaaaccagtctcagaagtgggtccgagggagggatgaggagccaggtcagaatgactgagttgagtagggaaggtctatcagcacagctgttagtgttggagtcaaggtatcctacttttgccaaatccaggtcttttcggtgacaaagctcaaactgtagaggagtgttgcagcgactagcagtagtaagagatgttgactggtgaaaacatgaggctgtatccatttcgacactcctcttctcctgggtgagatgagccaggtgtggccagctggggactctttgagcctgaattgggagggggtggtgtgactggagacagaggccgaagtaacttggtgacattctgctccatcagatagcgagacttccatttctttaatgggctcaacaagtctgcattgtctttgcagatactagaagagctactaatctcattgctttggtataggtgctgagttctagtctcttggggtacagatgatgtttgagtcatcccttcttctaaggcttgttttatccagcgcttcttacaggagctgaatgtgccatcaggcagaaggggccttcgacgtctctcagggataaagggtgagccaaagcgaatggagggttttggggtgtgcaataaccgggaattgttagactggtaactgtttaaggcggtgcactcaa

SEQ ID NO: 68358 - DNA, 371 bp, Homo sapiens
ggaagataggcttgcaaggttttaactgtttgattaggtagaaagagccattctattactgatacagacttgtctaagcactggcccaggagtcctgttggagaatgaggggtatgaagaataagcaaaggcttttgcggctacagccatgaggcatgtctctgctgaagcatctgttctacaagttgcaactcagcttctgcctctttgatcaattgctgcggggaaatctaatgaagaatctccttgcagggtttgataaagatgtttgagtcgataagttgcaatacctagcattgcgcacagccaatgaatatcccctaacaactgttgaaaatcatttaaaatctgtaacctgtctttatggagag

SEQ ID NO: 68359 - DNA, 359 bp, Homo sapiens
cccggcactatttggtgaaaagactcttcttttctccattgagtagtcttggtacttttatggaaaatcagttgacagaagacgtatgggtttatttctggaatctcaattctattccgttgatttctatgactttccttgtgccagtaccgcgctgtagtaattaccatggctttgtagtaagttttgaaattaggaaatgtcagttttcttacattctttttcagtattgttttggccattctgggcccttgttatcttctgcattttagagttcatgtgctttcattgggcccatctagatatctagcatagtctccttattttaatgattagtcaacttaattatatctgcaaag

SEQ ID NO: 68360 - DNA, 607 bp, Homo sapiens
aaaggaaagagtaactcttcctgcactagtggtcactgtaacccattgaactactaattaccaatccccttgatccctgctggaaaacaggagagtatgtaactctaggaatcgatggaactggactggatccctgagtaaatattttagtccaaggggaggtccacaagcgatcttccaaaccagtgtttcagaccttttatgatgagctgaatctgccagcaccagagcttccacaaaaaaggacaaagaacttgtttctccagttagcagaatatgtagctcattccctcaatgttacttcctgttatgtatgtgagggaaccactatgggagactgatggccttgggaaacccaagaattagtgcctactgatccagttcctgacataattccagtccagaaggcccaaactaacaacttttgggtcttgaaaacctctattaatggacaatactgcatacctagaaaaggaaaagacttcaccatccctgtaggaaggctcaattgtctaggacagaagctgtataaaagcataacagggacacagggacagtcacctggtgggggtctaaaccatactgaaaataatcccttcagtaaatt

SEQ ID NO: 68361 - DNA, 379 bp, Homo sapiens
  misc_feature (1)...(379): n = a,t,c or g
gtgagatcactaatactttatgaaaagtttatggggacaatgccccaaagaaatcagctgtttacaaattgataactcatttttaacaagggatcagatgatatggaaggtaaagccaatggcggcagatcatcaacatcaatttctgaggaaaaaatctcattcctgctctaattgaagaggacctatgattaacaacagaaatgatagccaacaccacagatatctcaactggttcagcttatacaattctgactgaaaaattaaagttgagcaaactttccactagatggatggcaaaaccactgcacccagatcagctgcagacaagagcaaaactttcaatgaaatgttaaataagtgggatcaagaccctgan

SEQ ID NO: 68362 - DNA, 337 bp, Homo sapiens
tttgggtctggttttttatctattgaccccatcacatttttgggtcgcatgctatctcttctcattcagaagctgttctatttccgccttaatgctctgctcgaaggagtcgttgctgctcgctctgaccgggaaggcagaaccctagtcctcactggatctcacctggctgccagggccaccacctgagccaggtacaagttttggggggacacacggaagtcggggcactgccgtgagatagttctggcttacatctactgccactgcctgcagccctggaaggctgggctgcgcctggctggcccctgccagccccgggctgtgcggctccact

SEQ ID NO: 68363 - DNA, 340 bp, Homo sapiens
gcaatgcaaccacctctggtacagccgctgcagttggaattaccacctagttaagcttacgttaagcttaagtcatcacctggctaatccactgtcattctgcaagatccatctgtcttctgcataggccaaataggagagttgaatggggatgtggtaggaatcaccatccctgcttccttgaagtcctctgcaatccctccagaaatgcagcaggtccccttcattctgtatcatgtccagcaagtgctctgtggagcgacatgaacttccatcattcatttcactctgcaacagtcattctttataaatggacatttacaaggtttttctgatctgc

SEQ ID NO: 68364 - DNA, 1130 bp, Homo sapiens
gtcaaacaagaacccaggtttgaggaggaagtcattattgggtcctggttctgggcagaaaaagaggccagtttggagggtggagcttcagcaatctgtgaatctgagccaggaactgaggagggggccattggcggatccgcgtactgggctgaggaaaagtccagtttgggggctgtggccagagaagaggccaagccggagtctgaagaagaggccatatttgggtcctggttctgggacagagatgaggcctgctttgacctaaatccctgtcctgtgtacaaggtcagtgataggttcagagatgcagctgaggagcttaatgcatcctccaggccccaaacctgggacgaggtcactgttgaattcaaacctggtctttttcatggggttggcttccgatccacaagcccctttggaattcccgaagaggcttctgaaatgcttgaggcaaagcccaagaacctggaacttagcccagaaggagaagagcaggaatctttgcttcagcctgatcagcctagtcctgagttcacatttcagtatgatccttcctaccggtcagtccgggaaattcgagagcatcttagggccagggagagtgcagagtctgagagttggtcctgcagctgcatacaatgtgagctgaaaattggttctgaagagtttgaagaattccttttattaatggacaaaattcgggatccttttattcatgaaatatctaaaattgcaatgggtatgagaagtgcttctcaatttacccgagatttcattcgagattcaggtgttgtctcacttattgaaaccttgcttaattatccatcctctagagttaggacaagttttttggaaaatatgattcacatggctccaccttatccaaatctaaacatgattgagacattcatatgtcaagtgtgtgaggaaacccttgcacatagtgtggattcccttgagcagctgactgggaataagggatgctttagacacctcactatgactattgactatcacacaactgattgccaactaatatggtccggggtttcctctccttttttaaccacaagcccaatgcggagaaacgaagtttcacgttctgaaaatgctattgaatttgtctg

SEQ ID NO: 68365 - DNA, 374 bp, Homo sapiens
ggagagaaaccttataaatgtaatgaatgtggtaaagcttttattgaaaggtcaaacttggtttaccatcagagaaaccatactggagagaagccatacaaatgtatggaatgtggcaaggcgtttgggcggcggtcttgcctcactaaacaccaacgaattcattctagtgaaaaaccttataaatgtaatgagtgtggcaaatcttacattagtcgctcaggcctcactaaacatcagataaaacatgctggagagaaccttacaactaaactcaatgtggaaaggccgttagatgttgtcctaacctctgggatccccaaataatttatacttactcatatagcttgtatatttgtcctttccctttgaag

SEQ ID NO: 68366 - DNA, 282 bp, Homo sapiens
aagcataatttaacttcttccttccgaggtggatgccttcatttctattgtctgattgctctagctaggaattccagtactatgttaaataacagtgttaaaagtgggcatatttgtcttgttccagatctcagaggaaaggctttcatttttcccgttcggtatgatactacctctgggtctgctgtatatggcttttattgtgttgaggtatattccttctatacccagtttttttgaggttttttaatcatagaatgatgttgaattttatcaaatgct

SEQ ID NO: 68367 - DNA, 364 bp, Homo sapiens
ctagcatagtactcaaagtgctagccagagcaagtgggcgaaggatcgaagcggcaggtgcattggtttggaagaagtcaacttttccctgttcatagatgacatgatcttacatatgaaaacctttaaaaacaggaacataaattagaaaaccttaaagatgccaccagaaagacctgttaaatctaatacatgaattcactgaagttgcaggatatgaaatcaacttataaaaaccagtattggttttatgtactaatagggaactacctggaagaattatcaagaaaactctatttacaatagctatgagaaaaatacttagaaataaatttaagcaaggaggcgaaatatctgtacattg

SEQ ID NO: 68368 - DNA, 290 bp, Homo sapiens
gtacaagcgttttccaaagctatcttctgaattgttatggtttcagaccttagatttaggtctttgacccatcttgtgttgattttttataaggtgagagatgagaatccatttttattcttttacatgtggcttgccaattatcccaggactatagggtgtatagggtgtactttccctaccttgattatgcttactgtgatgaagatcaattggctgttaggtatttggctttatttctgggttccctactctggcccattggtcatgtgcctatgtctgtgccagcg

SEQ ID NO: 68369 - DNA, 356 bp, Homo sapiens
cctacaagcactgctttactacatctcacaattttgataacttgtgttttcattttcatttaattcaaaatattttaaaatttatcctgagatatcgtctttgatctatgtgttatttagaggtgtgttgtttaatcttcatgtattttgggattttccggttttcttactgttaatgatttctgctttaagagcagacattgtgtaatttatattcttttaaatttattttaagatgtgttttatgacctagcttgtggtctgtcttgaatgttctatgtgaacttgagaagaatgtgtattctgctgttgttggatgaagtagtctacagatgttgattgtatacagttgattg

SEQ ID NO: 68370 - DNA, 678 bp, Homo sapiens
tgctgagtttggctgcaagaatggtgaaatcattgatactttacaagacactaatcaggacagtgccccaaaggaatcagcagtttacaaatggatataacctgttttcagaagagacaagattaatttgaagatgaagcagtggcggaccatccatgtcaatttatgagaaaaaaattcattctgttcatgccctaactgaagaggactgacaacagcacaaacaatagccaacatcatagacatctcaactggttcagcttactcaattctgactgaaagttaaagttgagcaaactttccactcaatgagtgtcgaaaccctcatgcccagatcagctgcagacaagagcagaggtttcaatggaaattttaaacaagtgagattaagatcctgaagcatttcttgaaagaattgtaacaggagataaaccatggcttcaccagtacaatactgaagactaagcacaatcaaagcaatggctaccaagaggccgaagtggtcccattaaggcgaaagtggaccagtcaagagcaaaggtcatggcaacagtgttttgggatgccaagacattttgctcgttgactttctggagggccaaagtgcagtaatgtctgtttattatgttttgagaaagttggccaaacctttagtagaaaaatgtccaggagtgtatt

SEQ ID NO: 68371 - DNA, 359 bp, Homo sapiens
ggaaaatgatgatttgaggtttatttgaaatacaacaatgtccaataggaaaacactgcaactttcttcaggtgttgagaaatccaatagagacctctgcttgtctcctcctttggcaagagctccaaggggagagagaggatgggccaccacgatgaatactacaggctgcggggaaggataaccctagtccagaccattcctacaaaagaaatggggaatccgaaaggaaaaggaagaaatctcactagcacatgtcaaagagccaggagaggcacaattcaccaagcagaggaagaaatagtgaccgcagcgggggccggtgcagccgcagtgataacggtcggagccgttacagg

SEQ ID NO: 68372 - DNA, 372 bp, Homo sapiens
  misc_feature (1)...(372): n = a,t,c or g
gagcttgattctatttacattttttaaagcaactctgaatatacacgttcgggaggtaaaaacacataataaaaaaggtctggaaagacacacagaacaattcttctgaacagggtaataaataacaaataaaagcgatttcttacttattactctatataattctgtgtttttaaatttcatgtattaaccagtttattaaaatagctttcagggaaaaacatattataatccaatatatcattaccttggtattatgctctaaatctttactattcagaagtgcatgattaattcgaaaaactatccagtcaaacagggcactatacagagacttagccatggagttcctcactgtcacagcctgaaaan

SEQ ID NO: 68373 - DNA, 383 bp, Homo sapiens
cggcacgaggaaataatttttatcagagcagaactaaatgaaatggaaacggaaatatagactaaaagagattaacaaaatgaaaactttggttttctgaaaagataaaatagataaacctttagctagaccaagagaaaaacagaaaagacccaaaaaaaattagaacaaaaaggagacattacaattgataccacagaaatagaatcattagagactattaggaacaactaacaacaacagattcctggacacatataatcaaccaagatagaatgaggaagaaatataaaacctgtgcagaccaataattagcaatgagattgaatcagtaataaaaagcctcccaacaaagaaaagcccaggatcagatggctttacca

SEQ ID NO: 68374 - DNA, 383 bp, Homo sapiens
  misc_feature (1)...(383): n = a,t,c or g
atgacttcaatacctgacttcatgatttattataaggttatagtgataaagacagtgagctattaccataaagatggatcaatggcccaaaacagactccagaattagacctactcatctgtgtcaactgatttttgaaaaggtgaaagaggtagtttagtgaaagaaaagataatcttttcaagaaataatgctgtaacaattgacatacagatgcaaaaacaacaacagtaacaaagaactgaggtctatacttcacaccatgtaaacaaattaacttgaaatggattagacctaaatgtaatactgaaactcaaaaacacttagaacaggagaaagnttttgtgatcttaggttaggcaaagatttcttaaatacaacac

SEQ ID NO: 68375 - DNA, 384 bp, Homo sapiens
atcagacttgtaaaaatttaaaaagacaaaacattctattaggaaaacaggctgcttcatacttatcagaaggaacacaaattggtacatgccagctgaagggaaatttggtaatatgtaacaaaccgcataggcataaacctttcaacccagcaatcccactattataaatgcaccctgacgttcccaatgataagaaaatatatatgcacaaagatattcattgcagcatcatttataattgcaaaatcctaggaacaacgtaaatgctcatgcacaagagagcagttatatcaactacagtatatcaacataaggaagtaaaagagaatgagaaagtcctctatgaactgataggagcaatttcccacaatatactgtcat

SEQ ID NO: 68376 - DNA, 390 bp, Homo sapiens
ggtgattaatgagattgagcacctcttcttacatttattggcaatttggatagtctgtttcgttacattcaattcaagtcttacctctttttcatttggactatctgtcgtctcattgattagaggaattctttattctggagattacccctttattggatatatgcttttcagataccttctcccactctggggcttgcctgttctgtcttaatggtgtctagtgagagcacaagctcttaatttcagtgaaatccagattattagtcttttcctttacagttagacattttaagtcctgttcaataaatctttgtcctacctcaaagtcatgaagatattctcctatgttgtctgctagacgctttattttttactctttacacatat

SEQ ID NO: 68377 - DNA, 525 bp, Homo sapiens
ggcacgagaactggtgcttaatttaatgccaattcatgatgtaggtttctaagcagcacataaaaggggctttttaggtagcactgagtactttactaaaaatacaaaaattagccaggggggggggtgcacgtctttaatcccagctactcagggcgggggccagggggtggggtagggtgggggctgagacaggagaagcacttgaacccaggaggcggaggttgcagtgagctgagattgtgctactgtactccaacctgggcaacaaacagagtgagacactgtctcaaataaataaataaatagataaataaaataaaataaaataaaaagaactcgaccctttttacaatagctaaaggaaaataaaatacttaagaatatacttaaccaaggaggtgaaagacctctacaaagaaaactacaaaacactgctgaaagaaatcacagatgacacaaacaaaaacacatcccaagctcatggacaggtagaatcaatactgtgaaaatgactatactgcc

SEQ ID NO: 68378 - DNA, 371 bp, Homo sapiens
tcaacaccatgtatcaaccactgatctgaccacttataggacagcaccccaacttcacaagatgttgtctcccagcaggctccataaatgagccttcgataggacatttcatcattccatcaatctagctgcttccaggtaagaacaatgaattctacgatgtgagcgtaataccacagctgtttcactgtaaatgagttccttgatcagtgacaatgctgtgtgtgacaccatggggatgaataaggcagcctatcaaccacatatggtaatgctggcggaagcaacatgcacaggaaagggaagttactctccagtatatgtaattattcccatgaagacaaattcctgccccttccataatgtagtgg

SEQ ID NO: 68379 - DNA, 375 bp, Homo sapiens
aaacttcataatcagtttgtgtctacaaaataacttgctagaatttttattgggattgcagtaatctattattccaagttgggaagaactgacgtcttggtattcaatcttctatctataaacatggaatatctccatctgttctttgatttttttcatcagaattttgtagttttcttcatatggatcttgtacatattttgttacgtttatatctaagtatttcattttttaggtgtgtgctcacaatggtattgtgtttttaatttcaaattccacttgtccattgctgatatataggaaaacattgattttctatattaaccttttatcctgaaatcttgcaatactcacttattagtttcagatttcttg

SEQ ID NO: 68380 - DNA, 447 bp, Homo sapiens
ataggaactcgcgtgactgggaaaacaccgtctgcactgggaaaccacttcctactttgggcttcgaggtcaggacttcgagtcgagcacgaggagagagctaggagcttcactaccctgatgggtatggcgacgcccacaagggttaggacaatcctctgatctgacatggagatataatgttactgctaaatcagacactaacgccaaatgagagaagtgccatcataactgcagcccgagagtttggcgatctctggtatctcaggtcaatgataggatgacaacagaggaatgagaacgattccccacaggccagcaggcagttcccagtgtagaccctcactgggacacagaatcagaacatacagattggtgccgcaaacatttgctaccttgcgtgctagaaggactaacgaaaactaggaagaagcttatgaattattg

SEQ ID NO: 68381 - DNA, 355 bp, Homo sapiens
  misc_feature (1)...(355): n = a,t,c or g
gagagagctaggagcttcaataccctgatggctatattgatgttttacaagggttaggacaatcctctgatcctgacttggaaatataaggttactgctaaatcaaaccctaccgccaaatgaaaaaagtgccttcttacctgcaccccaaaatttggccaacctctggaatctaaggtcattgataggatgacaccgaaggattgaaaccaattcccaacagcccacaagcaattcccaatggaaacccttactgggaccccgaatccgaaccttccgattggtgccggaaacatttgctaccttgcgtgctataaggactaaggaaaactaggaagaagcttatgaattattn

SEQ ID NO: 68382 - DNA, 410 bp, Homo sapiens
gcggccgcagcaggagggggagaagagccggccggtttcccgggcagtgctggcggcctctcatcgatctcgggtctaaggtccggccgggtcatcattcctgccatttccacagcattcgaggtaccacatcaccccctgcctcggtcgtcgctcagtcattccctccgcgccgagtcctggagcggcggagtccctggaggcctgggtttccttaaggggccccaatgcccgcagcccccgacccgcccaggtggaaggaaacaggctgcgggcctgggccaggcggggcctgacagaagtaaaggccgggagggggagcggaagacggccagaaggacccctgcgccctctcctccgcgccgcccgccaggctgccaacccagccaccctgggtgcgacgcggcgcc

SEQ ID NO: 68383 - DNA, 1305 bp, Homo sapiens
gacacagatgaagatgctccccttgtgccagatgatacctcagactctggctacggcactttgatcccaggcacccccacggggtcccgctccccactgagccgtctacgccaaagagcccttcggcgggaccctcgcctcaccttctccaccctggaactccgggacatccctctgcgtccccaccctcccgacccccaagctcctcaacgccgaagcgcccccgaactgccggaaggaatcctaaaaggaggcagtcttccccaggaagacccaccaacctggtctgaggaagaagatggggcctccgagcgagggaatgtggtggtggaaacactccacagggcccggcttcggggccagcttccctcctccccaacccatgctgactctgccggggaaagcccctgggagtcctcaggggaggaggaagaagaggggcctctgttcctgaaagctggccacacatccctgcgcccaatgcgggctgaggacatgctcagagagatccgggaggagctggccagccaaaggattgagggggccgaggagccccgggacagcaggccacggaagctgactcgggcccagctgcagaggatgcgggggccccacatcattcagctggacacccctctgtccgcatcaagaggtatgaggaatgcaagagggacctttggcatgcatctctccccagaggagatctctcccccagtagtgctggtcaccctccggcatctgtgactctacctcaaggaccacatttccccaaaggaaccctggccccaggcaccctgcctcctgctctgtttggggatcaagaactgtaaaatttatgtatcataggtgcacctgagccccacagaaagttgtgcataaaaatgactgccctggctgggcatggctgcctgtaatcccagcactttgggaggccaaggtgggaggatcccttgagcccaggagttccgaggccagcctgggcaacatagggagacccctgttctctataaaaaaaaaattaaaattttttttttttacaaaaagggttaccaagtatcaatacttcattaactcctactcctgctgcaaactccagctcatcaggccttgaataaatgattaccttcagctctggaaacagctaatctgaaaacgcaccttcccaaaactgtcataactatttttacccctttccagaaaaggaattagtgataaaagaagccatgccaactcatacgaataaggaaagacaatacagtttagaaggtacaatcttagtagccctctctagacaatcactgaata

SEQ ID NO: 68384 - DNA, 352 bp, Homo sapiens
ggaagttaagatagtccctgtccactctgagctcctcatgcctctgaatagacaggcaaagaagggagttaccgtgctggcagaggtggttgatcctgactaccaagggttaattgcttctactccacagaactaagaaataatacttctggaatacatgggatctcctagggtgtcttcagtgctacctactaccatgccctgtgattaatttaatggaaaactacaacaacccaattcgggcacagctgccaatggcccaattccttcaggaaggaaagtttgggtcattgccccatataaagaatcaagaccaactgagttgcttgctgaaagctaagggaatacagaa

SEQ ID NO: 68385 - DNA, 1398 bp, Homo sapiens
gcggccgcattcctgcaggggatgactgtgaatggcttcatcaacacagtcatcacctccctcggagcgccgctatgacctgcacagctaccagagcgggctcatcgccagctcctacgacattgccgcctgcctctgcctcaccttcgtcagctacttcgggggctcagggccacaagccgcgctggctgggctgggggcgtgctgcttatgggcacggggtcgctggtgttcgcgctgccccacttcacggctggcccctaatgaggttggaagttggacgcgggtgtcaggacgtgccctgccaacccccggcgcggtgtgtgccggacagcacctcgggcctgtcccgctaccagctggtcttcatgctgggccagttcctgcatggcgtgggtgccacacccctctacacgctgggcgtcacctacctggatgagaacgtcaagtccagctgctcgcccatctacattgccatcttctacacagcggccatcctgggcccagctgccggctacctgattggaggtgccctgctgaatatctacacggaaatgggccgacggacggagctgaccaccgagagcccactgtgggtcggcgcctggtgggtcggcttcctgggctctggggccgctgctttcttcaccgccgttcccatccttggttaccctcggcagctgccaggctcccagcgctacgcggtcatgagagcggcggaaatgcaccagttgaaggacagcagccgtggggaggcgagcaacccggactttgggaaaaccatcagagacctgcctctctccatctggctcctgctgaagaaccccacgttcatcctgctctgcctggccggggccaccgaggccactctcatcaccggcatgtccacgttcagccccaagttcttggagtcccagttcagcctgagtgcctcagaagctgccaccttgtttgggtacctggtggtgccagcgggtggtggcggcaccttcctgggcggcttctttgtgaacaagctcaggctccggggctccgcggtcatcaagttctgcctgttctgcaccgttgtcagcctgctgggcatcctcgtcttctcactgcactgccccagtgtgcccatggcgggcgtcacagccagctacggcgggagcctcctgcccgaaggccacctgaacctaacggctccctgcaacgctgcctgcagctgccagccagaacactacagccctgtgtgcggctcggacggcctcatgtacttctcactgtgccacgcagggtgccctgcagccacggagacgaatgtggacggccagaaggtgtaccgagactgtagctgtatccctcagaatctttcctctggttttggccatgccactgcagggaaatgcacttcaactt

SEQ ID NO: 68386 - DNA, 1579 bp, Homo sapiens
  misc_feature (1)...(1579): n = a,t,c or g
gatttttctgacaggatcaatcgtgcccttgctgcagcaaagaaggataatgacttcatttatcatgatcgagttccagaccttaaagatctagatcctattggcaaagccacacttgtgaaatctaccccggtcaatgtacccatcagtcagaaatttactgatctgtttgagaagatggttcccgtgtcagtacagcagtctttggctgcctataatcagaggaaagccgatttgattaacagatcaattgctcagatgagagaagccaccactttggcaaatggggtgctagcttcccttaatcttccagcagcaattgaagatgtgtctggagacactgtacctcagtctatattgactaaatccagatctgtgattgaacagggaggcatccagactgttgatcagttgattaaagaactgcctgaattactgcaacgaaatagagaaatcctagatgagtcattaaggttgttggatgaagaagaagcaaccgataatgatttaagagcaaaatttaaggaacgttggcaaaggacaccatccaatgaactgtataagcctttaagagcagagggaaccaacttcagaacagttttagataaagctgtgcaggcagatggacaagtgaaagaatgttaccagtctcatcgtgacaccatcgtgcttttgtgtaagccagagcctgagctgaatgctgccatcccttctgctaatccagcaaagaccatgcagggcagtgaggttgtaaatgtcttaaaatccttattgtcaaatcttgatgaagtaaagaaggaaagagagggtctggagaatgacttgaaatctgtgaattttgacatgacaagcaagtttttgacagccctggctcaagatggtgtgataaatgaagaagctctttctgttactgaactagatcgagtctatggaggtcttacaactaaagtccaagaatctctaaagaaacaggagggacttcttaaaaatattcaggtctcacatcaggaattttcaaaaatgaaacaatctaataatgaagctaacttaagagaagaagttttgaagaatttagctactgcatatgacaactttgttgaacttgtagctaatttgaaggaaggcacaaagttttacaatgagttgactgaaatcctggtcaggttccagaacaaatgcagtgatatagtttttgcacggaagacagaaagagatgaactcttaaaggacttgcaacaaagcattgccagagaacctagtgctccttcaattcctacacctgcgtatcagtcctcaccagcaggaggacatgcaccaactcctccccacactcatcgcccttaccacgctactcctacctatctccccttttatactaataatcttataaaangacaaaaaacctaaagcaacttcaattcctacacctgcataaaaanggggggggggcccgttttaaagaatcctctggggggcccaattattggcggtgatagagaaataatttctttttttttttgggggcgatttataacccccccgggggaattttgaagaaaacatttttttttgggggaaa

SEQ ID NO: 68387 - DNA, 396 bp, Homo sapiens
acgcgtgccaacaccaacatccatcatgccctatgctcagcctggacctgctgtatgagatggaccccgtagtactgggggactcactggatatatgttattcgagctacttcatgttatctagccctgctctgacttacgccacatcctacggacgcgctgcttacatagagcatgagcgtacctaggcttggctcttgacgtggactgatgtgataaactcgctgaatatgactactagcctgacccaccatgccccaggctcagcagggagctcctggaggtagtagagcctgaagtcttgcaggactcactggatagatgttattcaactccttccagttgtcttgaacagcctgactcctgccagccctatggaagttccttttatgcatg

SEQ ID NO: 68388 - DNA, 413 bp, Homo sapiens
aaggagaaataaaaatgaaagaaaaaagagagaacagaatatccaagaactgtgggacaattgagaaggatgtaacacgttatttgaataccacaagaattagaaagcagcaggagagatatttgaagtagtaatggccaagaattttccgaagttgttgacagatgcaaaactacagaaccaggaaactcagaggacaccaagaagaataaataccaaaatatatacatctatgcacatcatcttcaaatgcaggaaaagaaagacaaatagaaaatactgaaagaagccacaaggaaggaaaatactagaggaataaaaataagaaatcttatcagaaaccatgcaagaagagagtggagtgagatataaagtgttcagagaaaaactactaacctagtcttctgtatccg

SEQ ID NO: 68389 - DNA, 369 bp, Homo sapiens
tgatgagaaaacgtgtattctataccagttgcatgaaacgttctctaggtgtcaggtccattttgcctagagtgtacctcagtcttgatttgggttgtcttgattttctgtctgaatgacctgcccattattgaacgtggggcgttgaactcagtcttcagctattattgtgtcgccgtctgtctctccctttactaaatctattacgctttatacgtctgaccgctccaatactgtttgcatatatatttataacctttatatgctcttgctgaattgagccctttatcattatgtaatgacctacgtctttttctagtttttgacttgaaatctattctatctgatgcaagtatagttacttctatt

SEQ ID NO: 68390 - DNA, 393 bp, Homo sapiens
cccagggcttctcaaagtgtggcctcagacttcccaccttaaaatcatgatgggaatagaaagaagggtttgttaaatgcgcatgcccaggtcctgcacccagagggggacatggcccctggggctcccctaggcatccctgtgtgcacctgcacaaacggcagacacggtcctgggggctccgtgggtgacaccccagggaggggcttcacaggtgccatatggtaagaggtagacgaaagtacccactgcgtcgtggggtgaggtgtccaggcacaggcttcccagggatgggatcgccgcagggcacaggtggagggaggcagccctgggccggggagcagagcccacaaagggggcccaggaagctgctggctgtgaaggtgtaagaaa

SEQ ID NO: 68391 - DNA, 291 bp, Homo sapiens
aaactgtaccatggggagttgcattgcaccatgcagggcttacttttgatgagagggatatcactgaatgagcctttcatccaggccttattcgggccttggcggcgacttgtactatttcttctggggggaaatcacctgcacgacacgcgatgatccgaacccctattttcggaggtcgacctgatagatatgctcacttataaccagatgggtagccagagctggcacgaaaggagaggacacagtaggccacagtatgttaattcgtacgcgacgcaggcgcgaatt

SEQ ID NO: 68392 - DNA, 378 bp, Homo sapiens
tgtacctaaagtaggcttattagaggaaggtggtcatgttgatcctatggagatgcctttatactttcaaactggctcactggcatactgccatttatcacatctatttccattttctataagctctcttactgaagttttccactatactgatccggctttgatcataacgaatttgcccaatcacaaggcttccagtgtctttagcaagatcacacctatctcttctaactatatctaatcctttgagctcctgtttggtgacataattcccatccgacgttggctcaacaactttcaaggaaaaacatggctatctgcacagcctcaaagcatctccccaaagtatttcttaattaccacagtggttttaacaat

SEQ ID NO: 68393 - DNA, 349 bp, Homo sapiens
cagaacaagtagacagaaagggagtaagaatacagaagacttgaacagggttaacccaatgacatatatattctatatcccaaaacagtagaaggtacatcctttccaagtgcacctggaacactcaccaagacagaccataagccgggtctcgaaacatgcagaatatgttctctgaccacaactgaagtgaaaaataaataacaaaaatataacataaagagcccccatatattcagaaattaaacacacttttaaacaactcacgggtcaaagaagaaatcacaagagaaattagaaaataccttgggctgaatgataaaaatatattaaaacgtgtgggatgcag

SEQ ID NO: 68394 - DNA, 931 bp, Homo sapiens
acgcaagccttttggatccaaaatgtattatttcgggattgctgcactagatagatttaaaaacagattgaaggactatccccagtattgtcagcatttggcttctatcagtcactttatgcaatttccacatcatttacaggagtatattgagtatggacaagcagtctagagatcctcctgtgaaaatgcaaggctctatcacaacccctggaagtattgcactggctcaggcccaggctcaggcccaggttccagcaaaagctcctcttgctggtcaagttagcactatggtaaccacctcaacaactaccactgttgctaaaacggttacggtcaccaggccaactggagtcagctttaagaaagatgtgccaccttctattaatactacaaatatagatacgttgcttgtggccacagatcaaactgagagaattgtggagcccccagaaaatatccaggagaaaattgcttttattttcaataatctctcacagtcaaatatgacacaaaaggttgaagagctaaaggaaacggtgaaagaagaatttatgccttgggtttcacagtatctggttatgaagagagtcagtattgagccaaactttcatagcctgtattcaaacttccttgacacgctgaagaatcctgaatttaacaagatggttctgaatgagacctacagaaacattaaagtgctcctgacctctgataaagctgcagccaatttctcagatcgttctttgctgaagaacttgggacattggctaggaatgatcacattagctaaaaacaaacccatcttacacactgacttggatgtgaaatcattgctgctagaggcttatgttaaaggacaacaagaattgctctatgtagtggcctttggtggccaagtcttagaatctaacattcggagtgtggtttt

SEQ ID NO: 68395 - DNA, 599 bp, Homo sapiens
caaatgtatacagaaagaaagacaaggaaataaaacagctaaagcaattttgaaaaaagaagactaaagggagaggaatcagtctattcaatgtaaggactcatcatagcctaatcaagacactgattggttttagcaaaaggatagacacataagtcaatggaacaaaatgaagaacccagaaatagacccacacaaataagcataaatgatttttgagaaatgtgcaatcctttctcaatggagagagtatatggtcttttcaacaattagtgctggaccaatgggacatccataggcaaaaaaattgaatcttgatcttaacctcacacacaaaaaaacaactcaaagtggatcatgaacttaaacttaaaatgcagaacaatgatacagttacaaaaaacctaagagaagatatttgggatctaggattaggtaaaaagctccagacttgacaccaaaagcaaggagtataaaaggaaaaattgatacactggacttcattgaaatgaaatgttttttttgctttgaaaaactgtcaagaggatgaagaaagaagctaaagactaggaaaaaaatatttgcaaaccgtatgcctg

SEQ ID NO: 68396 - DNA, 331 bp, Homo sapiens
gaaaagggtatattttcctcctttggattgcagtggtgcttttgtcatatgttaagtgactatatatgtttggatctatttctggactctgttttgttcccttgatcttttgtcttccctggagctaataccacactatctcaattattctaactttatggcaaatcttgaaatcttattgtataagtcccccatatttgttcttattccacattgccttgcctattctacgtgctttgcagtgccatataaattttagaatcaacttgtcaattttcacacaaggatttgctggggttttgattgggattacattgaatccagagattaa

SEQ ID NO: 68397 - DNA, 356 bp, Homo sapiens
cgataaaatagaaaaacttctaaaaaccagtgcctagatcaaagccttaataaaaattctcccatcaaagaaaagcccaggacctgactgctttactgctgaattctaccaaacatttaaagaattaatgccaatcctattcaaactcttaaaataaaaaaaaagaaaaaaagggaaaaggggggaattttttaaaaactatttttagagggccggttttttctgaaaaaaaagcccgggcagggacccccaaaaaggaaaaacttaaggcccgtttccatgggaaactatatttccaaaaatccttaacaaatttttgaacccccaatttcattggtatccggaaaaaacattta

SEQ ID NO: 68398 - DNA, 394 bp, Homo sapiens
  misc_feature (1)...(394): n = a,t,c or g
ggcttttgctgcatcccataagttttgggggagatttttgttttaatttgtctcaagatattttctaatttccctttttggtttcttctttgacccattagttgttccagaatatattgtttaatttccacatatttttgaatttttttctttttgtttttgatttagtttcattccattgtggctggaaaagatacttggaattatttcaaacttcttatatttgttaggacttgttttctgacctagcatgtgatcaaccctgtagaatgttctgtttgcacttgaggacactgtgtgttctgctacttttgggtggaatgttttatatctgtctgttaggtttatttgatctatagtgttgttcaagtttgatattttcttttgatcttcn

SEQ ID NO: 68399 - DNA, 333 bp, Homo sapiens
gcgacattttagggggaaaaacaaaattatactagcataaatactataaaatcataaatttccttttaatggagaaaatgaaaaactattactgaaaggtatttaaaaagactaaataaatggagagattcaatattgtaaagatgcaaattctcagcagagggacctacaaatttagtgtagctccaataaaaataccaagttcctatagactttctctagcagactctgaagtttacatcaaaaatcaaagagccaagaatagcgaagtctctcctaaaaaagaatatggtaggaggtttaccccactggctatcaagagtcatgttttag

SEQ ID NO: 68400 - DNA, 341 bp, Homo sapiens
  misc_feature (1)...(341): n = a,t,c or g
aggggctcttcccctgggtgtgggcagtgtggctgctggaggacgctatgatgggctagtgggcatgttcgaccctacagagtgctcaacaacttcatttccaaccaaaaaaatggactttaaggaagatctttcaggaatagctgaaatgttcaagaccccagtgaaggagcttttgattgttntttgaacatgtttgatagtggcttttaaatccgataattcgtgagtaataaatcgcttatatactgtgctccatcttgattgttaattgatttatgaagctattgtgctttatatgatcatgatttgtgaaattttagtttgatataaatatctag

SEQ ID NO: 68401 - DNA, 338 bp, Homo sapiens
  misc_feature (1)...(338): n = a,t,c or g
ccacaatacccctcttttagcactgaacagatcatccagacagaaaatcaacaaagaaacatcagatttaatgggctctgcagatcaaataagactaacaaacatttacagaacatttcatccaacaactgaagaatacacattcttataagcacatggaacattctccaggatagactatatgttaggccacaaaacaagtttcaacaaattttcaaaaaattaaaatcatatcaagtaattttcataacagtatggtataaaattaaaatcaataccaagagcagttttggaaactatgcaaaaacatggcaattaaacaacatgctcctgaacan

SEQ ID NO: 68402 - DNA, 367 bp, Homo sapiens
gccctggccttgccctcaccctgcgttgggggtgcactggtcctgccctgccctggcactgccttggccccggccttgccttctccctggccttgcctttgccctgccctggcctgaccccaagcctaccgagtccatgaaatggccctggacctgccttgccatcctctgtcctggccctgaattgtccccaccatgctgtggtccagcagcttgccctggccctagtgctagtcctgccactgctatggccctgccctgattttggcatgccctgggctaccctaaccctgccctggcttgggcatgggcctatcatggccttgtcctaaccttggcttggcctaacctgggcctgtcctgacct

SEQ ID NO: 68403 - DNA, 366 bp, Homo sapiens
cagaaatcaattgtatttctgtacattagcagtgaacaaaaatgaaattaagaattccatttataattgcatctagaaattaagaaaataagcggtaaaaaaatggtactctgagacctaccaaaaattattgaaagaaattaaagaattagacatcccatgttcatggatctagatgacttaatattgttgagatgtcagtattatcccaaatgatctacagattcaaggcaatctcagctgccatttttcttcttcagaaaaggcaaagctgatcctaaaagttacatggaaattcagggtagtcagaatttttaaaacagctttgaaaaagaacaacaaaagtgaaggagtcacagttcttga

SEQ ID NO: 68404 - DNA, 333 bp, Homo sapiens
ttacgtttttgagggcttagccataaaatctttgcccagaccaatgccctgaagcatttctcccatactttcttctgggagctctataattccagggtcttatatttgattccgaaatccatcttgagatgaatgttgtgcatggggagaactatgagtctaatctaattcttccacatatggatatacagattttccaccactatatactgaagaaactgtccttcccctcaacatatttttggaatacctttctcaataatcagttggctatatatactcagacttatttcttggacctgtatacgattggtctacatggtagttatcatg

SEQ ID NO: 68405 - DNA, 403 bp, Homo sapiens
caaagggtcaatttaaaaaattaagatggaaaggtaaaatttccttgaaaatacaaaaacggtaatacaacataccaaaatctatgggatacagcaaaagcagtactaagaaagatgtttatagcaataaatgcctacattaaaaaagtaaaaagacttcaaatgaacaatctaataatggtgcatgttaaggaactagaagagcaagaacaaatcaaatccaaaattggtagaggaaaagaaataataaagaccagagcagaaataaatgaaattgaaactagaaaaaaaatacagaaggtcaatgaaacaaaaagtttactgtttgaaaatattgacaaaccttgaccaaggctaagataaaaagagagaagacccaaataaataaaatcagagattagag

SEQ ID NO: 68406 - DNA, 334 bp, Homo sapiens
aaataatatgagagctgtggctatactaatatcagacaaaacagactttaagtcaattctgtctgttaaatactgttacaagagacgaaggacataatgataaaagggtcaattcaccaagaagatataataactataaatatatatgcaccacacattagagctcctaaatataggaaacaacccctgacagaactgaaggtagaaaccaacagcaacacaataatagaaggagatttcaacactgctatttcaatgatggatggaacaaccagacagaagataaataaggaaaacagaggatctgaacaacactatggactaagtgggctga

SEQ ID NO: 68407 - DNA, 719 bp, Homo sapiens
tttcgtccggaagatgggtccgaatcaactggataggatttttaatttccgaaggcacgagctcctctggcatccgcaaatgtgacccgcaatttagagaggaagaggagcgcagaccctacctgtccggagtaacggtcaggagagaggtggggaagggctgggcccctcttggtgtcccgggtttccggcagaagtctccagggctgagggagtctgcagacacggagtttccgcgccagaggagcgggtccacgcggacaggcagttccagctccgggtaagtgcggccccatctcctctccgtccctcgtccgccagcagcagtcccggagagatttcccctccccggcgcccgcgctctctctcctcctgcgcccagcgcggtctccggctccggagtcggacggcgacggtgcagatgagggcgcacaggggacggtcctggagcccgggaagggtgcgagatggagacggcggttcagaaaagttgtcaggtctccagcccgggcagtggcgggagctggagccgcggtggagacgacttgaggggacgcagcccgcctggcacaaagggccacgggcgcgagggactcgatgagctgggagatcgcggccccggcaggtgcggcgcgctggggctggtgcttggcgccttgcccggtacagagagtcaagggattggattgtggattgcattggaggttttcctcagttct

SEQ ID NO: 68408 - DNA, 475 bp, Homo sapiens
  misc_feature (1)...(475): n = a,t,c or g
atcgtgatgactatggagatctctgattgtcgctaggaacctgccntctaattgtgcggctctacaccacacgtgcgctcgcagaagccgggggactagcctgggaggcccaggagccgcgggccggcgggcaggagagagccgttggagggcgccgcttcaagaggttaggcgtcgggaccaattcccgctgacccggagcagagccatccaggagtgcaggagccctgtgccgccccccgccgccgatcccccagaggccaggacgaaagcaccccccggtcggaagcgggagcccccggcgcaggccgtgcgcttcctgccctgggccacgccgggcctggagggcgctgctgtaccccagaccttggagaagaacagggcggtgcctgaggcagagaagaggcttcgcagagggccggaggaggacggtccctgtgggccctgggaccgccgaggggcccgcagccaggcg

SEQ ID NO: 68409 - DNA, 602 bp, Homo sapiens
cgacatcagaaaactcacactgcagaaagaccttatgagtgcagagaatgtgggaaattcttctccagtctccttgaacacaggagagttcacactggagaaaggccttatgaatgcagggaatgtggaaaaacatttactcgaaggtctgcgcattttaaacatcagagacttcatactcgaggaaagccttacgagtgcagcgaatgtgggaaatcctttgctgaaaccttcagtcttactgaacacaggagagtacacactggagaaaggccttatgagtgcagtgaatgtggaaaatcatttcatcgaagctcttctctccttcgacatcagagagttcacacagaaagaagtccttacaagtgaaaagaaatttgggaaattctttagctaaacctctgtgcatcttcttgatcagagggttcttactggatcaggaccttatgagtgtgacaaacgtgggatattctttatgcagaagtcttgttttattacatacagaagagctcccactgcagaagggcctcttgagtgcgatgaatgtgagaaagccttctgccttctgtcattggataacagattgttctcataaggaaaac

SEQ ID NO: 68410 - DNA, 739 bp, Homo sapiens
catgctacagctgtgtatggacactgggtgacgggattatgaccatgataggtggctgggtcacatggacattgatgctgtggccattcctataggaccaccatggctgtgtcttgagggaggccatccttggggacagttgtttgtgggtggttgcatgctgtggccatcagtacctctgtatgtggttgtgtatagaggactgtccctatgagtgtggctgtcacaatagactgtgtgactgatgctgtgaccagatttgagcacctatgactgagtatgtgtgaccacgtgacagtgtgtggccaaaaacagtgtgttggtgtgactggtctggttgaggctgcatgtggtctccgtgggaccaaatgtgtgtctgtccgtgtgcatctgtgaccagatgtcagtgtgcagcagtggagatacgtgtaacaagtgtatatagctgcgattgtgtcgtgtgggactgggtcagcaaatgggtgaactctgggtgtgattctatctgggtgggcctgtgacgtcagtatcttgggcgggcgcctgaggaaacatagctgtcactgggtgtggccacgcatgtgcggctctagtgggttgtctgggccccgttctttgtatgtggctgagaatgtggaagtgaccaaatttcagtgggtggtgtgaccaggtgtctgcggtgggaactgagtgggccaggacatgctgcatgtatgtggacaaatgtcttgagtagaag

SEQ ID NO: 68411 - DNA, 402 bp, Homo sapiens
agtacaacaactcgaaggggacactatatacgacgctgtggaacatggcttactggacgcatagaatggtgtgaaattcctaacattgccaccactgttacttctaccactgatgatatctatgtatgacccttagacggaccaaactatcaagatcactgaccggtgcgaattcccagagcatgtaccacttggtgaattattgcggataacagatcctattgaccctgcagattatatccttcatgcagtcctgggatcatagtggacattatcatggtggacattatgtggtttatctagacccctgaggggatggcgcatggcgtaaatttgatgactacgtggtgcaatgtgtactcatgaggatgcacttgatcacgattatgggggtcccgatca

SEQ ID NO: 68412 - DNA, 386 bp, Homo sapiens
agggagagcagatatcccagctgattgcaggctacattgacatcatcctgaaaaagaaacaatggaaagagcgatttggactagaaggtgatgaggagtcaaccatgttagaatagtccgattcctcaactgagtccaccatcttgcatcagcagttcaaccggaccgcgaaggcagagcacggctcagtgacgctgccggacgcgatgcgctcgggcttcagcgtgcctgagaccttcaacgttggcagcatgcccttgccaagcagcaggtcatggttgggcagatgcaccgaggccacatgcctgcactgacctcaacccaacatgccctgatggggaccatttacacaagcatgcacgccgtccagcaggcccaggatgatg

SEQ ID NO: 68413 - DNA, 1136 bp, Homo sapiens
  misc_feature (1)...(1136): n = a,t,c or g
tgggcaggccgggggtgagggctcgcgctccgggagctgcacggggctgcgtggaaagagcgccgagcggtggcgtcgttgtcgccccctcctcgtcgggaagaatcgtttggtctcctgccgtgcccggaatcccagtcagaagttccagcctgccactgttctctgatgccatgccagcaccaactcaactgttttttcctctcatccgtaactgtgaactgagcaggatctatggcactgcatgttactgccaccacaaacatctctgttgttcctcatcgtacattcctcagagtcgactgagatacacacctcatccagcatatgctaccttttgcaggccaaaggagaactggtggcagtacacccaaggaaggagatatgcttccacaccacagaaattttacctcacacctccacaagtcaatagcatccttaaagctaatgaatacagtttcaaagtgccagaatttgacggcaaaaatgtcagttctatccttggatttgacagcaatcagctgcctgcaaatgcacccattgaggaccggagaagtgcagcaacctgcttgcagaccagagggatgcttttgggggtttttgatggccatgcaggttgtgcttgttcccaggcagtcagtgaaagactcttttattatattgctgtctctttgttaccccatgagactttgctagagattgaaaatgcagtggagagcggccgggcactgctacccattctccagtggcacaagcaccccaatgattactttagtaaggaggcatccaaattgtactttaacagcttgaggacttactggcaagagcttatagacctcaacactggtgagtcgactgatattgatgttaaggaggctctaattaatgccttcaagaggcttgataatgacatctccttggaggcgcaagttggtgatcctaattcttttctcaactacctggtgcttcgagtggcattttctggagccactgcttgtgtggcccatgtggatggtgttgaccttcatgtggccaatactggcgatagcagagccatgctgggtgtgcaggaagaggacggctcatgggtcagcagtcacggtgtcttaatngaccacaatggttcaaaatgaaag

SEQ ID NO: 68414 - DNA, 396 bp, Homo sapiens
atctgttctaattttgatataagtcagatttttcaatactttcctgaatgggcttctgggggtataatatgtaagaaaccactgtcaaatccaaggtcacaaagatttgcctctgcattttcttctaagagttttataattttagttctgagatttaagcctttcaatcatttaatgtttttatatagtttaagatagggatccaacttcattcttttgcatgtgtatatccagttgtgcttacaccatgtattgaaaacattattctttccccattgaattgtcttggcacctgtgtaaaaaatcagctgattgtaagcataaagggttttaaaaaaatattttttcccatctctcaacttttagctgaagatgaagttctatttctgtatcttg

SEQ ID NO: 68415 - DNA, 400 bp, Homo sapiens
cccttgtcagaaaggtaaatctgagcaatgtcaagaattgtaaagggtccaaaatttaccctattggaagttaatgtattagcttgccacagtctattgtctctagttgttgttttgtcgctcatttttttgtctgaatttttatagtttattcttctaagctgttttctggttctttattgtcttttctagttttcttttttaatatgtatgatccgttatgttttctcatttattttgattacttcggttatttaattgttgtatgtttatcttgtccgttatcttttttgattttgttaatgtcttttctttcgttatcgtgtgtctctgtgttttgatttattcttaggtttcgtttttgtctattttgtttcgtatagtgtttattttattgttg

SEQ ID NO: 68416 - DNA, 374 bp, Homo sapiens
agcgagttgagcaagagcaatggggagaaagcttattcaaacaaattatagcagaaaacttttgaaaacttgagaaagagataaatacccaggtaaaggaaggtcagcaaaaactccaaacagattgatcccaaataagaataccccaagtactacaataattaattctcaaaagtcagtaagaaagagattatactatgagcaacaagagaaaagaggcaaataatgtataaaggagcgctccaattcatgtagcaacagaattctcaatcaaaaccatacaggccaggagggagtgaaatgacagtattaacatgttgaaagaaaaaaaacctgccattcaagaataccatattcagccaaacttattctta

SEQ ID NO: 68417 - DNA, 340 bp, Homo sapiens
tgacctcacactatacacaaaaattaacttaaaatggataatagacccagctgtaagagttaagactataaaagtcttcaaagaaaacataggagaaaaatcttcattcctttgggttaggcagagttttccccaaaacaccaccaaaagcttgatcaataaaaaataatacattggactgcatcaaaatttaaaatatttgcttttcaagacatcattaagaagatttttttaaagcctcaggctgggagaaaatacagtcatgtggcagctaatgaccaggttactttctgagaaatgtgccattaaacattgtcatcattgtatgaacatcatagag

SEQ ID NO: 68418 - DNA, 356 bp, Homo sapiens; identical to SEQ ID NO: 10196

SEQ ID NO: 68419 - DNA, 343 bp, Homo sapiens
cacaagtctgcaggaggagcactgcaacagcacgttgcgtgtggtcaacggtctcaccgtcgtgcactaagactggctgaacggtacggagtacaagcgcaaggtctctaactaaggccttccaacctgcatccatagaaccatctccaaaaccaaagggcatccccttagaaccacaggtgtacaccctgcccccattctgggaggagatgacctagaaccaggtcagcctgacctgtctggtcaaaggcttctaccccagcgacatcgccgtggagtgggagagcaatgggcagccggagaacaactactagaccacaccttccatgctggactccgacgg

SEQ ID NO: 68420 - DNA, 295 bp, Homo sapiens
tttcattgcaaaatacgaggtcatctggattatcttgttgaagcttgatagctttgtgctttatgtttatgttcgtgatacattctgaattcatttttgtaaaggacataacatctatatatggattcgttttttaaaaatgtacttattcagttgttccagcaccatttcttgaaaagactatcttttctccatcatattgccttgttcttttgtatatttgcgtggtctatttctgggctccccagtctgttccactgatggatttgtctcttttgcaaataccacagtcttg

SEQ ID NO: 68421 - DNA, 331 bp, Homo sapiens
cagaattagttacacatcttctcctccccctcatcacacctaatgaccaacttgcaattcccccatcactgcgactctggttctgctggtttaacagtctcagcacccaagtgaagaatgatttcaccaagggactcaacaatacctccactgatttggaagcttaaactgcaacctagcaattctgaactcctcatgacacagaacagggacaaaaagggaggtgacagaattggttgtgttaatgaatcttgattatcaagggtaaagaagattgttgcaacaggatgagagaagggaggtgtgtgtctggaacctggaacacctgttg

SEQ ID NO: 68422 - DNA, 305 bp, Homo sapiens
  misc_feature (1)...(305): n = a,t,c or g
aagaaacaagattgcctttgttcacagatgacaagattgtctatgtagaaaattgaaaataataaagaaaatcgaaaataataaagaaaatccctggaactaataagcaagtattacaaggttgcaggatacaaggttaatataaaaaagtccattgttttcctatagatcatcaatgaataaatggaatctgaaataaatacacaattgccatacattagtcctcaaaaattccctactatggaactccttaattatgtccggatataatgaatcattaaaaaggacctacttacatataaatn

SEQ ID NO: 68423 - DNA, 324 bp, Homo sapiens
gtgaatattccaagtgaacttgagaagaatgtttatttgactggttttggatatagtatattaacatcagttagattcagttgattgatgtggctcttcagttcaaccatattattactgattttctgcctgctagatctgtcagttactgacagaggagtgatgaagagtccaactacaatagtggattccttgcagttgcattagttttagcctcatgtattttgatgctttcttgttaggaacatatacattaaggattgttatgactccttgcagaattgactcctgtatcattttgttattattcttttgtgttctcat

SEQ ID NO: 68424 - DNA, 349 bp, Homo sapiens
gtgccacctcacctggctaatggcatactcttttgattgctgaatctttataataagccatgagatcatgtagtattagctctctagctttattctttttcaactggtttgactcttctggatattttgaatttccacgtgaattttagaaccagattggcaatttctacttaaaacaaaaaaaccctgctggggttttttattgggattgcattgaatctgtagatcagtttgggaaaaattaacatctcaacaatattgagtcttcaagtatatgaatatctctccactctacttacatctttcatttctcccagcagtgttttgtagatgttcgcgcattggtctg

SEQ ID NO: 68425 - DNA, 339 bp, Homo sapiens
gaattatgctgaatgtgtagattgatttgtacagtatggctgtttcaacagtattgattcttctaatccatgagcatgaaatttttttccttttgtttgtgtcacctgtgatttcttttatcagcgtttgtagctctccttgttgagatcttttacctacttggttaaatgtattcttaggtactttatctttttcttttttttgtagctattgcaaatgggactgcattctttacttggctctcagcttgagggttactggtatatagaattgctactgatttttgtacattgcttttgtatcttaaaactgggaagccatttatcagttccaggagc

SEQ ID NO: 68426 - DNA, 338 bp, Homo sapiens
atttataatcactccaaaaaattaaaatacttacatataaagcaaataacaggtataggatttacatgctgaaaattacagagtgctaatgaaagaaatcaaggaagatttaaatagacatatcaggtgaatggattagaagactcaatattatagatatcaattctccccaaatttatctaaaagtttaaatacaattcctatcaaaattgcagtaaagttttttgcagatatagacaagtatattctaaaatgcatacataaaggcaaatgatctagaatagctaaacaattttctaaaagaataaaggaaaaatcactgttcaatgttaacttaa

SEQ ID NO: 68427 - DNA, 719 bp, Homo sapiens
ctcatgaaagcctgaaacccctgccttccctaaatgttggtgcccatggccctaagccagctccagtgctcccagcacatcctctccccaggcggatgagaacccaccagtgggtggtcatccctcctacactgaccagcccgaaccctgggctctgagccagacctggtgagcctcagacccgtttccaaacttcctggatggccctgggggcccacagatagaggttgctcatgcctgccccacgctggggtgattaatgccccctgcaggtgcctgcccctcaccagggtcccaagctgccgacggctttgtcatccatccagtcacccagggagatcctggaggcattcctcccgcctcctcaccctgacatccactgtctgccagatctctcctgccctcttctctcttctctacagctggggtccagctcctcttccccctggatgatgccccttgcctgctcacaatccttccatggctccccagtgtcctcatgataagcaccgagcactccaggcccttggcaggcgggccatccgcatcaccagcctttccacccagcactggcggctgggccccttcaggctgctggccccccacacaccatgttctttcctcccactccttccaatccctccagtcaaagtcctttcagacctctctaagccccaaccttccatctcagcccccaaatcctgctgtctctgacgaaa

SEQ ID NO: 68428 - DNA, 307 bp, Homo sapiens
tgagagtgatgatgatgatgagtttaacaaacttcctagtgacgctaaagggaatgctcacagatgagatacgaagtgcgatgggtcagaggaggatgaggatcacagtgaaaaaagtatagagcgcccaagaatgcttccttttggagaaagtggtgatgaatcagatgattttttgcaatctagcaaaggacagaaacaagctctgacagacaagccaggtcctagcacagaaagcgggaatggatatgacgacgcctacttcaggattgcacagtggccgcactaaatgtcaacaataaggagc

SEQ ID NO: 68429 - DNA, 328 bp, Homo sapiens
aataaatgttttttattacgcaggggccatatgcttaaggcccttgataatattccccagcttagaagtagcacttagggaacataggaacctttaatagaaattggacagcaagaaagctagcttatggatacttgggggccagggcattagccacaccagccaccaatttctgataggcagtctgcactgatggggtgaattatttgccatagcgatgggtcagcacacagaccatgcacgttgtccaggagactgaagttctcaggattcacgtgcagcttgtcacagtgcagttcactcagtgtggcaaaggtgcccttgaggt

SEQ ID NO: 68430 - DNA, 412 bp, Homo sapiens
cggcagtctagtagagaccacacaattccatcactcagagtttactagcactcagagagctgaggttactctgtttatttattaaagaacttttacagcatgaagttagctctggagaccactctgtgtgctctttttctccgacttcagcaattgctacaccaacgtacacatcctgtttttattacacacattcgagcccacagctctctgcctggcccattggcttatggcaatgatcaagcagctcttcaggttgtaacatcactgctagaccaagccacccaattgcatcaatttttctactaaaattagagaaactcatcttaaacaacttcaacttatacagagattggctaaacaaattatctgacggtgcccagattgccagctcacaggcacagcccctctt

SEQ ID NO: 68431 - DNA, 333 bp, Homo sapiens; identical to SEQ ID NO: 40055

SEQ ID NO: 68432 - DNA, 317 bp, Homo sapiens
ccaaaattgctcttgttattgatttctaggtttattccattgtggtgagagaagatgcttgatattatttcagattttttgtttaaatgttataaggcttgttttatgacttaacctaaagtctatccttgacaatgatccatatgctcaggagaagaatgtgtatctgcagccattgaatgagatgttctgtaaatatctattaggcccattttgtctgtagtgcagattaaatctgaggtttctttgcggatttcctgtcaagaagatttgtccattgctgaaagtgggttgttgaaatcttcagctgttattgg

SEQ ID NO: 68433 - DNA, 329 bp, Homo sapiens
gttcgaattatgatttaatgatggatacaccgaagtaagtgttgttatataaaatcactgtataagcctaatgagttaatagatgcaggtacagatatataagatggctggacaaagacctccagactggctgaagaattataacattgtgctgcataacatttcaaactgatggcgcatctgctatgttaatcatggcggaggataaggctctaggccatgggttataagccgaaggcatatatgaggtaaagcagatgtgtcaaacaaatcatctctgacatctttattatagtaccacagctcacctctctgaacttttacctagg

SEQ ID NO: 68434 - DNA, 327 bp, Homo sapiens
tagaaaacaaatggagcaagaattaggcgatactcaaaataataaaaatacttagaattaacttaatcagaggcaaaagacttggataacaaaaaaattcaaaactgctgaaagaaattaaagaagacataaataaatggaaacacatcccacattcatgaactggaagacttaatattgttgacatgtcaacattatccaaagcaacctacagactcaatgcaatccctatcaaaatcccaacaagggatagtaatcttgaaacaagggacaatagacaaaataatcttgaaaaagaataaagctgaagcactcccatttcctgat

SEQ ID NO: 68435 - DNA, 297 bp, Homo sapiens
caaaattcatatgaaaatgcttttgcattgtaaaagaggaatgaagttcagaggctcctacttcccgatttcaaaacactactaagctacaataatcaagacaaagtggtactggcgtaagcatagacatgttgatcaatggaatagaatcgagactccagaaataaattggtatatttacagtcaattgagttcagtaaggataggaagaaaattgaatgagttaagattaatcttttcagtaaattctgcttgggcaattggatatgcacatgtaaaagaatgaagttggtctcc

SEQ ID NO: 68436 - DNA, 295 bp, Homo sapiens
gatttacatttatcttttctaaaagtttcacagttttatcccttccatttagatctttgatccattttgattactttttacgtgtggtgtgagttaggagacccagtttcattcttttgcatgtggaccattttcctggcaccagttgttgaaaagataatttccctgttgaattgtcttggtagtctgtggaaaacaatttgaccataaatatataatacatggatttacttctagactgtcggatcagttccattgatctgtatgtctgctcctatgccagcatcacactgtt

SEQ ID NO: 68437 - DNA, 414 bp, Homo sapiens
ggcacgagagctggcttttttccataaattataaacctaaaattcatatggaaatgcaagaaacacaatagttaaaacaaactggaaaatgaagatagatgactcatacttcctgattttcaaacttactgcaaagctatacagtgatgtaatggtataagatgaacatacaggtcattgtaatagaatggagtctctagaaataaacccttacatttatgaactgtttatttttgaaaagggtaccaagactattcagtgggaaagaagaatcttttcaacaaaaggtgcttggacaactgaatatctacatgcaaaataatgaatttggacctttacctcacaccatgtacaaaattaacttaatggatcatctaccaaaaagtaaaactataaaatatatattcttagagg

SEQ ID NO: 68438 - DNA, 386 bp, Homo sapiens
ggcacgaggaaccagaagccagttcctgctgttcctgtcgagaagtctggcacatcaggtggtcctcccatggcaggagggaagaaacccagcaaacgtccagcctgggacttaacgggccagcaatgggacctacatgcagaacttgaacgtagcacatgaaagactcggacggtgcacctggagaaccataccttttaggaccggctcgtaaattgccattgtcagagcaaggccctggtgacagagcgcacaacactggaggggctatttagccaaggcacaggccaatgctgaacaaggacaactggagctgtctaaattgcgagctagtgccacgtacgtctatgatcatatgaagaatctcctcgatttggggcgaaaag

SEQ ID NO: 68439 - DNA, 412 bp, Homo sapiens
ggcacgagggagtggctatgttaatatcagataaagtagacttcagagcaaagacaattatcagagatagggagataatgataaaagggtcaatctgccagtaagacataatagtcctaaatgtatatagaccaaacaatgaaattgcaaaatatgtgaagaaaaactcatagaacttaaaggagagaaacagatgattcacagtcatagccagagacttcaatattcttctttcaacaattttgatagaactagacagaaaaccagcaaggatataggtgaactcaacaccactaactgacaaaatctagttgacacttacagaacactctacctaataagaatacacattcttttaaagtgcttatggaaaatatatatcaagatagagtatatcctgagccataaaaat

SEQ ID NO: 68440 - DNA, 800 bp, Homo sapiens
ggcacgagccagccaaaggtaaactcactgaaaactctgttaaatgctagatgatcatacaagccaccatagtgaaggtgggcggaagacaagacaccatagtgaaggtgggaggaagacaagacaccatagtgaaggtgggaggaagacacacttgatgttttccaaggccacacatttactaaggtggcagaagtggaaataatcccagggtcatctgctttggggccagtgttcctcccaggtgagtccatgaggtttagacagaggagggtcagccatagaagtggagaggatttctctggggccagacagtgtgttgtttattccacagagactccaagcaccccaagtactgcatcgagctgagcgcccagcctgtgggacttatccgggtacacaaggtcctagtggtgggcagcacccaagacagcctgcatggcttcacccacaaggtgcagcccccagcaagcagcagcccctccacgcctatgtccctagcccccacttggcaagagagtcctctggcttccccaccccagaaaccgttctttccactgtaagccctgagccctccacagacgctggctgttccctgccaggggaagaagctgtggacagtgcagatgcccgcagccatcctgaccatgaacctcctggagcagcattcccggggcctgcaggccgtcatggctgggctggccaatggagaggtccgcatttatcgtgacaaggccctgctcaatgtcatccacaccccggatgcagtgaccagcctttgctttggccggtacgggcgg

SEQ ID NO: 68441 - DNA, 431 bp, Homo sapiens
ggcacgagggacatcattcaaacaaaccagaatatattcagatgctaatgcctccactgacccagaaatggaacatgttaaatggtgaagataaggatctcttccctttacctgagtgcctatcttcagttgccacagcactgcactctggctttcttccatactgtgaacctgtgtaagagacaatgaggaaaacttgcccaagccatgctaaccaatgctcaaccagatcaatatgaacctccacataacgattctatgctagcgtctcttgatttactgacgggcctggctcgaagactcgaacgcaacatttccacatctggtacgcccaagtaacactctaacactaatgcattcacggatgctagattaaatgctcaaaatcccacagagctattctaccctcttaaggacctcaccaaacctgg

SEQ ID NO: 68442 - DNA, 365 bp, Homo sapiens
ggcacgagcgtgactaagatggaagcgtttttggggtcccggtgcgcactgtggtactcagagtattgctttcctgaagaactcactcacaccttcatgagctgcaatctcattactggaatgcatcagcgactggactagctgaggactaatgcctctttcagcgtcatccttgttgtgaccggcaattgcagcttcatcgctggcgtctggaggctctacaatcttgacattcgcattatgattaataccgatcttatcagagtcttgaaaagcccatagatccacagagcccttcgagcaccacgcatgaagatccatcctagagtcctagataataacccactgaacaacttgagaatccg

SEQ ID NO: 68443 - DNA, 398 bp, Homo sapiens
  misc_feature (1)...(398): n = a,t,c or g
ggcacgagatattttaattatttgctttttattttttgtgtatctgttacttttggtttttttttttgggggcaaagccaaaacctggctcaatggcccagccggaaggccaggggcaaaacccgggcaaacggaaccccccgcccccggggtcaaggcaatccccaaccctaacccaacggagaacctaggactacgggccccggccacaagcccgggcaaattttggaattttaaaaaaaaccggggtttccccaggtgggcaaggcgggcccaaacccccggacctggaaaccccccggccaaaccccccaaaggggcgggaatcacgggctggacccaccgccccaagctcggcaacaggtttttgaaccggaaatacccagggggctggcaan

SEQ ID NO: 68444 - DNA, 292 bp, Homo sapiens
ggcacgagctggcacacttgagtctctgtttggcagacggaagccttcccttcatcccgaagttcatcgagctttggcaacaggcaggcaagcggtaatagcagcttggcaacattctgcaaaagcagcttctaccttttagcaaagaacaggagttccggggcataaaactaaggatgaaggatggctgctggctataacatataagtaatttatcaaaaatgcctctacataggcatgaaaagcagtgcacatcacatcaacctctggtctcaccaatcgggggaggttc

SEQ ID NO: 68445 - DNA, 575 bp, Homo sapiens
ggctcgaggtcttagtattgcacgagctcattatgttatatttcataccatttatggatatcactttatgctattgtaacatatattccattctaattattgtctgagtcaagacaagaattactcttactaaggtaaagcaaagcctacaaattcaaaacctgagtctatacaaatctgttagcagtttgagtggctgggcttcaatattatactctggatgtgatacaatagataaagttttttacgtctgtaaaaaaaaggaagagcaaaagactcttgggaacatgtgaaatcttaaatgaagattaagtacaaccaaatgtaaacatattttaaaaggttcttcttggacatcataatttgctctcctatgaagatgtcatcgtttgagcctttaatgttggaaatagcttacagatgttggggcagaaaccaaagaccaacattgccatgttctgtgagaccacgtccaagtggatgattgctggataggtatgtttcatgcataacatttagttcataaaattatatgctactttaggaggtccagggcccatggattaatgaaacaa

SEQ ID NO: 68446 - DNA, 437 bp, Homo sapiens
ggcacgagctgggaggaaagatgttcataggatagatactctgaaaagctctgacatgtgcaggtctgtgtccatgcagaggaaagatctcaaagggtccttccgcacgctcctgggacaccctctgcgctttggcttcttgtcatcatcagactcttctgtctcactctcagaagcagaggatctctgggcctgcctcttggactcactgtcagagtcactgtcatttgtctgagcctgagaaagaccttgagcaactgtgcaagcaggaactgaaagttaaggcagagttgtcaattgccttccagagcattgaaacgtgccccaacaacacatacccagcccttcaacaaaggctggtagacttacaggctcatagcatttaacgaaatctctggtcaatcattaactggccactaagctaatggagtagagcg

SEQ ID NO: 68447 - DNA, 726 bp, Homo sapiens
tttcatagggctcggcgtggtgaactcacgacaggcctggggtgggagcacagacacgccggcctgtgactaggcagcagggtggcacagggcagcaggttccacagcggagcagccgcctgccaccccctgtagttcacacaccggcgggtgactcgttaagtaaatggaaagggctttcagtaacaatggaccacctctgcagcgaccaactgcatggactccctgttctgcgccacgaaagaaaggtggttagcgttccgtgtttcgctttgacaaatgcgcattcacatgacagaaactcttccatgcagaaagatcacctgttcatatttctctagctcagagtggtaaatctgtcggatctgggacagcttggccctgtagtcagagtgctcaatgctattgtcatttggaccagccacctggtgttgctgtgccggccctggccaccgctcctccttttcctctcttctcgggcctgcacacgccctcagccagcagcatgttatccagcctcaggagctgggcgtcagggggatcttcgtcttgaatgccacggatgcttaccactgtcttttccttgatctcacagagcacgctgaacagagcaggcttcatccgatggcaattcagagcatgctttctggcctgtgcctcgtccaggctctggtcggtgatggccatgatctgctgcaggacgtcgctcgtgtcgaggcgccgcgg

SEQ ID NO: 68448 - DNA, 335 bp, Homo sapiens
ggcacgaggctagaccgagcctgtgggatataccaaggcataggtgcccatgggcctgaggagcctctgcgcctagctgttgttgatccttgcccacctgaggcctctctttttctttcccaagtcccgctttgtccgcatcttgatgcccttctctccgtacgatctcctgaactttcatgccatgctccagtccttccttgagatgatacactaggctcatcaggccatggacatccacttccatagcccggtcttccagctcccgccaacagaattcatactagaatggctacgattaccgttctgtttgcctgtagatccgtcacaactcc

SEQ ID NO: 68449 - DNA, 1042 bp, Homo sapiens
  misc_feature (1)...(1042): n = a,t,c or g
ttttttttttttgttatagaaatctgtttaatggtttaggaatgtgtacactctggctctgccaagtttccataaaggcaacttttccatgttttaaaaaatagatttggtataaagatttatatattcataaataggtggcatgaaaaattaccaaatgcaaatggaatacttgcgctgactgaagccctgttcaccccaagtccaggccctgcaggggtccgagggtctctgctggaggaggccccaactccggcagcctcttagggaagagaaactgaattaaatgtgtattaggaacccctccagctccttaagccagcgtcgcactggccccaccgaggcctcagcccacctccctctgcttccccccgccacctccaccattgccccctcccctgcactctggcccctgaccccacctgttcccactctttggcaatttatcaacaaaggaagagatgacactgttctccttccgccccagagcccgggctgccgggagagcttagcctgccaaggggaggaaacaagccggctttgttttgtctcacacacttccccgtcttcactcccagcccagttttaagggccggaagggcagtggggccccctcctggtgggatacagcagggcaggagcccctgcaaccccaggtacaggtcttgagtccctggacaccggcttttgtgcctgagagggggtgggaacgcttctctgtaggaaatggcttcagtccaggatccaggggtaggggaacctcgaccatggggtgggttgctcctgccagggggtaacttagcaaggccccagggtggagccagttctgggactgtgtccagctaggcatctgtgaccccaaatngcatgaataaaaggncaggttgctaagagccaggggaggncatggggcagggagaccaggttggcccagacaggacagaggtgctccagggacagggtgctggagtgaagccaggtggagcggtggagctgtggagcctttgaaacatcctgatggcccaggcctttgttcccaaga

SEQ ID NO: 68450 - DNA, 403 bp, Homo sapiens
tacgaatttggaccatctacgtcacaggaattctgcaccagtagcctttagacaaccgcagaaagcttccatgatttgaaactaactgacatacatgctgttggcatgtactgaatggacttggagctccagctaaagaacaatgcatctaaacttttgagtggccattatggaaagcagacatgacagtgagaatgcagaaagaattctttttaacatgagacccagagaactggtggatgtgatgaagaatgcctataaccaaggattgtaatgtgaccatgggtatgatcgggtaatactttattgcaggagcctattgctagactatcggtctaaatttgtcttgtcactaataaagactcccatccaacaccgctcttcccgatcctcaagggaggag

SEQ ID NO: 68451 - DNA, 336 bp, Homo sapiens
ggaacgagacaacatataataacataaagaatatgacattcttagggataaatatgacaaacgatgcataaacacctgcatacagaaaactacaaaactcctgaaagatattaaaaacccaaataaatggagaactataccatgttcacaaaccacaagactcaatactgctgagatgataattcttcacaaattgttctgtagattcagtgcaacctcaatcacaatttgaggaggctttttattaaagaagatgacatgctgattctaaaattgctgtggaaatgtaaaacacctagaatagtcagacaactttgaaaacctgaactatagtgc

SEQ ID NO: 68452 - DNA, 350 bp, Homo sapiens
ggcacgaggaaagtcgagactcctgccaaaatacatgccttctggattgactgcgccaacagagaggttctgccatccacccgcctgggtaccctatcacctgccttcagcactcgggtgctgccagctcaaaccaccgagtatgcctttagccttcatccaagtgccccacgatgatgatgcccgcacggacgccgagcactacgtacgcccctaaatgcataactactcagtgcctgctcaacgtccaacaatcgagtgccgactgccccaatgatactcgtgcctactactacacccatgtaccgtagtgtaaactgcaactcccacatacgtagtgctactagtct

SEQ ID NO: 68453 - DNA, 341 bp, Homo sapiens
ggcacgaggaggaactgaatcgcctgcagggggagctgcaggctgtgtgagactggtgttagccaccgctcactgcaagcactgcctccctccggggtctgtaagaggccgtactagtctacagacctcattcccccattccctgtctggagccacttacagtgaccactctcactcattaaacatatacgtgcccgcaggcacatcgctgctccttattgaggaagctgtcacattcctaacaattaatgggctcatcactggcgtcaagagaggcagacttgactccaagagcagatagacttactttggaaaactgggcatcgcctaagcttacatgg

SEQ ID NO: 68454 - DNA, 398 bp, Homo sapiens
ggcacgagctggaagactatacaaactgatttcaagattacaaagcttcaagaatcaagaaagtatgatattacataaaaacaagagatcaatggactaaattatagaatacagaaaaacatacacatgtatttgtgtgtgtgtgtgtatatatacacaaaaaagccttttttataaacaataaactatttttgttcacaaacatgcaaaggaattcacttgagaaagagtaatttatggaatctattcaacaaatggtgttggaacagtggctcatcatacacacacacacaaaaaaacttcaatccatacgtcacaccatattacaaaattaactcaaaatggatcacagacctacatgtgaaagaaaatcttaaaagttctaaaagtaaggccgg

SEQ ID NO: 68455 - DNA, 607 bp, Homo sapiens
ggcacgaggcatgcacctgtagccccagctacctgggaggctaaggtggaaggatcacttgagcccaggaggtcgaggatgcaatgagacaagatcatgccactgcactccagcctgggtgacagagtgagaccttatcttaaaaaaaaaaaaaaggaaaaaaggtccccagaatatacatttttggggatctttatttccagggatgaccactgcacctaacaacagcagaatgttcttctcaactacactaggaacattctgcacgctaggccatgaaacctcaatagattaaaatgatagaatgaatacacagtatgttctctgaccacaatagaatgaaattagagtcaataatagaaaggtatttagaaaacccacaaacagctcactcttaaatagtcagtgggccgaagaggaaatcaaaagagaaataagaaaatacactaagaaatacattgagatgaatgaaaatgaagacatggcataccaaaatgtatgggataaagctcaagcaatgcttctagggaaatttatagctgttaatgcctacaataaaaagaaagctctcaaatcagtaatcgattcaccaccataagacactggg

SEQ ID NO: 68456 - DNA, 1326 bp, Homo sapiens
ggcacgagaatgagaggaaatcctatgaatgtaaggaatgtggaaagacctttcttcatggctcaaagtttaatcgacatcagaaaattcatactggtgagagaaactatgaatgtaaggaatgtggaaagaccttttttcgtggttcagaacttaatcgacaccagaaaattcatactggaaagaggccatatgaatgtgaagaatgtggaaaagcctttctctggggttcacaacttactcgacatcagagaatgcatactggtgaggaaccttacgtatgtaaagaatgtgggacatcttttatctggggttcacagcttacacgacataagaaaattcatactgatgcagaaccttatggatgcaagaaaagtagccacatctttagtcaccattcatattttactgaacaaaaaattcataatagtgcaaatctctgtgaatggacagactatgggaacacctttagtcatgagtcaaactttgctcaacaccagaatatttacacttttgagaaatcctatgaatttaaagattttgagaaagcattttcttcaagctctcacttcatttcactcttgtgaaatattatataaaagtgtaggaagggctttattcatgactcattaattgatgtcatttatttttttctcttgaggaacaccacaaatgtaagtaatattggaaggcattttaacagagcacacatccagcagcagcagcagcagcagcagagaattcatcatgcaatcaatataggaaagaaattactgatcagttatcaattgcagaatatcagggtaaaattttatgagatagcatgaattctttttgaatcattctcaaaacattctcatcagagatgttgcataaagaatttatatataatttggccaagcatggtggctcacacctgttatcctagcactttgggaaacagaggtgggtggatcacctgaggtcaggggttcgagaccagcctgaccaacatggtgaaaccctgtctctactaaatatacaaaaattagccgggcgtggtagcacacgcctgtagtcccagctactcgggaggccgaggcatgagaattccttgaacctgggaggtggaggttgcagtgagccaagatcacatcactgcactccagcctgggtgatagaacaagactccatctcaaaaacaaaaacccacaagaatttatatatattcattttggaaatctttcatcttagcaaaattctgttgtatttccacaaaatcatgtaattaatccagaaagcttgaactatgtctacaatttatttggcatgtctgttcatacatcc

SEQ ID NO: 68457 - DNA, 529 bp, Homo sapiens
ggcacgagaatccgtgaacctggtttatttctttatttatttgggttttggttaatttacttttgcagtgttttgtagttttcagtagacaggccttgcataactttttttgaattcatgacaaaagtattttttgttattataaatgaaatgtttaaaaatattttctaattcttagtatatagaaatgcaattgattttttaaaatatattcatcatgtatactgagactttgataaattcatttattagtagctttttggatccttaggattttctagatacacaatcatgcttcttgggagtaattatagttgttctaatctttatgcttttagttctttttattgtcttaatgcactggctaagacctctagtacatatagtacatctagaccatataagagcattgctttgttcctaattttagaggtgaaagtatttagtctttcaccatcacatgtgatgttagctgtaggttgaagtttttgctttgtggggtttttttgttttgagcctgggcagtaaa

SEQ ID NO: 68458 - DNA, 323 bp, Homo sapiens
ggcacgaggatcagctacaggaaaaacacttggagtgctgaaggccggttccggaggctgaacactgttctggccatagcgaactgatcgtactgaagctcagatggaagggccataggaatgcctgcgacggaagcccatgtctcggatcatggaggagaccactgtcatgcaagaagaggaagacgaggagtctatagcagctgcccctggacgtaggggtcgtacagatggagaggatgatgcctcagcatctagcatgctacagctagagcgctgaatagaatgactctgcatgcggcagctatgctttcgcataaagc

SEQ ID NO: 68459 - DNA, 405 bp, Homo sapiens
gcacgaggaaggatttgtaaaccccggagcgaggttctgcttacccgaggccgctgctgtgcggagacccccgggtgaagccaccgtcatcatgtctgaccagggctctgtggattagactcacctctgcttcttggtgtgtggggcctcagctgagatgactcaagtggctgggggctggaacagctagttgtcagatggagtcttgctctgtggcccaggctggagtgcagtggcatgatctcggctcactgcaacctctgcctcctggttcaagtgattctcctgcctcagcgcctcgagtagctgggattacagatgtgtgtcaccacgcctggctagtttttgtatttttagtagtgatgggctttccccatgttggccacgttggtcttgaactcctgc

SEQ ID NO: 68460 - DNA, 330 bp, Homo sapiens
ggcacgagaaaggatgcctttttctatatagcgttacatcctgactctcaatacctgtttgccttcgaagatccctctggccagatgcccagttaacatggacagtgctgcctcagggattttgagacagtccccacttgtttggacaggtactgtcaaaggacctctctgagttttcccatcctcaggtcagggtcttgccatatgtagatgacatactgttttgtgccccaactgaggaagcatctcaggaaggcagtgaagctcttcttaatttcttagccaacagaagatataaggtttcaaaatctaacatcaagctttgccaaa

SEQ ID NO: 68461 - DNA, 344 bp, Homo sapiens
ggcacgagaatttttaggccaccgagcttctataacatggtcatgagctcgggtgcaccatagatttcccaaagctgaggttgcataacccctctgctgaggacagatcttaccgaagatcgcacgaagtgctgccatggagatctgcttgaatgcgctgatgacagggcagaccttgtcgaggatatctgggaaaatcaagattcaatctccactatactgattgaatgctgtgaaaaacctctgttggaaaaatcccactgcattgccgaagtggaaaatgatgagatgcctgctgacttgccttcattagctgctgattttgttgaaagtaaggatgtttg

SEQ ID NO: 68462 - DNA, 452 bp, Homo sapiens
ggcacgaggactcgaggaatatagaagtaacatgagtaaccctatagtaaagggagttgattttatagtgaaaagaccttctcatgaagagaaatccaggatcaaataccttcattgagaaatctactaagcatttatggaagaaatattagcagatctacaaagtttttcaaagagatagaagaggaaggaacacttcccaattcatcttatgagactagtgtcaccccagtaccatttccagagaagaaatacaagaaactacagaccactactcctcttgaacattaacttataagttcttaacaaaatatattcaaaactttataagtaggatcatacatcatgaccaagtagggtttatcttgtggaaaatgttggtttatcattcataacccaagatagttcaccatattacaaaatacatataattgtctcaattcatgtagagg

SEQ ID NO: 68463 - DNA, 613 bp, Homo sapiens
ggcacgagcccatgtgtggggagacccaccaggccctgcagggggccatggagaagctgtggagccgctttatggagctcatgcaggagagaaggtggacttgaaggagagggttgaggaactggaacattgctgcatctagctgtctggagagagacagacaccatcggggagtgggaagccagggcacggcaaagagagctgcacattggtcagaggggccccagcgtctgagtcctgtcctcctgcaggagagtacatcgcactgtaccagagccagagggcagtgcggaaggaggaggagtgcatcagcaggctggcccaggacaagggagaggtgaaggtgaagctgctggagctggcgtggcttgtggacgactgcaacaagtggcatagcagattcctggcagctgcccagaaccctgctgatgagcccactccaggggcccccgccccccagtagcttggggctactgacaagccaggaaagcccaaaccccaggctccacaagcagatgagcagacaaggagatgaacagatgagcagaagaatggcagaccagtgcagcagagacaagagaagtagtgactgaacgctgagaagagtttggcc

SEQ ID NO: 68464 - DNA, 399 bp, Homo sapiens
ggcacgagctggggctaccagcccggcggcaccatgttcaccagcaccggctccagtgggctctgtgagtaccggcctccgccatcctggctgtcccctacacgccaccctaggcacctctttgaggaggctggggcagcggtgaccctcgggtttgccggaggtggtggggccgaccctccagacccgcgtccgaaccctgctagttcccggtcttgggggtcaacggaaaccgtccccatttcggcctggaggggcgaatggggaccaagccccgccgtccgccccgaccccacctggtatccccaggtgcgcttgccagaagtatcttgacaccagtagtaattggcctggtgccctggtgccctaacttgtcataccggaatgtctctaattccg

SEQ ID NO: 68465 - DNA, 359 bp, Homo sapiens
ggcacgagatataagtaacataatacaggtaacagatacaatatatgtgatttgcaaatagtttctcccattctgtgagttgtcttcactttctgtttttaattttgttgaagcccaatttattattttttctttagttgcttgtgcttttggtatcatatttaagaaaccattgccaagtccaaggtcagggagatttacccctatgtcttttctcatagtttgagctctttatatttaggtctttgatcacattgagttaatttttatatgtagcatgagggaacagtccaacttcattcttttgcatgtggatatctagttgtcccagcatcatttgttgaagaggatattcttcc

SEQ ID NO: 68466 - DNA, 331 bp, Homo sapiens
ggcacgaggatgctcaatggccttgatgtcctccgcaaagtaaacatgtgaagtactctggggattcacatgatagtgcgacgtgcgagtcttctgactgtgtgccgactgttatacttgacctttgaagactgggttcatactatgactgctactcagattacccctgtctcattcccgcaataatgtcaccctttatataccacaatgataaggtacaaccccagactctgtcgactatcgcaagacaggatatgttactcctgacagaaatcatgctcattgcggatcctgctgggcttttatctctgtgtttgccctggagggccac

SEQ ID NO: 68467 - DNA, 399 bp, Homo sapiens
ggcacgagtgttattggagtcaagaggaggtaaactcaaaacacatctcattttgtcatgaaaaattcagctagtttctttggaatttgaagtgtacacattataaagacttataaagcttaataagttaaattgaaaggattattaattgatttttctgtcctttgtatttcaggtatctatcacttccaaagttcaggagcttcagaacttattattaggaactgaggatcagatgaataccatgaatgctgttctggaagaaaatgagacatgaccatacctatacaggtaaatttgtacacgtgatataatttgctgttacaaattacttgtttatagtctctttcgtattaattcatcatactcttataactatcagtataaatagcgtggacg

SEQ ID NO: 68468 - DNA, 657 bp, Homo sapiens
ggcacgagagcttcaatacctggtatttatcagtagcaaggcttggcccagctagaagttggaagatggggagacctagtcagctggggaaaataacaactataatactatcctatagctagatctcttcaaccacagagaaggaaaatggtccaaaattccatatgtataggccttttttgccctgcagaataaccgcaagctctgtcagcaatgtataatagaccttgcacttatagcagtgatatccagccagacttaatccagacagaagggaaaaaacagtctgcctccttagaagaggagacagaggcccctgcaccagcccaggtcccagctcctcttggatcatctcgtcccccttatccaggcccccttttgaacctcatcctgttagaagagttcgacctggatgcgctccagcatcacttcttcctttacaggaaatgcatagtgaatatggtcctatcaaagtacaagtccccttttctttacaagatttgaggcagataaaaagaaatctaggacaattgtgtcgacctggataggtatattgaagcctttcagaaccttaatcaaatgtctgagctttcatggaagggtatcatgttacttctcaactagactcttagagcttcagagaagcaggcggcttta

SEQ ID NO: 68469 - DNA, 348 bp, Homo sapiens
ggcacgagattttcatccaaaacaaacactggacttcctgcggagtgacatggctaattcgaaaatcacagaagaggtgaaaaggagtatagcacaacagtatctagatttgacagtagcccggaacaagtggaccctgatgccgaagtcgatgcagccccatctaccacatcttcatgtggacattgagattcacacgctggctcctgaagggtgctcagtctccttggtgattaaggtcctgcttgaactggtgccaactccatggcagggaagttgcttttggttgcctggctgggtttcccagatcccttctggggcaaggagctatcagaccctgctttcaag

SEQ ID NO: 68470 - DNA, 426 bp, Homo sapiens
ttgcctagcacatggcagggtgcagcgcctgtctgaatgtgtgaagagttcttagtgatgggtaaagggtgttcctgtgtgttttagattctgctcagcaatcctcagatgtggtggttaaatgattccaatcctgaaaccgacaaccgtcaagaaagtccttcccaggaaaacattgaccgagtgagtgacaggcctttgtgccctcagcttggacagcctcgggtggggttgcttggggtaacctgggtgaatcaggcagcaggactgggggagtccgtgctgaaaccttggctcccaggctccaggtgtaacctgcccacctcagaggccacccacgcagtaacagagggcaggggaggcctccttggaaagcaggaaaactggggaagtgtcaggaagttctctttaggtttgctgcctttg

SEQ ID NO: 68471 - DNA, 417 bp, Homo sapiens
ggcacgagcggacatcgagaaagggctgcagttcattcagtaagcctgcatgcggcaggggctggacggctgggtgggcaagggtgggttctctgagagccatgccctcccatcgctcccttttcttgctgctgatcctttgctgccatccctcctgtgtgccctgttttacttttcttgtttttcattttccaatgttacgctatcttttttttaactgctaatttccttttgtttccctcttctcgtttccttctctcttcttttcttttctcatttttatctctttaatcctttcccttttctctttttcacttctcattctgtcttctccctcctttttcccctctttcctcttctcatccattattctccatatctgctgactattcctttggtccttcttttcttctctct

SEQ ID NO: 68472 - DNA, 379 bp, Homo sapiens
ggcacgagattaatacatcaaaatttttgcatatcttattaatgtatcgaataattaggctaaatttttgcataacttattgatacatcagaaggtcaacaacatgaattcaaggatgcctatgttctgttgagtgaaacagaaatgtctagtgcccagtctattgtacctactcttgaaattgccagtgctcagtatacacctttggttgtcattgctgaagatgttgatggagaagctctatgaaccttccttttgaataggctaaaagctggtcctcaggttatagcagtaaaagctccaggtttgttgacaatagaaagaaccagcttaaagatatggctcttgctgttggtggtgcagtgtttggagaaggggg

SEQ ID NO: 68473 - DNA, 361 bp, Homo sapiens
ggcacgagactctttccacatctattcaacactgtgtgggaggttctagcgagagcaatttggcaagcaaaaagaataaaagtcatccagattagaaagaaagaagtaaaatgatctctatttggagatgacataatcttgtgtaaagaaaaccctaaggaatacacacacacacaaaaaaaaactattagaggtaataaatggatgcagcaaaattgcaggatgaacgattatatacaaaaatcaattagttccatactccagcaatgaacaatctgaaaataaaaatttaaaaaaaatttcatttataataacatctaaaaaaataaaatacttgggaatataacacctaaagtgcact

SEQ ID NO: 68474 - DNA, 371 bp, Homo sapiens
  misc_feature (1)...(371): n = a,t,c or g
ggcacgaggggacttcacaggctcggagtgaggattgaatgatgcagtttgcacagagggcttagcacaggacctggcacattgcaagggccccaagcaacatgtgggaaggggcgtggaacaggtaacagccggccatctgggatgaaggccatggngtgggccgtggtcataagggttgggtcccagatgacaagggcagctgaatggagagggtgcagtgcagccgcacctgccctctcggccacctggctctgcagggagtggtgaccatcaacaagaagaggaaccttgtggtgtctgtggacgacggtggcaccttttagtntgtttgcaccgantgtggaangggacctcgntccaccaggacc

SEQ ID NO: 68475 - DNA, 392 bp, Homo sapiens
ggcacgaggggagaaggcggggctgggcctcagcttcccaaaggtttttgaggaactgggcttttctgacaccctcaaaggtcagaaggttaaaggggcagaaggcattcggaaagctcccctcccacagtgacacctctctgacttctgacctagggttccaccaccgcttcaatcccaatgcctccagctccttcaagcccagtgggaccaagtttgccattcagtatggaactgggcgggtagatggaatcctgagtgaggacaagctgactgtgagtggcctttgactccaggaagcctcgagcctgggagaaccctgttgtctaagatcatctggcttagggaggggcttgaggtgcaggggcttcctgagccgatggatggggctt

SEQ ID NO: 68476 - DNA, 388 bp, Homo sapiens
ggcacgagatgctgttgaaaagttgatttgagaaggaaatgccaataaagactcaaaagaaaatactagaaattaaaaagaaaactaacagaaacaaggaatgcctttgataggttcatcaatggactggacacagctgaggaaaaagatcaatgagctaaagatatgtcagtagaaacctctcaaactgaaatgcaaatagaaaaaaaagactaaaaaataaaacagaagagaatatccaagaactatgggacaatttcaacacaagtaacatgtgctaaattggaataccagaagaaggaatagagaatgaagcagaagaaatatttgaagtaataatggcagataactttccaaaattaatagacaccaaacaatacatccaaga

SEQ ID NO: 68477 - DNA, 386 bp, Homo sapiens
tgcatgtttactttattagagtaggaaggctactggcattaattattaataccaaatattttagccttaaatttttgtcattttaaaatctgatttaatgttttctgctgtttaaggtcttgggaggctttcaattgcattttatatgacagaatcactcttttttgtgctatttatggtcttgcttatatataacctttacttgtttaaattgtgatttttatacctttccacttctcagttctatatttaactttttttattattctttatctttgtttattttatgttgtacttcttcgttttttattttattacgttctgcttttatgactcttttgtttctagtattcttttctttattgcttactttatttatcctgttt

SEQ ID NO: 68478 - DNA, 370 bp, Homo sapiens
gctgatgttggggagacggacctcagtgtgttttatattgtctggtgttaagatgataaattacttggtgattacgagcaaattttctatttgacaaagcccttggtggagtccaaatgatttttctgtactatattgttcttttacacatacctatgttatgattatattcacactttcatatacattgttctcttacacattcgttttataggtattatctttcattttcaatgtgtttcttttactatatatttctctttatattatactcttttacttatatttattattttctttttattttcttattctaatcttttactattattaatattatttttttttctcttctttttatattatttat

SEQ ID NO: 68479 - DNA, 1175 bp, Homo sapiens
ccgcgttcttctgtagtgtggcgatcgtggctgtagctggagcagcaaatggcacgtaactggccccgtaaatcccggcagtaggaattctctgaacgtttggagccaccgtgtatactggagttattgggcggccctggaaaggtggtggcgtcgacacagtgggaatgacagcggctgcggcggctgctttcctttcccttcatgatatcggctatatataccacggccagcagaatatcccccgaggtaggaacccctaggccctggggctctgttgccagctgcacctcgccctcggcctcttatgctgcctgctttcacaaagtagtccctgttgggcccaatgagcgcgttgtaggggtagccgtagtaggccagtgtgtaggggtcgcaggagtacacgtagctgggctgggtctcggctgcacagcaatgggacgtgatcatgtgctccactgatgtgagtttatgccatcttcaatcattttaggggctggagctgctggaaacatggaatactgagccccaatggcagggatggctactgtaccaggtttaatggcaactgggttgacggtagggatttccaaattcggcaccagttcatatcctttttcttgctgctttcctttcccttcatgatatcggctatatataccacggccagcagaatatcccccgaggtaggaacccctaggccctggggctctgttgccagctgcacctcgccctcggcctcttatgctgcctgctttcacaaagtagtccctgttgggcccaatgagcgcgttgtaggggtagccgtagtaggccagtgtgtaggggtcgcaggagtacacgtagctgggctgctgcgctgcctcagccgcgccgccgcccctggctgccttctggtagcgcgagtactgctccttgtccacgggcttggccagcgtgacctccaggcacgagccctccagctcagtgccggttgagttgttcatggcatgcacggcatcctcgcggctggtgaagtgcacggaggcgtaggtccggatcttcttgacgcgctccacgcagccggggttgaactggccgaagctcttcttgatggtgtcctcggtggtctcgatcatgaggttgcgcacgtagaggatcttcacggtctccatcacgtcctcgtccacgtcgat

SEQ ID NO: 68480 - DNA, 436 bp, Homo sapiens
ggcacgagtgcttatcaaaagacaccattaagaaatcaactggcaagctgtagaataagaggacatattcgcaaaccatatatctgacaaaggacatatccagaatgtatagagaacccataaaactcagtaataaaaagaagaacctaactaaaagacagaaaaaagacttgaagaaacgccggacaaaagatggcccaatacatacatgaaaaagtatacatcatggatcatcagaaaaatgcagtttgagactataataagatactactacgcatacccattagaacagctaaaagtagaagattgacaacacaatgaaaagattggcaagtgctggtgaggatgtgaagcaacccaaactctcatacattattggtgggggtgtaagtaaaatggcacaactactgtcgacaaagggcttgaagttttctgt

SEQ ID NO: 68481 - DNA, 669 bp, Homo sapiens
  misc_feature (1)...(669): n = a,t,c or g
ggcacgagacagactccagtaataaaaatcagaaatgaaagaagacattgcaactgatgatacagaaatacaaatgatcacaagagatttctagaaacaactatataataataaaatttgacaacttcaaagcaatggataaattcctaggaatttaccaagcctgactcatgaagaaataaaaattctttgtagaccaataacgagtaaggagacgtaatctgtaatcaaacaggtcccaacaaggaaaagcttaggaccagtgacttcactgaagaattcttgcagccatttaaagaactaacaaaaatccttctcaaactcttgcaaaaaatttagaacaaacctccaaattcatttcagaagtccagcattaccctgataccaaaatcaggcagatactttaagaaacgaaaactacaaaccaatatccctgatgaatgtcgatgcaaaaatcttcagcaaaacactagcatgcttaattcaacaacacattaagagttacaccaattacttttagaatgcaagaagatggttcaatatatgaaaatcaaattaagacatcacattaacaaaataatgggacaaaaaccacatagggccagggggcagtggcttcatgcctgttaatttccagtactttggggagcccgtgggtggggcagnttc

SEQ ID NO: 68482 - DNA, 321 bp, Homo sapiens
ggcacgaggagccaggagggcctccaggggttccttgtggaggctcacccggacaatgcctgcagccccattgccccaccacccccagccccggtcaatgggtcagtctttattgctctgcttttaatacttcactgtattttgacctcacggattttcgcgtccatttggctatatttattgactttttactacaatcttccttttcatcataattgctctaactttcatccttgttttaacctctttcattttattcctatttttctccatgacttatcatcccctgctcaatccctttattattttatatttacaatg

SEQ ID NO: 68483 - DNA, 439 bp, Homo sapiens
  misc_feature (1)...(439): n = a,t,c or g
ggcacgaggaaatgcggattaaaagatggcccactgtgagtgagctagcaatgcctgatctcccttggtttaatgtagaggaagggatccaaaggtttaaggggattgggatggtggagtggattagtcactttagacagactcatcccagctggaagggaccaatgccttgtgcaatagatttgtgagagcagcacctgcacctttgaaaagccctgtaattgcttttctctagatgtcagatctaatggtgggaactgcagtcacttaaatacaaaatttaaatccatgcctatatttgttgcagcactatttacaatagcaaggtatgaaatcaacctaagtgcccatcaatggtagactggataaagaaaatgtagtacatatatatcttggaatactctacaggtataaaaagaatgagatcatngtctttgca

SEQ ID NO: 68484 - DNA, 603 bp, Homo sapiens
ggcacgagggaagctgaacaactcatcatcctgccagcactggcgaacgttctctttggtgggcggtgaaaggaggatatatgtaccacagcctgcatatcccttctccaaaatctaccccaggggttcaggtatataaccctccctgaacccagcttctgcgttttcattctcaaggcctctctgagttgaccagatatgataaggtctcttcttgcaaagagttacgggggactgtggagtgtgatgagtcatccagaggggccattaagggattatggagacctcggggaaccactgaccagccagggcactcttctggccccagaagatctgatcaaagtcttctaggcagttccaggagctcaggagggtgtaaacacgtttgagggccatctgcaaagccctaggacaggtgttgaggcttaactcatcagctgatccctcagtccctcaccgtctatcatcattcttggccctcccagcccttatttcacttcgagggctagcctttttctcaccctgccttcagtgtccattcaaagtccagcctcttctcctcatggaatctcatatttggaggtagatcatccttacgggctg

SEQ ID NO: 68485 - DNA, 332 bp, Homo sapiens
ggcacgaggacatctaccgaccctactttattttttaggaaaactttgtagcggccttatcaaggtccagcccagagcattgcacagaggctgtgccatgtaaacactcactgaccccatggcgagtgactcccttctcacctttgcttgtgtctgctagagacagaatggatgaagcggaaggcgtctcggaggggagcataggaagaggaggaggaggaatacgactactctggagaggacatgaaggctatcatggagcgtcacagagaggaactcaggtactaccaacttgtgaaagatgatcttgaaagattagatggaatagccag

SEQ ID NO: 68486 - DNA, 373 bp, Homo sapiens
cccacgcgtccgctcctgaccgggccttcagggtggacagagggaggatcggtcatggcagccacacctgggcctggccttgctccgggacctgccagaggagctggcctggctctgtgcctgcctgcctccaggagcaggacggtggctgggagggtagtgactggggacacaggtgcaggtgttagtgcaggaccggaagggtgaggtggcctggtcctcggggctcctggcctgggctggctgaggcaggactctgccaaaagtcccctgccaggcctcatggtggtgctcctggtggcagtggctctctggccgcgggccctgtctgtgtctccgtggtggctctcacagggctctccagacactcctg

SEQ ID NO: 68487 - DNA, 335 bp, Homo sapiens
  misc_feature (1)...(335): n = a,t,c or g
ggcacgaggctgaacttcaggtggatgatgagacaaaatagaccgataggaatcgtctggctatatactccttgttgccactgctgagtgactagactggcccagagatccgcggtgcacatgctggccgctcctccctcagaaaaaggcaatggcctaaatactgtttaaatgacctgactcgatgctgtgggaaactggctgctctgctgcatgccgtgtgactgtcagtccaaccgttacatttgccacgttctccacacgggggatagacgcaatgcgcccaggtcccagttttctttggaggcagcagctctcgcagggctgaatgttgn

SEQ ID NO: 68488 - DNA, 543 bp, Homo sapiens
tttgtagaaattaaaaactggttttaagattcacatggcatgcagatgatctagaagatccacagtaactctcctgctgtgcagctggttcctaacaggtcatggacctgtccatggcctgtaggttgggaacctctgctacagaggatccagatttaaattcagaagaagcttcatctatttctgtagtttcattttcttgcaataactgctgcatcaaacttgaacttcgcaggattttctgaagctgctcaatttggccatcttgctttttaattgtatttcttaacactagaattttctatttcaagtttttgtacgtggccttgcgtctccttagtacattttatagtcgctgtaagttgattccatttttcttgaaattgaattctcatctgacctaatttcttccttgaatcctacatctcactttctcaatggacgcagtgacgcaatgaagcatccagcaaagcttttgttgttgattgtttaggacgtcaccctgtttttgttgaagttgtctcacaactacttctctttctg

SEQ ID NO: 68489 - DNA, 403 bp, Homo sapiens
agatgaaggtgatgaagacaggttggacaatgcagtcaggggccctgggcccaaggggccagttgggacggtgtcggaagctcagcttgctcggaggctcaccaaagtaaagaacagccggcggatgctgtcaaataagccacaggacttccagatccgcgtccgagtgattgagggccgacagttaagtggtaacaacatatggcctgtggtcaaagttcacgtctgtggtcatactcaccgaacaagaatcaatatcatgaaactaccctatttttgatgaagtagtatttcaatcagtcaatgttatcccatctgattacgtgcattagatatccggcatccaggtgaattccttcgaatttctgacaattaccttataaatcgcatgtcattgataacg

SEQ ID NO: 68490 - DNA, 346 bp, Homo sapiens
ggcacgagggaagagggaacgggtcctggcggtgctttgcaaagggcccgtgtttctgttgcgggaagctcccgggggtcgcacgtgcgtcctagcccacgcccctcccctccactccccttcctgcgtgccccggacccacctagcggatacgctcttctcctccctccttgacgcctctcgtccctccaaaccatctcctcctacatgccctcacttcgcctctttcccttccatcctcacctctctccccaccccgcattgccatctcctcatcccgactcccacgactccatctctgctcgccgtctcttccccccctcatcctctcctctctctacccccg

SEQ ID NO: 68491 - DNA, 1672 bp, Homo sapiens
atgaaccctgattacgctaagcttggcacgaggaaggcatcctagaggagacaggtgaagatggacttcctgaaggcttccagcttctgcagatcgatgcggaaggcgagtgccaggagggagagatcctggccacaggcagtacggcatggtgctcggcatttgcccccagcacagcaaacgtttcctgagagctctaaccaaagacaaacttttggaagccaaacactcaggaccaagactatgtatcgatttgagtatgacccactacatgtcaaagaaggtagaacatccactaagcctggaattcctgctcgccatgagggaggcccagaagggtacagctttccgaagaatatggtcaactccagcttctgggattccttagtaaactagaattaagtagactggctggacagattcgaaggttgtatggttcaaacaaaaaagctgacaggccattttggatctgcctcactggattcacaacagacagtcccctttatgaagagtgtgtgaggatgaatgatggattttctagttacctgttagacataacagaagaagactgctttagtttatttcccttggaaacccttgtgtacctgactcctgactcagaacacgctcttgaagatgttgatctaaacaaagtttacatcctcggtgggcttgtggatgaaagcattcagaagaaggtgacatttcaaaaggcccgggaatactctgtcaagaccgcacgcttgccaatccaggaatacatggtcagaaaccagaatgggaaaaactatcattcagagatactggccatcaatcaagtgtttgatatcctgtccacttacttagagactcacaactggcctgaagcattgaagaaaggagtttcttcaggaaaaggctatattcttcggaactcagtggaatgatgggcctaagattgcagctgcgtggccaggtgctcacgccgtaatgccaacactttggtagaccgaagtgggcagatcacctgaggtcaggagttcacgaccagcctggccaacatggtgaaacccttctctactgaaaatacaaaaattagccaggtgtggtggcgcatacctgtagtcccagctacttgggaggctgaggcaggagaatcacttgaactcgggaggcgaaggttgcagtgagccgagatttcaccagtgcactccagcctgggtgacagagcaagactccatctcaaaaaaaaaataaataaaaaaaaatgcagctgcaggagtgaggcgcttggaggtaccttgacccaaaaagcagggcagagggtggcagtggcacataggcaagtgtctttgcatgacatcttctcagagcttcacaataatgtcagggaccacatttaatgctttttaatctcccatagtgcctggctcacaggaagtgctcagatatgttaagtaataaaaagttaatgtggtgggtgcagtggctcacgcctgtaatcccagcactttgggaggctgaggtgagtggattacaaggtcaggagttccagaccagcctggctaatatggtgaaacctcgtctctactaaaaatacaaaaattagctgggcatggtggtgcgtgcctgtagtctcagctactcaggaggctgaggcaggagaatcgcctgaacccgggcggcggaggtt

SEQ ID NO: 68492 - DNA, 326 bp, Homo sapiens
tttgtttcaagaaatttttcagttgtctttcttaatgtcttcattggcccattggccattcaggaacatatttttttatttccatatatttgtatagtatctaaaattcctcttgttattgatttctaattttcctttgtggtcagagaagatgcttcatattatttcagttttttggaaagttttaagactcgtttattgacctaacatatggtctgtccttaagaatggtctatgtgctgaggaaaagaatgtgtattctgcagctgttggatgaaatggcctataaatgtgtattagatccatttggtctatagtgtggattg

SEQ ID NO: 68493 - DNA, 689 bp, Homo sapiens
ggcaacatacattgtggactttggcttcagtacaacattcagagaggggcagatgctgacagctttttgtggcatgtacccctacgtggccccagaacgctccctgggccaggcatgccagtgacccgccagggacatacaaagcctcagtgtcatactgtatttcaggaatacagtaggtagaagggccaggactttgcccttttactcagggaagcctccaaacttcaagaaaaaattctcacaggaagatatcatgccccaccacttcttgcccttcaacttgactcattaaaaaattactaatgctgaacgccaggaagtgtccttcactgtaactgatgaaaaatccatgggtgaaaagtagccagaagatgccactgataccatacgaagagccactcctggaccaccccaaacaatccagctcatggtggccatgggatttcaggccaagaacatctctgtggcaatcatagaaagaaaattcaactatcccatggccacctacctcattttagagcacacaaaacaagagaggaagtgctccaccatcagagaactgtcccttcctcccggggttcccacctctccttccccatccactgaactttccaccttccctctctcactgatgcgggctcatagggagccagcttttaacgttcagcctcccgaagaaagccagg

SEQ ID NO: 68494 - DNA, 1683 bp, Homo sapiens
tctcagtacccgcctcgactatctgcggcgatacttctgccgagtcacgggatgaggacgccctatctgaataggatgatgtgttacgcgaagctgctaagtatgaagacgtgaaagaatgtggaaaacatgtagaaagagctctcctagtggaacttaataaaataagtctcaaggaagaaaatgtatgtgaagaaaaaaattcacctgtggatcagtctgattttttttatgaattcagtaaacttatcttcaccaaaggcaagtctcctacggtagtgtgcagcttatgcaaacgagagggtcatctaaagaaggactgtcctgaagacttcaaaagaatccagctagaacctctgccaccattaacacccaagtttttaaatatcttagatcaagtctgtatccagtgttataaggatttttctccaacaattatagaagatcaggctcgtgaacatattcggcaaaacctagaaagtttcataagacaggactttccaggaactaaattgagcctgtttggctcctccaaaaatggatttgggttcaaacagagtgaccttgacgtctgtatgacaattaatggacttgaaactgctgagggattggactgtgtcagaactattgaagaattagcaagagtcctcagaaaacattcaggtctgagaaacatcttacctattacaacagcaaaggtgccaattgtgaagttcttccatttgagaagtggtctggaagtagatatcagtttgtataacacattggcccttcataacacaaggcttttatctgcttattccgccattgatcccacagtgaagtatttgtgctataccatgaaagtgtttacaaagatgtgtgatattggggatgcatttagaggcggcttatcatcgtatgcatatactcttatggtgctatattttctccagcagaggaatccaccagtcattcctgtccttcaagagatatacaaaggtgaaaagaaacctgaaatatttgttgatggctggaatatttatttttttgatcaaatagatgaactgcctacctattggtcagaatgtggaaaaaatacagaatctgttgggcagttatggttgggccttcttcgtttctacacagaggaatttgattttaaagaacatgttattagcatcaggagaaaaagtctgcttacaacttttaagaaacagtggacctcaaaatacattgttattgaaggctggaatgcaatggcgcaatcttggctcactgcaacctccacctcccgggttcaagtgattcttgtacctcaccctcctgagtagctgggattacagatccctttgatttgaatcataatcttggagctggattatcaaggaaaatgacaaattttataatgaaggcttttatcaatggtagaagagtatttggtattcctgtcaagggatttccaaaggactacccctcaaaaatggaatacttttttgatccagatgtgttaactgaaggagagctggccccaaatgatagatgttgtcgaatttgtggaaaaatcggacacttcatgaaggactgtcctatgaggagaaaagtaagacggcggcgagatcaggaagatgccctgaaccaaagataccctgagaacaaggaaaaaagaagcaaagaggacaaagaaattcacaacaagtacac

SEQ ID NO: 68495 - DNA, 707 bp, Homo sapiens
cccacgcgtccggatggaccccaggaaccacccagaccttaggacaggggacagcatgggacacagttgcttccactccaggaaccagcgagactacagcttcagctgagggaagacgaaccccaggagcaaccaggccagcagctccagggacaggcagctgggcagagggttctgtcaaagcacctgctccgattccagagagtccaccttcaaagagcagaagcatgtccaatacaacagaaggtgtttgggagggcaccagaagctcggtgacaaacagggctagagccagcaaggacaggagggagatgacaactaccaaggctgataggccaagggaggacatagagggggtcaggatagctcttgatgcagccaaaaaggtcctaggaaccattgggccaccagctctggtctcagaaactttggcctgggaaatcctcccacaagcaacgccagtttctaagcaacaatctcagggttccattggagaaacaactccagctgcaggcatgtggaccttgggaactccagctgcagatgtgtggatcttgggaactccagctgcagatgtgtggaccagcatggaggcagcatctggggaaggaagcgctgcaggggacctagatgctgccactggagacagaggtccccaagcaacactgagccagaccccggcagtatgaccctggggaccccctggg

SEQ ID NO: 68496 - DNA, 475 bp, Homo sapiens
  misc_feature (1)...(475): n = a,t,c or g
tttgtggttttaatccttatgtctttttggcagctaaggcggaccagctccaggtaagcaatactcaattgaccttaaatcttgctggttatatcactgcattaatcatagcacattgcaaacatgtaatatctctactttgatatctgggtcacattcctgggctatggattctcattaatctgtctgagccttgtgatgccacccctgtttggcactttgtgaaacttcttctaactaaacttactcatcatgcctgtagagcctcaggcatcataatttttgctattgtttctttggtcacactaatcacttctgctgtaatgtcctctgtagctttgcatagttctgttcaaatgggctcagtatgtaggagggactgggaggcatgcagccaactaaggcatgggctactttcagtgttaaaatttaacactgaggttacaaactgaagtngggtaatgtttaaantccc

SEQ ID NO: 68497 - DNA, 2032 bp, Homo sapiens
tttttttttgggtgatcaagtcttgattaaatcattcattcattcaacatttattgagcgcctactgtgtgctaggcgaccgtgctaggcgcagaaatacagagatgcataagatacagtccatgcccttaaggattcacagtctagaaggggagacaaacatgtaaacaagtaaaatacagtgtgataagtgccacaagagaagcattgacaaagtgcagaggtagcctggaggggaggggcacaggggttgccttcctggaggagggggcctttgaggggatcgtgagagatgaacttgccaggcagacaaggcaggaggagcaggggaaggcattccagtcggaagaaacagcatgagcgaaggcacagaggcatgaaactgcatgtcttgcttggtgagtggggaactctaactagtctggtggtattgctaaagtgtactagaggctgtggctagagaagggggcagaggccagatcatgaggggaaactgagggcaggggcatcttggagggtcaccagaggtgagcagagcccgagggcaggctttgacacaggaaaagagggctcctggctgactcaaggtacacctgcctgaggaccacagggttcctcgctgtggctccaaagggatctcgacccaagagtagaggagcagcagagctggaggtgaagcagaggggtcgggccaggtctgggacccagagctgccatgcactcccgcgctctcacagacttctgatttccaacctgcacgtcagagccccctcctgccagccggatgggggcctggatccagtgggaaatcacatgggaatatggctggcaaactgcaaagggccagatgagtgtcaggttacagaataaatctttactaactcaaagaagaaaagggctgcggataaaacaggaaaggttagatggaggaaggcgggcagacgggcctaagaacaagggccaaaatgagaatacagcatcggccaaagaggaccgtggctgtctctcccctggcaaggaggggcccttttggcccagggcagaggcagaggccagtgggtacaaccaggccagatgtgcaaggagagcatgtgacctgcaagactgtggggctccacactccagactccagtgtctccttagcccaatgaggagaggtttccttggcaatcaggaccctccttcttccaggctgtagggaggccactgaggcagagagtggccagccagcattccagcccttcagtgttcttaggaatggctctgtctgaaaaatggctttgcagggatgggtggggcagggaggctgtgggaagagggcagagtctcaggacaccagagtccagctgcccatctgagtggtgcttttgtaaggcatcacacttgaggccactgtgaggggctgagcttctttcccaaccatggatgggggaagggcaagatggaccctgggttccagggctacagtgagatgaggcctcctgacggagaagctaacagcagcccccatgtccttgctgccgtcccaggagtagggaaggaggaggggaccctcccagttggtagggtctggagatgtcccgagacccctcctttcctcttgccgttgatgaggcagcctcgcgctgcggggttcccagcctccaacaggcccccttcttttggcctcacagtctcatcgcctgatccctcccctcccctgagcagtgtggggggatgatgcccgcttgggtgccgatggagttggtggtgttagcgatgagaaggatgatgaggtgttggtggtggcggcctccccatgcggggagtgggctgggctgggggcgctgggggcatcacttgctcttgtgcatatccttcagccggcggagctcttccaggagctgggcccgggagtagtcatcatccccagtggggcccggccccggccccagagcctcctgtagcgccaggcagtgggttctcaggaacgggttgtaggagcgctcctctcccagggtagatgggcacgtgcccttgcgctccagccgct

SEQ ID NO: 68498 - DNA, 675 bp, Homo sapiens
gcggccgcacccagggagaggccgcggggcctgttggggctgggtttcaccgccgcacatgtgtcagcgtgcggtgagctgaggcccctggaggctctgggcgccgaatctcacccgctgccatggccaaagccggggggtgattttcaaccaatgccgggtggtttcttttttgatctaatggttaagagtgtgttaatttctatgatttttaaattttccagttttctttttgtttttgatttctaagttcatcccattgtggtcagggaagatattttgctgtcttttaaaatcaattcagacttaatttatgacctatcttggaatttatcctatgtatacttgagaagaatgtgtatttcattgttgggtagagtgttctgtatatggttgttagatctagttggtttattgtgttgtgaaagtcctatatttccttgcttagattttgatggttctatccactactgagattgggatattaaagtctccaactattaatgtagaattgtacttctcccttcaattacgtcaatttttgtttcatatatgttgatggtttgtcattaggagcatacatgtttacaactgttaaaccttcttgctgtattgaaccttttatgttttttatttttttaagacaggatcatgctctgtcgcccaggctgaagt

SEQ ID NO: 68499 - DNA, 671 bp, Homo sapiens
aaactattttaaatgtttttattttatcgaatagaaataaatctcacaaaatatgcttaagaactttaagcggaaaccataaaatactattgtgataagttaaagaagacctaaataaatggagagatctgtcatgctcatggattggaagattcaatactgtaatgatatgaatagttcccaaattgttctatagattcaaaacattgccagttaaaatctcagtggactttgtttttttgaaactgacaagctgattctgccatttataataatattcaaaggggcaagaataaccaagacacatttgaagaagaacaaggaggaagaagaacgtatttgaagaagaataaggaactctattaagtgtatatctcctatatattgagatacacatttgaaatacatctatcacctagatattgagatatattatacatttaatatagtgtgttgctggtatagggatagaaaaatgaacattggatcagaatagcactgaaacaagatctacccctatatgggcatgtccctattaacaaaaaaatattggtgattatttccgcaagatgatctgtaaaaaacaagttaattgaacatccatatgggaaaaaagtgaatccttctgctacctcaaatatcaaccccaggtagattatagatctaaaagg

SEQ ID NO: 68500 - DNA, 781 bp, Homo sapiens
gcggagggcggaggccctgagcccggcgagcaggagaggaggtcttccgggccgcggcctccgagcgcgcgggatttgcagttggccttggcagaattgtatgaagatgaggtgaagtgcaaatcttccaagtctaatagacctaaagccacagtcttcaagagcccacggacaccacctcaacggttttactcaagtgaacatgaatacagtggattaaatatagttcgaccttcaactgggaaaattgtgaatgaacttttcaaagaggcaagggaacatggggctgtccctctgaatgaagccacaagagcttcaggtgatgataaatctaagtcatttacaggtggaggatacagattgggtagttctttttgtaagcggtctgaatatatctatggagaaaatcagctgcaagatgttcagattttgcttaaactgtggagcaatggtttcagtttagatgatggagaattgagaccttacaatgaaccaacaaatgctcaatttctggagtctgttaagagaggggtgactctcattgcatgtatgcctgaaattcagcaacttatgttagaaatcttttaatgtggcattactgctggcagaagatttcaaaaggttagtttgaagttataatttgtgaaagtaaactcagatattcagtgctctcacccatccaaagaacattgtaacttaccagctcttcttgctaaaggatgaggaatcaagtgattttgctatgataataaaagcttttctgtgttatgattaaaaaaaa

SEQ ID NO: 68501 - DNA, 464 bp, Homo sapiens
aattgagcgctatcgatgaggctgtagttaccggctcgacccacgcgtccgaaacaattcatcaaagttgcagcatgcaaagtcaatatggagaaatcagttgctagtgtaaaaaatagaaaaggaaattttggaaacaatccaatttaacagcatcaaaagaataaactacttaggaatcagcttaaccaagcaggtggaagacttgtagagtgaaaacttcaaacaccctttaaagaaattatagatgacataagttattagaaagacatcctgtgtttatggattggaagacttaatattcttaagatgtcactactacccaaagtgatgtacaggtttgatataatccctaccaacattccaattactttgtataaatagaaaaatccaccataaatttcatatgaaatttccagagatcccctaattataaaaataaaaaggaagagccaagttggagt

SEQ ID NO: 68502 - DNA, 2398 bp, Homo sapiens
cccacgcgtccggtcagcctcagtcttcaatgagggaccccgtacagagtaacccaaacgcttgttcctatttcaggatgtgaacactctgcaaggaggtgggcagcctgtggtgactccgtccgtccagccctctcttcagccggcccatccagcgttaccacagatgacctcacaggcacctcagccatctgttactgggctccaggcaccttctgctgccttaatgcaagtgtcatctctcgattcccactcagctgtatctggaaatgcccaatcctttcagccctatgcaggtatgcaagcctacgcttatccccaggcatctgccgtcacctcccagctgcagcccgttcggcctttgtacccagcaccgctctctcagcctccccatttccaaggatcaggtgatatggcttcatttctcatgactgaagcccggcaacataacactgaaattcgaatggcagtcagcaaagtggctgataaaatggatcatctcatgactaaggttgaagagttacagaaacatagtgctggcaattccatgcttattcctagcatgtcagttacaatggaaacaagcatgattatgagcaacatccagcgaatcattcaggaaaatgaaagattgaagcaagagatccttgaaaagagcaatcggatagaagaacagaatgacaagattagtgaactaattgaacgaaatcagaggtatgttgagcagagtaacctgatgatggagaagaggaacaactcacttcagacagccacagaaaacacacaggcaagagtattgcatgctgaacaagagaaggccaaggtgacagaggagttagcagcggccactgcacaggtctctcatctgcagctgaaaatgactgctcaccaaaaaaaggaaacagagctgcagatgcagctgacagaaagcctgaaggagacagatcttctcaggggccagctcaccaaagtgcaggcaaagctctcagagctccaagaaacctctgagcaagcacagtccaaattcaaaagtgaaaagcagaaccggaaacaactggaactcaaggtgacatccctggaggaggaactgactgaccttcgagttgagaaggagtccttggaaaagaacctctcagaaaggaaaaagaagtcagctcaagagcgttctcaggccgaggaggagatagatgaaattcgcaagtcataccaggaggaattggacaaacttcgacagctcttgaaaaagactcgagtgtccacagaccaagcagctgcagagcagctgtctttagtacaggctgagctacagacccagtgggaagcaaaatgtgaacatttgttggcctccgccaaggatgagcacctgcagcagtaccaggaggtgtgcgcacagagagatgcctaccagcagaagctggtacaacttcaggaaaagtctgtttgttttgcagtgtttagccctccaggcccaaatcacagctctcaccaagcaaaatgaacagcacatcaaggaactagagaagaacaagtcccagatgtctggggttgaagctgctgcatctgacccctcagagaaggtcaagaagatcatgaaccaggtgttccagtccttacggagagagtttgagctggaggaatcttacaatggcaggaccattctgggaaccatcatgaatacgatcaagatggtgactcttcagctgttaaaccaacaggagcaagagaaggaagagagcagcagtgaagaagaagaagaaaaagcagaagagcggccacgaagaccttcccaggagcagtcagcctcagccagttctgggcagcctcaagcacccctgaatagggagaggccagagtcccccatggtgccctcagagcaggtggtcgaggaagctgtcccgttgcctcctcaggccctcaccacttcccaggatggacacagaaggaaaggggactcagaagctgaggcactctcagagataaaagatggttcccttccacccgaactgtcttgcatcccatcccacagagttctagggcccccgacttcaattccacctgagcccctaggccctgtatccatggactctgagtgtgaggagtcacttgctgccagcccaatggcagctaaagcccgacaacccatcagggaaaggtctgtgttcaggggaagtaggcaccagatgggcccacttacaaggaaaggttccacaagattgttccctggatttcaggaccccgagggagggggacccactggccttagggcttgaaaagcccagggagagcctcagcctccacagcttcaaggaaaggttgatgttcactaggttccaccggttccccacaagggagcttttcaagaacaggagggcaggtttccacagttttgcagggagca

SEQ ID NO: 68503 - DNA, 651 bp, Homo sapiens
  misc_feature (1)...(651): n = a,t,c or g
gcgttcttttataagagttttggtagtgtagggaggaagatgatgacctggaagaaagtgaagacagtaaacaatgtaaagaaagcttgaaaagagtgaccttcactttgctggatgatgaggcaactgaagatgcaggtgttttaaatgtaaagaaaaattctgatgaagttaaatcctcttgaaaaaagacaggaaaaggagtcagcttaagtagagctccgcgtgttggttgcagaagtcgcctgtcttccccgcaggaggctgtttgctcgctttgacactgaatgctcccccaacaaacacgtttagcttgcttgcccttctcaccgactgcggagaggagtctcagtgcacagtcgcagagaaggcgtgcgggggcgtgcaggggcgcacaggcgcctgcctctgcgggtgggaaaggaaggaggtgcccgggtttccgctcccagggctcagcctgccttgggcacctacggtatgggagcctttaacgtggaaaggaaaggagatcgatcactcgagcctccacttgccaagcctgtggaagcgagacgcggggatcggctgggaatgcctggaagcaccggcgcgcggagccaggaagaagaaattgtgagacgaaacggaatcgtcgncggggaattcgag

SEQ ID NO: 68504 - DNA, 552 bp, Homo sapiens
aaaaaaaagaaaattttactgcattttcttccatgacttatagtttttagctctttagttaagatctttgatccattgtaaattaattgttgcatgtggtataaggtaaacattcagattcattcttttgtttgtgaatatccagtttttccagtaccatttttgaagagactgttctttccccagagattggttttggcacccttgtcaaaaatcaactgaccatatatgcaagggcttacttctgggctctcaatcctatttaatttgtctgtatgtctggccttatgccatgtaactctgtcattactgtaactttataataagtttcagaattgagaagtctgatttctgttctttttcaagattgttttggcttttgatatttcctgtgaattttaggttgcatttatctatatttctaaaaaattccattgtacttttgataggaatgggactgaatctgtatattgccttgggtgatattgttatcttaccagtattaagtcttctaatctattagcacaggatgtctttgcatttatttagacc

SEQ ID NO: 68505 - DNA, 1179 bp, Homo sapiens
cccatccttacccagccagagaggctggagacggtatcgcgtggccagggatgtgatggaggaatccccagtgccctactctgtcaagggaggctcctactaataggaatcagagccctataaataatgtacctggtggcaggtaaacatcaccctcctggacatcaacgacaaccaccccacgtggaaggacgcaccctactacatcaacctggtggagatgacccctccagactctgacgtgaccacggtggtggctgttgacccagacctgggggagaatggcaccctggtgtacagcatccagccacccaacaagttctacagcctcaacagcaccacgggcaagatccgcaccacccacgccatgctggaccgggagaaccccgacccccatgaggccgagctgatgcgcaaaatcgtcgtctctgttactgactgtggcaggccccctctgaaagccaccagcagtgccacagtgtttgtgaacctcttggatctcaatgacaatgaccccacctttcagaacctgccttttgtggccgaggtgcttgaaggcatcccggcgggggtctccatctaccaagtggtggccatcgacctcgatgagggcctgaacggcctggtgtcctaccgcatgccggtgggcatgccccgcatggacttcctcatcaacagcagcagcggcgtggtggtcaccaccaccgagctggaccgcgagcgcatcgcggagtaccagctgcgggtggtggccagtgatgcaggcacgcccaccaagagctccaccagcacgctcaccatccatgtgctggatgtgaacgacgagacgcccaccttcttcccggccgtgtacaatgtgtctgtgtccgaggacgtgccacgcgagttccgggtggtctggctgagctgcacggaacaacgacgtgggcctcaatgcagagctcagctacttcatcacaggtggcaacgtggatgggaagttcagcgtgggttaccgcgatgccgttgtgagaaccgtggtgggcctggaccgggagaccacagccgcctacatgctcatcctggaggccatcgacaacggccctgtagggaagcgacacacgggcacagccaccgtgttcgtcactgtcctggatgtgaatgacaaacggcccataattctgcagagcagctatgtat

SEQ ID NO: 68506 - DNA, 466 bp, Homo sapiens
gccggccccgggccacccccggagccaccgcctccttcccagcggggttcggccccgcaatctggagccaagccgtctccgcagcctgcgacctgggtggagggcgcctcaagtccccggcctccttctagcggtgctgggccggggtcccgtcggaagcccgccagccctgggaggaccctgcgcaacgggcgaggcggtgaggccgaacccctggacctgtccttgcgggcagggccgggaggcgaggccgggcctgggggtgccctccaccgctgcctcttctgcccgttcgccactggagccccagagctcatggccttgcaccttcaagtgcaccacagccgccgggctaggggccgccggccaccccaggctgacgcgtccccgccctatgcccgagtaccatcaggagagacccctcccagtccttcgcaggaaggggaggagggctccgggctgtcca

SEQ ID NO: 68507 - DNA, 373 bp, Homo sapiens
ggcacgagcggaggtgtgagtggacgcgggactcagcggccggattttctcttcccttcttttcccttttccttccctatttgaaattggcatcgagggggctaagttcgggtggcagcgccgggcgcaacgcaggggtcacggcgacggcggcggcggctgacggctggaagggtaggcttccttcaccgctcgtcctccttcctcgctccgctcggtgtcaggcgcggcggcggcgcggcgggcggacttcgtccctcctcctgctcccccccacaccggagcgggcactcttcgcttcgccatcccccgacccttcaccccgaggactgggcgcctcctccggcgcagctgagggagcgggggccggtct

SEQ ID NO: 68508 - DNA, 409 bp, Homo sapiens
ggaccggaaggaggagcggctgaggagcccaaggagcggggcggcggccactaggagctcaggaggcaagggcgtggccgagtgggacccacttccctgcctggacccagaactctgggatcagtttgacaacttagaaaatcgatagtcttgagaaattcatcatatctgccaaggaaaggactgagattgaactcagctatacaaaacaactcaggaatcttttaaagacatgccaacctaaaaggaactggaaggagaaagaatacattacgtaaaactctccttccctccctgtgaacaaaatgagtgatcacgctaggcagcattaagttatcttctttgaggtcttgaactttcagatcaccgtggagttacaagggcatgttcaaaaccaaaagcaggagag

SEQ ID NO: 68509 - DNA, 915 bp, Homo sapiens
cctataaacagactggcagatgatatagtgcttaatgtcttgcctcagtttgtcattgtgtcagaacatccgaaaaaagataggagaaaagttggagtttagggcataattttcctgtaataatttggagctcaaaaatattacaatgagaaaataaaaagctattaattagcaggagacttaatcacatgaagaatttcaattagatatttcttctacgtagtatagttataactttgcattccattgttttccttctctatagtccattgtatttctgtggggtttttttttttcaggttttgagttcaagaacgagattaaaaaagaaaatctaaaaggggatgattcagaggaagtagaaataaccagggctttacagagaaagtccagaggagtttattggcactctgagctacaaaaaggcttggagagtgagccaacatcaagaaggcaatgtagaaattctccaggggagagtgaggagaaaaccccatcccaggagaagatgagtcaccagagtttttgtgccagggacaaagcctgtacacatatcctctgtgggaaaaactgctctcagagtgtgcactctccccacaagccagcgctcaaactggaaaaagtatctcaatgtcctgaatgtgggaaaacctttagccgaagttcttatcttgttcggcatcaaagaatccacacaggcgagaagcctcacaagtgcagtgagtgcgggaagggctttagtgagcgctccaacctcactgcccacctacgaactcacacaggggagaggccctatcagtgtgggcaatgtgggaaaagcttcaaccagagttccagcctcattgtccaccagaggacccataccggggaaaagccttaccagtgcattgtctgtggaaagagattcaacaacag

SEQ ID NO: 68510 - DNA, 326 bp, Homo sapiens
  misc_feature (1)...(326): n = a,t,c or g
cccacgcgtccggngacaggcctggccggcctctgcagagacgtccaacctcgtgcgcatgcgcagccaggccctgggccagtcggcgccctcgctcaccgccagcctgaaggagctgagtctccccagaagaggaagtttccctgtgtgtccaaatgctgggagaacatcaccccttggatgaattgccaccacattaaataaaatatatccaaagctcnnnnnnnnnnnnnngggggggccgttttaaaggacccttgggggggccaaggtttacgcgggctggcaaggtaatagttttttccttatagggagccgaattaaaa

SEQ ID NO: 68511 - DNA, 963 bp, Homo sapiens
ctcctagtcccctccctagcctgtcccttcctcctcccgttgctcctggtggccaggagagcccttcaccccacacagctgaggtggagagtgaggcctcaccacctcctgctcggcccctcccaggggaagccaggctggcgcccatctctgaagagggaaagccgcagcttgttgggcgtttcccaagtgacttcatccaaggaaccggctgagcctcttcccttgcagccaacatcccccactctctctggttctccaaaaccttcaacccctcagctcacttcagagagctcagatacagaggacagtgctggaggcgggccagagaccagggaagctctggctgagagcgaccgtgcagctgagggtctgggggctggagttgaggaggaaggagatgatgggaaggaaccccaagttgggggcagcccccaacccctgagccatcccagcccagtgtggatgaactactcctacagcagcctgtgtttgagcagcgaggagtcagaaagcagtggggaagatgaggagttctgggctgagctgcagagtcttcggcagaagcacttgtcagaggtggaaacactacagacactacagaaaaaagaaattgaagatttgtacagccggctggggaagcagcccccaccgggtattgtggccccagctgctatgctgtccagccgccagcgccgcctctccaagggcagcttccccacctcccgccgcaacagcctacagcgctctgagcccccaggccctggtgagactgcagtcacccagcttccatcttttccctgagacccctttctgtcgactgtttttctccaggccctgggggtctgccccgggggaatagaccccctctccccacctcccctttcctcacttagtgctctccttcccccatcctggctccaggcatcatgcgaaggaactctctgagtggcagcagcaccg

SEQ ID NO: 68512 - DNA, 319 bp, Homo sapiens
attcctgatcttaggggaaaaactttcagtaaagactgaatatacaccatttagtataatgttagctgtgggctttctatatacccttcaacatgtgtttttattatgaaaagatgttagattttatcaaatgcattttctgtgtttattgagatgatcatgtgggttttggcctctattttattagtatggtgtatcacactgataggtttttgcgtgtttaatcaaccttgcgttcctggaacaaattccacttaatcatggtgttgaaaatcaatttattttcaatcatagcgtataatcctttttatatgttgcg

SEQ ID NO: 68513 - DNA, 968 bp, Homo sapiens
  misc_feature (1)...(968): n = a,t,c or g
gcaaggggcagttggtgaacttgctgcctccagagaattttccctggtgtggaggcagccagggacccaggatgctccggacctgttacgtgctctgttcccaagctggtccccgctccaggggctggcagtccctgagctttgatggcggggccttccaccttaagggcacaggagagctgacacgggccttgctggttctccggctgtgtgcctggcccccactcgtcactcacgggctgttgctccaggcctggtctcggcgactcctgggctcccggctctcaggcgcatttctccgagcatccgtctatgggcagtttgtggctggtgagacagcagaggaggtgaagggctgcgtgcagcagctgcggaccctcagcctccgaccactgctggcagtgcccactgaggaggagccggactctgctgccaagagtggtgaggcgtggtatgaggggaacctcggtgctatgctgcggtgtgtggacctgtcacggggcctcctggagccccccagcctggctgaggccagcctcatgcagctgaaggtgacggcgctgaccagtactcggctctgtaaggagctagcctcgtgggtcagaaggccaggagcctccttggagctgagccccgagaggctggctgaagctatggactctgggcagaacctccaggtctcctgcctcaatgctgagcagaaccagcacctccgggcctccctcagccgcctgcatcgggtggcacagtatgcccgggcccagcacgtgcggctcctggtggatgcggagtacacctcactgaaccctgcgctctcgctgctggtggctgccctggctgtgcgctggaacagcccgggtgaaggcgggccctgggtgtggaacacctaccaggcctgtctaaaggacacattctagcggctggggagggatgcanaggctgcgcacagggccggcctggccttcggg

SEQ ID NO: 68514 - DNA, 401 bp, Homo sapiens
tatttttgtatcctgcaactttactgaatgtatcagttctaatagttttgggggagtttttaggttgtttcaaatataaggtcattatcatttccagataagcataatttgatttctttctttccaattcatatacccttcatttctttctctttttcaattgctctagctgggactttcagtcctatgttgaatagcaatggtgaaggggaacatctttgtctttcagatcttacaggaaaggctttcacttttgttccatttattatgatacaggccatgggtctgttgggtatgacttttattatgttgatgtatgttttttctatgcccagatttgtgagggtttttatcatgagaggatgttgaattttatcagttttctcagcatcaatttaaag

SEQ ID NO: 68515 - DNA, 416 bp, Homo sapiens
ctggaccaaatggacctaacagatatttacagaacattccatccaacagttgcagaatacacatttttctcaacagcacatggaatattctccaggattgatcatacattaggtcacaaaacaagttttaacaaatttttaaaattgaaattatatttatcttgtcacagtggaataaaactagaaatctataatcagaggaacattggaaacagtacaaattaatggaaattaaacaacaaatggaccaatgaagaaattttaaagtaaattttaaaatttcttgagacaaatgaaaatggaaacaaaataccaaaacctatgggatacagcaaaagcggttctaagagggaagtgtatagcaataaacgtctatatcaaaaaagtaaaaagacttcaaataacctaacgaaacg

SEQ ID NO: 68516 - DNA, 1518 bp, Homo sapiens
ttttttttttttggagtcaaaactctttattgtcctgcccagggagcccttcccaaaggaatccacagagcaggggggcgaggcgggcggcacagggccttggtgacaacgtgaagggggagctggagttaggtgggggacagccccttcagctccctgatggcactggctgtgctggcaggccacccaggggagccatcaccagcatgaggtccacacctggggctggggctgagtgctgtctacactgctctgtctacacggttactctggcacttgtcaggtccactcacctctctggcctcaaactgcagggggagatgggtccaatgctgggaggcactgggaggccgtggaacagtgaagagcggactgcacgggctggaggatgccagatgggcacacatgtcccccagggcagctgccggcaggagtctgacaaagggacccagccagcccctctggaccattctagaggccagtggtgaaggtcctgaagcaacttggcttatagagacacgttaagtgtacccggtgcaccccatgctgggaccagctctggtcccagggccaccttgacaggtgagcccaaatgtcctcctctccccatactgggcactgggctgaggcaggaccccagcaggtggtggcgggagcagctctacagagggaagccaaagcctttcaacagaagaacaaaggggcttccagggccggagtcacaggcctggggaggaggggacagggtgcttctgagaggcagggagacaacaaacccccacttcatgctggtcctcagtccttccatcctgccagccccgacccccggtccacaacagcaggcccaaccctgccttttggggtgaggagaaaaaaatctggaaccaaaagggatggcggctgtttcctcgggacccctggtgggtgtggggccaccgagcagccatcaccggaggttaaagaccaggctgacggtgaggatgatgcccaggagaaggatgaagggcagccaggtcttcacgaaggccccaacgctgacagagagaaaggagcgagcataggtgggcagggcctggtgagcaggcatgcggcccgcagccctgagcacccacagaccccaatagggctgccatccctaaggaaaaccctacaaccaccccctcaccccaaacttggccaatcaaggaagcaggctgggcgtggttgcccactatgggggatcaccagctatggtcccgggcaggggctgctccgcgctcctggtgatttactgacacctcgctggttgggaacaggaaacatgctccccatttctaggcctcactggctccatctatagccacctacctctagggtctccagcaagaggaccaggaattgcagtttgggtatggaagccacgtgtgccctctgcctatggacttcataatggggcctactggcagctctggggctgccaagggtcagcagtgttgtggctggagccaagcagctgggagccaggggtctgggttcaac

SEQ ID NO: 68517 - DNA, 355 bp, Homo sapiens
attcaatcagtaatgagaacttcccaacaaaggaaagccaaggaccagaaactttcactggtgaattctaccagacatttaaagattaacaccaatccttctcaaactcttccaaataactgaagaagcaggaacacttcccagctcattctatgagatcagcattaccataataccaaagccagaaaaaaaatcacaagaaaattacagtgcaatgtatcttatgaatatagacacaaaaatctttcagtaaaatactagcaacccaaatctaaccatatattaacgtcattatacactatgaccaggtgggatttatcccaggaatgcaaagttcatttaacgtaataaatcg

SEQ ID NO: 68518 - DNA, 335 bp, Homo sapiens
ttttattttttaagagaaatttctcgccacgaggggaagggggggggttttcccccccttccccctaaaaaatttttttttcccccaagggcgtaaatttttggggggggggggggcccaaatggcccccccccaaaaaaagggttttttccaaaaattccccggggggttttaaaaaccccccccaaaaaaaaaaaaaatttttttttccccccccggtaaaattgggcccccccaagggtttttttaaaagggccccccctttttttttttttttttttttttttttttttttttttttttagggggttaaaaacttttttttaaaaaaaaaa

SEQ ID NO: 68519 - DNA, 982 bp, Homo sapiens
ttttttttttttgacgctgagtgtatttatttatctacgcgccctggagaccggcccctaaatttaaatatccagcacggggccttggccctcctggccgtgggtggttattgggacgggtcctggagcccttccagggcagaggaacccagagcccggaggtgggatgcccctgagccagcagctgccgatagcaacaaaaggtgaggaggagatgggagccaggcactcatcccaatcccagagacgccaagcggaagggaagatgcttcgggccccaccgcaaggctgagggttggccaagctgggggtgcacacatgtggaagaactggaggcccagtgccatgagcagaggctgtaccctagatgcccgccccagtgccagccaacccaagacaggagaaagagtttggcagtttcgcctctgaggaatacatgcctggccctcctgtgaggtgaggcggtaggggggaaggcgcaggctccgaagtctgagggcttgccggagggggagtttctgagccttttgcatgggtgcatgccccctgccccccagcccttcagaggctgatgtggaaggcatcctgcagccactggtcacgggcattgtgcgtctggggcacagtaaggggtggcgggtcaggaggcaggctggcatcgggaggctcctcgtcgtcagacaggcccgcatccggtgggtaggagctgtccgaatggagggaggatgacaggtcctggcagaagctcaggtcttggcacaggtgtttgtagtcctggattgactcgtacaggccccacagctggcacaacaaggacatgtccaactgccgcagccccaccatctccttgcgcagcgcggccagcgctgagtcgaggttgacaggacgacgcgggccggctgcgggtcccgcgttggcggcgccggcggcgtggcggggcccgtccggaggcgcgggcggcgcggctcagctcgtcgtggat

SEQ ID NO: 68520 - DNA, 378 bp, Homo sapiens
ttgtccattttttaactgataggtttgtcttcttattgaattggatttatgtattctggatgcaagttctctgtcaaatatatgcatacgaacagttttgccttgtcttctttttggcttgtcttctcaatttttaatggtgcctttcgaatagcattttttaattttaatagactacaatttatcgactacttctgttaatagttcatgctttttgtgtcctaaaagacctttgcctactccaaggtcaagatgatttgctcctatgttttcttctagaagtctttccattttacccttcatatgtaggtctttcatccatttggagttcacttttgtgtacagtttaaggaaagggattatccccctcccctatat

SEQ ID NO: 68521 - DNA, 567 bp, Homo sapiens
cacgatgtcataaggtttccctatttggatccacctaatgagagacttattttagaagctcttaaacaactttaccagtgtgatgctattgacaggagtggccatgtcaccagattgggtttgtctatggtggagtttcctttgcctccacatctgacatgtgcagtaataaaagctgcttccctggattgtgaagatctactacttccaatagcagcaatgttgtctgtggaaaacgtcttcattagacctgttgatccagagtaccagaaggaagcagaacagagacatcgagaattggcagctaaagctggaggatttaatgactttgcaactttagctgtcatctttgaacaatgcaaatcaagtggagctccagcttcatggtgccaaaaacactggattcattggaggtgcttattttctgcatttcgtgtggaagctcaacttcgagaactaatcaggaagcttaaacagcaaaagtgatttcccaaaagagacctttgaaggccctaaacatgaagtactacgaagatgtctttgtgcgggctatttcaaaaatgtagc

SEQ ID NO: 68522 - DNA, 535 bp, Homo sapiens
cccacgcgtccgacaggcatgagccaccatgcccagccatgaatttttttttaagacccaacagtatgctgcctacaagagtcacctcacttttaaggacacccatagactgaaagtgaaaagttggaaaaagatactccatgcaaatagaaaccaaaagaaagcagggatagctaaacttatatcagacaaaatagactttaagtcaaaaactgtaaaaagagacattatataatgataagagcatcaattcatcaagaggatataacagttatatatgcacccaacattgaaacacctaaatacataaaatattgaaggatctgaagggagggataaattgcaatacaataatagtaggagactttaatactctacagataatccagacagaaaattaataaacattgggcttgaacaatactgtagaccaaatggacctaactgacgtttcatccaacagcaactgtatacacatccttctcaagcatacatggaacattctccaggatagatcaaatgttaaggcacaaca

SEQ ID NO: 68523 - DNA, 1041 bp, Homo sapiens
atcgcactccagcctgggcaacagagcgagactccgtctcaaaaaacaacaacaacaaaatatgtgatgcgaaaactgatagaactacaaggggaaatagatgaattcactgtctgcagttggagatccagcaccctctatcgtaaatggacagatccagcaggatgcagttgagtttaacagcaccatcacatcagtcagctgggaataatttacatctgtagactgcttcatccaacgatagcagaatgcacattcctgccaagctcatgtggaacattcactaagatagaccacattctgggccacaaaacactttaacatacttgaagaatagaaaacatagaatgtctattctcagaccacaatgacatgaaactagaaatgaaaccagaaagatagctagaaaatcctaaagtacttggcaaataacacacttccaaataacacgagtcaaagaagatatctcaagataaattttagaatattttgaattaagtgaaaatgaaaataaaacttaccaaaatttgtggaatgctgtgaatgcagtgcttagagggaaatttatagcattgactgcatgtattagaaaatgggaaagatctaaaatcataatgtaagctttcactctaggaaactagaaaaagaagagcaaattaaatacaaagtaagcagaagaaaagaaataaaaattcaagcagaaatcaatgaaatggaaaacaggaaatcaatagagaaaatcaacgaaaccagaagatggtttgaaaaaacaataaaatcagtaaacctttagccagactaagacaaagaagagagaggacacaaaatactaatatcaaatgaaagagggaacatcactacagagatgtcccacagacttttaaagggtaataaaaaaaaaaggatgaacaactttgggcccaaatttgataaatgaaccaattctttgaggtacacaatttcccaaacacgggaagaaatagacaatttgaatagggttatgtttgttaaataagtcaaatcaacaattaccttccaaaa

SEQ ID NO: 68524 - DNA, 1991 bp, Homo sapiens
tttttttaggactgaggagtgggttttattgtccttcagagctctttatagctgtcccctctgtcatcactccctggatgtgtggggcatggttccttccctgggaaggctaagttcagttctgttttttattctatgagaacaagtcacagctgcagctgggccccatgctctgccccaagcccccaaccccgcggtgctccggcggcttcctgtccactctcggggcccttggggcctggcttgctccagggtcttgggctactggcagctcctctccttgggctcctggctgccaggcgttggtgccacttcttaaaggccagggtccgccccagctgctctgccccttgggcatccacccagtgctgccatgccactgccaggcacctggcctgctgggaaccccgcagcccgtgaagcagtgcctcgaggcaccggcgctgcaggtacttcctcctgatggccaagagcatcgtgacccttcagggccagaaggagggcagagccatgggcctgggcctgcttttccaggatcctgcaggaacgagcacgtagcctccgtttatgggccttgctttgggctttgcaggctctgggctcagggctggagtgcgctcttggtccctggtccctcgtccacaggggcaggcctgggacccagctactctgtccaggccactgtggccagagctggaaggcagggcagagggaatgttccctgcaccctggaaaggggagttgagtcacaagaggttaaggtgggtccaggaaggcagctgctcttagtgcccgcctaggagttgagtacagtgaggagggtggaggaaggtgctgagcttagccttgtgccctgcccccatctccccaggcctccagcctctcccggctgcctgccacccaaagagaaatcacaggggcggggcaggaatgcaaagtgttttctcagaacagctgaaacattccgaagagggaatggatggggagaatggtcaatacacataagaccgtgtcccaaggagctgatttccaggcccctgaggactggagaccgcttcacccctgcacttcagacaccgtttgtcccccggggcaaggtctccttactctgagcccaggccgttccccttggcttcctccatccacccaggctgcactgcagtgatggcgcgggaggcaccagctctgtggcctgtgtccagcagctgcgggtctgaaggaatagccagagaggagcacctgaaccccatgggcttggacttcctggggccccgctgggatttcttcgctgctctagctggcaggacacatcccggcctcttcttccacccattcccccatgtggctgaagacattccaacaatggggtgggcccataatagttagccctcagtcagttcccggagcacagccctgggagggggctatttctctccccactgaaaacatttcaaagctgagttacttgtctgaggcctcatccctcggaagccgtctgactccagagtctgagcccccggctagtaccctatagagagggggctctccaaaggggctgctggggcatgtgtgcctgtggcagaaaagaggagaccctggaattcagcaccctgggtgccattcccagcgtttttttctagaggcctcagtttctccatcagcttatgggatccttgtctttactgacaagaatggaatagaaatgtaaaagtactctgaaaagcaattgccctgtaacttatctagaaagaaaagaccctgagactccagaatctgctgttgccatagccccatatgtgtgaattctgcaactagccaaggctagttcctttcaattccatttaaaaaacaaaaaccagcaggtgtggtggctcatggcgtaatgggcctgcccaatgctttgggaggccaaggcaggtagatcgcttgagcccaggagtttgagacaagccctggcaacatagtgagatcccatttctacaaaaaaaaaa

SEQ ID NO: 68525 - DNA, 868 bp, Homo sapiens
cccacgcgtccggaataaagagagaactctgttactattgtttttacatcaccaaataattatttaatatcgttagctaagagaagaattggctatgaactgtactttaacaactgacacaactgcatacaagttataaagtttaataatctttatcatcttggaaaataaatctcttcttgctaagtatcagtttttaaaaattgccccatgtattagatatgtatttttttaacaaaaatgttctgtgtattaattattttgaaataaattttaagttcacaaaaagccattacaagaagtggaaatagcagcaattacacatggtgctcttcagggattagcctacttacattctcatactatgattcatagagatatcaaagcaggaaatatccttctgacagaaccaggccaggtgaaacttgctgactttggctctgcttccatggcatcacctgccaattcctttgtgggaacgccgtattggatggccccagaagtaattttagccatggatgaaggacaatatgatggcaaagtagatgtgtggtctcttggaataacatgtattgaactagcggaaaggaagcctcctttatttaatatgaatgcaatgagtgccttatatcacatagcccaaaatgaatcccctacactacagtctaatgaatggtgagtattgttaatatatatattgctcagtgttgaataaatgaaatgctttttcataatctgttatcaaagtgatttaatttcagttaggtaaaatgtatcaccttataagatattaaaatagatgtattttacccttttaaatatatttattctttatcatgtttccatttcatggcatacgtataactgg

SEQ ID NO: 68526 - DNA, 1812 bp, Homo sapiens
gttaattctattcatttattatggcagaagtattttaaagtaaattagacaaatcatgacatttcatacccaatactttaacatgcatctctaaaaaccaatttcttacaaagccacataattttattacgcctaataaggagacgtagcagggtagtgtgaaggaggggaaatcgtggcgatgggttaggtatacacttagaatgaagtgcagactccacacggaggccctcccgaggcccaaccggacctgacctgggtttgcttctctgtcttcacctgccagcactaacccgcagctatactccagccacacaggacttctttgagttctttcagtgaccaatctctttctcgcctcagggcctttgtactggcggttccttccgccggacacgtcgggtttcctcgtttttgcggactggcgctttctgatttcagagactctccgcaacagaaccatctcaagtgggtctacctcctcgcctttttttgttgttgttgttgcttggctgcgcttctgacagggcaggccgtgatgatgtttgtttatgagttaggtctgactgttcgttggtgcttaagatccccaccgggtccctagggcctgtgcgtaccgcgcacctgtgcacgtcctgcgcgcagctgcaggcgactccgctctggctcgtcgctgctgtttcctgctgggggtgccgaccctgtcccacgctagctgggtgacttcccccaaccgcagagacagcggcgacccggggcctcagacctgcccccgcatctcgccggcgccaggcagtgggaagtcaggttcttccgccacctcccagccaggactctgccaccctccctcaggatgcctgagggccccgagctgcacctggccagccagtttgtgaatgaggcctgcagggcgctggtgttcggcggctgcgtggagaagtcctctgtcagccgcaaccctgaggtgccctttgagagcagtgcctaccgcatctcagcttcagcccgcggcaaggagctgcgcctgatactgagccctctgcctggggcccagccccaacaggagccactggccctggtcttccgcttcggcatgtccggctcttttcagctggtgccccgcgaggagctgccacgccatgcccacctgcgcttttacacggccccgcctggcccccggctcgccctatgtttcgtggacatccgccggttcggccgctgggaccttgggggaaagtggcagccgggccgcgggccctgtgtcttgcaggagtaccagcagttcagggagaatgtgctacgaaacctagcggataaggcctttgaccggcccatctgcgaggccctcctggaccagaggttcttcaatggcattggcaactatctgcgggcagagatcctgtaccggctgaagatccccccctttgagaaggcccgctcggtcctggaggccctgcagcagcacaggccgagcccggagctgaccctgagccagaagataaggaccaagctgcagaatccagacctgctggagctatgtcactcagtgcccaaggaagtggtccagttggggggcaggggctacgggtcagagagcggggaggaggactttgctgcctttcgagcctggctgcgctgctatggcatgccaggcatgagctccctgcaggaccggcatggccgtaccatctggttccagggggatcctggaccgttggcacccaaagggcgcaagtcccgcaaaaagaaatccaaggccacacagctgagtcctgaggacagagtggaggacgctttgcctccaagcaaggc

SEQ ID NO: 68527 - DNA, 532 bp, Homo sapiens
gcgcctgggtagcggctgctcccgggaagctcgctgccggctggggtgggggctcctggaaacgggcgccacccagcctctccccacctagctcaggaatggtgcgcctggaaactccgctggacttgcctgggcctcggggcggagtgctggggcgctgggtgcccgagtccccgggttccctgagcttagaagggcctgtctggaggaagggattccagctctagggactgggtggggcgtcctcagcccctctttcggcagctgtcccgtgttaggctgggtggggccgcctcggacccagctctgggctggttttcccacgtctttgctcctgctggagggagggggtggtgtggggcctgggcccgaagatggcacccaggacactgagggagggcgccgtccggtcctgtgactggcacccctgcaaggagctgctctgtcggggcgcccccgggctttgactgtacgaggaaagcgccctttaacccggccgactttgagccctgagttcctgagggtgagcgca

SEQ ID NO: 68528 - DNA, 427 bp, Homo sapiens
ctcccgactaggtctggtgcctgtttggggacggagcttttggctacagcctcatcgtatttgatacattcgtcagacacaaggtgactgggctggcctgagggaagcttagggcctggggttctgggagatttcaccaggggtgggctgaggtggggagggagcctcctctctggcagaggccctatccctgtctctgtcctctggctggccaagccatggggctgaaggctgcggcctgccttcatcatcttcctgtagatcccagtgatggccttggtagggaatgatgctggctggacacagatttctcgggagcaggtgccctctctgggcagcaacgtggcctgtggcctggcctacactggtgagggggcctcagcgaggttgggaggacaggaggctgtttcagtcccagctgggcttg

SEQ ID NO: 68529 - DNA, 823 bp, Homo sapiens
gcggccgctgggctgtgcggctgcgtgctgaggagagggccagccacagcatggtgtccgcgccctgggcctcggagcgcaggcgataccccgaagcctggacgtggaaccccggcatcgcctgcctcacacctggggtgtcaggcccagccaggatgcatggaagaaaaatggatggccgggtgcccttgggccccaccgctcccgtcagaaccacttgctgcctctcactgaccttgttttgtgcatagaccatagttcccatccaaatggtgttctttcggactggagatcattggttgttcagtttctgaaccaacattcctcctgaggagacgggttatcactcgggggtccgtgttctttctccagcacaggggatcaggccgggtcgtgagaaatgtacacaccccagagtattggcaaccaaagtttttttcaaagtccatcttcttgtgagcttctcttttattgaccatgcaacctgcattattgatcaagaacatggagtttatgttcctgcttgaaattttcaacaaatttccagattttcttgggatcagacaagtccacaatgtgcagaaaaatgttctggttaccgcatctcccggatgatctcacccctggcatcttctgctggggcttgatctcgacaaaccaggtgaactgtgccacctcgcttggcgatttcaagggcagttgctttgccaatgccgctgtttcctccagtgaccaaaaagactcttccaggaatctggacctccaagtcatgagggacaaagtctttacatgcagagtcatagccactcttggtgtagccccc

SEQ ID NO: 68530 - DNA, 715 bp, Homo sapiens
ccatcgtagacttcatactggagagaaatcttacaaatgtacaatttgtgacaaggctttcgtgcgtaattcactcctgtcaagacataccagaattcacactgcagagaaaccttacaagtgtaatgaatgtgggaaggcttttaatcaacaatcacacctttcacgtcatcatagaattcatactggagagaaaccttagaaatgtgaagcatgtgacaaagtttccatttggaaatcacaccttaaagacataggagaatttatactggagagaaagcttacaaatgtaaggtttctgacaagacttgggagtgattcacacctggaacaacatactggacttcacactggagagaaaccttacaagtgtaatgagtgtggcaaagcctttggcaagcagtcaacacttattcaccatcaggcaattcatggtgtagggaaacttgactaatgtaatgattgtcacaaagtcttcagtaatgctacaacgattacaaatcattggagaatccataatgaagagagatcttacaagtgtaataaatgtggcaaatttttcagagatcgttcacatattgcaggtcatcggtgaactcatactggagagaaaccttacaaatgtcatgactgtgccaaggtcttcagtcaagcttcatcctatgcaaaacataggagaatttatacaggagagaaacctcacaagtgtgatgat

SEQ ID NO: 68531 - DNA, 1024 bp, Homo sapiens
aaatcctgaaaactgggcctattacaaaggcttggaaaaagcactcaagccaactaatatgttagaacggctaaaaatttatgaggaagcctggactaaatatcccaggggactggtgccaagaaggctgccgttaaactttttatctggtgagaagtttaaagaatgtttggataagttcctaaggatgaatttcagcaagggttgcccaccagtcttcaatactttaagatcattatacaaagacaaagaaaaggtggcaatcatagaagagttagtagtaggttatgaaacctctctaaaaagctgccggttatttaaccccaatgatgatggaaaggaggaaccaccaaccacattactttgggtccagtactacttggcacaacattatgacaaaattggtcagccatctattgctttggagtacataaatactgctattgaaagtacacctacattaatagaactctttctcgtgaaagctaaaatctataagcatgctggaaatattaaagaagctgcaaggtggatggatgaggcccaggccttggacacagcagacagatttatcaactccaaatgtgcaaaatacatgctaaaagccaacctgattaaagaagctgaagaaatgtgctcaaagtttacaagggaaggaacatcagcggtagagaatttgaatgaaatgcagtgcatgtggttccaaacagaatgtgcccaggcttataaagcaatgaataaatttggtgaagcacttaagaaatgtcatgagattgagagacattttatagaaatcactgatgaccagtttgactttcatacatactgtatgaggaagattacccttagatcatatgtggacttattaaaactagaagatgtacttcgacagcatccattttacttcaagggcaggcaagaattgctatagagatctatttgaaggcttcatgacaacccccttacagatgaggaattaaaggaacacggaggctggatacagccaaacatgtctggacaaagg

SEQ ID NO: 68532 - DNA, 480 bp, Homo sapiens
cattcctggtcagaaaaagcattgaaatcatatcaagtatttttctgaccaggaatggtataaaactggaagtcaatggcaagaggaactttggaaactacacaaacacctggaagttaaataatatgctcctgaataaccagtgggccaatgaagaaattaagaagataatttaaaaatttctggaaataaaagaaaatggaaacacaacttaccaaaacctatgggatacagtgaaagcagtactaagaggaaagtttatagcaataagcacctacaacaaaaaagtagaaaaacttcaaataaaaaacctaaccatgcttctgtaacaactagaaaagcaagagcaaaccaaacacaaaattagtagaaaaaaataaatagtaaatattcaagcagaaataaatgaaattgaaatggaacaaatacaaaagatcaataaaataaaaagttgttctttgaaaagataaacaaaattga

SEQ ID NO: 68533 - DNA, 1922 bp, Homo sapiens
tttctttcttcatccaaaatagtagagatgtctttcccacgatgacctgtgatggtggagatatcttttcctcggccaactcctcctccatcggcttctttgatgtcatcttcaatagcttcatcaattgcttcatcaaactcatcaaatctgtagcttatacatttccttgttcttgttgacctcctttcaaagcaagtttgctttggatttttttgaatcttttttcttttcttcttgatcttcagaaaagtctggctctttgtggaggaatgatgttttcaatactggataccaacatacaccaagcgttcttttccttcgttccggcaacgctctttccttctttaaggcaacatcccaaatcctggaaactggtcctctaatttttccaacaagagcaagtttaatgttgggcaaaaggtggggcaagaacccatcctcccatctggggatggatcatcagaggaggggcgaaaggcagggcagtatggtatccactatcgcaagagtcacacagaagaattagctcaggatggtttggaaggccacattttttgcatggttcatcatcatctgctaggatggcttcttcactttccttttcttcctcctcttctgaagctgcagatgatttttcactgccagacccttcactttcatcattgctggaatatttccatctgccacgtgtccgagaaccagtccatcgaactttgcctttgggttttaccttgcttactttagaatttgtatctttctctgattttttcaaaatttcctttttgtcagttttttgcaaagctgttgactcttcttccacctcatcttctccttcccctctttttttatcagctttctgatctctgatctcagccacttttgcagtgggtctagatattcttggagatcttcttaaagtacgacccacatttgttttctcctcttccttttctgtcttctcttgcttgttttctggttctagaactttggggggagaatcgggcttctttttccgacttgatatcctgattgttaatttgatgccctctttctgcctttcagaggttatctctgtattttctgaggcagtggtttcttcttcaggaaccaacttatatttgaatttgcttttttgcatagaaccctttgtctcagaaggctcctctatgccagaggtctgggcattgtccagattatccatttctacctttgtgaactcagaatcctcttttagggtttctaggtctacttttttcacagactggccaccaacagtacttgtactctggcattctaccacttctttttctgaggctagtttctcacagtggtcaatgatattagatggtggagaagtttcagctgcctcaggagagccaggcttttctgactctagagtactctttggaacttcttctggtattggactcaatctttgtgcgtccttatcaagaaaagtctttttggacttctctaacttttcaagacattctaggattggtgggcgcttatccttcttagttttgggagacttctcttcacctttcatggtacacgactcggtggaagataaagcagtttttgaagagagatcttttgccatctcagaagaatcaagagaagtttccatttctggaggatcgggttcctctatttgtgctttttgactatggatctctaagactgatattgaactatctgcatctttcctcaaaggggctgtttctttctcaagctcacctgttttcatacttggttatgacagaatttaaggactctgttccatttccctccgtgatgatatttctgtccttaggggggctatagctctcttcctttgtctcataaaactttgtctctacttggttctgtcttaaaatttggagctaccctttcatcactaacttctccatttacca

SEQ ID NO: 68534 - DNA, 516 bp, Homo sapiens
tttcgtgcggccctgcgtgtactttcccaagcaccaccaggccaaaggtctctcagttcagagcagaaagccgtatacccagaggagcaggcagataacagaaacttccagaaacctctgtggagacagtggaagaggcaaaaggaggcgaggaatccgcatctatggagatgtccctgcatcccatgactcggagctgatggccttcatgacgaggaagttgtgggacctggagcagcaggtgaaggcccagactgatgagatactgtccaaggatcagaagatagcggccctagaggacctggtgcagaccctccggccacacccagccgaggcaaccctgcagcggcaggaggaactggagacgatgtgtgtgcagctgcagcggcaggtcagggagatggagcggttcctcagtgactatggcctgcagtgggtgggcgagcccatggaccaggaggactcagagagcaagacagtctcatagcatggcgagagggactggatgacagccat

SEQ ID NO: 68535 - DNA, 998 bp, Homo sapiens
ccaatgggcctgccagaataccacattccttttttaggcaccatgtatccattcctcaaggatagacccatatgttaggtccacaagtccttaaaacattaaaaaagttgaatacccatcaagcatccttcctctgacccacagtggaatacaactagaaactaataacaagaggaatttttgaaactacaaatacatgaaaattaaacaatatgctcctgaatgaccattgagtcaatgaagaaattaagaaggaaattgaacaatttcttgaaacaaatgataaaggaaacacaacataccaaaacctatgggatacggcaaaagcagtactaagaggcaaattgatagctataagtgcctacatgaaaaaagaggaaaaacttcaaataagcaatttaacaatgaaccttaaccagaaaagcaagagcaaaacaaacacaaaattagaagaaaacaaataataaaaattagagcataaataaataaaattgaaataaaaatcaatgcaaaagaacaatgaaacaaaaagttgctttttttcaaaagttaaacaaaactgacaagcctttagcaagactgagaaaaaagagacaagatacaaatcagaaatgaaaaagacattacaactgacactgcacaaattcaaaggatcattaggggctactatgagcaactctatgccaataaattggaaaatctagaagaaattgacaattcctagacacatacaacctactgagactggaccaggaagaaatccaaaacctgaacagactaataacaagtaacaaggttgaagccataataaaaagtctcccactaaagaaaaccaaggacccgatggcttcactgttgaattctaccaaacatttaaagaagaactaataccaatcccactcaagctattgaaaaatagaggaggagagaatatttccaaagtcattctaggagaccagtatcaccctgataccaaaaccagacaaagacacatcaaa

SEQ ID NO: 68536 - DNA, 422 bp, Homo sapiens
cccacgcgtccgagaatctctagggattccacttttttcattttttttcctggaatgtctgtcttgagattagtaaattttaatgactttctcaaggaaccaacttttggtttcactgatttttctctattttttttaaacttttaaacctttttttatttttaactttttaaaaattacattctttttaatgtttacaggggattttatttgctcttatttttctgttttcttaagggggaagctcaggttgttgatttgagatcattcttttagggctatcaatttcccactaagtacttttttagggcatcccacaaattttgctatgttgagtctttattttctctttgttccaaaaaccgtactgatttcctttgggatttctccctttgccccaggcgtttttaaaacgggtgtat

SEQ ID NO: 68537 - DNA, 909 bp, Homo sapiens
  misc_feature (1)...(909): n = a,t,c or g
ccgattctgtgcgatgatgcggaactgatactcagcatttggaacaagccctgtgactttgtacattgtgggggggatctgagtcttgtggggtctgacccacttgtcagtggatgtctctttgcgttcgatgtagtagcctgtgactctagaaccaccatcatctttgggccgggaccaggacaagctaacagaactcttggttacatcgagtacttctggaggattgcttggaggttctggaggatctgtaaatataagtggaaagcacacatgtattagaatacagtcccaagtattataagccaatgactttcatttaaaaacagaaaagtgctgaaataatgtttataattttgtggttgaaagggcacttactcaatggtgtttttggtgtgactggttcctcagatttcaagggtttgcttatgccaaactggttttctgctgaaacacggaaatggtattctacattctctttgaggccttttaccaccagagatgtacctcggactctggaatcaatggtataccaggcggctttaggcacttctcgtctctcgaggatgtagcctaagatgtcagcaccaccatcatcagcaggaggtctccagctgaccctcacagagcggacttggatgtcatcatattccagtggcccttctggactgttgggacttcctatcaccctgaccttgatgtagacagccttcttgccacatttattttccagaaccaggtcataagtgccagaatcacccctgtctgcttctttgatcacaagctcagtgtgtgtttcagatgttgcaatcatggcacgcttactaatatcctggccttccttggtccatttacatattgngaatggttttcctttgattgggtatggaagtctgatgacgccacctt

SEQ ID NO: 68538 - DNA, 526 bp, Homo sapiens
agccatgttaaccatttgttaatttcttctgaacagatcaagcaaaagtagataatcagccagaaaaattagtgcgtagtgctgaagatgtttccacagtgcctacacaacctgataatccattttctcaccctgacaaactcaaaaggatgagcaagtctgttccagcatttctccaagatgagagtgatgacagagaaacagatacagcatcagaaagcagttaccagctcagcagacacaagaagagcccgagctctttaaccaatcttagcagctcctctggcatgacgtccttgtcttctgtgagtggcagtgtgatgagtgtttatagtggagactttggcaatctggaagttaaaggaaatattcagtttgcaattgaatatgtggagtcactgaaggagttgcatgtttttggggccccagtggaaggacttaacagcagcggatggaaaaaaacaggcgtcataccatattgaaagggctaatttgctaccaaacaaaggccaaatgggcaagaaaa

SEQ ID NO: 68539 - DNA, 469 bp, Homo sapiens
attaggaatactgatcaaagacatgcagttacctacacactacatttctcagataggtgaaaaatcgtcttaggttatttgcacataggatcaggagtaagatgaagacagataatcaaaaatatcaaccctatccttacctaatgattggaagaaaacagagtaacggcattcatagagtgaaaacagatactgccgaactgctggaagactgtgcaacacttcaagaatctctgctcctttaatgacctaggtattttaaaaaacatatatacaaaaaaaatgtacattttaatgatttgtgtatttaaacaaaaaaaacaagtctttaaatttgagtattaaagtttggtcattaccttttccctgagatctggtctttctaaggcaatcatactgacatagacagtataagtcacaaatgttttataatccatgagttcataggatgtaaatgttgaaacagtgt

SEQ ID NO: 68540 - DNA, 1614 bp, Homo sapiens
tccagctcccagcctattggcatgaccaagatcgccaagtcagtcatcgccccactggctgaccagaacatatccgtgttgcatgctgtccacgtatcagacagacttcatcctggtgctcaagcgggacctgccctttgtcaccccacacgttgtcattcaggagttcaccatcctgtggtcagtggctagactgtaggcagccgagtaacctcggcattcaccagtggcttcgtgaagcccaagctggggccttggtgtaccttgttgtagtgtttgaaaacatctgaggctgcatccatctccagcaccccataaagcaacagcttgcagaacccggctaggaggcggcgccgctggtgtagccgctctatctgtaaatgatcctcctgggaatcacctggctcacatggaaggcaaaagggaatcacagacttaagcttcctgccctatatttctgagctacacccaagccccagcccttactgagccccaggtatagagtcactgcaccactgcccaggtctcccggctggatgaagacgtggtccatgaggaagctggctagctcagactggagagtagcttcaggaaaaaagacaagtggcctaaggaaatcacggcccccaacaatcatctgagggctaaagatgagaagtagatcacttaataagacaaaagcctgtagggggaaaagaaaggatgtttaaaaggacagaatgtttcccaaggtagaaatgacactgtcaatttctccttggaatgggggcagggatactcgccttgttgctcccacttgagtcagtactcacctgctcctggatctcagtatccacatctgagaggcaactctggcagagttcacagaaggccaccattctgtccctcaaactcgacagctgcttctgtgggcacagtggcttgaaggggaagaatgaagacacagactcctctgttcccattatcccatctaagacccacactcacctgggaagcatctgatttagaaatgtgggttagtgtccagagaatggaaaaatagacaagagtcaaggctggcaggataacctgtaacaacaaagggtttgaaaaatgaggtttgggttaggagagggagagacagatagccagaaacacaccagtgaagaggagagaaaatgagtaaagggagagctaattccttttccagtggaaaatgagtgatattctggacattcttcagaggcatctacacgaagtagaaatgtcaccgctccctaatttactctacgtcttctagaatccctcaatattatccttggcttccaggaaatccaagaagaccctggaagtagagtccaccttctaagagaggaatgtaagaggtgacccccacccacctgatcttcctcgctttgtccactccacgcactgagacttgacacacctagtggccacctagaaccgtaggtccttaaaatctagccccccagcccccaacccatctctagcctgtccactcacctggtgaggaacctctcctgtgtccacagccttctgcaggagttggcaacatggctcatagagctcccagcgagtcaggtcatgagtgctttgggggagaaaggggaataa

SEQ ID NO: 68541 - DNA, 2039 bp, Homo sapiens
cgcactgctcaggggtaaaggaatggaatgtttattctgaaagcttaaaaggaagatgaggtgcagcatgaagacaaaagcaaaatcggaacgctaaaacaagtttcactcttgttgcccaggctggagtgcaatggtgcgatcctggctcactgcagcctctgcctcctgggttgaagcgattctcctgtctcagcctcctgagtagctgggattacaggaggattccctgggagcacccaccagctgagatctgcacatcagccacaatcctctcaggacggcggaaagggaagggctcagctgccagcctggccacagcctgcatcatctcatcccagaggcggagcacaggctcggggtccttcagggcctgaaggtttgtggttggcactgtcaggatgatgttgtccgtggccagctctccccagggagccaggttctcctgcatctgcctcttccactcctccagcgatgtcttacctgggaataaatatcatggaacctaccacacccacttctccaacttcccttgagctgaaaaataccatttgaactctggaagaacattgcaataatgaactactatcacaggcgtctataggctgtaaagggaagaaaaggcttcctgactcttctctttgtctgccctgaagtctccatggacacagggtattccgtatcttctgcctccatgttccctcccaacagttcttcctctttctctccaccaaagctcatccctctcccatttagcaaccaccccacagttcccacggcatctgccactcttcctcctccctaaatgttcactccacttacccagcttgtagtatggggcaggcacagctcccctgatagtgacaggcacagggcctagttggctgcccttgggcacgatgacgtagaggaggccgccccagaggcaggagactgaccgctcagtcctgtccatccagcattggtgagtcaccacgggggctcgagatagcttcctggccttggtaaggtcatcggtgtggcagcctatctgtacctggacaggtgattccaccaagcgttggagaaattagagtctttgtgatgctttgtgatgtgcgtgtgaggttgtgtagatggaaggtattagacaaacatgcccatgaaaccccagcttcccttttctatgtgctaggcatggaaacttatgaaattttagcactccaaagtcatttggacttcaaggcatttaaaatcatttttctaaggatttaaacagctccactataagtcttcacctgacatgaattggtgagagaccaggctgatcctggcaaaggtcttgtgtctttctgccaggcaaaatcctgggttcttctagcaggacctaagccagtctggggacgctgatattgaggatgagctgggggactctgctctgtcctctgtgaacacacaggaggcccatccagagtgagtgaggttgattctctctccctctttgcccagagcttccctttctggccgccagatgggtggagatctgttttgtctggagtcctggagttgcttttcttaggtttgatataagcaagctccagaaagaatgctgacagaaaagggaccctagctgtggtaggaagtggccctcagagtcaaggaggcaggatgaatttaaattctgcatgtagggcatattttggggagtgatgggattatgcacacccttcaggtgtcaagataaagagataaaaccagagtttgtacagaatgagcttgctgacacacagcctaaatttgtaccgcatgtttcatacttaactccctctggagtttgcacatggggacccatgaggagggcatgaagaggttaactgccccatggcccgaggattttccagcccaaacaaatctttctatcaatcacctactaatcacagaatccactccctacaccttttctactaaaataactctttaaaataagtacaatgggacagatttgagctgggctcctgtctccttgttaatcaaattgcaataaaatgttttcttttgtt

SEQ ID NO: 68542 - DNA, 794 bp, Homo sapiens
ctctgggcagcatggcgtctttccggcttctccaaacccttgcgaaaaactttattggcaaagctatcagagaacggacagtgtacccactgaggcggccaaagcttaactggatcagggcaggatgacatgaccttgtggtagatcccagaactgaggccccaggatgacagaacaggagaccctggccctactggaagtgaagagggatcctggtgtacgggctgagcctgttatgcttttctgcccttcggccctttggggagccacggcgggaggtggagatccaccggcgatatgtggcccagtcggtccagctctttattctctacttcttcaacctggccgtgctttccacttacctgccccaggataccctcaaactgctccctctgctcactggtctctttgccgtctcccggctgatctactggctgacctttgccgtgggccgctccttccgaggcttcggctacggcctgacgtttctgccactgctgtcgatgctgatgtggaacctctactacatgttcgtggtggagccggagcgcatgctcactgccaccgagagccgcctggactacccggaccacgcccgctcggcctccgactacaggccccgcccctggggctgagcctctccgccctcgccctcggagtagggggtagcggcttgggtctgacacatctttgaaccttgtggccaggcctggacttcgcccccaggcctaggaccgcggtgggtggaaccctgctactgccccaacagggactccaatcaatcggagttctcc

SEQ ID NO: 68543 - DNA, 1616 bp, Homo sapiens
ggaggttgcggcggcggctgcggcgcagcccggggcggcgggtgggaagaggactaccagaggggcctgcgggagacccagggtcggacccataggagtcctgtcgtcaggacctccttgatcggtcttctgcttgggttctcggtgaaggaggagcttcggggtgtcggctgggctgcgcggactcctcttgggatccgatgatggatcccacccggtgatcgggaatggggttacaatgcagtgaggcggaaaggctctcgccggggcacagaaagatccccagggccgcaaggcgtgctgtcgcctgcaaaggcactgacccacgagcccactgcctccctccttcctgggtggagcaggggcctgccttcatctccaaggcccgggggctccggcatctcgacgcggcttccggcgacacgggcaaagagagacagaggctagtccgagccggagccagtgtgaccacacgtggcactgacgtcccccaagagcacatgcagtgagcctgtgtctctgaggccgtagtgggcgacgacgagacggacagtgatgtccaggcctgcgcccgggggccactggagacctgcccctcaaagcggaggaaacgccaagctcacctgaaaacctgcgagacagggcctgtgcacgagtccagtactcctacttcgccaagtctcagggacccatccccgagcaacggtggcggcgcagagaagagcacggcgccggcgcaggtgcagagagacaggaggctgatggggggaagttgaggcacctggggcagagaaaaaaatgcattgccaagaggtttctgggtcatctactgacgaaaatgtcttcccatcagcccttgcgctggtccccagggaccctggcatccgtcgttggcgcccagggtgcgcgtcgggccactaggggtaccccaactcggacagaaggcccatgagttgaatttgaagtttgtgggaatagaggtgaggcaccaggggcagaaaaaaaacaggagacctcgcctcagacaagcggggcctgggtcccccatggatgaaagtgccttcccattatgctgtaccctgggcagagtggacagtgacgaccctggttcgagcccagggtgcgcttcgggaccgcttgcggttaccagaaagcgaacaaatggtccatgagcggaaggtgaggcacctgaggcagagaaagtaaagaaacgcgccgccgagaagcagtgcctgggtccctcacggaggaaattgtcttctccttagcccgttcgcttggcagtgaggtccctggcgtccctggtttgatcccagggtacgcctcgggccactagtgttaccccaaggtgggcagaaagcccataaggggaaggcgaggcacctggggcagagaaaaaaaaaaacttcgccgcaaagaagcgcggcctgattccccacggacgaaagtgtcttcccatcagtccctgcactgggacccggggaccctggtgtccctggttcgagctcagggtgtgcctcagccgctacgtgcaccccaaggggagctttgggagcccaaaagccaataagggaaagtaatttttaaggcccccagtggtgaggcccctgtcacag

SEQ ID NO: 68544 - DNA, 476 bp, Homo sapiens
  misc_feature (1)...(476): n = a,t,c or g
attatacaaggaatgcttctaatctggaaagaaatgacctacggattgaggatggcatctcttccacactgccgtccaaagaatcaagaaggaagggtggtctggactacctaaagcaggtagagaatgaaacaagaaacaaatcagaaaatgaaaagaaccgcaatcaggaagacaacaaagtcaaagaccttaaccaagagattgagaaacttaagacgcaaatcaaacactttgaatcgttggaagaagagcttaagaaaatgaagtccaaaaataacgaccttcaggataattacctaagtgaacaaaataaaaacaaattattagccagccaattggaggagataaagctctaatcaagaaacagaaagagttagaaaatggagaggtagaaggggaagatgctttcctgccacaaagcaacgaaatctcgaccgggngtcgtccgatgtctctaagggctatacgactcg

SEQ ID NO: 68545 - DNA, 1686 bp, Homo sapiens
  misc_feature (1)...(1686): n = a,t,c or g
ataaatgatgagctttgcgggcatgcacgaggtggaccatgtccagggagacgtggcattgggatttggtgtcctcgaatcctttcttgtgctccagctcactctgcagcttggacatttgcagtgagtggctcatttgcgaatctccctgtacatcttttgccccaatgagcttccctctggatctctcataatcctccttgtacttcacctcgctagccaggtccctcttggctttggctgccaggaaggtcaaggaatcaagacgcagctcaaacccttttgctttctggttttcccagctgctcttatacagtttctcgctgagatttgcagcattggctcgggcctgcaggaagagaggctcgtctttgctgatggtatactgatggacagactgctcatttcctgccttgtaggccaccccgctctgtagctcctggctcttcttggcgtgctccatctgggagctgtcggtcacgctggtgaacttcagctcatcgaccctctgccggtagtttttctcgctgaccagctgtccagccttcttggcttgttccaagttgagactcccctctgtcagccacccaactcccttcatccatgccaggtcagccttgtactgcagctcgctctgaagcccatagaccttcttggcccactgagtcttcatatcttcaggcagcacagtgtattcatgcagtttcttcctgtagtccaggtcactggcgagagtttgggccttcttagcatgcctgatgtttaccatatccatgggcaggtgaaaccgggtcttactctcttcaaagcctttcttatattcaacctcactgctcatcttagcaatctgcagggagtgcagaagcctagagtcggctgttcccatggctttgccttttgtcttttcatattcttctttatatttaatattgctagcaagctccccagaggctttggcggccagcagagacatggcatccagcttcatctcaaatcctttcccctttgtcttctcccagccttctttatacttaacctcactgaagagtttggcattggttttggccttcaccagctgaaggaacatcctggggcaatgtgtaattcaacttatttttctcatagtcagcacggtaattcacatgactcagctgctgggcattgattttggcttgaacaatctgtggggtgtcagtcaccaagctgtacttcaacttgtccgatgctctgcctataattggcatctttcaagggcaccagtttcatagctgtttgataggaaggcgtgagagtggctggggtantttgtaagtcgacaataccatggttataatcagcctttgtaggcaacgttgcttgccaggctgcccaactttcatagcatgcagagtgcgtctgtccataccaactccttcatagcggcctctcatgtggttctggtagttttctttatatttattctcactcacgagtttgtttacgctctgagcctgtttgagaaccaagttgtcttgagctggaagcgagtgataatgtgcagcgcctttcatcttatcgaagtcctgcctgtatttgatgtcactagcgagctcctgaagcttcatggcgttctgatatgctggagagatcatagctgtgaaagctgccctttcccctgtgctcctcatactcctccgggtaaccctg

SEQ ID NO: 68546 - DNA, 1344 bp, Homo sapiens
ttttttttttttgctgctgggtcgggttttatttcaaatgcagccacagaggcggtttctgcacaggtacgtgatccgactccacaagctcccaccaggggctccccatgacccgcaatgacgctgtgtggggtcaaaggaaaacaggccacagccaggcccctcgatggacgcaggcaggggaccaggaatgcggcccacgcagggggatcgggaatcaggcggaaggtgcaggtttgcagctggcgggaggagccagcatgccccaatctctaaaatattcccggtagaaaaatagacatttccctccaaagcagattcctggggctggagggtccctccaaggccaggggtccgggtgattccagagcatccacgctctgcgctgaaggcactgaacctgccatcactgtcacagccgtcaccggccaaggagggtctggaggagggaaggggcccttgcgaggctctggtgctggtgatcccggcccccaccaccggaggagctgaaagcccttgctcagccgctgccctgctggtgaacccggcccccaccgccggaggagctgcaccctgtgtggtctgaggcagccctgcactgggcagtggccccgccccgcgctgaacccactaggagagcagctgcagcacctgtcggatgcgctgggccctccccggcagggggggatcagagccctcctcatccagctcccgcatcagggcttccgccttctgcaccgtcagctctcgggcccggccctgcagcccctccaggtaggccagcagggtggagaagtgctcatcgggaaccttgtcactgtcatacatgtgcagcaggagccacgtctgcctcgtcttctgaaacctccagttcttgtgcttttgggcccatctgcagaggtagtccagggccagttcggcccccgagcgcctggcaggcgggtgctgggccacaaggcctgcctcccgcagacgctgcctctcctctttcttccgttcctttttcagcttcctttccaggaccctctgctcctctggggacagctctggctctgcgtccagcccgggcctgagcacagcttcgcccttggagccggctccttcgccacttggtgcagcctcagggcccagcagtggcccctctgctgacgccttcttcagctttttgttctttttctctgtcacttcaggaacttttctcttctgttttgccatcctgcgcccacctgcgcccacgtcgcccacctaagcgtgaacagctgcgtcgcggacgccgccttccggcagggacccgcggacgcgtgggtcgacccggcaaaacgggtccaacctagggcgtcgagg

SEQ ID NO: 68547 - DNA, 1617 bp, Homo sapiens
  misc_feature (1)...(1617): n = a,t,c or g
ttttttttttttctgtctaaaatgacaacgatcgtttggagaagtttattaccacccctaccctccagtgggatctcaatgtcacgatgagtccggggctggctttccgccgggaccctcctgtcctggcacatggcccaccccagcacgaagcctggccgggagggctcaggtgggtggctgctaggccaggcctccccagaacgactgccccatgtccagcctgtatctcctgagtgccatgctgcactggggagggacagggctggctcggggctccaggaaagatgcctcacatgtgcctagaaatgtaggcgtcaagggaaggctgtgtgtgggggcacctgaggggctgggcttcccaggcatctgagttcttacggagccctaataggcacatccccaaatggttgtatgaggatgagcacaaaaatagcagatggggtcaccctcaccctccactgacaatggactgggatccgactcatgcaacattccttctcggccgtaggttccacatccatgggttaggtgtgctggcctggagcccgccggccccggtccccaccgcacaaggaccccatcacaagtgggtgtcatactcttcctccagaaacggattaagcaaccagcatgtgaaccttacgctctgtttacaggctgagtccccacagctcttccagcttcagccaggccagggtcaccttcagattgaatgtgcagggcccctgaggactcatgtcctgagatggcccttcttcctgggatgggacccccgggttcaggtgagaggtgttcccgggccccttcacctggggctcaggtgacaggaggtgttccgggccccttcacctggggctcaggtgagaggaggtgttccgggccccttcacctggggctcaggtgagagcaagtgttccgggccccttcaccgggggctcaggtgagagcaggtgttccgggccccttcacctggggctcaggtgagagcaggtgttccgggccccttcacctggggctcaggtgagagcaagtgttccgggccccttcaccaggggctcaggtgagagcaggtgttcccgggccccttcacctggggctcaggtgagagcaggtgttccgggccccttcacctggggctcaggtgagagcaggtgttctgggccccttcacctggggttcaggtgagagcaggtgttcccgggccccttcacctggggctcaggtgagagcaggtgttcccgggccccttcacctggggctcaggtgagagcaggtgttccgggccccttcacctggggctcaggtgagagcaggtgttccgggccccttcacctggggttcaggtgagagcaggtgttcccgggccccttcacctggggctcaggtgagagcaggtgttcccgggccccttcacctggggctcaggtgagagcaggtgttctgggcccctgcatctgaggcccgggagttgaccctgacttcctggccccagaaagaaaagggaaaactcagagatcacaggagaagggacacaagcggggagggtcgcaggctgccccaaagcccagctccaggctcaggaaagcccctccccactncacccttccggagggc

SEQ ID NO: 68548 - DNA, 659 bp, Homo sapiens
  misc_feature (1)...(659): n = a,t,c or g
taaaagtcaagtcttcatcatctggtttaggccatgagtcaacacacagtttttttttaaatactgaatgcagatgcttcaaaactcccagaatcttttgcacttgctcctcctgttttcaaacttgcattcttcttggatgcttcttctgggttgtcattttgaagaccattttcaaggatcnnnnnnnnnnaagggggcaaaatttgtggggagggcttgccaaaccaccaaaaatagcataatctgcagccggtccatacatactcttgagaaaagacaatattttgttgaagaagaatgctaactatacggtgacaagccataatgtacaacaggcatgagagctgttcttttcaacctatcaacagcatgtacatttgcttgtttcttcactaaaattccaccttttgctgtgttttgcaaactatagcaagtaaaagtggtgtgtttgcatccttgttcagcacttcagtatccttgttcagcacttcagtattcacatggtgtgagggcagtttttctgccagtagtgtattctcattatacacagcatagtgtagtgcattgttgctatagacatccataagatctgggttggtgccacattctagcagaatgatgacacaaatctcttcttggcaaagtacagccttcag

SEQ ID NO: 68549 - DNA, 463 bp, Homo sapiens
agaaaccaaatccattgtggagctgatggcaattcaggagaaagaagggcaggccgtggctgtaccatcttcaaagacagactcagatataaggactttcattgagagcaataatcgcaccaggagtcccagcctccttgctcacttagagaacagcaatccttccagcattcatcacttcgaaaacatcccaaacagccttgcatttctgcttccattccagtacataaaccctgtctcagcaccactgctagggttgcctccaaatgggctactgttagagcaaccagggttgaggctgcgggaacccagcctttcaactcagaatgaatataatgagagcagcgaatccgaagtttctcccacaccttataagaatgatcaaacacccaatagaaatgccctgaccagcattactaatgtggagcccaaaaccgagccagtctgacgaaatcgtcgacag

SEQ ID NO: 68550 - DNA, 669 bp, Homo sapiens
ctggaagtgaccgtaagggattgccatcaatatcaaattttgaatggcattgagccacccagtgatttcctttttggcatcgtgggcatatagtagaaagtggggcttgttgttgaaaaaattttggttgttggtgttgaaaagaacagcggcctgtatgccaaggacaatttcttttagaatgtcccgattggctgcataggaagcatttgccagggaattgtccaggcattcgaatagagaccatggcttgtgccatgaccattgctgtacgcagagttcccctcacgccttcacagactttaatgtatgaggtgagtacatcaccccctggtggaattttgcctttaatggggcaaatagccacctgacagtctggatttacttgttcataagccataagttctataacaagtcattggccctggctatcagggatagctttttctgctgcgtcttgaagatgggcaataaagtctggatacggttcatgttgtccccgtctgacggctgttaaaaacatgggcatagtttgtcatcatcttgaatcttgtcccaagcatctaagcagcatttccacagttgttcaataacctcatcatttagcatagtttggtttcgaattgcagcccactggcccattcccagtaattggtcggctgtaacaat

SEQ ID NO: 68551 - DNA, 455 bp, Homo sapiens
cacatgtcacactggtaaggccctgatccagtgttaactctgatcttgaaggagcaaagaggtgtggctacaaaattgcccaaatgtattttatttgtctagtgtgaactctctgatattcaaggagaaaagaccttcaggtaactttttttccacatttgctgcaatcacaagaccttactccagtgtgaactctcctgtgtttaatgagactgaaagtttcagcaaaggatttcccacattcactgcactcataaggtggtgtgaccagtgtgaactctcttatgaacacagaatgcagagctgtgggtagatgacttcccacaatcactgcattcatatggcctttctccagtgtgaactctctggtgtgcaatgaggtggtccttcttgctaaaaactttctgacaatcctcacactcatatggcttttctccagtgtgaactctggtgta

SEQ ID NO: 68552 - DNA, 564 bp, Homo sapiens
tttcgtgttttgactgagcagaatggtgccattgcagatcaacacgcactttaaataatcaaaacccctatctttcccctgggaaggaggaagccgaggaaggctgtgtttctgactcacacgggggagtcgggggagtcgtaaacaaccctgaagagaacagccaggcctgttcccgcaagcccagacaatgccggtggaggaatttgtggctggctggatctctggtgagacatttttcttccttctgtcacatcacacccaatggtaggtcacttcctcgggaagatgggtgacatgggaggagcagagaccaaagtctgagttccggcctggcgggaggatcacttgagcccaggagtttgagaccagtctgggcaacatagggaggcccctgtctctacaaaaaaatcaaaataattagctgggcatggtggctcacacctgtagtcccagctacttaggaggattgcttgagctcaggagttcaaggctgcagtgagctatgactgcaccactgcactccagcctgggtgacagaatgagaccctgccacaaaaaaaa

SEQ ID NO: 68553 - DNA, 816 bp, Homo sapiens
  misc_feature (1)...(816): n = a,t,c or g
cacccacgcgtccggtgaacatgaacctcatggatgcctccgtgcctctccctggcccttgggctgctggagagtgtgaccttgagcagcccagccctgggccagctggtcaagagcgaggtgcccctggataggctgctggtgcacctacaggtgatgaaccagcagctgcaaaccaaggccatggccctgctgacagccttgctgcagggggccagccctgtggaacgcaagcacatgcttgactatctttggcagaggaaccttcgccagttcatctataagaacatcatccacagtgcagcaccaatgggcgacgagatggctcatcacctgtacgtactgcaggctctcatgctggggctgctggagccgcgcatgcggacgcccctggacccctacagccaggagcagcgggagcagctgcaggtcctacgccaggctgccttcgaggtggagggggagtcctcgggtgccgggctaagtgctgaccgtcgccgttccctctgtgcccgagagttccgcaaactgggcttttctaacagcaacccagcacaggacctggagcgcgtgccccccggtactgctggccctggacaacatgttgtacttctccagaaacgcgcccagcgcgtacagccggtttgtgttggagaacagcagccgcgaggacaagcacgagtgcccctttgcccggggcagcatccagctgacggtgctgctgtgtgagctgctccgtgttggggagccctgctctgagacagcccaggacttctcacccatgttcttcggccaagaccagagcttncacgagct

SEQ ID NO: 68554 - DNA, 1682 bp, Homo sapiens
ggggttccgtgccccagagtcgagggagccgtgggcttggggtccggatcgcggccgcggggcgctggcgtgcggtgtcatttctgcggtgtaaatgctcccaccttggccgatttcaagccaccaggtgaggatggcactgcaacatcttccactgaggctccagctgccctctcaggtacatcagggcctggacgtcctctggggaggccacagaggaagggcctaggctaggaggtgcctctccattcagcacccgggccaggatccctgctagctggggtgtggagttctcctccaggagggccaggactcggccccctgccagcccccgaagcattgcagccaggagtgcagcgtgggggccctgcaggccatggccaggccccagcgccaccagcaccaggtcaggctggaagccataggccaggggcagcaccaagcccaagatgcagctcaggaaaccaccggtcatcactggcagtggcgtggagacatggaacatggatagggcagccgcctccttgcccctgatgttcagccacagactcctcccgtcatgggcgaggtctggaggccggtccagctgtcccagggccacgcacagcagcctctgggctccgtgggacaggcctctccgaacagccacatccagggtggctgctgcagcagaggctggagtggctgctataccactgttcacctgcccatccagcatcccatctaagaggtacaggagcttcccaagtgcagtgagggcctcctcccgggccagggactcgtgtggcctggcccaggcttctgtctcctccctcagggctgacgcttcctgttggatgacgtcagggggcagaaccaatgtgatatccggcgttgtcagggcaacagcggtgcggacagagggtgcggggcagaggcacggctggtccaggagggagctcggtgcagatgcagctgccttacacactggacccccaggcagcagaggtggaggcctcccctctggggagtggctgctggggctcatcggcacagcggtcacatcttgctgctggaggctcttccagtgcggggcctgggcagcacgggcactctggatggactctagggcactctgacatggcgccattggccctgacaggggtggggccgggtcacccagcagcgtctgtactgtcatgcacactgactccgccagtgactccaggtggtagccgccctccagcacggcacagacccggccgccggccagcacctgcagcagctgtgtgaggtgggcgaagcactctggcgtggcctgcatttgcccctcagggtccccgatggctgagtcaaatcctgccgagaccagcaccagctcagggtcaaactacaggccaggccggagtggggagggtcgacagagaggggctggagcccaggtgagggcgagccaggcccatcccatcccctcctgagcaccttccccagccacacaggagtgggacagctcataaccctcctcctgccttcactggcgcactccaggcacaaggtccccctcccacccggctgccctgggggagccctccgtgcagtcacctcaaaggccagtgggagcagcaggtgcaggaaggcagccacgtagtcagcgtttcccatcccaacctggcaggacatcccaggctacacccacgcgtccg

SEQ ID NO: 68555 - DNA, 1798 bp, Homo sapiens
  misc_feature (1)...(1798): n = a,t,c or g
gcacgagagctcgtggccatgatcgtgaaccacctcaagagccaggggctcttcgaccagttccgcagagactgcctggccgacgtggacaccaagcctgcgtatcagaatctgagacagcgtgttgacaactttgttgcaaatcacttggcaactcacacatggagtccgcatctcaataagaaccagctaagaaacaacattagacaacaagtcctcaaatcaggaatgttggagtctggtattgaccgaattatttctcaggttgtggacccaaagatcaaccacacattcagacctcaggtagagaaagctgtgcatgagtttttggccacgctaaatcacaaagaggaaggaagtggcaacacagctcccgatgatgagaaaccagacacttcccttattacacaaggtgttcctactcctgggcccagtgctaatgtagccaatgatgccatgtcgatattggaaaccataacttctcttaaccaagaagccagtgctgctagggcttcaacagaaacatcaaatgccaagaccagtgagagagcgtcaaaaaaacttccatctcagccaaccactgatactagtactgacaaagaaagaacttcagaggacatggctgataaagaaaaatctacagctgactctggaggtgaaggactggaaacagccccaaagtctgaagagttcagcgacctcccctgtccagtcgaagaaattaaaaattacacaaaagagcataataatttaattctgctaaataaggatgttcaacaggaaagcagtgagcaaaaaaataaatcaacagacaaaggtgaaaagaagccagccagcaatgagaaaggagaaagaaagaaagaaaagaaggaaaagactgaaaagaaatttgatcactcaaaaaagagtgaagatacacagaaagttaaagatgaaaaacaagcaaaggaaaaagaagtagagagtttaaaacttccttcagaaaagaacagtaataaagctaaaactgttgaagggacaaaagaagatttctctttgatagattctgatgtggatggacttacagacatcacagttagctctgttcataccagtgacctttcatcttttgaagaagatactgaggaggaagttgtaacgtctgatagcatggaagaaggagagattacgtcagatgatgaagagaagaacaaacagaataaaacaaaaactcaaactagtgattctagtgaaggaaaaacaaaaagtgtacggccatgcgtatgtccacaaaccatatctttactcaaaatactatagtgattctgatgatgagcttactgtagaacaacgacgacagtccattgccaaagaaaaagaagagaggcttttaagaaggcaaatcaatagagaaaaacttgaagaaaaacgaaaacagaaagcagaaaagacaaagtcttcaaaaaccaagggtcaaggcaggagtagtgtggacttagaagaatcatcaacaaagagtttggaacctaaagccgccagaattaaagaagtccttaaagaacggaaagttttagaaaaaaaagtagccttaagcaaaaagagaaaaaaagattcaaggaatgttgaagagaactccaaaaagaaacagcaatatgaagaagattccaaagaaacccttaaaacaagtgagcattgtgaaaaggaaaaaatttcttcttcaaaggagctgaagcatgttcatgcaaaaagtgaaccaagtaaacctgcccggagactttcacaccctttgcatgtagttgncgaaaacaaaaatgaatcc

SEQ ID NO: 68556 - DNA, 502 bp, Homo sapiens
ctcacaaaatgggatctctttggtaattgctacagattattgaagactggaattgaacatggagccatgccagaacaggtaggagtttattggtattccttctgtatgactctagaaagttgtttttctgaagtcatatgattatcagaagccttttatagaaagtaattgacgattcattagggcagctgcctcttttgagagaattattgctgtagtaattaaatgttattgataggtgtattatactggcttatgtgttaagagtagaaaaaacttttgctataacatatcttaaaaattttactgttaaggtagacttttctctattaggagaaataccattaatatctatggcagcaattttaaaactttggataatgaaaattgatgatgggtatattccagccgtgttctaggtattaatcatattaagtatggcttagtttttatattagaaccatagttaaattaacatggcagcctttaatagactttagaa

SEQ ID NO: 68557 - DNA, 793 bp, Homo sapiens
  misc_feature (1)...(793): n = a,t,c or g
tctttctttctttctttctttctctttctttccttcagcactggatctcgcttacagtaggttttatttaataattctcctccttacactttctgtctcaccagtttcccctcaaactgatttacctgctacataaaattattcttattgggcttatgtgccttttcctccacttattcgacctctcacctggatggatgctcctgcagaaatctatactaacgatagtgtatatatgcctggagctacagatgaccattgccccactcaaccaggagaagaaggcactgcatttaatgttactatgggttataaataccctcctctgtgcctcggacatgcaactcgttgtatccatctagaaactcaagtctgggctgcttatcttctggagagattagctacaggaaaatggggacatttggtctccggcctctccctttctcctttaagacaaatgaaagggggagtaatgagagataccccatactttcaatataaacctgtaggaaaatcatgtcctaaaaattttgagggcccatctaaaactttaatttgggaagattgtgttaactcacatgtagtagtattaaaaaatgcctcatatggtttagtaatagactgggcaccaaagggctattttaaaaaacaattgctcctctggtggaagggaatgcctggaggctacttattttatttctcattgggaggacaaggatcatcatcctactttgcataggagggtcagctcattctttcccttataatgggaagataanggcattacccccac

SEQ ID NO: 68558 - DNA, 898 bp, Homo sapiens
  misc_feature (1)...(898): n = a,t,c or g
ggcacgaggaagtgggtgaggttggggtcccaccagagatgagggactcctggaggaagtgtggacattcctggctagggtgggagtcccaggagaggtgtgtcaaggctgggactcctgaagtgaatgtggatgtccctgtctgggatggggacctgggaggcaggagccaagggctggctacgtgccatgtcacacagcagaggagctcctcatctgccatggctcatgtgggcagcccctgacaccacccttccatctgccccacttttcagcaccctccagccctccacttgcagcacagtcccctgaggggcaccatggacaccaagaaccagcctccacatccttcctacctaacaggattcaggaggagtgggggttgctggttcggtcacagaaggacctgtattgggatgcgatgctggagaagtacggcacagtggtctccctgggtgaggaccagccagccccaccccgcccctctccctggggcctgcacccaccctgcagcaggcctagctgggcagggcctctgtgctaccagccctacccagctctcccaccttccagaggaacaccctgtcacctaccagaaccgaccccacccctccttcatgcaaaccccatgcctaactgtgccccccacccgggcagggttaccgccccaccagccagaggcacaggcccagtcagagctggggatgctgctcacggngacaggcgtctgcagaagcctgcgctcggggagtgccccacaccatccagcctgaatcacccctcctgtatcgggggacctgagccacccactcatggngggacggagcttggccacagcacaagcctcaaaggaggggtgtgagngccggactcacctgtttgcccctgcccccaggaa

SEQ ID NO: 68559 - DNA, 1267 bp, Homo sapiens
ttttttttttttcagaaacatatcgaaaactttactagaaatatagagaaaaaaaaataactgcctgggaggtttcctgtcccttcaggatggatgaccaacagatggggcacctaggtccagtggggctgctcccgatctactgtttcttcctccaggagcaaggcatctagctcctccagccgctgctggagcagggggcccacatcagggctgggggccacattgggaggaacagtcctgccccctgcagcccggaccccacgggacggtcttcgtgatcgaggaaggctgctgtcccgaaattccacagcccgccggagcttccttgagctggtgaaaatcagagtcccattgcgctcccggggttcctcaaagatggtctcaaaggtcctcctggttgtgggtgattggtaattcttgttggtgtaaatttcttccaagctgaactccttcttgttcaacctgattggtcgaggcagtcccattggtgtaaggtttagctgaggacgggctggtgttctgcgtattctgaatcgagaaacctttcccatggtcttggtctcaggttctgaaagcacctggtcctttgaggctcttggctccttccctttggttgaacccaacctgggttctgctggttcggagaaggaagtggatgccgtggacgagcaagatgtggtgagagaaggggaggctcccactcctccgagagggaagacctctttccggagacagggccgagggggtggcggggctcgggccatttccccaccacccacagtgtgccgccgcggccgtggtcggcttggttggggtggagcaggtggccaggtgcaggtacctgggccagggggccccagatcagggcaggagtagcttcggcccagagagggcttagggagaagtgctggggtattgtggtcctgagttcgccactggcggattgggggccgggggctgacagacgcagtgccctcagcagccccagactgctcggcctctgagatggcgatcttcaactccagcttcattgggggggacgggggtgggggctgtggggttttgttgggcgtgaggaagatgtcagcaaagctctccagcttggagcggacggaacggaagagcggggccaagccccagggactgaggcgggggcgtaaaaggctggacggtggtggggtggatgggagctccagagcaggatctggggctgttggtgggctctccagagggtctgcaggcagagcagatggctggaatgggg

SEQ ID NO: 68560 - DNA, 2103 bp, Homo sapiens
ctaagatgcttttatttaccccagttaataccaccttacggaaaataatatttgctaatattgtttattgtgaactagaatcaaagtttttgtatgcatcaatgcacttaatccttataacaaccttatgaggtagttctattccctttttatagctaaggaaattggggtacagagaagttagccccaaggttatatattgcaagtaagtggcagagcagggattcatacaaagaccttctcactcagcagtcttcactcttactattcctgccactaggtagaaaaagaaagatttcggccgggcacagtggctcacgcctataattcccagcactttgggaggctgaggtgggcggatcacgaggtcaggagatggagaccatcctggctaacacagtgaaaccccgtctctactaaaaataaaaaataaaaaaaaattagccaggcgtggtggcgggtgcctgtacgcccagctactcgggaggctgaggcgggagaatggcgtgaacccaggaggaggagcttgcagtgtgccaagatcgcaccactgcactccagcctgggtgacagagcgagactccatcaaaaaaaaataaataaaaaaaaaataaaagatttcattttatgtgaggaattattttaataaaaaaaagagggtttatgctctatagtaataaaatttaccagtaacacccaatcagaaaattttggttccttagtatttagggaagacttttgtttaaatctcttatggaattttacatgttttgatttagaaaagtagatgcaatataatatatttcaagttttatacatattagatgaattgcatggtattttaggcaacttaactataaacaaatttattcatagaagcattgttgccaacaatttagatgacctcgatgaaaaaacacaccaattgacaaaactggctcaaaaggaaataaaaaatccaaacagacctgtaacaagtaaagagattgaaccagtaatcaaaaatctcccaacaaagaaagtccaggattaaatgagtttactggcaaactatgccaaacatataaagaagaattaacactaatccttcttgaactctcccaaaaaatggaagagaaaggagcaccctgtgacattctataaggcggacattaccttaacaccaaagccagacaaagacctcacagggaagctacagaccaatatcccttatgaatatagatgcaaaaaaacttcaaaatactagcaggccaaatccagcagcttattaaaatgatcacacagcatgaccaagtgagatttatcaaagaaatgcagggatggttctacatacaaatgtcaatcgatgtaataatataccatattaatagaatgaaggggaaaaaacagcatgatcacctcaattgataagaaaaagcatttgacaaaaatccaacaccctttcatggtaaaaacactctgcaaactaggaagaaaagggaactttcttaacctgataaagacatccataaaaacccacagctaacaacataatagcaaaacattgaaaatttttcccctaatatcatgaaaattcctgatttccccactgctattcaacattatactagaaggtctagccagagcaattaggcaagaaaaagaaataaaatgaatcccaaataggaagaagtaaaactacatttgcagaaaacatggtcctatatattaaaaatcctaaagaatccacaaaatgattccggctgattttaaaaattcagcaatgttgcaggttgcaagatcaacacacaaaagtctaagaaaaacctgaggggaaattaaaacaatttcatttacaataacatgaaaaagaataaaatacttagaaataaatttgaccaagaaagtgcaagacttggacactgaaaagtacaaaacgttgctgaaagaaattaaagaagacctaaataaatggaagacatcctgtgctggcaggttggaagacttaacattgttaagatggcattactcccaaaattagtctatagatttaatacaatccccattaaaattccagtgacccttttacagaaactgaaaagctgaccctagaatttatatggg

SEQ ID NO: 68561 - DNA, 1627 bp, Homo sapiens
cttaggagccccccaccgagggtggacacagtccctttccttcctgcagatgcctaggcaggaggagggcttcctgcctgtttggcaaagtcccaggcagaggccaaggatgaggcctgactcggctcctccctccacatcagccagggcatcagaagttgggccagggcggggtcttccctgctcgattttggacgaggcctaagtagaccccctatgccctgccccagccctggctctttcctaaccccctcaacggtgggaggaactggcagagggtgcgcctggccacagcctccccgcatctaaaggccccttcagttcttgaccaaaggtgctacgagaacctgccgtggaaacttccagttgtgcgtctgccccactcgctgtgtttgtccgtgggttcatacatgcattgggtgctaggccccaggctgccgggtggcaccctttacagttcctttgaacaggggcattgaaggcctggactgcctctcgcctcagtaggcctggggaccaggcttgggtctggaggtttgctgtggaagtcaccaggcctcccctcctggcccaggtgtgctgggggcaccgtgccccccacccccctgccctcctcagggtggtcagcccaacctgtcggaccttcacttcacatcatggtggggaccgagatagagagggagaccccattccaagctccctcttcctcccggtgtttggggaggatgctgaagaatccattcccgagggcctcccggcttgtcccagcccctcttttgcttctgaccacggaggctttctcacagcccagcctgcctgaagcaaaggaggctcccgtgtcctgggcagcttctgtttccctctgctgcctgggagctgaggcacccgtgccagtggcagaggccacagccccagccttaggccaggccctgggagggcaggcaggcaaaggggagaccagagggtctgtgttctccaggagaatgagggtgttggtcccagaattgggaccggggccccgctggccagccctgggccacttcccgggtctccattgtgcgtgggtggcgtgttccaggcgtggctggagctggcttcctggctgtgctgccatgggcccctccctcaaaagcacgttggcaggaggccgatcagaaccctagcgcctttggtcctaagaatgggaggctgccttccttcccaatctccctgccagggcccacagcgtggccctagccctcccctccccgggatgtagaacggggaccctcgcagggttggggcgggggctgatactcctcggcccctccctaccctgccctgtgtgttggctttgtggccgtccaagtgccaattggcttttcgcccaaataagggctggtatttctcctctgtccttggaggtgatttccccctgaccccctcccccaggtgagtgaccacctgggtgccagttacaggtgtttccagagaccatagaaatgtgttttcctgagagttcgtgtcattcgtgacttttttgtaaagaagttgtgttttcagaggtgattttatgacaggaaagtgaaagaattagttttgcaaaaaaacaaaaacaaaaaaagaggaaaaaaaaaaaaaagggggg

SEQ ID NO: 68562 - DNA, 1100 bp, Homo sapiens
cgtggagcccggcgccttcaacaacctcttcaacctccggacgctgggtctccgcagcaaccgcctgaagctcatcccgctaggcgtcttcactggcctcagcaacctgaccaagctggacatcagcgagaacaagattgttatcctgctggactacatgtttcaggacctgtacaacctcaagtcactggaggttggcgacaatgacctcgtctacatctctcaccgcgccttcagcggcctcaacagcctggagcagctgacgctggagaaatgcaacctgacctccatccccaccgaggcgctgtcccacctgcacggcctcatcgtcctgaggctccggcacctcaacatcaatgccatccgggactactccttcaagaggctgtaccgactcaaggtcttgggagatctcccactggccctacttggacaccatgacacccaactgcctctacggcctcaacctgacgtccctgtccatcacacactgcaatctgaccgctgtgccctacctggccgtccgccacctagtctatctccgcttcctcaacctctcctacaaccccatcagcaccattgagggctccatgttgcatgagctgctccggctgcaggagatccagctggtgggcgggcagctggccgtggtggagccctatgccttccgcggcctcaactacctgcgcgtgctcaatgtctctggcaaccagctgaccacactggaggaatcagtcttccactcggtgggcaacctggagacactcatcctggactccaacccgctggcctgcgactgtcggctcctgtgggtgttccggcgccgctggcggctcaacttcaaccggcagcagcccacgtgcgccacgcccgagtttgtccagggcaaggagttcaaggacttccctgatgtgctactgcccaactacttcacctgccgccgcgcccgcatccgggaccgcaaggcccagcaggtgtttgtggacgagggccacacggtgcagtttgtgtgccgggccgatggcgacccgccgcccgccatcctctggctctcaccccgaaagcacctggtctcagccaagagcaatgggcggctcaca

SEQ ID NO: 68563 - DNA, 739 bp, Homo sapiens
tcgctgaagaaaaaccgtttgaagtttagaaatgcaggaaatccttcaaccagcttgaatcactgaatatgcatttgagaaatcacattagattgaaaccctacgaatgcagtatatgtgggaaagcctttagtcataggtcgtccctgcttcaacatcacagtattcatactggagagaaaccttacgaatgtattaaatgtgggaagaccttcagctgtagttcaaaccttactgtacatcagagaattcatactggagaaaagccatataaatgtagtgagtgtgggaaagcttttagcaaaggctcgaatcttactgcccatcaaagagtacataatggagagaaacccaatagtgtggtaagtgtggaaaagcctttagatcatatgaatccctatacatgtgagaaatcttacagaagagaagcagtgtttatcacggtaaacttcattcatagatcctcccttatttaacatcagaaaaatgtatactggggaaaagttgtatgaaggtggtgaacatgggagacttttagcaatgatgcagatttttttattagagtttatactgtagagaaatcatatgaagtcaataaatgtgggaaagcctttgtcagtattaatcccttaattgacctaagtatactcacactaggaaaaatctgtgtacctgtaggagtttgcaggagattcctattgcctatagtctttcccacatatgctacatgtagtcgacg

SEQ ID NO: 68564 - DNA, 1905 bp, Homo sapiens
gcggccgctgcttcaggtcggcgggctccagggagacctgggtgggcagcgtcgccgtttctcctttcttgggcagtatttttcccagcgccacgcggaggctgggccattatgagctctgcatttccaggacctggtcactattcaggacacggttccagcgcagtgcgcgttagccatgtctcagggatgagtgacattccaagatgtggccattgacttctccaaggaagagtggggattcctgaaccctgctcagagagatttgtacacaactgtgatgctggagaattatcagaacctggtctggctgggactttccatttctaaatctgtgatttcactgttggagaaaaggaaactgccttggataatggcaaaagaagagataagaggcccattgccagatgtgccaggtgcagagattaaggagttatctgcaaagagggctattaatgaagtattatcgtagtttgacacagtgataaaatgtacaagaaacgtatgtaaggaatgtggaaatctatactgccacaatatgcagcttactctccataagagaaatcatacacaaaagaaatgcaatcagtgtttagattgtgggaaatacttcactcgtcaatcaactctcattcagcatcaaagaatccacacgggagagagaccctataaatgtaacgaatgtattaaaaccttcaaccagagggcacaccttacctagcatgagagaattcacactggtgagaaaccttacaaatgtaaggaatgcaggaaaaccttcagccagatgactcatctcacacagcatcagactacacatacgagagaaaagttccatgaatgcagtgaatgtggaaaggccttcagccgtgtctcagctcttatagatcaccagcgaattcatagtggagaaaagccgtatgaatgtaaggagtgtggaagagccttcactcaaagtgcccagctcattagacatcagaaaactcattctggagaaaaaccctatgagtgtagtaagtgtaagaaatcttttgtgcacctgtcttccctgattgaacattggagaattcacactggagaaaaaccatatcaatgtaaggactgcaaaaagaccttttgtcgtgtgatgcagttcactctgcacaggagaattcatactggtgaaaaaccctatgaatgcaaggaatgtggaaagtccttcagcgcccattcttctcttgttactcagaagagaacacacagtggagaaaaaccgtataaatgcaaggaatgtggaaaagccttcagtgcgcactcttcccttgttactcataagagaacacacagtggagagaaaccctatacatgccatgcctgtgggaaggcctttaatacttcctccacactttgtcaacataatagaattcatactggtgaaaaaccctttcagtgcagtcaatgcgggaagtcctttagtcctttagctgcagctctcaccttactcgacactgtagaatgtgtaatggaaaatttagcaaataaccaaaactcaaaatgttaattctgattattctgtatcatcaccagtactttgtactttgagtctttttaaatatgctctgttagtttgtatggaatgatatttcattgcacttttaatttaacttaaaaatgccttcccttgactgttgatatgtattttttgtgaagtgtgtgttgaagccttgcagattattttttaaattagaggtttatcactaggtatatctcctaatgctatccctcccccctccccctaatgtaaatgacgagttaatggtgcagcacaccaacatggcacatgtatacatatgtaacaaacctgcacgttgtgcacatggtaccctaaaacttaaagtataattaaaaaaaaaaattagaaaaaaa

SEQ ID NO: 68565 - DNA, 843 bp, Homo sapiens
ggcaagaatatgcgatacattgccagtcttgtcaatgctgacaaattggctggccgaactcgcaaatacaaagtgatcttcagccctcaaaagttctatgcgtgtgagatggtgcttgaggaagagggaatctatggagatgtgagctgtgatgaatgggccttctctttgctgcctcttgatgtggatctgctgagcatggaactaccagaatttttcagggattactttctggaaggagatcagcgttggatcaacactgtagctcaggccttacaccttctcagcactctctatggaccctttccaaactgctatggaattggcaggtgcgccaagatggcatatgaattgtggaggaacctggaggaggaggaggatggcgaaaccaagggccgaaggccagagattggacatatctttctcttggacagaggtaaattatgcccagcgttcctgtcatctttcagccctagaagacacgggaatatggaaggcgtggtggcaaagttaaaatcctaaagttagggctgtgaatcccagctttgaggagcgtgggtccttggccctatggaaagtatcaaagctgcccttggacatgctgtgtagaaggctgggtcagggagaaccttcatggtcagggatctctgtttcagatgtggactttgtgacagcactttgctcccaagtggtttatgagggcctagtagatgacaccttccgcatcaagtgtggtaagtgctatggtcctctgcatcttggcaagatggacgggtcatcagccttggcacctgccacgtggggcagggtttgtgggagagacccacaccctgaatgaactgc

SEQ ID NO: 68566 - DNA, 1033 bp, Homo sapiens
ggggcgagacagctctggacatagccaggaagaagcaccacaaggagtgtgaggagctgctggagcaggcccaggcggggacctttgccttccctctacatgtggactactcctgggtaatttccacagagcctggctctgacagtgaggaggatgaggaagagaagcgctgcttgctgaagctcccggcccaggctcactgggccagtgggaggctggacatcagcaacaagacctatgagactgtcgccagcctgggagcagccacccctcagggccgagagtgaggactgtcccccgcccttgccagtcaaaaactcttctcggactttggtccaagggtgtgcaagacatgccagtggagatcgttctgaagtctccagcctgagttcagaggcccctgagacccctgagagcctgggcagtccagcctcctcctccagtctgatgagccccttggaacctggggatcccagccaagccccacccaactctgaagagggcctccgagagcccccaggcacctccagacccagcctgacatccgggaccaccccttcggagatgtacctccccgtcagattcagctccgagagcactcgctcctatcggcggggggcgcggagccctgaagatggtccctcagccaggcagcctctgcccaaaaggaacgtgccggttggcatcactgaaggagatggctcaaggactgggagtctcccagcaagttctgtgcaacttttgcaagactagctccttgctggcccccacatgccccatgctaggccccaatgttcagagctgggacttgaagctcacaaaactggggagctgagacatttgttctcttggaatctcactctctctgtccccttgtgcctctgtaagctggccttcttcctgccacaggccatgcctctaccaaggacacatggcctttcccttggttaaggggctgatgggcgagttcttttcctatctcattacccgctaggggccctgggaagccctgtggctggatctaagtgctcct

SEQ ID NO: 68567 - DNA, 848 bp, Homo sapiens
cttcctgttgcagctgttccaggagctctgagtcctttggccattccaaatgctgctgcagcagctgctgcagctgctgctggccgagtgggtatgcctggagtctcagctggtggcaatacagtcctgttggttagcaatttaaatgaagagatggttacgccccaaagtctgtttaccctcttcggtgtttatggagatgtgcagcgtgtgaagattttatacaataagaaagacagcgctctaatacagatggctgatggaaaccaatcacaacttgccatgaatcatcttaatggacagaaaatgtatggaaaaattattcgtgttactctgtctaaacatcagactgtacagctacctcgagagggacttgatgatcaagggctaacaaaagattttggtaattccccattgcatcgttttaagaaacctggatccaaaaattttcaaaacatttttcctccttctgccacccttcacctatctaatatccctccatcagtagcagaagaggatctacgaacactgttcgctaacactgggggcactgtgaaagcatttaagttttttcagtaagcaagcttccttatctttaaattagtgacctgataaaatttttaagtagtttttgttcttttcgtttatagaaatttttgattccggaatggccaaaattcaagtatttaataagccctttctaatttgtatgaagtatctaattttataattttgtttcagaagagatcacaaaatggctcttcttcagatggcaacagtggaagaagctattcaggccttgattgatcttcataattataaccttggagaaaaccatcatctgagag

SEQ ID NO: 68568 - DNA, 1071 bp, Homo sapiens
tgcatgtggaaaagccttcagtgagaagtcacaccttattgcacatcagagaactcatactggggagaaaccttatgattgttctgaatgtggaaaaggcttttctcagaaatcatccctcattatacatcagagagttcacactggggaaaaaccatatgaatgtagtgaatgtgagaaagccttctcccagaaatcacccctcattatacatcagagaatacatactggggaaaagccctatgaatgtagagtgtgggaaagccttttcccagagtcacagctgattatacatcacagagctcatactggagagaagccatgtaagtgtactgaatgtgggaaagcattctgttttatacattaaagagttcacactggtgagaaaccctacaaatgtgctcaatgtgaggaagccttcagcaggaagtcagaactcattatacatcagataattcatactggggagaaaccgtatgaatgtacagaatgtgggaaaacattctctcgcaagtcacaactcatcatacatcagagaacccacactgggagagaaaccctataaatgtaccaaatgtggaaaatccttctgttcagcagtcacatgcttcattgggacatcagagaattcacacgggagaacaaccttatgtatgttctgaatgtggaaaagcctttgctaagaagtcacaactcattgttcatcaaagaattcatactggaaagaaaccatatgattgtggggcatgcggaaaagccttcagtgagaagtttcatcttgttgtacatcagagaactcatactggggagaaaccttatgattgttctgaatgtggaaaagccttctctcagaaatcgtcccttattatacatcagagagttcacactggggaaaaaccctatgaatgtagtgaatgcgggaaagccttctcccagaaatcacccctcattatacatcagagaatacatactggggaaaaaccctatgaatgtacagagggtgggaaggccttttcccagaagtcacagctgattatacaccacagagctcatactggagagaagccgtat

SEQ ID NO: 68569 - DNA, 1083 bp, Homo sapiens
  misc_feature (1)...(1083): n = a,t,c or g
gcataaaacatctttagatgactacgccaagcttggcacgaggcctcgtgccataatgtatggctgcgacttggggctggaagggcgcctcctccgcgggtatgaacagcacgccaacgatggcaaggattacatagcccggaactaggacctgcgctcctggaccgcggcggacatggcggctcagatcaccaagcgcaagtgggaggcagaagaatttgcagagcagatcagggcctacctggagggcacgtgcgtggagaggctcgcagacacctggagaacgggaaggagacgctgcagctcacgggtaccagggaacacaagacgcctccctgatcgcctgtagatctcctgggctggcttcccacaaagagagaaggaaaatgggaccaacactataatatcgccctccctctggtcctgagggagaagaatcctcctgggtttccagagagtgactctgagggtccgccgtgctctctgacacaattaagggatgaaatctctgaggaaatgaagggaagacaatccctggaatactgatgagtggttccctttgacactggcagcagccttgggccccgtgacttttcctctcaggccttgttctctgcttcacactcaatgtgcctgggggtctgagtccagctcttctgagtccctcagcctccactcaggtcaggaccagaagtcgctgttccctcctcagggactagaattttccacggaataggagattatcccaggtacctctgtccaggttggtgtctgggttctgtgctcccttccccaccccaaggtgtcctgtccattctcaggatggccacatgcgtgctgctggagtgtctcatgagagatgcaaagtgcctgaattttctgactcttcctgttagaccccccccgcaagacacatatgatccaccattccgtctctgactataaggccaccctgagctgctgggccctggggcttctaccctgtggagatcacactgaagctggcagcaagatggagangaccagaatcgggaaatggaagctttttaaagaccaagggctttcaggggatgggaactttca

SEQ ID NO: 68570 - DNA, 920 bp, Homo sapiens
ctgacttgcccaaagtgacacagctgggcagaagtgagattcaaacctaggccaagggctccagagtcccagatcttagctattttgtcgctaaagtctcttgaaagctatttaaacaaggactacgatatagcccttgttcctcttcacctcctaccaccctctgactcattcactccactatagctcctgaccttcagtctattccctgaaaatgacaagctggttctcacctcagggtctttgcactcttctcccttctcttctatatttgttgagtgaatgcggctccctctgactcctaaacctgcacttcccctgcctccaatcaccacctcctatggtgcatccctactgattttccacttcccgacctctccttccctccctctgcccagaacccggctccattctcatgcataagtcccaccctttgccactaagtcctgcccctaactcaaggacagcccatccccaaacccattccagagctctctccagccagatcagccccagggtcccgagcttccattcagtgttccctctagcccataagcccgactcctgccattcatgcagtcagccccgccccttcactcaggctccgcccagatccattaaggcccacctcttccctcagggcctccctgaacccctcagggaccagctccctcaaatcccgccccagatctatttaacccacgcaccaggaccctcagggttccacctaaatcgattaaggttcagcctcagacccactaaacccctcccagcatccacttaggtcctgcctccatcacaccagaccccgccccctgatctacaaagccccgcccattcccacaggccgcatcctccctgggcccagacccaggaccccagcttcgtccaccaccctcaccgtaggtctcagccatgac

SEQ ID NO: 68571 - DNA, 411 bp, Homo sapiens
ttttttttttttcctgagatggagctttgctgttgttgcccaggctgttagtgcaatggcacaatctcagctcactgccttttgggttcaagcaattctcctgcctcagcctcccaggtggctgggactgcaggcgcccgccactacgcccggctgattttttgtatttttggtggagacggggtttcgccgtgttcgccaggatggtctccatctcttgacctcgtgatctgcctgcctcagcctcccagtgctgggattacaggcgtgagccaccgcgcctggccaaaatatataaccttaagtgtcatcaatactctggctgaccatcatcatcgtgggactgactttggtggaagtccttggttacatgtcattattgcatttccgacaagttataaagttgtcatt

SEQ ID NO: 68572 - DNA, 2058 bp, Homo sapiens
gtgaaaggagcctccacggctgtcctcaggcaaggtggaggggtgtggcgggtgctgttggggtgctcctacccgctcagccccagccttgatgagggactgcatcgtacagcttcgggggacctccgcagtttccctgacccggtgctgcccctgaacgtgcctcacaggtccggcaggttcggctattccaggacgaggagatctacagcgacctgtacctgaccgtatgcgagtggcccagcgacgcctccaaggtcatcgtcttcggcttcaacacccgctcggccaacgggatgctcatgaacatgatgatgatgagtgacgagaaccaccgtgacatctacgtcagcaccgtggccgtgccaccgccaggccgctgtgctgcttgccaggatgccagccgagcccacccaggagacccgaatgcacagtgcctacggcatggcttcatgctgcacaccaagtaccaggtggtctaccccttccccaccttccagcccgccttccagctcaagaaggaccaggtggtgctgctcaacaccagctactccctggtggcctgcgccgtctccgtccactcggcaggtgacaggagtttctgccaaatcctgtatgaccacagcacctgccccctggcgcctgccagcccccctgagccccagagcccagagctgccccctgccctccccagcttctgccctgaggcggccccagcccgttcttctgggtctcctgagccctcgcccgccattgccaaagccaaggagtttgtggctgacatcttccgccgggccaaagaggccaagggcggggtccctgaggaagcccggcctgccctgtgcccaggaccctctggcagccgctgccgtgcgcactctgagcccctagccctgtgtggagagacggcaccccgggacagcccccctgcctcggaggcacctgcctccgagcctggctatgtcaactacaccaagctgtactatgtgctggagtccggagaggggacggagccggaggatgagttggaggacgacaagatctccctgcccttcgtggggactgatcttcgtggccgcaacctgcggcccatgcgggagcggactgctgtccagggccagtacctgacagtggagcagctcacactagacttcgaatatgttatcaatgaggtcatccgccacgacgctacctggggccatcagttctgttctttcagcgactatgacatcgtcattctggaggtctgcccagaaaccaaccaggtcctcatcaacattggcctgctgctcctggccttcccgtcccccactgaggagggccagctccgaccaaagacctatcacaccagcctcaaggtggcatgggacctcaacacagggatcttcgagacagtcagtgtaggcgacctgactgaggtcaaagggcagaccagcggcagtgtctggagctcctaccgcaagagctgcgtggacatggtcatgaagtggctggtgccggagagcagcggccgctacgtcaacaggatgaccaatgaggcgctgcacaaagggtgctccctgaaggttctggcggacagcgagcgatatacgtggatcgtgctgtgagggccaggccgccccggacactgactccaactacctccgtggcctgggaccggccgccttcctggggtggcctcttcctggccggctggcccaccgactgatgaccggcactagtgttagcctgcggaacggggctgggcagggcacgcctctgatggcctgagggtctggacgctttttatttatgcctatataagttgggaaggggcagagagaggggcgccccctgccccaccagcttgagtgccccgccttcaccccgagctgggcatgggcctggcccctcgtgcatttgccccttttctcggctacagctgtggacgttgccctcggggaggtcgaatggaccccattccccctgccctgcccgcccccagcctccccacaccaggccggcaacctggccatccccattccgttcttcttcatgtaataaatgttttaatttctg

SEQ ID NO: 68573 - DNA, 2109 bp, Homo sapiens
gcaatggtgaagccattgggcgggatcgccgggggcgcagggcccggaggaacaacagtggagaagcaggcggggcagccacacaggagctcttctgctcagcctgtgaccagctctttctctcaccccaccagctacagcagcacctgcggagtcaccgggagggcgtctttaagtgccccctgtgcagtcgtgtcttccctagcccttccagtctggaccagcaccttggagaccatagcagcgagtcacacttcctgtgtgtagactgtggcctggccttcggcacagaggccctcctcctggcccaccggcgagcccacaccccgaatcctctgcattcatgtccatgtgggaagacctttgtcaaccttaccaagttcctttatcaccggcgtactcatggggtagggggtgtccctctgcccacaacaccagtcccaccagaggaacctgtcattggtttccctgagccagccccagcagagactggagagccagaggcccctgagccccctgtgtctgaggagacctcagcagggcccgctgccccaggcacctaccgctgcctcctgtgcagccgtgaatttggaaaggccttgcagctgacccggcaccaacgttttgtgcatcggctggagcggcgccataaatgcagcatttgtggcaagatgttcaagaagaagtctcacgtgcgtaaccacctgcgcacacacacaggggagcggcccttcccctgccctgactgctccaagcccttcaactcacctgccaacctggcccgccaccggctcacacacacaggagagcggccctaccggtgtggggactgtggcaaggctttcacgcaaagctccacactgaggcagcaccgcttggtgcatgcccagcacttcccctaccgctgccaggaatgtggggtgcgttttcaccgtccttaccgcctgctcatgcaccgctaccatcacacaggtgaatacccctacaagtgtcgcgagtgcccccgctccttcttgctgcgtcggctgctggaggtgcaccagctcgtggtccatgccgggcgccagccccaccgctgcccatcctgtggggctgccttcccctcctcactgcggctccgggagcaccgctgtgcagccgctgctgcccaggccccacggcgctttgagtgtggcacctgtggcaagaaagtgggctcagctgctcgactgcaggcacacgaggcggcccatgcagctgctgggcctggagaggtcctggctaaggagccccctgcccctcgagccccacgggccactcgtgcaccagttgcctctccagcagcccttggaagcactgctacagcatcccctgcggcccctgcccgccgccggggtctagagtgcagcgagtgcaagaagctgttcagcacagagacgtcactgcaggtgcaccggcgcatccacacaggtgagcggccatacccatgtccagactgtggcaaagcgttccgtcagagtacccacctgaaagaccaccggcgcctgcacacaggtgagcggccctttgcctgtgaagtgtgtggcaaggcctttgccatctccatgcgcctggcagaacatcgccgcatccacacaggcgaacgaccctactcctgccctgactgtggcaagagctaccgctccttctccaacctctggaagcaccgcaagacccatcagcagcagcatcaggcagctgtgcggcagcagctggcagaggcggaggctgccgttggcctggccgtcatggagactgctgtggaggcgctacccctggtggaagccattgagatctaccctctggccgaggctgagggggtccagatcagtggctgactctgcccgacttcctctttggcacctccattccctgttgctgaaggccctccagcatccccttaagcatctgtacatactgtgtcccttcctcttcccatccccaccaccttgtaagttctaaattggatttattctctcgtgaggggggtgctctggggtccttgacacacataaaggtgcccccccaccttccacctcttagcactggtgaccccaaaaatgaaaccatcaataaagactgagttgccaa

SEQ ID NO: 68574 - DNA, 396 bp, Homo sapiens
ttttttttttttaagatggggtctcgctctgtcacccaggctggagtgcagtggtgtgatgtcagctcactgcaagctccgcctcccaggttcacactattctgcctcagcctcccaagtagctgggactacaggtgcgtgccaccatgcccggctaatttttttgtatttttagtagagacggggtttcaccgtgttagccagtatggtcttgatctcctgacctcgtgatccacctgcctcggcctcccaaaagtgctgggattacaggtgtgagctgctgcgcctggcttatgagtcgtatgttctgatcctccctcttgaagttgccttctgtggtctaaggagggcctgaaggttcaggtaaaaacttcagggtgaccttcactgggggtg

SEQ ID NO: 68575 - DNA, 2000 bp, Homo sapiens
gtggtggaattcccggccacggtggaacacccatgtacccatccctccgccccacatggtgttgggggctctctcaccagaagctgagcccaacacacccaggccccaacagagcccccctggccacacgtcccagtcagcgctcagcctgggagcacagagcactgtgctggactgtgggccacggctgcctgtagaagtggggccatctctgtcctcccccagctcgggctgcggggaggggagcatcagcgtgggggagaacgtgtcagacgtggctcccacccaaccatggtggcccaacaccccgggagacagtgtctctgaagaactaggtcagagtagggtggctggtggtcaggagtgggactgtgggacgcacagagcctgggaggtaggcgggcagtggggttggtggcatgtgaagttcccctcaggcctcctcgtcagccaggacctgggctgctgtgggggacatgggaggggctgcttgagccagggccggctcggctccgtacccgccacaggcactcggccctgatgccctcgtgtccacttgtgtccacacaggccctgggaggagcggggacgctgaggacctctctccaaattggcctctcaactcacaggaagacacagctgcccagagcagcccaggccgtggtgaggaggcggaggcatcggcggcggaggctcagggtggggagcaggcctacctggcaggcctggcagggcagtaccacttggagcggtacccggacagttacgagtccatgtccgagccgcccattgctcatcttttgcgccccgtgcttccccgggccttcgccttccccgtggacccccaggtccagtctgccgctgatgagactgctgtgcagctgagcgagttgctgacgctgcccgtgctcatgaagcgctccatcacggcaccgctggccgcccacatctccttggtgaacaaggccgctgtcgactacttcttcgtggagctgcacctggaggcgcactatgaggcactgcggcacttcctgctgatggaggacggcgagttcgcccagtccctcagcgacctgctctttgagaagcttggagctgggcaaacgcccggagagctgctcaacccgctggtgctgaactctgtgctgagcaaggccctgcagtgcagcctgcatggggacaccccgcacgcctccaacctctccctcgctctcaagtacctgcccgaggtgtttgcccccaacgccccggatgtgctgagctggcctggagctcaggtacaaggtggactggcctctcaacattgtcatcaccgagggctgcctgagcaagtacagcggcgtcttctccttcctgctgcagctgaagctcatgatgtgggcgctcaaggacgtctgcttccacctcaagcgcacagccctgctgagccacatggccggctctgtgcagttccgtcagctgcagctgttcaagcacgagatgcagcatttcgtgaaggtcatccagggctacatcgccaaccagatcctgcacgtcacctggtgcgagttcagggccaggttggccaccgtgggcgacctggaggagatccagcgtgcgcacgcagagtacctgcacaaggccgtcttcaggggcctgctcacggagaaggcggcgcccgtcatgaacgtcatccacagcatcttcagcctcgtgctcaagttccgcagccagctcatctcccaggcctgggggccccctgggggcccgcggggtgcagagcaccccaactttgcactcatgcagcagtcctacaacaccttcaagtactactcccactttctcttcaaagtggtgaccaagctggtgaaccgcggctaccagccccacctggaggactttctgctgcgcatcaacttcaacaactactaccaggacgcctgaggctgctctgcgggggacgtgcacaataaaggtgttctcaaaaaaaacgcggccgcgtcgaccgcggccgcgtcgac

SEQ ID NO: 68576 - DNA, 1424 bp, Homo sapiens
ttttttttttttgtgcttgttttattggaagcaagactcccagccagctgcagggctcaggggaggaggcctggagagttcagtcctgggtctccctctgggccagcagggggaaaaggggtgttaaaagagctagaaccctcagagatgctcctctgaagcaggggaaagaaaactagaaaggaaaactgtcccagggcggggagcggaatagggcccccacatctcagactctcctaccctcaagcagttaattctcaccccctgccttcctctgtcaacggtgggggtgattccaataactcttctcagcttccatacttcaggtgctcttcgtgaatgctgggtggctttaacccttgggggtcccaaacaagtttccagaatcccactgtccaccattctcccccaaagaaggtcccagaaaaggtgaagttccgtgtcttcacgcaacacgggcataagcagcaattatcgcacgaagtttccctagggtggtcggggatcctctcctgccactcctggggcccctctcttgtcgccttaaggtccatgctacctgtcttgaggagctgtgtccaggttgtgggctccggaggaccgaggagtgaaaggctggaggtacatctgaaggtggaggcgctggcggaagatcctgccggactaggtggcccacagtccggagtttcaggccgtctgatcctcgtccgcaacccctggctcgggttgcgatcgcttcgcggagccttctccagctgcgggttcccctaggctcctcttggacgctggcgcggctggcggggacgagggaccaggatggggattcgggggctggtagccgggctgtcgcggatccagcgcgtccttggaaagtaggatggcgaggccgggcacgttcttaagtacgctgagactagcggccggctcgccaggcgtctgaccctgcgtgggcccaggcgggaggctctgccacacctcgcgtacgctccggtagcgcagccgcgtgacctggtgcaggcccgccaggcggcgcttgaggatctcggcgcacgtgacggttttggtggtggcccggccgcagccgctgaagacgatggcgcgcgtggctggctgcgccatgctggcggtggcgaaggccatcaggttccggatcttgctgccttccttgacccgcatgtgcaccgcgcccggcgccaggtctgcgaacggggccggagcccgggccgcctccctcggccccgcatccccgtggcgcctcttcggagcgcacttacggaagttctccatgcgccgtcgatcgcgggaccgccggtttgccatggggcggcctcagccccggggctgcatggccgccggtcgcgccttgcaagggccagcaggggtaagggcgccggagcagcgcagacgccggcgggcgggctggg

SEQ ID NO: 68577 - DNA, 605 bp, Homo sapiens
ggcacgagggtggagggaggaaatagtaaatgagcttcttatgcttcctgcatatctgatttcatcctcttccattccctccttccttatttttttcttctgctagatttctaacgacccaagtccaggatacaacattgaacagatggcaaagcgaggcaagaagctggttgagctgccatacactgtaaaggggatggacgtctcattctcagggatcctgtctttcattgaggatgtagcccatcggatgctggccacaggcgagtgtactcctgaggatctgtgtttctccctgcaggtaatgcagtaaaaaactgggacagaaagttggggctgaaggttttatattgtagagcagaactaatctggggatgcccctctaatattttctccttatctgtccctgacaggaaactgtggttttgcaatgctggtagagatcacagagcgagccatggcacattggtgggtccccaggagggccctcattgtggggaggagttggggtgtatgtattattggaaagtgttcctctttcctattcttaacactatgcgtcttcctcctggtactctaaatcattaagcgtttggagtaggctt

SEQ ID NO: 68578 - DNA, 822 bp, Homo sapiens
ctcaatattgttaatatgtaattctccctaaattgatctacagattcaatataatcccaattgaaatccaagcaagctttttttaaaaatagaaattaacaatctgattgtaaaatgtatgtgaaaacacaaaagacctatgaacaaagttggataacttacactgtgcaatttcaatacttaactaaaaagctacaataatcaagacatggaatcggccaacatacaatcatatagtccagtgggagagcatatggaaagtctacatatagacacatatggtcaattgattgttggcacaagtgccaagataattctatgggaaaggacaatcttttcaactaatcatactgggactattggatatccatatagaagaaaagaacctcaaaccttatttcacctatacacaagattgaatccaatggatcataaacctaaatgtaaacagtaaagctttgtttagaagaaaacaaagaaaaactcttcatgactgtgggttaggcaacagttttgtagaggagacacagaaagcactaaccaactggatattatcaaacttcaaatttttgctcctcaaaatacaccactaagaaactaaaaaggtaagccacagactggggaaaaatacctacactatttgcaaaaaataataatgacaaaatatgtgaacatacacataataaaagaagatacatgtttggccaaatgcatgtgaaatggtggtcaacatcattagtcatcagagaaatgcaaattaaagtacaattgtatgcctcctagtagaatggtgaaaattagaaagactgatgattccaggtg

SEQ ID NO: 68579 - DNA, 1027 bp, Homo sapiens
tttttttaaggaaagaacattttatttccagtctattacaaacagtgtctgggtttagaaacagctgacagtgaagggacaaagaggtgttcacagggagctgctgggctgtggtcagggcaggctccaggctgtgcaagaggaagccacccagggcgggggacaatgggcccaacacagccccacctccgacgcaggggctgaggcctgggccaggggaaacacaggccaagccagcctttggccctgcgaggaggttcagacaggagccagcagagctcccaccaggggcccgaggcacggcgcctctcccagtggggtcagcaggcgaggctgctctgaggacaccacctgctcccggaaccttcccacaagggcttcactggggaacagtggggcccagaacccagagaccccgcaagccacacagcctcctgagcttcagtttcctcccatagatggggatgaggcccagcgcacacggagcccaggggggctgggctggtggagcccaggtggccggagcctctgtggtagcttgatgcttaacaggtggtgtgactgccccagagaggtgatggggagaaccggccacccccgaagggggcgtgaggcccaaggaggacaaggccagcggcagggcctccagcccttggcaccccagtgcaaggcacgagccaacagaggtgcagcactcacctgatcctcaggggtgggggacacggagtgaagcagctgggcattggggctctggtgaccccgacctgccagacccagagcccctgccttccagaactcacctccccaagtcagccccttcctccggtggcagccacagggcgcgccctccagctcccctctccgggagacccccggtccctcccacagaacacagagcaccagtctgcaaggaggctggcgccacttcctctcccatctgggggcaaattcagcccctttgcagccgcggggcgggatttgcggctctcaaggaggggggtttaccttgagtcctccacagactgga

SEQ ID NO: 68580 - DNA, 1419 bp, Homo sapiens
cccacgcgtccggtcctgcacctgcggcacgtggccctcacctgctggcgcggcctcctgcggctctgacgggcaggacgggcaggacgggcagggcttccaggagagctcaagcactccgggggctccgagacagcctgagccctggccctgctgcttggtgaatcatgggggccaaaaggggctgctgcctgagggctaactaggaaaagggggaccccgtggcgtgagatcggacatgggggcacagcgggcggccccgccacactagtcagcacagccctcctgtctcctgtgttgggtccatgtgagattttattagaaagaggattcgactgctaacagttgaggctccccaggctcacccaaagacccctccctcgtcccagcaggaactcctgctgctgctagggcctggcccggccatcaccgtgtgcaccctcttgaggagggggacacactgcccgtgttcaaggggctgctcggaggaggcaaacccagccttttgcgattatggcttgtggggaatccagacctcgaaaccccacggggagggaagggtctggttgtcaaggtgggtccctttgatgtgaggtgccatcctctgagcccaggtctgacccccctacccagccccgtgagtctggagaggccccagggaaggacccctcatcaggggcggcttcaggtgtagaagccgaggggacagcaaggggcccagacacccccgaccttcagaacagccatctgtgcccagctctgcaggccaggcacacccagctgagcccggggccagccagcaccacccaccagctggggcctgtgggtcccggagaccgtctgtggttgtggctttgtcgccggattgcagagctgaagggagccctgtgggtgacaaacaccaggggcctctccagaccctacgtggggggagggctgaacaaagcagggaggcccacggttagacaccaggcagaactgcccaggagagacacagggacaatcagaccagcgtcctcgaggttagcctgaggcgggtgggcacggccgaccatccacccggtggttcctgtttgtcccaccacttaactgggagacactgttttattaaaacacaccgtggcttccttcagtcttggtgtttttatagaaatgagagaaaccagaaccgatttgctaaggaatcggcctcagtggccaaagcggatgtcctgggcgcctggaacctccccatctcctgcaggcctgggagtggatgtgtccactcgggcaggggctgaccaagcccctgggtcttgagggatgcccggccggctccctttgccctgcagtcagggtgtgtccctgcaactccaggtgccagggaacaggtgaagtggtctccagggtcacttccagctttggaatccagggagccca

SEQ ID NO: 68581 - DNA, 916 bp, Homo sapiens
cggagtcgccgctgggcctgtccgctggcgtcatggtgagcaggggcgggagcggggctggggtcctcggcaggggcccggagacctcggggcagggaggcctcggtacacggagaccctgggaatgggaggcctggagcgctgggtttctggaattgagagctcggtgctcttgtgggggtctccgtggggcaaactcaggatgctcccggccccggggcctggcagcactcgggattgagacctgggctgtccagagccctgtgctcacaggggtggtcatagaacgcccagggcccggggtcggcggcgcacggtccccagaagagtgaacatgcgtcaaggggactctcatcctggaatgggagactcggtctgttggatccctgggacctagggtttcagctcacgaggctttgcagagcaccagggtccccatggaatagagccggaggcaggaattaccctaagacctttggtctcccggatggagagcctggggcacaccagagtggctagagatccctctacaccaaggaggcccggacaggtccagtgcccttggagtgcccagggcacaaccttgggatacaggaaccactgttcccttggaaagcctggcaggagtcaggcccagaccgagaagaggaaggcggagctcgtggcctcatcagctccatgtctgtctttctcttgtaaagggctctccctttgtggtacaggaattgtcagtaactcaatttctgggcaggtgtggcagggtgggtttcagctggtggggggaggaaagctctgggagccccaccaagtccctgcagctggctgtgaaggtcccaaatgctaagtaatgctgaaccttcctccactgccttcaagagtttgagatgaggtagccttcttggagtagagggattaa

SEQ ID NO: 68582 - DNA, 1106 bp, Homo sapiens
atcggggacattaggagcctgtcaagagtgggtctgcctgctggcacttactagacgggaaataccccctaaagagggcttaaaaagcatctccctagcacggggcatgctggcacagggtgctgtgtgacagaggcttggccgctgggccccgctgctgagaaggctgctccgcccatgcctggccctgtgggcagtgccagccatggatctctgagaccctgggctggaacctggggccccgtcccagccctacctgcagctcactaaccctctctgggttctgctcagtgtctgaagtgatggaaagaccccagggttggtggctgtagcggcccccaggggtggcagaaccctttgggaggccaagtgttctttcccaaagctgcgcgggtgccattgcctgccaggccctggctgtggtgacagacgtgggctggggtgaggctgcatctgcttcctctaacagccgtggctgcctgcgggctctggcctccgctctggcagattctgcacattccctgcaggcgcaggggtgggtgggggtgcctgtggcctcggaggtacagccagctgtcctcagctcagatggcccccaagagcccccagctcctgttcactgctcttccagttagtgacccccgtgtcagcatcattgtcagagttcctgggcttgtgggggctggagaagggaaggcgctgaggagggaaagatgagtgcaggttttgttgaaaccacccgacccgcgttttcagggggacgaggccactgccttggcccaaggacctgcaggcttgggggaccccctcgatgtccactgggctgcggatgaaacatcacactgtggtaggaaaggaaggggagcacccccagacgggggggtcctgcagagaccccaaccccttacctacctagttgagacacccatggggagcagccccaacagcatgtcggagtccctaggcttgcggggtcatgctctgttgagggcccttcctctaactggcgagcttgtttacagctgagctcgcctggtcagatgggcccagtggctttatctaataaaggctggacatgtccacttcatgagcaaaaaaaaaaaaaa

SEQ ID NO: 68583 - DNA, 1483 bp, Homo sapiens
ttttttttttttggaaataaacaagctttattttcagtttcaacaggtaaggcgatacctgcttcatcgtgtgcttttacgtaaatgccaaatagcaaaataacagctagaaaataaacagtttgtcagtttggagatcaagtactttatctatcttgagtgttatctgtcttggaatttagccaggcctaaaagtagcggaagtatcaggaaatgctatagagagccagtctccagctgcaggttggtgggcctgggcactgaccagattggggtggctcaaagcactgagcgatgcaggcgccgtttctgcattgcctgcagcctcttctgcctctcggcaaagttgttcttcggggtctgcttcagtgcgggcaggatggcacgctccgccacaggtgggctcaggcatttcttggagaggctcttggtggagaccttggggaaatgcgtggcttcttggtccctgggaaagctagcttcctccggggctgcctggggcctctggctcccttccaggagggacttgaggtgccgcagctcttgggtctgcaggaggttggtattccacagctcgcggatgagcacttcgcactgcctaagtgtggtgggctttcgcaggggaaggggcaggatcattggggggtgtgcccccgcccccatctgcctgccctggtgctggctgttccccatacaggcagctcctgcattagaggcctctgctttctcctttctggcctgcccttgtaccccaggaaccttgtccagcttgctgttgtgaagtaggggctcctcttccaggtccgccttctgggagacgtcagcttttgaatcttgcttgttgaaggagccgggctggggcctggccttgccttgagagttggctgcaagtcagaccctacaaggccggtcactgcaggcaccaacagtcaccgcccaagttttccaggaacagctgtgtgtacccaagaagcccctgtccctgcctcagtttcctcctctgtaaagggaagcctgccttggagggttctggggggcatcaatgtggttctgagggtgaagcccatgggtggtgcctgtgaacactctagaacaatcaacatagtggaagctggccccatcttgggtaaaatgaaactgcatgagaggcttgggacccagcctgcatgggtttcctcggcaaggacaaggcccgtctagcacctgggcccatcacaggaatggtgggggttagggcagggctgaggaaaatgcccggcctcacagagtggggaaaagaggctctctgctcccggctcactctgcagaaggtgccatgagcccagggctccgtgggcagtgccatccctcctgtgtcctgcctgcttgtggcagggacacggccaagcagggctgctgctgggcagccagggtacatcctccctagaaagccacccggggaggcccctcctgcctgcttgctgccccgccctggggtgcctgc

SEQ ID NO: 68584 - DNA, 939 bp, Homo sapiens
  misc_feature (1)...(939): n = a,t,c or g
ggtaaattacaacctcctcaagtatatttgcagattcttggatgaagtacagtcctactcgggagttaacaaaatgagtgtgcagaacttggcaacggtctttggtcctaatatcctgcgccccaaagtggaagatcctttgactatcatggagggcactgtggtggtccagcagttgatgtcagtgatgattagcaaacatgattgcctctttcccaaagatgcagaactacaaagcaagccccaagatggagtgagcaacaacaatgaaattcagaagaaagccaccatggggcaggttacagaacaaggagaacaataacaccaaggacagccctagtaggcagtgctcctgggacaagtctgagtcaccccagagaagcagcatgaacaatggatcccccacagctctatcaggcagcaaaaccaacagcccaaagaacagtgttcacaagctagatgtgtctagaagcccccctctcatggtcaaaaagaacccagcctttaataagggtagtgggatagttaccaatgggtccttcagcagcagtaatgcagaaggtcttgagaaaacccaaaccacccccaatgggagcctacaggccagaaggagctcttcactgaaggtatctggtaccaaaatgggcacgcacagtgtacagaatggaacggtgcgcatgggcattttgaacagcgacacactcgggaaccccacaaatgttcgaaacatgagctggctgccaaatggctatgtgaccctgagggataacaagcagaaagaacaagctggagagttaggccagcacaacagactgtccacctatgataatgtccatcaacagttctccatgatgaaccttgatgacaagcaganatttgacagtgctacctggtccacttcctcctgtgaaatctccctccctgagactccactcctgt

SEQ ID NO: 68585 - DNA, 896 bp, Homo sapiens
aacagtgagatccacctttattgaaacatcacacggcagcatcagggctcccacacctcacagggcagcaggcagttcacaggacagcaggcagttcacagggctttgggggcctcacagggcagcaggtggttcacagggcttcggggggcctcacagggcttcggggggcctcacagggctgcagggggttcacagagcttcaggggcctcacagagcttcaggggcctcacaggactgcaggggggctcacagggccctgtatgcagggctgctggtacaaagaagaggcccagagaaccctaacacagcctggggccccggggaagtcagggcttccagcagggcaggtacagaggcccctaggacttggcaggagcctcagccttggggacagtcccacggaagacgctgcatccgggctctttagcagaggcctctacccgtcctggtcagaggagccctcagacagttttgggaaagccagactggggtgtcgatgccgcagtgaggactcgtcctccaagtctgagccctgctgggctgaggtgctctggaagtctgcgtatgcatccctggggacgtccagcagctcctcctcgtactccgtctggtagtcagattcgtctggcaccgagggtagggctgcgtcagtcccctcccaaggaagggaccgtacccagcatagccacactcagaggcagaaccggccacagatgcccacccccgcctccaaggtggcccggggccctacacgcagccacctggtcccagggcagccctgcacaccacccctggttctgtctggctccagctttgccccagcacatcacttcgtgggtcttccacaaggacaaggagcgggcagacactcctccccttgtcagccaagcac

SEQ ID NO: 68586 - DNA, 623 bp, Homo sapiens
agttctcgagcgcccctcccaggagctcccctcctcagtccaggttgtagcagcggtggctgctcccagcagcaccttctctgttcgtgccaagcagacctacccatactgtgcactgcccaggtcccgggcctcctccgagagtgaattggatgatgaaggcccctgtggtggtgatggggacccaggcctgttccccttccccatgccccggggtgggacccaggcctccagcgaagagagtgaggaggaggggacatctgacgacctccacccaccccctgactgccattatgcaacccggcccccacggccacaggcgttctgcacctttgggagccggctggtgagcccaggatgctatgtgtttagccgccggctggaccggttctgctcagcactcagctccatgctggaacggcacctcagcacacacatgtggaagaagatcccaccggcagctgaacctccagctcaccttgtcaactccccgttatctgctcccctgagccccatcctctacaggcacctgcccccgccttccaggtccaaccatgagacctgcctgcccagcctccatgcccccctgtattgcggccgctctagagaatccaaactgtcgt

SEQ ID NO: 68587 - DNA, 529 bp, Homo sapiens
gcacgaggcgacttctccctcaccctgcggcgtcatcactgtcacgcctgtggcaagatcgtgtgccggaactgttcgcggaacaagtacccgctgaagtacctgaaggacaggatggccaaggtctgcgacggctgcttcggggagctgaagaagcggggcagggctgtcccgggcctgatgagagagcggcctgtgagcatgagcttcccgctgtcttcaccccgcttctcgggcagtgccttttcatccgtcttccagagcattaacccctcgaccttcaagaagcagaagaaagtcccttcagccctgacagaggtaaagcaggcagggctacccaagtgggaagtagggcatttggaaggttcatggtcatcctgggtagacggagtcagaccctgccctgtcccagcctgaccagtctcttccagacagagcattcctaatggaagcatcccagctacgaggaccgacttgacagtgatggtgctaggcgacatctttcccatccttctctctaactcttccc

SEQ ID NO: 68588 - DNA, 356 bp, Homo sapiens
ggcacgagaaatgtctcaccaataagtccagcgtgtttgctacttcttgctcactggatccaatcagcataatgtcattaaactaatggaccagtgtgatatcttgtggaaacgaaaagcgatcaaggtctttcccaataagattatgacctaaagccggagagtttactgtcctacccctgaggtatgacagtaaaagtgtattgccggccttgccaacggaaggcaaaatgcttctggtgggccttatggacaggaatggggaaaaagttatttgccaaggcaatggctgcataccaagtaccaagaggtgtgttaatttgctcaagcaatgaaaccacatctggtacagcacg

SEQ ID NO: 68589 - DNA, 364 bp, Homo sapiens
  misc_feature (1)...(364): n = a,t,c or g
ggcacgagcttaaagaggaggtagagagattggcatagaaaatttattgaaagagttaataacagaacttcccaaacctagagaaacatatcagtattcaaataaaagaagggtatagaacaccaagcagatttaacccaaataagactacctcaaggcatttaataatcaaactcccagaggtcaaagataaagaattctaaaagcagaaagagaaaagaaacaaataatatacaatggaactccagtacatctggaagcagacttctcagtgaaaaccttacaggccaggggagagtggcataacatatttaaaatgctgaagggnnnnnnnnnnnnncttttatgctaaaatagtatatcc

SEQ ID NO: 68590 - DNA, 1021 bp, Homo sapiens
taagaggactctaagggaatactataaacaatataagccaataaactaaataacctagatgaaatgagcaagttaaaagacacaaactattgcagctaactcaggaagaaatagaaaacctgaagtataacaacgagattgaataaataatgaaaaactgcccacaaagaaaagtcctggcccacatggcttcactggttaattctaccaaatgtttcaagaagaattcacaccaatactttccagactctaatagaaaataaaagaggaaggaacagttcccaacttactctttgaggtcatattatcatgataccaaaaccagataaagacatcacaagaccagtatctcttatgattataggtgcaaaaatattcaacaaaatactagcacaccaagtatagcaacatacaaggattgtataccatgaccaaatggatttatgcaagtttggttcaacatttgaaaatcagtttatgtaatacactgtgttaatagaataaaggacaaaaaccacatgatcgtttccataggagcaaaaaagcatttgacaaaatccaacaccctttcatggtaaaaacaaaaactcaggagagaacttcctcagcctgttaaagggcatctacaaaaacccatggctgacatacctaatggcaaaaaattgaaagcttctaccactaagatcaggaacaagacgagttcctgatcgtttctggaagtggcagtgccattgccacttctcttcagcatcgtattggaggttctggctagggcagttaggcaagaaaaagaaaggcatgcaaattagaaaagtagtgaaactgttcacagatgggatgatcttatatgtagaaaaatctaaggaatctactataaaaaccagtaaactaataaataggttcaacaaaggttcagaatacaaggctaatattaaaaaatgagtagtatttctatagagtagcaatcaacaaaccaaaaattaagaaaacaattttatttataataggatcaaaaaaaaaa

SEQ ID NO: 68591 - DNA, 366 bp, Homo sapiens
ggcacgaggagttctagtccataccctgggtggtggggccttctttatctacttctaagaagcacccacagggacacatgcacccggaaagtggccaaaagaagggcttcgacacttcatctgttttccttccttcagtaccccaccgaaagaagaaccttccgtctacaacatttctgcctaaagaaactaccactttgaaaagcccttcctctggcttgctaggaagctcattggagaccctaacttggaatttggtgccatgcctgctctcgcccgaccaaaaaaagtcatggacccagctttggcagcacaatatgagcacgacttatagggtggtcagacacctgctctcccggatgagga

SEQ ID NO: 68592 - DNA, 381 bp, Homo sapiens
atgaggtgctaatcaataaaaaatagttaaacatttgcatgactctactcatttgggaataaattccctgtttaatatctcggctttttatagaaaaataattacttaaaagagtaaaccaggtaacccaggcctgtgaactatatgcctggaacaacccaaatgaccaatgtttacctcctcctttagtaaggcctgttcagcatagaggagcataccctggtgaagactggcaaatagactatactcagatgcccccgtgtaaagggtttaaatattgattagtattcattgacacctttaccgtttggattgaggcttttcctaccaagtctgaaaaggcaatcaaggtttctaaactactaaaagaaataattccga

SEQ ID NO: 68593 - DNA, 1065 bp, Homo sapiens
ctctgctgtaactgcagggtcacaggcatcccgggagaatgggcctccaccctcagccagccctcactgctgacaggcacccctctgtcacctcctgccacctgtcagatacccagcctgcccgccatcagccacccgagtggttccgacctccattcacctcaagccccaacaggcccctgtcattccacttcatggaagagacggagccttctgaaatgagatctaccctgaaaatctcttctccttcccctttctgagaaacgtcatccccaccagttaacgtttcctgtacaccctcaccctctctcgtccatctctgttgcctctgcacatcagcacacactgactccacctgggctggctcctgccgcctcttccctacctcctccactagccgcaggaagggcctccagcacccacaactgcccttcctcttgatgcccctcggcttccccccagcctggcagcagcgtcccagcgcctccacattgcccctctcacctcccagctctccacgccacttggctctgcagcgacccctcctagacgctccctggcccctcggcacccagaatgccacattcttgtgtttttttcctccttctttcccaatccctctcaaccatgtatttatttatatatgtatgtatttttttatttattatttatttattgaaacccctactttgattgacaaaggaatcaaggtagatctgaccagtattcccctctcttctccttgtcccaccacatggacatgccttacactggcgtcctctcctgagtccctccgcactctccatcagcaacctcacacctgccttcagacccggctgcaacttcctaagctgcccctgccccagctcctctctgcaacccagccctctcctgagctctaggctgggattacacccgctggagggacactcaccccatctgctcccacggcagcaccatcaactcaacaagtcagaagccaagtggatcatctgtgtccccttcccccacaatccctcctttttctagtaaaagacccgtgatcccgtcagccacccagtctga

SEQ ID NO: 68594 - DNA, 839 bp, Homo sapiens
ttttttttttttccaaccaagggagctgtttatttgacagggaaggaatttgaggagccgtgttagtcctggcccaggacaggcaggtggaggtggtggcggggggtctctgatgggggcctcaaagactgcctctcccctcataggcggactccccgcggggccacgcttgtgctgcaccttcaggtctcatcgaagtccacgccaccagctggtttcttactcttgaacccggggttgatgagcgactctcctggacaccgcctcctgactccaggtccagggccacctctctggggatctgggtctggtaagaagagctgaggccctgcaggccgggggctcttcctcgggctgacagctgtctcttctgcagctgccagtcgccgctccaggctccacacgcgttttgccaggcccagtgtcagcgcccgcagcctgggggctgcctctgggcctggtaccttggagaggtcaaaggccagtgccgagggcccccctgaaagcgtcagggatgctctgtcctcctgcagagtcagagccacagcttgctgctcacaggctgccctgggagaggagaggtgcggagagctgtggcagaccctcctcctccccacccgtccttcctccctgcttgggtctcacctgaaccggggggtgatgtcctcagccgcactcaggccaaaacgggctttctagagagcacaggggcttgtcacgagctgcctggaacccgaggcccactgggggcacccgaaacctgcccgaccccagagccctagccaatgggaggactacagctacagggcgggcagagggtgtcagagcccacgcgtccg

SEQ ID NO: 68595 - DNA, 440 bp, Homo sapiens
cccggggcgacccacgcgtacggtgcaagtacgagggctgcgtgtacagcaaggctaccaaccacttccactgcatccgcgccggctgcggcttcaccttcacctccaccagccagatgacctctcacaagcgcaagcatgagcgccggcacatccgctcctcgggcgcgctggggctgccgccctcgctgctgggcgccaaggacacggagcacgaggagtccagcaacgacgaccttgttgacttctccgccctgagcagcaagaactccagcctgagcgcctcccctaccagccagcagtcctctgcgtccctggctgccgccactgccgccaccgaggctgggcccagtgccaccaaacctcccaacagcaagatctcggggctgctgccccagggcctgcctggctcgatccccctggccctggccctctccaag

SEQ ID NO: 68596 - DNA, 759 bp, Homo sapiens
  misc_feature (1)...(759): n = a,t,c or g
aaatggaccggcccagaaatcagtccaaataccagtggctccagcccagtcattcattttactccctctgatttggaggtgagacggtcttcaaaagagaactgtgccaaaaacctcttttccacacgtgggaaaccaaactttactcgacacccatctcttatcaaattggtaaagagtatagaaagtgatcggagaaagataaattctgcgcccagtagccctatcaagaccaacaaagctgagagttctcagaattctgcacccttcccaagtaaaatggctcagctcgcagctatttgtaaaatgcagttagaagagcaatcaagtgaatccagacagaaagtgaaagtacagctggcaagatctggaccctgcaaaccagtagcccctctggaccccccagtgaatgctgagatggagctgacagcaccgtccctcatccagcccctgggaatggttcccctgatccccagccccttgtcatcagcagtgcccctgatcctacctcaggccccttcaggcccatcctatgccatctacctgcagcccactcaagcccaccaaagtgtgaccccaccccaaggcctgagcccaacggtgtgcaccacccactcttctaaagctactggctcaaaagactccacagatgccaccactgagaaggcagccaatgatacctcaaaggccagtgcctctaccaggcctggaagcttgctgccagcaccagagaggcaaggggcanagagccgaaccagg

SEQ ID NO: 68597 - DNA, 1467 bp, Homo sapiens
cccacgcgtccgcccacgcgtccggatgcttggttcccggagcttggaagatgatatcagccttgcacattcagtgtatgcgacctcactgcagagtgatgtgaattacaagaaaggctttgaacactcaaaggcgcagttccatctgccgttggacatggccgccctggtgcatgccaagaaggctcagaccctggccagcaatcaggactacaaacatccactgccccagtacacttccttggcagaagacctgaggctgagctgtgccaagaaagctcacaaattgcagagtgagaatttgtaccggtcagacctgaactttatgcgaggtgttgcatgtgtcgttccaggcacgttagagatcgaagggaggaagaaagcatcggaactcatcagtgagagtaaatatcggcagcatccccactcattcaagtacacagctgtgacagacactcccaacctccttcatgcgaaattcagcaaccagataacgaatgagcgcctctataaagcagctggagaggatgcaagacacgagtatacaatgaccctgggtctgcccgagttcatccgagcaaaaacgaatgcagccaacctgagtgacgcaagatacaaagagtcctggcgtaatcttcgtgctcaaggctacaagctgacaatagaagcgctccccttccaggctgcccgggcctctggagatatagccagtgattttctctacagacatgactttgtgaaggagcgagggaaactcatagggccccagagtgtaagagacgacccccggatccagcactgccggcgcatgggccagctgcagagcgagcttcagtacaggaggggggcgaccagcagccaagcccagttccatctgcccatggacatggtgcacctggtccatgccaagaatgcccaggctctggccagcgaccacgactacaggacacagtatcacaagttcacagcactgcccgaggacctgaagatggcctgggccaagaaagcccatgccctgcagagtgagttgcgctacaagtcagacctgatcggcatgaagggcataggatggctggcgctgagatccccacagatggagagtgcaaagaaggctggagaactcatcagcgagaccaagtaccgtaaaaaaccagacagtatcaagttcaccacagtggttgactccccagacctggttcatgccaagaacagctatatgcactgcaatgagcgcatgtatagatctggagatgcagaatccctgcacagatacaccctgatccccgaccatcccgatttcacccgagctcgcctcaatgcgctgcatctgagtgacaaagtctacagaaactcctgggagcagacccgggctggcagttatgacttcaggctggatgccatcccccttccagacttgcccgggcatcttagggaattgccagtgatttccggtacaaagagctttct

SEQ ID NO: 68598 - DNA, 2024 bp, Homo sapiens
ggagaagtacgtggaggaacttgcagcagggaggcttacccttcagacagacctggagacatccattcggcggattgccgacctgcaggctgccttggaagaagtggcatccagtgacagtgatactgagagtgtccagacggcagtggattgtggcagcagcggccgaaaagagatggataacgtctccatcctcagctcccagccagagggcagcctgcagtcctggttgagctgtactctgtccctggccacagatactatgaggactccttctcgacagtcagccaccagcagccgcatcctcagccccaggataaacgaagaggctggggacactgagaggacccagtcggcattggcactgagcagagcccggtccaccaatgtccacagcaagacctcaggagacaagcctgtttctccccactttgtccgccggcaaaagtactgtcattttggggacggcgaagtgcttgccgtccatagaaagtccacagagagattagaacctgcttcctctcccctggcttctcggagtacaaatacatccccgctgtcgagggaaaagctgcccagtccttcagcggccctctcggagttcgtggaagggctccggaggaagagagcccaaagaggccaggggtccacgctgggcctataggactggcccactctccccatttaccagacgactggggcctccacactaaggaggggcagggctggcagtgacgagggaaacctctcgctgagggttggggcaaagtcacccctggaaatcgaaggggccgctggtggtctcttgaggtccaccagcctcaaatgcatctcttcagacggtgttgggggcacaaccctactccccgaaaagtcgaaaacccaattcagttcctgcgagtccctcttagaatccagaccgagcatggggagaaaactgagctctccgaccacacccagggacatgctgttgtcgcccacactgcgtcctcggaggcggtgtctggagtcctctgtggacgatgcgggctgtccagaccttggaaaggagccgcttgttttccagaaccgccagtttgcccacctgatggaggaacctctaggcagtgacccattcagctggaaactcccaagcctcgactacgaacgcaagaccaaagtggacttcgatgacttcctcccagctatccggaagccccagacacctacctccttggctggatcagccaaaggtgggcaagacggttcacagcgttcaagcatccactttgaaacggaagaggctaaccgttcctttctctcggggatcaagaccattttgaagaagagcccggagcccaaggaggatcccgctcacctgtctgactcgtcctcatcctccagctccatcgtgtccttcaaaagtgctgacagcatcaaaagtcgaccaggaatcccacgacttgcgggtgacggtggcgagcgaacgtcccccgagcggagagagccagggacggggaggaaagacgacgatgttgcgagcataatgaagaaatacctccagaagtaggaaccagttcagcctccttgaagctgcccttgaagacttcccgactctacaataacttggagacagagagactggccaggcctccccggtggccagagccagccagcatggccaccctcaagaggcgagatgagcccacagaggcatatcctgcggggatgctgggctcccagtgtggttggcctgaacaaaataaagtgttgactcctgggcatctgtgccttctctatggccttgctacctgggattccagagagttgatggggtgcagataggggtaggactgttagaatagaaccaacccaaactgtgtgtagtttggggtgtatacttctatttctcttcctacatgtctacatgccatgaccttcctcctcctcttcacttggccagtttcagctcacttcctccaggaagtctttcctgatatatcaaactgaaacaaatgctcctcctccatgctcccttaatcccc

SEQ ID NO: 68599 - DNA, 751 bp, Homo sapiens
tcgagaaaactgtatttccagatgacagaagtagcatttaaatgaaagttcggtcagaggggccctcccacacccaccagtgaagagcaggggcctgcggaagtacaggtgtagactggagagctggacacagggatggggaccaggatgaagcctccctgagagtggcatgggccggggaggtgatgaaagaggagggtgtgggagagcctgactcgagctgggctccaggccgcaggagcgggacactgactgggagcttcctgggggctgtttctactggaagtcctctgggaaggcagtgagacagtccccaaggcccacagaggaggaacagagcagggcccactttaggcacatgtggaagacaagtcagcaagggtaggctgggccggtggagggcacggcagggagacagatgagcgggcgtcacaggtcctcaaagcggagacccaaaggcacctggagctctcacctgagggtcagaatcctggtgcctttgtaggaacagtgtgggtcaggaggcgatcgatgagcagcatgccggcgggggagacttctttccggagccagctcagcacatcgggtccatgcagatgtgggcactgggcgtcctcaggggtctcccaaacggaactcagaggtgtgtgctgcaggcgatggcaggcatgcagagctgggaccgccacagggtatccctggagagcacaggtcacagtcagtggatcatggccaactccaggtggagggg

SEQ ID NO: 68600 - DNA, 684 bp, Homo sapiens
tgtagatacagagtagctaattctaaaattcatatggaaggcaaagaaactaaattagccaaaacaattttgaaaaagatttcaaaaaaattttgaaggaatcatgctgcccagttttaagacttactataaagctgtgataatcaaggcaatctggtatttatgaaaggataaacacatagatcaatggaataaagtccaaaaccagactcacataaatagcaattgatttctgacaaaggtgaaaagacaactcaatggggaatggagagtttttcaacagatgattttaaaacaactgaacatccatatgcaaaaaaataaacctacctaaatttcacagcttatacaaaaattaacctaaaatggatcacggatctaaatgtagaactaaatttataaaatttttagaagaaaaaaatccataggccgggcacggtggctcatgcctgtaatcccagcacttcagaggctgaggcgggcagatccgttgaggtcagttcaagaccagcctagcctatgtggtgaaatcccaactctactaaaaataaaaaataaaaaaaaaatgggctgggagtggtggtgcacacctgtagtcccagctacttgggagactgaagcacaagaatcacttgaacccagcaggcagaggttgcagtgagtggagattgtgccactgcaccc

SEQ ID NO: 68601 - DNA, 666 bp, Homo sapiens
ctgaacttggccctgtgtttaagcagcaggagccaatccagattttgttaattttcctacaaaaaatggatttgctactaaccaaaacccctcctgatgagataaagaacagtgttctacccatggtttacagagcactagaagctccttccattcagatccaggagctctgtctaaacatcattccaacctttgcaaatcttatagactacccatccatgaaaaacgctttgataccaagaattaaaaatgcttgtctacaaacatcttcccttgcggttcgtgtaaattcattagtgtgcttaggaaagattttggaatacttggataagtggtttgtacttgatgatatcctacccttcttacaacaaattccatccaaggaacctgcggtcctcatgggaattttaggaaactgaggctcagagaggtaaaataagtgattcaagatcatataagtggtatttacaaatgtacttttactcataagaagttgggaatcaccaaagagcagctggccggaaaagtgttgcctcatcttattcccctgagtattgaaaacaatcttaatcttaatcagttcaattctttcatttccgtcataaaagaaatgcttaatagattggagtctgaacataagactaaactggagcaacttcatataat

SEQ ID NO: 68602 - DNA, 845 bp, Homo sapiens
ggaagtatgtatttggagacagttcccacgggtaacttttctgatatgactcgtagaatagatgttccaaaagttgagggataaagctaataccaaaaagcaataatatagtccacaggctttttctttctttctttaactttaggaagcgaacttttgctattgcacagacctgctgcctccagagcgccacgccactgattgttttccttgtttcgtggaaggaagacaaaacttgttccagctcaacaaggcttcctatatcttttgccccatcagtttgtaattgtccccaaattccaatatctgattcatcaatagttgattttccttctaatttcagaaacacctcattcaaagttgttatggaaacaccataatcctcaatgccttggttagaacatctatcaagatccctgtaaagttctggaaatttgtttggtcctttccaaaaggcaaaattatatacaaggtttttcttcactttggggctggtcaaattttgggcatcagagatggtgcctgcttaaaccagtgatgttatactcttctggatcacacctttcattcaggatgcaaaacttaaatggtaggcctatgccccatttcttcttaaggaacagagaagagcctgcacacttcagcttcccattggatatgaacaccttcctgtccgccagaatgtcagcctcatctataaactgggtgctgaagagaattactctgtctgatttcccctctttcaggagattccatattcggtgccttgaaagaggatccaatccagcagtcggttcatccaatagcaaaacttgaggatctcctaaaatggcaatcccaaaatg

SEQ ID NO: 68603 - DNA, 1254 bp, Homo sapiens
ttttttttttttgtatattttaacaatgtttattattcatttatccctctatagaaccaccacccacaccgaggagattatttggagtgggtcccaccgtagggccggagctatgaaatctatctccccacttccctcaccatgtgcattaggtgtgggcatggttcagtcagaattggtttttttttttcaagagcacgccccctgggcctttattcaccaggaccttctggaaccctccatggccccacaccaagcacggccccggcgcccaagctcggccacctgcagtctcctggggtggggctgtcggatttatggcatgctttctgggttctcattgctgagccaatcccaaagtaggggaaggggctggattcatcacccgcccctcggctttcgagctccagacaagggccgtcgctggggaggcgtctgtgctctcccgggctcctgcagctccagagggttcgggctctgaagcaggtgagggtgttgctaggctgctgtttcctactggctgccgccccgctcctgcttgtacagtctctgctcccggatggcttgttccaacaagggcaggttcatcccctccacacaggtcagcacgcgcgccttcaccacggagcctctgtcctgctgatgctggagctccccgaggacgatgtacagggagcccacctgggcgtggaagggctccaccaacttggtacagacaagaacctggtgctgatcggatccgtgctgagccatcagtgttactctggactgaatcatgtcatagaggcacaacctgccaaatgttctcagcgtgctcccatcaggaacttggcctgcactaacctcccaggggaggtaataggtcccaggtttgggcagcatcatgggctcctgttctaggcgtcgccggtcctcggatttcttctttccgcctcgcgtggtcacgtgacgggggaggggcgggatacaaaaagtgctttattttcccactccccggacgcccagcagggcagtttcttgaccttcggagcccctttcccgaggatccgctcgggagcctcccctggccaggagcaggggattagtctgccccgcgaccggccccagccacgacgcggacatcgccccctctgtctgggccgctgtcacttttcatctactatgatgtgatattttaaatgaaaactttggaattcgagtaatgttagatatcctgtaggcacttgaaattataacttcttttgtagaagaaac

SEQ ID NO: 68604 - DNA, 625 bp, Homo sapiens
ggtaaatgcagcaggcacagccttagctctcatgggcttaaaaattgggtggagtacaaaaataaccagacaagtatctgagaaagccaagctgtgctaaaggttactaacagacacatgaatctgtgacagcttatgagaggaaagttgatttcagatgggaggggagggagcgcttcccacaagaggggttgatcatgctgagatatgaaggacaggtaggagctggccactgcagaaaggaaggctccatcaaatccaaggccaaggcctccaggttcctgaagtacttactgctgcagcacgggattctcaaagctgtcacttctgtatgtgaagcggagcttctgaatgatagccttcatcttgtccatctactctggagttgccatgaccttttcagtaaagggcatattcgccgggcgcggtggcttatgcctataatcccagccagggtcttggttttcactggttcatttgtttcctgatagagctttactggaggaggcttaagagccttttggaccagattacaaatgcccacagagatccctatatctttgttgagcttcagctttaacctgctgagtgcttgcttcctggtgtcaaaggcgtgctcgaaccg

SEQ ID NO: 68605 - DNA, 650 bp, Homo sapiens
  misc_feature (1)...(650): n = a,t,c or g
gaattctgcttatgcaccaatttgcagctcctgcaaccatgatgcagcctcacccggacctttcaacattttccctttcacctaaaactgtatttttctctgctaagaccggctaccctactttcattttcctttcactcttcttggctcttttgggccttttaggaatttgggatgattcaggctctgacaggcatggtactagatttattttaggctgctcttttgctgttgtccaacaggccaaggagagatttaaatgatttatccaatatttgctaaatagtcatgtgtttcatttatcccatatatagttcagccttaatattgtttttgttttgatttgttacactagtgcatacatagagacgtgaagccagaaaatatcctcatcacgaaacattccgtgattaagctttgtgactttggatttgctcggcttttgactggaccgagtgactactatacagactacgtggctaccaggtggtaccgctcccctgagctgcnggtgggggacacgcagtaccggccccccggtgggatgtttggggcaattggctgtgtctntgctgagctngctgtcagggaagtgcctctggtggccaggaaaatcggaatgttggatcagctgtatctgattaggaaga

SEQ ID NO: 68606 - DNA, 1273 bp, Homo sapiens
aacgtaggacctgctacgccagcttggcacgagggtaatgaatgtggacaaacctttggtcacactttttcccttaataagcatcagaggactcattctggagaaaagccctatgaatgccgggaatgtgggagaaccttcagccagagctcatcactcattgtgcattacagatttcatactggagagaaaccttacaaatgtaataaatgtgggagagccttcagccagagttcatctctcactcaacattacagatttcacactggagagaaaccctacaaatgtaatgagtgtggaagggcctttgctcatactgcatcccttattaaacatcagagaagtcatgctggaaaaaaaaccctataaattcagtgaatatagaagggctttcagctggagtgcagacatcactggaacttaaagaattcatatcagagagagatcctaaaggtgtaatgtatgtgggaagaccacatcttgttccacatcaggcaataattactaaagagaatccctgtcaatgtcaagagggggtgggcttcccctctcttaccaaacatgggagaatccatactagtgagaaaccacgtgaatgtaatgaatgtgggaacgctttgatcagaggatgcatattattcagcatcagacagccgacactggggaggagccttatcaatgcagtgagtgtggcaagccttcagttacatactgattctttaagaaaatcagataacttgtactggagagaaatcctacaagtgtggtaagtatggaaaaatcttcagttgtatctcttcctttactaagcatcaagaacacatactagagagaggccctatgaaagcaggaaatagaggaaggccttcagtcagggctcatcccttattaagcatcagaaaattcatacctgagaaaaacctgtgaatgtgggtaatgtgggagagccttcagccaaacctcattgctttataaaccccttagaactctccctactagctggaaactctggtgacgtgatgaatgtgggaagggctttggtggatgttccaccaaaacacgttagagaatttgtacattagagaatttgtgctagagcaactcttcaaatttagtgaaactgggaaaacccattagtagagttcaagcttcagtattcatctcaaagagaaaccttgggaacatgatgaatgtggaggaaagttcctttaccaacttggagatgtataaaactagagctgaaaagaagctgagaaatcctataaaaaaaaaa

SEQ ID NO: 68607 - DNA, 380 bp, Homo sapiens
ggccgcatcgggccccgagcgcgtgtccgagcggcttaaaggggccgtgctgctgccttcgggtaccgctgccccgggagacccccggcggcccggccctgcggggaccgggcgggatggggaccggggcagtggaccctcggagttgggatggggcggggggaacgcgggcgtggagccctccggggacagggcttggtgtcctcagaagcctccagaacgtccatggaacccgcccctgcgcccaccgcctcctgctgtctttccagctgagttccggctgcccctcaccctcggcttcttcactctgcctctccccagccagcgccctgctccccggtcctcaaccaccacctttcacctgcctgggccttcatcgc

SEQ ID NO: 68608 - DNA, 2262 bp, Homo sapiens
cctgccactgaggcaggtgcggccccaggaccatcaccaggaatgcgagcccaccctggaccagaggtaggagcccaaggtccggccccttgctctttgattgtgggcagcctcctgccctctctgggtctcagttgccccatctgcagagcgaggaggcccgggctggttggtcttgaaggcccttttccatgccgacatcatgtcactctaggcctggggttcagtttcctgtggctggtgatgctgtggttaagtttgcttgaccccagcagcccgagggactgtctgagtcacagcacagcccctattgcgtggctgctggtgtgtggggtcagttccagcagatgaatgtgtcatgtggcacaccttgtcccttcccgcagcatttcctggttccccccagacccttgagcgctctttgggacccagaaggagtccttgcacagggaaggcttgaggtgagaagccgcttcccagactgtcagggccaggcctgggtctagaattcttgctgctgctttgcagagtcaacagcccatcagcccatgttttagaggggacactttggtcctcggttcccaccctcagcaagcaggcctccagcccgaggaaggcctctgccgtggtgacgttgccgtgtggggctgcgtggctgttccccttggctggagcattcagccaaccccagcgtcccccctgaggcgttcattggcagccccctaggactgcacgctggccccacggtaaccccccctcccccaccaacatcctgcagggatggggtcagtggttccaccttcacaggccactttgaagggtggattctttgaggcccctgccagtcggctccctgctcagctgctggcccgggcgacctgggactcagcaccaacggctgaagtttctcagctgggctctgacctggggtctggggcagggaacgaacatggtggctttgggctgagaggatgagggaggtctttcccaggtcaaattactttcctttggcctctgcctgaggctcgatttgcctctctggtccaatgggactgacactgttgtacaacctgacctgtggctgagggtgtctgggcttaagcatgtggaccccttcggtgtgtctggccttcctccatcgtcctgccctttggccttttggtttgaagccacaggtgtggcttctggccttagcagatggtatgcttgcggaccgcagcccagcatgccggtgggcccacagcccgagccagcccagagctgccggaagggccgcccttcccggccctggcggggtgctggacactggccattttcactagagtttgcctggcagggaccgatctctgccccctcctctccccaggcctctggctgcagtgatgccgcagaatcctgagccaggtgcctcctgagcagcccgtgcgcctctccacagcggcgtttgccacccaatgcggctcgcttcagatgctctgatgcagagggcatgcccatagtccctctgcagagcctcgcactggggccagggcaggcaccagccccaggcggccagtcggccacggcctgtcctcttcctcgtagcgtctgctcctcactttgtgttgatggtgacttaggagaatgttccgattttccatgatctaagcaggccacgtttaaaataacatcaaggcaagcgtacgtgtcaccctctgtactgacatctcctcccctgaaatgcttttcagtttgacagcccgtttcctagacaagtgcacctggggtttcaggaactttgtgttttttcggagggggttggtggggaggtcgggatgcctgggatcccttcctggagaggcaggctgtctctggaaaaagcctccattgcccacccgccaggcggaaagtcaccctgttcccagcgcggtttcagcatttaattttaagggagctaaggaagcgcggcgcgccccctggtggtggtaagccgccaacgcacctgggggctgcaaccccaccggacgggtggtccggagggaggctggagcggggaggcgaggagggggctgtgagtcctcagaggccctgggccaccacatttctggcagcgtttcccagacacccctctgctaggccatccctggatagcaagtgaattaacttaagggcactgtgatgggaagccttgcccccctcttttttttttttttttaaaaatgggggaaaaaaccccaggggttaatttttgaatgaataaaaggtttttgttgaaaaaaaaaa

SEQ ID NO: 68609 - DNA, 682 bp, Homo sapiens
ttctcttgtggaagatttgaattatgtagtcattcaacttaataggtactcaaagtatttcatattgggtgggttttgatagattattatttttgaggaattgttccatttcatctaagttttgtaacttaaatttgtggagttatttatttgaagtattcccttattattcccttcatgacagaaggttctatagttgtatcctttgttttattcctaatagtggttatgtgtgtcttctttatctttgttaatcttcttagatgtttataaattttattgactatttcaaagaaccagctttctgtgtcattgattttctatgtgttctgactttgatttctattctgatcattattattttctttttctacttgttttggttgtatattgctgtttgtagtttcttgaggtgggagcttagattatcattagagactttattctaacataagcatttagttttataagctaaactcagcactgtttgagctccagcttacattttcctatattggaattatattttcattcagcttaactatttctcgattccatttaagaaattatctgtgacacatgggttatttagaagtgtgctcttttggccgagcacggtggctcacgcctgtagccccagcactttgggaggctgaggcgggcagatcatgaggtcaggaga

SEQ ID NO: 68610 - DNA, 532 bp, Homo sapiens
ccccccataaccatgctagaagaaacatctatataaggtgtccccactgtacacatactacttaggaaacccagacccatccagcccagcaacaattccaagtctttcagtcattctttaaacatataaaccagaagttaccagaacctcctcctttagcaaaaacagaaaaaacctatttgctcagctggctgaaaacattgctagctgcctagatgtttcttcatgttatgtttataaaaaggctaacataagagaccaatggccttgagaagcaaaagagttaatgcctcaagataactttaactagctctttccccaaacagatgccacaagttcaagcatctggctcttaaaacttctattattaaaaaataccatgttactcactaggaaaaagcttttaagacacagtaaaaagaactaacctgcttaaggcatgacaaagttggtacatgtgcatatacaggtttaacacaggtctgatcctaggtgttcatttagaacatagtttccagctgtaagaaaattt

SEQ ID NO: 68611 - DNA, 1869 bp, Homo sapiens
  misc_feature (1)...(1869): n = a,t,c or g
gactaacgctcccccatggcggactttgctgggccgtcttctgccggccgcaaggccggggctccccgctgctctcgaaaagccgcaggtactaaacagacaagtactttgaaacaagaagatgcttctaaaaggaaagctgaactagaagcagctgtgagaaagaagattgaatttgagagaaaagctctacatattgttgaacagcttttagaggagaatattacagaagagttcctaatggagtgtgggaggttcattacacctgctcactacagtgatgtcgtggatgaacgttctattgtcaaactctgtggttatcctttatgtcagaagaagctgggaattgtaccaaaacagaaatataaaatttctaccaaaaccaataaagtctatgatattactgaaagaaagtctttttgcagcaatttttgttatcaagcatctaagttttttgaagcacaaattcccaaaactccagtatgggttcgagaagaagagaggcatcctgattttcaactggctaaaggaagaacaaagtggccattctggagaagaagtacagttatgcagtaaagccattaaaacatcagatatcgacaatcctagccactttgaaaagcaatatgaatctagttcttctagcactcacagtgataggagcagtgacggtgagcaagactttgtttcctccattctaccaggaaacagaccaaattcaacaaatattaaaccacagctgcaccaaaaaagcataatgaaaaagaaagctggtcacaaagctaactccaaacactaagactaagaacagacagtagtagatgtcactgagcagttaggcgattgcaaattagatagtcaggagaaagatgctacatgtgaacttcctttacagaaagtaaatactcagagttcttcaaatagcactttgcctggaagattaaaagcgtcagaaaattctgaaagtgaatacagtaggtcagaaataactctagtaggcataagtaagaaaagtgcagagcattttaagagaaaatttgccaaatcaaaccaagtgtctaggtcagtgtctagttcagtgcaggtgtgtcctgaagttggaaagagaaacttacttaaagttttgaaggagactttgattgagtggaagacagaagaaacattgaggtttttgtatggccagaattatgcttctgtgtgtctgaaacccgaagcctctctggttaaagaagaacttgatgaagatgacataatctcagatccagatagtcatttccctgcctggagggaatctcagaacagcttggatgagtctttaccttttaggggctcaggtacagccattaaaccactgccaagttacgagaatttgaaaaaagaaactgaaaagttaaatctgaggatcagggagttttacagaggacggtatgttttgggtgaagaaaccaccaaatcacaagactcagaagagcatgattccacctttccactgatagactcaagttcccagaaccagattagaaaacgcatcgtacttgaaaagttgagtaaagtgttgcctgggcttctggttcctcttcagattacattgggagatatttacacacaacttaaaaatcttgttcgaactttcaggttaacaaatagaaatattatacacaaacctgcggaatggactttaattgctatggtgttgctgtcattactgaccccaattcttggcattcagaaacattctcaggaaggtatggtgtttacacggtttctagacaccctccttgaagaattacatctaanaaatgaagaccttgaaagtctaaccatcatatttagaaccagctgtttaccagagtgatatatttcatgaaa

SEQ ID NO: 68612 - DNA, 726 bp, Homo sapiens
tgtattagtacttttccaatgaagtctcttaatttataaagttatttaagagttttatgcatcagtataggtatatgtatcttctatggaaataaaatactcccttttcctcatatttacttctaatttttatgtagtgttttcaactttagcacttaaatttatgaagcattgatcttattcttcaaatagaacacttaattttcttggtttgtataatttaccaattcagatcatttcaattttccaaactcttgtgacaaatgtttatataaaaacgaagtcagtttttaatctgtgtctaggttgaaagtcatggggttggccctttctttaaatatgtgaaatggcttttcaattaacagtttaactttatttgtaagacagtactatggtattgaccataaagtatttttgctttgagtttaataaggactcaaaagagtgaagcatttatggcagattcttgttatctcgttttcttttttaggcctgatcaaccccgtataaccaaagatgtaatttgttttcatgctgaagatttcttagaagtagttcaacgaatgcagttagatttacatgaacctccactgtcccaggtatttttaatacacttactgtctttggtttagtttttattatgaagagagttatttgtatttcttgttttattattttttagtgtgtccaatgggttgatgatgcaaaactgaatcaactgaggag

SEQ ID NO: 68613 - DNA, 1488 bp, Homo sapiens
gaggggatggatctcagccatcacaaaatggggggcctttatgttcaggttttgcccgaagaatcagcttatttgcttcttgtactagcagggcagttgctgccaaggccctctaataggggggccatcctttagcaaccctgtctagttgtttagagacgtaggctaccggcctcagccagggccccacagtttgggttaaaagtccagctgccatcttttctctctctgacgcatacaatggaaaaggctttgtcagatcgggtagccccagggctggggctgccagaagattttcttgtaactcatgaaaaacttgctgttgttgggatccccatttcaaaagttccgggtccccgccccctttgtgacctcatacaaaggctcggctaatactgcagtttgggatccacagtctacaaaaccccacagctcctaagaattctctcacctgccttctgcccttaatttccggtagattgcaaataacctgctttctttctgttcccgagctgcgttcggacccgtcggatcgtaaatcccacataaggtacctgccgtcagaagatttgaactctctacttggacacctaatacccacagtcctccaggtgggtcctaaggatcttaggagcaacgatggggggtcctaagccagggggggatgagggtctggctctcagtccctgcctcgcggggggtgcctcccccctctgcgatgggggtcctaagagccaggaggggaagatggggagaggttgataataatttcagcattgccggctgtgttcacccagccctgtgatattcttcctcatattcagaggccaagaagttgatattactcgtagtattgcaggacgtatacaccctcgtgttagatggtccttaataatattccaaggcagagtgggtgatgtgactacatatatggcagaaagtggaaatccccctggcatattggtcccacgggccctgccttctgcccttaagctccggtagattgcaaataacctgctttctttctgttcctgagctgcgttcggacccctgtcgtattgtaaatcccacgcaaggtacctgccgtcggaagatttgagctttcttcttgaacacctcatacccacagtcctccagacagaaggacaacaggtacaaagtcctaaggattataaaggtatgctgcttgccatcatcttagtgaccaaggcagcgaagctgtttctgtaccttggaacagtcttccctgacaagccagagaacagcgataaagccaccagccttgggatcaggactgaaaaggcaagagtgatggagatttctcctgcgctaagccaagagaaggtttcagcacctcagacagctcccaccgaagtagccacgctcccagctgcttgcagatgttgaaaaggaaagcctcggtttgtcttgaggttgtcagcaggtgcaagacacgtaataaaatgcaatgtgttcctaaaaaaaaaa

SEQ ID NO: 68614 - DNA, 1311 bp, Homo sapiens
ctatcagccacataccacatagggaggccacagatgggccgtggtgggtggaggtagcctttgcaccatgttgagcagagacggctggctctcctcagggctccggctggaaggtgtataccggaaagggggcgctcgtgcccgcagcctgagactcctggctgagttccgtcgggatgcccggtcggtgaagctccgaccaggggagcactttgtggaggatgtcactgacacactcaaacgcttctttcgtgagctcgatgaccctgtgacctctgcacggttgctgcctcgctggagggaggctgctggtattcctaagatccctgagagccaaggcccaaccaggatctctgccttcccccaccagaatccatggtttggcagccctccgccccatcacttcccaccctgggggatcatccagagacttggctcagggggaggtgggaagggggcagagacacatccatcctgcatttgtgcctaaaaatccctccctctgtaccagctgccactctttcttcccgggtcctccccaaccctcctccattccatccccagagctgccccagaagaatcagcgcctggagaaatataaagatgtgattggctgcctgccgcgggtcacccgccgcacactggccaccctcattgggcatctctatcgggtgcagaaatgtgcggctctaaaccagatgtgcacgcggaacttggctctgctgtttgcacccagcgtgttccagacggatgggcgaggggagcacgaggtgcgagtgctgcaagagctcattgatggctacatctctgtctttgatatcgattctgaccaggtagctcagattgacttggaggtcagtcttatcaccacctggaaggacgtgcagctgtctcaggctggagacctcatcatggaagtttatatagagcagcagctcccagacaactgtgtcaccctgaaggtgtccccaaccctgactgctgaggagctgactaaccaggtactggagatgcgggggacagcagctgggatggacttgtgggtgacttttgagattcgcgagcatggggagctggagcggccactgcatcccaaggaaaaggtcttagagcaggctttacaatggtgccagctcccagagccctgctcagcttccctgctcttgaaaaaagtccccctggcccaagctggctgcctcttcacaggtatccgacgtgagagcccacgggtggggctgtttgcggtgttcgtgaggagccacctcgcttgttggggaagccgcttccaggagaggttctttcttgttgcgt

SEQ ID NO: 68615 - DNA, 365 bp, Homo sapiens
ctctgctgatgcccccatgttcgatatgggtgtgaaccatgagaagtatgacaacagcctgaatatcatcacgtgatgaaggcagggcccgtggagaagcggccagcctggcaccctatggacacgctcccctgacttgcgccccgctccctctttctttgcagcaatgcctcctgcaccaccaactgcttagaacccctggccaaggtcatccatgacaactttggtatcgtggaaggactcatggtatgagagctggggaaaggaactgaggctcccacctttatcatccaagactggctcctccctgccggagctgcgtgcaaccctggggatggggttctggggactggcttatccatact

SEQ ID NO: 68616 - DNA, 1191 bp, Homo sapiens
tttgagatggagtctcactctgccaccaggctggaatgcagtggcgcgatcttgggtgacagagcaagattctgtctaaaaaaaaagaaagaaataggagcaggatcaacttccagatatacagagaatataaaaatacattcactttattttagaaaaatgaagactcatagagtaagcttatcacaaactggcctattaggagtcacagaattcacaggaaacaatttctgaagaccaggtgcctgctgccacctctccaagcaggccagagtccagtagagaatgcgattcaggaagatggctcctcagagggcagggaggttagctacggaggccgctcacatggaaatgtccagtgaaccaatgccaaggaagaagataaaattctctggggctgaccacaacagtgggggtggataaagacaaaccacttgcctgtacttctcatcttctatttgttcatttcactgctggaaggtgacctcttttcccctaatcttctttcaacccagagagtttaagtcttctccagctcaatcctaatccaccccatttcccatggtctctactcctgggagaccagccctggtggcatctcttcctcctgtccctgggccagaatctgctggagtcagggtctgctgggtagaggcgagtccaggtactgactgtagtggtttgctactgaagtcttgcttgctgtcctgatctctttacctggtaggtcctgggactgccactttcctggggggctgcagattgctgcgagtggcacccatgacaggaagatttagtcgctgggaaacaggaaccttgtgtccactttcccgcactctgtgtcctgcagtgcttggtcttggaagcccttttcgagttgacagagaatccggaggtagggcacctctgccaggtggcacactccggctggtgagtggcattcggctggcaggcccgcaacttggctgctctggtctcctcactggctgctgctctcccactgggcccggctctcccccggactgggggagtcgatcgggtaagaggagaagatgctgggcttttggatgcagggaacagattgcaagtgggtgactccctcttcatgttggagggcctctttccagatgtagccggagagccctgactgaccccttcctatctttctccgccctcgtccaagcttgcgta

SEQ ID NO: 68617 - DNA, 1021 bp, Homo sapiens
ttttgtcgaaaggggtttaagtggggaacccccggggttttcccctcccggcggtgttaaaccccgggccagggaatttaattttgggggccccataaaaaaactttttccttgcaagcccgcggaagtaaactttgatcctttaaaacgggccccccttttttttttttttcttgggttcacatttattgtaacttggaagcccacccttcttcctactcctggagctgtcgtccccaagggctcaggaattagccttgctccacagcaaacagcccagaggccccacctgggcaaaagcaaacaaaacagatacgttcctttccggcaggtgcagatgctctgcccaggcctgcggaagccagctccggtctgtgtgtaaatcctccccaggacttccggcccaccagctccattccagcctccactcggctcagctccgcggcttcctcgagccaggctggtcctgcatcgccatctgctggccgcgcggcacggccggttcctggagccagcaggagtcggaggctgcagggcttgaaggcctcttcaccgtgccctccagggagcctagctgccgaagtattcctgctggaacttctggaagtcttcctcggtgaacacggtgccctcagccttcttcttcttggtcttggccacaggccggtcacaggccttgcggccccggttctggcgcaaaatctgctggctcacagactcagccacggtgcttctcgtcctggtcagaaacttcaggtttactctgaggtggtctcgacactctcgcttccggtactcgtccagtgccgacttgggcacctttcccttggccgagttccgcagtttctgggcctgaattgccttcgtcttccggggccgtttcaccggagcccctctcggcttggcctgacctggagggtcccggggggcctcggacgccgccagcagctccaggccccgccgcagcagggcggcggacatggcggcgcttggctccccccttctgtcgtcttctcgcagc

SEQ ID NO: 68618 - DNA, 755 bp, Homo sapiens
  misc_feature (1)...(755): n = a,t,c or g
gggtcgacgacttcgtcgggaggtgggcggcgacccatcccgctagaatccgtccatgtctctgctcgcgcaccgtgacttctaaggggcgcggatttcagccgagctgttttcgcctctcagttgcagcagagaagcccctggcacccgactctatccaccaccaggaagcctcccaaaagagctctcgccctgtggacgactcggaatccctggaaaagccgggagggagtcggaggcgccagcccactggggaggtggcgctgggcgcgcgggatgcgcggggagccttctctgcaggagccgcacagtgcactgctgcgcgctgggcagtgcggngaagcgccgcgggaaggagcagctccgagcaacaggtgcagcacgcagccgctccgggagccagggaaaaccgccggcgaagatctggagcggtaaggcggagagaagggtctttccacctgcgcggctgcagccggcggatccctcttcccaggctccgtggtcgcgcagcgggcggaggcgcccgggaaggggaccccagtgctctcgagatcaccgtcccttcccgagaaggtccagctccgggctcccgaacccaccctctctcagaaggtcccggcgcaaagacggtgccaccaggcacggccaccggatccccgctcccgctggctcgcgcctcgggggaagctcagactcctaaactcgcactctccgtgctttgcgacgggacccctggccacccccggcaatgtatt

SEQ ID NO: 68619 - DNA, 1903 bp, Homo sapiens
gtcccgactttcctggaggacaccttcgtgcggagcgcgccgagcctcgtcccgcggccgggccggggccgggccgtagcggcggcgcctggatgcggacccggccgcggggagacgggcgcccgccccgaaacgactttcagtccccgacgcgccccgcccaacccctacgatgaagagggcgtccgctggagggagccggctgctggcatgggtgctgtggctgcaggcctggcaggtggcagccccatgcccaggtgcctgcgtatgctacaatgagcccaaggtgacgacaagctgcccccagcagggcctgcaggctgtgcccgtgggcatccctgctgccagccagcgcatcttcctgcacggcaaccgcatctcgcatgtgccagctgccagcttccgtgcctgccgcaacctcaccatcctgtggctgcactcgaatgtgctggcccgaattgatgcggctgccttcactggcctggccctcctggagcagctggacctcagcgataatgcacagctccggtctgtggaccctgccacattccacgggcctgggccgcctacacacgctgcacctggaccgctgcggcctgcaggagctgggcccggggctgttccgcggcctggctgccctgcagtacctctacctgcaggacaacgcgctgcaggcactgcctgatgacaccttccgcgacctgggcaacctcacacacctcttcctgcacggcaaccgcatctccagcgtgcccgagcgcgccttccgtgggctgcacagcctcgaccgtctcctactgcaccagaaccgcgtggcccatgtgcacccgcatgccttccgtgaccttggccgcctcatgacactctatctgtttgccaacaatctatcagcgctgcccactgaggccctggcccccctgcgtgccctgcagtacctgaggctcaacgacaacccctgggtgtgtgactgccgggcacgcccactctgggcctggctgcagaagttccgcggctcctcctccgaggtgccctgcagcctcccgcaacgcctggctggccgtgacctcaaacgcctagctgccaatgacctgcagggctgcgctgtggccaccggcccttaccatcccatctggaccggcagggccaccgatgaggagccgctggggcttcccaagtgctgccagccagatgccgctgacaaggcctcagtactggagcctggaagaccagcttcggcaggcaatgcgctgaagggacgcgtgccgcccggtgacagcccgccgggcaacggctctggcccacggcacatcaatgactcaccctttgggactctgcctggctctgctgagcccccgctcactgcagtgcggcccgagggctccgagccaccagggttccccacctcgggccctcgccggaggccaggctgttcacgcaagaaccgcacccgcagccactgccgtctgggccaggcaggcagcgggggtggcgggactggtgactcagaaggctcaggtgccctacccagcctcacctgcagcctcacccccctgggcctggcgctggtgctgtggacagtgcttgggccctgctgacccccagcggacacaagagcgtgctcagcagcccaggtgtgtgtaacatacggggtctctctccaacgccgccaagccagccgggcggccgaacccgtggggcaggccaggccaggtcctccctgatggacgcctgccgcccgccacccccatctccaccccatcatgtttacagggttcggcggcagcgtttgttccagaacgccgcctcccacccagatcgcggtatatagagatatgcattttattttacttgtgtaaaaatatcggacgacgtggaataaagagctcttttcttaaaaaaaaaa

SEQ ID NO: 68620 - DNA, 1402 bp, Homo sapiens
ctagttcgacatctcgcgcggcctcgggagctgcccggcggccccggaccgaggcagccctcccctttaaaagaagcggaggacaggattgggatccttgaaacccgaaacccagaaacagcatcggagcggaaaccagaggggaaaccttgaactcctccagacaattgcttccggggagttgcgagggagcgagggggaataaaggacccgcgaggaagggcccgcggatggcgcgtccctgagggtcgtggcgagttcgcggagcgtgggaaggagcggaccctgctctccccgggctgcgggccatggccacggcggagcggagagccctcggcatcggcttccagtggctctctttggccactctggtgctcatctgcgccgggcaagggggacgcagggaggatgggggtccagcctgctacggcggatttgacctgtacttcattttggacaaatcaggaagtgtgctgcaccactggaatgaaatctattactttgtggaacagttggctcacaaattcatcagcccacagttgagaatgtcctttattgttttctccacccgaggaacaaccttaatgaaactgacagaagacagagaacaaatccgtcaaggcctagaagaactccagaaagttctgccaggaggagacacttacatgcatgaaggatttgaaagggccagtgagcagatttattatgaaaacagacaagggtacaggacagccagcgtcatcattgctttgactgatggagaactccatgaagatctctttttctattcagagagggaggctaataggtctcgagatcttggtgcaattgtttactgtgttggtgtgaaagatttcaatgagacacagctggcccggattgcggacagtaaggatcatgtgtttcccgtgaatgacggctttcaggctctgcaaggcatcatccactcaattttgaagaagtcctgcatcgaaattctagcagctgaaccatccaccatatgtgcaggagagtcatttcaagttgtcgtgagaggaaacggcttccgacatgcccgcaacgtggacagggtcctctgcagcttcaagatcaatgactcggtcacactcagtaagtccttgcagagtccatgggtttcttcgacaagtggcttcaaggaagggaattcccacccttgtcttccagcaaggccacacacatgaaaccagcagaaaagagtcttatttgctggaaagacccccagcaagggcatagtgagcccttacagtggttccagtcagaaaaggcaccacttggtgggcacagccccatgggtgttccaacttggtaagcagagcaaggctggacttgagttcccgtccttcacaaaacacagagccacaagccccaggcctgcagcagg

SEQ ID NO: 68621 - DNA, 823 bp, Homo sapiens
gcccggtgcaaaaagtaaactttccatgaggaaaaagatgcctggcattttatccacatggtaatactgactcacaatgtccaaataataacaatgtaacattataagcttgatctaatacataaaaccaatgggatattttattataccttcttatttaaaaagaataacatgttagtatacttatgataattgtttacattaattatctgtattcaaagaatcttggcagatctgaaggctttcccatactgcttacattcatagagtttctcccaagtgtgaacccttccatgccgttgaaggtgcgaggcacatctgaaggctttcccacattgcttacattcatagggtttcactccagtgtaagtcctttcatgatatcaaacggaactagaatacactcatagggtttctctcccgtgtgagtcctttcatgacattgaaaagaagtaaaaggaatgaaggctttcccacactgcttacattgatagggtttctccccagtgtgagtcctttcatgatatcgaaaagaactggaaaatgtgaaagttttgccacattgcttgcattcatagtgcttccttccagtgtgagtctattcatgtccataaaaggaaccaggctagctgaatgctttcccacaatccttacattcatatggcttctctcccatatgagtccttgcgtgtatatgcaaggaagaaaaataattgaatgcttttccgcattccttacattcataggggttctctcccatttgtgttctttcatgtatttggaaaatcctggcagatgtgaatcccattccacaatgcttaca

SEQ ID NO: 68622 - DNA, 2023 bp, Homo sapiens
ttttttttttttgaaggcaaaagtgtttattcaagactttctaccacactgtgggaagcatcgataaacagtcataataattatcattctgagtcactgcaagcgtggggttggatgctggctctcacagtagcctgtgttgggaccatgagcagccatgcgcacctccacgcacggccgagctcaacccgaagaccacgcgtgctccctggcaggagcaggaggcctgaccacagacgcagcagctccccagcctgagcctgggagtgcaccagccagctcgcagcggaggccgtttctcctcacaggctggagtgagctcagagtctagaggtcagaggacctcagactaagagctgcaacagaacgacagcaagaacattctggaaacgatgccacagtgaatcttttatactgtcactcacacttggtgagggcctcagacatgaaaccctggggagaggcgagtgtgacctccagagtttggctgggatgcggctgagacagacctgctgctggccgaggagggcagtggctggcgtggccctcatggccagcaggtgctaggactcctctggaggcccaggcgcctgtctaagctgccggctgtggaccacctgcagagctccccccgcagcctggcggagctgggcatccagggcgccacggaggtcgttcacctggacatcaggcagggggttaaggccaatgatgaccccatccctcggggccagctgaccctctgcatgagggccaaggtcccgccgtcgcctccggaggtcggagccagcctgcagtttcaggtcccggttgggcttggcattgtccggcctctggccccccgggacagctcgtttgagccccagctctggctctggcctctgcctgggctcctggacagcagcgtcctccccgcctctcggctgctcgtgggacacaggcacatggtcccccccgcgggcctttctcatctccaggtgaccgccatggtccagccggtggccctgctgtccaccctgctcgccatcagagatgacccgcagttccggctggcgtaacacagcctggggctgtgcagctgctccttccgccccaccgggcaggtccgctgcaaggcccaggtctcggctcacttgcttgggcttcatgcgagggtcccccgtctctgctcctggccctgccacgagccagttggcttccttcagaatgctggtgccagtggctgccacctccttcccaggttttttcctgtcttgggaaccgccagtaacgtcctgactttgcccagggaattcctctgcgaggcgctcctctgggcccccggcttccctggcggggtctggcacgggcacctgctccgggcccttggggagctccttcacagtgccagctgccctgggggcggcatccttctggccatctctcagcttgccctgggctgcccgaggctctgtgtcagggccgccgtcaggagggccagcagggtctctgcccacaggcccctcagagtgctccagggagcgctggttaaggtcctgggatggagcagggcggcccccaggagctctgaggacagggtccaaaggcaggggaggcagattctccaccgtctccctggccttgccttcaggggcctcctggcctctgggcaccgctgccccgggctcttgatgcacctccacctgcctgggtttatcctcctcgtcctcctgcctctgctggtggatctccttgtgctgctcctcgatcaccgccagcagcttctcctgctggtccagcaagcgcttttgctgcacctgctgttctttgatcacctgaagcaggacggcgtggtccagcatctccgccctgccagcttcctccagctggctggccgcctggtttccacccgctcgctccacgtccctctgctcgcgaggctcgggcgggcagcccaggccctggagccggcttctccgctgggaggggaggcttcccaccgtggtcgctgtcctctgcgggctgccctgtgtccccggcggcg

SEQ ID NO: 68623 - DNA, 870 bp, Homo sapiens
  misc_feature (1)...(870): n = a,t,c or g
ccttgggaagcccccaaggagcataagtacaaagctgaagagcacacagtcgttctcactgtcaccggggagccctgccacttccccttccagtaccaccggcagctgtaccacaaatgtacccacaagggccggccaggccctcagccctggtgtgctaccacccccaactttgatcaggaccagcgatggggatactgtttggagcccaagaaagtgaaagaccactgcagcaaacacagcccctgccagaaaggagggacctgtgtgaacatgccaagcggcccccactgtctctgtccacaacacctcactggaaaccactgccagaaagagaagtgctttgagcctcagcttctccggtttttccacaagaatgagatatggtatagaactgagcaagcagctgtggccagatgccagtgcaagggtcctgatgcccactgccagcggctggccagccaggcctgccgcaccaacccgtgcctccatgggggtcgctgcctagaggtggagggccaccgcctgtgccactgcccggtgggctacaccggacccttctgcgacgtgggtgagtgagggtctggggcaagcagaaggccagcccccaggtgggacgggcttgccaggaaggaggagggagagtgcggaaagcagatgagagggaggcaggagagcccagccttggctgcccagggagccccctttctcctcagacaccaaggcaagctgctatgatggccgcgggctcagctaccgcggnctggccaggaccacgctctcggtgcgccctgcagccgtggccctcgaggccacctaaccgaacgtgactgccgaacaagcgcggaacttgggactgggccgncaccc

SEQ ID NO: 68624 - DNA, 1420 bp, Homo sapiens
aaaactattaaaactgataaagcgagttcatccaggtcgtagaatacaagaccaatgtgcaatgatcattgcattttgtttttgtttgtttgtttttttttgagacagagtctcactcttgtcgagactggggtgtagtggcgccatcttggctcactgcaacctctgcctcccaggttcacgcaattcacatgcctcagccacctgagtagcagggattacaggtgtgtgccaccatgcctggctaatttttagtatttttagtagagatgggattttcccttgttggtcaggctagtcatgaactcctggcctcaagcgatccacccatcttggcctcccagagtgctgggattacaggtgtgaatcaccatactcagcctcaattgtatttctgtacacctctaaataaatggaaatacattccatgttcatgaatcagaagacataagatgaccatactccccaaactgatctacaggttaaatgtaattcccattaattccagctggtttctttgctgattctaaaattcatatggaaatttcaggaacacagaatattaggaagaatcttgaaagagtttgaatgacccacccttcctgattttaagtatacagaactacagtaatgaatgtgttgtactggtataaaggtagacatataggtcaatatagatcaatggcatagaattgagaattcagaaaaaaagccttcacgtttatggtcagttgattttaaaccagagtgccaagacaattcaatgggaaaaggaaacagtctttgaaccaactgtcttctggatctattggatatctatgtaaaaaagagtgacatttgattcctacttcacatgatatttaagaagtaacttaagatggatcaaatacctaaatgtaagctaaagctataaaactcttagaagaaaacatagacgtaaatctttgtgactttggattaggcaaggatttcttaaatatacccaaagcataggcaacaaaagagaatacacaaactggacttcatcaaaactaaaaactgttgtttgaaatgacaccatcaagaaagtgaaaagacagcttacagaatgggagaaaatatttgcaaatcataaatgtgataagggacttgtatcttggtggtatataaagaactcgtaactcaattataaaaagacaactttgaaatgggcaaaatagctcaacaggcttttctgcaaagaagaaatacaaatgaccaagaagcacatttaaaaattttcagtactattactcatcaggaaaatgcaaatcaaaaccacaagacacccaatgtctacaatcaaaaagataataactagtattgatgaggatgtggagaaattgaaattctcataacatgctgggtaggaatgtaaaatggggcagccactttgggaaaa

SEQ ID NO: 68625 - DNA, 536 bp, Homo sapiens
aatagacccctcgccgccgcgctgcaggaattcggcacgaggaggctgcctggtaagccaggaaaggggcttctggccgttctgttggagcgcctctgactgacttcccccatgtgtccgtgtggccacaccgtgctactttcagaggcagtgggcttttcgctaagggataaaaagaagtaaaaccttgcctttagcgcagctctccttcactgggcagattgctctccctccccactctcccaggcccaaattggatctcagcgcctgggagctccaactttagcaagtgcgaaatcctgtcttcggttttggaattttcatccgcacagactatatcagccacggataggatatgtgagaataccagcatgtcaaggctgggaatcatccttaggcatcacctagccagtcctgcctctcattttaaggtgatcacaggatctggtttgccactgaaaggaatcttgatgctgaccacttcacctcggagagcatgaactgctcccatgccttcaagagttttagtgggtaac

SEQ ID NO: 68626 - DNA, 452 bp, Homo sapiens
cagttgctaaaaaaacccaagtataaatctaacaaaacatgtacaggacttcaattgtacatgttttgtggcagaaaactacaaaacattgatgaaataaaccaaataagatctaaataaatggaaaaacatagtgtgtttgtggattagaagattcaatataataaagaagtcaattatttgccaatttacatagaagtttaatgcaattcctatcagaatcccagcaagatttttgtagatatagacacgattattctaaaatttatatgaaaatgcaaaggaaccagaatagctaaaataactttgtaaaagaataataaagtgggaggaatcaatctacctgatttcaagatttattatagagctgtcgtatttacagagtgatagacacatagatcaatgaaacaaatagagaacctagaaacagactcacaaaaatatgcccaacc

SEQ ID NO: 68627 - DNA, 421 bp, Homo sapiens
attaagcctagccctagcccttttaaggtgcactgtgtggaacggcccaggctccccaaatctaaacttctcactcttcaccatccagttttcaaggcactgtgaagcccctgatgcgaaacagcagttaccgcaggccatggaggagcgggcacagctgaaagcacatctagggcaggtaatggagtcagttagataactacaaacggagagagatacgtatgctgaaaatctgaaaggagggagggccatgtggtgtcagaggaagcaacagatgtcggagcagcagggccctccaaggtggagcagcagctacaagcagaggctgaccacctgcagaaggagctggagagtctggcagctccgagcccaggagcaagacactgagggcttcagtcacccgaaccaggaggtggaggag

SEQ ID NO: 68628 - DNA, 446 bp, Homo sapiens
aatagatgaccagtagtccgtgcggtggaattccttttttgactcctgtgtttatttataagtgtgtttttagatctctaagtatttggggattttccagctatctttctgttactgatttctggttgaattccattatggtctgagagcatgctttgtatgatttctattcttttacctttgttaaggtgtgtcatatggcccagaatgtggtctatttggtgaatgttctatacaagtgggagaagaatgtatattctgctgttgttagaggaagtattctattaatgttagtacatccagttgatggatggtactattcagttgaactatatcctcctgattttctgcttgctgaatctgtcagttactgatagaggggtgttgacatctccagctattatcgtggatttgtctatttctaaaaacatttatatatgtttttg

SEQ ID NO: 68629 - DNA, 2139 bp, Homo sapiens
ggaattcgcctgttggaggctgggccaggacctgagggccgagaggcattttctctgaacagctcttcaggggagttgcgtgcgcgagtgccctttgactatgagcacacagaaagcttccggctgctggtgggggctgctgatgctgggaatctctcagcctctgtcactgtgtcggtgctaatgactggagaggatgagtatgaccctgtatttctggcaccagctttccacttccaagtgcccgaaggtgcccggcgtggccacagcttgggtcacgtgcaggccacagatgaggatgggggtgccgatggcctggttctgtattcccttgccacctcttccccctattttggtattaaccagactacaggagccctgtacctgcgggtggacagtcgggcaccaggcagcggaacagccacctctgggggtgggggccggacccggcgggaagcaccacgggagctgaggctggaggtgatagcacgggggcctctgcctggttcccggagtgccacagtgcctgtgaccgtggatatcacccacaccgcactgggcctggcacctgacctcaacctgctattagtagggggccgtggcagcctccttgggagttgtggtggtgcttgcactggcagccctggtcctaggacttgttcgggcccgtagccgcaaggctgaggcagcccctggcccaatgtcacaggcagcacccctagccagtgactcactgcagaaactgggccgggagccacctagtccaccaccctctgagcacctctatcaccagactcttcccagctatggtgggccaggagctggaggaccctacccccgtggtggctccttggacccttcacattcaagtggccgaggatcatcagaggctgcagaggatgatgagatccgcatgatcaatgagttcccccgtgtggccagtgtggcctcctctctggctgcccgtggccctgactcaggcatccagcaggatgcagatggtctgagtgacacatcctgcgaaccacctgcccctgacacctggtataagggccgaaaggcagggctgctgctgccaggtgcaggagccactctctacagagaggaggggcccccagccactgccacagccttcctggggggctgtggcctgagccctgcacccactggggactatggcttcccagcagatggcaagccatgtgtggcaggtgcgctgacagccattgtggccggcgaggaggagctccgtggcagctataactgggactacctgctgagctggtgccctcagttccaaccactggccagtgtcttcacagagatcgctcggctcaaggatgaagctcggccatgtcccccagctccccgtatcgacccaccacccctcatcactgccgtggcccacccaggagccaagtctgtgccccccaagccagcaaacacagctgcagcccgggccatcttcccaccagcttctcaccgctcccccatcagccatgaaggctccctgtcctcagctgccatgtcccccagcttctcaccctctctgtctcctctggctgctcgctcacccgttgtctcaccatttggggtggcccagggtccctcagcctcagcactcagcgcagagtctggcctggagccacctgatgacacggagctgcacatctagctgtggcccaggctgggccccgacctgggatgcgcacagtgtccccaacgcaggccccactctgagcctgccctgggcagcctcggactatgactggctacggggaggccaccaccaggccccagctctccaccctgaactccccagccccctcagagtactaggaccacagaagccctgttgctcactgacctgtgaccaggtccaatgtggggagaaatatgaaggaggtagcagccctgggttctcctcagtgagggatccctgccctgcaccagcaccctgagatggagctgagactttatttattgggggtagggggatggaggaggtccctccaacatgtttggacccagctcctttgggttccactgacacccctgcccctgcccctgcccagaaccaagtgccatttctcactctggagccttaataaactgcaatttgtatccagaaaaaaaaaa

SEQ ID NO: 68630 - DNA, 749 bp, Homo sapiens
gcggctaactcgtagacactagtccagtgcggtggcattcgcctggtcactccagggaatgtcgctctgtgggcccctgtcagagtggagatcttgtccctccatactcactggagcaggagcccgcataattctcatagagagtcgccaggagcctattctgtgacttctggaagatggggaccacggtctcattcaggggatccttgtttttctccagccagcccacaatgctgtaaggcacctggagagacaagtcaggtgctgagcccgggtgggagacctggagcagggcgggaggagcctggccgagggctggggttccagcaagcacctaccacgcctgcgtagtggaccacctcgaagtgggcctggtacttgcgcttcttgtcaggccgaggctgctggaaattgggtgacttccccgcgtggttgtcgtagagcttggcccggaagctggcgtctgaggccttggggaacatgcattcctcctccaggatggacaggatgcccagtggctgggaacagaacgagcttgaaaagccaccatcaagccagtccatcctggaaggactgaacccctggttccccaggccacctcccttctgggagccttcccagatccccagcttcagccatctccccggatggtcagacaccacacccactccaagaacccatctcctaacagagaaaagtctgtggcttggctccagtcccctcctgcaaaatctgcagcactgaggtgt

SEQ ID NO: 68631 - DNA, 626 bp, Homo sapiens
  misc_feature (1)...(626): n = a,t,c or g
cgggacgcttaacgttgaaacccttattgatagcctatacagtgaggaggaattctgctgagctttctgactttgaggaatgcgaggagacgggagagctctttgaggagcctgccccccaagccctggccacgagggccctcccctgccctgcacacgtggtatttcgctatcaggcagggcgtgaggatgagctgacaatcacggagggtgagtggctggaggtcatagaggagggagatgctgacgaatgggtcaaggctcggaaccagcacggcgaggtaggctttgtccctgagcgatatctcaacttcccggacctctccctcccagagagcagccaagacagtgacaatccctgcggggcagagcccacagcattcctggcacaggccctgtacagctacaccggacagagtgcagaggagctgagcttccctgagggggcactcatccgtctgctgccccgggcccaaagatggagtagatgacggcttctggaggggagaattttggggccgtgttggggtcttcccctccctgcttggttggaagaactgctttggccccccanggaaacttgaactctctggaccctgaacanatgctggcgtccccttcttcct

SEQ ID NO: 68632 - DNA, 1270 bp, Homo sapiens
aagttcggcactaggtggacgcccctatccctccatgctctcgcagccccactgatggacggttgtggaaccactcccgggcctcatgtttacaaagagaccgagagcccatcgtccagggtcacagggatggcaggtggcagagaggacacaaatgagtctgcaaccctcaatgtctgaaactcaatagctggaagacggatacccccagcccctgcccctccccgaggtcccacctatccacctatgttaccgggggaggggagaagtcatagctggaactctgggggtttcccagaaccagccctgctgactgcgaacagcgtcccagcatggagaggctgagaacagtacgtaccctaagacctggaaaagattggggcacaaatccacgctcggcacagccatcacacacggccacacccagagagccacccatggcctgggaagcagggctgccacccgcacctccctgggctgcccagatgagggcgggtgaacagaagggcagcccagggccatgtgtcaggattcgggccacctgcccaggcagcccagagctccacccaccaccccccaccctcaactgcacagcagggtccctcagcagccccctgcgtcacacggaccaatgacctacacactgagccggggctcatgccaactgaaaattgggacccggcccagtctgccggtttagttgctgagatgatgtggggagcgggacagagcacgtggatgcagagaggcagagctgccagatgggcatgtccccaagacaacagcttccttgggatcagagcgcccgggacagcacaccagccaagggaagcgtgtcagctccaaaagcgggcctcgggcgttttgggcgactggctgccaggcttaggtcaggagctgggtacatgcacagacaagggacgaaggaacagcagccaggaaggggtccaaatccatacaggaatgtactttgtgagaaaggtgggatttcacagctgtaagcaaaagacaggtgctctcgacaggtggggctgagaagaaaactgagccaagatctaaaaaaaaaattacatcagctccatcccaccatgttacataataacatgctccagctggatcaaagcttcaaccatggaaacaagcaagcagtcaaggagaagccagaagaaaagctctggaggccgggcacggtggctcatgcctggaatcccagcactttgggacagggtcttgctctctcaccaaggctggagtatagtggcccgatcat

SEQ ID NO: 68633 - DNA, 456 bp, Homo sapiens
  misc_feature (1)...(456): n = a,t,c or g
cgcgccgttccataagaaaccatcgantgagggcgtacgaacnaccaggagctgttnctgtatttttaggagacacggatgtgctgcctccgttccatctctgaaggagtttcagaagcctgagcagcccactccaaggaaaagcccctatggtccccctcccactggcctgtttgatgatgatgatggtgatgatgataacgactttttctcgacaccccacagcataccttccaaaacaggcaaagtccaatccactgctgatatctttggtgatgaagaaggagatctgttcaaagaaaaagccgtagcatcgccagaagccacggttaccttaccttccagcaaaaatctcaagccctcgtcagaaacaaacactcagaaaggcttattttaggatcaggaggactctgaggatttgttttcttctcaaagtgcgagtaacttaaaaggtgc

SEQ ID NO: 68634 - DNA, 1427 bp, Homo sapiens
attgtagacattagtcagtgcggtggaattctcagccccacgtggaggccctggaggaagccctggctcagatccacataataaacagtgccctccagaagcgagtggaggcagtggcagctgatgtccggacattctcggagggctacattaaggccattgaggagcatcgggacaagctgctgaagcagctggaagacatacgggcccagaaggaaaattccctgcagctgcagaaggcccagctggaacagttactggcagacatgcggactggagtggagttcaccgagcacttgctgaccagcggctcagacttggagatcctcatcaccaagagggtggtggtagaacggctcaggaagctgaacaaagttcaatatagcacccgtcctggagtaaatgataagatacgcttctgtcctcaggagaaagcaggccagtgccgtggctatgaaatttatggtacgattaataccaaagaggttgatccagccaaatgtgtcctacaaggagaagacctccacagagcccgggagaaacagacggcctctttcaccctgctttgtaaggatgccgcaggagaaatcatgggcaggggaggagacaacgttcaagttgccgttgtccctaaagataagaaagacagcccagtcagaacaatggtccaggataacaaggatgggacatactacatttcctacacccccaaggaacctggcgtctatactgtgtgggtctgcatcaaagaacagcatgtgcagggctcgccattcactgtgatggtgaggagaaagcaccgcccacactcaggcgtgtttcactgctgcaccttctgctccagcgggggccagaaaaccgctcgctgcgcctgtggaggcaccatgccaggtgggtacctaggctgtggccatggacacaaaggccacccaggtcatccccactggtcatgctgtggaaaatttaatgagaaatctgaatgcacatggacaggtgggcagagcgcaccgaggagtctacttaggactgtggctctctgatgggtttgtgctcagccttttaaagctgcaggcagcaccacttgagatttccagaggacccagaccttcgttcattctaaagagactgatagaattaaaaacaaagtgccttatcttgcactggagttcaagtgctcttttgttattcactgattgtacttgtggatggttgagcacaaaaaaccacctctacatttctcttaaaggtaggttggcaacgttctttttctaccacaggatactccttttcattttgtacagtatggaggtatctattccattggaactgaagggtctaggtagtttagttcctttctgatataaccctttttttttctttgtttttttttttaaaggacagagtctaatttgtgtccccgggtgggg

SEQ ID NO: 68635 - DNA, 462 bp, Homo sapiens
ccccctttgagaccatttgacagcgctgtggaattcgttgggaacacgcccacacgctggcgatgaaatgcatgagaccagaagatgtgtcagtgctatacatcactcaggcccaggaaatggagaagcagggcaagtaccgtgaggctgaaaggtgagccgtggccccagaggaggtgtagagggagatgagatttcaaggctgggacgagggatggggtctgaggatgtgtaccctctgcccagaaggcagtgatagcaggggtcgggtctaggaggccccagatgtatctccttccccaggctatatgtgacagtacaagagcctgatcttgccatcaccatgtacaaaaagcacaagttgtatgatgacatgatccgcctggtagggaagcaccatccagatctcctcagtgatacacacctacatctgggcaaggagctggaggctgaaggccgact

SEQ ID NO: 68636 - DNA, 844 bp, Homo sapiens
gcgcccagttgcccgggcaccaaatcggagcgcggcgtgcggtagggcccagagcaggactggaaatgtcctggccgcgcgcctcctgctcagatacctgttcccggccctcctgcttcacgggctgggagagggttctgccctccttcatccagacagcaggtctcatcctaggtccttagagaaaagtgcctggagggcttttaaggagtcacagtgccatcacatgctcaaacatctccacaatggtgcaaggatcacagtgcagatgccacctacaatcgagggccactgggtctccacaggctgtgaagtaaggtcaggcccagagttcatcacaaggtcctacagattctaccacaataacaccttcaaggcctaccaattttattatggcagcaaccggtgcacaaatcccacttatactctcatcatccggggcaagatccgcctccgccaggcctcctggatcatccgagggggcacggaagccgactaccagctgcacaacgtccaggtgatctgccacacagaggcggtggccgagaagctcggccagcaggtgaaccgcacatgcccgggcttcctcgcagacgggggtccctgggtgcaggacgtggcctatgacctctggcgagaggagaacggctgtgagtgcaccaaggccgtgaactttgccatgcatgaacttcagctcatccgggtggagaagcagtaccttcaccacaacctcgaccacctggtcgaggagctcttccttggtgacattcacactgatgccacccagaggatgttctaccggccctccagttaccagccccctctgcagaatgccaagtgtggg

SEQ ID NO: 68637 - DNA, 426 bp, Homo sapiens
ggggagactcttcatctttttcctaatcttagaggaaaactttcagttttttaatcatctgctataatgcgagctgggagtttatcatatgtgacctttattatgtagaggtaaattccttttacctctagttttttgagtttttatactgaaagactattacgttttgtcaaacgctttttctgcatcattaaaatgatcatgtgatttttattcttcattctgttaatgtaatgtttcacattaattgattcacatgtcatgccatccttgcaccccaaagatgaatcccatgatgtgtggtacatgatgtattgtcctagtcatgctgtatggtccttttaaagtactgtcgaatttgatgtgctagtagtctgttgaggatttttgttaatcaaggacatttgtgcctgtaattatcttttc

SEQ ID NO: 68638 - DNA, 1501 bp, Homo sapiens
  misc_feature (1)...(1501): n = a,t,c or g
atggatcagatctctgaaagcaaccacctaattcatcttagtagcactaataatgtaaaactcctatctgagatagagttccttgtgaaccacatggacttggccaaaggtcatataaaggcccttcaggaaggagatcttgcttcttccagaggcattgaggcctgcaccaatgctgctgatgcccttctgcagagcatgaatgtagctcttcgaccaggccatgacttgcttctggcagtcaaacagcaacagcagcgattcagtgatttgcgagagctttttgcccggagactggccagtcacctcaacaatgtttttgttcaacagggtcatgatcagagttcgactcttgcccaacactctgttgaactgactttacccaatcatcatccatttcatagagatttgctccgatatgccaagctgatggagtggctaaagagtacagattatggaaaatatgaaggactaacaaagaattacatggattatttatcccgactatatgaaagagaaatcaaagatttctttgaagttgcaaagatcaagatgactggcacaactaaagaaagcaagaagtttggtcttcatggaagttcggggaaattaactggatctacttctagtctaaataagctcagtgttcagagttcagggaatcgcagatctcagtcatcttccctgttggatatgggaaacatgtctgcctctgatctcgatgttgctgacaggaccaaatttgataagatctttgaacaggtactaagtgaactggagcccctatgtctggcagaacaggacttcataagtaaatttttcaaactacagcaacatcaaagtatgcctggaactatggctgaagcagaggacctggatggaggaacattatcacggcaacataattgtggcacaccactgcctgtttcatctgagaaagatatgatccgccaaatgatgattaaaatatttcgctgcattgagccagagctgaacaacctaattgcattaggagacaaaattgatagctttaactctctttatatgttagtcaaaatgagtcatcatgtgtggactgcaacaaaatgtggaccctgcttctttcctaagtactacattgggaaatgttttggtgactgtcaaaaggaactttgacaaatgcattagtaaccaaataaggcaaatggaagaagtaaagatctcaaaaaagagtaaagttggaattcttccatttgttgctgaatttgaagaatttgctggacttgcagaatcaatcttcaaaaatgctgagcgtccgtggagacctggataaagcatacaccaaacttatcagaggagtatttgttaatgtggagaaagtagcaaatgaaagcccagaagacccccagggatgtggttatgatggaaaactttcaccatatttttgcaactctttctcggattgaaaatctccatgtcctaggaagccaggaaaaaaaaggaagcccaaacaaaaatncac

SEQ ID NO: 68639 - DNA, 1927 bp, Homo sapiens
cacggcaagaaaataatacacgaggggtcccttcactgctgaagagcttcctccaggagcgactgggaatccacttaattcgaaggaagatagtaaagcctaagcatcatgttttgatgtctcggaaggaatcatggaaggtgaaaagcgaaatcccaaaggtgccgaagcagcctctggtgctccatcacccgcgcatgacgacaaccaagtctccctcaaaggatatgctagagccagaggcagagctggctgaagatctgcccactaccaaaagcacttctgtggagtcagagatgcccactgagaacctggaaggccattccccgtcttgccggaccttcgtgccactgcctcccatctgctccaactccactgtgcatagtgaagagaccctgtcccacctgagtgacacaactgtccgcctcagcccagagcgcccatcagatgaggactccaagagcacagagtccatcttcctgacccaggtgagtgaactgccttcctccgtcatccataaggatgatttagagttaaaggagaaagaccaaaagaaaccaccaacggcacccagagaggtgaaagggactcggaggaaactcccaactgccttccttcccagcaagtaccacggctatgaagaactgctgacagccaagcctgatccagccttcattgagccaaagggaatccagaagaatgcacaagccctgcaacaaatgctgaagcacccactcctgtgccactcctccaagcccaagctggacactcttcagaaaccctatgttcacaaagagaaacgggcccagagaatcccgattccacccccaaagaagactagagcccaacttctggatgacatcttcattcgcttgcgggatccccggaacattacagaggctccactaggtgctgtcctgcaccagtggacagaacggcggctggtgaaccacaagcagtacctggaggccaagaggctgttgaaggagttccaggcacgttaccggcagctggtgagtggctctctgcgcacagtgttcgggactaccccgctccccatggcctgcccagcgctgagtgagagccagcccaagttcggccacttcctcgagttcatggatgagttctgccaggagcccacagccagtgactcacaaggctagagctgtgcatgggggctgtgtgcaccacccggcctgtgccccagctctccccgagggctctgtgccctggaccgcacctcaaggttgaccagccggccacaggcctcagagctcagctgggccccacttgctggccacaaggtggcatccccttgtcaggatctcccctccttggcccaggcatgacctggtgcctggcccagcggcaataaagagtgggtgcacagggcaatagactgggtgccacatgcattctttcttggaacccaggccacagcagcattgtcacacttccctctaaaaatggttttccagttcagatgcaacagggatacatttgttctctgttgtatgagaaactgacaccaaggggatcttaacaaattcctgaacaatggctccaaaaaagggtatttttaaaaaccagatcttgtgagtacagccctaatgtgcagggacagtgtcatcctgtatattcgttctttactcagactctttcttggttccttcattaggagcatgaatggttgaatgtgaacatgacagtaaattggagcaaactgtaaactggacataacttatgccaaaagacgtagttgtacaccatggaaaccccatccctgctcctaatctctactgccattctgaatgccaaagcaagacatccaacatggggcatctcccagagcacatacagcaccaaaaatccacacacagcctaagcttaacccatgtttttgtcttgagattgttcaccagagaca

SEQ ID NO: 68640 - DNA, 1125 bp, Homo sapiens
aaacacacgcgtccgggccgctgcgtcctcatcggattccgacgcctgcggagctgagagcaatgaggccaattcgaagtggttggatgcgcactacgacccaatggccaatatccacaccttttctgcctgcctagctggtggtaggggaccttggccctggtgggcagcagccccgcctgaaggtgctcaaaggaccactggtgatgaccgaaagcccgctacctgctctgccagctgctgctgccaccttcctcatggagcaacatgagccccggaccccagctctggcacttgcttcaggcccttgtgtctatgtgtataagaatctcagaccctacttcaagttcagcctgccccaattgcctccaaatcctctggaacaagacctttggaaccaggccaaagaggaccgaatcgaccccttaaccctgaaggagatgctggagagcatccgggagacggcagaggagcctttgtccatccagtcactcaggtttctgcagctggagctaagtgaaatggaggcatttgtaaaccaacacaagtccaactccatcaagcggcagacagtcatcaccaccatgaccaccttgaagaagaacctggctgacgaggatgctgtgtcttgcctggtgctgggcaccgagaacaaggagctcctggtgcttgaccccgaggccttcaccattttagccaagatgagccttcccagcgtccccgtcttcctagaggtttctggccagtttgatgttgagttccggcttgccgcggcctgccgcaatggaaacatctatattctgagaagagactccaagcaccccaagtactgcatcgagctgagcgcccagcctgtgggacttatccgggtacacaaggtcctagtggtgggcagcacccaagacagcctgcatggcttcacccacaaggggaagaagctgtggacagtgcagatgcccgcagccatcctgaccatgaacctcctggagcagcattcccggggcctgcaggccgtcatggctgggctggccaatggagaggtccgcatttatcgtgacaaggccctgctcaatgtcatccacaccccggatgcagtgaccagcctttgctttggccggtacggcg

SEQ ID NO: 68641 - DNA, 654 bp, Homo sapiens
cggcccatgctgctggtgctgcgcaacatcaacaccgtgcgcgctatcaacgtggccctcggcgcccccgtggaccgctacttccttatggctaaaagggctgtccggggctggagccgcctggcgggcgccacgtatcggggtgtctacggcaccagcctcctgcgccacgccaaggtcgtctgggagatgctcaagtttgaagtggcgctcaggctggagaccttggccatgcggctgaccgccctcctggctcgtgctctggtccacctgagcctcgtgcccccagcggaggagctctaccagtacctggagacctagggtgcagccgcccagggccagcagggcccttttcaccttgggctgacggaggtggcggggctagaggtgtagacaccccgagccccgtgggcactcgcactggggggctgtgacagcagctgggccaggaggccgtgtaatgaccacacactcctctcaagcaaaaaaaaaaaaagggggggcccttttaagggaaccaattttaattaccgggggttggaaaggtaaaattttttttatggggccccaaaattaaattccggggccggggtttaaaaacgggggggggggaaaaacccgggggttccccaatttaaacccctttggaaaaaa

SEQ ID NO: 68642 - DNA, 1242 bp, Homo sapiens
ttgaggagttggaattttattccaagtgaggcaaaaaccatgcaaggcatagagcaggggaggccaaggccaggtgtgggtttaatcggggtctgtcggtggcagggcagctgcagggaggccgtgttggtgatgcctgggccagggcacagtggtaaagtttaacccaggctcccctgtctacccctgaaaaagactggaaaatgctgagtcccagccaagggtccagggtctaggagctgaggtcagagaggcccaggaggtgggggaggcaggcccagtgaggtggccctctcctggtcttgctggcttcggttttcccaggggagctcactgcaccctgagcggcattgtcccccattgccctgacccttgcccccacctccttggctggtggagccaggagcctgggaggcccctgtgcacacctggcagcttcacctccccaaacaggcccggagttcattcaaatccagcctctgggagcaggggccttgccactcggttatgtgagcctgctaaagccctccccgccatgtgcgcttgcaggcgggggcccagaaccaagttgggaggccactggctgtcctgtgggaccagagaagtctggtgccaccctagcagggccaagggacttcttctggacgtcagtctgtgcccagcctctaccaccagctttcccttccctgcagggaggggcatgacctgcagaaccaaaggtgcttctgcgagccagtagcccagtgctgcttgggggcaggggcggggcctgtgccttgggttcccccccctccctgggcacatttggggttggggcagcccacacggtggggtgggaagattgacctgcccattttacaaatgagcaaaggtgggagaactcagggagacatgggggagcagagggaggaagcagagcccaacagcccagggcacccggaccccagccactgcctgcctgtggatgggtttctggccacggtgcagggctactgcgaggaggaaatgagggtgatgtgggcacctgaaacagcagaaatggctcagggccaggcactggggagccactgtccccatggggcttgagcttctgcctcagagggaccttccggctgccattgagggtcccagcaccaaaccccacagctggaccacttgggacctcaatccacagggggccagggctgcggcctatggcagataaagatagaggaggagggctggatgaagccacaggtggtg

SEQ ID NO: 68643 - DNA, 976 bp, Homo sapiens
  misc_feature (1)...(976): n = a,t,c or g
gcttttgagagggggcttctgaagcccagagaacttcatgggccttggacgggctcagcagagaggtcggcctgaccaccctggaccagtatgggtgcctatcggtaaaggccagcttttccacccagcctgccactgtggggtggggcctgcctatacccctgccctcccagctgttctccttgcatccagaagcccctgcctgatgcctggtgagaaggccatggccaaggagggctcggccctgaggctgtgtgtggcctgtctccctcctctgcagggtttcagcagcctgaggctccggcccattcgcacgctgagctctgccgtggagcagctgaggggctgcagggtggtcggggtcatcgagaaggtgagtgagtggacactcgccttgcaggagggagacagtgtatgcaatttggggtggcggtggggagagagacatgatatgctgaaagcaggtctgtagcagtggcccccactcctccagaggaggtgggcaggggtcagtggggagtgcgagtgcagttgtttccagcagttcccacctctcccccatccctaacacgcatgactttggtcctgggtcctggggaggaaaatgcagggaacgggaagaggctgattnnnnnnnnnnnnnnnnnnnnnnnnnnnnnnnnnnnnnnnnnnnncaagcaccnnnnnnnnnnnnnnnnnnnnnnnnnnnnnnnnnnnnnnnnnnnnnnnnnnnnnnnnnnnnnnnnnnnnnnnnnngataagataacatatatcatgaaagacaataaaataaaatatataaagaagaggcagacaggccctttccacagccctgcagctcagatccagaaaacctgctccttgggagagttgggacagaaactgcgggaggagcgaggagctatgcccagggcaccctgccagtcctcgaggccctgctcaaacccacttaaccgcttcccacagcacctgtatt

SEQ ID NO: 68644 - DNA, 825 bp, Homo sapiens
ggaattccggggatggtgttactgggctgctcaggggctggtggtcaggtgaggggctccccaggtgggcctggagagtccaggcactcccttcctgcggatgtgggaaggacatggggtcctgggaggagctgctgggaaggggcatgagtcagggtgggggtggcgcagcagctgcggggctgtgactcacaggagtcgggccctggaagtccccgcgtcctctccaggggaccctgtgtgtgttctgcaggttggttcccaggacctgggggggacctccagccccgggaacctggccgtgctggggaggcgagtggctggtgcagccccccggttgctctgggtgcatcgggaggcttcagagcctgccccagagggggagaagcttcacttcccgggaagcatgggaggcctggaggaggtctttggcaggtcccctctcgggaaatcccctgtgagttgggagtgggaggaattcataagtggggggttagtgtgggccccggcgactagggctggcctgagccccatcctgttcttccagcaatgataccctcccaggccctgaccctcgctgagcttcaggggcccctgccacgtgccacagccactgggggcagaggtggcactccccactgatcctcccagggagggtctgtctgaggtaggggaagccccgggcagcagttctgatggcaggcagcctgagggatctgggcacagcgggcggctcaggtgtccccggctgccctcccagtagctgtgcaactacaaccagttttatgaaaaagctttataaaataagctttaagaaaaaaaaaa

SEQ ID NO: 68645 - DNA, 1338 bp, Homo sapiens
ttgggagtaaagagcccgctcgcagcctgcatcgccggggctcgggacataagtcatcggcggggaaatggggctctgtcactttaagtacagctggagccctgggatgaaagcagctccatcagtagtggactcagcgatgcctcagacaatctcagttcagaagaattcaatgccagctcctcactcaactccctcccaagtactcccactgcttctcgcaggaactcaacaatagtgctacgcacagactcagagaagcgctcactggcagaaagtgggctgagctggtttagtgaatcagaggagaaagcccctaaaaaactggagtacgacagtggtagcctgaagatggaacctgggacttctaagtggcggagggagcggcctgagagctgtgatgattcatccaagggtggagaactgaaaaagcccatcagcctgggccaccctggttccctgaagaagggcaagaccccacctgtggctgtaacttcccccatcactcacacagcccagagtgccctcaaagtcgcaggcaaacctgagggcaaagctacagacaagggtaagcttgcagtgaagaatactgggctccaacgctcctcctctgatgctggtcgggaccgcctgagtgatgctaagaagcccccctcgggcattgctcgcccctccacttcgggatcctttggctacaagaagcctcctcctgccacaggcacagccactgtcatgcaaactggtggttcagccactctcagcaagatccagaagtcctcaggcatccctgtcaagccagtaaatgggcgcaagactagcttagatgtttccaacagtgcagagccaggattcctggctcctggagcccgttctaacatccagtaccgcagcctgccccggccagccaagtcaagttctatgagcgtgaccggcgggcggggtggacctcgccctgtgagcagcagcattgaccccagtctcctcagcaccaagcagggaggccttacgccttccagactgaaggagcctaccaaggtagccagtgggcggaccactccagcccctgtcaatcagacagatcgggaaaaggagaaggccaaagccaaggcagtggccttggactcagacaacatctccttgaagagtattggctccccagaaagtactcccaagaaccaagcaagccaccccacagccaccaagctggcagagctgccaccaacccctctcagggccacagcgaagagctttgtcaaaccaccctcactagccaatcttgacaaggtcaactccaacagtctggatctaccatcatccagtgataccacccaatgtatt

SEQ ID NO: 68646 - DNA, 1714 bp, Homo sapiens
  misc_feature (1)...(1714): n = a,t,c or g
ttttttttttttcacagggtgtgttttcatttgcctttggcactaatgggtctctggaacgttccatcctggccggggaggtcagggcctgggcggccagggcccatttcgagaaagcaggttttcctttgtggcatgcttatttcaagcaccattttccctcctggttatacttgaaatggggctcggtgttgggaggtttcaaatgtggacattccgggcaaggagcctcattcatgaactctgtggacattcaaggggcctcatgaactctgtgggacattctggggcaagggcgcctcatgaactctgaaggttgagcttggaaggacggacacaggtcttggcagcctgagtgggtacaaacgctgatttttctggagtcagtcctctcctgctgatgggctgagagagccccccaggccctgtgtcccttctcagaggacctcagccccccagtgcctggaacacggatgggctgggggctggggcccagggcctcgcatcctacaagggcccaagggctgaaatggggctggggtccctggatctaggggatgagggcccagaacgaggctggggtctggggttcagtggagcaatgaccaggaatcaggctgcgatctgtagtccaggtgtctggcgtcagacaacaccctcctgtacacggcacagctatactgcagggttagggacaggatttactgccaccaacggaagcgttgattccaagtctcagacaccgcccccaggctgggcctccctcgacggaaggtgacgctctctgggaggtccttggtgctcacctccctggctgcttggggccccagggctcctgcctagggatgttttggggctgcagaaggaccctctgcccattatcagacgagaagtgcagagagcaaatgcgtgctgttggcgccccccacccccacactgagagtggagacggataggcccagccagaagcttggggacccgctcccagcctggagtgacggacgctgagcagcaggagcacagctgttcccgacacatccgtgatctgggcgtgcacctgtcactggggagagagcagtgctggtctccacgctttgggcatcgcctgctccctgaatcctttccacatgcgaacagcctgggcaggggtccccagcggtcagtagctactcccgccagcgcgggttcacggatcaggaggctcccagtgtgtcaggggagtgcgaggtgaagatggggagggctgggctggaaatgctcgtcctccgtggaggtcgggggcatcaggaggaccaggaggacgtctgggctgcaggcagacgtaagctgcagcagggccagctctggctacagaggcccagaaagcactgctcctgctgcctgcctccctccacaaggccagcgtctgcagggcaggagctgtgagggtggcccggctccatcctgtgtgggaaagtgcctggcacacagcaagtgcttaattaatacctggtgaccctcaagccatcccgacacctccctctctgaaagctccgtcccggcgtcctctcaggcctagtggctcacacccgcggaggacgaggtcattttcctggggacttcaaggtggaccagagatgactctggaaggggggtttgtgggcaccactctgcatggggntccgcaacgcngctcaatncncaaggntctcaatnnnnnnncnnnncntcgcct

SEQ ID NO: 68647 - DNA, 1524 bp, Homo sapiens
  misc_feature (1)...(1524): n = a,t,c or g
ccccacccttctgggcccaggattacacacagccacgcgagggagacagcctgccagcctgctcagagcagcaccctggcccccatggagggcagctgcccagaggtggccgtcagggcccagagcttccatctcacgtgtgcagagcccaggcctggccggactgggcaggagccctccagtgagcgtccccatgctggtcaaggggctgggctttggtcagggtcaccgtgggggaggggccgcacacaacccacccacgctcccacagagggagccacgcctaggtgcccactgcgcccaagtccacgaggcagtgggcgtgcagggccaactttaatacgggccggcctgtctgggggtcgaggtggccgctccctttgtccttgtggctttccacgggcaggggcggtcccagcgagatcgtctcataaccaaaccagccctgtgcacgagaagtcacgccatgccccacagcctccggtcctggctgctggtggctcggggacccgcagggcaggagggtcccgggtctcgcagttccatgagccccagccgcggggacccccatggacaaacttccggggctgcacctgccggagcagcgtctcccaagcatcggaggtcctttctcagcagggctgagccctagtggacagagccgtgagtggcaaggcgggagtcagggctctcggagtcgtcaattcagcaagaaagcccctggcccgccaccttcaaactggaggtgggtgtctagggtgcggaggcagaggcacagagaggttcagcacatgctggtctcctggggatccccccaccagcagggaagctgaggtgcgccgggaagccaggccaagggagggaccccttaacggaagcctgcaccagctaatgggagcagcgaggagcaagaggaagcgcggggaccccaaggtctggaggtgtcttcctcacagacgagcgcgagccacgcggggctgggactgcaggggaacagcaccagaggcgttgggcctgggcctcggccaccggnggagcccacaaccggcagaagctgggctcggtcgagagttaatccggactgagagcaggccagtggcgcctgagtgcgttcaggctcaaggtctccaggagacgctctggagtcctcctgcaatgcgcctgcgtggctgcagctctgctcagcaccgtgcgcactgggctccagggaacccggtcaggggctggccgtgacccaaactctctgtgggccacagtccctggggcatccccgtgagtcccacaagacgaggccacgttacgaagctgccaccagctccgcctgcctgggcctggccttgacagggacgttttctgtggaggaaacagagatgtttatgacacgccaaagacccacaggcagagacctccagagagggacgaggccacaggggtggcaagggccagttccggggacttcgcactatggaagggcacgcccagctctgggggaggcaagtgacaaacaggaagccaatggggctg

SEQ ID NO: 68648 - DNA, 489 bp, Homo sapiens
  misc_feature (1)...(489): n = a,t,c or g
cgcgcgcccccgnnataganncccatcgagacctctaggcagtgtggnggaattctaaaagtggaacactcggacgctacgcatgccatcggtgatgagggtcagcatgtagatctgactgcccttgagggagatgaccatcttgtcatgggagatgaaggtggcctgggcgcagtccagggtgattcacacacccagctgggtgcacagcgggaaagctgcggtgcctgtggtgaggctgctgagagccacaccgtacgggggaatgctctggttcaggtataacagcgagctgacgacaaagaccaccaccccacctatgggcttgggtacggccagagcctgggtgcagtcaaagggtagctggtgagagatcagatgacggggtgcaccttctgcgtgatgttagcaagatggccacgatggagcacgtgtcctgccacacagccacgtgcccgggccaggtctggttgggctcgaacaggatgg

SEQ ID NO: 68649 - DNA, 777 bp, Homo sapiens
agggtacagagggcaaggggagctaacggtgctcaagcccacaccctacatcctcacatcaaccccctgaaggagtgtccagcacagtccacagcctccctgggcgattctgggttcctggctgggccacccagagccaggactgggctccaggtgcagccaaggtgctgtccctgcctcgatgtcccccattatcttccccagactacaacacggtgcagactgtgggcatgactctggcaaccatcttgttcctgctgggtatcctcatcgtcatcagcaagaaggtgaagtgcaggaaggcggactccagcccaacctgcaaatcctgtaagtctgagcttccctcttcagcccctggtggcggcggcgtgtaacaccttcccgaggaaactccgctgccgaccctgcctgagcgcgggagcctgaggaccgggtggaggcggtggggacccagccgcgcgccgggagcgctccccggaatgagccgccccacccaccccaaggctggagccgctgcaccctgctgtccctctccaggccttggcaatgacgatcccccaaagagcccgtctgcaccccagacccagggcctcaggcctccagctcctgggatccgggagtccatcccggcccagcacccccagcatccccgtgtatggcccccctgcacctccttgtctcatccccgaagatccgtccccctggcccctcagtgtccatgtcttgagcttaataaatgtgcatttggttttttcctttgaaaaaaaaaaaaaa

SEQ ID NO: 68650 - DNA, 419 bp, Homo sapiens
gcaattcgtggcctgcagagagccggcactatctctactgctgctgctgctgctactgctgctgttgctaccgctgcctctgctgccaccgccactactgctgccagcggagccgctaggagtgagcatcccctctccgggatacccagctccgcggcgtctcccgcgcgccctggccccacacggacctgccagccccagggaacaaaagcggagcccgctcgccctctactgcagccggaggatgagtcgagagggctgagcggagagtgtggtcctcggcggctggagctatttccttggcttctctccatgacgattcctgactcgtggccccggcaatcttgggaagacatcatccagcttcttcagtccagaccctgggcaccccccttttggcaggatcgtccccacccagg

SEQ ID NO: 68651 - DNA, 478 bp, Homo sapiens
  misc_feature (1)...(478): n = a,t,c or g
tcctgaaacatttcttcaaagaattacagagaattgtaatggagatgaaatatggctttaccagtgtgatcctaaagacaaagcagagtgaaagtgatgcctaccaagaaacggagtggctccagtcaaagcaaaagcagaccagtcaagagcaaaggtcatagcaacagtttttttttgaatgctcagggcattttgcttgctgactttctttaggaccaaagaatgaaaacatctgcttattacaagagtgttttgagaaagttagctaagatgtagcagagtaactcctgggaaagcttccccagagattcctccaccataatacttctactccttcctctcatcagacgagggcaatttttcgagagtttcaatgggaaatggttaggtatccaccttacagtcctgattgggccccttctgacttctttttattttatgagacagncttgctctggtgcccgggctggagagc

SEQ ID NO: 68652 - DNA, 1218 bp, Homo sapiens
gggatcaatggagcccaggacttttgaggccagcctgggcaacatagcaagatcccatctctacaaaagaatagaaaaattagccccaggagtatagctcaggggtagagcatttgactgcaaaaattagccaggcgtggagatgtgtgcctctagccccagctactcatgaggctgaggcaggaggactgtttgagcctgggaggtggaggctgcagtgaactgtgattgcagtccagcctggatgacacattgagaccctgtctctaaaaaagaaggaagcccagcgttcccttctctctccacttcctgtccccattgctgtccctggagtacgggcagcacaggtgaaggcgagggggacagacagacagcctgcccctccgtctcccgtggccctgcagcccaccctatctgctccaggttctgaagaaggccttccaggccacgctcaggtggctcctgagctcacccaagacccccggctgctctgatctcggccccctcatcccgcagttcctcagagagctgttccctgtgctgcagaaacgcctgtgccacccctgctgggaggtgagggactccgccctcgagttcctgacccagctgagcaggcactggggaggacaggctgacttcagatgcgcactcttggcttcagaggtgcctcagctggccctgcagctcctccaggaccctgagagttatgtccgagcgagtgcagtgaccgccatggggcagctgtccagccagggcctgcacgcccccaccagccctgagcatgcagaggcccggcagagcctgttcctggagctcctgcacatcctctccgtagactcggagggcttcccacggcgggcggtcatgcaagtcttcactgagtggctgcgggacggccacgccgacgcggcccaggacacggagcagttcgtggccactgtgctgcaggcggcgagccgggacctggactgggaggtccgcgcccagggcctggagctggccctcgtgttcctgggccagactttggggccgccgcgtacccactgcccctatgccgtggccctacccgaggtggccccagcccagccactcaccgaggcactgagggctctctgccacgtggggctctttgacttcgccttttgtgccttgtttgactgcgaccgccctgtggcgcaaaagtctgtgacctgcttctctcctgagggacaagattgt

SEQ ID NO: 68653 - DNA, 1087 bp, Homo sapiens
  misc_feature (1)...(1087): n = a,t,c or g
tttttttttagcaatatatatatataatttatttacattcacgcccgataaaacccctatgtgccccggcggccggcaaaggctgtgtacataaggccaagagtaagtgcgtgaatgcacttaagacaaagtcaaggacacgagcttcacatgacaggccccgcgtgggcgacccagccagaccctggggacgggcacgccacgccacacacacactcaccactgtacagcctgggactcccattgcatattcacaggccccgccgggcagggcacctcaaggctgggggaggggcaggggcagggaggagccgtggggtgtccctgggtgggtggagagggcagcatgtgagaggcaaatgtgcaccaacactgggcgtgagacgtgagcagcctcaggtgtacggcatgagatgtgtgtggttggggggtgtctgcgtgacccgggaggggggtgtgtgtgagatgagcacacgaggcatgcgtggcacgtgctcgtgtggtggtcgtgtgcctgaatccaggggctaccccctgtccggctgtggccctcggtcctgcaggcttggagcagggcccctcagacgtgcccctacccagcaggcacagaaatgtttgcataaggtccagctcaggcaggagctctggggccctggcccaggcccagtgtgtgcgtgcatggccgtgtgtatgcggggcccctggagagggacgggaggagaggtagcatcacacgcacatacacatacacagatgggctgggcctggcccaggctccaggcactgtccctcctgggccctggggccgagtgtgagtggcagtgccagcctggctaggcaggccatggagaggtgggagttcgggcagggtctgaaggaccagcattaagggacagcttcggccgggagggggcctgtccgagcagctctccccggtgtggggaagggcccctgtccggcttctgcctgtccttggtgggtgccaaagctggtgagagtgtaggtgtcgggcctggccggcctcagcgctcagtgacttcnccnctcggcctagggtctacgattctcaattnnnnngggcgggggg

SEQ ID NO: 68654 - DNA, 1243 bp, Homo sapiens
  misc_feature (1)...(1243): n = a,t,c or g
agcggccgcccggggccccgccccccaggaaagcctccagctcatcggcagccgtcctctccctgctgcgcgggggccgctgctgccgccgtcgccgctcctccttgccctcctccttgtccttgctcttcttgtgtttgctcttcttcttggcagctttttcttcttcctctttgccttttttcttcttcttcttattctccttagagggggttttgccctccttaccttcctcactgctctccttgggtccggcctcctccagccccagcccgaagaggtccgagtcattcttcagtctgaaggcgggaagagggagcttggggggtgggggcggctcggcagggccctcatcctcgtcagtcacatcggaggggtcatctcgcacgggaaagtcatccgccctgcgctgtgtgtctgatccctcgctctcaaagtcggggtcatccatgacgaaggacagcatttgtgcagcaatgggtccctcggggtcactctccgacgaggaggcctgctcacccttccccggctccatctcagcagggggcctggtgctgctgcgcttctccggacctgtgcgaacagagacaccgcctggccaggggggtgctgcggtcctcgtgggagctgtccccctccgtggcttcgaagctggtatggaggaccacttggtctctggctctgagcactgctggggagctggggcagggccttttgtgggagctgccacttctgcttcctcctcactcgaaagagtgatgtcttgactggggacggggcctgcaggcagcgggggactcccacgtggctggtcttcgaggtccacatcgtcctggaaccctgccaccatcgggttgccgcccagggcctccccatcactgtcgctgtcctgctgggcagccttggcccccaccttcttctcgtccctggcgggggttgtgtcttccaggaagctgcggtccaggcggtcgtcaggaacaaagtcctccacactctggaccgttgctgggccctgtgcggccgggactggctctggaggtggaggggctgcctcggtggcaggtgacgtcccaaacagcctagagatgatgctgcgccgtggggcgggggctgaggggcacgcaggtggggacagggcctctgagggtggtacagggggcacagaggatggtggggcagcgaattccnccgcnctgggctatggtctcgagggtttcaatnnnnngnnntcttctcgaacgcc

SEQ ID NO: 68655 - DNA, 1090 bp, Homo sapiens
gcggccgcggaggaggtgcggccccaaggggaggaggtgcccgctcaccgcagaccgcccgcggcagaggccgccccggtcgcgccgcggcgggagcggccggtggaggctgcgcggccgagggggagggccgggggagcggacgtcgcctctgctggtctcccacctcccgccgccccccgcccgcaggctcccaagccttagtcggcgccgagcatcccgctgccccggaccctcccgcgggcgcgcaccaggctcaactcaggctcaggactgcaggtagacatctccactgcccaggaatcactgagcgtgcagacagcacagcctcctctgaaggccggccataccagagtcctgcctcggcatgggcctcaccattgaggcagctccactgtctgtgctggtctgagggtgctgcctgtcatgggggcagccatctcccagggggccctcatcgccatcgtctgcaacggtctcgtgggcttcttgctgctgctgctctgggtcatcctctgctgggcctgccattctcgctctgccgacgttgactctctctctgaatccagtcccaactccagccctggcccctgtcctgagaaggccccaccaccccagaagcccagccatgaaggcagctacctgctgcagccctgaaggcccctggcctagcctggagcccaggacctaagtccacctcacctagagcctggaattaggatcccagagttcagccagcctggggtccagaactcaagagtccgcctgcttggagctggacccagcggcccagagtctagccagcttggctccaataggagctcagtggccctaaggagatgggcctggggtgggggcttatgagttggtgctagagccagggccatctggactatgctccatcccaagggccaagggtcaggggccgggtccactctttccctaggctgagcacctctaggccctctaggttggggaagcaaactggaacccatggcaataataggagggtgtccaggctgggcccctcccctggtcctcccagtgtttgctggataataaatggaactatggctctagaaaaaaaaaa

SEQ ID NO: 68656 - DNA, 1041 bp, Homo sapiens
  misc_feature (1)...(1041): n = a,t,c or g
ttttttttttttttctgtagtacgcgttttatttagaacgccatcctttggcgagtaggggggtatgttggaggcgttttgcagcgcctcctgcctgggagccaggcgatccgccaggttctgggaggacctaaggtcaacagccacgcctgctctctgggctcacagtcagcagccgctaccaggagagcaagtcctcagaaggcccgagaccagggcccgggagcgcccacaaggacgggaggtcacccagtgacaaacagggaagggcagcaggtgcgcccaggaacccagaggctcccagagcagaagtgggatgcaggggtgggggcgggtcatgctgaggttcaacagggacctgcttcctggttcaacagggagctggccagagagagggatctgctgaggcttctgtttaaaaaccctggcctgggtgtgggtgcaagtggatttgcaggtgcagtgaggcagcggccggagcaggctgttgcacgaagacccaggaaagtcagggtggtttgatccaggcagaagagggggaaatggagcctggggcagacgtaaaggtgctggggtgaggataagggtgacaggagggaggagtctggggtgaccaaggcctgcagctcaggtgactgggaaaaaacataaaacagaacacagatgaatgcaggggtcgggacgaaggctcctgtgagtctgaagtgactgtgagtggcaccctctggccagccacagtggctctcacagctcattctgcagagcaccggcccagtgatgagccgaggaagtgcccctggaggtcagctggatctgcccagtggtctgcacagggggcggctgccaggggcctgagcacagggaaaccctcgaaactgtgggagggatgaagccagagaggtagaccccagaaccgaccaagcccagcatggggcgtggagggcggccaagctcaagaagaccatgagattgggaattccgccnctctgaganggntatcaatnnnnnggnagggggtcgaagggggggggggctggggcg

SEQ ID NO: 68657 - DNA, 671 bp, Homo sapiens
gcagttttgcagtcatttatatctactttaaacacatgcagattaaggggtgatttgtgcaaaaatttctagggaatgggtaataacttttgggtcatcgagtcaatgccatggaagagaggggggataaccccctggtgttgcgatggcaacggtaaactgacatggcaactgatgagcgtgtcttacggaaagctcattccaccccagccctgtttcagctagtcctcaatttggtccagtgtccgagccctgcctctggagtcaagtcccacctcctacctcataaagagagacataaatcaatggaatagaatcgagagtccagaaataaactcatacctcgatgatcaattgattttcaacaacggtgccaagaccattcagtgggggaaagaatcatattttcaacaaatggtgccagataacgacatccaaaggagtgcaactgggcccctgtctcacaccatctacagaaattaagtcaaagtgcctcaaacactaagagctaagactataacattcttagaagaatacagggttacctctttatgatcttgatttggtaattgatttttagataacactaaaagcacaagcaacaataggaaaaaaaaaaagtaaatttaacctcatcaaaatttaaaatttttaggctgggtgcaggggct

SEQ ID NO: 68658 - DNA, 1771 bp, Homo sapiens
cttgggccgagggacgtttgggcaagtggtttagtgctggaaacggggcaccaatgagatcgtagccatcaagatcctgaagaaccacccatcctatgcccgacaaggtcagattgaagtgagcatcctggcccggttgagcacggagagtgccgatgactataacttcgtccgggcctacgaatgcttccagcacaagaaccacacgtgcttggtcttcgagatgttggagcagaacctctatgactttctgaagcaaaacaagtttagccccttgcccctcaaatacattcgcccagttctccagcaggtagccacagccctgatgaaactcaaaagcctaggtcttatccacgctgacctcaaaccagaaaacatcatgctggtggatccatctagacaaccatacagagtcaaggtcatcgactttggttcagccagccacgtctccaaggctgtgtgctccacctacttgcagtccagatattacagggcccctgagatcatccttggtttaccattttgtgaggcaattgacatgtggtccctgggctgtgttattgcagaattgttcctgggttggccgttatatccaggagcttctgagtatgatcagattcgtatatttcacaaacacagggtttgcctgctgaatatttattaagcgccgggacaaagacaactaggtttttcaaccgtgacacggactcaccatatcctttgtggagactgaagacaccagatgaccatgaagcagagacagggattaagtcaaaagaagcaagaaagtacattttcaactgtttagatgatatggcccaggtgaacatgacgacagatttggaagggagcgacatgttggtagaaaaggctgtccggcgggagttcattgacctgttgaagaagatgctgtccattgattctgtcaagagattctctccagtcggatccctgaaccatccctttgtcaccatgtcactctttctcgattttccccacagcacacacgtcaaatcatgtttccagaacatggagatctgcaagcgtcgggtgaatatgtatgacacggtgaaccagagcaaaacccctttcatcacgcacgtggcccccagcacgtccaccaacctgaccatgacctttaacaaccagctgaccactgtccacaaccagccctcagcggcatccatggctgcagtggcccagcggagcatgcccctgcagacaggaacagcccagatttgtgcccggcctgacccgttccagcaagctctcatcgtgtgtccccccggcttccaaggcttgcaggcctctccctctaagcacgctggctactcggtgcgaatggaaaatgcagttcccatcgtcactcaagccccaggagctcagcctcttcagatccaaccaggtctgcttgcccagcaggcttggccaagtgggacccagcagatcctgcttcccccagcatggcagcaactgactggagtggccacccacacatcagtgcagcatgccgccgtgattcccgagaccatggcaggcacccagcagctggcggactggagaaatacgcatgctcacggaagccattataatcccatcatgcagcagcctgcactattgaccggtcatgtgacccttccagcagcacagcccttaaatgtgggtgtggcccacgtgatgcggcagcagccaaccagcaccacctcctcccggaagagtaagcagcacctgtattgcggccgcgctagagtatccaagattgcgtctcgct

SEQ ID NO: 68659 - DNA, 391 bp, Homo sapiens
cgtaatcagacttatctatttttgcttttgtggttttgtgcttttggtgtcatatccaagaaatcattgccaaagccaatgtcaagaagctttttccctgttttcttctaagagttttgtagtttaaggacttacattgaaatctttaattcatattgagttgatttttatatacagtgtgagataagcgtccaatttcattcctctgcatgtggatatctagttttcccaataccatttatttgaagagattatcttttcttcactgtgtgttcttggcataattgtcaaaactcacttgtcctcatgtgtgggtttattactaggttctgtcttctgttccaatagtttatatgtctggttttatactggtaccatactgttttgaatg

SEQ ID NO: 68660 - DNA, 590 bp, Homo sapiens
aaaaatcttacaaaagtgaagaatgtggcaaagcctttatccaggcctcaactcctagtaaacataattaatgatggagagaaaccatacaactgtgaagaatgtggcaaagcttttaaccaggcctcaaactttattgaacaaaataattcatacaggagagaaaccctacaaatgtgaagaatgtgacaaagcctttaaccagtcctcaatttttactaaacataagaaaattcatactggagagaaaccctatgattgtgaaaaatatggcaaaggctttaactagtcctcagttcttaacacacatacgataattcttactgcagagaaactctacaaaccagtaagatgtgacagtgcttctgacaacatctcaaacttttctaatcataaaagaaatcatattggtgagaaatcctagaaatgtggagaatgtaacaaagtatttaaatggttgtcacacttgattataggtaatattcatattggaaaaatttcctacaagtaagaacaatgtggcaaagtttttaactaatacaccttattgcacagaaaatcatttatatttgagaaaaattgtagaaata

SEQ ID NO: 68661 - DNA, 916 bp, Homo sapiens
tgctctgccagcccgctgaggccaggcctactggcccccgacctgctgtacctgccaggtgctggccagccccgcaggccggaggcagaaccaggccagaagcccgtggtgcccacactgtatgtgacggaggccgaggcccactctccagctctgcccggactctcggggccccagcccaagtgggtggaggtggaggagaccattgaagtccgggtgaagaagatgggcccgcagggtgtgtctcccaccacagaggtgcccaggagctcatcggggcatctcttcacactgcccggtgcgacccccggaggggaccccaattccaacaactccaacaacaagctgctggcccaggaggcctgggcccagggcacagccatggtcggcgtcagagagccccttgtcttccgcgtggatgccagaggcagtgtggactgggctgcttctggcatgggcagcctggaggaggagggcaccatggaggaggcgggagaggaagagggggaagacggagacgcctttgtgacggaggagtcccaggacacacacagccttggggatcgtgaccccaagatcctcacgcacaacggccgcatgctgacactggctgacctggaagattacgtgcctggggaaggggagaccttccactgtggtggccctgggcctggcgcccctgatgaccctccctgcgaggtctcggtgatccagagagagatcggggagcccacggtggggcagcctgtgctgctcagcgtggggcatgcactgggtccccgaggccctctcggcctctttaggcctgagccccatggggcgtccaccaccgggaccccaggtccgtagccttgagggcacctccttcctcttgcgggaggccccggctcggcctgtgggcagtgctccctggacg

SEQ ID NO: 68662 - DNA, 781 bp, Homo sapiens
tttttttgagcaactgatggctttatttacccaattgcaaacagcagtcaggagtagaatgcatcctttttacatcactcacattagggctcatacacctcttccaggacctttaactgaagggaatcaaatggctgaccgcctaattgctaatgcaatctcaaatgctagacactttcacaatttaacccatgtgaatgcctctggtctcaaacgcagatgcagtattacctggaaagaagctaaagctattatccagcgatgcccaacttgccaaatggcccattcttcatcttttacaggaggagttaatcctcgaggattggaacctaactctgtttggcaaatggatgtcacacatcttccctcgtttgggagactagcttatgtacatgtatgtgtggacaccttttctcactttgggctacaggccaatcaggagagccttctgcctgtgttaaatgtcacctcttgcagtgttttgcagtgatgggcattccagcttctattaaaacagataatgccccaggctatcctagccaaactctagctacatttttctctttgtggaatattaaacacattactggtatcccatacaattctcaaggacaagccatagtggaaagaatgaatctttccctaaaacagcagttgcaaaagcagaaagggggagacagagtatatggaaccccatagatgcaactgaatctagcattattaactttaaattttctgagcctgcctaaaggccagatgctatcagcagctgaacaatatc

SEQ ID NO: 68663 - DNA, 665 bp, Homo sapiens
tggggcagaggctgcggagccccaggaggatctgcctccgctttcacagtcctccagatttttccaagagcagcagaaaatgaataaatccctggggccagtgtcattcaaggacgtggctgtggacttcacccaggaggaatggcagcagctggatcctgagcagaagataacttacagggatgtgatgctggagaactacagcaatctagtttctgtggggtatcacattatcaaaccggatgttatcagcaagttggagcaaggagaagagccatggatagtagaaggagaattcctacttcagagctatccagatgaagtctggcaaactgatgacctaatagagagaatccaggaagaggaaaataaaccttcaaggcaaactgtgttcattgagaccctgatatgaagagacgaggtaatgttcctggtaacacttttgatgtagaaacgaaccctgttccttcaagaaaaatagcctatacacatagcctctgtaactcatgtgaaagagtgatttaacgcctcttcagaatatattagtagtgatggacgctatgcaagaatgaaagctgatgaatgtagtggatgtgggaaatcactcctccatattaagcttgagaaaactcatccaggagatcaagcttatgaatttaatcaaa

SEQ ID NO: 68664 - DNA, 769 bp, Homo sapiens
ttttttttttttgggaacggccctggcagtgcaggggaagttcacagagccatttattgagccccacaaccgaccagagggaagggcgtccaccaggctcaggccatggtccttgaggggccggcgctctctacttggcccacatgtgtcctgaggagttgtggcatgcccgctgccctggtcagagctggccgccatcttccagctgcatctgccgggccagcgtctgcccgatggccaccagggggctggctctgtaggccggactggccagcagctcctgaaaccgggtcctttcttcctcgagaagctgctgtctctgggctgcgctcatccggctgagctctgagggccggggcttgttgctctccctgctgcgggcttggcgccggctgccagcctcgagccccagcagctcgggcagggcatccctgagagggtgcaggtcccccaccaccaccgtggccctccgcctccgctcctccctgtgcttctgctcagccagttttatggcttcgattttctgcaaccattgctcacgcctcagcttcattttctccttcttgggcaaaacggtcttggcctctgcacctctcctgacggaagtgacactcctcacgtccagctccagcttctgcaccaaggcgctggggtctatcttggtcctggcaaagatgttggtgttgatgaacgcccagtccttccccgcggccgaggccggcggaagggtcgcctccggggcagggggcgcggggccgggggcggccgc

SEQ ID NO: 68665 - DNA, 669 bp, Homo sapiens
ttatgacgtatgtacgactggcgcagagcgacgaggtgacaggagaatccgtaccctactgcaccccctcattattattgtgaagaaaaagagtggcctgaccctccagatctttcttttccagaggacagtgggcaaaaattagttgccccagtgactgttcaagcagcacctcgagcgactgctcttagttctattcagtcaggaattcagcaagctagatgagaaggtgattaagaggcttggcagttccctgttagaatacaccccccagatcaacagggaaatattatagctacatttgagccttttccttgtaaattactcaaagaatttaaacaagctattcatactaaaaaagaatgtagaaataatcagcaagtcagctgccagataggggaaaaaagaaaactgctgagtctgaaatatgtccaacatgtaaaaaaggaaaacactgggctaatcagtgtcactctaagtttgataaagaagggaacctgatttcaggaaatgccatgaggggcctgtcctgggccccattccaaactggggcatttccagctcaggccattccctcacacccgtacaatgtctgtcccccgccacagccggtagtgccgcagtagatttatgctgcacaaaagctgaggaattcctgcgcactgcgct

SEQ ID NO: 68666 - DNA, 604 bp, Homo sapiens
  misc_feature (1)...(604): n = a,t,c or g
ccagcttaatcgccataagaacattcacacaggtgagaaggcatcttgaatgtaaggaatgtggaaagtcctttaatcgtgtctcaaaccatgttcaacatcagagtattcgtgctggtgtaaaaccatgtgaatgtaaggggtgtgggaaaggcttcatttgtggttcaaacgttattcagcatcagaaaattcattccagtgagaaactctttgtatgcaaggagtggaggacgacctttagatatcattaccacttatttaacattaccaaattcacactggtaaaaaaccctttgaatgtaaagaatgtggaaaggccttcagttttctgacacagcttgctggacttcaggtcattcatactggcgagaagccatttgaatttgagaaatgtgggaaggccttcaatagtggctcaaaccttgttcaacatcagagtattcatactggtgagaaactctatgaatgtaaggagtgtgggaaaactttcagatttagtttggtcctgactgcacatcaaagaattcatactggtatgaaaccctgtgaatgtacagaatgtgggaagacctttagttgtagctcanacattggttcacat

SEQ ID NO: 68667 - DNA, 1223 bp, Homo sapiens
tatgccattgattgaataccttttgatcttactgtgcatactaactttcttgatgtaaatatttagtgcgatataaatatttagtgcgtgatttccatagcagatgacaagtttatattgattataacatggtctcggttgatatttttctgacaagtaagtttagatcatgtttggattttgtttcctattacctagagccaacacagatctatagatttctttgaactcggaatctcatagcagtaagtagtcaacaaaattcatcaatattatttctctcttataactgcatctgtattcaattttaacatttttaaaactctttttgtagccaatatttttgcacagaactcttacttacatgtctcatcgaaactccagaacaaacatcaaaagatacttgaatacctaccaagtagaaggcactatgccagcactgcatagctttccttgaagaagagcaattactgcccttcaggagtgtataatctagtaggagaaataaaatatttacatgagttttacatgtaggaaactgaatgaaaagaaaacatttaaagttgatgatatgttatcaaaagtagagaaaatgaaaggagagccagaatctcagagcttgtcagctcatttgcagcttacatttttggtttcttccacaaaaatgataagccatcaccaaactcagaaaatgaacaaaattctgttaccctggaagtcctgcttgtgaaagtttgccacaaaaaaagaaaggatgtatgttgtccaataaggcaagttcccacaggtaaaaagcaggtgcctttgaatcctgacctcaatcaaacaaaacctggaaatttcccgtcccttgcagtttccagtaatgaatttgaacctagtaacagccacatggggaagtcttactcgttgctatttagagtgactcgtccaagaagaagagagtttaatggaatgattaatggagaaaccatgaaaatattgatgtcagtgaagagcttccagccagaagaaaatgaaatcgtgaggatggggaaaagacatttgttgcacaaatgacagtatttgataaaaacaggtaatgttgatgaacaagcgaggctcccacaatgttctggaaatgttttcattctgaagcagaatataattatttatattgattatttcattgcctttgtgttctttttattcttacggatgaaaaaacaaatttgcaaacactg

SEQ ID NO: 68668 - DNA, 714 bp, Homo sapiens
gattgtaaaattttgagacccctctttgagaccactagtacagtgcggtggaattcgcttttaatgggtgctccagccttactcgacataagagaattcacactagagagaatacctacaaatgtgaagaatgtggcaaaggctttactttattttcaacccttactaaccataaagtaattcatactggagagaaatcctacaaatgtgatgaatgtggcaatgtttttaactggcctgcaactcttgctaatcataagagaattcatgctagagagaaaccctacaaatgtgaagaatgtggcaaagcttttaaccggtcctcacaccttactagacataagaaaattcatactggtgagaaactctacaaacctgaaaaatgcgacaataattttgataacacctaaaacttttctaaacataaaagacaccatcctgttgagaaaccctaaaaatgtgaagaatttgacaaagccttccaatgattgttacacttgcttgtaggtaagataatttatattggagaaaactttataagtgtaaagaatgtgacaaaacttaaccaatactcacatcttattgcacaggaaagcatttttacttgagaaagattgtacaagtataaagaatgtgaaaaagtcattgatatcttttcacatcttactcaacaccagagtttatacttattaaaagcattataaatgcaaaaaa

SEQ ID NO: 68669 - DNA, 1808 bp, Homo sapiens
  misc_feature (1)...(1808): n = a,t,c or g
tacgctctcttctttgagtgactttaagaactcttgattctcattttcaagaggtctagctatctcctggtcaagagacttacagtggttctagatctactttttctgggggtcttaatgtcatctgatcctgttcccctagagacctccgtcgctgttgagtctctttttcaagagttctcaaatgtctcttgggtcctgttcttctaaagacctcagtgatttgtgattctctgtttctagaggtctcacaatactctggtcctcttcttctagagtcttcagtggctcctggttctctttttctagagatctaaaggcctctttgttctcatcttcaagagacctcaggggttcctgattctcctttgtcagaggtctcagtgcctcctcatcccctacttctggagatctcagtggctcttgattctccttttccagagctgtcaatgactctaagttctcttgcagagaacttactaattcttgattttccgttcctggaaataaaaatgtctctagattaccttcaagagatttcattagttcttgattctccttttgcagggattgcaatgtctgtgtgtcctcttttcctgtaggcttaagttggcctacagcctctttttctagaggtctcactacctccacatcctttaatagctctttattttccttttctagactttttagtgtttctaagtcttcttctaaagacctcggacattcttgattctccctttctagtgtctcatggctctggttttccagagtcttcagtgactcttgaatctcctctcccagagacttcagggtttctttttccaaaggaacctgggagtcctggatttccttcctgtttagatcctcttcttcccatatttcctgctgcaagctgcttaccactttgccctctatggctgtttctttctctaccaacccccagatttgcccttcaccttcccctcggcatatgctgaacactctagacccaccggattctccatccttagcctctaaactggagtggtcagggctgaggggtggtgccaaggaggcatggtcctctggggactggcctgtactggcctcttgccgctggcccccaggctcctctggtccaggcaggacgctggcaggaatggccaccctggcttcagcccgcaggggctctggagcctgtttcctcccaccctgtgtctggagcagagagagaggagcatcctgggctctgatctctgcatctacagcaggagagggtgcctgaggtgtgggggggatgggggtgctggccaaggtaggggtacgggcctggaggaattcttggttcttaagaaaggctggcacaggtgtctcaagggtagcaggcaagggtgaggggagggaagttgggctcaggactgggagcaaagatccaagacgccggccctctggggtcctagggaattgcagctccagcttggggtcctgaaagctgagggaagtcttggagccaccgccaggtgtttgcagccgggagttctcagcctccaggagggtcctgtacgtggccacctccaggctgagggacatcttgaggtgcgccagctgctgccgaccttccaggacctgagcgatctggctctgtaggccctgtttctcctgctccagggcctccacagccagctggaacttttcagtagcccgcagccgctcctaccagcggccctccaacctctgttccaccgntgccntgcgctccaggaggcctgcggntttccacgcctactataaggtctcgatngggcgnnctnnnnnnnnntncccct

SEQ ID NO: 68670 - DNA, 803 bp, Homo sapiens
gcggcggaattcccgaaacctaggtgtccacccaggttctggtgtcgacctggggtcttatgtccacctggtgactagatatctacctggggcttgatgtccacctggagcccgatgtccacctcagagctgggtgtccacccaagttctggtatccacccggagcctggtgttcatctggggcccagtgcccacctggaacctgggtatcaccatggggcctgggtgtccacttggaacgtgatgtgcacctgggacctgagtttccacctagggcctgatgaccaccggagacccaggtgtccacctggggtctgatgtctacctgaagcctaggtaaccacctgtgccttggtgttacctgtgccttgatttccacctgagcctgatgtacacctggggcctgggtgtccatctgaggcctgatgtacacctcaagtccagtgtccacttgtggcctgatgtcaacttggaagctgatatccacctggggactgatgttttcctggggtctgatatccaactgggatcatatgttcacctattgcctggagttaatctgtggcctgatggtcaccagggacccaggtgtccacctagggcctagtgaccaactagggcctgatgtccacctggagtctagtatccgccttggccctgatgctacttgaggcctgggtgtcttcctagaacctgagtccccaactgggccctgatgtccacctgaggcctggtgtccttgtagggcctgatatctacctaaggcctgggtatcctcctgcagcctgatgctcacctgtagg

SEQ ID NO: 68671 - DNA, 2152 bp, Homo sapiens
gtgtattgcaggttcagccgtagtgtcttcccagtctaggagttgtgtgtcttttgattcgtcgttaagttccttctgtcatggtgtccagttaggcctaaattttaatgatctttgataggaagaatgctgtaaattattcatttgtgacccaagtgacattcccacttttcatatgataagtaaatttactggtggcactgacagtaggtacttctatcaaccaattttggattgtaggcattaagcatcctggtgcttttcccaggcaaataggaggataatgatacccaatggaaatgtttatcatcattccttcttcttcaggttgggcagggccacggtcatctgtggggcctggtacccattcactgttattaacatatacttcaataggattatctatccaagtgactgcccgaattaagggtgggaaaatcacataggcccagtaagtatagttagctgtagcggctcctgaagacatagggagacttaaccaccgttgatacaatcattaaagctgcaagaagcatattctctggagtctgtgttacccttgtgttttccaggcttttttcagctaactgtgtcagcttctttagctgggcccaggtcagcggccccactttcttggtggatggcaacttcatctgtccttctgatatcaccattttgttcaccctgcgagtcgatgatgttcgattgcgggttctctgtctctgcggaggcgccttcccttgcacctctgatgggttcattgtagaacttcaaatgtctagtgggtacccaaacaggaagctgattttctcctggtggaacacaagcaaaacctcacccccatgttatcaccttacctatttcccatgttttatttttgttattttcccaccaaatcagttttccctcatgtgggctgttctttttaccggtaaaatgttattctgcaggagtagtggtttgatttctatatatatttaaaaaatttaaagtacagagtgctatattaagttgcatctgaggagtgttatactgtttactgtctttttcctttttttgtttaaccaattgagctttgagtgttctattagttctttcaattatggcctgtccttgggaattataagggattcctgttgtatgtgcaattttccatggatttaaaaatttttgaaatgctttactacagtaacctggcccattatctgttttaattttttctggaactcccatgacaggaaaacaagataataaatgtcttttaacatgggaagtactttctcctgtctggcaggttgcccatatgaaatgtgaataagtatcaactgtcacatggaccaattgccaattttccaaatgaaggtaccgtgcatgacatccatttgccataacacattaggacatagacctctggggattaactcttgcctccctgagtggccaggtgtagaatctgacactgggtgcaatgttgtacaatattttttgtctgtttccatgtgatatcaaatttattttttaatcctattgcatttacatgagtcaaggcatgaagttcttgtgcttccatgaatgcagatgatactagcaagtcagcttgttcatttgctttagttaaaggccctggtaaattagtgtgtgctcgaatatgagtaatataaaatgggaaatttctttttcttacattttgttgtaacaaattaaacagcgggtttaactgatcatccataatgtatttgattagggctctctcaatatcctttgtagcctgtactacatatgcagaatctgatacaatattgatagattgatcaaaatcttattaacactgtaatgactgcaaccaactctgctctttgagtcaattgatactgagttttgattacttgctcttttggctctgtgtaagctgcttttccattgttggaaccatcagtatatactgtcagagcattttctaaaggtccgtgactggtaattttaggtaaaatccaagtagtcaattttaaaaactggaggatttttgtttttgggtaatgattatcagtaattcccacaaaatcagcaagaccaatctgccatgcaccagaattgataaaggcttgtctaacttgttccttggttaaagggacaactatttgtttgggtcatt

SEQ ID NO: 68672 - DNA, 763 bp, Homo sapiens
ttttttcggtttgaatggcatttcttaacaatttttattgagaacttactgaccccatgtgacacacaaaacaaatgtacatacccttcacatatttatagaaacatttttacaagtgccctaaaaatgggtcaatgatgtacttttctttaaaacgtttaatagacatttgatgaactacttttgatggggtgctatgcaaaatatgaatctggctcaaagacactctggcaaaaagtggccacagaggctatccctttagacattggggaaatgtgaaaagaaggccacgaataacaaaagggaaatgggcccaaattcaaccctggccagcgggtggccataggtggaagaagcatgagtggaaggggcaaggacggaggaggaaagggtggcatggggaaacacaggctgctggaatggctgtggtcccagaagtaatcatctctcatcccgctgatgaacaagggtgccgttatggcctcagctgcggttaccatgacaggctggcccactgccatgaagggcagcatgtttcttgccattaatgccctctgatgtctcctccatttggctcttctattctcaaaccaaatctgcactgcgagttcagtcacattcatgcttcttgccagcctccttcgcaggaactcactggggaactgctcgcgttggaaaatgcgctccagctcctgcagctgcaatggggtgaaggcgtggacgttgggttgctgcgcgttgccaggcgaattccaccgcacgg

SEQ ID NO: 68673 - DNA, 980 bp, Homo sapiens
atatggggaaggcttatcctatcttataagttttcaaacacacataagaatgaactctggagaaagaccttataaatgtaagatatgtgggaaaggcttttattctgccaagtcatttcaaacacatgaaaaaactcacactggagagaaacgctataaatgcaagcaatgtggtaaagccttcaatctttccagttcctttcgatatcatgaaaggattcacactggagagaaaccctatgagtgtaagcagtgtgggaaagccttcagatctgcctcacagcttcgagtgcacggtgggactcacactggagagaaaccctatgaatgtaaggaatgtgggaaagccttcagatctacctcacaccttcgagtgcatggtaggactcatactggagagaaaccctatgaatgtaaggaatgtgggaaagccttcagatatgtgaagcaccttcaaattcatgaaaggacagaaaaacacataagaatgccctctggagaaagaccttataaatgtagtatatgtgagaaaggcttttattctgccaagtcatttcaaacacatgaaaaaactcacactggagagaaaccctatgaatgcaaccaatgtggtaaagccttcagatgttgcaattcccttcgatatcatgaaaggactcacactggagagaaaccctatgagtgtaagcaatgtgggaaagccttcagatctgcctcacaccttcgaatgcatgaaaggactcacactggagagaaaccctatgagtgtaagcaatgtgggaaagccttcagttgtgcctcaaaccttcgaaagcatggtaggactcacactggagagaaaccctatgagtgtaagcaatgtgggaaagccttcagatctgcctcaaaccttcagatgcatgaaaggactcacactggagagaaaccctatgaatgtaaggaatgcgaaaaagcattctggaaattcttttcttttaaaa

SEQ ID NO: 68674 - DNA, 628 bp, Homo sapiens
ttgactgagaccctagccaggggggaattatttctatatactcccgaattcccctccagatggctcttccattttgcatcccaaccagccatggctaacagtgtctgtttccccatagccttgccagcagagtatgttatcaaaatcttgaatttttactaatcggatcgttgagaaaggggtagttttagcttgcatttctcttattaagagcaaaagtgagcacattttcatatggttcagagccatttatatttttttttctataaaaatcttggtctatctctgagcaatgtaggtttaacctgattctaaggttgctggtcttctctatttttagaagctctatctgtgatgtaagctgaaagtatttctttgcagtttgttattttcctttaactttgcttatgcaaagtatactttgccatgaaaaagtcttttgttgttgttttttcatgtaattgtatttatcagtccttttccttattgcttctggatttggagtcatagttaggaaaaccttctctctctcaggttgtaatgtaacttacccaagttttcttctaatacctgtatggttccatttgtacatttaaatatttgatctgtttagaatttatcctgatgt

SEQ ID NO: 68675 - DNA, 721 bp, Homo sapiens
ggccggaactcctgggtctacccacgcgtccgcggcttcctaaagtgctgggatgacaggcatgagcctcaattcccatccataagctcttaattcttaagagacatggcgataattcatggtgaagaggaactttacaaacctgaaagatgtgacagtgcttttcccaacacctccaacttttctatgcataaaaaaaattatactacaccatagaaatgtatgaaatgtgacaaagcctttatatggttgccacactttattgtaggtaattcatacttccaaaatacctacaagtatgaagaatgtggcaaaacttttaatcagtgcttacaccgtatttcacaggaaagctattatccttgagaaaaattgtacaaatataaagaatatggaaaagccattaatgtccatcacatcttactcaacagaagaaggttcataaaagagcaattactgtgacaaaaatctttcagaaaatataagcctttaaggtgaagaagagtattgattctgaagacaagcattacaaatataaagaggtttgtagtacctttgcttgtattacagatcttattgcccgcgttttgtattagaaggaaaccctaaagcggttgccaaactttgtgcaacatcagggaatatattgaagaagattcctgcaaatgtaatgagtttggaaacacttcttagataaattatttgtggctgggcacagtgg

SEQ ID NO: 68676 - DNA, 850 bp, Homo sapiens
gcaggaattccccggctcgagccggtgactctctgagaaccagcccttctgtggcctcactctctgaaaatgagctgccaccaccacctgagcctccgggctatgtgtgctcactgacagaagacctggtcaccaaagcccgggaagagctgcaggaaaagccggaatggagacttcgagatgtgcaggcccttcgtgacatggtgcggaaggagtaccccaacctgagcacatccctcgacgatgccttcctgctgcgcttcctccgagcccgcaagtttgattacgaccgggccctgcagctcctcgtcaactaccacagctgtagaagaagctggcccgaagtcttcaataacttgaagccatcagccttaaaagatgtccttgcttccgggttcctcaccgtgctgccccacactgaccccaggggctgccatgtcgtctgcatccgcccagacagatggataccaagcaactatccaattactgaaaacatccgagccatatacttgaccttagaaaaactcattcagtctgaagaaacccaggtgaatggaattgtaattcttgcagactacaaaggagtgagtttatcaaaagcatctcactttggcccttttatagccaaaaaggtgattggcatcctccaggatggtttccccattcggataaaagcagtccatgtggtgaatgaacctcgaatatttaaaggcatttttgccatcataaaaccatttctaaaggagaaaatagcaaacagagtaagtgatgatcctattgacttcagatttttcttttcctctgttgatttatttgtgacatctggtacttggttattatttttgccctg

SEQ ID NO: 68677 - DNA, 438 bp, Homo sapiens
gatccttgagtaaatatcttagttcgaggagaagtttacaaacgctctgctcagccagtgtttcaaactttctaagatgaactaaatgtgccagtaccagaaattccaggaaaaacaagaaatttgtttttgcaattagccaagcatgtagcccagtctctcagtgtcacttcatgttatgtatgtggaggaactgtgatgggagatcaatggccatgggaagcccaagaattagtacctacagacccagttcccaatgaattcccagctcaaaagagtcaccttgataatttctggaccctgaagcctcaattattggacaatattgcatagctagagaaggaaaataattcactcaccccttaggacaacttagttgtctgggacagaaactgtataatggtaccacaaaaacagtcacttggtggaggtcaaatc

SEQ ID NO: 68678 - DNA, 1152 bp, Homo sapiens
ggcctcgtgccacgctaggagagggtccaggcagggattgtgtttggttgtgttttgggtaagttagtgagaactcaagtcttgtgcctaaggagccttggagaacagagttttgtggagctggttccgcgtggggagaatcgggaggcccacgcgggaccagctctcccctgcgcaggccctccgcgggggacaggaacacccagccccagcgagtctggagaccaggactctgccttccaggcgtagggccagggctctggcaggtggccagggctccacgggggcctagtggcttcagcccctggggtacttctgtgttgtgattccccggagctgggaaggtcccgaatggagtccagacctgggccctggttcccccaggaccctgagggtttccaccttggcgcgcagcccgggagatccgccctgggctctgggttcgggaagaaggacttcctgctacagtagctgtggggagctggtgggggcatccttgaggacctccacctgggagatgctgggaccctcggggcaggaagtccctgagaagcctcatgggagtcagggagccctggggtttccacacaggcccatgccctccgtcctggcagggcaggcagagctcagcacagcctcacccctgcaggcggtatccagaggtgagggaggccctgaaatgtttccaggcatgaccctggagcccggcagtgcaccccctaaagatggcgcacccggcagccccccagtgtccccaggggcacacttccccttgggatgggcacaggctgccccacccctccatgattccaagggcccaaaggggcggggccaggatggcgtgtcccctgcctgtgagtgacatcggttcaggaggagacagtcaggaagcctcctgctgagtggtccacattctgctgcccccagaccccatccagccaggggtggggatggggttgggctctgcgtcccactgagtctcattcctctgtccccgagccgagctctcctgggccagggtctcgtcaggaggtgcctgagagcagaatgaataattgaggttaggaacccggcatgccgagtgccccagaaatgccgctgtgttcccgcgggcagtgacgttaattggggaggagattaaggcccacattt

SEQ ID NO: 68679 - DNA, 1649 bp, Homo sapiens
cctgcagggtcggggagaaagcccggatcaggcctgcaggggctcagggcagtggtggcctcatgtcagggccgggttcctggcacatccacgacatacaagccatctttgcaactcacttttattgtttctttataaacttcctctcccatggaggaatatattgttatagtcattagcttatctctttttttaaaactctatgctaacagcaatggagccaagaggaggaaaacataagctacgatagaaaggcacttagaacctgttaaaatactgacgtcctggaatgtgcaacaacacaccaatgacaaccacaaaaagtacaccggccctgccgagcctggtccgtcaccgagtcgcatgctgagctcgtcggccttccagtgccctgttcctccgctctgctcaagtcgcaaacccatgaccccgccagggacttaaggcctggggccctcacaggggtggggggtgctcagggcctgggtggggcccgaagaaaggagaccagctccctcctaccttgctcatagccccttcgaggggcagagccagtgtggctgggccctgtcagggctggagtccaaagcccagtggcaaggtgggccgggtcagggtgacccctctgggacagaagggcagtccgggagagggtggggtcagcagagctgccagaggacctgcagggccactaaggaccccaaggctgtccgggcagctgcctcgttttacagatggggaggtggaagggcctggccactcagaggcctggtgacagggcaggcctagaagccagaactcccagctgccaggtgggagagggagcagggagaggccccagatggggggtgcatggctgcgtccatccctcagggcgtcctgggatgggactggggcacaaggccctccagcaccacccttaagtggttctggcccctgccagggtccctctgagtggcacagaacctgggggggcccactgggtgttaggggtggggaagtgcctctgagaaagcggcccagcagggaaaagccagaggaagcaacgtgtcatgggtccagcaccctcctccagccactgcttccctcaaggccttcagtccacagcctccagaaagctcccaacacagcactgactgggagccccctcccctgcatgctgtcacttggagcccccagaccaggagctgtgtcccagcctgtggtcggtcgtccccagccagcctcccccttcctgttacaggaccaaggacccaaaggcctctgcagggggcgctgcccaggccaggcccagcgggggtagaaggaggaagacggggcgctgggcctggccccacatgctccctgagccagggcccaggtcactcagtatcttggcaccacagctggcctggcacctccccttgccagctcaggggccctcggacctgcttcccacgctcccagggtgccccaaaaggtagagggaggagaccctggggtgcaggggtggagtggccagctatcccgtctggtactgcaggcctggcctggggtgaggacggcggctgcagagcgggcctcctcctaactagtgggaggcgccttgtcctggggggcatgctcctcgtgccaagcttggaggaatcacggtcatagcgtttttcaat

SEQ ID NO: 68680 - DNA, 1565 bp, Homo sapiens
ttttttttttttgtcttttaaaaacatcgtaacattaacacatggccgttcaccgtcccccaacgatgggagctggcctggggcccagggtcctccaggatcttcactcattcacagtaacggttttgaccagtcctccaggtcgcacgtggatgcgacaggggtggggagggaggaggaagtgactgtccccccttcagaaaaaaaaaaacaaacaaacaaacaaacgctgctagccactcagctttagagacccgatggctatgggcgcctgcagcgggcgggggtccatttgcttgttctttgatacaaaaaggcagagaatcccccgttacgaaacatggaatcactgacaggcgagaagtgatgggggaaaaaggggtgggcggaatgcccgctacccccccaggggtctttggaaggggcagtccacagatatgggcagtggggaccagggaaggcagagcacccccacggccaccggactgtgaccatcatacgagattcaggaggggcagcagggccaggcagacggtctccgaggcccccacccccaggccccccgacattcaagtattcttcaagaacagggaagcaaagtccatcgatgtgttgtttttttttaaggaaaaactaaaaaactaaacaggaggaagaatcccgaccgcggatttagaagccagaggggctgccccagctgtggagctcgggggctgcgccgggaagggcgggcggtgaccctagccgcgcgcacttctaaagtggaaccctgtattgcatagaacgtccccacccgcggggagggggcagcaggctccgcagcccccgggggttggagcatggagggtggggggactgagcagacccccgcattcctgggtgcccgaagggaggccgaggccgcagccgttttcctgaaggtggcagaccaaaaacactgccctgggggtgaggattcggccagaccccggggtctgggctcagctctaaggacaaggacggagctgacggagcttccaggtcaggcccgaggggcggcgcgaggcaggacgtggctacggtcagactgagccctgagaaggggcactcgggtgccccaagggggtgtcttcaggaccccccacattggctgacagtgcctgtccagcccctctgcctgctgcggtggaaacggcttcgggccaggcggggctcctgctgtctcaggccttggtgtggaggggaggggcagcggcgagcccctggggtcagctgcagtttaaggtcaaggtcggaggccgaatctggccaccaggagtcctggacagacagacgggccttgcaggaagccccgattgtcaactatcatggggacaaggcaggcgcgggtgaagggctgggggatcccatggggtgggtgggtgagctgcctgccacctgcctgcctgacacctccagagacaggcagcccctcccttccccaaccaagccaccaggggtgctctcagggtgagggatagaggggaagagcctgtccctaaaatactgcgggctgggagggaacacgagggcagggtcctgtgccc

SEQ ID NO: 68681 - DNA, 707 bp, Homo sapiens
ggggtgaaaccctgtctcgtctaaaaatacaaaaaaatagctgggcatcatggtgtgtgcctgtagtcccagctgctcgggaggctgaggcaggagaatcgcttgagcttgggaggtggaggttgcagtgaactgagatcacaccattgctctctccaggctagtcgacagagcgagactccatcacacacacacaaaaaaagttgggtgcacctgaatccaacccctgcctcatccttctgaattgaaggccaaatgcaccctgatacttttcaccaaagagtagaaacaacaccattcacttgaccccaaatgtgactttccacaggatgcaagcacagtgttggaatagccaaagacagtaacaatagaagtgcagggtgagggtgatgaacaggacacactggagagcctgacattggcctagactacgggggtgtcttgatccttcacaaagagcccaaggagcaacccaaagagacactggagcacaggcccaaagggtgttcatatgccaggaaggccactaattttagaaggcagtgatgttggttcctgttggagtcctgatcctttataacatataacatctgcatctggttagacaaggaaatctgcaatttttgacttgcagcatttagaaataagttattttagcaatccacacactcgtggtttattctgaactaacttgagacaaacagcta

SEQ ID NO: 68682 - DNA, 757 bp, Homo sapiens
ttttctgggcttggtgcatttattcaggtttgagagctgaggagggcagagctcgcacagctgtgaggcagggctgggccggacaggagctgcttcatccttcaacaaaccctggcctggggtgaccagcctggtgggggagatggagtcgggatggaggacaaaggggggagcaggggacagagcccaggaggaagcaagggagggcacaaaggaggggcaggtggcttcaggtgagaagcaggagggagaaaggggaccagcagtgggtctaggggaaggggctggggtgagggaggctgagaaggggcagaagatgtggcccacagcggctcccaacagccccaggtcctcaggaagcccctcacctgtccctgtccccatgggcccccagactcactgcagacccaggaggcctggcatagcgagtgtgcaggtgtgtgcaggtgtgtgcagaccagcacgtgtgcctgtgcacgggtagacagcatgtgtgccagtgtgagtggcgtgtgtgtaagtgggtgttcgcatgtggaggcatgtgccagtctgtacacgtttgctcatgcgtgagtgtgtgtgcatgtggttatgcacatgtaaaggaccagaggcgggaatcagaagggcacggtgggcatccctccaggaagaggagggactcaggctgacctcgccctcccacaagaagagtcaggccttgggggccgcggctgtctgagtggtcaggctggggctgccattaacctctgtg

SEQ ID NO: 68683 - DNA, 1330 bp, Homo sapiens
tttcgagatccctagtccgtgtggtggaattcttcaagttaattttgtaagtagtataagttatgcgtccatttttttttcatatagatattcatctgttgaaaagaccatcctttctctaatgaattgcctttttgcttttgtcaaaatgttattagtctgtatatgtgttcgtctacttctggattctctgttctgtttcattgatctgttggtctacatttataccaataccacactgtcttgattactgtagcttacattaaatgattactgtagcttatattaaatcttgaaatcaagtagtgttaatcttgtaactttgttcttttcaaagttgttttggctattctgggttctttgtatttccatacatatttagagtcaacttgccaacttctgcaaagaaacctttcaagattttgattgatatttgacatcctaacagtaccgagtcttctgatccattaacatggcatatctttccatttatttaggtcatctttaatttttctcaacagcattatgtacttttcagggtacaggttttatatgtcttatcagatttttccctaagtagttcatattttttgggggtattttaaattgctttgggttatataaatttggtgctattttattgctttcttaattttaatttctaattgttcattgctaggatataaaactatcatagccttttgcatgtttatattgtgtcctgcaaccatactaaactaacttttaatagcttttttgtacatccatcagattttctacatagacagtcatattacctgtgaataatgatagttttacttttcctttccaccaccctggataccttttatttcttttccttttctttttcttcttcttcttatttatttattttttttctgtattacactggcttgaacctctagtacgaagtcaaatagaagtggtgagagtgggcatcttattcctttgtttttcatagataacctttagcagttaaggatcttactagtttgttcagcgtttttatctgaggtggatgttgaattttgtcaaatgctttttctgtatctatcaaggtaattatatggtttttagctttagtttgttaatatggtgaattatattgattttttttgttgttgttttaatgttgatggggtctcgctctgttgctcaggctagagtgcagtggtgtggccgtggttttctgtaactttgaactagtgggctgaagggatcctctcgtcttagcttctcaagtagctaggacagtagatgtgtgccgccatgcctggctaatttttaatttttttttctaaaaaaaaaa

SEQ ID NO: 68684 - DNA, 863 bp, Homo sapiens
agagaatcacactggtgagaaaccatatgcatgcaaagaatgtgggaaagccttcagccaaagctcagctctcatacaacatcaaagaattcacactggagaaaaaccctacaaatgtaatgaatgtgggaaagccttctcttggatttcacggcttaatatacatcacagaattcacactggagagaaaccatataattgtaaggaatgtggaaaagccttcagttcccactcaggcgttaatactcatcgaaaaattcatactggagaaaaaccttataaatgtaatgactgtgagaaagccttcaaccaaagctcagctctaattcagcaccagagaattcatactggagagaaaccatataattgtaaagtgtgtgggaaagccttcagacagagttcatcccttatgacacacatgagaattcatacaggggaaaaaccttataaatgtaaagaatgtgggaaggcttttagtcagagctcatctcttactaatcatcaaaggactcataattgagaaaaactgtataaatgcatgtaggaactgaagttatattccatactgagtatcaaaaaattcattgtggggagaaagtgatgaagagtagttaatcataggtaaaacttcagcattagacctcatcacacatcagagacttcatgatgcagggtaaccttgggaatgctagaaaagcttctataaaatgtttattcatatgttcttaagttattaccatgaaatggagaatttttaagattgcagggttagtatttgattgtctagtgatgtacgataacagccaccagctttcctgagcatcactgggaagcctgctgtttatgtacaagtacagccataa

SEQ ID NO: 68685 - DNA, 588 bp, Homo sapiens
aaattctactcccgattgggccaacaccgccccgcggcgcactgttatataccaacatattccttttaatgtaatatatgagaaaaaatgttcggcggcctattcaccttactgaacatatgagaattcatactggggagaaacctttcagatgtaaggaatgtggaagggcctttattcaaagtgcatccctcagtacacaccagagaatccatactggtgagaaaccctttgaatgtgaggaatgtgggaaagccttcagacatcgctcatcacttaatcagcatcatagaactcacactggggagaaaccctatgtatgtgataaatgtcagaaagctttcagccagaacattagcttggttcaacatttgaggactcattctggagagaaaccttttacttgcaatgaatgtgggaaaacctttagacagattagacaccttagtgaacatataagaattcataccggggagaagccctatgcatgcactgcatgttgtaaaacctttagtcatagagcgtatctaacacatcaccagagaatccatactggggagagaccctacaaatgtaaagaatggggag

SEQ ID NO: 68686 - DNA, 399 bp, Homo sapiens
  misc_feature (1)...(399): n = a,t,c or g
ggaggcaggaggcgaccacgtccaacaacgttttccccttcaagatcatccacatcagcaagaagcaccgcgcgtgggtcttctcggcctcctccgaggaggagcgcaaggtgactgggggtccgaggacgagtgcaaggtgactgggggtgtgggcctgcaggcaccaggctggacctgctaccccccgaaggatgagcgatccccctctgagcaccatgcccaccgcacccggcctccggaaacccccttgcttccgggagagtgccagcgcccacacaaggaacatgctgtcctgggaggtgcccctgtgggctgaggggagccacacagccatgttgtatccagccgggtcgcctcctctgaccttgggagtcacagcagagcangcagggcagg

SEQ ID NO: 68687 - DNA, 1747 bp, Homo sapiens
accaggttgccaaactgttctacctttctggaatggtgcatggagaatatcaaaaccaagaaatccacaatctgggccattttattacagttatgaagtttaggcctctcatggcaaacttttcacccttatatcctggcagacagttaaaaggatggaagatttgacaaacccggaggatatccaaacaaacatcaaatgtgacctgcaggtgtcactttatggttatttaagaggagcacacttgaaaaataaaagccaaattcacatgccaggacaaggtggggctcacccatgagctggtccagagtctcatctccacctactccaccattgatgccaagatggcttcaagtcgagtgatgctgctttccaattccaaaccacttgggtcagaggctatagataatcaaggggacgagttctcactatgttgcccaggctggcctcgaactcctgggctcaagcaatcctcctgcgttggcctcccaaagtcctgggattacaggtgtaagccactacggctggcctattattgctgtattctaacttattcatctcctatgtgtcagagatggctttggattccccgttctgtgtgctgctgtctggctcctgaacccagctgtagaggtgtgtcaatcccaactggtgaagtactgagaggaagctacacaaaaggcagcaaagtattagtgagtggtgtcattgagcaaacacgaagtcgggctcatccaaggatgagattttgccagagaaaggacgagcagcaagtcagggagcttaaggtggtggaaaggaaatccctcacagcaactggcaccataatcaagacagaatgtttgcagaataaatggagttacctgctttcagccccaggttgtagctattgtctgccctgatgatatgtgataataatttgtgatcctattgtcttaaaatggggtcactcatctccagtagaattaagtccacagtgaagttgtccccccatccccaaagagataaacatatatgaatgaactcacatgataacaactactgctgcctgggatcatgagagacctgaactgaactgataggaagtgaaaggtggctgagataatgagaatagacccatctgcagaggatcataaaaccagcaaagacaagatcttgtctaagatgccttcacaaactttgtccatgagaactctaaggacttctccagacctgttggctgctgctgtgatctctgcccaagaggagcctctgaccaacatccaaagggcttctggacccactggactcctctggaggtaccttagtctcccgatccatggctgtgtttttttactccctttatcgctgcctgtgtgtagaatgataattgcacaattgatagtgtgaagacctcttgataaatggtaaatctgagcatatgtatttggctgacatgtcattgtgaaacctcacagcttcagtcagtgtcaacgcagctagggagcatgtacctaatgcacatatcactgggcatagtctacaggcacctaataactcaggtaccttaacagtcactaatgagtgtctctccaaggactaaacaatggaagactgtagaagatgctattcattaaaatatctcaagaatatggaagactattattcgcttctcatgggacaggactttatagggcacctgaaaaaactcccatgaaaaatcacttttacaaaatgtcaagttatgatatccaagatgaaaccaatg

SEQ ID NO: 68688 - DNA, 1326 bp, Homo sapiens
ttttttcaattgcacagatatttatatggcgtggcaccatgcaagttaaacaactctttgcaaggcactgtgaagttaaatacaacaggcaaataatgtcctttcaaagggaatgttgttccttagtacagaacaatggccaccagggtttaggcatgctctcctcccacctggaggctcccactgacatctgaattcttctttccacaggttgccttggattcagtgacctgcattctttctttttcagtaaagatgtgaggttgccagctgggcttcagcactcactggctgtggaggcgtgcttgccacatagtagatgctcagtgcttgtctgctgagtcatactgcatagtggtgaagccttcagggaatgaagaacaatcactttgctttcgtcacatgttttctagatgattgctgcagaagcggaaaaggctgcttctgagtccctgaggatggcagctgagattctgtcaggcacccctgctgctgttcagcttcgatacctccacacccttcagtctctgtccacagagaagccttccactgtggttttacctttgccatttgacctactgaattgcctgtcttctcccagcaacagaactcagggaagcctccccttcccaagtccttccaaacctgttgagccactaaatcctaaaaagaaagactctcccatgttataggaaggatggggcataatgtgactgtaaaggggcctgccatagaaaagtcacatccctgagggagacactctgtcctcattccctgcccttcctttggttgccatatggaatggccatggaatgcacgaagtcacaatgcaccatccatgagaagacagtgaaatgatgtaatgacagagaaggcagacaacatgtttccgtgactcatctagtcagagcaattatgggaaacagctttggtcaacattctactttgggaagaattttgagtctagatgtggttaaattttgacttctgggaacttggttcagatgtccctttcactgtatgtcctctgacccctttggcaaggttgccacagctcccacagcccttcctacaagcacctatcattgggcttgtcacactctattgctcttctgtcccgaagatgcagtcttctctccaatgatactaccaagtcttagttttcctcaaccacactcaatctttttgctccaccctgaattcctcacacctaaccctgatagttacctaaagtgacacttaaatgtttcagagtgaatgcaaaaaagagagatgtacttggagtcggatatacaatttatccctaattaaagcatttaaaaggaa

SEQ ID NO: 68689 - DNA, 1077 bp, Homo sapiens
  misc_feature (1)...(1077): n = a,t,c or g
ttttttttttttctgaacaataaatgttttatttgctttaaaagtgcctctgaaagggccccccagaagtgagcagtgcgccgtcaagcgggtgtgcagggcacacagctgcacggcacagtgtgggtctgagtcactgccggaggagggaccagggtggtctgggccgcagcccctttaacaatctgcccttcctgccctgcaggaagaacccattctgaacacaccctggctgtccctggctgccccactttggggtgacaaagaggaggcagccctgggctgagtccacagagaccagccctgatatggcaggagtgggggtggggtgggggagtgggaatacaggagctcagccccagctcaccacggcatccccgaagagttgtgactcagacacacctgggtttaagtcccagctgggggctcaggtaagtcaaatcgtcttctggggcctctgtttatcagtagaaggctccagaagtatacactgttgatggctccttcccgctctgatgcaccatgcctgattaagcatacactgagccccctgggtcagaaatcgctgaggatgctgatgtcagcaaagtcagcccggtagcggtgggcatagaggctgagcaggaaggcccacttgaaggaaatgaagctccagacgctggagaggtagtagctggtggggtctgtgaggctctgatgccgggtgatggccagcacgaggaaggtgcagaaggcagcgatggagacggccgagaagaggacgcccacgaagaagaagccgcgcagccccttgagccaggtcctccaataatcttgcatgtacatcacgtgcgtcaccaggacccacagtgccagcacccctgcgagccctcccatggccgcggtccccggctgtcggtagaccaccgtccagacgaggaagatggagaagccggccacggagctgatgccggagtaggcggcgcggaggccgagctgcagcctggacggggccatggggctgccgtacgcgtgggcggacgcgtgggtcgtcccgggcnttccgcgacggtactcagggcgtcaggnnnngcaccc

SEQ ID NO: 68690 - DNA, 2355 bp, Homo sapiens
gtccgtgtggtggaattcgcagcggcagttcgtggtgcgggcctggggctgcgcgggcccttgcggccgggcagtctttctggccttcgggctagggctgggcctcatcgaggaaaaacaggcggagagccggcgggcggtctcggcctgtcaggagatccaggcaatttttacccagaaaagcaagccggggcctgacccgttggacacgagacgcttgcagggctttcggctggaggagtatctgatagggcagtccattggtaagggctgcagtgctgctgtgtatgaagccaccatgcctacattgccccagaacctggaggtgacaaagagcaccgggttgcttccagggagaggcccaggtaccagtgcaccaggagaagggcaggagcgagctccgggggcccctgccttccccttggccatcaagatgatgtggaacatctcggcaggttcctccagcgaagccatcttgaacacaatgagccaggagctggtcccagcgagccgagtggccttggctggggagtatggagcagtcacttacagaaaatccaagagaggtcccaagcaactagcccctcaccccaacatcatccgggttctccgcgccttcacctcttccgtgccgctgctgccaggggccctggtcgactaccctgatgtgctgccctcacgcctccaccctgaaggcctgggccatggccggacgctgttcctcgttatgaagaactatccctgtaccctgcgccagtacctttgtgtgaacacacccagcccccgcctcgccgccatgatgctgctgcagctgctggaaggcgtggaccatctggttcaacagggcatcgcgcacagagacctgaaatccgacaacatccttgtggagctggacccagacggctgcccctggctggtgatcgcagattttggctgctgcctggctgatgagagcatcggcctgcagttgcccttcagcagctggtacgtggatcggggcggaaacggctgtctgatggccccagaggtgtccacggcccgtcctggccccagggcagtgattgactacagcaaggctgatgcctgggcagtgggagccatcgcctatgaaatcttcgggcttgtcaatcccttctacggccagggcaaggcccaccttgaaagccgcagctaccaagaggctcagctacctgcactgcccgagtcagtgcctccagacgtgagacagttggtgagggcactgctccagcgagaggccagcaagagaccatctgcccgagtagccgcaaatgtgcttcatctaagcctctggggtgaacatattctagccctgaagaatctgaagttagacaagatggttggctggctcctccaacaatcggccgccactttgttggccaacaggctcacagagaagtgttgtgtggaaacaaaaatgaagatgctctttctggctaacctggagtgtgaaacgctctgccaggcagccctcctcctctgctcatggagggcagccctgtgatgtccctgcatggagctggtgaattactaaaagaacttggcatcctctgtgtcgtgatggtctgtgaatggtgagggtgggagtcaggagacaagacagcgcagagagggctggttagccggaaaaggcctcgggcttggcaaatggaagaacttgagtgagagttcagtctgcagtcctgtgctcacagacatctgaaaagtgaatggccaagctggtctagtagatgaggctggactgaggaggggtaggcctgcatccacatagaggatccaggccaaggcactggctgtcagtggcagagtttggctgtgacctttgcccctaacacgaggaactcgtttgaagggggcagcgtagcatgtctgatttgccacctggatgaaggcagacatcaacatgggtcagcacgttcagttacgggagtgggaaattacatgaggcctgggcctctgcgttcccaagctgtgcgttctggaccagctactgaattattaatctcacttagcgaaagtgacggatgagcagtaagtaagtaagtgtggggatttaaacttgagggtttccctcctgactagcctctcttacaggaattgtgaaatattaaatgcaaatttacaactgcagatgacgtatgtgccttgaactgaatatttggctttaagaatgattcttatactctgaaggtgagaatattttgtgggcaggtatcaacattggggaagagatttcatgtctaactaactaactttatacatgatttttaggaagctattgcctaaatcagcgtcaacatgcagtaaaggttgtcttcaactgaaaaaaaaaaaaaa

SEQ ID NO: 68691 - DNA, 841 bp, Homo sapiens
aacgaggtggtcaaggaatgtcaggaaaagctgcaggtagccctgcagaggctgataaaggaggatcaagaggctgagaagctggaagatgacatcagacaagagagaaccgcctggaaggcaggaggagacacctcctaagggataattagacaggaatctgggcaggaccctgggctctatcacaaggagaccccttcctctttgctgtgctagaattaacaagcatagaagtcatttgattaggtctcaatttaactccttccctgttggagtttaggggctggagagtagacatatcataaatcaacactatatttggaagtgaaggcatggagggaaatatctgtgaaaacgcttcctgtgaatcctgtgttccatttgtgtcatcaggtttgaggctccaatccttccagtaaacaccctggagaaagacccaggattccctgtttagggggtttcagtagggggatttttttgtttgtttgtttgttttttgagacagagtctctctctgtcatacaggctggagtgtagtggcgcgatcttggctcactgcaacctctgcctccctggttcaaacgattctcctgcctcagcctcctgagtagctgggactacaggcatgtgccaccatgcccggctaattttttgtatttttagtagagatggggtttcatcatgttagccaggatggtctcaatctcctgaccttgtgatccacccatctcagcctcccaaagtgctgggattacaggcatgagccactgtgcccggccaggtagagggatttaagacacagaaaggcaaagttgttcaggacaggtgtctacaatccaag

SEQ ID NO: 68692 - DNA, 2204 bp, Homo sapiens
caaaaatttatataattttacaccgattagaaatactttttacaagcaagcgtaatcagatagttttcgccttattccagataaaaatttttttatttccattgagcgtatgatttatgtaggtaggttgtcccaataagtccctcccacagaattagggttcataccaaaagtcaccagctaggtttatatatattaccatttagggaagaaattataatattgcaagtatgggtaaaatttgggcccccaaagggttctttaaaaagggcccccctttttttaagtattttttttttttccctctcatcccatttattaaagaaacagtaagaaaagatacaatgcaggaaaaccaccaaccatccttgcacaccaggccgaacaaagcacagtgatttcttcccttcatcccccacccccaccctaattcccatattcccatccacatcagtttaaattttgaggttctttgattgattgggagtaccagtgaagagggagttggatgagtagaggggccttaaatctggccacctctaagtcccaggagaagggagctgcaggcccagtcagtcaagcagaaactgcattcggtgggtctttctttgaagtggttgtccatctccctgttctgtgttcaagcccccagggaaaggtatggcagtagaggatgaccaggtccaagctgcccaggtcagagctacggaagcatggtccgttcaccaacgccacgtttctagagagcagtgagctgattctccaatggtgagcaggggactacatgtgaactgggacctgcaggccaatgtatccctgaggaaaagtccacaagaacaattcaagaaactagtaagaaacaatgggcagaaagctgtgggacgaaagcacagcaggcttctgggaggctggagatcctttctctcaagggcaggattattcccacctgccacagttcacatgccacaaataacatctcaccttcagtcaagaaaaacgcaaaggaaaaagatggctcatttgaacttgagcccaagctatgttcttcagactgtagctccacaactacccttttacctaagacagcccctgccaagaaccacagtgcctagaaaccaaggtggtcctggagggaaaatggtgtttaagggggcaacattccatttgggtacattgcagccattggaccccctggtctggggaaagcagctgggtttgtgccagggaggctccccactctaggaaatgggacgaaactcttgcctgcagggccattcatccttggaaaggaagctgggttgagacccagggtcccagttggccttgtgaaaggagctgggttgatacccacagggccagctggagaagggcccagatgcccggcagctggcctggggaaagtaacttgaccagggcctaatgggccagtagaccttgggaaggtagttggacttggaccctgcaggccagtggcccttgggaagttagctgggttggggccaagtggcccagaggctcttgggaaaatggttggatttgagccctggaggccagcggacctttggaaggtagctgggtttgatgccaatgtgccagaagactgagaaaaggcagatgaacctgctcccctgggaaagggattggcatttacccccatggggccaactggccttgagaaatgagctgaattagggcctatggggccaggagcccttgacatgggagatggatttggccctggaaggccaattccccgagagctaggacccgagtttgggcccatggggccaggtactcttgccatggaggatgggcttgtgcccatgtttccagaagcctgtgagaaagaagctgaatttgctcctaaaagacctgctgctcttagaatgggggcaagatcgaggccttgaggtccagccattcttaagttaagaccagatcctgtgcccaagaggccacctgctctggcatctagattagggcctgggcccaggccacttggtcttgggttgggcccaaggcctgggcctggaaacacacctgacctgggggcagggtttgtccctaaaaagcctgatctcagattggggtttggtcctgggcccaggccaactggcctaggattgggaggaccattcccagaggttaacagaacaccggctctcaggttaggtccagatccagggcccatgggaccaccacct

SEQ ID NO: 68693 - DNA, 631 bp, Homo sapiens
ttattcggccctaaatacatattatgaactgaattttcagttatctaaatatctcaagaagacaaaaagaaaatattaaacctggaaaatgtagaaagaagaaattatgaagtagaatttatgtagaaagcagaatttatgaagtagaaagaaatataaatcattcaagccaatagctggatttttgaaatgactaattgatgagcccttggaaagactgaatacgaaaaagagagaatataaaattaacaatattagaaatgaaaataggaaatcactgcagaacctccaaacaatgaaaagataataagagaatactgtgactagctttgttccaaagaaattaaaacattctagaaacaatatagtgttagcgaaatacagtttaccaaccctaacactagaagtgggaaatatcaactgtcttatatttattaaatgaaatgaatttataattaaagccttctcacaaagaagtccaggcccagatggcctcactggttaattccaccaaacatataaggaaacaataataccaatcttaaactctttcataatacttcccaactgattttatgaggccaacataaccctgatcctaaactatgacaaagaccatgcaaaaaaaaaa

SEQ ID NO: 68694 - DNA, 450 bp, Homo sapiens
atcgatgacactagtccatgtggtggaattcctctatttctggggggaaaaatggttgtcagaattttgatggggattgtgttgaatctgtagattgttttgaataggactggcattttagcaatattgagtctgccgacccaggaactaaggatctttccatttacctaggtctttttaagtttcttttaccaatgtttggtagtattcagcatgcaggtctttcacttccttggttaaatttattcctaagcattttatttgtttagcgctatttaaatggaatagccttcttaatttcctttttagattgttcattgtacatgtacagaaaaacaactaatttttgtgtgttggtcttgtatcctgaagctgtgctgaatttattaactctagtagtttccttctggattcacatgtatgtacttctagctactcgggaagctgggg

SEQ ID NO: 68695 - DNA, 655 bp, Homo sapiens
ggacacataatattccctcctacactgggaaaacaaaacagtagggctagccaactaacctcaacccatcccttccaaccactcaccggggcggccctgtcttcctctctctccgcttggcgatcagaaaacaagatcctaaagcccctctttgccaaagacctccaattttgccttcctagccagggcatattctttctctgtggcacttccacctagctctgcttacccactaactggacaggaacctgcacgctagtcttccttagtccaaaaatagacatagcccctggggatagacccttacccttccaaattcaaacattatcccgcagacgctgagccatacagcttatacccctgctaataggggtaggcattatggcagctgcacgaactagagtcgcaggaattgcaacctctacctattactacaaatccctatccaaggacctctctgataacactgatgacctagcatccactgtatcaaccctccaggcccaactagactccctagccgcagtaggtcttcaaagccgcaggggcctcgatttacttaccgcagaaaaaggaggtatctgcgtcttcctagatgaagaatgctgcttctatttcagtcaggcctggttcaagatgcagttaaaaaattaag

SEQ ID NO: 68696 - DNA, 1202 bp, Homo sapiens
tggcggcgggtcggggcgagaggctgaggggatctggcggtggagcgctaggatcagacgcccccgcgatgaccagctcccccgtctccagagtcgtgtacaacggcaagaggaccagcagcccccgctccccacccagcagcagcgagatcttcaccccagcccacgaggagaacgtccgcttcatttacgaagcctggcagggtgtggagcgagacctgcgaggccaggtgccgggtggcgagcggggcctggtggaggagtatgtggagaaggtccctaaccccagcctgaagaccttcaagcccatcgacctgagtgacctgaagcgccggagcacgcaggatgccaagaagtcctagagcgcccggtgcccctccccggcctccggaagatcagggtgcgaggtgtcggttccctcctgtcctgtggtcctgcccctgggatgggggtgccttgctccagcgggctgcagatcccagcactggcgtgactgacggctgaggcctgcctctccttcccaagcccccttccttcatccttgggggtctcaggctgcccccatcatgggggtctgggccctgcccaccctcctgccctcccccagccacctggctgcatttttgaagctgcctggcccccaggggccctgacctgacctctctcctctcccctcaccctcctgcccctggccactgcaggatcaggaggggagaagaaggagcctctgctgcctcccaggctgctgggactgggctggttttgtccttgaagtggtcaggatacaggacaagggcagccccaccccatccagcctgggctccccgcagacccttgctgctcccgtggcctggacacgctggggagcttctcacacctacccctaccgtccagcctggcctcttccctgaatcagcttcaagatggcaccagctctttgggcctaggatactgccgggccccccaagggggtccccagcaaccaggcctggcctcctggtgtctgcggtcacagtggcccctgggcaggggcacccaggctgaccctgaggtgctgctgctgggtctgtcttggctctggggtgtgctgggagggtcaccaggtcccttttccttcctgtgccctctgaaagctaagtgtctgtgtggctgtggagctcgagggtctgtgaataaaggcggcggcactgggaaaaaaaaaa

SEQ ID NO: 68697 - DNA, 664 bp, Homo sapiens
tgaggctggggcaagccttttaaggactggaccacgggtgggcaggataccgggggagaacccgccctgttagttggggctggggagggccgcgcaccgagactaaattgtccttccgggcagatccgctcaccaggccctggcgacctgagcatctacgacaactggatccggtacttcaaccgcagcagcccggtgtacggcctggtccccagagcaagacttcagccaggatctaccccacctaccacacagcctttgacacctttgactatgtggacaagtttttggacccgggtgaggagggagacaaggggcatcctgagaccaggacaggagaggctgaagactgagccctggccttgtcaccttgccgcaggcttcagcagccatcaggctgtggcccggacagcggggagtgtgattctccggctcagtgacagcttcttcctgcccctcaaagtcagtgactacagtgagacactccgcagcttcctgcaggcagcccagcaagatcttggggccctgctggagcagcacagcatcagcctggggcctctggtgactgcagtggagaagtttgaggcagaagctgcagccttgggccaacgcatatcaacactgcagaagggcagccctgaccccctgcaggtccggatgctca

SEQ ID NO: 68698 - DNA, 1495 bp, Homo sapiens
ggaattcgaggcgggggcagcctcgccagcgggggccccgggcctggccatgcctcactgagccagcgcctgcgcctctacctcgccgacagctggaaccagtgcgacctagtggctctcacctgcttcctcctgggcgtgggctgccggctgaccccgggtttgtaccacctgggccgcactgtcctctgcatcgacttcatggttttcacggtgcggctgcttcacatcttcacggtcaacaaacagctggggcccaagatcgtcatcgtgagcaagatgatgaaggacgtgttcttcttcctcttcttcctcggcgtgtggctggtagcctatggcgtggccacggaggggctcctgaggccacgggacagtgacttcccaagtatcctgcgccgcgtcttctaccgtccctacctgcagatcttcgggcagattccccaggaggacatggacgtggccctcatggagcacagcaactgctcgtcggagcccggcttctgggcacaccctcctggggcccaggcgggcacctgcgtctcccagtatgccaactggctggtggtgctgctcctcgtcatcttcctgctcgtggccaacatcctgctggtcaacttgctcattgccatgttcagttacacattcggcaaagtacagggcaacagcgatctctactggaaggcgcagcgttaccgcctcatccgggaattccactctcggcccgcgctggccccgccctttatcgtcatctcccacttgcgcctcctgctcaggcaattgtgcaggcgaccccggagcccccagccgtcctccccggccctcgagcatttccgggtttacctttctaaggaagccgagcggaagctgctaacgtgggaatcggtgcataaggagaactttctgctggcacgcgctagggacaagcgggagagcgactccgagcgtctgaagcgcacgtcccagaaggtggacttggcactgaaacagctgggacacatccgcgagtacgaacagcgcctgaaagtgctggagcgggaggtccagcagtgtagccgcgtcctggggtgggtggccgaggccctgagccgctctgccttgctgcccccaggtgggccgccaccccctgacctgcctgggtccaaagactgagccctgctggcggacttcaaggagaagcccccacaggggattttgctcctagagtaaggctcatctgggcctcggcccccgcacctggtggccttgtccttgaggtgagccccatgtccatctgggccactgtcaggaccacctttgggagtgtcatccttacaaaccacagcatgcccggctcctcccagaaccagtcccagcctgggaggatcaaggcctggatcccgggccgttatccatctggaggctgcagggtccttggggtaacagggaccacagacccctcaccactcacagattcctcacactggggaaataaagccatttcagaggaaaaaaaaaa

SEQ ID NO: 68699 - DNA, 855 bp, Homo sapiens
ttttttttttttcagttgagcagacatttattaagcacctatcaagtgcaaggcactgtgctaggcgccgtgggaaatacagagaacacaggcggtccctgcccacgaggagctcacagtctagaaagggcagcaagacagtacacaatcagtggcagcagcaccagccagagtggcaagtgctcaaagcgagacacaaagtgctgtgcggtcacaacatcatggggatgcttctggcagaagcactggaaaggagacgaggactcaggctgggccttccaggagggaagccatttgggagaagggcatctctagcggagagaggtccatctgcagagcccacaggtcatgggaaacatgtggctgcagggagagtttggggacagtcaagtatggctgggaggtggacagccacggacactaagctcaggagatgtgaactttgtggtctggtcaaacagccactgcagatcacttcgcaggaggaggggtgactagaagtatgttactggaaggtaaatctggccacactgcagcatctggacggcagagggcagcgctgggaggggccagccagttagggccccaccacccctgggtgtctgagagtgggagtagcgggcaggggccagcaaagcacgagggcagagcaggggaccatacggagggtgggtgtggaagaagggaggggccccatgcaagctgcaggtctggggagcctgaggatgtcatagggcttcctggtagagtggaaagtgcactcctgaaggtcagggccagtcactacagagaggggacagcgaggagagggacggtgtggccctaagggtgactgcagtttctcaacatgtggtc

SEQ ID NO: 68700 - DNA, 2198 bp, Homo sapiens
accgggtcgacgatttcgtgggagcgtgagcgagccaagcgggacgagaaggaccggcagcaccgtgaccgcgaccgggagaaggagcgggagaaggagaaggggaagcccaagccccgctccccgcagccgccaagccgccaagctgagccaccaaagaaggaggctgccaccacggggccgcaggtgaagagagcagatgagtggaaggacccttggcgccgatccaagtctcccaagaagaaactcggggtgtcggtctccccgagccgggctcgaaggcgtcggaaaacatcaccctcgtcagcctctgcctctaattcctccaggtcgtcttcgcggtcatcgtcctactctggctccggctcctcccggtcgcgatcccggtcttcatcctacagctcctactccagccgctcttccagacacagctcgttctcaggaagccggtccaggtcccggtccttctcttcgtccccgtccccgtccccaacaccttccccacatagaccttccatcagaaccaagggagagccggccccgccgcccgggaaagcaggagagaagtcagtgaagaagccggccccgcctccagccccaccacaggccaccaaaaccactgctcctgtccccgagcccaccaagccaggagaccctcgggaagccaggaggaaggagcggccagccaggaccccccccaggaggcggacgctaagcggcagcggcagtggcagtggtagcagctatagtggttccagctcccgatccaggtccctgagcgtgagcagcgtctcctcagtgtccagtgctacgtcgagcagcagctctgcacacagcgtggactcggaggacatgtacgcagacctggctagccccgtgtcctcagccagctctcggtccccggccccagcccagaccaggaaggagaaaggaaaatctaagaaagaagacggtgttaaagaggaaaagcggaaaagggattcgtccacacaaccacccaaatctgcaaaacctccagcaggggggaagtcctcccagcagccctcgacaccccagcaggcaccccccgggcagccccagcagggcacatttgtggcccacaaggagatcaagttgacactgttgaataaggcggctgataaaggaagcaggaagcgctatgaaccatcagacaaggacaggcagagccctcctccagccaagcggcccaacacatccccagaccgaggttctcgggaccggaagtcaggtgggagactgggctccccgaagccagagcggcagagaggccagaactccaaagcccctgcagccccggctgacaggaagcgccagctgtcaccccagtccaagagctccagcaaggtcacgagcgtgcccggcaaagcctcggatcccggcgccgccagcaccaaatcagggaaggccagcacgctgtctcggcgggaggagctgctgaaacagctgaaggccgtggaggatgctattgcacgcaagcgggccaagatccccgggaaagcataggccgtgccccgaccggactggacgcatttttatacatagggtaagcgcagccattttggattttgcagttaatgtcttattttggctgtgattctttttaaaaagtaaaaaagaaaaaaaagtttctcagctggaaaagaagccacacaggaaatgacaacgacgctgaatcccagcctccctccccagagcagaagtcccgcaggacagacagacacagacagcgctagtgaccagcacggttctcatgtaaattacaagccccagccgccagccccgccttctcttcctcctcctccgtcttcttccctggccctggtcaggcctgtggagccccagctctgggtccctagcccgggtccaggcagccaggctccctcctgagctgagaaacggaacctcgcgaaccactggtggcacatccttctcctcccccgcccctgatcacccgcccccggatcagaaatatatctatattctcgactaaagtctcatcaggaaatatttcctgtcttttattttaagcatcaaattgttttagttgatttaaaaaggaaaaaatacagaaaagaccaaaaaaaggccaagggtgttgttggggcgtctgtctaatgtggtgggtctttattttaggagacccctcaaaaaaaatattttgataagcaaaaaaaaaa

SEQ ID NO: 68701 - DNA, 510 bp, Homo sapiens
gcggagactggttcccccagtgtcctccaggctgcctctttgaagtgtgggggcatggcagcattgtaaagtgtggctggtacaaaccaaataaaccttaagtttaatttggagtgggaagaacagaatcattaaaacaatcttgaaaaaggaagacaaagttggatacttaccctacctgactttaagacttacagtgaagctgccatactcaagacactgtggtactggcgaaaggagacacaaatggatcaatggaaaaaaatggaaggccaagaaatagacccacacatacatggtcaaatgatttcgacaaggacacctcgacaattcgatagggaaacagccttgacctgtactttactaaatgtacaaaaatcaattcacggtagattgtagagctaagtgtaacagccagagctacaaagctagtaaaagaaacatgggagaatagctttgtgacattgggataggcaaagatttcttagggataatccagaaagtatgatc

SEQ ID NO: 68702 - DNA, 883 bp, Homo sapiens
  misc_feature (1)...(883): n = a,t,c or g
tttcgtcgcatccatgagggtcagctgctctgccagcagcctgggagggaaggtcgtcatgtcaggcagctcctcactgggttggttctttacagacccacgacagggacaggaggactctggggctgactgtggctccagcactgtccctggagggggcccttcccctggtgctggtgctggccctggtgctgaatgtagatatcctggtggacccagggctgcaggtgactctggctccagagcaggccccaggtccgccagcagtggtggtgctggctccagggccggcattgttaatgcgtgttgcccaggacgtggagcaggatctggaaaaggagaaaaggtcaccacaccagtcatttttcactgggttttccaagcacagaaatgaccgggtggaatttaagggaattgtagccccaaaacaccacccccggaaagtcttgcagactgcaagccccctcaccatctggcttggcctcgttgggctccggaagcaccaactggcctaggacaatttcctgatggtcctccaagcccagtccaggccaggagaggttcctgaaggccagctttatccggaaagatgaccgttgcgggggctgatagtaaactgaagtnttttcggggggccagttgaacaaaatggaggtgatggtgctggtgatggagtagacagctgagtcagaggcctggccttctcccacacaaccctccagggcacccctgcntggttctgggtccctggcctgttgctgccagtttggaggacagccccaccctaccgtaagccatcagtgctgtcctggaaggggcagacctggccatacagcagggctgtacagaccctcgtggcgccctggcgtcccacagacattct

SEQ ID NO: 68703 - DNA, 1115 bp, Homo sapiens
tttcgtaggaggagctggcgtgggagaccgacggccgtgagtctgcctggaggagggaggggggcgggccgaggccgagaggacccccgcatccgtttggggagtgccaggggtgaggttggcgccctccgaacggccacctccgtgtggggcgtctgtgtggctccgagcggaatggttaccggtccgcgcactgggccgaggggaccttgccagtgcgtctgggactcggggaccacacccgccaggtgagcggggagcagcggctgagaggttagctacaaataataaaggtaatagcgatccttgactgcgtgctgtactttgtgtgccaggccttgacccaggagaggcacgtcatttgatcttcgctgcggccatatggtgcttcctctggagaggcagctccacgaggccgcccgccagaacaatgtcggcaggatgcaggagctgattgggaggagggttaacaccagggccagaaaccacgtgggcagggtggccctgcactgggctgcaggtgcagggcacgagcaggctgtgcgtctgcttctggagcacgaggctgctgtggacgaggaggatgcggtaggggccctcacagaggcacgtctgtgtgcccttggtcctctccttgccttggccccagcctctgcttccctcctctctccagtgctgtccttgtctgcaccacccgcctcctgcctccaaattcccgcctgtttctaaagcaaagcagtgcaactctctttggatgctcgggagcctgctgatcatttgggatgaatgcgcttctcctgtctgcctggttcggccacttacgaatcctccagatcttggtaaactcaggggccaagatccactgtgagagcaaggatggcctgaccttactgcactgcgcagcccaaaaaggccatgtgcctgtgctggcgttcataatggaggacctggaggatgtggccctggaccacgtagacaagctggggaggacggcgtttcacagggcagctgagcacgggcagctggatgctctggacttcctcgtgggctctggctgtgaccacaatgtcaaagacaaggaggggaacactgcccttcatctggctgctggtcgg

SEQ ID NO: 68704 - DNA, 1770 bp, Homo sapiens
  misc_feature (1)...(1770): n = a,t,c or g
cccgcgcccaggtgggaagaggccggcgactggggtgaccgcggggaaactgaggcagagagatgggctccaaggcaaagaagcgcgtgctgctgcccacccgcccagcgccccccacggtggagcagatcctggaggatgtgcggggtgcgccggcagaggatccagtgttcaccatcctggccccggaagaccccccagttcccttcaggatgatggaggatgcggaggccccgggagagcagctctaccagcaaagccgggcctacgtggctgccaaccagcggctgcagcaggcgggcaacgtgctgaggcagaggtgtgagctcctgcagcgagccggcgaggacctggagcgggaggtggcccagatgaagcaggcagcattaccggcagccgaggctgcctcctcaggctgacctctcggggcctgcaggcttgggcagcgcacaaggtggcctgcacccaggctttccctgggggtccgtcggccccagactggcattcacggggtcccagcccacgtgggtgttgacacaggcgcccctcctgatgctggggctgcggttcatccgtcgtctcattcatgccgagttggtgggacccacccagctggctccgtcctgcgtgacctgagggccccactggggttctggaagaggatagggacattattgctgtactgtgattctgtcgtcagctcacagtggccgtgctctgcagtggggcccctgggagcaggtgccacctccttcctctcccggggcaggcactcgcctgtccacttctgagtccaggtgttgggatcgaggtgttaactgtgattccatccagcgagtgcccacccaatgtcagagcagcccgagggccagcctgagcccctgaccccacttccttctgggccccgggctcctcccacaagccacgttgatcttcacaacgaccctgggccgctggggtcacccaagagaagcagccctgagacccagccaggctgggcctagctccacggcacgggtgtctcccagccactgcccttgctggaggaccgctgtgagtcactggccaggagcccagggtgtcctgagtctcatagccaccctgccagctgcagcaggtcctgggcctgcttccctgcgggttcttgggcctgggggaagggggcgttagtgcggcggagggtcttgccaaaggcttttcatcctaaatagcaacttgagtggaaaccctgggcaagggccgcccagaggctgggccctgcacataaagctttcgtgtgtgtctggccgtctgaatggtgcctctgtgagcggctccgtcccggggcccccggaagcttgggagggatgggtaccggcgaccccgggaaccctgctcagtcctgccgggcactgcatgcagggaccgtccgcctgacccagagacctgggggctgcctcaccctctctccagacccacagccagctttgtttcttgaatgtggaagatgtttcttattccctgaagaaagggggcctgccacacacagcctgggaggcgcctcatccagaaactgggacttggctagcccggcctgggccctagggacttctcactggtcatgcttctgaagctgctcacctggccgagggaggtcccggcagtgtcccagggtggaaggtggggggnggnnnnnnnntgnntnnnttttnnnntgtntttttgtggtgtttgnnggnttgttttnttgtnttttgttaggcgaggggtggttttgctttgttttgggtg

SEQ ID NO: 68705 - DNA, 640 bp, Homo sapiens
gcggtgctcaaggtgcggcccgagcgcagccggcgcgagcgcatcctcacgctggagtccatgaacccgcaggtgaaggcggtggagtacgccgtgcggggacccatcgtgctcaaggccggcgagatcgagctcgagctgcagcgggctggagtgcagtggtgcagttatagctcactgtggcctcaaattcctgggctcaagtgatcctcctgcctcagcctcttcagaagctaggactacagggtatcaaaaagccattcacagaggtcatccgagccaacatcggggacgcccaggctatggggcagcagccaatcaacttcctccggcaggtgatggcactatgcacctacccaaacctgctggacagccccagcttcccagaagatgctaagaaacgtgcccggcggattcctgcaggcttgtgggcggggaacagcctgggggtccttacagttgcttagccaggggttttcaacttgcattccgttgaagatgttggcttgccttacattcaccaggagggatggccggtgtgcctgcggaccccgacaacatctacctgaccacgggagctagtgacggcatttctacgatcctggagacgtctttctttgtgccttgatgttgagagcgc

SEQ ID NO: 68706 - DNA, 1392 bp, Homo sapiens
  misc_feature (1)...(1392): n = a,t,c or g
ttttttttttttnnacaatagtccatatatttattcttaagcaagttatcaataaaaaatttgatactaaaatgcctttacatagagtctgctgttcataaaacctttgtgtgtttttttgtccattttgtttttagtgtttacattgaaaaaaaatccaaccatccccttagtttacacatttacaggaatcgtgccttcgtcacgttaaccacggtgagaggggaggggccgcaccattcgcacgcacacagaaaaaaaaaggaaaaaaccagggacaaagcggaacccagcagaagcgggacgaggacgaggcggcggagcagaggatccaacctccgtggctgcaccctcctcggccctctctggaactccagtggctcagcatgcccccgtgcatttttcttcacttgacatcgttctgatccccgagcctcaagcaggacctcgtccaaccacctccccagacatccaccgggaatgaaatattgcactcatgcgagacaaagggtaggctcgggggtgggagcggggggctgaaggcggggaccnccgaccacaacataagcccccagccttgagcctcctggggagcctctgggaacggcccttcagggggtccagccagcaggtgagaaacaggccccaatgggcccgagaaaaatagggggccaaggggacctgggattggggtgcagggcacccaccagcaccctgcttcgaggcctgtggtgtgggggacacagagctcgtcctagagcagtggctaacttggggggctttcctgaagctcccgtggggccaggggaaccttagtgtgggaggatataaggagtgtgtggccccccatgcgtttctgaggctgaaggctgttgggctcaggtccaggcagcctgtctgtccttggctgtgggagaaggggaggggtgtgaattccctggggatactggggcagagccctcgaggggtgctgcttgcacctggggccaggatttgggctcaggtggtcagggggaccctcattctatgccccaagcactagcccatcaggccatctgccccaccaagtggcacagaaaaggccgagaaacctccaaaggggttggggcaggcagaggggtccgagggccaggcagatttggctggtggaaaagggggcccagaaaggggccttccccaagggcagggcctgcgttttattttcttctcccctggccacagcactgctggcctggcctcaccaccatctacgcagcaggccaggggtttgggggcaccaataaggtgggtgggaaaaggggtgtcttttgcatgcattctgcttgggggtgaggagagaatctggtgggactgtgaacctgccctcataggccccgagccctgcccagttca

SEQ ID NO: 68707 - DNA, 908 bp, Homo sapiens
aagtacaaaagatttaaattttgatgaagtcaagtttttctgtttttcttttttcactttatgattttaatattatatctaaaaaggcctaatgttgagaagctttactcctatgttttcttctaaagttttatagtttacatttaggtttatgacccatcctcactttaagttttagcatatggtgtgaggaagggattcattttcattcttttgcatgtagatgtctggtagttccagtaccatttgttgaaaagacagttctttgtacattgaattgtcttggtatccttgttgacctctcatctgtggccccattcctggctctagattctctccttcatttttcatttatccaaggatctgtgagtttagttaagtcactttctaaggctgctccttttgcccatagttctctcccattagtcaaaaatagttattgaacattatttattgagtgttccagtaaatgatagggcaatgaacacacacagtgtccctactcttgtggtgttacggtataaaatacttcagagtttgtagatgaaacttaatttttttggctggtcttttcttagaaaccagtatttaaaaatctgaatatcaaaaaaaaaaaaccctcttaaaaggccagtaatttaaatttttttcattttaacggggattaaaaaaaataaatttaaaatttttttttttttgggggcaaagtttggctttttggccaaggttaaaggccaggggggaaatctaatttaatggaaccttccgcctcggggttaaaacaattttgggggcctaaccccccggaaaactgggaacaacgggttggccccccaagccccagtaaattttggatttttaagtaaaaacggggttcccccttgtgaatcaggcgggtctaaaacccc

SEQ ID NO: 68708 - DNA, 996 bp, Homo sapiens
atcaggtttttttgttgttgagttgcagatattccttatgtattttggagattaaccccttaccaggtatgtggtttgcaagtactttctcctattccataggttgcctttttgctctgttaatcgtttcctttgctgtggggaagcttgcttgctgtagtctcatgtgtttatttttggtcttgttgcctggtctttggtgtcatgtccaggaaatcattgccaaggccagtgtcatgaagcttttcccctatgttttcttttacacgttggcggtttttatattccttgaatttgccaaatgtgtttccaccttagagtctttgcacttgatggtcctctgcctcctctgcctgccttttcccaggtcttcccaggtcaaacacacatccccaggccctccctgaccatagctctgaagttgctgagcagcttctattacatgattatcatgttttactttcttcattgaactgataatatgtatctgaaattactttgctcacttatttacaagtttgttatcttcctagaatgtaagcttcacgaaaggtgggatcttgtgtatctgttcatagtaataaacaaacatgtaaatgagcaaaatgctatatagatataaatgctctgaagaaaataaaaagtttcaaataaggactcagtaaatatttttgttttgaaatatttcatataaatgaatgaataaatctgtggaaatgcttcaaaattgtcaataagatactccatttatggctaagaggtatcttagttataaatcatatgaggcaactaattgaattgtgtccactatccactatatgagaaccaacataaaattcaatttattttgctaatttgagtaaaaagtttcttggtttttatgaagatattaaggaatccttaaaatccacccacaaggccaggcttggtagcttacatctgtaatcccagaaccttgggagactgcagtgggcggattgcttaaacccaggagat

SEQ ID NO: 68709 - DNA, 935 bp, Homo sapiens
ttttttttttttaatggtcataagggtgtatgggaaataaatatttattaaagaagatctaacattcacaagaacagcaaaagtgagtcacatttgaaccaagaccactcctttcctcccccaactccaaactcagcgagatcaaaactccattcgacgggtacagccaagaatacagggctccctctctctggagctccaaggcagagggctgtcttctcaggaaggacaatctgtcaggaattctcatcttgcctccagtgtgcatatttagatgaatgatgttcaattgccagctccctcataaaggccatcctcagagtttctgttttaagtgaggtcatattgattcagagacagtacataacctgtcaccctaaggcctttctccattctaaactttctggtgttgaatagggttaggcctttggctgaaacctttttccatattcactacattgtccacattgtaaactgtccagtgttgaatgagactggaggtgtggctaacggatttccatctgttaccttcaagattttttccactgtgaactttctggtgttgaatgaggttgaaacgctggctaaaggatttcacacaatcactgcatttctccagtgtgaatccttcgatgtttaaaaagactggagttgtggcgaaaaaacttcccacattccctgcactcataaggctttgctccagtgtgaaccctctgatgtttaacaaggctggaattctcactaaagaatctcccacattcattgcacttaaaaggtttttctccagtgtgaacttttcgatgttgcatgaggcttgagctttggctaaaaaatttcccacattcactgcactcataaggcctttctccagtgtgaacacgccaatgattgataaggctgaacttgtggctatagaattttcccccacgcgtccg

SEQ ID NO: 68710 - DNA, 732 bp, Homo sapiens
gtctgctccgggagccggctctgctgcaggtgcgagatctgagccagcgagggcgcggcgtgggggaggcgcgagtcagctccttgacttgggtgggcccctctccgcctctccgctctacgcatgcgctcctacctgagccgagcctacaatccaaacctccctcgcccaactctgcccgccacagatgcccctgggctcccctccagaccctgccccgcatccccgccagcctgaagctcctgcgcacctgggctgggggagccggtcggcacccccggagtcggagcatcaccgccgctcggagttgccacagcgacggggaggatctcgatggagacagcatcccccggcccccgcagaatacggattaaccccttctcctccagctcctccaccttcagctccagggccgagggccgcgtcggggcagcgggaggcgctttctcaggctctgggggacgcctggaggcgcccatggcggtcgattcgctgaagcgctcctacgaaccccacgggaggggtcagtgcccaccagcaggctccttggcaccaagcctccatcttcttcccggggtggagggagatgtcaagcctagaagcctcagctggcctgttcttgggcgcctggcctaccacccgccccagcctcacccgcagggtctccaactccttgcgcgcctggcttagctggttttcccagtctgcattcttggccatggattcgtctcc

SEQ ID NO: 68711 - DNA, 1031 bp, Homo sapiens
tttcgtgagctttcaaatcccaacttgcccctggggattgcgcggctgatgtttagaacgcctagtcaagccaaccggctcgctcttgtttcagcaaaccctgacttacgtctcctatttgacttgaggcggcacagtggccaagtcgattggccgtggcaagtgaccctccctgtggctgaagtgttctgaggactggcgagagaggcgcgccatgcttgccccctgctcaggttgggagcttggctgcttccgtctctgtctccgtcaggtccgactgtgggctggcgctgggcgctgggcttgctgggcttgccaagccaggccgtacagctcaggtgggagcgagcgctggcccggatcggagactgaggtccctccgcctggcccggcgcgccgaactctgaaggagtggacactgcaggtgagcccgtttggtcggctgcgggcgcggctcccgtgccacctggccgtgaggcccctggaccccctcacctacccggatggcgaccgcgtgctggtcgcggtgtgcggcgtggagggcggcgtgcggggcctggacggcctgcaggtgaagtacgacgaggatctggaggagatggccattgtgtctgatactatccacccccaggcgtccgtggaggtttagatatcaagtcatcagggtctggctgtgtaaaagttcaaagtattgagggtgataattgcaaaattgaaacagagcatgggactagtatcttgcagtctgttaagggtcaaaaattgcatgttcaaacaaaaggaggcgaagtgatctgtctgggaacagtttatggaaatatagatattcatgcatcagataaaagtgctgtgaccatagataaactgcagggaagttctgttactgtatctaccgaagatggtttgctgaaagccaagtatctttatacagaatcatcatttctgtcttctgctgctggggatattacattaggaagtgttcatggtaagctgagcaaaggcgtaatacatctgagactttccacgtagca

SEQ ID NO: 68712 - DNA, 567 bp, Homo sapiens
aacattggcttgagattccaagcagaaatccctgaactccaagatatctctgccctggcccaggacacacacaaggccacactggtatggaagccctggccagaactagaaaaccatgacctccagcaaagagtggagaatcttctgaatttgtgcagttccagtgcattgccaggtggagggaccaattctgaatttgctttgcactctctgtttgaggccaaaggtgatgtgatggttgctctggaaatgctgctactgcggaagcctgtcaggttaaaatgtcatcctttagcaaattaccactatgccggttcggacaagtggacctccctagaaagaaaactgtttaacaaagcactagccacttacagcaaagactttatttttgtacagaagatggtgaagtccaagacggtggctcagtgcgtggagtactactacacgtggaaaaagatcatgcggctggggcggaaacaccggacacgcctggcagaaatcatcgacgattgtgtgacaagtgaagaagaagaagagttagaggaggaggaggagaggacccggaag

SEQ ID NO: 68713 - DNA, 522 bp, Homo sapiens
agtcgacgatttcgtgggcattccgtcccgccccgccgccggtgcagtgttggaagctccggttctcccggaagtggcccaggtctctctgtcggggtcccctccatctcgctgctgctgaaggccgcgagggcggcggcgatggcggaggcggcgctgttgctgctgcctgaggcggcggcggagcgggacgctagggaaaagctggctctctgggatcggagaccggacacgacggcgccgctgaccgacaggcagacggactcggtattggagctgaaggcggcggcagagaacttgccggtgccagctgagcttccaattgaagacttgtgcagtttaacatcccagtcactgcccattgaactgacttcagtagtgcctgaatctacagaagacattctcttgaagggcttcacttccttaggaatggaagaagaaagaattgaaaccgcacagcagtttttctcatggtttgcaaagctgcaaactcagatggatcaagatgaaggaactaaataa

SEQ ID NO: 68714 - DNA, 601 bp, Homo sapiens
tttcgtgcaacgcggcgggacctggccagcgctgctggcgggcgttagggtatttctggaaaactgaaactgtttttcctctactctgataccacaagaatcatcagcacagaggaagacttctgtgatcaaatgtggtgggagagggaggttttcaccagcacatgagcagtcagttctgccgcagactcggcgggtgtccttcggttcagttccaacaccgcctgcctggagagaggtcagaccacaggcggccaccatgctgccactgggctcagagcccgccctgaatgagctgctgcttcgcaaggaggaggagtggagggcgctgcaggcacaccgcacccagctgcaggaggcggctctgcaggacacacggagccagctggaggaggcgcaggggaaactgcggtgtctgcaggaggactttgtctacaaccttcaggtgctggaggagcgggacctcgagctggagcgctatgacgccgcctccgcccaggccagggagtgggaggaggccaggcgggcagaggtgagcgagctcaagatagaggcagctaagctgaggcaggcgctagccagagaggccaggaaggtggag

SEQ ID NO: 68715 - DNA, 1262 bp, Homo sapiens
tttcgttggaggtcctgcagttgggcaggaactccatccggcagattgaggtgggggccttcaacggcctggccagcctcaacaccctggagctgttcgacaactggctgacagtcatcctagcggggcctttgaatacctgtccaagctgcgggagctctggcttcgcaacaaccccatcgaaagcatcccctcttacgccttcaaccgggtgccctccctcatgcgcctggacttgggggagctcaagaagctggagtatatctctgagggagcttttgaggggctgttcaacctcaagtatctgaacttgggcatgtgcaacattaaagacatgcccaatctcacccccctggtggggctggaggagctggagatgtcagggaaccacttccctgagatcaggcctggctccttccatggcctgagctccctcaagaagctctgggtcatgaactcacaggtcagcctgattgagcggaatgcttttgacgggctggcttcacttgtggaactcaacttggcccacaataacctctcatctttgccccatgacctctttaccccgctgaggtacctggtggagttgcatctacaccacaacccttggaactgtgattgtgacattctgtggctagcctggtggcttcgagagtatatacccaccaattccacctgctgtggccgctgtcatgctcccatgcacatgcgaggccgctacctcgtggaggtggaccaggcctccttccagtgctctgcccccttcatcatggacgcacctcgagacctcaacatttctgagggtcggatggcggaacttaagtgtcggactccccctatgtcctccgtgaagtggttgctgcccaatgggacagtgctcagccacgcctcccgccacccaaggatctctgtcctcaacgacggcaccttgaacttttcccacgtgctgctttcagacactggggtgtacacatgcatggtgaccaatgttgcaggcaactccaacgcctcggcctacctcaatgtgagcacggctgagcttaacacctccaactacagcttcttcaccacagtaacagtggagaccacggagatctcgcctgaggacacaacgcgaaagtacaagcctgttcctaccacgtccactggttaccagccggcatataccacctctaccacggtgctcattcagactacccgtgtgcccaagcaggtggcagtacccgcgacaaacaccactgacaagatgcagaccatgtatt

SEQ ID NO: 68716 - DNA, 1055 bp, Homo sapiens
tttcgtcacgaccacaccaaataacagcagcagagggaggtgggggagagggaaataaaggggagtcatgcttaaaatgctacagcggtgtgaaacagcagagcaaagaagcgcccccagcttctgagagccctggcccgagtcccctcccccgttagaaacagggctttgggatggtcatggagcactgccagtaactccaaccgcagcacgccggcctgctcgcccatcctccggaagcggtctcgctcgccaaccccgcagaaccaggacggagacaccatggtggagaagggctcagatcactcctcggacaagtccccgtccacaccggagcagggcgtgcagcgcagctgctcctcccagtccggccggagcggcggcaagaattccaagaaaagccagagttggtataatgtgttaagccccacctacaagcagagaaatgaagacttcagaaagctctttaagcagcttccagacacggagcgcctcattgttgattactcatgtgcactccaaagagacattctccttcagggccgactctacctctctgaaaattggatctgcttctacagcaacatcttccgctgggaaactctgctgacagtccgtttgaaagacatctgttccatgactaaagaaaaaacagctcgcctcattcccaatgccatccaagtttgcactgattcagaaaagcacttcttcacttcgtttggggcccgggataggacatatatgatgatgttccggctctggcagaatgctctccttgaaaagcctctgtgtcccaaggagctctggcactttgttcaccagtgctatgggaacgaattgggcctgaccagtgatgacgaggactacgtgccccctgacgacgacttcaacacaatgggatactgtgaagagatccctgtggaagagaatgaagtgaatgacagctcatccaagagcagcatagagaccaagccagatgacagtccacagctgcccaagaaatccatcaccaacagcactgtagtggcgcgctctctgaatcaacttggtcgtcg

SEQ ID NO: 68717 - DNA, 388 bp, Homo sapiens
ataacacttgtttgggaggcctcggtcagtactcttcatggctggttcaggatgccattactcaggcccaggtttgctatgcgtcctgcagaatccggctagaatatgataggagctccagctctgcaaggagtcctggccaacccgtgtgccgtcttgctcagagcacgcacaggcagtccgggccgtgagcgactagtatcaggagtttctccgcaagcagtagagctagttcttggatgtgatggccagcgttcaaatagagaatgctgagctcaaggtcaaggccgcccagctagaccatcagcagcagtgtctggaggatgcagagagcaagcacagcatgagcatgttcaccctgcggggcaggtatgaggaggagagtatt

SEQ ID NO: 68718 - DNA, 888 bp, Homo sapiens
tttcgtaaagaaggttccaagctggagctcccagggagatggggaaagtcgggggaatggcagccctgtgtggcacctggagacaggggtgccaggaagagaacgggcaggatgcccatgctgatcagaggctcagtacgaggacagaaatgaccttcagcatcggcccagctgagagccagcctggaggttacccagcagcaggccacccaggccgaaggccagctactagagctgcgcaagcaaagcagccagatccagaactcggcctgcatcttggcctcctgggtctccggcaagttcagcagcctgctacaggccctggaaatacagcacacgacagcactgaggagcatcgaggtggccaagacgcaggcgctggcacaggctcgagacgaggagcagcggctgcgggtccatttggaggctgtggctcgccatggctgcaggatccgggagctcctggagcaggtggatgagcagaccttcctgcaggaatcgcagctcctccagcccccagggcctcttgggccactgacccctctgcagtgggatgaagaccaacagctgggtgacctgaagcagttgctaagccggctgtgtggcctcctcttggaagaggggagccaccctggggcaccagccaagcctgtggacttagcccccgtggaggccccaggtcccctggcaccggtcccaagcacagtttgtccactgaggaggaaactctggcagagtaaggaggccgttcgtgtatgtgtgcccctgtgtgtgcgtgagcaaggaagtgcctgtgtgtgctgtgagcacgtgtgtgtgtgcatgttcgtatgcacgtgtgagtgaggggggcacttgttttgactgtcctgccgggacatctgagcc

SEQ ID NO: 68719 - DNA, 414 bp, Homo sapiens
gaaaggaaataatgttatacagaaaaagggaaaggggtgtctagggcaactagggtgaatatttgaaaagatatgctctgacacgcaagaatttatttcaccagaaataaatccacaaatttgtagttggttgatttttgacaaaggtgccaagaacatgccacaggaaaggacagtcttttcaataaatggtcttggaaaaactggctatctacatgcagatgaatgagaccaggcccttatttcacaccatatacaaaaatcaactcaaaatagattaaaatgcaaacataagatgtgaaactgtaaaactactggaagaaaacacaggggaaaatctccatgatactggtctgggcaatgttttcctggatatgaccccaaaaacacagccaacaaaacaaaaatagacag

SEQ ID NO: 68720 - DNA, 929 bp, Homo sapiens
ccgtgtggtggaattcccaactcattcagtgacaacacgttgagatcttgaaactggccacagcatggatatttacaccaaagaaattggcaaatgctataaaccatggatttttttttcttttgagagagagcaagctcaatattccaacttaccagctcactcctgaccctcaccacccactcttttggagcaggtggccagaggaaggggcaccctgagcttagctccccggcagggcaggaaagggcagggattctgaagtccacacacaaactcaggctcccctaccccagccaaggtgcattttcccttccacacctgtgacctgaggatcgacggagactgcttcatggtgtcttcagaggcagacacctattacagagccaggatgaaatgtcagaggaaaggcggggtgctggcccagatcaagagccagaaagtgcaggacatcctcgccttctatctgggctgcctggagaccaccaacgaggtgattgacagtgacttcgagaccaggaacttctggatcgggctcacctacaagaccgccaaggactccttccgctgggccacaggggagcaccaggccttcaccagttttgcctttgggcagcctgacaaccacgggtttggcaactgcgtggagctgcaggcttcagctgccttcaactggaacaaccagcgctgcaaaacccgaaaccgttacatctgccagtttgcccaggagcacatctcccggtggggccctaagtcctgatgtcagaccacatggttacctcgtctgccctggtagcaccttatctgtttacatatacgaacacaatgctggatcattgccccattttataccataagaattattcttcgataaatatcatacattatcacatgctctctattctaattattactactgcatcctaaat

SEQ ID NO: 68721 - DNA, 387 bp, Homo sapiens
caagttctcaattcttaagagacatggcgataattcatgctgaagaggaactctacaaacctgaaagatgcaacagtgcttttaccaccacctccaacttttgtatacataaaaataaattatactaatgtgaaaccctggaaatgtatgaaatgagacaaagcgtttatatggttgccacacttgattgtaggtaagagaattaatgctgccaaaactcctacaagtgtgaagaatgtggcaaaacttttgagtgcttacaccttatttcacaggaaagcttttatccttgagaaaaatcgtacagatataaagaatatggaaacgccattaacgcccactcacatctcaacagaaggttcatagttaataaaagcaataaaagtg

SEQ ID NO: 68722 - DNA, 438 bp, Homo sapiens
cctttcgagaccctagtcagtgtggtggaattccctgcagagcggcggaaccacgcgcgggagctggtgcggtcggaggagctgggccgctgggacgctctggtggtcatgtctggagacgggctgatgcacgaggtgaggaccgcactgcgcggctaggcctggggcttggcgcggtgcgtcccaggctgaggccacgtgtgcttcaacaggtggtgaacgggctcatggagcggcctgactgggagaccgccatccagaagcccctgtgtagcctcccagcaggctctggcaacgcgctggcagcttccttgaaccattatgctgggtgagagcccagggccagagtaggcctgtttcccgtcagtgctcctctaccgcgggggttttcttgtctaagctcccataggctgagatcatttccatttccccttctcc

SEQ ID NO: 68723 - DNA, 511 bp, Homo sapiens
atcgaataactattcagagtggcggaattccaacatttctgcagaaatagaaaaatcaatcctaaaattcatacagaatgtcaagagacccccccccccgatactcaaaataatcttgaaaaagaacaaagttggaagtcttcacttactgatctcaaaatttaacacaaaactacagtaaccaacagtatggtactggcataaaaattagcatataaaccaatggaatagaataaagagcctagaagtaaatctttacacatatagtcagatttttgacaggggtgccaagaccattcagtggagaaaatagggtcctttcaacaaatggtgttgggaaaactggatatctacatacaaaaaaaagttggacccttacaccatatacaaatattaacttaaaatccatcaagaactagctccatccactaaggttggaagaaaaaagagagctagaatcattaaactctttaaaaaagaagaaaaagaattattggccccgtgtggtggg

SEQ ID NO: 68724 - DNA, 668 bp, Homo sapiens
ttcggcatgaggccgctcacaggttccgcccttggcctctggtcccgccccactgccagcacctggagcagtttccgcagtcgatgatggcgttgtaggaggcgtttaccgagccgaagtagtactgggtctgtttcatgacgcagctgctctcgcgcgtctcggggctcccctcggcctccgcggggtctgcgagggcccagagcgcctcagctccgcccacagaccctggcaaggtctccggcctccctcagtcgtagaccccaccctccccatggagtcgtcttagctcagattggggacccggacttgaggaggcgcctccaaagccctacctacctgcttggaaccagctgtggtagatgaggccgtagagaagctgctggaacagggacctgcagcgcacggggagccgagtgcaggtggtcagcagaggacgatgccatgccctacttctcttctgagccctcccggccagggagcaccttctctacccacctcccgctcaggactcaccaggcggcagcagaggtccaccaggccaggttaaggaaatctgcaacggtgggctgcagtggagagaggggcgtggactgccactgctgcccctcgccctaggtcacccccagctttatcaaatgtcagaggtagggggtcatctgtgggcc

SEQ ID NO: 68725 - DNA, 1891 bp, Homo sapiens
  misc_feature (1)...(1891): n = a,t,c or g
gcggtggaattcctggcaactcgtggtggccgcttcaggaggtgagcctggtctctgccttgcattcattctggctgggttgggcgttggtttctgtcgatcctcctgttgtttacctcctgcagacactgctaggggctctgtgagccagcagctcccccatccgccctccccatgtcagccacctactgtgtgggagatgttgccaggcagggcctcaggaggacacccctgggtcagggctccccagacacctcagagacaccccagaatcctaagggcagcagtcgggtactctgccccggggaagtgggtgccagttcgtctcctgccttctaggtgagcagctattcctggagccagagctggtcatcccccaccgccagcaccgactcttcacggcccccacattcactgggagcttcctgtcaccctggccaccagcggtcactgatgcctccttcaaggtgaagagccacgtctacagcctggagggccaggactgcaagtacaccccgatgtttgggcccgaggcccgcaccctggtcctgcgcctcgctcagctcatcacacaggccaaacacacagccaagtccatctccgaccagtgtgcggagagcccggctggccactccttcctctcatggctgggctttagctccatggacaccagtggctcctacacagccaacgacctggacgagatggggcaagacagtgtccggaagacagatgaatacctggagaaggccctggagtacctgcgccagatattccggctcagcgaagcgcatctcaggcagttcacactcgccttgggcaccacccaggatgagaatggaaaaaagcaactccccgactgcatcgtgggtgaggacggactcatccttacgcccctggggcggtaccagatcatcaatgggctgcgaaggtttgaaattgagtaccagggggacccggagctgcagcccatccggagctatgagatcgccagcttggtccgcacactctttaggctgtcgtctgccatcaaccacagatttgcaggacagatggcggctctgtgttcccgggatgacttcctcggcagcttctgtcgctaccacctcacagaacctgggctggccagcaggcacctgctgagccctgtggggcggaggcaggtggccggccacacccgcggccccaggctcagcctgcgcttcctgggcagttaccggacgctggtctcgctgctgctggccttcttcgtggcctctctgttctgcgtcgggcccctcccatgcatgctgctgctcaccctgggctacgtcctctacgcctctgccatgacactgctgaccgagcgggggaagctgcaccagccctgaaggtggcagctgccttcagagcaggctggagggatttgccacacagccccacccttgggctgagaggacctgggaagcccctccaggagggaacacggtcatcctcaggcttctggagcggggttcctgcagccgcagaggcatctggaggaaacacaaccaagaaaggaaggcagttgggccccagcaaaggagtggctaccagggctcaacagccacgctctgtgacagcgcagagctcagcgccggcctttccctccctctgccaaggactcatggccaagccagctctcggggccttttttccagtgcccatttggctactctgctgcaccaagcttgggagccagcctgccaagagccgcctgggcctggcctccccactggctggccttgaggtaggcagagtgggttgtggcgcctcctctctctgtntgggaccaggacggtggcttaagtntccactccaggaaagaatcaaagtttctagagttgtgagaaaaccagagagtggctctcct

SEQ ID NO: 68726 - DNA, 2242 bp, Homo sapiens
tgcggccgctgcagagcaccgagctgtgtccgggcgggggagcccgcgttgtggcagtggcggcgctccgaggccgcctggtgtggtgcgaggagcggcaggcccgggccgagggcccgtcagggtcgccagcagccgctttcagccactgtgtgtgcgtccggactctggagcccagcggggaagctagcaccagcctgggccgcacacacgtcctgctgcaccactgccctgcctttcgggctgcctgggctccctgcagacaactcttcctggtgcccactgccaccacctggcctggcgtggcccacgttctactcatctggagcccaggcaagggcaaagtgatggtggctgccccacggcttggtctctcctacagtaagagtctgaatcctggacgaggggacacatgggacttccggaccctgctccgaggccttcctgggttgctgtcccccagggagccactggctgtacacacctgggccccaactccccagggcctgctgttgcttgacttcgggggcactgtgagcctattgcagtcccacggtggtacgcgggctgtgggcaccctgcaggaggcacctgtaggcccgtgggggtctgcagccctaggcacatttcagggcactctggcctgtgtgctgggctccacattggaactgctggacatgggcagtgggcagctgctggagaggaaggtcctaagtacagacagggtacatctgctagaaccgccagcccccggcatggaggatgaggaagagctggagacccgagggaatcttcgtctgctttcagccttgggtctgttttgtgtgggctgggaagccccacagggtgttgagttgccttcagccaaggatctggtgtttgaggaggcctgcgggtactaccagcggcggagcctgcggggtgcccagctcactccagaagaactgagacacagcagcacattccgggcacctcaggctctggcctccatcctccagggccacctgcccccatctgcactgctgaccatgttgaggaccgagcttcgggattaccgaggcttagaacagctgaaggcccagctggtggctggggatgatgaggaggctggttggactgagctggcggagcaggaagtggcacgcctgctgaggactgagttgataggagaccagctagcccagctcaacaccgttttccaagcccttcctacagcagcctggggtgccaccctcagggccctgcagctccagctagatgggaatggcaagctgaggtcccaagcaccccctgatgtgtggaagaaagtgttagggggaataaccgctggaaaggaaccccccaatggaatactgcccccctttgaactcctgtgccagtgtctgtgccagctggagcctcgatggctgccaccctttgtggagctggcacagcagcagggcgggccgggctggggggcagggggcccaggactgcccctgtatcgccgagctctggcagtgctaggtgaggaggggaccaggcctgaggctctggagctagagctgctcttgagcagtgggcggcctaaagctgtgctccaagctgtcgggcagctggtgcaaaaggaacaatgggatcgggctctggatgctggcctggccctcggcccctccagtcccctgcttcgaagtgaaatcttcaaactgctgctggccgagtttgcccagcaccgccggcttgatgctcacctccccctcctttgccgcctgtgcccaccagaactggctccagctgagctcctgcttctactgaggacatacctcccagatgaggtggggcccccaaccccattccctgagcctggagcagagccccctctcactgtgggcttgctcaaagccctgctggagcagactggggctcaaggatggctgtcgggcccagttctaagcccatatgaggacatcctatgggaccccagcactccacccccgactccacctcgggacctatgactacccttcaggcatcagaacactcagggcctggaggcttgcttgggactggaggcttgcttggacagttcctctgtgtcactgacacaggaaatcatttctaggacacagtgatcagggaagggtgcctgggacttggagggtcccatgtatggacctgtgtatgcaatactgttctgtcatctggagctatttttaagatgtgtgtgttaaatatatacatagtttaatatataaaaaaaaaa

SEQ ID NO: 68727 - DNA, 507 bp, Homo sapiens
ggaattcccactaactgatgacttctgtctttccagtactggatgaatcgaagttctagtttctccgctcgctccctcaggtccaccttctcctccaggaggtccataaggccactctggagccaaaataatggggtcacatctcggcagcaacacccacccctgcccttcttggcccatgccaggactcagtcacctccagcttctccatgacctcctgcatggcccggtgggtctccccactcacagactggcccctagtcactggggctgggaccgctgcctctggcttctgctgggctgaggccaccaggtgagccatgcgctggcagcacaccctctgctctttcacctgctctcataaccgtgcctgctcctcctgggcattggctccagcggagttgaaaaatgcaacctgagggcaagaggtgagcattcttgtaggggcatacacagaacgaacggggcagagaggtggagtgcagcctcttcccttggggcctcaga

SEQ ID NO: 68728 - DNA, 481 bp, Homo sapiens
agggatgagaccatatcagatgagacttccccccccaggagaacaagccgccccctgtactcatcacgctgcctgcagagcccacactgcccccagacgcctacagccacctccagggtcacctcggccacttccctgggcccgaacccctggccttccccgtcaaggagctgcagggcagtggggcccgacctggggtgcccctgtacccaccgggcctcagcgagctcaaggtggccgaggtcaaggagggggccctgctgggagcaggcaaggccaaggcccccaagacggccagagctttggcactgcctgacaaggttctgctggaggacgccatgaagctcttcgactgcctgccaggcgcctctgagcctgagggtaccctgtgcgaggtccctgggccggccctgcctgacagcagtggtgggaactcagccgatgacatccgctcgctgtgcctgcccgaggagctgctgtc

SEQ ID NO: 68729 - DNA, 1723 bp, Homo sapiens
taccagttctccaacaggcggctcatgcccttagagtacacatccccagcatctgtgcatcacaacactcggtccggtggtggctctgctcctacacacaccaggacctgggccttgagaggaccctccttcctgatatcctctacagagatgtggccttcctcaacccggtcgaccccatctcccatgacctgcttgtgaacctggcccgggacctgcagtgccccaagaagctgcccagaaccccatgctgacagcacctgcagatgtcctgccatgagcatcgacacagccccaggatgtgtggctgtgaccagccaccggacccagactcctagtcacagtgagtccccaaccaaaaccagggtatccgctctgggccctgccagctctgaatgcccaggtctctgcacagtcggcccctaggactctgcgcctagcccacggccatcacaggaacagccagggcttgcagctgctgtgtgtgctgcctgctcctggggctgctcacagagggactggataaaggatgcagtggagcatgctcagtgccagctttgtgggccgcgcacctcggattccaccctgagctgggcctctgccggagcccagttaggactgagagagagccaggtggtggtgctgtaaaacattacatcccccagccctgtcagcccagacccagaccccgcaggcgcagtctcgcttggagagtgagaggaagaagaacacgctgacctggcttgttcctactccctgggattggcgtcagtggagcacggctccctcgaggggcctggtctggcctcctccccctgtggactatgagctctggaagtcctcggacaagatctgccgacagctcatctaccacctcacccctcactcgaagcagcagcaagggtccagcctgcgccagaggaagacccagagctgcctcaagagcagcctccagaagactctgctggcaggggagactgtggacctctcaggcatcccgctgtcgacacaggacgtgcaacacatcacacgctacctgagcagccatggtgctgtgctggcggtgctggacctgagcttcacggggctgagtgatgagctgctgcacctcctgctgcccagcctgtgggcgctgccccgcctcacccagctcctgctcaacggcaaccgactgacgcgggccactgcccgcaagctcactgatgccatcaaggacaccaccaagttccctgctttggcttgggtggacctgggcaacaacgtggatgtggcttccctgccccagcccctgctggtcggcctgcgccggcggctgagccagcgcacctcactccccaccatctacgagggcctggaccttgagcctgagggcagtgcggccggggccaccacccctgcctccacctgggactccacagctgctgggctgggacccgagccccaggcctgctgtgccaggtgacccaccacccacctggctcattgctactgacttgtgatgctctcaagcacatgatagtgggcgatgaaggtcaaggaggactcacaggcccccagaaatccagtgtaaatgctcagcctgagattaaggggacagaagaatggactcataggtggccaggtggccagccctggctagaggctcagccttccctcagtgggaggggccccagcacccacagtgtggaccccgcaataaagagtgacacccgcaaaaaaaaaa

SEQ ID NO: 68730 - DNA, 489 bp, Homo sapiens
  misc_feature (1)...(489): n = a,t,c or g
gggaggagcggngcccgnnnnccctggtgactgacgacgtncgcangngcntnnggnatggaggtcccgggtccacccacgcgtncggaagaaagatgatgatattttgatagggattacactgaatttgtagattgcttttggcagtatggccattttcacaatattgattctacccatccatgagcatggaacgtgtttctatttgtttgtgtcatctatgatttctttcagcagtgttttgtagttttccttgcagaggtctttcacctccttgattatgtatattcctgagtatttctttttcagttattgagaaaggggttgaattcttgatttgattctcagcttggttcctgttggtgtataggggaggtactgaattgtgtacattgattttgtatgtggaaactttgctgaattcttctatcagttctaggagctttttggaggagtctttagggttttctaggtatacaatcatatcan

SEQ ID NO: 68731 - DNA, 623 bp, Homo sapiens
cggacgcgtggtgggcatgaaaacacggtaattcacagacacgcaggtgggcgtgaaaacacggaaattcacagacgcacaggtgggcgtgaaaacggaaattcacagacgcaggtgggcatgaaaacacggaaattcacagacacgcaggtgggcgtgaaaacacggaaattcacagacgcacaggtgggcgtgaaaacggaaattcacagacgcaggtgggcatgaaaacacggaaattcacagacgcacaggtgggcgtgaaaacatggaaattcacagacacgcaggtgggcgtgaaaacacggaaattcacagacgcaggtgggcgtgaaaacacggaaattcacagatgcacaggtgggcatgaaaacacggaaattcacagacactcgcaggtgggcgtgaaaacacggaaatttacagacgcacaggtggtcgtgaaaacacggaaattcacagacgcacaggtgggcgtgaaaacacggaaattcacagacgcacaggtgggcgtgaaaacatggaaattcacagacacgcaggtgggcgtgaaaacacggaaattaacagagacgcacaggttggcatgaccaggctcgcatgggcaagatgcggtgtttctt

SEQ ID NO: 68732 - DNA, 523 bp, Homo sapiens
tcaaatgcccatggactccactcctgccaccctgccttctctccctcagcctgcacagatggcttcatggggagttctctatgatcagttgacagaggaagagaagactaggggctgactcatagatggctttgcatgatacacaggcaccaactgaaagtggacagctgcagcactacagcccctttctaggacgtccctgaaggtcaacaatgaagggaaatcttcccagtgggcagaactttgagcagtgcacctggttgtgcactttgaatgaaaggagaaatggccagatgtgtaattatatactgattcatgggctgtagccaatggtttggctggtcagggacttggaaggagcatgattggaaacttggtgacaaatttggggaagaggtatgtggatggacctctctgagtggtcaaagacaagatatttgtatcccatgtgagtgctcaccaacaagtgacctcagcggaggaggggtttaataatctagtggataggatgacccattttgtg

SEQ ID NO: 68733 - DNA, 871 bp, Homo sapiens
ttttttttttttccggcactaagtcaagttctttacttcccagaagtgatggctaaggggagggaggagggtgagaagaggaagacagaaagagccagagagaatgaggaggtgagaagggggggacagtaaaccactgttctatgaagtctcacgaggcaagtgctcaaggtaaaaaaagagtcctggagaatcgtccacggctgcgggaagcatctcggtttccttctgcttttaagtcctctcagggaaggctgtcgccgctgccgctgcattaaatagttatgtacatcgcagagagtcccaggccatgggcaggtgggggaggggcgtcatttcaccaggggccgagttttatcatcgtcaccgcactggtgagctttgtactttttcacttctgccatgtacttggcccacgcgtcacctttacttgttaatacctcatcctccgtcttctgcttcttggctactattcccgtcttgagggctagtttgttcccgcctctgcgtttgcccacgaagctaagtgtggagcccggaccgcccttcctcttcggatccccggggccagcggcggcggccgactggtcgggtcgctgcggacccgggggcggctcctcctgccgctgccgctgctcctcctccatcttccgcttgaacagctccaggaagctgccgtcgttggcgaacaagttcacgccgcccgacaccgggctcgaacccgcgcccgacacctcctcgtccccgctctcgggcgacgtccccgatcccgactcagcccaacggctcccgccaccgccaccgcccgcggggcccggagcctcccggccctgaggctccgcccgtctccctcgggcagccattttgtcgc

SEQ ID NO: 68734 - DNA, 2219 bp, Homo sapiens
  misc_feature (1)...(2219): n = a,t,c or g
gaattcttggacacttgtcatctgtgtactgtgtaacttttgatcgaactggcagacggatatttactggttctgatgactgtcttgtgaaaatatgggcaacagatgatgggaggttgttagctaccttaagaggacatgctgctgaaatatcagacatggctgtaaactatgagaataccatgatagcagctggaagttgtgataaaatgatccgagtctggtgtcttcgaacctgtgcacctttggctgttcttcagggccatagtgcatctattacatcactacagttctcaccattgtgcagtggctcaaagagatatctatcttctactggggcagatggcactatttgtttttggctctgggatgctggaacccttaaaataaacccaagacctgcaaaatttacagagcgccctcggcctggagttcaaatgatctgttcttcttttagtgctggtggaatgtttctggcgacgggaagcacagatcatattattcgggtttatttttttggatcaggtcagccagagaaaatatcagaattggagtttcatactgacaaagttgacagtatccagttttccaacactagtaacaggtttgtaagtggcagtcgtgatgggacagcacgtatttggcaatttaaacgaagagagtggaagagcattttgttggatatggctactcgtccagcaggccaaaaccttcaaggaatagaagataaaatcacaaaaatgaaggttactatggtagcttgggatcgacatgacaatacagttataactgcagttaataacatgactctgaaagtttggaattcttacactggtcaactaattcatgtcctgatgggtcatgaagatgaggtatttgtncttgaaccacacccgtntcgatcctagagttctcttttctgctggtcatgattggaaacgtgatagtgtgggatctggcaagaggagtcaaaatacgatcttatttcaatatggttgcagggaggaaacccattcgttctggattaatggaactggaaaacagaaaacaattatcagattgaaggccaaggacatggcgcagtatttgactgcaaatgctctcctgatggtcagcattttgcatgcacagactctcatggacatcttttaatttttggctttgggtccagtagcaaatatgacaagatagcagatcagatgttctttcatagtgattatcggccacttattcgtgatgccaacaattttgtattagatgaacagactcagcaagcacctcatcttatgcctccctcttttttggttgatgttgatggtaaccctcatccatcaagatatcaaagattagttcctggccgtgaaaattgcagggaggagcaactcatccctcagatgggagtaacttcctcaggactgaatcaagttttaagtcagcaagcaaaccaggagatcagcccactgtacagcatgattcaaagactacaacaggagcaagacctgagacgttctggtgaagcaggtatcagtaataccagccgtttaagtagaggctccataagttctacctcagaggttcattcaccaccaaacgtaggactaagacgtagtggacaaattgaaggtgtacggcaaatgcacagcaacgcaccaagaagtgaaatagccacagagcgggatctggtagcttggagtcgaagggtggtagtacccgagctatcagctggtgtagccagtaggcaagaagaatggagaactgcaaagggagaagaagaaataaagacttacaggtcagaagagaaaagaaaacacttaactgttccaaaagagaataaaatacccactgtctcaaagaatcatgctcatgagcatttcctggatcttggagaatccaaaaagcaacagacaaatcaacacaattatcgtacaagatctgcattggaagagactcctagaccctcagaagagatagaaaatggcagtagttcttcagatgaaggcgaagtagttgctgtcagtggtggaacatccgaagaagaagagagagcatggcacagtgatggcagttctagtgactactccagtgattactctgactggacagcagatgcaggaattaatctgcagccaccaaagaaagttcctaagaataaaaccaagaaagcagaaagcagttcagatgaagaagaagaatctgaaaaacagaagcaaaaacagatt

SEQ ID NO: 68735 - DNA, 770 bp, Homo sapiens
atcatcaaaaagaaggccgatttcatgtggtttttcctggctgtcggtgagtccacagctaagaaaacactaattcagtacaacctaaagtgtaatctgctagtatcttttacagctggtggtggtaaaaatatgtgtacagcggaagaataattggacaaatttacaaaacttgtgaaaatgtaaggtggtttattcattgtgttattcatcagcaggtactttgcagaaaatatcttaatttatcatgtgttattgaactcttagcatcagtaattttacttggttttgtgaatcatcatcagttccataagtttttgtcagaaatagaagctgaatattctgatgtgccctgccgcgcagtagtttgatggcttagcagtggtagttttctttcaactttttgagctcagggctgagattgaaaattttctgaatgaggagaatcgctcccaaccactattgaatgctgaatggctttggaaattagcttttgctgcagactaggtaatgtttgttaatgaattcaacctaaaactccaaagtaaaacagtgcttatgcgaaccctatgcttcacggaagtcatgttgatgacagcaaatgtttaaatcataagtcatgttaaactgccttggatacttactgcgctggcaaaagtgaaaacaaaggcgagctctccattcctacacacatgttccaaatgcatgctatagttctatcacggattgtgcatctcaatgtgaacccataggacatttctctaattcct

SEQ ID NO: 68736 - DNA, 850 bp, Homo sapiens
  misc_feature (1)...(850): n = a,t,c or g
ctttcacaaaaatccatgaattattctttaataaaagaaactcttggccccgcttttttggatacacagaatgctttccattgaatcatttggtcataatccgggtacaaagcaaatttaacacgtgtgagagatgcagaaaaaggtcccttctatgtacaccttgccaaatacaagaacataaagaaagaaaaaagcaaagtttaagcctttaggtcatttgtaaaatgttgccaaacccatgctgctacttttaacagagaagtctgagttttaaaattcaaacgttcttttcttacaaagaaaaagtgcctctatctgccaagcgcatgatcttatgagcttcagatagaaaagtggctatgacttgtgactgtttttggttcagaacaatgctagatcaacatgcaagttgtatggaggtggggacagaaagggagcggcaggctggggtggctggtaatgtttgatccctctggatttcccacaggagaaaaggttctgcaggacgatgagttcacctgtgacctcttccgattcctgcaactactctgtgagggacacaactcaggtttgtgagtccccggaacttctgatgatactaaggcataaataatgttttcaagccagtaataacaagagcctgttagttccaattatgcatcgttctagagacagcaaatcattctagagcatggctctgcattgggatctgggncgttttatntttggggtccgcgcacgtccacaatntcaaannnncggcgcccaggggtcccgccccccgagacgaattagatagatggaaggtgtgaatggtggtaaagatggacaaagtgatgcggggtgg

SEQ ID NO: 68737 - DNA, 949 bp, Homo sapiens
  misc_feature (1)...(949): n = a,t,c or g
atttgatggtaatttgctgggattacaggcgtgagccaccacacccggccggaagatattaattcttatatgtgtatgttcaacagatactgaatctcaggtgaagcaaagtgccttcatcattgtagcaaatcctacatttaaatgaaatcagataagtactggcatataatcaaaatttattttttatgttgattcccaatcaatgatttttttttttcaaacaccaacaagacataaagtacttattatggaattttgtccatgtgggagtttatacactgttttagaagaaccttctaatgcctatggactaccagaatctgaattcttaattgttttgcgagatgtggtgggtggaatgaatcatctacgagagaatggtatagtgcaccgtgatatcaagccaggaaatatcatgcgtgttataggggaagatggacagtctgtgtacaaactcacagattttggtgcagctagagaattagaagatgatgagcagtttgtttctctgtatggcacagaagaatatttgcaccctgatatgtatgagagagcagtgctaagaaaagatcatcaagaagaaatatggagcaacaagttgatctttggaggcattggggtaacattttaccaaggcaagcctactggatcaactggccatttaanacccctttgaaggggcctccgtanggaataaagnaagtgatggtataaaaataattacagggaaaggccttctgggtgcaatatcctggagtacagaaaagcaagaaaaatgggaccaatttgactgggagtgggaagacatgcctgtttcctgcagtccttcctcgggggtcctcagggttcctaacttaccccctgttcttgcaaaacatccttgaaagcagatcaaggaaaaagtgttgggggttttgaccaagttttttgcaagaaaactagtggg

SEQ ID NO: 68738 - DNA, 703 bp, Homo sapiens
cggacgcgtggggtatttttttgcagccattctgatgacagagaaagcagatgcagaagagaatttggaagatgccatggaggaggttcgtaaagtgaatgaaagcatcaagtataatcacccattgagaaaatgtgttgatacaatacttaaaaagtgccctacagagtatcaggaaaaaatgggtaggaacatggatgattatgaagattttgatgaaaagcatagtatctatccaagtgaaaaaagtctggtaaaactgcataaacaggtgatttattcagttcagagacaccgtcgaactcaagtacaatggcagattcttttggaacaagcattttatctagaagatgtagcaaaaaatgaaactagtgctactcatcagtttgttcacacctttcaatcgccagagccagaaaatcgatttatccaatatttttataatcctacatttgaatggtactgggaatgtcttttgcgaccatggttttacaagatacttgctgtggttctgtccatcttctctgtgattgttgtgtggtcagagtgcacattctttagcactactcctgtcttatccctctttgcggtcttcatacagctggcagaaaaaacatataattatatttatatcgagattgcctgcttcctttccatcttcttcccaagtatctgtgtttattctactgtgttcaggacgaaa

SEQ ID NO: 68739 - DNA, 439 bp, Homo sapiens
atttaaaccatatgatattgatatttgcattaattacagaaggtctaaatttcagttaaaaggcagagattatcagattggctagaaaagaagatgcaactatgagctgtctacatgagcccaccttaaatactaagactcagataaattaaaagtataaaaggatagaaatagatatgccatgcagacattaatctgaagaaagctggagtagctatgttaataatagacaagaagatttcagagcaaagaatttacagaggtaaagagagacaattcataatgataaaggggtcaagacatcaagaatacctaacaatcttaaatgtttatgccagagcttcaaagtacatgaagcaaaaactgatgcaattgaaagaagaactaactccacatttgtagttcaggatttcagctggtagaacaagtaaacagaatc

SEQ ID NO: 68740 - DNA, 458 bp, Homo sapiens
ccggtcgacccacgcgtccgttagggatgtcaagcatcaaatagatggaattatcttggctttcgcctcctcttcagtaaccagagcatccatccccaagtgctgtcttcactcatggttctcaactacgagtccatgcattttctcttgtaaaaactgattttctagcaaaagtttttggttctgttctaaatctaccacttgctgtttcaggtcactcatttgagcttgctttctgtctctggcagtttgagctgctaatcctgtttttcctcctcagtgccttctccttggggctccccacccccacagcactcaccatctcctggctggctcctctctgggctggcaccatgagcagcagggcctagctggccaaggctgtagcagcaggctgaccagacagaagcagtactttggaggccctgacggccagcctgattcagttcagattgatt

SEQ ID NO: 68741 - DNA, 761 bp, Homo sapiens
ggaaaaagaaaaaaggggttcagttataaaaaataaaaggagtttgtttaatatgtcaaaaaaaaggtttttaaagacttaaaaaggataaaagaacaaaaaactattaaaacgggagggtagatatgaaaaacaaccaaataaaacttctagaaatgaaaaagtgtgaataataatgaaactagaaacctcaatggattagacacagctaaagaaggaattaatgaaccagaagacagcactagagaaattacccagaatccagtatagaaagacaacagaatagaaaacgagaaagagaatttgaaaacatagaggttagtctaagtagatgcaacatacatagctaactggaattctagaagaaaagaaaatggagtatagtaaatatttaaagaaaacataatgaatgagaattttctagaattgatgaaagacatgaatcctcagattcagggagctcagtgaatcccaaatagtataagtagtgacaaatctacacctacacattttacagtgaaacctaagaacactgaagacaaatgattaaaagcatagaggaaaaaatcaattatttataaaggaacaacagactgaaagctgtctttcacaaggaacaaaaaaagccaaaagatattaatactgaagatatcaaaatactttgatgtctttaaagtgctgacaaaaatgatcaacttataagttcatacacagccaaaaaaaactgttaggagaggcggctttaaaaagttaggagaggc

SEQ ID NO: 68742 - DNA, 630 bp, Homo sapiens
attaaagaagacctaaataaatggaaaaacatcccatgttcatggatcagaagagttaatgctgttaagatgacaatattcctcaaacttgtctgcagattcagcataatccctgtcagaatctctgctgacatctttgcagaaattgacaagctgatgctaagagttatatgaaattgcaagggacccagaatagccaaagaaatcctgaaaaagaataaagtagaaaaacccacatttcttcattttgaattacaaaacaatagtaattaagaagtgtgttactggcacaagggtagacatagatcattgtattttttaaaaaatggtgattccagaaataaatgcaaacatctgtagtcaactgattttcagtaaaggtgccaagtccattcagtggggaaagaacagtcttttcaacaaatggtgctgggacaagtggatagtcacgtgcaaaagaatgaagttggacacttaccttacattatatttaaaaagttggctgggtatgacggcccatgcctgtagtcttagcactttgggaggctgaggcagaaggatcacttgaacccaggagccgagattgtgccactgcgttccagcctgggtgacagagtgagactctgtctc

SEQ ID NO: 68743 - DNA, 716 bp, Homo sapiens
  misc_feature (1)...(716): n = a,t,c or g
gataaagttggggggggccgcttaggaaaaaacccagcggggaaaaagggagggggcggagggggataaaatgggggagggccgggggtttcccgggccggcgggggaaaaaannnnnnnnnnnaaggaaaataaggggccccnnnnnnnnnnnnngggggggggaagcaggggaggggggggcgggacctcttannnnnnnnnnnnnnnnnntgnnnnnnnnnnngttgagacagagtgaggcacggcctccggggcaggagtgcagcggcgtcctcttggtctcttccacctcctcctcttcaggtgttcctcctcctcctcttcatctcttcctcctcctcctccatctcttcctcttcctcttcatctcttcctcttcctcccccatcttttcctcctctttcatctcttccttctcctcctcctcatctcttgcttctcctactgcatctcttcctcctcctctttatctcttcctcttcctcctgcatcttttcctcctcctcttacatctcttcctactccttctcctctatctcttcctcctcctcctcttcatctcttcctcttccatctcttcctcctcctgcatctcttcctccttctccatctcttcctcctcctccttatctcttcctcctgctccatctcttctatgtgctgtcctcctcctcttcttgctgtagctcctcctcctttgccccctttcgcct

SEQ ID NO: 68744 - DNA, 1578 bp, Homo sapiens
ttttttttctgggccacactgagtgaattttaatgcaggatggaagcacacagatgggtgatcaggtcttctctttactgaaacacagaacatgtgccaaggtgagtccaaggacacctctgggaacaggtgaagcccctccccacacatacactccggtggatgtgagcgagggtcctgttgccacatctggggtcaggggcttggacatgctgcccttcatgggaaccttctgggtacctctcagcacagtaacgcagctgcagtctgtcggtgggggcccaggctaggggcagcaccctcttttggcatacgggacatgcctggctgcagctgatgtccgttagcctctcctgacacgcagtaaggagacctggaagtgaggcgcgtgggcgtggagttcccggtggagctgctgcatcagcctttctgccactctggggtcagtgaggtcttccggggaagccacactcagccgcaggaggaggaaacctccattttcacctgcactcacgtctgtggtcggcctcgtccgggcagtcgtgggcgtggctgttgggggcttcatcgtggtcttcgctgaggttgtgatcttggctaaggtgctgttcgtccctcggctgctgttggttgtagtcggagggacagaaggaagagggtccctgctggtggggaagggccccttggttgtgatgtccatggtcagtgtctctgaaggggtgaagttcttgagggcggcttccgaggggctgtaggaggaagcagagctcccagcaaaggaagttgttttgcccactgctgacccagcctctatggagaccggagctgctcctgagactttgacgtaacttggtgtctcaacagagagggctgaggtttcttccaggggattcctgctaactgtgaccagagctccactgagggtcgtggccccgggtgctgtcacttctctttctgtggcgctgttagtggggagtggggtcccaaccgtggcatgaggtgcagctgactctgtggtgccggctgtggacagggtctcggcagaggctgtgacctcagtgatgtgtggttttgcttcagtggagtcaggcagagctggtggatcggaggtggacgaggccttcaccccttccgtggggatgagatctgtgtctgaggccccagggatgctggaagtcgttgtttctatttctgtgatgctgcaattaataacctcgatgtttgtgacagtcaccagggcttcagcgaggagagtgacgtcagatcccggggaccatgagggggtgatgactggatgggggccgtcggaagaggcgctgctctctgaggcccgtgacggggtgatgactggatggaggccgtcggaagaggcgctgctctctgaggcccgtgacggggtgatgactggatgggggccgtcggaagaggcgctgctctctgaggcccgtgacggggtgatgactggatgggggccgtcggaagaggcgctgctctctgaggcccgtgacggggtgatgactggatgggggctgtcggaaggaattccaccacactgactagggtctacgaaggtttcta

SEQ ID NO: 68745 - DNA, 462 bp, Homo sapiens
  misc_feature (1)...(462): n = a,t,c or g
tgagccatcgcgcccagcctattttccaactttcagaattatttttaaaagttgttttcactaatctaggtcctttgcatgtccatatgtattttagaattgagttcccaatttctacaaaacaaaaagcctcctgaatattcaaaatgggatttcactgaatctataggtcaggttggaaagaattgacatattaatggtattgagtcttgtagtctctgaacatagtatatctctatttaggtcttttttaaagttctcccagaagtgtttttaatttttatactatacatcttgcacttcttttgccagatgcatcactatgtatttcatattgtttatggngttataaatggcatttaaggttttaaggttcagattgttcatggctagttcatgcaaaatcatctgctttatatatattgatctttattttgcagtctcactaagctcatttagttt

SEQ ID NO: 68746 - DNA, 419 bp, Homo sapiens
aaaaatagcaattataaatatatatgcactcaatatcagactatataaaaaagtgaacattaaagtaactgaagggagaaataaacaacaatacaataatagtaagagacctcaatatcacactttaataatggatagaatatccagacagaagaccaataaaaaaacagaggatttgaacattattaaccaaataaccctaacagtcgtatgcagaacagttcatcccaaaacagcagagtacacaatttttccaaatacatatgaaactttctctaggatagatctagcacgttaggtcacaaaataagtcttaataaatataagaagattgaaatcatatcaagtatctttactaactacaatggaatgaagctaaaattcaatagcagaaggaaaacgtggaaattaaacaacac

SEQ ID NO: 68747 - DNA, 1052 bp, Homo sapiens
  misc_feature (1)...(1052): n = a,t,c or g
cggacgcgtgggcttttaaccagttctctaaccttactgcacgtaagataatttatactggagagaaaccctacaaatatgaagaatgtgacaaagcctttaacaagttctcaacccttattacacatcagataatttatactggagagaaaccctgcaaacatgaatgtggcagagcctttaacaaatcctcaaattatactaaagagaaactacaaacctgaaagatgtgacaatgattttcactacacctcaaacttttctaaacataaaccatattggtgccctagaaatgtgaggaatatgacaaggactttaaatggttgtcatgcttgattgtaggtaagataatttatattggagaaaaatcctccaagtatgaagaatgtggcaaacttttaaccaatcctcacaccttattgcacaggaaagcatttatacttgagaaaaattgtataaagaatatggaaaagccatttatatctgctcacatgtaaaaacatcagttcatacttaataaaatgcaattaccgtcaaatctttcagaaaatataagcctttaatacgaggaagagtattcttaagatgaacattacaaatagaaagagggttgtagtacctttagttttatgatagatcttattgtacacattttgtaccagaggaaaaccctaaagcattagttgctcaaactttgttcgacatcagggaatttgtattggagaaaaaccctgcaaatgtaataaatatggaaaaacattttttcaaaaactacagcttggaaaacatcagagagttcatactaaaatatatttttgcagatgcagtaaatatgaaaaatatttaatcccaaattaagtctatgtaaatatcagaattcacagtaggaaatcataaggcataaggcactgatacttcagacattacacttaaattaggagtgttgagtatagggagatcccaaaacttaaaattgtttagggtaagttattttatattattaactttaaaaaggaagttaggaaggtttttttgggaggttttttanttac

SEQ ID NO: 68748 - DNA, 762 bp, Homo sapiens
gcctcccaaagtgctgggattacaggcctgagccaccccgcctggcaccttactatattttaatgaatgaaatgatgtagtatggaaaaaaaaaaaatccctaaatggagacctgagtttccatctcatctttgctacttaattctgaggtttcaggaagattatttaacctatctgagttttcttatcttaaggataaagatgaattcacctaccctatgggactattaagaataaaatgaaggtcctgtgtaaaaaactaaataactgttcattattcttgctgctgttggttggattgagtagaaaggtcctatggttaggacattataaagtacgtctacttagcttctaagatgtaatatttctataacttcagtaaggatgtgcatttaatagtcaataaattaaaccttttaaagctgtgatttaaaaactataaaataaacaatgaaatgagaaatgggcaaattcaaataattttattttaccttgagcaagaagactatgccaatgctaatgctttgctttcccctgcccctgcccttcccaaagagaagagaacagacagcaatggcagagtatatttcgtcaaccacaacacacgaattacacaatgggaagaccccagaagtcaaggtcaattaaatgaaaagcccttacctgaaggttgggaaatgagattcacagtggatggaattccatattttgtggaccacaatagaagaactaccacctatatagatccctggtcgacgcggc

SEQ ID NO: 68749 - DNA, 857 bp, Homo sapiens
taccactctttggtgctgctaggcaagaattttaaactgagtttaggtcaccatcgtggacttaaggtccatatcacctcagggagacaagtagagtgggaggcatccaaaaggtaggtgattcttctcccctctagtgaagaatacaaggtcaatttacaaaaaagcaccagcagcaaataattggaaaattaaattcataaaacatttataatagcgtcaaaaaagcaccagcagcaaataattggaaaattaaattcataaaacatttataatagcgtcaaaaaaaagaaaatactcagaaataaatttgacaaaaattgtataagatctctacattaaaaattatgaaatacatggaagagaaattaaagaaaacctaaatagagagatataccacattcatggattggaagattcaagattattaaaatactattctccccaaatggctctatagattcaacataatcccaatcaaaatcccagtaggctttggtagaaattgagatgttggttctaaaatgaaataaaatgcagaggacctagaatatataatttccctttaatttgacaaagaagaaaaacatgttgggaagctcacctaatttcagtgtaatatttacatacgaatcaacaaatggatcagtggtatagaatagagaatcctgaaatagatctacatatatatggccaacagatttttaataatggtgccaaggctattcaggggaaagaaaattcttttttaaaaatgggattggaaactggataagggaaataagtgaacctcgacccctacccttataccgtgctcaaaaattaattcaaaatcattctagccataaatgtaaaag

SEQ ID NO: 68750 - DNA, 2080 bp, Homo sapiens
tttcgtagcatggccggcccgggccccaccttcccgctgcaccggctcgtatgggcgaaccggcatcacgaactggaggccgcactgcacagccaccaacgaatcccaaccctgctcgccctggcagcctccctgccttgccctcttctctcctgccctttgtgagtgtcccgtctcccccagcacgacattgaacaggaggacccccgcgggcggaccccactggagctggccgtgtctctgggaaacctggagtctgtgagagtgctccttcgacacaatgccaacgtgggcaaagagaaccgccagggctgggcagtcctgcaggaggcagtcagcactggagaccccgagatggtgcagctggtgctccagtatcgggactaccagagggccacgcagaggctggcgggcattccggaactgctcaacaaacttcgccaggcccccgatttctacgttgagatgaagtgggagttcaccagctgggtgccccttgtgtctaagatgtgcccaagcgatgtgtaccgcgtgtggaagcggggtgagagcctgcgagtagacaccagtctcctgggcttcgagcacatgacctggcagcggggccggaggagcttcatcttcaagggccaggaggcaggagccctggtgatggaagtggaccatgaccggcaggtggtgcatgtggagacactggggctcactctgcaggagcccgaaacactgctggccgccatgcggcccagcgaggagcatgtggccagtcgcctcacctctcctatcgtctccacccacctggacactcgtaatgtggcctttgagaggaacaaatgtggtatctggggctggcggtctgagaagatggaaactgttagcggctacgaggccaaggtgtacagtgccaccaacgtggagctggtgacacgcacacgcacggagcacctctctgatcaggacaagtcgaggagcaaagcggggaagactccattccagtccttcctggggatggcgcagcagcattcctcccacaccggggcccccgtgcagcaggcagccagccccaccaaccccacagccatctcccctgaggagtacttcgaccccaacttcagcctggagtcacggaacattggccgccccatcgagatgtccagcaaagtacagaggttcaaggcaacactgtggctgagtgaagagcacccgctctccctgggtgaccaggtgacccccatcatcgacctaatggccatcagcaacgctcactttgccaagctgcgcgacttcatcactctgcgccttccacctggcttccccgtcaaaattgagattccccttttccacgtgctcaatgcccgcatcaccttcagcaacctgtgtggctgtgatgagcccctgagctccgtgtgggtgccggcccccagctctgctgtcgccgcatcagggaaccctttcccgtgcgaggtggaccccaccgtgtttgaagtgcccaacgggtacagcgtgctgggcatggagcgcaacgagcccctccgggacgaggacgatgacctcctgcagttcgccatccagcagagcctgcttgaagcgggcactgaaggcggagcaggttgaccgtctgggaagccctgaccaacacccggcccggttgcccgccctccttccccagggccacggtttatgaggaacagcttcagctggagcgggccctccaggaaagcctgcagctgtccacagagcccaggggcccaggatcccctcccaggacacccccagcccccggtccacccagctttgaagagcagctgcgcctggccctggagttgtcttcacgggagcaggaggagcgggagcggcgcgggcagcaggaggaggaggacttacagcggatcctgcagctgtcactcactgagcactgagccatagccccgggagggctggccaggccactccctgcccgcttttgtaatttatttatttataaactctctgctgctgagcttggggcctggagccccaggaatgagcaggcaggggagactgagatggaaataaagagactgtcgcagcaggaaaaaaaaaa

SEQ ID NO: 68751 - DNA, 1908 bp, Homo sapiens
gtctctatggaattatagctcacctacttttgggggaatcatgtaaggtaattttatttcattatgtattactagaatgtattgttttaaaatgtgtctacttttttgaagtgtcattttgttgttgttttcattgagatggggtcttactatgttgcccaggctggtctcgaactccgaacctcaaatgacctgcccggctcggcctcccaaagtgctgggattatgggcatgagtcattgcatccagacaaaagtgtcattgtttaatcttgatttgaaagaactttaggtatttaaaacattatgtggttcttttgtgcaagcgctttatccctaagtcgtttgattatccagggttgaaagcaactctctctgacttctgcactcagaaagcgcttggtctaattgtgttctccttcctgtctcttagcttcacaggataatgcagctggctgtggttgtatcacaagtacttgagaatggttcctcagttttggtctgtttggaggaaggctgggacatcactgcacaagtgacatccctggttcagttactcagtgatcccttttataggacacttgaaggcttccagatgttggttgaaaaagagtggctctcttttggtcacaaattcagtcagaggagcagcttgaccctcaactgtcaggggagtggttttgctccagtcttcttacagttcttagactgtgtacaccaggttcacaaccagtatccaactgagtttgaattcaatctctattacttaaagttcttggctttccactatgtgtctaatcgctttaaaacatttctcctggattcagactatgaaagattagagcacggaactttatttgatgataaaggagaaaagcatgccaaaaaaggagtctgtatttgggaatgtattgacagaatgcacaagaggagtcccattttctttaattatttatattcaccattggaaatagaggctctaaagcccaatgtaaacgtctctagcctcaagaagtgggattactacatagaagagaccctgtccacaggcccttcctatgactggatgatgctaacccccaagcacttcccctccgaagactctgacctggctggagaagctgggccacggagccagaggagaacagtgtggccatgctatgatgatgtcagctgtactcagcctgatgctctcaccagccttttcagtgaaattgaaaaattggagcacaaattgaaccaagcccctgagaagtggcagcagctgtgggaaagggtaaccgtggaccttaaagaagaaccaagaacagatcgctcccaaagacacctgtcgagatccccaggaattgtgtctaccaacctaccttcctatcagaagaggtctctgctacatctcccagacagcagcatgggggaggaacagaattccagcatctccccatccaatggagtggagcgaagagcagccacgctctatagccagtatacatccaagaatgatgaaaacaggtcctttgagggaacactttataaaagaggggctttgctgaaaggttggaagccccgttggtttgttttggatgtaacaaaacatcagctgcgctactatgactcaggtgaggacacaagctgtaaaggccacattgatctggctgaagtagaaatggtcatccctgctggccccagcatgggagccccaaagcacacaagtgacaaggctttctttgatctcaagaccagcaaacgtgtgtataacttctgcgcccaggatggacagagtgcccagcaatggatggacaagatccagagttgtatctctgatgcctgatgcccatggtcaacccacgcagaagaaacagaagaactcatgctgccagatagatagaacaagaagcatggatccttgagg

SEQ ID NO: 68752 - DNA, 964 bp, Homo sapiens
  misc_feature (1)...(964): n = a,t,c or g
cacatgtgcgcccaggctggagtgcagtggtgcaatctcagctcactgcaagctccgcctcttccctgggattttctgtttggacaatcatgtcagcagcagactcaagattccctggggctttctacgtagatgatcatgtcaccagcaaaaagggacagttttatttctttcctctcatctgttgtcttaatttccttttcttgtattatgtctctgtagaacttccagaactatgttgaaaaagagtgctgtcagctgtggggctttttagatgctttttgtaaggttgaaggagtacctgtcttctattttgctggaagttttgagtcatgaatgatgtgaattttgccaaactctttttattctttttttggattgactgatatagtcgtgagctttttctttagcctgttagtatagtgtattacatgaatgaattttcaaatactaaaccagccttgcatctcagaatatgtcccatttggctacagtgtgtcaatctttttatatattgctgtgttctatttgtttatgttttgttaaggagttttgtatctgaatctgcgagggatattggtctgtagttttctttttctgttctttttgcctggttttggtatcagggtaatactagcttcacaaaatgaattaggacatgatcccccctcttctgttttctggaaggtattgcgtagaatcagtgttaattcttctttacatgtttggtagaattatccagtgaaacctgaagatttcttttttgggagattataaattactaggtcaatttccttatagttacagggtattcaagtagtctatttcctattgggtgagttgtgacagttcatgctcattaaggaactggtctatttaacctaagttntaaaaactatgcgtgtagagtagtttgtgtattccttcattattcttttggcgcccgctcgcgatctagaactag

SEQ ID NO: 68753 - DNA, 992 bp, Homo sapiens
ttacccaggcggcaggtctgcatgccaccatcggctatgacgggcacattttagttttgggtatgcttggccaccttgtacagggcagtgccctggggctgactgcgggctatcacttcctggttgatgtagatggagccgcgcagtccatgcccctgcccagcccatccacaccagcgtcaatcaggttgttggcctgggctgctgtcaccacgttccccccaatcacctggaggtggggttacttttgtttgatgtaatgcaccatggcgatctgatacaccgagttcccttgggacgagtccaagcctatgacattgacgcctacctgggtgagcaggtccaggtggtatttgtcatcctcatgggtacccacagctgccccgcccagcagctgctcatgggaatccttggaggccacagggtagtctcggttcttcagcgcggtgcaggtgataatggccaccagctcatcgcgatcattgacgataggcagcttcctttcttactaagctgcaggatctcatttgcctctttcaacctcacactgctggagccaccactagcttgatccttggcatcatcacctcactgaggagggtggtgtggtccttctcagcaagaaagtcgatgtctcgggaggtgacgatgcccaccagcttgctgcccatggtacccgtctcagtgatggggatgccagagaagccatgacgcatcttggcctccaacacatcacccacagtgtgcaaggggctcagcaccacggggtgtgtgataaagcccggttcaaacttcttgaccttctgcacctcactggcctggaactctggggtgcagttgtggtgaatgaaaccagtacctcccatcagagccatcacgatggccaggtcggcctctgtcacagtgtccatgggggaggagatcagcggcgtcttcagagtgaccattgggtcagggctgaggtcaggtccacctcatcagctatgaagtct

SEQ ID NO: 68754 - DNA, 1419 bp, Homo sapiens
ggaaggctcgcctgggagctcatacctggctagggccgaggattggctgttccggggctagggagcgctttctcccgggaaccgcggctgtgacccaagtggcccggaccagtttggggctgcgtgcggcctgcctcaagcaaccaggtacgtaggtcggcggcccagctcggcgctgcggtgggagccggagggcgacagtcagagccggggtgccagcgggacgcgaccgccagatccacttaggaccccgtcgttctgcgaagcggccacgtctgagtcccggggcctcctcgtgctgcagatgtcgccttaggacctcggccaggataccctctgccatgctcttgtgctgcccgtgatcaccgactggcccttgtaagcaccttcgcagcaggaagcccagagctgcgcctgccctttctgaaggctgtggaagaggttggagtgggcgcatcttagcttgccccatccccatttgaggtctgtcggagctgcccttcagtgtgagcatccacaatgggtaccccagcctcggtggtcagtgagccacccccttggcaggccccgattgaggcccggggccgcaagcaggcctcggccaacatcttccaggacgccgagctgctgcagatccaagccctgtttcaacgcagcggggaccagctggccgaggaacgggcacagatcatctgggaatgtgcaggggaccaccgtgtggctgaggccctcaagaggctgcgcaggaagaggcccccaaggcagaaacccctgggccactcgctacaccactgcagccgcctcagaatcctggagccccactctgcactggccaacccacagagtgccacagagacagcctccagtgagcagtatctgcactctaggaagaaaagtgccaggatccgccggaactggaggaagtcaggccccacaagctacctccaccagatcagacactgatccagggaaagagccaggaatggcagtgtcttccctcttgccaaaaggcctggggaggtgaaggaagagagactttaggcaagcagcccaaaggggtaaatgaaagcaagaggctgctgccactgacctgctccattcagaacaagactggatgcttctgttgagctctccattatgtgggacccattcctcaccaaaatgaggagagacagtgactgttcctgccacagtccttcccagtctaacactattcctgggctgcatgatattcccctgggagcaaagtgacaggcacttagatgcagcatttcaccactcatgctactaatcatctacctgctactactgtaaaccatggttccagcagcctgttccacacccccacaccatcaggatagcacagggaaactgtagtttaagtggcaaataaaaacatttgcatcaagaaaaaaaaaa

SEQ ID NO: 68755 - DNA, 733 bp, Homo sapiens
acgtggaattccgacgagatggggagggctggggagggcagcctggggcaggagggcttgggggacaggctcacctccacactgccagtctgggatcgtagcatgcggcccacccacgaggagcgggccagctgcaggaggcaggacttctgcaagttctgcagctcggcctccatctcttggagcgtgcgggtggtctgcagcagccgctcctccaggtgctccttctcctgctccgagagggcctgtggttggtggtgggggggtgtcttctgcagaaggcccccaggccagccccagcctggctccccaacaccaggaccctgcccactccctgtgcccctgcctcacccactgggctcgctccttctgttccttcaactcctggatcagcttctggacctggttctgcaggagtttctcctgactgtgggagctcctggaggaggggtgacctcagcagcccccaccctgctcaggcaggggttcctaatgtcagcagccgcagtgtgcgagggtccagggactcaagagccaacctgcagcggcagcagaccctgctgcttactcaggccggcccctggccacctggcccaggaggctcaccagtcctccctctcctccttactgcgggtcggcagagcagaccaccggtgcggggtggggcgtggtgtctggcaggcacgtgggagtctcgggggctgcagctcaaggccctacccccagcactcac

SEQ ID NO: 68756 - DNA, 759 bp, Homo sapiens
ggaattccacttactttgtagtgagcaaaattagagttgttaacatgtgggtagggcttgctagaaatgaaagaccctcacaaggattacctcattaaataactgtgaaatctgaaatctaaactctgtgatattggaaggatattttaaaataaagggactgacctgccagttcaagcttagctctggcttctttgtctttggcaataaatctgtattcaccctggtcacggggcttaatatcacaaatctgtagtcgatgtatctttccttcactcatcatctggtgtttatcaccctggacaacaaccatgttatttcttagccattggacttccaccttatctttattgagttctgctaaaaagacaacatcagcaccaggggcttcaagaatatcttgtggaggcctgatgatctcaacaggaatttctggaaagaaaatgtgaaataaatacaaatatgtttacattttgattaacaattttaaaaaattggtaacattagaattgttttttcacttaatatgtaccttccacaaaaagtctagcacgagacttcctgtcttctaccccgcaagcatattcacactcatcatccagcctgcaatcttttataatgagtctgtgtatacttccatctttttcaaatttgtatctaaaggagacattggattatcagttagcttgcaatgatggccactaaattgtcaaaagtgtatatatagctacagaaatagagaataaaaagatcttgctt

SEQ ID NO: 68757 - DNA, 724 bp, Homo sapiens
gatcacctacagcaatgaccacttctcccccggctcccctcccacccacctctccccagagatcgatccaaagacaggaatcccccggccccctcacccatccgagctgtcaccgtattacccactctctcccggagctgtcggacaaatcccccaccccctcggctggctcgtcccacagcaaggccagcccatgtactcccttcctcccggtggcttccggcacccttaccccgccctcgccatgaacgcctcgatgtccagcctggtctccagtcggttctctcctcacatggtggctcctgcccaccctggcctgcccacctcagggatcccccaccctgccatcgtctcccccatcgtcaagcaggaaccggcaccccccagcctgagccctgcagtgagcgtgaaatcaccagtcaccgtgaaaaaggaggaggaaaagaagccccacgtgaagaagcctctgaatgccttcatgttgtatatgaaggagatgagggccaaggtggtggctgagtgcaccctgaaggaaagtgcagccattaaccagatccttggaagaaaggtaagacctgccctctccctccaggccagggaggcagcgtccctgcattgatggctccgtgtggtctctgaccctctctcccccagtggcacaacctgtctcgagaagaacaggccaagtactacgagctggcccggaaggagcggcagcttcact

SEQ ID NO: 68758 - DNA, 1949 bp, Homo sapiens
  misc_feature (1)...(1949): n = a,t,c or g
gcggtggccattcccttctccactcctggaagccccttaccaggaccccaggaccctgcagatgctgcagagcctcctggaaagccaacgggatcagaggaccatcagcatggccgagccacacagctcccaggagctctggatacaagctccccagggacccagcatccctttgcccctgagacaccaatccctggagcatcctggagcatctcccctaccacccccggggggctgccttggggctggactcagacacctacgccagtccctgaggacaaagggcaacctggagaagacctgagacatcccggcaccagcctccctgctgcctccccggtgacatgagctgtgccctgccatcccactggcacgtttacactctgtgtactgccccgtgactcccagctcagaggacacacatagcagggcaggcgcaagcacagacttcattttaaatcattcgccttcttctcgtttggggctgtgatgctctttaccccacaaagcggggtgggaggaagacaaagatcagggaaagccctaatcggagatacctcagcaagctgcccccggcgggactgaccctctcagggcccctgttggtctcccctgccaagaccagggtcaactattgctccctcctcacagaccctgggcctgggcagatctgaatcccggccggtctgtagctggaagctgtcagggctgcctgccttcccggaactgtgaggacccctgtggaggccctgcatatttggcccctctccccagaaaggcaaagcagggccagggtaggtgggggactgttcacagccaggccgagaggaggggggcctgggaatgtggcatgaggcttcccagctgcagggctggagggggtggaacacaagatgatcgcaggcccagctcccggaagccaagagctccatgcagttccaccagctgaggccaggcagcagaggccagtttgtctttgctggccagaagatggtgctcatggccatactctggccttgcagatgtcactagtgttacttctagtgactccagattacagactggccccccaatctcaccccagcccaccagagaagggggctcaggacaccctggaccccaagtcctcagcatccagggatttccaaactggcgctcaccccctgactccaccaggatggcaactttcaattatcactctcagcctggaaggggactctgtgggacacagannggaacacgatttctcaggctgtcccttcaatcattgcccttctccgaagatcgctcctgctggagtcggacatcttcatcttctacctggctcaagctgggccagagtgtgtggttctcccaggggtggttggaccccaggactgaggaccagagtccactcatagcctggccctggagatgacaagggccacccaggccaagtgccccagggcagggtgccagcccctggcctggtgctggagtggggaagacacactcacccacggtgctgtaagggcctgagctgtgctcagctgccggccatgctacctccaagggacaggtaacagtcttagatcctctggctctcaggaagtggcagggggtcccaggacacctccggggtctttggaaggatgtctcctaaactcctgccaaggtgatagaggtgcttctcacttcttccttccccaaggcaaaagggggctgttctgagccagcctggaggaacatgagtagtgggcccctggcctgcaacccctttggagagtggaggtcctggggggctccccgccctccccctgttgccctcccctccctgggatgctggggcacacgtggagtcattcctgtgagaaccagcctggcctgtgttaaactcttgtgccttggaaatccagatctttaaaattttatgtatttattaacatcgccattgggccccaaaaaaaaaa

SEQ ID NO: 68759 - DNA, 464 bp, Homo sapiens
tgccgttgcaccggaccggaattcccgggacgacgatttcgtggcggcggctcggctgtaaggaggtggcagggacaaccacaaccacaacggccgggggaggagaaggcggcagcggcgattctaggcggcccaggcggcggggaggaggagaaggaggagggtggcggccgggcttggcttcggctccttgaggagttggcggcggcgcgacccggggaaccggcattggtaaaaaaacgtcctttcactgcgcctcgccctgggcaggggtttcggggaggcactggagggccctgagccacgctgctgtcggggcgggccgcggtgactcgggagccaggaatcagcggagtagggagggggagcggatcctggggcggggccgactttccccggccaggaccactccggctccctctggttgcaaaatctgaccttggagtcggacccccaggatgtgt

SEQ ID NO: 68760 - DNA, 955 bp, Homo sapiens
tttcgtgagaaggcggcggcggcggctagggatcagacatggcggcggatctgaacctggagtggatctccctgccccggtcctggacttacgggatcaccaggggcggccgagtcttcttcatcaacgaggaggccaagagcaccacctggctgcaccccgtcaccggcgaggcggtggtcaccggacaccggcggcagagcacagatttgcctactggctgggaagaagcatatacttttgaaggtgcaagatactatataaactgaatagatttccttttcattcttcctgggaatagaagatgtaatggaagttccagtatctgtatgcaggcctatgactagcttcacttcttggtgactaatactagttgacaaaacagcatattctaaactgattgtcttcgttatccagtagctttcctattctccataacaaatgttccaaatctttgattactcacctcagaatgcttgtctcactcctcttttcctcattcctagtagatcataccttggagaagaaagtagaaactatcaggcctgaacttcattagctttttcttcctcttcaatccaaatctgtctgtatcttcattcatttttcttaaccctttccttgcttgctatttctgctttccaaaaccaaggaaggaattttgacagaggtacccaaggaattcactgggggaaaatgaatgattcaataaatgatgttatgataattagatagatagctatatgtaagcataaaaaatttttaaaaccttaggcccttattatcatatcatgcacaaaaattaagtggattattgatttaaatgtaaaaacaaaaagtataaaacttttagaaaaaagagattatttgtgacattgggtctggcaaagatttcttagatgcgattaaagatttacaaaagaaaaaattgataaattagacttcatcaaaattt

SEQ ID NO: 68761 - DNA, 668 bp, Homo sapiens
gagatggaatttcactttcgtcacccaggctggagcgcaatggccagatcatggatcactgcaacctccgcctcccaggttcaagcgattctcctgggaggcagacgttgcagtgaactgagatcgtgccaccgcactccagcatgggcgacggagcgagatttcatctcgaaaaaaggaaagaaagaaatgtgttgttcagtatttactatggtctgttcagctgttggacggccagatgctacgtgttgtgttgagatatttctgggtgagattgtagagttgtcaggcactgcatgtgattttgcgttgtgtcatctgctggctgccaacgttgttgcgttgctgcatagtgtgtcctttgttctgctgccttgactgtatgtgttgtgatgccacatcgtgtgttctgtgctgtctgctgggttgctgtgtactagcgtgtgttgtgtggcaggattatgtagcggtatgctggcattacgtgttggtgtgtggttaccgtgtcttgggatgtttccgggctggctattaggtcactgcgtgtcgtgtgttggcatgtactgcgatcgtatttgctgggtgttctgttgccctgtgttgttgtggtccgtgatgcctgatgattgccttgtgctatgtcgcgtgctgtgtgtgtgttgccaacc

SEQ ID NO: 68762 - DNA, 1562 bp, Homo sapiens
gtcattgtgaggtcacttccatgaattgtgggaccttcagagcttttcactttttggaaaatagctcctgctggggcttcaagatggagtgtgaagagagccttgggccacagggaggtgcctgtggactagggggagttcatgcaccccttctttccccagaggggctggactcaggtgagtatgggggtgggggctcctacacttcgacacaggcagcgggagggttttctccccattccctctgcactcccaacttgagctatactttttaagaaagtgattcaccctgcctttgcccccttccccagaacagaacacgttgatcatgggcgatatttttcactgtgccaaaaagttgccatgaccggtcagttaaacctgtttaacaccaaataataaggaaaataaaataaaaaattcgggcttggcgcagaaactcactccaaataaattacctaccaaaatatttacataatggtggaaatattccaaaattcaatattttgggatttatacacaaaagataaacaaattagaggccaagaggctgccggaagggaaaaacggggcctggaatggccgacgtgaggaatgagctgggcctaaagaggccactggcaggcaggagctggacctgccgaagtggccgaaaggcaggagctttggactggggagaccgcagtgaggcgagagctagctgggcgtggagagtccgctgtgaggccgaggccgaggccgggcccgtgcaggccttcgagaggcaggaggccgggcctgcaaaggccgactggagatcaagttctgcgcctgaagaggctgccaaaagtcaaaagcggggcctgggaaggccgccgagagccatgagctgggctgggccgaaagaggccactgggaggcaggaggagctgggcctggagaggctgactcgaggaagttttgcacctggagaggccgtcgagaggacggagctgggcccagggaggccgacttgctgctcttccaggcccacttccaggccgacttgaggacgacttgggcctgcagaggccgccgggaggctggagctaagcctggagagactgacttcgggacgatttgggcctgcggaggccgccgggaggcccaagctgggcctagaggagcccaccgaccggaggccatttggggcctgcagatgtcatcggagggccaggagctgagcctggagaggccaccgcgaggcctgagctgggcctggggagcttggcttagggaagttgtgggcctaccagggccgctgggagctgggcaggagctgagtccaaagacgttgttgggacctggagtcgggccagagtccggcctggagatgcagccgggagagcccgacttcaggacaacttgggcctgcggcggtcgccgggaggcccaaccttggcgtggaggagcccaccgaccggagaccatttggggcctggagatgccatcggagggcaggagctcatcctggagaggccaccgtgaggcctgacctgggcctggggagcttggcttgaggaagctgtgggccgacccctagt

SEQ ID NO: 68763 - DNA, 436 bp, Homo sapiens
aactaatccatccaccttgtggcatgttcctgcccttcctcaactaatccatccaccactgtgacatgttcctgccctaccctaactaatccatccaccttgtgatatgttcctgcccttccccaactaatccatccaccttgtggcatgttcctgcccttcctcaactaatccatccaccttgtgatatgttcctgcccttccccaactaatccatccaccattgtgacatgttcctgcccttccccaactaatccatccaccattgtgacatgttcctgcccttccccaactaatccatccaccttgtgatatgttcctgcccttccccaactaatccatccaccttgtgattgttcctgcccttccccaactaatccatccaccactgtgatatgttcctgccctaccctaactaatccatccaccttgtgat

SEQ ID NO: 68764 - DNA, 1246 bp, Homo sapiens
agcggccgcgggacgcgctggggccgggcagccgggaagcggggcgctgacggtgagtgggcctggccccgggccggtgggtccccgcggggcggccgggcgaggagagaggcagcttcccttcccggagcccgcctggggcgtggaggctcagcgtccctatcctccatcccgccccgggacggcggaaccgggcctcagctggggacctcaccagggggtggggcctcccgcggtccccggcgctgctcccaggactggaggggcgtccgcgcccgggagaggggttccccccgacagggccccgggccgccacgaagttagggaagcgctctctccagggtggaacctgggcccgcggctcccgggagaggagctgcccgcggaaggggtcggggtgggctccaggctgggagaaggatctgactttgctgacctcgcaggctggtaggggaagctgccccccagagcagcatggatgccccgcgaagggacatggagttgctcagcaacagcctggctgcctacgcgcacatccgcgccaaccccgagagcttcggcctctacttcgtgctgggcgtctgcttcggcctgctgctcaccctctgcctgctcgtcatcagcatctcgtgggcgccccgcccgcggccccggggcccggctcagcgccgggacccccgcagcagcaccctggagcccgaggacgacgacgaggacgaggaggacacggtgactcggctgggccccgacgacacgctgccgggccccgagctgtccgcagagccggacgggcccctcaacgtcaacgtcttcacgtcggcggaggagctggagcgggcgcagcggctggaggagcgcgaacggatcctgcgggagatctggcgcaccgggcagccggacctgctgggcacaggcacgctggggcccagccccacggccacgggcaccctgggccgcatgcactattactgatgggccccggctcccgctgcaaggcgctcggggtaccggacctgcacatgagctcagagctaccccacaccttcggactgcctcggcccccacagctcccaggtgctactgggcgtggaccgccaccccctgagaggctcccttccccagtcctgccagaagaccccgggggcggggagggggcagcatgcagggtccccactccctctctggggtcgatgaagaggtgaagtgaccaaatgaaagaaagctgcattctcagtgaaaaaaaaaa

SEQ ID NO: 68765 - DNA, 349 bp, Homo sapiens
ttgggatcaagtggattgaggaggctgtgctgtgtgctagtgtgctgtgtgtgcatgtgtgtgcgtgtgctgtgcgtttgtgtgctgtgtgctcgtgtgtgtgctgtgtgtgcgtgtgtgctgtgcgtttgtgtgtgctgtgcgtttgcgtgtgtgctgtgtgtgcatgtgtgtgcgtgtgtgtgccgtgcgtttgtgtgctgtgtgtgtgtgtgtgtgcgtgcgtgtgcattgcatgtatcttacatttgtcttaatgcttttcctttgtaaaatgtgtaaattttttttgattgggttaatttaattcacagtgtcatctgtcttcagttagaaataatggaaactg

SEQ ID NO: 68766 - DNA, 607 bp, Homo sapiens
gtgcatgatcacgccaagcttggcacgagggctgacccggcaaaactcagcgggggctggatagccatgcccaagtactgcagggcgccgaactgctccaacactgcgggccgcctgggtgcagacaaccgccctgtgagcttctacaaagtcagcggaggacccgaagcacccagaagccagtctcgccgccgcctcccctacagaggaatacacccctgccccagagccctgccatcccagtctctggcccagtgcgcctagtggtgctgggccccacatcggggagccccaagactgtggccaccatgctcctgacccccctggcccctgcgccaactcctgagcggtcacaacctgaagtccctgcccaacaggcccagaccgggctgggcccagtgctgggagcactgcaacgccgggtgcggaggctgcaatggtgccaggagcggcaccaggcgcagctgcaggccctggaacggctggcacagcagctacacggggagagcctgctggcacgggcacgccggggtctgcagcgcctgacaacagcccagacccttggacctgaggaatcccaaaccttcaccatcatctgtggagggcg

SEQ ID NO: 68767 - DNA, 930 bp, Homo sapiens
ggggctgtggtcatcttaagacagcattcccagggaagcagggatgacagaaccccatagcatgagggcaggaggagtggatacaaggatgtggagaggggaaagactcccccattcctttccctcctccctcgtcatagaaagtgaggaccaaggcacccaaggtctgaccatctgtgtctccagagctcctgcatgtgactaacctctgtgtaaacttctccaaactgcacaccctgggtgacaggcccctgggaggcctcaagggacaccccttctactactatgccttctatgagcttgtagccaaaggcagttgcctgtgccttgggcacacctctaagtgcaggtctgcacctggaaccccagccaatgtggtgaggacaatgggaggggcattctgttgctggtggggtgggcaagctgggactccagagcaggcctgccttgccctcctccctatcaggtacatgggctttgcatctgtccccaccagtcggtgcacactgtgagtgctgccaagacctgcaccaggatcatccatgacatgcagcagagcctgggcacccccatgcctgctgggatgaatgccatgctctactctgcctggccatacctgccacaggtccgcccaccccatatctacctttctggttctgcctcagaatgtgagtgccatgggcatgtctacagttgtcactttgacacagctgtgttgtctggttatgtgagtggaggtgtgtgtgatgtgtgttcagcacaacacagctggggcgccactgttgagttctgctggcccttcttctactgtcatccctgagaggatccctgttcccctcggtcctgcagacatgagtccttcaacccctaatcccaacactgactcttatccttcagctccatggtgacctctgacctaattccatcctt

SEQ ID NO: 68768 - DNA, 599 bp, Homo sapiens
acctactacagtgactccatcttcttcctctcgggcgccatgcatcagatcatgcccaaagagatcctgcagatcattcagctggacctagacctgaagtttaagaccaacatccgggagttgtttgaggaatttgacagtttcctgccaggcgccatcatcggcatagcccgggagatgcagccagtttacaggcacacattctggcagttccgccatgagaacccccagacccgggttgggggcccgccccccgaggggctgccgggcttcaacagcggggtgatgttgctgaacctggaggccatgcgccagtccccgctctacagccgcctgctggagccggcgcaggtgcagcagctggccgacaagtaccactttcgcggccacctcggggaccaggacttcttcaccatgatcsgcatggagcaccccaagctcttccatgtgctggactgtaccccgaaccggcagstgtgsaccyggtggagggaccatkggtacagtgacgkcttcgaggcctatttgaggtgtgagggccacgtyaagatctascacgggactkgcaasactggcatcccggggragtagggggtccc

SEQ ID NO: 68769 - DNA, 504 bp, Homo sapiens
gcaacgccagcttggcacgaggccgtcttttactgtttaactgtgatgttaaagagtgatggtgttagctgtgagcttttactagatgtcctttatcagactaaagagggtcccttttattcttagtttattgaattttgtatcatgcaagagtgttgtattttgtcaaaatgctttttctactctgtcaaaataactgcttttttgtctgttaatatggtgtattgcactgatgttgaaccaccctggtgttcttagggtgagtcccacttggtcatgggatataatcctttttctatgttgttgggtttagcttgccggtattttctcgagttttgcatttatattcataagggatattgctccattgttttctcaagatgttcgtttggttttcgtgtctggctaatcctggccttatggactgagttaggaaagtcattttgaatgactattttgtaatcattcttcgaattactcctaaatatatcttcagattctaat

SEQ ID NO: 68770 - DNA, 432 bp, Homo sapiens
ggctgcttttgcagcatcctgtaagtgctgggctgctgcgttttcgttttcattctaagtattttctttttcccttgtgatttcttctctggactgttggttgtttaagagtgtgttgtttaacttccagaaatttgtggatttttcagttttacttctgttattgatttctaacgttatcctattgtggttggagaagagtttgtatgatacctacattttaaaattgattgagacctaatttgtggcctaacagatggtgtatcctggaaaatgactcatgcttatttgagaaggatgtatatgctgctattgttcttggtagaatgtctggatgtgtgttagatctagttggtttattgtgttgctgcccgccgctgccctacactcctctcacccaactacgcattcaactctgcttgacagtgagct

SEQ ID NO: 68771 - DNA, 1393 bp, Homo sapiens
tcaggtacctccagagctttgaggggtggggcagagagtcagtgggactgggaggactagggcagtgtcccctcatccctgggacggttttcctgaatggcctggcaggctgggggctgtcgcgtcaacagccaacctcctggatgatgtggagggccacgcgtgtggggaggctggaggggagatcgaagctccaacttctctatgatcggggatctcccagcggagttcctgggtgtttcatgggagcacccgccctgtcccctggaggaacacactgagggttggtgggcaggtgacccaaagatatggatccccctgacttggtcgacattgcttccccctttctgcaacccctgaaaaggggccctagccctacttccacctagatgtgtacctgtagcatgaagtgccaggtactgtttctggggaatattcttttgggtgtgaggtggcagacaggcctgcccccatgggggaccctcggcctgagaaccaagcactgggcagcttcagtctgtgggcccagaggcttctcaactttcacccagtcccttccaaaggccacgtgggccagaagactctgcctcagaccctcctgggcccgcagctgaaccctgatcctcatgccacattcgagggtcaggaggcatccagaaacaaggactggaagggcctcagaggtcatctagatagtccagcttttccatcccattttatagatgaggaaatttgaggcccaaagacgaggggagaacttgtccaaggtctcagagctcagtggtggaccctggccagcacctgagtgtcctgctgcctctctccctggacccatgcatcgtctacctggggggatctgcatgggtcccaaatgaagggggcagagagagtcgggtcagctctcttgcccagtctaggggccgtgcctgagcgaggccctgcagggtagaggatgaggcagcttccctctccttttcagatgaagacttccggggcaggcgtcaggaggcacccaaggtggaggaaggcctgcgagaaggacagtaagagatgccagcagctcttccttgccagagatgatctgacccggtgggggcagctggaaagcaacactggcccccagctgaagggcccagctgcagccagacagatggtgcttgagaaccgaggcccggtgatcctccagccacagtccagcccaaccactgccactttccatgggacttagaacttcggagttgctgccttgcaattggaggaaggacctggggcccctataggcagcagccaattacagccccttttgtagccaggcgttcctatggtcaaagagtggaaatgcaggaaccaacctccctttaaaaaaaaaaaaatccagaaggcaaaaaaaaaa

SEQ ID NO: 68772 - DNA, 1312 bp, Homo sapiens
ttttttttttttcccagtgaatagaggacgtttaatatttctgtgctggtcaaacggaacacaggtggggaatacatggggagggggcggagggccccctgcctctcaggaggggtggcttgtgaggggtgtatgtggggggttcttgggaaatatccaaggagtcttctcagtaaaggggccaggccaggggtgttatgagcatccgatacgcccagtccttggccttgagttgggggtcccccatagggggtctgtggagagtctgacttttttccagctcttttgctagaatccacactcccagcacgacgggtgacttggtcctagagaggggtctggagagcccccaggaagcagcccagggtcagggagaagggctcccgtgcccactcctgagggggtgagagcccgctttctcccctcctttctccttcccccaggctgggcaggagcggaagggaggggggcagggccctgcctccactgagccccagggtcctcagggtggatggaggaggggtggagagagaaggtcttggccaccaacagacactgtaaactttggtttaaaacaataacttaagtggagggagggcttccagcctggggccggggtgggagactgggagggcaggtgctggggaggcgacaaaggaaaaagccaacaaaaagttttggtttttgcttccggcataagaaaggtctttggtcatccgtttaactggtggggcggcggggggagaggcgggcaaggaaggggagctgagggtgactgcagaggaaggggagctgagggagggtgagaggactgcagagaggcctgcaggctggatgtgggtgtggagccggggtccagcctggccttcccctgggctcccggcccaggccccgcctctggcctcagggagagcttggctccacctgcagaagcgcacctggcacagacctctgtgggtgaggcggtaccaggcctcttcccatgggggccggctggagaagcccccagcaaacgggggttgggggtgagggcctggctcagcctggttctgtctcaggttgggggcgggtctggagccaggtgggcctgctcacacggacccccacagggcacacagacagtcccaccccagcagcagagggggctgtttcttctggggatggaggcgcagttcctccacccaggccagggcagggtgggagctggggtggagagttctttcttcacagtacggaaaagaaggcggaagggagctcgagttaggaaagtgggggcctctggccagaaaactcggccagagccaggtgccag

SEQ ID NO: 68773 - DNA, 595 bp, Homo sapiens
ggaattccagaacaagaaaaatattgctaggagtaatgaagcatgattcatcacgaaagaaggatcaattttttgagaagacacagcggtcctaaatgtatatgcatccagtaacagagtggaagcaaaaactgacagttgaaaggagaaatagacaaatccacaattacatttggaaattacaacattcttcctcaataactgatagaacaagcaggcaaaaaatcagtaaggttatagaagatttggacaatactctcaatggactatacttaattgacatttacagaacactctgcccacattcttttcaagtgcacatggaacatttaccaaaatagaccatatgctgggctacaaaacacatttcaacaaatttaaaaggattgaaatgtagtgtctactctgactacaatggaattaaattagaaatgaaaaagatacctggaaagtctccaaatatttgaaagtgaaataacatacttcaaaataacctttgggtcaaagaactcacaaaggaaattagaaaatattcataacgaaatgaaaatgaaaacacaatatatcaaaatttgtgagatactagaaaatattt

SEQ ID NO: 68774 - DNA, 1609 bp, Homo sapiens
  misc_feature (1)...(1609): n = a,t,c or g
ttttttttttttcaccgggctaggtctgctttttattggccacgcatccagccgccagcctcagggcacacacctggcagggggcaggctcgggtaggctgccctcgctgggtgggcagtgagggggcagcggctgctgggtgtcaccctgcagcccctcaggtggacctgtattgtccccagggcctgcccacgctgggcagctggcactgggaggggttttctgttgatgtgatggccaagtttcagctgcagggcagaggcctggcagtggcagcaaaggcagaccgcccccaactccaacttcaggggctggacatgctggaacgggggccagaccccatgggaggggaccctggcctgccatggcactgcctgccagcttacccctgcccagggcccccaactcagccacctccaagcagtaaagacttgcaaagcattgcattttgattaaaccttgctgggctgaagggcaggcagagctgtggtggacactggcaggacgcagcaccccccgactggcccttggcaggctgcaccgggcgcatgcgggtgtgggccagggttgcctttaggaagcaggtgggaggctggcacgtgcaggcggtccaggagggcaccaggcctggcagggcactggtgcctgtcgggttcccagccacaacaccccaagaaggctccaggagggccccggctgggtaaggcacggagttttggtttccggggcccagtcccagcctggcccccagaagagcctctcttggcagaatggcagcatgtcctgtggcctgggctctctcacttggccttgggcctgggcctgaggccttactggatcacacacagtttctttgttttattatcatcagaatcagggggaacctcttcctggctcctggagggacgcttcttccttcgcttcccggtcccctttgaggcccggccccgggccctggggagtgtgcccgaccccgaggagtcggtcaccgcatcctcggagaaggacttgtccagggatgtgtccagtgcggactctggggccgtgtcctcctcgtcctcgtcctcatccccacctgggcctgctgcagggggtctggcaccacggctgtggacagcgtcctccagcccctcacttgtgctgtcggcctcggcctggaggacgcccagcaaggacgtgggatccttggcatcttgccttgaacttccggctgcagggggctggttgctggagaacttgaggggcttcagggcctgagcatctcccagagtcaccggccaggccccctccaagggctgggggcactggggatcctcagtggttaggacatcgctggcatccacataccaggaagaacgcctctccaggggccggggaccaccctcctccaactgctccagggtgggctgagggccgggggtcacggcgtctacaaggtcccagccccgggactcgctggctgttgtagcatcaaggccgggctcagaggcgggacagcgcgtgctgcccacggggtctcctgcagggttactggtggccacaggctctgtggctcttgggggatccagnnttccnccgcncttccagnggtctcaatagggtgtcaaa

SEQ ID NO: 68775 - DNA, 660 bp, Homo sapiens
ggaattcgctgaagggaatcaaatggctgaccgcctaattgctaatgcaatctcaaatgctatacactttcacaatttaacccatgtgaatgcctctggtctcaaacgcagatgcagtattacctggaaagaagctaaagctattatccagcgatgcccaacttgccaaatggcccattcttcatcttttacaggaggagttaatcctcgaggattggaacctaactctgtttggcaaatggatgtcacacatcttccctcgtttgggagactagcttatgtacatgtatgtgtggacaccttttctcactttgggctacaggccaatcaggagagccttctgcctgtgttaaatgtcacctcttgcagtgttttgcagtgatgggcattccagcttctattaaaacagataatgccccaggctatcctagccaaactctagctacatttttctctttgtggaatattaaacacattactggtatcccatacaattctcaaggacaagccatagtggaaagaatgaatctttccctaaaacagcagttgcaaaagcagaaagggggagacagagtatatggaaccccatagatgcaactgaacctagcattattaactttaaattttctgagcctgcccaaggccagaagttatcagcag

SEQ ID NO: 68776 - DNA, 1072 bp, Homo sapiens
ttttttttttttaaaaatcggcatgctcctttatttgttcagaagagcagccagcatcaccctcgccactcaaacctggcacatacgcttcggagacaatggcctcgggaccctcatgctgctgggcccaggagagacagttctgaggcagaaactcggcgtccaaggggggccgcgggtcaggcactgtggtgaagggaacgccggggagtccggccccaccttgcagctggggacacgggggcgcaaacagagggggcaggctagtgtcccgctgccccaggaacagacctcagggccccaggagggtctgcaggcagctaggagcctgccaagtgctggtggaagtagaggccgaaaaggctggcgagcagctggcaggcagccgtccaccagatgaggtaggccaggacgccacggaggaagaggggagtaagcaggccacccagagccccggcaatccgcgctgcagtctgctggacttcgtcctccccagagccgatgggggcagcgctggctgaggatgggtcgggggatagtagaggagctgggcccaggccccaggaatagcctcccagcgtcttgagcagaagtgtgcagttgagggtgaggatgagcggcgtcaggtactgcaagctcaccacggtcacatagcagtagactcggaccaccctctgctggatttcacgggcttcgatgcggccagcctcccttcgcagctgctccacccgggccttggccaggcacaggtaggcctgcaggtggggccgggtcaccgccagccgcagcaggcacagcaccaccagcaaccagaggcgcccagagtcgaaggcagaatcggacagcagggagaaacgcgtctccccaaacggcggctggtgcaggaagtcccgtgcaatgggctttgtccagagccacaggatgaacaggggagacaggaagctggtgtgcaggaggaacctggggggtgagggcaggagggagtgaggcctgggtaccccctctcctccacccgggacttccggaccggtacggcacgcgtaaaggttatcaatggtttcaatccccacct

SEQ ID NO: 68777 - DNA, 1330 bp, Homo sapiens
cgacccacgcgttcgctcagggtggccactggaggatggggggttgtctctgcgaacattacgtatgcctgtgtgaagacaagcgaccaacctgcattcatgcccttgtatccgcacacgcccagtgtgtacaggcgcaccccgtggactggcccaggaggacgtgcatcatcactgcaatcagcatgaacaccaggcacccctgggacacctaacgcccagttcccgtgaccccaactgcaggccccccctactctgcagcctttcccatgctctgccccctgtctcatgcacgagtggtgcggggtgctgggagcgaggggggccgcatcctcctgtccttgtgcttctccttctgcccctctggtctttcctgttggtgctccaggcattgtttacctgctcttgctccccgctgtagcccacagccatatctgtcatgcttccccggggccactcacccctgccccaccccgtctgcatgctcacatggacgcggacggacacactcattacacactcacacgccccgactgcacccggtgtccatctataaacatgtcagggcacgtgtgcatacaagcagattcagcactgcctaccaggctctcctgttaccttgcctctctgcttggagggggccccctctgctcacccccagcgtgccccccccggaactgataaggatgagaatggtggtgccagcttctgagggcctgcttggcctcctgggggcaaagcccctctgcccgaagcaataacaacagcagcagaagcaatcccggggagctgccaggggtgtctgtctctgttctccttggcgtttccttcatggccgtgaatcccagctcacccatggacagaagacctcccctcatctgaaagcctttctgccttccttcctgtagctgtcgctttctcaggcttggactgtcccctggttcaccctgtctttgggatgtggcccttgagctgggcgggctccttgggtggattagagagctggccgagctgcaagcacctgagttacctgcgagggtgcccagagtggagcttggcctgagggcgtgttgcagccctggccccaccagtccacagaggcccccaggagcactgcctttcagtggaccgggtgggggctggtgggaggggccccactagctgagcttctgctgccctctgctgtctgctgagatgccaggctagtggagagggcacaccatgtgcccaaatggtgtgatgctccttgtagcaggataccagggtactggggggcaatgctatgattaacttgcttcaaataaaaagttcccgccccataaaaaaaaaa

SEQ ID NO: 68778 - DNA, 826 bp, Homo sapiens
ttttttttttttagagataaggtcttgctatatatatggcccaggctggtcttgacccagcatcaagtcgtcctcctgccttgggctcccaaagcactgggattacaggtgtgagccaccatgcccagccagatctttcttgtttttgatgtaggtgtttattactaaatacttccctcttaaaactgctcttgctgcatcccatacatttttatatgttgtgtttctgttttcactcattttaagacatttaaattttgtttcttaatttcttcattacccattggtcattcagaatcatgttatttaatttccatttatttgtgctgctttaaaagttcctcttgttattgatttctaggtttatttcattgtggtcagaaaggtacttgatgtgattttaattcttttaatttttgtgatttgttttgtggtttaacatgtggcctctccttgaaaatattgcatgtgcttatgaaaaaaaatatgtattctgtagctgtcggatgaaaagatctgttagtgtcttttaagtccatttggtctaaagtcagtttaaacttggtgtttctttgttgattttctatgtatatgatctgtccattgctgaaagtagggtgttgaagtccacaagtattattgtattattgtattgtcttcccctttagatctaataatatttgccttacatatctgggtgctctgatattgggggcatatatatttacaatttttgtatcctcttcctgatttcatccctactgtgtttgatacaaagtctcttatcgtaagtatagctactccttatatagtcatgattgtggta

SEQ ID NO: 68779 - DNA, 837 bp, Homo sapiens
  misc_feature (1)...(837): n = a,t,c or g
cgagccacgcgtccgcttaaatttttgttctggctgtggctttatgctttcctaaaatgtggcctgtaacgggttattggtaaatatgctgaattgctttctttggcaagtgcatttcagtattgaatccaagtaaaaacacaaatatttacttataaaagtcatttggggtagtaatatttttactatggccactgacccactagtgaaatgttagggcattgctagattggatcctgtttatttaagggccgagagaaagagaaagctaacattaattgaatgcctattaatgtgccatcatatttggtacactattatctcttttttgctttcccagcaactcgggaagtttatattatctctgtttttccagcaagaaaagtagctctcaaagaaatttatagaaattgagaagttgatttttaaactctgaaaatgtaaacaatccaaaatagtcaaaccaatttttaaaaagaacaaagttgagattcttgtattggctgattttaaggcttgcagtaaagctacaagacagtgtggtgttggagaagagctggacatataaatcagtagagtaggataaagtccagaaatagacccatacatacatggtcaattcgtttttgacaaggcaatttaatggagaaaggaaaatcttttcaacaaaccatgctaaaacgactaggtttccatatagagaaaaaaatgagcctcgcttaaaagggtcgtagacctaaatataaaagctnnnnnnnnnnnnnnnnnnnnnnnnnnnccgtgtggagtctggagacgacgtgcagaaatggcacctggaaaggggaaggaaaagaa

SEQ ID NO: 68780 - DNA, 888 bp, Homo sapiens
ttttttttactatactaatagattatgtatattataaaaaacacaataaaaaatagacattttaaagggatgagattaaaatatagaaagaaaattcccatatgtttttcctgctgccgctggggttgtgtgtccatctttggggacctctgagggaggccctggagccactgagaggggcggtggtcgccaggggtctggaaaatggagtaaggaggcctgaaggggccccagggaggcttcggggaggcaggggtcggggttacagctccgcgccgctggggaagcggaatctgcgggcggaggccggggcaccgtgctgtccagggcaaggggaacgcagtcccgcggcatccacgacggaggggcccggccgcggggcctggtggcccggggagccagggcatgggcatccggggcagaaggactgcgggcgcgaagcttgggaggcagggtacttggggcccggagagtcgctcgggcctggctccggcagcagtcgcgacaggtcctccaccaggtgccacttctcctgaacctgctgtgaggagaacaagtggcgagttgcgacaggcgctgcttcccacgagcgggtgtgaggacagcagcggcagcaactctgcggcccatgggccagcccgcacccaaagtagccagaggccacgccccgcccgaggccacgccccgctcgaggccacaccctcccagggccacgccccaccagggtcccgccccgatgcagccctagaccacgccctcaggagttccgtccccaacgcagccagatgccactccttccacgtccccgctggagcccacaccctcccagggccacgccccaccagggtaccgccccgatgcagccctagaccacgccctcctgcctcc

SEQ ID NO: 68781 - DNA, 677 bp, Homo sapiens
ggaggcaggagagcatcagaggtgggcggtaaagggcgtgcagggcaatttccaagaggtggctggtcggtgggcagggcgctgctgcagtcctcgatgaaaataggattcacaaaccacaggcggtcatttcctaccgacagctcgatttcacaggcacagtttgcgtcatgggctgtgggcctgaggctggagactagggggaatccgggggcccggtctcttgggggctctgctggcttccctctttcttgtggaggattcagcgaggagtcccagaaacccagacccaggttggcgatggtctcaaggtccgtgaagctgctggcctcaaggatggcctggggtagccgcagtgtgaagggcagtaagtctctactgacacagtagaacgcaatcaatctgaagatgtcctcaaacacaagagccgagccttccaggtacaatatcgacttttcttccttaatggtgtattcgagcacctcggccgagctttcgttcagagaaggaaagtggacacagagcaccagctgcttcgagctgctgtcccggcgaaccaggaacatcccagccaccacccggtgcaggatcctggccacctctgcctggcccagactcagctgcagccacaccgggcatgttttgataaacttaaaaggatgctgatgccccggcgc

SEQ ID NO: 68782 - DNA, 404 bp, Homo sapiens
ggaggcaggaggagaaggtgtcgcttaacacgacatccacatgggtgagcaaaaactccaccaccaccgactgggcccgaacttcccggaacgccgccgcgccacccattcccactgactccagcttcatggaccgtagcagggtgggtgcccagaccatggccaggttgcgggcatgcatgctggcgttggcactgtgtctcgccatgcgggccatgtgcctcaacaggtactacaaggtcctgggggaggaagcagagggggcacctgagcctcaacccccttggaataccaccaagacccgccctgccccttctggtttacctgtaatgtggtggcggcagctgttgaatgacatcgtgcacccggaccatatgctcctcctgcccaggcactgacatggc

SEQ ID NO: 68783 - DNA, 763 bp, Homo sapiens
gggccgcgtccaccaagcagaccatcactgagagcagcagcctcctcctgtcgcagctcaccagcctggacccccaggggcccccccggaggcctccccctcacatcctggatcaagtgaaaagcctcaaccagtccctccgcctcgggcacctcttgtgccgcagccgaaaccctgactttctcctccacatcatccagcggcaggcctcctcgcagtccatgccctggctggcggacctggtacagtccagcgagggctccctggacgtgctgcccgtgcagtgtctgtgcgagttcctgctgcacgatgctgtggacgatgctgcttccggggaggaggacgacgagggcgagagcaaggagcagaaggccaagaagcggcagaggcaacaaaagcagcggcagctgctgggccgcctgcaggacctgctactgggcccgaaggctgatgagcaaaccacgtgtgaggtgctggactactttttgcggcgcctcggctcctcccaggtggcctcccgcgtgctggccatgaagggtttgtcgctggtgctttcggagggcagcctgcgggacggggaggagaaggagccccccatggaggaggatgtgggggacacagatgtgctgcagggctatcagtggctgctgcgggacctgcctcgcctgcctctgttcgacagcgtcaggagcaccacagccctggccctgcagcaggcaatccacatggagactgatccccagaccatcagcgcctacctgag

SEQ ID NO: 68784 - DNA, 580 bp, Homo sapiens
atgcccagcatgtactggtccacctccaggccctccagcaaagctgtcttgttgcacacaggacacctccaagtcccccgctcacagttgagctgcaggtacgactccaggtcaaagcactgtatgtggcgacagtcatgacctcgggcagggagttggatcctgcggaaggtgatggggcacttcagggacaccttgatagctgtctgctccaccccgtcccctccgttgggcccaggggtgccagggatggtgccgctgctgaagttccgctttatcttggtgatgcagtgctcagcaggcaggaggcgctttttgaggaggccctgcagcaccgagcggacggatgggcggtgcactagctgcagcacgaagaggtgggagcagcagcaggcggtgacggtgatctggatggtgttgcggcctggctggcacacatgcttcaggtagagtggcttgtgcgaggtcttgttgtcgccacgctcgatggtgagcggcgtggcattgacgctgacctgcaccgaggctggccagatggtgttcatctgcccgtcctcgtggtgtagcacttgaattgcac

SEQ ID NO: 68785 - DNA, 944 bp, Homo sapiens
aaggaggacgtgatgacgtgcctgattaaggggtgcaacttcgtgctcaagaacatcccccatgaggccttcgtgtaccagaaggattccgaccctgagttccggttccagaccaaccacccccacattttcccctatcttcttgtcaatatcggccctggagtctccatcgtgaaggtggagacggaggacaggttcgagtgggtcggcggcagctccattggaggcggcaccttctgggggcttggcgctctgctcaccaaaacgaagaagtttgacgagctcctgcacctggcctcgaggggccagcacagcaatgtggacatgctggtgcgggacgtctacggcggcgcccaccagactctcgggctgagcgggaacctcatcgccagcagcttcgggaagtcggccaccgccgaccaagagttctccaaagaagacatggcgaaaagcctgctgcacatgatcagcaacgacattgggcagctggcctgcctccacgcacggctgcacagcctggaccgcgtgtactttggaggcttctttatccggggccaccccgtgaccatgcgcaccatcacctatagcatcaacttcttctccaagggggaagtgcaggcgctgtttctgaggcacgaaggctacctgggagccatcggagcgttcctgaaaggagctgagcaggacaatcctaaccagtacagctggggagagaactatgcaggcagctccgggctgatgagtgcatcacccgagctcggcccggcgcagcgggcgcggagtggcacttttgacttgctggtagtgagccgggtggaaaggccactggttgaactgccgcttcttctggacccgccctcctacgtgcccgacacggtggaacttactcgatgacgctctggcctgaaaatcctggctcaactgctgtgaggaggccctgggcg

SEQ ID NO: 68786 - DNA, 982 bp, Homo sapiens
gcgccggggcacatagccactgcccagagctgcccccagagctgggagccatcttgcacatggtgctgtgagatgccctccagagaggaagatggaagctgtctccgtgccccgggactgatgaagggcccattccaggcctttgggcacccgggctcgctacccttctgggagccctgtcctgtgggccaggacaaaggtgccctcactggtggcattctcagaagctcagccactccccacacatgcacataggggcgtgcccacaccaagccacgtgtgggtgtctggggacaatgagtcttgggggagggggtgggtcccttccagaagggtctggccaaagtccagttatgaaggtgagctgagatgggctccctcaaaggagccatagtgtggggagccccgggcagagcccagagagaaatgccagccccgagaccgagacacgctccaaggagtgctgccaagagcagtagacacagccgctgaggcccacggggcacagtgaggctgtgggagagggtggcccctctgtggccatttccctgcctgtgctcacatcccctcctcaggcctgtctcaccagctcttgcagcccatgacccacattctgtttgactctccttcctctcctggcaacagggatcccagtgcccctcaccattccttctggtctctcctctgcctcccggaactgttccccaggactctctcctgggtcagcccttcctcccactccacatcagtggttccgaaccccggatgcctttgggatcagctgggtgcattttaaatccttccagcccagagccctgaggcccaagtcacccccgcctgctcctgtggcaccccttggatcagccaaccattttatcatcatccatcacgtcccctgtcaccaagagcctctggcatgttctgttgtccccacgcccacactggcacccctcatccaccaacctgtatatctcctgcctcc

SEQ ID NO: 68787 - DNA, 603 bp, Homo sapiens
tttcgtgctgaggatgagggtgaagagtacagccctctggagggcctgccaccctttatctcactgcgggaggatcagctgctggtggccgtggccttaccccaggccagaaggaaccagagccagggcaggagaggtgggagctaccgcctcatcaagcagccaaggaggcaggataaggaagccccaaagagggactggggggctgatgaggacggggaggtgtctgaagaagaggagttgaccccgttcagcctggacccacgtggcctccaggaggcactcagtgcccgcatccccctccagagggctctgcccgaggtgcggcacccactgtgtctgcagcagcaccctcaggacagcctgcccacagccagcgtcatcctctgtttccatgatgaggcctggtccactctcctgcggactgtacacagcatcctcgacacagtgcccagggccttcctgaaggagatcatcctcgtggacgacctcagccagcaaggacaactcaagtctgctctcagcgaatatgtggccaggctggagggggtgaagttactcaggagcaacaagaggctgggtgccatcagggcccggtgtatt

SEQ ID NO: 68788 - DNA, 697 bp, Homo sapiens
tttcgtccccgaggctcggccggtgggcgcagccggggtcctctgggattgtcaggcctgtccagcctcccgcagcatccccgccccctcccccggcggtcaagatggagggagcgggcggcctcccctccccacgcgtgttgggaggggttctcgggtagcggcgatggtcagccccggctcccccttccgcacgatcctccgcccgcagcgtggggatgctcgggcagctcctccactcccggtttaggtgtgaacgttggaggggtctggaggctgtggtggcgttttccggaacatgtccccctccatgggggacatctctggaggggagaagttagggccgcgtcccccgtgccggttaaaggggtaggcaccgggctcctccggaatcatcagggtctgtcggggctctctccccgccccctccgagtcctgggaaagatcggaggacggggtggagacaagtgggccttggcccccgcacccctctgcgttcgtgtccgaggcggcggcgggggctcccgaactcccctgaaatcgtggggctccatgtggcctccggcagcgttccaccctcccccacctggggaagggaaggggtggggagtgcccggccccgtcccggccttcctccttcccccgccagacctctccggcgcgcgggtggtggtcgatccgcattgctgttcgaggg

SEQ ID NO: 68789 - DNA, 859 bp, Homo sapiens
cgacgatttcgtagctcactcgctctcagctcctgccaccgctcagccgtcacagcccaggggagcccgagagcctgagagcctgcaaaccggggagggagggagcaaaggagggagggagcaagggcgcgccctggctctccctctgccctgctgcccgcccttcctgcctccacaggtccgccccaatccccgctcacacttgggaaacttgggactgcgctggggccgcgtgtggcacctcaggggggcggcccccggcctcaagaggagggggaggagaaggaggaagaggaggaagtgagcccgaaggatccgctcggagctgtttgtccagctgtttctattcgcacccggagcagtacagccagaagggggccgagccgaaggtggctggctttaggcgctaatttccaactcttttcctcacagcttgtcttttccaggcaccctggagtcccctcaggccagctcggtgggcgcgcacctgccagccgcccctgacctcgcaggccaggcgacctccgagcctgagaagatggcccagtccaagctcgattgccgctcacctgtcggcctcgactgctgcaactgctgcctggacctggcccatcggagtgggctccagcgaggcagcagcggggagaacaacaacccgggcagccctacagtgagcaactttcggcagctgcaggaaaagctggtctttgagaacctcaataccgacaagctcaacagcataatgcggcaggattcgctagagccggtgctgcgggacccctgctacctgatcaacgagggcatctgcaaccgcaacatcgaccagaccatgctctccatcctgctcttcttccacagg

SEQ ID NO: 68790 - DNA, 1569 bp, Homo sapiens
ttttttttttttgccgcatgagattattttattaaaaaactcaaaggaagcagagtgtggagcggtatctgtcctgcgtgacgtctcacatcggagttggctcagaccctggctgtgcatccatcagaaagtgcaaggcccaggccatgagctggggaggaagcctgacagcttggacccgagcacagagggacgtgcagggtggctcatactcatactggaaggcagaaccatcacgatgcctctttgggggttcccagacagagcagggctcctgggctcccctggtagctccggtcctgggaaaaggcggccgattcttgcagggcaaccctacaaactccttgaactccaggctaggtttctggggcctggtcacaagagcctggtgtggactggggacatggctacggggtgagagactgggagtgcagctctggagtggggagctgggggtacggctggcgtgtggggacctgggggtcagggtggccaggggcctgagcagatggctggtgagggctgggagctgcttctctgccctgggtctggagcagccaaggacagggcaggcagaaggctgatgctggtaccactttcctcggatgacatgtggccgggtaaggccggggttcctgaggaactgggtgaggaaggaggagaggctatgagggtcagagataggtcctgcagagccgggtctggtgggggcagctcagggccctgtgtcctctgacaggggcctagagagctcagaattagctggtcattctcagagatgcacagcattgagctggggacagtgtacacagcttctccctgtgggacatgaactcgtggccttgcatcgtgaggcagcccagtgggtgacagggggtgctgtgcaagggccctccagtgtcaggcagctttcagccaggcacacgagtgccccctgatgctcctggtcctcccgcatttcatccagaagctgggacagtgataggcctgcattggacgaggtggactctgaaaggtgctcctcaaggcagtcatagagctttttctgaacatctaagtcttggttgcaaccaggcacccgtagccggggctgctccgtgggcagcaggctgaagcggtccacctggagatagaactctgcgggcgcgccgccctcagcgacctggacatgaaccccgcagtcctgcagcagcagcagccggccctctgtcccgcggaagccgaactccttctcctcccagtccgaggtgtccagggcctcccgcgtcaccaggcatcggacactgtgggtcccgtcagacacaagcagcgtggccccgacgtcggacgtatcaggggcgtgggatgggcccgcgaccgcggcctcggcgtcctgtagtacctcaagcagctgcccggctcgtggactggagggtgtctctgaccccagaatcagctcccgaatccagggccgtaggaccagcctccccgaacctgccatccccacggctacacccagcggatgcaacgggcccgggtttcccgcgggcgcccaggccccgcctttcctcggaagagcggggaagagag

SEQ ID NO: 68791 - DNA, 661 bp, Homo sapiens
  misc_feature (1)...(661): n = a,t,c or g
gctcaccctcagcagctcctcagggaggtccccgccctcgttgatgccgcggttcatggcgatgaaccgttctgccgtgggcttgtcacgcacgttgtggttgtggaggctggtgttgagcatgatgatggcgaatgacagcacgtagcacgtgtctgcaacgagtccggggtgctgggctcagccagaacctccagtggacagtgggaccccgcgtgctgggggcccgcctgcaagaggtgcccggccccacaggtcgtcctcgctcagggaaggcaggtccccaggaacacacgctgggctgtgcccacaggggccgccccctccagagctggaggctgtgcctggcaaggggccaggctgtgggctctgcactgacctgtggactggaagaccccggggttgcacaggcagtagcgagaagcgaaagcctccatcatgcgatcaatcttctgcgcctccccgggcagcctgaagctccataagaactgcctgtctgccttagccaccgtctgcccgcccaggagtgagccccggaggcaggggctgcagtccccatggccagctgcagcctcccgcaccagctattcagcaacgtctgatgctgccgtggatttagcacaaggatcaacgaaatcgtgnnnngggaattccggaccgg

SEQ ID NO: 68792 - DNA, 713 bp, Homo sapiens
tttcgtgtctcggaggggaccggctgtgcatgtaggcggctggggaggtgggcaaagttggctcctttttccgaggaggggcgaggctcggtggggaccgatctctggagcgccgggagcgccgggttttgtgtgttcagtgggtgtgtgcggtcctccgcggtcagctgcgccgcggtccccgcctgggcagcgggaaaccgggctggggatgtaaacaaggagatgggcgtcggaagagagaggagcctctaggggaggcaggctgtggcgctgggggtgacgctggtggctgggaattgctctcggtgctgccttgagcttggggtcagggttttcaggagaaggggaaagggctgcgcccaccctttatccatgaggagctttccctttgttacttggaagctgtggacacttggtggagcgtggggaattacggacgaaggcctgtggctggatgtgagtgtggacttatgagcgacacaaaatggaacttgctggtttggtgcttggggaaggtggcgctggacagagggcacaggatgggggcgcacggaaagaacgattctagcgctcggggattcatgatagtgcatcatttattacatccttcttggcttatccatccaatcctgtttgctttccggggggccctggggtccgtcattgtcccctttccccagcagggctggccctggcagagccatccctat

SEQ ID NO: 68793 - DNA, 949 bp, Homo sapiens
  misc_feature (1)...(949): n = a,t,c or g
ccggaaactcgggtcgacgatttcgtggggaaggagacgctgcccttccgcagcgatggcatcccggctctgtggaggggccctctggtatgtgtgtccctgtccttctggggcgtggatggtgcctgggacccagctggcaaccagttgaagacgttctccttggaagctcttggccctgaggactttgcctggggcattggccctgccatggcgttccggagggccgagggcacgtctatgatccaggccctggccatgacggtggccgagatccccgtgttcctgtacacgacgtttgggcagtctgcattctcccagctacggttgacgccaggcctgcggaaagtcctctttgccacggccctggggactgtggccctggccctggctgcccaccagctgaagaggcgacggaggaggaagaagcaggttggtcccgagatgggaggggagcagctgggcacggtgcccctccctatcctcttggccaggaaggtcccttcagtgaagaaaggatactccagccggagagtccagagccccagcagcaagagcaacgacaccctgagtggcatctcttccattgagcccagcaagcactcggggctcctcccacagtgtggcctcgatgatggcagtgaactcatccagccccacagccgcgtgctcgggactatgggatgccagagggatggaggagtctctgaccaccagcgacggcaatgcagagagcctgtacatgcaaggcatggagctgtttgaggaagctctgcagaagtgggagcaggcactaagcgtgggccagcggggggacagcggacacccccaatgcccagggacggccttccggaacccagagactgcatcagagccactgtctgagccagagttcacagcggaaaggagttttgcagangaagcttggaatnccctnctggnaacgtgc

SEQ ID NO: 68794 - DNA, 990 bp, Homo sapiens
caaaagagggtggttcctcagccgcccctcacgtggcagcctccacggagacttcctggatcttaatgttccttctcccactcgtaagtccacactgactgggggagttcaaaagcagaggtgcattcagcagggctgggtatgactaaggagactatcagggcaggagcagaggccacagcatcaacagcggtacatctgggcccttggcattcctggcacacccctgcccagaggcaggagtccctgaccagccagcttcctccatagcatgacctgtgccaaatgtaaccatggattctgctggcgctgcctcaagtcctggaagccaaatcacaaagactattacaactgctctgccatggtaagcaaggcagctcgccaggagaagcggtttcaggactataatgagaggtgcactttccatcaccaggcgcgggagtttgctgtgaacttgcggaaccgggtgtctgccatccatgaagtgcccccgcccagatccttcaccttcctcaatgatgcctgccagggactggagcaggctcggaaggtgctggcctacgcctgcgtgtacagcttctacagccaggacgcagagtacatggatgtggtggagcagcagacagagaacctggagctgcacaccaatgccctgcagatcctcctgggtgagccacccctgccagccaggccctcctcctgcctcctcccctctgttgcacagcccggcccctcccagacaggtcaagcggcacccttaccttccctctctcctcttcctcttcattcttcatggccttctcactgcctggctgttaaagctcaggtcgaaagcctacattgtaaggtgcccaagggcgcagatgttcgtggatgattcttggatcctgggctttaccctgctcccctagggagcttcatgagaatgtctagagctgcacctggtgcttggtagacgttccataggtgattgttggaggaaggaatgga

SEQ ID NO: 68795 - DNA, 1145 bp, Homo sapiens
tgaccttctagcaggttcccccagggaggggaggccaccagctgactcaccgcctaggaaggcccaggtgctgacctagtggcggagaaaaaacagccgcacaccgagtgtggcttccagagcccctcttcagctccaggcagccccctctaacatgtcccctcctgagctcagcccccacccccatactcctggtggggactaggtcttgcttggcttcggggctgaccgccggtcccctttcttctcaccacagtgcccatttttcatccagggagaacctcggggctgggacacctcctggccctcaccctgggtcatgtttacagtcctcagtgccccacaccggtggccccctgaggacacctccaccctgaccttgattttcccaaacgctgcctcttggtgacagactcagcccaaaaccccttccttctgtctctggagacccttgagcttggggaaatatggaggggtgggtgtctgcaatcaaggcctctgcagctcacggctggcccggtgggctgggacttccgtctgaattttaaatacttagggttcatttttttttctctggcaacaaagcttgatgttttcactgctttagtttcctgtttgctggtgggaggggatacggtctgtgactctggacttgctctgggggaacagttgtcactgcccccggggagaggggcagcttgggctggagaagcacagccagagacagagcccctcgagagggatccttggctgcttcattgtcttccccccagcaagccctgctctccacaggcacctctggggtcttggtatggtccccgctcacctccttccagagtcctgagtggtgtgggtgtgggtggcacaggatctggggcatgggaggggttcagagcttcccagagccccgtgtcctggcagactcagctggtgggctggggtgttaaccccagtcctggcgtaggtttacagactctcaaggtacgttggccctggtctcctgggagagaggggtgagggatgtcccctaccaaagcacaaggtgggatcaggctgcctcctgggtcgggtgtcgggggagctgtccggcagcctggcagggagatgcaagggctaaagtaaaattttgtcaagtaaaaaaaaaa

SEQ ID NO: 68796 - DNA, 595 bp, Homo sapiens
agagtgtgttctccaaccacaattgactcaaatacttgtaagctaaataacagacttctaaataatctgcggttcaaagaggaagtctgtagggaaatttaaaaacatacacagacctaaatgaaaatgcagcatatcagaatttgtgggataaagctaaacagtgcaatacagattatctgtagcaccagtgcgtacattggaaaacaggaaaagctttcctcaagtcgataatctaagctctaatctcaagaaccaagagaaacaaaaccaaaggaagcagaaggaaggacatttgaagagcagaaatcaatgacattgaaaacagaaatcaaacaatagagaaaattaatgaaaactagctggttttttgaaaaattaataaaactggcaatctctagcaaggctgacaaaaagaatgtaaattatcaatatcaggaatgaaatgggatgtcaccacagaccctgcagatatcaaaaggaatactgcaaacaattctataagtttgacagcttacacaaaatggattaatttcttgcaaaacacaaagtaccacaactcatccaatgtcaaatagattttgagttgccctat

SEQ ID NO: 68797 - DNA, 403 bp, Homo sapiens
  misc_feature (1)...(403): n = a,t,c or g
cctaagatcaggaataaaataaagacttccactcctgccatttctattctagctggggcaattatataagataatgaaataaaactcatgtagattgaaaaggaagttgtaaaactatttnnnnnnnnnnnnnnnnnnnnnnnnnnnnnnnnnnnttctaaggaacacacacacactcatacacaactattagggctaataaacgagttcagcagagcttcagggtaaaagataaatgtacaaaaattgtttctatacaccaacaatgtacaatcaaagaatgaaattaaggaaacaagtttatgtacaaaagcatcaaaaagaataggatacttaggaatacatttaacaaaagaagtgtaagacttgtacactgaaagaacaaaacattattgaaagaaat

SEQ ID NO: 68798 - DNA, 1436 bp, Homo sapiens
tctgatgatgggaggatttggaggtgctagtatacagaaagcgcagtctctgattgatttaggatctagtagctcaacttcctcgactgcttcactctcagggaactcacccaagactgggacctcagagtgggcagttcctcagcctacaagattaaaatatcggcaaaaatttaatactcttgacaaaagtatgagtggatatctctcaggttttcaagctagaaatgcccttcttcagtcaaatctttctcaaactcagctggctactatttggactctggctgacgttgatggtgatggacagctaaaagcagaagagtttattcttgcaatgcaccttactgacatggccaaagctggacagccattaccactgactttacctcctgagcttgttcctccatctttcagaggaggaaagcaaattgattccattaatggaactctggccttcatatcagaaaatgcaagaagaggagcctcagaagaaattaccagttacttttgaggacaaacggaaagccaactatgagcgagggaacatggagctggaaaagcgacgccaagccttgatggagcagcaacaaagggaggcagaacgtaaagcccagaaagaaaaggaagagtgggaacgaaaacagagagaattacaagaacaagaatggaagaaacaacttgaattagaaaaacgcttagagaagcaacgggaattggagagacaacgagaggaagaaaggagaaaagacatagaaagacgagaggcagcaaaacaggaacttgaacgacaacgtcgcttagaatgggagagaattcggcgacaggagcttctcaatcaaaagaatagagaacaagaagaaattgtcaggttaaactctaaaaagaagaatcttcatcttgagttggaagcactgaatggcaaacatcagcagatctcaggcagacttcaggatgtccgactcaaaaagcaaactcaaaagactgagctggaagttctggataagcagtgtgacttggaaattatggaaatcaagcaacttcaacaggaacttcaggaatatcagaataagcttatctatctggtacctgagaagcaattattaaatgaaagaattaaaaacatgcagttcagtaacacacctggtaagtctctaaggtttgtctgattacttttatccttttctgaatgactgtatcagtcacattgttacttttttaaaattaaaaaaagtattctgttataaataacactttttgcctgtaagtttaaagtttcaaaataaagtgaaaaatatcccagatgttagagcatttttagtgataaaaagtagataaaaataaaatagtaatgattgtggtatgacttcatatcttgatgatatttttatgtatataattgaaacatcaaataaagtgttagactataagatataaag

SEQ ID NO: 68799 - DNA, 1044 bp, Homo sapiens
tttcgtggaggacaaggtgggaccatagactttgccaaaagctgcaggtggatcgggggaccctgggggctcaggatccagcaaggggcggcaggagtaaaggaggaaggaatgacaggtgcaaataccttcccaccaaagcccttgttgccctctggctcctccccagagttgtccccactctcagtcggtcacccactccttgaacttgagatcggtgtcagtggtgctaaagccatcatcagcaatgacatcatcaccccctcctcctcatggatgaccgtgtgctcctcgtcacttgctatgtcctcactggccatgtgctgggaatgagcagctcaggtgggcagcagcagggctgcccactggtcacctccctcaccaggggctgcaaagtggcctggagctccatactgagtagaaggctttgggccagagtatgatgcagtgccagacaccacctgtgtcggttcccgtagtgcctgacggtctatttccctgccgtccaggctgtgtaccccactgtgggagaaggcttgggccaggctaagccaggttccctgactgtgtgcagccattctgccccacagaagctgctccttggtatccgagctctgaagtgtttgggctgcaactgactggagttcagaggacaccccaggggcagtggcagtgcccgtctcttatatgctccgctcccacgagcccttgttacactcctgctagcccctggcttgtgggcttggcctctgagctggacttctttcggtccttgttgcaagtgggccaccttcacctggaaggccaggtcgtggtatttctgcatctcattgggccccagggtgtaccaccgctcgctcagcatctggctgacggtccggttatcctggttggggtgaccctggtgcgccccgccagggcctggtgccgcctgctgaagatcatgagcgccactcatgggccaccggatgtggtccttgtctgatttgttggggctgcgtccatccttctcagaaatgagtcctgttccttgcgcagggcact

SEQ ID NO: 68800 - DNA, 1128 bp, Homo sapiens
ggcacgaggctcatacggcagcagcacgagatgtgcctgaaccactcaaaccaattcacccagctgggcaacatcactgaaaccaccaagtttgaaaagttggcggaggactgtaagcggagcatggacattctgaagcaagccttcgtccggggtctccccacgcccaccgcccgctttgagcaaaggaccttcagcgtcatcaagatcttccctgacctcagcagcaacgacatgctcctcttcatcgtgaagggcatcaacttgcccacacccccaggactgtcccctggcgatctggatgtctttgttcggtttgacttcccctatcccaacgtggaagaagctcagaaagacaagaccagtgtgatcaagaacacagactcccctgagttcaaggagcagttcaaactctgcatcaaccgcagccaccgtggcttccgaagggccatccagaccaagggcatcaagttcgaagtggttcacaagggggggctgttcaagactgaccgggtgctggggacagcccagctgaagctggatgcactggagatagcatgtgaggtccgggagatccttgaggtcctggatggtcgccggcccacaggggggcgactggaggtaatggtccggattcgggagccactgacagcccagcagttggagatgacgacagagaggtggctggtcattgaccctgtgccggcagctgtgcccacacaggttgctgggcccaaagggaaggcccctcctgtgcctgcccctgcaagggagtcagggaacagatcagcccggcccctgcatagcctcagtgtgctggcgtttgaccaagagcgtctggagcggaagatcctggccctcaggcaggcgcggcggccggtgcccccagaagtggcccagcagtaccaggacatcatgcaacgcagccagtggcagagggcacagctggagcaggggggtgtgggcatccgacgggaatacgcagcccagctggagcggcagctgcagttctacacggaggctgcccggcgcctgggcaccgatggcagcagggatgctgcaaaggaggcgctctataggcggaatctggtagagagtgagctgcagcggctccgcaggtgaggagcc

SEQ ID NO: 68801 - DNA, 1413 bp, Homo sapiens
cgcaggactcctttacatgtgtccatcatggccgggaatgaatatgtgttcagtcagctgctgcagtgcaaacagtacgtagggagacacgcacaagtgagaaggcggttgtgaggggggattgtgagtgaaaaatcattctttttaaacatctttagtgttgcatatattaagaagttaaagtgagctaaaaaaaaaatgtgtcattgaaaaagggtaaagagaaagaaccaggttgttgtcagtatagagtgtctcaaaaagattgtatgtgctgttgacactgcttctgcttttcagactagatttagaactcaaagaccacgagggcagcacggctctgtggctggcagtgcagcatatcacagtgtcttctgaccagtctgtgaaccccttcgaagatgtccccgtggtaaatgggacttcatttgatgagaacagctttgcagccagactcatccagcgcggcagccacacagacgcacctgacacggcgacaggaaactgtttactacagcgggcagctggagcaggaaacgaggcagcagctcttttcctggcaaccaacggtgcccatgtcaaccacagaaacaagtggggagaaaccccgttgcacacagcgtgtcggcatggcctggccaacctcacagcagagctcctgcagcaaggcgccaacccaaacctgcagacggaggaagctctgcctctgccaaaggaggccgcatccctgaccagcttggcggacagcgtccatctgcagacgccactgcacatggcgatcgcctataaccatccggatgtggtgtctgtcatcctggagcagaaagccaatgctcttcatgccaccaacaacttgcagatcattccggacttcagcctcaaagattcccgagaccagactgtgctgggcctggcattatggactggcatgcacacgatcgcagcccagctgctgggctctggagccgccatcaatgacaccatgtcggatgggcagacgctactgcacatggccatacagcggcaggacagcaagagcgcactcttcctgctggagcaccaggcagatataaatgtcagcaggactcaggacggggagacagccctccagctggccatcagaaaccagcttccactcgtagttgatgccatatgcacccgaggagctgacatgtctgtgccagatgagaaggggaaccccccgctgtggcttgcattggcaaacaatctggaggacatcgcatccactctggtcagacatggctgtgatgccacatgctggggtccgggacctggtgggtgccttcagacgctcttgcacagagccattgatgaaaacaacgagcccaccgcctgctttcttattcgcagtggctgtgatgtgaacagtcccagacaaccaggcagtgtatt

SEQ ID NO: 68802 - DNA, 942 bp, Homo sapiens
tcgacccacgcgtccgggctggattaatggagcatatttccttcccctcccaatgtccaggtggagtcctttgaaagactgatacaggcaggacgtctcatgccccaggaccaagtcaagggcttccagcggctgaaggctgcccacgcggccctagaggaggagtacctgaaggcttgtcgggagcaacaccctgcccagccgcttgccggctccaaggggacgcctggaagatttgatcctcgcagggagctggaggcagagatataccgtctgggaagctgcctggaagagctgaaggaacacatagaccagacccagcaagagcctgagccgcccgggtcagactcagctctggacagcaccccagccctgccctgcctccatcagccaacgcacctgcctgctccttctggacaagcccccatgccagccatcaagacctcctgccctgagcctgctaccaccactgccgccgccagcactggcccctgcccattgcacgtaaatgtggaggtgagctctggcaacagtgaggtggaggacaggccacaggaccccctggcccgactcaggcacaaggagctgcagatggaacaagtttaccatggcctcatggagcggtacctcagtgtgaagtctctcccagaagccatgagaatggaggaggaggaagaaggagaggaggaggaggaggaagaggggggaggtgactccctggaagttgatggggtggctgcaactccagggaaagcagaggccaccagggtcctcccaaggcagtgcccggtgcaggctgagaaaagtcatggggctcccctggagtaagtcactgagcctttcctgcagaatgtttggttccaccctaaaaccacagggatgatcactgtcagagtgaataagacagcgcttcacagtttagacatggcttacctgtcctgc

SEQ ID NO: 68803 - DNA, 726 bp, Homo sapiens
cccaaacaaagatggcgcgggaagcgtctgtgagggcagactgatccgagcacccaaaccctcggcggacagcggagccagtggtagccgcacggccctaaaaccatggaggagggcggcagcactggcagtgctggcagtgacagcagcaccagcgggagtggcggggcgcagcaaagggagctggagcgcatggctgaggtcttggtcaccggggaacagctacggctcaggctgcacgaagaaaaggttattaaagatagacgtcatcatctcaagacctacccaaactgttttgtcgcaaaagaactgattgactggctgattgaacacaaagaggcttctgacagagagacggcaattaaactcatgcagaaattagcagaccggggcattattcaccatgtgtgtgatgagcataaggaattcaaggatgtcaaactcttctaccgctttagaaaggatgacggcaccttcccattggataatgaagtgaaggcctttatgagaggacagaggctatatgaaaagtatgttccgcatgaaatcccccctgtaatcttgacttatagaaagaagcacaactgtgccagtctcattatgttgatttcagcggggcttttctatgtgggctggttacataactgttcttttccatatgagaaaactatcaagcatttgctgtctctttgccagaaaataagtcaatttcataagggttttaaa

SEQ ID NO: 68804 - DNA, 1042 bp, Homo sapiens
  misc_feature (1)...(1042): n = a,t,c or g
acgcgtccgggagtttgcaaatattttctcccattccatgggttgtctcttcactttgttaattatcttcttttctgtgtggaagctttttacttgatatgatcccgtttgtccatttttgctttggttacttgtgctgtgtgaagtgttaatcaagaaatcttcacttantccagtgtgctggagtgtttccccaatgttttctcttagtagtttcatagtttgaggtcttaagtttaagtctttaatccattttgatttgatttttttaatatggtgagagataggggtctaggttcattcttctgcatatgaatatccagttttctagcatcatttttttgaagagactgtcctttctccaatgtgtgttcttggcacttttgtcgaaaatgagttcactgtagctatatggatttagctctgagttctttattctgtcccactatctatgtgtctgtttttatgccactaccatgctgtttttgtttctatagctctgtggtataatttaaagtcaggtaatgtgattcttccagttttgttctcttgctcaggataactttggctacgctgggtcttttgtggttccatataaatttcagcatttttttttctatttcagtgaagaatgttattggtattttgatagggattgcattgagtctgtagattgctttaggtagtgtgaacattttaacaatattaatttttctaatgtatgaacatggaatttctttccattttttggtgccctcttcaatttctttcatcagtggtttatagttttcattgtagaaatccttctcttctttgggttaagttaattttgagggtactttattttatttgtgggcaattgggaaatgggaattcctttcctgatttctttttccaggattgttttctgttgggcatataggaaatgcctacctggatttttggtatgttggatttgtatccccgccaacctttaccggaaattgttgatccagntcccaataggtttccgggngggagtnccaggggttttcccccaata

SEQ ID NO: 68805 - DNA, 959 bp, Homo sapiens
gcctcaccaagcaggaagactgctgcggtagcatcggcactgcctggggccagagcaagtgccacaagtgtccccagctgcagtacacaggagtgcagaagccagggcctgtacgtggggaagtgggcgctgactgtccccagggctacaagaggcttaacagcacccactgccaggacatcaacgagtgcgcaatgccgggcgtgtgtcgccatggtgactgcctcaacaaccctggctcctatcgctgtgtctgcccacctggccatagtttaggcccctcccgtacacagtgcattgcagacaaaccggaggagaagagcctgtgtttccgcctggtgagccctgagcaccagtgccagcacccactgaccacccgcctgacccgccagctctgctgctgcagtgtcggcaaggcctggggcgcgcggtgtcagcgctgcccaacagatggcaccgctgcgttcaaggagatctgcccagctgggaagggataccacattctcacctcccaccagacgctcaccattcagggcgagagtgacttttcccttttcctgcaccctgacgggccacccaagccccagcagcttccggagagccctagccaggctccaccacctgaggacacagaggaagagagaggggtgaccacggactcaccggtgagtgaggagaggtcagtgcagcagagccacccaactgccaccacgactcctgcccggccctaccccgagctgatctcccgtccctcgcccccgaccatgcgctggttcctgccggacttgcctccttcccgcagcgccgtagagatcgctcccactcaggtcacagagactgatgagtgccgactgaaccagaacatctgtggccacggagagtgcgtgccgggcccccctgactactcctgccactgcaaccccggctaccggtcacatccccagcaccgctactgcgtg

SEQ ID NO: 68806 - DNA, 970 bp, Homo sapiens
tatagttatgtgggggtatatatgtgtatttttttttcttaaaaagggaaaacaactgttcaaaaccaactgggcagtatggtgggggtggggagcagtcctacagaagggggccgataacttcccccccaggaacaaagaacaaacacaatacaaagaaaataaccaccaatgctcccgcatggctcaggagcctttaaaaaacagattgtcccctcccccaactggctttttttttttccctttttttttaatcttttttttttccattttcttttttgttgttgttgttttagcacctgtacaataaaactgtaccatctccaaccagagccggccacggcgaggccctcctgcctttggatggtacatactctacaaggattgttcggaaaaatagcaattggtagaaaaataagagtgggagggacaatgccacagagggggcggggacagggaagcaacccaagctcctctctctctctcactcgacaaacccagcgctggaggcccagaggccagggggaggccaggtagggataccactcagccccaggcccccaggcatgagtggagcaagggctggagaccactttcctgcccttgcctaggaaacagctgacgcctggatttcacatccggcagtgagtcccagagccctctgcagattcccaaggagaatgaggggctgagggaggaggtgggaggagaggaaggaaaggggtgctgtgagtctcagaaggggcagggatgggggtggctgagggctgggaggtgagaggctcagtatcttgagacagggaggccagaacggggtgggagagtggaggcaggaacaaactcgtattgtgcactctgaggggggcagtgaagaaggcgtgaggagggggcccaccctcacccctcagatccccggacgcgaaagcggacgcaagggcggacgcgtgggcggacgcgtgggtcgacccgg

SEQ ID NO: 68807 - DNA, 408 bp, Homo sapiens
aaaaaccctgcagtaggcaccaaacctaacaatgagacattaaaagccttctctttactatcagaaacaaggcaaagaggcccaatgttctcacatctattcaaagttacattacaggtctcagccagtaagctaaggaaagtaaaacaaattaaaaataaaaggtttggaaaagtaaaaataaaactctgattattttcttatgatatgactacaatgacatccagaaataatatataaacaagttatcaaaattaataaaagtataagactaaaagtgattaaatacagaaaatccttttgatatatttttctacttattgctgatgtatagaaatgaatacttgaaagaacaaaaagtaatacgatacctagaaatacatctaacacaatacatataggatttca

SEQ ID NO: 68808 - DNA, 881 bp, Homo sapiens
atatgattaaaaacaaaagcaaatactcatatatcagtggctgaagaaggaaatgataaatggctctctcttgatttggagcaggtgggtagatgaatttcaaaaatatacctctttggattctattttctccttgaagttagatacctaaagtcaccatgtaatgttttaactctccccttactccaattttgttttagtttcatgaatctttattgaatatttgtgccctgctctagatagatgggaaggttcaatttttaataattaggtaactaggaatgcccagcttgttaagggaggtagacgtttaacaattactaaccactttggttaaataaagcagccaaagactagataagatgtaaatgcaccaaagagaaggaaattacttattctctctaggaagctattaggaatgctttcagagagtagggtaagccagactcttcttcaagttatttgaggagagtagtaacttagaagtgaaattttgattttgtgccatcattaaatctttgaataagagttttctgaatgactgacagaggttgatggaatattttatttttgaagaacttttattctaaaagttaggattagagaagtttttgctgtttctattcattattcctttttgcatacaaaaccgtccttgttgggattattcttgaagtatattctttagaatttcttttagagctggttttgaaggtaaataccatcagtgtctctagaaaaatctctctggcgggagggacaatgatcgggatataaacccaggcgttccagggggcaacggcaaccccctttaggtcccctgcctttgtatgggagctctgttttcactctatttcactctattaaatcttgcaactgcg

SEQ ID NO: 68809 - DNA, 582 bp, Homo sapiens
attttgttcattttcacaatattaattcatcccatccacaagcatgaatttttttttcatttacttgtgtttttaaatttttgttcattggggttttatagtttttcatatacaggacctttaattttttgcttaaatttacacctaagtatttaatttctgttgctatcatacttgggatttttaaaaaaatttcttcaggtagtttgttatttgtatacagaaacacttctgatctttgttagattattttgtatcctgaaaccttatcgaattcatgcatcagttctaacagtttttggtggaatatttagggttttctgtatacaggatcatgttgtctgcaattagagataatttcacttttttctgagtaggatgcttttcttttcttggctaattgttctgcctaggaattccactgttaacgatgaaaagaagtggtgagactggtcatccttgtcttgtctctgaacatggaggaaaagctttccacttttcactgttgagaataatgttagctaagagcttgtcatacacggttcttttttgtgtcgagatacattttctctacacttaatt

SEQ ID NO: 68810 - DNA, 418 bp, Homo sapiens
tttcgtccgcaagggtgactagagcccccatgctgcggggctgggggtgggagccggcaccggggacgagggccatcctctggcacagacaccctctccttcccgggggccctgactcgaggctgacgcaggaccccctcctccttcccttccgcgtccccgtcgcgccgcaggcctcagcagggaaccagagccgggacaggacgcagggccgggagcgaaggcagaaccccgggagctgagccgctcggggcagcgcgaacccgaagggatgggcatgggggtggggaggttggcagtgacgtcataggattaacctccctgtgccaggccaggtgctgccccctcggagagccacagtctcggagctgaccgacctggggagcgtgaggcggagcccagcctggagccccaacaa

SEQ ID NO: 68811 - DNA, 442 bp, Homo sapiens
tttcgtgtcgggggctattctctctcccaggaacatggcggcgagtcagggaggaggcggtaacagtgggggcggcggttgtggtggaggtggaagtagcggtggctgtggcacggctggagggggaggtggcggggctggagggggaggcggcggcggcggcgggaccctggtggttcccatcccggtaccgactcttttcggtcagccgttccccaacgggccgccgtggaacccggggagcctgcagcctcagcacaccgtgaggagcctggaccgggccctggaagaggcgggcagctccggcatcctgagcctcagtggtcggaaactccgagacttcccgggcagcggctacgacctgacggacaccacccaagcagatctttccagaaatcgttttacagaaattccttctgatatctggttatttgcacccctt

SEQ ID NO: 68812 - DNA, 884 bp, Homo sapiens
  misc_feature (1)...(884): n = a,t,c or g
atctttgtctccttctcttctctccccacaatccttgatgagttgttctcagacactgcttggcaaatctgaaccctagtcagtcttataagggctcctgtcctccttggaaggctttgttattgatacatgccaatgagaaaaaaacacattaacgagtagctgatggatactaagggagtattttactgaaaaaaatagaaaactacatttttacacgaaataaacttatgtctgcaatactcagccttaaattcacccctcacttcagaagaggtcccaggggcaggaataacacgcacagattgtttgttcacgacttccagccggtccaccagacctctggccaggtaatactgtacaaagtgcttccacgtgatttctcttccaggatctcgaaaatagaggtagaaaaatcccatgggcaacgcctgacccccaaaagggccagactgcgggaaatcctcgtcatcccaggggaagtccccccttctggcatccgcctccaccaggcaacgttatcctgcttccctcctctcctgcctccgtctcctccagactcagcattctctagttcaccagtctctttgggtggttttgaacacagccaccaggaaaataacgtcggtcttgcctgcagagtcagcttctgaacgtggatcccctggaagcactggaacaggaggccagatgagctttcctagcttcttcttgaaatgcaacaacgnacatnctcaacttgggcaataaccaacttgtcggggccttggcccagggncccctccggggtttggtnttgggccgnncccctgccggcctccttngggccaaccaaaaaatcgggccnaaaaggnaaaggccaaggggggcctgggccaaacccc

SEQ ID NO: 68813 - DNA, 597 bp, Homo sapiens
acatttcgtgtgcgtttgaaggttggcggggcggcgtttggttttcccggatatgtgggtgtgcgcctcccgggtggggcgggcggggaggggaggaggaggaagggggaggttactggtggtggcggcggcggcggcggcccgggctccggctgtcggggaagctgctgagctgtgatggtgatgacgaggtgaaaatggcggatctttcgaaatacaatcccggcccctgacataccagaggcggcggcgacggcgacgtcgccaccccggctcccttctcggtccccgggtaccctggagcgctccagtttggacaaactgggaaaggaagctgctggccagagctatcgtgcacgggcaaaacaagccccgccggggctcgggattgcccaggaccttccggagcccctacctcggagcccgagggaggagaaagcggcagccgctggagtgcctgatcaactttctagcgggagaacgatcatggaggtggtgccagctgaggtgaatagtttgcttccagaggaaataatggacactggtataactttagtggatgatgatagtattgaggctgttattgtttcatccccc

SEQ ID NO: 68814 - DNA, 421 bp, Homo sapiens
cggtggcattcgccttccacctcctggatgtggcagataacgcccttcagacactagaggaaacagctttcccttctccagacaaactggtcaccttgaggctgtctggctaccccctaacctgtgactgccgcctcctctggctgctccggctccgccgccacctggactttggcatgtccccccctgcctgtgctggcccccatcatgtccaggggaagagcctgaaggagttttcagacatcctgcctccagggcacttcacctgcaaaccagccctgatccgaaagtcggggcctcgatgggtcattgcagaggagggcgggcatgcggttttctcctgctctggagatggagacccagcccccactgtctcctggatgaggcctcatggggcttggctgggcagggctggacgaaa

SEQ ID NO: 68815 - DNA, 1834 bp, Homo sapiens
agcggccgccaggaaggattcagacaactctgcctgggagtgagggctctgctcagcggcctagacctgggcacaacggaacaggccactccgtttctcatcacagacctgaaggcagatggcctgggcgtcgggcttcctctgctctctggcggggcgattttcacggtcaccaggctgcggacaggctgtgggggtggcgggcggtccaaagccaccgcttcacgtaggccaggggagccttggagaaatcaggcctgatgttgctcagcagcggcagcctgttgggaaagcacctccaggcctcggggaccatctctctcaggacgcggatgcgggcggggaccatctctctctggatgcagatgcgggtgtagtcccagctgggaggagtggtgcggaggggccggatgcggacccagtgcttcctgtggaagtaggtgaccgttgcagttctcctggacctgggagctgaggaaggcccctggactgcagaacccagtgcttttgggcggggcgcagctttctggcaagcggcttgggccttccagtagacactgggctgccagaagtttccgaaatctgcggtcaaggccagagatcaaatgtcagggctcagtgactagcgacggttagcatcaaaatgttggaaagtgcacaaggcgccgtgtgccaggtacggtctgtccaccaactgttgcatggggcaggaggccacggccaggccacagctttgccgcgcgcagctgcagaaggggcaagtagcgccccatgctgtctggaggaccaaggaggctcaagcctgtccttcccactcatggtcccagacacttagctctgggcagaggggcctggcagctgtctctgcttttgtacctgacctttaaaggcagaacatagaagaatttctgccaggtcctgaaaactgcagatacctgttgacagaagggtgctctctttgatcagtgtgaaaatgatcacaatacacttggaggctcttttaaggaaaaacaaatcatttgctcatattcgtctaggatgactgttaatatcactttttgcaattttgctcttaagaaaacggtgaaagccatcaggatttatgttttagtacctgtaatgctgattttatgttgaccctcataattttcagtgttcacacagccatatatacataatcttctctaaacactaatgccatttctgtcctttcatttctattggtaatcctggagtagagtgaggcacattttccactaatagctgaaaagatctaacttcaaaaacaaagaatccaaaggctgcttagtaactgtagtgcctaagtttagagtctgttcaaggtggtgtgaaaagttttttgggggggggcatttccctcaaaagcacgtggagaaggaacctattgaccctctggaatgccagaatcgggaagagacaaaaaagtcgcaaccaattgaagattgggcaatagatttggcccagactgaggcagatgggtgaatagtaaagacaataaatagagcttaatgaggaagcaccaaatgctttttgaggtcagagggggccaagtgttttgcaatgcagggttggggtcagccagtagttgcaggggaatgagatccctaacactctcctctcaccaatgaattcctttggttttttgcctgattccttatttatggaatcatctctgggtatatgattttcaaaacctagagatattcctatggtataattcagtataattttcttctaaagacagttctcataatgagtggaatgactttttattcatatctaagacatctcaagataatggcatcagagtagg

SEQ ID NO: 68816 - DNA, 909 bp, Homo sapiens
ctaattgacatttacagtatacttcattcaacagagtacatattcttctcaagctcacaggaaacatccaccaagatagactacatacttggccttaagatacaccttacaaatttcaaagaatacaaaccatataaagtgtgctctcagaggaaattaaacaaaatcaaaaacagaaacgtagatgggaaatctcaaaataactggagattaaacaaaacacttctagataccagatgggtcaaagaagaagtctgaacagaaattttaaaatgttttgaactaaataaaaatgaaaatacaatgtatcaaaatttataggaagcagtgaaagtagtggttggagataaattataatattgaatgcctatattagaagagattaaaaagatttaaaattcataatctaagtttccatcttaggaaactagagaagaaagatcagtgtaagcctaaagcaagcaaaaggatagaaataaaaattatagtagaaatcaataaaatagaaaacaagaaaccaatagaaaaattcagtgaagtaaaaatgtgctaatttgtgcagcagcaatagaaaaaagaaataaaaacagtactttcacaggtcagtaaaatgtataaacctctagctaagctaactaagaaaaaaaaacacagattgctgataacagaaatgagaaaggggtcatcactactgatcccaaggacattaaaaagataacaaaagaatattatgagcaactctgtacccacagatttgacagcttaggtgaaacagatcaatttcttgaaagacacaaacaaccaaaactcacacagggaaaagagatgatctgaataggcctatatctattatggaaattgataaattatggaagtcaataaacaaccttgcaaacaagaaaaaaaaaa

SEQ ID NO: 68817 - DNA, 564 bp, Homo sapiens
tttttttttttttatcttgcaaaggctttatttgaaaattttgaaacttacatcccacagtaattcaagatgatcaccacaagaagaagaaagagataatacaaaaatatatatcacagcctaggagccagggaagaagggaaggaggaaggtggaaaaaccagtgagaaggagggaagaacctgaggagggggaaagggcagggaagcaaaaggaaggagagtggaaggaaggagggaggaaaggaggggacaggagggagtccgggaagggaagggtagacttggaggcagagctcccgatggccttgaaccagctgactccggtccctggcagcctaggtggagttagggaggcccaaagggaggctgggaagggaggactggctcagggggctctgaagtccagagaatggcacacacacagacagcccaggacagaccagaccaaagggactgttaggagaaaagggaagggccaatgggagtcccctttcctccatgttagtgccagcaggcgactccccaaaacccatctgtcagaaaacagatttagcagtgggct

SEQ ID NO: 68818 - DNA, 606 bp, Homo sapiens
cccacgcgtccgggcagccttctcgggtgcctgatccggcccagcatggcctcggaggagctgctgctcgaggtgcagcacgaacgcctggagctcactgtggctgtgcttgtggcagtccctggggtcgatgctgacgaccgcctcctcttggcctggcccctggaggggctggcggggaacctctggctgcaggacctgtatccagtggaggctgctaggctgcgagccctggacgaccatgacgctgggactcgccggcggctgctgctgctgctgtgtgctgtctgccgtggttgctcggctctggggcagctaggccggggtcacctgacccaggtggtcctgcgtctgggggaggacaacgtggattggacggaggaggccttgggtgagcgcttcctgcaagccctggagctgctcatcggcagcctggagcaggccagcctgccctgccacttcaaccccagcgtgaacctcttcagcagcttgcgtgaggaggagattgacgacattggctatgcgctatacagtggcctacaggagcccgaggggctgctctaggtgggtggaaacgggtgggtgccatgttttctaatgctgggg

SEQ ID NO: 68819 - DNA, 394 bp, Homo sapiens
aagagccacagtggatccaggccctgatgcctgagaaggagccagctaggcagagccggggaggagcactccagacagacagcaatgaaccatccaaaaatgaagtgaagaagacaatctcatttataatattggcaaaaagaacatacctagaaataaatgcaacaaaagatgcataaaacttgtgtactgaaaaatacaaaatatttttgaaaggaatcaaagagtatcgaattaaatggaaagatatcctgcagtcatggatcaggagacataatgttaagatggccaaactcccgaattcatctatagcttcacaatctctatcaaaatcccatctgtctttttacaagctgatcctcaaattcataaggaaatacaagggtttcagaat

SEQ ID NO: 68820 - DNA, 1102 bp, Homo sapiens
agtcgacgatttcgtgccggcggctatttctattcccaggaaatccccgggccatctgtgaccaacaaaggcccgagcccccccacccccgcgagcccaacaacagggcccaacggcccctggctccggggtggggggatcgggcctggatcggctgccggtgcctgccagtgggggttaggcttgctgaggggcaggcacaggagtcctggctgagctcatggcctgaggctgcctagcggccacggggaatggttgcaatggcggaggcagaggcaggggtggcagtggaggtccgtggactgccccctgccgtgcccgacgagctgctcactctctactttgaaaaccgccgacgctctggagggggacctgtgttgagctggcagagactgggctgtgggggcgtcctcaccttcagagagcctgcagacgccgagagggtcttggcccaggcagatcacgaactacatggtgcccagctgagcctgcggccagctccaccacgagcccctgcacgcctgctgctccaaggactgccccctggcaccacgccccagcgcttggagcagcatgtccaggccttgctgcgggcctcggggctcccagtacagccttgctgtgccttggccagcccccggccagaccgggctctggtccagttgcccaagcccctttctgaggcagatgtccgtgtcctggaggagcaggcccagaatctgggcctggaggggaccttggtgtccctggcccgggttccccaggcccgagcggtgcgtgtggtgggggatggtgcctctgtggacctgctgttgctggagttgtacctggagaatgagcgccgcagtggtgggggttaccccaagggcttgttttaactacccgcccgtttggtaattgaagcttcctttttgtaaatcaaaccggtgttgtaataaccacaccttgttttgctttttccccgtacgttgtttataaagcctctgtgggtttgtacctaggtctttgtttttattaaccacatggcttgttttctaacaattcgtgtttttgatacatagcacttcttgttttaatctccctgatcttttctgacaaaggt

SEQ ID NO: 68821 - DNA, 1946 bp, Homo sapiens
ttttttttttttgagatataaaaatctgtatttatattacaatgacataaggacacagcacggcccacacggtggacaggtggccgggggcccctttccccctctagcgcacgcccccctcaccggcacctaggcccctcgtgtggccccccgacttctggcacggaacctgccctagtgcccaacatggacctggggccaccctgctggccgagggtcagggtcctctgtgcaggcagtggggagggggtcccaggttccctgacagagggaggcagggcacgggggagcctgcctcacccagcggacagcacgggccggggcagacagagcagggaccctagggccacagaccggtacagggttcctccacccggggacacaggcccaagccccgttgccactaagatggggtctgcagaggcaaagccttgctgcagcctctcccactctgcgaggatggcgggggtctgctatgtggtttgcaggggttatcctggtatgcgggagctgccttccaataaggctggggaacccaagcctgagtctgggtgctcagtggccgagagcactggtgtgggctgggagggcacacgcagaggctcaggagccccgggctctgttctgcttctgtctgctctctatagacacggtgatggcctcttggtccctgcagcctccagtgatggcagcctgggcccctgacagggagcagtgggaggttggagcatgtggtgactcctagcacgggcccccacccagtgggcaacccctcacccacctgctgatggcagggaggggcagctgaacagcaccccgggtggctgagactgcctcccagtccacgtgggaaccacggcctcaagagccacaggctgagctgccgggagggtgggctgaggggccaccactggtcaccgggtggattctgctggtcagagatgagagcagaagcccctagctgcctcaggcactggagggtggggcagggagctggtgcttcaagaattgagggcagggacacgaccacctcagggccctgcagtgctggctggggaagcaagcttttacacacggcccgccttgctcggaggtgccacggtgtttgaaatgaagcctggggggacagactcaggcaggcaggggaagctcctttctgggcacccctggaccccagtggggccggaaggagatgcagacaggcctcctcacaaccacccgcaacgcgttcggatgcccctcagctccaggcaccatgccccctacagcctgcagggcaggttctgtgccagagttgtttccagggacccccttccgccacagtgggccccccatcctggggcgtctatgcgtacgactgaaaatagacacgaattttccccatgatatgggaattggctacagatgtaccagaggcacggcaggcactgctatgggccagccccaaggacagaggacgtcaggaaggaaaggcgggtgcaagcctcctggtgccaggcctgcaccacccagcgagcacagtcttcattggctgccagtgtctgaaacctggaaccctcgcctaggccaggaagcagggggctcgagtcaggtgacaggtgagaatccatctctctagtgagcaagcaggcccctgccagccactggggagggcaacactggggaccaggtcatagcccctccgtgccacccacaggggcctggctgcatcgcctccaggaagccctggctgccgggaggggctgcccacaggagatgggaggacagcactagctgggcaggcctggggcaccctgagccacgagggacatgctggtgggaagggcaaggcctgacacaagacacaaggcacactttgacgacgtgacggagggacaggtccctgagacgcctgggtggctcccacccctcagcaaacaaggacgcaacaacagctaggaaaatag

SEQ ID NO: 68822 - DNA, 839 bp, Homo sapiens
tagaaacgcccactcatcctgcttgtcccgcagagagcatttgtcaagctggcctttctccaactgggtcactgatggagttcggcagagacggcttgggggccacgggctgggcagatggggagagctcctcacaaggctgggcagccagacccccattgtcagtcccctccaaaccctcgtgggatgtagggccctaccacagggagccccgggactgggccagtgtctcaggaggctgtgaagagtcataggcttgagtctgggagctttctcgggggccgttttgtgccccttggggagaggccagaggggccctgggtaaggggactcctctagaatcacccagaagtggcaggaggtgcagggccactgctcggggctccctgggctctgagctgggcagtgacctggccccaaggcctctggctctctggcgtgcagtgggaacagccgggacagacaggcttggagcgttcgcgtcctgcgccccgatggtgtgttccctccccactgtgcctgtaggagggcaccgggtccccgtctatcctacttcatggctgaggaagctaaggcacagagtggccccgtcctgcgcccagggctctgcgttggcacagggcagagctgggctgtgaatcagggccgccttgtctcttgctgtggtgtgaggctgtgggagactcaggaatgaggcacagccaggtgcccagtgcccgtgggacccgcctccccacagtggggtggcgccgctcacacctggtaatttcacgctgggggaggccttggttcctatagcccatctcgaatcacctggatcccagggctatctctgggga

SEQ ID NO: 68823 - DNA, 2249 bp, Homo sapiens
ggacgaaggcgtctaccagtgcatggccgagaacgaggttgggagcgcccatgccgtagtccagctgcggacctccaggccaagcataaccccaaggctatggcaggatgctgagctggctactggcacacctcctgtatcaccctccaaactcggcaaccctgagcagatgctgagggggcaaccggcgctccccagacccccaacgtcagtggggcctgcttccccacagtgtccaggagagaaggggcagggggctcccgccgaggctcccatcatcctcagctcgccccgcacctccaagacagactcatatgaactggtgtggcggcctcggcatgagggcagtggccgggcgccaatcctctactatgtggtgaaacaccgcaaggtcacaaattcctctgacgattggaccatctctggcattccagccaaccagcaccgcctgaccctcaccagacttgaccccgggagcttgtatgaagtggagatggcagcttacaactgtgcgggagagggccagacagccatggtcaccttccgaactggacggcggcccaaacccgagatcatggccagcaaggagcagcagatccagagagacgaccctggagccagtccccagagcagcagccagccagaccacggccgcctctcccccccagaagctcccgacaggcccaccatctccacggcctccgagacctcagtgtacgtgacctggattccccgtgggaatggtgggttcccaatccagtccttccgtgtggagtacaagaagctaaagaaagtgggagactggattctggccaccagcgccatccccccatcgcggctgtccgtggagatcacgggcctagagaaaggcacctcctacaagtttcgagtccgggctctgaacatgctgggggagagcgagcccagcgccccctctcggccctacgtggtgtcgggctacagcggtcgcgtgtacgagaggcccgtggcaggtccttatatcaccttcacggatgcggtcaatgagaccaccatcatgctcaagtggatgtacatcccagcaagtaacaacaacaccccaatccatggcttttatatctattatcgacccacagacagtgacaatgatagtgactacaagaaggatatggtggaaggggacaagtactggcactccatcagccacctgcagccagagacctcctacgacattaagatgcagtgcttcaatgaaggaggggagagcgagttcagcaacgtgatgatctgtgagaccaaagctcggaagtcttctggccagcctggtcgactgccacccccaactctggccccaccacagccgccccttcctgaaaccatagagcggccggtgggcactggggccatggtggctcgctccagcgacctgccctatctgattgtcggggtcgtcctgggctccatcgttctcatcatcgtcaccttcatccccttctgcttgtggagggcctggtctaagcaaaaacatacaacagacctgggttttcctcgaagtgcccttccaccctcctgcccgtatactatggtgccattgggaggactcccaggccaccaggccagtggacagccctacctcagtggcatcagtggacgggcctgtgctaatgggatccacatgaataggggctgcccctcggctgcagtgggctacccgggcatgaagccccagcagcactgcccaggcgagcttcagcagcagagtgacaccagcagcctgctgaggcagacccatcttggcaatggatatgacccccaaagtcaccagatcacgaggggtcccaagtctagcccggacgagggctctttcttatacacactgcccgacgactccactcaccagctgctgcagccccatcacgactgctgccaacgccaggagcagcctgctgctgtgggccagtcaggggtgaggagagcccccgacagtcctgtcctggaagcagtgtgggaccctccatttcactcagggcccccatgctgcttgggccttgtgccagttgaagaggtggacagtcctgactcctgccaagtgagtggaggagactggtgtccccagcaccccgtaggggcctacgtaggacaggaacctggaatgcagctctccccggggccactggtgcgtgtgtcttttgaaacaccacctctcacaatttaggcagaagctgatatcccagaaagactatatattgtttttttttttaaaaaaaaaa

SEQ ID NO: 68824 - DNA, 1346 bp, Homo sapiens
ttttttttttttttaatggataactgaaatgtatggttttcatttataaagtataagttatctttaataacacacatgtacaataaataattcatatatgaaaattctcatcagatagcttcatgctttgatcagtggaagaagccacagcaccagggaaatcagaaggcaatcttagtaaatcttctacctcttcttgcagggcttctgctttttcatgcaacaggcatctttgctgatgaaacaatttgcttggcttggcgatcttgataaatgatcaattgtccttacgaggcacttcaggatttgcattagctaagtgcattagacttttgtaacctgcactggtataactgtttttggctcggaccctctaaaactccagtaacttccatgagagggattaattctgcctttacacagtaagtcagcttcttggtaagttctaccaaaagggctctgtaaacccaaaactcctcaagctcctcacagaaatgtaacacacaagatgagaatgaggcagttccagtgagaagattttgtatatatcctcgaggcatattaaatttttcagatacagtccaaatgttggtctctttgagcaaggtataaagaacaaaagacagatatagcctgttgacaacgttcttgtccaccttctttccgatggcttggcctgatgctttcttcccaataaagctttcagagactccaagaatggcagctacattttgttctgctggactgagttggctaaactgcctgaagtatatcatccaatcagggttacactgtgaaaccagatcatagggggttgttaggtagattagatgaagaaggctttcaagcacaagtccttcaagacctttcttcaagtctctgtacagaatgtcacaataagctaaatctatagttcccttaaatgaagcacgtcccaactttgtaatatgaaaattatattggacctcttcttcagacttataaatagtgtctttttgtaggagtcctttttctgtcaggtatctaagtgattcaacagttatttcccagagacttttttctttcaataaaaccttttgctgaacaccaaaaaatgtaccattcatgaaatgatagatgtcatcaagattcgttgcaatcttcaaaccaatcaaagagagaaataatgtttggattcccttggtgaattcctgaacaagatggctgtaacagttttccaatggtttagttattaactccaatacctgttgtttgtctttttcttgcaatatgaggatactctccccaatagtatctattccagcacgaccagccctcgtgccaagctgggcgtaataatggtctca

SEQ ID NO: 68825 - DNA, 1603 bp, Homo sapiens
cacagtgcagtgtggtggaattcgggctgccgggagctcgtcttcaggaacctctccagatcctccctgccctgtgccacgacatcaccgactgggtggtggggacccgagtgaagtcggcacagctgctcccagtgctgctgctgcatgccgaggaccacgccacgcagcacctggaggtcgtcctccggaccctgttccaggcctgcaccgacgaggaggcagccgtggtccaaagttgtaccagatccgcagagctcgtcgggacgtttgtcagccctgaggtgtttctgaagctgatcttatcgacgctgaagaagacgccctctgcctccggcctcctggtgctggcctccgccatgcggggttgcccccgagaagccctccagccgcacctggcagccatcgccacagagctggcacaggcccacatctgccaggcatctgaaaacgacctctacctggagcgcctgctgctgtgtgtgcaggctctggtgtctgtgtgtcatgaggactgtggcgtggccagcctgcagctcttggacgtgctgctgacaatagtggccctcgcaggtgctaccggcctgagggacaaggcacaggagacgatggactcactggccatggtggagggtgtcagcagctgccaggacctctaccgcaagcacattggtcccctcctggagcgggtgaccgcgtcgcaccttgactggaccgcacactcgccggagctcctgcagttcagtgtcatcgtcgcacagtcaggccctgccctgggagaagccctgccacacgtcgtgcccacgctgagggcctgtctgcagccctcccaagacccgcagatgcgcctgaagctgttctccatcctgtccaccgtgctgctcagagccacggacaccatcaactcccaggggcagtttcccagctacctcgagacggtgacaaaggacatcctggcccccaatctgcagtggcatgcggggaggacagccgcggccatccgcacggctgccgtgtcctgcctctgggcgctcaccagcagcgaggtcctgtcggcagagcagatacgggacgtgcaggaaacactgatgccccaggtcctgaccaccctggaggaggattcgaagatgacgcgactgatctcatgccgtattatcaacacgttcttaaaaacctcgggcggcatgacggatccagagaaactcatcaagatttatcctgaactcttaaaacgcctagatgacgtgtccaacgatgtgaggatggcagccgcctccaccttggtcacctggctgcagtgtgtcaagggtgccaacgcaaaatcctactatcagagcagtgtccagtacctgtaccgagagttgctggttcaccttgacgatccagagagggccatccaggatgcaattttaggtgagactccgacggcttggccttcgttccgatgcctgctttcggcgcctgccacgggcatctgtagctgagccgtgtgaccggccacagggccctggggcacaggaggggcctcagctccggcctggcacactcttgagttcttggcaaaccctgagagcggctgtctttgtggtgatagctgctgaca

SEQ ID NO: 68826 - DNA, 783 bp, Homo sapiens
ggcctccgagtcggggagcccaagatgtcaggtcaggctcccggtgaggtgcagggggtgctgctcaaaagcctcgttgagtgtggggccgcctcaaagcccgtggggatggccagagctgcgggcactgaggcctggccaccgggcgtgtctcgtaggagacctgcctaagcaagtcaagctgaaaaagccttcaaggttgaagaccctggacaccaagccaggtctgtgctcccctcgacctggagcccctccaccgtggagaggcctgtcttgtacctggcgggtctctcgggtggggcagccaggcccccagacccctgatcctcttccaggactcagcagcagagctcagaacccttggggaggggtcgctctcttctcttcagtgggtctcggtgtctggggggtgggtgggtgagattttcaggtgcagccaagggcatggggctgcaggcagatgaaacccccaccctggctcctctgtggggctgcaggagtgtgggagggaggcccttgaagggtggggcgccagctgtgccctcccgccaggcctctacaccgcttacacggcccacctccaccgcgacaaggcgctgctcaaacggctgctcaaggtatatggtttgtggggcaggggctggggacgcagggagcctggtgtggtgtgaagcgcagcaagggcctggccctctctcccctgcagggcgtgcagaagaagcggccgtcagatgtgcagagcgccctgctgcggcggcacctcctggagctcacccagagctt

SEQ ID NO: 68827 - DNA, 449 bp, Homo sapiens
tcgcttctggattgtgattgatgagaaagtgtatgatataaaggacttccagacacagtcgttaacaggaaatagtattcttgctcagtttgcaggggaaaacccagtggtagctttggaagctgctttcgagtttgaagtcacccgggaatccatgcacgcattttgtgttggccaatatttggagattgatgatgaagtttatttttccagcctgaccaagaagttgtcaccataccagatccgggaagtctctcttcacctctgatagacacagagaggaatctgggcctgcttctcggattacacacttcctatttagcaatgagcacaccgctgtctcctgtcgagattgaatgtgccagtaagaaaatctttgctttttgctgattagcagattattttttttgaactgtaagtgccattaagagtgggagagggccaggccg

SEQ ID NO: 68828 - DNA, 1033 bp, Homo sapiens
ttttttttttttactttgtaacgtttttaataagaaaagttttaaacaatttatttttggcaaaaacaggtagggcaaccaccaccccacagccctgaagtggaataggaagacttggaaaagcacacgaagagggcagggacatgagggtgtccatcttgtagcagcttctgaggaaagagctcagtcccaatggcaagtttcaagtccacggggttgaaacagccagggatgccctcccagccccctgtggtgcctggatccaggggcgtgaagctgtgcacgtgcctccaacttgagtccggccagggggcccccccagcccgggccacgcgccgggctcagctccatgggctaggggccagggcgggccaggggctccggggaaggagggcgggggcccggggcatgctcggcttgggcgagagctgtcatcccggctacagaacagctccaccaggcgggcgaaagagtcggaggacaggcggaccagcttgctgcgcagggcggggtccgaggccagcttctggttaatgacttctgcctcctcctccagcagggccaccagcctccgcagtatggcttccttctctgtcgatgggggaccctgtaattctgggctgggcggagatttcagctgctcttggaccagctgttccagccgctgggccaccaaagcatagaagtctggagtagctgggccaggctctaaaccatagcaggggcggatgggcagagagcaaggccgaggggactcagagggggctgctcctcgccccagggagcagggaagacatcttcgaaggcggctcaggaagtctgttggctcttcttgggcagggcttctaggtggagttggaacaggagacccggcagcctcaccacgcctaaggaaggcagctaggaccctcagcgtgtcttcccggagccccagctcttcagagcctgccatggaggcacctggtccggggccccaccgccgcctcctccactcaacttgcggtctcctccactgaacgaattccaccacacg

SEQ ID NO: 68829 - DNA, 1054 bp, Homo sapiens
ttttttttttttcagttctgcacaatcctcactttatccccccggggccccccaccagagggccatggagggtcccactgggcaccaggcctggtccatggggagcgacaaagaaccttctgctgtcattaaccgcgatggtttatcacaatgatgaccctccccgaggcctctcctacggtaacagcaacatctacggttccacacccacagggaaaacggattcagagcagcagcagggggcgggcaggctgtggggccgacagtgaacatggaggcaggctggtggctgggagggctccatgtgggcctggctgaggagccagggatctggagtcagaaccgggggaaggcagctggaacccagtagtggacttggaattccgcaaatcgtcctcaaacgtcttcagccagaagcgacggcggcagcggcgcctgcagacaggcgtcaggaagcttcgctgctgagggtatttctcaggctgggctgggctgggaggcccaggtccttgcaggaggagagggcctgaacaccggcccttcaagctccctagtcagtcagtcttgggcaccgggctcctgagggctgacagtgtgatgaggagctgggcagcatagtaggtggtcatgatcaccaggcgggcatggggcaggggctgggcgaaggtgtcccaggccagcacgccatcagagagcgtgaagagcagcgcgccccagccggcactcccgccctgggccaggccgcgccacagcatggccatcaggatcagcccataggctgccaccggcaggaccatatccggctcgaggtgctggagcacaaggctgaggtaggggccaggggccaggatgatgagcagcagcaggccgggctgcaggggagagaagccgaaggcccagacgtagaggaggtgggcggtggcaaaggcggccatgcctggcgggagaggggtggggtaccagtgaggaaggcccatcctgggaatggccccgaggtcacccctcagggcctaagagaaggaccatcccagagcaccagggaattccaccgcac

SEQ ID NO: 68830 - DNA, 557 bp, Homo sapiens
  misc_feature (1)...(557): n = a,t,c or g
acttggagaatctgcaaaatagtagattacaaaggatcaaaagtcagtgaggttcaacaagaggtagggtgggataatgaccaaagacagagggaacacttccaggttcattctgtgaggtcagcaacaccatgacctaaaagccagataaagaccctgcaagaaaaacaatacacaaaatacagatgaaaaggctggtgaatattgatgggaaaatcttcaacaaaattctagcaaaccaactttcacagcatgttaaaaggactgtacgccatgaccaagttggagatagccctggaatgcatgtatcacccaaaacaggaaaattaatgtagtgcaccccattagcagaatgaaggacaaaacccacatgatcatctcaactgatacagaaaaaacattggacaagattgaacacctttccnnnnnnnnnnnnnnaaaagggaccctctttttgtgccccacccggaagggcaggggggccgtttgggttaatggaaattttggcctcccgtgaacccggccggaattcccaaatttataaatggaaaatccgg

SEQ ID NO: 68831 - DNA, 1040 bp, Homo sapiens
ttttttttttttaaaagttcaaaagttttaatccaaatttagacagtgttgagaaaaccaaacttttggccatagaaaccattcccctcccgggcccgcaatggggaccagaccacgccccctgatgccctgagtggtcccagatctccggcggtacctccagaccacgtcctcgcgctccgattggctgccgcttttgggcggattagaagctggattgtagcagagtgactcgcagaggccatgccccctcgtcttgtggcaggaccggaggggcgatcccggcatcccacgcgggcccccagggggtgggacctcctccacgcccactccctcggcgagagaaccccgtggaacccgaattagccaccgggggagatctggggggaggggtctcctggcgcgtggggtccgaaggaggcagcggcacaccgggaagagggtctccctgggagtccaaatttccacctgtcatcattctgtgccactgcgacgcctcagtagccagggcttgggagaggctgagaacccgctcccggtgaccttcggaagtcggcaagtaaggggtggtgttccttggactactccaggacccagagcttctgagccatttctgggctcccgagtgtcctacgacaggcctttgctccacgtcaggctggcgtctggctggggacagtgtccttcccagggtgagaagccggggggaggtcgggcgagggaagggccgtccacattcctggtttctgcgcatccgctccagctgctcctgggcactcatccggggccgggccaccggggccttggttcctagctgtggggaagggaggtggcgaccctcagggctggaagcccgggagaccctcggagacccaagacctaagtgagggctggcgaggtctttgtcgcctccaggaggccgcccccagtcagtctcgggggacctaggggagctcagttccaaggactctggcaggctctccctctctgaggactcctcgccctggagcacgggagatggggagtcaggctctgccgtt

SEQ ID NO: 68832 - DNA, 1145 bp, Homo sapiens
cccacgcgtccgctgctgcacagacaccaggacttagaaaagctgctggcagcccaggaagagaagtttgcccaaatgcaaaagacagagatggaacaggagctcctgctgcagccacaggagctgaagcccgggagagctggcagctcgctgacatcctttcagtggaggccctctggacaccaggggctaggagcacagctggctgagacgagggacccccaggatgcaaagggtacccccaccatggaggggtctttggagttcaagcagcacctgctgcctggcgggaggcagcctagctcgagctcctgggacagctgccgcgggaccttgcagggcagctctctgagcctgttcctggatgagaggatggcagcggagaaagtagcttccatagccctccttgacctcacgggagcccggtgtgagaggctgcggggccgccacggcaggaaacacacattctccttaaggctgaccagtggggcagagatcctgtttgcagcaccgtccgaagagcaagctgagagctggtggcgagccctgggcagcactgcagcccagagtctgagcccaaaactcaaagccaaacctgtcagctctctgaatgagtgcacgaccaaggatgcccggcctggatgtctactcaggtctgatccctgaggtgaaccccagtgcaacaccaaacttcaggggcacaagcgaggacacatctaagggaccagaataagactcagctacaggcaaaagggctccttcccgtggctgcttcaacccagttccccaggcccagcttctggaatagacagttccttctggttagatgggtcctaccatgtggcaggaaacagccattgcctggcctccccctgcattcctgtctgggtgaagaggagacgtgttacggcagagcaggtgggcaaggccagggctaccccaggcccatgtggcctcctccttgcttggaaggggtgactctgagcacaggtagacgcagacgtgtgcagagaatgtgctcttcggaggaagaacactgatgagcgagctctgtaccagcccttgtcatgtacagccaagagcctagaatgacatggcccttctcagcagtaataacagatggtctcagcgcctcaaaaaaaaaa

SEQ ID NO: 68833 - DNA, 694 bp, Homo sapiens
tcgtaaaaactcacttcacctgtaaagacgcataaagactgaaagtgaaggaatagtaaaatatatttcatgcaaatgaaaaacaaaaacaagcacgagtagctatagttgtatcaggtaaaatagactttaagaatggtaaaaacaacaaacaacaacgaagatgatcattatataatgacaaagagatgaattcagcaagaggatataccagttctaaatatatatgcatatgcgtcactggtgcacagagatatataaaggaaatattatttgacctaaagggtgagatagactccaacacaataatggttggggacctcaaccattgtcagcatcggacagatcatgtagacagaaaataaacattggattgaaactgcgctttagaccaaattggcctaacagacatttacagaacattttatctaacagctggagaatgcacattctttttatcagcacatgtaacattctccaggatagaccatgtgttaggccataaaacaagtctcaacaaaattttaaaaatagaaattatatcaagtatcttcttagaccacaaaggaaaaaactagaattcaataacaagaacaactttggaagctgtacaaatacatggaaagtaaacaaaatgctcatgaccaactattgggtcagtgaagaaattatgaaggaaataaaaaaaaaaaaa

SEQ ID NO: 68834 - DNA, 663 bp, Homo sapiens
cccagcccctggaccagggtactgaccacctctccgcccccggccccggggtcctgaccacctctccgcccccggccccggggtcctgaccacctctccgtccccggccccgggttcctgaccacctctccgcccccggccccggggtcctgaccacctttccgtccccaaccccggggtcctgaccacctctctgcccccggccccagggtcctgcaggcagggctggaggtggagcggctccgactgcggaatttctatcaccactaccactccaagaggggcatgtggagcgtccgcagcaggaagggctctcgcacgggggcgtcttgaggacgggcagcccctcccagccccggtgggagtcccgaggcagctgctgggggctgggctttgagctcggtcccgagagacccggcagggctggtcagaggggcacagccaccgcctgtgcctgcccctctctggcccactgggcgtcgtgcccctccccggagaggcagccttcacggcgggtcagggcctggccttggtccccactctgcgatgatttctgtgaaattttgctgtagcgatgacattgttttcagaatttccaagagttctgtctgttctgttttttattcagaatgaaatgaaatattttttttagttctgaaaaaa

SEQ ID NO: 68835 - DNA, 575 bp, Homo sapiens
cccgggtcgacccacgcgtccgagtggaacacatgactgtctacgagaaagatttcatcccaagcagtttctattacaagaaaggaggggttgtctctcctttgactttagtggctgacgaaggctggttcataactgagaatcgagagatgcttccgttttggatgaacagcaccggcaggcgggaaggttggcagcgtggatggcacggctacgacaacgagctcatggacatgcggggcatcttcctggccttcggacctgatttcaaatccaacttcagagctgctcctatcaggtcggtggacgtctacaatgtcatgtgcaatgtggtgggcatcaccccgctgcccaacaacggatcctggtccagggtgatgtgcatgctgaagggccgcgccggcactgccccgcctgtctggcccagccactgtgccctggcactgattcttctcttcctgcttgcataactgatcatattgcttgtctcagaaaaaaacaccatcagcaaagtgggcctccaaagccagatgattttcattttatgtgtgaataatagcttcattaacacaatc

SEQ ID NO: 68836 - DNA, 1080 bp, Homo sapiens
  misc_feature (1)...(1080): n = a,t,c or g
agctggcctgggaggaggcttcctgatctatggttgagcaattggagggacagagaggggaggacaggtgaggagtcaggccgatccagcatcacctctgtgctgggtgatcttgggtgggtgccatccctttcctgggccttaatctactcttcggtcattgtggctggatggtgatagagtggcctagcctgagcccggctcacagtgagtgctcacctgttggggctgatgtggtcatccccgaagtcattaccagcctcaccttgctggtcagggtgggcccagccagtccaagggctgctgatgtcccccggccctttggatcatctcttgtgcagctgaaaccctggcttaggggaagaggaaccgcctgggaggggctgggggagatcctgggttcccctctggcactaaccaatgtggccaccagagggcgcaaggtggcagagcctggacttggccaggatgctctctgctgggttggggccaacaccaggaaggaagcatgggccatagggaagctcccattggtgctggggcaacccgcagcagctctgcgtcttctgctcttctgatgggaactgcaggcctctcccctggccccagagagtcgggcttctgggcccagccgctgtctgtcatgcctgcactcaggcagctggaggggtgggaggggagatggctcctggccttggccatggctgctttggcttccaccgttcctgctcctcttccatgtggccccctgacttggttgtgtgagcactccagtcctggcagagcctgacaggcactccctgaggttggggtatcccttggctctgtcctggggttgaggtccaggacctggcacggctgtgagaaggaccttgggctggagctgtggactcggtgctttattcgttctaagatgaaagtcattcattctggatggctatgaccttgagcgactcacttctctccaggctccaggngtccccttcattcatttgttaacctttattaagcacctcccatgggccgcagtcaggccctggggattcagcagtgaatgaaactgacaaaacccctgacctt

SEQ ID NO: 68837 - DNA, 611 bp, Homo sapiens
tttcgtgcctgcagcatggagggtccccagcggggccctccctggttacacgccaaggccctgccccaccccgccccagactgaaccgagagcacacggagatctgcgagatggactggtcggacaaggtggaggcctacaacctcgacaagacttgcgggcgccaccacagccagagcaccgaggtgcaggctcatccggcactccaccacctttcaagagaggggggccccagctctgccccgtgcttgccctggctgtggtctcgcctccctctgcctgggggccccagcggcactgcttcccccagcctggcccagaggccctcgcccccgagggcacttgggcaactgtctgcccctggcatgagaaagcgtgcaagacctcctcaagtgcccagcgcgtgcacagcctggttgcccgtagacaggacagggtgggatgcggtcagccccaggtgccggcaggattgcatttccaccgaaggccagcagagggagcacgaccaccgcccacttgagcatggcaaactcctggccccgcagcgcctccaccccagagacccggaccaagttcacacaggacaatctgtgccgtgcccagcgcaagcg

SEQ ID NO: 68838 - DNA, 1525 bp, Homo sapiens
gcacactgcactgcccatcctgtatgcaggccttgggcccaacctgagaccacctgatgcatggacgcccatcccgtgctcatcatctccgccagaccctgcctggggttctgcagggtacccacctgagccccagtttacctgtgtcagcccaaccacggccccagtcgacctccctgctggccctgggagacagctctctttcttcccctaatcctgcaagtgctcatttgccctggcactgtgctgcctgtgccatgctaaatgagccttgggcagtgctctgtgtggcctgtgatcggccccgaggctgtaaggggttggggttgggaactgagggtccccaaggaactggaggcctagaacctgatcttgcacggggtcggtgggcctgccagagctgtacctttgagaatgaggcagctgctgtgctatgttccatatgtgagcgacctcggctggcccagcctcccagcttggtggtggattcccgagatgctggcatttgcctgcaaccccttcagcagggggatgctttgctggcctctgcccaaagtcaagtctggtactgtattcactgtaccttctgcaactcgagccctggctgggtgtgtgttatgtgcaaccggactagtagccccattccagcacaacatgccccccggccctatgccagctctttggaaaagggaccccccaagcctgggcccccacgacgccttagtgcccccctgcccagttcctgtggagatcctgagaagcagcgccaagacaagatgcgggaagaaggcctccagctagtgagcatgatccgggaaggggaagccgcaggtgcctgtccagaggagatcttctcggctctgcagtactcgggcactgaggtgcctctgcagtggttgcgctcagaactgccctacgtcctggagatggtggctgagctggctggacagcaggaccctgggctgggtgccttttcctgtcaggaggcccggagagcctggctggatcgtcatggcaaccttgatgaagctgtggaggagtgtgtgaggaccaggcgaaggaaggtgcaggagctccagtctctaggctttgggcctgaggaggggtctctccaggcattgttccagcacggaggtgatgtgtcacgggccctgactgagctacagcgccaacgcctagagcccttccgccagcgcctctgggacagtggccctgagcccaccccttcctgggatgggccagacaagcagagcctggtcaggcggcttttggcagtctacgcactccccagctggggccgggcagagctggcactgtcactgctgcaggagacacccaggaactatgagttgggggatgtggtagaagctgtgaggcacagccaggaccgggccttcctgcgccgcttgcttgcccaggagggtgccgtgtgtggctggggcccttgcccaacaaaccggatgcaggccctgacttcctgttgagtgcaccatctgtcgtgactgcttccgccaagacttgacag

SEQ ID NO: 68839 - DNA, 423 bp, Homo sapiens
caaaacattgctgaaagaaatttttaaagacatcctgcattcatagactggaagacttgatgttgttaacatgattattactacccaacttaatctgcttgccccacgcaattcttctcaaaatcccaatagaaatttctgcagaaatagaaaacccatcctgaaactcacatggactctcaaggaatcctgaatagccaaaacaattttgaaaaagaacaacaaagttataggactcatactttcaattttaaaacttactacaaaggtatagtaatcaaaacaggatggcactggcataaggacagacatacagaccaatgaaaaaaactcttactatatagtcaactgatttttgacaagaatgacaagactactcaatggggaaaggacaatcttttcaaaagatggtgctggggaaac

SEQ ID NO: 68840 - DNA, 650 bp, Homo sapiens
caaatgtaatgagtgtggcaaggtcttcactcagaattcacaccttgcaagacatcggagagttcatactggaggtaaaccttaccagtgtaatgaatgtggcaaagcctttagtcaaacatcaaagcttgcaaggcatcagagagttcatactggagagaaaccatatgagtgtaatcagtgtgggaaagcctttagtgtccgttcaagcctaactacccatcaggcaatccatactggaaaaaaaccttacaaatgcaatgagtgtgggaaggtcttcactcagaattcacaccttgcaagacatcggggaattcatactggagagaaaccttacaagtgtaatgagtgtggcaaagcctttagtcaaacttcaaaacttgcaaggcatcagagaattcataccggagagaaaccatatgagtgtgggaaaccctttagtatctgttcaagcctaactacccatcagacaatccatactggtgggaaaccttacaaatgtaacgtgtggaaagttctaaagtcagagttcaaaccttgcaagccatcacagaattcatagtggagagaaaccttacaaatgaaggtggtaacttttgcagttagaattcattcctttgacaacgtcagagaatttatgcctgagagat

SEQ ID NO: 68841 - DNA, 725 bp, Homo sapiens
cccacgcgtccgcccagagtgcctgtcaggcggtggcactgtcatcgcatttgataaaggccaaactgagtctgggagagaaggggctggggccacgcaaaatcagggcagggctggggccaaaatgcctggagagacagagtctgagagatacagagatggccagagacagatggagagagacagataacagagagatacagagacagccagagacaaatggagagagagacaaatggagaaagagagccagagacatacagaaagacagagacactagagtctgagagatacagacagacacagagacagccagagacagatggagagagacagagacacaaagagagccagagacacagagagtctgagagatacagacagacacagagacggccagagacggagagagacagagacagacagacagagacacagagagtctgagagatacagaaacagccatagacaggtggggagagagacatgaacagagccagagacatacagagagacagagacacacagagagacagagacacggagagtctgagagatacagagagacacagagacagtcagagagagacagagaggccccagggcatcgtggctaaggttgggctcccctactccacagcctccaggaggggctgaggtctggaaacatgggcgggggtgggcccgcggtgagaaaggtggaagaatgtctgcaactcaggcgg

SEQ ID NO: 68842 - DNA, 512 bp, Homo sapiens
  misc_feature (1)...(512): n = a,t,c or g
ttttttttttttgctcttaaccacgtttattgagaggggccgggggaaggggatggacggtcctccccgcggcggggttttcagccctcgcgggtgggcagcgtcttgtcctcaggtgtagatgctccagtctcggctcagccaaacactgtcagggcccccagcagggccttcagggccttcacggcccccacggcctggggacccagctcagccacacacttctgggagccctctatgaggtggttcacggggatgcccaggctgctcagcaggagcttcagcgggttgagggtgccgagggggttggccagggtcccggccccggcctccgccgccgactccagcgcagcgacaggctgggccacaggcttggccgagcccactaagaaagcagcagcggagctgcaggacagggccacgcagagccccaggagggcggcgagcttcatggcgcgggggctcggggcgcgcgatttccaccgcncttccataggtctcatttngggccg

SEQ ID NO: 68843 - DNA, 802 bp, Homo sapiens
tcctgtgaaaatctaatcaataagggcttccatgaatccataagctttttaaaacaaaaaactttcagcttggccacgcatggtggctcatgcctgtaatcccagcaactcgggagctgaggcacaagaatcgcttgagcctgggaagcagaggttgcagtgagccaagattgtgccactgcactctagcctggccaacagagaaaccccgtcttttaaaaaaaataataaataaataaatacaacttttagctcaagtactgcatctacttaccagtgcaagattccaataagaaacaacactttttatagattcaaaagcagtcacagcatcttctatatttccatttactgcatccaacatagcaaaagttatgtgtgcgtcttcttcatattcaacaatttctgatgcctaaacacacagaatagtttttagtcaaattgtttatactcagaatataaaacccaaatgattttccaaagattttatatgatcttaagagacaaacatctcattactcttctctgtcatatcttatctgtgagagctagtgaatttagaaaacaagattaccgttaaataacaaggcaattaatttaagcagtgtatagctccatgtctttgtttataaactggaaattcccatctccaataaattcataaaggaactctgttacctgaatgtctacactatgaaaatgtttaaacagaggatcaataggttcaggaatactgttcttcttttttattatcttcaacaatggcaaaactttcttccaataatgaacacttctccctatg

SEQ ID NO: 68844 - DNA, 622 bp, Homo sapiens
ccacatggtaaatctttttggctttgtgggccacataaagtctctgttgcatattctttgttttgttgctttgtttcttcacaccttttaaaaatacaaagccattcttagcctacttgcaggctggatttagttcattggtttacttgttgattcctggtatagcacaaggaatttacatgtttggaattgtttttgtgtcttctgggataagggggaagaggaagattatatcttgtgttttgggcatgtcacactagaaatagttcctttaaggtgatgatttttccctccaacagattaatgctgaactgttgtttcggccaactgctctttcaactccaagcttttcttctcctaaggaaagtgttccaagaagacatctttcagaaggaacaaattcttatgcgacaagacttctaaataatcatcaagttcccacctcagtctggaacctggggagccaacagggtcagtggctaagattggttttccatttggggaatattaaacagagcttttacttgacacttctgtgacagtgatgccaattcgggatcattgtaggttccattgtggaattgtaggttccatgaatgtgaaaatcttcaggacaattgtt

SEQ ID NO: 68845 - DNA, 307 bp, Homo sapiens
  misc_feature (1)...(307): n = a,t,c or g
ttttttttttttgaaacggagtctcactctggtgcccaggctggagggggccccattttggttcactgaaagctccgcctcccggtttaatgccattctcgtccttcagcctcctgaggggctgggattacaggcgcccgccaccacccctagctaatttctttgtatttttggtagagacggggtttcactgtgttagccaggggtgggtctcaatctcctgacctcatgatccttccgccttngccttcccaaaagcggtngggattacaaggngtgacaaaccttcgncccggccaatncactg

SEQ ID NO: 68846 - DNA, 401 bp, Homo sapiens
cactgtcgtggtattccacacagcattgcctctgaacaagatacttactttatggctaaagaagtgtggcagtgggctcatgctcatggaattcactggtcttaccatgttccccatcatcttgaagcagctggattgatagaacagtggaatggccttttgatgtcacaattacaacaccaactaggtgacaatactttgcagggctggggcaaagttctccagaaggttgtgtatgctctgaatcagtgttcaatatatggtactgtttctcccatagccaggattcatgggtccaggaatcaaggggtagaagtggaagtggcactacttaccgtaacgcccaatgatccactagcaaatattagcttcctggtcctgtgacattacattctgatagg

SEQ ID NO: 68847 - DNA, 371 bp, Homo sapiens
gtggttttggcagtactgacagtgaaggaaaagcagcctattgagtaaatcaagcttctaaacagacctgtgtgcacaatgattcagggaaaacagtttgaaggactggtagacacaggtgctaatatttcaattatagctctaaatcagtggccaaaagcgtggccccgacaaaaggcttctatgggcttgattggagtaggcacagcatctgaagtctatcaaagtgctacaattttacatcgtttaagaccagatgggcaggaagtcaccatccaacctatgattactttcattcccattaatttgtaggggagagatttgttacagcaatggggtacagaaatcaccattccctctgcaatttacag

SEQ ID NO: 68848 - DNA, 1169 bp, Homo sapiens
gaaaaaaaatctatcctgtacgtgtgaagatctaggcctgcctccatgttactccctttctcttactacctgtggctcatcccatgccatgaactgcctggggtacatatgtgaacactccagccttcagcgtaagtgatagtccaaattttctttaagcagctgctctccaagacagggccctggaaagaggcccacacatacagcccagttgctgcccagggctgttggactgtcatttcattgctcattgtacccagacagggatctgggccttcagagacttttgagaatatgaagaggagggttgaggctggagaagagccagaatcaagctggcatggggcttttattgacagtgtgaagattgtacactacattacatgatcagatcatacaaataatctaagattttacagtctggtgaccctagattacacaagtaatctaagcttccactttggaaaactagaaaaagaagagcaaattaaatccaaagtaacctggaaaaaaattagagtaaaaatcagtgaaattgaaaagagaaaatcaataaaacccaaaactgttctttgaaaaggtgggtaaaattgataaacctctagctagattaagaaaaaacagaagacaaatactgctaataccaaaagtgaaagaggccatcatagctgatcctatggtcaccaaaaggattagaaagaaatatggacaactctgtccataaatttgataacttagctaaaatggatcaattccttgcaagatgcattctctcaaagctcataaaaggtagatctcagtaggcatatatatctattaaataaattgaagcagtaattaataactttccaagaccaggcgcggtggctaaaaatacaaaaagttagccgggcgtggtggcatgcgtgtatagtccaagctactcaggaggctgaggcagaagaatcacttgaacctgggaggtggaggttgcagtgagccaagattgtgccactgtactccagcctgggtgacagagtgagactccatctcaataaaattaataataataaaaccttccaaaaaaagtgccgggaccaaatggattcactgatgtgcatttttcgagatacttaaggtagaaatgataccaagtctgtactgtctctttcagaaaattaaaaagcagg

SEQ ID NO: 68849 - DNA, 383 bp, Homo sapiens
tgtcattcttgacaggtggaagcctgtgtcactgagcacatgcatgaccttcattcctgctgctctcacagtaggatatgaactttgttcattagcgttctgagcaagggaaacagtggctgataaaataatgagtcattttgtccacttggttattgagagcctcctctgctgagattatacattggtcatcatttacatgggacacaaataccctcacactttgtcctttttgagaatagtttattgacatagctcttttctatatcttaccacaagtttcccaaccttattctaagtttctgaatttccagtcaaaccatctgctgctgaccacaaatcagtgtggattcgtatttatagccatcactcctttgacacaa

SEQ ID NO: 68850 - DNA, 565 bp, Homo sapiens
aatacactgggggagaagcaggcgcagtctaactgatacacaggatctgggggagaagcaggcgccgtctaactgatacgtgggctctgggggagaagcaggcgccgtctaactgatacgtgggctctgggggagaagcaggcgccgtctaactgatacgtgggctctgggggagaagcaggcgccgtctaactgatacgtgggcacgggggagatgcaggcaccgtctaactgatacacaggatctgggggagacgcaggcactgcctgattgatacgcgggcgctgggggagacgcaggcccatctaactgatatgtgggctctgggggagacacaggtgctgcctaactgatacgtgggctctgggggagacgcaggcgccgcctaactgatacgtgggctttggggccactcctccaatccaaaggctgcccaggccgttcccctgccttgtcctcggcaccttgtgcagtgcctggagaacggaagctcagtaactgtctggacggaatgaaatgcttctttcagtcacggtgacttgtggcgctgagcaaaggcctttt

SEQ ID NO: 68851 - DNA, 582 bp, Homo sapiens
tttcgtgggcggggcctggtcctgtgagcgttcggagactgcgggcgcgcaaacctgtactgggcccgcgccccggccccttacagagctgggtgtgtccctccgagtgccccccgctagggactgtgcaggccggagctaggcagggacagcggggcgaaccgggctgatagagtcggtccctgctcctgtgaggctctcaccgaatccctgctgtttccgggcagctgaagagcgctgggccctcgcgtcgcgggcgtggctgtggccgtgtctcctggtagtctgagcccactgtgcgtgtggatccacgtgggagctgggttccagagcctggtcctgaggaggagccgagccggggcttccccttctcagaatcctgctcttcctccagagagattcccaggagaagagggaacaaccaattcattcctgaaagccaggcctcgggacctgatgacatttgaagatgtggctgtggaattcagccagtgggagtgggggcagctgaaccctgctcagaaggacctctacagggaggtgatgctggagaacttcaggaacttggccattctgggcctt

SEQ ID NO: 68852 - DNA, 436 bp, Homo sapiens
tttcgtcagaccttggctttgggagctttgagacggttttcaaggacactgggcttggaagagaagtgctgccccctgactgcagctccacagaggcaggaggggatggcattcggaggccgccgagcgggctggagcatcagcaaacaggtttgtctgaaagtcaccaggaccctgagaagcatccagaggcagaaaaggatgagatggagaagccggctaagcggacttgcaagcagaaacctgtctccaaagtggtggccaaagttcaggacctgtcctcccaggtacaaagagtagttaaaacgcattctaagggtaaggagacgattgccattcgcccagcagcccacgctgagtttgtacccaaagccgacttgctcaccctcccgggagctgaggctggggctcatggctccaggcggcaggacaagga

SEQ ID NO: 68853 - DNA, 1101 bp, Homo sapiens
gcggccgctccctgccctgcagctttgggctagggacctgccgcttgcgccggttcctacgagcggcgccaagcgccccactctcccagtgtgggcagtggcaccagtctctgcagtacatgcgaacggctggtacgaggccctggccgcgtcttcgccggtgcgggttgcggaggaagtactgctcggcgtgcacgccgccacgggcctgccctggtggggcagcattctgctctccaccgtggccttacggggtgctgtcacgctgcctttggcagcctaccagcactacatcctggccaagctaggtggaaaatttgcagccagaaataaaaactattgccaggcatcttaaccaagaagttgcagttcgtgcaaatcagttggggtggtccaaaagagatgccaggctcacttatctaaagaatatgaggaggctaatttcagagctatatgtgcgagataactgccaccctttcaaagccactgtgttggtttggattcagcttccaatgtggatcttcatgtcttttgctctccggaatttaagcacgggggcagcacattcagaaggtttttctgttcaggaacagttagctactggtggaattctgtggtttcctgacctcactgcacccgactccacttggattctgcctatctctgttggcgtcatcaatttgttaatagtggagatttgtgctctacaaaaaattggaatgtctcgttttcagacgtatattacgtactttgtccgtgcaatgtcggtgttgatgataccaattgctgcaacggtaccctcatcaattgttctctactggttatgctccagcttcgtgggcctttcacagaatttgctgctgcgttctcctggatttcgccaactttgccgaataccatcgaccaagtcagattcagaaactccttataaagacatatttgctgcctttaataccaagttcatttcaagaaaatgacatattttccataattttgaaacagttgcaggagtcactatcatctaaatgtatttagacttagaaattcagatgttacttgatttccttttatttaaaatcattaacttcatgaaatacgaaa

SEQ ID NO: 68854 - DNA, 495 bp, Homo sapiens
ttcgccattcgtgcttgggccagctccttggagaggcgggcagcctccgtgttttgggcctccagcttgcgggcctgggcttccagctcatctccaagggcctcagcctttctcctcaactgtgccacctcctccctgagggcctcctgctctgcgacaccactggccaggctctcccctgggattgggccttcccagacctggacctcaagagccccttctgacttctgctgtggtttttgccaggctgggtccctgaccgtcccttccagcctctggtcatgctctctggcctctgcttgtcccgtggccaggtccaggccctggtttgggccctcctgctcctccagctgcacagagctgggctccgaaggccctggcttgtgctcagggccctcctgtctcaacccccaggcctcaggcaccaactcgccttggggagcctaacttcccactgtctctcctcccagcaactgcgcggacgcgtgggtcgac

SEQ ID NO: 68855 - DNA, 613 bp, Homo sapiens
  misc_feature (1)...(613): n = a,t,c or g
gacatctcaagcttcgcacgagggtgactatgagtttgactctccatattgggatgatatttcgcaggcagccaaagacctggtcacaaggctgatggaggtggagcaagaccagcggatcactgcagaagaggccatctcccatgagtggatttctggcaatgctgcttctgataagaacatcaaggatggtgtctgtgcccagattgaaaagaactttgccagggccaagtggaagaaggctgtccgagtgaccaccctcatgaaacggctccgggcaccagagcagtccagcacggctgcagcccagtcggcctcagccacagacactgccacccccggggctgcaggtggggccacagctgcagctgcgagtggagctacctcagcccctgagggtgatgctgctcgtgctgcaaagagtgataatgtggccccccgcagaccgtagttgccaccccagccacagatggaagtgccaccccagccactgatggcagtgtcaccccaaccaccgatggaagcatcactccagccactgatgggagaatcaccccagccacccgatgtatgcggccgctctgaggnattcgcgctaatgccgcaggcttcg

SEQ ID NO: 68856 - DNA, 1337 bp, Homo sapiens
gcgtccgccttcagcgcgcccacctcgtcatccagcgcctgcacttggctccggagccgcgacgtggccgcccgcgcccgctcgccctccgctttgtgcgcgtccacggccagcgacacggcgtccacggcgttctgcagggcctgcagggaggagccgtccagctgccgccgctcgtccaggctcacctgggtctcctccagggcacgcgtggcgtccctctggccctcccggatgacgtccaggtctaaatagagcttctggcaattgcagtccttcacgtacttgatgaggtcggcatggccaccctgcaggtgctgcagcgtgaggttgagctccaggagctgccgctccacctcctccttgttctcctccatgatcagagacttctccatcaggatcacgcgcagctcacggagcgccgtgtggttcacctgcagctcctccacctgccgctccaccttgctaatctgatcgaaagtctcgtccgattcggagtacagttccttgatctcatccacgtgccgggtcagggtggccctcatgtcctccagggtgtactgcaactcctcctccctgcgggccgtggtcatgtgcagctctgagaggttcctctgcagctggcccagcctggcctgcaggctgtccggctcaggccttgccccagccccaggcgttgccaacaccagactgccattggtccctggggcctcctgagccttgtgcagcctcttcaatttggtgtccacatcggcttggagctctgagatcgagcggtgcagggtaaagtgctgggcgtgcaggcggtcctccacgtcctgtcgcagctgacccactctctgagtgttctcctggaccttggcctcaaatttggcaccaagctcctggaagtcagccctggccacggcactgtcctggactctggagatggcctggcggttggcctccacgtcaagagacaggtttcttatggcctgggtaaggctgtgcaggctttggttaaagctcctccagatggggctgaaatgcacttgtaggaaggtgtccacgtggggtagcagcacctgctccaaggatctatcagggaactctgcaacagacatgtggtgtgacacaagccctgcaggagcagacactcctcccaggctgggaccagcggggtcctcccctcctcccctcaatgtgaccaggctcttcctcagcccctagagcctgccactcaccgtgccctgtttgatttgcttccatcactgcagctgtgaggttaccaggcagggctttccacaggcctggcaggctgtctgccacccggtgcacatcattctggagatctccca

SEQ ID NO: 68857 - DNA, 394 bp, Homo sapiens
tttggctatagtaaccttttgtggtaccgtctttgtttttttgatttatttgaccccttccacctctcttctgttttttcttctcctcttcttcccctgctgttccttgaccttgacagattccagcttcttgtttgggtgaattttccacagtaagttttgcatattcatttggaaaattcttctctaatcattggctacatttagcaacatcaggcatatattcacagtactctattggtaatgaacagactccacaataaaggactcaaagtaggtaatcagcatctaacttggctctgttccttgggtctcctttgcaggcagccctattggaatcggaaacgtcagcagccatttcacaaacccaggcagttgcacaggccccgccatt

SEQ ID NO: 68858 - DNA, 891 bp, Homo sapiens
aaagacaacgacaacttgaaagcttggttatttccctggagatgtccggtatcaaggtgggggatgacaaatgctacttagtcaatctgaatgcagaccctgctcttaacgaacttctggtttattatttaaaggatcacaccagggtgggtgcagatacctctcaagatatccagctttttggcataggaattcagcctcagcactgtgagattgacattgcatctgatggagacgtcactctcactccaaaagaaaatgcaaggtcctgtgtgaacggcacccttgtgtgcagtaccacccagctgtggcatggtgaccgaatcctatggggaaataatcacttttttagaataaacttacctaagaggaaacgtcgagattggttgaaagactttgaaaagaaacgggcccgccagagcatgacctggatgcagccagtgaggcttcctctgaaccagactataactatgaatttgcacagatggaagttatcatgaaaaccctgaatagtaatgacccagttcaaaatgtggttcaggtcctggagaaacaatacctagaagaaaagagaagtgccctagaggagcagcggctcatgtatgagcgggaactggagcaactccgccagcagctctcccccgacaggcagccacagagtagcggccctgaccgcctggcctacagcagccagacagcgcagcagaaggtgacccagtgggcagaagagaggtaagaactgcagcgcgggcagcccagagtcaaggccccaaggccgtgggtctttgagggaggggtttttgagacatgtcagggacaaacctagcaacaagagaactcttaatcccatatgtgatattgccaattagcttttcctttcacaaatattgg

SEQ ID NO: 68859 - DNA, 1184 bp, Homo sapiens
gaagcctctccttctgtgcatattattactgaaattcttcaaaagattctgagatgctctcagtgtttcattgctactttaattttaatcattatgggattgattgctgtcacagctactgccgcggcagctggagttgctttgcatttcacagtacaaacagcagactatgtaaataattggcagaaaaattctactttgctgtggaattcccaaactaatatagaccagaaactagctaatcaaatcaattatctccaacaatctgtaatgtggctaggagattgagtagttagtctagaatatagaatgcagttacaatgtgattggaatacttctgatttttgcattactcctcatctgtataatgaaagacagcatgagtgggaaagagttaagaaacatttgaaaggtcatactggaaatttactttagatattatgcaactgaaggaacaaatatttcaatcttctctggcacatctgacactaatgccaggaactgaagtgcttgaaggcgcttcagatggattagcagctattaacccattaaaatggatcaagacacttggaggctctgcaatttgaatgatgactgtgcttttaattggtgttgtttgtctttgtatatcaaattgaaatacaaatgaaattggtcatttgtacatctgcaaatgtggatcgcgaatcctgcgagaagtagcctactgtgacaaagctgcctatgcctttatcactttgcaaaaacagaaaggtgggacacgttggtagcaatccctaaccctgtcataaacagaccttaaagaaactggccataaacaggatttctgcagcaatgggacatgctcatgatggctgtcatgcacactgctaaaagttgttggtttactagcagcagggcaaggaacacctgggccccgcccggagcaaaaaactgcttcaaaccacaaacgataggcagggaaaggcctgtgccttggcagcatgtttttgctgcagataatcagccagagcctgtttctctgctcctcgctgagattgctttgtttcccataaagattgcttttagctaatctacaatctatagaagcaatgcttatcactggctttctgtcaataaatgtgtgggtcaagctctgtttgtggctctcagctctgaagctgtcagccccctaatccccactt

SEQ ID NO: 68860 - DNA, 743 bp, Homo sapiens
agggactatagtaacgaaaggagggtctgtggtattatgaaggagggactatggtaacggaaggagggtctatggtaatgtgagaaggggggactgtggtaacggagggtctatagtaatgggaggagggactatggtaacggaaggagggactatagtaacgggaggagggtctatggtaatggaggagggactatggtaacagaagtagaagggtctatggtaatggaggagggactatggtaatgggagggactacggtaacgggagaagggactgtggtaacggaggagggtctatggtaacggaaggagggactacggtaatggaggaggggggactatggtaatggcggggagggattatggtaataggggaggaactattgtaacaagaggaggagggactaatgcaaccactggtggacgctgcctatagcaccatgaagcacacccgagcagtgacatctgggagcctcttggagcgcaggcagcataccattttcttttctagggacaggcacgtgatgctcggaacaaccgtgattggggtcgttcgatgtggggttcagtcatggataaaagctgccaaaccctgtggctgcatagctaattttgagcaggtcctaaggaagcgttgcttgatcctctgacgtttgctccaggtgaggctggcccaacatcccggggcctgataggaggagagaaacccaaccaaaatgtgatcacgttagatgggaattt

SEQ ID NO: 68861 - DNA, 1161 bp, Homo sapiens
  misc_feature (1)...(1161): n = a,t,c or g
ttttttaatgtggagaaatttttattactttgaatgttttagaatgcaggtagaagagacccggagctcaaatagcttaaataagtaggaaatctattggctaatacaactggaaatgcggagatagggcaggctgcagggctggtggctcagggctcagggggccccaactctctgtgctgctctgaggcactgccttcaatctcaggttggcagcacaaagctgctgagagtcccagtgtcacgcccagaccccacaatgccagggaggaagacaggttctatctaaggagagatcttccatccccacctctgcggacttttactcacttctcagggacctgcatgggatctcaggcccattcctgaagcagttgttggcagacagagtggaatagtgtttacagcaggcaggcagccttggagtggaggcacacagctccaagtctatcaggaagaaggggaaatgggagctgcacagacagcaagcagcatgctccatagaccacgaggatctgagtctgaattggtgattattagaacaatgactccatggggtgatacattagaagtgctccagggtccagagatttaaatgtaatgaaagatgaacagaaaaataatgaaaaaaagtatgctgcacaacaatagaaaaacaaaaatctcataatgcaaaagcatcaagtgtttgactctgagaagcgccttgtatgcccagttactctcgttctccctcagctcttgcttgtgcttctccacctgccattccactttggcctggtactgcctgtagtcttcctggcaggccccagctccagttctttggagcagctgggcatccaagaagaggtcattgctgtggaaggagccctctcgctccctccccagcctctcaatcacagccaggagctctgcctgctgctgcctctgctcctccacagagccccagttgttgaaggcacagtaccttctctcacactcccgcaccaggtctttcaggctgcagttgtccgtgtttgctacatagtcatccagggcctggcccccttagtcctctttgtgggtgaagaggatgaccacatgtctcatggcccctgtcccaaagacctctttcaccttcctgatggccactgtgtcctgagcagngaaacgccccagctg

SEQ ID NO: 68862 - DNA, 394 bp, Homo sapiens
cccacgcgtccgaacgggtttggcgtgtgggacgcagctgcctctgtactggggagtcacggagtggccgggctccagggacatggcggcggcctctgcggtgtcggtgctgctggtggcggcggagaggaaccggtggcatcgtctcccgagcctgctcctgccgccgaggtgggtggaggggccatggctcagtgggcagaggcgggagcgaggggtgcacggacccgcgtgagcggtgggaggtgcggcggaacccaaggtcggtgtggggaggacggtaggaaaaccccaggcactttcggaggggttctgccggcagtcacggcgtcgggaggaagacatccccaccagccctttcctttctccccgcttccgcacatccacgcttgag

SEQ ID NO: 68863 - DNA, 643 bp, Homo sapiens
cgagcaggaggaagaagggctcccgctgcccctcgcaaacattaaggaagagccgccctctccggggaccccaccccagtccccgccggctccccctgtcttcctcagcgcctcctgtttcgacagccaagaccactcagccttcgagatggaggaggaagaggtagacagcaaagctcacctgcgcgggctggggggcctggcctcctgaccttcgccgccctgccctccgccgctccgcctgagctccccggtttgcagaatggaggagggaagttgaaggagccacctcctctgtctacccacccgtccccttcacgcccttgacactaaggagtggggggccctggactgccccttcctcccccatcgcccgcccccagaacccctgatgctggttaggaaccgctcaccccaacatgtgtcttaaggcaggacgacttggaaaaaaaggcggcggacagttggccagagggatggagactggtggggacgcccccgcctccctgtcccccgtttcacacactggacaccatcacctctttggaactgccagaccctgggggtccccagtgagcaaaggtctgtccttgtccctttgtctgtctgtgaataaatgtgagttcgtgaaatccaaaaaaaa

SEQ ID NO: 68864 - DNA, 512 bp, Homo sapiens
gggtgctggggagggggacgggtgcatcttagccggccggtctccagctgagcctgaggctgagttcaccactaggcagggcaggagggagcaaaccctgagccccacccaccttccctgcagtggtgtgagaagcacaagcgctctgggaggcagatgctctgtgacttgcttatcaagccccaccagcgcatcaccaagtacccactgctgctccatgctgtgctcaagaggagccccgaggcacgagcccaagaggccctgaatgccatttgaagccgtggagtcattcctgcgacatatcaatgggcaggtccgccagggcgaagagcaagagagcttggcggctgcagcacaacgcatcgggccctacgaggtgctggagccacccagtgatgaggtggagaagaacctgcgcccattctccaccctggacctgacgtcccccatgctgggggttgcatctgagcacaccagacagctgctgctggaggggcctgtgcgagtgaagg

SEQ ID NO: 68865 - DNA, 421 bp, Homo sapiens
gattttcgtgattcctgtttcctgcaaaatggggagttttcaatatattctgtttgaaaactggaaaggagagcaccgacacaatgcgggtcttccaggcattcctggaagtttctgggaccccacagagctcgggcaacaaacagtcaacatggtcacgctttcggggggcagaaacttgagcaacaggcacctttgcagagggcaaagaacgtggaatccagaatcacgcttcagttggcctgagtgtgactcctgtgtggatgggactatccgcctcgcgctctgttgcagggcttaagggggggatatgtcatctgtgaagcatgtggatgaaaaacagacaaccacctgagtctcggtcattgctctctggggaattcgctcattccttcagaaacggaattggactgaattgctc

SEQ ID NO: 68866 - DNA, 1019 bp, Homo sapiens
  misc_feature (1)...(1019): n = a,t,c or g
aggaagagacgcttacgttaggggaatcctccgagcggccgcgttccccacagaggacagcaggacttccaaggtgagcatgtcggaggctgatcgcgcccagaagatggacggggagtccgaggaggagcaggagtccgtggacaccggggaggaggaggaaggcggtgacgagtctgacctgagttcggagatccagcatgaagaagagatttctcaagaggaaaggaaagaccgacagtccctggatcaagccagccaggaaaaggaggcggagaagtagaaagaagcccagcgctgccctcggtttctgagtcgtataagtcatctgcaggaagcgctgagcagacggcaccaggagacagcacagggtacatggaagtctcttctggacttcctggatctccgagtcaaaggaattctgtcttcacaagcagaagggttggccaacggtccagatgtgctggagacagacggcctccaggaagtgcctctctgcagctgccggatggaaacaccgaagagtcgagagatcaccacactggccaacaaccagtgcatggctacagagagcgtggaccatgaattgggccggtgcacaaacagcgtggtcaaggatgagctgatgcgcccctccaacaaggccccgctcctcgtgctgtgtgaagaccaccggggccgcatggtgaagcaccagtgctgtcctggctgtggctacttctgcacagcgggtaattttatggagtgtcagcccgagagcagcatctctcaccgtttccacaaagactgtgcctctcgagtcaataacgccagctattgtccccactgtggggaggagagctccaaggccaaagaggtgacgattagcttaaagcagacaccacctcgaccgtggacaccagtccccgggcaggagaagggctcggctcganagggagggcacnaaccacaacgggcaggtacctggcacagctctggctgggctctccagtcgtccacctgaaaaagtttcagttgtt

SEQ ID NO: 68867 - DNA, 528 bp, Homo sapiens
taccgggccgacgatttcgtgcaaagtcgcatctgatatgaggtggctttttaacccctgagggaccacatttaaggatttcgaagagatggaggctgaactttctcgatgactcttcgtcacccggagtggtgcagagcaacctgcaagcaatcaaggccagtctaccctgcagcccttgccgccttcccataagcagcactctgcacagcatcatccatccatcacttctctcaacagaaactccctgaccaatagaaggaaccagagtccggccccgccggctgctttgcccgccgagctgcaaaccacacccgagtccgtccagctgcaggacagctgggtccttggcagtaatgtaccactggaaagcaggtaacatctaaaatttcaaaataagctagcccaacccttttctcaccaggagcaatttactatacttacatattctggtgtggtgctttgggggtttgttgttggtgtgttttcttttttcttctctaagaagcagttccagattgttgtgat

SEQ ID NO: 68868 - DNA, 1187 bp, Homo sapiens
tttcgtgcgtgcgcgcaggtgtgcgtgaccatgtgcttgaaacggcagtagcgcagcgagaaggatcgccatcacacggcgcactggtgcggcttctcccccgagtggatgaacatgtgcttggtgtcgtttttccttgagctgaacgtcttgcaacagtggccgcacgcatagggctgaccccacattggacaccgctgcatccatgtccatcacacaacacagctgccgtttcttctgcctgcttatgggaaagacccctcttctcctccgttttcttctcttcctgccctatcacaccgtgcacttctccctttccttaaagaaccaccatcaactttaggaggagggaaaggggtggctctggcaggaaaagccagaatcccctctagccagcagagagagagagtcaagggtctgtttgggtggcagggatagccacttctgaaggtagaaaggaaaataagccaccaaattggtacctttctgtgaaatggacatcgtgctcagaatctccattttccccacaacctggaggagtaagtactgtcatctgcattttgtagctgaggaatctgactcaacaaaattaaattactcgcctaagcaattagcaatcaaccaagtctttctgactcagaaacccagctattgcctgttcatatccagcccctgtattggggtcaagatctggcctgttctcaatgcagcaagatccaggcagatcacactggactcccagcactgaatctggctcgaggggacatcaaatttgactgggtcatggggctcaggagcatcactctcaaaaatagcagtacaggaagaggcaatggccctaaacagcacttgcaggcagatccccaatgttaatcataagggccaggactctctcacttttctgtctctctctctgtctctcctctagggctgaccccacattggacaccactacatccaatgtccatcacacaccacagctgccttttcttctgcctgcttatgggaaagtgggctcaggaggtctggatctggggtggggatctggagtggaaggggaattcatttgttcattgtctatccttttgtattgattgaattttttatatatatatgtgaattttcacaataaaatttttttccaaaataaaataaacaaaaggggctttttgcaacccaattcctaa

SEQ ID NO: 68869 - DNA, 719 bp, Homo sapiens
tttccggtgtgcgtctgtgtgtgtgtgcgccgcacgtttttgagtgtgagacccaaatgcagaccacgcaacctgcgttccccgcgcctccccccgtccccggtgattaatacccatttttctgacgctcccctcctcccctcctgctctccctctccggctgccgcgcggttgacttgcacagcctgcccccgcccgcttcccttcccccggctccgatcctcaccaactggaatctgggctcctgcctctccaccccccacctctttttgagaaaggaaggttccccccaccccctttcaaaaaccacttcctccggcttcttcacctctaggaaatctcggggcttcgctctatcgagagtgctcgtcgagggtgattcttgatcaccaccatccagtagtgctggcgtccgaatgcatatccttttgccttgcaaagaagagtcatgaacttcaaaacccccgagacggatcattaatcctgctttgcaggaaaggaaaaccctccattcccagccaccggccacccctctccgcagactgcaaccgcggaggcgctcggagccggaaggggacgctttgggaatgaccatgctccaccgagggacggagccggcccccagcttctccacacagagcctcctccactaacgctccaaaaaccaaaaaccgtaattgccagaagaagcgttaaaaatctattccagccactaaccc

SEQ ID NO: 68870 - DNA, 1442 bp, Homo sapiens
cggggggcgtggggctgggcccagccggacgcgacctcagcctgcggcggctaactgccggtaggcgtctgtgtgcgccgccaagtcggtggggcggggacgcgaggtgtggatggggggtcgccttgacctctgcctcagccagtagcgcagtctcggcctcgccgttacggagatggtgccctgggtgcggacgatggggcagaagctgaagcagcggctgcgactggacgtgggacgcgagatctgccgccagtacccgctgttctgcttcctgctgctctgtctcagcgccgcctccctgcttcttaacaggtatattcatattttaatgatcttctggtcatttgttgctggagttgtcacattctactgctcactaggacctgattctctcttaccaaatatattcttcacaataaaatacaaacccaagcagttaggacttcaggaattatttcctcaaggtcatagctgtgctgtttgtggtaaagtgaaatgtaaacgacataggccttctttgctacttgaaaactaccagccatggctagacctgaaaatttcttccaaggttgatgcatctctctcagaggttcttgaattagtgttggaaaactttgtttatccgtggtacagggatgtgacagatgatgaatcctttgttgatgaactgagaataacattacgtttttttgcatctgtcttaataagaaggattcacaaggtggatattccatctattataaccaagaaactattaaaagcagcaatgaagcatatagaagtgatagttaaagccagacagaaagtaaaaaatacagagtttttacagcaagctgctttagaagaatatggtccagagcttcatgttgctttgagaagtcgaagagatgaattgcactatttaaggaaacttactgaactgctttttccttatattttgcctcctaaagcaacagactgcagatctctgaccttacttataagagagattctgtctggctctgtgttccttccttctttggatttcctagctgatccagatactgtgaatcatttgcttatcatcttcatagatgacagtccacctgaaaaagcaactgaaccggcttctcctttggttccattcttgcagaaatttgcagaacctagaaataaaaagccatctgtgctgaagttagaattgaagcaaatcagagagcaacaagatcttttatttcgttttatgaactttctgaaacaagaaggcgcagtgcacgtgttgcacgttttgtttgactgtggaggaatttaatgatagaattttacgaccagaattatcaaatggatgaaatgctgtctcttcatgaagaattgcagaagatttataaaacatactgtttggatgaaagtattgaccaaattagatttgatcccttcattggtagaagagattccaagaa

SEQ ID NO: 68871 - DNA, 569 bp, Homo sapiens
ttttttttttttacttggcatgcagtaagcgctcaataatagcttttattatcatgttcggctcagaggcagggaggagtggaacggcatgggagggctgcgggaggcacggcaggggggtcaggggcaagtggcaggagggcggatggggggcagcggtgggcaccggggcagggcgcgctgacctgtcctggggcccgggttgggggcagaaatgagcctgcccacgctgtcccgccacggcaggcgccacgcatcctcgacacagccgccatggcaggccttcgggctccgtctccgggacaggcggtgcagggcaaattggtatgcagcgtccgccccgtgggcccgggagagcctgccccgcagggaccagagcccaaggacgggctcaacactcagtcaaggtggggttgacgacggccagacaacaggggagggaggagggacaagggggtccccacttccagggacgcacaatagcagagccacttacacgctggggagggggcggtgcgggggtcctcctcccgcccgggattcagagtcgggcggacgcgtgggtcgac

SEQ ID NO: 68872 - DNA, 875 bp, Homo sapiens
ccacgcgtccgaacaattatacttactgggcatatttatcaattttttttggcaagaatgcctggatgtaatcactctatgacacagttacacatgctttctgatctcagtatttaccatgataaatctgctcctataattgaggcataccgccctcaaaaacctatctgtaaacaggattggacccagtcagagaaaatgaacgtacatgtttgggaagattgcattgcagaacaggcaggggtgctggcaacgattcctatggaatcattattgattgatcccctacggggatgtttagcttgaattgcacctctcagtctgtgtgccacggccccactatgttcagctggtctgaacaaaatggtcagatggtagaaatgataagaaatacggcaagaattcctattatctggaaccatggcggtgtagtggcacctcaacctcaaatgatatggccctttgtaggagctaaacataaggatttgtggaaactgttaatagctcttaataagatcaaaatttgggaaagaataaaaaagcatcgagaaggacactctacaaacttgtctttggatattacaaaattaaaagaacaaatatttaaagcatcccaggtacacctgaccttaatgacagaaactggagtgcttgaaggagctgcagacagattagcagctagtaacccattaaaatggataaaaacacttggaagctctgtgatttcaatgatgattgtgcttttaatcggtattgtttgtctttgtatagtgtgcagatgtggatcctgactcctgtgagaagtagctcacagtgtcaaaagctgcctttgcttttatcgatttgcaaatcaaataagggggacatattgggaa

SEQ ID NO: 68873 - DNA, 831 bp, Homo sapiens
  misc_feature (1)...(831): n = a,t,c or g
cgcgggggcggtggcgcgcggtcagctgacccggcgggccttgacccagaagctgggccctggcggcggatctggacgtggcggcccgcgccgggctgagtcaccaggagggagctgtggccgaggacgccgaggcctggagtgggtggtagccccgagctgggacgctcctccctccacaatctccccaggtctgcagggaccgagggcctacactgcctcctcccacgccgtgcttaggaacccttgctggcctcagaacaccagcgccctccctccggtgcagccctgcctggccgggggcccctcctccacagccatggtctggaagaaactgggctcccgcaacttctccagctgccccagtggctccatccagtggatatgggatgtgttgggtgaatgtgcccaggacggctgggacgaggccagcgtgggcctgggcttgatctccattctctgctttgctgcatctaccttcccgtgagtagtgtcttggtggcaggaccagggcagggctgtggggttgaggcagtggctccagctactgctcagcgaggggttgtctggtgggccacgggcctctccagactagaggctggggtgtgttccctcgacagggacctgcactgattgctaccgcaggtcagacctagtgctgggcagtgctgatacagagatcatcacctttgcaacagtttattgagtgcccaccatatacctggcttgcttntaagcacttgccatatttctacctcatttaatcctcacaacaaccgaattccncgncactgagtagggaaatcatggnnnnnaaaancggcgacttcc

SEQ ID NO: 68874 - DNA, 439 bp, Homo sapiens
gcccgagcctctggccggcctggaccaactgcgggagctcagcctggcgcacaaccggctccgggtcggcgacatcgggccaggcacctggcatgagctccaagccctccagatgctggacctcagccacaatgagctgtcctttgtgcccccggacctgcctgaggccctagaggagctgcacctcgagggcaaccgcatcggccacgtgggccccgaggccttcctcagcacaccccgcctgcgtgccctcttcctcaggtgccccgagggtgaccggaggggtggaggtgggcaggggagggcctgggagggtcatgaccgcctctctgtgcagggccaacaggcttcacatgacgagcatcgcggctgaggccttcctggggctcccaaacctgcgtgtggtggacacggcagggaatccggagcaggtcctgat

SEQ ID NO: 68875 - DNA, 898 bp, Homo sapiens
agcactgcaaacaagcaactgtctagacattgacagttattttctagttctgaccttatagtatccaaagcaactaaaagaacaggaagacacagtttaaatcatgaacagtcaatggtaagttatgaacattcagttgattctcagtatcagtctcgacctattattataagaagtcaggaatctagtcatggacattctatagtaactcataaacagtcaaacaacacctatgttcaacctggatataacacagccagaagggagggatgtacacatagccagtcaaatgaccaccttggatttggccatggacaatccatatcagttcatggccattcaaaatctagttcaatcagaaaacaggaatcccatactgataacaaaaagcattcagaagattgggagaaagacactcatgagcaattaggatctaggcatgggaagttagagttcaatacaataggtatacatggatctagccagcaacatttcggagatacaacttttcatgggcaggtaagatccagcacaggttttgccagataggtattaagtcatgggccatcaagagatgcctagggtcagtctggattcagtaccaatgaaagacaagtatacagccatggccaatcaaatgatagttatgagtagtcaaatgacagcaaaagtcaaagatacattttcagtcactttcttgacagccaagaccctgcaggaattgaagagtataggtatagatatttatcaagcagtgcaaccatatgcagtgggggagacaaaggcaagagtcagagtcaagtctgtcaggaggtatcagaatatacggtgaggatgtgggcaaaaaacaaagaggctctgaggccagcggttaccatacaaaggaaagaacaggctg

SEQ ID NO: 68876 - DNA, 865 bp, Homo sapiens
cagtgagccctaggccctcaccgcagacccagctgctggataggacccagccccgctcccagagacaatgaccatgtttgaaaatgtcacccgggccctggccagacagctaaaccctcgaggggacctgacaccacttgacagcctcatcgacttcaagcgcttccatcccttctgcctggagctgaggaagaggaagagcacgctcttctggggggcccggtacgtccgcaccgactacacactgctggatgtgcttgagcccggctgctcaccttcagacccaacagacactgggaattttggctttaagaatatgctggacacccgagtggtgggagatgtggatgtaccaaagacggtgaaggtgaagggaacggcagggctctcgcagaacagcactctggagggccagacactcagtgtggctgccaaggccctggagaccttgcagaagaggaagctggcagcagaccacccattcctgaaggagatgcaagatcaaggggagaacctgtatgtggtgatggaggtggtggagacggtgcaggaggtcacactggagcgagccggcaaggcagaggcctgcttctccctccccttcttcgccccattggggctacagggatccataaatcacaaggaggctgtaaccatccccaagggctgcgtcctggcctttcgagtgagacagctgatggtcaaaggcaaagatgagtgggatattccacatatctgcaatgataacatgcaaaccttccctcctggagaaaagtcaggagaggagaaggtcatccttatccaggcatctgatgttggggacgtacacgaaggcttcaagacactaaaagaagaagttcagaga

SEQ ID NO: 68877 - DNA, 957 bp, Homo sapiens
agtaaagggaagatttaggatgccgtttttcaagggaaagttaagtctagacatgcttctttgaaagtcacaaggcagaattggtcaaaagccagaattttaaaaggaacccaaaaccaaatatcataagcttgtccttctcttcctaactgggatataaaattctcctaagtatctcatcgaaaaggctccttgggacgaaagtcgatgggggcaaatctttggagggaaatttcgtgacttgtttgaccatggacttaattaataccgttcacctgtagagaggatgcacttggttcccagcgccctcctcccagcacaggccgctgcctcagcatccaccccgcagcccacgtgtggcaagccggggaaggggtggagtgaacggccggagaccacgtggagaaaggggccgctttggcccttccatctgggtgccgggagcccctaggccctccggccatggccgacagcggcgatgctggcagctcgggcccctggtggaaatcgctcaccaacagcagaaagaaaagcaaggaagccgcagtgggggtgccgcctcccgcccagcccgctcccggggagcccacgccacctgcgccgcccagcccggactggaccagcagctcccgggagaaccagcaccccaatctcctcgggggcgccggcgagccccccaaaccagacaagttatacggggacaaatccggcagcagccgccgcaatttgaagatctcgcgctccggccgctttaaggagaagaggaaagtgcgcgccacgctgctcccggaggcgggcaggtcctcggaggaggcaggctttcctggtgacccccacgaggacaagcagtagccccaatagcctgcgcgctccaggactgcctacccagcactaccccaaacccccagttccaaacccgagacttcaggcccgcccccttacgcgttgtctcattcc

SEQ ID NO: 68878 - DNA, 1069 bp, Homo sapiens
gttcttcctgcagccacctcctgagcctggagccgctccccgacttcttctcttttctcgccttgtcccttttgtgcatcgagagggcaccctgggccagcaggcccgtgatgccctacttcttctcatggctttgtcagctgggagccccactgtgggccgctacatcgcggatcactcttacttctgcccggtgctggccacagggctcagtgccctgtactcatcactgcctcgaaagattgaggttccaggggatgattggcactgtctgcgacgggaagactggctgggagtgccagcccttgcactcttcatgagttccctggagttctgcaatgcagtaattcaggtggctcaccccctggtgcagaagcagtaggttgattatatccataatgggttcctggtgcctgtcatgggtcctgccttgcacaagacctctgtggaggagatgatcgccagtaccgcctacctggaacttttcctacggagtatctcagagcctgctttgctccgtaccttcctgcgattcctgttgttgcaccggcatgacacccacaccatcctcgacaccctcgttgctcgtattggcagtaactcccggctctgcatggtctctctgagtctcttcaggaccctcctgaacctcagctgtgaggatgtcctgctgcagctggttctcaggtatcttgttccatgtaaccacgttatgctgagccagaagccggctgttcgtgatgtggacctatatggacgagcagctgacaagtttctctccctaatcccacgctgttgtcggcaccacgcccccagcccacctcgtccagagcatgcctcatgggcacgaggtgggcctagcagagagacagggagaagggaggacatcacgggtcctggaagcccaagtgtggactcctcttctgtgatgacagtaccccggccctccacaccatctcgtctggctctcttcctgcggcagcagagcctgggtggctctgagtctccaggcccagccccttgctcaccagggctttctgcatcccccgcctccagccctggccgacgg

SEQ ID NO: 68879 - DNA, 514 bp, Homo sapiens
  misc_feature (1)...(514): n = a,t,c or g
ttttttttttttgagtgtggccctggctattttattccatgtgctggccctggggacccagctgggccaggtcgacgcccctggggagacagtgtggctcggccagcctcagtggcttctttggggtgcaggagggctttggggttaaggctggggaggaacaggaagtaaagtgcttgcaggggccctcggggcttggccccagccaccctccctgctccggggcgggccagaggccggacacccctgggctgtgcaaacaggactctccagggcccagccaggcctgggtgaggggcacatactggctggcaggcatggttcccaacacccgcagccacggaggctctggcggggctgggggcccggatgaggggtgagtccagaaccgattgtccgctgattgtctgcttgtctggttcgtggctgtgtcggctcttcccggtatcggggcctgctgcccgctttctgggggctgcggacgcgtgggtcgacctnnaattccagagcggtc

SEQ ID NO: 68880 - DNA, 623 bp, Homo sapiens
ctttaacctccacatccaggtctttctggctaaactgcagtatatccacaatggggccaatggacacataagggaggccctatcacaggaacacgaacacccggagtcgctagaaatcagattccaccggctttgcttcaggccgacttcctaaggaaggcatggtagcatcacagatgctgtttgtctcagtttcctgagaagccaatttcttagagctgtcattcaagagtgggtcaaatttgagatataaaaacctttctcaaggtagactctttggcccctatgcctagtatgtcagctgggcctctgaagctctcctctttgaggtcctggcaggctctggcccctgttgagaaggggaagcagtcatgtgaactcatgtgctggaagaatccactctaccccttccctggcttctctgctgcaatttttgtctttaaacgtattttcaggtgattccagtttgcatacataattgagaaatataagatttggtccccagtagagagccaggtgaacttaagaaggagtccatctaagaaaattgcacaattatctagtttcacttgggtttaacttttatggcttacttgattcagtaatccaatggaatttcacac

SEQ ID NO: 68881 - DNA, 553 bp, Homo sapiens
gcaagcctggcctatcccctgtagggggtgggtgaggggcgaggctgaggaagaagagaaggggaattggggcgcttgaggggattataatttctttaaaaagaggggaggggagaggccatggccgtcccagccaagaaaaggaagatgaacttctcagagcgggaggtggagatcatcgtggaggagctggagctgaagaagcacctgctggtgaaccacttcaacgccggggtacccctggccgccaagagtgcggcctggcacggcatcctgagaagggtcaacgccgtggccacctgccgcagagagctgcctgaggtcaagaagaagtggtctgacctcaagaccgaggtccgtcgcaaggttgcccaggtccgggccgccgtggagggtggtgaggcgccggggcccactgaggaggacggagctggggggcctgggacaggcggtggcagtggcggcggtggcccagctgtagccccagtgctgctgacccccatgcaacaacgtatctgcaacctgctgggcgaggccaccatcatcagcctgc

SEQ ID NO: 68882 - DNA, 428 bp, Homo sapiens
ttttttttttttaaagaatagaatgtggcctctaggaggctgtttattaggaagagaagattgtggtttaggcctcattccaggtcagctgggcaattctctcaggcttgccatcttgtgtcctgttttcttctacttcctcagtgatgtggaccagggggtgggtgacctgggccatggccagggggaggcccgcagggccctggaccatggtgggggggtggcccgcaggaccctgggccatggccagggggtggcccgcagggccctggaccatggtgggggggtggcccgcagggccctgggccatggccagggggtggcccgcagtgacctggaggatggccatgccccccacagtggcagtgccccttcggacctgggtccatctttttggagtaagagcagggaatacctgagagtgcaga

SEQ ID NO: 68883 - DNA, 738 bp, Homo sapiens
  misc_feature (1)...(738): n = a,t,c or g
attttctcccattctcttgtcttttcacttttgtgattgtgtctgttgacacacagaagtttttcattttgaagttcactttatctatttttttctttggttgctaatgcttaagtgtcatatcaaataaatcattccctaatccaaaatcacaaagatttacacctatgttttcttgtaaaaagtttatagtttagctcttaacgtacttagatctttgatccagtttgaagtaatttttatatatgtgaggtacatgtaaggtaggagtccaaattcattctttgatatgagatattatcccagcactatatatagaaaagattattctttccccattgaattgtcttggcaactttgttagaaatcaattaccatagatgtatgggtttatttctagattcttggttctattccactcacctaaatttctgtccttatgccagacttggttagttttgaatccattttttagttaaatattgacttattccctgcatttaaacttcataaatataaaaagcaatctgtgtagtgcagtacacaatgtaaaatgactgtttcattgctttgcaaattccatcttagaagttttatggntctggaatgaataattgcttgtagaaatttattgaattaatcgtgtatcattgggaatttgccaaaggagactcagaanatcttttgtgaataaaatcatttaaattttctgaatgctgactcaaatacatcaaattg

SEQ ID NO: 68884 - DNA, 419 bp, Homo sapiens
tgtctttgctgttctgtgggtctactcaggttgtctgtgtttctcttgagtcagttttggtagcttttgtcttttcaggagtttgttcatttcacctccgttattaattttcggcatgcagctgttcgtagtattcctttacagcctttatctctggaaggtcagctagtgtctctttcactcccaactgcagtgatctgcaccctctttcttgtttccttggttggcccagctaaaagtttctgtcaattctgttgctattctcacagaaccaactttaggcttgaccgatttcttttattggttttggggtctttatttcacttatttttgctctaatatttattatttcgttccttctgcttgggtcaactgaagttggactccatcaagattaaaattttggccccgtgaaagtt

SEQ ID NO: 68885 - DNA, 651 bp, Homo sapiens
tttatgagagcagagacttttgtttgttcactgctttatccttagcacctaaaacagtgccttactcatagttacctcaatatttattgccaaatgaatttctgctttataatctgattatatttttccactctctcttagagtctaactagttatgatgtctgtagcatacttcttgggacttctaccatgcttgtgtggcttggagtcatccgatacctcggtttctttgcaaagtacaacctcctcattttgacccttcaggcagcgctgcccaatgtcatcaggttctgctgctgtgcagctatgatttacttaggttactgcttctgtggatggatcgtgctggggccttaccatgacaagtttcgttctctgaacatggtctctgagtgccttttctctctgataaatggagatgatatgtttgccacgtttgcaaaaatgcagcaaaaaagttacttagtctggctgtttagtagaatttacctctactcattcatcagcctctttatatatatgattttaagtcttttcattgcactgatcactgatacatacgaaacaattaagcaataccaacaagatggcttcccagagactgaacttcgtacatttatatcagaatgcaaagatctacccaactctgga

SEQ ID NO: 68886 - DNA, 405 bp, Homo sapiens
agtgccaagatggtgatctggggcgccaacgcctacgtcactgactaagacagtatgatatatgagggcatccgagatgtttccaaatggagtgagagaacaagaaagcctctacaagccctctatggatggagtctcactctgtcaccaggctggagtgcaatggcatgatctcagctcactgcaatctctgtctcctgggttcaagcgattgctctgcctcagcctcccaagtagctgggaccacaggcgtgcaccaccacacaggtaacatctgccggcacctgctgccccgggtccagtgccccgccttgattgtgcacggtgagaaggatcctctggtcccacggtttcatgccgacttcattcataagcacgtgaaaggctcacggctgcatttgatgc

SEQ ID NO: 68887 - DNA, 1360 bp, Homo sapiens
ttttttttttttcagaaagaaaggataataaagacgtttatttgcatttgtcaaccaacttaacatacagctgagaaagaaagactaaaaaccctctaataaagattgttaactgacagaagcattttgtttttgtttatttttttgagacagggtctcgctctgccacccaggctggagagcagtggcacgatctccactcactgcaactgccactttctggactcaagcaatcctcctgcctcagcctctcaagtagctggaactagatacacacagcactgcacccggctaacgacagaagcattcttatgatacgatctcctctcggctcacttcatctttagtcctggaggtctgactgtctagtttcttcttcttcagaattaatgtttccctcatccatgtcatagcggaactcctcctggtcatactcccggctctcttcccggaggacgtctgcatcttcatctccaggcctcatgtccatctcaccctcgaagccctccagcagagcctgggcctcctccctgggttctcctgcactctcagctcctggagcgtcttggccaggtccatccgtagaggtcggctttttggggagagttggtgtccacagggccaattcagtgatttgggtagctttccattttggaacaacagttactaattcttcctcctcttcctcttctcctctttccatatctgttaaacgatattcaccatgttgttcacacccaacatcaaatacatactttccagggccaacaggatttttgttcaagaacttgccctggtacctgtggttcaggtgaatgagctcggccgtgccctcctgctgtccgttcacccaggtgccaacatacttactgcccgtctccgcgtataaataggtgccttgcccatgcctttgatgagcaaaccactctccagtgtaggtgtcattattgatgtagtagtatacgccatggccgtgccgcaggtcatttgcccactctccttcatatctggatccatctggatatataaaagtgccttgaccgtgctttttatttctaacatattctccgatatatcgagcaccatttttaaatttgtagatcccctggccatgtcttttaccgaattcgtagctcccttcgtaggtgtccccgttgggtagccgtgccctcccacgtccgtgcctttcgcctgcctcattccgacccccctcatattccccaatatcattctctccctcctcctccaactcctccgagcccaggtccgacatggtctcgccccagcctggatcacagccgcagcgcctctagcaagtgggtagcaaccgcctccaccgccgcgtcccgcgtcgccatgg

SEQ ID NO: 68888 - DNA, 1299 bp, Homo sapiens
tccgaacgaccgcagcagggtcacaagggagatgtccgcccccagtcgtagcctcggacggtttctgagcgttggtgtttggcacgcgccaccctctcttgctttggttccgccatgccgatgtaccaggtaaaaccttatcacgggcgcggcgcgcctctccgtgtggagcttcccacctgcatgtaccggctctctaacgtgcaaggcaggagcggcggcccagcgcccggcgttggccacctacagtctttggtagatgagtggctggatagctacaagcaagaccaggatgcaggatttctggagcttgttaactttttcatctgatcttgtggatgtaaaggactcgggggactatcctctgacagctccaggtctatcctggaagaagttccagggcagcttctgtgagtttgtggggacattggtctgtcggtgccagtacatcctcctccatgatgacttccctatggacaacctcatctccctgctcactggcttctcagactcacaagtctgcgccttctgtcacactagcaccctggctgctatgaaactgatgacctccctggtaagagttgccctccaactgagtctgcacgaagatatcaatcagcgtcagtatgaggctgaaagaaacaaggggccagggcagagggcacctgagcggctggagagcctgttggagaaacacaaagagctgcattaatactacattgtcaaagacaaagacgaacatgagacatgcgatatgagttttaaaaggagagaagagcaaaaaaacaatacagctatccaaggagcaagtgctgagcttgtgaaaaaacagcttctattttattaaataatagtgttcctgcagggatgtctgaagtactctgcaaggctaattaggacagatcaatgtacacttacctctccagaaggctgaaaggtgtgtagtgactatgtgtcattaaaaatttacttgaccatgggcaacagatgtccatgaaagaatgaccctggtgagtgctctaagttttcattttactcatgtcatcctcaatgcatcataaatgccatagacaccattactatcacgtaggctcatagcagctgatgtgctgtatatgcttgagagggtggtatcaattaactatattatctataaagccatacttgcaattactaccacttcacaatttatcattaacgcatttggcagattttttttttctccaaagtaacatttatttaaaggtttattaaaattttttaaaccggattttattataaggggattttggaaaatgg

SEQ ID NO: 68889 - DNA, 2369 bp, Homo sapiens
ttttttttttttcagaccagctagatatttttattaatgatatataacctctttaaaacatgtatatttaccaaaagcattctgatatggcattcctctagtgtgactttttgcatgtaaattaatacagcctttttgaccttccatacagtcaggttcctcttcagtgtggatgtttcctaacgaccaagttcaagggctttccaacatctctttcactcatgggacttctcaatgtgtgctttgacatgttcccaaagtggaagctaaaaacaaagaagaatctccacacattttacattcataagatttttcacacttgtgagatcacagctgaatattaaggtataaggcagagtgaaaggtttcaacacattccttacagccagaggacgtgcatttatatccaatgtgctcacaagctcagtaaggcccgaggaaaataatgaaagcttttccaccttcctcacattcatagcatttctctccagcatgagttcaaacagactcagtaagatgtaagcatcgacaggtttcctacgttcagtttgtttcctaggatgcacagacacatgaatagtaaggcctatggaaggagccaagattttcccacattccttacattcatatgtcttctcttctattggaattgttaagatctgagacaccaaggaaggcttcccacattccttatgactgtgtacattgccactatgaatgagtacatgttcagtaagtgtgaggaagtagtggctttaccacattctttccaagtatcagccccaattcacacacattcagtaaggcatgaggaattactaaaggtttgcccacattccttatatggtttctccacactatgacttcttagatgtcgaataagatatgtggaccgagtaaaggctttcccacattcctgacattcaaagggccgttcaccagtgtgagttctcatgtgtactgtaaggcctgatgagatactgaaggcttgcccacacttttgacatttatatggcctctcccctgtatgtattcttttatgttgactaaggtgcgaggagtatctaaaggctttcccacattcctcacattcaaaaggcctttctgcactgtgacttctcaaatgtcgaataagaaatgaggatcgaatgaaggctttcccacactgttgacagtcatagggttttacaccaggatgagtctgcatgtgacttttaaaggaagaggaattaataaaggcttttccacattccttacattgataaggcttctcaccagtgtgagttctcatatgtacagtaagatgtgaagagttagcaaaagctttcccacattccttacattcataaggcttttctccagtgtgagttcgcctgtgttttataagacctgatgaatcagtgaaggctttcccacatttgttgcactcatacggtttttctccagtgtgaacccttatgtgaatgttgagttttgagaaacaagtaaattctttgccacattcattacaaacatagtgttttcctctagttctaagtcttatatgtttagcaagatctggggaaaaagcaaaggctttgccaaatttcttatgttctataggtaacactctactatgagttcttaaatgttgagtaagatatgacgactcagtgaagggtttcccacatgctttacattcatagaatttttctccatcttgagtttgcatgtgtacaaaaagggctgtagaatgagaaaaggtttcgtcatactccttatgagtatatggtctctctccaccataaattcttacacattctctgaggtgtgaggaggaaggtaagcctttttcacagtcactgcatttatatggtttctcttgagtgtgagttttcttgcaaacaagatgtagattttggctagttttcttgcaaacaagatgtagatgttggctgaaggctgtttcacattgattacagttaggaagttcctctccgatatcagttttcttgtgtaaagtaaagatagagggttttctgaaggctttttcacattgattacactcacaggttttctttctaaagtaagttctcctgtgagtcttaaggcatgagtgttcactcaaggctttttcacattggttaaagtcaaacagttcctctccaaaatggtttctctcctgttggtgaaaattaatgatggttcatagaagttttccaaatttatttcattgagattctcccttttactctgaattcatttccaccacactggatgttttcccctgcaaaaaattctgctgaggtgctgaccatttggtattaatatgactctcccaatctactgcaactagattcttatagttctccagcatcacatctctgtat

SEQ ID NO: 68890 - DNA, 2784 bp, Homo sapiens
tgggtccccttccactcaagagttttattccaatatattgaacctggcctggagcttagggctttatagagtgggaggggggcagtcttccaaaagatgcggactcttgccacatggaatggtggagtacggaagggtggaaagggtttggtaggtaaaccctgaagatgcttctaacacacgtgctgttctcccatctcacgtatgacgactctcccacaggtaaccaaaaccacatttctctctgcttagggaattcaagatcatatctaacttcgaattccaggggtaatgacgcggcttctattctccaaagtccagtgtcattagggataatctccctctttcagttttatcacaattccattttgaaattctacaacctgtagattaactggtaaaattaaccatattcaaccaaaattgtataacccagcaagaatggaagaatgggtaaagtctacagtccatttctagaactggtcatgagaactcatgtttatgatgatggacttttgatctggtggagggacccaaaccttcagttctgaagctcattagtggtcctacctgtgtgacaggcatttactattggactggcagtcccaggacaaactccaggaatccccccatgtccatctctactcctgccctcttttacgtagcagcaatcatattttcccttgatagggttcatcattctagatactccgatgacttctttataatgagcctgaagtggcctggtggctgcctcagcttccagttcagttgaatagctactacgtctttgaggatgtgctccttgctgggggactaaactctccacgccagcccagtcccaaacctaaacctcgggtatgagaaaagcattgagatctagcaatagcagggccatgtccacactgcgtcctatccctgaaggagaaacagcgccaggtatggttgccggctccaagcgcatgctgcctcctgcaggcctgacccagcctctcggggtgttgtttctggtgccatagttgaattttcaacaaaccatttcaccaccctctcaagacagctgctgctggtttgtgggttcctgacaagatgagtgaatgcctgcccatcaacccgttactcttcttttagctgtaaagtgaattctctggttgggtgcagtatgtgaggaggtcacatgatgtttatggcatttgagaattccatggatattgatggcaggagaggcatgatgggttagaaaagcaaatccaaatccagaacaagggcccaaaagggccaagacaaattactgcccctctcagagccacaggtgtagacaggtgaaaacactggacagtgagtgagctacccacacacgacccactggtgccttcagagccttagcctggagcgacagtgtaccgttgataatggaacgcactggccatgccagactttatggctaggcggtcagataacactacgaggggcagcatggccaccaagtgtgccagggccaagtgttcaggctctcccagagcccagtggtgagccagaagggcattttgtacaaggataatggttactttttggccagagcatcacttggctccaaatcctgggttcccgtatcatattttcttgtcaggacttaccgcaagctatgtatggctccgcggtatgccacccatggaaagacacctcatgcaccattgacctgccaggtcacgtggcctgatggcagcgtcggctgcacaaaagactttcccagctgcaatgccttcgcctgctctaggcccaccccaaagctggcagtcttctaggtcagttggtaaatgggttagaacaagatgccccaaagtggcataaattgcatggaattaggccttagtggcgagggattcgacatacagtcatttgtcctacattgtgaaggaaacattctgacctcaaacagatccctcaaccccagaactttatagaaggggcagaccttggcattttcacatgatttatctcccactctgattcacatatgtttgaccaaggcactgggcagctgccaatttcccgtcccttctgtagtcccagatgaatggatacagacctctttggggaaggctgcaaggaaggttcacaacatgcatctaagtgttaaaataagtttttccttcaaaaatacatttgacttcctctccatttaaggtctggaaatcaagtgggagatcttgactttaccttggcacttgagacagaactgttggcccagaagtctttagttaaggtcattactaggccatatcttaggggcgtctggcctttttcattcctgggacccacagctcgaggtctggtttccatgccctatcccttacgatgagcgccctattttgttccttctgtctatctctgttgctgagatcagggagcccacgttcacagcagctctttcaagcagcctcccaggcctagagaggaaaatcagcagagcctcgtgaatgtatttctcgtggcaagaagggagctcatcttctgggtcctgccagagggcagtgagggggttgatgggctgggtgcatgccagggacccaatcaagcatttttatcttctgaaatctttgaattcctgcctttcttggatgtttggtcttttgatataatttagcatgggccaacatttggtccagatttgtattagccaagccctcctaaaatagtaataacagtatctggcgatttgagcttttacgtagaatgtagaatctctggtgagtgaacatatcaataaagacaacctgaacc

SEQ ID NO: 68891 - DNA, 444 bp, Homo sapiens
ctcacgcgttcgggtatggaggagcatcacagctgttacagtgacccagagcctcccgagtccccttaagctggatgtgcacaccaacacccaggctgtatgcaccccggagaaattgcagatcaagaccctaaacaagtttgcccccttcactgagaaggtacccttcctggagcagcagaacaagatactggagaccaagtggatccttttgcagcagcaaaaagtagcttggagcaacatggacagcatgtttgagagctacatcaacaacctaaagcagcaactggacacactgagccaggagcagctgaagctggaggcagaacttggcaacatggagagaccagtggaggactatcagaagtgtgaagtttaaataaccaagcctacagagatggagaatgaatttgtcctcatcaagaaagatatgaatgtagcttc

SEQ ID NO: 68892 - DNA, 775 bp, Homo sapiens
ggcgctgaaactgcacaagctgatagctcacagcagtgcgtggtgcctcttcagctggggtgctcacccgcggggagacgtggctttgtgcgcttggcgaaccccacgccagggcgtagcggaagggtgtggaccggcactgaagcccgcggaggcacccgtgcgtgtgccagggcatgaagatttcccagggggcgacgttggagctgggcggggagcgaacaggagggacagggagggctgaggccccagagctgaccctgctgagggccctcgctggcggccttgaagctgcgcccagatccttggagaaggtgcggaacttgggcctttttcctgaactgtgcttcgcaagatgggccggcccggcgctggctgcggcttccgcagggcagggcagcacttgacatggtgagggctggttcagggaggagctgacggggacaccagccgggtgccttcacctccgccccatcctttctccactgctgtcagggctgcctggagcctgcagccgggatctctgtgctgcctgctgcgtgagaagccagggcacaggcctcggtgactttgaaccagacagtgacacatcggacagctgcgcgcgggagaggaaccacagtgcctgagggacacagcgctccctgggccgctttcacaagagcagcaggagcgaccaggcttccaggcggacgtttcccttgcatcggggtgtggggagaatcagcttccgcaggtgcccaccgccggctccagcaggggcactggggcccgt

SEQ ID NO: 68893 - DNA, 691 bp, Homo sapiens
cgggcttcctttcttgaaagtggtgaaggtacagcatatagctgtatggaagaaacagtaatcggatggctaccttctacattttgtattaggaaacaaagtccattgtaagagtccatgttgatcttggaaatagaaggattgaaaaaagctaaatttccacaaagaacaagaacttgaccatctcctttttgatctgaagactaggggacaatggatatcatagagacagcaaaacttgaagaacatttggaaaatcaacccagtgatcctacgaacacttatgcaagacccgctgaacctgttgaagaagaaaacaaaaatggcaatggtaaacccaagagcttatccagtgggctgcgaaaaggcaccaaaaagtacccggactatatccaaattgctatgcccactgaatcaaggaacaaatttccactagagtggtggaaaacgggcattgccttcatatatgcagttttcaacctcgtcttgacaaccgtcatgatcacagttgtacatgagagggtccctcccaaggagcttagccctccactcccagacaagttttttgattacattgatagggagaaatgggcattttctgtatcagaaataaatgggattatattagttggattatggatcacccagtggctgtttctgagatacaagtcaatgtgggacgcagattctg

SEQ ID NO: 68894 - DNA, 670 bp, Homo sapiens
gtcgacccacgcgtccgcccacgcgtccgacggcacctatcgtcaccactccagtgacaacaagaggtggaggaagaagatcatagagaagcagccgcagagccccaaagcccctgcccctcagccgccccccatcctcaaagtcttcaaccggcctatcctctttgacatcgtgtcccggggctccactgctgacctggacgggctgctcccattcttgctgacccacaagaaacgcctaactgatgaggagtttcgagagccatctacggtgaagacctgcctgcccaaggccttgctgaacctgagcaatggccgcaacgacaccatccctgtgctgctggacatcgcggagcgcaccggcaacatgcgggagttcattaactcgcccttccgtgacatctactatcgaggtggggccccgggctgggcaggggtgccacgggggctgatggagacgctgtcctttgcttgtctgactcctgagacttttgatctgggcctaagtgccagcatgtacccaggacctgacaaatggatggatggatggatggatggatggatgcatggatgcatggatagatcgatggatgaaggaacggtaactaccccttccaactttgtttcgagtttcagaatagaagattccactgggtgcggtggcttctac

SEQ ID NO: 68895 - DNA, 522 bp, Homo sapiens
cccacgcgtccgcggacgcgtgggtttagggatttcccagacatctttgttgttggtttctaatttaattccattatggttagggaacatactcgttatgatgaattaaaaaaaaatgtagaggtttgtatatggcctgaaacattgtttgtttaggtcaatgttcagtttgtaataggaaagatgtgttctgctgcctttaggtaaagtgtttcataaataataattaggtcaagttggttgatcgtgttaaggtcttccctatccttgctgatttcctgtctgcttgttctagtgattactgagaaaggagtgttgaagtctgcaatgattgttatgggtttgttctctttctccttaaaattctgtctgtttatgcttcctgtattttgaggcactgttattagatgcagaaacatttacagttttgtcctcttgattatttgacccctttatcattctgaaataacctttatttctgggaataatcattatattaaaaaccattatttggccagacat

SEQ ID NO: 68896 - DNA, 1629 bp, Homo sapiens
accgggttagagagttttcagaccttactgcccattttttattccatagtggagagaaaccttatgaatgtaaagaatgtggcaaagtcttcaggtacaagtcttctctaaccagtcatcatagaattcatactggagagaagccttacaaatgtaacagatgtggcaaggtcttcagtcgcagttcaaacctggtatgccatcagaaaattcatacaggagaaaagccttacaaatgtaatcaatgtggcaaggtctttaatcaagcatcataccttacaagacatcaaataattcatactggagagaggccttacagatgtagtaaatgtggcaaagcatttcgagggtgttcaggccttactgcccatcttgcaatccatactgaaaagaaatctcatgagtgtaaagaatgtggcaagatcttcactcagaagtcttccctcaccaatcaccatagaattcacattggagagaaaccttacaaatgcaccctgtgcagtaaggtcttcagtcacaattctgaccttgcacagcatcagagagttcattcatgagagtccctacaaactgtgtatggcaaaaccatcatcatgagttctagcattaatcaacatcagtgagtccatactaagtggaaatcatataaatgaaatgtatgtgacacaggctttatcaaggcctgccaaatcactggacatcaccacatcactgtggaggatgaaagcacacagatgaattgtgtgtacttgggctattattcaaggaccattgctatagaacacgataggatttacacaagaagtaactctgtctctggttctctgatactaatctatgatattgcatgatgcagaataatgctaagtcaaaatatgttgaatctcatgacctgatgtatatcaaaggtgcaacggcttgtaaatgaccagttttattcaggctataaagcattcaattatttggggcttatagaaaaggctactttactctttgtgacttcgaaatcttttcatgtgccttccatacaggccattcactgtggtccctgggaaagaatcagtaggatgacagggctgacttcattagctgaggattatttctatccaatttcctgatgaaggacattgccttttgagattaaatattgtctgatttagagagcatggaggtgggcagagtaacataaaactgatgaccgtcatcatactgttgcagttagcacactttctcctgacataagtgcacagagcttcagtgtccaccaactgaccatgaaatagagtatgctgtaatcttaaggcataggttattagtgggaagagagtaataggttgctagtgtctgattatatggtagaaataatgcaaggaaaaaggtagccaccttctccattgaacagcagtacctgctgtttagcaaagactgatgagaagtagacttttttttttttggaaataaagtctaattttgttgcccaggctgaagggaaggggggggtttttggttaatgtgcccctccgcctcctgggctaaagcagcctttttgccttaccctcctaagaagctgaaactacaaacgggcccccccacccccagttaatttttgtttttttagaaaagacgggg

SEQ ID NO: 68897 - DNA, 732 bp, Homo sapiens
gtaaataaaatagagaatagaaacacgatagagaatatcagtgataccttaagatggttctttgtaaagggcaacaaaatttacaaacctttatagctaaattgattaagaaaaaaagaaagactcaaactattaagatcagaaatggaagtgggatattattactgattttacagaaaccaaaaggattataagaatactatgaacatttgtacaccaacaagttggataacttagatgaaataaacacatctcttaaaaaagccaaactaccaaaactgacacaagtagaaatagacaatttgaatagacttataagtgaagaaattagatttaatctcttgacccagttatctgtggatttttagtccccagatagcttttatgaatactgctcactgcttttcctgccctcattccatgttatgtgagatagagacaagcaagtccatccttcaggtatcctccagccagcttagaacggacatatacaataatttgcaaataaaactatgttccctccagttccataaagggaattgggaactaggcttctgctgctcaagaccaacagtgctgctgtacttaggagcagatgaaagggtgaatacaaactccaaaaaacgtttctactgttttgaacatgaattctaggtgaacaggtttcattttctttcattactataaagatgtcactccatagtcttctgcctttcatagtctaataagaag

SEQ ID NO: 68898 - DNA, 530 bp, Homo sapiens
  misc_feature (1)...(530): n = a,t,c or g
tagtccgtgtggtggaattcgaaggaaagtggtgtggaccccaaacaagtggcaagatggagttaaacgaggagctgcgtggatttcacagacatcaggcaacactgggtcagtctctctcactgccatacacgtgtggacacacacatagacacatgcacactcggatccaggcacgcaggcacagcacataccacagacacatgtacactcaggcaccactggcagacccacattcaccaacagaaattatgattaatctgcccatacatagacacagacacggacacacacatgtagtacacacacgtgtactcacagaggcgcacagacccactgtgctccgggaagccaacccccacacattcacagacccattcatacaaacactgacatacttggaaatgtcaacgtgttcacccactcaggacccgtcacacactgctagatngccgtggacactttgattccctcagccagatggacacactcacatgttatcacacaaactcaaaagccaggcagtcaca

SEQ ID NO: 68899 - DNA, 775 bp, Homo sapiens
tggtggaattcgattaatacagaaactgacatggcgatcaagacaacaggatcgagaaaactgtgctatgaaaggcaagcataaagatgaatgccacaactttatcaaagtatttgttccaagaaacgatgagatggtttttgtttgtggtaccaatgcattcaatcccatgtgtagatactacagggtaagtatattttatgtgatatgcttcttttgatcaacttttctcccttcactgatatgctgttagagttgaaatctttctgctttccagtaatttgttttatctctagtgcaatgaaagaataaagacagaattcttcaaatggaattttaatacaaataaaatagtattgccttcaaacgggcacgttgaatagatatgacactggctatttacttttcttttgtagttgagtaccttataatatgatggggaagaaattagtggcctggcaagatgcccatttgatgccagacaaaccaatggtgccctctttgctgatgggaagctgtattctgccacagtggctgacttcttggccagcgatgccgttatttatcgaagcatgggtgatggatctgcccttcgcacaataaaatatgattccaaatggataaaagagcccactttctttatgccataaaaatggaactatgtctatttttcttttcgagaaatcgtggcaacataataattaggcaggctgtggattcccggtggcccgatatgaaaaacaactggttggtcccacggtctgagaacattgat

SEQ ID NO: 68900 - DNA, 1692 bp, Homo sapiens
ttttttttttttaaataaagcgtttattgattagtagaagcatgaacagtgtgcataatattttcaatacaatatcagggagggatgatgggaacccctcaaaaggcactagaggcgcagatcttcgggacaagagggaagagatgcgccagagaccagggctggggcagctgggggtccctgagtgccaggcgccaccacacgtcctgtgggtcaaggcccctcctctggggagcaggtctacggcacggaggatgcagggctgggaggggaccccacctcggggacccaaaaggagtccatttcttgccctgccccccgcaaagcagcatggggagggggccctgggggttccttggggtggggggtttcccagggcctgggccccatccctggcttgacccttgtcccagggaacaagaagctgaggagggacgacagccaggcccagagtgactcacaaggacatccaaagaagggactggattttcagagggaggtgacttggtgactgagaggcagcagaggccaaagcctgaccccagaccctcagggagggcccacccaacctgtacccctcaggagccccgtccggctccccaggcaaccactgaggacctcggggtggcctgtagaagacagaacccagccccattacaccccttgctgccgctccatccccaaccaccagagggacagggaccagagggagacctgtgggccaggcgggcaggagggaggcaggctggggccgggagaaggggatacacaggcccataaaacctcaggctccccataaccctcactcagccatctcactcactcactcactcccagcatcccccaggatgggggtcccctccttcactcaggacacttcccctccgcagacctgcacgttctgggcctttctcatttcaccccaggcctgcccaccccatgaggcaccccctaaatctcatctctccacccagcacccccagcctggctccagcctgaagaccccctccttccccttccctccagaacagtggggaaagcgaggctcggtccacccctaactgcggaaggagcagggccaggagggcagcagtgctccctctcccggtcctggcccagccagctcctgggtgagtgggcgggaacccactgggctcacaccagctttcacctccctctctccaggaaggatggcagcacccatgaggggatggaggccacagaaggacaggaagggaggggctttccagccccccagcagtgtccagcccttggcacaagcaggaaaaccccaaaaccagcccctgcatctgagatcatcccacagaagagaaaacagggagcaagaaagtgttgactgaacccaataaagtgactcaggtgggcccgctccctggcggtgccacacagccctgccccgcctccacccacaaggcacagaccagggtgccctccccagagctgagcctgcctgggtccggaagggaacggcctgtgccatgtgcagcagtcagggacccactggcctagaactcagtctgcacccctgcactgtcctcggtggtggtgtggagggcggggtggctgctggggctggacacctgctctccagtctccagatcgataagcttggggggaacaaggtccacagcctttccaggcaggaggtgggcagaatttccgacgctctat

SEQ ID NO: 68901 - DNA, 2017 bp, Homo sapiens
  misc_feature (1)...(2017): n = a,t,c or g
attcgtcattgcaaaatccactccttagcacttctaaaagtaccaggaactatgcaaaagctagtagaaatgtagaagaatctgaaaaagggtctttgaaaattgagtttcaagtgcacgcactagaagatgaaagtgatggagagacatctgacacggaaaagcatggaacaaaaattggaaccctaggttctgcaactacagaattgttatctggcagcactcgaactgctgatgagaaagaggaggatgaccgcatcctgaagacttctagagagctatccacttccccatgtaatcccatagttcgccagaaagaatctgaattacaaatgacatctgcagccagtccacaccctggcttattgctagacttgaaaacctctctagaagatgcacaggttgatgactctattaaatctcatgtatcttatgaaacagaaggctttgagagtgctagcttggatgcagagcttcaaaaaagtgacatcagtcagccctcgggccctctcctgcctgaactaagtaagcttggctttcctgcctcacttcagagggatctaacccggcacattagtttgaagagcaaaactggagtacaccttcctgagccaaacctcaatagtgcccgccgcattcgcaatattagcggtcaccgaaagagtgagacagagaaggagtctgggctcaagccaaccctacggcagattctaaatgcatctcggagaaatgtcaactgggaacaggtcattcagcaagtaaccaagaaaaagcaagagctgggcaaaggcttacccaggtttggcatagaaatggtaccccttgttcaaaatgaacaagaagccttagatttggatggggaacctgatctgtccagtctagaaggattccagtgggaaggtgtttccatttcctcgtcccctggcttggcaagaaagcgaagcctttctgagagcagcgtgatcatggacagagctccttctgtgtatagcttcttcagtgaggaaggtacaggcaaagaaaatgagccccagcagatggtttcacctagtaactcattgagggctggacagagccagaaagcaaccatgcacctcaaacaagaagtgacacctcgggctgcctccctccgaacaggtgaaagggctgaaaatgttgctacccaaaggcgacatagtgcacaattatcctctgaccatataatacctttgatgcatttggcaaaagacttgaacagccaggagaggtctataccaccgtcagagaatcagaattcccaggagagtaatggagagggaaactgtctgtcatcaagcgcatcctcagcccttgcgatctccagtttagcggatgcagccacagatagtagctgtacctctggtgctgaacaaaatgatggccaaagtattagaaagaaacgaagagccactggagatggatcttctcctgaactcccaagtcttgagagaaaaaataaaagaaggaaaattaaagggaaaaaangaacgttctcaggttgaccagctgctgaatatttctttaagggaggaagaacttagtaagtcattgcagtgcatggataacaatcttctgcaagcccgtgcagcccttcagacagcttatgtggaagttcagaggctacttatgctcaagcagcagataactatggagatgagtgcactgaggacccatagaatacagattctacagggattacaagaaacatatgaaccttctgagcacccaggtttggcatagaaatggtaccccttgttcaaaatgaacaagaagccttagatttggatggggaacctgatctgtccagtctagaaggattccagtgggaaggtgtttccatttcctcgtcccctggcttggcaagaaagcgaagcctttctgagagcagcgtgatcatggacagagctccttctgtgtatagcttcttcagtgaggaatgtacaggcaaagaaaatgagccccagcagatggtttcacctagtaactcattgagggctgg

SEQ ID NO: 68902 - DNA, 787 bp, Homo sapiens
atacaaggctcaattccgaactgttgaaggaagaagaaagcaacaaaagactggaagctgaaattgaatcatcagtctagactgactgctgctataagtaagcacagtgaaagtgtgaaaacagaaagaaacgtaaaacttgcattagagtgaacacaagatgtttccgtacaagtaaaaatgagttctgatatttccgaagtagaagataagaatgagtttcttactgaacaactttctaaaaagcaaattaaattcaataccttaaaagataagttccgtaagaaaagagatactctcagaaaaaagtcattggctttagaaactctccaaacgacctaagccaaacacagcagcaaataaaggaaatgaaagagatgtatgaaaatgcagaagctaaagtgaataattccactggaaagtggaactgtgtagaagagaggatatgtcacctccaacgtgaaaatgcgtggcttgtacagcaactagatgacgttcatcagaaagaggatcataaagagatagtaactaatatccaaagaggctttattgagagtggaaagaaagacctcgtgctagaagagaaaagtaagaagctaatgaatgaatgtgatcatttaaaagaaagtctctttcagtatgagagagagaaaacagaaggagtagtggttgtgagacaacttcaacaagaagtggctgacagcgtaaaaaaattaacgacgttagagtctccactggaaggtatatcacgttgtcatattaatttggttgagacacaggcctcaaa

SEQ ID NO: 68903 - DNA, 1438 bp, Homo sapiens
  misc_feature (1)...(1438): n = a,t,c or g
cctgccaccaggtgtccttgccacaccttgttccccaaggacacccaccaaacctgtgccctggtgcgggggatagaactgacctttcagaggctggaggcccggggcacaggcagccaaggccgcatccttttgggaagaactggagtgaaggaagccacttcagaggacgtagtgggtccagctgacttaggagtgggtcagcgccgggtggagaggagggaggctagttccctggtggggtagcctggcaacattcccattccaccgcacctggccagctgccatcttggcagagccagggggagatgcaccagggagtttggagtcaggaaggcagagttgtgtgggctgaagtctgcgggaaccccagggtgacacaggcaaggggtagaagtcagagtggggaccaaaccatagactggggccctgggttctgcagaggtgtggatggggcaggtggcaggtgctccagtgggggccccaggtgaggccctgatggccctcctggggcaataaagacatcatgggaagggggctttgtggtttgcctctgctctcgtcgggcgatctggctttagccttcaggaggaggtaagcagaggagatcagtgcctgtttctgaccccaggagggccttgttgggccccaacctagagccttccggcttcaggtcccaagagaagtccccccctaactgtgacccccctaactgtgatcaggggtctgccattgcccgcttttctctgcctgatctggggactcaggagaggccacggcagccacagcctaggggtggttcagtccctggcccacagtctggtcagttgagtccttctgggaaccggggctatgaaaactttcgtctttggggaccggtacccatggaagggaaaactttccttgaggggggtgagggaccaaagaatcaagatccttttcaggcctgatagcccaagatgatgagaacttttagataaggctgtggggagagtccctggccttttgagcatcctgcttgggcacacggggaataacctttctccagcttccagtgtgaactgagaaagagaaagggaaaccctgtctttggagaagctgggatcttcccagcaccagaaacttctgcaggcccctgcctggcccacagctaacctttgggtgggactggagtttcctgaacagggaacaagggagccttccgcagagctctgatgggcaggcctccgagggcctgtgctgtgtgctgttaggatagcttggtgttgtctataccccattagtaagttttgtctgagtgtgtcctcgctgttcattgtctaatttggtaacatttattttggtcctgaccccttctgctgctgctgggtttaagcttcagtgcaggtggaatgacattcaaataaagaaanactttctatcacccaaaaaaaaaaaa

SEQ ID NO: 68904 - DNA, 839 bp, Homo sapiens
tgtcatttccgggtcgacccacccgtccgtgaagatagtctcttagattatattctgaaatccttataaatgtaaatttcatatttaggcctttaattcacctagatttggttttttgcatatggtgtgaggtaaggattcactttcatttttttctctccatagggttacacacctgtcctatcattgtttgtaatctaactttctgcgcccatctgcaatgccacctctgtcatatgtccacatatgacatatgtagatctgttgttggattctttcctctgttccattagtctgtctgttcttgtgccaatatcaagctgtcttcattattatcaattatgtattgagatctgataaagtaagtcttttccaccttatttttcttctttgagagtgtcttgactattctggctctttgtattttcatgtaaggtttttctcccatataagttttaaaatcagcttgtcaattccaacaacaatgatgcacttgatagtttgggaatttattatagctatcaatcagttttgggaaaattgacgtctttacaatattgagttttctgattcatgaacatggtttacctctctttccatttgggtcttctttaaggtttaccaataggattttatatttttgtccattgtggtcttgcttatcttaagtttgatttgtaaatattttatgtttcttttagtctattgtaaattgtgtatttttaatttcattttttttttttgttaatagcatataaaacacaccttgtcttttaactggagcattttgtccaaagagcatttaatgtaattaaatctaacatcaagtattgtgctac

SEQ ID NO: 68905 - DNA, 378 bp, Homo sapiens
attctttgtaagatacaaccctcctagcttaaatcaggaagaattagataccccgaacactccaataacaagtagtgagattgaaatggtaatttaaaaattaccaacaaagaaatgtccaggaccagagagattcacagcagaattctatcagacattcaaagaagaattggtaccaatcctattgacacaattccagatagagaaagagggaaccctccctaaatcattctatgaagccggcatcaccctaatatcaagaccagaaaaggacataaccaaaaaagaaactgaagaccaatatctctaatgaacacagatgccaaaatccttaacaaaatactagttatccaaatccaacagcatatcaaaaagcca

SEQ ID NO: 68906 - DNA, 520 bp, Homo sapiens
tttctttcattgtatctttgaattttattgctctgtattttttacttcaaaaacacctactatatgcatttttttctctcgtttccttttttttccaagaaatgtttttgtccttttgattttttcactgaccattaccattatttatataccatgtacctggagagtttccaatgtttctctttggtctgagaagatacttgctatgattttcactttttaaatgctcttttgagatttgttttgtggcctaaaatgtggtctatcctggagaatgttctgtgagctgatgagaagaatgcacgttctgcagttggtgggtgaaatgttctgtaattacctgtgaggtccctttgacttctcttggagtcagtctggtctgttacttttctgcctagagggtgtgtctgttgctgaaagtgggtgttggagtccccacctattattgtctgtctctgtctgttgctcgaataactcttactttaataactggggctcctgtgtcaggtgtgtttacatt

SEQ ID NO: 68907 - DNA, 716 bp, Homo sapiens
cccacgcgtccgggccaggagtattagaactgagtgtggtgtcaggcctccctcctcccaggagggctgaggagtcagagcccactccttccctgcgcctgcctcgggctgcttcgtgggcagtgactggaggtgcaggccgggctgctggtcactactgtggtgggaggagatgggtgcagggggccctggggagggctggctcagggtctgaaggcagagcaccgggctgacaggctccctgctgtgggagtcagaggtggctttgaggggtccggcctgaacaaagggaggatggcgatcccagcaagtgagccatccccgaagggggcagcacttaaacatgtggggttggtaaggccctgaggggcatgtgggagcccaaggctgtgccatgggacagaccacattcacagactaggaggaggggcccaggcgtggccatctgcatggggaactgccggaggagcgtgagaggaagctgagacctgcccccaggtggcgcccgggtccggcaccctaacaagggcactgtggaggctgggcacggaaggagctcttgctgataggaagcagagaagccaggcggccaggacctcaagaggggctggggcagggcgagaaggggctctccagaggtgcgaggagagcgtacagaccccttggaggcatctggccaggacgagccaaggggcccgagtcccatggggcagagg

SEQ ID NO: 68908 - DNA, 678 bp, Homo sapiens
  misc_feature (1)...(678): n = a,t,c or g
tgctccgtgacctggaaggatcatattatctccgacaggaaagggatgggcttttgtttggtccatatgaaagtcaagagaaaatgaaagttcaggactcctgggtcaccaatggagttcctccaggttttggaaaggaactctttgagtctgatctagatcgaatcatggaacacatcaaagctgccatggaaatggttcctgtcttgaaaaaggctgacatcatcaatgttgtcaatggtcctatcacgtattctcctgacattctgcctatggtggggccccatcagggggtcagaaactactgggtggctataggctttggatatggcataatccacgctggtggggtagggaaatatctcagtgactggatcctgcatggagaacctccttttgatctgatagaattggatcctaatcgctatggcaaatggacaacaacccagtacactgaggccaaagcaagagaatcatatggattcaacaatattgttggttatcctaaagaagaacggtttgctgggaggccgactcaacgagtcagtgggctctatcaaaggctggagtctaagtgttccatggggttccatgctggctgggagcagccgcactggttatcaaaccaggccaggcacgaatcgtgaccggaatcgtgacggtgnnnnngacggtttc

SEQ ID NO: 68909 - DNA, 702 bp, Homo sapiens
  misc_feature (1)...(702): n = a,t,c or g
caggaggcagctccgccagagacgcgggtcgtgcttcgggaaaccggggggcggggggaggggaagagcgcagaaaagaaaacccaccaaggcggggactggcctgagcggggaggggcggcgaggccggagcccctctctgttgggcggactccccatggccagaggctgagctccactcccgccggccgctccctaggggaaggggaaggagaggggagagcagccagcgcccagggtccctctgtgctttttcgctttcctaagctcctgtcgctcctctttgtcccctcagtttatgtcctcctgtgctcacctccctgacctctgtgaccttgcactcccctggcctgaagctgcctctctgcgcgctttctactgggctcgtctctttccggagccccagcgtctcctgcccaaattcaccgcggaaagggcccggggcggaggtgcgaccgggcgtcggcagcgcagacctcttggccttctctcacaggtcggtgcgctcgctctccgcgttccccgcccgactgccgtgcagtccatggctagacgcgccggacaggactgatggcgggaccgcgctgcccgagaaagggacggaccaatacgtgtgtttgctccgcgaaccctcttgaagctgttcagaagccgcttgccgcggggcccactaggcggggcggnggttgggacccagcggga

SEQ ID NO: 68910 - DNA, 1465 bp, Homo sapiens
caagctgacgcctcaggagaagctgaaactgaggatgcagaaggcgctgaacaggcagaggccatcaagcatgccaaggctcttgaggaggagaaggccatgtactcgggacgccgctctcgacgccagcggagagagtttcgggagaagcggctgaggggtcgcaagatcagcccacccagctatgccggccgagacagccccacctatgacccctataagcggtcaccctcggagtccagctcagagtcccgctcccgctcccgctccccgaccccgggccgcgaggagaagatcacgttcatcaccagttttgggggcagcgatgaggaggcagccgcagccgctgctgccgcagcagcatcaggagtcaccacagggaagccccccgcacctccccagcctggcggtcccgccccgggacgtaatgccagcgcccggtcggtaacgctcacgccgcccgccctacgccccggtcaccatggggggtacccggagcagaggggggccgcggctcatgcctgcgctgaccggccctccgtgccccgcctgcagccgccgctcctcctcctcctcctcctcctcttctgcctcgaggacctccagctaccgctccagctctcgctccagctcccgctctcgccgaggtgggggctactaccgctccggccgccacgcccgctcccggtcccgctcctgggcccgctcccgctcccgctcccggcgctattcccgggcccgtagccgcggccggcggcactcaggtgggggctcccgagacggacaccggtactcccgctcgcccgcccggcgaggaggttacgggccccggcgcagaaacaggtgtgtgtggctgggcgtggaggtgggaggggctgggggggcgcggtctccgatcctggggagaaggtgctcagagggaggaaacctggccgtccagctcagagaacaccccatctaaggggacaggcacaggccactgctcttccgcaggaagcccttggttggaaagggcaaggcatgggtgtttgcgtgcgcgttctggtggcagtggaggtggatcccagccgctgttttccacgacagggtgtggagaggagactgtgcatctctctctcctcaggagactgtttttgctgtcaggggttccaggtggaggggagtagaaagcgcatggacgctccagggttttctgtagcttgaagggacgggtccgggccttgagggctgggaaaccccttgcggagggggaggggcgcgttcctgtgtggccaggagcggatggggaagcgaagcgggtggaaaaaatcaagacagctctttggcctggcgtggtggctcacacctgtaatcccagcactttgggaggccgaggcaggcggatctcctgagctcaggagttcgagaccaccctgggcaacatggtgaaaccccgtctctactgaaaaaaaaattagctgggtgt

SEQ ID NO: 68911 - DNA, 1297 bp, Homo sapiens
ttttttttttttaagggatagagtctatgttgcacagtctggtcacaaactcctggcctcaagtgatgtttcctcctcagcctcctaaagtattgagattacagctgtaagccactatacctggcctcaaaattatattaatgtctattagttaacttgaattgtttgtgcttgtcttgttggttttaaccctacttatatacaagaattcaaaagtattttcaagccctatcatttagttgtaaaatatacccaactcacatttatagactgccaactaacttgaatgtttgtacaggcatttctgctgtgatgccatgtgtacctaaataaaactcacactctataaaatcacacactaaattaaattaacagggctatagaaaaaaagagttataggcttacctctcaaaatctatagacttttgtgactagaaagcactaaaaaacagcaataatatcatataaacagtattactgttaaatctctctgctagcatcatagtccgtggatgctttgcagccttaagccctgggacctctgctgcttcctttaagatgcaggtacttgattcatttgcttctcaaagagatcagatgcatcagaattaaaaaggtatttcaggatgggaggaagggggtaagagatgtctctgcagcttcttcaactgcactctgattcctcagatagcttactataatggagtaaatatttttgaagccattaaactagccactctaaaggaagcggtttttaagattttcaactttgttataaggttttatattgctaagggttctctttgattatgagaaaatttacccctggtagcttcaaaataataccttgttgggaaaaactgcattccataaatacacactgtagaacagattgtacctttcttggcatcttgcatttgtttcatgatctcctctctttctgcttgttcagtggctgttgtgacacggaatgatccttctcttgtaaaagtggtccgactagcatcaaaagtagcagtcactccacattccttctcccgcttctgcttgcgctctaaacaggctgcaaaagcacagcctactgcatggctcaacctttcaccctgtaagagcagattttaaaagcttttcagaattacactactaacaattacatacaaataagtcttttgttttgttttgtttttgagacagagtcttactgttacccaggctggagtgcagtggcgcagtctctgctcactgcaacctccgcctcagggctcaaatacttctcgtgcctcagcctcctgagtag

SEQ ID NO: 68912 - DNA, 1328 bp, Homo sapiens
acactattatgcaacagacagatttccatttgaaagggttagaatattgctgtattacacatattcatatgtcccttcttttccttcctatacaaagtgttgttttgaatttttaacaatttatttttcttcatctttagagagtaaaacttgtctcggcacagagtcaagtaaagaaagccaacatacagtggagcccctggggagcagtccctgctgtcatcagatggacgtgcaaacagattccccaagcctttcggtaactgcaggaaaggaccacatggaggagctgctctgcagcgctgaagccacgttagcgctccacacccagtcctccgagacagcagggagcccgtctgggccagactcttctgaggatgcttgtgaggatgacagtcgcttgcagctggctcaaacagaggcctgccaggatgtggccagaatagagggcattgctgaagaccctaaggtgtttctttccagcaagtcaaagacagagccgttgatttcaccaggctgtgaccgtatacctcctgcattgatttctgagggtaaatattcacaggctcagaggaaagaactccgtttgccacttcgggatgcttctgaggcgttgcccacagaccaacttgagaacaatgaattaaatgagctgcagcagcctgatcttacagacagtgatggaaaatcaccacaggcgcaggctgactcagacggttctgagaatgtgctctgtggaaataatcaaatatctgacttaggcatactgcttccagaggtgtgtatggccccagaggaaaagggagataaagacgaccaactcaacaaagaaacagaagactatttgaacagccttttaaaaggatgtttaaaagatactgaagattccctttcctatgaagataaccaagacgacgactccgatctccttcaagatctctctcctgaagaagcatcctatagtctccaggagaatctgccttctgatgagagctgtctttctcttgatgatcttgccaaaaggatagagattgcagaggttgttcctactgaaggattggtctccatattaaagaagaggaatgatactgtaggagatcatcctgcccaaatgcaacacaaaccatctaagcgaagagtgagattccaagaaatagacgatagcttggatcaaggtaaaccgcttggcactgtggctagcaggatagatgctcagtgtttgctgaaaggatgagtttgtgaatgatgtgacgtttactaacaggatttgtaaaagactatgtccgccaggcacggtggctcacacctgtaatcccagcactttagga

SEQ ID NO: 68913 - DNA, 444 bp, Homo sapiens
ctggtagaacatatgcatgtaaggttcctccatgttgctttggttaggtttttgtggctcgatagcgcacttcattttagcactgcatattctattgtctgaatgcaccacagtttatgcactcacctactgaaggatatcttggttgcttacaaggtttggaaattatgagtaaagctgctacaaacatctgtgcgcaggttttttgtggatagacgttttcaacttatttacgtaacgaccaaagagcacaattgctggatcatatgccaggagtcttctgagaaactaccaacctgtcttccagagtgactgtaccattttgtattcaaacgagcagggaatgagagttcctgctgctctgcatctccgtcagcatttgatgttgtcagtgttctggattttggccatcttaatagctgtacagtgggatcttgtcattgc

SEQ ID NO: 68914 - DNA, 2320 bp, Homo sapiens
gcgatccccgaattccttgtcgacccacgcgtccggtgtcctggaggagcaggcccagaatctgggcctggaggggaccttggtgtccctggcccgggttccccaggcccgagcggtgcgtgtggtgggggatggtgcctctgtggacctgctgttgctggagttgtacctggagaatgagcgccgcagtggtggggggcccctggaggacctgcaacgcctacccgggcccctgggcactgttgcctccttccagcagtggcaagtggcagaacgagtgttgcagcaggagcaccggttgcagggctcagagctgagccttgtcccccactacgacatcctggagcccgaggagctggctgagaacaccagtggaggggaccacccgtccacccaggggcctagggctaccaagcatgctctcctgaggaccggagggttggtgacggctctgcagggtgcagggactgtgacaatgggctctggcgaggaaccagggcagtcaggggcctctctgaggacaggtcccatggtgcagggtagagggattatgacaacaggctctggccaggaaccagggcagtcagggacctctctgaggacaggtcccatggggtctctgggacaggcagagcaagtcagctcgatgcccatggggtctctggaacatgaggggctggtaagcctgaggcctgtggggttgcaggaacaggaggggcccatgagcctggggcctgtggggtctgcaggcccagtggagacctctaaggggttgctggggcaggagggcctggtggaaattgccatggactcaccagagcaagaggggctggtgggtcccatggagatcaccatggggtctctggagaaggcagggcctgtgagcccaggatgtgtgaagctggcagggcaggagggcctggtggagatggtgctattgatggagccaggggcgatgcgcttcctgcagctctaccatgaggaccttcttgcgggcctgggagacgtcgctctcttgccacttgaaggaccggatatgactggctttcggctctgtggagcccaggcttcctgccaggcggctgaggagtttctgcggagcctgctgggcagcattagctgccatgtgttgtgcctggagcacccgggcagcgccaggtttctcctgggcccagaagggcagcaccttctccaggggctggaggctcagttccagtgtgtctttgggacagagcgcctggccacagccacgttggacacaggccttgaagaggtggaccctaccgaggccctcccagtgctccctggcaacgcccacaccctgtggaccccagacagtacaggtggtgaccaggaggacgtgagcctggaggaggtccgagaactgctggccaccctggagggcctagacctagacggggaggactggctgcctcgggagctggaggaggaagggcctcaggagcagccagaggaggaggtgaccccagggcatgaggaggaggagcctgtggcccccagcactgtggcacccaggtggctggaggaggaggccgctctgcagctggccctccaccggtcactggagcctcaaggtcaggtggctgagcaggaggaggctgctgccctgcggcaagccctaaccctctccctgctggagcagcccccgttggaggcagaagagcccccagatggggggactgatggcaaggcccagctggtggtgcactcggcctttgagcaggatgtggaggagctggaccgggcgctcagggctgccttggaggtccacgtccaggaggagacggtggggccctggcgccgcacactgcctgcagagctgcgtgctcgcctggagcggtgccatggtgtgagtgttgccctgcgtggtgactgcaccatcctccgtggcttcggggcccaccctgcccgtgctgcccgccacttggtggcacttctggctggcccctgggatcagagtttggcctttcccttggcagcttcaggccctaccttggcggggcagacgctgaaggggccctggaacaacctggagcgtctggcagagaacaccggggagttccaggaggtggtgcgggccttctacgacaccctggacgctgcccgcagcagcatccgcgtcgttcgtgtggagcgcgtgtcgcacccgctgctgcagcagcagtatgagctgtaccgggagcgcctgctgcagcgatgcgagcggcgcccggtggagcaggtgctgtaccacggcacgacggcaccggcagtgcctgacatctgcgcccacggcttcaaccgcagcttctgcggccgc

SEQ ID NO: 68915 - DNA, 708 bp, Homo sapiens
tgcctgcggcaccggcccttaatggccgggtcgacccacgcgtccgagaatgtggcaaagcttttaaccaatcctcatactttactatacagaaattcatactggagagaaagcctacaattgtgaagaatgtggcaaagcttttaaccttccttaacccttaactgtagataagaaaattcatactggaaagaaaccctacaaatgtgaagtctgtggcaaagcttttaactgattctcaactcttactacatgtaagagtatttatactggaaagaaaccctacaaatgtaaaaaacgtggcaatgcctttaactggtcctcacaccttgctacatataagacagtttatactttgagagaaaccctgcaaatgtgaataatgtggcaatactttaaaccaatcctcaaacctcactaaacataagataatactgaaaactttacaaacctgaatgatgtgacaataattttgacaacacctcgaactttctaacataaatcatactggtgaaaaatcctagaaatgtgaaaaatatcacaaagcctttaaatggttgtcacacttgattgtaggtaagaatccatactgaagaaaactcctggaagtgtaaaaaatgtggcaacacttttaataaatgctcaccccttattgcacaggaaagcatttatacttcagaaagattgtacaaatacaaggaatgtgga

SEQ ID NO: 68916 - DNA, 417 bp, Homo sapiens
gccagacacagtggcatgctcttctattcccagctactcaggaggctgaggctgaaaaatcacttgagcccaggagtttgaggatatcctgggcaacatggtgaaacttggcaaaaacaaaaacaaggccgggcatggtggctcacacgtgtagtcccagcactttgggaggccacggctggcggatcacgaggtcaggagatcgagaccatcctggctaacatggtgaaaccctgtctctactaaaaatacaaaaaattagccaggcgtggtggcgggtgcctgtagtcccagctactcgggaggctgaggcaggagaatggcgtgaacccaggaggcggagcttgcagtgagctgagatcgcgccactgcactccagcctgggtgacagagcgagactccatctcaaaaaaaaaa

SEQ ID NO: 68917 - DNA, 706 bp, Homo sapiens
ttttttactttcttgatgaagttaattcttcatttaggaggctcagtgttctgaaaatttgttcttttcgatgctataataaacagaattgttttcttaatttccattttagattgttcagtgttagaagaaatacaactgatttttgtgtattgactttgtatcctgctactttgcttaattggtttaataattctaacagtttttgtgtagaatctttagggtgttttacatataagatcatatcatttgtgaacaagtaattttgcttcttcctttctaatttggatgtcttttatttctttttcttgcctaattgctttgacaacaacttcaactattcagctagtggtcatgttgagtacaagtggtgaaagcagacatacttgccttcttccttatcttagaggaaaagctttcagtctttcaccactgagtatgatgttcactgtgtgtgttttgtatatggtttttcttaggttgacatagtttccttctattcccatgtgcacttgagaagaatgtgggttctgttattgttagagttctgtgtctctttggtatattgagtttggtcatctcctctatttccttacttatcatatgtctgggtggtctgcccattatggagaatgtggtattgaagtctccagctattattgtagaaccatttctttcttcaattctgtctcatttttgctacttg

SEQ ID NO: 68918 - DNA, 438 bp, Homo sapiens
caccatactattaaatttaatttgttcagcaagattgcaggacataagattaatatacaaaatcaattttgttatatatacttgtaatgaataatatgaaataaaatagaaacaataattcgttttctaatagcatgaaaaagataaaaaacttaggaataagtttaacaaaagaagtgtaaaacatataccttaaaactataaaacatcattgaaagaaactaaagaagacctaaataactggaaaaacattccatgtgcatggatcagaaaacaatattttaaaaatgacagtactcttcaaattgatctacagatttaatgcaatctctgtcaaaaatctcaaatgaatttttttaattgacaagtagatactaaaactaatatggaaattcaagggacccagaatagccatgacaatcctgaaacagaagcaca

SEQ ID NO: 68919 - DNA, 382 bp, Homo sapiens
tcgacccacgcgtccggatatgtcatttttcaatagagatagttttacttcttccattccaatccagataccttatttggtaattgcagtctagtcttgttcctgttattagtggggaagccatttggtctttcaccagtaaatatgatgttaagcaatgggtttttcatagatgtcccttatctagttgagggagtttctgttccaaggatgttgaatatttttatcatgaatgttggaatctgtcaaaaaaaatgttctgcatcaatttggatgatattgtggctttccccctttattcgattaacatggcatattacattgattgatttttgtatgttgaacccttgcattcctgggataaatcccttgatcatggtgt

SEQ ID NO: 68920 - DNA, 1172 bp, Homo sapiens
actcgtgcttggtcatgagcaggtaaaggaggcgcagggcctgcacgaccaccatcttctctcccacctggttggtcagcagctccaccagcatcttcactagcttctctctcagcgatctgtcaggacggaccagagggtggtcccgctcagtgacctcctccacagcctgagagagggcagagagccctgaaagctgcaggtttgtgtccaagctggatatctgcacagtggccacgaccgctgccacatgctgatccagggagctgcgaggaccgggaccccgcaaggctctggccatttcactggctgcctccttcatctcagtgggcagggtcatcccctcagtcaccagaagctggttaaacagctgagaatcactctgtgccatgggggtctcggtccttgtcttggtgggctcggcctctgtcttaggggcctcggcctttgctttgagggactcagtctcttcctctgagaagctggcctccgacttggactcctcttctggatctggggtacaggagtgatttcgtgaagtagacgagctgcttggttcattagacagcagcccatacttggtgtagatctgggagttgagcaggtcattgagagtgctgccctcaaatcgactactgagaacctgcagcagactctcggccatttccacggacacagagatctcacctagggccttttcacccagggtctcatccaggttcttccaaagattctggaaaattggctgctgctcacacaagtccaactttttgataaagaaaagcagctcccaccattcagcctgggtcagatatcccactctctcattcttctgaggttcgggctggaggtacggcaaagggtacagcccatccataggattccagtcccaggagggaaatgctgaggacacaggcatggcgggcatcagcacccctcaggaatggggtctatttctggacccctagggctgctcctggtcagaagtggcttcatcccagtcactaatcctctgttcagagacatgctatccatgtcccctcttaggctcacctgtgcccaacacagtagcccctgcccccttctccacagctgctgaagccttatcctcagtggcttcctcagggcccaggatctccagcatgtgccagtgcacccagtaagtgcggcct

SEQ ID NO: 68921 - DNA, 1651 bp, Homo sapiens
actaggggaggtgctcaagtgccagcagggcgtatccagtctggcctttgccctggccttcttgcagcgcatggacatgaagccgctggtggtcctggggctgccggcccctacggctccctcgggctgtctttccttctgggaggccaaggcgcagctggccaagagctgcaaggtgctggtagacgcgcttcgacacaacgccgccgctgctgtgccattttttggcggcgggtctgtgctacgcgctgccgagccggctccccatgccagctacggcggcatcgtctcggtggagacagacctgctgcagtggtgcctggagtcgggcagcatccccatcctgtgccccatcggggagacggccgcgcgccgctccgtgcttctcgactccctggaggtgaccgcgtcgctggccaaggcgctgcggcccaccaaaatcatcttcctcaataacacaggcggcctgcgcgacagcagtcataaggtcctgagtaacgtgaacctgcccgccgacctggacctggtgtgcaacgccgagtgggtgagcacaaaagaacggcagcagatgcggctcatcgtggacgtgctcagccgcctgccccaccactcctcggccgtcatcaccgccgctagcacgctgctcactgagctctttagcaacaaggggtccgggaccctgttcaagaacgccgagcgaatgctacgggtgcgcagcctggacaagctggaccagggccgtctagtggacctggtcaacgccagcttcggcaagaagctcagggacgactacctggcctcgctgcgcccgcggctgcactccatctacgtctccgaggggtacaacgccgccgccattctgaccatggagcccgtcctggggggcaccccgtacctggacaaatttgtggtgagctccagccgccagggccaaggctccggccagatgctgtgggagtgcctgcggcgggaccttcagacacttttctggcgctcccgggtcaccaaccccatcaatccctggtacttcaaacacagtgatggcagcttctccaacaagcagtggatcttcttctggtttggcctggctgatatccgggactcctatgagttggtcaaccacgccaagggactgccagactcctttcacaagccagcttctgacccaggcagctgaccctcaccatggacactacaggccctggaatggccagggtggaccaaaagccatgccagctgggcatgaccccaggcagccagccacaggctgaagggggcttgttggctgagtgatctgcagaggagaaagcagcccccagctctgccccagaggaggcgctgaagtgggacaagcacaggaaagaaggggaccagtctaggaccccaacttgactcactctaaagctacaaccaaatggccttcgattttcaacctggggattaggggaggggagggtgccttccagggctcttactcaggacttaacccttaagggtgagcttagtttctgtcctcttgtgcttatgttttgaggctcccttacccaaaataatacccctgcctgcgtgatattctaccattcattttaattcctttgggtcttgcagtttttcaggaggccttgattaaaatgcaaatacttgtctgaga

SEQ ID NO: 68922 - DNA, 419 bp, Homo sapiens
tttgttctaaaatttgaatggaagtgcaaaagacctggagtaatcaaaataactaattaaaacaaagttggagggctcacactgtctgatttctagacttaaaaagctacggttgttaaaacagtgtggtgtcagtgcaaagatagatatattaatggaacagattggggtgcagaaatagacctacacatgtatggaacattgatttttgacaaaggcataaatgcagttgtgcagaaagaaggtagttgtttcaacaattggtgctgaaactatttagtaggcagaaagataggactcagacctcataccatatttaaaaattaactcaaaatggatcacatagccaaatgtaagacctaaaattataaagttgccagaagaaaatctttgtgaccttgggttaggcaaataatttt

SEQ ID NO: 68923 - DNA, 349 bp, Homo sapiens
tttattggggcataacatgtacacagtatgtgtataccttgataaatttttacatgtatatacatatgtacgtgtatgtatgtgtgtatacatatgtacgtgtatgtatgtgtgtatacatatgtacgtgtatgtatgtgtgtatacatatgtacgtgtatgtatgtgtgtgtatacatatgtacgtgtatgtatgtgtgtatacatatgtgcgtgtatgtgtgtatacatatgtacgtgtatatgtgtgtatacatatgtacgtgtatatgtgtgtatacatatgtacgtgtatatgtgtgtgtacatatgtacgtgtatgtgtgtgtatacatatgtacgtgtgtgt

SEQ ID NO: 68924 - DNA, 432 bp, Homo sapiens
ccctccccagcctcctcccgcaagcagtacccacaggcggcccacgtgccttgggctttgggccaggccagccagggtgccctggaggatgtggccgggatgtccggcaagccccgaccgcctccctcccaccgcgtccatgggccccaccccaggcagccgccgtcctcccccagctctcaggaggggcgtcagggcggagggcactgtgcctctcgccagctcctgtgggctccagccctcggcctggtgcagattccaggagccggaggttctttatcctgagctgatgtccagggggacttgcagaggaggcccggcacggggtcctccaggggcctatccgtgttccccgtctgtctgtcggacactctggagccaggctgctgtgctgtgacgggcagtcagcagagcagtttagtccctggcccc

SEQ ID NO: 68925 - DNA, 904 bp, Homo sapiens
ttttttttttttaaagttaaatctttctatttatttcaagaaagaacaaggcaagtggacttggacattttctatgaaaatagacaaacagaaaataggaccaagtagttaatcacattcatctcaacattgaagtttcaaggcacctacaagaaggaggccaaagggcggttcgcagtgcactttggtttgtgttgttgtcgtggtggtgggtgtttgcgtgtctcggttttctggaaacccttgcctggtggtgaggttgggagcgaagcaggtgggcacgaggccaggctggtctgggccctgagaagccgggccgggtcagccatctggtcgcatggcagcaggcggtagcggggacggtcaggcccgtcactcaggcccctgagacggcttccaagaaaaagaaaggagatagtgctgcacctgggcggctgattctggaggtgaggaaggctggggggcgtgggaagtgggggtactggcacaggggccccttggacatcaggcaggacctcggtcacaggcttgggagagatcaggcctgctccccctgacccgggcggttagctggcgggcttcctgccttctatagagcagaaggacccaccccttggccgccaggggctggccaaggacccctccctggtctcctcctcctcttcagaccaccgggaaggggatgacgttgtgtgccactccagaatgctttacgacgccacataagatacaaataacctgttaacatccggaaagggaattactgttggtggctcttaagacattcctctgccgtgtttatagggggtacgggctctttcagataactttcatctttggcctccctgttcacacttacctcctggctccagccagcagaatcccacaagcacctctctctctg

SEQ ID NO: 68926 - DNA, 317 bp, Homo sapiens
ttttttttttttgggacggagtctcgctctgtcgcccaggccggactgcagtggcgctatctcggctcactgcaagctccgcctcccaggttcacgccattctcctgcctcagcctcctgagtagctgggattacaggcgcctgccaccatgcccggctaactttttgtatttttagtagagacggggtttcaccgtgttagccaggatggtctcgatctcctgacctcgtgatccacccgccttggcctcccaaagtgctgggattacaggtgtgagccacctcgcccagccaactgaggcttaatttctaatcac

SEQ ID NO: 68927 - DNA, 1120 bp, Homo sapiens
cgtgaaggaagccttctacacagcggcgcccctgacgtctgccggcatcctgcctgtcatgcaatcgctgtgcccggacggccagcgagacgagttcggcttcctgcagtacgccaactccacggtcacgcagctgcttgagcgcctggaccgcgtggtggaggaaggcaacctgtttgacccagcgcggcccagcctgggctcagagctcgaggccctacgccagcatctggaggccctcagtgcgggcccgggcacctcggggagccacctggacagatccacagtgtcttccttctctctggactcggtggccagaaacccgcaggagctctggcgtttcctgacgcaaaacttgtcgctgcccaatagcacggcccaagcactcttggccgcccgtgtggacccgcccgaggtctaccacctgctctttggtccctcatctgccctggattcacagtctggcctccacaagggtcaggagccctggagccgcctagggggcaatcccctgttccggatggaggagctgctgctggctcctgccctcctggagcagctcacctgcacgccgggctcgggggagctgggccggatcctcactgtgcctgagagtcagaagggagccctgcagggctaccgggatgctgtctgcagtgggcaggctgctgcgcgtgccaggcgcttctctgggctgtctgctgagctccggaaccagctggacgtggccaaggtctcccagcagctgggcctggatgcccccaacggctcggactcctcgccacaggcgccacccccacggaggctgcaggcgcttctgggggacctgctggatgcccagaaggttctgcaggatgtggatgtcctgtcggccctggccctgctactgccccagggtgcctgcactggccggacccccggacccccagccagtggtgcgggtggggcggccaatggcactggggcaggggcagtcatgggccccaacgccaccgctgaggagggcgcaccctctgctgcagcactggccaccccggacacgctgtagggccagtgctcagacttcgtacagctctgggccggcctgcagcccatcttgtgtggcaacaaccgcctcgtg

SEQ ID NO: 68928 - DNA, 885 bp, Homo sapiens
gcatgctctcactactgctttcaacattgtactcgaagtcctagttagtgcagtaagacaagaaaaggaaataaagagcatagtgattgggaagaaagaaataaaactgtctttgttcacagatgacatgattgtctatgtagaatatccaaaaattgacaaaaatgctcctggaaataataagcaattttaccagggtggtaggatataaggttaatacacaaaattcagttacttttcgtgtatatcatcagtgagcaagtggtatttgaaattaaaaaaaatactatttgcattagcacccccaaaagtggaatacttgggtagtaatctaacaaaacatgcacaagatttatatgagaaaaattgtaaaactttaattaaagaaatcaaagaactaaataaatggagagagattttatgtggatagaaatattctgttttcaagatgtccgttcttctgaacttcgtctatagattcaatgcagtcccaatccaaatcccagtaagttgttttgtgggtattgacaaacattttaaagtttatatggagaggcaaaaagacccagaatagccaactcaatattgattgagaacaacaaagtcacaggattgacactacctttcttcaaggcatactataaagctacagtaatcaagaaagtgtgatattagcaaaagaacagacttacagcaactgttcttattagcaaaggaacagtttacagcaaaactgtaaaacttagaggataacatgggagaaaatgtagatgaccttctgtttggcgatgacttcttagttgcaacaccaaaggcatgaaccatagacgaaataattgataatctttacttcattaaaattaaaaattttgctttgtgaaagac

SEQ ID NO: 68929 - DNA, 655 bp, Homo sapiens
gaagtggtcccagaaaagaaagtaccggtgcctcctgccaaaaagccagaagctccacctcctaaaggtaggtatcattacacattgtcagtcggggggccctggggaaagactgtatagaagtgtccgccgatctcacaagttgtatttgcttgggtaaatgtggagtcgatattccccctttatagcttctaactaaaagatactaatatcttcaaagttcctgaagctcctaaagaagttgtacttgaaaagaaagtatctgtggctgtgcccaaaaaaccggaagccccacgtgcaaaaggtatttattccctctcctctgctaagaaaaacttatcgtctgtacccctcacaatcagctgtgatatataccttgcccattcatacattataacaatactaatatctttcaagtgcctgaagctgctcaagaaggtgtcccagaaaagaaaattcccaaggcaccaatcaaaaaaccagaagcccccgcaggtacaggtacatgtcagctcaaacttatcctgcagaagaaatctctcttccattcctgaaaacaattttagaccattcctcttcattaacctaagtataaaactactaatatctttcaagtgccagaagttcctctagaagccacagaaaaagaaatttt

SEQ ID NO: 68930 - DNA, 689 bp, Homo sapiens
tggtggtcagaggagccccgaatagaccagttgtggagaggcctgggtggggtggctggcagggagggcaggccaagcccagtttctgcccacagtcacctcgaggtgactgtccagggctttgggcaccttcccgggagggggacggccgcccaccctgagtggtgttggaagctgggctctcctggatgccctgacccagctgcctggggagagccctgggcccctcctccctcagcacctcctccctcagcccctcctgcctcggtccctcctcccttagcctgtctggcatagatccatgttccctagcccctggcacaggtgcctctgactggaggaggccccacctgtggcccgggagctgctctgggggttgataaagggcagcattattgggtcctgggaaggagcgggcgtgaggccagctgaggcatggtgacccctgggaaggagcgggcgtgaggccagctgaggcatggtgacccctgggaaggagcgggcgtgaggccagctgaggcatggtgacccctgggaaggagcgggcgtgaggccagctgaggcatggtgacccctgggaaggagcgggcgtgaggccagctgaggcatggtgacccctgggtacgggggacttgggggccgcaccttggtttgcccagggcccctcctgcaccacgggccacatgcgg

SEQ ID NO: 68931 - DNA, 2616 bp, Homo sapiens
ccgggactggggctgggcgcgctgcccgggagccccgcacccacgcctggaccgcggagacgcccaggccgaggaacccccagcccagggactagacaccaccagggccgggcggagccagagccagacgcgccggagcgggcgcctctacgccgctagatgttcgccatccagccagggctagctgaggggggccaattcctgggggacccacctcctggattatgtcagcccgagctccaaccagacagcaactccaacttcatggcaagtgccaaggatgctaacgagaattggcatgggatgccaggcagagtggaacctatcctgaggaggagctcctctgagtcaccctctgacaaccaagccttccaggcccctggatcccctgaggaaggggtgcgcagccccccagagggggcagagattcccggggctgagcctgaaaagatgggtggtgctggcacagtctgctcccctctggaggacaacggctatgccagcagttccctgagcattgacagccgtagcagcagtcctgagcctgcctgtgggaccccgcgaggccctggccctcccgatccccttctgccctcagtggcccaggctgtgcagcacttacaagtccaggagcgctacaaagagcaggagaaggaaaagcaccacgtgcacttggtgatgtaccgtcgcctggcactgctccagtggatccggggcctgcagcatcagttgattgaccagcaggcccgactgcaggagagcttcgacaccatcctagacaaccggaaggagcttattcgctgtctccagcagagggcagcaccatccaggccccaggaccaggcctaagggtgtgcctccacaagtgtgcaagggtatatgtatatatttgcaggcatgtgtgaggcgcactagtaagtacataatttgctggcatgattgcaggtaggcatgagtgtgtatgtgctaacatgtaggctggtgtgtgtaggcatgtgtgaataagcatgtataaatgagcttaagtgtgctgtgtgcacatgtgtacacacagctaatttatctgcagacctatatgtgagcatgtaagagtgaacatatgtgtgtgtgtgtagtatgtaagaatgaggaactcggtatgtgcatgtgtagacaggtacccagcagtgtgtgtatatgcgcatgagtgaggatgtataggcagaagatgtgtgtgtctatgagtgagtttgagtgtgcaggcttgtattaggtgtatgtgaggaagcccttgtgtgtgcaggggtgcacatgtttggccacaggcatgggaggtgtatgttaggagcatgtgtgtttgtaggcagactcatgagcaggtgtgtgcaaatacatatccagctgcactgtgggtgtccacccacaccttgtgttcctcatggcctaccccagcctttcttctccactgggtcccactgttccctggagacagagggctagcatgctgtcatttatctgaaggttgtggctgacccattctcctgggatttcccaggccacctctcctttccctttccctcacttaacccagacttgctcagctgaggctattgtccctgatgttggctttacttgtaggaggtttagtggctgctctggcctgccatggaattttggctgcaattttggcagtgtgtggagaactggtatcaggaaagggaaccaggagtagtgatgaagatgatggtggggatggggacagaggacataggggactgtccctcttgaactctgcctttgggcacatgggagatggggacaggaaagatgataacagtggaaccctgtgaagaataggagaatgggaattctaaaataccagttcccaaacaaaccatctctccattggaaaaggagctgttgcaaaccgtgttcatttaagcttctgatgaaaagcaatgtatgtttataagcttgcaagtaacagacaagatgttccaaggccgatgaggaaaatatcgcttccctgtctctgcctctaccttgctgtgcctctctggctttagcagcattggatgttgaattggtttggttcatttctctgaagtcggactgtcaggaggagccagaggttggctttctgggatgtgaaggggacagtgtcagcctaagcctctggagatgcttaggatgctgaattttaaccccttctttcactgcatggcccttcaaacagggattggcaggctccgcgagttacagagtgggtgagtcttggagagaaccaacgactaaggtagcttagctctctgctttgttcttgggagccaagagaatgcaagatcctggtgggtgagcagtggtatgaagaggggacactggtgggtgaacagtggcatggaagtcactgatgcagcctctggccctcagtctccctatcggcaaaggggggggctcttcctatctctaaagagtttcatccctgacaggtggatgggtgaaagatccaaagagtgggggtgaggggtgggccctgaagactttttgtctgtagctcttgcatattgagtgtataaacccggcttctggaccaacccaagatgaataaactggggcagaaaattaccaaaaaaaaaa

SEQ ID NO: 68932 - DNA, 1456 bp, Homo sapiens
  misc_feature (1)...(1456): n = a,t,c or g
gattcgaattcggcacgagggcggctgcggctgctacggcggcgcatgctaggggattctgccgggtagaagagctgggcctggaacccagccctgaggacatcctgcggcccaggggcaagtgacacctgctgagagaggcccaggatggtggaggctgaggaactggcacagctgcggctgctcaatctggagctcctgaggcagctgtgggtggggcaggatgctgtgcggcggtcagtggccagggcagcctcggagtcaagcctggaatccagcagcagctacaactcagagactccatcgaccccagagacgtcctcaacttccttgagcacctcctgcccacggggccggtcctccgtgtggggcccaccagatgcctgtcgaggggacctccgtgatgtggccagatcgggggtggcctctctcccacctgccaaatgccagcaccaggagtccctgggccgaccgagaccccactcagcaccctcgctgggcacctcaagcctgagggacccagagccctcagggaggctgggtgatccaggaccccaggaggcacagaccccgaggtccatcctggctcaacagagcaagctgtccaagcccagggtgaccttctctgaggagtctgcagttcctgagaggagctggcgcctcaggccatacctgggctatgactggattgcagggtctctggacaccagctcttccatcaccagccagcctgaggccttcttctccaagctgcaggagtttcgggaaaccaacaaggaggagtgtatctgcagccatcctgaaccccagttgccaggcctgcgtgagagcagtggcagcggcgtggaggaagaccatgaatgcgtgtactgttaccgtgtcaaccggcgcctgttcccggtgcctgtggatcccggtaccccctgccgcctgtgcaggacaccgcgagaccagcagggccctgggaccctggcgcagccagcgcacgtcagggtgagcatcccgctgtcgatcctggagcccccgcaccggtaccacatccaccggcgaaagagctttgacgcctctgacacactggccctgcccttgtgagcagccacgtggggctggatggtgatgagggcggggctggctcagactggcccagatccccagggagggtcacagagcgagactgggctcgacaagggtgagcgcccaagtctctggagcacagcctgggcctcttccatcacccacacctgtacctaagggaggtaggacccccgctccacgtaccccggtgcttccagggtgatctgcctgcaggctggcatgacatgaatgggtcctgtttattgcgctcttgtgtactgcaggcacagtccttagggggcttatctcatggagcccccacagcagccaggagtgtaggcactgctgtacccccaccctgcaggtggngagaccgaagcag

SEQ ID NO: 68933 - DNA, 567 bp, Homo sapiens
caaggccaggattcccatggcaggagatacccaaggtgtggtcgggactgtctctaagccttgtttcacagcatatgaaatgaaaatcggtgcaattacttttcaggttgctactggagatatagccactgaacaggtagatgttattgtaaactcaacagcaaggacatttaatcggaaatcaggtgtgtcaagagctattttagaaggtgctggacaagctgtggaaagtgaatgtgctgtactagctgcacagcctcacagagattttataattacaccaggtggatgcttaaagtgcaaaataataattcatgttcctgggggaaaagatgtcaggaaaacggtcaccagtgttctagaagagtgtgaacagaggaagtacacatcggtttcccttccagccattggaacaggaaatgccggaaaaaaccctatcacagttgctgataacataatcgatgctattgtagacttctcatcacaacattccaccccatcattaaaaacagttaaagttgtcatttttcaacctgagctgctaaatatattctacgacagcatgaa

SEQ ID NO: 68934 - DNA, 865 bp, Homo sapiens
tattgcttgcgcccccagtacaccctcctgaagaactccagggcatcttcgcggcccttccgtgcctccagctccaccttcttcttccagctagtgctcctcctgggcctgcttctggctgcagtgcccctgggctatgtggtcagcaggtgaggggaagaggaggggggcacccagaggctggcaggggcagtttctcacccaggaccctgatgccagccccacttggccatctctcgccagcatccactcctcctgggactgcggcctcttcaccaactactcagcaccctggcaagtggtcccggagctggtggcccttgggctcccgcccattggccagcgtgccctccactacctgggctcccacgccttcagcttccccctcctcatcatgctcaggttctcagggcagcaggggccatgggaggggacacctggagggggaggtccttccttccatgggggtggtgagcctgtgcacccccaaccaggagccagacgcagaaagccaagggaagcaggggcctctgaaaagcaggaacctcctgggcccaccctctgggctgccatggggattgcaggatcactggggaagcaccgtgtctgggtggctgcagctgctgagctattggtattgctgtgccagaggggaggggatgaggggctctgcgaggaaggagaggagggtcccatcctcagatacagcagtgagcagtgagaagaccccagtaccgcgtattgtaaacattgaggtggggagagaggaaatcagggagaggcgcctgtggccccaggggcaactgaccacgaatccccttcccacccaagccttgtactgacggtgtgcgtatgacagacccag

SEQ ID NO: 68935 - DNA, 628 bp, Homo sapiens
tgagtgttggtgcactggacacttttattgctgcagtatatgagcatgcggtgatattaccaaacagagcagaaacacctgtttcaaaagaagaagctttgctcctgatgaacaagaacatagatgttttggagaaagcagttaagctggcagcgaagcagggtgcacatatcattgtgaccccagaagatggaatctatggttggatcttcaccagggagagcatttacccctatctagaggatataccagaccctggagtgaactggattccatgtagagacccctggagaaatcactaaaatatagtaagtttgaggaaatgtctattgaattagattcggcaacacaccagtgcaacaaagactcagctgcctggccaaggacaactctatctatgtcgtggctaatattggggacaagaagccatgcaatgctagtgactctcagtgtccccctgatggccgttaccaatacaacactgatgtggtgtttgattctcagggaaaactgttggcacgctaccataagtacaatctttttgcacctgaaattcagtttgatttccccaaggattcagaacttgtgacttttgacactccctttgggaagattggcattattactt

SEQ ID NO: 68936 - DNA, 1060 bp, Homo sapiens
attatttttcttttcttttagccataccttcagagtgttattttcctttttgtcataaggggtctggaaatgaagtatggaaatgaaataatgaataaagacccagttttcagaatctctccacggagtagagaaactcatcccaatccggaagagcccgaagaagaagatgaagatgttcaagctgaaagagtccaagcagcaaatgcactcactgctccaaacttggaggaggaaccagtcataactgcaagctgtttacacaaggaatattatgagacaaagaaaagttgcttttcaacaagaaagaagaaaatagccatcagaaatgtttccttttgtgttaaaaaaggtgaagttttgggattactaggacacaatggagctggcaaaagtacttccattaaaatgataactgggtgcacagtgccaactgcaggagtggtggtgttacaaggcaacagagcatcagtaaggcaacagcgtgacaacagcctcaagttcttgggtactgccctcaggagaactcactgtgtcccaaacttacaatgaaagagcatttggagttgtatgcagccgtgaaaggactgggcaaagatgctgctcttagtatttcatgattggtggaagctctcaagctccaggagcaacttaaggctcccgtgaaaactctatcagagggaataaagagaaagctatgcttcgtgctgagcatactggggaacccatcagtggtgcttctagacgagctgttcaccgggatggaccctgaggggcagcagcaaatgtggcagatacttcaggctaccattaaaaaccaggagaggggcgccctcttgaccacccattacatgtcagaggctaagtctctgtgtgaccgtgtggccatcatggtgtcaggaacgctaaggtgtattggttccattcaacagctgaaaagtttggtaaagattatttactagaaataaaaatgaaagaacctactcaggtggaagctctccacacagagattttgaagcttttcccacaggctgcttggcaggaaagatattcctcttta

SEQ ID NO: 68937 - DNA, 606 bp, Homo sapiens
ggaggcaggtgaagggtctgaggacatgcagagggggctgagatgcgggccggagtaaccgtggtgcccaagcagctggtgcggaagaggaggcttttggaacaagcttgggatgactgcttgggacgtggggagacttgggcgaggaggccagaaaatgttgggtagggtccgaagtggagaaggccgggaagttaccggggtcgaggctggtccggaaagagagtatgttgggatgagtatacctgccgttggagatgggggagaccagggcagggccagcttgtttctaggggattctcagtcttggtgcaaagagatggggaaattctttgaggaattgaggggtccatggagccgtgaactgaggagagatggtggaaggggtggggagctcttgagtagtgaagaggggtgcgtgggaaactggtgacttctggaaggagttgcaggatgacgggtttgctcctgaaatccaggggactgggggacaggtggagatgtttggtgtgctaaatctttcaagtacaagatgagccatcgttgaagctcagggttccaagtaagcatcacaggacatttttctccccaaagaggagagatagg

SEQ ID NO: 68938 - DNA, 921 bp, Homo sapiens
gggctgacaagagcatctactttcgcagtgcccagcagggttcggatggactacactttgtccgtacccaccacgtagcagagaaaaccaccttgtatgacatggacattgacatcacccagaagtacgtggccgtggcctgccaggaccgcaatgtgagagtctacaacactgtgaacgggaggcaggaggcgtgctacaagggctcccagggtgacgaagggtccttgctgaaggtccatgtggacccctcaggcaccttcctggccaccagctgctctgacaaaagcatctcagtgattgacttttactcgggcgagtgcattgccaagatgtttggccattcagaaattattaccagcatgaagttcacctatgactgtcatcacttgatcacagtatctggagacagctgcgtgttcatctggcacctgggcccggagatcaccaactgcatgaagcagcacttgctggagattgaccaccggcagcagcagcagtacacaaatgacaagaagcggagtggccaccccaggcaggatacgtatgtgtccacacctagtgagattcactccctgagccctggagagcaaacagaggatgatctggaggaagagtgtgagccagaagagatgctgaagacaccatccaaagatagcttggatccagatcctcgttgcctgctaaccaacggcaagctgccactgtgggcaaagcggctgctaggggacgatgatgtggcagatggcttggccttccacgccaagcgcagctaccagccccacggccgctgggcagagcgggccggccaagagcccctcaagaccatcctggatgcccaggacctggattgctactttacccccatgaagcccgagagtctggagaactccattctggattcactggagccacagagcc

SEQ ID NO: 68939 - DNA, 893 bp, Homo sapiens
ctcggccggaattcctgggtcgacgggaggcaggagggaatggccgtcttcgggttcgtcctcttcttggtgctgtggctgatgcatttcatggctatcatctacacgtgagtgagggaccgcaggaggggctcggggcaggggtccgggcctcggagacaggcgagaatgggaaacgtttgcgctttgaaggggactgggctcgggcgggggtggagaaagctgatcgtcaggctgttccccccgttccctcgcccctcggaccggcggtggcggtggtctttgcgagggaaaagtgttgggcgtgggaagggtttgctgggttgcaggcgactgcccagccaggctaaaggagactgctcttacgtgtcaggctgaaggtggtggcttggtttgattgtgctggggattcgtgtaatttttcatctgggccgagatgtatggtgtattgtttttttctcccgacctgggccacgtttctgttagggtggtgattgtgtccacttttctgggagctgctcacagctatctggacacctctctgtggattttcttcttcctggaagggctctatgcgcttagataggtgtgaagcacctgtccaccctgaaaaatgtccaccagacctccgagctggcatgatagctttgagtcctgtcagcttgtacatctcagcgtggttttctttccttttttcagttcctcgttttattgttttatgtagatttgtactctccccgtgccggccacatctcttcatttttgtttaacaaatacttcttgaggcctactagataccattcactgttattggccaggggacatggtggtgagcaggacagaattcctgtcctcatacgaaatcgtcgacccgggaaaatcactagtcgaca

SEQ ID NO: 68940 - DNA, 606 bp, Homo sapiens
tatacgcattaggtaccggcccgtaattcctgggtcgacgggaggcaggaggtgtaagaggactgggtcggggtgacggagctgtgcttatggaagagcagagatgctggaggttttgaacctcagggtcagtggtggcttcgtgggtttcactttgtcgtactttctgtttcacacattttcttgtgaatgtgccaagtattacataaaaaccaaaaggctgaccagacttaacagtgctccacccaatagcagcagaacacacgtttctaagtgcacagggaacattctccaggacagaccacacgttagtgcacaaagcaagtctcagtaaattagagatcggaatcctgcaaaccaccttctccaatcacaatggaataaaaccagaaatccataccagaaggaaaatgaaaattcacacatacatagaaattgaacacactttttaacagccaaagggtcaaaggagaaatcacgagaaaaattaggaaatagagatggatgaaaacaacataccagaacttaaggaatgcggcaaaaactgctctgagggaaatttatagctgcaaatgccaacatttaaaaagatgcgacatcttggct

SEQ ID NO: 68941 - DNA, 1923 bp, Homo sapiens
tttttttttgtgtaacttatccaagagcctgcaaggggtttaatctttttcctgggaagagacaatttcaccctgctttccgaaaatgcctgctgagccctggtggctgagtcctgtctccctgggagcggccggttggccagggcagccccgaccctacctggatcttcctgcccaagcctcagtctcaagaccccatgacagagcgtagggggaggcagtgtctctgagtctttcctcgggggacgtgtgcgggcacacagatgggggcggggcaggctctgacccccaggccaaaccaaagcccccacgctgtccattcacagccatgccttcccctcgaacaaaacagaaagtacgaaacaaggtctgccttttaattgctatcagatattcggatatcccgtctgatgtcagcaaggcccccgcgccccgccggaaacccgcacgataggagcagcaccgccgcctgactgcacagaagggctggggcagggtcgctgtgcctctcggcctccttgctgccaccgtcttttagcctcggggcgcctggtgcaccgtctcctcttcgggtcagcccagcctctggcggccctcggaaggaggggaggcaggggtcgggggggtgagccggaggcgggggccccgtcgcgcacgcatgcagacttgccctgtgttggcttcgtttgttctcctcctttgctaaagtgatcagatagtcctgtgaagcagctgccagccaggtggacagggcagcggtgctgggatgccgcccgtgggctcctcggacatcctgaggccccgccctacttctgtatctggaacaggaagagccgcaggttgatgttcttggcagccagcagcttgttgcactccacggagtcaatgatgggcagtggcacgtagtccgtctcgttgctctcgttggtgaagacaaagtggtagatgacggggctgatcctcacgtcgtcgtaggggcccttgagcagcaggaaggagcactccagcggtgccgtgaccttgctcttgaggaggagctggaaggagagcgtacgcttgcaggacaggttggggttacgctccgagtcgttgactcgagccttcaggacccacgtctggttcagcactgtgaacctgggcgtctcatagtacaggcgcgtgatgaagtcgtctgtgcggtacggccggaactggacctctgtgtagccaatcttctcgaagctgagcaggctgaagatgctgttgtacagctgcatctccttgcggtggctctggtccatcccatccaggatctccatcagctcactgcctgtcttggtcgggtgggcgcacgcagcctcgtgcaccgtcagctcatggaaggggccgtgccatgggcagccgatgcgtttgtacttgcactgggttaccctgtcctggcattcctctttctggtgcctctccaggagggagcggggaaactggcgcaggcagaagccacactctgaaggcagctcgctcacggctttctccacggccaggttccggcagcagaggctcttactgatctcacaacgacaattggggcacgtggcctgctcctccttcagccgggcatctgctagtaggtggataaaacagccagcgcacatcaagtgaccattagtacactggtacacggaggccttgggcaggtccaggcacacggtgcagcacagcaccgagtagagccgctcctccagtttcccgctgccggccgccgccgccgccgccgccgcctcggccgcctcggctgcccgcagccgcttcttgggcggcgcgtcggggtcgccggccgcctcctgcagctgtagctgccgggcgcccgccaagcccgcctcgtccgagaagccccggccccgccgcctcgcccagagccgccgccgccgcctgcccggcggccgc

SEQ ID NO: 68942 - DNA, 1490 bp, Homo sapiens
  misc_feature (1)...(1490): n = a,t,c or g
ccccgtaattcccgggcgcgccggggccatgagacctgtcctgatgatccctgtgaagacccaggccccacccctcctgtccagctggccaagaactggaccttccccaatactagggcagccggcagctcctcggaccctctcatgtgcccaccccgacaactggaggggctgcccaggacccccatggtgagaattgcagcagaggaaagggaaaggactcgggagcaggagggagtgatgtggggagaccagtttctccagtaaggtacggcctgtgtgtcgcacagtctcagtgctgcaccctctgggaggaggacccctgggatgccctgtgagcggccctccacactgccctccttgcacttctctcgtggggaaaggtttctgtccttccccagaaccttgtaggactgttctcagttgtacctccagcctggttcctctgaagtataccccaccttgggccccctctggagcagccccccatcaggtgcacagacgcccctcagagctcagtgcctctgaggctgggccgaaaggtggagaggagcttcctcccgagctgcccctcctttcccaggccctgcccgtggaccggaagcgaagccaggagcccagccgcccgtcccctacgccccagggcccacctttcgggggtagccgcacccccagcacttcggacatggccgaggaaggcagagtggccagcgggggccccccagggctggagacctcggagtctctcagtgactcactctacgactcgctgtcctcttgtgggagtcangggctgaggggctgcgccacgccacggccccgctggagctggggaccacagactggaccggctctcttcatgcccagcccccggagacggggacccctccctgaagggaccaaggaggcaggtggataagaaggtgaaaagggggtccctggcacaccccaccacccactgcttcggcggatgagatgaccgtgctcagctcagggagagaccccgcccttggtcccttctctcacccagagtaaggctcttcctggaagggactgggggttaaaggccactgtgtcgcagccctccagtccctacttcaggctgagccatcttgtggtgctgggcttcctgcccaccagccgtgccatctctgcccaacccggctgctcctctgccccgaagccctcgcgaggccctcctggaggcccccgtgctggtggagtttgggggccagggggacaagttgccttctctctctgccctggtcctccctgctgtctggatggtgctgccctcctctgccccatgcctttggggtctgttcgtccgtcttttttgttgttgtttttatatattgaagcgcctggcccagcccccagcccccagccccgcactgcggttaatttatgtgttgtttaaaatgcggctgctctgcttcctgcctctgcttctgccgtatccctaataaaatgtggaggccccctcaaaa

SEQ ID NO: 68943 - DNA, 374 bp, Homo sapiens
cccaacaacagcaaaataaaatttttttctcaagtgtccatggaatattcagaaagatagaccatattctgggccataaataagccttggcagatttaaaagaattgaaatcattctgagtatgtatgttttctggccataatgaaaccaaactacaaatcagtaatagagtgacaataggaaaatatctaatcatttagaaattaaacatcagacttctaaataaagtctggagtgaagaaggggcctcaaattcaatagtagaaatgcatagacttaatgaaaatgagaccataccgtatcaatatatgtgggaggtagctaaagcagtgctgatagagaaatttatggcactaaatgctgacagtagacaa

SEQ ID NO: 68944 - DNA, 2143 bp, Homo sapiens
  misc_feature (1)...(2143): n = a,t,c or g
gataaccctgtgtccccttccccagacagaaaaatgcctcaacgtcgtgactgaggctgcgaccccgttgggaatatacctcaaggcgagagtggaggctggtggcctgaaggagctggagatctcctgggggctacaccagatcgtggtgaggtggggggcagtggtgatgagagcagggatggggggttgcaggtgctggggcgtgatggctccttttgcccccagaaagccctcagcttcctggtcaacgactgcagcctcatccacaacaatgtctgcatggccgccgtgttcgtggaccgagctggcgagtggaagcttgggggcctggactacatgtattcggcccagggcaacggtgggggacctccccgcaaggggatccccgagcttgagcagtatgaccccccggagttggctgacagcagtggcagagtggtcagagagaagcggtcagcagacatgtggcgcttgggctgcctcatttgggaagtcttcaatgggcccctacctcgggcagcagccctacgcaaccctgggaagatccccaaaacgctggtgccccattactgtgagctggtgggagcaaaccccaaggtgcgtcccaacccagcccgcttcctgcagaactgccgggcacctggtggcttcatgagcaaccgctttgtagaaaccaacctcttcctggaggagattcagatcaaagagccagccgagaagcaaaaattcttccaggagctgagcaagagcctggacgcattccctgaggatttctgtcggcacaaggtgctgccccagctgctgaccgccttcgagttcggcaatgctggggccgttgtcctcacgcccctcttcaaggtgggcaagttcctgagcgctgaggagtatcagcagaagatcatccctgtggtggtcaagatgttctcatccactgaccgggccatgcgcatccgcctcctgcagcagatggagcagttcatccagtaccttgacgagccaacagtcaacacccagatcttcccccacgtcgtacatggcttcctggacaccaaccctgccatccgggagcagacggtcaagtccatgctgctcctggccccaaagctgaacgaggccaacctcaatgtggagctgatgaagcactttgcacggctacaggccaaggatgaacagggccccatccgctgcaacaccacagtctgcctgggcaaaatcggctcctacctcagtgctagcaccagacacagggtccttacctctgccttcagccgagccactagggacccgtttgcaccgtcccgggttgcgggtgtcctgggctttgctgccacccacaacctctactcaatgaacgactgtgcccagaagatcctgcctgtgctctgcggtctcactgtagatcctgagaaatccgtgcgagaccaggccttcaaggccattcggagcttcctgtccaaattggagtctgtgtcggaggacccgacccagctggaggaagtggagaaggatgtccatgcagcctccagccctggcatgggaggagccgcagctagctgggcaggctgggccgtgaccggggtctcctcactcacctccaagctgatccgttcgcacccaaccactgccccaacagaaaccaacattccccaaagacccacgcctgaaggagttcctgccccagcccccacccctgttcctgccacccctacaacctcaggccactgggagacgcaggaggaggacaaggacacagcagaggacagcagcactgctgacagatgggacgacgaagactggggcagcctggagcaggaggccgagtctgtgctggcccagcaggacgactggagcaccgggggccaagtgagccgtgctagtcaggtcagcaactccgaccacaaatcctccaaatccccagagtccgactggagcagctgggaagctgagggctcctgggaacagggctggcaggagccaagctcccaggagccacctcctgacggtacacggctggccagcgagtataactggggtggcccagagtccagcgacaagggcgaccccttcgctaccctgtctgcacgtcccagcacccagccgaggccagactcttnggggtgaggacaactgggagggcctt

SEQ ID NO: 68945 - DNA, 950 bp, Homo sapiens
  misc_feature (1)...(950): n = a,t,c or g
gactctattttccgggtcgacgatttcgtcggcacagcagggcagataatgccaccgggtttggggagcagtggttctccaactttagggatagaaaccagaagtttaggagctcagcaaagaccgtgtaagcctcgatcaggagggacctccagccggaagagagagtgcctgcaggggcctgacgggacctggggggaaggaagtgagaaactgctctgccttcctgaggggcagccacagctcctgctggcccgtctcagcgcctctgcgacaacctcaggtgcgggcaagacagacggagggagagaagggaggaaggaaaaacggatgcaggaggatcctagacacggaggagacagaacccacaagagggggcggcggtggcgtggacggcgccgcgagggcatcccagcacacaggacgggtggagggctagtgacagcggaactctgcccttcgacccggccgggtcaccgctgaggacagaccctagagcggcacttcgggggtcagtgaggtcaacacaaccgccacaaagacaccacgatcactgtcgctgccactttccctcttgcggtctcaggagggcacagggaggcctttggaggctgcgtcaccagggacggctccgccatgttgacagctaaaagagggggcgcgcttgtcttcttgtgctctgaatttctcagctttcaatttatttggnnnnnnnnnnnnngaaacaaagcctcgttttgtttcccaggctgaaaggcaggggaacaatttggtttaattgaggcctaaccttttagggctaagnnnnnnnnnnnnnnnnnnnnnnnnnnnnggtgggaactacggcaaggcccccccatgcccggtaaattttatttttttgaaaaaacggggttttgttactggccccagcttggtttaaaatttccaaccttcgggaatcttccgct

SEQ ID NO: 68946 - DNA, 575 bp, Homo sapiens
attcccgggtcgacgatttcgtgtgaagtggaattgatggccaggatggcaaaaaccattgacagcttcactcagaatcagacaaggctggtggtcatcatcgatggattagatgcctgtgagcaggacaaagtccttcagatgctggacactgtccgagttctgttttcaaaaggcccgttcattgccatttttgcaagtgatccacatattatcataaaggcaattaaccagaacctcaatagtgtgccttcgggattcaaatataaatggccatgactacatgcgcaacatagtccacttgcctgtgttccttaatagtcgtggactaagcaatgcaagaaaatttctcgtaacttcagcaacaaatggagacgttccatgctcagatactacagggatacaggaagatgctgacagaagagtttcacagaacagccttggggagatgacaaaacttggtagcaagacagccctcaatagacgggtaagatgccattggcttcgagctgtatgtttgtattgctattcaatttaatacaaataaagatgatgccacttaaataaaaaaaaaa

SEQ ID NO: 68947 - DNA, 1904 bp, Homo sapiens
ttttttttttttaaagcttattagctcatttatcttggaaacagtagttaaactgaataaaaaccaaggggcaatataactgctactggttgagtcatacagtgatgtgtagtttggaaaagaagacgaatgatagatattgagcccctttaggaaatgttgccagtatttgaatttggctttcatagttatctcttgcacacgaagtagagtaccatggctgataacaagaggtcaaatgtacaagttgctctaatatggcctcaatgaggcaccagcttcaaaacccgcttgctgataattcaggtattcatggagggtcaagacttcaaagtcatgtacttcaagtaccagtagagcatctggtgttgcttaagggagtctgtcagtgtagggtgcatagaattgttctctggctatatcccattctaggaatcactggatatccatctggagtggagggctgttaatctaggttcacttgacaccatcttcagcaaatgatcattcctggggtcaaagacatgcctgtcttcttgcacttttctaagttcacacacagtatttctaagaatgttcagcatctactgaacatgaactgtgctgagtggaggtacagaaaagattggaatgccattcaggtcaaacatattgctgtctggggcagtggttttcaaactgtgttcggaagagttcaaggtgttgtaaggaagtccccttaggtgtcaccacggtggtaaaggaagatagttgtagcaggattcaggcccctactcttgcttcactacttcatccagagcagcttcacttttactctgggcttctgcacagttttcactcaaagggcttcatggccacaaagcctttggaaaaccaatgatctaagaataagtcggtcacaaaatgcatagaggttctaccttgatgtatcaagagaagccttttctggaatctggtgcagccttgtgagatgctgttaggtaaggggactccttggtagaatttcttacatttgtgtaaaaagttctggttcctgagtaattccaaagaagatgctatgaggagttcactgtgcctttgatttgatcccaatgggtcagaatatgttttctcattcagtaggctactacaggatttgaagtagaaaaaacagggtccagtgaccttcatgggatcctagatgttcatgaatttcaatcatttgagattgtggggtgtggtccaatgctgctctcaaaaagatgttgcctttcttcagagagcattaataactaaaaaatcccctggtccaaatttattgtgtgtctctgaaggctttaactgaagaaatgaaatgcacactcatggaacaaactaggcctttgttgtgataaaacagctttagctatttggcttgaggactctgacttcactataaagggctgtgctgaatctgggtagaacaagacaggagtggaggtaaaggccacatcatgatggctgaatgcctcctgggtcacagtggtccactggaatgggtgtcttcgtcagtagtaaggtggtaggaatcatctcgggcaaaaatccaggtaccaggtctgtaggctgatggaatagcacagggaaggtagtcagaaggtccaggtgaacactcagcaatcaggaggcacaggatgagtggttattctgatagcctgctctctaaactcctccttcctaataaatgcatcttgatatgttgtggtgtatgtgggcaaagatgcactaaacaaggaccctgctttcaaggagtctgctatcagacccgggagggggggagggcgcgccagggcttcttcgatttaggggcctgactccccggcgacgagacaagatggctcctccggtccgcaccgcagctaccgtcccggctgcgtcgcacgaaa

SEQ ID NO: 68948 - DNA, 421 bp, Homo sapiens
  misc_feature (1)...(421): n = a,t,c or g
tttcgtggaggcttatcggatttacaccccttttgatccggcagctctagaaaatagctgtgctcttaattgagcatttgtggctcaggcagccccggatattaaaaagaaactccaaaaactagaaagatttactagaataaatatctgtcagcttttagaaatagcccaaaaagcttttgacaatcacaaggttaaaaaaacaaaaacaagcaacacaggcagctgaaaaggccgctgataaagcattcaaaagacaaacaaaaatcttagtggcggctatccaagaagtacagaatgaaatagcccgttaatttagcattaactgaagcccctgctttagccctccctaatatctccataaaagccaaggagttgctaaagacgtgtttactcagactctaagaccctanagacgccc

SEQ ID NO: 68949 - DNA, 415 bp, Homo sapiens
tatcgtggccacagtaagctttcataatgctggatgttttggagcagttacaggactaactaactttggttgaggtgatgaaatccccttttcaccccatttccatggatagggtgattctagccttctataaacctggtctagcctttcagttaaatcactatcataggccggattagtgggccagacagatggggtctgtgaacatgagtgagtctggcccatacaaccataatataattggttttgaggggcccagtctataatagttccaaatttattgttttgtaataccaccacagtatcagccacatatttttcccaaactaagacttctgggtcttttgattctttgggaatttccttgaggcagggtccccttaggcctaaattttaatgatctttgataagaaga

SEQ ID NO: 68950 - DNA, 831 bp, Homo sapiens
  misc_feature (1)...(831): n = a,t,c or g
caccgagagcctcccggtgcccatggctcctgtcacagggcagctcagtcccgaggagcctccctggtccagcggcttcacaatgggaatgcctctcctccgagggagcccatccctccacctgcaccggaacccccatggcactgaggagaccggggtgactgcggagaccggggagacgtgggggacaggggagacaagcagcagggcatggcacggggtcgggggcctcaatggaaacgaggcgcccgagggggcaacttggtgactggcacacagcgtttcaaggaggccctgcaggatcctttcaccctgtgccttgccaatgtgcctggccagccagacctccgccatattgtcattgacggcagcaacgtggccatggtgcatggcctccagcactacttctccagccggggcattgccattgctgtgcagtacttctgggaccgtggtcaccgtgacataactgtctttgtgcctcagtggcgcttcagtaaggatgccaaagtcagaggtgagttgggcctggtcttcagtgtcccaggataggctctgtttccactttgaggagaaccctattatgttctttttcaatagagagtcacttcctgcaaaagctgtattccctcagcctgctctccctcacaccctcacgagtcatggatggcaagaggatctcctcctatgatgacaggtacttgctcctctcctggccccaggcttgatattgaaggagccctatggaagactgagggagagagaanagctcctggtggtttacgctgtttctaagccttggtggtgggtaaggggccagttattcctctg

SEQ ID NO: 68951 - DNA, 823 bp, Homo sapiens
tgttaggcagcaacagtgctgatgctggactgtggcaggcagagggtgctatcctgacacacttcaccttagtgcaggaaacttcaatttggtggaagaaaggcgatttcgaggttccaatctgggcgacacttcccagttggagagtcagcaaaagggagagggcaattccaagaagagggaaaagcttgtgcacagtgtacctcctttattcctgaagcccgggcagtgcttgacctggtcgaccagtgcccaaaacagatccagaaaggaaagttccaggttgttgccatcgaaggactggatgccacgggtaaaaccacggtgacccagtcagtggcagattcacttaaggctgtccctcttaaagtcaccaccctcttgcattggccagtggaggaagatctttgatgatgaaccaactatcattagaagagctttttactctttgggcaattatattgtggcctccgaaatagctaaagaatctgccaaatctcctgtgattgtagacaggtactggcacagcacggccacctatgccatagccactgaggtgagtgggggtctccagcacctgcccccagcccatcaccctgtgtaccagtggccagaggacctgctcaaacctgaccttatcctgctgctcactgtgagtcctgaggagaggttgcagaggctgcagggccggggcatggagaagaccagggaagaagcagaacttgaggccaacagtgtgtttcgtcaaaaggtagaaatgtcctaccagcggatggagaatcctggctgccatgtggttgatgccagcccctccagagaaaag

SEQ ID NO: 68952 - DNA, 473 bp, Homo sapiens
  misc_feature (1)...(473): n = a,t,c or g
cttcgtaattcccctttcgacgatttcgttcatggtctatcagttttatttatcttttcaagaaccagctctttgtttcacttactttttgcgttttttgtttgtttgattcactttcatttnnnnnnnnnnnnnnnnnnnnnnnnnnnnnnnnnnnnnnnnnnnnnnnnnnnnnnnnnnnnnnnnnnnnnnnnnccttgaggtgtgaccttatgttgtctgtttgtgctctttcagactttttggtgtacacatttaatgctgtatactttcctcttagcactgcttttgctatatcccagaggttttgataggttgtgtcactattattgttcagttcaaataattttttaatttccatcttgatatctttgttaactgaaagatcattcaggagcagattatttaatttccatgtatttgtttacttttgaaggatccttttggaattaattcacaattttactccattg

SEQ ID NO: 68953 - DNA, 895 bp, Homo sapiens
ctagattgaaacactttgtgggagagaaagtcaaacgaggctgatctaacagtaaattttgatactgcaagatgcgagcatttgacatctatttgccgaagcattttgtagtaaggtctttacggcatgaggagctgtaagggttaaattttggcttagagttaacttatcatcttcttgggccaggcttgctgtagctgctacggctcgcagacaacttggccatctacaggccacaggatctagcatcttagataaataggccactgggcagctttagggtcttagagtctgagtaagcacgtctttagcaactccttggcttttatgcagatattagggagggctaaagcaggggcttcagttaatgctaaattaacgggctacttcattctgtacttcttggatagctgccactaagatttttgtttgtcttctgaatgctttatcagctgcctttccagttgcctgtgttgcttttgttttttaagcttttgattatcaaaaactttttgggctatttctaaaagctgactgatatttattctagaaaatctttttagtttttggagtttctttttaatatcctgggctgcctgagccacaaatgctaaattaagagcaaggctattttcgggagctgccgggtcaaaaggggtgtaaatccgataaaaaggggtgtaaatccgataagcctcctggaggcgctctaaaacgttcttggtgacttatcgggcttttggacaacgtcggtcgtcttagacaagttgatgggtttctgagaggctcttttaatacttgcgaggagataccggtgagaatcgtctaaagctccctttctacttgaggaatttgggtcctggttaggccgtgtagaaggaaagacctcctcaag

SEQ ID NO: 68954 - DNA, 535 bp, Homo sapiens
gcattgacttgactttgtcagtgtttcttccgggtggagaacctgctgcacatgccttcattctggaacatcagatgaaacaccaactctttctttaccttggaacaggtgttcagatctatgaccggacatctgttcttcatgtaatggtcaaaaaaggtcaagttactggagtggagaccgataaaggacagattgaatgccagtattttgtcaactgtgctggccagctattgtggatgctgatggaagaatttatattcggaactggcagggtggcatcctgtctgggggctttgagaagaacccaaaaccaattttcactgagggcaagaaccagctggagattcagaatctacaggggactgggatcactttgagcctctgttgagttcccttctgaggaggatgccagaattagagactctggagatcatgaagttggtgaactgcccagagaccttcgcatcagacatgaggtgcatcatgggcgagtctcctgcagtgtagggctactttgtcctggcaggaatga

SEQ ID NO: 68955 - DNA, 456 bp, Homo sapiens
gctccggaatttccgggtcgacgatttcgtgactgattgatttttgacaaagatgtgaaggctattcaatgtgaaaaggatggtcttttcaacaaatggtattgaaacaattgaatgtccatatgcacaaatgaactttgaccataagctcacatcttgtacaaaaattaactcaaaattataatctaaatgtaaaatgtgaaaccataaaacttagaggaaacatgaaggaatctttatgtcctggagttaggcaaaaaaatcttagataataatttaaaaacatccataagaagaaaaattgatgaataggacttaatcaaaattttaaacttttgctttgagaaaaacactgttaagagaatggaaaagcaatccacaggttgggagaaaatatttacaaatcacacctgacaaagaactggtatttagagtatatgaagagctttcaaaaga

SEQ ID NO: 68956 - DNA, 2379 bp, Homo sapiens
ttaattcccgggtcgacgatttcgtcgcggagtattccaggcgcctgcaactaaacgtggccgggtctgcaagctaggtgccagcggggaaagtttccctgcttcttatcgtctgctttaacgccttaaatagcccgctgaaggctgcagcaggtgctaggtagcagcctcccggccctcgggaaaggcggggtggggaggcgagagcagcttagcctcctcgacctcccttcctggtgacggacgaacagttcccgtagaatttcgcttcaccgagtgaccttgagcccagggcgacggtcagcttgttaattcctggctgcaggaactttgtgagaattttaatgcatggaaaagctgtccatgttccaactgctgtacatccaaaagtctcagtgtaatagcaggaccaaaatattctgtcaatcagctgaccatatacttaatgactcctaaaatctcgtggacttctaagaaagcgccatggcctgtgctgctgttatgattcctgggttgttgcggtgctctgttggagccatccgtattgaggctgcgtcactgagattgacactcagcactttgcgccaccttactctaaccagcataatgaaatccaaaaggaaaactgatcacatggagagaactgcaagtgtccttcgacgggagactatagaaagctaatctaccacctgaaggggtgtcaagggctgagaaataaaggatcctcaccctttacctcaattgtgtcagcagctaaggtgtgtggagctgccagtgagtcaccgtcagtgaagagcctccgcttgcttgttgctgatcaagacttttcctttaaagctggccagtgggttgatttctttattccaggagtctctgtggttggtgggttttcaatatgctccagtcccagactgctagaacaagagagagtgatagaattggcagtgaaatatacgaaccaccctcctgccctctgggttcacaatacgtgtacacttgactgtgaagtggctgtgagagtgggtggagagttcttctttgaccctcagcctgcggatgcctctagaaacctcgtgttgattgcaggaggagtcggaattaaccctctgctttccatcctgcggcacgcagcagatctcctcagagagcaggcaaacaaaagaaatggatatgagataggaacaataaaactattctacagtgcaaaaaataccagcgaactcctgtttaagaaaaatatccttgatttagtaaatgaatttcctgagaagattgcatgcagtttgcatgttacaaaacagactacacaaatcaatgcggaactcaagccatacatcacggaaggaagaataacggagaaggagataagagatcatatttcaaaagagactttgttctatatttgtggcccacctccaatgacagactttttctccaagcaactggaaaacaaccatgtacccaaagaacacatttgctttgagaagtggtggtaggaggcagacaaaggcagaaaaaataaagagtgggaattcctggcaggctgaagcctccagaagagcctctctcctccatccttctggccggcccagcaggacgatggcagacaaggccctccagtcccctcagctgtcccgttttagcagcctgagatgtgattcgggttgccaggggctcaggtgttccttgggctctgcgagcccttggaagctggagcaggctgccccctcaaatgctgcagaaaatccactgaagatgaagccctgctgaggaaaacctaggaaggccatcaaagtctcttaccttcgattccttcttcttgattttctgaggtagacacggtctctgaagaaagacaatctgcttggtggatacactcccctcgctggtagtcttgacgacgggagttggtagcacacaggtgagctgccagccataggccgccagcgagttcagcaggggcacgtagtctgtctgcacttcgacaccttccaggactgtccattgttcagccacaatagcatcatagccctgtatggttttgctatcttctgtggaaacagcttcaaagatgaatactccatctgtcaagccatgtaaggaatcattcactattccaaggtagaagactgcgttcaccagcatgcctcctttccggaagtggtcgctcatgtgctctaaccagttggcgtccaagccgctcactgtctggccattcttggagacatggagaggaatggtgacagggtagtattgccggcacttctgatggctcttcggtttgttgaaaagggtgaagatctccattttccctgagagtggctcttcatgcgcctccaaggggaagctctccggcccacgcgtccgcggacgcgtggg

SEQ ID NO: 68957 - DNA, 725 bp, Homo sapiens
  misc_feature (1)...(725): n = a,t,c or g
agagaaagcttattgttgtaatcagtgtggtagggctttccagggcagctcagacctcatcggacatcaggtaactcatacaggagagaaaccatatgaatgtaaagaatgtgggaaaactttcaatcagagctcagaccttctgagacatcatagaattcacagtggagaaaaaccttatgtatgcaacaaatgtgggaaatcttttaggggcagctcagatcttattagacaccatcgtgttcatactggagagaaaccctatgaatgccctgaatgttggaaggccttcagtcagaactcacaccttgtcagtcatcaaagaattcataccagagagaaaccctttgaatgtagcaactgtggtaaggccttcagtggggtggacagcttttcttaagcaccagaaacttcacattggaaaggaatttgaagactgtaagagtctacaaacaggacctattctaataggtagcagaaacctaatgaatgcagtaaaactaggaaaagtctgatggagaccacatcttattgcactacaaatgagttttattagaaaaaaaccatgggaaggtgggaaagcagagaaaatacctactggatttttcaaacgtaagtataatcaagtggaaaagccaaaagctcttggacataatcaccnnnnnnnnnnctgtctcaaaactgacactagaatatggtcccaacgatacaattttttaaattat

SEQ ID NO: 68958 - DNA, 980 bp, Homo sapiens
  misc_feature (1)...(980): n = a,t,c or g
tttcttggcacagaccatgcggcacaggcggaaggcggggacacggcacagaccgtggggcacaggcggacggagggccaggagaaggggctgtgctgccagcaggcagtgcttttgagctctaatggatgaacattgctaaccagcgaaggtggagagagggcacccgtctgagaagatgaagaggcagcaaagcacagctggcctcggggaaccggaagccacagggacatcaggctgtgtgctgctgtctgtcggccaccagctgggggactatcctggacctggaagggcatccctgacactccccaccagatgccaggggcacccccagccccaggtgagaaccacggatcccatggcgaatgaggtcagcctgtgggaagtggggctgggactgctctgcacagcttaataggaaagttgggttctatttggtggggttttggtcatgccaatggctggtcagggctgtccgtgaggaactgatttgaggacaagttagagaaggggctgccgaggccagtggggcactcgttgtctgggtctaagaaaaagaaaataaaggctggtgatgtgacagttggtgggagcacagacggaagggaactggcggtggagacacacggttgggcctgcacagggctacggtagctaccttggggtcatcctattaattctcctcatggtcccaagaggccgctgtgaggatccctctcctgagggacaaactgctccagaggcacacagaaccaagatccgggccaaactcaaagcgggcgatcttgacccctcacccggggnctgaggcagggatcggacccccctgacacacgaacacttccaggactggccgatggggaataataacccagaccacgcaggaccagggttctggccctaggcacctggaccagcactgatagtggaccaaggggttaaccacactggggaggaagcctactttcaaggagacccac

SEQ ID NO: 68959 - DNA, 1496 bp, Homo sapiens
gcatgtatgcacatttttaatgtctgattcctctacatttcttaaactgtaaaataataagaacatgcagccagatagcatcgcgattaccaacttctttatataatgacacgtaccattccactcaatgtgctcctcagtttgaatttataaaatatatgctactcaaatgaaaggcacttatgcctgctcttagtagaggaagcgctagctaattgcctaacgccccattagcatatggcctatactgacttgagaaggaaagaacgttcatttgctgtggccaataaggatcccctctccccaccttcccttttctgcatcaaaatctacacagacaaaagtcagatgttgtaatatgcattttatcgtgtcacttaagtactaagaggtgcttttaaagtttttattaatgctgctcaaacttgaccccgacggtccaggatacaggccaaggtgtcagtgcggacacaatcgcaaggcggctgttaggcttcagggctgggcaggaaacttgccaggtgctactaggaacgtatcagccctttctacaaagcaggtgtctttcccatcataaaatgcaaagcaatcagccgttccctttctccccagccccctcgtccggagaccgagaggatatttaccctgggctcttgcagttctcttataactgaacccagcggcggctccttctccgagctcagagccagcaggctcaggcccagccacactttacaggcaaattgccgagctgaccaagggctttggccaagcccgagctgggccggggcgtccgggaagcggaaggagccagtctaggaaatccgggtgtgcgtggtggtgaagctggtgggcaagcttccacttcaggtccggggctttgtgtcccgcaacagacgcttggcgccgctcctcttccagcctgctgccgccttctccgagcgagtgagttggcgaaactcactcacctgtcggaacccggtgcctggcggccagacgcgcagattacagcaaaccttggccgggacgccccagccagggaggcaagtgtgggagctgctcctagaggtgccagctcccacccccagctccgcgccccctgctcgtcccctttcacttccaggcgccttcgggcttggggtgcccagaagggcaagtccaagcagacgccagggctgcaggttcaagatgctccgcctcctcctgccacttagagccacaaacgctagcgggaacctttccactcagtcttagtctgcggtcactgctgaggttttcagaactttccaggcaaaggccagccaggtcctttgcctccaacccactccgcgcctacctcccgcctggggacacccctaggcccaggagatcctactctcccccgagcaccgacgttccaactcgtctgcgcccccgactgctgtccggctcctgtgccaaggggcgcgcgcatcttcccggggccagacgaaatggtcgatccgggaattccggac

SEQ ID NO: 68960 - DNA, 819 bp, Homo sapiens
tgtttttcggtgtaaggcagcgacggcggctgcgacggcgagactgagatcctggtgtcgtgggcacctgagttctagcttcccccagcgagcgcgcgtcccttcgtgcctaggcgagagccggctcttccccgggagatgcgtttgtcccaggctcgggggctcagtgggagttcatgctgcgctggaggctcttggccaccgctctaatcgccttgtgccgccgcagcgccagctccgtcgccagcggtgagcctcccgattcccccccttgcccctggcggcggcgatgaccggggagaagatccgctcactgcggagggaccacaagcccagcaaagaagaaggggacctgctggagcccggggatgaggaagcggcggctgccctcggcggtacctttaccagaagcaggattggcaagggcggcaaagcttgtcataagatcttcagtaaccatcaccaccggctacagctgaaggcagctccggcctcctccaatccccccggcgccccggctctgccgctgcacaattcctccgtgactgccaactcccagtccccggcccttctggccggcaccaaccccgttgctgtcgtcgcggatggaggcagttgccccgcacactacccggtgcacgagtgcgtcttcaagggggatgtgaggagactctcctctctcatccgcacgcacaatatcgggcagaaagataatcacggtgaggagtgctagcccctctccacctctctccttccccgagcctagggtgtgcctccccaggcttctggaatcctaggccccctccagcacgaaatcgg

SEQ ID NO: 68961 - DNA, 1149 bp, Homo sapiens
agaggactctaggcgttttcccactcttgaaggcactgagctgggaacaccacctctggccaccagctgtggactgcagagaggcctacggtgaccaggaagggtggagctgcccaaggtcatacagcaagccggccctgcacaagctgatcccatggctgcccagccttggggaatgggggacttctggcatgtccccgagctggcctcatctgggccctcagaaaaacgggaggttctgagcccagtccgcgaggcgggggcggaggcggcccgatacctccacctactctcggtacccgcgtttctccagtggacgccctcttcatcataggggtcaggcggagcgggtcggggaccgaaagtcgcttcggggcgggcgccagtctccggcccagccccgggccggcatccaggcgccgccgctccggcccagccccggcccggcccctatgatgaagagggcgtccactggagttcttgctgtcgacatctttgacaagttcaacttcacgggagccagagtcccatggttcgacgccattcatgaagcattccccagggagctggagtcctccatctccttcccagccaacttcttcaaaccacctgaagaaaaagaaggccccctggtaaggccagccagccggaggaccaccccgcagaccacacgcccagggcctggcaccgagagggaggccccgatcagcaggtgaaagcgacaccctgatgacactggctagttcaccttcactctggtcatcgtttactgtaccccggggcagctcccgcctgagccctatgaccccaaccgccgcagcctctggctgcctcactggcccatcattaatacgtcgatggtgagcgcactggtgtacagcgagggggctccacttccgagacccctggagaggcccgtcctggtggagttcaccctgctggagatggagaagcgaaccaagcctgtctgtgtgttctggaaccattccctggcgtaaatgtgatgccgggagttctgcatcttcatgtgagggctttgccaagacacagagaacccgcagggttgttggctcaccggcagatcgtcccacggggacagtctcttgtgggctgtgactcccccttcagccccctgtggggcagtgaggg

SEQ ID NO: 68962 - DNA, 444 bp, Homo sapiens
cccgggtcgacgatttcgtggagccagaggcagccagaggccctggagccccagggcctgggggcgagtctgtgagtggggagacccactgggccctgcaggaagtcacggagaagctggcccatgccaggactcacctccgccttctccatgacttgaaaatgccacctgagggcaggtcgctgccgagatgtgactgcaatattttggctccagagcagctttatggaccaactggaggagaaggcagacctgagtgagctggtgaagaaaaaagaactttgcttcatccaccactggcgagatagatgccatcagtgagtgggaggccagggcacggcagggggagctgcaggaccgtcggaggggccccagcgtctgagccctgtcctcccgcaggaaaatccatcaccttttatcagaaccagggggccgtgccaaagg

SEQ ID NO: 68963 - DNA, 551 bp, Homo sapiens
cttcggaattcccgcgtcgacgatttcgtttcgcatgaaatggaagagagggtggtgcggatagcttgaggaaggtcccgcatctggggctcgatctcgtgcagaggagcatttccgaagacactggccgctcccacaatggctccgaagaccccagcgaccagcgggttcatgagtttgttggggctgtccgctcggtaccagctgcgcagggatgtcaggacaaagaaacaagttgcctggttccagccctgcttcagcacggggcctgtggggccccggtaagtcccggtgttcccgcacaatctcctaaccctgtggaagaatcccctgtacttggatttggagaggtctggccatggattaacttcaccttgatggtctccatgggacataggaccaccacggcctcggccacgctagctcactggccgcaccgctgcccgccttgctgttcaccagtccctgggcatcccgcatctggttgctgaggaacgcctgacgccgccttgtggatgaagccgcagagcagggagctgaggctgcggccc

SEQ ID NO: 68964 - DNA, 407 bp, Homo sapiens
tttcgtccgccaggggtcccagtaggtgaggtgcagagcctccctcagctcctcttttcctccatccaaggggtgtccaatgacacatcttcgctggagacagagcgagggtttgaggagttgcccctgtgcagctgcctcatggaggcacccaagattgaccgcatcagcgagagggcggcgcacaagtgcatggccactgagagtgtggacggagaggaggggccgtgggctggtgggagaggtgccagggcgtccagtccccggccccagcctgacgctctcttctcacccatcctcactgcgcacagctgtcaggctgcaatgccgccatcctcaagcgggagaccatgaggtcatccagccgtgtggccctgatggtgctctgtgagacccaccgcgcccgt

SEQ ID NO: 68965 - DNA, 1276 bp, Homo sapiens
ttttatttttgtataatggtttatttaatacagtatacattatctttcatatactttgttacaatgttaaaaaaacttcatttttcataatataggaaataaagttggaaacaactctggtgggaatacttcagatagagcaagaaagcattcacagcaaggcctataatcagtaagatgtgtgaaaagttgggtagccacaggaggtgttcattaaggatatgattccatttatatagctatttctattgcataaccaggacagttttattgttttgaggtcaatgttcttttaaaatttgattttctgtaagaagaggctttttggcccagaaagccttacttattttacatcttccagtttgtccatcccatgagttagagttcgtcttgactctgcaagcttgtatggaatggaagtggtgcctctggggtcccagacacgggagagaggaagcagcccaggggctgggagaagtggtgagacccagaagaacggtggacccagtcaggaagggtcctgccagcagggcgtgggccagcctcggggtcttccccaaaaggcaggtaggggcctccagcaagcttcccacctccgtgaggctggagaagaggccccctggatgagaaggaagaggccggcaggtccggcgggcgcaggcacaggtagacttctggtgggaaaagcgtgactcagcctcctccagcggctgcaggacgtccccccgctagaaagggccgggctccctttgctgacccagagtcaacccagcgattcctcccggggaggcggggggccccggccccggcccagagcgcatgcctatgccgggagctgggcgaggacagggcacagccacagctgggtgcccaacgggaaaggcggccgttccccctcaagctgcacctgaaggggtccccagggtcgaggccacttctccttcggctcagggttgaccttcagtgaccactgtggcctgcgggcatcccctgggagggacggagggggatggaggaaaactccaaagggaaaggccgaatcctgcagggtctggtcgtcggaaagccaaccatacagtcagccctccctctcctcgggctgccgtcgccatccgggtccacacgggctctaagacaaaaccccaattgcccccaaggccccataggaggggcgctgccagaatcgcctatttttagtgaaagagaaccgggccgggagacagcggcagggggccggagcattcccgaggtctcggtctgggtgtcgcctcgtgcc

SEQ ID NO: 68966 - DNA, 451 bp, Homo sapiens
agcaaagccacctatgacatgtcagcacaacctggacatcgagtgtcccatgtacaccaacctcagtcgtctgggcagatcgtgtcctccatcacggcctccctgtgattcgatggggccctgaatgtgtacttgacagaattccaaaccaacttggtgccatacccccacatcaacctccccctggccacctacgccctggtcatctcagccaagaaggcctaccatgagcagctgtccgtggccaagatcgccagtgcccgcttcgagccagccaatcagatggtcaagtgtgaccctcaccatggcaagtacatggcctgctgcatgttgtacagaggggatgtggtcctgaaagatgtcagtgcggctgtcgccaccatcaagagcaagcacaccaaccagtttgtggactggtgtccgattggatttaaggtaggactgggtgatg

SEQ ID NO: 68967 - DNA, 482 bp, Homo sapiens
gattcatagtgcagtgtggtggaattcgattgcgcgaaccatgctccgaatgagtgagattaccacttcctctagtgctcccttcacccagccattgtcttccaatgaggtgagtttcatgttcttgcactaactttctgacagattcttgggtgttatcaacgtttattatacacagatcctgagtttgggttgaggtctgagccttgaaagagaagggcatttgatgtggagcagggattatcttcaagtgatgagcactgaaatgtttggtctcttaggatccagcttttaaaaatctacactattcacttagtcaaagtatctattcgtcaagtacagcctattcctaattattttaagaatccacaatttggactctgagagccttggcattcaggacattatttgaccccctgtacttaaaatatcgatatttaatatatccaatatgtgttatttatattactttcatagtaata

SEQ ID NO: 68968 - DNA, 425 bp, Homo sapiens
tccagtgtggtggaattcacccgcctccgcccggcgctcgggcgggaacccgggcgcatccgcacgtgcgggcgctgctgcaggtgtgtgcggctcagcccctgcctggacagcgctccctccccaagcctgagagtccctgcctcgcgcgccccagggcccgaggtcccgctccccaatttcccctagagatccgggtcgcccccaagcgaggtctcttgctccacgcccgcttccttgtgccagggacccccacctccctgcataaaggcgtggggtcctctccaagtccccctcgcgatcccactggacttcgaagtcaggctcctgcccgcccaccgcctctgtgccagggtccaacccccgccccacggtgcaccccccagggcctggggtcccagtccccaagtaccccttgctataag

SEQ ID NO: 68969 - DNA, 1083 bp, Homo sapiens
  misc_feature (1)...(1083): n = a,t,c or g
tctcggctgacttatttattggagacctggatgcagagacaacgaggcggggagtgggctggggcgaccagcagtgagtgcaataaaggacaccactctcccggccttgtgactttgaccatgtgtccagccagccacacctggagctccctatgggccagtgccatcctgggttcccctgcaaatcccggccccagcaagcagccactgcaatgtcccagttaggctgtccattccccaactttattcacaaatctggtgtctgtagaaagctgggggtcagcaggctgggggcggctgtccagactcccctggccccatgccctcagggagggagcggcagatcacggagatgcgccggccccggggaatccggcgttccccaaagaaggactcttcatcccgaaggatctcatgggagaagtcataacgggctgagcccctaaggatgtagagggagcccggctccagcaagagttccgagccactcccccggctcctggggtgtgcaccagaccgcataaccgctgggagacaggagagacaggcccggcgattggtggcccccgcagaacttgatgctgtccacgtggggcttgatgtagccgcgggcttccaggtccagcacgtgcacggaggagagcagggtctggccggggccaaaggcggccgcctgcacgcgctgcaggatggcccggctggcttctgaccagcgcgacttctctgtctctcggaagccgtggatggccgcgtcccagtgatcgtattcgtagcggcggcggcgcagctcgggctccagttctcggctcagcgtctcctcctctgccgtgctcaggaagccaggccgcaccacggccgcgtcctgcaggcggctcagcacggaagggcccgagcctcgcacccagctgggccctggcagcgtccgcagcgccagcagcccagtcccggccataatcccggagcggggtcatgagagagggcagggttgggggaacgcccccgccaaaagccattgggggtacctgcggcacggattgacttccctcagagtcccgcctctcgctccaacatcangactcgtgc

SEQ ID NO: 68970 - DNA, 1750 bp, Homo sapiens
ggcagagcaccactgacgtactccctgttagttttcagtcataggtaggggcacctgggaggccatcagctcggaaagccctgtgagatccccgagattcgccgttctggacctggagaaaaagaagtcgtatgtcttcagagagcgatctatgaaccaccatggcctgagcgatccctcggagcccagcgaacccatcgccttgcggggcccgccagctaccctccctcctccagctcaagttcaagctttcagagacacacagacctctgtctccctgacatgggatcctgtgaaagacccagagctcctgggttattacatctactcccggaaggtggggacatctgagtggcaaacagttaacaacaaacccatccaaggcaccaggtttacagttcccgggctgaggacggggaaggagtacgagttttgtgtcaggtcagtcagcgaggctggggtaggcgagagctcagccgccaccgagcccatcagggtcaagcaggctctggctaccccgtctgccccatatggctttgccctcctgaactgcgggaagaatgaaatggtcattgggtggaaaccccccaagcgtcgtggaggtggcaagatcctgggctacttcctggaccagcatgactcggaagagctggactggcatgcggtcaatcagcagcccatccccacccgggtctgcaaggtcagtgaccttcatgaaggccacttctatgagttccgtgcccgggctgccaactgggcaggtgttggcgagctgtcggcacccagcagcctgtttgagtgcaaagagtggacaatgccccagccaggccccccgtacgatgtacgggcatccgaggtgcgggccacatccctggtgctgcagtgggaacccccactgtatatgggggctgggcctgtcacaggctatcacgtcagtttccaggaggaaggctctgagcagtggaagccggtcacctcaggccccatctctggcacccacctgagggtttccgacttgcagccaggaaagagttacgtgttccaggtacaggccatgaattcagctggtctggggcaaccgtccatgcccactgatcccgtgctcctggaggacaagccaggtgcccatgagatcgaggttggtgtggatgaagagggctttatctatttggcttttgaagcccctgaagcccccgactcctcagagtttcagtggtccaaagactacaagggcccactggacccccagagggtcaagatcgaggataaagttaacaagtccaaggtcatcctgaaagaacccggcctcgaggatttgggcacctactcagtcatagtcactgatgccgatgaagacatctccgcaagccacacgctaaccgaggaagagctggagaagctgaagaagctgagtcatgagatcagaaacccagtgatcaaactgatctccggctggaacattgacatcctggagcgaggggaggtgcggctttggctggaagtagaaaagttatctccagccgctgagctacatctaatcttcaacaacaaggagatcttcagctcgccgaaccgcaaaatcaattttgaccgagagaagggcctggtggaagtgatcatccagaacttgtctgaggaggacaaagggtcgtacaccgctcaactccaagatggaaaagccaaaaaccagattaccttgacactggtggatgacgattttgacaagcttctgaggaaggcagatgctaaa

SEQ ID NO: 68971 - DNA, 503 bp, Homo sapiens
ctacacataagataattaatgctggagggaaatcccacccatgtggcaaagcttttaatcaatcctcaaaccttactaaacataagataactcatactggagaaaaatcttagaaatgtgaaggatgtggtaaagccgttatccagtcctcaactcccactaaacataacataattcatactggagagaaacctcacaactgtgaagaatgtggcaaagcttttaaccagtcctacaaacctttttgaacaaaataattcatacaggagagaaacactacaaatgtgaggaatgtgacaaagcctttaaccagtcctcaattcttaccaaacataagaaaattcatattggagattaaccttatgagtgtgaaaaatatggcaaaggctttgactagttctcagttattattattatttttggagatggagtttcactcttgttgccaaggctgcaatactgaggcatgatttcagctcactgcaacctccgtctcccaggtt

SEQ ID NO: 68972 - DNA, 1452 bp, Homo sapiens
tgggaagaaaattatttcagagcttggatatttctgaaagactaaaatttttgcttactttggattgtgtagatgacactttaatagttctggctgaagagcatggttgtttggacattataaaggagcttcctgaaactgtgatagatcttttgaataagtgccttaccttccatccttctaagaggccaaccccagatgaattaatgaaggacaaagtattcagtgaggtatcacctttatataccccctttaccaaacctgccagtctgttttcatcttctctgagatgtgctgatttaactctgcctgaggatatcagtcagttgtgtaaagatataaataatgattacctggcagaaagatctattgaagaagtgtattacctttggtgtttggctggaggtgacttggagaaagagcttgtcaacaaggaaatcattcgatccaaaccacctatctgcacactccccaattttctctttgaggatggtgaaagctttggacaaggtcgagatagaagctcgcttttagatgataccactgggacattgtcgttatgcccgctaagaaatagattgaaagatgttgggggagaagcattttacccattactttgaagatgaccagtctaattttaccttattcaaacagcaataatgagttgtctgcagctgccacgctccctttaatcatcagagagaaggatacagagtaccaactaaatagaattattctcttcgacaggctgctaaaggcttatccatataaaaaaaaccaaatctggaaagaagcaagagttgacattcctcctcttatgagaggtttaacctgggctgctcttctgggagttgagggagctattcatgccaagtacgatgcaattgataaagacactccaattcctacagatagacaaattgaagtggatattcctcgctgtcatcagtacgatgaactgttatcatcaccagaaggtcatgcaaaatttaggcgtgtattaaaagcctgggtagtgtctcatcctgatcttgtgtattggcaaggtcttgactcactttgtgctccattcctatatctaaacttcaataatgaagccttggtatatgcatgtatgtctgcttttattcccaaatacctgtataacttcttcttaaaagacaactcacatgtaatacaagagtatctgactgtcttctctcagatgattgcatttcatgatccagagctgagtaatcatctcaatgagattggcttcattccagatctctatgccatcccttggtttcttaccatgtttactcatgtatttccactacacaaaattttccacctctggggataccttactacttggggaattcctctttcccattctgtattgggagtaggcaattcttcaggcagctgcggggaccggcttttgggctaatgggctttaaatggagtgta

SEQ ID NO: 68973 - DNA, 637 bp, Homo sapiens
  misc_feature (1)...(637): n = a,t,c or g
ttttttttttttttatttacatggattttcttttttaatagtaaagcatcatttattggtcccgttattcccgacaccaaacccatctccactttacagttgaggaaactgaggctcagggagtctacaaatcctggccaaggacagtggcagaggcgctatctgtctccaaagcccaggtgtggcccttctgcttggagctcagactctgtgatgggagtctctggtctgccccactggaggaggcaggagaggcagggactggggaggatggaaggctcacccgcacagccagtgcgaagatgcagcgtcggcagaaccaaggtgtgagcaggggctggtcagcactgcccgctatggggatgtggcactgctggtggtaacccaggccacacttcccgcagatgaggatctcattcagcggccctgatgtcttccctaggcagatgttgcacttgggctcctctcctggaacaccggcatgctgtatgtccttccataggacccagtatttggaattatcttcgaaagtcacgaggcagctttgcttagagctgctgaccctcttgatcttcccgaggtagtacaggccatctgtccaccggcacagcacatactggccctncgtcagtttgga

SEQ ID NO: 68974 - DNA, 949 bp, Homo sapiens
cagtatggactgtacaatggtggtggtgccattatggccgccttgcatgagagctttacatcgtgtctgaattatggcggccctcaaaagttctccccagaaggtgacctatgttctagcccagaccccaaaatctgttatgtgtgcaagaagagtttcaaaagctcctacagtgtgaaacttcactacaggaacgttcacttgaaagagatgcacgtctgcacagtggctggttgcaatgctgcattcccctctcgccgaagccgagacagcaaaagattagaaagctgatcttattgtcacaagacacagtgccaacataaacctacatcgtaaactgttgaccaaagaactcgatgacatgggcctggactcgtcgcagccctcccttagcaaggacctccgcgatgaatttttggtgaagatatatggtgcccagcaccccatggggctcgatgtcagggaagacgcctcctctcccgcagggactgaagactcccacctgaacgggtatgggagaggcatggcagaggactacatggtccttgacttgagcaccacctccagcctccagtccagcagcagtatccattcctccagagaatccgacgcaggcagcgatgaggggattcttctcgatgacattgacggggcgagtgacagtggggagtcggcacacaaggccgaggcccctgccctccctggcagcctaggggctgaagtttcaggatctcttatgttcagcagcttgtctgggagcaatggtgggatcatgtgcaacatttgccacaaaatgtacagcaacaaggggaccctgagagtgcactacaaaactgtgcatttgagagaaatgcacaagtgcaaagtcccaggttgcaatatgatgttttcctctgtacgaagccgaaatcggcacagtcagaaccctaatctccacaaaaacattccc

SEQ ID NO: 68975 - DNA, 436 bp, Homo sapiens
taaatggagagacatactgtgtttaaggactggaagactcaatattgcagggatgtctattcttcctagatagatttcatagataagatgcaatcccaacagttttgaaattgacaagctaagtttaaagtctacatggaaatgcacaaggtcgggaatagccaaaatgctcttgaagaacaaggaaggaggtcttgctctaccagataccaagacttattataaagctatagtaaacaagataataaggtatgggtttagagatgctcaaatagaccagaaaggaatagagaacctgaaaacactctcatacgtaaatggacacttgatgtgtgacagaaatagcactgcacagcaatgaggaatggacaggcttttaaataatgtaggacaattgggtatccattaggaagaaaaaaggaattggacccctcct

SEQ ID NO: 68976 - DNA, 746 bp, Homo sapiens
tcggagggagtggtgcccttgcggtacagctcggggctctcctgctgcaggggtgtcccggtggacagcacctcgatgtcgtcacaggaggtctgacgcttcggcctctggtactccagcccgttttcccggtgctggaaggaaggggagaactctttggcagtgatcctgggcgatccgcgcctcctcctgggctttctaagctgctgtgagggctgcctcggcctttgcccgagagtgggaggtcctggaagccgcgatctcagccttctgcttggcgatggtggcggcccgctcagcggcctcaacggcgcggtccaccttctcgcggatcttgctggcccgcagggggatgaggttcttgcgcttgccgccgacgaggatgttctgcttgtacttgccctcctccttggtgccgtccgggaaggtcatgcagccgtagccatggcgccggttgctggcccactcgccctcgtacttgagcccgtccgagcgctggctcacgccgaagccggagcgtttgtcgttcttccactcgcccacgtaggtctcggtggtggtggcgtcgatgtcgtcctcgatgaccgccagctcggcctcagcctcgcccaggctgatggtggagtggatgtcgctggccgtggagctgacggtgctcatgcccgcctcgctgcgaaaggagctctgcttgctgcgttggctggccaggctgctcttggactccgacttgcgcagcttcagcccac

SEQ ID NO: 68977 - DNA, 747 bp, Homo sapiens
  misc_feature (1)...(747): n = a,t,c or g
ctagtccagtgtcgtggaattcctgggcagtgcctctttaagaagtcaagactcagcccttcctcccagggacatcttttcttgatactgacactccgcctgtcccccatctgggtcctgaggccagctagagggaggcctccagggccccgcatccccctcactgccacatctgcctcccaaccaggttccttgcatttatctgctcctgcaccttgcccagtccccccagccctgccatctggccctcctctctcctgcttcccgctcatgccaccatcaagccgtgaaatatccagacgctgccaatctgatcacccaactcgctcgcccaaggagcctccacggggaaatcccagctccttcctggggcccacgagcccctcctcagtctggcttatcccaccccacgcttcatcctggctaccccaaggtcgggcactgagcctcacacccagaacctcgcagggacgcatcctccctgtcagtttcacctagtatcctgctccccacaggcctgggggggaaaaagtctagagtgtgagccaccccttccctggcctcagtgtccccagctgtcagagggatgagatgacagcgggcccaccctcaggttgtcacgcagacctagtgctgcgtgtggtggagaggccgtgagtgttcctgtgtgcttctttcccccaccttcctgggttagtctgcagggccctcctcgagagcctgngtccttgggtcctggatcgttct

SEQ ID NO: 68978 - DNA, 438 bp, Homo sapiens
actgtgtcttgagagcctgtcaccggagttttttacctcagtggtgcagggtgtgctcatctccctgctgggctccctgggggctcgggctggcagcagtgaaagtattgctgccttcatacaacgcctcagtggatccagcaacatctttgagcctggagctgatggggcccttggtgagcaaaaaggatgctttggcttgctccaggaaggggcagccagaggaatgtagatggccttggtttaggggtattgccaaggtgggatgaggttgatgatctggttgtgggtgggcaggccaggtggtaaaggccattgctaacatctgcccttgtcccccaggattctttggggccttgctttctcttctgtgccagaacttctctatggtggacgtagtgatgcttctccatgggcatttccagccactacaacggg

SEQ ID NO: 68979 - DNA, 509 bp, Homo sapiens
ttagagtggcggactgccagacagaacccctcgagggacagagcaggaaagaggacaaggggtgggggtctcagcaggggcaaggcttcactaaagaataggggaccacggggtgtggagacacactggaatcttgtggaccctctgagcctagggtctgggtggtgcctaacagcaatgaaagggcagagttccaggattgcagatggcaaaacgcctgcgtggcagcaagtgggagtcttcactggcctgcccctccttctgtgtggggcactctccacagggcttccagctcatctagatgaggagctccaagccacactccacgactttagacatcaaatcctgcagacaaggggaggtaaggggaccccctgggcctcacggggtaggagtttcccacaaattcccctcattctcagcaccagcttctagaacatagagatgacaaacaagcgtgcacatgcaggtcttggggaaaggaatgatgcttgcttttctgatgtctt

SEQ ID NO: 68980 - DNA, 998 bp, Homo sapiens
agtttccaggtgtctggaaatgaagtatggaaatgaaatcatgaataaagacccagttttcagaatctctccacgaagtagaggaactcataccaatccagaagagcctgaagaagatgttcaagctgaaagagtccaagcagcaaatgcactcactactccaaacttggaggaggaaccagtcataactgcaagctgtttacacaaggaatattatgagacaaagaaagttgcttttcaacaacaaagaagaaagcagccatcagaaatgtttcgttttgtgttaaaaagtgaagttttgggattactaggacacaatggagctggcaaaagtacttccattaaaatgataactgggtgcacagtgccaactgcaggagtggtggtgttacaaggcaacagagcatcagtaaggcaacagcgtgacaacagcctcaagttcttgggtactgccctcaggagaactcactgtgtcccaaacttacaatgaaagagcatttggagttgtatgcagccgtgaaaggactgggcaaagatgctgctcttagtatttcatgattggtggaagctctcaagctccaggagcaacttaaggctcccgtgaaaactctatcagagggaataaagagaaagctatgcttcgtgctgagcatactggggaacccatcagtggtgcttctagacgagctgttcaccgggatggaccctgaggggcagcagcaaatgtggcagatacttcaggctaccattaaaaaccaggagaggggcgccctcttgaccacccattacatgtcagaggctaagtctctgtgtgaccgtgtggccatcatggtgtcaggaacgctaaggtgtattggttccattcaacagctgaaaagtttggtaaagattatttactagaaataaaaatgaaagaacctactcaggtggaagctctccacacagagattttgaagcttttcccacaggctgcttggcaggaaagatattcctcttta

SEQ ID NO: 68981 - DNA, 1523 bp, Homo sapiens
gggggccccataaaaaaacttttaccttgccagcccgcggtagtaaacctggatcctttaaaacggcccccccttttttttttttttcttgtttcaagtccaatttatttcacacaacacacaggctgctgagggaatccacctgcactgcactcagttgaacttccggcccagtgccgcgtcagagactaaaccatgggagaaagttcacaccctggcctgggccacccaccttcagctctctcctgtgcgtcaggacgcacgctggccccaagagcttcactcaacacggctgggtcctgggcggacgtgggcacagcacttgccaggcgcccctggcaggggctcttctcagtcctccgcaccgctctcctctccgctgtcttcgtcgtcgaccccaccctcggcgccctcaacctcctcactgtcctcttccgagtccgtctcctccagccactcctgagtttctgggtccatctccaccaaggccttccacgcctccatcctgtgcaggtccaggcagtgcaggtcgctgagggtgacctggcggtcgccggcctcaaacatgcccccatagacgtagagcaccccatgcttcacagccagcatggcgttggagcgtggacacggcccaggtgcggggctgccggcctcctcaaggctgtcttcgtcctcagaccggggctgccccgccgagcctggcgcggtgagcacctgcttaatggtgaccacggtgccatcctcggccaccacctccttgaccagctgcacaggcccctgggtgccagctcccccacacgccggcctgctaccaccttcgggctcctcttttctgccccgcctgcgtttcttcttttcagacttgggtcccttcagctgtccctcaaaccaacggttcctggtggcgtcgtagaagtacagatcgttgaagaactcgcccgacaggctctcctcctcttcctcgtcacagacacccccgaagaacagtgtctggtgattcggggccatggccacggaaaagccagaccgtggggtgggcttgacccccgaagggttcatccgagtccaaacccacttgtcttctcttccgtcctctggcttcagcaggaacatgtctgagtgccgtgtgcccttgtccacgtctttcttaactctctgtttcgagtagcccccatagacgacgatgccgccctggggagtgacggacatctggcagcctgatctgggtgtgggccccgtccctgacggggacagcttgctccatgtgaaggtgtccagattaaaggcatacacgtcgttgtagtagatgtaatccctggttagaagaacagcagctgtcagggtccgtaacattgggaaaagccctgacattaaaaactgaactgatttaaattaaaggtaaatttcctactgtttggggaaaaactcaaaccatttttctcctctgctcttacaccaacacaacaatcaacacagaaacgtggccggaattccaccgctctggactagtgatctgcgatcaa

SEQ ID NO: 68982 - DNA, 1219 bp, Homo sapiens
  misc_feature (1)...(1219): n = a,t,c or g
tggaattccccggctcgagcagccccagcagccctgctgtccgggacttggtggagaggcatcaggttagcctgtgtcgctcccagtccttctcccaccagcagcctttccgaagccacctcatgaggtcgggcagtgtgatggagcgcatagccatcacgccccctgtggcctctcctgttggccgccccctctacctgcccccggacaaggctgtgttgtctctggacaagattgccaagcgcgagtgcaaggtcctggtggtggaacccgtcaagtagcaccgtgccagctctgttccctcttacactccagagacccaacgcccccagaggggatccctgctcccgggctgtgcctcccctgggatgcctcccagacgggggtgaagaggcctggcagagctgcctgtcttgtgtctgctgatgagggatgggggaagaagctgtgaagtgggcgggcatggctgggactaagccaccagtattccccgagttcctgtggggggggctggccccacccctaggccagggcaagggttcccagagctcccttgtccccggccctttaccctggttctgagtttacaaagtctcttcctcattcccgttgagttctttcccacctctgacattccctccctccctcccgcagggctgagattagagggtggtgatggctaagggcccctgacagtgaccttcctgtctcaggggttggggacagggccaggtagcctcctgccccttatgtttacgtttgcagcctgaagcactttaatttttttttttttgggccgttccctgtaacgttattttccaactattgcattccaactgaaaaaaaactattaaatgcctgttcgggagggaaaaaaaaaaaaaggggggggcccctttaaaaaaacccttggggggcccaaatttaaccggggatggaaaggaaaaatttttttccttaaggggggccaaataaaaacctccttgggaattttggaaaaaaaccctttttttgggggggggccaaattgggcccaccccccccccaaaatttaaagcctttagggaaaaaaaaaatttttaaggggaaaagggggaaaaaaaaccccaaaaccctgggggttaaaaaatgggccnnnacccnnacctttaatacaantacaggcggnttgcttctgcctaacgatacccatcaagggggggcctcagaatctaatgcg

SEQ ID NO: 68983 - DNA, 377 bp, Homo sapiens
ccaccatgcctggccagcccagcagtttcttatcccatgtagcaaccactggtgcaggtggcagcctggtgcattggggagtatggggacctcctgctggcagggaactgcgaggagattgagccccttcaggtgagacctcattgggggtacactgaggagggacttgtcagggggacaggacttgcaccagggccactaactgtatccatgtctgaaggtggacgaagaggaagtgctggcattgctggaaaaggtgctgcagtcccacatgtccctgccagcaggaggtccccatactccccaatgcaccaggctgccacctgcaccagtggttgctacatgggataagaaactgctgggcgtcgacgcggccg

SEQ ID NO: 68984 - DNA, 1468 bp, Homo sapiens
  misc_feature (1)...(1468): n = a,t,c or g
ctctagtccagcgtggtggaattccgggtgaggaatggccccgccggggaggcgggggagggaggcctgggccaccctggggtctgacctttgctccacctcttaggtgctcacgacccagagtggtgccctgcttggtactgccactggatcctctggcttatgaagccgtccaggacaggaagggtggggggtggtccttagttctcttcgtggggtcatgcagagtggtttcctcgaggtcccacgcccgtctcaggaagccagaaacgcaagatgccgggcgctcggcccgaacccgtgccgcggcccaaggggcaaggcggataccgaggcaaggcctaaagggccggactctgaccgcaccctccggacactgcagggctccgccggccagaggcggccttggcgccaaccacacctagcagcggggtccccgggcccaccgatgcgccctcctagccccgcgctccttcgaggggttccaaggtgactcagagacgcagctgacacaattctgaggcccccaggtaagcctggcgataccggatggagaagttacctggtcttgaaaggcccagtccagccagcgagacccgcgtgcgctccgcggggaggcaagcctaaccaggggctcacctggaagcgtccccgccccctggtccttatctctgaatcgaaaccgaacctggacccatctagataattggactgagcaattaaggacgcttcgctcctaactgttagcattttttcctaaggctctcggaggcggaatcagctggaaaggaacattgctaagtaggaatttcaggcacctgtgaactgagcccactcaataatcggccctttcccttaaccaaactcagcaaaggaagaaagaccaagttgctgcggatgcacagagccacgtgggtgcgggtcctctagaaacaggaattcagagtcagtagatatggaaatgttatggtttgcagtcttcggaccatgctgctttcatgctgttcacatgattctcctcggactgcgaggtaaagtccaagaaacaagtcgaatgtttgtattttcatagaaaaaacatctgtaagggtgcacaccgactgttaaccacggttacgcggggaggggaaacaagggagttacatttttttactcccttgactttggattttgtatttttccagttgtatttactttcataatttagaaagctaataaaacatgtttaaagaaacagaagctagaaattctctaagaactctaggnnnnnnnnnnnnnnnnnnnnnnnnnnnnnnnnnnnnnnnnnnnnnnnnnnnnnnnnnnnnnnnnnnnnnnnnnnnnnnnnnnnnnnnnnnnnnnnnnnnnnnnnnnnnnnnnnnnnnnnnnnnnnnnnnnnnnnnnnnnnnnnnnnnnnnnnnnnnnnnnnnnnnnnnnnnnnnnnnnnnnnnnnnnnnnnnnnnnnngaact

SEQ ID NO: 68985 - DNA, 852 bp, Homo sapiens
ctcagccggtggaattcggggcccagacgggcgctttgtgatggggcccactgtggcggccccccaggaaaggtcaggccgggagcaggcagaacctcggactccagcccagcgtctggcccggtcctttgactgtagcagcagcagccccagtggggcaccccagcccctctgcattgaagacatcagccctgtggcaccccctccagcagccccacccagtcccttgccaggtcctggacccctgctccagtacctgagcctgcccttcttccgagagatgaatgtggatggggactggcccccgcttgaggagcccagccctgctgcacccccagattacatggatacccggcgctgtcccacctcatctttccttcgttctccagaaacccctcctgtatcccccagggaatcacttcctggggctgtggtaggggctggggccactgcagagcccccttacacagccctggctgactggacactgagggagcggctgctgccaggccttctccctgctgcccctcgaggcagcctcaccagccagagcagcgggcgaggcagcgcttcgttcctgcggcccccctccacagccccctctgcaggaggcagctacctcagccctgctccaggagacaccagcagctgggccagtggccctgagagatggccccgaagggagcatgtggtgacagtcagcaagaggaggaacacatctgtggacgagaactatgagtgggactcagaattccctggggacatggaattgctggagactttgcacctgggcttggccagctcccggctcagacctgaagctgagccagagctaggtgtgaagactccaga

SEQ ID NO: 68986 - DNA, 1760 bp, Homo sapiens
  misc_feature (1)...(1760): n = a,t,c or g
ttttttttttttgcaatgaaaaccctttaatgttgggctttctttaaataaaacagaaaggttgcagctttcccatggtggctgtaaggcaagaacagcagtgagggcgggcgtgttctatcgggcagtgctgcagcccttgactctggctcaaggtgggcttcctggaggcagcggcaaggaggcagttctggatgtgcaggcacagatgtaggggaacaggcaagcgggcacagggccctgagctgacaagcagtgacccctgcacccagctagatggggcaccccctctctgggagctgagggcatcagctggagcctcaggctgggaccagccccaactttgccttggtgactctgggccattccaggcctcagtttccccagctgtaaggtgaggcattaggcaggagggggtggccccagccagtgtcctagtagcctggtgtctccattagggagacctgagaagctgccaggagaggctctgctagcgcaaggcagggccggcccagcagctgacaaggaacatgctgaatatagaggacagaggagttaagaagacgcctgccggccaggccagagaggggcagctctaagggggtacagcggcctgtggtgctgtaggcccagaaagggtggggatcagcccaagtcacagagcatggccctggtgggcggcgaggggtgcgagtggacaaggacacccctgcagagtcccacccccactctattccctccaacaagggaacgcccagcaggaagcctgctgtctttccaggagcccctgtgccacctagtctgacccctctcagccacaaggctaccctcccgtccagcctgactggaggtagaggaggaggaggaggcaaggccgactgcagtggggagcccgggtgccccgtcctctgtcagcaaatgcctcccttccatctgcctctagccccggcctctgaccacccaggctctgccccaggcctgcaaccacctcagcggaagccagaggggctgcctggcagatgccgctctgacccttcaggagtgcccactgcacctgaatcaggcccaggccctggagagcccaggcctgtacccaggatgctctggtctggccctgcctcggcccttgcagtggtccgagccaggatctaggctcgggaggcacttgtgggtccctttgctccaggcaccatcctcccctacctaggcccacatgagtggcctcatcgtagggccaggcaggactctcctttgcccatccatccccaccttgagggcagagctgggtcaggatgccaatgccactcctccttctgcctagcgtggagcccagcacagaggggtatcaataactgggggggcccagtgggtggagcagggtgggccaggctggtcaggaggctactccagctggaacagagtatggctgagactgcccatctgtgggcagcccccaggcccaggatggtggccagggcagacggtgtgaaggtggcggtcactggtccttggtgacatcactgagcccactctccatgcggagcagctggctgctggcctcgttgtaggagatccagtgctgcagatcagcgggcagctcagggggctccaccctgcgctggcacaggtgctgcacgacgcgctcgggtgaggtgcccagcaggtgctgccggaagcgcagcagcgcgcacacgaaaccgtcccgcaggctgacaaagcgcgcctccaggtagaacgcgcggaagtcgnnaaaacgggtc

SEQ ID NO: 68987 - DNA, 518 bp, Homo sapiens
ctggtggatttcgtcatggccatcagtcccagtgaggagaccaagctgcagatgttcatgtggagccgcatcatcttcagcctgggctttgtcattagtggccactacaaggactttgccagggatgtggcagcctccatagcattcaccaatgacctgaacggtgagcacccgcacaaggcagcggacatggagggtctgtacacgctggacacagcagaggtggatgaccgcagctactgggtcaggttccagtcctcatccctggcatcctggagtgggaccaggagcagagtgtcatctatggctccactgactttgtaagatggtggtgtggcccccatcgtgttgcctggatctgctggagcatgagttaactgctcaagaccctgtgccactgcatgctcaaccagtgcaacgatgaggcggagctcttctcggttgagggcaagggtgtcactggcaatgacagatactacctgctgagccccctccccctgacctcagctttcctgcct

SEQ ID NO: 68988 - DNA, 1213 bp, Homo sapiens
acccagctaaacctgttccttgaagaaagggtgaacctcaaattcaaagcccctctctttctcttccctcatcagaatcggctcccagacacctgccactcgtgaatgcatctgataaactcactcacactgaggccttggggactgaggccctggcggatcacgggtgcccaggggctcggaggccgcctcctctgggaagcctgcccaggttccgatggactcccacaggcaatacccctgggccttcctcgcggcccctgttggccccaattcccccaccccctgcaaggtctgtgcctctcctgcagccccgccaccaactagggcgagaggagctcgcccccacccaaacgtattggttcgatgaaggaagggcccatggttctgccactggccctggacacccagtgctggtttcccgtggaagtccccctggactgagtggcggctgggtgctctagtgatttgcgacctggggcctctgactcccatcatgttgggaaagtcgttgaacctcaccggtgaaacgggcacagtgaagtcatttccccgaagtctcaggactctgtgtaaggctggggacaggggcttgttggggcctaagggcaccttgggaactgcaggagcccgttctgcctccataagacactcactcctggcagggtcccctctccgggcacagcccagatccacccccatcatccctctccatctgtggctccctgcccctcacagaggattcatcactctgttcagaatccccaggactccctagggaaggaggtcccagcctggcctcccaagaccgtgcttgcccaattccaggacttcctcacatggctcctacctccagcacagaagcggcactaaaccaggtggtcaatcagggagcaccaccgaggttctgaatggtccagggatgagcagtgatgcctcaagctaagccaatcaaagccttccctgggattgtctcaaggagtccgcagtgagattctgggtctcagtactgggaaagggtgaggctgaggctgcctgctgtcctgggggcctcaccctgccaccaacaggaagccacacagagggaagcagaaatgagacgcagccagtgagggcagggtacaaaggtgagatcccggagagacagatgctgggacatcatccttgggtactggttccaacagtgcctgcagatggagccaccctcggagag

SEQ ID NO: 68989 - DNA, 1596 bp, Homo sapiens
gggcccgatcccgagcccgcggccgtggaggttcccgcggggcgcgtgctcagcgcccgggagctcttcgccgcccgctcgcggtcgcagaagctgccccagcgctcgcatggccccaaggactttctgcccgacggctcggcagctcaggccgagcggctgcgccggtgccgggaagagctctggcagctgctggcagagcagcgcgtggagcgcctgggcagcttggtggctgccgagtggaggccagaagagggcttcgtggagttgaagtctcccgcgggcaaattctggcagaccatgggcttctcagagcagggccggcagcgccttcacccggaagaggccttgtatcttctggagtgtggctccatccacctcttccaccaagacctgccactgtctatccaggaagcttaccagctgctgctgaccgaccacactgtgaccttcctgcagtaccaggtcttcagccacctgaagaggttgggttatgtggttcgacgattccaaccaagctctgtcctgtccccgtatgagaggcagcttaacctggatgccagcgtgcagcacttggaggatggagatggcaagagaaagaggagcagctccagccctcggtccattaataagaaggccaaggccctggacaactccctgcaacccaagagtctggcagcctccagcccacctccctgcagccagcccagccaatgcccagaggagaaaccccaggagtcaagccccatgaagggcccagggggcccctttcagcttctggggtccctgggccccagccctggcccggccagggagggggtggggtgcagctgggagagtggcagagccgagaacggagtcacgggagccggtaagcggcgctggaacttcgagcagatctccttccccaacatggcttcagacagccgccacacccttctgcgcgccccagccccagagctgctcccggccaacgtggctgggcgggagacagacgctgagtcctggtgccagaagctgaaccagcgcaaggagaagctctccaggcgggaacgggagcaccacgcggaggccgcgcagttccaggaagatgtcaacgccgatcccgaggtgcagcgctgctccagctggcgggagtacaaggagctgctgcagcggcggcaggtgcagaggagccagcgccgggcccctcacctgtggggccagcccgtcaccccgctgctgagtcctggccaggccagctccccaggtaccccctcagcctgccacatcttcgagggccactggcagctgaggaatcacaggactttggaaagggcatggatgaactgggatggattgaggcttaaggaagatgtgggaggagggagtggacccacaagcacggtcagttctccggcggctgcagcagggcctgtgtgggaaggcttgttttctgtgtccttgtagccgtggtccttcagcatatctctgtgctgcagacaacacaccttcctgatggaggtgtccggtaagtttccaagcagtgccgtctctgcagtaccagagtggggatgtccctctgatctttgccctggtggatcatggtgacatctc

SEQ ID NO: 68990 - DNA, 837 bp, Homo sapiens
ttttttttttttagggtttaaaaaggggcttgtttaattaattaaatacaaggatgaggccaggcagggcgggggaggggcgccacccacggaaagcacacgcctctcggagccgcctcccctgcaaacggctggaaccaggtcccagtgatcagcgactcctgggagagtggaggggtgggcgcaggtctctccgagcccctggacactggagaggggcccagttatagagttctggaacccacagccctacctacccctgctccagacaggcccctgccagggctggggccaaccaagactcacaaaggaaaacggggccccagtcccccacccacccccacagactaaggcatctcactagcgctgccagaagagggtttgaggctagggacagagaacacagagagccgagggctggatggggcaggaccctccgagcccagctccagaagggcgtcccctgcctccctccccccaggatcccaggcacccatccctggatcctgccaggccggggctgggtccaggtgcacaccagtgccatccaaagcccccctgtccccaagcgagaggcaggacggttctggaacaaaagggggtaccaaaaacctcctgcagccaacagtggggggatccacctttctgggtctgacatggaaccggggacccttctcattccaggctgggggtcctcaataccccccccaagaggaaatgcaacccaggccacagcaggacgaccgctgacaaggacacaaaggtggcccccgaggaacaagtccccaccccacccaagttcagctcagagaccccccgaattacaccacacgggaa

SEQ ID NO: 68991 - DNA, 964 bp, Homo sapiens
gtccagtgtggtggaattcccgggagcctcctcaggctccctctattaaagccgatctgactccgcccagccagatgtcccgagtgcgccaaggactgtcctctcacccactcctggattctgccctgacctccatcctggacactgccttgataacatagacccttccactgacaccctcgctctcacaccccctccagctttccgaccccacaccgacaactccccggcttccagaccctaccagcactaccctaaccctcagccgacagtctcagccccaccgacccactttcttggcatatagccccacttaagacccctcctctacttccttctgagtcctctacaaagacatccgggtactacatttccatcccttccctattttgacaccaaattatggtgtagacagccctcccccaaccccaggccagtcaggcacaatccccccaccccccaaacgtcctggactgcacagacctcccactccagaccatccaggcctggttcccaagacccgatccttcccctgcaaccagacagtctacaactgccccctccagcccattttctgccgtgaaaccccagccagccacaccagactctggaaccctttttcgactgccccaactcttggacaccaggccaactagaacacccaacaccaaactgtacagactctcccaccccaacctccccagactctgcacggatgtcctaggccccctccccaactctaaccagaccccatccccctaagtccctttgtcttgacccccaagtcttcaaccaagatatcctcggcaaccccacctcccaccctcctcctctttctcctttcaaagacccaactgagcacccgctctgattccccacagcctttctccctgggcaccactcccttagtctttcccaggcttactctcccgaataaatgtgctaggagctctgaaaaaaaaaa

SEQ ID NO: 68992 - DNA, 1353 bp, Homo sapiens
cctgaatagcgcggtggatttcgtgatggtaagcagcctgattccatgggggctcgaggaggtccctaccctgctcaccatcagggtccacaccacacccaggagacctcggcccgttgccactgaatctcaaccccaccgcttaccagctctgtggccttgtgggaattacctgagctttttgcctcaatttcccaatctgtaagtagatatttggtgggatacgtggtatctgccttttgggactccaagaaggcgcatgtgcacacggggccagtaatgttctggcctccgggagactcccagctgctgctcagcccttgcttggagctccgcgcctccgaggacgaagcccccgtgctcctctccccacaagccccgctctggacctggggtgccacttgaacaagagagaagttgctggacgcttccaggagtgcacacctttctgtccccgctacaggctgtgatctcctgggtctggcctcgcccgacgcctggagtctgagttgaagtgtcgggtgctggggatcttctgaaaggacccaccgtgttttgactttgttggaaaacagatgtggtgtgtgaacaccaggctccctctgtccgggccccactgggcctcatggctcggagatgcagcttcatctccatctctgaagcccctcctggggcctcggtggtctctggccaggctgcagagcctgggggtggtcatgagcaccctgggtacacggtggggcctcactggggaggtgcttgtttcaggggcttctgactccagccgtcacgggacttcttcctggggtcgttcctgtagctgtgcccttgtcattcaactttaaaaaccctctcggtgtatagaggtcagtgcagccccctgccgccgccctgttttctcgagactgtacactaacccctgccgccaccaccctggatcctcagcacagggactgtcgtgctctccttgttccctttccaggtgtctctgtagccttcaggactgtcgctgctgcagccatcctgggctaagagcttttgctggcctcgggttctactgagcaagagtcccccaggcccagcgggctcagtgcagcaggcggggtgggacggtgccgccaagagagggcagcctggggctgggggcatggacagaaactgaaggaaaggcagcctgtgggagctgcgcttttaaaataagcggcatggggggccggtggggggcgctgtgacgggggagcaggtctcttctgtagggactgggttttgattaagtcagtagcaggattaagtcattgggtcatcagaaaatctcatggataaagttcaaggggtttgtgaactttaaaaaaa

SEQ ID NO: 68993 - DNA, 1081 bp, Homo sapiens
  misc_feature (1)...(1081): n = a,t,c or g
ttttttttcaaaagatgaaataacacacttagcatttattgagcagctacgggatgtcttgccttgcgctacaagaactttccattttcatttcctttcacccctaggaggtagggattctttgccttccagcacacacagcagcctgggcccaancaagcctctaggattctctaggaacagaagctcaacagtgacaaaccatgtctgtggctgagccccaaaagtcgctggcctgtgttgggtgtgaatggatgttaggtgcctcgagtcagcgacagagaccaacggcaagggtagggatctcagagtgcattgttagagcctcggggtctggtccaggaggccagcattgttgacattttgtgatcttggaacccttctccctgcagcagagggagcattagggaggccgggagacagtgggagcaccccctcactgtaatgaacacaagtcccgtagggggctgatggagcagggccacctcaatggacccactttccctccccagcccctgatttgatcagggccacagctgccggctagcaggggtggatgctcccccgcccacttcctggaggtccctgaatgtccccatgagtagggctgaggaacaggccagaggtctggcccacctggggcccctgggcatggagaaggattggggcccaggcactttggtgaggccagtggaggccacagtcccacccagggccctgccccggctacctatgttcataatccccaggccaggatagagatcctcgctgccctctctccaggaacccctgccccgcctcaccagtgtctgggtccctccctgggcctgggttcctgcaggacctggcttgggcaccaccctgcatccctgatttccacctgtgagcctggcctgcccacgtcccccacccttcttctgccctctccccacctgggtcagcggccccctggaggcgacagggctgaggcccgtccttgcgctaagaattcctccccccaaaacctgccccatacactgaacaggcaagactactgctaaggcagtgatctgggcgccgcaggccttcccgaattcccaca

SEQ ID NO: 68994 - DNA, 2446 bp, Homo sapiens
  misc_feature (1)...(2446): n = a,t,c or g
cgggaggcttccccgcgccggccgcgtcccgcccgctccccggcaccagaagttcctctgcgcgtccgacggcgacatgggcgtccccacggccctggaggccggcagctggcgctggggatccctgctcttcgctctcttcctggctgcgtccctaggtccggtggcagccttcaaggtcgccacgccgtattccctgtatgtctgtcccgaggggcagaacgtcaccctcacctgcaggctcttgggccctgtggacaaagggcacgatgtgaccttctacaagacgtggtaccgcagctcgaggggcgaggtgcagacctgctcagagcgccggcccatccgcaacctcacgttccaggaccttcacctgcaccatggaggccaccaggctgccaacaccagccacgacctggctcagcgccacgggctggagtcggcctccgaccaccatggcaacttctccatcaccatgcgcaacctgaccctgctggatagcggcctctactgctgcctggtggtggagatcaggcaccaccactcggagcacagggtccatggtgccatggaactgcaggtgcagacaggcaaagatgcaccatccaactgtgtggtgtacccatcctcctcccaggagagtgaaaacatcacggctgcagccctggctacgggtgcctgcatcgtaggaatcctctgcctccccctcatcctgctcctggtctacaagcaaaggcaggcagcctccaaccgccgtgcccaggagctggtgcggatggacagcaacattcaagggattgaaaaccccggctttgaagcctcaccacctgcccaggggatacccgaggccaaagtcaggcaccccctgtcctatgtggcccagcggcagccttctgagtctgggcggcatctgctttcggagcccagcacccccctgtctcctccaggccccggagacgtcttcttcccatccctggaccctgtccctgactctccaaactttgaggtcatctagcccagctgggggacagtgggctgttgtggctgggtctggggcaggtgcatttgagccagggctggctctgtgagtggcctccttggcctcggccctggttccctccctcctgctctgggctcagatactgtgacatcccagaagcccagcccctcaacccctctggatgctacatggggatgctggacggctcagcccctgttccaaggattttggggtgctgagattctcccctagagacctgaaattcaccagctacagatgccaaatgacttacatcttaagaagtctcagaacgtccagcccttcagcagctctcgttctgagacatgagccttgggatgtggcagcatcagtgggacaagatggacactgggccaccctcccaggcaccagacacagggcacggtggagagacttctcccccgtggccgccttggctcccccgttttgcccgaggctgctcttctgtcagacttcctctttgtaccacagtggctctggggccaggcctgcctgcccactggccatcgccaccttccccagctgcctcctaccagcagtttctctgaagatctgtcaacaggttaagtcaatctggggcttccactgcctgcattccagtccccagagcttggtggtcccgaaacgggaagtacatattggggcatggtggcctccgtgagcaaatggtgtcttgggcaatctgaggccaggacagatgttgccccacccactggagatggtgctgagggaggtgggtggggccttctgggaaggtgagtggagaggggcacctgccccccgccctccccatcccctactcccactgctcagcgcgggccattgcaagggtgccacacaatgtcttgtccaccctgggacacttctgagtatgaagcgggatgctattaaaaactacatggggaaacaggtgcaaaccctggagatggattgtaagagccagtttaaatctgcactctgctgctcctcccccacccccaccttccactccatacaatctgggcctggtggagtcttcgcttcagagccattcggccaggtgcgggtgatgttcccatctcctgcttgtgggcatgccctggctttgtttttatacacataggcaaggtgagtcctctgtggaattgtgattgaaggattttaaagcaggggaggagagtagggggcatctctgtacactctgggggtaaaacagggaaggcagtgcctgagcatggggacaggtgaggtggggctgggcagaccccctgtagcgtttagcaggatgggggccccaggtactgtggagagcatagtccagcctgggcatttgtctcctagcagcctacactggctctgctgagctgggcctgggtgctgaaagccaggatttggngctaggcgggaagatgttcgcccaattgcttgggg

SEQ ID NO: 68995 - DNA, 781 bp, Homo sapiens
  misc_feature (1)...(781): n = a,t,c or g
gtccagcgtggtggaattcattttctttcaagaggcacactctggtaatctgagacactgcattactattcttctttctaagttctttccaagcacagctgacatcctgtatttcctctaggctttccagagtcatggccacaaaccccttatcagagttgattaaagatcatggttcaaagcttgatacaccagaaatgtgggctaaagctgcagccaatgcatctatcgcccctttctcttctatcagtatctgagctgatggttggaaaaaaatcaacagctgcataataaatggaagccagagaccttatggcatccatgcttttaaatttaactaaatccattgtagaaggaacacctacacatttaaaagtaatttgtgttttttgttccacatgtcttagttgacctttctcttggttgataaaaacatatacaaacccctgtctgtccagctttacccacgcatccagagagatggatataggactcaatatcctgaggaggagaactttgaatcaccaggtcaactacaggaatgtccaaaccacgaggagccacattggttgccaccaaaactttataattacctctctgaagccttttagtgtaatttctctttgtgactgtgcaatgtccccatgtaaacacagtgcattctgttttgtgcggattcatggccatgtcagttacattcttcttcgtctcacagaaaataatagccctcccttcagatccactgtagacttgaaggacatctcattntcatctgtgtttt

SEQ ID NO: 68996 - DNA, 1139 bp, Homo sapiens
ggcaagcgcgagctgctgcgactggctgtgtcctgcgccagcggctccccgctggacttcatgcgcagcttcatgctcaaggacatgctctacctggctggcctctcctgggacctggtgcaggcgggcagcattgagcgctgctggctgctgggcctgcgggctgccttcgagccccggcccggcgaggacagtgctgggcagccggcccaggccgaggaagccgccgagcacagcagggtgctcagcgacctcacccacctggcggctctggcctacaagtgcctggctccggaggaggttgcggagtggctgcacctggacgatgatgggggtccgcccgagggctgcagggaggaggtgggcccagccctgccccctgcagcgcctccggccccagccagtctgccctctgccattgggggcggagaggacgaggaggaggccaccgactatggagggacctcagtgccgactgccggggaggccgtgcgggggctagaaacagctctgcggtggctggagaaccaggaccccagagaggtggggccactgaggctggtgcagttgcgctcactcatcagcatggcccggaggctggggggcatcgggcataccccagcaggcccctatgacggtgtgtgaccaggccagcccagtgacctttctcctgctgcacttggagggaggggacatacacacagtctcccatctctcctcccctccccctggggtggcccaccgcatgggtacagggggttccaggaatccaaatccagcatggcttggaggagctctgttggtgagaggtcgccctgcctcactggcaccctgggggcacagctggaagagaggcctggcccatgctcctctcagggcaggcacatgtacggggcatacaaggcacagcgcctgttggaacaggtggctgtgttcctgctctggcccccgtggggctgggcctccgcccctgcaccagtcacatgcactggacgagggccgaaactcctgtctgctatcgagccctggtgctatgtggccccggagccacagcacaatcatctcagtggcgaagcacaccacttgattctattttttttttaacacattaaaatctgtttttaaagataaaaaaaaaa

SEQ ID NO: 68997 - DNA, 970 bp, Homo sapiens
  misc_feature (1)...(970): n = a,t,c or g
gtggtggaattcgccacccggaggagccgctctcccggctcagccgcaagaggaagctcctggaggacacagagtcaggcaagacacttctgttggatgcctaccgtgtgtggcagcagggccagaagggtgtggcctatgacctgggccgtgtggagaggatcatgtcggagacctacatgctcatcaagcaggtggatgaggaggctgcgctggagcaggctgtgaagttctgccaggtccatcttggggctgccgcccagagacaggcctcgggggacacccccaccactccaaagcaccccaaagacagccgagagaacttctttcctgtgacagtggtgcccacagcccctgaccctgtgccagctgactctgtccagcggcccagtgatgctcacaccaagcctcgccctgcactagctgccgccacaactattatcacctgccctccgtcagcatcagcttccaccctggaccagtccaaggaccctgggcctccccggccacacaggcctgaagctacccccagcatggcctctctgggcccagagggagaagagctggcgagagtggcagagggcaccagcttcccgcctcaggagccacggcacagtccgcaggtgaagatggcccccacaagttccccggcagagccacactgctggccggcagaggctgccctgggcacaggcgctgagcccacctgcagccaggaggggaaactgaggcctgagccgagaagggatggggaggctcaccacctcnnccatcacacgcactgcttgcgccattggtgccacccctcgagccaaggccaacgcaaagtactagaggtccagtaccaatgagtgaccccacctgtgtccgcgatgctcacctctaatgttcctccaccgacagtccctctaaggcgctctattcattccagagccacttgggcccctgcttgcctaccttgagcctgccg

SEQ ID NO: 68998 - DNA, 616 bp, Homo sapiens
gcgtgtggcggaattctccactgctcctatacatactgcgccacctagaagctgctagactgatggaatgttggtatggtctgctttagtgccaggtgggagacaataccctgccaagatgtgccaccgtctcctgcacacagtatacttattgaatcagaaagcctgtatgatgctgtgtctacaacaggaatatatagatttcagaaccaaggagtggaggcaggagtgaccccacttaccatcgcacccaacgaaccactgagggacttagtacttcccatgcccacaactccaggttctacagcatcagaagtcctagttctcagagactgtataccttctctaggcaatattgcaagaatcccattgaactacagtctgctgctactatgtgggcactttggactctgtgttcagggaccagtaggcaagaagtcaccatctagtcaagggtaattgaccctgaactgcaggaggaggcaagcctgctgtcagaggatagtggcgagagcaatgtgtgtggaacttagcggacccactggaggcaccctctgtactccttgcccagttgtaactgaatggactagtgcagcaaccctggtctgagaagggt

SEQ ID NO: 68999 - DNA, 673 bp, Homo sapiens
ttttttttttttcattgagaggttatgcatttattaggccaactttgatgacatacagacatgtaggtttggtcccaaacctgtcttgggtcccccctcagcaggatgtgtgaagtgcctaagtcctcagtctttggagatctctgggcctgggtgggggtttgcaggaaggaaaggagagggcgacatcaagggggacagaatggaggaggtccagcctccatcacgaggagatgtagttggacacctcaatcagatttctgtcggggtctcggaagtagatggacatgataggcccttttgcccctgttctggggactggcccctcctcaatagggacatcacaagccttgaggtgctggatcatttcctccaaaggcacctctgtgatcagacatatgtccagggagccaggaactgggtgagcggctttgggttcaaattcctttcccacctcgtggaggttaaatttctggtctccaaaacacagtgctttccggtcttccttaaaagtcatgacctccatgcccaggatcttggaataaaacatggtggtgtctttgatgctcttcaccgtcatcacgatgtggtcaagtctacggataagacatgggggaggggtctgactgctgtccctccatgagtgtagttccgggaattccaccgcacggta

SEQ ID NO: 69000 - DNA, 1120 bp, Homo sapiens
gcctctcccagccgcacatgggccagagcccctgctggcagaagacagggcctggggaaggtgaggctccctgacccgtccttgtccgaggccagaggcagccctgctcccacctgggcccagcctcacctcattcaagcatagggtggatggcacccaggtcaggacacctgggagggctgcccaagcccaggggttgttgaggggcccttgttccccagagcgagggccactccttcttcatctccctccacccagcccttctacccatgggctgagcccaagaaacacacttcatcttttattttttcttacaaaaggccttcatatcatcgtttgtcttacaaaaaccaaagtccttgtctctgagtttgaaaaacatcttcccagaataaatgggaaaggatctcttataaatatatatatatgttaaaaaagcaaaacatgttcataaagcatcttcctttccagtttcttttgttccttcgcttcctggggccaagactagagtcacacagccgcctacccgctctccctctgctctttccgggagcttccttcactggcccccagggtccgcctggagtgggagagcccagcagggcccaggcatgcgttaccagcacatggcagggcccgccgtgcccagggactgcacgttgcggagggcagggcggacactgtcctcataggcactcggttctggggacgttagggctcgtcagctgggccacagcatctcacagatgaggagaccgaggtccagagggaacagggcccagctgtggtcacacagccctgtctgcacacatccccgaggttgggactgagaacttacgtggtgtggcagcaggagggggctggccatctcactggctgagagcccggccccagctgccctgtctctctctggcttagatgtagggctttgcgtggaggggtgactggaggccaggccctgggaagcccatgagtggcacctcacactcagacccgctgggcagggcctctccaccgccctctgttgccttcgggcctggctccaaggggaccttcactccctccagttccaggggcccagcccctggccccacctgccctttgtcctgagccgctgctg

SEQ ID NO: 69001 - DNA, 584 bp, Homo sapiens
  misc_feature (1)...(584): n = a,t,c or g
agcggccgccagcgccagctggtagtacccggctgcatcaaacgggtccttcaggtcgtagaagatgatgtcaccgagcaccaggtacaccttcacgtagtagaggggtctcctcgtcaaactccagcggcgagttgcagagcgacagggccttgaggtagaagtgctctgccagctcgccatggcccagtccggtgttgcagggcggccagccgggtggtaggccacgcgctcgttcagccggtcccccagggtgatgctgagtgctagggccatgtgggcaaactccaagccctcctggggctcctcccagcgtggccaagcagtgccaccagcttgttgcacagccgcagctccgccttgcgtatgcccgtagtcactgccaagggcatgggcccggtcccggtagaaggacacagctttctcccgctcccaggccccgtcgaagaagatgtctccagccgcctcaaacagctccagccccaggttggggtcgcctgtgtacagggccacgttctgtgccacctggatgtagaggtccaccatgctcntctgccgcaagatgtaatagatcttccctgctt

SEQ ID NO: 69002 - DNA, 791 bp, Homo sapiens
tattgcaagagaacactcagatcgagccaagtgaacccaaaaaccaagaagaaaagaaactgtcccaggtgctaaatgagttgcaagtatcacacgcagagaccacattggaactagaaaagaccagggacatgcttattctgcagcgcaaaatcaacgtgtgttatcaggtgcaaggaaagatggtacaggaaggggatggataacaggaacgtgggaaccactcacaggactgggaatgaagcaagacctaagtttccagggctgataccaggaggaactggaggcaatgatgacaaaagctgacaatgataatagagatcacaaagaaaagctggagaggttgactcgactactagacctcaagaataaccgtatcaagcagctggaaggtattttaagaagccatgaccttccaacatctgctcaaagatgttgcttatggcacccgaccgttgtcgttatgtttggaaacactgccagcccatggagatgaggataaagtggatatttctctgctgcatcagggtgagaatctttttgaactgcacatccaccaggccttcctgacatctgccgccctagctcaggctggagatacccaacctaccactttctgcacctattccttctatgactttgaaacccactgtaccccattatctgtggggccacagcccctctatgacttcacctcccagtatgtgatggagacagattcgcttttcttacactaccttcaagaggcttcagcccggcttgacatacaccaggccatggccagtgaacac

SEQ ID NO: 69003 - DNA, 443 bp, Homo sapiens
cggaattcccgggtcgagccccacttctgaggtagagctattgggccccctgtgctccagggaggagttgctgctgtagttcatctccaggctgcaggtggacacctgatcccccgagggagaggcagggcccggccaaggctcgccccgcccagcaccatgactgtgcaccgccgggagctcctcgggaggcggggagccctcgaagcacagggcaggtccccggcccgagctgcccgagccccccgcctcactggcacgacaggggctccggctgcggtagatgaaggggtcatagtcgctgctgagggagctgcggaaggtggagcagctcccgtacacgccctggttgctgacctcagtgcagtctaccacagagtcactggaggaacagtggcactggccggagctgctgctgctgctgctgtcgctgcctgggcagc

SEQ ID NO: 69004 - DNA, 710 bp, Homo sapiens
ggtgttccaggaagggcaggttcttcagcagagaccagaacacggaggagggctgggggcacgcctggcccgagaaggggctgggacaggactgcacgcccacacgcactttcttgccaaagccgcgcggcactgcgtgcatggccggctgggcgggcgcgcggtcggcgcgcggcgcggagtcagcgacagagcagacaggcagggagagggagcgcaggtgacgcagccgggccaggagctggcagaggtggcggcccaggccctccgagctgtggtggtgggcggccgagaggttcaggtggcgcaggttgcagcaggacgccaccagcgtctccaggatgctgctgacgatgtcgtcctccgccttgcggagcagcgagtctggggacaggcagtggacgcagccgctgaggttcaagctggccaggctccgcaggtccttcccgccgatgatgacctgctggatcagatggccgcctgacagggtacagcggctgaaactgaagtagaacgggttgttgaatttcatgtgctgcaggagggaagagccgttcagccaggacttgggcagctgcagggcatccagcacgacattgcgcgccatggagtccaggaggttcttggtggcgccgctctccgcgaagctgccacggacggagatgaggaaggcgtggaggttcctaggagtgcggtcgctaagcacagcc

SEQ ID NO: 69005 - DNA, 1026 bp, Homo sapiens
cgttccggaattcccgggtcgagtctagttattttttacgcaagaccagcgtgcttgtgcacggcagtgtttttctctggtgtctgtgtgtttggtggtaacagcagcgagtcagatgagacaggtgtgggaggccacttgtttgtggagaagactcagatcagtgcgcgccgacttccttgtcagcacagaaccaagcttgaaacatgcacttttaaatcaataccagaaaagaacaacgaaaatagtggcttgctttgttggcccttcctttgtactgggctctgtgcagggcatgtcacctgagctgtcactgtgtttagtaccagccccccccttaataggtgtggacgtcttcctgaacagcctgaagcagacggtggtgaccctggcaagcagcgcagacgtgctgagcaccgtgcagtcggcctcccaggccatgctgcagagcggctggtccatgctgttgcccaccgctgagaagcaggcccgggcactctgctctcctgtcctgcggagtttcaggcaatgaagtgaacataagtccaggtcatcgattggtgattgatcttctggtgggcagcttgatggctgctggagggttggagtcagccttacacgcagccattactgcagagatccaggatacaaaaaaagaagcacggaaggaaaaagaaatttatgaacaggaagcaaatgcctcaacatttcatagaaggaggactccattggataaaggccttattaatacggggatctgtgagtcttctggcaaacagtgtttgcctctggttcagctcatacaacagcttcttaggtaaatcatattagctgtattgtattgggttttatttatttacttttttgttttttgagacagagtttcgctcttgttgcccaggccggagtgcagtggtgcgatcttgactcactgcaacctccgcctcccaggttcaagtaattcctctgcctcagcctctcgagcagctgggattacaggcatgcgccaccatgccccactaattt

SEQ ID NO: 69006 - DNA, 1753 bp, Homo sapiens
  misc_feature (1)...(1753): n = a,t,c or g
gggatcgggccccgcggacgctacgccgcgacgaataggagggccgctgcggtgagccttgaagcctagggcgcgggcccgggtggagccgccgcaggtgcagatcttggtggtagtagcaaatattcaaacgagaactttgaaggccgaagtggagaagggttccatgtgaacagcagttgaacatgggtcagtcggtcctgagagatggacgagacgccgggatccgaggtgccgggtgacaaggccgccgaggaacagggagatgaccaggatagtgaaaagtcaaaaccagcaggctcagatggtgagcggcggggggtaaagagacagcgggatgagaaggatgaacatggccgagcttactatgaattccgagaggaggcttaccacagccgctcaaagtctccactgcctcctgaagaagaggcaaaagatgaggaggaggatcaaactcttgtgaacctggacacgtatacctcggatctgcattttcaagtgagcaaagaccgctatggagggcagccacttttctcagagaagttccccaccctttggtctggggcaaggagtacttacggagtgacaaagggaaaagtctgctttgaggcaaaggtaacccagaatctcccaatgaaagaaggctgcacagaggtctctctccttcgagttgggtggtctgttgatttttcccgtccacagcttggtgaagatgaattctcttacggtttcgatggacgaggactcaaggcagaaaatggacaatttgaggaatttggccagacttttggggagaatgatgttattggctgctttgctaattttgagactgaagaagtagaactttccttctccaagaatggagaagacctaggtgtggcattctggatcagcaaggattccctggcagaccgggcccttctaccccatgtcctctgcaaaaattgtgttgtagaattaaacttcggtcagaaggaggagcccttcttcccaccaccagaagagtttgtgttcattcatgctgtgcctgttgaggagcgtgtacgcactgcagtccctcccaagaccatagaggaatgtgaggtgattctgatggtgggactacccggatctggaaagacccagtgggcactgaaatatgcaaaagaaaaccctgagaaaagatacaatgtcctgggagctgagactgtgctcaatcaaatgaggatgaagggtctcgaggagccagagatggaccccaaaagccgagaccttttagttcagcaagcctcccagtgccttagtaagctggtccagattgcttcccggacaaagaggaactttattcttgatcagtgtaatgtgtacaattctggccaacggcggaagctattgctgttcaagaccttctctcggaaagtggtggtggttgtccctaatgaggaagattggaagaagaggctggagttgaggaaggaagtagagggagatgatgtgcctgaatctataatgctggagatgaaagccaacttctctttgcctgaaaaatgcgactatatggatgaggtgacatatggggagctggagaaggaggaagctcagcccattgtcactaagtacaaggaggaggcaaggaagcttctgcccccctccgagaagcggacaaatcgccgaaacaaccgaaacaagcgtaaccggcagaaccgaagccggggccaaggctatgtgggcgggcagcgccgaggccacgacaaccctttttanaaaaaaaaaa

SEQ ID NO: 69007 - DNA, 1500 bp, Homo sapiens
gtaattcccagctcgaggagagcctctaggggcccttggaggggaaaaggccctaggaggcctggcaaagggacagctggagaaggagatgtcagtactgagactgagcaacagtaacttgctggaggagttaggggagttggggcgggagcggcagaggttgcagagggagctacagtccctgagccagcggctgcagcgggagtttgtgcccaagccagaggcgcaggtccagctacagcagttgcgacagagtgtggggctgctgacaaatgaactggccatggagaaggaggccacagagaagctgcggaagctcctggcctcccagagcagcggtctccgagggctgtgggactgcctgcccgcagacctagtgggcgagaggagtgcacaaagcaaagcagcggagtccctggaggagctgcgggcctgcatcagcaccctggtggatcggcaccgggaggcccagcaggtgctggctcggctgcaagaagaaaaccagcagttgcgggggtccttgtccccgtgtagggagccaggcacctccttaaaggccccagcatccccccaagtggccgctctggagcaagacctggggaagctggaggaagagctgcgggcagttcaggccacgatgagcgggaagagccaggagatcggaaagctgaagcagctgctctaccaagccacagaggaagtggctgagctaagggcccgggaggcagccagcctacggcaacacgagaaaactcggggttcgctggtggcccaggctcaggcttggggccaggagctaaaggctctgctggaaaagtataatacggcctgccgggaagtgggtcggctgcgggaggcggtggccgaggagcgccgccggagcggggacctggccgctcaggcagccgaacaagagcgccaggccagcgagatgcgggggcgctccgagcagtttgagaaaacggcagagctgctgaaagagaagatggagcatctcattggggcttgccgagacaaggaagccaagatcaaggagttgttgaagaagctggagcagctttcagaagaggttctagcaattcggggagaaaatgctcgccttgccctgcagctgcaggattcccagaagaaccatgaagagatcatctccacctacaggaatcatctactgaatgctgctcggggttacatggaacatgaagtgtacaatatcctgctgcaaatccttagcatggaagaggagtgaggcagcctcactgtgtgccctcagggatacgagattctctgttggaataagaaaccctggttgacagaggcttcatcaggctgtggtgggcgggggtgttggccactaggcaatggtatgggcagggcttcacctgacattatggacctcagacctgagaacctggaccctggaatcagcatggatgagaccagaggaggtatggatggaaacaagctctatggaaaataaagcatgaggcaggaaaaaaaaaa

SEQ ID NO: 69008 - DNA, 1527 bp, Homo sapiens
tctactctagcgtggtggaattcctcggcctcgcggcgacggcggcggtggcggcttggacgactcggagagccgagtgaagacatttccacctggacacctgaccatgtgcctgccctgagcagcgaggcccaccaggcatctctgttgtgggcagcagggccaggtcctggtctgtggaccctcggcagttggcaggctccctctgcagtggggtctgggcctcggccccaccatgtcgagcctcggcggtggctcccaggatgccggcggcagtagcagcagcagcaccaatggcagcggtggcagtggcagcagtggcccaaaggcaggagcagcagacaagagtgcagtggtggctgccgccgcaccagcctcagtggcagatgacacaccaccccccgagcgtcggaacaagagcggtatcatcagtgagcccctcaacaagagcctgcgccgctcccgcccgctctcccactactcttcttttggcagcagtggtggtagtggcggtggcagcatgatgggcggagagtctgctgacaaggccactgcggctgcagccgctgcctccctgttggccaatgggcatgacctggcggcggccatggcggtggacaaaagcaaccctacctcaaagcacaaaagtggtgctgtggccagcctgctgagcaaggcagagcgggccacggagctggcagccgagggacagctgacgctgcagcagtttgcgcagtccacagagatgctgaagcgcgtggtgcaggagcatctcccgctgatgagcgaggcgggtgctggcctgcctgacatggaggctgtggcaggtgccgaagccctcaatggccagtccgacttcccctacctgggcgctttccccatcaacccaggcctcttcattatgaccccggcaggtgtgttcctggccgagagcgcgctgcacatggcgggcctggctgagtaccccatgcagggagagctggcctctgccatcagctccggcaagaagaagcggaaacgctgcggcatgtgcgcgccctgccggcggcgcatcaactgcgagcagtgcagcagttgtaggaatcgaaagactggccatcagatttgcaaattcagaaaatgtgaggaactcaaaaagaagccttccgctgctctggagaaggtgatgcttccgacgggagccgccttccggtggtttcagtgacggcggcggaacccaaagctgccctctccgtgcaatgtcactgctcgtgtggtctccagcaagggattcgggcgaagacaaacggatgcacccgtctttagaaccaaaaatattctctcacagatttcattcctggttttatatatatattttttgttgtcgttttaacatctccacgtccctagcataaatattctctcacagatttcattcctgtttttatatatatattttttgttgtcgttttaacatctccacgtccctagcataaaaagaaaaagaaaaaaatttaaactgctttttcggaagaacaacaacaaaaa

SEQ ID NO: 69009 - DNA, 983 bp, Homo sapiens
cggaccggaattcccgacccgacccacgcgttcgttaggagcaagtaggggcagggggcagatggacccggacagcctcagagtcggccccacaaccttcctcactaataggtcgcctcagtgctctaaaccgcagctcccacacagagcctaaaccagccaaacacagtcacctgcccctccagactccctggtgctgacttggaacctggatagagggaaacttttcctcccctctcataagctgggctggaggccctgaccattcctctacccacagtgggtgaggctggaggacccccacgggaagccatacttctacaatccagaggactcctctgttcgatgggagctgccccaggtccctgtccctgcccctcgaagcatccataaatccagccaggatggtgacaccccagcccaggccagccctccagaggagaaggtcccagcagagctggatgaggttgggagctgggaggaagtctctcctgccacagctgctgtgaggaccaagaccttggacaaggcaggggtgctccatcgcaccaagacggcagacaagggaaagcggctccggaagaagcactggagtgcctcctggactgtgctggagggtggcgtcctgacattcttcaaggactcaaagacctcggctgcaggcggcctgaggcagccttccaagttttccacccctgagtacacagtggagctgaggggggccactctctcctgggcccccaaagacaaatccagtacgaagaatgtgctggagctacggagccgacaaggctctgagtacctgatccagcacgactcggaggccatcatcagcacctggcataaggccattgctcaaggcatccacgagctgtccgcagagctgcccccacaggagagcgagagcagccgagtggacttcgggtcgagcgagcgcttgggaagctggccggagaaagaggaggacgcgcgaccgaatgcag

SEQ ID NO: 69010 - DNA, 378 bp, Homo sapiens
tgatctttgggtcagcaatgaaatcaagatggaaattaaagaattatttgaactgaatgataatagtgacagaacttatcaaaacatctggcatatagcaaaagtggttctaagaggaaagttcatagcattaaatgcctatatcaaaaagtctgaaaaagcacaaatagccaatctaaggtcacacgtcaagtaactagagaaataagagcaaaccaaacccaaacccagcagagggaaaaaaaattacaaggatcagagcagaactaaatgaaattgcaatacaaaaatgtataaaatataaatgaaacaaaaagctagttctttcaaaaaaaatgatagactgttagtgagataaaccaaaaaaagaagggagaa

SEQ ID NO: 69011 - DNA, 842 bp, Homo sapiens
cccaggccgcagcctgggattccccagggacccccccggagccgccgcgtctcccatggacttgcccggggactccaggtgagagcgtacccgggcggcccgcctgtcttgaccccgggagatggggatcctggcgaccgtgccgggaaactacagagccagcgacaggttcgggcgaccgtcctctgcttctttcaccctccagcccgcctggccagccgcgtctgtgccgccagcctctgactcgagcattatggggagccaggagcccgaaacggccgaggctgcagctcccgggggccccttctcccctggaaaaggcctctcggcgggtcctggccgtggtgctagaagatgtcatggctgttcacatggtccccgtggtgccctcaaagcagacctccataccacagcaccacagctaccatcaggatcctgtccacaggcagccgcctgcctcgccaccccggcaggccgggtggtcctcgcaggccaggcctcccgaccctctgtgtttgtgtcgcgagcccttgagccgcatccaccggacctcttccaccctgaggcggcgatcaaggacaacccctggcccagaggagggcccttcacaaaaggtggaccgggccccccagcccaccctggtggtgatgctggaagacatcgccagtcctagaccccccgctgagggcttcattgatgagacccccaacttcatcatcccagcacaaagagctgagcccatgaggatagttcgccagccaacgcctccacctggggacctagaacccccattccagccatctgctctgcctgcagaccctctggagagcccaccaacagcc

SEQ ID NO: 69012 - DNA, 1623 bp, Homo sapiens
ttttttttttttaatgaaataaatgcccatgtttattacaagatagaaacattaaagatttcttaggcaaaagggcaacaggtatgaaagtattcacagggcgccaaatttacaacagcttgctccaggcgatttacgtgaatcctggcctgtcccagcatgaggccattgacaacctggcgcctctgccaagcctgtgtccaggtgcctggcatgaccaggcgtgatgcccaccaccacagtccctgctgcatctcagaggccggggacctcccacacaaggatctcgttgcgggcggccgtgaagagcagcctggcggacggtgtaaacctgcacaggtgcactgcgttgtcgtggccggcaaagtcttgggcagtccccatggcacagtctaccagcctcagcatgcactcagcaaagccaacagccaggaggtgggtcccgggggacaggctcagggacatggcaaaaaagggcagtggtatcttctccaccacctgcttctggcagaggttgtagatgatcacctccttgtaaacaccggggcccacgtacatcaggagcgccccatcccaagggcagaaggcagcgagggagggtggcaggtggccctgagtctccgtggtggcaggcattgggaaactcaaccagtccacaagctcacagtggttccgcagccagtcggaggcccagacgctgacccgctggtccccactggcagccagccataggtctgtgccctccacccctaagtcttcacactctttgcacgtgacacagatggtagagattggggcgccctggtggtcactcagcacacggaaggttgtccctgtgcaggggtggctcacagccacgagcccatccttgtctccagagaggacagtctgaccatcggtggagaaggcaacagtggtcagcgccaccgggtgggggtgcatcttgagctccatggccgtgcgggagacgctgaagatgcgcagggagccgtcaccgtagccagccgctagccgctgctgctcagggtggccacagcacggggggctccatgccaggcagaggcagctctggttcagcacctggaactggatcacaagctccatgctggccaaggcccacacccgcacactcccatcctcactgcatgtggcgcagtgggactccccggggctgaagaccacctcgttcaccttgctcctgtggccactgatgagacgtgtgctggtgccctcggcccagctgacaaaccacagcgtgcccgccgtggtgcccacgacgcccatgtccacgctgtcatcgaagctggcactcaccacagccccgtccagcaccagctcgtgttccatgaacacagaactggacctcagggtgcagggaaggagagaacaatgggtctcaaggccgatgacaagagccagctgggtccccagccgaggcagggccctcagcattgcatctcaggacctggctgtgccctcccggtggaagaagagaaagcccatggagctggggcttctgggcccatgcccgtactcgacagcagccagtgaggcccaggccacacccaagcctgtcccttggaggggctagcaggcggccggtctgcagggcggccttgcggg

SEQ ID NO: 69013 - DNA, 1267 bp, Homo sapiens
ttttttttttttgagtaatgccgactttatatcagcacacccagtgcccccacgttcccgctggcccaggtcccggagaccatgatggcacccacagtggacttcgcaaaggagcgtggggaccccgaaggccaggccacccctcagatgggggtcccatgctaaagcagacggtgccggtgccgcaggctgtctgagacccacggtggagcccgggcctggcgtgcgggaggcggccacgacggcgcctttctcccaggaactccgggagggaccccaggactcagcgccagggcagccttggcaggtgcagtgaggcagtgacttgtgggggttagatgtgggcctgccccacgtgggcagggatcagccaggcatgggggtccagcggatccgagcggggccacagagctctggaggacttttctgcacaatgaatttctgcttaaaaacagagatcaagaggaagctctatcctgcagctccggaaatgggtggctgcgtgcttggggtctccgccacgcgggaggacagcccagaggcaccctggtctcaggcagctggttcctaggctgtgtcctccccactggccgggcaccggctggaacggcacgaggaccagcctcactgttctcagaggggtctcgggccactgggtgtggtggtgctggaggagtcctgcccgctgtgggctctggagggcacggcagcagagcccctggcttttctaggcagagcggcacctgccccatagatcgtgccagctttggctgcaggcgctggggcctcaccgtgtttcctgggggggcccggaccccccaaggcctcgatctgaagctctgaggtctcatggatgcctgctcctggtccgataaacgagatggctgtggtggggaggagcctcaggcggcccgggaccctttggcgtccgtcgctgggaggcggagggactcagagccgaggctgtgcccaggactgtcccgggcgccgggcgatgccaacactttgtgctggttcccgccaaggggtcggcctccgggtccctgccgccaagtgcgtggcgtggtctcggcctccaggtcagacattgctgatacgggcctcccccgggaaggcagcgggatccgtggccctgtccaggggccgctcccgcctgacgtagcgcggcttccgtacgggctgactcttgggtccgcctgacccagcaccactgaagcgatggctgctcaggagggcctggcggaggccggctgcgtctgtcctcggg

SEQ ID NO: 69014 - DNA, 500 bp, Homo sapiens
tttttctcttccttctccttttctttctccttcttccttttcctcttctccttcttttcttctccttctcccttcttctttcttcttctccttgttcttctcctcctccttctttcctcttttcttcgttcttcttcctcttccctcttttctttcttttcttctgctttcttcttccttttttttcttcttccttattcttttcttctttcctcttttttcttcttcctctttcttcttcgttcatctttcttcttcctcttttctttcttccctctttcttctctttttcttttttcttttctttcttcctcttctaagaatgtttcttttttcttctttcttcctcgttcaatcttcttcctttctttccattcttcttccttctttcctcttctttcttttctttcttcttcctcttcttctattctccttctttcttcttcctcttttcttctttcacctcccacttttcttcttcctttcttttctcctttatt

SEQ ID NO: 69015 - DNA, 1590 bp, Homo sapiens
  misc_feature (1)...(1590): n = a,t,c or g
taaatctcttctagtgttagcaaagtatttagcacaggaaagatcttataaaatgaaataatgcatgtaatgatgcattttccaagtagatgattttaacaaactgtaagcttttatgcctggccttcattgtgtcttttctgcctctgtcaggcgaactgtgatgaagagccttatacttaggaagacacaactacctttgaacagtcctttgtgaaatctaatgatcgcaacgaacgaaataaaccagaacatcgttcttcaagccaaggacccttgtcatccattagagcggtaatcaagagatcttctcggacttctattcagagtgaacttcatcgagatagaaggcgcccagagatcaccattgtggcagctgagccactgaggccagcctcgtggtttccaggaaccccacccccaggactgggatttcctacatcatctgcagcaggctcttggaggcctaatgagctggttcctgctgagctcccaccatcttatgaacaagttataaaagaaatcaaccaagttcaagttaatactacaaataataataatgctgctgctactccaaggcacactattacttctgcaactcagactgacttttcagaagaaatagacaacgatctgcctcaaacactacaggcacctctcaagcctcttcagcctttctcagcagtctcgtctggcaatcttccaacaaatgtggcacctttaatcgtctttgatatttctgaagaaccgaattgtccagaaaaccccagtgctacaagatgtccagtgccaaaaccaagatcaaaaagcaacctcagaccaatacccagagattctcacattaaagagcaaagtcaacagaaaatcagcccagcagccgtacgagaggagtcatccccaggccggccccagtctctgctggacaacgctagcacctcagacagtcaggcagtgatgaacattatgaacacagaacaaagccaaaatagtattggttccagaattaaagtgtttgagggtcagacaaacatagaaacctcaggactgcccaagaaaccagaaattactccacgttcacttcctccaaagcctactgtttcctcagggaaaccttctgtagctcccaaaccagctgctaacagagcttctggagagtgggactctgggactgagaacagactcaaggtgacctccaaggaaggactcaccccataccctcccctgcaagaagcgggaagcatcccagtaaccaaacctgaattgccaaagaaaccaaaccctggccttatacgaagtgttaatcctgagattccgggaagagggcccctggctgagagctctgatagtgggaagaaagtgccaactcctgccccgcggcctttgctgctgaagaaatctgtttcctcagaaaaccccaccttacccttcagctccacctgaaacctgtcactgttcctccccgactcgcaggggcaatcacaagccaaagcatacaagtcactgggagaanggggcccccagccaaccccccagttccagttaatatagttattgcacaagttcaataaaaatctgctctttgtatgacaa

SEQ ID NO: 69016 - DNA, 659 bp, Homo sapiens
aacatttgcagtataaggtattgcaggaaagagagaattatcaacagtcttctcaatcaagcaaagcaaaatcagcagtaccttcctttggtataaatgataaatttacactaaataaagatgatgccagttacagccttatcttagaggtacagactgcaatagataatgtcttaatacagagtgatgttccaatagatttacttgatgtggataaaaattctgctgttgttagctttagcagctgtgattctgagtcaaacgacaacttccttcttgccacttatcggtgccaggcagatactacaaggctggaactcaagattcgctcaattgaaggccagtatggcacactacaagcatatgtgactccaagaattcaacccaaaacctgtcaggtccgccagtaccacatcaaacctctttcactccatcaaagaactcactttattgatcatgacagacccatgaatacactgaccctaacaggccagttcagttttgctgaagttcactcctgggtggttttttgtctgcctgaagttccagaaaaacctccagcaggagaattgtgtgacattttactttcagaacacctttctagattacacaacttgaaagtacctacagaaaaggagagggagtttttaaatctgaca

SEQ ID NO: 69017 - DNA, 1071 bp, Homo sapiens
gggatacggggggcagtggccttgggcacaaacagcctgaagcagcaggaacctggacttatgggggatcccggggcccgagtctactcctctcactccatgggggcccgggtggacctggagcctgtctcaccaaggagctgcctcaccaaagtggagctggccaagagccggctggcaggggccctgtgcccccaggtaccccgtacgcctgccaaagtgccaacctcagccccaagcctgggcaagcccaataagagccctcacagcagccccaccaagctcccttccaagtcaccaaccaaggtggtgcctcgacctggggctccgctagtcaccaaggagtcccccaagcctgacaaagggaagggccctccctgggcagactgtggtagtaccacggcccagtccacacccctagtacctggccccactgacccaagtcagggccctgaggggctggccccacactcagccatcgaggagaaggtgatgaagggcattgaggagaacgtgctgcggctccagggccaggagcgagcccctggcgccgaggtcaagcaccgcaacaccagcagcatcgccagctggttcggccttaagaagagcaagctgccagcgctgaaccgccgcacagaggccaccaagaacaaggagggggctggcgggggctccccgctccggagggaagtcaagatggaagcccggaagctggaggccgagagcctcaacatctccaagctgatggccaaggcggaagacctgcgtcgggcactggaagaggagaaggcctacctaagcagccgggcccggccacggcctggtggcccagccccagggcccaacacggggctggggcaggtgcagggccagctggctggcatgtaccaaggtgcagacaccttcatgcagcagctgctaaacagggtggatggcaaggagctgccatccaagagctggcgggagcccaagcctgagtacggggatttccagccggtgtcttctgaccccaagagcccctggccagcctgtgggccccggaatggcctggtgggccctcttcatggctgc

SEQ ID NO: 69018 - DNA, 759 bp, Homo sapiens
ccacgcgtccgagatgaggtagttggcaacacaataatagtgggggatgttaatactccgctggcagcactaggcagatcaccaagacagaaagtcaacaaagaaacaatggacttaaactataccctagaacaaatggacttaacagatacttacagaacattctacccaacaagcatagaatatacattgtatacatcagaacacgggacattctccaaaatagaccatatgatagggcacaaaacaagtctcagtaaatttaagaaaatcagaattatatcaagtactctctcagaccacagtggaataaaattggaaattaattccaaaaggaacactcaaaagcatgcaaatacatggtaattaaataacctactcctgaatgattgttgggtcaacaatgatatcaagagggaaatttaaaaattctttgaactgaacgataatagtgacacaacctatcaaaaactctgggatacagcaaaagtggagctaagaagaaaattcatagcattaaatgcctatatcaaaaagtctgaaagagcacaaataaacaatctaaggtcacacctcacagaattggagaaactagaacagtccaaatccaaacccagcagaagaaaagaaataacaaaatcagaacaaaactaaatgaaattgaaacaaaaaaatacaacagataaatgaaacaaaaagctggttctttgaaaagataaataaaattgataagcattagcaagattaatcaaaaaaaaa

SEQ ID NO: 69019 - DNA, 430 bp, Homo sapiens
  misc_feature (1)...(430): n = a,t,c or g
nnnnnnnnnnnnnnnnnnnnnnnnnnnnnnnnnnnnnnnnnnnnnnnnnnnnnnnnnnnnnnnnnnnnnnnnnnnnnnnnnnnnnnnnnnnnnnnnnnnnnnnnnnnnnnnnnnnnnnnnnnnnnnnnnnnnnnnnnnnnnnnnnnnnnnnnnnnnnnnnnnnnnnnnncagactttttgatgtaagcatttaatgccatgaactttcctcttagcactgctcttgctgtatcccagaggttttgataggttgtgtcactattatcgttcagtcaaagaacttttaagtttccatcttgatttcgttgttgacccaacgattattcaggaacaggttatttaatttccatgtatttgcatggtttcgagggtttcttttggagttgatttccaattttattccactgtgatctgagagagtgcttgatan

SEQ ID NO: 69020 - DNA, 461 bp, Homo sapiens
  misc_feature (1)...(461): n = a,t,c or g
ttagtgagcccaaatcaataaattcagcctgatgcatctgtatgttccttccagcattatcccacacccttaatatccattcccgtgcctgttctccaaatttctgcttatataaattagaaaactcaattcaagtgtagctcacctccccatgggtcacactctgaacctcacttctgtgggcccatcgggactttagttataggtctagaagcaaacaaaggtgttgagggtgctagaggagaatcgatattatcttgcctggcaactgcctcaggggaggccatcactgttgcctcaggcagcacagggtttatctcctcagacaaaggtggaaaggctgatggcagcatgggtcggggagaggatgttgccactattgnggatgccattttcctttctctttcttctgcctattanacctccactcctatnaaaaaaaaaaggaaggaaattggtgg

SEQ ID NO: 69021 - DNA, 401 bp, Homo sapiens
agatgaacacatataatcaatttctctctactaacaatgaacatatggaaatctaaattaaaaacataataccacttattccatagaaaattaaatagtttggtataaattgaacaaaatatgtataggacttttgtgctgaaaattacaaaatgctgatgaaagaaataatagaaataaatgaagacacatggtctcttgatagattggaaaactcaacttagtaagtatgccagttctctccaaattgatctgtaggtttaatggcattcctgtcaagattccagtaaggtttttctcagctttaaataaacttattccaaaatttgcataaacagtcaaagtcataaacagttgaaacaatttgggaaaatttttctcataagttttgagaaaaagag

SEQ ID NO: 69022 - DNA, 1148 bp, Homo sapiens
tccagtctcagggccctgccctcttcccttttattccaccaatctcttgggtggggagtggcgtggggaatcagaagcaccaggaagcctgggaaaggagaagccactgcagctgccccagacaccccaccccataaaggtttaaagaatgggccctcaccccatctggcaatcagcggagggggtggggcacaaaggcgagcagacactggtcaagcttccacttcatgtaaacaaggaggccgtggcactgacccctgcccagccaccgacagtccggtggaggcgtgtgactgagatgcttcggaccctctcatttgggatccagcgtccctgaggccaggacggaggctgcagggcagaaggccagttggcgtctgatgtgcaaactggtgcagtgtgcgacctgcgctctccacagcacagggcagggcaggcaggcatccacacgtcctgcccaccaccatcccgcagctcaggaaatcacacagttgctaggcttggcagaactgggacttgttttacctgagatgtcagcactggaattctcgttgggcctcttccccgtcagaaactccacttcaaaggtctcgggggaaacagagctggccatgccattgggcgccgcaggccttttggctcggcgactgaagagcctgctgctgaagcgcccggcgggggcggcctccccccgggccgcttctcccatgccatttcggctgggtgcctctcgggatttgggcttcaggtctctgtgcatgtgagagaccatcctgccatccttctggctcagctctcccaaggggatgggctccacggggggcagcacctgctccaccgtaaccaggtctttcaggaagctctccaggcgccaggccgactcgccaccgctggcgccctcctcctgcccctccgggttgccgcccgcctcccgctgttgccgggcagcccagcgcatcatctccccaggcgggtggcggcagcctgacaccaaggcgtacttggggttgataagctttcgagccacagtggaggagtaatggaggccaaccctgcccgccaggctcagctgccggtacaagtccacctcctcggagatggcgtacagctcccggaactccgtgtcaaagggctctacgttctgtcct

SEQ ID NO: 69023 - DNA, 719 bp, Homo sapiens
aaagaacccccaaatgggggctctgggtctggctctgacaccagaccaacattctctctttcctcctccaggccaccttgctgggtctggcagccctaaacaaggcctacccagaagtgctggctcagggacgcactgcccgtgtgacgcttacatccccttggccccgacccctgccttggcctgggaataccctgggccaggtgggcacccctggaaccaaggaccctagggccctgctgctggacgcactgaggtccccagggctgagggcactggaggctgggacggctgtcgaacttctggatgttttcttgggcctggagactgatggtgaagagctagctggggcgatagctgccgggaaccctggagcacctctccgtgaacgggcagctgagctccgggaggccctatagcaggggccacggggactggcccttcggctctggccaaagctgcaggtggtggtgactctggatgcaggaggccaggccgaggctgtggctgccctcggggccttgtggtgccaaggactagccttcttctctcctgcttatgctgcctcgggaggggtgctgggcctaaacctacagccagagcagccccatggcgtctaccttctgccccctggggccccctttatcgagctgctcccagtcaaggaaggcacccaggaggaagctgcctccaccctccttttggccgaggccagcagg

SEQ ID NO: 69024 - DNA, 487 bp, Homo sapiens
aattaatgaactaaaagaagaaaacttacatgatgctctctatcaatgcagaagatgcaaaatttagcacacatttatgattttaaaaatctcaggaaaaatagacatagagggggattttcctgaacttgataaagggtaaacaccataagccttcagctaacatacttaagggtgagactgaatgctttgtccctaagatggggaacaaaccaaggatattagttctcaccgcttatccaacatatggctgtaatttctagccagtgcaataaggtaagaaatggaagtaaaagtcatatagattggaaaagaaggaataagactccatatttgcagattacatgattgtgtacatagaagatcccaaggcatgcacaaataaactcctacaactaataggtaagcttagcagggttacaagatacaagatgacacacaaaaatcaattgcatttctgtatactaacaatgaacatatggataaa

SEQ ID NO: 69025 - DNA, 1094 bp, Homo sapiens
ccggtttgctgttaataaatatgtgggtaaatatctgtttggggctctcagctctgaagactgtgagacccccaatttcccacttcacacctctatatttctgtgtgtgtgtctttaattcctctagcaccactgggttagagtctctctgactgacctggtcttggcaagtggtgtccatttgtgggggctcatatccaggtcgaagggtcaccagagcaatggttggaatgggaaactagctggaggacacccgagtactcttaaagcaatccctgtcgtgcgtaagaaggggagctcggaagtgtcagggtaacaatgggacaggtatggggtctggttcatttcaccttggaactttttcacactggtaatgaggaggaacaagagtatagcgaagtaacagaagaggttacagagcatgtttattttgccagctaaagctaaaagcagcaaaggaaggaagagattcatccctacccttcttgcaccccctcccttattaattttgatgaagatgaccccccaaaatctttcctttcctggaggacactgggcaaaaagtaattgccccagttgactgtttcgagcagcgcctcatgtgacagctcttagttctattcaggcaggaattcgagcaagctagacaagagggtgatttagaggcttggcagttccctgttagaatacaccccccagatcaacagggaaatattatagctacatttgagccttttccttgtaaattactcaaagaatttaaacaagctattcatactaaaaaagaatgtagaaataatcagcaagtcagctgccagataggggaaaaaagaaaactgctgagtctgaaatatgtccaacatgtaaaaaaggaaaacactgggctaatcagtgtcactctaagtttgataaagaagggaacctgatttcaggaaatgccatgaggggcctgtcctgggccccattccaaactggggcatttccagctcaggccattccctcacacccgtacaatgtctgtcccccgccacagccggtagtgccgcagtagatttatgctgcacaaaagctgaggaattcctgcgcactgcgct

SEQ ID NO: 69026 - DNA, 666 bp, Homo sapiens
caaagtataaataaagagcaggagcaggaagatttttttttctccccaaaggcttgctttgttgtccaggctggagtgcagtggcacaatcttggctcactgcaacctctgcctcctgggttcaagcgattctcctgcctcagcctcccgagtagttggaactacaggtgtgtgccaccacgcctggctctttttttttctttaatagagacaagctttcaccgggttggccaggctgatctccgactcctgacctcaagtgatccagttccatctggcgtaacaaaggtcatcccaaattctacttttctccaccttgttaaaggatctcttgctcctcctcctccctccatcctacaggtaactcctcagttacctttaatgggatttgtggccagagtccaagaaaatatttcagatacaccacctccaccgccacctgtggaagaaccagtctttgatgagtctcccccacctcctcctcctccagaagattacgaagaggaggaagctgctgtggttgagtatagtgatccttatgctgaagaggacccaccgtgggctccacgttcttacttggaaaaggttgtggcaatttatgactatacaaaagacaaggaagatgagctgtcctttcaggaagaagccattatttatgtcatcaag

SEQ ID NO: 69027 - DNA, 585 bp, Homo sapiens
acaacatatcaaaaacttggggacacagccaaagcagtgctgagaggaaaattataacaatgcatgtgtataatagaaaagagtaagtctcagattaataacgtaagcacccacctcaacaacctatgaatagaaaagcaaacctaaagtaaacaagaggaaggaaataaataagagcagaagttattgaaattcaaaacagcaaaacaaaagataaaatcagttaaacaggaaataaacaaaattgacaaatctgtaccaggactgaccaaaaaaaaagagagaggagacataaattgccagtgtcaggaatgaatcagatgactcactgtggaccctgaagatatcaaaaggataataagggaataatatgcacatgcattggacatcttaaaagaaatggacaaacttcttgaaaaacacaaactatcacaaattatccaatataaaatatatcatttgaataatcttaaaattactaaggaaattgggttcataattttaaaacttgcaaaaaagaaataggtagacccaagtggtaagaattataccacacatttaaaatacagttaactggtagagtgc

SEQ ID NO: 69028 - DNA, 394 bp, Homo sapiens
ctggaatttgaaatcacaaacaagaccatttacatcaacatcaaaaaaacacgaaatattttggtattaataaaatatgtgcaagatccctaagaacaagactaaaaatctgatgaaagaaatatatctaaataaatggagagatagtccatgtgcacaaataggtagattcaatattttcaagatgtcagttcttcccaacttgatctggagattcagtgcaaccctatcattgcaatcaaaatcccagcaagttatttgtgaatattaacaaactgattctaaactttatatggaaagggggaaaaaaagaatagctaactcaatattaaaggagaagaacaaagtcagagaaccgatgctactcaacttcaacaatcagcaaaagaaaaga

SEQ ID NO: 69029 - DNA, 514 bp, Homo sapiens
tgagctagatgccattaacaaagtcttccagcaaagaaaagcccaggccttgatagcttcactactgaattttaccaaacatttaagaagaactgtttcaaaaaatagagaataattccagactcaatctatgaaaccaatattcctctgataccaaaaccaaagaaagtgacagggcagtatctctgatgaccactgatacaaaaatcatcaagaaaatactagcagagttcagcaacacattaaaaacatcattcatcatgaccaagtgagatcccagggatgtgcaaggatggttcagcatacacaaatcaattaatgtgatacatcatatcaacagaatgaaggacaaaacccatgtgataatctcaattgatgccaaatggctgggtgttgtggctcccacctgtaatcccagcactttgggaggccaaggtagatggatcgcttgaggccaagaatttgagaccagcctgggcaacatggcaaaacctcatctctaggaaaaaaaaaa

SEQ ID NO: 69030 - DNA, 495 bp, Homo sapiens
gttgctgtatggagttcctcgttttcagctgaagaagttcctttagtgtttctcataaggtgggtttgctaacaagaagttcagatttattcatctaggaaagtctgtattttaccttcatttttgaaagatggtctttgctggatataggatttttggttgagaatttttttttcttcattgagtgctctgattgtgttattccactgccttccggcattcattgtttttactgagagtcagctgttaatcttattggggcttcctttataagctattggtcatttttctcttgtagctttcaagattatctccctgtctttggttggcataataaagattacatctgatcttttgtctgtggttcctggcacagaggttcaaaaactcttgggatttcctgagtgagaagagtgtcctcttatgctaatgaagtgacttgaagtgggcccctagatagccctcgggatggggggtggtaccagaaagacaact

SEQ ID NO: 69031 - DNA, 509 bp, Homo sapiens
aaattttaaacaagtggtatcaagatcctgaagcatttctctgaagagttgtaacaggagatggaacatggctttaccagtaggatcctggagacaaagcaatggctcctaaaagggggaagtggcccagtcacagcagaagtgatcaggagcagaagtcacagcaacagttttttgagatgctgaagacattttacttgttggctttctagagggccaaagagcaataacatctgcttatgatgagagtgtcttgagaaagccaaaactttagcaaaaaaatgcccagaaagcttcaccagagggtccttctccaccaccacaaggctgctgctcattcctcatcaatcaagggcaattttgcaagagtttcaatgggaaatctgtaggcattcactttacagtcctgatttggctctttctgacttctttttgttttctaatcttaaaaatctttaggtcggtcatggtggctcatgcctgtaatctcagcactttgagaggccgag

SEQ ID NO: 69032 - DNA, 472 bp, Homo sapiens
tggacctgacctttcaatgcatctttctgtgcggcgtcggccacgatgatcttgccgcctgatttgctagtcttccccaccggaaaggcgtctcgaagcccctgcaggtgctccccgaggccccagccttcccggaagccgcgcttctgcatgatgttgtgcaccaccgttcccaccacgttagtgaggaaggagctgctaggacggcttggagatctcagtctgtcctgttcctccttcactgggggaggaatggctgctttggaagaccatgactgaggtcttgaatcctcttcataaggaaaatctcggggtgactcttggtctttctctaccaaagaagtgggaagggcaatggcagctccaccctactacttttcctcctctctccctcctaatcttccccttcatcagaatctggatttggtcgccttgatcagaactcccctaacttcttgcctgtcttcaggcg

SEQ ID NO: 69033 - DNA, 678 bp, Homo sapiens
attacagagcaggtttgtttgccaactaaagctaaagcggcaaaggagggagaggttcatccctacccttttgcaccccctccttattttgaagaaaaagagtggcctgaccctccagatctttcttttccagaggacagtgggcgaaaagtagttgctccagtgactgtccgagcagcaccttgagcgacccctctcagttctattcaggcaggaattcagcaagctagttgagagggtgatttagaggcttggcagttccctgttagaatacaccccccagatcaacagggaaatattatagctacatttgagccttttccctttaaattactcaaagaatttaaacaagctattcatactaaaaaagaatgtagaaataatcagcaagtcagctgccagataggggaaaaaagaaaactgctgagtctgaaatatgtccaacatgtaaaaaaggaaaacactgggctaatcagtgtcactctaagtttgataaagaagggaacctgatttcaggaaatgccatgaggggcctgtcctgggccccattccaaactggggcatttccagctcaggccattccctcacacccgtacaatgtctgtcccccgccacagccggtagtgccgcagtagatttatgctgcacaaaagctgaggaattcctgcgcactgcgct

SEQ ID NO: 69034 - DNA, 451 bp, Homo sapiens
  misc_feature (1)...(451): n = a,t,c or g
ctggctactacccctgcacctgttcccctgctgtccccaggcctctctgcctgaatctgcctctctctgcctcttttctcctgtccctccaggagtctctctgcctcaaccactctctctgccccttcatctctctgagctggtgtgtctggtcctaccctctgtttggggagctgtctggctctgtcccccacctcttggccagcctgtgtctcctgtctatgactgagcccaattgcctgttgcctttctgcaggtgtttccacgagcctatccctacccacctgtttgtttctgagtctgcctgtgtgtccctttctccctgtctctgcctgtcttccaagctcccctagcatcccctcctcccgcccatctgtctttctgtcccttctgtgggnctgtctgttcctggtggctgtttctcaanggctggtttctttgtaaanttaag

SEQ ID NO: 69035 - DNA, 830 bp, Homo sapiens
gaaaccccacaaatgtgaaaaatttggtaaattctttaacaagtcttcaaccctttctgcacataatataattcatactggagagaaaccccacaaatatgaagaatgtggtaatgcttttaaccaattctcaaatcttactaaacaaaattaatactgaaaatgttacaaaccagaaaaatgtgaaaatgaatttaacaaaaccttcaaatttttctaaacataaaggaaatcatactggtaagaaattataaaaatgtgaagaatgtgacaaagcctttaaatggttgtcacacttgattgtaggtaagataattcatactggcagaaactcccagaagtgtgaagaatatggcaaaactttaattcctataccttattgcacaggaaagcatttatacttcagaaaatgttgtactgatataaagaatgtagaaaagccattaatatgtgcttacatcttattcaacattagagagttagtacttaataaaagcattataaatgcaattactgtcaaaactcagtataaggttttgttttagtgtgtgtttttgtttgtttgtttgttttgtttgtttttttttaaatgagactacgtaatactctctcccaggctggagtgcactggtgcaatcttggtttactgtaacctctgccttccaggttcaagcaattctcctgcctgggcctccagaatagctgggactacaggcatgtgccatcacgctcggctaagttttgtattttttagtaaagacagggttttactgtgttggccaggctcatctcgaactcctgacttgaaatgatccatacacctctgcctc

SEQ ID NO: 69036 - DNA, 369 bp, Homo sapiens
gatgaatctggatgcaacccagctcatgatgggcagttcttgcctcatagttacttgacgtcatgtggtcagactctgtaactctacaggtgcctaatagcatgccataaactggttttacaaacatttatagttctctatttcagataactttaagaaccctaagggtctgcactacaattctactattggagtttaacctgtggcttcacatgatgcctagagttgtggaatactataattatgttgcagtctggaatttctaaagagccttttcctgttctggggcccactcagagatggaaaccttccctattggtaaataggttggaggagtatccaaaatgcatttatagctgaggctgcaac

SEQ ID NO: 69037 - DNA, 1310 bp, Homo sapiens
cagctactcaggaggctgaggcttgaacctgggagagggaggttgcagtgagccaggatcatgccacttgcattctagcctggatgacagtgagactgtgtctcaaaaaaaaaatcctgggatttaatattcatttttggctattcttactttcttactcaagattttgaggcctcaaataattgttatagttgttcaaaactgtattaatctaaaggacattttatcaagaaaattttaattcctttctctgttcaggaaacgattatatatggaagtatttgaatatactcgccctatgatgcatcctgaacctggaaaattctaccagattaatccagaagagtatgggcatccaaatacctggaaagagagtttccagcagttgtataaaggtgcacatgtaaagccaggatttgctgaacatttctacagtaaccctgcaagatataaaggaagagaaaatatgttgtattatgatactattgaagatgcccttggtggggtacaagaggctcattttgatggacttatctttgttcattctggaatatatactgatgaatggatatatattgaatctccaatcaccatgattggtgcagcacctgggaaagtggcagacaaagttataattgaaaacactagagattcaaccttcgtttttatggaaggctctgaagatgcttatgttggatatatgacaataaggtttaaccctgatgacaaatctgcacaacaccacaatgcacaccactgcttagagattacagtaaattgtagccctattattgatcactgtatcatccgaagtacatgtacagttggttctgcagtatgtgttagtggtcaaggagcatgtcccaccatcaagcactgtaacatcagtgactgtgaaaaatgttgggactatatataacagatcatgcacacgggaactatactgacggataactgaaatttccaataatgccgttagctgggatttgggttaaaaatcatggaaacccaattattagacggaatcatattcatcatggacgtgatgttggtgtgttcacatttgatcatggcatgggttactttgaaagttgcaatatacacagaaataggatagcaggctttgaagtaaaagcctatgctaaccctacagtggttcgatgtgaaattcaccatgggcagactggaggaatatatgtccatgaaaaaggaagaggacaattcatagagaataaaatctatgcaaacaactttgcaggtgtatggattacctcaaatagtgacccaacaataaggggaaattctatatt

SEQ ID NO: 69038 - DNA, 968 bp, Homo sapiens
cgggggatgagtaggcaccgcgggtaccacccccccgccacccaagctgaacctgtgcctcccctcacccccgacagcggctccgtcctgtccaatccaggagctgggggccctgccactccctccctcctgtcccacacccaacagctcggccagtcctgtgggccctgcttccagcatccatgccaaatccaccatgtctccccttccctgtcttctcatggtccagccccagcatggcccgcctgcacccgccccggtcccaggctgcaacttctcccccagcagctgtcctcccggcagcaaccaccagagggcgtctgtgagcgcctgggtcagggcctgtccctcttctgcccacagctctctgtgagtcccactgtcctcagggtcaaatcccctaagtcctccccatggcccaccaggccctgcacgacctgccctcccctcctccctctactccagccacacaggcctcctccctgttcttccaacacaacatgccaggtgtggtcctgccccagggctttggcactacttgtccctccccattggcctggaatgctctgacatcctgcaggtgtcagggccacgtcacctcctccaagaagccctccctggcttcctgccctggctgtccaggtttctctgagcgttcacctttacacaccacccacaccggtaccaaccacatgttcacctctgtgactattaacacggctggctctgccccaggcccagaccggctgtggtttccaggccctgggcctctacaggcgtgaatgctgtgatgctgtggtctagaaccatccatgtctgaaccctgagttctgtgggtctgggttacacggactcggggctcccttccagctgggcccacccccgatatatttctgtacggtgtcttcagcactgcacacatggacccaacgtttgttgagtgaataaactacatgcacagaggaaga

SEQ ID NO: 69039 - DNA, 510 bp, Homo sapiens
aatccttataccatcaccaattgcaccaccactgtccacacccaccatcaccttcactgccatcactccatcaccaccagcaccaccaataccatcactaaccccacagccaccatctctgcaaaacatctccaccaccttcaccaccatcgtcaccatcggtaacagcaccatcattatcaacagcacccacaccgtcacctccatcacccaccacctccacctgcatgtagcacgcacccacctcatgggggttctcgatgtgtctggggaaacagaatgtgtttatttgaaggtagctgctttcaggaaacaggcgctgccagagattaaagtgaagatggggtcggaggataagggaaggcttccagaaggaggcaagctagagctgagaggaccagggctgagtcaaacctgcagaagagccagggcctggagagaaccttttctgccccatcccctccccttcccctagggatccagcttccaaaggccgaggcccaagacagg

SEQ ID NO: 69040 - DNA, 395 bp, Homo sapiens
ggcatgtttttattttaatataatgctagatttaatttgccaatcttttgttgagaatttttgcatctatattcctaagagatactggtcagtagttttcatgtgatctcttactctgtttttagtatcggggtaattcgggactcagagaatgaattaagaatttcctcctcttctatttttttgggagaatttgaaggattggtgttaattcttttttaaacattgggtagaattcattatgaagccatctagtcctgggctcctctttcctggaagtttcttgattgctgattcaatctcttattaaagatctcagattttctgtttttccttgagtcagttttggtagtttgtgtattcctgagagtttgtatatttcatgtaggtttcta

SEQ ID NO: 69041 - DNA, 725 bp, Homo sapiens
gagttccatacagcctcggaattaacgggccgacccacgcgtgcgcggacgcgtgggctactttggtcttagttgggttgtttggattttggtcctgacctcgtttctgaatgctgcttatgtgagctggagggagagtggacactgcccccccatcccctctcactgccttgtgatgggatcttaagagaggctgggcctcgaagactcaggtgtggccccactgggtcaggtgtatagccctctcgggaggcggaggagccctctgggggtggggagccagcccctaccagtgtcctcttgggtggtgagtggtttcttggcagcaccaacctggactgcctcagccaggaccccagcattggccacactcccctgcccagtgtcccagggcacaacctgggcccataggacctgacacagatgcgttggagcctgcagggtggatgagtctattacctgcagtgagcccatgtccccacagagggagaagagctggcgagagtggcagagggcaccagcttcccgcctcaggagccacggcacagtccgcaggtgaagatggcccccacaagttccccggcagagccacactgctggccggcagaggctgccctgggcacaggcgctgagcccacctgcagccagggtaaggcgagttgggagcagcccagcaccagcccccaggaggctgcctcacagctggcagccagggtgggtttccc

SEQ ID NO: 69042 - DNA, 2049 bp, Homo sapiens
ctacaacagtgaccaagctttccacaccctccacatgcggttgtgtggacatcatctctgtaaaggagcagagcaaaaccgtggtcaccacgacagtgacagactccctgaccaccacgggaggcacactggttacatctatgactgtgagcaaagagtattccacacgagacaaagtgaaactgatgaaattttcaagaccaaagaagactcgttcaggtacagctctgccatcctatagaaaatttgttaccaagagcagcaagaagagcatttttgttttgcctaatgatgacttaaaaaagttggcccgaaaaggaggaatccgagaggtcccttattttaattacaatgcaaaacctgctttggatatatggccatatccttctcctagaccgacctttggcatcacttggaggtatagacttcagacagtaaagtccttagctggagtgagcctgatgttacggttactgtgggcaagtttgagatgggatgatatggcggccaaggctcctccaggaggagggactacacggacagaaacatccgaaactgaaatcacaacaacagaaataattaagaggagagatgttggtccttatggcattcgatctgaatattgtatcaggaaaatcatttgtcccattggagttccagaaacaccaaaagaaacgcctacacctcagaggaaaggccttcgatcaagtgcactgcggccaaagagaccagaaacgcccaagcaaactggccctgttattattgaaacctgggtagcagaagaagaactggaattgtgggagatcagggcatttgctgagagagtggagaaagaaaaggcacaagcagttgagcaacaggctaagaaacgactggagcagcagaagccgacagtgattgcaacttccactacttccccaacaagcagtacaaccagcaccatctctccagcacagaaggttatggtggcccccataagtggctcagttacaactggaaccaaaatggtactaactactaaagttggatctccagctacagtaacattccaacaaaacaagaactttcatcaaacctttgctacatgggttaagcaaggccagtcaaattcaggcgttgttcaagtacagcagaaagtcctgggtatcattccatcaagtacaggtaccagtcagcaaacctttatttcattccagcccaggacagcaacagtcacaattaggcccaatacctcaggctctggaggaaccacaagcaattcacaagtaatcacagggcctcagattcgccctggtatgaccgtgattagaacaccactccaacagtcaacactaggaaaggcaattattcgaacacctgtgatggtacagccaggtgctcctcagcaagtgatgactcaaatcatcagggggcagcctgtctccactgcagtctccgcccctaacacggtttcctcaacacctgggcagaaaagcttaacttcagcaacgtccacttcaaatatacagtcttcagcctcacaaccccctcgcccccaacaaggacaagtgaagctcaccatggctcaacttactcagttaacacagggccacggtggcaatcaaggtttgacagtagtaattcaaggacaaggtcaaactactggacagttgcagttgatacctcaaggggtgactgtactcccaggcccaggccagcagctaatgcaagctgcaatgccaaatggtactgttcagcgattcctctttaccccattggcaacaacagccaccacagccagcaccaccaccaccactgtttccacgacagcagcaggtagagctgtgggtttatcggaaatgtcggatgttactactacacgtggctgggctaacacaggccaacaggagaaccagtatttacctttggaaggatatgcctcaagccagtgagctcaacagttgacatagtcagcctcacaacgtctcgaagcttttgtaccctattcttacagactccctgttaccaccaccctctccctcctattaaaaaagagagagagagaaaggg

SEQ ID NO: 69043 - DNA, 649 bp, Homo sapiens
cattctgatgttggagcggccacagctgtcttgcccctcctcacggccgtgttgggtgttaccgtggtcacccgcagggacacggaggggccaggcagagcagccctagttcacctcaccgggagcccccgccagaaggtgggcacctctgggagggagggactgccaggccttggggcttcctgtgctgagtcagagctggaacgggagacgcaggagccccgcagccgcgggaggtgcatatttggggctgccaggtggcgccaggtccccttggccagcccccagcgcccctttcttctgtccccagggcctcggcttcacaggatggggctgccagtgtcctgggcccctcctgccctctgggttctagggtgctgcgccctgctcctctcgctgtgggcgctgtgcacagcctgccgcaggcccgaggacgctgtagcccccaggaagagggcgcggaggcagcgggcgaggctgcagggcagtgcgacggcggcggaagcggtgagtgccaagctgtcccggggaccagggtggggtccgcaggggaccgaccagccttcctcgcccccagtccctactgaagcggacccacctctgctccctcagcaagtcggacaccagactgcacgagctgcaccagggc

SEQ ID NO: 69044 - DNA, 876 bp, Homo sapiens
ttcaaactaagagcagaaaacaaaactgtttattacaaaccacagacaataacacagtagctttcccctcacaagttaatgaaagagatgtgctggagagagagaacctgctgaacatgggcacagatcccacagagggggcgtggtgtgtgggaggagactcgacagggtcatggggtcactgctggccattgtcgggagataaggctcacagctttatttgataatgttgtctttagcttgtaaatgaacatgcttcccttcccccattgagtgttgagtgttgtgcctgtgggaagcgttatacacacagcctgggacctcagcacagatgcccgttgacaggtgtcccaccggccttccgggttccagcgccaggcctggtgcctgccccaggaggatgagcatttgcattgcctgcaccttatcgtgcccttccacctgctgaagcagctgtgcctgccgctcttgtgaactgcgaacttccccttacctcctctctctggctcgggagctggctcggccccaggaggctcccgggagcgcctgtcagtgcaatgccgccccatgtggtgctcaccttccggcgcctgggctgcgccttggcctcctgccggctggcgcctgcgagacacagaggaagtggtcttctgcacacagccccagtggcccgctcggacaggagcgccccggtgttcacccgtgccctggcctttggggacagaatcgccctggttgaccagcacggccgccacacgtacagggagctttattcccgcagccttcgcctgtcccaggagatctgcaggctctgcgggtgtgtcggcggtgacctccgggaggagagggtctccttcctatgtgctaacgacgccc

SEQ ID NO: 69045 - DNA, 1037 bp, Homo sapiens
  misc_feature (1)...(1037): n = a,t,c or g
taaaaagtgaggatcttttcctttcttgtaagttagaagaaataacctcttcagttaaaccttcagtgaaggttcttttagttttctgttctgctttctaaaaacatagactctgttctttagagcaacttatgactctcatctctgctgcacgagaatatgagatagagttcatctatgcgatctcacctggattggatatcactttttctaaccccaaggaagtatccacattgaaacgtaaattggaccaggtttctcagtttgggtgcagatcatttgctttgctttttgatgatatagaccataatatgtgtgcagcagacaaagaggtattcagttcttttgctcatgcccaagtctccatcacaaatgaaatctatcagtacctaggagagccagaaactttcctcttctgtcccacaggtattgtatataatggctttacatttaactagtcttcttggaatatataacttataaaggaccatgggccccattctctctccacttccctcctcctttggtgtgtaaaagtaggaatctttttttagaagacatttttcaagatcctaaattggagaaattttaggaactaataaatgacaactgactaggcaaaagatttttatgtatttttaagtactggaagtatatgaacattacattgtcaatattaaaagagggatagtattgaaatgaaaactggagaaaaaccaaattacattgcttttaccttagtcacttctcatttcctcctacttgtcccctttttctgcccatgcatatctgtccctttttgcactcctcccactcccatctgggctcttatttcaagtagtcagcatagaaagcttaacagtttttcccgttttcctttctttntgcccctctggtttctttcattgaaaatattttagtctcttagttgcttctcaaaattcaacttacaggaagttttccccacacttcctttgtcaggaagaattttagattaaattatttaactttctttgtgtgtatgtgagccgagaacc

SEQ ID NO: 69046 - DNA, 701 bp, Homo sapiens
ctgtagacccggcggcccccccagaggagggcagcccccccgcagttgcggcagtggtgggcgcaaggtgctgacccccttgcctgacccgctggggctggaggagctgaaggacacaggggctgggctggtgcccgaggctgtccccggcaagccgcccttcgcagagccggacgcggtgctgtccatcgttgtgggtggtgcggtgggcgcggaaactgagctggtggtacctggacacgctgaggggctgggctccaacctggctctggcggagctgcaggccggggccgagggcccatgtgccatgctcgctgtgcccgtctacatccaggcctccgagtgacggacctgaggtgtctgtttcctgggcaggcctgatgctcctgtttgggtccagggcccctgggggcagaccggtgatccttaccagtggaagcgagccatcgagccattggcagaaatcctgctgaatgtcattcagaaacctcagcccatggtcgccctcctgtgcccctctcctgccggaaagccctgcaacattctagggttgggggcagggccatccacggtttctgggcagagccatggtggcaggagagagatggctgaagcctgagcagcccagagtcccgctggtctaggctggtggtcggggcccctgggagaggagacagggcattcctccccactctgtctcc

SEQ ID NO: 69047 - DNA, 1979 bp, Homo sapiens
caatgttggctagtctgtgcctcagtgagatcagtcagctccgagtggctcccgtgtcgtaacagcaggagcatggccgcaacttcccaggccgaggaagggcccccggctcggcctcttgagagccccacccctgaactggccccagctcctcttcctgcctctctcatggcttgggctggagtgggctctctggacctgaccagactgtgggtccctgcgtctcctgcccactctgaccgggcttcctccctccacgcttagggtctgtcccgggtactcagtcagcccagtgggatcttacccacttccctgcaaggtgcacctgccccaggctcaggctgcccagcggctcttcctggacagtgagagcagggctgggcgcctctgtcctggcccgggagccgcaggggcccctcctccagagcctgggcgcaagcgacacaggctgccgctgctctcccaggtgaaatccacaccagtccacgccgggtcgcctgccctgtctccctacttagacccagtcattctagagggatccaccgccacactggccggcccacgtcctgggtgctgtcatgcccagcttggagtgccacatggccgctgcccacgtcccgggcactgtcatgcccagcttggagtgccacgtggccgctgctgtgacaggcagtgttcttgggggtggggctgcatccaaggctttgtaaaccggctggaccacgtctccctggccccagtgaccgggggaagctgagcccctccctcctgtgtttgctcccattactcaaaatgcaggacagatcaggtcagagcccaggaattctcacaggttcacccagcgccctctacctcctagcaagtactttgtcttgatcctcactgagaaggccccagggcagcggtcttctccatctccgctgttttggggtcttagggtacagcccaggcggtcactgcccacctgccaggctgcagggacagttgggtgtgagaataacactggctttgggtagtgccatggccaggagtgggtttccctgcgtctcctcgtcccgagggcgcctgggtcctcccagctgacggcagtaaatccacagtgagttggggcgactgtgaaactggaatgctgttactttgataattactttccagcaggtgttttccttcacaatggttttgtttctttccttctgatctgagaagacatgaacgttttctcttcaccgccgtggggtgtattgactggtcccccatgggctgctggaaaggcccggagatgcatctgtggcctggggccatcaagatcaaagaaccaggaggcctgggagatgcagctggatggggcggcctgcagaccctgccagggggtttgaggaccctcccaggtttcccacttcggaacaggagtgactctggctgccaagataccttcatggtgttcatgacaagtggaatcattattttcaaccattgaagggggatgcaggcaagacaccttcccagctgctcctagaggggacaagccaggccctctctgcagtcctcggcagctccggaaggacacagtcaggggccgggcaaacactttggccacagccccaaacaagcaccaccgtgggagaggagaggctgctgtcactggtaccggatgcagaccccaccctgtctgcaggccacccccacctccctgcagctttgaggctggcggggtctgctcctgggaatggggtgggagccacagggacgacccggggcgggctgatgtcttcttgggggcagacccagagagctcaagtttcagagtcagaattaggcacttggagcgtttttgctggcttgcactttcttattttcttattttagagcgcttaaaaaatccggaaaaatggggtttaaaagaactgtctctttcagtctacatttttgtttaatacgcttgagcaataaacgctgacttgcagacgtgaaaaaaaaaa

SEQ ID NO: 69048 - DNA, 759 bp, Homo sapiens
aggaggttggcacagatgccagccatgcagcggatcctgggcaggggtctcagctgggatggcctggccttgggacagggaggctggctgggcagaaccctagaaccaaaagcggtgcctgtggtgggctagggagctaggtggggagtctagtggggagtctagtggggaggtccactagacactcgttctggcacagcatgcagcgtcctccatcctggccctgctgtgggtacggagccagcagggcaggagctctcagtggagccctccaaagagggctgcttcctggaccagctgcaggatgagggagaccccttctgtccagggctgacataggctgaccaccgccagccccaccctctcactagcttcccattcagttagccattgatgagggctcactgggtgcaggatcctgggctgcccggggttgggtaggggactcctacatgtaggtaaatccgcgagatgctggagagagcaggcaataaagtggttgattctctctggaggtgacattttactttcctagtagggcttggccaggcaggcaaggtggagcctggtgtgccaggcgcagcgcttcagatgagaggaggtgagagcttggggatggcacagggaagtgttttgtctggtgagggtgtggcagggagggcaggcctgaagggacctccagggaggtgtgatcagatctgggttccagaaagatcctacctgcttggcgaccttaactgagctggagtctggaggccc

SEQ ID NO: 69049 - DNA, 1542 bp, Homo sapiens
cttgccaagtgagtgtgggcgcaagacgcccctcttggccagggctctgcccggcctgtgcttcctcagcctgtccatgcaccagttgggaggcccagcacaggatctggcggcccctttgggagctagccagcaagacacccacgtcacagtgggcacaatgacatcccaaaggaggggtcaggagcctggacatttggggagtggcctggcatgggtcgggggcagtaggtggagtccaaccaccgatctgctcctcttacagggaaatcgggagcaccaaccgtgccttgctgccctggctgctcgagcagaggcacaagcacaacaaggcctgctgcccgctggagggggtcaggccatcaccccagcaggtcagactagacttcggtggccacaaacccctatcctgggttttgaaaaactttgcttttgctcacccttcctgttgatctccctgctttgtgttttcttctggtaacatcacatagttgtcagctgttcctcttgtttgactgccagcccctgtggggaaatcagggtttccaggcccaagcgctgggcagccagggtaaggtgcagctctctctcccagcagactgagtatcgtaataagtgtgagtttctggttggcgtcggggtggatggggaggataacaccgtgggctgtcggctcggcaagtacaagggcgggacgtgtgctgtggcagccccgtttgacaccgtgcacatccccgaagccaccaagcaggtggtgaaggccttccaggagttcatccggtccactccatactcggcatacgacccagagacgtacacaggccactggaagcagctgactgtgcgcaccagccgccgccaccaggccatggccattgcctacttccacccccagaagctgagccctgaggagctggcagagctgaagacctccctagcgcagcacttcacagcagggccaggcagggccagtggagtgacctgcctctacttcgtggaggagggacagcgaaagactcctagccaggagggcctgcccctggagcatgtggctggggaccggtgcatccacgaggacctgctagggctgaccttccggatctctccacacgccttcttccaggtagccatgagtccctggtgggcatggggacatgttgagggaggcctgacgcaccatcaggacgtgatgggaacagtgggctcaggcggtgagatttgggggagtatccaggcaggtgagccacaggggagggtgaagtaagaaagaggttggtcatcactgatttgactcgggataacctagaggtacacacggcagtggcccttgtcacagggaggatgaggagtggccctcagtgcattaccacagggcactgctctgggctcggcaggagggaggccatggtggcctctgggctgggaaatactgtttcactgtttgctcactgctgcaggaaggctgtggggacctggagcggccgtttttggagacaggcctggcaggacctcctggagggctatgtgtgggggtgggagctg

SEQ ID NO: 69050 - DNA, 516 bp, Homo sapiens
gtccggtaagaacagcctgctgtcgctgaaggccgacgtgctgggggatgacggctccctgctgttcgagtacctgcccagaggggcccactcgctgtcccgtaagtgcaggccctgggggccgcttggctttggtgtggttttgaaggctgagggttgcaggtcccgggccaagatgagatgaggctgagggtctgtccctgctgctcggccgcctgctgacctccctgttgcgggaggtgaggatgcggcgtcacagcctggactggcctctcaggtgcacggggggctggctttagagtgaggagggaatggacgcggttgtgagcgcggcgggcaggggagcagccgagtgcttgctggaatgtttctcacaggagtcgttggctgaatgcgagctcgtccgggtcgcgcaggggccgggggtctttgtgctccagagacggggctcgggcgccccctgccggcccctctgtcgccttcgtgctgaggctcgtttcgcgcaagggagatggg

SEQ ID NO: 69051 - DNA, 967 bp, Homo sapiens
gagtcagaattcaaacccaggcctggctccgcgcgaggcccttgttcccatggaggatgcagggtggacagcagaggcttctaacctggggagagggacaggaggcgccactgcggggttcctggcaggagctgcctgggcctctggacagatgctgtggagggttggccgtgtgggctgcaggtgtggccacagcagccactaggatggctcaaccttggaaggtaaacagtagtagagagggtgacgcagtgtagaaacttcccacacacttcccagatggggtggggggagcaagaggccctgtcgtccaggttttcctggttcccaccgttgctgtagggctgcaggatccactgagtgcacctgcctttgtgctggaagccagggctcctctctgaccctgagggtccctggctctggggagggagctcgcagggctcctctctgaccctgagggtccctggctctggggagggagctcgcagggctcctctctgacactgagggtccctggctctggggagggagcactgtgttttcagtgcccacatgttgccaaaccgcgctccagaaagctgcccagtttctgtccctgccgaacgcaggagaatgcagggaaggatgttgtactttttctccagagctgcttcccttgaggggggcccctgcctacaggtcagaaggaagctgaggttccaagtcaccccccaggcgggcctggcctgtgtaacacgcaggcgtgcaaggcagaggagatactgatgcccagggcacagtgccgtgccctggaagaccactccgtgcctcggactctgcagcagcttctgatgccgcggaggtggctgttctgttgcagacgggaaactgaggcttagcggcttgccccaggccaccgagcagctggttggcagagcaggcacacgccaggagagctgcctccctgagcctcatttccccctgtgcg

SEQ ID NO: 69052 - DNA, 811 bp, Homo sapiens
  misc_feature (1)...(811): n = a,t,c or g
ctgtggattgtcttttcactttcttgatagtgtcctttgaagtacatacatttttaattttaaagatctctattgttttcctttggatgcttatgctttgggtgtcataagaaactattgcctaatccaaggacaggaaaagttacacccgtgtttagttttagcacttacatttaatactctgatccattttgagttaatctttttcataaggtatgaggtagggatccaacttcattattatgtacgtgtttatccaattttccattaccatttgttgaaaagactattctttcccattgaatggtcttggcatccctgtcaaaaatcagttgaatgtgcatttaagagtttatttttggctctcaattttattccatcagtccatatgtctgtccttacgccagtactacactgtcttgattactgtggctttgtagtaaggtttgaaagtgaaatgtgtgagtcctccaactttgttctttttcaagattgttttgactcttctggatctctcattttcatatgaagtttaggatgtttgtcattttctgcaaaataggcagctgcaattttgataggggtcgtattaaatctgtagatgagtttggggagtattgcctttacaataatattaaatcttaacaatccaagggcatggggaagacgttccatttttttaaagccctaatttcctttagtgttttgtttgtttgttttgagacaaactctcgctatatgggcccaggctgggagagcagtnggcatgatccttgggctcactgtaaaagttccgnctcccngggttcca

SEQ ID NO: 69053 - DNA, 963 bp, Homo sapiens
tggaattcaaattaccaacgttaggcagaaaacaggggttctaactatagaacctacagacattaaaagcttaataagtgaataatatgaacaagtctatccaaaattcaataacttaaatgttctaattgcttgaaaaacacgaagaagactcaccaactataaaatagataatttaagtagttttatattaaagaaatggaattcatagtttaaaacatgctgaaaaggaaatctccaggcatagatgtcttccttgggtaattataccaaacttttaaagatgaaatgacatcagttttacataaattattccagaaaacaaaagtggagagaacacttcccagcttattttacaaagccaacattatgctgatatcaaagccaaagacagtacaaagaaggaaaactatagaccaattcttcttctgaacatggacacaaagtttacaacaaatatcagtaaatcatagctattaatacataaaaagaaagatacactacaactaggtgtggtttattcagcaaatgcaaggctggttcaatatttgaaaatcaaccaatgttatctgcaattttgacagactaaagaaaaaataaaacaccacaggatcatatcagttgatgcggcaaaagcatttgaccagatcaaacatccatttataataataactctcagaaaactagagctagaagaaaactttctcaacctaaaaaacgaggaaccacaaattaactaaagctagcatcacacttgatggctaaagtctcaatgcttttcccctaaaatcaggaccaaggcaagtgtgtctgatctccccactgctattcaacatagtactgggaatcctggccattacaataatgtaagaaaagaaaagctatacaaattggaaagaaaaaataaatctatccttatttgcagattgcatggttgtctagatagaaaatcccaaggaatct

SEQ ID NO: 69054 - DNA, 860 bp, Homo sapiens
ttttttttttttttgatcagccaatagggagcaattttattatctagcattgcatgcctgggttaaattaaaacagacagtgagaacaagtgagtctaggagtctgactctaaaagagaccatagtacatttgaacaaagagttgtgttaaagatgctgttactgtcagccattgggtggactaaaggatctcatacgtaaaaatttggggttgacacgatagattagacactccgttaatctatcattctctgtattttctcaaatataacatcccaatcaaagccttggtaatataaccaatgttttaaactatatcccattataaagacagcagattctcactgaacttgtgcaaataactgaattaccataaacatatgaatactcatgaatagttgcccagttctgtggcagtcaggtagggagcaaaagtaaatgttataatttttgttcacaaaagtctgctttaccaaattgcagtaaggtatagatagcttaaaagataaagaaattcataaatctgaaaaagaaaacacttaaagaattggcaatttttcaaataaaaaatcttaaaaacgggctgggcgcggtggctcacacctgtaatcccagaactttgggaggctgaggcaggcggaccatgaagtcaggagattgagaccacagtgaaaccccgtctctactaaaaatacaaaaaattagccgggcgttgtggcaggcgcctgtagtcccagctactcaggaggctgaggcaggagaatggtgtgaacccaggaggcggagcttgcagtgagttgagatcgtgccactgcactccagcctgggcgacagagcgagattccatctcaaaaaaaaaa

SEQ ID NO: 69055 - DNA, 451 bp, Homo sapiens
gcactcggagcgagcacaaaatgattacacaattgctcaagtaggactttatcccaggaatgcacggatggtttcatatctgatcaattagtataatacatcctatcaatataaggaagggacaaaaacaagatctcaacaggtgcagaaaatcatttgacaaaatccaatgctcttcatgataaaaaaaaagaacctcaacaaactaggaatagaagtaaattttgttaacttaacaaacagcttctgtgaaaaacctacagttaacatcatattccatgataaaagcatgagagttttgcccccagtatcaggaacaaagcaaggctgcccactcttgtacagcgtactggaaattcctgccaggtccataatgcaaaaatatgaaataacaggcatatgattggaaaagaaaaagtaaaactatctctggttgcatacaatatggcct

SEQ ID NO: 69056 - DNA, 453 bp, Homo sapiens
cctgaggacttctgcacgagcggcaagcagaggccagatgctccatctgtctggactacctgagacacccaatgaccactgattgcaggcactacatctgaagtgcctgcatccaccaatgctggtaagaattacaggacatctctccctgtcctgtctgcctccagcactgtcctgacaagaacctcaagaggaacttccagttatgccacatgaccgatattgctaagcagcttctcaccactgcaaggcgcaaaaggaaactgcagggagaggagcccgtgtgcaggaagtcagatgtggccctgttctgtgagaaggatcctgagctactgtgtcaccagtatagggtctccctcgaccactgagatcacccccgatgcccattgaacaagctgcagctaagcacaggaagcagttcgagagctacattgaacccttggaaaagcaagt

SEQ ID NO: 69057 - DNA, 553 bp, Homo sapiens
aattcggcacgagacctggaatatgatggtgaaccccaggcccctggaatatgacagtgaaccccagacacctggaatacaacagtgaaccccagacacctggaatacgacagtgagccccagacacctggaatacaatggtgaaccccagacacctggaatacgacagtgaacgccagacacctggaatatgatggtgaactccagacctctggaatatggtggtgaaccccaggcccctggaatatgacagtgaaccccagacacctggaatacgacagtgagccccagacacctggaatacaatggtgaactccagacacctggaatacaacgatgaaccccagacacctggaatacgacagtgaaccccagacacctggaatatggtggtgaaccccaggcccctggaatatgacagtgaaccccgtaaacctggaatacaatggtaaaccctagacacctggaatacaacgatgaaccccagacaactggaatatgaaagtgaacgccagacacctggaatatgatggtgaaccccagacctctggaa

SEQ ID NO: 69058 - DNA, 306 bp, Homo sapiens
ttttttttttttttttgtcatcttagaatatttaatcagttagcactagatgaaggctggagtaggagagactgggatagtggggggcaatgtggggatggaggcagggcgagggagataaagtcaaactggttttttttttgtttttttttttttttttttttttttggagacagagccttactctgtcgcccaggctggagtgcaatggtgtgatctcagctcactgcaacctctgcctcctgggtttaatcgattctcctgcctcagcctgggcaacagtgagaccctgtctcaaaaaaaaaa

SEQ ID NO: 69059 - DNA, 594 bp, Homo sapiens
gaacttgtctacgacgccgatggtactgtaaggagtgcgctgagagcgttactgcctgctgaagaaagtacatcgagttagtatggaaggagctcgaagaaaagtttggatttaaagtcctctacattgacactgatggtctctatgcaactatcccaggaggagaaagtgaggaaataaagaaaaaggctctagaatttgtaaaatacataaattcaaagctccctggactgctagagcttgaatatgaagggttttataagaggggattcttcgttacgaagaagaggtatgcagtaatagatgaagaaggaaaagtcattactcgtggtttagagatagttaggagagattggagtgaaattgcaaaagaaactcaagctagagttttggagacaatactaaaacacggagatgttgaagaagctgtgagaatagtaaaagaagtaatacaaagcttgccaattatgaaattccaccagagaagctcgcaatatatgagcagataacaagmccattacatgagtataagggccgataggtcctcacgtgctgttgcaaagaaactagctgctaaaggdgttaaaataaggc

SEQ ID NO: 69060 - DNA, 421 bp, Homo sapiens
tggtatgttaggcctccaaatccattttataggtcattatacccaaacattatccaggatttagatactatagaatccacctagcggtgtgggcgacgcagcttgcagaggattcaataccactctgaaaatagtaaaggtgtctatggtttacagtacgatgatgaaaaaattatcagtggcctacaagataattaagatttgggataaaaccagcctggaatgtttgaaagtgttaatggccacacaggttctgtcctctatctgcagtaggatgagcgtgtcattgtaactggctcttcggattctacggtgagagtgtgggaagtgaacacgggtgaagttcttaacacattaatccaccacaatgaggatgtactgcacttacgcttcagcagtggactgatggtgacctgttcca

SEQ ID NO: 69061 - DNA, 1269 bp, Homo sapiens
ctttgtggcatcaaatcattatgtttgtatgtttggaaggccacgccatctatcctcccacccagggcaggaatttctgctcccacttttgctttcctggaggtgaaataggaagaacaaggacccatgctcaagtccccaaagaatggcaggatgccctcagtggaggcagactgtatttaaatgcaattcacctctttggggtctaggaaaagccacccgtaggttcatttgctgggaaacacggtctgcgtgcctgaggcagtggacaccagggttgtggccttgccaagagctgactttctccggaggtctgtctgctgtccggagtggcagccacttcggtgggcaaataggacggtcatctctgggcccaaggacgctgcttcaggctgggacgccttgagggtggctggctgttcaggctttccggaggtgggatgggaggtgtaatgtttggtgggaggagggctgtaattctgaaatctcacggttttgacttgcttttcgatgccatttcttgagttttctggtttcaccaggatggatggtggggcagatgcgggcggttttggcagaggctcactcttgatggggatttctttgtcttccataatgagggagctggccgcggagtggatccgggcctcactgcccctgctgatgcacgtgagggcgggctcccccgtgagggcaggcttggaccccatctccaccaccacggctgagggggaggaggggatcccctgtggctggtagaattggaactgctgaggccgaaggaccatggtggggctgcgtctgagggagcctaccacgagagtggggatcccggactggaggggtctctgcagggatccattctttctcatgctgctccgccctttccgaagagacccttgtcctaaagtcccagggccggctgtgcttctcacggggttgactatggcagtgggcacaaagacggatttgaagggacggctttgccgtggatcaccttctgaaatgctgccttgggaggacacagaggaggtggataacgtccatgtggtgtagagaccagggctccgggagtctggaaaactagaggtctttctgaaaatggggatgacgtaattgtttgggaagatgccgactcgctcggtgaccaaggagacgcccgtgagccagccgtcctggcacttccccaggacccagccgccttctccctttagcaggtccagctcatcgggtccatgggctgagtaggagtctcgtgccgaattcgaa

SEQ ID NO: 69062 - DNA, 768 bp, Homo sapiens
  misc_feature (1)...(768): n = a,t,c or g
gacagagcgctggaattcccggaggaaggtggcccgctggaacaggtgaggaccccgcccgggacgcgggagagcggtcgctctggccggggcctccccgcgccccagtctcgagtttcctgacgcccccggcccagggctgcagcggctccacccacggctccagccctggcgctgggcttagagtgtgttccccacccgaaccccaccagctgttgcagacctcacagtccagtcccggagtcagatagtacgaggaaaaagtttctattgcagccgcacagcgaagaaacgctctcagccccttccccttgagcgcctgggtcgtcgttgagccccactcctgctccctcgtncactcccgctccctcgtccgctcccaaaccccactctctgtcctgatgtggaggaaagctgccgctggacttcgggtttccagaatgaggccccaaacagggtgactccagagctagttgaaattcagcacttaactgtgctctttgggtaaacctgggcgccttccagaaagcatgtttctccccaaaacccagttctttccctttccttattcctctgcccagtttcagagatcacaagggggtcatctgagtcaggaagtaaatggtcagttctctgccgcagccaccccattgttcacatttaaaacgcggcttgggcccatccagcaagtattagaacttgaaggcacttttatcatcttgtatgatcctggtgatttggactgacttggatctgcggcttgatgct

SEQ ID NO: 69063 - DNA, 447 bp, Homo sapiens
gcgtggtggaattccccggcttgagccgggttggaaaatgatggccctgagcttcctagcacgagcatcctgcagatacaccttccccaggatggggcaccccacacacgcacacacgtggacgcttgcacatacacatgcacaagccccacaagttcatacacacaaggccaggggcatgtgcacacatgcacacacacggcagtggatactgcactcctgcacatgcatgtcacggacgcagcacacatatgcaggaatgcacacgtgctcgcacacatggccctgtgcacacacatacacttttacctcggtgtcacaaggctgtatgggagaaataaacgggactgcaagggcctaggagggagaggtcggcaagggctagggggagcctaaccagcatcctggtgggctggggcaggataaagaatccattcccatgcccca

SEQ ID NO: 69064 - DNA, 822 bp, Homo sapiens
ttttttttgctgttggttgccttactttaatgctgacctagcagccccgacaggaagctttaacataaagccttgaccctgagaagcatgggtgcgtcttgtcgtgagcaggttcatggctgtgctccatcctcagcccgctgatttttggtcttttgtcctttgatccagcagttcccacgtggatgttgtactgcttctgtccttgatgttgatgccgtgggcagtcaggccccggcgcagggtgtcgcatgcttccagcaggggctgcctttctaggagctgctgccgccgggcgtcccccgtggcctcgggcatggccagcgcaaactgccggaccttctgccggaaccgcaccagctcgtccaccacaccatgcaaggtagcctcgctgccgtctcctgaaacgtactgttgatttgccagagaaattccaacagtttcaaaaaactgttcaaagtaagagatgatggcaccaaacacagcaggacttctcggcccttcaggttccttcagggacgccctgagctgtccattcccgtggtgtgcaaggcccaggatggcatcaaccaccctgggtgtgtcaaagtcatctgccaaggccgccttcacggccctcttggtgctggagagcctgagggaagaggagagaacagtcacagcagagggagctccactctccccaggcggcccccacaccagtccttccccagggagagacgctgggggctctaatctggggactttctctaggtcatattcccaaagacttgagttcctgagtagcagaaaattatgtaacatcaactgcaaactgtcatg

SEQ ID NO: 69065 - DNA, 416 bp, Homo sapiens
gtaataatcatatcaggaattatcagttcattgcctagcacaggaaatgacaaacatgaaaggaaggtcctgttgtattcactaagccccagagatcctgtatatctactatgagaaatcattgaagttctgcaaaaaggagatggaaatgcacacagtaataaaggtacagaaatctgcagatatgagctcctagaatccatttctctagctttgttaagcttcctgcaaggacatgcccaagaggtggtgctagataagtccgcgtgtgttggtatctgacattctgggatctgccactggagatgttcagcccgccatgaatgccattgccagcttggcagcagtggaactgcaacctagtggcaaggaccgagagcttcacattgcagaacatccttcaggacatctagttg

SEQ ID NO: 69066 - DNA, 769 bp, Homo sapiens
  misc_feature (1)...(769): n = a,t,c or g
accctgtctctacaaaaacattttttaaaaacttagccaggcatgatgacacacacctatagtcctagctattcaggaggctgaggctagaggatcacttgaggccaggaatttgaagttgcagtgagctatgatcatgccttgccactgcattccagcctgagtgacagagtgcgaccctgtctctaaaaaacaaaaggaaagtgtgttacctgtaggaactgtgaattcagtgggttttgctggtggttctgatcctgtggggccaggatatttcgaattaccttgtaagtgacttggaatttttcatcagcactaagtcagcctttgattttatttgacatagttttcggtgtgtgtattgctcttggcagttggtgtcactaggtgtcctaccgtagaagtgtccggtaccctgaagacacccatgccactgttgtgtttgatattgacgccacatatagacaggagtccaccactgtgttccatttcacaggtacgctacgggccatgacatcacagagcactctgtgctgatccacgagtactacagccgagaggcccccaaccccatccacctcactgtgggacacaagtctccagaacgggccgcatgaggcatcaaagccttacggtcagcacttttaatggggagttcctggggagggacctgggggagtgatgtttcaaggcttttgaaagtgaattagggttattaggacattgaaggcttngggttgaactgatcatggaggactgttttaggcca

SEQ ID NO: 69067 - DNA, 797 bp, Homo sapiens
  misc_feature (1)...(797): n = a,t,c or g
ctcactcactcctgcttggcacgagggtccgagatgcttctagcaagatccagggcgagtacacgctgaccctcaggaaaggcgggaacaataagctgagcagggtcttccaccgagatgggcactatggcttctcagagccactcaccttctgctccgttgtggacctcatcaatcactaccgccacgagtctctggcccagtacaatgccaagctggacacacggctcctctaccctgtgtccaaataccagcaggtccgtgctggcctgggagccagggagggtagcacctggctggccccaggcctcagtttcctaggtagacccgaccaggctatgcatctcccctcattccgccacgtatctccaggaccagattgtcaaggaggacagcgtggaggcagtgggcgcccagcttaaggtctatcaccagcagtaccaggacaagagccgcgagtatgaccagctttatgaagagtacacacggacctcccaggagctgcagatgaagcgtactgcaattgaggccttcaatgagactatcaagatctttgaagagcagggccagactcaagagaaatgcagcaaggaatacctggagcgcttccggcgtgagggcaaccgacgaaagagatgcaaaggatcctgctgaactccgagcggctcaagtcccgcattgcccgagatccatgagagccngcaccgaagctgggagcagcagctgctggtgcccagggcttcggacaacaagagagattcgacaagccgcattgaacaagcctcaagccggacctc

SEQ ID NO: 69068 - DNA, 411 bp, Homo sapiens
tacgcctcgcttggcacgaggggtggcgaccctgccccaggctgtggggcccctgcagctgttggcagccgggccaggcagccctgtgaaggtggcagctgcagcaggccctgccaatgtgcacctcatcaactccggggtgggcgtgactgccctgcagctgccttcggccactgccccaggtacccccatctccctccctcaggcctaggtgagagccggggaggggtgcagtcatctcggagagggaggggctgtccctgggctcctggagggcatctcatccctggcaagtcccagtgccccaaggcccaccacaaggctccctccgcccgccctccagctgcacagactccacttctctctggcttggcctgctctcctggctctcacctgcgctcggtccctctt

SEQ ID NO: 69069 - DNA, 1390 bp, Homo sapiens
ttttttttttttgtgggagatgttttattggctttcactttcctcagggagccagcggctcccccagcaggtccccacggtggagccgagtgagctgggagggatgggtgcttacttcgtttcaaagagatctacatatctacagagaggatggagaccagaaaggaattgggaaatggaatcatgagggctgggccctcatccccaccccacccagcccacccccctaacccaacgcatcagaaacagacttcacaggatgcacagagggaagccagaggtgtggggcgggcccggggggccggggctgcgagggacctcaagggcgaatgccactggcctgtccaaaccaggcaggagagaaagtaagaggaggaaaacaattgagaacataacgattgtgtcttcgtcagccgttccccccgacgcctyctggaaaacggttwtttcgtttttgagtaagggcaagaagtgtcctgctcaagccacccctccgctcagggaaggccactgcccggcvaagccttgtctttgagggcggtgccttccctgggcagagaggggctgccccggccctggggctccatggcagggcacaaaaggagaggcagagccccagagagggaagggggctcctggggccaggctgctgagaggaaataattgcctctttctgggtgaggaagagctgccttcctgatggctggtgtcctgggatgtggggcatttctctggggtagccattgacgtcatttccttagcagcaggagagcgggtgagaattcccaggagacctcagcctgggtgggcgcttggtggaaagtgggctcagatgaggtcttcagatggcagcagtaggctctggctgcttggggtccaccaggagctgggccaggcctcctgggtcctgctgagaagcaggtaggggaggtgacctgcagctctgtctcccttggggatctcagttcctgttgagactcacagcctgaagacctctgtcctcagggtctctcctcatcacacaagatggggagactgaggcccaggggtgggaagggccagccaagtctcatggggaactcgggggttttcaacccctgggccatggctctgcccaccctgacgagccccgggctgcctccgttcactgccgcttgctggccctgtttctggctgagcactgggtctatacatttccgcgttgcctctcccacggcagggggactgcgacatggcctctccctctccccgtgcctccctctgccaccaaaaagctggtcagggcggagcatcccaagggccctgatgcccctgaaagtctcccttctagggggcagccggtccatcttcagggagctcagcacgtgtctcagcctaggcagacgcttgg

SEQ ID NO: 69070 - DNA, 956 bp, Homo sapiens
tcaatacgcctcgcgtggaacgagcgaacccggcatgccgagtgccccagaaatgccgctgtgtccccgcgggcagtgacgtgagtggggaggagactcaggcccacattgcccacacctgcctctgaactgctgctggtcacccccacccccgggtgcctgtgaccggggtcctgaggctggggcttttgtgccaggagtgggtgggacacagagacccccgtgccaaatcctgggcatccccagccccctggcccctcccacatcccccgtgtattcaggaccccatctgctgagctctgacctgcccccgctctgccatcagcccctgctgctcctcggccagagctcccaggacgcagggagaccctgggagagtgaggtcatcccggggccatggaagctggcaggagacactggtctcagaggagggatagagacgcagatttcagatgtaagaagcccgatccacattgcataagtggacccagctgccagatgtgtgggcagctgcagggagtggcccggggtgctgggcccagctgtggttgttcttttctgggtcaggagtgactgcggagtggctgggacgctcctgccgggggaccctcctgccgggggtggccgcttgcctggggtaagacccctttccctttcttttttttttgggggctcaaaaaaaaaacccaaaaaaggcccctttttcccccccccccaaataacccttgacaccaaggtgggcgttttggcgcccagggctgttttttttatttaggggaaaatttcctttgggggagaggcgggcttttcaggggaaacccaccccctaaagggcccctccagcctttcttgtgggggcccctccccattgggggctttgactaagcccccggggatgagcctttcgggttcacgacctttgaggagccaaaatcctgcagtggggccctttgagg

SEQ ID NO: 69071 - DNA, 1505 bp, Homo sapiens
atcatcattactccttgcttggcacgaggccagaaggagggaattctgctgcggcgacttgactttccaggcccggagcagaaaggcattggcatttgtaggcggtgacccgccccttctctggccttgccaagagtcacatccctgcccaggggcacctctggccctggaacttgcctgggcagaggcagcgtgaagggcctgaacaagaggagaagaagggccttcctagtagaggcacagcatggacaaaggctcacaggggtgggggtgcccagtgatcgagtcctggcttgggaaggaaggtctgagttccctaggaactgaaatctgctagcagcactgtgagagaggtgtatttccccctcctaatgacagaggaaactgaggcttcagggaggggtggatttgcccttgacatgcagataggaggaggaggaactgcgtgtgcccctgggcctgcaggcccccacacccctccccagtcttcttcaagacctggcatggtgggaggagggagggggaagtggagaggggagcatagggctcctggggcaccaagggagagaggggcccaggggtagggaatctaggaatgtcgctttccttggagcagtacggaaagtcacagggaagatcaggaggatggacagctgagatgggagacaggagagatgagccccaggacccctggggagccaagctgtcccccacatcctagcctctcaccccacctggagcttcaccaagggctcctcagcagtgaagtggcacaagcctcccagtttggtgggcaagtgggggtgatcttggtgttgtggctcctggagacacgacataaccaggagggtgaagggataaacctggggtgggctggggctgaaacccatggcatgaccccaattctctctcctcaagctcgaccccccatccccaggatcacacaggagaatctcatcctcacggcttggattgctcctgggggccccctggtgtgctgctaactggtgtacaatgctcaggagcagcccagaggggagccgggaagggaccctcgcccttaccatctatccccatttccgcatctcttgcactggtaccccgggcgccacgttctcagttcctgggactgaaaactgcagcagtctggccagctccagggacagagaggcccagccacctactatgtaccctcctcagctgcccactggactcaggtcctgaatgaagctgtccgcctgcctcatgccaaaagcggctggacagtggctgcctcatgacccttgcagtctcccacatccagggcctgatgacatgcccccttgtcccaagtttcttgggaacccctgaccctgctggcccctctcatacaccccaaccctatccaccctggaccacctctgggggtctgtcagcctgctggtccccccaacagatctttgggggcagcctctatgggacaagagtgacacagggctggagaaaaggagtgaggagccctcttg

SEQ ID NO: 69072 - DNA, 705 bp, Homo sapiens
tcttacgaattcgccacgagatgagaccaggagtggccacatgttaggcacaataggttttaagccaagaatggttatgagagacaagggaattctatactgataaaaagtttaatccaacaagaaaatataataatttaaaacatatgtgcctaacaacagagcatcaaaacatatgaagtaaaaaaggatagaattaaagggagaaatagagtttcaggatgatcattggagacctcactacctcaatgttaataatacagagaccagatcaataggaaagagagcacttgaacaacatgataatccaattagatctaatggtcatatgcagacaccaacccaacaacagcaaaatacacattcttttcaagagcgtgtgggatattgtccagagtatacagtgtattaggctgcaaaacaagtattaatgttttaaaagattgaaagtatccaaagtgctaagtattttataatcgtcatggaatgaaactagacatcagtaaccagcaaaactcgaaaactcacaaatatatggaaagtaaacacactcttaaacaatcactggttgaagatgaaatcatacaggaaattagaaaacactttgagatgaataaaaatgaaaacacaacataccagaatttatgggatgcagttaaagcagtgctcagagggaaatgtatagctgtaagcatctacctttaa

SEQ ID NO: 69073 - DNA, 627 bp, Homo sapiens
ttggatctaatacatgacaccaatggatattttattatagcttcttaattatttaaaaagaataacatttgttagtatacagttattataaacagttaattgtttacattcattatttgtattcaaagaatcctagccgatctgaaggctttcccatactgcttacattcatagagtttctgccaagtgtgagtgcttccatgcatttgaagtcttgaggctgatctgacggctttcccacattgcttacattgatacggtttctccccagtgtgagtcctttcatgatattgaaaagaactggaagaagtgaaagcttttgccacattgcttacattcatagggtttccttctggtgtgtctttacatgtctatgaaagcaattaagcaagctgaatgctttcccacaatccttacattcatacggattctctctcgtatgagtcctttcatgtatatgcaaggaagaaaaataattgaatgcttgtttgcattccttacattcataggtttctctccagtgtgtgttttgcatgtattcaaacgatcttggcagatatgaatgctttcccacaatgcttacattcttagggcgcctctcctctgtgcaacctcgtgccgaattcg

SEQ ID NO: 69074 - DNA, 1139 bp, Homo sapiens
gggaaatcttcccagtgggcagaacttcaagcagtgtacctggttgtgcactttgagtggaaggagaaatgaccagatgtgtgattgtattcagattcacgggctgtagccagtggcttggctggatggtccgggacttggaagaagcatgattggaaaattggtgatgaagaaatttggggaacaggtatgtggatggacctctttaagtggtcaaaaactgtgaagatatttgcatctcacgtgagtgctcaccaacgggtgatcccagcagaggaggattttaataatcaagtggataggatgacccgttctgtggacaccttcagcctctttccccagccacttctgtcatcatgcaatgcgcctgtgaacaaaatggccatagtggcagggatggagtttatgcatgggctcagcaacatggacttccactcaccaaggctgacctggctacggccactgctgagtgcccagtttgtcaagcagcagagactaacaccaagcccttcgatattgggcaccattccttggtgtgatcagccagctacctggtggcaggttgattatattggacttcttccatcatggaaacggcagtggtttgtcctcactggaatagacacttactccggatatgggtttgcctatcctgcacgaaatgcttctgccaagactaccatccgtggagtctcggaatgccttatccaccatcatggtattccacacagcactgcctctgaccaaggcactcactttacagctaaagaggtgtggcagtgggcttatgctcatggaattcactggtcttaccatgttctccatcatcctgaagaggctgcaaagaacggtggaatggccttttgaagtcacaattacaatgccaactaggtgacaacactttgcagggctgaggcaaagttctccagcaggccgtatatgttctgaattagcatccaatatacggtactgtttctcccatagccaggattcacggtccaggaatcaaggggtgaaactgaactgacaccactcaccatcacccctagtgatcccctagcaaaatttttgcttcctgttcccccgacattacattctgctggcctggagatcttagttccagagggagaaatacgaaa

SEQ ID NO: 69075 - DNA, 1112 bp, Homo sapiens
cccgatggccgtaaagcatggggtgggggggtgcctgcctgcattgcagctgtcagagctgcacagagcctgcgacacccagccatggcttctgcccaccaggccacgtccctccgctcctctgaatccttccagttcttcttaggccacttaaacgccaccgtctccacgaagtcctgtcggatcaccctcataggaagtgacaaaccacgttttgaacccctctccccacccagcaagcccctagcccgcgagcataggatttcctttctagaacacgtgttctgtgaagggccagaggcaatatttgaggcctcgtgggccacatgctgtccctgttgcatatccttttttttgtttggtttggtaaactgcttaagctggcagaacaacagaacccgcacattctccacgcagcccagcgcccttggccatgcagggctgtgccttctgccagctctggaggcccaggggctggcatgggcctcccgtcctgagccccccatgtacattgcacccatactgggaacgcccccaggatctgctgcgagacccccaaggaccagcttctgcagtcctggaagggctctcctgacccccaagtccgccatcttctgatggtggcaggtgggcacagtcactggctgagcgaccaagggtcagtgagattactaggccggcgctgcacccaactgaaatgaactcacgtgtcctcacaactcctagcagcagatgctgtcggcctcgcatcctacaggaaaggaaccatcgccaaaagacgctgaggaacatcccgagggtcacagggacagtgcagagccaggaccagcccggcccatggtcccccagcgtgcaccacctggcccggcactgtgtgctcagccatgaggactgggaagagtcctgcccacagctcaagtgtctacaccgcactgccatccaggctgtgagccgctgctgagcatggggaatgtggctgctgcagagacgttatgaaacacttctaaaagaatgtaaaagatctcattaataattttgagtacctgttaaaatgatagtaattttggatctagtagattaaataaaacatattattaaacttaaaaaaaaaa

SEQ ID NO: 69076 - DNA, 881 bp, Homo sapiens
tttgcgcgttcagttcgttaaatctttattgatgcgtggacactccttcccctccagccccgccccccagccccagaaatactagagaagctgcaccataaaacgagggcacgagattgttgtcccattcacgacggagctgagggggagkgtgtgcaggttccagcctagatgttcaggattgagatgtgggbtcgtgaaaggaaagtgggttttccgggatgtggggggcttttctcagcactggggtccactgacgctgctgctcccaaggggatgctaggactccgctcaggcaggggtggggggcagggcagggtcgggaagatgccgggcttcaagtccttggggccgaattaagaggggagggcagcccgtcagggttgttcttgactcgagggtcattagacccagacctttcctgatgtgggaacggcctgggaccctggtgaggcccggatttgccgcggctgcggggcgcgccgacgccgataaagggctcggctgtagggcacgaggcaatcggctaggcggaggcgcaggcagaggcggcggtagctggccagagcaagcacgagcagcggcacgaggagcaggaatccggtgaccagtagggccgtgaaaccggggtcccgcaggtgcgcggtgcaagggggtgcctgggagcgcaggaactgagagtggcagaggaagccgaagcccagcatggtgacagcgggtagcaagatggtccctagcaccagcaccagcaggagaagattgaaggcagcccccagcagattctgggctgttacaagaacagcgcaggcccaacagtccagggggtcccggggctctgggccgtcaccaggaaccgctcgctgtgccccggggacatccgc

SEQ ID NO: 69077 - DNA, 512 bp, Homo sapiens
ccttaccctccatgatgtgtccctgtgtgtgtgtctacagacagggaaataggggtgaagatgaaaagttgaagcagtgatacagcctggtcagaagttgttgtttgtgtccgtgtggaacatgcctggggaagtaggaaaagagcaaagagggacaaaaatgtctgtagttgtatacttgtatatgtaagcacatagagggggagaaggaccataaagaatgtgtggtgaagcactctggtggagaggggctcatgagaagtgataccgagagcagtgaagctggagatcctgagagagcccacctgtgctaagtggggtgggtggatggacagggtgagcaggcctgtgcaccagtcggagaaccagctcatcagcccagtcttgccacttccctttgcccacagaagacgtgcgatgggacacattatccctatgccgaatgccatgtcagaccgaggacccagcagagctcatgctggagaattatgacaccatgtatcttttggacc

SEQ ID NO: 69078 - DNA, 402 bp, Homo sapiens
aagaggttgagttcttgatttgattctcagcttagccgatggtggtatatagcaatgctactgatttgtgtacattaattttgtatcttgaaactttactgaatttatttgtcagatctaggggctttttgggtaagtctttagggctttctaggtatatgattatatcatcggcgaacagcaagtttgacttcctcttaatcaatttggatgcctttttttctttctcttgtctgggtgctgtggctaggactagtcactactttaaaatgccaataattcagcaagggccataagttgtaaataggaacgggtaagtcagtgtatagcgaagaccactagagagattcaggtgatgtgccttgggaattcatgtggacgtggcattgattagattctggg

SEQ ID NO: 69079 - DNA, 374 bp, Homo sapiens
aagaaaggacagaagccatatgatcatctcaatatatgcaggagaagcatttgataaaatccagccccctttcttgacttaaaacgttcaacaaactaggaatagaagagaatttcaacctgataaaggacatctatgaaaaacctacaagtaacaccatactcagtggtgaaatacaggaataaggatgttttttcttaccacttctgtttaacattgtactggagattttagccaggcagttaggcaagaaaaataagcaaaaggcatccaggttagaaaggaagacgtgaaactatttctaagggatgttatctggtttatagaaaatccataggaatctactaaaaaacagaacagaagaaaacactaag

SEQ ID NO: 69080 - DNA, 640 bp, Homo sapiens
  misc_feature (1)...(640): n = a,t,c or g
gtgttgaaaaagacaaatactaacatgctgcatctttcatcagaacagaatctgaagcctcactgggtggaccaattcctgctctgttttctgcactgacacggaattcgtaggtgcttccttcttgcagtcctgttactttgcacctgagatcggaaactggtgtttttattgctctcacccatcgcaggcttttcttttctctcctttctacatgatatcctgtaatttcgctgccaccatcatccactggccttttccagctgacagtggcagtgttcttagtgacatttgatacctctggtttttcaggagggccagggggacctgaaaaggaagcaaatttattagaaatccatgatttcctaaactctgctataaatgtttccatgtcaattccctcacatgctctacataccaaatctgtctaccattttgacaggatcagactgtacaggttctcctttgccatagtggtttacagctgagacccggaagatgtactcatttccttggataagtttggttgccacatgcctgcaagactgaatatcttcagaaaccactgtccacaaaagtcggctggtttctctcttttcaagtatataggacttaattggngagccgccatcttccaagg

SEQ ID NO: 69081 - DNA, 454 bp, Homo sapiens
gaggaaaaggcacaggctaacctctccccttctccagtatctcagattcagctgggcagctggcagtcacagaggtagcaacaaggcctctggtccaggacttactgaaccatgatgtaagtagagtttgggtggacttagcttggggtagccagacatgcttcagaagcagaccctgtgcaaaatcttccttctggtcttgagcaaccatacctatctctggctgctttaggactgctacatcctggaccaaagtggaaccaaaatctacgtgtggaaaggaaaaggagccacaaaggctgaaaaacaggcagccatgtctaaagcgctggtaggagctacagatgtgcaatactgttcaaataattctgctaagagcacttcaggtgtgtcactccacagagccatgctaggtatttgagcatataacattgtgcttacgtacacggactgc

SEQ ID NO: 69082 - DNA, 358 bp, Homo sapiens
ttggagggctggggcaaaattctccagaaggccttgtatgctgctgaatcaacattcagtatatgttactttctcccattgccaggattcaaggttcctgaaatcaaggggtggaagtgaaagtggcacaactcaacatcacccttagtgatccactagcaaaaattttgcttcctcttcctgcaacattacgttctgctggcctagaggtcttggttccaaagggaggaatgctgccaccaggagacacaacaatgattccattaaactggaagttaagtttgccacctggacactttgagctcctcctacctttaagtcaaaaggctaagaagggacttatagtgttggctggagg

SEQ ID NO: 69083 - DNA, 718 bp, Homo sapiens
cagctgtggtgtcctctacaccatctgtggtcatgtgaacagtagcacaaggtgtatctacatcagcaatcaaaatggcatcaaccagacttccttcccccaaaagcttagtgagtgccccaactcagattcttgcacagttccctaaacaacatcaacagtctcctaagcagcagttatatcaagtgcaacagcagacacagcaacaagtggcccagccttctccagtatctcatcagcaacagcctcagcagtctcctttgccacctggtattaaacctaccatccaaatcaaacaggagtcaggtgttaaaatcatcacacaacaggttcaaccaagtaaaatcttacccaaaccagtgacagcaactctacccaccagtagcaattcccctattatggtggttagcagtaatggtgcaattatgacaactaaactggtaaccactcctactggcacacaagcaacctatacccggccaacagtgagcccatccattggtcggatggctgcaacccctggagctgcaacctatgtgaaaactacgagtggtagcatcattacagtagtacccaaatcattagctaccttggggggcaagataattagcagtaatatagtttctggaacgactaccaaaatcactacaatcccaatgacttccaagcccaacgtgattgttgtacaaaagactacaggaaaaggaacgaccattca

SEQ ID NO: 69084 - DNA, 335 bp, Homo sapiens
cttgggattttagagcatgaattccagagccaggccacctggactcaaaagggagtgctgcccccatcccgcccaagcctgagtgcatgacctggcaccagtgtgtgatgacctggcaccagtgtgtgaagacctgtgcgtgatgacctggaaccagtgcgtgatgacctgacaccagtgtgtgatgacctggcaccagtgcttgatgacctgacaccagtgcatcatgacctgacaccagcgcgcaatgacctgacaccagtgcacgatgacctggcaccagtgcgtgatgacctgacaccaatgcgttatgaccttacaccagtgggtgttga

SEQ ID NO: 69085 - DNA, 457 bp, Homo sapiens
gtatctattgtccgtcgctgtacaacgtgcgagactggcaaaaacctggcgataggcatcatatgcggattgaactgtagactcacctggggactcacctggggactcacctggtgactcacatggggacccacctggggactcacctggggaccacctggggactcacctggggactcacctggtgactcacctggggacccacctggggatccacctggggacccacctggggactcacctggggaccctcctggaaactcacctgtgggtgcaggggcttcactggctccagcacctcctgtctcaggggcggagggggcctgtctgtccgcttctgggatttcatctccactgtcaaaatcgaactgttctccctcttcctcttcattattattggtatcatatttcatttcattttctaaaaagaaaagccaaacccacatcaaggagagat

SEQ ID NO: 69086 - DNA, 489 bp, Homo sapiens
tgtccgtacccggagatcctgatgactggtaaaaccctgccgttaccacaagttactcgccttgactaacattgcgtacagcgcgggctggcgtacccatcaacaactggcgtttctcgccgcgaaagcccgctttgacaaagctcatggcggcaacaatgctctcttcgccaatgaccgcgccatccataatcacgctgttcatcccgaccaatgcatcgcgaccaatcaaacaaccatgcaggatcgctccgtgcccgatatggccgttttccccaacgatagtgtcagtgtcgcagtagccatgcataatgcagccatcctgaatattggctcccgcttgcacgatcaaccgcccgtagtcaccacgcagtgaggcgagtgggccgatgtagacaccggctcccacaatcacatcgccaatcaagacggcactgggatggacaaacgccgtcgggtgaaccaccggaattaacccctcaaaggcgg

SEQ ID NO: 69087 - DNA, 480 bp, Homo sapiens
  misc_feature (1)...(480): n = a,t,c or g
gatctgccagagcaattagacaagggaaaaagagtggaggactcagatgaaaggaagaagtaaagttgcatttgcatatgatatcctcttgtatgtagaatattctgaggaattcacagcaaaactactagactaataaacaggttgagcaaggttacagggcacaagatcggtatacaaaaatcaattaaatttctatacactagcagcaaacaacctgaaaatgagacaagaaaacaacttcatttataatgctgtcagaaagaaaaatacttggagaaatttttaatcaaaaagtgcaagatttatactctaaaaactacaagacatcattcagagaaattaaagaatacctaaataaatgggaaggcctcctatgttcatagattggaagatgtactattgttnnnnnnnnnncagtccccaattggatttgcagattcaacataatccctatttaaatttttgctgccttttttt

SEQ ID NO: 69088 - DNA, 291 bp, Homo sapiens
gccagtgttggtgccggcctagtgggaggtgtctggtcactggtgtggtgggaggcgtctgggtcactggtgtgatgggaggtgtctgggtcactggtgtggtgggaggtgtctggtcattgtggtaggaggtgtctggtcaccggtgtggtgggaggtgtctggtcaccggtgtggtgggaggtgtgtggtcactggtgtggtgggaggtgtgtggtcactggtgtggtgggaggtgtctggtcattgttgtggtgggaggtgtctggtcactggtgtggcccctacata

SEQ ID NO: 69089 - DNA, 888 bp, Homo sapiens
aaggaaaagaaactcatcagatccagagagccccaagagcttaaaaatcctacttacttttctatcaaatccagtgtgacgccaggcaccagactgacacatttctgcatgcaaaaccagcgcagggcgatcttgatgggggtggtgaggcaggaggtgaataggtcagccgggaggtcggggatcatgggcagcagctcggtggcctcgcaggctgccagctggatgcagtttttcatcgacggaggcaaaggcatctgagcaagagggtgatttgggttgattgcagctacctccagctcctgctcccgctgtagtgcgaactgcttgaaggacttgacgatcaagccagcattggagcagtcgtagacgaagatcgacgggctgcccatccacgtctgcaggtcatatatggacagagggatgtactgcgtgtagttcttgttgaagacccagacctccccgttgactgtgggccggggcaccccgtggccattgtagtgaaagaggactcgctcctccttggcgttgcgacgtaaggacgtgcagagcttcttgacttcatccacagttgggtcaaggctctgcttgtaccgggcccttggctgccagttctcgtactgcttctgtaaatttgcaccgatggttcccagagctttctgaggacccatcgacagaggatcgatccagcattccaagcgtgcacagggcgtggtcttcaccacatcgggagggtccacaccaacattcaggcacaaaactaaggcaacactgactgtgttcatccgatccttcatcctccagctctgagctaaggatttggagccttcaattttctcacagagcctctttttcataaaagccaaaggtaggttccagtctgtaaga

SEQ ID NO: 69090 - DNA, 1207 bp, Homo sapiens
cccacgcgtccgctcaaacatggccgccacggcgcctctggaagggaaccgctctgggccccgcctttgatctcgttggtggggctgggggatgagagctgcaccgcgcgggacaagtcgccggcggcgcccgacggagcagaagagagagcatggagctggagaggatcgtcagtgcagccctccttgcctttgtccagacacacctcccggaggccgacctcagtggcttggatgaggtcatcttctcctatgtgcttggggtcctggaggacctgggcccctcgggcccatcagaggagaacttcgatatggaggctttcactgagatgatggaggcctatgtgcctggcttcgcccacatccccaggggcacaataggggacatgatgcagaagctctcagggcagctgagcgatgccaggaacaaagagaacctgcaaccgcagagctctggtgtccaaggtcaggtgcccatctccccagagcccctgcagcggcccgaaatgctcaaagaagagactaggtcttcggctgctgctgctgcagacacccaagatgaggcaactggcgctgaggaggagcttctgccaggggtggatgtactcctggaggtgttccctacctgttcggtggagcaggcccagtgggtgctggccaaagctcggggggacttggaagaagctgtgcagatgctggtagagggaaaggaagaggggcctgcagcctgggagggccccaaccaggacctgcccagacgcctcagaggcccccaaaaggatgagctgaagtccttcatcctgcagaagtacatgatggtggatagcgcagaggatcagaagattcaccggcccatggctcccaaggaggcccccaagaagctgatccgatacatcgacaaccaggtagtgagcaccaaaggggagcgattcaaagatgtgcggaaccctgaggccgaggagatgaaggccacatacatcaacctcaagccagccagaaagtaccgcttccattgaggcactcgccggactctgcccgagccttctaggctcagatcccagagggatgcaggagccctatacccctacacaggggccccctaactcctgtcccccttctctactcctttgctccatagtgttaacctactctcggagctgcctccatgggcacagtaaaggtggcccaaggaaggtgaaaaaaaaaa

SEQ ID NO: 69091 - DNA, 524 bp, Homo sapiens
atttcatcacaggtaaagggattgtggccatcttgaggtgtctccagtttaatgagacgctaactgagcttcggtttcacaatcagaggcacatgttgggtcaccatgctgaaatggaaatagccaggcttttgaaggcaaacaacactctcctgaagatgggctaccattttgagcttccgggtcccagaatggtggtcactaatctgctcaccaggaatcaggataaacaaaggcagaaacgacaggaagagcaaaaacagcagcaactcaaggaacagaagaagctgatagccatgttagagaatgggttggggctgccccctgggatgtgggagctgttgggaggacccaagccagattccagaatgcaggaattcttccagccaccgccacctcggcctcccaacccccaaaatgtcccctttagtcaacgcagtgaaatgatgaaaaagccatcgcaggccccgaagtacaggacagaccctgactccttccgggtggtgaagctgaagagaatccag

SEQ ID NO: 69092 - DNA, 623 bp, Homo sapiens
  misc_feature (1)...(623): n = a,t,c or g
aaagaaacagaagtctcgaacagagcaacaatgtataaagtatataataagattgaattactaataaaacaagctaccaaccatagaaagccctggataagatgagttcacagccacattttatcacatatacaaagataacctggtattaattctactgagtgtattccaaaaatcaaggtggaagtccttcctaaattatttgaaaacattattatcttggtagtaaaacctagtgaagacacaacaaaaaaggaaaattaccggtcactattcttggtgaaaattgaaacaaaaattcatgaagtactagcaagttgagttcataagcaaagcaaaaagttactttgccacaatcatgtaaacttcattgtatgaatgcaaagatgtttcatcatatacaagtaaataaatgtgattcaccatgtaaagataatttttaaaaaacaattatcacatgcagaaaaggcattcaagaaaatctaatattcatttataaaaacattctcaacaaactaagcactggagaaatatgcctgnnnnnnnnnnnnnnnnnnnnnnnnnnnnnnnnnnnnnnnnnnnnnnnnnnnnnnnnnnnnnnnnntaaggtctccatcagaata

SEQ ID NO: 69093 - DNA, 408 bp, Homo sapiens
gtcacggacacaggcagggactgggatgtgacaggctggagctcaaggacttgttgggggaatgggggtcagtgacaggctggaggcttaatgcgaggatggaggcttggctctaggggcagcacctggggtggtcatgggatctcagggaggggagtgggagtcagagaaagggtcttacagaagctggggctttgtgaggagctaagggagactcactgatcgaggtggggaccctgcaggcagaaacctgactgtagtgatagaggtggggtttctccgcacgcaggtcatgggggccttggcaggagcggttttggcaaagggtggggctggtgcctctggaaggtatgaagatgtaaaagaaggtgaaggaagcaggcttgcaggaaggctctgcggccaaaa

SEQ ID NO: 69094 - DNA, 2348 bp, Homo sapiens
gagcacgctccccgctcgccagaacgcagcttccgcggctgcagcccaggcagctattcgggaagcgtccgcccgtggtctcgccagggggtttccgacctccccagcccgacagcgcaggggcggggaccgcggccggagagctcgcccgagagcaccccctcccgttgcgcctctgggcgcacgcgcagccgctgcagcctccattatttagtccgcgatggcttccctcgcgccccaccgtcctcttccggaaggcggctccctccctgcgcagcccggagcccctgagatcagcctcgagcaggcgcccgagcgagactatccctaaacgggaacggcggtggccgactcgcgagtgaggaaaagaaggaaagggcagactggtcgcgaagagaagatccaggcctcagaggaggagaaaggccggagccagccgagctgtcacgaccggaggggggactcgcagccttaccaggcacttaagtattcatcgaagagtcaccccagtagcggtgatcacagacatgaaaagatgcgagacgccggagatccttcaccaccaaataaaatgttgcggagatctgatagtcctgaaaacaaatacagtgacagcacaggtcacagtaaggccaaaaatgtgcatactcacagagttagagagagggatggtgggaccagttactctccacaagaaaattcacacaaccacagtgctcttcatagttcaaattcacattcttctaatccaagcaataacccaagcaaaacttcagatgcaccttatgattctgcagatgactggtctgagcatattagctcttctgggaaaaagtactactacaattgtcgaacagaagtttcacaatgggaaaaaccaaaagagtggcttgaaagagaacagagacaaaaagaagcaaacaagatggcagtcaacagcttcccaaaagatagggattacagaagagaggtgatgcaagcaacagccactagtgggtttgccagtggaatggaagacaagcattccagtgatgccagtagtttgctcccacagaatattttgtctcaaacaagcagacacaatgacagagactacagactgccaagagcagagactcacagtagttctacgccagtacagcaccccatcaaaccagtggttcatccaactgctaccccaagcactgttccttctagtccatttacgctacagtctgatcaccagccaaagaaatcatttgatgctaatggagcatctactttatcaaaactgcctacacccacatcttctgtccctgcacagaaaacagaaagaaaagaatctacatcaggagacaaacccgtatcacattcttgcacaactccttccacgtcttctgcctctggactgaaccccacatctgcacctccaacatctgcttcagcggtccctgtttctcctgttccacagtcgccaatacctcccttacttcaggacccaaatcttcttagacaattgcttcctgctttgcaagccacgctgcagcttaataattctaatgtggacatatctaaaataaatgaagttcttacagcagctgtgacacaagcctcactgcagtctataattcataagtttcttactgctggaccatctgctttcaacataacgtctctgatttctcaagctgctcagctctctacacaagcccagccatctaatcagtctccgatgtctttaacatctgatgcgtcatccccaagatcatatgtttctccaagaataagcacacctcaaactaacacagtccctatcaaacctttgatcagtactcctcctgtttcatcacagccaaaggttagtactccagtagttaagcaaggaccagtgtcacagtcagccacacagcagcctgtaactgctgacaagcagcaaggtcatgaacctgtctctcctcgaagtcttcagcgctcaagccagagaagtccatcacctggtcccaatcatacttctaatagtagtaatgcatcaaatgcaacagttgtaccacagaattcttctgcccgatccacgtgttcattaacgcctgcactagcagcacacttcagtgaaaatctcataaaacacgttcaaggatggcctgcagatcatgcagagaagcaggcatcaagattacgcgaagaagcgcataacatgggaactattcacatgtccgaaatttgtactgaattaaaaaatttaagatctttagtccgagtatgtgaaaattcagcaactttgcgagagcaaaggatactatttttgagacaacaaattaaggaacttgaaaagctaaagaatcagaattccttcatggtgtgaagatgtg

SEQ ID NO: 69095 - DNA, 709 bp, Homo sapiens; identical to SEQ ID NO: 68353

SEQ ID NO: 69096 - DNA, 411 bp, Homo sapiens; identical to SEQ ID NO: 68354

SEQ ID NO: 69097 - DNA, 865 bp, Homo sapiens; identical to SEQ ID NO: 68355

SEQ ID NO: 69098 - DNA, 770 bp, Homo sapiens; identical to SEQ ID NO: 68356

SEQ ID NO: 69099 - DNA, 2513 bp, Homo sapiens; identical to SEQ ID NO: 68357

SEQ ID NO: 69100 - DNA, 371 bp, Homo sapiens
ctctccataaagacaggttacagattttaaatgattttcaacagttgttaggggatattcattggctgtgcgcaatgctaggtattgcaacttatcgactcaaacatctttatcaaaccctgcaaggagattcttcattagatttccccgcagcaattgatcaaagaggcagaagctgagttgcaacttgtagaacagatgcttcagcagagacatgcctcatggctgtagccgcaaaagcctttgcttattcttcatacccctcattctccaacaggactcctgggccagtgcttagacaagtctgtatcagtaatagaatggctctttctacctaatcaaacagttaaaaccttgcaagcctatcttcc

SEQ ID NO: 69101 - DNA, 359 bp, Homo sapiens
ctttgcagatataattaagttgactaatcattaaaataaggagactatgctagatatctagatgggcccaatgaaagcacatgaactctaaaatgcagaagataacaagggcccagaatggccaaaacaatactgaaaaagaatgtaagaaaactgacatttcctaatttcaaaacttactacaaagccatggtaattactacagcgcggtactggcacaaggaaagtcatagaaatcaacggaatagaattgagattccagaaataaacccatacgtcttctgtcaactgattttccataaaagtaccaagactactcaatggagaaaagaagagtcttttcaccaaatagtgccggg

SEQ ID NO: 69102 - DNA, 607 bp, Homo sapiens; identical to SEQ ID NO: 68360

SEQ ID NO: 69103 - DNA, 379 bp, Homo sapiens; identical to SEQ ID NO: 68361
  misc_feature (1)...(379): n = a,t,c or g

SEQ ID NO: 69104 - DNA, 337 bp, Homo sapiens
agtggagccgcacagcccggggctggcaggggccagccaggcgcagcccagccttccagggctgcaggcagtggcagtagatgtaagccagaactatctcacggcagtgccccgacttccgtgtgtccccccaaaacttgtacctggctcaggtggtggccctggcagccaggtgagatccagtgaggactagggttctgccttcccggtcagagcgagcagcaacgactccttcgagcagagcattaaggcggaaatagaacagcttctgaatgagaagagatagcatgcgacccaaaaatgtgatggggtcaatagataaaaaaccagacccaaa

SEQ ID NO: 69105 - DNA, 340 bp, Homo sapiens
gcagatcagaaaaaccttgtaaatgtccatttataaagaatgactgttgcagagtgaaatgaatgatggaagttcatgtcgctccacagagcacttgctggacatgatacagaatgaaggggacctgctgcatttctggagggattgcagaggacttcaaggaagcagggatggtgattcctaccacatccccattcaactctcctatttggcctatgcagaagacagatggatcttgcagaatgacagtggattagccaggtgatgacttaagcttaacgtaagcttaactaggtggtaattccaactgcagcggctgtaccagaggtggttgcattgc

SEQ ID NO: 69106 - DNA, 1130 bp, Homo sapiens; identical to SEQ ID NO: 68364

SEQ ID NO: 69107 - DNA, 374 bp, Homo sapiens; identical to SEQ ID NO: 68365

SEQ ID NO: 69108 - DNA, 282 bp, Homo sapiens
agcatttgataaaattcaacatcattctatgattaaaaaacctcaaaaaaactgggtatagaaggaatatacctcaacacaataaaagccatatacagcagacccagaggtagtatcataccgaacgggaaaaatgaaagcctttcctctgagatctggaacaagacaaatatgcccacttttaacactgttatttaacatagtactggaattcctagctagagcaatcagacaatagaaatgaaggcatccacctcggaaggaagaagttaaattatgctt

SEQ ID NO: 69109 - DNA, 364 bp, Homo sapiens; identical to SEQ ID NO: 68367

SEQ ID NO: 69110 - DNA, 290 bp, Homo sapiens
cgctggcacagacataggcacatgaccaatgggccagagtagggaacccagaaataaagccaaatacctaacagccaattgatcttcatcacagtaagcataatcaaggtagggaaagtacaccctatacaccctatagtcctgggataattggcaagccacatgtaaaagaataaaaatggattctcatctctcaccttataaaaaatcaacacaagatgggtcaaagacctaaatctaaggtctgaaaccataacaattcagaagatagctttggaaaacgcttgtac

SEQ ID NO: 69111 - DNA, 356 bp, Homo sapiens
caatcaactgtatacaatcaacatctgtagactacttcatccaacaacagcagaatacacattcttctcaagttcacatagaacattcaagacagaccacaagctaggtcataaaacacatcttaaaataaatttaaaagaatataaattacacaatgtctgctcttaaagcagaaatcattaacagtaagaaaaccggaaaatcccaaaatacatgaagattaaacaacacacctctaaataacacatagatcaaagacgatatctcaggataaattttaaaatattttgaattaaatgaaaatgaaaacacaagttatcaaaattgtgagatgtagtaaagcagtgcttgtagg

SEQ ID NO: 69112 - DNA, 678 bp, Homo sapiens; identical to SEQ ID NO: 68370

SEQ ID NO: 69113 - DNA, 359 bp, Homo sapiens; identical to SEQ ID NO: 68371

SEQ ID NO: 69114 - DNA, 372 bp, Homo sapiens
  misc_feature (1)...(372): n = a,t,c or g
nttttcaggctgtgacagtgaggaactccatggctaagtctctgtatagtgccctgtttgactggatagtttttcgaattaatcatgcacttctgaatagtaaagatttagagcataataccaaggtaatgatatattggattataatatgtttttccctgaaagctattttaataaactggttaatacatgaaatttaaaaacacagaattatatagagtaataagtaagaaatcgcttttatttgttatttattaccctgttcagaagaattgttctgtgtgtctttccagaccttttttattatgtgtttttacctcccgaacgtgtatattcagagttgctttaaaaaatgtaaatagaatcaagctc

SEQ ID NO: 69115 - DNA, 383 bp, Homo sapiens; identical to SEQ ID NO: 68373

SEQ ID NO: 69116 - DNA, 383 bp, Homo sapiens; identical to SEQ ID NO: 68374
  misc_feature (1)...(383): n = a,t,c or g

SEQ ID NO: 69117 - DNA, 384 bp, Homo sapiens; identical to SEQ ID NO: 68375

SEQ ID NO: 69118 - DNA, 390 bp, Homo sapiens
atatgtgtaaagagtaaaaaataaagcgtctagcagacaacataggagaatatcttcatgactttgaggtaggacaaagatttattgaacaggacttaaaatgtctaactgtaaaggaaaagactaataatctggatttcactgaaattaagagcttgtgctctcactagacaccattaagacagaacaggcaagccccagagtgggagaaggtatctgaaaagcatatatccaataaaggggtaatctccagaataaagaattcctctaatcaatgagacgacagatagtccaaatgaaaaagaggtaagacttgaattgaatgtaacgaaacagactatccaaattgccaataaatgtaagaagaggtgctcaatctcattaatcacc

SEQ ID NO: 69119 - DNA, 525 bp, Homo sapiens; identical to SEQ ID NO: 68377

SEQ ID NO: 69120 - DNA, 371 bp, Homo sapiens; identical to SEQ ID NO: 68378

SEQ ID NO: 69121 - DNA, 375 bp, Homo sapiens
caagaaatctgaaactaataagtgagtattgcaagatttcaggataaaaggttaatatagaaaatcaatgttttcctatatatcagcaatggacaagtggaatttgaaattaaaaacacaataccattgtgagcacacacctaaaaaatgaaatacttagatataaacgtaacaaaatatgtacaagatccatatgaagaaaactacaaaattctgatgaaaaaaatcaaagaacagatggagatattccatgtttatagatagaagattgaataccaagacgtcagttcttcccaacttggaataatagattactgcaatcccaataaaaattctagcaagttattttgtagacacaaactgattatgaagttt

SEQ ID NO: 69122 - DNA, 447 bp, Homo sapiens; identical to SEQ ID NO: 68380

SEQ ID NO: 69123 - DNA, 355 bp, Homo sapiens; identical to SEQ ID NO: 68381
  misc_feature (1)...(355): n = a,t,c or g

SEQ ID NO: 69124 - DNA, 410 bp, Homo sapiens
ggcgccgcgtcgcacccagggtggctgggttggcagcctggcgggcggcgcggaggagagggcgcaggggtccttctggccgtcttccgctccccctcccggcctttacttctgtcaggccccgcctggcccaggcccgcagcctgtttccttccacctgggcgggtcgggggctgcgggcattggggccccttaaggaaacccaggcctccagggactccgccgctccaggactcggcgcggagggaatgactgagcgacgaccgaggcagggggtgatgtggtacctcgaatgctgtggaaatggcaggaatgatgacccggccggaccttagacccgagatcgatgagaggccgccagcactgcccgggaaaccggccggctcttctccccctcctgctgcggccgc

SEQ ID NO: 69125 - DNA, 1304 bp, Homo sapiens
tattcagtgattgtctagagagggctactaagattgtaccttctaaactgtattgtctttccttattcgtatgagttggcatggcttcttttatcactaattccttttctggaaaggggtaaaaatagttatgacagttttgggaaggtgcgttttcagattagctgtttccagagctgaaggtaatcatttattcaaggcctgatgagctggagtttgcagcaggagtaggagttaatgaagtattgatacttggtaaccctttttgtaaaaaaaaaaaattttaattttttttttatagagacaggggtctccctatgttgcccaggctggcctcggaactcctgggctcaagggatcctcccaccttggcctcccaaagtgctgggattacaggcagccatgcccagccagggcagacatttttatgcacaactttctgtggggctcaagtgcacctatgatacataaattttacagttcttgatccccaaacagagcaggaggcagggtgcctggggccagggttcctttggggaaatgtggtccttgaggtagagtcacagatgccggagggtgaccagcactactgggggagagatctcctctggggagagatgcatgccaaaggtccctcttgcattcctcatacctcttgatgcggacagaggggtgtccagctgaatgatgtggggcccccgcatcctctgcagctgggcccgagtcagcttccgtggcctgctgtcccggggctcctcggccccctcaatcctttggctggccagctcctcccggatctctctgagcatgtcctcagcccgcattgggcgcagggatgtgtggccagctttcaggaacagaggcccctcttcttcctcctcccctgaggactcccaggggctttccccggcagagtcagcatgggttggggaggagggaagctggccccgaagccgggccctgtggagtgtttccaccaccacattccctcgctcggaggccccatcttcttcctcagaccaggttggtgggtcttcctggggaagactgcctccttttaggattccttccggcagttcgggggcgcttcggcgttgaggagcttgggggtcgggagggtggggacgcagagggatgtcccggagttccagggtggagaaggtgaggcgagggtcccgccgaagggctctttggcgtagacggctcagtggggagcgggaccccgtgggggtgcctgggatcaaagtgccgtagccagagtctgaggtatcatctggcacaaggggagcatcttcatctgtgtc

SEQ ID NO: 69126 - DNA, 352 bp, Homo sapiens; identical to SEQ ID NO: 68384

SEQ ID NO: 69127 - DNA, 1398 bp, Homo sapiens; identical to SEQ ID NO: 68385

SEQ ID NO: 69128 - DNA, 1579 bp, Homo sapiens; identical to SEQ ID NO: 68386
  misc_feature (1)...(1579): n = a,t,c or g

SEQ ID NO: 69129 - DNA, 396 bp, Homo sapiens; identical to SEQ ID NO: 68387

SEQ ID NO: 69130 - DNA, 413 bp, Homo sapiens; identical to SEQ ID NO: 68388

SEQ ID NO: 69131 - DNA, 369 bp, Homo sapiens
aatagaagtaactatacttgcatcagatagaatagatttcaagtcaaaaactagaaaaagacgtaggtcattacataatgataaagggctcaattcagcaagagcatataaaggttataaatatatatgcaaacagtattggagcggtcagacgtataaagcgtaatagatttagtaaagggagagacagacggcgacacaataatagctgaagactgagttcaacgccccacgttcaataatgggcaggtcattcagacagaaaatcaagacaacccaaatcaagactgaggtacactctaggcaaaatggacctgacacctagagaacgtttcatgcaactggtatagaatacacgttttctcatca

SEQ ID NO: 69132 - DNA, 393 bp, Homo sapiens; identical to SEQ ID NO: 68390

SEQ ID NO: 69133 - DNA, 291 bp, Homo sapiens; identical to SEQ ID NO: 68391

SEQ ID NO: 69134 - DNA, 378 bp, Homo sapiens
attgttaaaaccactgtggtaattaagaaatactttggggagatgctttgaggctgtgcagatagccatgtttttccttgaaagttgttgagccaacgtcggatgggaattatgtcaccaaacaggagctcaaaggattagatatagttagaagagataggtgtgatcttgctaaagacactggaagccttgtgattgggcaaattcgttatgatcaaagccggatcagtatagtggaaaacttcagtaagagagcttatagaaaatggaaatagatgtgataaatggcagtatgccagtgagccagtttgaaagtataaaggcatctccataggatcaacatgaccaccttcctctaataagcctactttaggtaca

SEQ ID NO: 69135 - DNA, 349 bp, Homo sapiens; identical to SEQ ID NO: 68393

SEQ ID NO: 69136 - DNA, 931 bp, Homo sapiens; identical to SEQ ID NO: 68394

SEQ ID NO: 69137 - DNA, 599 bp, Homo sapiens; identical to SEQ ID NO: 68395

SEQ ID NO: 69138 - DNA, 331 bp, Homo sapiens
ttaatctctggattcaatgtaatcccaatcaaaaccccagcaaatccttgtgtgaaaattgacaagttgattctaaaatttatatggcactgcaaagcacgtagaataggcaaggcaatgtggaataagaacaaatatgggggacttatacaataagatttcaagatttgccataaagttagaataattgagatagtgtggtattagctccagggaagacaaaagatcaagggaacaaaacagagtccagaaatagatccaaacatatatagtcacttaacatatgacaaaagcaccactgcaatccaaaggaggaaaatatacccttttc

SEQ ID NO: 69139 - DNA, 356 bp, Homo sapiens; identical to SEQ ID NO: 68397

SEQ ID NO: 69140 - DNA, 394 bp, Homo sapiens
  misc_feature (1)...(394): n = a,t,c or g
ngaagatcaaaagaaaatatcaaacttgaacaacactatagatcaaataaacctaacagacagatataaaacattccacccaaaagtagcagaacacacagtgtcctcaagtgcaaacagaacattctacagggttgatcacatgctaggtcagaaaacaagtcctaacaaatataagaagtttgaaataattccaagtatcttttccagccacaatggaatgaaactaaatcaaaaacaaaaagaaaaaaattcaaaaatatgtggaaattaaacaatatattctggaacaactaatgggtcaaagaagaaaccaaaaagggaaattagaaaatatcttgagacaaattaaaacaaaaatctcccccaaaacttatgggatgcagcaaaagcc

SEQ ID NO: 69141 - DNA, 333 bp, Homo sapiens; identical to SEQ ID NO: 68399

SEQ ID NO: 69142 - DNA, 341 bp, Homo sapiens; identical to SEQ ID NO: 68400
  misc_feature (1)...(341): n = a,t,c or g

SEQ ID NO: 69143 - DNA, 338 bp, Homo sapiens; identical to SEQ ID NO: 68401
  misc_feature (1)...(338): n = a,t,c or g

SEQ ID NO: 69144 - DNA, 367 bp, Homo sapiens
aggtcaggacaggcccaggttaggccaagccaaggttaggacaaggccatgataggcccatgcccaagccagggcagggttagggtagcccagggcatgccaaaatcagggcagggccatagcagtggcaggactagcactagggccagggcaagctgctggaccacagcatggtggggacaattcagggccaggacagaggatggcaaggcaggtccagggccatttcatggactcggtaggcttggggtcaggccagggcagggcaaaggcaaggccagggagaaggcaaggccggggccaaggcagtgccagggcagggcaggaccagtgcacccccaacgcagggtgagggcaaggccagggc

SEQ ID NO: 69145 - DNA, 366 bp, Homo sapiens; identical to SEQ ID NO: 68403

SEQ ID NO: 69146 - DNA, 333 bp, Homo sapiens
catgataactaccatgtagaccaatcgtatacaggtccaagaaataagtctgagtatatatagccaactgattattgagaaaggtattccaaaaatatgttgaggggaaggacagtttcttcagtatatagtggtggaaaatctgtatatccatatgtggaagaattagattagactcatagttctccccatgcacaacattcatctcaagatggatttcggaatcaaatataagaccctggaattatagagctcccagaagaaagtatgggagaaatgcttcagggcattggtctgggcaaagattttatggctaagccctcaaaaacgtaa

SEQ ID NO: 69147 - DNA, 403 bp, Homo sapiens; identical to SEQ ID NO: 68405

SEQ ID NO: 69148 - DNA, 334 bp, Homo sapiens; identical to SEQ ID NO: 68406

SEQ ID NO: 69149 - DNA, 719 bp, Homo sapiens
agaactgaggaaaacctccaatgcaatccacaatccaatcccttgactctctgtaccgggcaaggcgccaagcaccagccccagcgcgccgcacctgccggggccgcgatctcccagctcatcgagtccctcgcgcccgtggccctttgtgccaggcgggctgcgtcccctcaagtcgtctccaccgcggctccagctcccgccactgcccgggctggagacctgacaacttttctgaaccgccgtctccatctcgcacccttcccgggctccaggaccgtcccctgtgcgccctcatctgcaccgtcgccgtccgactccggagccggagaccgcgctgggcgcaggaggagagagagcgcgggcgccggggaggggaaatctctccgggactgctgctggcggacgagggacggagaggagatggggccgcacttacccggagctggaactgcctgtccgcgtggacccgctcctctggcgcggaaactccgtgtctgcagactccctcagccctggagacttctgccggaaacccgggacaccaagaggggcccagcccttccccacctctctcctgaccgttactccggacaggtagggtctgcgctcctcttcctctctaaattgcgggtcacatttgcggatgccagaggagctcgtgccttcggaaattaaaaatcctatccagttgattcggacccatcttccggacgaaa

SEQ ID NO: 69150 - DNA, 475 bp, Homo sapiens
  misc_feature (1)...(475): n = a,t,c or g
cgcctggctgcgggcccctcggcggtcccagggcccacagggaccgtcctcctccggccctctgcgaagcctcttctctgcctcaggcaccgccctgttcttctccaaggtctggggtacagcagcgccctccaggcccggcgtggcccagggcaggaagcgcacggcctgcgccgggggctcccgcttccgaccggggggtgctttcgtcctggcctctgggggatcggcggcggggggcggcacagggctcctgcactcctggatggctctgctccgggtcagcgggaattggtcccgacgcctaacctcttgaagcggcgccctccaacggctctctcctgcccgccggcccgcggctcctgggcctcccaggctagtcccccggcttctgcgagcgcacgtgtggtgtagagccgcacaattaganggcaggttcctagcgacaatcagagatctccatagtcatcacgat

SEQ ID NO: 69151 - DNA, 602 bp, Homo sapiens; identical to SEQ ID NO: 68409

SEQ ID NO: 69152 - DNA, 739 bp, Homo sapiens
cttctactcaagacatttgtccacatacatgcagcatgtcctggcccactcagttcccaccgcagacacctggtcacaccacccactgaaatttggtcacttccacattctcagccacatacaaagaacggggcccagacaacccactagagccgcacatgcgtggccacacccagtgacagctatgtttcctcaggcgcccgcccaagatactgacgtcacaggcccacccagatagaatcacacccagagttcacccatttgctgacccagtcccacacgacacaatcgcagctatatacacttgttacacgtatctccactgctgcacactgacatctggtcacagatgcacacggacagacacacatttggtcccacggagaccacatgcagcctcaaccagaccagtcacaccaacacactgtttttggccacacactgtcacgtggtcacacatactcagtcataggtgctcaaatctggtcacagcatcagtcacacagtctattgtgacagccacactcatagggacagtcctctatacacaaccacatacagaggtactgatggccacagcatgcaaccacccacaaacaactgtccccaaggatggcctccctcaagacacagccatggtggtcctataggaatggccacagcatcaatgtccatgtgacccagccacctatcatggtcataatcccgtcacccagtgtccatacacagctgtagcatg

SEQ ID NO: 69153 - DNA, 402 bp, Homo sapiens; identical to SEQ ID NO: 68411

SEQ ID NO: 69154 - DNA, 386 bp, Homo sapiens; identical to SEQ ID NO: 68412

SEQ ID NO: 69155 - DNA, 1136 bp, Homo sapiens; identical to SEQ ID NO: 68413
  misc_feature (1)...(1136): n = a,t,c or g

SEQ ID NO: 69156 - DNA, 396 bp, Homo sapiens
caagatacagaaatagaacttcatcttcagctaaaagttgagagatgggaaaaaatatttttttaaaaccctttatgcttacaatcagctgattttttacacaggtgccaagacaattcaatggggaaagaataatgttttcaatacatggtgtaagcacaactggatatacacatgcaaaagaatgaagttggatccctatcttaaactatataaaaacattaaatgattgaaaggcttaaatctcagaactaaaattataaaactcttagaagaaaatgcagaggcaaatctttgtgaccttggatttgacagtggtttcttacatattatacccccagaagcccattcaggaaagtattgaaaaatctgacttatatcaaaattagaacagat

SEQ ID NO: 69157 - DNA, 400 bp, Homo sapiens; identical to SEQ ID NO: 68415

SEQ ID NO: 69158 - DNA, 374 bp, Homo sapiens; identical to SEQ ID NO: 68416

SEQ ID NO: 69159 - DNA, 340 bp, Homo sapiens; identical to SEQ ID NO: 68417

SEQ ID NO: 69160 - DNA, 356 bp, Homo sapiens
aacaccacacatcagtattcctgatcaagatttttttaaatcaatattcaacaaaatactggccaacaggattcagtgggacattgaaaggattacacatcatggccaagtaagatttacagctggtatgcaaagatgtttcaacatgctcaagtcaataaatgtaatgtctattacattaatagaatgaaggaaaaaaatgtgatctccattgatggagaaaaagcatttgagacaatgtcatgccctttcatgataaaaactcaacaattgggaatagaaggaaacaacctaaaatagaggccatatgaacatcccactgtaaacatcatattcaataagactgaaaggacttt

SEQ ID NO: 69161 - DNA, 343 bp, Homo sapiens; identical to SEQ ID NO: 68419

SEQ ID NO: 69162 - DNA, 295 bp, Homo sapiens
caagactgtggtatttgcaaaagagacaaatccatcagtggaacagactggggagcccagaaatagaccacgcaaatatacaaaagaacaaggcaatatgatggagaaaagatagtcttttcaagaaatggtgctggaacaactgaataagtacatttttaaaaaacgaatccatatatagatgttatgtcctttacaaaaatgaattcagaatgtatcacgaacataaacataaagcacaaagctatcaagcttcaacaagataatccagatgacctcgtattttgcaatgaaa

SEQ ID NO: 69163 - DNA, 331 bp, Homo sapiens; identical to SEQ ID NO: 68421

SEQ ID NO: 69164 - DNA, 305 bp, Homo sapiens; identical to SEQ ID NO: 68422
  misc_feature (1)...(305): n = a,t,c or g

SEQ ID NO: 69165 - DNA, 324 bp, Homo sapiens
atgagaacacaaaagaataataacaaaatgatacaggagtcaattctgcaaggagtcataacaatccttaatgtatatgttcctaacaagaaagcatcaaaatacatgaggctaaaactaatgcaactgcaaggaatccactattgtagttggactcttcatcactcctctgtcagtaactgacagatctagcaggcagaaaatcagtaataatatggttgaactgaagagccacatcaatcaactgaatctaactgatgttaatatactatatccaaaaccagtcaaataaacattcttctcaagttcacttggaatattcac

SEQ ID NO: 69166 - DNA, 349 bp, Homo sapiens
cagaccaatgcgcgaacatctacaaaacactgctgggagaaatgaaagatgtaagtagagtggagagatattcatatacttgaagactcaatattgttgagatgttaatttttcccaaactgatctacagattcaatgcaatcccaataaaaaaccccagcagggtttttttgttttaagtagaaattgccaatctggttctaaaattcacgtggaaattcaaaatatccagaagagtcaaaccagttgaaaaagaataaagctagagagctaatactacatgatctcatggcttattataaagattcagcaatcaaaagagtatgccattagccaggtgaggtggcac

SEQ ID NO: 69167 - DNA, 339 bp, Homo sapiens
gctcctggaactgataaatggcttcccagttttaagatacaaaagcaatgtacaaaaatcagtagcaattctatataccagtaaccctcaagctgagagccaagtaaagaatgcagtcccatttgcaatagctacaaaaaaaagaaaaagataaagtacctaagaatacatttaaccaagtaggtaaaagatctcaacaaggagagctacaaacgctgataaaagaaatcacaggtgacacaaacaaaaggaaaaaaatttcatgctcatggattagaagaatcaatactgttgaaacagccatactgtacaaatcaatctacacattcagcataattc

SEQ ID NO: 69168 - DNA, 338 bp, Homo sapiens; identical to SEQ ID NO: 68426

SEQ ID NO: 69169 - DNA, 719 bp, Homo sapiens; identical to SEQ ID NO: 68427

SEQ ID NO: 69170 - DNA, 307 bp, Homo sapiens; identical to SEQ ID NO: 68428

SEQ ID NO: 69171 - DNA, 328 bp, Homo sapiens
acctcaagggcacctttgccacactgagtgaactgcactgtgacaagctgcacgtgaatcctgagaacttcagtctcctggacaacgtgcatggtctgtgtgctgacccatcgctatggcaaataattcaccccatcagtgcagactgcctatcagaaattggtggctggtgtggctaatgccctggcccccaagtatccataagctagctttcttgctgtccaatttctattaaaggttcctatgttccctaagtgctacttctaagctggggaatattatcaagggccttaagcatatggcccctgcgtaataaaaaacatttatt

SEQ ID NO: 69172 - DNA, 412 bp, Homo sapiens; identical to SEQ ID NO: 68430

SEQ ID NO: 69173 - DNA, 333 bp, Homo sapiens; identical to SEQ ID NO: 40055

SEQ ID NO: 69174 - DNA, 317 bp, Homo sapiens
ccaataacagctgaagatttcaacaacccactttcagcaatggacaaatcttcttgacaggaaatccgcaaagaaacctcagatttaatctgcactacagacaaaatgggcctaatagatatttacagaacatctcattcaatggctgcagatacacattcttctcctgagcatatggatcattgtcaaggatagactttaggttaagtcataaaacaagccttataacatttaaacaaaaaatctgaaataatatcaagcatcttctctcaccacaatggaataaacctagaaatcaataacaagagcaattttgg

SEQ ID NO: 69175 - DNA, 329 bp, Homo sapiens; identical to SEQ ID NO: 68433

SEQ ID NO: 69176 - DNA, 327 bp, Homo sapiens; identical to SEQ ID NO: 68434

SEQ ID NO: 69177 - DNA, 297 bp, Homo sapiens; identical to SEQ ID NO: 68435

SEQ ID NO: 69178 - DNA, 295 bp, Homo sapiens
aacagtgtgatgctggcataggagcagacatacagatcaatggaactgatccgacagtctagaagtaaatccatgtattatatatttatggtcaaattgttttccacagactaccaagacaattcaacagggaaattatcttttcaacaactggtgccaggaaaatggtccacatgcaaaagaatgaaactgggtctcctaactcacaccacacgtaaaaagtaatcaaaatggatcaaagatctaaatggaagggataaaactgtgaaacttttagaaaagataaatgtaaatc

SEQ ID NO: 69179 - DNA, 414 bp, Homo sapiens; identical to SEQ ID NO: 68437

SEQ ID NO: 69180 - DNA, 386 bp, Homo sapiens; identical to SEQ ID NO: 68438

SEQ ID NO: 69181 - DNA, 412 bp, Homo sapiens; identical to SEQ ID NO: 68439

SEQ ID NO: 69182 - DNA, 800 bp, Homo sapiens; identical to SEQ ID NO: 68440

SEQ ID NO: 69183 - DNA, 431 bp, Homo sapiens; identical to SEQ ID NO: 68441

SEQ ID NO: 69184 - DNA, 365 bp, Homo sapiens; identical to SEQ ID NO: 68442

SEQ ID NO: 69185 - DNA, 398 bp, Homo sapiens; identical to SEQ ID NO: 68443
  misc_feature (1)...(398): n = a,t,c or g

SEQ ID NO: 69186 - DNA, 292 bp, Homo sapiens
gaacctcccccgattggtgagaccagaggttgatgtgatgtgcactgcttttcatgcctatgtagaggcatttttgataaattacttatatgttatagccagcagccatccttcatccttagttttatgccccggaactcctgttctttgctaaaaggtagaagctgcttttgcagaatgttgccaagctgctattaccgcttgcctgcctgttgccaaagctcgatgaacttcgggatgaagggaaggcttccgtctgccaaacagagactcaagtgtgccagctcgtgcc

SEQ ID NO: 69187 - DNA, 575 bp, Homo sapiens; identical to SEQ ID NO: 68445

SEQ ID NO: 69188 - DNA, 437 bp, Homo sapiens
cgctctactccattagcttagtggccagttaatgattgaccagagatttcgttaaatgctatgagcctgtaagtctaccagcctttgttgaagggctgggtatgtgttgttggggcacgtttcaatgctctggaaggcaattgacaactctgccttaactttcagttcctgcttgcacagttgctcaaggtctttctcaggctcagacaaatgacagtgactctgacagtgagtccaagaggcaggcccagagatcctctgcttctgagagtgagacagaagagtctgatgatgacaagaagccaaagcgcagagggtgtcccaggagcgtgcggaaggaccctttgagatctttcctctgcatggacacagacctgcacatgtcagagcttttcagagtatctatcctatgaacatctttcctcccagctcgtgcc

SEQ ID NO: 69189 - DNA, 726 bp, Homo sapiens
ccgcggcgcctcgacacgagcgacgtcctgcagcagatcatggccatcaccgaccagagcctggacgaggcacaggccagaaagcatgctctgaattgccatcggatgaagcctgctctgttcagcgtgctctgtgagatcaaggaaaagacagtggtaagcatccgtggcattcaagacgaagatccccctgacgcccagctcctgaggctggataacatgctgctggctgagggcgtgtgcaggcccgagaagagaggaaaaggaggagcggtggccagggccggcacagcaacaccaggtggctggtccaaatgacaatagcattgagcactctgactacagggccaagctgtcccagatccgacagatttaccactctgagctagagaaatatgaacaggtgatctttctgcatggaagagtttctgtcatgtgaatgcgcatttgtcaaagcgaaacacggaacgctaaccacctttctttcgtggcgcagaacagggagtccatgcagttggtcgctgcagaggtggtccattgttactgaaagccctttccatttacttaacgagtcacccgccggtgtgtgaactacagggggtggcaggcggctgctccgctgtggaacctgctgccctgtgccaccctgctgcctagtcacaggccggcgtgtctgtgctcccaccccaggcctgtcgtgagttcaccacgccgagccctatgaaa

SEQ ID NO: 69190 - DNA, 335 bp, Homo sapiens; identical to SEQ ID NO: 68448

SEQ ID NO: 69191 - DNA, 1042 bp, Homo sapiens
  misc_feature (1)...(1042): n = a,t,c or g
ttttttttttttgttatagaaatctgtttaatggtttaggaatgtgtacactctggctctgccaagtttccataaaggcaacttttccatgttttaaaaaatagatttggtataaagatttatatattcataaataggtggcatgaaaaattaccaaatgcaaatggaatacttgcgctgactgaagccctgttcaccccaagtccaggccctgcaggggtccgagggtctctgctggaggaggccccaactccggcagcctcttagggaagagaaactgaattaaatgtgtattaggaacccctccagctccttaagccagcgtcgcactggccccaccgaggcctcagcccacctccctctgcttccccccgccacctccaccattgccccctcccctgcactctggcccctgaccccacctgttcccactctttggcaatttatcaacaaaggaagagatgacactgttctccttccgccccagagcccgggctgccgggagagcttagcctgccaaggggaggaaacaagccggctttgttttgtctcacacacttccccgtcttcactcccagcccagttttaagggccggaagggcagtggggccnccctcctggtgggatacagcaggcaggagcccctgcaaccccaggtacaggtcttgagtccctggacaccggcttttgtgcctgagagggggtgggaacgcttctctgtaggaaatggcttcagtccaggatccaggggtaggggaacctcgaccatggggtgggttgctcctgccagggggtaacttagcaaggccccagggtggagccagttctgggactgtgtccagctaggcatctgtgaccccaaatngcatgaataaaaggncaggttgctaagagccaggggaggncatggggcagggagaccaggttggcccagacaggacagaggtgctccagggacagggtgctggagtgaagccaggtggagcggtggagctgtggagcctttgaaacatcctgatggcccaggcctttgttcccaaga

SEQ ID NO: 69192 - DNA, 403 bp, Homo sapiens; identical to SEQ ID NO: 68450

SEQ ID NO: 69193 - DNA, 336 bp, Homo sapiens; identical to SEQ ID NO: 68451

SEQ ID NO: 69194 - DNA, 350 bp, Homo sapiens; identical to SEQ ID NO: 68452

SEQ ID NO: 69195 - DNA, 341 bp, Homo sapiens; identical to SEQ ID NO: 68453

SEQ ID NO: 69196 - DNA, 398 bp, Homo sapiens; identical to SEQ ID NO: 68454

SEQ ID NO: 69197 - DNA, 607 bp, Homo sapiens; identical to SEQ ID NO: 68455

SEQ ID NO: 69198 - DNA, 1326 bp, Homo sapiens; identical to SEQ ID NO: 68456

SEQ ID NO: 69199 - DNA, 529 bp, Homo sapiens
tttactgcccaggctcaaaacaaaaaaaccccacaaagcaaaaacttcaacctacagctaacatcacatgtgatggtgaaagactaaatactttcacctctaaaattaggaacaaagcaatgctcttatatggtctagatgtactatatgtactagaggtcttagccagtgcattaagacaataaaaagaactaaaagcataaagattagaacaactataattactcccaagaagcatgattgtgtatctagaaaatcctaaggatccaaaaagctactaataaatgaatttatcaaagtctcagtatacatgatgaatatattttaaaaaatcaattgcatttctatatactaagaattagaaaatatttttaaacatttcatttataataacaaaaaatacttttgtcatgaattcaaaaaaagttatgcaaggcctgtctactgaaaactacaaaacactgcaaaagtaaattaaccaaaacccaaataaataaagaaataaaccaggttcacggattctcgtgcc

SEQ ID NO: 69200 - DNA, 323 bp, Homo sapiens; identical to SEQ ID NO: 68458

SEQ ID NO: 69201 - DNA, 405 bp, Homo sapiens
gcaggagttcaagaccaacgtggccaacatggggaaagcccatcactactaaaaatacaaaaactagccaggcgtggtgacacacatctgtaatcccagctactcgaggcgctgaggcaggagaatcacttgaaccaggaggcagaggttgcagtgagccgagatcatgccactgcactccagcctgggccacagagcaagactccatctgacaactagctgttccagcccccagccacttgagtcatctcagctgaggccccacacaccaagaagcagaggtgagtctaatccacagagccctggtcagacatgatgacggtggcttcacccgggggtctccgcacagcagcggcctcgggtaagcagaacctcgctccggggtttacaaatccttcctcgtgc

SEQ ID NO: 69202 - DNA, 330 bp, Homo sapiens; identical to SEQ ID NO: 68460

SEQ ID NO: 69203 - DNA, 344 bp, Homo sapiens; identical to SEQ ID NO: 68461

SEQ ID NO: 69204 - DNA, 452 bp, Homo sapiens; identical to SEQ ID NO: 68462

SEQ ID NO: 69205 - DNA, 753 bp, Homo sapiens
ggcacgagcccatgtgtggggagacccaccaggccctgcagggggccatggagaagctgtggagccgctttatggagctcatgcaggagagaaggtggacttgaaggagagggttgaggaactggaacattgctgcatctagctgtctggagagagacagacaccatcggggagtgggaagccagggcacggcaaagagagctgcacattggtcagaggggccccagcgtctgagtcctgtcctcctgcaggagagtacatcgcactgtaccagagccagagggcagtgcggaaggaggaggagtgcatcagcaggctggcccaggacaagggagaggtgaaggtgaagctgctggagctggcgtggcttgtggacgactgcaacaagtggcatagcagattcctggcagctgcccagaaccctgctgatgagcccactccaggggcccccgccccccagtagcttggggctactgacaagccagggtagtgagtagagtcctcaggcacagtgggcacgcaggagcaggggagggctcccacagcaccctgcctccctctctccaaagatctttgtgaggtgagccttgccagcagtggggagtctgcacaaggagaggcggggaagcattctccctgtgacaaccccactgagcagcagatcatgcaactgcttcatgagatgcagaacctccaggagcacccaggcttgggcagcagcccttgcattccttttttgtaccagactgatga

SEQ ID NO: 69206 - DNA, 399 bp, Homo sapiens; identical to SEQ ID NO: 68464

SEQ ID NO: 69207 - DNA, 359 bp, Homo sapiens
ggaagaatatcctcttcaacaaatgatgctgggacaactagatatccacatgcaaaagaatgaagttggactgttccctcatgctacatataaaaattaactcaatgtgatcaaagacctaaatataaagagctcaaactatgagaaaagacataggggtaaatctccctgaccttggacttggcaatggtttcttaaatatgataccaaaagcacaagcaactaaagaaaaaataataaattgggcttcaacaaaattaaaaacagaaagtgaagacaactcacagaatgggagaaactatttgcaaatcacatatattgtatctgttacctgtattatgttacttatatctcgtgcc

SEQ ID NO: 69208 - DNA, 331 bp, Homo sapiens; identical to SEQ ID NO: 68466

SEQ ID NO: 69209 - DNA, 399 bp, Homo sapiens; identical to SEQ ID NO: 68467

SEQ ID NO: 69210 - DNA, 657 bp, Homo sapiens; identical to SEQ ID NO: 68468

SEQ ID NO: 69211 - DNA, 348 bp, Homo sapiens; identical to SEQ ID NO: 68469

SEQ ID NO: 69212 - DNA, 426 bp, Homo sapiens; identical to SEQ ID NO: 68470

SEQ ID NO: 69213 - DNA, 417 bp, Homo sapiens
agagagaagaaaagaaggaccaaaggaatagtcagcagatatggagaataatggatgagaagaggaaagaggggaaaaaggagggagaagacagaatgagaagtgaaaaagagaaaagggaaaggattaaagagataaaaatgagaaaagaaaagaagagagaaggaaacgagaagagggaaacaaaaggaaattagcagttaaaaaaaagatagcgtaacattggaaaatgaaaaacaagaaaagtaaaacagggcacacaggagggatggcagcaaaggatcagcagcaagaaaagggagcgatgggagggcatggctctcagagaacccacccttgcccacccagccgtccagcccctgccgcatgcaggcttactgaatgaactgcagccctttctcgatgtccgctcgtgcc

SEQ ID NO: 69214 - DNA, 379 bp, Homo sapiens; identical to SEQ ID NO: 68472

SEQ ID NO: 69215 - DNA, 361 bp, Homo sapiens; identical to SEQ ID NO: 68473

SEQ ID NO: 69216 - DNA, 371 bp, Homo sapiens; identical to SEQ ID NO: 68474
  misc_feature (1)...(371): n = a,t,c or g

SEQ ID NO: 69217 - DNA, 392 bp, Homo sapiens; identical to SEQ ID NO: 68475

SEQ ID NO: 69218 - DNA, 388 bp, Homo sapiens; identical to SEQ ID NO: 68476

SEQ ID NO: 69219 - DNA, 386 bp, Homo sapiens; identical to SEQ ID NO: 68477

SEQ ID NO: 69220 - DNA, 370 bp, Homo sapiens; identical to SEQ ID NO: 68478

SEQ ID NO: 69221 - DNA, 1175 bp, Homo sapiens
atcgacgtggacgaggacgtgatggagaccgtgaagatcctctacgtgcgcaacctcatgatcgagaccaccgaggacaccatcaagaagagcttcggccagttcaaccccggctgcgtggagcgcgtcaagaagatccggacctacgcctccgtgcacttcaccagccgcgaggatgccgtgcatgccatgaacaactcaaccggcactgagctggagggctcgtgcctggaggtcacgctggccaagcccgtggacaaggagcagtactcgcgctaccagaaggcagccaggggcggcggcgcggctgaggcagcgcagcagcccagctacgtgtactcctgcgacccctacacactggcctactacggctacccctacaacgcgctcattgggcccaacagggactactttgtgaaagcaggcagcataagaggccgagggcgaggtgcagctggcaacagagccccagggcctaggggttcctacctcgggggatattctgctggccgtggtatatatagccgatatcatgaagggaaaggaaagcagcaagaaaaaggatatgaactggtgccgaatttggaaatccctaccgtcaacccagttgccattaaacctggtacagtagccatccctgccattggggctcagtattccatgtttccagcagctccagcccctaaaatgattgaagatggcataaactcacatcagtggagcacatgatcacgtcccattgctgtgcagccgagacccagcccagctacgtgtactcctgcgacccctacacactggcctactacggctacccctacaacgcgctcattgggcccaacagggactactttgtgaaagcaggcagcataagaggccgagggcgaggtgcagctggcaacagagccccagggcctaggggttcctacctcgggggatattctgctggccgtggtatatatagccgatatcatgaagggaaaggaaagcagccgccgcagccgctgtcattcccactgtgtcgacgccaccacctttccagggccgcccaataactccagtatacacggtggctccaaacgttcagagaattcctactgccgggatttacggggccagttacgtgccatttgctgctccagctacagccacgatcgccacactacagaagaacgcgg

SEQ ID NO: 69222 - DNA, 436 bp, Homo sapiens; identical to SEQ ID NO: 68480

SEQ ID NO: 69223 - DNA, 669 bp, Homo sapiens; identical to SEQ ID NO: 68481
  misc_feature (1)...(669): n = a,t,c or g

SEQ ID NO: 69224 - DNA, 321 bp, Homo sapiens; identical to SEQ ID NO: 68482

SEQ ID NO: 69225 - DNA, 439 bp, Homo sapiens; identical to SEQ ID NO: 68483
  misc_feature (1)...(439): n = a,t,c or g

SEQ ID NO: 69226 - DNA, 603 bp, Homo sapiens
cagcccgtaaggatgatctacctccaaatatgagattccatgaggagaagaggctggactttgaatggacactgaaggcagggtgagaaaaaggctagccctcgaagtgaaataagggctgggagggccaagaatgatgatagacggtgagggactgagggatcagctgatgagttaagcctcaacacctgtcctagggctttgcagatggccctcaaacgtgtttacaccctcctgagctcctggaactgcctagaagactttgatcagatcttctggggccagaagagtgccctggctggtcagtggttccccgaggtctccataatcccttaatggcccctctggatgactcatcacactccacagtcccccgtaactctttgcaagaagagaccttatcatatctggtcaactcagagaggccttgagaatgaaaacgcagaagctgggttcagggagggttatatacctgaacccctggggtagattttggagaagggatatgcaggctgtggtacatatatcctcctttcaccgcccaccaaagagaacgttcgccagtgctggcaggatgatgagttgttcagcttccctcgtgcc

SEQ ID NO: 69227 - DNA, 332 bp, Homo sapiens; identical to SEQ ID NO: 68485

SEQ ID NO: 69228 - DNA, 373 bp, Homo sapiens; identical to SEQ ID NO: 68486

SEQ ID NO: 69229 - DNA, 335 bp, Homo sapiens; identical to SEQ ID NO: 68487
  misc_feature (1)...(335): n = a,t,c or g

SEQ ID NO: 69230 - DNA, 543 bp, Homo sapiens
cagaaagagaagtagttgtgagacaacttcaacaaaaacagggtgacgtcctaaacaatcaacaacaaaagctttgctggatgcttcattgcgtcactgcgtccattgagaaagtgagatgtaggattcaaggaagaaattaggtcagatgagaattcaatttcaagaaaaatggaatcaacttacagcgactataaaatgtactaaggagacgcaaggccacgtacaaaaacttgaaatagaaaattctagtgttaagaaatacaattaaaaagcaagatggccaaattgagcagcttcagaaaatcctgcgaagttcaagtttgatgcagcagttattgcaagaaaatgaaactacagaaatagatgaagcttcttctgaatttaaatctggatcctctgtagcagaggttcccaacctacaggccatggacaggtccatgacctgttaggaaccagctgcacagcaggagagttactgtggatcttctagatcatctgcatgccatgtgaatcttaaaaccagtttttaatttctacaaa

SEQ ID NO: 69231 - DNA, 403 bp, Homo sapiens; identical to SEQ ID NO: 68489

SEQ ID NO: 69232 - DNA, 346 bp, Homo sapiens; identical to SEQ ID NO: 68490

SEQ ID NO: 69233 - DNA, 1672 bp, Homo sapiens
aacctccgccgcccgggttcaggcgattctcctgcctcagcctcctgagtagctgagactacaggcacgcaccaccatgcccagctaatttttgtatttttagtagagacgaggtttcaccatattagccaggctggtctggaactcctgaccttgtaatccactcacctcagcctcccaaagtgctgggattacaggcgtgagccactgcacccaccacattaactttttattacttaacatatctgagcacttcctgtgagccaggcactatgggagattaaaaagcattaaatgtggtccctgacattattgtgaagctctgagaagatgtcatgcaaagacacttgcctatgtgccactgccaccctctgccctgctttttgggtcaaggtacctccaagcgcctcactcctgcagctgcatttttttttatttattttttttttgagatggagtcttgctctgtcacccaggctggagtgcactggtgaaatctcggctcactgcaaccttcgcctcccgagttcaagtgattctcctgcctcagcctcccaagtagctgggactacaggtatgcgccaccacacctggctaatttttgtattttcagtagagaagggtttcaccatgttggccaggctggtcgtgaactcctgacctcaggtgatctgcccacttcggtctaccaaagtgttggcattacggcgtgagcacctggccacgcagctgcaatcttaggcccatcattccactgagttccgaagaatatagccttttcctgaagaaactcctttcttcaatgcttcaggccagttgtgagtctctaagtaagtggacaggatatcaaacacttgattgatggccagtatctctgaatgatagtttttcccattctggtttctgaccatgtattcctggattggcaagcgtgcggtcttgacagagtattcccgggccttttgaaatgtcaccttcttctgaatgctttcatccacaagcccaccgaggatgtaaactttgtttagatcaacatcttcaagagcgtgttctgagtcaggagtcaggtacacaagggtttccaagggaaataaactaaagcagtcttcttctgttatgtctaacaggtaactagaaaatccatcattcatcctcacacactcttcataaaggggactgtctgttgtgaatccagtgaggcagatccaaaatggcctgtcagcttttttgtttgaaccatacaaccttcgaatctgtccagccagtctacttaattctagtttactaaggaatcccagaagctggagttgaccatattcttcggaaagctgtacccttctgggcctccctcatggcgagcaggaattccaggcttagtggatgttctaccttctttgacatgtagtgggtcatactcaaatcgatacatagtcttggtcctgagtgtttggcttccaaaagtttgtctttggttagagctctcaggaaacgtttgctgtgctgggggcaaatgccgagcaccatgccgtactgcctgtggccaggatctctccctcctggcactcgccttccgcatcgatctgcagaagctggaagccttcaggaagtccatcttcacctgtctcctctaggatgccttcctcgtgccaagcttagcgtaatcagggttcat

SEQ ID NO: 69234 - DNA, 326 bp, Homo sapiens
caatccacactatagaccaaatggatctaatacacatttataggccatttcatccaacagctgcagaatacacattcttttcctcagcacatagaccattcttaaggacagaccatatgttaggtcaataaacgagtcttaaaactttccaaaaaactgaaataatatgaagcatcttctctgaccacaaaggaaaattagaaatcaataacaagaggaattttagatactatacaaatatatggaaataaaaaaatatgttcctgaatggccaatgggccaatgaagacattaagaaagacaactgaaaaatttcttgaaacaaa

SEQ ID NO: 69235 - DNA, 689 bp, Homo sapiens; identical to SEQ ID NO: 68493

SEQ ID NO: 69236 - DNA, 2368 bp, Homo sapiens
cgagaaagagaaagttggaaggaagggcaagcatctgttgactgttgatcagaaacgtggagagcatgttgtgtgtggcagcacacgtaataatgagtcagagagcactttggatttagaaggcttccaaaatcccacagctaaagagtgtgagggacttgccactttagataacaaggctgatcttgatggagaaagtacagaaggtactgaggaactagaagactctctaaaccactttacccactcagtacagggccagacatcagaaatgattccctctgatgaagaggaggaggacgacgaagaagaggaggaggaagaagaacctaggctcaccattaaccaaagggaagatgaagatggcatggctaatgaagatgagttagacaacacctacactgggtcaggggatgaggacgccctatctgaagaggatgatgagttaggcgaagctgctaagtatgaagacgtgaaagaatgtggaaaacatgtagaaagagctctcctagtggaacttaataaaataagtctcaaggaagaaaatgtatgtgaagaaaaaaattcacctgtggatcagtctgattttttttatgaattcagtaaacttatcttcaccaaaggcaagtctcctacggtagtgtgcagcttatgcaaacgagagggtcatctaaagaaggactgtcctgaagacttcaaaagaatccagctagaacctctgccaccattaacacccaagtttttaaatatcttagatcaagtctgtatccagtgttataaggatttttctccaacaattatagaagatcaggctcgtgaacatattcggcaaaacctagaaagtttcataagacaggactttccaggaactaaattgagcctgtttggctcctccaaaaatggatttgggttcaaacagagtgaccttgacgtctgtatgacaattaatggacttgaaactgctgagggattggactgtgtcagaactattgaagaattagcaagagtcctcagaaaacattcaggtctgagaaacatcttacctattacaacagcaaaggtgccaattgtgaagttcttccatttgagaagtggtctggaagtagatatcagtttgtataacacattggcccttcataacacaaggcttttatctgcttattccgccattgatcccacagtgaagtatttgtgctataccatgaaagtgtttacaaagatgtgtgatattggggatgcatttagaggcggcttatcatcgtatgcatatactcttatggtgctatattttctccagcagaggaatccaccagtcattcctgtccttcaagagatatacaaaggtgaaaagaaacctgaaatatttgttgatggctggaatatttatttttttgatcaaatagatgaactgcctacctattggtcagaatgtggaaaaaatacagaatctgttgggcagttatggttgggccttcttcgtttctacacagaggaatttgattttaaagaacatgttattagcatcaggagaaaaagtctgcttacaacttttaagaaacagtggacctcaaaatacattgttattgaaggctggaatgcaatggcgcaatcttggctcactgcaacctccacctcccgggttcaagtgattcttgtacctcaccctcctgagtagctgggattacagatccctttgatttgaatcataatcttggagctggattatcaaggaaaatgacaaattttataatgaaggcttttatcaatggtagaagagtatttggtattcctgtcaagggatttccaaaggactacccctcaaaaatggaatacttttttgatccagatgtgttaactgaaggagagctggccccaaatgatagatgttgtcgaatttgtggaaaaatcggacacttcatgaaggactgtcctatgaggagaaaagtaagacggcggcgagatcaggaagatgccctgaaccaaagataccctgagaacaaggaaaaaagaagcaaagaggacaaagaaattcacaacaagtacacagaaagggaggtgtcaacaaaagaagataagcccatacagtgcacacctcagaaagccaagccaatgcgggcagctgctgacctggggagggagaagatcctcaggccaccagtagaaaaatggaagagacaggatgacaaagacttaagagaaaaacgttgttttatttgtggaagagaagggcacattaaaaaggaatgcccacagtttaaaggctcttcaggtagcctttccagtaaatatatgactcagggaaaagcctcagcgaagaggacccagcaggaatcatgagggaaggaaaatgcagcactctaaatggccc

SEQ ID NO: 69237 - DNA, 707 bp, Homo sapiens; identical to SEQ ID NO: 68495

SEQ ID NO: 69238 - DNA, 475 bp, Homo sapiens; identical to SEQ ID NO: 68496
  misc_feature (1)...(475): n = a,t,c or g

SEQ ID NO: 69239 - DNA, 2032 bp, Homo sapiens
tttttttttgggtgatcaagtcttgattaaatcattcattcattcaacatttattgagcgcctactgtgtgctaggcgaccgtgctaggcgcagaaatacagagatgcataagatacagtccatgcccttaaggattcacagtctagaaggggagacaaacatgtaaacaagtaaaatacagtgtgataagtgccacaagagaagcattgacaaagtgcagaggtagcctggaggggaggggcacaggggttgccttcctggaggagggggcctttgaggggatcgtgagagatgaacttgccaggcagacaaggcaggaggagcaggggaaggcattccagtcggaagaaacagcatgagcgaaggcacagaggcatgaaactgcatgtcttgcttggtgagtggggaactctaactagtctggtggtattgctaaagtgtactagaggctgtggctagagaagggggcagaggccagatcatgaggggaaactgagggcaggggcatcttggagggtcaccagaggtgagcagagcccgagggcaggctttgacacaggaaaagagggctcctggctgactcaaggtacacctgcctgaggaccacagggttcctcgctgtggctccaaagggatctcgacccaagagtagaggagcagcagagctggaggtgaagcagaggggtcgggccaggtctgggacccagagctgccatgcactcccgcgctctcacagacttctgatttccaacctgcacgtcagagccccctcctgccagccggatgggggcctggatccagtgggaaatcacatgggaatatggctggcaaactgcaaagggccagatgagtgtcaggttacagaataaatctttactaactcaaagaagaaaagggctgcggataaaacaggaaaggttagatggaggagggcgggcagacgggcctaagaacaagggccaaaatgagaatacagcatcggccaaagaggaccgtggctgtctctcccctggcaaggaggggcccttttggcccagggcagaggcagaggccagtgggtacaaccaggccagatgtgcaaggagagcatgtgacctgcaagactgtggggctccacactccagactccagtgtctccttagcccaatgaggagaggtttccttggcaatcaggaccctccttcttccaggctgtagggaggccactgaggcagagagtggccagccagcattccagcccttcagtgttcttaggaatggctctgtctgaaaaatggctttgcagggatgggtggggcagggaggctgtgggaagagggcagagtctcaggacaccagagtccagctgcccatctgagtggtgcttttgtaaggcatcacacttgaggccactgtgaggggctgagcttctttcccaaccatggatgggggaagggcaagatggaccctgggttccagggctacagtgagatgaggcctcctgacggagaagctaacagcagcccccatgtccttgctgccgtcccaggagtagggaaggaggaggggaccctcccagttggtagggtctggagatgtcccgagacccctcctttcctcttgccgttgatgaggcagcctcgcgctgcggggttcccagcctccaacaggcccccttcttttggcctcacagtctcatcgcctgatccctcccctcccctgagcagtgtggggggatgatgcccgcttgggtgccgatggagttggtggtgttagcgatgagaaggatgatgaggtgttggtggtggcggcctccccatgcggggagtgggctgggctgggggcgctgggggcatcacttgctcttgtgcatatccttcagccggcggagctcttccaggagctgggcccgggagtagtcatcatccccagtggggcccggccccggccccagagcctcctgtagcgccaggcagtgggttctcaggaacgggttgtaggagcgctcctctcccagggtagatgggcacgtgcccttgcgctccagccgct

SEQ ID NO: 69240 - DNA, 675 bp, Homo sapiens
acttcagcctgggcgacagagcatgatcctgtcttaaaaaaataaaaaacataaaaggttcaatacagcaagaaggtttaacagttgtaaacatgtatgctcctaatgacaaaccatcaacatatatgaaacaaaaattgacgtaattgaagggagaagtacaattctacattaatagttggagactttaatatcccaatctcagtagtggatagaaccatcaaaatctaagcaaggaaatataggactttcacaacacaataaaccaactagatctaacaaccatatacagaacactctacccaacaatgaaatacacattcttctcaagtatacataggataaattccaagataggtcataaattaagtctgaattgattttaaaagacagcaaaatatcttccctgaccacaatgggatgaacttagaaatcaaaaacaaaaagaaaactggaaaatttaaaaatcatagaaattaacacactcttaaccattagatcaaaaaagaaaccacccggcattggttgaaaatcaccccccggctttggccatggcagcgggtgagattcggcgcccagagcctccaggggcctcagctcaccgcacgctgacacatgtgcggcggtgaaacccagccccaacaggccccgcggcctctccctgggtgcggccgc

SEQ ID NO: 69241 - DNA, 671 bp, Homo sapiens; identical to SEQ ID NO: 68499

SEQ ID NO: 69242 - DNA, 464 bp, Homo sapiens; identical to SEQ ID NO: 68501

SEQ ID NO: 69243 - DNA, 2398 bp, Homo sapiens; identical to SEQ ID NO: 68502

SEQ ID NO: 69244 - DNA, 651 bp, Homo sapiens; identical to SEQ ID NO: 68503
  misc_feature (1)...(651): n = a,t,c or g

SEQ ID NO: 69245 - DNA, 552 bp, Homo sapiens
ggtctaaataaatgcaaagacatcctgtgctaatagattagaagacttaatactggtaagataacaatatcacccaaggcaatatacagattcagtcccattcctatcaaaagtacaatggaattttttagaaatatagataaatgcaacctaaaattcacaggaaatatcaaaagccaaaacaatcttgaaaaagaacagaaatcagacttctcaattctgaaacttattataaagttacagtaatgacagagttacatggcataaggccagacatacagacaaattaaataggattgagagcccagaagtaagcccttgcatatatggtcagttgatttttgacaagggtgccaaaaccaatctctggggaaagaacagtctcttcaaaaatggtactggaaaaactggatattcacaaacaaaagaatgaatctgaatgtttaccttataccacatgcaacaattaatttacaatggatcaaagatcttaactaaagagctaaaaactataagtcatggaagaaaatgcagtaaaattttctttttttt

SEQ ID NO: 69246 - DNA, 1179 bp, Homo sapiens; identical to SEQ ID NO: 68505

SEQ ID NO: 69247 - DNA, 712 bp, Homo sapiens
  misc_feature (1)...(712): n = a,t,c or g
gccggccccgggccacccccggagccaccgcctccttcccagcggggttcggccccgcaatctggagccaagccgtctccgcagcctgcgacctgggtggagggcgcctcaagtccccggcctccttctagcggtgctgggccggggtcccgtcggaagcccgccagccctgggaggaccctgcgcaacgggcgaggcggtgaggccgaacccctggacctgtccttgcgggcagggccgggaggcgaggccgggcctgggggtgccctccaccgctgcctcttctgcccgttcgccactggagccccagagctcatggccttgcaccttcaagtgcaccacagccgccgggctaggggccgccggccaccccaggctgacgcgtccccgccctatgcccgagtaccatcaggagagacccctcccagtccttcgcaggaaggggaggagggctccgggctgtccagacccggagaggcagggctgggggggcaagaacggtagtgggccctcaggggcgattagcttagtgagcttaccccgccggagcgggggagcgctagaggtagttgggtagagaagccagcagggggcagcgtgggacccatatcccagccccaggcggaccagaggtggaaggcgcggcgggcgtangagggtgggctgncggttcccacccatcccaagggaggtccagtgccttagaagtgcg

SEQ ID NO: 69248 - DNA, 373 bp, Homo sapiens
agaccggcccccgctccctcagctgcgccggaggaggcgcccagtcctcggggtgaagggtcgggggatggcgaagcgaagagtgcccgctccggtgtgggggggagcaggaggagggacgaagtccgcccgccgcgccgccgccgcgcctgacaccgagcggagcgaggaaggaggacgagcggtgaaggaagcctacccttccagccgtcagccgccgccgccgtcgccgtgacccctgcgttgcgcccggcgctgccacccgaacttagccccctcgatgccaatttcaaatagggaaggaaaagggaaaagaagggaagagaaaatccggccgctgagtcccgcgtccactcacacctccgctcgtgcc

SEQ ID NO: 69249 - DNA, 409 bp, Homo sapiens; identical to SEQ ID NO: 68508

SEQ ID NO: 69250 - DNA, 915 bp, Homo sapiens
cctataaacagactggcagatgatatagtgcttaatgtcttgcctcagtttgtcattgtgtcagaacatccgaaaaaagataggagaaaagttggagtttagggcataattttcctgtaataatttggagctcaaaaatattacaatgagaaaataaaaagctattaattagcaggagacttaatcacatgaagaatttcaattagatatttcttctacgtagtatagttataactttgcattccattgttttccttctctatagtccattgtatttctgtggggtttttttttttcaggttttgagttcaagaacgagattaaaaaagaaaatctaaaatgggatgattcagaggaagtagaattaaacaaggctttacagagaaagtccagaggagtttattggcactctgagctacaaaaaggcttggagagtgagccaacatcaagaaggcaatgtagaaattctccaggggagagtgaggagaaaaccccatcccaggagaagatgagtcaccagagtttttgtgccagggacaaagcctgtacacatatcctctgtgggaaaaactgctctcagagtgtgcactctccccacaagccagcgctcaaactggaaaaagtatctcaatgtcctgaatgtgggaaaacctttagccgaagttcttatcttgttcggcatcaaagaatccacacaggcgagaagcctcacaagtgcagtgagtgcgggaagggctttagtgagcgctccaacctcactgcccacctacgaactcacacaggggagaggccctatcagtgtgggcaatgtgggaaaagcttcaaccagagttccagcctcattgtccaccagaggacccataccggggaaaagccttaccagtgcattgtctgtggaaagagattcaacaacag

SEQ ID NO: 69251 - DNA, 590 bp, Homo sapiens
gagggatactctagagcggccgccgccagctgcgcccccaccaggctgcccggcttggtggggtcaagtgccacgccgtgtggcaggaactggggcgggtagccggcgtaggccccggccaggctgcctgggtaggtcatacccgcgggaggcagagggaacactgtctggcccggcttgtagggtgacacgggagccaccagcccagagcccaacactgaggaggaggtgggcgcgctggggccggagccggagctggagcccgatgaaccgccgcagtccgagcccagagccttgcctcccgggcccccatccggatgctggttcacatccacattaatcccgccgccgcagctaatccggccgtgtgccagccccgtgggtcccccttcggccgaggcgcccccggtgcccttgccaccgccgcccacgtcggtgtctttcttgtcgtccttgccctccggggcacccccggccgaggacagcatacctcccggcgagcaggccgaggcgctggagctcgggctgcctgtcctgggcgtgaatggctggcaggtggcgctcggtacccggaatcccgacttctccga

SEQ ID NO: 69252 - DNA, 326 bp, Homo sapiens; identical to SEQ ID NO: 68510
  misc_feature (1)...(326): n = a,t,c or g

SEQ ID NO: 69253 - DNA, 963 bp, Homo sapiens; identical to SEQ ID NO: 68511

SEQ ID NO: 69254 - DNA, 319 bp, Homo sapiens
cgcaacatataaaaaggattatacgctatgattgaaaataaattgattttcaacaccatgattaagtggaatttgttccaggaacgcaaggttgattaaacacgcaaaaacctatcagtgtgatacaccatactaataaaatagaggccaaaacccacatgatcatctcaataaacacagaaaatgcatttgataaaatctaacatcttttcataataaaaacacatgttgaagggtatatagaaagcccacagctaacattatactaaatggtgtatattcagtctttactgaaagtttttcccctaagatcaggaat

SEQ ID NO: 69255 - DNA, 968 bp, Homo sapiens; identical to SEQ ID NO: 68513
  misc_feature (1)...(968): n = a,t,c or g

SEQ ID NO: 69256 - DNA, 401 bp, Homo sapiens
ctttaaattgatgctgagaaaactgataaaattcaacatcctctcatgataaaaaccctcacaaatctgggcatagaaaaaacatacatcaacataataaaagtcatacccaacagacccatggcctgtatcataataaatggaacaaaagtgaaagcctttcctgtaagatctgaaagacaaagatgttccccttcaccattgctattcaacataggactgaaagtcccagctagagcaattgaaaaagagaaagaaatgaagggtatatgaattggaaagaaagaaatcaaattatgcttatctggaaatgataatgaccttatatttgaaacaacctaaaaactcccccaaaactattagaactgatacattcagtaaagttgcaggatacaaaaata

SEQ ID NO: 69257 - DNA, 416 bp, Homo sapiens; identical to SEQ ID NO: 68515

SEQ ID NO: 69258 - DNA, 1518 bp, Homo sapiens
gttgaacccagacccctggctcccagctgcttggctccagccacaacactgctgacccttggcagccccagagctgccagtaggccccattatgaagtccataggcagagggcacacgtggcttccatacccaaactgcaattcctggtcctcttgctggagaccctagaggtaggtggctatagatggagccagtgaggcctagaaatggggagcatgtttcctgttcccaaccagcgaggtgtcagtaaatcaccaggagcgcggagcagcccctgcccgggaccatagctggtgatcccccatagtgggcaaccacgcccagcctgcttccttgattggccaagtttggggtgagggggtggttgtagggttttccttagggatggcagccctattggggtctgtgggtgctcagggctgcgggccgcatgcctgctcaccaggccctgcccacctatgctcgctcctttctctctgtcagcgttggggccttcgtgaagacctggctgcccttcatccttctcctgggcatcatcctcaccgtcagcctggtctttaacctccggtgatggctgctcggtggccccacacccaccaggggtcccgaggaaacagccgccatcccttttggttccagatttttttctcctcaccccaaaaggcagggttgggcctgctgttgtggaccgggggtcggggctggcaggatggaaggactgaggaccagcatgaagtgggggtttgttgtctccctgcctctcagaagcaccctgtcccctcctccccaggcctgtgactccggccctggaagcccctttgttcttctgttgaaaggctttggcttccctctgtagagctgctcccgccaccacctgctggggtcctgcctcagcccagtgcccagtatggggagaggaggacatttgggctcacctgtcaaggtggccctgggaccagagctggtcccagcatggggtgcaccgggtacacttaacgtgtctctataagccaagttgcttcaggaccttcaccactggcctctagaatggtccagaggggctggctgggtccctttgtcagactcctgccggcagctgccctgggggacatgtgtgcccatctggcatcctccagcccgtgcagtccgctcttcactgttccacggcctcccagtgcctcccagcattggacccatctccccctgcagtttgaggccagagaggtgagtggacctgacaagtgccagagtaaccgtgtagacagagcagtgtagacagcactcagccccagccccaggtgtggacctcatgctggtgatggctcccctgggtggcctgccagcacagccagtgccatcagggagctgaaggggctgtcccccacctaactccagctcccccttcacgttgtcaccaaggccctgtgccgcccgcctcgcccccctgctctgtggattcctttgggaagggctccctgggcaggacaataaagagttttgactccaaaaaaaaaaaa

SEQ ID NO: 69259 - DNA, 355 bp, Homo sapiens; identical to SEQ ID NO: 68517

SEQ ID NO: 69260 - DNA, 335 bp, Homo sapiens; identical to SEQ ID NO: 68518

SEQ ID NO: 69261 - DNA, 982 bp, Homo sapiens
atccacgacgagctgagccgcgccgcccgcgcctccggacgggccccgccacgccgccggcgccgccaacgcgggacccgcagccggcccgcgtcgtcctgtcaacctcgactcagcgctggccgcgctgcgcaaggagatggtggggctgcggcagttggacatgtccttgttgtgccagctgtggggcctgtacgagtcaatccaggactacaaacacctgtgccaagacctgagcttctgccaggacctgtcatcctccctccattcggacagctcctacccaccggatgcgggcctgtctgacgacgaggagcctcccgatgccagcctgcctcctgacccgccaccccttactgtgccccagacgcacaatgcccgtgaccagtggctgcaggatgccttccacatcagcctctgaagggctggggggcagggggcatgcacccatgcaaaaggctcagaaactccccctccggcaagccctcagacttcggagcctgcgccttcccccctaccgcctcacctcacaggagggccaggcatgtattcctcagaggcgaaactgccaaactctttctcctgtcttgggttggctggcactggggcgggcatctagggtacagcctctgctcatggcactgggcctccagttcttccacatgtgtgcacccccagcttggccaaccctcagccttgcggtggggcccgaagcatcttcccttccgcttggcgtctctgggattgggatgagtgcctggctcccatctcctcctcaccttttgttgctatcggcagctgctggctcaggggcatcccacctccgggctctgggttcctctgccctggaagggctccaggacccgtcccaataaccacccacggccaggagggccaaggccccgtgctggatatttaaatttaggggccggtctccagggcgcgtagataaataaatacactcagcgtcaaaaaaaaaaaa

SEQ ID NO: 69262 - DNA, 378 bp, Homo sapiens
atataggggagggggataatccctttccttaaactgtacacaaaagtgaactccaaatggatgaaagacctacatatgaagggtaaaatggaaagacttctagaagaaaacataggagcaaatcatcttgaccttggagtaggcaaaggtcttttaggacacaaaaagcatgaactattaacagaagtagtcgataaattgtagtctattaaaattaaaaaatgctattcgaaaggcaccattaaaaattgagaagacaagccaaaaagaagacaaggcaaaactgttcgtatgcatatatttgacagagaacttgcatccagaatacataaatccaattcaataagaagacaaacctatcagttaaaaaatggacaa

SEQ ID NO: 69263 - DNA, 567 bp, Homo sapiens; identical to SEQ ID NO: 68521

SEQ ID NO: 69264 - DNA, 535 bp, Homo sapiens; identical to SEQ ID NO: 68522

SEQ ID NO: 69265 - DNA, 1041 bp, Homo sapiens; identical to SEQ ID NO: 68523

SEQ ID NO: 69266 - DNA, 1991 bp, Homo sapiens
ttttttttttgtagaaatgggatctcactatgttgccagggcttgtctcaaactcctgggctcaagcgatctacctgccttggcctcccaaagcattgggcaggcccattacgccatgagccaccacacctgctggtttttgttttttaaatggaattgaaaggaactagccttggctagttgcagaattcacacatatggggctatggcaacagcagattctggagtctcagggtcttttctttctagataagttacagggcaattgcttttcagagtacttttacatttctattccattcttgtcagtaaagacaaggatcccataagctgatggagaaactgaggcctctagaaaaaaacgctgggaatggcacccagggtgctgaattccagggtctcctcttttctgccacaggcacacatgccccagcagcccctttggagagccccctctctatagggtactagccgggggctcagactctggagtcagacggcttccgagggatgaggcctcagacaagtaactcagctttgaaatgttttcagtggggagagaaatagccccctcccagggctgtgctccgggaactgactgagggctaactattatgggcccaccccattgttggaatgtcttcagccacatgggggaatgggtggaagaagaggccgggatgtgtcctgccagctagagcagcgaagaaatcccagcggggccccaggaagtccaagcccatggggttcaggtgctcctctctggctattccttcagacccgcagctgctggacacaggccacagagctggtgcctcccgcgccatcactgcagtgcagcctgggtggatggaggaagccaaggggaacggcctgggctcagagtaaggagaccttgccccgggggacaaacggtgtctgaagtgcaggggtgaagcggtctccagtcctcaggggcctggaaatcagctccttgggacacggtcttatgtgtattgaccattctccccatccattccctcttcggaatgtttcagctgttctgagaaaacactttgcattcctgccccgcccctgtgatttctctttgggtggcaggcagccgggagaggctggaggcctggggagatgggggcagggcacaaggctaagctcagcaccttcctccaccctcctcactgtactcaactcctaggcgggcactaagagcagctgccttcctggacccaccttaacctcttgtgactcaactcccctttccagggtgcagggaacattccctctgccctgccttccagctctggccacagtggcctggacagagtagctgggtcccaggcctgcccctgtggacgagggaccagggaccaagagcgcactccagccctgagcccagagcctgcaaagcccaaagcaaggcccataaacggaggctacgtgctcgttcctgcaggatcctggaaaagcaggcccaggcccatggctctgccctccttctggccctgaagggtcacgatgctcttggccatcaggaggaagtacctgcagcgccggtgcctcgaggcactgcttcacgggctgcggggttcccagcaggccaggtgcctggcagtggcatggcagcactgggtggatgcccaaggggcagagcagctggggcggaccctggcctttaagaagtggcaccaacgcctggcagccaggagcccaaggagaggagctgccagtagcccaagaccctggagcaagccaggccccaagggccccgagagtggacaggaagccgccggagcaccgcggggttgggggcttggggcagagcatggggcccagctgcagctgtgacttgttctcatagaataaaaaacagaactgaacttagccttcccagggaaggaaccatgccccacacatccagggagtgatgacagaggggacagctataaagagctctgaaggacaataaaacccactcctcagtcctaaaaaaa

SEQ ID NO: 69267 - DNA, 868 bp, Homo sapiens; identical to SEQ ID NO: 68525

SEQ ID NO: 69268 - DNA, 1812 bp, Homo sapiens
gccttgcttggaggcaaagcgtcctccactctgtcctcaggactcagctgtgtggccttggatttctttttgcgggacttgcgccctttgggtgccaacggtccaggatccccctggaaccagatggtacggccatgccggtcctgcagggagctcatgcctggcatgccatagcagcgcagccaggctcgaaaggcagcaaagtcctcctccccgctctctgacccgtagcccctgccccccaactggaccacttccttgggcactgagtgacatagctccagcaggtctggattctgcagcttggtccttatcttctggctcagggtcagctccgggctcggcctgtgctgctgcagggcctccaggaccgagcgggccttctcaaagggggggatcttcagccggtacaggatctctgcccgcagatagttgccaatgccattgaagaacctctggtccaggagggcctcgcagatgggccggtcaaaggccttatccgctaggtttcgtagcacattctccctgaactgctggtactcctgcaagacacagggcccgcggcccggctgccactttcccccaaggtcccagcggccgaaccggcggatgtccacgaaacatagggcgagccgggggccaggcggggccgtgtaaaagcgcaggtgggcatggcgtggcagctcctcgcggggcaccagctgaaaagagccggacatgccgaagcggaagaccagggccagtggctcctgttggggctgggccccaggcagagggctcagtatcaggcgcagctccttgccgcgggctgaagctgagatgcggtaggcactgctctcaaagggcacctcagggttgcggctgacagaggacttctccacgcagccgccgaacaccagcgccctgcaggcctcattcacaaactggctggccaggtgcagctcggggccctcaggcatcctgagggagggtggcagagtcctggctgggaggtggcggaagaacctgacttcccactgcctggcgccggcgagatgcgggggcaggtctgaggccccgggtcgccgctgtctctgcggttgggggaagtcacccagctagcgtgggacagggtcggcacccccagcaggaaacagcagcgacgagccagagcggagtcgcctgcagctgcgcgcaggacgtgcacaggtgcgcggtacgcacaggccctagggacccggtggggatcttaagcaccaacgaacagtcagacctaactcataaacaaacatcatcacggcctgccctgtcagaagcgcagccaagcaacaacaacaacaaaaaaaggcgaggaggtagacccacttgagatggttctgttgcggagagtctctgaaatcagaaagcgccagtccgcaaaaacgaggaaacccgacgtgtccggcggaaggaaccgccagtacaaaggccctgaggcgagaaagagattggtcactgaaagaactcaaagaagtcctgtgtggctggagtatagctgcgggttagtgctggcaggtgaagacagagaagcaaacccaggtcaggtccggttgggcctcgggagggcctccgtgtggagtctgcacttcattctaagtgtatacctaacccatcgccacgatttcccctccttcacactaccctgctacgtctccttattaggcgtaataaaattatgtggctttgtaagaaattggtttttagagatgcatgttaaagtattgggtatgaaatgtcatgatttgtctaatttactttaaaatacttctgccataataaatgaatagaattaac

SEQ ID NO: 69269 - DNA, 532 bp, Homo sapiens
tgcgctcaccctcaggaactcagggctcaaagtcggccgggttaaagggcgctttcctcgtacagtcaaagcccgggggcgccccgacagagcagctccttgcaggggtgccagtcacaggaccggacggcgccctccctcagtgtcctgggtgccatcttcgggcccaggccccacaccaccccctccctccagcaggagcaaagacgtgggaaaaccagcccagagctgggtccgaggcggccccacccagcctaacacgggacagctgccgaaagaggggctgaggacgccccacccagtccctagagctggaatcccttcctccagacaggcccttctaagctcagggaacccggggactcgggcacccagcgccccagcactccgccccgaggcccaggcaagtccagcggagtttccaggcgcaccattcctgagctaggtggggagaggctgggtggcgcccgtttccaggagcccccaccccagccggcagcgagcttcccgggagcagccgctacccaggcgc

SEQ ID NO: 69270 - DNA, 427 bp, Homo sapiens; identical to SEQ ID NO: 68528

SEQ ID NO: 69271 - DNA, 823 bp, Homo sapiens
gggggctacaccaagagtggctatgactctgcatgtaaagactttgtccctcatgacttggaggtccagattcctggaagagtctttttggtcactggaggaaacagcggcattggcaaagcaactgcccttgaaatcgccaagcgaggtggcacagttcacctggtttgtcgagatcaagccccagcagaagatgccaggggtgagatcatccgggagatgcggtaaccagaacatttttctgcacattgtggacttgtctgatcccaagaaaatctggaaatttgttgaaaatttcaagcaggaacataaactccatgttcttgatcaataatgcaggttgcatggtcaataaaagagaagctcacaagaagatggactttgaaaaaaactttggttgccaatactctggggtgtgtacatttctcacgacccggcctgatcccctgtgctggagaaagaacacggacccccgagtgataacccgtctcctcaggaggaatgttggttcagaaactgaacaaccaatgatctccagtccgaaagaacaccatttggatgggaactatggtctatgcacaaaacaaggtcagtgagaggcagcaagtggttctgacgggagcggtggggcccaagggcacccggccatccatttttcttccatgcatcctggctgggcctgacaccccaggtgtgaggcaggcgatgccggggttccacgtccaggcttcggggtatcgcctgcgctccgaggcccagggcgcggacaccatgctgtggctggccctctcctcagcacgcagccgcacagcccagcggccgc

SEQ ID NO: 69272 - DNA, 715 bp, Homo sapiens; identical to SEQ ID NO: 68530

SEQ ID NO: 69273 - DNA, 1024 bp, Homo sapiens; identical to SEQ ID NO: 68531

SEQ ID NO: 69274 - DNA, 890 bp, Homo sapiens
aaagtagtaggttggtgcaaacgtagtaataaattggtttggccctgttttcatagaactatagaggttggacctttgtccccttccagatgcctacaaacaaactgatgtttttgatttttttttctttttaaattttggttgccactaattcttataaaaatcctcacacaaggctgggctcagtggctcacacctgtaatcccagcactttgggaggctgaggcaggcggatcacgaggtcaggagatcgagaccatcctggctaacacggtgaaacccccgtctctactaaaaatacaaaaaaattagccgggcgtggtggcgggcgcctgtagtcccagctactcgggaggctgaggcaggagaatggcgtgaacccgggaggcagagcttgcagtgagccgagatagcgccactgcactccagcctgggcgacagagcaagactccatctcaaaaaaaaaaaaaagtgataatactgtaatcccagcactttgggaggccgaggcaggcggatcacgaggtcaggagatcgagaccatcctggctaacacggtgaaaccccgtctctactaaaaatacaaaaaattagctgggcgtggtggcgggcacctgtagtcccagctacctgggaggctgaggcaggagaatggcgtgaacccaggaggcggagcttgcagtgagcggagatcatgccactgcacttcagcctgggcgacagagcaagactccatctcaaaaaacacacacacacacacacacacacacacacacacaaatagaaaaataataatagttttaagcacctctaaagtacagatattgtgccaagcaatttatgtgaattgattagattgataactctaaaaatagtttccctaatcaact

SEQ ID NO: 69275 - DNA, 480 bp, Homo sapiens; identical to SEQ ID NO: 68532

SEQ ID NO: 69276 - DNA, 1922 bp, Homo sapiens; identical to SEQ ID NO: 68533

SEQ ID NO: 69277 - DNA, 516 bp, Homo sapiens
atggctgtcatccagtccctctcgccatgctatgagactgtcttgctctctgagtcctcctggtccatgggctcgcccacccactgcaggccatagtcactgaggaaccgctccatctccctgacctgccgctgcagctgcacacacatcgtctccagttcctcctgccgctgcagggttgcctcggctgggtgtggccggagggtctgcaccaggtcctctagggccgctatcttctgatccttggacagtatctcatcagtctgggccttcacctgctgctccaggtcccacaacttcctcgtcatgaaggccatcagctccgagtcatgggatgcagggacatctccatagatgcggattcctcgcctccttttgcctcttccactgtctccacagaggtttctggaagtttctgttatctgcctgctcctctgggtatacggctttctgctctgaactgagagacctttggcctggtggtgcttgggaaagtacacgcagggccgcacgaaa

SEQ ID NO: 69278 - DNA, 998 bp, Homo sapiens; identical to SEQ ID NO: 68535

SEQ ID NO: 69279 - DNA, 422 bp, Homo sapiens
atacacccgttttaaaaacgcctggggcaaagggagaaatcccaaaggaaatcagtacggtttttggaacaaagagaaaataaagactcaacatagcaaaatttgtgggatgccctaaaaaagtacttagtgggaaattgatagccctaaaagaatgatctcaaatcaacaacctgagcttcccccttaagaaaacagaaaaataagagcaaataaaatcccctgtaaacattaaaaagaatgtaatttttaaaaagttaaaaataaaaaaaggtttaaaagtttaaaaaaaatagagaaaaatcagtgaaaccaaaagttggttccttgagaaagtcattaaaatttactaatctcaagacagacattccaggaaaaaaaatgaaaaaagtggaatccctagagattctcggacgcgtggg

SEQ ID NO: 69280 - DNA, 909 bp, Homo sapiens
  misc_feature (1)...(909): n = a,t,c or g
aaggtggcgtcatcagacttccatacccaatcaaaggaaaaccattcncaatatgtaaatggaccaaggaaggccaggatattagtaagcgtgccatgattgcaacatctgaaacacacactgagcttgtgatcaaagaagcagacaggggtgattctggcacttatgacctggttctggaaaataaatgtggcaagaaggctgtctacatcaaggtcagggtgataggaagtcccaacagtccagaagggccactggaatatgatgacatccaagtccgctctgtgagggtcagctggagacctcctgctgatgatggtggtgctgacatcttaggctacatcctcgagagacgagaagtgcctaaagccgcctggtataccattgattccagagtccgaggtacatctctggtggtaaaaggcctcaaagagaatgtagaataccatttccgtgtttcagcagaaaaccagtttggcataagcaaacccttgaaatctgaggaaccagtcacaccaaaaacaccattgagtaagtgccctttcaaccacaaaattataaacattatttcagcacttttctgtttttaaatgaaagtcattggcttataatacttgggactgtattctaatacatgtgtgctttccacttatatttacagatcctccagaacctccaagcaatcctccagaagtactcgatgtaaccaagagttctgttagcttgtcctggtcccggcccaaagatgatggtggttctagagtcacaggctactacatcgaacgcaaagagacatccactgacaagtgggtcagaccccacaagactcagatcccccccacaatgtacaaagtcacagggcttgttccaaatgctgagtatcagttccgcatcatcgcacagaatcgg

SEQ ID NO: 69281 - DNA, 526 bp, Homo sapiens; identical to SEQ ID NO: 68538

SEQ ID NO: 69282 - DNA, 469 bp, Homo sapiens
acactgtttcaacatttacatcctatgaactcatggattataaaacatttgtgacttatactgtctatgtcagtatgattgccttagaaagaccagatctcagggaaaaggtaatgaccaaactttaatactcaaatttaaagacttgttttttttgtttaaatacacaaatcattaaaatgtacattttttttgtatatatgttttttaaaatacctaggtcattaaaggagcagagattcttgaagtgttgcacagtcttccagcagttcggcagtatctgttttcactctatgaatgccgttactctgttttcttccaatcattaggtaaggatagggttgatatttttgattatctgtcttcatcttactcctgatcctatgtgcaaataacctaagacgatttttcacctatctgagaaatgtagtgtgtaggtaactgcatgtctttgatcagtattcctaat

SEQ ID NO: 69283 - DNA, 1614 bp, Homo sapiens
ttattcccctttctcccccaaagcactcatgacctgactcgctgggagctctatgagccatgttgccaactcctgcagaaggctgtggacacaggagaggttcctcaccaggtgagtggacaggctagagatgggttgggggctggggggctagattttaaggacctacggttctaggtggccactaggtgtgtcaagtctcagtgcgtggagtggacaaagcgaggaagatcaggtgggtgggggtcacctcttacattcctctcttagaaggtggactctacttccagggtcttcttggatttcctggaagccaaggataatattgagggattctagaagacgtagagtaaattagggagcggtgacatttctacttcgtgtagatgcctctgaagaatgtccagaatatcactcattttccactggaaaaggaattagctctccctttactcattttctctcctcttcactggtgtgtttctggctatctgtctctccctctcctaacccaaacctcatttttcaaaccctttgttgttacaggttatcctgccagccttgactcttgtctatttttccattctctggacactaacccacatttctaaatcagatgcttcccaggtgagtgtgggtcttagatgggataatgggaacagaggagtctgtgtcttcattcttccccttcaagccactgtgcccacagaagcagctgtcgagtttgagggacagaatggtggccttctgtgaactctgccagagttgcctctcagatgtggatactgagatccaggagcaggtgagtactgactcaagtgggagcaacaaggcgagtatccctgcccccattccaaggagaaattgacagtgtcatttctaccttgggaaacattctgtccttttaaacatcctttcttttccccctacaggcttttgtcttattaagtgatctacttctcatctttagccctcagatgattgttgggggccgtgatttccttaggccacttgtcttttttcctgaagctactctccagtctgagctagccagcttcctcatggaccacgtcttcatccagccgggagacctgggcagtggtgcagtgactctatacctggggctcagtaagggctggggcttgggtgtagctcagaaatatagggcaggaagcttaagtctgtgattcccttttgccttccatgtgagccaggtgattcccaggaggatcatttacagatagagcggctacaccagcggcgccgcctcctagccgggttctgcaagctgttgctttatggggtgctggagatggatgcagcctcagatgttttcaaacactacaacaaggtacaccaaggccccagcttgggcttcacgaagccactggtgaatgccgaggttactcggctgcctacagtctagccactgaccacaggatggtgaactcctgaatgacaacgtgtggggtgacaaagggcaggtcccgcttgagcaccaggatgaagtctgtctgatacgtggacagcatgcaacacggatatgttctggtcagccagtggggcgatgactgacttggcgatcttggtcatgccaataggctgggagctgga

SEQ ID NO: 69284 - DNA, 2039 bp, Homo sapiens
aacaaaagaaaacattttattgcaatttgattaacaaggagacaggagcccagctcaaatctgtcccattgtacttattttaaagagttattttagtagaaaaggtgtagggagtggattctgtgattagtaggtgattgatagaaagatttgtttgggctggaaaatcctcgggccatggggcagttaacctcttcatgccctcctcatgggtccccatgtgcaaactccagagggagttaagtatgaaacatgcggtacaaatttaggctgtgtgtcagcaagctcattctgtacaaactctggttttatctctttatcttgacacctgaagggtgtgcataatcccatcactccccaaaatatgccctacatgcagaatttaaattcatcctgcctccttgactctgagggccacttcctaccacagctagggtcccttttctgtcagcattctttctggagcttgcttatatcaaacctaagaaaagcaactccaggactccagacaaaacagatctccacccatctggcggccagaaagggaagctctgggcaaagagggagagagaatcaacctcactcactctggatgggcctcctgtgtgttcacagaggacagagcagagtcccccagctcatcctcaatatcagcgtccccagactggcttaggtcctgctagaagaacccaggattttgcctggcagaaagacacaagacctttgccaggatcagcctggtctctcaccaattcatgtcaggtgaagacttatagtggagctgtttaaatccttagaaaaatgattttaaatgccttgaagtccaaatgactttggagtgctaaaatttcataagtttccatgcctagcacatagaaaagggaagctggggtttcatgggcatgtttgtctaataccttccatctacacaacctcacacgcacatcacaaagcatcacaaagactctaatttctccaacgcttggtggaatcacctgtccaggtacagataggctgccacaccgatgaccttaccaaggccaggaagctatctcgagcccccgtggtgactcaccaatgctggatggacaggactgagcggtcagtctcctgcctctggggcggcctcctctacgtcatcgtgcccaagggcagccaactaggccctgtgcctgtcactatcaggggagctgtgcctgccccatactacaagctgggtaagtggagtgaacatttagggaggaggaagagtggcagatgccgtgggaactgtggggtggttgctaaatgggagagggatgagctttggtggagagaaagaggaagaactgttgggagggaacatggaggcagaagatacggaataccctgtgtccatggagacttcagggcagacaaagagaagagtcaggaagccttttcttccctttacagcctatagacgcctgtgatagtagttcattattgcaatgttcttccagagttcaaatggtatttttcagctcaagggaagttggagaagtgggtgtggtaggttccatgatatttattcccaggtaagacatcgctggaggagtggaagaggcagatgcaggagaacctggctccctggggagagctggccacggacaacatcatcctgacagtgccaaccacaaaccttcaggccctgaaggaccccgagcctgtgctccgcctctgggatgagatgatgcaggctgtggccaggctggcagctgagcccttccctttccgccgtcctgagaggattgtggctgatgtgcagatctcagctggtgggtgctcccagggaatcctcctgtaatcccagctactcaggaggctgagacaggagaatcgcttcaacccaggaggcagaggctgcagtgagccaggatcgcaccattgcactccagcctgggcaacaagagtgaaacttgttttagcgttccgattttgcttttgtcttcatgctgcacctcatcttccttttaagctttcagaataaacattccattcctttacccctgagcagtgcg

SEQ ID NO: 69285 - DNA, 794 bp, Homo sapiens
ggagaactccgattgattggagtccctgttggggcagtagcagggttccacccaccgcggtcctaggcctgggggcgaagtccaggcctggccacaaggttcaaagatgtgtcagacccaagccgctaccccctactccgagggcgagggcggagaggctcagccccaggggcggggcctgtagtcggaggccgagcgggcgtggtccgggtagtccaggcggctctcggtggcagtgagcatgcgctccggctccaccacgaacatgtagtagaggttccacatcagcatcgacagcagtggcagaaacgtcaggccgtagccgaagcctcggaaggagcggcccacggcaaaggtcagccagtagatcagccgggagacggcaaagagaccagtgagcagagggagcagtttgagggtatcctggggcaggtaagtggaaagcacggccaggttgaagaagtagagaataaagagctggaccgactgggccacatatcgccggtggatctccacctcccgccgtggctccccaaagggccgaagggcagaaaagcataacaggctcagcccgtacaccaggatccctcttcacttccagtagggccagggtctcctgttctgtcatcctggggcctcagttctgggatctaccacaaggtcatgtcatcctgccctgatccagttaagctttggccgcctcagtgggtacactgtccgttctctgatagctttgccaataaagtttttcgcaagggtttggagaagccggaaagacgccatgctgcccagag

SEQ ID NO: 69286 - DNA, 1616 bp, Homo sapiens; identical to SEQ ID NO: 68543

SEQ ID NO: 69287 - DNA, 476 bp, Homo sapiens; identical to SEQ ID NO: 68544
  misc_feature (1)...(476): n = a,t,c or g

SEQ ID NO: 69288 - DNA, 1686 bp, Homo sapiens
  misc_feature (1)...(1686): n = a,t,c or g
cagggttacccggaggagtatgaggagcacaggggaaagggcagctttcacagctatgatctctccagcatatcagaacgccatgaagcttcaggagctcgctagtgacatcaaatacaggcaggacttcgataagatgaaaggcgctgcacattatcactcgcttccagctcaagacaacttggttctcaaacaggctcagagcgtaaacaaactcgtgagtgagaataaatataaagaaaactaccagaaccacatgagaggccgctatgaaggagttggtatggacagacgcactctgcatgctatgaaagttgggcagcctggcaagcaacgttgcctacaaaggctgattataaccatggtattgtcgacttacaaantaccccagccactctcacgccttcctatcaaacagctatgaaactggtgcccttgaaagatgccaattataggcagagcatcggacaagttgaagtacagcttggtgactgacaccccacagattgttcaagccaaaatcaatgcccagcagctgagtcatgtgaattaccgtgctgactatgagaaaaataagttgaattacacattgccccaggatgttccttcagctggtgaaggccaaaaccaatgccaaactcttcagtgaggttaagtataaagaaggctgggagaagacaaaggggaaaggatttgagatgaagctggatgccatgtctctgctggccgccaaagcctctggggagcttgctagcaatattaaatataaagaagaatatgaaaagacaaaaggcaaagccatgggaacagccgactctaggcttctgcactccctgcagattgctaagatgagcagtgaggttgaatataagaaaggctttgaagagagtaagacccggtttcacctgcccatggatatggtaaacatcaggcatgctaagaaggcccaaactctcgccagtgacctggactacaggaagaaactgcatgaatacactgtgctgcctgaagatatgaagactcagtgggccaagaaggtctatgggcttcagagcgagctgcagtacaaggctgacctggcatggatgaagggagttgggtggctgacagaggggagtctcaacttggaacaagccaagaaggctggacagctggtcagcgagaaaaactaccggcagagggtcgatgagctgaagttcaccagcgtgaccgacagctcccagatggagcacgccaagaagagccaggagctacagagcggggtggcctacaaggcaggaaatgagcagtctgtccatcagtataccatcagcaaagacgagcctctcttcctgcaggcccgagccaatgctgcaaatctcagcgagaaactgtataagagcagctgggaaaaccagaaagcaaaagggtttgagctgcgtcttgattccttgaccttcctggcagccaaagccaagagggacctggctagcgaggtgaagtacaaggaggattatgagagatccagagggaagctcattggggcaaaagatgtacagggagattcgcaaatgagccactcactgcaaatgtccaagctgcagagtgagctggagcacaagaaaggattcgaggacaccaaatcccaatgccacgtctccctggacatggtccacctcgtgcatgcccgcaaagctcatcatttat

SEQ ID NO: 69289 - DNA, 1344 bp, Homo sapiens
ttttttttttttgctgctgggtcgggttttatttcaaatgcagccacagaggcggtttctgcacaggtacgtgatccgactccacaagctcccaccaggggctccccatgacccgcaatgacgctgtgtggggtcaaaggaaaacaggccacagccaggcccctcgatggacgcaggcaggggaccaggaatgcggcccacgcagggggatcgggaatcaggcggaaggtgcaggtttgcagctggcgggaggagccagcatgccccaatctctaaaatattcccggtagaaaaatagacatttccctccaaagcagattcctggggctggagggtccctccaaggccaggggtccgggtgattccagagcatccacgctctgcgctgaaggcactgaacctgccatcactgtcacagccgtcaccggccaaggagggtctggaggagggaaggggcccttgcgaggctctggtgctggtgatcccggcccccaccaccggaggagctgaaagcccttgctcagccgctgccctgctggtgaacccggcccccaccgccggaggagctgcaccctgtgtggtctgaggcagccctgcactgggcagcggccccgccccgcgctgaacccactaggagagcagctgcagcacctgtcggatgcgctgggccctccccggcagggggggatcagagccctcctcatccagctcccgcatcagggcttccgccttctgcaccgtcagctctcgggcccggccctgcagcccctccaggtaggccagcagggtggagaagtgctcatcgggaaccttgtcactgtcatacatgtgcagcaggagccacgtctgcctcgtcttctgaaacctccagttcttgtgcttttgggcccatctgcagaggtagtccagggccagttcggcccccgagcgcctggcaggcgggtgctgggccacaaggcctgcctcccgcagacgctgcctctcctctttcttccgttcctttttcagcttcctttccaggaccctctgctcctctggggacagctctggctctgcgtccagcccgggcctgagcacagcttcgcccttggagccggctccttcgccacttggtgcagcctcagggcccagcagtggcccctctgctgacgccttcttcagctttttgttctttttctctgtcacttcaggaacttttctcttctgttttgccatcctgcgcccacctgcgcccacgtcgcccacctaagcgtgaacagctgcgtcgcggacgccgccttccggcagggacccgcggacgcgtgggtcgacccggcaaaacgggtccaacctagggcgtcgagg

SEQ ID NO: 69290 - DNA, 1617 bp, Homo sapiens; identical to SEQ ID NO: 68547
  misc_feature (1)...(1617): n = a,t,c or g

SEQ ID NO: 69291 - DNA, 659 bp, Homo sapiens
  misc_feature (1)...(659): n = a,t,c or g
ctgaaggctgtactttgccaagaagagatttgtgtcatcattctgctagaatgtggcaccaacccagatcttatggatgtctatagcaacaatgcactacactatgctgtgtataatgagaatacactactggcagaaaaactgccctcacaccatgtgaatactgaagtgctgaacaaggatactgaagtgctgaacaaggatgcaaacacaccacttttacttgctatagtttgcaaaacacagcaaaaggtggaattttagtgaagaaacaagcaaatgtacatgctgttgataggttgaaaagaacagctctcatgcctgttgtacattatggcttgtcaccgtatagttagcattcttcttcaacaaaatattgtcttttctcaagagtatgtatggaccggctgcagattatgctatttttggtggtttggcaagccctccccacaaattttgcccccttnnnnnnnnnngatccttgaaaatggtcttcaaaatgacaacccagaagaagcatccaagaagaatgcaagtttgaaaacaggaggagcaagtgcaaaagattctgggagttttgaagcatctgcattcagtatttaaaaaaaaactgtgtgttgactcatggcctaaaccagatgatgaagacttgactttta

SEQ ID NO: 69292 - DNA, 463 bp, Homo sapiens; identical to SEQ ID NO: 68549

SEQ ID NO: 69293 - DNA, 669 bp, Homo sapiens
attgttacagccgaccaattactgggaatgggccagtgggctgcaattcgaaaccaaactatgctaaatgatgaggttattgaacaactgtggaaatgctgcttagatgcttgggacaagattcaagatgatgacaaactatgcccatgtttttaacagccgtcagacggggacaacatgaaccgtatccagactttattgcccatcttcaagacgcagcagaaaaagctatccctgatagccagggccaatgacttgttatagaacttatggcttatgaacaagtaaatccagactgtcaggtggctatttgccccattaaaggcaaaattccaccagggggtgatgtactcacctcatacattaaagtctgtgaaggcgtgaggggaactctgcgtacagcaatggtcatggcacaagccatggtctctattcgaatgcctggacaattccctggcaaatgcttcctatgcagccaatcgggacattctaaaagaaattgtccttggcatacaggccgctgttcttttcaacaccaacaaccaaaattttttcaacaacaagccccactttctactatatgcccacgatgccaaaaaggaaatcactgggtggctcaatgccattcaaaatttgatattgatggcaatcccttacggtcacttccag

SEQ ID NO: 69294 - DNA, 455 bp, Homo sapiens
tacaccagagttcacactggagaaaagccatatgagtgtgaggattgtcagaaagtttttagcaagaaggaccacctcattgcacaccagagagttcacactggagaaaggccatatgaatgcagtgattgtgggaagtcatctacccacagctctgcattctgtgttcataagagagttcacactggtcacaccaccttatgagtgcagtgaatgtgggaaatcctttgctgaaactttcagtctcattaaacacaggagagttcacactggagtaaggtcttgtgattgcagcaaatgtggaaaaaaagttacctgaaggtcttttctccttgaatatcagagagttcacactagacaaataaaatacatttgggcaattttgtagccacacctctttgctccttcaagatcagagttaacactggatcagggccttaccagtgtgacatgtg

SEQ ID NO: 69295 - DNA, 564 bp, Homo sapiens
ttttttttgtggcagggtctcattctgtcacccaggctggagtgcagtggtgcagtcatagctcactgcagccttgaactcctgagctcaagcaatcctcctaagtagctgggactacaggtgtgagccaccatgcccagctaattattttgatttttttgtagagacaggggcctccctatgttgcccagactggtctcaaactcctgggctcaagtgatcctcccgccaggccggaactcagactttggtctctgctcctcccatgtcacccatcttcccgaggaagtgacctaccattgggtgtgatgtgacagaaggaagaaaaatgtctcaccagagatccagccagccacaaattcctccaccggcattgtctgggcttgcgggaacaggcctggctgttctcttcagggttgtttacgactcccccgactcccccgtgtgagtcagaaacacagccttcctcggcttcctccttcccaggggaaagataggggttttgattatttaaagtgcgtgttgatctgcaatggcaccattctgctcagtcaaaacacgaaa

SEQ ID NO: 69296 - DNA, 816 bp, Homo sapiens; identical to SEQ ID NO: 68553
  misc_feature (1)...(816): n = a,t,c or g

SEQ ID NO: 69297 - DNA, 1682 bp, Homo sapiens
cggacgcgtgggtgtagcctgggatgtcctgccaggttgggatgggaaacgctgactacgtggctgccttcctgcacctgctgctcccactggcctttgaggtgactgcacggagggctcccccagggcagccgggtgggagggggaccttgtgcctggagtgcgccagtgaaggcaggaggagggttatgagctgtcccactcctgtgtggctggggaaggtgctcaggaggggatgggatgggcctggctcgccctcacctgggctccagcccctctctgtcgaccctccccactccggcctggcctgtagtttgaccctgagctggtgctggtctcggcaggatttgactcagccatcggggaccctgaggggcaaatgcaggccacgccagagtgcttcgcccacctcacacagctgctgcaggtgctggccggcggccgggtctgtgccgtgctggagggcggctaccacctggagtcactggcggagtcagtgtgcatgacagtacagacgctgctgggtgacccggccccacccctgtcagggccaatggcgccatgtcagagtgccctagagtccatccagagtgcccgtgctgcccaggccccgcactggaagagcctccagcagcaagatgtgaccgctgtgccgatgagccccagcagccactccccagaggggaggcctccacctctgctgcctgggggtccagtgtgtaaggcagctgcatctgcaccgagctccctcctggaccagccgtgcctctgccccgcaccctctgtccgcaccgctgttgccctgacaacgccggatatcacattggttctgccccctgacgtcatccaacaggaagcgtcagccctgagggaggagacagaagcctgggccaggccacacgagtccctggcccgggaggaggccctcactgcacttgggaagctcctgtacctcttagatgggatgctggatgggcaggtgaacagtggtatagcagccactccagcctctgctgcagcagccaccctggatgtggctgttcggagaggcctgtcccacggagcccagaggctgctgtgcgtggccctgggacagctggaccggcctccagacctcgcccatgacgggaggagtctgtggctgaacatcaggggcaaggaggcggctgccctatccatgttccatgtctccacgccactgccagtgatgaccggtggtttcctgagctgcatcttgggcttggtgctgcccctggcctatggcttccagcctgacctggtgctggtggcgctggggcctggccatggcctgcagggcccccacgctgcactcctggctgcaatgcttcgggggctggcagggggccgagtcctggccctcctggaggagaactccacaccccagctagcagggatcctggcccgggtgctgaatggagaggcacctcctagcctaggcccttcctctgtggcctccccagaggacgtccaggccctgatgtacctgagagggcagctggagcctcagtggaagatgttgcagtgccatcctcacctggtggcttgaaatcggccaaggtgggagcatttacaccgcagaaatgacaccgcacgccagcgccccgcggccgcgatccggaccccaagcccacggctccctcgactctggggcacggaacccc

SEQ ID NO: 69298 - DNA, 1798 bp, Homo sapiens; identical to SEQ ID NO: 68555
  misc_feature (1)...(1798): n = a,t,c or g

SEQ ID NO: 69299 - DNA, 502 bp, Homo sapiens; identical to SEQ ID NO: 68556

SEQ ID NO: 69300 - DNA, 793 bp, Homo sapiens; identical to SEQ ID NO: 68557
  misc_feature (1)...(793): n = a,t,c or g

SEQ ID NO: 69301 - DNA, 898 bp, Homo sapiens; identical to SEQ ID NO: 68558
  misc_feature (1)...(898): n = a,t,c or g

SEQ ID NO: 69302 - DNA, 1267 bp, Homo sapiens; identical to SEQ ID NO: 68559

SEQ ID NO: 69303 - DNA, 2103 bp, Homo sapiens; identical to SEQ ID NO: 68560

SEQ ID NO: 69304 - DNA, 1627 bp, Homo sapiens; identical to SEQ ID NO: 68561

SEQ ID NO: 69305 - DNA, 1100 bp, Homo sapiens; identical to SEQ ID NO: 68562

SEQ ID NO: 69306 - DNA, 739 bp, Homo sapiens; identical to SEQ ID NO: 68563

SEQ ID NO: 69307 - DNA, 1905 bp, Homo sapiens; identical to SEQ ID NO: 68564

SEQ ID NO: 69308 - DNA, 843 bp, Homo sapiens; identical to SEQ ID NO: 68565

SEQ ID NO: 69309 - DNA, 1033 bp, Homo sapiens; identical to SEQ ID NO: 68566

SEQ ID NO: 69310 - DNA, 848 bp, Homo sapiens; identical to SEQ ID NO: 68567

SEQ ID NO: 69311 - DNA, 1071 bp, Homo sapiens; identical to SEQ ID NO: 68568

SEQ ID NO: 69312 - DNA, 1083 bp, Homo sapiens; identical to SEQ ID NO: 68569
  misc_feature (1)...(1083): n = a,t,c or g

SEQ ID NO: 69313 - DNA, 920 bp, Homo sapiens; identical to SEQ ID NO: 68570

SEQ ID NO: 69314 - DNA, 411 bp, Homo sapiens; identical to SEQ ID NO: 68571

SEQ ID NO: 69315 - DNA, 2058 bp, Homo sapiens; identical to SEQ ID NO: 68572

SEQ ID NO: 69316 - DNA, 2109 bp, Homo sapiens; identical to SEQ ID NO: 68573

SEQ ID NO: 69317 - DNA, 396 bp, Homo sapiens; identical to SEQ ID NO: 68574

SEQ ID NO: 69318 - DNA, 2187 bp, Homo sapiens
gtggtggaattcccggccacggtggaacacccatgtacccatccctccgccccacatggtgttgggggctctctcaccagaagctgagcccaacacacccaggccccaacagagcccccctggccacacgtcccagtcagcgctcagcctgggagcacagagcactgtgctggactgtgggccacggctgcctgtagaagtggggccatctctgtcctcccccagctcgggctgcggggaggggagcatcagcgtgggggagaacgtgtcagacgtggctcccacccaaccatggtggcccaacaccccgggagacagtgtctctgaagaactaggtcagagtagggtggctggtggtcaggagtgggactgtgggacgcacagagcctgggaggtaggcgggcagtggggttggtggcatgtgaagttcccctcaggcctcctcgtcagccaggacctgggctgctgtgggggacatgggaggggctgcttgagccagggccggctcggctccgtacccgccacaggcactcggccctgatgccctcgtgtccacttgtgtccacacaggccctgggaggagcggggacgctgaggacctctctccaaattggcctctcaactcacaggaagacacagctgcccagagcagcccaggccgtggtgaggaggcggaggcatcggcggcggaggctcagggtggggagcaggcctacctggcaggcctggcagggcagtaccacttggagcggtacccggacagttacgagtccatgtgtgagtgcagcagttgctgctggcagggagccctgggctggctggttcccagcacgtgctccacctcctgtgggttggggcggagccctgggctagccagttcccagcacgtgctccatctcctgtggatgggggcggagccctgggctggccggttcccagcacgtgcgtgctccatctcccgcagccgagccgcccattgctcatcttttgcgccccgtgcttccccgggccttcgccttccccgtggacccccaggtccagtctgccgctgatgagactgctgtgcagctgagcgagttgctgacgctgcccgtgctcatgaagcgctccatcacggcaccgctggccgcccacatctccttggtgaacaaggccgctgtcgactacttcttcgtggagctgcacctggaggcgcactatgaggcactgcggcacttcctgctgatggaggacggcgagttcgcccagtccctcagcgacctgctctttgagaagcttggagctgggcaaacgcccggagagctgctcaacccgctggtgctgaactctgtgctgagcaaggccctgcagtgcagcctgcatggggacaccccgcacgcctccaacctctccctcgctctcaagtacctgcccgaggtgtttgcccccaacgccccggatgtgctgagctggcctggagctcaggtacaaggtggactggcctctcaacattgtcatcaccgagggctgcctgagcaagtacagcggcgtcttctccttcctgctgcagctgaagctcatgatgtgggcgctcaaggacgtctgcttccacctcaagcgcacagccctgctgagccacatggccggctctgtgcagttccgtcagctgcagctgttcaagcacgagatgcagcatttcgtgaaggtcatccagggctacatcgccaaccagatcctgcacgtcacctggtgcgagttcagggccaggttggccaccgtgggcgacctggaggagatccagcgtgcgcacgcagagtacctgcacaaggccgtcttcaggggcctgctcacggagaaggcggcgcccgtcatgaacgtcatccacagcatcttcagcctcgtgctcaagttccgcagccagctcatctcccaggcctgggggccccctgggggcccgcggggtgcagagcaccccaactttgcactcatgcagcagtcctacaacaccttcaagtactactcccactttctcttcaaagtggtgaccaagctggtgaaccgcggctaccagccccacctggaggactttctgctgcgcatcaacttcaacaactactaccaggacgcctgaggctgctctgcgggggacgtgcacaataaaggtgttctcaaaaaaaacgcggccgcgtcgaccgcggccgcgtcgac

SEQ ID NO: 69319 - DNA, 1424 bp, Homo sapiens; identical to SEQ ID NO: 68576

SEQ ID NO: 69320 - DNA, 605 bp, Homo sapiens; identical to SEQ ID NO: 68577

SEQ ID NO: 69321 - DNA, 822 bp, Homo sapiens; identical to SEQ ID NO: 68578

SEQ ID NO: 69322 - DNA, 1027 bp, Homo sapiens
tccagtctgtggaggactcaaggtaaacccccctccttgagagccgcaaatcccgccccgcggctgcaaaggggctgaatttgcccccagatgggagaggaagtggcgccagcctccttgcagactggtgctctgtgttctgtgggagggaccgggggtctcccggagaggggagctggagggcgcgccctgtggctgccaccggaggaaggggctgacttggggaggtgagttctggaaggcaggggctctgggtctggcaggtcggggtcaccagagccccaatgcccagctgcttcactccgtgtcccccacccctgaggatcaggtgagtgctgcacctctgttggctcgtgccttgcactggggtgccaagggctggaggccctgccgctggccttgtcctccttgggcctcacgcccccttcgggggtggccggttctccccatcacctctctggggcagtcacaccacctgttaagcatcaagctaccacagaggctccggccacctgggctccaccagcccagcccccctgggctccgtgtgcgctgggcctcatccccatctatgggaggaaactgaagctcaggaggctgtgtggcttgcggggtctctgggttctgggccccactgttccccagtgaagcccttgtgggaaggttccgggagcaggtggtgtcctcagagcagcctcgcctgctgaccccactgggagaggcgccgtgcctcgggcccctggtgggagctctgctggctcctgtctgaacctcctcgcagggccaaaggctggcttggcctgtgtttcccctggcccaggcctcagcccctgcgtcggaggtggggctgtgttgggcccattgtcccccgccctgggtggcttcctcttgcacagcctggagcctgccctgaccacagcccagcagctccctgtgaacacctctttgtcccttcactgtcagctgtttctaaacccagacactgtttgtaatagactggaaataaaatgttctttccttaaaaaaa

SEQ ID NO: 69323 - DNA, 1419 bp, Homo sapiens
tgggctccctggattccaaagctggaagtgaccctggagaccacttcacctgttccctggcacctggagttgcagggacacaccctgactgcagggcaaagggagccggccgggcatccctcaagacccaggggcttggtcagcccctgcccgagtggacacatccactcccaggcctgcaggagatggggaggttccaggcgcccaggacatccgctttggccactgaggccgattccttagcaaatcggttctggtttctctcatttctataaaaacaccaagactgaaggaagccacggtgtgttttaataaaacagtgtctcccagttaagtggtgggacaaacaggaaccaccgggtggatggtcggccgtgcccacccgcctcaggctaacctcgaggacgctggtctgattgtccctgtgtctctcctgggcagttctgcctggtgtctaaccgtgggcctccctgctttgttcagccctccccccacgtagggtctggagaggcccctggtgtttgtcacccacagggctcccttcagctctgcaatccggcgacaaagccacaaccacagacggtctccgggacccacaggccccagctggtgggtggtgctggctggccccgggctcagctgggtgtgcctggcctgcagagctgggcacagatggctgttctgaaggtcgggggtgtctgggccccttgctgtcccctcggcttctacacctgaagccgcccctgatgaggggtccttccctggggcctctccagactcacggggctgggtaggggggtcagacctgggctcagaggatggcacctcacatcaaagggacccaccttgacaaccagacccttccctccccgtggggtttcgaggtctggattccccacaagccataatcgcaaaaggctgggtttgcctcctccgagcagccccttgaacacgggcagtgtgtccccctcctcaagagggtgcacacggtgatggccgggccaggccctagcagcagcaggagttcctgctgggacgagggaggggtctttgggtgagcctggggagcctcaactgttagcagtcgaatcctctttctaataaaatctcacatggacccaacacaggagacaggagggctgtgctgactagtgtggcggggccgcccgctgtgcccccatgtccgatctcacgccacggggtcccccttttcctagttagccctcaggcagcagccccttttggcccccatgattcaccaagcagcagggccagggctcaggctgtctcggagcccccggagtgcttgagctctcctggaagccctgcccgtcctgcccgtcctgcccgtcagagccgcaggaggccgcgccagcaggtgagggccacgtgccgcaggtgcaggaccggacgcgtggg

SEQ ID NO: 69324 - DNA, 916 bp, Homo sapiens
ttaatccctctactccaagaaggctacctcatctcaaactcttgaaggcagtggaggaaggttcagcattacttagcatttgggaccttcacagccagctgcagggacttggtggggctcccagagctttcctccccccaccagctgaaacccaccctgccacacctgcccagaaattgagttactgacaattcctgtaccacaaagggagagccctttacaagagaaagacagacatggagctgatgaggccacgagctccgccttcctcttctcggtctgggcctgactcctgccaggctttccaagggaacagtggttcctgtatcccaaggttgtgccctgggcactccaagggcactggacctgtccgggcctccttggtgtagagggatctctagccactctggtgtgccccaggctctccatccgggagaccaaaggtcttagggtaattcctgcctccggctctattccatggggaccctggtgctctgcaaagcctcgtgagctgaaaccctaggtcccagggatccaacagaccgagtctcccattccaggatgagagtccccttgacgcatgttcactcttctggggaccgtgcgccgccgaccccgggccctgggcgttctatgaccacccctgtgagcacagggctctggacagcccaggtctcaatcccgagtgctgccaggccccggggccgggagcatcctgagtttgccccacggagacccccacaagagcaccgagctctcaattccagaaacccagcgctccaggcctcccattcccagggtctccgtgtaccgaggcctccctgccccgaggtctccgggcccctgccgaggaccccagccccgctcccgcccctgctcaccatgacgccagcggacaggcccagcggcgactccg

SEQ ID NO: 69325 - DNA, 1106 bp, Homo sapiens
ttttttttttttttgctcatgaagtggacatgtccagcctttattagataaagccactgggcccatctgaccaggcgagctcagctgtaaacaagctcgccagttagaggaagggccctcaacagagcatgaccccgcaagcctagggactccgacatgctgttggggctgctccccatgggtgtctcaactaggtaggtaaggggttggggtctctgcaggacccccccgtctgggggtgctccccttcctttcctaccacagtgtgatgtttcatccgcagcccagtggacatcgagggggtcccccaagcctgcaggtccttgggccaaggcagtggcctcgtccccctgaaaacgcgggtcgggtggtttcaacaaaacctgcactcatctttccctcctcagcgccttcccttctccagcccccacaagcccaggaactctgacaatgatgctgacacgggggtcactaactggaagagcagtgaacaggagctgggggctcttgggggccatctgagctgaggacagctggctgtacctccgaggccacaggcacccccacccacccctgcgcctgcagggaatgtgcagaatctgccagagcggaggccagagcccgcaggcagccacggctgttagaggaagcagatgcagcctcaccccagcccacgtctgtcaccacagccagggcctggcaggcaatggcacccgcgcagctttgggaaagaacacttggcctcccaaagggttctgccacccctgggggccgctacagccaccaaccctggggtctttccatcacttcagacactgagcagaacccagagagggttagtgagctgcaggtagggctgggacggggccccaggttccagcccagggtctcagagatccatggctggcactgcccacagggccaggcatgggcggagcagccttctcagcagcggggcccagcggccaagcctctgtcacacagcaccctgtgccagcatgccccgtgctagggagatgctttttaagccctctttagggggtatttcccgtctagtaagtgccagcaggcagacccactcttgacaggctcctaatgtccccgat

SEQ ID NO: 69326 - DNA, 1483 bp, Homo sapiens
ttttttttttttggaaataaacaagctttattttcagtttcaacaggtaaggcgatacctgcttcatcgtgtgcttttacgtaaatgccaaatagcaaaataacagctagaaaataaacagtttgtcagtttggagatcaagtactttatctatcttgagtgttatctgtcttggaatttagccaggcctaaaagtagcggaagtatcaggaaatgctatagagagccagtctccagctgcaggttggtgggcctgggcactgaccagattggggtggctcaaagcactgagcgatgcaggcgccgtttctgcattgcctgcagcctcttctgcctctcggcaaagttgttcttcggggtctgcttcagtgcgggcaggatggcacgctccgccacaggtgggctcaggcatttcttggagaggctcttggtggagaccttggggaaatgcgtggcttcttggtccctgggaaagctagcttcctccggggctgcctggggcctctggctcccttccaggagggacttgaggtgccgcagctcttgggtctgcaggaggttggtattccacagctcgcggatgagcacttcgcactgcctaagtgtggtgggctttcgcaggggaaggggcaggatcattggggggtgtgccgccgcccccatctgcctgccctggtgctggctgttccccatacaggcagctcctgcgttagaggcctctgctttctcctttctggcctgcccttgtaccccaggaaccttgtccagcttgctgttgtgaagtaggggctcctcttccaggtccgccttctgggagacgtcagcttttgaatcttgcttgttgaaggagccgggctggggcctggccttgccttgagagttggctgcaagtcagaccctacaaggccggtcactgcaggcaccaacagtcaccgcccaagttttccaggaacagctgtgtgtacccaagaagcccctgtccctgcctcagtttcctcctctgtaaagggaagcctgccttggagggttctggggggcatcaatgtggttctgagggtgaagcccatgggtggtgcctgtgaacactctagaacaatcaacatagtggaagctggccccatcttgggtaaaatgaaactgcatgagaggcttgggacccagcctgcatgggtttcctcggcaaggacaaggcccgtctagcacctgggcccatcacaggaatggtgggggttagggcagggctgaggaaaatgcccggcctcacagagtggggaaaagaggctctctgctcccggctcactctgcagaaggtgccatgagcccagggctccgtgggcagtgccatccctcctgtgtcctgcctgcttgtggcagggacacggccaagcagggctgctgctgggcagccagggtacatcctccctagaaagccacccggggaggcccctcctgcctgcttgctgccccgccctggggtgcctgc

SEQ ID NO: 69327 - DNA, 939 bp, Homo sapiens; identical to SEQ ID NO: 68584
  misc_feature (1)...(939): n = a,t,c or g

SEQ ID NO: 69328 - DNA, 896 bp, Homo sapiens; identical to SEQ ID NO: 68585

SEQ ID NO: 69329 - DNA, 623 bp, Homo sapiens; identical to SEQ ID NO: 68586

SEQ ID NO: 69330 - DNA, 529 bp, Homo sapiens; identical to SEQ ID NO: 68587

SEQ ID NO: 69331 - DNA, 356 bp, Homo sapiens
cgtgctgtaccagatgtggtttcattgcttgagcaaattaacacacctcttggtacttggtatgcagccattgccttggcaaataactttttccccattcctgtccataaggcccaccagaagcattttgccttccgttggcaaggccggcaatacacttttactgtcatacctcaggggtaggacagtaaactctccggctttaggtcataatcttattgggaaagaccttgatcgcttttcgtttccacaagatatcacactggtccattagtttaatgacattatgctgattggatccagtgagcaagaagtagcaaacacgctggacttattggtgagacatttctcgtgcc

SEQ ID NO: 69332 - DNA, 364 bp, Homo sapiens; identical to SEQ ID NO: 68589
  misc_feature (1)...(364): n = a,t,c or g

SEQ ID NO: 69333 - DNA, 1021 bp, Homo sapiens; identical to SEQ ID NO: 68590

SEQ ID NO: 69334 - DNA, 366 bp, Homo sapiens; identical to SEQ ID NO: 68591

SEQ ID NO: 69335 - DNA, 381 bp, Homo sapiens; identical to SEQ ID NO: 68592

SEQ ID NO: 69336 - DNA, 1065 bp, Homo sapiens; identical to SEQ ID NO: 68593

SEQ ID NO: 69337 - DNA, 839 bp, Homo sapiens
cggacgcgtgggctctgacaccctctgcccgccctgtagctgtagtcctcccattggctagggctctggggtcgggcaggtttcgggtgcccccagtgggcctcgggttccaggcagctcgtgacaagcccctgtgctctctagaaagcccgttttggcctgagtgcggctgaggacatcaccccccggttcaggtgagacccaagcagggaggaaggacgggtggggaggaggagggtctgccacagctctccgcacctctcctctcccagggcagcctgtgagcagcaagctgtggctctgactctgcaggaggacagagcatccctgacgctttcaggggggccctcggcactggcctttgacctctccaaggtaccaggcccagaggcagcccccaggctgcgggcgctgacactgggcctggcaaaacgcgtgtggagcctggagcggcgactggcagctgcagaagagacagctgtcagcccgaggaagagcccccggcctgcagggcctcagctcttcttaccagacccagatccccagagaggtggccctggacctggagtcaggaggcggtgtccaggagagtcgctcatcaaccccgggttcaagagtaagaaaccagctggtggcgtggacttcgatgagacctgaaggtgcagcacaagcgtggccccgcggggagtccgcctatgaggggagaggcagtctttgaggcccccatcagagaccccccgccaccacctccacctgcctgtcctgggccaggactaacacggctcctcaaattccttccctgtcaaataaacagctcccttggttggaaaaaaaaaaaa

SEQ ID NO: 69338 - DNA, 440 bp, Homo sapiens; identical to SEQ ID NO: 68595

SEQ ID NO: 69339 - DNA, 759 bp, Homo sapiens; identical to SEQ ID NO: 68596
  misc_feature (1)...(759): n = a,t,c or g

SEQ ID NO: 69340 - DNA, 1467 bp, Homo sapiens; identical to SEQ ID NO: 68597

SEQ ID NO: 69341 - DNA, 2024 bp, Homo sapiens; identical to SEQ ID NO: 68598

SEQ ID NO: 69342 - DNA, 751 bp, Homo sapiens
cccctccacctggagttggccatgatccactgactgtgacctgtgctctccagggataccctgtggcggtcccagctctgcatgcctgccatcgcctgcagcacacacctctgagttccgtttgggagacccctgaggacgcccagtgcccacatctgcatggacccgatgtgctgagctggctccggaaagaagtctcccccgccggcatgctgctcatcgatcgcctcctgacccacactgttcctacaaaggcaccaggattctgaccctcaggtgagagctccaggtgcctttgggtctccgctttgaggacctgtgacgcccgctcatctgtctccctgccgtgccctccaccggcccagcctacccttgctgacttgtcttccacatgtgcctaaagtgggccctgctctgttcctcctctgtgggccttggggactgtctcactgccttcccagaggacttccagtagaaacagcccccaggaagctcccagtcagtgtcccgctcctgcggcctggagcccagctcgagtcaggctctcccacaccctcctctttcatcacctccccggcccatgccactctcagggaggcttcatcctggtccccatccctgtgtccagctctccagtctacacctgtacttccgcaggcccctgctcttcactggtgggtgtgggagggcccctctgaccgaactttcatttaaatgctacttctgtcatctggaaatacagttttctcga

SEQ ID NO: 69343 - DNA, 684 bp, Homo sapiens; identical to SEQ ID NO: 68600

SEQ ID NO: 69344 - DNA, 666 bp, Homo sapiens; identical to SEQ ID NO: 68601

SEQ ID NO: 69345 - DNA, 845 bp, Homo sapiens
cattttgggattgccattttaggagatcctcaagttttgctattggatgaaccgactgctggattggatcctctttcaaggcaccgaatatggaatctcctgaaagaggggaaatcagacagagtaattctcttcagcacccagtttatagatgaggctgacattctggcggacaggaaggtgttcatatccaatgggaagctgaagtgtgcaggctcttctctgttccttaagaagaaatggggcataggcctaccatttaagttttgcatcctgaatgaaaggtgtgatccagaagagtataacatcactggtttaagcaggcaccatctctgatgcccaaaatttgaccagccccaaagtgaagaaaaaccttgtatataattttgccttttggaaaggaccaaacaaatttccagaactttacagggatcttgatagatgttctaaccaaggcattgaggattatggtgtttccataacaactttgaatgaggtgtttctgaaattagaaggaaaatcaactattgatgaatcagatattggaatttggggacaattacaaactgatggggcaaaagatataggaagccttgttgagctggaacaagttttgtcttccttccacgaaacaaggaaaacaatcagtggcgtggcgctctggaggcagcaggtctgtgcaatagcaaaagttcgcttcctaaagttaaagaaagaaagaaaaagcctgtggactatattattgctttttggtattagctttatccctcaacttttggaacatctattctacgagtcatatcagaaaagttacccgtgggaactgtctccaaatacatacttcc

SEQ ID NO: 69346 - DNA, 1254 bp, Homo sapiens; identical to SEQ ID NO: 68603

SEQ ID NO: 69347 - DNA, 650 bp, Homo sapiens; identical to SEQ ID NO: 68605
  misc_feature (1)...(650): n = a,t,c or g

SEQ ID NO: 69348 - DNA, 1273 bp, Homo sapiens; identical to SEQ ID NO: 68606

SEQ ID NO: 69349 - DNA, 380 bp, Homo sapiens; identical to SEQ ID NO: 68607

SEQ ID NO: 69350 - DNA, 2262 bp, Homo sapiens; identical to SEQ ID NO: 68608

SEQ ID NO: 69351 - DNA, 682 bp, Homo sapiens
tctcctgacctcatgatctgcccgcctcagcctcccaaagtgctggggctacaggcgtgagccaccgtgctcggccaaaagagcacacttctaaataacccatgtgtcacagataatttcttaaatggaatcgagaaatagttaagctgaatgaaaatataattccaatataggaaaatgtaagctggagctcaaacagtgctgagtttagcttataaaactaaatgcttatgttagaataaagtctctaatgataatctaagctcccacctcaagaaactacaaacagcaatatacaaccaaaacaagtagaaaaagaaaataataatgatcagaatagaaatcaaagtcagaacacatagaaaatcaatgacacagaaagctggttctttgaaatagtcaataaaatttataaacatctaagaagattaacaaagataaagaagacacacataaccactattaggaataaaacaaaggatacaactatagaaccttctgtcatgaagggaataataagggaatacttcaaataaataactccacaaatttaagttacaaaacttagatgaaatggaacaattcctcaaaaataataatctatcaaaacccacccaatatgaaatactttgagtacctattaagttgaatgactacataattcaaatcttccacaagagaa

SEQ ID NO: 69352 - DNA, 532 bp, Homo sapiens; identical to SEQ ID NO: 68610

SEQ ID NO: 69353 - DNA, 726 bp, Homo sapiens; identical to SEQ ID NO: 68612

SEQ ID NO: 69354 - DNA, 1394 bp, Homo sapiens
tcatggtcatcagttctagtcatggatatttgaaattggacaaccacaagtctgagagatttgaaatttcaggctatgtggcaacgtctttggtacatttcaaaggtctgactaaatcagtctttgggtggcttgaaaattgaggcaagatcacacactgtgtggtttgtggagaccggcagtgtttgtgcatccctgatatcctttgtgttgtaatttatcacccttttgtgtttcacagatctggctttgattggctgatgagtgtctttgtgatcagttaaaagtggtagaatgtatgtacgtggacttgcctaaataataactttaggagaagacaatctgaaacatttgtgaccttgcacagatcagcaacagacttttaaaaataaattatttttattttaaggtttcataatagtaattacattcttaactttgtatgtcaggatgaagaagagaaggatgatggtgaagctaaagaaatttctacacctacccattggtctaaacttgatccaaagacaatgaaggtaaatgacctccgaaaagaattaaaaagtcgagctcttagttccaaaggattaaaatcccagttaatagcccgattgacaaaacagcttaaggtagaggaccaaaaagaagaacagaaggagttagagaaatctgaaaaagaagaggatgaggatgatgataggaaatctgaagacgataaagaggaagaagaaaggaaacgtcaagaggaaatagaacgccagcgtcgagaaagaagatatattttgcctgatgaaccggccatcattgtacatccaaattgggctgcaaaaagtggcaagtttgattgtagcatcatgtctttgagtgtcctattggactacagattagaggataataaagaacattcatttgaggtttcattgtttgcggaacttttcaacgaaatgcttcaaagagattttggtgtccgtatatacaaatcattactgtctcttcctgagaaagaggacaaaaaagaaaaggataaaaaaagcaaaaaagatgagagaaaagataaaaaagaagaaagagatgatgaaactgatgaaccaaaacccaaacggagaaaatcaggcgatgataaagataaaaaagaagatagagatgaaaggaagaaagaagataaaagaaaagatgattctaaagatgatgatgaaactgaagaagataacaatcaagatgaatatgaccctatggaagcagaagaagctgaggatgaagaagatggtaaatgacctccgaaaagaattagaaagtcgagctcttagttccaaaggattaaaatcccagttaatagcccgattgacaaaacagcttaaagtagaggaacaaaaagaagaacagaaggagttagagat

SEQ ID NO: 69355 - DNA, 1488 bp, Homo sapiens
ttttttttttaggaacacattgcattttattacgtgtcttgcacctgctgacaacctcaagacaaaccgaggctttccttttcaacatctgcaagcagctgggagcgtggctacttcggtgggagctgtctgaggtgctgaaaccttctcttggcttagcgcaggagaaatctccatcactcttgccttttcagtcctgatcccaaggctggtggctttatcgctgttctctggcttgtcagggaagactgttccaaggtacagaaacagcttcgctgccttggtcactaagatgatggcaagcagcatacctttataatccttaggactttgtacctgttgtccttctgtctggaggactgtgggtatgaggtgttcaagaagaaagctcaaatcttccgacggcaggtaccttgcgtgggatttacaatacgacaggggtccgaacgcagctcaggaacagaaagaaagcaggttatttgcaatctaccggagcttaagggcagaaggcagggcccgtgggaccaatatgccagggggatttccactttctgccatatatgtagtcacatcacccactctgccttggaatattattaaggaccatctaacacgagggtgtatacgtcctgcaatactacgagtaatatcaacttcttggcctctgaatatgaggaagaatatcacagggctgggtgaacacagccggcaatgctgaaattattatcaacctctccccatcttcccctcctggctcttaggacccccatcgcagaggggggaggcaccccccgcgaggcagggactgagagccagaccctcatccccccctggcttaggaccccccatcgttgctcctaagatccttaggacccacctggaggactgtgggtattaggtgtccaagtagagagttcaaatcttctgacggcaggtaccttatgtgggatttacgatccgacgggtccgaacgcagctcgggaacagaaagaaagcaggttatttgcaatctaccggaaattaagggcagaaggcaggtgagagaattcttaggagctgtggggttttgtagactgtggatcccaaactgcagtattagccgagcctttgtatgaggtcacaaagggggcggggacccggaacttttgaaatggggatcccaacaacagcaagtttttcatgagttacaagaaaatcttctggcagccccagccctggggctacccgatctgacaaagccttttccattgtatgcgtcagagagagaaaagatggcagctggacttttaacccaaactgtggggccctggctgaggccggtagcctacgtctctaaacaactagacagggttgctaaaggatggcccccctattagagggccttggcagcaactgccctgctagtacaagaagcaaataagctgattcttcgggcaaaacctgaacataaaggccccccattttgtgatggctgagatccatcccctc

SEQ ID NO: 69356 - DNA, 1311 bp, Homo sapiens; identical to SEQ ID NO: 68614

SEQ ID NO: 69357 - DNA, 365 bp, Homo sapiens
ctttgctgatgcccccatgttcgatatgggtgtgaaccatgagaagtatgacaacagcctgaatatcatcacgtgatgaaggcagggcccgtggagaagcggccagcctggcaccctatggacacgctcccctgacttgcgccccgctccctctttctttgcagcaatgcctcctgcaccaccaactgcttagaacccctggccaaggtcatccatgacaactttggtatcgtggaaggactcatggtatgagagctggggaaaggaactgaggctcccacctttatcatccaagactggctcctccctgccggagctgcgtgcaaccctggggatggggttctggggactggcttatccatact

SEQ ID NO: 69358 - DNA, 1192 bp, Homo sapiens
tttgagatggagtctcactctgccaccaggctggaatgcagtggcgcgatcttgggtgacagagcaagattctgtctaaaaaaaaagaaagaaataggagcaggatcaacttccagatatacagagaatataaaaatacattcactttattttagaaaaatgaagactcatagagtaagcttatcacaaactggcctattaggagtcacagaattcacaggaaacaatttctgaagaccaggtgcctgctgccacctctccaagcaggccagagtccagtagagaatgcgattcaggaagatggctcctcagagggcagggaggttagctacggaggccgctcacatggaaatgtccagtgaaccaatgccaaggaagaagataaaaattctctggggctgaccacaacagtgggggtggataaagacaaaccacttgcctgtacttctcatcttctatttgttcatttcactgctggaaggtgacctcttttcccctaatcttctttcaacccagagagtttaagtcttctccagctcaatcctaatccaccccatttcccatggtctctactcctgggagaccagccctggtggcatctcttcctcctgtccctgggccagaatctgctggagtcagggtctgctgggtagaggcgagtccaggtactgactgtagtggtttgctactgaagtcttgcttgctgtcctgatctctttacctggtaggtcctgggactgccactttcctggggggctgcagattgctgcgagtggcacccatgacaggaagatttagtcgctgggaaacaggaaccttgtgtccactttcccgcactctgtgtcctgcagtgcttggtcttggaagcccttttcgagttgacagagaatccggaggtagggcacctctgccaggtggcacactccggctggtgagtggcattcggctggcaggcccgcaacttggctgctctggtctcctcactggctgctgctctcccactgggcccggctctcccccggactgggggagtcgatcgggtaagaggagaagatgctgggcttttggatgcagggaacagattgcaagtgggtgactccctcttcatgttggagggcctctttccagatgtagccggagagccctgactgaccccttcctatctttctccgccctcgtccaagcttgcgta

SEQ ID NO: 69359 - DNA, 1021 bp, Homo sapiens; identical to SEQ ID NO: 68617

SEQ ID NO: 69360 - DNA, 755 bp, Homo sapiens
  misc_feature (1)...(755): n = a,t,c or g
aatacattgccgggggtggccaggggtcccgtcgcaaagcacggagagtgcgagtttaggagtctgagcttcccccgaggcgcgagccagcgggagcggggatccggtggccgtgcctggtggcaccgtctttgcgccgggaccttctgagagagggtgggttcgggagcccggagctggaccttctcgggaagggacggtgatctcgagagcactggggtccccttcccgggcgcctccgcccgctgcgcgaccacggagcctgggaagagggatccgccggctgcagccgcgcaggtggaaagacccttctctccgccttaccgctccagatcttcgccggcggttttccctggctcccggagcggctgcgtgctgcacctgttgctcggagctgctccttcccgcggcgcttcnccgcactgcccagcgcgcagcagtgcactgtgcggctcctgcagagaaggctccccgcgcatcccgcgcgcccagcgccacctccccagtgggctggcgcctccgactccctcccggcttttccagggattccgagtcgtccacagggcgagagctcttttgggaggcttcctggtggtggatagagtcgggtgccaggggcttctctgctgcaactgagaggcgaaaacagctcggctgaaatccgcgccccttagaagtcacggtgcgcgagcagagacatggacggattctagcgggatgggtcgccgcccacctcccgacgaagtcgtcgaccc

SEQ ID NO: 69361 - DNA, 1906 bp, Homo sapiens
  misc_feature (1)...(1906): n = a,t,c or g
gtcccgactttcctggaggacaccttcgtgcggagcgcgccgagcctcgtcccgcggccgggccggggccgggccgtagcggcggcgcctggatgcggacccggccgcggggagacgggcgcccgccccgaaacgactttcagtccccgacgcgccccgcccaacccctacgatgaagagggcgtccgctggagggagccggctgctggcatgggtgctgtggctgcaggcctggcaggtggcagccccatgcccaggtgcctgcgtatgctacaatgagcccaaggtgacgacaagctgcccccagcagggcctgcaggctgtgcccgtgggcatccctgctgccagccagcgcatcttcctgcacggcaaccgcatctcgcatgtgccagctgccagcttccgtgcctgccgcaacctcaccatcctgtggctgcactcgaatgtgctggcccgaattgatgcggctgccttcactggcctggccctcctggagcagctggacctcagcgataatgcacagctccggtctgtggaccctgccacattccacgggcctgggccgcctacacacgctgcacctggaccgctgcggcctgcaggagctgggcccggggctgttccgcggcctggctgccctgcagtacctctacctgcaggacaacgcgctgcaggcactgcctgatgacaccttccgcgacctgggcaacctcacacacctcttcctgcacggcaaccgcatctccagcgtgcccgagcgcgccttccgtgggctgcacagcctcgaccgtctcctactgcaccagaaccgcgtggcccatgtgcacccgcatgccttccgtgaccttggccgcctcatgacactctatctgtttgccaacaatctatcagcgctgcccactgaggccctggcccccctgcgtgccctgcagtacctgaggctcaacgacaacccctgggtgtgtgactgccgggcacgcccactctgggcctggctgcagaagttccgcggctcctcctccgaggtgccctgcagcctcccgcaacgcctggctggccgtgacctcaaacgcctagctgccaatgacctgcagggctgcgctgtggccaccggcccttaccatcccatctggaccggcagggccaccgatgaggagccgctggggcttcccaagtgctgccagccagatgccgctgacaaggcctcagtactggagcctggaagaccagcttcggcaggcaatgcgctgaagggacgcgtgccgcccggtgacagcccgccgggcaacggctctggcccacggcacatcaatgactcaccctttgggactctgcctggctctgctgagcccccgctcactgcagtgcggcccgagggctccgagccaccagggttccccacctcgggccctcgccggaggccaggctgttcacgcaagaaccgcacccgcagccactgccgtctgggccaggcaggcagcgggggtggcgggactggtgactcaaaaggctcaggtgccctacccagcctcacctgcagcctcacccccctgggcctggcgctggtgctgtggaanagtgcttgggccctgcttgacccccagcggacacaagagcgtgcttcagcagcccaggtgtgtgtaacatacggggtctctctccaacgccgccaagccagccgggcggccgaacccgtggggcaggccaggccaggtcctccctgatggacgcctgccgcccgccacccccatctccaccccatcatgtttacagggttcggcggcagcgtttgttccagaacgccgcctcccacccagatcgcggtatatagagatatgcattttattttacttgtgtaaaaatatcggacgacgtggaataaagagctcttttcttaaaaaaaaaa

SEQ ID NO: 69362 - DNA, 1402 bp, Homo sapiens; identical to SEQ ID NO: 68620

SEQ ID NO: 69363 - DNA, 823 bp, Homo sapiens
tgtaagcattgtggaatgggattcacatctgccaggattttccaaatacatgaaagaacacaaatgggagagaacccctatgaatgtaaggaatgcggaaaagcattcaattatttttcttccttgcatatacacgcaaggactcatatgggagagaagccatatgaatgtaaggattgtgggaaagcattcagctagcctggttccttttatggacatgaatagactcacactggaaggaagcactatgaatgcaagcaatgtggcaaaactttcacattttccagttcttttcgatatcatgaaaggactcacactggggagaaaccctatcaatgtaagcagtgtgggaaagccttcattccttttacttcttttcaatgtcatgaaaggactcacacgggagagaaaccctatgagtgtattctagttccgtttgatatcatgaaaggacttacactggagtgaaaccctatgaatgtaagcaatgtgggaaagccttcagatgtgcctcgcaccttcaacggcatggaagggttcacacttgggagaaactctatgaatgtaagcagtatgggaaagccttcagatctgccaagattctttgaatacagataattaatgtaaacaattatcataagtatactaacatgttattctttttaaataagaaggtataataaaatatcccattggttttatgtattagatcaagcttataatgttacattgttattatttggacattgtgagtcagtattaccatgtggataaaatgccaggcatctttttcctcatggaaagtttactttttgcaccgggc

SEQ ID NO: 69364 - DNA, 2023 bp, Homo sapiens; identical to SEQ ID NO: 68622

SEQ ID NO: 69365 - DNA, 870 bp, Homo sapiens; identical to SEQ ID NO: 68623
  misc_feature (1)...(870): n = a,t,c or g

SEQ ID NO: 69366 - DNA, 1420 bp, Homo sapiens; identical to SEQ ID NO: 68624

SEQ ID NO: 69367 - DNA, 536 bp, Homo sapiens
gttacccactaaaactcttgaaggcatgggagcagttcatgctctccgaggtgaagtggtcagcatcaagattcctttcagtggcaaaccagatcctgtgatcaccttaaaatgagaggcaggactggctaggtgatgcctaaggatgattcccagccttgacatgctggtattctcacatatcctatccgtggctgatatagtctgtgcggatgaaaattccaaaaccgaagacaggatttcgcacttgctaaagttggagctcccaggcgctgagatccaatttgggcctgggagagtggggagggagagcaatctgcccagtgaaggagagctgcgctaaaggcaaggttttacttctttttatcccttagcgaaaagcccactgcctctgaaagtagcacggtgtggccacacggacacatgggggaagtcagtcagaggcgctccaacagaacggccagaagcccctttcctggcttaccaggcagcctcctcgtgccgaattcctgcagcgcggcggcgaggggtctatt

SEQ ID NO: 69368 - DNA, 452 bp, Homo sapiens; identical to SEQ ID NO: 68626

SEQ ID NO: 69369 - DNA, 421 bp, Homo sapiens; identical to SEQ ID NO: 68627

SEQ ID NO: 69370 - DNA, 446 bp, Homo sapiens
caaaaacatatataaatgtttttagaaatagacaaatccacgataatagctggagatgtcaacacccctctatcagtaactgacagattcagcaagcagaaaatcaggaggatatagttcaactgaatagtaccatccatcaactggatgtactaacattaatagaatacttcctctaacaacagcagaatatacattcttctcccacttgtatagaacattcaccaaatagaccacattctgggccatatgacacaccttaacaaaggtaaaagaatagaaatcatacaaagcatgctctcagaccataatggaattcaaccagaaatcagtaacagaaagatagctggaaaatccccaaatacttagagatctaaaaacacacttataaataaacacaggagtcaaaaaaggaattccaccgcacggactactggtcatctatt

SEQ ID NO: 69371 - DNA, 2139 bp, Homo sapiens; identical to SEQ ID NO: 68629

SEQ ID NO: 69372 - DNA, 749 bp, Homo sapiens
acacctcagtgctgcagattttgcaggaggggactggagccaagccacagacttttctctgttaggagatgggttcttggagtgggtgtggtgtctgaccatccggggagatggctgaagctggggatctgggaaggctcccagaagggaggtggcctggggaaccaggggttcagtccttccaggatggactggcttgatggtggcttttcaagctcgttctgttcccagccactgggcatcctgtccatcctggaggaggaatgcatgttccccaaggcctcagacgccagcttccgggccaagctctacgacaaccacgcggggaagtcacccaatttccagcagcctcggcctgacaagaagcgcaagtaccaggcccacttcgaggtggtccactacgcaggcgtggtaggtgcttgctggaaccccagccctcggccaggctcctcccgccctgctccaggtctcccacccgggctcagcacctgacttgtctctccaggtgccttacagcattgtgggctggctggagaaaaacaaggatcccctgaatgagaccgtggtccccatcttccagaagtcacagaataggctcctggcgactctctatgagaattatgcgggctcctgctccagtgagtatggagggacaagatctccactctgacaggggcccacagagcgacattccctggagtgaccaggcgaatgccaccgcactggactagtgtctacgagttagccgc

SEQ ID NO: 69373 - DNA, 626 bp, Homo sapiens; identical to SEQ ID NO: 68631
  misc_feature (1)...(626): n = a,t,c or g

SEQ ID NO: 69374 - DNA, 1270 bp, Homo sapiens; identical to SEQ ID NO: 68632

SEQ ID NO: 69375 - DNA, 456 bp, Homo sapiens; identical to SEQ ID NO: 68633
  misc_feature (1)...(456): n = a,t,c or g

SEQ ID NO: 69376 - DNA, 1427 bp, Homo sapiens; identical to SEQ ID NO: 68634

SEQ ID NO: 69377 - DNA, 462 bp, Homo sapiens; identical to SEQ ID NO: 68635

SEQ ID NO: 69378 - DNA, 844 bp, Homo sapiens; identical to SEQ ID NO: 68636

SEQ ID NO: 69379 - DNA, 426 bp, Homo sapiens
gaaaagataattacaggcacaaatgtccttgattaacaaaaatcctcaacagactactagcacatcaaattcgacagtactttaaaaggaccatacagcatgactaggacaatacatcatgtaccacacatcatgggattcatctttggggtgcaaggatggcatgacatgtgaatcaattaatgtgaaacattacattaacagaatgaagaataaaaatcacatgatcattttaatgatgcagaaaaagcgtttgacaaaacgtaatagtctttcagtataaaaactcaaaaaactagaggtaaaaggaatttacctctacataataaaggtcacatatgataaactcccagctcgcattatagcagatgattaaaaaactgaaagttttcctctaagattaggaaaaagatgaagagtctcccc

SEQ ID NO: 69380 - DNA, 1693 bp, Homo sapiens
  misc_feature (1)...(1693): n = a,t,c or g
atggatcagatctctgaaagcaaccacctaattcatcttagtagcactaataatgtaaaactcctatctgagatagagttccttgtgaaccacatggacttggccaaaggtcatataaaggcccttcaggaaggagatcttgcttcttccagaggcattgaggcctgcaccaatgctgctgatgcccttctgcagagcatgaatgtagctcttcgaccaggccatgacttgcttctggcagtcaaacagcaacagcagcgattcagtgatttgcgagagctttttgcccggagactggccagtcacctcaacaatgtttttgttcaacagggtcatgatcagagttcgactcttgcccaacactctgttgaactgactttacccaatcatcatccatttcatagagatttgctccgatatgccaagctgatggagtggctaaagagtacagattatggaaaatatgaaggactaacaaagaattacatggattatttatcccgactatatgaaagagaaatcaaagatttctttgaagttgcaaagatcaagatgactggcacaactaaagaaagcaagaagtttggtcttcatggaagttcggggaaattaactggatctacttctagtctaaataagctcagtgttcagagttcagggaatcgcagatctcagtcatcttccctgttggatatgggaaacatgtctgcctctgatctcgatgttgctgacaggaccaaatttgataagatctttgaacaggtactaagtgaactggagcccctatgtctggcagaacaggacttcataagtaaatttttcaaactacagcaacatcaaagtatgcctggaactatggctgaagcagaggacctggatggaggaacattatcacggccancataattgttgggcacaccactgcctgtttcatctgagaaagatatgatccgccaaatgatgattaaaatatttcgctgcattgagccagagctgaacaacctaattgcattaggagacaaaattgatagctttaactctctttatatgttagtcaaaatgagtcatcatgtgtggactgcaacaaaatgtggaccctgcttctttcctaagtactacattgggaaatgttttggtgactgtcaaaaggaactttgacaaatgcattagtaaccaaataaggcaaatggaagaagtaaagatctcaaaaaagagtaaagttggaattcttccatttgttgctgaatttgaagaatttgctggacttgcagaatcaatcttcaaaaatgctgagcgtcgtggagacctggataaagcatacaccaaacttatcagaggagtatttgttaatgtggagaaagtagcaaatgaaagccagaagacccccagggatgtggttatgatggaaaactttcaccatatttttgcaactctttctcgattgaaaatctcatgtctagaagcagaaaaaaaaaaagccaaacaaaaatacacagatcaccttcagtcttatgtcatttactctttaggacaacctcttgaaaaactaaatcatttctttgaaggtgttgaagctcgcgtggcacagggcataagggagngaggaagtaagttaccaacttgcatttaaacaaacaagaacttcgtaaagtcattaaggagtaccctggaaaggaagtanaaaaagggtcta

SEQ ID NO: 69381 - DNA, 1927 bp, Homo sapiens; identical to SEQ ID NO: 68639

SEQ ID NO: 69382 - DNA, 1125 bp, Homo sapiens; identical to SEQ ID NO: 68640

SEQ ID NO: 69383 - DNA, 654 bp, Homo sapiens; identical to SEQ ID NO: 68641

SEQ ID NO: 69384 - DNA, 1242 bp, Homo sapiens
caccacctgtggcttcatccagccctcctcctctatctttatctgccataggccgcagccctggccccctgtggattgaggtcccaagtggtccagctgtggggtttggtgctgggaccctcaatggcagccggaaggtccctctgaggcagaagctcaagccccatggggacagtggctccccagtgcctggccctgagccatttctgctgtttcaggtgcccacatcaccctcatttcctcctcgcagtagccctgcaccgtggccagaaacccatccacaggcaggcagtggctggggtccgggtgccctgggctgttgggctctgcttcctccctctgctcccccatgtctccctgagttctcccacctttgctcatttgtaaaatgggcaggtcaatcttcccaccccaccgtgtgggctgccccaaccccaaatgtgcccagggaggggggggaacccaaggcacaggccccgcccctgcccccaagcagcactgggctactggctcgcagaagcacctttggttctgcaggtcatgcccctccctgcagggaagggaaagctggtggtagaggctgggcacagactgacgtccagaagaagtcccttggccctgctagggtggcaccagacttctctggtcccacaggacagccagtggcctcccaacttggttctgggcccccgcctgcaagcgcacatggcggggagggctttagcaggctcacataaccgagtggcaaggcccctgctcccagaggctggatttgaatgaactccgggcctgtttggggaggtgaagctgccaggtgtgcacaggggcctcccaggctcctggctccaccagccaaggaggtgggggcaagggtcagggcaatgggggacaatgccgctcagggtgcagtgagctcccctgggaaaaccgaagccagcaagaccaggagagggccacctcactgggcctgcctcccccacctcctgggcctctctgacctcagctcctagaccctggacccttggctgggactcagcattttccagtctttttcaggggtagacaggggagcctgggttaaactttaccactgtgccctggcccaggcatcaccaacacggcctccctgcagctgccctgccaccgacagaccccgattaaacccacacctggccttggcctcccctgctctatgccttgcatggtttttgcctcacttggaataaaattccaactcctcaa

SEQ ID NO: 69385 - DNA, 976 bp, Homo sapiens; identical to SEQ ID NO: 68643
  misc_feature (1)...(976): n = a,t,c or g

SEQ ID NO: 69386 - DNA, 825 bp, Homo sapiens
ttttttttttcttaaagcttattttataaagctttttcataaaactggttgtagttgcacagctactgggagggcagccggggacacctgagccgcccgctgtgcccagatccctcaggctgcctgccatcagaactgctgcccggggcttcccctacctcagacagaccctccctgggaggatcagtggggagtgccacctctgcccccagtggctgtggcacgtggcaggggcccctgaagctcagcgagggtcagggcctgggagggtatcattgctggaagaacaggatggggctcaggccagccctagtcgccggggcccacactaaccccccacttatgaattcctcccactcccaactcacaggggatttcccgagaggggacctgccaaagacctcctccaggcctcccatgcttcccgggaagtgaagcttctccccctctggggcaggctctgaagcctcccgatgcacccagagcaaccggggggctgcaccagccactcgcctccccagcacggccaggttcccggggctggaggtcccccccaggtcctgggaaccaacctgcagaacacacacagggtcccctggagaggacgcggggacttccagggcccgactcctgtgagtcacagccccgcagctgctgcgccacccccaccctgactcatgccccttcccagcagctcctcccaggaccccatgtccttcccacatccgcaggaagggagtgcctggactctccaggcccacctggggagcccctcacctgaccaccagcccctgagcagcccagtaacaccatccccggaattcc

SEQ ID NO: 69387 - DNA, 1338 bp, Homo sapiens; identical to SEQ ID NO: 68645

SEQ ID NO: 69388 - DNA, 1714 bp, Homo sapiens
  misc_feature (1)...(1714): n = a,t,c or g
aggcgangnnnngnnnnnnnattgaganccttgngnattgagcngcgttgcgganccccatgcagagtggtgcccacaaaccccccttccagagtcatctctggtccaccttgaagtccccaggaaaatgacctcgtcctccgcgggtgtgagccactaggcctgagaggacgccgggacggagctttcagagagggaggtgtcgggatggcttgagggtcaccaggtattaattaagcacttgctgtgtgccaggcactttcccacacaggatggagccgggccaccctcacagctcctgccctgcagacgctggccttgtggagggaggcaggcagcaggagcagtgctttctgggcctctgtagccagagctggccctgctgcagcttacgtctgcctgcagcccagacgtcctcctggtcctcctgatgcccccgacctccacggaggacgagcatttccagcccagccctccccatcttcacctcgcactcccctgacacactgggagcctcctgatccgtgaacccgcgctggcgggagtagctactgaccgctggggacccctgcccaggctgttcgcatgtggaaaggattcagggagcaggcgatgcccaaagcgtggagaccagcactgctctctccccagtgacaggtgcacgcccagatcacggatgtgtcgggaacagctgtgctcctgctgctcagcgtccgtcactccaggctgggagcgggtccccaagcttctggctgggcctatccgtctccactctcagtgtgggggtggggggcgccaacagcacgcatttgctctctgcacttctcgtctgataatgggcagagggtccttctgcagccccaaaacatccctaggcaggagccctggggccccaagcagccagggaggtgagcaccaaggacctcccagagagcgtcaccttccgtcgagggaggcccagcctgggggcggtgtctgagacttggaatcaacgcttccgttggtggcagtaaatcctgtccctaaccctgcagtatagctgtgccgtgtacaggagggtgttgtctgacgccagacacctggactacagatcgcagcctgattcctggtcattgctccactgaaccccagaccccagcctcgttctgggccctcatcccctagatccagggaccccagccccatttcagcccttgggcccttgtaggatgcgaggccctgggccccagcccccagcccatccgtgttccaggcactggggggctgaggtcctctgagaagggacacagggcctggggggctctctcagcccatcagcaggagaggactgactccagaaaaatcagcgtttgtacccactcaggctgccaagacctgtgtccgtccttccaagctcaaccttcagagttcatgaggcgcccttgccccagaatgtcccacagagttcatgaggccccttgaatgtccacagagttcatgaatgaggctccttgcccggaatgtccacatttgaaacctcccaacaccgagccccatttcaagtataaccaggagggaaaatggtgcttgaaataagcatgccacaaaggaaaacctgctttctcgaaatgggccctggccgcccaggccctgacctccccggccaggatggaacgttccagagacccattagtgccaaaggcaaatgaaaacacaccctgtgaaaaaaaaaaaa

SEQ ID NO: 69389 - DNA, 1524 bp, Homo sapiens; identical to SEQ ID NO: 68647
  misc_feature (1)...(1524): n = a,t,c or g

SEQ ID NO: 69390 - DNA, 489 bp, Homo sapiens
  misc_feature (1)...(489): n = a,t,c or g
ccatcctgttcgagcccaaccagacctggcccgggcacgtggctgtgtggcaggacacgtgctccatcgtggccatcttgctaacatcacgcagaaggtgcaccccgtcatctgatctctcaccagctaccctttgactgcacccaggctctggccgtacccaagcccataggtggggtggtggtctttgtcgtcagctcgctgttatacctgaaccagagcattcccccgtacggtgtggctctcagcagcctcaccacaggcaccgcagctttcccgctgtgcacccagctgggtgtgtgaatcaccctggactgcgcccaggccaccttcatctcccatgacaagatggtcatctccctcaagggcagtcagatctacatgctgaccctcatcaccgatggcatgcgtagcgtccgagtgttccacttttagaattccnccacactgcctagaggtctcgatgggnntctatnncgggggcgcgcg

SEQ ID NO: 69391 - DNA, 777 bp, Homo sapiens; identical to SEQ ID NO: 68649

SEQ ID NO: 69392 - DNA, 419 bp, Homo sapiens
cctgggtggggacgatcctgccaaaaggggggtgcccagggtctggactgaagaagctggatgatgtcttcccaagattgccggggccacgagtcaggaatcgtcatggagagaagccaaggaaatagctccagccgccgaggaccacactctccgctcagccctctcgactcatcctccggctgcagtagagggcgagcgggctccgcttttgttccctggggctggcaggtccgtgtggggccagggcgcgcgggagacgccgcggagctgggtatcccggagaggggatgctcactcctagcggctccgctggcagcagtagtggcggtggcagcagaggcagcggtagcaacagcagcagtagcagcagcagcagcagtagagatagtgccggctctctgcaggccacgaattgc

SEQ ID NO: 69393 - DNA, 478 bp, Homo sapiens; identical to SEQ ID NO: 68651
  misc_feature (1)...(478): n = a,t,c or g

SEQ ID NO: 69394 - DNA, 1218 bp, Homo sapiens; identical to SEQ ID NO: 68652

SEQ ID NO: 69395 - DNA, 1087 bp, Homo sapiens; identical to SEQ ID NO: 68653
  misc_feature (1)...(1087): n = a,t,c or g

SEQ ID NO: 69396 - DNA, 1243 bp, Homo sapiens; identical to SEQ ID NO: 68654
  misc_feature (1)...(1243): n = a,t,c or g

SEQ ID NO: 69397 - DNA, 1090 bp, Homo sapiens; identical to SEQ ID NO: 68655

SEQ ID NO: 69398 - DNA, 1041 bp, Homo sapiens; identical to SEQ ID NO: 68656
  misc_feature (1)...(1041): n = a,t,c or g

SEQ ID NO: 69399 - DNA, 671 bp, Homo sapiens; identical to SEQ ID NO: 68657

SEQ ID NO: 69400 - DNA, 1771 bp, Homo sapiens; identical to SEQ ID NO: 68658

SEQ ID NO: 69401 - DNA, 391 bp, Homo sapiens
cattcaaaacagtatggtaccagtataaaaccagacatataaactattggaacagaagacagaacctagtaataaacccacacatgaggacaagtgagttttgacaattatgccaagaacacacagtgaagaaaagataatctcttcaaataaatggtattgggaaaactagatatccacatgcagaggaatgaaattggacgcttatctcacactgtatataaaaatcaactcaatatgaattaaagatttcaatgtaagtccttaaactacaaaactcttagaagaaaacagggaaaaagcttcttgacattggctttggcaatgatttcttggatatgacaccaaaagcacaaaaccacaaaagcaaaaatagataagtctgattacg

SEQ ID NO: 69402 - DNA, 590 bp, Homo sapiens; identical to SEQ ID NO: 68660

SEQ ID NO: 69403 - DNA, 916 bp, Homo sapiens
cgtccagggagcactgcccacaggccgagccggggcctcccgcaagaggaaggaggtgccctcaaggctacggacctggggtcccggtggtggacgccccatggggctcaggcctaaagaggccgagagggcctcggggacccagtgcatgccccacgctgagcagcacaggctgccccaccgtgggctccccgatctctctctggatcaccgagacctcgcagggagggtcatcaggggcgccaggcccagggccaccacagtggaaggtctccccttccccaggcacgtaatcttccaggtcagccagtgtcagcatgcggccgttgtgcgtgaggatcttggggtcacgatccccaaggctgtgtgtgtcctgggactcctccgtcacaaaggcgtctccgtcttccccctcttcctctcccgcctcctccatggtgccctcctcctccaggctgcccatgccagaagcagcccagtccacactgcctctggcatccacgcggaagacaaggggctctctgacgccgaccatggctgtgccctgggcccaggcctcctgggccagcagcttgttgttggagttgttggaattggggtcccctccgggggtcgcaccgggcagtgtgaagagatgccccgatgagctcctgggcacctctgtggtgggagacacaccctgcgggcccatcttcttcacccggacttcaatggtctcctccacctccacccacttgggctggggccccgagagtccgggcagagctggagagtgggcctcggcctccgtcacatacagtgtgggcaccacgggcttctggcctggttctgcctccggcctgcggggctggccagcacctggcaggtacagcaggtcgggggccagtaggcctggcctcagcgggctggcagagca

SEQ ID NO: 69404 - DNA, 781 bp, Homo sapiens; identical to SEQ ID NO: 68662

SEQ ID NO: 69405 - DNA, 665 bp, Homo sapiens; identical to SEQ ID NO: 68663

SEQ ID NO: 69406 - DNA, 769 bp, Homo sapiens
gcggccgcccccggccccgcgccccctgccccggaggcgacccttccgccggcctcggccgcggggaaggactgggcgttcatcaacaccaacatctttgccaggaccaagatagaccccagcgccttggtgcagaagctggagctggacgtgaggagtgtcacttccgtcaggagaggtgcagaggccaagaccgttttgcccaagaaggagaaaatgaagctgaggcgtgagcaatggttgcagaaaatcgaagccataaaactggctgagcagaagcacagggaggagcggaggcggagggccacggtggtggtgggggacctgcaccctctcagggatgccctgcccgagctgctggggctcgaggctggcagccggcgccaagcccgcagcagggagagcaacaagccccggccctcagagctcagccggatgagcgcagcccagagacagcagcttctcgaggaagaaaggacccggtttcaggagctgctggccagtccggcctacagagccagccccctggtggccatcgggcagacgctggcccggcagatgcagctggaagatggcggccagctctgaccagggcagcgggcatgccacaactcctcaggacacatgtgggccaagtagagagcgccggcccctcaaggaccatggcctgagcctggtggacgcccttccctctggtcggttgtggggctcaataaatggctctgtgaacttcccctgcactgccagggccgttcccaaaaaaaaaaaa

SEQ ID NO: 69407 - DNA, 669 bp, Homo sapiens; identical to SEQ ID NO: 68665

SEQ ID NO: 69408 - DNA, 604 bp, Homo sapiens; identical to SEQ ID NO: 68666
  misc_feature (1)...(604): n = a,t,c or g

SEQ ID NO: 69409 - DNA, 1223 bp, Homo sapiens; identical to SEQ ID NO: 68667

SEQ ID NO: 69410 - DNA, 714 bp, Homo sapiens; identical to SEQ ID NO: 68668

SEQ ID NO: 69411 - DNA, 1808 bp, Homo sapiens; identical to SEQ ID NO: 68669
  misc_feature (1)...(1808): n = a,t,c or g

SEQ ID NO: 69412 - DNA, 803 bp, Homo sapiens
cctacaggtgagcatcaggctgcaggaggatacccaggccttaggtagatatcaggccctacaaggacaccaggcctcaggtggacatcagggcccagttggggactcaggttctaggaagacacccaggcctcaagtagcatcagggccaaggcggatactagactccaggtggacatcaggccctagttggtcactaggccctaggtggacacctgggtccctggtgaccatcaggccacagattaactccaggcaataggtgaacatatgatcccagttggatatcagaccccaggaaaacatcagtccccaggtggatatcagcttccaagttgacatcaggccacaagtggacactggacttgaggtgtacatcaggcctcagatggacacccaggccccaggtgtacatcaggctcaggtggaaatcaaggcacaggtaacaccaaggcacaggtggttacctaggcttcaggtagacatcagaccccaggtggacacctgggtctccggtggtcatcaggccctaggtggaaactcaggtcccaggtgcacatcacgttccaagtggacacccaggccccatggtgatacccaggttccaggtgggcactgggccccagatgaacaccaggctccgggtggataccagaacttgggtggacacccagctctgaggtggacatcgggctccaggtggacatcaagccccaggtagatatctagtcaccaggtggacataagaccccaggtcgacaccagaacctgggtggacacctaggtttcgggaattccgccgc

SEQ ID NO: 69413 - DNA, 2152 bp, Homo sapiens
aatgacccaaacaaatagttgtccctttaaccaaggaacaagttagacaagcctttatcaattctggtgcatggcagattggtcttgctgattttgtgggaattactgataatcattacccaaaaacaaaaatcctccagtttttaaaattgactacttggattttacctaaaattaccagtcacggacctttagaaaatgctctgacagtatatactgatggttccaacaatggaaaagcagcttacacagagccaaaagagcaagtaatcaaaactcagtatcaattgactcaaagagcagagttggttgcagtcattacagtgttaataagattttgatcaatctatcaatattgtatcagattctgcatatgtagtacaggctacaaaggatattgagagagccctaatcaaatacattatggatgatcagttaaacccgctgtttaatttgttacaacaaaatgtaagaaaaagaaatttcccattttatattactcatattcgagcacacactaatttaccagggcctttaactaaagcaaatgaacaagctgacttgctagtatcatctgcattcatggaagcacaagaacttcatgccttgactcatgtaaatgcaataggattaaaaaataaatttgatatcacatggaaacagacaaaaaatattgtacaacattgcacccagtgtcagattctacacctggccactcagggaggcaagagttaatccccagaggtctatgtcctaatgtgttatggcaaatggatgtcatgcacggtaccttcatttggaaaattggcaattggtccatgtgacagttgatacttattcacatttcatatgggcaacctgccagacaggagaaagtacttcccatgttaaaagacatttattatcttgttttcctgtcatgggagttccagaaaaaattaaaacagataatgggccaggttactgtagtaaagcatttcaaaaatttttaaatccatggaaaattgcacatacaacaggaatcccttataattcccaaggacaggccataattgaaagaactaatagaacactcaaagctcaattggttaaacaaaaaaaggaaaaagacagtaaacagtataacactcctcagatgcaacttaatatagcactctgtactttaaattttttaaatatatatagaaatcaaaccactactcctgcagaataacattttaccggtaaaaagaacagcccacatgagggaaaactgatttggtgggaaaataacaaaaataaaacatgggaaataggtaaggtgataacatgggggtgaggttttgcttgtgttccaccaggagaaaatcagcttcctgtttgggtacccactagacatttgaagttctacaatgaacccatcagaggtgcaagggaaggcgcctccgcagagacagagaacccgcaatcgaacatcatcgactcgcagggtgaacaaaatggtgatatcagaaggacagatgaagttgccatccaccaagaaagtggggccgctgacctgggcccagctaaagaagctgacacagttagctgaaaaaagcctggaaaacacaagggtaacacagactccagagaatatgcttcttgcagctttaatgattgtatcaacggtggttaagtctccctatgtcttcaggagccgctacagctaactatacttactgggcctatgtgattttcccacccttaattcgggcagtcacttggatagataatcctattgaagtatatgttaataacagtgaatgggtaccaggccccacagatgaccgtggccctgcccaacctgaagaagaaggaatgatgataaacatttccattgggtatcattatcctcctatttgcctgggaaaagcaccaggatgcttaatgcctacaatccaaaattggttgatagaagtacctactgtcagtgccaccagtaaatttacttatcatatgaaaagtgggaatgtcacttgggtcacaaatgaataatttacagcattcttcctatcaaagatcattaaaatttaggcctaactggacaccatgacagaaggaacttaacgacgaatcaaaagacacacaactcctagactgggaagacactacggctgaacctgcaatacac

SEQ ID NO: 69414 - DNA, 763 bp, Homo sapiens
ccgtgcggtggaattcgcctggcaacgcgcagcaacccaacgtccacgccttcaccccattgcagctgcaggagctggagcgcattttccaacgcgagcagttccccagtgagttcctgcgaaggaggctggcaagaagcatgaatgtgactgaactcgcagtgcagatttggtttgagaatagaagagccaaatggaggagacatcagagggcattaatggcaagaaacatgctgcccttcatggcagtgggccagcctgtcatggtaaccgcagctgaggccataacggcacccttgttcatcagcgggatgagagatgattacttctgggaccacagccattccagcagcctgtgtttccccatgccaccctttcctcctccgtccttgccccttccactcatgcttcttccacctatggccacccgctggccagggttgaatttgggcccatttcccttttgttattcgtggccttcttttcacatttccccaatgtctaaagggatagcctctgtggccactttttgccagagtgtctttgagccagattcatattttgcatagcaccccatcaaaagtagttcatcaaatgtctattaaacgttttaaagaaaagtacatcattgacccatttttagggcacttgtaaaaatgtttctataaatatgtgaagggtatgtacatttgttttgtgtgtcacatggggtcagtaagttctcaataaaaattgttaagaaatgccattcaaaccgaaaaaa

SEQ ID NO: 69415 - DNA, 980 bp, Homo sapiens; identical to SEQ ID NO: 68673

SEQ ID NO: 69416 - DNA, 628 bp, Homo sapiens
acatcaggataaattctaaacagatcaaatatttaaatgtacaaatggaaccatacaggtattagaagaaaacttgggtaagttacattacaacctgagagagagaaggttttcctaactatgactccaaatccagaagcaataaggaaaaggactgataaatacaattacatgaaaaaacaacaacaaaagactttttcatggcaaagtatactttgcataagcaaagttaaaggaaaataacaaactgcaaagaaatactttcagcttacatcacagatagagcttctaaaaatagagaagaccagcaaccttagaatcaggttaaacctacattgctcagagatagaccaagatttttatagaaaaaaaaatataaatggctctgaaccatatgaaaatgtgctcacttttgctcttaataagagaaatgcaagctaaaactacccctttctcaacgatccgattagtaaaaattcaagattttgataacatactctgctggcaaggctatggggaaacagacactgttagccatggctggttgggatgcaaaatggaagagccatctggaggggaattcgggagtatatagaaataattcccccctggctagggtctcagtcaa

SEQ ID NO: 69417 - DNA, 721 bp, Homo sapiens; identical to SEQ ID NO: 68675

SEQ ID NO: 69418 - DNA, 850 bp, Homo sapiens; identical to SEQ ID NO: 68676

SEQ ID NO: 69419 - DNA, 438 bp, Homo sapiens; identical to SEQ ID NO: 68677

SEQ ID NO: 69420 - DNA, 1152 bp, Homo sapiens
aaatgtgggccttaatctcctccccaattaacgtcactgcccgcgggaacacagcggcatttctggggcactcggcatgccgggttcctaacctcaattattcattctgctctcaggcacctcctgacgagaccctggcccaggagagctcggctcggggacagaggaatgagactcagtgggacgcagagcccaaccccatccccacccctggctggatggggtctgggggcagcagaatgtggaccactcagcaggaggcttcctgactgtctcctcctgaaccgatgtcactcacaggcaggggacacgccatcctggccccgcccctttgggcccttggaatcatggaggggtggggcagcctgtgcccatcccaaggggaagtgtgcccctggggacactggggggctgccgggtgcgccatctttagggggtgcactgccgggctccagggtcatgcctggaaacatttcagggcctccctcacctctggataccgcctgcaggggtgaggctgtgctgagctctgcctgccctgccaggacggagggcatgggcctgtgtggaaaccccagggctccctgactcccatgaggcttctcagggacttcctgccccgagggtcccagcatctcccaggtggaggtcctcaaggatgcccccaccagctccccacagctactgtagcaggaagtccttcttcccgaacccagagcccagggcggatctcccgggctgcgcgccaaggtggaaaccctcagggtcctgggggaaccagggcccaggtctggactccattcgggaccttcccagctccggggaatcacaacacagaagtaccccaggggctgaagccactaggcccccgtggagccctggccacctgccagagccctggccctacgcctggaaggcagagtcctggtctccagactcgctggggctgggtgttcctgtcccccgcggagggcctgcgcaggggagagctggtcccgcgtgggcctcccgattctccccacgcggaaccagctccacaaaactctgttctccaaggctccttaggcacaagacttgagttctcactaacttacccaaaacacaaccaaacacaatccctgcctggaccctctcctagcgtggcacgaggcc

SEQ ID NO: 69421 - DNA, 1649 bp, Homo sapiens; identical to SEQ ID NO: 68679

SEQ ID NO: 69422 - DNA, 1565 bp, Homo sapiens; identical to SEQ ID NO: 68680

SEQ ID NO: 69423 - DNA, 707 bp, Homo sapiens
tagctgtttgtctcaagttagttcagaataaaccacgagtgtgtggattgctaaaataacttatttctaaatgctgcaagtcaaaaattgcagatttccttgtctaaccagatgcagatgttatatgttataaaggatcaggactccaacaggaaccaacatcactgccttctaaaattagtggccttcctggcatatgaacaccctttgggcctgtgctccagtgtctctttgggttgctccttgggctctttgtgaaggatcaagacacccccgtagtctaggccaatgtcaggctctccagtgtgtcctgttcatcaccctcaccctgcacttctattgttactgtctttggctattccaacactgtgcttgcatcctgtggaaagtcacatttggggtcaagtgaatggtgttgtttctactctttggtgaaaagtatcagggtgcatttggccttcaattcagaaggatgaggcaggggttggattcaggtgcacccaactttttttgtgtgtgtgtgatggagtctcgctctgtcgactagcctggagagagcaatggtgtgatctcagttcactgcaacctccacctcccaagctcaagcgattctcctgcctcagcctcccgagcagctgggactacaggcacacaccatgatgcccagctatttttttgtatttttagacgagacagggtttcacccc

SEQ ID NO: 69424 - DNA, 757 bp, Homo sapiens; identical to SEQ ID NO: 68682

SEQ ID NO: 69425 - DNA, 1330 bp, Homo sapiens
ttttttttttagaaaaaaaaattaaaaattagccaggcatggcggcacacatctactgtcctagctacttgagaagctaagacgagaggatcccttcagcccactagttcaaagttacagaaaaccacggccacaccactgcactctagcctgagcaacagagcgagaccccatcaacattaaaacaacaacaaaaaaaatcaatataattcaccatattaacaaactaaagctaaaaaccatataattaccttgatagatacagaaaaagcatttgacaaaattcaacatccacctcagataaaaacgctgaacaaactagtaagatccttaactgctaaaggttatctatgaaaaacaaaggaataagatgcccactctcaccacttctatttgacttcgtactagaggttcaagccagtgtaatacagaaaaaaaataaataaataagaagaagaagaaaaagaaaaggaaaagaaataaaaggtatccagggtggtggaaaggaaaagtaaaactatcattattcacaggtaatatgactgtctatgtagaaaatctgatggatgtacaaaaaagctattaaaagttagtttagtatggttgcaggacacaatataaacatgcaaaaggctatgatagttttatatcctagcaatgaacaattagaaattaaaattaagaaagcaataaaatagcaccaaatttatataacccaaagcaatttaaaatacccccaaaaaatatgaactacttagggaaaaatctgataagacatataaaacctgtaccctgaaaagtacataatgctgttgagaaaaattaaagatgacctaaataaatggaaagatatgccatgttaatggatcagaagactcggtactgttaggatgtcaaatatcaatcaaaatcttgaaaggtttctttgcagaagttggcaagttgactctaaatatgtatggaaatacaaagaacccagaatagccaaaacaactttgaaaagaacaaagttacaagattaacactacttgatttcaagatttaatataagctacagtaatcatttaatgtaagctacagtaatcaagacagtgtggtattggtataaatgtagaccaacagatcaatgaaacagaacagagaatccagaagtagacgaacacatatacagactaataacattttgacaaaagcaaaaaggcaattcattagagaaaggatggtcttttcaacagatgaatatctatatgaaaaaaaaatggacgcataacttatactacttacaaaattaacttgaagaattccaccacacggactagggatctcgaaa

SEQ ID NO: 69426 - DNA, 863 bp, Homo sapiens; identical to SEQ ID NO: 68684

SEQ ID NO: 69427 - DNA, 588 bp, Homo sapiens; identical to SEQ ID NO: 68685

SEQ ID NO: 69428 - DNA, 399 bp, Homo sapiens; identical to SEQ ID NO: 68686
  misc_feature (1)...(399): n = a,t,c or g

SEQ ID NO: 69429 - DNA, 1747 bp, Homo sapiens; identical to SEQ ID NO: 68687

SEQ ID NO: 69430 - DNA, 1326 bp, Homo sapiens; identical to SEQ ID NO: 68688

SEQ ID NO: 69431 - DNA, 1077 bp, Homo sapiens; identical to SEQ ID NO: 68689
  misc_feature (1)...(1077): n = a,t,c or g

SEQ ID NO: 69432 - DNA, 2355 bp, Homo sapiens; identical to SEQ ID NO: 68690

SEQ ID NO: 69433 - DNA, 841 bp, Homo sapiens; identical to SEQ ID NO: 68691

SEQ ID NO: 69434 - DNA, 2204 bp, Homo sapiens; identical to SEQ ID NO: 68692

SEQ ID NO: 69435 - DNA, 631 bp, Homo sapiens; identical to SEQ ID NO: 68693
